United States Patent Application Publication US 2010/0105134 A1 - sequence listing, part 2

SEQ ID NO: 23132 - RNA, 12 nt, Artificial Sequence
  Description of Artificial Sequence: Synthetic oligonucleotide
ugaaugcuucau

SEQ ID NO: 23133 - RNA, 12 nt, Artificial Sequence
  Description of Artificial Sequence: Synthetic oligonucleotide
gaaugcuucaug

SEQ ID NO: 23134 - RNA, 12 nt, Artificial Sequence
  Description of Artificial Sequence: Synthetic oligonucleotide
auucuacuuuga

SEQ ID NO: 23135 - RNA, 12 nt, Artificial Sequence
  Description of Artificial Sequence: Synthetic oligonucleotide
gcaacuacagac

SEQ ID NO: 23136 - RNA, 12 nt, Artificial Sequence
  Description of Artificial Sequence: Synthetic oligonucleotide
accaaggucaac

SEQ ID NO: 23137 - RNA, 12 nt, Artificial Sequence
  Description of Artificial Sequence: Synthetic oligonucleotide
gacuaucucgac

SEQ ID NO: 23138 - RNA, 12 nt, Artificial Sequence
  Description of Artificial Sequence: Synthetic oligonucleotide
accuucccaaac

SEQ ID NO: 23139 - RNA, 13 nt, Artificial Sequence
  Description of Artificial Sequence: Synthetic oligonucleotide
caagcuuagaacu

SEQ ID NO: 23140 - RNA, 14 nt, Artificial Sequence
  Description of Artificial Sequence: Synthetic oligonucleotide
gcuuagaacuuuaa

SEQ ID NO: 23141 - RNA, 13 nt, Artificial Sequence
  Description of Artificial Sequence: Synthetic oligonucleotide
aacuuuaagcaac

SEQ ID NO: 23142 - RNA, 10 nt, Artificial Sequence
  Description of Artificial Sequence: Synthetic oligonucleotide
agaccaccac

SEQ ID NO: 23143 - RNA, 13 nt, Artificial Sequence
  Description of Artificial Sequence: Synthetic oligonucleotide
cgagaaauaaagu

SEQ ID NO: 23144 - RNA, 13 nt, Artificial Sequence
  Description of Artificial Sequence: Synthetic oligonucleotide
gagaaauaaaguu

SEQ ID NO: 23145 - RNA, 11 nt, Artificial Sequence
  Description of Artificial Sequence: Synthetic oligonucleotide
ggaaaugaucc

SEQ ID NO: 23146 - RNA, 12 nt, Artificial Sequence
  Description of Artificial Sequence: Synthetic oligonucleotide
aagaaaugaaac

SEQ ID NO: 23147 - RNA, 12 nt, Artificial Sequence
  Description of Artificial Sequence: Synthetic oligonucleotide
uuuccauccucc

SEQ ID NO: 23148 - RNA, 14 nt, Artificial Sequence
  Description of Artificial Sequence: Synthetic oligonucleotide
cugaaaaucuuuga

SEQ ID NO: 23149 - RNA, 10 nt, Artificial Sequence
  Description of Artificial Sequence: Synthetic oligonucleotide
gccguucagg

SEQ ID NO: 23150 - RNA, 12 nt, Artificial Sequence
  Description of Artificial Sequence: Synthetic oligonucleotide
aggguccagaag

SEQ ID NO: 23151 - RNA, 12 nt, Artificial Sequence
  Description of Artificial Sequence: Synthetic oligonucleotide
caagacugcuug

SEQ ID NO: 23152 - RNA, 12 nt, Artificial Sequence
  Description of Artificial Sequence: Synthetic oligonucleotide
ccaugucuuugg

SEQ ID NO: 23153 - RNA, 10 nt, Artificial Sequence
  Description of Artificial Sequence: Synthetic oligonucleotide
ccugaaacac

SEQ ID NO: 23154 - RNA, 11 nt, Artificial Sequence
  Description of Artificial Sequence: Synthetic oligonucleotide
cucuguaccuc

SEQ ID NO: 23155 - RNA, 11 nt, Artificial Sequence
  Description of Artificial Sequence: Synthetic oligonucleotide
gcaagacaaga

SEQ ID NO: 23156 - RNA, 12 nt, Artificial Sequence
  Description of Artificial Sequence: Synthetic oligonucleotide
caagacaagaaa

SEQ ID NO: 23157 - RNA, 11 nt, Artificial Sequence
  Description of Artificial Sequence: Synthetic oligonucleotide
guacaagaucc

SEQ ID NO: 23158 - RNA, 11 nt, Artificial Sequence
  Description of Artificial Sequence: Synthetic oligonucleotide
guacuugcaga

SEQ ID NO: 23159 - RNA, 12 nt, Artificial Sequence
  Description of Artificial Sequence: Synthetic oligonucleotide
gaucgauacaga

SEQ ID NO: 23160 - RNA, 12 nt, Artificial Sequence
  Description of Artificial Sequence: Synthetic oligonucleotide
auaaaaauaaau

SEQ ID NO: 23161 - RNA, 12 nt, Artificial Sequence
  Description of Artificial Sequence: Synthetic oligonucleotide
aaaaauaaauau

SEQ ID NO: 23162 - RNA, 12 nt, Artificial Sequence
  Description of Artificial Sequence: Synthetic oligonucleotide
uugacugcugug

SEQ ID NO: 23163 - RNA, 12 nt, Artificial Sequence
  Description of Artificial Sequence: Synthetic oligonucleotide
gagaugagagac

SEQ ID NO: 23164 - RNA, 9 nt, Artificial Sequence
  Description of Artificial Sequence: Synthetic oligonucleotide
cccacuugg

SEQ ID NO: 23165 - RNA, 6405 nt, Homo sapiens
gguuuuugagcccauuacuguuggagcuacagggagagaaacagaggaggagacugcaagagaucauuggaggccgugggcacgcucuuuacuccaugugugggacauucauugcggaauaacaucggaggagaaguuucccagagcuauggggacuucccauccggcguuccuggucuuaggcugucuucucacagggcugagccuaauccucugccagcuuucauuacccucuauccuuccaaaugaaaaugaaaagguugugcagcugaauucauccuuuucucugagaugcuuuggggagagugaagugagcuggcaguaccccaugucugaagaagagagcuccgauguggaaaucagaaaugaagaaaacaacagcggccuuuuugugacggucuuggaagugagcagugccucggcggcccacacaggguuguacacuugcuauuacaaccacacucagacagaagagaaugagcuugaaggcaggcacauuuacaucuaugugccagacccagauguagccuuuguaccucuaggaaugacggauuauuuagucaucguggaggaugaugauucugccauuauaccuugucgcacaacugaucccgagacuccuguaaccuuacacaacagugagggggugguaccugccuccuacgacagcagacagggcuuuaaugggaccuucacuguagggcccuauaucugugaggccaccgucaaaggaaagaaguuccagaccaucccauuuaauguuuaugcuuuaaaagcaacaucagagcuggaucuagaaauggaagcucuuaaaaccguguauaagucaggggaaacgauuguggucaccugugcuguuuuuaacaaugaggugguugaccuucaauggacuuacccuggagaagugaaaggcaaaggcaucacaaugcuggaagaaaucaaagucccauccaucaaauugguguacacuuugacgguccccgaggccacggugaaagacaguggagauuacgaaugugcugcccgccaggcuaccagggaggucaaagaaaugaagaaagucacuauuucuguccaugagaaagguuucauugaaaucaaacccaccuucagccaguuggaagcugucaaccugcaugaagucaaacauuuuguuguagaggugcgggccuacccaccucccaggauauccuggcugaaaaacaaucugacucugauugaaaaucucacugagaucaccacugauguggaaaagauucaggaaauaagguaucgaagcaaauuaaagcugauccgugcuaaggaagaagacaguggccauuauacuauuguagcucaaaaugaagaugcugugaagagcuauacuuuugaacuguuaacucaaguuccuucauccauucuggacuuggucgaugaucaccauggcucaacugggggacagacggugaggugcacagcugaaggcacgccgcuuccugauauugaguggaugauaugcaaagauauuaagaaauguaauaaugaaacuuccuggacuauuuuggccaacaaugucucaaacaucaucacggagauccacucccgagacaggaguaccguggagggccgugugacuuucgccaaaguggaggagaccaucgccgugcgaugccuggcuaagaaucuccuuggagcugagaaccgagagcugaagcugguggcucccacccugcguucugaacucacgguggcugcugcaguccuggugcuguuggugauugugaucaucucacuuauuguccugguugucauuuggaaacagaaaccgagguaugaaauucgcuggagggucauugaaucaaucagcccagauggacaugaauauauuuauguggacccgaugcagcugccuuaugacucaagaugggaguuuccaagagauggacuagugcuuggucgggucuuggggucuggagcguuugggaaggugguugaaggaacagccuauggauuaagccggucccaaccugucaugaaaguugcagugaagaugcuaaaacccacggccagauccagugaaaaacaagcucucaugucugaacugaagauaaugacucaccuggggccacauuugaacauuguaaacuugcugggagccugcaccaagucaggccccauuuacaucaucacagaguauugcuucuauggagauuuggucaacuauuugcauaagaauagggauagcuuccugagccaccacccagagaagccaaagaaagagcuggauaucuuuggauugaacccugcugaugaaagcacacggagcuauguuauuuuaucuuuugaaaacaauggugacuacauggacaugaagcaggcugauacuacacaguauguccccaugcuagaaaggaaagagguuucuaaauauuccgacauccagagaucacucuaugaucguccagccucauauaagaagaaaucuauguuagacucagaagucaaaaaccuccuuucagaugauaacucagaaggccuuacuuuauuggauuuguugagcuucaccuaucaaguugcccgaggaauggaguuuuuggcuucaaaaaauuguguccaccgugaucuggcugcucgcaacguccuccuggcacaaggaaaaauugugaagaucugugacuuuggccuggccagagacaucaugcaugauucgaacuaugugucgaaaggcaguaccuuucugcccgugaaguggauggcuccugagagcaucuuugacaaccucuacaccacacugagugaugucuggucuuauggcauucugcucugggagaucuuuucccuugguggcaccccuuaccccggcaugaugguggauucuacuuucuacaauaagaucaagaguggguaccggauggccaagccugaccacgcuaccagugaagucuacgagaucauggugaaaugcuggaacagugagccggagaagagacccuccuuuuaccaccugagugagauuguggagaaucugcugccuggacaauauaaaaagaguuaugaaaaaauucaccuggacuuccugaagagugaccauccugcuguggcacgcaugcguguggacucagacaaugcauacauuggugucaccuacaaaaacgaggaagacaagcugaaggacugggaggguggucuggaugagcagagacugagcgcugacaguggcuacaucauuccucugccugacauugacccugucccugaggaggaggaccugggcaagaggaacagacacagcucgcagaccucugaagagagugccauugagacggguuccagcaguuccaccuucaucaagagagaggacgagaccauugaagacaucgacaugauggacgacaucggcauagacucuucagaccugguggaagacagcuuccuguaacuggcggauucgagggguuccuuccacuucuggggccaccucuggaucccguucagaaaaccacuuuauugcaaugcggagguugagaggaggacuugguugauguuuaaagagaaguucccagccaagggccucggggagcguucuaaauaugaaugaaugggauauuuugaaaugaacuuugucaguguugccucuugcaaugccucaguagcaucucaguggugugugaaguuuggagauagauggauaagggaauaauaggccacagaaggugaacuuugugcuucaaggacauuggugagaguccaacagacacaauuuauacugcgacagaacuucagcauuguaauuauguaaauaacucuaaccaaggcuguguuuagauuguauuaacuaucuucuuuggacuucugaagagaccacucaauccauccauguacuucccucuugaaaccugaugucagcugcuguugaacuuuuuaaagaagugcaugaaaaaccauuuuugaaccuuaaaagguacugguacuauagcauuuugcuaucuuuuuuaguguuaaagagauaaagaauaauaauuaaccaaccuuguuuaauagauuugggucauuuagaagccugacaacucauuuucauauuguaaucuauguuuauaauacuacuacuguuaucaguaaugcuaaauguguaauaauguaacaugauuucccuccagagaaagcacaauuuaaaacaauccuuacuaaguaggugaugaguuugacaguuuuugacauuuauauuaaauaacauguuucucuauaaaguaugguaauagcuuuagugaauuaaauuuaguugagcauagagaacaaaguaaaaguaguguuguccaggaagucagaauuuuuaacuguacugaauagguuccccaauccaucguauuaaaaaacaauuaacugcccucugaaauaaugggauuagaaacaaacaaaacucuuaaguccuaaaaguucucaauguagaggcauaaaccugugcugaacauaacuucucauguauauuacccaauggaaaauauaaugaucagcaaaaagacuggauuugcagaaguuuuuuuuuuuuuuuucuucaugccugaugaaagcuuuggcgaccccaauauauguauuuuuugaaucuaugaaccugaaaagggucagaaggaugcccagacaucagccuccuucuuucaccccuuaccccaaagagaaagaguuugaaacucgagaccauaaagauauucuuuaguggaggcuggaugugcauuagccuggauccucaguucucaaauguguguggcagccaggaugacuagauccuggguuuccauccuugagauucugaaguaugaagucugagggaaaccagagucuguauuuuucuaaacucccuggcuguucugaucggccaguuuucggaaacacugacuuagguuucaggaaguugccaugggaaacaaauaauuugaacuuuggaacaggguuggaauucaaccacgcaggaagccuacuauuuaaauccuuggcuucagguuagugacauuuaaugccaucuagcuagcaauugcgaccuuaauuuaacuuuccagucuuagcugaggcugagaaagcuaaaguuugguuuugacagguuuuccaaaaguaaagaugcuacuucccacuguaugggggagauugaacuuuccccgucucccgucuucugccucccacuccauaccccgccaaggaaaggcauguacaaaaauuaugcaauucaguguuccaagucucuguguaaccagcucaguguuuugguggaaaaaacauuuuaaguuuuacugauaauuugagguuagaugggaggaugaauugucacaucuauccacacugucaaacagguugguguggguucauuggcauucuuugcaauacugcuuaauugcugauaccauaugaaugaaacaugggcugugauuacugcaaucacugugcuaucggcagaugaugcuuuggaagaugcagaagcaauaauaaaguacuugacuaccuacugguguaaucucaaugcaagccccaacuuucuuauccaacuuuuucauaguaagugcgaagacugagccagauuggccaauuaaaaacgaaaaccugacuagguucuguagagccaauuagacuugaaauacguuuguguuucuagaaucacagcucaagcauucuguuuaucgcucacucucccuuguacagccuuauuuuguuggugcuuugcauuuugauauugcugugagccuugcaugacaucaugaggccggaugaaacuucucaguccagcaguuuccaguccuaacaaaugcucccaccugaauuuguauaugacugcauuuguguguguguguguguuuucagcaaauuccagauuuguuuccuuuuggccuccugcaaagucuccagaagaaaauuugccaaucuuuccuacuuucuauuuuuaugaugacaaucaaagccggccugagaaacacuauuugugacuuuuuaaacgauuagugauguccuuaaaauguggucugccaaucuguacaaaaugguccuauuuuugugaagagggacauaagauaaaaugauguuauacaucaauauguauauauguauuucuauauagacuuggagaauacugccaaaacauuuaugacaagcuguaucacugccuucguuuauauuuuuuuaacugugauaauccccacaggcacauuaacuguugcacuuuugaauguccaaaauuuauauuuuagaaauaauaaaaagaaagauacuuacauguucccaaaacaaugguguggugaaugugugagaaaaacuaacuugauagggucuaccaauacaaaauguauuacgaaugccccuguucauguuuuuguuuuaaaacguguaaaugaagaucuuuauauuucaauaaaugauauauaauuuaaaguuaaaaaaaaaaaaaaa

SEQ ID NO: 23166 - RNA, 19 nt, Artificial Sequence
  Description of Artificial Sequence: Synthetic oligonucleotide
gguuuuugagcccauuacu

SEQ ID NO: 23167 - RNA, 19 nt, Artificial Sequence
  Description of Artificial Sequence: Synthetic oligonucleotide
uguuggagcuacagggaga

SEQ ID NO: 23168 - RNA, 19 nt, Artificial Sequence
  Description of Artificial Sequence: Synthetic oligonucleotide
agaaacagaggaggagacu

SEQ ID NO: 23169 - RNA, 19 nt, Artificial Sequence
  Description of Artificial Sequence: Synthetic oligonucleotide
ugcaagagaucauuggagg

SEQ ID NO: 23170 - RNA, 19 nt, Artificial Sequence
  Description of Artificial Sequence: Synthetic oligonucleotide
gccgugggcacgcucuuua

SEQ ID NO: 23171 - RNA, 19 nt, Artificial Sequence
  Description of Artificial Sequence: Synthetic oligonucleotide
acuccaugugugggacauu

SEQ ID NO: 23172 - RNA, 19 nt, Artificial Sequence
  Description of Artificial Sequence: Synthetic oligonucleotide
ucauugcggaauaacaucg

SEQ ID NO: 23173 - RNA, 19 nt, Artificial Sequence
  Description of Artificial Sequence: Synthetic oligonucleotide
ggaggagaaguuucccaga

SEQ ID NO: 23174 - RNA, 19 nt, Artificial Sequence
  Description of Artificial Sequence: Synthetic oligonucleotide
agcuauggggacuucccau

SEQ ID NO: 23175 - RNA, 19 nt, Artificial Sequence
  Description of Artificial Sequence: Synthetic oligonucleotide
uccggcguuccuggucuua

SEQ ID NO: 23176 - RNA, 19 nt, Artificial Sequence
  Description of Artificial Sequence: Synthetic oligonucleotide
aggcugucuucucacaggg

SEQ ID NO: 23177 - RNA, 19 nt, Artificial Sequence
  Description of Artificial Sequence: Synthetic oligonucleotide
gcugagccuaauccucugc

SEQ ID NO: 23178 - RNA, 19 nt, Artificial Sequence
  Description of Artificial Sequence: Synthetic oligonucleotide
ccagcuuucauuacccucu

SEQ ID NO: 23179 - RNA, 19 nt, Artificial Sequence
  Description of Artificial Sequence: Synthetic oligonucleotide
uauccuuccaaaugaaaau

SEQ ID NO: 23180 - RNA, 19 nt, Artificial Sequence
  Description of Artificial Sequence: Synthetic oligonucleotide
ugaaaagguugugcagcug

SEQ ID NO: 23181 - RNA, 19 nt, Artificial Sequence
  Description of Artificial Sequence: Synthetic oligonucleotide
gaauucauccuuuucucug

SEQ ID NO: 23182 - RNA, 19 nt, Artificial Sequence
  Description of Artificial Sequence: Synthetic oligonucleotide
gagaugcuuuggggagagu

SEQ ID NO: 23183 - RNA, 19 nt, Artificial Sequence
  Description of Artificial Sequence: Synthetic oligonucleotide
ugaagugagcuggcaguac

SEQ ID NO: 23184 - RNA, 19 nt, Artificial Sequence
  Description of Artificial Sequence: Synthetic oligonucleotide
ccccaugucugaagaagag

SEQ ID NO: 23185 - RNA, 19 nt, Artificial Sequence
  Description of Artificial Sequence: Synthetic oligonucleotide
gagcuccgauguggaaauc

SEQ ID NO: 23186 - RNA, 19 nt, Artificial Sequence
  Description of Artificial Sequence: Synthetic oligonucleotide
cagaaaugaagaaaacaac

SEQ ID NO: 23187 - RNA, 19 nt, Artificial Sequence
  Description of Artificial Sequence: Synthetic oligonucleotide
cagcggccuuuuugugacg

SEQ ID NO: 23188 - RNA, 19 nt, Artificial Sequence
  Description of Artificial Sequence: Synthetic oligonucleotide
ggucuuggaagugagcagu

SEQ ID NO: 23189 - RNA, 19 nt, Artificial Sequence
  Description of Artificial Sequence: Synthetic oligonucleotide
ugccucggcggcccacaca

SEQ ID NO: 23190 - RNA, 19 nt, Artificial Sequence
  Description of Artificial Sequence: Synthetic oligonucleotide
aggguuguacacuugcuau

SEQ ID NO: 23191 - RNA, 19 nt, Artificial Sequence
  Description of Artificial Sequence: Synthetic oligonucleotide
uuacaaccacacucagaca

SEQ ID NO: 23192 - RNA, 19 nt, Artificial Sequence
  Description of Artificial Sequence: Synthetic oligonucleotide
agaagagaaugagcuugaa

SEQ ID NO: 23193 - RNA, 19 nt, Artificial Sequence
  Description of Artificial Sequence: Synthetic oligonucleotide
aggcaggcacauuuacauc

SEQ ID NO: 23194 - RNA, 19 nt, Artificial Sequence
  Description of Artificial Sequence: Synthetic oligonucleotide
cuaugugccagacccagau

SEQ ID NO: 23195 - RNA, 19 nt, Artificial Sequence
  Description of Artificial Sequence: Synthetic oligonucleotide
uguagccuuuguaccucua

SEQ ID NO: 23196 - RNA, 19 nt, Artificial Sequence
  Description of Artificial Sequence: Synthetic oligonucleotide
aggaaugacggauuauuua

SEQ ID NO: 23197 - RNA, 19 nt, Artificial Sequence
  Description of Artificial Sequence: Synthetic oligonucleotide
agucaucguggaggaugau

SEQ ID NO: 23198 - RNA, 19 nt, Artificial Sequence
  Description of Artificial Sequence: Synthetic oligonucleotide
ugauucugccauuauaccu

SEQ ID NO: 23199 - RNA, 19 nt, Artificial Sequence
  Description of Artificial Sequence: Synthetic oligonucleotide
uugucgcacaacugauccc

SEQ ID NO: 23200 - RNA, 19 nt, Artificial Sequence
  Description of Artificial Sequence: Synthetic oligonucleotide
cgagacuccuguaaccuua

SEQ ID NO: 23201 - RNA, 19 nt, Artificial Sequence
  Description of Artificial Sequence: Synthetic oligonucleotide
acacaacagugagggggug

SEQ ID NO: 23202 - RNA, 19 nt, Artificial Sequence
  Description of Artificial Sequence: Synthetic oligonucleotide
gguaccugccuccuacgac

SEQ ID NO: 23203 - RNA, 19 nt, Artificial Sequence
  Description of Artificial Sequence: Synthetic oligonucleotide
cagcagacagggcuuuaau

SEQ ID NO: 23204 - RNA, 19 nt, Artificial Sequence
  Description of Artificial Sequence: Synthetic oligonucleotide
ugggaccuucacuguaggg

SEQ ID NO: 23205 - RNA, 19 nt, Artificial Sequence
  Description of Artificial Sequence: Synthetic oligonucleotide
gcccuauaucugugaggcc

SEQ ID NO: 23206 - RNA, 19 nt, Artificial Sequence
  Description of Artificial Sequence: Synthetic oligonucleotide
caccgucaaaggaaagaag

SEQ ID NO: 23207 - RNA, 19 nt, Artificial Sequence
  Description of Artificial Sequence: Synthetic oligonucleotide
guuccagaccaucccauuu

SEQ ID NO: 23208 - RNA, 19 nt, Artificial Sequence
  Description of Artificial Sequence: Synthetic oligonucleotide
uaauguuuaugcuuuaaaa

SEQ ID NO: 23209 - RNA, 19 nt, Artificial Sequence
  Description of Artificial Sequence: Synthetic oligonucleotide
agcaacaucagagcuggau

SEQ ID NO: 23210 - RNA, 19 nt, Artificial Sequence
  Description of Artificial Sequence: Synthetic oligonucleotide
ucuagaaauggaagcucuu

SEQ ID NO: 23211 - RNA, 19 nt, Artificial Sequence
  Description of Artificial Sequence: Synthetic oligonucleotide
uaaaaccguguauaaguca

SEQ ID NO: 23212 - RNA, 19 nt, Artificial Sequence
  Description of Artificial Sequence: Synthetic oligonucleotide
aggggaaacgauugugguc

SEQ ID NO: 23213 - RNA, 19 nt, Artificial Sequence
  Description of Artificial Sequence: Synthetic oligonucleotide
caccugugcuguuuuuaac

SEQ ID NO: 23214 - RNA, 19 nt, Artificial Sequence
  Description of Artificial Sequence: Synthetic oligonucleotide
caaugaggugguugaccuu

SEQ ID NO: 23215 - RNA, 19 nt, Artificial Sequence
  Description of Artificial Sequence: Synthetic oligonucleotide
ucaauggacuuacccugga

SEQ ID NO: 23216 - RNA, 19 nt, Artificial Sequence
  Description of Artificial Sequence: Synthetic oligonucleotide
agaagugaaaggcaaaggc

SEQ ID NO: 23217 - RNA, 19 nt, Artificial Sequence
  Description of Artificial Sequence: Synthetic oligonucleotide
caucacaaugcuggaagaa

SEQ ID NO: 23218 - RNA, 19 nt, Artificial Sequence
  Description of Artificial Sequence: Synthetic oligonucleotide
aaucaaagucccauccauc

SEQ ID NO: 23219 - RNA, 19 nt, Artificial Sequence
  Description of Artificial Sequence: Synthetic oligonucleotide
caaauugguguacacuuug

SEQ ID NO: 23220 - RNA, 19 nt, Artificial Sequence
  Description of Artificial Sequence: Synthetic oligonucleotide
gacgguccccgaggccacg

SEQ ID NO: 23221 - RNA, 19 nt, Artificial Sequence
  Description of Artificial Sequence: Synthetic oligonucleotide
ggugaaagacaguggagau

SEQ ID NO: 23222 - RNA, 19 nt, Artificial Sequence
  Description of Artificial Sequence: Synthetic oligonucleotide
uuacgaaugugcugcccgc

SEQ ID NO: 23223 - RNA, 19 nt, Artificial Sequence
  Description of Artificial Sequence: Synthetic oligonucleotide
ccaggcuaccagggagguc

SEQ ID NO: 23224 - RNA, 19 nt, Artificial Sequence
  Description of Artificial Sequence: Synthetic oligonucleotide
caaagaaaugaagaaaguc

SEQ ID NO: 23225 - RNA, 19 nt, Artificial Sequence
  Description of Artificial Sequence: Synthetic oligonucleotide
cacuauuucuguccaugag

SEQ ID NO: 23226 - RNA, 19 nt, Artificial Sequence
  Description of Artificial Sequence: Synthetic oligonucleotide
gaaagguuucauugaaauc

SEQ ID NO: 23227 - RNA, 19 nt, Artificial Sequence
  Description of Artificial Sequence: Synthetic oligonucleotide
caaacccaccuucagccag

SEQ ID NO: 23228 - RNA, 19 nt, Artificial Sequence
  Description of Artificial Sequence: Synthetic oligonucleotide
guuggaagcugucaaccug

SEQ ID NO: 23229 - RNA, 19 nt, Artificial Sequence
  Description of Artificial Sequence: Synthetic oligonucleotide
gcaugaagucaaacauuuu

SEQ ID NO: 23230 - RNA, 19 nt, Artificial Sequence
  Description of Artificial Sequence: Synthetic oligonucleotide
uguuguagaggugcgggcc

SEQ ID NO: 23231 - RNA, 19 nt, Artificial Sequence
  Description of Artificial Sequence: Synthetic oligonucleotide
cuacccaccucccaggaua

SEQ ID NO: 23232 - RNA, 19 nt, Artificial Sequence
  Description of Artificial Sequence: Synthetic oligonucleotide
auccuggcugaaaaacaau

SEQ ID NO: 23233 - RNA, 19 nt, Artificial Sequence
  Description of Artificial Sequence: Synthetic oligonucleotide
ucugacucugauugaaaau

SEQ ID NO: 23234 - RNA, 19 nt, Artificial Sequence
  Description of Artificial Sequence: Synthetic oligonucleotide
ucucacugagaucaccacu

SEQ ID NO: 23235 - RNA, 19 nt, Artificial Sequence
  Description of Artificial Sequence: Synthetic oligonucleotide
ugauguggaaaagauucag

SEQ ID NO: 23236 - RNA, 19 nt, Artificial Sequence
  Description of Artificial Sequence: Synthetic oligonucleotide
ggaaauaagguaucgaagc

SEQ ID NO: 23237 - RNA, 19 nt, Artificial Sequence
  Description of Artificial Sequence: Synthetic oligonucleotide
caaauuaaagcugauccgu

SEQ ID NO: 23238 - RNA, 19 nt, Artificial Sequence
  Description of Artificial Sequence: Synthetic oligonucleotide
ugcuaaggaagaagacagu

SEQ ID NO: 23239 - RNA, 19 nt, Artificial Sequence
  Description of Artificial Sequence: Synthetic oligonucleotide
uggccauuauacuauugua

SEQ ID NO: 23240 - RNA, 19 nt, Artificial Sequence
  Description of Artificial Sequence: Synthetic oligonucleotide
agcucaaaaugaagaugcu

SEQ ID NO: 23241 - RNA, 19 nt, Artificial Sequence
  Description of Artificial Sequence: Synthetic oligonucleotide
ugugaagagcuauacuuuu

SEQ ID NO: 23242 - RNA, 19 nt, Artificial Sequence
  Description of Artificial Sequence: Synthetic oligonucleotide
ugaacuguuaacucaaguu

SEQ ID NO: 23243 - RNA, 19 nt, Artificial Sequence
  Description of Artificial Sequence: Synthetic oligonucleotide
uccuucauccauucuggac

SEQ ID NO: 23244 - RNA, 19 nt, Artificial Sequence
  Description of Artificial Sequence: Synthetic oligonucleotide
cuuggucgaugaucaccau

SEQ ID NO: 23245 - RNA, 19 nt, Artificial Sequence
  Description of Artificial Sequence: Synthetic oligonucleotide
uggcucaacugggggacag

SEQ ID NO: 23246 - RNA, 19 nt, Artificial Sequence
  Description of Artificial Sequence: Synthetic oligonucleotide
gacggugaggugcacagcu

SEQ ID NO: 23247 - RNA, 19 nt, Artificial Sequence
  Description of Artificial Sequence: Synthetic oligonucleotide
ugaaggcacgccgcuuccu

SEQ ID NO: 23248 - RNA, 19 nt, Artificial Sequence
  Description of Artificial Sequence: Synthetic oligonucleotide
ugauauugaguggaugaua

SEQ ID NO: 23249 - RNA, 19 nt, Artificial Sequence
  Description of Artificial Sequence: Synthetic oligonucleotide
augcaaagauauuaagaaa

SEQ ID NO: 23250 - RNA, 19 nt, Artificial Sequence
  Description of Artificial Sequence: Synthetic oligonucleotide
auguaauaaugaaacuucc

SEQ ID NO: 23251 - RNA, 19 nt, Artificial Sequence
  Description of Artificial Sequence: Synthetic oligonucleotide
cuggacuauuuuggccaac

SEQ ID NO: 23252 - RNA, 19 nt, Artificial Sequence
  Description of Artificial Sequence: Synthetic oligonucleotide
caaugucucaaacaucauc

SEQ ID NO: 23253 - RNA, 19 nt, Artificial Sequence
  Description of Artificial Sequence: Synthetic oligonucleotide
cacggagauccacucccga

SEQ ID NO: 23254 - RNA, 19 nt, Artificial Sequence
  Description of Artificial Sequence: Synthetic oligonucleotide
agacaggaguaccguggag

SEQ ID NO: 23255 - RNA, 19 nt, Artificial Sequence
  Description of Artificial Sequence: Synthetic oligonucleotide
gggccgugugacuuucgcc

SEQ ID NO: 23256 - RNA, 19 nt, Artificial Sequence
  Description of Artificial Sequence: Synthetic oligonucleotide
caaaguggaggagaccauc

SEQ ID NO: 23257 - RNA, 19 nt, Artificial Sequence
  Description of Artificial Sequence: Synthetic oligonucleotide
cgccgugcgaugccuggcu

SEQ ID NO: 23258 - RNA, 19 nt, Artificial Sequence
  Description of Artificial Sequence: Synthetic oligonucleotide
uaagaaucuccuuggagcu

SEQ ID NO: 23259 - RNA, 19 nt, Artificial Sequence
  Description of Artificial Sequence: Synthetic oligonucleotide
ugagaaccgagagcugaag

SEQ ID NO: 23260 - RNA, 19 nt, Artificial Sequence
  Description of Artificial Sequence: Synthetic oligonucleotide
gcugguggcucccacccug

SEQ ID NO: 23261 - RNA, 19 nt, Artificial Sequence
  Description of Artificial Sequence: Synthetic oligonucleotide
gcguucugaacucacggug

SEQ ID NO: 23262 - RNA, 19 nt, Artificial Sequence
  Description of Artificial Sequence: Synthetic oligonucleotide
ggcugcugcaguccuggug

SEQ ID NO: 23263 - RNA, 19 nt, Artificial Sequence
  Description of Artificial Sequence: Synthetic oligonucleotide
gcuguuggugauugugauc

SEQ ID NO: 23264 - RNA, 19 nt, Artificial Sequence
  Description of Artificial Sequence: Synthetic oligonucleotide
caucucacuuauuguccug

SEQ ID NO: 23265 - RNA, 19 nt, Artificial Sequence
  Description of Artificial Sequence: Synthetic oligonucleotide
gguugucauuuggaaacag

SEQ ID NO: 23266 - RNA, 19 nt, Artificial Sequence
  Description of Artificial Sequence: Synthetic oligonucleotide
gaaaccgagguaugaaauu

SEQ ID NO: 23267 - RNA, 19 nt, Artificial Sequence
  Description of Artificial Sequence: Synthetic oligonucleotide
ucgcuggagggucauugaa

SEQ ID NO: 23268 - RNA, 19 nt, Artificial Sequence
  Description of Artificial Sequence: Synthetic oligonucleotide
aucaaucagcccagaugga

SEQ ID NO: 23269 - RNA, 19 nt, Artificial Sequence
  Description of Artificial Sequence: Synthetic oligonucleotide
acaugaauauauuuaugug

SEQ ID NO: 23270 - RNA, 19 nt, Artificial Sequence
  Description of Artificial Sequence: Synthetic oligonucleotide
ggacccgaugcagcugccu

SEQ ID NO: 23271 - RNA, 19 nt, Artificial Sequence
  Description of Artificial Sequence: Synthetic oligonucleotide
uuaugacucaagaugggag

SEQ ID NO: 23272 - RNA, 19 nt, Artificial Sequence
  Description of Artificial Sequence: Synthetic oligonucleotide
guuuccaagagauggacua

SEQ ID NO: 23273 - RNA, 19 nt, Artificial Sequence
  Description of Artificial Sequence: Synthetic oligonucleotide
agugcuuggucgggucuug

SEQ ID NO: 23274 - RNA, 19 nt, Artificial Sequence
  Description of Artificial Sequence: Synthetic oligonucleotide
ggggucuggagcguuuggg

SEQ ID NO: 23275 - RNA, 19 nt, Artificial Sequence
  Description of Artificial Sequence: Synthetic oligonucleotide
gaaggugguugaaggaaca

SEQ ID NO: 23276 - RNA, 19 nt, Artificial Sequence
  Description of Artificial Sequence: Synthetic oligonucleotide
agccuauggauuaagccgg

SEQ ID NO: 23277 - RNA, 19 nt, Artificial Sequence
  Description of Artificial Sequence: Synthetic oligonucleotide
gucccaaccugucaugaaa

SEQ ID NO: 23278 - RNA, 19 nt, Artificial Sequence
  Description of Artificial Sequence: Synthetic oligonucleotide
aguugcagugaagaugcua

SEQ ID NO: 23279 - RNA, 19 nt, Artificial Sequence
  Description of Artificial Sequence: Synthetic oligonucleotide
aaaacccacggccagaucc

SEQ ID NO: 23280 - RNA, 19 nt, Artificial Sequence
  Description of Artificial Sequence: Synthetic oligonucleotide
cagugaaaaacaagcucuc

SEQ ID NO: 23281 - RNA, 19 nt, Artificial Sequence
  Description of Artificial Sequence: Synthetic oligonucleotide
caugucugaacugaagaua

SEQ ID NO: 23282 - RNA, 19 nt, Artificial Sequence
  Description of Artificial Sequence: Synthetic oligonucleotide
aaugacucaccuggggcca

SEQ ID NO: 23283 - RNA, 19 nt, Artificial Sequence
  Description of Artificial Sequence: Synthetic oligonucleotide
acauuugaacauuguaaac

SEQ ID NO: 23284 - RNA, 19 nt, Artificial Sequence
  Description of Artificial Sequence: Synthetic oligonucleotide
cuugcugggagccugcacc

SEQ ID NO: 23285 - RNA, 19 nt, Artificial Sequence
  Description of Artificial Sequence: Synthetic oligonucleotide
caagucaggccccauuuac

SEQ ID NO: 23286 - RNA, 19 nt, Artificial Sequence
  Description of Artificial Sequence: Synthetic oligonucleotide
caucaucacagaguauugc

SEQ ID NO: 23287 - RNA, 19 nt, Artificial Sequence
  Description of Artificial Sequence: Synthetic oligonucleotide
cuucuauggagauuugguc

SEQ ID NO: 23288 - RNA, 19 nt, Artificial Sequence
  Description of Artificial Sequence: Synthetic oligonucleotide
caacuauuugcauaagaau

SEQ ID NO: 23289 - RNA, 19 nt, Artificial Sequence
  Description of Artificial Sequence: Synthetic oligonucleotide
uagggauagcuuccugagc

SEQ ID NO: 23290 - RNA, 19 nt, Artificial Sequence
  Description of Artificial Sequence: Synthetic oligonucleotide
ccaccacccagagaagcca

SEQ ID NO: 23291 - RNA, 19 nt, Artificial Sequence
  Description of Artificial Sequence: Synthetic oligonucleotide
aaagaaagagcuggauauc

SEQ ID NO: 23292 - RNA, 19 nt, Artificial Sequence
  Description of Artificial Sequence: Synthetic oligonucleotide
cuuuggauugaacccugcu

SEQ ID NO: 23293 - RNA, 19 nt, Artificial Sequence
  Description of Artificial Sequence: Synthetic oligonucleotide
ugaugaaagcacacggagc

SEQ ID NO: 23294 - RNA, 19 nt, Artificial Sequence
  Description of Artificial Sequence: Synthetic oligonucleotide
cuauguuauuuuaucuuuu

SEQ ID NO: 23295 - RNA, 19 nt, Artificial Sequence
  Description of Artificial Sequence: Synthetic oligonucleotide
ugaaaacaauggugacuac

SEQ ID NO: 23296 - RNA, 19 nt, Artificial Sequence
  Description of Artificial Sequence: Synthetic oligonucleotide
cauggacaugaagcaggcu

SEQ ID NO: 23297 - RNA, 19 nt, Artificial Sequence
  Description of Artificial Sequence: Synthetic oligonucleotide
ugauacuacacaguauguc

SEQ ID NO: 23298 - RNA, 19 nt, Artificial Sequence
  Description of Artificial Sequence: Synthetic oligonucleotide
ccccaugcuagaaaggaaa

SEQ ID NO: 23299 - RNA, 19 nt, Artificial Sequence
  Description of Artificial Sequence: Synthetic oligonucleotide
agagguuucuaaauauucc

SEQ ID NO: 23300 - RNA, 19 nt, Artificial Sequence
  Description of Artificial Sequence: Synthetic oligonucleotide
cgacauccagagaucacuc

SEQ ID NO: 23301 - RNA, 19 nt, Artificial Sequence
  Description of Artificial Sequence: Synthetic oligonucleotide
cuaugaucguccagccuca

SEQ ID NO: 23302 - RNA, 19 nt, Artificial Sequence
  Description of Artificial Sequence: Synthetic oligonucleotide
auauaagaagaaaucuaug

SEQ ID NO: 23303 - RNA, 19 nt, Artificial Sequence
  Description of Artificial Sequence: Synthetic oligonucleotide
guuagacucagaagucaaa

SEQ ID NO: 23304 - RNA, 19 nt, Artificial Sequence
  Description of Artificial Sequence: Synthetic oligonucleotide
aaaccuccuuucagaugau

SEQ ID NO: 23305 - RNA, 19 nt, Artificial Sequence
  Description of Artificial Sequence: Synthetic oligonucleotide
uaacucagaaggccuuacu

SEQ ID NO: 23306 - RNA, 19 nt, Artificial Sequence
  Description of Artificial Sequence: Synthetic oligonucleotide
uuuauuggauuuguugagc

SEQ ID NO: 23307 - RNA, 19 nt, Artificial Sequence
  Description of Artificial Sequence: Synthetic oligonucleotide
cuucaccuaucaaguugcc

SEQ ID NO: 23308 - RNA, 19 nt, Artificial Sequence
  Description of Artificial Sequence: Synthetic oligonucleotide
ccgaggaauggaguuuuug

SEQ ID NO: 23309 - RNA, 19 nt, Artificial Sequence
  Description of Artificial Sequence: Synthetic oligonucleotide
ggcuucaaaaaauuguguc

SEQ ID NO: 23310 - RNA, 19 nt, Artificial Sequence
  Description of Artificial Sequence: Synthetic oligonucleotide
ccaccgugaucuggcugcu

SEQ ID NO: 23311 - RNA, 19 nt, Artificial Sequence
  Description of Artificial Sequence: Synthetic oligonucleotide
ucgcaacguccuccuggca

SEQ ID NO: 23312 - RNA, 19 nt, Artificial Sequence
  Description of Artificial Sequence: Synthetic oligonucleotide
acaaggaaaaauugugaag

SEQ ID NO: 23313 - RNA, 19 nt, Artificial Sequence
  Description of Artificial Sequence: Synthetic oligonucleotide
gaucugugacuuuggccug

SEQ ID NO: 23314 - RNA, 19 nt, Artificial Sequence
  Description of Artificial Sequence: Synthetic oligonucleotide
ggccagagacaucaugcau

SEQ ID NO: 23315 - RNA, 19 nt, Artificial Sequence
  Description of Artificial Sequence: Synthetic oligonucleotide
ugauucgaacuaugugucg

SEQ ID NO: 23316 - RNA, 19 nt, Artificial Sequence
  Description of Artificial Sequence: Synthetic oligonucleotide
gaaaggcaguaccuuucug

SEQ ID NO: 23317 - RNA, 19 nt, Artificial Sequence
  Description of Artificial Sequence: Synthetic oligonucleotide
gcccgugaaguggauggcu

SEQ ID NO: 23318 - RNA, 19 nt, Artificial Sequence
  Description of Artificial Sequence: Synthetic oligonucleotide
uccugagagcaucuuugac

SEQ ID NO: 23319 - RNA, 19 nt, Artificial Sequence
  Description of Artificial Sequence: Synthetic oligonucleotide
caaccucuacaccacacug

SEQ ID NO: 23320 - RNA, 19 nt, Artificial Sequence
  Description of Artificial Sequence: Synthetic oligonucleotide
gagugaugucuggucuuau

SEQ ID NO: 23321 - RNA, 19 nt, Artificial Sequence
  Description of Artificial Sequence: Synthetic oligonucleotide
uggcauucugcucugggag

SEQ ID NO: 23322 - RNA, 19 nt, Artificial Sequence
  Description of Artificial Sequence: Synthetic oligonucleotide
gaucuuuucccuugguggc

SEQ ID NO: 23323 - RNA, 19 nt, Artificial Sequence
  Description of Artificial Sequence: Synthetic oligonucleotide
caccccuuaccccggcaug

SEQ ID NO: 23324 - RNA, 19 nt, Artificial Sequence
  Description of Artificial Sequence: Synthetic oligonucleotide
gaugguggauucuacuuuc

SEQ ID NO: 23325 - RNA, 19 nt, Artificial Sequence
  Description of Artificial Sequence: Synthetic oligonucleotide
cuacaauaagaucaagagu

SEQ ID NO: 23326 - RNA, 19 nt, Artificial Sequence
  Description of Artificial Sequence: Synthetic oligonucleotide
uggguaccggauggccaag

SEQ ID NO: 23327 - RNA, 19 nt, Artificial Sequence
  Description of Artificial Sequence: Synthetic oligonucleotide
gccugaccacgcuaccagu

SEQ ID NO: 23328 - RNA, 19 nt, Artificial Sequence
  Description of Artificial Sequence: Synthetic oligonucleotide
ugaagucuacgagaucaug

SEQ ID NO: 23329 - RNA, 19 nt, Artificial Sequence
  Description of Artificial Sequence: Synthetic oligonucleotide
ggugaaaugcuggaacagu

SEQ ID NO: 23330 - RNA, 19 nt, Artificial Sequence
  Description of Artificial Sequence: Synthetic oligonucleotide
ugagccggagaagagaccc

SEQ ID NO: 23331 - RNA, 19 nt, Artificial Sequence
  Description of Artificial Sequence: Synthetic oligonucleotide
cuccuuuuaccaccugagu

SEQ ID NO: 23332 - RNA, 19 nt, Artificial Sequence
  Description of Artificial Sequence: Synthetic oligonucleotide
ugagauuguggagaaucug

SEQ ID NO: 23333 - RNA, 19 nt, Artificial Sequence
  Description of Artificial Sequence: Synthetic oligonucleotide
gcugccuggacaauauaaa

SEQ ID NO: 23334 - RNA, 19 nt, Artificial Sequence
  Description of Artificial Sequence: Synthetic oligonucleotide
aaagaguuaugaaaaaauu

SEQ ID NO: 23335 - RNA, 19 nt, Artificial Sequence
  Description of Artificial Sequence: Synthetic oligonucleotide
ucaccuggacuuccugaag

SEQ ID NO: 23336 - RNA, 19 nt, Artificial Sequence
  Description of Artificial Sequence: Synthetic oligonucleotide
gagugaccauccugcugug

SEQ ID NO: 23337 - RNA, 19 nt, Artificial Sequence
  Description of Artificial Sequence: Synthetic oligonucleotide
ggcacgcaugcguguggac

SEQ ID NO: 23338 - RNA, 19 nt, Artificial Sequence
  Description of Artificial Sequence: Synthetic oligonucleotide
cucagacaaugcauacauu

SEQ ID NO: 23339 - RNA, 19 nt, Artificial Sequence
  Description of Artificial Sequence: Synthetic oligonucleotide
uggugucaccuacaaaaac

SEQ ID NO: 23340 - RNA, 19 nt, Artificial Sequence
  Description of Artificial Sequence: Synthetic oligonucleotide
cgaggaagacaagcugaag

SEQ ID NO: 23341 - RNA, 19 nt, Artificial Sequence
  Description of Artificial Sequence: Synthetic oligonucleotide
ggacugggaggguggucug

SEQ ID NO: 23342 - RNA, 19 nt, Artificial Sequence
  Description of Artificial Sequence: Synthetic oligonucleotide
ggaugagcagagacugagc

SEQ ID NO: 23343 - RNA, 19 nt, Artificial Sequence
  Description of Artificial Sequence: Synthetic oligonucleotide
cgcugacaguggcuacauc

SEQ ID NO: 23344 - RNA, 19 nt, Artificial Sequence
  Description of Artificial Sequence: Synthetic oligonucleotide
cauuccucugccugacauu

SEQ ID NO: 23345 - RNA, 19 nt, Artificial Sequence
  Description of Artificial Sequence: Synthetic oligonucleotide
ugacccugucccugaggag

SEQ ID NO: 23346 - RNA, 19 nt, Artificial Sequence
  Description of Artificial Sequence: Synthetic oligonucleotide
ggaggaccugggcaagagg

SEQ ID NO: 23347 - RNA, 19 nt, Artificial Sequence
  Description of Artificial Sequence: Synthetic oligonucleotide
gaacagacacagcucgcag

SEQ ID NO: 23348 - RNA, 19 nt, Artificial Sequence
  Description of Artificial Sequence: Synthetic oligonucleotide
gaccucugaagagagugcc

SEQ ID NO: 23349 - RNA, 19 nt, Artificial Sequence
  Description of Artificial Sequence: Synthetic oligonucleotide
cauugagacggguuccagc

SEQ ID NO: 23350 - RNA, 19 nt, Artificial Sequence
  Description of Artificial Sequence: Synthetic oligonucleotide
caguuccaccuucaucaag

SEQ ID NO: 23351 - RNA, 19 nt, Artificial Sequence
  Description of Artificial Sequence: Synthetic oligonucleotide
gagagaggacgagaccauu

SEQ ID NO: 23352 - RNA, 19 nt, Artificial Sequence
  Description of Artificial Sequence: Synthetic oligonucleotide
ugaagacaucgacaugaug

SEQ ID NO: 23353 - RNA, 19 nt, Artificial Sequence
  Description of Artificial Sequence: Synthetic oligonucleotide
ggacgacaucggcauagac

SEQ ID NO: 23354 - RNA, 19 nt, Artificial Sequence
  Description of Artificial Sequence: Synthetic oligonucleotide
cucuucagaccugguggaa

SEQ ID NO: 23355 - RNA, 19 nt, Artificial Sequence
  Description of Artificial Sequence: Synthetic oligonucleotide
agacagcuuccuguaacug

SEQ ID NO: 23356 - RNA, 19 nt, Artificial Sequence
  Description of Artificial Sequence: Synthetic oligonucleotide
ggcggauucgagggguucc

SEQ ID NO: 23357 - RNA, 19 nt, Artificial Sequence
  Description of Artificial Sequence: Synthetic oligonucleotide
cuuccacuucuggggccac

SEQ ID NO: 23358 - RNA, 19 nt, Artificial Sequence
  Description of Artificial Sequence: Synthetic oligonucleotide
ccucuggaucccguucaga

SEQ ID NO: 23359 - RNA, 19 nt, Artificial Sequence
  Description of Artificial Sequence: Synthetic oligonucleotide
aaaaccacuuuauugcaau

SEQ ID NO: 23360 - RNA, 19 nt, Artificial Sequence
  Description of Artificial Sequence: Synthetic oligonucleotide
ugcggagguugagaggagg

SEQ ID NO: 23361 - RNA, 19 nt, Artificial Sequence
  Description of Artificial Sequence: Synthetic oligonucleotide
gacuugguugauguuuaaa

SEQ ID NO: 23362 - RNA, 19 nt, Artificial Sequence
  Description of Artificial Sequence: Synthetic oligonucleotide
agagaaguucccagccaag

SEQ ID NO: 23363 - RNA, 19 nt, Artificial Sequence
  Description of Artificial Sequence: Synthetic oligonucleotide
gggccucggggagcguucu

SEQ ID NO: 23364 - RNA, 19 nt, Artificial Sequence
  Description of Artificial Sequence: Synthetic oligonucleotide
uaaauaugaaugaauggga

SEQ ID NO: 23365 - RNA, 19 nt, Artificial Sequence
  Description of Artificial Sequence: Synthetic oligonucleotide
auauuuugaaaugaacuuu

SEQ ID NO: 23366 - RNA, 19 nt, Artificial Sequence
  Description of Artificial Sequence: Synthetic oligonucleotide
ugucaguguugccucuugc

SEQ ID NO: 23367 - RNA, 19 nt, Artificial Sequence
  Description of Artificial Sequence: Synthetic oligonucleotide
caaugccucaguagcaucu

SEQ ID NO: 23368 - RNA, 19 nt, Artificial Sequence
  Description of Artificial Sequence: Synthetic oligonucleotide
ucaguggugugugaaguuu

SEQ ID NO: 23369 - RNA, 19 nt, Artificial Sequence
  Description of Artificial Sequence: Synthetic oligonucleotide
uggagauagauggauaagg

SEQ ID NO: 23370 - RNA, 19 nt, Artificial Sequence
  Description of Artificial Sequence: Synthetic oligonucleotide
ggaauaauaggccacagaa

SEQ ID NO: 23371 - RNA, 19 nt, Artificial Sequence
  Description of Artificial Sequence: Synthetic oligonucleotide
aggugaacuuugugcuuca

SEQ ID NO: 23372 - RNA, 19 nt, Artificial Sequence
  Description of Artificial Sequence: Synthetic oligonucleotide
aaggacauuggugagaguc

SEQ ID NO: 23373 - RNA, 19 nt, Artificial Sequence
  Description of Artificial Sequence: Synthetic oligonucleotide
ccaacagacacaauuuaua

SEQ ID NO: 23374 - RNA, 19 nt, Artificial Sequence
  Description of Artificial Sequence: Synthetic oligonucleotide
acugcgacagaacuucagc

SEQ ID NO: 23375 - RNA, 19 nt, Artificial Sequence
  Description of Artificial Sequence: Synthetic oligonucleotide
cauuguaauuauguaaaua

SEQ ID NO: 23376 - RNA, 19 nt, Artificial Sequence
  Description of Artificial Sequence: Synthetic oligonucleotide
aacucuaaccaaggcugug

SEQ ID NO: 23377 - RNA, 19 nt, Artificial Sequence
  Description of Artificial Sequence: Synthetic oligonucleotide
guuuagauuguauuaacua

SEQ ID NO: 23378 - RNA, 19 nt, Artificial Sequence
  Description of Artificial Sequence: Synthetic oligonucleotide
aucuucuuuggacuucuga

SEQ ID NO: 23379 - RNA, 19 nt, Artificial Sequence
  Description of Artificial Sequence: Synthetic oligonucleotide
aagagaccacucaauccau

SEQ ID NO: 23380 - RNA, 19 nt, Artificial Sequence
  Description of Artificial Sequence: Synthetic oligonucleotide
uccauguacuucccucuug

SEQ ID NO: 23381 - RNA, 19 nt, Artificial Sequence
  Description of Artificial Sequence: Synthetic oligonucleotide
gaaaccugaugucagcugc

SEQ ID NO: 23382 - RNA, 19 nt, Artificial Sequence
  Description of Artificial Sequence: Synthetic oligonucleotide
cuguugaacuuuuuaaaga

SEQ ID NO: 23383 - RNA, 19 nt, Artificial Sequence
  Description of Artificial Sequence: Synthetic oligonucleotide
aagugcaugaaaaaccauu

SEQ ID NO: 23384 - RNA, 19 nt, Artificial Sequence
  Description of Artificial Sequence: Synthetic oligonucleotide
uuuugaaccuuaaaaggua

SEQ ID NO: 23385 - RNA, 19 nt, Artificial Sequence
  Description of Artificial Sequence: Synthetic oligonucleotide
acugguacuauagcauuuu

SEQ ID NO: 23386 - RNA, 19 nt, Artificial Sequence
  Description of Artificial Sequence: Synthetic oligonucleotide
ugcuaucuuuuuuaguguu

SEQ ID NO: 23387 - RNA, 19 nt, Artificial Sequence
  Description of Artificial Sequence: Synthetic oligonucleotide
uaaagagauaaagaauaau

SEQ ID NO: 23388 - RNA, 19 nt, Artificial Sequence
  Description of Artificial Sequence: Synthetic oligonucleotide
uaauuaaccaaccuuguuu

SEQ ID NO: 23389 - RNA, 19 nt, Artificial Sequence
  Description of Artificial Sequence: Synthetic oligonucleotide
uaauagauuugggucauuu

SEQ ID NO: 23390 - RNA, 19 nt, Artificial Sequence
  Description of Artificial Sequence: Synthetic oligonucleotide
uagaagccugacaacucau

SEQ ID NO: 23391 - RNA, 19 nt, Artificial Sequence
  Description of Artificial Sequence: Synthetic oligonucleotide
uuuucauauuguaaucuau

SEQ ID NO: 23392 - RNA, 19 nt, Artificial Sequence
  Description of Artificial Sequence: Synthetic oligonucleotide
uguuuauaauacuacuacu

SEQ ID NO: 23393 - RNA, 19 nt, Artificial Sequence
  Description of Artificial Sequence: Synthetic oligonucleotide
uguuaucaguaaugcuaaa

SEQ ID NO: 23394 - RNA, 19 nt, Artificial Sequence
  Description of Artificial Sequence: Synthetic oligonucleotide
auguguaauaauguaacau

SEQ ID NO: 23395 - RNA, 19 nt, Artificial Sequence
  Description of Artificial Sequence: Synthetic oligonucleotide
ugauuucccuccagagaaa

SEQ ID NO: 23396 - RNA, 19 nt, Artificial Sequence
  Description of Artificial Sequence: Synthetic oligonucleotide
agcacaauuuaaaacaauc

SEQ ID NO: 23397 - RNA, 19 nt, Artificial Sequence
  Description of Artificial Sequence: Synthetic oligonucleotide
ccuuacuaaguaggugaug

SEQ ID NO: 23398 - RNA, 19 nt, Artificial Sequence
  Description of Artificial Sequence: Synthetic oligonucleotide
gaguuugacaguuuuugac

SEQ ID NO: 23399 - RNA, 19 nt, Artificial Sequence
  Description of Artificial Sequence: Synthetic oligonucleotide
cauuuauauuaaauaacau

SEQ ID NO: 23400 - RNA, 19 nt, Artificial Sequence
  Description of Artificial Sequence: Synthetic oligonucleotide
uguuucucuauaaaguaug

SEQ ID NO: 23401 - RNA, 19 nt, Artificial Sequence
  Description of Artificial Sequence: Synthetic oligonucleotide
gguaauagcuuuagugaau

SEQ ID NO: 23402 - RNA, 19 nt, Artificial Sequence
  Description of Artificial Sequence: Synthetic oligonucleotide
uuaaauuuaguugagcaua

SEQ ID NO: 23403 - RNA, 19 nt, Artificial Sequence
  Description of Artificial Sequence: Synthetic oligonucleotide
agagaacaaaguaaaagua

SEQ ID NO: 23404 - RNA, 19 nt, Artificial Sequence
  Description of Artificial Sequence: Synthetic oligonucleotide
aguguuguccaggaaguca

SEQ ID NO: 23405 - RNA, 19 nt, Artificial Sequence
  Description of Artificial Sequence: Synthetic oligonucleotide
agaauuuuuaacuguacug

SEQ ID NO: 23406 - RNA, 19 nt, Artificial Sequence
  Description of Artificial Sequence: Synthetic oligonucleotide
gaauagguuccccaaucca

SEQ ID NO: 23407 - RNA, 19 nt, Artificial Sequence
  Description of Artificial Sequence: Synthetic oligonucleotide
aucguauuaaaaaacaauu

SEQ ID NO: 23408 - RNA, 19 nt, Artificial Sequence
  Description of Artificial Sequence: Synthetic oligonucleotide
uaacugcccucugaaauaa

SEQ ID NO: 23409 - RNA, 19 nt, Artificial Sequence
  Description of Artificial Sequence: Synthetic oligonucleotide
augggauuagaaacaaaca

SEQ ID NO: 23410 - RNA, 19 nt, Artificial Sequence
  Description of Artificial Sequence: Synthetic oligonucleotide
aaaacucuuaaguccuaaa

SEQ ID NO: 23411 - RNA, 19 nt, Artificial Sequence
  Description of Artificial Sequence: Synthetic oligonucleotide
aaguucucaauguagaggc

SEQ ID NO: 23412 - RNA, 19 nt, Artificial Sequence
  Description of Artificial Sequence: Synthetic oligonucleotide
cauaaaccugugcugaaca

SEQ ID NO: 23413 - RNA, 19 nt, Artificial Sequence
  Description of Artificial Sequence: Synthetic oligonucleotide
auaacuucucauguauauu

SEQ ID NO: 23414 - RNA, 19 nt, Artificial Sequence
  Description of Artificial Sequence: Synthetic oligonucleotide
uacccaauggaaaauauaa

SEQ ID NO: 23415 - RNA, 19 nt, Artificial Sequence
  Description of Artificial Sequence: Synthetic oligonucleotide
augaucagcaaaaagacug

SEQ ID NO: 23416 - RNA, 19 nt, Artificial Sequence
  Description of Artificial Sequence: Synthetic oligonucleotide
ggauuugcagaaguuuuuu

SEQ ID NO: 23417 - RNA, 19 nt, Artificial Sequence
  Description of Artificial Sequence: Synthetic oligonucleotide
ccugaugaaagcuuuggcg

SEQ ID NO: 23418 - RNA, 19 nt, Artificial Sequence
  Description of Artificial Sequence: Synthetic oligonucleotide
gaccccaauauauguauuu

SEQ ID NO: 23419 - RNA, 19 nt, Artificial Sequence
  Description of Artificial Sequence: Synthetic oligonucleotide
uuuugaaucuaugaaccug

SEQ ID NO: 23420 - RNA, 19 nt, Artificial Sequence
  Description of Artificial Sequence: Synthetic oligonucleotide
gaaaagggucagaaggaug

SEQ ID NO: 23421 - RNA, 19 nt, Artificial Sequence
  Description of Artificial Sequence: Synthetic oligonucleotide
gcccagacaucagccuccu

SEQ ID NO: 23422 - RNA, 19 nt, Artificial Sequence
  Description of Artificial Sequence: Synthetic oligonucleotide
uucuuucaccccuuacccc

SEQ ID NO: 23423 - RNA, 19 nt, Artificial Sequence
  Description of Artificial Sequence: Synthetic oligonucleotide
caaagagaaagaguuugaa

SEQ ID NO: 23424 - RNA, 19 nt, Artificial Sequence
  Description of Artificial Sequence: Synthetic oligonucleotide
aacucgagaccauaaagau

SEQ ID NO: 23425 - RNA, 19 nt, Artificial Sequence
  Description of Artificial Sequence: Synthetic oligonucleotide
uauucuuuaguggaggcug

SEQ ID NO: 23426 - RNA, 19 nt, Artificial Sequence
  Description of Artificial Sequence: Synthetic oligonucleotide
ggaugugcauuagccugga

SEQ ID NO: 23427 - RNA, 19 nt, Artificial Sequence
  Description of Artificial Sequence: Synthetic oligonucleotide
auccucaguucucaaaugu

SEQ ID NO: 23428 - RNA, 19 nt, Artificial Sequence
  Description of Artificial Sequence: Synthetic oligonucleotide
uguguggcagccaggauga

SEQ ID NO: 23429 - RNA, 19 nt, Artificial Sequence
  Description of Artificial Sequence: Synthetic oligonucleotide
acuagauccuggguuucca

SEQ ID NO: 23430 - RNA, 19 nt, Artificial Sequence
  Description of Artificial Sequence: Synthetic oligonucleotide
auccuugagauucugaagu

SEQ ID NO: 23431 - RNA, 19 nt, Artificial Sequence
  Description of Artificial Sequence: Synthetic oligonucleotide
uaugaagucugagggaaac

SEQ ID NO: 23432 - RNA, 19 nt, Artificial Sequence
  Description of Artificial Sequence: Synthetic oligonucleotide
ccagagucuguauuuuucu

SEQ ID NO: 23433 - RNA, 19 nt, Artificial Sequence
  Description of Artificial Sequence: Synthetic oligonucleotide
uaaacucccuggcuguucu

SEQ ID NO: 23434 - RNA, 19 nt, Artificial Sequence
  Description of Artificial Sequence: Synthetic oligonucleotide
ugaucggccaguuuucgga

SEQ ID NO: 23435 - RNA, 19 nt, Artificial Sequence
  Description of Artificial Sequence: Synthetic oligonucleotide
aaacacugacuuagguuuc

SEQ ID NO: 23436 - RNA, 19 nt, Artificial Sequence
  Description of Artificial Sequence: Synthetic oligonucleotide
caggaaguugccaugggaa

SEQ ID NO: 23437 - RNA, 19 nt, Artificial Sequence
  Description of Artificial Sequence: Synthetic oligonucleotide
aacaaauaauuugaacuuu

SEQ ID NO: 23438 - RNA, 19 nt, Artificial Sequence
  Description of Artificial Sequence: Synthetic oligonucleotide
uggaacaggguuggaauuc

SEQ ID NO: 23439 - RNA, 19 nt, Artificial Sequence
  Description of Artificial Sequence: Synthetic oligonucleotide
caaccacgcaggaagccua

SEQ ID NO: 23440 - RNA, 19 nt, Artificial Sequence
  Description of Artificial Sequence: Synthetic oligonucleotide
acuauuuaaauccuuggcu

SEQ ID NO: 23441 - RNA, 19 nt, Artificial Sequence
  Description of Artificial Sequence: Synthetic oligonucleotide
uucagguuagugacauuua

SEQ ID NO: 23442 - RNA, 19 nt, Artificial Sequence
  Description of Artificial Sequence: Synthetic oligonucleotide
aaugccaucuagcuagcaa

SEQ ID NO: 23443 - RNA, 19 nt, Artificial Sequence
  Description of Artificial Sequence: Synthetic oligonucleotide
auugcgaccuuaauuuaac

SEQ ID NO: 23444 - RNA, 19 nt, Artificial Sequence
  Description of Artificial Sequence: Synthetic oligonucleotide
cuuuccagucuuagcugag

SEQ ID NO: 23445 - RNA, 19 nt, Artificial Sequence
  Description of Artificial Sequence: Synthetic oligonucleotide
ggcugagaaagcuaaaguu

SEQ ID NO: 23446 - RNA, 19 nt, Artificial Sequence
  Description of Artificial Sequence: Synthetic oligonucleotide
uugguuuugacagguuuuc

SEQ ID NO: 23447 - RNA, 19 nt, Artificial Sequence
  Description of Artificial Sequence: Synthetic oligonucleotide
ccaaaaguaaagaugcuac

SEQ ID NO: 23448 - RNA, 19 nt, Artificial Sequence
  Description of Artificial Sequence: Synthetic oligonucleotide
cuucccacuguauggggga

SEQ ID NO: 23449 - RNA, 19 nt, Artificial Sequence
  Description of Artificial Sequence: Synthetic oligonucleotide
agauugaacuuuccccguc

SEQ ID NO: 23450 - RNA, 19 nt, Artificial Sequence
  Description of Artificial Sequence: Synthetic oligonucleotide
cucccgucuucugccuccc

SEQ ID NO: 23451 - RNA, 19 nt, Artificial Sequence
  Description of Artificial Sequence: Synthetic oligonucleotide
cacuccauaccccgccaag

SEQ ID NO: 23452 - RNA, 19 nt, Artificial Sequence
  Description of Artificial Sequence: Synthetic oligonucleotide
ggaaaggcauguacaaaaa

SEQ ID NO: 23453 - RNA, 19 nt, Artificial Sequence
  Description of Artificial Sequence: Synthetic oligonucleotide
auuaugcaauucaguguuc

SEQ ID NO: 23454 - RNA, 19 nt, Artificial Sequence
  Description of Artificial Sequence: Synthetic oligonucleotide
ccaagucucuguguaacca

SEQ ID NO: 23455 - RNA, 19 nt, Artificial Sequence
  Description of Artificial Sequence: Synthetic oligonucleotide
agcucaguguuuuggugga

SEQ ID NO: 23456 - RNA, 19 nt, Artificial Sequence
  Description of Artificial Sequence: Synthetic oligonucleotide
aaaaaacauuuuaaguuuu

SEQ ID NO: 23457 - RNA, 19 nt, Artificial Sequence
  Description of Artificial Sequence: Synthetic oligonucleotide
uacugauaauuugagguua

SEQ ID NO: 23458 - RNA, 19 nt, Artificial Sequence
  Description of Artificial Sequence: Synthetic oligonucleotide
agaugggaggaugaauugu

SEQ ID NO: 23459 - RNA, 19 nt, Artificial Sequence
  Description of Artificial Sequence: Synthetic oligonucleotide
ucacaucuauccacacugu

SEQ ID NO: 23460 - RNA, 19 nt, Artificial Sequence
  Description of Artificial Sequence: Synthetic oligonucleotide
ucaaacagguugguguggg

SEQ ID NO: 23461 - RNA, 19 nt, Artificial Sequence
  Description of Artificial Sequence: Synthetic oligonucleotide
guucauuggcauucuuugc

SEQ ID NO: 23462 - RNA, 19 nt, Artificial Sequence
  Description of Artificial Sequence: Synthetic oligonucleotide
caauacugcuuaauugcug

SEQ ID NO: 23463 - RNA, 19 nt, Artificial Sequence
  Description of Artificial Sequence: Synthetic oligonucleotide
gauaccauaugaaugaaac

SEQ ID NO: 23464 - RNA, 19 nt, Artificial Sequence
  Description of Artificial Sequence: Synthetic oligonucleotide
caugggcugugauuacugc

SEQ ID NO: 23465 - RNA, 19 nt, Artificial Sequence
  Description of Artificial Sequence: Synthetic oligonucleotide
caaucacugugcuaucggc

SEQ ID NO: 23466 - RNA, 19 nt, Artificial Sequence
  Description of Artificial Sequence: Synthetic oligonucleotide
cagaugaugcuuuggaaga

SEQ ID NO: 23467 - RNA, 19 nt, Artificial Sequence
  Description of Artificial Sequence: Synthetic oligonucleotide
augcagaagcaauaauaaa

SEQ ID NO: 23468 - RNA, 19 nt, Artificial Sequence
  Description of Artificial Sequence: Synthetic oligonucleotide
aguacuugacuaccuacug

SEQ ID NO: 23469 - RNA, 19 nt, Artificial Sequence
  Description of Artificial Sequence: Synthetic oligonucleotide
gguguaaucucaaugcaag

SEQ ID NO: 23470 - RNA, 19 nt, Artificial Sequence
  Description of Artificial Sequence: Synthetic oligonucleotide
gccccaacuuucuuaucca

SEQ ID NO: 23471 - RNA, 19 nt, Artificial Sequence
  Description of Artificial Sequence: Synthetic oligonucleotide
aacuuuuucauaguaagug

SEQ ID NO: 23472 - RNA, 19 nt, Artificial Sequence
  Description of Artificial Sequence: Synthetic oligonucleotide
gcgaagacugagccagauu

SEQ ID NO: 23473 - RNA, 19 nt, Artificial Sequence
  Description of Artificial Sequence: Synthetic oligonucleotide
uggccaauuaaaaacgaaa

SEQ ID NO: 23474 - RNA, 19 nt, Artificial Sequence
  Description of Artificial Sequence: Synthetic oligonucleotide
aaccugacuagguucugua

SEQ ID NO: 23475 - RNA, 19 nt, Artificial Sequence
  Description of Artificial Sequence: Synthetic oligonucleotide
agagccaauuagacuugaa

SEQ ID NO: 23476 - RNA, 19 nt, Artificial Sequence
  Description of Artificial Sequence: Synthetic oligonucleotide
aauacguuuguguuucuag

SEQ ID NO: 23477 - RNA, 19 nt, Artificial Sequence
  Description of Artificial Sequence: Synthetic oligonucleotide
gaaucacagcucaagcauu

SEQ ID NO: 23478 - RNA, 19 nt, Artificial Sequence
  Description of Artificial Sequence: Synthetic oligonucleotide
ucuguuuaucgcucacucu

SEQ ID NO: 23479 - RNA, 19 nt, Artificial Sequence
  Description of Artificial Sequence: Synthetic oligonucleotide
ucccuuguacagccuuauu

SEQ ID NO: 23480 - RNA, 19 nt, Artificial Sequence
  Description of Artificial Sequence: Synthetic oligonucleotide
uuuguuggugcuuugcauu

SEQ ID NO: 23481 - RNA, 19 nt, Artificial Sequence
  Description of Artificial Sequence: Synthetic oligonucleotide
uuugauauugcugugagcc

SEQ ID NO: 23482 - RNA, 19 nt, Artificial Sequence
  Description of Artificial Sequence: Synthetic oligonucleotide
cuugcaugacaucaugagg

SEQ ID NO: 23483 - RNA, 19 nt, Artificial Sequence
  Description of Artificial Sequence: Synthetic oligonucleotide
gccggaugaaacuucucag

SEQ ID NO: 23484 - RNA, 19 nt, Artificial Sequence
  Description of Artificial Sequence: Synthetic oligonucleotide
guccagcaguuuccagucc

SEQ ID NO: 23485 - RNA, 19 nt, Artificial Sequence
  Description of Artificial Sequence: Synthetic oligonucleotide
cuaacaaaugcucccaccu

SEQ ID NO: 23486 - RNA, 19 nt, Artificial Sequence
  Description of Artificial Sequence: Synthetic oligonucleotide
ugaauuuguauaugacugc

SEQ ID NO: 23487 - RNA, 19 nt, Artificial Sequence
  Description of Artificial Sequence: Synthetic oligonucleotide
cauuugugugugugugugu

SEQ ID NO: 23488 - RNA, 19 nt, Artificial Sequence
  Description of Artificial Sequence: Synthetic oligonucleotide
uguuuucagcaaauuccag

SEQ ID NO: 23489 - RNA, 19 nt, Artificial Sequence
  Description of Artificial Sequence: Synthetic oligonucleotide
gauuuguuuccuuuuggcc

SEQ ID NO: 23490 - RNA, 19 nt, Artificial Sequence
  Description of Artificial Sequence: Synthetic oligonucleotide
cuccugcaaagucuccaga

SEQ ID NO: 23491 - RNA, 19 nt, Artificial Sequence
  Description of Artificial Sequence: Synthetic oligonucleotide
aagaaaauuugccaaucuu

SEQ ID NO: 23492 - RNA, 19 nt, Artificial Sequence
  Description of Artificial Sequence: Synthetic oligonucleotide
uuccuacuuucuauuuuua

SEQ ID NO: 23493 - RNA, 19 nt, Artificial Sequence
  Description of Artificial Sequence: Synthetic oligonucleotide
augaugacaaucaaagccg

SEQ ID NO: 23494 - RNA, 19 nt, Artificial Sequence
  Description of Artificial Sequence: Synthetic oligonucleotide
ggccugagaaacacuauuu

SEQ ID NO: 23495 - RNA, 19 nt, Artificial Sequence
  Description of Artificial Sequence: Synthetic oligonucleotide
ugugacuuuuuaaacgauu

SEQ ID NO: 23496 - RNA, 19 nt, Artificial Sequence
  Description of Artificial Sequence: Synthetic oligonucleotide
uagugauguccuuaaaaug

SEQ ID NO: 23497 - RNA, 19 nt, Artificial Sequence
  Description of Artificial Sequence: Synthetic oligonucleotide
guggucugccaaucuguac

SEQ ID NO: 23498 - RNA, 19 nt, Artificial Sequence
  Description of Artificial Sequence: Synthetic oligonucleotide
caaaaugguccuauuuuug

SEQ ID NO: 23499 - RNA, 19 nt, Artificial Sequence
  Description of Artificial Sequence: Synthetic oligonucleotide
gugaagagggacauaagau

SEQ ID NO: 23500 - RNA, 19 nt, Artificial Sequence
  Description of Artificial Sequence: Synthetic oligonucleotide
uaaaaugauguuauacauc

SEQ ID NO: 23501 - RNA, 19 nt, Artificial Sequence
  Description of Artificial Sequence: Synthetic oligonucleotide
caauauguauauauguauu

SEQ ID NO: 23502 - RNA, 19 nt, Artificial Sequence
  Description of Artificial Sequence: Synthetic oligonucleotide
uucuauauagacuuggaga

SEQ ID NO: 23503 - RNA, 19 nt, Artificial Sequence
  Description of Artificial Sequence: Synthetic oligonucleotide
aauacugccaaaacauuua

SEQ ID NO: 23504 - RNA, 19 nt, Artificial Sequence
  Description of Artificial Sequence: Synthetic oligonucleotide
augacaagcuguaucacug

SEQ ID NO: 23505 - RNA, 19 nt, Artificial Sequence
  Description of Artificial Sequence: Synthetic oligonucleotide
gccuucguuuauauuuuuu

SEQ ID NO: 23506 - RNA, 19 nt, Artificial Sequence
  Description of Artificial Sequence: Synthetic oligonucleotide
uuaacugugauaaucccca

SEQ ID NO: 23507 - RNA, 19 nt, Artificial Sequence
  Description of Artificial Sequence: Synthetic oligonucleotide
acaggcacauuaacuguug

SEQ ID NO: 23508 - RNA, 19 nt, Artificial Sequence
  Description of Artificial Sequence: Synthetic oligonucleotide
gcacuuuugaauguccaaa

SEQ ID NO: 23509 - RNA, 19 nt, Artificial Sequence
  Description of Artificial Sequence: Synthetic oligonucleotide
aauuuauauuuuagaaaua

SEQ ID NO: 23510 - RNA, 19 nt, Artificial Sequence
  Description of Artificial Sequence: Synthetic oligonucleotide
aauaaaaagaaagauacuu

SEQ ID NO: 23511 - RNA, 19 nt, Artificial Sequence
  Description of Artificial Sequence: Synthetic oligonucleotide
uacauguucccaaaacaau

SEQ ID NO: 23512 - RNA, 19 nt, Artificial Sequence
  Description of Artificial Sequence: Synthetic oligonucleotide
ugguguggugaauguguga

SEQ ID NO: 23513 - RNA, 19 nt, Artificial Sequence
  Description of Artificial Sequence: Synthetic oligonucleotide
agaaaaacuaacuugauag

SEQ ID NO: 23514 - RNA, 19 nt, Artificial Sequence
  Description of Artificial Sequence: Synthetic oligonucleotide
gggucuaccaauacaaaau

SEQ ID NO: 23515 - RNA, 19 nt, Artificial Sequence
  Description of Artificial Sequence: Synthetic oligonucleotide
uguauuacgaaugccccug

SEQ ID NO: 23516 - RNA, 19 nt, Artificial Sequence
  Description of Artificial Sequence: Synthetic oligonucleotide
guucauguuuuuguuuuaa

SEQ ID NO: 23517 - RNA, 19 nt, Artificial Sequence
  Description of Artificial Sequence: Synthetic oligonucleotide
aaacguguaaaugaagauc

SEQ ID NO: 23518 - RNA, 19 nt, Artificial Sequence
  Description of Artificial Sequence: Synthetic oligonucleotide
cuuuauauuucaauaaaug

SEQ ID NO: 23519 - RNA, 19 nt, Artificial Sequence
  Description of Artificial Sequence: Synthetic oligonucleotide
gauauauaauuuaaaguua

SEQ ID NO: 23520 - RNA, 25 nt, Artificial Sequence
  Description of Artificial Sequence: Synthetic oligonucleotide
gguuuuugagcccauuacuguugga

SEQ ID NO: 23521 - RNA, 25 nt, Artificial Sequence
  Description of Artificial Sequence: Synthetic oligonucleotide
agcuacagggagagaaacagaggag

SEQ ID NO: 23522 - RNA, 25 nt, Artificial Sequence
  Description of Artificial Sequence: Synthetic oligonucleotide
ggagacugcaagagaucauuggagg

SEQ ID NO: 23523 - RNA, 25 nt, Artificial Sequence
  Description of Artificial Sequence: Synthetic oligonucleotide
gccgugggcacgcucuuuacuccau

SEQ ID NO: 23524 - RNA, 25 nt, Artificial Sequence
  Description of Artificial Sequence: Synthetic oligonucleotide
ugugugggacauucauugcggaaua

SEQ ID NO: 23525 - RNA, 25 nt, Artificial Sequence
  Description of Artificial Sequence: Synthetic oligonucleotide
aacaucggaggagaaguuucccaga

SEQ ID NO: 23526 - RNA, 25 nt, Artificial Sequence
  Description of Artificial Sequence: Synthetic oligonucleotide
agcuauggggacuucccauccggcg

SEQ ID NO: 23527 - RNA, 25 nt, Artificial Sequence
  Description of Artificial Sequence: Synthetic oligonucleotide
guuccuggucuuaggcugucuucuc

SEQ ID NO: 23528 - RNA, 25 nt, Artificial Sequence
  Description of Artificial Sequence: Synthetic oligonucleotide
cacagggcugagccuaauccucugc

SEQ ID NO: 23529 - RNA, 25 nt, Artificial Sequence
  Description of Artificial Sequence: Synthetic oligonucleotide
ccagcuuucauuacccucuauccuu

SEQ ID NO: 23530 - RNA, 25 nt, Artificial Sequence
  Description of Artificial Sequence: Synthetic oligonucleotide
uccaaaugaaaaugaaaagguugug

SEQ ID NO: 23531 - RNA, 25 nt, Artificial Sequence
  Description of Artificial Sequence: Synthetic oligonucleotide
gcagcugaauucauccuuuucucug

SEQ ID NO: 23532 - RNA, 25 nt, Artificial Sequence
  Description of Artificial Sequence: Synthetic oligonucleotide
gagaugcuuuggggagagugaagug

SEQ ID NO: 23533 - RNA, 25 nt, Artificial Sequence
  Description of Artificial Sequence: Synthetic oligonucleotide
gagcuggcaguaccccaugucugaa

SEQ ID NO: 23534 - RNA, 25 nt, Artificial Sequence
  Description of Artificial Sequence: Synthetic oligonucleotide
agaagagagcuccgauguggaaauc

SEQ ID NO: 23535 - RNA, 25 nt, Artificial Sequence
  Description of Artificial Sequence: Synthetic oligonucleotide
cagaaaugaagaaaacaacagcggc

SEQ ID NO: 23536 - RNA, 25 nt, Artificial Sequence
  Description of Artificial Sequence: Synthetic oligonucleotide
ccuuuuugugacggucuuggaagug

SEQ ID NO: 23537 - RNA, 25 nt, Artificial Sequence
  Description of Artificial Sequence: Synthetic oligonucleotide
gagcagugccucggcggcccacaca

SEQ ID NO: 23538 - RNA, 25 nt, Artificial Sequence
  Description of Artificial Sequence: Synthetic oligonucleotide
aggguuguacacuugcuauuacaac

SEQ ID NO: 23539 - RNA, 25 nt, Artificial Sequence
  Description of Artificial Sequence: Synthetic oligonucleotide
ccacacucagacagaagagaaugag

SEQ ID NO: 23540 - RNA, 25 nt, Artificial Sequence
  Description of Artificial Sequence: Synthetic oligonucleotide
gcuugaaggcaggcacauuuacauc

SEQ ID NO: 23541 - RNA, 25 nt, Artificial Sequence
  Description of Artificial Sequence: Synthetic oligonucleotide
cuaugugccagacccagauguagcc

SEQ ID NO: 23542 - RNA, 25 nt, Artificial Sequence
  Description of Artificial Sequence: Synthetic oligonucleotide
cuuuguaccucuaggaaugacggau

SEQ ID NO: 23543 - RNA, 25 nt, Artificial Sequence
  Description of Artificial Sequence: Synthetic oligonucleotide
uuauuuagucaucguggaggaugau

SEQ ID NO: 23544 - RNA, 25 nt, Artificial Sequence
  Description of Artificial Sequence: Synthetic oligonucleotide
ugauucugccauuauaccuugucgc

SEQ ID NO: 23545 - RNA, 25 nt, Artificial Sequence
  Description of Artificial Sequence: Synthetic oligonucleotide
cacaacugaucccgagacuccugua

SEQ ID NO: 23546 - RNA, 25 nt, Artificial Sequence
  Description of Artificial Sequence: Synthetic oligonucleotide
aaccuuacacaacagugagggggug

SEQ ID NO: 23547 - RNA, 25 nt, Artificial Sequence
  Description of Artificial Sequence: Synthetic oligonucleotide
gguaccugccuccuacgacagcaga

SEQ ID NO: 23548 - RNA, 25 nt, Artificial Sequence
  Description of Artificial Sequence: Synthetic oligonucleotide
acagggcuuuaaugggaccuucacu

SEQ ID NO: 23549 - RNA, 25 nt, Artificial Sequence
  Description of Artificial Sequence: Synthetic oligonucleotide
uguagggcccuauaucugugaggcc

SEQ ID NO: 23550 - RNA, 25 nt, Artificial Sequence
  Description of Artificial Sequence: Synthetic oligonucleotide
caccgucaaaggaaagaaguuccag

SEQ ID NO: 23551 - RNA, 25 nt, Artificial Sequence
  Description of Artificial Sequence: Synthetic oligonucleotide
gaccaucccauuuaauguuuaugcu

SEQ ID NO: 23552 - RNA, 25 nt, Artificial Sequence
  Description of Artificial Sequence: Synthetic oligonucleotide
uuuaaaagcaacaucagagcuggau

SEQ ID NO: 23553 - RNA, 25 nt, Artificial Sequence
  Description of Artificial Sequence: Synthetic oligonucleotide
ucuagaaauggaagcucuuaaaacc

SEQ ID NO: 23554 - RNA, 25 nt, Artificial Sequence
  Description of Artificial Sequence: Synthetic oligonucleotide
cguguauaagucaggggaaacgauu

SEQ ID NO: 23555 - RNA, 25 nt, Artificial Sequence
  Description of Artificial Sequence: Synthetic oligonucleotide
uguggucaccugugcuguuuuuaac

SEQ ID NO: 23556 - RNA, 25 nt, Artificial Sequence
  Description of Artificial Sequence: Synthetic oligonucleotide
caaugaggugguugaccuucaaugg

SEQ ID NO: 23557 - RNA, 25 nt, Artificial Sequence
  Description of Artificial Sequence: Synthetic oligonucleotide
gacuuacccuggagaagugaaaggc

SEQ ID NO: 23558 - RNA, 25 nt, Artificial Sequence
  Description of Artificial Sequence: Synthetic oligonucleotide
caaaggcaucacaaugcuggaagaa

SEQ ID NO: 23559 - RNA, 25 nt, Artificial Sequence
  Description of Artificial Sequence: Synthetic oligonucleotide
aaucaaagucccauccaucaaauug

SEQ ID NO: 23560 - RNA, 25 nt, Artificial Sequence
  Description of Artificial Sequence: Synthetic oligonucleotide
gguguacacuuugacgguccccgag

SEQ ID NO: 23561 - RNA, 25 nt, Artificial Sequence
  Description of Artificial Sequence: Synthetic oligonucleotide
ggccacggugaaagacaguggagau

SEQ ID NO: 23562 - RNA, 25 nt, Artificial Sequence
  Description of Artificial Sequence: Synthetic oligonucleotide
uuacgaaugugcugcccgccaggcu

SEQ ID NO: 23563 - RNA, 25 nt, Artificial Sequence
  Description of Artificial Sequence: Synthetic oligonucleotide
uaccagggaggucaaagaaaugaag

SEQ ID NO: 23564 - RNA, 25 nt, Artificial Sequence
  Description of Artificial Sequence: Synthetic oligonucleotide
gaaagucacuauuucuguccaugag

SEQ ID NO: 23565 - RNA, 25 nt, Artificial Sequence
  Description of Artificial Sequence: Synthetic oligonucleotide
gaaagguuucauugaaaucaaaccc

SEQ ID NO: 23566 - RNA, 25 nt, Artificial Sequence
  Description of Artificial Sequence: Synthetic oligonucleotide
caccuucagccaguuggaagcuguc

SEQ ID NO: 23567 - RNA, 25 nt, Artificial Sequence
  Description of Artificial Sequence: Synthetic oligonucleotide
caaccugcaugaagucaaacauuuu

SEQ ID NO: 23568 - RNA, 25 nt, Artificial Sequence
  Description of Artificial Sequence: Synthetic oligonucleotide
uguuguagaggugcgggccuaccca

SEQ ID NO: 23569 - RNA, 25 nt, Artificial Sequence
  Description of Artificial Sequence: Synthetic oligonucleotide
accucccaggauauccuggcugaaa

SEQ ID NO: 23570 - RNA, 25 nt, Artificial Sequence
  Description of Artificial Sequence: Synthetic oligonucleotide
aaacaaucugacucugauugaaaau

SEQ ID NO: 23571 - RNA, 25 nt, Artificial Sequence
  Description of Artificial Sequence: Synthetic oligonucleotide
ucucacugagaucaccacugaugug

SEQ ID NO: 23572 - RNA, 25 nt, Artificial Sequence
  Description of Artificial Sequence: Synthetic oligonucleotide
ggaaaagauucaggaaauaagguau

SEQ ID NO: 23573 - RNA, 25 nt, Artificial Sequence
  Description of Artificial Sequence: Synthetic oligonucleotide
ucgaagcaaauuaaagcugauccgu

SEQ ID NO: 23574 - RNA, 25 nt, Artificial Sequence
  Description of Artificial Sequence: Synthetic oligonucleotide
ugcuaaggaagaagacaguggccau

SEQ ID NO: 23575 - RNA, 25 nt, Artificial Sequence
  Description of Artificial Sequence: Synthetic oligonucleotide
uuauacuauuguagcucaaaaugaa

SEQ ID NO: 23576 - RNA, 25 nt, Artificial Sequence
  Description of Artificial Sequence: Synthetic oligonucleotide
agaugcugugaagagcuauacuuuu

SEQ ID NO: 23577 - RNA, 25 nt, Artificial Sequence
  Description of Artificial Sequence: Synthetic oligonucleotide
ugaacuguuaacucaaguuccuuca

SEQ ID NO: 23578 - RNA, 25 nt, Artificial Sequence
  Description of Artificial Sequence: Synthetic oligonucleotide
auccauucuggacuuggucgaugau

SEQ ID NO: 23579 - RNA, 25 nt, Artificial Sequence
  Description of Artificial Sequence: Synthetic oligonucleotide
ucaccauggcucaacugggggacag

SEQ ID NO: 23580 - RNA, 25 nt, Artificial Sequence
  Description of Artificial Sequence: Synthetic oligonucleotide
gacggugaggugcacagcugaaggc

SEQ ID NO: 23581 - RNA, 25 nt, Artificial Sequence
  Description of Artificial Sequence: Synthetic oligonucleotide
cacgccgcuuccugauauugagugg

SEQ ID NO: 23582 - RNA, 25 nt, Artificial Sequence
  Description of Artificial Sequence: Synthetic oligonucleotide
gaugauaugcaaagauauuaagaaa

SEQ ID NO: 23583 - RNA, 25 nt, Artificial Sequence
  Description of Artificial Sequence: Synthetic oligonucleotide
auguaauaaugaaacuuccuggacu

SEQ ID NO: 23584 - RNA, 25 nt, Artificial Sequence
  Description of Artificial Sequence: Synthetic oligonucleotide
uauuuuggccaacaaugucucaaac

SEQ ID NO: 23585 - RNA, 25 nt, Artificial Sequence
  Description of Artificial Sequence: Synthetic oligonucleotide
caucaucacggagauccacucccga

SEQ ID NO: 23586 - RNA, 25 nt, Artificial Sequence
  Description of Artificial Sequence: Synthetic oligonucleotide
agacaggaguaccguggagggccgu

SEQ ID NO: 23587 - RNA, 25 nt, Artificial Sequence
  Description of Artificial Sequence: Synthetic oligonucleotide
ugugacuuucgccaaaguggaggag

SEQ ID NO: 23588 - RNA, 25 nt, Artificial Sequence
  Description of Artificial Sequence: Synthetic oligonucleotide
gaccaucgccgugcgaugccuggcu

SEQ ID NO: 23589 - RNA, 25 nt, Artificial Sequence
  Description of Artificial Sequence: Synthetic oligonucleotide
uaagaaucuccuuggagcugagaac

SEQ ID NO: 23590 - RNA, 25 nt, Artificial Sequence
  Description of Artificial Sequence: Synthetic oligonucleotide
ccgagagcugaagcugguggcuccc

SEQ ID NO: 23591 - RNA, 25 nt, Artificial Sequence
  Description of Artificial Sequence: Synthetic oligonucleotide
cacccugcguucugaacucacggug

SEQ ID NO: 23592 - RNA, 25 nt, Artificial Sequence
  Description of Artificial Sequence: Synthetic oligonucleotide
ggcugcugcaguccuggugcuguug

SEQ ID NO: 23593 - RNA, 25 nt, Artificial Sequence
  Description of Artificial Sequence: Synthetic oligonucleotide
ggugauugugaucaucucacuuauu

SEQ ID NO: 23594 - RNA, 25 nt, Artificial Sequence
  Description of Artificial Sequence: Synthetic oligonucleotide
uguccugguugucauuuggaaacag

SEQ ID NO: 23595 - RNA, 25 nt, Artificial Sequence
  Description of Artificial Sequence: Synthetic oligonucleotide
gaaaccgagguaugaaauucgcugg

SEQ ID NO: 23596 - RNA, 25 nt, Artificial Sequence
  Description of Artificial Sequence: Synthetic oligonucleotide
gagggucauugaaucaaucagccca

SEQ ID NO: 23597 - RNA, 25 nt, Artificial Sequence
  Description of Artificial Sequence: Synthetic oligonucleotide
agauggacaugaauauauuuaugug

SEQ ID NO: 23598 - RNA, 25 nt, Artificial Sequence
  Description of Artificial Sequence: Synthetic oligonucleotide
ggacccgaugcagcugccuuaugac

SEQ ID NO: 23599 - RNA, 25 nt, Artificial Sequence
  Description of Artificial Sequence: Synthetic oligonucleotide
cucaagaugggaguuuccaagagau

SEQ ID NO: 23600 - RNA, 25 nt, Artificial Sequence
  Description of Artificial Sequence: Synthetic oligonucleotide
uggacuagugcuuggucgggucuug

SEQ ID NO: 23601 - RNA, 25 nt, Artificial Sequence
  Description of Artificial Sequence: Synthetic oligonucleotide
ggggucuggagcguuugggaaggug

SEQ ID NO: 23602 - RNA, 25 nt, Artificial Sequence
  Description of Artificial Sequence: Synthetic oligonucleotide
gguugaaggaacagccuauggauua

SEQ ID NO: 23603 - RNA, 25 nt, Artificial Sequence
  Description of Artificial Sequence: Synthetic oligonucleotide
aagccggucccaaccugucaugaaa

SEQ ID NO: 23604 - RNA, 25 nt, Artificial Sequence
  Description of Artificial Sequence: Synthetic oligonucleotide
aguugcagugaagaugcuaaaaccc

SEQ ID NO: 23605 - RNA, 25 nt, Artificial Sequence
  Description of Artificial Sequence: Synthetic oligonucleotide
cacggccagauccagugaaaaacaa

SEQ ID NO: 23606 - RNA, 25 nt, Artificial Sequence
  Description of Artificial Sequence: Synthetic oligonucleotide
agcucucaugucugaacugaagaua

SEQ ID NO: 23607 - RNA, 25 nt, Artificial Sequence
  Description of Artificial Sequence: Synthetic oligonucleotide
aaugacucaccuggggccacauuug

SEQ ID NO: 23608 - RNA, 25 nt, Artificial Sequence
  Description of Artificial Sequence: Synthetic oligonucleotide
gaacauuguaaacuugcugggagcc

SEQ ID NO: 23609 - RNA, 25 nt, Artificial Sequence
  Description of Artificial Sequence: Synthetic oligonucleotide
cugcaccaagucaggccccauuuac

SEQ ID NO: 23610 - RNA, 25 nt, Artificial Sequence
  Description of Artificial Sequence: Synthetic oligonucleotide
caucaucacagaguauugcuucuau

SEQ ID NO: 23611 - RNA, 25 nt, Artificial Sequence
  Description of Artificial Sequence: Synthetic oligonucleotide
uggagauuuggucaacuauuugcau

SEQ ID NO: 23612 - RNA, 25 nt, Artificial Sequence
  Description of Artificial Sequence: Synthetic oligonucleotide
uaagaauagggauagcuuccugagc

SEQ ID NO: 23613 - RNA, 25 nt, Artificial Sequence
  Description of Artificial Sequence: Synthetic oligonucleotide
ccaccacccagagaagccaaagaaa

SEQ ID NO: 23614 - RNA, 25 nt, Artificial Sequence
  Description of Artificial Sequence: Synthetic oligonucleotide
agagcuggauaucuuuggauugaac

SEQ ID NO: 23615 - RNA, 25 nt, Artificial Sequence
  Description of Artificial Sequence: Synthetic oligonucleotide
cccugcugaugaaagcacacggagc

SEQ ID NO: 23616 - RNA, 25 nt, Artificial Sequence
  Description of Artificial Sequence: Synthetic oligonucleotide
cuauguuauuuuaucuuuugaaaac

SEQ ID NO: 23617 - RNA, 25 nt, Artificial Sequence
  Description of Artificial Sequence: Synthetic oligonucleotide
caauggugacuacauggacaugaag

SEQ ID NO: 23618 - RNA, 25 nt, Artificial Sequence
  Description of Artificial Sequence: Synthetic oligonucleotide
gcaggcugauacuacacaguauguc

SEQ ID NO: 23619 - RNA, 25 nt, Artificial Sequence
  Description of Artificial Sequence: Synthetic oligonucleotide
ccccaugcuagaaaggaaagagguu

SEQ ID NO: 23620 - RNA, 25 nt, Artificial Sequence
  Description of Artificial Sequence: Synthetic oligonucleotide
uucuaaauauuccgacauccagaga

SEQ ID NO: 23621 - RNA, 25 nt, Artificial Sequence
  Description of Artificial Sequence: Synthetic oligonucleotide
aucacucuaugaucguccagccuca

SEQ ID NO: 23622 - RNA, 25 nt, Artificial Sequence
  Description of Artificial Sequence: Synthetic oligonucleotide
auauaagaagaaaucuauguuagac

SEQ ID NO: 23623 - RNA, 25 nt, Artificial Sequence
  Description of Artificial Sequence: Synthetic oligonucleotide
cucagaagucaaaaaccuccuuuca

SEQ ID NO: 23624 - RNA, 25 nt, Artificial Sequence
  Description of Artificial Sequence: Synthetic oligonucleotide
agaugauaacucagaaggccuuacu

SEQ ID NO: 23625 - RNA, 25 nt, Artificial Sequence
  Description of Artificial Sequence: Synthetic oligonucleotide
uuuauuggauuuguugagcuucacc

SEQ ID NO: 23626 - RNA, 25 nt, Artificial Sequence
  Description of Artificial Sequence: Synthetic oligonucleotide
cuaucaaguugcccgaggaauggag

SEQ ID NO: 23627 - RNA, 25 nt, Artificial Sequence
  Description of Artificial Sequence: Synthetic oligonucleotide
guuuuuggcuucaaaaaauuguguc

SEQ ID NO: 23628 - RNA, 25 nt, Artificial Sequence
  Description of Artificial Sequence: Synthetic oligonucleotide
ccaccgugaucuggcugcucgcaac

SEQ ID NO: 23629 - RNA, 25 nt, Artificial Sequence
  Description of Artificial Sequence: Synthetic oligonucleotide
cguccuccuggcacaaggaaaaauu

SEQ ID NO: 23630 - RNA, 25 nt, Artificial Sequence
  Description of Artificial Sequence: Synthetic oligonucleotide
ugugaagaucugugacuuuggccug

SEQ ID NO: 23631 - RNA, 25 nt, Artificial Sequence
  Description of Artificial Sequence: Synthetic oligonucleotide
ggccagagacaucaugcaugauucg

SEQ ID NO: 23632 - RNA, 25 nt, Artificial Sequence
  Description of Artificial Sequence: Synthetic oligonucleotide
gaacuaugugucgaaaggcaguacc

SEQ ID NO: 23633 - RNA, 25 nt, Artificial Sequence
  Description of Artificial Sequence: Synthetic oligonucleotide
cuuucugcccgugaaguggauggcu

SEQ ID NO: 23634 - RNA, 25 nt, Artificial Sequence
  Description of Artificial Sequence: Synthetic oligonucleotide
uccugagagcaucuuugacaaccuc

SEQ ID NO: 23635 - RNA, 25 nt, Artificial Sequence
  Description of Artificial Sequence: Synthetic oligonucleotide
cuacaccacacugagugaugucugg

SEQ ID NO: 23636 - RNA, 25 nt, Artificial Sequence
  Description of Artificial Sequence: Synthetic oligonucleotide
gucuuauggcauucugcucugggag

SEQ ID NO: 23637 - RNA, 25 nt, Artificial Sequence
  Description of Artificial Sequence: Synthetic oligonucleotide
gaucuuuucccuugguggcaccccu

SEQ ID NO: 23638 - RNA, 25 nt, Artificial Sequence
  Description of Artificial Sequence: Synthetic oligonucleotide
uuaccccggcaugaugguggauucu

SEQ ID NO: 23639 - RNA, 25 nt, Artificial Sequence
  Description of Artificial Sequence: Synthetic oligonucleotide
uacuuucuacaauaagaucaagagu

SEQ ID NO: 23640 - RNA, 25 nt, Artificial Sequence
  Description of Artificial Sequence: Synthetic oligonucleotide
uggguaccggauggccaagccugac

SEQ ID NO: 23641 - RNA, 25 nt, Artificial Sequence
  Description of Artificial Sequence: Synthetic oligonucleotide
ccacgcuaccagugaagucuacgag

SEQ ID NO: 23642 - RNA, 25 nt, Artificial Sequence
  Description of Artificial Sequence: Synthetic oligonucleotide
gaucauggugaaaugcuggaacagu

SEQ ID NO: 23643 - RNA, 25 nt, Artificial Sequence
  Description of Artificial Sequence: Synthetic oligonucleotide
ugagccggagaagagacccuccuuu

SEQ ID NO: 23644 - RNA, 25 nt, Artificial Sequence
  Description of Artificial Sequence: Synthetic oligonucleotide
uuaccaccugagugagauuguggag

SEQ ID NO: 23645 - RNA, 25 nt, Artificial Sequence
  Description of Artificial Sequence: Synthetic oligonucleotide
gaaucugcugccuggacaauauaaa

SEQ ID NO: 23646 - RNA, 25 nt, Artificial Sequence
  Description of Artificial Sequence: Synthetic oligonucleotide
aaagaguuaugaaaaaauucaccug

SEQ ID NO: 23647 - RNA, 25 nt, Artificial Sequence
  Description of Artificial Sequence: Synthetic oligonucleotide
ggacuuccugaagagugaccauccu

SEQ ID NO: 23648 - RNA, 25 nt, Artificial Sequence
  Description of Artificial Sequence: Synthetic oligonucleotide
ugcuguggcacgcaugcguguggac

SEQ ID NO: 23649 - RNA, 25 nt, Artificial Sequence
  Description of Artificial Sequence: Synthetic oligonucleotide
cucagacaaugcauacauugguguc

SEQ ID NO: 23650 - RNA, 25 nt, Artificial Sequence
  Description of Artificial Sequence: Synthetic oligonucleotide
caccuacaaaaacgaggaagacaag

SEQ ID NO: 23651 - RNA, 25 nt, Artificial Sequence
  Description of Artificial Sequence: Synthetic oligonucleotide
gcugaaggacugggaggguggucug

SEQ ID NO: 23652 - RNA, 25 nt, Artificial Sequence
  Description of Artificial Sequence: Synthetic oligonucleotide
ggaugagcagagacugagcgcugac

SEQ ID NO: 23653 - RNA, 25 nt, Artificial Sequence
  Description of Artificial Sequence: Synthetic oligonucleotide
caguggcuacaucauuccucugccu

SEQ ID NO: 23654 - RNA, 25 nt, Artificial Sequence
  Description of Artificial Sequence: Synthetic oligonucleotide
ugacauugacccugucccugaggag

SEQ ID NO: 23655 - RNA, 25 nt, Artificial Sequence
  Description of Artificial Sequence: Synthetic oligonucleotide
ggaggaccugggcaagaggaacaga

SEQ ID NO: 23656 - RNA, 25 nt, Artificial Sequence
  Description of Artificial Sequence: Synthetic oligonucleotide
acacagcucgcagaccucugaagag

SEQ ID NO: 23657 - RNA, 25 nt, Artificial Sequence
  Description of Artificial Sequence: Synthetic oligonucleotide
gagugccauugagacggguuccagc

SEQ ID NO: 23658 - RNA, 25 nt, Artificial Sequence
  Description of Artificial Sequence: Synthetic oligonucleotide
caguuccaccuucaucaagagagag

SEQ ID NO: 23659 - RNA, 25 nt, Artificial Sequence
  Description of Artificial Sequence: Synthetic oligonucleotide
ggacgagaccauugaagacaucgac

SEQ ID NO: 23660 - RNA, 25 nt, Artificial Sequence
  Description of Artificial Sequence: Synthetic oligonucleotide
caugauggacgacaucggcauagac

SEQ ID NO: 23661 - RNA, 25 nt, Artificial Sequence
  Description of Artificial Sequence: Synthetic oligonucleotide
cucuucagaccugguggaagacagc

SEQ ID NO: 23662 - RNA, 25 nt, Artificial Sequence
  Description of Artificial Sequence: Synthetic oligonucleotide
cuuccuguaacuggcggauucgagg

SEQ ID NO: 23663 - RNA, 25 nt, Artificial Sequence
  Description of Artificial Sequence: Synthetic oligonucleotide
ggguuccuuccacuucuggggccac

SEQ ID NO: 23664 - RNA, 25 nt, Artificial Sequence
  Description of Artificial Sequence: Synthetic oligonucleotide
ccucuggaucccguucagaaaacca

SEQ ID NO: 23665 - RNA, 25 nt, Artificial Sequence
  Description of Artificial Sequence: Synthetic oligonucleotide
acuuuauugcaaugcggagguugag

SEQ ID NO: 23666 - RNA, 25 nt, Artificial Sequence
  Description of Artificial Sequence: Synthetic oligonucleotide
gaggaggacuugguugauguuuaaa

SEQ ID NO: 23667 - RNA, 25 nt, Artificial Sequence
  Description of Artificial Sequence: Synthetic oligonucleotide
agagaaguucccagccaagggccuc

SEQ ID NO: 23668 - RNA, 25 nt, Artificial Sequence
  Description of Artificial Sequence: Synthetic oligonucleotide
cggggagcguucuaaauaugaauga

SEQ ID NO: 23669 - RNA, 25 nt, Artificial Sequence
  Description of Artificial Sequence: Synthetic oligonucleotide
aaugggauauuuugaaaugaacuuu

SEQ ID NO: 23670 - RNA, 25 nt, Artificial Sequence
  Description of Artificial Sequence: Synthetic oligonucleotide
ugucaguguugccucuugcaaugcc

SEQ ID NO: 23671 - RNA, 25 nt, Artificial Sequence
  Description of Artificial Sequence: Synthetic oligonucleotide
cucaguagcaucucaguggugugug

SEQ ID NO: 23672 - RNA, 25 nt, Artificial Sequence
  Description of Artificial Sequence: Synthetic oligonucleotide
gaaguuuggagauagauggauaagg

SEQ ID NO: 23673 - RNA, 25 nt, Artificial Sequence
  Description of Artificial Sequence: Synthetic oligonucleotide
ggaauaauaggccacagaaggugaa

SEQ ID NO: 23674 - RNA, 25 nt, Artificial Sequence
  Description of Artificial Sequence: Synthetic oligonucleotide
acuuugugcuucaaggacauuggug

SEQ ID NO: 23675 - RNA, 25 nt, Artificial Sequence
  Description of Artificial Sequence: Synthetic oligonucleotide
gagaguccaacagacacaauuuaua

SEQ ID NO: 23676 - RNA, 25 nt, Artificial Sequence
  Description of Artificial Sequence: Synthetic oligonucleotide
acugcgacagaacuucagcauugua

SEQ ID NO: 23677 - RNA, 25 nt, Artificial Sequence
  Description of Artificial Sequence: Synthetic oligonucleotide
aauuauguaaauaacucuaaccaag

SEQ ID NO: 23678 - RNA, 25 nt, Artificial Sequence
  Description of Artificial Sequence: Synthetic oligonucleotide
ggcuguguuuagauuguauuaacua

SEQ ID NO: 23679 - RNA, 25 nt, Artificial Sequence
  Description of Artificial Sequence: Synthetic oligonucleotide
aucuucuuuggacuucugaagagac

SEQ ID NO: 23680 - RNA, 25 nt, Artificial Sequence
  Description of Artificial Sequence: Synthetic oligonucleotide
ccacucaauccauccauguacuucc

SEQ ID NO: 23681 - RNA, 25 nt, Artificial Sequence
  Description of Artificial Sequence: Synthetic oligonucleotide
ccucuugaaaccugaugucagcugc

SEQ ID NO: 23682 - RNA, 25 nt, Artificial Sequence
  Description of Artificial Sequence: Synthetic oligonucleotide
cuguugaacuuuuuaaagaagugca

SEQ ID NO: 23683 - RNA, 25 nt, Artificial Sequence
  Description of Artificial Sequence: Synthetic oligonucleotide
augaaaaaccauuuuugaaccuuaa

SEQ ID NO: 23684 - RNA, 25 nt, Artificial Sequence
  Description of Artificial Sequence: Synthetic oligonucleotide
aaagguacugguacuauagcauuuu

SEQ ID NO: 23685 - RNA, 25 nt, Artificial Sequence
  Description of Artificial Sequence: Synthetic oligonucleotide
ugcuaucuuuuuuaguguuaaagag

SEQ ID NO: 23686 - RNA, 25 nt, Artificial Sequence
  Description of Artificial Sequence: Synthetic oligonucleotide
gauaaagaauaauaauuaaccaacc

SEQ ID NO: 23687 - RNA, 25 nt, Artificial Sequence
  Description of Artificial Sequence: Synthetic oligonucleotide
cuuguuuaauagauuugggucauuu

SEQ ID NO: 23688 - RNA, 25 nt, Artificial Sequence
  Description of Artificial Sequence: Synthetic oligonucleotide
uagaagccugacaacucauuuucau

SEQ ID NO: 23689 - RNA, 25 nt, Artificial Sequence
  Description of Artificial Sequence: Synthetic oligonucleotide
uauuguaaucuauguuuauaauacu

SEQ ID NO: 23690 - RNA, 25 nt, Artificial Sequence
  Description of Artificial Sequence: Synthetic oligonucleotide
uacuacuguuaucaguaaugcuaaa

SEQ ID NO: 23691 - RNA, 25 nt, Artificial Sequence
  Description of Artificial Sequence: Synthetic oligonucleotide
auguguaauaauguaacaugauuuc

SEQ ID NO: 23692 - RNA, 25 nt, Artificial Sequence
  Description of Artificial Sequence: Synthetic oligonucleotide
cccuccagagaaagcacaauuuaaa

SEQ ID NO: 23693 - RNA, 25 nt, Artificial Sequence
  Description of Artificial Sequence: Synthetic oligonucleotide
aacaauccuuacuaaguaggugaug

SEQ ID NO: 23694 - RNA, 25 nt, Artificial Sequence
  Description of Artificial Sequence: Synthetic oligonucleotide
gaguuugacaguuuuugacauuuau

SEQ ID NO: 23695 - RNA, 25 nt, Artificial Sequence
  Description of Artificial Sequence: Synthetic oligonucleotide
uauuaaauaacauguuucucuauaa

SEQ ID NO: 23696 - RNA, 25 nt, Artificial Sequence
  Description of Artificial Sequence: Synthetic oligonucleotide
aaguaugguaauagcuuuagugaau

SEQ ID NO: 23697 - RNA, 25 nt, Artificial Sequence
  Description of Artificial Sequence: Synthetic oligonucleotide
uuaaauuuaguugagcauagagaac

SEQ ID NO: 23698 - RNA, 25 nt, Artificial Sequence
  Description of Artificial Sequence: Synthetic oligonucleotide
caaaguaaaaguaguguuguccagg

SEQ ID NO: 23699 - RNA, 25 nt, Artificial Sequence
  Description of Artificial Sequence: Synthetic oligonucleotide
gaagucagaauuuuuaacuguacug

SEQ ID NO: 23700 - RNA, 25 nt, Artificial Sequence
  Description of Artificial Sequence: Synthetic oligonucleotide
gaauagguuccccaauccaucguau

SEQ ID NO: 23701 - RNA, 25 nt, Artificial Sequence
  Description of Artificial Sequence: Synthetic oligonucleotide
uuaaaaaacaauuaacugcccucug

SEQ ID NO: 23702 - RNA, 25 nt, Artificial Sequence
  Description of Artificial Sequence: Synthetic oligonucleotide
gaaauaaugggauuagaaacaaaca

SEQ ID NO: 23703 - RNA, 25 nt, Artificial Sequence
  Description of Artificial Sequence: Synthetic oligonucleotide
aaaacucuuaaguccuaaaaguucu

SEQ ID NO: 23704 - RNA, 25 nt, Artificial Sequence
  Description of Artificial Sequence: Synthetic oligonucleotide
ucaauguagaggcauaaaccugugc

SEQ ID NO: 23705 - RNA, 25 nt, Artificial Sequence
  Description of Artificial Sequence: Synthetic oligonucleotide
cugaacauaacuucucauguauauu

SEQ ID NO: 23706 - RNA, 25 nt, Artificial Sequence
  Description of Artificial Sequence: Synthetic oligonucleotide
uacccaauggaaaauauaaugauca

SEQ ID NO: 23707 - RNA, 25 nt, Artificial Sequence
  Description of Artificial Sequence: Synthetic oligonucleotide
agcaaaaagacuggauuugcagaag

SEQ ID NO: 23708 - RNA, 25 nt, Artificial Sequence
  Description of Artificial Sequence: Synthetic oligonucleotide
ccugaugaaagcuuuggcgacccca

SEQ ID NO: 23709 - RNA, 25 nt, Artificial Sequence
  Description of Artificial Sequence: Synthetic oligonucleotide
aauauauguauuuuuugaaucuaug

SEQ ID NO: 23710 - RNA, 25 nt, Artificial Sequence
  Description of Artificial Sequence: Synthetic oligonucleotide
gaaccugaaaagggucagaaggaug

SEQ ID NO: 23711 - RNA, 25 nt, Artificial Sequence
  Description of Artificial Sequence: Synthetic oligonucleotide
gcccagacaucagccuccuucuuuc

SEQ ID NO: 23712 - RNA, 25 nt, Artificial Sequence
  Description of Artificial Sequence: Synthetic oligonucleotide
caccccuuaccccaaagagaaagag

SEQ ID NO: 23713 - RNA, 25 nt, Artificial Sequence
  Description of Artificial Sequence: Synthetic oligonucleotide
guuugaaacucgagaccauaaagau

SEQ ID NO: 23714 - RNA, 25 nt, Artificial Sequence
  Description of Artificial Sequence: Synthetic oligonucleotide
uauucuuuaguggaggcuggaugug

SEQ ID NO: 23715 - RNA, 25 nt, Artificial Sequence
  Description of Artificial Sequence: Synthetic oligonucleotide
gcauuagccuggauccucaguucuc

SEQ ID NO: 23716 - RNA, 25 nt, Artificial Sequence
  Description of Artificial Sequence: Synthetic oligonucleotide
caaauguguguggcagccaggauga

SEQ ID NO: 23717 - RNA, 25 nt, Artificial Sequence
  Description of Artificial Sequence: Synthetic oligonucleotide
acuagauccuggguuuccauccuug

SEQ ID NO: 23718 - RNA, 25 nt, Artificial Sequence
  Description of Artificial Sequence: Synthetic oligonucleotide
gagauucugaaguaugaagucugag

SEQ ID NO: 23719 - RNA, 25 nt, Artificial Sequence
  Description of Artificial Sequence: Synthetic oligonucleotide
gggaaaccagagucuguauuuuucu

SEQ ID NO: 23720 - RNA, 25 nt, Artificial Sequence
  Description of Artificial Sequence: Synthetic oligonucleotide
uaaacucccuggcuguucugaucgg

SEQ ID NO: 23721 - RNA, 25 nt, Artificial Sequence
  Description of Artificial Sequence: Synthetic oligonucleotide
gccaguuuucggaaacacugacuua

SEQ ID NO: 23722 - RNA, 25 nt, Artificial Sequence
  Description of Artificial Sequence: Synthetic oligonucleotide
agguuucaggaaguugccaugggaa

SEQ ID NO: 23723 - RNA, 25 nt, Artificial Sequence
  Description of Artificial Sequence: Synthetic oligonucleotide
aacaaauaauuugaacuuuggaaca

SEQ ID NO: 23724 - RNA, 25 nt, Artificial Sequence
  Description of Artificial Sequence: Synthetic oligonucleotide
aggguuggaauucaaccacgcagga

SEQ ID NO: 23725 - RNA, 25 nt, Artificial Sequence
  Description of Artificial Sequence: Synthetic oligonucleotide
aagccuacuauuuaaauccuuggcu

SEQ ID NO: 23726 - RNA, 25 nt, Artificial Sequence
  Description of Artificial Sequence: Synthetic oligonucleotide
uucagguuagugacauuuaaugcca

SEQ ID NO: 23727 - RNA, 25 nt, Artificial Sequence
  Description of Artificial Sequence: Synthetic oligonucleotide
aucuagcuagcaauugcgaccuuaa

SEQ ID NO: 23728 - RNA, 25 nt, Artificial Sequence
  Description of Artificial Sequence: Synthetic oligonucleotide
auuuaacuuuccagucuuagcugag

SEQ ID NO: 23729 - RNA, 25 nt, Artificial Sequence
  Description of Artificial Sequence: Synthetic oligonucleotide
ggcugagaaagcuaaaguuugguuu

SEQ ID NO: 23730 - RNA, 25 nt, Artificial Sequence
  Description of Artificial Sequence: Synthetic oligonucleotide
uugacagguuuuccaaaaguaaaga

SEQ ID NO: 23731 - RNA, 25 nt, Artificial Sequence
  Description of Artificial Sequence: Synthetic oligonucleotide
augcuacuucccacuguauggggga

SEQ ID NO: 23732 - RNA, 25 nt, Artificial Sequence
  Description of Artificial Sequence: Synthetic oligonucleotide
agauugaacuuuccccgucucccgu

SEQ ID NO: 23733 - RNA, 25 nt, Artificial Sequence
  Description of Artificial Sequence: Synthetic oligonucleotide
ucuucugccucccacuccauacccc

SEQ ID NO: 23734 - RNA, 25 nt, Artificial Sequence
  Description of Artificial Sequence: Synthetic oligonucleotide
cgccaaggaaaggcauguacaaaaa

SEQ ID NO: 23735 - RNA, 25 nt, Artificial Sequence
  Description of Artificial Sequence: Synthetic oligonucleotide
auuaugcaauucaguguuccaaguc

SEQ ID NO: 23736 - RNA, 25 nt, Artificial Sequence
  Description of Artificial Sequence: Synthetic oligonucleotide
cucuguguaaccagcucaguguuuu

SEQ ID NO: 23737 - RNA, 25 nt, Artificial Sequence
  Description of Artificial Sequence: Synthetic oligonucleotide
ugguggaaaaaacauuuuaaguuuu

SEQ ID NO: 23738 - RNA, 25 nt, Artificial Sequence
  Description of Artificial Sequence: Synthetic oligonucleotide
uacugauaauuugagguuagauggg

SEQ ID NO: 23739 - RNA, 25 nt, Artificial Sequence
  Description of Artificial Sequence: Synthetic oligonucleotide
gaggaugaauugucacaucuaucca

SEQ ID NO: 23740 - RNA, 25 nt, Artificial Sequence
  Description of Artificial Sequence: Synthetic oligonucleotide
acacugucaaacagguugguguggg

SEQ ID NO: 23741 - RNA, 25 nt, Artificial Sequence
  Description of Artificial Sequence: Synthetic oligonucleotide
guucauuggcauucuuugcaauacu

SEQ ID NO: 23742 - RNA, 25 nt, Artificial Sequence
  Description of Artificial Sequence: Synthetic oligonucleotide
ugcuuaauugcugauaccauaugaa

SEQ ID NO: 23743 - RNA, 25 nt, Artificial Sequence
  Description of Artificial Sequence: Synthetic oligonucleotide
augaaacaugggcugugauuacugc

SEQ ID NO: 23744 - RNA, 25 nt, Artificial Sequence
  Description of Artificial Sequence: Synthetic oligonucleotide
caaucacugugcuaucggcagauga

SEQ ID NO: 23745 - RNA, 25 nt, Artificial Sequence
  Description of Artificial Sequence: Synthetic oligonucleotide
augcuuuggaagaugcagaagcaau

SEQ ID NO: 23746 - RNA, 25 nt, Artificial Sequence
  Description of Artificial Sequence: Synthetic oligonucleotide
uaauaaaguacuugacuaccuacug

SEQ ID NO: 23747 - RNA, 25 nt, Artificial Sequence
  Description of Artificial Sequence: Synthetic oligonucleotide
gguguaaucucaaugcaagccccaa

SEQ ID NO: 23748 - RNA, 25 nt, Artificial Sequence
  Description of Artificial Sequence: Synthetic oligonucleotide
acuuucuuauccaacuuuuucauag

SEQ ID NO: 23749 - RNA, 25 nt, Artificial Sequence
  Description of Artificial Sequence: Synthetic oligonucleotide
guaagugcgaagacugagccagauu

SEQ ID NO: 23750 - RNA, 25 nt, Artificial Sequence
  Description of Artificial Sequence: Synthetic oligonucleotide
uggccaauuaaaaacgaaaaccuga

SEQ ID NO: 23751 - RNA, 25 nt, Artificial Sequence
  Description of Artificial Sequence: Synthetic oligonucleotide
acuagguucuguagagccaauuaga

SEQ ID NO: 23752 - RNA, 25 nt, Artificial Sequence
  Description of Artificial Sequence: Synthetic oligonucleotide
acuugaaauacguuuguguuucuag

SEQ ID NO: 23753 - RNA, 25 nt, Artificial Sequence
  Description of Artificial Sequence: Synthetic oligonucleotide
gaaucacagcucaagcauucuguuu

SEQ ID NO: 23754 - RNA, 25 nt, Artificial Sequence
  Description of Artificial Sequence: Synthetic oligonucleotide
uaucgcucacucucccuuguacagc

SEQ ID NO: 23755 - RNA, 25 nt, Artificial Sequence
  Description of Artificial Sequence: Synthetic oligonucleotide
ccuuauuuuguuggugcuuugcauu

SEQ ID NO: 23756 - RNA, 25 nt, Artificial Sequence
  Description of Artificial Sequence: Synthetic oligonucleotide
uuugauauugcugugagccuugcau

SEQ ID NO: 23757 - RNA, 25 nt, Artificial Sequence
  Description of Artificial Sequence: Synthetic oligonucleotide
ugacaucaugaggccggaugaaacu

SEQ ID NO: 23758 - RNA, 25 nt, Artificial Sequence
  Description of Artificial Sequence: Synthetic oligonucleotide
uucucaguccagcaguuuccagucc

SEQ ID NO: 23759 - RNA, 25 nt, Artificial Sequence
  Description of Artificial Sequence: Synthetic oligonucleotide
cuaacaaaugcucccaccugaauuu

SEQ ID NO: 23760 - RNA, 25 nt, Artificial Sequence
  Description of Artificial Sequence: Synthetic oligonucleotide
uguauaugacugcauuugugugugu

SEQ ID NO: 23761 - RNA, 25 nt, Artificial Sequence
  Description of Artificial Sequence: Synthetic oligonucleotide
uguguguguuuucagcaaauuccag

SEQ ID NO: 23762 - RNA, 25 nt, Artificial Sequence
  Description of Artificial Sequence: Synthetic oligonucleotide
gauuuguuuccuuuuggccuccugc

SEQ ID NO: 23763 - RNA, 25 nt, Artificial Sequence
  Description of Artificial Sequence: Synthetic oligonucleotide
caaagucuccagaagaaaauuugcc

SEQ ID NO: 23764 - RNA, 25 nt, Artificial Sequence
  Description of Artificial Sequence: Synthetic oligonucleotide
caaucuuuccuacuuucuauuuuua

SEQ ID NO: 23765 - RNA, 25 nt, Artificial Sequence
  Description of Artificial Sequence: Synthetic oligonucleotide
augaugacaaucaaagccggccuga

SEQ ID NO: 23766 - RNA, 25 nt, Artificial Sequence
  Description of Artificial Sequence: Synthetic oligonucleotide
agaaacacuauuugugacuuuuuaa

SEQ ID NO: 23767 - RNA, 25 nt, Artificial Sequence
  Description of Artificial Sequence: Synthetic oligonucleotide
aacgauuagugauguccuuaaaaug

SEQ ID NO: 23768 - RNA, 25 nt, Artificial Sequence
  Description of Artificial Sequence: Synthetic oligonucleotide
guggucugccaaucuguacaaaaug

SEQ ID NO: 23769 - RNA, 25 nt, Artificial Sequence
  Description of Artificial Sequence: Synthetic oligonucleotide
gguccuauuuuugugaagagggaca

SEQ ID NO: 23770 - RNA, 25 nt, Artificial Sequence
  Description of Artificial Sequence: Synthetic oligonucleotide
auaagauaaaaugauguuauacauc

SEQ ID NO: 23771 - RNA, 25 nt, Artificial Sequence
  Description of Artificial Sequence: Synthetic oligonucleotide
caauauguauauauguauuucuaua

SEQ ID NO: 23772 - RNA, 25 nt, Artificial Sequence
  Description of Artificial Sequence: Synthetic oligonucleotide
auagacuuggagaauacugccaaaa

SEQ ID NO: 23773 - RNA, 25 nt, Artificial Sequence
  Description of Artificial Sequence: Synthetic oligonucleotide
acauuuaugacaagcuguaucacug

SEQ ID NO: 23774 - RNA, 25 nt, Artificial Sequence
  Description of Artificial Sequence: Synthetic oligonucleotide
gccuucguuuauauuuuuuuaacug

SEQ ID NO: 23775 - RNA, 25 nt, Artificial Sequence
  Description of Artificial Sequence: Synthetic oligonucleotide
gugauaauccccacaggcacauuaa

SEQ ID NO: 23776 - RNA, 25 nt, Artificial Sequence
  Description of Artificial Sequence: Synthetic oligonucleotide
acuguugcacuuuugaauguccaaa

SEQ ID NO: 23777 - RNA, 25 nt, Artificial Sequence
  Description of Artificial Sequence: Synthetic oligonucleotide
aauuuauauuuuagaaauaauaaaa

SEQ ID NO: 23778 - RNA, 25 nt, Artificial Sequence
  Description of Artificial Sequence: Synthetic oligonucleotide
aagaaagauacuuacauguucccaa

SEQ ID NO: 23779 - RNA, 25 nt, Artificial Sequence
  Description of Artificial Sequence: Synthetic oligonucleotide
aaacaaugguguggugaauguguga

SEQ ID NO: 23780 - RNA, 25 nt, Artificial Sequence
  Description of Artificial Sequence: Synthetic oligonucleotide
agaaaaacuaacuugauagggucua

SEQ ID NO: 23781 - RNA, 25 nt, Artificial Sequence
  Description of Artificial Sequence: Synthetic oligonucleotide
accaauacaaaauguauuacgaaug

SEQ ID NO: 23782 - RNA, 25 nt, Artificial Sequence
  Description of Artificial Sequence: Synthetic oligonucleotide
gccccuguucauguuuuuguuuuaa

SEQ ID NO: 23783 - RNA, 25 nt, Artificial Sequence
  Description of Artificial Sequence: Synthetic oligonucleotide
aaacguguaaaugaagaucuuuaua

SEQ ID NO: 23784 - RNA, 25 nt, Artificial Sequence
  Description of Artificial Sequence: Synthetic oligonucleotide
auuucaauaaaugauauauaauuua

SEQ ID NO: 23785 - RNA, 5718 nt, Homo sapiens
cuccugaggcugccagcagccagcagugacugcccgcccuaucugggacccaggaucgcucugugagcaacuuggagccagagaggagaucaacaaggaggaggagagagccggccccucagcccugcugcccagcagcagccugugcucgcccugcccaacgcagacagccagacccagggcggccccucuggcggcucugcuccucccgaaggaugcuuggggagugaggcgaagcugggccgcuccucuccccuacagcagcccccuuccuccaucccucuguucuccugagccuucaggagccugcaccaguccugccuguccuucuacucagcuguuacccacucugggaccagcagucuuucugauaacugggagagggcaguaaggaggacuuccuggagggggugacuguccagagccuggaacugugcccacaccagaagccaucagcagcaaggacaccaugcggcuuccgggugcgaugccagcucuggcccucaaaggcgagcugcuguugcugucucuccuguuacuucuggaaccacagaucucucagggccuggucgucacacccccggggccagagcuuguccucaaugucuccagcaccuucguucugaccugcucggguucagcuccgguggugugggaacggaugucccaggagcccccacaggaaauggccaaggcccaggauggcaccuucuccagcgugcucacacugaccaaccucacugggcuagacacgggagaauacuuuugcacccacaaugacucccguggacuggagaccgaugagcggaaacggcucuacaucuuugugccagaucccaccgugggcuuccucccuaaugaugccgaggaacuauucaucuuucucacggaaauaacugagaucaccauuccaugccgaguaacagacccacagcugguggugacacugcacgagaagaaaggggacguugcacugccuguccccuaugaucaccaacguggcuuuucugguaucuuugaggacagaagcuacaucugcaaaaccaccauuggggacagggagguggauucugaugccuacuaugucuacagacuccaggugucauccaucaacgucucugugaacgcagugcagacugugguccgccagggugagaacaucacccucaugugcauugugaucgggaaugagguggucaacuucgaguggacauacccccgcaaagaaagugggcggcugguggagccggugacugacuuccucuuggauaugccuuaccacauccgcuccauccugcacauccccagugccgaguuagaagacucggggaccuacaccugcaaugugacggagagugugaaugaccaucaggaugaaaaggccaucaacaucaccgugguugagagcggcuacgugcggcuccugggagaggugggcacacuacaauuugcugagcugcaucggagccggacacugcagguaguguucgaggccuacccaccgcccacuguccugugguucaaagacaaccgcacccugggcgacuccagcgcuggcgaaaucgcccuguccacgcgcaacgugucggagacccgguaugugucagagcugacacugguucgcgugaagguggcagaggcuggccacuacaccaugcgggccuuccaugaggaugcugagguccagcucuccuuccagcuacagaucaaugucccuguccgagugcuggagcuaagugagagccacccugacaguggggaacagacaguccgcugucguggccggggcaugccccagccgaacaucaucuggucugccugcagagaccucaaaagguguccacgugagcugccgcccacgcugcuggggaacaguuccgaagaggagagccagcuggagacuaacgugacguacugggaggaggagcaggaguuugagguggugagcacacugcgucugcagcacguggaucggccacugucggugcgcugcacgcugcgcaacgcugugggccaggacacgcaggaggucaucguggugccacacuccuugcccuuuaaggugguggugaucucagccauccuggcccugguggugcucaccaucaucucccuuaucauccucaucaugcuuuggcagaagaagccacguuacgagauccgauggaaggugauugagucugugagcucugacggccaugaguacaucuacguggaccccaugcagcugcccuaugacuccacgugggagcugccgcgggaccagcuugugcugggacgcacccucggcucuggggccuuugggcaggugguggaggccacggcucauggccugagccauucucaggccacgaugaaaguggccgucaagaugcuuaaauccacagcccgcagcagugagaagcaagcccuuaugucggagcugaagaucaugagucaccuugggccccaccugaacguggucaaccuguugggggccugcaccaaaggaggacccaucuauaucaucacugaguacugccgcuacggagaccugguggacuaccugcaccgcaacaaacacaccuuccugcagcaccacuccgacaagcgccgcccgcccagcgcggagcucuacagcaaugcucugcccguugggcucccccugcccagccauguguccuugaccggggagagcgacgguggcuacauggacaugagcaaggacgagucgguggacuaugugcccaugcuggacaugaaaggagacgucaaauaugcagacaucgaguccuccaacuacauggccccuuacgauaacuacguucccucugccccugagaggaccugccgagcaacuuugaucaacgagucuccagugcuaagcuacauggaccucgugggcuucagcuaccagguggccaauggcauggaguuucuggccuccaagaacugcguccacagagaccuggcggcuaggaacgugcucaucugugaaggcaagcuggucaagaucugugacuuuggccuggcucgagacaucaugcgggacucgaauuacaucuccaaaggcagcaccuuuuugccuuuaaaguggauggcuccggagagcaucuucaacagccucuacaccacccugagcgacgugugguccuucgggauccugcucugggagaucuucaccuuggguggcaccccuuacccagagcugcccaugaacgagcaguucuacaaugccaucaaacgggguuaccgcauggcccagccugcccaugccuccgacgagaucuaugagaucaugcagaagugcugggaagagaaguuugagauucggccccccuucucccagcuggugcugcuucucgagagacuguugggcgaagguuacaaaaagaaguaccagcagguggaugaggaguuucugaggagugaccacccagccauccuucggucccaggcccgcuugccuggguuccauggccuccgaucuccccuggacaccagcuccguccucuauacugccgugcagcccaaugagggugacaacgacuauaucaucccccugccugaccccaaacccgagguugcugacgagggcccacuggaggguucccccagccuagccagcuccacccugaaugaagucaacaccuccucaaccaucuccugugacagcccccuggagccccaggacgaaccagagccagagccccagcuugagcuccagguggagccggagccagagcuggaacaguugccggauucggggugcccugcgccucgggcggaagcagaggauagcuuccuguagggggcuggccccuacccugcccugccugaagcucccccccugccagcacccagcaucuccuggccuggccugaccgggcuuccugucagccaggcugcccuuaucagcuguccccuucuggaagcuuucugcuccugacguguugugccccaaacccuggggcuggcuuaggaggcaagaaaacugcaggggccgugaccagcccucugccuccagggaggccaacugacucugagccaggguucccccagggaacucaguuuucccauauguaagaugggaaaguuaggcuugaugacccagaaucuaggauucucucccuggcugacagguggggagaccgaaucccucccugggaagauucuuggaguuacugaggugguaaauuaacuuuuuucuguucagccagcuaccccucaaggaaucauagcucucuccucgcacuuuuauccacccaggagcuagggaagagacccuagccucccuggcugcuggcugagcuagggccuagccuugagcaguguugccucauccagaagaaagccagucuccucccuaugaugccagucccugcguucccuggcccgagcuggucuggggccauuaggcagccuaauuaaugcuggaggcugagccaaguacaggacacccccagccugcagcccuugcccagggcacuuggagcacacgcagccauagcaagugccugugucccuguccuucaggcccaucaguccuggggcuuuuucuuuaucacccucagucuuaauccauccaccagagucuagaaggccagacgggccccgcaucugugaugagaauguaaaugugccaguguggaguggccacgugugugugccaguauauggcccuggcucugcauuggaccugcuaugaggcuuuggaggaaucccucacccucucugggccucaguuuccccuucaaaaaaugaauaagucggacuuauuaacucugagugccuugccagcacuaacauucuagaguauuccaggugguugcacauuuguccagaugaagcaaggccauauacccuaaacuuccauccugggggucagcugggcuccugggagauuccagaucacacaucacacucuggggacucaggaaccaugccccuuccccaggcccccagcaagucucaagaacacagcugcacaggccuugacuuagagugacagccgguguccuggaaagcccccagcagcugccccagggacaugggaagaccacgggaccucuuucacuacccacgaugaccuccggggguauccugggcaaaagggacaaagagggcaaaugagaucaccuccugcagcccaccacuccagcaccugugccgaggucugcgucgaagacagaauggacagugaggacaguuaugucuuguaaaagacaagaagcuucagauggguaccccaagaaggaugugagaggugggcgcuuuggagguuugccccucacccaccagcugccccaucccugaggcagcgcuccauggggguaugguuuugucacugcccagaccuagcagugacaucucauuguccccagcccagugggcauuggaggugccaggggagucaggguuguagccaagacgcccccgcacggggaggguugggaagggggugcaggaagcucaaccccucugggcaccaacccugcauugcagguuggcaccuuacuucccugggauccccagaguugguccaaggagggagaguggguucucaauacgguaccaaagauauaaucaccuagguuuacaaauauuuuuaggacucacguuaacucacauuuauacagcagaaaugcuauuuuguaugcuguuaaguuuuucuaucuguguacuuuuuuuuaagggaaagauuuuaauauuaaaccuggugcuucucacucacaaaaa

SEQ ID NO: 23786 - RNA, 19 nt, Artificial Sequence
  Description of Artificial Sequence: Synthetic oligonucleotide
cuccugaggcugccagcag

SEQ ID NO: 23787 - RNA, 19 nt, Artificial Sequence
  Description of Artificial Sequence: Synthetic oligonucleotide
gccagcagugacugcccgc

SEQ ID NO: 23788 - RNA, 19 nt, Artificial Sequence
  Description of Artificial Sequence: Synthetic oligonucleotide
cccuaucugggacccagga

SEQ ID NO: 23789 - RNA, 19 nt, Artificial Sequence
  Description of Artificial Sequence: Synthetic oligonucleotide
aucgcucugugagcaacuu

SEQ ID NO: 23790 - RNA, 19 nt, Artificial Sequence
  Description of Artificial Sequence: Synthetic oligonucleotide
uggagccagagaggagauc

SEQ ID NO: 23791 - RNA, 19 nt, Artificial Sequence
  Description of Artificial Sequence: Synthetic oligonucleotide
caacaaggaggaggagaga

SEQ ID NO: 23792 - RNA, 19 nt, Artificial Sequence
  Description of Artificial Sequence: Synthetic oligonucleotide
agccggccccucagcccug

SEQ ID NO: 23793 - RNA, 19 nt, Artificial Sequence
  Description of Artificial Sequence: Synthetic oligonucleotide
gcugcccagcagcagccug

SEQ ID NO: 23794 - RNA, 19 nt, Artificial Sequence
  Description of Artificial Sequence: Synthetic oligonucleotide
gugcucgcccugcccaacg

SEQ ID NO: 23795 - RNA, 19 nt, Artificial Sequence
  Description of Artificial Sequence: Synthetic oligonucleotide
gcagacagccagacccagg

SEQ ID NO: 23796 - RNA, 19 nt, Artificial Sequence
  Description of Artificial Sequence: Synthetic oligonucleotide
ggcggccccucuggcggcu

SEQ ID NO: 23797 - RNA, 19 nt, Artificial Sequence
  Description of Artificial Sequence: Synthetic oligonucleotide
ucugcuccucccgaaggau

SEQ ID NO: 23798 - RNA, 19 nt, Artificial Sequence
  Description of Artificial Sequence: Synthetic oligonucleotide
ugcuuggggagugaggcga

SEQ ID NO: 23799 - RNA, 19 nt, Artificial Sequence
  Description of Artificial Sequence: Synthetic oligonucleotide
aagcugggccgcuccucuc

SEQ ID NO: 23800 - RNA, 19 nt, Artificial Sequence
  Description of Artificial Sequence: Synthetic oligonucleotide
ccccuacagcagcccccuu

SEQ ID NO: 23801 - RNA, 19 nt, Artificial Sequence
  Description of Artificial Sequence: Synthetic oligonucleotide
uccuccaucccucuguucu

SEQ ID NO: 23802 - RNA, 19 nt, Artificial Sequence
  Description of Artificial Sequence: Synthetic oligonucleotide
uccugagccuucaggagcc

SEQ ID NO: 23803 - RNA, 19 nt, Artificial Sequence
  Description of Artificial Sequence: Synthetic oligonucleotide
cugcaccaguccugccugu

SEQ ID NO: 23804 - RNA, 19 nt, Artificial Sequence
  Description of Artificial Sequence: Synthetic oligonucleotide
uccuucuacucagcuguua

SEQ ID NO: 23805 - RNA, 19 nt, Artificial Sequence
  Description of Artificial Sequence: Synthetic oligonucleotide
acccacucugggaccagca

SEQ ID NO: 23806 - RNA, 19 nt, Artificial Sequence
  Description of Artificial Sequence: Synthetic oligonucleotide
agucuuucugauaacuggg

SEQ ID NO: 23807 - RNA, 19 nt, Artificial Sequence
  Description of Artificial Sequence: Synthetic oligonucleotide
gagagggcaguaaggagga

SEQ ID NO: 23808 - RNA, 19 nt, Artificial Sequence
  Description of Artificial Sequence: Synthetic oligonucleotide
acuuccuggagggggugac

SEQ ID NO: 23809 - RNA, 19 nt, Artificial Sequence
  Description of Artificial Sequence: Synthetic oligonucleotide
cuguccagagccuggaacu

SEQ ID NO: 23810 - RNA, 19 nt, Artificial Sequence
  Description of Artificial Sequence: Synthetic oligonucleotide
ugugcccacaccagaagcc

SEQ ID NO: 23811 - RNA, 19 nt, Artificial Sequence
  Description of Artificial Sequence: Synthetic oligonucleotide
caucagcagcaaggacacc

SEQ ID NO: 23812 - RNA, 19 nt, Artificial Sequence
  Description of Artificial Sequence: Synthetic oligonucleotide
caugcggcuuccgggugcg

SEQ ID NO: 23813 - RNA, 19 nt, Artificial Sequence
  Description of Artificial Sequence: Synthetic oligonucleotide
gaugccagcucuggcccuc

SEQ ID NO: 23814 - RNA, 19 nt, Artificial Sequence
  Description of Artificial Sequence: Synthetic oligonucleotide
caaaggcgagcugcuguug

SEQ ID NO: 23815 - RNA, 19 nt, Artificial Sequence
  Description of Artificial Sequence: Synthetic oligonucleotide
gcugucucuccuguuacuu

SEQ ID NO: 23816 - RNA, 19 nt, Artificial Sequence
  Description of Artificial Sequence: Synthetic oligonucleotide
ucuggaaccacagaucucu

SEQ ID NO: 23817 - RNA, 19 nt, Artificial Sequence
  Description of Artificial Sequence: Synthetic oligonucleotide
ucagggccuggucgucaca

SEQ ID NO: 23818 - RNA, 19 nt, Artificial Sequence
  Description of Artificial Sequence: Synthetic oligonucleotide
acccccggggccagagcuu

SEQ ID NO: 23819 - RNA, 19 nt, Artificial Sequence
  Description of Artificial Sequence: Synthetic oligonucleotide
uguccucaaugucuccagc

SEQ ID NO: 23820 - RNA, 19 nt, Artificial Sequence
  Description of Artificial Sequence: Synthetic oligonucleotide
caccuucguucugaccugc

SEQ ID NO: 23821 - RNA, 19 nt, Artificial Sequence
  Description of Artificial Sequence: Synthetic oligonucleotide
cucggguucagcuccggug

SEQ ID NO: 23822 - RNA, 19 nt, Artificial Sequence
  Description of Artificial Sequence: Synthetic oligonucleotide
ggugugggaacggaugucc

SEQ ID NO: 23823 - RNA, 19 nt, Artificial Sequence
  Description of Artificial Sequence: Synthetic oligonucleotide
ccaggagcccccacaggaa

SEQ ID NO: 23824 - RNA, 19 nt, Artificial Sequence
  Description of Artificial Sequence: Synthetic oligonucleotide
aauggccaaggcccaggau

SEQ ID NO: 23825 - RNA, 19 nt, Artificial Sequence
  Description of Artificial Sequence: Synthetic oligonucleotide
uggcaccuucuccagcgug

SEQ ID NO: 23826 - RNA, 19 nt, Artificial Sequence
  Description of Artificial Sequence: Synthetic oligonucleotide
gcucacacugaccaaccuc

SEQ ID NO: 23827 - RNA, 19 nt, Artificial Sequence
  Description of Artificial Sequence: Synthetic oligonucleotide
cacugggcuagacacggga

SEQ ID NO: 23828 - RNA, 19 nt, Artificial Sequence
  Description of Artificial Sequence: Synthetic oligonucleotide
agaauacuuuugcacccac

SEQ ID NO: 23829 - RNA, 19 nt, Artificial Sequence
  Description of Artificial Sequence: Synthetic oligonucleotide
caaugacucccguggacug

SEQ ID NO: 23830 - RNA, 19 nt, Artificial Sequence
  Description of Artificial Sequence: Synthetic oligonucleotide
ggagaccgaugagcggaaa

SEQ ID NO: 23831 - RNA, 19 nt, Artificial Sequence
  Description of Artificial Sequence: Synthetic oligonucleotide
acggcucuacaucuuugug

SEQ ID NO: 23832 - RNA, 19 nt, Artificial Sequence
  Description of Artificial Sequence: Synthetic oligonucleotide
gccagaucccaccgugggc

SEQ ID NO: 23833 - RNA, 19 nt, Artificial Sequence
  Description of Artificial Sequence: Synthetic oligonucleotide
cuuccucccuaaugaugcc

SEQ ID NO: 23834 - RNA, 19 nt, Artificial Sequence
  Description of Artificial Sequence: Synthetic oligonucleotide
cgaggaacuauucaucuuu

SEQ ID NO: 23835 - RNA, 19 nt, Artificial Sequence
  Description of Artificial Sequence: Synthetic oligonucleotide
ucucacggaaauaacugag

SEQ ID NO: 23836 - RNA, 19 nt, Artificial Sequence
  Description of Artificial Sequence: Synthetic oligonucleotide
gaucaccauuccaugccga

SEQ ID NO: 23837 - RNA, 19 nt, Artificial Sequence
  Description of Artificial Sequence: Synthetic oligonucleotide
aguaacagacccacagcug

SEQ ID NO: 23838 - RNA, 19 nt, Artificial Sequence
  Description of Artificial Sequence: Synthetic oligonucleotide
gguggugacacugcacgag

SEQ ID NO: 23839 - RNA, 19 nt, Artificial Sequence
  Description of Artificial Sequence: Synthetic oligonucleotide
gaagaaaggggacguugca

SEQ ID NO: 23840 - RNA, 19 nt, Artificial Sequence
  Description of Artificial Sequence: Synthetic oligonucleotide
acugccuguccccuaugau

SEQ ID NO: 23841 - RNA, 19 nt, Artificial Sequence
  Description of Artificial Sequence: Synthetic oligonucleotide
ucaccaacguggcuuuucu

SEQ ID NO: 23842 - RNA, 19 nt, Artificial Sequence
  Description of Artificial Sequence: Synthetic oligonucleotide
ugguaucuuugaggacaga

SEQ ID NO: 23843 - RNA, 19 nt, Artificial Sequence
  Description of Artificial Sequence: Synthetic oligonucleotide
aagcuacaucugcaaaacc

SEQ ID NO: 23844 - RNA, 19 nt, Artificial Sequence
  Description of Artificial Sequence: Synthetic oligonucleotide
caccauuggggacagggag

SEQ ID NO: 23845 - RNA, 19 nt, Artificial Sequence
  Description of Artificial Sequence: Synthetic oligonucleotide
gguggauucugaugccuac

SEQ ID NO: 23846 - RNA, 19 nt, Artificial Sequence
  Description of Artificial Sequence: Synthetic oligonucleotide
cuaugucuacagacuccag

SEQ ID NO: 23847 - RNA, 19 nt, Artificial Sequence
  Description of Artificial Sequence: Synthetic oligonucleotide
ggugucauccaucaacguc

SEQ ID NO: 23848 - RNA, 19 nt, Artificial Sequence
  Description of Artificial Sequence: Synthetic oligonucleotide
cucugugaacgcagugcag

SEQ ID NO: 23849 - RNA, 19 nt, Artificial Sequence
  Description of Artificial Sequence: Synthetic oligonucleotide
gacugugguccgccagggu

SEQ ID NO: 23850 - RNA, 19 nt, Artificial Sequence
  Description of Artificial Sequence: Synthetic oligonucleotide
ugagaacaucacccucaug

SEQ ID NO: 23851 - RNA, 19 nt, Artificial Sequence
  Description of Artificial Sequence: Synthetic oligonucleotide
gugcauugugaucgggaau

SEQ ID NO: 23852 - RNA, 19 nt, Artificial Sequence
  Description of Artificial Sequence: Synthetic oligonucleotide
ugagguggucaacuucgag

SEQ ID NO: 23853 - RNA, 19 nt, Artificial Sequence
  Description of Artificial Sequence: Synthetic oligonucleotide
guggacauacccccgcaaa

SEQ ID NO: 23854 - RNA, 19 nt, Artificial Sequence
  Description of Artificial Sequence: Synthetic oligonucleotide
agaaagugggcggcuggug

SEQ ID NO: 23855 - RNA, 19 nt, Artificial Sequence
  Description of Artificial Sequence: Synthetic oligonucleotide
ggagccggugacugacuuc

SEQ ID NO: 23856 - RNA, 19 nt, Artificial Sequence
  Description of Artificial Sequence: Synthetic oligonucleotide
ccucuuggauaugccuuac

SEQ ID NO: 23857 - RNA, 19 nt, Artificial Sequence
  Description of Artificial Sequence: Synthetic oligonucleotide
ccacauccgcuccauccug

SEQ ID NO: 23858 - RNA, 19 nt, Artificial Sequence
  Description of Artificial Sequence: Synthetic oligonucleotide
gcacauccccagugccgag

SEQ ID NO: 23859 - RNA, 19 nt, Artificial Sequence
  Description of Artificial Sequence: Synthetic oligonucleotide
guuagaagacucggggacc

SEQ ID NO: 23860 - RNA, 19 nt, Artificial Sequence
  Description of Artificial Sequence: Synthetic oligonucleotide
cuacaccugcaaugugacg

SEQ ID NO: 23861 - RNA, 19 nt, Artificial Sequence
  Description of Artificial Sequence: Synthetic oligonucleotide
ggagagugugaaugaccau

SEQ ID NO: 23862 - RNA, 19 nt, Artificial Sequence
  Description of Artificial Sequence: Synthetic oligonucleotide
ucaggaugaaaaggccauc

SEQ ID NO: 23863 - RNA, 19 nt, Artificial Sequence
  Description of Artificial Sequence: Synthetic oligonucleotide
caacaucaccgugguugag

SEQ ID NO: 23864 - RNA, 19 nt, Artificial Sequence
  Description of Artificial Sequence: Synthetic oligonucleotide
gagcggcuacgugcggcuc

SEQ ID NO: 23865 - RNA, 19 nt, Artificial Sequence
  Description of Artificial Sequence: Synthetic oligonucleotide
ccugggagaggugggcaca

SEQ ID NO: 23866 - RNA, 19 nt, Artificial Sequence
  Description of Artificial Sequence: Synthetic oligonucleotide
acuacaauuugcugagcug

SEQ ID NO: 23867 - RNA, 19 nt, Artificial Sequence
  Description of Artificial Sequence: Synthetic oligonucleotide
gcaucggagccggacacug

SEQ ID NO: 23868 - RNA, 19 nt, Artificial Sequence
  Description of Artificial Sequence: Synthetic oligonucleotide
gcagguaguguucgaggcc

SEQ ID NO: 23869 - RNA, 19 nt, Artificial Sequence
  Description of Artificial Sequence: Synthetic oligonucleotide
cuacccaccgcccacuguc

SEQ ID NO: 23870 - RNA, 19 nt, Artificial Sequence
  Description of Artificial Sequence: Synthetic oligonucleotide
ccugugguucaaagacaac

SEQ ID NO: 23871 - RNA, 19 nt, Artificial Sequence
  Description of Artificial Sequence: Synthetic oligonucleotide
ccgcacccugggcgacucc

SEQ ID NO: 23872 - RNA, 19 nt, Artificial Sequence
  Description of Artificial Sequence: Synthetic oligonucleotide
cagcgcuggcgaaaucgcc

SEQ ID NO: 23873 - RNA, 19 nt, Artificial Sequence
  Description of Artificial Sequence: Synthetic oligonucleotide
ccuguccacgcgcaacgug

SEQ ID NO: 23874 - RNA, 19 nt, Artificial Sequence
  Description of Artificial Sequence: Synthetic oligonucleotide
gucggagacccgguaugug

SEQ ID NO: 23875 - RNA, 19 nt, Artificial Sequence
  Description of Artificial Sequence: Synthetic oligonucleotide
gucagagcugacacugguu

SEQ ID NO: 23876 - RNA, 19 nt, Artificial Sequence
  Description of Artificial Sequence: Synthetic oligonucleotide
ucgcgugaagguggcagag

SEQ ID NO: 23877 - RNA, 19 nt, Artificial Sequence
  Description of Artificial Sequence: Synthetic oligonucleotide
ggcuggccacuacaccaug

SEQ ID NO: 23878 - RNA, 19 nt, Artificial Sequence
  Description of Artificial Sequence: Synthetic oligonucleotide
gcgggccuuccaugaggau

SEQ ID NO: 23879 - RNA, 19 nt, Artificial Sequence
  Description of Artificial Sequence: Synthetic oligonucleotide
ugcugagguccagcucucc

SEQ ID NO: 23880 - RNA, 19 nt, Artificial Sequence
  Description of Artificial Sequence: Synthetic oligonucleotide
cuuccagcuacagaucaau

SEQ ID NO: 23881 - RNA, 19 nt, Artificial Sequence
  Description of Artificial Sequence: Synthetic oligonucleotide
ugucccuguccgagugcug

SEQ ID NO: 23882 - RNA, 19 nt, Artificial Sequence
  Description of Artificial Sequence: Synthetic oligonucleotide
ggagcuaagugagagccac

SEQ ID NO: 23883 - RNA, 19 nt, Artificial Sequence
  Description of Artificial Sequence: Synthetic oligonucleotide
cccugacaguggggaacag

SEQ ID NO: 23884 - RNA, 19 nt, Artificial Sequence
  Description of Artificial Sequence: Synthetic oligonucleotide
gacaguccgcugucguggc

SEQ ID NO: 23885 - RNA, 19 nt, Artificial Sequence
  Description of Artificial Sequence: Synthetic oligonucleotide
ccggggcaugccccagccg

SEQ ID NO: 23886 - RNA, 19 nt, Artificial Sequence
  Description of Artificial Sequence: Synthetic oligonucleotide
gaacaucaucuggucugcc

SEQ ID NO: 23887 - RNA, 19 nt, Artificial Sequence
  Description of Artificial Sequence: Synthetic oligonucleotide
cugcagagaccucaaaagg

SEQ ID NO: 23888 - RNA, 19 nt, Artificial Sequence
  Description of Artificial Sequence: Synthetic oligonucleotide
guguccacgugagcugccg

SEQ ID NO: 23889 - RNA, 19 nt, Artificial Sequence
  Description of Artificial Sequence: Synthetic oligonucleotide
gcccacgcugcuggggaac

SEQ ID NO: 23890 - RNA, 19 nt, Artificial Sequence
  Description of Artificial Sequence: Synthetic oligonucleotide
caguuccgaagaggagagc

SEQ ID NO: 23891 - RNA, 19 nt, Artificial Sequence
  Description of Artificial Sequence: Synthetic oligonucleotide
ccagcuggagacuaacgug

SEQ ID NO: 23892 - RNA, 19 nt, Artificial Sequence
  Description of Artificial Sequence: Synthetic oligonucleotide
gacguacugggaggaggag

SEQ ID NO: 23893 - RNA, 19 nt, Artificial Sequence
  Description of Artificial Sequence: Synthetic oligonucleotide
gcaggaguuugagguggug

SEQ ID NO: 23894 - RNA, 19 nt, Artificial Sequence
  Description of Artificial Sequence: Synthetic oligonucleotide
gagcacacugcgucugcag

SEQ ID NO: 23895 - RNA, 19 nt, Artificial Sequence
  Description of Artificial Sequence: Synthetic oligonucleotide
gcacguggaucggccacug

SEQ ID NO: 23896 - RNA, 19 nt, Artificial Sequence
  Description of Artificial Sequence: Synthetic oligonucleotide
gucggugcgcugcacgcug

SEQ ID NO: 23897 - RNA, 19 nt, Artificial Sequence
  Description of Artificial Sequence: Synthetic oligonucleotide
gcgcaacgcugugggccag

SEQ ID NO: 23898 - RNA, 19 nt, Artificial Sequence
  Description of Artificial Sequence: Synthetic oligonucleotide
ggacacgcaggaggucauc

SEQ ID NO: 23899 - RNA, 19 nt, Artificial Sequence
  Description of Artificial Sequence: Synthetic oligonucleotide
cguggugccacacuccuug

SEQ ID NO: 23900 - RNA, 19 nt, Artificial Sequence
  Description of Artificial Sequence: Synthetic oligonucleotide
gcccuuuaaggugguggug

SEQ ID NO: 23901 - RNA, 19 nt, Artificial Sequence
  Description of Artificial Sequence: Synthetic oligonucleotide
gaucucagccauccuggcc

SEQ ID NO: 23902 - RNA, 19 nt, Artificial Sequence
  Description of Artificial Sequence: Synthetic oligonucleotide
ccugguggugcucaccauc

SEQ ID NO: 23903 - RNA, 19 nt, Artificial Sequence
  Description of Artificial Sequence: Synthetic oligonucleotide
caucucccuuaucauccuc

SEQ ID NO: 23904 - RNA, 19 nt, Artificial Sequence
  Description of Artificial Sequence: Synthetic oligonucleotide
caucaugcuuuggcagaag

SEQ ID NO: 23905 - RNA, 19 nt, Artificial Sequence
  Description of Artificial Sequence: Synthetic oligonucleotide
gaagccacguuacgagauc

SEQ ID NO: 23906 - RNA, 19 nt, Artificial Sequence
  Description of Artificial Sequence: Synthetic oligonucleotide
ccgauggaaggugauugag

SEQ ID NO: 23907 - RNA, 19 nt, Artificial Sequence
  Description of Artificial Sequence: Synthetic oligonucleotide
gucugugagcucugacggc

SEQ ID NO: 23908 - RNA, 19 nt, Artificial Sequence
  Description of Artificial Sequence: Synthetic oligonucleotide
ccaugaguacaucuacgug

SEQ ID NO: 23909 - RNA, 19 nt, Artificial Sequence
  Description of Artificial Sequence: Synthetic oligonucleotide
ggaccccaugcagcugccc

SEQ ID NO: 23910 - RNA, 19 nt, Artificial Sequence
  Description of Artificial Sequence: Synthetic oligonucleotide
cuaugacuccacgugggag

SEQ ID NO: 23911 - RNA, 19 nt, Artificial Sequence
  Description of Artificial Sequence: Synthetic oligonucleotide
gcugccgcgggaccagcuu

SEQ ID NO: 23912 - RNA, 19 nt, Artificial Sequence
  Description of Artificial Sequence: Synthetic oligonucleotide
ugugcugggacgcacccuc

SEQ ID NO: 23913 - RNA, 19 nt, Artificial Sequence
  Description of Artificial Sequence: Synthetic oligonucleotide
cggcucuggggccuuuggg

SEQ ID NO: 23914 - RNA, 19 nt, Artificial Sequence
  Description of Artificial Sequence: Synthetic oligonucleotide
gcaggugguggaggccacg

SEQ ID NO: 23915 - RNA, 19 nt, Artificial Sequence
  Description of Artificial Sequence: Synthetic oligonucleotide
ggcucauggccugagccau

SEQ ID NO: 23916 - RNA, 19 nt, Artificial Sequence
  Description of Artificial Sequence: Synthetic oligonucleotide
uucucaggccacgaugaaa

SEQ ID NO: 23917 - RNA, 19 nt, Artificial Sequence
  Description of Artificial Sequence: Synthetic oligonucleotide
aguggccgucaagaugcuu

SEQ ID NO: 23918 - RNA, 19 nt, Artificial Sequence
  Description of Artificial Sequence: Synthetic oligonucleotide
uaaauccacagcccgcagc

SEQ ID NO: 23919 - RNA, 19 nt, Artificial Sequence
  Description of Artificial Sequence: Synthetic oligonucleotide
cagugagaagcaagcccuu

SEQ ID NO: 23920 - RNA, 19 nt, Artificial Sequence
  Description of Artificial Sequence: Synthetic oligonucleotide
uaugucggagcugaagauc

SEQ ID NO: 23921 - RNA, 19 nt, Artificial Sequence
  Description of Artificial Sequence: Synthetic oligonucleotide
caugagucaccuugggccc

SEQ ID NO: 23922 - RNA, 19 nt, Artificial Sequence
  Description of Artificial Sequence: Synthetic oligonucleotide
ccaccugaacguggucaac

SEQ ID NO: 23923 - RNA, 19 nt, Artificial Sequence
  Description of Artificial Sequence: Synthetic oligonucleotide
ccuguugggggccugcacc

SEQ ID NO: 23924 - RNA, 19 nt, Artificial Sequence
  Description of Artificial Sequence: Synthetic oligonucleotide
caaaggaggacccaucuau

SEQ ID NO: 23925 - RNA, 19 nt, Artificial Sequence
  Description of Artificial Sequence: Synthetic oligonucleotide
uaucaucacugaguacugc

SEQ ID NO: 23926 - RNA, 19 nt, Artificial Sequence
  Description of Artificial Sequence: Synthetic oligonucleotide
ccgcuacggagaccuggug

SEQ ID NO: 23927 - RNA, 19 nt, Artificial Sequence
  Description of Artificial Sequence: Synthetic oligonucleotide
ggacuaccugcaccgcaac

SEQ ID NO: 23928 - RNA, 19 nt, Artificial Sequence
  Description of Artificial Sequence: Synthetic oligonucleotide
caaacacaccuuccugcag

SEQ ID NO: 23929 - RNA, 19 nt, Artificial Sequence
  Description of Artificial Sequence: Synthetic oligonucleotide
gcaccacuccgacaagcgc

SEQ ID NO: 23930 - RNA, 19 nt, Artificial Sequence
  Description of Artificial Sequence: Synthetic oligonucleotide
ccgcccgcccagcgcggag

SEQ ID NO: 23931 - RNA, 19 nt, Artificial Sequence
  Description of Artificial Sequence: Synthetic oligonucleotide
gcucuacagcaaugcucug

SEQ ID NO: 23932 - RNA, 19 nt, Artificial Sequence
  Description of Artificial Sequence: Synthetic oligonucleotide
gcccguugggcucccccug

SEQ ID NO: 23933 - RNA, 19 nt, Artificial Sequence
  Description of Artificial Sequence: Synthetic oligonucleotide
gcccagccauguguccuug

SEQ ID NO: 23934 - RNA, 19 nt, Artificial Sequence
  Description of Artificial Sequence: Synthetic oligonucleotide
gaccggggagagcgacggu

SEQ ID NO: 23935 - RNA, 19 nt, Artificial Sequence
  Description of Artificial Sequence: Synthetic oligonucleotide
uggcuacauggacaugagc

SEQ ID NO: 23936 - RNA, 19 nt, Artificial Sequence
  Description of Artificial Sequence: Synthetic oligonucleotide
caaggacgagucgguggac

SEQ ID NO: 23937 - RNA, 19 nt, Artificial Sequence
  Description of Artificial Sequence: Synthetic oligonucleotide
cuaugugcccaugcuggac

SEQ ID NO: 23938 - RNA, 19 nt, Artificial Sequence
  Description of Artificial Sequence: Synthetic oligonucleotide
caugaaaggagacgucaaa

SEQ ID NO: 23939 - RNA, 19 nt, Artificial Sequence
  Description of Artificial Sequence: Synthetic oligonucleotide
auaugcagacaucgagucc

SEQ ID NO: 23940 - RNA, 19 nt, Artificial Sequence
  Description of Artificial Sequence: Synthetic oligonucleotide
cuccaacuacauggccccu

SEQ ID NO: 23941 - RNA, 19 nt, Artificial Sequence
  Description of Artificial Sequence: Synthetic oligonucleotide
uuacgauaacuacguuccc

SEQ ID NO: 23942 - RNA, 19 nt, Artificial Sequence
  Description of Artificial Sequence: Synthetic oligonucleotide
cucugccccugagaggacc

SEQ ID NO: 23943 - RNA, 19 nt, Artificial Sequence
  Description of Artificial Sequence: Synthetic oligonucleotide
cugccgagcaacuuugauc

SEQ ID NO: 23944 - RNA, 19 nt, Artificial Sequence
  Description of Artificial Sequence: Synthetic oligonucleotide
caacgagucuccagugcua

SEQ ID NO: 23945 - RNA, 19 nt, Artificial Sequence
  Description of Artificial Sequence: Synthetic oligonucleotide
aagcuacauggaccucgug

SEQ ID NO: 23946 - RNA, 19 nt, Artificial Sequence
  Description of Artificial Sequence: Synthetic oligonucleotide
gggcuucagcuaccaggug

SEQ ID NO: 23947 - RNA, 19 nt, Artificial Sequence
  Description of Artificial Sequence: Synthetic oligonucleotide
ggccaauggcauggaguuu

SEQ ID NO: 23948 - RNA, 19 nt, Artificial Sequence
  Description of Artificial Sequence: Synthetic oligonucleotide
ucuggccuccaagaacugc

SEQ ID NO: 23949 - RNA, 19 nt, Artificial Sequence
  Description of Artificial Sequence: Synthetic oligonucleotide
cguccacagagaccuggcg

SEQ ID NO: 23950 - RNA, 19 nt, Artificial Sequence
  Description of Artificial Sequence: Synthetic oligonucleotide
ggcuaggaacgugcucauc

SEQ ID NO: 23951 - RNA, 19 nt, Artificial Sequence
  Description of Artificial Sequence: Synthetic oligonucleotide
cugugaaggcaagcugguc

SEQ ID NO: 23952 - RNA, 19 nt, Artificial Sequence
  Description of Artificial Sequence: Synthetic oligonucleotide
caagaucugugacuuuggc

SEQ ID NO: 23953 - RNA, 19 nt, Artificial Sequence
  Description of Artificial Sequence: Synthetic oligonucleotide
ccuggcucgagacaucaug

SEQ ID NO: 23954 - RNA, 19 nt, Artificial Sequence
  Description of Artificial Sequence: Synthetic oligonucleotide
gcgggacucgaauuacauc

SEQ ID NO: 23955 - RNA, 19 nt, Artificial Sequence
  Description of Artificial Sequence: Synthetic oligonucleotide
cuccaaaggcagcaccuuu

SEQ ID NO: 23956 - RNA, 19 nt, Artificial Sequence
  Description of Artificial Sequence: Synthetic oligonucleotide
uuugccuuuaaaguggaug

SEQ ID NO: 23957 - RNA, 19 nt, Artificial Sequence
  Description of Artificial Sequence: Synthetic oligonucleotide
ggcuccggagagcaucuuc

SEQ ID NO: 23958 - RNA, 19 nt, Artificial Sequence
  Description of Artificial Sequence: Synthetic oligonucleotide
caacagccucuacaccacc

SEQ ID NO: 23959 - RNA, 19 nt, Artificial Sequence
  Description of Artificial Sequence: Synthetic oligonucleotide
ccugagcgacguguggucc

SEQ ID NO: 23960 - RNA, 19 nt, Artificial Sequence
  Description of Artificial Sequence: Synthetic oligonucleotide
cuucgggauccugcucugg

SEQ ID NO: 23961 - RNA, 19 nt, Artificial Sequence
  Description of Artificial Sequence: Synthetic oligonucleotide
ggagaucuucaccuugggu

SEQ ID NO: 23962 - RNA, 19 nt, Artificial Sequence
  Description of Artificial Sequence: Synthetic oligonucleotide
uggcaccccuuacccagag

SEQ ID NO: 23963 - RNA, 19 nt, Artificial Sequence
  Description of Artificial Sequence: Synthetic oligonucleotide
gcugcccaugaacgagcag

SEQ ID NO: 23964 - RNA, 19 nt, Artificial Sequence
  Description of Artificial Sequence: Synthetic oligonucleotide
guucuacaaugccaucaaa

SEQ ID NO: 23965 - RNA, 19 nt, Artificial Sequence
  Description of Artificial Sequence: Synthetic oligonucleotide
acgggguuaccgcauggcc

SEQ ID NO: 23966 - RNA, 19 nt, Artificial Sequence
  Description of Artificial Sequence: Synthetic oligonucleotide
ccagccugcccaugccucc

SEQ ID NO: 23967 - RNA, 19 nt, Artificial Sequence
  Description of Artificial Sequence: Synthetic oligonucleotide
cgacgagaucuaugagauc

SEQ ID NO: 23968 - RNA, 19 nt, Artificial Sequence
  Description of Artificial Sequence: Synthetic oligonucleotide
caugcagaagugcugggaa

SEQ ID NO: 23969 - RNA, 19 nt, Artificial Sequence
  Description of Artificial Sequence: Synthetic oligonucleotide
agagaaguuugagauucgg

SEQ ID NO: 23970 - RNA, 19 nt, Artificial Sequence
  Description of Artificial Sequence: Synthetic oligonucleotide
gccccccuucucccagcug

SEQ ID NO: 23971 - RNA, 19 nt, Artificial Sequence
  Description of Artificial Sequence: Synthetic oligonucleotide
ggugcugcuucucgagaga

SEQ ID NO: 23972 - RNA, 19 nt, Artificial Sequence
  Description of Artificial Sequence: Synthetic oligonucleotide
acuguugggcgaagguuac

SEQ ID NO: 23973 - RNA, 19 nt, Artificial Sequence
  Description of Artificial Sequence: Synthetic oligonucleotide
caaaaagaaguaccagcag

SEQ ID NO: 23974 - RNA, 19 nt, Artificial Sequence
  Description of Artificial Sequence: Synthetic oligonucleotide
gguggaugaggaguuucug

SEQ ID NO: 23975 - RNA, 19 nt, Artificial Sequence
  Description of Artificial Sequence: Synthetic oligonucleotide
gaggagugaccacccagcc

SEQ ID NO: 23976 - RNA, 19 nt, Artificial Sequence
  Description of Artificial Sequence: Synthetic oligonucleotide
cauccuucggucccaggcc

SEQ ID NO: 23977 - RNA, 19 nt, Artificial Sequence
  Description of Artificial Sequence: Synthetic oligonucleotide
ccgcuugccuggguuccau

SEQ ID NO: 23978 - RNA, 19 nt, Artificial Sequence
  Description of Artificial Sequence: Synthetic oligonucleotide
uggccuccgaucuccccug

SEQ ID NO: 23979 - RNA, 19 nt, Artificial Sequence
  Description of Artificial Sequence: Synthetic oligonucleotide
ggacaccagcuccguccuc

SEQ ID NO: 23980 - RNA, 19 nt, Artificial Sequence
  Description of Artificial Sequence: Synthetic oligonucleotide
cuauacugccgugcagccc

SEQ ID NO: 23981 - RNA, 19 nt, Artificial Sequence
  Description of Artificial Sequence: Synthetic oligonucleotide
caaugagggugacaacgac

SEQ ID NO: 23982 - RNA, 19 nt, Artificial Sequence
  Description of Artificial Sequence: Synthetic oligonucleotide
cuauaucaucccccugccu

SEQ ID NO: 23983 - RNA, 19 nt, Artificial Sequence
  Description of Artificial Sequence: Synthetic oligonucleotide
ugaccccaaacccgagguu

SEQ ID NO: 23984 - RNA, 19 nt, Artificial Sequence
  Description of Artificial Sequence: Synthetic oligonucleotide
ugcugacgagggcccacug

SEQ ID NO: 23985 - RNA, 19 nt, Artificial Sequence
  Description of Artificial Sequence: Synthetic oligonucleotide
ggaggguucccccagccua

SEQ ID NO: 23986 - RNA, 19 nt, Artificial Sequence
  Description of Artificial Sequence: Synthetic oligonucleotide
agccagcuccacccugaau

SEQ ID NO: 23987 - RNA, 19 nt, Artificial Sequence
  Description of Artificial Sequence: Synthetic oligonucleotide
ugaagucaacaccuccuca

SEQ ID NO: 23988 - RNA, 19 nt, Artificial Sequence
  Description of Artificial Sequence: Synthetic oligonucleotide
aaccaucuccugugacagc

SEQ ID NO: 23989 - RNA, 19 nt, Artificial Sequence
  Description of Artificial Sequence: Synthetic oligonucleotide
cccccuggagccccaggac

SEQ ID NO: 23990 - RNA, 19 nt, Artificial Sequence
  Description of Artificial Sequence: Synthetic oligonucleotide
cgaaccagagccagagccc

SEQ ID NO: 23991 - RNA, 19 nt, Artificial Sequence
  Description of Artificial Sequence: Synthetic oligonucleotide
ccagcuugagcuccaggug

SEQ ID NO: 23992 - RNA, 19 nt, Artificial Sequence
  Description of Artificial Sequence: Synthetic oligonucleotide
ggagccggagccagagcug

SEQ ID NO: 23993 - RNA, 19 nt, Artificial Sequence
  Description of Artificial Sequence: Synthetic oligonucleotide
ggaacaguugccggauucg

SEQ ID NO: 23994 - RNA, 19 nt, Artificial Sequence
  Description of Artificial Sequence: Synthetic oligonucleotide
ggggugcccugcgccucgg

SEQ ID NO: 23995 - RNA, 19 nt, Artificial Sequence
  Description of Artificial Sequence: Synthetic oligonucleotide
ggcggaagcagaggauagc

SEQ ID NO: 23996 - RNA, 19 nt, Artificial Sequence
  Description of Artificial Sequence: Synthetic oligonucleotide
cuuccuguagggggcuggc

SEQ ID NO: 23997 - RNA, 19 nt, Artificial Sequence
  Description of Artificial Sequence: Synthetic oligonucleotide
ccccuacccugcccugccu

SEQ ID NO: 23998 - RNA, 19 nt, Artificial Sequence
  Description of Artificial Sequence: Synthetic oligonucleotide
ugaagcucccccccugcca

SEQ ID NO: 23999 - RNA, 19 nt, Artificial Sequence
  Description of Artificial Sequence: Synthetic oligonucleotide
agcacccagcaucuccugg

SEQ ID NO: 24000 - RNA, 19 nt, Artificial Sequence
  Description of Artificial Sequence: Synthetic oligonucleotide
gccuggccugaccgggcuu

SEQ ID NO: 24001 - RNA, 19 nt, Artificial Sequence
  Description of Artificial Sequence: Synthetic oligonucleotide
uccugucagccaggcugcc

SEQ ID NO: 24002 - RNA, 19 nt, Artificial Sequence
  Description of Artificial Sequence: Synthetic oligonucleotide
ccuuaucagcuguccccuu

SEQ ID NO: 24003 - RNA, 19 nt, Artificial Sequence
  Description of Artificial Sequence: Synthetic oligonucleotide
ucuggaagcuuucugcucc

SEQ ID NO: 24004 - RNA, 19 nt, Artificial Sequence
  Description of Artificial Sequence: Synthetic oligonucleotide
cugacguguugugccccaa

SEQ ID NO: 24005 - RNA, 19 nt, Artificial Sequence
  Description of Artificial Sequence: Synthetic oligonucleotide
aacccuggggcuggcuuag

SEQ ID NO: 24006 - RNA, 19 nt, Artificial Sequence
  Description of Artificial Sequence: Synthetic oligonucleotide
ggaggcaagaaaacugcag

SEQ ID NO: 24007 - RNA, 19 nt, Artificial Sequence
  Description of Artificial Sequence: Synthetic oligonucleotide
ggggccgugaccagcccuc

SEQ ID NO: 24008 - RNA, 19 nt, Artificial Sequence
  Description of Artificial Sequence: Synthetic oligonucleotide
cugccuccagggaggccaa

SEQ ID NO: 24009 - RNA, 19 nt, Artificial Sequence
  Description of Artificial Sequence: Synthetic oligonucleotide
acugacucugagccagggu

SEQ ID NO: 24010 - RNA, 19 nt, Artificial Sequence
  Description of Artificial Sequence: Synthetic oligonucleotide
uucccccagggaacucagu

SEQ ID NO: 24011 - RNA, 19 nt, Artificial Sequence
  Description of Artificial Sequence: Synthetic oligonucleotide
uuuucccauauguaagaug

SEQ ID NO: 24012 - RNA, 19 nt, Artificial Sequence
  Description of Artificial Sequence: Synthetic oligonucleotide
gggaaaguuaggcuugaug

SEQ ID NO: 24013 - RNA, 19 nt, Artificial Sequence
  Description of Artificial Sequence: Synthetic oligonucleotide
gacccagaaucuaggauuc

SEQ ID NO: 24014 - RNA, 19 nt, Artificial Sequence
  Description of Artificial Sequence: Synthetic oligonucleotide
cucucccuggcugacaggu

SEQ ID NO: 24015 - RNA, 19 nt, Artificial Sequence
  Description of Artificial Sequence: Synthetic oligonucleotide
uggggagaccgaaucccuc

SEQ ID NO: 24016 - RNA, 19 nt, Artificial Sequence
  Description of Artificial Sequence: Synthetic oligonucleotide
cccugggaagauucuugga

SEQ ID NO: 24017 - RNA, 19 nt, Artificial Sequence
  Description of Artificial Sequence: Synthetic oligonucleotide
aguuacugaggugguaaau

SEQ ID NO: 24018 - RNA, 19 nt, Artificial Sequence
  Description of Artificial Sequence: Synthetic oligonucleotide
uuaacuuuuuucuguucag

SEQ ID NO: 24019 - RNA, 19 nt, Artificial Sequence
  Description of Artificial Sequence: Synthetic oligonucleotide
gccagcuaccccucaagga

SEQ ID NO: 24020 - RNA, 19 nt, Artificial Sequence
  Description of Artificial Sequence: Synthetic oligonucleotide
aaucauagcucucuccucg

SEQ ID NO: 24021 - RNA, 19 nt, Artificial Sequence
  Description of Artificial Sequence: Synthetic oligonucleotide
gcacuuuuauccacccagg

SEQ ID NO: 24022 - RNA, 19 nt, Artificial Sequence
  Description of Artificial Sequence: Synthetic oligonucleotide
gagcuagggaagagacccu

SEQ ID NO: 24023 - RNA, 19 nt, Artificial Sequence
  Description of Artificial Sequence: Synthetic oligonucleotide
uagccucccuggcugcugg

SEQ ID NO: 24024 - RNA, 19 nt, Artificial Sequence
  Description of Artificial Sequence: Synthetic oligonucleotide
gcugagcuagggccuagcc

SEQ ID NO: 24025 - RNA, 19 nt, Artificial Sequence
  Description of Artificial Sequence: Synthetic oligonucleotide
cuugagcaguguugccuca

SEQ ID NO: 24026 - RNA, 19 nt, Artificial Sequence
  Description of Artificial Sequence: Synthetic oligonucleotide
auccagaagaaagccaguc

SEQ ID NO: 24027 - RNA, 19 nt, Artificial Sequence
  Description of Artificial Sequence: Synthetic oligonucleotide
cuccucccuaugaugccag

SEQ ID NO: 24028 - RNA, 19 nt, Artificial Sequence
  Description of Artificial Sequence: Synthetic oligonucleotide
gucccugcguucccuggcc

SEQ ID NO: 24029 - RNA, 19 nt, Artificial Sequence
  Description of Artificial Sequence: Synthetic oligonucleotide
ccgagcuggucuggggcca

SEQ ID NO: 24030 - RNA, 19 nt, Artificial Sequence
  Description of Artificial Sequence: Synthetic oligonucleotide
auuaggcagccuaauuaau

SEQ ID NO: 24031 - RNA, 19 nt, Artificial Sequence
  Description of Artificial Sequence: Synthetic oligonucleotide
ugcuggaggcugagccaag

SEQ ID NO: 24032 - RNA, 19 nt, Artificial Sequence
  Description of Artificial Sequence: Synthetic oligonucleotide
guacaggacacccccagcc

SEQ ID NO: 24033 - RNA, 19 nt, Artificial Sequence
  Description of Artificial Sequence: Synthetic oligonucleotide
cugcagcccuugcccaggg

SEQ ID NO: 24034 - RNA, 19 nt, Artificial Sequence
  Description of Artificial Sequence: Synthetic oligonucleotide
gcacuuggagcacacgcag

SEQ ID NO: 24035 - RNA, 19 nt, Artificial Sequence
  Description of Artificial Sequence: Synthetic oligonucleotide
gccauagcaagugccugug

SEQ ID NO: 24036 - RNA, 19 nt, Artificial Sequence
  Description of Artificial Sequence: Synthetic oligonucleotide
gucccuguccuucaggccc

SEQ ID NO: 24037 - RNA, 19 nt, Artificial Sequence
  Description of Artificial Sequence: Synthetic oligonucleotide
caucaguccuggggcuuuu

SEQ ID NO: 24038 - RNA, 19 nt, Artificial Sequence
  Description of Artificial Sequence: Synthetic oligonucleotide
uucuuuaucacccucaguc

SEQ ID NO: 24039 - RNA, 19 nt, Artificial Sequence
  Description of Artificial Sequence: Synthetic oligonucleotide
cuuaauccauccaccagag

SEQ ID NO: 24040 - RNA, 19 nt, Artificial Sequence
  Description of Artificial Sequence: Synthetic oligonucleotide
gucuagaaggccagacggg

SEQ ID NO: 24041 - RNA, 19 nt, Artificial Sequence
  Description of Artificial Sequence: Synthetic oligonucleotide
gccccgcaucugugaugag

SEQ ID NO: 24042 - RNA, 19 nt, Artificial Sequence
  Description of Artificial Sequence: Synthetic oligonucleotide
gaauguaaaugugccagug

SEQ ID NO: 24043 - RNA, 19 nt, Artificial Sequence
  Description of Artificial Sequence: Synthetic oligonucleotide
guggaguggccacgugugu

SEQ ID NO: 24044 - RNA, 19 nt, Artificial Sequence
  Description of Artificial Sequence: Synthetic oligonucleotide
ugugccaguauauggcccu

SEQ ID NO: 24045 - RNA, 19 nt, Artificial Sequence
  Description of Artificial Sequence: Synthetic oligonucleotide
uggcucugcauuggaccug

SEQ ID NO: 24046 - RNA, 19 nt, Artificial Sequence
  Description of Artificial Sequence: Synthetic oligonucleotide
gcuaugaggcuuuggagga

SEQ ID NO: 24047 - RNA, 19 nt, Artificial Sequence
  Description of Artificial Sequence: Synthetic oligonucleotide
aaucccucacccucucugg

SEQ ID NO: 24048 - RNA, 19 nt, Artificial Sequence
  Description of Artificial Sequence: Synthetic oligonucleotide
ggccucaguuuccccuuca

SEQ ID NO: 24049 - RNA, 19 nt, Artificial Sequence
  Description of Artificial Sequence: Synthetic oligonucleotide
aaaaaaugaauaagucgga

SEQ ID NO: 24050 - RNA, 19 nt, Artificial Sequence
  Description of Artificial Sequence: Synthetic oligonucleotide
acuuauuaacucugagugc

SEQ ID NO: 24051 - RNA, 19 nt, Artificial Sequence
  Description of Artificial Sequence: Synthetic oligonucleotide
ccuugccagcacuaacauu

SEQ ID NO: 24052 - RNA, 19 nt, Artificial Sequence
  Description of Artificial Sequence: Synthetic oligonucleotide
ucuagaguauuccaggugg

SEQ ID NO: 24053 - RNA, 19 nt, Artificial Sequence
  Description of Artificial Sequence: Synthetic oligonucleotide
guugcacauuuguccagau

SEQ ID NO: 24054 - RNA, 19 nt, Artificial Sequence
  Description of Artificial Sequence: Synthetic oligonucleotide
ugaagcaaggccauauacc

SEQ ID NO: 24055 - RNA, 19 nt, Artificial Sequence
  Description of Artificial Sequence: Synthetic oligonucleotide
ccuaaacuuccauccuggg

SEQ ID NO: 24056 - RNA, 19 nt, Artificial Sequence
  Description of Artificial Sequence: Synthetic oligonucleotide
gggucagcugggcuccugg

SEQ ID NO: 24057 - RNA, 19 nt, Artificial Sequence
  Description of Artificial Sequence: Synthetic oligonucleotide
ggagauuccagaucacaca

SEQ ID NO: 24058 - RNA, 19 nt, Artificial Sequence
  Description of Artificial Sequence: Synthetic oligonucleotide
aucacacucuggggacuca

SEQ ID NO: 24059 - RNA, 19 nt, Artificial Sequence
  Description of Artificial Sequence: Synthetic oligonucleotide
aggaaccaugccccuuccc

SEQ ID NO: 24060 - RNA, 19 nt, Artificial Sequence
  Description of Artificial Sequence: Synthetic oligonucleotide
ccaggcccccagcaagucu

SEQ ID NO: 24061 - RNA, 19 nt, Artificial Sequence
  Description of Artificial Sequence: Synthetic oligonucleotide
ucaagaacacagcugcaca

SEQ ID NO: 24062 - RNA, 19 nt, Artificial Sequence
  Description of Artificial Sequence: Synthetic oligonucleotide
aggccuugacuuagaguga

SEQ ID NO: 24063 - RNA, 19 nt, Artificial Sequence
  Description of Artificial Sequence: Synthetic oligonucleotide
acagccgguguccuggaaa

SEQ ID NO: 24064 - RNA, 19 nt, Artificial Sequence
  Description of Artificial Sequence: Synthetic oligonucleotide
agcccccagcagcugcccc

SEQ ID NO: 24065 - RNA, 19 nt, Artificial Sequence
  Description of Artificial Sequence: Synthetic oligonucleotide
cagggacaugggaagacca

SEQ ID NO: 24066 - RNA, 19 nt, Artificial Sequence
  Description of Artificial Sequence: Synthetic oligonucleotide
acgggaccucuuucacuac

SEQ ID NO: 24067 - RNA, 19 nt, Artificial Sequence
  Description of Artificial Sequence: Synthetic oligonucleotide
cccacgaugaccuccgggg

SEQ ID NO: 24068 - RNA, 19 nt, Artificial Sequence
  Description of Artificial Sequence: Synthetic oligonucleotide
gguauccugggcaaaaggg

SEQ ID NO: 24069 - RNA, 19 nt, Artificial Sequence
  Description of Artificial Sequence: Synthetic oligonucleotide
gacaaagagggcaaaugag

SEQ ID NO: 24070 - RNA, 19 nt, Artificial Sequence
  Description of Artificial Sequence: Synthetic oligonucleotide
gaucaccuccugcagccca

SEQ ID NO: 24071 - RNA, 19 nt, Artificial Sequence
  Description of Artificial Sequence: Synthetic oligonucleotide
accacuccagcaccugugc

SEQ ID NO: 24072 - RNA, 19 nt, Artificial Sequence
  Description of Artificial Sequence: Synthetic oligonucleotide
ccgaggucugcgucgaaga

SEQ ID NO: 24073 - RNA, 19 nt, Artificial Sequence
  Description of Artificial Sequence: Synthetic oligonucleotide
acagaauggacagugagga

SEQ ID NO: 24074 - RNA, 19 nt, Artificial Sequence
  Description of Artificial Sequence: Synthetic oligonucleotide
acaguuaugucuuguaaaa

SEQ ID NO: 24075 - RNA, 19 nt, Artificial Sequence
  Description of Artificial Sequence: Synthetic oligonucleotide
agacaagaagcuucagaug

SEQ ID NO: 24076 - RNA, 19 nt, Artificial Sequence
  Description of Artificial Sequence: Synthetic oligonucleotide
ggguaccccaagaaggaug

SEQ ID NO: 24077 - RNA, 19 nt, Artificial Sequence
  Description of Artificial Sequence: Synthetic oligonucleotide
gugagaggugggcgcuuug

SEQ ID NO: 24078 - RNA, 19 nt, Artificial Sequence
  Description of Artificial Sequence: Synthetic oligonucleotide
ggagguuugccccucaccc

SEQ ID NO: 24079 - RNA, 19 nt, Artificial Sequence
  Description of Artificial Sequence: Synthetic oligonucleotide
caccagcugccccaucccu

SEQ ID NO: 24080 - RNA, 19 nt, Artificial Sequence
  Description of Artificial Sequence: Synthetic oligonucleotide
ugaggcagcgcuccauggg

SEQ ID NO: 24081 - RNA, 19 nt, Artificial Sequence
  Description of Artificial Sequence: Synthetic oligonucleotide
ggguaugguuuugucacug

SEQ ID NO: 24082 - RNA, 19 nt, Artificial Sequence
  Description of Artificial Sequence: Synthetic oligonucleotide
gcccagaccuagcagugac

SEQ ID NO: 24083 - RNA, 19 nt, Artificial Sequence
  Description of Artificial Sequence: Synthetic oligonucleotide
caucucauuguccccagcc

SEQ ID NO: 24084 - RNA, 19 nt, Artificial Sequence
  Description of Artificial Sequence: Synthetic oligonucleotide
ccagugggcauuggaggug

SEQ ID NO: 24085 - RNA, 19 nt, Artificial Sequence
  Description of Artificial Sequence: Synthetic oligonucleotide
gccaggggagucaggguug

SEQ ID NO: 24086 - RNA, 19 nt, Artificial Sequence
  Description of Artificial Sequence: Synthetic oligonucleotide
guagccaagacgcccccgc

SEQ ID NO: 24087 - RNA, 19 nt, Artificial Sequence
  Description of Artificial Sequence: Synthetic oligonucleotide
cacggggaggguugggaag

SEQ ID NO: 24088 - RNA, 19 nt, Artificial Sequence
  Description of Artificial Sequence: Synthetic oligonucleotide
gggggugcaggaagcucaa

SEQ ID NO: 24089 - RNA, 19 nt, Artificial Sequence
  Description of Artificial Sequence: Synthetic oligonucleotide
accccucugggcaccaacc

SEQ ID NO: 24090 - RNA, 19 nt, Artificial Sequence
  Description of Artificial Sequence: Synthetic oligonucleotide
ccugcauugcagguuggca

SEQ ID NO: 24091 - RNA, 19 nt, Artificial Sequence
  Description of Artificial Sequence: Synthetic oligonucleotide
accuuacuucccugggauc

SEQ ID NO: 24092 - RNA, 19 nt, Artificial Sequence
  Description of Artificial Sequence: Synthetic oligonucleotide
ccccagaguugguccaagg

SEQ ID NO: 24093 - RNA, 19 nt, Artificial Sequence
  Description of Artificial Sequence: Synthetic oligonucleotide
gagggagaguggguucuca

SEQ ID NO: 24094 - RNA, 19 nt, Artificial Sequence
  Description of Artificial Sequence: Synthetic oligonucleotide
aauacgguaccaaagauau

SEQ ID NO: 24095 - RNA, 19 nt, Artificial Sequence
  Description of Artificial Sequence: Synthetic oligonucleotide
uaaucaccuagguuuacaa

SEQ ID NO: 24096 - RNA, 19 nt, Artificial Sequence
  Description of Artificial Sequence: Synthetic oligonucleotide
aauauuuuuaggacucacg

SEQ ID NO: 24097 - RNA, 19 nt, Artificial Sequence
  Description of Artificial Sequence: Synthetic oligonucleotide
guuaacucacauuuauaca

SEQ ID NO: 24098 - RNA, 19 nt, Artificial Sequence
  Description of Artificial Sequence: Synthetic oligonucleotide
agcagaaaugcuauuuugu

SEQ ID NO: 24099 - RNA, 19 nt, Artificial Sequence
  Description of Artificial Sequence: Synthetic oligonucleotide
uaugcuguuaaguuuuucu

SEQ ID NO: 24100 - RNA, 19 nt, Artificial Sequence
  Description of Artificial Sequence: Synthetic oligonucleotide
uaucuguguacuuuuuuuu

SEQ ID NO: 24101 - RNA, 19 nt, Artificial Sequence
  Description of Artificial Sequence: Synthetic oligonucleotide
uaagggaaagauuuuaaua

SEQ ID NO: 24102 - RNA, 19 nt, Artificial Sequence
  Description of Artificial Sequence: Synthetic oligonucleotide
auuaaaccuggugcuucuc

SEQ ID NO: 24103 - RNA, 19 nt, Artificial Sequence
  Description of Artificial Sequence: Synthetic oligonucleotide
ugcuucucacucacaaaaa

SEQ ID NO: 24104 - RNA, 25 nt, Artificial Sequence
  Description of Artificial Sequence: Synthetic oligonucleotide
cuccugaggcugccagcagccagca

SEQ ID NO: 24105 - RNA, 25 nt, Artificial Sequence
  Description of Artificial Sequence: Synthetic oligonucleotide
agugacugcccgcccuaucugggac

SEQ ID NO: 24106 - RNA, 25 nt, Artificial Sequence
  Description of Artificial Sequence: Synthetic oligonucleotide
cccaggaucgcucugugagcaacuu

SEQ ID NO: 24107 - RNA, 25 nt, Artificial Sequence
  Description of Artificial Sequence: Synthetic oligonucleotide
uggagccagagaggagaucaacaag

SEQ ID NO: 24108 - RNA, 25 nt, Artificial Sequence
  Description of Artificial Sequence: Synthetic oligonucleotide
ggaggaggagagagccggccccuca

SEQ ID NO: 24109 - RNA, 25 nt, Artificial Sequence
  Description of Artificial Sequence: Synthetic oligonucleotide
agcccugcugcccagcagcagccug

SEQ ID NO: 24110 - RNA, 25 nt, Artificial Sequence
  Description of Artificial Sequence: Synthetic oligonucleotide
gugcucgcccugcccaacgcagaca

SEQ ID NO: 24111 - RNA, 25 nt, Artificial Sequence
  Description of Artificial Sequence: Synthetic oligonucleotide
agccagacccagggcggccccucug

SEQ ID NO: 24112 - RNA, 25 nt, Artificial Sequence
  Description of Artificial Sequence: Synthetic oligonucleotide
ggcggcucugcuccucccgaaggau

SEQ ID NO: 24113 - RNA, 25 nt, Artificial Sequence
  Description of Artificial Sequence: Synthetic oligonucleotide
ugcuuggggagugaggcgaagcugg

SEQ ID NO: 24114 - RNA, 25 nt, Artificial Sequence
  Description of Artificial Sequence: Synthetic oligonucleotide
ggccgcuccucuccccuacagcagc

SEQ ID NO: 24115 - RNA, 25 nt, Artificial Sequence
  Description of Artificial Sequence: Synthetic oligonucleotide
cccccuuccuccaucccucuguucu

SEQ ID NO: 24116 - RNA, 25 nt, Artificial Sequence
  Description of Artificial Sequence: Synthetic oligonucleotide
uccugagccuucaggagccugcacc

SEQ ID NO: 24117 - RNA, 25 nt, Artificial Sequence
  Description of Artificial Sequence: Synthetic oligonucleotide
caguccugccuguccuucuacucag

SEQ ID NO: 24118 - RNA, 25 nt, Artificial Sequence
  Description of Artificial Sequence: Synthetic oligonucleotide
gcuguuacccacucugggaccagca

SEQ ID NO: 24119 - RNA, 25 nt, Artificial Sequence
  Description of Artificial Sequence: Synthetic oligonucleotide
agucuuucugauaacugggagaggg

SEQ ID NO: 24120 - RNA, 25 nt, Artificial Sequence
  Description of Artificial Sequence: Synthetic oligonucleotide
gcaguaaggaggacuuccuggaggg

SEQ ID NO: 24121 - RNA, 25 nt, Artificial Sequence
  Description of Artificial Sequence: Synthetic oligonucleotide
gggugacuguccagagccuggaacu

SEQ ID NO: 24122 - RNA, 25 nt, Artificial Sequence
  Description of Artificial Sequence: Synthetic oligonucleotide
ugugcccacaccagaagccaucagc

SEQ ID NO: 24123 - RNA, 25 nt, Artificial Sequence
  Description of Artificial Sequence: Synthetic oligonucleotide
cagcaaggacaccaugcggcuuccg

SEQ ID NO: 24124 - RNA, 25 nt, Artificial Sequence
  Description of Artificial Sequence: Synthetic oligonucleotide
gggugcgaugccagcucuggcccuc

SEQ ID NO: 24125 - RNA, 25 nt, Artificial Sequence
  Description of Artificial Sequence: Synthetic oligonucleotide
caaaggcgagcugcuguugcugucu

SEQ ID NO: 24126 - RNA, 25 nt, Artificial Sequence
  Description of Artificial Sequence: Synthetic oligonucleotide
ucuccuguuacuucuggaaccacag

SEQ ID NO: 24127 - RNA, 25 nt, Artificial Sequence
  Description of Artificial Sequence: Synthetic oligonucleotide
gaucucucagggccuggucgucaca

SEQ ID NO: 24128 - RNA, 25 nt, Artificial Sequence
  Description of Artificial Sequence: Synthetic oligonucleotide
acccccggggccagagcuuguccuc

SEQ ID NO: 24129 - RNA, 25 nt, Artificial Sequence
  Description of Artificial Sequence: Synthetic oligonucleotide
caaugucuccagcaccuucguucug

SEQ ID NO: 24130 - RNA, 25 nt, Artificial Sequence
  Description of Artificial Sequence: Synthetic oligonucleotide
gaccugcucggguucagcuccggug

SEQ ID NO: 24131 - RNA, 25 nt, Artificial Sequence
  Description of Artificial Sequence: Synthetic oligonucleotide
ggugugggaacggaugucccaggag

SEQ ID NO: 24132 - RNA, 25 nt, Artificial Sequence
  Description of Artificial Sequence: Synthetic oligonucleotide
gcccccacaggaaauggccaaggcc

SEQ ID NO: 24133 - RNA, 25 nt, Artificial Sequence
  Description of Artificial Sequence: Synthetic oligonucleotide
ccaggauggcaccuucuccagcgug

SEQ ID NO: 24134 - RNA, 25 nt, Artificial Sequence
  Description of Artificial Sequence: Synthetic oligonucleotide
gcucacacugaccaaccucacuggg

SEQ ID NO: 24135 - RNA, 25 nt, Artificial Sequence
  Description of Artificial Sequence: Synthetic oligonucleotide
gcuagacacgggagaauacuuuugc

SEQ ID NO: 24136 - RNA, 25 nt, Artificial Sequence
  Description of Artificial Sequence: Synthetic oligonucleotide
cacccacaaugacucccguggacug

SEQ ID NO: 24137 - RNA, 25 nt, Artificial Sequence
  Description of Artificial Sequence: Synthetic oligonucleotide
ggagaccgaugagcggaaacggcuc

SEQ ID NO: 24138 - RNA, 25 nt, Artificial Sequence
  Description of Artificial Sequence: Synthetic oligonucleotide
cuacaucuuugugccagaucccacc

SEQ ID NO: 24139 - RNA, 25 nt, Artificial Sequence
  Description of Artificial Sequence: Synthetic oligonucleotide
cgugggcuuccucccuaaugaugcc

SEQ ID NO: 24140 - RNA, 25 nt, Artificial Sequence
  Description of Artificial Sequence: Synthetic oligonucleotide
cgaggaacuauucaucuuucucacg

SEQ ID NO: 24141 - RNA, 25 nt, Artificial Sequence
  Description of Artificial Sequence: Synthetic oligonucleotide
ggaaauaacugagaucaccauucca

SEQ ID NO: 24142 - RNA, 25 nt, Artificial Sequence
  Description of Artificial Sequence: Synthetic oligonucleotide
augccgaguaacagacccacagcug

SEQ ID NO: 24143 - RNA, 25 nt, Artificial Sequence
  Description of Artificial Sequence: Synthetic oligonucleotide
gguggugacacugcacgagaagaaa

SEQ ID NO: 24144 - RNA, 25 nt, Artificial Sequence
  Description of Artificial Sequence: Synthetic oligonucleotide
aggggacguugcacugccugucccc

SEQ ID NO: 24145 - RNA, 25 nt, Artificial Sequence
  Description of Artificial Sequence: Synthetic oligonucleotide
cuaugaucaccaacguggcuuuucu

SEQ ID NO: 24146 - RNA, 25 nt, Artificial Sequence
  Description of Artificial Sequence: Synthetic oligonucleotide
ugguaucuuugaggacagaagcuac

SEQ ID NO: 24147 - RNA, 25 nt, Artificial Sequence
  Description of Artificial Sequence: Synthetic oligonucleotide
caucugcaaaaccaccauuggggac

SEQ ID NO: 24148 - RNA, 25 nt, Artificial Sequence
  Description of Artificial Sequence: Synthetic oligonucleotide
cagggagguggauucugaugccuac

SEQ ID NO: 24149 - RNA, 25 nt, Artificial Sequence
  Description of Artificial Sequence: Synthetic oligonucleotide
cuaugucuacagacuccagguguca

SEQ ID NO: 24150 - RNA, 25 nt, Artificial Sequence
  Description of Artificial Sequence: Synthetic oligonucleotide
auccaucaacgucucugugaacgca

SEQ ID NO: 24151 - RNA, 25 nt, Artificial Sequence
  Description of Artificial Sequence: Synthetic oligonucleotide
agugcagacugugguccgccagggu

SEQ ID NO: 24152 - RNA, 25 nt, Artificial Sequence
  Description of Artificial Sequence: Synthetic oligonucleotide
ugagaacaucacccucaugugcauu

SEQ ID NO: 24153 - RNA, 25 nt, Artificial Sequence
  Description of Artificial Sequence: Synthetic oligonucleotide
ugugaucgggaaugagguggucaac

SEQ ID NO: 24154 - RNA, 25 nt, Artificial Sequence
  Description of Artificial Sequence: Synthetic oligonucleotide
cuucgaguggacauacccccgcaaa

SEQ ID NO: 24155 - RNA, 25 nt, Artificial Sequence
  Description of Artificial Sequence: Synthetic oligonucleotide
agaaagugggcggcugguggagccg

SEQ ID NO: 24156 - RNA, 25 nt, Artificial Sequence
  Description of Artificial Sequence: Synthetic oligonucleotide
ggugacugacuuccucuuggauaug

SEQ ID NO: 24157 - RNA, 25 nt, Artificial Sequence
  Description of Artificial Sequence: Synthetic oligonucleotide
gccuuaccacauccgcuccauccug

SEQ ID NO: 24158 - RNA, 25 nt, Artificial Sequence
  Description of Artificial Sequence: Synthetic oligonucleotide
gcacauccccagugccgaguuagaa

SEQ ID NO: 24159 - RNA, 25 nt, Artificial Sequence
  Description of Artificial Sequence: Synthetic oligonucleotide
agacucggggaccuacaccugcaau

SEQ ID NO: 24160 - RNA, 25 nt, Artificial Sequence
  Description of Artificial Sequence: Synthetic oligonucleotide
ugugacggagagugugaaugaccau

SEQ ID NO: 24161 - RNA, 25 nt, Artificial Sequence
  Description of Artificial Sequence: Synthetic oligonucleotide
ucaggaugaaaaggccaucaacauc

SEQ ID NO: 24162 - RNA, 25 nt, Artificial Sequence
  Description of Artificial Sequence: Synthetic oligonucleotide
caccgugguugagagcggcuacgug

SEQ ID NO: 24163 - RNA, 25 nt, Artificial Sequence
  Description of Artificial Sequence: Synthetic oligonucleotide
gcggcuccugggagaggugggcaca

SEQ ID NO: 24164 - RNA, 25 nt, Artificial Sequence
  Description of Artificial Sequence: Synthetic oligonucleotide
acuacaauuugcugagcugcaucgg

SEQ ID NO: 24165 - RNA, 25 nt, Artificial Sequence
  Description of Artificial Sequence: Synthetic oligonucleotide
gagccggacacugcagguaguguuc

SEQ ID NO: 24166 - RNA, 25 nt, Artificial Sequence
  Description of Artificial Sequence: Synthetic oligonucleotide
cgaggccuacccaccgcccacuguc

SEQ ID NO: 24167 - RNA, 25 nt, Artificial Sequence
  Description of Artificial Sequence: Synthetic oligonucleotide
ccugugguucaaagacaaccgcacc

SEQ ID NO: 24168 - RNA, 25 nt, Artificial Sequence
  Description of Artificial Sequence: Synthetic oligonucleotide
ccugggcgacuccagcgcuggcgaa

SEQ ID NO: 24169 - RNA, 25 nt, Artificial Sequence
  Description of Artificial Sequence: Synthetic oligonucleotide
aaucgcccuguccacgcgcaacgug

SEQ ID NO: 24170 - RNA, 25 nt, Artificial Sequence
  Description of Artificial Sequence: Synthetic oligonucleotide
gucggagacccgguaugugucagag

SEQ ID NO: 24171 - RNA, 25 nt, Artificial Sequence
  Description of Artificial Sequence: Synthetic oligonucleotide
gcugacacugguucgcgugaaggug

SEQ ID NO: 24172 - RNA, 25 nt, Artificial Sequence
  Description of Artificial Sequence: Synthetic oligonucleotide
ggcagaggcuggccacuacaccaug

SEQ ID NO: 24173 - RNA, 25 nt, Artificial Sequence
  Description of Artificial Sequence: Synthetic oligonucleotide
gcgggccuuccaugaggaugcugag

SEQ ID NO: 24174 - RNA, 25 nt, Artificial Sequence
  Description of Artificial Sequence: Synthetic oligonucleotide
gguccagcucuccuuccagcuacag

SEQ ID NO: 24175 - RNA, 25 nt, Artificial Sequence
  Description of Artificial Sequence: Synthetic oligonucleotide
gaucaaugucccuguccgagugcug

SEQ ID NO: 24176 - RNA, 25 nt, Artificial Sequence
  Description of Artificial Sequence: Synthetic oligonucleotide
ggagcuaagugagagccacccugac

SEQ ID NO: 24177 - RNA, 25 nt, Artificial Sequence
  Description of Artificial Sequence: Synthetic oligonucleotide
caguggggaacagacaguccgcugu

SEQ ID NO: 24178 - RNA, 25 nt, Artificial Sequence
  Description of Artificial Sequence: Synthetic oligonucleotide
ucguggccggggcaugccccagccg

SEQ ID NO: 24179 - RNA, 25 nt, Artificial Sequence
  Description of Artificial Sequence: Synthetic oligonucleotide
gaacaucaucuggucugccugcaga

SEQ ID NO: 24180 - RNA, 25 nt, Artificial Sequence
  Description of Artificial Sequence: Synthetic oligonucleotide
agaccucaaaagguguccacgugag

SEQ ID NO: 24181 - RNA, 25 nt, Artificial Sequence
  Description of Artificial Sequence: Synthetic oligonucleotide
gcugccgcccacgcugcuggggaac

SEQ ID NO: 24182 - RNA, 25 nt, Artificial Sequence
  Description of Artificial Sequence: Synthetic oligonucleotide
caguuccgaagaggagagccagcug

SEQ ID NO: 24183 - RNA, 25 nt, Artificial Sequence
  Description of Artificial Sequence: Synthetic oligonucleotide
ggagacuaacgugacguacugggag

SEQ ID NO: 24184 - RNA, 25 nt, Artificial Sequence
  Description of Artificial Sequence: Synthetic oligonucleotide
ggaggagcaggaguuugagguggug

SEQ ID NO: 24185 - RNA, 25 nt, Artificial Sequence
  Description of Artificial Sequence: Synthetic oligonucleotide
gagcacacugcgucugcagcacgug

SEQ ID NO: 24186 - RNA, 25 nt, Artificial Sequence
  Description of Artificial Sequence: Synthetic oligonucleotide
ggaucggccacugucggugcgcugc

SEQ ID NO: 24187 - RNA, 25 nt, Artificial Sequence
  Description of Artificial Sequence: Synthetic oligonucleotide
cacgcugcgcaacgcugugggccag

SEQ ID NO: 24188 - RNA, 25 nt, Artificial Sequence
  Description of Artificial Sequence: Synthetic oligonucleotide
ggacacgcaggaggucaucguggug

SEQ ID NO: 24189 - RNA, 25 nt, Artificial Sequence
  Description of Artificial Sequence: Synthetic oligonucleotide
gccacacuccuugcccuuuaaggug

SEQ ID NO: 24190 - RNA, 25 nt, Artificial Sequence
  Description of Artificial Sequence: Synthetic oligonucleotide
gguggugaucucagccauccuggcc

SEQ ID NO: 24191 - RNA, 25 nt, Artificial Sequence
  Description of Artificial Sequence: Synthetic oligonucleotide
ccugguggugcucaccaucaucucc

SEQ ID NO: 24192 - RNA, 25 nt, Artificial Sequence
  Description of Artificial Sequence: Synthetic oligonucleotide
ccuuaucauccucaucaugcuuugg

SEQ ID NO: 24193 - RNA, 25 nt, Artificial Sequence
  Description of Artificial Sequence: Synthetic oligonucleotide
gcagaagaagccacguuacgagauc

SEQ ID NO: 24194 - RNA, 25 nt, Artificial Sequence
  Description of Artificial Sequence: Synthetic oligonucleotide
ccgauggaaggugauugagucugug

SEQ ID NO: 24195 - RNA, 25 nt, Artificial Sequence
  Description of Artificial Sequence: Synthetic oligonucleotide
gagcucugacggccaugaguacauc

SEQ ID NO: 24196 - RNA, 25 nt, Artificial Sequence
  Description of Artificial Sequence: Synthetic oligonucleotide
cuacguggaccccaugcagcugccc

SEQ ID NO: 24197 - RNA, 25 nt, Artificial Sequence
  Description of Artificial Sequence: Synthetic oligonucleotide
cuaugacuccacgugggagcugccg

SEQ ID NO: 24198 - RNA, 25 nt, Artificial Sequence
  Description of Artificial Sequence: Synthetic oligonucleotide
gcgggaccagcuugugcugggacgc

SEQ ID NO: 24199 - RNA, 25 nt, Artificial Sequence
  Description of Artificial Sequence: Synthetic oligonucleotide
cacccucggcucuggggccuuuggg

SEQ ID NO: 24200 - RNA, 25 nt, Artificial Sequence
  Description of Artificial Sequence: Synthetic oligonucleotide
gcaggugguggaggccacggcucau

SEQ ID NO: 24201 - RNA, 25 nt, Artificial Sequence
  Description of Artificial Sequence: Synthetic oligonucleotide
uggccugagccauucucaggccacg

SEQ ID NO: 24202 - RNA, 25 nt, Artificial Sequence
  Description of Artificial Sequence: Synthetic oligonucleotide
gaugaaaguggccgucaagaugcuu

SEQ ID NO: 24203 - RNA, 25 nt, Artificial Sequence
  Description of Artificial Sequence: Synthetic oligonucleotide
uaaauccacagcccgcagcagugag

SEQ ID NO: 24204 - RNA, 25 nt, Artificial Sequence
  Description of Artificial Sequence: Synthetic oligonucleotide
gaagcaagcccuuaugucggagcug

SEQ ID NO: 24205 - RNA, 25 nt, Artificial Sequence
  Description of Artificial Sequence: Synthetic oligonucleotide
gaagaucaugagucaccuugggccc

SEQ ID NO: 24206 - RNA, 25 nt, Artificial Sequence
  Description of Artificial Sequence: Synthetic oligonucleotide
ccaccugaacguggucaaccuguug

SEQ ID NO: 24207 - RNA, 25 nt, Artificial Sequence
  Description of Artificial Sequence: Synthetic oligonucleotide
gggggccugcaccaaaggaggaccc

SEQ ID NO: 24208 - RNA, 25 nt, Artificial Sequence
  Description of Artificial Sequence: Synthetic oligonucleotide
caucuauaucaucacugaguacugc

SEQ ID NO: 24209 - RNA, 25 nt, Artificial Sequence
  Description of Artificial Sequence: Synthetic oligonucleotide
ccgcuacggagaccugguggacuac

SEQ ID NO: 24210 - RNA, 25 nt, Artificial Sequence
  Description of Artificial Sequence: Synthetic oligonucleotide
ccugcaccgcaacaaacacaccuuc

SEQ ID NO: 24211 - RNA, 25 nt, Artificial Sequence
  Description of Artificial Sequence: Synthetic oligonucleotide
ccugcagcaccacuccgacaagcgc

SEQ ID NO: 24212 - RNA, 25 nt, Artificial Sequence
  Description of Artificial Sequence: Synthetic oligonucleotide
ccgcccgcccagcgcggagcucuac

SEQ ID NO: 24213 - RNA, 25 nt, Artificial Sequence
  Description of Artificial Sequence: Synthetic oligonucleotide
cagcaaugcucugcccguugggcuc

SEQ ID NO: 24214 - RNA, 25 nt, Artificial Sequence
  Description of Artificial Sequence: Synthetic oligonucleotide
cccccugcccagccauguguccuug

SEQ ID NO: 24215 - RNA, 25 nt, Artificial Sequence
  Description of Artificial Sequence: Synthetic oligonucleotide
gaccggggagagcgacgguggcuac

SEQ ID NO: 24216 - RNA, 25 nt, Artificial Sequence
  Description of Artificial Sequence: Synthetic oligonucleotide
cauggacaugagcaaggacgagucg

SEQ ID NO: 24217 - RNA, 25 nt, Artificial Sequence
  Description of Artificial Sequence: Synthetic oligonucleotide
gguggacuaugugcccaugcuggac

SEQ ID NO: 24218 - RNA, 25 nt, Artificial Sequence
  Description of Artificial Sequence: Synthetic oligonucleotide
caugaaaggagacgucaaauaugca

SEQ ID NO: 24219 - RNA, 25 nt, Artificial Sequence
  Description of Artificial Sequence: Synthetic oligonucleotide
agacaucgaguccuccaacuacaug

SEQ ID NO: 24220 - RNA, 25 nt, Artificial Sequence
  Description of Artificial Sequence: Synthetic oligonucleotide
ggccccuuacgauaacuacguuccc

SEQ ID NO: 24221 - RNA, 25 nt, Artificial Sequence
  Description of Artificial Sequence: Synthetic oligonucleotide
cucugccccugagaggaccugccga

SEQ ID NO: 24222 - RNA, 25 nt, Artificial Sequence
  Description of Artificial Sequence: Synthetic oligonucleotide
agcaacuuugaucaacgagucucca

SEQ ID NO: 24223 - RNA, 25 nt, Artificial Sequence
  Description of Artificial Sequence: Synthetic oligonucleotide
agugcuaagcuacauggaccucgug

SEQ ID NO: 24224 - RNA, 25 nt, Artificial Sequence
  Description of Artificial Sequence: Synthetic oligonucleotide
gggcuucagcuaccagguggccaau

SEQ ID NO: 24225 - RNA, 25 nt, Artificial Sequence
  Description of Artificial Sequence: Synthetic oligonucleotide
uggcauggaguuucuggccuccaag

SEQ ID NO: 24226 - RNA, 25 nt, Artificial Sequence
  Description of Artificial Sequence: Synthetic oligonucleotide
gaacugcguccacagagaccuggcg

SEQ ID NO: 24227 - RNA, 25 nt, Artificial Sequence
  Description of Artificial Sequence: Synthetic oligonucleotide
ggcuaggaacgugcucaucugugaa

SEQ ID NO: 24228 - RNA, 25 nt, Artificial Sequence
  Description of Artificial Sequence: Synthetic oligonucleotide
aggcaagcuggucaagaucugugac

SEQ ID NO: 24229 - RNA, 25 nt, Artificial Sequence
  Description of Artificial Sequence: Synthetic oligonucleotide
cuuuggccuggcucgagacaucaug

SEQ ID NO: 24230 - RNA, 25 nt, Artificial Sequence
  Description of Artificial Sequence: Synthetic oligonucleotide
gcgggacucgaauuacaucuccaaa

SEQ ID NO: 24231 - RNA, 25 nt, Artificial Sequence
  Description of Artificial Sequence: Synthetic oligonucleotide
aggcagcaccuuuuugccuuuaaag

SEQ ID NO: 24232 - RNA, 25 nt, Artificial Sequence
  Description of Artificial Sequence: Synthetic oligonucleotide
guggauggcuccggagagcaucuuc

SEQ ID NO: 24233 - RNA, 25 nt, Artificial Sequence
  Description of Artificial Sequence: Synthetic oligonucleotide
caacagccucuacaccacccugagc

SEQ ID NO: 24234 - RNA, 25 nt, Artificial Sequence
  Description of Artificial Sequence: Synthetic oligonucleotide
cgacgugugguccuucgggauccug

SEQ ID NO: 24235 - RNA, 25 nt, Artificial Sequence
  Description of Artificial Sequence: Synthetic oligonucleotide
gcucugggagaucuucaccuugggu

SEQ ID NO: 24236 - RNA, 25 nt, Artificial Sequence
  Description of Artificial Sequence: Synthetic oligonucleotide
uggcaccccuuacccagagcugccc

SEQ ID NO: 24237 - RNA, 25 nt, Artificial Sequence
  Description of Artificial Sequence: Synthetic oligonucleotide
caugaacgagcaguucuacaaugcc

SEQ ID NO: 24238 - RNA, 25 nt, Artificial Sequence
  Description of Artificial Sequence: Synthetic oligonucleotide
caucaaacgggguuaccgcauggcc

SEQ ID NO: 24239 - RNA, 25 nt, Artificial Sequence
  Description of Artificial Sequence: Synthetic oligonucleotide
ccagccugcccaugccuccgacgag

SEQ ID NO: 24240 - RNA, 25 nt, Artificial Sequence
  Description of Artificial Sequence: Synthetic oligonucleotide
gaucuaugagaucaugcagaagugc

SEQ ID NO: 24241 - RNA, 25 nt, Artificial Sequence
  Description of Artificial Sequence: Synthetic oligonucleotide
cugggaagagaaguuugagauucgg

SEQ ID NO: 24242 - RNA, 25 nt, Artificial Sequence
  Description of Artificial Sequence: Synthetic oligonucleotide
gccccccuucucccagcuggugcug

SEQ ID NO: 24243 - RNA, 25 nt, Artificial Sequence
  Description of Artificial Sequence: Synthetic oligonucleotide
gcuucucgagagacuguugggcgaa

SEQ ID NO: 24244 - RNA, 25 nt, Artificial Sequence
  Description of Artificial Sequence: Synthetic oligonucleotide
agguuacaaaaagaaguaccagcag

SEQ ID NO: 24245 - RNA, 25 nt, Artificial Sequence
  Description of Artificial Sequence: Synthetic oligonucleotide
gguggaugaggaguuucugaggagu

SEQ ID NO: 24246 - RNA, 25 nt, Artificial Sequence
  Description of Artificial Sequence: Synthetic oligonucleotide
ugaccacccagccauccuucggucc

SEQ ID NO: 24247 - RNA, 25 nt, Artificial Sequence
  Description of Artificial Sequence: Synthetic oligonucleotide
ccaggcccgcuugccuggguuccau

SEQ ID NO: 24248 - RNA, 25 nt, Artificial Sequence
  Description of Artificial Sequence: Synthetic oligonucleotide
uggccuccgaucuccccuggacacc

SEQ ID NO: 24249 - RNA, 25 nt, Artificial Sequence
  Description of Artificial Sequence: Synthetic oligonucleotide
cagcuccguccucuauacugccgug

SEQ ID NO: 24250 - RNA, 25 nt, Artificial Sequence
  Description of Artificial Sequence: Synthetic oligonucleotide
gcagcccaaugagggugacaacgac

SEQ ID NO: 24251 - RNA, 25 nt, Artificial Sequence
  Description of Artificial Sequence: Synthetic oligonucleotide
cuauaucaucccccugccugacccc

SEQ ID NO: 24252 - RNA, 25 nt, Artificial Sequence
  Description of Artificial Sequence: Synthetic oligonucleotide
caaacccgagguugcugacgagggc

SEQ ID NO: 24253 - RNA, 25 nt, Artificial Sequence
  Description of Artificial Sequence: Synthetic oligonucleotide
cccacuggaggguucccccagccua

SEQ ID NO: 24254 - RNA, 25 nt, Artificial Sequence
  Description of Artificial Sequence: Synthetic oligonucleotide
agccagcuccacccugaaugaaguc

SEQ ID NO: 24255 - RNA, 25 nt, Artificial Sequence
  Description of Artificial Sequence: Synthetic oligonucleotide
caacaccuccucaaccaucuccugu

SEQ ID NO: 24256 - RNA, 25 nt, Artificial Sequence
  Description of Artificial Sequence: Synthetic oligonucleotide
ugacagcccccuggagccccaggac

SEQ ID NO: 24257 - RNA, 25 nt, Artificial Sequence
  Description of Artificial Sequence: Synthetic oligonucleotide
cgaaccagagccagagccccagcuu

SEQ ID NO: 24258 - RNA, 25 nt, Artificial Sequence
  Description of Artificial Sequence: Synthetic oligonucleotide
ugagcuccagguggagccggagcca

SEQ ID NO: 24259 - RNA, 25 nt, Artificial Sequence
  Description of Artificial Sequence: Synthetic oligonucleotide
agagcuggaacaguugccggauucg

SEQ ID NO: 24260 - RNA, 25 nt, Artificial Sequence
  Description of Artificial Sequence: Synthetic oligonucleotide
ggggugcccugcgccucgggcggaa

SEQ ID NO: 24261 - RNA, 25 nt, Artificial Sequence
  Description of Artificial Sequence: Synthetic oligonucleotide
agcagaggauagcuuccuguagggg

SEQ ID NO: 24262 - RNA, 25 nt, Artificial Sequence
  Description of Artificial Sequence: Synthetic oligonucleotide
ggcuggccccuacccugcccugccu

SEQ ID NO: 24263 - RNA, 25 nt, Artificial Sequence
  Description of Artificial Sequence: Synthetic oligonucleotide
ugaagcucccccccugccagcaccc

SEQ ID NO: 24264 - RNA, 25 nt, Artificial Sequence
  Description of Artificial Sequence: Synthetic oligonucleotide
cagcaucuccuggccuggccugacc

SEQ ID NO: 24265 - RNA, 25 nt, Artificial Sequence
  Description of Artificial Sequence: Synthetic oligonucleotide
cgggcuuccugucagccaggcugcc

SEQ ID NO: 24266 - RNA, 25 nt, Artificial Sequence
  Description of Artificial Sequence: Synthetic oligonucleotide
ccuuaucagcuguccccuucuggaa

SEQ ID NO: 24267 - RNA, 25 nt, Artificial Sequence
  Description of Artificial Sequence: Synthetic oligonucleotide
agcuuucugcuccugacguguugug

SEQ ID NO: 24268 - RNA, 25 nt, Artificial Sequence
  Description of Artificial Sequence: Synthetic oligonucleotide
gccccaaacccuggggcuggcuuag

SEQ ID NO: 24269 - RNA, 25 nt, Artificial Sequence
  Description of Artificial Sequence: Synthetic oligonucleotide
ggaggcaagaaaacugcaggggccg

SEQ ID NO: 24270 - RNA, 25 nt, Artificial Sequence
  Description of Artificial Sequence: Synthetic oligonucleotide
gugaccagcccucugccuccaggga

SEQ ID NO: 24271 - RNA, 25 nt, Artificial Sequence
  Description of Artificial Sequence: Synthetic oligonucleotide
aggccaacugacucugagccagggu

SEQ ID NO: 24272 - RNA, 25 nt, Artificial Sequence
  Description of Artificial Sequence: Synthetic oligonucleotide
uucccccagggaacucaguuuuccc

SEQ ID NO: 24273 - RNA, 25 nt, Artificial Sequence
  Description of Artificial Sequence: Synthetic oligonucleotide
cauauguaagaugggaaaguuaggc

SEQ ID NO: 24274 - RNA, 25 nt, Artificial Sequence
  Description of Artificial Sequence: Synthetic oligonucleotide
cuugaugacccagaaucuaggauuc

SEQ ID NO: 24275 - RNA, 25 nt, Artificial Sequence
  Description of Artificial Sequence: Synthetic oligonucleotide
cucucccuggcugacagguggggag

SEQ ID NO: 24276 - RNA, 25 nt, Artificial Sequence
  Description of Artificial Sequence: Synthetic oligonucleotide
gaccgaaucccucccugggaagauu

SEQ ID NO: 24277 - RNA, 25 nt, Artificial Sequence
  Description of Artificial Sequence: Synthetic oligonucleotide
ucuuggaguuacugaggugguaaau

SEQ ID NO: 24278 - RNA, 25 nt, Artificial Sequence
  Description of Artificial Sequence: Synthetic oligonucleotide
uuaacuuuuuucuguucagccagcu

SEQ ID NO: 24279 - RNA, 25 nt, Artificial Sequence
  Description of Artificial Sequence: Synthetic oligonucleotide
uaccccucaaggaaucauagcucuc

SEQ ID NO: 24280 - RNA, 25 nt, Artificial Sequence
  Description of Artificial Sequence: Synthetic oligonucleotide
cuccucgcacuuuuauccacccagg

SEQ ID NO: 24281 - RNA, 25 nt, Artificial Sequence
  Description of Artificial Sequence: Synthetic oligonucleotide
gagcuagggaagagacccuagccuc

SEQ ID NO: 24282 - RNA, 25 nt, Artificial Sequence
  Description of Artificial Sequence: Synthetic oligonucleotide
cccuggcugcuggcugagcuagggc

SEQ ID NO: 24283 - RNA, 25 nt, Artificial Sequence
  Description of Artificial Sequence: Synthetic oligonucleotide
ccuagccuugagcaguguugccuca

SEQ ID NO: 24284 - RNA, 25 nt, Artificial Sequence
  Description of Artificial Sequence: Synthetic oligonucleotide
auccagaagaaagccagucuccucc

SEQ ID NO: 24285 - RNA, 25 nt, Artificial Sequence
  Description of Artificial Sequence: Synthetic oligonucleotide
ccuaugaugccagucccugcguucc

SEQ ID NO: 24286 - RNA, 25 nt, Artificial Sequence
  Description of Artificial Sequence: Synthetic oligonucleotide
ccuggcccgagcuggucuggggcca

SEQ ID NO: 24287 - RNA, 25 nt, Artificial Sequence
  Description of Artificial Sequence: Synthetic oligonucleotide
auuaggcagccuaauuaaugcugga

SEQ ID NO: 24288 - RNA, 25 nt, Artificial Sequence
  Description of Artificial Sequence: Synthetic oligonucleotide
aggcugagccaaguacaggacaccc

SEQ ID NO: 24289 - RNA, 25 nt, Artificial Sequence
  Description of Artificial Sequence: Synthetic oligonucleotide
cccagccugcagcccuugcccaggg

SEQ ID NO: 24290 - RNA, 25 nt, Artificial Sequence
  Description of Artificial Sequence: Synthetic oligonucleotide
gcacuuggagcacacgcagccauag

SEQ ID NO: 24291 - RNA, 25 nt, Artificial Sequence
  Description of Artificial Sequence: Synthetic oligonucleotide
gcaagugccugugucccuguccuuc

SEQ ID NO: 24292 - RNA, 25 nt, Artificial Sequence
  Description of Artificial Sequence: Synthetic oligonucleotide
caggcccaucaguccuggggcuuuu

SEQ ID NO: 24293 - RNA, 25 nt, Artificial Sequence
  Description of Artificial Sequence: Synthetic oligonucleotide
uucuuuaucacccucagucuuaauc

SEQ ID NO: 24294 - RNA, 25 nt, Artificial Sequence
  Description of Artificial Sequence: Synthetic oligonucleotide
ccauccaccagagucuagaaggcca

SEQ ID NO: 24295 - RNA, 25 nt, Artificial Sequence
  Description of Artificial Sequence: Synthetic oligonucleotide
agacgggccccgcaucugugaugag

SEQ ID NO: 24296 - RNA, 25 nt, Artificial Sequence
  Description of Artificial Sequence: Synthetic oligonucleotide
gaauguaaaugugccaguguggagu

SEQ ID NO: 24297 - RNA, 25 nt, Artificial Sequence
  Description of Artificial Sequence: Synthetic oligonucleotide
uggccacgugugugugccaguauau

SEQ ID NO: 24298 - RNA, 25 nt, Artificial Sequence
  Description of Artificial Sequence: Synthetic oligonucleotide
uggcccuggcucugcauuggaccug

SEQ ID NO: 24299 - RNA, 25 nt, Artificial Sequence
  Description of Artificial Sequence: Synthetic oligonucleotide
gcuaugaggcuuuggaggaaucccu

SEQ ID NO: 24300 - RNA, 25 nt, Artificial Sequence
  Description of Artificial Sequence: Synthetic oligonucleotide
ucacccucucugggccucaguuucc

SEQ ID NO: 24301 - RNA, 25 nt, Artificial Sequence
  Description of Artificial Sequence: Synthetic oligonucleotide
cccuucaaaaaaugaauaagucgga

SEQ ID NO: 24302 - RNA, 25 nt, Artificial Sequence
  Description of Artificial Sequence: Synthetic oligonucleotide
acuuauuaacucugagugccuugcc

SEQ ID NO: 24303 - RNA, 25 nt, Artificial Sequence
  Description of Artificial Sequence: Synthetic oligonucleotide
cagcacuaacauucuagaguauucc

SEQ ID NO: 24304 - RNA, 25 nt, Artificial Sequence
  Description of Artificial Sequence: Synthetic oligonucleotide
caggugguugcacauuuguccagau

SEQ ID NO: 24305 - RNA, 25 nt, Artificial Sequence
  Description of Artificial Sequence: Synthetic oligonucleotide
ugaagcaaggccauauacccuaaac

SEQ ID NO: 24306 - RNA, 25 nt, Artificial Sequence
  Description of Artificial Sequence: Synthetic oligonucleotide
cuuccauccugggggucagcugggc

SEQ ID NO: 24307 - RNA, 25 nt, Artificial Sequence
  Description of Artificial Sequence: Synthetic oligonucleotide
cuccugggagauuccagaucacaca

SEQ ID NO: 24308 - RNA, 25 nt, Artificial Sequence
  Description of Artificial Sequence: Synthetic oligonucleotide
aucacacucuggggacucaggaacc

SEQ ID NO: 24309 - RNA, 25 nt, Artificial Sequence
  Description of Artificial Sequence: Synthetic oligonucleotide
caugccccuuccccaggcccccagc

SEQ ID NO: 24310 - RNA, 25 nt, Artificial Sequence
  Description of Artificial Sequence: Synthetic oligonucleotide
caagucucaagaacacagcugcaca

SEQ ID NO: 24311 - RNA, 25 nt, Artificial Sequence
  Description of Artificial Sequence: Synthetic oligonucleotide
aggccuugacuuagagugacagccg

SEQ ID NO: 24312 - RNA, 25 nt, Artificial Sequence
  Description of Artificial Sequence: Synthetic oligonucleotide
gguguccuggaaagcccccagcagc

SEQ ID NO: 24313 - RNA, 25 nt, Artificial Sequence
  Description of Artificial Sequence: Synthetic oligonucleotide
cugccccagggacaugggaagacca

SEQ ID NO: 24314 - RNA, 25 nt, Artificial Sequence
  Description of Artificial Sequence: Synthetic oligonucleotide
acgggaccucuuucacuacccacga

SEQ ID NO: 24315 - RNA, 25 nt, Artificial Sequence
  Description of Artificial Sequence: Synthetic oligonucleotide
augaccuccggggguauccugggca

SEQ ID NO: 24316 - RNA, 25 nt, Artificial Sequence
  Description of Artificial Sequence: Synthetic oligonucleotide
aaaagggacaaagagggcaaaugag

SEQ ID NO: 24317 - RNA, 25 nt, Artificial Sequence
  Description of Artificial Sequence: Synthetic oligonucleotide
gaucaccuccugcagcccaccacuc

SEQ ID NO: 24318 - RNA, 25 nt, Artificial Sequence
  Description of Artificial Sequence: Synthetic oligonucleotide
ccagcaccugugccgaggucugcgu

SEQ ID NO: 24319 - RNA, 25 nt, Artificial Sequence
  Description of Artificial Sequence: Synthetic oligonucleotide
ucgaagacagaauggacagugagga

SEQ ID NO: 24320 - RNA, 25 nt, Artificial Sequence
  Description of Artificial Sequence: Synthetic oligonucleotide
acaguuaugucuuguaaaagacaag

SEQ ID NO: 24321 - RNA, 25 nt, Artificial Sequence
  Description of Artificial Sequence: Synthetic oligonucleotide
gaagcuucagauggguaccccaaga

SEQ ID NO: 24322 - RNA, 25 nt, Artificial Sequence
  Description of Artificial Sequence: Synthetic oligonucleotide
aaggaugugagaggugggcgcuuug

SEQ ID NO: 24323 - RNA, 25 nt, Artificial Sequence
  Description of Artificial Sequence: Synthetic oligonucleotide
ggagguuugccccucacccaccagc

SEQ ID NO: 24324 - RNA, 25 nt, Artificial Sequence
  Description of Artificial Sequence: Synthetic oligonucleotide
cugccccaucccugaggcagcgcuc

SEQ ID NO: 24325 - RNA, 25 nt, Artificial Sequence
  Description of Artificial Sequence: Synthetic oligonucleotide
ccauggggguaugguuuugucacug

SEQ ID NO: 24326 - RNA, 25 nt, Artificial Sequence
  Description of Artificial Sequence: Synthetic oligonucleotide
gcccagaccuagcagugacaucuca

SEQ ID NO: 24327 - RNA, 25 nt, Artificial Sequence
  Description of Artificial Sequence: Synthetic oligonucleotide
auuguccccagcccagugggcauug

SEQ ID NO: 24328 - RNA, 25 nt, Artificial Sequence
  Description of Artificial Sequence: Synthetic oligonucleotide
ggaggugccaggggagucaggguug

SEQ ID NO: 24329 - RNA, 25 nt, Artificial Sequence
  Description of Artificial Sequence: Synthetic oligonucleotide
guagccaagacgcccccgcacgggg

SEQ ID NO: 24330 - RNA, 25 nt, Artificial Sequence
  Description of Artificial Sequence: Synthetic oligonucleotide
gaggguugggaagggggugcaggaa

SEQ ID NO: 24331 - RNA, 25 nt, Artificial Sequence
  Description of Artificial Sequence: Synthetic oligonucleotide
agcucaaccccucugggcaccaacc

SEQ ID NO: 24332 - RNA, 25 nt, Artificial Sequence
  Description of Artificial Sequence: Synthetic oligonucleotide
ccugcauugcagguuggcaccuuac

SEQ ID NO: 24333 - RNA, 25 nt, Artificial Sequence
  Description of Artificial Sequence: Synthetic oligonucleotide
cuucccugggauccccagaguuggu

SEQ ID NO: 24334 - RNA, 25 nt, Artificial Sequence
  Description of Artificial Sequence: Synthetic oligonucleotide
uccaaggagggagaguggguucuca

SEQ ID NO: 24335 - RNA, 25 nt, Artificial Sequence
  Description of Artificial Sequence: Synthetic oligonucleotide
aauacgguaccaaagauauaaucac

SEQ ID NO: 24336 - RNA, 25 nt, Artificial Sequence
  Description of Artificial Sequence: Synthetic oligonucleotide
ccuagguuuacaaauauuuuuagga

SEQ ID NO: 24337 - RNA, 25 nt, Artificial Sequence
  Description of Artificial Sequence: Synthetic oligonucleotide
acucacguuaacucacauuuauaca

SEQ ID NO: 24338 - RNA, 25 nt, Artificial Sequence
  Description of Artificial Sequence: Synthetic oligonucleotide
agcagaaaugcuauuuuguaugcug

SEQ ID NO: 24339 - RNA, 25 nt, Artificial Sequence
  Description of Artificial Sequence: Synthetic oligonucleotide
guuaaguuuuucuaucuguguacuu

SEQ ID NO: 24340 - RNA, 25 nt, Artificial Sequence
  Description of Artificial Sequence: Synthetic oligonucleotide
uuuuuuuaagggaaagauuuuaaua

SEQ ID NO: 24341 - RNA, 25 nt, Artificial Sequence
  Description of Artificial Sequence: Synthetic oligonucleotide
auuaaaccuggugcuucucacucac

SEQ ID NO: 24342 - RNA, 25 nt, Artificial Sequence
  Description of Artificial Sequence: Synthetic oligonucleotide
accuggugcuucucacucacaaaaa

SEQ ID NO: 24343 - DNA, 21 bp, Artificial Sequence
  Description of Artificial Sequence: Synthetic oligonucleotide
  Description of Combined DNA/RNA Molecule: Synthetic oligonucleotide
cuacacaaaucagcgauuutt

SEQ ID NO: 24344 - DNA, 21 bp, Artificial Sequence
  Description of Artificial Sequence: Synthetic oligonucleotide
  Description of Combined DNA/RNA Molecule: Synthetic oligonucleotide
aaaucgcugauuuguguagtt

SEQ ID NO: 24345 - DNA, 25 bp, Artificial Sequence
  Description of Artificial Sequence: Synthetic oligonucleotide
  Description of Combined DNA/RNA Molecule: Synthetic oligonucleotide
cuacacaaaucagcgauuuccaugt

SEQ ID NO: 24346 - RNA, 27 nt, Artificial Sequence
  Description of Artificial Sequence: Synthetic oligonucleotide
acauggaaaucgcugauuuguguaguc

SEQ ID NO: 24347 - RNA, 13 nt, Artificial Sequence
  Description of Artificial Sequence: Synthetic oligonucleotide
cuacacaaaucag

SEQ ID NO: 24348 - DNA, 11 bp, Artificial Sequence
  Description of Artificial Sequence: Synthetic oligonucleotide
  Description of Combined DNA/RNA Molecule: Synthetic oligonucleotide
gauuuccaugt

SEQ ID NO: 24349 - DNA, 21 bp, Artificial Sequence
  Description of Artificial Sequence: Synthetic oligonucleotide
  Description of Combined DNA/RNA Molecule: Synthetic oligonucleotide
ggaucuuauuucuucggagtt

SEQ ID NO: 24350 - DNA, 21 bp, Artificial Sequence
  Description of Artificial Sequence: Synthetic oligonucleotide
  Description of Combined DNA/RNA Molecule: Synthetic oligonucleotide
cuccgaagaaauaagaucctt

SEQ ID NO: 24351 - RNA, 11 nt, Artificial Sequence
  Description of Artificial Sequence: Synthetic oligonucleotide
ggaucuuauuu

SEQ ID NO: 24352 - DNA, 10 bp, Artificial Sequence
  Description of Artificial Sequence: Synthetic oligonucleotide
  Description of Combined DNA/RNA Molecule: Synthetic oligonucleotide
cuucggagtt

SEQ ID NO: 24353 - RNA, 27 nt, Artificial Sequence
  Description of Artificial Sequence: Synthetic oligonucleotide
cauugucuccgaagaaauaagauccuu

SEQ ID NO: 24354 - RNA, 8 nt, Artificial Sequence
  Description of Artificial Sequence: Synthetic oligonucleotide
  modified_base (2): LNA-G
ggaucuua

SEQ ID NO: 24355 - DNA, 17 bp, Artificial Sequence
  Description of Artificial Sequence: Synthetic oligonucleotide
  Description of Combined DNA/RNA Molecule: Synthetic oligonucleotide
uuucuucggagacaatg

SEQ ID NO: 24356 - DNA, 16 bp, Artificial Sequence
  Description of Artificial Sequence: Synthetic oligonucleotide
  Description of Combined DNA/RNA Molecule: Synthetic oligonucleotide
uucuucggagacaatg

SEQ ID NO: 24357 - DNA, 15 bp, Artificial Sequence
  Description of Artificial Sequence: Synthetic oligonucleotide
  Description of Combined DNA/RNA Molecule: Synthetic oligonucleotide
ucuucggagacaatg

SEQ ID NO: 24358 - DNA, 14 bp, Artificial Sequence
  Description of Artificial Sequence: Synthetic oligonucleotide
  Description of Combined DNA/RNA Molecule: Synthetic oligonucleotide
cuucggagacaatg

SEQ ID NO: 24359 - DNA, 13 bp, Artificial Sequence
  Description of Artificial Sequence: Synthetic oligonucleotide
  Description of Combined DNA/RNA Molecule: Synthetic oligonucleotide
uucggagacaatg

SEQ ID NO: 24360 - DNA, 12 bp, Artificial Sequence
  Description of Artificial Sequence: Synthetic oligonucleotide
  Description of Combined DNA/RNA Molecule: Synthetic oligonucleotide
ucggagacaatg

SEQ ID NO: 24361 - DNA, 11 bp, Artificial Sequence
  Description of Artificial Sequence: Synthetic oligonucleotide
  Description of Combined DNA/RNA Molecule: Synthetic oligonucleotide
cggagacaatg

SEQ ID NO: 24362 - RNA, 9 nt, Artificial Sequence
  Description of Artificial Sequence: Synthetic oligonucleotide
  modified_base (2): LNA-G
ggaucuuau

SEQ ID NO: 24363 - RNA, 10 nt, Artificial Sequence
  Description of Artificial Sequence: Synthetic oligonucleotide
  modified_base (2): LNA-G
ggaucuuauu

SEQ ID NO: 24364 - RNA, 11 nt, Artificial Sequence
  Description of Artificial Sequence: Synthetic oligonucleotide
  modified_base (2): LNA-G
ggaucuuauuu

SEQ ID NO: 24365 - RNA, 12 nt, Artificial Sequence
  Description of Artificial Sequence: Synthetic oligonucleotide
  modified_base (2): LNA-G
ggaucuuauuuc

SEQ ID NO: 24366 - RNA, 8 nt, Artificial Sequence
  Description of Artificial Sequence: Synthetic oligonucleotide
  modified_base (3): LNA-A
cuacacaa

SEQ ID NO: 24367 - DNA, 13 bp, Artificial Sequence
  Description of Artificial Sequence: Synthetic oligonucleotide
  Description of Combined DNA/RNA Molecule: Synthetic oligonucleotide
  modified_base (8): LNA-A
aucagcgauuutt

SEQ ID NO: 24368 - DNA, 12 bp, Artificial Sequence
  Description of Artificial Sequence: Synthetic oligonucleotide
  Description of Combined DNA/RNA Molecule: Synthetic oligonucleotide
  modified_base (7): LNA-A
ucagcgauuutt

SEQ ID NO: 24369 - DNA, 11 bp, Artificial Sequence
  Description of Artificial Sequence: Synthetic oligonucleotide
  Description of Combined DNA/RNA Molecule: Synthetic oligonucleotide
  modified_base (6): LNA-A
cagcgauuutt

SEQ ID NO: 24370 - DNA, 10 bp, Artificial Sequence
  Description of Artificial Sequence: Synthetic oligonucleotide
  Description of Combined DNA/RNA Molecule: Synthetic oligonucleotide
  modified_base (5): LNA-A
agcgauuutt

SEQ ID NO: 24371 - DNA, 9 bp, Artificial Sequence
  Description of Artificial Sequence: Synthetic oligonucleotide
  Description of Combined DNA/RNA Molecule: Synthetic oligonucleotide
  modified_base (4): LNA-A
gcgauuutt

SEQ ID NO: 24372 - DNA, 8 bp, Artificial Sequence
  Description of Artificial Sequence: Synthetic oligonucleotide
  Description of Combined DNA/RNA Molecule: Synthetic oligonucleotide
  modified_base (3): LNA-A
cgauuutt

SEQ ID NO: 24373 - DNA, 7 bp, Artificial Sequence
  Description of Artificial Sequence: Synthetic oligonucleotide
  Description of Combined DNA/RNA Molecule: Synthetic oligonucleotide
  modified_base (2): LNA-A
gauuutt

SEQ ID NO: 24374 - RNA, 9 nt, Artificial Sequence
  Description of Artificial Sequence: Synthetic oligonucleotide
  modified_base (3): LNA-A
cuacacaaa

SEQ ID NO: 24375 - RNA, 10 nt, Artificial Sequence
  Description of Artificial Sequence: Synthetic oligonucleotide
  modified_base (3): LNA-A
cuacacaaau

SEQ ID NO: 24376 - RNA, 11 nt, Artificial Sequence
  Description of Artificial Sequence: Synthetic oligonucleotide
  modified_base (3): LNA-A
cuacacaaauc

SEQ ID NO: 24377 - RNA, 12 nt, Artificial Sequence
  Description of Artificial Sequence: Synthetic oligonucleotide
  modified_base (3): LNA-A
cuacacaaauca

SEQ ID NO: 24378 - RNA, 13 nt, Artificial Sequence
  Description of Artificial Sequence: Synthetic oligonucleotide
  modified_base (3): LNA-A
cuacacaaaucag

SEQ ID NO: 24379 - RNA, 14 nt, Artificial Sequence
  Description of Artificial Sequence: Synthetic oligonucleotide
  modified_base (3): LNA-A
cuacacaaaucagc

SEQ ID NO: 24380 - RNA, 13 nt, Artificial Sequence
  Description of Artificial Sequence: Synthetic oligonucleotide
  modified_base (2): LNA-G
ggaucuuauuucu

SEQ ID NO: 24381 - RNA, 14 nt, Artificial Sequence
  Description of Artificial Sequence: Synthetic oligonucleotide
  modified_base (2): LNA-G
ggaucuuauuucuu

SEQ ID NO: 24382 - RNA, 8 nt, Artificial Sequence
  Description of Artificial Sequence: Synthetic oligonucleotide
  modified_base (2): LNA-G
  modified_base (8): LNA-A
ggaucuua

SEQ ID NO: 24383 - RNA, 9 nt, Artificial Sequence
  Description of Artificial Sequence: Synthetic oligonucleotide
  modified_base (2): LNA-G
  modified_base (9): LNA-U
ggaucuuau

SEQ ID NO: 24384 - RNA, 10 nt, Artificial Sequence
  Description of Artificial Sequence: Synthetic oligonucleotide
  modified_base (2): LNA-G
  modified_base (10): LNA-U
ggaucuuauu

SEQ ID NO: 24385 - RNA, 11 nt, Artificial Sequence
  Description of Artificial Sequence: Synthetic oligonucleotide
  modified_base (2): LNA-G
  modified_base (11): LNA-U
ggaucuuauuu

SEQ ID NO: 24386 - RNA, 12 nt, Artificial Sequence
  Description of Artificial Sequence: Synthetic oligonucleotide
  modified_base (2): LNA-G
  modified_base (12): LNA-C
ggaucuuauuuc

SEQ ID NO: 24387 - RNA, 13 nt, Artificial Sequence
  Description of Artificial Sequence: Synthetic oligonucleotide
  modified_base (2): LNA-G
  modified_base (13): LNA-U
ggaucuuauuucu

SEQ ID NO: 24388 - RNA, 14 nt, Artificial Sequence
  Description of Artificial Sequence: Synthetic oligonucleotide
  modified_base (2): LNA-G
  modified_base (14): LNA-U
ggaucuuauuucuu

SEQ ID NO: 24389 - DNA, 13 bp, Artificial Sequence
  Description of Artificial Sequence: Synthetic oligonucleotide
  Description of Combined DNA/RNA Molecule: Synthetic oligonucleotide
  modified_base (8): LNA-G
uuucuucggagtt

SEQ ID NO: 24390 - DNA, 12 bp, Artificial Sequence
  Description of Artificial Sequence: Synthetic oligonucleotide
  Description of Combined DNA/RNA Molecule: Synthetic oligonucleotide
  modified_base (7): LNA-G
uucuucggagtt

SEQ ID NO: 24391 - DNA, 11 bp, Artificial Sequence
  Description of Artificial Sequence: Synthetic oligonucleotide
  Description of Combined DNA/RNA Molecule: Synthetic oligonucleotide
  modified_base (6): LNA-G
ucuucggagtt

SEQ ID NO: 24392 - DNA, 10 bp, Artificial Sequence
  Description of Artificial Sequence: Synthetic oligonucleotide
  Description of Combined DNA/RNA Molecule: Synthetic oligonucleotide
  modified_base (5): LNA-G
cuucggagtt

SEQ ID NO: 24393 - DNA, 9 bp, Artificial Sequence
  Description of Artificial Sequence: Synthetic oligonucleotide
  Description of Combined DNA/RNA Molecule: Synthetic oligonucleotide
  modified_base (4): LNA-G
uucggagtt

SEQ ID NO: 24394 - DNA, 8 bp, Artificial Sequence
  Description of Artificial Sequence: Synthetic oligonucleotide
  Description of Combined DNA/RNA Molecule: Synthetic oligonucleotide
  modified_base (3): LNA-G
ucggagtt

SEQ ID NO: 24395 - DNA, 7 bp, Artificial Sequence
  Description of Artificial Sequence: Synthetic oligonucleotide
  Description of Combined DNA/RNA Molecule: Synthetic oligonucleotide
  modified_base (2): LNA-G
cggagtt

SEQ ID NO: 24396 - DNA, 13 bp, Artificial Sequence
  Description of Artificial Sequence: Synthetic oligonucleotide
  Description of Combined DNA/RNA Molecule: Synthetic oligonucleotide
  modified_base (1): LNA-U
  modified_base (8): LNA-G
uuucuucggagtt

SEQ ID NO: 24397 - DNA, 12 bp, Artificial Sequence
  Description of Artificial Sequence: Synthetic oligonucleotide
  Description of Combined DNA/RNA Molecule: Synthetic oligonucleotide
  modified_base (1): LNA-U
  modified_base (7): LNA-G
uucuucggagtt

SEQ ID NO: 24398 - DNA, 11 bp, Artificial Sequence
  Description of Artificial Sequence: Synthetic oligonucleotide
  Description of Combined DNA/RNA Molecule: Synthetic oligonucleotide
  modified_base (1): LNA-U
  modified_base (6): LNA-G
ucuucggagtt

SEQ ID NO: 24399 - DNA, 10 bp, Artificial Sequence
  Description of Artificial Sequence: Synthetic oligonucleotide
  Description of Combined DNA/RNA Molecule: Synthetic oligonucleotide
  modified_base (1): LNA-C
  modified_base (5): LNA-G
cuucggagtt

SEQ ID NO: 24400 - DNA, 9 bp, Artificial Sequence
  Description of Artificial Sequence: Synthetic oligonucleotide
  Description of Combined DNA/RNA Molecule: Synthetic oligonucleotide
  modified_base (1): LNA-U
  modified_base (4): LNA-G
uucggagtt

SEQ ID NO: 24401 - DNA, 8 bp, Artificial Sequence
  Description of Artificial Sequence: Synthetic oligonucleotide
  Description of Combined DNA/RNA Molecule: Synthetic oligonucleotide
  modified_base (1): LNA-U
  modified_base (3): LNA-G
ucggagtt

SEQ ID NO: 24402 - DNA, 7 bp, Artificial Sequence
  Description of Artificial Sequence: Synthetic oligonucleotide
  Description of Combined DNA/RNA Molecule: Synthetic oligonucleotide
  modified_base (1): LNA-C
  modified_base (2): LNA-G
cggagtt

SEQ ID NO: 24403 - DNA, 21 bp, Artificial Sequence
  Description of Artificial Sequence: Synthetic oligonucleotide
  Description of Combined DNA/RNA Molecule: Synthetic oligonucleotide
  modified_base (2): LNA-G
  modified_base (16): LNA-G
ggaucuuauuucuucggagtt

SEQ ID NO: 24404 - DNA, 25 bp, Artificial Sequence
  Description of Artificial Sequence: Synthetic oligonucleotide
  Description of Combined DNA/RNA Molecule: Synthetic oligonucleotide
ggaucuuauuucuucggagacaatg

SEQ ID NO: 24405 - RNA, 25 nt, Artificial Sequence
  Description of Artificial Sequence: Synthetic oligonucleotide
guauuuugaugaggaguucacggcc

SEQ ID NO: 24406 - RNA, 25 nt, Artificial Sequence
  Description of Artificial Sequence: Synthetic oligonucleotide
ggcccagaugaucaccaucacacca

SEQ ID NO: 24407 - RNA, 25 nt, Artificial Sequence
  Description of Artificial Sequence: Synthetic oligonucleotide
gggaagaaaacuauccugcggguuu

SEQ ID NO: 24408 - RNA, 25 nt, Artificial Sequence
  Description of Artificial Sequence: Synthetic oligonucleotide
guuuuaauuuauuucauccaguuug

SEQ ID NO: 24409 - RNA, 25 nt, Artificial Sequence
  Description of Artificial Sequence: Synthetic oligonucleotide
acguagggaaauguuaaggacuucu

SEQ ID NO: 24410 - RNA, 25 nt, Artificial Sequence
  Description of Artificial Sequence: Synthetic oligonucleotide
ccaggguuuacccagugggacagag

SEQ ID NO: 24411 - RNA, 25 nt, Artificial Sequence
  Description of Artificial Sequence: Synthetic oligonucleotide
agcaagguuuaaauuuguuauugug

SEQ ID NO: 24412 - RNA, 25 nt, Artificial Sequence
  Description of Artificial Sequence: Synthetic oligonucleotide
uguauuauguuguucaaaugcauuu

SEQ ID NO: 24413 - RNA, 25 nt, Artificial Sequence
  Description of Artificial Sequence: Synthetic oligonucleotide
uuuuaaucuuugugacaggaaagcc

SEQ ID NO: 24414 - RNA, 25 nt, Artificial Sequence
  Description of Artificial Sequence: Synthetic oligonucleotide
uuaaucuuugugacaggaaagcccu

SEQ ID NO: 24415 - RNA, 25 nt, Artificial Sequence
  Description of Artificial Sequence: Synthetic oligonucleotide
gcugcuuaugucucccagcauggcc

SEQ ID NO: 24416 - RNA, 25 nt, Artificial Sequence
  Description of Artificial Sequence: Synthetic oligonucleotide
aaguguuucagaagcuucucccuga

SEQ ID NO: 24417 - RNA, 25 nt, Artificial Sequence
  Description of Artificial Sequence: Synthetic oligonucleotide
gaccaucaauaaggaagaagcccuu

SEQ ID NO: 24418 - RNA, 25 nt, Artificial Sequence
  Description of Artificial Sequence: Synthetic oligonucleotide
ccaucaauaaggaagaagcccuuca

SEQ ID NO: 24419 - RNA, 25 nt, Artificial Sequence
  Description of Artificial Sequence: Synthetic oligonucleotide
ucaauaaggaagaagcccuucagcg

SEQ ID NO: 24420 - RNA, 25 nt, Artificial Sequence
  Description of Artificial Sequence: Synthetic oligonucleotide
aauaaggaagaagcccuucagcggc

SEQ ID NO: 24421 - RNA, 25 nt, Artificial Sequence
  Description of Artificial Sequence: Synthetic oligonucleotide
aggaagaagcccuucagcggccagu

SEQ ID NO: 24422 - RNA, 25 nt, Artificial Sequence
  Description of Artificial Sequence: Synthetic oligonucleotide
gcauaacuaaaggugaaaagcuccg

SEQ ID NO: 24423 - RNA, 25 nt, Artificial Sequence
  Description of Artificial Sequence: Synthetic oligonucleotide
cauaacuaaaggugaaaagcuccgg

SEQ ID NO: 24424 - RNA, 25 nt, Artificial Sequence
  Description of Artificial Sequence: Synthetic oligonucleotide
cuacaucacgccagucaacagucug

SEQ ID NO: 24425 - RNA, 25 nt, Artificial Sequence
  Description of Artificial Sequence: Synthetic oligonucleotide
acuggauuuaagcagaguucaaaag

SEQ ID NO: 24426 - RNA, 25 nt, Artificial Sequence
  Description of Artificial Sequence: Synthetic oligonucleotide
cuggauuuaagcagaguucaaaagc

SEQ ID NO: 24427 - RNA, 25 nt, Artificial Sequence
  Description of Artificial Sequence: Synthetic oligonucleotide
gauuuaagcagaguucaaaagcccu

SEQ ID NO: 24428 - RNA, 25 nt, Artificial Sequence
  Description of Artificial Sequence: Synthetic oligonucleotide
auuuaagcagaguucaaaagcccuu

SEQ ID NO: 24429 - RNA, 25 nt, Artificial Sequence
  Description of Artificial Sequence: Synthetic oligonucleotide
uuaagcagaguucaaaagcccuuca

SEQ ID NO: 24430 - RNA, 25 nt, Artificial Sequence
  Description of Artificial Sequence: Synthetic oligonucleotide
uaagcagaguucaaaagcccuucag

SEQ ID NO: 24431 - RNA, 25 nt, Artificial Sequence
  Description of Artificial Sequence: Synthetic oligonucleotide
agcagaguucaaaagcccuucagcg

SEQ ID NO: 24432 - RNA, 25 nt, Artificial Sequence
  Description of Artificial Sequence: Synthetic oligonucleotide
cucagggucugagugaagccgcucg

SEQ ID NO: 24433 - RNA, 25 nt, Artificial Sequence
  Description of Artificial Sequence: Synthetic oligonucleotide
caagcaacuacaucacgccagucaa

SEQ ID NO: 24434 - RNA, 25 nt, Artificial Sequence
  Description of Artificial Sequence: Synthetic oligonucleotide
aucaauggcagcuucuuggugcgug

SEQ ID NO: 24435 - RNA, 25 nt, Artificial Sequence
  Description of Artificial Sequence: Synthetic oligonucleotide
uuccagcccacauuggauucaucag

SEQ ID NO: 24436 - RNA, 25 nt, Artificial Sequence
  Description of Artificial Sequence: Synthetic oligonucleotide
cagcugagaauguggaauaccuaag

SEQ ID NO: 24437 - RNA, 25 nt, Artificial Sequence
  Description of Artificial Sequence: Synthetic oligonucleotide
aacguaucuccuaauuugaggcuca

SEQ ID NO: 24438 - RNA, 25 nt, Artificial Sequence
  Description of Artificial Sequence: Synthetic oligonucleotide
ccuaaaauaauuucucuacaauugg

SEQ ID NO: 24439 - RNA, 25 nt, Artificial Sequence
  Description of Artificial Sequence: Synthetic oligonucleotide
uggaagauucagcuaguuaggagcc

SEQ ID NO: 24440 - RNA, 25 nt, Artificial Sequence
  Description of Artificial Sequence: Synthetic oligonucleotide
uuaaacucuccuagucaauauccac

SEQ ID NO: 24441 - RNA, 25 nt, Artificial Sequence
  Description of Artificial Sequence: Synthetic oligonucleotide
cagccuacaguuauguucagucaca

SEQ ID NO: 24442 - RNA, 25 nt, Artificial Sequence
  Description of Artificial Sequence: Synthetic oligonucleotide
guuauguucagucacacacacauac

SEQ ID NO: 24443 - RNA, 25 nt, Artificial Sequence
  Description of Artificial Sequence: Synthetic oligonucleotide
cacauacaaaauguuccuuuugcuu

SEQ ID NO: 24444 - RNA, 25 nt, Artificial Sequence
  Description of Artificial Sequence: Synthetic oligonucleotide
uccuuuugcuuuuaaaguaauuuuu

SEQ ID NO: 24445 - RNA, 25 nt, Artificial Sequence
  Description of Artificial Sequence: Synthetic oligonucleotide
ugaccugugaagcaacagucaaugg

SEQ ID NO: 24446 - RNA, 25 nt, Artificial Sequence
  Description of Artificial Sequence: Synthetic oligonucleotide
cuaucucacacaucgacaaaccaau

SEQ ID NO: 24447 - RNA, 25 nt, Artificial Sequence
  Description of Artificial Sequence: Synthetic oligonucleotide
uguccucaauuguacugcuaccacu

SEQ ID NO: 24448 - RNA, 25 nt, Artificial Sequence
  Description of Artificial Sequence: Synthetic oligonucleotide
aaaccguagcuggcaagcggucuua

SEQ ID NO: 24449 - RNA, 25 nt, Artificial Sequence
  Description of Artificial Sequence: Synthetic oligonucleotide
uagcuggcaagcggucuuaccggcu

SEQ ID NO: 24450 - RNA, 25 nt, Artificial Sequence
  Description of Artificial Sequence: Synthetic oligonucleotide
uuguaugguuaaaagauggguuacc

SEQ ID NO: 24451 - RNA, 25 nt, Artificial Sequence
  Description of Artificial Sequence: Synthetic oligonucleotide
ugguuaaaagauggguuaccugcga

SEQ ID NO: 24452 - RNA, 25 nt, Artificial Sequence
  Description of Artificial Sequence: Synthetic oligonucleotide
cagggaauuauacaaucuugcugag

SEQ ID NO: 24453 - RNA, 25 nt, Artificial Sequence
  Description of Artificial Sequence: Synthetic oligonucleotide
acaaucuugcugagcauaaaacagu

SEQ ID NO: 24454 - RNA, 25 nt, Artificial Sequence
  Description of Artificial Sequence: Synthetic oligonucleotide
ccaauaaugaagaguccuuuauccu

SEQ ID NO: 24455 - RNA, 25 nt, Artificial Sequence
  Description of Artificial Sequence: Synthetic oligonucleotide
acuuuggauguuccaacgcaaguug

SEQ ID NO: 24456 - RNA, 25 nt, Artificial Sequence
  Description of Artificial Sequence: Synthetic oligonucleotide
aaugcuuccacuaaacugaaaccau

SEQ ID NO: 24457 - RNA, 25 nt, Artificial Sequence
  Description of Artificial Sequence: Synthetic oligonucleotide
gagaaaguuugacuuuguuaaauau

SEQ ID NO: 24458 - RNA, 25 nt, Artificial Sequence
  Description of Artificial Sequence: Synthetic oligonucleotide
aaagaacuacuguauauuaaaaguu

SEQ ID NO: 24459 - RNA, 25 nt, Artificial Sequence
  Description of Artificial Sequence: Synthetic oligonucleotide
uuagaaauacggguuuugacuuaac

SEQ ID NO: 24460 - RNA, 25 nt, Artificial Sequence
  Description of Artificial Sequence: Synthetic oligonucleotide
aacauggguacagcaaacucagcac

SEQ ID NO: 24461 - RNA, 25 nt, Artificial Sequence
  Description of Artificial Sequence: Synthetic oligonucleotide
aaagacacagaagaugcugaccuca

SEQ ID NO: 24462 - RNA, 25 nt, Artificial Sequence
  Description of Artificial Sequence: Synthetic oligonucleotide
uaguagggagguuuauucagaucgc

SEQ ID NO: 24463 - RNA, 25 nt, Artificial Sequence
  Description of Artificial Sequence: Synthetic oligonucleotide
gccuucugcagcaggguucugggau

SEQ ID NO: 24464 - RNA, 25 nt, Artificial Sequence
  Description of Artificial Sequence: Synthetic oligonucleotide
ggucugguacauauuggaaauuaug

SEQ ID NO: 24465 - RNA, 25 nt, Artificial Sequence
  Description of Artificial Sequence: Synthetic oligonucleotide
cuaguccuuccgauggaagcacuag

SEQ ID NO: 24466 - RNA, 25 nt, Artificial Sequence
  Description of Artificial Sequence: Synthetic oligonucleotide
ccagugaauauuguuuuuaugugga

SEQ ID NO: 24467 - RNA, 25 nt, Artificial Sequence
  Description of Artificial Sequence: Synthetic oligonucleotide
augaauucaaguuggaauugguaga

SEQ ID NO: 24468 - RNA, 25 nt, Artificial Sequence
  Description of Artificial Sequence: Synthetic oligonucleotide
caggacacagauuuagacuuggaga

SEQ ID NO: 24469 - RNA, 25 nt, Artificial Sequence
  Description of Artificial Sequence: Synthetic oligonucleotide
cucaaagcacaguuacaguauucca

SEQ ID NO: 24470 - RNA, 25 nt, Artificial Sequence
  Description of Artificial Sequence: Synthetic oligonucleotide
accacugccaccacugaugaauuaa

SEQ ID NO: 24471 - RNA, 25 nt, Artificial Sequence
  Description of Artificial Sequence: Synthetic oligonucleotide
gaaacuacuagugccacaucaucac

SEQ ID NO: 24472 - RNA, 25 nt, Artificial Sequence
  Description of Artificial Sequence: Synthetic oligonucleotide
aagucggacagccucaccaaacaga

SEQ ID NO: 24473 - RNA, 25 nt, Artificial Sequence
  Description of Artificial Sequence: Synthetic oligonucleotide
gaaagcgaaaaauggaacaugaugg

SEQ ID NO: 24474 - RNA, 25 nt, Artificial Sequence
  Description of Artificial Sequence: Synthetic oligonucleotide
cccucugauuuagcauguagacugc

SEQ ID NO: 24475 - RNA, 25 nt, Artificial Sequence
  Description of Artificial Sequence: Synthetic oligonucleotide
ugagcuauuuaaggaucuauuuaug

SEQ ID NO: 24476 - RNA, 25 nt, Artificial Sequence
  Description of Artificial Sequence: Synthetic oligonucleotide
aaaaggugaaaaagcacuauuauca

SEQ ID NO: 24477 - RNA, 25 nt, Artificial Sequence
  Description of Artificial Sequence: Synthetic oligonucleotide
gaaaaagcacuauuaucaguucugc

SEQ ID NO: 24478 - RNA, 25 nt, Artificial Sequence
  Description of Artificial Sequence: Synthetic oligonucleotide
ggcugaaaagaaagauuaaaccuac

SEQ ID NO: 24479 - RNA, 25 nt, Artificial Sequence
  Description of Artificial Sequence: Synthetic oligonucleotide
uaaacccuuauaauaaaauccuucu

SEQ ID NO: 24480 - RNA, 25 nt, Artificial Sequence
  Description of Artificial Sequence: Synthetic oligonucleotide
cauacuauuagccaaugcuguagac

SEQ ID NO: 24481 - RNA, 25 nt, Artificial Sequence
  Description of Artificial Sequence: Synthetic oligonucleotide
gacagaagcauuuugauaggaauag

SEQ ID NO: 24482 - RNA, 25 nt, Artificial Sequence
  Description of Artificial Sequence: Synthetic oligonucleotide
agagcaaauaagauaauggcccuga

SEQ ID NO: 24483 - RNA, 25 nt, Artificial Sequence
  Description of Artificial Sequence: Synthetic oligonucleotide
ccaacauuuuucucuuccucaagca

SEQ ID NO: 24484 - RNA, 25 nt, Artificial Sequence
  Description of Artificial Sequence: Synthetic oligonucleotide
uuaaguaugagaaaaguucagccca

SEQ ID NO: 24485 - RNA, 25 nt, Artificial Sequence
  Description of Artificial Sequence: Synthetic oligonucleotide
caggaauaaagauggcugcugaacc

SEQ ID NO: 24486 - RNA, 25 nt, Artificial Sequence
  Description of Artificial Sequence: Synthetic oligonucleotide
aauuugaaugaccaaguucucuuca

SEQ ID NO: 24487 - RNA, 25 nt, Artificial Sequence
  Description of Artificial Sequence: Synthetic oligonucleotide
auguauaaagauagccagccuagag

SEQ ID NO: 24488 - RNA, 25 nt, Artificial Sequence
  Description of Artificial Sequence: Synthetic oligonucleotide
ggcuguaacuaucucugugaagugu

SEQ ID NO: 24489 - RNA, 25 nt, Artificial Sequence
  Description of Artificial Sequence: Synthetic oligonucleotide
ucugugaagugugagaaaauuucaa

SEQ ID NO: 24490 - RNA, 25 nt, Artificial Sequence
  Description of Artificial Sequence: Synthetic oligonucleotide
ccuuuaaggaaaugaauccuccuga

SEQ ID NO: 24491 - RNA, 25 nt, Artificial Sequence
  Description of Artificial Sequence: Synthetic oligonucleotide
aaggauacaaaaagugacaucauau

SEQ ID NO: 24492 - RNA, 25 nt, Artificial Sequence
  Description of Artificial Sequence: Synthetic oligonucleotide
agaugcaauuugaaucuucaucaua

SEQ ID NO: 24493 - RNA, 25 nt, Artificial Sequence
  Description of Artificial Sequence: Synthetic oligonucleotide
guucaaaacgaagacuagcuauuaa

SEQ ID NO: 24494 - RNA, 25 nt, Artificial Sequence
  Description of Artificial Sequence: Synthetic oligonucleotide
gugaaaccucaucucuacuaaaaau

SEQ ID NO: 24495 - RNA, 25 nt, Artificial Sequence
  Description of Artificial Sequence: Synthetic oligonucleotide
acgaaagagaagcucuaucucgccu

SEQ ID NO: 24496 - RNA, 25 nt, Artificial Sequence
  Description of Artificial Sequence: Synthetic oligonucleotide
cuccacaagcgccuucgguccaguu

SEQ ID NO: 24497 - RNA, 25 nt, Artificial Sequence
  Description of Artificial Sequence: Synthetic oligonucleotide
gagaagauuccaaagauguagccgc

SEQ ID NO: 24498 - RNA, 25 nt, Artificial Sequence
  Description of Artificial Sequence: Synthetic oligonucleotide
aaucuggauucaaugaggagacuug

SEQ ID NO: 24499 - RNA, 25 nt, Artificial Sequence
  Description of Artificial Sequence: Synthetic oligonucleotide
agaacagauuugagaguagugagga

SEQ ID NO: 24500 - RNA, 25 nt, Artificial Sequence
  Description of Artificial Sequence: Synthetic oligonucleotide
ccagagcugugcagaugaguacaaa

SEQ ID NO: 24501 - RNA, 25 nt, Artificial Sequence
  Description of Artificial Sequence: Synthetic oligonucleotide
ccucagauuguuguuguuaaugggc

SEQ ID NO: 24502 - RNA, 25 nt, Artificial Sequence
  Description of Artificial Sequence: Synthetic oligonucleotide
cuauuuuaauuauuuuuaauuuauu

SEQ ID NO: 24503 - RNA, 25 nt, Artificial Sequence
  Description of Artificial Sequence: Synthetic oligonucleotide
uuuaauuuauuaauauuuaaauaug

SEQ ID NO: 24504 - RNA, 25 nt, Artificial Sequence
  Description of Artificial Sequence: Synthetic oligonucleotide
augcaguuugaauauccuuuguuuc

SEQ ID NO: 24505 - RNA, 25 nt, Artificial Sequence
  Description of Artificial Sequence: Synthetic oligonucleotide
caugcugcuggcgucuaaguguuug

SEQ ID NO: 24506 - RNA, 25 nt, Artificial Sequence
  Description of Artificial Sequence: Synthetic oligonucleotide
agaugugcauuucaccugugacaaa

SEQ ID NO: 24507 - RNA, 25 nt, Artificial Sequence
  Description of Artificial Sequence: Synthetic oligonucleotide
ucaaaaccugugccaggcugaauua

SEQ ID NO: 24508 - RNA, 25 nt, Artificial Sequence
  Description of Artificial Sequence: Synthetic oligonucleotide
gaauguggguagucauucuuacaau

SEQ ID NO: 24509 - RNA, 25 nt, Artificial Sequence
  Description of Artificial Sequence: Synthetic oligonucleotide
auguggguagucauucuuacaauug

SEQ ID NO: 24510 - RNA, 25 nt, Artificial Sequence
  Description of Artificial Sequence: Synthetic oligonucleotide
ugaaaaugagcaucagagaguguac

SEQ ID NO: 24511 - RNA, 25 nt, Artificial Sequence
  Description of Artificial Sequence: Synthetic oligonucleotide
uugcuuuucauguagaacucagcag

SEQ ID NO: 24512 - RNA, 25 nt, Artificial Sequence
  Description of Artificial Sequence: Synthetic oligonucleotide
uguauuucuauauuuauuuucagua

SEQ ID NO: 24513 - RNA, 25 nt, Artificial Sequence
  Description of Artificial Sequence: Synthetic oligonucleotide
uuugauuaauguuucuuaaauggaa

SEQ ID NO: 24514 - RNA, 25 nt, Artificial Sequence
  Description of Artificial Sequence: Synthetic oligonucleotide
caacguguauagugccuaaaauugu

SEQ ID NO: 24515 - RNA, 25 nt, Artificial Sequence
  Description of Artificial Sequence: Synthetic oligonucleotide
cauauccuuggcuacuaacaucugg

SEQ ID NO: 24516 - RNA, 25 nt, Artificial Sequence
  Description of Artificial Sequence: Synthetic oligonucleotide
uacuaacaucuggagacugugagcu

SEQ ID NO: 24517 - RNA, 25 nt, Artificial Sequence
  Description of Artificial Sequence: Synthetic oligonucleotide
cauaaguugugugcuuuuuauuaau

SEQ ID NO: 24518 - RNA, 25 nt, Artificial Sequence
  Description of Artificial Sequence: Synthetic oligonucleotide
gcaucauuuuggcucuucuuacauu

SEQ ID NO: 24519 - RNA, 25 nt, Artificial Sequence
  Description of Artificial Sequence: Synthetic oligonucleotide
gcucuucuuacauuuguaaaaaugu

SEQ ID NO: 24520 - RNA, 25 nt, Artificial Sequence
  Description of Artificial Sequence: Synthetic oligonucleotide
agauuaggucaucuuaauucauauu

SEQ ID NO: 24521 - RNA, 25 nt, Artificial Sequence
  Description of Artificial Sequence: Synthetic oligonucleotide
auggaauugaaagaacuaaucauga

SEQ ID NO: 24522 - RNA, 25 nt, Artificial Sequence
  Description of Artificial Sequence: Synthetic oligonucleotide
cacacucauuccuucugcucuuggg

SEQ ID NO: 24523 - RNA, 25 nt, Artificial Sequence
  Description of Artificial Sequence: Synthetic oligonucleotide
uguagagguaaccaguagcuuugag

SEQ ID NO: 24524 - RNA, 25 nt, Artificial Sequence
  Description of Artificial Sequence: Synthetic oligonucleotide
caaccacaugccacguaauauuuca

SEQ ID NO: 24525 - RNA, 25 nt, Artificial Sequence
  Description of Artificial Sequence: Synthetic oligonucleotide
ucggaaacaaguuauucucuucacu

SEQ ID NO: 24526 - RNA, 25 nt, Artificial Sequence
  Description of Artificial Sequence: Synthetic oligonucleotide
acucccaauaacuaaugcuaagaaa

SEQ ID NO: 24527 - RNA, 25 nt, Artificial Sequence
  Description of Artificial Sequence: Synthetic oligonucleotide
aaugcuaagaaaugcugaaaaucaa

SEQ ID NO: 24528 - RNA, 25 nt, Artificial Sequence
  Description of Artificial Sequence: Synthetic oligonucleotide
gucuuucucuaaauaugauuacuuu

SEQ ID NO: 24529 - RNA, 25 nt, Artificial Sequence
  Description of Artificial Sequence: Synthetic oligonucleotide
ugaauuucaggcauuuuguucuaca

SEQ ID NO: 24530 - RNA, 25 nt, Artificial Sequence
  Description of Artificial Sequence: Synthetic oligonucleotide
cgauucccucucacccgggacucuc

SEQ ID NO: 24531 - RNA, 25 nt, Artificial Sequence
  Description of Artificial Sequence: Synthetic oligonucleotide
aggaaagugaaccuuuaaaguaaag

SEQ ID NO: 24532 - RNA, 25 nt, Artificial Sequence
  Description of Artificial Sequence: Synthetic oligonucleotide
gaggcugcaugcucuggaagccugg

SEQ ID NO: 24533 - RNA, 25 nt, Artificial Sequence
  Description of Artificial Sequence: Synthetic oligonucleotide
ucucugaacagaaaacaaaagagag

SEQ ID NO: 24534 - RNA, 25 nt, Artificial Sequence
  Description of Artificial Sequence: Synthetic oligonucleotide
aacuuggcuguaaucaguuaugccg

SEQ ID NO: 24535 - RNA, 25 nt, Artificial Sequence
  Description of Artificial Sequence: Synthetic oligonucleotide
agaagccaaaauuaaaagaagucca

SEQ ID NO: 24536 - RNA, 25 nt, Artificial Sequence
  Description of Artificial Sequence: Synthetic oligonucleotide
auuaaaagaaguccaggugagguua

SEQ ID NO: 24537 - RNA, 25 nt, Artificial Sequence
  Description of Artificial Sequence: Synthetic oligonucleotide
gaauccggauuaucgggaagaggac

SEQ ID NO: 24538 - RNA, 25 nt, Artificial Sequence
  Description of Artificial Sequence: Synthetic oligonucleotide
aaugugacaucaaagcaaguauugu

SEQ ID NO: 24539 - RNA, 25 nt, Artificial Sequence
  Description of Artificial Sequence: Synthetic oligonucleotide
caucaaagcaaguauuguagcacuc

SEQ ID NO: 24540 - RNA, 25 nt, Artificial Sequence
  Description of Artificial Sequence: Synthetic oligonucleotide
agagagagaaaacaaaaccacaaau

SEQ ID NO: 24541 - RNA, 25 nt, Artificial Sequence
  Description of Artificial Sequence: Synthetic oligonucleotide
ucgcuguaguauuuaagcccauaca

SEQ ID NO: 24542 - RNA, 25 nt, Artificial Sequence
  Description of Artificial Sequence: Synthetic oligonucleotide
cgcuguaguauuuaagcccauacag

SEQ ID NO: 24543 - RNA, 25 nt, Artificial Sequence
  Description of Artificial Sequence: Synthetic oligonucleotide
auuuaagcccauacagaaaccuucc

SEQ ID NO: 24544 - RNA, 25 nt, Artificial Sequence
  Description of Artificial Sequence: Synthetic oligonucleotide
auuaaaauaaacaugguauaccuac

SEQ ID NO: 24545 - RNA, 25 nt, Artificial Sequence
  Description of Artificial Sequence: Synthetic oligonucleotide
cuguucugaucggccaguuuucgga

SEQ ID NO: 24546 - RNA, 25 nt, Artificial Sequence
  Description of Artificial Sequence: Synthetic oligonucleotide
aaauaauuugaacuuuggaacaggg

SEQ ID NO: 24547 - RNA, 25 nt, Artificial Sequence
  Description of Artificial Sequence: Synthetic oligonucleotide
ugcgaccuuaauuuaacuuuccagu

SEQ ID NO: 24548 - RNA, 25 nt, Artificial Sequence
  Description of Artificial Sequence: Synthetic oligonucleotide
cugagaaagcuaaaguuugguuuug

SEQ ID NO: 24549 - RNA, 25 nt, Artificial Sequence
  Description of Artificial Sequence: Synthetic oligonucleotide
aguaaagaugcuacuucccacugua

SEQ ID NO: 24550 - RNA, 25 nt, Artificial Sequence
  Description of Artificial Sequence: Synthetic oligonucleotide
cugcuuaauugcugauaccauauga

SEQ ID NO: 24551 - RNA, 25 nt, Artificial Sequence
  Description of Artificial Sequence: Synthetic oligonucleotide
uaccauaugaaugaaacaugggcug

SEQ ID NO: 24552 - RNA, 25 nt, Artificial Sequence
  Description of Artificial Sequence: Synthetic oligonucleotide
aacuuucuuauccaacuuuuucaua

SEQ ID NO: 24553 - RNA, 25 nt, Artificial Sequence
  Description of Artificial Sequence: Synthetic oligonucleotide
ccuugcaugacaucaugaggccgga

SEQ ID NO: 24554 - RNA, 25 nt, Artificial Sequence
  Description of Artificial Sequence: Synthetic oligonucleotide
ugaauuuguauaugacugcauuugu

SEQ ID NO: 24555 - RNA, 25 nt, Artificial Sequence
  Description of Artificial Sequence: Synthetic oligonucleotide
gaauccuaguagaauguuuacuacc

SEQ ID NO: 24556 - RNA, 25 nt, Artificial Sequence
  Description of Artificial Sequence: Synthetic oligonucleotide
gaaagggaagaauuuuuugaugaaa

SEQ ID NO: 24557 - RNA, 25 nt, Artificial Sequence
  Description of Artificial Sequence: Synthetic oligonucleotide
uaucggcaugccagugugugaauuu

SEQ ID NO: 24558 - RNA, 25 nt, Artificial Sequence
  Description of Artificial Sequence: Synthetic oligonucleotide
caccucauaguagagcaauguaugu

SEQ ID NO: 24559 - RNA, 25 nt, Artificial Sequence
  Description of Artificial Sequence: Synthetic oligonucleotide
ccagaauugccaaagcacauauaua

SEQ ID NO: 24560 - RNA, 25 nt, Artificial Sequence
  Description of Artificial Sequence: Synthetic oligonucleotide
uggugaucuggguaauaguuucucc

SEQ ID NO: 24561 - RNA, 25 nt, Artificial Sequence
  Description of Artificial Sequence: Synthetic oligonucleotide
gaucuggguaauaguuucuccaaau

SEQ ID NO: 24562 - RNA, 25 nt, Artificial Sequence
  Description of Artificial Sequence: Synthetic oligonucleotide
ggaugugaugaauacuuccuagaaa

SEQ ID NO: 24563 - RNA, 25 nt, Artificial Sequence
  Description of Artificial Sequence: Synthetic oligonucleotide
cauuuccacagcuacaccauauaug

SEQ ID NO: 24564 - RNA, 25 nt, Artificial Sequence
  Description of Artificial Sequence: Synthetic oligonucleotide
acagcuacaccauauaugaauggag

SEQ ID NO: 24565 - RNA, 25 nt, Artificial Sequence
  Description of Artificial Sequence: Synthetic oligonucleotide
ugcaguucuuacacgagaagaagau

SEQ ID NO: 24566 - RNA, 25 nt, Artificial Sequence
  Description of Artificial Sequence: Synthetic oligonucleotide
acgagaagaagaucauuuacaggga

SEQ ID NO: 24567 - RNA, 25 nt, Artificial Sequence
  Description of Artificial Sequence: Synthetic oligonucleotide
cgagaagaagaucauuuacagggac

SEQ ID NO: 24568 - RNA, 25 nt, Artificial Sequence
  Description of Artificial Sequence: Synthetic oligonucleotide
aagaagaucauuuacagggaccuga

SEQ ID NO: 24569 - RNA, 25 nt, Artificial Sequence
  Description of Artificial Sequence: Synthetic oligonucleotide
agaggaagagguguuugacugcauc

SEQ ID NO: 24570 - RNA, 25 nt, Artificial Sequence
  Description of Artificial Sequence: Synthetic oligonucleotide
gaggaagagguguuugacugcaucg

SEQ ID NO: 24571 - RNA, 25 nt, Artificial Sequence
  Description of Artificial Sequence: Synthetic oligonucleotide
cuacuuugagggcgaguucacaggg

SEQ ID NO: 24572 - RNA, 25 nt, Artificial Sequence
  Description of Artificial Sequence: Synthetic oligonucleotide
agggcaucuccuggcaccucugucc

SEQ ID NO: 24573 - RNA, 25 nt, Artificial Sequence
  Description of Artificial Sequence: Synthetic oligonucleotide
ggagugauaugguuugucuuuuuaa

SEQ ID NO: 24574 - RNA, 25 nt, Artificial Sequence
  Description of Artificial Sequence: Synthetic oligonucleotide
gagugauaugguuugucuuuuuaag

SEQ ID NO: 24575 - RNA, 25 nt, Artificial Sequence
  Description of Artificial Sequence: Synthetic oligonucleotide
ugcaguaaagauccuaaagguuguc

SEQ ID NO: 24576 - RNA, 25 nt, Artificial Sequence
  Description of Artificial Sequence: Synthetic oligonucleotide
aguaaagauccuaaagguugucgac

SEQ ID NO: 24577 - RNA, 25 nt, Artificial Sequence
  Description of Artificial Sequence: Synthetic oligonucleotide
ugacaaaggacaaccuggcaauugu

SEQ ID NO: 24578 - RNA, 25 nt, Artificial Sequence
  Description of Artificial Sequence: Synthetic oligonucleotide
gcaauugugacccaguggugcgagg

SEQ ID NO: 24579 - RNA, 25 nt, Artificial Sequence
  Description of Artificial Sequence: Synthetic oligonucleotide
aacaucauccauagagacaugaaau

SEQ ID NO: 24580 - RNA, 25 nt, Artificial Sequence
  Description of Artificial Sequence: Synthetic oligonucleotide
ugaaauccaacaauauauuucucca

SEQ ID NO: 24581 - RNA, 25 nt, Artificial Sequence
  Description of Artificial Sequence: Synthetic oligonucleotide
aacaauauauuucuccaugaaggcu

SEQ ID NO: 24582 - RNA, 25 nt, Artificial Sequence
  Description of Artificial Sequence: Synthetic oligonucleotide
aacaguaaagucacgcuggaguggu

SEQ ID NO: 24583 - RNA, 25 nt, Artificial Sequence
  Description of Artificial Sequence: Synthetic oligonucleotide
ugugaagaaaguaaaggaagagagg

SEQ ID NO: 24584 - RNA, 25 nt, Artificial Sequence
  Description of Artificial Sequence: Synthetic oligonucleotide
cuuccgagccauccuugcaucgggc

SEQ ID NO: 24585 - RNA, 25 nt, Artificial Sequence
  Description of Artificial Sequence: Synthetic oligonucleotide
aauggagguugaauauccuacugug

SEQ ID NO: 24586 - RNA, 25 nt, Artificial Sequence
  Description of Artificial Sequence: Synthetic oligonucleotide
ggagguugaauauccuacuguguaa

SEQ ID NO: 24587 - RNA, 25 nt, Artificial Sequence
  Description of Artificial Sequence: Synthetic oligonucleotide
auuuugaguuuucccuuguagugua

SEQ ID NO: 24588 - RNA, 25 nt, Artificial Sequence
  Description of Artificial Sequence: Synthetic oligonucleotide
uauccuguuuguucuuuguugauug

SEQ ID NO: 24589 - RNA, 25 nt, Artificial Sequence
  Description of Artificial Sequence: Synthetic oligonucleotide
ccuguuuguucuuuguugauugaaa

SEQ ID NO: 24590 - RNA, 25 nt, Artificial Sequence
  Description of Artificial Sequence: Synthetic oligonucleotide
cucuacagccuucuuuuucuuccau

SEQ ID NO: 24591 - RNA, 25 nt, Artificial Sequence
  Description of Artificial Sequence: Synthetic oligonucleotide
ucuuccauagcuaaucuuccuucua

SEQ ID NO: 24592 - RNA, 25 nt, Artificial Sequence
  Description of Artificial Sequence: Synthetic oligonucleotide
auaaucuuccuguugaaugcuucau

SEQ ID NO: 24593 - RNA, 25 nt, Artificial Sequence
  Description of Artificial Sequence: Synthetic oligonucleotide
uaaucuuccuguugaaugcuucaug

SEQ ID NO: 24594 - RNA, 25 nt, Artificial Sequence
  Description of Artificial Sequence: Synthetic oligonucleotide
cuucaugacuugaauucuacuuuga

SEQ ID NO: 24595 - RNA, 25 nt, Artificial Sequence
  Description of Artificial Sequence: Synthetic oligonucleotide
aagagggagagaagcaacuacagac

SEQ ID NO: 24596 - RNA, 25 nt, Artificial Sequence
  Description of Artificial Sequence: Synthetic oligonucleotide
cgucuccuaccagaccaaggucaac

SEQ ID NO: 24597 - RNA, 25 nt, Artificial Sequence
  Description of Artificial Sequence: Synthetic oligonucleotide
gaucaaucggcccgacuaucucgac

SEQ ID NO: 24598 - RNA, 25 nt, Artificial Sequence
  Description of Artificial Sequence: Synthetic oligonucleotide
ggacgaacauccaaccuucccaaac

SEQ ID NO: 24599 - RNA, 25 nt, Artificial Sequence
  Description of Artificial Sequence: Synthetic oligonucleotide
agggucggaacccaagcuuagaacu

SEQ ID NO: 24600 - RNA, 25 nt, Artificial Sequence
  Description of Artificial Sequence: Synthetic oligonucleotide
ucggaacccaagcuuagaacuuuaa

SEQ ID NO: 24601 - RNA, 25 nt, Artificial Sequence
  Description of Artificial Sequence: Synthetic oligonucleotide
acccaagcuuagaacuuuaagcaac

SEQ ID NO: 24602 - RNA, 25 nt, Artificial Sequence
  Description of Artificial Sequence: Synthetic oligonucleotide
gaacuuuaagcaacaagaccaccac

SEQ ID NO: 24603 - RNA, 25 nt, Artificial Sequence
  Description of Artificial Sequence: Synthetic oligonucleotide
acuauucaguggcgagaaauaaagu

SEQ ID NO: 24604 - RNA, 25 nt, Artificial Sequence
  Description of Artificial Sequence: Synthetic oligonucleotide
cuauucaguggcgagaaauaaaguu

SEQ ID NO: 24605 - RNA, 25 nt, Artificial Sequence
  Description of Artificial Sequence: Synthetic oligonucleotide
aaacacagauaacaggaaaugaucc

SEQ ID NO: 24606 - RNA, 25 nt, Artificial Sequence
  Description of Artificial Sequence: Synthetic oligonucleotide
cuuaagaaaagagaagaaaugaaac

SEQ ID NO: 24607 - RNA, 25 nt, Artificial Sequence
  Description of Artificial Sequence: Synthetic oligonucleotide
cugaaggaguguguuuccauccucc

SEQ ID NO: 24608 - RNA, 25 nt, Artificial Sequence
  Description of Artificial Sequence: Synthetic oligonucleotide
ucaccgcgggacugaaaaucuuuga

SEQ ID NO: 24609 - RNA, 25 nt, Artificial Sequence
  Description of Artificial Sequence: Synthetic oligonucleotide
agcagaaauaagcgugccguucagg

SEQ ID NO: 24610 - RNA, 25 nt, Artificial Sequence
  Description of Artificial Sequence: Synthetic oligonucleotide
aagcgugccguucaggguccagaag

SEQ ID NO: 24611 - RNA, 25 nt, Artificial Sequence
  Description of Artificial Sequence: Synthetic oligonucleotide
agaaacagucacucaagacugcuug

SEQ ID NO: 24612 - RNA, 25 nt, Artificial Sequence
  Description of Artificial Sequence: Synthetic oligonucleotide
agaggaagaagguccaugucuuugg

SEQ ID NO: 24613 - RNA, 25 nt, Artificial Sequence
  Description of Artificial Sequence: Synthetic oligonucleotide
uguauucaaaauaugccugaaacac

SEQ ID NO: 24614 - RNA, 25 nt, Artificial Sequence
  Description of Artificial Sequence: Synthetic oligonucleotide
auuuuccucccuuucucuguaccuc

SEQ ID NO: 24615 - RNA, 25 nt, Artificial Sequence
  Description of Artificial Sequence: Synthetic oligonucleotide
caaagaaagauagagcaagacaaga

SEQ ID NO: 24616 - RNA, 25 nt, Artificial Sequence
  Description of Artificial Sequence: Synthetic oligonucleotide
aagaaagauagagcaagacaagaaa

SEQ ID NO: 24617 - RNA, 25 nt, Artificial Sequence
  Description of Artificial Sequence: Synthetic oligonucleotide
gaaagcauuuguuuguacaagaucc

SEQ ID NO: 24618 - RNA, 25 nt, Artificial Sequence
  Description of Artificial Sequence: Synthetic oligonucleotide
ugaguuaaacgaacguacuugcaga

SEQ ID NO: 24619 - RNA, 25 nt, Artificial Sequence
  Description of Artificial Sequence: Synthetic oligonucleotide
acugauacagaacgaucgauacaga

SEQ ID NO: 24620 - RNA, 25 nt, Artificial Sequence
  Description of Artificial Sequence: Synthetic oligonucleotide
auauuauauauauauaaaaauaaau

SEQ ID NO: 24621 - RNA, 25 nt, Artificial Sequence
  Description of Artificial Sequence: Synthetic oligonucleotide
auuauauauauauaaaaauaaauau

SEQ ID NO: 24622 - RNA, 25 nt, Artificial Sequence
  Description of Artificial Sequence: Synthetic oligonucleotide
ucacuggauguauuugacugcugug

SEQ ID NO: 24623 - RNA, 25 nt, Artificial Sequence
  Description of Artificial Sequence: Synthetic oligonucleotide
cagggaagaggaggagaugagagac

SEQ ID NO: 24624 - RNA, 25 nt, Artificial Sequence
  Description of Artificial Sequence: Synthetic oligonucleotide
augaucuuuuuuuugucccacuugg

SEQ ID NO: 24625 - RNA, 27 nt, Artificial Sequence
  Description of Artificial Sequence: Synthetic oligonucleotide
ggccgugaacuccucaucaaaauaccu

SEQ ID NO: 24626 - RNA, 27 nt, Artificial Sequence
  Description of Artificial Sequence: Synthetic oligonucleotide
uggugugauggugaucaucugggccgu

SEQ ID NO: 24627 - RNA, 27 nt, Artificial Sequence
  Description of Artificial Sequence: Synthetic oligonucleotide
aaacccgcaggauaguuuucuucccua

SEQ ID NO: 24628 - RNA, 27 nt, Artificial Sequence
  Description of Artificial Sequence: Synthetic oligonucleotide
caaacuggaugaaauaaauuaaaaccc

SEQ ID NO: 24629 - RNA, 27 nt, Artificial Sequence
  Description of Artificial Sequence: Synthetic oligonucleotide
agaaguccuuaacauuucccuacguga

SEQ ID NO: 24630 - RNA, 27 nt, Artificial Sequence
  Description of Artificial Sequence: Synthetic oligonucleotide
cucugucccacuggguaaacccuggcc

SEQ ID NO: 24631 - RNA, 27 nt, Artificial Sequence
  Description of Artificial Sequence: Synthetic oligonucleotide
cacaauaacaaauuuaaaccuugcucc

SEQ ID NO: 24632 - RNA, 27 nt, Artificial Sequence
  Description of Artificial Sequence: Synthetic oligonucleotide
aaaugcauuugaacaacauaauacaca

SEQ ID NO: 24633 - RNA, 27 nt, Artificial Sequence
  Description of Artificial Sequence: Synthetic oligonucleotide
ggcuuuccugucacaaagauuaaaaac

SEQ ID NO: 24634 - RNA, 27 nt, Artificial Sequence
  Description of Artificial Sequence: Synthetic oligonucleotide
agggcuuuccugucacaaagauuaaaa

SEQ ID NO: 24635 - RNA, 27 nt, Artificial Sequence
  Description of Artificial Sequence: Synthetic oligonucleotide
ggccaugcugggagacauaagcagcag

SEQ ID NO: 24636 - RNA, 27 nt, Artificial Sequence
  Description of Artificial Sequence: Synthetic oligonucleotide
ucagggagaagcuucugaaacacuucu

SEQ ID NO: 24637 - RNA, 27 nt, Artificial Sequence
  Description of Artificial Sequence: Synthetic oligonucleotide
aagggcuucuuccuuauugauggucag

SEQ ID NO: 24638 - RNA, 27 nt, Artificial Sequence
  Description of Artificial Sequence: Synthetic oligonucleotide
ugaagggcuucuuccuuauugaugguc

SEQ ID NO: 24639 - RNA, 27 nt, Artificial Sequence
  Description of Artificial Sequence: Synthetic oligonucleotide
cgcugaagggcuucuuccuuauugaug

SEQ ID NO: 24640 - RNA, 27 nt, Artificial Sequence
  Description of Artificial Sequence: Synthetic oligonucleotide
gccgcugaagggcuucuuccuuauuga

SEQ ID NO: 24641 - RNA, 27 nt, Artificial Sequence
  Description of Artificial Sequence: Synthetic oligonucleotide
acuggccgcugaagggcuucuuccuua

SEQ ID NO: 24642 - RNA, 27 nt, Artificial Sequence
  Description of Artificial Sequence: Synthetic oligonucleotide
cggagcuuuucaccuuuaguuaugcuu

SEQ ID NO: 24643 - RNA, 27 nt, Artificial Sequence
  Description of Artificial Sequence: Synthetic oligonucleotide
ccggagcuuuucaccuuuaguuaugcu

SEQ ID NO: 24644 - RNA, 27 nt, Artificial Sequence
  Description of Artificial Sequence: Synthetic oligonucleotide
cagacuguugacuggcgugauguaguu

SEQ ID NO: 24645 - RNA, 27 nt, Artificial Sequence
  Description of Artificial Sequence: Synthetic oligonucleotide
cuuuugaacucugcuuaaauccagugg

SEQ ID NO: 24646 - RNA, 27 nt, Artificial Sequence
  Description of Artificial Sequence: Synthetic oligonucleotide
gcuuuugaacucugcuuaaauccagug

SEQ ID NO: 24647 - RNA, 27 nt, Artificial Sequence
  Description of Artificial Sequence: Synthetic oligonucleotide
agggcuuuugaacucugcuuaaaucca

SEQ ID NO: 24648 - RNA, 27 nt, Artificial Sequence
  Description of Artificial Sequence: Synthetic oligonucleotide
aagggcuuuugaacucugcuuaaaucc

SEQ ID NO: 24649 - RNA, 27 nt, Artificial Sequence
  Description of Artificial Sequence: Synthetic oligonucleotide
ugaagggcuuuugaacucugcuuaaau

SEQ ID NO: 24650 - RNA, 27 nt, Artificial Sequence
  Description of Artificial Sequence: Synthetic oligonucleotide
cugaagggcuuuugaacucugcuuaaa

SEQ ID NO: 24651 - RNA, 27 nt, Artificial Sequence
  Description of Artificial Sequence: Synthetic oligonucleotide
cgcugaagggcuuuugaacucugcuua

SEQ ID NO: 24652 - RNA, 27 nt, Artificial Sequence
  Description of Artificial Sequence: Synthetic oligonucleotide
cgagcggcuucacucagacccugaggc

SEQ ID NO: 24653 - RNA, 27 nt, Artificial Sequence
  Description of Artificial Sequence: Synthetic oligonucleotide
uugacuggcgugauguaguugcuuggg

SEQ ID NO: 24654 - RNA, 27 nt, Artificial Sequence
  Description of Artificial Sequence: Synthetic oligonucleotide
cacgcaccaagaagcugccauugaucc

SEQ ID NO: 24655 - RNA, 27 nt, Artificial Sequence
  Description of Artificial Sequence: Synthetic oligonucleotide
cugaugaauccaaugugggcuggaauc

SEQ ID NO: 24656 - RNA, 27 nt, Artificial Sequence
  Description of Artificial Sequence: Synthetic oligonucleotide
cuuagguauuccacauucucagcugug

SEQ ID NO: 24657 - RNA, 27 nt, Artificial Sequence
  Description of Artificial Sequence: Synthetic oligonucleotide
ugagccucaaauuaggagauacguuuu

SEQ ID NO: 24658 - RNA, 27 nt, Artificial Sequence
  Description of Artificial Sequence: Synthetic oligonucleotide
ccaauuguagagaaauuauuuuaggaa

SEQ ID NO: 24659 - RNA, 27 nt, Artificial Sequence
  Description of Artificial Sequence: Synthetic oligonucleotide
ggcuccuaacuagcugaaucuuccaau

SEQ ID NO: 24660 - RNA, 27 nt, Artificial Sequence
  Description of Artificial Sequence: Synthetic oligonucleotide
guggauauugacuaggagaguuuaaaa

SEQ ID NO: 24661 - RNA, 27 nt, Artificial Sequence
  Description of Artificial Sequence: Synthetic oligonucleotide
ugugacugaacauaacuguaggcugaa

SEQ ID NO: 24662 - RNA, 27 nt, Artificial Sequence
  Description of Artificial Sequence: Synthetic oligonucleotide
guaugugugugugacugaacauaacug

SEQ ID NO: 24663 - RNA, 27 nt, Artificial Sequence
  Description of Artificial Sequence: Synthetic oligonucleotide
aagcaaaaggaacauuuuguaugugug

SEQ ID NO: 24664 - RNA, 27 nt, Artificial Sequence
  Description of Artificial Sequence: Synthetic oligonucleotide
aaaaauuacuuuaaaagcaaaaggaac

SEQ ID NO: 24665 - RNA, 27 nt, Artificial Sequence
  Description of Artificial Sequence: Synthetic oligonucleotide
ccauugacuguugcuucacaggucaga

SEQ ID NO: 24666 - RNA, 27 nt, Artificial Sequence
  Description of Artificial Sequence: Synthetic oligonucleotide
auugguuugucgaugugugagauaguu

SEQ ID NO: 24667 - RNA, 27 nt, Artificial Sequence
  Description of Artificial Sequence: Synthetic oligonucleotide
agugguagcaguacaauugaggacaag

SEQ ID NO: 24668 - RNA, 27 nt, Artificial Sequence
  Description of Artificial Sequence: Synthetic oligonucleotide
uaagaccgcuugccagcuacgguuuca

SEQ ID NO: 24669 - RNA, 27 nt, Artificial Sequence
  Description of Artificial Sequence: Synthetic oligonucleotide
agccgguaagaccgcuugccagcuacg

SEQ ID NO: 24670 - RNA, 27 nt, Artificial Sequence
  Description of Artificial Sequence: Synthetic oligonucleotide
gguaacccaucuuuuaaccauacaacu

SEQ ID NO: 24671 - RNA, 27 nt, Artificial Sequence
  Description of Artificial Sequence: Synthetic oligonucleotide
ucgcagguaacccaucuuuuaaccaua

SEQ ID NO: 24672 - RNA, 27 nt, Artificial Sequence
  Description of Artificial Sequence: Synthetic oligonucleotide
cucagcaagauuguauaauucccugca

SEQ ID NO: 24673 - RNA, 27 nt, Artificial Sequence
  Description of Artificial Sequence: Synthetic oligonucleotide
acuguuuuaugcucagcaagauuguau

SEQ ID NO: 24674 - RNA, 27 nt, Artificial Sequence
  Description of Artificial Sequence: Synthetic oligonucleotide
aggauaaaggacucuucauuauuggaa

SEQ ID NO: 24675 - RNA, 27 nt, Artificial Sequence
  Description of Artificial Sequence: Synthetic oligonucleotide
caacuugcguuggaacauccaaagugu

SEQ ID NO: 24676 - RNA, 27 nt, Artificial Sequence
  Description of Artificial Sequence: Synthetic oligonucleotide
augguuucaguuuaguggaagcauuua

SEQ ID NO: 24677 - RNA, 27 nt, Artificial Sequence
  Description of Artificial Sequence: Synthetic oligonucleotide
auauuuaacaaagucaaacuuucucac

SEQ ID NO: 24678 - RNA, 27 nt, Artificial Sequence
  Description of Artificial Sequence: Synthetic oligonucleotide
aacuuuuaauauacaguaguucuuuuc

SEQ ID NO: 24679 - RNA, 27 nt, Artificial Sequence
  Description of Artificial Sequence: Synthetic oligonucleotide
guuaagucaaaacccguauuucuaaag

SEQ ID NO: 24680 - RNA, 27 nt, Artificial Sequence
  Description of Artificial Sequence: Synthetic oligonucleotide
gugcugaguuugcuguacccauguuga

SEQ ID NO: 24681 - RNA, 27 nt, Artificial Sequence
  Description of Artificial Sequence: Synthetic oligonucleotide
ugaggucagcaucuucugugucuuuac

SEQ ID NO: 24682 - RNA, 27 nt, Artificial Sequence
  Description of Artificial Sequence: Synthetic oligonucleotide
gcgaucugaauaaaccucccuacuagc

SEQ ID NO: 24683 - RNA, 27 nt, Artificial Sequence
  Description of Artificial Sequence: Synthetic oligonucleotide
aucccagaacccugcugcagaaggcca

SEQ ID NO: 24684 - RNA, 27 nt, Artificial Sequence
  Description of Artificial Sequence: Synthetic oligonucleotide
cauaauuuccaauauguaccagaccuu

SEQ ID NO: 24685 - RNA, 27 nt, Artificial Sequence
  Description of Artificial Sequence: Synthetic oligonucleotide
cuagugcuuccaucggaaggacuaggu

SEQ ID NO: 24686 - RNA, 27 nt, Artificial Sequence
  Description of Artificial Sequence: Synthetic oligonucleotide
uccacauaaaaacaauauucacuggga

SEQ ID NO: 24687 - RNA, 27 nt, Artificial Sequence
  Description of Artificial Sequence: Synthetic oligonucleotide
ucuaccaauuccaacuugaauucauug

SEQ ID NO: 24688 - RNA, 27 nt, Artificial Sequence
  Description of Artificial Sequence: Synthetic oligonucleotide
ucuccaagucuaaaucuguguccugag

SEQ ID NO: 24689 - RNA, 27 nt, Artificial Sequence
  Description of Artificial Sequence: Synthetic oligonucleotide
uggaauacuguaacugugcuuugagga

SEQ ID NO: 24690 - RNA, 27 nt, Artificial Sequence
  Description of Artificial Sequence: Synthetic oligonucleotide
uuaauucaucagugguggcagugguag

SEQ ID NO: 24691 - RNA, 27 nt, Artificial Sequence
  Description of Artificial Sequence: Synthetic oligonucleotide
gugaugauguggcacuaguaguuucuu

SEQ ID NO: 24692 - RNA, 27 nt, Artificial Sequence
  Description of Artificial Sequence: Synthetic oligonucleotide
ucuguuuggugaggcuguccgacuuug

SEQ ID NO: 24693 - RNA, 27 nt, Artificial Sequence
  Description of Artificial Sequence: Synthetic oligonucleotide
ccaucauguuccauuuuucgcuuucuc

SEQ ID NO: 24694 - RNA, 27 nt, Artificial Sequence
  Description of Artificial Sequence: Synthetic oligonucleotide
gcagucuacaugcuaaaucagagggua

SEQ ID NO: 24695 - RNA, 27 nt, Artificial Sequence
  Description of Artificial Sequence: Synthetic oligonucleotide
cauaaauagauccuuaaauagcucaaa

SEQ ID NO: 24696 - RNA, 27 nt, Artificial Sequence
  Description of Artificial Sequence: Synthetic oligonucleotide
ugauaauagugcuuuuucaccuuuuuc

SEQ ID NO: 24697 - RNA, 27 nt, Artificial Sequence
  Description of Artificial Sequence: Synthetic oligonucleotide
gcagaacugauaauagugcuuuuucac

SEQ ID NO: 24698 - RNA, 27 nt, Artificial Sequence
  Description of Artificial Sequence: Synthetic oligonucleotide
guagguuuaaucuuucuuuucagccau

SEQ ID NO: 24699 - RNA, 27 nt, Artificial Sequence
  Description of Artificial Sequence: Synthetic oligonucleotide
agaaggauuuuauuauaaggguuuaau

SEQ ID NO: 24700 - RNA, 27 nt, Artificial Sequence
  Description of Artificial Sequence: Synthetic oligonucleotide
gucuacagcauuggcuaauaguaugaa

SEQ ID NO: 24701 - RNA, 27 nt, Artificial Sequence
  Description of Artificial Sequence: Synthetic oligonucleotide
cuauuccuaucaaaaugcuucugucua

SEQ ID NO: 24702 - RNA, 27 nt, Artificial Sequence
  Description of Artificial Sequence: Synthetic oligonucleotide
ucagggccauuaucuuauuugcucuau

SEQ ID NO: 24703 - RNA, 27 nt, Artificial Sequence
  Description of Artificial Sequence: Synthetic oligonucleotide
ugcuugaggaagagaaaaauguugguc

SEQ ID NO: 24704 - RNA, 27 nt, Artificial Sequence
  Description of Artificial Sequence: Synthetic oligonucleotide
ugggcugaacuuuucucauacuuaaag

SEQ ID NO: 24705 - RNA, 27 nt, Artificial Sequence
  Description of Artificial Sequence: Synthetic oligonucleotide
gguucagcagccaucuuuauuccugcg

SEQ ID NO: 24706 - RNA, 27 nt, Artificial Sequence
  Description of Artificial Sequence: Synthetic oligonucleotide
ugaagagaacuuggucauucaaauuuc

SEQ ID NO: 24707 - RNA, 27 nt, Artificial Sequence
  Description of Artificial Sequence: Synthetic oligonucleotide
cucuaggcuggcuaucuuuauacauac

SEQ ID NO: 24708 - RNA, 27 nt, Artificial Sequence
  Description of Artificial Sequence: Synthetic oligonucleotide
acacuucacagagauaguuacagccau

SEQ ID NO: 24709 - RNA, 27 nt, Artificial Sequence
  Description of Artificial Sequence: Synthetic oligonucleotide
uugaaauuuucucacacuucacagaga

SEQ ID NO: 24710 - RNA, 27 nt, Artificial Sequence
  Description of Artificial Sequence: Synthetic oligonucleotide
ucaggaggauucauuuccuuaaaggaa

SEQ ID NO: 24711 - RNA, 27 nt, Artificial Sequence
  Description of Artificial Sequence: Synthetic oligonucleotide
auaugaugucacuuuuuguauccuuga

SEQ ID NO: 24712 - RNA, 27 nt, Artificial Sequence
  Description of Artificial Sequence: Synthetic oligonucleotide
uaugaugaagauucaaauugcaucuua

SEQ ID NO: 24713 - RNA, 27 nt, Artificial Sequence
  Description of Artificial Sequence: Synthetic oligonucleotide
uuaauagcuagucuucguuuugaacag

SEQ ID NO: 24714 - RNA, 27 nt, Artificial Sequence
  Description of Artificial Sequence: Synthetic oligonucleotide
auuuuuaguagagaugagguuucacca

SEQ ID NO: 24715 - RNA, 27 nt, Artificial Sequence
  Description of Artificial Sequence: Synthetic oligonucleotide
aggcgagauagagcuucucuuucguuc

SEQ ID NO: 24716 - RNA, 27 nt, Artificial Sequence
  Description of Artificial Sequence: Synthetic oligonucleotide
aacuggaccgaaggcgcuuguggagaa

SEQ ID NO: 24717 - RNA, 27 nt, Artificial Sequence
  Description of Artificial Sequence: Synthetic oligonucleotide
gcggcuacaucuuuggaaucuucuccu

SEQ ID NO: 24718 - RNA, 27 nt, Artificial Sequence
  Description of Artificial Sequence: Synthetic oligonucleotide
caagucuccucauugaauccagauugg

SEQ ID NO: 24719 - RNA, 27 nt, Artificial Sequence
  Description of Artificial Sequence: Synthetic oligonucleotide
uccucacuacucucaaaucuguucugg

SEQ ID NO: 24720 - RNA, 27 nt, Artificial Sequence
  Description of Artificial Sequence: Synthetic oligonucleotide
uuuguacucaucugcacagcucuggcu

SEQ ID NO: 24721 - RNA, 27 nt, Artificial Sequence
  Description of Artificial Sequence: Synthetic oligonucleotide
gcccauuaacaacaacaaucugaggug

SEQ ID NO: 24722 - RNA, 27 nt, Artificial Sequence
  Description of Artificial Sequence: Synthetic oligonucleotide
aauaaauuaaaaauaauuaaaauagug

SEQ ID NO: 24723 - RNA, 27 nt, Artificial Sequence
  Description of Artificial Sequence: Synthetic oligonucleotide
cauauuuaaauauuaauaaauuaaaaa

SEQ ID NO: 24724 - RNA, 27 nt, Artificial Sequence
  Description of Artificial Sequence: Synthetic oligonucleotide
gaaacaaaggauauucaaacugcauag

SEQ ID NO: 24725 - RNA, 27 nt, Artificial Sequence
  Description of Artificial Sequence: Synthetic oligonucleotide
caaacacuuagacgccagcagcauggg

SEQ ID NO: 24726 - RNA, 27 nt, Artificial Sequence
  Description of Artificial Sequence: Synthetic oligonucleotide
uuugucacaggugaaaugcacaucuga

SEQ ID NO: 24727 - RNA, 27 nt, Artificial Sequence
  Description of Artificial Sequence: Synthetic oligonucleotide
uaauucagccuggcacagguuuugauc

SEQ ID NO: 24728 - RNA, 27 nt, Artificial Sequence
  Description of Artificial Sequence: Synthetic oligonucleotide
auuguaagaaugacuacccacauucac

SEQ ID NO: 24729 - RNA, 27 nt, Artificial Sequence
  Description of Artificial Sequence: Synthetic oligonucleotide
caauuguaagaaugacuacccacauuc

SEQ ID NO: 24730 - RNA, 27 nt, Artificial Sequence
  Description of Artificial Sequence: Synthetic oligonucleotide
guacacucucugaugcucauuuucaua

SEQ ID NO: 24731 - RNA, 27 nt, Artificial Sequence
  Description of Artificial Sequence: Synthetic oligonucleotide
cugcugaguucuacaugaaaagcaaau

SEQ ID NO: 24732 - RNA, 27 nt, Artificial Sequence
  Description of Artificial Sequence: Synthetic oligonucleotide
uacugaaaauaaauauagaaauacaac

SEQ ID NO: 24733 - RNA, 27 nt, Artificial Sequence
  Description of Artificial Sequence: Synthetic oligonucleotide
uuccauuuaagaaacauuaaucaaaac

SEQ ID NO: 24734 - RNA, 27 nt, Artificial Sequence
  Description of Artificial Sequence: Synthetic oligonucleotide
acaauuuuaggcacuauacacguuguu

SEQ ID NO: 24735 - RNA, 27 nt, Artificial Sequence
  Description of Artificial Sequence: Synthetic oligonucleotide
ccagauguuaguagccaaggauauggu

SEQ ID NO: 24736 - RNA, 27 nt, Artificial Sequence
  Description of Artificial Sequence: Synthetic oligonucleotide
agcucacagucuccagauguuaguagc

SEQ ID NO: 24737 - RNA, 27 nt, Artificial Sequence
  Description of Artificial Sequence: Synthetic oligonucleotide
auuaauaaaaagcacacaacuuauggc

SEQ ID NO: 24738 - RNA, 27 nt, Artificial Sequence
  Description of Artificial Sequence: Synthetic oligonucleotide
aauguaagaagagccaaaaugaugcau

SEQ ID NO: 24739 - RNA, 27 nt, Artificial Sequence
  Description of Artificial Sequence: Synthetic oligonucleotide
acauuuuuacaaauguaagaagagcca

SEQ ID NO: 24740 - RNA, 27 nt, Artificial Sequence
  Description of Artificial Sequence: Synthetic oligonucleotide
aauaugaauuaagaugaccuaaucugu

SEQ ID NO: 24741 - RNA, 27 nt, Artificial Sequence
  Description of Artificial Sequence: Synthetic oligonucleotide
ucaugauuaguucuuucaauuccaucc

SEQ ID NO: 24742 - RNA, 27 nt, Artificial Sequence
  Description of Artificial Sequence: Synthetic oligonucleotide
cccaagagcagaaggaaugagugugca

SEQ ID NO: 24743 - RNA, 27 nt, Artificial Sequence
  Description of Artificial Sequence: Synthetic oligonucleotide
cucaaagcuacugguuaccucuacacc

SEQ ID NO: 24744 - RNA, 27 nt, Artificial Sequence
  Description of Artificial Sequence: Synthetic oligonucleotide
ugaaauauuacguggcaugugguuggg

SEQ ID NO: 24745 - RNA, 27 nt, Artificial Sequence
  Description of Artificial Sequence: Synthetic oligonucleotide
agugaagagaauaacuuguuuccgaag

SEQ ID NO: 24746 - RNA, 27 nt, Artificial Sequence
  Description of Artificial Sequence: Synthetic oligonucleotide
uuucuuagcauuaguuauugggaguga

SEQ ID NO: 24747 - RNA, 27 nt, Artificial Sequence
  Description of Artificial Sequence: Synthetic oligonucleotide
uugauuuucagcauuucuuagcauuag

SEQ ID NO: 24748 - RNA, 27 nt, Artificial Sequence
  Description of Artificial Sequence: Synthetic oligonucleotide
aaaguaaucauauuuagagaaagacag

SEQ ID NO: 24749 - RNA, 27 nt, Artificial Sequence
  Description of Artificial Sequence: Synthetic oligonucleotide
uguagaacaaaaugccugaaauucagc

SEQ ID NO: 24750 - RNA, 27 nt, Artificial Sequence
  Description of Artificial Sequence: Synthetic oligonucleotide
gagagucccgggugagagggaaucgcc

SEQ ID NO: 24751 - RNA, 27 nt, Artificial Sequence
  Description of Artificial Sequence: Synthetic oligonucleotide
cuuuacuuuaaagguucacuuuccuug

SEQ ID NO: 24752 - RNA, 27 nt, Artificial Sequence
  Description of Artificial Sequence: Synthetic oligonucleotide
ccaggcuuccagagcaugcagccuccu

SEQ ID NO: 24753 - RNA, 27 nt, Artificial Sequence
  Description of Artificial Sequence: Synthetic oligonucleotide
cucucuuuuguuuucuguucagagaaa

SEQ ID NO: 24754 - RNA, 27 nt, Artificial Sequence
  Description of Artificial Sequence: Synthetic oligonucleotide
cggcauaacugauuacagccaaguuca

SEQ ID NO: 24755 - RNA, 27 nt, Artificial Sequence
  Description of Artificial Sequence: Synthetic oligonucleotide
uggacuucuuuuaauuuuggcuucuuc

SEQ ID NO: 24756 - RNA, 27 nt, Artificial Sequence
  Description of Artificial Sequence: Synthetic oligonucleotide
uaaccucaccuggacuucuuuuaauuu

SEQ ID NO: 24757 - RNA, 27 nt, Artificial Sequence
  Description of Artificial Sequence: Synthetic oligonucleotide
guccucuucccgauaauccggauucag

SEQ ID NO: 24758 - RNA, 27 nt, Artificial Sequence
  Description of Artificial Sequence: Synthetic oligonucleotide
acaauacuugcuuugaugucacauuaa

SEQ ID NO: 24759 - RNA, 27 nt, Artificial Sequence
  Description of Artificial Sequence: Synthetic oligonucleotide
gagugcuacaauacuugcuuugauguc

SEQ ID NO: 24760 - RNA, 27 nt, Artificial Sequence
  Description of Artificial Sequence: Synthetic oligonucleotide
auuugugguuuuguuuucucucucucu

SEQ ID NO: 24761 - RNA, 27 nt, Artificial Sequence
  Description of Artificial Sequence: Synthetic oligonucleotide
uguaugggcuuaaauacuacagcgagg

SEQ ID NO: 24762 - RNA, 27 nt, Artificial Sequence
  Description of Artificial Sequence: Synthetic oligonucleotide
cuguaugggcuuaaauacuacagcgag

SEQ ID NO: 24763 - RNA, 27 nt, Artificial Sequence
  Description of Artificial Sequence: Synthetic oligonucleotide
ggaagguuucuguaugggcuuaaauac

SEQ ID NO: 24764 - RNA, 27 nt, Artificial Sequence
  Description of Artificial Sequence: Synthetic oligonucleotide
guagguauaccauguuuauuuuaauac

SEQ ID NO: 24765 - RNA, 27 nt, Artificial Sequence
  Description of Artificial Sequence: Synthetic oligonucleotide
uccgaaaacuggccgaucagaacagcc

SEQ ID NO: 24766 - RNA, 27 nt, Artificial Sequence
  Description of Artificial Sequence: Synthetic oligonucleotide
cccuguuccaaaguucaaauuauuugu

SEQ ID NO: 24767 - RNA, 27 nt, Artificial Sequence
  Description of Artificial Sequence: Synthetic oligonucleotide
acuggaaaguuaaauuaaggucgcaau

SEQ ID NO: 24768 - RNA, 27 nt, Artificial Sequence
  Description of Artificial Sequence: Synthetic oligonucleotide
caaaaccaaacuuuagcuuucucagcc

SEQ ID NO: 24769 - RNA, 27 nt, Artificial Sequence
  Description of Artificial Sequence: Synthetic oligonucleotide
uacagugggaaguagcaucuuuacuuu

SEQ ID NO: 24770 - RNA, 27 nt, Artificial Sequence
  Description of Artificial Sequence: Synthetic oligonucleotide
ucauaugguaucagcaauuaagcagua

SEQ ID NO: 24771 - RNA, 27 nt, Artificial Sequence
  Description of Artificial Sequence: Synthetic oligonucleotide
cagcccauguuucauucauaugguauc

SEQ ID NO: 24772 - RNA, 27 nt, Artificial Sequence
  Description of Artificial Sequence: Synthetic oligonucleotide
uaugaaaaaguuggauaagaaaguugg

SEQ ID NO: 24773 - RNA, 27 nt, Artificial Sequence
  Description of Artificial Sequence: Synthetic oligonucleotide
uccggccucaugaugucaugcaaggcu

SEQ ID NO: 24774 - RNA, 27 nt, Artificial Sequence
  Description of Artificial Sequence: Synthetic oligonucleotide
acaaaugcagucauauacaaauucagg

SEQ ID NO: 24775 - RNA, 27 nt, Artificial Sequence
  Description of Artificial Sequence: Synthetic oligonucleotide
gguaguaaacauucuacuaggauucuu

SEQ ID NO: 24776 - RNA, 27 nt, Artificial Sequence
  Description of Artificial Sequence: Synthetic oligonucleotide
uuucaucaaaaaauucuucccuuucug

SEQ ID NO: 24777 - RNA, 27 nt, Artificial Sequence
  Description of Artificial Sequence: Synthetic oligonucleotide
aaauucacacacuggcaugccgauagc

SEQ ID NO: 24778 - RNA, 27 nt, Artificial Sequence
  Description of Artificial Sequence: Synthetic oligonucleotide
acauacauugcucuacuaugaggugaa

SEQ ID NO: 24779 - RNA, 27 nt, Artificial Sequence
  Description of Artificial Sequence: Synthetic oligonucleotide
uauauaugugcuuuggcaauucuggug

SEQ ID NO: 24780 - RNA, 27 nt, Artificial Sequence
  Description of Artificial Sequence: Synthetic oligonucleotide
ggagaaacuauuacccagaucaccacu

SEQ ID NO: 24781 - RNA, 27 nt, Artificial Sequence
  Description of Artificial Sequence: Synthetic oligonucleotide
auuuggagaaacuauuacccagaucac

SEQ ID NO: 24782 - RNA, 27 nt, Artificial Sequence
  Description of Artificial Sequence: Synthetic oligonucleotide
uuucuaggaaguauucaucacauccac

SEQ ID NO: 24783 - RNA, 27 nt, Artificial Sequence
  Description of Artificial Sequence: Synthetic oligonucleotide
cauauaugguguagcuguggaaaugcg

SEQ ID NO: 24784 - RNA, 27 nt, Artificial Sequence
  Description of Artificial Sequence: Synthetic oligonucleotide
cuccauucauauaugguguagcugugg

SEQ ID NO: 24785 - RNA, 27 nt, Artificial Sequence
  Description of Artificial Sequence: Synthetic oligonucleotide
aucuucuucucguguaagaacugcagc

SEQ ID NO: 24786 - RNA, 27 nt, Artificial Sequence
  Description of Artificial Sequence: Synthetic oligonucleotide
ucccuguaaaugaucuucuucucgugu

SEQ ID NO: 24787 - RNA, 27 nt, Artificial Sequence
  Description of Artificial Sequence: Synthetic oligonucleotide
gucccuguaaaugaucuucuucucgug

SEQ ID NO: 24788 - RNA, 27 nt, Artificial Sequence
  Description of Artificial Sequence: Synthetic oligonucleotide
ucaggucccuguaaaugaucuucuucu

SEQ ID NO: 24789 - RNA, 27 nt, Artificial Sequence
  Description of Artificial Sequence: Synthetic oligonucleotide
gaugcagucaaacaccucuuccucugu

SEQ ID NO: 24790 - RNA, 27 nt, Artificial Sequence
  Description of Artificial Sequence: Synthetic oligonucleotide
cgaugcagucaaacaccucuuccucug

SEQ ID NO: 24791 - RNA, 27 nt, Artificial Sequence
  Description of Artificial Sequence: Synthetic oligonucleotide
cccugugaacucgcccucaaaguagcg

SEQ ID NO: 24792 - RNA, 27 nt, Artificial Sequence
  Description of Artificial Sequence: Synthetic oligonucleotide
ggacagaggugccaggagaugcccuca

SEQ ID NO: 24793 - RNA, 27 nt, Artificial Sequence
  Description of Artificial Sequence: Synthetic oligonucleotide
uuaaaaagacaaaccauaucacuccuu

SEQ ID NO: 24794 - RNA, 27 nt, Artificial Sequence
  Description of Artificial Sequence: Synthetic oligonucleotide
cuuaaaaagacaaaccauaucacuccu

SEQ ID NO: 24795 - RNA, 27 nt, Artificial Sequence
  Description of Artificial Sequence: Synthetic oligonucleotide
gacaaccuuuaggaucuuuacugcaac

SEQ ID NO: 24796 - RNA, 27 nt, Artificial Sequence
  Description of Artificial Sequence: Synthetic oligonucleotide
gucgacaaccuuuaggaucuuuacugc

SEQ ID NO: 24797 - RNA, 27 nt, Artificial Sequence
  Description of Artificial Sequence: Synthetic oligonucleotide
acaauugccagguuguccuuugucaug

SEQ ID NO: 24798 - RNA, 27 nt, Artificial Sequence
  Description of Artificial Sequence: Synthetic oligonucleotide
ccucgcaccacugggucacaauugcca

SEQ ID NO: 24799 - RNA, 27 nt, Artificial Sequence
  Description of Artificial Sequence: Synthetic oligonucleotide
auuucaugucucuauggaugauguucu

SEQ ID NO: 24800 - RNA, 27 nt, Artificial Sequence
  Description of Artificial Sequence: Synthetic oligonucleotide
uggagaaauauauuguuggauuucaug

SEQ ID NO: 24801 - RNA, 27 nt, Artificial Sequence
  Description of Artificial Sequence: Synthetic oligonucleotide
agccuucauggagaaauauauuguugg

SEQ ID NO: 24802 - RNA, 27 nt, Artificial Sequence
  Description of Artificial Sequence: Synthetic oligonucleotide
accacuccagcgugacuuuacuguugc

SEQ ID NO: 24803 - RNA, 27 nt, Artificial Sequence
  Description of Artificial Sequence: Synthetic oligonucleotide
ccucucuuccuuuacuuucuucacaca

SEQ ID NO: 24804 - RNA, 27 nt, Artificial Sequence
  Description of Artificial Sequence: Synthetic oligonucleotide
gcccgaugcaaggauggcucggaagcg

SEQ ID NO: 24805 - RNA, 27 nt, Artificial Sequence
  Description of Artificial Sequence: Synthetic oligonucleotide
cacaguaggauauucaaccuccauuuc

SEQ ID NO: 24806 - RNA, 27 nt, Artificial Sequence
  Description of Artificial Sequence: Synthetic oligonucleotide
uuacacaguaggauauucaaccuccau

SEQ ID NO: 24807 - RNA, 27 nt, Artificial Sequence
  Description of Artificial Sequence: Synthetic oligonucleotide
uacacuacaagggaaaacucaaaaucu

SEQ ID NO: 24808 - RNA, 27 nt, Artificial Sequence
  Description of Artificial Sequence: Synthetic oligonucleotide
caaucaacaaagaacaaacaggauaaa

SEQ ID NO: 24809 - RNA, 27 nt, Artificial Sequence
  Description of Artificial Sequence: Synthetic oligonucleotide
uuucaaucaacaaagaacaaacaggau

SEQ ID NO: 24810 - RNA, 27 nt, Artificial Sequence
  Description of Artificial Sequence: Synthetic oligonucleotide
auggaagaaaaagaaggcuguagagaa

SEQ ID NO: 24811 - RNA, 27 nt, Artificial Sequence
  Description of Artificial Sequence: Synthetic oligonucleotide
uagaaggaagauuagcuauggaagaaa

SEQ ID NO: 24812 - RNA, 27 nt, Artificial Sequence
  Description of Artificial Sequence: Synthetic oligonucleotide
augaagcauucaacaggaagauuauuu

SEQ ID NO: 24813 - RNA, 27 nt, Artificial Sequence
  Description of Artificial Sequence: Synthetic oligonucleotide
caugaagcauucaacaggaagauuauu

SEQ ID NO: 24814 - RNA, 27 nt, Artificial Sequence
  Description of Artificial Sequence: Synthetic oligonucleotide
ucaaaguagaauucaagucaugaagca

SEQ ID NO: 24815 - RNA, 27 nt, Artificial Sequence
  Description of Artificial Sequence: Synthetic oligonucleotide
gucuguaguugcuucucucccucuuag

SEQ ID NO: 24816 - RNA, 27 nt, Artificial Sequence
  Description of Artificial Sequence: Synthetic oligonucleotide
guugaccuuggucugguaggagacggc

SEQ ID NO: 24817 - RNA, 27 nt, Artificial Sequence
  Description of Artificial Sequence: Synthetic oligonucleotide
gucgagauagucgggccgauugaucuc

SEQ ID NO: 24818 - RNA, 27 nt, Artificial Sequence
  Description of Artificial Sequence: Synthetic oligonucleotide
guuugggaagguuggauguucguccuc

SEQ ID NO: 24819 - RNA, 27 nt, Artificial Sequence
  Description of Artificial Sequence: Synthetic oligonucleotide
aguucuaagcuuggguuccgacccuaa

SEQ ID NO: 24820 - RNA, 27 nt, Artificial Sequence
  Description of Artificial Sequence: Synthetic oligonucleotide
uuaaaguucuaagcuuggguuccgacc

SEQ ID NO: 24821 - RNA, 27 nt, Artificial Sequence
  Description of Artificial Sequence: Synthetic oligonucleotide
guugcuuaaaguucuaagcuuggguuc

SEQ ID NO: 24822 - RNA, 27 nt, Artificial Sequence
  Description of Artificial Sequence: Synthetic oligonucleotide
gugguggucuuguugcuuaaaguucua

SEQ ID NO: 24823 - RNA, 27 nt, Artificial Sequence
  Description of Artificial Sequence: Synthetic oligonucleotide
acuuuauuucucgccacugaauaguag

SEQ ID NO: 24824 - RNA, 27 nt, Artificial Sequence
  Description of Artificial Sequence: Synthetic oligonucleotide
aacuuuauuucucgccacugaauagua

SEQ ID NO: 24825 - RNA, 27 nt, Artificial Sequence
  Description of Artificial Sequence: Synthetic oligonucleotide
ggaucauuuccuguuaucuguguuugu

SEQ ID NO: 24826 - RNA, 27 nt, Artificial Sequence
  Description of Artificial Sequence: Synthetic oligonucleotide
guuucauuucuucucuuuucuuaaggc

SEQ ID NO: 24827 - RNA, 27 nt, Artificial Sequence
  Description of Artificial Sequence: Synthetic oligonucleotide
ggaggauggaaacacacuccuucaguu

SEQ ID NO: 24828 - RNA, 27 nt, Artificial Sequence
  Description of Artificial Sequence: Synthetic oligonucleotide
ucaaagauuuucagucccgcggugaca

SEQ ID NO: 24829 - RNA, 27 nt, Artificial Sequence
  Description of Artificial Sequence: Synthetic oligonucleotide
ccugaacggcacgcuuauuucugcugu

SEQ ID NO: 24830 - RNA, 27 nt, Artificial Sequence
  Description of Artificial Sequence: Synthetic oligonucleotide
cuucuggacccugaacggcacgcuuau

SEQ ID NO: 24831 - RNA, 27 nt, Artificial Sequence
  Description of Artificial Sequence: Synthetic oligonucleotide
caagcagucuugagugacuguuucuuc

SEQ ID NO: 24832 - RNA, 27 nt, Artificial Sequence
  Description of Artificial Sequence: Synthetic oligonucleotide
ccaaagacauggaccuucuuccucuga

SEQ ID NO: 24833 - RNA, 27 nt, Artificial Sequence
  Description of Artificial Sequence: Synthetic oligonucleotide
guguuucaggcauauuuugaauacauc

SEQ ID NO: 24834 - RNA, 27 nt, Artificial Sequence
  Description of Artificial Sequence: Synthetic oligonucleotide
gagguacagagaaagggaggaaaauag

SEQ ID NO: 24835 - RNA, 27 nt, Artificial Sequence
  Description of Artificial Sequence: Synthetic oligonucleotide
ucuugucuugcucuaucuuucuuuggu

SEQ ID NO: 24836 - RNA, 27 nt, Artificial Sequence
  Description of Artificial Sequence: Synthetic oligonucleotide
uuucuugucuugcucuaucuuucuuug

SEQ ID NO: 24837 - RNA, 27 nt, Artificial Sequence
  Description of Artificial Sequence: Synthetic oligonucleotide
ggaucuuguacaaacaaaugcuuucuc

SEQ ID NO: 24838 - RNA, 27 nt, Artificial Sequence
  Description of Artificial Sequence: Synthetic oligonucleotide
ucugcaaguacguucguuuaacucaag

SEQ ID NO: 24839 - RNA, 27 nt, Artificial Sequence
  Description of Artificial Sequence: Synthetic oligonucleotide
ucuguaucgaucguucuguaucagucu

SEQ ID NO: 24840 - RNA, 27 nt, Artificial Sequence
  Description of Artificial Sequence: Synthetic oligonucleotide
auuuauuuuuauauauauauaauauau

SEQ ID NO: 24841 - RNA, 27 nt, Artificial Sequence
  Description of Artificial Sequence: Synthetic oligonucleotide
auauuuauuuuuauauauauauaauau

SEQ ID NO: 24842 - RNA, 27 nt, Artificial Sequence
  Description of Artificial Sequence: Synthetic oligonucleotide
cacagcagucaaauacauccagugaag

SEQ ID NO: 24843 - RNA, 27 nt, Artificial Sequence
  Description of Artificial Sequence: Synthetic oligonucleotide
gucucucaucuccuccucuucccuguc

SEQ ID NO: 24844 - RNA, 27 nt, Artificial Sequence
  Description of Artificial Sequence: Synthetic oligonucleotide
ccaagugggacaaaaaaaagaucaugc

SEQ ID NO: 24845 - RNA, 14 nt, Artificial Sequence
  Description of Artificial Sequence: Synthetic oligonucleotide
guauuuugaugagg

SEQ ID NO: 24846 - RNA, 12 nt, Artificial Sequence
  Description of Artificial Sequence: Synthetic oligonucleotide
ggcccagaugau

SEQ ID NO: 24847 - RNA, 14 nt, Artificial Sequence
  Description of Artificial Sequence: Synthetic oligonucleotide
gggaagaaaacuau

SEQ ID NO: 24848 - RNA, 15 nt, Artificial Sequence
  Description of Artificial Sequence: Synthetic oligonucleotide
guuuuaauuuauuuc

SEQ ID NO: 24849 - RNA, 12 nt, Artificial Sequence
  Description of Artificial Sequence: Synthetic oligonucleotide
acguagggaaau

SEQ ID NO: 24850 - RNA, 12 nt, Artificial Sequence
  Description of Artificial Sequence: Synthetic oligonucleotide
ccaggguuuacc

SEQ ID NO: 24851 - RNA, 11 nt, Artificial Sequence
  Description of Artificial Sequence: Synthetic oligonucleotide
agcaagguuua

SEQ ID NO: 24852 - RNA, 12 nt, Artificial Sequence
  Description of Artificial Sequence: Synthetic oligonucleotide
uguauuauguug

SEQ ID NO: 24853 - RNA, 15 nt, Artificial Sequence
  Description of Artificial Sequence: Synthetic oligonucleotide
uuuuaaucuuuguga

SEQ ID NO: 24854 - RNA, 14 nt, Artificial Sequence
  Description of Artificial Sequence: Synthetic oligonucleotide
uuaaucuuugugac

SEQ ID NO: 24855 - RNA, 13 nt, Artificial Sequence
  Description of Artificial Sequence: Synthetic oligonucleotide
gcugcuuaugucu

SEQ ID NO: 24856 - RNA, 14 nt, Artificial Sequence
  Description of Artificial Sequence: Synthetic oligonucleotide
aaguguuucagaag

SEQ ID NO: 24857 - RNA, 13 nt, Artificial Sequence
  Description of Artificial Sequence: Synthetic oligonucleotide
gaccaucaauaag

SEQ ID NO: 24858 - RNA, 13 nt, Artificial Sequence
  Description of Artificial Sequence: Synthetic oligonucleotide
ccaucaauaagga

SEQ ID NO: 24859 - RNA, 14 nt, Artificial Sequence
  Description of Artificial Sequence: Synthetic oligonucleotide
ucaauaaggaagaa

SEQ ID NO: 24860 - RNA, 14 nt, Artificial Sequence
  Description of Artificial Sequence: Synthetic oligonucleotide
aauaaggaagaagc

SEQ ID NO: 24861 - RNA, 13 nt, Artificial Sequence
  Description of Artificial Sequence: Synthetic oligonucleotide
aggaagaagcccu

SEQ ID NO: 24862 - RNA, 13 nt, Artificial Sequence
  Description of Artificial Sequence: Synthetic oligonucleotide
gcauaacuaaagg

SEQ ID NO: 24863 - RNA, 14 nt, Artificial Sequence
  Description of Artificial Sequence: Synthetic oligonucleotide
cauaacuaaaggug

SEQ ID NO: 24864 - RNA, 12 nt, Artificial Sequence
  Description of Artificial Sequence: Synthetic oligonucleotide
cuacaucacgcc

SEQ ID NO: 24865 - RNA, 12 nt, Artificial Sequence
  Description of Artificial Sequence: Synthetic oligonucleotide
acuggauuuaag

SEQ ID NO: 24866 - RNA, 12 nt, Artificial Sequence
  Description of Artificial Sequence: Synthetic oligonucleotide
cuggauuuaagc

SEQ ID NO: 24867 - RNA, 13 nt, Artificial Sequence
  Description of Artificial Sequence: Synthetic oligonucleotide
gauuuaagcagag

SEQ ID NO: 24868 - RNA, 13 nt, Artificial Sequence
  Description of Artificial Sequence: Synthetic oligonucleotide
auuuaagcagagu

SEQ ID NO: 24869 - RNA, 13 nt, Artificial Sequence
  Description of Artificial Sequence: Synthetic oligonucleotide
uuaagcagaguuc

SEQ ID NO: 24870 - RNA, 13 nt, Artificial Sequence
  Description of Artificial Sequence: Synthetic oligonucleotide
uaagcagaguuca

SEQ ID NO: 24871 - RNA, 14 nt, Artificial Sequence
  Description of Artificial Sequence: Synthetic oligonucleotide
agcagaguucaaaa

SEQ ID NO: 24872 - RNA, 12 nt, Artificial Sequence
  Description of Artificial Sequence: Synthetic oligonucleotide
cucagggucuga

SEQ ID NO: 24873 - RNA, 13 nt, Artificial Sequence
  Description of Artificial Sequence: Synthetic oligonucleotide
caagcaacuacau

SEQ ID NO: 24874 - RNA, 12 nt, Artificial Sequence
  Description of Artificial Sequence: Synthetic oligonucleotide
aucaauggcagc

SEQ ID NO: 24875 - RNA, 11 nt, Artificial Sequence
  Description of Artificial Sequence: Synthetic oligonucleotide
uuccagcccac

SEQ ID NO: 24876 - RNA, 12 nt, Artificial Sequence
  Description of Artificial Sequence: Synthetic oligonucleotide
cagcugagaaug

SEQ ID NO: 24877 - RNA, 13 nt, Artificial Sequence
  Description of Artificial Sequence: Synthetic oligonucleotide
aacguaucuccua

SEQ ID NO: 24878 - RNA, 14 nt, Artificial Sequence
  Description of Artificial Sequence: Synthetic oligonucleotide
ccuaaaauaauuuc

SEQ ID NO: 24879 - RNA, 13 nt, Artificial Sequence
  Description of Artificial Sequence: Synthetic oligonucleotide
uggaagauucagc

SEQ ID NO: 24880 - RNA, 12 nt, Artificial Sequence
  Description of Artificial Sequence: Synthetic oligonucleotide
uuaaacucuccu

SEQ ID NO: 24881 - RNA, 12 nt, Artificial Sequence
  Description of Artificial Sequence: Synthetic oligonucleotide
cagccuacaguu

SEQ ID NO: 24882 - RNA, 13 nt, Artificial Sequence
  Description of Artificial Sequence: Synthetic oligonucleotide
guuauguucaguc

SEQ ID NO: 24883 - RNA, 13 nt, Artificial Sequence
  Description of Artificial Sequence: Synthetic oligonucleotide
cacauacaaaaug

SEQ ID NO: 24884 - RNA, 9 nt, Artificial Sequence
  Description of Artificial Sequence: Synthetic oligonucleotide
uccuuuugc

SEQ ID NO: 24885 - RNA, 12 nt, Artificial Sequence
  Description of Artificial Sequence: Synthetic oligonucleotide
ugaccugugaag

SEQ ID NO: 24886 - RNA, 12 nt, Artificial Sequence
  Description of Artificial Sequence: Synthetic oligonucleotide
cuaucucacaca

SEQ ID NO: 24887 - RNA, 13 nt, Artificial Sequence
  Description of Artificial Sequence: Synthetic oligonucleotide
uguccucaauugu

SEQ ID NO: 24888 - RNA, 12 nt, Artificial Sequence
  Description of Artificial Sequence: Synthetic oligonucleotide
aaaccguagcug

SEQ ID NO: 24889 - RNA, 12 nt, Artificial Sequence
  Description of Artificial Sequence: Synthetic oligonucleotide
uagcuggcaagc

SEQ ID NO: 24890 - RNA, 14 nt, Artificial Sequence
  Description of Artificial Sequence: Synthetic oligonucleotide
uuguaugguuaaaa

SEQ ID NO: 24891 - RNA, 14 nt, Artificial Sequence
  Description of Artificial Sequence: Synthetic oligonucleotide
ugguuaaaagaugg

SEQ ID NO: 24892 - RNA, 13 nt, Artificial Sequence
  Description of Artificial Sequence: Synthetic oligonucleotide
cagggaauuauac

SEQ ID NO: 24893 - RNA, 12 nt, Artificial Sequence
  Description of Artificial Sequence: Synthetic oligonucleotide
acaaucuugcug

SEQ ID NO: 24894 - RNA, 13 nt, Artificial Sequence
  Description of Artificial Sequence: Synthetic oligonucleotide
ccaauaaugaaga

SEQ ID NO: 24895 - RNA, 13 nt, Artificial Sequence
  Description of Artificial Sequence: Synthetic oligonucleotide
acuuuggauguuc

SEQ ID NO: 24896 - RNA, 12 nt, Artificial Sequence
  Description of Artificial Sequence: Synthetic oligonucleotide
aaugcuuccacu

SEQ ID NO: 24897 - RNA, 11 nt, Artificial Sequence
  Description of Artificial Sequence: Synthetic oligonucleotide
gagaaaguuug

SEQ ID NO: 24898 - RNA, 11 nt, Artificial Sequence
  Description of Artificial Sequence: Synthetic oligonucleotide
aaagaacuacu

SEQ ID NO: 24899 - RNA, 12 nt, Artificial Sequence
  Description of Artificial Sequence: Synthetic oligonucleotide
uuagaaauacgg

SEQ ID NO: 24900 - RNA, 12 nt, Artificial Sequence
  Description of Artificial Sequence: Synthetic oligonucleotide
aacauggguaca

SEQ ID NO: 24901 - RNA, 14 nt, Artificial Sequence
  Description of Artificial Sequence: Synthetic oligonucleotide
aaagacacagaaga

SEQ ID NO: 24902 - RNA, 11 nt, Artificial Sequence
  Description of Artificial Sequence: Synthetic oligonucleotide
uaguagggagg

SEQ ID NO: 24903 - RNA, 12 nt, Artificial Sequence
  Description of Artificial Sequence: Synthetic oligonucleotide
gccuucugcagc

SEQ ID NO: 24904 - RNA, 10 nt, Artificial Sequence
  Description of Artificial Sequence: Synthetic oligonucleotide
ggucugguac

SEQ ID NO: 24905 - RNA, 12 nt, Artificial Sequence
  Description of Artificial Sequence: Synthetic oligonucleotide
cuaguccuuccg

SEQ ID NO: 24906 - RNA, 12 nt, Artificial Sequence
  Description of Artificial Sequence: Synthetic oligonucleotide
ccagugaauauu

SEQ ID NO: 24907 - RNA, 13 nt, Artificial Sequence
  Description of Artificial Sequence: Synthetic oligonucleotide
augaauucaaguu

SEQ ID NO: 24908 - RNA, 12 nt, Artificial Sequence
  Description of Artificial Sequence: Synthetic oligonucleotide
caggacacagau

SEQ ID NO: 24909 - RNA, 12 nt, Artificial Sequence
  Description of Artificial Sequence: Synthetic oligonucleotide
cucaaagcacag

SEQ ID NO: 24910 - RNA, 10 nt, Artificial Sequence
  Description of Artificial Sequence: Synthetic oligonucleotide
accacugcca

SEQ ID NO: 24911 - RNA, 13 nt, Artificial Sequence
  Description of Artificial Sequence: Synthetic oligonucleotide
gaaacuacuagug

SEQ ID NO: 24912 - RNA, 12 nt, Artificial Sequence
  Description of Artificial Sequence: Synthetic oligonucleotide
aagucggacagc

SEQ ID NO: 24913 - RNA, 13 nt, Artificial Sequence
  Description of Artificial Sequence: Synthetic oligonucleotide
gaaagcgaaaaau

SEQ ID NO: 24914 - RNA, 13 nt, Artificial Sequence
  Description of Artificial Sequence: Synthetic oligonucleotide
cccucugauuuag

SEQ ID NO: 24915 - RNA, 12 nt, Artificial Sequence
  Description of Artificial Sequence: Synthetic oligonucleotide
ugagcuauuuaa

SEQ ID NO: 24916 - RNA, 13 nt, Artificial Sequence
  Description of Artificial Sequence: Synthetic oligonucleotide
aaaaggugaaaaa

SEQ ID NO: 24917 - RNA, 14 nt, Artificial Sequence
  Description of Artificial Sequence: Synthetic oligonucleotide
gaaaaagcacuauu

SEQ ID NO: 24918 - RNA, 12 nt, Artificial Sequence
  Description of Artificial Sequence: Synthetic oligonucleotide
ggcugaaaagaa

SEQ ID NO: 24919 - RNA, 12 nt, Artificial Sequence
  Description of Artificial Sequence: Synthetic oligonucleotide
uaaacccuuaua

SEQ ID NO: 24920 - RNA, 13 nt, Artificial Sequence
  Description of Artificial Sequence: Synthetic oligonucleotide
cauacuauuagcc

SEQ ID NO: 24921 - RNA, 12 nt, Artificial Sequence
  Description of Artificial Sequence: Synthetic oligonucleotide
gacagaagcauu

SEQ ID NO: 24922 - RNA, 14 nt, Artificial Sequence
  Description of Artificial Sequence: Synthetic oligonucleotide
agagcaaauaagau

SEQ ID NO: 24923 - RNA, 14 nt, Artificial Sequence
  Description of Artificial Sequence: Synthetic oligonucleotide
ccaacauuuuucuc

SEQ ID NO: 24924 - RNA, 15 nt, Artificial Sequence
  Description of Artificial Sequence: Synthetic oligonucleotide
uuaaguaugagaaaa

SEQ ID NO: 24925 - RNA, 14 nt, Artificial Sequence
  Description of Artificial Sequence: Synthetic oligonucleotide
caggaauaaagaug

SEQ ID NO: 24926 - RNA, 13 nt, Artificial Sequence
  Description of Artificial Sequence: Synthetic oligonucleotide
aauuugaaugacc

SEQ ID NO: 24927 - RNA, 14 nt, Artificial Sequence
  Description of Artificial Sequence: Synthetic oligonucleotide
auguauaaagauag

SEQ ID NO: 24928 - RNA, 12 nt, Artificial Sequence
  Description of Artificial Sequence: Synthetic oligonucleotide
ggcuguaacuau

SEQ ID NO: 24929 - RNA, 11 nt, Artificial Sequence
  Description of Artificial Sequence: Synthetic oligonucleotide
ucugugaagug

SEQ ID NO: 24930 - RNA, 14 nt, Artificial Sequence
  Description of Artificial Sequence: Synthetic oligonucleotide
ccuuuaaggaaaug

SEQ ID NO: 24931 - RNA, 13 nt, Artificial Sequence
  Description of Artificial Sequence: Synthetic oligonucleotide
aaggauacaaaaa

SEQ ID NO: 24932 - RNA, 12 nt, Artificial Sequence
  Description of Artificial Sequence: Synthetic oligonucleotide
agaugcaauuug

SEQ ID NO: 24933 - RNA, 12 nt, Artificial Sequence
  Description of Artificial Sequence: Synthetic oligonucleotide
guucaaaacgaa

SEQ ID NO: 24934 - RNA, 11 nt, Artificial Sequence
  Description of Artificial Sequence: Synthetic oligonucleotide
gugaaaccuca

SEQ ID NO: 24935 - RNA, 13 nt, Artificial Sequence
  Description of Artificial Sequence: Synthetic oligonucleotide
acgaaagagaagc

SEQ ID NO: 24936 - RNA, 12 nt, Artificial Sequence
  Description of Artificial Sequence: Synthetic oligonucleotide
cuccacaagcgc

SEQ ID NO: 24937 - RNA, 14 nt, Artificial Sequence
  Description of Artificial Sequence: Synthetic oligonucleotide
gagaagauuccaaa

SEQ ID NO: 24938 - RNA, 13 nt, Artificial Sequence
  Description of Artificial Sequence: Synthetic oligonucleotide
aaucuggauucaa

SEQ ID NO: 24939 - RNA, 13 nt, Artificial Sequence
  Description of Artificial Sequence: Synthetic oligonucleotide
agaacagauuuga

SEQ ID NO: 24940 - RNA, 11 nt, Artificial Sequence
  Description of Artificial Sequence: Synthetic oligonucleotide
ccagagcugug

SEQ ID NO: 24941 - RNA, 12 nt, Artificial Sequence
  Description of Artificial Sequence: Synthetic oligonucleotide
ccucagauuguu

SEQ ID NO: 24942 - RNA, 12 nt, Artificial Sequence
  Description of Artificial Sequence: Synthetic oligonucleotide
cuauuuuaauua

SEQ ID NO: 24943 - RNA, 13 nt, Artificial Sequence
  Description of Artificial Sequence: Synthetic oligonucleotide
uuuaauuuauuaa

SEQ ID NO: 24944 - RNA, 12 nt, Artificial Sequence
  Description of Artificial Sequence: Synthetic oligonucleotide
augcaguuugaa

SEQ ID NO: 24945 - RNA, 11 nt, Artificial Sequence
  Description of Artificial Sequence: Synthetic oligonucleotide
caugcugcugg

SEQ ID NO: 24946 - RNA, 13 nt, Artificial Sequence
  Description of Artificial Sequence: Synthetic oligonucleotide
agaugugcauuuc

SEQ ID NO: 24947 - RNA, 12 nt, Artificial Sequence
  Description of Artificial Sequence: Synthetic oligonucleotide
ucaaaaccugug

SEQ ID NO: 24948 - RNA, 11 nt, Artificial Sequence
  Description of Artificial Sequence: Synthetic oligonucleotide
gaaugugggua

SEQ ID NO: 24949 - RNA, 10 nt, Artificial Sequence
  Description of Artificial Sequence: Synthetic oligonucleotide
auguggguag

SEQ ID NO: 24950 - RNA, 13 nt, Artificial Sequence
  Description of Artificial Sequence: Synthetic oligonucleotide
ugaaaaugagcau

SEQ ID NO: 24951 - RNA, 13 nt, Artificial Sequence
  Description of Artificial Sequence: Synthetic oligonucleotide
uugcuuuucaugu

SEQ ID NO: 24952 - RNA, 12 nt, Artificial Sequence
  Description of Artificial Sequence: Synthetic oligonucleotide
uguauuucuaua

SEQ ID NO: 24953 - RNA, 13 nt, Artificial Sequence
  Description of Artificial Sequence: Synthetic oligonucleotide
uuugauuaauguu

SEQ ID NO: 24954 - RNA, 12 nt, Artificial Sequence
  Description of Artificial Sequence: Synthetic oligonucleotide
caacguguauag

SEQ ID NO: 24955 - RNA, 12 nt, Artificial Sequence
  Description of Artificial Sequence: Synthetic oligonucleotide
cauauccuuggc

SEQ ID NO: 24956 - RNA, 13 nt, Artificial Sequence
  Description of Artificial Sequence: Synthetic oligonucleotide
uacuaacaucugg

SEQ ID NO: 24957 - RNA, 11 nt, Artificial Sequence
  Description of Artificial Sequence: Synthetic oligonucleotide
cauaaguugug

SEQ ID NO: 24958 - RNA, 12 nt, Artificial Sequence
  Description of Artificial Sequence: Synthetic oligonucleotide
gcaucauuuugg

SEQ ID NO: 24959 - RNA, 10 nt, Artificial Sequence
  Description of Artificial Sequence: Synthetic oligonucleotide
gcucuucuua

SEQ ID NO: 24960 - RNA, 10 nt, Artificial Sequence
  Description of Artificial Sequence: Synthetic oligonucleotide
agauuagguc

SEQ ID NO: 24961 - RNA, 12 nt, Artificial Sequence
  Description of Artificial Sequence: Synthetic oligonucleotide
auggaauugaaa

SEQ ID NO: 24962 - RNA, 13 nt, Artificial Sequence
  Description of Artificial Sequence: Synthetic oligonucleotide
cacacucauuccu

SEQ ID NO: 24963 - RNA, 12 nt, Artificial Sequence
  Description of Artificial Sequence: Synthetic oligonucleotide
uguagagguaac

SEQ ID NO: 24964 - RNA, 11 nt, Artificial Sequence
  Description of Artificial Sequence: Synthetic oligonucleotide
caaccacaugc

SEQ ID NO: 24965 - RNA, 12 nt, Artificial Sequence
  Description of Artificial Sequence: Synthetic oligonucleotide
ucggaaacaagu

SEQ ID NO: 24966 - RNA, 11 nt, Artificial Sequence
  Description of Artificial Sequence: Synthetic oligonucleotide
acucccaauaa

SEQ ID NO: 24967 - RNA, 13 nt, Artificial Sequence
  Description of Artificial Sequence: Synthetic oligonucleotide
aaugcuaagaaau

SEQ ID NO: 24968 - RNA, 11 nt, Artificial Sequence
  Description of Artificial Sequence: Synthetic oligonucleotide
gucuuucucua

SEQ ID NO: 24969 - RNA, 11 nt, Artificial Sequence
  Description of Artificial Sequence: Synthetic oligonucleotide
ugaauuucagg

SEQ ID NO: 24970 - RNA, 13 nt, Artificial Sequence
  Description of Artificial Sequence: Synthetic oligonucleotide
cgauucccucuca

SEQ ID NO: 24971 - RNA, 11 nt, Artificial Sequence
  Description of Artificial Sequence: Synthetic oligonucleotide
aggaaagugaa

SEQ ID NO: 24972 - RNA, 12 nt, Artificial Sequence
  Description of Artificial Sequence: Synthetic oligonucleotide
gaggcugcaugc

SEQ ID NO: 24973 - RNA, 11 nt, Artificial Sequence
  Description of Artificial Sequence: Synthetic oligonucleotide
ucucugaacag

SEQ ID NO: 24974 - RNA, 12 nt, Artificial Sequence
  Description of Artificial Sequence: Synthetic oligonucleotide
aacuuggcugua

SEQ ID NO: 24975 - RNA, 12 nt, Artificial Sequence
  Description of Artificial Sequence: Synthetic oligonucleotide
agaagccaaaau

SEQ ID NO: 24976 - RNA, 14 nt, Artificial Sequence
  Description of Artificial Sequence: Synthetic oligonucleotide
auuaaaagaagucc

SEQ ID NO: 24977 - RNA, 14 nt, Artificial Sequence
  Description of Artificial Sequence: Synthetic oligonucleotide
gaauccggauuauc

SEQ ID NO: 24978 - RNA, 12 nt, Artificial Sequence
  Description of Artificial Sequence: Synthetic oligonucleotide
aaugugacauca

SEQ ID NO: 24979 - RNA, 13 nt, Artificial Sequence
  Description of Artificial Sequence: Synthetic oligonucleotide
caucaaagcaagu

SEQ ID NO: 24980 - RNA, 11 nt, Artificial Sequence
  Description of Artificial Sequence: Synthetic oligonucleotide
agagagagaaa

SEQ ID NO: 24981 - RNA, 13 nt, Artificial Sequence
  Description of Artificial Sequence: Synthetic oligonucleotide
ucgcuguaguauu

SEQ ID NO: 24982 - RNA, 14 nt, Artificial Sequence
  Description of Artificial Sequence: Synthetic oligonucleotide
cgcuguaguauuua

SEQ ID NO: 24983 - RNA, 13 nt, Artificial Sequence
  Description of Artificial Sequence: Synthetic oligonucleotide
auuuaagcccaua

SEQ ID NO: 24984 - RNA, 15 nt, Artificial Sequence
  Description of Artificial Sequence: Synthetic oligonucleotide
auuaaaauaaacaug

SEQ ID NO: 24985 - RNA, 12 nt, Artificial Sequence
  Description of Artificial Sequence: Synthetic oligonucleotide
cuguucugaucg

SEQ ID NO: 24986 - RNA, 16 nt, Artificial Sequence
  Description of Artificial Sequence: Synthetic oligonucleotide
aaauaauuugaacuuu

SEQ ID NO: 24987 - RNA, 12 nt, Artificial Sequence
  Description of Artificial Sequence: Synthetic oligonucleotide
ugcgaccuuaau

SEQ ID NO: 24988 - RNA, 11 nt, Artificial Sequence
  Description of Artificial Sequence: Synthetic oligonucleotide
cugagaaagcu

SEQ ID NO: 24989 - RNA, 13 nt, Artificial Sequence
  Description of Artificial Sequence: Synthetic oligonucleotide
aguaaagaugcua

SEQ ID NO: 24990 - RNA, 12 nt, Artificial Sequence
  Description of Artificial Sequence: Synthetic oligonucleotide
cugcuuaauugc

SEQ ID NO: 24991 - RNA, 14 nt, Artificial Sequence
  Description of Artificial Sequence: Synthetic oligonucleotide
uaccauaugaauga

SEQ ID NO: 24992 - RNA, 12 nt, Artificial Sequence
  Description of Artificial Sequence: Synthetic oligonucleotide
aacuuucuuauc

SEQ ID NO: 24993 - RNA, 13 nt, Artificial Sequence
  Description of Artificial Sequence: Synthetic oligonucleotide
ccuugcaugacau

SEQ ID NO: 24994 - RNA, 14 nt, Artificial Sequence
  Description of Artificial Sequence: Synthetic oligonucleotide
ugaauuuguauaug

SEQ ID NO: 24995 - RNA, 12 nt, Artificial Sequence
  Description of Artificial Sequence: Synthetic oligonucleotide
gaauccuaguag

SEQ ID NO: 24996 - RNA, 10 nt, Artificial Sequence
  Description of Artificial Sequence: Synthetic oligonucleotide
gaaagggaag

SEQ ID NO: 24997 - RNA, 11 nt, Artificial Sequence
  Description of Artificial Sequence: Synthetic oligonucleotide
uaucggcaugc

SEQ ID NO: 24998 - RNA, 12 nt, Artificial Sequence
  Description of Artificial Sequence: Synthetic oligonucleotide
caccucauagua

SEQ ID NO: 24999 - RNA, 11 nt, Artificial Sequence
  Description of Artificial Sequence: Synthetic oligonucleotide
ccagaauugcc

SEQ ID NO: 25000 - RNA, 11 nt, Artificial Sequence
  Description of Artificial Sequence: Synthetic oligonucleotide
uggugaucugg

SEQ ID NO: 25001 - RNA, 12 nt, Artificial Sequence
  Description of Artificial Sequence: Synthetic oligonucleotide
gaucuggguaau

SEQ ID NO: 25002 - RNA, 12 nt, Artificial Sequence
  Description of Artificial Sequence: Synthetic oligonucleotide
ggaugugaugaa

SEQ ID NO: 25003 - RNA, 12 nt, Artificial Sequence
  Description of Artificial Sequence: Synthetic oligonucleotide
cauuuccacagc

SEQ ID NO: 25004 - RNA, 11 nt, Artificial Sequence
  Description of Artificial Sequence: Synthetic oligonucleotide
acagcuacacc

SEQ ID NO: 25005 - RNA, 12 nt, Artificial Sequence
  Description of Artificial Sequence: Synthetic oligonucleotide
ugcaguucuuac

SEQ ID NO: 25006 - RNA, 12 nt, Artificial Sequence
  Description of Artificial Sequence: Synthetic oligonucleotide
acgagaagaaga

SEQ ID NO: 25007 - RNA, 12 nt, Artificial Sequence
  Description of Artificial Sequence: Synthetic oligonucleotide
cgagaagaagau

SEQ ID NO: 25008 - RNA, 15 nt, Artificial Sequence
  Description of Artificial Sequence: Synthetic oligonucleotide
aagaagaucauuuac

SEQ ID NO: 25009 - RNA, 11 nt, Artificial Sequence
  Description of Artificial Sequence: Synthetic oligonucleotide
agaggaagagg

SEQ ID NO: 25010 - RNA, 12 nt, Artificial Sequence
  Description of Artificial Sequence: Synthetic oligonucleotide
gaggaagaggug

SEQ ID NO: 25011 - RNA, 13 nt, Artificial Sequence
  Description of Artificial Sequence: Synthetic oligonucleotide
cuacuuugagggc

SEQ ID NO: 25012 - RNA, 12 nt, Artificial Sequence
  Description of Artificial Sequence: Synthetic oligonucleotide
agggcaucuccu

SEQ ID NO: 25013 - RNA, 10 nt, Artificial Sequence
  Description of Artificial Sequence: Synthetic oligonucleotide
ggagugauau

SEQ ID NO: 25014 - RNA, 11 nt, Artificial Sequence
  Description of Artificial Sequence: Synthetic oligonucleotide
gagugauaugg

SEQ ID NO: 25015 - RNA, 12 nt, Artificial Sequence
  Description of Artificial Sequence: Synthetic oligonucleotide
ugcaguaaagau

SEQ ID NO: 25016 - RNA, 13 nt, Artificial Sequence
  Description of Artificial Sequence: Synthetic oligonucleotide
aguaaagauccua

SEQ ID NO: 25017 - RNA, 12 nt, Artificial Sequence
  Description of Artificial Sequence: Synthetic oligonucleotide
ugacaaaggaca

SEQ ID NO: 25018 - RNA, 13 nt, Artificial Sequence
  Description of Artificial Sequence: Synthetic oligonucleotide
gcaauugugaccc

SEQ ID NO: 25019 - RNA, 12 nt, Artificial Sequence
  Description of Artificial Sequence: Synthetic oligonucleotide
aacaucauccau

SEQ ID NO: 25020 - RNA, 12 nt, Artificial Sequence
  Description of Artificial Sequence: Synthetic oligonucleotide
ugaaauccaaca

SEQ ID NO: 25021 - RNA, 15 nt, Artificial Sequence
  Description of Artificial Sequence: Synthetic oligonucleotide
aacaauauauuucuc

SEQ ID NO: 25022 - RNA, 14 nt, Artificial Sequence
  Description of Artificial Sequence: Synthetic oligonucleotide
aacaguaaagucac

SEQ ID NO: 25023 - RNA, 14 nt, Artificial Sequence
  Description of Artificial Sequence: Synthetic oligonucleotide
ugugaagaaaguaa

SEQ ID NO: 25024 - RNA, 13 nt, Artificial Sequence
  Description of Artificial Sequence: Synthetic oligonucleotide
cuuccgagccauc

SEQ ID NO: 25025 - RNA, 12 nt, Artificial Sequence
  Description of Artificial Sequence: Synthetic oligonucleotide
aauggagguuga

SEQ ID NO: 25026 - RNA, 12 nt, Artificial Sequence
  Description of Artificial Sequence: Synthetic oligonucleotide
ggagguugaaua

SEQ ID NO: 25027 - RNA, 13 nt, Artificial Sequence
  Description of Artificial Sequence: Synthetic oligonucleotide
auuuugaguuuuc

SEQ ID NO: 25028 - RNA, 12 nt, Artificial Sequence
  Description of Artificial Sequence: Synthetic oligonucleotide
uauccuguuugu

SEQ ID NO: 25029 - RNA, 11 nt, Artificial Sequence
  Description of Artificial Sequence: Synthetic oligonucleotide
ccuguuuguuc

SEQ ID NO: 25030 - RNA, 10 nt, Artificial Sequence
  Description of Artificial Sequence: Synthetic oligonucleotide
cucuacagcc

SEQ ID NO: 25031 - RNA, 12 nt, Artificial Sequence
  Description of Artificial Sequence: Synthetic oligonucleotide
ucuuccauagcu

SEQ ID NO: 25032 - RNA, 12 nt, Artificial Sequence
  Description of Artificial Sequence: Synthetic oligonucleotide
auaaucuuccug

SEQ ID NO: 25033 - RNA, 12 nt, Artificial Sequence
  Description of Artificial Sequence: Synthetic oligonucleotide
uaaucuuccugu

SEQ ID NO: 25034 - RNA, 12 nt, Artificial Sequence
  Description of Artificial Sequence: Synthetic oligonucleotide
cuucaugacuug

SEQ ID NO: 25035 - RNA, 12 nt, Artificial Sequence
  Description of Artificial Sequence: Synthetic oligonucleotide
aagagggagaga

SEQ ID NO: 25036 - RNA, 12 nt, Artificial Sequence
  Description of Artificial Sequence: Synthetic oligonucleotide
cgucuccuacca

SEQ ID NO: 25037 - RNA, 12 nt, Artificial Sequence
  Description of Artificial Sequence: Synthetic oligonucleotide
gaucaaucggcc

SEQ ID NO: 25038 - RNA, 12 nt, Artificial Sequence
  Description of Artificial Sequence: Synthetic oligonucleotide
ggacgaacaucc

SEQ ID NO: 25039 - RNA, 11 nt, Artificial Sequence
  Description of Artificial Sequence: Synthetic oligonucleotide
agggucggaac

SEQ ID NO: 25040 - RNA, 10 nt, Artificial Sequence
  Description of Artificial Sequence: Synthetic oligonucleotide
ucggaaccca

SEQ ID NO: 25041 - RNA, 11 nt, Artificial Sequence
  Description of Artificial Sequence: Synthetic oligonucleotide
acccaagcuua

SEQ ID NO: 25042 - RNA, 14 nt, Artificial Sequence
  Description of Artificial Sequence: Synthetic oligonucleotide
gaacuuuaagcaac

SEQ ID NO: 25043 - RNA, 11 nt, Artificial Sequence
  Description of Artificial Sequence: Synthetic oligonucleotide
acuauucagug

SEQ ID NO: 25044 - RNA, 11 nt, Artificial Sequence
  Description of Artificial Sequence: Synthetic oligonucleotide
cuauucagugg

SEQ ID NO: 25045 - RNA, 13 nt, Artificial Sequence
  Description of Artificial Sequence: Synthetic oligonucleotide
aaacacagauaac

SEQ ID NO: 25046 - RNA, 12 nt, Artificial Sequence
  Description of Artificial Sequence: Synthetic oligonucleotide
cuuaagaaaaga

SEQ ID NO: 25047 - RNA, 12 nt, Artificial Sequence
  Description of Artificial Sequence: Synthetic oligonucleotide
cugaaggagugu

SEQ ID NO: 25048 - RNA, 10 nt, Artificial Sequence
  Description of Artificial Sequence: Synthetic oligonucleotide
ucaccgcggg

SEQ ID NO: 25049 - RNA, 14 nt, Artificial Sequence
  Description of Artificial Sequence: Synthetic oligonucleotide
agcagaaauaagcg

SEQ ID NO: 25050 - RNA, 12 nt, Artificial Sequence
  Description of Artificial Sequence: Synthetic oligonucleotide
aagcgugccguu

SEQ ID NO: 25051 - RNA, 12 nt, Artificial Sequence
  Description of Artificial Sequence: Synthetic oligonucleotide
agaaacagucac

SEQ ID NO: 25052 - RNA, 12 nt, Artificial Sequence
  Description of Artificial Sequence: Synthetic oligonucleotide
agaggaagaagg

SEQ ID NO: 25053 - RNA, 14 nt, Artificial Sequence
  Description of Artificial Sequence: Synthetic oligonucleotide
uguauucaaaauau

SEQ ID NO: 25054 - RNA, 13 nt, Artificial Sequence
  Description of Artificial Sequence: Synthetic oligonucleotide
auuuuccucccuu

SEQ ID NO: 25055 - RNA, 13 nt, Artificial Sequence
  Description of Artificial Sequence: Synthetic oligonucleotide
caaagaaagauag

SEQ ID NO: 25056 - RNA, 12 nt, Artificial Sequence
  Description of Artificial Sequence: Synthetic oligonucleotide
aagaaagauaga

SEQ ID NO: 25057 - RNA, 13 nt, Artificial Sequence
  Description of Artificial Sequence: Synthetic oligonucleotide
gaaagcauuuguu

SEQ ID NO: 25058 - RNA, 13 nt, Artificial Sequence
  Description of Artificial Sequence: Synthetic oligonucleotide
ugaguuaaacgaa

SEQ ID NO: 25059 - RNA, 12 nt, Artificial Sequence
  Description of Artificial Sequence: Synthetic oligonucleotide
acugauacagaa

SEQ ID NO: 25060 - RNA, 12 nt, Artificial Sequence
  Description of Artificial Sequence: Synthetic oligonucleotide
auauuauauaua

SEQ ID NO: 25061 - RNA, 12 nt, Artificial Sequence
  Description of Artificial Sequence: Synthetic oligonucleotide
auuauauauaua

SEQ ID NO: 25062 - RNA, 12 nt, Artificial Sequence
  Description of Artificial Sequence: Synthetic oligonucleotide
ucacuggaugua

SEQ ID NO: 25063 - RNA, 12 nt, Artificial Sequence
  Description of Artificial Sequence: Synthetic oligonucleotide
cagggaagagga

SEQ ID NO: 25064 - RNA, 15 nt, Artificial Sequence
  Description of Artificial Sequence: Synthetic oligonucleotide
augaucuuuuuuuug

SEQ ID NO: 25065 - RNA, 11 nt, Artificial Sequence
  Description of Artificial Sequence: Synthetic oligonucleotide
aguucacggcc

SEQ ID NO: 25066 - RNA, 13 nt, Artificial Sequence
  Description of Artificial Sequence: Synthetic oligonucleotide
caccaucacacca

SEQ ID NO: 25067 - RNA, 11 nt, Artificial Sequence
  Description of Artificial Sequence: Synthetic oligonucleotide
ccugcggguuu

SEQ ID NO: 25068 - RNA, 10 nt, Artificial Sequence
  Description of Artificial Sequence: Synthetic oligonucleotide
auccaguuug

SEQ ID NO: 25069 - RNA, 13 nt, Artificial Sequence
  Description of Artificial Sequence: Synthetic oligonucleotide
guuaaggacuucu

SEQ ID NO: 25070 - RNA, 13 nt, Artificial Sequence
  Description of Artificial Sequence: Synthetic oligonucleotide
cagugggacagag

SEQ ID NO: 25071 - RNA, 14 nt, Artificial Sequence
  Description of Artificial Sequence: Synthetic oligonucleotide
aauuuguuauugug

SEQ ID NO: 25072 - RNA, 13 nt, Artificial Sequence
  Description of Artificial Sequence: Synthetic oligonucleotide
uucaaaugcauuu

SEQ ID NO: 25073 - RNA, 10 nt, Artificial Sequence
  Description of Artificial Sequence: Synthetic oligonucleotide
caggaaagcc

SEQ ID NO: 25074 - RNA, 11 nt, Artificial Sequence
  Description of Artificial Sequence: Synthetic oligonucleotide
aggaaagcccu

SEQ ID NO: 25075 - RNA, 12 nt, Artificial Sequence
  Description of Artificial Sequence: Synthetic oligonucleotide
cccagcauggcc

SEQ ID NO: 25076 - RNA, 11 nt, Artificial Sequence
  Description of Artificial Sequence: Synthetic oligonucleotide
cuucucccuga

SEQ ID NO: 25077 - RNA, 12 nt, Artificial Sequence
  Description of Artificial Sequence: Synthetic oligonucleotide
gaagaagcccuu

SEQ ID NO: 25078 - RNA, 12 nt, Artificial Sequence
  Description of Artificial Sequence: Synthetic oligonucleotide
agaagcccuuca

SEQ ID NO: 25079 - RNA, 11 nt, Artificial Sequence
  Description of Artificial Sequence: Synthetic oligonucleotide
gcccuucagcg

SEQ ID NO: 25080 - RNA, 11 nt, Artificial Sequence
  Description of Artificial Sequence: Synthetic oligonucleotide
ccuucagcggc

SEQ ID NO: 25081 - RNA, 12 nt, Artificial Sequence
  Description of Artificial Sequence: Synthetic oligonucleotide
ucagcggccagu

SEQ ID NO: 25082 - RNA, 12 nt, Artificial Sequence
  Description of Artificial Sequence: Synthetic oligonucleotide
ugaaaagcuccg

SEQ ID NO: 25083 - RNA, 11 nt, Artificial Sequence
  Description of Artificial Sequence: Synthetic oligonucleotide
aaaagcuccgg

SEQ ID NO: 25084 - RNA, 13 nt, Artificial Sequence
  Description of Artificial Sequence: Synthetic oligonucleotide
agucaacagucug

SEQ ID NO: 25085 - RNA, 13 nt, Artificial Sequence
  Description of Artificial Sequence: Synthetic oligonucleotide
cagaguucaaaag

SEQ ID NO: 25086 - RNA, 13 nt, Artificial Sequence
  Description of Artificial Sequence: Synthetic oligonucleotide
agaguucaaaagc

SEQ ID NO: 25087 - RNA, 12 nt, Artificial Sequence
  Description of Artificial Sequence: Synthetic oligonucleotide
uucaaaagcccu

SEQ ID NO: 25088 - RNA, 12 nt, Artificial Sequence
  Description of Artificial Sequence: Synthetic oligonucleotide
ucaaaagcccuu

SEQ ID NO: 25089 - RNA, 12 nt, Artificial Sequence
  Description of Artificial Sequence: Synthetic oligonucleotide
aaaagcccuuca

SEQ ID NO: 25090 - RNA, 12 nt, Artificial Sequence
  Description of Artificial Sequence: Synthetic oligonucleotide
aaagcccuucag

SEQ ID NO: 25091 - RNA, 13 nt, Artificial Sequence
  Description of Artificial Sequence: Synthetic oligonucleotide
gugaagccgcucg

SEQ ID NO: 25092 - RNA, 12 nt, Artificial Sequence
  Description of Artificial Sequence: Synthetic oligonucleotide
cacgccagucaa

SEQ ID NO: 25093 - RNA, 13 nt, Artificial Sequence
  Description of Artificial Sequence: Synthetic oligonucleotide
uucuuggugcgug

SEQ ID NO: 25094 - RNA, 14 nt, Artificial Sequence
  Description of Artificial Sequence: Synthetic oligonucleotide
auuggauucaucag

SEQ ID NO: 25095 - RNA, 13 nt, Artificial Sequence
  Description of Artificial Sequence: Synthetic oligonucleotide
uggaauaccuaag

SEQ ID NO: 25096 - RNA, 12 nt, Artificial Sequence
  Description of Artificial Sequence: Synthetic oligonucleotide
auuugaggcuca

SEQ ID NO: 25097 - RNA, 11 nt, Artificial Sequence
  Description of Artificial Sequence: Synthetic oligonucleotide
ucuacaauugg

SEQ ID NO: 25098 - RNA, 12 nt, Artificial Sequence
  Description of Artificial Sequence: Synthetic oligonucleotide
uaguuaggagcc

SEQ ID NO: 25099 - RNA, 13 nt, Artificial Sequence
  Description of Artificial Sequence: Synthetic oligonucleotide
agucaauauccac

SEQ ID NO: 25100 - RNA, 13 nt, Artificial Sequence
  Description of Artificial Sequence: Synthetic oligonucleotide
auguucagucaca

SEQ ID NO: 25101 - RNA, 12 nt, Artificial Sequence
  Description of Artificial Sequence: Synthetic oligonucleotide
acacacacauac

SEQ ID NO: 25102 - RNA, 12 nt, Artificial Sequence
  Description of Artificial Sequence: Synthetic oligonucleotide
uuccuuuugcuu

SEQ ID NO: 25103 - RNA, 16 nt, Artificial Sequence
  Description of Artificial Sequence: Synthetic oligonucleotide
uuuuaaaguaauuuuu

SEQ ID NO: 25104 - RNA, 13 nt, Artificial Sequence
  Description of Artificial Sequence: Synthetic oligonucleotide
caacagucaaugg

SEQ ID NO: 25105 - RNA, 13 nt, Artificial Sequence
  Description of Artificial Sequence: Synthetic oligonucleotide
ucgacaaaccaau

SEQ ID NO: 25106 - RNA, 12 nt, Artificial Sequence
  Description of Artificial Sequence: Synthetic oligonucleotide
acugcuaccacu

SEQ ID NO: 25107 - RNA, 13 nt, Artificial Sequence
  Description of Artificial Sequence: Synthetic oligonucleotide
gcaagcggucuua

SEQ ID NO: 25108 - RNA, 13 nt, Artificial Sequence
  Description of Artificial Sequence: Synthetic oligonucleotide
ggucuuaccggcu

SEQ ID NO: 25109 - RNA, 11 nt, Artificial Sequence
  Description of Artificial Sequence: Synthetic oligonucleotide
gauggguuacc

SEQ ID NO: 25110 - RNA, 11 nt, Artificial Sequence
  Description of Artificial Sequence: Synthetic oligonucleotide
guuaccugcga

SEQ ID NO: 25111 - RNA, 12 nt, Artificial Sequence
  Description of Artificial Sequence: Synthetic oligonucleotide
aaucuugcugag

SEQ ID NO: 25112 - RNA, 13 nt, Artificial Sequence
  Description of Artificial Sequence: Synthetic oligonucleotide
agcauaaaacagu

SEQ ID NO: 25113 - RNA, 12 nt, Artificial Sequence
  Description of Artificial Sequence: Synthetic oligonucleotide
guccuuuauccu

SEQ ID NO: 25114 - RNA, 12 nt, Artificial Sequence
  Description of Artificial Sequence: Synthetic oligonucleotide
caacgcaaguug

SEQ ID NO: 25115 - RNA, 13 nt, Artificial Sequence
  Description of Artificial Sequence: Synthetic oligonucleotide
aaacugaaaccau

SEQ ID NO: 25116 - RNA, 14 nt, Artificial Sequence
  Description of Artificial Sequence: Synthetic oligonucleotide
acuuuguuaaauau

SEQ ID NO: 25117 - RNA, 14 nt, Artificial Sequence
  Description of Artificial Sequence: Synthetic oligonucleotide
guauauuaaaaguu

SEQ ID NO: 25118 - RNA, 13 nt, Artificial Sequence
  Description of Artificial Sequence: Synthetic oligonucleotide
guuuugacuuaac

SEQ ID NO: 25119 - RNA, 13 nt, Artificial Sequence
  Description of Artificial Sequence: Synthetic oligonucleotide
gcaaacucagcac

SEQ ID NO: 25120 - RNA, 11 nt, Artificial Sequence
  Description of Artificial Sequence: Synthetic oligonucleotide
ugcugaccuca

SEQ ID NO: 25121 - RNA, 14 nt, Artificial Sequence
  Description of Artificial Sequence: Synthetic oligonucleotide
uuuauucagaucgc

SEQ ID NO: 25122 - RNA, 13 nt, Artificial Sequence
  Description of Artificial Sequence: Synthetic oligonucleotide
aggguucugggau

SEQ ID NO: 25123 - RNA, 15 nt, Artificial Sequence
  Description of Artificial Sequence: Synthetic oligonucleotide
auauuggaaauuaug

SEQ ID NO: 25124 - RNA, 13 nt, Artificial Sequence
  Description of Artificial Sequence: Synthetic oligonucleotide
auggaagcacuag

SEQ ID NO: 25125 - RNA, 13 nt, Artificial Sequence
  Description of Artificial Sequence: Synthetic oligonucleotide
guuuuuaugugga

SEQ ID NO: 25126 - RNA, 12 nt, Artificial Sequence
  Description of Artificial Sequence: Synthetic oligonucleotide
ggaauugguaga

SEQ ID NO: 25127 - RNA, 13 nt, Artificial Sequence
  Description of Artificial Sequence: Synthetic oligonucleotide
uuagacuuggaga

SEQ ID NO: 25128 - RNA, 13 nt, Artificial Sequence
  Description of Artificial Sequence: Synthetic oligonucleotide
uuacaguauucca

SEQ ID NO: 25129 - RNA, 15 nt, Artificial Sequence
  Description of Artificial Sequence: Synthetic oligonucleotide
ccacugaugaauuaa

SEQ ID NO: 25130 - RNA, 12 nt, Artificial Sequence
  Description of Artificial Sequence: Synthetic oligonucleotide
ccacaucaucac

SEQ ID NO: 25131 - RNA, 13 nt, Artificial Sequence
  Description of Artificial Sequence: Synthetic oligonucleotide
cucaccaaacaga

SEQ ID NO: 25132 - RNA, 12 nt, Artificial Sequence
  Description of Artificial Sequence: Synthetic oligonucleotide
ggaacaugaugg

SEQ ID NO: 25133 - RNA, 12 nt, Artificial Sequence
  Description of Artificial Sequence: Synthetic oligonucleotide
cauguagacugc

SEQ ID NO: 25134 - RNA, 13 nt, Artificial Sequence
  Description of Artificial Sequence: Synthetic oligonucleotide
ggaucuauuuaug

SEQ ID NO: 25135 - RNA, 12 nt, Artificial Sequence
  Description of Artificial Sequence: Synthetic oligonucleotide
gcacuauuauca

SEQ ID NO: 25136 - RNA, 11 nt, Artificial Sequence
  Description of Artificial Sequence: Synthetic oligonucleotide
aucaguucugc

SEQ ID NO: 25137 - RNA, 13 nt, Artificial Sequence
  Description of Artificial Sequence: Synthetic oligonucleotide
agauuaaaccuac

SEQ ID NO: 25138 - RNA, 13 nt, Artificial Sequence
  Description of Artificial Sequence: Synthetic oligonucleotide
auaaaauccuucu

SEQ ID NO: 25139 - RNA, 12 nt, Artificial Sequence
  Description of Artificial Sequence: Synthetic oligonucleotide
aaugcuguagac

SEQ ID NO: 25140 - RNA, 13 nt, Artificial Sequence
  Description of Artificial Sequence: Synthetic oligonucleotide
uugauaggaauag

SEQ ID NO: 25141 - RNA, 11 nt, Artificial Sequence
  Description of Artificial Sequence: Synthetic oligonucleotide
aauggcccuga

SEQ ID NO: 25142 - RNA, 11 nt, Artificial Sequence
  Description of Artificial Sequence: Synthetic oligonucleotide
uuccucaagca

SEQ ID NO: 25143 - RNA, 10 nt, Artificial Sequence
  Description of Artificial Sequence: Synthetic oligonucleotide
guucagccca

SEQ ID NO: 25144 - RNA, 11 nt, Artificial Sequence
  Description of Artificial Sequence: Synthetic oligonucleotide
gcugcugaacc

SEQ ID NO: 25145 - RNA, 12 nt, Artificial Sequence
  Description of Artificial Sequence: Synthetic oligonucleotide
aaguucucuuca

SEQ ID NO: 25146 - RNA, 11 nt, Artificial Sequence
  Description of Artificial Sequence: Synthetic oligonucleotide
ccagccuagag

SEQ ID NO: 25147 - RNA, 13 nt, Artificial Sequence
  Description of Artificial Sequence: Synthetic oligonucleotide
cucugugaagugu

SEQ ID NO: 25148 - RNA, 14 nt, Artificial Sequence
  Description of Artificial Sequence: Synthetic oligonucleotide
ugagaaaauuucaa

SEQ ID NO: 25149 - RNA, 11 nt, Artificial Sequence
  Description of Artificial Sequence: Synthetic oligonucleotide
aauccuccuga

SEQ ID NO: 25150 - RNA, 12 nt, Artificial Sequence
  Description of Artificial Sequence: Synthetic oligonucleotide
gugacaucauau

SEQ ID NO: 25151 - RNA, 13 nt, Artificial Sequence
  Description of Artificial Sequence: Synthetic oligonucleotide
aaucuucaucaua

SEQ ID NO: 25152 - RNA, 13 nt, Artificial Sequence
  Description of Artificial Sequence: Synthetic oligonucleotide
gacuagcuauuaa

SEQ ID NO: 25153 - RNA, 14 nt, Artificial Sequence
  Description of Artificial Sequence: Synthetic oligonucleotide
ucucuacuaaaaau

SEQ ID NO: 25154 - RNA, 12 nt, Artificial Sequence
  Description of Artificial Sequence: Synthetic oligonucleotide
ucuaucucgccu

SEQ ID NO: 25155 - RNA, 13 nt, Artificial Sequence
  Description of Artificial Sequence: Synthetic oligonucleotide
cuucgguccaguu

SEQ ID NO: 25156 - RNA, 11 nt, Artificial Sequence
  Description of Artificial Sequence: Synthetic oligonucleotide
gauguagccgc

SEQ ID NO: 25157 - RNA, 12 nt, Artificial Sequence
  Description of Artificial Sequence: Synthetic oligonucleotide
ugaggagacuug

SEQ ID NO: 25158 - RNA, 12 nt, Artificial Sequence
  Description of Artificial Sequence: Synthetic oligonucleotide
gaguagugagga

SEQ ID NO: 25159 - RNA, 14 nt, Artificial Sequence
  Description of Artificial Sequence: Synthetic oligonucleotide
cagaugaguacaaa

SEQ ID NO: 25160 - RNA, 13 nt, Artificial Sequence
  Description of Artificial Sequence: Synthetic oligonucleotide
guuguuaaugggc

SEQ ID NO: 25161 - RNA, 13 nt, Artificial Sequence
  Description of Artificial Sequence: Synthetic oligonucleotide
uuuuuaauuuauu

SEQ ID NO: 25162 - RNA, 12 nt, Artificial Sequence
  Description of Artificial Sequence: Synthetic oligonucleotide
uauuuaaauaug

SEQ ID NO: 25163 - RNA, 13 nt, Artificial Sequence
  Description of Artificial Sequence: Synthetic oligonucleotide
uauccuuuguuuc

SEQ ID NO: 25164 - RNA, 14 nt, Artificial Sequence
  Description of Artificial Sequence: Synthetic oligonucleotide
cgucuaaguguuug

SEQ ID NO: 25165 - RNA, 12 nt, Artificial Sequence
  Description of Artificial Sequence: Synthetic oligonucleotide
accugugacaaa

SEQ ID NO: 25166 - RNA, 13 nt, Artificial Sequence
  Description of Artificial Sequence: Synthetic oligonucleotide
ccaggcugaauua

SEQ ID NO: 25167 - RNA, 14 nt, Artificial Sequence
  Description of Artificial Sequence: Synthetic oligonucleotide
gucauucuuacaau

SEQ ID NO: 25168 - RNA, 15 nt, Artificial Sequence
  Description of Artificial Sequence: Synthetic oligonucleotide
ucauucuuacaauug

SEQ ID NO: 25169 - RNA, 12 nt, Artificial Sequence
  Description of Artificial Sequence: Synthetic oligonucleotide
cagagaguguac

SEQ ID NO: 25170 - RNA, 12 nt, Artificial Sequence
  Description of Artificial Sequence: Synthetic oligonucleotide
agaacucagcag

SEQ ID NO: 25171 - RNA, 13 nt, Artificial Sequence
  Description of Artificial Sequence: Synthetic oligonucleotide
uuuauuuucagua

SEQ ID NO: 25172 - RNA, 12 nt, Artificial Sequence
  Description of Artificial Sequence: Synthetic oligonucleotide
ucuuaaauggaa

SEQ ID NO: 25173 - RNA, 13 nt, Artificial Sequence
  Description of Artificial Sequence: Synthetic oligonucleotide
ugccuaaaauugu

SEQ ID NO: 25174 - RNA, 12 nt, Artificial Sequence
  Description of Artificial Sequence: Synthetic oligonucleotide
agacugugagcu

SEQ ID NO: 25175 - RNA, 14 nt, Artificial Sequence
  Description of Artificial Sequence: Synthetic oligonucleotide
ugcuuuuuauuaau

SEQ ID NO: 25176 - RNA, 13 nt, Artificial Sequence
  Description of Artificial Sequence: Synthetic oligonucleotide
cucuucuuacauu

SEQ ID NO: 25177 - RNA, 15 nt, Artificial Sequence
  Description of Artificial Sequence: Synthetic oligonucleotide
cauuuguaaaaaugu

SEQ ID NO: 25178 - RNA, 15 nt, Artificial Sequence
  Description of Artificial Sequence: Synthetic oligonucleotide
aucuuaauucauauu

SEQ ID NO: 25179 - RNA, 13 nt, Artificial Sequence
  Description of Artificial Sequence: Synthetic oligonucleotide
gaacuaaucauga

SEQ ID NO: 25180 - RNA, 12 nt, Artificial Sequence
  Description of Artificial Sequence: Synthetic oligonucleotide
ucugcucuuggg

SEQ ID NO: 25181 - RNA, 13 nt, Artificial Sequence
  Description of Artificial Sequence: Synthetic oligonucleotide
caguagcuuugag

SEQ ID NO: 25182 - RNA, 14 nt, Artificial Sequence
  Description of Artificial Sequence: Synthetic oligonucleotide
cacguaauauuuca

SEQ ID NO: 25183 - RNA, 13 nt, Artificial Sequence
  Description of Artificial Sequence: Synthetic oligonucleotide
uauucucuucacu

SEQ ID NO: 25184 - RNA, 14 nt, Artificial Sequence
  Description of Artificial Sequence: Synthetic oligonucleotide
cuaaugcuaagaaa

SEQ ID NO: 25185 - RNA, 12 nt, Artificial Sequence
  Description of Artificial Sequence: Synthetic oligonucleotide
gcugaaaaucaa

SEQ ID NO: 25186 - RNA, 14 nt, Artificial Sequence
  Description of Artificial Sequence: Synthetic oligonucleotide
aauaugauuacuuu

SEQ ID NO: 25187 - RNA, 14 nt, Artificial Sequence
  Description of Artificial Sequence: Synthetic oligonucleotide
cauuuuguucuaca

SEQ ID NO: 25188 - RNA, 12 nt, Artificial Sequence
  Description of Artificial Sequence: Synthetic oligonucleotide
cccgggacucuc

SEQ ID NO: 25189 - RNA, 14 nt, Artificial Sequence
  Description of Artificial Sequence: Synthetic oligonucleotide
ccuuuaaaguaaag

SEQ ID NO: 25190 - RNA, 13 nt, Artificial Sequence
  Description of Artificial Sequence: Synthetic oligonucleotide
ucuggaagccugg

SEQ ID NO: 25191 - RNA, 14 nt, Artificial Sequence
  Description of Artificial Sequence: Synthetic oligonucleotide
aaaacaaaagagag

SEQ ID NO: 25192 - RNA, 13 nt, Artificial Sequence
  Description of Artificial Sequence: Synthetic oligonucleotide
aucaguuaugccg

SEQ ID NO: 25193 - RNA, 13 nt, Artificial Sequence
  Description of Artificial Sequence: Synthetic oligonucleotide
uaaaagaagucca

SEQ ID NO: 25194 - RNA, 11 nt, Artificial Sequence
  Description of Artificial Sequence: Synthetic oligonucleotide
aggugagguua

SEQ ID NO: 25195 - RNA, 11 nt, Artificial Sequence
  Description of Artificial Sequence: Synthetic oligonucleotide
gggaagaggac

SEQ ID NO: 25196 - RNA, 13 nt, Artificial Sequence
  Description of Artificial Sequence: Synthetic oligonucleotide
aagcaaguauugu

SEQ ID NO: 25197 - RNA, 12 nt, Artificial Sequence
  Description of Artificial Sequence: Synthetic oligonucleotide
auuguagcacuc

SEQ ID NO: 25198 - RNA, 14 nt, Artificial Sequence
  Description of Artificial Sequence: Synthetic oligonucleotide
acaaaaccacaaau

SEQ ID NO: 25199 - RNA, 12 nt, Artificial Sequence
  Description of Artificial Sequence: Synthetic oligonucleotide
uaagcccauaca

SEQ ID NO: 25200 - RNA, 11 nt, Artificial Sequence
  Description of Artificial Sequence: Synthetic oligonucleotide
agcccauacag

SEQ ID NO: 25201 - RNA, 12 nt, Artificial Sequence
  Description of Artificial Sequence: Synthetic oligonucleotide
cagaaaccuucc

SEQ ID NO: 25202 - RNA, 10 nt, Artificial Sequence
  Description of Artificial Sequence: Synthetic oligonucleotide
guauaccuac

SEQ ID NO: 25203 - RNA, 13 nt, Artificial Sequence
  Description of Artificial Sequence: Synthetic oligonucleotide
gccaguuuucgga

SEQ ID NO: 25204 - RNA, 9 nt, Artificial Sequence
  Description of Artificial Sequence: Synthetic oligonucleotide
ggaacaggg

SEQ ID NO: 25205 - RNA, 13 nt, Artificial Sequence
  Description of Artificial Sequence: Synthetic oligonucleotide
uuaacuuuccagu

SEQ ID NO: 25206 - RNA, 14 nt, Artificial Sequence
  Description of Artificial Sequence: Synthetic oligonucleotide
aaaguuugguuuug

SEQ ID NO: 25207 - RNA, 12 nt, Artificial Sequence
  Description of Artificial Sequence: Synthetic oligonucleotide
cuucccacugua

SEQ ID NO: 25208 - RNA, 13 nt, Artificial Sequence
  Description of Artificial Sequence: Synthetic oligonucleotide
ugauaccauauga

SEQ ID NO: 25209 - RNA, 11 nt, Artificial Sequence
  Description of Artificial Sequence: Synthetic oligonucleotide
aacaugggcug

SEQ ID NO: 25210 - RNA, 13 nt, Artificial Sequence
  Description of Artificial Sequence: Synthetic oligonucleotide
caacuuuuucaua

SEQ ID NO: 25211 - RNA, 12 nt, Artificial Sequence
  Description of Artificial Sequence: Synthetic oligonucleotide
caugaggccgga

SEQ ID NO: 25212 - RNA, 11 nt, Artificial Sequence
  Description of Artificial Sequence: Synthetic oligonucleotide
acugcauuugu

SEQ ID NO: 25213 - RNA, 13 nt, Artificial Sequence
  Description of Artificial Sequence: Synthetic oligonucleotide
aauguuuacuacc

SEQ ID NO: 25214 - RNA, 15 nt, Artificial Sequence
  Description of Artificial Sequence: Synthetic oligonucleotide
aauuuuuugaugaaa

SEQ ID NO: 25215 - RNA, 14 nt, Artificial Sequence
  Description of Artificial Sequence: Synthetic oligonucleotide
cagugugugaauuu

SEQ ID NO: 25216 - RNA, 13 nt, Artificial Sequence
  Description of Artificial Sequence: Synthetic oligonucleotide
gagcaauguaugu

SEQ ID NO: 25217 - RNA, 14 nt, Artificial Sequence
  Description of Artificial Sequence: Synthetic oligonucleotide
aaagcacauauaua

SEQ ID NO: 25218 - RNA, 14 nt, Artificial Sequence
  Description of Artificial Sequence: Synthetic oligonucleotide
guaauaguuucucc

SEQ ID NO: 25219 - RNA, 13 nt, Artificial Sequence
  Description of Artificial Sequence: Synthetic oligonucleotide
aguuucuccaaau

SEQ ID NO: 25220 - RNA, 13 nt, Artificial Sequence
  Description of Artificial Sequence: Synthetic oligonucleotide
uacuuccuagaaa

SEQ ID NO: 25221 - RNA, 13 nt, Artificial Sequence
  Description of Artificial Sequence: Synthetic oligonucleotide
uacaccauauaug

SEQ ID NO: 25222 - RNA, 14 nt, Artificial Sequence
  Description of Artificial Sequence: Synthetic oligonucleotide
auauaugaauggag

SEQ ID NO: 25223 - RNA, 13 nt, Artificial Sequence
  Description of Artificial Sequence: Synthetic oligonucleotide
acgagaagaagau

SEQ ID NO: 25224 - RNA, 13 nt, Artificial Sequence
  Description of Artificial Sequence: Synthetic oligonucleotide
ucauuuacaggga

SEQ ID NO: 25225 - RNA, 13 nt, Artificial Sequence
  Description of Artificial Sequence: Synthetic oligonucleotide
cauuuacagggac

SEQ ID NO: 25226 - RNA, 10 nt, Artificial Sequence
  Description of Artificial Sequence: Synthetic oligonucleotide
agggaccuga

SEQ ID NO: 25227 - RNA, 14 nt, Artificial Sequence
  Description of Artificial Sequence: Synthetic oligonucleotide
uguuugacugcauc

SEQ ID NO: 25228 - RNA, 13 nt, Artificial Sequence
  Description of Artificial Sequence: Synthetic oligonucleotide
uuugacugcaucg

SEQ ID NO: 25229 - RNA, 12 nt, Artificial Sequence
  Description of Artificial Sequence: Synthetic oligonucleotide
gaguucacaggg

SEQ ID NO: 25230 - RNA, 13 nt, Artificial Sequence
  Description of Artificial Sequence: Synthetic oligonucleotide
ggcaccucugucc

SEQ ID NO: 25231 - RNA, 15 nt, Artificial Sequence
  Description of Artificial Sequence: Synthetic oligonucleotide
gguuugucuuuuuaa

SEQ ID NO: 25232 - RNA, 14 nt, Artificial Sequence
  Description of Artificial Sequence: Synthetic oligonucleotide
uuugucuuuuuaag

SEQ ID NO: 25233 - RNA, 13 nt, Artificial Sequence
  Description of Artificial Sequence: Synthetic oligonucleotide
ccuaaagguuguc

SEQ ID NO: 25234 - RNA, 12 nt, Artificial Sequence
  Description of Artificial Sequence: Synthetic oligonucleotide
aagguugucgac

SEQ ID NO: 25235 - RNA, 13 nt, Artificial Sequence
  Description of Artificial Sequence: Synthetic oligonucleotide
accuggcaauugu

SEQ ID NO: 25236 - RNA, 12 nt, Artificial Sequence
  Description of Artificial Sequence: Synthetic oligonucleotide
aguggugcgagg

SEQ ID NO: 25237 - RNA, 13 nt, Artificial Sequence
  Description of Artificial Sequence: Synthetic oligonucleotide
agagacaugaaau

SEQ ID NO: 25238 - RNA, 13 nt, Artificial Sequence
  Description of Artificial Sequence: Synthetic oligonucleotide
auauauuucucca

SEQ ID NO: 25239 - RNA, 10 nt, Artificial Sequence
  Description of Artificial Sequence: Synthetic oligonucleotide
caugaaggcu

SEQ ID NO: 25240 - RNA, 11 nt, Artificial Sequence
  Description of Artificial Sequence: Synthetic oligonucleotide
gcuggaguggu

SEQ ID NO: 25241 - RNA, 11 nt, Artificial Sequence
  Description of Artificial Sequence: Synthetic oligonucleotide
aggaagagagg

SEQ ID NO: 25242 - RNA, 12 nt, Artificial Sequence
  Description of Artificial Sequence: Synthetic oligonucleotide
cuugcaucgggc

SEQ ID NO: 25243 - RNA, 13 nt, Artificial Sequence
  Description of Artificial Sequence: Synthetic oligonucleotide
auauccuacugug

SEQ ID NO: 25244 - RNA, 13 nt, Artificial Sequence
  Description of Artificial Sequence: Synthetic oligonucleotide
uccuacuguguaa

SEQ ID NO: 25245 - RNA, 12 nt, Artificial Sequence
  Description of Artificial Sequence: Synthetic oligonucleotide
ccuuguagugua

SEQ ID NO: 25246 - RNA, 13 nt, Artificial Sequence
  Description of Artificial Sequence: Synthetic oligonucleotide
ucuuuguugauug

SEQ ID NO: 25247 - RNA, 14 nt, Artificial Sequence
  Description of Artificial Sequence: Synthetic oligonucleotide
uuuguugauugaaa

SEQ ID NO: 25248 - RNA, 15 nt, Artificial Sequence
  Description of Artificial Sequence: Synthetic oligonucleotide
uucuuuuucuuccau

SEQ ID NO: 25249 - RNA, 13 nt, Artificial Sequence
  Description of Artificial Sequence: Synthetic oligonucleotide
aaucuuccuucua

SEQ ID NO: 25250 - RNA, 13 nt, Artificial Sequence
  Description of Artificial Sequence: Synthetic oligonucleotide
uugaaugcuucau

SEQ ID NO: 25251 - RNA, 13 nt, Artificial Sequence
  Description of Artificial Sequence: Synthetic oligonucleotide
ugaaugcuucaug

SEQ ID NO: 25252 - RNA, 13 nt, Artificial Sequence
  Description of Artificial Sequence: Synthetic oligonucleotide
aauucuacuuuga

SEQ ID NO: 25253 - RNA, 13 nt, Artificial Sequence
  Description of Artificial Sequence: Synthetic oligonucleotide
agcaacuacagac

SEQ ID NO: 25254 - RNA, 13 nt, Artificial Sequence
  Description of Artificial Sequence: Synthetic oligonucleotide
gaccaaggucaac

SEQ ID NO: 25255 - RNA, 13 nt, Artificial Sequence
  Description of Artificial Sequence: Synthetic oligonucleotide
cgacuaucucgac

SEQ ID NO: 25256 - RNA, 13 nt, Artificial Sequence
  Description of Artificial Sequence: Synthetic oligonucleotide
aaccuucccaaac

SEQ ID NO: 25257 - RNA, 14 nt, Artificial Sequence
  Description of Artificial Sequence: Synthetic oligonucleotide
ccaagcuuagaacu

SEQ ID NO: 25258 - RNA, 15 nt, Artificial Sequence
  Description of Artificial Sequence: Synthetic oligonucleotide
agcuuagaacuuuaa

SEQ ID NO: 25259 - RNA, 11 nt, Artificial Sequence
  Description of Artificial Sequence: Synthetic oligonucleotide
aagaccaccac

SEQ ID NO: 25260 - RNA, 14 nt, Artificial Sequence
  Description of Artificial Sequence: Synthetic oligonucleotide
gcgagaaauaaagu

SEQ ID NO: 25261 - RNA, 14 nt, Artificial Sequence
  Description of Artificial Sequence: Synthetic oligonucleotide
cgagaaauaaaguu

SEQ ID NO: 25262 - RNA, 12 nt, Artificial Sequence
  Description of Artificial Sequence: Synthetic oligonucleotide
aggaaaugaucc

SEQ ID NO: 25263 - RNA, 13 nt, Artificial Sequence
  Description of Artificial Sequence: Synthetic oligonucleotide
gaagaaaugaaac

SEQ ID NO: 25264 - RNA, 13 nt, Artificial Sequence
  Description of Artificial Sequence: Synthetic oligonucleotide
guuuccauccucc

SEQ ID NO: 25265 - RNA, 15 nt, Artificial Sequence
  Description of Artificial Sequence: Synthetic oligonucleotide
acugaaaaucuuuga

SEQ ID NO: 25266 - RNA, 11 nt, Artificial Sequence
  Description of Artificial Sequence: Synthetic oligonucleotide
ugccguucagg

SEQ ID NO: 25267 - RNA, 13 nt, Artificial Sequence
  Description of Artificial Sequence: Synthetic oligonucleotide
caggguccagaag

SEQ ID NO: 25268 - RNA, 13 nt, Artificial Sequence
  Description of Artificial Sequence: Synthetic oligonucleotide
ucaagacugcuug

SEQ ID NO: 25269 - RNA, 13 nt, Artificial Sequence
  Description of Artificial Sequence: Synthetic oligonucleotide
uccaugucuuugg

SEQ ID NO: 25270 - RNA, 11 nt, Artificial Sequence
  Description of Artificial Sequence: Synthetic oligonucleotide
gccugaaacac

SEQ ID NO: 25271 - RNA, 12 nt, Artificial Sequence
  Description of Artificial Sequence: Synthetic oligonucleotide
ucucuguaccuc

SEQ ID NO: 25272 - RNA, 12 nt, Artificial Sequence
  Description of Artificial Sequence: Synthetic oligonucleotide
agcaagacaaga

SEQ ID NO: 25273 - RNA, 13 nt, Artificial Sequence
  Description of Artificial Sequence: Synthetic oligonucleotide
gcaagacaagaaa

SEQ ID NO: 25274 - RNA, 12 nt, Artificial Sequence
  Description of Artificial Sequence: Synthetic oligonucleotide
uguacaagaucc

SEQ ID NO: 25275 - RNA, 12 nt, Artificial Sequence
  Description of Artificial Sequence: Synthetic oligonucleotide
cguacuugcaga

SEQ ID NO: 25276 - RNA, 13 nt, Artificial Sequence
  Description of Artificial Sequence: Synthetic oligonucleotide
cgaucgauacaga

SEQ ID NO: 25277 - RNA, 13 nt, Artificial Sequence
  Description of Artificial Sequence: Synthetic oligonucleotide
uauaaaaauaaau

SEQ ID NO: 25278 - RNA, 13 nt, Artificial Sequence
  Description of Artificial Sequence: Synthetic oligonucleotide
uaaaaauaaauau

SEQ ID NO: 25279 - RNA, 13 nt, Artificial Sequence
  Description of Artificial Sequence: Synthetic oligonucleotide
uuugacugcugug

SEQ ID NO: 25280 - RNA, 13 nt, Artificial Sequence
  Description of Artificial Sequence: Synthetic oligonucleotide
ggagaugagagac

SEQ ID NO: 25281 - RNA, 10 nt, Artificial Sequence
  Description of Artificial Sequence: Synthetic oligonucleotide
ucccacuugg

SEQ ID NO: 25282 - RNA, 10 nt, Artificial Sequence
  Description of Artificial Sequence: Synthetic oligonucleotide
guucacggcc

SEQ ID NO: 25283 - RNA, 12 nt, Artificial Sequence
  Description of Artificial Sequence: Synthetic oligonucleotide
accaucacacca

SEQ ID NO: 25284 - RNA, 10 nt, Artificial Sequence
  Description of Artificial Sequence: Synthetic oligonucleotide
cugcggguuu

SEQ ID NO: 25285 - RNA, 9 nt, Artificial Sequence
  Description of Artificial Sequence: Synthetic oligonucleotide
uccaguuug

SEQ ID NO: 25286 - RNA, 12 nt, Artificial Sequence
  Description of Artificial Sequence: Synthetic oligonucleotide
uuaaggacuucu

SEQ ID NO: 25287 - RNA, 12 nt, Artificial Sequence
  Description of Artificial Sequence: Synthetic oligonucleotide
agugggacagag

SEQ ID NO: 25288 - RNA, 13 nt, Artificial Sequence
  Description of Artificial Sequence: Synthetic oligonucleotide
auuuguuauugug

SEQ ID NO: 25289 - RNA, 12 nt, Artificial Sequence
  Description of Artificial Sequence: Synthetic oligonucleotide
ucaaaugcauuu

SEQ ID NO: 25290 - RNA, 9 nt, Artificial Sequence
  Description of Artificial Sequence: Synthetic oligonucleotide
aggaaagcc

SEQ ID NO: 25291 - RNA, 10 nt, Artificial Sequence
  Description of Artificial Sequence: Synthetic oligonucleotide
ggaaagcccu

SEQ ID NO: 25292 - RNA, 11 nt, Artificial Sequence
  Description of Artificial Sequence: Synthetic oligonucleotide
ccagcauggcc

SEQ ID NO: 25293 - RNA, 10 nt, Artificial Sequence
  Description of Artificial Sequence: Synthetic oligonucleotide
uucucccuga

SEQ ID NO: 25294 - RNA, 11 nt, Artificial Sequence
  Description of Artificial Sequence: Synthetic oligonucleotide
aagaagcccuu

SEQ ID NO: 25295 - RNA, 11 nt, Artificial Sequence
  Description of Artificial Sequence: Synthetic oligonucleotide
gaagcccuuca

SEQ ID NO: 25296 - RNA, 10 nt, Artificial Sequence
  Description of Artificial Sequence: Synthetic oligonucleotide
cccuucagcg

SEQ ID NO: 25297 - RNA, 10 nt, Artificial Sequence
  Description of Artificial Sequence: Synthetic oligonucleotide
cuucagcggc

SEQ ID NO: 25298 - RNA, 11 nt, Artificial Sequence
  Description of Artificial Sequence: Synthetic oligonucleotide
cagcggccagu

SEQ ID NO: 25299 - RNA, 11 nt, Artificial Sequence
  Description of Artificial Sequence: Synthetic oligonucleotide
gaaaagcuccg

SEQ ID NO: 25300 - RNA, 10 nt, Artificial Sequence
  Description of Artificial Sequence: Synthetic oligonucleotide
aaagcuccgg

SEQ ID NO: 25301 - RNA, 12 nt, Artificial Sequence
  Description of Artificial Sequence: Synthetic oligonucleotide
gucaacagucug

SEQ ID NO: 25302 - RNA, 12 nt, Artificial Sequence
  Description of Artificial Sequence: Synthetic oligonucleotide
agaguucaaaag

SEQ ID NO: 25303 - RNA, 12 nt, Artificial Sequence
  Description of Artificial Sequence: Synthetic oligonucleotide
gaguucaaaagc

SEQ ID NO: 25304 - RNA, 11 nt, Artificial Sequence
  Description of Artificial Sequence: Synthetic oligonucleotide
ucaaaagcccu

SEQ ID NO: 25305 - RNA, 11 nt, Artificial Sequence
  Description of Artificial Sequence: Synthetic oligonucleotide
caaaagcccuu

SEQ ID NO: 25306 - RNA, 11 nt, Artificial Sequence
  Description of Artificial Sequence: Synthetic oligonucleotide
aaagcccuuca

SEQ ID NO: 25307 - RNA, 11 nt, Artificial Sequence
  Description of Artificial Sequence: Synthetic oligonucleotide
aagcccuucag

SEQ ID NO: 25308 - RNA, 12 nt, Artificial Sequence
  Description of Artificial Sequence: Synthetic oligonucleotide
ugaagccgcucg

SEQ ID NO: 25309 - RNA, 11 nt, Artificial Sequence
  Description of Artificial Sequence: Synthetic oligonucleotide
acgccagucaa

SEQ ID NO: 25310 - RNA, 12 nt, Artificial Sequence
  Description of Artificial Sequence: Synthetic oligonucleotide
ucuuggugcgug

SEQ ID NO: 25311 - RNA, 13 nt, Artificial Sequence
  Description of Artificial Sequence: Synthetic oligonucleotide
uuggauucaucag

SEQ ID NO: 25312 - RNA, 12 nt, Artificial Sequence
  Description of Artificial Sequence: Synthetic oligonucleotide
ggaauaccuaag

SEQ ID NO: 25313 - RNA, 11 nt, Artificial Sequence
  Description of Artificial Sequence: Synthetic oligonucleotide
uuugaggcuca

SEQ ID NO: 25314 - RNA, 10 nt, Artificial Sequence
  Description of Artificial Sequence: Synthetic oligonucleotide
cuacaauugg

SEQ ID NO: 25315 - RNA, 11 nt, Artificial Sequence
  Description of Artificial Sequence: Synthetic oligonucleotide
aguuaggagcc

SEQ ID NO: 25316 - RNA, 12 nt, Artificial Sequence
  Description of Artificial Sequence: Synthetic oligonucleotide
gucaauauccac

SEQ ID NO: 25317 - RNA, 12 nt, Artificial Sequence
  Description of Artificial Sequence: Synthetic oligonucleotide
uguucagucaca

SEQ ID NO: 25318 - RNA, 11 nt, Artificial Sequence
  Description of Artificial Sequence: Synthetic oligonucleotide
cacacacauac

SEQ ID NO: 25319 - RNA, 11 nt, Artificial Sequence
  Description of Artificial Sequence: Synthetic oligonucleotide
uccuuuugcuu

SEQ ID NO: 25320 - RNA, 15 nt, Artificial Sequence
  Description of Artificial Sequence: Synthetic oligonucleotide
uuuaaaguaauuuuu

SEQ ID NO: 25321 - RNA, 12 nt, Artificial Sequence
  Description of Artificial Sequence: Synthetic oligonucleotide
aacagucaaugg

SEQ ID NO: 25322 - RNA, 12 nt, Artificial Sequence
  Description of Artificial Sequence: Synthetic oligonucleotide
cgacaaaccaau

SEQ ID NO: 25323 - RNA, 11 nt, Artificial Sequence
  Description of Artificial Sequence: Synthetic oligonucleotide
cugcuaccacu

SEQ ID NO: 25324 - RNA, 12 nt, Artificial Sequence
  Description of Artificial Sequence: Synthetic oligonucleotide
caagcggucuua

SEQ ID NO: 25325 - RNA, 12 nt, Artificial Sequence
  Description of Artificial Sequence: Synthetic oligonucleotide
gucuuaccggcu

SEQ ID NO: 25326 - RNA, 10 nt, Artificial Sequence
  Description of Artificial Sequence: Synthetic oligonucleotide
auggguuacc

SEQ ID NO: 25327 - RNA, 10 nt, Artificial Sequence
  Description of Artificial Sequence: Synthetic oligonucleotide
uuaccugcga

SEQ ID NO: 25328 - RNA, 11 nt, Artificial Sequence
  Description of Artificial Sequence: Synthetic oligonucleotide
aucuugcugag

SEQ ID NO: 25329 - RNA, 12 nt, Artificial Sequence
  Description of Artificial Sequence: Synthetic oligonucleotide
gcauaaaacagu

SEQ ID NO: 25330 - RNA, 11 nt, Artificial Sequence
  Description of Artificial Sequence: Synthetic oligonucleotide
uccuuuauccu

SEQ ID NO: 25331 - RNA, 11 nt, Artificial Sequence
  Description of Artificial Sequence: Synthetic oligonucleotide
aacgcaaguug

SEQ ID NO: 25332 - RNA, 12 nt, Artificial Sequence
  Description of Artificial Sequence: Synthetic oligonucleotide
aacugaaaccau

SEQ ID NO: 25333 - RNA, 13 nt, Artificial Sequence
  Description of Artificial Sequence: Synthetic oligonucleotide
cuuuguuaaauau

SEQ ID NO: 25334 - RNA, 13 nt, Artificial Sequence
  Description of Artificial Sequence: Synthetic oligonucleotide
uauauuaaaaguu

SEQ ID NO: 25335 - RNA, 12 nt, Artificial Sequence
  Description of Artificial Sequence: Synthetic oligonucleotide
uuuugacuuaac

SEQ ID NO: 25336 - RNA, 12 nt, Artificial Sequence
  Description of Artificial Sequence: Synthetic oligonucleotide
caaacucagcac

SEQ ID NO: 25337 - RNA, 10 nt, Artificial Sequence
  Description of Artificial Sequence: Synthetic oligonucleotide
gcugaccuca

SEQ ID NO: 25338 - RNA, 13 nt, Artificial Sequence
  Description of Artificial Sequence: Synthetic oligonucleotide
uuauucagaucgc

SEQ ID NO: 25339 - RNA, 12 nt, Artificial Sequence
  Description of Artificial Sequence: Synthetic oligonucleotide
ggguucugggau

SEQ ID NO: 25340 - RNA, 14 nt, Artificial Sequence
  Description of Artificial Sequence: Synthetic oligonucleotide
uauuggaaauuaug

SEQ ID NO: 25341 - RNA, 12 nt, Artificial Sequence
  Description of Artificial Sequence: Synthetic oligonucleotide
uggaagcacuag

SEQ ID NO: 25342 - RNA, 12 nt, Artificial Sequence
  Description of Artificial Sequence: Synthetic oligonucleotide
uuuuuaugugga

SEQ ID NO: 25343 - RNA, 11 nt, Artificial Sequence
  Description of Artificial Sequence: Synthetic oligonucleotide
gaauugguaga

SEQ ID NO: 25344 - RNA, 12 nt, Artificial Sequence
  Description of Artificial Sequence: Synthetic oligonucleotide
uagacuuggaga

SEQ ID NO: 25345 - RNA, 12 nt, Artificial Sequence
  Description of Artificial Sequence: Synthetic oligonucleotide
uacaguauucca

SEQ ID NO: 25346 - RNA, 14 nt, Artificial Sequence
  Description of Artificial Sequence: Synthetic oligonucleotide
cacugaugaauuaa

SEQ ID NO: 25347 - RNA, 11 nt, Artificial Sequence
  Description of Artificial Sequence: Synthetic oligonucleotide
cacaucaucac

SEQ ID NO: 25348 - RNA, 12 nt, Artificial Sequence
  Description of Artificial Sequence: Synthetic oligonucleotide
ucaccaaacaga

SEQ ID NO: 25349 - RNA, 11 nt, Artificial Sequence
  Description of Artificial Sequence: Synthetic oligonucleotide
gaacaugaugg

SEQ ID NO: 25350 - RNA, 11 nt, Artificial Sequence
  Description of Artificial Sequence: Synthetic oligonucleotide
auguagacugc

SEQ ID NO: 25351 - RNA, 12 nt, Artificial Sequence
  Description of Artificial Sequence: Synthetic oligonucleotide
gaucuauuuaug

SEQ ID NO: 25352 - RNA, 11 nt, Artificial Sequence
  Description of Artificial Sequence: Synthetic oligonucleotide
cacuauuauca

SEQ ID NO: 25353 - RNA, 10 nt, Artificial Sequence
  Description of Artificial Sequence: Synthetic oligonucleotide
ucaguucugc

SEQ ID NO: 25354 - RNA, 12 nt, Artificial Sequence
  Description of Artificial Sequence: Synthetic oligonucleotide
gauuaaaccuac

SEQ ID NO: 25355 - RNA, 12 nt, Artificial Sequence
  Description of Artificial Sequence: Synthetic oligonucleotide
uaaaauccuucu

SEQ ID NO: 25356 - RNA, 11 nt, Artificial Sequence
  Description of Artificial Sequence: Synthetic oligonucleotide
augcuguagac

SEQ ID NO: 25357 - RNA, 12 nt, Artificial Sequence
  Description of Artificial Sequence: Synthetic oligonucleotide
ugauaggaauag

SEQ ID NO: 25358 - RNA, 10 nt, Artificial Sequence
  Description of Artificial Sequence: Synthetic oligonucleotide
auggcccuga

SEQ ID NO: 25359 - RNA, 10 nt, Artificial Sequence
  Description of Artificial Sequence: Synthetic oligonucleotide
uccucaagca

SEQ ID NO: 25360 - RNA, 9 nt, Artificial Sequence
  Description of Artificial Sequence: Synthetic oligonucleotide
uucagccca

SEQ ID NO: 25361 - RNA, 10 nt, Artificial Sequence
  Description of Artificial Sequence: Synthetic oligonucleotide
cugcugaacc

SEQ ID NO: 25362 - RNA, 11 nt, Artificial Sequence
  Description of Artificial Sequence: Synthetic oligonucleotide
aguucucuuca

SEQ ID NO: 25363 - RNA, 10 nt, Artificial Sequence
  Description of Artificial Sequence: Synthetic oligonucleotide
cagccuagag

SEQ ID NO: 25364 - RNA, 12 nt, Artificial Sequence
  Description of Artificial Sequence: Synthetic oligonucleotide
ucugugaagugu

SEQ ID NO: 25365 - RNA, 13 nt, Artificial Sequence
  Description of Artificial Sequence: Synthetic oligonucleotide
gagaaaauuucaa

SEQ ID NO: 25366 - RNA, 10 nt, Artificial Sequence
  Description of Artificial Sequence: Synthetic oligonucleotide
auccuccuga

SEQ ID NO: 25367 - RNA, 11 nt, Artificial Sequence
  Description of Artificial Sequence: Synthetic oligonucleotide
ugacaucauau

SEQ ID NO: 25368 - RNA, 12 nt, Artificial Sequence
  Description of Artificial Sequence: Synthetic oligonucleotide
aucuucaucaua

SEQ ID NO: 25369 - RNA, 12 nt, Artificial Sequence
  Description of Artificial Sequence: Synthetic oligonucleotide
acuagcuauuaa

SEQ ID NO: 25370 - RNA, 13 nt, Artificial Sequence
  Description of Artificial Sequence: Synthetic oligonucleotide
cucuacuaaaaau

SEQ ID NO: 25371 - RNA, 11 nt, Artificial Sequence
  Description of Artificial Sequence: Synthetic oligonucleotide
cuaucucgccu

SEQ ID NO: 25372 - RNA, 12 nt, Artificial Sequence
  Description of Artificial Sequence: Synthetic oligonucleotide
uucgguccaguu

SEQ ID NO: 25373 - RNA, 10 nt, Artificial Sequence
  Description of Artificial Sequence: Synthetic oligonucleotide
auguagccgc

SEQ ID NO: 25374 - RNA, 11 nt, Artificial Sequence
  Description of Artificial Sequence: Synthetic oligonucleotide
gaggagacuug

SEQ ID NO: 25375 - RNA, 11 nt, Artificial Sequence
  Description of Artificial Sequence: Synthetic oligonucleotide
aguagugagga

SEQ ID NO: 25376 - RNA, 13 nt, Artificial Sequence
  Description of Artificial Sequence: Synthetic oligonucleotide
agaugaguacaaa

SEQ ID NO: 25377 - RNA, 12 nt, Artificial Sequence
  Description of Artificial Sequence: Synthetic oligonucleotide
uuguuaaugggc

SEQ ID NO: 25378 - RNA, 12 nt, Artificial Sequence
  Description of Artificial Sequence: Synthetic oligonucleotide
uuuuaauuuauu

SEQ ID NO: 25379 - RNA, 11 nt, Artificial Sequence
  Description of Artificial Sequence: Synthetic oligonucleotide
auuuaaauaug

SEQ ID NO: 25380 - RNA, 12 nt, Artificial Sequence
  Description of Artificial Sequence: Synthetic oligonucleotide
auccuuuguuuc

SEQ ID NO: 25381 - RNA, 13 nt, Artificial Sequence
  Description of Artificial Sequence: Synthetic oligonucleotide
gucuaaguguuug

SEQ ID NO: 25382 - RNA, 11 nt, Artificial Sequence
  Description of Artificial Sequence: Synthetic oligonucleotide
ccugugacaaa

SEQ ID NO: 25383 - RNA, 12 nt, Artificial Sequence
  Description of Artificial Sequence: Synthetic oligonucleotide
caggcugaauua

SEQ ID NO: 25384 - RNA, 13 nt, Artificial Sequence
  Description of Artificial Sequence: Synthetic oligonucleotide
ucauucuuacaau

SEQ ID NO: 25385 - RNA, 14 nt, Artificial Sequence
  Description of Artificial Sequence: Synthetic oligonucleotide
cauucuuacaauug

SEQ ID NO: 25386 - RNA, 11 nt, Artificial Sequence
  Description of Artificial Sequence: Synthetic oligonucleotide
agagaguguac

SEQ ID NO: 25387 - RNA, 11 nt, Artificial Sequence
  Description of Artificial Sequence: Synthetic oligonucleotide
gaacucagcag

SEQ ID NO: 25388 - RNA, 12 nt, Artificial Sequence
  Description of Artificial Sequence: Synthetic oligonucleotide
uuauuuucagua

SEQ ID NO: 25389 - RNA, 11 nt, Artificial Sequence
  Description of Artificial Sequence: Synthetic oligonucleotide
cuuaaauggaa

SEQ ID NO: 25390 - RNA, 12 nt, Artificial Sequence
  Description of Artificial Sequence: Synthetic oligonucleotide
gccuaaaauugu

SEQ ID NO: 25391 - RNA, 12 nt, Artificial Sequence
  Description of Artificial Sequence: Synthetic oligonucleotide
acuaacaucugg

SEQ ID NO: 25392 - RNA, 11 nt, Artificial Sequence
  Description of Artificial Sequence: Synthetic oligonucleotide
gacugugagcu

SEQ ID NO: 25393 - RNA, 13 nt, Artificial Sequence
  Description of Artificial Sequence: Synthetic oligonucleotide
gcuuuuuauuaau

SEQ ID NO: 25394 - RNA, 12 nt, Artificial Sequence
  Description of Artificial Sequence: Synthetic oligonucleotide
ucuucuuacauu

SEQ ID NO: 25395 - RNA, 14 nt, Artificial Sequence
  Description of Artificial Sequence: Synthetic oligonucleotide
auuuguaaaaaugu

SEQ ID NO: 25396 - RNA, 14 nt, Artificial Sequence
  Description of Artificial Sequence: Synthetic oligonucleotide
ucuuaauucauauu

SEQ ID NO: 25397 - RNA, 12 nt, Artificial Sequence
  Description of Artificial Sequence: Synthetic oligonucleotide
aacuaaucauga

SEQ ID NO: 25398 - RNA, 11 nt, Artificial Sequence
  Description of Artificial Sequence: Synthetic oligonucleotide
cugcucuuggg

SEQ ID NO: 25399 - RNA, 12 nt, Artificial Sequence
  Description of Artificial Sequence: Synthetic oligonucleotide
aguagcuuugag

SEQ ID NO: 25400 - RNA, 13 nt, Artificial Sequence
  Description of Artificial Sequence: Synthetic oligonucleotide
acguaauauuuca

SEQ ID NO: 25401 - RNA, 12 nt, Artificial Sequence
  Description of Artificial Sequence: Synthetic oligonucleotide
auucucuucacu

SEQ ID NO: 25402 - RNA, 13 nt, Artificial Sequence
  Description of Artificial Sequence: Synthetic oligonucleotide
uaaugcuaagaaa

SEQ ID NO: 25403 - RNA, 11 nt, Artificial Sequence
  Description of Artificial Sequence: Synthetic oligonucleotide
cugaaaaucaa

SEQ ID NO: 25404 - RNA, 13 nt, Artificial Sequence
  Description of Artificial Sequence: Synthetic oligonucleotide
auaugauuacuuu

SEQ ID NO: 25405 - RNA, 13 nt, Artificial Sequence
  Description of Artificial Sequence: Synthetic oligonucleotide
auuuuguucuaca

SEQ ID NO: 25406 - RNA, 11 nt, Artificial Sequence
  Description of Artificial Sequence: Synthetic oligonucleotide
ccgggacucuc

SEQ ID NO: 25407 - RNA, 13 nt, Artificial Sequence
  Description of Artificial Sequence: Synthetic oligonucleotide
cuuuaaaguaaag

SEQ ID NO: 25408 - RNA, 12 nt, Artificial Sequence
  Description of Artificial Sequence: Synthetic oligonucleotide
cuggaagccugg

SEQ ID NO: 25409 - RNA, 13 nt, Artificial Sequence
  Description of Artificial Sequence: Synthetic oligonucleotide
aaacaaaagagag

SEQ ID NO: 25410 - RNA, 12 nt, Artificial Sequence
  Description of Artificial Sequence: Synthetic oligonucleotide
ucaguuaugccg

SEQ ID NO: 25411 - RNA, 12 nt, Artificial Sequence
  Description of Artificial Sequence: Synthetic oligonucleotide
aaaagaagucca

SEQ ID NO: 25412 - RNA, 10 nt, Artificial Sequence
  Description of Artificial Sequence: Synthetic oligonucleotide
ggugagguua

SEQ ID NO: 25413 - RNA, 10 nt, Artificial Sequence
  Description of Artificial Sequence: Synthetic oligonucleotide
ggaagaggac

SEQ ID NO: 25414 - RNA, 12 nt, Artificial Sequence
  Description of Artificial Sequence: Synthetic oligonucleotide
agcaaguauugu

SEQ ID NO: 25415 - RNA, 11 nt, Artificial Sequence
  Description of Artificial Sequence: Synthetic oligonucleotide
uuguagcacuc

SEQ ID NO: 25416 - RNA, 13 nt, Artificial Sequence
  Description of Artificial Sequence: Synthetic oligonucleotide
caaaaccacaaau

SEQ ID NO: 25417 - RNA, 11 nt, Artificial Sequence
  Description of Artificial Sequence: Synthetic oligonucleotide
aagcccauaca

SEQ ID NO: 25418 - RNA, 10 nt, Artificial Sequence
  Description of Artificial Sequence: Synthetic oligonucleotide
gcccauacag

SEQ ID NO: 25419 - RNA, 11 nt, Artificial Sequence
  Description of Artificial Sequence: Synthetic oligonucleotide
agaaaccuucc

SEQ ID NO: 25420 - RNA, 9 nt, Artificial Sequence
  Description of Artificial Sequence: Synthetic oligonucleotide
uauaccuac

SEQ ID NO: 25421 - RNA, 12 nt, Artificial Sequence
  Description of Artificial Sequence: Synthetic oligonucleotide
ccaguuuucgga

SEQ ID NO: 25422 - RNA, 8 nt, Artificial Sequence
  Description of Artificial Sequence: Synthetic oligonucleotide
gaacaggg

SEQ ID NO: 25423 - RNA, 12 nt, Artificial Sequence
  Description of Artificial Sequence: Synthetic oligonucleotide
uaacuuuccagu

SEQ ID NO: 25424 - RNA, 13 nt, Artificial Sequence
  Description of Artificial Sequence: Synthetic oligonucleotide
aaguuugguuuug

SEQ ID NO: 25425 - RNA, 11 nt, Artificial Sequence
  Description of Artificial Sequence: Synthetic oligonucleotide
uucccacugua

SEQ ID NO: 25426 - RNA, 12 nt, Artificial Sequence
  Description of Artificial Sequence: Synthetic oligonucleotide
gauaccauauga

SEQ ID NO: 25427 - RNA, 10 nt, Artificial Sequence
  Description of Artificial Sequence: Synthetic oligonucleotide
acaugggcug

SEQ ID NO: 25428 - RNA, 12 nt, Artificial Sequence
  Description of Artificial Sequence: Synthetic oligonucleotide
aacuuuuucaua

SEQ ID NO: 25429 - RNA, 11 nt, Artificial Sequence
  Description of Artificial Sequence: Synthetic oligonucleotide
augaggccgga

SEQ ID NO: 25430 - RNA, 10 nt, Artificial Sequence
  Description of Artificial Sequence: Synthetic oligonucleotide
cugcauuugu

SEQ ID NO: 25431 - RNA, 12 nt, Artificial Sequence
  Description of Artificial Sequence: Synthetic oligonucleotide
auguuuacuacc

SEQ ID NO: 25432 - RNA, 14 nt, Artificial Sequence
  Description of Artificial Sequence: Synthetic oligonucleotide
auuuuuugaugaaa

SEQ ID NO: 25433 - RNA, 13 nt, Artificial Sequence
  Description of Artificial Sequence: Synthetic oligonucleotide
agugugugaauuu

SEQ ID NO: 25434 - RNA, 12 nt, Artificial Sequence
  Description of Artificial Sequence: Synthetic oligonucleotide
agcaauguaugu

SEQ ID NO: 25435 - RNA, 13 nt, Artificial Sequence
  Description of Artificial Sequence: Synthetic oligonucleotide
aagcacauauaua

SEQ ID NO: 25436 - RNA, 13 nt, Artificial Sequence
  Description of Artificial Sequence: Synthetic oligonucleotide
uaauaguuucucc

SEQ ID NO: 25437 - RNA, 12 nt, Artificial Sequence
  Description of Artificial Sequence: Synthetic oligonucleotide
guuucuccaaau

SEQ ID NO: 25438 - RNA, 12 nt, Artificial Sequence
  Description of Artificial Sequence: Synthetic oligonucleotide
acuuccuagaaa

SEQ ID NO: 25439 - RNA, 12 nt, Artificial Sequence
  Description of Artificial Sequence: Synthetic oligonucleotide
acaccauauaug

SEQ ID NO: 25440 - RNA, 13 nt, Artificial Sequence
  Description of Artificial Sequence: Synthetic oligonucleotide
uauaugaauggag

SEQ ID NO: 25441 - RNA, 12 nt, Artificial Sequence
  Description of Artificial Sequence: Synthetic oligonucleotide
cauuuacaggga

SEQ ID NO: 25442 - RNA, 12 nt, Artificial Sequence
  Description of Artificial Sequence: Synthetic oligonucleotide
auuuacagggac

SEQ ID NO: 25443 - RNA, 9 nt, Artificial Sequence
  Description of Artificial Sequence: Synthetic oligonucleotide
gggaccuga

SEQ ID NO: 25444 - RNA, 13 nt, Artificial Sequence
  Description of Artificial Sequence: Synthetic oligonucleotide
guuugacugcauc

SEQ ID NO: 25445 - RNA, 12 nt, Artificial Sequence
  Description of Artificial Sequence: Synthetic oligonucleotide
uugacugcaucg

SEQ ID NO: 25446 - RNA, 11 nt, Artificial Sequence
  Description of Artificial Sequence: Synthetic oligonucleotide
aguucacaggg

SEQ ID NO: 25447 - RNA, 12 nt, Artificial Sequence
  Description of Artificial Sequence: Synthetic oligonucleotide
gcaccucugucc

SEQ ID NO: 25448 - RNA, 14 nt, Artificial Sequence
  Description of Artificial Sequence: Synthetic oligonucleotide
guuugucuuuuuaa

SEQ ID NO: 25449 - RNA, 13 nt, Artificial Sequence
  Description of Artificial Sequence: Synthetic oligonucleotide
uugucuuuuuaag

SEQ ID NO: 25450 - RNA, 12 nt, Artificial Sequence
  Description of Artificial Sequence: Synthetic oligonucleotide
cuaaagguuguc

SEQ ID NO: 25451 - RNA, 11 nt, Artificial Sequence
  Description of Artificial Sequence: Synthetic oligonucleotide
agguugucgac

SEQ ID NO: 25452 - RNA, 12 nt, Artificial Sequence
  Description of Artificial Sequence: Synthetic oligonucleotide
ccuggcaauugu

SEQ ID NO: 25453 - RNA, 11 nt, Artificial Sequence
  Description of Artificial Sequence: Synthetic oligonucleotide
guggugcgagg

SEQ ID NO: 25454 - RNA, 12 nt, Artificial Sequence
  Description of Artificial Sequence: Synthetic oligonucleotide
gagacaugaaau

SEQ ID NO: 25455 - RNA, 12 nt, Artificial Sequence
  Description of Artificial Sequence: Synthetic oligonucleotide
uauauuucucca

SEQ ID NO: 25456 - RNA, 9 nt, Artificial Sequence
  Description of Artificial Sequence: Synthetic oligonucleotide
augaaggcu

SEQ ID NO: 25457 - RNA, 10 nt, Artificial Sequence
  Description of Artificial Sequence: Synthetic oligonucleotide
cuggaguggu

SEQ ID NO: 25458 - RNA, 10 nt, Artificial Sequence
  Description of Artificial Sequence: Synthetic oligonucleotide
ggaagagagg

SEQ ID NO: 25459 - RNA, 11 nt, Artificial Sequence
  Description of Artificial Sequence: Synthetic oligonucleotide
uugcaucgggc

SEQ ID NO: 25460 - RNA, 12 nt, Artificial Sequence
  Description of Artificial Sequence: Synthetic oligonucleotide
uauccuacugug

SEQ ID NO: 25461 - RNA, 12 nt, Artificial Sequence
  Description of Artificial Sequence: Synthetic oligonucleotide
ccuacuguguaa

SEQ ID NO: 25462 - RNA, 11 nt, Artificial Sequence
  Description of Artificial Sequence: Synthetic oligonucleotide
cuuguagugua

SEQ ID NO: 25463 - RNA, 12 nt, Artificial Sequence
  Description of Artificial Sequence: Synthetic oligonucleotide
cuuuguugauug

SEQ ID NO: 25464 - RNA, 13 nt, Artificial Sequence
  Description of Artificial Sequence: Synthetic oligonucleotide
uuguugauugaaa

SEQ ID NO: 25465 - RNA, 14 nt, Artificial Sequence
  Description of Artificial Sequence: Synthetic oligonucleotide
ucuuuuucuuccau

SEQ ID NO: 25466 - RNA, 12 nt, Artificial Sequence
  Description of Artificial Sequence: Synthetic oligonucleotide
aucuuccuucua

SEQ ID NO: 25467 - RNA, 12 nt, Artificial Sequence
  Description of Artificial Sequence: Synthetic oligonucleotide
ugaaugcuucau

SEQ ID NO: 25468 - RNA, 12 nt, Artificial Sequence
  Description of Artificial Sequence: Synthetic oligonucleotide
gaaugcuucaug

SEQ ID NO: 25469 - RNA, 12 nt, Artificial Sequence
  Description of Artificial Sequence: Synthetic oligonucleotide
auucuacuuuga

SEQ ID NO: 25470 - RNA, 12 nt, Artificial Sequence
  Description of Artificial Sequence: Synthetic oligonucleotide
gcaacuacagac

SEQ ID NO: 25471 - RNA, 12 nt, Artificial Sequence
  Description of Artificial Sequence: Synthetic oligonucleotide
accaaggucaac

SEQ ID NO: 25472 - RNA, 12 nt, Artificial Sequence
  Description of Artificial Sequence: Synthetic oligonucleotide
gacuaucucgac

SEQ ID NO: 25473 - RNA, 12 nt, Artificial Sequence
  Description of Artificial Sequence: Synthetic oligonucleotide
accuucccaaac

SEQ ID NO: 25474 - RNA, 13 nt, Artificial Sequence
  Description of Artificial Sequence: Synthetic oligonucleotide
caagcuuagaacu

SEQ ID NO: 25475 - RNA, 14 nt, Artificial Sequence
  Description of Artificial Sequence: Synthetic oligonucleotide
gcuuagaacuuuaa

SEQ ID NO: 25476 - RNA, 13 nt, Artificial Sequence
  Description of Artificial Sequence: Synthetic oligonucleotide
aacuuuaagcaac

SEQ ID NO: 25477 - RNA, 10 nt, Artificial Sequence
  Description of Artificial Sequence: Synthetic oligonucleotide
agaccaccac

SEQ ID NO: 25478 - RNA, 13 nt, Artificial Sequence
  Description of Artificial Sequence: Synthetic oligonucleotide
cgagaaauaaagu

SEQ ID NO: 25479 - RNA, 13 nt, Artificial Sequence
  Description of Artificial Sequence: Synthetic oligonucleotide
gagaaauaaaguu

SEQ ID NO: 25480 - RNA, 11 nt, Artificial Sequence
  Description of Artificial Sequence: Synthetic oligonucleotide
ggaaaugaucc

SEQ ID NO: 25481 - RNA, 12 nt, Artificial Sequence
  Description of Artificial Sequence: Synthetic oligonucleotide
aagaaaugaaac

SEQ ID NO: 25482 - RNA, 12 nt, Artificial Sequence
  Description of Artificial Sequence: Synthetic oligonucleotide
uuuccauccucc

SEQ ID NO: 25483 - RNA, 14 nt, Artificial Sequence
  Description of Artificial Sequence: Synthetic oligonucleotide
cugaaaaucuuuga

SEQ ID NO: 25484 - RNA, 10 nt, Artificial Sequence
  Description of Artificial Sequence: Synthetic oligonucleotide
gccguucagg

SEQ ID NO: 25485 - RNA, 12 nt, Artificial Sequence
  Description of Artificial Sequence: Synthetic oligonucleotide
aggguccagaag

SEQ ID NO: 25486 - RNA, 12 nt, Artificial Sequence
  Description of Artificial Sequence: Synthetic oligonucleotide
caagacugcuug

SEQ ID NO: 25487 - RNA, 12 nt, Artificial Sequence
  Description of Artificial Sequence: Synthetic oligonucleotide
ccaugucuuugg

SEQ ID NO: 25488 - RNA, 10 nt, Artificial Sequence
  Description of Artificial Sequence: Synthetic oligonucleotide
ccugaaacac

SEQ ID NO: 25489 - RNA, 11 nt, Artificial Sequence
  Description of Artificial Sequence: Synthetic oligonucleotide
cucuguaccuc

SEQ ID NO: 25490 - RNA, 11 nt, Artificial Sequence
  Description of Artificial Sequence: Synthetic oligonucleotide
gcaagacaaga

SEQ ID NO: 25491 - RNA, 12 nt, Artificial Sequence
  Description of Artificial Sequence: Synthetic oligonucleotide
caagacaagaaa

SEQ ID NO: 25492 - RNA, 11 nt, Artificial Sequence
  Description of Artificial Sequence: Synthetic oligonucleotide
guacaagaucc

SEQ ID NO: 25493 - RNA, 11 nt, Artificial Sequence
  Description of Artificial Sequence: Synthetic oligonucleotide
guacuugcaga

SEQ ID NO: 25494 - RNA, 12 nt, Artificial Sequence
  Description of Artificial Sequence: Synthetic oligonucleotide
gaucgauacaga

SEQ ID NO: 25495 - RNA, 12 nt, Artificial Sequence
  Description of Artificial Sequence: Synthetic oligonucleotide
auaaaaauaaau

SEQ ID NO: 25496 - RNA, 12 nt, Artificial Sequence
  Description of Artificial Sequence: Synthetic oligonucleotide
aaaaauaaauau

SEQ ID NO: 25497 - RNA, 12 nt, Artificial Sequence
  Description of Artificial Sequence: Synthetic oligonucleotide
uugacugcugug

SEQ ID NO: 25498 - RNA, 12 nt, Artificial Sequence
  Description of Artificial Sequence: Synthetic oligonucleotide
gagaugagagac

SEQ ID NO: 25499 - RNA, 9 nt, Artificial Sequence
  Description of Artificial Sequence: Synthetic oligonucleotide
cccacuugg

SEQ ID NO: 25500 - RNA, 6405 nt, Homo sapiens; identical to SEQ ID NO: 23165

SEQ ID NO: 25501 - RNA, 5718 nt, Homo sapiens; identical to SEQ ID NO: 23785

SEQ ID NO: 25502 - RNA, 19 nt, Artificial Sequence
  Description of Artificial Sequence: Synthetic oligonucleotide
aagaucugugacuuuggcc

SEQ ID NO: 25503 - RNA, 19 nt, Artificial Sequence
  Description of Artificial Sequence: Synthetic oligonucleotide
agaucugugacuuuggccu

SEQ ID NO: 25504 - RNA, 19 nt, Artificial Sequence
  Description of Artificial Sequence: Synthetic oligonucleotide
gaucugugacuuuggccug

SEQ ID NO: 25505 - RNA, 19 nt, Artificial Sequence
  Description of Artificial Sequence: Synthetic oligonucleotide
aucugugacuuuggccugg

SEQ ID NO: 25506 - RNA, 19 nt, Artificial Sequence
  Description of Artificial Sequence: Synthetic oligonucleotide
ucugugacuuuggccuggc

SEQ ID NO: 25507 - RNA, 19 nt, Artificial Sequence
  Description of Artificial Sequence: Synthetic oligonucleotide
ggugacuacauggacauga

SEQ ID NO: 25508 - RNA, 19 nt, Artificial Sequence
  Description of Artificial Sequence: Synthetic oligonucleotide
cugugacuuuggccuggcc

SEQ ID NO: 25509 - RNA, 19 nt, Artificial Sequence
  Description of Artificial Sequence: Synthetic oligonucleotide
augcagcugcccuaugacu

SEQ ID NO: 25510 - RNA, 19 nt, Artificial Sequence
  Description of Artificial Sequence: Synthetic oligonucleotide
ugcagcugcccuaugacuc

SEQ ID NO: 25511 - RNA, 19 nt, Artificial Sequence
  Description of Artificial Sequence: Synthetic oligonucleotide
auccugcucugggagaucu

SEQ ID NO: 25512 - RNA, 19 nt, Artificial Sequence
  Description of Artificial Sequence: Synthetic oligonucleotide
uccugcucugggagaucuu

SEQ ID NO: 25513 - RNA, 19 nt, Artificial Sequence
  Description of Artificial Sequence: Synthetic oligonucleotide
guggacccgaugcagcugc

SEQ ID NO: 25514 - RNA, 19 nt, Artificial Sequence
  Description of Artificial Sequence: Synthetic oligonucleotide
uggacccgaugcagcugcc

SEQ ID NO: 25515 - RNA, 19 nt, Artificial Sequence
  Description of Artificial Sequence: Synthetic oligonucleotide
augcagcugccuuaugacu

SEQ ID NO: 25516 - RNA, 19 nt, Artificial Sequence
  Description of Artificial Sequence: Synthetic oligonucleotide
ugcagcugccuuaugacuc

SEQ ID NO: 25517 - RNA, 19 nt, Artificial Sequence
  Description of Artificial Sequence: Synthetic oligonucleotide
gugaagaucugugacuuug

SEQ ID NO: 25518 - RNA, 19 nt, Artificial Sequence
  Description of Artificial Sequence: Synthetic oligonucleotide
ugaagaucugugacuuugg

SEQ ID NO: 25519 - RNA, 19 nt, Artificial Sequence
  Description of Artificial Sequence: Synthetic oligonucleotide
gaagaucugugacuuuggc

SEQ ID NO: 25520 - RNA, 19 nt, Artificial Sequence
  Description of Artificial Sequence: Synthetic oligonucleotide
aaguggauggcuccugaga

SEQ ID NO: 25521 - RNA, 19 nt, Artificial Sequence
  Description of Artificial Sequence: Synthetic oligonucleotide
aguggauggcuccugagag

SEQ ID NO: 25522 - RNA, 19 nt, Artificial Sequence
  Description of Artificial Sequence: Synthetic oligonucleotide
guggauggcuccugagagc

SEQ ID NO: 25523 - RNA, 19 nt, Artificial Sequence
  Description of Artificial Sequence: Synthetic oligonucleotide
uggauggcuccugagagca

SEQ ID NO: 25524 - RNA, 19 nt, Artificial Sequence
  Description of Artificial Sequence: Synthetic oligonucleotide
ggauggcuccugagagcau

SEQ ID NO: 25525 - RNA, 19 nt, Artificial Sequence
  Description of Artificial Sequence: Synthetic oligonucleotide
gauggcuccugagagcauc

SEQ ID NO: 25526 - RNA, 19 nt, Artificial Sequence
  Description of Artificial Sequence: Synthetic oligonucleotide
auggcuccugagagcaucu

SEQ ID NO: 25527 - RNA, 19 nt, Artificial Sequence
  Description of Artificial Sequence: Synthetic oligonucleotide
uggcuccugagagcaucuu

SEQ ID NO: 25528 - RNA, 19 nt, Artificial Sequence
  Description of Artificial Sequence: Synthetic oligonucleotide
auucugcucugggagaucu

SEQ ID NO: 25529 - RNA, 19 nt, Artificial Sequence
  Description of Artificial Sequence: Synthetic oligonucleotide
uucugcucugggagaucuu

SEQ ID NO: 25530 - RNA, 19 nt, Artificial Sequence
  Description of Artificial Sequence: Synthetic oligonucleotide
uugguggcaccccuuaccc

SEQ ID NO: 25531 - RNA, 19 nt, Artificial Sequence
  Description of Artificial Sequence: Synthetic oligonucleotide
gguggcaccccuuaccccg

SEQ ID NO: 25532 - RNA, 19 nt, Artificial Sequence
  Description of Artificial Sequence: Synthetic oligonucleotide
guggaccccaugcagcugc

SEQ ID NO: 25533 - RNA, 19 nt, Artificial Sequence
  Description of Artificial Sequence: Synthetic oligonucleotide
uggaccccaugcagcugcc

SEQ ID NO: 25534 - RNA, 19 nt, Artificial Sequence
  Description of Artificial Sequence: Synthetic oligonucleotide
gguggcuacauggacauga

SEQ ID NO: 25535 - RNA, 19 nt, Artificial Sequence
  Description of Artificial Sequence: Synthetic oligonucleotide
gucaagaucugugacuuug

SEQ ID NO: 25536 - RNA, 19 nt, Artificial Sequence
  Description of Artificial Sequence: Synthetic oligonucleotide
ucaagaucugugacuuugg

SEQ ID NO: 25537 - RNA, 19 nt, Artificial Sequence
  Description of Artificial Sequence: Synthetic oligonucleotide
caagaucugugacuuuggc

SEQ ID NO: 25538 - RNA, 19 nt, Artificial Sequence
  Description of Artificial Sequence: Synthetic oligonucleotide
cugugacuuuggccuggcu

SEQ ID NO: 25539 - RNA, 19 nt, Artificial Sequence
  Description of Artificial Sequence: Synthetic oligonucleotide
aaguggauggcuccggaga

SEQ ID NO: 25540 - RNA, 19 nt, Artificial Sequence
  Description of Artificial Sequence: Synthetic oligonucleotide
aguggauggcuccggagag

SEQ ID NO: 25541 - RNA, 19 nt, Artificial Sequence
  Description of Artificial Sequence: Synthetic oligonucleotide
guggauggcuccggagagc

SEQ ID NO: 25542 - RNA, 19 nt, Artificial Sequence
  Description of Artificial Sequence: Synthetic oligonucleotide
uggauggcuccggagagca

SEQ ID NO: 25543 - RNA, 19 nt, Artificial Sequence
  Description of Artificial Sequence: Synthetic oligonucleotide
ggauggcuccggagagcau

SEQ ID NO: 25544 - RNA, 19 nt, Artificial Sequence
  Description of Artificial Sequence: Synthetic oligonucleotide
gauggcuccggagagcauc

SEQ ID NO: 25545 - RNA, 19 nt, Artificial Sequence
  Description of Artificial Sequence: Synthetic oligonucleotide
auggcuccggagagcaucu

SEQ ID NO: 25546 - RNA, 19 nt, Artificial Sequence
  Description of Artificial Sequence: Synthetic oligonucleotide
uggcuccggagagcaucuu

SEQ ID NO: 25547 - RNA, 19 nt, Artificial Sequence
  Description of Artificial Sequence: Synthetic oligonucleotide
uggguggcaccccuuaccc

SEQ ID NO: 25548 - RNA, 19 nt, Artificial Sequence
  Description of Artificial Sequence: Synthetic oligonucleotide
gguggcaccccuuacccag

SEQ ID NO: 25549 - RNA, 19 nt, Artificial Sequence
  Description of Artificial Sequence: Synthetic oligonucleotide
ugcugggagccugcaccaa

SEQ ID NO: 25550 - RNA, 19 nt, Artificial Sequence
  Description of Artificial Sequence: Synthetic oligonucleotide
gugacuacauggacaugaa

SEQ ID NO: 25551 - RNA, 19 nt, Artificial Sequence
  Description of Artificial Sequence: Synthetic oligonucleotide
ccugcucugggagaucuuc

SEQ ID NO: 25552 - RNA, 19 nt, Artificial Sequence
  Description of Artificial Sequence: Synthetic oligonucleotide
uacaucuaugugccagacc

SEQ ID NO: 25553 - RNA, 19 nt, Artificial Sequence
  Description of Artificial Sequence: Synthetic oligonucleotide
acaucuaugugccagaccc

SEQ ID NO: 25554 - RNA, 19 nt, Artificial Sequence
  Description of Artificial Sequence: Synthetic oligonucleotide
auggugacuacauggacau

SEQ ID NO: 25555 - RNA, 19 nt, Artificial Sequence
  Description of Artificial Sequence: Synthetic oligonucleotide
uggugacuacauggacaug

SEQ ID NO: 25556 - RNA, 19 nt, Artificial Sequence
  Description of Artificial Sequence: Synthetic oligonucleotide
ugugacuuuggccuggcca

SEQ ID NO: 25557 - RNA, 19 nt, Artificial Sequence
  Description of Artificial Sequence: Synthetic oligonucleotide
gugacuuuggccuggccag

SEQ ID NO: 25558 - RNA, 19 nt, Artificial Sequence
  Description of Artificial Sequence: Synthetic oligonucleotide
ugacuuuggccuggccaga

SEQ ID NO: 25559 - RNA, 19 nt, Artificial Sequence
  Description of Artificial Sequence: Synthetic oligonucleotide
gacuuuggccuggccagag

SEQ ID NO: 25560 - RNA, 19 nt, Artificial Sequence
  Description of Artificial Sequence: Synthetic oligonucleotide
acuuuggccuggccagaga

SEQ ID NO: 25561 - RNA, 19 nt, Artificial Sequence
  Description of Artificial Sequence: Synthetic oligonucleotide
cuuuggccuggccagagac

SEQ ID NO: 25562 - RNA, 19 nt, Artificial Sequence
  Description of Artificial Sequence: Synthetic oligonucleotide
uuuggccuggccagagaca

SEQ ID NO: 25563 - RNA, 19 nt, Artificial Sequence
  Description of Artificial Sequence: Synthetic oligonucleotide
uuggccuggccagagacau

SEQ ID NO: 25564 - RNA, 19 nt, Artificial Sequence
  Description of Artificial Sequence: Synthetic oligonucleotide
uggccuggccagagacauc

SEQ ID NO: 25565 - RNA, 19 nt, Artificial Sequence
  Description of Artificial Sequence: Synthetic oligonucleotide
ggccuggccagagacauca

SEQ ID NO: 25566 - RNA, 19 nt, Artificial Sequence
  Description of Artificial Sequence: Synthetic oligonucleotide
gccuggccagagacaucau

SEQ ID NO: 25567 - RNA, 19 nt, Artificial Sequence
  Description of Artificial Sequence: Synthetic oligonucleotide
ccuggccagagacaucaug

SEQ ID NO: 25568 - RNA, 19 nt, Artificial Sequence
  Description of Artificial Sequence: Synthetic oligonucleotide
cuggccagagacaucaugc

SEQ ID NO: 25569 - RNA, 19 nt, Artificial Sequence
  Description of Artificial Sequence: Synthetic oligonucleotide
aaaggcaguaccuuucugc

SEQ ID NO: 25570 - RNA, 19 nt, Artificial Sequence
  Description of Artificial Sequence: Synthetic oligonucleotide
aaggcaguaccuuucugcc

SEQ ID NO: 25571 - RNA, 19 nt, Artificial Sequence
  Description of Artificial Sequence: Synthetic oligonucleotide
acaaccucuacaccacacu

SEQ ID NO: 25572 - RNA, 19 nt, Artificial Sequence
  Description of Artificial Sequence: Synthetic oligonucleotide
caaccucuacaccacacug

SEQ ID NO: 25573 - RNA, 19 nt, Artificial Sequence
  Description of Artificial Sequence: Synthetic oligonucleotide
aaccucuacaccacacuga

SEQ ID NO: 25574 - RNA, 19 nt, Artificial Sequence
  Description of Artificial Sequence: Synthetic oligonucleotide
accucuacaccacacugag

SEQ ID NO: 25575 - RNA, 19 nt, Artificial Sequence
  Description of Artificial Sequence: Synthetic oligonucleotide
cccuugguggcaccccuua

SEQ ID NO: 25576 - RNA, 19 nt, Artificial Sequence
  Description of Artificial Sequence: Synthetic oligonucleotide
ccuugguggcaccccuuac

SEQ ID NO: 25577 - RNA, 19 nt, Artificial Sequence
  Description of Artificial Sequence: Synthetic oligonucleotide
cuugguggcaccccuuacc

SEQ ID NO: 25578 - RNA, 19 nt, Artificial Sequence
  Description of Artificial Sequence: Synthetic oligonucleotide
ucuacaucuuugugccaga

SEQ ID NO: 25579 - RNA, 19 nt, Artificial Sequence
  Description of Artificial Sequence: Synthetic oligonucleotide
uacguggaccccaugcagc

SEQ ID NO: 25580 - RNA, 19 nt, Artificial Sequence
  Description of Artificial Sequence: Synthetic oligonucleotide
acguggaccccaugcagcu

SEQ ID NO: 25581 - RNA, 19 nt, Artificial Sequence
  Description of Artificial Sequence: Synthetic oligonucleotide
cguggaccccaugcagcug

SEQ ID NO: 25582 - RNA, 19 nt, Artificial Sequence
  Description of Artificial Sequence: Synthetic oligonucleotide
ggaccccaugcagcugccc

SEQ ID NO: 25583 - RNA, 19 nt, Artificial Sequence
  Description of Artificial Sequence: Synthetic oligonucleotide
gaccccaugcagcugcccu

SEQ ID NO: 25584 - RNA, 19 nt, Artificial Sequence
  Description of Artificial Sequence: Synthetic oligonucleotide
accccaugcagcugcccua

SEQ ID NO: 25585 - RNA, 19 nt, Artificial Sequence
  Description of Artificial Sequence: Synthetic oligonucleotide
ccccaugcagcugcccuau

SEQ ID NO: 25586 - RNA, 19 nt, Artificial Sequence
  Description of Artificial Sequence: Synthetic oligonucleotide
cccaugcagcugcccuaug

SEQ ID NO: 25587 - RNA, 19 nt, Artificial Sequence
  Description of Artificial Sequence: Synthetic oligonucleotide
ccaugcagcugcccuauga

SEQ ID NO: 25588 - RNA, 19 nt, Artificial Sequence
  Description of Artificial Sequence: Synthetic oligonucleotide
caugcagcugcccuaugac

SEQ ID NO: 25589 - RNA, 19 nt, Artificial Sequence
  Description of Artificial Sequence: Synthetic oligonucleotide
gcagcugcccuaugacucc

SEQ ID NO: 25590 - RNA, 19 nt, Artificial Sequence
  Description of Artificial Sequence: Synthetic oligonucleotide
cagcugcccuaugacucca

SEQ ID NO: 25591 - RNA, 19 nt, Artificial Sequence
  Description of Artificial Sequence: Synthetic oligonucleotide
acgguggcuacauggacau

SEQ ID NO: 25592 - RNA, 19 nt, Artificial Sequence
  Description of Artificial Sequence: Synthetic oligonucleotide
cgguggcuacauggacaug

SEQ ID NO: 25593 - RNA, 19 nt, Artificial Sequence
  Description of Artificial Sequence: Synthetic oligonucleotide
aaaggcagcaccuuuuugc

SEQ ID NO: 25594 - RNA, 19 nt, Artificial Sequence
  Description of Artificial Sequence: Synthetic oligonucleotide
aaggcagcaccuuuuugcc

SEQ ID NO: 25595 - RNA, 19 nt, Artificial Sequence
  Description of Artificial Sequence: Synthetic oligonucleotide
uaaaguggauggcuccgga

SEQ ID NO: 25596 - RNA, 19 nt, Artificial Sequence
  Description of Artificial Sequence: Synthetic oligonucleotide
aaaguggauggcuccggag

SEQ ID NO: 25597 - RNA, 19 nt, Artificial Sequence
  Description of Artificial Sequence: Synthetic oligonucleotide
ggcuccggagagcaucuuc

SEQ ID NO: 25598 - RNA, 19 nt, Artificial Sequence
  Description of Artificial Sequence: Synthetic oligonucleotide
ccucuacaccacccugagc

SEQ ID NO: 25599 - RNA, 19 nt, Artificial Sequence
  Description of Artificial Sequence: Synthetic oligonucleotide
cucuacaccacccugagcg

SEQ ID NO: 25600 - RNA, 19 nt, Artificial Sequence
  Description of Artificial Sequence: Synthetic oligonucleotide
ucuacaccacccugagcga

SEQ ID NO: 25601 - RNA, 19 nt, Artificial Sequence
  Description of Artificial Sequence: Synthetic oligonucleotide
gggauccugcucugggaga

SEQ ID NO: 25602 - RNA, 19 nt, Artificial Sequence
  Description of Artificial Sequence: Synthetic oligonucleotide
ggauccugcucugggagau

SEQ ID NO: 25603 - RNA, 19 nt, Artificial Sequence
  Description of Artificial Sequence: Synthetic oligonucleotide
gauccugcucugggagauc

SEQ ID NO: 25604 - RNA, 19 nt, Artificial Sequence
  Description of Artificial Sequence: Synthetic oligonucleotide
cugcucugggagaucuuca

SEQ ID NO: 25605 - RNA, 19 nt, Artificial Sequence
  Description of Artificial Sequence: Synthetic oligonucleotide
ugcucugggagaucuucac

SEQ ID NO: 25606 - RNA, 19 nt, Artificial Sequence
  Description of Artificial Sequence: Synthetic oligonucleotide
gcucugggagaucuucacc

SEQ ID NO: 25607 - RNA, 19 nt, Artificial Sequence
  Description of Artificial Sequence: Synthetic oligonucleotide
guggcaccccuuacccaga

SEQ ID NO: 25608 - RNA, 19 nt, Artificial Sequence
  Description of Artificial Sequence: Synthetic oligonucleotide
uuuacaucuaugugccaga

SEQ ID NO: 25609 - RNA, 19 nt, Artificial Sequence
  Description of Artificial Sequence: Synthetic oligonucleotide
uauguggacccgaugcagc

SEQ ID NO: 25610 - RNA, 19 nt, Artificial Sequence
  Description of Artificial Sequence: Synthetic oligonucleotide
auguggacccgaugcagcu

SEQ ID NO: 25611 - RNA, 19 nt, Artificial Sequence
  Description of Artificial Sequence: Synthetic oligonucleotide
uguggacccgaugcagcug

SEQ ID NO: 25612 - RNA, 19 nt, Artificial Sequence
  Description of Artificial Sequence: Synthetic oligonucleotide
ggacccgaugcagcugccu

SEQ ID NO: 25613 - RNA, 19 nt, Artificial Sequence
  Description of Artificial Sequence: Synthetic oligonucleotide
gacccgaugcagcugccuu

SEQ ID NO: 25614 - RNA, 19 nt, Artificial Sequence
  Description of Artificial Sequence: Synthetic oligonucleotide
acccgaugcagcugccuua

SEQ ID NO: 25615 - RNA, 19 nt, Artificial Sequence
  Description of Artificial Sequence: Synthetic oligonucleotide
cccgaugcagcugccuuau

SEQ ID NO: 25616 - RNA, 19 nt, Artificial Sequence
  Description of Artificial Sequence: Synthetic oligonucleotide
ccgaugcagcugccuuaug

SEQ ID NO: 25617 - RNA, 19 nt, Artificial Sequence
  Description of Artificial Sequence: Synthetic oligonucleotide
cgaugcagcugccuuauga

SEQ ID NO: 25618 - RNA, 19 nt, Artificial Sequence
  Description of Artificial Sequence: Synthetic oligonucleotide
gaugcagcugccuuaugac

SEQ ID NO: 25619 - RNA, 19 nt, Artificial Sequence
  Description of Artificial Sequence: Synthetic oligonucleotide
gcagcugccuuaugacuca

SEQ ID NO: 25620 - RNA, 19 nt, Artificial Sequence
  Description of Artificial Sequence: Synthetic oligonucleotide
cagcugccuuaugacucaa

SEQ ID NO: 25621 - RNA, 19 nt, Artificial Sequence
  Description of Artificial Sequence: Synthetic oligonucleotide
cugaagauaaugacucacc

SEQ ID NO: 25622 - RNA, 19 nt, Artificial Sequence
  Description of Artificial Sequence: Synthetic oligonucleotide
ugaagauaaugacucaccu

SEQ ID NO: 25623 - RNA, 19 nt, Artificial Sequence
  Description of Artificial Sequence: Synthetic oligonucleotide
uugugaagaucugugacuu

SEQ ID NO: 25624 - RNA, 19 nt, Artificial Sequence
  Description of Artificial Sequence: Synthetic oligonucleotide
ugugaagaucugugacuuu

SEQ ID NO: 25625 - RNA, 19 nt, Artificial Sequence
  Description of Artificial Sequence: Synthetic oligonucleotide
ugaaguggauggcuccuga

SEQ ID NO: 25626 - RNA, 19 nt, Artificial Sequence
  Description of Artificial Sequence: Synthetic oligonucleotide
gaaguggauggcuccugag

SEQ ID NO: 25627 - RNA, 19 nt, Artificial Sequence
  Description of Artificial Sequence: Synthetic oligonucleotide
ggcuccugagagcaucuuu

SEQ ID NO: 25628 - RNA, 19 nt, Artificial Sequence
  Description of Artificial Sequence: Synthetic oligonucleotide
ccucuacaccacacugagu

SEQ ID NO: 25629 - RNA, 19 nt, Artificial Sequence
  Description of Artificial Sequence: Synthetic oligonucleotide
cucuacaccacacugagug

SEQ ID NO: 25630 - RNA, 19 nt, Artificial Sequence
  Description of Artificial Sequence: Synthetic oligonucleotide
ucuacaccacacugaguga

SEQ ID NO: 25631 - RNA, 19 nt, Artificial Sequence
  Description of Artificial Sequence: Synthetic oligonucleotide
ggcauucugcucugggaga

SEQ ID NO: 25632 - RNA, 19 nt, Artificial Sequence
  Description of Artificial Sequence: Synthetic oligonucleotide
gcauucugcucugggagau

SEQ ID NO: 25633 - RNA, 19 nt, Artificial Sequence
  Description of Artificial Sequence: Synthetic oligonucleotide
cauucugcucugggagauc

SEQ ID NO: 25634 - RNA, 19 nt, Artificial Sequence
  Description of Artificial Sequence: Synthetic oligonucleotide
ucugcucugggagaucuuu

SEQ ID NO: 25635 - RNA, 19 nt, Artificial Sequence
  Description of Artificial Sequence: Synthetic oligonucleotide
cugcucugggagaucuuuu

SEQ ID NO: 25636 - RNA, 19 nt, Artificial Sequence
  Description of Artificial Sequence: Synthetic oligonucleotide
ugcucugggagaucuuuuc

SEQ ID NO: 25637 - RNA, 19 nt, Artificial Sequence
  Description of Artificial Sequence: Synthetic oligonucleotide
gcucugggagaucuuuucc

SEQ ID NO: 25638 - RNA, 19 nt, Artificial Sequence
  Description of Artificial Sequence: Synthetic oligonucleotide
ugguggcaccccuuacccc

SEQ ID NO: 25639 - RNA, 19 nt, Artificial Sequence
  Description of Artificial Sequence: Synthetic oligonucleotide
guggcaccccuuaccccgg

SEQ ID NO: 25640 - RNA, 19 nt, Artificial Sequence
  Description of Artificial Sequence: Synthetic oligonucleotide
uaccggauggccaagccug

SEQ ID NO: 25641 - RNA, 19 nt, Artificial Sequence
  Description of Artificial Sequence: Synthetic oligonucleotide
uacaucuuugugccagauc

SEQ ID NO: 25642 - RNA, 19 nt, Artificial Sequence
  Description of Artificial Sequence: Synthetic oligonucleotide
acaucuuugugccagaucc

SEQ ID NO: 25643 - RNA, 19 nt, Artificial Sequence
  Description of Artificial Sequence: Synthetic oligonucleotide
cugaagaucaugagucacc

SEQ ID NO: 25644 - RNA, 19 nt, Artificial Sequence
  Description of Artificial Sequence: Synthetic oligonucleotide
ugaagaucaugagucaccu

SEQ ID NO: 25645 - RNA, 19 nt, Artificial Sequence
  Description of Artificial Sequence: Synthetic oligonucleotide
uguugggggccugcaccaa

SEQ ID NO: 25646 - RNA, 19 nt, Artificial Sequence
  Description of Artificial Sequence: Synthetic oligonucleotide
guggcuacauggacaugag

SEQ ID NO: 25647 - RNA, 19 nt, Artificial Sequence
  Description of Artificial Sequence: Synthetic oligonucleotide
uggucaagaucugugacuu

SEQ ID NO: 25648 - RNA, 19 nt, Artificial Sequence
  Description of Artificial Sequence: Synthetic oligonucleotide
ggucaagaucugugacuuu

SEQ ID NO: 25649 - RNA, 19 nt, Artificial Sequence
  Description of Artificial Sequence: Synthetic oligonucleotide
ugugacuuuggccuggcuc

SEQ ID NO: 25650 - RNA, 19 nt, Artificial Sequence
  Description of Artificial Sequence: Synthetic oligonucleotide
gugacuuuggccuggcucg

SEQ ID NO: 25651 - RNA, 19 nt, Artificial Sequence
  Description of Artificial Sequence: Synthetic oligonucleotide
ugacuuuggccuggcucga

SEQ ID NO: 25652 - RNA, 19 nt, Artificial Sequence
  Description of Artificial Sequence: Synthetic oligonucleotide
gacuuuggccuggcucgag

SEQ ID NO: 25653 - RNA, 19 nt, Artificial Sequence
  Description of Artificial Sequence: Synthetic oligonucleotide
acuuuggccuggcucgaga

SEQ ID NO: 25654 - RNA, 19 nt, Artificial Sequence
  Description of Artificial Sequence: Synthetic oligonucleotide
cuuuggccuggcucgagac

SEQ ID NO: 25655 - RNA, 19 nt, Artificial Sequence
  Description of Artificial Sequence: Synthetic oligonucleotide
uuuggccuggcucgagaca

SEQ ID NO: 25656 - RNA, 19 nt, Artificial Sequence
  Description of Artificial Sequence: Synthetic oligonucleotide
uuggccuggcucgagacau

SEQ ID NO: 25657 - RNA, 19 nt, Artificial Sequence
  Description of Artificial Sequence: Synthetic oligonucleotide
uggccuggcucgagacauc

SEQ ID NO: 25658 - RNA, 19 nt, Artificial Sequence
  Description of Artificial Sequence: Synthetic oligonucleotide
ggccuggcucgagacauca

SEQ ID NO: 25659 - RNA, 19 nt, Artificial Sequence
  Description of Artificial Sequence: Synthetic oligonucleotide
gccuggcucgagacaucau

SEQ ID NO: 25660 - RNA, 19 nt, Artificial Sequence
  Description of Artificial Sequence: Synthetic oligonucleotide
ccuggcucgagacaucaug

SEQ ID NO: 25661 - RNA, 19 nt, Artificial Sequence
  Description of Artificial Sequence: Synthetic oligonucleotide
cuggcucgagacaucaugc

SEQ ID NO: 25662 - RNA, 19 nt, Artificial Sequence
  Description of Artificial Sequence: Synthetic oligonucleotide
acagccucuacaccacccu

SEQ ID NO: 25663 - RNA, 19 nt, Artificial Sequence
  Description of Artificial Sequence: Synthetic oligonucleotide
cagccucuacaccacccug

SEQ ID NO: 25664 - RNA, 19 nt, Artificial Sequence
  Description of Artificial Sequence: Synthetic oligonucleotide
agccucuacaccacccuga

SEQ ID NO: 25665 - RNA, 19 nt, Artificial Sequence
  Description of Artificial Sequence: Synthetic oligonucleotide
gccucuacaccacccugag

SEQ ID NO: 25666 - RNA, 19 nt, Artificial Sequence
  Description of Artificial Sequence: Synthetic oligonucleotide
ccuuggguggcaccccuua

SEQ ID NO: 25667 - RNA, 19 nt, Artificial Sequence
  Description of Artificial Sequence: Synthetic oligonucleotide
cuuggguggcaccccuuac

SEQ ID NO: 25668 - RNA, 19 nt, Artificial Sequence
  Description of Artificial Sequence: Synthetic oligonucleotide
uuggguggcaccccuuacc

SEQ ID NO: 25669 - RNA, 19 nt, Artificial Sequence
  Description of Artificial Sequence: Synthetic oligonucleotide
ggguggcaccccuuaccca

SEQ ID NO: 25670 - RNA, 19 nt, Artificial Sequence
  Description of Artificial Sequence: Synthetic oligonucleotide
uaccgcauggcccagccug

SEQ ID NO: 25671 - RNA, 19 nt, Artificial Sequence
  Description of Artificial Sequence: Synthetic oligonucleotide
accucccaggauauccugg

SEQ ID NO: 25672 - RNA, 19 nt, Artificial Sequence
  Description of Artificial Sequence: Synthetic oligonucleotide
cucaugucugaacugaaga

SEQ ID NO: 25673 - RNA, 19 nt, Artificial Sequence
  Description of Artificial Sequence: Synthetic oligonucleotide
ucaugucugaacugaagau

SEQ ID NO: 25674 - RNA, 19 nt, Artificial Sequence
  Description of Artificial Sequence: Synthetic oligonucleotide
aacuugcugggagccugca

SEQ ID NO: 25675 - RNA, 19 nt, Artificial Sequence
  Description of Artificial Sequence: Synthetic oligonucleotide
acuugcugggagccugcac

SEQ ID NO: 25676 - RNA, 19 nt, Artificial Sequence
  Description of Artificial Sequence: Synthetic oligonucleotide
cuugcugggagccugcacc

SEQ ID NO: 25677 - RNA, 19 nt, Artificial Sequence
  Description of Artificial Sequence: Synthetic oligonucleotide
uugcugggagccugcacca

SEQ ID NO: 25678 - RNA, 19 nt, Artificial Sequence
  Description of Artificial Sequence: Synthetic oligonucleotide
gcugggagccugcaccaag

SEQ ID NO: 25679 - RNA, 19 nt, Artificial Sequence
  Description of Artificial Sequence: Synthetic oligonucleotide
caauggugacuacauggac

SEQ ID NO: 25680 - RNA, 19 nt, Artificial Sequence
  Description of Artificial Sequence: Synthetic oligonucleotide
aauggugacuacauggaca

SEQ ID NO: 25681 - RNA, 19 nt, Artificial Sequence
  Description of Artificial Sequence: Synthetic oligonucleotide
ugacuacauggacaugaag

SEQ ID NO: 25682 - RNA, 19 nt, Artificial Sequence
  Description of Artificial Sequence: Synthetic oligonucleotide
uggccagagacaucaugca

SEQ ID NO: 25683 - RNA, 19 nt, Artificial Sequence
  Description of Artificial Sequence: Synthetic oligonucleotide
aggcaguaccuuucugccc

SEQ ID NO: 25684 - RNA, 19 nt, Artificial Sequence
  Description of Artificial Sequence: Synthetic oligonucleotide
gagccggagaagagacccu

SEQ ID NO: 25685 - RNA, 19 nt, Artificial Sequence
  Description of Artificial Sequence: Synthetic oligonucleotide
ggacuuccugaagagugac

SEQ ID NO: 25686 - RNA, 19 nt, Artificial Sequence
  Description of Artificial Sequence: Synthetic oligonucleotide
gacuuccugaagagugacc

SEQ ID NO: 25687 - RNA, 19 nt, Artificial Sequence
  Description of Artificial Sequence: Synthetic oligonucleotide
acuuccugaagagugacca

SEQ ID NO: 25688 - RNA, 19 nt, Artificial Sequence
  Description of Artificial Sequence: Synthetic oligonucleotide
uuccugaagagugaccauc

SEQ ID NO: 25689 - RNA, 19 nt, Artificial Sequence
  Description of Artificial Sequence: Synthetic oligonucleotide
uccugaagagugaccaucc

SEQ ID NO: 25690 - RNA, 19 nt, Artificial Sequence
  Description of Artificial Sequence: Synthetic oligonucleotide
aucaucucccuuaucaucc

SEQ ID NO: 25691 - RNA, 19 nt, Artificial Sequence
  Description of Artificial Sequence: Synthetic oligonucleotide
ucaucucccuuaucauccu

SEQ ID NO: 25692 - RNA, 19 nt, Artificial Sequence
  Description of Artificial Sequence: Synthetic oligonucleotide
aucuacguggaccccaugc

SEQ ID NO: 25693 - RNA, 19 nt, Artificial Sequence
  Description of Artificial Sequence: Synthetic oligonucleotide
ucuacguggaccccaugca

SEQ ID NO: 25694 - RNA, 19 nt, Artificial Sequence
  Description of Artificial Sequence: Synthetic oligonucleotide
cuacguggaccccaugcag

SEQ ID NO: 25695 - RNA, 19 nt, Artificial Sequence
  Description of Artificial Sequence: Synthetic oligonucleotide
aucaucacugaguacugcc

SEQ ID NO: 25696 - RNA, 19 nt, Artificial Sequence
  Description of Artificial Sequence: Synthetic oligonucleotide
ggcauggaguuucuggccu

SEQ ID NO: 25697 - RNA, 19 nt, Artificial Sequence
  Description of Artificial Sequence: Synthetic oligonucleotide
gcauggaguuucuggccuc

SEQ ID NO: 25698 - RNA, 19 nt, Artificial Sequence
  Description of Artificial Sequence: Synthetic oligonucleotide
auggaguuucuggccucca

SEQ ID NO: 25699 - RNA, 19 nt, Artificial Sequence
  Description of Artificial Sequence: Synthetic oligonucleotide
uggaguuucuggccuccaa

SEQ ID NO: 25700 - RNA, 19 nt, Artificial Sequence
  Description of Artificial Sequence: Synthetic oligonucleotide
gcuccggagagcaucuuca

SEQ ID NO: 25701 - RNA, 19 nt, Artificial Sequence
  Description of Artificial Sequence: Synthetic oligonucleotide
cuccggagagcaucuucaa

SEQ ID NO: 25702 - RNA, 19 nt, Artificial Sequence
  Description of Artificial Sequence: Synthetic oligonucleotide
uccggagagcaucuucaac

SEQ ID NO: 25703 - RNA, 19 nt, Artificial Sequence
  Description of Artificial Sequence: Synthetic oligonucleotide
ccggagagcaucuucaaca

SEQ ID NO: 25704 - RNA, 19 nt, Artificial Sequence
  Description of Artificial Sequence: Synthetic oligonucleotide
gagagcaucuucaacagcc

SEQ ID NO: 25705 - RNA, 19 nt, Artificial Sequence
  Description of Artificial Sequence: Synthetic oligonucleotide
agagcaucuucaacagccu

SEQ ID NO: 25706 - RNA, 19 nt, Artificial Sequence
  Description of Artificial Sequence: Synthetic oligonucleotide
gagcaucuucaacagccuc

SEQ ID NO: 25707 - RNA, 19 nt, Artificial Sequence
  Description of Artificial Sequence: Synthetic oligonucleotide
agcaucuucaacagccucu

SEQ ID NO: 25708 - RNA, 19 nt, Artificial Sequence
  Description of Artificial Sequence: Synthetic oligonucleotide
gcaucuucaacagccucua

SEQ ID NO: 25709 - RNA, 19 nt, Artificial Sequence
  Description of Artificial Sequence: Synthetic oligonucleotide
caucuucaacagccucuac

SEQ ID NO: 25710 - RNA, 19 nt, Artificial Sequence
  Description of Artificial Sequence: Synthetic oligonucleotide
aucuucaacagccucuaca

SEQ ID NO: 25711 - RNA, 19 nt, Artificial Sequence
  Description of Artificial Sequence: Synthetic oligonucleotide
ucuucaacagccucuacac

SEQ ID NO: 25712 - RNA, 19 nt, Artificial Sequence
  Description of Artificial Sequence: Synthetic oligonucleotide
cuucaacagccucuacacc

SEQ ID NO: 25713 - RNA, 19 nt, Artificial Sequence
  Description of Artificial Sequence: Synthetic oligonucleotide
uucaacagccucuacacca

SEQ ID NO: 25714 - RNA, 19 nt, Artificial Sequence
  Description of Artificial Sequence: Synthetic oligonucleotide
ucaacagccucuacaccac

SEQ ID NO: 25715 - RNA, 19 nt, Artificial Sequence
  Description of Artificial Sequence: Synthetic oligonucleotide
cuacaccacccugagcgac

SEQ ID NO: 25716 - RNA, 19 nt, Artificial Sequence
  Description of Artificial Sequence: Synthetic oligonucleotide
uacaccacccugagcgacg

SEQ ID NO: 25717 - RNA, 19 nt, Artificial Sequence
  Description of Artificial Sequence: Synthetic oligonucleotide
acaccacccugagcgacgu

SEQ ID NO: 25718 - RNA, 19 nt, Artificial Sequence
  Description of Artificial Sequence: Synthetic oligonucleotide
cgggauccugcucugggag

SEQ ID NO: 25719 - RNA, 19 nt, Artificial Sequence
  Description of Artificial Sequence: Synthetic oligonucleotide
cuauaucaucccccugccu

SEQ ID NO: 25720 - RNA, 19 nt, Artificial Sequence
  Description of Artificial Sequence: Synthetic oligonucleotide
uauaucaucccccugccug

SEQ ID NO: 25721 - RNA, 19 nt, Artificial Sequence
  Description of Artificial Sequence: Synthetic oligonucleotide
auaucaucccccugccuga

SEQ ID NO: 25722 - RNA, 19 nt, Artificial Sequence
  Description of Artificial Sequence: Synthetic oligonucleotide
uaucaucccccugccugac

SEQ ID NO: 25723 - RNA, 19 nt, Artificial Sequence
  Description of Artificial Sequence: Synthetic oligonucleotide
aucaucccccugccugacc

SEQ ID NO: 25724 - RNA, 19 nt, Artificial Sequence
  Description of Artificial Sequence: Synthetic oligonucleotide
ccugggcaaaagggacaaa

SEQ ID NO: 25725 - RNA, 19 nt, Artificial Sequence
  Description of Artificial Sequence: Synthetic oligonucleotide
uuacaucuaugugccagac

SEQ ID NO: 25726 - RNA, 19 nt, Artificial Sequence
  Description of Artificial Sequence: Synthetic oligonucleotide
caucuaugugccagaccca

SEQ ID NO: 25727 - RNA, 19 nt, Artificial Sequence
  Description of Artificial Sequence: Synthetic oligonucleotide
ucuggagcguuugggaagg

SEQ ID NO: 25728 - RNA, 19 nt, Artificial Sequence
  Description of Artificial Sequence: Synthetic oligonucleotide
cuggagcguuugggaaggu

SEQ ID NO: 25729 - RNA, 19 nt, Artificial Sequence
  Description of Artificial Sequence: Synthetic oligonucleotide
uggagcguuugggaaggug

SEQ ID NO: 25730 - RNA, 19 nt, Artificial Sequence
  Description of Artificial Sequence: Synthetic oligonucleotide
ggagcguuugggaaggugg

SEQ ID NO: 25731 - RNA, 19 nt, Artificial Sequence
  Description of Artificial Sequence: Synthetic oligonucleotide
gagcguuugggaagguggu

SEQ ID NO: 25732 - RNA, 19 nt, Artificial Sequence
  Description of Artificial Sequence: Synthetic oligonucleotide
uuugggaaggugguugaag

SEQ ID NO: 25733 - RNA, 19 nt, Artificial Sequence
  Description of Artificial Sequence: Synthetic oligonucleotide
aagaugcuaaaacccacgg

SEQ ID NO: 25734 - RNA, 19 nt, Artificial Sequence
  Description of Artificial Sequence: Synthetic oligonucleotide
agaugcuaaaacccacggc

SEQ ID NO: 25735 - RNA, 19 nt, Artificial Sequence
  Description of Artificial Sequence: Synthetic oligonucleotide
gaugcuaaaacccacggcc

SEQ ID NO: 25736 - RNA, 19 nt, Artificial Sequence
  Description of Artificial Sequence: Synthetic oligonucleotide
augucugaacugaagauaa

SEQ ID NO: 25737 - RNA, 19 nt, Artificial Sequence
  Description of Artificial Sequence: Synthetic oligonucleotide
ugucugaacugaagauaau

SEQ ID NO: 25738 - RNA, 19 nt, Artificial Sequence
  Description of Artificial Sequence: Synthetic oligonucleotide
gucugaacugaagauaaug

SEQ ID NO: 25739 - RNA, 19 nt, Artificial Sequence
  Description of Artificial Sequence: Synthetic oligonucleotide
ucugaacugaagauaauga

SEQ ID NO: 25740 - RNA, 19 nt, Artificial Sequence
  Description of Artificial Sequence: Synthetic oligonucleotide
gaacugaagauaaugacuc

SEQ ID NO: 25741 - RNA, 19 nt, Artificial Sequence
  Description of Artificial Sequence: Synthetic oligonucleotide
aacugaagauaaugacuca

SEQ ID NO: 25742 - RNA, 19 nt, Artificial Sequence
  Description of Artificial Sequence: Synthetic oligonucleotide
acugaagauaaugacucac

SEQ ID NO: 25743 - RNA, 19 nt, Artificial Sequence
  Description of Artificial Sequence: Synthetic oligonucleotide
aggccccauuuacaucauc

SEQ ID NO: 25744 - RNA, 19 nt, Artificial Sequence
  Description of Artificial Sequence: Synthetic oligonucleotide
ggccccauuuacaucauca

SEQ ID NO: 25745 - RNA, 19 nt, Artificial Sequence
  Description of Artificial Sequence: Synthetic oligonucleotide
gccccauuuacaucaucac

SEQ ID NO: 25746 - RNA, 19 nt, Artificial Sequence
  Description of Artificial Sequence: Synthetic oligonucleotide
cccauuuacaucaucacag

SEQ ID NO: 25747 - RNA, 19 nt, Artificial Sequence
  Description of Artificial Sequence: Synthetic oligonucleotide
ccauuuacaucaucacaga

SEQ ID NO: 25748 - RNA, 19 nt, Artificial Sequence
  Description of Artificial Sequence: Synthetic oligonucleotide
cauuuacaucaucacagag

SEQ ID NO: 25749 - RNA, 19 nt, Artificial Sequence
  Description of Artificial Sequence: Synthetic oligonucleotide
auuuacaucaucacagagu

SEQ ID NO: 25750 - RNA, 19 nt, Artificial Sequence
  Description of Artificial Sequence: Synthetic oligonucleotide
uuuacaucaucacagagua

SEQ ID NO: 25751 - RNA, 19 nt, Artificial Sequence
  Description of Artificial Sequence: Synthetic oligonucleotide
uacaucaucacagaguauu

SEQ ID NO: 25752 - RNA, 19 nt, Artificial Sequence
  Description of Artificial Sequence: Synthetic oligonucleotide
acaucaucacagaguauug

SEQ ID NO: 25753 - RNA, 19 nt, Artificial Sequence
  Description of Artificial Sequence: Synthetic oligonucleotide
caucaucacagaguauugc

SEQ ID NO: 25754 - RNA, 19 nt, Artificial Sequence
  Description of Artificial Sequence: Synthetic oligonucleotide
cuacauggacaugaagcag

SEQ ID NO: 25755 - RNA, 19 nt, Artificial Sequence
  Description of Artificial Sequence: Synthetic oligonucleotide
uacauggacaugaagcagg

SEQ ID NO: 25756 - RNA, 19 nt, Artificial Sequence
  Description of Artificial Sequence: Synthetic oligonucleotide
aguauguccccaugcuaga

SEQ ID NO: 25757 - RNA, 19 nt, Artificial Sequence
  Description of Artificial Sequence: Synthetic oligonucleotide
uauguccccaugcuagaaa

SEQ ID NO: 25758 - RNA, 19 nt, Artificial Sequence
  Description of Artificial Sequence: Synthetic oligonucleotide
cccaugcuagaaaggaaag

SEQ ID NO: 25759 - RNA, 19 nt, Artificial Sequence
  Description of Artificial Sequence: Synthetic oligonucleotide
gagacaucaugcaugauuc

SEQ ID NO: 25760 - RNA, 19 nt, Artificial Sequence
  Description of Artificial Sequence: Synthetic oligonucleotide
agacaucaugcaugauucg

SEQ ID NO: 25761 - RNA, 19 nt, Artificial Sequence
  Description of Artificial Sequence: Synthetic oligonucleotide
gacaucaugcaugauucga

SEQ ID NO: 25762 - RNA, 19 nt, Artificial Sequence
  Description of Artificial Sequence: Synthetic oligonucleotide
acaucaugcaugauucgaa

SEQ ID NO: 25763 - RNA, 19 nt, Artificial Sequence
  Description of Artificial Sequence: Synthetic oligonucleotide
ucgaaaggcaguaccuuuc

SEQ ID NO: 25764 - RNA, 19 nt, Artificial Sequence
  Description of Artificial Sequence: Synthetic oligonucleotide
cgaaaggcaguaccuuucu

SEQ ID NO: 25765 - RNA, 19 nt, Artificial Sequence
  Description of Artificial Sequence: Synthetic oligonucleotide
gaaaggcaguaccuuucug

SEQ ID NO: 25766 - RNA, 19 nt, Artificial Sequence
  Description of Artificial Sequence: Synthetic oligonucleotide
ugcccgugaaguggauggc

SEQ ID NO: 25767 - RNA, 19 nt, Artificial Sequence
  Description of Artificial Sequence: Synthetic oligonucleotide
gcccgugaaguggauggcu

SEQ ID NO: 25768 - RNA, 19 nt, Artificial Sequence
  Description of Artificial Sequence: Synthetic oligonucleotide
cccgugaaguggauggcuc

SEQ ID NO: 25769 - RNA, 19 nt, Artificial Sequence
  Description of Artificial Sequence: Synthetic oligonucleotide
ccgugaaguggauggcucc

SEQ ID NO: 25770 - RNA, 19 nt, Artificial Sequence
  Description of Artificial Sequence: Synthetic oligonucleotide
gagagcaucuuugacaacc

SEQ ID NO: 25771 - RNA, 19 nt, Artificial Sequence
  Description of Artificial Sequence: Synthetic oligonucleotide
agagcaucuuugacaaccu

SEQ ID NO: 25772 - RNA, 19 nt, Artificial Sequence
  Description of Artificial Sequence: Synthetic oligonucleotide
gagcaucuuugacaaccuc

SEQ ID NO: 25773 - RNA, 19 nt, Artificial Sequence
  Description of Artificial Sequence: Synthetic oligonucleotide
agcaucuuugacaaccucu

SEQ ID NO: 25774 - RNA, 19 nt, Artificial Sequence
  Description of Artificial Sequence: Synthetic oligonucleotide
gcaucuuugacaaccucua

SEQ ID NO: 25775 - RNA, 19 nt, Artificial Sequence
  Description of Artificial Sequence: Synthetic oligonucleotide
caucuuugacaaccucuac

SEQ ID NO: 25776 - RNA, 19 nt, Artificial Sequence
  Description of Artificial Sequence: Synthetic oligonucleotide
aucuuugacaaccucuaca

SEQ ID NO: 25777 - RNA, 19 nt, Artificial Sequence
  Description of Artificial Sequence: Synthetic oligonucleotide
ucuuugacaaccucuacac

SEQ ID NO: 25778 - RNA, 19 nt, Artificial Sequence
  Description of Artificial Sequence: Synthetic oligonucleotide
cuuugacaaccucuacacc

SEQ ID NO: 25779 - RNA, 19 nt, Artificial Sequence
  Description of Artificial Sequence: Synthetic oligonucleotide
uuugacaaccucuacacca

SEQ ID NO: 25780 - RNA, 19 nt, Artificial Sequence
  Description of Artificial Sequence: Synthetic oligonucleotide
uugacaaccucuacaccac

SEQ ID NO: 25781 - RNA, 19 nt, Artificial Sequence
  Description of Artificial Sequence: Synthetic oligonucleotide
gacaaccucuacaccacac

SEQ ID NO: 25782 - RNA, 19 nt, Artificial Sequence
  Description of Artificial Sequence: Synthetic oligonucleotide
cucugggagaucuuuuccc

SEQ ID NO: 25783 - RNA, 19 nt, Artificial Sequence
  Description of Artificial Sequence: Synthetic oligonucleotide
ucugggagaucuuuucccu

SEQ ID NO: 25784 - RNA, 19 nt, Artificial Sequence
  Description of Artificial Sequence: Synthetic oligonucleotide
ucccuugguggcaccccuu

SEQ ID NO: 25785 - RNA, 19 nt, Artificial Sequence
  Description of Artificial Sequence: Synthetic oligonucleotide
auggccaagccugaccacg

SEQ ID NO: 25786 - RNA, 19 nt, Artificial Sequence
  Description of Artificial Sequence: Synthetic oligonucleotide
uggccaagccugaccacgc

SEQ ID NO: 25787 - RNA, 19 nt, Artificial Sequence
  Description of Artificial Sequence: Synthetic oligonucleotide
ucuacgagaucauggugaa

SEQ ID NO: 25788 - RNA, 19 nt, Artificial Sequence
  Description of Artificial Sequence: Synthetic oligonucleotide
gagaucauggugaaaugcu

SEQ ID NO: 25789 - RNA, 19 nt, Artificial Sequence
  Description of Artificial Sequence: Synthetic oligonucleotide
agaucauggugaaaugcug

SEQ ID NO: 25790 - RNA, 19 nt, Artificial Sequence
  Description of Artificial Sequence: Synthetic oligonucleotide
gaucauggugaaaugcugg

SEQ ID NO: 25791 - RNA, 19 nt, Artificial Sequence
  Description of Artificial Sequence: Synthetic oligonucleotide
cugaagagugaccauccug

SEQ ID NO: 25792 - RNA, 19 nt, Artificial Sequence
  Description of Artificial Sequence: Synthetic oligonucleotide
ugaagagugaccauccugc

SEQ ID NO: 25793 - RNA, 19 nt, Artificial Sequence
  Description of Artificial Sequence: Synthetic oligonucleotide
cuacaucauuccucugccu

SEQ ID NO: 25794 - RNA, 19 nt, Artificial Sequence
  Description of Artificial Sequence: Synthetic oligonucleotide
uacaucauuccucugccug

SEQ ID NO: 25795 - RNA, 19 nt, Artificial Sequence
  Description of Artificial Sequence: Synthetic oligonucleotide
acaucauuccucugccuga

SEQ ID NO: 25796 - RNA, 19 nt, Artificial Sequence
  Description of Artificial Sequence: Synthetic oligonucleotide
caucauuccucugccugac

SEQ ID NO: 25797 - RNA, 19 nt, Artificial Sequence
  Description of Artificial Sequence: Synthetic oligonucleotide
ccugggcaagaggaacaga

SEQ ID NO: 25798 - RNA, 19 nt, Artificial Sequence
  Description of Artificial Sequence: Synthetic oligonucleotide
cucuacaucuuugugccag

SEQ ID NO: 25799 - RNA, 19 nt, Artificial Sequence
  Description of Artificial Sequence: Synthetic oligonucleotide
cuacaucuuugugccagau

SEQ ID NO: 25800 - RNA, 19 nt, Artificial Sequence
  Description of Artificial Sequence: Synthetic oligonucleotide
gaggccuacccaccgccca

SEQ ID NO: 25801 - RNA, 19 nt, Artificial Sequence
  Description of Artificial Sequence: Synthetic oligonucleotide
aggccuacccaccgcccac

SEQ ID NO: 25802 - RNA, 19 nt, Artificial Sequence
  Description of Artificial Sequence: Synthetic oligonucleotide
agcugcccuaugacuccac

SEQ ID NO: 25803 - RNA, 19 nt, Artificial Sequence
  Description of Artificial Sequence: Synthetic oligonucleotide
aagaugcuuaaauccacag

SEQ ID NO: 25804 - RNA, 19 nt, Artificial Sequence
  Description of Artificial Sequence: Synthetic oligonucleotide
agaugcuuaaauccacagc

SEQ ID NO: 25805 - RNA, 19 nt, Artificial Sequence
  Description of Artificial Sequence: Synthetic oligonucleotide
gaugcuuaaauccacagcc

SEQ ID NO: 25806 - RNA, 19 nt, Artificial Sequence
  Description of Artificial Sequence: Synthetic oligonucleotide
aaccuguugggggccugca

SEQ ID NO: 25807 - RNA, 19 nt, Artificial Sequence
  Description of Artificial Sequence: Synthetic oligonucleotide
accuguugggggccugcac

SEQ ID NO: 25808 - RNA, 19 nt, Artificial Sequence
  Description of Artificial Sequence: Synthetic oligonucleotide
ccuguugggggccugcacc

SEQ ID NO: 25809 - RNA, 19 nt, Artificial Sequence
  Description of Artificial Sequence: Synthetic oligonucleotide
cuguugggggccugcacca

SEQ ID NO: 25810 - RNA, 19 nt, Artificial Sequence
  Description of Artificial Sequence: Synthetic oligonucleotide
guugggggccugcaccaaa

SEQ ID NO: 25811 - RNA, 19 nt, Artificial Sequence
  Description of Artificial Sequence: Synthetic oligonucleotide
aggacccaucuauaucauc

SEQ ID NO: 25812 - RNA, 19 nt, Artificial Sequence
  Description of Artificial Sequence: Synthetic oligonucleotide
ggacccaucuauaucauca

SEQ ID NO: 25813 - RNA, 19 nt, Artificial Sequence
  Description of Artificial Sequence: Synthetic oligonucleotide
gacccaucuauaucaucac

SEQ ID NO: 25814 - RNA, 19 nt, Artificial Sequence
  Description of Artificial Sequence: Synthetic oligonucleotide
cccaucuauaucaucacug

SEQ ID NO: 25815 - RNA, 19 nt, Artificial Sequence
  Description of Artificial Sequence: Synthetic oligonucleotide
ccaucuauaucaucacuga

SEQ ID NO: 25816 - RNA, 19 nt, Artificial Sequence
  Description of Artificial Sequence: Synthetic oligonucleotide
caucuauaucaucacugag

SEQ ID NO: 25817 - RNA, 19 nt, Artificial Sequence
  Description of Artificial Sequence: Synthetic oligonucleotide
aucuauaucaucacugagu

SEQ ID NO: 25818 - RNA, 19 nt, Artificial Sequence
  Description of Artificial Sequence: Synthetic oligonucleotide
ucuauaucaucacugagua

SEQ ID NO: 25819 - RNA, 19 nt, Artificial Sequence
  Description of Artificial Sequence: Synthetic oligonucleotide
uauaucaucacugaguacu

SEQ ID NO: 25820 - RNA, 19 nt, Artificial Sequence
  Description of Artificial Sequence: Synthetic oligonucleotide
auaucaucacugaguacug

SEQ ID NO: 25821 - RNA, 19 nt, Artificial Sequence
  Description of Artificial Sequence: Synthetic oligonucleotide
uaucaucacugaguacugc

SEQ ID NO: 25822 - RNA, 19 nt, Artificial Sequence
  Description of Artificial Sequence: Synthetic oligonucleotide
cgacgguggcuacauggac

SEQ ID NO: 25823 - RNA, 19 nt, Artificial Sequence
  Description of Artificial Sequence: Synthetic oligonucleotide
gacgguggcuacauggaca

SEQ ID NO: 25824 - RNA, 19 nt, Artificial Sequence
  Description of Artificial Sequence: Synthetic oligonucleotide
gagacaucaugcgggacuc

SEQ ID NO: 25825 - RNA, 19 nt, Artificial Sequence
  Description of Artificial Sequence: Synthetic oligonucleotide
agacaucaugcgggacucg

SEQ ID NO: 25826 - RNA, 19 nt, Artificial Sequence
  Description of Artificial Sequence: Synthetic oligonucleotide
gacaucaugcgggacucga

SEQ ID NO: 25827 - RNA, 19 nt, Artificial Sequence
  Description of Artificial Sequence: Synthetic oligonucleotide
acaucaugcgggacucgaa

SEQ ID NO: 25828 - RNA, 19 nt, Artificial Sequence
  Description of Artificial Sequence: Synthetic oligonucleotide
ucuccaaaggcagcaccuu

SEQ ID NO: 25829 - RNA, 19 nt, Artificial Sequence
  Description of Artificial Sequence: Synthetic oligonucleotide
cuccaaaggcagcaccuuu

SEQ ID NO: 25830 - RNA, 19 nt, Artificial Sequence
  Description of Artificial Sequence: Synthetic oligonucleotide
uccaaaggcagcaccuuuu

SEQ ID NO: 25831 - RNA, 19 nt, Artificial Sequence
  Description of Artificial Sequence: Synthetic oligonucleotide
ccaaaggcagcaccuuuuu

SEQ ID NO: 25832 - RNA, 19 nt, Artificial Sequence
  Description of Artificial Sequence: Synthetic oligonucleotide
caaaggcagcaccuuuuug

SEQ ID NO: 25833 - RNA, 19 nt, Artificial Sequence
  Description of Artificial Sequence: Synthetic oligonucleotide
aggcagcaccuuuuugccu

SEQ ID NO: 25834 - RNA, 19 nt, Artificial Sequence
  Description of Artificial Sequence: Synthetic oligonucleotide
ugccuuuaaaguggauggc

SEQ ID NO: 25835 - RNA, 19 nt, Artificial Sequence
  Description of Artificial Sequence: Synthetic oligonucleotide
gccuuuaaaguggauggcu

SEQ ID NO: 25836 - RNA, 19 nt, Artificial Sequence
  Description of Artificial Sequence: Synthetic oligonucleotide
ccuuuaaaguggauggcuc

SEQ ID NO: 25837 - RNA, 19 nt, Artificial Sequence
  Description of Artificial Sequence: Synthetic oligonucleotide
cuuuaaaguggauggcucc

SEQ ID NO: 25838 - RNA, 19 nt, Artificial Sequence
  Description of Artificial Sequence: Synthetic oligonucleotide
uuaaaguggauggcuccgg

SEQ ID NO: 25839 - RNA, 19 nt, Artificial Sequence
  Description of Artificial Sequence: Synthetic oligonucleotide
aacagccucuacaccaccc

SEQ ID NO: 25840 - RNA, 19 nt, Artificial Sequence
  Description of Artificial Sequence: Synthetic oligonucleotide
cucugggagaucuucaccu

SEQ ID NO: 25841 - RNA, 19 nt, Artificial Sequence
  Description of Artificial Sequence: Synthetic oligonucleotide
ucugggagaucuucaccuu

SEQ ID NO: 25842 - RNA, 19 nt, Artificial Sequence
  Description of Artificial Sequence: Synthetic oligonucleotide
uggcaccccuuacccagag

SEQ ID NO: 25843 - RNA, 19 nt, Artificial Sequence
  Description of Artificial Sequence: Synthetic oligonucleotide
uuucugaggagugaccacc

SEQ ID NO: 25844 - RNA, 19 nt, Artificial Sequence
  Description of Artificial Sequence: Synthetic oligonucleotide
uucugaggagugaccaccc

SEQ ID NO: 25845 - RNA, 19 nt, Artificial Sequence
  Description of Artificial Sequence: Synthetic oligonucleotide
cugaggagugaccacccag

SEQ ID NO: 25846 - RNA, 19 nt, Artificial Sequence
  Description of Artificial Sequence: Synthetic oligonucleotide
ugaggagugaccacccagc

SEQ ID NO: 25847 - RNA, 19 nt, Artificial Sequence
  Description of Artificial Sequence: Synthetic oligonucleotide
ccacccugaaugaagucaa

SEQ ID NO: 25848 - RNA, 19 nt, Artificial Sequence
  Description of Artificial Sequence: Synthetic oligonucleotide
gagcuagggaagagacccu

SEQ ID NO: 25849 - RNA, 19 nt, Artificial Sequence
  Description of Artificial Sequence: Synthetic oligonucleotide
auuuacaucuaugugccag

SEQ ID NO: 25850 - RNA, 19 nt, Artificial Sequence
  Description of Artificial Sequence: Synthetic oligonucleotide
ucaaccugcaugaagucaa

SEQ ID NO: 25851 - RNA, 19 nt, Artificial Sequence
  Description of Artificial Sequence: Synthetic oligonucleotide
caaccugcaugaagucaaa

SEQ ID NO: 25852 - RNA, 19 nt, Artificial Sequence
  Description of Artificial Sequence: Synthetic oligonucleotide
cgggccuacccaccuccca

SEQ ID NO: 25853 - RNA, 19 nt, Artificial Sequence
  Description of Artificial Sequence: Synthetic oligonucleotide
gggccuacccaccucccag

SEQ ID NO: 25854 - RNA, 19 nt, Artificial Sequence
  Description of Artificial Sequence: Synthetic oligonucleotide
ggccuacccaccucccagg

SEQ ID NO: 25855 - RNA, 19 nt, Artificial Sequence
  Description of Artificial Sequence: Synthetic oligonucleotide
aucaucucacuuauugucc

SEQ ID NO: 25856 - RNA, 19 nt, Artificial Sequence
  Description of Artificial Sequence: Synthetic oligonucleotide
ucaucucacuuauuguccu

SEQ ID NO: 25857 - RNA, 19 nt, Artificial Sequence
  Description of Artificial Sequence: Synthetic oligonucleotide
auuuauguggacccgaugc

SEQ ID NO: 25858 - RNA, 19 nt, Artificial Sequence
  Description of Artificial Sequence: Synthetic oligonucleotide
uuuauguggacccgaugca

SEQ ID NO: 25859 - RNA, 19 nt, Artificial Sequence
  Description of Artificial Sequence: Synthetic oligonucleotide
uuauguggacccgaugcag

SEQ ID NO: 25860 - RNA, 19 nt, Artificial Sequence
  Description of Artificial Sequence: Synthetic oligonucleotide
agcugccuuaugacucaag

SEQ ID NO: 25861 - RNA, 19 nt, Artificial Sequence
  Description of Artificial Sequence: Synthetic oligonucleotide
gcguuugggaaggugguug

SEQ ID NO: 25862 - RNA, 19 nt, Artificial Sequence
  Description of Artificial Sequence: Synthetic oligonucleotide
cguuugggaaggugguuga

SEQ ID NO: 25863 - RNA, 19 nt, Artificial Sequence
  Description of Artificial Sequence: Synthetic oligonucleotide
augaaaguugcagugaaga

SEQ ID NO: 25864 - RNA, 19 nt, Artificial Sequence
  Description of Artificial Sequence: Synthetic oligonucleotide
ugaaaguugcagugaagau

SEQ ID NO: 25865 - RNA, 19 nt, Artificial Sequence
  Description of Artificial Sequence: Synthetic oligonucleotide
gaaaguugcagugaagaug

SEQ ID NO: 25866 - RNA, 19 nt, Artificial Sequence
  Description of Artificial Sequence: Synthetic oligonucleotide
aaaguugcagugaagaugc

SEQ ID NO: 25867 - RNA, 19 nt, Artificial Sequence
  Description of Artificial Sequence: Synthetic oligonucleotide
aaguugcagugaagaugcu

SEQ ID NO: 25868 - RNA, 19 nt, Artificial Sequence
  Description of Artificial Sequence: Synthetic oligonucleotide
gaagauaaugacucaccug

SEQ ID NO: 25869 - RNA, 19 nt, Artificial Sequence
  Description of Artificial Sequence: Synthetic oligonucleotide
aagauaaugacucaccugg

SEQ ID NO: 25870 - RNA, 19 nt, Artificial Sequence
  Description of Artificial Sequence: Synthetic oligonucleotide
agauaaugacucaccuggg

SEQ ID NO: 25871 - RNA, 19 nt, Artificial Sequence
  Description of Artificial Sequence: Synthetic oligonucleotide
gauaaugacucaccugggg

SEQ ID NO: 25872 - RNA, 19 nt, Artificial Sequence
  Description of Artificial Sequence: Synthetic oligonucleotide
auaaugacucaccuggggc

SEQ ID NO: 25873 - RNA, 19 nt, Artificial Sequence
  Description of Artificial Sequence: Synthetic oligonucleotide
uaaugacucaccuggggcc

SEQ ID NO: 25874 - RNA, 19 nt, Artificial Sequence
  Description of Artificial Sequence: Synthetic oligonucleotide
augacucaccuggggccac

SEQ ID NO: 25875 - RNA, 19 nt, Artificial Sequence
  Description of Artificial Sequence: Synthetic oligonucleotide
ugacucaccuggggccaca

SEQ ID NO: 25876 - RNA, 19 nt, Artificial Sequence
  Description of Artificial Sequence: Synthetic oligonucleotide
aucaucacagaguauugcu

SEQ ID NO: 25877 - RNA, 19 nt, Artificial Sequence
  Description of Artificial Sequence: Synthetic oligonucleotide
ggaauggaguuuuuggcuu

SEQ ID NO: 25878 - RNA, 19 nt, Artificial Sequence
  Description of Artificial Sequence: Synthetic oligonucleotide
gaauggaguuuuuggcuuc

SEQ ID NO: 25879 - RNA, 19 nt, Artificial Sequence
  Description of Artificial Sequence: Synthetic oligonucleotide
auggaguuuuuggcuucaa

SEQ ID NO: 25880 - RNA, 19 nt, Artificial Sequence
  Description of Artificial Sequence: Synthetic oligonucleotide
uggaguuuuuggcuucaaa

SEQ ID NO: 25881 - RNA, 19 nt, Artificial Sequence
  Description of Artificial Sequence: Synthetic oligonucleotide
auugugaagaucugugacu

SEQ ID NO: 25882 - RNA, 19 nt, Artificial Sequence
  Description of Artificial Sequence: Synthetic oligonucleotide
ugucgaaaggcaguaccuu

SEQ ID NO: 25883 - RNA, 19 nt, Artificial Sequence
  Description of Artificial Sequence: Synthetic oligonucleotide
gucgaaaggcaguaccuuu

SEQ ID NO: 25884 - RNA, 19 nt, Artificial Sequence
  Description of Artificial Sequence: Synthetic oligonucleotide
gugaaguggauggcuccug

SEQ ID NO: 25885 - RNA, 19 nt, Artificial Sequence
  Description of Artificial Sequence: Synthetic oligonucleotide
gcuccugagagcaucuuug

SEQ ID NO: 25886 - RNA, 19 nt, Artificial Sequence
  Description of Artificial Sequence: Synthetic oligonucleotide
cuccugagagcaucuuuga

SEQ ID NO: 25887 - RNA, 19 nt, Artificial Sequence
  Description of Artificial Sequence: Synthetic oligonucleotide
uccugagagcaucuuugac

SEQ ID NO: 25888 - RNA, 19 nt, Artificial Sequence
  Description of Artificial Sequence: Synthetic oligonucleotide
ccugagagcaucuuugaca

SEQ ID NO: 25889 - RNA, 19 nt, Artificial Sequence
  Description of Artificial Sequence: Synthetic oligonucleotide
cuacaccacacugagugau

SEQ ID NO: 25890 - RNA, 19 nt, Artificial Sequence
  Description of Artificial Sequence: Synthetic oligonucleotide
uacaccacacugagugaug

SEQ ID NO: 25891 - RNA, 19 nt, Artificial Sequence
  Description of Artificial Sequence: Synthetic oligonucleotide
acaccacacugagugaugu

SEQ ID NO: 25892 - RNA, 19 nt, Artificial Sequence
  Description of Artificial Sequence: Synthetic oligonucleotide
uggcauucugcucugggag

SEQ ID NO: 25893 - RNA, 19 nt, Artificial Sequence
  Description of Artificial Sequence: Synthetic oligonucleotide
uggcaccccuuaccccggc

SEQ ID NO: 25894 - RNA, 19 nt, Artificial Sequence
  Description of Artificial Sequence: Synthetic oligonucleotide
ggguaccggauggccaagc

SEQ ID NO: 25895 - RNA, 19 nt, Artificial Sequence
  Description of Artificial Sequence: Synthetic oligonucleotide
gguaccggauggccaagcc

SEQ ID NO: 25896 - RNA, 19 nt, Artificial Sequence
  Description of Artificial Sequence: Synthetic oligonucleotide
guaccggauggccaagccu

SEQ ID NO: 25897 - RNA, 19 nt, Artificial Sequence
  Description of Artificial Sequence: Synthetic oligonucleotide
accggauggccaagccuga

SEQ ID NO: 25898 - RNA, 19 nt, Artificial Sequence
  Description of Artificial Sequence: Synthetic oligonucleotide
ccggauggccaagccugac

SEQ ID NO: 25899 - RNA, 19 nt, Artificial Sequence
  Description of Artificial Sequence: Synthetic oligonucleotide
cggauggccaagccugacc

SEQ ID NO: 25900 - RNA, 19 nt, Artificial Sequence
  Description of Artificial Sequence: Synthetic oligonucleotide
ggauggccaagccugacca

SEQ ID NO: 25901 - RNA, 19 nt, Artificial Sequence
  Description of Artificial Sequence: Synthetic oligonucleotide
aucauuccucugccugaca

SEQ ID NO: 25902 - RNA, 19 nt, Artificial Sequence
  Description of Artificial Sequence: Synthetic oligonucleotide
caucuuugugccagauccc

SEQ ID NO: 25903 - RNA, 19 nt, Artificial Sequence
  Description of Artificial Sequence: Synthetic oligonucleotide
ucuggggccuuugggcagg

SEQ ID NO: 25904 - RNA, 19 nt, Artificial Sequence
  Description of Artificial Sequence: Synthetic oligonucleotide
cuggggccuuugggcaggu

SEQ ID NO: 25905 - RNA, 19 nt, Artificial Sequence
  Description of Artificial Sequence: Synthetic oligonucleotide
uggggccuuugggcaggug

SEQ ID NO: 25906 - RNA, 19 nt, Artificial Sequence
  Description of Artificial Sequence: Synthetic oligonucleotide
ggggccuuugggcaggugg

SEQ ID NO: 25907 - RNA, 19 nt, Artificial Sequence
  Description of Artificial Sequence: Synthetic oligonucleotide
gggccuuugggcagguggu

SEQ ID NO: 25908 - RNA, 19 nt, Artificial Sequence
  Description of Artificial Sequence: Synthetic oligonucleotide
gccuuugggcagguggugg

SEQ ID NO: 25909 - RNA, 19 nt, Artificial Sequence
  Description of Artificial Sequence: Synthetic oligonucleotide
ccuuugggcagguggugga

SEQ ID NO: 25910 - RNA, 19 nt, Artificial Sequence
  Description of Artificial Sequence: Synthetic oligonucleotide
uuugggcaggugguggagg

SEQ ID NO: 25911 - RNA, 19 nt, Artificial Sequence
  Description of Artificial Sequence: Synthetic oligonucleotide
augaaaguggccgucaaga

SEQ ID NO: 25912 - RNA, 19 nt, Artificial Sequence
  Description of Artificial Sequence: Synthetic oligonucleotide
ugaaaguggccgucaagau

SEQ ID NO: 25913 - RNA, 19 nt, Artificial Sequence
  Description of Artificial Sequence: Synthetic oligonucleotide
gaaaguggccgucaagaug

SEQ ID NO: 25914 - RNA, 19 nt, Artificial Sequence
  Description of Artificial Sequence: Synthetic oligonucleotide
aaaguggccgucaagaugc

SEQ ID NO: 25915 - RNA, 19 nt, Artificial Sequence
  Description of Artificial Sequence: Synthetic oligonucleotide
aaguggccgucaagaugcu

SEQ ID NO: 25916 - RNA, 19 nt, Artificial Sequence
  Description of Artificial Sequence: Synthetic oligonucleotide
gucaagaugcuuaaaucca

SEQ ID NO: 25917 - RNA, 19 nt, Artificial Sequence
  Description of Artificial Sequence: Synthetic oligonucleotide
ucaagaugcuuaaauccac

SEQ ID NO: 25918 - RNA, 19 nt, Artificial Sequence
  Description of Artificial Sequence: Synthetic oligonucleotide
cuuaugucggagcugaaga

SEQ ID NO: 25919 - RNA, 19 nt, Artificial Sequence
  Description of Artificial Sequence: Synthetic oligonucleotide
uuaugucggagcugaagau

SEQ ID NO: 25920 - RNA, 19 nt, Artificial Sequence
  Description of Artificial Sequence: Synthetic oligonucleotide
augucggagcugaagauca

SEQ ID NO: 25921 - RNA, 19 nt, Artificial Sequence
  Description of Artificial Sequence: Synthetic oligonucleotide
ugucggagcugaagaucau

SEQ ID NO: 25922 - RNA, 19 nt, Artificial Sequence
  Description of Artificial Sequence: Synthetic oligonucleotide
gucggagcugaagaucaug

SEQ ID NO: 25923 - RNA, 19 nt, Artificial Sequence
  Description of Artificial Sequence: Synthetic oligonucleotide
ucggagcugaagaucauga

SEQ ID NO: 25924 - RNA, 19 nt, Artificial Sequence
  Description of Artificial Sequence: Synthetic oligonucleotide
gagcugaagaucaugaguc

SEQ ID NO: 25925 - RNA, 19 nt, Artificial Sequence
  Description of Artificial Sequence: Synthetic oligonucleotide
agcugaagaucaugaguca

SEQ ID NO: 25926 - RNA, 19 nt, Artificial Sequence
  Description of Artificial Sequence: Synthetic oligonucleotide
gcugaagaucaugagucac

SEQ ID NO: 25927 - RNA, 19 nt, Artificial Sequence
  Description of Artificial Sequence: Synthetic oligonucleotide
gaagaucaugagucaccuu

SEQ ID NO: 25928 - RNA, 19 nt, Artificial Sequence
  Description of Artificial Sequence: Synthetic oligonucleotide
aagaucaugagucaccuug

SEQ ID NO: 25929 - RNA, 19 nt, Artificial Sequence
  Description of Artificial Sequence: Synthetic oligonucleotide
agaucaugagucaccuugg

SEQ ID NO: 25930 - RNA, 19 nt, Artificial Sequence
  Description of Artificial Sequence: Synthetic oligonucleotide
gaucaugagucaccuuggg

SEQ ID NO: 25931 - RNA, 19 nt, Artificial Sequence
  Description of Artificial Sequence: Synthetic oligonucleotide
aucaugagucaccuugggc

SEQ ID NO: 25932 - RNA, 19 nt, Artificial Sequence
  Description of Artificial Sequence: Synthetic oligonucleotide
ucaugagucaccuugggcc

SEQ ID NO: 25933 - RNA, 19 nt, Artificial Sequence
  Description of Artificial Sequence: Synthetic oligonucleotide
augagucaccuugggcccc

SEQ ID NO: 25934 - RNA, 19 nt, Artificial Sequence
  Description of Artificial Sequence: Synthetic oligonucleotide
ugagucaccuugggcccca

SEQ ID NO: 25935 - RNA, 19 nt, Artificial Sequence
  Description of Artificial Sequence: Synthetic oligonucleotide
uggcuacauggacaugagc

SEQ ID NO: 25936 - RNA, 19 nt, Artificial Sequence
  Description of Artificial Sequence: Synthetic oligonucleotide
cuacauggacaugagcaag

SEQ ID NO: 25937 - RNA, 19 nt, Artificial Sequence
  Description of Artificial Sequence: Synthetic oligonucleotide
uacauggacaugagcaagg

SEQ ID NO: 25938 - RNA, 19 nt, Artificial Sequence
  Description of Artificial Sequence: Synthetic oligonucleotide
acuaugugcccaugcugga

SEQ ID NO: 25939 - RNA, 19 nt, Artificial Sequence
  Description of Artificial Sequence: Synthetic oligonucleotide
uaugugcccaugcuggaca

SEQ ID NO: 25940 - RNA, 19 nt, Artificial Sequence
  Description of Artificial Sequence: Synthetic oligonucleotide
cccaugcuggacaugaaag

SEQ ID NO: 25941 - RNA, 19 nt, Artificial Sequence
  Description of Artificial Sequence: Synthetic oligonucleotide
cuggucaagaucugugacu

SEQ ID NO: 25942 - RNA, 19 nt, Artificial Sequence
  Description of Artificial Sequence: Synthetic oligonucleotide
uggcucgagacaucaugcg

SEQ ID NO: 25943 - RNA, 19 nt, Artificial Sequence
  Description of Artificial Sequence: Synthetic oligonucleotide
accuuggguggcaccccuu

SEQ ID NO: 25944 - RNA, 19 nt, Artificial Sequence
  Description of Artificial Sequence: Synthetic oligonucleotide
gguuaccgcauggcccagc

SEQ ID NO: 25945 - RNA, 19 nt, Artificial Sequence
  Description of Artificial Sequence: Synthetic oligonucleotide
guuaccgcauggcccagcc

SEQ ID NO: 25946 - RNA, 19 nt, Artificial Sequence
  Description of Artificial Sequence: Synthetic oligonucleotide
uuaccgcauggcccagccu

SEQ ID NO: 25947 - RNA, 19 nt, Artificial Sequence
  Description of Artificial Sequence: Synthetic oligonucleotide
accgcauggcccagccugc

SEQ ID NO: 25948 - RNA, 19 nt, Artificial Sequence
  Description of Artificial Sequence: Synthetic oligonucleotide
ccgcauggcccagccugcc

SEQ ID NO: 25949 - RNA, 19 nt, Artificial Sequence
  Description of Artificial Sequence: Synthetic oligonucleotide
cgcauggcccagccugccc

SEQ ID NO: 25950 - RNA, 19 nt, Artificial Sequence
  Description of Artificial Sequence: Synthetic oligonucleotide
gcauggcccagccugccca

SEQ ID NO: 25951 - RNA, 19 nt, Artificial Sequence
  Description of Artificial Sequence: Synthetic oligonucleotide
auggcccagccugcccaug

SEQ ID NO: 25952 - RNA, 19 nt, Artificial Sequence
  Description of Artificial Sequence: Synthetic oligonucleotide
uggcccagccugcccaugc

SEQ ID NO: 25953 - RNA, 19 nt, Artificial Sequence
  Description of Artificial Sequence: Synthetic oligonucleotide
ucuaugagaucaugcagaa

SEQ ID NO: 25954 - RNA, 19 nt, Artificial Sequence
  Description of Artificial Sequence: Synthetic oligonucleotide
gagaucaugcagaagugcu

SEQ ID NO: 25955 - RNA, 19 nt, Artificial Sequence
  Description of Artificial Sequence: Synthetic oligonucleotide
agaucaugcagaagugcug

SEQ ID NO: 25956 - RNA, 19 nt, Artificial Sequence
  Description of Artificial Sequence: Synthetic oligonucleotide
gaucaugcagaagugcugg

SEQ ID NO: 25957 - RNA, 19 nt, Artificial Sequence
  Description of Artificial Sequence: Synthetic oligonucleotide
ggaguuucugaggagugac

SEQ ID NO: 25958 - RNA, 19 nt, Artificial Sequence
  Description of Artificial Sequence: Synthetic oligonucleotide
gaguuucugaggagugacc

SEQ ID NO: 25959 - RNA, 19 nt, Artificial Sequence
  Description of Artificial Sequence: Synthetic oligonucleotide
aguuucugaggagugacca

SEQ ID NO: 25960 - RNA, 19 nt, Artificial Sequence
  Description of Artificial Sequence: Synthetic oligonucleotide
cacccugaaugaagucaac

SEQ ID NO: 25961 - RNA, 19 nt, Artificial Sequence
  Description of Artificial Sequence: Synthetic oligonucleotide
accuccggggguauccugg

SEQ ID NO: 25962 - RNA, 19 nt, Artificial Sequence
  Description of Artificial Sequence: Synthetic oligonucleotide
ggccuacccaccgcccacu

SEQ ID NO: 25963 - RNA, 19 nt, Artificial Sequence
  Description of Artificial Sequence: Synthetic oligonucleotide
gugaagaugcuaaaaccca

SEQ ID NO: 25964 - RNA, 19 nt, Artificial Sequence
  Description of Artificial Sequence: Synthetic oligonucleotide
ugaagaugcuaaaacccac

SEQ ID NO: 25965 - DNA, 21 bp, Artificial Sequence
  Description of Artificial Sequence: Synthetic oligonucleotide
  Description of Combined DNA/RNA Molecule: Synthetic oligonucleotide
cuacacaaaucagcgauuutt

SEQ ID NO: 25966 - DNA, 21 bp, Artificial Sequence
  Description of Artificial Sequence: Synthetic oligonucleotide
  Description of Combined DNA/RNA Molecule: Synthetic oligonucleotide
aaaucgcugauuuguguagtt

SEQ ID NO: 25967 - DNA, 25 bp, Artificial Sequence
  Description of Artificial Sequence: Synthetic oligonucleotide
  Description of Combined DNA/RNA Molecule: Synthetic oligonucleotide
cuacacaaaucagcgauuuccaugt

SEQ ID NO: 25968 - RNA, 27 nt, Artificial Sequence
  Description of Artificial Sequence: Synthetic oligonucleotide
acauggaaaucgcugauuuguguaguc

SEQ ID NO: 25969 - RNA, 13 nt, Artificial Sequence
  Description of Artificial Sequence: Synthetic oligonucleotide
cuacacaaaucag

SEQ ID NO: 25970 - DNA, 11 bp, Artificial Sequence
  Description of Artificial Sequence: Synthetic oligonucleotide
  Description of Combined DNA/RNA Molecule: Synthetic oligonucleotide
gauuuccaugt

SEQ ID NO: 25971 - DNA, 21 bp, Artificial Sequence
  Description of Artificial Sequence: Synthetic oligonucleotide
  Description of Combined DNA/RNA Molecule: Synthetic oligonucleotide
ggaucuuauuucuucggagtt

SEQ ID NO: 25972 - DNA, 21 bp, Artificial Sequence
  Description of Artificial Sequence: Synthetic oligonucleotide
  Description of Combined DNA/RNA Molecule: Synthetic oligonucleotide
cuccgaagaaauaagaucctt

SEQ ID NO: 25973 - RNA, 11 nt, Artificial Sequence
  Description of Artificial Sequence: Synthetic oligonucleotide
ggaucuuauuu

SEQ ID NO: 25974 - DNA, 10 bp, Artificial Sequence
  Description of Artificial Sequence: Synthetic oligonucleotide
  Description of Combined DNA/RNA Molecule: Synthetic oligonucleotide
cuucggagtt

SEQ ID NO: 25975 - RNA, 27 nt, Artificial Sequence
  Description of Artificial Sequence: Synthetic oligonucleotide
cauugucuccgaagaaauaagauccuu

SEQ ID NO: 25976 - RNA, 8 nt, Artificial Sequence
  Description of Artificial Sequence: Synthetic oligonucleotide
  modified_base (2): LNA-G
ggaucuua

SEQ ID NO: 25977 - DNA, 17 bp, Artificial Sequence
  Description of Artificial Sequence: Synthetic oligonucleotide
  Description of Combined DNA/RNA Molecule: Synthetic oligonucleotide
uuucuucggagacaatg

SEQ ID NO: 25978 - DNA, 16 bp, Artificial Sequence
  Description of Artificial Sequence: Synthetic oligonucleotide
  Description of Combined DNA/RNA Molecule: Synthetic oligonucleotide
uucuucggagacaatg

SEQ ID NO: 25979 - DNA, 15 bp, Artificial Sequence
  Description of Artificial Sequence: Synthetic oligonucleotide
  Description of Combined DNA/RNA Molecule: Synthetic oligonucleotide
ucuucggagacaatg

SEQ ID NO: 25980 - DNA, 14 bp, Artificial Sequence
  Description of Artificial Sequence: Synthetic oligonucleotide
  Description of Combined DNA/RNA Molecule: Synthetic oligonucleotide
cuucggagacaatg

SEQ ID NO: 25981 - DNA, 13 bp, Artificial Sequence
  Description of Artificial Sequence: Synthetic oligonucleotide
  Description of Combined DNA/RNA Molecule: Synthetic oligonucleotide
uucggagacaatg

SEQ ID NO: 25982 - DNA, 12 bp, Artificial Sequence
  Description of Artificial Sequence: Synthetic oligonucleotide
  Description of Combined DNA/RNA Molecule: Synthetic oligonucleotide
ucggagacaatg

SEQ ID NO: 25983 - DNA, 11 bp, Artificial Sequence
  Description of Artificial Sequence: Synthetic oligonucleotide
  Description of Combined DNA/RNA Molecule: Synthetic oligonucleotide
cggagacaatg

SEQ ID NO: 25984 - RNA, 9 nt, Artificial Sequence
  Description of Artificial Sequence: Synthetic oligonucleotide
  modified_base (2): LNA-G
ggaucuuau

SEQ ID NO: 25985 - RNA, 10 nt, Artificial Sequence
  Description of Artificial Sequence: Synthetic oligonucleotide
  modified_base (2): LNA-G
ggaucuuauu

SEQ ID NO: 25986 - RNA, 11 nt, Artificial Sequence
  Description of Artificial Sequence: Synthetic oligonucleotide
  modified_base (2): LNA-G
ggaucuuauuu

SEQ ID NO: 25987 - RNA, 12 nt, Artificial Sequence
  Description of Artificial Sequence: Synthetic oligonucleotide
  modified_base (2): LNA-G
ggaucuuauuuc

SEQ ID NO: 25988 - RNA, 8 nt, Artificial Sequence
  Description of Artificial Sequence: Synthetic oligonucleotide
  modified_base (3): LNA-A
cuacacaa

SEQ ID NO: 25989 - DNA, 13 bp, Artificial Sequence
  Description of Artificial Sequence: Synthetic oligonucleotide
  Description of Combined DNA/RNA Molecule: Synthetic oligonucleotide
  modified_base (8): LNA-A
aucagcgauuutt

SEQ ID NO: 25990 - DNA, 12 bp, Artificial Sequence
  Description of Artificial Sequence: Synthetic oligonucleotide
  Description of Combined DNA/RNA Molecule: Synthetic oligonucleotide
  modified_base (7): LNA-A
ucagcgauuutt

SEQ ID NO: 25991 - DNA, 11 bp, Artificial Sequence
  Description of Artificial Sequence: Synthetic oligonucleotide
  Description of Combined DNA/RNA Molecule: Synthetic oligonucleotide
  modified_base (6): LNA-A
cagcgauuutt

SEQ ID NO: 25992 - DNA, 10 bp, Artificial Sequence
  Description of Artificial Sequence: Synthetic oligonucleotide
  Description of Combined DNA/RNA Molecule: Synthetic oligonucleotide
  modified_base (5): LNA-A
agcgauuutt

SEQ ID NO: 25993 - DNA, 9 bp, Artificial Sequence
  Description of Artificial Sequence: Synthetic oligonucleotide
  Description of Combined DNA/RNA Molecule: Synthetic oligonucleotide
  modified_base (4): LNA-A
gcgauuutt

SEQ ID NO: 25994 - DNA, 8 bp, Artificial Sequence
  Description of Artificial Sequence: Synthetic oligonucleotide
  Description of Combined DNA/RNA Molecule: Synthetic oligonucleotide
  modified_base (3): LNA-A
cgauuutt

SEQ ID NO: 25995 - DNA, 7 bp, Artificial Sequence
  Description of Artificial Sequence: Synthetic oligonucleotide
  Description of Combined DNA/RNA Molecule: Synthetic oligonucleotide
  modified_base (2): LNA-A
gauuutt

SEQ ID NO: 25996 - RNA, 9 nt, Artificial Sequence
  Description of Artificial Sequence: Synthetic oligonucleotide
  modified_base (3): LNA-A
cuacacaaa

SEQ ID NO: 25997 - RNA, 10 nt, Artificial Sequence
  Description of Artificial Sequence: Synthetic oligonucleotide
  modified_base (3): LNA-A
cuacacaaau

SEQ ID NO: 25998 - RNA, 11 nt, Artificial Sequence
  Description of Artificial Sequence: Synthetic oligonucleotide
  modified_base (3): LNA-A
cuacacaaauc

SEQ ID NO: 25999 - RNA, 12 nt, Artificial Sequence
  Description of Artificial Sequence: Synthetic oligonucleotide
  modified_base (3): LNA-A
cuacacaaauca

SEQ ID NO: 26000 - RNA, 13 nt, Artificial Sequence
  Description of Artificial Sequence: Synthetic oligonucleotide
  modified_base (3): LNA-A
cuacacaaaucag

SEQ ID NO: 26001 - RNA, 14 nt, Artificial Sequence
  Description of Artificial Sequence: Synthetic oligonucleotide
  modified_base (3): LNA-A
cuacacaaaucagc

SEQ ID NO: 26002 - RNA, 13 nt, Artificial Sequence
  Description of Artificial Sequence: Synthetic oligonucleotide
  modified_base (2): LNA-G
ggaucuuauuucu

SEQ ID NO: 26003 - RNA, 14 nt, Artificial Sequence
  Description of Artificial Sequence: Synthetic oligonucleotide
  modified_base (2): LNA-G
ggaucuuauuucuu

SEQ ID NO: 26004 - RNA, 8 nt, Artificial Sequence
  Description of Artificial Sequence: Synthetic oligonucleotide
  modified_base (2): LNA-G
  modified_base (8): LNA-A
ggaucuua

SEQ ID NO: 26005 - RNA, 9 nt, Artificial Sequence
  Description of Artificial Sequence: Synthetic oligonucleotide
  modified_base (2): LNA-G
  modified_base (9): LNA-U
ggaucuuau

SEQ ID NO: 26006 - RNA, 10 nt, Artificial Sequence
  Description of Artificial Sequence: Synthetic oligonucleotide
  modified_base (2): LNA-G
  modified_base (10): LNA-U
ggaucuuauu

SEQ ID NO: 26007 - RNA, 11 nt, Artificial Sequence
  Description of Artificial Sequence: Synthetic oligonucleotide
  modified_base (2): LNA-G
  modified_base (11): LNA-U
ggaucuuauuu

SEQ ID NO: 26008 - RNA, 12 nt, Artificial Sequence
  Description of Artificial Sequence: Synthetic oligonucleotide
  modified_base (2): LNA-G
  modified_base (12): LNA-C
ggaucuuauuuc

SEQ ID NO: 26009 - RNA, 13 nt, Artificial Sequence
  Description of Artificial Sequence: Synthetic oligonucleotide
  modified_base (2): LNA-G
  modified_base (13): LNA-U
ggaucuuauuucu

SEQ ID NO: 26010 - RNA, 14 nt, Artificial Sequence
  Description of Artificial Sequence: Synthetic oligonucleotide
  modified_base (2): LNA-G
  modified_base (14): LNA-U
ggaucuuauuucuu

SEQ ID NO: 26011 - DNA, 13 bp, Artificial Sequence
  Description of Artificial Sequence: Synthetic oligonucleotide
  Description of Combined DNA/RNA Molecule: Synthetic oligonucleotide
  modified_base (8): LNA-G
uuucuucggagtt

SEQ ID NO: 26012 - DNA, 12 bp, Artificial Sequence
  Description of Artificial Sequence: Synthetic oligonucleotide
  Description of Combined DNA/RNA Molecule: Synthetic oligonucleotide
  modified_base (7): LNA-G
uucuucggagtt

SEQ ID NO: 26013 - DNA, 11 bp, Artificial Sequence
  Description of Artificial Sequence: Synthetic oligonucleotide
  Description of Combined DNA/RNA Molecule: Synthetic oligonucleotide
  modified_base (6): LNA-G
ucuucggagtt

SEQ ID NO: 26014 - DNA, 10 bp, Artificial Sequence
  Description of Artificial Sequence: Synthetic oligonucleotide
  Description of Combined DNA/RNA Molecule: Synthetic oligonucleotide
  modified_base (5): LNA-G
cuucggagtt

SEQ ID NO: 26015 - DNA, 9 bp, Artificial Sequence
  Description of Artificial Sequence: Synthetic oligonucleotide
  Description of Combined DNA/RNA Molecule: Synthetic oligonucleotide
  modified_base (4): LNA-G
uucggagtt

SEQ ID NO: 26016 - DNA, 8 bp, Artificial Sequence
  Description of Artificial Sequence: Synthetic oligonucleotide
  Description of Combined DNA/RNA Molecule: Synthetic oligonucleotide
  modified_base (3): LNA-G
ucggagtt

SEQ ID NO: 26017 - DNA, 7 bp, Artificial Sequence
  Description of Artificial Sequence: Synthetic oligonucleotide
  Description of Combined DNA/RNA Molecule: Synthetic oligonucleotide
  modified_base (2): LNA-G
cggagtt

SEQ ID NO: 26018 - DNA, 13 bp, Artificial Sequence
  Description of Artificial Sequence: Synthetic oligonucleotide
  Description of Combined DNA/RNA Molecule: Synthetic oligonucleotide
  modified_base (1): LNA-U
  modified_base (8): LNA-G
uuucuucggagtt

SEQ ID NO: 26019 - DNA, 12 bp, Artificial Sequence
  Description of Artificial Sequence: Synthetic oligonucleotide
  Description of Combined DNA/RNA Molecule: Synthetic oligonucleotide
  modified_base (1): LNA-U
  modified_base (7): LNA-G
uucuucggagtt

SEQ ID NO: 26020 - DNA, 11 bp, Artificial Sequence
  Description of Artificial Sequence: Synthetic oligonucleotide
  Description of Combined DNA/RNA Molecule: Synthetic oligonucleotide
  modified_base (1): LNA-U
  modified_base (6): LNA-G
ucuucggagtt

SEQ ID NO: 26021 - DNA, 10 bp, Artificial Sequence
  Description of Artificial Sequence: Synthetic oligonucleotide
  Description of Combined DNA/RNA Molecule: Synthetic oligonucleotide
  modified_base (1): LNA-C
  modified_base (5): LNA-G
cuucggagtt

SEQ ID NO: 26022 - DNA, 9 bp, Artificial Sequence
  Description of Artificial Sequence: Synthetic oligonucleotide
  Description of Combined DNA/RNA Molecule: Synthetic oligonucleotide
  modified_base (1): LNA-U
  modified_base (4): LNA-G
uucggagtt

SEQ ID NO: 26023 - DNA, 8 bp, Artificial Sequence
  Description of Artificial Sequence: Synthetic oligonucleotide
  Description of Combined DNA/RNA Molecule: Synthetic oligonucleotide
  modified_base (1): LNA-U
  modified_base (3): LNA-G
ucggagtt

SEQ ID NO: 26024 - DNA, 7 bp, Artificial Sequence
  Description of Artificial Sequence: Synthetic oligonucleotide
  Description of Combined DNA/RNA Molecule: Synthetic oligonucleotide
  modified_base (1): LNA-C
  modified_base (2): LNA-G
cggagtt

SEQ ID NO: 26025 - DNA, 21 bp, Artificial Sequence
  Description of Artificial Sequence: Synthetic oligonucleotide
  Description of Combined DNA/RNA Molecule: Synthetic oligonucleotide
  modified_base (2): LNA-G
  modified_base (16): LNA-G
ggaucuuauuucuucggagtt

SEQ ID NO: 26026 - DNA, 25 bp, Artificial Sequence
  Description of Artificial Sequence: Synthetic oligonucleotide
  Description of Combined DNA/RNA Molecule: Synthetic oligonucleotide
ggaucuuauuucuucggagacaatg

SEQ ID NO: 26027 - RNA, 25 nt, Artificial Sequence
  Description of Artificial Sequence: Synthetic oligonucleotide
guauuuugaugaggaguucacggcc

SEQ ID NO: 26028 - RNA, 25 nt, Artificial Sequence
  Description of Artificial Sequence: Synthetic oligonucleotide
ggcccagaugaucaccaucacacca

SEQ ID NO: 26029 - RNA, 25 nt, Artificial Sequence
  Description of Artificial Sequence: Synthetic oligonucleotide
gggaagaaaacuauccugcggguuu

SEQ ID NO: 26030 - RNA, 25 nt, Artificial Sequence
  Description of Artificial Sequence: Synthetic oligonucleotide
guuuuaauuuauuucauccaguuug

SEQ ID NO: 26031 - RNA, 25 nt, Artificial Sequence
  Description of Artificial Sequence: Synthetic oligonucleotide
acguagggaaauguuaaggacuucu

SEQ ID NO: 26032 - RNA, 25 nt, Artificial Sequence
  Description of Artificial Sequence: Synthetic oligonucleotide
ccaggguuuacccagugggacagag

SEQ ID NO: 26033 - RNA, 25 nt, Artificial Sequence
  Description of Artificial Sequence: Synthetic oligonucleotide
agcaagguuuaaauuuguuauugug

SEQ ID NO: 26034 - RNA, 25 nt, Artificial Sequence
  Description of Artificial Sequence: Synthetic oligonucleotide
uguauuauguuguucaaaugcauuu

SEQ ID NO: 26035 - RNA, 25 nt, Artificial Sequence
  Description of Artificial Sequence: Synthetic oligonucleotide
uuuuaaucuuugugacaggaaagcc

SEQ ID NO: 26036 - RNA, 25 nt, Artificial Sequence
  Description of Artificial Sequence: Synthetic oligonucleotide
uuaaucuuugugacaggaaagcccu

SEQ ID NO: 26037 - RNA, 25 nt, Artificial Sequence
  Description of Artificial Sequence: Synthetic oligonucleotide
gcugcuuaugucucccagcauggcc

SEQ ID NO: 26038 - RNA, 25 nt, Artificial Sequence
  Description of Artificial Sequence: Synthetic oligonucleotide
aaguguuucagaagcuucucccuga

SEQ ID NO: 26039 - RNA, 25 nt, Artificial Sequence
  Description of Artificial Sequence: Synthetic oligonucleotide
gaccaucaauaaggaagaagcccuu

SEQ ID NO: 26040 - RNA, 25 nt, Artificial Sequence
  Description of Artificial Sequence: Synthetic oligonucleotide
ccaucaauaaggaagaagcccuuca

SEQ ID NO: 26041 - RNA, 25 nt, Artificial Sequence
  Description of Artificial Sequence: Synthetic oligonucleotide
ucaauaaggaagaagcccuucagcg

SEQ ID NO: 26042 - RNA, 25 nt, Artificial Sequence
  Description of Artificial Sequence: Synthetic oligonucleotide
aauaaggaagaagcccuucagcggc

SEQ ID NO: 26043 - RNA, 25 nt, Artificial Sequence
  Description of Artificial Sequence: Synthetic oligonucleotide
aggaagaagcccuucagcggccagu

SEQ ID NO: 26044 - RNA, 25 nt, Artificial Sequence
  Description of Artificial Sequence: Synthetic oligonucleotide
gcauaacuaaaggugaaaagcuccg

SEQ ID NO: 26045 - RNA, 25 nt, Artificial Sequence
  Description of Artificial Sequence: Synthetic oligonucleotide
cauaacuaaaggugaaaagcuccgg

SEQ ID NO: 26046 - RNA, 25 nt, Artificial Sequence
  Description of Artificial Sequence: Synthetic oligonucleotide
cuacaucacgccagucaacagucug

SEQ ID NO: 26047 - RNA, 25 nt, Artificial Sequence
  Description of Artificial Sequence: Synthetic oligonucleotide
acuggauuuaagcagaguucaaaag

SEQ ID NO: 26048 - RNA, 25 nt, Artificial Sequence
  Description of Artificial Sequence: Synthetic oligonucleotide
cuggauuuaagcagaguucaaaagc

SEQ ID NO: 26049 - RNA, 25 nt, Artificial Sequence
  Description of Artificial Sequence: Synthetic oligonucleotide
gauuuaagcagaguucaaaagcccu

SEQ ID NO: 26050 - RNA, 25 nt, Artificial Sequence
  Description of Artificial Sequence: Synthetic oligonucleotide
auuuaagcagaguucaaaagcccuu

SEQ ID NO: 26051 - RNA, 25 nt, Artificial Sequence
  Description of Artificial Sequence: Synthetic oligonucleotide
uuaagcagaguucaaaagcccuuca

SEQ ID NO: 26052 - RNA, 25 nt, Artificial Sequence
  Description of Artificial Sequence: Synthetic oligonucleotide
uaagcagaguucaaaagcccuucag

SEQ ID NO: 26053 - RNA, 25 nt, Artificial Sequence
  Description of Artificial Sequence: Synthetic oligonucleotide
agcagaguucaaaagcccuucagcg

SEQ ID NO: 26054 - RNA, 25 nt, Artificial Sequence
  Description of Artificial Sequence: Synthetic oligonucleotide
cucagggucugagugaagccgcucg

SEQ ID NO: 26055 - RNA, 25 nt, Artificial Sequence
  Description of Artificial Sequence: Synthetic oligonucleotide
caagcaacuacaucacgccagucaa

SEQ ID NO: 26056 - RNA, 25 nt, Artificial Sequence
  Description of Artificial Sequence: Synthetic oligonucleotide
aucaauggcagcuucuuggugcgug

SEQ ID NO: 26057 - RNA, 25 nt, Artificial Sequence
  Description of Artificial Sequence: Synthetic oligonucleotide
uuccagcccacauuggauucaucag

SEQ ID NO: 26058 - RNA, 25 nt, Artificial Sequence
  Description of Artificial Sequence: Synthetic oligonucleotide
cagcugagaauguggaauaccuaag

SEQ ID NO: 26059 - RNA, 25 nt, Artificial Sequence
  Description of Artificial Sequence: Synthetic oligonucleotide
aacguaucuccuaauuugaggcuca

SEQ ID NO: 26060 - RNA, 25 nt, Artificial Sequence
  Description of Artificial Sequence: Synthetic oligonucleotide
ccuaaaauaauuucucuacaauugg

SEQ ID NO: 26061 - RNA, 25 nt, Artificial Sequence
  Description of Artificial Sequence: Synthetic oligonucleotide
uggaagauucagcuaguuaggagcc

SEQ ID NO: 26062 - RNA, 25 nt, Artificial Sequence
  Description of Artificial Sequence: Synthetic oligonucleotide
uuaaacucuccuagucaauauccac

SEQ ID NO: 26063 - RNA, 25 nt, Artificial Sequence
  Description of Artificial Sequence: Synthetic oligonucleotide
cagccuacaguuauguucagucaca

SEQ ID NO: 26064 - RNA, 25 nt, Artificial Sequence
  Description of Artificial Sequence: Synthetic oligonucleotide
guuauguucagucacacacacauac

SEQ ID NO: 26065 - RNA, 25 nt, Artificial Sequence
  Description of Artificial Sequence: Synthetic oligonucleotide
cacauacaaaauguuccuuuugcuu

SEQ ID NO: 26066 - RNA, 25 nt, Artificial Sequence
  Description of Artificial Sequence: Synthetic oligonucleotide
uccuuuugcuuuuaaaguaauuuuu

SEQ ID NO: 26067 - RNA, 25 nt, Artificial Sequence
  Description of Artificial Sequence: Synthetic oligonucleotide
ugaccugugaagcaacagucaaugg

SEQ ID NO: 26068 - RNA, 25 nt, Artificial Sequence
  Description of Artificial Sequence: Synthetic oligonucleotide
cuaucucacacaucgacaaaccaau

SEQ ID NO: 26069 - RNA, 25 nt, Artificial Sequence
  Description of Artificial Sequence: Synthetic oligonucleotide
uguccucaauuguacugcuaccacu

SEQ ID NO: 26070 - RNA, 25 nt, Artificial Sequence
  Description of Artificial Sequence: Synthetic oligonucleotide
aaaccguagcuggcaagcggucuua

SEQ ID NO: 26071 - RNA, 25 nt, Artificial Sequence
  Description of Artificial Sequence: Synthetic oligonucleotide
uagcuggcaagcggucuuaccggcu

SEQ ID NO: 26072 - RNA, 25 nt, Artificial Sequence
  Description of Artificial Sequence: Synthetic oligonucleotide
uuguaugguuaaaagauggguuacc

SEQ ID NO: 26073 - RNA, 25 nt, Artificial Sequence
  Description of Artificial Sequence: Synthetic oligonucleotide
ugguuaaaagauggguuaccugcga

SEQ ID NO: 26074 - RNA, 25 nt, Artificial Sequence
  Description of Artificial Sequence: Synthetic oligonucleotide
cagggaauuauacaaucuugcugag

SEQ ID NO: 26075 - RNA, 25 nt, Artificial Sequence
  Description of Artificial Sequence: Synthetic oligonucleotide
acaaucuugcugagcauaaaacagu

SEQ ID NO: 26076 - RNA, 25 nt, Artificial Sequence
  Description of Artificial Sequence: Synthetic oligonucleotide
ccaauaaugaagaguccuuuauccu

SEQ ID NO: 26077 - RNA, 25 nt, Artificial Sequence
  Description of Artificial Sequence: Synthetic oligonucleotide
acuuuggauguuccaacgcaaguug

SEQ ID NO: 26078 - RNA, 25 nt, Artificial Sequence
  Description of Artificial Sequence: Synthetic oligonucleotide
aaugcuuccacuaaacugaaaccau

SEQ ID NO: 26079 - RNA, 25 nt, Artificial Sequence
  Description of Artificial Sequence: Synthetic oligonucleotide
gagaaaguuugacuuuguuaaauau

SEQ ID NO: 26080 - RNA, 25 nt, Artificial Sequence
  Description of Artificial Sequence: Synthetic oligonucleotide
aaagaacuacuguauauuaaaaguu

SEQ ID NO: 26081 - RNA, 25 nt, Artificial Sequence
  Description of Artificial Sequence: Synthetic oligonucleotide
uuagaaauacggguuuugacuuaac

SEQ ID NO: 26082 - RNA, 25 nt, Artificial Sequence
  Description of Artificial Sequence: Synthetic oligonucleotide
aacauggguacagcaaacucagcac

SEQ ID NO: 26083 - RNA, 25 nt, Artificial Sequence
  Description of Artificial Sequence: Synthetic oligonucleotide
aaagacacagaagaugcugaccuca

SEQ ID NO: 26084 - RNA, 25 nt, Artificial Sequence
  Description of Artificial Sequence: Synthetic oligonucleotide
uaguagggagguuuauucagaucgc

SEQ ID NO: 26085 - RNA, 25 nt, Artificial Sequence
  Description of Artificial Sequence: Synthetic oligonucleotide
gccuucugcagcaggguucugggau

SEQ ID NO: 26086 - RNA, 25 nt, Artificial Sequence
  Description of Artificial Sequence: Synthetic oligonucleotide
ggucugguacauauuggaaauuaug

SEQ ID NO: 26087 - RNA, 25 nt, Artificial Sequence
  Description of Artificial Sequence: Synthetic oligonucleotide
cuaguccuuccgauggaagcacuag

SEQ ID NO: 26088 - RNA, 25 nt, Artificial Sequence
  Description of Artificial Sequence: Synthetic oligonucleotide
ccagugaauauuguuuuuaugugga

SEQ ID NO: 26089 - RNA, 25 nt, Artificial Sequence
  Description of Artificial Sequence: Synthetic oligonucleotide
augaauucaaguuggaauugguaga

SEQ ID NO: 26090 - RNA, 25 nt, Artificial Sequence
  Description of Artificial Sequence: Synthetic oligonucleotide
caggacacagauuuagacuuggaga

SEQ ID NO: 26091 - RNA, 25 nt, Artificial Sequence
  Description of Artificial Sequence: Synthetic oligonucleotide
cucaaagcacaguuacaguauucca

SEQ ID NO: 26092 - RNA, 25 nt, Artificial Sequence
  Description of Artificial Sequence: Synthetic oligonucleotide
accacugccaccacugaugaauuaa

SEQ ID NO: 26093 - RNA, 25 nt, Artificial Sequence
  Description of Artificial Sequence: Synthetic oligonucleotide
gaaacuacuagugccacaucaucac

SEQ ID NO: 26094 - RNA, 25 nt, Artificial Sequence
  Description of Artificial Sequence: Synthetic oligonucleotide
aagucggacagccucaccaaacaga

SEQ ID NO: 26095 - RNA, 25 nt, Artificial Sequence
  Description of Artificial Sequence: Synthetic oligonucleotide
gaaagcgaaaaauggaacaugaugg

SEQ ID NO: 26096 - RNA, 25 nt, Artificial Sequence
  Description of Artificial Sequence: Synthetic oligonucleotide
cccucugauuuagcauguagacugc

SEQ ID NO: 26097 - RNA, 25 nt, Artificial Sequence
  Description of Artificial Sequence: Synthetic oligonucleotide
ugagcuauuuaaggaucuauuuaug

SEQ ID NO: 26098 - RNA, 25 nt, Artificial Sequence
  Description of Artificial Sequence: Synthetic oligonucleotide
aaaaggugaaaaagcacuauuauca

SEQ ID NO: 26099 - RNA, 25 nt, Artificial Sequence
  Description of Artificial Sequence: Synthetic oligonucleotide
gaaaaagcacuauuaucaguucugc

SEQ ID NO: 26100 - RNA, 25 nt, Artificial Sequence
  Description of Artificial Sequence: Synthetic oligonucleotide
ggcugaaaagaaagauuaaaccuac

SEQ ID NO: 26101 - RNA, 25 nt, Artificial Sequence
  Description of Artificial Sequence: Synthetic oligonucleotide
uaaacccuuauaauaaaauccuucu

SEQ ID NO: 26102 - RNA, 25 nt, Artificial Sequence
  Description of Artificial Sequence: Synthetic oligonucleotide
cauacuauuagccaaugcuguagac

SEQ ID NO: 26103 - RNA, 25 nt, Artificial Sequence
  Description of Artificial Sequence: Synthetic oligonucleotide
gacagaagcauuuugauaggaauag

SEQ ID NO: 26104 - RNA, 25 nt, Artificial Sequence
  Description of Artificial Sequence: Synthetic oligonucleotide
agagcaaauaagauaauggcccuga

SEQ ID NO: 26105 - RNA, 25 nt, Artificial Sequence
  Description of Artificial Sequence: Synthetic oligonucleotide
ccaacauuuuucucuuccucaagca

SEQ ID NO: 26106 - RNA, 25 nt, Artificial Sequence
  Description of Artificial Sequence: Synthetic oligonucleotide
uuaaguaugagaaaaguucagccca

SEQ ID NO: 26107 - RNA, 25 nt, Artificial Sequence
  Description of Artificial Sequence: Synthetic oligonucleotide
caggaauaaagauggcugcugaacc

SEQ ID NO: 26108 - RNA, 25 nt, Artificial Sequence
  Description of Artificial Sequence: Synthetic oligonucleotide
aauuugaaugaccaaguucucuuca

SEQ ID NO: 26109 - RNA, 25 nt, Artificial Sequence
  Description of Artificial Sequence: Synthetic oligonucleotide
auguauaaagauagccagccuagag

SEQ ID NO: 26110 - RNA, 25 nt, Artificial Sequence
  Description of Artificial Sequence: Synthetic oligonucleotide
ggcuguaacuaucucugugaagugu

SEQ ID NO: 26111 - RNA, 25 nt, Artificial Sequence
  Description of Artificial Sequence: Synthetic oligonucleotide
ucugugaagugugagaaaauuucaa

SEQ ID NO: 26112 - RNA, 25 nt, Artificial Sequence
  Description of Artificial Sequence: Synthetic oligonucleotide
ccuuuaaggaaaugaauccuccuga

SEQ ID NO: 26113 - RNA, 25 nt, Artificial Sequence
  Description of Artificial Sequence: Synthetic oligonucleotide
aaggauacaaaaagugacaucauau

SEQ ID NO: 26114 - RNA, 25 nt, Artificial Sequence
  Description of Artificial Sequence: Synthetic oligonucleotide
agaugcaauuugaaucuucaucaua

SEQ ID NO: 26115 - RNA, 25 nt, Artificial Sequence
  Description of Artificial Sequence: Synthetic oligonucleotide
guucaaaacgaagacuagcuauuaa

SEQ ID NO: 26116 - RNA, 25 nt, Artificial Sequence
  Description of Artificial Sequence: Synthetic oligonucleotide
gugaaaccucaucucuacuaaaaau

SEQ ID NO: 26117 - RNA, 25 nt, Artificial Sequence
  Description of Artificial Sequence: Synthetic oligonucleotide
acgaaagagaagcucuaucucgccu

SEQ ID NO: 26118 - RNA, 25 nt, Artificial Sequence
  Description of Artificial Sequence: Synthetic oligonucleotide
cuccacaagcgccuucgguccaguu

SEQ ID NO: 26119 - RNA, 25 nt, Artificial Sequence
  Description of Artificial Sequence: Synthetic oligonucleotide
gagaagauuccaaagauguagccgc

SEQ ID NO: 26120 - RNA, 25 nt, Artificial Sequence
  Description of Artificial Sequence: Synthetic oligonucleotide
aaucuggauucaaugaggagacuug

SEQ ID NO: 26121 - RNA, 25 nt, Artificial Sequence
  Description of Artificial Sequence: Synthetic oligonucleotide
agaacagauuugagaguagugagga

SEQ ID NO: 26122 - RNA, 25 nt, Artificial Sequence
  Description of Artificial Sequence: Synthetic oligonucleotide
ccagagcugugcagaugaguacaaa

SEQ ID NO: 26123 - RNA, 25 nt, Artificial Sequence
  Description of Artificial Sequence: Synthetic oligonucleotide
ccucagauuguuguuguuaaugggc

SEQ ID NO: 26124 - RNA, 25 nt, Artificial Sequence
  Description of Artificial Sequence: Synthetic oligonucleotide
cuauuuuaauuauuuuuaauuuauu

SEQ ID NO: 26125 - RNA, 25 nt, Artificial Sequence
  Description of Artificial Sequence: Synthetic oligonucleotide
uuuaauuuauuaauauuuaaauaug

SEQ ID NO: 26126 - RNA, 25 nt, Artificial Sequence
  Description of Artificial Sequence: Synthetic oligonucleotide
augcaguuugaauauccuuuguuuc

SEQ ID NO: 26127 - RNA, 25 nt, Artificial Sequence
  Description of Artificial Sequence: Synthetic oligonucleotide
caugcugcuggcgucuaaguguuug

SEQ ID NO: 26128 - RNA, 25 nt, Artificial Sequence
  Description of Artificial Sequence: Synthetic oligonucleotide
agaugugcauuucaccugugacaaa

SEQ ID NO: 26129 - RNA, 25 nt, Artificial Sequence
  Description of Artificial Sequence: Synthetic oligonucleotide
ucaaaaccugugccaggcugaauua

SEQ ID NO: 26130 - RNA, 25 nt, Artificial Sequence
  Description of Artificial Sequence: Synthetic oligonucleotide
gaauguggguagucauucuuacaau

SEQ ID NO: 26131 - RNA, 25 nt, Artificial Sequence
  Description of Artificial Sequence: Synthetic oligonucleotide
auguggguagucauucuuacaauug

SEQ ID NO: 26132 - RNA, 25 nt, Artificial Sequence
  Description of Artificial Sequence: Synthetic oligonucleotide
ugaaaaugagcaucagagaguguac

SEQ ID NO: 26133 - RNA, 25 nt, Artificial Sequence
  Description of Artificial Sequence: Synthetic oligonucleotide
uugcuuuucauguagaacucagcag

SEQ ID NO: 26134 - RNA, 25 nt, Artificial Sequence
  Description of Artificial Sequence: Synthetic oligonucleotide
uguauuucuauauuuauuuucagua

SEQ ID NO: 26135 - RNA, 25 nt, Artificial Sequence
  Description of Artificial Sequence: Synthetic oligonucleotide
uuugauuaauguuucuuaaauggaa

SEQ ID NO: 26136 - RNA, 25 nt, Artificial Sequence
  Description of Artificial Sequence: Synthetic oligonucleotide
caacguguauagugccuaaaauugu

SEQ ID NO: 26137 - RNA, 25 nt, Artificial Sequence
  Description of Artificial Sequence: Synthetic oligonucleotide
cauauccuuggcuacuaacaucugg

SEQ ID NO: 26138 - RNA, 25 nt, Artificial Sequence
  Description of Artificial Sequence: Synthetic oligonucleotide
uacuaacaucuggagacugugagcu

SEQ ID NO: 26139 - RNA, 25 nt, Artificial Sequence
  Description of Artificial Sequence: Synthetic oligonucleotide
cauaaguugugugcuuuuuauuaau

SEQ ID NO: 26140 - RNA, 25 nt, Artificial Sequence
  Description of Artificial Sequence: Synthetic oligonucleotide
gcaucauuuuggcucuucuuacauu

SEQ ID NO: 26141 - RNA, 25 nt, Artificial Sequence
  Description of Artificial Sequence: Synthetic oligonucleotide
gcucuucuuacauuuguaaaaaugu

SEQ ID NO: 26142 - RNA, 25 nt, Artificial Sequence
  Description of Artificial Sequence: Synthetic oligonucleotide
agauuaggucaucuuaauucauauu

SEQ ID NO: 26143 - RNA, 25 nt, Artificial Sequence
  Description of Artificial Sequence: Synthetic oligonucleotide
auggaauugaaagaacuaaucauga

SEQ ID NO: 26144 - RNA, 25 nt, Artificial Sequence
  Description of Artificial Sequence: Synthetic oligonucleotide
cacacucauuccuucugcucuuggg

SEQ ID NO: 26145 - RNA, 25 nt, Artificial Sequence
  Description of Artificial Sequence: Synthetic oligonucleotide
uguagagguaaccaguagcuuugag

SEQ ID NO: 26146 - RNA, 25 nt, Artificial Sequence
  Description of Artificial Sequence: Synthetic oligonucleotide
caaccacaugccacguaauauuuca

SEQ ID NO: 26147 - RNA, 25 nt, Artificial Sequence
  Description of Artificial Sequence: Synthetic oligonucleotide
ucggaaacaaguuauucucuucacu

SEQ ID NO: 26148 - RNA, 25 nt, Artificial Sequence
  Description of Artificial Sequence: Synthetic oligonucleotide
acucccaauaacuaaugcuaagaaa

SEQ ID NO: 26149 - RNA, 25 nt, Artificial Sequence
  Description of Artificial Sequence: Synthetic oligonucleotide
aaugcuaagaaaugcugaaaaucaa

SEQ ID NO: 26150 - RNA, 25 nt, Artificial Sequence
  Description of Artificial Sequence: Synthetic oligonucleotide
gucuuucucuaaauaugauuacuuu

SEQ ID NO: 26151 - RNA, 25 nt, Artificial Sequence
  Description of Artificial Sequence: Synthetic oligonucleotide
ugaauuucaggcauuuuguucuaca

SEQ ID NO: 26152 - RNA, 25 nt, Artificial Sequence
  Description of Artificial Sequence: Synthetic oligonucleotide
cgauucccucucacccgggacucuc

SEQ ID NO: 26153 - RNA, 25 nt, Artificial Sequence
  Description of Artificial Sequence: Synthetic oligonucleotide
aggaaagugaaccuuuaaaguaaag

SEQ ID NO: 26154 - RNA, 25 nt, Artificial Sequence
  Description of Artificial Sequence: Synthetic oligonucleotide
gaggcugcaugcucuggaagccugg

SEQ ID NO: 26155 - RNA, 25 nt, Artificial Sequence
  Description of Artificial Sequence: Synthetic oligonucleotide
ucucugaacagaaaacaaaagagag

SEQ ID NO: 26156 - RNA, 25 nt, Artificial Sequence
  Description of Artificial Sequence: Synthetic oligonucleotide
aacuuggcuguaaucaguuaugccg

SEQ ID NO: 26157 - RNA, 25 nt, Artificial Sequence
  Description of Artificial Sequence: Synthetic oligonucleotide
agaagccaaaauuaaaagaagucca

SEQ ID NO: 26158 - RNA, 25 nt, Artificial Sequence
  Description of Artificial Sequence: Synthetic oligonucleotide
auuaaaagaaguccaggugagguua

SEQ ID NO: 26159 - RNA, 25 nt, Artificial Sequence
  Description of Artificial Sequence: Synthetic oligonucleotide
gaauccggauuaucgggaagaggac

SEQ ID NO: 26160 - RNA, 25 nt, Artificial Sequence
  Description of Artificial Sequence: Synthetic oligonucleotide
aaugugacaucaaagcaaguauugu

SEQ ID NO: 26161 - RNA, 25 nt, Artificial Sequence
  Description of Artificial Sequence: Synthetic oligonucleotide
caucaaagcaaguauuguagcacuc

SEQ ID NO: 26162 - RNA, 25 nt, Artificial Sequence
  Description of Artificial Sequence: Synthetic oligonucleotide
agagagagaaaacaaaaccacaaau

SEQ ID NO: 26163 - RNA, 25 nt, Artificial Sequence
  Description of Artificial Sequence: Synthetic oligonucleotide
ucgcuguaguauuuaagcccauaca

SEQ ID NO: 26164 - RNA, 25 nt, Artificial Sequence
  Description of Artificial Sequence: Synthetic oligonucleotide
cgcuguaguauuuaagcccauacag

SEQ ID NO: 26165 - RNA, 25 nt, Artificial Sequence
  Description of Artificial Sequence: Synthetic oligonucleotide
auuuaagcccauacagaaaccuucc

SEQ ID NO: 26166 - RNA, 25 nt, Artificial Sequence
  Description of Artificial Sequence: Synthetic oligonucleotide
auuaaaauaaacaugguauaccuac

SEQ ID NO: 26167 - RNA, 25 nt, Artificial Sequence
  Description of Artificial Sequence: Synthetic oligonucleotide
cuguucugaucggccaguuuucgga

SEQ ID NO: 26168 - RNA, 25 nt, Artificial Sequence
  Description of Artificial Sequence: Synthetic oligonucleotide
aaauaauuugaacuuuggaacaggg

SEQ ID NO: 26169 - RNA, 25 nt, Artificial Sequence
  Description of Artificial Sequence: Synthetic oligonucleotide
ugcgaccuuaauuuaacuuuccagu

SEQ ID NO: 26170 - RNA, 25 nt, Artificial Sequence
  Description of Artificial Sequence: Synthetic oligonucleotide
cugagaaagcuaaaguuugguuuug

SEQ ID NO: 26171 - RNA, 25 nt, Artificial Sequence
  Description of Artificial Sequence: Synthetic oligonucleotide
aguaaagaugcuacuucccacugua

SEQ ID NO: 26172 - RNA, 25 nt, Artificial Sequence
  Description of Artificial Sequence: Synthetic oligonucleotide
cugcuuaauugcugauaccauauga

SEQ ID NO: 26173 - RNA, 25 nt, Artificial Sequence
  Description of Artificial Sequence: Synthetic oligonucleotide
uaccauaugaaugaaacaugggcug

SEQ ID NO: 26174 - RNA, 25 nt, Artificial Sequence
  Description of Artificial Sequence: Synthetic oligonucleotide
aacuuucuuauccaacuuuuucaua

SEQ ID NO: 26175 - RNA, 25 nt, Artificial Sequence
  Description of Artificial Sequence: Synthetic oligonucleotide
ccuugcaugacaucaugaggccgga

SEQ ID NO: 26176 - RNA, 25 nt, Artificial Sequence
  Description of Artificial Sequence: Synthetic oligonucleotide
ugaauuuguauaugacugcauuugu

SEQ ID NO: 26177 - RNA, 25 nt, Artificial Sequence
  Description of Artificial Sequence: Synthetic oligonucleotide
gaauccuaguagaauguuuacuacc

SEQ ID NO: 26178 - RNA, 25 nt, Artificial Sequence
  Description of Artificial Sequence: Synthetic oligonucleotide
gaaagggaagaauuuuuugaugaaa

SEQ ID NO: 26179 - RNA, 25 nt, Artificial Sequence
  Description of Artificial Sequence: Synthetic oligonucleotide
uaucggcaugccagugugugaauuu

SEQ ID NO: 26180 - RNA, 25 nt, Artificial Sequence
  Description of Artificial Sequence: Synthetic oligonucleotide
caccucauaguagagcaauguaugu

SEQ ID NO: 26181 - RNA, 25 nt, Artificial Sequence
  Description of Artificial Sequence: Synthetic oligonucleotide
ccagaauugccaaagcacauauaua

SEQ ID NO: 26182 - RNA, 25 nt, Artificial Sequence
  Description of Artificial Sequence: Synthetic oligonucleotide
uggugaucuggguaauaguuucucc

SEQ ID NO: 26183 - RNA, 25 nt, Artificial Sequence
  Description of Artificial Sequence: Synthetic oligonucleotide
gaucuggguaauaguuucuccaaau

SEQ ID NO: 26184 - RNA, 25 nt, Artificial Sequence
  Description of Artificial Sequence: Synthetic oligonucleotide
ggaugugaugaauacuuccuagaaa

SEQ ID NO: 26185 - RNA, 25 nt, Artificial Sequence
  Description of Artificial Sequence: Synthetic oligonucleotide
cauuuccacagcuacaccauauaug

SEQ ID NO: 26186 - RNA, 25 nt, Artificial Sequence
  Description of Artificial Sequence: Synthetic oligonucleotide
acagcuacaccauauaugaauggag

SEQ ID NO: 26187 - RNA, 25 nt, Artificial Sequence
  Description of Artificial Sequence: Synthetic oligonucleotide
ugcaguucuuacacgagaagaagau

SEQ ID NO: 26188 - RNA, 25 nt, Artificial Sequence
  Description of Artificial Sequence: Synthetic oligonucleotide
acgagaagaagaucauuuacaggga

SEQ ID NO: 26189 - RNA, 25 nt, Artificial Sequence
  Description of Artificial Sequence: Synthetic oligonucleotide
cgagaagaagaucauuuacagggac

SEQ ID NO: 26190 - RNA, 25 nt, Artificial Sequence
  Description of Artificial Sequence: Synthetic oligonucleotide
aagaagaucauuuacagggaccuga

SEQ ID NO: 26191 - RNA, 25 nt, Artificial Sequence
  Description of Artificial Sequence: Synthetic oligonucleotide
agaggaagagguguuugacugcauc

SEQ ID NO: 26192 - RNA, 25 nt, Artificial Sequence
  Description of Artificial Sequence: Synthetic oligonucleotide
gaggaagagguguuugacugcaucg

SEQ ID NO: 26193 - RNA, 25 nt, Artificial Sequence
  Description of Artificial Sequence: Synthetic oligonucleotide
cuacuuugagggcgaguucacaggg

SEQ ID NO: 26194 - RNA, 25 nt, Artificial Sequence
  Description of Artificial Sequence: Synthetic oligonucleotide
agggcaucuccuggcaccucugucc

SEQ ID NO: 26195 - RNA, 25 nt, Artificial Sequence
  Description of Artificial Sequence: Synthetic oligonucleotide
ggagugauaugguuugucuuuuuaa

SEQ ID NO: 26196 - RNA, 25 nt, Artificial Sequence
  Description of Artificial Sequence: Synthetic oligonucleotide
gagugauaugguuugucuuuuuaag

SEQ ID NO: 26197 - RNA, 25 nt, Artificial Sequence
  Description of Artificial Sequence: Synthetic oligonucleotide
ugcaguaaagauccuaaagguuguc

SEQ ID NO: 26198 - RNA, 25 nt, Artificial Sequence
  Description of Artificial Sequence: Synthetic oligonucleotide
aguaaagauccuaaagguugucgac

SEQ ID NO: 26199 - RNA, 25 nt, Artificial Sequence
  Description of Artificial Sequence: Synthetic oligonucleotide
ugacaaaggacaaccuggcaauugu

SEQ ID NO: 26200 - RNA, 25 nt, Artificial Sequence
  Description of Artificial Sequence: Synthetic oligonucleotide
gcaauugugacccaguggugcgagg

SEQ ID NO: 26201 - RNA, 25 nt, Artificial Sequence
  Description of Artificial Sequence: Synthetic oligonucleotide
aacaucauccauagagacaugaaau

SEQ ID NO: 26202 - RNA, 25 nt, Artificial Sequence
  Description of Artificial Sequence: Synthetic oligonucleotide
ugaaauccaacaauauauuucucca

SEQ ID NO: 26203 - RNA, 25 nt, Artificial Sequence
  Description of Artificial Sequence: Synthetic oligonucleotide
aacaauauauuucuccaugaaggcu

SEQ ID NO: 26204 - RNA, 25 nt, Artificial Sequence
  Description of Artificial Sequence: Synthetic oligonucleotide
aacaguaaagucacgcuggaguggu

SEQ ID NO: 26205 - RNA, 25 nt, Artificial Sequence
  Description of Artificial Sequence: Synthetic oligonucleotide
ugugaagaaaguaaaggaagagagg

SEQ ID NO: 26206 - RNA, 25 nt, Artificial Sequence
  Description of Artificial Sequence: Synthetic oligonucleotide
cuuccgagccauccuugcaucgggc

SEQ ID NO: 26207 - RNA, 25 nt, Artificial Sequence
  Description of Artificial Sequence: Synthetic oligonucleotide
aauggagguugaauauccuacugug

SEQ ID NO: 26208 - RNA, 25 nt, Artificial Sequence
  Description of Artificial Sequence: Synthetic oligonucleotide
ggagguugaauauccuacuguguaa

SEQ ID NO: 26209 - RNA, 25 nt, Artificial Sequence
  Description of Artificial Sequence: Synthetic oligonucleotide
auuuugaguuuucccuuguagugua

SEQ ID NO: 26210 - RNA, 25 nt, Artificial Sequence
  Description of Artificial Sequence: Synthetic oligonucleotide
uauccuguuuguucuuuguugauug

SEQ ID NO: 26211 - RNA, 25 nt, Artificial Sequence
  Description of Artificial Sequence: Synthetic oligonucleotide
ccuguuuguucuuuguugauugaaa

SEQ ID NO: 26212 - RNA, 25 nt, Artificial Sequence
  Description of Artificial Sequence: Synthetic oligonucleotide
cucuacagccuucuuuuucuuccau

SEQ ID NO: 26213 - RNA, 25 nt, Artificial Sequence
  Description of Artificial Sequence: Synthetic oligonucleotide
ucuuccauagcuaaucuuccuucua

SEQ ID NO: 26214 - RNA, 25 nt, Artificial Sequence
  Description of Artificial Sequence: Synthetic oligonucleotide
auaaucuuccuguugaaugcuucau

SEQ ID NO: 26215 - RNA, 25 nt, Artificial Sequence
  Description of Artificial Sequence: Synthetic oligonucleotide
uaaucuuccuguugaaugcuucaug

SEQ ID NO: 26216 - RNA, 25 nt, Artificial Sequence
  Description of Artificial Sequence: Synthetic oligonucleotide
cuucaugacuugaauucuacuuuga

SEQ ID NO: 26217 - RNA, 25 nt, Artificial Sequence
  Description of Artificial Sequence: Synthetic oligonucleotide
aagagggagagaagcaacuacagac

SEQ ID NO: 26218 - RNA, 25 nt, Artificial Sequence
  Description of Artificial Sequence: Synthetic oligonucleotide
cgucuccuaccagaccaaggucaac

SEQ ID NO: 26219 - RNA, 25 nt, Artificial Sequence
  Description of Artificial Sequence: Synthetic oligonucleotide
gaucaaucggcccgacuaucucgac

SEQ ID NO: 26220 - RNA, 25 nt, Artificial Sequence
  Description of Artificial Sequence: Synthetic oligonucleotide
ggacgaacauccaaccuucccaaac

SEQ ID NO: 26221 - RNA, 25 nt, Artificial Sequence
  Description of Artificial Sequence: Synthetic oligonucleotide
agggucggaacccaagcuuagaacu

SEQ ID NO: 26222 - RNA, 25 nt, Artificial Sequence
  Description of Artificial Sequence: Synthetic oligonucleotide
ucggaacccaagcuuagaacuuuaa

SEQ ID NO: 26223 - RNA, 25 nt, Artificial Sequence
  Description of Artificial Sequence: Synthetic oligonucleotide
acccaagcuuagaacuuuaagcaac

SEQ ID NO: 26224 - RNA, 25 nt, Artificial Sequence
  Description of Artificial Sequence: Synthetic oligonucleotide
gaacuuuaagcaacaagaccaccac

SEQ ID NO: 26225 - RNA, 25 nt, Artificial Sequence
  Description of Artificial Sequence: Synthetic oligonucleotide
acuauucaguggcgagaaauaaagu

SEQ ID NO: 26226 - RNA, 25 nt, Artificial Sequence
  Description of Artificial Sequence: Synthetic oligonucleotide
cuauucaguggcgagaaauaaaguu

SEQ ID NO: 26227 - RNA, 25 nt, Artificial Sequence
  Description of Artificial Sequence: Synthetic oligonucleotide
aaacacagauaacaggaaaugaucc

SEQ ID NO: 26228 - RNA, 25 nt, Artificial Sequence
  Description of Artificial Sequence: Synthetic oligonucleotide
cuuaagaaaagagaagaaaugaaac

SEQ ID NO: 26229 - RNA, 25 nt, Artificial Sequence
  Description of Artificial Sequence: Synthetic oligonucleotide
cugaaggaguguguuuccauccucc

SEQ ID NO: 26230 - RNA, 25 nt, Artificial Sequence
  Description of Artificial Sequence: Synthetic oligonucleotide
ucaccgcgggacugaaaaucuuuga

SEQ ID NO: 26231 - RNA, 25 nt, Artificial Sequence
  Description of Artificial Sequence: Synthetic oligonucleotide
agcagaaauaagcgugccguucagg

SEQ ID NO: 26232 - RNA, 25 nt, Artificial Sequence
  Description of Artificial Sequence: Synthetic oligonucleotide
aagcgugccguucaggguccagaag

SEQ ID NO: 26233 - RNA, 25 nt, Artificial Sequence
  Description of Artificial Sequence: Synthetic oligonucleotide
agaaacagucacucaagacugcuug

SEQ ID NO: 26234 - RNA, 25 nt, Artificial Sequence
  Description of Artificial Sequence: Synthetic oligonucleotide
agaggaagaagguccaugucuuugg

SEQ ID NO: 26235 - RNA, 25 nt, Artificial Sequence
  Description of Artificial Sequence: Synthetic oligonucleotide
uguauucaaaauaugccugaaacac

SEQ ID NO: 26236 - RNA, 25 nt, Artificial Sequence
  Description of Artificial Sequence: Synthetic oligonucleotide
auuuuccucccuuucucuguaccuc

SEQ ID NO: 26237 - RNA, 25 nt, Artificial Sequence
  Description of Artificial Sequence: Synthetic oligonucleotide
caaagaaagauagagcaagacaaga

SEQ ID NO: 26238 - RNA, 25 nt, Artificial Sequence
  Description of Artificial Sequence: Synthetic oligonucleotide
aagaaagauagagcaagacaagaaa

SEQ ID NO: 26239 - RNA, 25 nt, Artificial Sequence
  Description of Artificial Sequence: Synthetic oligonucleotide
gaaagcauuuguuuguacaagaucc

SEQ ID NO: 26240 - RNA, 25 nt, Artificial Sequence
  Description of Artificial Sequence: Synthetic oligonucleotide
ugaguuaaacgaacguacuugcaga

SEQ ID NO: 26241 - RNA, 25 nt, Artificial Sequence
  Description of Artificial Sequence: Synthetic oligonucleotide
acugauacagaacgaucgauacaga

SEQ ID NO: 26242 - RNA, 25 nt, Artificial Sequence
  Description of Artificial Sequence: Synthetic oligonucleotide
auauuauauauauauaaaaauaaau

SEQ ID NO: 26243 - RNA, 25 nt, Artificial Sequence
  Description of Artificial Sequence: Synthetic oligonucleotide
auuauauauauauaaaaauaaauau

SEQ ID NO: 26244 - RNA, 25 nt, Artificial Sequence
  Description of Artificial Sequence: Synthetic oligonucleotide
ucacuggauguauuugacugcugug

SEQ ID NO: 26245 - RNA, 25 nt, Artificial Sequence
  Description of Artificial Sequence: Synthetic oligonucleotide
cagggaagaggaggagaugagagac

SEQ ID NO: 26246 - RNA, 25 nt, Artificial Sequence
  Description of Artificial Sequence: Synthetic oligonucleotide
augaucuuuuuuuugucccacuugg

SEQ ID NO: 26247 - RNA, 27 nt, Artificial Sequence
  Description of Artificial Sequence: Synthetic oligonucleotide
ggccgugaacuccucaucaaaauaccu

SEQ ID NO: 26248 - RNA, 27 nt, Artificial Sequence
  Description of Artificial Sequence: Synthetic oligonucleotide
uggugugauggugaucaucugggccgu

SEQ ID NO: 26249 - RNA, 27 nt, Artificial Sequence
  Description of Artificial Sequence: Synthetic oligonucleotide
aaacccgcaggauaguuuucuucccua

SEQ ID NO: 26250 - RNA, 27 nt, Artificial Sequence
  Description of Artificial Sequence: Synthetic oligonucleotide
caaacuggaugaaauaaauuaaaaccc

SEQ ID NO: 26251 - RNA, 27 nt, Artificial Sequence
  Description of Artificial Sequence: Synthetic oligonucleotide
agaaguccuuaacauuucccuacguga

SEQ ID NO: 26252 - RNA, 27 nt, Artificial Sequence
  Description of Artificial Sequence: Synthetic oligonucleotide
cucugucccacuggguaaacccuggcc

SEQ ID NO: 26253 - RNA, 27 nt, Artificial Sequence
  Description of Artificial Sequence: Synthetic oligonucleotide
cacaauaacaaauuuaaaccuugcucc

SEQ ID NO: 26254 - RNA, 27 nt, Artificial Sequence
  Description of Artificial Sequence: Synthetic oligonucleotide
aaaugcauuugaacaacauaauacaca

SEQ ID NO: 26255 - RNA, 27 nt, Artificial Sequence
  Description of Artificial Sequence: Synthetic oligonucleotide
ggcuuuccugucacaaagauuaaaaac

SEQ ID NO: 26256 - RNA, 27 nt, Artificial Sequence
  Description of Artificial Sequence: Synthetic oligonucleotide
agggcuuuccugucacaaagauuaaaa

SEQ ID NO: 26257 - RNA, 27 nt, Artificial Sequence
  Description of Artificial Sequence: Synthetic oligonucleotide
ggccaugcugggagacauaagcagcag

SEQ ID NO: 26258 - RNA, 27 nt, Artificial Sequence
  Description of Artificial Sequence: Synthetic oligonucleotide
ucagggagaagcuucugaaacacuucu

SEQ ID NO: 26259 - RNA, 27 nt, Artificial Sequence
  Description of Artificial Sequence: Synthetic oligonucleotide
aagggcuucuuccuuauugauggucag

SEQ ID NO: 26260 - RNA, 27 nt, Artificial Sequence
  Description of Artificial Sequence: Synthetic oligonucleotide
ugaagggcuucuuccuuauugaugguc

SEQ ID NO: 26261 - RNA, 27 nt, Artificial Sequence
  Description of Artificial Sequence: Synthetic oligonucleotide
cgcugaagggcuucuuccuuauugaug

SEQ ID NO: 26262 - RNA, 27 nt, Artificial Sequence
  Description of Artificial Sequence: Synthetic oligonucleotide
gccgcugaagggcuucuuccuuauuga

SEQ ID NO: 26263 - RNA, 27 nt, Artificial Sequence
  Description of Artificial Sequence: Synthetic oligonucleotide
acuggccgcugaagggcuucuuccuua

SEQ ID NO: 26264 - RNA, 27 nt, Artificial Sequence
  Description of Artificial Sequence: Synthetic oligonucleotide
cggagcuuuucaccuuuaguuaugcuu

SEQ ID NO: 26265 - RNA, 27 nt, Artificial Sequence
  Description of Artificial Sequence: Synthetic oligonucleotide
ccggagcuuuucaccuuuaguuaugcu

SEQ ID NO: 26266 - RNA, 27 nt, Artificial Sequence
  Description of Artificial Sequence: Synthetic oligonucleotide
cagacuguugacuggcgugauguaguu

SEQ ID NO: 26267 - RNA, 27 nt, Artificial Sequence
  Description of Artificial Sequence: Synthetic oligonucleotide
cuuuugaacucugcuuaaauccagugg

SEQ ID NO: 26268 - RNA, 27 nt, Artificial Sequence
  Description of Artificial Sequence: Synthetic oligonucleotide
gcuuuugaacucugcuuaaauccagug

SEQ ID NO: 26269 - RNA, 27 nt, Artificial Sequence
  Description of Artificial Sequence: Synthetic oligonucleotide
agggcuuuugaacucugcuuaaaucca

SEQ ID NO: 26270 - RNA, 27 nt, Artificial Sequence
  Description of Artificial Sequence: Synthetic oligonucleotide
aagggcuuuugaacucugcuuaaaucc

SEQ ID NO: 26271 - RNA, 27 nt, Artificial Sequence
  Description of Artificial Sequence: Synthetic oligonucleotide
ugaagggcuuuugaacucugcuuaaau

SEQ ID NO: 26272 - RNA, 27 nt, Artificial Sequence
  Description of Artificial Sequence: Synthetic oligonucleotide
cugaagggcuuuugaacucugcuuaaa

SEQ ID NO: 26273 - RNA, 27 nt, Artificial Sequence
  Description of Artificial Sequence: Synthetic oligonucleotide
cgcugaagggcuuuugaacucugcuua

SEQ ID NO: 26274 - RNA, 27 nt, Artificial Sequence
  Description of Artificial Sequence: Synthetic oligonucleotide
cgagcggcuucacucagacccugaggc

SEQ ID NO: 26275 - RNA, 27 nt, Artificial Sequence
  Description of Artificial Sequence: Synthetic oligonucleotide
uugacuggcgugauguaguugcuuggg

SEQ ID NO: 26276 - RNA, 27 nt, Artificial Sequence
  Description of Artificial Sequence: Synthetic oligonucleotide
cacgcaccaagaagcugccauugaucc

SEQ ID NO: 26277 - RNA, 27 nt, Artificial Sequence
  Description of Artificial Sequence: Synthetic oligonucleotide
cugaugaauccaaugugggcuggaauc

SEQ ID NO: 26278 - RNA, 27 nt, Artificial Sequence
  Description of Artificial Sequence: Synthetic oligonucleotide
cuuagguauuccacauucucagcugug

SEQ ID NO: 26279 - RNA, 27 nt, Artificial Sequence
  Description of Artificial Sequence: Synthetic oligonucleotide
ugagccucaaauuaggagauacguuuu

SEQ ID NO: 26280 - RNA, 27 nt, Artificial Sequence
  Description of Artificial Sequence: Synthetic oligonucleotide
ccaauuguagagaaauuauuuuaggaa

SEQ ID NO: 26281 - RNA, 27 nt, Artificial Sequence
  Description of Artificial Sequence: Synthetic oligonucleotide
ggcuccuaacuagcugaaucuuccaau

SEQ ID NO: 26282 - RNA, 27 nt, Artificial Sequence
  Description of Artificial Sequence: Synthetic oligonucleotide
guggauauugacuaggagaguuuaaaa

SEQ ID NO: 26283 - RNA, 27 nt, Artificial Sequence
  Description of Artificial Sequence: Synthetic oligonucleotide
ugugacugaacauaacuguaggcugaa

SEQ ID NO: 26284 - RNA, 27 nt, Artificial Sequence
  Description of Artificial Sequence: Synthetic oligonucleotide
guaugugugugugacugaacauaacug

SEQ ID NO: 26285 - RNA, 27 nt, Artificial Sequence
  Description of Artificial Sequence: Synthetic oligonucleotide
aagcaaaaggaacauuuuguaugugug

SEQ ID NO: 26286 - RNA, 27 nt, Artificial Sequence
  Description of Artificial Sequence: Synthetic oligonucleotide
aaaaauuacuuuaaaagcaaaaggaac

SEQ ID NO: 26287 - RNA, 27 nt, Artificial Sequence
  Description of Artificial Sequence: Synthetic oligonucleotide
ccauugacuguugcuucacaggucaga

SEQ ID NO: 26288 - RNA, 27 nt, Artificial Sequence
  Description of Artificial Sequence: Synthetic oligonucleotide
auugguuugucgaugugugagauaguu

SEQ ID NO: 26289 - RNA, 27 nt, Artificial Sequence
  Description of Artificial Sequence: Synthetic oligonucleotide
agugguagcaguacaauugaggacaag

SEQ ID NO: 26290 - RNA, 27 nt, Artificial Sequence
  Description of Artificial Sequence: Synthetic oligonucleotide
uaagaccgcuugccagcuacgguuuca

SEQ ID NO: 26291 - RNA, 27 nt, Artificial Sequence
  Description of Artificial Sequence: Synthetic oligonucleotide
agccgguaagaccgcuugccagcuacg

SEQ ID NO: 26292 - RNA, 27 nt, Artificial Sequence
  Description of Artificial Sequence: Synthetic oligonucleotide
gguaacccaucuuuuaaccauacaacu

SEQ ID NO: 26293 - RNA, 27 nt, Artificial Sequence
  Description of Artificial Sequence: Synthetic oligonucleotide
ucgcagguaacccaucuuuuaaccaua

SEQ ID NO: 26294 - RNA, 27 nt, Artificial Sequence
  Description of Artificial Sequence: Synthetic oligonucleotide
cucagcaagauuguauaauucccugca

SEQ ID NO: 26295 - RNA, 27 nt, Artificial Sequence
  Description of Artificial Sequence: Synthetic oligonucleotide
acuguuuuaugcucagcaagauuguau

SEQ ID NO: 26296 - RNA, 27 nt, Artificial Sequence
  Description of Artificial Sequence: Synthetic oligonucleotide
aggauaaaggacucuucauuauuggaa

SEQ ID NO: 26297 - RNA, 27 nt, Artificial Sequence
  Description of Artificial Sequence: Synthetic oligonucleotide
caacuugcguuggaacauccaaagugu

SEQ ID NO: 26298 - RNA, 27 nt, Artificial Sequence
  Description of Artificial Sequence: Synthetic oligonucleotide
augguuucaguuuaguggaagcauuua

SEQ ID NO: 26299 - RNA, 27 nt, Artificial Sequence
  Description of Artificial Sequence: Synthetic oligonucleotide
auauuuaacaaagucaaacuuucucac

SEQ ID NO: 26300 - RNA, 27 nt, Artificial Sequence
  Description of Artificial Sequence: Synthetic oligonucleotide
aacuuuuaauauacaguaguucuuuuc

SEQ ID NO: 26301 - RNA, 27 nt, Artificial Sequence
  Description of Artificial Sequence: Synthetic oligonucleotide
guuaagucaaaacccguauuucuaaag

SEQ ID NO: 26302 - RNA, 27 nt, Artificial Sequence
  Description of Artificial Sequence: Synthetic oligonucleotide
gugcugaguuugcuguacccauguuga

SEQ ID NO: 26303 - RNA, 27 nt, Artificial Sequence
  Description of Artificial Sequence: Synthetic oligonucleotide
ugaggucagcaucuucugugucuuuac

SEQ ID NO: 26304 - RNA, 27 nt, Artificial Sequence
  Description of Artificial Sequence: Synthetic oligonucleotide
gcgaucugaauaaaccucccuacuagc

SEQ ID NO: 26305 - RNA, 27 nt, Artificial Sequence
  Description of Artificial Sequence: Synthetic oligonucleotide
aucccagaacccugcugcagaaggcca

SEQ ID NO: 26306 - RNA, 27 nt, Artificial Sequence
  Description of Artificial Sequence: Synthetic oligonucleotide
cauaauuuccaauauguaccagaccuu

SEQ ID NO: 26307 - RNA, 27 nt, Artificial Sequence
  Description of Artificial Sequence: Synthetic oligonucleotide
cuagugcuuccaucggaaggacuaggu

SEQ ID NO: 26308 - RNA, 27 nt, Artificial Sequence
  Description of Artificial Sequence: Synthetic oligonucleotide
uccacauaaaaacaauauucacuggga

SEQ ID NO: 26309 - RNA, 27 nt, Artificial Sequence
  Description of Artificial Sequence: Synthetic oligonucleotide
ucuaccaauuccaacuugaauucauug

SEQ ID NO: 26310 - RNA, 27 nt, Artificial Sequence
  Description of Artificial Sequence: Synthetic oligonucleotide
ucuccaagucuaaaucuguguccugag

SEQ ID NO: 26311 - RNA, 27 nt, Artificial Sequence
  Description of Artificial Sequence: Synthetic oligonucleotide
uggaauacuguaacugugcuuugagga

SEQ ID NO: 26312 - RNA, 27 nt, Artificial Sequence
  Description of Artificial Sequence: Synthetic oligonucleotide
uuaauucaucagugguggcagugguag

SEQ ID NO: 26313 - RNA, 27 nt, Artificial Sequence
  Description of Artificial Sequence: Synthetic oligonucleotide
gugaugauguggcacuaguaguuucuu

SEQ ID NO: 26314 - RNA, 27 nt, Artificial Sequence
  Description of Artificial Sequence: Synthetic oligonucleotide
ucuguuuggugaggcuguccgacuuug

SEQ ID NO: 26315 - RNA, 27 nt, Artificial Sequence
  Description of Artificial Sequence: Synthetic oligonucleotide
ccaucauguuccauuuuucgcuuucuc

SEQ ID NO: 26316 - RNA, 27 nt, Artificial Sequence
  Description of Artificial Sequence: Synthetic oligonucleotide
gcagucuacaugcuaaaucagagggua

SEQ ID NO: 26317 - RNA, 27 nt, Artificial Sequence
  Description of Artificial Sequence: Synthetic oligonucleotide
cauaaauagauccuuaaauagcucaaa

SEQ ID NO: 26318 - RNA, 27 nt, Artificial Sequence
  Description of Artificial Sequence: Synthetic oligonucleotide
ugauaauagugcuuuuucaccuuuuuc

SEQ ID NO: 26319 - RNA, 27 nt, Artificial Sequence
  Description of Artificial Sequence: Synthetic oligonucleotide
gcagaacugauaauagugcuuuuucac

SEQ ID NO: 26320 - RNA, 27 nt, Artificial Sequence
  Description of Artificial Sequence: Synthetic oligonucleotide
guagguuuaaucuuucuuuucagccau

SEQ ID NO: 26321 - RNA, 27 nt, Artificial Sequence
  Description of Artificial Sequence: Synthetic oligonucleotide
agaaggauuuuauuauaaggguuuaau

SEQ ID NO: 26322 - RNA, 27 nt, Artificial Sequence
  Description of Artificial Sequence: Synthetic oligonucleotide
gucuacagcauuggcuaauaguaugaa

SEQ ID NO: 26323 - RNA, 27 nt, Artificial Sequence
  Description of Artificial Sequence: Synthetic oligonucleotide
cuauuccuaucaaaaugcuucugucua

SEQ ID NO: 26324 - RNA, 27 nt, Artificial Sequence
  Description of Artificial Sequence: Synthetic oligonucleotide
ucagggccauuaucuuauuugcucuau

SEQ ID NO: 26325 - RNA, 27 nt, Artificial Sequence
  Description of Artificial Sequence: Synthetic oligonucleotide
ugcuugaggaagagaaaaauguugguc

SEQ ID NO: 26326 - RNA, 27 nt, Artificial Sequence
  Description of Artificial Sequence: Synthetic oligonucleotide
ugggcugaacuuuucucauacuuaaag

SEQ ID NO: 26327 - RNA, 27 nt, Artificial Sequence
  Description of Artificial Sequence: Synthetic oligonucleotide
gguucagcagccaucuuuauuccugcg

SEQ ID NO: 26328 - RNA, 27 nt, Artificial Sequence
  Description of Artificial Sequence: Synthetic oligonucleotide
ugaagagaacuuggucauucaaauuuc

SEQ ID NO: 26329 - RNA, 27 nt, Artificial Sequence
  Description of Artificial Sequence: Synthetic oligonucleotide
cucuaggcuggcuaucuuuauacauac

SEQ ID NO: 26330 - RNA, 27 nt, Artificial Sequence
  Description of Artificial Sequence: Synthetic oligonucleotide
acacuucacagagauaguuacagccau

SEQ ID NO: 26331 - RNA, 27 nt, Artificial Sequence
  Description of Artificial Sequence: Synthetic oligonucleotide
uugaaauuuucucacacuucacagaga

SEQ ID NO: 26332 - RNA, 27 nt, Artificial Sequence
  Description of Artificial Sequence: Synthetic oligonucleotide
ucaggaggauucauuuccuuaaaggaa

SEQ ID NO: 26333 - RNA, 27 nt, Artificial Sequence
  Description of Artificial Sequence: Synthetic oligonucleotide
auaugaugucacuuuuuguauccuuga

SEQ ID NO: 26334 - RNA, 27 nt, Artificial Sequence
  Description of Artificial Sequence: Synthetic oligonucleotide
uaugaugaagauucaaauugcaucuua

SEQ ID NO: 26335 - RNA, 27 nt, Artificial Sequence
  Description of Artificial Sequence: Synthetic oligonucleotide
uuaauagcuagucuucguuuugaacag

SEQ ID NO: 26336 - RNA, 27 nt, Artificial Sequence
  Description of Artificial Sequence: Synthetic oligonucleotide
auuuuuaguagagaugagguuucacca

SEQ ID NO: 26337 - RNA, 27 nt, Artificial Sequence
  Description of Artificial Sequence: Synthetic oligonucleotide
aggcgagauagagcuucucuuucguuc

SEQ ID NO: 26338 - RNA, 27 nt, Artificial Sequence
  Description of Artificial Sequence: Synthetic oligonucleotide
aacuggaccgaaggcgcuuguggagaa

SEQ ID NO: 26339 - RNA, 27 nt, Artificial Sequence
  Description of Artificial Sequence: Synthetic oligonucleotide
gcggcuacaucuuuggaaucuucuccu

SEQ ID NO: 26340 - RNA, 27 nt, Artificial Sequence
  Description of Artificial Sequence: Synthetic oligonucleotide
caagucuccucauugaauccagauugg

SEQ ID NO: 26341 - RNA, 27 nt, Artificial Sequence
  Description of Artificial Sequence: Synthetic oligonucleotide
uccucacuacucucaaaucuguucugg

SEQ ID NO: 26342 - RNA, 27 nt, Artificial Sequence
  Description of Artificial Sequence: Synthetic oligonucleotide
uuuguacucaucugcacagcucuggcu

SEQ ID NO: 26343 - RNA, 27 nt, Artificial Sequence
  Description of Artificial Sequence: Synthetic oligonucleotide
gcccauuaacaacaacaaucugaggug

SEQ ID NO: 26344 - RNA, 27 nt, Artificial Sequence
  Description of Artificial Sequence: Synthetic oligonucleotide
aauaaauuaaaaauaauuaaaauagug

SEQ ID NO: 26345 - RNA, 27 nt, Artificial Sequence
  Description of Artificial Sequence: Synthetic oligonucleotide
cauauuuaaauauuaauaaauuaaaaa

SEQ ID NO: 26346 - RNA, 27 nt, Artificial Sequence
  Description of Artificial Sequence: Synthetic oligonucleotide
gaaacaaaggauauucaaacugcauag

SEQ ID NO: 26347 - RNA, 27 nt, Artificial Sequence
  Description of Artificial Sequence: Synthetic oligonucleotide
caaacacuuagacgccagcagcauggg

SEQ ID NO: 26348 - RNA, 27 nt, Artificial Sequence
  Description of Artificial Sequence: Synthetic oligonucleotide
uuugucacaggugaaaugcacaucuga

SEQ ID NO: 26349 - RNA, 27 nt, Artificial Sequence
  Description of Artificial Sequence: Synthetic oligonucleotide
uaauucagccuggcacagguuuugauc

SEQ ID NO: 26350 - RNA, 27 nt, Artificial Sequence
  Description of Artificial Sequence: Synthetic oligonucleotide
auuguaagaaugacuacccacauucac

SEQ ID NO: 26351 - RNA, 27 nt, Artificial Sequence
  Description of Artificial Sequence: Synthetic oligonucleotide
caauuguaagaaugacuacccacauuc

SEQ ID NO: 26352 - RNA, 27 nt, Artificial Sequence
  Description of Artificial Sequence: Synthetic oligonucleotide
guacacucucugaugcucauuuucaua

SEQ ID NO: 26353 - RNA, 27 nt, Artificial Sequence
  Description of Artificial Sequence: Synthetic oligonucleotide
cugcugaguucuacaugaaaagcaaau

SEQ ID NO: 26354 - RNA, 27 nt, Artificial Sequence
  Description of Artificial Sequence: Synthetic oligonucleotide
uacugaaaauaaauauagaaauacaac

SEQ ID NO: 26355 - RNA, 27 nt, Artificial Sequence
  Description of Artificial Sequence: Synthetic oligonucleotide
uuccauuuaagaaacauuaaucaaaac

SEQ ID NO: 26356 - RNA, 27 nt, Artificial Sequence
  Description of Artificial Sequence: Synthetic oligonucleotide
acaauuuuaggcacuauacacguuguu

SEQ ID NO: 26357 - RNA, 27 nt, Artificial Sequence
  Description of Artificial Sequence: Synthetic oligonucleotide
ccagauguuaguagccaaggauauggu

SEQ ID NO: 26358 - RNA, 27 nt, Artificial Sequence
  Description of Artificial Sequence: Synthetic oligonucleotide
agcucacagucuccagauguuaguagc

SEQ ID NO: 26359 - RNA, 27 nt, Artificial Sequence
  Description of Artificial Sequence: Synthetic oligonucleotide
auuaauaaaaagcacacaacuuauggc

SEQ ID NO: 26360 - RNA, 27 nt, Artificial Sequence
  Description of Artificial Sequence: Synthetic oligonucleotide
aauguaagaagagccaaaaugaugcau

SEQ ID NO: 26361 - RNA, 27 nt, Artificial Sequence
  Description of Artificial Sequence: Synthetic oligonucleotide
acauuuuuacaaauguaagaagagcca

SEQ ID NO: 26362 - RNA, 27 nt, Artificial Sequence
  Description of Artificial Sequence: Synthetic oligonucleotide
aauaugaauuaagaugaccuaaucugu

SEQ ID NO: 26363 - RNA, 27 nt, Artificial Sequence
  Description of Artificial Sequence: Synthetic oligonucleotide
ucaugauuaguucuuucaauuccaucc

SEQ ID NO: 26364 - RNA, 27 nt, Artificial Sequence
  Description of Artificial Sequence: Synthetic oligonucleotide
cccaagagcagaaggaaugagugugca

SEQ ID NO: 26365 - RNA, 27 nt, Artificial Sequence
  Description of Artificial Sequence: Synthetic oligonucleotide
cucaaagcuacugguuaccucuacacc

SEQ ID NO: 26366 - RNA, 27 nt, Artificial Sequence
  Description of Artificial Sequence: Synthetic oligonucleotide
ugaaauauuacguggcaugugguuggg

SEQ ID NO: 26367 - RNA, 27 nt, Artificial Sequence
  Description of Artificial Sequence: Synthetic oligonucleotide
agugaagagaauaacuuguuuccgaag

SEQ ID NO: 26368 - RNA, 27 nt, Artificial Sequence
  Description of Artificial Sequence: Synthetic oligonucleotide
uuucuuagcauuaguuauugggaguga

SEQ ID NO: 26369 - RNA, 27 nt, Artificial Sequence
  Description of Artificial Sequence: Synthetic oligonucleotide
uugauuuucagcauuucuuagcauuag

SEQ ID NO: 26370 - RNA, 27 nt, Artificial Sequence
  Description of Artificial Sequence: Synthetic oligonucleotide
aaaguaaucauauuuagagaaagacag

SEQ ID NO: 26371 - RNA, 27 nt, Artificial Sequence
  Description of Artificial Sequence: Synthetic oligonucleotide
uguagaacaaaaugccugaaauucagc

SEQ ID NO: 26372 - RNA, 27 nt, Artificial Sequence
  Description of Artificial Sequence: Synthetic oligonucleotide
gagagucccgggugagagggaaucgcc

SEQ ID NO: 26373 - RNA, 27 nt, Artificial Sequence
  Description of Artificial Sequence: Synthetic oligonucleotide
cuuuacuuuaaagguucacuuuccuug

SEQ ID NO: 26374 - RNA, 27 nt, Artificial Sequence
  Description of Artificial Sequence: Synthetic oligonucleotide
ccaggcuuccagagcaugcagccuccu

SEQ ID NO: 26375 - RNA, 27 nt, Artificial Sequence
  Description of Artificial Sequence: Synthetic oligonucleotide
cucucuuuuguuuucuguucagagaaa

SEQ ID NO: 26376 - RNA, 27 nt, Artificial Sequence
  Description of Artificial Sequence: Synthetic oligonucleotide
cggcauaacugauuacagccaaguuca

SEQ ID NO: 26377 - RNA, 27 nt, Artificial Sequence
  Description of Artificial Sequence: Synthetic oligonucleotide
uggacuucuuuuaauuuuggcuucuuc

SEQ ID NO: 26378 - RNA, 27 nt, Artificial Sequence
  Description of Artificial Sequence: Synthetic oligonucleotide
uaaccucaccuggacuucuuuuaauuu

SEQ ID NO: 26379 - RNA, 27 nt, Artificial Sequence
  Description of Artificial Sequence: Synthetic oligonucleotide
guccucuucccgauaauccggauucag

SEQ ID NO: 26380 - RNA, 27 nt, Artificial Sequence
  Description of Artificial Sequence: Synthetic oligonucleotide
acaauacuugcuuugaugucacauuaa

SEQ ID NO: 26381 - RNA, 27 nt, Artificial Sequence
  Description of Artificial Sequence: Synthetic oligonucleotide
gagugcuacaauacuugcuuugauguc

SEQ ID NO: 26382 - RNA, 27 nt, Artificial Sequence
  Description of Artificial Sequence: Synthetic oligonucleotide
auuugugguuuuguuuucucucucucu

SEQ ID NO: 26383 - RNA, 27 nt, Artificial Sequence
  Description of Artificial Sequence: Synthetic oligonucleotide
uguaugggcuuaaauacuacagcgagg

SEQ ID NO: 26384 - RNA, 27 nt, Artificial Sequence
  Description of Artificial Sequence: Synthetic oligonucleotide
cuguaugggcuuaaauacuacagcgag

SEQ ID NO: 26385 - RNA, 27 nt, Artificial Sequence
  Description of Artificial Sequence: Synthetic oligonucleotide
ggaagguuucuguaugggcuuaaauac

SEQ ID NO: 26386 - RNA, 27 nt, Artificial Sequence
  Description of Artificial Sequence: Synthetic oligonucleotide
guagguauaccauguuuauuuuaauac

SEQ ID NO: 26387 - RNA, 27 nt, Artificial Sequence
  Description of Artificial Sequence: Synthetic oligonucleotide
uccgaaaacuggccgaucagaacagcc

SEQ ID NO: 26388 - RNA, 27 nt, Artificial Sequence
  Description of Artificial Sequence: Synthetic oligonucleotide
cccuguuccaaaguucaaauuauuugu

SEQ ID NO: 26389 - RNA, 27 nt, Artificial Sequence
  Description of Artificial Sequence: Synthetic oligonucleotide
acuggaaaguuaaauuaaggucgcaau

SEQ ID NO: 26390 - RNA, 27 nt, Artificial Sequence
  Description of Artificial Sequence: Synthetic oligonucleotide
caaaaccaaacuuuagcuuucucagcc

SEQ ID NO: 26391 - RNA, 27 nt, Artificial Sequence
  Description of Artificial Sequence: Synthetic oligonucleotide
uacagugggaaguagcaucuuuacuuu

SEQ ID NO: 26392 - RNA, 27 nt, Artificial Sequence
  Description of Artificial Sequence: Synthetic oligonucleotide
ucauaugguaucagcaauuaagcagua

SEQ ID NO: 26393 - RNA, 27 nt, Artificial Sequence
  Description of Artificial Sequence: Synthetic oligonucleotide
cagcccauguuucauucauaugguauc

SEQ ID NO: 26394 - RNA, 27 nt, Artificial Sequence
  Description of Artificial Sequence: Synthetic oligonucleotide
uaugaaaaaguuggauaagaaaguugg

SEQ ID NO: 26395 - RNA, 27 nt, Artificial Sequence
  Description of Artificial Sequence: Synthetic oligonucleotide
uccggccucaugaugucaugcaaggcu

SEQ ID NO: 26396 - RNA, 27 nt, Artificial Sequence
  Description of Artificial Sequence: Synthetic oligonucleotide
acaaaugcagucauauacaaauucagg

SEQ ID NO: 26397 - RNA, 27 nt, Artificial Sequence
  Description of Artificial Sequence: Synthetic oligonucleotide
gguaguaaacauucuacuaggauucuu

SEQ ID NO: 26398 - RNA, 27 nt, Artificial Sequence
  Description of Artificial Sequence: Synthetic oligonucleotide
uuucaucaaaaaauucuucccuuucug

SEQ ID NO: 26399 - RNA, 27 nt, Artificial Sequence
  Description of Artificial Sequence: Synthetic oligonucleotide
aaauucacacacuggcaugccgauagc

SEQ ID NO: 26400 - RNA, 27 nt, Artificial Sequence
  Description of Artificial Sequence: Synthetic oligonucleotide
acauacauugcucuacuaugaggugaa

SEQ ID NO: 26401 - RNA, 27 nt, Artificial Sequence
  Description of Artificial Sequence: Synthetic oligonucleotide
uauauaugugcuuuggcaauucuggug

SEQ ID NO: 26402 - RNA, 27 nt, Artificial Sequence
  Description of Artificial Sequence: Synthetic oligonucleotide
ggagaaacuauuacccagaucaccacu

SEQ ID NO: 26403 - RNA, 27 nt, Artificial Sequence
  Description of Artificial Sequence: Synthetic oligonucleotide
auuuggagaaacuauuacccagaucac

SEQ ID NO: 26404 - RNA, 27 nt, Artificial Sequence
  Description of Artificial Sequence: Synthetic oligonucleotide
uuucuaggaaguauucaucacauccac

SEQ ID NO: 26405 - RNA, 27 nt, Artificial Sequence
  Description of Artificial Sequence: Synthetic oligonucleotide
cauauaugguguagcuguggaaaugcg

SEQ ID NO: 26406 - RNA, 27 nt, Artificial Sequence
  Description of Artificial Sequence: Synthetic oligonucleotide
cuccauucauauaugguguagcugugg

SEQ ID NO: 26407 - RNA, 27 nt, Artificial Sequence
  Description of Artificial Sequence: Synthetic oligonucleotide
aucuucuucucguguaagaacugcagc

SEQ ID NO: 26408 - RNA, 27 nt, Artificial Sequence
  Description of Artificial Sequence: Synthetic oligonucleotide
ucccuguaaaugaucuucuucucgugu

SEQ ID NO: 26409 - RNA, 27 nt, Artificial Sequence
  Description of Artificial Sequence: Synthetic oligonucleotide
gucccuguaaaugaucuucuucucgug

SEQ ID NO: 26410 - RNA, 27 nt, Artificial Sequence
  Description of Artificial Sequence: Synthetic oligonucleotide
ucaggucccuguaaaugaucuucuucu

SEQ ID NO: 26411 - RNA, 27 nt, Artificial Sequence
  Description of Artificial Sequence: Synthetic oligonucleotide
gaugcagucaaacaccucuuccucugu

SEQ ID NO: 26412 - RNA, 27 nt, Artificial Sequence
  Description of Artificial Sequence: Synthetic oligonucleotide
cgaugcagucaaacaccucuuccucug

SEQ ID NO: 26413 - RNA, 27 nt, Artificial Sequence
  Description of Artificial Sequence: Synthetic oligonucleotide
cccugugaacucgcccucaaaguagcg

SEQ ID NO: 26414 - RNA, 27 nt, Artificial Sequence
  Description of Artificial Sequence: Synthetic oligonucleotide
ggacagaggugccaggagaugcccuca

SEQ ID NO: 26415 - RNA, 27 nt, Artificial Sequence
  Description of Artificial Sequence: Synthetic oligonucleotide
uuaaaaagacaaaccauaucacuccuu

SEQ ID NO: 26416 - RNA, 27 nt, Artificial Sequence
  Description of Artificial Sequence: Synthetic oligonucleotide
cuuaaaaagacaaaccauaucacuccu

SEQ ID NO: 26417 - RNA, 27 nt, Artificial Sequence
  Description of Artificial Sequence: Synthetic oligonucleotide
gacaaccuuuaggaucuuuacugcaac

SEQ ID NO: 26418 - RNA, 27 nt, Artificial Sequence
  Description of Artificial Sequence: Synthetic oligonucleotide
gucgacaaccuuuaggaucuuuacugc

SEQ ID NO: 26419 - RNA, 27 nt, Artificial Sequence
  Description of Artificial Sequence: Synthetic oligonucleotide
acaauugccagguuguccuuugucaug

SEQ ID NO: 26420 - RNA, 27 nt, Artificial Sequence
  Description of Artificial Sequence: Synthetic oligonucleotide
ccucgcaccacugggucacaauugcca

SEQ ID NO: 26421 - RNA, 27 nt, Artificial Sequence
  Description of Artificial Sequence: Synthetic oligonucleotide
auuucaugucucuauggaugauguucu

SEQ ID NO: 26422 - RNA, 27 nt, Artificial Sequence
  Description of Artificial Sequence: Synthetic oligonucleotide
uggagaaauauauuguuggauuucaug

SEQ ID NO: 26423 - RNA, 27 nt, Artificial Sequence
  Description of Artificial Sequence: Synthetic oligonucleotide
agccuucauggagaaauauauuguugg

SEQ ID NO: 26424 - RNA, 27 nt, Artificial Sequence
  Description of Artificial Sequence: Synthetic oligonucleotide
accacuccagcgugacuuuacuguugc

SEQ ID NO: 26425 - RNA, 27 nt, Artificial Sequence
  Description of Artificial Sequence: Synthetic oligonucleotide
ccucucuuccuuuacuuucuucacaca

SEQ ID NO: 26426 - RNA, 27 nt, Artificial Sequence
  Description of Artificial Sequence: Synthetic oligonucleotide
gcccgaugcaaggauggcucggaagcg

SEQ ID NO: 26427 - RNA, 27 nt, Artificial Sequence
  Description of Artificial Sequence: Synthetic oligonucleotide
cacaguaggauauucaaccuccauuuc

SEQ ID NO: 26428 - RNA, 27 nt, Artificial Sequence
  Description of Artificial Sequence: Synthetic oligonucleotide
uuacacaguaggauauucaaccuccau

SEQ ID NO: 26429 - RNA, 27 nt, Artificial Sequence
  Description of Artificial Sequence: Synthetic oligonucleotide
uacacuacaagggaaaacucaaaaucu

SEQ ID NO: 26430 - RNA, 27 nt, Artificial Sequence
  Description of Artificial Sequence: Synthetic oligonucleotide
caaucaacaaagaacaaacaggauaaa

SEQ ID NO: 26431 - RNA, 27 nt, Artificial Sequence
  Description of Artificial Sequence: Synthetic oligonucleotide
uuucaaucaacaaagaacaaacaggau

SEQ ID NO: 26432 - RNA, 27 nt, Artificial Sequence
  Description of Artificial Sequence: Synthetic oligonucleotide
auggaagaaaaagaaggcuguagagaa

SEQ ID NO: 26433 - RNA, 27 nt, Artificial Sequence
  Description of Artificial Sequence: Synthetic oligonucleotide
uagaaggaagauuagcuauggaagaaa

SEQ ID NO: 26434 - RNA, 27 nt, Artificial Sequence
  Description of Artificial Sequence: Synthetic oligonucleotide
augaagcauucaacaggaagauuauuu

SEQ ID NO: 26435 - RNA, 27 nt, Artificial Sequence
  Description of Artificial Sequence: Synthetic oligonucleotide
caugaagcauucaacaggaagauuauu

SEQ ID NO: 26436 - RNA, 27 nt, Artificial Sequence
  Description of Artificial Sequence: Synthetic oligonucleotide
ucaaaguagaauucaagucaugaagca

SEQ ID NO: 26437 - RNA, 27 nt, Artificial Sequence
  Description of Artificial Sequence: Synthetic oligonucleotide
gucuguaguugcuucucucccucuuag

SEQ ID NO: 26438 - RNA, 27 nt, Artificial Sequence
  Description of Artificial Sequence: Synthetic oligonucleotide
guugaccuuggucugguaggagacggc

SEQ ID NO: 26439 - RNA, 27 nt, Artificial Sequence
  Description of Artificial Sequence: Synthetic oligonucleotide
gucgagauagucgggccgauugaucuc

SEQ ID NO: 26440 - RNA, 27 nt, Artificial Sequence
  Description of Artificial Sequence: Synthetic oligonucleotide
guuugggaagguuggauguucguccuc

SEQ ID NO: 26441 - RNA, 27 nt, Artificial Sequence
  Description of Artificial Sequence: Synthetic oligonucleotide
aguucuaagcuuggguuccgacccuaa

SEQ ID NO: 26442 - RNA, 27 nt, Artificial Sequence
  Description of Artificial Sequence: Synthetic oligonucleotide
uuaaaguucuaagcuuggguuccgacc

SEQ ID NO: 26443 - RNA, 27 nt, Artificial Sequence
  Description of Artificial Sequence: Synthetic oligonucleotide
guugcuuaaaguucuaagcuuggguuc

SEQ ID NO: 26444 - RNA, 27 nt, Artificial Sequence
  Description of Artificial Sequence: Synthetic oligonucleotide
gugguggucuuguugcuuaaaguucua

SEQ ID NO: 26445 - RNA, 27 nt, Artificial Sequence
  Description of Artificial Sequence: Synthetic oligonucleotide
acuuuauuucucgccacugaauaguag

SEQ ID NO: 26446 - RNA, 27 nt, Artificial Sequence
  Description of Artificial Sequence: Synthetic oligonucleotide
aacuuuauuucucgccacugaauagua

SEQ ID NO: 26447 - RNA, 27 nt, Artificial Sequence
  Description of Artificial Sequence: Synthetic oligonucleotide
ggaucauuuccuguuaucuguguuugu

SEQ ID NO: 26448 - RNA, 27 nt, Artificial Sequence
  Description of Artificial Sequence: Synthetic oligonucleotide
guuucauuucuucucuuuucuuaaggc

SEQ ID NO: 26449 - RNA, 27 nt, Artificial Sequence
  Description of Artificial Sequence: Synthetic oligonucleotide
ggaggauggaaacacacuccuucaguu

SEQ ID NO: 26450 - RNA, 27 nt, Artificial Sequence
  Description of Artificial Sequence: Synthetic oligonucleotide
ucaaagauuuucagucccgcggugaca

SEQ ID NO: 26451 - RNA, 27 nt, Artificial Sequence
  Description of Artificial Sequence: Synthetic oligonucleotide
ccugaacggcacgcuuauuucugcugu

SEQ ID NO: 26452 - RNA, 27 nt, Artificial Sequence
  Description of Artificial Sequence: Synthetic oligonucleotide
cuucuggacccugaacggcacgcuuau

SEQ ID NO: 26453 - RNA, 27 nt, Artificial Sequence
  Description of Artificial Sequence: Synthetic oligonucleotide
caagcagucuugagugacuguuucuuc

SEQ ID NO: 26454 - RNA, 27 nt, Artificial Sequence
  Description of Artificial Sequence: Synthetic oligonucleotide
ccaaagacauggaccuucuuccucuga

SEQ ID NO: 26455 - RNA, 27 nt, Artificial Sequence
  Description of Artificial Sequence: Synthetic oligonucleotide
guguuucaggcauauuuugaauacauc

SEQ ID NO: 26456 - RNA, 27 nt, Artificial Sequence
  Description of Artificial Sequence: Synthetic oligonucleotide
gagguacagagaaagggaggaaaauag

SEQ ID NO: 26457 - RNA, 27 nt, Artificial Sequence
  Description of Artificial Sequence: Synthetic oligonucleotide
ucuugucuugcucuaucuuucuuuggu

SEQ ID NO: 26458 - RNA, 27 nt, Artificial Sequence
  Description of Artificial Sequence: Synthetic oligonucleotide
uuucuugucuugcucuaucuuucuuug

SEQ ID NO: 26459 - RNA, 27 nt, Artificial Sequence
  Description of Artificial Sequence: Synthetic oligonucleotide
ggaucuuguacaaacaaaugcuuucuc

SEQ ID NO: 26460 - RNA, 27 nt, Artificial Sequence
  Description of Artificial Sequence: Synthetic oligonucleotide
ucugcaaguacguucguuuaacucaag

SEQ ID NO: 26461 - RNA, 27 nt, Artificial Sequence
  Description of Artificial Sequence: Synthetic oligonucleotide
ucuguaucgaucguucuguaucagucu

SEQ ID NO: 26462 - RNA, 27 nt, Artificial Sequence
  Description of Artificial Sequence: Synthetic oligonucleotide
auuuauuuuuauauauauauaauauau

SEQ ID NO: 26463 - RNA, 27 nt, Artificial Sequence
  Description of Artificial Sequence: Synthetic oligonucleotide
auauuuauuuuuauauauauauaauau

SEQ ID NO: 26464 - RNA, 27 nt, Artificial Sequence
  Description of Artificial Sequence: Synthetic oligonucleotide
cacagcagucaaauacauccagugaag

SEQ ID NO: 26465 - RNA, 27 nt, Artificial Sequence
  Description of Artificial Sequence: Synthetic oligonucleotide
gucucucaucuccuccucuucccuguc

SEQ ID NO: 26466 - RNA, 27 nt, Artificial Sequence
  Description of Artificial Sequence: Synthetic oligonucleotide
ccaagugggacaaaaaaaagaucaugc

SEQ ID NO: 26467 - RNA, 14 nt, Artificial Sequence
  Description of Artificial Sequence: Synthetic oligonucleotide
guauuuugaugagg

SEQ ID NO: 26468 - RNA, 12 nt, Artificial Sequence
  Description of Artificial Sequence: Synthetic oligonucleotide
ggcccagaugau

SEQ ID NO: 26469 - RNA, 14 nt, Artificial Sequence
  Description of Artificial Sequence: Synthetic oligonucleotide
gggaagaaaacuau

SEQ ID NO: 26470 - RNA, 15 nt, Artificial Sequence
  Description of Artificial Sequence: Synthetic oligonucleotide
guuuuaauuuauuuc

SEQ ID NO: 26471 - RNA, 12 nt, Artificial Sequence
  Description of Artificial Sequence: Synthetic oligonucleotide
acguagggaaau

SEQ ID NO: 26472 - RNA, 12 nt, Artificial Sequence
  Description of Artificial Sequence: Synthetic oligonucleotide
ccaggguuuacc

SEQ ID NO: 26473 - RNA, 11 nt, Artificial Sequence
  Description of Artificial Sequence: Synthetic oligonucleotide
agcaagguuua

SEQ ID NO: 26474 - RNA, 12 nt, Artificial Sequence
  Description of Artificial Sequence: Synthetic oligonucleotide
uguauuauguug

SEQ ID NO: 26475 - RNA, 15 nt, Artificial Sequence
  Description of Artificial Sequence: Synthetic oligonucleotide
uuuuaaucuuuguga

SEQ ID NO: 26476 - RNA, 14 nt, Artificial Sequence
  Description of Artificial Sequence: Synthetic oligonucleotide
uuaaucuuugugac

SEQ ID NO: 26477 - RNA, 13 nt, Artificial Sequence
  Description of Artificial Sequence: Synthetic oligonucleotide
gcugcuuaugucu

SEQ ID NO: 26478 - RNA, 14 nt, Artificial Sequence
  Description of Artificial Sequence: Synthetic oligonucleotide
aaguguuucagaag

SEQ ID NO: 26479 - RNA, 13 nt, Artificial Sequence
  Description of Artificial Sequence: Synthetic oligonucleotide
gaccaucaauaag

SEQ ID NO: 26480 - RNA, 13 nt, Artificial Sequence
  Description of Artificial Sequence: Synthetic oligonucleotide
ccaucaauaagga

SEQ ID NO: 26481 - RNA, 14 nt, Artificial Sequence
  Description of Artificial Sequence: Synthetic oligonucleotide
ucaauaaggaagaa

SEQ ID NO: 26482 - RNA, 14 nt, Artificial Sequence
  Description of Artificial Sequence: Synthetic oligonucleotide
aauaaggaagaagc

SEQ ID NO: 26483 - RNA, 13 nt, Artificial Sequence
  Description of Artificial Sequence: Synthetic oligonucleotide
aggaagaagcccu

SEQ ID NO: 26484 - RNA, 13 nt, Artificial Sequence
  Description of Artificial Sequence: Synthetic oligonucleotide
gcauaacuaaagg

SEQ ID NO: 26485 - RNA, 14 nt, Artificial Sequence
  Description of Artificial Sequence: Synthetic oligonucleotide
cauaacuaaaggug

SEQ ID NO: 26486 - RNA, 12 nt, Artificial Sequence
  Description of Artificial Sequence: Synthetic oligonucleotide
cuacaucacgcc

SEQ ID NO: 26487 - RNA, 12 nt, Artificial Sequence
  Description of Artificial Sequence: Synthetic oligonucleotide
acuggauuuaag

SEQ ID NO: 26488 - RNA, 12 nt, Artificial Sequence
  Description of Artificial Sequence: Synthetic oligonucleotide
cuggauuuaagc

SEQ ID NO: 26489 - RNA, 13 nt, Artificial Sequence
  Description of Artificial Sequence: Synthetic oligonucleotide
gauuuaagcagag

SEQ ID NO: 26490 - RNA, 13 nt, Artificial Sequence
  Description of Artificial Sequence: Synthetic oligonucleotide
auuuaagcagagu

SEQ ID NO: 26491 - RNA, 13 nt, Artificial Sequence
  Description of Artificial Sequence: Synthetic oligonucleotide
uuaagcagaguuc

SEQ ID NO: 26492 - RNA, 13 nt, Artificial Sequence
  Description of Artificial Sequence: Synthetic oligonucleotide
uaagcagaguuca

SEQ ID NO: 26493 - RNA, 14 nt, Artificial Sequence
  Description of Artificial Sequence: Synthetic oligonucleotide
agcagaguucaaaa

SEQ ID NO: 26494 - RNA, 12 nt, Artificial Sequence
  Description of Artificial Sequence: Synthetic oligonucleotide
cucagggucuga

SEQ ID NO: 26495 - RNA, 13 nt, Artificial Sequence
  Description of Artificial Sequence: Synthetic oligonucleotide
caagcaacuacau

SEQ ID NO: 26496 - RNA, 12 nt, Artificial Sequence
  Description of Artificial Sequence: Synthetic oligonucleotide
aucaauggcagc

SEQ ID NO: 26497 - RNA, 11 nt, Artificial Sequence
  Description of Artificial Sequence: Synthetic oligonucleotide
uuccagcccac

SEQ ID NO: 26498 - RNA, 12 nt, Artificial Sequence
  Description of Artificial Sequence: Synthetic oligonucleotide
cagcugagaaug

SEQ ID NO: 26499 - RNA, 13 nt, Artificial Sequence
  Description of Artificial Sequence: Synthetic oligonucleotide
aacguaucuccua

SEQ ID NO: 26500 - RNA, 14 nt, Artificial Sequence
  Description of Artificial Sequence: Synthetic oligonucleotide
ccuaaaauaauuuc

SEQ ID NO: 26501 - RNA, 13 nt, Artificial Sequence
  Description of Artificial Sequence: Synthetic oligonucleotide
uggaagauucagc

SEQ ID NO: 26502 - RNA, 12 nt, Artificial Sequence
  Description of Artificial Sequence: Synthetic oligonucleotide
uuaaacucuccu

SEQ ID NO: 26503 - RNA, 12 nt, Artificial Sequence
  Description of Artificial Sequence: Synthetic oligonucleotide
cagccuacaguu

SEQ ID NO: 26504 - RNA, 13 nt, Artificial Sequence
  Description of Artificial Sequence: Synthetic oligonucleotide
guuauguucaguc

SEQ ID NO: 26505 - RNA, 13 nt, Artificial Sequence
  Description of Artificial Sequence: Synthetic oligonucleotide
cacauacaaaaug

SEQ ID NO: 26506 - RNA, 9 nt, Artificial Sequence
  Description of Artificial Sequence: Synthetic oligonucleotide
uccuuuugc

SEQ ID NO: 26507 - RNA, 12 nt, Artificial Sequence
  Description of Artificial Sequence: Synthetic oligonucleotide
ugaccugugaag

SEQ ID NO: 26508 - RNA, 12 nt, Artificial Sequence
  Description of Artificial Sequence: Synthetic oligonucleotide
cuaucucacaca

SEQ ID NO: 26509 - RNA, 13 nt, Artificial Sequence
  Description of Artificial Sequence: Synthetic oligonucleotide
uguccucaauugu

SEQ ID NO: 26510 - RNA, 12 nt, Artificial Sequence
  Description of Artificial Sequence: Synthetic oligonucleotide
aaaccguagcug

SEQ ID NO: 26511 - RNA, 12 nt, Artificial Sequence
  Description of Artificial Sequence: Synthetic oligonucleotide
uagcuggcaagc

SEQ ID NO: 26512 - RNA, 14 nt, Artificial Sequence
  Description of Artificial Sequence: Synthetic oligonucleotide
uuguaugguuaaaa

SEQ ID NO: 26513 - RNA, 14 nt, Artificial Sequence
  Description of Artificial Sequence: Synthetic oligonucleotide
ugguuaaaagaugg

SEQ ID NO: 26514 - RNA, 13 nt, Artificial Sequence
  Description of Artificial Sequence: Synthetic oligonucleotide
cagggaauuauac

SEQ ID NO: 26515 - RNA, 12 nt, Artificial Sequence
  Description of Artificial Sequence: Synthetic oligonucleotide
acaaucuugcug

SEQ ID NO: 26516 - RNA, 13 nt, Artificial Sequence
  Description of Artificial Sequence: Synthetic oligonucleotide
ccaauaaugaaga

SEQ ID NO: 26517 - RNA, 13 nt, Artificial Sequence
  Description of Artificial Sequence: Synthetic oligonucleotide
acuuuggauguuc

SEQ ID NO: 26518 - RNA, 12 nt, Artificial Sequence
  Description of Artificial Sequence: Synthetic oligonucleotide
aaugcuuccacu

SEQ ID NO: 26519 - RNA, 11 nt, Artificial Sequence
  Description of Artificial Sequence: Synthetic oligonucleotide
gagaaaguuug

SEQ ID NO: 26520 - RNA, 11 nt, Artificial Sequence
  Description of Artificial Sequence: Synthetic oligonucleotide
aaagaacuacu

SEQ ID NO: 26521 - RNA, 12 nt, Artificial Sequence
  Description of Artificial Sequence: Synthetic oligonucleotide
uuagaaauacgg

SEQ ID NO: 26522 - RNA, 12 nt, Artificial Sequence
  Description of Artificial Sequence: Synthetic oligonucleotide
aacauggguaca

SEQ ID NO: 26523 - RNA, 14 nt, Artificial Sequence
  Description of Artificial Sequence: Synthetic oligonucleotide
aaagacacagaaga

SEQ ID NO: 26524 - RNA, 11 nt, Artificial Sequence
  Description of Artificial Sequence: Synthetic oligonucleotide
uaguagggagg

SEQ ID NO: 26525 - RNA, 12 nt, Artificial Sequence
  Description of Artificial Sequence: Synthetic oligonucleotide
gccuucugcagc

SEQ ID NO: 26526 - RNA, 10 nt, Artificial Sequence
  Description of Artificial Sequence: Synthetic oligonucleotide
ggucugguac

SEQ ID NO: 26527 - RNA, 12 nt, Artificial Sequence
  Description of Artificial Sequence: Synthetic oligonucleotide
cuaguccuuccg

SEQ ID NO: 26528 - RNA, 12 nt, Artificial Sequence
  Description of Artificial Sequence: Synthetic oligonucleotide
ccagugaauauu

SEQ ID NO: 26529 - RNA, 13 nt, Artificial Sequence
  Description of Artificial Sequence: Synthetic oligonucleotide
augaauucaaguu

SEQ ID NO: 26530 - RNA, 12 nt, Artificial Sequence
  Description of Artificial Sequence: Synthetic oligonucleotide
caggacacagau

SEQ ID NO: 26531 - RNA, 12 nt, Artificial Sequence
  Description of Artificial Sequence: Synthetic oligonucleotide
cucaaagcacag

SEQ ID NO: 26532 - RNA, 10 nt, Artificial Sequence
  Description of Artificial Sequence: Synthetic oligonucleotide
accacugcca

SEQ ID NO: 26533 - RNA, 13 nt, Artificial Sequence
  Description of Artificial Sequence: Synthetic oligonucleotide
gaaacuacuagug

SEQ ID NO: 26534 - RNA, 12 nt, Artificial Sequence
  Description of Artificial Sequence: Synthetic oligonucleotide
aagucggacagc

SEQ ID NO: 26535 - RNA, 13 nt, Artificial Sequence
  Description of Artificial Sequence: Synthetic oligonucleotide
gaaagcgaaaaau

SEQ ID NO: 26536 - RNA, 13 nt, Artificial Sequence
  Description of Artificial Sequence: Synthetic oligonucleotide
cccucugauuuag

SEQ ID NO: 26537 - RNA, 12 nt, Artificial Sequence
  Description of Artificial Sequence: Synthetic oligonucleotide
ugagcuauuuaa

SEQ ID NO: 26538 - RNA, 13 nt, Artificial Sequence
  Description of Artificial Sequence: Synthetic oligonucleotide
aaaaggugaaaaa

SEQ ID NO: 26539 - RNA, 14 nt, Artificial Sequence
  Description of Artificial Sequence: Synthetic oligonucleotide
gaaaaagcacuauu

SEQ ID NO: 26540 - RNA, 12 nt, Artificial Sequence
  Description of Artificial Sequence: Synthetic oligonucleotide
ggcugaaaagaa

SEQ ID NO: 26541 - RNA, 12 nt, Artificial Sequence
  Description of Artificial Sequence: Synthetic oligonucleotide
uaaacccuuaua

SEQ ID NO: 26542 - RNA, 13 nt, Artificial Sequence
  Description of Artificial Sequence: Synthetic oligonucleotide
cauacuauuagcc

SEQ ID NO: 26543 - RNA, 12 nt, Artificial Sequence
  Description of Artificial Sequence: Synthetic oligonucleotide
gacagaagcauu

SEQ ID NO: 26544 - RNA, 14 nt, Artificial Sequence
  Description of Artificial Sequence: Synthetic oligonucleotide
agagcaaauaagau

SEQ ID NO: 26545 - RNA, 14 nt, Artificial Sequence
  Description of Artificial Sequence: Synthetic oligonucleotide
ccaacauuuuucuc

SEQ ID NO: 26546 - RNA, 15 nt, Artificial Sequence
  Description of Artificial Sequence: Synthetic oligonucleotide
uuaaguaugagaaaa

SEQ ID NO: 26547 - RNA, 14 nt, Artificial Sequence
  Description of Artificial Sequence: Synthetic oligonucleotide
caggaauaaagaug

SEQ ID NO: 26548 - RNA, 13 nt, Artificial Sequence
  Description of Artificial Sequence: Synthetic oligonucleotide
aauuugaaugacc

SEQ ID NO: 26549 - RNA, 14 nt, Artificial Sequence
  Description of Artificial Sequence: Synthetic oligonucleotide
auguauaaagauag

SEQ ID NO: 26550 - RNA, 12 nt, Artificial Sequence
  Description of Artificial Sequence: Synthetic oligonucleotide
ggcuguaacuau

SEQ ID NO: 26551 - RNA, 11 nt, Artificial Sequence
  Description of Artificial Sequence: Synthetic oligonucleotide
ucugugaagug

SEQ ID NO: 26552 - RNA, 14 nt, Artificial Sequence
  Description of Artificial Sequence: Synthetic oligonucleotide
ccuuuaaggaaaug

SEQ ID NO: 26553 - RNA, 13 nt, Artificial Sequence
  Description of Artificial Sequence: Synthetic oligonucleotide
aaggauacaaaaa

SEQ ID NO: 26554 - RNA, 12 nt, Artificial Sequence
  Description of Artificial Sequence: Synthetic oligonucleotide
agaugcaauuug

SEQ ID NO: 26555 - RNA, 12 nt, Artificial Sequence
  Description of Artificial Sequence: Synthetic oligonucleotide
guucaaaacgaa

SEQ ID NO: 26556 - RNA, 11 nt, Artificial Sequence
  Description of Artificial Sequence: Synthetic oligonucleotide
gugaaaccuca

SEQ ID NO: 26557 - RNA, 13 nt, Artificial Sequence
  Description of Artificial Sequence: Synthetic oligonucleotide
acgaaagagaagc

SEQ ID NO: 26558 - RNA, 12 nt, Artificial Sequence
  Description of Artificial Sequence: Synthetic oligonucleotide
cuccacaagcgc

SEQ ID NO: 26559 - RNA, 14 nt, Artificial Sequence
  Description of Artificial Sequence: Synthetic oligonucleotide
gagaagauuccaaa

SEQ ID NO: 26560 - RNA, 13 nt, Artificial Sequence
  Description of Artificial Sequence: Synthetic oligonucleotide
aaucuggauucaa

SEQ ID NO: 26561 - RNA, 13 nt, Artificial Sequence
  Description of Artificial Sequence: Synthetic oligonucleotide
agaacagauuuga

SEQ ID NO: 26562 - RNA, 11 nt, Artificial Sequence
  Description of Artificial Sequence: Synthetic oligonucleotide
ccagagcugug

SEQ ID NO: 26563 - RNA, 12 nt, Artificial Sequence
  Description of Artificial Sequence: Synthetic oligonucleotide
ccucagauuguu

SEQ ID NO: 26564 - RNA, 12 nt, Artificial Sequence
  Description of Artificial Sequence: Synthetic oligonucleotide
cuauuuuaauua

SEQ ID NO: 26565 - RNA, 13 nt, Artificial Sequence
  Description of Artificial Sequence: Synthetic oligonucleotide
uuuaauuuauuaa

SEQ ID NO: 26566 - RNA, 12 nt, Artificial Sequence
  Description of Artificial Sequence: Synthetic oligonucleotide
augcaguuugaa

SEQ ID NO: 26567 - RNA, 11 nt, Artificial Sequence
  Description of Artificial Sequence: Synthetic oligonucleotide
caugcugcugg

SEQ ID NO: 26568 - RNA, 13 nt, Artificial Sequence
  Description of Artificial Sequence: Synthetic oligonucleotide
agaugugcauuuc

SEQ ID NO: 26569 - RNA, 12 nt, Artificial Sequence
  Description of Artificial Sequence: Synthetic oligonucleotide
ucaaaaccugug

SEQ ID NO: 26570 - RNA, 11 nt, Artificial Sequence
  Description of Artificial Sequence: Synthetic oligonucleotide
gaaugugggua

SEQ ID NO: 26571 - RNA, 10 nt, Artificial Sequence
  Description of Artificial Sequence: Synthetic oligonucleotide
auguggguag

SEQ ID NO: 26572 - RNA, 13 nt, Artificial Sequence
  Description of Artificial Sequence: Synthetic oligonucleotide
ugaaaaugagcau

SEQ ID NO: 26573 - RNA, 13 nt, Artificial Sequence
  Description of Artificial Sequence: Synthetic oligonucleotide
uugcuuuucaugu

SEQ ID NO: 26574 - RNA, 12 nt, Artificial Sequence
  Description of Artificial Sequence: Synthetic oligonucleotide
uguauuucuaua

SEQ ID NO: 26575 - RNA, 13 nt, Artificial Sequence
  Description of Artificial Sequence: Synthetic oligonucleotide
uuugauuaauguu

SEQ ID NO: 26576 - RNA, 12 nt, Artificial Sequence
  Description of Artificial Sequence: Synthetic oligonucleotide
caacguguauag

SEQ ID NO: 26577 - RNA, 12 nt, Artificial Sequence
  Description of Artificial Sequence: Synthetic oligonucleotide
cauauccuuggc

SEQ ID NO: 26578 - RNA, 13 nt, Artificial Sequence
  Description of Artificial Sequence: Synthetic oligonucleotide
uacuaacaucugg

SEQ ID NO: 26579 - RNA, 11 nt, Artificial Sequence
  Description of Artificial Sequence: Synthetic oligonucleotide
cauaaguugug

SEQ ID NO: 26580 - RNA, 12 nt, Artificial Sequence
  Description of Artificial Sequence: Synthetic oligonucleotide
gcaucauuuugg

SEQ ID NO: 26581 - RNA, 10 nt, Artificial Sequence
  Description of Artificial Sequence: Synthetic oligonucleotide
gcucuucuua

SEQ ID NO: 26582 - RNA, 10 nt, Artificial Sequence
  Description of Artificial Sequence: Synthetic oligonucleotide
agauuagguc

SEQ ID NO: 26583 - RNA, 12 nt, Artificial Sequence
  Description of Artificial Sequence: Synthetic oligonucleotide
auggaauugaaa

SEQ ID NO: 26584 - RNA, 13 nt, Artificial Sequence
  Description of Artificial Sequence: Synthetic oligonucleotide
cacacucauuccu

SEQ ID NO: 26585 - RNA, 12 nt, Artificial Sequence
  Description of Artificial Sequence: Synthetic oligonucleotide
uguagagguaac

SEQ ID NO: 26586 - RNA, 11 nt, Artificial Sequence
  Description of Artificial Sequence: Synthetic oligonucleotide
caaccacaugc

SEQ ID NO: 26587 - RNA, 12 nt, Artificial Sequence
  Description of Artificial Sequence: Synthetic oligonucleotide
ucggaaacaagu

SEQ ID NO: 26588 - RNA, 11 nt, Artificial Sequence
  Description of Artificial Sequence: Synthetic oligonucleotide
acucccaauaa

SEQ ID NO: 26589 - RNA, 13 nt, Artificial Sequence
  Description of Artificial Sequence: Synthetic oligonucleotide
aaugcuaagaaau

SEQ ID NO: 26590 - RNA, 11 nt, Artificial Sequence
  Description of Artificial Sequence: Synthetic oligonucleotide
gucuuucucua

SEQ ID NO: 26591 - RNA, 11 nt, Artificial Sequence
  Description of Artificial Sequence: Synthetic oligonucleotide
ugaauuucagg

SEQ ID NO: 26592 - RNA, 13 nt, Artificial Sequence
  Description of Artificial Sequence: Synthetic oligonucleotide
cgauucccucuca

SEQ ID NO: 26593 - RNA, 11 nt, Artificial Sequence
  Description of Artificial Sequence: Synthetic oligonucleotide
aggaaagugaa

SEQ ID NO: 26594 - RNA, 12 nt, Artificial Sequence
  Description of Artificial Sequence: Synthetic oligonucleotide
gaggcugcaugc

SEQ ID NO: 26595 - RNA, 11 nt, Artificial Sequence
  Description of Artificial Sequence: Synthetic oligonucleotide
ucucugaacag

SEQ ID NO: 26596 - RNA, 12 nt, Artificial Sequence
  Description of Artificial Sequence: Synthetic oligonucleotide
aacuuggcugua

SEQ ID NO: 26597 - RNA, 12 nt, Artificial Sequence
  Description of Artificial Sequence: Synthetic oligonucleotide
agaagccaaaau

SEQ ID NO: 26598 - RNA, 14 nt, Artificial Sequence
  Description of Artificial Sequence: Synthetic oligonucleotide
auuaaaagaagucc

SEQ ID NO: 26599 - RNA, 14 nt, Artificial Sequence
  Description of Artificial Sequence: Synthetic oligonucleotide
gaauccggauuauc

SEQ ID NO: 26600 - RNA, 12 nt, Artificial Sequence
  Description of Artificial Sequence: Synthetic oligonucleotide
aaugugacauca

SEQ ID NO: 26601 - RNA, 13 nt, Artificial Sequence
  Description of Artificial Sequence: Synthetic oligonucleotide
caucaaagcaagu

SEQ ID NO: 26602 - RNA, 11 nt, Artificial Sequence
  Description of Artificial Sequence: Synthetic oligonucleotide
agagagagaaa

SEQ ID NO: 26603 - RNA, 13 nt, Artificial Sequence
  Description of Artificial Sequence: Synthetic oligonucleotide
ucgcuguaguauu

SEQ ID NO: 26604 - RNA, 14 nt, Artificial Sequence
  Description of Artificial Sequence: Synthetic oligonucleotide
cgcuguaguauuua

SEQ ID NO: 26605 - RNA, 13 nt, Artificial Sequence
  Description of Artificial Sequence: Synthetic oligonucleotide
auuuaagcccaua

SEQ ID NO: 26606 - RNA, 15 nt, Artificial Sequence
  Description of Artificial Sequence: Synthetic oligonucleotide
auuaaaauaaacaug

SEQ ID NO: 26607 - RNA, 12 nt, Artificial Sequence
  Description of Artificial Sequence: Synthetic oligonucleotide
cuguucugaucg

SEQ ID NO: 26608 - RNA, 16 nt, Artificial Sequence
  Description of Artificial Sequence: Synthetic oligonucleotide
aaauaauuugaacuuu

SEQ ID NO: 26609 - RNA, 12 nt, Artificial Sequence
  Description of Artificial Sequence: Synthetic oligonucleotide
ugcgaccuuaau

SEQ ID NO: 26610 - RNA, 11 nt, Artificial Sequence
  Description of Artificial Sequence: Synthetic oligonucleotide
cugagaaagcu

SEQ ID NO: 26611 - RNA, 13 nt, Artificial Sequence
  Description of Artificial Sequence: Synthetic oligonucleotide
aguaaagaugcua

SEQ ID NO: 26612 - RNA, 12 nt, Artificial Sequence
  Description of Artificial Sequence: Synthetic oligonucleotide
cugcuuaauugc

SEQ ID NO: 26613 - RNA, 14 nt, Artificial Sequence
  Description of Artificial Sequence: Synthetic oligonucleotide
uaccauaugaauga

SEQ ID NO: 26614 - RNA, 12 nt, Artificial Sequence
  Description of Artificial Sequence: Synthetic oligonucleotide
aacuuucuuauc

SEQ ID NO: 26615 - RNA, 13 nt, Artificial Sequence
  Description of Artificial Sequence: Synthetic oligonucleotide
ccuugcaugacau

SEQ ID NO: 26616 - RNA, 14 nt, Artificial Sequence
  Description of Artificial Sequence: Synthetic oligonucleotide
ugaauuuguauaug

SEQ ID NO: 26617 - RNA, 12 nt, Artificial Sequence
  Description of Artificial Sequence: Synthetic oligonucleotide
gaauccuaguag

SEQ ID NO: 26618 - RNA, 10 nt, Artificial Sequence
  Description of Artificial Sequence: Synthetic oligonucleotide
gaaagggaag

SEQ ID NO: 26619 - RNA, 11 nt, Artificial Sequence
  Description of Artificial Sequence: Synthetic oligonucleotide
uaucggcaugc

SEQ ID NO: 26620 - RNA, 12 nt, Artificial Sequence
  Description of Artificial Sequence: Synthetic oligonucleotide
caccucauagua

SEQ ID NO: 26621 - RNA, 11 nt, Artificial Sequence
  Description of Artificial Sequence: Synthetic oligonucleotide
ccagaauugcc

SEQ ID NO: 26622 - RNA, 11 nt, Artificial Sequence
  Description of Artificial Sequence: Synthetic oligonucleotide
uggugaucugg

SEQ ID NO: 26623 - RNA, 12 nt, Artificial Sequence
  Description of Artificial Sequence: Synthetic oligonucleotide
gaucuggguaau

SEQ ID NO: 26624 - RNA, 12 nt, Artificial Sequence
  Description of Artificial Sequence: Synthetic oligonucleotide
ggaugugaugaa

SEQ ID NO: 26625 - RNA, 12 nt, Artificial Sequence
  Description of Artificial Sequence: Synthetic oligonucleotide
cauuuccacagc

SEQ ID NO: 26626 - RNA, 11 nt, Artificial Sequence
  Description of Artificial Sequence: Synthetic oligonucleotide
acagcuacacc

SEQ ID NO: 26627 - RNA, 12 nt, Artificial Sequence
  Description of Artificial Sequence: Synthetic oligonucleotide
ugcaguucuuac

SEQ ID NO: 26628 - RNA, 12 nt, Artificial Sequence
  Description of Artificial Sequence: Synthetic oligonucleotide
acgagaagaaga

SEQ ID NO: 26629 - RNA, 12 nt, Artificial Sequence
  Description of Artificial Sequence: Synthetic oligonucleotide
cgagaagaagau

SEQ ID NO: 26630 - RNA, 15 nt, Artificial Sequence
  Description of Artificial Sequence: Synthetic oligonucleotide
aagaagaucauuuac

SEQ ID NO: 26631 - RNA, 11 nt, Artificial Sequence
  Description of Artificial Sequence: Synthetic oligonucleotide
agaggaagagg

SEQ ID NO: 26632 - RNA, 12 nt, Artificial Sequence
  Description of Artificial Sequence: Synthetic oligonucleotide
gaggaagaggug

SEQ ID NO: 26633 - RNA, 13 nt, Artificial Sequence
  Description of Artificial Sequence: Synthetic oligonucleotide
cuacuuugagggc

SEQ ID NO: 26634 - RNA, 12 nt, Artificial Sequence
  Description of Artificial Sequence: Synthetic oligonucleotide
agggcaucuccu

SEQ ID NO: 26635 - RNA, 10 nt, Artificial Sequence
  Description of Artificial Sequence: Synthetic oligonucleotide
ggagugauau

SEQ ID NO: 26636 - RNA, 11 nt, Artificial Sequence
  Description of Artificial Sequence: Synthetic oligonucleotide
gagugauaugg

SEQ ID NO: 26637 - RNA, 12 nt, Artificial Sequence
  Description of Artificial Sequence: Synthetic oligonucleotide
ugcaguaaagau

SEQ ID NO: 26638 - RNA, 13 nt, Artificial Sequence
  Description of Artificial Sequence: Synthetic oligonucleotide
aguaaagauccua

SEQ ID NO: 26639 - RNA, 12 nt, Artificial Sequence
  Description of Artificial Sequence: Synthetic oligonucleotide
ugacaaaggaca

SEQ ID NO: 26640 - RNA, 13 nt, Artificial Sequence
  Description of Artificial Sequence: Synthetic oligonucleotide
gcaauugugaccc

SEQ ID NO: 26641 - RNA, 12 nt, Artificial Sequence
  Description of Artificial Sequence: Synthetic oligonucleotide
aacaucauccau

SEQ ID NO: 26642 - RNA, 12 nt, Artificial Sequence
  Description of Artificial Sequence: Synthetic oligonucleotide
ugaaauccaaca

SEQ ID NO: 26643 - RNA, 15 nt, Artificial Sequence
  Description of Artificial Sequence: Synthetic oligonucleotide
aacaauauauuucuc

SEQ ID NO: 26644 - RNA, 14 nt, Artificial Sequence
  Description of Artificial Sequence: Synthetic oligonucleotide
aacaguaaagucac

SEQ ID NO: 26645 - RNA, 14 nt, Artificial Sequence
  Description of Artificial Sequence: Synthetic oligonucleotide
ugugaagaaaguaa

SEQ ID NO: 26646 - RNA, 13 nt, Artificial Sequence
  Description of Artificial Sequence: Synthetic oligonucleotide
cuuccgagccauc

SEQ ID NO: 26647 - RNA, 12 nt, Artificial Sequence
  Description of Artificial Sequence: Synthetic oligonucleotide
aauggagguuga

SEQ ID NO: 26648 - RNA, 12 nt, Artificial Sequence
  Description of Artificial Sequence: Synthetic oligonucleotide
ggagguugaaua

SEQ ID NO: 26649 - RNA, 13 nt, Artificial Sequence
  Description of Artificial Sequence: Synthetic oligonucleotide
auuuugaguuuuc

SEQ ID NO: 26650 - RNA, 12 nt, Artificial Sequence
  Description of Artificial Sequence: Synthetic oligonucleotide
uauccuguuugu

SEQ ID NO: 26651 - RNA, 11 nt, Artificial Sequence
  Description of Artificial Sequence: Synthetic oligonucleotide
ccuguuuguuc

SEQ ID NO: 26652 - RNA, 10 nt, Artificial Sequence
  Description of Artificial Sequence: Synthetic oligonucleotide
cucuacagcc

SEQ ID NO: 26653 - RNA, 12 nt, Artificial Sequence
  Description of Artificial Sequence: Synthetic oligonucleotide
ucuuccauagcu

SEQ ID NO: 26654 - RNA, 12 nt, Artificial Sequence
  Description of Artificial Sequence: Synthetic oligonucleotide
auaaucuuccug

SEQ ID NO: 26655 - RNA, 12 nt, Artificial Sequence
  Description of Artificial Sequence: Synthetic oligonucleotide
uaaucuuccugu

SEQ ID NO: 26656 - RNA, 12 nt, Artificial Sequence
  Description of Artificial Sequence: Synthetic oligonucleotide
cuucaugacuug

SEQ ID NO: 26657 - RNA, 12 nt, Artificial Sequence
  Description of Artificial Sequence: Synthetic oligonucleotide
aagagggagaga

SEQ ID NO: 26658 - RNA, 12 nt, Artificial Sequence
  Description of Artificial Sequence: Synthetic oligonucleotide
cgucuccuacca

SEQ ID NO: 26659 - RNA, 12 nt, Artificial Sequence
  Description of Artificial Sequence: Synthetic oligonucleotide
gaucaaucggcc

SEQ ID NO: 26660 - RNA, 12 nt, Artificial Sequence
  Description of Artificial Sequence: Synthetic oligonucleotide
ggacgaacaucc

SEQ ID NO: 26661 - RNA, 11 nt, Artificial Sequence
  Description of Artificial Sequence: Synthetic oligonucleotide
agggucggaac

SEQ ID NO: 26662 - RNA, 10 nt, Artificial Sequence
  Description of Artificial Sequence: Synthetic oligonucleotide
ucggaaccca

SEQ ID NO: 26663 - RNA, 11 nt, Artificial Sequence
  Description of Artificial Sequence: Synthetic oligonucleotide
acccaagcuua

SEQ ID NO: 26664 - RNA, 14 nt, Artificial Sequence
  Description of Artificial Sequence: Synthetic oligonucleotide
gaacuuuaagcaac

SEQ ID NO: 26665 - RNA, 11 nt, Artificial Sequence
  Description of Artificial Sequence: Synthetic oligonucleotide
acuauucagug

SEQ ID NO: 26666 - RNA, 11 nt, Artificial Sequence
  Description of Artificial Sequence: Synthetic oligonucleotide
cuauucagugg

SEQ ID NO: 26667 - RNA, 13 nt, Artificial Sequence
  Description of Artificial Sequence: Synthetic oligonucleotide
aaacacagauaac

SEQ ID NO: 26668 - RNA, 12 nt, Artificial Sequence
  Description of Artificial Sequence: Synthetic oligonucleotide
cuuaagaaaaga

SEQ ID NO: 26669 - RNA, 12 nt, Artificial Sequence
  Description of Artificial Sequence: Synthetic oligonucleotide
cugaaggagugu

SEQ ID NO: 26670 - RNA, 10 nt, Artificial Sequence
  Description of Artificial Sequence: Synthetic oligonucleotide
ucaccgcggg

SEQ ID NO: 26671 - RNA, 14 nt, Artificial Sequence
  Description of Artificial Sequence: Synthetic oligonucleotide
agcagaaauaagcg

SEQ ID NO: 26672 - RNA, 12 nt, Artificial Sequence
  Description of Artificial Sequence: Synthetic oligonucleotide
aagcgugccguu

SEQ ID NO: 26673 - RNA, 12 nt, Artificial Sequence
  Description of Artificial Sequence: Synthetic oligonucleotide
agaaacagucac

SEQ ID NO: 26674 - RNA, 12 nt, Artificial Sequence
  Description of Artificial Sequence: Synthetic oligonucleotide
agaggaagaagg

SEQ ID NO: 26675 - RNA, 14 nt, Artificial Sequence
  Description of Artificial Sequence: Synthetic oligonucleotide
uguauucaaaauau

SEQ ID NO: 26676 - RNA, 13 nt, Artificial Sequence
  Description of Artificial Sequence: Synthetic oligonucleotide
auuuuccucccuu

SEQ ID NO: 26677 - RNA, 13 nt, Artificial Sequence
  Description of Artificial Sequence: Synthetic oligonucleotide
caaagaaagauag

SEQ ID NO: 26678 - RNA, 12 nt, Artificial Sequence
  Description of Artificial Sequence: Synthetic oligonucleotide
aagaaagauaga

SEQ ID NO: 26679 - RNA, 13 nt, Artificial Sequence
  Description of Artificial Sequence: Synthetic oligonucleotide
gaaagcauuuguu

SEQ ID NO: 26680 - RNA, 13 nt, Artificial Sequence
  Description of Artificial Sequence: Synthetic oligonucleotide
ugaguuaaacgaa

SEQ ID NO: 26681 - RNA, 12 nt, Artificial Sequence
  Description of Artificial Sequence: Synthetic oligonucleotide
acugauacagaa

SEQ ID NO: 26682 - RNA, 12 nt, Artificial Sequence
  Description of Artificial Sequence: Synthetic oligonucleotide
auauuauauaua

SEQ ID NO: 26683 - RNA, 12 nt, Artificial Sequence
  Description of Artificial Sequence: Synthetic oligonucleotide
auuauauauaua

SEQ ID NO: 26684 - RNA, 12 nt, Artificial Sequence
  Description of Artificial Sequence: Synthetic oligonucleotide
ucacuggaugua

SEQ ID NO: 26685 - RNA, 12 nt, Artificial Sequence
  Description of Artificial Sequence: Synthetic oligonucleotide
cagggaagagga

SEQ ID NO: 26686 - RNA, 15 nt, Artificial Sequence
  Description of Artificial Sequence: Synthetic oligonucleotide
augaucuuuuuuuug

SEQ ID NO: 26687 - RNA, 11 nt, Artificial Sequence
  Description of Artificial Sequence: Synthetic oligonucleotide
aguucacggcc

SEQ ID NO: 26688 - RNA, 13 nt, Artificial Sequence
  Description of Artificial Sequence: Synthetic oligonucleotide
caccaucacacca

SEQ ID NO: 26689 - RNA, 11 nt, Artificial Sequence
  Description of Artificial Sequence: Synthetic oligonucleotide
ccugcggguuu

SEQ ID NO: 26690 - RNA, 10 nt, Artificial Sequence
  Description of Artificial Sequence: Synthetic oligonucleotide
auccaguuug

SEQ ID NO: 26691 - RNA, 13 nt, Artificial Sequence
  Description of Artificial Sequence: Synthetic oligonucleotide
guuaaggacuucu

SEQ ID NO: 26692 - RNA, 13 nt, Artificial Sequence
  Description of Artificial Sequence: Synthetic oligonucleotide
cagugggacagag

SEQ ID NO: 26693 - RNA, 14 nt, Artificial Sequence
  Description of Artificial Sequence: Synthetic oligonucleotide
aauuuguuauugug

SEQ ID NO: 26694 - RNA, 13 nt, Artificial Sequence
  Description of Artificial Sequence: Synthetic oligonucleotide
uucaaaugcauuu

SEQ ID NO: 26695 - RNA, 10 nt, Artificial Sequence
  Description of Artificial Sequence: Synthetic oligonucleotide
caggaaagcc

SEQ ID NO: 26696 - RNA, 11 nt, Artificial Sequence
  Description of Artificial Sequence: Synthetic oligonucleotide
aggaaagcccu

SEQ ID NO: 26697 - RNA, 12 nt, Artificial Sequence
  Description of Artificial Sequence: Synthetic oligonucleotide
cccagcauggcc

SEQ ID NO: 26698 - RNA, 11 nt, Artificial Sequence
  Description of Artificial Sequence: Synthetic oligonucleotide
cuucucccuga

SEQ ID NO: 26699 - RNA, 12 nt, Artificial Sequence
  Description of Artificial Sequence: Synthetic oligonucleotide
gaagaagcccuu

SEQ ID NO: 26700 - RNA, 12 nt, Artificial Sequence
  Description of Artificial Sequence: Synthetic oligonucleotide
agaagcccuuca

SEQ ID NO: 26701 - RNA, 11 nt, Artificial Sequence
  Description of Artificial Sequence: Synthetic oligonucleotide
gcccuucagcg

SEQ ID NO: 26702 - RNA, 11 nt, Artificial Sequence
  Description of Artificial Sequence: Synthetic oligonucleotide
ccuucagcggc

SEQ ID NO: 26703 - RNA, 12 nt, Artificial Sequence
  Description of Artificial Sequence: Synthetic oligonucleotide
ucagcggccagu

SEQ ID NO: 26704 - RNA, 12 nt, Artificial Sequence
  Description of Artificial Sequence: Synthetic oligonucleotide
ugaaaagcuccg

SEQ ID NO: 26705 - RNA, 11 nt, Artificial Sequence
  Description of Artificial Sequence: Synthetic oligonucleotide
aaaagcuccgg

SEQ ID NO: 26706 - RNA, 13 nt, Artificial Sequence
  Description of Artificial Sequence: Synthetic oligonucleotide
agucaacagucug

SEQ ID NO: 26707 - RNA, 13 nt, Artificial Sequence
  Description of Artificial Sequence: Synthetic oligonucleotide
cagaguucaaaag

SEQ ID NO: 26708 - RNA, 13 nt, Artificial Sequence
  Description of Artificial Sequence: Synthetic oligonucleotide
agaguucaaaagc

SEQ ID NO: 26709 - RNA, 12 nt, Artificial Sequence
  Description of Artificial Sequence: Synthetic oligonucleotide
uucaaaagcccu

SEQ ID NO: 26710 - RNA, 12 nt, Artificial Sequence
  Description of Artificial Sequence: Synthetic oligonucleotide
ucaaaagcccuu

SEQ ID NO: 26711 - RNA, 12 nt, Artificial Sequence
  Description of Artificial Sequence: Synthetic oligonucleotide
aaaagcccuuca

SEQ ID NO: 26712 - RNA, 12 nt, Artificial Sequence
  Description of Artificial Sequence: Synthetic oligonucleotide
aaagcccuucag

SEQ ID NO: 26713 - RNA, 13 nt, Artificial Sequence
  Description of Artificial Sequence: Synthetic oligonucleotide
gugaagccgcucg

SEQ ID NO: 26714 - RNA, 12 nt, Artificial Sequence
  Description of Artificial Sequence: Synthetic oligonucleotide
cacgccagucaa

SEQ ID NO: 26715 - RNA, 13 nt, Artificial Sequence
  Description of Artificial Sequence: Synthetic oligonucleotide
uucuuggugcgug

SEQ ID NO: 26716 - RNA, 14 nt, Artificial Sequence
  Description of Artificial Sequence: Synthetic oligonucleotide
auuggauucaucag

SEQ ID NO: 26717 - RNA, 13 nt, Artificial Sequence
  Description of Artificial Sequence: Synthetic oligonucleotide
uggaauaccuaag

SEQ ID NO: 26718 - RNA, 12 nt, Artificial Sequence
  Description of Artificial Sequence: Synthetic oligonucleotide
auuugaggcuca

SEQ ID NO: 26719 - RNA, 11 nt, Artificial Sequence
  Description of Artificial Sequence: Synthetic oligonucleotide
ucuacaauugg

SEQ ID NO: 26720 - RNA, 12 nt, Artificial Sequence
  Description of Artificial Sequence: Synthetic oligonucleotide
uaguuaggagcc

SEQ ID NO: 26721 - RNA, 13 nt, Artificial Sequence
  Description of Artificial Sequence: Synthetic oligonucleotide
agucaauauccac

SEQ ID NO: 26722 - RNA, 13 nt, Artificial Sequence
  Description of Artificial Sequence: Synthetic oligonucleotide
auguucagucaca

SEQ ID NO: 26723 - RNA, 12 nt, Artificial Sequence
  Description of Artificial Sequence: Synthetic oligonucleotide
acacacacauac

SEQ ID NO: 26724 - RNA, 12 nt, Artificial Sequence
  Description of Artificial Sequence: Synthetic oligonucleotide
uuccuuuugcuu

SEQ ID NO: 26725 - RNA, 16 nt, Artificial Sequence
  Description of Artificial Sequence: Synthetic oligonucleotide
uuuuaaaguaauuuuu

SEQ ID NO: 26726 - RNA, 13 nt, Artificial Sequence
  Description of Artificial Sequence: Synthetic oligonucleotide
caacagucaaugg

SEQ ID NO: 26727 - RNA, 13 nt, Artificial Sequence
  Description of Artificial Sequence: Synthetic oligonucleotide
ucgacaaaccaau

SEQ ID NO: 26728 - RNA, 12 nt, Artificial Sequence
  Description of Artificial Sequence: Synthetic oligonucleotide
acugcuaccacu

SEQ ID NO: 26729 - RNA, 13 nt, Artificial Sequence
  Description of Artificial Sequence: Synthetic oligonucleotide
gcaagcggucuua

SEQ ID NO: 26730 - RNA, 13 nt, Artificial Sequence
  Description of Artificial Sequence: Synthetic oligonucleotide
ggucuuaccggcu

SEQ ID NO: 26731 - RNA, 11 nt, Artificial Sequence
  Description of Artificial Sequence: Synthetic oligonucleotide
gauggguuacc

SEQ ID NO: 26732 - RNA, 11 nt, Artificial Sequence
  Description of Artificial Sequence: Synthetic oligonucleotide
guuaccugcga

SEQ ID NO: 26733 - RNA, 12 nt, Artificial Sequence
  Description of Artificial Sequence: Synthetic oligonucleotide
aaucuugcugag

SEQ ID NO: 26734 - RNA, 13 nt, Artificial Sequence
  Description of Artificial Sequence: Synthetic oligonucleotide
agcauaaaacagu

SEQ ID NO: 26735 - RNA, 12 nt, Artificial Sequence
  Description of Artificial Sequence: Synthetic oligonucleotide
guccuuuauccu

SEQ ID NO: 26736 - RNA, 12 nt, Artificial Sequence
  Description of Artificial Sequence: Synthetic oligonucleotide
caacgcaaguug

SEQ ID NO: 26737 - RNA, 13 nt, Artificial Sequence
  Description of Artificial Sequence: Synthetic oligonucleotide
aaacugaaaccau

SEQ ID NO: 26738 - RNA, 14 nt, Artificial Sequence
  Description of Artificial Sequence: Synthetic oligonucleotide
acuuuguuaaauau

SEQ ID NO: 26739 - RNA, 14 nt, Artificial Sequence
  Description of Artificial Sequence: Synthetic oligonucleotide
guauauuaaaaguu

SEQ ID NO: 26740 - RNA, 13 nt, Artificial Sequence
  Description of Artificial Sequence: Synthetic oligonucleotide
guuuugacuuaac

SEQ ID NO: 26741 - RNA, 13 nt, Artificial Sequence
  Description of Artificial Sequence: Synthetic oligonucleotide
gcaaacucagcac

SEQ ID NO: 26742 - RNA, 11 nt, Artificial Sequence
  Description of Artificial Sequence: Synthetic oligonucleotide
ugcugaccuca

SEQ ID NO: 26743 - RNA, 14 nt, Artificial Sequence
  Description of Artificial Sequence: Synthetic oligonucleotide
uuuauucagaucgc

SEQ ID NO: 26744 - RNA, 13 nt, Artificial Sequence
  Description of Artificial Sequence: Synthetic oligonucleotide
aggguucugggau

SEQ ID NO: 26745 - RNA, 15 nt, Artificial Sequence
  Description of Artificial Sequence: Synthetic oligonucleotide
auauuggaaauuaug

SEQ ID NO: 26746 - RNA, 13 nt, Artificial Sequence
  Description of Artificial Sequence: Synthetic oligonucleotide
auggaagcacuag

SEQ ID NO: 26747 - RNA, 13 nt, Artificial Sequence
  Description of Artificial Sequence: Synthetic oligonucleotide
guuuuuaugugga

SEQ ID NO: 26748 - RNA, 12 nt, Artificial Sequence
  Description of Artificial Sequence: Synthetic oligonucleotide
ggaauugguaga

SEQ ID NO: 26749 - RNA, 13 nt, Artificial Sequence
  Description of Artificial Sequence: Synthetic oligonucleotide
uuagacuuggaga

SEQ ID NO: 26750 - RNA, 13 nt, Artificial Sequence
  Description of Artificial Sequence: Synthetic oligonucleotide
uuacaguauucca

SEQ ID NO: 26751 - RNA, 15 nt, Artificial Sequence
  Description of Artificial Sequence: Synthetic oligonucleotide
ccacugaugaauuaa

SEQ ID NO: 26752 - RNA, 12 nt, Artificial Sequence
  Description of Artificial Sequence: Synthetic oligonucleotide
ccacaucaucac

SEQ ID NO: 26753 - RNA, 13 nt, Artificial Sequence
  Description of Artificial Sequence: Synthetic oligonucleotide
cucaccaaacaga

SEQ ID NO: 26754 - RNA, 12 nt, Artificial Sequence
  Description of Artificial Sequence: Synthetic oligonucleotide
ggaacaugaugg

SEQ ID NO: 26755 - RNA, 12 nt, Artificial Sequence
  Description of Artificial Sequence: Synthetic oligonucleotide
cauguagacugc

SEQ ID NO: 26756 - RNA, 13 nt, Artificial Sequence
  Description of Artificial Sequence: Synthetic oligonucleotide
ggaucuauuuaug

SEQ ID NO: 26757 - RNA, 12 nt, Artificial Sequence
  Description of Artificial Sequence: Synthetic oligonucleotide
gcacuauuauca

SEQ ID NO: 26758 - RNA, 11 nt, Artificial Sequence
  Description of Artificial Sequence: Synthetic oligonucleotide
aucaguucugc

SEQ ID NO: 26759 - RNA, 13 nt, Artificial Sequence
  Description of Artificial Sequence: Synthetic oligonucleotide
agauuaaaccuac

SEQ ID NO: 26760 - RNA, 13 nt, Artificial Sequence
  Description of Artificial Sequence: Synthetic oligonucleotide
auaaaauccuucu

SEQ ID NO: 26761 - RNA, 12 nt, Artificial Sequence
  Description of Artificial Sequence: Synthetic oligonucleotide
aaugcuguagac

SEQ ID NO: 26762 - RNA, 13 nt, Artificial Sequence
  Description of Artificial Sequence: Synthetic oligonucleotide
uugauaggaauag

SEQ ID NO: 26763 - RNA, 11 nt, Artificial Sequence
  Description of Artificial Sequence: Synthetic oligonucleotide
aauggcccuga

SEQ ID NO: 26764 - RNA, 11 nt, Artificial Sequence
  Description of Artificial Sequence: Synthetic oligonucleotide
uuccucaagca

SEQ ID NO: 26765 - RNA, 10 nt, Artificial Sequence
  Description of Artificial Sequence: Synthetic oligonucleotide
guucagccca

SEQ ID NO: 26766 - RNA, 11 nt, Artificial Sequence
  Description of Artificial Sequence: Synthetic oligonucleotide
gcugcugaacc

SEQ ID NO: 26767 - RNA, 12 nt, Artificial Sequence
  Description of Artificial Sequence: Synthetic oligonucleotide
aaguucucuuca

SEQ ID NO: 26768 - RNA, 11 nt, Artificial Sequence
  Description of Artificial Sequence: Synthetic oligonucleotide
ccagccuagag

SEQ ID NO: 26769 - RNA, 13 nt, Artificial Sequence
  Description of Artificial Sequence: Synthetic oligonucleotide
cucugugaagugu

SEQ ID NO: 26770 - RNA, 14 nt, Artificial Sequence
  Description of Artificial Sequence: Synthetic oligonucleotide
ugagaaaauuucaa

SEQ ID NO: 26771 - RNA, 11 nt, Artificial Sequence
  Description of Artificial Sequence: Synthetic oligonucleotide
aauccuccuga

SEQ ID NO: 26772 - RNA, 12 nt, Artificial Sequence
  Description of Artificial Sequence: Synthetic oligonucleotide
gugacaucauau

SEQ ID NO: 26773 - RNA, 13 nt, Artificial Sequence
  Description of Artificial Sequence: Synthetic oligonucleotide
aaucuucaucaua

SEQ ID NO: 26774 - RNA, 13 nt, Artificial Sequence
  Description of Artificial Sequence: Synthetic oligonucleotide
gacuagcuauuaa

SEQ ID NO: 26775 - RNA, 14 nt, Artificial Sequence
  Description of Artificial Sequence: Synthetic oligonucleotide
ucucuacuaaaaau

SEQ ID NO: 26776 - RNA, 12 nt, Artificial Sequence
  Description of Artificial Sequence: Synthetic oligonucleotide
ucuaucucgccu

SEQ ID NO: 26777 - RNA, 13 nt, Artificial Sequence
  Description of Artificial Sequence: Synthetic oligonucleotide
cuucgguccaguu

SEQ ID NO: 26778 - RNA, 11 nt, Artificial Sequence
  Description of Artificial Sequence: Synthetic oligonucleotide
gauguagccgc

SEQ ID NO: 26779 - RNA, 12 nt, Artificial Sequence
  Description of Artificial Sequence: Synthetic oligonucleotide
ugaggagacuug

SEQ ID NO: 26780 - RNA, 12 nt, Artificial Sequence
  Description of Artificial Sequence: Synthetic oligonucleotide
gaguagugagga

SEQ ID NO: 26781 - RNA, 14 nt, Artificial Sequence
  Description of Artificial Sequence: Synthetic oligonucleotide
cagaugaguacaaa

SEQ ID NO: 26782 - RNA, 13 nt, Artificial Sequence
  Description of Artificial Sequence: Synthetic oligonucleotide
guuguuaaugggc

SEQ ID NO: 26783 - RNA, 13 nt, Artificial Sequence
  Description of Artificial Sequence: Synthetic oligonucleotide
uuuuuaauuuauu

SEQ ID NO: 26784 - RNA, 12 nt, Artificial Sequence
  Description of Artificial Sequence: Synthetic oligonucleotide
uauuuaaauaug

SEQ ID NO: 26785 - RNA, 13 nt, Artificial Sequence
  Description of Artificial Sequence: Synthetic oligonucleotide
uauccuuuguuuc

SEQ ID NO: 26786 - RNA, 14 nt, Artificial Sequence
  Description of Artificial Sequence: Synthetic oligonucleotide
cgucuaaguguuug

SEQ ID NO: 26787 - RNA, 12 nt, Artificial Sequence
  Description of Artificial Sequence: Synthetic oligonucleotide
accugugacaaa

SEQ ID NO: 26788 - RNA, 13 nt, Artificial Sequence
  Description of Artificial Sequence: Synthetic oligonucleotide
ccaggcugaauua

SEQ ID NO: 26789 - RNA, 14 nt, Artificial Sequence
  Description of Artificial Sequence: Synthetic oligonucleotide
gucauucuuacaau

SEQ ID NO: 26790 - RNA, 15 nt, Artificial Sequence
  Description of Artificial Sequence: Synthetic oligonucleotide
ucauucuuacaauug

SEQ ID NO: 26791 - RNA, 12 nt, Artificial Sequence
  Description of Artificial Sequence: Synthetic oligonucleotide
cagagaguguac

SEQ ID NO: 26792 - RNA, 12 nt, Artificial Sequence
  Description of Artificial Sequence: Synthetic oligonucleotide
agaacucagcag

SEQ ID NO: 26793 - RNA, 13 nt, Artificial Sequence
  Description of Artificial Sequence: Synthetic oligonucleotide
uuuauuuucagua

SEQ ID NO: 26794 - RNA, 12 nt, Artificial Sequence
  Description of Artificial Sequence: Synthetic oligonucleotide
ucuuaaauggaa

SEQ ID NO: 26795 - RNA, 13 nt, Artificial Sequence
  Description of Artificial Sequence: Synthetic oligonucleotide
ugccuaaaauugu

SEQ ID NO: 26796 - RNA, 12 nt, Artificial Sequence
  Description of Artificial Sequence: Synthetic oligonucleotide
agacugugagcu

SEQ ID NO: 26797 - RNA, 14 nt, Artificial Sequence
  Description of Artificial Sequence: Synthetic oligonucleotide
ugcuuuuuauuaau

SEQ ID NO: 26798 - RNA, 13 nt, Artificial Sequence
  Description of Artificial Sequence: Synthetic oligonucleotide
cucuucuuacauu

SEQ ID NO: 26799 - RNA, 15 nt, Artificial Sequence
  Description of Artificial Sequence: Synthetic oligonucleotide
cauuuguaaaaaugu

SEQ ID NO: 26800 - RNA, 15 nt, Artificial Sequence
  Description of Artificial Sequence: Synthetic oligonucleotide
aucuuaauucauauu

SEQ ID NO: 26801 - RNA, 13 nt, Artificial Sequence
  Description of Artificial Sequence: Synthetic oligonucleotide
gaacuaaucauga

SEQ ID NO: 26802 - RNA, 12 nt, Artificial Sequence
  Description of Artificial Sequence: Synthetic oligonucleotide
ucugcucuuggg

SEQ ID NO: 26803 - RNA, 13 nt, Artificial Sequence
  Description of Artificial Sequence: Synthetic oligonucleotide
caguagcuuugag

SEQ ID NO: 26804 - RNA, 14 nt, Artificial Sequence
  Description of Artificial Sequence: Synthetic oligonucleotide
cacguaauauuuca

SEQ ID NO: 26805 - RNA, 13 nt, Artificial Sequence
  Description of Artificial Sequence: Synthetic oligonucleotide
uauucucuucacu

SEQ ID NO: 26806 - RNA, 14 nt, Artificial Sequence
  Description of Artificial Sequence: Synthetic oligonucleotide
cuaaugcuaagaaa

SEQ ID NO: 26807 - RNA, 12 nt, Artificial Sequence
  Description of Artificial Sequence: Synthetic oligonucleotide
gcugaaaaucaa

SEQ ID NO: 26808 - RNA, 14 nt, Artificial Sequence
  Description of Artificial Sequence: Synthetic oligonucleotide
aauaugauuacuuu

SEQ ID NO: 26809 - RNA, 14 nt, Artificial Sequence
  Description of Artificial Sequence: Synthetic oligonucleotide
cauuuuguucuaca

SEQ ID NO: 26810 - RNA, 12 nt, Artificial Sequence
  Description of Artificial Sequence: Synthetic oligonucleotide
cccgggacucuc

SEQ ID NO: 26811 - RNA, 14 nt, Artificial Sequence
  Description of Artificial Sequence: Synthetic oligonucleotide
ccuuuaaaguaaag

SEQ ID NO: 26812 - RNA, 13 nt, Artificial Sequence
  Description of Artificial Sequence: Synthetic oligonucleotide
ucuggaagccugg

SEQ ID NO: 26813 - RNA, 14 nt, Artificial Sequence
  Description of Artificial Sequence: Synthetic oligonucleotide
aaaacaaaagagag

SEQ ID NO: 26814 - RNA, 13 nt, Artificial Sequence
  Description of Artificial Sequence: Synthetic oligonucleotide
aucaguuaugccg

SEQ ID NO: 26815 - RNA, 13 nt, Artificial Sequence
  Description of Artificial Sequence: Synthetic oligonucleotide
uaaaagaagucca

SEQ ID NO: 26816 - RNA, 11 nt, Artificial Sequence
  Description of Artificial Sequence: Synthetic oligonucleotide
aggugagguua

SEQ ID NO: 26817 - RNA, 11 nt, Artificial Sequence
  Description of Artificial Sequence: Synthetic oligonucleotide
gggaagaggac

SEQ ID NO: 26818 - RNA, 13 nt, Artificial Sequence
  Description of Artificial Sequence: Synthetic oligonucleotide
aagcaaguauugu

SEQ ID NO: 26819 - RNA, 12 nt, Artificial Sequence
  Description of Artificial Sequence: Synthetic oligonucleotide
auuguagcacuc

SEQ ID NO: 26820 - RNA, 14 nt, Artificial Sequence
  Description of Artificial Sequence: Synthetic oligonucleotide
acaaaaccacaaau

SEQ ID NO: 26821 - RNA, 12 nt, Artificial Sequence
  Description of Artificial Sequence: Synthetic oligonucleotide
uaagcccauaca

SEQ ID NO: 26822 - RNA, 11 nt, Artificial Sequence
  Description of Artificial Sequence: Synthetic oligonucleotide
agcccauacag

SEQ ID NO: 26823 - RNA, 12 nt, Artificial Sequence
  Description of Artificial Sequence: Synthetic oligonucleotide
cagaaaccuucc

SEQ ID NO: 26824 - RNA, 10 nt, Artificial Sequence
  Description of Artificial Sequence: Synthetic oligonucleotide
guauaccuac

SEQ ID NO: 26825 - RNA, 13 nt, Artificial Sequence
  Description of Artificial Sequence: Synthetic oligonucleotide
gccaguuuucgga

SEQ ID NO: 26826 - RNA, 9 nt, Artificial Sequence
  Description of Artificial Sequence: Synthetic oligonucleotide
ggaacaggg

SEQ ID NO: 26827 - RNA, 13 nt, Artificial Sequence
  Description of Artificial Sequence: Synthetic oligonucleotide
uuaacuuuccagu

SEQ ID NO: 26828 - RNA, 14 nt, Artificial Sequence
  Description of Artificial Sequence: Synthetic oligonucleotide
aaaguuugguuuug

SEQ ID NO: 26829 - RNA, 12 nt, Artificial Sequence
  Description of Artificial Sequence: Synthetic oligonucleotide
cuucccacugua

SEQ ID NO: 26830 - RNA, 13 nt, Artificial Sequence
  Description of Artificial Sequence: Synthetic oligonucleotide
ugauaccauauga

SEQ ID NO: 26831 - RNA, 11 nt, Artificial Sequence
  Description of Artificial Sequence: Synthetic oligonucleotide
aacaugggcug

SEQ ID NO: 26832 - RNA, 13 nt, Artificial Sequence
  Description of Artificial Sequence: Synthetic oligonucleotide
caacuuuuucaua

SEQ ID NO: 26833 - RNA, 12 nt, Artificial Sequence
  Description of Artificial Sequence: Synthetic oligonucleotide
caugaggccgga

SEQ ID NO: 26834 - RNA, 11 nt, Artificial Sequence
  Description of Artificial Sequence: Synthetic oligonucleotide
acugcauuugu

SEQ ID NO: 26835 - RNA, 13 nt, Artificial Sequence
  Description of Artificial Sequence: Synthetic oligonucleotide
aauguuuacuacc

SEQ ID NO: 26836 - RNA, 15 nt, Artificial Sequence
  Description of Artificial Sequence: Synthetic oligonucleotide
aauuuuuugaugaaa

SEQ ID NO: 26837 - RNA, 14 nt, Artificial Sequence
  Description of Artificial Sequence: Synthetic oligonucleotide
cagugugugaauuu

SEQ ID NO: 26838 - RNA, 13 nt, Artificial Sequence
  Description of Artificial Sequence: Synthetic oligonucleotide
gagcaauguaugu

SEQ ID NO: 26839 - RNA, 14 nt, Artificial Sequence
  Description of Artificial Sequence: Synthetic oligonucleotide
aaagcacauauaua

SEQ ID NO: 26840 - RNA, 14 nt, Artificial Sequence
  Description of Artificial Sequence: Synthetic oligonucleotide
guaauaguuucucc

SEQ ID NO: 26841 - RNA, 13 nt, Artificial Sequence
  Description of Artificial Sequence: Synthetic oligonucleotide
aguuucuccaaau

SEQ ID NO: 26842 - RNA, 13 nt, Artificial Sequence
  Description of Artificial Sequence: Synthetic oligonucleotide
uacuuccuagaaa

SEQ ID NO: 26843 - RNA, 13 nt, Artificial Sequence
  Description of Artificial Sequence: Synthetic oligonucleotide
uacaccauauaug

SEQ ID NO: 26844 - RNA, 14 nt, Artificial Sequence
  Description of Artificial Sequence: Synthetic oligonucleotide
auauaugaauggag

SEQ ID NO: 26845 - RNA, 13 nt, Artificial Sequence
  Description of Artificial Sequence: Synthetic oligonucleotide
acgagaagaagau

SEQ ID NO: 26846 - RNA, 13 nt, Artificial Sequence
  Description of Artificial Sequence: Synthetic oligonucleotide
ucauuuacaggga

SEQ ID NO: 26847 - RNA, 13 nt, Artificial Sequence
  Description of Artificial Sequence: Synthetic oligonucleotide
cauuuacagggac

SEQ ID NO: 26848 - RNA, 10 nt, Artificial Sequence
  Description of Artificial Sequence: Synthetic oligonucleotide
agggaccuga

SEQ ID NO: 26849 - RNA, 14 nt, Artificial Sequence
  Description of Artificial Sequence: Synthetic oligonucleotide
uguuugacugcauc

SEQ ID NO: 26850 - RNA, 13 nt, Artificial Sequence
  Description of Artificial Sequence: Synthetic oligonucleotide
uuugacugcaucg

SEQ ID NO: 26851 - RNA, 12 nt, Artificial Sequence
  Description of Artificial Sequence: Synthetic oligonucleotide
gaguucacaggg

SEQ ID NO: 26852 - RNA, 13 nt, Artificial Sequence
  Description of Artificial Sequence: Synthetic oligonucleotide
ggcaccucugucc

SEQ ID NO: 26853 - RNA, 15 nt, Artificial Sequence
  Description of Artificial Sequence: Synthetic oligonucleotide
gguuugucuuuuuaa

SEQ ID NO: 26854 - RNA, 14 nt, Artificial Sequence
  Description of Artificial Sequence: Synthetic oligonucleotide
uuugucuuuuuaag

SEQ ID NO: 26855 - RNA, 13 nt, Artificial Sequence
  Description of Artificial Sequence: Synthetic oligonucleotide
ccuaaagguuguc

SEQ ID NO: 26856 - RNA, 12 nt, Artificial Sequence
  Description of Artificial Sequence: Synthetic oligonucleotide
aagguugucgac

SEQ ID NO: 26857 - RNA, 13 nt, Artificial Sequence
  Description of Artificial Sequence: Synthetic oligonucleotide
accuggcaauugu

SEQ ID NO: 26858 - RNA, 12 nt, Artificial Sequence
  Description of Artificial Sequence: Synthetic oligonucleotide
aguggugcgagg

SEQ ID NO: 26859 - RNA, 13 nt, Artificial Sequence
  Description of Artificial Sequence: Synthetic oligonucleotide
agagacaugaaau

SEQ ID NO: 26860 - RNA, 13 nt, Artificial Sequence
  Description of Artificial Sequence: Synthetic oligonucleotide
auauauuucucca

SEQ ID NO: 26861 - RNA, 10 nt, Artificial Sequence
  Description of Artificial Sequence: Synthetic oligonucleotide
caugaaggcu

SEQ ID NO: 26862 - RNA, 11 nt, Artificial Sequence
  Description of Artificial Sequence: Synthetic oligonucleotide
gcuggaguggu

SEQ ID NO: 26863 - RNA, 11 nt, Artificial Sequence
  Description of Artificial Sequence: Synthetic oligonucleotide
aggaagagagg

SEQ ID NO: 26864 - RNA, 12 nt, Artificial Sequence
  Description of Artificial Sequence: Synthetic oligonucleotide
cuugcaucgggc

SEQ ID NO: 26865 - RNA, 13 nt, Artificial Sequence
  Description of Artificial Sequence: Synthetic oligonucleotide
auauccuacugug

SEQ ID NO: 26866 - RNA, 13 nt, Artificial Sequence
  Description of Artificial Sequence: Synthetic oligonucleotide
uccuacuguguaa

SEQ ID NO: 26867 - RNA, 12 nt, Artificial Sequence
  Description of Artificial Sequence: Synthetic oligonucleotide
ccuuguagugua

SEQ ID NO: 26868 - RNA, 13 nt, Artificial Sequence
  Description of Artificial Sequence: Synthetic oligonucleotide
ucuuuguugauug

SEQ ID NO: 26869 - RNA, 14 nt, Artificial Sequence
  Description of Artificial Sequence: Synthetic oligonucleotide
uuuguugauugaaa

SEQ ID NO: 26870 - RNA, 15 nt, Artificial Sequence
  Description of Artificial Sequence: Synthetic oligonucleotide
uucuuuuucuuccau

SEQ ID NO: 26871 - RNA, 13 nt, Artificial Sequence
  Description of Artificial Sequence: Synthetic oligonucleotide
aaucuuccuucua

SEQ ID NO: 26872 - RNA, 13 nt, Artificial Sequence
  Description of Artificial Sequence: Synthetic oligonucleotide
uugaaugcuucau

SEQ ID NO: 26873 - RNA, 13 nt, Artificial Sequence
  Description of Artificial Sequence: Synthetic oligonucleotide
ugaaugcuucaug

SEQ ID NO: 26874 - RNA, 13 nt, Artificial Sequence
  Description of Artificial Sequence: Synthetic oligonucleotide
aauucuacuuuga

SEQ ID NO: 26875 - RNA, 13 nt, Artificial Sequence
  Description of Artificial Sequence: Synthetic oligonucleotide
agcaacuacagac

SEQ ID NO: 26876 - RNA, 13 nt, Artificial Sequence
  Description of Artificial Sequence: Synthetic oligonucleotide
gaccaaggucaac

SEQ ID NO: 26877 - RNA, 13 nt, Artificial Sequence
  Description of Artificial Sequence: Synthetic oligonucleotide
cgacuaucucgac

SEQ ID NO: 26878 - RNA, 13 nt, Artificial Sequence
  Description of Artificial Sequence: Synthetic oligonucleotide
aaccuucccaaac

SEQ ID NO: 26879 - RNA, 14 nt, Artificial Sequence
  Description of Artificial Sequence: Synthetic oligonucleotide
ccaagcuuagaacu

SEQ ID NO: 26880 - RNA, 15 nt, Artificial Sequence
  Description of Artificial Sequence: Synthetic oligonucleotide
agcuuagaacuuuaa

SEQ ID NO: 26881 - RNA, 11 nt, Artificial Sequence
  Description of Artificial Sequence: Synthetic oligonucleotide
aagaccaccac

SEQ ID NO: 26882 - RNA, 14 nt, Artificial Sequence
  Description of Artificial Sequence: Synthetic oligonucleotide
gcgagaaauaaagu

SEQ ID NO: 26883 - RNA, 14 nt, Artificial Sequence
  Description of Artificial Sequence: Synthetic oligonucleotide
cgagaaauaaaguu

SEQ ID NO: 26884 - RNA, 12 nt, Artificial Sequence
  Description of Artificial Sequence: Synthetic oligonucleotide
aggaaaugaucc

SEQ ID NO: 26885 - RNA, 13 nt, Artificial Sequence
  Description of Artificial Sequence: Synthetic oligonucleotide
gaagaaaugaaac

SEQ ID NO: 26886 - RNA, 13 nt, Artificial Sequence
  Description of Artificial Sequence: Synthetic oligonucleotide
guuuccauccucc

SEQ ID NO: 26887 - RNA, 15 nt, Artificial Sequence
  Description of Artificial Sequence: Synthetic oligonucleotide
acugaaaaucuuuga

SEQ ID NO: 26888 - RNA, 11 nt, Artificial Sequence
  Description of Artificial Sequence: Synthetic oligonucleotide
ugccguucagg

SEQ ID NO: 26889 - RNA, 13 nt, Artificial Sequence
  Description of Artificial Sequence: Synthetic oligonucleotide
caggguccagaag

SEQ ID NO: 26890 - RNA, 13 nt, Artificial Sequence
  Description of Artificial Sequence: Synthetic oligonucleotide
ucaagacugcuug

SEQ ID NO: 26891 - RNA, 13 nt, Artificial Sequence
  Description of Artificial Sequence: Synthetic oligonucleotide
uccaugucuuugg

SEQ ID NO: 26892 - RNA, 11 nt, Artificial Sequence
  Description of Artificial Sequence: Synthetic oligonucleotide
gccugaaacac

SEQ ID NO: 26893 - RNA, 12 nt, Artificial Sequence
  Description of Artificial Sequence: Synthetic oligonucleotide
ucucuguaccuc

SEQ ID NO: 26894 - RNA, 12 nt, Artificial Sequence
  Description of Artificial Sequence: Synthetic oligonucleotide
agcaagacaaga

SEQ ID NO: 26895 - RNA, 13 nt, Artificial Sequence
  Description of Artificial Sequence: Synthetic oligonucleotide
gcaagacaagaaa

SEQ ID NO: 26896 - RNA, 12 nt, Artificial Sequence
  Description of Artificial Sequence: Synthetic oligonucleotide
uguacaagaucc

SEQ ID NO: 26897 - RNA, 12 nt, Artificial Sequence
  Description of Artificial Sequence: Synthetic oligonucleotide
cguacuugcaga

SEQ ID NO: 26898 - RNA, 13 nt, Artificial Sequence
  Description of Artificial Sequence: Synthetic oligonucleotide
cgaucgauacaga

SEQ ID NO: 26899 - RNA, 13 nt, Artificial Sequence
  Description of Artificial Sequence: Synthetic oligonucleotide
uauaaaaauaaau

SEQ ID NO: 26900 - RNA, 13 nt, Artificial Sequence
  Description of Artificial Sequence: Synthetic oligonucleotide
uaaaaauaaauau

SEQ ID NO: 26901 - RNA, 13 nt, Artificial Sequence
  Description of Artificial Sequence: Synthetic oligonucleotide
uuugacugcugug

SEQ ID NO: 26902 - RNA, 13 nt, Artificial Sequence
  Description of Artificial Sequence: Synthetic oligonucleotide
ggagaugagagac

SEQ ID NO: 26903 - RNA, 10 nt, Artificial Sequence
  Description of Artificial Sequence: Synthetic oligonucleotide
ucccacuugg

SEQ ID NO: 26904 - RNA, 10 nt, Artificial Sequence
  Description of Artificial Sequence: Synthetic oligonucleotide
guucacggcc

SEQ ID NO: 26905 - RNA, 12 nt, Artificial Sequence
  Description of Artificial Sequence: Synthetic oligonucleotide
accaucacacca

SEQ ID NO: 26906 - RNA, 10 nt, Artificial Sequence
  Description of Artificial Sequence: Synthetic oligonucleotide
cugcggguuu

SEQ ID NO: 26907 - RNA, 9 nt, Artificial Sequence
  Description of Artificial Sequence: Synthetic oligonucleotide
uccaguuug

SEQ ID NO: 26908 - RNA, 12 nt, Artificial Sequence
  Description of Artificial Sequence: Synthetic oligonucleotide
uuaaggacuucu

SEQ ID NO: 26909 - RNA, 12 nt, Artificial Sequence
  Description of Artificial Sequence: Synthetic oligonucleotide
agugggacagag

SEQ ID NO: 26910 - RNA, 13 nt, Artificial Sequence
  Description of Artificial Sequence: Synthetic oligonucleotide
auuuguuauugug

SEQ ID NO: 26911 - RNA, 12 nt, Artificial Sequence
  Description of Artificial Sequence: Synthetic oligonucleotide
ucaaaugcauuu

SEQ ID NO: 26912 - RNA, 9 nt, Artificial Sequence
  Description of Artificial Sequence: Synthetic oligonucleotide
aggaaagcc

SEQ ID NO: 26913 - RNA, 10 nt, Artificial Sequence
  Description of Artificial Sequence: Synthetic oligonucleotide
ggaaagcccu

SEQ ID NO: 26914 - RNA, 11 nt, Artificial Sequence
  Description of Artificial Sequence: Synthetic oligonucleotide
ccagcauggcc

SEQ ID NO: 26915 - RNA, 10 nt, Artificial Sequence
  Description of Artificial Sequence: Synthetic oligonucleotide
uucucccuga

SEQ ID NO: 26916 - RNA, 11 nt, Artificial Sequence
  Description of Artificial Sequence: Synthetic oligonucleotide
aagaagcccuu

SEQ ID NO: 26917 - RNA, 11 nt, Artificial Sequence
  Description of Artificial Sequence: Synthetic oligonucleotide
gaagcccuuca

SEQ ID NO: 26918 - RNA, 10 nt, Artificial Sequence
  Description of Artificial Sequence: Synthetic oligonucleotide
cccuucagcg

SEQ ID NO: 26919 - RNA, 10 nt, Artificial Sequence
  Description of Artificial Sequence: Synthetic oligonucleotide
cuucagcggc

SEQ ID NO: 26920 - RNA, 11 nt, Artificial Sequence
  Description of Artificial Sequence: Synthetic oligonucleotide
cagcggccagu

SEQ ID NO: 26921 - RNA, 11 nt, Artificial Sequence
  Description of Artificial Sequence: Synthetic oligonucleotide
gaaaagcuccg

SEQ ID NO: 26922 - RNA, 10 nt, Artificial Sequence
  Description of Artificial Sequence: Synthetic oligonucleotide
aaagcuccgg

SEQ ID NO: 26923 - RNA, 12 nt, Artificial Sequence
  Description of Artificial Sequence: Synthetic oligonucleotide
gucaacagucug

SEQ ID NO: 26924 - RNA, 12 nt, Artificial Sequence
  Description of Artificial Sequence: Synthetic oligonucleotide
agaguucaaaag

SEQ ID NO: 26925 - RNA, 12 nt, Artificial Sequence
  Description of Artificial Sequence: Synthetic oligonucleotide
gaguucaaaagc

SEQ ID NO: 26926 - RNA, 11 nt, Artificial Sequence
  Description of Artificial Sequence: Synthetic oligonucleotide
ucaaaagcccu

SEQ ID NO: 26927 - RNA, 11 nt, Artificial Sequence
  Description of Artificial Sequence: Synthetic oligonucleotide
caaaagcccuu

SEQ ID NO: 26928 - RNA, 11 nt, Artificial Sequence
  Description of Artificial Sequence: Synthetic oligonucleotide
aaagcccuuca

SEQ ID NO: 26929 - RNA, 11 nt, Artificial Sequence
  Description of Artificial Sequence: Synthetic oligonucleotide
aagcccuucag

SEQ ID NO: 26930 - RNA, 12 nt, Artificial Sequence
  Description of Artificial Sequence: Synthetic oligonucleotide
ugaagccgcucg

SEQ ID NO: 26931 - RNA, 11 nt, Artificial Sequence
  Description of Artificial Sequence: Synthetic oligonucleotide
acgccagucaa

SEQ ID NO: 26932 - RNA, 12 nt, Artificial Sequence
  Description of Artificial Sequence: Synthetic oligonucleotide
ucuuggugcgug

SEQ ID NO: 26933 - RNA, 13 nt, Artificial Sequence
  Description of Artificial Sequence: Synthetic oligonucleotide
uuggauucaucag

SEQ ID NO: 26934 - RNA, 12 nt, Artificial Sequence
  Description of Artificial Sequence: Synthetic oligonucleotide
ggaauaccuaag

SEQ ID NO: 26935 - RNA, 11 nt, Artificial Sequence
  Description of Artificial Sequence: Synthetic oligonucleotide
uuugaggcuca

SEQ ID NO: 26936 - RNA, 10 nt, Artificial Sequence
  Description of Artificial Sequence: Synthetic oligonucleotide
cuacaauugg

SEQ ID NO: 26937 - RNA, 11 nt, Artificial Sequence
  Description of Artificial Sequence: Synthetic oligonucleotide
aguuaggagcc

SEQ ID NO: 26938 - RNA, 12 nt, Artificial Sequence
  Description of Artificial Sequence: Synthetic oligonucleotide
gucaauauccac

SEQ ID NO: 26939 - RNA, 12 nt, Artificial Sequence
  Description of Artificial Sequence: Synthetic oligonucleotide
uguucagucaca

SEQ ID NO: 26940 - RNA, 11 nt, Artificial Sequence
  Description of Artificial Sequence: Synthetic oligonucleotide
cacacacauac

SEQ ID NO: 26941 - RNA, 11 nt, Artificial Sequence
  Description of Artificial Sequence: Synthetic oligonucleotide
uccuuuugcuu

SEQ ID NO: 26942 - RNA, 15 nt, Artificial Sequence
  Description of Artificial Sequence: Synthetic oligonucleotide
uuuaaaguaauuuuu

SEQ ID NO: 26943 - RNA, 12 nt, Artificial Sequence
  Description of Artificial Sequence: Synthetic oligonucleotide
aacagucaaugg

SEQ ID NO: 26944 - RNA, 12 nt, Artificial Sequence
  Description of Artificial Sequence: Synthetic oligonucleotide
cgacaaaccaau

SEQ ID NO: 26945 - RNA, 11 nt, Artificial Sequence
  Description of Artificial Sequence: Synthetic oligonucleotide
cugcuaccacu

SEQ ID NO: 26946 - RNA, 12 nt, Artificial Sequence
  Description of Artificial Sequence: Synthetic oligonucleotide
caagcggucuua

SEQ ID NO: 26947 - RNA, 12 nt, Artificial Sequence
  Description of Artificial Sequence: Synthetic oligonucleotide
gucuuaccggcu

SEQ ID NO: 26948 - RNA, 10 nt, Artificial Sequence
  Description of Artificial Sequence: Synthetic oligonucleotide
auggguuacc

SEQ ID NO: 26949 - RNA, 10 nt, Artificial Sequence
  Description of Artificial Sequence: Synthetic oligonucleotide
uuaccugcga

SEQ ID NO: 26950 - RNA, 11 nt, Artificial Sequence
  Description of Artificial Sequence: Synthetic oligonucleotide
aucuugcugag

SEQ ID NO: 26951 - RNA, 12 nt, Artificial Sequence
  Description of Artificial Sequence: Synthetic oligonucleotide
gcauaaaacagu

SEQ ID NO: 26952 - RNA, 11 nt, Artificial Sequence
  Description of Artificial Sequence: Synthetic oligonucleotide
uccuuuauccu

SEQ ID NO: 26953 - RNA, 11 nt, Artificial Sequence
  Description of Artificial Sequence: Synthetic oligonucleotide
aacgcaaguug

SEQ ID NO: 26954 - RNA, 12 nt, Artificial Sequence
  Description of Artificial Sequence: Synthetic oligonucleotide
aacugaaaccau

SEQ ID NO: 26955 - RNA, 13 nt, Artificial Sequence
  Description of Artificial Sequence: Synthetic oligonucleotide
cuuuguuaaauau

SEQ ID NO: 26956 - RNA, 13 nt, Artificial Sequence
  Description of Artificial Sequence: Synthetic oligonucleotide
uauauuaaaaguu

SEQ ID NO: 26957 - RNA, 12 nt, Artificial Sequence
  Description of Artificial Sequence: Synthetic oligonucleotide
uuuugacuuaac

SEQ ID NO: 26958 - RNA, 12 nt, Artificial Sequence
  Description of Artificial Sequence: Synthetic oligonucleotide
caaacucagcac

SEQ ID NO: 26959 - RNA, 10 nt, Artificial Sequence
  Description of Artificial Sequence: Synthetic oligonucleotide
gcugaccuca

SEQ ID NO: 26960 - RNA, 13 nt, Artificial Sequence
  Description of Artificial Sequence: Synthetic oligonucleotide
uuauucagaucgc

SEQ ID NO: 26961 - RNA, 12 nt, Artificial Sequence
  Description of Artificial Sequence: Synthetic oligonucleotide
ggguucugggau

SEQ ID NO: 26962 - RNA, 14 nt, Artificial Sequence
  Description of Artificial Sequence: Synthetic oligonucleotide
uauuggaaauuaug

SEQ ID NO: 26963 - RNA, 12 nt, Artificial Sequence
  Description of Artificial Sequence: Synthetic oligonucleotide
uggaagcacuag

SEQ ID NO: 26964 - RNA, 12 nt, Artificial Sequence
  Description of Artificial Sequence: Synthetic oligonucleotide
uuuuuaugugga

SEQ ID NO: 26965 - RNA, 11 nt, Artificial Sequence
  Description of Artificial Sequence: Synthetic oligonucleotide
gaauugguaga

SEQ ID NO: 26966 - RNA, 12 nt, Artificial Sequence
  Description of Artificial Sequence: Synthetic oligonucleotide
uagacuuggaga

SEQ ID NO: 26967 - RNA, 12 nt, Artificial Sequence
  Description of Artificial Sequence: Synthetic oligonucleotide
uacaguauucca

SEQ ID NO: 26968 - RNA, 14 nt, Artificial Sequence
  Description of Artificial Sequence: Synthetic oligonucleotide
cacugaugaauuaa

SEQ ID NO: 26969 - RNA, 11 nt, Artificial Sequence
  Description of Artificial Sequence: Synthetic oligonucleotide
cacaucaucac

SEQ ID NO: 26970 - RNA, 12 nt, Artificial Sequence
  Description of Artificial Sequence: Synthetic oligonucleotide
ucaccaaacaga

SEQ ID NO: 26971 - RNA, 11 nt, Artificial Sequence
  Description of Artificial Sequence: Synthetic oligonucleotide
gaacaugaugg

SEQ ID NO: 26972 - RNA, 11 nt, Artificial Sequence
  Description of Artificial Sequence: Synthetic oligonucleotide
auguagacugc

SEQ ID NO: 26973 - RNA, 12 nt, Artificial Sequence
  Description of Artificial Sequence: Synthetic oligonucleotide
gaucuauuuaug

SEQ ID NO: 26974 - RNA, 11 nt, Artificial Sequence
  Description of Artificial Sequence: Synthetic oligonucleotide
cacuauuauca

SEQ ID NO: 26975 - RNA, 10 nt, Artificial Sequence
  Description of Artificial Sequence: Synthetic oligonucleotide
ucaguucugc

SEQ ID NO: 26976 - RNA, 12 nt, Artificial Sequence
  Description of Artificial Sequence: Synthetic oligonucleotide
gauuaaaccuac

SEQ ID NO: 26977 - RNA, 12 nt, Artificial Sequence
  Description of Artificial Sequence: Synthetic oligonucleotide
uaaaauccuucu

SEQ ID NO: 26978 - RNA, 11 nt, Artificial Sequence
  Description of Artificial Sequence: Synthetic oligonucleotide
augcuguagac

SEQ ID NO: 26979 - RNA, 12 nt, Artificial Sequence
  Description of Artificial Sequence: Synthetic oligonucleotide
ugauaggaauag

SEQ ID NO: 26980 - RNA, 10 nt, Artificial Sequence
  Description of Artificial Sequence: Synthetic oligonucleotide
auggcccuga

SEQ ID NO: 26981 - RNA, 10 nt, Artificial Sequence
  Description of Artificial Sequence: Synthetic oligonucleotide
uccucaagca

SEQ ID NO: 26982 - RNA, 9 nt, Artificial Sequence
  Description of Artificial Sequence: Synthetic oligonucleotide
uucagccca

SEQ ID NO: 26983 - RNA, 10 nt, Artificial Sequence
  Description of Artificial Sequence: Synthetic oligonucleotide
cugcugaacc

SEQ ID NO: 26984 - RNA, 11 nt, Artificial Sequence
  Description of Artificial Sequence: Synthetic oligonucleotide
aguucucuuca

SEQ ID NO: 26985 - RNA, 10 nt, Artificial Sequence
  Description of Artificial Sequence: Synthetic oligonucleotide
cagccuagag

SEQ ID NO: 26986 - RNA, 12 nt, Artificial Sequence
  Description of Artificial Sequence: Synthetic oligonucleotide
ucugugaagugu

SEQ ID NO: 26987 - RNA, 13 nt, Artificial Sequence
  Description of Artificial Sequence: Synthetic oligonucleotide
gagaaaauuucaa

SEQ ID NO: 26988 - RNA, 10 nt, Artificial Sequence
  Description of Artificial Sequence: Synthetic oligonucleotide
auccuccuga

SEQ ID NO: 26989 - RNA, 11 nt, Artificial Sequence
  Description of Artificial Sequence: Synthetic oligonucleotide
ugacaucauau

SEQ ID NO: 26990 - RNA, 12 nt, Artificial Sequence
  Description of Artificial Sequence: Synthetic oligonucleotide
aucuucaucaua

SEQ ID NO: 26991 - RNA, 12 nt, Artificial Sequence
  Description of Artificial Sequence: Synthetic oligonucleotide
acuagcuauuaa

SEQ ID NO: 26992 - RNA, 13 nt, Artificial Sequence
  Description of Artificial Sequence: Synthetic oligonucleotide
cucuacuaaaaau

SEQ ID NO: 26993 - RNA, 11 nt, Artificial Sequence
  Description of Artificial Sequence: Synthetic oligonucleotide
cuaucucgccu

SEQ ID NO: 26994 - RNA, 12 nt, Artificial Sequence
  Description of Artificial Sequence: Synthetic oligonucleotide
uucgguccaguu

SEQ ID NO: 26995 - RNA, 10 nt, Artificial Sequence
  Description of Artificial Sequence: Synthetic oligonucleotide
auguagccgc

SEQ ID NO: 26996 - RNA, 11 nt, Artificial Sequence
  Description of Artificial Sequence: Synthetic oligonucleotide
gaggagacuug

SEQ ID NO: 26997 - RNA, 11 nt, Artificial Sequence
  Description of Artificial Sequence: Synthetic oligonucleotide
aguagugagga

SEQ ID NO: 26998 - RNA, 13 nt, Artificial Sequence
  Description of Artificial Sequence: Synthetic oligonucleotide
agaugaguacaaa

SEQ ID NO: 26999 - RNA, 12 nt, Artificial Sequence
  Description of Artificial Sequence: Synthetic oligonucleotide
uuguuaaugggc

SEQ ID NO: 27000 - RNA, 12 nt, Artificial Sequence
  Description of Artificial Sequence: Synthetic oligonucleotide
uuuuaauuuauu

SEQ ID NO: 27001 - RNA, 11 nt, Artificial Sequence
  Description of Artificial Sequence: Synthetic oligonucleotide
auuuaaauaug

SEQ ID NO: 27002 - RNA, 12 nt, Artificial Sequence
  Description of Artificial Sequence: Synthetic oligonucleotide
auccuuuguuuc

SEQ ID NO: 27003 - RNA, 13 nt, Artificial Sequence
  Description of Artificial Sequence: Synthetic oligonucleotide
gucuaaguguuug

SEQ ID NO: 27004 - RNA, 11 nt, Artificial Sequence
  Description of Artificial Sequence: Synthetic oligonucleotide
ccugugacaaa

SEQ ID NO: 27005 - RNA, 12 nt, Artificial Sequence
  Description of Artificial Sequence: Synthetic oligonucleotide
caggcugaauua

SEQ ID NO: 27006 - RNA, 13 nt, Artificial Sequence
  Description of Artificial Sequence: Synthetic oligonucleotide
ucauucuuacaau

SEQ ID NO: 27007 - RNA, 14 nt, Artificial Sequence
  Description of Artificial Sequence: Synthetic oligonucleotide
cauucuuacaauug

SEQ ID NO: 27008 - RNA, 11 nt, Artificial Sequence
  Description of Artificial Sequence: Synthetic oligonucleotide
agagaguguac

SEQ ID NO: 27009 - RNA, 11 nt, Artificial Sequence
  Description of Artificial Sequence: Synthetic oligonucleotide
gaacucagcag

SEQ ID NO: 27010 - RNA, 12 nt, Artificial Sequence
  Description of Artificial Sequence: Synthetic oligonucleotide
uuauuuucagua

SEQ ID NO: 27011 - RNA, 11 nt, Artificial Sequence
  Description of Artificial Sequence: Synthetic oligonucleotide
cuuaaauggaa

SEQ ID NO: 27012 - RNA, 12 nt, Artificial Sequence
  Description of Artificial Sequence: Synthetic oligonucleotide
gccuaaaauugu

SEQ ID NO: 27013 - RNA, 12 nt, Artificial Sequence
  Description of Artificial Sequence: Synthetic oligonucleotide
acuaacaucugg

SEQ ID NO: 27014 - RNA, 11 nt, Artificial Sequence
  Description of Artificial Sequence: Synthetic oligonucleotide
gacugugagcu

SEQ ID NO: 27015 - RNA, 13 nt, Artificial Sequence
  Description of Artificial Sequence: Synthetic oligonucleotide
gcuuuuuauuaau

SEQ ID NO: 27016 - RNA, 12 nt, Artificial Sequence
  Description of Artificial Sequence: Synthetic oligonucleotide
ucuucuuacauu

SEQ ID NO: 27017 - RNA, 14 nt, Artificial Sequence
  Description of Artificial Sequence: Synthetic oligonucleotide
auuuguaaaaaugu

SEQ ID NO: 27018 - RNA, 14 nt, Artificial Sequence
  Description of Artificial Sequence: Synthetic oligonucleotide
ucuuaauucauauu

SEQ ID NO: 27019 - RNA, 12 nt, Artificial Sequence
  Description of Artificial Sequence: Synthetic oligonucleotide
aacuaaucauga

SEQ ID NO: 27020 - RNA, 11 nt, Artificial Sequence
  Description of Artificial Sequence: Synthetic oligonucleotide
cugcucuuggg

SEQ ID NO: 27021 - RNA, 12 nt, Artificial Sequence
  Description of Artificial Sequence: Synthetic oligonucleotide
aguagcuuugag

SEQ ID NO: 27022 - RNA, 13 nt, Artificial Sequence
  Description of Artificial Sequence: Synthetic oligonucleotide
acguaauauuuca

SEQ ID NO: 27023 - RNA, 12 nt, Artificial Sequence
  Description of Artificial Sequence: Synthetic oligonucleotide
auucucuucacu

SEQ ID NO: 27024 - RNA, 13 nt, Artificial Sequence
  Description of Artificial Sequence: Synthetic oligonucleotide
uaaugcuaagaaa

SEQ ID NO: 27025 - RNA, 11 nt, Artificial Sequence
  Description of Artificial Sequence: Synthetic oligonucleotide
cugaaaaucaa

SEQ ID NO: 27026 - RNA, 13 nt, Artificial Sequence
  Description of Artificial Sequence: Synthetic oligonucleotide
auaugauuacuuu

SEQ ID NO: 27027 - RNA, 13 nt, Artificial Sequence
  Description of Artificial Sequence: Synthetic oligonucleotide
auuuuguucuaca

SEQ ID NO: 27028 - RNA, 11 nt, Artificial Sequence
  Description of Artificial Sequence: Synthetic oligonucleotide
ccgggacucuc

SEQ ID NO: 27029 - RNA, 13 nt, Artificial Sequence
  Description of Artificial Sequence: Synthetic oligonucleotide
cuuuaaaguaaag

SEQ ID NO: 27030 - RNA, 12 nt, Artificial Sequence
  Description of Artificial Sequence: Synthetic oligonucleotide
cuggaagccugg

SEQ ID NO: 27031 - RNA, 13 nt, Artificial Sequence
  Description of Artificial Sequence: Synthetic oligonucleotide
aaacaaaagagag

SEQ ID NO: 27032 - RNA, 12 nt, Artificial Sequence
  Description of Artificial Sequence: Synthetic oligonucleotide
ucaguuaugccg

SEQ ID NO: 27033 - RNA, 12 nt, Artificial Sequence
  Description of Artificial Sequence: Synthetic oligonucleotide
aaaagaagucca

SEQ ID NO: 27034 - RNA, 10 nt, Artificial Sequence
  Description of Artificial Sequence: Synthetic oligonucleotide
ggugagguua

SEQ ID NO: 27035 - RNA, 10 nt, Artificial Sequence
  Description of Artificial Sequence: Synthetic oligonucleotide
ggaagaggac

SEQ ID NO: 27036 - RNA, 12 nt, Artificial Sequence
  Description of Artificial Sequence: Synthetic oligonucleotide
agcaaguauugu

SEQ ID NO: 27037 - RNA, 11 nt, Artificial Sequence
  Description of Artificial Sequence: Synthetic oligonucleotide
uuguagcacuc

SEQ ID NO: 27038 - RNA, 13 nt, Artificial Sequence
  Description of Artificial Sequence: Synthetic oligonucleotide
caaaaccacaaau

SEQ ID NO: 27039 - RNA, 11 nt, Artificial Sequence
  Description of Artificial Sequence: Synthetic oligonucleotide
aagcccauaca

SEQ ID NO: 27040 - RNA, 10 nt, Artificial Sequence
  Description of Artificial Sequence: Synthetic oligonucleotide
gcccauacag

SEQ ID NO: 27041 - RNA, 11 nt, Artificial Sequence
  Description of Artificial Sequence: Synthetic oligonucleotide
agaaaccuucc

SEQ ID NO: 27042 - RNA, 9 nt, Artificial Sequence
  Description of Artificial Sequence: Synthetic oligonucleotide
uauaccuac

SEQ ID NO: 27043 - RNA, 12 nt, Artificial Sequence
  Description of Artificial Sequence: Synthetic oligonucleotide
ccaguuuucgga

SEQ ID NO: 27044 - RNA, 8 nt, Artificial Sequence
  Description of Artificial Sequence: Synthetic oligonucleotide
gaacaggg

SEQ ID NO: 27045 - RNA, 12 nt, Artificial Sequence
  Description of Artificial Sequence: Synthetic oligonucleotide
uaacuuuccagu

SEQ ID NO: 27046 - RNA, 13 nt, Artificial Sequence
  Description of Artificial Sequence: Synthetic oligonucleotide
aaguuugguuuug

SEQ ID NO: 27047 - RNA, 11 nt, Artificial Sequence
  Description of Artificial Sequence: Synthetic oligonucleotide
uucccacugua

SEQ ID NO: 27048 - RNA, 12 nt, Artificial Sequence
  Description of Artificial Sequence: Synthetic oligonucleotide
gauaccauauga

SEQ ID NO: 27049 - RNA, 10 nt, Artificial Sequence
  Description of Artificial Sequence: Synthetic oligonucleotide
acaugggcug

SEQ ID NO: 27050 - RNA, 12 nt, Artificial Sequence
  Description of Artificial Sequence: Synthetic oligonucleotide
aacuuuuucaua

SEQ ID NO: 27051 - RNA, 11 nt, Artificial Sequence
  Description of Artificial Sequence: Synthetic oligonucleotide
augaggccgga

SEQ ID NO: 27052 - RNA, 10 nt, Artificial Sequence
  Description of Artificial Sequence: Synthetic oligonucleotide
cugcauuugu

SEQ ID NO: 27053 - RNA, 12 nt, Artificial Sequence
  Description of Artificial Sequence: Synthetic oligonucleotide
auguuuacuacc

SEQ ID NO: 27054 - RNA, 14 nt, Artificial Sequence
  Description of Artificial Sequence: Synthetic oligonucleotide
auuuuuugaugaaa

SEQ ID NO: 27055 - RNA, 13 nt, Artificial Sequence
  Description of Artificial Sequence: Synthetic oligonucleotide
agugugugaauuu

SEQ ID NO: 27056 - RNA, 12 nt, Artificial Sequence
  Description of Artificial Sequence: Synthetic oligonucleotide
agcaauguaugu

SEQ ID NO: 27057 - RNA, 13 nt, Artificial Sequence
  Description of Artificial Sequence: Synthetic oligonucleotide
aagcacauauaua

SEQ ID NO: 27058 - RNA, 13 nt, Artificial Sequence
  Description of Artificial Sequence: Synthetic oligonucleotide
uaauaguuucucc

SEQ ID NO: 27059 - RNA, 12 nt, Artificial Sequence
  Description of Artificial Sequence: Synthetic oligonucleotide
guuucuccaaau

SEQ ID NO: 27060 - RNA, 12 nt, Artificial Sequence
  Description of Artificial Sequence: Synthetic oligonucleotide
acuuccuagaaa

SEQ ID NO: 27061 - RNA, 12 nt, Artificial Sequence
  Description of Artificial Sequence: Synthetic oligonucleotide
acaccauauaug

SEQ ID NO: 27062 - RNA, 13 nt, Artificial Sequence
  Description of Artificial Sequence: Synthetic oligonucleotide
uauaugaauggag

SEQ ID NO: 27063 - RNA, 12 nt, Artificial Sequence
  Description of Artificial Sequence: Synthetic oligonucleotide
cauuuacaggga

SEQ ID NO: 27064 - RNA, 12 nt, Artificial Sequence
  Description of Artificial Sequence: Synthetic oligonucleotide
auuuacagggac

SEQ ID NO: 27065 - RNA, 9 nt, Artificial Sequence
  Description of Artificial Sequence: Synthetic oligonucleotide
gggaccuga

SEQ ID NO: 27066 - RNA, 13 nt, Artificial Sequence
  Description of Artificial Sequence: Synthetic oligonucleotide
guuugacugcauc

SEQ ID NO: 27067 - RNA, 12 nt, Artificial Sequence
  Description of Artificial Sequence: Synthetic oligonucleotide
uugacugcaucg

SEQ ID NO: 27068 - RNA, 11 nt, Artificial Sequence
  Description of Artificial Sequence: Synthetic oligonucleotide
aguucacaggg

SEQ ID NO: 27069 - RNA, 12 nt, Artificial Sequence
  Description of Artificial Sequence: Synthetic oligonucleotide
gcaccucugucc

SEQ ID NO: 27070 - RNA, 14 nt, Artificial Sequence
  Description of Artificial Sequence: Synthetic oligonucleotide
guuugucuuuuuaa

SEQ ID NO: 27071 - RNA, 13 nt, Artificial Sequence
  Description of Artificial Sequence: Synthetic oligonucleotide
uugucuuuuuaag

SEQ ID NO: 27072 - RNA, 12 nt, Artificial Sequence
  Description of Artificial Sequence: Synthetic oligonucleotide
cuaaagguuguc

SEQ ID NO: 27073 - RNA, 11 nt, Artificial Sequence
  Description of Artificial Sequence: Synthetic oligonucleotide
agguugucgac

SEQ ID NO: 27074 - RNA, 12 nt, Artificial Sequence
  Description of Artificial Sequence: Synthetic oligonucleotide
ccuggcaauugu

SEQ ID NO: 27075 - RNA, 11 nt, Artificial Sequence
  Description of Artificial Sequence: Synthetic oligonucleotide
guggugcgagg

SEQ ID NO: 27076 - RNA, 12 nt, Artificial Sequence
  Description of Artificial Sequence: Synthetic oligonucleotide
gagacaugaaau

SEQ ID NO: 27077 - RNA, 12 nt, Artificial Sequence
  Description of Artificial Sequence: Synthetic oligonucleotide
uauauuucucca

SEQ ID NO: 27078 - RNA, 9 nt, Artificial Sequence
  Description of Artificial Sequence: Synthetic oligonucleotide
augaaggcu

SEQ ID NO: 27079 - RNA, 10 nt, Artificial Sequence
  Description of Artificial Sequence: Synthetic oligonucleotide
cuggaguggu

SEQ ID NO: 27080 - RNA, 10 nt, Artificial Sequence
  Description of Artificial Sequence: Synthetic oligonucleotide
ggaagagagg

SEQ ID NO: 27081 - RNA, 11 nt, Artificial Sequence
  Description of Artificial Sequence: Synthetic oligonucleotide
uugcaucgggc

SEQ ID NO: 27082 - RNA, 12 nt, Artificial Sequence
  Description of Artificial Sequence: Synthetic oligonucleotide
uauccuacugug

SEQ ID NO: 27083 - RNA, 12 nt, Artificial Sequence
  Description of Artificial Sequence: Synthetic oligonucleotide
ccuacuguguaa

SEQ ID NO: 27084 - RNA, 11 nt, Artificial Sequence
  Description of Artificial Sequence: Synthetic oligonucleotide
cuuguagugua

SEQ ID NO: 27085 - RNA, 12 nt, Artificial Sequence
  Description of Artificial Sequence: Synthetic oligonucleotide
cuuuguugauug

SEQ ID NO: 27086 - RNA, 13 nt, Artificial Sequence
  Description of Artificial Sequence: Synthetic oligonucleotide
uuguugauugaaa

SEQ ID NO: 27087 - RNA, 14 nt, Artificial Sequence
  Description of Artificial Sequence: Synthetic oligonucleotide
ucuuuuucuuccau

SEQ ID NO: 27088 - RNA, 12 nt, Artificial Sequence
  Description of Artificial Sequence: Synthetic oligonucleotide
aucuuccuucua

SEQ ID NO: 27089 - RNA, 12 nt, Artificial Sequence
  Description of Artificial Sequence: Synthetic oligonucleotide
ugaaugcuucau

SEQ ID NO: 27090 - RNA, 12 nt, Artificial Sequence
  Description of Artificial Sequence: Synthetic oligonucleotide
gaaugcuucaug

SEQ ID NO: 27091 - RNA, 12 nt, Artificial Sequence
  Description of Artificial Sequence: Synthetic oligonucleotide
auucuacuuuga

SEQ ID NO: 27092 - RNA, 12 nt, Artificial Sequence
  Description of Artificial Sequence: Synthetic oligonucleotide
gcaacuacagac

SEQ ID NO: 27093 - RNA, 12 nt, Artificial Sequence
  Description of Artificial Sequence: Synthetic oligonucleotide
accaaggucaac

SEQ ID NO: 27094 - RNA, 12 nt, Artificial Sequence
  Description of Artificial Sequence: Synthetic oligonucleotide
gacuaucucgac

SEQ ID NO: 27095 - RNA, 12 nt, Artificial Sequence
  Description of Artificial Sequence: Synthetic oligonucleotide
accuucccaaac

SEQ ID NO: 27096 - RNA, 13 nt, Artificial Sequence
  Description of Artificial Sequence: Synthetic oligonucleotide
caagcuuagaacu

SEQ ID NO: 27097 - RNA, 14 nt, Artificial Sequence
  Description of Artificial Sequence: Synthetic oligonucleotide
gcuuagaacuuuaa

SEQ ID NO: 27098 - RNA, 13 nt, Artificial Sequence
  Description of Artificial Sequence: Synthetic oligonucleotide
aacuuuaagcaac

SEQ ID NO: 27099 - RNA, 10 nt, Artificial Sequence
  Description of Artificial Sequence: Synthetic oligonucleotide
agaccaccac

SEQ ID NO: 27100 - RNA, 13 nt, Artificial Sequence
  Description of Artificial Sequence: Synthetic oligonucleotide
cgagaaauaaagu

SEQ ID NO: 27101 - RNA, 13 nt, Artificial Sequence
  Description of Artificial Sequence: Synthetic oligonucleotide
gagaaauaaaguu

SEQ ID NO: 27102 - RNA, 11 nt, Artificial Sequence
  Description of Artificial Sequence: Synthetic oligonucleotide
ggaaaugaucc

SEQ ID NO: 27103 - RNA, 12 nt, Artificial Sequence
  Description of Artificial Sequence: Synthetic oligonucleotide
aagaaaugaaac

SEQ ID NO: 27104 - RNA, 12 nt, Artificial Sequence
  Description of Artificial Sequence: Synthetic oligonucleotide
uuuccauccucc

SEQ ID NO: 27105 - RNA, 14 nt, Artificial Sequence
  Description of Artificial Sequence: Synthetic oligonucleotide
cugaaaaucuuuga

SEQ ID NO: 27106 - RNA, 10 nt, Artificial Sequence
  Description of Artificial Sequence: Synthetic oligonucleotide
gccguucagg

SEQ ID NO: 27107 - RNA, 12 nt, Artificial Sequence
  Description of Artificial Sequence: Synthetic oligonucleotide
aggguccagaag

SEQ ID NO: 27108 - RNA, 12 nt, Artificial Sequence
  Description of Artificial Sequence: Synthetic oligonucleotide
caagacugcuug

SEQ ID NO: 27109 - RNA, 12 nt, Artificial Sequence
  Description of Artificial Sequence: Synthetic oligonucleotide
ccaugucuuugg

SEQ ID NO: 27110 - RNA, 10 nt, Artificial Sequence
  Description of Artificial Sequence: Synthetic oligonucleotide
ccugaaacac

SEQ ID NO: 27111 - RNA, 11 nt, Artificial Sequence
  Description of Artificial Sequence: Synthetic oligonucleotide
cucuguaccuc

SEQ ID NO: 27112 - RNA, 11 nt, Artificial Sequence
  Description of Artificial Sequence: Synthetic oligonucleotide
gcaagacaaga

SEQ ID NO: 27113 - RNA, 12 nt, Artificial Sequence
  Description of Artificial Sequence: Synthetic oligonucleotide
caagacaagaaa

SEQ ID NO: 27114 - RNA, 11 nt, Artificial Sequence
  Description of Artificial Sequence: Synthetic oligonucleotide
guacaagaucc

SEQ ID NO: 27115 - RNA, 11 nt, Artificial Sequence
  Description of Artificial Sequence: Synthetic oligonucleotide
guacuugcaga

SEQ ID NO: 27116 - RNA, 12 nt, Artificial Sequence
  Description of Artificial Sequence: Synthetic oligonucleotide
gaucgauacaga

SEQ ID NO: 27117 - RNA, 12 nt, Artificial Sequence
  Description of Artificial Sequence: Synthetic oligonucleotide
auaaaaauaaau

SEQ ID NO: 27118 - RNA, 12 nt, Artificial Sequence
  Description of Artificial Sequence: Synthetic oligonucleotide
aaaaauaaauau

SEQ ID NO: 27119 - RNA, 12 nt, Artificial Sequence
  Description of Artificial Sequence: Synthetic oligonucleotide
uugacugcugug

SEQ ID NO: 27120 - RNA, 12 nt, Artificial Sequence
  Description of Artificial Sequence: Synthetic oligonucleotide
gagaugagagac

SEQ ID NO: 27121 - RNA, 9 nt, Artificial Sequence
  Description of Artificial Sequence: Synthetic oligonucleotide
cccacuugg

SEQ ID NO: 27122 - RNA, 922 nt, Homo sapiens
gcgaacaagggcagcaaggcuacggagaggcugaagaagaagcugucggagcaggagucacugcugcugcuuaugucucccagcauggccuucagggugcacagccgcaacggcaagaguuacacguuccugaucuccucugacuaugagcgugcagaguggagggagaacauccgggagcagcagaagaaguguuucagaagcuucucccugacauccguggagcugcagaugcugaccaacucgugugugaaacuccagacuguccacagcauuccgcugaccaucaauaaggaagaagcccuucagcggccaguagcaucugacuuugagccucagggucugagugaagccgcucguuggaacuccaaggaaaaccuucucgcuggacccagugaaaaugaccccaaccuuuucguugcacuguaugauuuuguggccaguggagauaacacucuaagcauaacuaaaggugaaaagcuccgggucuuaggcuauaaucacaauggggaauggugugaagcccaaaccaaaaauggccaaggcugggucccaagcaacuacaucacgccagucaacagucuggagaaacacuccugguaccaugggccugugucccgcaaugccgcugaguaucugcugagcagcgggaucaauggcagcuucuuggugcgugagagugagagcaguccuggccagagguccaucucgcugagauacgaagggaggguguaccauuacaggaucaacacugcuucugauggcaagcucuacgucuccuccgagagccgcuucaacacccuggccgaguugguucaucaucauucaacgguggccgacgggcucaucaccacgcuccauuauccagccccaaagcgcaacaagcccacugucuauggugugucccccaacuacgacaagu

SEQ ID NO: 27123 - RNA, 997 nt, Homo sapiens
gcgaacaagggcagcaaagcuacggagaggcugaagaagaagcugucggagcaggagucacugcugcugcuuaugucucccagcauggccuucagggugcacagccgcaacggcaagaguuacacguuccugaucuccucugacuaugagcgugcagaguggagggagaacauccgggagcagcagaagaaguguuucagaagcuucucccugacauccguggagcugcagaugcugaccaacucgugugugaaacuccagacuguccacagcauuccgcugaccaucaauaaggaagaugaugagucuccggggcucuauggguuucugaaugucaucguccacucagccacuggauuuaagcagaguucaaaagcccuucagcggccaguagcaucugacuuugagccucagggucugagugaagccgcucguuggaacuccaaggaaaaccuucucgcuggacccagugaaaaugaccccaaccuuuucguugcacuguaugauuuuguggccaguggagauaacacucuaagcauaacuaaaggugaaaagcuccgggucuuaggcuauaaucacaauggggaauggugugaagcccaaaccaaaaauggccaaggcugggucccaagcaacuacaucacgccagucaacagucuggagaaacacuccugguaccaugggccugugucccgcaaugccgcugaguaucugcugagcagcgggaucaauggcagcuucuuggugcgugagagugagagcaguccuggccagagguccaucucgcugagauacgaagggaggguguaccauuacaggaucaacacugcuucugauggcaagcucuacgucuccuccgagagccgcuucaacacccuggccgaguugguucaucaucauucaacgguggccgacgggcucaucaccacgcuccauuauccagccccaaagcgcaacaagcccacugucuaugguguguccccuaacuacgacaagu

SEQ ID NO: 27124 - RNA, 1079 nt, Homo sapiens
guaccagcccuaccagagcaucuacgucgggggcaugauggaaggggagggcaagggcccgcuccugcgcagccagagcaccucugagcaggagaagcgccuuaccuggccccgcagguccuacuccccccggaguuuugaggauugcggaggcggcuauaccccggacugcagcuccaaugagaaccucaccuccagcgaggaggacuucuccucuggccaguccagccgcguguccccaagccccaccaccuaccgcauguuccgggacaaaagccgcucucccucgcagaacucgcaacaguccuucgacagcagcaguccccccacgccgcagugccauaagcggcaccggcacugcccgguugucguguccgaggccaccaucgugggcguccgcaagaccgggcagaucuggcccaacgauggcgagggcgccuuccauggagacgcagaagcccuucagcggccaguagcaucugacuuugagccucagggucugagugaagccgcucguuggaacuccaaggaaaaccuucucgcuggacccagugaaaaugaccccaaccuuuucguugcacuguaugauuuuguggccaguggagauaacacucuaagcauaacuaaaggugaaaagcuccgggucuuaggcuauaaucacaauggggaauggugugaagcccaaaccaaaaauggccaaggcugggucccaagcaacuacaucacgccagucaacagucuggagaaacacuccugguaccaugggccugugucccgcaaugccgcugaguaucugcugagcagcgggaucaauggcagcuucuuggugcgugagagugagagcaguccuggccagagguccaucucgcugagauacgaagggaggguguaccauuacaggaucaacacugcuucugauggcaagcucuacgucuccuccgagagccgcuucaacacccuggccgaguugguucaucaucauucaacgguggccgacgggcucaucaccacgcuccauuauccagccccaaagcgcaacaagcccacugucuauggugugucccccaacuacgacaagu

SEQ ID NO: 27125 - RNA, 1496 nt, Homo sapiens
cccagcauggccuucagggugcacagccgcaacggcaagaguuacacguuccugaucuccucugacuaugagcgugcagaguggagggagaacauccgggagcagcagaagaaguguuucagaagcuucucccugacauccguggagcugcagaugccgaccaacucgugugugaaacuccagacuguccacagcauuccgcugaccaucaauaaggaagaugaugagucuccggggcucuauggguuucugaaugucaucguccacucagccacuggauuuaagcagaguucaaaucuguacugcacccuggagguggauuccuuuggguauuuugugaauaaagcaaagacgcgcgucuacagggacacagcugagccaaacuggaacgaggaauuugagauagagcuggagggcucccagacccugaggauacugugcuaugaaaaguguuacaacaagacgaagauccccaaggaggacggcgagagcacggacagacucauggggaagggccagguccagcuggacccgcaggcccugcaggacagagacuggcagcgcaccgucaucgccaugaaugggaucgaaguaaagcucucggucaaguucaacagcagggaguucagcuugaagaggaugccgucccgaaaacagacagggguccucggagucaagauugcuguggucaccaagagagagagguccaaggugcccuacaucgugcgccagugcguggaggagaucgagcgccgaggcauggaggaggugggcaucuaccgcguguccgguguggccacggacauccaggcacugaaggcagccuucgacgucaaagcccuucagcggccaguagcaucugacuuugagccucagggucugagugaagccgcucguuggaacuccaaggaaaaccuucucgcuggacccagugaaaaugaccccaaccuuuucguugcacuguaugauuuuguggccaguggagauaacacucuaagcauaacuaaaggugaaaagcuccgggucuuaggcuauaaucacaauggggaauggugugaagcccaaaccaaaaauggccaaggcugggucccaagcaacuacaucacgccagucaacagucuggagaaacacuccugguaccaugggccugugucccgcaaugccgcugagcaucugcugagcagcgggaucaauggcagcuucuuggugcgugagagugagagcaguccuggccagagguccaucucgcugagauacgaagggaggguguaccauuacaggaucaacacugcuucugauggcaagcucuacgucuccuccgagagccgcuucaacacccuggccgaguugguucaucaucauucaacgguggccgacgggcucaucaccacgcuccauuauccagccccaaagcgcaacaagcccucugucuauggugugucccccaacuacgacaagugggagauggaacgcacggacaucaccaugaagcacaa

SEQ ID NO: 27126 - RNA, 6927 nt, Homo sapiens
ggggggaggguggcggcucgaugggggagccgccuccagggggcccccccgcccugugcccacggcgcggccccuuuaagaggcccgccuggcuccgucauccgcgccgcggccaccuccccccggcccuccccuuccugcggcgcagagugcgggccgggcgggagugcggcgagagccggcuggcugagcuuagcguccgaggaggcggcggcggcggcggcggcacggcggcggcggggcuguggggcggugcggaagcgagaggcgaggagcgcgcgggccguggccagagucuggcggcggccuggcggagcggagagcagcgcccgcgccucgccgugcggaggagccccgcacacaauagcggcgcgcgcagcccgcgcccuuccccccggcgcgccccgccccgcgcgccgagcgccccgcuccgccucaccugccaccagggagugggcgggcauuguucgccgccgccgccgccgcgcgggccaugggggccgcccggcgcccggggccgggcuggcgaggcgccgcgccgccgcugagacgggccccgcgcgcagcccggcggcgcagguaaggccggccgcgccaugguggacccggugggcuucgcggaggcguggaaggcgcaguucccggacucagagcccccgcgcauggagcugcgcucagugggcgacaucgagcaggagcuggagcgcugcaaggccuccauucggcgccuggagcaggaggugaaccaggagcgcuuccgcaugaucuaccugcagacguugcuggccaaggaaaagaagagcuaugaccggcagcgauggggcuuccggcgcgcggcgcaggcccccgacggcgccuccgagccccgagcguccgcgucgcgcccgcagccagcgcccgccgacggagccgacccgccgcccgccgaggagcccgaggcccggcccgacggcgaggguucuccggguaaggccaggcccgggaccgcccgcaggcccggggcagccgcgucgggggaacgggacgaccggggaccccccgccagcguggcggcgcucagguccaacuucgagcggauccgcaagggccauggccagcccggggcggacgccgagaagcccuucuacgugaacgucgaguuucaccacgagcgcggccuggugaaggucaacgacaaagaggugucggaccgcaucagcucccugggcagccaggccaugcagauggagcgcaaaaagucccagcacggcgcgggcucgagcgugggggaugcauccaggcccccuuaccggggacgcuccucggagagcagcugcggcgucgacggcgacuacgaggacgccgaguugaacccccgcuuccugaaggacaaccugaucgacgccaauggcgguagcaggcccccuuggccgccccuggaguaccagcccuaccagagcaucuacgucgggggcaugauggaaggggagggcaagggcccgcuccugcgcagccagagcaccucugagcaggagaagcgccuuaccuggccccgcagguccuacuccccccggaguuuugaggauugcggaggcggcuauaccccggacugcagcuccaaugagaaccucaccuccagcgaggaggacuucuccucuggccaguccagccgcguguccccaagccccaccaccuaccgcauguuccgggacaaaagccgcucucccucgcagaacucgcaacaguccuucgacagcagcaguccccccacgccgcagugccauaagcggcaccggcacugcccgguugucguguccgaggccaccaucgugggcguccgcaagaccgggcagaucuggcccaacgauggcgagggcgccuuccauggagacgcagauggcucguucggaacaccaccuggauacggcugcgcugcagaccgggcagaggagcagcgccggcaccaagaugggcugcccuacauugaugacucgcccuccucaucgccccaccucagcagcaagggcaggggcagccgggaugcgcuggucucgggagcccuggaguccacuaaagcgagugagcuggacuuggaaaagggcuuggagaugagaaaauggguccugucgggaauccuggcuagcgaggagacuuaccugagccaccuggaggcacugcugcugcccaugaagccuuugaaagccgcugccaccaccucucagccggugcugacgagucagcagaucgagaccaucuucuucaaagugccugagcucuacgagauccacaaggaguucuaugaugggcucuucccccgcgugcagcaguggagccaccagcagcgggugggcgaccucuuccagaagcuggccagccagcuggguguguaccgggccuucguggacaacuacggaguugccauggaaauggcugagaagugcugucaggccaaugcucaguuugcagaaaucuccgagaaccugagagccagaagcaacaaagaugccaaggauccaacgaccaagaacucucuggaaacucugcucuacaagccuguggaccgugugacgaggagcacgcugguccuccaugacuugcugaagcacacuccugccagccacccugaccaccccuugcugcaggacgcccuccgcaucucacagaacuuccuguccagcaucaaugaggagaucacaccccgacggcaguccaugacggugaagaagggagagcaccggcagcugcugaaggacagcuucaugguggagcugguggagggggcccgcaagcugcgccacgucuuccuguucaccgaccugcuucucugcaccaagcucaagaagcagagcggaggcaaaacgcagcaguaugacugcaaaugguacauuccgcucacggaucucagcuuccagaugguggaugaacuggaggcagugcccaacaucccccuggugcccgaugaggagcuggacgcuuugaagaucaagaucucccagaucaagaaugacauccagagagagaagagggcgaacaagggcagcaaggcuacggagaggcugaagaagaagcugucggagcaggagucacugcugcugcuuaugucucccagcauggccuucagggugcacagccgcaacggcaagaguuacacguuccugaucuccucugacuaugagcgugcagaguggagggagaacauccgggagcagcagaagaaguguuucagaagcuucucccugacauccguggagcugcagaugcugaccaacucgugugugaaacuccagacuguccacagcauuccgcugaccaucaauaaggaagaugaugagucuccggggcucuauggguuucugaaugucaucguccacucagccacuggauuuaagcagaguucaaaucuguacugcacccuggagguggauuccuuuggguauuuugugaauaaagcaaagacgcgcgucuacagggacacagcugagccaaacuggaacgaggaauuugagauagagcuggagggcucccagacccugaggauacugugcuaugaaaaguguuacaacaagacgaagauccccaaggaggacggcgagagcacggacagacucauggggaagggccagguccagcuggacccgcaggcccugcaggacagagacuggcagcgcaccgucaucgccaugaaugggaucgaaguaaagcucucggucaaguucaacagcagggaguucagcuugaagaggaugccgucccgaaaacagacaggggucuucggagucaagauugcuguggucaccaagagagagagguccaaggugcccuacaucgugcgccagugcguggaggagaucgagcgccgaggcauggaggaggugggcaucuaccgcguguccgguguggccacggacauccaggcacugaaggcagccuucgacgucaauaacaaggacgugucggugaugaugagcgagauggacgugaacgccaucgcaggcacgcugaagcuguacuuccgugagcugcccgagccccucuucacugacgaguucuaccccaacuucgcagagggcaucgcucuuucagacccgguugcaaaggagagcugcaugcucaaccugcugcugucccugccggaggccaaccugcucaccuuccuuuuccuucuggaccaccugaaaaggguggcagagaaggaggcagucaauaagaugucccugcacaaccucgccacggucuuuggccccacgcugcuccggcccuccgagaaggagagcaagcucccugccaaccccagccagccuaucaccaugacugacagcugguccuuggaggucaugucccagguccaggugcugcuguacuuccugcagcuggaggccaucccugccccggacagcaagagacagagcauccuguucuccaccgaagucuaaaggucccaguccaucuccuggaggcggacagauggccuggaaaccucuggcuaaucgggccauccguagagcgggaaccuuccugagguguccuugggccacccccaaguguugggccaucugccaagagacagcgacccaaagccgaaggacagguggccuggaaagaucccgcccaggucugggagccccaggcuggccucagacugugguuuuuuauguggccaccugagggcgccccaagccaguucaucucggaguccaggccuggcccugggagacagggugaagggagugguuuuuaugaacuuaacuuagagucuaaaagauuucuacuggaucacuugucaagaugcgcccucucuggggagaagggaacgugacuggauucccucacuguuguaucuugaauaaacgcugcugcuucauccugugggggccguggcccugucccuguguggguggggccucuuccauuucccugacuuagaaaccacacuccacuucuaacaggguuugagaggcuuagucagcacuggguagcguuuugacuccauucuuggcuuucuuuuucuuuccagaaggauuuuugugcagaaaugggucuuuuguugccauguuaguccuccuuggaaggcagcucagaaggccugugaaaugucaggggacaggacccccagggagggaaccccaggcuacgcacuuuaggguucguucuccagggagagcgaccucgucccccgauccugaccgcccuuccggcccacgcucuccuguuuggcuuccacaggccuggacuucucuggcuucucugcccacacacucccugcccccagugucccugccccugccccagcacaggugacuucauuucuguccucucagcucaguggacucgcucaacuuuuguauaagucuccacuugguggcagcagcuugcugaugacuuguuuuaaaacuuucauccuaaauaaccuuuugauacuugaauauuuguaaguuuuauacauaguuucuaauuuuuuuccgaacagauccagauaccuaauaagaugcuggaauguaaucccuggacaauccguguccuggcagcauuuggucuuccucuaagcgccuggcuccgcuguucucaggaguggguucugaagucucuggagaacaggauacguggaggguuaggaaggggccaggccuagagacgggagacucccucccggagcagguggaggcacaggaccauucgcuaccccaucugccgacaccugcgggggagcccaggcauucuuuguaaacccuccugaccaccuggcucaaagaaaacagaagcauggagaccgccaaguauuuucaagaaauaaccccaugaauauuccaucacuuuuuuagaaagaggggcuuggggcaggcagaggagagaagggagagcaaacugagagccaaguuuccacacgguccugcaggaggagaggaugcagcugcccagagggaagcaggaucacauuuaaggaaguguguggggucccuggaugacaccagcacccagugcggcucugucuggcacccgcucccaaggugggaggaguggguguccccugugugucagugggcagcuccugcugaacccgcagcucacuagggagccugacaguggggccaugcgccugacacuccucucugcuuguggaccuggcaaggcagggagcagaaaacagccacuugaaggcuuucugucugcgucugugugcaguguggauuuaguugugcuuuuuucuugcugggagagcacagccaccauuuacaagcagugucaccgucguggguggcgaggacagaacaggagccucugcucucuguaccuaucugggcccggugggcucccuuguccuggcuuccaucucugucucagcgaccauucagcccugcgcaggaacacguguugcuuagaaaagccaaauccagccuugucucugccuccucuggucucaugaugugcaucuguuaccuugaaacuggaaaccagucuaucaaugucugugccaauuuuuuauucccuccccaaccuccuuccccauacgacuuuuuauuuauguaggaugugugcugucuaaugaugggaugaccacacuuuuccauguucuaaaagugcuccucucccgcagggucccagggcuggugguugcuuugggucuacagcuacgucuuacccaccuccugccucaacagccugugugguggcaaagccgguguggggcuggggaacgcagcguucuccaggagggggaccuggcucuccuucugcaaugcaggcgaaggccuagaugccagugugaccucccacaaggcguggcuuccagacuccccggccggaagugaugcuuuuuugccuugggcccuggguuugaagcagccuggcuuucucuugguaaguggcuggugucuuagcagcugcaaucugagcucagccaccuacacaccaccguggccgacacuuucauuaaaaaguuuccugagacga

SEQ ID NO: 27127 - RNA, 6795 nt, Homo sapiens
ggggggaggguggcggcucgaugggggagccgccuccagggggcccccccgcccugugcccacggcgcggccccuuuaagaggcccgccuggcuccgucauccgcgccgcggccaccuccccccggcccuccccuuccugcggcgcagagugcgggccgggcgggagugcggcgagagccggcuggcugagcuuagcguccgaggaggcggcggcggcggcggcggcacggcggcggcggggcuguggggcggugcggaagcgagaggcgaggagcgcgcgggccguggccagagucuggcggcggccuggcggagcggagagcagcgcccgcgccucgccgugcggaggagccccgcacacaauagcggcgcgcgcagcccgcgcccuuccccccggcgcgccccgccccgcgcgccgagcgccccgcuccgccucaccugccaccagggagugggcgggcauuguucgccgccgccgccgccgcgcgggccaugggggccgcccggcgcccggggccgggcuggcgaggcgccgcgccgccgcugagacgggccccgcgcgcagcccggcggcgcagguaaggccggccgcgccaugguggacccggugggcuucgcggaggcguggaaggcgcaguucccggacucagagcccccgcgcauggagcugcgcucagugggcgacaucgagcaggagcuggagcgcugcaaggccuccauucggcgccuggagcaggaggugaaccaggagcgcuuccgcaugaucuaccugcagacguugcuggccaaggaaaagaagagcuaugaccggcagcgauggggcuuccggcgcgcggcgcaggcccccgacggcgccuccgagccccgagcguccgcgucgcgcccgcagccagcgcccgccgacggagccgacccgccgcccgccgaggagcccgaggcccggcccgacggcgaggguucuccggguaaggccaggcccgggaccgcccgcaggcccggggcagccgcgucgggggaacgggacgaccggggaccccccgccagcguggcggcgcucagguccaacuucgagcggauccgcaagggccauggccagcccggggcggacgccgagaagcccuucuacgugaacgucgaguuucaccacgagcgcggccuggugaaggucaacgacaaagaggugucggaccgcaucagcucccugggcagccaggccaugcagauggagcgcaaaaagucccagcacggcgcgggcucgagcgugggggaugcauccaggcccccuuaccggggacgcuccucggagagcagcugcggcgucgacggcgacuacgaggacgccgaguugaacccccgcuuccugaaggacaaccugaucgacgccaauggcgguagcaggcccccuuggccgccccuggaguaccagcccuaccagagcaucuacgucgggggcaugauggaaggggagggcaagggcccgcuccugcgcagccagagcaccucugagcaggagaagcgccuuaccuggccccgcagguccuacuccccccggaguuuugaggauugcggaggcggcuauaccccggacugcagcuccaaugagaaccucaccuccagcgaggaggacuucuccucuggccaguccagccgcguguccccaagccccaccaccuaccgcauguuccgggacaaaagccgcucucccucgcagaacucgcaacaguccuucgacagcagcaguccccccacgccgcagugccauaagcggcaccggcacugcccgguugucguguccgaggccaccaucgugggcguccgcaagaccgggcagaucuggcccaacgauggcgagggcgccuuccauggagacgcagauggcucguucggaacaccaccuggauacggcugcgcugcagaccgggcagaggagcagcgccggcaccaagaugggcugcccuacauugaugacucgcccuccucaucgccccaccucagcagcaagggcaggggcagccgggaugcgcuggucucgggagcccuggaguccacuaaagcgagugagcuggacuuggaaaagggcuuggagaugagaaaauggguccugucgggaauccuggcuagcgaggagacuuaccugagccaccuggaggcacugcugcugcccaugaagccuuugaaagccgcugccaccaccucucagccggugcugacgagucagcagaucgagaccaucuucuucaaagugccugagcucuacgagauccacaaggaguucuaugaugggcucuucccccgcgugcagcaguggagccaccagcagcgggugggcgaccucuuccagaagcuggccagccagcuggguguguaccgggccuucguggacaacuacggaguugccauggaaauggcugagaagugcugucaggccaaugcucaguuugcagaaaucuccgagaaccugagagccagaagcaacaaagaugccaaggauccaacgaccaagaacucucuggaaacucugcucuacaagccuguggaccgugugacgaggagcacgcugguccuccaugacuugcugaagcacacuccugccagccacccugaccaccccuugcugcaggacgcccuccgcaucucacagaacuuccuguccagcaucaaugaggagaucacaccccgacggcaguccaugacggugaagaagggagagcaccggcagcugcugaaggacagcuucaugguggagcugguggagggggcccgcaagcugcgccacgucuuccuguucaccgaccugcuucucugcaccaagcucaagaagcagagcggaggcaaaacgcagcaguaugacugcaaaugguacauuccgcucacggaucucagcuuccagaugguggaugaacuggaggcagugcccaacaucccccuggugcccgaugaggagcuggacgcuuugaagaucaagaucucccagaucaagaaugacauccagagagagaagagggcgaacaagggcagcaaggcuacggagaggcugaagaagaagcugucggagcaggagucacugcugcugcuuaugucucccagcauggccuucagggugcacagccgcaacggcaagaguuacacguuccugaucuccucugacuaugagcgugcagaguggagggagaacauccgggagcagcagaagaaguguuucagaagcuucucccugacauccguggagcugcagaugcugaccaacucgugugugaaacuccagacuguccacagcauuccgcugaccaucaauaaggaagaugaugagucuccggggcucuauggguuucugaaugucaucguccacucagccacuggauuuaagcagaguucaaaucuguacugcacccuggagguggauuccuuuggguauuuugugaauaaagcaaagacgcgcgucuacagggacacagcugagccaaacuggaacgagcuggacccgcaggcccugcaggacagagacuggcagcgcaccgucaucgccaugaaugggaucgaaguaaagcucucggucaaguucaacagcagggaguucagcuugaagaggaugccgucccgaaaacagacaggggucuucggagucaagauugcuguggucaccaagagagagagguccaaggugcccuacaucgugcgccagugcguggaggagaucgagcgccgaggcauggaggaggugggcaucuaccgcguguccgguguggccacggacauccaggcacugaaggcagccuucgacgucaauaacaaggacgugucggugaugaugagcgagauggacgugaacgccaucgcaggcacgcugaagcuguacuuccgugagcugcccgagccccucuucacugacgaguucuaccccaacuucgcagagggcaucgcucuuucagacccgguugcaaaggagagcugcaugcucaaccugcugcugucccugccggaggccaaccugcucaccuuccuuuuccuucuggaccaccugaaaaggguggcagagaaggaggcagucaauaagaugucccugcacaaccucgccacggucuuuggccccacgcugcuccggcccuccgagaaggagagcaagcucccugccaaccccagccagccuaucaccaugacugacagcugguccuuggaggucaugucccagguccaggugcugcuguacuuccugcagcuggaggccaucccugccccggacagcaagagacagagcauccuguucuccaccgaagucuaaaggucccaguccaucuccuggaggcggacagauggccuggaaaccucuggcuaaucgggccauccguagagcgggaaccuuccugagguguccuugggccacccccaaguguugggccaucugccaagagacagcgacccaaagccgaaggacagguggccuggaaagaucccgcccaggucugggagccccaggcuggccucagacugugguuuuuuauguggccaccugagggcgccccaagccaguucaucucggaguccaggccuggcccugggagacagggugaagggagugguuuuuaugaacuuaacuuagagucuaaaagauuucuacuggaucacuugucaagaugcgcccucucuggggagaagggaacgugacuggauucccucacuguuguaucuugaauaaacgcugcugcuucauccugugggggccguggcccugucccuguguggguggggccucuuccauuucccugacuuagaaaccacacuccacuucuaacaggguuugagaggcuuagucagcacuggguagcguuuugacuccauucuuggcuuucuuuuucuuuccagaaggauuuuugugcagaaaugggucuuuuguugccauguuaguccuccuuggaaggcagcucagaaggccugugaaaugucaggggacaggacccccagggagggaaccccaggcuacgcacuuuaggguucguucuccagggagagcgaccucgucccccgauccugaccgcccuuccggcccacgcucuccuguuuggcuuccacaggccuggacuucucuggcuucucugcccacacacucccugcccccagugucccugccccugccccagcacaggugacuucauuucuguccucucagcucaguggacucgcucaacuuuuguauaagucuccacuugguggcagcagcuugcugaugacuuguuuuaaaacuuucauccuaaauaaccuuuugauacuugaauauuuguaaguuuuauacauaguuucuaauuuuuuuccgaacagauccagauaccuaauaagaugcuggaauguaaucccuggacaauccguguccuggcagcauuuggucuuccucuaagcgccuggcuccgcuguucucaggaguggguucugaagucucuggagaacaggauacguggaggguuaggaaggggccaggccuagagacgggagacucccucccggagcagguggaggcacaggaccauucgcuaccccaucugccgacaccugcgggggagcccaggcauucuuuguaaacccuccugaccaccuggcucaaagaaaacagaagcauggagaccgccaaguauuuucaagaaauaaccccaugaauauuccaucacuuuuuuagaaagaggggcuuggggcaggcagaggagagaagggagagcaaacugagagccaaguuuccacacgguccugcaggaggagaggaugcagcugcccagagggaagcaggaucacauuuaaggaaguguguggggucccuggaugacaccagcacccagugcggcucugucuggcacccgcucccaaggugggaggaguggguguccccugugugucagugggcagcuccugcugaacccgcagcucacuagggagccugacaguggggccaugcgccugacacuccucucugcuuguggaccuggcaaggcagggagcagaaaacagccacuugaaggcuuucugucugcgucugugugcaguguggauuuaguugugcuuuuuucuugcugggagagcacagccaccauuuacaagcagugucaccgucguggguggcgaggacagaacaggagccucugcucucuguaccuaucugggcccggugggcucccuuguccuggcuuccaucucugucucagcgaccauucagcccugcgcaggaacacguguugcuuagaaaagccaaauccagccuugucucugccuccucuggucucaugaugugcaucuguuaccuugaaacuggaaaccagucuaucaaugucugugccaauuuuuuauucccuccccaaccuccuuccccauacgacuuuuuauuuauguaggaugugugcugucuaaugaugggaugaccacacuuuuccauguucuaaaagugcuccucucccgcagggucccagggcuggugguugcuuugggucuacagcuacgucuuacccaccuccugccucaacagccugugugguggcaaagccgguguggggcuggggaacgcagcguucuccaggagggggaccuggcucuccuucugcaaugcaggcgaaggccuagaugccagugugaccucccacaaggcguggcuuccagacuccccggccggaagugaugcuuuuuugccuugggcccuggguuugaagcagccuggcuuucucuugguaaguggcuggugucuuagcagcugcaaucugagcucagccaccuacacaccaccguggccgacacuuucauuaaaaaguuuccugagacga

SEQ ID NO: 27128 - RNA, 5384 nt, Homo sapiens
aaaauguuggagaucugccugaagcuggugggcugcaaauccaagaaggggcuguccucguccuccagcuguuaucuggaagaagcccuucagcggccaguagcaucugacuuugagccucagggucugagugaagccgcucguuggaacuccaaggaaaaccuucucgcuggacccagugaaaaugaccccaaccuuuucguugcacuguaugauuuuguggccaguggagauaacacucuaagcauaacuaaaggugaaaagcuccgggucuuaggcuauaaucacaauggggaauggugugaagcccaaaccaaaaauggccaaggcugggucccaagcaacuacaucacgccagucaacagucuggagaaacacuccugguaccaugggccugugucccgcaaugccgcugaguaucugcugagcagcgggaucaauggcagcuucuuggugcgugagagugagagcaguccuggccagagguccaucucgcugagauacgaagggaggguguaccauuacaggaucaacacugcuucugauggcaagcucuacgucuccuccgagagccgcuucaacacccuggccgaguugguucaucaucauucaacgguggccgacgggcucaucaccacgcuccauuauccagccccaaagcgcaacaagcccacugucuauggugugucccccaacuacgacaagugggagauggaacgcacggacaucaccaugaagcacaagcugggcgggggccaguacggggagguguacgagggcguguggaagaaauacagccugacgguggccgugaagaccuugaaggaggacaccauggagguggaagaguucuugaaagaagcugcagucaugaaagagaucaaacacccuaaccuggugcagcuccuuggggucugcacccgggagcccccguucuauaucaucacugaguucaugaccuacgggaaccuccuggacuaccugagggagugcaaccggcaggaggugaacgccguggugcugcuguacauggccacucagaucucgucagccauggaguaccuggagaagaaaaacuucauccacagagaucuugcugcccgaaacugccugguaggggagaaccacuuggugaagguagcugauuuuggccugagcagguugaugacaggggacaccuacacagcccaugcuggagccaaguuccccaucaaauggacugcacccgagagccuggccuacaacaaguucuccaucaaguccgacgucugggcauuuggaguauugcuuugggaaauugcuaccuauggcauguccccuuacccgggaauugaccugucccagguguaugagcugcuagagaaggacuaccgcauggagcgcccagaaggcugcccagagaaggucuaugaacucaugcgagcauguuggcaguggaaucccucugaccggcccuccuuugcugaaauccaccaagccuuugaaacaauguuccaggaauccaguaucucagacgaaguggaaaaggagcuggggaaacaaggcguccguggggcugugaguaccuugcugcaggccccagagcugcccaccaagacgaggaccuccaggagagcugcagagcacagagacaccacugacgugccugagaugccucacuccaagggccagggagagagcgauccucuggaccaugagccugccgugucuccauugcucccucgaaaagagcgaggucccccggagggcggccugaaugaagaugagcgccuucuccccaaagacaaaaagaccaacuuguucagcgccuugaucaagaagaagaagaagacagccccaaccccucccaaacgcagcagcuccuuccgggagauggacggccagccggagcgcagaggggccggcgaggaagagggccgagacaucagcaacggggcacuggcuuucacccccuuggacacagcugacccagccaaguccccaaagcccagcaauggggcugggguccccaauggagcccuccgggaguccgggggcucaggcuuccggucuccccaccuguggaagaaguccagcacgcugaccagcagccgccuagccaccggcgaggaggagggcgguggcagcuccagcaagcgcuuccugcgcucuugcuccgccuccugcguuccccauggggccaaggacacggaguggaggucagucacgcugccucgggacuugcaguccacgggaagacaguuugacucguccacauuuggagggcacaaaagugagaagccggcucugccucggaagagggcaggggagaacaggucugaccaggugacccgaggcacaguaacgccuccccccaggcuggugaaaaagaaugaggaagcugcugaugaggucuucaaagacaucauggaguccagcccgggcuccagcccgcccaaccugacuccaaaaccccuccggcggcaggucaccguggccccugccucgggccucccccacaaggaagaagcuggaaagggcagugccuuagggaccccugcugcagcugagccagugacccccaccagcaaagcaggcucaggugcaccagggggcaccagcaagggccccgccgaggaguccagagugaggaggcacaagcacuccucugagucgccagggagggacaaggggaaauuguccaggcucaaaccugccccgccgcccccaccagcagccucugcagggaaggcuggaggaaagcccucgcagagcccgagccaggaggcggccggggaggcaguccugggcgcaaagacaaaagccacgagucugguugaugcugugaacagugacgcugccaagcccagccagccgggagagggccucaaaaagcccgugcucccggccacuccaaagccacaguccgccaagccgucggggacccccaucagcccagcccccguucccuccacguugccaucagcauccucggcccuggcaggggaccagccgucuuccaccgccuucaucccucucauaucaacccgagugucucuucggaaaacccgccagccuccagagcggaucgccagcggcgccaucaccaagggcgugguccuggacagcaccgaggcgcugugccucgccaucucuaggaacuccgagcagauggccagccacagcgcagugcuggaggccggcaaaaaccucuacacguucugcgugagcuauguggauuccauccagcaaaugaggaacaaguuugccuuccgagaggccaucaacaaacuggagaauaaucuccgggagcuucagaucugcccggcgacagcaggcagugguccagcggccacucaggacuucagcaagcuccucaguucggugaaggaaaucagugacauagugcagagguagcagcagucaggggucaggugucaggcccgucggagcugccugcagcacaugcgggcucgcccauacccgugacaguggcugacaagggacuagugagucagcaccuuggcccaggagcucugcgccaggcagagcugagggcccuguggaguccagcucuacuaccuacguuugcaccgccugcccucccgcaccuuccuccuccccgcuccgucucuguccucgaauuuuaucuguggaguuccugcuccguggacugcagucggcaugccaggacccgccagccccgcucccaccuagugccccagacugagcucuccaggccaggugggaacggcugauguggacugucuuuuucauuuuuuucucucuggagccccuccucccccggcugggccuccuucuuccacuucuccaagaauggaagccugaacugaggccuugugugucaggcccucugccugcacucccuggccuugcccgucgugugcugaagacauguuucaagaaccgcauuucgggaagggcaugcacgggcaugcacacggcuggucacucugcccucugcugcugcccgggguggggugcacucgccauuuccucacgugcaggacagcucuugauuuggguggaaaacagggugcuaaagccaaccagccuuuggguccugggcaggugggagcugaaaaggaucgaggcauggggcauguccuuuccaucuguccacauccccagagcccagcucuugcucucuugugacgugcacugugaauccuggcaagaaagcuugagucucaaggguggcaggucacugucacugccgacaucccucccccagcagaauggaggcaggggacaagggaggcaguggcuaguggggugaacagcuggugccaaauagccccagacugggcccaggcaggucugcaagggcccagagugaaccguccuuucacacaucugggugcccugaaagggcccuuccccucccccacuccucuaagacaaaguagauucuuacaaggcccuuuccuuuggaacaagacagccuucacuuuucugaguucuugaagcauuucaaagcccugccucuguguagccgcccugagagagaauagagcugccacugggcaccugcgcacaggugggaggaaagggccuggccaguccugguccuggcugcacucuugaacugggcgaaugucuuauuuaauuaccgugagugacauagccucauguucugugggggucaucagggaggguuaggaaaaccacaaacggagccccugaaagccucacguauuucacagagcacgccugccaucuucuccccgaggcugccccaggccggagcccagauacgggggcugugacucugggcagggacccggggucuccuggaccuugacagagcagcuaacuccgagagcagugggcagguggccgccccugaggcuucacgccgggagaagccaccuucccaccccuucauaccgccucgugccagcagccucgcacaggcccuagcuuuacgcucaucaccuaaacuuguacuuuauuuuucugauagaaaugguuuccucuggaucguuuuaugcgguucuuacagcacaucaccucuuugcccccgacggcugugacgcagccggagggaggcacuagucaccgacagcggccuugaagacagagcaaagcgcccacccaggucccccgacugccugucuccaugagguacuggucccuuccuuuuguuaacgugaugugccacuauauuuuacacguaucucuugguaugcaucuuuuauagacgcucuuuucuaaguggcgugugcauagcguccugcccugcccccucgggggccugugguggcucccccucugcuucucgggguccagugcauuuuguuucuguauaugauucucugugguuuuuuuugaauccaaaucuguccucuguaguauuuuuuaaauaaaucaguguuuacauu

SEQ ID NO: 27129 - RNA, 5881 nt, Homo sapiens
gguuggugacuuccacaggaaaaguucuggaggaguagccaaagaccaucagcguuuccuuuaugugugagaauugaaaugacuagcauuauugacccuuuucagcauccccugugaauauuucuguuuagguuuuucuucuugaaaagaaauuguuauucagcccguuuaaaacaaaucaagaaacuuuuggguaacauugcaauuacaugaaauugauaaccgcgaaaauaauuggaacuccugcuugcaagugucaaccuaaaaaaagugcuuccuuuuguuauggaagaugucuuucugugauugacuucaauugcugacuuguggagaugcagcgaaugugaaaucccacguauaugccauuucccucuacgcucgcugaccguucuggaagaucuugaacccucuucuggaaagggguaccuauuauuacuuuauggggcagcagccuggaaaaguacuuggggaccaaagaaggccaagcuugccugcccugcauuuuaucaaaggagcagggaagaaggaaucaucgaggcauggggguccacacugcaauguuuuuguggaacaugaagcccuucagcggccaguagcaucugacuuugagccucagggucugagugaagccgcucguuggaacuccaaggaaaaccuucucgcuggacccagugaaaaugaccccaaccuuuucguugcacuguaugauuuuguggccaguggagauaacacucuaagcauaacuaaaggugaaaagcuccgggucuuaggcuauaaucacaauggggaauggugugaagcccaaaccaaaaauggccaaggcugggucccaagcaacuacaucacgccagucaacagucuggagaaacacuccugguaccaugggccugugucccgcaaugccgcugaguaucugcugagcagcgggaucaauggcagcuucuuggugcgugagagugagagcaguccuggccagagguccaucucgcugagauacgaagggaggguguaccauuacaggaucaacacugcuucugauggcaagcucuacgucuccuccgagagccgcuucaacacccuggccgaguugguucaucaucauucaacgguggccgacgggcucaucaccacgcuccauuauccagccccaaagcgcaacaagcccacugucuauggugugucccccaacuacgacaagugggagauggaacgcacggacaucaccaugaagcacaagcugggcgggggccaguacggggagguguacgagggcguguggaagaaauacagccugacgguggccgugaagaccuugaaggaggacaccauggagguggaagaguucuugaaagaagcugcagucaugaaagagaucaaacacccuaaccuggugcagcuccuuggggucugcacccgggagcccccguucuauaucaucacugaguucaugaccuacgggaaccuccuggacuaccugagggagugcaaccggcaggaggugaacgccguggugcugcuguacauggccacucagaucucgucagccauggaguaccuggagaagaaaaacuucauccacagagaucuugcugcccgaaacugccugguaggggagaaccacuuggugaagguagcugauuuuggccugagcagguugaugacaggggacaccuacacagcccaugcuggagccaaguuccccaucaaauggacugcacccgagagccuggccuacaacaaguucuccaucaaguccgacgucugggcauuuggaguauugcuuugggaaauugcuaccuauggcauguccccuuacccgggaauugaccugucccagguguaugagcugcuagagaaggacuaccgcauggagcgcccagaaggcugcccagagaaggucuaugaacucaugcgagcauguuggcaguggaaucccucugaccggcccuccuuugcugaaauccaccaagccuuugaaacaauguuccaggaauccaguaucucagacgaaguggaaaaggagcuggggaaacaaggcguccguggggcugugaguaccuugcugcaggccccagagcugcccaccaagacgaggaccuccaggagagcugcagagcacagagacaccacugacgugccugagaugccucacuccaagggccagggagagagcgauccucuggaccaugagccugccgugucuccauugcucccucgaaaagagcgaggucccccggagggcggccugaaugaagaugagcgccuucuccccaaagacaaaaagaccaacuuguucagcgccuugaucaagaagaagaagaagacagccccaaccccucccaaacgcagcagcuccuuccgggagauggacggccagccggagcgcagaggggccggcgaggaagagggccgagacaucagcaacggggcacuggcuuucacccccuuggacacagcugacccagccaaguccccaaagcccagcaauggggcugggguccccaauggagcccuccgggaguccgggggcucaggcuuccggucuccccaccuguggaagaaguccagcacgcugaccagcagccgccuagccaccggcgaggaggagggcgguggcagcuccagcaagcgcuuccugcgcucuugcuccgccuccugcguuccccauggggccaaggacacggaguggaggucagucacgcugccucgggacuugcaguccacgggaagacaguuugacucguccacauuuggagggcacaaaagugagaagccggcucugccucggaagagggcaggggagaacaggucugaccaggugacccgaggcacaguaacgccuccccccaggcuggugaaaaagaaugaggaagcugcugaugaggucuucaaagacaucauggaguccagcccgggcuccagcccgcccaaccugacuccaaaaccccuccggcggcaggucaccguggccccugccucgggccucccccacaaggaagaagcuggaaagggcagugccuuagggaccccugcugcagcugagccagugacccccaccagcaaagcaggcucaggugcaccagggggcaccagcaagggccccgccgaggaguccagagugaggaggcacaagcacuccucugagucgccagggagggacaaggggaaauuguccaggcucaaaccugccccgccgcccccaccagcagccucugcagggaaggcuggaggaaagcccucgcagagcccgagccaggaggcggccggggaggcaguccugggcgcaaagacaaaagccacgagucugguugaugcugugaacagugacgcugccaagcccagccagccgggagagggccucaaaaagcccgugcucccggccacuccaaagccacaguccgccaagccgucggggacccccaucagcccagcccccguucccuccacguugccaucagcauccucggcccuggcaggggaccagccgucuuccaccgccuucaucccucucauaucaacccgagugucucuucggaaaacccgccagccuccagagcggaucgccagcggcgccaucaccaagggcgugguccuggacagcaccgaggcgcugugccucgccaucucuaggaacuccgagcagauggccagccacagcgcagugcuggaggccggcaaaaaccucuacacguucugcgugagcuauguggauuccauccagcaaaugaggaacaaguuugccuuccgagaggccaucaacaaacuggagaauaaucuccgggagcuucagaucugcccggcgacagcaggcagugguccagcggccacucaggacuucagcaagcuccucaguucggugaaggaaaucagugacauagugcagagguagcagcagucaggggucaggugucaggcccgucggagcugccugcagcacaugcgggcucgcccauacccgugacaguggcugacaagggacuagugagucagcaccuuggcccaggagcucugcgccaggcagagcugagggcccuguggaguccagcucuacuaccuacguuugcaccgccugcccucccgcaccuuccuccuccccgcuccgucucuguccucgaauuuuaucuguggaguuccugcuccguggacugcagucggcaugccaggacccgccagccccgcucccaccuagugccccagacugagcucuccaggccaggugggaacggcugauguggacugucuuuuucauuuuuuucucucuggagccccuccucccccggcugggccuccuucuuccacuucuccaagaauggaagccugaacugaggccuugugugucaggcccucugccugcacucccuggccuugcccgucgugugcugaagacauguuucaagaaccgcauuucgggaagggcaugcacgggcaugcacacggcuggucacucugcccucugcugcugcccgggguggggugcacucgccauuuccucacgugcaggacagcucuugauuuggguggaaaacagggugcuaaagccaaccagccuuuggguccugggcaggugggagcugaaaaggaucgaggcauggggcauguccuuuccaucuguccacauccccagagcccagcucuugcucucuugugacgugcacugugaauccuggcaagaaagcuugagucucaaggguggcaggucacugucacugccgacaucccucccccagcagaauggaggcaggggacaagggaggcaguggcuaguggggugaacagcuggugccaaauagccccagacugggcccaggcaggucugcaagggcccagagugaaccguccuuucacacaucugggugcccugaaagggcccuuccccucccccacuccucuaagacaaaguagauucuuacaaggcccuuuccuuuggaacaagacagccuucacuuuucugaguucuugaagcauuucaaagcccugccucuguguagccgcccugagagagaauagagcugccacugggcaccugcgcacaggugggaggaaagggccuggccaguccugguccuggcugcacucuugaacugggcgaaugucuuauuuaauuaccgugagugacauagccucauguucugugggggucaucagggaggguuaggaaaaccacaaacggagccccugaaagccucacguauuucacagagcacgccugccaucuucuccccgaggcugccccaggccggagcccagauacgggggcugugacucugggcagggacccggggucuccuggaccuugacagagcagcuaacuccgagagcagugggcagguggccgccccugaggcuucacgccgggagaagccaccuucccaccccuucauaccgccucgugccagcagccucgcacaggcccuagcuuuacgcucaucaccuaaacuuguacuuuauuuuucugauagaaaugguuuccucuggaucguuuuaugcgguucuuacagcacaucaccucuuugcccccgacggcugugacgcagccggagggaggcacuagucaccgacagcggccuugaagacagagcaaagcgcccacccaggucccccgacugccugucuccaugagguacuggucccuuccuuuuguuaacgugaugugccacuauauuuuacacguaucucuugguaugcaucuuuuauagacgcucuuuucuaaguggcgugugcauagcguccugcccugcccccucgggggccugugguggcucccccucugcuucucgggguccagugcauuuuguuucuguauaugauucucugugguuuuuuuugaauccaaaucuguccucuguaguauuuuuuaaauaaaucaguguuuacauuagaa

SEQ ID NO: 27130 - RNA, 7177 nt, Homo sapiens
ggggggaggguggcggcucgaugggggagccgccuccagggggcccccccgcccugugcccacggcgcggccccuuuaagaggcccgccuggcuccgucauccgcgccgcggccaccuccccccggcccuccccuuccugcggcgcagagugcgggccgggcgggagugcggcgagagccggcuggcugagcuuagcguccgaggaggcggcggcggcggcggcggcacggcggcggcggggcuguggggcggugcggaagcgagaggcgaggagcgcgcgggccguggccagagucuggcggcggccuggcggagcggagagcagcgcccgcgccucgccgugcggaggagccccgcacacaauagcggcgcgcgcagcccgcgcccuuccccccggcgcgccccgccccgcgcgccgagcgccccgcuccgccucaccugccaccagggagugggcgggcauuguucgccgccgccgccgccgcgcgggccaugggggccgcccggcgcccggggccgggcuggcgaggcgccgcgccgccgcugagacgggccccgcgcgcagcccggcggcgcagguaaggccggccgcgccaugguggacccggugggcuucgcggaggcguggaaggcgcaguucccggacucagagcccccgcgcauggagcugcgcucagugggcgacaucgagcaggagcuggagcgcugcaaggccuccauucggcgccuggagcaggaggugaaccaggagcgcuuccgcaugaucuaccugcagacguugcuggccaaggaaaagaagagcuaugaccggcagcgauggggcuuccggcgcgcggcgcaggcccccgacggcgccuccgagccccgagcguccgcgucgcgcccgcagccagcgcccgccgacggagccgacccgccgcccgccgaggagcccgaggcccggcccgacggcgaggguucuccggguaaggccaggcccgggaccgcccgcaggcccggggcagccgcgucgggggaacgggacgaccggggaccccccgccagcguggcggcgcucagguccaacuucgagcggauccgcaagggccauggccagcccggggcggacgccgagaagcccuucuacgugaacgucgaguuucaccacgagcgcggccuggugaaggucaacgacaaagaggugucggaccgcaucagcucccugggcagccaggccaugcagauggagcgcaaaaagucccagcacggcgcgggcucgagcgugggggaugcauccaggcccccuuaccggggacgcuccucggagagcagcugcggcgucgacggcgacuacgaggacgccgaguugaacccccgcuuccugaaggacaaccugaucgacgccaauggcgguagcaggcccccuuggccgccccuggaguaccagcccuaccagagcaucuacgucgggggcaugauggaaggggagggcaagggcccgcuccugcgcagccagagcaccucugagcaggagaagcgccuuaccuggccccgcagguccuacuccccccggaguuuugaggauugcggaggcggcuauaccccggacugcagcuccaaugagaaccucaccuccagcgaggaggacuucuccucuggccaguccagccgcguguccccaagccccaccaccuaccgcauguuccgggacaaaagccgcucucccucgcagaacucgcaacaguccuucgacagcagcaguccccccacgccgcagugccauaagcggcaccggcacugcccgguugucguguccgaggccaccaucgugggcguccgcaagaccgggcagaucuggcccaacgauggcgagggcgccuuccauggagacgcagaagcccuucagcggccaguagcaucugacuuugagccucagggucugagugaagccgcucguuggaacuccaaggaaaaccuucucgcuggacccagugaaaaugaccccaaccuuuucguugcacuguaugauuuuguggccaguggagauaacacucuaagcauaacuaaaggugaaaagcuccgggucuuaggcuauaaucacaauggggaauggugugaagcccaaaccaaaaauggccaaggcugggucccaagcaacuacaucacgccagucaacagucuggagaaacacuccugguaccaugggccugugucccgcaaugccgcugaguaucugcugagcagcgggaucaauggcagcuucuuggugcgugagagugagagcaguccuggccagagguccaucucgcugagauacgaagggaggguguaccauuacaggaucaacacugcuucugauggcaagcucuacgucuccuccgagagccgcuucaacacccuggccgaguugguucaucaucauucaacgguggccgacgggcucaucaccacgcuccauuauccagccccaaagcgcaacaagcccacugucuauggugugucccccaacuacgacaagugggagauggaacgcacggacaucaccaugaagcacaagcugggcgggggccaguacggggagguguacgagggcguguggaagaaauacagccugacgguggccgugaagaccuugaaggaggacaccauggagguggaagaguucuugaaagaagcugcagucaugaaagagaucaaacacccuaaccuggugcagcuccuuggggucugcacccgggagcccccguucuauaucaucacugaguucaugaccuacgggaaccuccuggacuaccugagggagugcaaccggcaggaggugaacgccguggugcugcuguacauggccacucagaucucgucagccauggaguaccuggagaagaaaaacuucauccacagagaucuugcugcccgaaacugccugguaggggagaaccacuuggugaagguagcugauuuuggccugagcagguugaugacaggggacaccuacacagcccaugcuggagccaaguuccccaucaaauggacugcacccgagagccuggccuacaacaaguucuccaucaaguccgacgucugggcauuuggaguauugcuuugggaaauugcuaccuauggcauguccccuuacccgggaauugaccugucccagguguaugagcugcuagagaaggacuaccgcauggagcgcccagaaggcugcccagagaaggucuaugaacucaugcgagcauguuggcaguggaaucccucugaccggcccuccuuugcugaaauccaccaagccuuugaaacaauguuccaggaauccaguaucucagacgaaguggaaaaggagcuggggaaacaaggcguccguggggcugugaguaccuugcugcaggccccagagcugcccaccaagacgaggaccuccaggagagcugcagagcacagagacaccacugacgugccugagaugccucacuccaagggccagggagagagcgauccucuggaccaugagccugccgugucuccauugcucccucgaaaagagcgaggucccccggagggcggccugaaugaagaugagcgccuucuccccaaagacaaaaagaccaacuuguucagcgccuugaucaagaagaagaagaagacagccccaaccccucccaaacgcagcagcuccuuccgggagauggacggccagccggagcgcagaggggccggcgaggaagagggccgagacaucagcaacggggcacuggcuuucacccccuuggacacagcugacccagccaaguccccaaagcccagcaauggggcugggguccccaauggagcccuccgggaguccgggggcucaggcuuccggucuccccaccuguggaagaaguccagcacgcugaccagcagccgccuagccaccggcgaggaggagggcgguggcagcuccagcaagcgcuuccugcgcucuugcuccgccuccugcguuccccauggggccaaggacacggaguggaggucagucacgcugccucgggacuugcaguccacgggaagacaguuugacucguccacauuuggagggcacaaaagugagaagccggcucugccucggaagagggcaggggagaacaggucugaccaggugacccgaggcacaguaacgccuccccccaggcuggugaaaaagaaugaggaagcugcugaugaggucuucaaagacaucauggaguccagcccgggcuccagcccgcccaaccugacuccaaaaccccuccggcggcaggucaccguggccccugccucgggccucccccacaaggaagaagcuggaaagggcagugccuuagggaccccugcugcagcugagccagugacccccaccagcaaagcaggcucaggugcaccagggggcaccagcaagggccccgccgaggaguccagagugaggaggcacaagcacuccucugagucgccagggagggacaaggggaaauuguccaggcucaaaccugccccgccgcccccaccagcagccucugcagggaaggcuggaggaaagcccucgcagagcccgagccaggaggcggccggggaggcaguccugggcgcaaagacaaaagccacgagucugguugaugcugugaacagugacgcugccaagcccagccagccgggagagggccucaaaaagcccgugcucccggccacuccaaagccacaguccgccaagccgucggggacccccaucagcccagcccccguucccuccacguugccaucagcauccucggcccuggcaggggaccagccgucuuccaccgccuucaucccucucauaucaacccgagugucucuucggaaaacccgccagccuccagagcggaucgccagcggcgccaucaccaagggcgugguccuggacagcaccgaggcgcugugccucgccaucucuaggaacuccgagcagauggccagccacagcgcagugcuggaggccggcaaaaaccucuacacguucugcgugagcuauguggauuccauccagcaaaugaggaacaaguuugccuuccgagaggccaucaacaaacuggagaauaaucuccgggagcuucagaucugcccggcgacagcaggcagugguccagcggccacucaggacuucagcaagcuccucaguucggugaaggaaaucagugacauagugcagagguagcagcagucaggggucaggugucaggcccgucggagcugccugcagcacaugcgggcucgcccauacccgugacaguggcugacaagggacuagugagucagcaccuuggcccaggagcucugcgccaggcagagcugagggcccuguggaguccagcucuacuaccuacguuugcaccgccugcccucccgcaccuuccuccuccccgcuccgucucuguccucgaauuuuaucuguggaguuccugcuccguggacugcagucggcaugccaggacccgccagccccgcucccaccuagugccccagacugagcucuccaggccaggugggaacggcugauguggacugucuuuuucauuuuuuucucucuggagccccuccucccccggcugggccuccuucuuccacuucuccaagaauggaagccugaacugaggccuugugugucaggcccucugccugcacucccuggccuugcccgucgugugcugaagacauguuucaagaaccgcauuucgggaagggcaugcacgggcaugcacacggcuggucacucugcccucugcugcugcccgggguggggugcacucgccauuuccucacgugcaggacagcucuugauuuggguggaaaacagggugcuaaagccaaccagccuuuggguccugggcaggugggagcugaaaaggaucgaggcauggggcauguccuuuccaucuguccacauccccagagcccagcucuugcucucuugugacgugcacugugaauccuggcaagaaagcuugagucucaaggguggcaggucacugucacugccgacaucccucccccagcagaauggaggcaggggacaagggaggcaguggcuaguggggugaacagcuggugccaaauagccccagacugggcccaggcaggucugcaagggcccagagugaaccguccuuucacacaucugggugcccugaaagggcccuuccccucccccacuccucuaagacaaaguagauucuuacaaggcccuuuccuuuggaacaagacagccuucacuuuucugaguucuugaagcauuucaaagcccugccucuguguagccgcccugagagagaauagagcugccacugggcaccugcgcacaggugggaggaaagggccuggccaguccugguccuggcugcacucuugaacugggcgaaugucuuauuuaauuaccgugagugacauagccucauguucugugggggucaucagggaggguuaggaaaaccacaaacggagccccugaaagccucacguauuucacagagcacgccugccaucuucuccccgaggcugccccaggccggagcccagauacgggggcugugacucugggcagggacccggggucuccuggaccuugacagagcagcuaacuccgagagcagugggcagguggccgccccugaggcuucacgccgggagaagccaccuucccaccccuucauaccgccucgugccagcagccucgcacaggcccuagcuuuacgcucaucaccuaaacuuguacuuuauuuuucugauagaaaugguuuccucuggaucguuuuaugcgguucuuacagcacaucaccucuuugcccccgacggcugugacgcagccggagggaggcacuagucaccgacagcggccuugaagacagagcaaagcgcccacccaggucccccgacugccugucuccaugagguacuggucccuuccuuuuguuaacgugaugugccacuauauuuuacacguaucucuugguaugcaucuuuuauagacgcucuuuucuaaguggcgugugcauagcguccugcccugcccccucgggggccugugguggcucccccucugcuucucgggguccagugcauuuuguuucuguauaugauucucugugguuuuuuuugaauccaaaucuguccucuguaguauuuuuuaaauaaaucaguguuuacauu

SEQ ID NO: 27131 - RNA, 8605 nt, Homo sapiens
ggggggaggguggcggcucgaugggggagccgccuccagggggcccccccgcccugugcccacggcgcggccccuuuaagaggcccgccuggcuccgucauccgcgccgcggccaccuccccccggcccuccccuuccugcggcgcagagugcgggccgggcgggagugcggcgagagccggcuggcugagcuuagcguccgaggaggcggcggcggcggcggcggcacggcggcggcggggcuguggggcggugcggaagcgagaggcgaggagcgcgcgggccguggccagagucuggcggcggccuggcggagcggagagcagcgcccgcgccucgccgugcggaggagccccgcacacaauagcggcgcgcgcagcccgcgcccuuccccccggcgcgccccgccccgcgcgccgagcgccccgcuccgccucaccugccaccagggagugggcgggcauuguucgccgccgccgccgccgcgcgggccaugggggccgcccggcgcccggggccgggcuggcgaggcgccgcgccgccgcugagacgggccccgcgcgcagcccggcggcgcagguaaggccggccgcgccaugguggacccggugggcuucgcggaggcguggaaggcgcaguucccggacucagagcccccgcgcauggagcugcgcucagugggcgacaucgagcaggagcuggagcgcugcaaggccuccauucggcgccuggagcaggaggugaaccaggagcgcuuccgcaugaucuaccugcagacguugcuggccaaggaaaagaagagcuaugaccggcagcgauggggcuuccggcgcgcggcgcaggcccccgacggcgccuccgagccccgagcguccgcgucgcgcccgcagccagcgcccgccgacggagccgacccgccgcccgccgaggagcccgaggcccggcccgacggcgaggguucuccggguaaggccaggcccgggaccgcccgcaggcccggggcagccgcgucgggggaacgggacgaccggggaccccccgccagcguggcggcgcucagguccaacuucgagcggauccgcaagggccauggccagcccggggcggacgccgagaagcccuucuacgugaacgucgaguuucaccacgagcgcggccuggugaaggucaacgacaaagaggugucggaccgcaucagcucccugggcagccaggccaugcagauggagcgcaaaaagucccagcacggcgcgggcucgagcgugggggaugcauccaggcccccuuaccggggacgcuccucggagagcagcugcggcgucgacggcgacuacgaggacgccgaguugaacccccgcuuccugaaggacaaccugaucgacgccaauggcgguagcaggcccccuuggccgccccuggaguaccagcccuaccagagcaucuacgucgggggcaugauggaaggggagggcaagggcccgcuccugcgcagccagagcaccucugagcaggagaagcgccuuaccuggccccgcagguccuacuccccccggaguuuugaggauugcggaggcggcuauaccccggacugcagcuccaaugagaaccucaccuccagcgaggaggacuucuccucuggccaguccagccgcguguccccaagccccaccaccuaccgcauguuccgggacaaaagccgcucucccucgcagaacucgcaacaguccuucgacagcagcaguccccccacgccgcagugccauaagcggcaccggcacugcccgguugucguguccgaggccaccaucgugggcguccgcaagaccgggcagaucuggcccaacgauggcgagggcgccuuccauggagacgcagauggcucguucggaacaccaccuggauacggcugcgcugcagaccgggcagaggagcagcgccggcaccaagaugggcugcccuacauugaugacucgcccuccucaucgccccaccucagcagcaagggcaggggcagccgggaugcgcuggucucgggagcccuggaguccacuaaagcgagugagcuggacuuggaaaagggcuuggagaugagaaaauggguccugucgggaauccuggcuagcgaggagacuuaccugagccaccuggaggcacugcugcugcccaugaagccuuugaaagccgcugccaccaccucucagccggugcugacgagucagcagaucgagaccaucuucuucaaagugccugagcucuacgagauccacaaggaguucuaugaugggcucuucccccgcgugcagcaguggagccaccagcagcgggugggcgaccucuuccagaagcuggccagccagcuggguguguaccgggccuucguggacaacuacggaguugccauggaaauggcugagaagugcugucaggccaaugcucaguuugcagaaaucuccgagaaccugagagccagaagcaacaaagaugccaaggauccaacgaccaagaacucucuggaaacucugcucuacaagccuguggaccgugugacgaggagcacgcugguccuccaugacuugcugaagcacacuccugccagccacccugaccaccccuugcugcaggacgcccuccgcaucucacagaacuuccuguccagcaucaaugaggagaucacaccccgacggcaguccaugacggugaagaagggagagcaccggcagcugcugaaggacagcuucaugguggagcugguggagggggcccgcaagcugcgccacgucuuccuguucaccgaccugcuucucugcaccaagcucaagaagcagagcggaggcaaaacgcagcaguaugacugcaaaugguacauuccgcucacggaucucagcuuccagaugguggaugaacuggaggcagugcccaacaucccccuggugcccgaugaggagcuggacgcuuugaagaucaagaucucccagaucaagaaugacauccagagagagaagagggcgaacaagggcagcaaggcuacggagaggcugaagaagaagcugucggagcaggagucacugcugcugcuuaugucucccagcauggccuucagggugcacagccgcaacggcaagaguuacacguuccugaucuccucugacuaugagcgugcagaguggagggagaacauccgggagcagcagaagaaguguuucagaagcuucucccugacauccguggagcugcagaugcugaccaacucgugugugaaacuccagacuguccacagcauuccgcugaccaucaauaaggaagaagcccuucagcggccaguagcaucugacuuugagccucagggucugagugaagccgcucguuggaacuccaaggaaaaccuucucgcuggacccagugaaaaugaccccaaccuuuucguugcacuguaugauuuuguggccaguggagauaacacucuaagcauaacuaaaggugaaaagcuccgggucuuaggcuauaaucacaauggggaauggugugaagcccaaaccaaaaauggccaaggcugggucccaagcaacuacaucacgccagucaacagucuggagaaacacuccugguaccaugggccugugucccgcaaugccgcugaguaucugcugagcagcgggaucaauggcagcuucuuggugcgugagagugagagcaguccuggccagagguccaucucgcugagauacgaagggaggguguaccauuacaggaucaacacugcuucugauggcaagcucuacgucuccuccgagagccgcuucaacacccuggccgaguugguucaucaucauucaacgguggccgacgggcucaucaccacgcuccauuauccagccccaaagcgcaacaagcccacugucuauggugugucccccaacuacgacaagugggagauggaacgcacggacaucaccaugaagcacaagcugggcgggggccaguacggggagguguacgagggcguguggaagaaauacagccugacgguggccgugaagaccuugaaggaggacaccauggagguggaagaguucuugaaagaagcugcagucaugaaagagaucaaacacccuaaccuggugcagcuccuuggggucugcacccgggagcccccguucuauaucaucacugaguucaugaccuacgggaaccuccuggacuaccugagggagugcaaccggcaggaggugaacgccguggugcugcuguacauggccacucagaucucgucagccauggaguaccuggagaagaaaaacuucauccacagagaucuugcugcccgaaacugccugguaggggagaaccacuuggugaagguagcugauuuuggccugagcagguugaugacaggggacaccuacacagcccaugcuggagccaaguuccccaucaaauggacugcacccgagagccuggccuacaacaaguucuccaucaaguccgacgucugggcauuuggaguauugcuuugggaaauugcuaccuauggcauguccccuuacccgggaauugaccugucccagguguaugagcugcuagagaaggacuaccgcauggagcgcccagaaggcugcccagagaaggucuaugaacucaugcgagcauguuggcaguggaaucccucugaccggcccuccuuugcugaaauccaccaagccuuugaaacaauguuccaggaauccaguaucucagacgaaguggaaaaggagcuggggaaacaaggcguccguggggcugugaguaccuugcugcaggccccagagcugcccaccaagacgaggaccuccaggagagcugcagagcacagagacaccacugacgugccugagaugccucacuccaagggccagggagagagcgauccucuggaccaugagccugccgugucuccauugcucccucgaaaagagcgaggucccccggagggcggccugaaugaagaugagcgccuucuccccaaagacaaaaagaccaacuuguucagcgccuugaucaagaagaagaagaagacagccccaaccccucccaaacgcagcagcuccuuccgggagauggacggccagccggagcgcagaggggccggcgaggaagagggccgagacaucagcaacggggcacuggcuuucacccccuuggacacagcugacccagccaaguccccaaagcccagcaauggggcugggguccccaauggagcccuccgggaguccgggggcucaggcuuccggucuccccaccuguggaagaaguccagcacgcugaccagcagccgccuagccaccggcgaggaggagggcgguggcagcuccagcaagcgcuuccugcgcucuugcuccgccuccugcguuccccauggggccaaggacacggaguggaggucagucacgcugccucgggacuugcaguccacgggaagacaguuugacucguccacauuuggagggcacaaaagugagaagccggcucugccucggaagagggcaggggagaacaggucugaccaggugacccgaggcacaguaacgccuccccccaggcuggugaaaaagaaugaggaagcugcugaugaggucuucaaagacaucauggaguccagcccgggcuccagcccgcccaaccugacuccaaaaccccuccggcggcaggucaccguggccccugccucgggccucccccacaaggaagaagcuggaaagggcagugccuuagggaccccugcugcagcugagccagugacccccaccagcaaagcaggcucaggugcaccagggggcaccagcaagggccccgccgaggaguccagagugaggaggcacaagcacuccucugagucgccagggagggacaaggggaaauuguccaggcucaaaccugccccgccgcccccaccagcagccucugcagggaaggcuggaggaaagcccucgcagagcccgagccaggaggcggccggggaggcaguccugggcgcaaagacaaaagccacgagucugguugaugcugugaacagugacgcugccaagcccagccagccgggagagggccucaaaaagcccgugcucccggccacuccaaagccacaguccgccaagccgucggggacccccaucagcccagcccccguucccuccacguugccaucagcauccucggcccuggcaggggaccagccgucuuccaccgccuucaucccucucauaucaacccgagugucucuucggaaaacccgccagccuccagagcggaucgccagcggcgccaucaccaagggcgugguccuggacagcaccgaggcgcugugccucgccaucucuaggaacuccgagcagauggccagccacagcgcagugcuggaggccggcaaaaaccucuacacguucugcgugagcuauguggauuccauccagcaaaugaggaacaaguuugccuuccgagaggccaucaacaaacuggagaauaaucuccgggagcuucagaucugcccggcgacagcaggcagugguccagcggccacucaggacuucagcaagcuccucaguucggugaaggaaaucagugacauagugcagagguagcagcagucaggggucaggugucaggcccgucggagcugccugcagcacaugcgggcucgcccauacccgugacaguggcugacaagggacuagugagucagcaccuuggcccaggagcucugcgccaggcagagcugagggcccuguggaguccagcucuacuaccuacguuugcaccgccugcccucccgcaccuuccuccuccccgcuccgucucuguccucgaauuuuaucuguggaguuccugcuccguggacugcagucggcaugccaggacccgccagccccgcucccaccuagugccccagacugagcucuccaggccaggugggaacggcugauguggacugucuuuuucauuuuuuucucucuggagccccuccucccccggcugggccuccuucuuccacuucuccaagaauggaagccugaacugaggccuugugugucaggcccucugccugcacucccuggccuugcccgucgugugcugaagacauguuucaagaaccgcauuucgggaagggcaugcacgggcaugcacacggcuggucacucugcccucugcugcugcccgggguggggugcacucgccauuuccucacgugcaggacagcucuugauuuggguggaaaacagggugcuaaagccaaccagccuuuggguccugggcaggugggagcugaaaaggaucgaggcauggggcauguccuuuccaucuguccacauccccagagcccagcucuugcucucuugugacgugcacugugaauccuggcaagaaagcuugagucucaaggguggcaggucacugucacugccgacaucccucccccagcagaauggaggcaggggacaagggaggcaguggcuaguggggugaacagcuggugccaaauagccccagacugggcccaggcaggucugcaagggcccagagugaaccguccuuucacacaucugggugcccugaaagggcccuuccccucccccacuccucuaagacaaaguagauucuuacaaggcccuuuccuuuggaacaagacagccuucacuuuucugaguucuugaagcauuucaaagcccugccucuguguagccgcccugagagagaauagagcugccacugggcaccugcgcacaggugggaggaaagggccuggccaguccugguccuggcugcacucuugaacugggcgaaugucuuauuuaauuaccgugagugacauagccucauguucugugggggucaucagggaggguuaggaaaaccacaaacggagccccugaaagccucacguauuucacagagcacgccugccaucuucuccccgaggcugccccaggccggagcccagauacgggggcugugacucugggcagggacccggggucuccuggaccuugacagagcagcuaacuccgagagcagugggcagguggccgccccugaggcuucacgccgggagaagccaccuucccaccccuucauaccgccucgugccagcagccucgcacaggcccuagcuuuacgcucaucaccuaaacuuguacuuuauuuuucugauagaaaugguuuccucuggaucguuuuaugcgguucuuacagcacaucaccucuuugcccccgacggcugugacgcagccggagggaggcacuagucaccgacagcggccuugaagacagagcaaagcgcccacccaggucccccgacugccugucuccaugagguacuggucccuuccuuuuguuaacgugaugugccacuauauuuuacacguaucucuugguaugcaucuuuuauagacgcucuuuucuaaguggcgugugcauagcguccugcccugcccccucgggggccugugguggcucccccucugcuucucgggguccagugcauuuuguuucuguauaugauucucugugguuuuuuuugaauccaaaucuguccucuguaguauuuuuuaaauaaaucaguguuuacauu

SEQ ID NO: 27132 - RNA, 8680 nt, Homo sapiens
ggggggaggguggcggcucgaugggggagccgccuccagggggcccccccgcccugugcccacggcgcggccccuuuaagaggcccgccuggcuccgucauccgcgccgcggccaccuccccccggcccuccccuuccugcggcgcagagugcgggccgggcgggagugcggcgagagccggcuggcugagcuuagcguccgaggaggcggcggcggcggcggcggcacggcggcggcggggcuguggggcggugcggaagcgagaggcgaggagcgcgcgggccguggccagagucuggcggcggccuggcggagcggagagcagcgcccgcgccucgccgugcggaggagccccgcacacaauagcggcgcgcgcagcccgcgcccuuccccccggcgcgccccgccccgcgcgccgagcgccccgcuccgccucaccugccaccagggagugggcgggcauuguucgccgccgccgccgccgcgcgggccaugggggccgcccggcgcccggggccgggcuggcgaggcgccgcgccgccgcugagacgggccccgcgcgcagcccggcggcgcagguaaggccggccgcgccaugguggacccggugggcuucgcggaggcguggaaggcgcaguucccggacucagagcccccgcgcauggagcugcgcucagugggcgacaucgagcaggagcuggagcgcugcaaggccuccauucggcgccuggagcaggaggugaaccaggagcgcuuccgcaugaucuaccugcagacguugcuggccaaggaaaagaagagcuaugaccggcagcgauggggcuuccggcgcgcggcgcaggcccccgacggcgccuccgagccccgagcguccgcgucgcgcccgcagccagcgcccgccgacggagccgacccgccgcccgccgaggagcccgaggcccggcccgacggcgaggguucuccggguaaggccaggcccgggaccgcccgcaggcccggggcagccgcgucgggggaacgggacgaccggggaccccccgccagcguggcggcgcucagguccaacuucgagcggauccgcaagggccauggccagcccggggcggacgccgagaagcccuucuacgugaacgucgaguuucaccacgagcgcggccuggugaaggucaacgacaaagaggugucggaccgcaucagcucccugggcagccaggccaugcagauggagcgcaaaaagucccagcacggcgcgggcucgagcgugggggaugcauccaggcccccuuaccggggacgcuccucggagagcagcugcggcgucgacggcgacuacgaggacgccgaguugaacccccgcuuccugaaggacaaccugaucgacgccaauggcgguagcaggcccccuuggccgccccuggaguaccagcccuaccagagcaucuacgucgggggcaugauggaaggggagggcaagggcccgcuccugcgcagccagagcaccucugagcaggagaagcgccuuaccuggccccgcagguccuacuccccccggaguuuugaggauugcggaggcggcuauaccccggacugcagcuccaaugagaaccucaccuccagcgaggaggacuucuccucuggccaguccagccgcguguccccaagccccaccaccuaccgcauguuccgggacaaaagccgcucucccucgcagaacucgcaacaguccuucgacagcagcaguccccccacgccgcagugccauaagcggcaccggcacugcccgguugucguguccgaggccaccaucgugggcguccgcaagaccgggcagaucuggcccaacgauggcgagggcgccuuccauggagacgcagauggcucguucggaacaccaccuggauacggcugcgcugcagaccgggcagaggagcagcgccggcaccaagaugggcugcccuacauugaugacucgcccuccucaucgccccaccucagcagcaagggcaggggcagccgggaugcgcuggucucgggagcccuggaguccacuaaagcgagugagcuggacuuggaaaagggcuuggagaugagaaaauggguccugucgggaauccuggcuagcgaggagacuuaccugagccaccuggaggcacugcugcugcccaugaagccuuugaaagccgcugccaccaccucucagccggugcugacgagucagcagaucgagaccaucuucuucaaagugccugagcucuacgagauccacaaggaguucuaugaugggcucuucccccgcgugcagcaguggagccaccagcagcgggugggcgaccucuuccagaagcuggccagccagcuggguguguaccgggccuucguggacaacuacggaguugccauggaaauggcugagaagugcugucaggccaaugcucaguuugcagaaaucuccgagaaccugagagccagaagcaacaaagaugccaaggauccaacgaccaagaacucucuggaaacucugcucuacaagccuguggaccgugugacgaggagcacgcugguccuccaugacuugcugaagcacacuccugccagccacccugaccaccccuugcugcaggacgcccuccgcaucucacagaacuuccuguccagcaucaaugaggagaucacaccccgacggcaguccaugacggugaagaagggagagcaccggcagcugcugaaggacagcuucaugguggagcugguggagggggcccgcaagcugcgccacgucuuccuguucaccgaccugcuucucugcaccaagcucaagaagcagagcggaggcaaaacgcagcaguaugacugcaaaugguacauuccgcucacggaucucagcuuccagaugguggaugaacuggaggcagugcccaacaucccccuggugcccgaugaggagcuggacgcuuugaagaucaagaucucccagaucaagaaugacauccagagagagaagagggcgaacaagggcagcaaggcuacggagaggcugaagaagaagcugucggagcaggagucacugcugcugcuuaugucucccagcauggccuucagggugcacagccgcaacggcaagaguuacacguuccugaucuccucugacuaugagcgugcagaguggagggagaacauccgggagcagcagaagaaguguuucagaagcuucucccugacauccguggagcugcagaugcugaccaacucgugugugaaacuccagacuguccacagcauuccgcugaccaucaauaaggaagaugaugagucuccggggcucuauggguuucugaaugucaucguccacucagccacuggauuuaagcagaguucaaaagcccuucagcggccaguagcaucugacuuugagccucagggucugagugaagccgcucguuggaacuccaaggaaaaccuucucgcuggacccagugaaaaugaccccaaccuuuucguugcacuguaugauuuuguggccaguggagauaacacucuaagcauaacuaaaggugaaaagcuccgggucuuaggcuauaaucacaauggggaauggugugaagcccaaaccaaaaauggccaaggcugggucccaagcaacuacaucacgccagucaacagucuggagaaacacuccugguaccaugggccugugucccgcaaugccgcugaguaucugcugagcagcgggaucaauggcagcuucuuggugcgugagagugagagcaguccuggccagagguccaucucgcugagauacgaagggaggguguaccauuacaggaucaacacugcuucugauggcaagcucuacgucuccuccgagagccgcuucaacacccuggccgaguugguucaucaucauucaacgguggccgacgggcucaucaccacgcuccauuauccagccccaaagcgcaacaagcccacugucuauggugugucccccaacuacgacaagugggagauggaacgcacggacaucaccaugaagcacaagcugggcgggggccaguacggggagguguacgagggcguguggaagaaauacagccugacgguggccgugaagaccuugaaggaggacaccauggagguggaagaguucuugaaagaagcugcagucaugaaagagaucaaacacccuaaccuggugcagcuccuuggggucugcacccgggagcccccguucuauaucaucacugaguucaugaccuacgggaaccuccuggacuaccugagggagugcaaccggcaggaggugaacgccguggugcugcuguacauggccacucagaucucgucagccauggaguaccuggagaagaaaaacuucauccacagagaucuugcugcccgaaacugccugguaggggagaaccacuuggugaagguagcugauuuuggccugagcagguugaugacaggggacaccuacacagcccaugcuggagccaaguuccccaucaaauggacugcacccgagagccuggccuacaacaaguucuccaucaaguccgacgucugggcauuuggaguauugcuuugggaaauugcuaccuauggcauguccccuuacccgggaauugaccugucccagguguaugagcugcuagagaaggacuaccgcauggagcgcccagaaggcugcccagagaaggucuaugaacucaugcgagcauguuggcaguggaaucccucugaccggcccuccuuugcugaaauccaccaagccuuugaaacaauguuccaggaauccaguaucucagacgaaguggaaaaggagcuggggaaacaaggcguccguggggcugugaguaccuugcugcaggccccagagcugcccaccaagacgaggaccuccaggagagcugcagagcacagagacaccacugacgugccugagaugccucacuccaagggccagggagagagcgauccucuggaccaugagccugccgugucuccauugcucccucgaaaagagcgaggucccccggagggcggccugaaugaagaugagcgccuucuccccaaagacaaaaagaccaacuuguucagcgccuugaucaagaagaagaagaagacagccccaaccccucccaaacgcagcagcuccuuccgggagauggacggccagccggagcgcagaggggccggcgaggaagagggccgagacaucagcaacggggcacuggcuuucacccccuuggacacagcugacccagccaaguccccaaagcccagcaauggggcugggguccccaauggagcccuccgggaguccgggggcucaggcuuccggucuccccaccuguggaagaaguccagcacgcugaccagcagccgccuagccaccggcgaggaggagggcgguggcagcuccagcaagcgcuuccugcgcucuugcuccgccuccugcguuccccauggggccaaggacacggaguggaggucagucacgcugccucgggacuugcaguccacgggaagacaguuugacucguccacauuuggagggcacaaaagugagaagccggcucugccucggaagagggcaggggagaacaggucugaccaggugacccgaggcacaguaacgccuccccccaggcuggugaaaaagaaugaggaagcugcugaugaggucuucaaagacaucauggaguccagcccgggcuccagcccgcccaaccugacuccaaaaccccuccggcggcaggucaccguggccccugccucgggccucccccacaaggaagaagcuggaaagggcagugccuuagggaccccugcugcagcugagccagugacccccaccagcaaagcaggcucaggugcaccagggggcaccagcaagggccccgccgaggaguccagagugaggaggcacaagcacuccucugagucgccagggagggacaaggggaaauuguccaggcucaaaccugccccgccgcccccaccagcagccucugcagggaaggcuggaggaaagcccucgcagagcccgagccaggaggcggccggggaggcaguccugggcgcaaagacaaaagccacgagucugguugaugcugugaacagugacgcugccaagcccagccagccgggagagggccucaaaaagcccgugcucccggccacuccaaagccacaguccgccaagccgucggggacccccaucagcccagcccccguucccuccacguugccaucagcauccucggcccuggcaggggaccagccgucuuccaccgccuucaucccucucauaucaacccgagugucucuucggaaaacccgccagccuccagagcggaucgccagcggcgccaucaccaagggcgugguccuggacagcaccgaggcgcugugccucgccaucucuaggaacuccgagcagauggccagccacagcgcagugcuggaggccggcaaaaaccucuacacguucugcgugagcuauguggauuccauccagcaaaugaggaacaaguuugccuuccgagaggccaucaacaaacuggagaauaaucuccgggagcuucagaucugcccggcgacagcaggcagugguccagcggccacucaggacuucagcaagcuccucaguucggugaaggaaaucagugacauagugcagagguagcagcagucaggggucaggugucaggcccgucggagcugccugcagcacaugcgggcucgcccauacccgugacaguggcugacaagggacuagugagucagcaccuuggcccaggagcucugcgccaggcagagcugagggcccuguggaguccagcucuacuaccuacguuugcaccgccugcccucccgcaccuuccuccuccccgcuccgucucuguccucgaauuuuaucuguggaguuccugcuccguggacugcagucggcaugccaggacccgccagccccgcucccaccuagugccccagacugagcucuccaggccaggugggaacggcugauguggacugucuuuuucauuuuuuucucucuggagccccuccucccccggcugggccuccuucuuccacuucuccaagaauggaagccugaacugaggccuugugugucaggcccucugccugcacucccuggccuugcccgucgugugcugaagacauguuucaagaaccgcauuucgggaagggcaugcacgggcaugcacacggcuggucacucugcccucugcugcugcccgggguggggugcacucgccauuuccucacgugcaggacagcucuugauuuggguggaaaacagggugcuaaagccaaccagccuuuggguccugggcaggugggagcugaaaaggaucgaggcauggggcauguccuuuccaucuguccacauccccagagcccagcucuugcucucuugugacgugcacugugaauccuggcaagaaagcuugagucucaaggguggcaggucacugucacugccgacaucccucccccagcagaauggaggcaggggacaagggaggcaguggcuaguggggugaacagcuggugccaaauagccccagacugggcccaggcaggucugcaagggcccagagugaaccguccuuucacacaucugggugcccugaaagggcccuuccccucccccacuccucuaagacaaaguagauucuuacaaggcccuuuccuuuggaacaagacagccuucacuuuucugaguucuugaagcauuucaaagcccugccucuguguagccgcccugagagagaauagagcugccacugggcaccugcgcacaggugggaggaaagggccuggccaguccugguccuggcugcacucuugaacugggcgaaugucuuauuuaauuaccgugagugacauagccucauguucugugggggucaucagggaggguuaggaaaaccacaaacggagccccugaaagccucacguauuucacagagcacgccugccaucuucuccccgaggcugccccaggccggagcccagauacgggggcugugacucugggcagggacccggggucuccuggaccuugacagagcagcuaacuccgagagcagugggcagguggccgccccugaggcuucacgccgggagaagccaccuucccaccccuucauaccgccucgugccagcagccucgcacaggcccuagcuuuacgcucaucaccuaaacuuguacuuuauuuuucugauagaaaugguuuccucuggaucguuuuaugcgguucuuacagcacaucaccucuuugcccccgacggcugugacgcagccggagggaggcacuagucaccgacagcggccuugaagacagagcaaagcgcccacccaggucccccgacugccugucuccaugagguacuggucccuuccuuuuguuaacgugaugugccacuauauuuuacacguaucucuugguaugcaucuuuuauagacgcucuuuucuaaguggcgugugcauagcguccugcccugcccccucgggggccugugguggcucccccucugcuucucgggguccagugcauuuuguuucuguauaugauucucugugguuuuuuuugaauccaaaucuguccucuguaguauuuuuuaaauaaaucaguguuuacauu

SEQ ID NO: 27133 - RNA, 9220 nt, Homo sapiens
ggggggaggguggcggcucgaugggggagccgccuccagggggcccccccgcccugugcccacggcgcggccccuuuaagaggcccgccuggcuccgucauccgcgccgcggccaccuccccccggcccuccccuuccugcggcgcagagugcgggccgggcgggagugcggcgagagccggcuggcugagcuuagcguccgaggaggcggcggcggcggcggcggcacggcggcggcggggcuguggggcggugcggaagcgagaggcgaggagcgcgcgggccguggccagagucuggcggcggccuggcggagcggagagcagcgcccgcgccucgccgugcggaggagccccgcacacaauagcggcgcgcgcagcccgcgcccuuccccccggcgcgccccgccccgcgcgccgagcgccccgcuccgccucaccugccaccagggagugggcgggcauuguucgccgccgccgccgccgcgcgggccaugggggccgcccggcgcccggggccgggcuggcgaggcgccgcgccgccgcugagacgggccccgcgcgcagcccggcggcgcagguaaggccggccgcgccaugguggacccggugggcuucgcggaggcguggaaggcgcaguucccggacucagagcccccgcgcauggagcugcgcucagugggcgacaucgagcaggagcuggagcgcugcaaggccuccauucggcgccuggagcaggaggugaaccaggagcgcuuccgcaugaucuaccugcagacguugcuggccaaggaaaagaagagcuaugaccggcagcgauggggcuuccggcgcgcggcgcaggcccccgacggcgccuccgagccccgagcguccgcgucgcgcccgcagccagcgcccgccgacggagccgacccgccgcccgccgaggagcccgaggcccggcccgacggcgaggguucuccggguaaggccaggcccgggaccgcccgcaggcccggggcagccgcgucgggggaacgggacgaccggggaccccccgccagcguggcggcgcucagguccaacuucgagcggauccgcaagggccauggccagcccggggcggacgccgagaagcccuucuacgugaacgucgaguuucaccacgagcgcggccuggugaaggucaacgacaaagaggugucggaccgcaucagcucccugggcagccaggccaugcagauggagcgcaaaaagucccagcacggcgcgggcucgagcgugggggaugcauccaggcccccuuaccggggacgcuccucggagagcagcugcggcgucgacggcgacuacgaggacgccgaguugaacccccgcuuccugaaggacaaccugaucgacgccaauggcgguagcaggcccccuuggccgccccuggaguaccagcccuaccagagcaucuacgucgggggcaugauggaaggggagggcaagggcccgcuccugcgcagccagagcaccucugagcaggagaagcgccuuaccuggccccgcagguccuacuccccccggaguuuugaggauugcggaggcggcuauaccccggacugcagcuccaaugagaaccucaccuccagcgaggaggacuucuccucuggccaguccagccgcguguccccaagccccaccaccuaccgcauguuccgggacaaaagccgcucucccucgcagaacucgcaacaguccuucgacagcagcaguccccccacgccgcagugccauaagcggcaccggcacugcccgguugucguguccgaggccaccaucgugggcguccgcaagaccgggcagaucuggcccaacgauggcgagggcgccuuccauggagacgcagauggcucguucggaacaccaccuggauacggcugcgcugcagaccgggcagaggagcagcgccggcaccaagaugggcugcccuacauugaugacucgcccuccucaucgccccaccucagcagcaagggcaggggcagccgggaugcgcuggucucgggagcccuggaguccacuaaagcgagugagcuggacuuggaaaagggcuuggagaugagaaaauggguccugucgggaauccuggcuagcgaggagacuuaccugagccaccuggaggcacugcugcugcccaugaagccuuugaaagccgcugccaccaccucucagccggugcugacgagucagcagaucgagaccaucuucuucaaagugccugagcucuacgagauccacaaggaguucuaugaugggcucuucccccgcgugcagcaguggagccaccagcagcgggugggcgaccucuuccagaagcuggccagccagcuggguguguaccgggccuucguggacaacuacggaguugccauggaaauggcugagaagugcugucaggccaaugcucaguuugcagaaaucuccgagaaccugagagccagaagcaacaaagaugccaaggauccaacgaccaagaacucucuggaaacucugcucuacaagccuguggaccgugugacgaggagcacgcugguccuccaugacuugcugaagcacacuccugccagccacccugaccaccccuugcugcaggacgcccuccgcaucucacagaacuuccuguccagcaucaaugaggagaucacaccccgacggcaguccaugacggugaagaagggagagcaccggcagcugcugaaggacagcuucaugguggagcugguggagggggcccgcaagcugcgccacgucuuccuguucaccgaccugcuucucugcaccaagcucaagaagcagagcggaggcaaaacgcagcaguaugacugcaaaugguacauuccgcucacggaucucagcuuccagaugguggaugaacuggaggcagugcccaacaucccccuggugcccgaugaggagcuggacgcuuugaagaucaagaucucccagaucaagaaugacauccagagagagaagagggcgaacaagggcagcaaggcuacggagaggcugaagaagaagcugucggagcaggagucacugcugcugcuuaugucucccagcauggccuucagggugcacagccgcaacggcaagaguuacacguuccugaucuccucugacuaugagcgugcagaguggagggagaacauccgggagcagcagaagaaguguuucagaagcuucucccugacauccguggagcugcagaugcugaccaacucgugugugaaacuccagacuguccacagcauuccgcugaccaucaauaaggaagaugaugagucuccggggcucuauggguuucugaaugucaucguccacucagccacuggauuuaagcagaguucaaaucuguacugcacccuggagguggauuccuuuggguauuuugugaauaaagcaaagacgcgcgucuacagggacacagcugagccaaacuggaacgaggaauuugagauagagcuggagggcucccagacccugaggauacugugcuaugaaaaguguuacaacaagacgaagauccccaaggaggacggcgagagcacggacagacucauggggaagggccagguccagcuggacccgcaggcccugcaggacagagacuggcagcgcaccgucaucgccaugaaugggaucgaaguaaagcucucggucaaguucaacagcagggaguucagcuugaagaggaugccgucccgaaaacagacaggggucuucggagucaagauugcuguggucaccaagagagagagguccaaggugcccuacaucgugcgccagugcguggaggagaucgagcgccgaggcauggaggaggugggcaucuaccgcguguccgguguggccacggacauccaggcacugaaggcagccuucgacgucaaagcccuucagcggccaguagcaucugacuuugagccucagggucugagugaagccgcucguuggaacuccaaggaaaaccuucucgcuggacccagugaaaaugaccccaaccuuuucguugcacuguaugauuuuguggccaguggagauaacacucuaagcauaacuaaaggugaaaagcuccgggucuuaggcuauaaucacaauggggaauggugugaagcccaaaccaaaaauggccaaggcugggucccaagcaacuacaucacgccagucaacagucuggagaaacacuccugguaccaugggccugugucccgcaaugccgcugaguaucugcugagcagcgggaucaauggcagcuucuuggugcgugagagugagagcaguccuggccagagguccaucucgcugagauacgaagggaggguguaccauuacaggaucaacacugcuucugauggcaagcucuacgucuccuccgagagccgcuucaacacccuggccgaguugguucaucaucauucaacgguggccgacgggcucaucaccacgcuccauuauccagccccaaagcgcaacaagcccacugucuauggugugucccccaacuacgacaagugggagauggaacgcacggacaucaccaugaagcacaagcugggcgggggccaguacggggagguguacgagggcguguggaagaaauacagccugacgguggccgugaagaccuugaaggaggacaccauggagguggaagaguucuugaaagaagcugcagucaugaaagagaucaaacacccuaaccuggugcagcuccuuggggucugcacccgggagcccccguucuauaucaucacugaguucaugaccuacgggaaccuccuggacuaccugagggagugcaaccggcaggaggugaacgccguggugcugcuguacauggccacucagaucucgucagccauggaguaccuggagaagaaaaacuucauccacagagaucuugcugcccgaaacugccugguaggggagaaccacuuggugaagguagcugauuuuggccugagcagguugaugacaggggacaccuacacagcccaugcuggagccaaguuccccaucaaauggacugcacccgagagccuggccuacaacaaguucuccaucaaguccgacgucugggcauuuggaguauugcuuugggaaauugcuaccuauggcauguccccuuacccgggaauugaccugucccagguguaugagcugcuagagaaggacuaccgcauggagcgcccagaaggcugcccagagaaggucuaugaacucaugcgagcauguuggcaguggaaucccucugaccggcccuccuuugcugaaauccaccaagccuuugaaacaauguuccaggaauccaguaucucagacgaaguggaaaaggagcuggggaaacaaggcguccguggggcugugaguaccuugcugcaggccccagagcugcccaccaagacgaggaccuccaggagagcugcagagcacagagacaccacugacgugccugagaugccucacuccaagggccagggagagagcgauccucuggaccaugagccugccgugucuccauugcucccucgaaaagagcgaggucccccggagggcggccugaaugaagaugagcgccuucuccccaaagacaaaaagaccaacuuguucagcgccuugaucaagaagaagaagaagacagccccaaccccucccaaacgcagcagcuccuuccgggagauggacggccagccggagcgcagaggggccggcgaggaagagggccgagacaucagcaacggggcacuggcuuucacccccuuggacacagcugacccagccaaguccccaaagcccagcaauggggcugggguccccaauggagcccuccgggaguccgggggcucaggcuuccggucuccccaccuguggaagaaguccagcacgcugaccagcagccgccuagccaccggcgaggaggagggcgguggcagcuccagcaagcgcuuccugcgcucuugcuccgccuccugcguuccccauggggccaaggacacggaguggaggucagucacgcugccucgggacuugcaguccacgggaagacaguuugacucguccacauuuggagggcacaaaagugagaagccggcucugccucggaagagggcaggggagaacaggucugaccaggugacccgaggcacaguaacgccuccccccaggcuggugaaaaagaaugaggaagcugcugaugaggucuucaaagacaucauggaguccagcccgggcuccagcccgcccaaccugacuccaaaaccccuccggcggcaggucaccguggccccugccucgggccucccccacaaggaagaagcuggaaagggcagugccuuagggaccccugcugcagcugagccagugacccccaccagcaaagcaggcucaggugcaccagggggcaccagcaagggccccgccgaggaguccagagugaggaggcacaagcacuccucugagucgccagggagggacaaggggaaauuguccaggcucaaaccugccccgccgcccccaccagcagccucugcagggaaggcuggaggaaagcccucgcagagcccgagccaggaggcggccggggaggcaguccugggcgcaaagacaaaagccacgagucugguugaugcugugaacagugacgcugccaagcccagccagccgggagagggccucaaaaagcccgugcucccggccacuccaaagccacaguccgccaagccgucggggacccccaucagcccagcccccguucccuccacguugccaucagcauccucggcccuggcaggggaccagccgucuuccaccgccuucaucccucucauaucaacccgagugucucuucggaaaacccgccagccuccagagcggaucgccagcggcgccaucaccaagggcgugguccuggacagcaccgaggcgcugugccucgccaucucuaggaacuccgagcagauggccagccacagcgcagugcuggaggccggcaaaaaccucuacacguucugcgugagcuauguggauuccauccagcaaaugaggaacaaguuugccuuccgagaggccaucaacaaacuggagaauaaucuccgggagcuucagaucugcccggcgacagcaggcagugguccagcggccacucaggacuucagcaagcuccucaguucggugaaggaaaucagugacauagugcagagguagcagcagucaggggucaggugucaggcccgucggagcugccugcagcacaugcgggcucgcccauacccgugacaguggcugacaagggacuagugagucagcaccuuggcccaggagcucugcgccaggcagagcugagggcccuguggaguccagcucuacuaccuacguuugcaccgccugcccucccgcaccuuccuccuccccgcuccgucucuguccucgaauuuuaucuguggaguuccugcuccguggacugcagucggcaugccaggacccgccagccccgcucccaccuagugccccagacugagcucuccaggccaggugggaacggcugauguggacugucuuuuucauuuuuuucucucuggagccccuccucccccggcugggccuccuucuuccacuucuccaagaauggaagccugaacugaggccuugugugucaggcccucugccugcacucccuggccuugcccgucgugugcugaagacauguuucaagaaccgcauuucgggaagggcaugcacgggcaugcacacggcuggucacucugcccucugcugcugcccgggguggggugcacucgccauuuccucacgugcaggacagcucuugauuuggguggaaaacagggugcuaaagccaaccagccuuuggguccugggcaggugggagcugaaaaggaucgaggcauggggcauguccuuuccaucuguccacauccccagagcccagcucuugcucucuugugacgugcacugugaauccuggcaagaaagcuugagucucaaggguggcaggucacugucacugccgacaucccucccccagcagaauggaggcaggggacaagggaggcaguggcuaguggggugaacagcuggugccaaauagccccagacugggcccaggcaggucugcaagggcccagagugaaccguccuuucacacaucugggugcccugaaagggcccuuccccucccccacuccucuaagacaaaguagauucuuacaaggcccuuuccuuuggaacaagacagccuucacuuuucugaguucuugaagcauuucaaagcccugccucuguguagccgcccugagagagaauagagcugccacugggcaccugcgcacaggugggaggaaagggccuggccaguccugguccuggcugcacucuugaacugggcgaaugucuuauuuaauuaccgugagugacauagccucauguucugugggggucaucagggaggguuaggaaaaccacaaacggagccccugaaagccucacguauuucacagagcacgccugccaucuucuccccgaggcugccccaggccggagcccagauacgggggcugugacucugggcagggacccggggucuccuggaccuugacagagcagcuaacuccgagagcagugggcagguggccgccccugaggcuucacgccgggagaagccaccuucccaccccuucauaccgccucgugccagcagccucgcacaggcccuagcuuuacgcucaucaccuaaacuuguacuuuauuuuucugauagaaaugguuuccucuggaucguuuuaugcgguucuuacagcacaucaccucuuugcccccgacggcugugacgcagccggagggaggcacuagucaccgacagcggccuugaagacagagcaaagcgcccacccaggucccccgacugccugucuccaugagguacuggucccuuccuuuuguuaacgugaugugccacuauauuuuacacguaucucuugguaugcaucuuuuauagacgcucuuuucuaaguggcgugugcauagcguccugcccugcccccucgggggccugugguggcucccccucugcuucucgggguccagugcauuuuguuucuguauaugauucucugugguuuuuuuugaauccaaaucuguccucuguaguauuuuuuaaauaaaucaguguuuacauu

SEQ ID NO: 27134 - RNA, 9088 nt, Homo sapiens
ggggggaggguggcggcucgaugggggagccgccuccagggggcccccccgcccugugcccacggcgcggccccuuuaagaggcccgccuggcuccgucauccgcgccgcggccaccuccccccggcccuccccuuccugcggcgcagagugcgggccgggcgggagugcggcgagagccggcuggcugagcuuagcguccgaggaggcggcggcggcggcggcggcacggcggcggcggggcuguggggcggugcggaagcgagaggcgaggagcgcgcgggccguggccagagucuggcggcggccuggcggagcggagagcagcgcccgcgccucgccgugcggaggagccccgcacacaauagcggcgcgcgcagcccgcgcccuuccccccggcgcgccccgccccgcgcgccgagcgccccgcuccgccucaccugccaccagggagugggcgggcauuguucgccgccgccgccgccgcgcgggccaugggggccgcccggcgcccggggccgggcuggcgaggcgccgcgccgccgcugagacgggccccgcgcgcagcccggcggcgcagguaaggccggccgcgccaugguggacccggugggcuucgcggaggcguggaaggcgcaguucccggacucagagcccccgcgcauggagcugcgcucagugggcgacaucgagcaggagcuggagcgcugcaaggccuccauucggcgccuggagcaggaggugaaccaggagcgcuuccgcaugaucuaccugcagacguugcuggccaaggaaaagaagagcuaugaccggcagcgauggggcuuccggcgcgcggcgcaggcccccgacggcgccuccgagccccgagcguccgcgucgcgcccgcagccagcgcccgccgacggagccgacccgccgcccgccgaggagcccgaggcccggcccgacggcgaggguucuccggguaaggccaggcccgggaccgcccgcaggcccggggcagccgcgucgggggaacgggacgaccggggaccccccgccagcguggcggcgcucagguccaacuucgagcggauccgcaagggccauggccagcccggggcggacgccgagaagcccuucuacgugaacgucgaguuucaccacgagcgcggccuggugaaggucaacgacaaagaggugucggaccgcaucagcucccugggcagccaggccaugcagauggagcgcaaaaagucccagcacggcgcgggcucgagcgugggggaugcauccaggcccccuuaccggggacgcuccucggagagcagcugcggcgucgacggcgacuacgaggacgccgaguugaacccccgcuuccugaaggacaaccugaucgacgccaauggcgguagcaggcccccuuggccgccccuggaguaccagcccuaccagagcaucuacgucgggggcaugauggaaggggagggcaagggcccgcuccugcgcagccagagcaccucugagcaggagaagcgccuuaccuggccccgcagguccuacuccccccggaguuuugaggauugcggaggcggcuauaccccggacugcagcuccaaugagaaccucaccuccagcgaggaggacuucuccucuggccaguccagccgcguguccccaagccccaccaccuaccgcauguuccgggacaaaagccgcucucccucgcagaacucgcaacaguccuucgacagcagcaguccccccacgccgcagugccauaagcggcaccggcacugcccgguugucguguccgaggccaccaucgugggcguccgcaagaccgggcagaucuggcccaacgauggcgagggcgccuuccauggagacgcagauggcucguucggaacaccaccuggauacggcugcgcugcagaccgggcagaggagcagcgccggcaccaagaugggcugcccuacauugaugacucgcccuccucaucgccccaccucagcagcaagggcaggggcagccgggaugcgcuggucucgggagcccuggaguccacuaaagcgagugagcuggacuuggaaaagggcuuggagaugagaaaauggguccugucgggaauccuggcuagcgaggagacuuaccugagccaccuggaggcacugcugcugcccaugaagccuuugaaagccgcugccaccaccucucagccggugcugacgagucagcagaucgagaccaucuucuucaaagugccugagcucuacgagauccacaaggaguucuaugaugggcucuucccccgcgugcagcaguggagccaccagcagcgggugggcgaccucuuccagaagcuggccagccagcuggguguguaccgggccuucguggacaacuacggaguugccauggaaauggcugagaagugcugucaggccaaugcucaguuugcagaaaucuccgagaaccugagagccagaagcaacaaagaugccaaggauccaacgaccaagaacucucuggaaacucugcucuacaagccuguggaccgugugacgaggagcacgcugguccuccaugacuugcugaagcacacuccugccagccacccugaccaccccuugcugcaggacgcccuccgcaucucacagaacuuccuguccagcaucaaugaggagaucacaccccgacggcaguccaugacggugaagaagggagagcaccggcagcugcugaaggacagcuucaugguggagcugguggagggggcccgcaagcugcgccacgucuuccuguucaccgaccugcuucucugcaccaagcucaagaagcagagcggaggcaaaacgcagcaguaugacugcaaaugguacauuccgcucacggaucucagcuuccagaugguggaugaacuggaggcagugcccaacaucccccuggugcccgaugaggagcuggacgcuuugaagaucaagaucucccagaucaagaaugacauccagagagagaagagggcgaacaagggcagcaaggcuacggagaggcugaagaagaagcugucggagcaggagucacugcugcugcuuaugucucccagcauggccuucagggugcacagccgcaacggcaagaguuacacguuccugaucuccucugacuaugagcgugcagaguggagggagaacauccgggagcagcagaagaaguguuucagaagcuucucccugacauccguggagcugcagaugcugaccaacucgugugugaaacuccagacuguccacagcauuccgcugaccaucaauaaggaagaugaugagucuccggggcucuauggguuucugaaugucaucguccacucagccacuggauuuaagcagaguucaaaucuguacugcacccuggagguggauuccuuuggguauuuugugaauaaagcaaagacgcgcgucuacagggacacagcugagccaaacuggaacgagcuggacccgcaggcccugcaggacagagacuggcagcgcaccgucaucgccaugaaugggaucgaaguaaagcucucggucaaguucaacagcagggaguucagcuugaagaggaugccgucccgaaaacagacaggggucuucggagucaagauugcuguggucaccaagagagagagguccaaggugcccuacaucgugcgccagugcguggaggagaucgagcgccgaggcauggaggaggugggcaucuaccgcguguccgguguggccacggacauccaggcacugaaggcagccuucgacgucaaagcccuucagcggccaguagcaucugacuuugagccucagggucugagugaagccgcucguuggaacuccaaggaaaaccuucucgcuggacccagugaaaaugaccccaaccuuuucguugcacuguaugauuuuguggccaguggagauaacacucuaagcauaacuaaaggugaaaagcuccgggucuuaggcuauaaucacaauggggaauggugugaagcccaaaccaaaaauggccaaggcugggucccaagcaacuacaucacgccagucaacagucuggagaaacacuccugguaccaugggccugugucccgcaaugccgcugaguaucugcugagcagcgggaucaauggcagcuucuuggugcgugagagugagagcaguccuggccagagguccaucucgcugagauacgaagggaggguguaccauuacaggaucaacacugcuucugauggcaagcucuacgucuccuccgagagccgcuucaacacccuggccgaguugguucaucaucauucaacgguggccgacgggcucaucaccacgcuccauuauccagccccaaagcgcaacaagcccacugucuauggugugucccccaacuacgacaagugggagauggaacgcacggacaucaccaugaagcacaagcugggcgggggccaguacggggagguguacgagggcguguggaagaaauacagccugacgguggccgugaagaccuugaaggaggacaccauggagguggaagaguucuugaaagaagcugcagucaugaaagagaucaaacacccuaaccuggugcagcuccuuggggucugcacccgggagcccccguucuauaucaucacugaguucaugaccuacgggaaccuccuggacuaccugagggagugcaaccggcaggaggugaacgccguggugcugcuguacauggccacucagaucucgucagccauggaguaccuggagaagaaaaacuucauccacagagaucuugcugcccgaaacugccugguaggggagaaccacuuggugaagguagcugauuuuggccugagcagguugaugacaggggacaccuacacagcccaugcuggagccaaguuccccaucaaauggacugcacccgagagccuggccuacaacaaguucuccaucaaguccgacgucugggcauuuggaguauugcuuugggaaauugcuaccuauggcauguccccuuacccgggaauugaccugucccagguguaugagcugcuagagaaggacuaccgcauggagcgcccagaaggcugcccagagaaggucuaugaacucaugcgagcauguuggcaguggaaucccucugaccggcccuccuuugcugaaauccaccaagccuuugaaacaauguuccaggaauccaguaucucagacgaaguggaaaaggagcuggggaaacaaggcguccguggggcugugaguaccuugcugcaggccccagagcugcccaccaagacgaggaccuccaggagagcugcagagcacagagacaccacugacgugccugagaugccucacuccaagggccagggagagagcgauccucuggaccaugagccugccgugucuccauugcucccucgaaaagagcgaggucccccggagggcggccugaaugaagaugagcgccuucuccccaaagacaaaaagaccaacuuguucagcgccuugaucaagaagaagaagaagacagccccaaccccucccaaacgcagcagcuccuuccgggagauggacggccagccggagcgcagaggggccggcgaggaagagggccgagacaucagcaacggggcacuggcuuucacccccuuggacacagcugacccagccaaguccccaaagcccagcaauggggcugggguccccaauggagcccuccgggaguccgggggcucaggcuuccggucuccccaccuguggaagaaguccagcacgcugaccagcagccgccuagccaccggcgaggaggagggcgguggcagcuccagcaagcgcuuccugcgcucuugcuccgccuccugcguuccccauggggccaaggacacggaguggaggucagucacgcugccucgggacuugcaguccacgggaagacaguuugacucguccacauuuggagggcacaaaagugagaagccggcucugccucggaagagggcaggggagaacaggucugaccaggugacccgaggcacaguaacgccuccccccaggcuggugaaaaagaaugaggaagcugcugaugaggucuucaaagacaucauggaguccagcccgggcuccagcccgcccaaccugacuccaaaaccccuccggcggcaggucaccguggccccugccucgggccucccccacaaggaagaagcuggaaagggcagugccuuagggaccccugcugcagcugagccagugacccccaccagcaaagcaggcucaggugcaccagggggcaccagcaagggccccgccgaggaguccagagugaggaggcacaagcacuccucugagucgccagggagggacaaggggaaauuguccaggcucaaaccugccccgccgcccccaccagcagccucugcagggaaggcuggaggaaagcccucgcagagcccgagccaggaggcggccggggaggcaguccugggcgcaaagacaaaagccacgagucugguugaugcugugaacagugacgcugccaagcccagccagccgggagagggccucaaaaagcccgugcucccggccacuccaaagccacaguccgccaagccgucggggacccccaucagcccagcccccguucccuccacguugccaucagcauccucggcccuggcaggggaccagccgucuuccaccgccuucaucccucucauaucaacccgagugucucuucggaaaacccgccagccuccagagcggaucgccagcggcgccaucaccaagggcgugguccuggacagcaccgaggcgcugugccucgccaucucuaggaacuccgagcagauggccagccacagcgcagugcuggaggccggcaaaaaccucuacacguucugcgugagcuauguggauuccauccagcaaaugaggaacaaguuugccuuccgagaggccaucaacaaacuggagaauaaucuccgggagcuucagaucugcccggcgacagcaggcagugguccagcggccacucaggacuucagcaagcuccucaguucggugaaggaaaucagugacauagugcagagguagcagcagucaggggucaggugucaggcccgucggagcugccugcagcacaugcgggcucgcccauacccgugacaguggcugacaagggacuagugagucagcaccuuggcccaggagcucugcgccaggcagagcugagggcccuguggaguccagcucuacuaccuacguuugcaccgccugcccucccgcaccuuccuccuccccgcuccgucucuguccucgaauuuuaucuguggaguuccugcuccguggacugcagucggcaugccaggacccgccagccccgcucccaccuagugccccagacugagcucuccaggccaggugggaacggcugauguggacugucuuuuucauuuuuuucucucuggagccccuccucccccggcugggccuccuucuuccacuucuccaagaauggaagccugaacugaggccuugugugucaggcccucugccugcacucccuggccuugcccgucgugugcugaagacauguuucaagaaccgcauuucgggaagggcaugcacgggcaugcacacggcuggucacucugcccucugcugcugcccgggguggggugcacucgccauuuccucacgugcaggacagcucuugauuuggguggaaaacagggugcuaaagccaaccagccuuuggguccugggcaggugggagcugaaaaggaucgaggcauggggcauguccuuuccaucuguccacauccccagagcccagcucuugcucucuugugacgugcacugugaauccuggcaagaaagcuugagucucaaggguggcaggucacugucacugccgacaucccucccccagcagaauggaggcaggggacaagggaggcaguggcuaguggggugaacagcuggugccaaauagccccagacugggcccaggcaggucugcaagggcccagagugaaccguccuuucacacaucugggugcccugaaagggcccuuccccucccccacuccucuaagacaaaguagauucuuacaaggcccuuuccuuuggaacaagacagccuucacuuuucugaguucuugaagcauuucaaagcccugccucuguguagccgcccugagagagaauagagcugccacugggcaccugcgcacaggugggaggaaagggccuggccaguccugguccuggcugcacucuugaacugggcgaaugucuuauuuaauuaccgugagugacauagccucauguucugugggggucaucagggaggguuaggaaaaccacaaacggagccccugaaagccucacguauuucacagagcacgccugccaucuucuccccgaggcugccccaggccggagcccagauacgggggcugugacucugggcagggacccggggucuccuggaccuugacagagcagcuaacuccgagagcagugggcagguggccgccccugaggcuucacgccgggagaagccaccuucccaccccuucauaccgccucgugccagcagccucgcacaggcccuagcuuuacgcucaucaccuaaacuuguacuuuauuuuucugauagaaaugguuuccucuggaucguuuuaugcgguucuuacagcacaucaccucuuugcccccgacggcugugacgcagccggagggaggcacuagucaccgacagcggccuugaagacagagcaaagcgcccacccaggucccccgacugccugucuccaugagguacuggucccuuccuuuuguuaacgugaugugccacuauauuuuacacguaucucuugguaugcaucuuuuauagacgcucuuuucuaaguggcgugugcauagcguccugcccugcccccucgggggccugugguggcucccccucugcuucucgggguccagugcauuuuguuucuguauaugauucucugugguuuuuuuugaauccaaaucuguccucuguaguauuuuuuaaauaaaucaguguuuacauu

SEQ ID NO: 27135 - RNA, 7181 nt, Homo sapiens
ggggggaggguggcggcucgaugggggagccgccuccagggggcccccccgcccugugcccacggcgcggccccuuuaagaggcccgccuggcuccgucauccgcgccgcggccaccuccccccggcccuccccuuccugcggcgcagagugcgggccgggcgggagugcggcgagagccggcuggcugagcuuagcguccgaggaggcggcggcggcggcggcggcacggcggcggcggggcuguggggcggugcggaagcgagaggcgaggagcgcgcgggccguggccagagucuggcggcggccuggcggagcggagagcagcgcccgcgccucgccgugcggaggagccccgcacacaauagcggcgcgcgcagcccgcgcccuuccccccggcgcgccccgccccgcgcgccgagcgccccgcuccgccucaccugccaccagggagugggcgggcauuguucgccgccgccgccgccgcgcgggccaugggggccgcccggcgcccggggccgggcuggcgaggcgccgcgccgccgcugagacgggccccgcgcgcagcccggcggcgcagguaaggccggccgcgccaugguggacccggugggcuucgcggaggcguggaaggcgcaguucccggacucagagcccccgcgcauggagcugcgcucagugggcgacaucgagcaggagcuggagcgcugcaaggccuccauucggcgccuggagcaggaggugaaccaggagcgcuuccgcaugaucuaccugcagacguugcuggccaaggaaaagaagagcuaugaccggcagcgauggggcuuccggcgcgcggcgcaggcccccgacggcgccuccgagccccgagcguccgcgucgcgcccgcagccagcgcccgccgacggagccgacccgccgcccgccgaggagcccgaggcccggcccgacggcgaggguucuccggguaaggccaggcccgggaccgcccgcaggcccggggcagccgcgucgggggaacgggacgaccggggaccccccgccagcguggcggcgcucagguccaacuucgagcggauccgcaagggccauggccagcccggggcggacgccgagaagcccuucuacgugaacgucgaguuucaccacgagcgcggccuggugaaggucaacgacaaagaggugucggaccgcaucagcucccugggcagccaggccaugcagauggagcgcaaaaagucccagcacggcgcgggcucgagcgugggggaugcauccaggcccccuuaccggggacgcuccucggagagcagcugcggcgucgacggcgacuacgaggacgccgaguugaacccccgcuuccugaaggacaaccugaucgacgccaauggcgguagcaggcccccuuggccgccccuggaguaccagcccuaccagagcaucuacgucgggggcaugauggaaggggagggcaagggcccgcuccugcgcagccagagcaccucugagcaggagaagcgccuuaccuggccccgcagguccuacuccccccggaguuuugaggauugcggaggcggcuauaccccggacugcagcuccaaugagaaccucaccuccagcgaggaggacuucuccucuggccaguccagccgcguguccccaagccccaccaccuaccgcauguuccgggacaaaagccgcucucccucgcagaacucgcaacaguccuucgacagcagcaguccccccacgccgcagugccauaagcggcaccggcacugcccgguugucguguccgaggccaccaucgugggcguccgcaagaccgggcagaucuggcccaacgauggcgagggcgccuuccauggagacgcagaagcccuucagcggccaguagcaucugacuuugagccucagggucugagugaagccgcucguuggaacuccaaggaaaaccuucucgcuggacccagugaaaaugaccccaaccuuuucguugcacuguaugauuuuguggccaguggagauaacacucuaagcauaacuaaaggugaaaagcuccgggucuuaggcuauaaucacaauggggaauggugugaagcccaaaccaaaaauggccaaggcugggucccaagcaacuacaucacgccagucaacagucuggagaaacacuccugguaccaugggccugugucccgcaaugccgcugaguaucugcugagcagcgggaucaauggcagcuucuuggugcgugagagugagagcaguccuggccagagguccaucucgcugagauacgaagggaggguguaccauuacaggaucaacacugcuucugauggcaagcucuacgucuccuccgagagccgcuucaacacccuggccgaguugguucaucaucauucaacgguggccgacgggcucaucaccacgcuccauuauccagccccaaagcgcaacaagcccacugucuauggugugucccccaacuacgacaagugggagauggaacgcacggacaucaccaugaagcacaagcugggcgggggccaguacggggagguguacgagggcguguggaagaaauacagccugacgguggccgugaagaccuugaaggaggacaccauggagguggaagaguucuugaaagaagcugcagucaugaaagagaucaaacacccuaaccuggugcagcuccuuggggucugcacccgggagcccccguucuauaucaucacugaguucaugaccuacgggaaccuccuggacuaccugagggagugcaaccggcaggaggugaacgccguggugcugcuguacauggccacucagaucucgucagccauggaguaccuggagaagaaaaacuucauccacagagaucuugcugcccgaaacugccugguaggggagaaccacuuggugaagguagcugauuuuggccugagcagguugaugacaggggacaccuacacagcccaugcuggagccaaguuccccaucaaauggacugcacccgagagccuggccuacaacaaguucuccaucaaguccgacgucugggcauuuggaguauugcuuugggaaauugcuaccuauggcauguccccuuacccgggaauugaccugucccagguguaugagcugcuagagaaggacuaccgcauggagcgcccagaaggcugcccagagaaggucuaugaacucaugcgagcauguuggcaguggaaucccucugaccggcccuccuuugcugaaauccaccaagccuuugaaacaauguuccaggaauccaguaucucagacgaaguggaaaaggagcuggggaaacaaggcguccguggggcugugaguaccuugcugcaggccccagagcugcccaccaagacgaggaccuccaggagagcugcagagcacagagacaccacugacgugccugagaugccucacuccaagggccagggagagagcgauccucuggaccaugagccugccgugucuccauugcucccucgaaaagagcgaggucccccggagggcggccugaaugaagaugagcgccuucuccccaaagacaaaaagaccaacuuguucagcgccuugaucaagaagaagaagaagacagccccaaccccucccaaacgcagcagcuccuuccgggagauggacggccagccggagcgcagaggggccggcgaggaagagggccgagacaucagcaacggggcacuggcuuucacccccuuggacacagcugacccagccaaguccccaaagcccagcaauggggcugggguccccaauggagcccuccgggaguccgggggcucaggcuuccggucuccccaccuguggaagaaguccagcacgcugaccagcagccgccuagccaccggcgaggaggagggcgguggcagcuccagcaagcgcuuccugcgcucuugcuccgccuccugcguuccccauggggccaaggacacggaguggaggucagucacgcugccucgggacuugcaguccacgggaagacaguuugacucguccacauuuggagggcacaaaagugagaagccggcucugccucggaagagggcaggggagaacaggucugaccaggugacccgaggcacaguaacgccuccccccaggcuggugaaaaagaaugaggaagcugcugaugaggucuucaaagacaucauggaguccagcccgggcuccagcccgcccaaccugacuccaaaaccccuccggcggcaggucaccguggccccugccucgggccucccccacaaggaagaagcuggaaagggcagugccuuagggaccccugcugcagcugagccagugacccccaccagcaaagcaggcucaggugcaccagggggcaccagcaagggccccgccgaggaguccagagugaggaggcacaagcacuccucugagucgccagggagggacaaggggaaauuguccaggcucaaaccugccccgccgcccccaccagcagccucugcagggaaggcuggaggaaagcccucgcagagcccgagccaggaggcggccggggaggcaguccugggcgcaaagacaaaagccacgagucugguugaugcugugaacagugacgcugccaagcccagccagccgggagagggccucaaaaagcccgugcucccggccacuccaaagccacaguccgccaagccgucggggacccccaucagcccagcccccguucccuccacguugccaucagcauccucggcccuggcaggggaccagccgucuuccaccgccuucaucccucucauaucaacccgagugucucuucggaaaacccgccagccuccagagcggaucgccagcggcgccaucaccaagggcgugguccuggacagcaccgaggcgcugugccucgccaucucuaggaacuccgagcagauggccagccacagcgcagugcuggaggccggcaaaaaccucuacacguucugcgugagcuauguggauuccauccagcaaaugaggaacaaguuugccuuccgagaggccaucaacaaacuggagaauaaucuccgggagcuucagaucugcccggcgacagcaggcagugguccagcggccacucaggacuucagcaagcuccucaguucggugaaggaaaucagugacauagugcagagguagcagcagucaggggucaggugucaggcccgucggagcugccugcagcacaugcgggcucgcccauacccgugacaguggcugacaagggacuagugagucagcaccuuggcccaggagcucugcgccaggcagagcugagggcccuguggaguccagcucuacuaccuacguuugcaccgccugcccucccgcaccuuccuccuccccgcuccgucucuguccucgaauuuuaucuguggaguuccugcuccguggacugcagucggcaugccaggacccgccagccccgcucccaccuagugccccagacugagcucuccaggccaggugggaacggcugauguggacugucuuuuucauuuuuuucucucuggagccccuccucccccggcugggccuccuucuuccacuucuccaagaauggaagccugaacugaggccuugugugucaggcccucugccugcacucccuggccuugcccgucgugugcugaagacauguuucaagaaccgcauuucgggaagggcaugcacgggcaugcacacggcuggucacucugcccucugcugcugcccgggguggggugcacucgccauuuccucacgugcaggacagcucuugauuuggguggaaaacagggugcuaaagccaaccagccuuuggguccugggcaggugggagcugaaaaggaucgaggcauggggcauguccuuuccaucuguccacauccccagagcccagcucuugcucucuugugacgugcacugugaauccuggcaagaaagcuugagucucaaggguggcaggucacugucacugccgacaucccucccccagcagaauggaggcaggggacaagggaggcaguggcuaguggggugaacagcuggugccaaauagccccagacugggcccaggcaggucugcaagggcccagagugaaccguccuuucacacaucugggugcccugaaagggcccuuccccucccccacuccucuaagacaaaguagauucuuacaaggcccuuuccuuuggaacaagacagccuucacuuuucugaguucuugaagcauuucaaagcccugccucuguguagccgcccugagagagaauagagcugccacugggcaccugcgcacaggugggaggaaagggccuggccaguccugguccuggcugcacucuugaacugggcgaaugucuuauuuaauuaccgugagugacauagccucauguucugugggggucaucagggaggguuaggaaaaccacaaacggagccccugaaagccucacguauuucacagagcacgccugccaucuucuccccgaggcugccccaggccggagcccagauacgggggcugugacucugggcagggacccggggucuccuggaccuugacagagcagcuaacuccgagagcagugggcagguggccgccccugaggcuucacgccgggagaagccaccuucccaccccuucauaccgccucgugccagcagccucgcacaggcccuagcuuuacgcucaucaccuaaacuuguacuuuauuuuucugauagaaaugguuuccucuggaucguuuuaugcgguucuuacagcacaucaccucuuugcccccgacggcugugacgcagccggagggaggcacuagucaccgacagcggccuugaagacagagcaaagcgcccacccaggucccccgacugccugucuccaugagguacuggucccuuccuuuuguuaacgugaugugccacuauauuuuacacguaucucuugguaugcaucuuuuauagacgcucuuuucuaaguggcgugugcauagcguccugcccugcccccucgggggccugugguggcucccccucugcuucucgggguccagugcauuuuguuucuguauaugauucucugugguuuuuuuugaauccaaaucuguccucuguaguauuuuuuaaauaaaucaguguuuacauuagaa

SEQ ID NO: 27136 - RNA, 8609 nt, Homo sapiens
ggggggaggguggcggcucgaugggggagccgccuccagggggcccccccgcccugugcccacggcgcggccccuuuaagaggcccgccuggcuccgucauccgcgccgcggccaccuccccccggcccuccccuuccugcggcgcagagugcgggccgggcgggagugcggcgagagccggcuggcugagcuuagcguccgaggaggcggcggcggcggcggcggcacggcggcggcggggcuguggggcggugcggaagcgagaggcgaggagcgcgcgggccguggccagagucuggcggcggccuggcggagcggagagcagcgcccgcgccucgccgugcggaggagccccgcacacaauagcggcgcgcgcagcccgcgcccuuccccccggcgcgccccgccccgcgcgccgagcgccccgcuccgccucaccugccaccagggagugggcgggcauuguucgccgccgccgccgccgcgcgggccaugggggccgcccggcgcccggggccgggcuggcgaggcgccgcgccgccgcugagacgggccccgcgcgcagcccggcggcgcagguaaggccggccgcgccaugguggacccggugggcuucgcggaggcguggaaggcgcaguucccggacucagagcccccgcgcauggagcugcgcucagugggcgacaucgagcaggagcuggagcgcugcaaggccuccauucggcgccuggagcaggaggugaaccaggagcgcuuccgcaugaucuaccugcagacguugcuggccaaggaaaagaagagcuaugaccggcagcgauggggcuuccggcgcgcggcgcaggcccccgacggcgccuccgagccccgagcguccgcgucgcgcccgcagccagcgcccgccgacggagccgacccgccgcccgccgaggagcccgaggcccggcccgacggcgaggguucuccggguaaggccaggcccgggaccgcccgcaggcccggggcagccgcgucgggggaacgggacgaccggggaccccccgccagcguggcggcgcucagguccaacuucgagcggauccgcaagggccauggccagcccggggcggacgccgagaagcccuucuacgugaacgucgaguuucaccacgagcgcggccuggugaaggucaacgacaaagaggugucggaccgcaucagcucccugggcagccaggccaugcagauggagcgcaaaaagucccagcacggcgcgggcucgagcgugggggaugcauccaggcccccuuaccggggacgcuccucggagagcagcugcggcgucgacggcgacuacgaggacgccgaguugaacccccgcuuccugaaggacaaccugaucgacgccaauggcgguagcaggcccccuuggccgccccuggaguaccagcccuaccagagcaucuacgucgggggcaugauggaaggggagggcaagggcccgcuccugcgcagccagagcaccucugagcaggagaagcgccuuaccuggccccgcagguccuacuccccccggaguuuugaggauugcggaggcggcuauaccccggacugcagcuccaaugagaaccucaccuccagcgaggaggacuucuccucuggccaguccagccgcguguccccaagccccaccaccuaccgcauguuccgggacaaaagccgcucucccucgcagaacucgcaacaguccuucgacagcagcaguccccccacgccgcagugccauaagcggcaccggcacugcccgguugucguguccgaggccaccaucgugggcguccgcaagaccgggcagaucuggcccaacgauggcgagggcgccuuccauggagacgcagauggcucguucggaacaccaccuggauacggcugcgcugcagaccgggcagaggagcagcgccggcaccaagaugggcugcccuacauugaugacucgcccuccucaucgccccaccucagcagcaagggcaggggcagccgggaugcgcuggucucgggagcccuggaguccacuaaagcgagugagcuggacuuggaaaagggcuuggagaugagaaaauggguccugucgggaauccuggcuagcgaggagacuuaccugagccaccuggaggcacugcugcugcccaugaagccuuugaaagccgcugccaccaccucucagccggugcugacgagucagcagaucgagaccaucuucuucaaagugccugagcucuacgagauccacaaggaguucuaugaugggcucuucccccgcgugcagcaguggagccaccagcagcgggugggcgaccucuuccagaagcuggccagccagcuggguguguaccgggccuucguggacaacuacggaguugccauggaaauggcugagaagugcugucaggccaaugcucaguuugcagaaaucuccgagaaccugagagccagaagcaacaaagaugccaaggauccaacgaccaagaacucucuggaaacucugcucuacaagccuguggaccgugugacgaggagcacgcugguccuccaugacuugcugaagcacacuccugccagccacccugaccaccccuugcugcaggacgcccuccgcaucucacagaacuuccuguccagcaucaaugaggagaucacaccccgacggcaguccaugacggugaagaagggagagcaccggcagcugcugaaggacagcuucaugguggagcugguggagggggcccgcaagcugcgccacgucuuccuguucaccgaccugcuucucugcaccaagcucaagaagcagagcggaggcaaaacgcagcaguaugacugcaaaugguacauuccgcucacggaucucagcuuccagaugguggaugaacuggaggcagugcccaacaucccccuggugcccgaugaggagcuggacgcuuugaagaucaagaucucccagaucaagaaugacauccagagagagaagagggcgaacaagggcagcaaggcuacggagaggcugaagaagaagcugucggagcaggagucacugcugcugcuuaugucucccagcauggccuucagggugcacagccgcaacggcaagaguuacacguuccugaucuccucugacuaugagcgugcagaguggagggagaacauccgggagcagcagaagaaguguuucagaagcuucucccugacauccguggagcugcagaugcugaccaacucgugugugaaacuccagacuguccacagcauuccgcugaccaucaauaaggaagaagcccuucagcggccaguagcaucugacuuugagccucagggucugagugaagccgcucguuggaacuccaaggaaaaccuucucgcuggacccagugaaaaugaccccaaccuuuucguugcacuguaugauuuuguggccaguggagauaacacucuaagcauaacuaaaggugaaaagcuccgggucuuaggcuauaaucacaauggggaauggugugaagcccaaaccaaaaauggccaaggcugggucccaagcaacuacaucacgccagucaacagucuggagaaacacuccugguaccaugggccugugucccgcaaugccgcugaguaucugcugagcagcgggaucaauggcagcuucuuggugcgugagagugagagcaguccuggccagagguccaucucgcugagauacgaagggaggguguaccauuacaggaucaacacugcuucugauggcaagcucuacgucuccuccgagagccgcuucaacacccuggccgaguugguucaucaucauucaacgguggccgacgggcucaucaccacgcuccauuauccagccccaaagcgcaacaagcccacugucuauggugugucccccaacuacgacaagugggagauggaacgcacggacaucaccaugaagcacaagcugggcgggggccaguacggggagguguacgagggcguguggaagaaauacagccugacgguggccgugaagaccuugaaggaggacaccauggagguggaagaguucuugaaagaagcugcagucaugaaagagaucaaacacccuaaccuggugcagcuccuuggggucugcacccgggagcccccguucuauaucaucacugaguucaugaccuacgggaaccuccuggacuaccugagggagugcaaccggcaggaggugaacgccguggugcugcuguacauggccacucagaucucgucagccauggaguaccuggagaagaaaaacuucauccacagagaucuugcugcccgaaacugccugguaggggagaaccacuuggugaagguagcugauuuuggccugagcagguugaugacaggggacaccuacacagcccaugcuggagccaaguuccccaucaaauggacugcacccgagagccuggccuacaacaaguucuccaucaaguccgacgucugggcauuuggaguauugcuuugggaaauugcuaccuauggcauguccccuuacccgggaauugaccugucccagguguaugagcugcuagagaaggacuaccgcauggagcgcccagaaggcugcccagagaaggucuaugaacucaugcgagcauguuggcaguggaaucccucugaccggcccuccuuugcugaaauccaccaagccuuugaaacaauguuccaggaauccaguaucucagacgaaguggaaaaggagcuggggaaacaaggcguccguggggcugugaguaccuugcugcaggccccagagcugcccaccaagacgaggaccuccaggagagcugcagagcacagagacaccacugacgugccugagaugccucacuccaagggccagggagagagcgauccucuggaccaugagccugccgugucuccauugcucccucgaaaagagcgaggucccccggagggcggccugaaugaagaugagcgccuucuccccaaagacaaaaagaccaacuuguucagcgccuugaucaagaagaagaagaagacagccccaaccccucccaaacgcagcagcuccuuccgggagauggacggccagccggagcgcagaggggccggcgaggaagagggccgagacaucagcaacggggcacuggcuuucacccccuuggacacagcugacccagccaaguccccaaagcccagcaauggggcugggguccccaauggagcccuccgggaguccgggggcucaggcuuccggucuccccaccuguggaagaaguccagcacgcugaccagcagccgccuagccaccggcgaggaggagggcgguggcagcuccagcaagcgcuuccugcgcucuugcuccgccuccugcguuccccauggggccaaggacacggaguggaggucagucacgcugccucgggacuugcaguccacgggaagacaguuugacucguccacauuuggagggcacaaaagugagaagccggcucugccucggaagagggcaggggagaacaggucugaccaggugacccgaggcacaguaacgccuccccccaggcuggugaaaaagaaugaggaagcugcugaugaggucuucaaagacaucauggaguccagcccgggcuccagcccgcccaaccugacuccaaaaccccuccggcggcaggucaccguggccccugccucgggccucccccacaaggaagaagcuggaaagggcagugccuuagggaccccugcugcagcugagccagugacccccaccagcaaagcaggcucaggugcaccagggggcaccagcaagggccccgccgaggaguccagagugaggaggcacaagcacuccucugagucgccagggagggacaaggggaaauuguccaggcucaaaccugccccgccgcccccaccagcagccucugcagggaaggcuggaggaaagcccucgcagagcccgagccaggaggcggccggggaggcaguccugggcgcaaagacaaaagccacgagucugguugaugcugugaacagugacgcugccaagcccagccagccgggagagggccucaaaaagcccgugcucccggccacuccaaagccacaguccgccaagccgucggggacccccaucagcccagcccccguucccuccacguugccaucagcauccucggcccuggcaggggaccagccgucuuccaccgccuucaucccucucauaucaacccgagugucucuucggaaaacccgccagccuccagagcggaucgccagcggcgccaucaccaagggcgugguccuggacagcaccgaggcgcugugccucgccaucucuaggaacuccgagcagauggccagccacagcgcagugcuggaggccggcaaaaaccucuacacguucugcgugagcuauguggauuccauccagcaaaugaggaacaaguuugccuuccgagaggccaucaacaaacuggagaauaaucuccgggagcuucagaucugcccggcgacagcaggcagugguccagcggccacucaggacuucagcaagcuccucaguucggugaaggaaaucagugacauagugcagagguagcagcagucaggggucaggugucaggcccgucggagcugccugcagcacaugcgggcucgcccauacccgugacaguggcugacaagggacuagugagucagcaccuuggcccaggagcucugcgccaggcagagcugagggcccuguggaguccagcucuacuaccuacguuugcaccgccugcccucccgcaccuuccuccuccccgcuccgucucuguccucgaauuuuaucuguggaguuccugcuccguggacugcagucggcaugccaggacccgccagccccgcucccaccuagugccccagacugagcucuccaggccaggugggaacggcugauguggacugucuuuuucauuuuuuucucucuggagccccuccucccccggcugggccuccuucuuccacuucuccaagaauggaagccugaacugaggccuugugugucaggcccucugccugcacucccuggccuugcccgucgugugcugaagacauguuucaagaaccgcauuucgggaagggcaugcacgggcaugcacacggcuggucacucugcccucugcugcugcccgggguggggugcacucgccauuuccucacgugcaggacagcucuugauuuggguggaaaacagggugcuaaagccaaccagccuuuggguccugggcaggugggagcugaaaaggaucgaggcauggggcauguccuuuccaucuguccacauccccagagcccagcucuugcucucuugugacgugcacugugaauccuggcaagaaagcuugagucucaaggguggcaggucacugucacugccgacaucccucccccagcagaauggaggcaggggacaagggaggcaguggcuaguggggugaacagcuggugccaaauagccccagacugggcccaggcaggucugcaagggcccagagugaaccguccuuucacacaucugggugcccugaaagggcccuuccccucccccacuccucuaagacaaaguagauucuuacaaggcccuuuccuuuggaacaagacagccuucacuuuucugaguucuugaagcauuucaaagcccugccucuguguagccgcccugagagagaauagagcugccacugggcaccugcgcacaggugggaggaaagggccuggccaguccugguccuggcugcacucuugaacugggcgaaugucuuauuuaauuaccgugagugacauagccucauguucugugggggucaucagggaggguuaggaaaaccacaaacggagccccugaaagccucacguauuucacagagcacgccugccaucuucuccccgaggcugccccaggccggagcccagauacgggggcugugacucugggcagggacccggggucuccuggaccuugacagagcagcuaacuccgagagcagugggcagguggccgccccugaggcuucacgccgggagaagccaccuucccaccccuucauaccgccucgugccagcagccucgcacaggcccuagcuuuacgcucaucaccuaaacuuguacuuuauuuuucugauagaaaugguuuccucuggaucguuuuaugcgguucuuacagcacaucaccucuuugcccccgacggcugugacgcagccggagggaggcacuagucaccgacagcggccuugaagacagagcaaagcgcccacccaggucccccgacugccugucuccaugagguacuggucccuuccuuuuguuaacgugaugugccacuauauuuuacacguaucucuugguaugcaucuuuuauagacgcucuuuucuaaguggcgugugcauagcguccugcccugcccccucgggggccugugguggcucccccucugcuucucgggguccagugcauuuuguuucuguauaugauucucugugguuuuuuuugaauccaaaucuguccucuguaguauuuuuuaaauaaaucaguguuuacauuagaa

SEQ ID NO: 27137 - RNA, 8684 nt, Homo sapiens
ggggggaggguggcggcucgaugggggagccgccuccagggggcccccccgcccugugcccacggcgcggccccuuuaagaggcccgccuggcuccgucauccgcgccgcggccaccuccccccggcccuccccuuccugcggcgcagagugcgggccgggcgggagugcggcgagagccggcuggcugagcuuagcguccgaggaggcggcggcggcggcggcggcacggcggcggcggggcuguggggcggugcggaagcgagaggcgaggagcgcgcgggccguggccagagucuggcggcggccuggcggagcggagagcagcgcccgcgccucgccgugcggaggagccccgcacacaauagcggcgcgcgcagcccgcgcccuuccccccggcgcgccccgccccgcgcgccgagcgccccgcuccgccucaccugccaccagggagugggcgggcauuguucgccgccgccgccgccgcgcgggccaugggggccgcccggcgcccggggccgggcuggcgaggcgccgcgccgccgcugagacgggccccgcgcgcagcccggcggcgcagguaaggccggccgcgccaugguggacccggugggcuucgcggaggcguggaaggcgcaguucccggacucagagcccccgcgcauggagcugcgcucagugggcgacaucgagcaggagcuggagcgcugcaaggccuccauucggcgccuggagcaggaggugaaccaggagcgcuuccgcaugaucuaccugcagacguugcuggccaaggaaaagaagagcuaugaccggcagcgauggggcuuccggcgcgcggcgcaggcccccgacggcgccuccgagccccgagcguccgcgucgcgcccgcagccagcgcccgccgacggagccgacccgccgcccgccgaggagcccgaggcccggcccgacggcgaggguucuccggguaaggccaggcccgggaccgcccgcaggcccggggcagccgcgucgggggaacgggacgaccggggaccccccgccagcguggcggcgcucagguccaacuucgagcggauccgcaagggccauggccagcccggggcggacgccgagaagcccuucuacgugaacgucgaguuucaccacgagcgcggccuggugaaggucaacgacaaagaggugucggaccgcaucagcucccugggcagccaggccaugcagauggagcgcaaaaagucccagcacggcgcgggcucgagcgugggggaugcauccaggcccccuuaccggggacgcuccucggagagcagcugcggcgucgacggcgacuacgaggacgccgaguugaacccccgcuuccugaaggacaaccugaucgacgccaauggcgguagcaggcccccuuggccgccccuggaguaccagcccuaccagagcaucuacgucgggggcaugauggaaggggagggcaagggcccgcuccugcgcagccagagcaccucugagcaggagaagcgccuuaccuggccccgcagguccuacuccccccggaguuuugaggauugcggaggcggcuauaccccggacugcagcuccaaugagaaccucaccuccagcgaggaggacuucuccucuggccaguccagccgcguguccccaagccccaccaccuaccgcauguuccgggacaaaagccgcucucccucgcagaacucgcaacaguccuucgacagcagcaguccccccacgccgcagugccauaagcggcaccggcacugcccgguugucguguccgaggccaccaucgugggcguccgcaagaccgggcagaucuggcccaacgauggcgagggcgccuuccauggagacgcagauggcucguucggaacaccaccuggauacggcugcgcugcagaccgggcagaggagcagcgccggcaccaagaugggcugcccuacauugaugacucgcccuccucaucgccccaccucagcagcaagggcaggggcagccgggaugcgcuggucucgggagcccuggaguccacuaaagcgagugagcuggacuuggaaaagggcuuggagaugagaaaauggguccugucgggaauccuggcuagcgaggagacuuaccugagccaccuggaggcacugcugcugcccaugaagccuuugaaagccgcugccaccaccucucagccggugcugacgagucagcagaucgagaccaucuucuucaaagugccugagcucuacgagauccacaaggaguucuaugaugggcucuucccccgcgugcagcaguggagccaccagcagcgggugggcgaccucuuccagaagcuggccagccagcuggguguguaccgggccuucguggacaacuacggaguugccauggaaauggcugagaagugcugucaggccaaugcucaguuugcagaaaucuccgagaaccugagagccagaagcaacaaagaugccaaggauccaacgaccaagaacucucuggaaacucugcucuacaagccuguggaccgugugacgaggagcacgcugguccuccaugacuugcugaagcacacuccugccagccacccugaccaccccuugcugcaggacgcccuccgcaucucacagaacuuccuguccagcaucaaugaggagaucacaccccgacggcaguccaugacggugaagaagggagagcaccggcagcugcugaaggacagcuucaugguggagcugguggagggggcccgcaagcugcgccacgucuuccuguucaccgaccugcuucucugcaccaagcucaagaagcagagcggaggcaaaacgcagcaguaugacugcaaaugguacauuccgcucacggaucucagcuuccagaugguggaugaacuggaggcagugcccaacaucccccuggugcccgaugaggagcuggacgcuuugaagaucaagaucucccagaucaagaaugacauccagagagagaagagggcgaacaagggcagcaaggcuacggagaggcugaagaagaagcugucggagcaggagucacugcugcugcuuaugucucccagcauggccuucagggugcacagccgcaacggcaagaguuacacguuccugaucuccucugacuaugagcgugcagaguggagggagaacauccgggagcagcagaagaaguguuucagaagcuucucccugacauccguggagcugcagaugcugaccaacucgugugugaaacuccagacuguccacagcauuccgcugaccaucaauaaggaagaugaugagucuccggggcucuauggguuucugaaugucaucguccacucagccacuggauuuaagcagaguucaaaagcccuucagcggccaguagcaucugacuuugagccucagggucugagugaagccgcucguuggaacuccaaggaaaaccuucucgcuggacccagugaaaaugaccccaaccuuuucguugcacuguaugauuuuguggccaguggagauaacacucuaagcauaacuaaaggugaaaagcuccgggucuuaggcuauaaucacaauggggaauggugugaagcccaaaccaaaaauggccaaggcugggucccaagcaacuacaucacgccagucaacagucuggagaaacacuccugguaccaugggccugugucccgcaaugccgcugaguaucugcugagcagcgggaucaauggcagcuucuuggugcgugagagugagagcaguccuggccagagguccaucucgcugagauacgaagggaggguguaccauuacaggaucaacacugcuucugauggcaagcucuacgucuccuccgagagccgcuucaacacccuggccgaguugguucaucaucauucaacgguggccgacgggcucaucaccacgcuccauuauccagccccaaagcgcaacaagcccacugucuauggugugucccccaacuacgacaagugggagauggaacgcacggacaucaccaugaagcacaagcugggcgggggccaguacggggagguguacgagggcguguggaagaaauacagccugacgguggccgugaagaccuugaaggaggacaccauggagguggaagaguucuugaaagaagcugcagucaugaaagagaucaaacacccuaaccuggugcagcuccuuggggucugcacccgggagcccccguucuauaucaucacugaguucaugaccuacgggaaccuccuggacuaccugagggagugcaaccggcaggaggugaacgccguggugcugcuguacauggccacucagaucucgucagccauggaguaccuggagaagaaaaacuucauccacagagaucuugcugcccgaaacugccugguaggggagaaccacuuggugaagguagcugauuuuggccugagcagguugaugacaggggacaccuacacagcccaugcuggagccaaguuccccaucaaauggacugcacccgagagccuggccuacaacaaguucuccaucaaguccgacgucugggcauuuggaguauugcuuugggaaauugcuaccuauggcauguccccuuacccgggaauugaccugucccagguguaugagcugcuagagaaggacuaccgcauggagcgcccagaaggcugcccagagaaggucuaugaacucaugcgagcauguuggcaguggaaucccucugaccggcccuccuuugcugaaauccaccaagccuuugaaacaauguuccaggaauccaguaucucagacgaaguggaaaaggagcuggggaaacaaggcguccguggggcugugaguaccuugcugcaggccccagagcugcccaccaagacgaggaccuccaggagagcugcagagcacagagacaccacugacgugccugagaugccucacuccaagggccagggagagagcgauccucuggaccaugagccugccgugucuccauugcucccucgaaaagagcgaggucccccggagggcggccugaaugaagaugagcgccuucuccccaaagacaaaaagaccaacuuguucagcgccuugaucaagaagaagaagaagacagccccaaccccucccaaacgcagcagcuccuuccgggagauggacggccagccggagcgcagaggggccggcgaggaagagggccgagacaucagcaacggggcacuggcuuucacccccuuggacacagcugacccagccaaguccccaaagcccagcaauggggcugggguccccaauggagcccuccgggaguccgggggcucaggcuuccggucuccccaccuguggaagaaguccagcacgcugaccagcagccgccuagccaccggcgaggaggagggcgguggcagcuccagcaagcgcuuccugcgcucuugcuccgccuccugcguuccccauggggccaaggacacggaguggaggucagucacgcugccucgggacuugcaguccacgggaagacaguuugacucguccacauuuggagggcacaaaagugagaagccggcucugccucggaagagggcaggggagaacaggucugaccaggugacccgaggcacaguaacgccuccccccaggcuggugaaaaagaaugaggaagcugcugaugaggucuucaaagacaucauggaguccagcccgggcuccagcccgcccaaccugacuccaaaaccccuccggcggcaggucaccguggccccugccucgggccucccccacaaggaagaagcuggaaagggcagugccuuagggaccccugcugcagcugagccagugacccccaccagcaaagcaggcucaggugcaccagggggcaccagcaagggccccgccgaggaguccagagugaggaggcacaagcacuccucugagucgccagggagggacaaggggaaauuguccaggcucaaaccugccccgccgcccccaccagcagccucugcagggaaggcuggaggaaagcccucgcagagcccgagccaggaggcggccggggaggcaguccugggcgcaaagacaaaagccacgagucugguugaugcugugaacagugacgcugccaagcccagccagccgggagagggccucaaaaagcccgugcucccggccacuccaaagccacaguccgccaagccgucggggacccccaucagcccagcccccguucccuccacguugccaucagcauccucggcccuggcaggggaccagccgucuuccaccgccuucaucccucucauaucaacccgagugucucuucggaaaacccgccagccuccagagcggaucgccagcggcgccaucaccaagggcgugguccuggacagcaccgaggcgcugugccucgccaucucuaggaacuccgagcagauggccagccacagcgcagugcuggaggccggcaaaaaccucuacacguucugcgugagcuauguggauuccauccagcaaaugaggaacaaguuugccuuccgagaggccaucaacaaacuggagaauaaucuccgggagcuucagaucugcccggcgacagcaggcagugguccagcggccacucaggacuucagcaagcuccucaguucggugaaggaaaucagugacauagugcagagguagcagcagucaggggucaggugucaggcccgucggagcugccugcagcacaugcgggcucgcccauacccgugacaguggcugacaagggacuagugagucagcaccuuggcccaggagcucugcgccaggcagagcugagggcccuguggaguccagcucuacuaccuacguuugcaccgccugcccucccgcaccuuccuccuccccgcuccgucucuguccucgaauuuuaucuguggaguuccugcuccguggacugcagucggcaugccaggacccgccagccccgcucccaccuagugccccagacugagcucuccaggccaggugggaacggcugauguggacugucuuuuucauuuuuuucucucuggagccccuccucccccggcugggccuccuucuuccacuucuccaagaauggaagccugaacugaggccuugugugucaggcccucugccugcacucccuggccuugcccgucgugugcugaagacauguuucaagaaccgcauuucgggaagggcaugcacgggcaugcacacggcuggucacucugcccucugcugcugcccgggguggggugcacucgccauuuccucacgugcaggacagcucuugauuuggguggaaaacagggugcuaaagccaaccagccuuuggguccugggcaggugggagcugaaaaggaucgaggcauggggcauguccuuuccaucuguccacauccccagagcccagcucuugcucucuugugacgugcacugugaauccuggcaagaaagcuugagucucaaggguggcaggucacugucacugccgacaucccucccccagcagaauggaggcaggggacaagggaggcaguggcuaguggggugaacagcuggugccaaauagccccagacugggcccaggcaggucugcaagggcccagagugaaccguccuuucacacaucugggugcccugaaagggcccuuccccucccccacuccucuaagacaaaguagauucuuacaaggcccuuuccuuuggaacaagacagccuucacuuuucugaguucuugaagcauuucaaagcccugccucuguguagccgcccugagagagaauagagcugccacugggcaccugcgcacaggugggaggaaagggccuggccaguccugguccuggcugcacucuugaacugggcgaaugucuuauuuaauuaccgugagugacauagccucauguucugugggggucaucagggaggguuaggaaaaccacaaacggagccccugaaagccucacguauuucacagagcacgccugccaucuucuccccgaggcugccccaggccggagcccagauacgggggcugugacucugggcagggacccggggucuccuggaccuugacagagcagcuaacuccgagagcagugggcagguggccgccccugaggcuucacgccgggagaagccaccuucccaccccuucauaccgccucgugccagcagccucgcacaggcccuagcuuuacgcucaucaccuaaacuuguacuuuauuuuucugauagaaaugguuuccucuggaucguuuuaugcgguucuuacagcacaucaccucuuugcccccgacggcugugacgcagccggagggaggcacuagucaccgacagcggccuugaagacagagcaaagcgcccacccaggucccccgacugccugucuccaugagguacuggucccuuccuuuuguuaacgugaugugccacuauauuuuacacguaucucuugguaugcaucuuuuauagacgcucuuuucuaaguggcgugugcauagcguccugcccugcccccucgggggccugugguggcucccccucugcuucucgggguccagugcauuuuguuucuguauaugauucucugugguuuuuuuugaauccaaaucuguccucuguaguauuuuuuaaauaaaucaguguuuacauuagaa

SEQ ID NO: 27138 - RNA, 9224 nt, Homo sapiens
ggggggaggguggcggcucgaugggggagccgccuccagggggcccccccgcccugugcccacggcgcggccccuuuaagaggcccgccuggcuccgucauccgcgccgcggccaccuccccccggcccuccccuuccugcggcgcagagugcgggccgggcgggagugcggcgagagccggcuggcugagcuuagcguccgaggaggcggcggcggcggcggcggcacggcggcggcggggcuguggggcggugcggaagcgagaggcgaggagcgcgcgggccguggccagagucuggcggcggccuggcggagcggagagcagcgcccgcgccucgccgugcggaggagccccgcacacaauagcggcgcgcgcagcccgcgcccuuccccccggcgcgccccgccccgcgcgccgagcgccccgcuccgccucaccugccaccagggagugggcgggcauuguucgccgccgccgccgccgcgcgggccaugggggccgcccggcgcccggggccgggcuggcgaggcgccgcgccgccgcugagacgggccccgcgcgcagcccggcggcgcagguaaggccggccgcgccaugguggacccggugggcuucgcggaggcguggaaggcgcaguucccggacucagagcccccgcgcauggagcugcgcucagugggcgacaucgagcaggagcuggagcgcugcaaggccuccauucggcgccuggagcaggaggugaaccaggagcgcuuccgcaugaucuaccugcagacguugcuggccaaggaaaagaagagcuaugaccggcagcgauggggcuuccggcgcgcggcgcaggcccccgacggcgccuccgagccccgagcguccgcgucgcgcccgcagccagcgcccgccgacggagccgacccgccgcccgccgaggagcccgaggcccggcccgacggcgaggguucuccggguaaggccaggcccgggaccgcccgcaggcccggggcagccgcgucgggggaacgggacgaccggggaccccccgccagcguggcggcgcucagguccaacuucgagcggauccgcaagggccauggccagcccggggcggacgccgagaagcccuucuacgugaacgucgaguuucaccacgagcgcggccuggugaaggucaacgacaaagaggugucggaccgcaucagcucccugggcagccaggccaugcagauggagcgcaaaaagucccagcacggcgcgggcucgagcgugggggaugcauccaggcccccuuaccggggacgcuccucggagagcagcugcggcgucgacggcgacuacgaggacgccgaguugaacccccgcuuccugaaggacaaccugaucgacgccaauggcgguagcaggcccccuuggccgccccuggaguaccagcccuaccagagcaucuacgucgggggcaugauggaaggggagggcaagggcccgcuccugcgcagccagagcaccucugagcaggagaagcgccuuaccuggccccgcagguccuacuccccccggaguuuugaggauugcggaggcggcuauaccccggacugcagcuccaaugagaaccucaccuccagcgaggaggacuucuccucuggccaguccagccgcguguccccaagccccaccaccuaccgcauguuccgggacaaaagccgcucucccucgcagaacucgcaacaguccuucgacagcagcaguccccccacgccgcagugccauaagcggcaccggcacugcccgguugucguguccgaggccaccaucgugggcguccgcaagaccgggcagaucuggcccaacgauggcgagggcgccuuccauggagacgcagauggcucguucggaacaccaccuggauacggcugcgcugcagaccgggcagaggagcagcgccggcaccaagaugggcugcccuacauugaugacucgcccuccucaucgccccaccucagcagcaagggcaggggcagccgggaugcgcuggucucgggagcccuggaguccacuaaagcgagugagcuggacuuggaaaagggcuuggagaugagaaaauggguccugucgggaauccuggcuagcgaggagacuuaccugagccaccuggaggcacugcugcugcccaugaagccuuugaaagccgcugccaccaccucucagccggugcugacgagucagcagaucgagaccaucuucuucaaagugccugagcucuacgagauccacaaggaguucuaugaugggcucuucccccgcgugcagcaguggagccaccagcagcgggugggcgaccucuuccagaagcuggccagccagcuggguguguaccgggccuucguggacaacuacggaguugccauggaaauggcugagaagugcugucaggccaaugcucaguuugcagaaaucuccgagaaccugagagccagaagcaacaaagaugccaaggauccaacgaccaagaacucucuggaaacucugcucuacaagccuguggaccgugugacgaggagcacgcugguccuccaugacuugcugaagcacacuccugccagccacccugaccaccccuugcugcaggacgcccuccgcaucucacagaacuuccuguccagcaucaaugaggagaucacaccccgacggcaguccaugacggugaagaagggagagcaccggcagcugcugaaggacagcuucaugguggagcugguggagggggcccgcaagcugcgccacgucuuccuguucaccgaccugcuucucugcaccaagcucaagaagcagagcggaggcaaaacgcagcaguaugacugcaaaugguacauuccgcucacggaucucagcuuccagaugguggaugaacuggaggcagugcccaacaucccccuggugcccgaugaggagcuggacgcuuugaagaucaagaucucccagaucaagaaugacauccagagagagaagagggcgaacaagggcagcaaggcuacggagaggcugaagaagaagcugucggagcaggagucacugcugcugcuuaugucucccagcauggccuucagggugcacagccgcaacggcaagaguuacacguuccugaucuccucugacuaugagcgugcagaguggagggagaacauccgggagcagcagaagaaguguuucagaagcuucucccugacauccguggagcugcagaugcugaccaacucgugugugaaacuccagacuguccacagcauuccgcugaccaucaauaaggaagaugaugagucuccggggcucuauggguuucugaaugucaucguccacucagccacuggauuuaagcagaguucaaaucuguacugcacccuggagguggauuccuuuggguauuuugugaauaaagcaaagacgcgcgucuacagggacacagcugagccaaacuggaacgaggaauuugagauagagcuggagggcucccagacccugaggauacugugcuaugaaaaguguuacaacaagacgaagauccccaaggaggacggcgagagcacggacagacucauggggaagggccagguccagcuggacccgcaggcccugcaggacagagacuggcagcgcaccgucaucgccaugaaugggaucgaaguaaagcucucggucaaguucaacagcagggaguucagcuugaagaggaugccgucccgaaaacagacaggggucuucggagucaagauugcuguggucaccaagagagagagguccaaggugcccuacaucgugcgccagugcguggaggagaucgagcgccgaggcauggaggaggugggcaucuaccgcguguccgguguggccacggacauccaggcacugaaggcagccuucgacgucaaagcccuucagcggccaguagcaucugacuuugagccucagggucugagugaagccgcucguuggaacuccaaggaaaaccuucucgcuggacccagugaaaaugaccccaaccuuuucguugcacuguaugauuuuguggccaguggagauaacacucuaagcauaacuaaaggugaaaagcuccgggucuuaggcuauaaucacaauggggaauggugugaagcccaaaccaaaaauggccaaggcugggucccaagcaacuacaucacgccagucaacagucuggagaaacacuccugguaccaugggccugugucccgcaaugccgcugaguaucugcugagcagcgggaucaauggcagcuucuuggugcgugagagugagagcaguccuggccagagguccaucucgcugagauacgaagggaggguguaccauuacaggaucaacacugcuucugauggcaagcucuacgucuccuccgagagccgcuucaacacccuggccgaguugguucaucaucauucaacgguggccgacgggcucaucaccacgcuccauuauccagccccaaagcgcaacaagcccacugucuauggugugucccccaacuacgacaagugggagauggaacgcacggacaucaccaugaagcacaagcugggcgggggccaguacggggagguguacgagggcguguggaagaaauacagccugacgguggccgugaagaccuugaaggaggacaccauggagguggaagaguucuugaaagaagcugcagucaugaaagagaucaaacacccuaaccuggugcagcuccuuggggucugcacccgggagcccccguucuauaucaucacugaguucaugaccuacgggaaccuccuggacuaccugagggagugcaaccggcaggaggugaacgccguggugcugcuguacauggccacucagaucucgucagccauggaguaccuggagaagaaaaacuucauccacagagaucuugcugcccgaaacugccugguaggggagaaccacuuggugaagguagcugauuuuggccugagcagguugaugacaggggacaccuacacagcccaugcuggagccaaguuccccaucaaauggacugcacccgagagccuggccuacaacaaguucuccaucaaguccgacgucugggcauuuggaguauugcuuugggaaauugcuaccuauggcauguccccuuacccgggaauugaccugucccagguguaugagcugcuagagaaggacuaccgcauggagcgcccagaaggcugcccagagaaggucuaugaacucaugcgagcauguuggcaguggaaucccucugaccggcccuccuuugcugaaauccaccaagccuuugaaacaauguuccaggaauccaguaucucagacgaaguggaaaaggagcuggggaaacaaggcguccguggggcugugaguaccuugcugcaggccccagagcugcccaccaagacgaggaccuccaggagagcugcagagcacagagacaccacugacgugccugagaugccucacuccaagggccagggagagagcgauccucuggaccaugagccugccgugucuccauugcucccucgaaaagagcgaggucccccggagggcggccugaaugaagaugagcgccuucuccccaaagacaaaaagaccaacuuguucagcgccuugaucaagaagaagaagaagacagccccaaccccucccaaacgcagcagcuccuuccgggagauggacggccagccggagcgcagaggggccggcgaggaagagggccgagacaucagcaacggggcacuggcuuucacccccuuggacacagcugacccagccaaguccccaaagcccagcaauggggcugggguccccaauggagcccuccgggaguccgggggcucaggcuuccggucuccccaccuguggaagaaguccagcacgcugaccagcagccgccuagccaccggcgaggaggagggcgguggcagcuccagcaagcgcuuccugcgcucuugcuccgccuccugcguuccccauggggccaaggacacggaguggaggucagucacgcugccucgggacuugcaguccacgggaagacaguuugacucguccacauuuggagggcacaaaagugagaagccggcucugccucggaagagggcaggggagaacaggucugaccaggugacccgaggcacaguaacgccuccccccaggcuggugaaaaagaaugaggaagcugcugaugaggucuucaaagacaucauggaguccagcccgggcuccagcccgcccaaccugacuccaaaaccccuccggcggcaggucaccguggccccugccucgggccucccccacaaggaagaagcuggaaagggcagugccuuagggaccccugcugcagcugagccagugacccccaccagcaaagcaggcucaggugcaccagggggcaccagcaagggccccgccgaggaguccagagugaggaggcacaagcacuccucugagucgccagggagggacaaggggaaauuguccaggcucaaaccugccccgccgcccccaccagcagccucugcagggaaggcuggaggaaagcccucgcagagcccgagccaggaggcggccggggaggcaguccugggcgcaaagacaaaagccacgagucugguugaugcugugaacagugacgcugccaagcccagccagccgggagagggccucaaaaagcccgugcucccggccacuccaaagccacaguccgccaagccgucggggacccccaucagcccagcccccguucccuccacguugccaucagcauccucggcccuggcaggggaccagccgucuuccaccgccuucaucccucucauaucaacccgagugucucuucggaaaacccgccagccuccagagcggaucgccagcggcgccaucaccaagggcgugguccuggacagcaccgaggcgcugugccucgccaucucuaggaacuccgagcagauggccagccacagcgcagugcuggaggccggcaaaaaccucuacacguucugcgugagcuauguggauuccauccagcaaaugaggaacaaguuugccuuccgagaggccaucaacaaacuggagaauaaucuccgggagcuucagaucugcccggcgacagcaggcagugguccagcggccacucaggacuucagcaagcuccucaguucggugaaggaaaucagugacauagugcagagguagcagcagucaggggucaggugucaggcccgucggagcugccugcagcacaugcgggcucgcccauacccgugacaguggcugacaagggacuagugagucagcaccuuggcccaggagcucugcgccaggcagagcugagggcccuguggaguccagcucuacuaccuacguuugcaccgccugcccucccgcaccuuccuccuccccgcuccgucucuguccucgaauuuuaucuguggaguuccugcuccguggacugcagucggcaugccaggacccgccagccccgcucccaccuagugccccagacugagcucuccaggccaggugggaacggcugauguggacugucuuuuucauuuuuuucucucuggagccccuccucccccggcugggccuccuucuuccacuucuccaagaauggaagccugaacugaggccuugugugucaggcccucugccugcacucccuggccuugcccgucgugugcugaagacauguuucaagaaccgcauuucgggaagggcaugcacgggcaugcacacggcuggucacucugcccucugcugcugcccgggguggggugcacucgccauuuccucacgugcaggacagcucuugauuuggguggaaaacagggugcuaaagccaaccagccuuuggguccugggcaggugggagcugaaaaggaucgaggcauggggcauguccuuuccaucuguccacauccccagagcccagcucuugcucucuugugacgugcacugugaauccuggcaagaaagcuugagucucaaggguggcaggucacugucacugccgacaucccucccccagcagaauggaggcaggggacaagggaggcaguggcuaguggggugaacagcuggugccaaauagccccagacugggcccaggcaggucugcaagggcccagagugaaccguccuuucacacaucugggugcccugaaagggcccuuccccucccccacuccucuaagacaaaguagauucuuacaaggcccuuuccuuuggaacaagacagccuucacuuuucugaguucuugaagcauuucaaagcccugccucuguguagccgcccugagagagaauagagcugccacugggcaccugcgcacaggugggaggaaagggccuggccaguccugguccuggcugcacucuugaacugggcgaaugucuuauuuaauuaccgugagugacauagccucauguucugugggggucaucagggaggguuaggaaaaccacaaacggagccccugaaagccucacguauuucacagagcacgccugccaucuucuccccgaggcugccccaggccggagcccagauacgggggcugugacucugggcagggacccggggucuccuggaccuugacagagcagcuaacuccgagagcagugggcagguggccgccccugaggcuucacgccgggagaagccaccuucccaccccuucauaccgccucgugccagcagccucgcacaggcccuagcuuuacgcucaucaccuaaacuuguacuuuauuuuucugauagaaaugguuuccucuggaucguuuuaugcgguucuuacagcacaucaccucuuugcccccgacggcugugacgcagccggagggaggcacuagucaccgacagcggccuugaagacagagcaaagcgcccacccaggucccccgacugccugucuccaugagguacuggucccuuccuuuuguuaacgugaugugccacuauauuuuacacguaucucuugguaugcaucuuuuauagacgcucuuuucuaaguggcgugugcauagcguccugcccugcccccucgggggccugugguggcucccccucugcuucucgggguccagugcauuuuguuucuguauaugauucucugugguuuuuuuugaauccaaaucuguccucuguaguauuuuuuaaauaaaucaguguuuacauuagaa

SEQ ID NO: 27139 - RNA, 9092 nt, Homo sapiens
ggggggaggguggcggcucgaugggggagccgccuccagggggcccccccgcccugugcccacggcgcggccccuuuaagaggcccgccuggcuccgucauccgcgccgcggccaccuccccccggcccuccccuuccugcggcgcagagugcgggccgggcgggagugcggcgagagccggcuggcugagcuuagcguccgaggaggcggcggcggcggcggcggcacggcggcggcggggcuguggggcggugcggaagcgagaggcgaggagcgcgcgggccguggccagagucuggcggcggccuggcggagcggagagcagcgcccgcgccucgccgugcggaggagccccgcacacaauagcggcgcgcgcagcccgcgcccuuccccccggcgcgccccgccccgcgcgccgagcgccccgcuccgccucaccugccaccagggagugggcgggcauuguucgccgccgccgccgccgcgcgggccaugggggccgcccggcgcccggggccgggcuggcgaggcgccgcgccgccgcugagacgggccccgcgcgcagcccggcggcgcagguaaggccggccgcgccaugguggacccggugggcuucgcggaggcguggaaggcgcaguucccggacucagagcccccgcgcauggagcugcgcucagugggcgacaucgagcaggagcuggagcgcugcaaggccuccauucggcgccuggagcaggaggugaaccaggagcgcuuccgcaugaucuaccugcagacguugcuggccaaggaaaagaagagcuaugaccggcagcgauggggcuuccggcgcgcggcgcaggcccccgacggcgccuccgagccccgagcguccgcgucgcgcccgcagccagcgcccgccgacggagccgacccgccgcccgccgaggagcccgaggcccggcccgacggcgaggguucuccggguaaggccaggcccgggaccgcccgcaggcccggggcagccgcgucgggggaacgggacgaccggggaccccccgccagcguggcggcgcucagguccaacuucgagcggauccgcaagggccauggccagcccggggcggacgccgagaagcccuucuacgugaacgucgaguuucaccacgagcgcggccuggugaaggucaacgacaaagaggugucggaccgcaucagcucccugggcagccaggccaugcagauggagcgcaaaaagucccagcacggcgcgggcucgagcgugggggaugcauccaggcccccuuaccggggacgcuccucggagagcagcugcggcgucgacggcgacuacgaggacgccgaguugaacccccgcuuccugaaggacaaccugaucgacgccaauggcgguagcaggcccccuuggccgccccuggaguaccagcccuaccagagcaucuacgucgggggcaugauggaaggggagggcaagggcccgcuccugcgcagccagagcaccucugagcaggagaagcgccuuaccuggccccgcagguccuacuccccccggaguuuugaggauugcggaggcggcuauaccccggacugcagcuccaaugagaaccucaccuccagcgaggaggacuucuccucuggccaguccagccgcguguccccaagccccaccaccuaccgcauguuccgggacaaaagccgcucucccucgcagaacucgcaacaguccuucgacagcagcaguccccccacgccgcagugccauaagcggcaccggcacugcccgguugucguguccgaggccaccaucgugggcguccgcaagaccgggcagaucuggcccaacgauggcgagggcgccuuccauggagacgcagauggcucguucggaacaccaccuggauacggcugcgcugcagaccgggcagaggagcagcgccggcaccaagaugggcugcccuacauugaugacucgcccuccucaucgccccaccucagcagcaagggcaggggcagccgggaugcgcuggucucgggagcccuggaguccacuaaagcgagugagcuggacuuggaaaagggcuuggagaugagaaaauggguccugucgggaauccuggcuagcgaggagacuuaccugagccaccuggaggcacugcugcugcccaugaagccuuugaaagccgcugccaccaccucucagccggugcugacgagucagcagaucgagaccaucuucuucaaagugccugagcucuacgagauccacaaggaguucuaugaugggcucuucccccgcgugcagcaguggagccaccagcagcgggugggcgaccucuuccagaagcuggccagccagcuggguguguaccgggccuucguggacaacuacggaguugccauggaaauggcugagaagugcugucaggccaaugcucaguuugcagaaaucuccgagaaccugagagccagaagcaacaaagaugccaaggauccaacgaccaagaacucucuggaaacucugcucuacaagccuguggaccgugugacgaggagcacgcugguccuccaugacuugcugaagcacacuccugccagccacccugaccaccccuugcugcaggacgcccuccgcaucucacagaacuuccuguccagcaucaaugaggagaucacaccccgacggcaguccaugacggugaagaagggagagcaccggcagcugcugaaggacagcuucaugguggagcugguggagggggcccgcaagcugcgccacgucuuccuguucaccgaccugcuucucugcaccaagcucaagaagcagagcggaggcaaaacgcagcaguaugacugcaaaugguacauuccgcucacggaucucagcuuccagaugguggaugaacuggaggcagugcccaacaucccccuggugcccgaugaggagcuggacgcuuugaagaucaagaucucccagaucaagaaugacauccagagagagaagagggcgaacaagggcagcaaggcuacggagaggcugaagaagaagcugucggagcaggagucacugcugcugcuuaugucucccagcauggccuucagggugcacagccgcaacggcaagaguuacacguuccugaucuccucugacuaugagcgugcagaguggagggagaacauccgggagcagcagaagaaguguuucagaagcuucucccugacauccguggagcugcagaugcugaccaacucgugugugaaacuccagacuguccacagcauuccgcugaccaucaauaaggaagaugaugagucuccggggcucuauggguuucugaaugucaucguccacucagccacuggauuuaagcagaguucaaaucuguacugcacccuggagguggauuccuuuggguauuuugugaauaaagcaaagacgcgcgucuacagggacacagcugagccaaacuggaacgagcuggacccgcaggcccugcaggacagagacuggcagcgcaccgucaucgccaugaaugggaucgaaguaaagcucucggucaaguucaacagcagggaguucagcuugaagaggaugccgucccgaaaacagacaggggucuucggagucaagauugcuguggucaccaagagagagagguccaaggugcccuacaucgugcgccagugcguggaggagaucgagcgccgaggcauggaggaggugggcaucuaccgcguguccgguguggccacggacauccaggcacugaaggcagccuucgacgucaaagcccuucagcggccaguagcaucugacuuugagccucagggucugagugaagccgcucguuggaacuccaaggaaaaccuucucgcuggacccagugaaaaugaccccaaccuuuucguugcacuguaugauuuuguggccaguggagauaacacucuaagcauaacuaaaggugaaaagcuccgggucuuaggcuauaaucacaauggggaauggugugaagcccaaaccaaaaauggccaaggcugggucccaagcaacuacaucacgccagucaacagucuggagaaacacuccugguaccaugggccugugucccgcaaugccgcugaguaucugcugagcagcgggaucaauggcagcuucuuggugcgugagagugagagcaguccuggccagagguccaucucgcugagauacgaagggaggguguaccauuacaggaucaacacugcuucugauggcaagcucuacgucuccuccgagagccgcuucaacacccuggccgaguugguucaucaucauucaacgguggccgacgggcucaucaccacgcuccauuauccagccccaaagcgcaacaagcccacugucuauggugugucccccaacuacgacaagugggagauggaacgcacggacaucaccaugaagcacaagcugggcgggggccaguacggggagguguacgagggcguguggaagaaauacagccugacgguggccgugaagaccuugaaggaggacaccauggagguggaagaguucuugaaagaagcugcagucaugaaagagaucaaacacccuaaccuggugcagcuccuuggggucugcacccgggagcccccguucuauaucaucacugaguucaugaccuacgggaaccuccuggacuaccugagggagugcaaccggcaggaggugaacgccguggugcugcuguacauggccacucagaucucgucagccauggaguaccuggagaagaaaaacuucauccacagagaucuugcugcccgaaacugccugguaggggagaaccacuuggugaagguagcugauuuuggccugagcagguugaugacaggggacaccuacacagcccaugcuggagccaaguuccccaucaaauggacugcacccgagagccuggccuacaacaaguucuccaucaaguccgacgucugggcauuuggaguauugcuuugggaaauugcuaccuauggcauguccccuuacccgggaauugaccugucccagguguaugagcugcuagagaaggacuaccgcauggagcgcccagaaggcugcccagagaaggucuaugaacucaugcgagcauguuggcaguggaaucccucugaccggcccuccuuugcugaaauccaccaagccuuugaaacaauguuccaggaauccaguaucucagacgaaguggaaaaggagcuggggaaacaaggcguccguggggcugugaguaccuugcugcaggccccagagcugcccaccaagacgaggaccuccaggagagcugcagagcacagagacaccacugacgugccugagaugccucacuccaagggccagggagagagcgauccucuggaccaugagccugccgugucuccauugcucccucgaaaagagcgaggucccccggagggcggccugaaugaagaugagcgccuucuccccaaagacaaaaagaccaacuuguucagcgccuugaucaagaagaagaagaagacagccccaaccccucccaaacgcagcagcuccuuccgggagauggacggccagccggagcgcagaggggccggcgaggaagagggccgagacaucagcaacggggcacuggcuuucacccccuuggacacagcugacccagccaaguccccaaagcccagcaauggggcugggguccccaauggagcccuccgggaguccgggggcucaggcuuccggucuccccaccuguggaagaaguccagcacgcugaccagcagccgccuagccaccggcgaggaggagggcgguggcagcuccagcaagcgcuuccugcgcucuugcuccgccuccugcguuccccauggggccaaggacacggaguggaggucagucacgcugccucgggacuugcaguccacgggaagacaguuugacucguccacauuuggagggcacaaaagugagaagccggcucugccucggaagagggcaggggagaacaggucugaccaggugacccgaggcacaguaacgccuccccccaggcuggugaaaaagaaugaggaagcugcugaugaggucuucaaagacaucauggaguccagcccgggcuccagcccgcccaaccugacuccaaaaccccuccggcggcaggucaccguggccccugccucgggccucccccacaaggaagaagcuggaaagggcagugccuuagggaccccugcugcagcugagccagugacccccaccagcaaagcaggcucaggugcaccagggggcaccagcaagggccccgccgaggaguccagagugaggaggcacaagcacuccucugagucgccagggagggacaaggggaaauuguccaggcucaaaccugccccgccgcccccaccagcagccucugcagggaaggcuggaggaaagcccucgcagagcccgagccaggaggcggccggggaggcaguccugggcgcaaagacaaaagccacgagucugguugaugcugugaacagugacgcugccaagcccagccagccgggagagggccucaaaaagcccgugcucccggccacuccaaagccacaguccgccaagccgucggggacccccaucagcccagcccccguucccuccacguugccaucagcauccucggcccuggcaggggaccagccgucuuccaccgccuucaucccucucauaucaacccgagugucucuucggaaaacccgccagccuccagagcggaucgccagcggcgccaucaccaagggcgugguccuggacagcaccgaggcgcugugccucgccaucucuaggaacuccgagcagauggccagccacagcgcagugcuggaggccggcaaaaaccucuacacguucugcgugagcuauguggauuccauccagcaaaugaggaacaaguuugccuuccgagaggccaucaacaaacuggagaauaaucuccgggagcuucagaucugcccggcgacagcaggcagugguccagcggccacucaggacuucagcaagcuccucaguucggugaaggaaaucagugacauagugcagagguagcagcagucaggggucaggugucaggcccgucggagcugccugcagcacaugcgggcucgcccauacccgugacaguggcugacaagggacuagugagucagcaccuuggcccaggagcucugcgccaggcagagcugagggcccuguggaguccagcucuacuaccuacguuugcaccgccugcccucccgcaccuuccuccuccccgcuccgucucuguccucgaauuuuaucuguggaguuccugcuccguggacugcagucggcaugccaggacccgccagccccgcucccaccuagugccccagacugagcucuccaggccaggugggaacggcugauguggacugucuuuuucauuuuuuucucucuggagccccuccucccccggcugggccuccuucuuccacuucuccaagaauggaagccugaacugaggccuugugugucaggcccucugccugcacucccuggccuugcccgucgugugcugaagacauguuucaagaaccgcauuucgggaagggcaugcacgggcaugcacacggcuggucacucugcccucugcugcugcccgggguggggugcacucgccauuuccucacgugcaggacagcucuugauuuggguggaaaacagggugcuaaagccaaccagccuuuggguccugggcaggugggagcugaaaaggaucgaggcauggggcauguccuuuccaucuguccacauccccagagcccagcucuugcucucuugugacgugcacugugaauccuggcaagaaagcuugagucucaaggguggcaggucacugucacugccgacaucccucccccagcagaauggaggcaggggacaagggaggcaguggcuaguggggugaacagcuggugccaaauagccccagacugggcccaggcaggucugcaagggcccagagugaaccguccuuucacacaucugggugcccugaaagggcccuuccccucccccacuccucuaagacaaaguagauucuuacaaggcccuuuccuuuggaacaagacagccuucacuuuucugaguucuugaagcauuucaaagcccugccucuguguagccgcccugagagagaauagagcugccacugggcaccugcgcacaggugggaggaaagggccuggccaguccugguccuggcugcacucuugaacugggcgaaugucuuauuuaauuaccgugagugacauagccucauguucugugggggucaucagggaggguuaggaaaaccacaaacggagccccugaaagccucacguauuucacagagcacgccugccaucuucuccccgaggcugccccaggccggagcccagauacgggggcugugacucugggcagggacccggggucuccuggaccuugacagagcagcuaacuccgagagcagugggcagguggccgccccugaggcuucacgccgggagaagccaccuucccaccccuucauaccgccucgugccagcagccucgcacaggcccuagcuuuacgcucaucaccuaaacuuguacuuuauuuuucugauagaaaugguuuccucuggaucguuuuaugcgguucuuacagcacaucaccucuuugcccccgacggcugugacgcagccggagggaggcacuagucaccgacagcggccuugaagacagagcaaagcgcccacccaggucccccgacugccugucuccaugagguacuggucccuuccuuuuguuaacgugaugugccacuauauuuuacacguaucucuugguaugcaucuuuuauagacgcucuuuucuaaguggcgugugcauagcguccugcccugcccccucgggggccugugguggcucccccucugcuucucgggguccagugcauuuuguuucuguauaugauucucugugguuuuuuuugaauccaaaucuguccucuguaguauuuuuuaaauaaaucaguguuuacauuagaa

SEQ ID NO: 27140 - RNA, 9220 nt, Homo sapiens
ggggggaggguggcggcucgaugggggagccgccuccagggggcccccccgcccugugcccacggcgcggccccuuuaagaggcccgccuggcuccgucauccgcgccgcggccaccuccccccggcccuccccuuccugcggcgcagagugcgggccgggcgggagugcggcgagagccggcuggcugagcuuagcguccgaggaggcggcggcggcggcggcggcacggcggcggcggggcuguggggcggugcggaagcgagaggcgaggagcgcgcgggccguggccagagucuggcggcggccuggcggagcggagagcagcgcccgcgccucgccgugcggaggagccccgcacacaauagcggcgcgcgcagcccgcgcccuuccccccggcgcgccccgccccgcgcgccgagcgccccgcuccgccucaccugccaccagggagugggcgggcauuguucgccgccgccgccgccgcgcgggccaugggggccgcccggcgcccggggccgggcuggcgaggcgccgcgccgccgcugagacgggccccgcgcgcagcccggcggcgcagguaaggccggccgcgccaugguggacccggugggcuucgcggaggcguggaaggcgcaguucccggacucagagcccccgcgcauggagcugcgcucagugggcgacaucgagcaggagcuggagcgcugcaaggccuccauucggcgccuggagcaggaggugaaccaggagcgcuuccgcaugaucuaccugcagacguugcuggccaaggaaaagaagagcuaugaccggcagcgauggggcuuccggcgcgcggcgcaggcccccgacggcgccuccgagccccgagcguccgcgucgcgcccgcagccagcgcccgccgacggagccgacccgccgcccgccgaggagcccgaggcccggcccgacggcgaggguucuccggguaaggccaggcccgggaccgcccgcaggcccggggcagccgcgucgggggaacgggacgaccggggaccccccgccagcguggcggcgcucagguccaacuucgagcggauccgcaagggccauggccagcccggggcggacgccgagaagcccuucuacgugaacgucgaguuucaccacgagcgcggccuggugaaggucaacgacaaagaggugucggaccgcaucagcucccugggcagccaggccaugcagauggagcgcaaaaagucccagcacggcgcgggcucgagcgugggggaugcauccaggcccccuuaccggggacgcuccucggagagcagcugcggcgucgacggcgacuacgaggacgccgaguugaacccccgcuuccugaaggacaaccugaucgacgccaauggcgguagcaggcccccuuggccgccccuggaguaccagcccuaccagagcaucuacgucgggggcaugauggaaggggagggcaagggcccgcuccugcgcagccagagcaccucugagcaggagaagcgccuuaccuggccccgcagguccuacuccccccggaguuuugaggauugcggaggcggcuauaccccggacugcagcuccaaugagaaccucaccuccagcgaggaggacuucuccucuggccaguccagccgcguguccccaagccccaccaccuaccgcauguuccgggacaaaagccgcucucccucgcagaacucgcaacaguccuucgacagcagcaguccccccacgccgcagugccauaagcggcaccggcacugcccgguugucguguccgaggccaccaucgugggcguccgcaagaccgggcagaucuggcccaacgauggcgagggcgccuuccauggagacgcagauggcucguucggaacaccaccuggauacggcugcgcugcagaccgggcagaggagcagcgccggcaccaagaugggcugcccuacauugaugacucgcccuccucaucgccccaccucagcagcaagggcaggggcagccgggaugcgcuggucucgggagcccuggaguccacuaaagcgagugagcuggacuuggaaaagggcuuggagaugagaaaauggguccugucgggaauccuggcuagcgaggagacuuaccugagccaccuggaggcacugcugcugcccaugaagccuuugaaagccgcugccaccaccucucagccggugcugacgagucagcagaucgagaccaucuucuucaaagugccugagcucuacgagauccacaaggaguucuaugaugggcucuucccccgcgugcagcaguggagccaccagcagcgggugggcgaccucuuccagaagcuggccagccagcuggguguguaccgggccuucguggacaacuacggaguugccauggaaauggcugagaagugcugucaggccaaugcucaguuugcagaaaucuccgagaaccugagagccagaagcaacaaagaugccaaggauccaacgaccaagaacucucuggaaacucugcucuacaagccuguggaccgugugacgaggagcacgcugguccuccaugacuugcugaagcacacuccugccagccacccugaccaccccuugcugcaggacgcccuccgcaucucacagaacuuccuguccagcaucaaugaggagaucacaccccgacggcaguccaugacggugaagaagggagagcaccggcagcugcugaaggacagcuucaugguggagcugguggagggggcccgcaagcugcgccacgucuuccuguucaccgaccugcuucucugcaccaagcucaagaagcagagcggaggcaaaacgcagcaguaugacugcaaaugguacauuccgcucacggaucucagcuuccagaugguggaugaacuggaggcagugcccaacaucccccuggugcccgaugaggagcuggacgcuuugaagaucaagaucucccagaucaagaaugacauccagagagagaagagggcgaacaagggcagcaaggcuacggagaggcugaagaagaagcugucggagcaggagucacugcugcugcuuaugucucccagcauggccuucagggugcacagccgcaacggcaagaguuacacguuccugaucuccucugacuaugagcgugcagaguggagggagaacauccgggagcagcagaagaaguguuucagaagcuucucccugacauccguggagcugcagaugccgaccaacucgugugugaaacuccagacuguccacagcauuccgcugaccaucaauaaggaagaugaugagucuccggggcucuauggguuucugaaugucaucguccacucagccacuggauuuaagcagaguucaaaucuguacugcacccuggagguggauuccuuuggguauuuugugaauaaagcaaagacgcgcgucuacagggacacagcugagccaaacuggaacgaggaauuugagauagagcuggagggcucccagacccugaggauacugugcuaugaaaaguguuacaacaagacgaagauccccaaggaggacggcgagagcacggacagacucauggggaagggccagguccagcuggacccgcaggcccugcaggacagagacuggcagcgcaccgucaucgccaugaaugggaucgaaguaaagcucucggucaaguucaacagcagggaguucagcuugaagaggaugccgucccgaaaacagacagggguccucggagucaagauugcuguggucaccaagagagagagguccaaggugcccuacaucgugcgccagugcguggaggagaucgagcgccgaggcauggaggaggugggcaucuaccgcguguccgguguggccacggacauccaggcacugaaggcagccuucgacgucaaagcccuucagcggccaguagcaucugacuuugagccucagggucugagugaagccgcucguuggaacuccaaggaaaaccuucucgcuggacccagugaaaaugaccccaaccuuuucguugcacuguaugauuuuguggccaguggagauaacacucuaagcauaacuaaaggugaaaagcuccgggucuuaggcuauaaucacaauggggaauggugugaagcccaaaccaaaaauggccaaggcugggucccaagcaacuacaucacgccagucaacagucuggagaaacacuccugguaccaugggccugugucccgcaaugccgcugagcaucugcugagcagcgggaucaauggcagcuucuuggugcgugagagugagagcaguccuggccagagguccaucucgcugagauacgaagggaggguguaccauuacaggaucaacacugcuucugauggcaagcucuacgucuccuccgagagccgcuucaacacccuggccgaguugguucaucaucauucaacgguggccgacgggcucaucaccacgcuccauuauccagccccaaagcgcaacaagcccucugucuauggugugucccccaacuacgacaagugggagauggaacgcacggacaucaccaugaagcacaagcugggcgggggccaguacggggagguguacgagggcguguggaagaaauacagccugacgguggccgugaagaccuugaaggaggacaccauggagguggaagaguucuugaaagaagcugcagucaugaaagagaucaaacacccuaaccuggugcagcuccuuggggucugcacccgggagcccccguucuauaucaucacugaguucaugaccuacgggaaccuccuggacuaccugagggagugcaaccggcaggaggugaacgccguggugcugcuguacauggccacucagaucucgucagccauggaguaccuggagaagaaaaacuucauccacagagaucuugcugcccgaaacugccugguaggggagaaccacuuggugaagguagcugauuuuggccugagcagguugaugacaggggacaccuacacagcccaugcuggagccaaguuccccaucaaauggacugcacccgagagccuggccuacaacaaguucuccaucaaguccgacgucugggcauuuggaguauugcuuugggaaauugcuaccuauggcauguccccuuacccgggaauugaccugucccagguguaugagcugcuagagaaggacuaccgcauggagcgcccagaaggcugcccagagaaggucuaugaacucaugcgagcauguuggcaguggaaucccucugaccggcccuccuuugcugaaauccaccaagccuuugaaacaauguuccaggaauccaguaucucagacgaaguggaaaaggagcuggggaaacaaggcguccguggggcugugaguaccuugcugcaggccccagagcugcccaccaagacgaggaccuccaggagagcugcagagcacagagacaccacugacgugccugagaugccucacuccaagggccagggagagagcgauccucuggaccaugagccugccgugucuccauugcucccucgaaaagagcgaggucccccggagggcggccugaaugaagaugagcgccuucuccccaaagacaaaaagaccaacuuguucagcgccuugaucaagaagaagaagaagacagccccaaccccucccaaacgcagcagcuccuuccgggagauggacggccagccggagcgcagaggggccggcgaggaagagggccgagacaucagcaacggggcacuggcuuucacccccuuggacacagcugacccagccaaguccccaaagcccagcaauggggcugggguccccaauggagcccuccgggaguccgggggcucaggcuuccggucuccccaccuguggaagaaguccagcacgcugaccagcagccgccuagccaccggcgaggaggagggcgguggcagcuccagcaagcgcuuccugcgcucuugcuccgccuccugcguuccccauggggccaaggacacggaguggaggucagucacgcugccucgggacuugcaguccacgggaagacaguuugacucguccacauuuggagggcacaaaagugagaagccggcucugccucggaagagggcaggggagaacaggucugaccaggugacccgaggcacaguaacgccuccccccaggcuggugaaaaagaaugaggaagcugcugaugaggucuucaaagacaucauggaguccagcccgggcuccagcccgcccaaccugacuccaaaaccccuccggcggcaggucaccguggccccugccucgggccucccccacaaggaagaagcuggaaagggcagugccuuagggaccccugcugcagcugagccagugacccccaccagcaaagcaggcucaggugcaccagggggcaccagcaagggccccgccgaggaguccagagugaggaggcacaagcacuccucugagucgccagggagggacaaggggaaauuguccaggcucaaaccugccccgccgcccccaccagcagccucugcagggaaggcuggaggaaagcccucgcagagcccgagccaggaggcggccggggaggcaguccugggcgcaaagacaaaagccacgagucugguugaugcugugaacagugacgcugccaagcccagccagccgggagagggccucaaaaagcccgugcucccggccacuccaaagccacaguccgccaagccgucggggacccccaucagcccagcccccguucccuccacguugccaucagcauccucggcccuggcaggggaccagccgucuuccaccgccuucaucccucucauaucaacccgagugucucuucggaaaacccgccagccuccagagcggaucgccagcggcgccaucaccaagggcgugguccuggacagcaccgaggcgcugugccucgccaucucuaggaacuccgagcagauggccagccacagcgcagugcuggaggccggcaaaaaccucuacacguucugcgugagcuauguggauuccauccagcaaaugaggaacaaguuugccuuccgagaggccaucaacaaacuggagaauaaucuccgggagcuucagaucugcccggcgacagcaggcagugguccagcggccacucaggacuucagcaagcuccucaguucggugaaggaaaucagugacauagugcagagguagcagcagucaggggucaggugucaggcccgucggagcugccugcagcacaugcgggcucgcccauacccgugacaguggcugacaagggacuagugagucagcaccuuggcccaggagcucugcgccaggcagagcugagggcccuguggaguccagcucuacuaccuacguuugcaccgccugcccucccgcaccuuccuccuccccgcuccgucucuguccucgaauuuuaucuguggaguuccugcuccguggacugcagucggcaugccaggacccgccagccccgcucccaccuagugccccagacugagcucuccaggccaggugggaacggcugauguggacugucuuuuucauuuuuuucucucuggagccccuccucccccggcugggccuccuucuuccacuucuccaagaauggaagccugaacugaggccuugugugucaggcccucugccugcacucccuggccuugcccgucgugugcugaagacauguuucaagaaccgcauuucgggaagggcaugcacgggcaugcacacggcuggucacucugcccucugcugcugcccgggguggggugcacucgccauuuccucacgugcaggacagcucuugauuuggguggaaaacagggugcuaaagccaaccagccuuuggguccugggcaggugggagcugaaaaggaucgaggcauggggcauguccuuuccaucuguccacauccccagagcccagcucuugcucucuugugacgugcacugugaauccuggcaagaaagcuugagucucaaggguggcaggucacugucacugccgacaucccucccccagcagaauggaggcaggggacaagggaggcaguggcuaguggggugaacagcuggugccaaauagccccagacugggcccaggcaggucugcaagggcccagagugaaccguccuuucacacaucugggugcccugaaagggcccuuccccucccccacuccucuaagacaaaguagauucuuacaaggcccuuuccuuuggaacaagacagccuucacuuuucugaguucuugaagcauuucaaagcccugccucuguguagccgcccugagagagaauagagcugccacugggcaccugcgcacaggugggaggaaagggccuggccaguccugguccuggcugcacucuugaacugggcgaaugucuuauuuaauuaccgugagugacauagccucauguucugugggggucaucagggaggguuaggaaaaccacaaacggagccccugaaagccucacguauuucacagagcacgccugccaucuucuccccgaggcugccccaggccggagcccagauacgggggcugugacucugggcagggacccggggucuccuggaccuugacagagcagcuaacuccgagagcagugggcagguggccgccccugaggcuucacgccgggagaagccaccuucccaccccuucauaccgccucgugccagcagccucgcacaggcccuagcuuuacgcucaucaccuaaacuuguacuuuauuuuucugauagaaaugguuuccucuggaucguuuuaugcgguucuuacagcacaucaccucuuugcccccgacggcugugacgcagccggagggaggcacuagucaccgacagcggccuugaagacagagcaaagcgcccacccaggucccccgacugccugucuccaugagguacuggucccuuccuuuuguuaacgugaugugccacuauauuuuacacguaucucuugguaugcaucuuuuauagacgcucuuuucuaaguggcgugugcauagcguccugcccugcccccucgggggccugugguggcucccccucugcuucucgggguccagugcauuuuguuucuguauaugauucucugugguuuuuuuugaauccaaaucuguccucuguaguauuuuuuaaauaaaucaguguuuacauu

SEQ ID NO: 27141 - RNA, 9224 nt, Homo sapiens
ggggggaggguggcggcucgaugggggagccgccuccagggggcccccccgcccugugcccacggcgcggccccuuuaagaggcccgccuggcuccgucauccgcgccgcggccaccuccccccggcccuccccuuccugcggcgcagagugcgggccgggcgggagugcggcgagagccggcuggcugagcuuagcguccgaggaggcggcggcggcggcggcggcacggcggcggcggggcuguggggcggugcggaagcgagaggcgaggagcgcgcgggccguggccagagucuggcggcggccuggcggagcggagagcagcgcccgcgccucgccgugcggaggagccccgcacacaauagcggcgcgcgcagcccgcgcccuuccccccggcgcgccccgccccgcgcgccgagcgccccgcuccgccucaccugccaccagggagugggcgggcauuguucgccgccgccgccgccgcgcgggccaugggggccgcccggcgcccggggccgggcuggcgaggcgccgcgccgccgcugagacgggccccgcgcgcagcccggcggcgcagguaaggccggccgcgccaugguggacccggugggcuucgcggaggcguggaaggcgcaguucccggacucagagcccccgcgcauggagcugcgcucagugggcgacaucgagcaggagcuggagcgcugcaaggccuccauucggcgccuggagcaggaggugaaccaggagcgcuuccgcaugaucuaccugcagacguugcuggccaaggaaaagaagagcuaugaccggcagcgauggggcuuccggcgcgcggcgcaggcccccgacggcgccuccgagccccgagcguccgcgucgcgcccgcagccagcgcccgccgacggagccgacccgccgcccgccgaggagcccgaggcccggcccgacggcgaggguucuccggguaaggccaggcccgggaccgcccgcaggcccggggcagccgcgucgggggaacgggacgaccggggaccccccgccagcguggcggcgcucagguccaacuucgagcggauccgcaagggccauggccagcccggggcggacgccgagaagcccuucuacgugaacgucgaguuucaccacgagcgcggccuggugaaggucaacgacaaagaggugucggaccgcaucagcucccugggcagccaggccaugcagauggagcgcaaaaagucccagcacggcgcgggcucgagcgugggggaugcauccaggcccccuuaccggggacgcuccucggagagcagcugcggcgucgacggcgacuacgaggacgccgaguugaacccccgcuuccugaaggacaaccugaucgacgccaauggcgguagcaggcccccuuggccgccccuggaguaccagcccuaccagagcaucuacgucgggggcaugauggaaggggagggcaagggcccgcuccugcgcagccagagcaccucugagcaggagaagcgccuuaccuggccccgcagguccuacuccccccggaguuuugaggauugcggaggcggcuauaccccggacugcagcuccaaugagaaccucaccuccagcgaggaggacuucuccucuggccaguccagccgcguguccccaagccccaccaccuaccgcauguuccgggacaaaagccgcucucccucgcagaacucgcaacaguccuucgacagcagcaguccccccacgccgcagugccauaagcggcaccggcacugcccgguugucguguccgaggccaccaucgugggcguccgcaagaccgggcagaucuggcccaacgauggcgagggcgccuuccauggagacgcagauggcucguucggaacaccaccuggauacggcugcgcugcagaccgggcagaggagcagcgccggcaccaagaugggcugcccuacauugaugacucgcccuccucaucgccccaccucagcagcaagggcaggggcagccgggaugcgcuggucucgggagcccuggaguccacuaaagcgagugagcuggacuuggaaaagggcuuggagaugagaaaauggguccugucgggaauccuggcuagcgaggagacuuaccugagccaccuggaggcacugcugcugcccaugaagccuuugaaagccgcugccaccaccucucagccggugcugacgagucagcagaucgagaccaucuucuucaaagugccugagcucuacgagauccacaaggaguucuaugaugggcucuucccccgcgugcagcaguggagccaccagcagcgggugggcgaccucuuccagaagcuggccagccagcuggguguguaccgggccuucguggacaacuacggaguugccauggaaauggcugagaagugcugucaggccaaugcucaguuugcagaaaucuccgagaaccugagagccagaagcaacaaagaugccaaggauccaacgaccaagaacucucuggaaacucugcucuacaagccuguggaccgugugacgaggagcacgcugguccuccaugacuugcugaagcacacuccugccagccacccugaccaccccuugcugcaggacgcccuccgcaucucacagaacuuccuguccagcaucaaugaggagaucacaccccgacggcaguccaugacggugaagaagggagagcaccggcagcugcugaaggacagcuucaugguggagcugguggagggggcccgcaagcugcgccacgucuuccuguucaccgaccugcuucucugcaccaagcucaagaagcagagcggaggcaaaacgcagcaguaugacugcaaaugguacauuccgcucacggaucucagcuuccagaugguggaugaacuggaggcagugcccaacaucccccuggugcccgaugaggagcuggacgcuuugaagaucaagaucucccagaucaagaaugacauccagagagagaagagggcgaacaagggcagcaaggcuacggagaggcugaagaagaagcugucggagcaggagucacugcugcugcuuaugucucccagcauggccuucagggugcacagccgcaacggcaagaguuacacguuccugaucuccucugacuaugagcgugcagaguggagggagaacauccgggagcagcagaagaaguguuucagaagcuucucccugacauccguggagcugcagaugccgaccaacucgugugugaaacuccagacuguccacagcauuccgcugaccaucaauaaggaagaugaugagucuccggggcucuauggguuucugaaugucaucguccacucagccacuggauuuaagcagaguucaaaucuguacugcacccuggagguggauuccuuuggguauuuugugaauaaagcaaagacgcgcgucuacagggacacagcugagccaaacuggaacgaggaauuugagauagagcuggagggcucccagacccugaggauacugugcuaugaaaaguguuacaacaagacgaagauccccaaggaggacggcgagagcacggacagacucauggggaagggccagguccagcuggacccgcaggcccugcaggacagagacuggcagcgcaccgucaucgccaugaaugggaucgaaguaaagcucucggucaaguucaacagcagggaguucagcuugaagaggaugccgucccgaaaacagacagggguccucggagucaagauugcuguggucaccaagagagagagguccaaggugcccuacaucgugcgccagugcguggaggagaucgagcgccgaggcauggaggaggugggcaucuaccgcguguccgguguggccacggacauccaggcacugaaggcagccuucgacgucaaagcccuucagcggccaguagcaucugacuuugagccucagggucugagugaagccgcucguuggaacuccaaggaaaaccuucucgcuggacccagugaaaaugaccccaaccuuuucguugcacuguaugauuuuguggccaguggagauaacacucuaagcauaacuaaaggugaaaagcuccgggucuuaggcuauaaucacaauggggaauggugugaagcccaaaccaaaaauggccaaggcugggucccaagcaacuacaucacgccagucaacagucuggagaaacacuccugguaccaugggccugugucccgcaaugccgcugagcaucugcugagcagcgggaucaauggcagcuucuuggugcgugagagugagagcaguccuggccagagguccaucucgcugagauacgaagggaggguguaccauuacaggaucaacacugcuucugauggcaagcucuacgucuccuccgagagccgcuucaacacccuggccgaguugguucaucaucauucaacgguggccgacgggcucaucaccacgcuccauuauccagccccaaagcgcaacaagcccucugucuauggugugucccccaacuacgacaagugggagauggaacgcacggacaucaccaugaagcacaagcugggcgggggccaguacggggagguguacgagggcguguggaagaaauacagccugacgguggccgugaagaccuugaaggaggacaccauggagguggaagaguucuugaaagaagcugcagucaugaaagagaucaaacacccuaaccuggugcagcuccuuggggucugcacccgggagcccccguucuauaucaucacugaguucaugaccuacgggaaccuccuggacuaccugagggagugcaaccggcaggaggugaacgccguggugcugcuguacauggccacucagaucucgucagccauggaguaccuggagaagaaaaacuucauccacagagaucuugcugcccgaaacugccugguaggggagaaccacuuggugaagguagcugauuuuggccugagcagguugaugacaggggacaccuacacagcccaugcuggagccaaguuccccaucaaauggacugcacccgagagccuggccuacaacaaguucuccaucaaguccgacgucugggcauuuggaguauugcuuugggaaauugcuaccuauggcauguccccuuacccgggaauugaccugucccagguguaugagcugcuagagaaggacuaccgcauggagcgcccagaaggcugcccagagaaggucuaugaacucaugcgagcauguuggcaguggaaucccucugaccggcccuccuuugcugaaauccaccaagccuuugaaacaauguuccaggaauccaguaucucagacgaaguggaaaaggagcuggggaaacaaggcguccguggggcugugaguaccuugcugcaggccccagagcugcccaccaagacgaggaccuccaggagagcugcagagcacagagacaccacugacgugccugagaugccucacuccaagggccagggagagagcgauccucuggaccaugagccugccgugucuccauugcucccucgaaaagagcgaggucccccggagggcggccugaaugaagaugagcgccuucuccccaaagacaaaaagaccaacuuguucagcgccuugaucaagaagaagaagaagacagccccaaccccucccaaacgcagcagcuccuuccgggagauggacggccagccggagcgcagaggggccggcgaggaagagggccgagacaucagcaacggggcacuggcuuucacccccuuggacacagcugacccagccaaguccccaaagcccagcaauggggcugggguccccaauggagcccuccgggaguccgggggcucaggcuuccggucuccccaccuguggaagaaguccagcacgcugaccagcagccgccuagccaccggcgaggaggagggcgguggcagcuccagcaagcgcuuccugcgcucuugcuccgccuccugcguuccccauggggccaaggacacggaguggaggucagucacgcugccucgggacuugcaguccacgggaagacaguuugacucguccacauuuggagggcacaaaagugagaagccggcucugccucggaagagggcaggggagaacaggucugaccaggugacccgaggcacaguaacgccuccccccaggcuggugaaaaagaaugaggaagcugcugaugaggucuucaaagacaucauggaguccagcccgggcuccagcccgcccaaccugacuccaaaaccccuccggcggcaggucaccguggccccugccucgggccucccccacaaggaagaagcuggaaagggcagugccuuagggaccccugcugcagcugagccagugacccccaccagcaaagcaggcucaggugcaccagggggcaccagcaagggccccgccgaggaguccagagugaggaggcacaagcacuccucugagucgccagggagggacaaggggaaauuguccaggcucaaaccugccccgccgcccccaccagcagccucugcagggaaggcuggaggaaagcccucgcagagcccgagccaggaggcggccggggaggcaguccugggcgcaaagacaaaagccacgagucugguugaugcugugaacagugacgcugccaagcccagccagccgggagagggccucaaaaagcccgugcucccggccacuccaaagccacaguccgccaagccgucggggacccccaucagcccagcccccguucccuccacguugccaucagcauccucggcccuggcaggggaccagccgucuuccaccgccuucaucccucucauaucaacccgagugucucuucggaaaacccgccagccuccagagcggaucgccagcggcgccaucaccaagggcgugguccuggacagcaccgaggcgcugugccucgccaucucuaggaacuccgagcagauggccagccacagcgcagugcuggaggccggcaaaaaccucuacacguucugcgugagcuauguggauuccauccagcaaaugaggaacaaguuugccuuccgagaggccaucaacaaacuggagaauaaucuccgggagcuucagaucugcccggcgacagcaggcagugguccagcggccacucaggacuucagcaagcuccucaguucggugaaggaaaucagugacauagugcagagguagcagcagucaggggucaggugucaggcccgucggagcugccugcagcacaugcgggcucgcccauacccgugacaguggcugacaagggacuagugagucagcaccuuggcccaggagcucugcgccaggcagagcugagggcccuguggaguccagcucuacuaccuacguuugcaccgccugcccucccgcaccuuccuccuccccgcuccgucucuguccucgaauuuuaucuguggaguuccugcuccguggacugcagucggcaugccaggacccgccagccccgcucccaccuagugccccagacugagcucuccaggccaggugggaacggcugauguggacugucuuuuucauuuuuuucucucuggagccccuccucccccggcugggccuccuucuuccacuucuccaagaauggaagccugaacugaggccuugugugucaggcccucugccugcacucccuggccuugcccgucgugugcugaagacauguuucaagaaccgcauuucgggaagggcaugcacgggcaugcacacggcuggucacucugcccucugcugcugcccgggguggggugcacucgccauuuccucacgugcaggacagcucuugauuuggguggaaaacagggugcuaaagccaaccagccuuuggguccugggcaggugggagcugaaaaggaucgaggcauggggcauguccuuuccaucuguccacauccccagagcccagcucuugcucucuugugacgugcacugugaauccuggcaagaaagcuugagucucaaggguggcaggucacugucacugccgacaucccucccccagcagaauggaggcaggggacaagggaggcaguggcuaguggggugaacagcuggugccaaauagccccagacugggcccaggcaggucugcaagggcccagagugaaccguccuuucacacaucugggugcccugaaagggcccuuccccucccccacuccucuaagacaaaguagauucuuacaaggcccuuuccuuuggaacaagacagccuucacuuuucugaguucuugaagcauuucaaagcccugccucuguguagccgcccugagagagaauagagcugccacugggcaccugcgcacaggugggaggaaagggccuggccaguccugguccuggcugcacucuugaacugggcgaaugucuuauuuaauuaccgugagugacauagccucauguucugugggggucaucagggaggguuaggaaaaccacaaacggagccccugaaagccucacguauuucacagagcacgccugccaucuucuccccgaggcugccccaggccggagcccagauacgggggcugugacucugggcagggacccggggucuccuggaccuugacagagcagcuaacuccgagagcagugggcagguggccgccccugaggcuucacgccgggagaagccaccuucccaccccuucauaccgccucgugccagcagccucgcacaggcccuagcuuuacgcucaucaccuaaacuuguacuuuauuuuucugauagaaaugguuuccucuggaucguuuuaugcgguucuuacagcacaucaccucuuugcccccgacggcugugacgcagccggagggaggcacuagucaccgacagcggccuugaagacagagcaaagcgcccacccaggucccccgacugccugucuccaugagguacuggucccuuccuuuuguuaacgugaugugccacuauauuuuacacguaucucuugguaugcaucuuuuauagacgcucuuuucuaaguggcgugugcauagcguccugcccugcccccucgggggccugugguggcucccccucugcuucucgggguccagugcauuuuguuucuguauaugauucucugugguuuuuuuugaauccaaaucuguccucuguaguauuuuuuaaauaaaucaguguuuacauuagaa

SEQ ID NO: 27142 - RNA, 9092 nt, Homo sapiens
ggggggaggguggcggcucgaugggggagccgccuccagggggcccccccgcccugugcccacggcgcggccccuuuaagaggcccgccuggcuccgucauccgcgccgcggccaccuccccccggcccuccccuuccugcggcgcagagugcgggccgggcgggagugcggcgagagccggcuggcugagcuuagcguccgaggaggcggcggcggcggcggcggcacggcggcggcggggcuguggggcggugcggaagcgagaggcgaggagcgcgcgggccguggccagagucuggcggcggccuggcggagcggagagcagcgcccgcgccucgccgugcggaggagccccgcacacaauagcggcgcgcgcagcccgcgcccuuccccccggcgcgccccgccccgcgcgccgagcgccccgcuccgccucaccugccaccagggagugggcgggcauuguucgccgccgccgccgccgcgcgggccaugggggccgcccggcgcccggggccgggcuggcgaggcgccgcgccgccgcugagacgggccccgcgcgcagcccggcggcgcagguaaggccggccgcgccaugguggacccggugggcuucgcggaggcguggaaggcgcaguucccggacucagagcccccgcgcauggagcugcgcucagugggcgacaucgagcaggagcuggagcgcugcaaggccuccauucggcgccuggagcaggaggugaaccaggagcgcuuccgcaugaucuaccugcagacguugcuggccaaggaaaagaagagcuaugaccggcagcgauggggcuuccggcgcgcggcgcaggcccccgacggcgccuccgagccccgagcguccgcgucgcgcccgcagccagcgcccgccgacggagccgacccgccgcccgccgaggagcccgaggcccggcccgacggcgaggguucuccggguaaggccaggcccgggaccgcccgcaggcccggggcagccgcgucgggggaacgggacgaccggggaccccccgccagcguggcggcgcucagguccaacuucgagcggauccgcaagggccauggccagcccggggcggacgccgagaagcccuucuacgugaacgucgaguuucaccacgagcgcggccuggugaaggucaacgacaaagaggugucggaccgcaucagcucccugggcagccaggccaugcagauggagcgcaaaaagucccagcacggcgcgggcucgagcgugggggaugcauccaggcccccuuaccggggacgcuccucggagagcagcugcggcgucgacggcgacuacgaggacgccgaguugaacccccgcuuccugaaggacaaccugaucgacgccaauggcgguagcaggcccccuuggccgccccuggaguaccagcccuaccagagcaucuacgucgggggcaugauggaaggggagggcaagggcccgcuccugcgcagccagagcaccucugagcaggagaagcgccuuaccuggccccgcagguccuacuccccccggaguuuugaggauugcggaggcggcuauaccccggacugcagcuccaaugagaaccucaccuccagcgaggaggacuucuccucuggccaguccagccgcguguccccaagccccaccaccuaccgcauguuccgggacaaaagccgcucucccucgcagaacucgcaacaguccuucgacagcagcaguccccccacgccgcagugccauaagcggcaccggcacugcccgguugucguguccgaggccaccaucgugggcguccgcaagaccgggcagaucuggcccaacgauggcgagggcgccuuccauggagacgcagauggcucguucggaacaccaccuggauacggcugcgcugcagaccgggcagaggagcagcgccggcaccaagaugggcugcccuacauugaugacucgcccuccucaucgccccaccucagcagcaagggcaggggcagccgggaugcgcuggucucgggagcccuggaguccacuaaagcgagugagcuggacuuggaaaagggcuuggagaugagaaaauggguccugucgggaauccuggcuagcgaggagacuuaccugagccaccuggaggcacugcugcugcccaugaagccuuugaaagccgcugccaccaccucucagccggugcugacgagucagcagaucgagaccaucuucuucaaagugccugagcucuacgagauccacaaggaguucuaugaugggcucuucccccgcgugcagcaguggagccaccagcagcgggugggcgaccucuuccagaagcuggccagccagcuggguguguaccgggccuucguggacaacuacggaguugccauggaaauggcugagaagugcugucaggccaaugcucaguuugcagaaaucuccgagaaccugagagccagaagcaacaaagaugccaaggauccaacgaccaagaacucucuggaaacucugcucuacaagccuguggaccgugugacgaggagcacgcugguccuccaugacuugcugaagcacacuccugccagccacccugaccaccccuugcugcaggacgcccuccgcaucucacagaacuuccuguccagcaucaaugaggagaucacaccccgacggcaguccaugacggugaagaagggagagcaccggcagcugcugaaggacagcuucaugguggagcugguggagggggcccgcaagcugcgccacgucuuccuguucaccgaccugcuucucugcaccaagcucaagaagcagagcggaggcaaaacgcagcaguaugacugcaaaugguacauuccgcucacggaucucagcuuccagaugguggaugaacuggaggcagugcccaacaucccccuggugcccgaugaggagcuggacgcuuugaagaucaagaucucccagaucaagaaugacauccagagagagaagagggcgaacaagggcagcaaggcuacggagaggcugaagaagaagcugucggagcaggagucacugcugcugcuuaugucucccagcauggccuucagggugcacagccgcaacggcaagaguuacacguuccugaucuccucugacuaugagcgugcagaguggagggagaacauccgggagcagcagaagaaguguuucagaagcuucucccugacauccguggagcugcagaugccgaccaacucgugugugaaacuccagacuguccacagcauuccgcugaccaucaauaaggaagaugaugagucuccggggcucuauggguuucugaaugucaucguccacucagccacuggauuuaagcagaguucaaaucuguacugcacccuggagguggauuccuuuggguauuuugugaauaaagcaaagacgcgcgucuacagggacacagcugagccaaacuggaacgagcuggacccgcaggcccugcaggacagagacuggcagcgcaccgucaucgccaugaaugggaucgaaguaaagcucucggucaaguucaacagcagggaguucagcuugaagaggaugccgucccgaaaacagacagggguccucggagucaagauugcuguggucaccaagagagagagguccaaggugcccuacaucgugcgccagugcguggaggagaucgagcgccgaggcauggaggaggugggcaucuaccgcguguccgguguggccacggacauccaggcacugaaggcagccuucgacgucaaagcccuucagcggccaguagcaucugacuuugagccucagggucugagugaagccgcucguuggaacuccaaggaaaaccuucucgcuggacccagugaaaaugaccccaaccuuuucguugcacuguaugauuuuguggccaguggagauaacacucuaagcauaacuaaaggugaaaagcuccgggucuuaggcuauaaucacaauggggaauggugugaagcccaaaccaaaaauggccaaggcugggucccaagcaacuacaucacgccagucaacagucuggagaaacacuccugguaccaugggccugugucccgcaaugccgcugagcaucugcugagcagcgggaucaauggcagcuucuuggugcgugagagugagagcaguccuggccagagguccaucucgcugagauacgaagggaggguguaccauuacaggaucaacacugcuucugauggcaagcucuacgucuccuccgagagccgcuucaacacccuggccgaguugguucaucaucauucaacgguggccgacgggcucaucaccacgcuccauuauccagccccaaagcgcaacaagcccucugucuauggugugucccccaacuacgacaagugggagauggaacgcacggacaucaccaugaagcacaagcugggcgggggccaguacggggagguguacgagggcguguggaagaaauacagccugacgguggccgugaagaccuugaaggaggacaccauggagguggaagaguucuugaaagaagcugcagucaugaaagagaucaaacacccuaaccuggugcagcuccuuggggucugcacccgggagcccccguucuauaucaucacugaguucaugaccuacgggaaccuccuggacuaccugagggagugcaaccggcaggaggugaacgccguggugcugcuguacauggccacucagaucucgucagccauggaguaccuggagaagaaaaacuucauccacagagaucuugcugcccgaaacugccugguaggggagaaccacuuggugaagguagcugauuuuggccugagcagguugaugacaggggacaccuacacagcccaugcuggagccaaguuccccaucaaauggacugcacccgagagccuggccuacaacaaguucuccaucaaguccgacgucugggcauuuggaguauugcuuugggaaauugcuaccuauggcauguccccuuacccgggaauugaccugucccagguguaugagcugcuagagaaggacuaccgcauggagcgcccagaaggcugcccagagaaggucuaugaacucaugcgagcauguuggcaguggaaucccucugaccggcccuccuuugcugaaauccaccaagccuuugaaacaauguuccaggaauccaguaucucagacgaaguggaaaaggagcuggggaaacaaggcguccguggggcugugaguaccuugcugcaggccccagagcugcccaccaagacgaggaccuccaggagagcugcagagcacagagacaccacugacgugccugagaugccucacuccaagggccagggagagagcgauccucuggaccaugagccugccgugucuccauugcucccucgaaaagagcgaggucccccggagggcggccugaaugaagaugagcgccuucuccccaaagacaaaaagaccaacuuguucagcgccuugaucaagaagaagaagaagacagccccaaccccucccaaacgcagcagcuccuuccgggagauggacggccagccggagcgcagaggggccggcgaggaagagggccgagacaucagcaacggggcacuggcuuucacccccuuggacacagcugacccagccaaguccccaaagcccagcaauggggcugggguccccaauggagcccuccgggaguccgggggcucaggcuuccggucuccccaccuguggaagaaguccagcacgcugaccagcagccgccuagccaccggcgaggaggagggcgguggcagcuccagcaagcgcuuccugcgcucuugcuccgccuccugcguuccccauggggccaaggacacggaguggaggucagucacgcugccucgggacuugcaguccacgggaagacaguuugacucguccacauuuggagggcacaaaagugagaagccggcucugccucggaagagggcaggggagaacaggucugaccaggugacccgaggcacaguaacgccuccccccaggcuggugaaaaagaaugaggaagcugcugaugaggucuucaaagacaucauggaguccagcccgggcuccagcccgcccaaccugacuccaaaaccccuccggcggcaggucaccguggccccugccucgggccucccccacaaggaagaagcuggaaagggcagugccuuagggaccccugcugcagcugagccagugacccccaccagcaaagcaggcucaggugcaccagggggcaccagcaagggccccgccgaggaguccagagugaggaggcacaagcacuccucugagucgccagggagggacaaggggaaauuguccaggcucaaaccugccccgccgcccccaccagcagccucugcagggaaggcuggaggaaagcccucgcagagcccgagccaggaggcggccggggaggcaguccugggcgcaaagacaaaagccacgagucugguugaugcugugaacagugacgcugccaagcccagccagccgggagagggccucaaaaagcccgugcucccggccacuccaaagccacaguccgccaagccgucggggacccccaucagcccagcccccguucccuccacguugccaucagcauccucggcccuggcaggggaccagccgucuuccaccgccuucaucccucucauaucaacccgagugucucuucggaaaacccgccagccuccagagcggaucgccagcggcgccaucaccaagggcgugguccuggacagcaccgaggcgcugugccucgccaucucuaggaacuccgagcagauggccagccacagcgcagugcuggaggccggcaaaaaccucuacacguucugcgugagcuauguggauuccauccagcaaaugaggaacaaguuugccuuccgagaggccaucaacaaacuggagaauaaucuccgggagcuucagaucugcccggcgacagcaggcagugguccagcggccacucaggacuucagcaagcuccucaguucggugaaggaaaucagugacauagugcagagguagcagcagucaggggucaggugucaggcccgucggagcugccugcagcacaugcgggcucgcccauacccgugacaguggcugacaagggacuagugagucagcaccuuggcccaggagcucugcgccaggcagagcugagggcccuguggaguccagcucuacuaccuacguuugcaccgccugcccucccgcaccuuccuccuccccgcuccgucucuguccucgaauuuuaucuguggaguuccugcuccguggacugcagucggcaugccaggacccgccagccccgcucccaccuagugccccagacugagcucuccaggccaggugggaacggcugauguggacugucuuuuucauuuuuuucucucuggagccccuccucccccggcugggccuccuucuuccacuucuccaagaauggaagccugaacugaggccuugugugucaggcccucugccugcacucccuggccuugcccgucgugugcugaagacauguuucaagaaccgcauuucgggaagggcaugcacgggcaugcacacggcuggucacucugcccucugcugcugcccgggguggggugcacucgccauuuccucacgugcaggacagcucuugauuuggguggaaaacagggugcuaaagccaaccagccuuuggguccugggcaggugggagcugaaaaggaucgaggcauggggcauguccuuuccaucuguccacauccccagagcccagcucuugcucucuugugacgugcacugugaauccuggcaagaaagcuugagucucaaggguggcaggucacugucacugccgacaucccucccccagcagaauggaggcaggggacaagggaggcaguggcuaguggggugaacagcuggugccaaauagccccagacugggcccaggcaggucugcaagggcccagagugaaccguccuuucacacaucugggugcccugaaagggcccuuccccucccccacuccucuaagacaaaguagauucuuacaaggcccuuuccuuuggaacaagacagccuucacuuuucugaguucuugaagcauuucaaagcccugccucuguguagccgcccugagagagaauagagcugccacugggcaccugcgcacaggugggaggaaagggccuggccaguccugguccuggcugcacucuugaacugggcgaaugucuuauuuaauuaccgugagugacauagccucauguucugugggggucaucagggaggguuaggaaaaccacaaacggagccccugaaagccucacguauuucacagagcacgccugccaucuucuccccgaggcugccccaggccggagcccagauacgggggcugugacucugggcagggacccggggucuccuggaccuugacagagcagcuaacuccgagagcagugggcagguggccgccccugaggcuucacgccgggagaagccaccuucccaccccuucauaccgccucgugccagcagccucgcacaggcccuagcuuuacgcucaucaccuaaacuuguacuuuauuuuucugauagaaaugguuuccucuggaucguuuuaugcgguucuuacagcacaucaccucuuugcccccgacggcugugacgcagccggagggaggcacuagucaccgacagcggccuugaagacagagcaaagcgcccacccaggucccccgacugccugucuccaugagguacuggucccuuccuuuuguuaacgugaugugccacuauauuuuacacguaucucuugguaugcaucuuuuauagacgcucuuuucuaaguggcgugugcauagcguccugcccugcccccucgggggccugugguggcucccccucugcuucucgggguccagugcauuuuguuucuguauaugauucucugugguuuuuuuugaauccaaaucuguccucuguaguauuuuuuaaauaaaucaguguuuacauuagaa

SEQ ID NO: 27143 - RNA, 19 nt, Artificial Sequence
  Description of Artificial Sequence: Synthetic oligonucleotide
guaccagcccuaccagagc

SEQ ID NO: 27144 - RNA, 19 nt, Artificial Sequence
  Description of Artificial Sequence: Synthetic oligonucleotide
caucuacgucgggggcaug

SEQ ID NO: 27145 - RNA, 19 nt, Artificial Sequence
  Description of Artificial Sequence: Synthetic oligonucleotide
gauggaaggggagggcaag

SEQ ID NO: 27146 - RNA, 19 nt, Artificial Sequence
  Description of Artificial Sequence: Synthetic oligonucleotide
gggcccgcuccugcgcagc

SEQ ID NO: 27147 - RNA, 19 nt, Artificial Sequence
  Description of Artificial Sequence: Synthetic oligonucleotide
ccagagcaccucugagcag

SEQ ID NO: 27148 - RNA, 19 nt, Artificial Sequence
  Description of Artificial Sequence: Synthetic oligonucleotide
ggagaagcgccuuaccugg

SEQ ID NO: 27149 - RNA, 19 nt, Artificial Sequence
  Description of Artificial Sequence: Synthetic oligonucleotide
gccccgcagguccuacucc

SEQ ID NO: 27150 - RNA, 19 nt, Artificial Sequence
  Description of Artificial Sequence: Synthetic oligonucleotide
cccccggaguuuugaggau

SEQ ID NO: 27151 - RNA, 19 nt, Artificial Sequence
  Description of Artificial Sequence: Synthetic oligonucleotide
uugcggaggcggcuauacc

SEQ ID NO: 27152 - RNA, 19 nt, Artificial Sequence
  Description of Artificial Sequence: Synthetic oligonucleotide
cccggacugcagcuccaau

SEQ ID NO: 27153 - RNA, 19 nt, Artificial Sequence
  Description of Artificial Sequence: Synthetic oligonucleotide
ugagaaccucaccuccagc

SEQ ID NO: 27154 - RNA, 19 nt, Artificial Sequence
  Description of Artificial Sequence: Synthetic oligonucleotide
cgaggaggacuucuccucu

SEQ ID NO: 27155 - RNA, 19 nt, Artificial Sequence
  Description of Artificial Sequence: Synthetic oligonucleotide
uggccaguccagccgcgug

SEQ ID NO: 27156 - RNA, 19 nt, Artificial Sequence
  Description of Artificial Sequence: Synthetic oligonucleotide
guccccaagccccaccacc

SEQ ID NO: 27157 - RNA, 19 nt, Artificial Sequence
  Description of Artificial Sequence: Synthetic oligonucleotide
cuaccgcauguuccgggac

SEQ ID NO: 27158 - RNA, 19 nt, Artificial Sequence
  Description of Artificial Sequence: Synthetic oligonucleotide
caaaagccgcucucccucg

SEQ ID NO: 27159 - RNA, 19 nt, Artificial Sequence
  Description of Artificial Sequence: Synthetic oligonucleotide
gcagaacucgcaacagucc

SEQ ID NO: 27160 - RNA, 19 nt, Artificial Sequence
  Description of Artificial Sequence: Synthetic oligonucleotide
cuucgacagcagcaguccc

SEQ ID NO: 27161 - RNA, 19 nt, Artificial Sequence
  Description of Artificial Sequence: Synthetic oligonucleotide
ccccacgccgcagugccau

SEQ ID NO: 27162 - RNA, 19 nt, Artificial Sequence
  Description of Artificial Sequence: Synthetic oligonucleotide
uaagcggcaccggcacugc

SEQ ID NO: 27163 - RNA, 19 nt, Artificial Sequence
  Description of Artificial Sequence: Synthetic oligonucleotide
cccgguugucguguccgag

SEQ ID NO: 27164 - RNA, 19 nt, Artificial Sequence
  Description of Artificial Sequence: Synthetic oligonucleotide
ggccaccaucgugggcguc

SEQ ID NO: 27165 - RNA, 19 nt, Artificial Sequence
  Description of Artificial Sequence: Synthetic oligonucleotide
ccgcaagaccgggcagauc

SEQ ID NO: 27166 - RNA, 19 nt, Artificial Sequence
  Description of Artificial Sequence: Synthetic oligonucleotide
cuggcccaacgauggcgag

SEQ ID NO: 27167 - RNA, 19 nt, Artificial Sequence
  Description of Artificial Sequence: Synthetic oligonucleotide
gggcgccuuccauggagac

SEQ ID NO: 27168 - RNA, 19 nt, Artificial Sequence
  Description of Artificial Sequence: Synthetic oligonucleotide
cuuccauggagacgcagaa

SEQ ID NO: 27169 - RNA, 19 nt, Artificial Sequence
  Description of Artificial Sequence: Synthetic oligonucleotide
uuccauggagacgcagaag

SEQ ID NO: 27170 - RNA, 19 nt, Artificial Sequence
  Description of Artificial Sequence: Synthetic oligonucleotide
uccauggagacgcagaagc

SEQ ID NO: 27171 - RNA, 19 nt, Artificial Sequence
  Description of Artificial Sequence: Synthetic oligonucleotide
ccauggagacgcagaagcc

SEQ ID NO: 27172 - RNA, 19 nt, Artificial Sequence
  Description of Artificial Sequence: Synthetic oligonucleotide
cauggagacgcagaagccc

SEQ ID NO: 27173 - RNA, 19 nt, Artificial Sequence
  Description of Artificial Sequence: Synthetic oligonucleotide
auggagacgcagaagcccu

SEQ ID NO: 27174 - RNA, 19 nt, Artificial Sequence
  Description of Artificial Sequence: Synthetic oligonucleotide
uggagacgcagaagcccuu

SEQ ID NO: 27175 - RNA, 19 nt, Artificial Sequence
  Description of Artificial Sequence: Synthetic oligonucleotide
ggagacgcagaagcccuuc

SEQ ID NO: 27176 - RNA, 19 nt, Artificial Sequence
  Description of Artificial Sequence: Synthetic oligonucleotide
gagacgcagaagcccuuca

SEQ ID NO: 27177 - RNA, 19 nt, Artificial Sequence
  Description of Artificial Sequence: Synthetic oligonucleotide
agacgcagaagcccuucag

SEQ ID NO: 27178 - RNA, 19 nt, Artificial Sequence
  Description of Artificial Sequence: Synthetic oligonucleotide
gacgcagaagcccuucagc

SEQ ID NO: 27179 - RNA, 19 nt, Artificial Sequence
  Description of Artificial Sequence: Synthetic oligonucleotide
acgcagaagcccuucagcg

SEQ ID NO: 27180 - RNA, 19 nt, Artificial Sequence
  Description of Artificial Sequence: Synthetic oligonucleotide
cgcagaagcccuucagcgg

SEQ ID NO: 27181 - RNA, 19 nt, Artificial Sequence
  Description of Artificial Sequence: Synthetic oligonucleotide
gcagaagcccuucagcggc

SEQ ID NO: 27182 - RNA, 19 nt, Artificial Sequence
  Description of Artificial Sequence: Synthetic oligonucleotide
cagaagcccuucagcggcc

SEQ ID NO: 27183 - RNA, 19 nt, Artificial Sequence
  Description of Artificial Sequence: Synthetic oligonucleotide
agaagcccuucagcggcca

SEQ ID NO: 27184 - RNA, 19 nt, Artificial Sequence
  Description of Artificial Sequence: Synthetic oligonucleotide
gaagcccuucagcggccag

SEQ ID NO: 27185 - RNA, 19 nt, Artificial Sequence
  Description of Artificial Sequence: Synthetic oligonucleotide
aagcccuucagcggccagu

SEQ ID NO: 27186 - RNA, 19 nt, Artificial Sequence
  Description of Artificial Sequence: Synthetic oligonucleotide
agcccuucagcggccagua

SEQ ID NO: 27187 - RNA, 19 nt, Artificial Sequence
  Description of Artificial Sequence: Synthetic oligonucleotide
gcccuucagcggccaguag

SEQ ID NO: 27188 - RNA, 19 nt, Artificial Sequence
  Description of Artificial Sequence: Synthetic oligonucleotide
cccuucagcggccaguagc

SEQ ID NO: 27189 - RNA, 19 nt, Artificial Sequence
  Description of Artificial Sequence: Synthetic oligonucleotide
ccuucagcggccaguagca

SEQ ID NO: 27190 - RNA, 19 nt, Artificial Sequence
  Description of Artificial Sequence: Synthetic oligonucleotide
cuucagcggccaguagcau

SEQ ID NO: 27191 - RNA, 19 nt, Artificial Sequence
  Description of Artificial Sequence: Synthetic oligonucleotide
uucagcggccaguagcauc

SEQ ID NO: 27192 - RNA, 19 nt, Artificial Sequence
  Description of Artificial Sequence: Synthetic oligonucleotide
ucagcggccaguagcaucu

SEQ ID NO: 27193 - RNA, 19 nt, Artificial Sequence
  Description of Artificial Sequence: Synthetic oligonucleotide
cagcggccaguagcaucug

SEQ ID NO: 27194 - RNA, 19 nt, Artificial Sequence
  Description of Artificial Sequence: Synthetic oligonucleotide
agcggccaguagcaucuga

SEQ ID NO: 27195 - RNA, 19 nt, Artificial Sequence
  Description of Artificial Sequence: Synthetic oligonucleotide
gcggccaguagcaucugac

SEQ ID NO: 27196 - RNA, 19 nt, Artificial Sequence
  Description of Artificial Sequence: Synthetic oligonucleotide
cggccaguagcaucugacu

SEQ ID NO: 27197 - RNA, 19 nt, Artificial Sequence
  Description of Artificial Sequence: Synthetic oligonucleotide
ggccaguagcaucugacuu

SEQ ID NO: 27198 - RNA, 19 nt, Artificial Sequence
  Description of Artificial Sequence: Synthetic oligonucleotide
gccaguagcaucugacuuu

SEQ ID NO: 27199 - RNA, 19 nt, Artificial Sequence
  Description of Artificial Sequence: Synthetic oligonucleotide
ccaguagcaucugacuuug

SEQ ID NO: 27200 - RNA, 19 nt, Artificial Sequence
  Description of Artificial Sequence: Synthetic oligonucleotide
caguagcaucugacuuuga

SEQ ID NO: 27201 - RNA, 19 nt, Artificial Sequence
  Description of Artificial Sequence: Synthetic oligonucleotide
aguagcaucugacuuugag

SEQ ID NO: 27202 - RNA, 19 nt, Artificial Sequence
  Description of Artificial Sequence: Synthetic oligonucleotide
guagcaucugacuuugagc

SEQ ID NO: 27203 - RNA, 19 nt, Artificial Sequence
  Description of Artificial Sequence: Synthetic oligonucleotide
uagcaucugacuuugagcc

SEQ ID NO: 27204 - RNA, 19 nt, Artificial Sequence
  Description of Artificial Sequence: Synthetic oligonucleotide
agcaucugacuuugagccu

SEQ ID NO: 27205 - RNA, 19 nt, Artificial Sequence
  Description of Artificial Sequence: Synthetic oligonucleotide
ugagccucagggucugagu

SEQ ID NO: 27206 - RNA, 19 nt, Artificial Sequence
  Description of Artificial Sequence: Synthetic oligonucleotide
ugaagccgcucguuggaac

SEQ ID NO: 27207 - RNA, 19 nt, Artificial Sequence
  Description of Artificial Sequence: Synthetic oligonucleotide
cuccaaggaaaaccuucuc

SEQ ID NO: 27208 - RNA, 19 nt, Artificial Sequence
  Description of Artificial Sequence: Synthetic oligonucleotide
cgcuggacccagugaaaau

SEQ ID NO: 27209 - RNA, 19 nt, Artificial Sequence
  Description of Artificial Sequence: Synthetic oligonucleotide
ugaccccaaccuuuucguu

SEQ ID NO: 27210 - RNA, 19 nt, Artificial Sequence
  Description of Artificial Sequence: Synthetic oligonucleotide
ugcacuguaugauuuugug

SEQ ID NO: 27211 - RNA, 19 nt, Artificial Sequence
  Description of Artificial Sequence: Synthetic oligonucleotide
ggccaguggagauaacacu

SEQ ID NO: 27212 - RNA, 19 nt, Artificial Sequence
  Description of Artificial Sequence: Synthetic oligonucleotide
ucuaagcauaacuaaaggu

SEQ ID NO: 27213 - RNA, 19 nt, Artificial Sequence
  Description of Artificial Sequence: Synthetic oligonucleotide
ugaaaagcuccgggucuua

SEQ ID NO: 27214 - RNA, 19 nt, Artificial Sequence
  Description of Artificial Sequence: Synthetic oligonucleotide
aggcuauaaucacaauggg

SEQ ID NO: 27215 - RNA, 19 nt, Artificial Sequence
  Description of Artificial Sequence: Synthetic oligonucleotide
ggaauggugugaagcccaa

SEQ ID NO: 27216 - RNA, 19 nt, Artificial Sequence
  Description of Artificial Sequence: Synthetic oligonucleotide
aaccaaaaauggccaaggc

SEQ ID NO: 27217 - RNA, 19 nt, Artificial Sequence
  Description of Artificial Sequence: Synthetic oligonucleotide
cugggucccaagcaacuac

SEQ ID NO: 27218 - RNA, 19 nt, Artificial Sequence
  Description of Artificial Sequence: Synthetic oligonucleotide
caucacgccagucaacagu

SEQ ID NO: 27219 - RNA, 19 nt, Artificial Sequence
  Description of Artificial Sequence: Synthetic oligonucleotide
ucuggagaaacacuccugg

SEQ ID NO: 27220 - RNA, 19 nt, Artificial Sequence
  Description of Artificial Sequence: Synthetic oligonucleotide
guaccaugggccugugucc

SEQ ID NO: 27221 - RNA, 19 nt, Artificial Sequence
  Description of Artificial Sequence: Synthetic oligonucleotide
ccgcaaugccgcugaguau

SEQ ID NO: 27222 - RNA, 19 nt, Artificial Sequence
  Description of Artificial Sequence: Synthetic oligonucleotide
ucugcugagcagcgggauc

SEQ ID NO: 27223 - RNA, 19 nt, Artificial Sequence
  Description of Artificial Sequence: Synthetic oligonucleotide
caauggcagcuucuuggug

SEQ ID NO: 27224 - RNA, 19 nt, Artificial Sequence
  Description of Artificial Sequence: Synthetic oligonucleotide
gcgugagagugagagcagu

SEQ ID NO: 27225 - RNA, 19 nt, Artificial Sequence
  Description of Artificial Sequence: Synthetic oligonucleotide
uccuggccagagguccauc

SEQ ID NO: 27226 - RNA, 19 nt, Artificial Sequence
  Description of Artificial Sequence: Synthetic oligonucleotide
cucgcugagauacgaaggg

SEQ ID NO: 27227 - RNA, 19 nt, Artificial Sequence
  Description of Artificial Sequence: Synthetic oligonucleotide
gaggguguaccauuacagg

SEQ ID NO: 27228 - RNA, 19 nt, Artificial Sequence
  Description of Artificial Sequence: Synthetic oligonucleotide
gaucaacacugcuucugau

SEQ ID NO: 27229 - RNA, 19 nt, Artificial Sequence
  Description of Artificial Sequence: Synthetic oligonucleotide
uggcaagcucuacgucucc

SEQ ID NO: 27230 - RNA, 19 nt, Artificial Sequence
  Description of Artificial Sequence: Synthetic oligonucleotide
cuccgagagccgcuucaac

SEQ ID NO: 27231 - RNA, 19 nt, Artificial Sequence
  Description of Artificial Sequence: Synthetic oligonucleotide
cacccuggccgaguugguu

SEQ ID NO: 27232 - RNA, 19 nt, Artificial Sequence
  Description of Artificial Sequence: Synthetic oligonucleotide
ucaucaucauucaacggug

SEQ ID NO: 27233 - RNA, 19 nt, Artificial Sequence
  Description of Artificial Sequence: Synthetic oligonucleotide
ggccgacgggcucaucacc

SEQ ID NO: 27234 - RNA, 19 nt, Artificial Sequence
  Description of Artificial Sequence: Synthetic oligonucleotide
cacgcuccauuauccagcc

SEQ ID NO: 27235 - RNA, 19 nt, Artificial Sequence
  Description of Artificial Sequence: Synthetic oligonucleotide
cccaaagcgcaacaagccc

SEQ ID NO: 27236 - RNA, 19 nt, Artificial Sequence
  Description of Artificial Sequence: Synthetic oligonucleotide
cacugucuauggugugucc

SEQ ID NO: 27237 - RNA, 19 nt, Artificial Sequence
  Description of Artificial Sequence: Synthetic oligonucleotide
cgaacaagggcagcaaagc

SEQ ID NO: 27238 - RNA, 19 nt, Artificial Sequence
  Description of Artificial Sequence: Synthetic oligonucleotide
cuacggagaggcugaagaa

SEQ ID NO: 27239 - RNA, 19 nt, Artificial Sequence
  Description of Artificial Sequence: Synthetic oligonucleotide
agaagcugucggagcagga

SEQ ID NO: 27240 - RNA, 19 nt, Artificial Sequence
  Description of Artificial Sequence: Synthetic oligonucleotide
agucacugcugcugcuuau

SEQ ID NO: 27241 - RNA, 19 nt, Artificial Sequence
  Description of Artificial Sequence: Synthetic oligonucleotide
ugucucccagcauggccuu

SEQ ID NO: 27242 - RNA, 19 nt, Artificial Sequence
  Description of Artificial Sequence: Synthetic oligonucleotide
ucagggugcacagccgcaa

SEQ ID NO: 27243 - RNA, 19 nt, Artificial Sequence
  Description of Artificial Sequence: Synthetic oligonucleotide
acggcaagaguuacacguu

SEQ ID NO: 27244 - RNA, 19 nt, Artificial Sequence
  Description of Artificial Sequence: Synthetic oligonucleotide
uccugaucuccucugacua

SEQ ID NO: 27245 - RNA, 19 nt, Artificial Sequence
  Description of Artificial Sequence: Synthetic oligonucleotide
augagcgugcagaguggag

SEQ ID NO: 27246 - RNA, 19 nt, Artificial Sequence
  Description of Artificial Sequence: Synthetic oligonucleotide
gggagaacauccgggagca

SEQ ID NO: 27247 - RNA, 19 nt, Artificial Sequence
  Description of Artificial Sequence: Synthetic oligonucleotide
agcagaagaaguguuucag

SEQ ID NO: 27248 - RNA, 19 nt, Artificial Sequence
  Description of Artificial Sequence: Synthetic oligonucleotide
gaagcuucucccugacauc

SEQ ID NO: 27249 - RNA, 19 nt, Artificial Sequence
  Description of Artificial Sequence: Synthetic oligonucleotide
ccguggagcugcagaugcu

SEQ ID NO: 27250 - RNA, 19 nt, Artificial Sequence
  Description of Artificial Sequence: Synthetic oligonucleotide
ugaccaacucgugugugaa

SEQ ID NO: 27251 - RNA, 19 nt, Artificial Sequence
  Description of Artificial Sequence: Synthetic oligonucleotide
aacuccagacuguccacag

SEQ ID NO: 27252 - RNA, 19 nt, Artificial Sequence
  Description of Artificial Sequence: Synthetic oligonucleotide
gcauuccgcugaccaucaa

SEQ ID NO: 27253 - RNA, 19 nt, Artificial Sequence
  Description of Artificial Sequence: Synthetic oligonucleotide
auaaggaagaugaugaguc

SEQ ID NO: 27254 - RNA, 19 nt, Artificial Sequence
  Description of Artificial Sequence: Synthetic oligonucleotide
cuccggggcucuauggguu

SEQ ID NO: 27255 - RNA, 19 nt, Artificial Sequence
  Description of Artificial Sequence: Synthetic oligonucleotide
uucugaaugucaucgucca

SEQ ID NO: 27256 - RNA, 19 nt, Artificial Sequence
  Description of Artificial Sequence: Synthetic oligonucleotide
acucagccacuggauuuaa

SEQ ID NO: 27257 - RNA, 19 nt, Artificial Sequence
  Description of Artificial Sequence: Synthetic oligonucleotide
gauuuaagcagaguucaaa

SEQ ID NO: 27258 - RNA, 19 nt, Artificial Sequence
  Description of Artificial Sequence: Synthetic oligonucleotide
auuuaagcagaguucaaaa

SEQ ID NO: 27259 - RNA, 19 nt, Artificial Sequence
  Description of Artificial Sequence: Synthetic oligonucleotide
uuuaagcagaguucaaaag

SEQ ID NO: 27260 - RNA, 19 nt, Artificial Sequence
  Description of Artificial Sequence: Synthetic oligonucleotide
uuaagcagaguucaaaagc

SEQ ID NO: 27261 - RNA, 19 nt, Artificial Sequence
  Description of Artificial Sequence: Synthetic oligonucleotide
uaagcagaguucaaaagcc

SEQ ID NO: 27262 - RNA, 19 nt, Artificial Sequence
  Description of Artificial Sequence: Synthetic oligonucleotide
aagcagaguucaaaagccc

SEQ ID NO: 27263 - RNA, 19 nt, Artificial Sequence
  Description of Artificial Sequence: Synthetic oligonucleotide
agcagaguucaaaagcccu

SEQ ID NO: 27264 - RNA, 19 nt, Artificial Sequence
  Description of Artificial Sequence: Synthetic oligonucleotide
gcagaguucaaaagcccuu

SEQ ID NO: 27265 - RNA, 19 nt, Artificial Sequence
  Description of Artificial Sequence: Synthetic oligonucleotide
cagaguucaaaagcccuuc

SEQ ID NO: 27266 - RNA, 19 nt, Artificial Sequence
  Description of Artificial Sequence: Synthetic oligonucleotide
agaguucaaaagcccuuca

SEQ ID NO: 27267 - RNA, 19 nt, Artificial Sequence
  Description of Artificial Sequence: Synthetic oligonucleotide
gaguucaaaagcccuucag

SEQ ID NO: 27268 - RNA, 19 nt, Artificial Sequence
  Description of Artificial Sequence: Synthetic oligonucleotide
aguucaaaagcccuucagc

SEQ ID NO: 27269 - RNA, 19 nt, Artificial Sequence
  Description of Artificial Sequence: Synthetic oligonucleotide
guucaaaagcccuucagcg

SEQ ID NO: 27270 - RNA, 19 nt, Artificial Sequence
  Description of Artificial Sequence: Synthetic oligonucleotide
uucaaaagcccuucagcgg

SEQ ID NO: 27271 - RNA, 19 nt, Artificial Sequence
  Description of Artificial Sequence: Synthetic oligonucleotide
ucaaaagcccuucagcggc

SEQ ID NO: 27272 - RNA, 19 nt, Artificial Sequence
  Description of Artificial Sequence: Synthetic oligonucleotide
caaaagcccuucagcggcc

SEQ ID NO: 27273 - RNA, 19 nt, Artificial Sequence
  Description of Artificial Sequence: Synthetic oligonucleotide
aaaagcccuucagcggcca

SEQ ID NO: 27274 - RNA, 19 nt, Artificial Sequence
  Description of Artificial Sequence: Synthetic oligonucleotide
aaagcccuucagcggccag

SEQ ID NO: 27275 - RNA, 19 nt, Artificial Sequence
  Description of Artificial Sequence: Synthetic oligonucleotide
cugacuuugagccucaggg

SEQ ID NO: 27276 - RNA, 19 nt, Artificial Sequence
  Description of Artificial Sequence: Synthetic oligonucleotide
gucugagugaagccgcucg

SEQ ID NO: 27277 - RNA, 19 nt, Artificial Sequence
  Description of Artificial Sequence: Synthetic oligonucleotide
guuggaacuccaaggaaaa

SEQ ID NO: 27278 - RNA, 19 nt, Artificial Sequence
  Description of Artificial Sequence: Synthetic oligonucleotide
accuucucgcuggacccag

SEQ ID NO: 27279 - RNA, 19 nt, Artificial Sequence
  Description of Artificial Sequence: Synthetic oligonucleotide
gugaaaaugaccccaaccu

SEQ ID NO: 27280 - RNA, 19 nt, Artificial Sequence
  Description of Artificial Sequence: Synthetic oligonucleotide
uuuucguugcacuguauga

SEQ ID NO: 27281 - RNA, 19 nt, Artificial Sequence
  Description of Artificial Sequence: Synthetic oligonucleotide
auuuuguggccaguggaga

SEQ ID NO: 27282 - RNA, 19 nt, Artificial Sequence
  Description of Artificial Sequence: Synthetic oligonucleotide
auaacacucuaagcauaac

SEQ ID NO: 27283 - RNA, 19 nt, Artificial Sequence
  Description of Artificial Sequence: Synthetic oligonucleotide
cuaaaggugaaaagcuccg

SEQ ID NO: 27284 - RNA, 19 nt, Artificial Sequence
  Description of Artificial Sequence: Synthetic oligonucleotide
gggucuuaggcuauaauca

SEQ ID NO: 27285 - RNA, 19 nt, Artificial Sequence
  Description of Artificial Sequence: Synthetic oligonucleotide
acaauggggaaugguguga

SEQ ID NO: 27286 - RNA, 19 nt, Artificial Sequence
  Description of Artificial Sequence: Synthetic oligonucleotide
aagcccaaaccaaaaaugg

SEQ ID NO: 27287 - RNA, 19 nt, Artificial Sequence
  Description of Artificial Sequence: Synthetic oligonucleotide
gccaaggcugggucccaag

SEQ ID NO: 27288 - RNA, 19 nt, Artificial Sequence
  Description of Artificial Sequence: Synthetic oligonucleotide
gcaacuacaucacgccagu

SEQ ID NO: 27289 - RNA, 19 nt, Artificial Sequence
  Description of Artificial Sequence: Synthetic oligonucleotide
ucaacagucuggagaaaca

SEQ ID NO: 27290 - RNA, 19 nt, Artificial Sequence
  Description of Artificial Sequence: Synthetic oligonucleotide
acuccugguaccaugggcc

SEQ ID NO: 27291 - RNA, 19 nt, Artificial Sequence
  Description of Artificial Sequence: Synthetic oligonucleotide
cugugucccgcaaugccgc

SEQ ID NO: 27292 - RNA, 19 nt, Artificial Sequence
  Description of Artificial Sequence: Synthetic oligonucleotide
cugaguaucugcugagcag

SEQ ID NO: 27293 - RNA, 19 nt, Artificial Sequence
  Description of Artificial Sequence: Synthetic oligonucleotide
gcgggaucaauggcagcuu

SEQ ID NO: 27294 - RNA, 19 nt, Artificial Sequence
  Description of Artificial Sequence: Synthetic oligonucleotide
ucuuggugcgugagaguga

SEQ ID NO: 27295 - RNA, 19 nt, Artificial Sequence
  Description of Artificial Sequence: Synthetic oligonucleotide
agagcaguccuggccagag

SEQ ID NO: 27296 - RNA, 19 nt, Artificial Sequence
  Description of Artificial Sequence: Synthetic oligonucleotide
gguccaucucgcugagaua

SEQ ID NO: 27297 - RNA, 19 nt, Artificial Sequence
  Description of Artificial Sequence: Synthetic oligonucleotide
acgaagggaggguguacca

SEQ ID NO: 27298 - RNA, 19 nt, Artificial Sequence
  Description of Artificial Sequence: Synthetic oligonucleotide
auuacaggaucaacacugc

SEQ ID NO: 27299 - RNA, 19 nt, Artificial Sequence
  Description of Artificial Sequence: Synthetic oligonucleotide
cuucugauggcaagcucua

SEQ ID NO: 27300 - RNA, 19 nt, Artificial Sequence
  Description of Artificial Sequence: Synthetic oligonucleotide
acgucuccuccgagagccg

SEQ ID NO: 27301 - RNA, 19 nt, Artificial Sequence
  Description of Artificial Sequence: Synthetic oligonucleotide
gcuucaacacccuggccga

SEQ ID NO: 27302 - RNA, 19 nt, Artificial Sequence
  Description of Artificial Sequence: Synthetic oligonucleotide
aguugguucaucaucauuc

SEQ ID NO: 27303 - RNA, 19 nt, Artificial Sequence
  Description of Artificial Sequence: Synthetic oligonucleotide
caacgguggccgacgggcu

SEQ ID NO: 27304 - RNA, 19 nt, Artificial Sequence
  Description of Artificial Sequence: Synthetic oligonucleotide
ucaucaccacgcuccauua

SEQ ID NO: 27305 - RNA, 19 nt, Artificial Sequence
  Description of Artificial Sequence: Synthetic oligonucleotide
auccagccccaaagcgcaa

SEQ ID NO: 27306 - RNA, 19 nt, Artificial Sequence
  Description of Artificial Sequence: Synthetic oligonucleotide
acaagcccacugucuaugg

SEQ ID NO: 27307 - RNA, 19 nt, Artificial Sequence
  Description of Artificial Sequence: Synthetic oligonucleotide
guguguccccuaacuacga

SEQ ID NO: 27308 - RNA, 19 nt, Artificial Sequence
  Description of Artificial Sequence: Synthetic oligonucleotide
agcaaggcuacggagaggc

SEQ ID NO: 27309 - RNA, 19 nt, Artificial Sequence
  Description of Artificial Sequence: Synthetic oligonucleotide
cugaagaagaagcugucgg

SEQ ID NO: 27310 - RNA, 19 nt, Artificial Sequence
  Description of Artificial Sequence: Synthetic oligonucleotide
gagcaggagucacugcugc

SEQ ID NO: 27311 - RNA, 19 nt, Artificial Sequence
  Description of Artificial Sequence: Synthetic oligonucleotide
cugcuuaugucucccagca

SEQ ID NO: 27312 - RNA, 19 nt, Artificial Sequence
  Description of Artificial Sequence: Synthetic oligonucleotide
auggccuucagggugcaca

SEQ ID NO: 27313 - RNA, 19 nt, Artificial Sequence
  Description of Artificial Sequence: Synthetic oligonucleotide
agccgcaacggcaagaguu

SEQ ID NO: 27314 - RNA, 19 nt, Artificial Sequence
  Description of Artificial Sequence: Synthetic oligonucleotide
uacacguuccugaucuccu

SEQ ID NO: 27315 - RNA, 19 nt, Artificial Sequence
  Description of Artificial Sequence: Synthetic oligonucleotide
ucugacuaugagcgugcag

SEQ ID NO: 27316 - RNA, 19 nt, Artificial Sequence
  Description of Artificial Sequence: Synthetic oligonucleotide
gaguggagggagaacaucc

SEQ ID NO: 27317 - RNA, 19 nt, Artificial Sequence
  Description of Artificial Sequence: Synthetic oligonucleotide
cgggagcagcagaagaagu

SEQ ID NO: 27318 - RNA, 19 nt, Artificial Sequence
  Description of Artificial Sequence: Synthetic oligonucleotide
uguuucagaagcuucuccc

SEQ ID NO: 27319 - RNA, 19 nt, Artificial Sequence
  Description of Artificial Sequence: Synthetic oligonucleotide
cugacauccguggagcugc

SEQ ID NO: 27320 - RNA, 19 nt, Artificial Sequence
  Description of Artificial Sequence: Synthetic oligonucleotide
cagaugcugaccaacucgu

SEQ ID NO: 27321 - RNA, 19 nt, Artificial Sequence
  Description of Artificial Sequence: Synthetic oligonucleotide
ugugugaaacuccagacug

SEQ ID NO: 27322 - RNA, 19 nt, Artificial Sequence
  Description of Artificial Sequence: Synthetic oligonucleotide
guccacagcauuccgcuga

SEQ ID NO: 27323 - RNA, 19 nt, Artificial Sequence
  Description of Artificial Sequence: Synthetic oligonucleotide
cugaccaucaauaaggaag

SEQ ID NO: 27324 - RNA, 19 nt, Artificial Sequence
  Description of Artificial Sequence: Synthetic oligonucleotide
ugaccaucaauaaggaaga

SEQ ID NO: 27325 - RNA, 19 nt, Artificial Sequence
  Description of Artificial Sequence: Synthetic oligonucleotide
gaccaucaauaaggaagaa

SEQ ID NO: 27326 - RNA, 19 nt, Artificial Sequence
  Description of Artificial Sequence: Synthetic oligonucleotide
accaucaauaaggaagaag

SEQ ID NO: 27327 - RNA, 19 nt, Artificial Sequence
  Description of Artificial Sequence: Synthetic oligonucleotide
ccaucaauaaggaagaagc

SEQ ID NO: 27328 - RNA, 19 nt, Artificial Sequence
  Description of Artificial Sequence: Synthetic oligonucleotide
caucaauaaggaagaagcc

SEQ ID NO: 27329 - RNA, 19 nt, Artificial Sequence
  Description of Artificial Sequence: Synthetic oligonucleotide
aucaauaaggaagaagccc

SEQ ID NO: 27330 - RNA, 19 nt, Artificial Sequence
  Description of Artificial Sequence: Synthetic oligonucleotide
ucaauaaggaagaagcccu

SEQ ID NO: 27331 - RNA, 19 nt, Artificial Sequence
  Description of Artificial Sequence: Synthetic oligonucleotide
caauaaggaagaagcccuu

SEQ ID NO: 27332 - RNA, 19 nt, Artificial Sequence
  Description of Artificial Sequence: Synthetic oligonucleotide
aauaaggaagaagcccuuc

SEQ ID NO: 27333 - RNA, 19 nt, Artificial Sequence
  Description of Artificial Sequence: Synthetic oligonucleotide
auaaggaagaagcccuuca

SEQ ID NO: 27334 - RNA, 19 nt, Artificial Sequence
  Description of Artificial Sequence: Synthetic oligonucleotide
uaaggaagaagcccuucag

SEQ ID NO: 27335 - RNA, 19 nt, Artificial Sequence
  Description of Artificial Sequence: Synthetic oligonucleotide
aaggaagaagcccuucagc

SEQ ID NO: 27336 - RNA, 19 nt, Artificial Sequence
  Description of Artificial Sequence: Synthetic oligonucleotide
aggaagaagcccuucagcg

SEQ ID NO: 27337 - RNA, 19 nt, Artificial Sequence
  Description of Artificial Sequence: Synthetic oligonucleotide
ggaagaagcccuucagcgg

SEQ ID NO: 27338 - RNA, 19 nt, Artificial Sequence
  Description of Artificial Sequence: Synthetic oligonucleotide
gaagaagcccuucagcggc

SEQ ID NO: 27339 - RNA, 19 nt, Artificial Sequence
  Description of Artificial Sequence: Synthetic oligonucleotide
aagaagcccuucagcggcc

SEQ ID NO: 27340 - RNA, 19 nt, Artificial Sequence
  Description of Artificial Sequence: Synthetic oligonucleotide
gcaucugacuuugagccuc

SEQ ID NO: 27341 - RNA, 19 nt, Artificial Sequence
  Description of Artificial Sequence: Synthetic oligonucleotide
cagggucugagugaagccg

SEQ ID NO: 27342 - RNA, 19 nt, Artificial Sequence
  Description of Artificial Sequence: Synthetic oligonucleotide
gcucguuggaacuccaagg

SEQ ID NO: 27343 - RNA, 19 nt, Artificial Sequence
  Description of Artificial Sequence: Synthetic oligonucleotide
gaaaaccuucucgcuggac

SEQ ID NO: 27344 - RNA, 19 nt, Artificial Sequence
  Description of Artificial Sequence: Synthetic oligonucleotide
cccagugaaaaugacccca

SEQ ID NO: 27345 - RNA, 19 nt, Artificial Sequence
  Description of Artificial Sequence: Synthetic oligonucleotide
aaccuuuucguugcacugu

SEQ ID NO: 27346 - RNA, 19 nt, Artificial Sequence
  Description of Artificial Sequence: Synthetic oligonucleotide
uaugauuuuguggccagug

SEQ ID NO: 27347 - RNA, 19 nt, Artificial Sequence
  Description of Artificial Sequence: Synthetic oligonucleotide
ggagauaacacucuaagca

SEQ ID NO: 27348 - RNA, 19 nt, Artificial Sequence
  Description of Artificial Sequence: Synthetic oligonucleotide
auaacuaaaggugaaaagc

SEQ ID NO: 27349 - RNA, 19 nt, Artificial Sequence
  Description of Artificial Sequence: Synthetic oligonucleotide
cuccgggucuuaggcuaua

SEQ ID NO: 27350 - RNA, 19 nt, Artificial Sequence
  Description of Artificial Sequence: Synthetic oligonucleotide
aaucacaauggggaauggu

SEQ ID NO: 27351 - RNA, 19 nt, Artificial Sequence
  Description of Artificial Sequence: Synthetic oligonucleotide
ugugaagcccaaaccaaaa

SEQ ID NO: 27352 - RNA, 19 nt, Artificial Sequence
  Description of Artificial Sequence: Synthetic oligonucleotide
aauggccaaggcugggucc

SEQ ID NO: 27353 - RNA, 19 nt, Artificial Sequence
  Description of Artificial Sequence: Synthetic oligonucleotide
ccaagcaacuacaucacgc

SEQ ID NO: 27354 - RNA, 19 nt, Artificial Sequence
  Description of Artificial Sequence: Synthetic oligonucleotide
ccagucaacagucuggaga

SEQ ID NO: 27355 - RNA, 19 nt, Artificial Sequence
  Description of Artificial Sequence: Synthetic oligonucleotide
aaacacuccugguaccaug

SEQ ID NO: 27356 - RNA, 19 nt, Artificial Sequence
  Description of Artificial Sequence: Synthetic oligonucleotide
gggccugugucccgcaaug

SEQ ID NO: 27357 - RNA, 19 nt, Artificial Sequence
  Description of Artificial Sequence: Synthetic oligonucleotide
gccgcugaguaucugcuga

SEQ ID NO: 27358 - RNA, 19 nt, Artificial Sequence
  Description of Artificial Sequence: Synthetic oligonucleotide
agcagcgggaucaauggca

SEQ ID NO: 27359 - RNA, 19 nt, Artificial Sequence
  Description of Artificial Sequence: Synthetic oligonucleotide
agcuucuuggugcgugaga

SEQ ID NO: 27360 - RNA, 19 nt, Artificial Sequence
  Description of Artificial Sequence: Synthetic oligonucleotide
agugagagcaguccuggcc

SEQ ID NO: 27361 - RNA, 19 nt, Artificial Sequence
  Description of Artificial Sequence: Synthetic oligonucleotide
cagagguccaucucgcuga

SEQ ID NO: 27362 - RNA, 19 nt, Artificial Sequence
  Description of Artificial Sequence: Synthetic oligonucleotide
agauacgaagggagggugu

SEQ ID NO: 27363 - RNA, 19 nt, Artificial Sequence
  Description of Artificial Sequence: Synthetic oligonucleotide
uaccauuacaggaucaaca

SEQ ID NO: 27364 - RNA, 19 nt, Artificial Sequence
  Description of Artificial Sequence: Synthetic oligonucleotide
acugcuucugauggcaagc

SEQ ID NO: 27365 - RNA, 19 nt, Artificial Sequence
  Description of Artificial Sequence: Synthetic oligonucleotide
cucuacgucuccuccgaga

SEQ ID NO: 27366 - RNA, 19 nt, Artificial Sequence
  Description of Artificial Sequence: Synthetic oligonucleotide
agccgcuucaacacccugg

SEQ ID NO: 27367 - RNA, 19 nt, Artificial Sequence
  Description of Artificial Sequence: Synthetic oligonucleotide
gccgaguugguucaucauc

SEQ ID NO: 27368 - RNA, 19 nt, Artificial Sequence
  Description of Artificial Sequence: Synthetic oligonucleotide
cauucaacgguggccgacg

SEQ ID NO: 27369 - RNA, 19 nt, Artificial Sequence
  Description of Artificial Sequence: Synthetic oligonucleotide
gggcucaucaccacgcucc

SEQ ID NO: 27370 - RNA, 19 nt, Artificial Sequence
  Description of Artificial Sequence: Synthetic oligonucleotide
cauuauccagccccaaagc

SEQ ID NO: 27371 - RNA, 19 nt, Artificial Sequence
  Description of Artificial Sequence: Synthetic oligonucleotide
cgcaacaagcccacugucu

SEQ ID NO: 27372 - RNA, 19 nt, Artificial Sequence
  Description of Artificial Sequence: Synthetic oligonucleotide
uauggugugucccccaacu

SEQ ID NO: 27373 - RNA, 19 nt, Artificial Sequence
  Description of Artificial Sequence: Synthetic oligonucleotide
ggccuucagggugcacagc

SEQ ID NO: 27374 - RNA, 19 nt, Artificial Sequence
  Description of Artificial Sequence: Synthetic oligonucleotide
ccgcaacggcaagaguuac

SEQ ID NO: 27375 - RNA, 19 nt, Artificial Sequence
  Description of Artificial Sequence: Synthetic oligonucleotide
cacguuccugaucuccucu

SEQ ID NO: 27376 - RNA, 19 nt, Artificial Sequence
  Description of Artificial Sequence: Synthetic oligonucleotide
ugacuaugagcgugcagag

SEQ ID NO: 27377 - RNA, 19 nt, Artificial Sequence
  Description of Artificial Sequence: Synthetic oligonucleotide
guggagggagaacauccgg

SEQ ID NO: 27378 - RNA, 19 nt, Artificial Sequence
  Description of Artificial Sequence: Synthetic oligonucleotide
ggagcagcagaagaagugu

SEQ ID NO: 27379 - RNA, 19 nt, Artificial Sequence
  Description of Artificial Sequence: Synthetic oligonucleotide
uuucagaagcuucucccug

SEQ ID NO: 27380 - RNA, 19 nt, Artificial Sequence
  Description of Artificial Sequence: Synthetic oligonucleotide
gacauccguggagcugcag

SEQ ID NO: 27381 - RNA, 19 nt, Artificial Sequence
  Description of Artificial Sequence: Synthetic oligonucleotide
gaugccgaccaacucgugu

SEQ ID NO: 27382 - RNA, 19 nt, Artificial Sequence
  Description of Artificial Sequence: Synthetic oligonucleotide
ugugaaacuccagacuguc

SEQ ID NO: 27383 - RNA, 19 nt, Artificial Sequence
  Description of Artificial Sequence: Synthetic oligonucleotide
ccacagcauuccgcugacc

SEQ ID NO: 27384 - RNA, 19 nt, Artificial Sequence
  Description of Artificial Sequence: Synthetic oligonucleotide
caucaauaaggaagaugau

SEQ ID NO: 27385 - RNA, 19 nt, Artificial Sequence
  Description of Artificial Sequence: Synthetic oligonucleotide
ugagucuccggggcucuau

SEQ ID NO: 27386 - RNA, 19 nt, Artificial Sequence
  Description of Artificial Sequence: Synthetic oligonucleotide
uggguuucugaaugucauc

SEQ ID NO: 27387 - RNA, 19 nt, Artificial Sequence
  Description of Artificial Sequence: Synthetic oligonucleotide
cguccacucagccacugga

SEQ ID NO: 27388 - RNA, 19 nt, Artificial Sequence
  Description of Artificial Sequence: Synthetic oligonucleotide
auuuaagcagaguucaaau

SEQ ID NO: 27389 - RNA, 19 nt, Artificial Sequence
  Description of Artificial Sequence: Synthetic oligonucleotide
ucuguacugcacccuggag

SEQ ID NO: 27390 - RNA, 19 nt, Artificial Sequence
  Description of Artificial Sequence: Synthetic oligonucleotide
gguggauuccuuuggguau

SEQ ID NO: 27391 - RNA, 19 nt, Artificial Sequence
  Description of Artificial Sequence: Synthetic oligonucleotide
uuuugugaauaaagcaaag

SEQ ID NO: 27392 - RNA, 19 nt, Artificial Sequence
  Description of Artificial Sequence: Synthetic oligonucleotide
gacgcgcgucuacagggac

SEQ ID NO: 27393 - RNA, 19 nt, Artificial Sequence
  Description of Artificial Sequence: Synthetic oligonucleotide
cacagcugagccaaacugg

SEQ ID NO: 27394 - RNA, 19 nt, Artificial Sequence
  Description of Artificial Sequence: Synthetic oligonucleotide
gaacgaggaauuugagaua

SEQ ID NO: 27395 - RNA, 19 nt, Artificial Sequence
  Description of Artificial Sequence: Synthetic oligonucleotide
agagcuggagggcucccag

SEQ ID NO: 27396 - RNA, 19 nt, Artificial Sequence
  Description of Artificial Sequence: Synthetic oligonucleotide
gacccugaggauacugugc

SEQ ID NO: 27397 - RNA, 19 nt, Artificial Sequence
  Description of Artificial Sequence: Synthetic oligonucleotide
cuaugaaaaguguuacaac

SEQ ID NO: 27398 - RNA, 19 nt, Artificial Sequence
  Description of Artificial Sequence: Synthetic oligonucleotide
caagacgaagauccccaag

SEQ ID NO: 27399 - RNA, 19 nt, Artificial Sequence
  Description of Artificial Sequence: Synthetic oligonucleotide
ggaggacggcgagagcacg

SEQ ID NO: 27400 - RNA, 19 nt, Artificial Sequence
  Description of Artificial Sequence: Synthetic oligonucleotide
ggacagacucauggggaag

SEQ ID NO: 27401 - RNA, 19 nt, Artificial Sequence
  Description of Artificial Sequence: Synthetic oligonucleotide
gggccagguccagcuggac

SEQ ID NO: 27402 - RNA, 19 nt, Artificial Sequence
  Description of Artificial Sequence: Synthetic oligonucleotide
cccgcaggcccugcaggac

SEQ ID NO: 27403 - RNA, 19 nt, Artificial Sequence
  Description of Artificial Sequence: Synthetic oligonucleotide
cagagacuggcagcgcacc

SEQ ID NO: 27404 - RNA, 19 nt, Artificial Sequence
  Description of Artificial Sequence: Synthetic oligonucleotide
cgucaucgccaugaauggg

SEQ ID NO: 27405 - RNA, 19 nt, Artificial Sequence
  Description of Artificial Sequence: Synthetic oligonucleotide
gaucgaaguaaagcucucg

SEQ ID NO: 27406 - RNA, 19 nt, Artificial Sequence
  Description of Artificial Sequence: Synthetic oligonucleotide
ggucaaguucaacagcagg

SEQ ID NO: 27407 - RNA, 19 nt, Artificial Sequence
  Description of Artificial Sequence: Synthetic oligonucleotide
ggaguucagcuugaagagg

SEQ ID NO: 27408 - RNA, 19 nt, Artificial Sequence
  Description of Artificial Sequence: Synthetic oligonucleotide
gaugccgucccgaaaacag

SEQ ID NO: 27409 - RNA, 19 nt, Artificial Sequence
  Description of Artificial Sequence: Synthetic oligonucleotide
gacagggguccucggaguc

SEQ ID NO: 27410 - RNA, 19 nt, Artificial Sequence
  Description of Artificial Sequence: Synthetic oligonucleotide
caagauugcuguggucacc

SEQ ID NO: 27411 - RNA, 19 nt, Artificial Sequence
  Description of Artificial Sequence: Synthetic oligonucleotide
caagagagagagguccaag

SEQ ID NO: 27412 - RNA, 19 nt, Artificial Sequence
  Description of Artificial Sequence: Synthetic oligonucleotide
ggugcccuacaucgugcgc

SEQ ID NO: 27413 - RNA, 19 nt, Artificial Sequence
  Description of Artificial Sequence: Synthetic oligonucleotide
ccagugcguggaggagauc

SEQ ID NO: 27414 - RNA, 19 nt, Artificial Sequence
  Description of Artificial Sequence: Synthetic oligonucleotide
cgagcgccgaggcauggag

SEQ ID NO: 27415 - RNA, 19 nt, Artificial Sequence
  Description of Artificial Sequence: Synthetic oligonucleotide
ggaggugggcaucuaccgc

SEQ ID NO: 27416 - RNA, 19 nt, Artificial Sequence
  Description of Artificial Sequence: Synthetic oligonucleotide
cguguccgguguggccacg

SEQ ID NO: 27417 - RNA, 19 nt, Artificial Sequence
  Description of Artificial Sequence: Synthetic oligonucleotide
ggacauccaggcacugaag

SEQ ID NO: 27418 - RNA, 19 nt, Artificial Sequence
  Description of Artificial Sequence: Synthetic oligonucleotide
aaggcagccuucgacguca

SEQ ID NO: 27419 - RNA, 19 nt, Artificial Sequence
  Description of Artificial Sequence: Synthetic oligonucleotide
aggcagccuucgacgucaa

SEQ ID NO: 27420 - RNA, 19 nt, Artificial Sequence
  Description of Artificial Sequence: Synthetic oligonucleotide
ggcagccuucgacgucaaa

SEQ ID NO: 27421 - RNA, 19 nt, Artificial Sequence
  Description of Artificial Sequence: Synthetic oligonucleotide
gcagccuucgacgucaaag

SEQ ID NO: 27422 - RNA, 19 nt, Artificial Sequence
  Description of Artificial Sequence: Synthetic oligonucleotide
cagccuucgacgucaaagc

SEQ ID NO: 27423 - RNA, 19 nt, Artificial Sequence
  Description of Artificial Sequence: Synthetic oligonucleotide
agccuucgacgucaaagcc

SEQ ID NO: 27424 - RNA, 19 nt, Artificial Sequence
  Description of Artificial Sequence: Synthetic oligonucleotide
gccuucgacgucaaagccc

SEQ ID NO: 27425 - RNA, 19 nt, Artificial Sequence
  Description of Artificial Sequence: Synthetic oligonucleotide
ccuucgacgucaaagcccu

SEQ ID NO: 27426 - RNA, 19 nt, Artificial Sequence
  Description of Artificial Sequence: Synthetic oligonucleotide
cuucgacgucaaagcccuu

SEQ ID NO: 27427 - RNA, 19 nt, Artificial Sequence
  Description of Artificial Sequence: Synthetic oligonucleotide
uucgacgucaaagcccuuc

SEQ ID NO: 27428 - RNA, 19 nt, Artificial Sequence
  Description of Artificial Sequence: Synthetic oligonucleotide
ucgacgucaaagcccuuca

SEQ ID NO: 27429 - RNA, 19 nt, Artificial Sequence
  Description of Artificial Sequence: Synthetic oligonucleotide
cgacgucaaagcccuucag

SEQ ID NO: 27430 - RNA, 19 nt, Artificial Sequence
  Description of Artificial Sequence: Synthetic oligonucleotide
gacgucaaagcccuucagc

SEQ ID NO: 27431 - RNA, 19 nt, Artificial Sequence
  Description of Artificial Sequence: Synthetic oligonucleotide
acgucaaagcccuucagcg

SEQ ID NO: 27432 - RNA, 19 nt, Artificial Sequence
  Description of Artificial Sequence: Synthetic oligonucleotide
cgucaaagcccuucagcgg

SEQ ID NO: 27433 - RNA, 19 nt, Artificial Sequence
  Description of Artificial Sequence: Synthetic oligonucleotide
gucaaagcccuucagcggc

SEQ ID NO: 27434 - RNA, 19 nt, Artificial Sequence
  Description of Artificial Sequence: Synthetic oligonucleotide
ucaaagcccuucagcggcc

SEQ ID NO: 27435 - RNA, 19 nt, Artificial Sequence
  Description of Artificial Sequence: Synthetic oligonucleotide
caaagcccuucagcggcca

SEQ ID NO: 27436 - RNA, 19 nt, Artificial Sequence
  Description of Artificial Sequence: Synthetic oligonucleotide
ucagggucugagugaagcc

SEQ ID NO: 27437 - RNA, 19 nt, Artificial Sequence
  Description of Artificial Sequence: Synthetic oligonucleotide
cgcucguuggaacuccaag

SEQ ID NO: 27438 - RNA, 19 nt, Artificial Sequence
  Description of Artificial Sequence: Synthetic oligonucleotide
ggaaaaccuucucgcugga

SEQ ID NO: 27439 - RNA, 19 nt, Artificial Sequence
  Description of Artificial Sequence: Synthetic oligonucleotide
acccagugaaaaugacccc

SEQ ID NO: 27440 - RNA, 19 nt, Artificial Sequence
  Description of Artificial Sequence: Synthetic oligonucleotide
caaccuuuucguugcacug

SEQ ID NO: 27441 - RNA, 19 nt, Artificial Sequence
  Description of Artificial Sequence: Synthetic oligonucleotide
guaugauuuuguggccagu

SEQ ID NO: 27442 - RNA, 19 nt, Artificial Sequence
  Description of Artificial Sequence: Synthetic oligonucleotide
uggagauaacacucuaagc

SEQ ID NO: 27443 - RNA, 19 nt, Artificial Sequence
  Description of Artificial Sequence: Synthetic oligonucleotide
cauaacuaaaggugaaaag

SEQ ID NO: 27444 - RNA, 19 nt, Artificial Sequence
  Description of Artificial Sequence: Synthetic oligonucleotide
gcuccgggucuuaggcuau

SEQ ID NO: 27445 - RNA, 19 nt, Artificial Sequence
  Description of Artificial Sequence: Synthetic oligonucleotide
uaaucacaauggggaaugg

SEQ ID NO: 27446 - RNA, 19 nt, Artificial Sequence
  Description of Artificial Sequence: Synthetic oligonucleotide
gugugaagcccaaaccaaa

SEQ ID NO: 27447 - RNA, 19 nt, Artificial Sequence
  Description of Artificial Sequence: Synthetic oligonucleotide
aaauggccaaggcuggguc

SEQ ID NO: 27448 - RNA, 19 nt, Artificial Sequence
  Description of Artificial Sequence: Synthetic oligonucleotide
cccaagcaacuacaucacg

SEQ ID NO: 27449 - RNA, 19 nt, Artificial Sequence
  Description of Artificial Sequence: Synthetic oligonucleotide
gccagucaacagucuggag

SEQ ID NO: 27450 - RNA, 19 nt, Artificial Sequence
  Description of Artificial Sequence: Synthetic oligonucleotide
gaaacacuccugguaccau

SEQ ID NO: 27451 - RNA, 19 nt, Artificial Sequence
  Description of Artificial Sequence: Synthetic oligonucleotide
ugggccugugucccgcaau

SEQ ID NO: 27452 - RNA, 19 nt, Artificial Sequence
  Description of Artificial Sequence: Synthetic oligonucleotide
ugccgcugagcaucugcug

SEQ ID NO: 27453 - RNA, 19 nt, Artificial Sequence
  Description of Artificial Sequence: Synthetic oligonucleotide
gagcagcgggaucaauggc

SEQ ID NO: 27454 - RNA, 19 nt, Artificial Sequence
  Description of Artificial Sequence: Synthetic oligonucleotide
cagcuucuuggugcgugag

SEQ ID NO: 27455 - RNA, 19 nt, Artificial Sequence
  Description of Artificial Sequence: Synthetic oligonucleotide
gagugagagcaguccuggc

SEQ ID NO: 27456 - RNA, 19 nt, Artificial Sequence
  Description of Artificial Sequence: Synthetic oligonucleotide
ccagagguccaucucgcug

SEQ ID NO: 27457 - RNA, 19 nt, Artificial Sequence
  Description of Artificial Sequence: Synthetic oligonucleotide
gagauacgaagggagggug

SEQ ID NO: 27458 - RNA, 19 nt, Artificial Sequence
  Description of Artificial Sequence: Synthetic oligonucleotide
guaccauuacaggaucaac

SEQ ID NO: 27459 - RNA, 19 nt, Artificial Sequence
  Description of Artificial Sequence: Synthetic oligonucleotide
cacugcuucugauggcaag

SEQ ID NO: 27460 - RNA, 19 nt, Artificial Sequence
  Description of Artificial Sequence: Synthetic oligonucleotide
gcucuacgucuccuccgag

SEQ ID NO: 27461 - RNA, 19 nt, Artificial Sequence
  Description of Artificial Sequence: Synthetic oligonucleotide
gagccgcuucaacacccug

SEQ ID NO: 27462 - RNA, 19 nt, Artificial Sequence
  Description of Artificial Sequence: Synthetic oligonucleotide
ggccgaguugguucaucau

SEQ ID NO: 27463 - RNA, 19 nt, Artificial Sequence
  Description of Artificial Sequence: Synthetic oligonucleotide
ucauucaacgguggccgac

SEQ ID NO: 27464 - RNA, 19 nt, Artificial Sequence
  Description of Artificial Sequence: Synthetic oligonucleotide
cgggcucaucaccacgcuc

SEQ ID NO: 27465 - RNA, 19 nt, Artificial Sequence
  Description of Artificial Sequence: Synthetic oligonucleotide
ccauuauccagccccaaag

SEQ ID NO: 27466 - RNA, 19 nt, Artificial Sequence
  Description of Artificial Sequence: Synthetic oligonucleotide
gcgcaacaagcccucuguc

SEQ ID NO: 27467 - RNA, 19 nt, Artificial Sequence
  Description of Artificial Sequence: Synthetic oligonucleotide
cuauggugugucccccaac

SEQ ID NO: 27468 - RNA, 19 nt, Artificial Sequence
  Description of Artificial Sequence: Synthetic oligonucleotide
cuacgacaagugggagaug

SEQ ID NO: 27469 - RNA, 19 nt, Artificial Sequence
  Description of Artificial Sequence: Synthetic oligonucleotide
ggaacgcacggacaucacc

SEQ ID NO: 27470 - RNA, 25 nt, Artificial Sequence
  Description of Artificial Sequence: Synthetic oligonucleotide
guaccagcccuaccagagcaucuac

SEQ ID NO: 27471 - RNA, 25 nt, Artificial Sequence
  Description of Artificial Sequence: Synthetic oligonucleotide
cgucgggggcaugauggaaggggag

SEQ ID NO: 27472 - RNA, 25 nt, Artificial Sequence
  Description of Artificial Sequence: Synthetic oligonucleotide
gggcaagggcccgcuccugcgcagc

SEQ ID NO: 27473 - RNA, 25 nt, Artificial Sequence
  Description of Artificial Sequence: Synthetic oligonucleotide
ccagagcaccucugagcaggagaag

SEQ ID NO: 27474 - RNA, 25 nt, Artificial Sequence
  Description of Artificial Sequence: Synthetic oligonucleotide
gcgccuuaccuggccccgcaggucc

SEQ ID NO: 27475 - RNA, 25 nt, Artificial Sequence
  Description of Artificial Sequence: Synthetic oligonucleotide
cuacuccccccggaguuuugaggau

SEQ ID NO: 27476 - RNA, 25 nt, Artificial Sequence
  Description of Artificial Sequence: Synthetic oligonucleotide
uugcggaggcggcuauaccccggac

SEQ ID NO: 27477 - RNA, 25 nt, Artificial Sequence
  Description of Artificial Sequence: Synthetic oligonucleotide
cugcagcuccaaugagaaccucacc

SEQ ID NO: 27478 - RNA, 25 nt, Artificial Sequence
  Description of Artificial Sequence: Synthetic oligonucleotide
cuccagcgaggaggacuucuccucu

SEQ ID NO: 27479 - RNA, 25 nt, Artificial Sequence
  Description of Artificial Sequence: Synthetic oligonucleotide
uggccaguccagccgcgugucccca

SEQ ID NO: 27480 - RNA, 25 nt, Artificial Sequence
  Description of Artificial Sequence: Synthetic oligonucleotide
aagccccaccaccuaccgcauguuc

SEQ ID NO: 27481 - RNA, 25 nt, Artificial Sequence
  Description of Artificial Sequence: Synthetic oligonucleotide
ccgggacaaaagccgcucucccucg

SEQ ID NO: 27482 - RNA, 25 nt, Artificial Sequence
  Description of Artificial Sequence: Synthetic oligonucleotide
gcagaacucgcaacaguccuucgac

SEQ ID NO: 27483 - RNA, 25 nt, Artificial Sequence
  Description of Artificial Sequence: Synthetic oligonucleotide
cagcagcaguccccccacgccgcag

SEQ ID NO: 27484 - RNA, 25 nt, Artificial Sequence
  Description of Artificial Sequence: Synthetic oligonucleotide
gugccauaagcggcaccggcacugc

SEQ ID NO: 27485 - RNA, 25 nt, Artificial Sequence
  Description of Artificial Sequence: Synthetic oligonucleotide
cccgguugucguguccgaggccacc

SEQ ID NO: 27486 - RNA, 25 nt, Artificial Sequence
  Description of Artificial Sequence: Synthetic oligonucleotide
caucgugggcguccgcaagaccggg

SEQ ID NO: 27487 - RNA, 25 nt, Artificial Sequence
  Description of Artificial Sequence: Synthetic oligonucleotide
gcagaucuggcccaacgauggcgag

SEQ ID NO: 27488 - RNA, 25 nt, Artificial Sequence
  Description of Artificial Sequence: Synthetic oligonucleotide
gagggcgccuuccauggagacgcag

SEQ ID NO: 27489 - RNA, 25 nt, Artificial Sequence
  Description of Artificial Sequence: Synthetic oligonucleotide
agggcgccuuccauggagacgcaga

SEQ ID NO: 27490 - RNA, 25 nt, Artificial Sequence
  Description of Artificial Sequence: Synthetic oligonucleotide
gggcgccuuccauggagacgcagaa

SEQ ID NO: 27491 - RNA, 25 nt, Artificial Sequence
  Description of Artificial Sequence: Synthetic oligonucleotide
ggcgccuuccauggagacgcagaag

SEQ ID NO: 27492 - RNA, 25 nt, Artificial Sequence
  Description of Artificial Sequence: Synthetic oligonucleotide
gcgccuuccauggagacgcagaagc

SEQ ID NO: 27493 - RNA, 25 nt, Artificial Sequence
  Description of Artificial Sequence: Synthetic oligonucleotide
cgccuuccauggagacgcagaagcc

SEQ ID NO: 27494 - RNA, 25 nt, Artificial Sequence
  Description of Artificial Sequence: Synthetic oligonucleotide
gccuuccauggagacgcagaagccc

SEQ ID NO: 27495 - RNA, 25 nt, Artificial Sequence
  Description of Artificial Sequence: Synthetic oligonucleotide
ccuuccauggagacgcagaagcccu

SEQ ID NO: 27496 - RNA, 25 nt, Artificial Sequence
  Description of Artificial Sequence: Synthetic oligonucleotide
cuuccauggagacgcagaagcccuu

SEQ ID NO: 27497 - RNA, 25 nt, Artificial Sequence
  Description of Artificial Sequence: Synthetic oligonucleotide
uuccauggagacgcagaagcccuuc

SEQ ID NO: 27498 - RNA, 25 nt, Artificial Sequence
  Description of Artificial Sequence: Synthetic oligonucleotide
uccauggagacgcagaagcccuuca

SEQ ID NO: 27499 - RNA, 25 nt, Artificial Sequence
  Description of Artificial Sequence: Synthetic oligonucleotide
ccauggagacgcagaagcccuucag

SEQ ID NO: 27500 - RNA, 25 nt, Artificial Sequence
  Description of Artificial Sequence: Synthetic oligonucleotide
cauggagacgcagaagcccuucagc

SEQ ID NO: 27501 - RNA, 25 nt, Artificial Sequence
  Description of Artificial Sequence: Synthetic oligonucleotide
auggagacgcagaagcccuucagcg

SEQ ID NO: 27502 - RNA, 25 nt, Artificial Sequence
  Description of Artificial Sequence: Synthetic oligonucleotide
uggagacgcagaagcccuucagcgg

SEQ ID NO: 27503 - RNA, 25 nt, Artificial Sequence
  Description of Artificial Sequence: Synthetic oligonucleotide
ggagacgcagaagcccuucagcggc

SEQ ID NO: 27504 - RNA, 25 nt, Artificial Sequence
  Description of Artificial Sequence: Synthetic oligonucleotide
gagacgcagaagcccuucagcggcc

SEQ ID NO: 27505 - RNA, 25 nt, Artificial Sequence
  Description of Artificial Sequence: Synthetic oligonucleotide
agacgcagaagcccuucagcggcca

SEQ ID NO: 27506 - RNA, 25 nt, Artificial Sequence
  Description of Artificial Sequence: Synthetic oligonucleotide
gacgcagaagcccuucagcggccag

SEQ ID NO: 27507 - RNA, 25 nt, Artificial Sequence
  Description of Artificial Sequence: Synthetic oligonucleotide
acgcagaagcccuucagcggccagu

SEQ ID NO: 27508 - RNA, 25 nt, Artificial Sequence
  Description of Artificial Sequence: Synthetic oligonucleotide
cgcagaagcccuucagcggccagua

SEQ ID NO: 27509 - RNA, 25 nt, Artificial Sequence
  Description of Artificial Sequence: Synthetic oligonucleotide
gcagaagcccuucagcggccaguag

SEQ ID NO: 27510 - RNA, 25 nt, Artificial Sequence
  Description of Artificial Sequence: Synthetic oligonucleotide
cagaagcccuucagcggccaguagc

SEQ ID NO: 27511 - RNA, 25 nt, Artificial Sequence
  Description of Artificial Sequence: Synthetic oligonucleotide
agaagcccuucagcggccaguagca

SEQ ID NO: 27512 - RNA, 25 nt, Artificial Sequence
  Description of Artificial Sequence: Synthetic oligonucleotide
gaagcccuucagcggccaguagcau

SEQ ID NO: 27513 - RNA, 25 nt, Artificial Sequence
  Description of Artificial Sequence: Synthetic oligonucleotide
aagcccuucagcggccaguagcauc

SEQ ID NO: 27514 - RNA, 25 nt, Artificial Sequence
  Description of Artificial Sequence: Synthetic oligonucleotide
agcccuucagcggccaguagcaucu

SEQ ID NO: 27515 - RNA, 25 nt, Artificial Sequence
  Description of Artificial Sequence: Synthetic oligonucleotide
gcccuucagcggccaguagcaucug

SEQ ID NO: 27516 - RNA, 25 nt, Artificial Sequence
  Description of Artificial Sequence: Synthetic oligonucleotide
cccuucagcggccaguagcaucuga

SEQ ID NO: 27517 - RNA, 25 nt, Artificial Sequence
  Description of Artificial Sequence: Synthetic oligonucleotide
ccuucagcggccaguagcaucugac

SEQ ID NO: 27518 - RNA, 25 nt, Artificial Sequence
  Description of Artificial Sequence: Synthetic oligonucleotide
cuucagcggccaguagcaucugacu

SEQ ID NO: 27519 - RNA, 25 nt, Artificial Sequence
  Description of Artificial Sequence: Synthetic oligonucleotide
uucagcggccaguagcaucugacuu

SEQ ID NO: 27520 - RNA, 25 nt, Artificial Sequence
  Description of Artificial Sequence: Synthetic oligonucleotide
ucagcggccaguagcaucugacuuu

SEQ ID NO: 27521 - RNA, 25 nt, Artificial Sequence
  Description of Artificial Sequence: Synthetic oligonucleotide
cagcggccaguagcaucugacuuug

SEQ ID NO: 27522 - RNA, 25 nt, Artificial Sequence
  Description of Artificial Sequence: Synthetic oligonucleotide
agcggccaguagcaucugacuuuga

SEQ ID NO: 27523 - RNA, 25 nt, Artificial Sequence
  Description of Artificial Sequence: Synthetic oligonucleotide
gcggccaguagcaucugacuuugag

SEQ ID NO: 27524 - RNA, 25 nt, Artificial Sequence
  Description of Artificial Sequence: Synthetic oligonucleotide
cggccaguagcaucugacuuugagc

SEQ ID NO: 27525 - RNA, 25 nt, Artificial Sequence
  Description of Artificial Sequence: Synthetic oligonucleotide
ggccaguagcaucugacuuugagcc

SEQ ID NO: 27526 - RNA, 25 nt, Artificial Sequence
  Description of Artificial Sequence: Synthetic oligonucleotide
gccaguagcaucugacuuugagccu

SEQ ID NO: 27527 - RNA, 25 nt, Artificial Sequence
  Description of Artificial Sequence: Synthetic oligonucleotide
ccaguagcaucugacuuugagccuc

SEQ ID NO: 27528 - RNA, 25 nt, Artificial Sequence
  Description of Artificial Sequence: Synthetic oligonucleotide
caguagcaucugacuuugagccuca

SEQ ID NO: 27529 - RNA, 25 nt, Artificial Sequence
  Description of Artificial Sequence: Synthetic oligonucleotide
aguagcaucugacuuugagccucag

SEQ ID NO: 27530 - RNA, 25 nt, Artificial Sequence
  Description of Artificial Sequence: Synthetic oligonucleotide
guagcaucugacuuugagccucagg

SEQ ID NO: 27531 - RNA, 25 nt, Artificial Sequence
  Description of Artificial Sequence: Synthetic oligonucleotide
uagcaucugacuuugagccucaggg

SEQ ID NO: 27532 - RNA, 25 nt, Artificial Sequence
  Description of Artificial Sequence: Synthetic oligonucleotide
agcaucugacuuugagccucagggu

SEQ ID NO: 27533 - RNA, 25 nt, Artificial Sequence
  Description of Artificial Sequence: Synthetic oligonucleotide
gcaucugacuuugagccucaggguc

SEQ ID NO: 27534 - RNA, 25 nt, Artificial Sequence
  Description of Artificial Sequence: Synthetic oligonucleotide
caucugacuuugagccucagggucu

SEQ ID NO: 27535 - RNA, 25 nt, Artificial Sequence
  Description of Artificial Sequence: Synthetic oligonucleotide
aucugacuuugagccucagggucug

SEQ ID NO: 27536 - RNA, 25 nt, Artificial Sequence
  Description of Artificial Sequence: Synthetic oligonucleotide
ucugacuuugagccucagggucuga

SEQ ID NO: 27537 - RNA, 25 nt, Artificial Sequence
  Description of Artificial Sequence: Synthetic oligonucleotide
cugacuuugagccucagggucugag

SEQ ID NO: 27538 - RNA, 25 nt, Artificial Sequence
  Description of Artificial Sequence: Synthetic oligonucleotide
ugacuuugagccucagggucugagu

SEQ ID NO: 27539 - RNA, 25 nt, Artificial Sequence
  Description of Artificial Sequence: Synthetic oligonucleotide
ugaagccgcucguuggaacuccaag

SEQ ID NO: 27540 - RNA, 25 nt, Artificial Sequence
  Description of Artificial Sequence: Synthetic oligonucleotide
ggaaaaccuucucgcuggacccagu

SEQ ID NO: 27541 - RNA, 25 nt, Artificial Sequence
  Description of Artificial Sequence: Synthetic oligonucleotide
ugaaaaugaccccaaccuuuucguu

SEQ ID NO: 27542 - RNA, 25 nt, Artificial Sequence
  Description of Artificial Sequence: Synthetic oligonucleotide
ugcacuguaugauuuuguggccagu

SEQ ID NO: 27543 - RNA, 25 nt, Artificial Sequence
  Description of Artificial Sequence: Synthetic oligonucleotide
uggagauaacacucuaagcauaacu

SEQ ID NO: 27544 - RNA, 25 nt, Artificial Sequence
  Description of Artificial Sequence: Synthetic oligonucleotide
uaaaggugaaaagcuccgggucuua

SEQ ID NO: 27545 - RNA, 25 nt, Artificial Sequence
  Description of Artificial Sequence: Synthetic oligonucleotide
aggcuauaaucacaauggggaaugg

SEQ ID NO: 27546 - RNA, 25 nt, Artificial Sequence
  Description of Artificial Sequence: Synthetic oligonucleotide
gugugaagcccaaaccaaaaauggc

SEQ ID NO: 27547 - RNA, 25 nt, Artificial Sequence
  Description of Artificial Sequence: Synthetic oligonucleotide
ccaaggcugggucccaagcaacuac

SEQ ID NO: 27548 - RNA, 25 nt, Artificial Sequence
  Description of Artificial Sequence: Synthetic oligonucleotide
caucacgccagucaacagucuggag

SEQ ID NO: 27549 - RNA, 25 nt, Artificial Sequence
  Description of Artificial Sequence: Synthetic oligonucleotide
gaaacacuccugguaccaugggccu

SEQ ID NO: 27550 - RNA, 25 nt, Artificial Sequence
  Description of Artificial Sequence: Synthetic oligonucleotide
ugugucccgcaaugccgcugaguau

SEQ ID NO: 27551 - RNA, 25 nt, Artificial Sequence
  Description of Artificial Sequence: Synthetic oligonucleotide
ucugcugagcagcgggaucaauggc

SEQ ID NO: 27552 - RNA, 25 nt, Artificial Sequence
  Description of Artificial Sequence: Synthetic oligonucleotide
cagcuucuuggugcgugagagugag

SEQ ID NO: 27553 - RNA, 25 nt, Artificial Sequence
  Description of Artificial Sequence: Synthetic oligonucleotide
gagcaguccuggccagagguccauc

SEQ ID NO: 27554 - RNA, 25 nt, Artificial Sequence
  Description of Artificial Sequence: Synthetic oligonucleotide
cucgcugagauacgaagggagggug

SEQ ID NO: 27555 - RNA, 25 nt, Artificial Sequence
  Description of Artificial Sequence: Synthetic oligonucleotide
guaccauuacaggaucaacacugcu

SEQ ID NO: 27556 - RNA, 25 nt, Artificial Sequence
  Description of Artificial Sequence: Synthetic oligonucleotide
uucugauggcaagcucuacgucucc

SEQ ID NO: 27557 - RNA, 25 nt, Artificial Sequence
  Description of Artificial Sequence: Synthetic oligonucleotide
cuccgagagccgcuucaacacccug

SEQ ID NO: 27558 - RNA, 25 nt, Artificial Sequence
  Description of Artificial Sequence: Synthetic oligonucleotide
ggccgaguugguucaucaucauuca

SEQ ID NO: 27559 - RNA, 25 nt, Artificial Sequence
  Description of Artificial Sequence: Synthetic oligonucleotide
aacgguggccgacgggcucaucacc

SEQ ID NO: 27560 - RNA, 25 nt, Artificial Sequence
  Description of Artificial Sequence: Synthetic oligonucleotide
cacgcuccauuauccagccccaaag

SEQ ID NO: 27561 - RNA, 25 nt, Artificial Sequence
  Description of Artificial Sequence: Synthetic oligonucleotide
gcgcaacaagcccacugucuauggu

SEQ ID NO: 27562 - RNA, 25 nt, Artificial Sequence
  Description of Artificial Sequence: Synthetic oligonucleotide
cgaacaagggcagcaaagcuacgga

SEQ ID NO: 27563 - RNA, 25 nt, Artificial Sequence
  Description of Artificial Sequence: Synthetic oligonucleotide
agaggcugaagaagaagcugucgga

SEQ ID NO: 27564 - RNA, 25 nt, Artificial Sequence
  Description of Artificial Sequence: Synthetic oligonucleotide
agcaggagucacugcugcugcuuau

SEQ ID NO: 27565 - RNA, 25 nt, Artificial Sequence
  Description of Artificial Sequence: Synthetic oligonucleotide
ugucucccagcauggccuucagggu

SEQ ID NO: 27566 - RNA, 25 nt, Artificial Sequence
  Description of Artificial Sequence: Synthetic oligonucleotide
ugcacagccgcaacggcaagaguua

SEQ ID NO: 27567 - RNA, 25 nt, Artificial Sequence
  Description of Artificial Sequence: Synthetic oligonucleotide
acacguuccugaucuccucugacua

SEQ ID NO: 27568 - RNA, 25 nt, Artificial Sequence
  Description of Artificial Sequence: Synthetic oligonucleotide
augagcgugcagaguggagggagaa

SEQ ID NO: 27569 - RNA, 25 nt, Artificial Sequence
  Description of Artificial Sequence: Synthetic oligonucleotide
acauccgggagcagcagaagaagug

SEQ ID NO: 27570 - RNA, 25 nt, Artificial Sequence
  Description of Artificial Sequence: Synthetic oligonucleotide
guuucagaagcuucucccugacauc

SEQ ID NO: 27571 - RNA, 25 nt, Artificial Sequence
  Description of Artificial Sequence: Synthetic oligonucleotide
ccguggagcugcagaugcugaccaa

SEQ ID NO: 27572 - RNA, 25 nt, Artificial Sequence
  Description of Artificial Sequence: Synthetic oligonucleotide
acucgugugugaaacuccagacugu

SEQ ID NO: 27573 - RNA, 25 nt, Artificial Sequence
  Description of Artificial Sequence: Synthetic oligonucleotide
uccacagcauuccgcugaccaucaa

SEQ ID NO: 27574 - RNA, 25 nt, Artificial Sequence
  Description of Artificial Sequence: Synthetic oligonucleotide
auaaggaagaugaugagucuccggg

SEQ ID NO: 27575 - RNA, 25 nt, Artificial Sequence
  Description of Artificial Sequence: Synthetic oligonucleotide
ggcucuauggguuucugaaugucau

SEQ ID NO: 27576 - RNA, 25 nt, Artificial Sequence
  Description of Artificial Sequence: Synthetic oligonucleotide
ucguccacucagccacuggauuuaa

SEQ ID NO: 27577 - RNA, 25 nt, Artificial Sequence
  Description of Artificial Sequence: Synthetic oligonucleotide
gccacuggauuuaagcagaguucaa

SEQ ID NO: 27578 - RNA, 25 nt, Artificial Sequence
  Description of Artificial Sequence: Synthetic oligonucleotide
ccacuggauuuaagcagaguucaaa

SEQ ID NO: 27579 - RNA, 25 nt, Artificial Sequence
  Description of Artificial Sequence: Synthetic oligonucleotide
cacuggauuuaagcagaguucaaaa

SEQ ID NO: 27580 - RNA, 25 nt, Artificial Sequence
  Description of Artificial Sequence: Synthetic oligonucleotide
uggauuuaagcagaguucaaaagcc

SEQ ID NO: 27581 - RNA, 25 nt, Artificial Sequence
  Description of Artificial Sequence: Synthetic oligonucleotide
ggauuuaagcagaguucaaaagccc

SEQ ID NO: 27582 - RNA, 25 nt, Artificial Sequence
  Description of Artificial Sequence: Synthetic oligonucleotide
uuuaagcagaguucaaaagcccuuc

SEQ ID NO: 27583 - RNA, 25 nt, Artificial Sequence
  Description of Artificial Sequence: Synthetic oligonucleotide
aagcagaguucaaaagcccuucagc

SEQ ID NO: 27584 - RNA, 25 nt, Artificial Sequence
  Description of Artificial Sequence: Synthetic oligonucleotide
gcagaguucaaaagcccuucagcgg

SEQ ID NO: 27585 - RNA, 25 nt, Artificial Sequence
  Description of Artificial Sequence: Synthetic oligonucleotide
cagaguucaaaagcccuucagcggc

SEQ ID NO: 27586 - RNA, 25 nt, Artificial Sequence
  Description of Artificial Sequence: Synthetic oligonucleotide
agaguucaaaagcccuucagcggcc

SEQ ID NO: 27587 - RNA, 25 nt, Artificial Sequence
  Description of Artificial Sequence: Synthetic oligonucleotide
gaguucaaaagcccuucagcggcca

SEQ ID NO: 27588 - RNA, 25 nt, Artificial Sequence
  Description of Artificial Sequence: Synthetic oligonucleotide
aguucaaaagcccuucagcggccag

SEQ ID NO: 27589 - RNA, 25 nt, Artificial Sequence
  Description of Artificial Sequence: Synthetic oligonucleotide
guucaaaagcccuucagcggccagu

SEQ ID NO: 27590 - RNA, 25 nt, Artificial Sequence
  Description of Artificial Sequence: Synthetic oligonucleotide
uucaaaagcccuucagcggccagua

SEQ ID NO: 27591 - RNA, 25 nt, Artificial Sequence
  Description of Artificial Sequence: Synthetic oligonucleotide
ucaaaagcccuucagcggccaguag

SEQ ID NO: 27592 - RNA, 25 nt, Artificial Sequence
  Description of Artificial Sequence: Synthetic oligonucleotide
caaaagcccuucagcggccaguagc

SEQ ID NO: 27593 - RNA, 25 nt, Artificial Sequence
  Description of Artificial Sequence: Synthetic oligonucleotide
aaaagcccuucagcggccaguagca

SEQ ID NO: 27594 - RNA, 25 nt, Artificial Sequence
  Description of Artificial Sequence: Synthetic oligonucleotide
aaagcccuucagcggccaguagcau

SEQ ID NO: 27595 - RNA, 25 nt, Artificial Sequence
  Description of Artificial Sequence: Synthetic oligonucleotide
guuggaacuccaaggaaaaccuucu

SEQ ID NO: 27596 - RNA, 25 nt, Artificial Sequence
  Description of Artificial Sequence: Synthetic oligonucleotide
ucgcuggacccagugaaaaugaccc

SEQ ID NO: 27597 - RNA, 25 nt, Artificial Sequence
  Description of Artificial Sequence: Synthetic oligonucleotide
ccaaccuuuucguugcacuguauga

SEQ ID NO: 27598 - RNA, 25 nt, Artificial Sequence
  Description of Artificial Sequence: Synthetic oligonucleotide
auuuuguggccaguggagauaacac

SEQ ID NO: 27599 - RNA, 25 nt, Artificial Sequence
  Description of Artificial Sequence: Synthetic oligonucleotide
cucuaagcauaacuaaaggugaaaa

SEQ ID NO: 27600 - RNA, 25 nt, Artificial Sequence
  Description of Artificial Sequence: Synthetic oligonucleotide
agcuccgggucuuaggcuauaauca

SEQ ID NO: 27601 - RNA, 25 nt, Artificial Sequence
  Description of Artificial Sequence: Synthetic oligonucleotide
acaauggggaauggugugaagccca

SEQ ID NO: 27602 - RNA, 25 nt, Artificial Sequence
  Description of Artificial Sequence: Synthetic oligonucleotide
aaaccaaaaauggccaaggcugggu

SEQ ID NO: 27603 - RNA, 25 nt, Artificial Sequence
  Description of Artificial Sequence: Synthetic oligonucleotide
ucccaagcaacuacaucacgccagu

SEQ ID NO: 27604 - RNA, 25 nt, Artificial Sequence
  Description of Artificial Sequence: Synthetic oligonucleotide
ucaacagucuggagaaacacuccug

SEQ ID NO: 27605 - RNA, 25 nt, Artificial Sequence
  Description of Artificial Sequence: Synthetic oligonucleotide
gguaccaugggccugugucccgcaa

SEQ ID NO: 27606 - RNA, 25 nt, Artificial Sequence
  Description of Artificial Sequence: Synthetic oligonucleotide
augccgcugaguaucugcugagcag

SEQ ID NO: 27607 - RNA, 25 nt, Artificial Sequence
  Description of Artificial Sequence: Synthetic oligonucleotide
gcgggaucaauggcagcuucuuggu

SEQ ID NO: 27608 - RNA, 25 nt, Artificial Sequence
  Description of Artificial Sequence: Synthetic oligonucleotide
ugcgugagagugagagcaguccugg

SEQ ID NO: 27609 - RNA, 25 nt, Artificial Sequence
  Description of Artificial Sequence: Synthetic oligonucleotide
gccagagguccaucucgcugagaua

SEQ ID NO: 27610 - RNA, 25 nt, Artificial Sequence
  Description of Artificial Sequence: Synthetic oligonucleotide
acgaagggaggguguaccauuacag

SEQ ID NO: 27611 - RNA, 25 nt, Artificial Sequence
  Description of Artificial Sequence: Synthetic oligonucleotide
ggaucaacacugcuucugauggcaa

SEQ ID NO: 27612 - RNA, 25 nt, Artificial Sequence
  Description of Artificial Sequence: Synthetic oligonucleotide
agcucuacgucuccuccgagagccg

SEQ ID NO: 27613 - RNA, 25 nt, Artificial Sequence
  Description of Artificial Sequence: Synthetic oligonucleotide
gcuucaacacccuggccgaguuggu

SEQ ID NO: 27614 - RNA, 25 nt, Artificial Sequence
  Description of Artificial Sequence: Synthetic oligonucleotide
uucaucaucauucaacgguggccga

SEQ ID NO: 27615 - RNA, 25 nt, Artificial Sequence
  Description of Artificial Sequence: Synthetic oligonucleotide
acgggcucaucaccacgcuccauua

SEQ ID NO: 27616 - RNA, 25 nt, Artificial Sequence
  Description of Artificial Sequence: Synthetic oligonucleotide
auccagccccaaagcgcaacaagcc

SEQ ID NO: 27617 - RNA, 25 nt, Artificial Sequence
  Description of Artificial Sequence: Synthetic oligonucleotide
ccacugucuaugguguguccccuaa

SEQ ID NO: 27618 - RNA, 25 nt, Artificial Sequence
  Description of Artificial Sequence: Synthetic oligonucleotide
agcaaggcuacggagaggcugaaga

SEQ ID NO: 27619 - RNA, 25 nt, Artificial Sequence
  Description of Artificial Sequence: Synthetic oligonucleotide
aagaagcugucggagcaggagucac

SEQ ID NO: 27620 - RNA, 25 nt, Artificial Sequence
  Description of Artificial Sequence: Synthetic oligonucleotide
cugcugcugcuuaugucucccagca

SEQ ID NO: 27621 - RNA, 25 nt, Artificial Sequence
  Description of Artificial Sequence: Synthetic oligonucleotide
auggccuucagggugcacagccgca

SEQ ID NO: 27622 - RNA, 25 nt, Artificial Sequence
  Description of Artificial Sequence: Synthetic oligonucleotide
aacggcaagaguuacacguuccuga

SEQ ID NO: 27623 - RNA, 25 nt, Artificial Sequence
  Description of Artificial Sequence: Synthetic oligonucleotide
aucuccucugacuaugagcgugcag

SEQ ID NO: 27624 - RNA, 25 nt, Artificial Sequence
  Description of Artificial Sequence: Synthetic oligonucleotide
gaguggagggagaacauccgggagc

SEQ ID NO: 27625 - RNA, 25 nt, Artificial Sequence
  Description of Artificial Sequence: Synthetic oligonucleotide
cagcagaagaaguguuucagaagcu

SEQ ID NO: 27626 - RNA, 25 nt, Artificial Sequence
  Description of Artificial Sequence: Synthetic oligonucleotide
uucucccugacauccguggagcugc

SEQ ID NO: 27627 - RNA, 25 nt, Artificial Sequence
  Description of Artificial Sequence: Synthetic oligonucleotide
cagaugcugaccaacucguguguga

SEQ ID NO: 27628 - RNA, 25 nt, Artificial Sequence
  Description of Artificial Sequence: Synthetic oligonucleotide
aaacuccagacuguccacagcauuc

SEQ ID NO: 27629 - RNA, 25 nt, Artificial Sequence
  Description of Artificial Sequence: Synthetic oligonucleotide
auuccgcugaccaucaauaaggaag

SEQ ID NO: 27630 - RNA, 25 nt, Artificial Sequence
  Description of Artificial Sequence: Synthetic oligonucleotide
uuccgcugaccaucaauaaggaaga

SEQ ID NO: 27631 - RNA, 25 nt, Artificial Sequence
  Description of Artificial Sequence: Synthetic oligonucleotide
uccgcugaccaucaauaaggaagaa

SEQ ID NO: 27632 - RNA, 25 nt, Artificial Sequence
  Description of Artificial Sequence: Synthetic oligonucleotide
ccgcugaccaucaauaaggaagaag

SEQ ID NO: 27633 - RNA, 25 nt, Artificial Sequence
  Description of Artificial Sequence: Synthetic oligonucleotide
cgcugaccaucaauaaggaagaagc

SEQ ID NO: 27634 - RNA, 25 nt, Artificial Sequence
  Description of Artificial Sequence: Synthetic oligonucleotide
gcugaccaucaauaaggaagaagcc

SEQ ID NO: 27635 - RNA, 25 nt, Artificial Sequence
  Description of Artificial Sequence: Synthetic oligonucleotide
cugaccaucaauaaggaagaagccc

SEQ ID NO: 27636 - RNA, 25 nt, Artificial Sequence
  Description of Artificial Sequence: Synthetic oligonucleotide
ugaccaucaauaaggaagaagcccu

SEQ ID NO: 27637 - RNA, 25 nt, Artificial Sequence
  Description of Artificial Sequence: Synthetic oligonucleotide
accaucaauaaggaagaagcccuuc

SEQ ID NO: 27638 - RNA, 25 nt, Artificial Sequence
  Description of Artificial Sequence: Synthetic oligonucleotide
caucaauaaggaagaagcccuucag

SEQ ID NO: 27639 - RNA, 25 nt, Artificial Sequence
  Description of Artificial Sequence: Synthetic oligonucleotide
aucaauaaggaagaagcccuucagc

SEQ ID NO: 27640 - RNA, 25 nt, Artificial Sequence
  Description of Artificial Sequence: Synthetic oligonucleotide
caauaaggaagaagcccuucagcgg

SEQ ID NO: 27641 - RNA, 25 nt, Artificial Sequence
  Description of Artificial Sequence: Synthetic oligonucleotide
auaaggaagaagcccuucagcggcc

SEQ ID NO: 27642 - RNA, 25 nt, Artificial Sequence
  Description of Artificial Sequence: Synthetic oligonucleotide
uaaggaagaagcccuucagcggcca

SEQ ID NO: 27643 - RNA, 25 nt, Artificial Sequence
  Description of Artificial Sequence: Synthetic oligonucleotide
aaggaagaagcccuucagcggccag

SEQ ID NO: 27644 - RNA, 25 nt, Artificial Sequence
  Description of Artificial Sequence: Synthetic oligonucleotide
ggaagaagcccuucagcggccagua

SEQ ID NO: 27645 - RNA, 25 nt, Artificial Sequence
  Description of Artificial Sequence: Synthetic oligonucleotide
gaagaagcccuucagcggccaguag

SEQ ID NO: 27646 - RNA, 25 nt, Artificial Sequence
  Description of Artificial Sequence: Synthetic oligonucleotide
aagaagcccuucagcggccaguagc

SEQ ID NO: 27647 - RNA, 25 nt, Artificial Sequence
  Description of Artificial Sequence: Synthetic oligonucleotide
gacuuugagccucagggucugagug

SEQ ID NO: 27648 - RNA, 25 nt, Artificial Sequence
  Description of Artificial Sequence: Synthetic oligonucleotide
gaagccgcucguuggaacuccaagg

SEQ ID NO: 27649 - RNA, 25 nt, Artificial Sequence
  Description of Artificial Sequence: Synthetic oligonucleotide
gaaaaccuucucgcuggacccagug

SEQ ID NO: 27650 - RNA, 25 nt, Artificial Sequence
  Description of Artificial Sequence: Synthetic oligonucleotide
gaaaaugaccccaaccuuuucguug

SEQ ID NO: 27651 - RNA, 25 nt, Artificial Sequence
  Description of Artificial Sequence: Synthetic oligonucleotide
gcacuguaugauuuuguggccagug

SEQ ID NO: 27652 - RNA, 25 nt, Artificial Sequence
  Description of Artificial Sequence: Synthetic oligonucleotide
ggagauaacacucuaagcauaacua

SEQ ID NO: 27653 - RNA, 25 nt, Artificial Sequence
  Description of Artificial Sequence: Synthetic oligonucleotide
aaaggugaaaagcuccgggucuuag

SEQ ID NO: 27654 - RNA, 25 nt, Artificial Sequence
  Description of Artificial Sequence: Synthetic oligonucleotide
ggcuauaaucacaauggggaauggu

SEQ ID NO: 27655 - RNA, 25 nt, Artificial Sequence
  Description of Artificial Sequence: Synthetic oligonucleotide
ugugaagcccaaaccaaaaauggcc

SEQ ID NO: 27656 - RNA, 25 nt, Artificial Sequence
  Description of Artificial Sequence: Synthetic oligonucleotide
caaggcugggucccaagcaacuaca

SEQ ID NO: 27657 - RNA, 25 nt, Artificial Sequence
  Description of Artificial Sequence: Synthetic oligonucleotide
aucacgccagucaacagucuggaga

SEQ ID NO: 27658 - RNA, 25 nt, Artificial Sequence
  Description of Artificial Sequence: Synthetic oligonucleotide
aaacacuccugguaccaugggccug

SEQ ID NO: 27659 - RNA, 25 nt, Artificial Sequence
  Description of Artificial Sequence: Synthetic oligonucleotide
gugucccgcaaugccgcugaguauc

SEQ ID NO: 27660 - RNA, 25 nt, Artificial Sequence
  Description of Artificial Sequence: Synthetic oligonucleotide
cugcugagcagcgggaucaauggca

SEQ ID NO: 27661 - RNA, 25 nt, Artificial Sequence
  Description of Artificial Sequence: Synthetic oligonucleotide
agcuucuuggugcgugagagugaga

SEQ ID NO: 27662 - RNA, 25 nt, Artificial Sequence
  Description of Artificial Sequence: Synthetic oligonucleotide
agcaguccuggccagagguccaucu

SEQ ID NO: 27663 - RNA, 25 nt, Artificial Sequence
  Description of Artificial Sequence: Synthetic oligonucleotide
ucgcugagauacgaagggagggugu

SEQ ID NO: 27664 - RNA, 25 nt, Artificial Sequence
  Description of Artificial Sequence: Synthetic oligonucleotide
uaccauuacaggaucaacacugcuu

SEQ ID NO: 27665 - RNA, 25 nt, Artificial Sequence
  Description of Artificial Sequence: Synthetic oligonucleotide
ucugauggcaagcucuacgucuccu

SEQ ID NO: 27666 - RNA, 25 nt, Artificial Sequence
  Description of Artificial Sequence: Synthetic oligonucleotide
uccgagagccgcuucaacacccugg

SEQ ID NO: 27667 - RNA, 25 nt, Artificial Sequence
  Description of Artificial Sequence: Synthetic oligonucleotide
gccgaguugguucaucaucauucaa

SEQ ID NO: 27668 - RNA, 25 nt, Artificial Sequence
  Description of Artificial Sequence: Synthetic oligonucleotide
acgguggccgacgggcucaucacca

SEQ ID NO: 27669 - RNA, 25 nt, Artificial Sequence
  Description of Artificial Sequence: Synthetic oligonucleotide
acgcuccauuauccagccccaaagc

SEQ ID NO: 27670 - RNA, 25 nt, Artificial Sequence
  Description of Artificial Sequence: Synthetic oligonucleotide
cgcaacaagcccacugucuauggug

SEQ ID NO: 27671 - RNA, 25 nt, Artificial Sequence
  Description of Artificial Sequence: Synthetic oligonucleotide
cagcauggccuucagggugcacagc

SEQ ID NO: 27672 - RNA, 25 nt, Artificial Sequence
  Description of Artificial Sequence: Synthetic oligonucleotide
ccgcaacggcaagaguuacacguuc

SEQ ID NO: 27673 - RNA, 25 nt, Artificial Sequence
  Description of Artificial Sequence: Synthetic oligonucleotide
ccugaucuccucugacuaugagcgu

SEQ ID NO: 27674 - RNA, 25 nt, Artificial Sequence
  Description of Artificial Sequence: Synthetic oligonucleotide
ugcagaguggagggagaacauccgg

SEQ ID NO: 27675 - RNA, 25 nt, Artificial Sequence
  Description of Artificial Sequence: Synthetic oligonucleotide
ggagcagcagaagaaguguuucaga

SEQ ID NO: 27676 - RNA, 25 nt, Artificial Sequence
  Description of Artificial Sequence: Synthetic oligonucleotide
aagcuucucccugacauccguggag

SEQ ID NO: 27677 - RNA, 25 nt, Artificial Sequence
  Description of Artificial Sequence: Synthetic oligonucleotide
gcugcagaugccgaccaacucgugu

SEQ ID NO: 27678 - RNA, 25 nt, Artificial Sequence
  Description of Artificial Sequence: Synthetic oligonucleotide
ugugaaacuccagacuguccacagc

SEQ ID NO: 27679 - RNA, 25 nt, Artificial Sequence
  Description of Artificial Sequence: Synthetic oligonucleotide
cauuccgcugaccaucaauaaggaa

SEQ ID NO: 27680 - RNA, 25 nt, Artificial Sequence
  Description of Artificial Sequence: Synthetic oligonucleotide
agaugaugagucuccggggcucuau

SEQ ID NO: 27681 - RNA, 25 nt, Artificial Sequence
  Description of Artificial Sequence: Synthetic oligonucleotide
uggguuucugaaugucaucguccac

SEQ ID NO: 27682 - RNA, 25 nt, Artificial Sequence
  Description of Artificial Sequence: Synthetic oligonucleotide
cucagccacuggauuuaagcagagu

SEQ ID NO: 27683 - RNA, 25 nt, Artificial Sequence
  Description of Artificial Sequence: Synthetic oligonucleotide
uucaaaucuguacugcacccuggag

SEQ ID NO: 27684 - RNA, 25 nt, Artificial Sequence
  Description of Artificial Sequence: Synthetic oligonucleotide
gguggauuccuuuggguauuuugug

SEQ ID NO: 27685 - RNA, 25 nt, Artificial Sequence
  Description of Artificial Sequence: Synthetic oligonucleotide
gaauaaagcaaagacgcgcgucuac

SEQ ID NO: 27686 - RNA, 25 nt, Artificial Sequence
  Description of Artificial Sequence: Synthetic oligonucleotide
cagggacacagcugagccaaacugg

SEQ ID NO: 27687 - RNA, 25 nt, Artificial Sequence
  Description of Artificial Sequence: Synthetic oligonucleotide
gaacgaggaauuugagauagagcug

SEQ ID NO: 27688 - RNA, 25 nt, Artificial Sequence
  Description of Artificial Sequence: Synthetic oligonucleotide
ggagggcucccagacccugaggaua

SEQ ID NO: 27689 - RNA, 25 nt, Artificial Sequence
  Description of Artificial Sequence: Synthetic oligonucleotide
acugugcuaugaaaaguguuacaac

SEQ ID NO: 27690 - RNA, 25 nt, Artificial Sequence
  Description of Artificial Sequence: Synthetic oligonucleotide
caagacgaagauccccaaggaggac

SEQ ID NO: 27691 - RNA, 25 nt, Artificial Sequence
  Description of Artificial Sequence: Synthetic oligonucleotide
cggcgagagcacggacagacucaug

SEQ ID NO: 27692 - RNA, 25 nt, Artificial Sequence
  Description of Artificial Sequence: Synthetic oligonucleotide
ggggaagggccagguccagcuggac

SEQ ID NO: 27693 - RNA, 25 nt, Artificial Sequence
  Description of Artificial Sequence: Synthetic oligonucleotide
cccgcaggcccugcaggacagagac

SEQ ID NO: 27694 - RNA, 25 nt, Artificial Sequence
  Description of Artificial Sequence: Synthetic oligonucleotide
cuggcagcgcaccgucaucgccaug

SEQ ID NO: 27695 - RNA, 25 nt, Artificial Sequence
  Description of Artificial Sequence: Synthetic oligonucleotide
gaaugggaucgaaguaaagcucucg

SEQ ID NO: 27696 - RNA, 25 nt, Artificial Sequence
  Description of Artificial Sequence: Synthetic oligonucleotide
ggucaaguucaacagcagggaguuc

SEQ ID NO: 27697 - RNA, 25 nt, Artificial Sequence
  Description of Artificial Sequence: Synthetic oligonucleotide
cagcuugaagaggaugccgucccga

SEQ ID NO: 27698 - RNA, 25 nt, Artificial Sequence
  Description of Artificial Sequence: Synthetic oligonucleotide
aaaacagacagggguccucggaguc

SEQ ID NO: 27699 - RNA, 25 nt, Artificial Sequence
  Description of Artificial Sequence: Synthetic oligonucleotide
caagauugcuguggucaccaagaga

SEQ ID NO: 27700 - RNA, 25 nt, Artificial Sequence
  Description of Artificial Sequence: Synthetic oligonucleotide
agagagguccaaggugcccuacauc

SEQ ID NO: 27701 - RNA, 25 nt, Artificial Sequence
  Description of Artificial Sequence: Synthetic oligonucleotide
cgugcgccagugcguggaggagauc

SEQ ID NO: 27702 - RNA, 25 nt, Artificial Sequence
  Description of Artificial Sequence: Synthetic oligonucleotide
cgagcgccgaggcauggaggaggug

SEQ ID NO: 27703 - RNA, 25 nt, Artificial Sequence
  Description of Artificial Sequence: Synthetic oligonucleotide
gggcaucuaccgcguguccggugug

SEQ ID NO: 27704 - RNA, 25 nt, Artificial Sequence
  Description of Artificial Sequence: Synthetic oligonucleotide
ggccacggacauccaggcacugaag

SEQ ID NO: 27705 - RNA, 25 nt, Artificial Sequence
  Description of Artificial Sequence: Synthetic oligonucleotide
gcacugaaggcagccuucgacguca

SEQ ID NO: 27706 - RNA, 25 nt, Artificial Sequence
  Description of Artificial Sequence: Synthetic oligonucleotide
cacugaaggcagccuucgacgucaa

SEQ ID NO: 27707 - RNA, 25 nt, Artificial Sequence
  Description of Artificial Sequence: Synthetic oligonucleotide
acugaaggcagccuucgacgucaaa

SEQ ID NO: 27708 - RNA, 25 nt, Artificial Sequence
  Description of Artificial Sequence: Synthetic oligonucleotide
cugaaggcagccuucgacgucaaag

SEQ ID NO: 27709 - RNA, 25 nt, Artificial Sequence
  Description of Artificial Sequence: Synthetic oligonucleotide
ugaaggcagccuucgacgucaaagc

SEQ ID NO: 27710 - RNA, 25 nt, Artificial Sequence
  Description of Artificial Sequence: Synthetic oligonucleotide
gaaggcagccuucgacgucaaagcc

SEQ ID NO: 27711 - RNA, 25 nt, Artificial Sequence
  Description of Artificial Sequence: Synthetic oligonucleotide
aaggcagccuucgacgucaaagccc

SEQ ID NO: 27712 - RNA, 25 nt, Artificial Sequence
  Description of Artificial Sequence: Synthetic oligonucleotide
aggcagccuucgacgucaaagcccu

SEQ ID NO: 27713 - RNA, 25 nt, Artificial Sequence
  Description of Artificial Sequence: Synthetic oligonucleotide
ggcagccuucgacgucaaagcccuu

SEQ ID NO: 27714 - RNA, 25 nt, Artificial Sequence
  Description of Artificial Sequence: Synthetic oligonucleotide
gcagccuucgacgucaaagcccuuc

SEQ ID NO: 27715 - RNA, 25 nt, Artificial Sequence
  Description of Artificial Sequence: Synthetic oligonucleotide
cagccuucgacgucaaagcccuuca

SEQ ID NO: 27716 - RNA, 25 nt, Artificial Sequence
  Description of Artificial Sequence: Synthetic oligonucleotide
agccuucgacgucaaagcccuucag

SEQ ID NO: 27717 - RNA, 25 nt, Artificial Sequence
  Description of Artificial Sequence: Synthetic oligonucleotide
gccuucgacgucaaagcccuucagc

SEQ ID NO: 27718 - RNA, 25 nt, Artificial Sequence
  Description of Artificial Sequence: Synthetic oligonucleotide
ccuucgacgucaaagcccuucagcg

SEQ ID NO: 27719 - RNA, 25 nt, Artificial Sequence
  Description of Artificial Sequence: Synthetic oligonucleotide
cuucgacgucaaagcccuucagcgg

SEQ ID NO: 27720 - RNA, 25 nt, Artificial Sequence
  Description of Artificial Sequence: Synthetic oligonucleotide
uucgacgucaaagcccuucagcggc

SEQ ID NO: 27721 - RNA, 25 nt, Artificial Sequence
  Description of Artificial Sequence: Synthetic oligonucleotide
ucgacgucaaagcccuucagcggcc

SEQ ID NO: 27722 - RNA, 25 nt, Artificial Sequence
  Description of Artificial Sequence: Synthetic oligonucleotide
cgacgucaaagcccuucagcggcca

SEQ ID NO: 27723 - RNA, 25 nt, Artificial Sequence
  Description of Artificial Sequence: Synthetic oligonucleotide
gacgucaaagcccuucagcggccag

SEQ ID NO: 27724 - RNA, 25 nt, Artificial Sequence
  Description of Artificial Sequence: Synthetic oligonucleotide
acgucaaagcccuucagcggccagu

SEQ ID NO: 27725 - RNA, 25 nt, Artificial Sequence
  Description of Artificial Sequence: Synthetic oligonucleotide
cgucaaagcccuucagcggccagua

SEQ ID NO: 27726 - RNA, 25 nt, Artificial Sequence
  Description of Artificial Sequence: Synthetic oligonucleotide
gucaaagcccuucagcggccaguag

SEQ ID NO: 27727 - RNA, 25 nt, Artificial Sequence
  Description of Artificial Sequence: Synthetic oligonucleotide
ucaaagcccuucagcggccaguagc

SEQ ID NO: 27728 - RNA, 25 nt, Artificial Sequence
  Description of Artificial Sequence: Synthetic oligonucleotide
caaagcccuucagcggccaguagca

SEQ ID NO: 27729 - RNA, 25 nt, Artificial Sequence
  Description of Artificial Sequence: Synthetic oligonucleotide
ugagccucagggucugagugaagcc

SEQ ID NO: 27730 - RNA, 25 nt, Artificial Sequence
  Description of Artificial Sequence: Synthetic oligonucleotide
cgcucguuggaacuccaaggaaaac

SEQ ID NO: 27731 - RNA, 25 nt, Artificial Sequence
  Description of Artificial Sequence: Synthetic oligonucleotide
ccuucucgcuggacccagugaaaau

SEQ ID NO: 27732 - RNA, 25 nt, Artificial Sequence
  Description of Artificial Sequence: Synthetic oligonucleotide
ugaccccaaccuuuucguugcacug

SEQ ID NO: 27733 - RNA, 25 nt, Artificial Sequence
  Description of Artificial Sequence: Synthetic oligonucleotide
guaugauuuuguggccaguggagau

SEQ ID NO: 27734 - RNA, 25 nt, Artificial Sequence
  Description of Artificial Sequence: Synthetic oligonucleotide
uaacacucuaagcauaacuaaaggu

SEQ ID NO: 27735 - RNA, 25 nt, Artificial Sequence
  Description of Artificial Sequence: Synthetic oligonucleotide
ugaaaagcuccgggucuuaggcuau

SEQ ID NO: 27736 - RNA, 25 nt, Artificial Sequence
  Description of Artificial Sequence: Synthetic oligonucleotide
uaaucacaauggggaauggugugaa

SEQ ID NO: 27737 - RNA, 25 nt, Artificial Sequence
  Description of Artificial Sequence: Synthetic oligonucleotide
agcccaaaccaaaaauggccaaggc

SEQ ID NO: 27738 - RNA, 25 nt, Artificial Sequence
  Description of Artificial Sequence: Synthetic oligonucleotide
cugggucccaagcaacuacaucacg

SEQ ID NO: 27739 - RNA, 25 nt, Artificial Sequence
  Description of Artificial Sequence: Synthetic oligonucleotide
gccagucaacagucuggagaaacac

SEQ ID NO: 27740 - RNA, 25 nt, Artificial Sequence
  Description of Artificial Sequence: Synthetic oligonucleotide
cuccugguaccaugggccugugucc

SEQ ID NO: 27741 - RNA, 25 nt, Artificial Sequence
  Description of Artificial Sequence: Synthetic oligonucleotide
ccgcaaugccgcugagcaucugcug

SEQ ID NO: 27742 - RNA, 25 nt, Artificial Sequence
  Description of Artificial Sequence: Synthetic oligonucleotide
gagcagcgggaucaauggcagcuuc

SEQ ID NO: 27743 - RNA, 25 nt, Artificial Sequence
  Description of Artificial Sequence: Synthetic oligonucleotide
cuuggugcgugagagugagagcagu

SEQ ID NO: 27744 - RNA, 25 nt, Artificial Sequence
  Description of Artificial Sequence: Synthetic oligonucleotide
uccuggccagagguccaucucgcug

SEQ ID NO: 27745 - RNA, 25 nt, Artificial Sequence
  Description of Artificial Sequence: Synthetic oligonucleotide
gagauacgaagggaggguguaccau

SEQ ID NO: 27746 - RNA, 25 nt, Artificial Sequence
  Description of Artificial Sequence: Synthetic oligonucleotide
uuacaggaucaacacugcuucugau

SEQ ID NO: 27747 - RNA, 25 nt, Artificial Sequence
  Description of Artificial Sequence: Synthetic oligonucleotide
uggcaagcucuacgucuccuccgag

SEQ ID NO: 27748 - RNA, 25 nt, Artificial Sequence
  Description of Artificial Sequence: Synthetic oligonucleotide
gagccgcuucaacacccuggccgag

SEQ ID NO: 27749 - RNA, 25 nt, Artificial Sequence
  Description of Artificial Sequence: Synthetic oligonucleotide
guugguucaucaucauucaacggug

SEQ ID NO: 27750 - RNA, 25 nt, Artificial Sequence
  Description of Artificial Sequence: Synthetic oligonucleotide
ggccgacgggcucaucaccacgcuc

SEQ ID NO: 27751 - RNA, 25 nt, Artificial Sequence
  Description of Artificial Sequence: Synthetic oligonucleotide
ccauuauccagccccaaagcgcaac

SEQ ID NO: 27752 - RNA, 25 nt, Artificial Sequence
  Description of Artificial Sequence: Synthetic oligonucleotide
caagcccucugucuauggugugucc

SEQ ID NO: 27753 - RNA, 25 nt, Artificial Sequence
  Description of Artificial Sequence: Synthetic oligonucleotide
ccccaacuacgacaagugggagaug

SEQ ID NO: 27754 - RNA, 25 nt, Artificial Sequence
  Description of Artificial Sequence: Synthetic oligonucleotide
ggaacgcacggacaucaccaugaag

SEQ ID NO: 27755 - RNA, 19 nt, Artificial Sequence
  Description of Artificial Sequence: Synthetic oligonucleotide
ggggggaggguggcggcuc

SEQ ID NO: 27756 - RNA, 19 nt, Artificial Sequence
  Description of Artificial Sequence: Synthetic oligonucleotide
cgaugggggagccgccucc

SEQ ID NO: 27757 - RNA, 19 nt, Artificial Sequence
  Description of Artificial Sequence: Synthetic oligonucleotide
cagggggcccccccgcccu

SEQ ID NO: 27758 - RNA, 19 nt, Artificial Sequence
  Description of Artificial Sequence: Synthetic oligonucleotide
ugugcccacggcgcggccc

SEQ ID NO: 27759 - RNA, 19 nt, Artificial Sequence
  Description of Artificial Sequence: Synthetic oligonucleotide
ccuuuaagaggcccgccug

SEQ ID NO: 27760 - RNA, 19 nt, Artificial Sequence
  Description of Artificial Sequence: Synthetic oligonucleotide
ggcuccgucauccgcgccg

SEQ ID NO: 27761 - RNA, 19 nt, Artificial Sequence
  Description of Artificial Sequence: Synthetic oligonucleotide
gcggccaccuccccccggc

SEQ ID NO: 27762 - RNA, 19 nt, Artificial Sequence
  Description of Artificial Sequence: Synthetic oligonucleotide
cccuccccuuccugcggcg

SEQ ID NO: 27763 - RNA, 19 nt, Artificial Sequence
  Description of Artificial Sequence: Synthetic oligonucleotide
gcagagugcgggccgggcg

SEQ ID NO: 27764 - RNA, 19 nt, Artificial Sequence
  Description of Artificial Sequence: Synthetic oligonucleotide
gggagugcggcgagagccg

SEQ ID NO: 27765 - RNA, 19 nt, Artificial Sequence
  Description of Artificial Sequence: Synthetic oligonucleotide
ggcuggcugagcuuagcgu

SEQ ID NO: 27766 - RNA, 19 nt, Artificial Sequence
  Description of Artificial Sequence: Synthetic oligonucleotide
uccgaggaggcggcggcgg

SEQ ID NO: 27767 - RNA, 19 nt, Artificial Sequence
  Description of Artificial Sequence: Synthetic oligonucleotide
gcggcggcggcacggcggc

SEQ ID NO: 27768 - RNA, 19 nt, Artificial Sequence
  Description of Artificial Sequence: Synthetic oligonucleotide
cggcggggcuguggggcgg

SEQ ID NO: 27769 - RNA, 19 nt, Artificial Sequence
  Description of Artificial Sequence: Synthetic oligonucleotide
gugcggaagcgagaggcga

SEQ ID NO: 27770 - RNA, 19 nt, Artificial Sequence
  Description of Artificial Sequence: Synthetic oligonucleotide
aggagcgcgcgggccgugg

SEQ ID NO: 27771 - RNA, 19 nt, Artificial Sequence
  Description of Artificial Sequence: Synthetic oligonucleotide
gccagagucuggcggcggc

SEQ ID NO: 27772 - RNA, 19 nt, Artificial Sequence
  Description of Artificial Sequence: Synthetic oligonucleotide
ccuggcggagcggagagca

SEQ ID NO: 27773 - RNA, 19 nt, Artificial Sequence
  Description of Artificial Sequence: Synthetic oligonucleotide
agcgcccgcgccucgccgu

SEQ ID NO: 27774 - RNA, 19 nt, Artificial Sequence
  Description of Artificial Sequence: Synthetic oligonucleotide
ugcggaggagccccgcaca

SEQ ID NO: 27775 - RNA, 19 nt, Artificial Sequence
  Description of Artificial Sequence: Synthetic oligonucleotide
acaauagcggcgcgcgcag

SEQ ID NO: 27776 - RNA, 19 nt, Artificial Sequence
  Description of Artificial Sequence: Synthetic oligonucleotide
gcccgcgcccuuccccccg

SEQ ID NO: 27777 - RNA, 19 nt, Artificial Sequence
  Description of Artificial Sequence: Synthetic oligonucleotide
ggcgcgccccgccccgcgc

SEQ ID NO: 27778 - RNA, 19 nt, Artificial Sequence
  Description of Artificial Sequence: Synthetic oligonucleotide
cgccgagcgccccgcuccg

SEQ ID NO: 27779 - RNA, 19 nt, Artificial Sequence
  Description of Artificial Sequence: Synthetic oligonucleotide
gccucaccugccaccaggg

SEQ ID NO: 27780 - RNA, 19 nt, Artificial Sequence
  Description of Artificial Sequence: Synthetic oligonucleotide
gagugggcgggcauuguuc

SEQ ID NO: 27781 - RNA, 19 nt, Artificial Sequence
  Description of Artificial Sequence: Synthetic oligonucleotide
cgccgccgccgccgccgcg

SEQ ID NO: 27782 - RNA, 19 nt, Artificial Sequence
  Description of Artificial Sequence: Synthetic oligonucleotide
gcgggccaugggggccgcc

SEQ ID NO: 27783 - RNA, 19 nt, Artificial Sequence
  Description of Artificial Sequence: Synthetic oligonucleotide
ccggcgcccggggccgggc

SEQ ID NO: 27784 - RNA, 19 nt, Artificial Sequence
  Description of Artificial Sequence: Synthetic oligonucleotide
cuggcgaggcgccgcgccg

SEQ ID NO: 27785 - RNA, 19 nt, Artificial Sequence
  Description of Artificial Sequence: Synthetic oligonucleotide
gccgcugagacgggccccg

SEQ ID NO: 27786 - RNA, 19 nt, Artificial Sequence
  Description of Artificial Sequence: Synthetic oligonucleotide
gcgcgcagcccggcggcgc

SEQ ID NO: 27787 - RNA, 19 nt, Artificial Sequence
  Description of Artificial Sequence: Synthetic oligonucleotide
cagguaaggccggccgcgc

SEQ ID NO: 27788 - RNA, 19 nt, Artificial Sequence
  Description of Artificial Sequence: Synthetic oligonucleotide
ccaugguggacccgguggg

SEQ ID NO: 27789 - RNA, 19 nt, Artificial Sequence
  Description of Artificial Sequence: Synthetic oligonucleotide
gcuucgcggaggcguggaa

SEQ ID NO: 27790 - RNA, 19 nt, Artificial Sequence
  Description of Artificial Sequence: Synthetic oligonucleotide
aggcgcaguucccggacuc

SEQ ID NO: 27791 - RNA, 19 nt, Artificial Sequence
  Description of Artificial Sequence: Synthetic oligonucleotide
cagagcccccgcgcaugga

SEQ ID NO: 27792 - RNA, 19 nt, Artificial Sequence
  Description of Artificial Sequence: Synthetic oligonucleotide
agcugcgcucagugggcga

SEQ ID NO: 27793 - RNA, 19 nt, Artificial Sequence
  Description of Artificial Sequence: Synthetic oligonucleotide
acaucgagcaggagcugga

SEQ ID NO: 27794 - RNA, 19 nt, Artificial Sequence
  Description of Artificial Sequence: Synthetic oligonucleotide
agcgcugcaaggccuccau

SEQ ID NO: 27795 - RNA, 19 nt, Artificial Sequence
  Description of Artificial Sequence: Synthetic oligonucleotide
uucggcgccuggagcagga

SEQ ID NO: 27796 - RNA, 19 nt, Artificial Sequence
  Description of Artificial Sequence: Synthetic oligonucleotide
aggugaaccaggagcgcuu

SEQ ID NO: 27797 - RNA, 19 nt, Artificial Sequence
  Description of Artificial Sequence: Synthetic oligonucleotide
uccgcaugaucuaccugca

SEQ ID NO: 27798 - RNA, 19 nt, Artificial Sequence
  Description of Artificial Sequence: Synthetic oligonucleotide
agacguugcuggccaagga

SEQ ID NO: 27799 - RNA, 19 nt, Artificial Sequence
  Description of Artificial Sequence: Synthetic oligonucleotide
aaaagaagagcuaugaccg

SEQ ID NO: 27800 - RNA, 19 nt, Artificial Sequence
  Description of Artificial Sequence: Synthetic oligonucleotide
ggcagcgauggggcuuccg

SEQ ID NO: 27801 - RNA, 19 nt, Artificial Sequence
  Description of Artificial Sequence: Synthetic oligonucleotide
ggcgcgcggcgcaggcccc

SEQ ID NO: 27802 - RNA, 19 nt, Artificial Sequence
  Description of Artificial Sequence: Synthetic oligonucleotide
ccgacggcgccuccgagcc

SEQ ID NO: 27803 - RNA, 19 nt, Artificial Sequence
  Description of Artificial Sequence: Synthetic oligonucleotide
cccgagcguccgcgucgcg

SEQ ID NO: 27804 - RNA, 19 nt, Artificial Sequence
  Description of Artificial Sequence: Synthetic oligonucleotide
gcccgcagccagcgcccgc

SEQ ID NO: 27805 - RNA, 19 nt, Artificial Sequence
  Description of Artificial Sequence: Synthetic oligonucleotide
ccgacggagccgacccgcc

SEQ ID NO: 27806 - RNA, 19 nt, Artificial Sequence
  Description of Artificial Sequence: Synthetic oligonucleotide
cgcccgccgaggagcccga

SEQ ID NO: 27807 - RNA, 19 nt, Artificial Sequence
  Description of Artificial Sequence: Synthetic oligonucleotide
aggcccggcccgacggcga

SEQ ID NO: 27808 - RNA, 19 nt, Artificial Sequence
  Description of Artificial Sequence: Synthetic oligonucleotide
aggguucuccggguaaggc

SEQ ID NO: 27809 - RNA, 19 nt, Artificial Sequence
  Description of Artificial Sequence: Synthetic oligonucleotide
ccaggcccgggaccgcccg

SEQ ID NO: 27810 - RNA, 19 nt, Artificial Sequence
  Description of Artificial Sequence: Synthetic oligonucleotide
gcaggcccggggcagccgc

SEQ ID NO: 27811 - RNA, 19 nt, Artificial Sequence
  Description of Artificial Sequence: Synthetic oligonucleotide
cgucgggggaacgggacga

SEQ ID NO: 27812 - RNA, 19 nt, Artificial Sequence
  Description of Artificial Sequence: Synthetic oligonucleotide
accggggaccccccgccag

SEQ ID NO: 27813 - RNA, 19 nt, Artificial Sequence
  Description of Artificial Sequence: Synthetic oligonucleotide
gcguggcggcgcucagguc

SEQ ID NO: 27814 - RNA, 19 nt, Artificial Sequence
  Description of Artificial Sequence: Synthetic oligonucleotide
ccaacuucgagcggauccg

SEQ ID NO: 27815 - RNA, 19 nt, Artificial Sequence
  Description of Artificial Sequence: Synthetic oligonucleotide
gcaagggccauggccagcc

SEQ ID NO: 27816 - RNA, 19 nt, Artificial Sequence
  Description of Artificial Sequence: Synthetic oligonucleotide
ccggggcggacgccgagaa

SEQ ID NO: 27817 - RNA, 19 nt, Artificial Sequence
  Description of Artificial Sequence: Synthetic oligonucleotide
agcccuucuacgugaacgu

SEQ ID NO: 27818 - RNA, 19 nt, Artificial Sequence
  Description of Artificial Sequence: Synthetic oligonucleotide
ucgaguuucaccacgagcg

SEQ ID NO: 27819 - RNA, 19 nt, Artificial Sequence
  Description of Artificial Sequence: Synthetic oligonucleotide
gcggccuggugaaggucaa

SEQ ID NO: 27820 - RNA, 19 nt, Artificial Sequence
  Description of Artificial Sequence: Synthetic oligonucleotide
acgacaaagaggugucgga

SEQ ID NO: 27821 - RNA, 19 nt, Artificial Sequence
  Description of Artificial Sequence: Synthetic oligonucleotide
accgcaucagcucccuggg

SEQ ID NO: 27822 - RNA, 19 nt, Artificial Sequence
  Description of Artificial Sequence: Synthetic oligonucleotide
gcagccaggccaugcagau

SEQ ID NO: 27823 - RNA, 19 nt, Artificial Sequence
  Description of Artificial Sequence: Synthetic oligonucleotide
uggagcgcaaaaaguccca

SEQ ID NO: 27824 - RNA, 19 nt, Artificial Sequence
  Description of Artificial Sequence: Synthetic oligonucleotide
agcacggcgcgggcucgag

SEQ ID NO: 27825 - RNA, 19 nt, Artificial Sequence
  Description of Artificial Sequence: Synthetic oligonucleotide
gcgugggggaugcauccag

SEQ ID NO: 27826 - RNA, 19 nt, Artificial Sequence
  Description of Artificial Sequence: Synthetic oligonucleotide
ggcccccuuaccggggacg

SEQ ID NO: 27827 - RNA, 19 nt, Artificial Sequence
  Description of Artificial Sequence: Synthetic oligonucleotide
gcuccucggagagcagcug

SEQ ID NO: 27828 - RNA, 19 nt, Artificial Sequence
  Description of Artificial Sequence: Synthetic oligonucleotide
gcggcgucgacggcgacua

SEQ ID NO: 27829 - RNA, 19 nt, Artificial Sequence
  Description of Artificial Sequence: Synthetic oligonucleotide
acgaggacgccgaguugaa

SEQ ID NO: 27830 - RNA, 19 nt, Artificial Sequence
  Description of Artificial Sequence: Synthetic oligonucleotide
acccccgcuuccugaagga

SEQ ID NO: 27831 - RNA, 19 nt, Artificial Sequence
  Description of Artificial Sequence: Synthetic oligonucleotide
acaaccugaucgacgccaa

SEQ ID NO: 27832 - RNA, 19 nt, Artificial Sequence
  Description of Artificial Sequence: Synthetic oligonucleotide
auggcgguagcaggccccc

SEQ ID NO: 27833 - RNA, 19 nt, Artificial Sequence
  Description of Artificial Sequence: Synthetic oligonucleotide
cuuggccgccccuggagua

SEQ ID NO: 27834 - RNA, 19 nt, Artificial Sequence
  Description of Artificial Sequence: Synthetic oligonucleotide
accagcccuaccagagcau

SEQ ID NO: 27835 - RNA, 19 nt, Artificial Sequence
  Description of Artificial Sequence: Synthetic oligonucleotide
ucuacgucgggggcaugau

SEQ ID NO: 27836 - RNA, 19 nt, Artificial Sequence
  Description of Artificial Sequence: Synthetic oligonucleotide
uggaaggggagggcaaggg

SEQ ID NO: 27837 - RNA, 19 nt, Artificial Sequence
  Description of Artificial Sequence: Synthetic oligonucleotide
gcccgcuccugcgcagcca

SEQ ID NO: 27838 - RNA, 19 nt, Artificial Sequence
  Description of Artificial Sequence: Synthetic oligonucleotide
agagcaccucugagcagga

SEQ ID NO: 27839 - RNA, 19 nt, Artificial Sequence
  Description of Artificial Sequence: Synthetic oligonucleotide
agaagcgccuuaccuggcc

SEQ ID NO: 27840 - RNA, 19 nt, Artificial Sequence
  Description of Artificial Sequence: Synthetic oligonucleotide
cccgcagguccuacucccc

SEQ ID NO: 27841 - RNA, 19 nt, Artificial Sequence
  Description of Artificial Sequence: Synthetic oligonucleotide
cccggaguuuugaggauug

SEQ ID NO: 27842 - RNA, 19 nt, Artificial Sequence
  Description of Artificial Sequence: Synthetic oligonucleotide
gcggaggcggcuauacccc

SEQ ID NO: 27843 - RNA, 19 nt, Artificial Sequence
  Description of Artificial Sequence: Synthetic oligonucleotide
cggacugcagcuccaauga

SEQ ID NO: 27844 - RNA, 19 nt, Artificial Sequence
  Description of Artificial Sequence: Synthetic oligonucleotide
agaaccucaccuccagcga

SEQ ID NO: 27845 - RNA, 19 nt, Artificial Sequence
  Description of Artificial Sequence: Synthetic oligonucleotide
aggaggacuucuccucugg

SEQ ID NO: 27846 - RNA, 19 nt, Artificial Sequence
  Description of Artificial Sequence: Synthetic oligonucleotide
gccaguccagccgcguguc

SEQ ID NO: 27847 - RNA, 19 nt, Artificial Sequence
  Description of Artificial Sequence: Synthetic oligonucleotide
ccccaagccccaccaccua

SEQ ID NO: 27848 - RNA, 19 nt, Artificial Sequence
  Description of Artificial Sequence: Synthetic oligonucleotide
accgcauguuccgggacaa

SEQ ID NO: 27849 - RNA, 19 nt, Artificial Sequence
  Description of Artificial Sequence: Synthetic oligonucleotide
aaagccgcucucccucgca

SEQ ID NO: 27850 - RNA, 19 nt, Artificial Sequence
  Description of Artificial Sequence: Synthetic oligonucleotide
agaacucgcaacaguccuu

SEQ ID NO: 27851 - RNA, 19 nt, Artificial Sequence
  Description of Artificial Sequence: Synthetic oligonucleotide
ucgacagcagcaguccccc

SEQ ID NO: 27852 - RNA, 19 nt, Artificial Sequence
  Description of Artificial Sequence: Synthetic oligonucleotide
ccacgccgcagugccauaa

SEQ ID NO: 27853 - RNA, 19 nt, Artificial Sequence
  Description of Artificial Sequence: Synthetic oligonucleotide
agcggcaccggcacugccc

SEQ ID NO: 27854 - RNA, 19 nt, Artificial Sequence
  Description of Artificial Sequence: Synthetic oligonucleotide
cgguugucguguccgaggc

SEQ ID NO: 27855 - RNA, 19 nt, Artificial Sequence
  Description of Artificial Sequence: Synthetic oligonucleotide
ccaccaucgugggcguccg

SEQ ID NO: 27856 - RNA, 19 nt, Artificial Sequence
  Description of Artificial Sequence: Synthetic oligonucleotide
gcaagaccgggcagaucug

SEQ ID NO: 27857 - RNA, 19 nt, Artificial Sequence
  Description of Artificial Sequence: Synthetic oligonucleotide
ggcccaacgauggcgaggg

SEQ ID NO: 27858 - RNA, 19 nt, Artificial Sequence
  Description of Artificial Sequence: Synthetic oligonucleotide
gcgccuuccauggagacgc

SEQ ID NO: 27859 - RNA, 19 nt, Artificial Sequence
  Description of Artificial Sequence: Synthetic oligonucleotide
cagauggcucguucggaac

SEQ ID NO: 27860 - RNA, 19 nt, Artificial Sequence
  Description of Artificial Sequence: Synthetic oligonucleotide
caccaccuggauacggcug

SEQ ID NO: 27861 - RNA, 19 nt, Artificial Sequence
  Description of Artificial Sequence: Synthetic oligonucleotide
gcgcugcagaccgggcaga

SEQ ID NO: 27862 - RNA, 19 nt, Artificial Sequence
  Description of Artificial Sequence: Synthetic oligonucleotide
aggagcagcgccggcacca

SEQ ID NO: 27863 - RNA, 19 nt, Artificial Sequence
  Description of Artificial Sequence: Synthetic oligonucleotide
aagaugggcugcccuacau

SEQ ID NO: 27864 - RNA, 19 nt, Artificial Sequence
  Description of Artificial Sequence: Synthetic oligonucleotide
uugaugacucgcccuccuc

SEQ ID NO: 27865 - RNA, 19 nt, Artificial Sequence
  Description of Artificial Sequence: Synthetic oligonucleotide
caucgccccaccucagcag

SEQ ID NO: 27866 - RNA, 19 nt, Artificial Sequence
  Description of Artificial Sequence: Synthetic oligonucleotide
gcaagggcaggggcagccg

SEQ ID NO: 27867 - RNA, 19 nt, Artificial Sequence
  Description of Artificial Sequence: Synthetic oligonucleotide
gggaugcgcuggucucggg

SEQ ID NO: 27868 - RNA, 19 nt, Artificial Sequence
  Description of Artificial Sequence: Synthetic oligonucleotide
gagcccuggaguccacuaa

SEQ ID NO: 27869 - RNA, 19 nt, Artificial Sequence
  Description of Artificial Sequence: Synthetic oligonucleotide
aagcgagugagcuggacuu

SEQ ID NO: 27870 - RNA, 19 nt, Artificial Sequence
  Description of Artificial Sequence: Synthetic oligonucleotide
uggaaaagggcuuggagau

SEQ ID NO: 27871 - RNA, 19 nt, Artificial Sequence
  Description of Artificial Sequence: Synthetic oligonucleotide
ugagaaaauggguccuguc

SEQ ID NO: 27872 - RNA, 19 nt, Artificial Sequence
  Description of Artificial Sequence: Synthetic oligonucleotide
cgggaauccuggcuagcga

SEQ ID NO: 27873 - RNA, 19 nt, Artificial Sequence
  Description of Artificial Sequence: Synthetic oligonucleotide
aggagacuuaccugagcca

SEQ ID NO: 27874 - RNA, 19 nt, Artificial Sequence
  Description of Artificial Sequence: Synthetic oligonucleotide
accuggaggcacugcugcu

SEQ ID NO: 27875 - RNA, 19 nt, Artificial Sequence
  Description of Artificial Sequence: Synthetic oligonucleotide
ugcccaugaagccuuugaa

SEQ ID NO: 27876 - RNA, 19 nt, Artificial Sequence
  Description of Artificial Sequence: Synthetic oligonucleotide
aagccgcugccaccaccuc

SEQ ID NO: 27877 - RNA, 19 nt, Artificial Sequence
  Description of Artificial Sequence: Synthetic oligonucleotide
cucagccggugcugacgag

SEQ ID NO: 27878 - RNA, 19 nt, Artificial Sequence
  Description of Artificial Sequence: Synthetic oligonucleotide
gucagcagaucgagaccau

SEQ ID NO: 27879 - RNA, 19 nt, Artificial Sequence
  Description of Artificial Sequence: Synthetic oligonucleotide
ucuucuucaaagugccuga

SEQ ID NO: 27880 - RNA, 19 nt, Artificial Sequence
  Description of Artificial Sequence: Synthetic oligonucleotide
agcucuacgagauccacaa

SEQ ID NO: 27881 - RNA, 19 nt, Artificial Sequence
  Description of Artificial Sequence: Synthetic oligonucleotide
aggaguucuaugaugggcu

SEQ ID NO: 27882 - RNA, 19 nt, Artificial Sequence
  Description of Artificial Sequence: Synthetic oligonucleotide
ucuucccccgcgugcagca

SEQ ID NO: 27883 - RNA, 19 nt, Artificial Sequence
  Description of Artificial Sequence: Synthetic oligonucleotide
aguggagccaccagcagcg

SEQ ID NO: 27884 - RNA, 19 nt, Artificial Sequence
  Description of Artificial Sequence: Synthetic oligonucleotide
gggugggcgaccucuucca

SEQ ID NO: 27885 - RNA, 19 nt, Artificial Sequence
  Description of Artificial Sequence: Synthetic oligonucleotide
agaagcuggccagccagcu

SEQ ID NO: 27886 - RNA, 19 nt, Artificial Sequence
  Description of Artificial Sequence: Synthetic oligonucleotide
uggguguguaccgggccuu

SEQ ID NO: 27887 - RNA, 19 nt, Artificial Sequence
  Description of Artificial Sequence: Synthetic oligonucleotide
ucguggacaacuacggagu

SEQ ID NO: 27888 - RNA, 19 nt, Artificial Sequence
  Description of Artificial Sequence: Synthetic oligonucleotide
uugccauggaaauggcuga

SEQ ID NO: 27889 - RNA, 19 nt, Artificial Sequence
  Description of Artificial Sequence: Synthetic oligonucleotide
agaagugcugucaggccaa

SEQ ID NO: 27890 - RNA, 19 nt, Artificial Sequence
  Description of Artificial Sequence: Synthetic oligonucleotide
augcucaguuugcagaaau

SEQ ID NO: 27891 - RNA, 19 nt, Artificial Sequence
  Description of Artificial Sequence: Synthetic oligonucleotide
ucuccgagaaccugagagc

SEQ ID NO: 27892 - RNA, 19 nt, Artificial Sequence
  Description of Artificial Sequence: Synthetic oligonucleotide
ccagaagcaacaaagaugc

SEQ ID NO: 27893 - RNA, 19 nt, Artificial Sequence
  Description of Artificial Sequence: Synthetic oligonucleotide
ccaaggauccaacgaccaa

SEQ ID NO: 27894 - RNA, 19 nt, Artificial Sequence
  Description of Artificial Sequence: Synthetic oligonucleotide
agaacucucuggaaacucu

SEQ ID NO: 27895 - RNA, 19 nt, Artificial Sequence
  Description of Artificial Sequence: Synthetic oligonucleotide
ugcucuacaagccugugga

SEQ ID NO: 27896 - RNA, 19 nt, Artificial Sequence
  Description of Artificial Sequence: Synthetic oligonucleotide
accgugugacgaggagcac

SEQ ID NO: 27897 - RNA, 19 nt, Artificial Sequence
  Description of Artificial Sequence: Synthetic oligonucleotide
cgcugguccuccaugacuu

SEQ ID NO: 27898 - RNA, 19 nt, Artificial Sequence
  Description of Artificial Sequence: Synthetic oligonucleotide
ugcugaagcacacuccugc

SEQ ID NO: 27899 - RNA, 19 nt, Artificial Sequence
  Description of Artificial Sequence: Synthetic oligonucleotide
ccagccacccugaccaccc

SEQ ID NO: 27900 - RNA, 19 nt, Artificial Sequence
  Description of Artificial Sequence: Synthetic oligonucleotide
ccuugcugcaggacgcccu

SEQ ID NO: 27901 - RNA, 19 nt, Artificial Sequence
  Description of Artificial Sequence: Synthetic oligonucleotide
uccgcaucucacagaacuu

SEQ ID NO: 27902 - RNA, 19 nt, Artificial Sequence
  Description of Artificial Sequence: Synthetic oligonucleotide
uccuguccagcaucaauga

SEQ ID NO: 27903 - RNA, 19 nt, Artificial Sequence
  Description of Artificial Sequence: Synthetic oligonucleotide
aggagaucacaccccgacg

SEQ ID NO: 27904 - RNA, 19 nt, Artificial Sequence
  Description of Artificial Sequence: Synthetic oligonucleotide
ggcaguccaugacggugaa

SEQ ID NO: 27905 - RNA, 19 nt, Artificial Sequence
  Description of Artificial Sequence: Synthetic oligonucleotide
agaagggagagcaccggca

SEQ ID NO: 27906 - RNA, 19 nt, Artificial Sequence
  Description of Artificial Sequence: Synthetic oligonucleotide
agcugcugaaggacagcuu

SEQ ID NO: 27907 - RNA, 19 nt, Artificial Sequence
  Description of Artificial Sequence: Synthetic oligonucleotide
ucaugguggagcuggugga

SEQ ID NO: 27908 - RNA, 19 nt, Artificial Sequence
  Description of Artificial Sequence: Synthetic oligonucleotide
agggggcccgcaagcugcg

SEQ ID NO: 27909 - RNA, 19 nt, Artificial Sequence
  Description of Artificial Sequence: Synthetic oligonucleotide
gccacgucuuccuguucac

SEQ ID NO: 27910 - RNA, 19 nt, Artificial Sequence
  Description of Artificial Sequence: Synthetic oligonucleotide
ccgaccugcuucucugcac

SEQ ID NO: 27911 - RNA, 19 nt, Artificial Sequence
  Description of Artificial Sequence: Synthetic oligonucleotide
ccaagcucaagaagcagag

SEQ ID NO: 27912 - RNA, 19 nt, Artificial Sequence
  Description of Artificial Sequence: Synthetic oligonucleotide
gcggaggcaaaacgcagca

SEQ ID NO: 27913 - RNA, 19 nt, Artificial Sequence
  Description of Artificial Sequence: Synthetic oligonucleotide
aguaugacugcaaauggua

SEQ ID NO: 27914 - RNA, 19 nt, Artificial Sequence
  Description of Artificial Sequence: Synthetic oligonucleotide
acauuccgcucacggaucu

SEQ ID NO: 27915 - RNA, 19 nt, Artificial Sequence
  Description of Artificial Sequence: Synthetic oligonucleotide
ucagcuuccagauggugga

SEQ ID NO: 27916 - RNA, 19 nt, Artificial Sequence
  Description of Artificial Sequence: Synthetic oligonucleotide
augaacuggaggcagugcc

SEQ ID NO: 27917 - RNA, 19 nt, Artificial Sequence
  Description of Artificial Sequence: Synthetic oligonucleotide
ccaacaucccccuggugcc

SEQ ID NO: 27918 - RNA, 19 nt, Artificial Sequence
  Description of Artificial Sequence: Synthetic oligonucleotide
ccgaugaggagcuggacgc

SEQ ID NO: 27919 - RNA, 19 nt, Artificial Sequence
  Description of Artificial Sequence: Synthetic oligonucleotide
cuuugaagaucaagaucuc

SEQ ID NO: 27920 - RNA, 19 nt, Artificial Sequence
  Description of Artificial Sequence: Synthetic oligonucleotide
cccagaucaagaaugacau

SEQ ID NO: 27921 - RNA, 19 nt, Artificial Sequence
  Description of Artificial Sequence: Synthetic oligonucleotide
uccagagagagaagagggc

SEQ ID NO: 27922 - RNA, 19 nt, Artificial Sequence
  Description of Artificial Sequence: Synthetic oligonucleotide
cgaacaagggcagcaaggc

SEQ ID NO: 27923 - RNA, 19 nt, Artificial Sequence
  Description of Artificial Sequence: Synthetic oligonucleotide
agcagaguucaaaucugua

SEQ ID NO: 27924 - RNA, 19 nt, Artificial Sequence
  Description of Artificial Sequence: Synthetic oligonucleotide
acugcacccuggaggugga

SEQ ID NO: 27925 - RNA, 19 nt, Artificial Sequence
  Description of Artificial Sequence: Synthetic oligonucleotide
auuccuuuggguauuuugu

SEQ ID NO: 27926 - RNA, 19 nt, Artificial Sequence
  Description of Artificial Sequence: Synthetic oligonucleotide
ugaauaaagcaaagacgcg

SEQ ID NO: 27927 - RNA, 19 nt, Artificial Sequence
  Description of Artificial Sequence: Synthetic oligonucleotide
gcgucuacagggacacagc

SEQ ID NO: 27928 - RNA, 19 nt, Artificial Sequence
  Description of Artificial Sequence: Synthetic oligonucleotide
cugagccaaacuggaacga

SEQ ID NO: 27929 - RNA, 19 nt, Artificial Sequence
  Description of Artificial Sequence: Synthetic oligonucleotide
agcuggacccgcaggcccu

SEQ ID NO: 27930 - RNA, 19 nt, Artificial Sequence
  Description of Artificial Sequence: Synthetic oligonucleotide
ugcaggacagagacuggca

SEQ ID NO: 27931 - RNA, 19 nt, Artificial Sequence
  Description of Artificial Sequence: Synthetic oligonucleotide
agcgcaccgucaucgccau

SEQ ID NO: 27932 - RNA, 19 nt, Artificial Sequence
  Description of Artificial Sequence: Synthetic oligonucleotide
ugaaugggaucgaaguaaa

SEQ ID NO: 27933 - RNA, 19 nt, Artificial Sequence
  Description of Artificial Sequence: Synthetic oligonucleotide
agcucucggucaaguucaa

SEQ ID NO: 27934 - RNA, 19 nt, Artificial Sequence
  Description of Artificial Sequence: Synthetic oligonucleotide
acagcagggaguucagcuu

SEQ ID NO: 27935 - RNA, 19 nt, Artificial Sequence
  Description of Artificial Sequence: Synthetic oligonucleotide
ugaagaggaugccgucccg

SEQ ID NO: 27936 - RNA, 19 nt, Artificial Sequence
  Description of Artificial Sequence: Synthetic oligonucleotide
gaaaacagacaggggucuu

SEQ ID NO: 27937 - RNA, 19 nt, Artificial Sequence
  Description of Artificial Sequence: Synthetic oligonucleotide
ucggagucaagauugcugu

SEQ ID NO: 27938 - RNA, 19 nt, Artificial Sequence
  Description of Artificial Sequence: Synthetic oligonucleotide
uggucaccaagagagagag

SEQ ID NO: 27939 - RNA, 19 nt, Artificial Sequence
  Description of Artificial Sequence: Synthetic oligonucleotide
gguccaaggugcccuacau

SEQ ID NO: 27940 - RNA, 19 nt, Artificial Sequence
  Description of Artificial Sequence: Synthetic oligonucleotide
ucgugcgccagugcgugga

SEQ ID NO: 27941 - RNA, 19 nt, Artificial Sequence
  Description of Artificial Sequence: Synthetic oligonucleotide
aggagaucgagcgccgagg

SEQ ID NO: 27942 - RNA, 19 nt, Artificial Sequence
  Description of Artificial Sequence: Synthetic oligonucleotide
gcauggaggaggugggcau

SEQ ID NO: 27943 - RNA, 19 nt, Artificial Sequence
  Description of Artificial Sequence: Synthetic oligonucleotide
ucuaccgcguguccggugu

SEQ ID NO: 27944 - RNA, 19 nt, Artificial Sequence
  Description of Artificial Sequence: Synthetic oligonucleotide
uggccacggacauccaggc

SEQ ID NO: 27945 - RNA, 19 nt, Artificial Sequence
  Description of Artificial Sequence: Synthetic oligonucleotide
cacugaaggcagccuucga

SEQ ID NO: 27946 - RNA, 19 nt, Artificial Sequence
  Description of Artificial Sequence: Synthetic oligonucleotide
aggaauuugagauagagcu

SEQ ID NO: 27947 - RNA, 19 nt, Artificial Sequence
  Description of Artificial Sequence: Synthetic oligonucleotide
uggagggcucccagacccu

SEQ ID NO: 27948 - RNA, 19 nt, Artificial Sequence
  Description of Artificial Sequence: Synthetic oligonucleotide
ugaggauacugugcuauga

SEQ ID NO: 27949 - RNA, 19 nt, Artificial Sequence
  Description of Artificial Sequence: Synthetic oligonucleotide
aaaaguguuacaacaagac

SEQ ID NO: 27950 - RNA, 19 nt, Artificial Sequence
  Description of Artificial Sequence: Synthetic oligonucleotide
cgaagauccccaaggagga

SEQ ID NO: 27951 - RNA, 19 nt, Artificial Sequence
  Description of Artificial Sequence: Synthetic oligonucleotide
acggcgagagcacggacag

SEQ ID NO: 27952 - RNA, 19 nt, Artificial Sequence
  Description of Artificial Sequence: Synthetic oligonucleotide
gacucauggggaagggcca

SEQ ID NO: 27953 - RNA, 19 nt, Artificial Sequence
  Description of Artificial Sequence: Synthetic oligonucleotide
agguccagcuggacccgca

SEQ ID NO: 27954 - RNA, 19 nt, Artificial Sequence
  Description of Artificial Sequence: Synthetic oligonucleotide
aggcccugcaggacagaga

SEQ ID NO: 27955 - RNA, 19 nt, Artificial Sequence
  Description of Artificial Sequence: Synthetic oligonucleotide
acuggcagcgcaccgucau

SEQ ID NO: 27956 - RNA, 19 nt, Artificial Sequence
  Description of Artificial Sequence: Synthetic oligonucleotide
ucgccaugaaugggaucga

SEQ ID NO: 27957 - RNA, 19 nt, Artificial Sequence
  Description of Artificial Sequence: Synthetic oligonucleotide
aaguaaagcucucggucaa

SEQ ID NO: 27958 - RNA, 19 nt, Artificial Sequence
  Description of Artificial Sequence: Synthetic oligonucleotide
aguucaacagcagggaguu

SEQ ID NO: 27959 - RNA, 19 nt, Artificial Sequence
  Description of Artificial Sequence: Synthetic oligonucleotide
ucagcuugaagaggaugcc

SEQ ID NO: 27960 - RNA, 19 nt, Artificial Sequence
  Description of Artificial Sequence: Synthetic oligonucleotide
cgucccgaaaacagacagg

SEQ ID NO: 27961 - RNA, 19 nt, Artificial Sequence
  Description of Artificial Sequence: Synthetic oligonucleotide
gggucuucggagucaagau

SEQ ID NO: 27962 - RNA, 19 nt, Artificial Sequence
  Description of Artificial Sequence: Synthetic oligonucleotide
uugcuguggucaccaagag

SEQ ID NO: 27963 - RNA, 19 nt, Artificial Sequence
  Description of Artificial Sequence: Synthetic oligonucleotide
gagagagguccaaggugcc

SEQ ID NO: 27964 - RNA, 19 nt, Artificial Sequence
  Description of Artificial Sequence: Synthetic oligonucleotide
ccuacaucgugcgccagug

SEQ ID NO: 27965 - RNA, 19 nt, Artificial Sequence
  Description of Artificial Sequence: Synthetic oligonucleotide
gcguggaggagaucgagcg

SEQ ID NO: 27966 - RNA, 19 nt, Artificial Sequence
  Description of Artificial Sequence: Synthetic oligonucleotide
gccgaggcauggaggaggu

SEQ ID NO: 27967 - RNA, 19 nt, Artificial Sequence
  Description of Artificial Sequence: Synthetic oligonucleotide
ugggcaucuaccgcguguc

SEQ ID NO: 27968 - RNA, 19 nt, Artificial Sequence
  Description of Artificial Sequence: Synthetic oligonucleotide
ccgguguggccacggacau

SEQ ID NO: 27969 - RNA, 19 nt, Artificial Sequence
  Description of Artificial Sequence: Synthetic oligonucleotide
uccaggcacugaaggcagc

SEQ ID NO: 27970 - RNA, 25 nt, Artificial Sequence
  Description of Artificial Sequence: Synthetic oligonucleotide
ggggggaggguggcggcucgauggg

SEQ ID NO: 27971 - RNA, 25 nt, Artificial Sequence
  Description of Artificial Sequence: Synthetic oligonucleotide
gggagccgccuccagggggcccccc

SEQ ID NO: 27972 - RNA, 25 nt, Artificial Sequence
  Description of Artificial Sequence: Synthetic oligonucleotide
ccgcccugugcccacggcgcggccc

SEQ ID NO: 27973 - RNA, 25 nt, Artificial Sequence
  Description of Artificial Sequence: Synthetic oligonucleotide
ccuuuaagaggcccgccuggcuccg

SEQ ID NO: 27974 - RNA, 25 nt, Artificial Sequence
  Description of Artificial Sequence: Synthetic oligonucleotide
gucauccgcgccgcggccaccuccc

SEQ ID NO: 27975 - RNA, 25 nt, Artificial Sequence
  Description of Artificial Sequence: Synthetic oligonucleotide
ccccggcccuccccuuccugcggcg

SEQ ID NO: 27976 - RNA, 25 nt, Artificial Sequence
  Description of Artificial Sequence: Synthetic oligonucleotide
gcagagugcgggccgggcgggagug

SEQ ID NO: 27977 - RNA, 25 nt, Artificial Sequence
  Description of Artificial Sequence: Synthetic oligonucleotide
gcggcgagagccggcuggcugagcu

SEQ ID NO: 27978 - RNA, 25 nt, Artificial Sequence
  Description of Artificial Sequence: Synthetic oligonucleotide
uuagcguccgaggaggcggcggcgg

SEQ ID NO: 27979 - RNA, 25 nt, Artificial Sequence
  Description of Artificial Sequence: Synthetic oligonucleotide
gcggcggcggcacggcggcggcggg

SEQ ID NO: 27980 - RNA, 25 nt, Artificial Sequence
  Description of Artificial Sequence: Synthetic oligonucleotide
ggcuguggggcggugcggaagcgag

SEQ ID NO: 27981 - RNA, 25 nt, Artificial Sequence
  Description of Artificial Sequence: Synthetic oligonucleotide
gaggcgaggagcgcgcgggccgugg

SEQ ID NO: 27982 - RNA, 25 nt, Artificial Sequence
  Description of Artificial Sequence: Synthetic oligonucleotide
gccagagucuggcggcggccuggcg

SEQ ID NO: 27983 - RNA, 25 nt, Artificial Sequence
  Description of Artificial Sequence: Synthetic oligonucleotide
ggagcggagagcagcgcccgcgccu

SEQ ID NO: 27984 - RNA, 25 nt, Artificial Sequence
  Description of Artificial Sequence: Synthetic oligonucleotide
ucgccgugcggaggagccccgcaca

SEQ ID NO: 27985 - RNA, 25 nt, Artificial Sequence
  Description of Artificial Sequence: Synthetic oligonucleotide
acaauagcggcgcgcgcagcccgcg

SEQ ID NO: 27986 - RNA, 25 nt, Artificial Sequence
  Description of Artificial Sequence: Synthetic oligonucleotide
gcccuuccccccggcgcgccccgcc

SEQ ID NO: 27987 - RNA, 25 nt, Artificial Sequence
  Description of Artificial Sequence: Synthetic oligonucleotide
cccgcgcgccgagcgccccgcuccg

SEQ ID NO: 27988 - RNA, 25 nt, Artificial Sequence
  Description of Artificial Sequence: Synthetic oligonucleotide
gccucaccugccaccagggaguggg

SEQ ID NO: 27989 - RNA, 25 nt, Artificial Sequence
  Description of Artificial Sequence: Synthetic oligonucleotide
gcgggcauuguucgccgccgccgcc

SEQ ID NO: 27990 - RNA, 25 nt, Artificial Sequence
  Description of Artificial Sequence: Synthetic oligonucleotide
cgccgcgcgggccaugggggccgcc

SEQ ID NO: 27991 - RNA, 25 nt, Artificial Sequence
  Description of Artificial Sequence: Synthetic oligonucleotide
ccggcgcccggggccgggcuggcga

SEQ ID NO: 27992 - RNA, 25 nt, Artificial Sequence
  Description of Artificial Sequence: Synthetic oligonucleotide
aggcgccgcgccgccgcugagacgg

SEQ ID NO: 27993 - RNA, 25 nt, Artificial Sequence
  Description of Artificial Sequence: Synthetic oligonucleotide
ggccccgcgcgcagcccggcggcgc

SEQ ID NO: 27994 - RNA, 25 nt, Artificial Sequence
  Description of Artificial Sequence: Synthetic oligonucleotide
cagguaaggccggccgcgccauggu

SEQ ID NO: 27995 - RNA, 25 nt, Artificial Sequence
  Description of Artificial Sequence: Synthetic oligonucleotide
uggacccggugggcuucgcggaggc

SEQ ID NO: 27996 - RNA, 25 nt, Artificial Sequence
  Description of Artificial Sequence: Synthetic oligonucleotide
cguggaaggcgcaguucccggacuc

SEQ ID NO: 27997 - RNA, 25 nt, Artificial Sequence
  Description of Artificial Sequence: Synthetic oligonucleotide
cagagcccccgcgcauggagcugcg

SEQ ID NO: 27998 - RNA, 25 nt, Artificial Sequence
  Description of Artificial Sequence: Synthetic oligonucleotide
gcucagugggcgacaucgagcagga

SEQ ID NO: 27999 - RNA, 25 nt, Artificial Sequence
  Description of Artificial Sequence: Synthetic oligonucleotide
agcuggagcgcugcaaggccuccau

SEQ ID NO: 28000 - RNA, 25 nt, Artificial Sequence
  Description of Artificial Sequence: Synthetic oligonucleotide
uucggcgccuggagcaggaggugaa

SEQ ID NO: 28001 - RNA, 25 nt, Artificial Sequence
  Description of Artificial Sequence: Synthetic oligonucleotide
accaggagcgcuuccgcaugaucua

SEQ ID NO: 28002 - RNA, 25 nt, Artificial Sequence
  Description of Artificial Sequence: Synthetic oligonucleotide
accugcagacguugcuggccaagga

SEQ ID NO: 28003 - RNA, 25 nt, Artificial Sequence
  Description of Artificial Sequence: Synthetic oligonucleotide
aaaagaagagcuaugaccggcagcg

SEQ ID NO: 28004 - RNA, 25 nt, Artificial Sequence
  Description of Artificial Sequence: Synthetic oligonucleotide
gauggggcuuccggcgcgcggcgca

SEQ ID NO: 28005 - RNA, 25 nt, Artificial Sequence
  Description of Artificial Sequence: Synthetic oligonucleotide
aggcccccgacggcgccuccgagcc

SEQ ID NO: 28006 - RNA, 25 nt, Artificial Sequence
  Description of Artificial Sequence: Synthetic oligonucleotide
cccgagcguccgcgucgcgcccgca

SEQ ID NO: 28007 - RNA, 25 nt, Artificial Sequence
  Description of Artificial Sequence: Synthetic oligonucleotide
agccagcgcccgccgacggagccga

SEQ ID NO: 28008 - RNA, 25 nt, Artificial Sequence
  Description of Artificial Sequence: Synthetic oligonucleotide
acccgccgcccgccgaggagcccga

SEQ ID NO: 28009 - RNA, 25 nt, Artificial Sequence
  Description of Artificial Sequence: Synthetic oligonucleotide
aggcccggcccgacggcgaggguuc

SEQ ID NO: 28010 - RNA, 25 nt, Artificial Sequence
  Description of Artificial Sequence: Synthetic oligonucleotide
cuccggguaaggccaggcccgggac

SEQ ID NO: 28011 - RNA, 25 nt, Artificial Sequence
  Description of Artificial Sequence: Synthetic oligonucleotide
ccgcccgcaggcccggggcagccgc

SEQ ID NO: 28012 - RNA, 25 nt, Artificial Sequence
  Description of Artificial Sequence: Synthetic oligonucleotide
cgucgggggaacgggacgaccgggg

SEQ ID NO: 28013 - RNA, 25 nt, Artificial Sequence
  Description of Artificial Sequence: Synthetic oligonucleotide
gaccccccgccagcguggcggcgcu

SEQ ID NO: 28014 - RNA, 25 nt, Artificial Sequence
  Description of Artificial Sequence: Synthetic oligonucleotide
ucagguccaacuucgagcggauccg

SEQ ID NO: 28015 - RNA, 25 nt, Artificial Sequence
  Description of Artificial Sequence: Synthetic oligonucleotide
gcaagggccauggccagcccggggc

SEQ ID NO: 28016 - RNA, 25 nt, Artificial Sequence
  Description of Artificial Sequence: Synthetic oligonucleotide
cggacgccgagaagcccuucuacgu

SEQ ID NO: 28017 - RNA, 25 nt, Artificial Sequence
  Description of Artificial Sequence: Synthetic oligonucleotide
ugaacgucgaguuucaccacgagcg

SEQ ID NO: 28018 - RNA, 25 nt, Artificial Sequence
  Description of Artificial Sequence: Synthetic oligonucleotide
gcggccuggugaaggucaacgacaa

SEQ ID NO: 28019 - RNA, 25 nt, Artificial Sequence
  Description of Artificial Sequence: Synthetic oligonucleotide
aagaggugucggaccgcaucagcuc

SEQ ID NO: 28020 - RNA, 25 nt, Artificial Sequence
  Description of Artificial Sequence: Synthetic oligonucleotide
cccugggcagccaggccaugcagau

SEQ ID NO: 28021 - RNA, 25 nt, Artificial Sequence
  Description of Artificial Sequence: Synthetic oligonucleotide
uggagcgcaaaaagucccagcacgg

SEQ ID NO: 28022 - RNA, 25 nt, Artificial Sequence
  Description of Artificial Sequence: Synthetic oligonucleotide
gcgcgggcucgagcgugggggaugc

SEQ ID NO: 28023 - RNA, 25 nt, Artificial Sequence
  Description of Artificial Sequence: Synthetic oligonucleotide
cauccaggcccccuuaccggggacg

SEQ ID NO: 28024 - RNA, 25 nt, Artificial Sequence
  Description of Artificial Sequence: Synthetic oligonucleotide
gcuccucggagagcagcugcggcgu

SEQ ID NO: 28025 - RNA, 25 nt, Artificial Sequence
  Description of Artificial Sequence: Synthetic oligonucleotide
ucgacggcgacuacgaggacgccga

SEQ ID NO: 28026 - RNA, 25 nt, Artificial Sequence
  Description of Artificial Sequence: Synthetic oligonucleotide
aguugaacccccgcuuccugaagga

SEQ ID NO: 28027 - RNA, 25 nt, Artificial Sequence
  Description of Artificial Sequence: Synthetic oligonucleotide
acaaccugaucgacgccaauggcgg

SEQ ID NO: 28028 - RNA, 25 nt, Artificial Sequence
  Description of Artificial Sequence: Synthetic oligonucleotide
guagcaggcccccuuggccgccccu

SEQ ID NO: 28029 - RNA, 25 nt, Artificial Sequence
  Description of Artificial Sequence: Synthetic oligonucleotide
uggaguaccagcccuaccagagcau

SEQ ID NO: 28030 - RNA, 25 nt, Artificial Sequence
  Description of Artificial Sequence: Synthetic oligonucleotide
ucuacgucgggggcaugauggaagg

SEQ ID NO: 28031 - RNA, 25 nt, Artificial Sequence
  Description of Artificial Sequence: Synthetic oligonucleotide
gggagggcaagggcccgcuccugcg

SEQ ID NO: 28032 - RNA, 25 nt, Artificial Sequence
  Description of Artificial Sequence: Synthetic oligonucleotide
gcagccagagcaccucugagcagga

SEQ ID NO: 28033 - RNA, 25 nt, Artificial Sequence
  Description of Artificial Sequence: Synthetic oligonucleotide
agaagcgccuuaccuggccccgcag

SEQ ID NO: 28034 - RNA, 25 nt, Artificial Sequence
  Description of Artificial Sequence: Synthetic oligonucleotide
gguccuacuccccccggaguuuuga

SEQ ID NO: 28035 - RNA, 25 nt, Artificial Sequence
  Description of Artificial Sequence: Synthetic oligonucleotide
aggauugcggaggcggcuauacccc

SEQ ID NO: 28036 - RNA, 25 nt, Artificial Sequence
  Description of Artificial Sequence: Synthetic oligonucleotide
cggacugcagcuccaaugagaaccu

SEQ ID NO: 28037 - RNA, 25 nt, Artificial Sequence
  Description of Artificial Sequence: Synthetic oligonucleotide
ucaccuccagcgaggaggacuucuc

SEQ ID NO: 28038 - RNA, 25 nt, Artificial Sequence
  Description of Artificial Sequence: Synthetic oligonucleotide
ccucuggccaguccagccgcguguc

SEQ ID NO: 28039 - RNA, 25 nt, Artificial Sequence
  Description of Artificial Sequence: Synthetic oligonucleotide
ccccaagccccaccaccuaccgcau

SEQ ID NO: 28040 - RNA, 25 nt, Artificial Sequence
  Description of Artificial Sequence: Synthetic oligonucleotide
uguuccgggacaaaagccgcucucc

SEQ ID NO: 28041 - RNA, 25 nt, Artificial Sequence
  Description of Artificial Sequence: Synthetic oligonucleotide
ccucgcagaacucgcaacaguccuu

SEQ ID NO: 28042 - RNA, 25 nt, Artificial Sequence
  Description of Artificial Sequence: Synthetic oligonucleotide
ucgacagcagcaguccccccacgcc

SEQ ID NO: 28043 - RNA, 25 nt, Artificial Sequence
  Description of Artificial Sequence: Synthetic oligonucleotide
cgcagugccauaagcggcaccggca

SEQ ID NO: 28044 - RNA, 25 nt, Artificial Sequence
  Description of Artificial Sequence: Synthetic oligonucleotide
acugcccgguugucguguccgaggc

SEQ ID NO: 28045 - RNA, 25 nt, Artificial Sequence
  Description of Artificial Sequence: Synthetic oligonucleotide
ccaccaucgugggcguccgcaagac

SEQ ID NO: 28046 - RNA, 25 nt, Artificial Sequence
  Description of Artificial Sequence: Synthetic oligonucleotide
ccgggcagaucuggcccaacgaugg

SEQ ID NO: 28047 - RNA, 25 nt, Artificial Sequence
  Description of Artificial Sequence: Synthetic oligonucleotide
gcgagggcgccuuccauggagacgc

SEQ ID NO: 28048 - RNA, 25 nt, Artificial Sequence
  Description of Artificial Sequence: Synthetic oligonucleotide
cagauggcucguucggaacaccacc

SEQ ID NO: 28049 - RNA, 25 nt, Artificial Sequence
  Description of Artificial Sequence: Synthetic oligonucleotide
cuggauacggcugcgcugcagaccg

SEQ ID NO: 28050 - RNA, 25 nt, Artificial Sequence
  Description of Artificial Sequence: Synthetic oligonucleotide
gggcagaggagcagcgccggcacca

SEQ ID NO: 28051 - RNA, 25 nt, Artificial Sequence
  Description of Artificial Sequence: Synthetic oligonucleotide
aagaugggcugcccuacauugauga

SEQ ID NO: 28052 - RNA, 25 nt, Artificial Sequence
  Description of Artificial Sequence: Synthetic oligonucleotide
acucgcccuccucaucgccccaccu

SEQ ID NO: 28053 - RNA, 25 nt, Artificial Sequence
  Description of Artificial Sequence: Synthetic oligonucleotide
ucagcagcaagggcaggggcagccg

SEQ ID NO: 28054 - RNA, 25 nt, Artificial Sequence
  Description of Artificial Sequence: Synthetic oligonucleotide
gggaugcgcuggucucgggagcccu

SEQ ID NO: 28055 - RNA, 25 nt, Artificial Sequence
  Description of Artificial Sequence: Synthetic oligonucleotide
uggaguccacuaaagcgagugagcu

SEQ ID NO: 28056 - RNA, 25 nt, Artificial Sequence
  Description of Artificial Sequence: Synthetic oligonucleotide
uggacuuggaaaagggcuuggagau

SEQ ID NO: 28057 - RNA, 25 nt, Artificial Sequence
  Description of Artificial Sequence: Synthetic oligonucleotide
ugagaaaauggguccugucgggaau

SEQ ID NO: 28058 - RNA, 25 nt, Artificial Sequence
  Description of Artificial Sequence: Synthetic oligonucleotide
uccuggcuagcgaggagacuuaccu

SEQ ID NO: 28059 - RNA, 25 nt, Artificial Sequence
  Description of Artificial Sequence: Synthetic oligonucleotide
ugagccaccuggaggcacugcugcu

SEQ ID NO: 28060 - RNA, 25 nt, Artificial Sequence
  Description of Artificial Sequence: Synthetic oligonucleotide
ugcccaugaagccuuugaaagccgc

SEQ ID NO: 28061 - RNA, 25 nt, Artificial Sequence
  Description of Artificial Sequence: Synthetic oligonucleotide
cugccaccaccucucagccggugcu

SEQ ID NO: 28062 - RNA, 25 nt, Artificial Sequence
  Description of Artificial Sequence: Synthetic oligonucleotide
ugacgagucagcagaucgagaccau

SEQ ID NO: 28063 - RNA, 25 nt, Artificial Sequence
  Description of Artificial Sequence: Synthetic oligonucleotide
ucuucuucaaagugccugagcucua

SEQ ID NO: 28064 - RNA, 25 nt, Artificial Sequence
  Description of Artificial Sequence: Synthetic oligonucleotide
acgagauccacaaggaguucuauga

SEQ ID NO: 28065 - RNA, 25 nt, Artificial Sequence
  Description of Artificial Sequence: Synthetic oligonucleotide
augggcucuucccccgcgugcagca

SEQ ID NO: 28066 - RNA, 25 nt, Artificial Sequence
  Description of Artificial Sequence: Synthetic oligonucleotide
aguggagccaccagcagcggguggg

SEQ ID NO: 28067 - RNA, 25 nt, Artificial Sequence
  Description of Artificial Sequence: Synthetic oligonucleotide
gcgaccucuuccagaagcuggccag

SEQ ID NO: 28068 - RNA, 25 nt, Artificial Sequence
  Description of Artificial Sequence: Synthetic oligonucleotide
gccagcuggguguguaccgggccuu

SEQ ID NO: 28069 - RNA, 25 nt, Artificial Sequence
  Description of Artificial Sequence: Synthetic oligonucleotide
ucguggacaacuacggaguugccau

SEQ ID NO: 28070 - RNA, 25 nt, Artificial Sequence
  Description of Artificial Sequence: Synthetic oligonucleotide
uggaaauggcugagaagugcuguca

SEQ ID NO: 28071 - RNA, 25 nt, Artificial Sequence
  Description of Artificial Sequence: Synthetic oligonucleotide
aggccaaugcucaguuugcagaaau

SEQ ID NO: 28072 - RNA, 25 nt, Artificial Sequence
  Description of Artificial Sequence: Synthetic oligonucleotide
ucuccgagaaccugagagccagaag

SEQ ID NO: 28073 - RNA, 25 nt, Artificial Sequence
  Description of Artificial Sequence: Synthetic oligonucleotide
gcaacaaagaugccaaggauccaac

SEQ ID NO: 28074 - RNA, 25 nt, Artificial Sequence
  Description of Artificial Sequence: Synthetic oligonucleotide
cgaccaagaacucucuggaaacucu

SEQ ID NO: 28075 - RNA, 25 nt, Artificial Sequence
  Description of Artificial Sequence: Synthetic oligonucleotide
ugcucuacaagccuguggaccgugu

SEQ ID NO: 28076 - RNA, 25 nt, Artificial Sequence
  Description of Artificial Sequence: Synthetic oligonucleotide
ugacgaggagcacgcugguccucca

SEQ ID NO: 28077 - RNA, 25 nt, Artificial Sequence
  Description of Artificial Sequence: Synthetic oligonucleotide
augacuugcugaagcacacuccugc

SEQ ID NO: 28078 - RNA, 25 nt, Artificial Sequence
  Description of Artificial Sequence: Synthetic oligonucleotide
ccagccacccugaccaccccuugcu

SEQ ID NO: 28079 - RNA, 25 nt, Artificial Sequence
  Description of Artificial Sequence: Synthetic oligonucleotide
ugcaggacgcccuccgcaucucaca

SEQ ID NO: 28080 - RNA, 25 nt, Artificial Sequence
  Description of Artificial Sequence: Synthetic oligonucleotide
agaacuuccuguccagcaucaauga

SEQ ID NO: 28081 - RNA, 25 nt, Artificial Sequence
  Description of Artificial Sequence: Synthetic oligonucleotide
aggagaucacaccccgacggcaguc

SEQ ID NO: 28082 - RNA, 25 nt, Artificial Sequence
  Description of Artificial Sequence: Synthetic oligonucleotide
ccaugacggugaagaagggagagca

SEQ ID NO: 28083 - RNA, 25 nt, Artificial Sequence
  Description of Artificial Sequence: Synthetic oligonucleotide
accggcagcugcugaaggacagcuu

SEQ ID NO: 28084 - RNA, 25 nt, Artificial Sequence
  Description of Artificial Sequence: Synthetic oligonucleotide
ucaugguggagcugguggagggggc

SEQ ID NO: 28085 - RNA, 25 nt, Artificial Sequence
  Description of Artificial Sequence: Synthetic oligonucleotide
cccgcaagcugcgccacgucuuccu

SEQ ID NO: 28086 - RNA, 25 nt, Artificial Sequence
  Description of Artificial Sequence: Synthetic oligonucleotide
uguucaccgaccugcuucucugcac

SEQ ID NO: 28087 - RNA, 25 nt, Artificial Sequence
  Description of Artificial Sequence: Synthetic oligonucleotide
ccaagcucaagaagcagagcggagg

SEQ ID NO: 28088 - RNA, 25 nt, Artificial Sequence
  Description of Artificial Sequence: Synthetic oligonucleotide
gcaaaacgcagcaguaugacugcaa

SEQ ID NO: 28089 - RNA, 25 nt, Artificial Sequence
  Description of Artificial Sequence: Synthetic oligonucleotide
aaugguacauuccgcucacggaucu

SEQ ID NO: 28090 - RNA, 25 nt, Artificial Sequence
  Description of Artificial Sequence: Synthetic oligonucleotide
ucagcuuccagaugguggaugaacu

SEQ ID NO: 28091 - RNA, 25 nt, Artificial Sequence
  Description of Artificial Sequence: Synthetic oligonucleotide
uggaggcagugcccaacaucccccu

SEQ ID NO: 28092 - RNA, 25 nt, Artificial Sequence
  Description of Artificial Sequence: Synthetic oligonucleotide
uggugcccgaugaggagcuggacgc

SEQ ID NO: 28093 - RNA, 25 nt, Artificial Sequence
  Description of Artificial Sequence: Synthetic oligonucleotide
cuuugaagaucaagaucucccagau

SEQ ID NO: 28094 - RNA, 25 nt, Artificial Sequence
  Description of Artificial Sequence: Synthetic oligonucleotide
ucaagaaugacauccagagagagaa

SEQ ID NO: 28095 - RNA, 25 nt, Artificial Sequence
  Description of Artificial Sequence: Synthetic oligonucleotide
agagggcgaacaagggcagcaaggc

SEQ ID NO: 28096 - RNA, 25 nt, Artificial Sequence
  Description of Artificial Sequence: Synthetic oligonucleotide
cuacggagaggcugaagaagaagcu

SEQ ID NO: 28097 - RNA, 25 nt, Artificial Sequence
  Description of Artificial Sequence: Synthetic oligonucleotide
ugucggagcaggagucacugcugcu

SEQ ID NO: 28098 - RNA, 25 nt, Artificial Sequence
  Description of Artificial Sequence: Synthetic oligonucleotide
ugcuuaugucucccagcauggccuu

SEQ ID NO: 28099 - RNA, 25 nt, Artificial Sequence
  Description of Artificial Sequence: Synthetic oligonucleotide
ucagggugcacagccgcaacggcaa

SEQ ID NO: 28100 - RNA, 25 nt, Artificial Sequence
  Description of Artificial Sequence: Synthetic oligonucleotide
agaguuacacguuccugaucuccuc

SEQ ID NO: 28101 - RNA, 25 nt, Artificial Sequence
  Description of Artificial Sequence: Synthetic oligonucleotide
cugacuaugagcgugcagaguggag

SEQ ID NO: 28102 - RNA, 25 nt, Artificial Sequence
  Description of Artificial Sequence: Synthetic oligonucleotide
gggagaacauccgggagcagcagaa

SEQ ID NO: 28103 - RNA, 25 nt, Artificial Sequence
  Description of Artificial Sequence: Synthetic oligonucleotide
agaaguguuucagaagcuucucccu

SEQ ID NO: 28104 - RNA, 25 nt, Artificial Sequence
  Description of Artificial Sequence: Synthetic oligonucleotide
ugacauccguggagcugcagaugcu

SEQ ID NO: 28105 - RNA, 25 nt, Artificial Sequence
  Description of Artificial Sequence: Synthetic oligonucleotide
ugaccaacucgugugugaaacucca

SEQ ID NO: 28106 - RNA, 25 nt, Artificial Sequence
  Description of Artificial Sequence: Synthetic oligonucleotide
agacuguccacagcauuccgcugac

SEQ ID NO: 28107 - RNA, 25 nt, Artificial Sequence
  Description of Artificial Sequence: Synthetic oligonucleotide
ccaucaauaaggaagaugaugaguc

SEQ ID NO: 28108 - RNA, 25 nt, Artificial Sequence
  Description of Artificial Sequence: Synthetic oligonucleotide
cuccggggcucuauggguuucugaa

SEQ ID NO: 28109 - RNA, 25 nt, Artificial Sequence
  Description of Artificial Sequence: Synthetic oligonucleotide
augucaucguccacucagccacugg

SEQ ID NO: 28110 - RNA, 25 nt, Artificial Sequence
  Description of Artificial Sequence: Synthetic oligonucleotide
gauuuaagcagaguucaaaucugua

SEQ ID NO: 28111 - RNA, 25 nt, Artificial Sequence
  Description of Artificial Sequence: Synthetic oligonucleotide
acugcacccuggagguggauuccuu

SEQ ID NO: 28112 - RNA, 25 nt, Artificial Sequence
  Description of Artificial Sequence: Synthetic oligonucleotide
uuggguauuuugugaauaaagcaaa

SEQ ID NO: 28113 - RNA, 25 nt, Artificial Sequence
  Description of Artificial Sequence: Synthetic oligonucleotide
agacgcgcgucuacagggacacagc

SEQ ID NO: 28114 - RNA, 25 nt, Artificial Sequence
  Description of Artificial Sequence: Synthetic oligonucleotide
cugagccaaacuggaacgagcugga

SEQ ID NO: 28115 - RNA, 25 nt, Artificial Sequence
  Description of Artificial Sequence: Synthetic oligonucleotide
acccgcaggcccugcaggacagaga

SEQ ID NO: 28116 - RNA, 25 nt, Artificial Sequence
  Description of Artificial Sequence: Synthetic oligonucleotide
acuggcagcgcaccgucaucgccau

SEQ ID NO: 28117 - RNA, 25 nt, Artificial Sequence
  Description of Artificial Sequence: Synthetic oligonucleotide
ugaaugggaucgaaguaaagcucuc

SEQ ID NO: 28118 - RNA, 25 nt, Artificial Sequence
  Description of Artificial Sequence: Synthetic oligonucleotide
cggucaaguucaacagcagggaguu

SEQ ID NO: 28119 - RNA, 25 nt, Artificial Sequence
  Description of Artificial Sequence: Synthetic oligonucleotide
ucagcuugaagaggaugccgucccg

SEQ ID NO: 28120 - RNA, 25 nt, Artificial Sequence
  Description of Artificial Sequence: Synthetic oligonucleotide
gaaaacagacaggggucuucggagu

SEQ ID NO: 28121 - RNA, 25 nt, Artificial Sequence
  Description of Artificial Sequence: Synthetic oligonucleotide
ucaagauugcuguggucaccaagag

SEQ ID NO: 28122 - RNA, 25 nt, Artificial Sequence
  Description of Artificial Sequence: Synthetic oligonucleotide
gagagagguccaaggugcccuacau

SEQ ID NO: 28123 - RNA, 25 nt, Artificial Sequence
  Description of Artificial Sequence: Synthetic oligonucleotide
ucgugcgccagugcguggaggagau

SEQ ID NO: 28124 - RNA, 25 nt, Artificial Sequence
  Description of Artificial Sequence: Synthetic oligonucleotide
ucgagcgccgaggcauggaggaggu

SEQ ID NO: 28125 - RNA, 25 nt, Artificial Sequence
  Description of Artificial Sequence: Synthetic oligonucleotide
ugggcaucuaccgcguguccggugu

SEQ ID NO: 28126 - RNA, 25 nt, Artificial Sequence
  Description of Artificial Sequence: Synthetic oligonucleotide
uggccacggacauccaggcacugaa

SEQ ID NO: 28127 - RNA, 25 nt, Artificial Sequence
  Description of Artificial Sequence: Synthetic oligonucleotide
cugagccaaacuggaacgaggaauu

SEQ ID NO: 28128 - RNA, 25 nt, Artificial Sequence
  Description of Artificial Sequence: Synthetic oligonucleotide
uugagauagagcuggagggcuccca

SEQ ID NO: 28129 - RNA, 25 nt, Artificial Sequence
  Description of Artificial Sequence: Synthetic oligonucleotide
agacccugaggauacugugcuauga

SEQ ID NO: 28130 - RNA, 25 nt, Artificial Sequence
  Description of Artificial Sequence: Synthetic oligonucleotide
aaaaguguuacaacaagacgaagau

SEQ ID NO: 28131 - RNA, 25 nt, Artificial Sequence
  Description of Artificial Sequence: Synthetic oligonucleotide
uccccaaggaggacggcgagagcac

SEQ ID NO: 28132 - RNA, 25 nt, Artificial Sequence
  Description of Artificial Sequence: Synthetic oligonucleotide
cggacagacucauggggaagggcca

SEQ ID NO: 28133 - RNA, 25 nt, Artificial Sequence
  Description of Artificial Sequence: Synthetic oligonucleotide
agguccagcuggacccgcaggcccu

SEQ ID NO: 28134 - RNA, 25 nt, Artificial Sequence
  Description of Artificial Sequence: Synthetic oligonucleotide
ugcaggacagagacuggcagcgcac

SEQ ID NO: 28135 - RNA, 25 nt, Artificial Sequence
  Description of Artificial Sequence: Synthetic oligonucleotide
ccgucaucgccaugaaugggaucga

SEQ ID NO: 28136 - RNA, 25 nt, Artificial Sequence
  Description of Artificial Sequence: Synthetic oligonucleotide
aaguaaagcucucggucaaguucaa

SEQ ID NO: 28137 - RNA, 25 nt, Artificial Sequence
  Description of Artificial Sequence: Synthetic oligonucleotide
acagcagggaguucagcuugaagag

SEQ ID NO: 28138 - RNA, 25 nt, Artificial Sequence
  Description of Artificial Sequence: Synthetic oligonucleotide
ggaugccgucccgaaaacagacagg

SEQ ID NO: 28139 - RNA, 25 nt, Artificial Sequence
  Description of Artificial Sequence: Synthetic oligonucleotide
gggucuucggagucaagauugcugu

SEQ ID NO: 28140 - RNA, 25 nt, Artificial Sequence
  Description of Artificial Sequence: Synthetic oligonucleotide
uggucaccaagagagagagguccaa

SEQ ID NO: 28141 - RNA, 25 nt, Artificial Sequence
  Description of Artificial Sequence: Synthetic oligonucleotide
aggugcccuacaucgugcgccagug

SEQ ID NO: 28142 - RNA, 25 nt, Artificial Sequence
  Description of Artificial Sequence: Synthetic oligonucleotide
gcguggaggagaucgagcgccgagg

SEQ ID NO: 28143 - RNA, 25 nt, Artificial Sequence
  Description of Artificial Sequence: Synthetic oligonucleotide
gcauggaggaggugggcaucuaccg

SEQ ID NO: 28144 - RNA, 25 nt, Artificial Sequence
  Description of Artificial Sequence: Synthetic oligonucleotide
gcguguccgguguggccacggacau

SEQ ID NO: 28145 - RNA, 25 nt, Artificial Sequence
  Description of Artificial Sequence: Synthetic oligonucleotide
uccaggcacugaaggcagccuucga

SEQ ID NO: 28146 - RNA, 19 nt, Artificial Sequence
  Description of Artificial Sequence: Synthetic oligonucleotide
ugccgcugaguaucugcug

SEQ ID NO: 28147 - RNA, 19 nt, Artificial Sequence
  Description of Artificial Sequence: Synthetic oligonucleotide
gcgcaacaagcccacuguc

SEQ ID NO: 28148 - RNA, 19 nt, Artificial Sequence
  Description of Artificial Sequence: Synthetic oligonucleotide
caugaagcacaagcugggc

SEQ ID NO: 28149 - RNA, 19 nt, Artificial Sequence
  Description of Artificial Sequence: Synthetic oligonucleotide
cgggggccaguacggggag

SEQ ID NO: 28150 - RNA, 19 nt, Artificial Sequence
  Description of Artificial Sequence: Synthetic oligonucleotide
gguguacgagggcgugugg

SEQ ID NO: 28151 - RNA, 19 nt, Artificial Sequence
  Description of Artificial Sequence: Synthetic oligonucleotide
gaagaaauacagccugacg

SEQ ID NO: 28152 - RNA, 19 nt, Artificial Sequence
  Description of Artificial Sequence: Synthetic oligonucleotide
gguggccgugaagaccuug

SEQ ID NO: 28153 - RNA, 19 nt, Artificial Sequence
  Description of Artificial Sequence: Synthetic oligonucleotide
gaaggaggacaccauggag

SEQ ID NO: 28154 - RNA, 19 nt, Artificial Sequence
  Description of Artificial Sequence: Synthetic oligonucleotide
gguggaagaguucuugaaa

SEQ ID NO: 28155 - RNA, 19 nt, Artificial Sequence
  Description of Artificial Sequence: Synthetic oligonucleotide
agaagcugcagucaugaaa

SEQ ID NO: 28156 - RNA, 19 nt, Artificial Sequence
  Description of Artificial Sequence: Synthetic oligonucleotide
agagaucaaacacccuaac

SEQ ID NO: 28157 - RNA, 19 nt, Artificial Sequence
  Description of Artificial Sequence: Synthetic oligonucleotide
ccuggugcagcuccuuggg

SEQ ID NO: 28158 - RNA, 19 nt, Artificial Sequence
  Description of Artificial Sequence: Synthetic oligonucleotide
ggucugcacccgggagccc

SEQ ID NO: 28159 - RNA, 19 nt, Artificial Sequence
  Description of Artificial Sequence: Synthetic oligonucleotide
cccguucuauaucaucacu

SEQ ID NO: 28160 - RNA, 19 nt, Artificial Sequence
  Description of Artificial Sequence: Synthetic oligonucleotide
ugaguucaugaccuacggg

SEQ ID NO: 28161 - RNA, 19 nt, Artificial Sequence
  Description of Artificial Sequence: Synthetic oligonucleotide
gaaccuccuggacuaccug

SEQ ID NO: 28162 - RNA, 19 nt, Artificial Sequence
  Description of Artificial Sequence: Synthetic oligonucleotide
gagggagugcaaccggcag

SEQ ID NO: 28163 - RNA, 19 nt, Artificial Sequence
  Description of Artificial Sequence: Synthetic oligonucleotide
ggaggugaacgccguggug

SEQ ID NO: 28164 - RNA, 19 nt, Artificial Sequence
  Description of Artificial Sequence: Synthetic oligonucleotide
gcugcuguacauggccacu

SEQ ID NO: 28165 - RNA, 19 nt, Artificial Sequence
  Description of Artificial Sequence: Synthetic oligonucleotide
ucagaucucgucagccaug

SEQ ID NO: 28166 - RNA, 19 nt, Artificial Sequence
  Description of Artificial Sequence: Synthetic oligonucleotide
ggaguaccuggagaagaaa

SEQ ID NO: 28167 - RNA, 19 nt, Artificial Sequence
  Description of Artificial Sequence: Synthetic oligonucleotide
aaacuucauccacagagau

SEQ ID NO: 28168 - RNA, 19 nt, Artificial Sequence
  Description of Artificial Sequence: Synthetic oligonucleotide
ucuugcugcccgaaacugc

SEQ ID NO: 28169 - RNA, 19 nt, Artificial Sequence
  Description of Artificial Sequence: Synthetic oligonucleotide
ccugguaggggagaaccac

SEQ ID NO: 28170 - RNA, 19 nt, Artificial Sequence
  Description of Artificial Sequence: Synthetic oligonucleotide
cuuggugaagguagcugau

SEQ ID NO: 28171 - RNA, 19 nt, Artificial Sequence
  Description of Artificial Sequence: Synthetic oligonucleotide
uuuuggccugagcagguug

SEQ ID NO: 28172 - RNA, 19 nt, Artificial Sequence
  Description of Artificial Sequence: Synthetic oligonucleotide
gaugacaggggacaccuac

SEQ ID NO: 28173 - RNA, 19 nt, Artificial Sequence
  Description of Artificial Sequence: Synthetic oligonucleotide
cacagcccaugcuggagcc

SEQ ID NO: 28174 - RNA, 19 nt, Artificial Sequence
  Description of Artificial Sequence: Synthetic oligonucleotide
caaguuccccaucaaaugg

SEQ ID NO: 28175 - RNA, 19 nt, Artificial Sequence
  Description of Artificial Sequence: Synthetic oligonucleotide
gacugcacccgagagccug

SEQ ID NO: 28176 - RNA, 19 nt, Artificial Sequence
  Description of Artificial Sequence: Synthetic oligonucleotide
ggccuacaacaaguucucc

SEQ ID NO: 28177 - RNA, 19 nt, Artificial Sequence
  Description of Artificial Sequence: Synthetic oligonucleotide
caucaaguccgacgucugg

SEQ ID NO: 28178 - RNA, 19 nt, Artificial Sequence
  Description of Artificial Sequence: Synthetic oligonucleotide
ggcauuuggaguauugcuu

SEQ ID NO: 28179 - RNA, 19 nt, Artificial Sequence
  Description of Artificial Sequence: Synthetic oligonucleotide
uugggaaauugcuaccuau

SEQ ID NO: 28180 - RNA, 19 nt, Artificial Sequence
  Description of Artificial Sequence: Synthetic oligonucleotide
uggcauguccccuuacccg

SEQ ID NO: 28181 - RNA, 19 nt, Artificial Sequence
  Description of Artificial Sequence: Synthetic oligonucleotide
gggaauugaccugucccag

SEQ ID NO: 28182 - RNA, 19 nt, Artificial Sequence
  Description of Artificial Sequence: Synthetic oligonucleotide
gguguaugagcugcuagag

SEQ ID NO: 28183 - RNA, 19 nt, Artificial Sequence
  Description of Artificial Sequence: Synthetic oligonucleotide
gaaggacuaccgcauggag

SEQ ID NO: 28184 - RNA, 19 nt, Artificial Sequence
  Description of Artificial Sequence: Synthetic oligonucleotide
gcgcccagaaggcugccca

SEQ ID NO: 28185 - RNA, 19 nt, Artificial Sequence
  Description of Artificial Sequence: Synthetic oligonucleotide
agagaaggucuaugaacuc

SEQ ID NO: 28186 - RNA, 19 nt, Artificial Sequence
  Description of Artificial Sequence: Synthetic oligonucleotide
caugcgagcauguuggcag

SEQ ID NO: 28187 - RNA, 19 nt, Artificial Sequence
  Description of Artificial Sequence: Synthetic oligonucleotide
guggaaucccucugaccgg

SEQ ID NO: 28188 - RNA, 19 nt, Artificial Sequence
  Description of Artificial Sequence: Synthetic oligonucleotide
gcccuccuuugcugaaauc

SEQ ID NO: 28189 - RNA, 19 nt, Artificial Sequence
  Description of Artificial Sequence: Synthetic oligonucleotide
ccaccaagccuuugaaaca

SEQ ID NO: 28190 - RNA, 19 nt, Artificial Sequence
  Description of Artificial Sequence: Synthetic oligonucleotide
aauguuccaggaauccagu

SEQ ID NO: 28191 - RNA, 19 nt, Artificial Sequence
  Description of Artificial Sequence: Synthetic oligonucleotide
uaucucagacgaaguggaa

SEQ ID NO: 28192 - RNA, 19 nt, Artificial Sequence
  Description of Artificial Sequence: Synthetic oligonucleotide
aaaggagcuggggaaacaa

SEQ ID NO: 28193 - RNA, 19 nt, Artificial Sequence
  Description of Artificial Sequence: Synthetic oligonucleotide
aggcguccguggggcugug

SEQ ID NO: 28194 - RNA, 19 nt, Artificial Sequence
  Description of Artificial Sequence: Synthetic oligonucleotide
gaguaccuugcugcaggcc

SEQ ID NO: 28195 - RNA, 19 nt, Artificial Sequence
  Description of Artificial Sequence: Synthetic oligonucleotide
cccagagcugcccaccaag

SEQ ID NO: 28196 - RNA, 19 nt, Artificial Sequence
  Description of Artificial Sequence: Synthetic oligonucleotide
gacgaggaccuccaggaga

SEQ ID NO: 28197 - RNA, 19 nt, Artificial Sequence
  Description of Artificial Sequence: Synthetic oligonucleotide
agcugcagagcacagagac

SEQ ID NO: 28198 - RNA, 19 nt, Artificial Sequence
  Description of Artificial Sequence: Synthetic oligonucleotide
caccacugacgugccugag

SEQ ID NO: 28199 - RNA, 19 nt, Artificial Sequence
  Description of Artificial Sequence: Synthetic oligonucleotide
gaugccucacuccaagggc

SEQ ID NO: 28200 - RNA, 19 nt, Artificial Sequence
  Description of Artificial Sequence: Synthetic oligonucleotide
ccagggagagagcgauccu

SEQ ID NO: 28201 - RNA, 19 nt, Artificial Sequence
  Description of Artificial Sequence: Synthetic oligonucleotide
ucuggaccaugagccugcc

SEQ ID NO: 28202 - RNA, 19 nt, Artificial Sequence
  Description of Artificial Sequence: Synthetic oligonucleotide
cgugucuccauugcucccu

SEQ ID NO: 28203 - RNA, 19 nt, Artificial Sequence
  Description of Artificial Sequence: Synthetic oligonucleotide
ucgaaaagagcgagguccc

SEQ ID NO: 28204 - RNA, 19 nt, Artificial Sequence
  Description of Artificial Sequence: Synthetic oligonucleotide
cccggagggcggccugaau

SEQ ID NO: 28205 - RNA, 19 nt, Artificial Sequence
  Description of Artificial Sequence: Synthetic oligonucleotide
ugaagaugagcgccuucuc

SEQ ID NO: 28206 - RNA, 19 nt, Artificial Sequence
  Description of Artificial Sequence: Synthetic oligonucleotide
ccccaaagacaaaaagacc

SEQ ID NO: 28207 - RNA, 19 nt, Artificial Sequence
  Description of Artificial Sequence: Synthetic oligonucleotide
caacuuguucagcgccuug

SEQ ID NO: 28208 - RNA, 19 nt, Artificial Sequence
  Description of Artificial Sequence: Synthetic oligonucleotide
gaucaagaagaagaagaag

SEQ ID NO: 28209 - RNA, 19 nt, Artificial Sequence
  Description of Artificial Sequence: Synthetic oligonucleotide
gacagccccaaccccuccc

SEQ ID NO: 28210 - RNA, 19 nt, Artificial Sequence
  Description of Artificial Sequence: Synthetic oligonucleotide
caaacgcagcagcuccuuc

SEQ ID NO: 28211 - RNA, 19 nt, Artificial Sequence
  Description of Artificial Sequence: Synthetic oligonucleotide
ccgggagauggacggccag

SEQ ID NO: 28212 - RNA, 19 nt, Artificial Sequence
  Description of Artificial Sequence: Synthetic oligonucleotide
gccggagcgcagaggggcc

SEQ ID NO: 28213 - RNA, 19 nt, Artificial Sequence
  Description of Artificial Sequence: Synthetic oligonucleotide
cggcgaggaagagggccga

SEQ ID NO: 28214 - RNA, 19 nt, Artificial Sequence
  Description of Artificial Sequence: Synthetic oligonucleotide
agacaucagcaacggggca

SEQ ID NO: 28215 - RNA, 19 nt, Artificial Sequence
  Description of Artificial Sequence: Synthetic oligonucleotide
acuggcuuucacccccuug

SEQ ID NO: 28216 - RNA, 19 nt, Artificial Sequence
  Description of Artificial Sequence: Synthetic oligonucleotide
ggacacagcugacccagcc

SEQ ID NO: 28217 - RNA, 19 nt, Artificial Sequence
  Description of Artificial Sequence: Synthetic oligonucleotide
caaguccccaaagcccagc

SEQ ID NO: 28218 - RNA, 19 nt, Artificial Sequence
  Description of Artificial Sequence: Synthetic oligonucleotide
caauggggcuggggucccc

SEQ ID NO: 28219 - RNA, 19 nt, Artificial Sequence
  Description of Artificial Sequence: Synthetic oligonucleotide
caauggagcccuccgggag

SEQ ID NO: 28220 - RNA, 19 nt, Artificial Sequence
  Description of Artificial Sequence: Synthetic oligonucleotide
guccgggggcucaggcuuc

SEQ ID NO: 28221 - RNA, 19 nt, Artificial Sequence
  Description of Artificial Sequence: Synthetic oligonucleotide
ccggucuccccaccugugg

SEQ ID NO: 28222 - RNA, 19 nt, Artificial Sequence
  Description of Artificial Sequence: Synthetic oligonucleotide
gaagaaguccagcacgcug

SEQ ID NO: 28223 - RNA, 19 nt, Artificial Sequence
  Description of Artificial Sequence: Synthetic oligonucleotide
gaccagcagccgccuagcc

SEQ ID NO: 28224 - RNA, 19 nt, Artificial Sequence
  Description of Artificial Sequence: Synthetic oligonucleotide
caccggcgaggaggagggc

SEQ ID NO: 28225 - RNA, 19 nt, Artificial Sequence
  Description of Artificial Sequence: Synthetic oligonucleotide
cgguggcagcuccagcaag

SEQ ID NO: 28226 - RNA, 19 nt, Artificial Sequence
  Description of Artificial Sequence: Synthetic oligonucleotide
gcgcuuccugcgcucuugc

SEQ ID NO: 28227 - RNA, 19 nt, Artificial Sequence
  Description of Artificial Sequence: Synthetic oligonucleotide
cuccgccuccugcguuccc

SEQ ID NO: 28228 - RNA, 19 nt, Artificial Sequence
  Description of Artificial Sequence: Synthetic oligonucleotide
ccauggggccaaggacacg

SEQ ID NO: 28229 - RNA, 19 nt, Artificial Sequence
  Description of Artificial Sequence: Synthetic oligonucleotide
ggaguggaggucagucacg

SEQ ID NO: 28230 - RNA, 19 nt, Artificial Sequence
  Description of Artificial Sequence: Synthetic oligonucleotide
gcugccucgggacuugcag

SEQ ID NO: 28231 - RNA, 19 nt, Artificial Sequence
  Description of Artificial Sequence: Synthetic oligonucleotide
guccacgggaagacaguuu

SEQ ID NO: 28232 - RNA, 19 nt, Artificial Sequence
  Description of Artificial Sequence: Synthetic oligonucleotide
ugacucguccacauuugga

SEQ ID NO: 28233 - RNA, 19 nt, Artificial Sequence
  Description of Artificial Sequence: Synthetic oligonucleotide
agggcacaaaagugagaag

SEQ ID NO: 28234 - RNA, 19 nt, Artificial Sequence
  Description of Artificial Sequence: Synthetic oligonucleotide
gccggcucugccucggaag

SEQ ID NO: 28235 - RNA, 19 nt, Artificial Sequence
  Description of Artificial Sequence: Synthetic oligonucleotide
gagggcaggggagaacagg

SEQ ID NO: 28236 - RNA, 19 nt, Artificial Sequence
  Description of Artificial Sequence: Synthetic oligonucleotide
gucugaccaggugacccga

SEQ ID NO: 28237 - RNA, 19 nt, Artificial Sequence
  Description of Artificial Sequence: Synthetic oligonucleotide
aggcacaguaacgccuccc

SEQ ID NO: 28238 - RNA, 19 nt, Artificial Sequence
  Description of Artificial Sequence: Synthetic oligonucleotide
ccccaggcuggugaaaaag

SEQ ID NO: 28239 - RNA, 19 nt, Artificial Sequence
  Description of Artificial Sequence: Synthetic oligonucleotide
gaaugaggaagcugcugau

SEQ ID NO: 28240 - RNA, 19 nt, Artificial Sequence
  Description of Artificial Sequence: Synthetic oligonucleotide
ugaggucuucaaagacauc

SEQ ID NO: 28241 - RNA, 19 nt, Artificial Sequence
  Description of Artificial Sequence: Synthetic oligonucleotide
cauggaguccagcccgggc

SEQ ID NO: 28242 - RNA, 19 nt, Artificial Sequence
  Description of Artificial Sequence: Synthetic oligonucleotide
cuccagcccgcccaaccug

SEQ ID NO: 28243 - RNA, 19 nt, Artificial Sequence
  Description of Artificial Sequence: Synthetic oligonucleotide
gacuccaaaaccccuccgg

SEQ ID NO: 28244 - RNA, 19 nt, Artificial Sequence
  Description of Artificial Sequence: Synthetic oligonucleotide
gcggcaggucaccguggcc

SEQ ID NO: 28245 - RNA, 19 nt, Artificial Sequence
  Description of Artificial Sequence: Synthetic oligonucleotide
cccugccucgggccucccc

SEQ ID NO: 28246 - RNA, 19 nt, Artificial Sequence
  Description of Artificial Sequence: Synthetic oligonucleotide
ccacaaggaagaagcugga

SEQ ID NO: 28247 - RNA, 19 nt, Artificial Sequence
  Description of Artificial Sequence: Synthetic oligonucleotide
aaagggcagugccuuaggg

SEQ ID NO: 28248 - RNA, 19 nt, Artificial Sequence
  Description of Artificial Sequence: Synthetic oligonucleotide
gaccccugcugcagcugag

SEQ ID NO: 28249 - RNA, 19 nt, Artificial Sequence
  Description of Artificial Sequence: Synthetic oligonucleotide
gccagugacccccaccagc

SEQ ID NO: 28250 - RNA, 19 nt, Artificial Sequence
  Description of Artificial Sequence: Synthetic oligonucleotide
caaagcaggcucaggugca

SEQ ID NO: 28251 - RNA, 19 nt, Artificial Sequence
  Description of Artificial Sequence: Synthetic oligonucleotide
accagggggcaccagcaag

SEQ ID NO: 28252 - RNA, 19 nt, Artificial Sequence
  Description of Artificial Sequence: Synthetic oligonucleotide
gggccccgccgaggagucc

SEQ ID NO: 28253 - RNA, 19 nt, Artificial Sequence
  Description of Artificial Sequence: Synthetic oligonucleotide
cagagugaggaggcacaag

SEQ ID NO: 28254 - RNA, 19 nt, Artificial Sequence
  Description of Artificial Sequence: Synthetic oligonucleotide
gcacuccucugagucgcca

SEQ ID NO: 28255 - RNA, 19 nt, Artificial Sequence
  Description of Artificial Sequence: Synthetic oligonucleotide
agggagggacaaggggaaa

SEQ ID NO: 28256 - RNA, 19 nt, Artificial Sequence
  Description of Artificial Sequence: Synthetic oligonucleotide
auuguccaggcucaaaccu

SEQ ID NO: 28257 - RNA, 19 nt, Artificial Sequence
  Description of Artificial Sequence: Synthetic oligonucleotide
ugccccgccgcccccacca

SEQ ID NO: 28258 - RNA, 19 nt, Artificial Sequence
  Description of Artificial Sequence: Synthetic oligonucleotide
agcagccucugcagggaag

SEQ ID NO: 28259 - RNA, 19 nt, Artificial Sequence
  Description of Artificial Sequence: Synthetic oligonucleotide
ggcuggaggaaagcccucg

SEQ ID NO: 28260 - RNA, 19 nt, Artificial Sequence
  Description of Artificial Sequence: Synthetic oligonucleotide
gcagagcccgagccaggag

SEQ ID NO: 28261 - RNA, 19 nt, Artificial Sequence
  Description of Artificial Sequence: Synthetic oligonucleotide
ggcggccggggaggcaguc

SEQ ID NO: 28262 - RNA, 19 nt, Artificial Sequence
  Description of Artificial Sequence: Synthetic oligonucleotide
ccugggcgcaaagacaaaa

SEQ ID NO: 28263 - RNA, 19 nt, Artificial Sequence
  Description of Artificial Sequence: Synthetic oligonucleotide
agccacgagucugguugau

SEQ ID NO: 28264 - RNA, 19 nt, Artificial Sequence
  Description of Artificial Sequence: Synthetic oligonucleotide
ugcugugaacagugacgcu

SEQ ID NO: 28265 - RNA, 19 nt, Artificial Sequence
  Description of Artificial Sequence: Synthetic oligonucleotide
ugccaagcccagccagccg

SEQ ID NO: 28266 - RNA, 19 nt, Artificial Sequence
  Description of Artificial Sequence: Synthetic oligonucleotide
gggagagggccucaaaaag

SEQ ID NO: 28267 - RNA, 19 nt, Artificial Sequence
  Description of Artificial Sequence: Synthetic oligonucleotide
gcccgugcucccggccacu

SEQ ID NO: 28268 - RNA, 19 nt, Artificial Sequence
  Description of Artificial Sequence: Synthetic oligonucleotide
uccaaagccacaguccgcc

SEQ ID NO: 28269 - RNA, 19 nt, Artificial Sequence
  Description of Artificial Sequence: Synthetic oligonucleotide
caagccgucggggaccccc

SEQ ID NO: 28270 - RNA, 19 nt, Artificial Sequence
  Description of Artificial Sequence: Synthetic oligonucleotide
caucagcccagcccccguu

SEQ ID NO: 28271 - RNA, 19 nt, Artificial Sequence
  Description of Artificial Sequence: Synthetic oligonucleotide
ucccuccacguugccauca

SEQ ID NO: 28272 - RNA, 19 nt, Artificial Sequence
  Description of Artificial Sequence: Synthetic oligonucleotide
agcauccucggcccuggca

SEQ ID NO: 28273 - RNA, 19 nt, Artificial Sequence
  Description of Artificial Sequence: Synthetic oligonucleotide
aggggaccagccgucuucc

SEQ ID NO: 28274 - RNA, 19 nt, Artificial Sequence
  Description of Artificial Sequence: Synthetic oligonucleotide
caccgccuucaucccucuc

SEQ ID NO: 28275 - RNA, 19 nt, Artificial Sequence
  Description of Artificial Sequence: Synthetic oligonucleotide
cauaucaacccgagugucu

SEQ ID NO: 28276 - RNA, 19 nt, Artificial Sequence
  Description of Artificial Sequence: Synthetic oligonucleotide
ucuucggaaaacccgccag

SEQ ID NO: 28277 - RNA, 19 nt, Artificial Sequence
  Description of Artificial Sequence: Synthetic oligonucleotide
gccuccagagcggaucgcc

SEQ ID NO: 28278 - RNA, 19 nt, Artificial Sequence
  Description of Artificial Sequence: Synthetic oligonucleotide
cagcggcgccaucaccaag

SEQ ID NO: 28279 - RNA, 19 nt, Artificial Sequence
  Description of Artificial Sequence: Synthetic oligonucleotide
gggcgugguccuggacagc

SEQ ID NO: 28280 - RNA, 19 nt, Artificial Sequence
  Description of Artificial Sequence: Synthetic oligonucleotide
caccgaggcgcugugccuc

SEQ ID NO: 28281 - RNA, 19 nt, Artificial Sequence
  Description of Artificial Sequence: Synthetic oligonucleotide
cgccaucucuaggaacucc

SEQ ID NO: 28282 - RNA, 19 nt, Artificial Sequence
  Description of Artificial Sequence: Synthetic oligonucleotide
cgagcagauggccagccac

SEQ ID NO: 28283 - RNA, 19 nt, Artificial Sequence
  Description of Artificial Sequence: Synthetic oligonucleotide
cagcgcagugcuggaggcc

SEQ ID NO: 28284 - RNA, 19 nt, Artificial Sequence
  Description of Artificial Sequence: Synthetic oligonucleotide
cggcaaaaaccucuacacg

SEQ ID NO: 28285 - RNA, 19 nt, Artificial Sequence
  Description of Artificial Sequence: Synthetic oligonucleotide
guucugcgugagcuaugug

SEQ ID NO: 28286 - RNA, 19 nt, Artificial Sequence
  Description of Artificial Sequence: Synthetic oligonucleotide
ggauuccauccagcaaaug

SEQ ID NO: 28287 - RNA, 19 nt, Artificial Sequence
  Description of Artificial Sequence: Synthetic oligonucleotide
gaggaacaaguuugccuuc

SEQ ID NO: 28288 - RNA, 19 nt, Artificial Sequence
  Description of Artificial Sequence: Synthetic oligonucleotide
ccgagaggccaucaacaaa

SEQ ID NO: 28289 - RNA, 19 nt, Artificial Sequence
  Description of Artificial Sequence: Synthetic oligonucleotide
acuggagaauaaucuccgg

SEQ ID NO: 28290 - RNA, 19 nt, Artificial Sequence
  Description of Artificial Sequence: Synthetic oligonucleotide
ggagcuucagaucugcccg

SEQ ID NO: 28291 - RNA, 19 nt, Artificial Sequence
  Description of Artificial Sequence: Synthetic oligonucleotide
ggcgacagcaggcaguggu

SEQ ID NO: 28292 - RNA, 19 nt, Artificial Sequence
  Description of Artificial Sequence: Synthetic oligonucleotide
uccagcggccacucaggac

SEQ ID NO: 28293 - RNA, 19 nt, Artificial Sequence
  Description of Artificial Sequence: Synthetic oligonucleotide
cuucagcaagcuccucagu

SEQ ID NO: 28294 - RNA, 19 nt, Artificial Sequence
  Description of Artificial Sequence: Synthetic oligonucleotide
uucggugaaggaaaucagu

SEQ ID NO: 28295 - RNA, 19 nt, Artificial Sequence
  Description of Artificial Sequence: Synthetic oligonucleotide
ugacauagugcagagguag

SEQ ID NO: 28296 - RNA, 19 nt, Artificial Sequence
  Description of Artificial Sequence: Synthetic oligonucleotide
gcagcagucaggggucagg

SEQ ID NO: 28297 - RNA, 19 nt, Artificial Sequence
  Description of Artificial Sequence: Synthetic oligonucleotide
gugucaggcccgucggagc

SEQ ID NO: 28298 - RNA, 19 nt, Artificial Sequence
  Description of Artificial Sequence: Synthetic oligonucleotide
cugccugcagcacaugcgg

SEQ ID NO: 28299 - RNA, 19 nt, Artificial Sequence
  Description of Artificial Sequence: Synthetic oligonucleotide
ggcucgcccauacccguga

SEQ ID NO: 28300 - RNA, 19 nt, Artificial Sequence
  Description of Artificial Sequence: Synthetic oligonucleotide
acaguggcugacaagggac

SEQ ID NO: 28301 - RNA, 19 nt, Artificial Sequence
  Description of Artificial Sequence: Synthetic oligonucleotide
cuagugagucagcaccuug

SEQ ID NO: 28302 - RNA, 19 nt, Artificial Sequence
  Description of Artificial Sequence: Synthetic oligonucleotide
ggcccaggagcucugcgcc

SEQ ID NO: 28303 - RNA, 19 nt, Artificial Sequence
  Description of Artificial Sequence: Synthetic oligonucleotide
caggcagagcugagggccc

SEQ ID NO: 28304 - RNA, 19 nt, Artificial Sequence
  Description of Artificial Sequence: Synthetic oligonucleotide
cuguggaguccagcucuac

SEQ ID NO: 28305 - RNA, 19 nt, Artificial Sequence
  Description of Artificial Sequence: Synthetic oligonucleotide
cuaccuacguuugcaccgc

SEQ ID NO: 28306 - RNA, 19 nt, Artificial Sequence
  Description of Artificial Sequence: Synthetic oligonucleotide
ccugcccucccgcaccuuc

SEQ ID NO: 28307 - RNA, 19 nt, Artificial Sequence
  Description of Artificial Sequence: Synthetic oligonucleotide
ccuccuccccgcuccgucu

SEQ ID NO: 28308 - RNA, 19 nt, Artificial Sequence
  Description of Artificial Sequence: Synthetic oligonucleotide
ucuguccucgaauuuuauc

SEQ ID NO: 28309 - RNA, 19 nt, Artificial Sequence
  Description of Artificial Sequence: Synthetic oligonucleotide
cuguggaguuccugcuccg

SEQ ID NO: 28310 - RNA, 19 nt, Artificial Sequence
  Description of Artificial Sequence: Synthetic oligonucleotide
guggacugcagucggcaug

SEQ ID NO: 28311 - RNA, 19 nt, Artificial Sequence
  Description of Artificial Sequence: Synthetic oligonucleotide
gccaggacccgccagcccc

SEQ ID NO: 28312 - RNA, 19 nt, Artificial Sequence
  Description of Artificial Sequence: Synthetic oligonucleotide
cgcucccaccuagugcccc

SEQ ID NO: 28313 - RNA, 19 nt, Artificial Sequence
  Description of Artificial Sequence: Synthetic oligonucleotide
cagacugagcucuccaggc

SEQ ID NO: 28314 - RNA, 19 nt, Artificial Sequence
  Description of Artificial Sequence: Synthetic oligonucleotide
ccaggugggaacggcugau

SEQ ID NO: 28315 - RNA, 19 nt, Artificial Sequence
  Description of Artificial Sequence: Synthetic oligonucleotide
uguggacugucuuuuucau

SEQ ID NO: 28316 - RNA, 19 nt, Artificial Sequence
  Description of Artificial Sequence: Synthetic oligonucleotide
uuuuuuucucucuggagcc

SEQ ID NO: 28317 - RNA, 19 nt, Artificial Sequence
  Description of Artificial Sequence: Synthetic oligonucleotide
cccuccucccccggcuggg

SEQ ID NO: 28318 - RNA, 19 nt, Artificial Sequence
  Description of Artificial Sequence: Synthetic oligonucleotide
gccuccuucuuccacuucu

SEQ ID NO: 28319 - RNA, 19 nt, Artificial Sequence
  Description of Artificial Sequence: Synthetic oligonucleotide
uccaagaauggaagccuga

SEQ ID NO: 28320 - RNA, 19 nt, Artificial Sequence
  Description of Artificial Sequence: Synthetic oligonucleotide
aacugaggccuuguguguc

SEQ ID NO: 28321 - RNA, 19 nt, Artificial Sequence
  Description of Artificial Sequence: Synthetic oligonucleotide
caggcccucugccugcacu

SEQ ID NO: 28322 - RNA, 19 nt, Artificial Sequence
  Description of Artificial Sequence: Synthetic oligonucleotide
ucccuggccuugcccgucg

SEQ ID NO: 28323 - RNA, 19 nt, Artificial Sequence
  Description of Artificial Sequence: Synthetic oligonucleotide
gugugcugaagacauguuu

SEQ ID NO: 28324 - RNA, 19 nt, Artificial Sequence
  Description of Artificial Sequence: Synthetic oligonucleotide
ucaagaaccgcauuucggg

SEQ ID NO: 28325 - RNA, 19 nt, Artificial Sequence
  Description of Artificial Sequence: Synthetic oligonucleotide
gaagggcaugcacgggcau

SEQ ID NO: 28326 - RNA, 19 nt, Artificial Sequence
  Description of Artificial Sequence: Synthetic oligonucleotide
ugcacacggcuggucacuc

SEQ ID NO: 28327 - RNA, 19 nt, Artificial Sequence
  Description of Artificial Sequence: Synthetic oligonucleotide
cugcccucugcugcugccc

SEQ ID NO: 28328 - RNA, 19 nt, Artificial Sequence
  Description of Artificial Sequence: Synthetic oligonucleotide
cgggguggggugcacucgc

SEQ ID NO: 28329 - RNA, 19 nt, Artificial Sequence
  Description of Artificial Sequence: Synthetic oligonucleotide
ccauuuccucacgugcagg

SEQ ID NO: 28330 - RNA, 19 nt, Artificial Sequence
  Description of Artificial Sequence: Synthetic oligonucleotide
gacagcucuugauuugggu

SEQ ID NO: 28331 - RNA, 19 nt, Artificial Sequence
  Description of Artificial Sequence: Synthetic oligonucleotide
uggaaaacagggugcuaaa

SEQ ID NO: 28332 - RNA, 19 nt, Artificial Sequence
  Description of Artificial Sequence: Synthetic oligonucleotide
agccaaccagccuuugggu

SEQ ID NO: 28333 - RNA, 19 nt, Artificial Sequence
  Description of Artificial Sequence: Synthetic oligonucleotide
uccugggcaggugggagcu

SEQ ID NO: 28334 - RNA, 19 nt, Artificial Sequence
  Description of Artificial Sequence: Synthetic oligonucleotide
ugaaaaggaucgaggcaug

SEQ ID NO: 28335 - RNA, 19 nt, Artificial Sequence
  Description of Artificial Sequence: Synthetic oligonucleotide
ggggcauguccuuuccauc

SEQ ID NO: 28336 - RNA, 19 nt, Artificial Sequence
  Description of Artificial Sequence: Synthetic oligonucleotide
cuguccacauccccagagc

SEQ ID NO: 28337 - RNA, 19 nt, Artificial Sequence
  Description of Artificial Sequence: Synthetic oligonucleotide
cccagcucuugcucucuug

SEQ ID NO: 28338 - RNA, 19 nt, Artificial Sequence
  Description of Artificial Sequence: Synthetic oligonucleotide
gugacgugcacugugaauc

SEQ ID NO: 28339 - RNA, 19 nt, Artificial Sequence
  Description of Artificial Sequence: Synthetic oligonucleotide
ccuggcaagaaagcuugag

SEQ ID NO: 28340 - RNA, 19 nt, Artificial Sequence
  Description of Artificial Sequence: Synthetic oligonucleotide
gucucaaggguggcagguc

SEQ ID NO: 28341 - RNA, 19 nt, Artificial Sequence
  Description of Artificial Sequence: Synthetic oligonucleotide
cacugucacugccgacauc

SEQ ID NO: 28342 - RNA, 19 nt, Artificial Sequence
  Description of Artificial Sequence: Synthetic oligonucleotide
cccucccccagcagaaugg

SEQ ID NO: 28343 - RNA, 19 nt, Artificial Sequence
  Description of Artificial Sequence: Synthetic oligonucleotide
gaggcaggggacaagggag

SEQ ID NO: 28344 - RNA, 19 nt, Artificial Sequence
  Description of Artificial Sequence: Synthetic oligonucleotide
ggcaguggcuaguggggug

SEQ ID NO: 28345 - RNA, 19 nt, Artificial Sequence
  Description of Artificial Sequence: Synthetic oligonucleotide
gaacagcuggugccaaaua

SEQ ID NO: 28346 - RNA, 19 nt, Artificial Sequence
  Description of Artificial Sequence: Synthetic oligonucleotide
agccccagacugggcccag

SEQ ID NO: 28347 - RNA, 19 nt, Artificial Sequence
  Description of Artificial Sequence: Synthetic oligonucleotide
ggcaggucugcaagggccc

SEQ ID NO: 28348 - RNA, 19 nt, Artificial Sequence
  Description of Artificial Sequence: Synthetic oligonucleotide
cagagugaaccguccuuuc

SEQ ID NO: 28349 - RNA, 19 nt, Artificial Sequence
  Description of Artificial Sequence: Synthetic oligonucleotide
cacacaucugggugcccug

SEQ ID NO: 28350 - RNA, 19 nt, Artificial Sequence
  Description of Artificial Sequence: Synthetic oligonucleotide
gaaagggcccuuccccucc

SEQ ID NO: 28351 - RNA, 19 nt, Artificial Sequence
  Description of Artificial Sequence: Synthetic oligonucleotide
ccccacuccucuaagacaa

SEQ ID NO: 28352 - RNA, 19 nt, Artificial Sequence
  Description of Artificial Sequence: Synthetic oligonucleotide
aaguagauucuuacaaggc

SEQ ID NO: 28353 - RNA, 19 nt, Artificial Sequence
  Description of Artificial Sequence: Synthetic oligonucleotide
cccuuuccuuuggaacaag

SEQ ID NO: 28354 - RNA, 19 nt, Artificial Sequence
  Description of Artificial Sequence: Synthetic oligonucleotide
gacagccuucacuuuucug

SEQ ID NO: 28355 - RNA, 19 nt, Artificial Sequence
  Description of Artificial Sequence: Synthetic oligonucleotide
gaguucuugaagcauuuca

SEQ ID NO: 28356 - RNA, 19 nt, Artificial Sequence
  Description of Artificial Sequence: Synthetic oligonucleotide
aaagcccugccucugugua

SEQ ID NO: 28357 - RNA, 19 nt, Artificial Sequence
  Description of Artificial Sequence: Synthetic oligonucleotide
agccgcccugagagagaau

SEQ ID NO: 28358 - RNA, 19 nt, Artificial Sequence
  Description of Artificial Sequence: Synthetic oligonucleotide
uagagcugccacugggcac

SEQ ID NO: 28359 - RNA, 19 nt, Artificial Sequence
  Description of Artificial Sequence: Synthetic oligonucleotide
ccugcgcacaggugggagg

SEQ ID NO: 28360 - RNA, 19 nt, Artificial Sequence
  Description of Artificial Sequence: Synthetic oligonucleotide
gaaagggccuggccagucc

SEQ ID NO: 28361 - RNA, 19 nt, Artificial Sequence
  Description of Artificial Sequence: Synthetic oligonucleotide
cugguccuggcugcacucu

SEQ ID NO: 28362 - RNA, 19 nt, Artificial Sequence
  Description of Artificial Sequence: Synthetic oligonucleotide
uugaacugggcgaaugucu

SEQ ID NO: 28363 - RNA, 19 nt, Artificial Sequence
  Description of Artificial Sequence: Synthetic oligonucleotide
uuauuuaauuaccgugagu

SEQ ID NO: 28364 - RNA, 19 nt, Artificial Sequence
  Description of Artificial Sequence: Synthetic oligonucleotide
ugacauagccucauguucu

SEQ ID NO: 28365 - RNA, 19 nt, Artificial Sequence
  Description of Artificial Sequence: Synthetic oligonucleotide
ugugggggucaucagggag

SEQ ID NO: 28366 - RNA, 19 nt, Artificial Sequence
  Description of Artificial Sequence: Synthetic oligonucleotide
ggguuaggaaaaccacaaa

SEQ ID NO: 28367 - RNA, 19 nt, Artificial Sequence
  Description of Artificial Sequence: Synthetic oligonucleotide
acggagccccugaaagccu

SEQ ID NO: 28368 - RNA, 19 nt, Artificial Sequence
  Description of Artificial Sequence: Synthetic oligonucleotide
ucacguauuucacagagca

SEQ ID NO: 28369 - RNA, 19 nt, Artificial Sequence
  Description of Artificial Sequence: Synthetic oligonucleotide
acgccugccaucuucuccc

SEQ ID NO: 28370 - RNA, 19 nt, Artificial Sequence
  Description of Artificial Sequence: Synthetic oligonucleotide
ccgaggcugccccaggccg

SEQ ID NO: 28371 - RNA, 19 nt, Artificial Sequence
  Description of Artificial Sequence: Synthetic oligonucleotide
ggagcccagauacgggggc

SEQ ID NO: 28372 - RNA, 19 nt, Artificial Sequence
  Description of Artificial Sequence: Synthetic oligonucleotide
cugugacucugggcaggga

SEQ ID NO: 28373 - RNA, 19 nt, Artificial Sequence
  Description of Artificial Sequence: Synthetic oligonucleotide
acccggggucuccuggacc

SEQ ID NO: 28374 - RNA, 19 nt, Artificial Sequence
  Description of Artificial Sequence: Synthetic oligonucleotide
cuugacagagcagcuaacu

SEQ ID NO: 28375 - RNA, 19 nt, Artificial Sequence
  Description of Artificial Sequence: Synthetic oligonucleotide
uccgagagcagugggcagg

SEQ ID NO: 28376 - RNA, 19 nt, Artificial Sequence
  Description of Artificial Sequence: Synthetic oligonucleotide
guggccgccccugaggcuu

SEQ ID NO: 28377 - RNA, 19 nt, Artificial Sequence
  Description of Artificial Sequence: Synthetic oligonucleotide
ucacgccgggagaagccac

SEQ ID NO: 28378 - RNA, 19 nt, Artificial Sequence
  Description of Artificial Sequence: Synthetic oligonucleotide
ccuucccaccccuucauac

SEQ ID NO: 28379 - RNA, 19 nt, Artificial Sequence
  Description of Artificial Sequence: Synthetic oligonucleotide
ccgccucgugccagcagcc

SEQ ID NO: 28380 - RNA, 19 nt, Artificial Sequence
  Description of Artificial Sequence: Synthetic oligonucleotide
cucgcacaggcccuagcuu

SEQ ID NO: 28381 - RNA, 19 nt, Artificial Sequence
  Description of Artificial Sequence: Synthetic oligonucleotide
uuacgcucaucaccuaaac

SEQ ID NO: 28382 - RNA, 19 nt, Artificial Sequence
  Description of Artificial Sequence: Synthetic oligonucleotide
cuuguacuuuauuuuucug

SEQ ID NO: 28383 - RNA, 19 nt, Artificial Sequence
  Description of Artificial Sequence: Synthetic oligonucleotide
gauagaaaugguuuccucu

SEQ ID NO: 28384 - RNA, 19 nt, Artificial Sequence
  Description of Artificial Sequence: Synthetic oligonucleotide
uggaucguuuuaugcgguu

SEQ ID NO: 28385 - RNA, 19 nt, Artificial Sequence
  Description of Artificial Sequence: Synthetic oligonucleotide
ucuuacagcacaucaccuc

SEQ ID NO: 28386 - RNA, 19 nt, Artificial Sequence
  Description of Artificial Sequence: Synthetic oligonucleotide
cuuugcccccgacggcugu

SEQ ID NO: 28387 - RNA, 19 nt, Artificial Sequence
  Description of Artificial Sequence: Synthetic oligonucleotide
ugacgcagccggagggagg

SEQ ID NO: 28388 - RNA, 19 nt, Artificial Sequence
  Description of Artificial Sequence: Synthetic oligonucleotide
gcacuagucaccgacagcg

SEQ ID NO: 28389 - RNA, 19 nt, Artificial Sequence
  Description of Artificial Sequence: Synthetic oligonucleotide
ggccuugaagacagagcaa

SEQ ID NO: 28390 - RNA, 19 nt, Artificial Sequence
  Description of Artificial Sequence: Synthetic oligonucleotide
aagcgcccacccagguccc

SEQ ID NO: 28391 - RNA, 19 nt, Artificial Sequence
  Description of Artificial Sequence: Synthetic oligonucleotide
cccgacugccugucuccau

SEQ ID NO: 28392 - RNA, 19 nt, Artificial Sequence
  Description of Artificial Sequence: Synthetic oligonucleotide
ugagguacuggucccuucc

SEQ ID NO: 28393 - RNA, 19 nt, Artificial Sequence
  Description of Artificial Sequence: Synthetic oligonucleotide
cuuuuguuaacgugaugug

SEQ ID NO: 28394 - RNA, 19 nt, Artificial Sequence
  Description of Artificial Sequence: Synthetic oligonucleotide
gccacuauauuuuacacgu

SEQ ID NO: 28395 - RNA, 19 nt, Artificial Sequence
  Description of Artificial Sequence: Synthetic oligonucleotide
uaucucuugguaugcaucu

SEQ ID NO: 28396 - RNA, 19 nt, Artificial Sequence
  Description of Artificial Sequence: Synthetic oligonucleotide
uuuuauagacgcucuuuuc

SEQ ID NO: 28397 - RNA, 19 nt, Artificial Sequence
  Description of Artificial Sequence: Synthetic oligonucleotide
cuaaguggcgugugcauag

SEQ ID NO: 28398 - RNA, 19 nt, Artificial Sequence
  Description of Artificial Sequence: Synthetic oligonucleotide
gcguccugcccugcccccu

SEQ ID NO: 28399 - RNA, 19 nt, Artificial Sequence
  Description of Artificial Sequence: Synthetic oligonucleotide
ucgggggccugugguggcu

SEQ ID NO: 28400 - RNA, 19 nt, Artificial Sequence
  Description of Artificial Sequence: Synthetic oligonucleotide
ucccccucugcuucucggg

SEQ ID NO: 28401 - RNA, 19 nt, Artificial Sequence
  Description of Artificial Sequence: Synthetic oligonucleotide
gguccagugcauuuuguuu

SEQ ID NO: 28402 - RNA, 19 nt, Artificial Sequence
  Description of Artificial Sequence: Synthetic oligonucleotide
ucuguauaugauucucugu

SEQ ID NO: 28403 - RNA, 19 nt, Artificial Sequence
  Description of Artificial Sequence: Synthetic oligonucleotide
ugguuuuuuuugaauccaa

SEQ ID NO: 28404 - RNA, 19 nt, Artificial Sequence
  Description of Artificial Sequence: Synthetic oligonucleotide
aaucuguccucuguaguau

SEQ ID NO: 28405 - RNA, 19 nt, Artificial Sequence
  Description of Artificial Sequence: Synthetic oligonucleotide
uuuuuuaaauaaaucagug

SEQ ID NO: 28406 - RNA, 19 nt, Artificial Sequence
  Description of Artificial Sequence: Synthetic oligonucleotide
aucaguguuuacauuagaa

SEQ ID NO: 28407 - RNA, 19 nt, Artificial Sequence
  Description of Artificial Sequence: Synthetic oligonucleotide
gacuuugagccucaggguc

SEQ ID NO: 28408 - RNA, 19 nt, Artificial Sequence
  Description of Artificial Sequence: Synthetic oligonucleotide
cugagugaagccgcucguu

SEQ ID NO: 28409 - RNA, 19 nt, Artificial Sequence
  Description of Artificial Sequence: Synthetic oligonucleotide
uggaacuccaaggaaaacc

SEQ ID NO: 28410 - RNA, 19 nt, Artificial Sequence
  Description of Artificial Sequence: Synthetic oligonucleotide
cuucucgcuggacccagug

SEQ ID NO: 28411 - RNA, 19 nt, Artificial Sequence
  Description of Artificial Sequence: Synthetic oligonucleotide
gaaaaugaccccaaccuuu

SEQ ID NO: 28412 - RNA, 19 nt, Artificial Sequence
  Description of Artificial Sequence: Synthetic oligonucleotide
uucguugcacuguaugauu

SEQ ID NO: 28413 - RNA, 19 nt, Artificial Sequence
  Description of Artificial Sequence: Synthetic oligonucleotide
uuuguggccaguggagaua

SEQ ID NO: 28414 - RNA, 19 nt, Artificial Sequence
  Description of Artificial Sequence: Synthetic oligonucleotide
aacacucuaagcauaacua

SEQ ID NO: 28415 - RNA, 19 nt, Artificial Sequence
  Description of Artificial Sequence: Synthetic oligonucleotide
aaaggugaaaagcuccggg

SEQ ID NO: 28416 - RNA, 19 nt, Artificial Sequence
  Description of Artificial Sequence: Synthetic oligonucleotide
gucuuaggcuauaaucaca

SEQ ID NO: 28417 - RNA, 19 nt, Artificial Sequence
  Description of Artificial Sequence: Synthetic oligonucleotide
aauggggaauggugugaag

SEQ ID NO: 28418 - RNA, 19 nt, Artificial Sequence
  Description of Artificial Sequence: Synthetic oligonucleotide
gcccaaaccaaaaauggcc

SEQ ID NO: 28419 - RNA, 19 nt, Artificial Sequence
  Description of Artificial Sequence: Synthetic oligonucleotide
caaggcugggucccaagca

SEQ ID NO: 28420 - RNA, 19 nt, Artificial Sequence
  Description of Artificial Sequence: Synthetic oligonucleotide
aacuacaucacgccaguca

SEQ ID NO: 28421 - RNA, 19 nt, Artificial Sequence
  Description of Artificial Sequence: Synthetic oligonucleotide
aacagucuggagaaacacu

SEQ ID NO: 28422 - RNA, 19 nt, Artificial Sequence
  Description of Artificial Sequence: Synthetic oligonucleotide
uccugguaccaugggccug

SEQ ID NO: 28423 - RNA, 19 nt, Artificial Sequence
  Description of Artificial Sequence: Synthetic oligonucleotide
gugucccgcaaugccgcug

SEQ ID NO: 28424 - RNA, 19 nt, Artificial Sequence
  Description of Artificial Sequence: Synthetic oligonucleotide
gaguaucugcugagcagcg

SEQ ID NO: 28425 - RNA, 19 nt, Artificial Sequence
  Description of Artificial Sequence: Synthetic oligonucleotide
gggaucaauggcagcuucu

SEQ ID NO: 28426 - RNA, 19 nt, Artificial Sequence
  Description of Artificial Sequence: Synthetic oligonucleotide
uuggugcgugagagugaga

SEQ ID NO: 28427 - RNA, 19 nt, Artificial Sequence
  Description of Artificial Sequence: Synthetic oligonucleotide
agcaguccuggccagaggu

SEQ ID NO: 28428 - RNA, 19 nt, Artificial Sequence
  Description of Artificial Sequence: Synthetic oligonucleotide
uccaucucgcugagauacg

SEQ ID NO: 28429 - RNA, 19 nt, Artificial Sequence
  Description of Artificial Sequence: Synthetic oligonucleotide
gaagggaggguguaccauu

SEQ ID NO: 28430 - RNA, 19 nt, Artificial Sequence
  Description of Artificial Sequence: Synthetic oligonucleotide
uacaggaucaacacugcuu

SEQ ID NO: 28431 - RNA, 19 nt, Artificial Sequence
  Description of Artificial Sequence: Synthetic oligonucleotide
ucugauggcaagcucuacg

SEQ ID NO: 28432 - RNA, 19 nt, Artificial Sequence
  Description of Artificial Sequence: Synthetic oligonucleotide
gucuccuccgagagccgcu

SEQ ID NO: 28433 - RNA, 19 nt, Artificial Sequence
  Description of Artificial Sequence: Synthetic oligonucleotide
uucaacacccuggccgagu

SEQ ID NO: 28434 - RNA, 19 nt, Artificial Sequence
  Description of Artificial Sequence: Synthetic oligonucleotide
uugguucaucaucauucaa

SEQ ID NO: 28435 - RNA, 19 nt, Artificial Sequence
  Description of Artificial Sequence: Synthetic oligonucleotide
acgguggccgacgggcuca

SEQ ID NO: 28436 - RNA, 19 nt, Artificial Sequence
  Description of Artificial Sequence: Synthetic oligonucleotide
aucaccacgcuccauuauc

SEQ ID NO: 28437 - RNA, 19 nt, Artificial Sequence
  Description of Artificial Sequence: Synthetic oligonucleotide
ccagccccaaagcgcaaca

SEQ ID NO: 28438 - RNA, 19 nt, Artificial Sequence
  Description of Artificial Sequence: Synthetic oligonucleotide
aagcccacugucuauggug

SEQ ID NO: 28439 - RNA, 19 nt, Artificial Sequence
  Description of Artificial Sequence: Synthetic oligonucleotide
gugucccccaacuacgaca

SEQ ID NO: 28440 - RNA, 19 nt, Artificial Sequence
  Description of Artificial Sequence: Synthetic oligonucleotide
aagugggagauggaacgca

SEQ ID NO: 28441 - RNA, 19 nt, Artificial Sequence
  Description of Artificial Sequence: Synthetic oligonucleotide
acggacaucaccaugaagc

SEQ ID NO: 28442 - RNA, 19 nt, Artificial Sequence
  Description of Artificial Sequence: Synthetic oligonucleotide
cacaagcugggcgggggcc

SEQ ID NO: 28443 - RNA, 19 nt, Artificial Sequence
  Description of Artificial Sequence: Synthetic oligonucleotide
caguacggggagguguacg

SEQ ID NO: 28444 - RNA, 19 nt, Artificial Sequence
  Description of Artificial Sequence: Synthetic oligonucleotide
gagggcguguggaagaaau

SEQ ID NO: 28445 - RNA, 19 nt, Artificial Sequence
  Description of Artificial Sequence: Synthetic oligonucleotide
uacagccugacgguggccg

SEQ ID NO: 28446 - RNA, 19 nt, Artificial Sequence
  Description of Artificial Sequence: Synthetic oligonucleotide
gugaagaccuugaaggagg

SEQ ID NO: 28447 - RNA, 19 nt, Artificial Sequence
  Description of Artificial Sequence: Synthetic oligonucleotide
gacaccauggagguggaag

SEQ ID NO: 28448 - RNA, 19 nt, Artificial Sequence
  Description of Artificial Sequence: Synthetic oligonucleotide
gaguucuugaaagaagcug

SEQ ID NO: 28449 - RNA, 19 nt, Artificial Sequence
  Description of Artificial Sequence: Synthetic oligonucleotide
gcagucaugaaagagauca

SEQ ID NO: 28450 - RNA, 19 nt, Artificial Sequence
  Description of Artificial Sequence: Synthetic oligonucleotide
aaacacccuaaccuggugc

SEQ ID NO: 28451 - RNA, 19 nt, Artificial Sequence
  Description of Artificial Sequence: Synthetic oligonucleotide
cagcuccuuggggucugca

SEQ ID NO: 28452 - RNA, 19 nt, Artificial Sequence
  Description of Artificial Sequence: Synthetic oligonucleotide
acccgggagcccccguucu

SEQ ID NO: 28453 - RNA, 19 nt, Artificial Sequence
  Description of Artificial Sequence: Synthetic oligonucleotide
uauaucaucacugaguuca

SEQ ID NO: 28454 - RNA, 19 nt, Artificial Sequence
  Description of Artificial Sequence: Synthetic oligonucleotide
augaccuacgggaaccucc

SEQ ID NO: 28455 - RNA, 19 nt, Artificial Sequence
  Description of Artificial Sequence: Synthetic oligonucleotide
cuggacuaccugagggagu

SEQ ID NO: 28456 - RNA, 19 nt, Artificial Sequence
  Description of Artificial Sequence: Synthetic oligonucleotide
ugcaaccggcaggagguga

SEQ ID NO: 28457 - RNA, 19 nt, Artificial Sequence
  Description of Artificial Sequence: Synthetic oligonucleotide
aacgccguggugcugcugu

SEQ ID NO: 28458 - RNA, 19 nt, Artificial Sequence
  Description of Artificial Sequence: Synthetic oligonucleotide
uacauggccacucagaucu

SEQ ID NO: 28459 - RNA, 19 nt, Artificial Sequence
  Description of Artificial Sequence: Synthetic oligonucleotide
ucgucagccauggaguacc

SEQ ID NO: 28460 - RNA, 19 nt, Artificial Sequence
  Description of Artificial Sequence: Synthetic oligonucleotide
cuggagaagaaaaacuuca

SEQ ID NO: 28461 - RNA, 19 nt, Artificial Sequence
  Description of Artificial Sequence: Synthetic oligonucleotide
auccacagagaucuugcug

SEQ ID NO: 28462 - RNA, 19 nt, Artificial Sequence
  Description of Artificial Sequence: Synthetic oligonucleotide
gcccgaaacugccugguag

SEQ ID NO: 28463 - RNA, 19 nt, Artificial Sequence
  Description of Artificial Sequence: Synthetic oligonucleotide
ggggagaaccacuugguga

SEQ ID NO: 28464 - RNA, 19 nt, Artificial Sequence
  Description of Artificial Sequence: Synthetic oligonucleotide
aagguagcugauuuuggcc

SEQ ID NO: 28465 - RNA, 19 nt, Artificial Sequence
  Description of Artificial Sequence: Synthetic oligonucleotide
cugagcagguugaugacag

SEQ ID NO: 28466 - RNA, 19 nt, Artificial Sequence
  Description of Artificial Sequence: Synthetic oligonucleotide
ggggacaccuacacagccc

SEQ ID NO: 28467 - RNA, 19 nt, Artificial Sequence
  Description of Artificial Sequence: Synthetic oligonucleotide
caugcuggagccaaguucc

SEQ ID NO: 28468 - RNA, 19 nt, Artificial Sequence
  Description of Artificial Sequence: Synthetic oligonucleotide
cccaucaaauggacugcac

SEQ ID NO: 28469 - RNA, 19 nt, Artificial Sequence
  Description of Artificial Sequence: Synthetic oligonucleotide
cccgagagccuggccuaca

SEQ ID NO: 28470 - RNA, 19 nt, Artificial Sequence
  Description of Artificial Sequence: Synthetic oligonucleotide
aacaaguucuccaucaagu

SEQ ID NO: 28471 - RNA, 19 nt, Artificial Sequence
  Description of Artificial Sequence: Synthetic oligonucleotide
uccgacgucugggcauuug

SEQ ID NO: 28472 - RNA, 19 nt, Artificial Sequence
  Description of Artificial Sequence: Synthetic oligonucleotide
ggaguauugcuuugggaaa

SEQ ID NO: 28473 - RNA, 19 nt, Artificial Sequence
  Description of Artificial Sequence: Synthetic oligonucleotide
auugcuaccuauggcaugu

SEQ ID NO: 28474 - RNA, 19 nt, Artificial Sequence
  Description of Artificial Sequence: Synthetic oligonucleotide
uccccuuacccgggaauug

SEQ ID NO: 28475 - RNA, 19 nt, Artificial Sequence
  Description of Artificial Sequence: Synthetic oligonucleotide
gaccugucccagguguaug

SEQ ID NO: 28476 - RNA, 19 nt, Artificial Sequence
  Description of Artificial Sequence: Synthetic oligonucleotide
gagcugcuagagaaggacu

SEQ ID NO: 28477 - RNA, 19 nt, Artificial Sequence
  Description of Artificial Sequence: Synthetic oligonucleotide
uaccgcauggagcgcccag

SEQ ID NO: 28478 - RNA, 19 nt, Artificial Sequence
  Description of Artificial Sequence: Synthetic oligonucleotide
gaaggcugcccagagaagg

SEQ ID NO: 28479 - RNA, 19 nt, Artificial Sequence
  Description of Artificial Sequence: Synthetic oligonucleotide
gucuaugaacucaugcgag

SEQ ID NO: 28480 - RNA, 19 nt, Artificial Sequence
  Description of Artificial Sequence: Synthetic oligonucleotide
gcauguuggcaguggaauc

SEQ ID NO: 28481 - RNA, 19 nt, Artificial Sequence
  Description of Artificial Sequence: Synthetic oligonucleotide
cccucugaccggcccuccu

SEQ ID NO: 28482 - RNA, 19 nt, Artificial Sequence
  Description of Artificial Sequence: Synthetic oligonucleotide
uuugcugaaauccaccaag

SEQ ID NO: 28483 - RNA, 19 nt, Artificial Sequence
  Description of Artificial Sequence: Synthetic oligonucleotide
gccuuugaaacaauguucc

SEQ ID NO: 28484 - RNA, 19 nt, Artificial Sequence
  Description of Artificial Sequence: Synthetic oligonucleotide
caggaauccaguaucucag

SEQ ID NO: 28485 - RNA, 19 nt, Artificial Sequence
  Description of Artificial Sequence: Synthetic oligonucleotide
gacgaaguggaaaaggagc

SEQ ID NO: 28486 - RNA, 19 nt, Artificial Sequence
  Description of Artificial Sequence: Synthetic oligonucleotide
cuggggaaacaaggcgucc

SEQ ID NO: 28487 - RNA, 19 nt, Artificial Sequence
  Description of Artificial Sequence: Synthetic oligonucleotide
cguggggcugugaguaccu

SEQ ID NO: 28488 - RNA, 19 nt, Artificial Sequence
  Description of Artificial Sequence: Synthetic oligonucleotide
uugcugcaggccccagagc

SEQ ID NO: 28489 - RNA, 19 nt, Artificial Sequence
  Description of Artificial Sequence: Synthetic oligonucleotide
cugcccaccaagacgagga

SEQ ID NO: 28490 - RNA, 19 nt, Artificial Sequence
  Description of Artificial Sequence: Synthetic oligonucleotide
accuccaggagagcugcag

SEQ ID NO: 28491 - RNA, 19 nt, Artificial Sequence
  Description of Artificial Sequence: Synthetic oligonucleotide
gagcacagagacaccacug

SEQ ID NO: 28492 - RNA, 19 nt, Artificial Sequence
  Description of Artificial Sequence: Synthetic oligonucleotide
gacgugccugagaugccuc

SEQ ID NO: 28493 - RNA, 19 nt, Artificial Sequence
  Description of Artificial Sequence: Synthetic oligonucleotide
cacuccaagggccagggag

SEQ ID NO: 28494 - RNA, 19 nt, Artificial Sequence
  Description of Artificial Sequence: Synthetic oligonucleotide
gagagcgauccucuggacc

SEQ ID NO: 28495 - RNA, 19 nt, Artificial Sequence
  Description of Artificial Sequence: Synthetic oligonucleotide
caugagccugccgugucuc

SEQ ID NO: 28496 - RNA, 19 nt, Artificial Sequence
  Description of Artificial Sequence: Synthetic oligonucleotide
ccauugcucccucgaaaag

SEQ ID NO: 28497 - RNA, 19 nt, Artificial Sequence
  Description of Artificial Sequence: Synthetic oligonucleotide
gagcgaggucccccggagg

SEQ ID NO: 28498 - RNA, 19 nt, Artificial Sequence
  Description of Artificial Sequence: Synthetic oligonucleotide
ggcggccugaaugaagaug

SEQ ID NO: 28499 - RNA, 19 nt, Artificial Sequence
  Description of Artificial Sequence: Synthetic oligonucleotide
gagcgccuucuccccaaag

SEQ ID NO: 28500 - RNA, 19 nt, Artificial Sequence
  Description of Artificial Sequence: Synthetic oligonucleotide
gacaaaaagaccaacuugu

SEQ ID NO: 28501 - RNA, 19 nt, Artificial Sequence
  Description of Artificial Sequence: Synthetic oligonucleotide
uucagcgccuugaucaaga

SEQ ID NO: 28502 - RNA, 19 nt, Artificial Sequence
  Description of Artificial Sequence: Synthetic oligonucleotide
aagaagaagaagacagccc

SEQ ID NO: 28503 - RNA, 19 nt, Artificial Sequence
  Description of Artificial Sequence: Synthetic oligonucleotide
ccaaccccucccaaacgca

SEQ ID NO: 28504 - RNA, 19 nt, Artificial Sequence
  Description of Artificial Sequence: Synthetic oligonucleotide
agcagcuccuuccgggaga

SEQ ID NO: 28505 - RNA, 19 nt, Artificial Sequence
  Description of Artificial Sequence: Synthetic oligonucleotide
auggacggccagccggagc

SEQ ID NO: 28506 - RNA, 19 nt, Artificial Sequence
  Description of Artificial Sequence: Synthetic oligonucleotide
cgcagaggggccggcgagg

SEQ ID NO: 28507 - RNA, 19 nt, Artificial Sequence
  Description of Artificial Sequence: Synthetic oligonucleotide
gaagagggccgagacauca

SEQ ID NO: 28508 - RNA, 19 nt, Artificial Sequence
  Description of Artificial Sequence: Synthetic oligonucleotide
agcaacggggcacuggcuu

SEQ ID NO: 28509 - RNA, 19 nt, Artificial Sequence
  Description of Artificial Sequence: Synthetic oligonucleotide
uucacccccuuggacacag

SEQ ID NO: 28510 - RNA, 19 nt, Artificial Sequence
  Description of Artificial Sequence: Synthetic oligonucleotide
gcugacccagccaaguccc

SEQ ID NO: 28511 - RNA, 19 nt, Artificial Sequence
  Description of Artificial Sequence: Synthetic oligonucleotide
ccaaagcccagcaaugggg

SEQ ID NO: 28512 - RNA, 19 nt, Artificial Sequence
  Description of Artificial Sequence: Synthetic oligonucleotide
gcugggguccccaauggag

SEQ ID NO: 28513 - RNA, 19 nt, Artificial Sequence
  Description of Artificial Sequence: Synthetic oligonucleotide
gcccuccgggaguccgggg

SEQ ID NO: 28514 - RNA, 19 nt, Artificial Sequence
  Description of Artificial Sequence: Synthetic oligonucleotide
ggcucaggcuuccggucuc

SEQ ID NO: 28515 - RNA, 19 nt, Artificial Sequence
  Description of Artificial Sequence: Synthetic oligonucleotide
ccccaccuguggaagaagu

SEQ ID NO: 28516 - RNA, 19 nt, Artificial Sequence
  Description of Artificial Sequence: Synthetic oligonucleotide
uccagcacgcugaccagca

SEQ ID NO: 28517 - RNA, 19 nt, Artificial Sequence
  Description of Artificial Sequence: Synthetic oligonucleotide
agccgccuagccaccggcg

SEQ ID NO: 28518 - RNA, 19 nt, Artificial Sequence
  Description of Artificial Sequence: Synthetic oligonucleotide
gaggaggagggcgguggca

SEQ ID NO: 28519 - RNA, 19 nt, Artificial Sequence
  Description of Artificial Sequence: Synthetic oligonucleotide
agcuccagcaagcgcuucc

SEQ ID NO: 28520 - RNA, 19 nt, Artificial Sequence
  Description of Artificial Sequence: Synthetic oligonucleotide
cugcgcucuugcuccgccu

SEQ ID NO: 28521 - RNA, 19 nt, Artificial Sequence
  Description of Artificial Sequence: Synthetic oligonucleotide
uccugcguuccccaugggg

SEQ ID NO: 28522 - RNA, 19 nt, Artificial Sequence
  Description of Artificial Sequence: Synthetic oligonucleotide
gccaaggacacggagugga

SEQ ID NO: 28523 - RNA, 19 nt, Artificial Sequence
  Description of Artificial Sequence: Synthetic oligonucleotide
aggucagucacgcugccuc

SEQ ID NO: 28524 - RNA, 19 nt, Artificial Sequence
  Description of Artificial Sequence: Synthetic oligonucleotide
cgggacuugcaguccacgg

SEQ ID NO: 28525 - RNA, 19 nt, Artificial Sequence
  Description of Artificial Sequence: Synthetic oligonucleotide
ggaagacaguuugacucgu

SEQ ID NO: 28526 - RNA, 19 nt, Artificial Sequence
  Description of Artificial Sequence: Synthetic oligonucleotide
uccacauuuggagggcaca

SEQ ID NO: 28527 - RNA, 19 nt, Artificial Sequence
  Description of Artificial Sequence: Synthetic oligonucleotide
aaaagugagaagccggcuc

SEQ ID NO: 28528 - RNA, 19 nt, Artificial Sequence
  Description of Artificial Sequence: Synthetic oligonucleotide
cugccucggaagagggcag

SEQ ID NO: 28529 - RNA, 19 nt, Artificial Sequence
  Description of Artificial Sequence: Synthetic oligonucleotide
ggggagaacaggucugacc

SEQ ID NO: 28530 - RNA, 19 nt, Artificial Sequence
  Description of Artificial Sequence: Synthetic oligonucleotide
caggugacccgaggcacag

SEQ ID NO: 28531 - RNA, 19 nt, Artificial Sequence
  Description of Artificial Sequence: Synthetic oligonucleotide
guaacgccuccccccaggc

SEQ ID NO: 28532 - RNA, 19 nt, Artificial Sequence
  Description of Artificial Sequence: Synthetic oligonucleotide
cuggugaaaaagaaugagg

SEQ ID NO: 28533 - RNA, 19 nt, Artificial Sequence
  Description of Artificial Sequence: Synthetic oligonucleotide
gaagcugcugaugaggucu

SEQ ID NO: 28534 - RNA, 19 nt, Artificial Sequence
  Description of Artificial Sequence: Synthetic oligonucleotide
uucaaagacaucauggagu

SEQ ID NO: 28535 - RNA, 19 nt, Artificial Sequence
  Description of Artificial Sequence: Synthetic oligonucleotide
uccagcccgggcuccagcc

SEQ ID NO: 28536 - RNA, 19 nt, Artificial Sequence
  Description of Artificial Sequence: Synthetic oligonucleotide
ccgcccaaccugacuccaa

SEQ ID NO: 28537 - RNA, 19 nt, Artificial Sequence
  Description of Artificial Sequence: Synthetic oligonucleotide
aaaccccuccggcggcagg

SEQ ID NO: 28538 - RNA, 19 nt, Artificial Sequence
  Description of Artificial Sequence: Synthetic oligonucleotide
gucaccguggccccugccu

SEQ ID NO: 28539 - RNA, 19 nt, Artificial Sequence
  Description of Artificial Sequence: Synthetic oligonucleotide
ucgggccucccccacaagg

SEQ ID NO: 28540 - RNA, 19 nt, Artificial Sequence
  Description of Artificial Sequence: Synthetic oligonucleotide
gaagaagcuggaaagggca

SEQ ID NO: 28541 - RNA, 19 nt, Artificial Sequence
  Description of Artificial Sequence: Synthetic oligonucleotide
agugccuuagggaccccug

SEQ ID NO: 28542 - RNA, 19 nt, Artificial Sequence
  Description of Artificial Sequence: Synthetic oligonucleotide
gcugcagcugagccaguga

SEQ ID NO: 28543 - RNA, 19 nt, Artificial Sequence
  Description of Artificial Sequence: Synthetic oligonucleotide
acccccaccagcaaagcag

SEQ ID NO: 28544 - RNA, 19 nt, Artificial Sequence
  Description of Artificial Sequence: Synthetic oligonucleotide
ggcucaggugcaccagggg

SEQ ID NO: 28545 - RNA, 19 nt, Artificial Sequence
  Description of Artificial Sequence: Synthetic oligonucleotide
ggcaccagcaagggccccg

SEQ ID NO: 28546 - RNA, 19 nt, Artificial Sequence
  Description of Artificial Sequence: Synthetic oligonucleotide
gccgaggaguccagaguga

SEQ ID NO: 28547 - RNA, 19 nt, Artificial Sequence
  Description of Artificial Sequence: Synthetic oligonucleotide
aggaggcacaagcacuccu

SEQ ID NO: 28548 - RNA, 19 nt, Artificial Sequence
  Description of Artificial Sequence: Synthetic oligonucleotide
ucugagucgccagggaggg

SEQ ID NO: 28549 - RNA, 19 nt, Artificial Sequence
  Description of Artificial Sequence: Synthetic oligonucleotide
gacaaggggaaauugucca

SEQ ID NO: 28550 - RNA, 19 nt, Artificial Sequence
  Description of Artificial Sequence: Synthetic oligonucleotide
aggcucaaaccugccccgc

SEQ ID NO: 28551 - RNA, 19 nt, Artificial Sequence
  Description of Artificial Sequence: Synthetic oligonucleotide
ccgcccccaccagcagccu

SEQ ID NO: 28552 - RNA, 19 nt, Artificial Sequence
  Description of Artificial Sequence: Synthetic oligonucleotide
ucugcagggaaggcuggag

SEQ ID NO: 28553 - RNA, 19 nt, Artificial Sequence
  Description of Artificial Sequence: Synthetic oligonucleotide
ggaaagcccucgcagagcc

SEQ ID NO: 28554 - RNA, 19 nt, Artificial Sequence
  Description of Artificial Sequence: Synthetic oligonucleotide
ccgagccaggaggcggccg

SEQ ID NO: 28555 - RNA, 19 nt, Artificial Sequence
  Description of Artificial Sequence: Synthetic oligonucleotide
ggggaggcaguccugggcg

SEQ ID NO: 28556 - RNA, 19 nt, Artificial Sequence
  Description of Artificial Sequence: Synthetic oligonucleotide
gcaaagacaaaagccacga

SEQ ID NO: 28557 - RNA, 19 nt, Artificial Sequence
  Description of Artificial Sequence: Synthetic oligonucleotide
agucugguugaugcuguga

SEQ ID NO: 28558 - RNA, 19 nt, Artificial Sequence
  Description of Artificial Sequence: Synthetic oligonucleotide
aacagugacgcugccaagc

SEQ ID NO: 28559 - RNA, 19 nt, Artificial Sequence
  Description of Artificial Sequence: Synthetic oligonucleotide
cccagccagccgggagagg

SEQ ID NO: 28560 - RNA, 19 nt, Artificial Sequence
  Description of Artificial Sequence: Synthetic oligonucleotide
ggccucaaaaagcccgugc

SEQ ID NO: 28561 - RNA, 19 nt, Artificial Sequence
  Description of Artificial Sequence: Synthetic oligonucleotide
cucccggccacuccaaagc

SEQ ID NO: 28562 - RNA, 19 nt, Artificial Sequence
  Description of Artificial Sequence: Synthetic oligonucleotide
ccacaguccgccaagccgu

SEQ ID NO: 28563 - RNA, 19 nt, Artificial Sequence
  Description of Artificial Sequence: Synthetic oligonucleotide
ucggggacccccaucagcc

SEQ ID NO: 28564 - RNA, 19 nt, Artificial Sequence
  Description of Artificial Sequence: Synthetic oligonucleotide
ccagcccccguucccucca

SEQ ID NO: 28565 - RNA, 19 nt, Artificial Sequence
  Description of Artificial Sequence: Synthetic oligonucleotide
acguugccaucagcauccu

SEQ ID NO: 28566 - RNA, 19 nt, Artificial Sequence
  Description of Artificial Sequence: Synthetic oligonucleotide
ucggcccuggcaggggacc

SEQ ID NO: 28567 - RNA, 19 nt, Artificial Sequence
  Description of Artificial Sequence: Synthetic oligonucleotide
cagccgucuuccaccgccu

SEQ ID NO: 28568 - RNA, 19 nt, Artificial Sequence
  Description of Artificial Sequence: Synthetic oligonucleotide
uucaucccucucauaucaa

SEQ ID NO: 28569 - RNA, 19 nt, Artificial Sequence
  Description of Artificial Sequence: Synthetic oligonucleotide
acccgagugucucuucgga

SEQ ID NO: 28570 - RNA, 19 nt, Artificial Sequence
  Description of Artificial Sequence: Synthetic oligonucleotide
aaaacccgccagccuccag

SEQ ID NO: 28571 - RNA, 19 nt, Artificial Sequence
  Description of Artificial Sequence: Synthetic oligonucleotide
gagcggaucgccagcggcg

SEQ ID NO: 28572 - RNA, 19 nt, Artificial Sequence
  Description of Artificial Sequence: Synthetic oligonucleotide
gccaucaccaagggcgugg

SEQ ID NO: 28573 - RNA, 19 nt, Artificial Sequence
  Description of Artificial Sequence: Synthetic oligonucleotide
guccuggacagcaccgagg

SEQ ID NO: 28574 - RNA, 19 nt, Artificial Sequence
  Description of Artificial Sequence: Synthetic oligonucleotide
gcgcugugccucgccaucu

SEQ ID NO: 28575 - RNA, 19 nt, Artificial Sequence
  Description of Artificial Sequence: Synthetic oligonucleotide
ucuaggaacuccgagcaga

SEQ ID NO: 28576 - RNA, 19 nt, Artificial Sequence
  Description of Artificial Sequence: Synthetic oligonucleotide
auggccagccacagcgcag

SEQ ID NO: 28577 - RNA, 19 nt, Artificial Sequence
  Description of Artificial Sequence: Synthetic oligonucleotide
gugcuggaggccggcaaaa

SEQ ID NO: 28578 - RNA, 19 nt, Artificial Sequence
  Description of Artificial Sequence: Synthetic oligonucleotide
aaccucuacacguucugcg

SEQ ID NO: 28579 - RNA, 19 nt, Artificial Sequence
  Description of Artificial Sequence: Synthetic oligonucleotide
gugagcuauguggauucca

SEQ ID NO: 28580 - RNA, 19 nt, Artificial Sequence
  Description of Artificial Sequence: Synthetic oligonucleotide
auccagcaaaugaggaaca

SEQ ID NO: 28581 - RNA, 19 nt, Artificial Sequence
  Description of Artificial Sequence: Synthetic oligonucleotide
aaguuugccuuccgagagg

SEQ ID NO: 28582 - RNA, 19 nt, Artificial Sequence
  Description of Artificial Sequence: Synthetic oligonucleotide
gccaucaacaaacuggaga

SEQ ID NO: 28583 - RNA, 19 nt, Artificial Sequence
  Description of Artificial Sequence: Synthetic oligonucleotide
aauaaucuccgggagcuuc

SEQ ID NO: 28584 - RNA, 19 nt, Artificial Sequence
  Description of Artificial Sequence: Synthetic oligonucleotide
cagaucugcccggcgacag

SEQ ID NO: 28585 - RNA, 19 nt, Artificial Sequence
  Description of Artificial Sequence: Synthetic oligonucleotide
gcaggcagugguccagcgg

SEQ ID NO: 28586 - RNA, 19 nt, Artificial Sequence
  Description of Artificial Sequence: Synthetic oligonucleotide
gccacucaggacuucagca

SEQ ID NO: 28587 - RNA, 19 nt, Artificial Sequence
  Description of Artificial Sequence: Synthetic oligonucleotide
aagcuccucaguucgguga

SEQ ID NO: 28588 - RNA, 19 nt, Artificial Sequence
  Description of Artificial Sequence: Synthetic oligonucleotide
aaggaaaucagugacauag

SEQ ID NO: 28589 - RNA, 19 nt, Artificial Sequence
  Description of Artificial Sequence: Synthetic oligonucleotide
gugcagagguagcagcagu

SEQ ID NO: 28590 - RNA, 19 nt, Artificial Sequence
  Description of Artificial Sequence: Synthetic oligonucleotide
ucaggggucaggugucagg

SEQ ID NO: 28591 - RNA, 19 nt, Artificial Sequence
  Description of Artificial Sequence: Synthetic oligonucleotide
gcccgucggagcugccugc

SEQ ID NO: 28592 - RNA, 19 nt, Artificial Sequence
  Description of Artificial Sequence: Synthetic oligonucleotide
cagcacaugcgggcucgcc

SEQ ID NO: 28593 - RNA, 19 nt, Artificial Sequence
  Description of Artificial Sequence: Synthetic oligonucleotide
ccauacccgugacaguggc

SEQ ID NO: 28594 - RNA, 19 nt, Artificial Sequence
  Description of Artificial Sequence: Synthetic oligonucleotide
cugacaagggacuagugag

SEQ ID NO: 28595 - RNA, 19 nt, Artificial Sequence
  Description of Artificial Sequence: Synthetic oligonucleotide
gucagcaccuuggcccagg

SEQ ID NO: 28596 - RNA, 19 nt, Artificial Sequence
  Description of Artificial Sequence: Synthetic oligonucleotide
gagcucugcgccaggcaga

SEQ ID NO: 28597 - RNA, 19 nt, Artificial Sequence
  Description of Artificial Sequence: Synthetic oligonucleotide
agcugagggcccuguggag

SEQ ID NO: 28598 - RNA, 19 nt, Artificial Sequence
  Description of Artificial Sequence: Synthetic oligonucleotide
guccagcucuacuaccuac

SEQ ID NO: 28599 - RNA, 19 nt, Artificial Sequence
  Description of Artificial Sequence: Synthetic oligonucleotide
cguuugcaccgccugcccu

SEQ ID NO: 28600 - RNA, 19 nt, Artificial Sequence
  Description of Artificial Sequence: Synthetic oligonucleotide
ucccgcaccuuccuccucc

SEQ ID NO: 28601 - RNA, 19 nt, Artificial Sequence
  Description of Artificial Sequence: Synthetic oligonucleotide
cccgcuccgucucuguccu

SEQ ID NO: 28602 - RNA, 19 nt, Artificial Sequence
  Description of Artificial Sequence: Synthetic oligonucleotide
ucgaauuuuaucuguggag

SEQ ID NO: 28603 - RNA, 19 nt, Artificial Sequence
  Description of Artificial Sequence: Synthetic oligonucleotide
guuccugcuccguggacug

SEQ ID NO: 28604 - RNA, 19 nt, Artificial Sequence
  Description of Artificial Sequence: Synthetic oligonucleotide
gcagucggcaugccaggac

SEQ ID NO: 28605 - RNA, 19 nt, Artificial Sequence
  Description of Artificial Sequence: Synthetic oligonucleotide
cccgccagccccgcuccca

SEQ ID NO: 28606 - RNA, 19 nt, Artificial Sequence
  Description of Artificial Sequence: Synthetic oligonucleotide
accuagugccccagacuga

SEQ ID NO: 28607 - RNA, 19 nt, Artificial Sequence
  Description of Artificial Sequence: Synthetic oligonucleotide
agcucuccaggccaggugg

SEQ ID NO: 28608 - RNA, 19 nt, Artificial Sequence
  Description of Artificial Sequence: Synthetic oligonucleotide
ggaacggcugauguggacu

SEQ ID NO: 28609 - RNA, 19 nt, Artificial Sequence
  Description of Artificial Sequence: Synthetic oligonucleotide
ugucuuuuucauuuuuuuc

SEQ ID NO: 28610 - RNA, 19 nt, Artificial Sequence
  Description of Artificial Sequence: Synthetic oligonucleotide
cucucuggagccccuccuc

SEQ ID NO: 28611 - RNA, 19 nt, Artificial Sequence
  Description of Artificial Sequence: Synthetic oligonucleotide
cccccggcugggccuccuu

SEQ ID NO: 28612 - RNA, 19 nt, Artificial Sequence
  Description of Artificial Sequence: Synthetic oligonucleotide
ucuuccacuucuccaagaa

SEQ ID NO: 28613 - RNA, 19 nt, Artificial Sequence
  Description of Artificial Sequence: Synthetic oligonucleotide
auggaagccugaacugagg

SEQ ID NO: 28614 - RNA, 19 nt, Artificial Sequence
  Description of Artificial Sequence: Synthetic oligonucleotide
gccuugugugucaggcccu

SEQ ID NO: 28615 - RNA, 19 nt, Artificial Sequence
  Description of Artificial Sequence: Synthetic oligonucleotide
ucugccugcacucccuggc

SEQ ID NO: 28616 - RNA, 19 nt, Artificial Sequence
  Description of Artificial Sequence: Synthetic oligonucleotide
ccuugcccgucgugugcug

SEQ ID NO: 28617 - RNA, 19 nt, Artificial Sequence
  Description of Artificial Sequence: Synthetic oligonucleotide
gaagacauguuucaagaac

SEQ ID NO: 28618 - RNA, 19 nt, Artificial Sequence
  Description of Artificial Sequence: Synthetic oligonucleotide
ccgcauuucgggaagggca

SEQ ID NO: 28619 - RNA, 19 nt, Artificial Sequence
  Description of Artificial Sequence: Synthetic oligonucleotide
augcacgggcaugcacacg

SEQ ID NO: 28620 - RNA, 19 nt, Artificial Sequence
  Description of Artificial Sequence: Synthetic oligonucleotide
ggcuggucacucugcccuc

SEQ ID NO: 28621 - RNA, 19 nt, Artificial Sequence
  Description of Artificial Sequence: Synthetic oligonucleotide
cugcugcugcccggggugg

SEQ ID NO: 28622 - RNA, 19 nt, Artificial Sequence
  Description of Artificial Sequence: Synthetic oligonucleotide
gggugcacucgccauuucc

SEQ ID NO: 28623 - RNA, 19 nt, Artificial Sequence
  Description of Artificial Sequence: Synthetic oligonucleotide
cucacgugcaggacagcuc

SEQ ID NO: 28624 - RNA, 19 nt, Artificial Sequence
  Description of Artificial Sequence: Synthetic oligonucleotide
cuugauuuggguggaaaac

SEQ ID NO: 28625 - RNA, 19 nt, Artificial Sequence
  Description of Artificial Sequence: Synthetic oligonucleotide
cagggugcuaaagccaacc

SEQ ID NO: 28626 - RNA, 19 nt, Artificial Sequence
  Description of Artificial Sequence: Synthetic oligonucleotide
cagccuuuggguccugggc

SEQ ID NO: 28627 - RNA, 19 nt, Artificial Sequence
  Description of Artificial Sequence: Synthetic oligonucleotide
caggugggagcugaaaagg

SEQ ID NO: 28628 - RNA, 19 nt, Artificial Sequence
  Description of Artificial Sequence: Synthetic oligonucleotide
gaucgaggcauggggcaug

SEQ ID NO: 28629 - RNA, 19 nt, Artificial Sequence
  Description of Artificial Sequence: Synthetic oligonucleotide
guccuuuccaucuguccac

SEQ ID NO: 28630 - RNA, 19 nt, Artificial Sequence
  Description of Artificial Sequence: Synthetic oligonucleotide
cauccccagagcccagcuc

SEQ ID NO: 28631 - RNA, 19 nt, Artificial Sequence
  Description of Artificial Sequence: Synthetic oligonucleotide
cuugcucucuugugacgug

SEQ ID NO: 28632 - RNA, 19 nt, Artificial Sequence
  Description of Artificial Sequence: Synthetic oligonucleotide
gcacugugaauccuggcaa

SEQ ID NO: 28633 - RNA, 19 nt, Artificial Sequence
  Description of Artificial Sequence: Synthetic oligonucleotide
agaaagcuugagucucaag

SEQ ID NO: 28634 - RNA, 19 nt, Artificial Sequence
  Description of Artificial Sequence: Synthetic oligonucleotide
ggguggcaggucacuguca

SEQ ID NO: 28635 - RNA, 19 nt, Artificial Sequence
  Description of Artificial Sequence: Synthetic oligonucleotide
acugccgacaucccucccc

SEQ ID NO: 28636 - RNA, 19 nt, Artificial Sequence
  Description of Artificial Sequence: Synthetic oligonucleotide
ccagcagaauggaggcagg

SEQ ID NO: 28637 - RNA, 19 nt, Artificial Sequence
  Description of Artificial Sequence: Synthetic oligonucleotide
gggacaagggaggcagugg

SEQ ID NO: 28638 - RNA, 19 nt, Artificial Sequence
  Description of Artificial Sequence: Synthetic oligonucleotide
gcuaguggggugaacagcu

SEQ ID NO: 28639 - RNA, 19 nt, Artificial Sequence
  Description of Artificial Sequence: Synthetic oligonucleotide
uggugccaaauagccccag

SEQ ID NO: 28640 - RNA, 19 nt, Artificial Sequence
  Description of Artificial Sequence: Synthetic oligonucleotide
gacugggcccaggcagguc

SEQ ID NO: 28641 - RNA, 19 nt, Artificial Sequence
  Description of Artificial Sequence: Synthetic oligonucleotide
cugcaagggcccagaguga

SEQ ID NO: 28642 - RNA, 19 nt, Artificial Sequence
  Description of Artificial Sequence: Synthetic oligonucleotide
aaccguccuuucacacauc

SEQ ID NO: 28643 - RNA, 19 nt, Artificial Sequence
  Description of Artificial Sequence: Synthetic oligonucleotide
cugggugcccugaaagggc

SEQ ID NO: 28644 - RNA, 19 nt, Artificial Sequence
  Description of Artificial Sequence: Synthetic oligonucleotide
cccuuccccucccccacuc

SEQ ID NO: 28645 - RNA, 19 nt, Artificial Sequence
  Description of Artificial Sequence: Synthetic oligonucleotide
ccucuaagacaaaguagau

SEQ ID NO: 28646 - RNA, 19 nt, Artificial Sequence
  Description of Artificial Sequence: Synthetic oligonucleotide
uucuuacaaggcccuuucc

SEQ ID NO: 28647 - RNA, 19 nt, Artificial Sequence
  Description of Artificial Sequence: Synthetic oligonucleotide
cuuuggaacaagacagccu

SEQ ID NO: 28648 - RNA, 19 nt, Artificial Sequence
  Description of Artificial Sequence: Synthetic oligonucleotide
uucacuuuucugaguucuu

SEQ ID NO: 28649 - RNA, 19 nt, Artificial Sequence
  Description of Artificial Sequence: Synthetic oligonucleotide
ugaagcauuucaaagcccu

SEQ ID NO: 28650 - RNA, 19 nt, Artificial Sequence
  Description of Artificial Sequence: Synthetic oligonucleotide
ugccucuguguagccgccc

SEQ ID NO: 28651 - RNA, 19 nt, Artificial Sequence
  Description of Artificial Sequence: Synthetic oligonucleotide
cugagagagaauagagcug

SEQ ID NO: 28652 - RNA, 19 nt, Artificial Sequence
  Description of Artificial Sequence: Synthetic oligonucleotide
gccacugggcaccugcgca

SEQ ID NO: 28653 - RNA, 19 nt, Artificial Sequence
  Description of Artificial Sequence: Synthetic oligonucleotide
acaggugggaggaaagggc

SEQ ID NO: 28654 - RNA, 19 nt, Artificial Sequence
  Description of Artificial Sequence: Synthetic oligonucleotide
ccuggccaguccugguccu

SEQ ID NO: 28655 - RNA, 19 nt, Artificial Sequence
  Description of Artificial Sequence: Synthetic oligonucleotide
uggcugcacucuugaacug

SEQ ID NO: 28656 - RNA, 19 nt, Artificial Sequence
  Description of Artificial Sequence: Synthetic oligonucleotide
gggcgaaugucuuauuuaa

SEQ ID NO: 28657 - RNA, 19 nt, Artificial Sequence
  Description of Artificial Sequence: Synthetic oligonucleotide
auuaccgugagugacauag

SEQ ID NO: 28658 - RNA, 19 nt, Artificial Sequence
  Description of Artificial Sequence: Synthetic oligonucleotide
gccucauguucuguggggg

SEQ ID NO: 28659 - RNA, 19 nt, Artificial Sequence
  Description of Artificial Sequence: Synthetic oligonucleotide
gucaucagggaggguuagg

SEQ ID NO: 28660 - RNA, 19 nt, Artificial Sequence
  Description of Artificial Sequence: Synthetic oligonucleotide
gaaaaccacaaacggagcc

SEQ ID NO: 28661 - RNA, 19 nt, Artificial Sequence
  Description of Artificial Sequence: Synthetic oligonucleotide
cccugaaagccucacguau

SEQ ID NO: 28662 - RNA, 19 nt, Artificial Sequence
  Description of Artificial Sequence: Synthetic oligonucleotide
uuucacagagcacgccugc

SEQ ID NO: 28663 - RNA, 19 nt, Artificial Sequence
  Description of Artificial Sequence: Synthetic oligonucleotide
ccaucuucuccccgaggcu

SEQ ID NO: 28664 - RNA, 19 nt, Artificial Sequence
  Description of Artificial Sequence: Synthetic oligonucleotide
ugccccaggccggagccca

SEQ ID NO: 28665 - RNA, 19 nt, Artificial Sequence
  Description of Artificial Sequence: Synthetic oligonucleotide
agauacgggggcugugacu

SEQ ID NO: 28666 - RNA, 19 nt, Artificial Sequence
  Description of Artificial Sequence: Synthetic oligonucleotide
ucugggcagggacccgggg

SEQ ID NO: 28667 - RNA, 19 nt, Artificial Sequence
  Description of Artificial Sequence: Synthetic oligonucleotide
gucuccuggaccuugacag

SEQ ID NO: 28668 - RNA, 19 nt, Artificial Sequence
  Description of Artificial Sequence: Synthetic oligonucleotide
gagcagcuaacuccgagag

SEQ ID NO: 28669 - RNA, 19 nt, Artificial Sequence
  Description of Artificial Sequence: Synthetic oligonucleotide
gcagugggcagguggccgc

SEQ ID NO: 28670 - RNA, 19 nt, Artificial Sequence
  Description of Artificial Sequence: Synthetic oligonucleotide
ccccugaggcuucacgccg

SEQ ID NO: 28671 - RNA, 19 nt, Artificial Sequence
  Description of Artificial Sequence: Synthetic oligonucleotide
gggagaagccaccuuccca

SEQ ID NO: 28672 - RNA, 19 nt, Artificial Sequence
  Description of Artificial Sequence: Synthetic oligonucleotide
accccuucauaccgccucg

SEQ ID NO: 28673 - RNA, 19 nt, Artificial Sequence
  Description of Artificial Sequence: Synthetic oligonucleotide
gugccagcagccucgcaca

SEQ ID NO: 28674 - RNA, 19 nt, Artificial Sequence
  Description of Artificial Sequence: Synthetic oligonucleotide
aggcccuagcuuuacgcuc

SEQ ID NO: 28675 - RNA, 19 nt, Artificial Sequence
  Description of Artificial Sequence: Synthetic oligonucleotide
caucaccuaaacuuguacu

SEQ ID NO: 28676 - RNA, 19 nt, Artificial Sequence
  Description of Artificial Sequence: Synthetic oligonucleotide
uuuauuuuucugauagaaa

SEQ ID NO: 28677 - RNA, 19 nt, Artificial Sequence
  Description of Artificial Sequence: Synthetic oligonucleotide
augguuuccucuggaucgu

SEQ ID NO: 28678 - RNA, 19 nt, Artificial Sequence
  Description of Artificial Sequence: Synthetic oligonucleotide
uuuuaugcgguucuuacag

SEQ ID NO: 28679 - RNA, 19 nt, Artificial Sequence
  Description of Artificial Sequence: Synthetic oligonucleotide
gcacaucaccucuuugccc

SEQ ID NO: 28680 - RNA, 19 nt, Artificial Sequence
  Description of Artificial Sequence: Synthetic oligonucleotide
cccgacggcugugacgcag

SEQ ID NO: 28681 - RNA, 19 nt, Artificial Sequence
  Description of Artificial Sequence: Synthetic oligonucleotide
gccggagggaggcacuagu

SEQ ID NO: 28682 - RNA, 19 nt, Artificial Sequence
  Description of Artificial Sequence: Synthetic oligonucleotide
ucaccgacagcggccuuga

SEQ ID NO: 28683 - RNA, 19 nt, Artificial Sequence
  Description of Artificial Sequence: Synthetic oligonucleotide
aagacagagcaaagcgccc

SEQ ID NO: 28684 - RNA, 19 nt, Artificial Sequence
  Description of Artificial Sequence: Synthetic oligonucleotide
cacccaggucccccgacug

SEQ ID NO: 28685 - RNA, 19 nt, Artificial Sequence
  Description of Artificial Sequence: Synthetic oligonucleotide
gccugucuccaugagguac

SEQ ID NO: 28686 - RNA, 19 nt, Artificial Sequence
  Description of Artificial Sequence: Synthetic oligonucleotide
cuggucccuuccuuuuguu

SEQ ID NO: 28687 - RNA, 19 nt, Artificial Sequence
  Description of Artificial Sequence: Synthetic oligonucleotide
uaacgugaugugccacuau

SEQ ID NO: 28688 - RNA, 19 nt, Artificial Sequence
  Description of Artificial Sequence: Synthetic oligonucleotide
uauuuuacacguaucucuu

SEQ ID NO: 28689 - RNA, 19 nt, Artificial Sequence
  Description of Artificial Sequence: Synthetic oligonucleotide
ugguaugcaucuuuuauag

SEQ ID NO: 28690 - RNA, 19 nt, Artificial Sequence
  Description of Artificial Sequence: Synthetic oligonucleotide
gacgcucuuuucuaagugg

SEQ ID NO: 28691 - RNA, 19 nt, Artificial Sequence
  Description of Artificial Sequence: Synthetic oligonucleotide
gcgugugcauagcguccug

SEQ ID NO: 28692 - RNA, 19 nt, Artificial Sequence
  Description of Artificial Sequence: Synthetic oligonucleotide
gcccugcccccucgggggc

SEQ ID NO: 28693 - RNA, 19 nt, Artificial Sequence
  Description of Artificial Sequence: Synthetic oligonucleotide
ccugugguggcucccccuc

SEQ ID NO: 28694 - RNA, 19 nt, Artificial Sequence
  Description of Artificial Sequence: Synthetic oligonucleotide
cugcuucucgggguccagu

SEQ ID NO: 28695 - RNA, 19 nt, Artificial Sequence
  Description of Artificial Sequence: Synthetic oligonucleotide
ugcauuuuguuucuguaua

SEQ ID NO: 28696 - RNA, 19 nt, Artificial Sequence
  Description of Artificial Sequence: Synthetic oligonucleotide
augauucucugugguuuuu

SEQ ID NO: 28697 - RNA, 19 nt, Artificial Sequence
  Description of Artificial Sequence: Synthetic oligonucleotide
uuuugaauccaaaucuguc

SEQ ID NO: 28698 - RNA, 19 nt, Artificial Sequence
  Description of Artificial Sequence: Synthetic oligonucleotide
ccucuguaguauuuuuuaa

SEQ ID NO: 28699 - RNA, 19 nt, Artificial Sequence
  Description of Artificial Sequence: Synthetic oligonucleotide
aauaaaucaguguuuacau

SEQ ID NO: 28700 - RNA, 19 nt, Artificial Sequence
  Description of Artificial Sequence: Synthetic oligonucleotide
auaaaucaguguuuacauu

SEQ ID NO: 28701 - RNA, 25 nt, Artificial Sequence
  Description of Artificial Sequence: Synthetic oligonucleotide
ugugucccccaacuacgacaagugg

SEQ ID NO: 28702 - RNA, 25 nt, Artificial Sequence
  Description of Artificial Sequence: Synthetic oligonucleotide
ggagauggaacgcacggacaucacc

SEQ ID NO: 28703 - RNA, 25 nt, Artificial Sequence
  Description of Artificial Sequence: Synthetic oligonucleotide
caugaagcacaagcugggcgggggc

SEQ ID NO: 28704 - RNA, 25 nt, Artificial Sequence
  Description of Artificial Sequence: Synthetic oligonucleotide
ccaguacggggagguguacgagggc

SEQ ID NO: 28705 - RNA, 25 nt, Artificial Sequence
  Description of Artificial Sequence: Synthetic oligonucleotide
cguguggaagaaauacagccugacg

SEQ ID NO: 28706 - RNA, 25 nt, Artificial Sequence
  Description of Artificial Sequence: Synthetic oligonucleotide
gguggccgugaagaccuugaaggag

SEQ ID NO: 28707 - RNA, 25 nt, Artificial Sequence
  Description of Artificial Sequence: Synthetic oligonucleotide
ggacaccauggagguggaagaguuc

SEQ ID NO: 28708 - RNA, 25 nt, Artificial Sequence
  Description of Artificial Sequence: Synthetic oligonucleotide
cuugaaagaagcugcagucaugaaa

SEQ ID NO: 28709 - RNA, 25 nt, Artificial Sequence
  Description of Artificial Sequence: Synthetic oligonucleotide
agagaucaaacacccuaaccuggug

SEQ ID NO: 28710 - RNA, 25 nt, Artificial Sequence
  Description of Artificial Sequence: Synthetic oligonucleotide
gcagcuccuuggggucugcacccgg

SEQ ID NO: 28711 - RNA, 25 nt, Artificial Sequence
  Description of Artificial Sequence: Synthetic oligonucleotide
ggagcccccguucuauaucaucacu

SEQ ID NO: 28712 - RNA, 25 nt, Artificial Sequence
  Description of Artificial Sequence: Synthetic oligonucleotide
ugaguucaugaccuacgggaaccuc

SEQ ID NO: 28713 - RNA, 25 nt, Artificial Sequence
  Description of Artificial Sequence: Synthetic oligonucleotide
ccuggacuaccugagggagugcaac

SEQ ID NO: 28714 - RNA, 25 nt, Artificial Sequence
  Description of Artificial Sequence: Synthetic oligonucleotide
ccggcaggaggugaacgccguggug

SEQ ID NO: 28715 - RNA, 25 nt, Artificial Sequence
  Description of Artificial Sequence: Synthetic oligonucleotide
gcugcuguacauggccacucagauc

SEQ ID NO: 28716 - RNA, 25 nt, Artificial Sequence
  Description of Artificial Sequence: Synthetic oligonucleotide
cucgucagccauggaguaccuggag

SEQ ID NO: 28717 - RNA, 25 nt, Artificial Sequence
  Description of Artificial Sequence: Synthetic oligonucleotide
gaagaaaaacuucauccacagagau

SEQ ID NO: 28718 - RNA, 25 nt, Artificial Sequence
  Description of Artificial Sequence: Synthetic oligonucleotide
ucuugcugcccgaaacugccuggua

SEQ ID NO: 28719 - RNA, 25 nt, Artificial Sequence
  Description of Artificial Sequence: Synthetic oligonucleotide
aggggagaaccacuuggugaaggua

SEQ ID NO: 28720 - RNA, 25 nt, Artificial Sequence
  Description of Artificial Sequence: Synthetic oligonucleotide
agcugauuuuggccugagcagguug

SEQ ID NO: 28721 - RNA, 25 nt, Artificial Sequence
  Description of Artificial Sequence: Synthetic oligonucleotide
gaugacaggggacaccuacacagcc

SEQ ID NO: 28722 - RNA, 25 nt, Artificial Sequence
  Description of Artificial Sequence: Synthetic oligonucleotide
ccaugcuggagccaaguuccccauc

SEQ ID NO: 28723 - RNA, 25 nt, Artificial Sequence
  Description of Artificial Sequence: Synthetic oligonucleotide
caaauggacugcacccgagagccug

SEQ ID NO: 28724 - RNA, 25 nt, Artificial Sequence
  Description of Artificial Sequence: Synthetic oligonucleotide
ggccuacaacaaguucuccaucaag

SEQ ID NO: 28725 - RNA, 25 nt, Artificial Sequence
  Description of Artificial Sequence: Synthetic oligonucleotide
guccgacgucugggcauuuggagua

SEQ ID NO: 28726 - RNA, 25 nt, Artificial Sequence
  Description of Artificial Sequence: Synthetic oligonucleotide
auugcuuugggaaauugcuaccuau

SEQ ID NO: 28727 - RNA, 25 nt, Artificial Sequence
  Description of Artificial Sequence: Synthetic oligonucleotide
uggcauguccccuuacccgggaauu

SEQ ID NO: 28728 - RNA, 25 nt, Artificial Sequence
  Description of Artificial Sequence: Synthetic oligonucleotide
ugaccugucccagguguaugagcug

SEQ ID NO: 28729 - RNA, 25 nt, Artificial Sequence
  Description of Artificial Sequence: Synthetic oligonucleotide
gcuagagaaggacuaccgcauggag

SEQ ID NO: 28730 - RNA, 25 nt, Artificial Sequence
  Description of Artificial Sequence: Synthetic oligonucleotide
gcgcccagaaggcugcccagagaag

SEQ ID NO: 28731 - RNA, 25 nt, Artificial Sequence
  Description of Artificial Sequence: Synthetic oligonucleotide
ggucuaugaacucaugcgagcaugu

SEQ ID NO: 28732 - RNA, 25 nt, Artificial Sequence
  Description of Artificial Sequence: Synthetic oligonucleotide
uuggcaguggaaucccucugaccgg

SEQ ID NO: 28733 - RNA, 25 nt, Artificial Sequence
  Description of Artificial Sequence: Synthetic oligonucleotide
gcccuccuuugcugaaauccaccaa

SEQ ID NO: 28734 - RNA, 25 nt, Artificial Sequence
  Description of Artificial Sequence: Synthetic oligonucleotide
agccuuugaaacaauguuccaggaa

SEQ ID NO: 28735 - RNA, 25 nt, Artificial Sequence
  Description of Artificial Sequence: Synthetic oligonucleotide
auccaguaucucagacgaaguggaa

SEQ ID NO: 28736 - RNA, 25 nt, Artificial Sequence
  Description of Artificial Sequence: Synthetic oligonucleotide
aaaggagcuggggaaacaaggcguc

SEQ ID NO: 28737 - RNA, 25 nt, Artificial Sequence
  Description of Artificial Sequence: Synthetic oligonucleotide
ccguggggcugugaguaccuugcug

SEQ ID NO: 28738 - RNA, 25 nt, Artificial Sequence
  Description of Artificial Sequence: Synthetic oligonucleotide
gcaggccccagagcugcccaccaag

SEQ ID NO: 28739 - RNA, 25 nt, Artificial Sequence
  Description of Artificial Sequence: Synthetic oligonucleotide
gacgaggaccuccaggagagcugca

SEQ ID NO: 28740 - RNA, 25 nt, Artificial Sequence
  Description of Artificial Sequence: Synthetic oligonucleotide
agagcacagagacaccacugacgug

SEQ ID NO: 28741 - RNA, 25 nt, Artificial Sequence
  Description of Artificial Sequence: Synthetic oligonucleotide
gccugagaugccucacuccaagggc

SEQ ID NO: 28742 - RNA, 25 nt, Artificial Sequence
  Description of Artificial Sequence: Synthetic oligonucleotide
ccagggagagagcgauccucuggac

SEQ ID NO: 28743 - RNA, 25 nt, Artificial Sequence
  Description of Artificial Sequence: Synthetic oligonucleotide
ccaugagccugccgugucuccauug

SEQ ID NO: 28744 - RNA, 25 nt, Artificial Sequence
  Description of Artificial Sequence: Synthetic oligonucleotide
gcucccucgaaaagagcgagguccc

SEQ ID NO: 28745 - RNA, 25 nt, Artificial Sequence
  Description of Artificial Sequence: Synthetic oligonucleotide
cccggagggcggccugaaugaagau

SEQ ID NO: 28746 - RNA, 25 nt, Artificial Sequence
  Description of Artificial Sequence: Synthetic oligonucleotide
ugagcgccuucuccccaaagacaaa

SEQ ID NO: 28747 - RNA, 25 nt, Artificial Sequence
  Description of Artificial Sequence: Synthetic oligonucleotide
aaagaccaacuuguucagcgccuug

SEQ ID NO: 28748 - RNA, 25 nt, Artificial Sequence
  Description of Artificial Sequence: Synthetic oligonucleotide
gaucaagaagaagaagaagacagcc

SEQ ID NO: 28749 - RNA, 25 nt, Artificial Sequence
  Description of Artificial Sequence: Synthetic oligonucleotide
cccaaccccucccaaacgcagcagc

SEQ ID NO: 28750 - RNA, 25 nt, Artificial Sequence
  Description of Artificial Sequence: Synthetic oligonucleotide
cuccuuccgggagauggacggccag

SEQ ID NO: 28751 - RNA, 25 nt, Artificial Sequence
  Description of Artificial Sequence: Synthetic oligonucleotide
gccggagcgcagaggggccggcgag

SEQ ID NO: 28752 - RNA, 25 nt, Artificial Sequence
  Description of Artificial Sequence: Synthetic oligonucleotide
ggaagagggccgagacaucagcaac

SEQ ID NO: 28753 - RNA, 25 nt, Artificial Sequence
  Description of Artificial Sequence: Synthetic oligonucleotide
cggggcacuggcuuucacccccuug

SEQ ID NO: 28754 - RNA, 25 nt, Artificial Sequence
  Description of Artificial Sequence: Synthetic oligonucleotide
ggacacagcugacccagccaagucc

SEQ ID NO: 28755 - RNA, 25 nt, Artificial Sequence
  Description of Artificial Sequence: Synthetic oligonucleotide
cccaaagcccagcaauggggcuggg

SEQ ID NO: 28756 - RNA, 25 nt, Artificial Sequence
  Description of Artificial Sequence: Synthetic oligonucleotide
gguccccaauggagcccuccgggag

SEQ ID NO: 28757 - RNA, 25 nt, Artificial Sequence
  Description of Artificial Sequence: Synthetic oligonucleotide
guccgggggcucaggcuuccggucu

SEQ ID NO: 28758 - RNA, 25 nt, Artificial Sequence
  Description of Artificial Sequence: Synthetic oligonucleotide
uccccaccuguggaagaaguccagc

SEQ ID NO: 28759 - RNA, 25 nt, Artificial Sequence
  Description of Artificial Sequence: Synthetic oligonucleotide
cacgcugaccagcagccgccuagcc

SEQ ID NO: 28760 - RNA, 25 nt, Artificial Sequence
  Description of Artificial Sequence: Synthetic oligonucleotide
caccggcgaggaggagggcgguggc

SEQ ID NO: 28761 - RNA, 25 nt, Artificial Sequence
  Description of Artificial Sequence: Synthetic oligonucleotide
cagcuccagcaagcgcuuccugcgc

SEQ ID NO: 28762 - RNA, 25 nt, Artificial Sequence
  Description of Artificial Sequence: Synthetic oligonucleotide
cucuugcuccgccuccugcguuccc

SEQ ID NO: 28763 - RNA, 25 nt, Artificial Sequence
  Description of Artificial Sequence: Synthetic oligonucleotide
ccauggggccaaggacacggagugg

SEQ ID NO: 28764 - RNA, 25 nt, Artificial Sequence
  Description of Artificial Sequence: Synthetic oligonucleotide
gaggucagucacgcugccucgggac

SEQ ID NO: 28765 - RNA, 25 nt, Artificial Sequence
  Description of Artificial Sequence: Synthetic oligonucleotide
cuugcaguccacgggaagacaguuu

SEQ ID NO: 28766 - RNA, 25 nt, Artificial Sequence
  Description of Artificial Sequence: Synthetic oligonucleotide
ugacucguccacauuuggagggcac

SEQ ID NO: 28767 - RNA, 25 nt, Artificial Sequence
  Description of Artificial Sequence: Synthetic oligonucleotide
caaaagugagaagccggcucugccu

SEQ ID NO: 28768 - RNA, 25 nt, Artificial Sequence
  Description of Artificial Sequence: Synthetic oligonucleotide
ucggaagagggcaggggagaacagg

SEQ ID NO: 28769 - RNA, 25 nt, Artificial Sequence
  Description of Artificial Sequence: Synthetic oligonucleotide
gucugaccaggugacccgaggcaca

SEQ ID NO: 28770 - RNA, 25 nt, Artificial Sequence
  Description of Artificial Sequence: Synthetic oligonucleotide
aguaacgccuccccccaggcuggug

SEQ ID NO: 28771 - RNA, 25 nt, Artificial Sequence
  Description of Artificial Sequence: Synthetic oligonucleotide
gaaaaagaaugaggaagcugcugau

SEQ ID NO: 28772 - RNA, 25 nt, Artificial Sequence
  Description of Artificial Sequence: Synthetic oligonucleotide
ugaggucuucaaagacaucauggag

SEQ ID NO: 28773 - RNA, 25 nt, Artificial Sequence
  Description of Artificial Sequence: Synthetic oligonucleotide
guccagcccgggcuccagcccgccc

SEQ ID NO: 28774 - RNA, 25 nt, Artificial Sequence
  Description of Artificial Sequence: Synthetic oligonucleotide
caaccugacuccaaaaccccuccgg

SEQ ID NO: 28775 - RNA, 25 nt, Artificial Sequence
  Description of Artificial Sequence: Synthetic oligonucleotide
gcggcaggucaccguggccccugcc

SEQ ID NO: 28776 - RNA, 25 nt, Artificial Sequence
  Description of Artificial Sequence: Synthetic oligonucleotide
cucgggccucccccacaaggaagaa

SEQ ID NO: 28777 - RNA, 25 nt, Artificial Sequence
  Description of Artificial Sequence: Synthetic oligonucleotide
agcuggaaagggcagugccuuaggg

SEQ ID NO: 28778 - RNA, 25 nt, Artificial Sequence
  Description of Artificial Sequence: Synthetic oligonucleotide
gaccccugcugcagcugagccagug

SEQ ID NO: 28779 - RNA, 25 nt, Artificial Sequence
  Description of Artificial Sequence: Synthetic oligonucleotide
gacccccaccagcaaagcaggcuca

SEQ ID NO: 28780 - RNA, 25 nt, Artificial Sequence
  Description of Artificial Sequence: Synthetic oligonucleotide
aggugcaccagggggcaccagcaag

SEQ ID NO: 28781 - RNA, 25 nt, Artificial Sequence
  Description of Artificial Sequence: Synthetic oligonucleotide
gggccccgccgaggaguccagagug

SEQ ID NO: 28782 - RNA, 25 nt, Artificial Sequence
  Description of Artificial Sequence: Synthetic oligonucleotide
gaggaggcacaagcacuccucugag

SEQ ID NO: 28783 - RNA, 25 nt, Artificial Sequence
  Description of Artificial Sequence: Synthetic oligonucleotide
gucgccagggagggacaaggggaaa

SEQ ID NO: 28784 - RNA, 25 nt, Artificial Sequence
  Description of Artificial Sequence: Synthetic oligonucleotide
auuguccaggcucaaaccugccccg

SEQ ID NO: 28785 - RNA, 25 nt, Artificial Sequence
  Description of Artificial Sequence: Synthetic oligonucleotide
gccgcccccaccagcagccucugca

SEQ ID NO: 28786 - RNA, 25 nt, Artificial Sequence
  Description of Artificial Sequence: Synthetic oligonucleotide
agggaaggcuggaggaaagcccucg

SEQ ID NO: 28787 - RNA, 25 nt, Artificial Sequence
  Description of Artificial Sequence: Synthetic oligonucleotide
gcagagcccgagccaggaggcggcc

SEQ ID NO: 28788 - RNA, 25 nt, Artificial Sequence
  Description of Artificial Sequence: Synthetic oligonucleotide
cggggaggcaguccugggcgcaaag

SEQ ID NO: 28789 - RNA, 25 nt, Artificial Sequence
  Description of Artificial Sequence: Synthetic oligonucleotide
gacaaaagccacgagucugguugau

SEQ ID NO: 28790 - RNA, 25 nt, Artificial Sequence
  Description of Artificial Sequence: Synthetic oligonucleotide
ugcugugaacagugacgcugccaag

SEQ ID NO: 28791 - RNA, 25 nt, Artificial Sequence
  Description of Artificial Sequence: Synthetic oligonucleotide
gcccagccagccgggagagggccuc

SEQ ID NO: 28792 - RNA, 25 nt, Artificial Sequence
  Description of Artificial Sequence: Synthetic oligonucleotide
caaaaagcccgugcucccggccacu

SEQ ID NO: 28793 - RNA, 25 nt, Artificial Sequence
  Description of Artificial Sequence: Synthetic oligonucleotide
uccaaagccacaguccgccaagccg

SEQ ID NO: 28794 - RNA, 25 nt, Artificial Sequence
  Description of Artificial Sequence: Synthetic oligonucleotide
gucggggacccccaucagcccagcc

SEQ ID NO: 28795 - RNA, 25 nt, Artificial Sequence
  Description of Artificial Sequence: Synthetic oligonucleotide
ccccguucccuccacguugccauca

SEQ ID NO: 28796 - RNA, 25 nt, Artificial Sequence
  Description of Artificial Sequence: Synthetic oligonucleotide
agcauccucggcccuggcaggggac

SEQ ID NO: 28797 - RNA, 25 nt, Artificial Sequence
  Description of Artificial Sequence: Synthetic oligonucleotide
ccagccgucuuccaccgccuucauc

SEQ ID NO: 28798 - RNA, 25 nt, Artificial Sequence
  Description of Artificial Sequence: Synthetic oligonucleotide
cccucucauaucaacccgagugucu

SEQ ID NO: 28799 - RNA, 25 nt, Artificial Sequence
  Description of Artificial Sequence: Synthetic oligonucleotide
ucuucggaaaacccgccagccucca

SEQ ID NO: 28800 - RNA, 25 nt, Artificial Sequence
  Description of Artificial Sequence: Synthetic oligonucleotide
agagcggaucgccagcggcgccauc

SEQ ID NO: 28801 - RNA, 25 nt, Artificial Sequence
  Description of Artificial Sequence: Synthetic oligonucleotide
caccaagggcgugguccuggacagc

SEQ ID NO: 28802 - RNA, 25 nt, Artificial Sequence
  Description of Artificial Sequence: Synthetic oligonucleotide
caccgaggcgcugugccucgccauc

SEQ ID NO: 28803 - RNA, 25 nt, Artificial Sequence
  Description of Artificial Sequence: Synthetic oligonucleotide
cucuaggaacuccgagcagauggcc

SEQ ID NO: 28804 - RNA, 25 nt, Artificial Sequence
  Description of Artificial Sequence: Synthetic oligonucleotide
cagccacagcgcagugcuggaggcc

SEQ ID NO: 28805 - RNA, 25 nt, Artificial Sequence
  Description of Artificial Sequence: Synthetic oligonucleotide
cggcaaaaaccucuacacguucugc

SEQ ID NO: 28806 - RNA, 25 nt, Artificial Sequence
  Description of Artificial Sequence: Synthetic oligonucleotide
cgugagcuauguggauuccauccag

SEQ ID NO: 28807 - RNA, 25 nt, Artificial Sequence
  Description of Artificial Sequence: Synthetic oligonucleotide
gcaaaugaggaacaaguuugccuuc

SEQ ID NO: 28808 - RNA, 25 nt, Artificial Sequence
  Description of Artificial Sequence: Synthetic oligonucleotide
ccgagaggccaucaacaaacuggag

SEQ ID NO: 28809 - RNA, 25 nt, Artificial Sequence
  Description of Artificial Sequence: Synthetic oligonucleotide
gaauaaucuccgggagcuucagauc

SEQ ID NO: 28810 - RNA, 25 nt, Artificial Sequence
  Description of Artificial Sequence: Synthetic oligonucleotide
cugcccggcgacagcaggcaguggu

SEQ ID NO: 28811 - RNA, 25 nt, Artificial Sequence
  Description of Artificial Sequence: Synthetic oligonucleotide
uccagcggccacucaggacuucagc

SEQ ID NO: 28812 - RNA, 25 nt, Artificial Sequence
  Description of Artificial Sequence: Synthetic oligonucleotide
caagcuccucaguucggugaaggaa

SEQ ID NO: 28813 - RNA, 25 nt, Artificial Sequence
  Description of Artificial Sequence: Synthetic oligonucleotide
aaucagugacauagugcagagguag

SEQ ID NO: 28814 - RNA, 25 nt, Artificial Sequence
  Description of Artificial Sequence: Synthetic oligonucleotide
gcagcagucaggggucaggugucag

SEQ ID NO: 28815 - RNA, 25 nt, Artificial Sequence
  Description of Artificial Sequence: Synthetic oligonucleotide
ggcccgucggagcugccugcagcac

SEQ ID NO: 28816 - RNA, 25 nt, Artificial Sequence
  Description of Artificial Sequence: Synthetic oligonucleotide
caugcgggcucgcccauacccguga

SEQ ID NO: 28817 - RNA, 25 nt, Artificial Sequence
  Description of Artificial Sequence: Synthetic oligonucleotide
acaguggcugacaagggacuaguga

SEQ ID NO: 28818 - RNA, 25 nt, Artificial Sequence
  Description of Artificial Sequence: Synthetic oligonucleotide
agucagcaccuuggcccaggagcuc

SEQ ID NO: 28819 - RNA, 25 nt, Artificial Sequence
  Description of Artificial Sequence: Synthetic oligonucleotide
cugcgccaggcagagcugagggccc

SEQ ID NO: 28820 - RNA, 25 nt, Artificial Sequence
  Description of Artificial Sequence: Synthetic oligonucleotide
cuguggaguccagcucuacuaccua

SEQ ID NO: 28821 - RNA, 25 nt, Artificial Sequence
  Description of Artificial Sequence: Synthetic oligonucleotide
acguuugcaccgccugcccucccgc

SEQ ID NO: 28822 - RNA, 25 nt, Artificial Sequence
  Description of Artificial Sequence: Synthetic oligonucleotide
caccuuccuccuccccgcuccgucu

SEQ ID NO: 28823 - RNA, 25 nt, Artificial Sequence
  Description of Artificial Sequence: Synthetic oligonucleotide
ucuguccucgaauuuuaucugugga

SEQ ID NO: 28824 - RNA, 25 nt, Artificial Sequence
  Description of Artificial Sequence: Synthetic oligonucleotide
aguuccugcuccguggacugcaguc

SEQ ID NO: 28825 - RNA, 25 nt, Artificial Sequence
  Description of Artificial Sequence: Synthetic oligonucleotide
cggcaugccaggacccgccagcccc

SEQ ID NO: 28826 - RNA, 25 nt, Artificial Sequence
  Description of Artificial Sequence: Synthetic oligonucleotide
cgcucccaccuagugccccagacug

SEQ ID NO: 28827 - RNA, 25 nt, Artificial Sequence
  Description of Artificial Sequence: Synthetic oligonucleotide
gagcucuccaggccaggugggaacg

SEQ ID NO: 28828 - RNA, 25 nt, Artificial Sequence
  Description of Artificial Sequence: Synthetic oligonucleotide
ggcugauguggacugucuuuuucau

SEQ ID NO: 28829 - RNA, 25 nt, Artificial Sequence
  Description of Artificial Sequence: Synthetic oligonucleotide
uuuuuuucucucuggagccccuccu

SEQ ID NO: 28830 - RNA, 25 nt, Artificial Sequence
  Description of Artificial Sequence: Synthetic oligonucleotide
ucccccggcugggccuccuucuucc

SEQ ID NO: 28831 - RNA, 25 nt, Artificial Sequence
  Description of Artificial Sequence: Synthetic oligonucleotide
cacuucuccaagaauggaagccuga

SEQ ID NO: 28832 - RNA, 25 nt, Artificial Sequence
  Description of Artificial Sequence: Synthetic oligonucleotide
aacugaggccuugugugucaggccc

SEQ ID NO: 28833 - RNA, 25 nt, Artificial Sequence
  Description of Artificial Sequence: Synthetic oligonucleotide
cucugccugcacucccuggccuugc

SEQ ID NO: 28834 - RNA, 25 nt, Artificial Sequence
  Description of Artificial Sequence: Synthetic oligonucleotide
cccgucgugugcugaagacauguuu

SEQ ID NO: 28835 - RNA, 25 nt, Artificial Sequence
  Description of Artificial Sequence: Synthetic oligonucleotide
ucaagaaccgcauuucgggaagggc

SEQ ID NO: 28836 - RNA, 25 nt, Artificial Sequence
  Description of Artificial Sequence: Synthetic oligonucleotide
caugcacgggcaugcacacggcugg

SEQ ID NO: 28837 - RNA, 25 nt, Artificial Sequence
  Description of Artificial Sequence: Synthetic oligonucleotide
gucacucugcccucugcugcugccc

SEQ ID NO: 28838 - RNA, 25 nt, Artificial Sequence
  Description of Artificial Sequence: Synthetic oligonucleotide
cgggguggggugcacucgccauuuc

SEQ ID NO: 28839 - RNA, 25 nt, Artificial Sequence
  Description of Artificial Sequence: Synthetic oligonucleotide
ccucacgugcaggacagcucuugau

SEQ ID NO: 28840 - RNA, 25 nt, Artificial Sequence
  Description of Artificial Sequence: Synthetic oligonucleotide
uuuggguggaaaacagggugcuaaa

SEQ ID NO: 28841 - RNA, 25 nt, Artificial Sequence
  Description of Artificial Sequence: Synthetic oligonucleotide
agccaaccagccuuuggguccuggg

SEQ ID NO: 28842 - RNA, 25 nt, Artificial Sequence
  Description of Artificial Sequence: Synthetic oligonucleotide
gcaggugggagcugaaaaggaucga

SEQ ID NO: 28843 - RNA, 25 nt, Artificial Sequence
  Description of Artificial Sequence: Synthetic oligonucleotide
aggcauggggcauguccuuuccauc

SEQ ID NO: 28844 - RNA, 25 nt, Artificial Sequence
  Description of Artificial Sequence: Synthetic oligonucleotide
cuguccacauccccagagcccagcu

SEQ ID NO: 28845 - RNA, 25 nt, Artificial Sequence
  Description of Artificial Sequence: Synthetic oligonucleotide
ucuugcucucuugugacgugcacug

SEQ ID NO: 28846 - RNA, 25 nt, Artificial Sequence
  Description of Artificial Sequence: Synthetic oligonucleotide
gugaauccuggcaagaaagcuugag

SEQ ID NO: 28847 - RNA, 25 nt, Artificial Sequence
  Description of Artificial Sequence: Synthetic oligonucleotide
gucucaaggguggcaggucacuguc

SEQ ID NO: 28848 - RNA, 25 nt, Artificial Sequence
  Description of Artificial Sequence: Synthetic oligonucleotide
cacugccgacaucccucccccagca

SEQ ID NO: 28849 - RNA, 25 nt, Artificial Sequence
  Description of Artificial Sequence: Synthetic oligonucleotide
agaauggaggcaggggacaagggag

SEQ ID NO: 28850 - RNA, 25 nt, Artificial Sequence
  Description of Artificial Sequence: Synthetic oligonucleotide
ggcaguggcuaguggggugaacagc

SEQ ID NO: 28851 - RNA, 25 nt, Artificial Sequence
  Description of Artificial Sequence: Synthetic oligonucleotide
cuggugccaaauagccccagacugg

SEQ ID NO: 28852 - RNA, 25 nt, Artificial Sequence
  Description of Artificial Sequence: Synthetic oligonucleotide
ggcccaggcaggucugcaagggccc

SEQ ID NO: 28853 - RNA, 25 nt, Artificial Sequence
  Description of Artificial Sequence: Synthetic oligonucleotide
cagagugaaccguccuuucacacau

SEQ ID NO: 28854 - RNA, 25 nt, Artificial Sequence
  Description of Artificial Sequence: Synthetic oligonucleotide
ucugggugcccugaaagggcccuuc

SEQ ID NO: 28855 - RNA, 25 nt, Artificial Sequence
  Description of Artificial Sequence: Synthetic oligonucleotide
ccccucccccacuccucuaagacaa

SEQ ID NO: 28856 - RNA, 25 nt, Artificial Sequence
  Description of Artificial Sequence: Synthetic oligonucleotide
aaguagauucuuacaaggcccuuuc

SEQ ID NO: 28857 - RNA, 25 nt, Artificial Sequence
  Description of Artificial Sequence: Synthetic oligonucleotide
ccuuuggaacaagacagccuucacu

SEQ ID NO: 28858 - RNA, 25 nt, Artificial Sequence
  Description of Artificial Sequence: Synthetic oligonucleotide
uuuucugaguucuugaagcauuuca

SEQ ID NO: 28859 - RNA, 25 nt, Artificial Sequence
  Description of Artificial Sequence: Synthetic oligonucleotide
aaagcccugccucuguguagccgcc

SEQ ID NO: 28860 - RNA, 25 nt, Artificial Sequence
  Description of Artificial Sequence: Synthetic oligonucleotide
ccugagagagaauagagcugccacu

SEQ ID NO: 28861 - RNA, 25 nt, Artificial Sequence
  Description of Artificial Sequence: Synthetic oligonucleotide
ugggcaccugcgcacaggugggagg

SEQ ID NO: 28862 - RNA, 25 nt, Artificial Sequence
  Description of Artificial Sequence: Synthetic oligonucleotide
gaaagggccuggccaguccuggucc

SEQ ID NO: 28863 - RNA, 25 nt, Artificial Sequence
  Description of Artificial Sequence: Synthetic oligonucleotide
cuggcugcacucuugaacugggcga

SEQ ID NO: 28864 - RNA, 25 nt, Artificial Sequence
  Description of Artificial Sequence: Synthetic oligonucleotide
aaugucuuauuuaauuaccgugagu

SEQ ID NO: 28865 - RNA, 25 nt, Artificial Sequence
  Description of Artificial Sequence: Synthetic oligonucleotide
ugacauagccucauguucugugggg

SEQ ID NO: 28866 - RNA, 25 nt, Artificial Sequence
  Description of Artificial Sequence: Synthetic oligonucleotide
ggucaucagggaggguuaggaaaac

SEQ ID NO: 28867 - RNA, 25 nt, Artificial Sequence
  Description of Artificial Sequence: Synthetic oligonucleotide
ccacaaacggagccccugaaagccu

SEQ ID NO: 28868 - RNA, 25 nt, Artificial Sequence
  Description of Artificial Sequence: Synthetic oligonucleotide
ucacguauuucacagagcacgccug

SEQ ID NO: 28869 - RNA, 25 nt, Artificial Sequence
  Description of Artificial Sequence: Synthetic oligonucleotide
gccaucuucuccccgaggcugcccc

SEQ ID NO: 28870 - RNA, 25 nt, Artificial Sequence
  Description of Artificial Sequence: Synthetic oligonucleotide
caggccggagcccagauacgggggc

SEQ ID NO: 28871 - RNA, 25 nt, Artificial Sequence
  Description of Artificial Sequence: Synthetic oligonucleotide
cugugacucugggcagggacccggg

SEQ ID NO: 28872 - RNA, 25 nt, Artificial Sequence
  Description of Artificial Sequence: Synthetic oligonucleotide
ggucuccuggaccuugacagagcag

SEQ ID NO: 28873 - RNA, 25 nt, Artificial Sequence
  Description of Artificial Sequence: Synthetic oligonucleotide
gcuaacuccgagagcagugggcagg

SEQ ID NO: 28874 - RNA, 25 nt, Artificial Sequence
  Description of Artificial Sequence: Synthetic oligonucleotide
guggccgccccugaggcuucacgcc

SEQ ID NO: 28875 - RNA, 25 nt, Artificial Sequence
  Description of Artificial Sequence: Synthetic oligonucleotide
cgggagaagccaccuucccaccccu

SEQ ID NO: 28876 - RNA, 25 nt, Artificial Sequence
  Description of Artificial Sequence: Synthetic oligonucleotide
uucauaccgccucgugccagcagcc

SEQ ID NO: 28877 - RNA, 25 nt, Artificial Sequence
  Description of Artificial Sequence: Synthetic oligonucleotide
cucgcacaggcccuagcuuuacgcu

SEQ ID NO: 28878 - RNA, 25 nt, Artificial Sequence
  Description of Artificial Sequence: Synthetic oligonucleotide
ucaucaccuaaacuuguacuuuauu

SEQ ID NO: 28879 - RNA, 25 nt, Artificial Sequence
  Description of Artificial Sequence: Synthetic oligonucleotide
uuuucugauagaaaugguuuccucu

SEQ ID NO: 28880 - RNA, 25 nt, Artificial Sequence
  Description of Artificial Sequence: Synthetic oligonucleotide
uggaucguuuuaugcgguucuuaca

SEQ ID NO: 28881 - RNA, 25 nt, Artificial Sequence
  Description of Artificial Sequence: Synthetic oligonucleotide
agcacaucaccucuuugcccccgac

SEQ ID NO: 28882 - RNA, 25 nt, Artificial Sequence
  Description of Artificial Sequence: Synthetic oligonucleotide
cggcugugacgcagccggagggagg

SEQ ID NO: 28883 - RNA, 25 nt, Artificial Sequence
  Description of Artificial Sequence: Synthetic oligonucleotide
gcacuagucaccgacagcggccuug

SEQ ID NO: 28884 - RNA, 25 nt, Artificial Sequence
  Description of Artificial Sequence: Synthetic oligonucleotide
gaagacagagcaaagcgcccaccca

SEQ ID NO: 28885 - RNA, 25 nt, Artificial Sequence
  Description of Artificial Sequence: Synthetic oligonucleotide
aggucccccgacugccugucuccau

SEQ ID NO: 28886 - RNA, 25 nt, Artificial Sequence
  Description of Artificial Sequence: Synthetic oligonucleotide
ugagguacuggucccuuccuuuugu

SEQ ID NO: 28887 - RNA, 25 nt, Artificial Sequence
  Description of Artificial Sequence: Synthetic oligonucleotide
uuaacgugaugugccacuauauuuu

SEQ ID NO: 28888 - RNA, 25 nt, Artificial Sequence
  Description of Artificial Sequence: Synthetic oligonucleotide
uacacguaucucuugguaugcaucu

SEQ ID NO: 28889 - RNA, 25 nt, Artificial Sequence
  Description of Artificial Sequence: Synthetic oligonucleotide
uuuuauagacgcucuuuucuaagug

SEQ ID NO: 28890 - RNA, 25 nt, Artificial Sequence
  Description of Artificial Sequence: Synthetic oligonucleotide
ggcgugugcauagcguccugcccug

SEQ ID NO: 28891 - RNA, 25 nt, Artificial Sequence
  Description of Artificial Sequence: Synthetic oligonucleotide
gcccccucgggggccugugguggcu

SEQ ID NO: 28892 - RNA, 25 nt, Artificial Sequence
  Description of Artificial Sequence: Synthetic oligonucleotide
ucccccucugcuucucgggguccag

SEQ ID NO: 28893 - RNA, 25 nt, Artificial Sequence
  Description of Artificial Sequence: Synthetic oligonucleotide
gugcauuuuguuucuguauaugauu

SEQ ID NO: 28894 - RNA, 25 nt, Artificial Sequence
  Description of Artificial Sequence: Synthetic oligonucleotide
ucucugugguuuuuuuugaauccaa

SEQ ID NO: 28895 - RNA, 25 nt, Artificial Sequence
  Description of Artificial Sequence: Synthetic oligonucleotide
aaucuguccucuguaguauuuuuua

SEQ ID NO: 28896 - RNA, 25 nt, Artificial Sequence
  Description of Artificial Sequence: Synthetic oligonucleotide
aaauaaaucaguguuuacauuagaa

SEQ ID NO: 28897 - RNA, 25 nt, Artificial Sequence
  Description of Artificial Sequence: Synthetic oligonucleotide
cagggucugagugaagccgcucguu

SEQ ID NO: 28898 - RNA, 25 nt, Artificial Sequence
  Description of Artificial Sequence: Synthetic oligonucleotide
uggaacuccaaggaaaaccuucucg

SEQ ID NO: 28899 - RNA, 25 nt, Artificial Sequence
  Description of Artificial Sequence: Synthetic oligonucleotide
gcuggacccagugaaaaugacccca

SEQ ID NO: 28900 - RNA, 25 nt, Artificial Sequence
  Description of Artificial Sequence: Synthetic oligonucleotide
aaccuuuucguugcacuguaugauu

SEQ ID NO: 28901 - RNA, 25 nt, Artificial Sequence
  Description of Artificial Sequence: Synthetic oligonucleotide
uuuguggccaguggagauaacacuc

SEQ ID NO: 28902 - RNA, 25 nt, Artificial Sequence
  Description of Artificial Sequence: Synthetic oligonucleotide
cuaagcauaacuaaaggugaaaagc

SEQ ID NO: 28903 - RNA, 25 nt, Artificial Sequence
  Description of Artificial Sequence: Synthetic oligonucleotide
cuccgggucuuaggcuauaaucaca

SEQ ID NO: 28904 - RNA, 25 nt, Artificial Sequence
  Description of Artificial Sequence: Synthetic oligonucleotide
aauggggaauggugugaagcccaaa

SEQ ID NO: 28905 - RNA, 25 nt, Artificial Sequence
  Description of Artificial Sequence: Synthetic oligonucleotide
accaaaaauggccaaggcugggucc

SEQ ID NO: 28906 - RNA, 25 nt, Artificial Sequence
  Description of Artificial Sequence: Synthetic oligonucleotide
ccaagcaacuacaucacgccaguca

SEQ ID NO: 28907 - RNA, 25 nt, Artificial Sequence
  Description of Artificial Sequence: Synthetic oligonucleotide
aacagucuggagaaacacuccuggu

SEQ ID NO: 28908 - RNA, 25 nt, Artificial Sequence
  Description of Artificial Sequence: Synthetic oligonucleotide
uaccaugggccugugucccgcaaug

SEQ ID NO: 28909 - RNA, 25 nt, Artificial Sequence
  Description of Artificial Sequence: Synthetic oligonucleotide
gccgcugaguaucugcugagcagcg

SEQ ID NO: 28910 - RNA, 25 nt, Artificial Sequence
  Description of Artificial Sequence: Synthetic oligonucleotide
gggaucaauggcagcuucuuggugc

SEQ ID NO: 28911 - RNA, 25 nt, Artificial Sequence
  Description of Artificial Sequence: Synthetic oligonucleotide
cgugagagugagagcaguccuggcc

SEQ ID NO: 28912 - RNA, 25 nt, Artificial Sequence
  Description of Artificial Sequence: Synthetic oligonucleotide
cagagguccaucucgcugagauacg

SEQ ID NO: 28913 - RNA, 25 nt, Artificial Sequence
  Description of Artificial Sequence: Synthetic oligonucleotide
gaagggaggguguaccauuacagga

SEQ ID NO: 28914 - RNA, 25 nt, Artificial Sequence
  Description of Artificial Sequence: Synthetic oligonucleotide
aucaacacugcuucugauggcaagc

SEQ ID NO: 28915 - RNA, 25 nt, Artificial Sequence
  Description of Artificial Sequence: Synthetic oligonucleotide
cucuacgucuccuccgagagccgcu

SEQ ID NO: 28916 - RNA, 25 nt, Artificial Sequence
  Description of Artificial Sequence: Synthetic oligonucleotide
uucaacacccuggccgaguugguuc

SEQ ID NO: 28917 - RNA, 25 nt, Artificial Sequence
  Description of Artificial Sequence: Synthetic oligonucleotide
caucaucauucaacgguggccgacg

SEQ ID NO: 28918 - RNA, 25 nt, Artificial Sequence
  Description of Artificial Sequence: Synthetic oligonucleotide
gggcucaucaccacgcuccauuauc

SEQ ID NO: 28919 - RNA, 25 nt, Artificial Sequence
  Description of Artificial Sequence: Synthetic oligonucleotide
ccagccccaaagcgcaacaagccca

SEQ ID NO: 28920 - RNA, 25 nt, Artificial Sequence
  Description of Artificial Sequence: Synthetic oligonucleotide
acugucuauggugugucccccaacu

SEQ ID NO: 28921 - RNA, 25 nt, Artificial Sequence
  Description of Artificial Sequence: Synthetic oligonucleotide
uacgacaagugggagauggaacgca

SEQ ID NO: 28922 - RNA, 25 nt, Artificial Sequence
  Description of Artificial Sequence: Synthetic oligonucleotide
acggacaucaccaugaagcacaagc

SEQ ID NO: 28923 - RNA, 25 nt, Artificial Sequence
  Description of Artificial Sequence: Synthetic oligonucleotide
cugggcgggggccaguacggggagg

SEQ ID NO: 28924 - RNA, 25 nt, Artificial Sequence
  Description of Artificial Sequence: Synthetic oligonucleotide
guguacgagggcguguggaagaaau

SEQ ID NO: 28925 - RNA, 25 nt, Artificial Sequence
  Description of Artificial Sequence: Synthetic oligonucleotide
uacagccugacgguggccgugaaga

SEQ ID NO: 28926 - RNA, 25 nt, Artificial Sequence
  Description of Artificial Sequence: Synthetic oligonucleotide
accuugaaggaggacaccauggagg

SEQ ID NO: 28927 - RNA, 25 nt, Artificial Sequence
  Description of Artificial Sequence: Synthetic oligonucleotide
guggaagaguucuugaaagaagcug

SEQ ID NO: 28928 - RNA, 25 nt, Artificial Sequence
  Description of Artificial Sequence: Synthetic oligonucleotide
gcagucaugaaagagaucaaacacc

SEQ ID NO: 28929 - RNA, 25 nt, Artificial Sequence
  Description of Artificial Sequence: Synthetic oligonucleotide
ccuaaccuggugcagcuccuugggg

SEQ ID NO: 28930 - RNA, 25 nt, Artificial Sequence
  Description of Artificial Sequence: Synthetic oligonucleotide
gucugcacccgggagcccccguucu

SEQ ID NO: 28931 - RNA, 25 nt, Artificial Sequence
  Description of Artificial Sequence: Synthetic oligonucleotide
uauaucaucacugaguucaugaccu

SEQ ID NO: 28932 - RNA, 25 nt, Artificial Sequence
  Description of Artificial Sequence: Synthetic oligonucleotide
uacgggaaccuccuggacuaccuga

SEQ ID NO: 28933 - RNA, 25 nt, Artificial Sequence
  Description of Artificial Sequence: Synthetic oligonucleotide
agggagugcaaccggcaggagguga

SEQ ID NO: 28934 - RNA, 25 nt, Artificial Sequence
  Description of Artificial Sequence: Synthetic oligonucleotide
aacgccguggugcugcuguacaugg

SEQ ID NO: 28935 - RNA, 25 nt, Artificial Sequence
  Description of Artificial Sequence: Synthetic oligonucleotide
gccacucagaucucgucagccaugg

SEQ ID NO: 28936 - RNA, 25 nt, Artificial Sequence
  Description of Artificial Sequence: Synthetic oligonucleotide
gaguaccuggagaagaaaaacuuca

SEQ ID NO: 28937 - RNA, 25 nt, Artificial Sequence
  Description of Artificial Sequence: Synthetic oligonucleotide
auccacagagaucuugcugcccgaa

SEQ ID NO: 28938 - RNA, 25 nt, Artificial Sequence
  Description of Artificial Sequence: Synthetic oligonucleotide
aacugccugguaggggagaaccacu

SEQ ID NO: 28939 - RNA, 25 nt, Artificial Sequence
  Description of Artificial Sequence: Synthetic oligonucleotide
uuggugaagguagcugauuuuggcc

SEQ ID NO: 28940 - RNA, 25 nt, Artificial Sequence
  Description of Artificial Sequence: Synthetic oligonucleotide
cugagcagguugaugacaggggaca

SEQ ID NO: 28941 - RNA, 25 nt, Artificial Sequence
  Description of Artificial Sequence: Synthetic oligonucleotide
accuacacagcccaugcuggagcca

SEQ ID NO: 28942 - RNA, 25 nt, Artificial Sequence
  Description of Artificial Sequence: Synthetic oligonucleotide
aaguuccccaucaaauggacugcac

SEQ ID NO: 28943 - RNA, 25 nt, Artificial Sequence
  Description of Artificial Sequence: Synthetic oligonucleotide
cccgagagccuggccuacaacaagu

SEQ ID NO: 28944 - RNA, 25 nt, Artificial Sequence
  Description of Artificial Sequence: Synthetic oligonucleotide
uucuccaucaaguccgacgucuggg

SEQ ID NO: 28945 - RNA, 25 nt, Artificial Sequence
  Description of Artificial Sequence: Synthetic oligonucleotide
gcauuuggaguauugcuuugggaaa

SEQ ID NO: 28946 - RNA, 25 nt, Artificial Sequence
  Description of Artificial Sequence: Synthetic oligonucleotide
auugcuaccuauggcauguccccuu

SEQ ID NO: 28947 - RNA, 25 nt, Artificial Sequence
  Description of Artificial Sequence: Synthetic oligonucleotide
uacccgggaauugaccugucccagg

SEQ ID NO: 28948 - RNA, 25 nt, Artificial Sequence
  Description of Artificial Sequence: Synthetic oligonucleotide
guguaugagcugcuagagaaggacu

SEQ ID NO: 28949 - RNA, 25 nt, Artificial Sequence
  Description of Artificial Sequence: Synthetic oligonucleotide
uaccgcauggagcgcccagaaggcu

SEQ ID NO: 28950 - RNA, 25 nt, Artificial Sequence
  Description of Artificial Sequence: Synthetic oligonucleotide
ugcccagagaaggucuaugaacuca

SEQ ID NO: 28951 - RNA, 25 nt, Artificial Sequence
  Description of Artificial Sequence: Synthetic oligonucleotide
augcgagcauguuggcaguggaauc

SEQ ID NO: 28952 - RNA, 25 nt, Artificial Sequence
  Description of Artificial Sequence: Synthetic oligonucleotide
cccucugaccggcccuccuuugcug

SEQ ID NO: 28953 - RNA, 25 nt, Artificial Sequence
  Description of Artificial Sequence: Synthetic oligonucleotide
gaaauccaccaagccuuugaaacaa

SEQ ID NO: 28954 - RNA, 25 nt, Artificial Sequence
  Description of Artificial Sequence: Synthetic oligonucleotide
auguuccaggaauccaguaucucag

SEQ ID NO: 28955 - RNA, 25 nt, Artificial Sequence
  Description of Artificial Sequence: Synthetic oligonucleotide
gacgaaguggaaaaggagcugggga

SEQ ID NO: 28956 - RNA, 25 nt, Artificial Sequence
  Description of Artificial Sequence: Synthetic oligonucleotide
aaacaaggcguccguggggcuguga

SEQ ID NO: 28957 - RNA, 25 nt, Artificial Sequence
  Description of Artificial Sequence: Synthetic oligonucleotide
aguaccuugcugcaggccccagagc

SEQ ID NO: 28958 - RNA, 25 nt, Artificial Sequence
  Description of Artificial Sequence: Synthetic oligonucleotide
cugcccaccaagacgaggaccucca

SEQ ID NO: 28959 - RNA, 25 nt, Artificial Sequence
  Description of Artificial Sequence: Synthetic oligonucleotide
aggagagcugcagagcacagagaca

SEQ ID NO: 28960 - RNA, 25 nt, Artificial Sequence
  Description of Artificial Sequence: Synthetic oligonucleotide
accacugacgugccugagaugccuc

SEQ ID NO: 28961 - RNA, 25 nt, Artificial Sequence
  Description of Artificial Sequence: Synthetic oligonucleotide
cacuccaagggccagggagagagcg

SEQ ID NO: 28962 - RNA, 25 nt, Artificial Sequence
  Description of Artificial Sequence: Synthetic oligonucleotide
gauccucuggaccaugagccugccg

SEQ ID NO: 28963 - RNA, 25 nt, Artificial Sequence
  Description of Artificial Sequence: Synthetic oligonucleotide
gugucuccauugcucccucgaaaag

SEQ ID NO: 28964 - RNA, 25 nt, Artificial Sequence
  Description of Artificial Sequence: Synthetic oligonucleotide
gagcgaggucccccggagggcggcc

SEQ ID NO: 28965 - RNA, 25 nt, Artificial Sequence
  Description of Artificial Sequence: Synthetic oligonucleotide
cugaaugaagaugagcgccuucucc

SEQ ID NO: 28966 - RNA, 25 nt, Artificial Sequence
  Description of Artificial Sequence: Synthetic oligonucleotide
cccaaagacaaaaagaccaacuugu

SEQ ID NO: 28967 - RNA, 25 nt, Artificial Sequence
  Description of Artificial Sequence: Synthetic oligonucleotide
uucagcgccuugaucaagaagaaga

SEQ ID NO: 28968 - RNA, 25 nt, Artificial Sequence
  Description of Artificial Sequence: Synthetic oligonucleotide
aagaagacagccccaaccccuccca

SEQ ID NO: 28969 - RNA, 25 nt, Artificial Sequence
  Description of Artificial Sequence: Synthetic oligonucleotide
aaacgcagcagcuccuuccgggaga

SEQ ID NO: 28970 - RNA, 25 nt, Artificial Sequence
  Description of Artificial Sequence: Synthetic oligonucleotide
auggacggccagccggagcgcagag

SEQ ID NO: 28971 - RNA, 25 nt, Artificial Sequence
  Description of Artificial Sequence: Synthetic oligonucleotide
ggggccggcgaggaagagggccgag

SEQ ID NO: 28972 - RNA, 25 nt, Artificial Sequence
  Description of Artificial Sequence: Synthetic oligonucleotide
gacaucagcaacggggcacuggcuu

SEQ ID NO: 28973 - RNA, 25 nt, Artificial Sequence
  Description of Artificial Sequence: Synthetic oligonucleotide
uucacccccuuggacacagcugacc

SEQ ID NO: 28974 - RNA, 25 nt, Artificial Sequence
  Description of Artificial Sequence: Synthetic oligonucleotide
ccagccaaguccccaaagcccagca

SEQ ID NO: 28975 - RNA, 25 nt, Artificial Sequence
  Description of Artificial Sequence: Synthetic oligonucleotide
aauggggcugggguccccaauggag

SEQ ID NO: 28976 - RNA, 25 nt, Artificial Sequence
  Description of Artificial Sequence: Synthetic oligonucleotide
gcccuccgggaguccgggggcucag

SEQ ID NO: 28977 - RNA, 25 nt, Artificial Sequence
  Description of Artificial Sequence: Synthetic oligonucleotide
ggcuuccggucuccccaccugugga

SEQ ID NO: 28978 - RNA, 25 nt, Artificial Sequence
  Description of Artificial Sequence: Synthetic oligonucleotide
aagaaguccagcacgcugaccagca

SEQ ID NO: 28979 - RNA, 25 nt, Artificial Sequence
  Description of Artificial Sequence: Synthetic oligonucleotide
agccgccuagccaccggcgaggagg

SEQ ID NO: 28980 - RNA, 25 nt, Artificial Sequence
  Description of Artificial Sequence: Synthetic oligonucleotide
gagggcgguggcagcuccagcaagc

SEQ ID NO: 28981 - RNA, 25 nt, Artificial Sequence
  Description of Artificial Sequence: Synthetic oligonucleotide
cgcuuccugcgcucuugcuccgccu

SEQ ID NO: 28982 - RNA, 25 nt, Artificial Sequence
  Description of Artificial Sequence: Synthetic oligonucleotide
uccugcguuccccauggggccaagg

SEQ ID NO: 28983 - RNA, 25 nt, Artificial Sequence
  Description of Artificial Sequence: Synthetic oligonucleotide
gacacggaguggaggucagucacgc

SEQ ID NO: 28984 - RNA, 25 nt, Artificial Sequence
  Description of Artificial Sequence: Synthetic oligonucleotide
cugccucgggacuugcaguccacgg

SEQ ID NO: 28985 - RNA, 25 nt, Artificial Sequence
  Description of Artificial Sequence: Synthetic oligonucleotide
ggaagacaguuugacucguccacau

SEQ ID NO: 28986 - RNA, 25 nt, Artificial Sequence
  Description of Artificial Sequence: Synthetic oligonucleotide
uuuggagggcacaaaagugagaagc

SEQ ID NO: 28987 - RNA, 25 nt, Artificial Sequence
  Description of Artificial Sequence: Synthetic oligonucleotide
ccggcucugccucggaagagggcag

SEQ ID NO: 28988 - RNA, 25 nt, Artificial Sequence
  Description of Artificial Sequence: Synthetic oligonucleotide
ggggagaacaggucugaccagguga

SEQ ID NO: 28989 - RNA, 25 nt, Artificial Sequence
  Description of Artificial Sequence: Synthetic oligonucleotide
acccgaggcacaguaacgccucccc

SEQ ID NO: 28990 - RNA, 25 nt, Artificial Sequence
  Description of Artificial Sequence: Synthetic oligonucleotide
cccaggcuggugaaaaagaaugagg

SEQ ID NO: 28991 - RNA, 25 nt, Artificial Sequence
  Description of Artificial Sequence: Synthetic oligonucleotide
gaagcugcugaugaggucuucaaag

SEQ ID NO: 28992 - RNA, 25 nt, Artificial Sequence
  Description of Artificial Sequence: Synthetic oligonucleotide
gacaucauggaguccagcccgggcu

SEQ ID NO: 28993 - RNA, 25 nt, Artificial Sequence
  Description of Artificial Sequence: Synthetic oligonucleotide
uccagcccgcccaaccugacuccaa

SEQ ID NO: 28994 - RNA, 25 nt, Artificial Sequence
  Description of Artificial Sequence: Synthetic oligonucleotide
aaaccccuccggcggcaggucaccg

SEQ ID NO: 28995 - RNA, 25 nt, Artificial Sequence
  Description of Artificial Sequence: Synthetic oligonucleotide
guggccccugccucgggccuccccc

SEQ ID NO: 28996 - RNA, 25 nt, Artificial Sequence
  Description of Artificial Sequence: Synthetic oligonucleotide
cacaaggaagaagcuggaaagggca

SEQ ID NO: 28997 - RNA, 25 nt, Artificial Sequence
  Description of Artificial Sequence: Synthetic oligonucleotide
agugccuuagggaccccugcugcag

SEQ ID NO: 28998 - RNA, 25 nt, Artificial Sequence
  Description of Artificial Sequence: Synthetic oligonucleotide
gcugagccagugacccccaccagca

SEQ ID NO: 28999 - RNA, 25 nt, Artificial Sequence
  Description of Artificial Sequence: Synthetic oligonucleotide
aaagcaggcucaggugcaccagggg

SEQ ID NO: 29000 - RNA, 25 nt, Artificial Sequence
  Description of Artificial Sequence: Synthetic oligonucleotide
ggcaccagcaagggccccgccgagg

SEQ ID NO: 29001 - RNA, 25 nt, Artificial Sequence
  Description of Artificial Sequence: Synthetic oligonucleotide
gaguccagagugaggaggcacaagc

SEQ ID NO: 29002 - RNA, 25 nt, Artificial Sequence
  Description of Artificial Sequence: Synthetic oligonucleotide
cacuccucugagucgccagggaggg

SEQ ID NO: 29003 - RNA, 25 nt, Artificial Sequence
  Description of Artificial Sequence: Synthetic oligonucleotide
gacaaggggaaauuguccaggcuca

SEQ ID NO: 29004 - RNA, 25 nt, Artificial Sequence
  Description of Artificial Sequence: Synthetic oligonucleotide
aaaccugccccgccgcccccaccag

SEQ ID NO: 29005 - RNA, 25 nt, Artificial Sequence
  Description of Artificial Sequence: Synthetic oligonucleotide
gcagccucugcagggaaggcuggag

SEQ ID NO: 29006 - RNA, 25 nt, Artificial Sequence
  Description of Artificial Sequence: Synthetic oligonucleotide
ggaaagcccucgcagagcccgagcc

SEQ ID NO: 29007 - RNA, 25 nt, Artificial Sequence
  Description of Artificial Sequence: Synthetic oligonucleotide
caggaggcggccggggaggcagucc

SEQ ID NO: 29008 - RNA, 25 nt, Artificial Sequence
  Description of Artificial Sequence: Synthetic oligonucleotide
cugggcgcaaagacaaaagccacga

SEQ ID NO: 29009 - RNA, 25 nt, Artificial Sequence
  Description of Artificial Sequence: Synthetic oligonucleotide
agucugguugaugcugugaacagug

SEQ ID NO: 29010 - RNA, 25 nt, Artificial Sequence
  Description of Artificial Sequence: Synthetic oligonucleotide
gacgcugccaagcccagccagccgg

SEQ ID NO: 29011 - RNA, 25 nt, Artificial Sequence
  Description of Artificial Sequence: Synthetic oligonucleotide
ggagagggccucaaaaagcccgugc

SEQ ID NO: 29012 - RNA, 25 nt, Artificial Sequence
  Description of Artificial Sequence: Synthetic oligonucleotide
cucccggccacuccaaagccacagu

SEQ ID NO: 29013 - RNA, 25 nt, Artificial Sequence
  Description of Artificial Sequence: Synthetic oligonucleotide
uccgccaagccgucggggaccccca

SEQ ID NO: 29014 - RNA, 25 nt, Artificial Sequence
  Description of Artificial Sequence: Synthetic oligonucleotide
aucagcccagcccccguucccucca

SEQ ID NO: 29015 - RNA, 25 nt, Artificial Sequence
  Description of Artificial Sequence: Synthetic oligonucleotide
acguugccaucagcauccucggccc

SEQ ID NO: 29016 - RNA, 25 nt, Artificial Sequence
  Description of Artificial Sequence: Synthetic oligonucleotide
cuggcaggggaccagccgucuucca

SEQ ID NO: 29017 - RNA, 25 nt, Artificial Sequence
  Description of Artificial Sequence: Synthetic oligonucleotide
accgccuucaucccucucauaucaa

SEQ ID NO: 29018 - RNA, 25 nt, Artificial Sequence
  Description of Artificial Sequence: Synthetic oligonucleotide
acccgagugucucuucggaaaaccc

SEQ ID NO: 29019 - RNA, 25 nt, Artificial Sequence
  Description of Artificial Sequence: Synthetic oligonucleotide
cgccagccuccagagcggaucgcca

SEQ ID NO: 29020 - RNA, 25 nt, Artificial Sequence
  Description of Artificial Sequence: Synthetic oligonucleotide
agcggcgccaucaccaagggcgugg

SEQ ID NO: 29021 - RNA, 25 nt, Artificial Sequence
  Description of Artificial Sequence: Synthetic oligonucleotide
guccuggacagcaccgaggcgcugu

SEQ ID NO: 29022 - RNA, 25 nt, Artificial Sequence
  Description of Artificial Sequence: Synthetic oligonucleotide
ugccucgccaucucuaggaacuccg

SEQ ID NO: 29023 - RNA, 25 nt, Artificial Sequence
  Description of Artificial Sequence: Synthetic oligonucleotide
gagcagauggccagccacagcgcag

SEQ ID NO: 29024 - RNA, 25 nt, Artificial Sequence
  Description of Artificial Sequence: Synthetic oligonucleotide
gugcuggaggccggcaaaaaccucu

SEQ ID NO: 29025 - RNA, 25 nt, Artificial Sequence
  Description of Artificial Sequence: Synthetic oligonucleotide
uacacguucugcgugagcuaugugg

SEQ ID NO: 29026 - RNA, 25 nt, Artificial Sequence
  Description of Artificial Sequence: Synthetic oligonucleotide
gauuccauccagcaaaugaggaaca

SEQ ID NO: 29027 - RNA, 25 nt, Artificial Sequence
  Description of Artificial Sequence: Synthetic oligonucleotide
aaguuugccuuccgagaggccauca

SEQ ID NO: 29028 - RNA, 25 nt, Artificial Sequence
  Description of Artificial Sequence: Synthetic oligonucleotide
aacaaacuggagaauaaucuccggg

SEQ ID NO: 29029 - RNA, 25 nt, Artificial Sequence
  Description of Artificial Sequence: Synthetic oligonucleotide
gagcuucagaucugcccggcgacag

SEQ ID NO: 29030 - RNA, 25 nt, Artificial Sequence
  Description of Artificial Sequence: Synthetic oligonucleotide
gcaggcagugguccagcggccacuc

SEQ ID NO: 29031 - RNA, 25 nt, Artificial Sequence
  Description of Artificial Sequence: Synthetic oligonucleotide
caggacuucagcaagcuccucaguu

SEQ ID NO: 29032 - RNA, 25 nt, Artificial Sequence
  Description of Artificial Sequence: Synthetic oligonucleotide
ucggugaaggaaaucagugacauag

SEQ ID NO: 29033 - RNA, 25 nt, Artificial Sequence
  Description of Artificial Sequence: Synthetic oligonucleotide
gugcagagguagcagcagucagggg

SEQ ID NO: 29034 - RNA, 25 nt, Artificial Sequence
  Description of Artificial Sequence: Synthetic oligonucleotide
gucaggugucaggcccgucggagcu

SEQ ID NO: 29035 - RNA, 25 nt, Artificial Sequence
  Description of Artificial Sequence: Synthetic oligonucleotide
ugccugcagcacaugcgggcucgcc

SEQ ID NO: 29036 - RNA, 25 nt, Artificial Sequence
  Description of Artificial Sequence: Synthetic oligonucleotide
ccauacccgugacaguggcugacaa

SEQ ID NO: 29037 - RNA, 25 nt, Artificial Sequence
  Description of Artificial Sequence: Synthetic oligonucleotide
agggacuagugagucagcaccuugg

SEQ ID NO: 29038 - RNA, 25 nt, Artificial Sequence
  Description of Artificial Sequence: Synthetic oligonucleotide
gcccaggagcucugcgccaggcaga

SEQ ID NO: 29039 - RNA, 25 nt, Artificial Sequence
  Description of Artificial Sequence: Synthetic oligonucleotide
agcugagggcccuguggaguccagc

SEQ ID NO: 29040 - RNA, 25 nt, Artificial Sequence
  Description of Artificial Sequence: Synthetic oligonucleotide
cucuacuaccuacguuugcaccgcc

SEQ ID NO: 29041 - RNA, 25 nt, Artificial Sequence
  Description of Artificial Sequence: Synthetic oligonucleotide
cugcccucccgcaccuuccuccucc

SEQ ID NO: 29042 - RNA, 25 nt, Artificial Sequence
  Description of Artificial Sequence: Synthetic oligonucleotide
cccgcuccgucucuguccucgaauu

SEQ ID NO: 29043 - RNA, 25 nt, Artificial Sequence
  Description of Artificial Sequence: Synthetic oligonucleotide
uuuaucuguggaguuccugcuccgu

SEQ ID NO: 29044 - RNA, 25 nt, Artificial Sequence
  Description of Artificial Sequence: Synthetic oligonucleotide
uggacugcagucggcaugccaggac

SEQ ID NO: 29045 - RNA, 25 nt, Artificial Sequence
  Description of Artificial Sequence: Synthetic oligonucleotide
cccgccagccccgcucccaccuagu

SEQ ID NO: 29046 - RNA, 25 nt, Artificial Sequence
  Description of Artificial Sequence: Synthetic oligonucleotide
ugccccagacugagcucuccaggcc

SEQ ID NO: 29047 - RNA, 25 nt, Artificial Sequence
  Description of Artificial Sequence: Synthetic oligonucleotide
caggugggaacggcugauguggacu

SEQ ID NO: 29048 - RNA, 25 nt, Artificial Sequence
  Description of Artificial Sequence: Synthetic oligonucleotide
ugucuuuuucauuuuuuucucucug

SEQ ID NO: 29049 - RNA, 25 nt, Artificial Sequence
  Description of Artificial Sequence: Synthetic oligonucleotide
ggagccccuccucccccggcugggc

SEQ ID NO: 29050 - RNA, 25 nt, Artificial Sequence
  Description of Artificial Sequence: Synthetic oligonucleotide
ccuccuucuuccacuucuccaagaa

SEQ ID NO: 29051 - RNA, 25 nt, Artificial Sequence
  Description of Artificial Sequence: Synthetic oligonucleotide
auggaagccugaacugaggccuugu

SEQ ID NO: 29052 - RNA, 25 nt, Artificial Sequence
  Description of Artificial Sequence: Synthetic oligonucleotide
ugugucaggcccucugccugcacuc

SEQ ID NO: 29053 - RNA, 25 nt, Artificial Sequence
  Description of Artificial Sequence: Synthetic oligonucleotide
cccuggccuugcccgucgugugcug

SEQ ID NO: 29054 - RNA, 25 nt, Artificial Sequence
  Description of Artificial Sequence: Synthetic oligonucleotide
gaagacauguuucaagaaccgcauu

SEQ ID NO: 29055 - RNA, 25 nt, Artificial Sequence
  Description of Artificial Sequence: Synthetic oligonucleotide
uucgggaagggcaugcacgggcaug

SEQ ID NO: 29056 - RNA, 25 nt, Artificial Sequence
  Description of Artificial Sequence: Synthetic oligonucleotide
gcacacggcuggucacucugcccuc

SEQ ID NO: 29057 - RNA, 25 nt, Artificial Sequence
  Description of Artificial Sequence: Synthetic oligonucleotide
cugcugcugcccgggguggggugca

SEQ ID NO: 29058 - RNA, 25 nt, Artificial Sequence
  Description of Artificial Sequence: Synthetic oligonucleotide
acucgccauuuccucacgugcagga

SEQ ID NO: 29059 - RNA, 25 nt, Artificial Sequence
  Description of Artificial Sequence: Synthetic oligonucleotide
acagcucuugauuuggguggaaaac

SEQ ID NO: 29060 - RNA, 25 nt, Artificial Sequence
  Description of Artificial Sequence: Synthetic oligonucleotide
cagggugcuaaagccaaccagccuu

SEQ ID NO: 29061 - RNA, 25 nt, Artificial Sequence
  Description of Artificial Sequence: Synthetic oligonucleotide
uuggguccugggcaggugggagcug

SEQ ID NO: 29062 - RNA, 25 nt, Artificial Sequence
  Description of Artificial Sequence: Synthetic oligonucleotide
gaaaaggaucgaggcauggggcaug

SEQ ID NO: 29063 - RNA, 25 nt, Artificial Sequence
  Description of Artificial Sequence: Synthetic oligonucleotide
guccuuuccaucuguccacaucccc

SEQ ID NO: 29064 - RNA, 25 nt, Artificial Sequence
  Description of Artificial Sequence: Synthetic oligonucleotide
cagagcccagcucuugcucucuugu

SEQ ID NO: 29065 - RNA, 25 nt, Artificial Sequence
  Description of Artificial Sequence: Synthetic oligonucleotide
ugacgugcacugugaauccuggcaa

SEQ ID NO: 29066 - RNA, 25 nt, Artificial Sequence
  Description of Artificial Sequence: Synthetic oligonucleotide
agaaagcuugagucucaaggguggc

SEQ ID NO: 29067 - RNA, 25 nt, Artificial Sequence
  Description of Artificial Sequence: Synthetic oligonucleotide
caggucacugucacugccgacaucc

SEQ ID NO: 29068 - RNA, 25 nt, Artificial Sequence
  Description of Artificial Sequence: Synthetic oligonucleotide
ccucccccagcagaauggaggcagg

SEQ ID NO: 29069 - RNA, 25 nt, Artificial Sequence
  Description of Artificial Sequence: Synthetic oligonucleotide
gggacaagggaggcaguggcuagug

SEQ ID NO: 29070 - RNA, 25 nt, Artificial Sequence
  Description of Artificial Sequence: Synthetic oligonucleotide
ggggugaacagcuggugccaaauag

SEQ ID NO: 29071 - RNA, 25 nt, Artificial Sequence
  Description of Artificial Sequence: Synthetic oligonucleotide
gccccagacugggcccaggcagguc

SEQ ID NO: 29072 - RNA, 25 nt, Artificial Sequence
  Description of Artificial Sequence: Synthetic oligonucleotide
cugcaagggcccagagugaaccguc

SEQ ID NO: 29073 - RNA, 25 nt, Artificial Sequence
  Description of Artificial Sequence: Synthetic oligonucleotide
ccuuucacacaucugggugcccuga

SEQ ID NO: 29074 - RNA, 25 nt, Artificial Sequence
  Description of Artificial Sequence: Synthetic oligonucleotide
aaagggcccuuccccucccccacuc

SEQ ID NO: 29075 - RNA, 25 nt, Artificial Sequence
  Description of Artificial Sequence: Synthetic oligonucleotide
ccucuaagacaaaguagauucuuac

SEQ ID NO: 29076 - RNA, 25 nt, Artificial Sequence
  Description of Artificial Sequence: Synthetic oligonucleotide
caaggcccuuuccuuuggaacaaga

SEQ ID NO: 29077 - RNA, 25 nt, Artificial Sequence
  Description of Artificial Sequence: Synthetic oligonucleotide
acagccuucacuuuucugaguucuu

SEQ ID NO: 29078 - RNA, 25 nt, Artificial Sequence
  Description of Artificial Sequence: Synthetic oligonucleotide
ugaagcauuucaaagcccugccucu

SEQ ID NO: 29079 - RNA, 25 nt, Artificial Sequence
  Description of Artificial Sequence: Synthetic oligonucleotide
uguguagccgcccugagagagaaua

SEQ ID NO: 29080 - RNA, 25 nt, Artificial Sequence
  Description of Artificial Sequence: Synthetic oligonucleotide
agagcugccacugggcaccugcgca

SEQ ID NO: 29081 - RNA, 25 nt, Artificial Sequence
  Description of Artificial Sequence: Synthetic oligonucleotide
acaggugggaggaaagggccuggcc

SEQ ID NO: 29082 - RNA, 25 nt, Artificial Sequence
  Description of Artificial Sequence: Synthetic oligonucleotide
caguccugguccuggcugcacucuu

SEQ ID NO: 29083 - RNA, 25 nt, Artificial Sequence
  Description of Artificial Sequence: Synthetic oligonucleotide
ugaacugggcgaaugucuuauuuaa

SEQ ID NO: 29084 - RNA, 25 nt, Artificial Sequence
  Description of Artificial Sequence: Synthetic oligonucleotide
auuaccgugagugacauagccucau

SEQ ID NO: 29085 - RNA, 25 nt, Artificial Sequence
  Description of Artificial Sequence: Synthetic oligonucleotide
uguucugugggggucaucagggagg

SEQ ID NO: 29086 - RNA, 25 nt, Artificial Sequence
  Description of Artificial Sequence: Synthetic oligonucleotide
gguuaggaaaaccacaaacggagcc

SEQ ID NO: 29087 - RNA, 25 nt, Artificial Sequence
  Description of Artificial Sequence: Synthetic oligonucleotide
cccugaaagccucacguauuucaca

SEQ ID NO: 29088 - RNA, 25 nt, Artificial Sequence
  Description of Artificial Sequence: Synthetic oligonucleotide
agagcacgccugccaucuucucccc

SEQ ID NO: 29089 - RNA, 25 nt, Artificial Sequence
  Description of Artificial Sequence: Synthetic oligonucleotide
cgaggcugccccaggccggagccca

SEQ ID NO: 29090 - RNA, 25 nt, Artificial Sequence
  Description of Artificial Sequence: Synthetic oligonucleotide
agauacgggggcugugacucugggc

SEQ ID NO: 29091 - RNA, 25 nt, Artificial Sequence
  Description of Artificial Sequence: Synthetic oligonucleotide
cagggacccggggucuccuggaccu

SEQ ID NO: 29092 - RNA, 25 nt, Artificial Sequence
  Description of Artificial Sequence: Synthetic oligonucleotide
uugacagagcagcuaacuccgagag

SEQ ID NO: 29093 - RNA, 25 nt, Artificial Sequence
  Description of Artificial Sequence: Synthetic oligonucleotide
gcagugggcagguggccgccccuga

SEQ ID NO: 29094 - RNA, 25 nt, Artificial Sequence
  Description of Artificial Sequence: Synthetic oligonucleotide
aggcuucacgccgggagaagccacc

SEQ ID NO: 29095 - RNA, 25 nt, Artificial Sequence
  Description of Artificial Sequence: Synthetic oligonucleotide
cuucccaccccuucauaccgccucg

SEQ ID NO: 29096 - RNA, 25 nt, Artificial Sequence
  Description of Artificial Sequence: Synthetic oligonucleotide
gugccagcagccucgcacaggcccu

SEQ ID NO: 29097 - RNA, 25 nt, Artificial Sequence
  Description of Artificial Sequence: Synthetic oligonucleotide
uagcuuuacgcucaucaccuaaacu

SEQ ID NO: 29098 - RNA, 25 nt, Artificial Sequence
  Description of Artificial Sequence: Synthetic oligonucleotide
uuguacuuuauuuuucugauagaaa

SEQ ID NO: 29099 - RNA, 25 nt, Artificial Sequence
  Description of Artificial Sequence: Synthetic oligonucleotide
augguuuccucuggaucguuuuaug

SEQ ID NO: 29100 - RNA, 25 nt, Artificial Sequence
  Description of Artificial Sequence: Synthetic oligonucleotide
gcgguucuuacagcacaucaccucu

SEQ ID NO: 29101 - RNA, 25 nt, Artificial Sequence
  Description of Artificial Sequence: Synthetic oligonucleotide
uuugcccccgacggcugugacgcag

SEQ ID NO: 29102 - RNA, 25 nt, Artificial Sequence
  Description of Artificial Sequence: Synthetic oligonucleotide
gccggagggaggcacuagucaccga

SEQ ID NO: 29103 - RNA, 25 nt, Artificial Sequence
  Description of Artificial Sequence: Synthetic oligonucleotide
acagcggccuugaagacagagcaaa

SEQ ID NO: 29104 - RNA, 25 nt, Artificial Sequence
  Description of Artificial Sequence: Synthetic oligonucleotide
agcgcccacccaggucccccgacug

SEQ ID NO: 29105 - RNA, 25 nt, Artificial Sequence
  Description of Artificial Sequence: Synthetic oligonucleotide
gccugucuccaugagguacuggucc

SEQ ID NO: 29106 - RNA, 25 nt, Artificial Sequence
  Description of Artificial Sequence: Synthetic oligonucleotide
ccuuccuuuuguuaacgugaugugc

SEQ ID NO: 29107 - RNA, 25 nt, Artificial Sequence
  Description of Artificial Sequence: Synthetic oligonucleotide
ccacuauauuuuacacguaucucuu

SEQ ID NO: 29108 - RNA, 25 nt, Artificial Sequence
  Description of Artificial Sequence: Synthetic oligonucleotide
ugguaugcaucuuuuauagacgcuc

SEQ ID NO: 29109 - RNA, 25 nt, Artificial Sequence
  Description of Artificial Sequence: Synthetic oligonucleotide
cuuuucuaaguggcgugugcauagc

SEQ ID NO: 29110 - RNA, 25 nt, Artificial Sequence
  Description of Artificial Sequence: Synthetic oligonucleotide
cguccugcccugcccccucgggggc

SEQ ID NO: 29111 - RNA, 25 nt, Artificial Sequence
  Description of Artificial Sequence: Synthetic oligonucleotide
ccugugguggcucccccucugcuuc

SEQ ID NO: 29112 - RNA, 25 nt, Artificial Sequence
  Description of Artificial Sequence: Synthetic oligonucleotide
cucgggguccagugcauuuuguuuc

SEQ ID NO: 29113 - RNA, 25 nt, Artificial Sequence
  Description of Artificial Sequence: Synthetic oligonucleotide
cuguauaugauucucugugguuuuu

SEQ ID NO: 29114 - RNA, 25 nt, Artificial Sequence
  Description of Artificial Sequence: Synthetic oligonucleotide
uuuugaauccaaaucuguccucugu

SEQ ID NO: 29115 - RNA, 25 nt, Artificial Sequence
  Description of Artificial Sequence: Synthetic oligonucleotide
uaguauuuuuuaaauaaaucagugu

SEQ ID NO: 29116 - RNA, 25 nt, Artificial Sequence
  Description of Artificial Sequence: Synthetic oligonucleotide
uuuuaaauaaaucaguguuuacauu

SEQ ID NO: 29117 - DNA, 21 bp, Artificial Sequence
  Description of Artificial Sequence: Synthetic oligonucleotide
  Description of Combined DNA/RNA Molecule: Synthetic oligonucleotide
cuacacaaaucagcgauuutt

SEQ ID NO: 29118 - DNA, 21 bp, Artificial Sequence
  Description of Artificial Sequence: Synthetic oligonucleotide
  Description of Combined DNA/RNA Molecule: Synthetic oligonucleotide
aaaucgcugauuuguguagtt

SEQ ID NO: 29119 - DNA, 25 bp, Artificial Sequence
  Description of Artificial Sequence: Synthetic oligonucleotide
  Description of Combined DNA/RNA Molecule: Synthetic oligonucleotide
cuacacaaaucagcgauuuccaugt

SEQ ID NO: 29120 - RNA, 27 nt, Artificial Sequence
  Description of Artificial Sequence: Synthetic oligonucleotide
acauggaaaucgcugauuuguguaguc

SEQ ID NO: 29121 - RNA, 13 nt, Artificial Sequence
  Description of Artificial Sequence: Synthetic oligonucleotide
cuacacaaaucag

SEQ ID NO: 29122 - DNA, 11 bp, Artificial Sequence
  Description of Artificial Sequence: Synthetic oligonucleotide
  Description of Combined DNA/RNA Molecule: Synthetic oligonucleotide
gauuuccaugt

SEQ ID NO: 29123 - DNA, 21 bp, Artificial Sequence
  Description of Artificial Sequence: Synthetic oligonucleotide
  Description of Combined DNA/RNA Molecule: Synthetic oligonucleotide
ggaucuuauuucuucggagtt

SEQ ID NO: 29124 - DNA, 21 bp, Artificial Sequence
  Description of Artificial Sequence: Synthetic oligonucleotide
  Description of Combined DNA/RNA Molecule: Synthetic oligonucleotide
cuccgaagaaauaagaucctt

SEQ ID NO: 29125 - RNA, 11 nt, Artificial Sequence
  Description of Artificial Sequence: Synthetic oligonucleotide
ggaucuuauuu

SEQ ID NO: 29126 - DNA, 10 bp, Artificial Sequence
  Description of Artificial Sequence: Synthetic oligonucleotide
  Description of Combined DNA/RNA Molecule: Synthetic oligonucleotide
cuucggagtt

SEQ ID NO: 29127 - RNA, 27 nt, Artificial Sequence
  Description of Artificial Sequence: Synthetic oligonucleotide
cauugucuccgaagaaauaagauccuu

SEQ ID NO: 29128 - RNA, 8 nt, Artificial Sequence
  Description of Artificial Sequence: Synthetic oligonucleotide
  modified_base (2): LNA-G
ggaucuua

SEQ ID NO: 29129 - DNA, 17 bp, Artificial Sequence
  Description of Artificial Sequence: Synthetic oligonucleotide
  Description of Combined DNA/RNA Molecule: Synthetic oligonucleotide
uuucuucggagacaatg

SEQ ID NO: 29130 - DNA, 16 bp, Artificial Sequence
  Description of Artificial Sequence: Synthetic oligonucleotide
  Description of Combined DNA/RNA Molecule: Synthetic oligonucleotide
uucuucggagacaatg

SEQ ID NO: 29131 - DNA, 15 bp, Artificial Sequence
  Description of Artificial Sequence: Synthetic oligonucleotide
  Description of Combined DNA/RNA Molecule: Synthetic oligonucleotide
ucuucggagacaatg

SEQ ID NO: 29132 - DNA, 14 bp, Artificial Sequence
  Description of Artificial Sequence: Synthetic oligonucleotide
  Description of Combined DNA/RNA Molecule: Synthetic oligonucleotide
cuucggagacaatg

SEQ ID NO: 29133 - DNA, 13 bp, Artificial Sequence
  Description of Artificial Sequence: Synthetic oligonucleotide
  Description of Combined DNA/RNA Molecule: Synthetic oligonucleotide
uucggagacaatg

SEQ ID NO: 29134 - DNA, 12 bp, Artificial Sequence
  Description of Artificial Sequence: Synthetic oligonucleotide
  Description of Combined DNA/RNA Molecule: Synthetic oligonucleotide
ucggagacaatg

SEQ ID NO: 29135 - DNA, 11 bp, Artificial Sequence
  Description of Artificial Sequence: Synthetic oligonucleotide
  Description of Combined DNA/RNA Molecule: Synthetic oligonucleotide
cggagacaatg

SEQ ID NO: 29136 - RNA, 9 nt, Artificial Sequence
  Description of Artificial Sequence: Synthetic oligonucleotide
  modified_base (2): LNA-G
ggaucuuau

SEQ ID NO: 29137 - RNA, 10 nt, Artificial Sequence
  Description of Artificial Sequence: Synthetic oligonucleotide
  modified_base (2): LNA-G
ggaucuuauu

SEQ ID NO: 29138 - RNA, 11 nt, Artificial Sequence
  Description of Artificial Sequence: Synthetic oligonucleotide
  modified_base (2): LNA-G
ggaucuuauuu

SEQ ID NO: 29139 - RNA, 12 nt, Artificial Sequence
  Description of Artificial Sequence: Synthetic oligonucleotide
  modified_base (2): LNA-G
ggaucuuauuuc

SEQ ID NO: 29140 - RNA, 8 nt, Artificial Sequence
  Description of Artificial Sequence: Synthetic oligonucleotide
  modified_base (3): LNA-A
cuacacaa

SEQ ID NO: 29141 - DNA, 13 bp, Artificial Sequence
  Description of Artificial Sequence: Synthetic oligonucleotide
  Description of Combined DNA/RNA Molecule: Synthetic oligonucleotide
  modified_base (8): LNA-A
aucagcgauuutt

SEQ ID NO: 29142 - DNA, 12 bp, Artificial Sequence
  Description of Artificial Sequence: Synthetic oligonucleotide
  Description of Combined DNA/RNA Molecule: Synthetic oligonucleotide
  modified_base (7): LNA-A
ucagcgauuutt

SEQ ID NO: 29143 - DNA, 11 bp, Artificial Sequence
  Description of Artificial Sequence: Synthetic oligonucleotide
  Description of Combined DNA/RNA Molecule: Synthetic oligonucleotide
  modified_base (6): LNA-A
cagcgauuutt

SEQ ID NO: 29144 - DNA, 10 bp, Artificial Sequence
  Description of Artificial Sequence: Synthetic oligonucleotide
  Description of Combined DNA/RNA Molecule: Synthetic oligonucleotide
  modified_base (5): LNA-A
agcgauuutt

SEQ ID NO: 29145 - DNA, 9 bp, Artificial Sequence
  Description of Artificial Sequence: Synthetic oligonucleotide
  Description of Combined DNA/RNA Molecule: Synthetic oligonucleotide
  modified_base (4): LNA-A
gcgauuutt

SEQ ID NO: 29146 - DNA, 8 bp, Artificial Sequence
  Description of Artificial Sequence: Synthetic oligonucleotide
  Description of Combined DNA/RNA Molecule: Synthetic oligonucleotide
  modified_base (3): LNA-A
cgauuutt

SEQ ID NO: 29147 - DNA, 7 bp, Artificial Sequence
  Description of Artificial Sequence: Synthetic oligonucleotide
  Description of Combined DNA/RNA Molecule: Synthetic oligonucleotide
  modified_base (2): LNA-A
gauuutt

SEQ ID NO: 29148 - RNA, 9 nt, Artificial Sequence
  Description of Artificial Sequence: Synthetic oligonucleotide
  modified_base (3): LNA-A
cuacacaaa

SEQ ID NO: 29149 - RNA, 10 nt, Artificial Sequence
  Description of Artificial Sequence: Synthetic oligonucleotide
  modified_base (3): LNA-A
cuacacaaau

SEQ ID NO: 29150 - RNA, 11 nt, Artificial Sequence
  Description of Artificial Sequence: Synthetic oligonucleotide
  modified_base (3): LNA-A
cuacacaaauc

SEQ ID NO: 29151 - RNA, 12 nt, Artificial Sequence
  Description of Artificial Sequence: Synthetic oligonucleotide
  modified_base (3): LNA-A
cuacacaaauca

SEQ ID NO: 29152 - RNA, 13 nt, Artificial Sequence
  Description of Artificial Sequence: Synthetic oligonucleotide
  modified_base (3): LNA-A
cuacacaaaucag

SEQ ID NO: 29153 - RNA, 14 nt, Artificial Sequence
  Description of Artificial Sequence: Synthetic oligonucleotide
  modified_base (3): LNA-A
cuacacaaaucagc

SEQ ID NO: 29154 - RNA, 13 nt, Artificial Sequence
  Description of Artificial Sequence: Synthetic oligonucleotide
  modified_base (2): LNA-G
ggaucuuauuucu

SEQ ID NO: 29155 - RNA, 14 nt, Artificial Sequence
  Description of Artificial Sequence: Synthetic oligonucleotide
  modified_base (2): LNA-G
ggaucuuauuucuu

SEQ ID NO: 29156 - RNA, 8 nt, Artificial Sequence
  Description of Artificial Sequence: Synthetic oligonucleotide
  modified_base (2): LNA-G
  modified_base (8): LNA-A
ggaucuua

SEQ ID NO: 29157 - RNA, 9 nt, Artificial Sequence
  Description of Artificial Sequence: Synthetic oligonucleotide
  modified_base (2): LNA-G
  modified_base (9): LNA-U
ggaucuuau

SEQ ID NO: 29158 - RNA, 10 nt, Artificial Sequence
  Description of Artificial Sequence: Synthetic oligonucleotide
  modified_base (2): LNA-G
  modified_base (10): LNA-U
ggaucuuauu

SEQ ID NO: 29159 - RNA, 11 nt, Artificial Sequence
  Description of Artificial Sequence: Synthetic oligonucleotide
  modified_base (2): LNA-G
  modified_base (11): LNA-U
ggaucuuauuu

SEQ ID NO: 29160 - RNA, 12 nt, Artificial Sequence
  Description of Artificial Sequence: Synthetic oligonucleotide
  modified_base (2): LNA-G
  modified_base (12): LNA-C
ggaucuuauuuc

SEQ ID NO: 29161 - RNA, 13 nt, Artificial Sequence
  Description of Artificial Sequence: Synthetic oligonucleotide
  modified_base (2): LNA-G
  modified_base (13): LNA-U
ggaucuuauuucu

SEQ ID NO: 29162 - RNA, 14 nt, Artificial Sequence
  Description of Artificial Sequence: Synthetic oligonucleotide
  modified_base (2): LNA-G
  modified_base (14): LNA-U
ggaucuuauuucuu

SEQ ID NO: 29163 - DNA, 13 bp, Artificial Sequence
  Description of Artificial Sequence: Synthetic oligonucleotide
  Description of Combined DNA/RNA Molecule: Synthetic oligonucleotide
  modified_base (8): LNA-G
uuucuucggagtt

SEQ ID NO: 29164 - DNA, 12 bp, Artificial Sequence
  Description of Artificial Sequence: Synthetic oligonucleotide
  Description of Combined DNA/RNA Molecule: Synthetic oligonucleotide
  modified_base (7): LNA-G
uucuucggagtt

SEQ ID NO: 29165 - DNA, 11 bp, Artificial Sequence
  Description of Artificial Sequence: Synthetic oligonucleotide
  Description of Combined DNA/RNA Molecule: Synthetic oligonucleotide
  modified_base (6): LNA-G
ucuucggagtt

SEQ ID NO: 29166 - DNA, 10 bp, Artificial Sequence
  Description of Artificial Sequence: Synthetic oligonucleotide
  Description of Combined DNA/RNA Molecule: Synthetic oligonucleotide
  modified_base (5): LNA-G
cuucggagtt

SEQ ID NO: 29167 - DNA, 9 bp, Artificial Sequence
  Description of Artificial Sequence: Synthetic oligonucleotide
  Description of Combined DNA/RNA Molecule: Synthetic oligonucleotide
  modified_base (4): LNA-G
uucggagtt

SEQ ID NO: 29168 - DNA, 8 bp, Artificial Sequence
  Description of Artificial Sequence: Synthetic oligonucleotide
  Description of Combined DNA/RNA Molecule: Synthetic oligonucleotide
  modified_base (3): LNA-G
ucggagtt

SEQ ID NO: 29169 - DNA, 7 bp, Artificial Sequence
  Description of Artificial Sequence: Synthetic oligonucleotide
  Description of Combined DNA/RNA Molecule: Synthetic oligonucleotide
  modified_base (2): LNA-G
cggagtt

SEQ ID NO: 29170 - DNA, 13 bp, Artificial Sequence
  Description of Artificial Sequence: Synthetic oligonucleotide
  Description of Combined DNA/RNA Molecule: Synthetic oligonucleotide
  modified_base (1): LNA-U
  modified_base (8): LNA-G
uuucuucggagtt

SEQ ID NO: 29171 - DNA, 12 bp, Artificial Sequence
  Description of Artificial Sequence: Synthetic oligonucleotide
  Description of Combined DNA/RNA Molecule: Synthetic oligonucleotide
  modified_base (1): LNA-U
  modified_base (7): LNA-G
uucuucggagtt

SEQ ID NO: 29172 - DNA, 11 bp, Artificial Sequence
  Description of Artificial Sequence: Synthetic oligonucleotide
  Description of Combined DNA/RNA Molecule: Synthetic oligonucleotide
  modified_base (1): LNA-U
  modified_base (6): LNA-G
ucuucggagtt

SEQ ID NO: 29173 - DNA, 10 bp, Artificial Sequence
  Description of Artificial Sequence: Synthetic oligonucleotide
  Description of Combined DNA/RNA Molecule: Synthetic oligonucleotide
  modified_base (1): LNA-C
  modified_base (5): LNA-G
cuucggagtt

SEQ ID NO: 29174 - DNA, 9 bp, Artificial Sequence
  Description of Artificial Sequence: Synthetic oligonucleotide
  Description of Combined DNA/RNA Molecule: Synthetic oligonucleotide
  modified_base (1): LNA-U
  modified_base (4): LNA-G
uucggagtt

SEQ ID NO: 29175 - DNA, 8 bp, Artificial Sequence
  Description of Artificial Sequence: Synthetic oligonucleotide
  Description of Combined DNA/RNA Molecule: Synthetic oligonucleotide
  modified_base (1): LNA-U
  modified_base (3): LNA-G
ucggagtt

SEQ ID NO: 29176 - DNA, 7 bp, Artificial Sequence
  Description of Artificial Sequence: Synthetic oligonucleotide
  Description of Combined DNA/RNA Molecule: Synthetic oligonucleotide
  modified_base (1): LNA-C
  modified_base (2): LNA-G
cggagtt

SEQ ID NO: 29177 - DNA, 21 bp, Artificial Sequence
  Description of Artificial Sequence: Synthetic oligonucleotide
  Description of Combined DNA/RNA Molecule: Synthetic oligonucleotide
  modified_base (2): LNA-G
  modified_base (16): LNA-G
ggaucuuauuucuucggagtt

SEQ ID NO: 29178 - DNA, 25 bp, Artificial Sequence
  Description of Artificial Sequence: Synthetic oligonucleotide
  Description of Combined DNA/RNA Molecule: Synthetic oligonucleotide
ggaucuuauuucuucggagacaatg

SEQ ID NO: 29179 - RNA, 25 nt, Artificial Sequence
  Description of Artificial Sequence: Synthetic oligonucleotide
uuaagcagaguucaaaagcccuuca

SEQ ID NO: 29180 - RNA, 25 nt, Artificial Sequence
  Description of Artificial Sequence: Synthetic oligonucleotide
uaagcagaguucaaaagcccuucag

SEQ ID NO: 29181 - RNA, 25 nt, Artificial Sequence
  Description of Artificial Sequence: Synthetic oligonucleotide
agcagaguucaaaagcccuucagcg

SEQ ID NO: 29182 - RNA, 25 nt, Artificial Sequence
  Description of Artificial Sequence: Synthetic oligonucleotide
cucagggucugagugaagccgcucg

SEQ ID NO: 29183 - RNA, 25 nt, Artificial Sequence
  Description of Artificial Sequence: Synthetic oligonucleotide
caagcaacuacaucacgccagucaa

SEQ ID NO: 29184 - RNA, 25 nt, Artificial Sequence
  Description of Artificial Sequence: Synthetic oligonucleotide
aucaauggcagcuucuuggugcgug

SEQ ID NO: 29185 - RNA, 25 nt, Artificial Sequence
  Description of Artificial Sequence: Synthetic oligonucleotide
uuccagcccacauuggauucaucag

SEQ ID NO: 29186 - RNA, 25 nt, Artificial Sequence
  Description of Artificial Sequence: Synthetic oligonucleotide
cagcugagaauguggaauaccuaag

SEQ ID NO: 29187 - RNA, 25 nt, Artificial Sequence
  Description of Artificial Sequence: Synthetic oligonucleotide
aacguaucuccuaauuugaggcuca

SEQ ID NO: 29188 - RNA, 25 nt, Artificial Sequence
  Description of Artificial Sequence: Synthetic oligonucleotide
ccuaaaauaauuucucuacaauugg

SEQ ID NO: 29189 - RNA, 25 nt, Artificial Sequence
  Description of Artificial Sequence: Synthetic oligonucleotide
uggaagauucagcuaguuaggagcc

SEQ ID NO: 29190 - RNA, 25 nt, Artificial Sequence
  Description of Artificial Sequence: Synthetic oligonucleotide
uuaaacucuccuagucaauauccac

SEQ ID NO: 29191 - RNA, 25 nt, Artificial Sequence
  Description of Artificial Sequence: Synthetic oligonucleotide
cagccuacaguuauguucagucaca

SEQ ID NO: 29192 - RNA, 25 nt, Artificial Sequence
  Description of Artificial Sequence: Synthetic oligonucleotide
guuauguucagucacacacacauac

SEQ ID NO: 29193 - RNA, 25 nt, Artificial Sequence
  Description of Artificial Sequence: Synthetic oligonucleotide
cacauacaaaauguuccuuuugcuu

SEQ ID NO: 29194 - RNA, 25 nt, Artificial Sequence
  Description of Artificial Sequence: Synthetic oligonucleotide
uccuuuugcuuuuaaaguaauuuuu

SEQ ID NO: 29195 - RNA, 25 nt, Artificial Sequence
  Description of Artificial Sequence: Synthetic oligonucleotide
ugaccugugaagcaacagucaaugg

SEQ ID NO: 29196 - RNA, 25 nt, Artificial Sequence
  Description of Artificial Sequence: Synthetic oligonucleotide
cuaucucacacaucgacaaaccaau

SEQ ID NO: 29197 - RNA, 25 nt, Artificial Sequence
  Description of Artificial Sequence: Synthetic oligonucleotide
uguccucaauuguacugcuaccacu

SEQ ID NO: 29198 - RNA, 25 nt, Artificial Sequence
  Description of Artificial Sequence: Synthetic oligonucleotide
aaaccguagcuggcaagcggucuua

SEQ ID NO: 29199 - RNA, 25 nt, Artificial Sequence
  Description of Artificial Sequence: Synthetic oligonucleotide
uagcuggcaagcggucuuaccggcu

SEQ ID NO: 29200 - RNA, 25 nt, Artificial Sequence
  Description of Artificial Sequence: Synthetic oligonucleotide
uuguaugguuaaaagauggguuacc

SEQ ID NO: 29201 - RNA, 25 nt, Artificial Sequence
  Description of Artificial Sequence: Synthetic oligonucleotide
ugguuaaaagauggguuaccugcga

SEQ ID NO: 29202 - RNA, 25 nt, Artificial Sequence
  Description of Artificial Sequence: Synthetic oligonucleotide
cagggaauuauacaaucuugcugag

SEQ ID NO: 29203 - RNA, 25 nt, Artificial Sequence
  Description of Artificial Sequence: Synthetic oligonucleotide
acaaucuugcugagcauaaaacagu

SEQ ID NO: 29204 - RNA, 25 nt, Artificial Sequence
  Description of Artificial Sequence: Synthetic oligonucleotide
ccaauaaugaagaguccuuuauccu

SEQ ID NO: 29205 - RNA, 25 nt, Artificial Sequence
  Description of Artificial Sequence: Synthetic oligonucleotide
acuuuggauguuccaacgcaaguug

SEQ ID NO: 29206 - RNA, 25 nt, Artificial Sequence
  Description of Artificial Sequence: Synthetic oligonucleotide
aaugcuuccacuaaacugaaaccau

SEQ ID NO: 29207 - RNA, 25 nt, Artificial Sequence
  Description of Artificial Sequence: Synthetic oligonucleotide
gagaaaguuugacuuuguuaaauau

SEQ ID NO: 29208 - RNA, 25 nt, Artificial Sequence
  Description of Artificial Sequence: Synthetic oligonucleotide
aaagaacuacuguauauuaaaaguu

SEQ ID NO: 29209 - RNA, 25 nt, Artificial Sequence
  Description of Artificial Sequence: Synthetic oligonucleotide
uuagaaauacggguuuugacuuaac

SEQ ID NO: 29210 - RNA, 25 nt, Artificial Sequence
  Description of Artificial Sequence: Synthetic oligonucleotide
aacauggguacagcaaacucagcac

SEQ ID NO: 29211 - RNA, 25 nt, Artificial Sequence
  Description of Artificial Sequence: Synthetic oligonucleotide
aaagacacagaagaugcugaccuca

SEQ ID NO: 29212 - RNA, 25 nt, Artificial Sequence
  Description of Artificial Sequence: Synthetic oligonucleotide
uaguagggagguuuauucagaucgc

SEQ ID NO: 29213 - RNA, 25 nt, Artificial Sequence
  Description of Artificial Sequence: Synthetic oligonucleotide
gccuucugcagcaggguucugggau

SEQ ID NO: 29214 - RNA, 25 nt, Artificial Sequence
  Description of Artificial Sequence: Synthetic oligonucleotide
ggucugguacauauuggaaauuaug

SEQ ID NO: 29215 - RNA, 25 nt, Artificial Sequence
  Description of Artificial Sequence: Synthetic oligonucleotide
cuaguccuuccgauggaagcacuag

SEQ ID NO: 29216 - RNA, 25 nt, Artificial Sequence
  Description of Artificial Sequence: Synthetic oligonucleotide
ccagugaauauuguuuuuaugugga

SEQ ID NO: 29217 - RNA, 25 nt, Artificial Sequence
  Description of Artificial Sequence: Synthetic oligonucleotide
augaauucaaguuggaauugguaga

SEQ ID NO: 29218 - RNA, 25 nt, Artificial Sequence
  Description of Artificial Sequence: Synthetic oligonucleotide
caggacacagauuuagacuuggaga

SEQ ID NO: 29219 - RNA, 25 nt, Artificial Sequence
  Description of Artificial Sequence: Synthetic oligonucleotide
cucaaagcacaguuacaguauucca

SEQ ID NO: 29220 - RNA, 25 nt, Artificial Sequence
  Description of Artificial Sequence: Synthetic oligonucleotide
accacugccaccacugaugaauuaa

SEQ ID NO: 29221 - RNA, 25 nt, Artificial Sequence
  Description of Artificial Sequence: Synthetic oligonucleotide
gaaacuacuagugccacaucaucac

SEQ ID NO: 29222 - RNA, 25 nt, Artificial Sequence
  Description of Artificial Sequence: Synthetic oligonucleotide
aagucggacagccucaccaaacaga

SEQ ID NO: 29223 - RNA, 25 nt, Artificial Sequence
  Description of Artificial Sequence: Synthetic oligonucleotide
gaaagcgaaaaauggaacaugaugg

SEQ ID NO: 29224 - RNA, 25 nt, Artificial Sequence
  Description of Artificial Sequence: Synthetic oligonucleotide
cccucugauuuagcauguagacugc

SEQ ID NO: 29225 - RNA, 25 nt, Artificial Sequence
  Description of Artificial Sequence: Synthetic oligonucleotide
ugagcuauuuaaggaucuauuuaug

SEQ ID NO: 29226 - RNA, 25 nt, Artificial Sequence
  Description of Artificial Sequence: Synthetic oligonucleotide
aaaaggugaaaaagcacuauuauca

SEQ ID NO: 29227 - RNA, 25 nt, Artificial Sequence
  Description of Artificial Sequence: Synthetic oligonucleotide
gaaaaagcacuauuaucaguucugc

SEQ ID NO: 29228 - RNA, 25 nt, Artificial Sequence
  Description of Artificial Sequence: Synthetic oligonucleotide
ggcugaaaagaaagauuaaaccuac

SEQ ID NO: 29229 - RNA, 25 nt, Artificial Sequence
  Description of Artificial Sequence: Synthetic oligonucleotide
uaaacccuuauaauaaaauccuucu

SEQ ID NO: 29230 - RNA, 25 nt, Artificial Sequence
  Description of Artificial Sequence: Synthetic oligonucleotide
cauacuauuagccaaugcuguagac

SEQ ID NO: 29231 - RNA, 25 nt, Artificial Sequence
  Description of Artificial Sequence: Synthetic oligonucleotide
gacagaagcauuuugauaggaauag

SEQ ID NO: 29232 - RNA, 25 nt, Artificial Sequence
  Description of Artificial Sequence: Synthetic oligonucleotide
agagcaaauaagauaauggcccuga

SEQ ID NO: 29233 - RNA, 25 nt, Artificial Sequence
  Description of Artificial Sequence: Synthetic oligonucleotide
ccaacauuuuucucuuccucaagca

SEQ ID NO: 29234 - RNA, 25 nt, Artificial Sequence
  Description of Artificial Sequence: Synthetic oligonucleotide
uuaaguaugagaaaaguucagccca

SEQ ID NO: 29235 - RNA, 25 nt, Artificial Sequence
  Description of Artificial Sequence: Synthetic oligonucleotide
caggaauaaagauggcugcugaacc

SEQ ID NO: 29236 - RNA, 25 nt, Artificial Sequence
  Description of Artificial Sequence: Synthetic oligonucleotide
aauuugaaugaccaaguucucuuca

SEQ ID NO: 29237 - RNA, 25 nt, Artificial Sequence
  Description of Artificial Sequence: Synthetic oligonucleotide
auguauaaagauagccagccuagag

SEQ ID NO: 29238 - RNA, 25 nt, Artificial Sequence
  Description of Artificial Sequence: Synthetic oligonucleotide
ggcuguaacuaucucugugaagugu

SEQ ID NO: 29239 - RNA, 25 nt, Artificial Sequence
  Description of Artificial Sequence: Synthetic oligonucleotide
ucugugaagugugagaaaauuucaa

SEQ ID NO: 29240 - RNA, 25 nt, Artificial Sequence
  Description of Artificial Sequence: Synthetic oligonucleotide
ccuuuaaggaaaugaauccuccuga

SEQ ID NO: 29241 - RNA, 25 nt, Artificial Sequence
  Description of Artificial Sequence: Synthetic oligonucleotide
aaggauacaaaaagugacaucauau

SEQ ID NO: 29242 - RNA, 25 nt, Artificial Sequence
  Description of Artificial Sequence: Synthetic oligonucleotide
agaugcaauuugaaucuucaucaua

SEQ ID NO: 29243 - RNA, 25 nt, Artificial Sequence
  Description of Artificial Sequence: Synthetic oligonucleotide
guucaaaacgaagacuagcuauuaa

SEQ ID NO: 29244 - RNA, 25 nt, Artificial Sequence
  Description of Artificial Sequence: Synthetic oligonucleotide
gugaaaccucaucucuacuaaaaau

SEQ ID NO: 29245 - RNA, 25 nt, Artificial Sequence
  Description of Artificial Sequence: Synthetic oligonucleotide
acgaaagagaagcucuaucucgccu

SEQ ID NO: 29246 - RNA, 25 nt, Artificial Sequence
  Description of Artificial Sequence: Synthetic oligonucleotide
cuccacaagcgccuucgguccaguu

SEQ ID NO: 29247 - RNA, 25 nt, Artificial Sequence
  Description of Artificial Sequence: Synthetic oligonucleotide
gagaagauuccaaagauguagccgc

SEQ ID NO: 29248 - RNA, 25 nt, Artificial Sequence
  Description of Artificial Sequence: Synthetic oligonucleotide
aaucuggauucaaugaggagacuug

SEQ ID NO: 29249 - RNA, 25 nt, Artificial Sequence
  Description of Artificial Sequence: Synthetic oligonucleotide
agaacagauuugagaguagugagga

SEQ ID NO: 29250 - RNA, 25 nt, Artificial Sequence
  Description of Artificial Sequence: Synthetic oligonucleotide
ccagagcugugcagaugaguacaaa

SEQ ID NO: 29251 - RNA, 25 nt, Artificial Sequence
  Description of Artificial Sequence: Synthetic oligonucleotide
ccucagauuguuguuguuaaugggc

SEQ ID NO: 29252 - RNA, 25 nt, Artificial Sequence
  Description of Artificial Sequence: Synthetic oligonucleotide
cuauuuuaauuauuuuuaauuuauu

SEQ ID NO: 29253 - RNA, 25 nt, Artificial Sequence
  Description of Artificial Sequence: Synthetic oligonucleotide
uuuaauuuauuaauauuuaaauaug

SEQ ID NO: 29254 - RNA, 25 nt, Artificial Sequence
  Description of Artificial Sequence: Synthetic oligonucleotide
augcaguuugaauauccuuuguuuc

SEQ ID NO: 29255 - RNA, 25 nt, Artificial Sequence
  Description of Artificial Sequence: Synthetic oligonucleotide
caugcugcuggcgucuaaguguuug

SEQ ID NO: 29256 - RNA, 25 nt, Artificial Sequence
  Description of Artificial Sequence: Synthetic oligonucleotide
agaugugcauuucaccugugacaaa

SEQ ID NO: 29257 - RNA, 25 nt, Artificial Sequence
  Description of Artificial Sequence: Synthetic oligonucleotide
ucaaaaccugugccaggcugaauua

SEQ ID NO: 29258 - RNA, 25 nt, Artificial Sequence
  Description of Artificial Sequence: Synthetic oligonucleotide
gaauguggguagucauucuuacaau

SEQ ID NO: 29259 - RNA, 25 nt, Artificial Sequence
  Description of Artificial Sequence: Synthetic oligonucleotide
auguggguagucauucuuacaauug

SEQ ID NO: 29260 - RNA, 25 nt, Artificial Sequence
  Description of Artificial Sequence: Synthetic oligonucleotide
ugaaaaugagcaucagagaguguac

SEQ ID NO: 29261 - RNA, 25 nt, Artificial Sequence
  Description of Artificial Sequence: Synthetic oligonucleotide
uugcuuuucauguagaacucagcag

SEQ ID NO: 29262 - RNA, 25 nt, Artificial Sequence
  Description of Artificial Sequence: Synthetic oligonucleotide
uguauuucuauauuuauuuucagua

SEQ ID NO: 29263 - RNA, 25 nt, Artificial Sequence
  Description of Artificial Sequence: Synthetic oligonucleotide
uuugauuaauguuucuuaaauggaa

SEQ ID NO: 29264 - RNA, 25 nt, Artificial Sequence
  Description of Artificial Sequence: Synthetic oligonucleotide
caacguguauagugccuaaaauugu

SEQ ID NO: 29265 - RNA, 25 nt, Artificial Sequence
  Description of Artificial Sequence: Synthetic oligonucleotide
cauauccuuggcuacuaacaucugg

SEQ ID NO: 29266 - RNA, 25 nt, Artificial Sequence
  Description of Artificial Sequence: Synthetic oligonucleotide
uacuaacaucuggagacugugagcu

SEQ ID NO: 29267 - RNA, 25 nt, Artificial Sequence
  Description of Artificial Sequence: Synthetic oligonucleotide
cauaaguugugugcuuuuuauuaau

SEQ ID NO: 29268 - RNA, 25 nt, Artificial Sequence
  Description of Artificial Sequence: Synthetic oligonucleotide
gcaucauuuuggcucuucuuacauu

SEQ ID NO: 29269 - RNA, 25 nt, Artificial Sequence
  Description of Artificial Sequence: Synthetic oligonucleotide
gcucuucuuacauuuguaaaaaugu

SEQ ID NO: 29270 - RNA, 25 nt, Artificial Sequence
  Description of Artificial Sequence: Synthetic oligonucleotide
agauuaggucaucuuaauucauauu

SEQ ID NO: 29271 - RNA, 25 nt, Artificial Sequence
  Description of Artificial Sequence: Synthetic oligonucleotide
auggaauugaaagaacuaaucauga

SEQ ID NO: 29272 - RNA, 25 nt, Artificial Sequence
  Description of Artificial Sequence: Synthetic oligonucleotide
cacacucauuccuucugcucuuggg

SEQ ID NO: 29273 - RNA, 25 nt, Artificial Sequence
  Description of Artificial Sequence: Synthetic oligonucleotide
uguagagguaaccaguagcuuugag

SEQ ID NO: 29274 - RNA, 25 nt, Artificial Sequence
  Description of Artificial Sequence: Synthetic oligonucleotide
caaccacaugccacguaauauuuca

SEQ ID NO: 29275 - RNA, 25 nt, Artificial Sequence
  Description of Artificial Sequence: Synthetic oligonucleotide
ucggaaacaaguuauucucuucacu

SEQ ID NO: 29276 - RNA, 25 nt, Artificial Sequence
  Description of Artificial Sequence: Synthetic oligonucleotide
acucccaauaacuaaugcuaagaaa

SEQ ID NO: 29277 - RNA, 25 nt, Artificial Sequence
  Description of Artificial Sequence: Synthetic oligonucleotide
aaugcuaagaaaugcugaaaaucaa

SEQ ID NO: 29278 - RNA, 25 nt, Artificial Sequence
  Description of Artificial Sequence: Synthetic oligonucleotide
gucuuucucuaaauaugauuacuuu

SEQ ID NO: 29279 - RNA, 25 nt, Artificial Sequence
  Description of Artificial Sequence: Synthetic oligonucleotide
ugaauuucaggcauuuuguucuaca

SEQ ID NO: 29280 - RNA, 25 nt, Artificial Sequence
  Description of Artificial Sequence: Synthetic oligonucleotide
cgauucccucucacccgggacucuc

SEQ ID NO: 29281 - RNA, 25 nt, Artificial Sequence
  Description of Artificial Sequence: Synthetic oligonucleotide
aggaaagugaaccuuuaaaguaaag

SEQ ID NO: 29282 - RNA, 25 nt, Artificial Sequence
  Description of Artificial Sequence: Synthetic oligonucleotide
gaggcugcaugcucuggaagccugg

SEQ ID NO: 29283 - RNA, 25 nt, Artificial Sequence
  Description of Artificial Sequence: Synthetic oligonucleotide
ucucugaacagaaaacaaaagagag

SEQ ID NO: 29284 - RNA, 25 nt, Artificial Sequence
  Description of Artificial Sequence: Synthetic oligonucleotide
aacuuggcuguaaucaguuaugccg

SEQ ID NO: 29285 - RNA, 25 nt, Artificial Sequence
  Description of Artificial Sequence: Synthetic oligonucleotide
agaagccaaaauuaaaagaagucca

SEQ ID NO: 29286 - RNA, 25 nt, Artificial Sequence
  Description of Artificial Sequence: Synthetic oligonucleotide
auuaaaagaaguccaggugagguua

SEQ ID NO: 29287 - RNA, 25 nt, Artificial Sequence
  Description of Artificial Sequence: Synthetic oligonucleotide
gaauccggauuaucgggaagaggac

SEQ ID NO: 29288 - RNA, 25 nt, Artificial Sequence
  Description of Artificial Sequence: Synthetic oligonucleotide
aaugugacaucaaagcaaguauugu

SEQ ID NO: 29289 - RNA, 25 nt, Artificial Sequence
  Description of Artificial Sequence: Synthetic oligonucleotide
caucaaagcaaguauuguagcacuc

SEQ ID NO: 29290 - RNA, 25 nt, Artificial Sequence
  Description of Artificial Sequence: Synthetic oligonucleotide
agagagagaaaacaaaaccacaaau

SEQ ID NO: 29291 - RNA, 25 nt, Artificial Sequence
  Description of Artificial Sequence: Synthetic oligonucleotide
ucgcuguaguauuuaagcccauaca

SEQ ID NO: 29292 - RNA, 25 nt, Artificial Sequence
  Description of Artificial Sequence: Synthetic oligonucleotide
cgcuguaguauuuaagcccauacag

SEQ ID NO: 29293 - RNA, 25 nt, Artificial Sequence
  Description of Artificial Sequence: Synthetic oligonucleotide
auuuaagcccauacagaaaccuucc

SEQ ID NO: 29294 - RNA, 25 nt, Artificial Sequence
  Description of Artificial Sequence: Synthetic oligonucleotide
auuaaaauaaacaugguauaccuac

SEQ ID NO: 29295 - RNA, 25 nt, Artificial Sequence
  Description of Artificial Sequence: Synthetic oligonucleotide
cuguucugaucggccaguuuucgga

SEQ ID NO: 29296 - RNA, 25 nt, Artificial Sequence
  Description of Artificial Sequence: Synthetic oligonucleotide
aaauaauuugaacuuuggaacaggg

SEQ ID NO: 29297 - RNA, 25 nt, Artificial Sequence
  Description of Artificial Sequence: Synthetic oligonucleotide
ugcgaccuuaauuuaacuuuccagu

SEQ ID NO: 29298 - RNA, 25 nt, Artificial Sequence
  Description of Artificial Sequence: Synthetic oligonucleotide
cugagaaagcuaaaguuugguuuug

SEQ ID NO: 29299 - RNA, 25 nt, Artificial Sequence
  Description of Artificial Sequence: Synthetic oligonucleotide
aguaaagaugcuacuucccacugua

SEQ ID NO: 29300 - RNA, 25 nt, Artificial Sequence
  Description of Artificial Sequence: Synthetic oligonucleotide
cugcuuaauugcugauaccauauga

SEQ ID NO: 29301 - RNA, 25 nt, Artificial Sequence
  Description of Artificial Sequence: Synthetic oligonucleotide
uaccauaugaaugaaacaugggcug

SEQ ID NO: 29302 - RNA, 25 nt, Artificial Sequence
  Description of Artificial Sequence: Synthetic oligonucleotide
aacuuucuuauccaacuuuuucaua

SEQ ID NO: 29303 - RNA, 25 nt, Artificial Sequence
  Description of Artificial Sequence: Synthetic oligonucleotide
ccuugcaugacaucaugaggccgga

SEQ ID NO: 29304 - RNA, 25 nt, Artificial Sequence
  Description of Artificial Sequence: Synthetic oligonucleotide
ugaauuuguauaugacugcauuugu

SEQ ID NO: 29305 - RNA, 25 nt, Artificial Sequence
  Description of Artificial Sequence: Synthetic oligonucleotide
gaauccuaguagaauguuuacuacc

SEQ ID NO: 29306 - RNA, 25 nt, Artificial Sequence
  Description of Artificial Sequence: Synthetic oligonucleotide
gaaagggaagaauuuuuugaugaaa

SEQ ID NO: 29307 - RNA, 25 nt, Artificial Sequence
  Description of Artificial Sequence: Synthetic oligonucleotide
uaucggcaugccagugugugaauuu

SEQ ID NO: 29308 - RNA, 25 nt, Artificial Sequence
  Description of Artificial Sequence: Synthetic oligonucleotide
caccucauaguagagcaauguaugu

SEQ ID NO: 29309 - RNA, 25 nt, Artificial Sequence
  Description of Artificial Sequence: Synthetic oligonucleotide
ccagaauugccaaagcacauauaua

SEQ ID NO: 29310 - RNA, 25 nt, Artificial Sequence
  Description of Artificial Sequence: Synthetic oligonucleotide
uggugaucuggguaauaguuucucc

SEQ ID NO: 29311 - RNA, 25 nt, Artificial Sequence
  Description of Artificial Sequence: Synthetic oligonucleotide
gaucuggguaauaguuucuccaaau

SEQ ID NO: 29312 - RNA, 25 nt, Artificial Sequence
  Description of Artificial Sequence: Synthetic oligonucleotide
ggaugugaugaauacuuccuagaaa

SEQ ID NO: 29313 - RNA, 25 nt, Artificial Sequence
  Description of Artificial Sequence: Synthetic oligonucleotide
cauuuccacagcuacaccauauaug

SEQ ID NO: 29314 - RNA, 25 nt, Artificial Sequence
  Description of Artificial Sequence: Synthetic oligonucleotide
acagcuacaccauauaugaauggag

SEQ ID NO: 29315 - RNA, 25 nt, Artificial Sequence
  Description of Artificial Sequence: Synthetic oligonucleotide
ugcaguucuuacacgagaagaagau

SEQ ID NO: 29316 - RNA, 25 nt, Artificial Sequence
  Description of Artificial Sequence: Synthetic oligonucleotide
acgagaagaagaucauuuacaggga

SEQ ID NO: 29317 - RNA, 25 nt, Artificial Sequence
  Description of Artificial Sequence: Synthetic oligonucleotide
cgagaagaagaucauuuacagggac

SEQ ID NO: 29318 - RNA, 25 nt, Artificial Sequence
  Description of Artificial Sequence: Synthetic oligonucleotide
aagaagaucauuuacagggaccuga

SEQ ID NO: 29319 - RNA, 25 nt, Artificial Sequence
  Description of Artificial Sequence: Synthetic oligonucleotide
agaggaagagguguuugacugcauc

SEQ ID NO: 29320 - RNA, 25 nt, Artificial Sequence
  Description of Artificial Sequence: Synthetic oligonucleotide
gaggaagagguguuugacugcaucg

SEQ ID NO: 29321 - RNA, 25 nt, Artificial Sequence
  Description of Artificial Sequence: Synthetic oligonucleotide
cuacuuugagggcgaguucacaggg

SEQ ID NO: 29322 - RNA, 25 nt, Artificial Sequence
  Description of Artificial Sequence: Synthetic oligonucleotide
agggcaucuccuggcaccucugucc

SEQ ID NO: 29323 - RNA, 25 nt, Artificial Sequence
  Description of Artificial Sequence: Synthetic oligonucleotide
ggagugauaugguuugucuuuuuaa

SEQ ID NO: 29324 - RNA, 25 nt, Artificial Sequence
  Description of Artificial Sequence: Synthetic oligonucleotide
gagugauaugguuugucuuuuuaag

SEQ ID NO: 29325 - RNA, 25 nt, Artificial Sequence
  Description of Artificial Sequence: Synthetic oligonucleotide
ugcaguaaagauccuaaagguuguc

SEQ ID NO: 29326 - RNA, 25 nt, Artificial Sequence
  Description of Artificial Sequence: Synthetic oligonucleotide
aguaaagauccuaaagguugucgac

SEQ ID NO: 29327 - RNA, 25 nt, Artificial Sequence
  Description of Artificial Sequence: Synthetic oligonucleotide
ugacaaaggacaaccuggcaauugu

SEQ ID NO: 29328 - RNA, 25 nt, Artificial Sequence
  Description of Artificial Sequence: Synthetic oligonucleotide
gcaauugugacccaguggugcgagg

SEQ ID NO: 29329 - RNA, 25 nt, Artificial Sequence
  Description of Artificial Sequence: Synthetic oligonucleotide
aacaucauccauagagacaugaaau

SEQ ID NO: 29330 - RNA, 25 nt, Artificial Sequence
  Description of Artificial Sequence: Synthetic oligonucleotide
ugaaauccaacaauauauuucucca

SEQ ID NO: 29331 - RNA, 25 nt, Artificial Sequence
  Description of Artificial Sequence: Synthetic oligonucleotide
aacaauauauuucuccaugaaggcu

SEQ ID NO: 29332 - RNA, 25 nt, Artificial Sequence
  Description of Artificial Sequence: Synthetic oligonucleotide
aacaguaaagucacgcuggaguggu

SEQ ID NO: 29333 - RNA, 25 nt, Artificial Sequence
  Description of Artificial Sequence: Synthetic oligonucleotide
ugugaagaaaguaaaggaagagagg

SEQ ID NO: 29334 - RNA, 25 nt, Artificial Sequence
  Description of Artificial Sequence: Synthetic oligonucleotide
cuuccgagccauccuugcaucgggc

SEQ ID NO: 29335 - RNA, 25 nt, Artificial Sequence
  Description of Artificial Sequence: Synthetic oligonucleotide
aauggagguugaauauccuacugug

SEQ ID NO: 29336 - RNA, 25 nt, Artificial Sequence
  Description of Artificial Sequence: Synthetic oligonucleotide
ggagguugaauauccuacuguguaa

SEQ ID NO: 29337 - RNA, 25 nt, Artificial Sequence
  Description of Artificial Sequence: Synthetic oligonucleotide
auuuugaguuuucccuuguagugua

SEQ ID NO: 29338 - RNA, 25 nt, Artificial Sequence
  Description of Artificial Sequence: Synthetic oligonucleotide
uauccuguuuguucuuuguugauug

SEQ ID NO: 29339 - RNA, 25 nt, Artificial Sequence
  Description of Artificial Sequence: Synthetic oligonucleotide
ccuguuuguucuuuguugauugaaa

SEQ ID NO: 29340 - RNA, 25 nt, Artificial Sequence
  Description of Artificial Sequence: Synthetic oligonucleotide
cucuacagccuucuuuuucuuccau

SEQ ID NO: 29341 - RNA, 25 nt, Artificial Sequence
  Description of Artificial Sequence: Synthetic oligonucleotide
ucuuccauagcuaaucuuccuucua

SEQ ID NO: 29342 - RNA, 25 nt, Artificial Sequence
  Description of Artificial Sequence: Synthetic oligonucleotide
auaaucuuccuguugaaugcuucau

SEQ ID NO: 29343 - RNA, 25 nt, Artificial Sequence
  Description of Artificial Sequence: Synthetic oligonucleotide
uaaucuuccuguugaaugcuucaug

SEQ ID NO: 29344 - RNA, 25 nt, Artificial Sequence
  Description of Artificial Sequence: Synthetic oligonucleotide
cuucaugacuugaauucuacuuuga

SEQ ID NO: 29345 - RNA, 25 nt, Artificial Sequence
  Description of Artificial Sequence: Synthetic oligonucleotide
aagagggagagaagcaacuacagac

SEQ ID NO: 29346 - RNA, 25 nt, Artificial Sequence
  Description of Artificial Sequence: Synthetic oligonucleotide
cgucuccuaccagaccaaggucaac

SEQ ID NO: 29347 - RNA, 25 nt, Artificial Sequence
  Description of Artificial Sequence: Synthetic oligonucleotide
gaucaaucggcccgacuaucucgac

SEQ ID NO: 29348 - RNA, 25 nt, Artificial Sequence
  Description of Artificial Sequence: Synthetic oligonucleotide
ggacgaacauccaaccuucccaaac

SEQ ID NO: 29349 - RNA, 25 nt, Artificial Sequence
  Description of Artificial Sequence: Synthetic oligonucleotide
agggucggaacccaagcuuagaacu

SEQ ID NO: 29350 - RNA, 25 nt, Artificial Sequence
  Description of Artificial Sequence: Synthetic oligonucleotide
ucggaacccaagcuuagaacuuuaa

SEQ ID NO: 29351 - RNA, 25 nt, Artificial Sequence
  Description of Artificial Sequence: Synthetic oligonucleotide
acccaagcuuagaacuuuaagcaac

SEQ ID NO: 29352 - RNA, 25 nt, Artificial Sequence
  Description of Artificial Sequence: Synthetic oligonucleotide
gaacuuuaagcaacaagaccaccac

SEQ ID NO: 29353 - RNA, 25 nt, Artificial Sequence
  Description of Artificial Sequence: Synthetic oligonucleotide
acuauucaguggcgagaaauaaagu

SEQ ID NO: 29354 - RNA, 25 nt, Artificial Sequence
  Description of Artificial Sequence: Synthetic oligonucleotide
cuauucaguggcgagaaauaaaguu

SEQ ID NO: 29355 - RNA, 25 nt, Artificial Sequence
  Description of Artificial Sequence: Synthetic oligonucleotide
aaacacagauaacaggaaaugaucc

SEQ ID NO: 29356 - RNA, 25 nt, Artificial Sequence
  Description of Artificial Sequence: Synthetic oligonucleotide
cuuaagaaaagagaagaaaugaaac

SEQ ID NO: 29357 - RNA, 25 nt, Artificial Sequence
  Description of Artificial Sequence: Synthetic oligonucleotide
cugaaggaguguguuuccauccucc

SEQ ID NO: 29358 - RNA, 25 nt, Artificial Sequence
  Description of Artificial Sequence: Synthetic oligonucleotide
ucaccgcgggacugaaaaucuuuga

SEQ ID NO: 29359 - RNA, 25 nt, Artificial Sequence
  Description of Artificial Sequence: Synthetic oligonucleotide
agcagaaauaagcgugccguucagg

SEQ ID NO: 29360 - RNA, 25 nt, Artificial Sequence
  Description of Artificial Sequence: Synthetic oligonucleotide
aagcgugccguucaggguccagaag

SEQ ID NO: 29361 - RNA, 25 nt, Artificial Sequence
  Description of Artificial Sequence: Synthetic oligonucleotide
agaaacagucacucaagacugcuug

SEQ ID NO: 29362 - RNA, 25 nt, Artificial Sequence
  Description of Artificial Sequence: Synthetic oligonucleotide
agaggaagaagguccaugucuuugg

SEQ ID NO: 29363 - RNA, 25 nt, Artificial Sequence
  Description of Artificial Sequence: Synthetic oligonucleotide
uguauucaaaauaugccugaaacac

SEQ ID NO: 29364 - RNA, 25 nt, Artificial Sequence
  Description of Artificial Sequence: Synthetic oligonucleotide
auuuuccucccuuucucuguaccuc

SEQ ID NO: 29365 - RNA, 25 nt, Artificial Sequence
  Description of Artificial Sequence: Synthetic oligonucleotide
caaagaaagauagagcaagacaaga

SEQ ID NO: 29366 - RNA, 25 nt, Artificial Sequence
  Description of Artificial Sequence: Synthetic oligonucleotide
aagaaagauagagcaagacaagaaa

SEQ ID NO: 29367 - RNA, 25 nt, Artificial Sequence
  Description of Artificial Sequence: Synthetic oligonucleotide
gaaagcauuuguuuguacaagaucc

SEQ ID NO: 29368 - RNA, 25 nt, Artificial Sequence
  Description of Artificial Sequence: Synthetic oligonucleotide
ugaguuaaacgaacguacuugcaga

SEQ ID NO: 29369 - RNA, 25 nt, Artificial Sequence
  Description of Artificial Sequence: Synthetic oligonucleotide
acugauacagaacgaucgauacaga

SEQ ID NO: 29370 - RNA, 25 nt, Artificial Sequence
  Description of Artificial Sequence: Synthetic oligonucleotide
auauuauauauauauaaaaauaaau

SEQ ID NO: 29371 - RNA, 25 nt, Artificial Sequence
  Description of Artificial Sequence: Synthetic oligonucleotide
auuauauauauauaaaaauaaauau

SEQ ID NO: 29372 - RNA, 25 nt, Artificial Sequence
  Description of Artificial Sequence: Synthetic oligonucleotide
ucacuggauguauuugacugcugug

SEQ ID NO: 29373 - RNA, 25 nt, Artificial Sequence
  Description of Artificial Sequence: Synthetic oligonucleotide
cagggaagaggaggagaugagagac

SEQ ID NO: 29374 - RNA, 25 nt, Artificial Sequence
  Description of Artificial Sequence: Synthetic oligonucleotide
augaucuuuuuuuugucccacuugg

SEQ ID NO: 29375 - RNA, 27 nt, Artificial Sequence
  Description of Artificial Sequence: Synthetic oligonucleotide
ggccgugaacuccucaucaaaauaccu

SEQ ID NO: 29376 - RNA, 27 nt, Artificial Sequence
  Description of Artificial Sequence: Synthetic oligonucleotide
uggugugauggugaucaucugggccgu

SEQ ID NO: 29377 - RNA, 27 nt, Artificial Sequence
  Description of Artificial Sequence: Synthetic oligonucleotide
aaacccgcaggauaguuuucuucccua

SEQ ID NO: 29378 - RNA, 27 nt, Artificial Sequence
  Description of Artificial Sequence: Synthetic oligonucleotide
caaacuggaugaaauaaauuaaaaccc

SEQ ID NO: 29379 - RNA, 27 nt, Artificial Sequence
  Description of Artificial Sequence: Synthetic oligonucleotide
agaaguccuuaacauuucccuacguga

SEQ ID NO: 29380 - RNA, 27 nt, Artificial Sequence
  Description of Artificial Sequence: Synthetic oligonucleotide
cucugucccacuggguaaacccuggcc

SEQ ID NO: 29381 - RNA, 27 nt, Artificial Sequence
  Description of Artificial Sequence: Synthetic oligonucleotide
cacaauaacaaauuuaaaccuugcucc

SEQ ID NO: 29382 - RNA, 27 nt, Artificial Sequence
  Description of Artificial Sequence: Synthetic oligonucleotide
aaaugcauuugaacaacauaauacaca

SEQ ID NO: 29383 - RNA, 27 nt, Artificial Sequence
  Description of Artificial Sequence: Synthetic oligonucleotide
ggcuuuccugucacaaagauuaaaaac

SEQ ID NO: 29384 - RNA, 27 nt, Artificial Sequence
  Description of Artificial Sequence: Synthetic oligonucleotide
agggcuuuccugucacaaagauuaaaa

SEQ ID NO: 29385 - RNA, 27 nt, Artificial Sequence
  Description of Artificial Sequence: Synthetic oligonucleotide
ggccaugcugggagacauaagcagcag

SEQ ID NO: 29386 - RNA, 27 nt, Artificial Sequence
  Description of Artificial Sequence: Synthetic oligonucleotide
ucagggagaagcuucugaaacacuucu

SEQ ID NO: 29387 - RNA, 27 nt, Artificial Sequence
  Description of Artificial Sequence: Synthetic oligonucleotide
aagggcuucuuccuuauugauggucag

SEQ ID NO: 29388 - RNA, 27 nt, Artificial Sequence
  Description of Artificial Sequence: Synthetic oligonucleotide
ugaagggcuucuuccuuauugaugguc

SEQ ID NO: 29389 - RNA, 27 nt, Artificial Sequence
  Description of Artificial Sequence: Synthetic oligonucleotide
cgcugaagggcuucuuccuuauugaug

SEQ ID NO: 29390 - RNA, 27 nt, Artificial Sequence
  Description of Artificial Sequence: Synthetic oligonucleotide
gccgcugaagggcuucuuccuuauuga

SEQ ID NO: 29391 - RNA, 27 nt, Artificial Sequence
  Description of Artificial Sequence: Synthetic oligonucleotide
acuggccgcugaagggcuucuuccuua

SEQ ID NO: 29392 - RNA, 27 nt, Artificial Sequence
  Description of Artificial Sequence: Synthetic oligonucleotide
cggagcuuuucaccuuuaguuaugcuu

SEQ ID NO: 29393 - RNA, 27 nt, Artificial Sequence
  Description of Artificial Sequence: Synthetic oligonucleotide
ccggagcuuuucaccuuuaguuaugcu

SEQ ID NO: 29394 - RNA, 27 nt, Artificial Sequence
  Description of Artificial Sequence: Synthetic oligonucleotide
cagacuguugacuggcgugauguaguu

SEQ ID NO: 29395 - RNA, 27 nt, Artificial Sequence
  Description of Artificial Sequence: Synthetic oligonucleotide
cuuuugaacucugcuuaaauccagugg

SEQ ID NO: 29396 - RNA, 27 nt, Artificial Sequence
  Description of Artificial Sequence: Synthetic oligonucleotide
gcuuuugaacucugcuuaaauccagug

SEQ ID NO: 29397 - RNA, 27 nt, Artificial Sequence
  Description of Artificial Sequence: Synthetic oligonucleotide
agggcuuuugaacucugcuuaaaucca

SEQ ID NO: 29398 - RNA, 27 nt, Artificial Sequence
  Description of Artificial Sequence: Synthetic oligonucleotide
aagggcuuuugaacucugcuuaaaucc

SEQ ID NO: 29399 - RNA, 27 nt, Artificial Sequence
  Description of Artificial Sequence: Synthetic oligonucleotide
ugaagggcuuuugaacucugcuuaaau

SEQ ID NO: 29400 - RNA, 27 nt, Artificial Sequence
  Description of Artificial Sequence: Synthetic oligonucleotide
cugaagggcuuuugaacucugcuuaaa

SEQ ID NO: 29401 - RNA, 27 nt, Artificial Sequence
  Description of Artificial Sequence: Synthetic oligonucleotide
cgcugaagggcuuuugaacucugcuua

SEQ ID NO: 29402 - RNA, 27 nt, Artificial Sequence
  Description of Artificial Sequence: Synthetic oligonucleotide
cgagcggcuucacucagacccugaggc

SEQ ID NO: 29403 - RNA, 27 nt, Artificial Sequence
  Description of Artificial Sequence: Synthetic oligonucleotide
uugacuggcgugauguaguugcuuggg

SEQ ID NO: 29404 - RNA, 27 nt, Artificial Sequence
  Description of Artificial Sequence: Synthetic oligonucleotide
cacgcaccaagaagcugccauugaucc

SEQ ID NO: 29405 - RNA, 27 nt, Artificial Sequence
  Description of Artificial Sequence: Synthetic oligonucleotide
cugaugaauccaaugugggcuggaauc

SEQ ID NO: 29406 - RNA, 27 nt, Artificial Sequence
  Description of Artificial Sequence: Synthetic oligonucleotide
cuuagguauuccacauucucagcugug

SEQ ID NO: 29407 - RNA, 27 nt, Artificial Sequence
  Description of Artificial Sequence: Synthetic oligonucleotide
ugagccucaaauuaggagauacguuuu

SEQ ID NO: 29408 - RNA, 27 nt, Artificial Sequence
  Description of Artificial Sequence: Synthetic oligonucleotide
ccaauuguagagaaauuauuuuaggaa

SEQ ID NO: 29409 - RNA, 27 nt, Artificial Sequence
  Description of Artificial Sequence: Synthetic oligonucleotide
ggcuccuaacuagcugaaucuuccaau

SEQ ID NO: 29410 - RNA, 27 nt, Artificial Sequence
  Description of Artificial Sequence: Synthetic oligonucleotide
guggauauugacuaggagaguuuaaaa

SEQ ID NO: 29411 - RNA, 27 nt, Artificial Sequence
  Description of Artificial Sequence: Synthetic oligonucleotide
ugugacugaacauaacuguaggcugaa

SEQ ID NO: 29412 - RNA, 27 nt, Artificial Sequence
  Description of Artificial Sequence: Synthetic oligonucleotide
guaugugugugugacugaacauaacug

SEQ ID NO: 29413 - RNA, 27 nt, Artificial Sequence
  Description of Artificial Sequence: Synthetic oligonucleotide
aagcaaaaggaacauuuuguaugugug

SEQ ID NO: 29414 - RNA, 27 nt, Artificial Sequence
  Description of Artificial Sequence: Synthetic oligonucleotide
aaaaauuacuuuaaaagcaaaaggaac

SEQ ID NO: 29415 - RNA, 27 nt, Artificial Sequence
  Description of Artificial Sequence: Synthetic oligonucleotide
ccauugacuguugcuucacaggucaga

SEQ ID NO: 29416 - RNA, 27 nt, Artificial Sequence
  Description of Artificial Sequence: Synthetic oligonucleotide
auugguuugucgaugugugagauaguu

SEQ ID NO: 29417 - RNA, 27 nt, Artificial Sequence
  Description of Artificial Sequence: Synthetic oligonucleotide
agugguagcaguacaauugaggacaag

SEQ ID NO: 29418 - RNA, 27 nt, Artificial Sequence
  Description of Artificial Sequence: Synthetic oligonucleotide
uaagaccgcuugccagcuacgguuuca

SEQ ID NO: 29419 - RNA, 27 nt, Artificial Sequence
  Description of Artificial Sequence: Synthetic oligonucleotide
agccgguaagaccgcuugccagcuacg

SEQ ID NO: 29420 - RNA, 27 nt, Artificial Sequence
  Description of Artificial Sequence: Synthetic oligonucleotide
gguaacccaucuuuuaaccauacaacu

SEQ ID NO: 29421 - RNA, 27 nt, Artificial Sequence
  Description of Artificial Sequence: Synthetic oligonucleotide
ucgcagguaacccaucuuuuaaccaua

SEQ ID NO: 29422 - RNA, 27 nt, Artificial Sequence
  Description of Artificial Sequence: Synthetic oligonucleotide
cucagcaagauuguauaauucccugca

SEQ ID NO: 29423 - RNA, 27 nt, Artificial Sequence
  Description of Artificial Sequence: Synthetic oligonucleotide
acuguuuuaugcucagcaagauuguau

SEQ ID NO: 29424 - RNA, 27 nt, Artificial Sequence
  Description of Artificial Sequence: Synthetic oligonucleotide
aggauaaaggacucuucauuauuggaa

SEQ ID NO: 29425 - RNA, 27 nt, Artificial Sequence
  Description of Artificial Sequence: Synthetic oligonucleotide
caacuugcguuggaacauccaaagugu

SEQ ID NO: 29426 - RNA, 27 nt, Artificial Sequence
  Description of Artificial Sequence: Synthetic oligonucleotide
augguuucaguuuaguggaagcauuua

SEQ ID NO: 29427 - RNA, 27 nt, Artificial Sequence
  Description of Artificial Sequence: Synthetic oligonucleotide
auauuuaacaaagucaaacuuucucac

SEQ ID NO: 29428 - RNA, 27 nt, Artificial Sequence
  Description of Artificial Sequence: Synthetic oligonucleotide
aacuuuuaauauacaguaguucuuuuc

SEQ ID NO: 29429 - RNA, 27 nt, Artificial Sequence
  Description of Artificial Sequence: Synthetic oligonucleotide
guuaagucaaaacccguauuucuaaag

SEQ ID NO: 29430 - RNA, 27 nt, Artificial Sequence
  Description of Artificial Sequence: Synthetic oligonucleotide
gugcugaguuugcuguacccauguuga

SEQ ID NO: 29431 - RNA, 27 nt, Artificial Sequence
  Description of Artificial Sequence: Synthetic oligonucleotide
ugaggucagcaucuucugugucuuuac

SEQ ID NO: 29432 - RNA, 27 nt, Artificial Sequence
  Description of Artificial Sequence: Synthetic oligonucleotide
gcgaucugaauaaaccucccuacuagc

SEQ ID NO: 29433 - RNA, 27 nt, Artificial Sequence
  Description of Artificial Sequence: Synthetic oligonucleotide
aucccagaacccugcugcagaaggcca

SEQ ID NO: 29434 - RNA, 27 nt, Artificial Sequence
  Description of Artificial Sequence: Synthetic oligonucleotide
cauaauuuccaauauguaccagaccuu

SEQ ID NO: 29435 - RNA, 27 nt, Artificial Sequence
  Description of Artificial Sequence: Synthetic oligonucleotide
cuagugcuuccaucggaaggacuaggu

SEQ ID NO: 29436 - RNA, 27 nt, Artificial Sequence
  Description of Artificial Sequence: Synthetic oligonucleotide
uccacauaaaaacaauauucacuggga

SEQ ID NO: 29437 - RNA, 27 nt, Artificial Sequence
  Description of Artificial Sequence: Synthetic oligonucleotide
ucuaccaauuccaacuugaauucauug

SEQ ID NO: 29438 - RNA, 27 nt, Artificial Sequence
  Description of Artificial Sequence: Synthetic oligonucleotide
ucuccaagucuaaaucuguguccugag

SEQ ID NO: 29439 - RNA, 27 nt, Artificial Sequence
  Description of Artificial Sequence: Synthetic oligonucleotide
uggaauacuguaacugugcuuugagga

SEQ ID NO: 29440 - RNA, 27 nt, Artificial Sequence
  Description of Artificial Sequence: Synthetic oligonucleotide
uuaauucaucagugguggcagugguag

SEQ ID NO: 29441 - RNA, 27 nt, Artificial Sequence
  Description of Artificial Sequence: Synthetic oligonucleotide
gugaugauguggcacuaguaguuucuu

SEQ ID NO: 29442 - RNA, 27 nt, Artificial Sequence
  Description of Artificial Sequence: Synthetic oligonucleotide
ucuguuuggugaggcuguccgacuuug

SEQ ID NO: 29443 - RNA, 27 nt, Artificial Sequence
  Description of Artificial Sequence: Synthetic oligonucleotide
ccaucauguuccauuuuucgcuuucuc

SEQ ID NO: 29444 - RNA, 27 nt, Artificial Sequence
  Description of Artificial Sequence: Synthetic oligonucleotide
gcagucuacaugcuaaaucagagggua

SEQ ID NO: 29445 - RNA, 27 nt, Artificial Sequence
  Description of Artificial Sequence: Synthetic oligonucleotide
cauaaauagauccuuaaauagcucaaa

SEQ ID NO: 29446 - RNA, 27 nt, Artificial Sequence
  Description of Artificial Sequence: Synthetic oligonucleotide
ugauaauagugcuuuuucaccuuuuuc

SEQ ID NO: 29447 - RNA, 27 nt, Artificial Sequence
  Description of Artificial Sequence: Synthetic oligonucleotide
gcagaacugauaauagugcuuuuucac

SEQ ID NO: 29448 - RNA, 27 nt, Artificial Sequence
  Description of Artificial Sequence: Synthetic oligonucleotide
guagguuuaaucuuucuuuucagccau

SEQ ID NO: 29449 - RNA, 27 nt, Artificial Sequence
  Description of Artificial Sequence: Synthetic oligonucleotide
agaaggauuuuauuauaaggguuuaau

SEQ ID NO: 29450 - RNA, 27 nt, Artificial Sequence
  Description of Artificial Sequence: Synthetic oligonucleotide
gucuacagcauuggcuaauaguaugaa

SEQ ID NO: 29451 - RNA, 27 nt, Artificial Sequence
  Description of Artificial Sequence: Synthetic oligonucleotide
cuauuccuaucaaaaugcuucugucua

SEQ ID NO: 29452 - RNA, 27 nt, Artificial Sequence
  Description of Artificial Sequence: Synthetic oligonucleotide
ucagggccauuaucuuauuugcucuau

SEQ ID NO: 29453 - RNA, 27 nt, Artificial Sequence
  Description of Artificial Sequence: Synthetic oligonucleotide
ugcuugaggaagagaaaaauguugguc

SEQ ID NO: 29454 - RNA, 27 nt, Artificial Sequence
  Description of Artificial Sequence: Synthetic oligonucleotide
ugggcugaacuuuucucauacuuaaag

SEQ ID NO: 29455 - RNA, 27 nt, Artificial Sequence
  Description of Artificial Sequence: Synthetic oligonucleotide
gguucagcagccaucuuuauuccugcg

SEQ ID NO: 29456 - RNA, 27 nt, Artificial Sequence
  Description of Artificial Sequence: Synthetic oligonucleotide
ugaagagaacuuggucauucaaauuuc

SEQ ID NO: 29457 - RNA, 27 nt, Artificial Sequence
  Description of Artificial Sequence: Synthetic oligonucleotide
cucuaggcuggcuaucuuuauacauac

SEQ ID NO: 29458 - RNA, 27 nt, Artificial Sequence
  Description of Artificial Sequence: Synthetic oligonucleotide
acacuucacagagauaguuacagccau

SEQ ID NO: 29459 - RNA, 27 nt, Artificial Sequence
  Description of Artificial Sequence: Synthetic oligonucleotide
uugaaauuuucucacacuucacagaga

SEQ ID NO: 29460 - RNA, 27 nt, Artificial Sequence
  Description of Artificial Sequence: Synthetic oligonucleotide
ucaggaggauucauuuccuuaaaggaa

SEQ ID NO: 29461 - RNA, 27 nt, Artificial Sequence
  Description of Artificial Sequence: Synthetic oligonucleotide
auaugaugucacuuuuuguauccuuga

SEQ ID NO: 29462 - RNA, 27 nt, Artificial Sequence
  Description of Artificial Sequence: Synthetic oligonucleotide
uaugaugaagauucaaauugcaucuua

SEQ ID NO: 29463 - RNA, 27 nt, Artificial Sequence
  Description of Artificial Sequence: Synthetic oligonucleotide
uuaauagcuagucuucguuuugaacag

SEQ ID NO: 29464 - RNA, 27 nt, Artificial Sequence
  Description of Artificial Sequence: Synthetic oligonucleotide
auuuuuaguagagaugagguuucacca

SEQ ID NO: 29465 - RNA, 27 nt, Artificial Sequence
  Description of Artificial Sequence: Synthetic oligonucleotide
aggcgagauagagcuucucuuucguuc

SEQ ID NO: 29466 - RNA, 27 nt, Artificial Sequence
  Description of Artificial Sequence: Synthetic oligonucleotide
aacuggaccgaaggcgcuuguggagaa

SEQ ID NO: 29467 - RNA, 27 nt, Artificial Sequence
  Description of Artificial Sequence: Synthetic oligonucleotide
gcggcuacaucuuuggaaucuucuccu

SEQ ID NO: 29468 - RNA, 27 nt, Artificial Sequence
  Description of Artificial Sequence: Synthetic oligonucleotide
caagucuccucauugaauccagauugg

SEQ ID NO: 29469 - RNA, 27 nt, Artificial Sequence
  Description of Artificial Sequence: Synthetic oligonucleotide
uccucacuacucucaaaucuguucugg

SEQ ID NO: 29470 - RNA, 27 nt, Artificial Sequence
  Description of Artificial Sequence: Synthetic oligonucleotide
uuuguacucaucugcacagcucuggcu

SEQ ID NO: 29471 - RNA, 27 nt, Artificial Sequence
  Description of Artificial Sequence: Synthetic oligonucleotide
gcccauuaacaacaacaaucugaggug

SEQ ID NO: 29472 - RNA, 27 nt, Artificial Sequence
  Description of Artificial Sequence: Synthetic oligonucleotide
aauaaauuaaaaauaauuaaaauagug

SEQ ID NO: 29473 - RNA, 27 nt, Artificial Sequence
  Description of Artificial Sequence: Synthetic oligonucleotide
cauauuuaaauauuaauaaauuaaaaa

SEQ ID NO: 29474 - RNA, 27 nt, Artificial Sequence
  Description of Artificial Sequence: Synthetic oligonucleotide
gaaacaaaggauauucaaacugcauag

SEQ ID NO: 29475 - RNA, 27 nt, Artificial Sequence
  Description of Artificial Sequence: Synthetic oligonucleotide
caaacacuuagacgccagcagcauggg

SEQ ID NO: 29476 - RNA, 27 nt, Artificial Sequence
  Description of Artificial Sequence: Synthetic oligonucleotide
uuugucacaggugaaaugcacaucuga

SEQ ID NO: 29477 - RNA, 27 nt, Artificial Sequence
  Description of Artificial Sequence: Synthetic oligonucleotide
uaauucagccuggcacagguuuugauc

SEQ ID NO: 29478 - RNA, 27 nt, Artificial Sequence
  Description of Artificial Sequence: Synthetic oligonucleotide
auuguaagaaugacuacccacauucac

SEQ ID NO: 29479 - RNA, 27 nt, Artificial Sequence
  Description of Artificial Sequence: Synthetic oligonucleotide
caauuguaagaaugacuacccacauuc

SEQ ID NO: 29480 - RNA, 27 nt, Artificial Sequence
  Description of Artificial Sequence: Synthetic oligonucleotide
guacacucucugaugcucauuuucaua

SEQ ID NO: 29481 - RNA, 27 nt, Artificial Sequence
  Description of Artificial Sequence: Synthetic oligonucleotide
cugcugaguucuacaugaaaagcaaau

SEQ ID NO: 29482 - RNA, 27 nt, Artificial Sequence
  Description of Artificial Sequence: Synthetic oligonucleotide
uacugaaaauaaauauagaaauacaac

SEQ ID NO: 29483 - RNA, 27 nt, Artificial Sequence
  Description of Artificial Sequence: Synthetic oligonucleotide
uuccauuuaagaaacauuaaucaaaac

SEQ ID NO: 29484 - RNA, 27 nt, Artificial Sequence
  Description of Artificial Sequence: Synthetic oligonucleotide
acaauuuuaggcacuauacacguuguu

SEQ ID NO: 29485 - RNA, 27 nt, Artificial Sequence
  Description of Artificial Sequence: Synthetic oligonucleotide
ccagauguuaguagccaaggauauggu

SEQ ID NO: 29486 - RNA, 27 nt, Artificial Sequence
  Description of Artificial Sequence: Synthetic oligonucleotide
agcucacagucuccagauguuaguagc

SEQ ID NO: 29487 - RNA, 27 nt, Artificial Sequence
  Description of Artificial Sequence: Synthetic oligonucleotide
auuaauaaaaagcacacaacuuauggc

SEQ ID NO: 29488 - RNA, 27 nt, Artificial Sequence
  Description of Artificial Sequence: Synthetic oligonucleotide
aauguaagaagagccaaaaugaugcau

SEQ ID NO: 29489 - RNA, 27 nt, Artificial Sequence
  Description of Artificial Sequence: Synthetic oligonucleotide
acauuuuuacaaauguaagaagagcca

SEQ ID NO: 29490 - RNA, 27 nt, Artificial Sequence
  Description of Artificial Sequence: Synthetic oligonucleotide
aauaugaauuaagaugaccuaaucugu

SEQ ID NO: 29491 - RNA, 27 nt, Artificial Sequence
  Description of Artificial Sequence: Synthetic oligonucleotide
ucaugauuaguucuuucaauuccaucc

SEQ ID NO: 29492 - RNA, 27 nt, Artificial Sequence
  Description of Artificial Sequence: Synthetic oligonucleotide
cccaagagcagaaggaaugagugugca

SEQ ID NO: 29493 - RNA, 27 nt, Artificial Sequence
  Description of Artificial Sequence: Synthetic oligonucleotide
cucaaagcuacugguuaccucuacacc

SEQ ID NO: 29494 - RNA, 27 nt, Artificial Sequence
  Description of Artificial Sequence: Synthetic oligonucleotide
ugaaauauuacguggcaugugguuggg

SEQ ID NO: 29495 - RNA, 27 nt, Artificial Sequence
  Description of Artificial Sequence: Synthetic oligonucleotide
agugaagagaauaacuuguuuccgaag

SEQ ID NO: 29496 - RNA, 27 nt, Artificial Sequence
  Description of Artificial Sequence: Synthetic oligonucleotide
uuucuuagcauuaguuauugggaguga

SEQ ID NO: 29497 - RNA, 27 nt, Artificial Sequence
  Description of Artificial Sequence: Synthetic oligonucleotide
uugauuuucagcauuucuuagcauuag

SEQ ID NO: 29498 - RNA, 27 nt, Artificial Sequence
  Description of Artificial Sequence: Synthetic oligonucleotide
aaaguaaucauauuuagagaaagacag

SEQ ID NO: 29499 - RNA, 27 nt, Artificial Sequence
  Description of Artificial Sequence: Synthetic oligonucleotide
uguagaacaaaaugccugaaauucagc

SEQ ID NO: 29500 - RNA, 27 nt, Artificial Sequence
  Description of Artificial Sequence: Synthetic oligonucleotide
gagagucccgggugagagggaaucgcc

SEQ ID NO: 29501 - RNA, 27 nt, Artificial Sequence
  Description of Artificial Sequence: Synthetic oligonucleotide
cuuuacuuuaaagguucacuuuccuug

SEQ ID NO: 29502 - RNA, 27 nt, Artificial Sequence
  Description of Artificial Sequence: Synthetic oligonucleotide
ccaggcuuccagagcaugcagccuccu

SEQ ID NO: 29503 - RNA, 27 nt, Artificial Sequence
  Description of Artificial Sequence: Synthetic oligonucleotide
cucucuuuuguuuucuguucagagaaa

SEQ ID NO: 29504 - RNA, 27 nt, Artificial Sequence
  Description of Artificial Sequence: Synthetic oligonucleotide
cggcauaacugauuacagccaaguuca

SEQ ID NO: 29505 - RNA, 27 nt, Artificial Sequence
  Description of Artificial Sequence: Synthetic oligonucleotide
uggacuucuuuuaauuuuggcuucuuc

SEQ ID NO: 29506 - RNA, 27 nt, Artificial Sequence
  Description of Artificial Sequence: Synthetic oligonucleotide
uaaccucaccuggacuucuuuuaauuu

SEQ ID NO: 29507 - RNA, 27 nt, Artificial Sequence
  Description of Artificial Sequence: Synthetic oligonucleotide
guccucuucccgauaauccggauucag

SEQ ID NO: 29508 - RNA, 27 nt, Artificial Sequence
  Description of Artificial Sequence: Synthetic oligonucleotide
acaauacuugcuuugaugucacauuaa

SEQ ID NO: 29509 - RNA, 27 nt, Artificial Sequence
  Description of Artificial Sequence: Synthetic oligonucleotide
gagugcuacaauacuugcuuugauguc

SEQ ID NO: 29510 - RNA, 27 nt, Artificial Sequence
  Description of Artificial Sequence: Synthetic oligonucleotide
auuugugguuuuguuuucucucucucu

SEQ ID NO: 29511 - RNA, 27 nt, Artificial Sequence
  Description of Artificial Sequence: Synthetic oligonucleotide
uguaugggcuuaaauacuacagcgagg

SEQ ID NO: 29512 - RNA, 27 nt, Artificial Sequence
  Description of Artificial Sequence: Synthetic oligonucleotide
cuguaugggcuuaaauacuacagcgag

SEQ ID NO: 29513 - RNA, 27 nt, Artificial Sequence
  Description of Artificial Sequence: Synthetic oligonucleotide
ggaagguuucuguaugggcuuaaauac

SEQ ID NO: 29514 - RNA, 27 nt, Artificial Sequence
  Description of Artificial Sequence: Synthetic oligonucleotide
guagguauaccauguuuauuuuaauac

SEQ ID NO: 29515 - RNA, 27 nt, Artificial Sequence
  Description of Artificial Sequence: Synthetic oligonucleotide
uccgaaaacuggccgaucagaacagcc

SEQ ID NO: 29516 - RNA, 27 nt, Artificial Sequence
  Description of Artificial Sequence: Synthetic oligonucleotide
cccuguuccaaaguucaaauuauuugu

SEQ ID NO: 29517 - RNA, 27 nt, Artificial Sequence
  Description of Artificial Sequence: Synthetic oligonucleotide
acuggaaaguuaaauuaaggucgcaau

SEQ ID NO: 29518 - RNA, 27 nt, Artificial Sequence
  Description of Artificial Sequence: Synthetic oligonucleotide
caaaaccaaacuuuagcuuucucagcc

SEQ ID NO: 29519 - RNA, 27 nt, Artificial Sequence
  Description of Artificial Sequence: Synthetic oligonucleotide
uacagugggaaguagcaucuuuacuuu

SEQ ID NO: 29520 - RNA, 27 nt, Artificial Sequence
  Description of Artificial Sequence: Synthetic oligonucleotide
ucauaugguaucagcaauuaagcagua

SEQ ID NO: 29521 - RNA, 27 nt, Artificial Sequence
  Description of Artificial Sequence: Synthetic oligonucleotide
cagcccauguuucauucauaugguauc

SEQ ID NO: 29522 - RNA, 27 nt, Artificial Sequence
  Description of Artificial Sequence: Synthetic oligonucleotide
uaugaaaaaguuggauaagaaaguugg

SEQ ID NO: 29523 - RNA, 27 nt, Artificial Sequence
  Description of Artificial Sequence: Synthetic oligonucleotide
uccggccucaugaugucaugcaaggcu

SEQ ID NO: 29524 - RNA, 27 nt, Artificial Sequence
  Description of Artificial Sequence: Synthetic oligonucleotide
acaaaugcagucauauacaaauucagg

SEQ ID NO: 29525 - RNA, 27 nt, Artificial Sequence
  Description of Artificial Sequence: Synthetic oligonucleotide
gguaguaaacauucuacuaggauucuu

SEQ ID NO: 29526 - RNA, 27 nt, Artificial Sequence
  Description of Artificial Sequence: Synthetic oligonucleotide
uuucaucaaaaaauucuucccuuucug

SEQ ID NO: 29527 - RNA, 27 nt, Artificial Sequence
  Description of Artificial Sequence: Synthetic oligonucleotide
aaauucacacacuggcaugccgauagc

SEQ ID NO: 29528 - RNA, 27 nt, Artificial Sequence
  Description of Artificial Sequence: Synthetic oligonucleotide
acauacauugcucuacuaugaggugaa

SEQ ID NO: 29529 - RNA, 27 nt, Artificial Sequence
  Description of Artificial Sequence: Synthetic oligonucleotide
uauauaugugcuuuggcaauucuggug

SEQ ID NO: 29530 - RNA, 27 nt, Artificial Sequence
  Description of Artificial Sequence: Synthetic oligonucleotide
ggagaaacuauuacccagaucaccacu

SEQ ID NO: 29531 - RNA, 27 nt, Artificial Sequence
  Description of Artificial Sequence: Synthetic oligonucleotide
auuuggagaaacuauuacccagaucac

SEQ ID NO: 29532 - RNA, 27 nt, Artificial Sequence
  Description of Artificial Sequence: Synthetic oligonucleotide
uuucuaggaaguauucaucacauccac

SEQ ID NO: 29533 - RNA, 27 nt, Artificial Sequence
  Description of Artificial Sequence: Synthetic oligonucleotide
cauauaugguguagcuguggaaaugcg

SEQ ID NO: 29534 - RNA, 27 nt, Artificial Sequence
  Description of Artificial Sequence: Synthetic oligonucleotide
cuccauucauauaugguguagcugugg

SEQ ID NO: 29535 - RNA, 27 nt, Artificial Sequence
  Description of Artificial Sequence: Synthetic oligonucleotide
aucuucuucucguguaagaacugcagc

SEQ ID NO: 29536 - RNA, 27 nt, Artificial Sequence
  Description of Artificial Sequence: Synthetic oligonucleotide
ucccuguaaaugaucuucuucucgugu

SEQ ID NO: 29537 - RNA, 27 nt, Artificial Sequence
  Description of Artificial Sequence: Synthetic oligonucleotide
gucccuguaaaugaucuucuucucgug

SEQ ID NO: 29538 - RNA, 27 nt, Artificial Sequence
  Description of Artificial Sequence: Synthetic oligonucleotide
ucaggucccuguaaaugaucuucuucu

SEQ ID NO: 29539 - RNA, 27 nt, Artificial Sequence
  Description of Artificial Sequence: Synthetic oligonucleotide
gaugcagucaaacaccucuuccucugu

SEQ ID NO: 29540 - RNA, 27 nt, Artificial Sequence
  Description of Artificial Sequence: Synthetic oligonucleotide
cgaugcagucaaacaccucuuccucug

SEQ ID NO: 29541 - RNA, 27 nt, Artificial Sequence
  Description of Artificial Sequence: Synthetic oligonucleotide
cccugugaacucgcccucaaaguagcg

SEQ ID NO: 29542 - RNA, 27 nt, Artificial Sequence
  Description of Artificial Sequence: Synthetic oligonucleotide
ggacagaggugccaggagaugcccuca

SEQ ID NO: 29543 - RNA, 27 nt, Artificial Sequence
  Description of Artificial Sequence: Synthetic oligonucleotide
uuaaaaagacaaaccauaucacuccuu

SEQ ID NO: 29544 - RNA, 27 nt, Artificial Sequence
  Description of Artificial Sequence: Synthetic oligonucleotide
cuuaaaaagacaaaccauaucacuccu

SEQ ID NO: 29545 - RNA, 27 nt, Artificial Sequence
  Description of Artificial Sequence: Synthetic oligonucleotide
gacaaccuuuaggaucuuuacugcaac

SEQ ID NO: 29546 - RNA, 27 nt, Artificial Sequence
  Description of Artificial Sequence: Synthetic oligonucleotide
gucgacaaccuuuaggaucuuuacugc

SEQ ID NO: 29547 - RNA, 27 nt, Artificial Sequence
  Description of Artificial Sequence: Synthetic oligonucleotide
acaauugccagguuguccuuugucaug

SEQ ID NO: 29548 - RNA, 27 nt, Artificial Sequence
  Description of Artificial Sequence: Synthetic oligonucleotide
ccucgcaccacugggucacaauugcca

SEQ ID NO: 29549 - RNA, 27 nt, Artificial Sequence
  Description of Artificial Sequence: Synthetic oligonucleotide
auuucaugucucuauggaugauguucu

SEQ ID NO: 29550 - RNA, 27 nt, Artificial Sequence
  Description of Artificial Sequence: Synthetic oligonucleotide
uggagaaauauauuguuggauuucaug

SEQ ID NO: 29551 - RNA, 27 nt, Artificial Sequence
  Description of Artificial Sequence: Synthetic oligonucleotide
agccuucauggagaaauauauuguugg

SEQ ID NO: 29552 - RNA, 27 nt, Artificial Sequence
  Description of Artificial Sequence: Synthetic oligonucleotide
accacuccagcgugacuuuacuguugc

SEQ ID NO: 29553 - RNA, 27 nt, Artificial Sequence
  Description of Artificial Sequence: Synthetic oligonucleotide
ccucucuuccuuuacuuucuucacaca

SEQ ID NO: 29554 - RNA, 27 nt, Artificial Sequence
  Description of Artificial Sequence: Synthetic oligonucleotide
gcccgaugcaaggauggcucggaagcg

SEQ ID NO: 29555 - RNA, 27 nt, Artificial Sequence
  Description of Artificial Sequence: Synthetic oligonucleotide
cacaguaggauauucaaccuccauuuc

SEQ ID NO: 29556 - RNA, 27 nt, Artificial Sequence
  Description of Artificial Sequence: Synthetic oligonucleotide
uuacacaguaggauauucaaccuccau

SEQ ID NO: 29557 - RNA, 27 nt, Artificial Sequence
  Description of Artificial Sequence: Synthetic oligonucleotide
uacacuacaagggaaaacucaaaaucu

SEQ ID NO: 29558 - RNA, 27 nt, Artificial Sequence
  Description of Artificial Sequence: Synthetic oligonucleotide
caaucaacaaagaacaaacaggauaaa

SEQ ID NO: 29559 - RNA, 27 nt, Artificial Sequence
  Description of Artificial Sequence: Synthetic oligonucleotide
uuucaaucaacaaagaacaaacaggau

SEQ ID NO: 29560 - RNA, 27 nt, Artificial Sequence
  Description of Artificial Sequence: Synthetic oligonucleotide
auggaagaaaaagaaggcuguagagaa

SEQ ID NO: 29561 - RNA, 27 nt, Artificial Sequence
  Description of Artificial Sequence: Synthetic oligonucleotide
uagaaggaagauuagcuauggaagaaa

SEQ ID NO: 29562 - RNA, 27 nt, Artificial Sequence
  Description of Artificial Sequence: Synthetic oligonucleotide
augaagcauucaacaggaagauuauuu

SEQ ID NO: 29563 - RNA, 27 nt, Artificial Sequence
  Description of Artificial Sequence: Synthetic oligonucleotide
caugaagcauucaacaggaagauuauu

SEQ ID NO: 29564 - RNA, 27 nt, Artificial Sequence
  Description of Artificial Sequence: Synthetic oligonucleotide
ucaaaguagaauucaagucaugaagca

SEQ ID NO: 29565 - RNA, 27 nt, Artificial Sequence
  Description of Artificial Sequence: Synthetic oligonucleotide
gucuguaguugcuucucucccucuuag

SEQ ID NO: 29566 - RNA, 27 nt, Artificial Sequence
  Description of Artificial Sequence: Synthetic oligonucleotide
guugaccuuggucugguaggagacggc

SEQ ID NO: 29567 - RNA, 27 nt, Artificial Sequence
  Description of Artificial Sequence: Synthetic oligonucleotide
gucgagauagucgggccgauugaucuc

SEQ ID NO: 29568 - RNA, 27 nt, Artificial Sequence
  Description of Artificial Sequence: Synthetic oligonucleotide
guuugggaagguuggauguucguccuc

SEQ ID NO: 29569 - RNA, 27 nt, Artificial Sequence
  Description of Artificial Sequence: Synthetic oligonucleotide
aguucuaagcuuggguuccgacccuaa

SEQ ID NO: 29570 - RNA, 27 nt, Artificial Sequence
  Description of Artificial Sequence: Synthetic oligonucleotide
uuaaaguucuaagcuuggguuccgacc

SEQ ID NO: 29571 - RNA, 27 nt, Artificial Sequence
  Description of Artificial Sequence: Synthetic oligonucleotide
guugcuuaaaguucuaagcuuggguuc

SEQ ID NO: 29572 - RNA, 27 nt, Artificial Sequence
  Description of Artificial Sequence: Synthetic oligonucleotide
gugguggucuuguugcuuaaaguucua

SEQ ID NO: 29573 - RNA, 27 nt, Artificial Sequence
  Description of Artificial Sequence: Synthetic oligonucleotide
acuuuauuucucgccacugaauaguag

SEQ ID NO: 29574 - RNA, 27 nt, Artificial Sequence
  Description of Artificial Sequence: Synthetic oligonucleotide
aacuuuauuucucgccacugaauagua

SEQ ID NO: 29575 - RNA, 27 nt, Artificial Sequence
  Description of Artificial Sequence: Synthetic oligonucleotide
ggaucauuuccuguuaucuguguuugu

SEQ ID NO: 29576 - RNA, 27 nt, Artificial Sequence
  Description of Artificial Sequence: Synthetic oligonucleotide
guuucauuucuucucuuuucuuaaggc

SEQ ID NO: 29577 - RNA, 27 nt, Artificial Sequence
  Description of Artificial Sequence: Synthetic oligonucleotide
ggaggauggaaacacacuccuucaguu

SEQ ID NO: 29578 - RNA, 27 nt, Artificial Sequence
  Description of Artificial Sequence: Synthetic oligonucleotide
ucaaagauuuucagucccgcggugaca

SEQ ID NO: 29579 - RNA, 27 nt, Artificial Sequence
  Description of Artificial Sequence: Synthetic oligonucleotide
ccugaacggcacgcuuauuucugcugu

SEQ ID NO: 29580 - RNA, 27 nt, Artificial Sequence
  Description of Artificial Sequence: Synthetic oligonucleotide
cuucuggacccugaacggcacgcuuau

SEQ ID NO: 29581 - RNA, 27 nt, Artificial Sequence
  Description of Artificial Sequence: Synthetic oligonucleotide
caagcagucuugagugacuguuucuuc

SEQ ID NO: 29582 - RNA, 27 nt, Artificial Sequence
  Description of Artificial Sequence: Synthetic oligonucleotide
ccaaagacauggaccuucuuccucuga

SEQ ID NO: 29583 - RNA, 27 nt, Artificial Sequence
  Description of Artificial Sequence: Synthetic oligonucleotide
guguuucaggcauauuuugaauacauc

SEQ ID NO: 29584 - RNA, 27 nt, Artificial Sequence
  Description of Artificial Sequence: Synthetic oligonucleotide
gagguacagagaaagggaggaaaauag

SEQ ID NO: 29585 - RNA, 27 nt, Artificial Sequence
  Description of Artificial Sequence: Synthetic oligonucleotide
ucuugucuugcucuaucuuucuuuggu

SEQ ID NO: 29586 - RNA, 27 nt, Artificial Sequence
  Description of Artificial Sequence: Synthetic oligonucleotide
uuucuugucuugcucuaucuuucuuug

SEQ ID NO: 29587 - RNA, 27 nt, Artificial Sequence
  Description of Artificial Sequence: Synthetic oligonucleotide
ggaucuuguacaaacaaaugcuuucuc

SEQ ID NO: 29588 - RNA, 27 nt, Artificial Sequence
  Description of Artificial Sequence: Synthetic oligonucleotide
ucugcaaguacguucguuuaacucaag

SEQ ID NO: 29589 - RNA, 27 nt, Artificial Sequence
  Description of Artificial Sequence: Synthetic oligonucleotide
ucuguaucgaucguucuguaucagucu

SEQ ID NO: 29590 - RNA, 27 nt, Artificial Sequence
  Description of Artificial Sequence: Synthetic oligonucleotide
auuuauuuuuauauauauauaauauau

SEQ ID NO: 29591 - RNA, 27 nt, Artificial Sequence
  Description of Artificial Sequence: Synthetic oligonucleotide
auauuuauuuuuauauauauauaauau

SEQ ID NO: 29592 - RNA, 27 nt, Artificial Sequence
  Description of Artificial Sequence: Synthetic oligonucleotide
cacagcagucaaauacauccagugaag

SEQ ID NO: 29593 - RNA, 27 nt, Artificial Sequence
  Description of Artificial Sequence: Synthetic oligonucleotide
gucucucaucuccuccucuucccuguc

SEQ ID NO: 29594 - RNA, 27 nt, Artificial Sequence
  Description of Artificial Sequence: Synthetic oligonucleotide
ccaagugggacaaaaaaaagaucaugc

SEQ ID NO: 29595 - RNA, 14 nt, Artificial Sequence
  Description of Artificial Sequence: Synthetic oligonucleotide
guauuuugaugagg

SEQ ID NO: 29596 - RNA, 12 nt, Artificial Sequence
  Description of Artificial Sequence: Synthetic oligonucleotide
ggcccagaugau

SEQ ID NO: 29597 - RNA, 14 nt, Artificial Sequence
  Description of Artificial Sequence: Synthetic oligonucleotide
gggaagaaaacuau

SEQ ID NO: 29598 - RNA, 15 nt, Artificial Sequence
  Description of Artificial Sequence: Synthetic oligonucleotide
guuuuaauuuauuuc

SEQ ID NO: 29599 - RNA, 12 nt, Artificial Sequence
  Description of Artificial Sequence: Synthetic oligonucleotide
acguagggaaau

SEQ ID NO: 29600 - RNA, 12 nt, Artificial Sequence
  Description of Artificial Sequence: Synthetic oligonucleotide
ccaggguuuacc

SEQ ID NO: 29601 - RNA, 11 nt, Artificial Sequence
  Description of Artificial Sequence: Synthetic oligonucleotide
agcaagguuua

SEQ ID NO: 29602 - RNA, 12 nt, Artificial Sequence
  Description of Artificial Sequence: Synthetic oligonucleotide
uguauuauguug

SEQ ID NO: 29603 - RNA, 15 nt, Artificial Sequence
  Description of Artificial Sequence: Synthetic oligonucleotide
uuuuaaucuuuguga

SEQ ID NO: 29604 - RNA, 14 nt, Artificial Sequence
  Description of Artificial Sequence: Synthetic oligonucleotide
uuaaucuuugugac

SEQ ID NO: 29605 - RNA, 13 nt, Artificial Sequence
  Description of Artificial Sequence: Synthetic oligonucleotide
gcugcuuaugucu

SEQ ID NO: 29606 - RNA, 14 nt, Artificial Sequence
  Description of Artificial Sequence: Synthetic oligonucleotide
aaguguuucagaag

SEQ ID NO: 29607 - RNA, 13 nt, Artificial Sequence
  Description of Artificial Sequence: Synthetic oligonucleotide
gaccaucaauaag

SEQ ID NO: 29608 - RNA, 13 nt, Artificial Sequence
  Description of Artificial Sequence: Synthetic oligonucleotide
ccaucaauaagga

SEQ ID NO: 29609 - RNA, 14 nt, Artificial Sequence
  Description of Artificial Sequence: Synthetic oligonucleotide
ucaauaaggaagaa

SEQ ID NO: 29610 - RNA, 14 nt, Artificial Sequence
  Description of Artificial Sequence: Synthetic oligonucleotide
aauaaggaagaagc

SEQ ID NO: 29611 - RNA, 13 nt, Artificial Sequence
  Description of Artificial Sequence: Synthetic oligonucleotide
aggaagaagcccu

SEQ ID NO: 29612 - RNA, 13 nt, Artificial Sequence
  Description of Artificial Sequence: Synthetic oligonucleotide
gcauaacuaaagg

SEQ ID NO: 29613 - RNA, 14 nt, Artificial Sequence
  Description of Artificial Sequence: Synthetic oligonucleotide
cauaacuaaaggug

SEQ ID NO: 29614 - RNA, 12 nt, Artificial Sequence
  Description of Artificial Sequence: Synthetic oligonucleotide
cuacaucacgcc

SEQ ID NO: 29615 - RNA, 12 nt, Artificial Sequence
  Description of Artificial Sequence: Synthetic oligonucleotide
acuggauuuaag

SEQ ID NO: 29616 - RNA, 12 nt, Artificial Sequence
  Description of Artificial Sequence: Synthetic oligonucleotide
cuggauuuaagc

SEQ ID NO: 29617 - RNA, 13 nt, Artificial Sequence
  Description of Artificial Sequence: Synthetic oligonucleotide
gauuuaagcagag

SEQ ID NO: 29618 - RNA, 13 nt, Artificial Sequence
  Description of Artificial Sequence: Synthetic oligonucleotide
auuuaagcagagu

SEQ ID NO: 29619 - RNA, 13 nt, Artificial Sequence
  Description of Artificial Sequence: Synthetic oligonucleotide
uuaagcagaguuc

SEQ ID NO: 29620 - RNA, 13 nt, Artificial Sequence
  Description of Artificial Sequence: Synthetic oligonucleotide
uaagcagaguuca

SEQ ID NO: 29621 - RNA, 14 nt, Artificial Sequence
  Description of Artificial Sequence: Synthetic oligonucleotide
agcagaguucaaaa

SEQ ID NO: 29622 - RNA, 12 nt, Artificial Sequence
  Description of Artificial Sequence: Synthetic oligonucleotide
cucagggucuga

SEQ ID NO: 29623 - RNA, 13 nt, Artificial Sequence
  Description of Artificial Sequence: Synthetic oligonucleotide
caagcaacuacau

SEQ ID NO: 29624 - RNA, 12 nt, Artificial Sequence
  Description of Artificial Sequence: Synthetic oligonucleotide
aucaauggcagc

SEQ ID NO: 29625 - RNA, 11 nt, Artificial Sequence
  Description of Artificial Sequence: Synthetic oligonucleotide
uuccagcccac

SEQ ID NO: 29626 - RNA, 12 nt, Artificial Sequence
  Description of Artificial Sequence: Synthetic oligonucleotide
cagcugagaaug

SEQ ID NO: 29627 - RNA, 13 nt, Artificial Sequence
  Description of Artificial Sequence: Synthetic oligonucleotide
aacguaucuccua

SEQ ID NO: 29628 - RNA, 14 nt, Artificial Sequence
  Description of Artificial Sequence: Synthetic oligonucleotide
ccuaaaauaauuuc

SEQ ID NO: 29629 - RNA, 13 nt, Artificial Sequence
  Description of Artificial Sequence: Synthetic oligonucleotide
uggaagauucagc

SEQ ID NO: 29630 - RNA, 12 nt, Artificial Sequence
  Description of Artificial Sequence: Synthetic oligonucleotide
uuaaacucuccu

SEQ ID NO: 29631 - RNA, 12 nt, Artificial Sequence
  Description of Artificial Sequence: Synthetic oligonucleotide
cagccuacaguu

SEQ ID NO: 29632 - RNA, 13 nt, Artificial Sequence
  Description of Artificial Sequence: Synthetic oligonucleotide
guuauguucaguc

SEQ ID NO: 29633 - RNA, 13 nt, Artificial Sequence
  Description of Artificial Sequence: Synthetic oligonucleotide
cacauacaaaaug

SEQ ID NO: 29634 - RNA, 9 nt, Artificial Sequence
  Description of Artificial Sequence: Synthetic oligonucleotide
uccuuuugc

SEQ ID NO: 29635 - RNA, 12 nt, Artificial Sequence
  Description of Artificial Sequence: Synthetic oligonucleotide
ugaccugugaag

SEQ ID NO: 29636 - RNA, 12 nt, Artificial Sequence
  Description of Artificial Sequence: Synthetic oligonucleotide
cuaucucacaca

SEQ ID NO: 29637 - RNA, 13 nt, Artificial Sequence
  Description of Artificial Sequence: Synthetic oligonucleotide
uguccucaauugu

SEQ ID NO: 29638 - RNA, 12 nt, Artificial Sequence
  Description of Artificial Sequence: Synthetic oligonucleotide
aaaccguagcug

SEQ ID NO: 29639 - RNA, 12 nt, Artificial Sequence
  Description of Artificial Sequence: Synthetic oligonucleotide
uagcuggcaagc

SEQ ID NO: 29640 - RNA, 14 nt, Artificial Sequence
  Description of Artificial Sequence: Synthetic oligonucleotide
uuguaugguuaaaa

SEQ ID NO: 29641 - RNA, 14 nt, Artificial Sequence
  Description of Artificial Sequence: Synthetic oligonucleotide
ugguuaaaagaugg

SEQ ID NO: 29642 - RNA, 13 nt, Artificial Sequence
  Description of Artificial Sequence: Synthetic oligonucleotide
cagggaauuauac

SEQ ID NO: 29643 - RNA, 12 nt, Artificial Sequence
  Description of Artificial Sequence: Synthetic oligonucleotide
acaaucuugcug

SEQ ID NO: 29644 - RNA, 13 nt, Artificial Sequence
  Description of Artificial Sequence: Synthetic oligonucleotide
ccaauaaugaaga

SEQ ID NO: 29645 - RNA, 13 nt, Artificial Sequence
  Description of Artificial Sequence: Synthetic oligonucleotide
acuuuggauguuc

SEQ ID NO: 29646 - RNA, 12 nt, Artificial Sequence
  Description of Artificial Sequence: Synthetic oligonucleotide
aaugcuuccacu

SEQ ID NO: 29647 - RNA, 11 nt, Artificial Sequence
  Description of Artificial Sequence: Synthetic oligonucleotide
gagaaaguuug

SEQ ID NO: 29648 - RNA, 11 nt, Artificial Sequence
  Description of Artificial Sequence: Synthetic oligonucleotide
aaagaacuacu

SEQ ID NO: 29649 - RNA, 12 nt, Artificial Sequence
  Description of Artificial Sequence: Synthetic oligonucleotide
uuagaaauacgg

SEQ ID NO: 29650 - RNA, 12 nt, Artificial Sequence
  Description of Artificial Sequence: Synthetic oligonucleotide
aacauggguaca

SEQ ID NO: 29651 - RNA, 14 nt, Artificial Sequence
  Description of Artificial Sequence: Synthetic oligonucleotide
aaagacacagaaga

SEQ ID NO: 29652 - RNA, 11 nt, Artificial Sequence
  Description of Artificial Sequence: Synthetic oligonucleotide
uaguagggagg

SEQ ID NO: 29653 - RNA, 12 nt, Artificial Sequence
  Description of Artificial Sequence: Synthetic oligonucleotide
gccuucugcagc

SEQ ID NO: 29654 - RNA, 10 nt, Artificial Sequence
  Description of Artificial Sequence: Synthetic oligonucleotide
ggucugguac

SEQ ID NO: 29655 - RNA, 12 nt, Artificial Sequence
  Description of Artificial Sequence: Synthetic oligonucleotide
cuaguccuuccg

SEQ ID NO: 29656 - RNA, 12 nt, Artificial Sequence
  Description of Artificial Sequence: Synthetic oligonucleotide
ccagugaauauu

SEQ ID NO: 29657 - RNA, 13 nt, Artificial Sequence
  Description of Artificial Sequence: Synthetic oligonucleotide
augaauucaaguu

SEQ ID NO: 29658 - RNA, 12 nt, Artificial Sequence
  Description of Artificial Sequence: Synthetic oligonucleotide
caggacacagau

SEQ ID NO: 29659 - RNA, 12 nt, Artificial Sequence
  Description of Artificial Sequence: Synthetic oligonucleotide
cucaaagcacag

SEQ ID NO: 29660 - RNA, 10 nt, Artificial Sequence
  Description of Artificial Sequence: Synthetic oligonucleotide
accacugcca

SEQ ID NO: 29661 - RNA, 13 nt, Artificial Sequence
  Description of Artificial Sequence: Synthetic oligonucleotide
gaaacuacuagug

SEQ ID NO: 29662 - RNA, 12 nt, Artificial Sequence
  Description of Artificial Sequence: Synthetic oligonucleotide
aagucggacagc

SEQ ID NO: 29663 - RNA, 13 nt, Artificial Sequence
  Description of Artificial Sequence: Synthetic oligonucleotide
gaaagcgaaaaau

SEQ ID NO: 29664 - RNA, 13 nt, Artificial Sequence
  Description of Artificial Sequence: Synthetic oligonucleotide
cccucugauuuag

SEQ ID NO: 29665 - RNA, 12 nt, Artificial Sequence
  Description of Artificial Sequence: Synthetic oligonucleotide
ugagcuauuuaa

SEQ ID NO: 29666 - RNA, 13 nt, Artificial Sequence
  Description of Artificial Sequence: Synthetic oligonucleotide
aaaaggugaaaaa

SEQ ID NO: 29667 - RNA, 14 nt, Artificial Sequence
  Description of Artificial Sequence: Synthetic oligonucleotide
gaaaaagcacuauu

SEQ ID NO: 29668 - RNA, 12 nt, Artificial Sequence
  Description of Artificial Sequence: Synthetic oligonucleotide
ggcugaaaagaa

SEQ ID NO: 29669 - RNA, 12 nt, Artificial Sequence
  Description of Artificial Sequence: Synthetic oligonucleotide
uaaacccuuaua

SEQ ID NO: 29670 - RNA, 13 nt, Artificial Sequence
  Description of Artificial Sequence: Synthetic oligonucleotide
cauacuauuagcc

SEQ ID NO: 29671 - RNA, 12 nt, Artificial Sequence
  Description of Artificial Sequence: Synthetic oligonucleotide
gacagaagcauu

SEQ ID NO: 29672 - RNA, 14 nt, Artificial Sequence
  Description of Artificial Sequence: Synthetic oligonucleotide
agagcaaauaagau

SEQ ID NO: 29673 - RNA, 14 nt, Artificial Sequence
  Description of Artificial Sequence: Synthetic oligonucleotide
ccaacauuuuucuc

SEQ ID NO: 29674 - RNA, 15 nt, Artificial Sequence
  Description of Artificial Sequence: Synthetic oligonucleotide
uuaaguaugagaaaa

SEQ ID NO: 29675 - RNA, 14 nt, Artificial Sequence
  Description of Artificial Sequence: Synthetic oligonucleotide
caggaauaaagaug

SEQ ID NO: 29676 - RNA, 13 nt, Artificial Sequence
  Description of Artificial Sequence: Synthetic oligonucleotide
aauuugaaugacc

SEQ ID NO: 29677 - RNA, 14 nt, Artificial Sequence
  Description of Artificial Sequence: Synthetic oligonucleotide
auguauaaagauag

SEQ ID NO: 29678 - RNA, 12 nt, Artificial Sequence
  Description of Artificial Sequence: Synthetic oligonucleotide
ggcuguaacuau

SEQ ID NO: 29679 - RNA, 11 nt, Artificial Sequence
  Description of Artificial Sequence: Synthetic oligonucleotide
ucugugaagug

SEQ ID NO: 29680 - RNA, 14 nt, Artificial Sequence
  Description of Artificial Sequence: Synthetic oligonucleotide
ccuuuaaggaaaug

SEQ ID NO: 29681 - RNA, 13 nt, Artificial Sequence
  Description of Artificial Sequence: Synthetic oligonucleotide
aaggauacaaaaa

SEQ ID NO: 29682 - RNA, 12 nt, Artificial Sequence
  Description of Artificial Sequence: Synthetic oligonucleotide
agaugcaauuug

SEQ ID NO: 29683 - RNA, 12 nt, Artificial Sequence
  Description of Artificial Sequence: Synthetic oligonucleotide
guucaaaacgaa

SEQ ID NO: 29684 - RNA, 11 nt, Artificial Sequence
  Description of Artificial Sequence: Synthetic oligonucleotide
gugaaaccuca

SEQ ID NO: 29685 - RNA, 13 nt, Artificial Sequence
  Description of Artificial Sequence: Synthetic oligonucleotide
acgaaagagaagc

SEQ ID NO: 29686 - RNA, 12 nt, Artificial Sequence
  Description of Artificial Sequence: Synthetic oligonucleotide
cuccacaagcgc

SEQ ID NO: 29687 - RNA, 14 nt, Artificial Sequence
  Description of Artificial Sequence: Synthetic oligonucleotide
gagaagauuccaaa

SEQ ID NO: 29688 - RNA, 13 nt, Artificial Sequence
  Description of Artificial Sequence: Synthetic oligonucleotide
aaucuggauucaa

SEQ ID NO: 29689 - RNA, 13 nt, Artificial Sequence
  Description of Artificial Sequence: Synthetic oligonucleotide
agaacagauuuga

SEQ ID NO: 29690 - RNA, 11 nt, Artificial Sequence
  Description of Artificial Sequence: Synthetic oligonucleotide
ccagagcugug

SEQ ID NO: 29691 - RNA, 12 nt, Artificial Sequence
  Description of Artificial Sequence: Synthetic oligonucleotide
ccucagauuguu

SEQ ID NO: 29692 - RNA, 12 nt, Artificial Sequence
  Description of Artificial Sequence: Synthetic oligonucleotide
cuauuuuaauua

SEQ ID NO: 29693 - RNA, 13 nt, Artificial Sequence
  Description of Artificial Sequence: Synthetic oligonucleotide
uuuaauuuauuaa

SEQ ID NO: 29694 - RNA, 12 nt, Artificial Sequence
  Description of Artificial Sequence: Synthetic oligonucleotide
augcaguuugaa

SEQ ID NO: 29695 - RNA, 11 nt, Artificial Sequence
  Description of Artificial Sequence: Synthetic oligonucleotide
caugcugcugg

SEQ ID NO: 29696 - RNA, 13 nt, Artificial Sequence
  Description of Artificial Sequence: Synthetic oligonucleotide
agaugugcauuuc

SEQ ID NO: 29697 - RNA, 12 nt, Artificial Sequence
  Description of Artificial Sequence: Synthetic oligonucleotide
ucaaaaccugug

SEQ ID NO: 29698 - RNA, 11 nt, Artificial Sequence
  Description of Artificial Sequence: Synthetic oligonucleotide
gaaugugggua

SEQ ID NO: 29699 - RNA, 10 nt, Artificial Sequence
  Description of Artificial Sequence: Synthetic oligonucleotide
auguggguag

SEQ ID NO: 29700 - RNA, 13 nt, Artificial Sequence
  Description of Artificial Sequence: Synthetic oligonucleotide
ugaaaaugagcau

SEQ ID NO: 29701 - RNA, 13 nt, Artificial Sequence
  Description of Artificial Sequence: Synthetic oligonucleotide
uugcuuuucaugu

SEQ ID NO: 29702 - RNA, 12 nt, Artificial Sequence
  Description of Artificial Sequence: Synthetic oligonucleotide
uguauuucuaua

SEQ ID NO: 29703 - RNA, 13 nt, Artificial Sequence
  Description of Artificial Sequence: Synthetic oligonucleotide
uuugauuaauguu

SEQ ID NO: 29704 - RNA, 12 nt, Artificial Sequence
  Description of Artificial Sequence: Synthetic oligonucleotide
caacguguauag

SEQ ID NO: 29705 - RNA, 12 nt, Artificial Sequence
  Description of Artificial Sequence: Synthetic oligonucleotide
cauauccuuggc

SEQ ID NO: 29706 - RNA, 13 nt, Artificial Sequence
  Description of Artificial Sequence: Synthetic oligonucleotide
uacuaacaucugg

SEQ ID NO: 29707 - RNA, 11 nt, Artificial Sequence
  Description of Artificial Sequence: Synthetic oligonucleotide
cauaaguugug

SEQ ID NO: 29708 - RNA, 12 nt, Artificial Sequence
  Description of Artificial Sequence: Synthetic oligonucleotide
gcaucauuuugg

SEQ ID NO: 29709 - RNA, 10 nt, Artificial Sequence
  Description of Artificial Sequence: Synthetic oligonucleotide
gcucuucuua

SEQ ID NO: 29710 - RNA, 10 nt, Artificial Sequence
  Description of Artificial Sequence: Synthetic oligonucleotide
agauuagguc

SEQ ID NO: 29711 - RNA, 12 nt, Artificial Sequence
  Description of Artificial Sequence: Synthetic oligonucleotide
auggaauugaaa

SEQ ID NO: 29712 - RNA, 13 nt, Artificial Sequence
  Description of Artificial Sequence: Synthetic oligonucleotide
cacacucauuccu

SEQ ID NO: 29713 - RNA, 12 nt, Artificial Sequence
  Description of Artificial Sequence: Synthetic oligonucleotide
uguagagguaac

SEQ ID NO: 29714 - RNA, 11 nt, Artificial Sequence
  Description of Artificial Sequence: Synthetic oligonucleotide
caaccacaugc

SEQ ID NO: 29715 - RNA, 12 nt, Artificial Sequence
  Description of Artificial Sequence: Synthetic oligonucleotide
ucggaaacaagu

SEQ ID NO: 29716 - RNA, 11 nt, Artificial Sequence
  Description of Artificial Sequence: Synthetic oligonucleotide
acucccaauaa

SEQ ID NO: 29717 - RNA, 13 nt, Artificial Sequence
  Description of Artificial Sequence: Synthetic oligonucleotide
aaugcuaagaaau

SEQ ID NO: 29718 - RNA, 11 nt, Artificial Sequence
  Description of Artificial Sequence: Synthetic oligonucleotide
gucuuucucua

SEQ ID NO: 29719 - RNA, 11 nt, Artificial Sequence
  Description of Artificial Sequence: Synthetic oligonucleotide
ugaauuucagg

SEQ ID NO: 29720 - RNA, 13 nt, Artificial Sequence
  Description of Artificial Sequence: Synthetic oligonucleotide
cgauucccucuca

SEQ ID NO: 29721 - RNA, 11 nt, Artificial Sequence
  Description of Artificial Sequence: Synthetic oligonucleotide
aggaaagugaa

SEQ ID NO: 29722 - RNA, 12 nt, Artificial Sequence
  Description of Artificial Sequence: Synthetic oligonucleotide
gaggcugcaugc

SEQ ID NO: 29723 - RNA, 11 nt, Artificial Sequence
  Description of Artificial Sequence: Synthetic oligonucleotide
ucucugaacag

SEQ ID NO: 29724 - RNA, 12 nt, Artificial Sequence
  Description of Artificial Sequence: Synthetic oligonucleotide
aacuuggcugua

SEQ ID NO: 29725 - RNA, 12 nt, Artificial Sequence
  Description of Artificial Sequence: Synthetic oligonucleotide
agaagccaaaau

SEQ ID NO: 29726 - RNA, 14 nt, Artificial Sequence
  Description of Artificial Sequence: Synthetic oligonucleotide
auuaaaagaagucc

SEQ ID NO: 29727 - RNA, 14 nt, Artificial Sequence
  Description of Artificial Sequence: Synthetic oligonucleotide
gaauccggauuauc

SEQ ID NO: 29728 - RNA, 12 nt, Artificial Sequence
  Description of Artificial Sequence: Synthetic oligonucleotide
aaugugacauca

SEQ ID NO: 29729 - RNA, 13 nt, Artificial Sequence
  Description of Artificial Sequence: Synthetic oligonucleotide
caucaaagcaagu

SEQ ID NO: 29730 - RNA, 11 nt, Artificial Sequence
  Description of Artificial Sequence: Synthetic oligonucleotide
agagagagaaa

SEQ ID NO: 29731 - RNA, 13 nt, Artificial Sequence
  Description of Artificial Sequence: Synthetic oligonucleotide
ucgcuguaguauu

SEQ ID NO: 29732 - RNA, 14 nt, Artificial Sequence
  Description of Artificial Sequence: Synthetic oligonucleotide
cgcuguaguauuua

SEQ ID NO: 29733 - RNA, 13 nt, Artificial Sequence
  Description of Artificial Sequence: Synthetic oligonucleotide
auuuaagcccaua

SEQ ID NO: 29734 - RNA, 15 nt, Artificial Sequence
  Description of Artificial Sequence: Synthetic oligonucleotide
auuaaaauaaacaug

SEQ ID NO: 29735 - RNA, 12 nt, Artificial Sequence
  Description of Artificial Sequence: Synthetic oligonucleotide
cuguucugaucg

SEQ ID NO: 29736 - RNA, 16 nt, Artificial Sequence
  Description of Artificial Sequence: Synthetic oligonucleotide
aaauaauuugaacuuu

SEQ ID NO: 29737 - RNA, 12 nt, Artificial Sequence
  Description of Artificial Sequence: Synthetic oligonucleotide
ugcgaccuuaau

SEQ ID NO: 29738 - RNA, 11 nt, Artificial Sequence
  Description of Artificial Sequence: Synthetic oligonucleotide
cugagaaagcu

SEQ ID NO: 29739 - RNA, 13 nt, Artificial Sequence
  Description of Artificial Sequence: Synthetic oligonucleotide
aguaaagaugcua

SEQ ID NO: 29740 - RNA, 12 nt, Artificial Sequence
  Description of Artificial Sequence: Synthetic oligonucleotide
cugcuuaauugc

SEQ ID NO: 29741 - RNA, 14 nt, Artificial Sequence
  Description of Artificial Sequence: Synthetic oligonucleotide
uaccauaugaauga

SEQ ID NO: 29742 - RNA, 12 nt, Artificial Sequence
  Description of Artificial Sequence: Synthetic oligonucleotide
aacuuucuuauc

SEQ ID NO: 29743 - RNA, 13 nt, Artificial Sequence
  Description of Artificial Sequence: Synthetic oligonucleotide
ccuugcaugacau

SEQ ID NO: 29744 - RNA, 14 nt, Artificial Sequence
  Description of Artificial Sequence: Synthetic oligonucleotide
ugaauuuguauaug

SEQ ID NO: 29745 - RNA, 12 nt, Artificial Sequence
  Description of Artificial Sequence: Synthetic oligonucleotide
gaauccuaguag

SEQ ID NO: 29746 - RNA, 10 nt, Artificial Sequence
  Description of Artificial Sequence: Synthetic oligonucleotide
gaaagggaag

SEQ ID NO: 29747 - RNA, 11 nt, Artificial Sequence
  Description of Artificial Sequence: Synthetic oligonucleotide
uaucggcaugc

SEQ ID NO: 29748 - RNA, 12 nt, Artificial Sequence
  Description of Artificial Sequence: Synthetic oligonucleotide
caccucauagua

SEQ ID NO: 29749 - RNA, 11 nt, Artificial Sequence
  Description of Artificial Sequence: Synthetic oligonucleotide
ccagaauugcc

SEQ ID NO: 29750 - RNA, 11 nt, Artificial Sequence
  Description of Artificial Sequence: Synthetic oligonucleotide
uggugaucugg

SEQ ID NO: 29751 - RNA, 12 nt, Artificial Sequence
  Description of Artificial Sequence: Synthetic oligonucleotide
gaucuggguaau

SEQ ID NO: 29752 - RNA, 12 nt, Artificial Sequence
  Description of Artificial Sequence: Synthetic oligonucleotide
ggaugugaugaa

SEQ ID NO: 29753 - RNA, 12 nt, Artificial Sequence
  Description of Artificial Sequence: Synthetic oligonucleotide
cauuuccacagc

SEQ ID NO: 29754 - RNA, 11 nt, Artificial Sequence
  Description of Artificial Sequence: Synthetic oligonucleotide
acagcuacacc

SEQ ID NO: 29755 - RNA, 12 nt, Artificial Sequence
  Description of Artificial Sequence: Synthetic oligonucleotide
ugcaguucuuac

SEQ ID NO: 29756 - RNA, 12 nt, Artificial Sequence
  Description of Artificial Sequence: Synthetic oligonucleotide
acgagaagaaga

SEQ ID NO: 29757 - RNA, 12 nt, Artificial Sequence
  Description of Artificial Sequence: Synthetic oligonucleotide
cgagaagaagau

SEQ ID NO: 29758 - RNA, 15 nt, Artificial Sequence
  Description of Artificial Sequence: Synthetic oligonucleotide
aagaagaucauuuac

SEQ ID NO: 29759 - RNA, 11 nt, Artificial Sequence
  Description of Artificial Sequence: Synthetic oligonucleotide
agaggaagagg

SEQ ID NO: 29760 - RNA, 12 nt, Artificial Sequence
  Description of Artificial Sequence: Synthetic oligonucleotide
gaggaagaggug

SEQ ID NO: 29761 - RNA, 13 nt, Artificial Sequence
  Description of Artificial Sequence: Synthetic oligonucleotide
cuacuuugagggc

SEQ ID NO: 29762 - RNA, 12 nt, Artificial Sequence
  Description of Artificial Sequence: Synthetic oligonucleotide
agggcaucuccu

SEQ ID NO: 29763 - RNA, 10 nt, Artificial Sequence
  Description of Artificial Sequence: Synthetic oligonucleotide
ggagugauau

SEQ ID NO: 29764 - RNA, 11 nt, Artificial Sequence
  Description of Artificial Sequence: Synthetic oligonucleotide
gagugauaugg

SEQ ID NO: 29765 - RNA, 12 nt, Artificial Sequence
  Description of Artificial Sequence: Synthetic oligonucleotide
ugcaguaaagau

SEQ ID NO: 29766 - RNA, 13 nt, Artificial Sequence
  Description of Artificial Sequence: Synthetic oligonucleotide
aguaaagauccua

SEQ ID NO: 29767 - RNA, 12 nt, Artificial Sequence
  Description of Artificial Sequence: Synthetic oligonucleotide
ugacaaaggaca

SEQ ID NO: 29768 - RNA, 13 nt, Artificial Sequence
  Description of Artificial Sequence: Synthetic oligonucleotide
gcaauugugaccc

SEQ ID NO: 29769 - RNA, 12 nt, Artificial Sequence
  Description of Artificial Sequence: Synthetic oligonucleotide
aacaucauccau

SEQ ID NO: 29770 - RNA, 12 nt, Artificial Sequence
  Description of Artificial Sequence: Synthetic oligonucleotide
ugaaauccaaca

SEQ ID NO: 29771 - RNA, 15 nt, Artificial Sequence
  Description of Artificial Sequence: Synthetic oligonucleotide
aacaauauauuucuc

SEQ ID NO: 29772 - RNA, 14 nt, Artificial Sequence
  Description of Artificial Sequence: Synthetic oligonucleotide
aacaguaaagucac

SEQ ID NO: 29773 - RNA, 14 nt, Artificial Sequence
  Description of Artificial Sequence: Synthetic oligonucleotide
ugugaagaaaguaa

SEQ ID NO: 29774 - RNA, 13 nt, Artificial Sequence
  Description of Artificial Sequence: Synthetic oligonucleotide
cuuccgagccauc

SEQ ID NO: 29775 - RNA, 12 nt, Artificial Sequence
  Description of Artificial Sequence: Synthetic oligonucleotide
aauggagguuga

SEQ ID NO: 29776 - RNA, 12 nt, Artificial Sequence
  Description of Artificial Sequence: Synthetic oligonucleotide
ggagguugaaua

SEQ ID NO: 29777 - RNA, 13 nt, Artificial Sequence
  Description of Artificial Sequence: Synthetic oligonucleotide
auuuugaguuuuc

SEQ ID NO: 29778 - RNA, 12 nt, Artificial Sequence
  Description of Artificial Sequence: Synthetic oligonucleotide
uauccuguuugu

SEQ ID NO: 29779 - RNA, 11 nt, Artificial Sequence
  Description of Artificial Sequence: Synthetic oligonucleotide
ccuguuuguuc

SEQ ID NO: 29780 - RNA, 10 nt, Artificial Sequence
  Description of Artificial Sequence: Synthetic oligonucleotide
cucuacagcc

SEQ ID NO: 29781 - RNA, 12 nt, Artificial Sequence
  Description of Artificial Sequence: Synthetic oligonucleotide
ucuuccauagcu

SEQ ID NO: 29782 - RNA, 12 nt, Artificial Sequence
  Description of Artificial Sequence: Synthetic oligonucleotide
auaaucuuccug

SEQ ID NO: 29783 - RNA, 12 nt, Artificial Sequence
  Description of Artificial Sequence: Synthetic oligonucleotide
uaaucuuccugu

SEQ ID NO: 29784 - RNA, 12 nt, Artificial Sequence
  Description of Artificial Sequence: Synthetic oligonucleotide
cuucaugacuug

SEQ ID NO: 29785 - RNA, 12 nt, Artificial Sequence
  Description of Artificial Sequence: Synthetic oligonucleotide
aagagggagaga

SEQ ID NO: 29786 - RNA, 12 nt, Artificial Sequence
  Description of Artificial Sequence: Synthetic oligonucleotide
cgucuccuacca

SEQ ID NO: 29787 - RNA, 12 nt, Artificial Sequence
  Description of Artificial Sequence: Synthetic oligonucleotide
gaucaaucggcc

SEQ ID NO: 29788 - RNA, 12 nt, Artificial Sequence
  Description of Artificial Sequence: Synthetic oligonucleotide
ggacgaacaucc

SEQ ID NO: 29789 - RNA, 11 nt, Artificial Sequence
  Description of Artificial Sequence: Synthetic oligonucleotide
agggucggaac

SEQ ID NO: 29790 - RNA, 10 nt, Artificial Sequence
  Description of Artificial Sequence: Synthetic oligonucleotide
ucggaaccca

SEQ ID NO: 29791 - RNA, 11 nt, Artificial Sequence
  Description of Artificial Sequence: Synthetic oligonucleotide
acccaagcuua

SEQ ID NO: 29792 - RNA, 14 nt, Artificial Sequence
  Description of Artificial Sequence: Synthetic oligonucleotide
gaacuuuaagcaac

SEQ ID NO: 29793 - RNA, 11 nt, Artificial Sequence
  Description of Artificial Sequence: Synthetic oligonucleotide
acuauucagug

SEQ ID NO: 29794 - RNA, 11 nt, Artificial Sequence
  Description of Artificial Sequence: Synthetic oligonucleotide
cuauucagugg

SEQ ID NO: 29795 - RNA, 13 nt, Artificial Sequence
  Description of Artificial Sequence: Synthetic oligonucleotide
aaacacagauaac

SEQ ID NO: 29796 - RNA, 12 nt, Artificial Sequence
  Description of Artificial Sequence: Synthetic oligonucleotide
cuuaagaaaaga

SEQ ID NO: 29797 - RNA, 12 nt, Artificial Sequence
  Description of Artificial Sequence: Synthetic oligonucleotide
cugaaggagugu

SEQ ID NO: 29798 - RNA, 10 nt, Artificial Sequence
  Description of Artificial Sequence: Synthetic oligonucleotide
ucaccgcggg

SEQ ID NO: 29799 - RNA, 14 nt, Artificial Sequence
  Description of Artificial Sequence: Synthetic oligonucleotide
agcagaaauaagcg

SEQ ID NO: 29800 - RNA, 12 nt, Artificial Sequence
  Description of Artificial Sequence: Synthetic oligonucleotide
aagcgugccguu

SEQ ID NO: 29801 - RNA, 12 nt, Artificial Sequence
  Description of Artificial Sequence: Synthetic oligonucleotide
agaaacagucac

SEQ ID NO: 29802 - RNA, 12 nt, Artificial Sequence
  Description of Artificial Sequence: Synthetic oligonucleotide
agaggaagaagg

SEQ ID NO: 29803 - RNA, 14 nt, Artificial Sequence
  Description of Artificial Sequence: Synthetic oligonucleotide
uguauucaaaauau

SEQ ID NO: 29804 - RNA, 13 nt, Artificial Sequence
  Description of Artificial Sequence: Synthetic oligonucleotide
auuuuccucccuu

SEQ ID NO: 29805 - RNA, 13 nt, Artificial Sequence
  Description of Artificial Sequence: Synthetic oligonucleotide
caaagaaagauag

SEQ ID NO: 29806 - RNA, 12 nt, Artificial Sequence
  Description of Artificial Sequence: Synthetic oligonucleotide
aagaaagauaga

SEQ ID NO: 29807 - RNA, 13 nt, Artificial Sequence
  Description of Artificial Sequence: Synthetic oligonucleotide
gaaagcauuuguu

SEQ ID NO: 29808 - RNA, 13 nt, Artificial Sequence
  Description of Artificial Sequence: Synthetic oligonucleotide
ugaguuaaacgaa

SEQ ID NO: 29809 - RNA, 12 nt, Artificial Sequence
  Description of Artificial Sequence: Synthetic oligonucleotide
acugauacagaa

SEQ ID NO: 29810 - RNA, 12 nt, Artificial Sequence
  Description of Artificial Sequence: Synthetic oligonucleotide
auauuauauaua

SEQ ID NO: 29811 - RNA, 12 nt, Artificial Sequence
  Description of Artificial Sequence: Synthetic oligonucleotide
auuauauauaua

SEQ ID NO: 29812 - RNA, 12 nt, Artificial Sequence
  Description of Artificial Sequence: Synthetic oligonucleotide
ucacuggaugua

SEQ ID NO: 29813 - RNA, 12 nt, Artificial Sequence
  Description of Artificial Sequence: Synthetic oligonucleotide
cagggaagagga

SEQ ID NO: 29814 - RNA, 15 nt, Artificial Sequence
  Description of Artificial Sequence: Synthetic oligonucleotide
augaucuuuuuuuug

SEQ ID NO: 29815 - RNA, 11 nt, Artificial Sequence
  Description of Artificial Sequence: Synthetic oligonucleotide
aguucacggcc

SEQ ID NO: 29816 - RNA, 13 nt, Artificial Sequence
  Description of Artificial Sequence: Synthetic oligonucleotide
caccaucacacca

SEQ ID NO: 29817 - RNA, 11 nt, Artificial Sequence
  Description of Artificial Sequence: Synthetic oligonucleotide
ccugcggguuu

SEQ ID NO: 29818 - RNA, 10 nt, Artificial Sequence
  Description of Artificial Sequence: Synthetic oligonucleotide
auccaguuug

SEQ ID NO: 29819 - RNA, 13 nt, Artificial Sequence
  Description of Artificial Sequence: Synthetic oligonucleotide
guuaaggacuucu

SEQ ID NO: 29820 - RNA, 13 nt, Artificial Sequence
  Description of Artificial Sequence: Synthetic oligonucleotide
cagugggacagag

SEQ ID NO: 29821 - RNA, 14 nt, Artificial Sequence
  Description of Artificial Sequence: Synthetic oligonucleotide
aauuuguuauugug

SEQ ID NO: 29822 - RNA, 13 nt, Artificial Sequence
  Description of Artificial Sequence: Synthetic oligonucleotide
uucaaaugcauuu

SEQ ID NO: 29823 - RNA, 10 nt, Artificial Sequence
  Description of Artificial Sequence: Synthetic oligonucleotide
caggaaagcc

SEQ ID NO: 29824 - RNA, 11 nt, Artificial Sequence
  Description of Artificial Sequence: Synthetic oligonucleotide
aggaaagcccu

SEQ ID NO: 29825 - RNA, 12 nt, Artificial Sequence
  Description of Artificial Sequence: Synthetic oligonucleotide
cccagcauggcc

SEQ ID NO: 29826 - RNA, 11 nt, Artificial Sequence
  Description of Artificial Sequence: Synthetic oligonucleotide
cuucucccuga

SEQ ID NO: 29827 - RNA, 12 nt, Artificial Sequence
  Description of Artificial Sequence: Synthetic oligonucleotide
gaagaagcccuu

SEQ ID NO: 29828 - RNA, 12 nt, Artificial Sequence
  Description of Artificial Sequence: Synthetic oligonucleotide
agaagcccuuca

SEQ ID NO: 29829 - RNA, 11 nt, Artificial Sequence
  Description of Artificial Sequence: Synthetic oligonucleotide
gcccuucagcg

SEQ ID NO: 29830 - RNA, 11 nt, Artificial Sequence
  Description of Artificial Sequence: Synthetic oligonucleotide
ccuucagcggc

SEQ ID NO: 29831 - RNA, 12 nt, Artificial Sequence
  Description of Artificial Sequence: Synthetic oligonucleotide
ucagcggccagu

SEQ ID NO: 29832 - RNA, 12 nt, Artificial Sequence
  Description of Artificial Sequence: Synthetic oligonucleotide
ugaaaagcuccg

SEQ ID NO: 29833 - RNA, 11 nt, Artificial Sequence
  Description of Artificial Sequence: Synthetic oligonucleotide
aaaagcuccgg

SEQ ID NO: 29834 - RNA, 13 nt, Artificial Sequence
  Description of Artificial Sequence: Synthetic oligonucleotide
agucaacagucug

SEQ ID NO: 29835 - RNA, 13 nt, Artificial Sequence
  Description of Artificial Sequence: Synthetic oligonucleotide
cagaguucaaaag

SEQ ID NO: 29836 - RNA, 13 nt, Artificial Sequence
  Description of Artificial Sequence: Synthetic oligonucleotide
agaguucaaaagc

SEQ ID NO: 29837 - RNA, 12 nt, Artificial Sequence
  Description of Artificial Sequence: Synthetic oligonucleotide
uucaaaagcccu

SEQ ID NO: 29838 - RNA, 12 nt, Artificial Sequence
  Description of Artificial Sequence: Synthetic oligonucleotide
ucaaaagcccuu

SEQ ID NO: 29839 - RNA, 12 nt, Artificial Sequence
  Description of Artificial Sequence: Synthetic oligonucleotide
aaaagcccuuca

SEQ ID NO: 29840 - RNA, 12 nt, Artificial Sequence
  Description of Artificial Sequence: Synthetic oligonucleotide
aaagcccuucag

SEQ ID NO: 29841 - RNA, 13 nt, Artificial Sequence
  Description of Artificial Sequence: Synthetic oligonucleotide
gugaagccgcucg

SEQ ID NO: 29842 - RNA, 12 nt, Artificial Sequence
  Description of Artificial Sequence: Synthetic oligonucleotide
cacgccagucaa

SEQ ID NO: 29843 - RNA, 13 nt, Artificial Sequence
  Description of Artificial Sequence: Synthetic oligonucleotide
uucuuggugcgug

SEQ ID NO: 29844 - RNA, 14 nt, Artificial Sequence
  Description of Artificial Sequence: Synthetic oligonucleotide
auuggauucaucag

SEQ ID NO: 29845 - RNA, 13 nt, Artificial Sequence
  Description of Artificial Sequence: Synthetic oligonucleotide
uggaauaccuaag

SEQ ID NO: 29846 - RNA, 12 nt, Artificial Sequence
  Description of Artificial Sequence: Synthetic oligonucleotide
auuugaggcuca

SEQ ID NO: 29847 - RNA, 11 nt, Artificial Sequence
  Description of Artificial Sequence: Synthetic oligonucleotide
ucuacaauugg

SEQ ID NO: 29848 - RNA, 12 nt, Artificial Sequence
  Description of Artificial Sequence: Synthetic oligonucleotide
uaguuaggagcc

SEQ ID NO: 29849 - RNA, 13 nt, Artificial Sequence
  Description of Artificial Sequence: Synthetic oligonucleotide
agucaauauccac

SEQ ID NO: 29850 - RNA, 13 nt, Artificial Sequence
  Description of Artificial Sequence: Synthetic oligonucleotide
auguucagucaca

SEQ ID NO: 29851 - RNA, 12 nt, Artificial Sequence
  Description of Artificial Sequence: Synthetic oligonucleotide
acacacacauac

SEQ ID NO: 29852 - RNA, 12 nt, Artificial Sequence
  Description of Artificial Sequence: Synthetic oligonucleotide
uuccuuuugcuu

SEQ ID NO: 29853 - RNA, 16 nt, Artificial Sequence
  Description of Artificial Sequence: Synthetic oligonucleotide
uuuuaaaguaauuuuu

SEQ ID NO: 29854 - RNA, 13 nt, Artificial Sequence
  Description of Artificial Sequence: Synthetic oligonucleotide
caacagucaaugg

SEQ ID NO: 29855 - RNA, 13 nt, Artificial Sequence
  Description of Artificial Sequence: Synthetic oligonucleotide
ucgacaaaccaau

SEQ ID NO: 29856 - RNA, 12 nt, Artificial Sequence
  Description of Artificial Sequence: Synthetic oligonucleotide
acugcuaccacu

SEQ ID NO: 29857 - RNA, 13 nt, Artificial Sequence
  Description of Artificial Sequence: Synthetic oligonucleotide
gcaagcggucuua

SEQ ID NO: 29858 - RNA, 13 nt, Artificial Sequence
  Description of Artificial Sequence: Synthetic oligonucleotide
ggucuuaccggcu

SEQ ID NO: 29859 - RNA, 11 nt, Artificial Sequence
  Description of Artificial Sequence: Synthetic oligonucleotide
gauggguuacc

SEQ ID NO: 29860 - RNA, 11 nt, Artificial Sequence
  Description of Artificial Sequence: Synthetic oligonucleotide
guuaccugcga

SEQ ID NO: 29861 - RNA, 12 nt, Artificial Sequence
  Description of Artificial Sequence: Synthetic oligonucleotide
aaucuugcugag

SEQ ID NO: 29862 - RNA, 13 nt, Artificial Sequence
  Description of Artificial Sequence: Synthetic oligonucleotide
agcauaaaacagu

SEQ ID NO: 29863 - RNA, 12 nt, Artificial Sequence
  Description of Artificial Sequence: Synthetic oligonucleotide
guccuuuauccu

SEQ ID NO: 29864 - RNA, 12 nt, Artificial Sequence
  Description of Artificial Sequence: Synthetic oligonucleotide
caacgcaaguug

SEQ ID NO: 29865 - RNA, 13 nt, Artificial Sequence
  Description of Artificial Sequence: Synthetic oligonucleotide
aaacugaaaccau

SEQ ID NO: 29866 - RNA, 14 nt, Artificial Sequence
  Description of Artificial Sequence: Synthetic oligonucleotide
acuuuguuaaauau

SEQ ID NO: 29867 - RNA, 14 nt, Artificial Sequence
  Description of Artificial Sequence: Synthetic oligonucleotide
guauauuaaaaguu

SEQ ID NO: 29868 - RNA, 13 nt, Artificial Sequence
  Description of Artificial Sequence: Synthetic oligonucleotide
guuuugacuuaac

SEQ ID NO: 29869 - RNA, 13 nt, Artificial Sequence
  Description of Artificial Sequence: Synthetic oligonucleotide
gcaaacucagcac

SEQ ID NO: 29870 - RNA, 11 nt, Artificial Sequence
  Description of Artificial Sequence: Synthetic oligonucleotide
ugcugaccuca

SEQ ID NO: 29871 - RNA, 14 nt, Artificial Sequence
  Description of Artificial Sequence: Synthetic oligonucleotide
uuuauucagaucgc

SEQ ID NO: 29872 - RNA, 13 nt, Artificial Sequence
  Description of Artificial Sequence: Synthetic oligonucleotide
aggguucugggau

SEQ ID NO: 29873 - RNA, 15 nt, Artificial Sequence
  Description of Artificial Sequence: Synthetic oligonucleotide
auauuggaaauuaug

SEQ ID NO: 29874 - RNA, 13 nt, Artificial Sequence
  Description of Artificial Sequence: Synthetic oligonucleotide
auggaagcacuag

SEQ ID NO: 29875 - RNA, 13 nt, Artificial Sequence
  Description of Artificial Sequence: Synthetic oligonucleotide
guuuuuaugugga

SEQ ID NO: 29876 - RNA, 12 nt, Artificial Sequence
  Description of Artificial Sequence: Synthetic oligonucleotide
ggaauugguaga

SEQ ID NO: 29877 - RNA, 13 nt, Artificial Sequence
  Description of Artificial Sequence: Synthetic oligonucleotide
uuagacuuggaga

SEQ ID NO: 29878 - RNA, 13 nt, Artificial Sequence
  Description of Artificial Sequence: Synthetic oligonucleotide
uuacaguauucca

SEQ ID NO: 29879 - RNA, 15 nt, Artificial Sequence
  Description of Artificial Sequence: Synthetic oligonucleotide
ccacugaugaauuaa

SEQ ID NO: 29880 - RNA, 12 nt, Artificial Sequence
  Description of Artificial Sequence: Synthetic oligonucleotide
ccacaucaucac

SEQ ID NO: 29881 - RNA, 13 nt, Artificial Sequence
  Description of Artificial Sequence: Synthetic oligonucleotide
cucaccaaacaga

SEQ ID NO: 29882 - RNA, 12 nt, Artificial Sequence
  Description of Artificial Sequence: Synthetic oligonucleotide
ggaacaugaugg

SEQ ID NO: 29883 - RNA, 12 nt, Artificial Sequence
  Description of Artificial Sequence: Synthetic oligonucleotide
cauguagacugc

SEQ ID NO: 29884 - RNA, 13 nt, Artificial Sequence
  Description of Artificial Sequence: Synthetic oligonucleotide
ggaucuauuuaug

SEQ ID NO: 29885 - RNA, 12 nt, Artificial Sequence
  Description of Artificial Sequence: Synthetic oligonucleotide
gcacuauuauca

SEQ ID NO: 29886 - RNA, 11 nt, Artificial Sequence
  Description of Artificial Sequence: Synthetic oligonucleotide
aucaguucugc

SEQ ID NO: 29887 - RNA, 13 nt, Artificial Sequence
  Description of Artificial Sequence: Synthetic oligonucleotide
agauuaaaccuac

SEQ ID NO: 29888 - RNA, 13 nt, Artificial Sequence
  Description of Artificial Sequence: Synthetic oligonucleotide
auaaaauccuucu

SEQ ID NO: 29889 - RNA, 12 nt, Artificial Sequence
  Description of Artificial Sequence: Synthetic oligonucleotide
aaugcuguagac

SEQ ID NO: 29890 - RNA, 13 nt, Artificial Sequence
  Description of Artificial Sequence: Synthetic oligonucleotide
uugauaggaauag

SEQ ID NO: 29891 - RNA, 11 nt, Artificial Sequence
  Description of Artificial Sequence: Synthetic oligonucleotide
aauggcccuga

SEQ ID NO: 29892 - RNA, 11 nt, Artificial Sequence
  Description of Artificial Sequence: Synthetic oligonucleotide
uuccucaagca

SEQ ID NO: 29893 - RNA, 10 nt, Artificial Sequence
  Description of Artificial Sequence: Synthetic oligonucleotide
guucagccca

SEQ ID NO: 29894 - RNA, 11 nt, Artificial Sequence
  Description of Artificial Sequence: Synthetic oligonucleotide
gcugcugaacc

SEQ ID NO: 29895 - RNA, 12 nt, Artificial Sequence
  Description of Artificial Sequence: Synthetic oligonucleotide
aaguucucuuca

SEQ ID NO: 29896 - RNA, 11 nt, Artificial Sequence
  Description of Artificial Sequence: Synthetic oligonucleotide
ccagccuagag

SEQ ID NO: 29897 - RNA, 13 nt, Artificial Sequence
  Description of Artificial Sequence: Synthetic oligonucleotide
cucugugaagugu

SEQ ID NO: 29898 - RNA, 14 nt, Artificial Sequence
  Description of Artificial Sequence: Synthetic oligonucleotide
ugagaaaauuucaa

SEQ ID NO: 29899 - RNA, 11 nt, Artificial Sequence
  Description of Artificial Sequence: Synthetic oligonucleotide
aauccuccuga

SEQ ID NO: 29900 - RNA, 12 nt, Artificial Sequence
  Description of Artificial Sequence: Synthetic oligonucleotide
gugacaucauau

SEQ ID NO: 29901 - RNA, 13 nt, Artificial Sequence
  Description of Artificial Sequence: Synthetic oligonucleotide
aaucuucaucaua

SEQ ID NO: 29902 - RNA, 13 nt, Artificial Sequence
  Description of Artificial Sequence: Synthetic oligonucleotide
gacuagcuauuaa

SEQ ID NO: 29903 - RNA, 14 nt, Artificial Sequence
  Description of Artificial Sequence: Synthetic oligonucleotide
ucucuacuaaaaau

SEQ ID NO: 29904 - RNA, 12 nt, Artificial Sequence
  Description of Artificial Sequence: Synthetic oligonucleotide
ucuaucucgccu

SEQ ID NO: 29905 - RNA, 13 nt, Artificial Sequence
  Description of Artificial Sequence: Synthetic oligonucleotide
cuucgguccaguu

SEQ ID NO: 29906 - RNA, 11 nt, Artificial Sequence
  Description of Artificial Sequence: Synthetic oligonucleotide
gauguagccgc

SEQ ID NO: 29907 - RNA, 12 nt, Artificial Sequence
  Description of Artificial Sequence: Synthetic oligonucleotide
ugaggagacuug

SEQ ID NO: 29908 - RNA, 12 nt, Artificial Sequence
  Description of Artificial Sequence: Synthetic oligonucleotide
gaguagugagga

SEQ ID NO: 29909 - RNA, 14 nt, Artificial Sequence
  Description of Artificial Sequence: Synthetic oligonucleotide
cagaugaguacaaa

SEQ ID NO: 29910 - RNA, 13 nt, Artificial Sequence
  Description of Artificial Sequence: Synthetic oligonucleotide
guuguuaaugggc

SEQ ID NO: 29911 - RNA, 13 nt, Artificial Sequence
  Description of Artificial Sequence: Synthetic oligonucleotide
uuuuuaauuuauu

SEQ ID NO: 29912 - RNA, 12 nt, Artificial Sequence
  Description of Artificial Sequence: Synthetic oligonucleotide
uauuuaaauaug

SEQ ID NO: 29913 - RNA, 13 nt, Artificial Sequence
  Description of Artificial Sequence: Synthetic oligonucleotide
uauccuuuguuuc

SEQ ID NO: 29914 - RNA, 14 nt, Artificial Sequence
  Description of Artificial Sequence: Synthetic oligonucleotide
cgucuaaguguuug

SEQ ID NO: 29915 - RNA, 12 nt, Artificial Sequence
  Description of Artificial Sequence: Synthetic oligonucleotide
accugugacaaa

SEQ ID NO: 29916 - RNA, 13 nt, Artificial Sequence
  Description of Artificial Sequence: Synthetic oligonucleotide
ccaggcugaauua

SEQ ID NO: 29917 - RNA, 14 nt, Artificial Sequence
  Description of Artificial Sequence: Synthetic oligonucleotide
gucauucuuacaau

SEQ ID NO: 29918 - RNA, 15 nt, Artificial Sequence
  Description of Artificial Sequence: Synthetic oligonucleotide
ucauucuuacaauug

SEQ ID NO: 29919 - RNA, 12 nt, Artificial Sequence
  Description of Artificial Sequence: Synthetic oligonucleotide
cagagaguguac

SEQ ID NO: 29920 - RNA, 12 nt, Artificial Sequence
  Description of Artificial Sequence: Synthetic oligonucleotide
agaacucagcag

SEQ ID NO: 29921 - RNA, 13 nt, Artificial Sequence
  Description of Artificial Sequence: Synthetic oligonucleotide
uuuauuuucagua

SEQ ID NO: 29922 - RNA, 12 nt, Artificial Sequence
  Description of Artificial Sequence: Synthetic oligonucleotide
ucuuaaauggaa

SEQ ID NO: 29923 - RNA, 13 nt, Artificial Sequence
  Description of Artificial Sequence: Synthetic oligonucleotide
ugccuaaaauugu

SEQ ID NO: 29924 - RNA, 12 nt, Artificial Sequence
  Description of Artificial Sequence: Synthetic oligonucleotide
agacugugagcu

SEQ ID NO: 29925 - RNA, 14 nt, Artificial Sequence
  Description of Artificial Sequence: Synthetic oligonucleotide
ugcuuuuuauuaau

SEQ ID NO: 29926 - RNA, 13 nt, Artificial Sequence
  Description of Artificial Sequence: Synthetic oligonucleotide
cucuucuuacauu

SEQ ID NO: 29927 - RNA, 15 nt, Artificial Sequence
  Description of Artificial Sequence: Synthetic oligonucleotide
cauuuguaaaaaugu

SEQ ID NO: 29928 - RNA, 15 nt, Artificial Sequence
  Description of Artificial Sequence: Synthetic oligonucleotide
aucuuaauucauauu

SEQ ID NO: 29929 - RNA, 13 nt, Artificial Sequence
  Description of Artificial Sequence: Synthetic oligonucleotide
gaacuaaucauga

SEQ ID NO: 29930 - RNA, 12 nt, Artificial Sequence
  Description of Artificial Sequence: Synthetic oligonucleotide
ucugcucuuggg

SEQ ID NO: 29931 - RNA, 13 nt, Artificial Sequence
  Description of Artificial Sequence: Synthetic oligonucleotide
caguagcuuugag

SEQ ID NO: 29932 - RNA, 14 nt, Artificial Sequence
  Description of Artificial Sequence: Synthetic oligonucleotide
cacguaauauuuca

SEQ ID NO: 29933 - RNA, 13 nt, Artificial Sequence
  Description of Artificial Sequence: Synthetic oligonucleotide
uauucucuucacu

SEQ ID NO: 29934 - RNA, 14 nt, Artificial Sequence
  Description of Artificial Sequence: Synthetic oligonucleotide
cuaaugcuaagaaa

SEQ ID NO: 29935 - RNA, 12 nt, Artificial Sequence
  Description of Artificial Sequence: Synthetic oligonucleotide
gcugaaaaucaa

SEQ ID NO: 29936 - RNA, 14 nt, Artificial Sequence
  Description of Artificial Sequence: Synthetic oligonucleotide
aauaugauuacuuu

SEQ ID NO: 29937 - RNA, 14 nt, Artificial Sequence
  Description of Artificial Sequence: Synthetic oligonucleotide
cauuuuguucuaca

SEQ ID NO: 29938 - RNA, 12 nt, Artificial Sequence
  Description of Artificial Sequence: Synthetic oligonucleotide
cccgggacucuc

SEQ ID NO: 29939 - RNA, 14 nt, Artificial Sequence
  Description of Artificial Sequence: Synthetic oligonucleotide
ccuuuaaaguaaag

SEQ ID NO: 29940 - RNA, 13 nt, Artificial Sequence
  Description of Artificial Sequence: Synthetic oligonucleotide
ucuggaagccugg

SEQ ID NO: 29941 - RNA, 14 nt, Artificial Sequence
  Description of Artificial Sequence: Synthetic oligonucleotide
aaaacaaaagagag

SEQ ID NO: 29942 - RNA, 13 nt, Artificial Sequence
  Description of Artificial Sequence: Synthetic oligonucleotide
aucaguuaugccg

SEQ ID NO: 29943 - RNA, 13 nt, Artificial Sequence
  Description of Artificial Sequence: Synthetic oligonucleotide
uaaaagaagucca

SEQ ID NO: 29944 - RNA, 11 nt, Artificial Sequence
  Description of Artificial Sequence: Synthetic oligonucleotide
aggugagguua

SEQ ID NO: 29945 - RNA, 11 nt, Artificial Sequence
  Description of Artificial Sequence: Synthetic oligonucleotide
gggaagaggac

SEQ ID NO: 29946 - RNA, 13 nt, Artificial Sequence
  Description of Artificial Sequence: Synthetic oligonucleotide
aagcaaguauugu

SEQ ID NO: 29947 - RNA, 12 nt, Artificial Sequence
  Description of Artificial Sequence: Synthetic oligonucleotide
auuguagcacuc

SEQ ID NO: 29948 - RNA, 14 nt, Artificial Sequence
  Description of Artificial Sequence: Synthetic oligonucleotide
acaaaaccacaaau

SEQ ID NO: 29949 - RNA, 12 nt, Artificial Sequence
  Description of Artificial Sequence: Synthetic oligonucleotide
uaagcccauaca

SEQ ID NO: 29950 - RNA, 11 nt, Artificial Sequence
  Description of Artificial Sequence: Synthetic oligonucleotide
agcccauacag

SEQ ID NO: 29951 - RNA, 12 nt, Artificial Sequence
  Description of Artificial Sequence: Synthetic oligonucleotide
cagaaaccuucc

SEQ ID NO: 29952 - RNA, 10 nt, Artificial Sequence
  Description of Artificial Sequence: Synthetic oligonucleotide
guauaccuac

SEQ ID NO: 29953 - RNA, 13 nt, Artificial Sequence
  Description of Artificial Sequence: Synthetic oligonucleotide
gccaguuuucgga

SEQ ID NO: 29954 - RNA, 9 nt, Artificial Sequence
  Description of Artificial Sequence: Synthetic oligonucleotide
ggaacaggg

SEQ ID NO: 29955 - RNA, 13 nt, Artificial Sequence
  Description of Artificial Sequence: Synthetic oligonucleotide
uuaacuuuccagu

SEQ ID NO: 29956 - RNA, 14 nt, Artificial Sequence
  Description of Artificial Sequence: Synthetic oligonucleotide
aaaguuugguuuug

SEQ ID NO: 29957 - RNA, 12 nt, Artificial Sequence
  Description of Artificial Sequence: Synthetic oligonucleotide
cuucccacugua

SEQ ID NO: 29958 - RNA, 13 nt, Artificial Sequence
  Description of Artificial Sequence: Synthetic oligonucleotide
ugauaccauauga

SEQ ID NO: 29959 - RNA, 11 nt, Artificial Sequence
  Description of Artificial Sequence: Synthetic oligonucleotide
aacaugggcug

SEQ ID NO: 29960 - RNA, 13 nt, Artificial Sequence
  Description of Artificial Sequence: Synthetic oligonucleotide
caacuuuuucaua

SEQ ID NO: 29961 - RNA, 12 nt, Artificial Sequence
  Description of Artificial Sequence: Synthetic oligonucleotide
caugaggccgga

SEQ ID NO: 29962 - RNA, 11 nt, Artificial Sequence
  Description of Artificial Sequence: Synthetic oligonucleotide
acugcauuugu

SEQ ID NO: 29963 - RNA, 13 nt, Artificial Sequence
  Description of Artificial Sequence: Synthetic oligonucleotide
aauguuuacuacc

SEQ ID NO: 29964 - RNA, 15 nt, Artificial Sequence
  Description of Artificial Sequence: Synthetic oligonucleotide
aauuuuuugaugaaa

SEQ ID NO: 29965 - RNA, 14 nt, Artificial Sequence
  Description of Artificial Sequence: Synthetic oligonucleotide
cagugugugaauuu

SEQ ID NO: 29966 - RNA, 13 nt, Artificial Sequence
  Description of Artificial Sequence: Synthetic oligonucleotide
gagcaauguaugu

SEQ ID NO: 29967 - RNA, 14 nt, Artificial Sequence
  Description of Artificial Sequence: Synthetic oligonucleotide
aaagcacauauaua

SEQ ID NO: 29968 - RNA, 14 nt, Artificial Sequence
  Description of Artificial Sequence: Synthetic oligonucleotide
guaauaguuucucc

SEQ ID NO: 29969 - RNA, 13 nt, Artificial Sequence
  Description of Artificial Sequence: Synthetic oligonucleotide
aguuucuccaaau

SEQ ID NO: 29970 - RNA, 13 nt, Artificial Sequence
  Description of Artificial Sequence: Synthetic oligonucleotide
uacuuccuagaaa

SEQ ID NO: 29971 - RNA, 13 nt, Artificial Sequence
  Description of Artificial Sequence: Synthetic oligonucleotide
uacaccauauaug

SEQ ID NO: 29972 - RNA, 14 nt, Artificial Sequence
  Description of Artificial Sequence: Synthetic oligonucleotide
auauaugaauggag

SEQ ID NO: 29973 - RNA, 13 nt, Artificial Sequence
  Description of Artificial Sequence: Synthetic oligonucleotide
acgagaagaagau

SEQ ID NO: 29974 - RNA, 13 nt, Artificial Sequence
  Description of Artificial Sequence: Synthetic oligonucleotide
ucauuuacaggga

SEQ ID NO: 29975 - RNA, 13 nt, Artificial Sequence
  Description of Artificial Sequence: Synthetic oligonucleotide
cauuuacagggac

SEQ ID NO: 29976 - RNA, 10 nt, Artificial Sequence
  Description of Artificial Sequence: Synthetic oligonucleotide
agggaccuga

SEQ ID NO: 29977 - RNA, 14 nt, Artificial Sequence
  Description of Artificial Sequence: Synthetic oligonucleotide
uguuugacugcauc

SEQ ID NO: 29978 - RNA, 13 nt, Artificial Sequence
  Description of Artificial Sequence: Synthetic oligonucleotide
uuugacugcaucg

SEQ ID NO: 29979 - RNA, 12 nt, Artificial Sequence
  Description of Artificial Sequence: Synthetic oligonucleotide
gaguucacaggg

SEQ ID NO: 29980 - RNA, 13 nt, Artificial Sequence
  Description of Artificial Sequence: Synthetic oligonucleotide
ggcaccucugucc

SEQ ID NO: 29981 - RNA, 15 nt, Artificial Sequence
  Description of Artificial Sequence: Synthetic oligonucleotide
gguuugucuuuuuaa

SEQ ID NO: 29982 - RNA, 14 nt, Artificial Sequence
  Description of Artificial Sequence: Synthetic oligonucleotide
uuugucuuuuuaag

SEQ ID NO: 29983 - RNA, 13 nt, Artificial Sequence
  Description of Artificial Sequence: Synthetic oligonucleotide
ccuaaagguuguc

SEQ ID NO: 29984 - RNA, 12 nt, Artificial Sequence
  Description of Artificial Sequence: Synthetic oligonucleotide
aagguugucgac

SEQ ID NO: 29985 - RNA, 13 nt, Artificial Sequence
  Description of Artificial Sequence: Synthetic oligonucleotide
accuggcaauugu

SEQ ID NO: 29986 - RNA, 12 nt, Artificial Sequence
  Description of Artificial Sequence: Synthetic oligonucleotide
aguggugcgagg

SEQ ID NO: 29987 - RNA, 13 nt, Artificial Sequence
  Description of Artificial Sequence: Synthetic oligonucleotide
agagacaugaaau

SEQ ID NO: 29988 - RNA, 13 nt, Artificial Sequence
  Description of Artificial Sequence: Synthetic oligonucleotide
auauauuucucca

SEQ ID NO: 29989 - RNA, 10 nt, Artificial Sequence
  Description of Artificial Sequence: Synthetic oligonucleotide
caugaaggcu

SEQ ID NO: 29990 - RNA, 11 nt, Artificial Sequence
  Description of Artificial Sequence: Synthetic oligonucleotide
gcuggaguggu

SEQ ID NO: 29991 - RNA, 11 nt, Artificial Sequence
  Description of Artificial Sequence: Synthetic oligonucleotide
aggaagagagg

SEQ ID NO: 29992 - RNA, 12 nt, Artificial Sequence
  Description of Artificial Sequence: Synthetic oligonucleotide
cuugcaucgggc

SEQ ID NO: 29993 - RNA, 13 nt, Artificial Sequence
  Description of Artificial Sequence: Synthetic oligonucleotide
auauccuacugug

SEQ ID NO: 29994 - RNA, 13 nt, Artificial Sequence
  Description of Artificial Sequence: Synthetic oligonucleotide
uccuacuguguaa

SEQ ID NO: 29995 - RNA, 12 nt, Artificial Sequence
  Description of Artificial Sequence: Synthetic oligonucleotide
ccuuguagugua

SEQ ID NO: 29996 - RNA, 13 nt, Artificial Sequence
  Description of Artificial Sequence: Synthetic oligonucleotide
ucuuuguugauug

SEQ ID NO: 29997 - RNA, 14 nt, Artificial Sequence
  Description of Artificial Sequence: Synthetic oligonucleotide
uuuguugauugaaa

SEQ ID NO: 29998 - RNA, 15 nt, Artificial Sequence
  Description of Artificial Sequence: Synthetic oligonucleotide
uucuuuuucuuccau

SEQ ID NO: 29999 - RNA, 13 nt, Artificial Sequence
  Description of Artificial Sequence: Synthetic oligonucleotide
aaucuuccuucua

SEQ ID NO: 30000 - RNA, 13 nt, Artificial Sequence
  Description of Artificial Sequence: Synthetic oligonucleotide
uugaaugcuucau

SEQ ID NO: 30001 - RNA, 13 nt, Artificial Sequence
  Description of Artificial Sequence: Synthetic oligonucleotide
ugaaugcuucaug

SEQ ID NO: 30002 - RNA, 13 nt, Artificial Sequence
  Description of Artificial Sequence: Synthetic oligonucleotide
aauucuacuuuga

SEQ ID NO: 30003 - RNA, 13 nt, Artificial Sequence
  Description of Artificial Sequence: Synthetic oligonucleotide
agcaacuacagac

SEQ ID NO: 30004 - RNA, 13 nt, Artificial Sequence
  Description of Artificial Sequence: Synthetic oligonucleotide
gaccaaggucaac

SEQ ID NO: 30005 - RNA, 13 nt, Artificial Sequence
  Description of Artificial Sequence: Synthetic oligonucleotide
cgacuaucucgac

SEQ ID NO: 30006 - RNA, 13 nt, Artificial Sequence
  Description of Artificial Sequence: Synthetic oligonucleotide
aaccuucccaaac

SEQ ID NO: 30007 - RNA, 14 nt, Artificial Sequence
  Description of Artificial Sequence: Synthetic oligonucleotide
ccaagcuuagaacu

SEQ ID NO: 30008 - RNA, 15 nt, Artificial Sequence
  Description of Artificial Sequence: Synthetic oligonucleotide
agcuuagaacuuuaa

SEQ ID NO: 30009 - RNA, 11 nt, Artificial Sequence
  Description of Artificial Sequence: Synthetic oligonucleotide
aagaccaccac

SEQ ID NO: 30010 - RNA, 14 nt, Artificial Sequence
  Description of Artificial Sequence: Synthetic oligonucleotide
gcgagaaauaaagu

SEQ ID NO: 30011 - RNA, 14 nt, Artificial Sequence
  Description of Artificial Sequence: Synthetic oligonucleotide
cgagaaauaaaguu

SEQ ID NO: 30012 - RNA, 12 nt, Artificial Sequence
  Description of Artificial Sequence: Synthetic oligonucleotide
aggaaaugaucc

SEQ ID NO: 30013 - RNA, 13 nt, Artificial Sequence
  Description of Artificial Sequence: Synthetic oligonucleotide
gaagaaaugaaac

SEQ ID NO: 30014 - RNA, 13 nt, Artificial Sequence
  Description of Artificial Sequence: Synthetic oligonucleotide
guuuccauccucc

SEQ ID NO: 30015 - RNA, 15 nt, Artificial Sequence
  Description of Artificial Sequence: Synthetic oligonucleotide
acugaaaaucuuuga

SEQ ID NO: 30016 - RNA, 11 nt, Artificial Sequence
  Description of Artificial Sequence: Synthetic oligonucleotide
ugccguucagg

SEQ ID NO: 30017 - RNA, 13 nt, Artificial Sequence
  Description of Artificial Sequence: Synthetic oligonucleotide
caggguccagaag

SEQ ID NO: 30018 - RNA, 13 nt, Artificial Sequence
  Description of Artificial Sequence: Synthetic oligonucleotide
ucaagacugcuug

SEQ ID NO: 30019 - RNA, 13 nt, Artificial Sequence
  Description of Artificial Sequence: Synthetic oligonucleotide
uccaugucuuugg

SEQ ID NO: 30020 - RNA, 11 nt, Artificial Sequence
  Description of Artificial Sequence: Synthetic oligonucleotide
gccugaaacac

SEQ ID NO: 30021 - RNA, 12 nt, Artificial Sequence
  Description of Artificial Sequence: Synthetic oligonucleotide
ucucuguaccuc

SEQ ID NO: 30022 - RNA, 12 nt, Artificial Sequence
  Description of Artificial Sequence: Synthetic oligonucleotide
agcaagacaaga

SEQ ID NO: 30023 - RNA, 13 nt, Artificial Sequence
  Description of Artificial Sequence: Synthetic oligonucleotide
gcaagacaagaaa

SEQ ID NO: 30024 - RNA, 12 nt, Artificial Sequence
  Description of Artificial Sequence: Synthetic oligonucleotide
uguacaagaucc

SEQ ID NO: 30025 - RNA, 12 nt, Artificial Sequence
  Description of Artificial Sequence: Synthetic oligonucleotide
cguacuugcaga

SEQ ID NO: 30026 - RNA, 13 nt, Artificial Sequence
  Description of Artificial Sequence: Synthetic oligonucleotide
cgaucgauacaga

SEQ ID NO: 30027 - RNA, 13 nt, Artificial Sequence
  Description of Artificial Sequence: Synthetic oligonucleotide
uauaaaaauaaau

SEQ ID NO: 30028 - RNA, 13 nt, Artificial Sequence
  Description of Artificial Sequence: Synthetic oligonucleotide
uaaaaauaaauau

SEQ ID NO: 30029 - RNA, 13 nt, Artificial Sequence
  Description of Artificial Sequence: Synthetic oligonucleotide
uuugacugcugug

SEQ ID NO: 30030 - RNA, 13 nt, Artificial Sequence
  Description of Artificial Sequence: Synthetic oligonucleotide
ggagaugagagac

SEQ ID NO: 30031 - RNA, 10 nt, Artificial Sequence
  Description of Artificial Sequence: Synthetic oligonucleotide
ucccacuugg

SEQ ID NO: 30032 - RNA, 10 nt, Artificial Sequence
  Description of Artificial Sequence: Synthetic oligonucleotide
guucacggcc

SEQ ID NO: 30033 - RNA, 12 nt, Artificial Sequence
  Description of Artificial Sequence: Synthetic oligonucleotide
accaucacacca

SEQ ID NO: 30034 - RNA, 10 nt, Artificial Sequence
  Description of Artificial Sequence: Synthetic oligonucleotide
cugcggguuu

SEQ ID NO: 30035 - RNA, 9 nt, Artificial Sequence
  Description of Artificial Sequence: Synthetic oligonucleotide
uccaguuug

SEQ ID NO: 30036 - RNA, 12 nt, Artificial Sequence
  Description of Artificial Sequence: Synthetic oligonucleotide
uuaaggacuucu

SEQ ID NO: 30037 - RNA, 12 nt, Artificial Sequence
  Description of Artificial Sequence: Synthetic oligonucleotide
agugggacagag

SEQ ID NO: 30038 - RNA, 13 nt, Artificial Sequence
  Description of Artificial Sequence: Synthetic oligonucleotide
auuuguuauugug

SEQ ID NO: 30039 - RNA, 12 nt, Artificial Sequence
  Description of Artificial Sequence: Synthetic oligonucleotide
ucaaaugcauuu

SEQ ID NO: 30040 - RNA, 9 nt, Artificial Sequence
  Description of Artificial Sequence: Synthetic oligonucleotide
aggaaagcc

SEQ ID NO: 30041 - RNA, 10 nt, Artificial Sequence
  Description of Artificial Sequence: Synthetic oligonucleotide
ggaaagcccu

SEQ ID NO: 30042 - RNA, 11 nt, Artificial Sequence
  Description of Artificial Sequence: Synthetic oligonucleotide
ccagcauggcc

SEQ ID NO: 30043 - RNA, 10 nt, Artificial Sequence
  Description of Artificial Sequence: Synthetic oligonucleotide
uucucccuga

SEQ ID NO: 30044 - RNA, 11 nt, Artificial Sequence
  Description of Artificial Sequence: Synthetic oligonucleotide
aagaagcccuu

SEQ ID NO: 30045 - RNA, 11 nt, Artificial Sequence
  Description of Artificial Sequence: Synthetic oligonucleotide
gaagcccuuca

SEQ ID NO: 30046 - RNA, 10 nt, Artificial Sequence
  Description of Artificial Sequence: Synthetic oligonucleotide
cccuucagcg

SEQ ID NO: 30047 - RNA, 10 nt, Artificial Sequence
  Description of Artificial Sequence: Synthetic oligonucleotide
cuucagcggc

SEQ ID NO: 30048 - RNA, 11 nt, Artificial Sequence
  Description of Artificial Sequence: Synthetic oligonucleotide
cagcggccagu

SEQ ID NO: 30049 - RNA, 11 nt, Artificial Sequence
  Description of Artificial Sequence: Synthetic oligonucleotide
gaaaagcuccg

SEQ ID NO: 30050 - RNA, 10 nt, Artificial Sequence
  Description of Artificial Sequence: Synthetic oligonucleotide
aaagcuccgg

SEQ ID NO: 30051 - RNA, 12 nt, Artificial Sequence
  Description of Artificial Sequence: Synthetic oligonucleotide
gucaacagucug

SEQ ID NO: 30052 - RNA, 12 nt, Artificial Sequence
  Description of Artificial Sequence: Synthetic oligonucleotide
agaguucaaaag

SEQ ID NO: 30053 - RNA, 12 nt, Artificial Sequence
  Description of Artificial Sequence: Synthetic oligonucleotide
gaguucaaaagc

SEQ ID NO: 30054 - RNA, 11 nt, Artificial Sequence
  Description of Artificial Sequence: Synthetic oligonucleotide
ucaaaagcccu

SEQ ID NO: 30055 - RNA, 11 nt, Artificial Sequence
  Description of Artificial Sequence: Synthetic oligonucleotide
caaaagcccuu

SEQ ID NO: 30056 - RNA, 11 nt, Artificial Sequence
  Description of Artificial Sequence: Synthetic oligonucleotide
aaagcccuuca

SEQ ID NO: 30057 - RNA, 11 nt, Artificial Sequence
  Description of Artificial Sequence: Synthetic oligonucleotide
aagcccuucag

SEQ ID NO: 30058 - RNA, 12 nt, Artificial Sequence
  Description of Artificial Sequence: Synthetic oligonucleotide
ugaagccgcucg

SEQ ID NO: 30059 - RNA, 11 nt, Artificial Sequence
  Description of Artificial Sequence: Synthetic oligonucleotide
acgccagucaa

SEQ ID NO: 30060 - RNA, 12 nt, Artificial Sequence
  Description of Artificial Sequence: Synthetic oligonucleotide
ucuuggugcgug

SEQ ID NO: 30061 - RNA, 13 nt, Artificial Sequence
  Description of Artificial Sequence: Synthetic oligonucleotide
uuggauucaucag

SEQ ID NO: 30062 - RNA, 12 nt, Artificial Sequence
  Description of Artificial Sequence: Synthetic oligonucleotide
ggaauaccuaag

SEQ ID NO: 30063 - RNA, 11 nt, Artificial Sequence
  Description of Artificial Sequence: Synthetic oligonucleotide
uuugaggcuca

SEQ ID NO: 30064 - RNA, 10 nt, Artificial Sequence
  Description of Artificial Sequence: Synthetic oligonucleotide
cuacaauugg

SEQ ID NO: 30065 - RNA, 11 nt, Artificial Sequence
  Description of Artificial Sequence: Synthetic oligonucleotide
aguuaggagcc

SEQ ID NO: 30066 - RNA, 12 nt, Artificial Sequence
  Description of Artificial Sequence: Synthetic oligonucleotide
gucaauauccac

SEQ ID NO: 30067 - RNA, 12 nt, Artificial Sequence
  Description of Artificial Sequence: Synthetic oligonucleotide
uguucagucaca

SEQ ID NO: 30068 - RNA, 11 nt, Artificial Sequence
  Description of Artificial Sequence: Synthetic oligonucleotide
cacacacauac

SEQ ID NO: 30069 - RNA, 11 nt, Artificial Sequence
  Description of Artificial Sequence: Synthetic oligonucleotide
uccuuuugcuu

SEQ ID NO: 30070 - RNA, 15 nt, Artificial Sequence
  Description of Artificial Sequence: Synthetic oligonucleotide
uuuaaaguaauuuuu

SEQ ID NO: 30071 - RNA, 12 nt, Artificial Sequence
  Description of Artificial Sequence: Synthetic oligonucleotide
aacagucaaugg

SEQ ID NO: 30072 - RNA, 12 nt, Artificial Sequence
  Description of Artificial Sequence: Synthetic oligonucleotide
cgacaaaccaau

SEQ ID NO: 30073 - RNA, 11 nt, Artificial Sequence
  Description of Artificial Sequence: Synthetic oligonucleotide
cugcuaccacu

SEQ ID NO: 30074 - RNA, 12 nt, Artificial Sequence
  Description of Artificial Sequence: Synthetic oligonucleotide
caagcggucuua

SEQ ID NO: 30075 - RNA, 12 nt, Artificial Sequence
  Description of Artificial Sequence: Synthetic oligonucleotide
gucuuaccggcu

SEQ ID NO: 30076 - RNA, 10 nt, Artificial Sequence
  Description of Artificial Sequence: Synthetic oligonucleotide
auggguuacc

SEQ ID NO: 30077 - RNA, 10 nt, Artificial Sequence
  Description of Artificial Sequence: Synthetic oligonucleotide
uuaccugcga

SEQ ID NO: 30078 - RNA, 11 nt, Artificial Sequence
  Description of Artificial Sequence: Synthetic oligonucleotide
aucuugcugag

SEQ ID NO: 30079 - RNA, 12 nt, Artificial Sequence
  Description of Artificial Sequence: Synthetic oligonucleotide
gcauaaaacagu

SEQ ID NO: 30080 - RNA, 11 nt, Artificial Sequence
  Description of Artificial Sequence: Synthetic oligonucleotide
uccuuuauccu

SEQ ID NO: 30081 - RNA, 11 nt, Artificial Sequence
  Description of Artificial Sequence: Synthetic oligonucleotide
aacgcaaguug

SEQ ID NO: 30082 - RNA, 12 nt, Artificial Sequence
  Description of Artificial Sequence: Synthetic oligonucleotide
aacugaaaccau

SEQ ID NO: 30083 - RNA, 13 nt, Artificial Sequence
  Description of Artificial Sequence: Synthetic oligonucleotide
cuuuguuaaauau

SEQ ID NO: 30084 - RNA, 13 nt, Artificial Sequence
  Description of Artificial Sequence: Synthetic oligonucleotide
uauauuaaaaguu

SEQ ID NO: 30085 - RNA, 12 nt, Artificial Sequence
  Description of Artificial Sequence: Synthetic oligonucleotide
uuuugacuuaac

SEQ ID NO: 30086 - RNA, 12 nt, Artificial Sequence
  Description of Artificial Sequence: Synthetic oligonucleotide
caaacucagcac

SEQ ID NO: 30087 - RNA, 10 nt, Artificial Sequence
  Description of Artificial Sequence: Synthetic oligonucleotide
gcugaccuca

SEQ ID NO: 30088 - RNA, 13 nt, Artificial Sequence
  Description of Artificial Sequence: Synthetic oligonucleotide
uuauucagaucgc

SEQ ID NO: 30089 - RNA, 12 nt, Artificial Sequence
  Description of Artificial Sequence: Synthetic oligonucleotide
ggguucugggau

SEQ ID NO: 30090 - RNA, 14 nt, Artificial Sequence
  Description of Artificial Sequence: Synthetic oligonucleotide
uauuggaaauuaug

SEQ ID NO: 30091 - RNA, 12 nt, Artificial Sequence
  Description of Artificial Sequence: Synthetic oligonucleotide
uggaagcacuag

SEQ ID NO: 30092 - RNA, 12 nt, Artificial Sequence
  Description of Artificial Sequence: Synthetic oligonucleotide
uuuuuaugugga

SEQ ID NO: 30093 - RNA, 11 nt, Artificial Sequence
  Description of Artificial Sequence: Synthetic oligonucleotide
gaauugguaga

SEQ ID NO: 30094 - RNA, 12 nt, Artificial Sequence
  Description of Artificial Sequence: Synthetic oligonucleotide
uagacuuggaga

SEQ ID NO: 30095 - RNA, 12 nt, Artificial Sequence
  Description of Artificial Sequence: Synthetic oligonucleotide
uacaguauucca

SEQ ID NO: 30096 - RNA, 14 nt, Artificial Sequence
  Description of Artificial Sequence: Synthetic oligonucleotide
cacugaugaauuaa

SEQ ID NO: 30097 - RNA, 11 nt, Artificial Sequence
  Description of Artificial Sequence: Synthetic oligonucleotide
cacaucaucac

SEQ ID NO: 30098 - RNA, 12 nt, Artificial Sequence
  Description of Artificial Sequence: Synthetic oligonucleotide
ucaccaaacaga

SEQ ID NO: 30099 - RNA, 11 nt, Artificial Sequence
  Description of Artificial Sequence: Synthetic oligonucleotide
gaacaugaugg

SEQ ID NO: 30100 - RNA, 11 nt, Artificial Sequence
  Description of Artificial Sequence: Synthetic oligonucleotide
auguagacugc

SEQ ID NO: 30101 - RNA, 12 nt, Artificial Sequence
  Description of Artificial Sequence: Synthetic oligonucleotide
gaucuauuuaug

SEQ ID NO: 30102 - RNA, 11 nt, Artificial Sequence
  Description of Artificial Sequence: Synthetic oligonucleotide
cacuauuauca

SEQ ID NO: 30103 - RNA, 10 nt, Artificial Sequence
  Description of Artificial Sequence: Synthetic oligonucleotide
ucaguucugc

SEQ ID NO: 30104 - RNA, 12 nt, Artificial Sequence
  Description of Artificial Sequence: Synthetic oligonucleotide
gauuaaaccuac

SEQ ID NO: 30105 - RNA, 12 nt, Artificial Sequence
  Description of Artificial Sequence: Synthetic oligonucleotide
uaaaauccuucu

SEQ ID NO: 30106 - RNA, 11 nt, Artificial Sequence
  Description of Artificial Sequence: Synthetic oligonucleotide
augcuguagac

SEQ ID NO: 30107 - RNA, 12 nt, Artificial Sequence
  Description of Artificial Sequence: Synthetic oligonucleotide
ugauaggaauag

SEQ ID NO: 30108 - RNA, 10 nt, Artificial Sequence
  Description of Artificial Sequence: Synthetic oligonucleotide
auggcccuga

SEQ ID NO: 30109 - RNA, 10 nt, Artificial Sequence
  Description of Artificial Sequence: Synthetic oligonucleotide
uccucaagca

SEQ ID NO: 30110 - RNA, 9 nt, Artificial Sequence
  Description of Artificial Sequence: Synthetic oligonucleotide
uucagccca

SEQ ID NO: 30111 - RNA, 10 nt, Artificial Sequence
  Description of Artificial Sequence: Synthetic oligonucleotide
cugcugaacc

SEQ ID NO: 30112 - RNA, 11 nt, Artificial Sequence
  Description of Artificial Sequence: Synthetic oligonucleotide
aguucucuuca

SEQ ID NO: 30113 - RNA, 10 nt, Artificial Sequence
  Description of Artificial Sequence: Synthetic oligonucleotide
cagccuagag

SEQ ID NO: 30114 - RNA, 12 nt, Artificial Sequence
  Description of Artificial Sequence: Synthetic oligonucleotide
ucugugaagugu

SEQ ID NO: 30115 - RNA, 13 nt, Artificial Sequence
  Description of Artificial Sequence: Synthetic oligonucleotide
gagaaaauuucaa

SEQ ID NO: 30116 - RNA, 10 nt, Artificial Sequence
  Description of Artificial Sequence: Synthetic oligonucleotide
auccuccuga

SEQ ID NO: 30117 - RNA, 11 nt, Artificial Sequence
  Description of Artificial Sequence: Synthetic oligonucleotide
ugacaucauau

SEQ ID NO: 30118 - RNA, 12 nt, Artificial Sequence
  Description of Artificial Sequence: Synthetic oligonucleotide
aucuucaucaua

SEQ ID NO: 30119 - RNA, 12 nt, Artificial Sequence
  Description of Artificial Sequence: Synthetic oligonucleotide
acuagcuauuaa

SEQ ID NO: 30120 - RNA, 13 nt, Artificial Sequence
  Description of Artificial Sequence: Synthetic oligonucleotide
cucuacuaaaaau

SEQ ID NO: 30121 - RNA, 11 nt, Artificial Sequence
  Description of Artificial Sequence: Synthetic oligonucleotide
cuaucucgccu

SEQ ID NO: 30122 - RNA, 12 nt, Artificial Sequence
  Description of Artificial Sequence: Synthetic oligonucleotide
uucgguccaguu

SEQ ID NO: 30123 - RNA, 10 nt, Artificial Sequence
  Description of Artificial Sequence: Synthetic oligonucleotide
auguagccgc

SEQ ID NO: 30124 - RNA, 11 nt, Artificial Sequence
  Description of Artificial Sequence: Synthetic oligonucleotide
gaggagacuug

SEQ ID NO: 30125 - RNA, 11 nt, Artificial Sequence
  Description of Artificial Sequence: Synthetic oligonucleotide
aguagugagga

SEQ ID NO: 30126 - RNA, 13 nt, Artificial Sequence
  Description of Artificial Sequence: Synthetic oligonucleotide
agaugaguacaaa

SEQ ID NO: 30127 - RNA, 12 nt, Artificial Sequence
  Description of Artificial Sequence: Synthetic oligonucleotide
uuguuaaugggc

SEQ ID NO: 30128 - RNA, 12 nt, Artificial Sequence
  Description of Artificial Sequence: Synthetic oligonucleotide
uuuuaauuuauu

SEQ ID NO: 30129 - RNA, 11 nt, Artificial Sequence
  Description of Artificial Sequence: Synthetic oligonucleotide
auuuaaauaug

SEQ ID NO: 30130 - RNA, 12 nt, Artificial Sequence
  Description of Artificial Sequence: Synthetic oligonucleotide
auccuuuguuuc

SEQ ID NO: 30131 - RNA, 13 nt, Artificial Sequence
  Description of Artificial Sequence: Synthetic oligonucleotide
gucuaaguguuug

SEQ ID NO: 30132 - RNA, 11 nt, Artificial Sequence
  Description of Artificial Sequence: Synthetic oligonucleotide
ccugugacaaa

SEQ ID NO: 30133 - RNA, 12 nt, Artificial Sequence
  Description of Artificial Sequence: Synthetic oligonucleotide
caggcugaauua

SEQ ID NO: 30134 - RNA, 13 nt, Artificial Sequence
  Description of Artificial Sequence: Synthetic oligonucleotide
ucauucuuacaau

SEQ ID NO: 30135 - RNA, 14 nt, Artificial Sequence
  Description of Artificial Sequence: Synthetic oligonucleotide
cauucuuacaauug

SEQ ID NO: 30136 - RNA, 11 nt, Artificial Sequence
  Description of Artificial Sequence: Synthetic oligonucleotide
agagaguguac

SEQ ID NO: 30137 - RNA, 11 nt, Artificial Sequence
  Description of Artificial Sequence: Synthetic oligonucleotide
gaacucagcag

SEQ ID NO: 30138 - RNA, 12 nt, Artificial Sequence
  Description of Artificial Sequence: Synthetic oligonucleotide
uuauuuucagua

SEQ ID NO: 30139 - RNA, 11 nt, Artificial Sequence
  Description of Artificial Sequence: Synthetic oligonucleotide
cuuaaauggaa

SEQ ID NO: 30140 - RNA, 12 nt, Artificial Sequence
  Description of Artificial Sequence: Synthetic oligonucleotide
gccuaaaauugu

SEQ ID NO: 30141 - RNA, 12 nt, Artificial Sequence
  Description of Artificial Sequence: Synthetic oligonucleotide
acuaacaucugg

SEQ ID NO: 30142 - RNA, 11 nt, Artificial Sequence
  Description of Artificial Sequence: Synthetic oligonucleotide
gacugugagcu

SEQ ID NO: 30143 - RNA, 13 nt, Artificial Sequence
  Description of Artificial Sequence: Synthetic oligonucleotide
gcuuuuuauuaau

SEQ ID NO: 30144 - RNA, 12 nt, Artificial Sequence
  Description of Artificial Sequence: Synthetic oligonucleotide
ucuucuuacauu

SEQ ID NO: 30145 - RNA, 14 nt, Artificial Sequence
  Description of Artificial Sequence: Synthetic oligonucleotide
auuuguaaaaaugu

SEQ ID NO: 30146 - RNA, 14 nt, Artificial Sequence
  Description of Artificial Sequence: Synthetic oligonucleotide
ucuuaauucauauu

SEQ ID NO: 30147 - RNA, 12 nt, Artificial Sequence
  Description of Artificial Sequence: Synthetic oligonucleotide
aacuaaucauga

SEQ ID NO: 30148 - RNA, 11 nt, Artificial Sequence
  Description of Artificial Sequence: Synthetic oligonucleotide
cugcucuuggg

SEQ ID NO: 30149 - RNA, 12 nt, Artificial Sequence
  Description of Artificial Sequence: Synthetic oligonucleotide
aguagcuuugag

SEQ ID NO: 30150 - RNA, 13 nt, Artificial Sequence
  Description of Artificial Sequence: Synthetic oligonucleotide
acguaauauuuca

SEQ ID NO: 30151 - RNA, 12 nt, Artificial Sequence
  Description of Artificial Sequence: Synthetic oligonucleotide
auucucuucacu

SEQ ID NO: 30152 - RNA, 13 nt, Artificial Sequence
  Description of Artificial Sequence: Synthetic oligonucleotide
uaaugcuaagaaa

SEQ ID NO: 30153 - RNA, 11 nt, Artificial Sequence
  Description of Artificial Sequence: Synthetic oligonucleotide
cugaaaaucaa

SEQ ID NO: 30154 - RNA, 13 nt, Artificial Sequence
  Description of Artificial Sequence: Synthetic oligonucleotide
auaugauuacuuu

SEQ ID NO: 30155 - RNA, 13 nt, Artificial Sequence
  Description of Artificial Sequence: Synthetic oligonucleotide
auuuuguucuaca

SEQ ID NO: 30156 - RNA, 11 nt, Artificial Sequence
  Description of Artificial Sequence: Synthetic oligonucleotide
ccgggacucuc

SEQ ID NO: 30157 - RNA, 13 nt, Artificial Sequence
  Description of Artificial Sequence: Synthetic oligonucleotide
cuuuaaaguaaag

SEQ ID NO: 30158 - RNA, 12 nt, Artificial Sequence
  Description of Artificial Sequence: Synthetic oligonucleotide
cuggaagccugg

SEQ ID NO: 30159 - RNA, 13 nt, Artificial Sequence
  Description of Artificial Sequence: Synthetic oligonucleotide
aaacaaaagagag

SEQ ID NO: 30160 - RNA, 12 nt, Artificial Sequence
  Description of Artificial Sequence: Synthetic oligonucleotide
ucaguuaugccg

SEQ ID NO: 30161 - RNA, 12 nt, Artificial Sequence
  Description of Artificial Sequence: Synthetic oligonucleotide
aaaagaagucca

SEQ ID NO: 30162 - RNA, 10 nt, Artificial Sequence
  Description of Artificial Sequence: Synthetic oligonucleotide
ggugagguua

SEQ ID NO: 30163 - RNA, 10 nt, Artificial Sequence
  Description of Artificial Sequence: Synthetic oligonucleotide
ggaagaggac

SEQ ID NO: 30164 - RNA, 12 nt, Artificial Sequence
  Description of Artificial Sequence: Synthetic oligonucleotide
agcaaguauugu

SEQ ID NO: 30165 - RNA, 11 nt, Artificial Sequence
  Description of Artificial Sequence: Synthetic oligonucleotide
uuguagcacuc

SEQ ID NO: 30166 - RNA, 13 nt, Artificial Sequence
  Description of Artificial Sequence: Synthetic oligonucleotide
caaaaccacaaau

SEQ ID NO: 30167 - RNA, 11 nt, Artificial Sequence
  Description of Artificial Sequence: Synthetic oligonucleotide
aagcccauaca

SEQ ID NO: 30168 - RNA, 10 nt, Artificial Sequence
  Description of Artificial Sequence: Synthetic oligonucleotide
gcccauacag

SEQ ID NO: 30169 - RNA, 11 nt, Artificial Sequence
  Description of Artificial Sequence: Synthetic oligonucleotide
agaaaccuucc

SEQ ID NO: 30170 - RNA, 9 nt, Artificial Sequence
  Description of Artificial Sequence: Synthetic oligonucleotide
uauaccuac

SEQ ID NO: 30171 - RNA, 12 nt, Artificial Sequence
  Description of Artificial Sequence: Synthetic oligonucleotide
ccaguuuucgga

SEQ ID NO: 30172 - RNA, 8 nt, Artificial Sequence
  Description of Artificial Sequence: Synthetic oligonucleotide
gaacaggg

SEQ ID NO: 30173 - RNA, 12 nt, Artificial Sequence
  Description of Artificial Sequence: Synthetic oligonucleotide
uaacuuuccagu

SEQ ID NO: 30174 - RNA, 13 nt, Artificial Sequence
  Description of Artificial Sequence: Synthetic oligonucleotide
aaguuugguuuug

SEQ ID NO: 30175 - RNA, 11 nt, Artificial Sequence
  Description of Artificial Sequence: Synthetic oligonucleotide
uucccacugua

SEQ ID NO: 30176 - RNA, 12 nt, Artificial Sequence
  Description of Artificial Sequence: Synthetic oligonucleotide
gauaccauauga

SEQ ID NO: 30177 - RNA, 10 nt, Artificial Sequence
  Description of Artificial Sequence: Synthetic oligonucleotide
acaugggcug

SEQ ID NO: 30178 - RNA, 12 nt, Artificial Sequence
  Description of Artificial Sequence: Synthetic oligonucleotide
aacuuuuucaua

SEQ ID NO: 30179 - RNA, 11 nt, Artificial Sequence
  Description of Artificial Sequence: Synthetic oligonucleotide
augaggccgga

SEQ ID NO: 30180 - RNA, 10 nt, Artificial Sequence
  Description of Artificial Sequence: Synthetic oligonucleotide
cugcauuugu

SEQ ID NO: 30181 - RNA, 12 nt, Artificial Sequence
  Description of Artificial Sequence: Synthetic oligonucleotide
auguuuacuacc

SEQ ID NO: 30182 - RNA, 14 nt, Artificial Sequence
  Description of Artificial Sequence: Synthetic oligonucleotide
auuuuuugaugaaa

SEQ ID NO: 30183 - RNA, 13 nt, Artificial Sequence
  Description of Artificial Sequence: Synthetic oligonucleotide
agugugugaauuu

SEQ ID NO: 30184 - RNA, 12 nt, Artificial Sequence
  Description of Artificial Sequence: Synthetic oligonucleotide
agcaauguaugu

SEQ ID NO: 30185 - RNA, 13 nt, Artificial Sequence
  Description of Artificial Sequence: Synthetic oligonucleotide
aagcacauauaua

SEQ ID NO: 30186 - RNA, 13 nt, Artificial Sequence
  Description of Artificial Sequence: Synthetic oligonucleotide
uaauaguuucucc

SEQ ID NO: 30187 - RNA, 12 nt, Artificial Sequence
  Description of Artificial Sequence: Synthetic oligonucleotide
guuucuccaaau

SEQ ID NO: 30188 - RNA, 12 nt, Artificial Sequence
  Description of Artificial Sequence: Synthetic oligonucleotide
acuuccuagaaa

SEQ ID NO: 30189 - RNA, 12 nt, Artificial Sequence
  Description of Artificial Sequence: Synthetic oligonucleotide
acaccauauaug

SEQ ID NO: 30190 - RNA, 13 nt, Artificial Sequence
  Description of Artificial Sequence: Synthetic oligonucleotide
uauaugaauggag

SEQ ID NO: 30191 - RNA, 12 nt, Artificial Sequence
  Description of Artificial Sequence: Synthetic oligonucleotide
cauuuacaggga

SEQ ID NO: 30192 - RNA, 12 nt, Artificial Sequence
  Description of Artificial Sequence: Synthetic oligonucleotide
auuuacagggac

SEQ ID NO: 30193 - RNA, 9 nt, Artificial Sequence
  Description of Artificial Sequence: Synthetic oligonucleotide
gggaccuga

SEQ ID NO: 30194 - RNA, 13 nt, Artificial Sequence
  Description of Artificial Sequence: Synthetic oligonucleotide
guuugacugcauc

SEQ ID NO: 30195 - RNA, 12 nt, Artificial Sequence
  Description of Artificial Sequence: Synthetic oligonucleotide
uugacugcaucg

SEQ ID NO: 30196 - RNA, 11 nt, Artificial Sequence
  Description of Artificial Sequence: Synthetic oligonucleotide
aguucacaggg

SEQ ID NO: 30197 - RNA, 12 nt, Artificial Sequence
  Description of Artificial Sequence: Synthetic oligonucleotide
gcaccucugucc

SEQ ID NO: 30198 - RNA, 14 nt, Artificial Sequence
  Description of Artificial Sequence: Synthetic oligonucleotide
guuugucuuuuuaa

SEQ ID NO: 30199 - RNA, 13 nt, Artificial Sequence
  Description of Artificial Sequence: Synthetic oligonucleotide
uugucuuuuuaag

SEQ ID NO: 30200 - RNA, 12 nt, Artificial Sequence
  Description of Artificial Sequence: Synthetic oligonucleotide
cuaaagguuguc

SEQ ID NO: 30201 - RNA, 11 nt, Artificial Sequence
  Description of Artificial Sequence: Synthetic oligonucleotide
agguugucgac

SEQ ID NO: 30202 - RNA, 12 nt, Artificial Sequence
  Description of Artificial Sequence: Synthetic oligonucleotide
ccuggcaauugu

SEQ ID NO: 30203 - RNA, 11 nt, Artificial Sequence
  Description of Artificial Sequence: Synthetic oligonucleotide
guggugcgagg

SEQ ID NO: 30204 - RNA, 12 nt, Artificial Sequence
  Description of Artificial Sequence: Synthetic oligonucleotide
gagacaugaaau

SEQ ID NO: 30205 - RNA, 12 nt, Artificial Sequence
  Description of Artificial Sequence: Synthetic oligonucleotide
uauauuucucca

SEQ ID NO: 30206 - RNA, 9 nt, Artificial Sequence
  Description of Artificial Sequence: Synthetic oligonucleotide
augaaggcu

SEQ ID NO: 30207 - RNA, 10 nt, Artificial Sequence
  Description of Artificial Sequence: Synthetic oligonucleotide
cuggaguggu

SEQ ID NO: 30208 - RNA, 10 nt, Artificial Sequence
  Description of Artificial Sequence: Synthetic oligonucleotide
ggaagagagg

SEQ ID NO: 30209 - RNA, 11 nt, Artificial Sequence
  Description of Artificial Sequence: Synthetic oligonucleotide
uugcaucgggc

SEQ ID NO: 30210 - RNA, 12 nt, Artificial Sequence
  Description of Artificial Sequence: Synthetic oligonucleotide
uauccuacugug

SEQ ID NO: 30211 - RNA, 12 nt, Artificial Sequence
  Description of Artificial Sequence: Synthetic oligonucleotide
ccuacuguguaa

SEQ ID NO: 30212 - RNA, 11 nt, Artificial Sequence
  Description of Artificial Sequence: Synthetic oligonucleotide
cuuguagugua

SEQ ID NO: 30213 - RNA, 12 nt, Artificial Sequence
  Description of Artificial Sequence: Synthetic oligonucleotide
cuuuguugauug

SEQ ID NO: 30214 - RNA, 13 nt, Artificial Sequence
  Description of Artificial Sequence: Synthetic oligonucleotide
uuguugauugaaa

SEQ ID NO: 30215 - RNA, 14 nt, Artificial Sequence
  Description of Artificial Sequence: Synthetic oligonucleotide
ucuuuuucuuccau

SEQ ID NO: 30216 - RNA, 12 nt, Artificial Sequence
  Description of Artificial Sequence: Synthetic oligonucleotide
aucuuccuucua

SEQ ID NO: 30217 - RNA, 12 nt, Artificial Sequence
  Description of Artificial Sequence: Synthetic oligonucleotide
ugaaugcuucau

SEQ ID NO: 30218 - RNA, 12 nt, Artificial Sequence
  Description of Artificial Sequence: Synthetic oligonucleotide
gaaugcuucaug

SEQ ID NO: 30219 - RNA, 12 nt, Artificial Sequence
  Description of Artificial Sequence: Synthetic oligonucleotide
auucuacuuuga

SEQ ID NO: 30220 - RNA, 12 nt, Artificial Sequence
  Description of Artificial Sequence: Synthetic oligonucleotide
gcaacuacagac

SEQ ID NO: 30221 - RNA, 12 nt, Artificial Sequence
  Description of Artificial Sequence: Synthetic oligonucleotide
accaaggucaac

SEQ ID NO: 30222 - RNA, 12 nt, Artificial Sequence
  Description of Artificial Sequence: Synthetic oligonucleotide
gacuaucucgac

SEQ ID NO: 30223 - RNA, 12 nt, Artificial Sequence
  Description of Artificial Sequence: Synthetic oligonucleotide
accuucccaaac

SEQ ID NO: 30224 - RNA, 13 nt, Artificial Sequence
  Description of Artificial Sequence: Synthetic oligonucleotide
caagcuuagaacu

SEQ ID NO: 30225 - RNA, 14 nt, Artificial Sequence
  Description of Artificial Sequence: Synthetic oligonucleotide
gcuuagaacuuuaa

SEQ ID NO: 30226 - RNA, 13 nt, Artificial Sequence
  Description of Artificial Sequence: Synthetic oligonucleotide
aacuuuaagcaac

SEQ ID NO: 30227 - RNA, 10 nt, Artificial Sequence
  Description of Artificial Sequence: Synthetic oligonucleotide
agaccaccac

SEQ ID NO: 30228 - RNA, 13 nt, Artificial Sequence
  Description of Artificial Sequence: Synthetic oligonucleotide
cgagaaauaaagu

SEQ ID NO: 30229 - RNA, 13 nt, Artificial Sequence
  Description of Artificial Sequence: Synthetic oligonucleotide
gagaaauaaaguu

SEQ ID NO: 30230 - RNA, 11 nt, Artificial Sequence
  Description of Artificial Sequence: Synthetic oligonucleotide
ggaaaugaucc

SEQ ID NO: 30231 - RNA, 12 nt, Artificial Sequence
  Description of Artificial Sequence: Synthetic oligonucleotide
aagaaaugaaac

SEQ ID NO: 30232 - RNA, 12 nt, Artificial Sequence
  Description of Artificial Sequence: Synthetic oligonucleotide
uuuccauccucc

SEQ ID NO: 30233 - RNA, 14 nt, Artificial Sequence
  Description of Artificial Sequence: Synthetic oligonucleotide
cugaaaaucuuuga

SEQ ID NO: 30234 - RNA, 10 nt, Artificial Sequence
  Description of Artificial Sequence: Synthetic oligonucleotide
gccguucagg

SEQ ID NO: 30235 - RNA, 12 nt, Artificial Sequence
  Description of Artificial Sequence: Synthetic oligonucleotide
aggguccagaag

SEQ ID NO: 30236 - RNA, 12 nt, Artificial Sequence
  Description of Artificial Sequence: Synthetic oligonucleotide
caagacugcuug

SEQ ID NO: 30237 - RNA, 12 nt, Artificial Sequence
  Description of Artificial Sequence: Synthetic oligonucleotide
ccaugucuuugg

SEQ ID NO: 30238 - RNA, 10 nt, Artificial Sequence
  Description of Artificial Sequence: Synthetic oligonucleotide
ccugaaacac

SEQ ID NO: 30239 - RNA, 11 nt, Artificial Sequence
  Description of Artificial Sequence: Synthetic oligonucleotide
cucuguaccuc

SEQ ID NO: 30240 - RNA, 11 nt, Artificial Sequence
  Description of Artificial Sequence: Synthetic oligonucleotide
gcaagacaaga

SEQ ID NO: 30241 - RNA, 12 nt, Artificial Sequence
  Description of Artificial Sequence: Synthetic oligonucleotide
caagacaagaaa

SEQ ID NO: 30242 - RNA, 11 nt, Artificial Sequence
  Description of Artificial Sequence: Synthetic oligonucleotide
guacaagaucc

SEQ ID NO: 30243 - RNA, 11 nt, Artificial Sequence
  Description of Artificial Sequence: Synthetic oligonucleotide
guacuugcaga

SEQ ID NO: 30244 - RNA, 12 nt, Artificial Sequence
  Description of Artificial Sequence: Synthetic oligonucleotide
gaucgauacaga

SEQ ID NO: 30245 - RNA, 12 nt, Artificial Sequence
  Description of Artificial Sequence: Synthetic oligonucleotide
auaaaaauaaau

SEQ ID NO: 30246 - RNA, 12 nt, Artificial Sequence
  Description of Artificial Sequence: Synthetic oligonucleotide
aaaaauaaauau

SEQ ID NO: 30247 - RNA, 12 nt, Artificial Sequence
  Description of Artificial Sequence: Synthetic oligonucleotide
uugacugcugug

SEQ ID NO: 30248 - RNA, 12 nt, Artificial Sequence
  Description of Artificial Sequence: Synthetic oligonucleotide
gagaugagagac

SEQ ID NO: 30249 - RNA, 9 nt, Artificial Sequence
  Description of Artificial Sequence: Synthetic oligonucleotide
cccacuugg

SEQ ID NO: 30250 - RNA, 2285 nt, Homo sapiens
cccggggccgcacccacagccccggcuaccccggagaagccugacuugagaacccuuucugcagagucccggcagugcgggacuccgguagccgccccuccgguagccgccccuccugcccccgcgccgccgcccuauauguugcccgccgcggccucuggggcauggagcacgcugcccagcccuggcgauggcaacggcgacggggguggcggaggagcgccugcuggccgcgcucgccuaccugcagugcgccgugggcugcgcggucuucgcgcgcaaucgucagacgaacucaguguacggccgccacgcgcugcccagccacaggcuccgagugccggcgcgggccgccuggguggugcaggagcugcccucgcuggcccugccgcucuaccaguacgccagcgaguccgccccgcgucuccgcagcgcgcccaacugcauccuccuggccauguuccucguccacuacgggcaucggugcuuaauuuacccauuucugaugcgaggaggaaagccuaugccacuguuggcguguacaauggcgauuauguucuguaccuguaacggcuauuugcaaagcagauacuugagccauugugcaguguaugcugaugacuggguaacagauccccguuuucuaauagguuuuggcuugugguuaacgggcauguugauaaacauccauucagaucauauccuaaggaaucucagaaaaccaggagauacuggauacaaaauaccaaggggaggcuuauuugaauacguaacugcagccaacuauuuuggagaaaucauggagugguguggcuaugcccuggccagcuggucuguccaaggcgcggcuuuugcuuucuucacguuuuguuuuuuaucugguagagcaaaagagcaucaugagugguaccuccggaaauuugaagaguauccaaaguucagaaaaauuauaauuccauuuuuguuuuaagugcguuuuucaugaaauuaucuucaacuugaagcuuuccaauggcgcuucucuauggacuuuguaaauaaguuauaucuuuguaauuuuccugcuacuuuaucauuuucaagauguccucuaggaauuuuuuuucuaguaauuuugcaaucuaccuaauaaguaccuaaauacgcugaaauggagguugaauauccuacuguguaacaggucagaauuucaagcucuggguaauaacugcugauauuuuuucuaauuucaaauuuaccucuuuuggcuaugucuugccaaguguguaugagacuagacuuuacaacugucuuugauggcauuuucagaacaauaaaugucacaaucccuucuauagcccccuacagugaucucuucaaggucaacugcaguguugcuucccucccccuauagggcuggaaucugucuaggagcccucucucggaggccacagaggcuggggguagccauugugcagucauggcccgggggaaacuugccaaccuucgugucaggugcuguguguaaguggagaacuuggggauagaggaggaagcuccucguggcccuuccaaggugaggcaaaggcaucuggacuuguuccagcccagcccaccgggugacaucaccgggcagggaggggugcugguggugguucauacggaguaagcugcucugccugugugaguggcuccugggcccuaaacaggcaccuuuaggccaugggucacucaccgugagccaucaaugugcucuggucugacaugguuucucucugucuucuagucuagaccuaguuuuuuuguucuguuccccacguauggauauaguagagauuguugucugugaaauuucucuuuuguagauuuugaguuuucccuuguaguguaaagaaugaucacuuucuguaacaauaacaagaccacuuuuuaagauuuauccuguuuguucuuuguugauugaaacauaauaauuguuaaaauucucuacagccuucuuuuucuuccauagcuaaucuuccuucuaauaguuuuugcuuucuguuuugcuguuguugcuuugcaaagcuuuccccucauagccuguaccuguuaucaauauaaaauaaucuuccuguugaaugcuucaugacuugaauucuacuuugauaaaaacauugccauacugcuuuuuaucuugaugaauucaucuggcauugcuuugccuuaucaucucaucuggaguuuuuaaaugccauuuguuucaguugucuuuaacaacauaauaaauagacuuugccauuuaaaaaaaaaaaaaaaaaaaaaaa

SEQ ID NO: 30251 - RNA, 19 nt, Artificial Sequence
  Description of Artificial Sequence: Synthetic oligonucleotide
cccggggccgcacccacag

SEQ ID NO: 30252 - RNA, 19 nt, Artificial Sequence
  Description of Artificial Sequence: Synthetic oligonucleotide
gccccggcuaccccggaga

SEQ ID NO: 30253 - RNA, 19 nt, Artificial Sequence
  Description of Artificial Sequence: Synthetic oligonucleotide
aagccugacuugagaaccc

SEQ ID NO: 30254 - RNA, 19 nt, Artificial Sequence
  Description of Artificial Sequence: Synthetic oligonucleotide
cuuucugcagagucccggc

SEQ ID NO: 30255 - RNA, 19 nt, Artificial Sequence
  Description of Artificial Sequence: Synthetic oligonucleotide
cagugcgggacuccgguag

SEQ ID NO: 30256 - RNA, 19 nt, Artificial Sequence
  Description of Artificial Sequence: Synthetic oligonucleotide
gccgccccuccgguagccg

SEQ ID NO: 30257 - RNA, 19 nt, Artificial Sequence
  Description of Artificial Sequence: Synthetic oligonucleotide
gccccuccugcccccgcgc

SEQ ID NO: 30258 - RNA, 19 nt, Artificial Sequence
  Description of Artificial Sequence: Synthetic oligonucleotide
ccgccgcccuauauguugc

SEQ ID NO: 30259 - RNA, 19 nt, Artificial Sequence
  Description of Artificial Sequence: Synthetic oligonucleotide
cccgccgcggccucugggg

SEQ ID NO: 30260 - RNA, 19 nt, Artificial Sequence
  Description of Artificial Sequence: Synthetic oligonucleotide
gcauggagcacgcugccca

SEQ ID NO: 30261 - RNA, 19 nt, Artificial Sequence
  Description of Artificial Sequence: Synthetic oligonucleotide
agcccuggcgauggcaacg

SEQ ID NO: 30262 - RNA, 19 nt, Artificial Sequence
  Description of Artificial Sequence: Synthetic oligonucleotide
ggcgacggggguggcggag

SEQ ID NO: 30263 - RNA, 19 nt, Artificial Sequence
  Description of Artificial Sequence: Synthetic oligonucleotide
ggagcgccugcuggccgcg

SEQ ID NO: 30264 - RNA, 19 nt, Artificial Sequence
  Description of Artificial Sequence: Synthetic oligonucleotide
gcucgccuaccugcagugc

SEQ ID NO: 30265 - RNA, 19 nt, Artificial Sequence
  Description of Artificial Sequence: Synthetic oligonucleotide
cgccgugggcugcgcgguc

SEQ ID NO: 30266 - RNA, 19 nt, Artificial Sequence
  Description of Artificial Sequence: Synthetic oligonucleotide
cuucgcgcgcaaucgucag

SEQ ID NO: 30267 - RNA, 19 nt, Artificial Sequence
  Description of Artificial Sequence: Synthetic oligonucleotide
gacgaacucaguguacggc

SEQ ID NO: 30268 - RNA, 19 nt, Artificial Sequence
  Description of Artificial Sequence: Synthetic oligonucleotide
ccgccacgcgcugcccagc

SEQ ID NO: 30269 - RNA, 19 nt, Artificial Sequence
  Description of Artificial Sequence: Synthetic oligonucleotide
ccacaggcuccgagugccg

SEQ ID NO: 30270 - RNA, 19 nt, Artificial Sequence
  Description of Artificial Sequence: Synthetic oligonucleotide
ggcgcgggccgccugggug

SEQ ID NO: 30271 - RNA, 19 nt, Artificial Sequence
  Description of Artificial Sequence: Synthetic oligonucleotide
ggugcaggagcugcccucg

SEQ ID NO: 30272 - RNA, 19 nt, Artificial Sequence
  Description of Artificial Sequence: Synthetic oligonucleotide
gcuggcccugccgcucuac

SEQ ID NO: 30273 - RNA, 19 nt, Artificial Sequence
  Description of Artificial Sequence: Synthetic oligonucleotide
ccaguacgccagcgagucc

SEQ ID NO: 30274 - RNA, 19 nt, Artificial Sequence
  Description of Artificial Sequence: Synthetic oligonucleotide
cgccccgcgucuccgcagc

SEQ ID NO: 30275 - RNA, 19 nt, Artificial Sequence
  Description of Artificial Sequence: Synthetic oligonucleotide
cgcgcccaacugcauccuc

SEQ ID NO: 30276 - RNA, 19 nt, Artificial Sequence
  Description of Artificial Sequence: Synthetic oligonucleotide
ccuggccauguuccucguc

SEQ ID NO: 30277 - RNA, 19 nt, Artificial Sequence
  Description of Artificial Sequence: Synthetic oligonucleotide
ccacuacgggcaucggugc

SEQ ID NO: 30278 - RNA, 19 nt, Artificial Sequence
  Description of Artificial Sequence: Synthetic oligonucleotide
cuuaauuuacccauuucug

SEQ ID NO: 30279 - RNA, 19 nt, Artificial Sequence
  Description of Artificial Sequence: Synthetic oligonucleotide
gaugcgaggaggaaagccu

SEQ ID NO: 30280 - RNA, 19 nt, Artificial Sequence
  Description of Artificial Sequence: Synthetic oligonucleotide
uaugccacuguuggcgugu

SEQ ID NO: 30281 - RNA, 19 nt, Artificial Sequence
  Description of Artificial Sequence: Synthetic oligonucleotide
uacaauggcgauuauguuc

SEQ ID NO: 30282 - RNA, 19 nt, Artificial Sequence
  Description of Artificial Sequence: Synthetic oligonucleotide
cuguaccuguaacggcuau

SEQ ID NO: 30283 - RNA, 19 nt, Artificial Sequence
  Description of Artificial Sequence: Synthetic oligonucleotide
uuugcaaagcagauacuug

SEQ ID NO: 30284 - RNA, 19 nt, Artificial Sequence
  Description of Artificial Sequence: Synthetic oligonucleotide
gagccauugugcaguguau

SEQ ID NO: 30285 - RNA, 19 nt, Artificial Sequence
  Description of Artificial Sequence: Synthetic oligonucleotide
ugcugaugacuggguaaca

SEQ ID NO: 30286 - RNA, 19 nt, Artificial Sequence
  Description of Artificial Sequence: Synthetic oligonucleotide
agauccccguuuucuaaua

SEQ ID NO: 30287 - RNA, 19 nt, Artificial Sequence
  Description of Artificial Sequence: Synthetic oligonucleotide
agguuuuggcuugugguua

SEQ ID NO: 30288 - RNA, 19 nt, Artificial Sequence
  Description of Artificial Sequence: Synthetic oligonucleotide
aacgggcauguugauaaac

SEQ ID NO: 30289 - RNA, 19 nt, Artificial Sequence
  Description of Artificial Sequence: Synthetic oligonucleotide
cauccauucagaucauauc

SEQ ID NO: 30290 - RNA, 19 nt, Artificial Sequence
  Description of Artificial Sequence: Synthetic oligonucleotide
ccuaaggaaucucagaaaa

SEQ ID NO: 30291 - RNA, 19 nt, Artificial Sequence
  Description of Artificial Sequence: Synthetic oligonucleotide
accaggagauacuggauac

SEQ ID NO: 30292 - RNA, 19 nt, Artificial Sequence
  Description of Artificial Sequence: Synthetic oligonucleotide
caaaauaccaaggggaggc

SEQ ID NO: 30293 - RNA, 19 nt, Artificial Sequence
  Description of Artificial Sequence: Synthetic oligonucleotide
cuuauuugaauacguaacu

SEQ ID NO: 30294 - RNA, 19 nt, Artificial Sequence
  Description of Artificial Sequence: Synthetic oligonucleotide
ugcagccaacuauuuugga

SEQ ID NO: 30295 - RNA, 19 nt, Artificial Sequence
  Description of Artificial Sequence: Synthetic oligonucleotide
agaaaucauggaguggugu

SEQ ID NO: 30296 - RNA, 19 nt, Artificial Sequence
  Description of Artificial Sequence: Synthetic oligonucleotide
uggcuaugcccuggccagc

SEQ ID NO: 30297 - RNA, 19 nt, Artificial Sequence
  Description of Artificial Sequence: Synthetic oligonucleotide
cuggucuguccaaggcgcg

SEQ ID NO: 30298 - RNA, 19 nt, Artificial Sequence
  Description of Artificial Sequence: Synthetic oligonucleotide
ggcuuuugcuuucuucacg

SEQ ID NO: 30299 - RNA, 19 nt, Artificial Sequence
  Description of Artificial Sequence: Synthetic oligonucleotide
guuuuguuuuuuaucuggu

SEQ ID NO: 30300 - RNA, 19 nt, Artificial Sequence
  Description of Artificial Sequence: Synthetic oligonucleotide
uagagcaaaagagcaucau

SEQ ID NO: 30301 - RNA, 19 nt, Artificial Sequence
  Description of Artificial Sequence: Synthetic oligonucleotide
ugagugguaccuccggaaa

SEQ ID NO: 30302 - RNA, 19 nt, Artificial Sequence
  Description of Artificial Sequence: Synthetic oligonucleotide
auuugaagaguauccaaag

SEQ ID NO: 30303 - RNA, 19 nt, Artificial Sequence
  Description of Artificial Sequence: Synthetic oligonucleotide
guucagaaaaauuauaauu

SEQ ID NO: 30304 - RNA, 19 nt, Artificial Sequence
  Description of Artificial Sequence: Synthetic oligonucleotide
uccauuuuuguuuuaagug

SEQ ID NO: 30305 - RNA, 19 nt, Artificial Sequence
  Description of Artificial Sequence: Synthetic oligonucleotide
gcguuuuucaugaaauuau

SEQ ID NO: 30306 - RNA, 19 nt, Artificial Sequence
  Description of Artificial Sequence: Synthetic oligonucleotide
ucuucaacuugaagcuuuc

SEQ ID NO: 30307 - RNA, 19 nt, Artificial Sequence
  Description of Artificial Sequence: Synthetic oligonucleotide
ccaauggcgcuucucuaug

SEQ ID NO: 30308 - RNA, 19 nt, Artificial Sequence
  Description of Artificial Sequence: Synthetic oligonucleotide
ggacuuuguaaauaaguua

SEQ ID NO: 30309 - RNA, 19 nt, Artificial Sequence
  Description of Artificial Sequence: Synthetic oligonucleotide
auaucuuuguaauuuuccu

SEQ ID NO: 30310 - RNA, 19 nt, Artificial Sequence
  Description of Artificial Sequence: Synthetic oligonucleotide
ugcuacuuuaucauuuuca

SEQ ID NO: 30311 - RNA, 19 nt, Artificial Sequence
  Description of Artificial Sequence: Synthetic oligonucleotide
aagauguccucuaggaauu

SEQ ID NO: 30312 - RNA, 19 nt, Artificial Sequence
  Description of Artificial Sequence: Synthetic oligonucleotide
uuuuuuucuaguaauuuug

SEQ ID NO: 30313 - RNA, 19 nt, Artificial Sequence
  Description of Artificial Sequence: Synthetic oligonucleotide
gcaaucuaccuaauaagua

SEQ ID NO: 30314 - RNA, 19 nt, Artificial Sequence
  Description of Artificial Sequence: Synthetic oligonucleotide
accuaaauacgcugaaaug

SEQ ID NO: 30315 - RNA, 19 nt, Artificial Sequence
  Description of Artificial Sequence: Synthetic oligonucleotide
ggagguugaauauccuacu

SEQ ID NO: 30316 - RNA, 19 nt, Artificial Sequence
  Description of Artificial Sequence: Synthetic oligonucleotide
uguguaacaggucagaauu

SEQ ID NO: 30317 - RNA, 19 nt, Artificial Sequence
  Description of Artificial Sequence: Synthetic oligonucleotide
uucaagcucuggguaauaa

SEQ ID NO: 30318 - RNA, 19 nt, Artificial Sequence
  Description of Artificial Sequence: Synthetic oligonucleotide
acugcugauauuuuuucua

SEQ ID NO: 30319 - RNA, 19 nt, Artificial Sequence
  Description of Artificial Sequence: Synthetic oligonucleotide
aauuucaaauuuaccucuu

SEQ ID NO: 30320 - RNA, 19 nt, Artificial Sequence
  Description of Artificial Sequence: Synthetic oligonucleotide
uuuggcuaugucuugccaa

SEQ ID NO: 30321 - RNA, 19 nt, Artificial Sequence
  Description of Artificial Sequence: Synthetic oligonucleotide
aguguguaugagacuagac

SEQ ID NO: 30322 - RNA, 19 nt, Artificial Sequence
  Description of Artificial Sequence: Synthetic oligonucleotide
cuuuacaacugucuuugau

SEQ ID NO: 30323 - RNA, 19 nt, Artificial Sequence
  Description of Artificial Sequence: Synthetic oligonucleotide
uggcauuuucagaacaaua

SEQ ID NO: 30324 - RNA, 19 nt, Artificial Sequence
  Description of Artificial Sequence: Synthetic oligonucleotide
aaaugucacaaucccuucu

SEQ ID NO: 30325 - RNA, 19 nt, Artificial Sequence
  Description of Artificial Sequence: Synthetic oligonucleotide
uauagcccccuacagugau

SEQ ID NO: 30326 - RNA, 19 nt, Artificial Sequence
  Description of Artificial Sequence: Synthetic oligonucleotide
ucucuucaaggucaacugc

SEQ ID NO: 30327 - RNA, 19 nt, Artificial Sequence
  Description of Artificial Sequence: Synthetic oligonucleotide
caguguugcuucccucccc

SEQ ID NO: 30328 - RNA, 19 nt, Artificial Sequence
  Description of Artificial Sequence: Synthetic oligonucleotide
ccuauagggcuggaaucug

SEQ ID NO: 30329 - RNA, 19 nt, Artificial Sequence
  Description of Artificial Sequence: Synthetic oligonucleotide
gucuaggagcccucucucg

SEQ ID NO: 30330 - RNA, 19 nt, Artificial Sequence
  Description of Artificial Sequence: Synthetic oligonucleotide
ggaggccacagaggcuggg

SEQ ID NO: 30331 - RNA, 19 nt, Artificial Sequence
  Description of Artificial Sequence: Synthetic oligonucleotide
ggguagccauugugcaguc

SEQ ID NO: 30332 - RNA, 19 nt, Artificial Sequence
  Description of Artificial Sequence: Synthetic oligonucleotide
cauggcccgggggaaacuu

SEQ ID NO: 30333 - RNA, 19 nt, Artificial Sequence
  Description of Artificial Sequence: Synthetic oligonucleotide
ugccaaccuucgugucagg

SEQ ID NO: 30334 - RNA, 19 nt, Artificial Sequence
  Description of Artificial Sequence: Synthetic oligonucleotide
gugcuguguguaaguggag

SEQ ID NO: 30335 - RNA, 19 nt, Artificial Sequence
  Description of Artificial Sequence: Synthetic oligonucleotide
gaacuuggggauagaggag

SEQ ID NO: 30336 - RNA, 19 nt, Artificial Sequence
  Description of Artificial Sequence: Synthetic oligonucleotide
ggaagcuccucguggcccu

SEQ ID NO: 30337 - RNA, 19 nt, Artificial Sequence
  Description of Artificial Sequence: Synthetic oligonucleotide
uuccaaggugaggcaaagg

SEQ ID NO: 30338 - RNA, 19 nt, Artificial Sequence
  Description of Artificial Sequence: Synthetic oligonucleotide
gcaucuggacuuguuccag

SEQ ID NO: 30339 - RNA, 19 nt, Artificial Sequence
  Description of Artificial Sequence: Synthetic oligonucleotide
gcccagcccaccgggugac

SEQ ID NO: 30340 - RNA, 19 nt, Artificial Sequence
  Description of Artificial Sequence: Synthetic oligonucleotide
caucaccgggcagggaggg

SEQ ID NO: 30341 - RNA, 19 nt, Artificial Sequence
  Description of Artificial Sequence: Synthetic oligonucleotide
ggugcugguggugguucau

SEQ ID NO: 30342 - RNA, 19 nt, Artificial Sequence
  Description of Artificial Sequence: Synthetic oligonucleotide
uacggaguaagcugcucug

SEQ ID NO: 30343 - RNA, 19 nt, Artificial Sequence
  Description of Artificial Sequence: Synthetic oligonucleotide
gccugugugaguggcuccu

SEQ ID NO: 30344 - RNA, 19 nt, Artificial Sequence
  Description of Artificial Sequence: Synthetic oligonucleotide
ugggcccuaaacaggcacc

SEQ ID NO: 30345 - RNA, 19 nt, Artificial Sequence
  Description of Artificial Sequence: Synthetic oligonucleotide
cuuuaggccaugggucacu

SEQ ID NO: 30346 - RNA, 19 nt, Artificial Sequence
  Description of Artificial Sequence: Synthetic oligonucleotide
ucaccgugagccaucaaug

SEQ ID NO: 30347 - RNA, 19 nt, Artificial Sequence
  Description of Artificial Sequence: Synthetic oligonucleotide
gugcucuggucugacaugg

SEQ ID NO: 30348 - RNA, 19 nt, Artificial Sequence
  Description of Artificial Sequence: Synthetic oligonucleotide
guuucucucugucuucuag

SEQ ID NO: 30349 - RNA, 19 nt, Artificial Sequence
  Description of Artificial Sequence: Synthetic oligonucleotide
gucuagaccuaguuuuuuu

SEQ ID NO: 30350 - RNA, 19 nt, Artificial Sequence
  Description of Artificial Sequence: Synthetic oligonucleotide
uguucuguuccccacguau

SEQ ID NO: 30351 - RNA, 19 nt, Artificial Sequence
  Description of Artificial Sequence: Synthetic oligonucleotide
uggauauaguagagauugu

SEQ ID NO: 30352 - RNA, 19 nt, Artificial Sequence
  Description of Artificial Sequence: Synthetic oligonucleotide
uugucugugaaauuucucu

SEQ ID NO: 30353 - RNA, 19 nt, Artificial Sequence
  Description of Artificial Sequence: Synthetic oligonucleotide
uuuuguagauuuugaguuu

SEQ ID NO: 30354 - RNA, 19 nt, Artificial Sequence
  Description of Artificial Sequence: Synthetic oligonucleotide
uucccuuguaguguaaaga

SEQ ID NO: 30355 - RNA, 19 nt, Artificial Sequence
  Description of Artificial Sequence: Synthetic oligonucleotide
aaugaucacuuucuguaac

SEQ ID NO: 30356 - RNA, 19 nt, Artificial Sequence
  Description of Artificial Sequence: Synthetic oligonucleotide
caauaacaagaccacuuuu

SEQ ID NO: 30357 - RNA, 19 nt, Artificial Sequence
  Description of Artificial Sequence: Synthetic oligonucleotide
uuaagauuuauccuguuug

SEQ ID NO: 30358 - RNA, 19 nt, Artificial Sequence
  Description of Artificial Sequence: Synthetic oligonucleotide
guucuuuguugauugaaac

SEQ ID NO: 30359 - RNA, 19 nt, Artificial Sequence
  Description of Artificial Sequence: Synthetic oligonucleotide
cauaauaauuguuaaaauu

SEQ ID NO: 30360 - RNA, 19 nt, Artificial Sequence
  Description of Artificial Sequence: Synthetic oligonucleotide
ucucuacagccuucuuuuu

SEQ ID NO: 30361 - RNA, 19 nt, Artificial Sequence
  Description of Artificial Sequence: Synthetic oligonucleotide
ucuuccauagcuaaucuuc

SEQ ID NO: 30362 - RNA, 19 nt, Artificial Sequence
  Description of Artificial Sequence: Synthetic oligonucleotide
ccuucuaauaguuuuugcu

SEQ ID NO: 30363 - RNA, 19 nt, Artificial Sequence
  Description of Artificial Sequence: Synthetic oligonucleotide
uuucuguuuugcuguuguu

SEQ ID NO: 30364 - RNA, 19 nt, Artificial Sequence
  Description of Artificial Sequence: Synthetic oligonucleotide
ugcuuugcaaagcuuuccc

SEQ ID NO: 30365 - RNA, 19 nt, Artificial Sequence
  Description of Artificial Sequence: Synthetic oligonucleotide
ccucauagccuguaccugu

SEQ ID NO: 30366 - RNA, 19 nt, Artificial Sequence
  Description of Artificial Sequence: Synthetic oligonucleotide
uuaucaauauaaaauaauc

SEQ ID NO: 30367 - RNA, 19 nt, Artificial Sequence
  Description of Artificial Sequence: Synthetic oligonucleotide
cuuccuguugaaugcuuca

SEQ ID NO: 30368 - RNA, 19 nt, Artificial Sequence
  Description of Artificial Sequence: Synthetic oligonucleotide
augacuugaauucuacuuu

SEQ ID NO: 30369 - RNA, 19 nt, Artificial Sequence
  Description of Artificial Sequence: Synthetic oligonucleotide
ugauaaaaacauugccaua

SEQ ID NO: 30370 - RNA, 19 nt, Artificial Sequence
  Description of Artificial Sequence: Synthetic oligonucleotide
acugcuuuuuaucuugaug

SEQ ID NO: 30371 - RNA, 19 nt, Artificial Sequence
  Description of Artificial Sequence: Synthetic oligonucleotide
gaauucaucuggcauugcu

SEQ ID NO: 30372 - RNA, 19 nt, Artificial Sequence
  Description of Artificial Sequence: Synthetic oligonucleotide
uuugccuuaucaucucauc

SEQ ID NO: 30373 - RNA, 19 nt, Artificial Sequence
  Description of Artificial Sequence: Synthetic oligonucleotide
cuggaguuuuuaaaugcca

SEQ ID NO: 30374 - RNA, 19 nt, Artificial Sequence
  Description of Artificial Sequence: Synthetic oligonucleotide
auuuguuucaguugucuuu

SEQ ID NO: 30375 - RNA, 19 nt, Artificial Sequence
  Description of Artificial Sequence: Synthetic oligonucleotide
uaacaacauaauaaauaga

SEQ ID NO: 30376 - RNA, 19 nt, Artificial Sequence
  Description of Artificial Sequence: Synthetic oligonucleotide
acuuugccauuuaaaaaaa

SEQ ID NO: 30377 - RNA, 25 nt, Artificial Sequence
  Description of Artificial Sequence: Synthetic oligonucleotide
cccggggccgcacccacagccccgg

SEQ ID NO: 30378 - RNA, 25 nt, Artificial Sequence
  Description of Artificial Sequence: Synthetic oligonucleotide
gcuaccccggagaagccugacuuga

SEQ ID NO: 30379 - RNA, 25 nt, Artificial Sequence
  Description of Artificial Sequence: Synthetic oligonucleotide
agaacccuuucugcagagucccggc

SEQ ID NO: 30380 - RNA, 25 nt, Artificial Sequence
  Description of Artificial Sequence: Synthetic oligonucleotide
cagugcgggacuccgguagccgccc

SEQ ID NO: 30381 - RNA, 25 nt, Artificial Sequence
  Description of Artificial Sequence: Synthetic oligonucleotide
ccuccgguagccgccccuccugccc

SEQ ID NO: 30382 - RNA, 25 nt, Artificial Sequence
  Description of Artificial Sequence: Synthetic oligonucleotide
cccgcgccgccgcccuauauguugc

SEQ ID NO: 30383 - RNA, 25 nt, Artificial Sequence
  Description of Artificial Sequence: Synthetic oligonucleotide
cccgccgcggccucuggggcaugga

SEQ ID NO: 30384 - RNA, 25 nt, Artificial Sequence
  Description of Artificial Sequence: Synthetic oligonucleotide
agcacgcugcccagcccuggcgaug

SEQ ID NO: 30385 - RNA, 25 nt, Artificial Sequence
  Description of Artificial Sequence: Synthetic oligonucleotide
ggcaacggcgacggggguggcggag

SEQ ID NO: 30386 - RNA, 25 nt, Artificial Sequence
  Description of Artificial Sequence: Synthetic oligonucleotide
ggagcgccugcuggccgcgcucgcc

SEQ ID NO: 30387 - RNA, 25 nt, Artificial Sequence
  Description of Artificial Sequence: Synthetic oligonucleotide
cuaccugcagugcgccgugggcugc

SEQ ID NO: 30388 - RNA, 25 nt, Artificial Sequence
  Description of Artificial Sequence: Synthetic oligonucleotide
cgcggucuucgcgcgcaaucgucag

SEQ ID NO: 30389 - RNA, 25 nt, Artificial Sequence
  Description of Artificial Sequence: Synthetic oligonucleotide
gacgaacucaguguacggccgccac

SEQ ID NO: 30390 - RNA, 25 nt, Artificial Sequence
  Description of Artificial Sequence: Synthetic oligonucleotide
cgcgcugcccagccacaggcuccga

SEQ ID NO: 30391 - RNA, 25 nt, Artificial Sequence
  Description of Artificial Sequence: Synthetic oligonucleotide
agugccggcgcgggccgccugggug

SEQ ID NO: 30392 - RNA, 25 nt, Artificial Sequence
  Description of Artificial Sequence: Synthetic oligonucleotide
ggugcaggagcugcccucgcuggcc

SEQ ID NO: 30393 - RNA, 25 nt, Artificial Sequence
  Description of Artificial Sequence: Synthetic oligonucleotide
ccugccgcucuaccaguacgccagc

SEQ ID NO: 30394 - RNA, 25 nt, Artificial Sequence
  Description of Artificial Sequence: Synthetic oligonucleotide
cgaguccgccccgcgucuccgcagc

SEQ ID NO: 30395 - RNA, 25 nt, Artificial Sequence
  Description of Artificial Sequence: Synthetic oligonucleotide
cgcgcccaacugcauccuccuggcc

SEQ ID NO: 30396 - RNA, 25 nt, Artificial Sequence
  Description of Artificial Sequence: Synthetic oligonucleotide
cauguuccucguccacuacgggcau

SEQ ID NO: 30397 - RNA, 25 nt, Artificial Sequence
  Description of Artificial Sequence: Synthetic oligonucleotide
ucggugcuuaauuuacccauuucug

SEQ ID NO: 30398 - RNA, 25 nt, Artificial Sequence
  Description of Artificial Sequence: Synthetic oligonucleotide
gaugcgaggaggaaagccuaugcca

SEQ ID NO: 30399 - RNA, 25 nt, Artificial Sequence
  Description of Artificial Sequence: Synthetic oligonucleotide
acuguuggcguguacaauggcgauu

SEQ ID NO: 30400 - RNA, 25 nt, Artificial Sequence
  Description of Artificial Sequence: Synthetic oligonucleotide
uauguucuguaccuguaacggcuau

SEQ ID NO: 30401 - RNA, 25 nt, Artificial Sequence
  Description of Artificial Sequence: Synthetic oligonucleotide
uuugcaaagcagauacuugagccau

SEQ ID NO: 30402 - RNA, 25 nt, Artificial Sequence
  Description of Artificial Sequence: Synthetic oligonucleotide
uugugcaguguaugcugaugacugg

SEQ ID NO: 30403 - RNA, 25 nt, Artificial Sequence
  Description of Artificial Sequence: Synthetic oligonucleotide
gguaacagauccccguuuucuaaua

SEQ ID NO: 30404 - RNA, 25 nt, Artificial Sequence
  Description of Artificial Sequence: Synthetic oligonucleotide
agguuuuggcuugugguuaacgggc

SEQ ID NO: 30405 - RNA, 25 nt, Artificial Sequence
  Description of Artificial Sequence: Synthetic oligonucleotide
cauguugauaaacauccauucagau

SEQ ID NO: 30406 - RNA, 25 nt, Artificial Sequence
  Description of Artificial Sequence: Synthetic oligonucleotide
ucauauccuaaggaaucucagaaaa

SEQ ID NO: 30407 - RNA, 25 nt, Artificial Sequence
  Description of Artificial Sequence: Synthetic oligonucleotide
accaggagauacuggauacaaaaua

SEQ ID NO: 30408 - RNA, 25 nt, Artificial Sequence
  Description of Artificial Sequence: Synthetic oligonucleotide
accaaggggaggcuuauuugaauac

SEQ ID NO: 30409 - RNA, 25 nt, Artificial Sequence
  Description of Artificial Sequence: Synthetic oligonucleotide
cguaacugcagccaacuauuuugga

SEQ ID NO: 30410 - RNA, 25 nt, Artificial Sequence
  Description of Artificial Sequence: Synthetic oligonucleotide
agaaaucauggagugguguggcuau

SEQ ID NO: 30411 - RNA, 25 nt, Artificial Sequence
  Description of Artificial Sequence: Synthetic oligonucleotide
ugcccuggccagcuggucuguccaa

SEQ ID NO: 30412 - RNA, 25 nt, Artificial Sequence
  Description of Artificial Sequence: Synthetic oligonucleotide
aggcgcggcuuuugcuuucuucacg

SEQ ID NO: 30413 - RNA, 25 nt, Artificial Sequence
  Description of Artificial Sequence: Synthetic oligonucleotide
guuuuguuuuuuaucugguagagca

SEQ ID NO: 30414 - RNA, 25 nt, Artificial Sequence
  Description of Artificial Sequence: Synthetic oligonucleotide
aaaagagcaucaugagugguaccuc

SEQ ID NO: 30415 - RNA, 25 nt, Artificial Sequence
  Description of Artificial Sequence: Synthetic oligonucleotide
ccggaaauuugaagaguauccaaag

SEQ ID NO: 30416 - RNA, 25 nt, Artificial Sequence
  Description of Artificial Sequence: Synthetic oligonucleotide
guucagaaaaauuauaauuccauuu

SEQ ID NO: 30417 - RNA, 25 nt, Artificial Sequence
  Description of Artificial Sequence: Synthetic oligonucleotide
uuuguuuuaagugcguuuuucauga

SEQ ID NO: 30418 - RNA, 25 nt, Artificial Sequence
  Description of Artificial Sequence: Synthetic oligonucleotide
aaauuaucuucaacuugaagcuuuc

SEQ ID NO: 30419 - RNA, 25 nt, Artificial Sequence
  Description of Artificial Sequence: Synthetic oligonucleotide
ccaauggcgcuucucuauggacuuu

SEQ ID NO: 30420 - RNA, 25 nt, Artificial Sequence
  Description of Artificial Sequence: Synthetic oligonucleotide
uguaaauaaguuauaucuuuguaau

SEQ ID NO: 30421 - RNA, 25 nt, Artificial Sequence
  Description of Artificial Sequence: Synthetic oligonucleotide
uuuuccugcuacuuuaucauuuuca

SEQ ID NO: 30422 - RNA, 25 nt, Artificial Sequence
  Description of Artificial Sequence: Synthetic oligonucleotide
aagauguccucuaggaauuuuuuuu

SEQ ID NO: 30423 - RNA, 25 nt, Artificial Sequence
  Description of Artificial Sequence: Synthetic oligonucleotide
ucuaguaauuuugcaaucuaccuaa

SEQ ID NO: 30424 - RNA, 25 nt, Artificial Sequence
  Description of Artificial Sequence: Synthetic oligonucleotide
auaaguaccuaaauacgcugaaaug

SEQ ID NO: 30425 - RNA, 25 nt, Artificial Sequence
  Description of Artificial Sequence: Synthetic oligonucleotide
acaggucagaauuucaagcucuggg

SEQ ID NO: 30426 - RNA, 25 nt, Artificial Sequence
  Description of Artificial Sequence: Synthetic oligonucleotide
guaauaacugcugauauuuuuucua

SEQ ID NO: 30427 - RNA, 25 nt, Artificial Sequence
  Description of Artificial Sequence: Synthetic oligonucleotide
aauuucaaauuuaccucuuuuggcu

SEQ ID NO: 30428 - RNA, 25 nt, Artificial Sequence
  Description of Artificial Sequence: Synthetic oligonucleotide
uaugucuugccaaguguguaugaga

SEQ ID NO: 30429 - RNA, 25 nt, Artificial Sequence
  Description of Artificial Sequence: Synthetic oligonucleotide
acuagacuuuacaacugucuuugau

SEQ ID NO: 30430 - RNA, 25 nt, Artificial Sequence
  Description of Artificial Sequence: Synthetic oligonucleotide
uggcauuuucagaacaauaaauguc

SEQ ID NO: 30431 - RNA, 25 nt, Artificial Sequence
  Description of Artificial Sequence: Synthetic oligonucleotide
cacaaucccuucuauagcccccuac

SEQ ID NO: 30432 - RNA, 25 nt, Artificial Sequence
  Description of Artificial Sequence: Synthetic oligonucleotide
cagugaucucuucaaggucaacugc

SEQ ID NO: 30433 - RNA, 25 nt, Artificial Sequence
  Description of Artificial Sequence: Synthetic oligonucleotide
caguguugcuucccucccccuauag

SEQ ID NO: 30434 - RNA, 25 nt, Artificial Sequence
  Description of Artificial Sequence: Synthetic oligonucleotide
gggcuggaaucugucuaggagcccu

SEQ ID NO: 30435 - RNA, 25 nt, Artificial Sequence
  Description of Artificial Sequence: Synthetic oligonucleotide
ucucucggaggccacagaggcuggg

SEQ ID NO: 30436 - RNA, 25 nt, Artificial Sequence
  Description of Artificial Sequence: Synthetic oligonucleotide
ggguagccauugugcagucauggcc

SEQ ID NO: 30437 - RNA, 25 nt, Artificial Sequence
  Description of Artificial Sequence: Synthetic oligonucleotide
ccgggggaaacuugccaaccuucgu

SEQ ID NO: 30438 - RNA, 25 nt, Artificial Sequence
  Description of Artificial Sequence: Synthetic oligonucleotide
ugucaggugcuguguguaaguggag

SEQ ID NO: 30439 - RNA, 25 nt, Artificial Sequence
  Description of Artificial Sequence: Synthetic oligonucleotide
gaacuuggggauagaggaggaagcu

SEQ ID NO: 30440 - RNA, 25 nt, Artificial Sequence
  Description of Artificial Sequence: Synthetic oligonucleotide
uccucguggcccuuccaaggugagg

SEQ ID NO: 30441 - RNA, 25 nt, Artificial Sequence
  Description of Artificial Sequence: Synthetic oligonucleotide
gcaaaggcaucuggacuuguuccag

SEQ ID NO: 30442 - RNA, 25 nt, Artificial Sequence
  Description of Artificial Sequence: Synthetic oligonucleotide
gcccagcccaccgggugacaucacc

SEQ ID NO: 30443 - RNA, 25 nt, Artificial Sequence
  Description of Artificial Sequence: Synthetic oligonucleotide
cgggcagggaggggugcugguggug

SEQ ID NO: 30444 - RNA, 25 nt, Artificial Sequence
  Description of Artificial Sequence: Synthetic oligonucleotide
gguucauacggaguaagcugcucug

SEQ ID NO: 30445 - RNA, 25 nt, Artificial Sequence
  Description of Artificial Sequence: Synthetic oligonucleotide
gccugugugaguggcuccugggccc

SEQ ID NO: 30446 - RNA, 25 nt, Artificial Sequence
  Description of Artificial Sequence: Synthetic oligonucleotide
cuaaacaggcaccuuuaggccaugg

SEQ ID NO: 30447 - RNA, 25 nt, Artificial Sequence
  Description of Artificial Sequence: Synthetic oligonucleotide
ggucacucaccgugagccaucaaug

SEQ ID NO: 30448 - RNA, 25 nt, Artificial Sequence
  Description of Artificial Sequence: Synthetic oligonucleotide
gugcucuggucugacaugguuucuc

SEQ ID NO: 30449 - RNA, 25 nt, Artificial Sequence
  Description of Artificial Sequence: Synthetic oligonucleotide
cucugucuucuagucuagaccuagu

SEQ ID NO: 30450 - RNA, 25 nt, Artificial Sequence
  Description of Artificial Sequence: Synthetic oligonucleotide
uuuuuuuguucuguuccccacguau

SEQ ID NO: 30451 - RNA, 25 nt, Artificial Sequence
  Description of Artificial Sequence: Synthetic oligonucleotide
uggauauaguagagauuguugucug

SEQ ID NO: 30452 - RNA, 25 nt, Artificial Sequence
  Description of Artificial Sequence: Synthetic oligonucleotide
gugaaauuucucuuuuguagauuuu

SEQ ID NO: 30453 - RNA, 25 nt, Artificial Sequence
  Description of Artificial Sequence: Synthetic oligonucleotide
ugaguuuucccuuguaguguaaaga

SEQ ID NO: 30454 - RNA, 25 nt, Artificial Sequence
  Description of Artificial Sequence: Synthetic oligonucleotide
aaugaucacuuucuguaacaauaac

SEQ ID NO: 30455 - RNA, 25 nt, Artificial Sequence
  Description of Artificial Sequence: Synthetic oligonucleotide
caagaccacuuuuuaagauuuaucc

SEQ ID NO: 30456 - RNA, 25 nt, Artificial Sequence
  Description of Artificial Sequence: Synthetic oligonucleotide
cuguuuguucuuuguugauugaaac

SEQ ID NO: 30457 - RNA, 25 nt, Artificial Sequence
  Description of Artificial Sequence: Synthetic oligonucleotide
cauaauaauuguuaaaauucucuac

SEQ ID NO: 30458 - RNA, 25 nt, Artificial Sequence
  Description of Artificial Sequence: Synthetic oligonucleotide
cagccuucuuuuucuuccauagcua

SEQ ID NO: 30459 - RNA, 25 nt, Artificial Sequence
  Description of Artificial Sequence: Synthetic oligonucleotide
aaucuuccuucuaauaguuuuugcu

SEQ ID NO: 30460 - RNA, 25 nt, Artificial Sequence
  Description of Artificial Sequence: Synthetic oligonucleotide
uuucuguuuugcuguuguugcuuug

SEQ ID NO: 30461 - RNA, 25 nt, Artificial Sequence
  Description of Artificial Sequence: Synthetic oligonucleotide
gcaaagcuuuccccucauagccugu

SEQ ID NO: 30462 - RNA, 25 nt, Artificial Sequence
  Description of Artificial Sequence: Synthetic oligonucleotide
uaccuguuaucaauauaaaauaauc

SEQ ID NO: 30463 - RNA, 25 nt, Artificial Sequence
  Description of Artificial Sequence: Synthetic oligonucleotide
cuuccuguugaaugcuucaugacuu

SEQ ID NO: 30464 - RNA, 25 nt, Artificial Sequence
  Description of Artificial Sequence: Synthetic oligonucleotide
ugaauucuacuuugauaaaaacauu

SEQ ID NO: 30465 - RNA, 25 nt, Artificial Sequence
  Description of Artificial Sequence: Synthetic oligonucleotide
ugccauacugcuuuuuaucuugaug

SEQ ID NO: 30466 - RNA, 25 nt, Artificial Sequence
  Description of Artificial Sequence: Synthetic oligonucleotide
gaauucaucuggcauugcuuugccu

SEQ ID NO: 30467 - RNA, 25 nt, Artificial Sequence
  Description of Artificial Sequence: Synthetic oligonucleotide
uuaucaucucaucuggaguuuuuaa

SEQ ID NO: 30468 - RNA, 25 nt, Artificial Sequence
  Description of Artificial Sequence: Synthetic oligonucleotide
aaugccauuuguuucaguugucuuu

SEQ ID NO: 30469 - RNA, 25 nt, Artificial Sequence
  Description of Artificial Sequence: Synthetic oligonucleotide
uaacaacauaauaaauagacuuugc

SEQ ID NO: 30470 - DNA, 21 bp, Artificial Sequence
  Description of Artificial Sequence: Synthetic oligonucleotide
  Description of Combined DNA/RNA Molecule: Synthetic oligonucleotide
cuacacaaaucagcgauuutt

SEQ ID NO: 30471 - DNA, 21 bp, Artificial Sequence
  Description of Artificial Sequence: Synthetic oligonucleotide
  Description of Combined DNA/RNA Molecule: Synthetic oligonucleotide
aaaucgcugauuuguguagtt

SEQ ID NO: 30472 - DNA, 25 bp, Artificial Sequence
  Description of Artificial Sequence: Synthetic oligonucleotide
  Description of Combined DNA/RNA Molecule: Synthetic oligonucleotide
cuacacaaaucagcgauuuccaugt

SEQ ID NO: 30473 - RNA, 27 nt, Artificial Sequence
  Description of Artificial Sequence: Synthetic oligonucleotide
acauggaaaucgcugauuuguguaguc

SEQ ID NO: 30474 - RNA, 13 nt, Artificial Sequence
  Description of Artificial Sequence: Synthetic oligonucleotide
cuacacaaaucag

SEQ ID NO: 30475 - DNA, 11 bp, Artificial Sequence
  Description of Artificial Sequence: Synthetic oligonucleotide
  Description of Combined DNA/RNA Molecule: Synthetic oligonucleotide
gauuuccaugt

SEQ ID NO: 30476 - DNA, 21 bp, Artificial Sequence
  Description of Artificial Sequence: Synthetic oligonucleotide
  Description of Combined DNA/RNA Molecule: Synthetic oligonucleotide
ggaucuuauuucuucggagtt

SEQ ID NO: 30477 - DNA, 21 bp, Artificial Sequence
  Description of Artificial Sequence: Synthetic oligonucleotide
  Description of Combined DNA/RNA Molecule: Synthetic oligonucleotide
cuccgaagaaauaagaucctt

SEQ ID NO: 30478 - RNA, 11 nt, Artificial Sequence
  Description of Artificial Sequence: Synthetic oligonucleotide
ggaucuuauuu

SEQ ID NO: 30479 - DNA, 10 bp, Artificial Sequence
  Description of Artificial Sequence: Synthetic oligonucleotide
  Description of Combined DNA/RNA Molecule: Synthetic oligonucleotide
cuucggagtt

SEQ ID NO: 30480 - RNA, 27 nt, Artificial Sequence
  Description of Artificial Sequence: Synthetic oligonucleotide
cauugucuccgaagaaauaagauccuu

SEQ ID NO: 30481 - RNA, 8 nt, Artificial Sequence
  Description of Artificial Sequence: Synthetic oligonucleotide
  modified_base (2): LNA-G
ggaucuua

SEQ ID NO: 30482 - DNA, 17 bp, Artificial Sequence
  Description of Artificial Sequence: Synthetic oligonucleotide
  Description of Combined DNA/RNA Molecule: Synthetic oligonucleotide
uuucuucggagacaatg

SEQ ID NO: 30483 - DNA, 16 bp, Artificial Sequence
  Description of Artificial Sequence: Synthetic oligonucleotide
  Description of Combined DNA/RNA Molecule: Synthetic oligonucleotide
uucuucggagacaatg

SEQ ID NO: 30484 - DNA, 15 bp, Artificial Sequence
  Description of Artificial Sequence: Synthetic oligonucleotide
  Description of Combined DNA/RNA Molecule: Synthetic oligonucleotide
ucuucggagacaatg

SEQ ID NO: 30485 - DNA, 14 bp, Artificial Sequence
  Description of Artificial Sequence: Synthetic oligonucleotide
  Description of Combined DNA/RNA Molecule: Synthetic oligonucleotide
cuucggagacaatg

SEQ ID NO: 30486 - DNA, 13 bp, Artificial Sequence
  Description of Artificial Sequence: Synthetic oligonucleotide
  Description of Combined DNA/RNA Molecule: Synthetic oligonucleotide
uucggagacaatg

SEQ ID NO: 30487 - DNA, 12 bp, Artificial Sequence
  Description of Artificial Sequence: Synthetic oligonucleotide
  Description of Combined DNA/RNA Molecule: Synthetic oligonucleotide
ucggagacaatg

SEQ ID NO: 30488 - DNA, 11 bp, Artificial Sequence
  Description of Artificial Sequence: Synthetic oligonucleotide
  Description of Combined DNA/RNA Molecule: Synthetic oligonucleotide
cggagacaatg

SEQ ID NO: 30489 - RNA, 9 nt, Artificial Sequence
  Description of Artificial Sequence: Synthetic oligonucleotide
  modified_base (2): LNA-G
ggaucuuau

SEQ ID NO: 30490 - RNA, 10 nt, Artificial Sequence
  Description of Artificial Sequence: Synthetic oligonucleotide
  modified_base (2): LNA-G
ggaucuuauu

SEQ ID NO: 30491 - RNA, 11 nt, Artificial Sequence
  Description of Artificial Sequence: Synthetic oligonucleotide
  modified_base (2): LNA-G
ggaucuuauuu

SEQ ID NO: 30492 - RNA, 12 nt, Artificial Sequence
  Description of Artificial Sequence: Synthetic oligonucleotide
  modified_base (2): LNA-G
ggaucuuauuuc

SEQ ID NO: 30493 - RNA, 8 nt, Artificial Sequence
  Description of Artificial Sequence: Synthetic oligonucleotide
  modified_base (3): LNA-A
cuacacaa

SEQ ID NO: 30494 - DNA, 13 bp, Artificial Sequence
  Description of Artificial Sequence: Synthetic oligonucleotide
  Description of Combined DNA/RNA Molecule: Synthetic oligonucleotide
  modified_base (8): LNA-A
aucagcgauuutt

SEQ ID NO: 30495 - DNA, 12 bp, Artificial Sequence
  Description of Artificial Sequence: Synthetic oligonucleotide
  Description of Combined DNA/RNA Molecule: Synthetic oligonucleotide
  modified_base (7): LNA-A
ucagcgauuutt

SEQ ID NO: 30496 - DNA, 11 bp, Artificial Sequence
  Description of Artificial Sequence: Synthetic oligonucleotide
  Description of Combined DNA/RNA Molecule: Synthetic oligonucleotide
  modified_base (6): LNA-A
cagcgauuutt

SEQ ID NO: 30497 - DNA, 10 bp, Artificial Sequence
  Description of Artificial Sequence: Synthetic oligonucleotide
  Description of Combined DNA/RNA Molecule: Synthetic oligonucleotide
  modified_base (5): LNA-A
agcgauuutt

SEQ ID NO: 30498 - DNA, 9 bp, Artificial Sequence
  Description of Artificial Sequence: Synthetic oligonucleotide
  Description of Combined DNA/RNA Molecule: Synthetic oligonucleotide
  modified_base (4): LNA-A
gcgauuutt

SEQ ID NO: 30499 - DNA, 8 bp, Artificial Sequence
  Description of Artificial Sequence: Synthetic oligonucleotide
  Description of Combined DNA/RNA Molecule: Synthetic oligonucleotide
  modified_base (3): LNA-A
cgauuutt

SEQ ID NO: 30500 - DNA, 7 bp, Artificial Sequence
  Description of Artificial Sequence: Synthetic oligonucleotide
  Description of Combined DNA/RNA Molecule: Synthetic oligonucleotide
  modified_base (2): LNA-A
gauuutt

SEQ ID NO: 30501 - RNA, 9 nt, Artificial Sequence
  Description of Artificial Sequence: Synthetic oligonucleotide
  modified_base (3): LNA-A
cuacacaaa

SEQ ID NO: 30502 - RNA, 10 nt, Artificial Sequence
  Description of Artificial Sequence: Synthetic oligonucleotide
  modified_base (3): LNA-A
cuacacaaau

SEQ ID NO: 30503 - RNA, 11 nt, Artificial Sequence
  Description of Artificial Sequence: Synthetic oligonucleotide
  modified_base (3): LNA-A
cuacacaaauc

SEQ ID NO: 30504 - RNA, 12 nt, Artificial Sequence
  Description of Artificial Sequence: Synthetic oligonucleotide
  modified_base (3): LNA-A
cuacacaaauca

SEQ ID NO: 30505 - RNA, 13 nt, Artificial Sequence
  Description of Artificial Sequence: Synthetic oligonucleotide
  modified_base (3): LNA-A
cuacacaaaucag

SEQ ID NO: 30506 - RNA, 14 nt, Artificial Sequence
  Description of Artificial Sequence: Synthetic oligonucleotide
  modified_base (3): LNA-A
cuacacaaaucagc

SEQ ID NO: 30507 - RNA, 13 nt, Artificial Sequence
  Description of Artificial Sequence: Synthetic oligonucleotide
  modified_base (2): LNA-G
ggaucuuauuucu

SEQ ID NO: 30508 - RNA, 14 nt, Artificial Sequence
  Description of Artificial Sequence: Synthetic oligonucleotide
  modified_base (2): LNA-G
ggaucuuauuucuu

SEQ ID NO: 30509 - RNA, 8 nt, Artificial Sequence
  Description of Artificial Sequence: Synthetic oligonucleotide
  modified_base (2): LNA-G
  modified_base (8): LNA-A
ggaucuua

SEQ ID NO: 30510 - RNA, 9 nt, Artificial Sequence
  Description of Artificial Sequence: Synthetic oligonucleotide
  modified_base (2): LNA-G
  modified_base (9): LNA-U
ggaucuuau

SEQ ID NO: 30511 - RNA, 10 nt, Artificial Sequence
  Description of Artificial Sequence: Synthetic oligonucleotide
  modified_base (2): LNA-G
  modified_base (10): LNA-U
ggaucuuauu

SEQ ID NO: 30512 - RNA, 11 nt, Artificial Sequence
  Description of Artificial Sequence: Synthetic oligonucleotide
  modified_base (2): LNA-G
  modified_base (11): LNA-U
ggaucuuauuu

SEQ ID NO: 30513 - RNA, 12 nt, Artificial Sequence
  Description of Artificial Sequence: Synthetic oligonucleotide
  modified_base (2): LNA-G
  modified_base (12): LNA-C
ggaucuuauuuc

SEQ ID NO: 30514 - RNA, 13 nt, Artificial Sequence
  Description of Artificial Sequence: Synthetic oligonucleotide
  modified_base (2): LNA-G
  modified_base (13): LNA-U
ggaucuuauuucu

SEQ ID NO: 30515 - RNA, 14 nt, Artificial Sequence
  Description of Artificial Sequence: Synthetic oligonucleotide
  modified_base (2): LNA-G
  modified_base (14): LNA-U
ggaucuuauuucuu

SEQ ID NO: 30516 - DNA, 13 bp, Artificial Sequence
  Description of Artificial Sequence: Synthetic oligonucleotide
  Description of Combined DNA/RNA Molecule: Synthetic oligonucleotide
  modified_base (8): LNA-G
uuucuucggagtt

SEQ ID NO: 30517 - DNA, 12 bp, Artificial Sequence
  Description of Artificial Sequence: Synthetic oligonucleotide
  Description of Combined DNA/RNA Molecule: Synthetic oligonucleotide
  modified_base (7): LNA-G
uucuucggagtt

SEQ ID NO: 30518 - DNA, 11 bp, Artificial Sequence
  Description of Artificial Sequence: Synthetic oligonucleotide
  Description of Combined DNA/RNA Molecule: Synthetic oligonucleotide
  modified_base (6): LNA-G
ucuucggagtt

SEQ ID NO: 30519 - DNA, 10 bp, Artificial Sequence
  Description of Artificial Sequence: Synthetic oligonucleotide
  Description of Combined DNA/RNA Molecule: Synthetic oligonucleotide
  modified_base (5): LNA-G
cuucggagtt

SEQ ID NO: 30520 - DNA, 9 bp, Artificial Sequence
  Description of Artificial Sequence: Synthetic oligonucleotide
  Description of Combined DNA/RNA Molecule: Synthetic oligonucleotide
  modified_base (4): LNA-G
uucggagtt

SEQ ID NO: 30521 - DNA, 8 bp, Artificial Sequence
  Description of Artificial Sequence: Synthetic oligonucleotide
  Description of Combined DNA/RNA Molecule: Synthetic oligonucleotide
  modified_base (3): LNA-G
ucggagtt

SEQ ID NO: 30522 - DNA, 7 bp, Artificial Sequence
  Description of Artificial Sequence: Synthetic oligonucleotide
  Description of Combined DNA/RNA Molecule: Synthetic oligonucleotide
  modified_base (2): LNA-G
cggagtt

SEQ ID NO: 30523 - DNA, 13 bp, Artificial Sequence
  Description of Artificial Sequence: Synthetic oligonucleotide
  Description of Combined DNA/RNA Molecule: Synthetic oligonucleotide
  modified_base (1): LNA-U
  modified_base (8): LNA-G
uuucuucggagtt

SEQ ID NO: 30524 - DNA, 12 bp, Artificial Sequence
  Description of Artificial Sequence: Synthetic oligonucleotide
  Description of Combined DNA/RNA Molecule: Synthetic oligonucleotide
  modified_base (1): LNA-U
  modified_base (7): LNA-G
uucuucggagtt

SEQ ID NO: 30525 - DNA, 11 bp, Artificial Sequence
  Description of Artificial Sequence: Synthetic oligonucleotide
  Description of Combined DNA/RNA Molecule: Synthetic oligonucleotide
  modified_base (1): LNA-U
  modified_base (6): LNA-G
ucuucggagtt

SEQ ID NO: 30526 - DNA, 10 bp, Artificial Sequence
  Description of Artificial Sequence: Synthetic oligonucleotide
  Description of Combined DNA/RNA Molecule: Synthetic oligonucleotide
  modified_base (1): LNA-C
  modified_base (5): LNA-G
cuucggagtt

SEQ ID NO: 30527 - DNA, 9 bp, Artificial Sequence
  Description of Artificial Sequence: Synthetic oligonucleotide
  Description of Combined DNA/RNA Molecule: Synthetic oligonucleotide
  modified_base (1): LNA-U
  modified_base (4): LNA-G
uucggagtt

SEQ ID NO: 30528 - DNA, 8 bp, Artificial Sequence
  Description of Artificial Sequence: Synthetic oligonucleotide
  Description of Combined DNA/RNA Molecule: Synthetic oligonucleotide
  modified_base (1): LNA-U
  modified_base (3): LNA-G
ucggagtt

SEQ ID NO: 30529 - DNA, 7 bp, Artificial Sequence
  Description of Artificial Sequence: Synthetic oligonucleotide
  Description of Combined DNA/RNA Molecule: Synthetic oligonucleotide
  modified_base (1): LNA-C
  modified_base (2): LNA-G
cggagtt

SEQ ID NO: 30530 - DNA, 21 bp, Artificial Sequence
  Description of Artificial Sequence: Synthetic oligonucleotide
  Description of Combined DNA/RNA Molecule: Synthetic oligonucleotide
  modified_base (2): LNA-G
  modified_base (16): LNA-G
ggaucuuauuucuucggagtt

SEQ ID NO: 30531 - DNA, 25 bp, Artificial Sequence
  Description of Artificial Sequence: Synthetic oligonucleotide
  Description of Combined DNA/RNA Molecule: Synthetic oligonucleotide
ggaucuuauuucuucggagacaatg

SEQ ID NO: 30532 - RNA, 25 nt, Artificial Sequence
  Description of Artificial Sequence: Synthetic oligonucleotide
uuaagcagaguucaaaagcccuuca

SEQ ID NO: 30533 - RNA, 25 nt, Artificial Sequence
  Description of Artificial Sequence: Synthetic oligonucleotide
uaagcagaguucaaaagcccuucag

SEQ ID NO: 30534 - RNA, 25 nt, Artificial Sequence
  Description of Artificial Sequence: Synthetic oligonucleotide
agcagaguucaaaagcccuucagcg

SEQ ID NO: 30535 - RNA, 25 nt, Artificial Sequence
  Description of Artificial Sequence: Synthetic oligonucleotide
cucagggucugagugaagccgcucg

SEQ ID NO: 30536 - RNA, 25 nt, Artificial Sequence
  Description of Artificial Sequence: Synthetic oligonucleotide
caagcaacuacaucacgccagucaa

SEQ ID NO: 30537 - RNA, 25 nt, Artificial Sequence
  Description of Artificial Sequence: Synthetic oligonucleotide
aucaauggcagcuucuuggugcgug

SEQ ID NO: 30538 - RNA, 25 nt, Artificial Sequence
  Description of Artificial Sequence: Synthetic oligonucleotide
uuccagcccacauuggauucaucag

SEQ ID NO: 30539 - RNA, 25 nt, Artificial Sequence
  Description of Artificial Sequence: Synthetic oligonucleotide
cagcugagaauguggaauaccuaag

SEQ ID NO: 30540 - RNA, 25 nt, Artificial Sequence
  Description of Artificial Sequence: Synthetic oligonucleotide
aacguaucuccuaauuugaggcuca

SEQ ID NO: 30541 - RNA, 25 nt, Artificial Sequence
  Description of Artificial Sequence: Synthetic oligonucleotide
ccuaaaauaauuucucuacaauugg

SEQ ID NO: 30542 - RNA, 25 nt, Artificial Sequence
  Description of Artificial Sequence: Synthetic oligonucleotide
uggaagauucagcuaguuaggagcc

SEQ ID NO: 30543 - RNA, 25 nt, Artificial Sequence
  Description of Artificial Sequence: Synthetic oligonucleotide
uuaaacucuccuagucaauauccac

SEQ ID NO: 30544 - RNA, 25 nt, Artificial Sequence
  Description of Artificial Sequence: Synthetic oligonucleotide
cagccuacaguuauguucagucaca

SEQ ID NO: 30545 - RNA, 25 nt, Artificial Sequence
  Description of Artificial Sequence: Synthetic oligonucleotide
guuauguucagucacacacacauac

SEQ ID NO: 30546 - RNA, 25 nt, Artificial Sequence
  Description of Artificial Sequence: Synthetic oligonucleotide
cacauacaaaauguuccuuuugcuu

SEQ ID NO: 30547 - RNA, 25 nt, Artificial Sequence
  Description of Artificial Sequence: Synthetic oligonucleotide
uccuuuugcuuuuaaaguaauuuuu

SEQ ID NO: 30548 - RNA, 25 nt, Artificial Sequence
  Description of Artificial Sequence: Synthetic oligonucleotide
ugaccugugaagcaacagucaaugg

SEQ ID NO: 30549 - RNA, 25 nt, Artificial Sequence
  Description of Artificial Sequence: Synthetic oligonucleotide
cuaucucacacaucgacaaaccaau

SEQ ID NO: 30550 - RNA, 25 nt, Artificial Sequence
  Description of Artificial Sequence: Synthetic oligonucleotide
uguccucaauuguacugcuaccacu

SEQ ID NO: 30551 - RNA, 25 nt, Artificial Sequence
  Description of Artificial Sequence: Synthetic oligonucleotide
aaaccguagcuggcaagcggucuua

SEQ ID NO: 30552 - RNA, 25 nt, Artificial Sequence
  Description of Artificial Sequence: Synthetic oligonucleotide
uagcuggcaagcggucuuaccggcu

SEQ ID NO: 30553 - RNA, 25 nt, Artificial Sequence
  Description of Artificial Sequence: Synthetic oligonucleotide
uuguaugguuaaaagauggguuacc

SEQ ID NO: 30554 - RNA, 25 nt, Artificial Sequence
  Description of Artificial Sequence: Synthetic oligonucleotide
ugguuaaaagauggguuaccugcga

SEQ ID NO: 30555 - RNA, 25 nt, Artificial Sequence
  Description of Artificial Sequence: Synthetic oligonucleotide
cagggaauuauacaaucuugcugag

SEQ ID NO: 30556 - RNA, 25 nt, Artificial Sequence
  Description of Artificial Sequence: Synthetic oligonucleotide
acaaucuugcugagcauaaaacagu

SEQ ID NO: 30557 - RNA, 25 nt, Artificial Sequence
  Description of Artificial Sequence: Synthetic oligonucleotide
ccaauaaugaagaguccuuuauccu

SEQ ID NO: 30558 - RNA, 25 nt, Artificial Sequence
  Description of Artificial Sequence: Synthetic oligonucleotide
acuuuggauguuccaacgcaaguug

SEQ ID NO: 30559 - RNA, 25 nt, Artificial Sequence
  Description of Artificial Sequence: Synthetic oligonucleotide
aaugcuuccacuaaacugaaaccau

SEQ ID NO: 30560 - RNA, 25 nt, Artificial Sequence
  Description of Artificial Sequence: Synthetic oligonucleotide
gagaaaguuugacuuuguuaaauau

SEQ ID NO: 30561 - RNA, 25 nt, Artificial Sequence
  Description of Artificial Sequence: Synthetic oligonucleotide
aaagaacuacuguauauuaaaaguu

SEQ ID NO: 30562 - RNA, 25 nt, Artificial Sequence
  Description of Artificial Sequence: Synthetic oligonucleotide
uuagaaauacggguuuugacuuaac

SEQ ID NO: 30563 - RNA, 25 nt, Artificial Sequence
  Description of Artificial Sequence: Synthetic oligonucleotide
aacauggguacagcaaacucagcac

SEQ ID NO: 30564 - RNA, 25 nt, Artificial Sequence
  Description of Artificial Sequence: Synthetic oligonucleotide
aaagacacagaagaugcugaccuca

SEQ ID NO: 30565 - RNA, 25 nt, Artificial Sequence
  Description of Artificial Sequence: Synthetic oligonucleotide
uaguagggagguuuauucagaucgc

SEQ ID NO: 30566 - RNA, 25 nt, Artificial Sequence
  Description of Artificial Sequence: Synthetic oligonucleotide
gccuucugcagcaggguucugggau

SEQ ID NO: 30567 - RNA, 25 nt, Artificial Sequence
  Description of Artificial Sequence: Synthetic oligonucleotide
ggucugguacauauuggaaauuaug

SEQ ID NO: 30568 - RNA, 25 nt, Artificial Sequence
  Description of Artificial Sequence: Synthetic oligonucleotide
cuaguccuuccgauggaagcacuag

SEQ ID NO: 30569 - RNA, 25 nt, Artificial Sequence
  Description of Artificial Sequence: Synthetic oligonucleotide
ccagugaauauuguuuuuaugugga

SEQ ID NO: 30570 - RNA, 25 nt, Artificial Sequence
  Description of Artificial Sequence: Synthetic oligonucleotide
augaauucaaguuggaauugguaga

SEQ ID NO: 30571 - RNA, 25 nt, Artificial Sequence
  Description of Artificial Sequence: Synthetic oligonucleotide
caggacacagauuuagacuuggaga

SEQ ID NO: 30572 - RNA, 25 nt, Artificial Sequence
  Description of Artificial Sequence: Synthetic oligonucleotide
cucaaagcacaguuacaguauucca

SEQ ID NO: 30573 - RNA, 25 nt, Artificial Sequence
  Description of Artificial Sequence: Synthetic oligonucleotide
accacugccaccacugaugaauuaa

SEQ ID NO: 30574 - RNA, 25 nt, Artificial Sequence
  Description of Artificial Sequence: Synthetic oligonucleotide
gaaacuacuagugccacaucaucac

SEQ ID NO: 30575 - RNA, 25 nt, Artificial Sequence
  Description of Artificial Sequence: Synthetic oligonucleotide
aagucggacagccucaccaaacaga

SEQ ID NO: 30576 - RNA, 25 nt, Artificial Sequence
  Description of Artificial Sequence: Synthetic oligonucleotide
gaaagcgaaaaauggaacaugaugg

SEQ ID NO: 30577 - RNA, 25 nt, Artificial Sequence
  Description of Artificial Sequence: Synthetic oligonucleotide
cccucugauuuagcauguagacugc

SEQ ID NO: 30578 - RNA, 25 nt, Artificial Sequence
  Description of Artificial Sequence: Synthetic oligonucleotide
ugagcuauuuaaggaucuauuuaug

SEQ ID NO: 30579 - RNA, 25 nt, Artificial Sequence
  Description of Artificial Sequence: Synthetic oligonucleotide
aaaaggugaaaaagcacuauuauca

SEQ ID NO: 30580 - RNA, 25 nt, Artificial Sequence
  Description of Artificial Sequence: Synthetic oligonucleotide
gaaaaagcacuauuaucaguucugc

SEQ ID NO: 30581 - RNA, 25 nt, Artificial Sequence
  Description of Artificial Sequence: Synthetic oligonucleotide
ggcugaaaagaaagauuaaaccuac

SEQ ID NO: 30582 - RNA, 25 nt, Artificial Sequence
  Description of Artificial Sequence: Synthetic oligonucleotide
uaaacccuuauaauaaaauccuucu

SEQ ID NO: 30583 - RNA, 25 nt, Artificial Sequence
  Description of Artificial Sequence: Synthetic oligonucleotide
cauacuauuagccaaugcuguagac

SEQ ID NO: 30584 - RNA, 25 nt, Artificial Sequence
  Description of Artificial Sequence: Synthetic oligonucleotide
gacagaagcauuuugauaggaauag

SEQ ID NO: 30585 - RNA, 25 nt, Artificial Sequence
  Description of Artificial Sequence: Synthetic oligonucleotide
agagcaaauaagauaauggcccuga

SEQ ID NO: 30586 - RNA, 25 nt, Artificial Sequence
  Description of Artificial Sequence: Synthetic oligonucleotide
ccaacauuuuucucuuccucaagca

SEQ ID NO: 30587 - RNA, 25 nt, Artificial Sequence
  Description of Artificial Sequence: Synthetic oligonucleotide
uuaaguaugagaaaaguucagccca

SEQ ID NO: 30588 - RNA, 25 nt, Artificial Sequence
  Description of Artificial Sequence: Synthetic oligonucleotide
caggaauaaagauggcugcugaacc

SEQ ID NO: 30589 - RNA, 25 nt, Artificial Sequence
  Description of Artificial Sequence: Synthetic oligonucleotide
aauuugaaugaccaaguucucuuca

SEQ ID NO: 30590 - RNA, 25 nt, Artificial Sequence
  Description of Artificial Sequence: Synthetic oligonucleotide
auguauaaagauagccagccuagag

SEQ ID NO: 30591 - RNA, 25 nt, Artificial Sequence
  Description of Artificial Sequence: Synthetic oligonucleotide
ggcuguaacuaucucugugaagugu

SEQ ID NO: 30592 - RNA, 25 nt, Artificial Sequence
  Description of Artificial Sequence: Synthetic oligonucleotide
ucugugaagugugagaaaauuucaa

SEQ ID NO: 30593 - RNA, 25 nt, Artificial Sequence
  Description of Artificial Sequence: Synthetic oligonucleotide
ccuuuaaggaaaugaauccuccuga

SEQ ID NO: 30594 - RNA, 25 nt, Artificial Sequence
  Description of Artificial Sequence: Synthetic oligonucleotide
aaggauacaaaaagugacaucauau

SEQ ID NO: 30595 - RNA, 25 nt, Artificial Sequence
  Description of Artificial Sequence: Synthetic oligonucleotide
agaugcaauuugaaucuucaucaua

SEQ ID NO: 30596 - RNA, 25 nt, Artificial Sequence
  Description of Artificial Sequence: Synthetic oligonucleotide
guucaaaacgaagacuagcuauuaa

SEQ ID NO: 30597 - RNA, 25 nt, Artificial Sequence
  Description of Artificial Sequence: Synthetic oligonucleotide
gugaaaccucaucucuacuaaaaau

SEQ ID NO: 30598 - RNA, 25 nt, Artificial Sequence
  Description of Artificial Sequence: Synthetic oligonucleotide
acgaaagagaagcucuaucucgccu

SEQ ID NO: 30599 - RNA, 25 nt, Artificial Sequence
  Description of Artificial Sequence: Synthetic oligonucleotide
cuccacaagcgccuucgguccaguu

SEQ ID NO: 30600 - RNA, 25 nt, Artificial Sequence
  Description of Artificial Sequence: Synthetic oligonucleotide
gagaagauuccaaagauguagccgc

SEQ ID NO: 30601 - RNA, 25 nt, Artificial Sequence
  Description of Artificial Sequence: Synthetic oligonucleotide
aaucuggauucaaugaggagacuug

SEQ ID NO: 30602 - RNA, 25 nt, Artificial Sequence
  Description of Artificial Sequence: Synthetic oligonucleotide
agaacagauuugagaguagugagga

SEQ ID NO: 30603 - RNA, 25 nt, Artificial Sequence
  Description of Artificial Sequence: Synthetic oligonucleotide
ccagagcugugcagaugaguacaaa

SEQ ID NO: 30604 - RNA, 25 nt, Artificial Sequence
  Description of Artificial Sequence: Synthetic oligonucleotide
ccucagauuguuguuguuaaugggc

SEQ ID NO: 30605 - RNA, 25 nt, Artificial Sequence
  Description of Artificial Sequence: Synthetic oligonucleotide
cuauuuuaauuauuuuuaauuuauu

SEQ ID NO: 30606 - RNA, 25 nt, Artificial Sequence
  Description of Artificial Sequence: Synthetic oligonucleotide
uuuaauuuauuaauauuuaaauaug

SEQ ID NO: 30607 - RNA, 25 nt, Artificial Sequence
  Description of Artificial Sequence: Synthetic oligonucleotide
augcaguuugaauauccuuuguuuc

SEQ ID NO: 30608 - RNA, 25 nt, Artificial Sequence
  Description of Artificial Sequence: Synthetic oligonucleotide
caugcugcuggcgucuaaguguuug

SEQ ID NO: 30609 - RNA, 25 nt, Artificial Sequence
  Description of Artificial Sequence: Synthetic oligonucleotide
agaugugcauuucaccugugacaaa

SEQ ID NO: 30610 - RNA, 25 nt, Artificial Sequence
  Description of Artificial Sequence: Synthetic oligonucleotide
ucaaaaccugugccaggcugaauua

SEQ ID NO: 30611 - RNA, 25 nt, Artificial Sequence
  Description of Artificial Sequence: Synthetic oligonucleotide
gaauguggguagucauucuuacaau

SEQ ID NO: 30612 - RNA, 25 nt, Artificial Sequence
  Description of Artificial Sequence: Synthetic oligonucleotide
auguggguagucauucuuacaauug

SEQ ID NO: 30613 - RNA, 25 nt, Artificial Sequence
  Description of Artificial Sequence: Synthetic oligonucleotide
ugaaaaugagcaucagagaguguac

SEQ ID NO: 30614 - RNA, 25 nt, Artificial Sequence
  Description of Artificial Sequence: Synthetic oligonucleotide
uugcuuuucauguagaacucagcag

SEQ ID NO: 30615 - RNA, 25 nt, Artificial Sequence
  Description of Artificial Sequence: Synthetic oligonucleotide
uguauuucuauauuuauuuucagua

SEQ ID NO: 30616 - RNA, 25 nt, Artificial Sequence
  Description of Artificial Sequence: Synthetic oligonucleotide
uuugauuaauguuucuuaaauggaa

SEQ ID NO: 30617 - RNA, 25 nt, Artificial Sequence
  Description of Artificial Sequence: Synthetic oligonucleotide
caacguguauagugccuaaaauugu

SEQ ID NO: 30618 - RNA, 25 nt, Artificial Sequence
  Description of Artificial Sequence: Synthetic oligonucleotide
cauauccuuggcuacuaacaucugg

SEQ ID NO: 30619 - RNA, 25 nt, Artificial Sequence
  Description of Artificial Sequence: Synthetic oligonucleotide
uacuaacaucuggagacugugagcu

SEQ ID NO: 30620 - RNA, 25 nt, Artificial Sequence
  Description of Artificial Sequence: Synthetic oligonucleotide
cauaaguugugugcuuuuuauuaau

SEQ ID NO: 30621 - RNA, 25 nt, Artificial Sequence
  Description of Artificial Sequence: Synthetic oligonucleotide
gcaucauuuuggcucuucuuacauu

SEQ ID NO: 30622 - RNA, 25 nt, Artificial Sequence
  Description of Artificial Sequence: Synthetic oligonucleotide
gcucuucuuacauuuguaaaaaugu

SEQ ID NO: 30623 - RNA, 25 nt, Artificial Sequence
  Description of Artificial Sequence: Synthetic oligonucleotide
agauuaggucaucuuaauucauauu

SEQ ID NO: 30624 - RNA, 25 nt, Artificial Sequence
  Description of Artificial Sequence: Synthetic oligonucleotide
auggaauugaaagaacuaaucauga

SEQ ID NO: 30625 - RNA, 25 nt, Artificial Sequence
  Description of Artificial Sequence: Synthetic oligonucleotide
cacacucauuccuucugcucuuggg

SEQ ID NO: 30626 - RNA, 25 nt, Artificial Sequence
  Description of Artificial Sequence: Synthetic oligonucleotide
uguagagguaaccaguagcuuugag

SEQ ID NO: 30627 - RNA, 25 nt, Artificial Sequence
  Description of Artificial Sequence: Synthetic oligonucleotide
caaccacaugccacguaauauuuca

SEQ ID NO: 30628 - RNA, 25 nt, Artificial Sequence
  Description of Artificial Sequence: Synthetic oligonucleotide
ucggaaacaaguuauucucuucacu

SEQ ID NO: 30629 - RNA, 25 nt, Artificial Sequence
  Description of Artificial Sequence: Synthetic oligonucleotide
acucccaauaacuaaugcuaagaaa

SEQ ID NO: 30630 - RNA, 25 nt, Artificial Sequence
  Description of Artificial Sequence: Synthetic oligonucleotide
aaugcuaagaaaugcugaaaaucaa

SEQ ID NO: 30631 - RNA, 25 nt, Artificial Sequence
  Description of Artificial Sequence: Synthetic oligonucleotide
gucuuucucuaaauaugauuacuuu

SEQ ID NO: 30632 - RNA, 25 nt, Artificial Sequence
  Description of Artificial Sequence: Synthetic oligonucleotide
ugaauuucaggcauuuuguucuaca

SEQ ID NO: 30633 - RNA, 25 nt, Artificial Sequence
  Description of Artificial Sequence: Synthetic oligonucleotide
cgauucccucucacccgggacucuc

SEQ ID NO: 30634 - RNA, 25 nt, Artificial Sequence
  Description of Artificial Sequence: Synthetic oligonucleotide
aggaaagugaaccuuuaaaguaaag

SEQ ID NO: 30635 - RNA, 25 nt, Artificial Sequence
  Description of Artificial Sequence: Synthetic oligonucleotide
gaggcugcaugcucuggaagccugg

SEQ ID NO: 30636 - RNA, 25 nt, Artificial Sequence
  Description of Artificial Sequence: Synthetic oligonucleotide
ucucugaacagaaaacaaaagagag

SEQ ID NO: 30637 - RNA, 25 nt, Artificial Sequence
  Description of Artificial Sequence: Synthetic oligonucleotide
aacuuggcuguaaucaguuaugccg

SEQ ID NO: 30638 - RNA, 25 nt, Artificial Sequence
  Description of Artificial Sequence: Synthetic oligonucleotide
agaagccaaaauuaaaagaagucca

SEQ ID NO: 30639 - RNA, 25 nt, Artificial Sequence
  Description of Artificial Sequence: Synthetic oligonucleotide
auuaaaagaaguccaggugagguua

SEQ ID NO: 30640 - RNA, 25 nt, Artificial Sequence
  Description of Artificial Sequence: Synthetic oligonucleotide
gaauccggauuaucgggaagaggac

SEQ ID NO: 30641 - RNA, 25 nt, Artificial Sequence
  Description of Artificial Sequence: Synthetic oligonucleotide
aaugugacaucaaagcaaguauugu

SEQ ID NO: 30642 - RNA, 25 nt, Artificial Sequence
  Description of Artificial Sequence: Synthetic oligonucleotide
caucaaagcaaguauuguagcacuc

SEQ ID NO: 30643 - RNA, 25 nt, Artificial Sequence
  Description of Artificial Sequence: Synthetic oligonucleotide
agagagagaaaacaaaaccacaaau

SEQ ID NO: 30644 - RNA, 25 nt, Artificial Sequence
  Description of Artificial Sequence: Synthetic oligonucleotide
ucgcuguaguauuuaagcccauaca

SEQ ID NO: 30645 - RNA, 25 nt, Artificial Sequence
  Description of Artificial Sequence: Synthetic oligonucleotide
cgcuguaguauuuaagcccauacag

SEQ ID NO: 30646 - RNA, 25 nt, Artificial Sequence
  Description of Artificial Sequence: Synthetic oligonucleotide
auuuaagcccauacagaaaccuucc

SEQ ID NO: 30647 - RNA, 25 nt, Artificial Sequence
  Description of Artificial Sequence: Synthetic oligonucleotide
auuaaaauaaacaugguauaccuac

SEQ ID NO: 30648 - RNA, 25 nt, Artificial Sequence
  Description of Artificial Sequence: Synthetic oligonucleotide
cuguucugaucggccaguuuucgga

SEQ ID NO: 30649 - RNA, 25 nt, Artificial Sequence
  Description of Artificial Sequence: Synthetic oligonucleotide
aaauaauuugaacuuuggaacaggg

SEQ ID NO: 30650 - RNA, 25 nt, Artificial Sequence
  Description of Artificial Sequence: Synthetic oligonucleotide
ugcgaccuuaauuuaacuuuccagu

SEQ ID NO: 30651 - RNA, 25 nt, Artificial Sequence
  Description of Artificial Sequence: Synthetic oligonucleotide
cugagaaagcuaaaguuugguuuug

SEQ ID NO: 30652 - RNA, 25 nt, Artificial Sequence
  Description of Artificial Sequence: Synthetic oligonucleotide
aguaaagaugcuacuucccacugua

SEQ ID NO: 30653 - RNA, 25 nt, Artificial Sequence
  Description of Artificial Sequence: Synthetic oligonucleotide
cugcuuaauugcugauaccauauga

SEQ ID NO: 30654 - RNA, 25 nt, Artificial Sequence
  Description of Artificial Sequence: Synthetic oligonucleotide
uaccauaugaaugaaacaugggcug

SEQ ID NO: 30655 - RNA, 25 nt, Artificial Sequence
  Description of Artificial Sequence: Synthetic oligonucleotide
aacuuucuuauccaacuuuuucaua

SEQ ID NO: 30656 - RNA, 25 nt, Artificial Sequence
  Description of Artificial Sequence: Synthetic oligonucleotide
ccuugcaugacaucaugaggccgga

SEQ ID NO: 30657 - RNA, 25 nt, Artificial Sequence
  Description of Artificial Sequence: Synthetic oligonucleotide
ugaauuuguauaugacugcauuugu

SEQ ID NO: 30658 - RNA, 25 nt, Artificial Sequence
  Description of Artificial Sequence: Synthetic oligonucleotide
gaauccuaguagaauguuuacuacc

SEQ ID NO: 30659 - RNA, 25 nt, Artificial Sequence
  Description of Artificial Sequence: Synthetic oligonucleotide
gaaagggaagaauuuuuugaugaaa

SEQ ID NO: 30660 - RNA, 25 nt, Artificial Sequence
  Description of Artificial Sequence: Synthetic oligonucleotide
uaucggcaugccagugugugaauuu

SEQ ID NO: 30661 - RNA, 25 nt, Artificial Sequence
  Description of Artificial Sequence: Synthetic oligonucleotide
caccucauaguagagcaauguaugu

SEQ ID NO: 30662 - RNA, 25 nt, Artificial Sequence
  Description of Artificial Sequence: Synthetic oligonucleotide
ccagaauugccaaagcacauauaua

SEQ ID NO: 30663 - RNA, 25 nt, Artificial Sequence
  Description of Artificial Sequence: Synthetic oligonucleotide
uggugaucuggguaauaguuucucc

SEQ ID NO: 30664 - RNA, 25 nt, Artificial Sequence
  Description of Artificial Sequence: Synthetic oligonucleotide
gaucuggguaauaguuucuccaaau

SEQ ID NO: 30665 - RNA, 25 nt, Artificial Sequence
  Description of Artificial Sequence: Synthetic oligonucleotide
ggaugugaugaauacuuccuagaaa

SEQ ID NO: 30666 - RNA, 25 nt, Artificial Sequence
  Description of Artificial Sequence: Synthetic oligonucleotide
cauuuccacagcuacaccauauaug

SEQ ID NO: 30667 - RNA, 25 nt, Artificial Sequence
  Description of Artificial Sequence: Synthetic oligonucleotide
acagcuacaccauauaugaauggag

SEQ ID NO: 30668 - RNA, 25 nt, Artificial Sequence
  Description of Artificial Sequence: Synthetic oligonucleotide
ugcaguucuuacacgagaagaagau

SEQ ID NO: 30669 - RNA, 25 nt, Artificial Sequence
  Description of Artificial Sequence: Synthetic oligonucleotide
acgagaagaagaucauuuacaggga

SEQ ID NO: 30670 - RNA, 25 nt, Artificial Sequence
  Description of Artificial Sequence: Synthetic oligonucleotide
cgagaagaagaucauuuacagggac

SEQ ID NO: 30671 - RNA, 25 nt, Artificial Sequence
  Description of Artificial Sequence: Synthetic oligonucleotide
aagaagaucauuuacagggaccuga

SEQ ID NO: 30672 - RNA, 25 nt, Artificial Sequence
  Description of Artificial Sequence: Synthetic oligonucleotide
agaggaagagguguuugacugcauc

SEQ ID NO: 30673 - RNA, 25 nt, Artificial Sequence
  Description of Artificial Sequence: Synthetic oligonucleotide
gaggaagagguguuugacugcaucg

SEQ ID NO: 30674 - RNA, 25 nt, Artificial Sequence
  Description of Artificial Sequence: Synthetic oligonucleotide
cuacuuugagggcgaguucacaggg

SEQ ID NO: 30675 - RNA, 25 nt, Artificial Sequence
  Description of Artificial Sequence: Synthetic oligonucleotide
agggcaucuccuggcaccucugucc

SEQ ID NO: 30676 - RNA, 25 nt, Artificial Sequence
  Description of Artificial Sequence: Synthetic oligonucleotide
ggagugauaugguuugucuuuuuaa

SEQ ID NO: 30677 - RNA, 25 nt, Artificial Sequence
  Description of Artificial Sequence: Synthetic oligonucleotide
gagugauaugguuugucuuuuuaag

SEQ ID NO: 30678 - RNA, 25 nt, Artificial Sequence
  Description of Artificial Sequence: Synthetic oligonucleotide
ugcaguaaagauccuaaagguuguc

SEQ ID NO: 30679 - RNA, 25 nt, Artificial Sequence
  Description of Artificial Sequence: Synthetic oligonucleotide
aguaaagauccuaaagguugucgac

SEQ ID NO: 30680 - RNA, 25 nt, Artificial Sequence
  Description of Artificial Sequence: Synthetic oligonucleotide
ugacaaaggacaaccuggcaauugu

SEQ ID NO: 30681 - RNA, 25 nt, Artificial Sequence
  Description of Artificial Sequence: Synthetic oligonucleotide
gcaauugugacccaguggugcgagg

SEQ ID NO: 30682 - RNA, 25 nt, Artificial Sequence
  Description of Artificial Sequence: Synthetic oligonucleotide
aacaucauccauagagacaugaaau

SEQ ID NO: 30683 - RNA, 25 nt, Artificial Sequence
  Description of Artificial Sequence: Synthetic oligonucleotide
ugaaauccaacaauauauuucucca

SEQ ID NO: 30684 - RNA, 25 nt, Artificial Sequence
  Description of Artificial Sequence: Synthetic oligonucleotide
aacaauauauuucuccaugaaggcu

SEQ ID NO: 30685 - RNA, 25 nt, Artificial Sequence
  Description of Artificial Sequence: Synthetic oligonucleotide
aacaguaaagucacgcuggaguggu

SEQ ID NO: 30686 - RNA, 25 nt, Artificial Sequence
  Description of Artificial Sequence: Synthetic oligonucleotide
ugugaagaaaguaaaggaagagagg

SEQ ID NO: 30687 - RNA, 25 nt, Artificial Sequence
  Description of Artificial Sequence: Synthetic oligonucleotide
cuuccgagccauccuugcaucgggc

SEQ ID NO: 30688 - RNA, 25 nt, Artificial Sequence
  Description of Artificial Sequence: Synthetic oligonucleotide
aauggagguugaauauccuacugug

SEQ ID NO: 30689 - RNA, 25 nt, Artificial Sequence
  Description of Artificial Sequence: Synthetic oligonucleotide
ggagguugaauauccuacuguguaa

SEQ ID NO: 30690 - RNA, 25 nt, Artificial Sequence
  Description of Artificial Sequence: Synthetic oligonucleotide
auuuugaguuuucccuuguagugua

SEQ ID NO: 30691 - RNA, 25 nt, Artificial Sequence
  Description of Artificial Sequence: Synthetic oligonucleotide
uauccuguuuguucuuuguugauug

SEQ ID NO: 30692 - RNA, 25 nt, Artificial Sequence
  Description of Artificial Sequence: Synthetic oligonucleotide
ccuguuuguucuuuguugauugaaa

SEQ ID NO: 30693 - RNA, 25 nt, Artificial Sequence
  Description of Artificial Sequence: Synthetic oligonucleotide
cucuacagccuucuuuuucuuccau

SEQ ID NO: 30694 - RNA, 25 nt, Artificial Sequence
  Description of Artificial Sequence: Synthetic oligonucleotide
ucuuccauagcuaaucuuccuucua

SEQ ID NO: 30695 - RNA, 25 nt, Artificial Sequence
  Description of Artificial Sequence: Synthetic oligonucleotide
auaaucuuccuguugaaugcuucau

SEQ ID NO: 30696 - RNA, 25 nt, Artificial Sequence
  Description of Artificial Sequence: Synthetic oligonucleotide
uaaucuuccuguugaaugcuucaug

SEQ ID NO: 30697 - RNA, 25 nt, Artificial Sequence
  Description of Artificial Sequence: Synthetic oligonucleotide
cuucaugacuugaauucuacuuuga

SEQ ID NO: 30698 - RNA, 25 nt, Artificial Sequence
  Description of Artificial Sequence: Synthetic oligonucleotide
aagagggagagaagcaacuacagac

SEQ ID NO: 30699 - RNA, 25 nt, Artificial Sequence
  Description of Artificial Sequence: Synthetic oligonucleotide
cgucuccuaccagaccaaggucaac

SEQ ID NO: 30700 - RNA, 25 nt, Artificial Sequence
  Description of Artificial Sequence: Synthetic oligonucleotide
gaucaaucggcccgacuaucucgac

SEQ ID NO: 30701 - RNA, 25 nt, Artificial Sequence
  Description of Artificial Sequence: Synthetic oligonucleotide
ggacgaacauccaaccuucccaaac

SEQ ID NO: 30702 - RNA, 25 nt, Artificial Sequence
  Description of Artificial Sequence: Synthetic oligonucleotide
agggucggaacccaagcuuagaacu

SEQ ID NO: 30703 - RNA, 25 nt, Artificial Sequence
  Description of Artificial Sequence: Synthetic oligonucleotide
ucggaacccaagcuuagaacuuuaa

SEQ ID NO: 30704 - RNA, 25 nt, Artificial Sequence
  Description of Artificial Sequence: Synthetic oligonucleotide
acccaagcuuagaacuuuaagcaac

SEQ ID NO: 30705 - RNA, 25 nt, Artificial Sequence
  Description of Artificial Sequence: Synthetic oligonucleotide
gaacuuuaagcaacaagaccaccac

SEQ ID NO: 30706 - RNA, 25 nt, Artificial Sequence
  Description of Artificial Sequence: Synthetic oligonucleotide
acuauucaguggcgagaaauaaagu

SEQ ID NO: 30707 - RNA, 25 nt, Artificial Sequence
  Description of Artificial Sequence: Synthetic oligonucleotide
cuauucaguggcgagaaauaaaguu

SEQ ID NO: 30708 - RNA, 25 nt, Artificial Sequence
  Description of Artificial Sequence: Synthetic oligonucleotide
aaacacagauaacaggaaaugaucc

SEQ ID NO: 30709 - RNA, 25 nt, Artificial Sequence
  Description of Artificial Sequence: Synthetic oligonucleotide
cuuaagaaaagagaagaaaugaaac

SEQ ID NO: 30710 - RNA, 25 nt, Artificial Sequence
  Description of Artificial Sequence: Synthetic oligonucleotide
cugaaggaguguguuuccauccucc

SEQ ID NO: 30711 - RNA, 25 nt, Artificial Sequence
  Description of Artificial Sequence: Synthetic oligonucleotide
ucaccgcgggacugaaaaucuuuga

SEQ ID NO: 30712 - RNA, 25 nt, Artificial Sequence
  Description of Artificial Sequence: Synthetic oligonucleotide
agcagaaauaagcgugccguucagg

SEQ ID NO: 30713 - RNA, 25 nt, Artificial Sequence
  Description of Artificial Sequence: Synthetic oligonucleotide
aagcgugccguucaggguccagaag

SEQ ID NO: 30714 - RNA, 25 nt, Artificial Sequence
  Description of Artificial Sequence: Synthetic oligonucleotide
agaaacagucacucaagacugcuug

SEQ ID NO: 30715 - RNA, 25 nt, Artificial Sequence
  Description of Artificial Sequence: Synthetic oligonucleotide
agaggaagaagguccaugucuuugg

SEQ ID NO: 30716 - RNA, 25 nt, Artificial Sequence
  Description of Artificial Sequence: Synthetic oligonucleotide
uguauucaaaauaugccugaaacac

SEQ ID NO: 30717 - RNA, 25 nt, Artificial Sequence
  Description of Artificial Sequence: Synthetic oligonucleotide
auuuuccucccuuucucuguaccuc

SEQ ID NO: 30718 - RNA, 25 nt, Artificial Sequence
  Description of Artificial Sequence: Synthetic oligonucleotide
caaagaaagauagagcaagacaaga

SEQ ID NO: 30719 - RNA, 25 nt, Artificial Sequence
  Description of Artificial Sequence: Synthetic oligonucleotide
aagaaagauagagcaagacaagaaa

SEQ ID NO: 30720 - RNA, 25 nt, Artificial Sequence
  Description of Artificial Sequence: Synthetic oligonucleotide
gaaagcauuuguuuguacaagaucc

SEQ ID NO: 30721 - RNA, 25 nt, Artificial Sequence
  Description of Artificial Sequence: Synthetic oligonucleotide
ugaguuaaacgaacguacuugcaga

SEQ ID NO: 30722 - RNA, 25 nt, Artificial Sequence
  Description of Artificial Sequence: Synthetic oligonucleotide
acugauacagaacgaucgauacaga

SEQ ID NO: 30723 - RNA, 25 nt, Artificial Sequence
  Description of Artificial Sequence: Synthetic oligonucleotide
auauuauauauauauaaaaauaaau

SEQ ID NO: 30724 - RNA, 25 nt, Artificial Sequence
  Description of Artificial Sequence: Synthetic oligonucleotide
auuauauauauauaaaaauaaauau

SEQ ID NO: 30725 - RNA, 25 nt, Artificial Sequence
  Description of Artificial Sequence: Synthetic oligonucleotide
ucacuggauguauuugacugcugug

SEQ ID NO: 30726 - RNA, 25 nt, Artificial Sequence
  Description of Artificial Sequence: Synthetic oligonucleotide
cagggaagaggaggagaugagagac

SEQ ID NO: 30727 - RNA, 25 nt, Artificial Sequence
  Description of Artificial Sequence: Synthetic oligonucleotide
augaucuuuuuuuugucccacuugg

SEQ ID NO: 30728 - RNA, 27 nt, Artificial Sequence
  Description of Artificial Sequence: Synthetic oligonucleotide
ggccgugaacuccucaucaaaauaccu

SEQ ID NO: 30729 - RNA, 27 nt, Artificial Sequence
  Description of Artificial Sequence: Synthetic oligonucleotide
uggugugauggugaucaucugggccgu

SEQ ID NO: 30730 - RNA, 27 nt, Artificial Sequence
  Description of Artificial Sequence: Synthetic oligonucleotide
aaacccgcaggauaguuuucuucccua

SEQ ID NO: 30731 - RNA, 27 nt, Artificial Sequence
  Description of Artificial Sequence: Synthetic oligonucleotide
caaacuggaugaaauaaauuaaaaccc

SEQ ID NO: 30732 - RNA, 27 nt, Artificial Sequence
  Description of Artificial Sequence: Synthetic oligonucleotide
agaaguccuuaacauuucccuacguga

SEQ ID NO: 30733 - RNA, 27 nt, Artificial Sequence
  Description of Artificial Sequence: Synthetic oligonucleotide
cucugucccacuggguaaacccuggcc

SEQ ID NO: 30734 - RNA, 27 nt, Artificial Sequence
  Description of Artificial Sequence: Synthetic oligonucleotide
cacaauaacaaauuuaaaccuugcucc

SEQ ID NO: 30735 - RNA, 27 nt, Artificial Sequence
  Description of Artificial Sequence: Synthetic oligonucleotide
aaaugcauuugaacaacauaauacaca

SEQ ID NO: 30736 - RNA, 27 nt, Artificial Sequence
  Description of Artificial Sequence: Synthetic oligonucleotide
ggcuuuccugucacaaagauuaaaaac

SEQ ID NO: 30737 - RNA, 27 nt, Artificial Sequence
  Description of Artificial Sequence: Synthetic oligonucleotide
agggcuuuccugucacaaagauuaaaa

SEQ ID NO: 30738 - RNA, 27 nt, Artificial Sequence
  Description of Artificial Sequence: Synthetic oligonucleotide
ggccaugcugggagacauaagcagcag

SEQ ID NO: 30739 - RNA, 27 nt, Artificial Sequence
  Description of Artificial Sequence: Synthetic oligonucleotide
ucagggagaagcuucugaaacacuucu

SEQ ID NO: 30740 - RNA, 27 nt, Artificial Sequence
  Description of Artificial Sequence: Synthetic oligonucleotide
aagggcuucuuccuuauugauggucag

SEQ ID NO: 30741 - RNA, 27 nt, Artificial Sequence
  Description of Artificial Sequence: Synthetic oligonucleotide
ugaagggcuucuuccuuauugaugguc

SEQ ID NO: 30742 - RNA, 27 nt, Artificial Sequence
  Description of Artificial Sequence: Synthetic oligonucleotide
cgcugaagggcuucuuccuuauugaug

SEQ ID NO: 30743 - RNA, 27 nt, Artificial Sequence
  Description of Artificial Sequence: Synthetic oligonucleotide
gccgcugaagggcuucuuccuuauuga

SEQ ID NO: 30744 - RNA, 27 nt, Artificial Sequence
  Description of Artificial Sequence: Synthetic oligonucleotide
acuggccgcugaagggcuucuuccuua

SEQ ID NO: 30745 - RNA, 27 nt, Artificial Sequence
  Description of Artificial Sequence: Synthetic oligonucleotide
cggagcuuuucaccuuuaguuaugcuu

SEQ ID NO: 30746 - RNA, 27 nt, Artificial Sequence
  Description of Artificial Sequence: Synthetic oligonucleotide
ccggagcuuuucaccuuuaguuaugcu

SEQ ID NO: 30747 - RNA, 27 nt, Artificial Sequence
  Description of Artificial Sequence: Synthetic oligonucleotide
cagacuguugacuggcgugauguaguu

SEQ ID NO: 30748 - RNA, 27 nt, Artificial Sequence
  Description of Artificial Sequence: Synthetic oligonucleotide
cuuuugaacucugcuuaaauccagugg

SEQ ID NO: 30749 - RNA, 27 nt, Artificial Sequence
  Description of Artificial Sequence: Synthetic oligonucleotide
gcuuuugaacucugcuuaaauccagug

SEQ ID NO: 30750 - RNA, 27 nt, Artificial Sequence
  Description of Artificial Sequence: Synthetic oligonucleotide
agggcuuuugaacucugcuuaaaucca

SEQ ID NO: 30751 - RNA, 27 nt, Artificial Sequence
  Description of Artificial Sequence: Synthetic oligonucleotide
aagggcuuuugaacucugcuuaaaucc

SEQ ID NO: 30752 - RNA, 27 nt, Artificial Sequence
  Description of Artificial Sequence: Synthetic oligonucleotide
ugaagggcuuuugaacucugcuuaaau

SEQ ID NO: 30753 - RNA, 27 nt, Artificial Sequence
  Description of Artificial Sequence: Synthetic oligonucleotide
cugaagggcuuuugaacucugcuuaaa

SEQ ID NO: 30754 - RNA, 27 nt, Artificial Sequence
  Description of Artificial Sequence: Synthetic oligonucleotide
cgcugaagggcuuuugaacucugcuua

SEQ ID NO: 30755 - RNA, 27 nt, Artificial Sequence
  Description of Artificial Sequence: Synthetic oligonucleotide
cgagcggcuucacucagacccugaggc

SEQ ID NO: 30756 - RNA, 27 nt, Artificial Sequence
  Description of Artificial Sequence: Synthetic oligonucleotide
uugacuggcgugauguaguugcuuggg

SEQ ID NO: 30757 - RNA, 27 nt, Artificial Sequence
  Description of Artificial Sequence: Synthetic oligonucleotide
cacgcaccaagaagcugccauugaucc

SEQ ID NO: 30758 - RNA, 27 nt, Artificial Sequence
  Description of Artificial Sequence: Synthetic oligonucleotide
cugaugaauccaaugugggcuggaauc

SEQ ID NO: 30759 - RNA, 27 nt, Artificial Sequence
  Description of Artificial Sequence: Synthetic oligonucleotide
cuuagguauuccacauucucagcugug

SEQ ID NO: 30760 - RNA, 27 nt, Artificial Sequence
  Description of Artificial Sequence: Synthetic oligonucleotide
ugagccucaaauuaggagauacguuuu

SEQ ID NO: 30761 - RNA, 27 nt, Artificial Sequence
  Description of Artificial Sequence: Synthetic oligonucleotide
ccaauuguagagaaauuauuuuaggaa

SEQ ID NO: 30762 - RNA, 27 nt, Artificial Sequence
  Description of Artificial Sequence: Synthetic oligonucleotide
ggcuccuaacuagcugaaucuuccaau

SEQ ID NO: 30763 - RNA, 27 nt, Artificial Sequence
  Description of Artificial Sequence: Synthetic oligonucleotide
guggauauugacuaggagaguuuaaaa

SEQ ID NO: 30764 - RNA, 27 nt, Artificial Sequence
  Description of Artificial Sequence: Synthetic oligonucleotide
ugugacugaacauaacuguaggcugaa

SEQ ID NO: 30765 - RNA, 27 nt, Artificial Sequence
  Description of Artificial Sequence: Synthetic oligonucleotide
guaugugugugugacugaacauaacug

SEQ ID NO: 30766 - RNA, 27 nt, Artificial Sequence
  Description of Artificial Sequence: Synthetic oligonucleotide
aagcaaaaggaacauuuuguaugugug

SEQ ID NO: 30767 - RNA, 27 nt, Artificial Sequence
  Description of Artificial Sequence: Synthetic oligonucleotide
aaaaauuacuuuaaaagcaaaaggaac

SEQ ID NO: 30768 - RNA, 27 nt, Artificial Sequence
  Description of Artificial Sequence: Synthetic oligonucleotide
ccauugacuguugcuucacaggucaga

SEQ ID NO: 30769 - RNA, 27 nt, Artificial Sequence
  Description of Artificial Sequence: Synthetic oligonucleotide
auugguuugucgaugugugagauaguu

SEQ ID NO: 30770 - RNA, 27 nt, Artificial Sequence
  Description of Artificial Sequence: Synthetic oligonucleotide
agugguagcaguacaauugaggacaag

SEQ ID NO: 30771 - RNA, 27 nt, Artificial Sequence
  Description of Artificial Sequence: Synthetic oligonucleotide
uaagaccgcuugccagcuacgguuuca

SEQ ID NO: 30772 - RNA, 27 nt, Artificial Sequence
  Description of Artificial Sequence: Synthetic oligonucleotide
agccgguaagaccgcuugccagcuacg

SEQ ID NO: 30773 - RNA, 27 nt, Artificial Sequence
  Description of Artificial Sequence: Synthetic oligonucleotide
gguaacccaucuuuuaaccauacaacu

SEQ ID NO: 30774 - RNA, 27 nt, Artificial Sequence
  Description of Artificial Sequence: Synthetic oligonucleotide
ucgcagguaacccaucuuuuaaccaua

SEQ ID NO: 30775 - RNA, 27 nt, Artificial Sequence
  Description of Artificial Sequence: Synthetic oligonucleotide
cucagcaagauuguauaauucccugca

SEQ ID NO: 30776 - RNA, 27 nt, Artificial Sequence
  Description of Artificial Sequence: Synthetic oligonucleotide
acuguuuuaugcucagcaagauuguau

SEQ ID NO: 30777 - RNA, 27 nt, Artificial Sequence
  Description of Artificial Sequence: Synthetic oligonucleotide
aggauaaaggacucuucauuauuggaa

SEQ ID NO: 30778 - RNA, 27 nt, Artificial Sequence
  Description of Artificial Sequence: Synthetic oligonucleotide
caacuugcguuggaacauccaaagugu

SEQ ID NO: 30779 - RNA, 27 nt, Artificial Sequence
  Description of Artificial Sequence: Synthetic oligonucleotide
augguuucaguuuaguggaagcauuua

SEQ ID NO: 30780 - RNA, 27 nt, Artificial Sequence
  Description of Artificial Sequence: Synthetic oligonucleotide
auauuuaacaaagucaaacuuucucac

SEQ ID NO: 30781 - RNA, 27 nt, Artificial Sequence
  Description of Artificial Sequence: Synthetic oligonucleotide
aacuuuuaauauacaguaguucuuuuc

SEQ ID NO: 30782 - RNA, 27 nt, Artificial Sequence
  Description of Artificial Sequence: Synthetic oligonucleotide
guuaagucaaaacccguauuucuaaag

SEQ ID NO: 30783 - RNA, 27 nt, Artificial Sequence
  Description of Artificial Sequence: Synthetic oligonucleotide
gugcugaguuugcuguacccauguuga

SEQ ID NO: 30784 - RNA, 27 nt, Artificial Sequence
  Description of Artificial Sequence: Synthetic oligonucleotide
ugaggucagcaucuucugugucuuuac

SEQ ID NO: 30785 - RNA, 27 nt, Artificial Sequence
  Description of Artificial Sequence: Synthetic oligonucleotide
gcgaucugaauaaaccucccuacuagc

SEQ ID NO: 30786 - RNA, 27 nt, Artificial Sequence
  Description of Artificial Sequence: Synthetic oligonucleotide
aucccagaacccugcugcagaaggcca

SEQ ID NO: 30787 - RNA, 27 nt, Artificial Sequence
  Description of Artificial Sequence: Synthetic oligonucleotide
cauaauuuccaauauguaccagaccuu

SEQ ID NO: 30788 - RNA, 27 nt, Artificial Sequence
  Description of Artificial Sequence: Synthetic oligonucleotide
cuagugcuuccaucggaaggacuaggu

SEQ ID NO: 30789 - RNA, 27 nt, Artificial Sequence
  Description of Artificial Sequence: Synthetic oligonucleotide
uccacauaaaaacaauauucacuggga

SEQ ID NO: 30790 - RNA, 27 nt, Artificial Sequence
  Description of Artificial Sequence: Synthetic oligonucleotide
ucuaccaauuccaacuugaauucauug

SEQ ID NO: 30791 - RNA, 27 nt, Artificial Sequence
  Description of Artificial Sequence: Synthetic oligonucleotide
ucuccaagucuaaaucuguguccugag

SEQ ID NO: 30792 - RNA, 27 nt, Artificial Sequence
  Description of Artificial Sequence: Synthetic oligonucleotide
uggaauacuguaacugugcuuugagga

SEQ ID NO: 30793 - RNA, 27 nt, Artificial Sequence
  Description of Artificial Sequence: Synthetic oligonucleotide
uuaauucaucagugguggcagugguag

SEQ ID NO: 30794 - RNA, 27 nt, Artificial Sequence
  Description of Artificial Sequence: Synthetic oligonucleotide
gugaugauguggcacuaguaguuucuu

SEQ ID NO: 30795 - RNA, 27 nt, Artificial Sequence
  Description of Artificial Sequence: Synthetic oligonucleotide
ucuguuuggugaggcuguccgacuuug

SEQ ID NO: 30796 - RNA, 27 nt, Artificial Sequence
  Description of Artificial Sequence: Synthetic oligonucleotide
ccaucauguuccauuuuucgcuuucuc

SEQ ID NO: 30797 - RNA, 27 nt, Artificial Sequence
  Description of Artificial Sequence: Synthetic oligonucleotide
gcagucuacaugcuaaaucagagggua

SEQ ID NO: 30798 - RNA, 27 nt, Artificial Sequence
  Description of Artificial Sequence: Synthetic oligonucleotide
cauaaauagauccuuaaauagcucaaa

SEQ ID NO: 30799 - RNA, 27 nt, Artificial Sequence
  Description of Artificial Sequence: Synthetic oligonucleotide
ugauaauagugcuuuuucaccuuuuuc

SEQ ID NO: 30800 - RNA, 27 nt, Artificial Sequence
  Description of Artificial Sequence: Synthetic oligonucleotide
gcagaacugauaauagugcuuuuucac

SEQ ID NO: 30801 - RNA, 27 nt, Artificial Sequence
  Description of Artificial Sequence: Synthetic oligonucleotide
guagguuuaaucuuucuuuucagccau

SEQ ID NO: 30802 - RNA, 27 nt, Artificial Sequence
  Description of Artificial Sequence: Synthetic oligonucleotide
agaaggauuuuauuauaaggguuuaau

SEQ ID NO: 30803 - RNA, 27 nt, Artificial Sequence
  Description of Artificial Sequence: Synthetic oligonucleotide
gucuacagcauuggcuaauaguaugaa

SEQ ID NO: 30804 - RNA, 27 nt, Artificial Sequence
  Description of Artificial Sequence: Synthetic oligonucleotide
cuauuccuaucaaaaugcuucugucua

SEQ ID NO: 30805 - RNA, 27 nt, Artificial Sequence
  Description of Artificial Sequence: Synthetic oligonucleotide
ucagggccauuaucuuauuugcucuau

SEQ ID NO: 30806 - RNA, 27 nt, Artificial Sequence
  Description of Artificial Sequence: Synthetic oligonucleotide
ugcuugaggaagagaaaaauguugguc

SEQ ID NO: 30807 - RNA, 27 nt, Artificial Sequence
  Description of Artificial Sequence: Synthetic oligonucleotide
ugggcugaacuuuucucauacuuaaag

SEQ ID NO: 30808 - RNA, 27 nt, Artificial Sequence
  Description of Artificial Sequence: Synthetic oligonucleotide
gguucagcagccaucuuuauuccugcg

SEQ ID NO: 30809 - RNA, 27 nt, Artificial Sequence
  Description of Artificial Sequence: Synthetic oligonucleotide
ugaagagaacuuggucauucaaauuuc

SEQ ID NO: 30810 - RNA, 27 nt, Artificial Sequence
  Description of Artificial Sequence: Synthetic oligonucleotide
cucuaggcuggcuaucuuuauacauac

SEQ ID NO: 30811 - RNA, 27 nt, Artificial Sequence
  Description of Artificial Sequence: Synthetic oligonucleotide
acacuucacagagauaguuacagccau

SEQ ID NO: 30812 - RNA, 27 nt, Artificial Sequence
  Description of Artificial Sequence: Synthetic oligonucleotide
uugaaauuuucucacacuucacagaga

SEQ ID NO: 30813 - RNA, 27 nt, Artificial Sequence
  Description of Artificial Sequence: Synthetic oligonucleotide
ucaggaggauucauuuccuuaaaggaa

SEQ ID NO: 30814 - RNA, 27 nt, Artificial Sequence
  Description of Artificial Sequence: Synthetic oligonucleotide
auaugaugucacuuuuuguauccuuga

SEQ ID NO: 30815 - RNA, 27 nt, Artificial Sequence
  Description of Artificial Sequence: Synthetic oligonucleotide
uaugaugaagauucaaauugcaucuua

SEQ ID NO: 30816 - RNA, 27 nt, Artificial Sequence
  Description of Artificial Sequence: Synthetic oligonucleotide
uuaauagcuagucuucguuuugaacag

SEQ ID NO: 30817 - RNA, 27 nt, Artificial Sequence
  Description of Artificial Sequence: Synthetic oligonucleotide
auuuuuaguagagaugagguuucacca

SEQ ID NO: 30818 - RNA, 27 nt, Artificial Sequence
  Description of Artificial Sequence: Synthetic oligonucleotide
aggcgagauagagcuucucuuucguuc

SEQ ID NO: 30819 - RNA, 27 nt, Artificial Sequence
  Description of Artificial Sequence: Synthetic oligonucleotide
aacuggaccgaaggcgcuuguggagaa

SEQ ID NO: 30820 - RNA, 27 nt, Artificial Sequence
  Description of Artificial Sequence: Synthetic oligonucleotide
gcggcuacaucuuuggaaucuucuccu

SEQ ID NO: 30821 - RNA, 27 nt, Artificial Sequence
  Description of Artificial Sequence: Synthetic oligonucleotide
caagucuccucauugaauccagauugg

SEQ ID NO: 30822 - RNA, 27 nt, Artificial Sequence
  Description of Artificial Sequence: Synthetic oligonucleotide
uccucacuacucucaaaucuguucugg

SEQ ID NO: 30823 - RNA, 27 nt, Artificial Sequence
  Description of Artificial Sequence: Synthetic oligonucleotide
uuuguacucaucugcacagcucuggcu

SEQ ID NO: 30824 - RNA, 27 nt, Artificial Sequence
  Description of Artificial Sequence: Synthetic oligonucleotide
gcccauuaacaacaacaaucugaggug

SEQ ID NO: 30825 - RNA, 27 nt, Artificial Sequence
  Description of Artificial Sequence: Synthetic oligonucleotide
aauaaauuaaaaauaauuaaaauagug

SEQ ID NO: 30826 - RNA, 27 nt, Artificial Sequence
  Description of Artificial Sequence: Synthetic oligonucleotide
cauauuuaaauauuaauaaauuaaaaa

SEQ ID NO: 30827 - RNA, 27 nt, Artificial Sequence
  Description of Artificial Sequence: Synthetic oligonucleotide
gaaacaaaggauauucaaacugcauag

SEQ ID NO: 30828 - RNA, 27 nt, Artificial Sequence
  Description of Artificial Sequence: Synthetic oligonucleotide
caaacacuuagacgccagcagcauggg

SEQ ID NO: 30829 - RNA, 27 nt, Artificial Sequence
  Description of Artificial Sequence: Synthetic oligonucleotide
uuugucacaggugaaaugcacaucuga

SEQ ID NO: 30830 - RNA, 27 nt, Artificial Sequence
  Description of Artificial Sequence: Synthetic oligonucleotide
uaauucagccuggcacagguuuugauc

SEQ ID NO: 30831 - RNA, 27 nt, Artificial Sequence
  Description of Artificial Sequence: Synthetic oligonucleotide
auuguaagaaugacuacccacauucac

SEQ ID NO: 30832 - RNA, 27 nt, Artificial Sequence
  Description of Artificial Sequence: Synthetic oligonucleotide
caauuguaagaaugacuacccacauuc

SEQ ID NO: 30833 - RNA, 27 nt, Artificial Sequence
  Description of Artificial Sequence: Synthetic oligonucleotide
guacacucucugaugcucauuuucaua

SEQ ID NO: 30834 - RNA, 27 nt, Artificial Sequence
  Description of Artificial Sequence: Synthetic oligonucleotide
cugcugaguucuacaugaaaagcaaau

SEQ ID NO: 30835 - RNA, 27 nt, Artificial Sequence
  Description of Artificial Sequence: Synthetic oligonucleotide
uacugaaaauaaauauagaaauacaac

SEQ ID NO: 30836 - RNA, 27 nt, Artificial Sequence
  Description of Artificial Sequence: Synthetic oligonucleotide
uuccauuuaagaaacauuaaucaaaac

SEQ ID NO: 30837 - RNA, 27 nt, Artificial Sequence
  Description of Artificial Sequence: Synthetic oligonucleotide
acaauuuuaggcacuauacacguuguu

SEQ ID NO: 30838 - RNA, 27 nt, Artificial Sequence
  Description of Artificial Sequence: Synthetic oligonucleotide
ccagauguuaguagccaaggauauggu

SEQ ID NO: 30839 - RNA, 27 nt, Artificial Sequence
  Description of Artificial Sequence: Synthetic oligonucleotide
agcucacagucuccagauguuaguagc

SEQ ID NO: 30840 - RNA, 27 nt, Artificial Sequence
  Description of Artificial Sequence: Synthetic oligonucleotide
auuaauaaaaagcacacaacuuauggc

SEQ ID NO: 30841 - RNA, 27 nt, Artificial Sequence
  Description of Artificial Sequence: Synthetic oligonucleotide
aauguaagaagagccaaaaugaugcau

SEQ ID NO: 30842 - RNA, 27 nt, Artificial Sequence
  Description of Artificial Sequence: Synthetic oligonucleotide
acauuuuuacaaauguaagaagagcca

SEQ ID NO: 30843 - RNA, 27 nt, Artificial Sequence
  Description of Artificial Sequence: Synthetic oligonucleotide
aauaugaauuaagaugaccuaaucugu

SEQ ID NO: 30844 - RNA, 27 nt, Artificial Sequence
  Description of Artificial Sequence: Synthetic oligonucleotide
ucaugauuaguucuuucaauuccaucc

SEQ ID NO: 30845 - RNA, 27 nt, Artificial Sequence
  Description of Artificial Sequence: Synthetic oligonucleotide
cccaagagcagaaggaaugagugugca

SEQ ID NO: 30846 - RNA, 27 nt, Artificial Sequence
  Description of Artificial Sequence: Synthetic oligonucleotide
cucaaagcuacugguuaccucuacacc

SEQ ID NO: 30847 - RNA, 27 nt, Artificial Sequence
  Description of Artificial Sequence: Synthetic oligonucleotide
ugaaauauuacguggcaugugguuggg

SEQ ID NO: 30848 - RNA, 27 nt, Artificial Sequence
  Description of Artificial Sequence: Synthetic oligonucleotide
agugaagagaauaacuuguuuccgaag

SEQ ID NO: 30849 - RNA, 27 nt, Artificial Sequence
  Description of Artificial Sequence: Synthetic oligonucleotide
uuucuuagcauuaguuauugggaguga

SEQ ID NO: 30850 - RNA, 27 nt, Artificial Sequence
  Description of Artificial Sequence: Synthetic oligonucleotide
uugauuuucagcauuucuuagcauuag

SEQ ID NO: 30851 - RNA, 27 nt, Artificial Sequence
  Description of Artificial Sequence: Synthetic oligonucleotide
aaaguaaucauauuuagagaaagacag

SEQ ID NO: 30852 - RNA, 27 nt, Artificial Sequence
  Description of Artificial Sequence: Synthetic oligonucleotide
uguagaacaaaaugccugaaauucagc

SEQ ID NO: 30853 - RNA, 27 nt, Artificial Sequence
  Description of Artificial Sequence: Synthetic oligonucleotide
gagagucccgggugagagggaaucgcc

SEQ ID NO: 30854 - RNA, 27 nt, Artificial Sequence
  Description of Artificial Sequence: Synthetic oligonucleotide
cuuuacuuuaaagguucacuuuccuug

SEQ ID NO: 30855 - RNA, 27 nt, Artificial Sequence
  Description of Artificial Sequence: Synthetic oligonucleotide
ccaggcuuccagagcaugcagccuccu

SEQ ID NO: 30856 - RNA, 27 nt, Artificial Sequence
  Description of Artificial Sequence: Synthetic oligonucleotide
cucucuuuuguuuucuguucagagaaa

SEQ ID NO: 30857 - RNA, 27 nt, Artificial Sequence
  Description of Artificial Sequence: Synthetic oligonucleotide
cggcauaacugauuacagccaaguuca

SEQ ID NO: 30858 - RNA, 27 nt, Artificial Sequence
  Description of Artificial Sequence: Synthetic oligonucleotide
uggacuucuuuuaauuuuggcuucuuc

SEQ ID NO: 30859 - RNA, 27 nt, Artificial Sequence
  Description of Artificial Sequence: Synthetic oligonucleotide
uaaccucaccuggacuucuuuuaauuu

SEQ ID NO: 30860 - RNA, 27 nt, Artificial Sequence
  Description of Artificial Sequence: Synthetic oligonucleotide
guccucuucccgauaauccggauucag

SEQ ID NO: 30861 - RNA, 27 nt, Artificial Sequence
  Description of Artificial Sequence: Synthetic oligonucleotide
acaauacuugcuuugaugucacauuaa

SEQ ID NO: 30862 - RNA, 27 nt, Artificial Sequence
  Description of Artificial Sequence: Synthetic oligonucleotide
gagugcuacaauacuugcuuugauguc

SEQ ID NO: 30863 - RNA, 27 nt, Artificial Sequence
  Description of Artificial Sequence: Synthetic oligonucleotide
auuugugguuuuguuuucucucucucu

SEQ ID NO: 30864 - RNA, 27 nt, Artificial Sequence
  Description of Artificial Sequence: Synthetic oligonucleotide
uguaugggcuuaaauacuacagcgagg

SEQ ID NO: 30865 - RNA, 27 nt, Artificial Sequence
  Description of Artificial Sequence: Synthetic oligonucleotide
cuguaugggcuuaaauacuacagcgag

SEQ ID NO: 30866 - RNA, 27 nt, Artificial Sequence
  Description of Artificial Sequence: Synthetic oligonucleotide
ggaagguuucuguaugggcuuaaauac

SEQ ID NO: 30867 - RNA, 27 nt, Artificial Sequence
  Description of Artificial Sequence: Synthetic oligonucleotide
guagguauaccauguuuauuuuaauac

SEQ ID NO: 30868 - RNA, 27 nt, Artificial Sequence
  Description of Artificial Sequence: Synthetic oligonucleotide
uccgaaaacuggccgaucagaacagcc

SEQ ID NO: 30869 - RNA, 27 nt, Artificial Sequence
  Description of Artificial Sequence: Synthetic oligonucleotide
cccuguuccaaaguucaaauuauuugu

SEQ ID NO: 30870 - RNA, 27 nt, Artificial Sequence
  Description of Artificial Sequence: Synthetic oligonucleotide
acuggaaaguuaaauuaaggucgcaau

SEQ ID NO: 30871 - RNA, 27 nt, Artificial Sequence
  Description of Artificial Sequence: Synthetic oligonucleotide
caaaaccaaacuuuagcuuucucagcc

SEQ ID NO: 30872 - RNA, 27 nt, Artificial Sequence
  Description of Artificial Sequence: Synthetic oligonucleotide
uacagugggaaguagcaucuuuacuuu

SEQ ID NO: 30873 - RNA, 27 nt, Artificial Sequence
  Description of Artificial Sequence: Synthetic oligonucleotide
ucauaugguaucagcaauuaagcagua

SEQ ID NO: 30874 - RNA, 27 nt, Artificial Sequence
  Description of Artificial Sequence: Synthetic oligonucleotide
cagcccauguuucauucauaugguauc

SEQ ID NO: 30875 - RNA, 27 nt, Artificial Sequence
  Description of Artificial Sequence: Synthetic oligonucleotide
uaugaaaaaguuggauaagaaaguugg

SEQ ID NO: 30876 - RNA, 27 nt, Artificial Sequence
  Description of Artificial Sequence: Synthetic oligonucleotide
uccggccucaugaugucaugcaaggcu

SEQ ID NO: 30877 - RNA, 27 nt, Artificial Sequence
  Description of Artificial Sequence: Synthetic oligonucleotide
acaaaugcagucauauacaaauucagg

SEQ ID NO: 30878 - RNA, 27 nt, Artificial Sequence
  Description of Artificial Sequence: Synthetic oligonucleotide
gguaguaaacauucuacuaggauucuu

SEQ ID NO: 30879 - RNA, 27 nt, Artificial Sequence
  Description of Artificial Sequence: Synthetic oligonucleotide
uuucaucaaaaaauucuucccuuucug

SEQ ID NO: 30880 - RNA, 27 nt, Artificial Sequence
  Description of Artificial Sequence: Synthetic oligonucleotide
aaauucacacacuggcaugccgauagc

SEQ ID NO: 30881 - RNA, 27 nt, Artificial Sequence
  Description of Artificial Sequence: Synthetic oligonucleotide
acauacauugcucuacuaugaggugaa

SEQ ID NO: 30882 - RNA, 27 nt, Artificial Sequence
  Description of Artificial Sequence: Synthetic oligonucleotide
uauauaugugcuuuggcaauucuggug

SEQ ID NO: 30883 - RNA, 27 nt, Artificial Sequence
  Description of Artificial Sequence: Synthetic oligonucleotide
ggagaaacuauuacccagaucaccacu

SEQ ID NO: 30884 - RNA, 27 nt, Artificial Sequence
  Description of Artificial Sequence: Synthetic oligonucleotide
auuuggagaaacuauuacccagaucac

SEQ ID NO: 30885 - RNA, 27 nt, Artificial Sequence
  Description of Artificial Sequence: Synthetic oligonucleotide
uuucuaggaaguauucaucacauccac

SEQ ID NO: 30886 - RNA, 27 nt, Artificial Sequence
  Description of Artificial Sequence: Synthetic oligonucleotide
cauauaugguguagcuguggaaaugcg

SEQ ID NO: 30887 - RNA, 27 nt, Artificial Sequence
  Description of Artificial Sequence: Synthetic oligonucleotide
cuccauucauauaugguguagcugugg

SEQ ID NO: 30888 - RNA, 27 nt, Artificial Sequence
  Description of Artificial Sequence: Synthetic oligonucleotide
aucuucuucucguguaagaacugcagc

SEQ ID NO: 30889 - RNA, 27 nt, Artificial Sequence
  Description of Artificial Sequence: Synthetic oligonucleotide
ucccuguaaaugaucuucuucucgugu

SEQ ID NO: 30890 - RNA, 27 nt, Artificial Sequence
  Description of Artificial Sequence: Synthetic oligonucleotide
gucccuguaaaugaucuucuucucgug

SEQ ID NO: 30891 - RNA, 27 nt, Artificial Sequence
  Description of Artificial Sequence: Synthetic oligonucleotide
ucaggucccuguaaaugaucuucuucu

SEQ ID NO: 30892 - RNA, 27 nt, Artificial Sequence
  Description of Artificial Sequence: Synthetic oligonucleotide
gaugcagucaaacaccucuuccucugu

SEQ ID NO: 30893 - RNA, 27 nt, Artificial Sequence
  Description of Artificial Sequence: Synthetic oligonucleotide
cgaugcagucaaacaccucuuccucug

SEQ ID NO: 30894 - RNA, 27 nt, Artificial Sequence
  Description of Artificial Sequence: Synthetic oligonucleotide
cccugugaacucgcccucaaaguagcg

SEQ ID NO: 30895 - RNA, 27 nt, Artificial Sequence
  Description of Artificial Sequence: Synthetic oligonucleotide
ggacagaggugccaggagaugcccuca

SEQ ID NO: 30896 - RNA, 27 nt, Artificial Sequence
  Description of Artificial Sequence: Synthetic oligonucleotide
uuaaaaagacaaaccauaucacuccuu

SEQ ID NO: 30897 - RNA, 27 nt, Artificial Sequence
  Description of Artificial Sequence: Synthetic oligonucleotide
cuuaaaaagacaaaccauaucacuccu

SEQ ID NO: 30898 - RNA, 27 nt, Artificial Sequence
  Description of Artificial Sequence: Synthetic oligonucleotide
gacaaccuuuaggaucuuuacugcaac

SEQ ID NO: 30899 - RNA, 27 nt, Artificial Sequence
  Description of Artificial Sequence: Synthetic oligonucleotide
gucgacaaccuuuaggaucuuuacugc

SEQ ID NO: 30900 - RNA, 27 nt, Artificial Sequence
  Description of Artificial Sequence: Synthetic oligonucleotide
acaauugccagguuguccuuugucaug

SEQ ID NO: 30901 - RNA, 27 nt, Artificial Sequence
  Description of Artificial Sequence: Synthetic oligonucleotide
ccucgcaccacugggucacaauugcca

SEQ ID NO: 30902 - RNA, 27 nt, Artificial Sequence
  Description of Artificial Sequence: Synthetic oligonucleotide
auuucaugucucuauggaugauguucu

SEQ ID NO: 30903 - RNA, 27 nt, Artificial Sequence
  Description of Artificial Sequence: Synthetic oligonucleotide
uggagaaauauauuguuggauuucaug

SEQ ID NO: 30904 - RNA, 27 nt, Artificial Sequence
  Description of Artificial Sequence: Synthetic oligonucleotide
agccuucauggagaaauauauuguugg

SEQ ID NO: 30905 - RNA, 27 nt, Artificial Sequence
  Description of Artificial Sequence: Synthetic oligonucleotide
accacuccagcgugacuuuacuguugc

SEQ ID NO: 30906 - RNA, 27 nt, Artificial Sequence
  Description of Artificial Sequence: Synthetic oligonucleotide
ccucucuuccuuuacuuucuucacaca

SEQ ID NO: 30907 - RNA, 27 nt, Artificial Sequence
  Description of Artificial Sequence: Synthetic oligonucleotide
gcccgaugcaaggauggcucggaagcg

SEQ ID NO: 30908 - RNA, 27 nt, Artificial Sequence
  Description of Artificial Sequence: Synthetic oligonucleotide
cacaguaggauauucaaccuccauuuc

SEQ ID NO: 30909 - RNA, 27 nt, Artificial Sequence
  Description of Artificial Sequence: Synthetic oligonucleotide
uuacacaguaggauauucaaccuccau

SEQ ID NO: 30910 - RNA, 27 nt, Artificial Sequence
  Description of Artificial Sequence: Synthetic oligonucleotide
uacacuacaagggaaaacucaaaaucu

SEQ ID NO: 30911 - RNA, 27 nt, Artificial Sequence
  Description of Artificial Sequence: Synthetic oligonucleotide
caaucaacaaagaacaaacaggauaaa

SEQ ID NO: 30912 - RNA, 27 nt, Artificial Sequence
  Description of Artificial Sequence: Synthetic oligonucleotide
uuucaaucaacaaagaacaaacaggau

SEQ ID NO: 30913 - RNA, 27 nt, Artificial Sequence
  Description of Artificial Sequence: Synthetic oligonucleotide
auggaagaaaaagaaggcuguagagaa

SEQ ID NO: 30914 - RNA, 27 nt, Artificial Sequence
  Description of Artificial Sequence: Synthetic oligonucleotide
uagaaggaagauuagcuauggaagaaa

SEQ ID NO: 30915 - RNA, 27 nt, Artificial Sequence
  Description of Artificial Sequence: Synthetic oligonucleotide
augaagcauucaacaggaagauuauuu

SEQ ID NO: 30916 - RNA, 27 nt, Artificial Sequence
  Description of Artificial Sequence: Synthetic oligonucleotide
caugaagcauucaacaggaagauuauu

SEQ ID NO: 30917 - RNA, 27 nt, Artificial Sequence
  Description of Artificial Sequence: Synthetic oligonucleotide
ucaaaguagaauucaagucaugaagca

SEQ ID NO: 30918 - RNA, 27 nt, Artificial Sequence
  Description of Artificial Sequence: Synthetic oligonucleotide
gucuguaguugcuucucucccucuuag

SEQ ID NO: 30919 - RNA, 27 nt, Artificial Sequence
  Description of Artificial Sequence: Synthetic oligonucleotide
guugaccuuggucugguaggagacggc

SEQ ID NO: 30920 - RNA, 27 nt, Artificial Sequence
  Description of Artificial Sequence: Synthetic oligonucleotide
gucgagauagucgggccgauugaucuc

SEQ ID NO: 30921 - RNA, 27 nt, Artificial Sequence
  Description of Artificial Sequence: Synthetic oligonucleotide
guuugggaagguuggauguucguccuc

SEQ ID NO: 30922 - RNA, 27 nt, Artificial Sequence
  Description of Artificial Sequence: Synthetic oligonucleotide
aguucuaagcuuggguuccgacccuaa

SEQ ID NO: 30923 - RNA, 27 nt, Artificial Sequence
  Description of Artificial Sequence: Synthetic oligonucleotide
uuaaaguucuaagcuuggguuccgacc

SEQ ID NO: 30924 - RNA, 27 nt, Artificial Sequence
  Description of Artificial Sequence: Synthetic oligonucleotide
guugcuuaaaguucuaagcuuggguuc

SEQ ID NO: 30925 - RNA, 27 nt, Artificial Sequence
  Description of Artificial Sequence: Synthetic oligonucleotide
gugguggucuuguugcuuaaaguucua

SEQ ID NO: 30926 - RNA, 27 nt, Artificial Sequence
  Description of Artificial Sequence: Synthetic oligonucleotide
acuuuauuucucgccacugaauaguag

SEQ ID NO: 30927 - RNA, 27 nt, Artificial Sequence
  Description of Artificial Sequence: Synthetic oligonucleotide
aacuuuauuucucgccacugaauagua

SEQ ID NO: 30928 - RNA, 27 nt, Artificial Sequence
  Description of Artificial Sequence: Synthetic oligonucleotide
ggaucauuuccuguuaucuguguuugu

SEQ ID NO: 30929 - RNA, 27 nt, Artificial Sequence
  Description of Artificial Sequence: Synthetic oligonucleotide
guuucauuucuucucuuuucuuaaggc

SEQ ID NO: 30930 - RNA, 27 nt, Artificial Sequence
  Description of Artificial Sequence: Synthetic oligonucleotide
ggaggauggaaacacacuccuucaguu

SEQ ID NO: 30931 - RNA, 27 nt, Artificial Sequence
  Description of Artificial Sequence: Synthetic oligonucleotide
ucaaagauuuucagucccgcggugaca

SEQ ID NO: 30932 - RNA, 27 nt, Artificial Sequence
  Description of Artificial Sequence: Synthetic oligonucleotide
ccugaacggcacgcuuauuucugcugu

SEQ ID NO: 30933 - RNA, 27 nt, Artificial Sequence
  Description of Artificial Sequence: Synthetic oligonucleotide
cuucuggacccugaacggcacgcuuau

SEQ ID NO: 30934 - RNA, 27 nt, Artificial Sequence
  Description of Artificial Sequence: Synthetic oligonucleotide
caagcagucuugagugacuguuucuuc

SEQ ID NO: 30935 - RNA, 27 nt, Artificial Sequence
  Description of Artificial Sequence: Synthetic oligonucleotide
ccaaagacauggaccuucuuccucuga

SEQ ID NO: 30936 - RNA, 27 nt, Artificial Sequence
  Description of Artificial Sequence: Synthetic oligonucleotide
guguuucaggcauauuuugaauacauc

SEQ ID NO: 30937 - RNA, 27 nt, Artificial Sequence
  Description of Artificial Sequence: Synthetic oligonucleotide
gagguacagagaaagggaggaaaauag

SEQ ID NO: 30938 - RNA, 27 nt, Artificial Sequence
  Description of Artificial Sequence: Synthetic oligonucleotide
ucuugucuugcucuaucuuucuuuggu

SEQ ID NO: 30939 - RNA, 27 nt, Artificial Sequence
  Description of Artificial Sequence: Synthetic oligonucleotide
uuucuugucuugcucuaucuuucuuug

SEQ ID NO: 30940 - RNA, 27 nt, Artificial Sequence
  Description of Artificial Sequence: Synthetic oligonucleotide
ggaucuuguacaaacaaaugcuuucuc

SEQ ID NO: 30941 - RNA, 27 nt, Artificial Sequence
  Description of Artificial Sequence: Synthetic oligonucleotide
ucugcaaguacguucguuuaacucaag

SEQ ID NO: 30942 - RNA, 27 nt, Artificial Sequence
  Description of Artificial Sequence: Synthetic oligonucleotide
ucuguaucgaucguucuguaucagucu

SEQ ID NO: 30943 - RNA, 27 nt, Artificial Sequence
  Description of Artificial Sequence: Synthetic oligonucleotide
auuuauuuuuauauauauauaauauau

SEQ ID NO: 30944 - RNA, 27 nt, Artificial Sequence
  Description of Artificial Sequence: Synthetic oligonucleotide
auauuuauuuuuauauauauauaauau

SEQ ID NO: 30945 - RNA, 27 nt, Artificial Sequence
  Description of Artificial Sequence: Synthetic oligonucleotide
cacagcagucaaauacauccagugaag

SEQ ID NO: 30946 - RNA, 27 nt, Artificial Sequence
  Description of Artificial Sequence: Synthetic oligonucleotide
gucucucaucuccuccucuucccuguc

SEQ ID NO: 30947 - RNA, 27 nt, Artificial Sequence
  Description of Artificial Sequence: Synthetic oligonucleotide
ccaagugggacaaaaaaaagaucaugc

SEQ ID NO: 30948 - RNA, 14 nt, Artificial Sequence
  Description of Artificial Sequence: Synthetic oligonucleotide
guauuuugaugagg

SEQ ID NO: 30949 - RNA, 12 nt, Artificial Sequence
  Description of Artificial Sequence: Synthetic oligonucleotide
ggcccagaugau

SEQ ID NO: 30950 - RNA, 14 nt, Artificial Sequence
  Description of Artificial Sequence: Synthetic oligonucleotide
gggaagaaaacuau

SEQ ID NO: 30951 - RNA, 15 nt, Artificial Sequence
  Description of Artificial Sequence: Synthetic oligonucleotide
guuuuaauuuauuuc

SEQ ID NO: 30952 - RNA, 12 nt, Artificial Sequence
  Description of Artificial Sequence: Synthetic oligonucleotide
acguagggaaau

SEQ ID NO: 30953 - RNA, 12 nt, Artificial Sequence
  Description of Artificial Sequence: Synthetic oligonucleotide
ccaggguuuacc

SEQ ID NO: 30954 - RNA, 11 nt, Artificial Sequence
  Description of Artificial Sequence: Synthetic oligonucleotide
agcaagguuua

SEQ ID NO: 30955 - RNA, 12 nt, Artificial Sequence
  Description of Artificial Sequence: Synthetic oligonucleotide
uguauuauguug

SEQ ID NO: 30956 - RNA, 15 nt, Artificial Sequence
  Description of Artificial Sequence: Synthetic oligonucleotide
uuuuaaucuuuguga

SEQ ID NO: 30957 - RNA, 14 nt, Artificial Sequence
  Description of Artificial Sequence: Synthetic oligonucleotide
uuaaucuuugugac

SEQ ID NO: 30958 - RNA, 13 nt, Artificial Sequence
  Description of Artificial Sequence: Synthetic oligonucleotide
gcugcuuaugucu

SEQ ID NO: 30959 - RNA, 14 nt, Artificial Sequence
  Description of Artificial Sequence: Synthetic oligonucleotide
aaguguuucagaag

SEQ ID NO: 30960 - RNA, 13 nt, Artificial Sequence
  Description of Artificial Sequence: Synthetic oligonucleotide
gaccaucaauaag

SEQ ID NO: 30961 - RNA, 13 nt, Artificial Sequence
  Description of Artificial Sequence: Synthetic oligonucleotide
ccaucaauaagga

SEQ ID NO: 30962 - RNA, 14 nt, Artificial Sequence
  Description of Artificial Sequence: Synthetic oligonucleotide
ucaauaaggaagaa

SEQ ID NO: 30963 - RNA, 14 nt, Artificial Sequence
  Description of Artificial Sequence: Synthetic oligonucleotide
aauaaggaagaagc

SEQ ID NO: 30964 - RNA, 13 nt, Artificial Sequence
  Description of Artificial Sequence: Synthetic oligonucleotide
aggaagaagcccu

SEQ ID NO: 30965 - RNA, 13 nt, Artificial Sequence
  Description of Artificial Sequence: Synthetic oligonucleotide
gcauaacuaaagg

SEQ ID NO: 30966 - RNA, 14 nt, Artificial Sequence
  Description of Artificial Sequence: Synthetic oligonucleotide
cauaacuaaaggug

SEQ ID NO: 30967 - RNA, 12 nt, Artificial Sequence
  Description of Artificial Sequence: Synthetic oligonucleotide
cuacaucacgcc

SEQ ID NO: 30968 - RNA, 12 nt, Artificial Sequence
  Description of Artificial Sequence: Synthetic oligonucleotide
acuggauuuaag

SEQ ID NO: 30969 - RNA, 12 nt, Artificial Sequence
  Description of Artificial Sequence: Synthetic oligonucleotide
cuggauuuaagc

SEQ ID NO: 30970 - RNA, 13 nt, Artificial Sequence
  Description of Artificial Sequence: Synthetic oligonucleotide
gauuuaagcagag

SEQ ID NO: 30971 - RNA, 13 nt, Artificial Sequence
  Description of Artificial Sequence: Synthetic oligonucleotide
auuuaagcagagu

SEQ ID NO: 30972 - RNA, 13 nt, Artificial Sequence
  Description of Artificial Sequence: Synthetic oligonucleotide
uuaagcagaguuc

SEQ ID NO: 30973 - RNA, 13 nt, Artificial Sequence
  Description of Artificial Sequence: Synthetic oligonucleotide
uaagcagaguuca

SEQ ID NO: 30974 - RNA, 14 nt, Artificial Sequence
  Description of Artificial Sequence: Synthetic oligonucleotide
agcagaguucaaaa

SEQ ID NO: 30975 - RNA, 12 nt, Artificial Sequence
  Description of Artificial Sequence: Synthetic oligonucleotide
cucagggucuga

SEQ ID NO: 30976 - RNA, 13 nt, Artificial Sequence
  Description of Artificial Sequence: Synthetic oligonucleotide
caagcaacuacau

SEQ ID NO: 30977 - RNA, 12 nt, Artificial Sequence
  Description of Artificial Sequence: Synthetic oligonucleotide
aucaauggcagc

SEQ ID NO: 30978 - RNA, 11 nt, Artificial Sequence
  Description of Artificial Sequence: Synthetic oligonucleotide
uuccagcccac

SEQ ID NO: 30979 - RNA, 12 nt, Artificial Sequence
  Description of Artificial Sequence: Synthetic oligonucleotide
cagcugagaaug

SEQ ID NO: 30980 - RNA, 13 nt, Artificial Sequence
  Description of Artificial Sequence: Synthetic oligonucleotide
aacguaucuccua

SEQ ID NO: 30981 - RNA, 14 nt, Artificial Sequence
  Description of Artificial Sequence: Synthetic oligonucleotide
ccuaaaauaauuuc

SEQ ID NO: 30982 - RNA, 13 nt, Artificial Sequence
  Description of Artificial Sequence: Synthetic oligonucleotide
uggaagauucagc

SEQ ID NO: 30983 - RNA, 12 nt, Artificial Sequence
  Description of Artificial Sequence: Synthetic oligonucleotide
uuaaacucuccu

SEQ ID NO: 30984 - RNA, 12 nt, Artificial Sequence
  Description of Artificial Sequence: Synthetic oligonucleotide
cagccuacaguu

SEQ ID NO: 30985 - RNA, 13 nt, Artificial Sequence
  Description of Artificial Sequence: Synthetic oligonucleotide
guuauguucaguc

SEQ ID NO: 30986 - RNA, 13 nt, Artificial Sequence
  Description of Artificial Sequence: Synthetic oligonucleotide
cacauacaaaaug

SEQ ID NO: 30987 - RNA, 9 nt, Artificial Sequence
  Description of Artificial Sequence: Synthetic oligonucleotide
uccuuuugc

SEQ ID NO: 30988 - RNA, 12 nt, Artificial Sequence
  Description of Artificial Sequence: Synthetic oligonucleotide
ugaccugugaag

SEQ ID NO: 30989 - RNA, 12 nt, Artificial Sequence
  Description of Artificial Sequence: Synthetic oligonucleotide
cuaucucacaca

SEQ ID NO: 30990 - RNA, 13 nt, Artificial Sequence
  Description of Artificial Sequence: Synthetic oligonucleotide
uguccucaauugu

SEQ ID NO: 30991 - RNA, 12 nt, Artificial Sequence
  Description of Artificial Sequence: Synthetic oligonucleotide
aaaccguagcug

SEQ ID NO: 30992 - RNA, 12 nt, Artificial Sequence
  Description of Artificial Sequence: Synthetic oligonucleotide
uagcuggcaagc

SEQ ID NO: 30993 - RNA, 14 nt, Artificial Sequence
  Description of Artificial Sequence: Synthetic oligonucleotide
uuguaugguuaaaa

SEQ ID NO: 30994 - RNA, 14 nt, Artificial Sequence
  Description of Artificial Sequence: Synthetic oligonucleotide
ugguuaaaagaugg

SEQ ID NO: 30995 - RNA, 13 nt, Artificial Sequence
  Description of Artificial Sequence: Synthetic oligonucleotide
cagggaauuauac

SEQ ID NO: 30996 - RNA, 12 nt, Artificial Sequence
  Description of Artificial Sequence: Synthetic oligonucleotide
acaaucuugcug

SEQ ID NO: 30997 - RNA, 13 nt, Artificial Sequence
  Description of Artificial Sequence: Synthetic oligonucleotide
ccaauaaugaaga

SEQ ID NO: 30998 - RNA, 13 nt, Artificial Sequence
  Description of Artificial Sequence: Synthetic oligonucleotide
acuuuggauguuc

SEQ ID NO: 30999 - RNA, 12 nt, Artificial Sequence
  Description of Artificial Sequence: Synthetic oligonucleotide
aaugcuuccacu

SEQ ID NO: 31000 - RNA, 11 nt, Artificial Sequence
  Description of Artificial Sequence: Synthetic oligonucleotide
gagaaaguuug

SEQ ID NO: 31001 - RNA, 11 nt, Artificial Sequence
  Description of Artificial Sequence: Synthetic oligonucleotide
aaagaacuacu

SEQ ID NO: 31002 - RNA, 12 nt, Artificial Sequence
  Description of Artificial Sequence: Synthetic oligonucleotide
uuagaaauacgg

SEQ ID NO: 31003 - RNA, 12 nt, Artificial Sequence
  Description of Artificial Sequence: Synthetic oligonucleotide
aacauggguaca

SEQ ID NO: 31004 - RNA, 14 nt, Artificial Sequence
  Description of Artificial Sequence: Synthetic oligonucleotide
aaagacacagaaga

SEQ ID NO: 31005 - RNA, 11 nt, Artificial Sequence
  Description of Artificial Sequence: Synthetic oligonucleotide
uaguagggagg

SEQ ID NO: 31006 - RNA, 12 nt, Artificial Sequence
  Description of Artificial Sequence: Synthetic oligonucleotide
gccuucugcagc

SEQ ID NO: 31007 - RNA, 10 nt, Artificial Sequence
  Description of Artificial Sequence: Synthetic oligonucleotide
ggucugguac

SEQ ID NO: 31008 - RNA, 12 nt, Artificial Sequence
  Description of Artificial Sequence: Synthetic oligonucleotide
cuaguccuuccg

SEQ ID NO: 31009 - RNA, 12 nt, Artificial Sequence
  Description of Artificial Sequence: Synthetic oligonucleotide
ccagugaauauu

SEQ ID NO: 31010 - RNA, 13 nt, Artificial Sequence
  Description of Artificial Sequence: Synthetic oligonucleotide
augaauucaaguu

SEQ ID NO: 31011 - RNA, 12 nt, Artificial Sequence
  Description of Artificial Sequence: Synthetic oligonucleotide
caggacacagau

SEQ ID NO: 31012 - RNA, 12 nt, Artificial Sequence
  Description of Artificial Sequence: Synthetic oligonucleotide
cucaaagcacag

SEQ ID NO: 31013 - RNA, 10 nt, Artificial Sequence
  Description of Artificial Sequence: Synthetic oligonucleotide
accacugcca

SEQ ID NO: 31014 - RNA, 13 nt, Artificial Sequence
  Description of Artificial Sequence: Synthetic oligonucleotide
gaaacuacuagug

SEQ ID NO: 31015 - RNA, 12 nt, Artificial Sequence
  Description of Artificial Sequence: Synthetic oligonucleotide
aagucggacagc

SEQ ID NO: 31016 - RNA, 13 nt, Artificial Sequence
  Description of Artificial Sequence: Synthetic oligonucleotide
gaaagcgaaaaau

SEQ ID NO: 31017 - RNA, 13 nt, Artificial Sequence
  Description of Artificial Sequence: Synthetic oligonucleotide
cccucugauuuag

SEQ ID NO: 31018 - RNA, 12 nt, Artificial Sequence
  Description of Artificial Sequence: Synthetic oligonucleotide
ugagcuauuuaa

SEQ ID NO: 31019 - RNA, 13 nt, Artificial Sequence
  Description of Artificial Sequence: Synthetic oligonucleotide
aaaaggugaaaaa

SEQ ID NO: 31020 - RNA, 14 nt, Artificial Sequence
  Description of Artificial Sequence: Synthetic oligonucleotide
gaaaaagcacuauu

SEQ ID NO: 31021 - RNA, 12 nt, Artificial Sequence
  Description of Artificial Sequence: Synthetic oligonucleotide
ggcugaaaagaa

SEQ ID NO: 31022 - RNA, 12 nt, Artificial Sequence
  Description of Artificial Sequence: Synthetic oligonucleotide
uaaacccuuaua

SEQ ID NO: 31023 - RNA, 13 nt, Artificial Sequence
  Description of Artificial Sequence: Synthetic oligonucleotide
cauacuauuagcc

SEQ ID NO: 31024 - RNA, 12 nt, Artificial Sequence
  Description of Artificial Sequence: Synthetic oligonucleotide
gacagaagcauu

SEQ ID NO: 31025 - RNA, 14 nt, Artificial Sequence
  Description of Artificial Sequence: Synthetic oligonucleotide
agagcaaauaagau

SEQ ID NO: 31026 - RNA, 14 nt, Artificial Sequence
  Description of Artificial Sequence: Synthetic oligonucleotide
ccaacauuuuucuc

SEQ ID NO: 31027 - RNA, 15 nt, Artificial Sequence
  Description of Artificial Sequence: Synthetic oligonucleotide
uuaaguaugagaaaa

SEQ ID NO: 31028 - RNA, 14 nt, Artificial Sequence
  Description of Artificial Sequence: Synthetic oligonucleotide
caggaauaaagaug

SEQ ID NO: 31029 - RNA, 13 nt, Artificial Sequence
  Description of Artificial Sequence: Synthetic oligonucleotide
aauuugaaugacc

SEQ ID NO: 31030 - RNA, 14 nt, Artificial Sequence
  Description of Artificial Sequence: Synthetic oligonucleotide
auguauaaagauag

SEQ ID NO: 31031 - RNA, 12 nt, Artificial Sequence
  Description of Artificial Sequence: Synthetic oligonucleotide
ggcuguaacuau

SEQ ID NO: 31032 - RNA, 11 nt, Artificial Sequence
  Description of Artificial Sequence: Synthetic oligonucleotide
ucugugaagug

SEQ ID NO: 31033 - RNA, 14 nt, Artificial Sequence
  Description of Artificial Sequence: Synthetic oligonucleotide
ccuuuaaggaaaug

SEQ ID NO: 31034 - RNA, 13 nt, Artificial Sequence
  Description of Artificial Sequence: Synthetic oligonucleotide
aaggauacaaaaa

SEQ ID NO: 31035 - RNA, 12 nt, Artificial Sequence
  Description of Artificial Sequence: Synthetic oligonucleotide
agaugcaauuug

SEQ ID NO: 31036 - RNA, 12 nt, Artificial Sequence
  Description of Artificial Sequence: Synthetic oligonucleotide
guucaaaacgaa

SEQ ID NO: 31037 - RNA, 11 nt, Artificial Sequence
  Description of Artificial Sequence: Synthetic oligonucleotide
gugaaaccuca

SEQ ID NO: 31038 - RNA, 13 nt, Artificial Sequence
  Description of Artificial Sequence: Synthetic oligonucleotide
acgaaagagaagc

SEQ ID NO: 31039 - RNA, 12 nt, Artificial Sequence
  Description of Artificial Sequence: Synthetic oligonucleotide
cuccacaagcgc

SEQ ID NO: 31040 - RNA, 14 nt, Artificial Sequence
  Description of Artificial Sequence: Synthetic oligonucleotide
gagaagauuccaaa

SEQ ID NO: 31041 - RNA, 13 nt, Artificial Sequence
  Description of Artificial Sequence: Synthetic oligonucleotide
aaucuggauucaa

SEQ ID NO: 31042 - RNA, 13 nt, Artificial Sequence
  Description of Artificial Sequence: Synthetic oligonucleotide
agaacagauuuga

SEQ ID NO: 31043 - RNA, 11 nt, Artificial Sequence
  Description of Artificial Sequence: Synthetic oligonucleotide
ccagagcugug

SEQ ID NO: 31044 - RNA, 12 nt, Artificial Sequence
  Description of Artificial Sequence: Synthetic oligonucleotide
ccucagauuguu

SEQ ID NO: 31045 - RNA, 12 nt, Artificial Sequence
  Description of Artificial Sequence: Synthetic oligonucleotide
cuauuuuaauua

SEQ ID NO: 31046 - RNA, 13 nt, Artificial Sequence
  Description of Artificial Sequence: Synthetic oligonucleotide
uuuaauuuauuaa

SEQ ID NO: 31047 - RNA, 12 nt, Artificial Sequence
  Description of Artificial Sequence: Synthetic oligonucleotide
augcaguuugaa

SEQ ID NO: 31048 - RNA, 11 nt, Artificial Sequence
  Description of Artificial Sequence: Synthetic oligonucleotide
caugcugcugg

SEQ ID NO: 31049 - RNA, 13 nt, Artificial Sequence
  Description of Artificial Sequence: Synthetic oligonucleotide
agaugugcauuuc

SEQ ID NO: 31050 - RNA, 12 nt, Artificial Sequence
  Description of Artificial Sequence: Synthetic oligonucleotide
ucaaaaccugug

SEQ ID NO: 31051 - RNA, 11 nt, Artificial Sequence
  Description of Artificial Sequence: Synthetic oligonucleotide
gaaugugggua

SEQ ID NO: 31052 - RNA, 10 nt, Artificial Sequence
  Description of Artificial Sequence: Synthetic oligonucleotide
auguggguag

SEQ ID NO: 31053 - RNA, 13 nt, Artificial Sequence
  Description of Artificial Sequence: Synthetic oligonucleotide
ugaaaaugagcau

SEQ ID NO: 31054 - RNA, 13 nt, Artificial Sequence
  Description of Artificial Sequence: Synthetic oligonucleotide
uugcuuuucaugu

SEQ ID NO: 31055 - RNA, 12 nt, Artificial Sequence
  Description of Artificial Sequence: Synthetic oligonucleotide
uguauuucuaua

SEQ ID NO: 31056 - RNA, 13 nt, Artificial Sequence
  Description of Artificial Sequence: Synthetic oligonucleotide
uuugauuaauguu

SEQ ID NO: 31057 - RNA, 12 nt, Artificial Sequence
  Description of Artificial Sequence: Synthetic oligonucleotide
caacguguauag

SEQ ID NO: 31058 - RNA, 12 nt, Artificial Sequence
  Description of Artificial Sequence: Synthetic oligonucleotide
cauauccuuggc

SEQ ID NO: 31059 - RNA, 13 nt, Artificial Sequence
  Description of Artificial Sequence: Synthetic oligonucleotide
uacuaacaucugg

SEQ ID NO: 31060 - RNA, 11 nt, Artificial Sequence
  Description of Artificial Sequence: Synthetic oligonucleotide
cauaaguugug

SEQ ID NO: 31061 - RNA, 12 nt, Artificial Sequence
  Description of Artificial Sequence: Synthetic oligonucleotide
gcaucauuuugg

SEQ ID NO: 31062 - RNA, 10 nt, Artificial Sequence
  Description of Artificial Sequence: Synthetic oligonucleotide
gcucuucuua

SEQ ID NO: 31063 - RNA, 10 nt, Artificial Sequence
  Description of Artificial Sequence: Synthetic oligonucleotide
agauuagguc

SEQ ID NO: 31064 - RNA, 12 nt, Artificial Sequence
  Description of Artificial Sequence: Synthetic oligonucleotide
auggaauugaaa

SEQ ID NO: 31065 - RNA, 13 nt, Artificial Sequence
  Description of Artificial Sequence: Synthetic oligonucleotide
cacacucauuccu

SEQ ID NO: 31066 - RNA, 12 nt, Artificial Sequence
  Description of Artificial Sequence: Synthetic oligonucleotide
uguagagguaac

SEQ ID NO: 31067 - RNA, 11 nt, Artificial Sequence
  Description of Artificial Sequence: Synthetic oligonucleotide
caaccacaugc

SEQ ID NO: 31068 - RNA, 12 nt, Artificial Sequence
  Description of Artificial Sequence: Synthetic oligonucleotide
ucggaaacaagu

SEQ ID NO: 31069 - RNA, 11 nt, Artificial Sequence
  Description of Artificial Sequence: Synthetic oligonucleotide
acucccaauaa

SEQ ID NO: 31070 - RNA, 13 nt, Artificial Sequence
  Description of Artificial Sequence: Synthetic oligonucleotide
aaugcuaagaaau

SEQ ID NO: 31071 - RNA, 11 nt, Artificial Sequence
  Description of Artificial Sequence: Synthetic oligonucleotide
gucuuucucua

SEQ ID NO: 31072 - RNA, 11 nt, Artificial Sequence
  Description of Artificial Sequence: Synthetic oligonucleotide
ugaauuucagg

SEQ ID NO: 31073 - RNA, 13 nt, Artificial Sequence
  Description of Artificial Sequence: Synthetic oligonucleotide
cgauucccucuca

SEQ ID NO: 31074 - RNA, 11 nt, Artificial Sequence
  Description of Artificial Sequence: Synthetic oligonucleotide
aggaaagugaa

SEQ ID NO: 31075 - RNA, 12 nt, Artificial Sequence
  Description of Artificial Sequence: Synthetic oligonucleotide
gaggcugcaugc

SEQ ID NO: 31076 - RNA, 11 nt, Artificial Sequence
  Description of Artificial Sequence: Synthetic oligonucleotide
ucucugaacag

SEQ ID NO: 31077 - RNA, 12 nt, Artificial Sequence
  Description of Artificial Sequence: Synthetic oligonucleotide
aacuuggcugua

SEQ ID NO: 31078 - RNA, 12 nt, Artificial Sequence
  Description of Artificial Sequence: Synthetic oligonucleotide
agaagccaaaau

SEQ ID NO: 31079 - RNA, 14 nt, Artificial Sequence
  Description of Artificial Sequence: Synthetic oligonucleotide
auuaaaagaagucc

SEQ ID NO: 31080 - RNA, 14 nt, Artificial Sequence
  Description of Artificial Sequence: Synthetic oligonucleotide
gaauccggauuauc

SEQ ID NO: 31081 - RNA, 12 nt, Artificial Sequence
  Description of Artificial Sequence: Synthetic oligonucleotide
aaugugacauca

SEQ ID NO: 31082 - RNA, 13 nt, Artificial Sequence
  Description of Artificial Sequence: Synthetic oligonucleotide
caucaaagcaagu

SEQ ID NO: 31083 - RNA, 11 nt, Artificial Sequence
  Description of Artificial Sequence: Synthetic oligonucleotide
agagagagaaa

SEQ ID NO: 31084 - RNA, 13 nt, Artificial Sequence
  Description of Artificial Sequence: Synthetic oligonucleotide
ucgcuguaguauu

SEQ ID NO: 31085 - RNA, 14 nt, Artificial Sequence
  Description of Artificial Sequence: Synthetic oligonucleotide
cgcuguaguauuua

SEQ ID NO: 31086 - RNA, 13 nt, Artificial Sequence
  Description of Artificial Sequence: Synthetic oligonucleotide
auuuaagcccaua

SEQ ID NO: 31087 - RNA, 15 nt, Artificial Sequence
  Description of Artificial Sequence: Synthetic oligonucleotide
auuaaaauaaacaug

SEQ ID NO: 31088 - RNA, 12 nt, Artificial Sequence
  Description of Artificial Sequence: Synthetic oligonucleotide
cuguucugaucg

SEQ ID NO: 31089 - RNA, 16 nt, Artificial Sequence
  Description of Artificial Sequence: Synthetic oligonucleotide
aaauaauuugaacuuu

SEQ ID NO: 31090 - RNA, 12 nt, Artificial Sequence
  Description of Artificial Sequence: Synthetic oligonucleotide
ugcgaccuuaau

SEQ ID NO: 31091 - RNA, 11 nt, Artificial Sequence
  Description of Artificial Sequence: Synthetic oligonucleotide
cugagaaagcu

SEQ ID NO: 31092 - RNA, 13 nt, Artificial Sequence
  Description of Artificial Sequence: Synthetic oligonucleotide
aguaaagaugcua

SEQ ID NO: 31093 - RNA, 12 nt, Artificial Sequence
  Description of Artificial Sequence: Synthetic oligonucleotide
cugcuuaauugc

SEQ ID NO: 31094 - RNA, 14 nt, Artificial Sequence
  Description of Artificial Sequence: Synthetic oligonucleotide
uaccauaugaauga

SEQ ID NO: 31095 - RNA, 12 nt, Artificial Sequence
  Description of Artificial Sequence: Synthetic oligonucleotide
aacuuucuuauc

SEQ ID NO: 31096 - RNA, 13 nt, Artificial Sequence
  Description of Artificial Sequence: Synthetic oligonucleotide
ccuugcaugacau

SEQ ID NO: 31097 - RNA, 14 nt, Artificial Sequence
  Description of Artificial Sequence: Synthetic oligonucleotide
ugaauuuguauaug

SEQ ID NO: 31098 - RNA, 12 nt, Artificial Sequence
  Description of Artificial Sequence: Synthetic oligonucleotide
gaauccuaguag

SEQ ID NO: 31099 - RNA, 10 nt, Artificial Sequence
  Description of Artificial Sequence: Synthetic oligonucleotide
gaaagggaag

SEQ ID NO: 31100 - RNA, 11 nt, Artificial Sequence
  Description of Artificial Sequence: Synthetic oligonucleotide
uaucggcaugc

SEQ ID NO: 31101 - RNA, 12 nt, Artificial Sequence
  Description of Artificial Sequence: Synthetic oligonucleotide
caccucauagua

SEQ ID NO: 31102 - RNA, 11 nt, Artificial Sequence
  Description of Artificial Sequence: Synthetic oligonucleotide
ccagaauugcc

SEQ ID NO: 31103 - RNA, 11 nt, Artificial Sequence
  Description of Artificial Sequence: Synthetic oligonucleotide
uggugaucugg

SEQ ID NO: 31104 - RNA, 12 nt, Artificial Sequence
  Description of Artificial Sequence: Synthetic oligonucleotide
gaucuggguaau

SEQ ID NO: 31105 - RNA, 12 nt, Artificial Sequence
  Description of Artificial Sequence: Synthetic oligonucleotide
ggaugugaugaa

SEQ ID NO: 31106 - RNA, 12 nt, Artificial Sequence
  Description of Artificial Sequence: Synthetic oligonucleotide
cauuuccacagc

SEQ ID NO: 31107 - RNA, 11 nt, Artificial Sequence
  Description of Artificial Sequence: Synthetic oligonucleotide
acagcuacacc

SEQ ID NO: 31108 - RNA, 12 nt, Artificial Sequence
  Description of Artificial Sequence: Synthetic oligonucleotide
ugcaguucuuac

SEQ ID NO: 31109 - RNA, 12 nt, Artificial Sequence
  Description of Artificial Sequence: Synthetic oligonucleotide
acgagaagaaga

SEQ ID NO: 31110 - RNA, 12 nt, Artificial Sequence
  Description of Artificial Sequence: Synthetic oligonucleotide
cgagaagaagau

SEQ ID NO: 31111 - RNA, 15 nt, Artificial Sequence
  Description of Artificial Sequence: Synthetic oligonucleotide
aagaagaucauuuac

SEQ ID NO: 31112 - RNA, 11 nt, Artificial Sequence
  Description of Artificial Sequence: Synthetic oligonucleotide
agaggaagagg

SEQ ID NO: 31113 - RNA, 12 nt, Artificial Sequence
  Description of Artificial Sequence: Synthetic oligonucleotide
gaggaagaggug

SEQ ID NO: 31114 - RNA, 13 nt, Artificial Sequence
  Description of Artificial Sequence: Synthetic oligonucleotide
cuacuuugagggc

SEQ ID NO: 31115 - RNA, 12 nt, Artificial Sequence
  Description of Artificial Sequence: Synthetic oligonucleotide
agggcaucuccu

SEQ ID NO: 31116 - RNA, 10 nt, Artificial Sequence
  Description of Artificial Sequence: Synthetic oligonucleotide
ggagugauau

SEQ ID NO: 31117 - RNA, 11 nt, Artificial Sequence
  Description of Artificial Sequence: Synthetic oligonucleotide
gagugauaugg

SEQ ID NO: 31118 - RNA, 12 nt, Artificial Sequence
  Description of Artificial Sequence: Synthetic oligonucleotide
ugcaguaaagau

SEQ ID NO: 31119 - RNA, 13 nt, Artificial Sequence
  Description of Artificial Sequence: Synthetic oligonucleotide
aguaaagauccua

SEQ ID NO: 31120 - RNA, 12 nt, Artificial Sequence
  Description of Artificial Sequence: Synthetic oligonucleotide
ugacaaaggaca

SEQ ID NO: 31121 - RNA, 13 nt, Artificial Sequence
  Description of Artificial Sequence: Synthetic oligonucleotide
gcaauugugaccc

SEQ ID NO: 31122 - RNA, 12 nt, Artificial Sequence
  Description of Artificial Sequence: Synthetic oligonucleotide
aacaucauccau

SEQ ID NO: 31123 - RNA, 12 nt, Artificial Sequence
  Description of Artificial Sequence: Synthetic oligonucleotide
ugaaauccaaca

SEQ ID NO: 31124 - RNA, 15 nt, Artificial Sequence
  Description of Artificial Sequence: Synthetic oligonucleotide
aacaauauauuucuc

SEQ ID NO: 31125 - RNA, 14 nt, Artificial Sequence
  Description of Artificial Sequence: Synthetic oligonucleotide
aacaguaaagucac

SEQ ID NO: 31126 - RNA, 14 nt, Artificial Sequence
  Description of Artificial Sequence: Synthetic oligonucleotide
ugugaagaaaguaa

SEQ ID NO: 31127 - RNA, 13 nt, Artificial Sequence
  Description of Artificial Sequence: Synthetic oligonucleotide
cuuccgagccauc

SEQ ID NO: 31128 - RNA, 12 nt, Artificial Sequence
  Description of Artificial Sequence: Synthetic oligonucleotide
aauggagguuga

SEQ ID NO: 31129 - RNA, 12 nt, Artificial Sequence
  Description of Artificial Sequence: Synthetic oligonucleotide
ggagguugaaua

SEQ ID NO: 31130 - RNA, 13 nt, Artificial Sequence
  Description of Artificial Sequence: Synthetic oligonucleotide
auuuugaguuuuc

SEQ ID NO: 31131 - RNA, 12 nt, Artificial Sequence
  Description of Artificial Sequence: Synthetic oligonucleotide
uauccuguuugu

SEQ ID NO: 31132 - RNA, 11 nt, Artificial Sequence
  Description of Artificial Sequence: Synthetic oligonucleotide
ccuguuuguuc

SEQ ID NO: 31133 - RNA, 10 nt, Artificial Sequence
  Description of Artificial Sequence: Synthetic oligonucleotide
cucuacagcc

SEQ ID NO: 31134 - RNA, 12 nt, Artificial Sequence
  Description of Artificial Sequence: Synthetic oligonucleotide
ucuuccauagcu

SEQ ID NO: 31135 - RNA, 12 nt, Artificial Sequence
  Description of Artificial Sequence: Synthetic oligonucleotide
auaaucuuccug

SEQ ID NO: 31136 - RNA, 12 nt, Artificial Sequence
  Description of Artificial Sequence: Synthetic oligonucleotide
uaaucuuccugu

SEQ ID NO: 31137 - RNA, 12 nt, Artificial Sequence
  Description of Artificial Sequence: Synthetic oligonucleotide
cuucaugacuug

SEQ ID NO: 31138 - RNA, 12 nt, Artificial Sequence
  Description of Artificial Sequence: Synthetic oligonucleotide
aagagggagaga

SEQ ID NO: 31139 - RNA, 12 nt, Artificial Sequence
  Description of Artificial Sequence: Synthetic oligonucleotide
cgucuccuacca

SEQ ID NO: 31140 - RNA, 12 nt, Artificial Sequence
  Description of Artificial Sequence: Synthetic oligonucleotide
gaucaaucggcc

SEQ ID NO: 31141 - RNA, 12 nt, Artificial Sequence
  Description of Artificial Sequence: Synthetic oligonucleotide
ggacgaacaucc

SEQ ID NO: 31142 - RNA, 11 nt, Artificial Sequence
  Description of Artificial Sequence: Synthetic oligonucleotide
agggucggaac

SEQ ID NO: 31143 - RNA, 10 nt, Artificial Sequence
  Description of Artificial Sequence: Synthetic oligonucleotide
ucggaaccca

SEQ ID NO: 31144 - RNA, 11 nt, Artificial Sequence
  Description of Artificial Sequence: Synthetic oligonucleotide
acccaagcuua

SEQ ID NO: 31145 - RNA, 14 nt, Artificial Sequence
  Description of Artificial Sequence: Synthetic oligonucleotide
gaacuuuaagcaac

SEQ ID NO: 31146 - RNA, 11 nt, Artificial Sequence
  Description of Artificial Sequence: Synthetic oligonucleotide
acuauucagug

SEQ ID NO: 31147 - RNA, 11 nt, Artificial Sequence
  Description of Artificial Sequence: Synthetic oligonucleotide
cuauucagugg

SEQ ID NO: 31148 - RNA, 13 nt, Artificial Sequence
  Description of Artificial Sequence: Synthetic oligonucleotide
aaacacagauaac

SEQ ID NO: 31149 - RNA, 12 nt, Artificial Sequence
  Description of Artificial Sequence: Synthetic oligonucleotide
cuuaagaaaaga

SEQ ID NO: 31150 - RNA, 12 nt, Artificial Sequence
  Description of Artificial Sequence: Synthetic oligonucleotide
cugaaggagugu

SEQ ID NO: 31151 - RNA, 10 nt, Artificial Sequence
  Description of Artificial Sequence: Synthetic oligonucleotide
ucaccgcggg

SEQ ID NO: 31152 - RNA, 14 nt, Artificial Sequence
  Description of Artificial Sequence: Synthetic oligonucleotide
agcagaaauaagcg

SEQ ID NO: 31153 - RNA, 12 nt, Artificial Sequence
  Description of Artificial Sequence: Synthetic oligonucleotide
aagcgugccguu

SEQ ID NO: 31154 - RNA, 12 nt, Artificial Sequence
  Description of Artificial Sequence: Synthetic oligonucleotide
agaaacagucac

SEQ ID NO: 31155 - RNA, 12 nt, Artificial Sequence
  Description of Artificial Sequence: Synthetic oligonucleotide
agaggaagaagg

SEQ ID NO: 31156 - RNA, 14 nt, Artificial Sequence
  Description of Artificial Sequence: Synthetic oligonucleotide
uguauucaaaauau

SEQ ID NO: 31157 - RNA, 13 nt, Artificial Sequence
  Description of Artificial Sequence: Synthetic oligonucleotide
auuuuccucccuu

SEQ ID NO: 31158 - RNA, 13 nt, Artificial Sequence
  Description of Artificial Sequence: Synthetic oligonucleotide
caaagaaagauag

SEQ ID NO: 31159 - RNA, 12 nt, Artificial Sequence
  Description of Artificial Sequence: Synthetic oligonucleotide
aagaaagauaga

SEQ ID NO: 31160 - RNA, 13 nt, Artificial Sequence
  Description of Artificial Sequence: Synthetic oligonucleotide
gaaagcauuuguu

SEQ ID NO: 31161 - RNA, 13 nt, Artificial Sequence
  Description of Artificial Sequence: Synthetic oligonucleotide
ugaguuaaacgaa

SEQ ID NO: 31162 - RNA, 12 nt, Artificial Sequence
  Description of Artificial Sequence: Synthetic oligonucleotide
acugauacagaa

SEQ ID NO: 31163 - RNA, 12 nt, Artificial Sequence
  Description of Artificial Sequence: Synthetic oligonucleotide
auauuauauaua

SEQ ID NO: 31164 - RNA, 12 nt, Artificial Sequence
  Description of Artificial Sequence: Synthetic oligonucleotide
auuauauauaua

SEQ ID NO: 31165 - RNA, 12 nt, Artificial Sequence
  Description of Artificial Sequence: Synthetic oligonucleotide
ucacuggaugua

SEQ ID NO: 31166 - RNA, 12 nt, Artificial Sequence
  Description of Artificial Sequence: Synthetic oligonucleotide
cagggaagagga

SEQ ID NO: 31167 - RNA, 15 nt, Artificial Sequence
  Description of Artificial Sequence: Synthetic oligonucleotide
augaucuuuuuuuug

SEQ ID NO: 31168 - RNA, 11 nt, Artificial Sequence
  Description of Artificial Sequence: Synthetic oligonucleotide
aguucacggcc

SEQ ID NO: 31169 - RNA, 13 nt, Artificial Sequence
  Description of Artificial Sequence: Synthetic oligonucleotide
caccaucacacca

SEQ ID NO: 31170 - RNA, 11 nt, Artificial Sequence
  Description of Artificial Sequence: Synthetic oligonucleotide
ccugcggguuu

SEQ ID NO: 31171 - RNA, 10 nt, Artificial Sequence
  Description of Artificial Sequence: Synthetic oligonucleotide
auccaguuug

SEQ ID NO: 31172 - RNA, 13 nt, Artificial Sequence
  Description of Artificial Sequence: Synthetic oligonucleotide
guuaaggacuucu

SEQ ID NO: 31173 - RNA, 13 nt, Artificial Sequence
  Description of Artificial Sequence: Synthetic oligonucleotide
cagugggacagag

SEQ ID NO: 31174 - RNA, 14 nt, Artificial Sequence
  Description of Artificial Sequence: Synthetic oligonucleotide
aauuuguuauugug

SEQ ID NO: 31175 - RNA, 13 nt, Artificial Sequence
  Description of Artificial Sequence: Synthetic oligonucleotide
uucaaaugcauuu

SEQ ID NO: 31176 - RNA, 10 nt, Artificial Sequence
  Description of Artificial Sequence: Synthetic oligonucleotide
caggaaagcc

SEQ ID NO: 31177 - RNA, 11 nt, Artificial Sequence
  Description of Artificial Sequence: Synthetic oligonucleotide
aggaaagcccu

SEQ ID NO: 31178 - RNA, 12 nt, Artificial Sequence
  Description of Artificial Sequence: Synthetic oligonucleotide
cccagcauggcc

SEQ ID NO: 31179 - RNA, 11 nt, Artificial Sequence
  Description of Artificial Sequence: Synthetic oligonucleotide
cuucucccuga

SEQ ID NO: 31180 - RNA, 12 nt, Artificial Sequence
  Description of Artificial Sequence: Synthetic oligonucleotide
gaagaagcccuu

SEQ ID NO: 31181 - RNA, 12 nt, Artificial Sequence
  Description of Artificial Sequence: Synthetic oligonucleotide
agaagcccuuca

SEQ ID NO: 31182 - RNA, 11 nt, Artificial Sequence
  Description of Artificial Sequence: Synthetic oligonucleotide
gcccuucagcg

SEQ ID NO: 31183 - RNA, 11 nt, Artificial Sequence
  Description of Artificial Sequence: Synthetic oligonucleotide
ccuucagcggc

SEQ ID NO: 31184 - RNA, 12 nt, Artificial Sequence
  Description of Artificial Sequence: Synthetic oligonucleotide
ucagcggccagu

SEQ ID NO: 31185 - RNA, 12 nt, Artificial Sequence
  Description of Artificial Sequence: Synthetic oligonucleotide
ugaaaagcuccg

SEQ ID NO: 31186 - RNA, 11 nt, Artificial Sequence
  Description of Artificial Sequence: Synthetic oligonucleotide
aaaagcuccgg

SEQ ID NO: 31187 - RNA, 13 nt, Artificial Sequence
  Description of Artificial Sequence: Synthetic oligonucleotide
agucaacagucug

SEQ ID NO: 31188 - RNA, 13 nt, Artificial Sequence
  Description of Artificial Sequence: Synthetic oligonucleotide
cagaguucaaaag

SEQ ID NO: 31189 - RNA, 13 nt, Artificial Sequence
  Description of Artificial Sequence: Synthetic oligonucleotide
agaguucaaaagc

SEQ ID NO: 31190 - RNA, 12 nt, Artificial Sequence
  Description of Artificial Sequence: Synthetic oligonucleotide
uucaaaagcccu

SEQ ID NO: 31191 - RNA, 12 nt, Artificial Sequence
  Description of Artificial Sequence: Synthetic oligonucleotide
ucaaaagcccuu

SEQ ID NO: 31192 - RNA, 12 nt, Artificial Sequence
  Description of Artificial Sequence: Synthetic oligonucleotide
aaaagcccuuca

SEQ ID NO: 31193 - RNA, 12 nt, Artificial Sequence
  Description of Artificial Sequence: Synthetic oligonucleotide
aaagcccuucag

SEQ ID NO: 31194 - RNA, 13 nt, Artificial Sequence
  Description of Artificial Sequence: Synthetic oligonucleotide
gugaagccgcucg

SEQ ID NO: 31195 - RNA, 12 nt, Artificial Sequence
  Description of Artificial Sequence: Synthetic oligonucleotide
cacgccagucaa

SEQ ID NO: 31196 - RNA, 13 nt, Artificial Sequence
  Description of Artificial Sequence: Synthetic oligonucleotide
uucuuggugcgug

SEQ ID NO: 31197 - RNA, 14 nt, Artificial Sequence
  Description of Artificial Sequence: Synthetic oligonucleotide
auuggauucaucag

SEQ ID NO: 31198 - RNA, 13 nt, Artificial Sequence
  Description of Artificial Sequence: Synthetic oligonucleotide
uggaauaccuaag

SEQ ID NO: 31199 - RNA, 12 nt, Artificial Sequence
  Description of Artificial Sequence: Synthetic oligonucleotide
auuugaggcuca

SEQ ID NO: 31200 - RNA, 11 nt, Artificial Sequence
  Description of Artificial Sequence: Synthetic oligonucleotide
ucuacaauugg

SEQ ID NO: 31201 - RNA, 12 nt, Artificial Sequence
  Description of Artificial Sequence: Synthetic oligonucleotide
uaguuaggagcc

SEQ ID NO: 31202 - RNA, 13 nt, Artificial Sequence
  Description of Artificial Sequence: Synthetic oligonucleotide
agucaauauccac

SEQ ID NO: 31203 - RNA, 13 nt, Artificial Sequence
  Description of Artificial Sequence: Synthetic oligonucleotide
auguucagucaca

SEQ ID NO: 31204 - RNA, 12 nt, Artificial Sequence
  Description of Artificial Sequence: Synthetic oligonucleotide
acacacacauac

SEQ ID NO: 31205 - RNA, 12 nt, Artificial Sequence
  Description of Artificial Sequence: Synthetic oligonucleotide
uuccuuuugcuu

SEQ ID NO: 31206 - RNA, 16 nt, Artificial Sequence
  Description of Artificial Sequence: Synthetic oligonucleotide
uuuuaaaguaauuuuu

SEQ ID NO: 31207 - RNA, 13 nt, Artificial Sequence
  Description of Artificial Sequence: Synthetic oligonucleotide
caacagucaaugg

SEQ ID NO: 31208 - RNA, 13 nt, Artificial Sequence
  Description of Artificial Sequence: Synthetic oligonucleotide
ucgacaaaccaau

SEQ ID NO: 31209 - RNA, 12 nt, Artificial Sequence
  Description of Artificial Sequence: Synthetic oligonucleotide
acugcuaccacu

SEQ ID NO: 31210 - RNA, 13 nt, Artificial Sequence
  Description of Artificial Sequence: Synthetic oligonucleotide
gcaagcggucuua

SEQ ID NO: 31211 - RNA, 13 nt, Artificial Sequence
  Description of Artificial Sequence: Synthetic oligonucleotide
ggucuuaccggcu

SEQ ID NO: 31212 - RNA, 11 nt, Artificial Sequence
  Description of Artificial Sequence: Synthetic oligonucleotide
gauggguuacc

SEQ ID NO: 31213 - RNA, 11 nt, Artificial Sequence
  Description of Artificial Sequence: Synthetic oligonucleotide
guuaccugcga

SEQ ID NO: 31214 - RNA, 12 nt, Artificial Sequence
  Description of Artificial Sequence: Synthetic oligonucleotide
aaucuugcugag

SEQ ID NO: 31215 - RNA, 13 nt, Artificial Sequence
  Description of Artificial Sequence: Synthetic oligonucleotide
agcauaaaacagu

SEQ ID NO: 31216 - RNA, 12 nt, Artificial Sequence
  Description of Artificial Sequence: Synthetic oligonucleotide
guccuuuauccu

SEQ ID NO: 31217 - RNA, 12 nt, Artificial Sequence
  Description of Artificial Sequence: Synthetic oligonucleotide
caacgcaaguug

SEQ ID NO: 31218 - RNA, 13 nt, Artificial Sequence
  Description of Artificial Sequence: Synthetic oligonucleotide
aaacugaaaccau

SEQ ID NO: 31219 - RNA, 14 nt, Artificial Sequence
  Description of Artificial Sequence: Synthetic oligonucleotide
acuuuguuaaauau

SEQ ID NO: 31220 - RNA, 14 nt, Artificial Sequence
  Description of Artificial Sequence: Synthetic oligonucleotide
guauauuaaaaguu

SEQ ID NO: 31221 - RNA, 13 nt, Artificial Sequence
  Description of Artificial Sequence: Synthetic oligonucleotide
guuuugacuuaac

SEQ ID NO: 31222 - RNA, 13 nt, Artificial Sequence
  Description of Artificial Sequence: Synthetic oligonucleotide
gcaaacucagcac

SEQ ID NO: 31223 - RNA, 11 nt, Artificial Sequence
  Description of Artificial Sequence: Synthetic oligonucleotide
ugcugaccuca

SEQ ID NO: 31224 - RNA, 14 nt, Artificial Sequence
  Description of Artificial Sequence: Synthetic oligonucleotide
uuuauucagaucgc

SEQ ID NO: 31225 - RNA, 13 nt, Artificial Sequence
  Description of Artificial Sequence: Synthetic oligonucleotide
aggguucugggau

SEQ ID NO: 31226 - RNA, 15 nt, Artificial Sequence
  Description of Artificial Sequence: Synthetic oligonucleotide
auauuggaaauuaug

SEQ ID NO: 31227 - RNA, 13 nt, Artificial Sequence
  Description of Artificial Sequence: Synthetic oligonucleotide
auggaagcacuag

SEQ ID NO: 31228 - RNA, 13 nt, Artificial Sequence
  Description of Artificial Sequence: Synthetic oligonucleotide
guuuuuaugugga

SEQ ID NO: 31229 - RNA, 12 nt, Artificial Sequence
  Description of Artificial Sequence: Synthetic oligonucleotide
ggaauugguaga

SEQ ID NO: 31230 - RNA, 13 nt, Artificial Sequence
  Description of Artificial Sequence: Synthetic oligonucleotide
uuagacuuggaga

SEQ ID NO: 31231 - RNA, 13 nt, Artificial Sequence
  Description of Artificial Sequence: Synthetic oligonucleotide
uuacaguauucca

SEQ ID NO: 31232 - RNA, 15 nt, Artificial Sequence
  Description of Artificial Sequence: Synthetic oligonucleotide
ccacugaugaauuaa

SEQ ID NO: 31233 - RNA, 12 nt, Artificial Sequence
  Description of Artificial Sequence: Synthetic oligonucleotide
ccacaucaucac

SEQ ID NO: 31234 - RNA, 13 nt, Artificial Sequence
  Description of Artificial Sequence: Synthetic oligonucleotide
cucaccaaacaga

SEQ ID NO: 31235 - RNA, 12 nt, Artificial Sequence
  Description of Artificial Sequence: Synthetic oligonucleotide
ggaacaugaugg

SEQ ID NO: 31236 - RNA, 12 nt, Artificial Sequence
  Description of Artificial Sequence: Synthetic oligonucleotide
cauguagacugc

SEQ ID NO: 31237 - RNA, 13 nt, Artificial Sequence
  Description of Artificial Sequence: Synthetic oligonucleotide
ggaucuauuuaug

SEQ ID NO: 31238 - RNA, 12 nt, Artificial Sequence
  Description of Artificial Sequence: Synthetic oligonucleotide
gcacuauuauca

SEQ ID NO: 31239 - RNA, 11 nt, Artificial Sequence
  Description of Artificial Sequence: Synthetic oligonucleotide
aucaguucugc

SEQ ID NO: 31240 - RNA, 13 nt, Artificial Sequence
  Description of Artificial Sequence: Synthetic oligonucleotide
agauuaaaccuac

SEQ ID NO: 31241 - RNA, 13 nt, Artificial Sequence
  Description of Artificial Sequence: Synthetic oligonucleotide
auaaaauccuucu

SEQ ID NO: 31242 - RNA, 12 nt, Artificial Sequence
  Description of Artificial Sequence: Synthetic oligonucleotide
aaugcuguagac

SEQ ID NO: 31243 - RNA, 13 nt, Artificial Sequence
  Description of Artificial Sequence: Synthetic oligonucleotide
uugauaggaauag

SEQ ID NO: 31244 - RNA, 11 nt, Artificial Sequence
  Description of Artificial Sequence: Synthetic oligonucleotide
aauggcccuga

SEQ ID NO: 31245 - RNA, 11 nt, Artificial Sequence
  Description of Artificial Sequence: Synthetic oligonucleotide
uuccucaagca

SEQ ID NO: 31246 - RNA, 10 nt, Artificial Sequence
  Description of Artificial Sequence: Synthetic oligonucleotide
guucagccca

SEQ ID NO: 31247 - RNA, 11 nt, Artificial Sequence
  Description of Artificial Sequence: Synthetic oligonucleotide
gcugcugaacc

SEQ ID NO: 31248 - RNA, 12 nt, Artificial Sequence
  Description of Artificial Sequence: Synthetic oligonucleotide
aaguucucuuca

SEQ ID NO: 31249 - RNA, 11 nt, Artificial Sequence
  Description of Artificial Sequence: Synthetic oligonucleotide
ccagccuagag

SEQ ID NO: 31250 - RNA, 13 nt, Artificial Sequence
  Description of Artificial Sequence: Synthetic oligonucleotide
cucugugaagugu

SEQ ID NO: 31251 - RNA, 14 nt, Artificial Sequence
  Description of Artificial Sequence: Synthetic oligonucleotide
ugagaaaauuucaa

SEQ ID NO: 31252 - RNA, 11 nt, Artificial Sequence
  Description of Artificial Sequence: Synthetic oligonucleotide
aauccuccuga

SEQ ID NO: 31253 - RNA, 12 nt, Artificial Sequence
  Description of Artificial Sequence: Synthetic oligonucleotide
gugacaucauau

SEQ ID NO: 31254 - RNA, 13 nt, Artificial Sequence
  Description of Artificial Sequence: Synthetic oligonucleotide
aaucuucaucaua

SEQ ID NO: 31255 - RNA, 13 nt, Artificial Sequence
  Description of Artificial Sequence: Synthetic oligonucleotide
gacuagcuauuaa

SEQ ID NO: 31256 - RNA, 14 nt, Artificial Sequence
  Description of Artificial Sequence: Synthetic oligonucleotide
ucucuacuaaaaau

SEQ ID NO: 31257 - RNA, 12 nt, Artificial Sequence
  Description of Artificial Sequence: Synthetic oligonucleotide
ucuaucucgccu

SEQ ID NO: 31258 - RNA, 13 nt, Artificial Sequence
  Description of Artificial Sequence: Synthetic oligonucleotide
cuucgguccaguu

SEQ ID NO: 31259 - RNA, 11 nt, Artificial Sequence
  Description of Artificial Sequence: Synthetic oligonucleotide
gauguagccgc

SEQ ID NO: 31260 - RNA, 12 nt, Artificial Sequence
  Description of Artificial Sequence: Synthetic oligonucleotide
ugaggagacuug

SEQ ID NO: 31261 - RNA, 12 nt, Artificial Sequence
  Description of Artificial Sequence: Synthetic oligonucleotide
gaguagugagga

SEQ ID NO: 31262 - RNA, 14 nt, Artificial Sequence
  Description of Artificial Sequence: Synthetic oligonucleotide
cagaugaguacaaa

SEQ ID NO: 31263 - RNA, 13 nt, Artificial Sequence
  Description of Artificial Sequence: Synthetic oligonucleotide
guuguuaaugggc

SEQ ID NO: 31264 - RNA, 13 nt, Artificial Sequence
  Description of Artificial Sequence: Synthetic oligonucleotide
uuuuuaauuuauu

SEQ ID NO: 31265 - RNA, 12 nt, Artificial Sequence
  Description of Artificial Sequence: Synthetic oligonucleotide
uauuuaaauaug

SEQ ID NO: 31266 - RNA, 13 nt, Artificial Sequence
  Description of Artificial Sequence: Synthetic oligonucleotide
uauccuuuguuuc

SEQ ID NO: 31267 - RNA, 14 nt, Artificial Sequence
  Description of Artificial Sequence: Synthetic oligonucleotide
cgucuaaguguuug

SEQ ID NO: 31268 - RNA, 12 nt, Artificial Sequence
  Description of Artificial Sequence: Synthetic oligonucleotide
accugugacaaa

SEQ ID NO: 31269 - RNA, 13 nt, Artificial Sequence
  Description of Artificial Sequence: Synthetic oligonucleotide
ccaggcugaauua

SEQ ID NO: 31270 - RNA, 14 nt, Artificial Sequence
  Description of Artificial Sequence: Synthetic oligonucleotide
gucauucuuacaau

SEQ ID NO: 31271 - RNA, 15 nt, Artificial Sequence
  Description of Artificial Sequence: Synthetic oligonucleotide
ucauucuuacaauug

SEQ ID NO: 31272 - RNA, 12 nt, Artificial Sequence
  Description of Artificial Sequence: Synthetic oligonucleotide
cagagaguguac

SEQ ID NO: 31273 - RNA, 12 nt, Artificial Sequence
  Description of Artificial Sequence: Synthetic oligonucleotide
agaacucagcag

SEQ ID NO: 31274 - RNA, 13 nt, Artificial Sequence
  Description of Artificial Sequence: Synthetic oligonucleotide
uuuauuuucagua

SEQ ID NO: 31275 - RNA, 12 nt, Artificial Sequence
  Description of Artificial Sequence: Synthetic oligonucleotide
ucuuaaauggaa

SEQ ID NO: 31276 - RNA, 13 nt, Artificial Sequence
  Description of Artificial Sequence: Synthetic oligonucleotide
ugccuaaaauugu

SEQ ID NO: 31277 - RNA, 12 nt, Artificial Sequence
  Description of Artificial Sequence: Synthetic oligonucleotide
agacugugagcu

SEQ ID NO: 31278 - RNA, 14 nt, Artificial Sequence
  Description of Artificial Sequence: Synthetic oligonucleotide
ugcuuuuuauuaau

SEQ ID NO: 31279 - RNA, 13 nt, Artificial Sequence
  Description of Artificial Sequence: Synthetic oligonucleotide
cucuucuuacauu

SEQ ID NO: 31280 - RNA, 15 nt, Artificial Sequence
  Description of Artificial Sequence: Synthetic oligonucleotide
cauuuguaaaaaugu

SEQ ID NO: 31281 - RNA, 15 nt, Artificial Sequence
  Description of Artificial Sequence: Synthetic oligonucleotide
aucuuaauucauauu

SEQ ID NO: 31282 - RNA, 13 nt, Artificial Sequence
  Description of Artificial Sequence: Synthetic oligonucleotide
gaacuaaucauga

SEQ ID NO: 31283 - RNA, 12 nt, Artificial Sequence
  Description of Artificial Sequence: Synthetic oligonucleotide
ucugcucuuggg

SEQ ID NO: 31284 - RNA, 13 nt, Artificial Sequence
  Description of Artificial Sequence: Synthetic oligonucleotide
caguagcuuugag

SEQ ID NO: 31285 - RNA, 14 nt, Artificial Sequence
  Description of Artificial Sequence: Synthetic oligonucleotide
cacguaauauuuca

SEQ ID NO: 31286 - RNA, 13 nt, Artificial Sequence
  Description of Artificial Sequence: Synthetic oligonucleotide
uauucucuucacu

SEQ ID NO: 31287 - RNA, 14 nt, Artificial Sequence
  Description of Artificial Sequence: Synthetic oligonucleotide
cuaaugcuaagaaa

SEQ ID NO: 31288 - RNA, 12 nt, Artificial Sequence
  Description of Artificial Sequence: Synthetic oligonucleotide
gcugaaaaucaa

SEQ ID NO: 31289 - RNA, 14 nt, Artificial Sequence
  Description of Artificial Sequence: Synthetic oligonucleotide
aauaugauuacuuu

SEQ ID NO: 31290 - RNA, 14 nt, Artificial Sequence
  Description of Artificial Sequence: Synthetic oligonucleotide
cauuuuguucuaca

SEQ ID NO: 31291 - RNA, 12 nt, Artificial Sequence
  Description of Artificial Sequence: Synthetic oligonucleotide
cccgggacucuc

SEQ ID NO: 31292 - RNA, 14 nt, Artificial Sequence
  Description of Artificial Sequence: Synthetic oligonucleotide
ccuuuaaaguaaag

SEQ ID NO: 31293 - RNA, 13 nt, Artificial Sequence
  Description of Artificial Sequence: Synthetic oligonucleotide
ucuggaagccugg

SEQ ID NO: 31294 - RNA, 14 nt, Artificial Sequence
  Description of Artificial Sequence: Synthetic oligonucleotide
aaaacaaaagagag

SEQ ID NO: 31295 - RNA, 13 nt, Artificial Sequence
  Description of Artificial Sequence: Synthetic oligonucleotide
aucaguuaugccg

SEQ ID NO: 31296 - RNA, 13 nt, Artificial Sequence
  Description of Artificial Sequence: Synthetic oligonucleotide
uaaaagaagucca

SEQ ID NO: 31297 - RNA, 11 nt, Artificial Sequence
  Description of Artificial Sequence: Synthetic oligonucleotide
aggugagguua

SEQ ID NO: 31298 - RNA, 11 nt, Artificial Sequence
  Description of Artificial Sequence: Synthetic oligonucleotide
gggaagaggac

SEQ ID NO: 31299 - RNA, 13 nt, Artificial Sequence
  Description of Artificial Sequence: Synthetic oligonucleotide
aagcaaguauugu

SEQ ID NO: 31300 - RNA, 12 nt, Artificial Sequence
  Description of Artificial Sequence: Synthetic oligonucleotide
auuguagcacuc

SEQ ID NO: 31301 - RNA, 14 nt, Artificial Sequence
  Description of Artificial Sequence: Synthetic oligonucleotide
acaaaaccacaaau

SEQ ID NO: 31302 - RNA, 12 nt, Artificial Sequence
  Description of Artificial Sequence: Synthetic oligonucleotide
uaagcccauaca

SEQ ID NO: 31303 - RNA, 11 nt, Artificial Sequence
  Description of Artificial Sequence: Synthetic oligonucleotide
agcccauacag

SEQ ID NO: 31304 - RNA, 12 nt, Artificial Sequence
  Description of Artificial Sequence: Synthetic oligonucleotide
cagaaaccuucc

SEQ ID NO: 31305 - RNA, 10 nt, Artificial Sequence
  Description of Artificial Sequence: Synthetic oligonucleotide
guauaccuac

SEQ ID NO: 31306 - RNA, 13 nt, Artificial Sequence
  Description of Artificial Sequence: Synthetic oligonucleotide
gccaguuuucgga

SEQ ID NO: 31307 - RNA, 9 nt, Artificial Sequence
  Description of Artificial Sequence: Synthetic oligonucleotide
ggaacaggg

SEQ ID NO: 31308 - RNA, 13 nt, Artificial Sequence
  Description of Artificial Sequence: Synthetic oligonucleotide
uuaacuuuccagu

SEQ ID NO: 31309 - RNA, 14 nt, Artificial Sequence
  Description of Artificial Sequence: Synthetic oligonucleotide
aaaguuugguuuug

SEQ ID NO: 31310 - RNA, 12 nt, Artificial Sequence
  Description of Artificial Sequence: Synthetic oligonucleotide
cuucccacugua

SEQ ID NO: 31311 - RNA, 13 nt, Artificial Sequence
  Description of Artificial Sequence: Synthetic oligonucleotide
ugauaccauauga

SEQ ID NO: 31312 - RNA, 11 nt, Artificial Sequence
  Description of Artificial Sequence: Synthetic oligonucleotide
aacaugggcug

SEQ ID NO: 31313 - RNA, 13 nt, Artificial Sequence
  Description of Artificial Sequence: Synthetic oligonucleotide
caacuuuuucaua

SEQ ID NO: 31314 - RNA, 12 nt, Artificial Sequence
  Description of Artificial Sequence: Synthetic oligonucleotide
caugaggccgga

SEQ ID NO: 31315 - RNA, 11 nt, Artificial Sequence
  Description of Artificial Sequence: Synthetic oligonucleotide
acugcauuugu

SEQ ID NO: 31316 - RNA, 13 nt, Artificial Sequence
  Description of Artificial Sequence: Synthetic oligonucleotide
aauguuuacuacc

SEQ ID NO: 31317 - RNA, 15 nt, Artificial Sequence
  Description of Artificial Sequence: Synthetic oligonucleotide
aauuuuuugaugaaa

SEQ ID NO: 31318 - RNA, 14 nt, Artificial Sequence
  Description of Artificial Sequence: Synthetic oligonucleotide
cagugugugaauuu

SEQ ID NO: 31319 - RNA, 13 nt, Artificial Sequence
  Description of Artificial Sequence: Synthetic oligonucleotide
gagcaauguaugu

SEQ ID NO: 31320 - RNA, 14 nt, Artificial Sequence
  Description of Artificial Sequence: Synthetic oligonucleotide
aaagcacauauaua

SEQ ID NO: 31321 - RNA, 14 nt, Artificial Sequence
  Description of Artificial Sequence: Synthetic oligonucleotide
guaauaguuucucc

SEQ ID NO: 31322 - RNA, 13 nt, Artificial Sequence
  Description of Artificial Sequence: Synthetic oligonucleotide
aguuucuccaaau

SEQ ID NO: 31323 - RNA, 13 nt, Artificial Sequence
  Description of Artificial Sequence: Synthetic oligonucleotide
uacuuccuagaaa

SEQ ID NO: 31324 - RNA, 13 nt, Artificial Sequence
  Description of Artificial Sequence: Synthetic oligonucleotide
uacaccauauaug

SEQ ID NO: 31325 - RNA, 14 nt, Artificial Sequence
  Description of Artificial Sequence: Synthetic oligonucleotide
auauaugaauggag

SEQ ID NO: 31326 - RNA, 13 nt, Artificial Sequence
  Description of Artificial Sequence: Synthetic oligonucleotide
acgagaagaagau

SEQ ID NO: 31327 - RNA, 13 nt, Artificial Sequence
  Description of Artificial Sequence: Synthetic oligonucleotide
ucauuuacaggga

SEQ ID NO: 31328 - RNA, 13 nt, Artificial Sequence
  Description of Artificial Sequence: Synthetic oligonucleotide
cauuuacagggac

SEQ ID NO: 31329 - RNA, 10 nt, Artificial Sequence
  Description of Artificial Sequence: Synthetic oligonucleotide
agggaccuga

SEQ ID NO: 31330 - RNA, 14 nt, Artificial Sequence
  Description of Artificial Sequence: Synthetic oligonucleotide
uguuugacugcauc

SEQ ID NO: 31331 - RNA, 13 nt, Artificial Sequence
  Description of Artificial Sequence: Synthetic oligonucleotide
uuugacugcaucg

SEQ ID NO: 31332 - RNA, 12 nt, Artificial Sequence
  Description of Artificial Sequence: Synthetic oligonucleotide
gaguucacaggg

SEQ ID NO: 31333 - RNA, 13 nt, Artificial Sequence
  Description of Artificial Sequence: Synthetic oligonucleotide
ggcaccucugucc

SEQ ID NO: 31334 - RNA, 15 nt, Artificial Sequence
  Description of Artificial Sequence: Synthetic oligonucleotide
gguuugucuuuuuaa

SEQ ID NO: 31335 - RNA, 14 nt, Artificial Sequence
  Description of Artificial Sequence: Synthetic oligonucleotide
uuugucuuuuuaag

SEQ ID NO: 31336 - RNA, 13 nt, Artificial Sequence
  Description of Artificial Sequence: Synthetic oligonucleotide
ccuaaagguuguc

SEQ ID NO: 31337 - RNA, 12 nt, Artificial Sequence
  Description of Artificial Sequence: Synthetic oligonucleotide
aagguugucgac

SEQ ID NO: 31338 - RNA, 13 nt, Artificial Sequence
  Description of Artificial Sequence: Synthetic oligonucleotide
accuggcaauugu

SEQ ID NO: 31339 - RNA, 12 nt, Artificial Sequence
  Description of Artificial Sequence: Synthetic oligonucleotide
aguggugcgagg

SEQ ID NO: 31340 - RNA, 13 nt, Artificial Sequence
  Description of Artificial Sequence: Synthetic oligonucleotide
agagacaugaaau

SEQ ID NO: 31341 - RNA, 13 nt, Artificial Sequence
  Description of Artificial Sequence: Synthetic oligonucleotide
auauauuucucca

SEQ ID NO: 31342 - RNA, 10 nt, Artificial Sequence
  Description of Artificial Sequence: Synthetic oligonucleotide
caugaaggcu

SEQ ID NO: 31343 - RNA, 11 nt, Artificial Sequence
  Description of Artificial Sequence: Synthetic oligonucleotide
gcuggaguggu

SEQ ID NO: 31344 - RNA, 11 nt, Artificial Sequence
  Description of Artificial Sequence: Synthetic oligonucleotide
aggaagagagg

SEQ ID NO: 31345 - RNA, 12 nt, Artificial Sequence
  Description of Artificial Sequence: Synthetic oligonucleotide
cuugcaucgggc

SEQ ID NO: 31346 - RNA, 13 nt, Artificial Sequence
  Description of Artificial Sequence: Synthetic oligonucleotide
auauccuacugug

SEQ ID NO: 31347 - RNA, 13 nt, Artificial Sequence
  Description of Artificial Sequence: Synthetic oligonucleotide
uccuacuguguaa

SEQ ID NO: 31348 - RNA, 12 nt, Artificial Sequence
  Description of Artificial Sequence: Synthetic oligonucleotide
ccuuguagugua

SEQ ID NO: 31349 - RNA, 13 nt, Artificial Sequence
  Description of Artificial Sequence: Synthetic oligonucleotide
ucuuuguugauug

SEQ ID NO: 31350 - RNA, 14 nt, Artificial Sequence
  Description of Artificial Sequence: Synthetic oligonucleotide
uuuguugauugaaa

SEQ ID NO: 31351 - RNA, 15 nt, Artificial Sequence
  Description of Artificial Sequence: Synthetic oligonucleotide
uucuuuuucuuccau

SEQ ID NO: 31352 - RNA, 13 nt, Artificial Sequence
  Description of Artificial Sequence: Synthetic oligonucleotide
aaucuuccuucua

SEQ ID NO: 31353 - RNA, 13 nt, Artificial Sequence
  Description of Artificial Sequence: Synthetic oligonucleotide
uugaaugcuucau

SEQ ID NO: 31354 - RNA, 13 nt, Artificial Sequence
  Description of Artificial Sequence: Synthetic oligonucleotide
ugaaugcuucaug

SEQ ID NO: 31355 - RNA, 13 nt, Artificial Sequence
  Description of Artificial Sequence: Synthetic oligonucleotide
aauucuacuuuga

SEQ ID NO: 31356 - RNA, 13 nt, Artificial Sequence
  Description of Artificial Sequence: Synthetic oligonucleotide
agcaacuacagac

SEQ ID NO: 31357 - RNA, 13 nt, Artificial Sequence
  Description of Artificial Sequence: Synthetic oligonucleotide
gaccaaggucaac

SEQ ID NO: 31358 - RNA, 13 nt, Artificial Sequence
  Description of Artificial Sequence: Synthetic oligonucleotide
cgacuaucucgac

SEQ ID NO: 31359 - RNA, 13 nt, Artificial Sequence
  Description of Artificial Sequence: Synthetic oligonucleotide
aaccuucccaaac

SEQ ID NO: 31360 - RNA, 14 nt, Artificial Sequence
  Description of Artificial Sequence: Synthetic oligonucleotide
ccaagcuuagaacu

SEQ ID NO: 31361 - RNA, 15 nt, Artificial Sequence
  Description of Artificial Sequence: Synthetic oligonucleotide
agcuuagaacuuuaa

SEQ ID NO: 31362 - RNA, 11 nt, Artificial Sequence
  Description of Artificial Sequence: Synthetic oligonucleotide
aagaccaccac

SEQ ID NO: 31363 - RNA, 14 nt, Artificial Sequence
  Description of Artificial Sequence: Synthetic oligonucleotide
gcgagaaauaaagu

SEQ ID NO: 31364 - RNA, 14 nt, Artificial Sequence
  Description of Artificial Sequence: Synthetic oligonucleotide
cgagaaauaaaguu

SEQ ID NO: 31365 - RNA, 12 nt, Artificial Sequence
  Description of Artificial Sequence: Synthetic oligonucleotide
aggaaaugaucc

SEQ ID NO: 31366 - RNA, 13 nt, Artificial Sequence
  Description of Artificial Sequence: Synthetic oligonucleotide
gaagaaaugaaac

SEQ ID NO: 31367 - RNA, 13 nt, Artificial Sequence
  Description of Artificial Sequence: Synthetic oligonucleotide
guuuccauccucc

SEQ ID NO: 31368 - RNA, 15 nt, Artificial Sequence
  Description of Artificial Sequence: Synthetic oligonucleotide
acugaaaaucuuuga

SEQ ID NO: 31369 - RNA, 11 nt, Artificial Sequence
  Description of Artificial Sequence: Synthetic oligonucleotide
ugccguucagg

SEQ ID NO: 31370 - RNA, 13 nt, Artificial Sequence
  Description of Artificial Sequence: Synthetic oligonucleotide
caggguccagaag

SEQ ID NO: 31371 - RNA, 13 nt, Artificial Sequence
  Description of Artificial Sequence: Synthetic oligonucleotide
ucaagacugcuug

SEQ ID NO: 31372 - RNA, 13 nt, Artificial Sequence
  Description of Artificial Sequence: Synthetic oligonucleotide
uccaugucuuugg

SEQ ID NO: 31373 - RNA, 11 nt, Artificial Sequence
  Description of Artificial Sequence: Synthetic oligonucleotide
gccugaaacac

SEQ ID NO: 31374 - RNA, 12 nt, Artificial Sequence
  Description of Artificial Sequence: Synthetic oligonucleotide
ucucuguaccuc

SEQ ID NO: 31375 - RNA, 12 nt, Artificial Sequence
  Description of Artificial Sequence: Synthetic oligonucleotide
agcaagacaaga

SEQ ID NO: 31376 - RNA, 13 nt, Artificial Sequence
  Description of Artificial Sequence: Synthetic oligonucleotide
gcaagacaagaaa

SEQ ID NO: 31377 - RNA, 12 nt, Artificial Sequence
  Description of Artificial Sequence: Synthetic oligonucleotide
uguacaagaucc

SEQ ID NO: 31378 - RNA, 12 nt, Artificial Sequence
  Description of Artificial Sequence: Synthetic oligonucleotide
cguacuugcaga

SEQ ID NO: 31379 - RNA, 13 nt, Artificial Sequence
  Description of Artificial Sequence: Synthetic oligonucleotide
cgaucgauacaga

SEQ ID NO: 31380 - RNA, 13 nt, Artificial Sequence
  Description of Artificial Sequence: Synthetic oligonucleotide
uauaaaaauaaau

SEQ ID NO: 31381 - RNA, 13 nt, Artificial Sequence
  Description of Artificial Sequence: Synthetic oligonucleotide
uaaaaauaaauau

SEQ ID NO: 31382 - RNA, 13 nt, Artificial Sequence
  Description of Artificial Sequence: Synthetic oligonucleotide
uuugacugcugug

SEQ ID NO: 31383 - RNA, 13 nt, Artificial Sequence
  Description of Artificial Sequence: Synthetic oligonucleotide
ggagaugagagac

SEQ ID NO: 31384 - RNA, 10 nt, Artificial Sequence
  Description of Artificial Sequence: Synthetic oligonucleotide
ucccacuugg

SEQ ID NO: 31385 - RNA, 10 nt, Artificial Sequence
  Description of Artificial Sequence: Synthetic oligonucleotide
guucacggcc

SEQ ID NO: 31386 - RNA, 12 nt, Artificial Sequence
  Description of Artificial Sequence: Synthetic oligonucleotide
accaucacacca

SEQ ID NO: 31387 - RNA, 10 nt, Artificial Sequence
  Description of Artificial Sequence: Synthetic oligonucleotide
cugcggguuu

SEQ ID NO: 31388 - RNA, 9 nt, Artificial Sequence
  Description of Artificial Sequence: Synthetic oligonucleotide
uccaguuug

SEQ ID NO: 31389 - RNA, 12 nt, Artificial Sequence
  Description of Artificial Sequence: Synthetic oligonucleotide
uuaaggacuucu

SEQ ID NO: 31390 - RNA, 12 nt, Artificial Sequence
  Description of Artificial Sequence: Synthetic oligonucleotide
agugggacagag

SEQ ID NO: 31391 - RNA, 13 nt, Artificial Sequence
  Description of Artificial Sequence: Synthetic oligonucleotide
auuuguuauugug

SEQ ID NO: 31392 - RNA, 12 nt, Artificial Sequence
  Description of Artificial Sequence: Synthetic oligonucleotide
ucaaaugcauuu

SEQ ID NO: 31393 - RNA, 9 nt, Artificial Sequence
  Description of Artificial Sequence: Synthetic oligonucleotide
aggaaagcc

SEQ ID NO: 31394 - RNA, 10 nt, Artificial Sequence
  Description of Artificial Sequence: Synthetic oligonucleotide
ggaaagcccu

SEQ ID NO: 31395 - RNA, 11 nt, Artificial Sequence
  Description of Artificial Sequence: Synthetic oligonucleotide
ccagcauggcc

SEQ ID NO: 31396 - RNA, 10 nt, Artificial Sequence
  Description of Artificial Sequence: Synthetic oligonucleotide
uucucccuga

SEQ ID NO: 31397 - RNA, 11 nt, Artificial Sequence
  Description of Artificial Sequence: Synthetic oligonucleotide
aagaagcccuu

SEQ ID NO: 31398 - RNA, 11 nt, Artificial Sequence
  Description of Artificial Sequence: Synthetic oligonucleotide
gaagcccuuca

SEQ ID NO: 31399 - RNA, 10 nt, Artificial Sequence
  Description of Artificial Sequence: Synthetic oligonucleotide
cccuucagcg

SEQ ID NO: 31400 - RNA, 10 nt, Artificial Sequence
  Description of Artificial Sequence: Synthetic oligonucleotide
cuucagcggc

SEQ ID NO: 31401 - RNA, 11 nt, Artificial Sequence
  Description of Artificial Sequence: Synthetic oligonucleotide
cagcggccagu

SEQ ID NO: 31402 - RNA, 11 nt, Artificial Sequence
  Description of Artificial Sequence: Synthetic oligonucleotide
gaaaagcuccg

SEQ ID NO: 31403 - RNA, 10 nt, Artificial Sequence
  Description of Artificial Sequence: Synthetic oligonucleotide
aaagcuccgg

SEQ ID NO: 31404 - RNA, 12 nt, Artificial Sequence
  Description of Artificial Sequence: Synthetic oligonucleotide
gucaacagucug

SEQ ID NO: 31405 - RNA, 12 nt, Artificial Sequence
  Description of Artificial Sequence: Synthetic oligonucleotide
agaguucaaaag

SEQ ID NO: 31406 - RNA, 12 nt, Artificial Sequence
  Description of Artificial Sequence: Synthetic oligonucleotide
gaguucaaaagc

SEQ ID NO: 31407 - RNA, 11 nt, Artificial Sequence
  Description of Artificial Sequence: Synthetic oligonucleotide
ucaaaagcccu

SEQ ID NO: 31408 - RNA, 11 nt, Artificial Sequence
  Description of Artificial Sequence: Synthetic oligonucleotide
caaaagcccuu

SEQ ID NO: 31409 - RNA, 11 nt, Artificial Sequence
  Description of Artificial Sequence: Synthetic oligonucleotide
aaagcccuuca

SEQ ID NO: 31410 - RNA, 11 nt, Artificial Sequence
  Description of Artificial Sequence: Synthetic oligonucleotide
aagcccuucag

SEQ ID NO: 31411 - RNA, 12 nt, Artificial Sequence
  Description of Artificial Sequence: Synthetic oligonucleotide
ugaagccgcucg

SEQ ID NO: 31412 - RNA, 11 nt, Artificial Sequence
  Description of Artificial Sequence: Synthetic oligonucleotide
acgccagucaa

SEQ ID NO: 31413 - RNA, 12 nt, Artificial Sequence
  Description of Artificial Sequence: Synthetic oligonucleotide
ucuuggugcgug

SEQ ID NO: 31414 - RNA, 13 nt, Artificial Sequence
  Description of Artificial Sequence: Synthetic oligonucleotide
uuggauucaucag

SEQ ID NO: 31415 - RNA, 12 nt, Artificial Sequence
  Description of Artificial Sequence: Synthetic oligonucleotide
ggaauaccuaag

SEQ ID NO: 31416 - RNA, 11 nt, Artificial Sequence
  Description of Artificial Sequence: Synthetic oligonucleotide
uuugaggcuca

SEQ ID NO: 31417 - RNA, 10 nt, Artificial Sequence
  Description of Artificial Sequence: Synthetic oligonucleotide
cuacaauugg

SEQ ID NO: 31418 - RNA, 11 nt, Artificial Sequence
  Description of Artificial Sequence: Synthetic oligonucleotide
aguuaggagcc

SEQ ID NO: 31419 - RNA, 12 nt, Artificial Sequence
  Description of Artificial Sequence: Synthetic oligonucleotide
gucaauauccac

SEQ ID NO: 31420 - RNA, 12 nt, Artificial Sequence
  Description of Artificial Sequence: Synthetic oligonucleotide
uguucagucaca

SEQ ID NO: 31421 - RNA, 11 nt, Artificial Sequence
  Description of Artificial Sequence: Synthetic oligonucleotide
cacacacauac

SEQ ID NO: 31422 - RNA, 11 nt, Artificial Sequence
  Description of Artificial Sequence: Synthetic oligonucleotide
uccuuuugcuu

SEQ ID NO: 31423 - RNA, 15 nt, Artificial Sequence
  Description of Artificial Sequence: Synthetic oligonucleotide
uuuaaaguaauuuuu

SEQ ID NO: 31424 - RNA, 12 nt, Artificial Sequence
  Description of Artificial Sequence: Synthetic oligonucleotide
aacagucaaugg

SEQ ID NO: 31425 - RNA, 12 nt, Artificial Sequence
  Description of Artificial Sequence: Synthetic oligonucleotide
cgacaaaccaau

SEQ ID NO: 31426 - RNA, 11 nt, Artificial Sequence
  Description of Artificial Sequence: Synthetic oligonucleotide
cugcuaccacu

SEQ ID NO: 31427 - RNA, 12 nt, Artificial Sequence
  Description of Artificial Sequence: Synthetic oligonucleotide
caagcggucuua

SEQ ID NO: 31428 - RNA, 12 nt, Artificial Sequence
  Description of Artificial Sequence: Synthetic oligonucleotide
gucuuaccggcu

SEQ ID NO: 31429 - RNA, 10 nt, Artificial Sequence
  Description of Artificial Sequence: Synthetic oligonucleotide
auggguuacc

SEQ ID NO: 31430 - RNA, 10 nt, Artificial Sequence
  Description of Artificial Sequence: Synthetic oligonucleotide
uuaccugcga

SEQ ID NO: 31431 - RNA, 11 nt, Artificial Sequence
  Description of Artificial Sequence: Synthetic oligonucleotide
aucuugcugag

SEQ ID NO: 31432 - RNA, 12 nt, Artificial Sequence
  Description of Artificial Sequence: Synthetic oligonucleotide
gcauaaaacagu

SEQ ID NO: 31433 - RNA, 11 nt, Artificial Sequence
  Description of Artificial Sequence: Synthetic oligonucleotide
uccuuuauccu

SEQ ID NO: 31434 - RNA, 11 nt, Artificial Sequence
  Description of Artificial Sequence: Synthetic oligonucleotide
aacgcaaguug

SEQ ID NO: 31435 - RNA, 12 nt, Artificial Sequence
  Description of Artificial Sequence: Synthetic oligonucleotide
aacugaaaccau

SEQ ID NO: 31436 - RNA, 13 nt, Artificial Sequence
  Description of Artificial Sequence: Synthetic oligonucleotide
cuuuguuaaauau

SEQ ID NO: 31437 - RNA, 13 nt, Artificial Sequence
  Description of Artificial Sequence: Synthetic oligonucleotide
uauauuaaaaguu

SEQ ID NO: 31438 - RNA, 12 nt, Artificial Sequence
  Description of Artificial Sequence: Synthetic oligonucleotide
uuuugacuuaac

SEQ ID NO: 31439 - RNA, 12 nt, Artificial Sequence
  Description of Artificial Sequence: Synthetic oligonucleotide
caaacucagcac

SEQ ID NO: 31440 - RNA, 10 nt, Artificial Sequence
  Description of Artificial Sequence: Synthetic oligonucleotide
gcugaccuca

SEQ ID NO: 31441 - RNA, 13 nt, Artificial Sequence
  Description of Artificial Sequence: Synthetic oligonucleotide
uuauucagaucgc

SEQ ID NO: 31442 - RNA, 12 nt, Artificial Sequence
  Description of Artificial Sequence: Synthetic oligonucleotide
ggguucugggau

SEQ ID NO: 31443 - RNA, 14 nt, Artificial Sequence
  Description of Artificial Sequence: Synthetic oligonucleotide
uauuggaaauuaug

SEQ ID NO: 31444 - RNA, 12 nt, Artificial Sequence
  Description of Artificial Sequence: Synthetic oligonucleotide
uggaagcacuag

SEQ ID NO: 31445 - RNA, 12 nt, Artificial Sequence
  Description of Artificial Sequence: Synthetic oligonucleotide
uuuuuaugugga

SEQ ID NO: 31446 - RNA, 11 nt, Artificial Sequence
  Description of Artificial Sequence: Synthetic oligonucleotide
gaauugguaga

SEQ ID NO: 31447 - RNA, 12 nt, Artificial Sequence
  Description of Artificial Sequence: Synthetic oligonucleotide
uagacuuggaga

SEQ ID NO: 31448 - RNA, 12 nt, Artificial Sequence
  Description of Artificial Sequence: Synthetic oligonucleotide
uacaguauucca

SEQ ID NO: 31449 - RNA, 14 nt, Artificial Sequence
  Description of Artificial Sequence: Synthetic oligonucleotide
cacugaugaauuaa

SEQ ID NO: 31450 - RNA, 11 nt, Artificial Sequence
  Description of Artificial Sequence: Synthetic oligonucleotide
cacaucaucac

SEQ ID NO: 31451 - RNA, 12 nt, Artificial Sequence
  Description of Artificial Sequence: Synthetic oligonucleotide
ucaccaaacaga

SEQ ID NO: 31452 - RNA, 11 nt, Artificial Sequence
  Description of Artificial Sequence: Synthetic oligonucleotide
gaacaugaugg

SEQ ID NO: 31453 - RNA, 11 nt, Artificial Sequence
  Description of Artificial Sequence: Synthetic oligonucleotide
auguagacugc

SEQ ID NO: 31454 - RNA, 12 nt, Artificial Sequence
  Description of Artificial Sequence: Synthetic oligonucleotide
gaucuauuuaug

SEQ ID NO: 31455 - RNA, 11 nt, Artificial Sequence
  Description of Artificial Sequence: Synthetic oligonucleotide
cacuauuauca

SEQ ID NO: 31456 - RNA, 10 nt, Artificial Sequence
  Description of Artificial Sequence: Synthetic oligonucleotide
ucaguucugc

SEQ ID NO: 31457 - RNA, 12 nt, Artificial Sequence
  Description of Artificial Sequence: Synthetic oligonucleotide
gauuaaaccuac

SEQ ID NO: 31458 - RNA, 12 nt, Artificial Sequence
  Description of Artificial Sequence: Synthetic oligonucleotide
uaaaauccuucu

SEQ ID NO: 31459 - RNA, 11 nt, Artificial Sequence
  Description of Artificial Sequence: Synthetic oligonucleotide
augcuguagac

SEQ ID NO: 31460 - RNA, 12 nt, Artificial Sequence
  Description of Artificial Sequence: Synthetic oligonucleotide
ugauaggaauag

SEQ ID NO: 31461 - RNA, 10 nt, Artificial Sequence
  Description of Artificial Sequence: Synthetic oligonucleotide
auggcccuga

SEQ ID NO: 31462 - RNA, 10 nt, Artificial Sequence
  Description of Artificial Sequence: Synthetic oligonucleotide
uccucaagca

SEQ ID NO: 31463 - RNA, 9 nt, Artificial Sequence
  Description of Artificial Sequence: Synthetic oligonucleotide
uucagccca

SEQ ID NO: 31464 - RNA, 10 nt, Artificial Sequence
  Description of Artificial Sequence: Synthetic oligonucleotide
cugcugaacc

SEQ ID NO: 31465 - RNA, 11 nt, Artificial Sequence
  Description of Artificial Sequence: Synthetic oligonucleotide
aguucucuuca

SEQ ID NO: 31466 - RNA, 10 nt, Artificial Sequence
  Description of Artificial Sequence: Synthetic oligonucleotide
cagccuagag

SEQ ID NO: 31467 - RNA, 12 nt, Artificial Sequence
  Description of Artificial Sequence: Synthetic oligonucleotide
ucugugaagugu

SEQ ID NO: 31468 - RNA, 13 nt, Artificial Sequence
  Description of Artificial Sequence: Synthetic oligonucleotide
gagaaaauuucaa

SEQ ID NO: 31469 - RNA, 10 nt, Artificial Sequence
  Description of Artificial Sequence: Synthetic oligonucleotide
auccuccuga

SEQ ID NO: 31470 - RNA, 11 nt, Artificial Sequence
  Description of Artificial Sequence: Synthetic oligonucleotide
ugacaucauau

SEQ ID NO: 31471 - RNA, 12 nt, Artificial Sequence
  Description of Artificial Sequence: Synthetic oligonucleotide
aucuucaucaua

SEQ ID NO: 31472 - RNA, 12 nt, Artificial Sequence
  Description of Artificial Sequence: Synthetic oligonucleotide
acuagcuauuaa

SEQ ID NO: 31473 - RNA, 13 nt, Artificial Sequence
  Description of Artificial Sequence: Synthetic oligonucleotide
cucuacuaaaaau

SEQ ID NO: 31474 - RNA, 11 nt, Artificial Sequence
  Description of Artificial Sequence: Synthetic oligonucleotide
cuaucucgccu

SEQ ID NO: 31475 - RNA, 12 nt, Artificial Sequence
  Description of Artificial Sequence: Synthetic oligonucleotide
uucgguccaguu

SEQ ID NO: 31476 - RNA, 10 nt, Artificial Sequence
  Description of Artificial Sequence: Synthetic oligonucleotide
auguagccgc

SEQ ID NO: 31477 - RNA, 11 nt, Artificial Sequence
  Description of Artificial Sequence: Synthetic oligonucleotide
gaggagacuug

SEQ ID NO: 31478 - RNA, 11 nt, Artificial Sequence
  Description of Artificial Sequence: Synthetic oligonucleotide
aguagugagga

SEQ ID NO: 31479 - RNA, 13 nt, Artificial Sequence
  Description of Artificial Sequence: Synthetic oligonucleotide
agaugaguacaaa

SEQ ID NO: 31480 - RNA, 12 nt, Artificial Sequence
  Description of Artificial Sequence: Synthetic oligonucleotide
uuguuaaugggc

SEQ ID NO: 31481 - RNA, 12 nt, Artificial Sequence
  Description of Artificial Sequence: Synthetic oligonucleotide
uuuuaauuuauu

SEQ ID NO: 31482 - RNA, 11 nt, Artificial Sequence
  Description of Artificial Sequence: Synthetic oligonucleotide
auuuaaauaug

SEQ ID NO: 31483 - RNA, 12 nt, Artificial Sequence
  Description of Artificial Sequence: Synthetic oligonucleotide
auccuuuguuuc

SEQ ID NO: 31484 - RNA, 13 nt, Artificial Sequence
  Description of Artificial Sequence: Synthetic oligonucleotide
gucuaaguguuug

SEQ ID NO: 31485 - RNA, 11 nt, Artificial Sequence
  Description of Artificial Sequence: Synthetic oligonucleotide
ccugugacaaa

SEQ ID NO: 31486 - RNA, 12 nt, Artificial Sequence
  Description of Artificial Sequence: Synthetic oligonucleotide
caggcugaauua

SEQ ID NO: 31487 - RNA, 13 nt, Artificial Sequence
  Description of Artificial Sequence: Synthetic oligonucleotide
ucauucuuacaau

SEQ ID NO: 31488 - RNA, 14 nt, Artificial Sequence
  Description of Artificial Sequence: Synthetic oligonucleotide
cauucuuacaauug

SEQ ID NO: 31489 - RNA, 11 nt, Artificial Sequence
  Description of Artificial Sequence: Synthetic oligonucleotide
agagaguguac

SEQ ID NO: 31490 - RNA, 11 nt, Artificial Sequence
  Description of Artificial Sequence: Synthetic oligonucleotide
gaacucagcag

SEQ ID NO: 31491 - RNA, 12 nt, Artificial Sequence
  Description of Artificial Sequence: Synthetic oligonucleotide
uuauuuucagua

SEQ ID NO: 31492 - RNA, 11 nt, Artificial Sequence
  Description of Artificial Sequence: Synthetic oligonucleotide
cuuaaauggaa

SEQ ID NO: 31493 - RNA, 12 nt, Artificial Sequence
  Description of Artificial Sequence: Synthetic oligonucleotide
gccuaaaauugu

SEQ ID NO: 31494 - RNA, 12 nt, Artificial Sequence
  Description of Artificial Sequence: Synthetic oligonucleotide
acuaacaucugg

SEQ ID NO: 31495 - RNA, 11 nt, Artificial Sequence
  Description of Artificial Sequence: Synthetic oligonucleotide
gacugugagcu

SEQ ID NO: 31496 - RNA, 13 nt, Artificial Sequence
  Description of Artificial Sequence: Synthetic oligonucleotide
gcuuuuuauuaau

SEQ ID NO: 31497 - RNA, 12 nt, Artificial Sequence
  Description of Artificial Sequence: Synthetic oligonucleotide
ucuucuuacauu

SEQ ID NO: 31498 - RNA, 14 nt, Artificial Sequence
  Description of Artificial Sequence: Synthetic oligonucleotide
auuuguaaaaaugu

SEQ ID NO: 31499 - RNA, 14 nt, Artificial Sequence
  Description of Artificial Sequence: Synthetic oligonucleotide
ucuuaauucauauu

SEQ ID NO: 31500 - RNA, 12 nt, Artificial Sequence
  Description of Artificial Sequence: Synthetic oligonucleotide
aacuaaucauga

SEQ ID NO: 31501 - RNA, 11 nt, Artificial Sequence
  Description of Artificial Sequence: Synthetic oligonucleotide
cugcucuuggg

SEQ ID NO: 31502 - RNA, 12 nt, Artificial Sequence
  Description of Artificial Sequence: Synthetic oligonucleotide
aguagcuuugag

SEQ ID NO: 31503 - RNA, 13 nt, Artificial Sequence
  Description of Artificial Sequence: Synthetic oligonucleotide
acguaauauuuca

SEQ ID NO: 31504 - RNA, 12 nt, Artificial Sequence
  Description of Artificial Sequence: Synthetic oligonucleotide
auucucuucacu

SEQ ID NO: 31505 - RNA, 13 nt, Artificial Sequence
  Description of Artificial Sequence: Synthetic oligonucleotide
uaaugcuaagaaa

SEQ ID NO: 31506 - RNA, 11 nt, Artificial Sequence
  Description of Artificial Sequence: Synthetic oligonucleotide
cugaaaaucaa

SEQ ID NO: 31507 - RNA, 13 nt, Artificial Sequence
  Description of Artificial Sequence: Synthetic oligonucleotide
auaugauuacuuu

SEQ ID NO: 31508 - RNA, 13 nt, Artificial Sequence
  Description of Artificial Sequence: Synthetic oligonucleotide
auuuuguucuaca

SEQ ID NO: 31509 - RNA, 11 nt, Artificial Sequence
  Description of Artificial Sequence: Synthetic oligonucleotide
ccgggacucuc

SEQ ID NO: 31510 - RNA, 13 nt, Artificial Sequence
  Description of Artificial Sequence: Synthetic oligonucleotide
cuuuaaaguaaag

SEQ ID NO: 31511 - RNA, 12 nt, Artificial Sequence
  Description of Artificial Sequence: Synthetic oligonucleotide
cuggaagccugg

SEQ ID NO: 31512 - RNA, 13 nt, Artificial Sequence
  Description of Artificial Sequence: Synthetic oligonucleotide
aaacaaaagagag

SEQ ID NO: 31513 - RNA, 12 nt, Artificial Sequence
  Description of Artificial Sequence: Synthetic oligonucleotide
ucaguuaugccg

SEQ ID NO: 31514 - RNA, 12 nt, Artificial Sequence
  Description of Artificial Sequence: Synthetic oligonucleotide
aaaagaagucca

SEQ ID NO: 31515 - RNA, 10 nt, Artificial Sequence
  Description of Artificial Sequence: Synthetic oligonucleotide
ggugagguua

SEQ ID NO: 31516 - RNA, 10 nt, Artificial Sequence
  Description of Artificial Sequence: Synthetic oligonucleotide
ggaagaggac

SEQ ID NO: 31517 - RNA, 12 nt, Artificial Sequence
  Description of Artificial Sequence: Synthetic oligonucleotide
agcaaguauugu

SEQ ID NO: 31518 - RNA, 11 nt, Artificial Sequence
  Description of Artificial Sequence: Synthetic oligonucleotide
uuguagcacuc

SEQ ID NO: 31519 - RNA, 13 nt, Artificial Sequence
  Description of Artificial Sequence: Synthetic oligonucleotide
caaaaccacaaau

SEQ ID NO: 31520 - RNA, 11 nt, Artificial Sequence
  Description of Artificial Sequence: Synthetic oligonucleotide
aagcccauaca

SEQ ID NO: 31521 - RNA, 10 nt, Artificial Sequence
  Description of Artificial Sequence: Synthetic oligonucleotide
gcccauacag

SEQ ID NO: 31522 - RNA, 11 nt, Artificial Sequence
  Description of Artificial Sequence: Synthetic oligonucleotide
agaaaccuucc

SEQ ID NO: 31523 - RNA, 9 nt, Artificial Sequence
  Description of Artificial Sequence: Synthetic oligonucleotide
uauaccuac

SEQ ID NO: 31524 - RNA, 12 nt, Artificial Sequence
  Description of Artificial Sequence: Synthetic oligonucleotide
ccaguuuucgga

SEQ ID NO: 31525 - RNA, 8 nt, Artificial Sequence
  Description of Artificial Sequence: Synthetic oligonucleotide
gaacaggg

SEQ ID NO: 31526 - RNA, 12 nt, Artificial Sequence
  Description of Artificial Sequence: Synthetic oligonucleotide
uaacuuuccagu

SEQ ID NO: 31527 - RNA, 13 nt, Artificial Sequence
  Description of Artificial Sequence: Synthetic oligonucleotide
aaguuugguuuug

SEQ ID NO: 31528 - RNA, 11 nt, Artificial Sequence
  Description of Artificial Sequence: Synthetic oligonucleotide
uucccacugua

SEQ ID NO: 31529 - RNA, 12 nt, Artificial Sequence
  Description of Artificial Sequence: Synthetic oligonucleotide
gauaccauauga

SEQ ID NO: 31530 - RNA, 10 nt, Artificial Sequence
  Description of Artificial Sequence: Synthetic oligonucleotide
acaugggcug

SEQ ID NO: 31531 - RNA, 12 nt, Artificial Sequence
  Description of Artificial Sequence: Synthetic oligonucleotide
aacuuuuucaua

SEQ ID NO: 31532 - RNA, 11 nt, Artificial Sequence
  Description of Artificial Sequence: Synthetic oligonucleotide
augaggccgga

SEQ ID NO: 31533 - RNA, 10 nt, Artificial Sequence
  Description of Artificial Sequence: Synthetic oligonucleotide
cugcauuugu

SEQ ID NO: 31534 - RNA, 12 nt, Artificial Sequence
  Description of Artificial Sequence: Synthetic oligonucleotide
auguuuacuacc

SEQ ID NO: 31535 - RNA, 14 nt, Artificial Sequence
  Description of Artificial Sequence: Synthetic oligonucleotide
auuuuuugaugaaa

SEQ ID NO: 31536 - RNA, 13 nt, Artificial Sequence
  Description of Artificial Sequence: Synthetic oligonucleotide
agugugugaauuu

SEQ ID NO: 31537 - RNA, 12 nt, Artificial Sequence
  Description of Artificial Sequence: Synthetic oligonucleotide
agcaauguaugu

SEQ ID NO: 31538 - RNA, 13 nt, Artificial Sequence
  Description of Artificial Sequence: Synthetic oligonucleotide
aagcacauauaua

SEQ ID NO: 31539 - RNA, 13 nt, Artificial Sequence
  Description of Artificial Sequence: Synthetic oligonucleotide
uaauaguuucucc

SEQ ID NO: 31540 - RNA, 12 nt, Artificial Sequence
  Description of Artificial Sequence: Synthetic oligonucleotide
guuucuccaaau

SEQ ID NO: 31541 - RNA, 12 nt, Artificial Sequence
  Description of Artificial Sequence: Synthetic oligonucleotide
acuuccuagaaa

SEQ ID NO: 31542 - RNA, 12 nt, Artificial Sequence
  Description of Artificial Sequence: Synthetic oligonucleotide
acaccauauaug

SEQ ID NO: 31543 - RNA, 13 nt, Artificial Sequence
  Description of Artificial Sequence: Synthetic oligonucleotide
uauaugaauggag

SEQ ID NO: 31544 - RNA, 12 nt, Artificial Sequence
  Description of Artificial Sequence: Synthetic oligonucleotide
cauuuacaggga

SEQ ID NO: 31545 - RNA, 12 nt, Artificial Sequence
  Description of Artificial Sequence: Synthetic oligonucleotide
auuuacagggac

SEQ ID NO: 31546 - RNA, 9 nt, Artificial Sequence
  Description of Artificial Sequence: Synthetic oligonucleotide
gggaccuga

SEQ ID NO: 31547 - RNA, 13 nt, Artificial Sequence
  Description of Artificial Sequence: Synthetic oligonucleotide
guuugacugcauc

SEQ ID NO: 31548 - RNA, 12 nt, Artificial Sequence
  Description of Artificial Sequence: Synthetic oligonucleotide
uugacugcaucg

SEQ ID NO: 31549 - RNA, 11 nt, Artificial Sequence
  Description of Artificial Sequence: Synthetic oligonucleotide
aguucacaggg

SEQ ID NO: 31550 - RNA, 12 nt, Artificial Sequence
  Description of Artificial Sequence: Synthetic oligonucleotide
gcaccucugucc

SEQ ID NO: 31551 - RNA, 14 nt, Artificial Sequence
  Description of Artificial Sequence: Synthetic oligonucleotide
guuugucuuuuuaa

SEQ ID NO: 31552 - RNA, 13 nt, Artificial Sequence
  Description of Artificial Sequence: Synthetic oligonucleotide
uugucuuuuuaag

SEQ ID NO: 31553 - RNA, 12 nt, Artificial Sequence
  Description of Artificial Sequence: Synthetic oligonucleotide
cuaaagguuguc

SEQ ID NO: 31554 - RNA, 11 nt, Artificial Sequence
  Description of Artificial Sequence: Synthetic oligonucleotide
agguugucgac

SEQ ID NO: 31555 - RNA, 12 nt, Artificial Sequence
  Description of Artificial Sequence: Synthetic oligonucleotide
ccuggcaauugu

SEQ ID NO: 31556 - RNA, 11 nt, Artificial Sequence
  Description of Artificial Sequence: Synthetic oligonucleotide
guggugcgagg

SEQ ID NO: 31557 - RNA, 12 nt, Artificial Sequence
  Description of Artificial Sequence: Synthetic oligonucleotide
gagacaugaaau

SEQ ID NO: 31558 - RNA, 12 nt, Artificial Sequence
  Description of Artificial Sequence: Synthetic oligonucleotide
uauauuucucca

SEQ ID NO: 31559 - RNA, 9 nt, Artificial Sequence
  Description of Artificial Sequence: Synthetic oligonucleotide
augaaggcu

SEQ ID NO: 31560 - RNA, 10 nt, Artificial Sequence
  Description of Artificial Sequence: Synthetic oligonucleotide
cuggaguggu

SEQ ID NO: 31561 - RNA, 10 nt, Artificial Sequence
  Description of Artificial Sequence: Synthetic oligonucleotide
ggaagagagg

SEQ ID NO: 31562 - RNA, 11 nt, Artificial Sequence
  Description of Artificial Sequence: Synthetic oligonucleotide
uugcaucgggc

SEQ ID NO: 31563 - RNA, 12 nt, Artificial Sequence
  Description of Artificial Sequence: Synthetic oligonucleotide
uauccuacugug

SEQ ID NO: 31564 - RNA, 12 nt, Artificial Sequence
  Description of Artificial Sequence: Synthetic oligonucleotide
ccuacuguguaa

SEQ ID NO: 31565 - RNA, 11 nt, Artificial Sequence
  Description of Artificial Sequence: Synthetic oligonucleotide
cuuguagugua

SEQ ID NO: 31566 - RNA, 12 nt, Artificial Sequence
  Description of Artificial Sequence: Synthetic oligonucleotide
cuuuguugauug

SEQ ID NO: 31567 - RNA, 13 nt, Artificial Sequence
  Description of Artificial Sequence: Synthetic oligonucleotide
uuguugauugaaa

SEQ ID NO: 31568 - RNA, 14 nt, Artificial Sequence
  Description of Artificial Sequence: Synthetic oligonucleotide
ucuuuuucuuccau

SEQ ID NO: 31569 - RNA, 12 nt, Artificial Sequence
  Description of Artificial Sequence: Synthetic oligonucleotide
aucuuccuucua

SEQ ID NO: 31570 - RNA, 12 nt, Artificial Sequence
  Description of Artificial Sequence: Synthetic oligonucleotide
ugaaugcuucau

SEQ ID NO: 31571 - RNA, 12 nt, Artificial Sequence
  Description of Artificial Sequence: Synthetic oligonucleotide
gaaugcuucaug

SEQ ID NO: 31572 - RNA, 12 nt, Artificial Sequence
  Description of Artificial Sequence: Synthetic oligonucleotide
auucuacuuuga

SEQ ID NO: 31573 - RNA, 12 nt, Artificial Sequence
  Description of Artificial Sequence: Synthetic oligonucleotide
gcaacuacagac

SEQ ID NO: 31574 - RNA, 12 nt, Artificial Sequence
  Description of Artificial Sequence: Synthetic oligonucleotide
accaaggucaac

SEQ ID NO: 31575 - RNA, 12 nt, Artificial Sequence
  Description of Artificial Sequence: Synthetic oligonucleotide
gacuaucucgac

SEQ ID NO: 31576 - RNA, 12 nt, Artificial Sequence
  Description of Artificial Sequence: Synthetic oligonucleotide
accuucccaaac

SEQ ID NO: 31577 - RNA, 13 nt, Artificial Sequence
  Description of Artificial Sequence: Synthetic oligonucleotide
caagcuuagaacu

SEQ ID NO: 31578 - RNA, 14 nt, Artificial Sequence
  Description of Artificial Sequence: Synthetic oligonucleotide
gcuuagaacuuuaa

SEQ ID NO: 31579 - RNA, 13 nt, Artificial Sequence
  Description of Artificial Sequence: Synthetic oligonucleotide
aacuuuaagcaac

SEQ ID NO: 31580 - RNA, 10 nt, Artificial Sequence
  Description of Artificial Sequence: Synthetic oligonucleotide
agaccaccac

SEQ ID NO: 31581 - RNA, 13 nt, Artificial Sequence
  Description of Artificial Sequence: Synthetic oligonucleotide
cgagaaauaaagu

SEQ ID NO: 31582 - RNA, 13 nt, Artificial Sequence
  Description of Artificial Sequence: Synthetic oligonucleotide
gagaaauaaaguu

SEQ ID NO: 31583 - RNA, 11 nt, Artificial Sequence
  Description of Artificial Sequence: Synthetic oligonucleotide
ggaaaugaucc

SEQ ID NO: 31584 - RNA, 12 nt, Artificial Sequence
  Description of Artificial Sequence: Synthetic oligonucleotide
aagaaaugaaac

SEQ ID NO: 31585 - RNA, 12 nt, Artificial Sequence
  Description of Artificial Sequence: Synthetic oligonucleotide
uuuccauccucc

SEQ ID NO: 31586 - RNA, 14 nt, Artificial Sequence
  Description of Artificial Sequence: Synthetic oligonucleotide
cugaaaaucuuuga

SEQ ID NO: 31587 - RNA, 10 nt, Artificial Sequence
  Description of Artificial Sequence: Synthetic oligonucleotide
gccguucagg

SEQ ID NO: 31588 - RNA, 12 nt, Artificial Sequence
  Description of Artificial Sequence: Synthetic oligonucleotide
aggguccagaag

SEQ ID NO: 31589 - RNA, 12 nt, Artificial Sequence
  Description of Artificial Sequence: Synthetic oligonucleotide
caagacugcuug

SEQ ID NO: 31590 - RNA, 12 nt, Artificial Sequence
  Description of Artificial Sequence: Synthetic oligonucleotide
ccaugucuuugg

SEQ ID NO: 31591 - RNA, 10 nt, Artificial Sequence
  Description of Artificial Sequence: Synthetic oligonucleotide
ccugaaacac

SEQ ID NO: 31592 - RNA, 11 nt, Artificial Sequence
  Description of Artificial Sequence: Synthetic oligonucleotide
cucuguaccuc

SEQ ID NO: 31593 - RNA, 11 nt, Artificial Sequence
  Description of Artificial Sequence: Synthetic oligonucleotide
gcaagacaaga

SEQ ID NO: 31594 - RNA, 12 nt, Artificial Sequence
  Description of Artificial Sequence: Synthetic oligonucleotide
caagacaagaaa

SEQ ID NO: 31595 - RNA, 11 nt, Artificial Sequence
  Description of Artificial Sequence: Synthetic oligonucleotide
guacaagaucc

SEQ ID NO: 31596 - RNA, 11 nt, Artificial Sequence
  Description of Artificial Sequence: Synthetic oligonucleotide
guacuugcaga

SEQ ID NO: 31597 - RNA, 12 nt, Artificial Sequence
  Description of Artificial Sequence: Synthetic oligonucleotide
gaucgauacaga

SEQ ID NO: 31598 - RNA, 12 nt, Artificial Sequence
  Description of Artificial Sequence: Synthetic oligonucleotide
auaaaaauaaau

SEQ ID NO: 31599 - RNA, 12 nt, Artificial Sequence
  Description of Artificial Sequence: Synthetic oligonucleotide
aaaaauaaauau

SEQ ID NO: 31600 - RNA, 12 nt, Artificial Sequence
  Description of Artificial Sequence: Synthetic oligonucleotide
uugacugcugug

SEQ ID NO: 31601 - RNA, 12 nt, Artificial Sequence
  Description of Artificial Sequence: Synthetic oligonucleotide
gagaugagagac

SEQ ID NO: 31602 - RNA, 9 nt, Artificial Sequence
  Description of Artificial Sequence: Synthetic oligonucleotide
cccacuugg

SEQ ID NO: 31603 - RNA, 2446 nt, Homo sapiens
uccauaaagggguugcgggggccgcgcucucuucugggagggcagcggccaccggcgaggaacacggcgcgaugcagguucagugccagcagagcccagugcuggcaggcagcgccacuuuggucgcccuuggggcacuggccuuguacgucgcgaagcccuccggcuacgggaagcacacggagagccugaagccggcggcuacccgccugccagcccgcgccgccugguuccugcaggagcugccuuccuucgcggugcccgcggggauccucgcccggcagccccucucccucuucgggccaccugggacgguacuucugggccucuucugccuacauuacuuccacaggacauuuguguacucacugcucaaucgagggaggccuuauccagcuauacucauucucagaggcacugccuucugcacuggaaauggaguccuucaaggcuacuaucugauuuacugugcugaauacccugaugggugguacacagacauacgguuuagcuugggugucuucuuauuuauuuugggaaugggaauaaacauucauagugacuauauauugcgccagcucaggaagccuggagaaaucagcuacaggauuccacaagguggcuuguuuacguauguuucuggagccaauuuccucggugagaucauugaauggaucggcuaugcccuggccacuuggucccucccagcacuugcauuugcauuuuucucacuuuguuuccuugggcugcgagcuuuucaccaccauagguucuaccucaagauguuugaggacuaccccaaaucucggaaagcccuuauuccauucaucuuuuaaaggaaccaaauuaaaaaggagcagagcucccacaaugcugaugaaaacugucaagcugcugaaacuguaauuuucaugauauaauagucccguauauauguaauaguaggucuccuggcguucugccagcuggccuggggauucugaguggugucugcuuagaguuuacuccuacccuuccagggaccccuauccugauccccaacugaagcuucaaaaagccacuuuuccaaauggcgacaguugcuucuuagcuauugcucugagaaaguacaaacuucuccuaugucuuucaccgggcaauccaaguacauguggcuucauacccacucccugucaaugcaggacaacucuguaaucaagaauuuuuugacuugaaggcaguacuuauagaccuuauuaaagguaugcauuuuauacauguaacagaguagcagaaauuuaaacucugaagccacaaagacccagagcaaacccacucccaaaugaaaaccccagucauggcuuccuuuuucuugguuaauuaggaaagaugagaaauuauuagguagaccuugaauacaggagcccucuccucauagugcugaaaagauacugaugcauugaccucauuucaaauuugugcagugucuuaguugaugagugccucuguuuuccagaagauuucacaauccccggaaaacugguauggcuauucuugaaggccagguuuuaauaaccacaaacaaaaaggcaugaaccuggguggcuuaugagagaguagagaacaacaugacccuggauggcuacuaagaggauagagaacaguuuuacaauagacauugcaaacucucauguuuuuggaaacuaguggcaauauccaaauaaugaguaguguaaaacaaagagaauuaaugaugagguuacaugcugcuugccuccaccagauguccacaacaauaugaaguacagcagaagccccaagcaacuuuccuuuccuggagcuucuuccuuguaguucucaggaccuguucaagaaggugucuccuaggggcagccugaaugccucccucaaaggaccugcaggcagagacugaaaauugcagacagaggggcacgucugggcagaaaaccuguuuuguuuggcucagacauauaguuuuuuuuuuuuuuacaaaguuucaaaaacuuaaaaaucaggagauuccuucauaaaacucuagcauucuaguuucauuuaaaaaguuggaggaucugaacauacagagcccacauuuccacaccagaacuggaacuacguagcuaguaagcauuugaguuugcaaacucuugugaaggggucaccccagcaugagugcugagauauggacucucuaaggaaggggccgaacgcuuguaauuggaauacauggaaauauuugucuucucaggccuauguuugcggaaugcauugucaauauuuagcaaacuguuuugacaaaugagcaccagugguacuaagcacagaaacucacuauauaagucacauaggaaacuugaaaggucugaggaugauguagauuacugaaaaaugcaaauugcaaucauauaaauaaguguuuuuguuguucauuaaauaccuuuaaaucaug

SEQ ID NO: 31604 - RNA, 19 nt, Artificial Sequence
  Description of Artificial Sequence: Synthetic oligonucleotide
uccauaaagggguugcggg

SEQ ID NO: 31605 - RNA, 19 nt, Artificial Sequence
  Description of Artificial Sequence: Synthetic oligonucleotide
gggccgcgcucucuucugg

SEQ ID NO: 31606 - RNA, 19 nt, Artificial Sequence
  Description of Artificial Sequence: Synthetic oligonucleotide
ggagggcagcggccaccgg

SEQ ID NO: 31607 - RNA, 19 nt, Artificial Sequence
  Description of Artificial Sequence: Synthetic oligonucleotide
gcgaggaacacggcgcgau

SEQ ID NO: 31608 - RNA, 19 nt, Artificial Sequence
  Description of Artificial Sequence: Synthetic oligonucleotide
ugcagguucagugccagca

SEQ ID NO: 31609 - RNA, 19 nt, Artificial Sequence
  Description of Artificial Sequence: Synthetic oligonucleotide
agagcccagugcuggcagg

SEQ ID NO: 31610 - RNA, 19 nt, Artificial Sequence
  Description of Artificial Sequence: Synthetic oligonucleotide
gcagcgccacuuuggucgc

SEQ ID NO: 31611 - RNA, 19 nt, Artificial Sequence
  Description of Artificial Sequence: Synthetic oligonucleotide
cccuuggggcacuggccuu

SEQ ID NO: 31612 - RNA, 19 nt, Artificial Sequence
  Description of Artificial Sequence: Synthetic oligonucleotide
uguacgucgcgaagcccuc

SEQ ID NO: 31613 - RNA, 19 nt, Artificial Sequence
  Description of Artificial Sequence: Synthetic oligonucleotide
ccggcuacgggaagcacac

SEQ ID NO: 31614 - RNA, 19 nt, Artificial Sequence
  Description of Artificial Sequence: Synthetic oligonucleotide
cggagagccugaagccggc

SEQ ID NO: 31615 - RNA, 19 nt, Artificial Sequence
  Description of Artificial Sequence: Synthetic oligonucleotide
cggcuacccgccugccagc

SEQ ID NO: 31616 - RNA, 19 nt, Artificial Sequence
  Description of Artificial Sequence: Synthetic oligonucleotide
cccgcgccgccugguuccu

SEQ ID NO: 31617 - RNA, 19 nt, Artificial Sequence
  Description of Artificial Sequence: Synthetic oligonucleotide
ugcaggagcugccuuccuu

SEQ ID NO: 31618 - RNA, 19 nt, Artificial Sequence
  Description of Artificial Sequence: Synthetic oligonucleotide
ucgcggugcccgcggggau

SEQ ID NO: 31619 - RNA, 19 nt, Artificial Sequence
  Description of Artificial Sequence: Synthetic oligonucleotide
uccucgcccggcagccccu

SEQ ID NO: 31620 - RNA, 19 nt, Artificial Sequence
  Description of Artificial Sequence: Synthetic oligonucleotide
ucucccucuucgggccacc

SEQ ID NO: 31621 - RNA, 19 nt, Artificial Sequence
  Description of Artificial Sequence: Synthetic oligonucleotide
cugggacgguacuucuggg

SEQ ID NO: 31622 - RNA, 19 nt, Artificial Sequence
  Description of Artificial Sequence: Synthetic oligonucleotide
gccucuucugccuacauua

SEQ ID NO: 31623 - RNA, 19 nt, Artificial Sequence
  Description of Artificial Sequence: Synthetic oligonucleotide
acuuccacaggacauuugu

SEQ ID NO: 31624 - RNA, 19 nt, Artificial Sequence
  Description of Artificial Sequence: Synthetic oligonucleotide
uguacucacugcucaaucg

SEQ ID NO: 31625 - RNA, 19 nt, Artificial Sequence
  Description of Artificial Sequence: Synthetic oligonucleotide
gagggaggccuuauccagc

SEQ ID NO: 31626 - RNA, 19 nt, Artificial Sequence
  Description of Artificial Sequence: Synthetic oligonucleotide
cuauacucauucucagagg

SEQ ID NO: 31627 - RNA, 19 nt, Artificial Sequence
  Description of Artificial Sequence: Synthetic oligonucleotide
gcacugccuucugcacugg

SEQ ID NO: 31628 - RNA, 19 nt, Artificial Sequence
  Description of Artificial Sequence: Synthetic oligonucleotide
gaaauggaguccuucaagg

SEQ ID NO: 31629 - RNA, 19 nt, Artificial Sequence
  Description of Artificial Sequence: Synthetic oligonucleotide
gcuacuaucugauuuacug

SEQ ID NO: 31630 - RNA, 19 nt, Artificial Sequence
  Description of Artificial Sequence: Synthetic oligonucleotide
gugcugaauacccugaugg

SEQ ID NO: 31631 - RNA, 19 nt, Artificial Sequence
  Description of Artificial Sequence: Synthetic oligonucleotide
ggugguacacagacauacg

SEQ ID NO: 31632 - RNA, 19 nt, Artificial Sequence
  Description of Artificial Sequence: Synthetic oligonucleotide
gguuuagcuugggugucuu

SEQ ID NO: 31633 - RNA, 19 nt, Artificial Sequence
  Description of Artificial Sequence: Synthetic oligonucleotide
ucuuauuuauuuugggaau

SEQ ID NO: 31634 - RNA, 19 nt, Artificial Sequence
  Description of Artificial Sequence: Synthetic oligonucleotide
ugggaauaaacauucauag

SEQ ID NO: 31635 - RNA, 19 nt, Artificial Sequence
  Description of Artificial Sequence: Synthetic oligonucleotide
gugacuauauauugcgcca

SEQ ID NO: 31636 - RNA, 19 nt, Artificial Sequence
  Description of Artificial Sequence: Synthetic oligonucleotide
agcucaggaagccuggaga

SEQ ID NO: 31637 - RNA, 19 nt, Artificial Sequence
  Description of Artificial Sequence: Synthetic oligonucleotide
aaaucagcuacaggauucc

SEQ ID NO: 31638 - RNA, 19 nt, Artificial Sequence
  Description of Artificial Sequence: Synthetic oligonucleotide
cacaagguggcuuguuuac

SEQ ID NO: 31639 - RNA, 19 nt, Artificial Sequence
  Description of Artificial Sequence: Synthetic oligonucleotide
cguauguuucuggagccaa

SEQ ID NO: 31640 - RNA, 19 nt, Artificial Sequence
  Description of Artificial Sequence: Synthetic oligonucleotide
auuuccucggugagaucau

SEQ ID NO: 31641 - RNA, 19 nt, Artificial Sequence
  Description of Artificial Sequence: Synthetic oligonucleotide
uugaauggaucggcuaugc

SEQ ID NO: 31642 - RNA, 19 nt, Artificial Sequence
  Description of Artificial Sequence: Synthetic oligonucleotide
cccuggccacuuggucccu

SEQ ID NO: 31643 - RNA, 19 nt, Artificial Sequence
  Description of Artificial Sequence: Synthetic oligonucleotide
ucccagcacuugcauuugc

SEQ ID NO: 31644 - RNA, 19 nt, Artificial Sequence
  Description of Artificial Sequence: Synthetic oligonucleotide
cauuuuucucacuuuguuu

SEQ ID NO: 31645 - RNA, 19 nt, Artificial Sequence
  Description of Artificial Sequence: Synthetic oligonucleotide
uccuugggcugcgagcuuu

SEQ ID NO: 31646 - RNA, 19 nt, Artificial Sequence
  Description of Artificial Sequence: Synthetic oligonucleotide
uucaccaccauagguucua

SEQ ID NO: 31647 - RNA, 19 nt, Artificial Sequence
  Description of Artificial Sequence: Synthetic oligonucleotide
accucaagauguuugagga

SEQ ID NO: 31648 - RNA, 19 nt, Artificial Sequence
  Description of Artificial Sequence: Synthetic oligonucleotide
acuaccccaaaucucggaa

SEQ ID NO: 31649 - RNA, 19 nt, Artificial Sequence
  Description of Artificial Sequence: Synthetic oligonucleotide
aagcccuuauuccauucau

SEQ ID NO: 31650 - RNA, 19 nt, Artificial Sequence
  Description of Artificial Sequence: Synthetic oligonucleotide
ucuuuuaaaggaaccaaau

SEQ ID NO: 31651 - RNA, 19 nt, Artificial Sequence
  Description of Artificial Sequence: Synthetic oligonucleotide
uuaaaaaggagcagagcuc

SEQ ID NO: 31652 - RNA, 19 nt, Artificial Sequence
  Description of Artificial Sequence: Synthetic oligonucleotide
cccacaaugcugaugaaaa

SEQ ID NO: 31653 - RNA, 19 nt, Artificial Sequence
  Description of Artificial Sequence: Synthetic oligonucleotide
acugucaagcugcugaaac

SEQ ID NO: 31654 - RNA, 19 nt, Artificial Sequence
  Description of Artificial Sequence: Synthetic oligonucleotide
cuguaauuuucaugauaua

SEQ ID NO: 31655 - RNA, 19 nt, Artificial Sequence
  Description of Artificial Sequence: Synthetic oligonucleotide
aauagucccguauauaugu

SEQ ID NO: 31656 - RNA, 19 nt, Artificial Sequence
  Description of Artificial Sequence: Synthetic oligonucleotide
uaauaguaggucuccuggc

SEQ ID NO: 31657 - RNA, 19 nt, Artificial Sequence
  Description of Artificial Sequence: Synthetic oligonucleotide
cguucugccagcuggccug

SEQ ID NO: 31658 - RNA, 19 nt, Artificial Sequence
  Description of Artificial Sequence: Synthetic oligonucleotide
ggggauucugagugguguc

SEQ ID NO: 31659 - RNA, 19 nt, Artificial Sequence
  Description of Artificial Sequence: Synthetic oligonucleotide
cugcuuagaguuuacuccu

SEQ ID NO: 31660 - RNA, 19 nt, Artificial Sequence
  Description of Artificial Sequence: Synthetic oligonucleotide
uacccuuccagggaccccu

SEQ ID NO: 31661 - RNA, 19 nt, Artificial Sequence
  Description of Artificial Sequence: Synthetic oligonucleotide
uauccugauccccaacuga

SEQ ID NO: 31662 - RNA, 19 nt, Artificial Sequence
  Description of Artificial Sequence: Synthetic oligonucleotide
aagcuucaaaaagccacuu

SEQ ID NO: 31663 - RNA, 19 nt, Artificial Sequence
  Description of Artificial Sequence: Synthetic oligonucleotide
uuuccaaauggcgacaguu

SEQ ID NO: 31664 - RNA, 19 nt, Artificial Sequence
  Description of Artificial Sequence: Synthetic oligonucleotide
ugcuucuuagcuauugcuc

SEQ ID NO: 31665 - RNA, 19 nt, Artificial Sequence
  Description of Artificial Sequence: Synthetic oligonucleotide
cugagaaaguacaaacuuc

SEQ ID NO: 31666 - RNA, 19 nt, Artificial Sequence
  Description of Artificial Sequence: Synthetic oligonucleotide
cuccuaugucuuucaccgg

SEQ ID NO: 31667 - RNA, 19 nt, Artificial Sequence
  Description of Artificial Sequence: Synthetic oligonucleotide
ggcaauccaaguacaugug

SEQ ID NO: 31668 - RNA, 19 nt, Artificial Sequence
  Description of Artificial Sequence: Synthetic oligonucleotide
ggcuucauacccacucccu

SEQ ID NO: 31669 - RNA, 19 nt, Artificial Sequence
  Description of Artificial Sequence: Synthetic oligonucleotide
ugucaaugcaggacaacuc

SEQ ID NO: 31670 - RNA, 19 nt, Artificial Sequence
  Description of Artificial Sequence: Synthetic oligonucleotide
cuguaaucaagaauuuuuu

SEQ ID NO: 31671 - RNA, 19 nt, Artificial Sequence
  Description of Artificial Sequence: Synthetic oligonucleotide
ugacuugaaggcaguacuu

SEQ ID NO: 31672 - RNA, 19 nt, Artificial Sequence
  Description of Artificial Sequence: Synthetic oligonucleotide
uauagaccuuauuaaaggu

SEQ ID NO: 31673 - RNA, 19 nt, Artificial Sequence
  Description of Artificial Sequence: Synthetic oligonucleotide
uaugcauuuuauacaugua

SEQ ID NO: 31674 - RNA, 19 nt, Artificial Sequence
  Description of Artificial Sequence: Synthetic oligonucleotide
aacagaguagcagaaauuu

SEQ ID NO: 31675 - RNA, 19 nt, Artificial Sequence
  Description of Artificial Sequence: Synthetic oligonucleotide
uaaacucugaagccacaaa

SEQ ID NO: 31676 - RNA, 19 nt, Artificial Sequence
  Description of Artificial Sequence: Synthetic oligonucleotide
agacccagagcaaacccac

SEQ ID NO: 31677 - RNA, 19 nt, Artificial Sequence
  Description of Artificial Sequence: Synthetic oligonucleotide
cucccaaaugaaaacccca

SEQ ID NO: 31678 - RNA, 19 nt, Artificial Sequence
  Description of Artificial Sequence: Synthetic oligonucleotide
agucauggcuuccuuuuuc

SEQ ID NO: 31679 - RNA, 19 nt, Artificial Sequence
  Description of Artificial Sequence: Synthetic oligonucleotide
cuugguuaauuaggaaaga

SEQ ID NO: 31680 - RNA, 19 nt, Artificial Sequence
  Description of Artificial Sequence: Synthetic oligonucleotide
augagaaauuauuagguag

SEQ ID NO: 31681 - RNA, 19 nt, Artificial Sequence
  Description of Artificial Sequence: Synthetic oligonucleotide
gaccuugaauacaggagcc

SEQ ID NO: 31682 - RNA, 19 nt, Artificial Sequence
  Description of Artificial Sequence: Synthetic oligonucleotide
ccucuccucauagugcuga

SEQ ID NO: 31683 - RNA, 19 nt, Artificial Sequence
  Description of Artificial Sequence: Synthetic oligonucleotide
aaaagauacugaugcauug

SEQ ID NO: 31684 - RNA, 19 nt, Artificial Sequence
  Description of Artificial Sequence: Synthetic oligonucleotide
gaccucauuucaaauuugu

SEQ ID NO: 31685 - RNA, 19 nt, Artificial Sequence
  Description of Artificial Sequence: Synthetic oligonucleotide
ugcagugucuuaguugaug

SEQ ID NO: 31686 - RNA, 19 nt, Artificial Sequence
  Description of Artificial Sequence: Synthetic oligonucleotide
gagugccucuguuuuccag

SEQ ID NO: 31687 - RNA, 19 nt, Artificial Sequence
  Description of Artificial Sequence: Synthetic oligonucleotide
gaagauuucacaauccccg

SEQ ID NO: 31688 - RNA, 19 nt, Artificial Sequence
  Description of Artificial Sequence: Synthetic oligonucleotide
ggaaaacugguauggcuau

SEQ ID NO: 31689 - RNA, 19 nt, Artificial Sequence
  Description of Artificial Sequence: Synthetic oligonucleotide
uucuugaaggccagguuuu

SEQ ID NO: 31690 - RNA, 19 nt, Artificial Sequence
  Description of Artificial Sequence: Synthetic oligonucleotide
uaauaaccacaaacaaaaa

SEQ ID NO: 31691 - RNA, 19 nt, Artificial Sequence
  Description of Artificial Sequence: Synthetic oligonucleotide
aggcaugaaccuggguggc

SEQ ID NO: 31692 - RNA, 19 nt, Artificial Sequence
  Description of Artificial Sequence: Synthetic oligonucleotide
cuuaugagagaguagagaa

SEQ ID NO: 31693 - RNA, 19 nt, Artificial Sequence
  Description of Artificial Sequence: Synthetic oligonucleotide
acaacaugacccuggaugg

SEQ ID NO: 31694 - RNA, 19 nt, Artificial Sequence
  Description of Artificial Sequence: Synthetic oligonucleotide
gcuacuaagaggauagaga

SEQ ID NO: 31695 - RNA, 19 nt, Artificial Sequence
  Description of Artificial Sequence: Synthetic oligonucleotide
aacaguuuuacaauagaca

SEQ ID NO: 31696 - RNA, 19 nt, Artificial Sequence
  Description of Artificial Sequence: Synthetic oligonucleotide
auugcaaacucucauguuu

SEQ ID NO: 31697 - RNA, 19 nt, Artificial Sequence
  Description of Artificial Sequence: Synthetic oligonucleotide
uuuggaaacuaguggcaau

SEQ ID NO: 31698 - RNA, 19 nt, Artificial Sequence
  Description of Artificial Sequence: Synthetic oligonucleotide
uauccaaauaaugaguagu

SEQ ID NO: 31699 - RNA, 19 nt, Artificial Sequence
  Description of Artificial Sequence: Synthetic oligonucleotide
uguaaaacaaagagaauua

SEQ ID NO: 31700 - RNA, 19 nt, Artificial Sequence
  Description of Artificial Sequence: Synthetic oligonucleotide
aaugaugagguuacaugcu

SEQ ID NO: 31701 - RNA, 19 nt, Artificial Sequence
  Description of Artificial Sequence: Synthetic oligonucleotide
ugcuugccuccaccagaug

SEQ ID NO: 31702 - RNA, 19 nt, Artificial Sequence
  Description of Artificial Sequence: Synthetic oligonucleotide
guccacaacaauaugaagu

SEQ ID NO: 31703 - RNA, 19 nt, Artificial Sequence
  Description of Artificial Sequence: Synthetic oligonucleotide
uacagcagaagccccaagc

SEQ ID NO: 31704 - RNA, 19 nt, Artificial Sequence
  Description of Artificial Sequence: Synthetic oligonucleotide
caacuuuccuuuccuggag

SEQ ID NO: 31705 - RNA, 19 nt, Artificial Sequence
  Description of Artificial Sequence: Synthetic oligonucleotide
gcuucuuccuuguaguucu

SEQ ID NO: 31706 - RNA, 19 nt, Artificial Sequence
  Description of Artificial Sequence: Synthetic oligonucleotide
ucaggaccuguucaagaag

SEQ ID NO: 31707 - RNA, 19 nt, Artificial Sequence
  Description of Artificial Sequence: Synthetic oligonucleotide
ggugucuccuaggggcagc

SEQ ID NO: 31708 - RNA, 19 nt, Artificial Sequence
  Description of Artificial Sequence: Synthetic oligonucleotide
ccugaaugccucccucaaa

SEQ ID NO: 31709 - RNA, 19 nt, Artificial Sequence
  Description of Artificial Sequence: Synthetic oligonucleotide
aggaccugcaggcagagac

SEQ ID NO: 31710 - RNA, 19 nt, Artificial Sequence
  Description of Artificial Sequence: Synthetic oligonucleotide
cugaaaauugcagacagag

SEQ ID NO: 31711 - RNA, 19 nt, Artificial Sequence
  Description of Artificial Sequence: Synthetic oligonucleotide
ggggcacgucugggcagaa

SEQ ID NO: 31712 - RNA, 19 nt, Artificial Sequence
  Description of Artificial Sequence: Synthetic oligonucleotide
aaaccuguuuuguuuggcu

SEQ ID NO: 31713 - RNA, 19 nt, Artificial Sequence
  Description of Artificial Sequence: Synthetic oligonucleotide
ucagacauauaguuuuuuu

SEQ ID NO: 31714 - RNA, 19 nt, Artificial Sequence
  Description of Artificial Sequence: Synthetic oligonucleotide
uuuuuuuuacaaaguuuca

SEQ ID NO: 31715 - RNA, 19 nt, Artificial Sequence
  Description of Artificial Sequence: Synthetic oligonucleotide
aaaaacuuaaaaaucagga

SEQ ID NO: 31716 - RNA, 19 nt, Artificial Sequence
  Description of Artificial Sequence: Synthetic oligonucleotide
agauuccuucauaaaacuc

SEQ ID NO: 31717 - RNA, 19 nt, Artificial Sequence
  Description of Artificial Sequence: Synthetic oligonucleotide
cuagcauucuaguuucauu

SEQ ID NO: 31718 - RNA, 19 nt, Artificial Sequence
  Description of Artificial Sequence: Synthetic oligonucleotide
uuaaaaaguuggaggaucu

SEQ ID NO: 31719 - RNA, 19 nt, Artificial Sequence
  Description of Artificial Sequence: Synthetic oligonucleotide
ugaacauacagagcccaca

SEQ ID NO: 31720 - RNA, 19 nt, Artificial Sequence
  Description of Artificial Sequence: Synthetic oligonucleotide
auuuccacaccagaacugg

SEQ ID NO: 31721 - RNA, 19 nt, Artificial Sequence
  Description of Artificial Sequence: Synthetic oligonucleotide
gaacuacguagcuaguaag

SEQ ID NO: 31722 - RNA, 19 nt, Artificial Sequence
  Description of Artificial Sequence: Synthetic oligonucleotide
gcauuugaguuugcaaacu

SEQ ID NO: 31723 - RNA, 19 nt, Artificial Sequence
  Description of Artificial Sequence: Synthetic oligonucleotide
ucuugugaaggggucaccc

SEQ ID NO: 31724 - RNA, 19 nt, Artificial Sequence
  Description of Artificial Sequence: Synthetic oligonucleotide
ccagcaugagugcugagau

SEQ ID NO: 31725 - RNA, 19 nt, Artificial Sequence
  Description of Artificial Sequence: Synthetic oligonucleotide
uauggacucucuaaggaag

SEQ ID NO: 31726 - RNA, 19 nt, Artificial Sequence
  Description of Artificial Sequence: Synthetic oligonucleotide
ggggccgaacgcuuguaau

SEQ ID NO: 31727 - RNA, 19 nt, Artificial Sequence
  Description of Artificial Sequence: Synthetic oligonucleotide
uuggaauacauggaaauau

SEQ ID NO: 31728 - RNA, 19 nt, Artificial Sequence
  Description of Artificial Sequence: Synthetic oligonucleotide
uuugucuucucaggccuau

SEQ ID NO: 31729 - RNA, 19 nt, Artificial Sequence
  Description of Artificial Sequence: Synthetic oligonucleotide
uguuugcggaaugcauugu

SEQ ID NO: 31730 - RNA, 19 nt, Artificial Sequence
  Description of Artificial Sequence: Synthetic oligonucleotide
ucaauauuuagcaaacugu

SEQ ID NO: 31731 - RNA, 19 nt, Artificial Sequence
  Description of Artificial Sequence: Synthetic oligonucleotide
uuuugacaaaugagcacca

SEQ ID NO: 31732 - RNA, 19 nt, Artificial Sequence
  Description of Artificial Sequence: Synthetic oligonucleotide
agugguacuaagcacagaa

SEQ ID NO: 31733 - RNA, 19 nt, Artificial Sequence
  Description of Artificial Sequence: Synthetic oligonucleotide
aacucacuauauaagucac

SEQ ID NO: 31734 - RNA, 19 nt, Artificial Sequence
  Description of Artificial Sequence: Synthetic oligonucleotide
cauaggaaacuugaaaggu

SEQ ID NO: 31735 - RNA, 19 nt, Artificial Sequence
  Description of Artificial Sequence: Synthetic oligonucleotide
ucugaggaugauguagauu

SEQ ID NO: 31736 - RNA, 19 nt, Artificial Sequence
  Description of Artificial Sequence: Synthetic oligonucleotide
uacugaaaaaugcaaauug

SEQ ID NO: 31737 - RNA, 19 nt, Artificial Sequence
  Description of Artificial Sequence: Synthetic oligonucleotide
gcaaucauauaaauaagug

SEQ ID NO: 31738 - RNA, 19 nt, Artificial Sequence
  Description of Artificial Sequence: Synthetic oligonucleotide
guuuuuguuguucauuaaa

SEQ ID NO: 31739 - RNA, 19 nt, Artificial Sequence
  Description of Artificial Sequence: Synthetic oligonucleotide
uaaauaccuuuaaaucaug

SEQ ID NO: 31740 - RNA, 25 nt, Artificial Sequence
  Description of Artificial Sequence: Synthetic oligonucleotide
uccauaaagggguugcgggggccgc

SEQ ID NO: 31741 - RNA, 25 nt, Artificial Sequence
  Description of Artificial Sequence: Synthetic oligonucleotide
cgcucucuucugggagggcagcggc

SEQ ID NO: 31742 - RNA, 25 nt, Artificial Sequence
  Description of Artificial Sequence: Synthetic oligonucleotide
ccaccggcgaggaacacggcgcgau

SEQ ID NO: 31743 - RNA, 25 nt, Artificial Sequence
  Description of Artificial Sequence: Synthetic oligonucleotide
ugcagguucagugccagcagagccc

SEQ ID NO: 31744 - RNA, 25 nt, Artificial Sequence
  Description of Artificial Sequence: Synthetic oligonucleotide
cagugcuggcaggcagcgccacuuu

SEQ ID NO: 31745 - RNA, 25 nt, Artificial Sequence
  Description of Artificial Sequence: Synthetic oligonucleotide
uggucgcccuuggggcacuggccuu

SEQ ID NO: 31746 - RNA, 25 nt, Artificial Sequence
  Description of Artificial Sequence: Synthetic oligonucleotide
uguacgucgcgaagcccuccggcua

SEQ ID NO: 31747 - RNA, 25 nt, Artificial Sequence
  Description of Artificial Sequence: Synthetic oligonucleotide
acgggaagcacacggagagccugaa

SEQ ID NO: 31748 - RNA, 25 nt, Artificial Sequence
  Description of Artificial Sequence: Synthetic oligonucleotide
agccggcggcuacccgccugccagc

SEQ ID NO: 31749 - RNA, 25 nt, Artificial Sequence
  Description of Artificial Sequence: Synthetic oligonucleotide
cccgcgccgccugguuccugcagga

SEQ ID NO: 31750 - RNA, 25 nt, Artificial Sequence
  Description of Artificial Sequence: Synthetic oligonucleotide
agcugccuuccuucgcggugcccgc

SEQ ID NO: 31751 - RNA, 25 nt, Artificial Sequence
  Description of Artificial Sequence: Synthetic oligonucleotide
cggggauccucgcccggcagccccu

SEQ ID NO: 31752 - RNA, 25 nt, Artificial Sequence
  Description of Artificial Sequence: Synthetic oligonucleotide
ucucccucuucgggccaccugggac

SEQ ID NO: 31753 - RNA, 25 nt, Artificial Sequence
  Description of Artificial Sequence: Synthetic oligonucleotide
cgguacuucugggccucuucugccu

SEQ ID NO: 31754 - RNA, 25 nt, Artificial Sequence
  Description of Artificial Sequence: Synthetic oligonucleotide
uacauuacuuccacaggacauuugu

SEQ ID NO: 31755 - RNA, 25 nt, Artificial Sequence
  Description of Artificial Sequence: Synthetic oligonucleotide
uguacucacugcucaaucgagggag

SEQ ID NO: 31756 - RNA, 25 nt, Artificial Sequence
  Description of Artificial Sequence: Synthetic oligonucleotide
ggccuuauccagcuauacucauucu

SEQ ID NO: 31757 - RNA, 25 nt, Artificial Sequence
  Description of Artificial Sequence: Synthetic oligonucleotide
ucagaggcacugccuucugcacugg

SEQ ID NO: 31758 - RNA, 25 nt, Artificial Sequence
  Description of Artificial Sequence: Synthetic oligonucleotide
gaaauggaguccuucaaggcuacua

SEQ ID NO: 31759 - RNA, 25 nt, Artificial Sequence
  Description of Artificial Sequence: Synthetic oligonucleotide
aucugauuuacugugcugaauaccc

SEQ ID NO: 31760 - RNA, 25 nt, Artificial Sequence
  Description of Artificial Sequence: Synthetic oligonucleotide
cugaugggugguacacagacauacg

SEQ ID NO: 31761 - RNA, 25 nt, Artificial Sequence
  Description of Artificial Sequence: Synthetic oligonucleotide
gguuuagcuugggugucuucuuauu

SEQ ID NO: 31762 - RNA, 25 nt, Artificial Sequence
  Description of Artificial Sequence: Synthetic oligonucleotide
uuauuuugggaaugggaauaaacau

SEQ ID NO: 31763 - RNA, 25 nt, Artificial Sequence
  Description of Artificial Sequence: Synthetic oligonucleotide
uucauagugacuauauauugcgcca

SEQ ID NO: 31764 - RNA, 25 nt, Artificial Sequence
  Description of Artificial Sequence: Synthetic oligonucleotide
agcucaggaagccuggagaaaucag

SEQ ID NO: 31765 - RNA, 25 nt, Artificial Sequence
  Description of Artificial Sequence: Synthetic oligonucleotide
gcuacaggauuccacaagguggcuu

SEQ ID NO: 31766 - RNA, 25 nt, Artificial Sequence
  Description of Artificial Sequence: Synthetic oligonucleotide
uguuuacguauguuucuggagccaa

SEQ ID NO: 31767 - RNA, 25 nt, Artificial Sequence
  Description of Artificial Sequence: Synthetic oligonucleotide
auuuccucggugagaucauugaaug

SEQ ID NO: 31768 - RNA, 25 nt, Artificial Sequence
  Description of Artificial Sequence: Synthetic oligonucleotide
ggaucggcuaugcccuggccacuug

SEQ ID NO: 31769 - RNA, 25 nt, Artificial Sequence
  Description of Artificial Sequence: Synthetic oligonucleotide
ggucccucccagcacuugcauuugc

SEQ ID NO: 31770 - RNA, 25 nt, Artificial Sequence
  Description of Artificial Sequence: Synthetic oligonucleotide
cauuuuucucacuuuguuuccuugg

SEQ ID NO: 31771 - RNA, 25 nt, Artificial Sequence
  Description of Artificial Sequence: Synthetic oligonucleotide
ggcugcgagcuuuucaccaccauag

SEQ ID NO: 31772 - RNA, 25 nt, Artificial Sequence
  Description of Artificial Sequence: Synthetic oligonucleotide
gguucuaccucaagauguuugagga

SEQ ID NO: 31773 - RNA, 25 nt, Artificial Sequence
  Description of Artificial Sequence: Synthetic oligonucleotide
acuaccccaaaucucggaaagcccu

SEQ ID NO: 31774 - RNA, 25 nt, Artificial Sequence
  Description of Artificial Sequence: Synthetic oligonucleotide
uuauuccauucaucuuuuaaaggaa

SEQ ID NO: 31775 - RNA, 25 nt, Artificial Sequence
  Description of Artificial Sequence: Synthetic oligonucleotide
accaaauuaaaaaggagcagagcuc

SEQ ID NO: 31776 - RNA, 25 nt, Artificial Sequence
  Description of Artificial Sequence: Synthetic oligonucleotide
cccacaaugcugaugaaaacuguca

SEQ ID NO: 31777 - RNA, 25 nt, Artificial Sequence
  Description of Artificial Sequence: Synthetic oligonucleotide
aagcugcugaaacuguaauuuucau

SEQ ID NO: 31778 - RNA, 25 nt, Artificial Sequence
  Description of Artificial Sequence: Synthetic oligonucleotide
ugauauaauagucccguauauaugu

SEQ ID NO: 31779 - RNA, 25 nt, Artificial Sequence
  Description of Artificial Sequence: Synthetic oligonucleotide
uaauaguaggucuccuggcguucug

SEQ ID NO: 31780 - RNA, 25 nt, Artificial Sequence
  Description of Artificial Sequence: Synthetic oligonucleotide
gccagcuggccuggggauucugagu

SEQ ID NO: 31781 - RNA, 25 nt, Artificial Sequence
  Description of Artificial Sequence: Synthetic oligonucleotide
uggugucugcuuagaguuuacuccu

SEQ ID NO: 31782 - RNA, 25 nt, Artificial Sequence
  Description of Artificial Sequence: Synthetic oligonucleotide
uacccuuccagggaccccuauccug

SEQ ID NO: 31783 - RNA, 25 nt, Artificial Sequence
  Description of Artificial Sequence: Synthetic oligonucleotide
gauccccaacugaagcuucaaaaag

SEQ ID NO: 31784 - RNA, 25 nt, Artificial Sequence
  Description of Artificial Sequence: Synthetic oligonucleotide
gccacuuuuccaaauggcgacaguu

SEQ ID NO: 31785 - RNA, 25 nt, Artificial Sequence
  Description of Artificial Sequence: Synthetic oligonucleotide
ugcuucuuagcuauugcucugagaa

SEQ ID NO: 31786 - RNA, 25 nt, Artificial Sequence
  Description of Artificial Sequence: Synthetic oligonucleotide
aaguacaaacuucuccuaugucuuu

SEQ ID NO: 31787 - RNA, 25 nt, Artificial Sequence
  Description of Artificial Sequence: Synthetic oligonucleotide
ucaccgggcaauccaaguacaugug

SEQ ID NO: 31788 - RNA, 25 nt, Artificial Sequence
  Description of Artificial Sequence: Synthetic oligonucleotide
ggcuucauacccacucccugucaau

SEQ ID NO: 31789 - RNA, 25 nt, Artificial Sequence
  Description of Artificial Sequence: Synthetic oligonucleotide
ugcaggacaacucuguaaucaagaa

SEQ ID NO: 31790 - RNA, 25 nt, Artificial Sequence
  Description of Artificial Sequence: Synthetic oligonucleotide
auuuuuugacuugaaggcaguacuu

SEQ ID NO: 31791 - RNA, 25 nt, Artificial Sequence
  Description of Artificial Sequence: Synthetic oligonucleotide
uauagaccuuauuaaagguaugcau

SEQ ID NO: 31792 - RNA, 25 nt, Artificial Sequence
  Description of Artificial Sequence: Synthetic oligonucleotide
uuuuauacauguaacagaguagcag

SEQ ID NO: 31793 - RNA, 25 nt, Artificial Sequence
  Description of Artificial Sequence: Synthetic oligonucleotide
gaaauuuaaacucugaagccacaaa

SEQ ID NO: 31794 - RNA, 25 nt, Artificial Sequence
  Description of Artificial Sequence: Synthetic oligonucleotide
agacccagagcaaacccacucccaa

SEQ ID NO: 31795 - RNA, 25 nt, Artificial Sequence
  Description of Artificial Sequence: Synthetic oligonucleotide
aaugaaaaccccagucauggcuucc

SEQ ID NO: 31796 - RNA, 25 nt, Artificial Sequence
  Description of Artificial Sequence: Synthetic oligonucleotide
cuuuuucuugguuaauuaggaaaga

SEQ ID NO: 31797 - RNA, 25 nt, Artificial Sequence
  Description of Artificial Sequence: Synthetic oligonucleotide
augagaaauuauuagguagaccuug

SEQ ID NO: 31798 - RNA, 25 nt, Artificial Sequence
  Description of Artificial Sequence: Synthetic oligonucleotide
gaauacaggagcccucuccucauag

SEQ ID NO: 31799 - RNA, 25 nt, Artificial Sequence
  Description of Artificial Sequence: Synthetic oligonucleotide
gugcugaaaagauacugaugcauug

SEQ ID NO: 31800 - RNA, 25 nt, Artificial Sequence
  Description of Artificial Sequence: Synthetic oligonucleotide
gaccucauuucaaauuugugcagug

SEQ ID NO: 31801 - RNA, 25 nt, Artificial Sequence
  Description of Artificial Sequence: Synthetic oligonucleotide
gucuuaguugaugagugccucuguu

SEQ ID NO: 31802 - RNA, 25 nt, Artificial Sequence
  Description of Artificial Sequence: Synthetic oligonucleotide
uuuccagaagauuucacaauccccg

SEQ ID NO: 31803 - RNA, 25 nt, Artificial Sequence
  Description of Artificial Sequence: Synthetic oligonucleotide
ggaaaacugguauggcuauucuuga

SEQ ID NO: 31804 - RNA, 25 nt, Artificial Sequence
  Description of Artificial Sequence: Synthetic oligonucleotide
aaggccagguuuuaauaaccacaaa

SEQ ID NO: 31805 - RNA, 25 nt, Artificial Sequence
  Description of Artificial Sequence: Synthetic oligonucleotide
acaaaaaggcaugaaccuggguggc

SEQ ID NO: 31806 - RNA, 25 nt, Artificial Sequence
  Description of Artificial Sequence: Synthetic oligonucleotide
cuuaugagagaguagagaacaacau

SEQ ID NO: 31807 - RNA, 25 nt, Artificial Sequence
  Description of Artificial Sequence: Synthetic oligonucleotide
ugacccuggauggcuacuaagagga

SEQ ID NO: 31808 - RNA, 25 nt, Artificial Sequence
  Description of Artificial Sequence: Synthetic oligonucleotide
auagagaacaguuuuacaauagaca

SEQ ID NO: 31809 - RNA, 25 nt, Artificial Sequence
  Description of Artificial Sequence: Synthetic oligonucleotide
auugcaaacucucauguuuuuggaa

SEQ ID NO: 31810 - RNA, 25 nt, Artificial Sequence
  Description of Artificial Sequence: Synthetic oligonucleotide
aacuaguggcaauauccaaauaaug

SEQ ID NO: 31811 - RNA, 25 nt, Artificial Sequence
  Description of Artificial Sequence: Synthetic oligonucleotide
gaguaguguaaaacaaagagaauua

SEQ ID NO: 31812 - RNA, 25 nt, Artificial Sequence
  Description of Artificial Sequence: Synthetic oligonucleotide
aaugaugagguuacaugcugcuugc

SEQ ID NO: 31813 - RNA, 25 nt, Artificial Sequence
  Description of Artificial Sequence: Synthetic oligonucleotide
ccuccaccagauguccacaacaaua

SEQ ID NO: 31814 - RNA, 25 nt, Artificial Sequence
  Description of Artificial Sequence: Synthetic oligonucleotide
augaaguacagcagaagccccaagc

SEQ ID NO: 31815 - RNA, 25 nt, Artificial Sequence
  Description of Artificial Sequence: Synthetic oligonucleotide
caacuuuccuuuccuggagcuucuu

SEQ ID NO: 31816 - RNA, 25 nt, Artificial Sequence
  Description of Artificial Sequence: Synthetic oligonucleotide
uccuuguaguucucaggaccuguuc

SEQ ID NO: 31817 - RNA, 25 nt, Artificial Sequence
  Description of Artificial Sequence: Synthetic oligonucleotide
caagaaggugucuccuaggggcagc

SEQ ID NO: 31818 - RNA, 25 nt, Artificial Sequence
  Description of Artificial Sequence: Synthetic oligonucleotide
ccugaaugccucccucaaaggaccu

SEQ ID NO: 31819 - RNA, 25 nt, Artificial Sequence
  Description of Artificial Sequence: Synthetic oligonucleotide
ugcaggcagagacugaaaauugcag

SEQ ID NO: 31820 - RNA, 25 nt, Artificial Sequence
  Description of Artificial Sequence: Synthetic oligonucleotide
gacagaggggcacgucugggcagaa

SEQ ID NO: 31821 - RNA, 25 nt, Artificial Sequence
  Description of Artificial Sequence: Synthetic oligonucleotide
aaaccuguuuuguuuggcucagaca

SEQ ID NO: 31822 - RNA, 25 nt, Artificial Sequence
  Description of Artificial Sequence: Synthetic oligonucleotide
aguuucaaaaacuuaaaaaucagga

SEQ ID NO: 31823 - RNA, 25 nt, Artificial Sequence
  Description of Artificial Sequence: Synthetic oligonucleotide
agauuccuucauaaaacucuagcau

SEQ ID NO: 31824 - RNA, 25 nt, Artificial Sequence
  Description of Artificial Sequence: Synthetic oligonucleotide
uucuaguuucauuuaaaaaguugga

SEQ ID NO: 31825 - RNA, 25 nt, Artificial Sequence
  Description of Artificial Sequence: Synthetic oligonucleotide
aggaucugaacauacagagcccaca

SEQ ID NO: 31826 - RNA, 25 nt, Artificial Sequence
  Description of Artificial Sequence: Synthetic oligonucleotide
auuuccacaccagaacuggaacuac

SEQ ID NO: 31827 - RNA, 25 nt, Artificial Sequence
  Description of Artificial Sequence: Synthetic oligonucleotide
cguagcuaguaagcauuugaguuug

SEQ ID NO: 31828 - RNA, 25 nt, Artificial Sequence
  Description of Artificial Sequence: Synthetic oligonucleotide
gcaaacucuugugaaggggucaccc

SEQ ID NO: 31829 - RNA, 25 nt, Artificial Sequence
  Description of Artificial Sequence: Synthetic oligonucleotide
ccagcaugagugcugagauauggac

SEQ ID NO: 31830 - RNA, 25 nt, Artificial Sequence
  Description of Artificial Sequence: Synthetic oligonucleotide
cucucuaaggaaggggccgaacgcu

SEQ ID NO: 31831 - RNA, 25 nt, Artificial Sequence
  Description of Artificial Sequence: Synthetic oligonucleotide
uuguaauuggaauacauggaaauau

SEQ ID NO: 31832 - RNA, 25 nt, Artificial Sequence
  Description of Artificial Sequence: Synthetic oligonucleotide
uuugucuucucaggccuauguuugc

SEQ ID NO: 31833 - RNA, 25 nt, Artificial Sequence
  Description of Artificial Sequence: Synthetic oligonucleotide
cggaaugcauugucaauauuuagca

SEQ ID NO: 31834 - RNA, 25 nt, Artificial Sequence
  Description of Artificial Sequence: Synthetic oligonucleotide
aaacuguuuugacaaaugagcacca

SEQ ID NO: 31835 - RNA, 25 nt, Artificial Sequence
  Description of Artificial Sequence: Synthetic oligonucleotide
agugguacuaagcacagaaacucac

SEQ ID NO: 31836 - RNA, 25 nt, Artificial Sequence
  Description of Artificial Sequence: Synthetic oligonucleotide
cuauauaagucacauaggaaacuug

SEQ ID NO: 31837 - RNA, 25 nt, Artificial Sequence
  Description of Artificial Sequence: Synthetic oligonucleotide
gaaaggucugaggaugauguagauu

SEQ ID NO: 31838 - RNA, 25 nt, Artificial Sequence
  Description of Artificial Sequence: Synthetic oligonucleotide
uacugaaaaaugcaaauugcaauca

SEQ ID NO: 31839 - RNA, 25 nt, Artificial Sequence
  Description of Artificial Sequence: Synthetic oligonucleotide
auauaaauaaguguuuuuguuguuc

SEQ ID NO: 31840 - RNA, 25 nt, Artificial Sequence
  Description of Artificial Sequence: Synthetic oligonucleotide
guucauuaaauaccuuuaaaucaug

SEQ ID NO: 31841 - DNA, 21 bp, Artificial Sequence
  Description of Artificial Sequence: Synthetic oligonucleotide
  Description of Combined DNA/RNA Molecule: Synthetic oligonucleotide
cuacacaaaucagcgauuutt

SEQ ID NO: 31842 - DNA, 21 bp, Artificial Sequence
  Description of Artificial Sequence: Synthetic oligonucleotide
  Description of Combined DNA/RNA Molecule: Synthetic oligonucleotide
aaaucgcugauuuguguagtt

SEQ ID NO: 31843 - DNA, 25 bp, Artificial Sequence
  Description of Artificial Sequence: Synthetic oligonucleotide
  Description of Combined DNA/RNA Molecule: Synthetic oligonucleotide
cuacacaaaucagcgauuuccaugt

SEQ ID NO: 31844 - RNA, 27 nt, Artificial Sequence
  Description of Artificial Sequence: Synthetic oligonucleotide
acauggaaaucgcugauuuguguaguc

SEQ ID NO: 31845 - RNA, 13 nt, Artificial Sequence
  Description of Artificial Sequence: Synthetic oligonucleotide
cuacacaaaucag

SEQ ID NO: 31846 - DNA, 11 bp, Artificial Sequence
  Description of Artificial Sequence: Synthetic oligonucleotide
  Description of Combined DNA/RNA Molecule: Synthetic oligonucleotide
gauuuccaugt

SEQ ID NO: 31847 - DNA, 21 bp, Artificial Sequence
  Description of Artificial Sequence: Synthetic oligonucleotide
  Description of Combined DNA/RNA Molecule: Synthetic oligonucleotide
ggaucuuauuucuucggagtt

SEQ ID NO: 31848 - DNA, 21 bp, Artificial Sequence
  Description of Artificial Sequence: Synthetic oligonucleotide
  Description of Combined DNA/RNA Molecule: Synthetic oligonucleotide
cuccgaagaaauaagaucctt

SEQ ID NO: 31849 - RNA, 11 nt, Artificial Sequence
  Description of Artificial Sequence: Synthetic oligonucleotide
ggaucuuauuu

SEQ ID NO: 31850 - DNA, 10 bp, Artificial Sequence
  Description of Artificial Sequence: Synthetic oligonucleotide
  Description of Combined DNA/RNA Molecule: Synthetic oligonucleotide
cuucggagtt

SEQ ID NO: 31851 - RNA, 27 nt, Artificial Sequence
  Description of Artificial Sequence: Synthetic oligonucleotide
cauugucuccgaagaaauaagauccuu

SEQ ID NO: 31852 - RNA, 8 nt, Artificial Sequence
  Description of Artificial Sequence: Synthetic oligonucleotide
  modified_base (2): LNA-G
ggaucuua

SEQ ID NO: 31853 - DNA, 17 bp, Artificial Sequence
  Description of Artificial Sequence: Synthetic oligonucleotide
  Description of Combined DNA/RNA Molecule: Synthetic oligonucleotide
uuucuucggagacaatg

SEQ ID NO: 31854 - DNA, 16 bp, Artificial Sequence
  Description of Artificial Sequence: Synthetic oligonucleotide
  Description of Combined DNA/RNA Molecule: Synthetic oligonucleotide
uucuucggagacaatg

SEQ ID NO: 31855 - DNA, 15 bp, Artificial Sequence
  Description of Artificial Sequence: Synthetic oligonucleotide
  Description of Combined DNA/RNA Molecule: Synthetic oligonucleotide
ucuucggagacaatg

SEQ ID NO: 31856 - DNA, 14 bp, Artificial Sequence
  Description of Artificial Sequence: Synthetic oligonucleotide
  Description of Combined DNA/RNA Molecule: Synthetic oligonucleotide
cuucggagacaatg

SEQ ID NO: 31857 - DNA, 13 bp, Artificial Sequence
  Description of Artificial Sequence: Synthetic oligonucleotide
  Description of Combined DNA/RNA Molecule: Synthetic oligonucleotide
uucggagacaatg

SEQ ID NO: 31858 - DNA, 12 bp, Artificial Sequence
  Description of Artificial Sequence: Synthetic oligonucleotide
  Description of Combined DNA/RNA Molecule: Synthetic oligonucleotide
ucggagacaatg

SEQ ID NO: 31859 - DNA, 11 bp, Artificial Sequence
  Description of Artificial Sequence: Synthetic oligonucleotide
  Description of Combined DNA/RNA Molecule: Synthetic oligonucleotide
cggagacaatg

SEQ ID NO: 31860 - RNA, 9 nt, Artificial Sequence
  Description of Artificial Sequence: Synthetic oligonucleotide
  modified_base (2): LNA-G
ggaucuuau

SEQ ID NO: 31861 - RNA, 10 nt, Artificial Sequence
  Description of Artificial Sequence: Synthetic oligonucleotide
  modified_base (2): LNA-G
ggaucuuauu

SEQ ID NO: 31862 - RNA, 11 nt, Artificial Sequence
  Description of Artificial Sequence: Synthetic oligonucleotide
  modified_base (2): LNA-G
ggaucuuauuu

SEQ ID NO: 31863 - RNA, 12 nt, Artificial Sequence
  Description of Artificial Sequence: Synthetic oligonucleotide
  modified_base (2): LNA-G
ggaucuuauuuc

SEQ ID NO: 31864 - RNA, 8 nt, Artificial Sequence
  Description of Artificial Sequence: Synthetic oligonucleotide
  modified_base (3): LNA-A
cuacacaa

SEQ ID NO: 31865 - DNA, 13 bp, Artificial Sequence
  Description of Artificial Sequence: Synthetic oligonucleotide
  Description of Combined DNA/RNA Molecule: Synthetic oligonucleotide
  modified_base (8): LNA-A
aucagcgauuutt

SEQ ID NO: 31866 - DNA, 12 bp, Artificial Sequence
  Description of Artificial Sequence: Synthetic oligonucleotide
  Description of Combined DNA/RNA Molecule: Synthetic oligonucleotide
  modified_base (7): LNA-A
ucagcgauuutt

SEQ ID NO: 31867 - DNA, 11 bp, Artificial Sequence
  Description of Artificial Sequence: Synthetic oligonucleotide
  Description of Combined DNA/RNA Molecule: Synthetic oligonucleotide
  modified_base (6): LNA-A
cagcgauuutt

SEQ ID NO: 31868 - DNA, 10 bp, Artificial Sequence
  Description of Artificial Sequence: Synthetic oligonucleotide
  Description of Combined DNA/RNA Molecule: Synthetic oligonucleotide
  modified_base (5): LNA-A
agcgauuutt

SEQ ID NO: 31869 - DNA, 9 bp, Artificial Sequence
  Description of Artificial Sequence: Synthetic oligonucleotide
  Description of Combined DNA/RNA Molecule: Synthetic oligonucleotide
  modified_base (4): LNA-A
gcgauuutt

SEQ ID NO: 31870 - DNA, 8 bp, Artificial Sequence
  Description of Artificial Sequence: Synthetic oligonucleotide
  Description of Combined DNA/RNA Molecule: Synthetic oligonucleotide
  modified_base (3): LNA-A
cgauuutt

SEQ ID NO: 31871 - DNA, 7 bp, Artificial Sequence
  Description of Artificial Sequence: Synthetic oligonucleotide
  Description of Combined DNA/RNA Molecule: Synthetic oligonucleotide
  modified_base (2): LNA-A
gauuutt

SEQ ID NO: 31872 - RNA, 9 nt, Artificial Sequence
  Description of Artificial Sequence: Synthetic oligonucleotide
  modified_base (3): LNA-A
cuacacaaa

SEQ ID NO: 31873 - RNA, 10 nt, Artificial Sequence
  Description of Artificial Sequence: Synthetic oligonucleotide
  modified_base (3): LNA-A
cuacacaaau

SEQ ID NO: 31874 - RNA, 11 nt, Artificial Sequence
  Description of Artificial Sequence: Synthetic oligonucleotide
  modified_base (3): LNA-A
cuacacaaauc

SEQ ID NO: 31875 - RNA, 12 nt, Artificial Sequence
  Description of Artificial Sequence: Synthetic oligonucleotide
  modified_base (3): LNA-A
cuacacaaauca

SEQ ID NO: 31876 - RNA, 13 nt, Artificial Sequence
  Description of Artificial Sequence: Synthetic oligonucleotide
  modified_base (3): LNA-A
cuacacaaaucag

SEQ ID NO: 31877 - RNA, 14 nt, Artificial Sequence
  Description of Artificial Sequence: Synthetic oligonucleotide
  modified_base (3): LNA-A
cuacacaaaucagc

SEQ ID NO: 31878 - RNA, 13 nt, Artificial Sequence
  Description of Artificial Sequence: Synthetic oligonucleotide
  modified_base (2): LNA-G
ggaucuuauuucu

SEQ ID NO: 31879 - RNA, 14 nt, Artificial Sequence
  Description of Artificial Sequence: Synthetic oligonucleotide
  modified_base (2): LNA-G
ggaucuuauuucuu

SEQ ID NO: 31880 - RNA, 8 nt, Artificial Sequence
  Description of Artificial Sequence: Synthetic oligonucleotide
  modified_base (2): LNA-G
  modified_base (8): LNA-A
ggaucuua

SEQ ID NO: 31881 - RNA, 9 nt, Artificial Sequence
  Description of Artificial Sequence: Synthetic oligonucleotide
  modified_base (2): LNA-G
  modified_base (9): LNA-U
ggaucuuau

SEQ ID NO: 31882 - RNA, 10 nt, Artificial Sequence
  Description of Artificial Sequence: Synthetic oligonucleotide
  modified_base (2): LNA-G
  modified_base (10): LNA-U
ggaucuuauu

SEQ ID NO: 31883 - RNA, 11 nt, Artificial Sequence
  Description of Artificial Sequence: Synthetic oligonucleotide
  modified_base (2): LNA-G
  modified_base (11): LNA-U
ggaucuuauuu

SEQ ID NO: 31884 - RNA, 12 nt, Artificial Sequence
  Description of Artificial Sequence: Synthetic oligonucleotide
  modified_base (2): LNA-G
  modified_base (12): LNA-C
ggaucuuauuuc

SEQ ID NO: 31885 - RNA, 13 nt, Artificial Sequence
  Description of Artificial Sequence: Synthetic oligonucleotide
  modified_base (2): LNA-G
  modified_base (13): LNA-U
ggaucuuauuucu

SEQ ID NO: 31886 - RNA, 14 nt, Artificial Sequence
  Description of Artificial Sequence: Synthetic oligonucleotide
  modified_base (2): LNA-G
  modified_base (14): LNA-U
ggaucuuauuucuu

SEQ ID NO: 31887 - DNA, 13 bp, Artificial Sequence
  Description of Artificial Sequence: Synthetic oligonucleotide
  Description of Combined DNA/RNA Molecule: Synthetic oligonucleotide
  modified_base (8): LNA-G
uuucuucggagtt

SEQ ID NO: 31888 - DNA, 12 bp, Artificial Sequence
  Description of Artificial Sequence: Synthetic oligonucleotide
  Description of Combined DNA/RNA Molecule: Synthetic oligonucleotide
  modified_base (7): LNA-G
uucuucggagtt

SEQ ID NO: 31889 - DNA, 11 bp, Artificial Sequence
  Description of Artificial Sequence: Synthetic oligonucleotide
  Description of Combined DNA/RNA Molecule: Synthetic oligonucleotide
  modified_base (6): LNA-G
ucuucggagtt

SEQ ID NO: 31890 - DNA, 10 bp, Artificial Sequence
  Description of Artificial Sequence: Synthetic oligonucleotide
  Description of Combined DNA/RNA Molecule: Synthetic oligonucleotide
  modified_base (5): LNA-G
cuucggagtt

SEQ ID NO: 31891 - DNA, 9 bp, Artificial Sequence
  Description of Artificial Sequence: Synthetic oligonucleotide
  Description of Combined DNA/RNA Molecule: Synthetic oligonucleotide
  modified_base (4): LNA-G
uucggagtt

SEQ ID NO: 31892 - DNA, 8 bp, Artificial Sequence
  Description of Artificial Sequence: Synthetic oligonucleotide
  Description of Combined DNA/RNA Molecule: Synthetic oligonucleotide
  modified_base (3): LNA-G
ucggagtt

SEQ ID NO: 31893 - DNA, 7 bp, Artificial Sequence
  Description of Artificial Sequence: Synthetic oligonucleotide
  Description of Combined DNA/RNA Molecule: Synthetic oligonucleotide
  modified_base (2): LNA-G
cggagtt

SEQ ID NO: 31894 - DNA, 13 bp, Artificial Sequence
  Description of Artificial Sequence: Synthetic oligonucleotide
  Description of Combined DNA/RNA Molecule: Synthetic oligonucleotide
  modified_base (1): LNA-U
  modified_base (8): LNA-G
uuucuucggagtt

SEQ ID NO: 31895 - DNA, 12 bp, Artificial Sequence
  Description of Artificial Sequence: Synthetic oligonucleotide
  Description of Combined DNA/RNA Molecule: Synthetic oligonucleotide
  modified_base (1): LNA-U
  modified_base (7): LNA-G
uucuucggagtt

SEQ ID NO: 31896 - DNA, 11 bp, Artificial Sequence
  Description of Artificial Sequence: Synthetic oligonucleotide
  Description of Combined DNA/RNA Molecule: Synthetic oligonucleotide
  modified_base (1): LNA-U
  modified_base (6): LNA-G
ucuucggagtt

SEQ ID NO: 31897 - DNA, 10 bp, Artificial Sequence
  Description of Artificial Sequence: Synthetic oligonucleotide
  Description of Combined DNA/RNA Molecule: Synthetic oligonucleotide
  modified_base (1): LNA-C
  modified_base (5): LNA-G
cuucggagtt

SEQ ID NO: 31898 - DNA, 9 bp, Artificial Sequence
  Description of Artificial Sequence: Synthetic oligonucleotide
  Description of Combined DNA/RNA Molecule: Synthetic oligonucleotide
  modified_base (1): LNA-U
  modified_base (4): LNA-G
uucggagtt

SEQ ID NO: 31899 - DNA, 8 bp, Artificial Sequence
  Description of Artificial Sequence: Synthetic oligonucleotide
  Description of Combined DNA/RNA Molecule: Synthetic oligonucleotide
  modified_base (1): LNA-U
  modified_base (3): LNA-G
ucggagtt

SEQ ID NO: 31900 - DNA, 7 bp, Artificial Sequence
  Description of Artificial Sequence: Synthetic oligonucleotide
  Description of Combined DNA/RNA Molecule: Synthetic oligonucleotide
  modified_base (1): LNA-C
  modified_base (2): LNA-G
cggagtt

SEQ ID NO: 31901 - DNA, 21 bp, Artificial Sequence
  Description of Artificial Sequence: Synthetic oligonucleotide
  Description of Combined DNA/RNA Molecule: Synthetic oligonucleotide
  modified_base (2): LNA-G
  modified_base (16): LNA-G
ggaucuuauuucuucggagtt

SEQ ID NO: 31902 - DNA, 25 bp, Artificial Sequence
  Description of Artificial Sequence: Synthetic oligonucleotide
  Description of Combined DNA/RNA Molecule: Synthetic oligonucleotide
ggaucuuauuucuucggagacaatg

SEQ ID NO: 31903 - RNA, 25 nt, Artificial Sequence
  Description of Artificial Sequence: Synthetic oligonucleotide
guauuuugaugaggaguucacggcc

SEQ ID NO: 31904 - RNA, 25 nt, Artificial Sequence
  Description of Artificial Sequence: Synthetic oligonucleotide
ggcccagaugaucaccaucacacca

SEQ ID NO: 31905 - RNA, 25 nt, Artificial Sequence
  Description of Artificial Sequence: Synthetic oligonucleotide
gggaagaaaacuauccugcggguuu

SEQ ID NO: 31906 - RNA, 25 nt, Artificial Sequence
  Description of Artificial Sequence: Synthetic oligonucleotide
guuuuaauuuauuucauccaguuug

SEQ ID NO: 31907 - RNA, 25 nt, Artificial Sequence
  Description of Artificial Sequence: Synthetic oligonucleotide
acguagggaaauguuaaggacuucu

SEQ ID NO: 31908 - RNA, 25 nt, Artificial Sequence
  Description of Artificial Sequence: Synthetic oligonucleotide
ccaggguuuacccagugggacagag

SEQ ID NO: 31909 - RNA, 25 nt, Artificial Sequence
  Description of Artificial Sequence: Synthetic oligonucleotide
agcaagguuuaaauuuguuauugug

SEQ ID NO: 31910 - RNA, 25 nt, Artificial Sequence
  Description of Artificial Sequence: Synthetic oligonucleotide
uguauuauguuguucaaaugcauuu

SEQ ID NO: 31911 - RNA, 25 nt, Artificial Sequence
  Description of Artificial Sequence: Synthetic oligonucleotide
uuuuaaucuuugugacaggaaagcc

SEQ ID NO: 31912 - RNA, 25 nt, Artificial Sequence
  Description of Artificial Sequence: Synthetic oligonucleotide
uuaaucuuugugacaggaaagcccu

SEQ ID NO: 31913 - RNA, 25 nt, Artificial Sequence
  Description of Artificial Sequence: Synthetic oligonucleotide
gcugcuuaugucucccagcauggcc

SEQ ID NO: 31914 - RNA, 25 nt, Artificial Sequence
  Description of Artificial Sequence: Synthetic oligonucleotide
aaguguuucagaagcuucucccuga

SEQ ID NO: 31915 - RNA, 25 nt, Artificial Sequence
  Description of Artificial Sequence: Synthetic oligonucleotide
gaccaucaauaaggaagaagcccuu

SEQ ID NO: 31916 - RNA, 25 nt, Artificial Sequence
  Description of Artificial Sequence: Synthetic oligonucleotide
ccaucaauaaggaagaagcccuuca

SEQ ID NO: 31917 - RNA, 25 nt, Artificial Sequence
  Description of Artificial Sequence: Synthetic oligonucleotide
ucaauaaggaagaagcccuucagcg

SEQ ID NO: 31918 - RNA, 25 nt, Artificial Sequence
  Description of Artificial Sequence: Synthetic oligonucleotide
aauaaggaagaagcccuucagcggc

SEQ ID NO: 31919 - RNA, 25 nt, Artificial Sequence
  Description of Artificial Sequence: Synthetic oligonucleotide
aggaagaagcccuucagcggccagu

SEQ ID NO: 31920 - RNA, 25 nt, Artificial Sequence
  Description of Artificial Sequence: Synthetic oligonucleotide
gcauaacuaaaggugaaaagcuccg

SEQ ID NO: 31921 - RNA, 25 nt, Artificial Sequence
  Description of Artificial Sequence: Synthetic oligonucleotide
cauaacuaaaggugaaaagcuccgg

SEQ ID NO: 31922 - RNA, 25 nt, Artificial Sequence
  Description of Artificial Sequence: Synthetic oligonucleotide
cuacaucacgccagucaacagucug

SEQ ID NO: 31923 - RNA, 25 nt, Artificial Sequence
  Description of Artificial Sequence: Synthetic oligonucleotide
acuggauuuaagcagaguucaaaag

SEQ ID NO: 31924 - RNA, 25 nt, Artificial Sequence
  Description of Artificial Sequence: Synthetic oligonucleotide
cuggauuuaagcagaguucaaaagc

SEQ ID NO: 31925 - RNA, 25 nt, Artificial Sequence
  Description of Artificial Sequence: Synthetic oligonucleotide
gauuuaagcagaguucaaaagcccu

SEQ ID NO: 31926 - RNA, 25 nt, Artificial Sequence
  Description of Artificial Sequence: Synthetic oligonucleotide
auuuaagcagaguucaaaagcccuu

SEQ ID NO: 31927 - RNA, 25 nt, Artificial Sequence
  Description of Artificial Sequence: Synthetic oligonucleotide
uuaagcagaguucaaaagcccuuca

SEQ ID NO: 31928 - RNA, 25 nt, Artificial Sequence
  Description of Artificial Sequence: Synthetic oligonucleotide
uaagcagaguucaaaagcccuucag

SEQ ID NO: 31929 - RNA, 25 nt, Artificial Sequence
  Description of Artificial Sequence: Synthetic oligonucleotide
agcagaguucaaaagcccuucagcg

SEQ ID NO: 31930 - RNA, 25 nt, Artificial Sequence
  Description of Artificial Sequence: Synthetic oligonucleotide
cucagggucugagugaagccgcucg

SEQ ID NO: 31931 - RNA, 25 nt, Artificial Sequence
  Description of Artificial Sequence: Synthetic oligonucleotide
caagcaacuacaucacgccagucaa

SEQ ID NO: 31932 - RNA, 25 nt, Artificial Sequence
  Description of Artificial Sequence: Synthetic oligonucleotide
aucaauggcagcuucuuggugcgug

SEQ ID NO: 31933 - RNA, 25 nt, Artificial Sequence
  Description of Artificial Sequence: Synthetic oligonucleotide
uuccagcccacauuggauucaucag

SEQ ID NO: 31934 - RNA, 25 nt, Artificial Sequence
  Description of Artificial Sequence: Synthetic oligonucleotide
cagcugagaauguggaauaccuaag

SEQ ID NO: 31935 - RNA, 25 nt, Artificial Sequence
  Description of Artificial Sequence: Synthetic oligonucleotide
aacguaucuccuaauuugaggcuca

SEQ ID NO: 31936 - RNA, 25 nt, Artificial Sequence
  Description of Artificial Sequence: Synthetic oligonucleotide
ccuaaaauaauuucucuacaauugg

SEQ ID NO: 31937 - RNA, 25 nt, Artificial Sequence
  Description of Artificial Sequence: Synthetic oligonucleotide
uggaagauucagcuaguuaggagcc

SEQ ID NO: 31938 - RNA, 25 nt, Artificial Sequence
  Description of Artificial Sequence: Synthetic oligonucleotide
uuaaacucuccuagucaauauccac

SEQ ID NO: 31939 - RNA, 25 nt, Artificial Sequence
  Description of Artificial Sequence: Synthetic oligonucleotide
cagccuacaguuauguucagucaca

SEQ ID NO: 31940 - RNA, 25 nt, Artificial Sequence
  Description of Artificial Sequence: Synthetic oligonucleotide
guuauguucagucacacacacauac

SEQ ID NO: 31941 - RNA, 25 nt, Artificial Sequence
  Description of Artificial Sequence: Synthetic oligonucleotide
cacauacaaaauguuccuuuugcuu

SEQ ID NO: 31942 - RNA, 25 nt, Artificial Sequence
  Description of Artificial Sequence: Synthetic oligonucleotide
uccuuuugcuuuuaaaguaauuuuu

SEQ ID NO: 31943 - RNA, 25 nt, Artificial Sequence
  Description of Artificial Sequence: Synthetic oligonucleotide
ugaccugugaagcaacagucaaugg

SEQ ID NO: 31944 - RNA, 25 nt, Artificial Sequence
  Description of Artificial Sequence: Synthetic oligonucleotide
cuaucucacacaucgacaaaccaau

SEQ ID NO: 31945 - RNA, 25 nt, Artificial Sequence
  Description of Artificial Sequence: Synthetic oligonucleotide
uguccucaauuguacugcuaccacu

SEQ ID NO: 31946 - RNA, 25 nt, Artificial Sequence
  Description of Artificial Sequence: Synthetic oligonucleotide
aaaccguagcuggcaagcggucuua

SEQ ID NO: 31947 - RNA, 25 nt, Artificial Sequence
  Description of Artificial Sequence: Synthetic oligonucleotide
uagcuggcaagcggucuuaccggcu

SEQ ID NO: 31948 - RNA, 25 nt, Artificial Sequence
  Description of Artificial Sequence: Synthetic oligonucleotide
uuguaugguuaaaagauggguuacc

SEQ ID NO: 31949 - RNA, 25 nt, Artificial Sequence
  Description of Artificial Sequence: Synthetic oligonucleotide
ugguuaaaagauggguuaccugcga

SEQ ID NO: 31950 - RNA, 25 nt, Artificial Sequence
  Description of Artificial Sequence: Synthetic oligonucleotide
cagggaauuauacaaucuugcugag

SEQ ID NO: 31951 - RNA, 25 nt, Artificial Sequence
  Description of Artificial Sequence: Synthetic oligonucleotide
acaaucuugcugagcauaaaacagu

SEQ ID NO: 31952 - RNA, 25 nt, Artificial Sequence
  Description of Artificial Sequence: Synthetic oligonucleotide
ccaauaaugaagaguccuuuauccu

SEQ ID NO: 31953 - RNA, 25 nt, Artificial Sequence
  Description of Artificial Sequence: Synthetic oligonucleotide
acuuuggauguuccaacgcaaguug

SEQ ID NO: 31954 - RNA, 25 nt, Artificial Sequence
  Description of Artificial Sequence: Synthetic oligonucleotide
aaugcuuccacuaaacugaaaccau

SEQ ID NO: 31955 - RNA, 25 nt, Artificial Sequence
  Description of Artificial Sequence: Synthetic oligonucleotide
gagaaaguuugacuuuguuaaauau

SEQ ID NO: 31956 - RNA, 25 nt, Artificial Sequence
  Description of Artificial Sequence: Synthetic oligonucleotide
aaagaacuacuguauauuaaaaguu

SEQ ID NO: 31957 - RNA, 25 nt, Artificial Sequence
  Description of Artificial Sequence: Synthetic oligonucleotide
uuagaaauacggguuuugacuuaac

SEQ ID NO: 31958 - RNA, 25 nt, Artificial Sequence
  Description of Artificial Sequence: Synthetic oligonucleotide
aacauggguacagcaaacucagcac

SEQ ID NO: 31959 - RNA, 25 nt, Artificial Sequence
  Description of Artificial Sequence: Synthetic oligonucleotide
aaagacacagaagaugcugaccuca

SEQ ID NO: 31960 - RNA, 25 nt, Artificial Sequence
  Description of Artificial Sequence: Synthetic oligonucleotide
uaguagggagguuuauucagaucgc

SEQ ID NO: 31961 - RNA, 25 nt, Artificial Sequence
  Description of Artificial Sequence: Synthetic oligonucleotide
gccuucugcagcaggguucugggau

SEQ ID NO: 31962 - RNA, 25 nt, Artificial Sequence
  Description of Artificial Sequence: Synthetic oligonucleotide
ggucugguacauauuggaaauuaug

SEQ ID NO: 31963 - RNA, 25 nt, Artificial Sequence
  Description of Artificial Sequence: Synthetic oligonucleotide
cuaguccuuccgauggaagcacuag

SEQ ID NO: 31964 - RNA, 25 nt, Artificial Sequence
  Description of Artificial Sequence: Synthetic oligonucleotide
ccagugaauauuguuuuuaugugga

SEQ ID NO: 31965 - RNA, 25 nt, Artificial Sequence
  Description of Artificial Sequence: Synthetic oligonucleotide
augaauucaaguuggaauugguaga

SEQ ID NO: 31966 - RNA, 25 nt, Artificial Sequence
  Description of Artificial Sequence: Synthetic oligonucleotide
caggacacagauuuagacuuggaga

SEQ ID NO: 31967 - RNA, 25 nt, Artificial Sequence
  Description of Artificial Sequence: Synthetic oligonucleotide
cucaaagcacaguuacaguauucca

SEQ ID NO: 31968 - RNA, 25 nt, Artificial Sequence
  Description of Artificial Sequence: Synthetic oligonucleotide
accacugccaccacugaugaauuaa

SEQ ID NO: 31969 - RNA, 25 nt, Artificial Sequence
  Description of Artificial Sequence: Synthetic oligonucleotide
gaaacuacuagugccacaucaucac

SEQ ID NO: 31970 - RNA, 25 nt, Artificial Sequence
  Description of Artificial Sequence: Synthetic oligonucleotide
aagucggacagccucaccaaacaga

SEQ ID NO: 31971 - RNA, 25 nt, Artificial Sequence
  Description of Artificial Sequence: Synthetic oligonucleotide
gaaagcgaaaaauggaacaugaugg

SEQ ID NO: 31972 - RNA, 25 nt, Artificial Sequence
  Description of Artificial Sequence: Synthetic oligonucleotide
cccucugauuuagcauguagacugc

SEQ ID NO: 31973 - RNA, 25 nt, Artificial Sequence
  Description of Artificial Sequence: Synthetic oligonucleotide
ugagcuauuuaaggaucuauuuaug

SEQ ID NO: 31974 - RNA, 25 nt, Artificial Sequence
  Description of Artificial Sequence: Synthetic oligonucleotide
aaaaggugaaaaagcacuauuauca

SEQ ID NO: 31975 - RNA, 25 nt, Artificial Sequence
  Description of Artificial Sequence: Synthetic oligonucleotide
gaaaaagcacuauuaucaguucugc

SEQ ID NO: 31976 - RNA, 25 nt, Artificial Sequence
  Description of Artificial Sequence: Synthetic oligonucleotide
ggcugaaaagaaagauuaaaccuac

SEQ ID NO: 31977 - RNA, 25 nt, Artificial Sequence
  Description of Artificial Sequence: Synthetic oligonucleotide
uaaacccuuauaauaaaauccuucu

SEQ ID NO: 31978 - RNA, 25 nt, Artificial Sequence
  Description of Artificial Sequence: Synthetic oligonucleotide
cauacuauuagccaaugcuguagac

SEQ ID NO: 31979 - RNA, 25 nt, Artificial Sequence
  Description of Artificial Sequence: Synthetic oligonucleotide
gacagaagcauuuugauaggaauag

SEQ ID NO: 31980 - RNA, 25 nt, Artificial Sequence
  Description of Artificial Sequence: Synthetic oligonucleotide
agagcaaauaagauaauggcccuga

SEQ ID NO: 31981 - RNA, 25 nt, Artificial Sequence
  Description of Artificial Sequence: Synthetic oligonucleotide
ccaacauuuuucucuuccucaagca

SEQ ID NO: 31982 - RNA, 25 nt, Artificial Sequence
  Description of Artificial Sequence: Synthetic oligonucleotide
uuaaguaugagaaaaguucagccca

SEQ ID NO: 31983 - RNA, 25 nt, Artificial Sequence
  Description of Artificial Sequence: Synthetic oligonucleotide
caggaauaaagauggcugcugaacc

SEQ ID NO: 31984 - RNA, 25 nt, Artificial Sequence
  Description of Artificial Sequence: Synthetic oligonucleotide
aauuugaaugaccaaguucucuuca

SEQ ID NO: 31985 - RNA, 25 nt, Artificial Sequence
  Description of Artificial Sequence: Synthetic oligonucleotide
auguauaaagauagccagccuagag

SEQ ID NO: 31986 - RNA, 25 nt, Artificial Sequence
  Description of Artificial Sequence: Synthetic oligonucleotide
ggcuguaacuaucucugugaagugu

SEQ ID NO: 31987 - RNA, 25 nt, Artificial Sequence
  Description of Artificial Sequence: Synthetic oligonucleotide
ucugugaagugugagaaaauuucaa

SEQ ID NO: 31988 - RNA, 25 nt, Artificial Sequence
  Description of Artificial Sequence: Synthetic oligonucleotide
ccuuuaaggaaaugaauccuccuga

SEQ ID NO: 31989 - RNA, 25 nt, Artificial Sequence
  Description of Artificial Sequence: Synthetic oligonucleotide
aaggauacaaaaagugacaucauau

SEQ ID NO: 31990 - RNA, 25 nt, Artificial Sequence
  Description of Artificial Sequence: Synthetic oligonucleotide
agaugcaauuugaaucuucaucaua

SEQ ID NO: 31991 - RNA, 25 nt, Artificial Sequence
  Description of Artificial Sequence: Synthetic oligonucleotide
guucaaaacgaagacuagcuauuaa

SEQ ID NO: 31992 - RNA, 25 nt, Artificial Sequence
  Description of Artificial Sequence: Synthetic oligonucleotide
gugaaaccucaucucuacuaaaaau

SEQ ID NO: 31993 - RNA, 25 nt, Artificial Sequence
  Description of Artificial Sequence: Synthetic oligonucleotide
acgaaagagaagcucuaucucgccu

SEQ ID NO: 31994 - RNA, 25 nt, Artificial Sequence
  Description of Artificial Sequence: Synthetic oligonucleotide
cuccacaagcgccuucgguccaguu

SEQ ID NO: 31995 - RNA, 25 nt, Artificial Sequence
  Description of Artificial Sequence: Synthetic oligonucleotide
gagaagauuccaaagauguagccgc

SEQ ID NO: 31996 - RNA, 25 nt, Artificial Sequence
  Description of Artificial Sequence: Synthetic oligonucleotide
aaucuggauucaaugaggagacuug

SEQ ID NO: 31997 - RNA, 25 nt, Artificial Sequence
  Description of Artificial Sequence: Synthetic oligonucleotide
agaacagauuugagaguagugagga

SEQ ID NO: 31998 - RNA, 25 nt, Artificial Sequence
  Description of Artificial Sequence: Synthetic oligonucleotide
ccagagcugugcagaugaguacaaa

SEQ ID NO: 31999 - RNA, 25 nt, Artificial Sequence
  Description of Artificial Sequence: Synthetic oligonucleotide
ccucagauuguuguuguuaaugggc

SEQ ID NO: 32000 - RNA, 25 nt, Artificial Sequence
  Description of Artificial Sequence: Synthetic oligonucleotide
cuauuuuaauuauuuuuaauuuauu

SEQ ID NO: 32001 - RNA, 25 nt, Artificial Sequence
  Description of Artificial Sequence: Synthetic oligonucleotide
uuuaauuuauuaauauuuaaauaug

SEQ ID NO: 32002 - RNA, 25 nt, Artificial Sequence
  Description of Artificial Sequence: Synthetic oligonucleotide
augcaguuugaauauccuuuguuuc

SEQ ID NO: 32003 - RNA, 25 nt, Artificial Sequence
  Description of Artificial Sequence: Synthetic oligonucleotide
caugcugcuggcgucuaaguguuug

SEQ ID NO: 32004 - RNA, 25 nt, Artificial Sequence
  Description of Artificial Sequence: Synthetic oligonucleotide
agaugugcauuucaccugugacaaa

SEQ ID NO: 32005 - RNA, 25 nt, Artificial Sequence
  Description of Artificial Sequence: Synthetic oligonucleotide
ucaaaaccugugccaggcugaauua

SEQ ID NO: 32006 - RNA, 25 nt, Artificial Sequence
  Description of Artificial Sequence: Synthetic oligonucleotide
gaauguggguagucauucuuacaau

SEQ ID NO: 32007 - RNA, 25 nt, Artificial Sequence
  Description of Artificial Sequence: Synthetic oligonucleotide
auguggguagucauucuuacaauug

SEQ ID NO: 32008 - RNA, 25 nt, Artificial Sequence
  Description of Artificial Sequence: Synthetic oligonucleotide
ugaaaaugagcaucagagaguguac

SEQ ID NO: 32009 - RNA, 25 nt, Artificial Sequence
  Description of Artificial Sequence: Synthetic oligonucleotide
uugcuuuucauguagaacucagcag

SEQ ID NO: 32010 - RNA, 25 nt, Artificial Sequence
  Description of Artificial Sequence: Synthetic oligonucleotide
uguauuucuauauuuauuuucagua

SEQ ID NO: 32011 - RNA, 25 nt, Artificial Sequence
  Description of Artificial Sequence: Synthetic oligonucleotide
uuugauuaauguuucuuaaauggaa

SEQ ID NO: 32012 - RNA, 25 nt, Artificial Sequence
  Description of Artificial Sequence: Synthetic oligonucleotide
caacguguauagugccuaaaauugu

SEQ ID NO: 32013 - RNA, 25 nt, Artificial Sequence
  Description of Artificial Sequence: Synthetic oligonucleotide
cauauccuuggcuacuaacaucugg

SEQ ID NO: 32014 - RNA, 25 nt, Artificial Sequence
  Description of Artificial Sequence: Synthetic oligonucleotide
uacuaacaucuggagacugugagcu

SEQ ID NO: 32015 - RNA, 25 nt, Artificial Sequence
  Description of Artificial Sequence: Synthetic oligonucleotide
cauaaguugugugcuuuuuauuaau

SEQ ID NO: 32016 - RNA, 25 nt, Artificial Sequence
  Description of Artificial Sequence: Synthetic oligonucleotide
gcaucauuuuggcucuucuuacauu

SEQ ID NO: 32017 - RNA, 25 nt, Artificial Sequence
  Description of Artificial Sequence: Synthetic oligonucleotide
gcucuucuuacauuuguaaaaaugu

SEQ ID NO: 32018 - RNA, 25 nt, Artificial Sequence
  Description of Artificial Sequence: Synthetic oligonucleotide
agauuaggucaucuuaauucauauu

SEQ ID NO: 32019 - RNA, 25 nt, Artificial Sequence
  Description of Artificial Sequence: Synthetic oligonucleotide
auggaauugaaagaacuaaucauga

SEQ ID NO: 32020 - RNA, 25 nt, Artificial Sequence
  Description of Artificial Sequence: Synthetic oligonucleotide
cacacucauuccuucugcucuuggg

SEQ ID NO: 32021 - RNA, 25 nt, Artificial Sequence
  Description of Artificial Sequence: Synthetic oligonucleotide
uguagagguaaccaguagcuuugag

SEQ ID NO: 32022 - RNA, 25 nt, Artificial Sequence
  Description of Artificial Sequence: Synthetic oligonucleotide
caaccacaugccacguaauauuuca

SEQ ID NO: 32023 - RNA, 25 nt, Artificial Sequence
  Description of Artificial Sequence: Synthetic oligonucleotide
ucggaaacaaguuauucucuucacu

SEQ ID NO: 32024 - RNA, 25 nt, Artificial Sequence
  Description of Artificial Sequence: Synthetic oligonucleotide
acucccaauaacuaaugcuaagaaa

SEQ ID NO: 32025 - RNA, 25 nt, Artificial Sequence
  Description of Artificial Sequence: Synthetic oligonucleotide
aaugcuaagaaaugcugaaaaucaa

SEQ ID NO: 32026 - RNA, 25 nt, Artificial Sequence
  Description of Artificial Sequence: Synthetic oligonucleotide
gucuuucucuaaauaugauuacuuu

SEQ ID NO: 32027 - RNA, 25 nt, Artificial Sequence
  Description of Artificial Sequence: Synthetic oligonucleotide
ugaauuucaggcauuuuguucuaca

SEQ ID NO: 32028 - RNA, 25 nt, Artificial Sequence
  Description of Artificial Sequence: Synthetic oligonucleotide
cgauucccucucacccgggacucuc

SEQ ID NO: 32029 - RNA, 25 nt, Artificial Sequence
  Description of Artificial Sequence: Synthetic oligonucleotide
aggaaagugaaccuuuaaaguaaag

SEQ ID NO: 32030 - RNA, 25 nt, Artificial Sequence
  Description of Artificial Sequence: Synthetic oligonucleotide
gaggcugcaugcucuggaagccugg

SEQ ID NO: 32031 - RNA, 25 nt, Artificial Sequence
  Description of Artificial Sequence: Synthetic oligonucleotide
ucucugaacagaaaacaaaagagag

SEQ ID NO: 32032 - RNA, 25 nt, Artificial Sequence
  Description of Artificial Sequence: Synthetic oligonucleotide
aacuuggcuguaaucaguuaugccg

SEQ ID NO: 32033 - RNA, 25 nt, Artificial Sequence
  Description of Artificial Sequence: Synthetic oligonucleotide
agaagccaaaauuaaaagaagucca

SEQ ID NO: 32034 - RNA, 25 nt, Artificial Sequence
  Description of Artificial Sequence: Synthetic oligonucleotide
auuaaaagaaguccaggugagguua

SEQ ID NO: 32035 - RNA, 25 nt, Artificial Sequence
  Description of Artificial Sequence: Synthetic oligonucleotide
gaauccggauuaucgggaagaggac

SEQ ID NO: 32036 - RNA, 25 nt, Artificial Sequence
  Description of Artificial Sequence: Synthetic oligonucleotide
aaugugacaucaaagcaaguauugu

SEQ ID NO: 32037 - RNA, 25 nt, Artificial Sequence
  Description of Artificial Sequence: Synthetic oligonucleotide
caucaaagcaaguauuguagcacuc

SEQ ID NO: 32038 - RNA, 25 nt, Artificial Sequence
  Description of Artificial Sequence: Synthetic oligonucleotide
agagagagaaaacaaaaccacaaau

SEQ ID NO: 32039 - RNA, 25 nt, Artificial Sequence
  Description of Artificial Sequence: Synthetic oligonucleotide
ucgcuguaguauuuaagcccauaca

SEQ ID NO: 32040 - RNA, 25 nt, Artificial Sequence
  Description of Artificial Sequence: Synthetic oligonucleotide
cgcuguaguauuuaagcccauacag

SEQ ID NO: 32041 - RNA, 25 nt, Artificial Sequence
  Description of Artificial Sequence: Synthetic oligonucleotide
auuuaagcccauacagaaaccuucc

SEQ ID NO: 32042 - RNA, 25 nt, Artificial Sequence
  Description of Artificial Sequence: Synthetic oligonucleotide
auuaaaauaaacaugguauaccuac

SEQ ID NO: 32043 - RNA, 25 nt, Artificial Sequence
  Description of Artificial Sequence: Synthetic oligonucleotide
cuguucugaucggccaguuuucgga

SEQ ID NO: 32044 - RNA, 25 nt, Artificial Sequence
  Description of Artificial Sequence: Synthetic oligonucleotide
aaauaauuugaacuuuggaacaggg

SEQ ID NO: 32045 - RNA, 25 nt, Artificial Sequence
  Description of Artificial Sequence: Synthetic oligonucleotide
ugcgaccuuaauuuaacuuuccagu

SEQ ID NO: 32046 - RNA, 25 nt, Artificial Sequence
  Description of Artificial Sequence: Synthetic oligonucleotide
cugagaaagcuaaaguuugguuuug

SEQ ID NO: 32047 - RNA, 25 nt, Artificial Sequence
  Description of Artificial Sequence: Synthetic oligonucleotide
aguaaagaugcuacuucccacugua

SEQ ID NO: 32048 - RNA, 25 nt, Artificial Sequence
  Description of Artificial Sequence: Synthetic oligonucleotide
cugcuuaauugcugauaccauauga

SEQ ID NO: 32049 - RNA, 25 nt, Artificial Sequence
  Description of Artificial Sequence: Synthetic oligonucleotide
uaccauaugaaugaaacaugggcug

SEQ ID NO: 32050 - RNA, 25 nt, Artificial Sequence
  Description of Artificial Sequence: Synthetic oligonucleotide
aacuuucuuauccaacuuuuucaua

SEQ ID NO: 32051 - RNA, 25 nt, Artificial Sequence
  Description of Artificial Sequence: Synthetic oligonucleotide
ccuugcaugacaucaugaggccgga

SEQ ID NO: 32052 - RNA, 25 nt, Artificial Sequence
  Description of Artificial Sequence: Synthetic oligonucleotide
ugaauuuguauaugacugcauuugu

SEQ ID NO: 32053 - RNA, 25 nt, Artificial Sequence
  Description of Artificial Sequence: Synthetic oligonucleotide
gaauccuaguagaauguuuacuacc

SEQ ID NO: 32054 - RNA, 25 nt, Artificial Sequence
  Description of Artificial Sequence: Synthetic oligonucleotide
gaaagggaagaauuuuuugaugaaa

SEQ ID NO: 32055 - RNA, 25 nt, Artificial Sequence
  Description of Artificial Sequence: Synthetic oligonucleotide
uaucggcaugccagugugugaauuu

SEQ ID NO: 32056 - RNA, 25 nt, Artificial Sequence
  Description of Artificial Sequence: Synthetic oligonucleotide
caccucauaguagagcaauguaugu

SEQ ID NO: 32057 - RNA, 25 nt, Artificial Sequence
  Description of Artificial Sequence: Synthetic oligonucleotide
ccagaauugccaaagcacauauaua

SEQ ID NO: 32058 - RNA, 25 nt, Artificial Sequence
  Description of Artificial Sequence: Synthetic oligonucleotide
uggugaucuggguaauaguuucucc

SEQ ID NO: 32059 - RNA, 25 nt, Artificial Sequence
  Description of Artificial Sequence: Synthetic oligonucleotide
gaucuggguaauaguuucuccaaau

SEQ ID NO: 32060 - RNA, 25 nt, Artificial Sequence
  Description of Artificial Sequence: Synthetic oligonucleotide
ggaugugaugaauacuuccuagaaa

SEQ ID NO: 32061 - RNA, 25 nt, Artificial Sequence
  Description of Artificial Sequence: Synthetic oligonucleotide
cauuuccacagcuacaccauauaug

SEQ ID NO: 32062 - RNA, 25 nt, Artificial Sequence
  Description of Artificial Sequence: Synthetic oligonucleotide
acagcuacaccauauaugaauggag

SEQ ID NO: 32063 - RNA, 25 nt, Artificial Sequence
  Description of Artificial Sequence: Synthetic oligonucleotide
ugcaguucuuacacgagaagaagau

SEQ ID NO: 32064 - RNA, 25 nt, Artificial Sequence
  Description of Artificial Sequence: Synthetic oligonucleotide
acgagaagaagaucauuuacaggga

SEQ ID NO: 32065 - RNA, 25 nt, Artificial Sequence
  Description of Artificial Sequence: Synthetic oligonucleotide
cgagaagaagaucauuuacagggac

SEQ ID NO: 32066 - RNA, 25 nt, Artificial Sequence
  Description of Artificial Sequence: Synthetic oligonucleotide
aagaagaucauuuacagggaccuga

SEQ ID NO: 32067 - RNA, 25 nt, Artificial Sequence
  Description of Artificial Sequence: Synthetic oligonucleotide
agaggaagagguguuugacugcauc

SEQ ID NO: 32068 - RNA, 25 nt, Artificial Sequence
  Description of Artificial Sequence: Synthetic oligonucleotide
gaggaagagguguuugacugcaucg

SEQ ID NO: 32069 - RNA, 25 nt, Artificial Sequence
  Description of Artificial Sequence: Synthetic oligonucleotide
cuacuuugagggcgaguucacaggg

SEQ ID NO: 32070 - RNA, 25 nt, Artificial Sequence
  Description of Artificial Sequence: Synthetic oligonucleotide
agggcaucuccuggcaccucugucc

SEQ ID NO: 32071 - RNA, 25 nt, Artificial Sequence
  Description of Artificial Sequence: Synthetic oligonucleotide
ggagugauaugguuugucuuuuuaa

SEQ ID NO: 32072 - RNA, 25 nt, Artificial Sequence
  Description of Artificial Sequence: Synthetic oligonucleotide
gagugauaugguuugucuuuuuaag

SEQ ID NO: 32073 - RNA, 25 nt, Artificial Sequence
  Description of Artificial Sequence: Synthetic oligonucleotide
ugcaguaaagauccuaaagguuguc

SEQ ID NO: 32074 - RNA, 25 nt, Artificial Sequence
  Description of Artificial Sequence: Synthetic oligonucleotide
aguaaagauccuaaagguugucgac

SEQ ID NO: 32075 - RNA, 25 nt, Artificial Sequence
  Description of Artificial Sequence: Synthetic oligonucleotide
ugacaaaggacaaccuggcaauugu

SEQ ID NO: 32076 - RNA, 25 nt, Artificial Sequence
  Description of Artificial Sequence: Synthetic oligonucleotide
gcaauugugacccaguggugcgagg

SEQ ID NO: 32077 - RNA, 25 nt, Artificial Sequence
  Description of Artificial Sequence: Synthetic oligonucleotide
aacaucauccauagagacaugaaau

SEQ ID NO: 32078 - RNA, 25 nt, Artificial Sequence
  Description of Artificial Sequence: Synthetic oligonucleotide
ugaaauccaacaauauauuucucca

SEQ ID NO: 32079 - RNA, 25 nt, Artificial Sequence
  Description of Artificial Sequence: Synthetic oligonucleotide
aacaauauauuucuccaugaaggcu

SEQ ID NO: 32080 - RNA, 25 nt, Artificial Sequence
  Description of Artificial Sequence: Synthetic oligonucleotide
aacaguaaagucacgcuggaguggu

SEQ ID NO: 32081 - RNA, 25 nt, Artificial Sequence
  Description of Artificial Sequence: Synthetic oligonucleotide
ugugaagaaaguaaaggaagagagg

SEQ ID NO: 32082 - RNA, 25 nt, Artificial Sequence
  Description of Artificial Sequence: Synthetic oligonucleotide
cuuccgagccauccuugcaucgggc

SEQ ID NO: 32083 - RNA, 25 nt, Artificial Sequence
  Description of Artificial Sequence: Synthetic oligonucleotide
aauggagguugaauauccuacugug

SEQ ID NO: 32084 - RNA, 25 nt, Artificial Sequence
  Description of Artificial Sequence: Synthetic oligonucleotide
ggagguugaauauccuacuguguaa

SEQ ID NO: 32085 - RNA, 25 nt, Artificial Sequence
  Description of Artificial Sequence: Synthetic oligonucleotide
auuuugaguuuucccuuguagugua

SEQ ID NO: 32086 - RNA, 25 nt, Artificial Sequence
  Description of Artificial Sequence: Synthetic oligonucleotide
uauccuguuuguucuuuguugauug

SEQ ID NO: 32087 - RNA, 25 nt, Artificial Sequence
  Description of Artificial Sequence: Synthetic oligonucleotide
ccuguuuguucuuuguugauugaaa

SEQ ID NO: 32088 - RNA, 25 nt, Artificial Sequence
  Description of Artificial Sequence: Synthetic oligonucleotide
cucuacagccuucuuuuucuuccau

SEQ ID NO: 32089 - RNA, 25 nt, Artificial Sequence
  Description of Artificial Sequence: Synthetic oligonucleotide
ucuuccauagcuaaucuuccuucua

SEQ ID NO: 32090 - RNA, 25 nt, Artificial Sequence
  Description of Artificial Sequence: Synthetic oligonucleotide
auaaucuuccuguugaaugcuucau

SEQ ID NO: 32091 - RNA, 25 nt, Artificial Sequence
  Description of Artificial Sequence: Synthetic oligonucleotide
uaaucuuccuguugaaugcuucaug

SEQ ID NO: 32092 - RNA, 25 nt, Artificial Sequence
  Description of Artificial Sequence: Synthetic oligonucleotide
cuucaugacuugaauucuacuuuga

SEQ ID NO: 32093 - RNA, 25 nt, Artificial Sequence
  Description of Artificial Sequence: Synthetic oligonucleotide
aagagggagagaagcaacuacagac

SEQ ID NO: 32094 - RNA, 25 nt, Artificial Sequence
  Description of Artificial Sequence: Synthetic oligonucleotide
cgucuccuaccagaccaaggucaac

SEQ ID NO: 32095 - RNA, 25 nt, Artificial Sequence
  Description of Artificial Sequence: Synthetic oligonucleotide
gaucaaucggcccgacuaucucgac

SEQ ID NO: 32096 - RNA, 25 nt, Artificial Sequence
  Description of Artificial Sequence: Synthetic oligonucleotide
ggacgaacauccaaccuucccaaac

SEQ ID NO: 32097 - RNA, 25 nt, Artificial Sequence
  Description of Artificial Sequence: Synthetic oligonucleotide
agggucggaacccaagcuuagaacu

SEQ ID NO: 32098 - RNA, 25 nt, Artificial Sequence
  Description of Artificial Sequence: Synthetic oligonucleotide
ucggaacccaagcuuagaacuuuaa

SEQ ID NO: 32099 - RNA, 25 nt, Artificial Sequence
  Description of Artificial Sequence: Synthetic oligonucleotide
acccaagcuuagaacuuuaagcaac

SEQ ID NO: 32100 - RNA, 25 nt, Artificial Sequence
  Description of Artificial Sequence: Synthetic oligonucleotide
gaacuuuaagcaacaagaccaccac

SEQ ID NO: 32101 - RNA, 25 nt, Artificial Sequence
  Description of Artificial Sequence: Synthetic oligonucleotide
acuauucaguggcgagaaauaaagu

SEQ ID NO: 32102 - RNA, 25 nt, Artificial Sequence
  Description of Artificial Sequence: Synthetic oligonucleotide
cuauucaguggcgagaaauaaaguu

SEQ ID NO: 32103 - RNA, 25 nt, Artificial Sequence
  Description of Artificial Sequence: Synthetic oligonucleotide
aaacacagauaacaggaaaugaucc

SEQ ID NO: 32104 - RNA, 25 nt, Artificial Sequence
  Description of Artificial Sequence: Synthetic oligonucleotide
cuuaagaaaagagaagaaaugaaac

SEQ ID NO: 32105 - RNA, 25 nt, Artificial Sequence
  Description of Artificial Sequence: Synthetic oligonucleotide
cugaaggaguguguuuccauccucc

SEQ ID NO: 32106 - RNA, 25 nt, Artificial Sequence
  Description of Artificial Sequence: Synthetic oligonucleotide
ucaccgcgggacugaaaaucuuuga

SEQ ID NO: 32107 - RNA, 25 nt, Artificial Sequence
  Description of Artificial Sequence: Synthetic oligonucleotide
agcagaaauaagcgugccguucagg

SEQ ID NO: 32108 - RNA, 25 nt, Artificial Sequence
  Description of Artificial Sequence: Synthetic oligonucleotide
aagcgugccguucaggguccagaag

SEQ ID NO: 32109 - RNA, 25 nt, Artificial Sequence
  Description of Artificial Sequence: Synthetic oligonucleotide
agaaacagucacucaagacugcuug

SEQ ID NO: 32110 - RNA, 25 nt, Artificial Sequence
  Description of Artificial Sequence: Synthetic oligonucleotide
agaggaagaagguccaugucuuugg

SEQ ID NO: 32111 - RNA, 25 nt, Artificial Sequence
  Description of Artificial Sequence: Synthetic oligonucleotide
uguauucaaaauaugccugaaacac

SEQ ID NO: 32112 - RNA, 25 nt, Artificial Sequence
  Description of Artificial Sequence: Synthetic oligonucleotide
auuuuccucccuuucucuguaccuc

SEQ ID NO: 32113 - RNA, 25 nt, Artificial Sequence
  Description of Artificial Sequence: Synthetic oligonucleotide
caaagaaagauagagcaagacaaga

SEQ ID NO: 32114 - RNA, 25 nt, Artificial Sequence
  Description of Artificial Sequence: Synthetic oligonucleotide
aagaaagauagagcaagacaagaaa

SEQ ID NO: 32115 - RNA, 25 nt, Artificial Sequence
  Description of Artificial Sequence: Synthetic oligonucleotide
gaaagcauuuguuuguacaagaucc

SEQ ID NO: 32116 - RNA, 25 nt, Artificial Sequence
  Description of Artificial Sequence: Synthetic oligonucleotide
ugaguuaaacgaacguacuugcaga

SEQ ID NO: 32117 - RNA, 25 nt, Artificial Sequence
  Description of Artificial Sequence: Synthetic oligonucleotide
acugauacagaacgaucgauacaga

SEQ ID NO: 32118 - RNA, 25 nt, Artificial Sequence
  Description of Artificial Sequence: Synthetic oligonucleotide
auauuauauauauauaaaaauaaau

SEQ ID NO: 32119 - RNA, 25 nt, Artificial Sequence
  Description of Artificial Sequence: Synthetic oligonucleotide
auuauauauauauaaaaauaaauau

SEQ ID NO: 32120 - RNA, 25 nt, Artificial Sequence
  Description of Artificial Sequence: Synthetic oligonucleotide
ucacuggauguauuugacugcugug

SEQ ID NO: 32121 - RNA, 25 nt, Artificial Sequence
  Description of Artificial Sequence: Synthetic oligonucleotide
cagggaagaggaggagaugagagac

SEQ ID NO: 32122 - RNA, 25 nt, Artificial Sequence
  Description of Artificial Sequence: Synthetic oligonucleotide
augaucuuuuuuuugucccacuugg

SEQ ID NO: 32123 - RNA, 27 nt, Artificial Sequence
  Description of Artificial Sequence: Synthetic oligonucleotide
ggccgugaacuccucaucaaaauaccu

SEQ ID NO: 32124 - RNA, 27 nt, Artificial Sequence
  Description of Artificial Sequence: Synthetic oligonucleotide
uggugugauggugaucaucugggccgu

SEQ ID NO: 32125 - RNA, 27 nt, Artificial Sequence
  Description of Artificial Sequence: Synthetic oligonucleotide
aaacccgcaggauaguuuucuucccua

SEQ ID NO: 32126 - RNA, 27 nt, Artificial Sequence
  Description of Artificial Sequence: Synthetic oligonucleotide
caaacuggaugaaauaaauuaaaaccc

SEQ ID NO: 32127 - RNA, 27 nt, Artificial Sequence
  Description of Artificial Sequence: Synthetic oligonucleotide
agaaguccuuaacauuucccuacguga

SEQ ID NO: 32128 - RNA, 27 nt, Artificial Sequence
  Description of Artificial Sequence: Synthetic oligonucleotide
cucugucccacuggguaaacccuggcc

SEQ ID NO: 32129 - RNA, 27 nt, Artificial Sequence
  Description of Artificial Sequence: Synthetic oligonucleotide
cacaauaacaaauuuaaaccuugcucc

SEQ ID NO: 32130 - RNA, 27 nt, Artificial Sequence
  Description of Artificial Sequence: Synthetic oligonucleotide
aaaugcauuugaacaacauaauacaca

SEQ ID NO: 32131 - RNA, 27 nt, Artificial Sequence
  Description of Artificial Sequence: Synthetic oligonucleotide
ggcuuuccugucacaaagauuaaaaac

SEQ ID NO: 32132 - RNA, 27 nt, Artificial Sequence
  Description of Artificial Sequence: Synthetic oligonucleotide
agggcuuuccugucacaaagauuaaaa

SEQ ID NO: 32133 - RNA, 27 nt, Artificial Sequence
  Description of Artificial Sequence: Synthetic oligonucleotide
ggccaugcugggagacauaagcagcag

SEQ ID NO: 32134 - RNA, 27 nt, Artificial Sequence
  Description of Artificial Sequence: Synthetic oligonucleotide
ucagggagaagcuucugaaacacuucu

SEQ ID NO: 32135 - RNA, 27 nt, Artificial Sequence
  Description of Artificial Sequence: Synthetic oligonucleotide
aagggcuucuuccuuauugauggucag

SEQ ID NO: 32136 - RNA, 27 nt, Artificial Sequence
  Description of Artificial Sequence: Synthetic oligonucleotide
ugaagggcuucuuccuuauugaugguc

SEQ ID NO: 32137 - RNA, 27 nt, Artificial Sequence
  Description of Artificial Sequence: Synthetic oligonucleotide
cgcugaagggcuucuuccuuauugaug

SEQ ID NO: 32138 - RNA, 27 nt, Artificial Sequence
  Description of Artificial Sequence: Synthetic oligonucleotide
gccgcugaagggcuucuuccuuauuga

SEQ ID NO: 32139 - RNA, 27 nt, Artificial Sequence
  Description of Artificial Sequence: Synthetic oligonucleotide
acuggccgcugaagggcuucuuccuua

SEQ ID NO: 32140 - RNA, 27 nt, Artificial Sequence
  Description of Artificial Sequence: Synthetic oligonucleotide
cggagcuuuucaccuuuaguuaugcuu

SEQ ID NO: 32141 - RNA, 27 nt, Artificial Sequence
  Description of Artificial Sequence: Synthetic oligonucleotide
ccggagcuuuucaccuuuaguuaugcu

SEQ ID NO: 32142 - RNA, 27 nt, Artificial Sequence
  Description of Artificial Sequence: Synthetic oligonucleotide
cagacuguugacuggcgugauguaguu

SEQ ID NO: 32143 - RNA, 27 nt, Artificial Sequence
  Description of Artificial Sequence: Synthetic oligonucleotide
cuuuugaacucugcuuaaauccagugg

SEQ ID NO: 32144 - RNA, 27 nt, Artificial Sequence
  Description of Artificial Sequence: Synthetic oligonucleotide
gcuuuugaacucugcuuaaauccagug

SEQ ID NO: 32145 - RNA, 27 nt, Artificial Sequence
  Description of Artificial Sequence: Synthetic oligonucleotide
agggcuuuugaacucugcuuaaaucca

SEQ ID NO: 32146 - RNA, 27 nt, Artificial Sequence
  Description of Artificial Sequence: Synthetic oligonucleotide
aagggcuuuugaacucugcuuaaaucc

SEQ ID NO: 32147 - RNA, 27 nt, Artificial Sequence
  Description of Artificial Sequence: Synthetic oligonucleotide
ugaagggcuuuugaacucugcuuaaau

SEQ ID NO: 32148 - RNA, 27 nt, Artificial Sequence
  Description of Artificial Sequence: Synthetic oligonucleotide
cugaagggcuuuugaacucugcuuaaa

SEQ ID NO: 32149 - RNA, 27 nt, Artificial Sequence
  Description of Artificial Sequence: Synthetic oligonucleotide
cgcugaagggcuuuugaacucugcuua

SEQ ID NO: 32150 - RNA, 27 nt, Artificial Sequence
  Description of Artificial Sequence: Synthetic oligonucleotide
cgagcggcuucacucagacccugaggc

SEQ ID NO: 32151 - RNA, 27 nt, Artificial Sequence
  Description of Artificial Sequence: Synthetic oligonucleotide
uugacuggcgugauguaguugcuuggg

SEQ ID NO: 32152 - RNA, 27 nt, Artificial Sequence
  Description of Artificial Sequence: Synthetic oligonucleotide
cacgcaccaagaagcugccauugaucc

SEQ ID NO: 32153 - RNA, 27 nt, Artificial Sequence
  Description of Artificial Sequence: Synthetic oligonucleotide
cugaugaauccaaugugggcuggaauc

SEQ ID NO: 32154 - RNA, 27 nt, Artificial Sequence
  Description of Artificial Sequence: Synthetic oligonucleotide
cuuagguauuccacauucucagcugug

SEQ ID NO: 32155 - RNA, 27 nt, Artificial Sequence
  Description of Artificial Sequence: Synthetic oligonucleotide
ugagccucaaauuaggagauacguuuu

SEQ ID NO: 32156 - RNA, 27 nt, Artificial Sequence
  Description of Artificial Sequence: Synthetic oligonucleotide
ccaauuguagagaaauuauuuuaggaa

SEQ ID NO: 32157 - RNA, 27 nt, Artificial Sequence
  Description of Artificial Sequence: Synthetic oligonucleotide
ggcuccuaacuagcugaaucuuccaau

SEQ ID NO: 32158 - RNA, 27 nt, Artificial Sequence
  Description of Artificial Sequence: Synthetic oligonucleotide
guggauauugacuaggagaguuuaaaa

SEQ ID NO: 32159 - RNA, 27 nt, Artificial Sequence
  Description of Artificial Sequence: Synthetic oligonucleotide
ugugacugaacauaacuguaggcugaa

SEQ ID NO: 32160 - RNA, 27 nt, Artificial Sequence
  Description of Artificial Sequence: Synthetic oligonucleotide
guaugugugugugacugaacauaacug

SEQ ID NO: 32161 - RNA, 27 nt, Artificial Sequence
  Description of Artificial Sequence: Synthetic oligonucleotide
aagcaaaaggaacauuuuguaugugug

SEQ ID NO: 32162 - RNA, 27 nt, Artificial Sequence
  Description of Artificial Sequence: Synthetic oligonucleotide
aaaaauuacuuuaaaagcaaaaggaac

SEQ ID NO: 32163 - RNA, 27 nt, Artificial Sequence
  Description of Artificial Sequence: Synthetic oligonucleotide
ccauugacuguugcuucacaggucaga

SEQ ID NO: 32164 - RNA, 27 nt, Artificial Sequence
  Description of Artificial Sequence: Synthetic oligonucleotide
auugguuugucgaugugugagauaguu

SEQ ID NO: 32165 - RNA, 27 nt, Artificial Sequence
  Description of Artificial Sequence: Synthetic oligonucleotide
agugguagcaguacaauugaggacaag

SEQ ID NO: 32166 - RNA, 27 nt, Artificial Sequence
  Description of Artificial Sequence: Synthetic oligonucleotide
uaagaccgcuugccagcuacgguuuca

SEQ ID NO: 32167 - RNA, 27 nt, Artificial Sequence
  Description of Artificial Sequence: Synthetic oligonucleotide
agccgguaagaccgcuugccagcuacg

SEQ ID NO: 32168 - RNA, 27 nt, Artificial Sequence
  Description of Artificial Sequence: Synthetic oligonucleotide
gguaacccaucuuuuaaccauacaacu

SEQ ID NO: 32169 - RNA, 27 nt, Artificial Sequence
  Description of Artificial Sequence: Synthetic oligonucleotide
ucgcagguaacccaucuuuuaaccaua

SEQ ID NO: 32170 - RNA, 27 nt, Artificial Sequence
  Description of Artificial Sequence: Synthetic oligonucleotide
cucagcaagauuguauaauucccugca

SEQ ID NO: 32171 - RNA, 27 nt, Artificial Sequence
  Description of Artificial Sequence: Synthetic oligonucleotide
acuguuuuaugcucagcaagauuguau

SEQ ID NO: 32172 - RNA, 27 nt, Artificial Sequence
  Description of Artificial Sequence: Synthetic oligonucleotide
aggauaaaggacucuucauuauuggaa

SEQ ID NO: 32173 - RNA, 27 nt, Artificial Sequence
  Description of Artificial Sequence: Synthetic oligonucleotide
caacuugcguuggaacauccaaagugu

SEQ ID NO: 32174 - RNA, 27 nt, Artificial Sequence
  Description of Artificial Sequence: Synthetic oligonucleotide
augguuucaguuuaguggaagcauuua

SEQ ID NO: 32175 - RNA, 27 nt, Artificial Sequence
  Description of Artificial Sequence: Synthetic oligonucleotide
auauuuaacaaagucaaacuuucucac

SEQ ID NO: 32176 - RNA, 27 nt, Artificial Sequence
  Description of Artificial Sequence: Synthetic oligonucleotide
aacuuuuaauauacaguaguucuuuuc

SEQ ID NO: 32177 - RNA, 27 nt, Artificial Sequence
  Description of Artificial Sequence: Synthetic oligonucleotide
guuaagucaaaacccguauuucuaaag

SEQ ID NO: 32178 - RNA, 27 nt, Artificial Sequence
  Description of Artificial Sequence: Synthetic oligonucleotide
gugcugaguuugcuguacccauguuga

SEQ ID NO: 32179 - RNA, 27 nt, Artificial Sequence
  Description of Artificial Sequence: Synthetic oligonucleotide
ugaggucagcaucuucugugucuuuac

SEQ ID NO: 32180 - RNA, 27 nt, Artificial Sequence
  Description of Artificial Sequence: Synthetic oligonucleotide
gcgaucugaauaaaccucccuacuagc

SEQ ID NO: 32181 - RNA, 27 nt, Artificial Sequence
  Description of Artificial Sequence: Synthetic oligonucleotide
aucccagaacccugcugcagaaggcca

SEQ ID NO: 32182 - RNA, 27 nt, Artificial Sequence
  Description of Artificial Sequence: Synthetic oligonucleotide
cauaauuuccaauauguaccagaccuu

SEQ ID NO: 32183 - RNA, 27 nt, Artificial Sequence
  Description of Artificial Sequence: Synthetic oligonucleotide
cuagugcuuccaucggaaggacuaggu

SEQ ID NO: 32184 - RNA, 27 nt, Artificial Sequence
  Description of Artificial Sequence: Synthetic oligonucleotide
uccacauaaaaacaauauucacuggga

SEQ ID NO: 32185 - RNA, 27 nt, Artificial Sequence
  Description of Artificial Sequence: Synthetic oligonucleotide
ucuaccaauuccaacuugaauucauug

SEQ ID NO: 32186 - RNA, 27 nt, Artificial Sequence
  Description of Artificial Sequence: Synthetic oligonucleotide
ucuccaagucuaaaucuguguccugag

SEQ ID NO: 32187 - RNA, 27 nt, Artificial Sequence
  Description of Artificial Sequence: Synthetic oligonucleotide
uggaauacuguaacugugcuuugagga

SEQ ID NO: 32188 - RNA, 27 nt, Artificial Sequence
  Description of Artificial Sequence: Synthetic oligonucleotide
uuaauucaucagugguggcagugguag

SEQ ID NO: 32189 - RNA, 27 nt, Artificial Sequence
  Description of Artificial Sequence: Synthetic oligonucleotide
gugaugauguggcacuaguaguuucuu

SEQ ID NO: 32190 - RNA, 27 nt, Artificial Sequence
  Description of Artificial Sequence: Synthetic oligonucleotide
ucuguuuggugaggcuguccgacuuug

SEQ ID NO: 32191 - RNA, 27 nt, Artificial Sequence
  Description of Artificial Sequence: Synthetic oligonucleotide
ccaucauguuccauuuuucgcuuucuc

SEQ ID NO: 32192 - RNA, 27 nt, Artificial Sequence
  Description of Artificial Sequence: Synthetic oligonucleotide
gcagucuacaugcuaaaucagagggua

SEQ ID NO: 32193 - RNA, 27 nt, Artificial Sequence
  Description of Artificial Sequence: Synthetic oligonucleotide
cauaaauagauccuuaaauagcucaaa

SEQ ID NO: 32194 - RNA, 27 nt, Artificial Sequence
  Description of Artificial Sequence: Synthetic oligonucleotide
ugauaauagugcuuuuucaccuuuuuc

SEQ ID NO: 32195 - RNA, 27 nt, Artificial Sequence
  Description of Artificial Sequence: Synthetic oligonucleotide
gcagaacugauaauagugcuuuuucac

SEQ ID NO: 32196 - RNA, 27 nt, Artificial Sequence
  Description of Artificial Sequence: Synthetic oligonucleotide
guagguuuaaucuuucuuuucagccau

SEQ ID NO: 32197 - RNA, 27 nt, Artificial Sequence
  Description of Artificial Sequence: Synthetic oligonucleotide
agaaggauuuuauuauaaggguuuaau

SEQ ID NO: 32198 - RNA, 27 nt, Artificial Sequence
  Description of Artificial Sequence: Synthetic oligonucleotide
gucuacagcauuggcuaauaguaugaa

SEQ ID NO: 32199 - RNA, 27 nt, Artificial Sequence
  Description of Artificial Sequence: Synthetic oligonucleotide
cuauuccuaucaaaaugcuucugucua

SEQ ID NO: 32200 - RNA, 27 nt, Artificial Sequence
  Description of Artificial Sequence: Synthetic oligonucleotide
ucagggccauuaucuuauuugcucuau

SEQ ID NO: 32201 - RNA, 27 nt, Artificial Sequence
  Description of Artificial Sequence: Synthetic oligonucleotide
ugcuugaggaagagaaaaauguugguc

SEQ ID NO: 32202 - RNA, 27 nt, Artificial Sequence
  Description of Artificial Sequence: Synthetic oligonucleotide
ugggcugaacuuuucucauacuuaaag

SEQ ID NO: 32203 - RNA, 27 nt, Artificial Sequence
  Description of Artificial Sequence: Synthetic oligonucleotide
gguucagcagccaucuuuauuccugcg

SEQ ID NO: 32204 - RNA, 27 nt, Artificial Sequence
  Description of Artificial Sequence: Synthetic oligonucleotide
ugaagagaacuuggucauucaaauuuc

SEQ ID NO: 32205 - RNA, 27 nt, Artificial Sequence
  Description of Artificial Sequence: Synthetic oligonucleotide
cucuaggcuggcuaucuuuauacauac

SEQ ID NO: 32206 - RNA, 27 nt, Artificial Sequence
  Description of Artificial Sequence: Synthetic oligonucleotide
acacuucacagagauaguuacagccau

SEQ ID NO: 32207 - RNA, 27 nt, Artificial Sequence
  Description of Artificial Sequence: Synthetic oligonucleotide
uugaaauuuucucacacuucacagaga

SEQ ID NO: 32208 - RNA, 27 nt, Artificial Sequence
  Description of Artificial Sequence: Synthetic oligonucleotide
ucaggaggauucauuuccuuaaaggaa

SEQ ID NO: 32209 - RNA, 27 nt, Artificial Sequence
  Description of Artificial Sequence: Synthetic oligonucleotide
auaugaugucacuuuuuguauccuuga

SEQ ID NO: 32210 - RNA, 27 nt, Artificial Sequence
  Description of Artificial Sequence: Synthetic oligonucleotide
uaugaugaagauucaaauugcaucuua

SEQ ID NO: 32211 - RNA, 27 nt, Artificial Sequence
  Description of Artificial Sequence: Synthetic oligonucleotide
uuaauagcuagucuucguuuugaacag

SEQ ID NO: 32212 - RNA, 27 nt, Artificial Sequence
  Description of Artificial Sequence: Synthetic oligonucleotide
auuuuuaguagagaugagguuucacca

SEQ ID NO: 32213 - RNA, 27 nt, Artificial Sequence
  Description of Artificial Sequence: Synthetic oligonucleotide
aggcgagauagagcuucucuuucguuc

SEQ ID NO: 32214 - RNA, 27 nt, Artificial Sequence
  Description of Artificial Sequence: Synthetic oligonucleotide
aacuggaccgaaggcgcuuguggagaa

SEQ ID NO: 32215 - RNA, 27 nt, Artificial Sequence
  Description of Artificial Sequence: Synthetic oligonucleotide
gcggcuacaucuuuggaaucuucuccu

SEQ ID NO: 32216 - RNA, 27 nt, Artificial Sequence
  Description of Artificial Sequence: Synthetic oligonucleotide
caagucuccucauugaauccagauugg

SEQ ID NO: 32217 - RNA, 27 nt, Artificial Sequence
  Description of Artificial Sequence: Synthetic oligonucleotide
uccucacuacucucaaaucuguucugg

SEQ ID NO: 32218 - RNA, 27 nt, Artificial Sequence
  Description of Artificial Sequence: Synthetic oligonucleotide
uuuguacucaucugcacagcucuggcu

SEQ ID NO: 32219 - RNA, 27 nt, Artificial Sequence
  Description of Artificial Sequence: Synthetic oligonucleotide
gcccauuaacaacaacaaucugaggug

SEQ ID NO: 32220 - RNA, 27 nt, Artificial Sequence
  Description of Artificial Sequence: Synthetic oligonucleotide
aauaaauuaaaaauaauuaaaauagug

SEQ ID NO: 32221 - RNA, 27 nt, Artificial Sequence
  Description of Artificial Sequence: Synthetic oligonucleotide
cauauuuaaauauuaauaaauuaaaaa

SEQ ID NO: 32222 - RNA, 27 nt, Artificial Sequence
  Description of Artificial Sequence: Synthetic oligonucleotide
gaaacaaaggauauucaaacugcauag

SEQ ID NO: 32223 - RNA, 27 nt, Artificial Sequence
  Description of Artificial Sequence: Synthetic oligonucleotide
caaacacuuagacgccagcagcauggg

SEQ ID NO: 32224 - RNA, 27 nt, Artificial Sequence
  Description of Artificial Sequence: Synthetic oligonucleotide
uuugucacaggugaaaugcacaucuga

SEQ ID NO: 32225 - RNA, 27 nt, Artificial Sequence
  Description of Artificial Sequence: Synthetic oligonucleotide
uaauucagccuggcacagguuuugauc

SEQ ID NO: 32226 - RNA, 27 nt, Artificial Sequence
  Description of Artificial Sequence: Synthetic oligonucleotide
auuguaagaaugacuacccacauucac

SEQ ID NO: 32227 - RNA, 27 nt, Artificial Sequence
  Description of Artificial Sequence: Synthetic oligonucleotide
caauuguaagaaugacuacccacauuc

SEQ ID NO: 32228 - RNA, 27 nt, Artificial Sequence
  Description of Artificial Sequence: Synthetic oligonucleotide
guacacucucugaugcucauuuucaua

SEQ ID NO: 32229 - RNA, 27 nt, Artificial Sequence
  Description of Artificial Sequence: Synthetic oligonucleotide
cugcugaguucuacaugaaaagcaaau

SEQ ID NO: 32230 - RNA, 27 nt, Artificial Sequence
  Description of Artificial Sequence: Synthetic oligonucleotide
uacugaaaauaaauauagaaauacaac

SEQ ID NO: 32231 - RNA, 27 nt, Artificial Sequence
  Description of Artificial Sequence: Synthetic oligonucleotide
uuccauuuaagaaacauuaaucaaaac

SEQ ID NO: 32232 - RNA, 27 nt, Artificial Sequence
  Description of Artificial Sequence: Synthetic oligonucleotide
acaauuuuaggcacuauacacguuguu

SEQ ID NO: 32233 - RNA, 27 nt, Artificial Sequence
  Description of Artificial Sequence: Synthetic oligonucleotide
ccagauguuaguagccaaggauauggu

SEQ ID NO: 32234 - RNA, 27 nt, Artificial Sequence
  Description of Artificial Sequence: Synthetic oligonucleotide
agcucacagucuccagauguuaguagc

SEQ ID NO: 32235 - RNA, 27 nt, Artificial Sequence
  Description of Artificial Sequence: Synthetic oligonucleotide
auuaauaaaaagcacacaacuuauggc

SEQ ID NO: 32236 - RNA, 27 nt, Artificial Sequence
  Description of Artificial Sequence: Synthetic oligonucleotide
aauguaagaagagccaaaaugaugcau

SEQ ID NO: 32237 - RNA, 27 nt, Artificial Sequence
  Description of Artificial Sequence: Synthetic oligonucleotide
acauuuuuacaaauguaagaagagcca

SEQ ID NO: 32238 - RNA, 27 nt, Artificial Sequence
  Description of Artificial Sequence: Synthetic oligonucleotide
aauaugaauuaagaugaccuaaucugu

SEQ ID NO: 32239 - RNA, 27 nt, Artificial Sequence
  Description of Artificial Sequence: Synthetic oligonucleotide
ucaugauuaguucuuucaauuccaucc

SEQ ID NO: 32240 - RNA, 27 nt, Artificial Sequence
  Description of Artificial Sequence: Synthetic oligonucleotide
cccaagagcagaaggaaugagugugca

SEQ ID NO: 32241 - RNA, 27 nt, Artificial Sequence
  Description of Artificial Sequence: Synthetic oligonucleotide
cucaaagcuacugguuaccucuacacc

SEQ ID NO: 32242 - RNA, 27 nt, Artificial Sequence
  Description of Artificial Sequence: Synthetic oligonucleotide
ugaaauauuacguggcaugugguuggg

SEQ ID NO: 32243 - RNA, 27 nt, Artificial Sequence
  Description of Artificial Sequence: Synthetic oligonucleotide
agugaagagaauaacuuguuuccgaag

SEQ ID NO: 32244 - RNA, 27 nt, Artificial Sequence
  Description of Artificial Sequence: Synthetic oligonucleotide
uuucuuagcauuaguuauugggaguga

SEQ ID NO: 32245 - RNA, 27 nt, Artificial Sequence
  Description of Artificial Sequence: Synthetic oligonucleotide
uugauuuucagcauuucuuagcauuag

SEQ ID NO: 32246 - RNA, 27 nt, Artificial Sequence
  Description of Artificial Sequence: Synthetic oligonucleotide
aaaguaaucauauuuagagaaagacag

SEQ ID NO: 32247 - RNA, 27 nt, Artificial Sequence
  Description of Artificial Sequence: Synthetic oligonucleotide
uguagaacaaaaugccugaaauucagc

SEQ ID NO: 32248 - RNA, 27 nt, Artificial Sequence
  Description of Artificial Sequence: Synthetic oligonucleotide
gagagucccgggugagagggaaucgcc

SEQ ID NO: 32249 - RNA, 27 nt, Artificial Sequence
  Description of Artificial Sequence: Synthetic oligonucleotide
cuuuacuuuaaagguucacuuuccuug

SEQ ID NO: 32250 - RNA, 27 nt, Artificial Sequence
  Description of Artificial Sequence: Synthetic oligonucleotide
ccaggcuuccagagcaugcagccuccu

SEQ ID NO: 32251 - RNA, 27 nt, Artificial Sequence
  Description of Artificial Sequence: Synthetic oligonucleotide
cucucuuuuguuuucuguucagagaaa

SEQ ID NO: 32252 - RNA, 27 nt, Artificial Sequence
  Description of Artificial Sequence: Synthetic oligonucleotide
cggcauaacugauuacagccaaguuca

SEQ ID NO: 32253 - RNA, 27 nt, Artificial Sequence
  Description of Artificial Sequence: Synthetic oligonucleotide
uggacuucuuuuaauuuuggcuucuuc

SEQ ID NO: 32254 - RNA, 27 nt, Artificial Sequence
  Description of Artificial Sequence: Synthetic oligonucleotide
uaaccucaccuggacuucuuuuaauuu

SEQ ID NO: 32255 - RNA, 27 nt, Artificial Sequence
  Description of Artificial Sequence: Synthetic oligonucleotide
guccucuucccgauaauccggauucag

SEQ ID NO: 32256 - RNA, 27 nt, Artificial Sequence
  Description of Artificial Sequence: Synthetic oligonucleotide
acaauacuugcuuugaugucacauuaa

SEQ ID NO: 32257 - RNA, 27 nt, Artificial Sequence
  Description of Artificial Sequence: Synthetic oligonucleotide
gagugcuacaauacuugcuuugauguc

SEQ ID NO: 32258 - RNA, 27 nt, Artificial Sequence
  Description of Artificial Sequence: Synthetic oligonucleotide
auuugugguuuuguuuucucucucucu

SEQ ID NO: 32259 - RNA, 27 nt, Artificial Sequence
  Description of Artificial Sequence: Synthetic oligonucleotide
uguaugggcuuaaauacuacagcgagg

SEQ ID NO: 32260 - RNA, 27 nt, Artificial Sequence
  Description of Artificial Sequence: Synthetic oligonucleotide
cuguaugggcuuaaauacuacagcgag

SEQ ID NO: 32261 - RNA, 27 nt, Artificial Sequence
  Description of Artificial Sequence: Synthetic oligonucleotide
ggaagguuucuguaugggcuuaaauac

SEQ ID NO: 32262 - RNA, 27 nt, Artificial Sequence
  Description of Artificial Sequence: Synthetic oligonucleotide
guagguauaccauguuuauuuuaauac

SEQ ID NO: 32263 - RNA, 27 nt, Artificial Sequence
  Description of Artificial Sequence: Synthetic oligonucleotide
uccgaaaacuggccgaucagaacagcc

SEQ ID NO: 32264 - RNA, 27 nt, Artificial Sequence
  Description of Artificial Sequence: Synthetic oligonucleotide
cccuguuccaaaguucaaauuauuugu

SEQ ID NO: 32265 - RNA, 27 nt, Artificial Sequence
  Description of Artificial Sequence: Synthetic oligonucleotide
acuggaaaguuaaauuaaggucgcaau

SEQ ID NO: 32266 - RNA, 27 nt, Artificial Sequence
  Description of Artificial Sequence: Synthetic oligonucleotide
caaaaccaaacuuuagcuuucucagcc

SEQ ID NO: 32267 - RNA, 27 nt, Artificial Sequence
  Description of Artificial Sequence: Synthetic oligonucleotide
uacagugggaaguagcaucuuuacuuu

SEQ ID NO: 32268 - RNA, 27 nt, Artificial Sequence
  Description of Artificial Sequence: Synthetic oligonucleotide
ucauaugguaucagcaauuaagcagua

SEQ ID NO: 32269 - RNA, 27 nt, Artificial Sequence
  Description of Artificial Sequence: Synthetic oligonucleotide
cagcccauguuucauucauaugguauc

SEQ ID NO: 32270 - RNA, 27 nt, Artificial Sequence
  Description of Artificial Sequence: Synthetic oligonucleotide
uaugaaaaaguuggauaagaaaguugg

SEQ ID NO: 32271 - RNA, 27 nt, Artificial Sequence
  Description of Artificial Sequence: Synthetic oligonucleotide
uccggccucaugaugucaugcaaggcu

SEQ ID NO: 32272 - RNA, 27 nt, Artificial Sequence
  Description of Artificial Sequence: Synthetic oligonucleotide
acaaaugcagucauauacaaauucagg

SEQ ID NO: 32273 - RNA, 27 nt, Artificial Sequence
  Description of Artificial Sequence: Synthetic oligonucleotide
gguaguaaacauucuacuaggauucuu

SEQ ID NO: 32274 - RNA, 27 nt, Artificial Sequence
  Description of Artificial Sequence: Synthetic oligonucleotide
uuucaucaaaaaauucuucccuuucug

SEQ ID NO: 32275 - RNA, 27 nt, Artificial Sequence
  Description of Artificial Sequence: Synthetic oligonucleotide
aaauucacacacuggcaugccgauagc

SEQ ID NO: 32276 - RNA, 27 nt, Artificial Sequence
  Description of Artificial Sequence: Synthetic oligonucleotide
acauacauugcucuacuaugaggugaa

SEQ ID NO: 32277 - RNA, 27 nt, Artificial Sequence
  Description of Artificial Sequence: Synthetic oligonucleotide
uauauaugugcuuuggcaauucuggug

SEQ ID NO: 32278 - RNA, 27 nt, Artificial Sequence
  Description of Artificial Sequence: Synthetic oligonucleotide
ggagaaacuauuacccagaucaccacu

SEQ ID NO: 32279 - RNA, 27 nt, Artificial Sequence
  Description of Artificial Sequence: Synthetic oligonucleotide
auuuggagaaacuauuacccagaucac

SEQ ID NO: 32280 - RNA, 27 nt, Artificial Sequence
  Description of Artificial Sequence: Synthetic oligonucleotide
uuucuaggaaguauucaucacauccac

SEQ ID NO: 32281 - RNA, 27 nt, Artificial Sequence
  Description of Artificial Sequence: Synthetic oligonucleotide
cauauaugguguagcuguggaaaugcg

SEQ ID NO: 32282 - RNA, 27 nt, Artificial Sequence
  Description of Artificial Sequence: Synthetic oligonucleotide
cuccauucauauaugguguagcugugg

SEQ ID NO: 32283 - RNA, 27 nt, Artificial Sequence
  Description of Artificial Sequence: Synthetic oligonucleotide
aucuucuucucguguaagaacugcagc

SEQ ID NO: 32284 - RNA, 27 nt, Artificial Sequence
  Description of Artificial Sequence: Synthetic oligonucleotide
ucccuguaaaugaucuucuucucgugu

SEQ ID NO: 32285 - RNA, 27 nt, Artificial Sequence
  Description of Artificial Sequence: Synthetic oligonucleotide
gucccuguaaaugaucuucuucucgug

SEQ ID NO: 32286 - RNA, 27 nt, Artificial Sequence
  Description of Artificial Sequence: Synthetic oligonucleotide
ucaggucccuguaaaugaucuucuucu

SEQ ID NO: 32287 - RNA, 27 nt, Artificial Sequence
  Description of Artificial Sequence: Synthetic oligonucleotide
gaugcagucaaacaccucuuccucugu

SEQ ID NO: 32288 - RNA, 27 nt, Artificial Sequence
  Description of Artificial Sequence: Synthetic oligonucleotide
cgaugcagucaaacaccucuuccucug

SEQ ID NO: 32289 - RNA, 27 nt, Artificial Sequence
  Description of Artificial Sequence: Synthetic oligonucleotide
cccugugaacucgcccucaaaguagcg

SEQ ID NO: 32290 - RNA, 27 nt, Artificial Sequence
  Description of Artificial Sequence: Synthetic oligonucleotide
ggacagaggugccaggagaugcccuca

SEQ ID NO: 32291 - RNA, 27 nt, Artificial Sequence
  Description of Artificial Sequence: Synthetic oligonucleotide
uuaaaaagacaaaccauaucacuccuu

SEQ ID NO: 32292 - RNA, 27 nt, Artificial Sequence
  Description of Artificial Sequence: Synthetic oligonucleotide
cuuaaaaagacaaaccauaucacuccu

SEQ ID NO: 32293 - RNA, 27 nt, Artificial Sequence
  Description of Artificial Sequence: Synthetic oligonucleotide
gacaaccuuuaggaucuuuacugcaac

SEQ ID NO: 32294 - RNA, 27 nt, Artificial Sequence
  Description of Artificial Sequence: Synthetic oligonucleotide
gucgacaaccuuuaggaucuuuacugc

SEQ ID NO: 32295 - RNA, 27 nt, Artificial Sequence
  Description of Artificial Sequence: Synthetic oligonucleotide
acaauugccagguuguccuuugucaug

SEQ ID NO: 32296 - RNA, 27 nt, Artificial Sequence
  Description of Artificial Sequence: Synthetic oligonucleotide
ccucgcaccacugggucacaauugcca

SEQ ID NO: 32297 - RNA, 27 nt, Artificial Sequence
  Description of Artificial Sequence: Synthetic oligonucleotide
auuucaugucucuauggaugauguucu

SEQ ID NO: 32298 - RNA, 27 nt, Artificial Sequence
  Description of Artificial Sequence: Synthetic oligonucleotide
uggagaaauauauuguuggauuucaug

SEQ ID NO: 32299 - RNA, 27 nt, Artificial Sequence
  Description of Artificial Sequence: Synthetic oligonucleotide
agccuucauggagaaauauauuguugg

SEQ ID NO: 32300 - RNA, 27 nt, Artificial Sequence
  Description of Artificial Sequence: Synthetic oligonucleotide
accacuccagcgugacuuuacuguugc

SEQ ID NO: 32301 - RNA, 27 nt, Artificial Sequence
  Description of Artificial Sequence: Synthetic oligonucleotide
ccucucuuccuuuacuuucuucacaca

SEQ ID NO: 32302 - RNA, 27 nt, Artificial Sequence
  Description of Artificial Sequence: Synthetic oligonucleotide
gcccgaugcaaggauggcucggaagcg

SEQ ID NO: 32303 - RNA, 27 nt, Artificial Sequence
  Description of Artificial Sequence: Synthetic oligonucleotide
cacaguaggauauucaaccuccauuuc

SEQ ID NO: 32304 - RNA, 27 nt, Artificial Sequence
  Description of Artificial Sequence: Synthetic oligonucleotide
uuacacaguaggauauucaaccuccau

SEQ ID NO: 32305 - RNA, 27 nt, Artificial Sequence
  Description of Artificial Sequence: Synthetic oligonucleotide
uacacuacaagggaaaacucaaaaucu

SEQ ID NO: 32306 - RNA, 27 nt, Artificial Sequence
  Description of Artificial Sequence: Synthetic oligonucleotide
caaucaacaaagaacaaacaggauaaa

SEQ ID NO: 32307 - RNA, 27 nt, Artificial Sequence
  Description of Artificial Sequence: Synthetic oligonucleotide
uuucaaucaacaaagaacaaacaggau

SEQ ID NO: 32308 - RNA, 27 nt, Artificial Sequence
  Description of Artificial Sequence: Synthetic oligonucleotide
auggaagaaaaagaaggcuguagagaa

SEQ ID NO: 32309 - RNA, 27 nt, Artificial Sequence
  Description of Artificial Sequence: Synthetic oligonucleotide
uagaaggaagauuagcuauggaagaaa

SEQ ID NO: 32310 - RNA, 27 nt, Artificial Sequence
  Description of Artificial Sequence: Synthetic oligonucleotide
augaagcauucaacaggaagauuauuu

SEQ ID NO: 32311 - RNA, 27 nt, Artificial Sequence
  Description of Artificial Sequence: Synthetic oligonucleotide
caugaagcauucaacaggaagauuauu

SEQ ID NO: 32312 - RNA, 27 nt, Artificial Sequence
  Description of Artificial Sequence: Synthetic oligonucleotide
ucaaaguagaauucaagucaugaagca

SEQ ID NO: 32313 - RNA, 27 nt, Artificial Sequence
  Description of Artificial Sequence: Synthetic oligonucleotide
gucuguaguugcuucucucccucuuag

SEQ ID NO: 32314 - RNA, 27 nt, Artificial Sequence
  Description of Artificial Sequence: Synthetic oligonucleotide
guugaccuuggucugguaggagacggc

SEQ ID NO: 32315 - RNA, 27 nt, Artificial Sequence
  Description of Artificial Sequence: Synthetic oligonucleotide
gucgagauagucgggccgauugaucuc

SEQ ID NO: 32316 - RNA, 27 nt, Artificial Sequence
  Description of Artificial Sequence: Synthetic oligonucleotide
guuugggaagguuggauguucguccuc

SEQ ID NO: 32317 - RNA, 27 nt, Artificial Sequence
  Description of Artificial Sequence: Synthetic oligonucleotide
aguucuaagcuuggguuccgacccuaa

SEQ ID NO: 32318 - RNA, 27 nt, Artificial Sequence
  Description of Artificial Sequence: Synthetic oligonucleotide
uuaaaguucuaagcuuggguuccgacc

SEQ ID NO: 32319 - RNA, 27 nt, Artificial Sequence
  Description of Artificial Sequence: Synthetic oligonucleotide
guugcuuaaaguucuaagcuuggguuc

SEQ ID NO: 32320 - RNA, 27 nt, Artificial Sequence
  Description of Artificial Sequence: Synthetic oligonucleotide
gugguggucuuguugcuuaaaguucua

SEQ ID NO: 32321 - RNA, 27 nt, Artificial Sequence
  Description of Artificial Sequence: Synthetic oligonucleotide
acuuuauuucucgccacugaauaguag

SEQ ID NO: 32322 - RNA, 27 nt, Artificial Sequence
  Description of Artificial Sequence: Synthetic oligonucleotide
aacuuuauuucucgccacugaauagua

SEQ ID NO: 32323 - RNA, 27 nt, Artificial Sequence
  Description of Artificial Sequence: Synthetic oligonucleotide
ggaucauuuccuguuaucuguguuugu

SEQ ID NO: 32324 - RNA, 27 nt, Artificial Sequence
  Description of Artificial Sequence: Synthetic oligonucleotide
guuucauuucuucucuuuucuuaaggc

SEQ ID NO: 32325 - RNA, 27 nt, Artificial Sequence
  Description of Artificial Sequence: Synthetic oligonucleotide
ggaggauggaaacacacuccuucaguu

SEQ ID NO: 32326 - RNA, 27 nt, Artificial Sequence
  Description of Artificial Sequence: Synthetic oligonucleotide
ucaaagauuuucagucccgcggugaca

SEQ ID NO: 32327 - RNA, 27 nt, Artificial Sequence
  Description of Artificial Sequence: Synthetic oligonucleotide
ccugaacggcacgcuuauuucugcugu

SEQ ID NO: 32328 - RNA, 27 nt, Artificial Sequence
  Description of Artificial Sequence: Synthetic oligonucleotide
cuucuggacccugaacggcacgcuuau

SEQ ID NO: 32329 - RNA, 27 nt, Artificial Sequence
  Description of Artificial Sequence: Synthetic oligonucleotide
caagcagucuugagugacuguuucuuc

SEQ ID NO: 32330 - RNA, 27 nt, Artificial Sequence
  Description of Artificial Sequence: Synthetic oligonucleotide
ccaaagacauggaccuucuuccucuga

SEQ ID NO: 32331 - RNA, 27 nt, Artificial Sequence
  Description of Artificial Sequence: Synthetic oligonucleotide
guguuucaggcauauuuugaauacauc

SEQ ID NO: 32332 - RNA, 27 nt, Artificial Sequence
  Description of Artificial Sequence: Synthetic oligonucleotide
gagguacagagaaagggaggaaaauag

SEQ ID NO: 32333 - RNA, 27 nt, Artificial Sequence
  Description of Artificial Sequence: Synthetic oligonucleotide
ucuugucuugcucuaucuuucuuuggu

SEQ ID NO: 32334 - RNA, 27 nt, Artificial Sequence
  Description of Artificial Sequence: Synthetic oligonucleotide
uuucuugucuugcucuaucuuucuuug

SEQ ID NO: 32335 - RNA, 27 nt, Artificial Sequence
  Description of Artificial Sequence: Synthetic oligonucleotide
ggaucuuguacaaacaaaugcuuucuc

SEQ ID NO: 32336 - RNA, 27 nt, Artificial Sequence
  Description of Artificial Sequence: Synthetic oligonucleotide
ucugcaaguacguucguuuaacucaag

SEQ ID NO: 32337 - RNA, 27 nt, Artificial Sequence
  Description of Artificial Sequence: Synthetic oligonucleotide
ucuguaucgaucguucuguaucagucu

SEQ ID NO: 32338 - RNA, 27 nt, Artificial Sequence
  Description of Artificial Sequence: Synthetic oligonucleotide
auuuauuuuuauauauauauaauauau

SEQ ID NO: 32339 - RNA, 27 nt, Artificial Sequence
  Description of Artificial Sequence: Synthetic oligonucleotide
auauuuauuuuuauauauauauaauau

SEQ ID NO: 32340 - RNA, 27 nt, Artificial Sequence
  Description of Artificial Sequence: Synthetic oligonucleotide
cacagcagucaaauacauccagugaag

SEQ ID NO: 32341 - RNA, 27 nt, Artificial Sequence
  Description of Artificial Sequence: Synthetic oligonucleotide
gucucucaucuccuccucuucccuguc

SEQ ID NO: 32342 - RNA, 27 nt, Artificial Sequence
  Description of Artificial Sequence: Synthetic oligonucleotide
ccaagugggacaaaaaaaagaucaugc

SEQ ID NO: 32343 - RNA, 14 nt, Artificial Sequence
  Description of Artificial Sequence: Synthetic oligonucleotide
guauuuugaugagg

SEQ ID NO: 32344 - RNA, 12 nt, Artificial Sequence
  Description of Artificial Sequence: Synthetic oligonucleotide
ggcccagaugau

SEQ ID NO: 32345 - RNA, 14 nt, Artificial Sequence
  Description of Artificial Sequence: Synthetic oligonucleotide
gggaagaaaacuau

SEQ ID NO: 32346 - RNA, 15 nt, Artificial Sequence
  Description of Artificial Sequence: Synthetic oligonucleotide
guuuuaauuuauuuc

SEQ ID NO: 32347 - RNA, 12 nt, Artificial Sequence
  Description of Artificial Sequence: Synthetic oligonucleotide
acguagggaaau

SEQ ID NO: 32348 - RNA, 12 nt, Artificial Sequence
  Description of Artificial Sequence: Synthetic oligonucleotide
ccaggguuuacc

SEQ ID NO: 32349 - RNA, 11 nt, Artificial Sequence
  Description of Artificial Sequence: Synthetic oligonucleotide
agcaagguuua

SEQ ID NO: 32350 - RNA, 12 nt, Artificial Sequence
  Description of Artificial Sequence: Synthetic oligonucleotide
uguauuauguug

SEQ ID NO: 32351 - RNA, 15 nt, Artificial Sequence
  Description of Artificial Sequence: Synthetic oligonucleotide
uuuuaaucuuuguga

SEQ ID NO: 32352 - RNA, 14 nt, Artificial Sequence
  Description of Artificial Sequence: Synthetic oligonucleotide
uuaaucuuugugac

SEQ ID NO: 32353 - RNA, 13 nt, Artificial Sequence
  Description of Artificial Sequence: Synthetic oligonucleotide
gcugcuuaugucu

SEQ ID NO: 32354 - RNA, 14 nt, Artificial Sequence
  Description of Artificial Sequence: Synthetic oligonucleotide
aaguguuucagaag

SEQ ID NO: 32355 - RNA, 13 nt, Artificial Sequence
  Description of Artificial Sequence: Synthetic oligonucleotide
gaccaucaauaag

SEQ ID NO: 32356 - RNA, 13 nt, Artificial Sequence
  Description of Artificial Sequence: Synthetic oligonucleotide
ccaucaauaagga

SEQ ID NO: 32357 - RNA, 14 nt, Artificial Sequence
  Description of Artificial Sequence: Synthetic oligonucleotide
ucaauaaggaagaa

SEQ ID NO: 32358 - RNA, 14 nt, Artificial Sequence
  Description of Artificial Sequence: Synthetic oligonucleotide
aauaaggaagaagc

SEQ ID NO: 32359 - RNA, 13 nt, Artificial Sequence
  Description of Artificial Sequence: Synthetic oligonucleotide
aggaagaagcccu

SEQ ID NO: 32360 - RNA, 13 nt, Artificial Sequence
  Description of Artificial Sequence: Synthetic oligonucleotide
gcauaacuaaagg

SEQ ID NO: 32361 - RNA, 14 nt, Artificial Sequence
  Description of Artificial Sequence: Synthetic oligonucleotide
cauaacuaaaggug

SEQ ID NO: 32362 - RNA, 12 nt, Artificial Sequence
  Description of Artificial Sequence: Synthetic oligonucleotide
cuacaucacgcc

SEQ ID NO: 32363 - RNA, 12 nt, Artificial Sequence
  Description of Artificial Sequence: Synthetic oligonucleotide
acuggauuuaag

SEQ ID NO: 32364 - RNA, 12 nt, Artificial Sequence
  Description of Artificial Sequence: Synthetic oligonucleotide
cuggauuuaagc

SEQ ID NO: 32365 - RNA, 13 nt, Artificial Sequence
  Description of Artificial Sequence: Synthetic oligonucleotide
gauuuaagcagag

SEQ ID NO: 32366 - RNA, 13 nt, Artificial Sequence
  Description of Artificial Sequence: Synthetic oligonucleotide
auuuaagcagagu

SEQ ID NO: 32367 - RNA, 13 nt, Artificial Sequence
  Description of Artificial Sequence: Synthetic oligonucleotide
uuaagcagaguuc

SEQ ID NO: 32368 - RNA, 13 nt, Artificial Sequence
  Description of Artificial Sequence: Synthetic oligonucleotide
uaagcagaguuca

SEQ ID NO: 32369 - RNA, 14 nt, Artificial Sequence
  Description of Artificial Sequence: Synthetic oligonucleotide
agcagaguucaaaa

SEQ ID NO: 32370 - RNA, 12 nt, Artificial Sequence
  Description of Artificial Sequence: Synthetic oligonucleotide
cucagggucuga

SEQ ID NO: 32371 - RNA, 13 nt, Artificial Sequence
  Description of Artificial Sequence: Synthetic oligonucleotide
caagcaacuacau

SEQ ID NO: 32372 - RNA, 12 nt, Artificial Sequence
  Description of Artificial Sequence: Synthetic oligonucleotide
aucaauggcagc

SEQ ID NO: 32373 - RNA, 11 nt, Artificial Sequence
  Description of Artificial Sequence: Synthetic oligonucleotide
uuccagcccac

SEQ ID NO: 32374 - RNA, 12 nt, Artificial Sequence
  Description of Artificial Sequence: Synthetic oligonucleotide
cagcugagaaug

SEQ ID NO: 32375 - RNA, 13 nt, Artificial Sequence
  Description of Artificial Sequence: Synthetic oligonucleotide
aacguaucuccua

SEQ ID NO: 32376 - RNA, 14 nt, Artificial Sequence
  Description of Artificial Sequence: Synthetic oligonucleotide
ccuaaaauaauuuc

SEQ ID NO: 32377 - RNA, 13 nt, Artificial Sequence
  Description of Artificial Sequence: Synthetic oligonucleotide
uggaagauucagc

SEQ ID NO: 32378 - RNA, 12 nt, Artificial Sequence
  Description of Artificial Sequence: Synthetic oligonucleotide
uuaaacucuccu

SEQ ID NO: 32379 - RNA, 12 nt, Artificial Sequence
  Description of Artificial Sequence: Synthetic oligonucleotide
cagccuacaguu

SEQ ID NO: 32380 - RNA, 13 nt, Artificial Sequence
  Description of Artificial Sequence: Synthetic oligonucleotide
guuauguucaguc

SEQ ID NO: 32381 - RNA, 13 nt, Artificial Sequence
  Description of Artificial Sequence: Synthetic oligonucleotide
cacauacaaaaug

SEQ ID NO: 32382 - RNA, 9 nt, Artificial Sequence
  Description of Artificial Sequence: Synthetic oligonucleotide
uccuuuugc

SEQ ID NO: 32383 - RNA, 12 nt, Artificial Sequence
  Description of Artificial Sequence: Synthetic oligonucleotide
ugaccugugaag

SEQ ID NO: 32384 - RNA, 12 nt, Artificial Sequence
  Description of Artificial Sequence: Synthetic oligonucleotide
cuaucucacaca

SEQ ID NO: 32385 - RNA, 13 nt, Artificial Sequence
  Description of Artificial Sequence: Synthetic oligonucleotide
uguccucaauugu

SEQ ID NO: 32386 - RNA, 12 nt, Artificial Sequence
  Description of Artificial Sequence: Synthetic oligonucleotide
aaaccguagcug

SEQ ID NO: 32387 - RNA, 12 nt, Artificial Sequence
  Description of Artificial Sequence: Synthetic oligonucleotide
uagcuggcaagc

SEQ ID NO: 32388 - RNA, 14 nt, Artificial Sequence
  Description of Artificial Sequence: Synthetic oligonucleotide
uuguaugguuaaaa

SEQ ID NO: 32389 - RNA, 14 nt, Artificial Sequence
  Description of Artificial Sequence: Synthetic oligonucleotide
ugguuaaaagaugg

SEQ ID NO: 32390 - RNA, 13 nt, Artificial Sequence
  Description of Artificial Sequence: Synthetic oligonucleotide
cagggaauuauac

SEQ ID NO: 32391 - RNA, 12 nt, Artificial Sequence
  Description of Artificial Sequence: Synthetic oligonucleotide
acaaucuugcug

SEQ ID NO: 32392 - RNA, 13 nt, Artificial Sequence
  Description of Artificial Sequence: Synthetic oligonucleotide
ccaauaaugaaga

SEQ ID NO: 32393 - RNA, 13 nt, Artificial Sequence
  Description of Artificial Sequence: Synthetic oligonucleotide
acuuuggauguuc

SEQ ID NO: 32394 - RNA, 12 nt, Artificial Sequence
  Description of Artificial Sequence: Synthetic oligonucleotide
aaugcuuccacu

SEQ ID NO: 32395 - RNA, 11 nt, Artificial Sequence
  Description of Artificial Sequence: Synthetic oligonucleotide
gagaaaguuug

SEQ ID NO: 32396 - RNA, 11 nt, Artificial Sequence
  Description of Artificial Sequence: Synthetic oligonucleotide
aaagaacuacu

SEQ ID NO: 32397 - RNA, 12 nt, Artificial Sequence
  Description of Artificial Sequence: Synthetic oligonucleotide
uuagaaauacgg

SEQ ID NO: 32398 - RNA, 12 nt, Artificial Sequence
  Description of Artificial Sequence: Synthetic oligonucleotide
aacauggguaca

SEQ ID NO: 32399 - RNA, 14 nt, Artificial Sequence
  Description of Artificial Sequence: Synthetic oligonucleotide
aaagacacagaaga

SEQ ID NO: 32400 - RNA, 11 nt, Artificial Sequence
  Description of Artificial Sequence: Synthetic oligonucleotide
uaguagggagg

SEQ ID NO: 32401 - RNA, 12 nt, Artificial Sequence
  Description of Artificial Sequence: Synthetic oligonucleotide
gccuucugcagc

SEQ ID NO: 32402 - RNA, 10 nt, Artificial Sequence
  Description of Artificial Sequence: Synthetic oligonucleotide
ggucugguac

SEQ ID NO: 32403 - RNA, 12 nt, Artificial Sequence
  Description of Artificial Sequence: Synthetic oligonucleotide
cuaguccuuccg

SEQ ID NO: 32404 - RNA, 12 nt, Artificial Sequence
  Description of Artificial Sequence: Synthetic oligonucleotide
ccagugaauauu

SEQ ID NO: 32405 - RNA, 13 nt, Artificial Sequence
  Description of Artificial Sequence: Synthetic oligonucleotide
augaauucaaguu

SEQ ID NO: 32406 - RNA, 12 nt, Artificial Sequence
  Description of Artificial Sequence: Synthetic oligonucleotide
caggacacagau

SEQ ID NO: 32407 - RNA, 12 nt, Artificial Sequence
  Description of Artificial Sequence: Synthetic oligonucleotide
cucaaagcacag

SEQ ID NO: 32408 - RNA, 10 nt, Artificial Sequence
  Description of Artificial Sequence: Synthetic oligonucleotide
accacugcca

SEQ ID NO: 32409 - RNA, 13 nt, Artificial Sequence
  Description of Artificial Sequence: Synthetic oligonucleotide
gaaacuacuagug

SEQ ID NO: 32410 - RNA, 12 nt, Artificial Sequence
  Description of Artificial Sequence: Synthetic oligonucleotide
aagucggacagc

SEQ ID NO: 32411 - RNA, 13 nt, Artificial Sequence
  Description of Artificial Sequence: Synthetic oligonucleotide
gaaagcgaaaaau

SEQ ID NO: 32412 - RNA, 13 nt, Artificial Sequence
  Description of Artificial Sequence: Synthetic oligonucleotide
cccucugauuuag

SEQ ID NO: 32413 - RNA, 12 nt, Artificial Sequence
  Description of Artificial Sequence: Synthetic oligonucleotide
ugagcuauuuaa

SEQ ID NO: 32414 - RNA, 13 nt, Artificial Sequence
  Description of Artificial Sequence: Synthetic oligonucleotide
aaaaggugaaaaa

SEQ ID NO: 32415 - RNA, 14 nt, Artificial Sequence
  Description of Artificial Sequence: Synthetic oligonucleotide
gaaaaagcacuauu

SEQ ID NO: 32416 - RNA, 12 nt, Artificial Sequence
  Description of Artificial Sequence: Synthetic oligonucleotide
ggcugaaaagaa

SEQ ID NO: 32417 - RNA, 12 nt, Artificial Sequence
  Description of Artificial Sequence: Synthetic oligonucleotide
uaaacccuuaua

SEQ ID NO: 32418 - RNA, 13 nt, Artificial Sequence
  Description of Artificial Sequence: Synthetic oligonucleotide
cauacuauuagcc

SEQ ID NO: 32419 - RNA, 12 nt, Artificial Sequence
  Description of Artificial Sequence: Synthetic oligonucleotide
gacagaagcauu

SEQ ID NO: 32420 - RNA, 14 nt, Artificial Sequence
  Description of Artificial Sequence: Synthetic oligonucleotide
agagcaaauaagau

SEQ ID NO: 32421 - RNA, 14 nt, Artificial Sequence
  Description of Artificial Sequence: Synthetic oligonucleotide
ccaacauuuuucuc

SEQ ID NO: 32422 - RNA, 15 nt, Artificial Sequence
  Description of Artificial Sequence: Synthetic oligonucleotide
uuaaguaugagaaaa

SEQ ID NO: 32423 - RNA, 14 nt, Artificial Sequence
  Description of Artificial Sequence: Synthetic oligonucleotide
caggaauaaagaug

SEQ ID NO: 32424 - RNA, 13 nt, Artificial Sequence
  Description of Artificial Sequence: Synthetic oligonucleotide
aauuugaaugacc

SEQ ID NO: 32425 - RNA, 14 nt, Artificial Sequence
  Description of Artificial Sequence: Synthetic oligonucleotide
auguauaaagauag

SEQ ID NO: 32426 - RNA, 12 nt, Artificial Sequence
  Description of Artificial Sequence: Synthetic oligonucleotide
ggcuguaacuau

SEQ ID NO: 32427 - RNA, 11 nt, Artificial Sequence
  Description of Artificial Sequence: Synthetic oligonucleotide
ucugugaagug

SEQ ID NO: 32428 - RNA, 14 nt, Artificial Sequence
  Description of Artificial Sequence: Synthetic oligonucleotide
ccuuuaaggaaaug

SEQ ID NO: 32429 - RNA, 13 nt, Artificial Sequence
  Description of Artificial Sequence: Synthetic oligonucleotide
aaggauacaaaaa

SEQ ID NO: 32430 - RNA, 12 nt, Artificial Sequence
  Description of Artificial Sequence: Synthetic oligonucleotide
agaugcaauuug

SEQ ID NO: 32431 - RNA, 12 nt, Artificial Sequence
  Description of Artificial Sequence: Synthetic oligonucleotide
guucaaaacgaa

SEQ ID NO: 32432 - RNA, 11 nt, Artificial Sequence
  Description of Artificial Sequence: Synthetic oligonucleotide
gugaaaccuca

SEQ ID NO: 32433 - RNA, 13 nt, Artificial Sequence
  Description of Artificial Sequence: Synthetic oligonucleotide
acgaaagagaagc

SEQ ID NO: 32434 - RNA, 12 nt, Artificial Sequence
  Description of Artificial Sequence: Synthetic oligonucleotide
cuccacaagcgc

SEQ ID NO: 32435 - RNA, 14 nt, Artificial Sequence
  Description of Artificial Sequence: Synthetic oligonucleotide
gagaagauuccaaa

SEQ ID NO: 32436 - RNA, 13 nt, Artificial Sequence
  Description of Artificial Sequence: Synthetic oligonucleotide
aaucuggauucaa

SEQ ID NO: 32437 - RNA, 13 nt, Artificial Sequence
  Description of Artificial Sequence: Synthetic oligonucleotide
agaacagauuuga

SEQ ID NO: 32438 - RNA, 11 nt, Artificial Sequence
  Description of Artificial Sequence: Synthetic oligonucleotide
ccagagcugug

SEQ ID NO: 32439 - RNA, 12 nt, Artificial Sequence
  Description of Artificial Sequence: Synthetic oligonucleotide
ccucagauuguu

SEQ ID NO: 32440 - RNA, 12 nt, Artificial Sequence
  Description of Artificial Sequence: Synthetic oligonucleotide
cuauuuuaauua

SEQ ID NO: 32441 - RNA, 13 nt, Artificial Sequence
  Description of Artificial Sequence: Synthetic oligonucleotide
uuuaauuuauuaa

SEQ ID NO: 32442 - RNA, 12 nt, Artificial Sequence
  Description of Artificial Sequence: Synthetic oligonucleotide
augcaguuugaa

SEQ ID NO: 32443 - RNA, 11 nt, Artificial Sequence
  Description of Artificial Sequence: Synthetic oligonucleotide
caugcugcugg

SEQ ID NO: 32444 - RNA, 13 nt, Artificial Sequence
  Description of Artificial Sequence: Synthetic oligonucleotide
agaugugcauuuc

SEQ ID NO: 32445 - RNA, 12 nt, Artificial Sequence
  Description of Artificial Sequence: Synthetic oligonucleotide
ucaaaaccugug

SEQ ID NO: 32446 - RNA, 11 nt, Artificial Sequence
  Description of Artificial Sequence: Synthetic oligonucleotide
gaaugugggua

SEQ ID NO: 32447 - RNA, 10 nt, Artificial Sequence
  Description of Artificial Sequence: Synthetic oligonucleotide
auguggguag

SEQ ID NO: 32448 - RNA, 13 nt, Artificial Sequence
  Description of Artificial Sequence: Synthetic oligonucleotide
ugaaaaugagcau

SEQ ID NO: 32449 - RNA, 13 nt, Artificial Sequence
  Description of Artificial Sequence: Synthetic oligonucleotide
uugcuuuucaugu

SEQ ID NO: 32450 - RNA, 12 nt, Artificial Sequence
  Description of Artificial Sequence: Synthetic oligonucleotide
uguauuucuaua

SEQ ID NO: 32451 - RNA, 13 nt, Artificial Sequence
  Description of Artificial Sequence: Synthetic oligonucleotide
uuugauuaauguu

SEQ ID NO: 32452 - RNA, 12 nt, Artificial Sequence
  Description of Artificial Sequence: Synthetic oligonucleotide
caacguguauag

SEQ ID NO: 32453 - RNA, 12 nt, Artificial Sequence
  Description of Artificial Sequence: Synthetic oligonucleotide
cauauccuuggc

SEQ ID NO: 32454 - RNA, 13 nt, Artificial Sequence
  Description of Artificial Sequence: Synthetic oligonucleotide
uacuaacaucugg

SEQ ID NO: 32455 - RNA, 11 nt, Artificial Sequence
  Description of Artificial Sequence: Synthetic oligonucleotide
cauaaguugug

SEQ ID NO: 32456 - RNA, 12 nt, Artificial Sequence
  Description of Artificial Sequence: Synthetic oligonucleotide
gcaucauuuugg

SEQ ID NO: 32457 - RNA, 10 nt, Artificial Sequence
  Description of Artificial Sequence: Synthetic oligonucleotide
gcucuucuua

SEQ ID NO: 32458 - RNA, 10 nt, Artificial Sequence
  Description of Artificial Sequence: Synthetic oligonucleotide
agauuagguc

SEQ ID NO: 32459 - RNA, 12 nt, Artificial Sequence
  Description of Artificial Sequence: Synthetic oligonucleotide
auggaauugaaa

SEQ ID NO: 32460 - RNA, 13 nt, Artificial Sequence
  Description of Artificial Sequence: Synthetic oligonucleotide
cacacucauuccu

SEQ ID NO: 32461 - RNA, 12 nt, Artificial Sequence
  Description of Artificial Sequence: Synthetic oligonucleotide
uguagagguaac

SEQ ID NO: 32462 - RNA, 11 nt, Artificial Sequence
  Description of Artificial Sequence: Synthetic oligonucleotide
caaccacaugc

SEQ ID NO: 32463 - RNA, 12 nt, Artificial Sequence
  Description of Artificial Sequence: Synthetic oligonucleotide
ucggaaacaagu

SEQ ID NO: 32464 - RNA, 11 nt, Artificial Sequence
  Description of Artificial Sequence: Synthetic oligonucleotide
acucccaauaa

SEQ ID NO: 32465 - RNA, 13 nt, Artificial Sequence
  Description of Artificial Sequence: Synthetic oligonucleotide
aaugcuaagaaau

SEQ ID NO: 32466 - RNA, 11 nt, Artificial Sequence
  Description of Artificial Sequence: Synthetic oligonucleotide
gucuuucucua

SEQ ID NO: 32467 - RNA, 11 nt, Artificial Sequence
  Description of Artificial Sequence: Synthetic oligonucleotide
ugaauuucagg

SEQ ID NO: 32468 - RNA, 13 nt, Artificial Sequence
  Description of Artificial Sequence: Synthetic oligonucleotide
cgauucccucuca

SEQ ID NO: 32469 - RNA, 11 nt, Artificial Sequence
  Description of Artificial Sequence: Synthetic oligonucleotide
aggaaagugaa

SEQ ID NO: 32470 - RNA, 12 nt, Artificial Sequence
  Description of Artificial Sequence: Synthetic oligonucleotide
gaggcugcaugc

SEQ ID NO: 32471 - RNA, 11 nt, Artificial Sequence
  Description of Artificial Sequence: Synthetic oligonucleotide
ucucugaacag

SEQ ID NO: 32472 - RNA, 12 nt, Artificial Sequence
  Description of Artificial Sequence: Synthetic oligonucleotide
aacuuggcugua

SEQ ID NO: 32473 - RNA, 12 nt, Artificial Sequence
  Description of Artificial Sequence: Synthetic oligonucleotide
agaagccaaaau

SEQ ID NO: 32474 - RNA, 14 nt, Artificial Sequence
  Description of Artificial Sequence: Synthetic oligonucleotide
auuaaaagaagucc

SEQ ID NO: 32475 - RNA, 14 nt, Artificial Sequence
  Description of Artificial Sequence: Synthetic oligonucleotide
gaauccggauuauc

SEQ ID NO: 32476 - RNA, 12 nt, Artificial Sequence
  Description of Artificial Sequence: Synthetic oligonucleotide
aaugugacauca

SEQ ID NO: 32477 - RNA, 13 nt, Artificial Sequence
  Description of Artificial Sequence: Synthetic oligonucleotide
caucaaagcaagu

SEQ ID NO: 32478 - RNA, 11 nt, Artificial Sequence
  Description of Artificial Sequence: Synthetic oligonucleotide
agagagagaaa

SEQ ID NO: 32479 - RNA, 13 nt, Artificial Sequence
  Description of Artificial Sequence: Synthetic oligonucleotide
ucgcuguaguauu

SEQ ID NO: 32480 - RNA, 14 nt, Artificial Sequence
  Description of Artificial Sequence: Synthetic oligonucleotide
cgcuguaguauuua

SEQ ID NO: 32481 - RNA, 13 nt, Artificial Sequence
  Description of Artificial Sequence: Synthetic oligonucleotide
auuuaagcccaua

SEQ ID NO: 32482 - RNA, 15 nt, Artificial Sequence
  Description of Artificial Sequence: Synthetic oligonucleotide
auuaaaauaaacaug

SEQ ID NO: 32483 - RNA, 12 nt, Artificial Sequence
  Description of Artificial Sequence: Synthetic oligonucleotide
cuguucugaucg

SEQ ID NO: 32484 - RNA, 16 nt, Artificial Sequence
  Description of Artificial Sequence: Synthetic oligonucleotide
aaauaauuugaacuuu

SEQ ID NO: 32485 - RNA, 12 nt, Artificial Sequence
  Description of Artificial Sequence: Synthetic oligonucleotide
ugcgaccuuaau

SEQ ID NO: 32486 - RNA, 11 nt, Artificial Sequence
  Description of Artificial Sequence: Synthetic oligonucleotide
cugagaaagcu

SEQ ID NO: 32487 - RNA, 13 nt, Artificial Sequence
  Description of Artificial Sequence: Synthetic oligonucleotide
aguaaagaugcua

SEQ ID NO: 32488 - RNA, 12 nt, Artificial Sequence
  Description of Artificial Sequence: Synthetic oligonucleotide
cugcuuaauugc

SEQ ID NO: 32489 - RNA, 14 nt, Artificial Sequence
  Description of Artificial Sequence: Synthetic oligonucleotide
uaccauaugaauga

SEQ ID NO: 32490 - RNA, 12 nt, Artificial Sequence
  Description of Artificial Sequence: Synthetic oligonucleotide
aacuuucuuauc

SEQ ID NO: 32491 - RNA, 13 nt, Artificial Sequence
  Description of Artificial Sequence: Synthetic oligonucleotide
ccuugcaugacau

SEQ ID NO: 32492 - RNA, 14 nt, Artificial Sequence
  Description of Artificial Sequence: Synthetic oligonucleotide
ugaauuuguauaug

SEQ ID NO: 32493 - RNA, 12 nt, Artificial Sequence
  Description of Artificial Sequence: Synthetic oligonucleotide
gaauccuaguag

SEQ ID NO: 32494 - RNA, 10 nt, Artificial Sequence
  Description of Artificial Sequence: Synthetic oligonucleotide
gaaagggaag

SEQ ID NO: 32495 - RNA, 11 nt, Artificial Sequence
  Description of Artificial Sequence: Synthetic oligonucleotide
uaucggcaugc

SEQ ID NO: 32496 - RNA, 12 nt, Artificial Sequence
  Description of Artificial Sequence: Synthetic oligonucleotide
caccucauagua

SEQ ID NO: 32497 - RNA, 11 nt, Artificial Sequence
  Description of Artificial Sequence: Synthetic oligonucleotide
ccagaauugcc

SEQ ID NO: 32498 - RNA, 11 nt, Artificial Sequence
  Description of Artificial Sequence: Synthetic oligonucleotide
uggugaucugg

SEQ ID NO: 32499 - RNA, 12 nt, Artificial Sequence
  Description of Artificial Sequence: Synthetic oligonucleotide
gaucuggguaau

SEQ ID NO: 32500 - RNA, 12 nt, Artificial Sequence
  Description of Artificial Sequence: Synthetic oligonucleotide
ggaugugaugaa

SEQ ID NO: 32501 - RNA, 12 nt, Artificial Sequence
  Description of Artificial Sequence: Synthetic oligonucleotide
cauuuccacagc

SEQ ID NO: 32502 - RNA, 11 nt, Artificial Sequence
  Description of Artificial Sequence: Synthetic oligonucleotide
acagcuacacc

SEQ ID NO: 32503 - RNA, 12 nt, Artificial Sequence
  Description of Artificial Sequence: Synthetic oligonucleotide
ugcaguucuuac

SEQ ID NO: 32504 - RNA, 12 nt, Artificial Sequence
  Description of Artificial Sequence: Synthetic oligonucleotide
acgagaagaaga

SEQ ID NO: 32505 - RNA, 12 nt, Artificial Sequence
  Description of Artificial Sequence: Synthetic oligonucleotide
cgagaagaagau

SEQ ID NO: 32506 - RNA, 15 nt, Artificial Sequence
  Description of Artificial Sequence: Synthetic oligonucleotide
aagaagaucauuuac

SEQ ID NO: 32507 - RNA, 11 nt, Artificial Sequence
  Description of Artificial Sequence: Synthetic oligonucleotide
agaggaagagg

SEQ ID NO: 32508 - RNA, 12 nt, Artificial Sequence
  Description of Artificial Sequence: Synthetic oligonucleotide
gaggaagaggug

SEQ ID NO: 32509 - RNA, 13 nt, Artificial Sequence
  Description of Artificial Sequence: Synthetic oligonucleotide
cuacuuugagggc

SEQ ID NO: 32510 - RNA, 12 nt, Artificial Sequence
  Description of Artificial Sequence: Synthetic oligonucleotide
agggcaucuccu

SEQ ID NO: 32511 - RNA, 10 nt, Artificial Sequence
  Description of Artificial Sequence: Synthetic oligonucleotide
ggagugauau

SEQ ID NO: 32512 - RNA, 11 nt, Artificial Sequence
  Description of Artificial Sequence: Synthetic oligonucleotide
gagugauaugg

SEQ ID NO: 32513 - RNA, 12 nt, Artificial Sequence
  Description of Artificial Sequence: Synthetic oligonucleotide
ugcaguaaagau

SEQ ID NO: 32514 - RNA, 13 nt, Artificial Sequence
  Description of Artificial Sequence: Synthetic oligonucleotide
aguaaagauccua

SEQ ID NO: 32515 - RNA, 12 nt, Artificial Sequence
  Description of Artificial Sequence: Synthetic oligonucleotide
ugacaaaggaca

SEQ ID NO: 32516 - RNA, 13 nt, Artificial Sequence
  Description of Artificial Sequence: Synthetic oligonucleotide
gcaauugugaccc

SEQ ID NO: 32517 - RNA, 12 nt, Artificial Sequence
  Description of Artificial Sequence: Synthetic oligonucleotide
aacaucauccau

SEQ ID NO: 32518 - RNA, 12 nt, Artificial Sequence
  Description of Artificial Sequence: Synthetic oligonucleotide
ugaaauccaaca

SEQ ID NO: 32519 - RNA, 15 nt, Artificial Sequence
  Description of Artificial Sequence: Synthetic oligonucleotide
aacaauauauuucuc

SEQ ID NO: 32520 - RNA, 14 nt, Artificial Sequence
  Description of Artificial Sequence: Synthetic oligonucleotide
aacaguaaagucac

SEQ ID NO: 32521 - RNA, 14 nt, Artificial Sequence
  Description of Artificial Sequence: Synthetic oligonucleotide
ugugaagaaaguaa

SEQ ID NO: 32522 - RNA, 13 nt, Artificial Sequence
  Description of Artificial Sequence: Synthetic oligonucleotide
cuuccgagccauc

SEQ ID NO: 32523 - RNA, 12 nt, Artificial Sequence
  Description of Artificial Sequence: Synthetic oligonucleotide
aauggagguuga

SEQ ID NO: 32524 - RNA, 12 nt, Artificial Sequence
  Description of Artificial Sequence: Synthetic oligonucleotide
ggagguugaaua

SEQ ID NO: 32525 - RNA, 13 nt, Artificial Sequence
  Description of Artificial Sequence: Synthetic oligonucleotide
auuuugaguuuuc

SEQ ID NO: 32526 - RNA, 12 nt, Artificial Sequence
  Description of Artificial Sequence: Synthetic oligonucleotide
uauccuguuugu

SEQ ID NO: 32527 - RNA, 11 nt, Artificial Sequence
  Description of Artificial Sequence: Synthetic oligonucleotide
ccuguuuguuc

SEQ ID NO: 32528 - RNA, 10 nt, Artificial Sequence
  Description of Artificial Sequence: Synthetic oligonucleotide
cucuacagcc

SEQ ID NO: 32529 - RNA, 12 nt, Artificial Sequence
  Description of Artificial Sequence: Synthetic oligonucleotide
ucuuccauagcu

SEQ ID NO: 32530 - RNA, 12 nt, Artificial Sequence
  Description of Artificial Sequence: Synthetic oligonucleotide
auaaucuuccug

SEQ ID NO: 32531 - RNA, 12 nt, Artificial Sequence
  Description of Artificial Sequence: Synthetic oligonucleotide
uaaucuuccugu

SEQ ID NO: 32532 - RNA, 12 nt, Artificial Sequence
  Description of Artificial Sequence: Synthetic oligonucleotide
cuucaugacuug

SEQ ID NO: 32533 - RNA, 12 nt, Artificial Sequence
  Description of Artificial Sequence: Synthetic oligonucleotide
aagagggagaga

SEQ ID NO: 32534 - RNA, 12 nt, Artificial Sequence
  Description of Artificial Sequence: Synthetic oligonucleotide
cgucuccuacca

SEQ ID NO: 32535 - RNA, 12 nt, Artificial Sequence
  Description of Artificial Sequence: Synthetic oligonucleotide
gaucaaucggcc

SEQ ID NO: 32536 - RNA, 12 nt, Artificial Sequence
  Description of Artificial Sequence: Synthetic oligonucleotide
ggacgaacaucc

SEQ ID NO: 32537 - RNA, 11 nt, Artificial Sequence
  Description of Artificial Sequence: Synthetic oligonucleotide
agggucggaac

SEQ ID NO: 32538 - RNA, 10 nt, Artificial Sequence
  Description of Artificial Sequence: Synthetic oligonucleotide
ucggaaccca

SEQ ID NO: 32539 - RNA, 11 nt, Artificial Sequence
  Description of Artificial Sequence: Synthetic oligonucleotide
acccaagcuua

SEQ ID NO: 32540 - RNA, 14 nt, Artificial Sequence
  Description of Artificial Sequence: Synthetic oligonucleotide
gaacuuuaagcaac

SEQ ID NO: 32541 - RNA, 11 nt, Artificial Sequence
  Description of Artificial Sequence: Synthetic oligonucleotide
acuauucagug

SEQ ID NO: 32542 - RNA, 11 nt, Artificial Sequence
  Description of Artificial Sequence: Synthetic oligonucleotide
cuauucagugg

SEQ ID NO: 32543 - RNA, 13 nt, Artificial Sequence
  Description of Artificial Sequence: Synthetic oligonucleotide
aaacacagauaac

SEQ ID NO: 32544 - RNA, 12 nt, Artificial Sequence
  Description of Artificial Sequence: Synthetic oligonucleotide
cuuaagaaaaga

SEQ ID NO: 32545 - RNA, 12 nt, Artificial Sequence
  Description of Artificial Sequence: Synthetic oligonucleotide
cugaaggagugu

SEQ ID NO: 32546 - RNA, 10 nt, Artificial Sequence
  Description of Artificial Sequence: Synthetic oligonucleotide
ucaccgcggg

SEQ ID NO: 32547 - RNA, 14 nt, Artificial Sequence
  Description of Artificial Sequence: Synthetic oligonucleotide
agcagaaauaagcg

SEQ ID NO: 32548 - RNA, 12 nt, Artificial Sequence
  Description of Artificial Sequence: Synthetic oligonucleotide
aagcgugccguu

SEQ ID NO: 32549 - RNA, 12 nt, Artificial Sequence
  Description of Artificial Sequence: Synthetic oligonucleotide
agaaacagucac

SEQ ID NO: 32550 - RNA, 12 nt, Artificial Sequence
  Description of Artificial Sequence: Synthetic oligonucleotide
agaggaagaagg

SEQ ID NO: 32551 - RNA, 14 nt, Artificial Sequence
  Description of Artificial Sequence: Synthetic oligonucleotide
uguauucaaaauau

SEQ ID NO: 32552 - RNA, 13 nt, Artificial Sequence
  Description of Artificial Sequence: Synthetic oligonucleotide
auuuuccucccuu

SEQ ID NO: 32553 - RNA, 13 nt, Artificial Sequence
  Description of Artificial Sequence: Synthetic oligonucleotide
caaagaaagauag

SEQ ID NO: 32554 - RNA, 12 nt, Artificial Sequence
  Description of Artificial Sequence: Synthetic oligonucleotide
aagaaagauaga

SEQ ID NO: 32555 - RNA, 13 nt, Artificial Sequence
  Description of Artificial Sequence: Synthetic oligonucleotide
gaaagcauuuguu

SEQ ID NO: 32556 - RNA, 13 nt, Artificial Sequence
  Description of Artificial Sequence: Synthetic oligonucleotide
ugaguuaaacgaa

SEQ ID NO: 32557 - RNA, 12 nt, Artificial Sequence
  Description of Artificial Sequence: Synthetic oligonucleotide
acugauacagaa

SEQ ID NO: 32558 - RNA, 12 nt, Artificial Sequence
  Description of Artificial Sequence: Synthetic oligonucleotide
auauuauauaua

SEQ ID NO: 32559 - RNA, 12 nt, Artificial Sequence
  Description of Artificial Sequence: Synthetic oligonucleotide
auuauauauaua

SEQ ID NO: 32560 - RNA, 12 nt, Artificial Sequence
  Description of Artificial Sequence: Synthetic oligonucleotide
ucacuggaugua

SEQ ID NO: 32561 - RNA, 12 nt, Artificial Sequence
  Description of Artificial Sequence: Synthetic oligonucleotide
cagggaagagga

SEQ ID NO: 32562 - RNA, 15 nt, Artificial Sequence
  Description of Artificial Sequence: Synthetic oligonucleotide
augaucuuuuuuuug

SEQ ID NO: 32563 - RNA, 11 nt, Artificial Sequence
  Description of Artificial Sequence: Synthetic oligonucleotide
aguucacggcc

SEQ ID NO: 32564 - RNA, 13 nt, Artificial Sequence
  Description of Artificial Sequence: Synthetic oligonucleotide
caccaucacacca

SEQ ID NO: 32565 - RNA, 11 nt, Artificial Sequence
  Description of Artificial Sequence: Synthetic oligonucleotide
ccugcggguuu

SEQ ID NO: 32566 - RNA, 10 nt, Artificial Sequence
  Description of Artificial Sequence: Synthetic oligonucleotide
auccaguuug

SEQ ID NO: 32567 - RNA, 13 nt, Artificial Sequence
  Description of Artificial Sequence: Synthetic oligonucleotide
guuaaggacuucu

SEQ ID NO: 32568 - RNA, 13 nt, Artificial Sequence
  Description of Artificial Sequence: Synthetic oligonucleotide
cagugggacagag

SEQ ID NO: 32569 - RNA, 14 nt, Artificial Sequence
  Description of Artificial Sequence: Synthetic oligonucleotide
aauuuguuauugug

SEQ ID NO: 32570 - RNA, 13 nt, Artificial Sequence
  Description of Artificial Sequence: Synthetic oligonucleotide
uucaaaugcauuu

SEQ ID NO: 32571 - RNA, 10 nt, Artificial Sequence
  Description of Artificial Sequence: Synthetic oligonucleotide
caggaaagcc

SEQ ID NO: 32572 - RNA, 11 nt, Artificial Sequence
  Description of Artificial Sequence: Synthetic oligonucleotide
aggaaagcccu

SEQ ID NO: 32573 - RNA, 12 nt, Artificial Sequence
  Description of Artificial Sequence: Synthetic oligonucleotide
cccagcauggcc

SEQ ID NO: 32574 - RNA, 11 nt, Artificial Sequence
  Description of Artificial Sequence: Synthetic oligonucleotide
cuucucccuga

SEQ ID NO: 32575 - RNA, 12 nt, Artificial Sequence
  Description of Artificial Sequence: Synthetic oligonucleotide
gaagaagcccuu

SEQ ID NO: 32576 - RNA, 12 nt, Artificial Sequence
  Description of Artificial Sequence: Synthetic oligonucleotide
agaagcccuuca

SEQ ID NO: 32577 - RNA, 11 nt, Artificial Sequence
  Description of Artificial Sequence: Synthetic oligonucleotide
gcccuucagcg

SEQ ID NO: 32578 - RNA, 11 nt, Artificial Sequence
  Description of Artificial Sequence: Synthetic oligonucleotide
ccuucagcggc

SEQ ID NO: 32579 - RNA, 12 nt, Artificial Sequence
  Description of Artificial Sequence: Synthetic oligonucleotide
ucagcggccagu

SEQ ID NO: 32580 - RNA, 12 nt, Artificial Sequence
  Description of Artificial Sequence: Synthetic oligonucleotide
ugaaaagcuccg

SEQ ID NO: 32581 - RNA, 11 nt, Artificial Sequence
  Description of Artificial Sequence: Synthetic oligonucleotide
aaaagcuccgg

SEQ ID NO: 32582 - RNA, 13 nt, Artificial Sequence
  Description of Artificial Sequence: Synthetic oligonucleotide
agucaacagucug

SEQ ID NO: 32583 - RNA, 13 nt, Artificial Sequence
  Description of Artificial Sequence: Synthetic oligonucleotide
cagaguucaaaag

SEQ ID NO: 32584 - RNA, 13 nt, Artificial Sequence
  Description of Artificial Sequence: Synthetic oligonucleotide
agaguucaaaagc

SEQ ID NO: 32585 - RNA, 12 nt, Artificial Sequence
  Description of Artificial Sequence: Synthetic oligonucleotide
uucaaaagcccu

SEQ ID NO: 32586 - RNA, 12 nt, Artificial Sequence
  Description of Artificial Sequence: Synthetic oligonucleotide
ucaaaagcccuu

SEQ ID NO: 32587 - RNA, 12 nt, Artificial Sequence
  Description of Artificial Sequence: Synthetic oligonucleotide
aaaagcccuuca

SEQ ID NO: 32588 - RNA, 12 nt, Artificial Sequence
  Description of Artificial Sequence: Synthetic oligonucleotide
aaagcccuucag

SEQ ID NO: 32589 - RNA, 13 nt, Artificial Sequence
  Description of Artificial Sequence: Synthetic oligonucleotide
gugaagccgcucg

SEQ ID NO: 32590 - RNA, 12 nt, Artificial Sequence
  Description of Artificial Sequence: Synthetic oligonucleotide
cacgccagucaa

SEQ ID NO: 32591 - RNA, 13 nt, Artificial Sequence
  Description of Artificial Sequence: Synthetic oligonucleotide
uucuuggugcgug

SEQ ID NO: 32592 - RNA, 14 nt, Artificial Sequence
  Description of Artificial Sequence: Synthetic oligonucleotide
auuggauucaucag

SEQ ID NO: 32593 - RNA, 13 nt, Artificial Sequence
  Description of Artificial Sequence: Synthetic oligonucleotide
uggaauaccuaag

SEQ ID NO: 32594 - RNA, 12 nt, Artificial Sequence
  Description of Artificial Sequence: Synthetic oligonucleotide
auuugaggcuca

SEQ ID NO: 32595 - RNA, 11 nt, Artificial Sequence
  Description of Artificial Sequence: Synthetic oligonucleotide
ucuacaauugg

SEQ ID NO: 32596 - RNA, 12 nt, Artificial Sequence
  Description of Artificial Sequence: Synthetic oligonucleotide
uaguuaggagcc

SEQ ID NO: 32597 - RNA, 13 nt, Artificial Sequence
  Description of Artificial Sequence: Synthetic oligonucleotide
agucaauauccac

SEQ ID NO: 32598 - RNA, 13 nt, Artificial Sequence
  Description of Artificial Sequence: Synthetic oligonucleotide
auguucagucaca

SEQ ID NO: 32599 - RNA, 12 nt, Artificial Sequence
  Description of Artificial Sequence: Synthetic oligonucleotide
acacacacauac

SEQ ID NO: 32600 - RNA, 12 nt, Artificial Sequence
  Description of Artificial Sequence: Synthetic oligonucleotide
uuccuuuugcuu

SEQ ID NO: 32601 - RNA, 16 nt, Artificial Sequence
  Description of Artificial Sequence: Synthetic oligonucleotide
uuuuaaaguaauuuuu

SEQ ID NO: 32602 - RNA, 13 nt, Artificial Sequence
  Description of Artificial Sequence: Synthetic oligonucleotide
caacagucaaugg

SEQ ID NO: 32603 - RNA, 13 nt, Artificial Sequence
  Description of Artificial Sequence: Synthetic oligonucleotide
ucgacaaaccaau

SEQ ID NO: 32604 - RNA, 12 nt, Artificial Sequence
  Description of Artificial Sequence: Synthetic oligonucleotide
acugcuaccacu

SEQ ID NO: 32605 - RNA, 13 nt, Artificial Sequence
  Description of Artificial Sequence: Synthetic oligonucleotide
gcaagcggucuua

SEQ ID NO: 32606 - RNA, 13 nt, Artificial Sequence
  Description of Artificial Sequence: Synthetic oligonucleotide
ggucuuaccggcu

SEQ ID NO: 32607 - RNA, 11 nt, Artificial Sequence
  Description of Artificial Sequence: Synthetic oligonucleotide
gauggguuacc

SEQ ID NO: 32608 - RNA, 11 nt, Artificial Sequence
  Description of Artificial Sequence: Synthetic oligonucleotide
guuaccugcga

SEQ ID NO: 32609 - RNA, 12 nt, Artificial Sequence
  Description of Artificial Sequence: Synthetic oligonucleotide
aaucuugcugag

SEQ ID NO: 32610 - RNA, 13 nt, Artificial Sequence
  Description of Artificial Sequence: Synthetic oligonucleotide
agcauaaaacagu

SEQ ID NO: 32611 - RNA, 12 nt, Artificial Sequence
  Description of Artificial Sequence: Synthetic oligonucleotide
guccuuuauccu

SEQ ID NO: 32612 - RNA, 12 nt, Artificial Sequence
  Description of Artificial Sequence: Synthetic oligonucleotide
caacgcaaguug

SEQ ID NO: 32613 - RNA, 13 nt, Artificial Sequence
  Description of Artificial Sequence: Synthetic oligonucleotide
aaacugaaaccau

SEQ ID NO: 32614 - RNA, 14 nt, Artificial Sequence
  Description of Artificial Sequence: Synthetic oligonucleotide
acuuuguuaaauau

SEQ ID NO: 32615 - RNA, 14 nt, Artificial Sequence
  Description of Artificial Sequence: Synthetic oligonucleotide
guauauuaaaaguu

SEQ ID NO: 32616 - RNA, 13 nt, Artificial Sequence
  Description of Artificial Sequence: Synthetic oligonucleotide
guuuugacuuaac

SEQ ID NO: 32617 - RNA, 13 nt, Artificial Sequence
  Description of Artificial Sequence: Synthetic oligonucleotide
gcaaacucagcac

SEQ ID NO: 32618 - RNA, 11 nt, Artificial Sequence
  Description of Artificial Sequence: Synthetic oligonucleotide
ugcugaccuca

SEQ ID NO: 32619 - RNA, 14 nt, Artificial Sequence
  Description of Artificial Sequence: Synthetic oligonucleotide
uuuauucagaucgc

SEQ ID NO: 32620 - RNA, 13 nt, Artificial Sequence
  Description of Artificial Sequence: Synthetic oligonucleotide
aggguucugggau

SEQ ID NO: 32621 - RNA, 15 nt, Artificial Sequence
  Description of Artificial Sequence: Synthetic oligonucleotide
auauuggaaauuaug

SEQ ID NO: 32622 - RNA, 13 nt, Artificial Sequence
  Description of Artificial Sequence: Synthetic oligonucleotide
auggaagcacuag

SEQ ID NO: 32623 - RNA, 13 nt, Artificial Sequence
  Description of Artificial Sequence: Synthetic oligonucleotide
guuuuuaugugga

SEQ ID NO: 32624 - RNA, 12 nt, Artificial Sequence
  Description of Artificial Sequence: Synthetic oligonucleotide
ggaauugguaga

SEQ ID NO: 32625 - RNA, 13 nt, Artificial Sequence
  Description of Artificial Sequence: Synthetic oligonucleotide
uuagacuuggaga

SEQ ID NO: 32626 - RNA, 13 nt, Artificial Sequence
  Description of Artificial Sequence: Synthetic oligonucleotide
uuacaguauucca

SEQ ID NO: 32627 - RNA, 15 nt, Artificial Sequence
  Description of Artificial Sequence: Synthetic oligonucleotide
ccacugaugaauuaa

SEQ ID NO: 32628 - RNA, 12 nt, Artificial Sequence
  Description of Artificial Sequence: Synthetic oligonucleotide
ccacaucaucac

SEQ ID NO: 32629 - RNA, 13 nt, Artificial Sequence
  Description of Artificial Sequence: Synthetic oligonucleotide
cucaccaaacaga

SEQ ID NO: 32630 - RNA, 12 nt, Artificial Sequence
  Description of Artificial Sequence: Synthetic oligonucleotide
ggaacaugaugg

SEQ ID NO: 32631 - RNA, 12 nt, Artificial Sequence
  Description of Artificial Sequence: Synthetic oligonucleotide
cauguagacugc

SEQ ID NO: 32632 - RNA, 13 nt, Artificial Sequence
  Description of Artificial Sequence: Synthetic oligonucleotide
ggaucuauuuaug

SEQ ID NO: 32633 - RNA, 12 nt, Artificial Sequence
  Description of Artificial Sequence: Synthetic oligonucleotide
gcacuauuauca

SEQ ID NO: 32634 - RNA, 11 nt, Artificial Sequence
  Description of Artificial Sequence: Synthetic oligonucleotide
aucaguucugc

SEQ ID NO: 32635 - RNA, 13 nt, Artificial Sequence
  Description of Artificial Sequence: Synthetic oligonucleotide
agauuaaaccuac

SEQ ID NO: 32636 - RNA, 13 nt, Artificial Sequence
  Description of Artificial Sequence: Synthetic oligonucleotide
auaaaauccuucu

SEQ ID NO: 32637 - RNA, 12 nt, Artificial Sequence
  Description of Artificial Sequence: Synthetic oligonucleotide
aaugcuguagac

SEQ ID NO: 32638 - RNA, 13 nt, Artificial Sequence
  Description of Artificial Sequence: Synthetic oligonucleotide
uugauaggaauag

SEQ ID NO: 32639 - RNA, 11 nt, Artificial Sequence
  Description of Artificial Sequence: Synthetic oligonucleotide
aauggcccuga

SEQ ID NO: 32640 - RNA, 11 nt, Artificial Sequence
  Description of Artificial Sequence: Synthetic oligonucleotide
uuccucaagca

SEQ ID NO: 32641 - RNA, 10 nt, Artificial Sequence
  Description of Artificial Sequence: Synthetic oligonucleotide
guucagccca

SEQ ID NO: 32642 - RNA, 11 nt, Artificial Sequence
  Description of Artificial Sequence: Synthetic oligonucleotide
gcugcugaacc

SEQ ID NO: 32643 - RNA, 12 nt, Artificial Sequence
  Description of Artificial Sequence: Synthetic oligonucleotide
aaguucucuuca

SEQ ID NO: 32644 - RNA, 11 nt, Artificial Sequence
  Description of Artificial Sequence: Synthetic oligonucleotide
ccagccuagag

SEQ ID NO: 32645 - RNA, 13 nt, Artificial Sequence
  Description of Artificial Sequence: Synthetic oligonucleotide
cucugugaagugu

SEQ ID NO: 32646 - RNA, 14 nt, Artificial Sequence
  Description of Artificial Sequence: Synthetic oligonucleotide
ugagaaaauuucaa

SEQ ID NO: 32647 - RNA, 11 nt, Artificial Sequence
  Description of Artificial Sequence: Synthetic oligonucleotide
aauccuccuga

SEQ ID NO: 32648 - RNA, 12 nt, Artificial Sequence
  Description of Artificial Sequence: Synthetic oligonucleotide
gugacaucauau

SEQ ID NO: 32649 - RNA, 13 nt, Artificial Sequence
  Description of Artificial Sequence: Synthetic oligonucleotide
aaucuucaucaua

SEQ ID NO: 32650 - RNA, 13 nt, Artificial Sequence
  Description of Artificial Sequence: Synthetic oligonucleotide
gacuagcuauuaa

SEQ ID NO: 32651 - RNA, 14 nt, Artificial Sequence
  Description of Artificial Sequence: Synthetic oligonucleotide
ucucuacuaaaaau

SEQ ID NO: 32652 - RNA, 12 nt, Artificial Sequence
  Description of Artificial Sequence: Synthetic oligonucleotide
ucuaucucgccu

SEQ ID NO: 32653 - RNA, 13 nt, Artificial Sequence
  Description of Artificial Sequence: Synthetic oligonucleotide
cuucgguccaguu

SEQ ID NO: 32654 - RNA, 11 nt, Artificial Sequence
  Description of Artificial Sequence: Synthetic oligonucleotide
gauguagccgc

SEQ ID NO: 32655 - RNA, 12 nt, Artificial Sequence
  Description of Artificial Sequence: Synthetic oligonucleotide
ugaggagacuug

SEQ ID NO: 32656 - RNA, 12 nt, Artificial Sequence
  Description of Artificial Sequence: Synthetic oligonucleotide
gaguagugagga

SEQ ID NO: 32657 - RNA, 14 nt, Artificial Sequence
  Description of Artificial Sequence: Synthetic oligonucleotide
cagaugaguacaaa

SEQ ID NO: 32658 - RNA, 13 nt, Artificial Sequence
  Description of Artificial Sequence: Synthetic oligonucleotide
guuguuaaugggc

SEQ ID NO: 32659 - RNA, 13 nt, Artificial Sequence
  Description of Artificial Sequence: Synthetic oligonucleotide
uuuuuaauuuauu

SEQ ID NO: 32660 - RNA, 12 nt, Artificial Sequence
  Description of Artificial Sequence: Synthetic oligonucleotide
uauuuaaauaug

SEQ ID NO: 32661 - RNA, 13 nt, Artificial Sequence
  Description of Artificial Sequence: Synthetic oligonucleotide
uauccuuuguuuc

SEQ ID NO: 32662 - RNA, 14 nt, Artificial Sequence
  Description of Artificial Sequence: Synthetic oligonucleotide
cgucuaaguguuug

SEQ ID NO: 32663 - RNA, 12 nt, Artificial Sequence
  Description of Artificial Sequence: Synthetic oligonucleotide
accugugacaaa

SEQ ID NO: 32664 - RNA, 13 nt, Artificial Sequence
  Description of Artificial Sequence: Synthetic oligonucleotide
ccaggcugaauua

SEQ ID NO: 32665 - RNA, 14 nt, Artificial Sequence
  Description of Artificial Sequence: Synthetic oligonucleotide
gucauucuuacaau

SEQ ID NO: 32666 - RNA, 15 nt, Artificial Sequence
  Description of Artificial Sequence: Synthetic oligonucleotide
ucauucuuacaauug

SEQ ID NO: 32667 - RNA, 12 nt, Artificial Sequence
  Description of Artificial Sequence: Synthetic oligonucleotide
cagagaguguac

SEQ ID NO: 32668 - RNA, 12 nt, Artificial Sequence
  Description of Artificial Sequence: Synthetic oligonucleotide
agaacucagcag

SEQ ID NO: 32669 - RNA, 13 nt, Artificial Sequence
  Description of Artificial Sequence: Synthetic oligonucleotide
uuuauuuucagua

SEQ ID NO: 32670 - RNA, 12 nt, Artificial Sequence
  Description of Artificial Sequence: Synthetic oligonucleotide
ucuuaaauggaa

SEQ ID NO: 32671 - RNA, 13 nt, Artificial Sequence
  Description of Artificial Sequence: Synthetic oligonucleotide
ugccuaaaauugu

SEQ ID NO: 32672 - RNA, 12 nt, Artificial Sequence
  Description of Artificial Sequence: Synthetic oligonucleotide
agacugugagcu

SEQ ID NO: 32673 - RNA, 14 nt, Artificial Sequence
  Description of Artificial Sequence: Synthetic oligonucleotide
ugcuuuuuauuaau

SEQ ID NO: 32674 - RNA, 13 nt, Artificial Sequence
  Description of Artificial Sequence: Synthetic oligonucleotide
cucuucuuacauu

SEQ ID NO: 32675 - RNA, 15 nt, Artificial Sequence
  Description of Artificial Sequence: Synthetic oligonucleotide
cauuuguaaaaaugu

SEQ ID NO: 32676 - RNA, 15 nt, Artificial Sequence
  Description of Artificial Sequence: Synthetic oligonucleotide
aucuuaauucauauu

SEQ ID NO: 32677 - RNA, 13 nt, Artificial Sequence
  Description of Artificial Sequence: Synthetic oligonucleotide
gaacuaaucauga

SEQ ID NO: 32678 - RNA, 12 nt, Artificial Sequence
  Description of Artificial Sequence: Synthetic oligonucleotide
ucugcucuuggg

SEQ ID NO: 32679 - RNA, 13 nt, Artificial Sequence
  Description of Artificial Sequence: Synthetic oligonucleotide
caguagcuuugag

SEQ ID NO: 32680 - RNA, 14 nt, Artificial Sequence
  Description of Artificial Sequence: Synthetic oligonucleotide
cacguaauauuuca

SEQ ID NO: 32681 - RNA, 13 nt, Artificial Sequence
  Description of Artificial Sequence: Synthetic oligonucleotide
uauucucuucacu

SEQ ID NO: 32682 - RNA, 14 nt, Artificial Sequence
  Description of Artificial Sequence: Synthetic oligonucleotide
cuaaugcuaagaaa

SEQ ID NO: 32683 - RNA, 12 nt, Artificial Sequence
  Description of Artificial Sequence: Synthetic oligonucleotide
gcugaaaaucaa

SEQ ID NO: 32684 - RNA, 14 nt, Artificial Sequence
  Description of Artificial Sequence: Synthetic oligonucleotide
aauaugauuacuuu

SEQ ID NO: 32685 - RNA, 14 nt, Artificial Sequence
  Description of Artificial Sequence: Synthetic oligonucleotide
cauuuuguucuaca

SEQ ID NO: 32686 - RNA, 12 nt, Artificial Sequence
  Description of Artificial Sequence: Synthetic oligonucleotide
cccgggacucuc

SEQ ID NO: 32687 - RNA, 14 nt, Artificial Sequence
  Description of Artificial Sequence: Synthetic oligonucleotide
ccuuuaaaguaaag

SEQ ID NO: 32688 - RNA, 13 nt, Artificial Sequence
  Description of Artificial Sequence: Synthetic oligonucleotide
ucuggaagccugg

SEQ ID NO: 32689 - RNA, 14 nt, Artificial Sequence
  Description of Artificial Sequence: Synthetic oligonucleotide
aaaacaaaagagag

SEQ ID NO: 32690 - RNA, 13 nt, Artificial Sequence
  Description of Artificial Sequence: Synthetic oligonucleotide
aucaguuaugccg

SEQ ID NO: 32691 - RNA, 13 nt, Artificial Sequence
  Description of Artificial Sequence: Synthetic oligonucleotide
uaaaagaagucca

SEQ ID NO: 32692 - RNA, 11 nt, Artificial Sequence
  Description of Artificial Sequence: Synthetic oligonucleotide
aggugagguua

SEQ ID NO: 32693 - RNA, 11 nt, Artificial Sequence
  Description of Artificial Sequence: Synthetic oligonucleotide
gggaagaggac

SEQ ID NO: 32694 - RNA, 13 nt, Artificial Sequence
  Description of Artificial Sequence: Synthetic oligonucleotide
aagcaaguauugu

SEQ ID NO: 32695 - RNA, 12 nt, Artificial Sequence
  Description of Artificial Sequence: Synthetic oligonucleotide
auuguagcacuc

SEQ ID NO: 32696 - RNA, 14 nt, Artificial Sequence
  Description of Artificial Sequence: Synthetic oligonucleotide
acaaaaccacaaau

SEQ ID NO: 32697 - RNA, 12 nt, Artificial Sequence
  Description of Artificial Sequence: Synthetic oligonucleotide
uaagcccauaca

SEQ ID NO: 32698 - RNA, 11 nt, Artificial Sequence
  Description of Artificial Sequence: Synthetic oligonucleotide
agcccauacag

SEQ ID NO: 32699 - RNA, 12 nt, Artificial Sequence
  Description of Artificial Sequence: Synthetic oligonucleotide
cagaaaccuucc

SEQ ID NO: 32700 - RNA, 10 nt, Artificial Sequence
  Description of Artificial Sequence: Synthetic oligonucleotide
guauaccuac

SEQ ID NO: 32701 - RNA, 13 nt, Artificial Sequence
  Description of Artificial Sequence: Synthetic oligonucleotide
gccaguuuucgga

SEQ ID NO: 32702 - RNA, 9 nt, Artificial Sequence
  Description of Artificial Sequence: Synthetic oligonucleotide
ggaacaggg

SEQ ID NO: 32703 - RNA, 13 nt, Artificial Sequence
  Description of Artificial Sequence: Synthetic oligonucleotide
uuaacuuuccagu

SEQ ID NO: 32704 - RNA, 14 nt, Artificial Sequence
  Description of Artificial Sequence: Synthetic oligonucleotide
aaaguuugguuuug

SEQ ID NO: 32705 - RNA, 12 nt, Artificial Sequence
  Description of Artificial Sequence: Synthetic oligonucleotide
cuucccacugua

SEQ ID NO: 32706 - RNA, 13 nt, Artificial Sequence
  Description of Artificial Sequence: Synthetic oligonucleotide
ugauaccauauga

SEQ ID NO: 32707 - RNA, 11 nt, Artificial Sequence
  Description of Artificial Sequence: Synthetic oligonucleotide
aacaugggcug

SEQ ID NO: 32708 - RNA, 13 nt, Artificial Sequence
  Description of Artificial Sequence: Synthetic oligonucleotide
caacuuuuucaua

SEQ ID NO: 32709 - RNA, 12 nt, Artificial Sequence
  Description of Artificial Sequence: Synthetic oligonucleotide
caugaggccgga

SEQ ID NO: 32710 - RNA, 11 nt, Artificial Sequence
  Description of Artificial Sequence: Synthetic oligonucleotide
acugcauuugu

SEQ ID NO: 32711 - RNA, 13 nt, Artificial Sequence
  Description of Artificial Sequence: Synthetic oligonucleotide
aauguuuacuacc

SEQ ID NO: 32712 - RNA, 15 nt, Artificial Sequence
  Description of Artificial Sequence: Synthetic oligonucleotide
aauuuuuugaugaaa

SEQ ID NO: 32713 - RNA, 14 nt, Artificial Sequence
  Description of Artificial Sequence: Synthetic oligonucleotide
cagugugugaauuu

SEQ ID NO: 32714 - RNA, 13 nt, Artificial Sequence
  Description of Artificial Sequence: Synthetic oligonucleotide
gagcaauguaugu

SEQ ID NO: 32715 - RNA, 14 nt, Artificial Sequence
  Description of Artificial Sequence: Synthetic oligonucleotide
aaagcacauauaua

SEQ ID NO: 32716 - RNA, 14 nt, Artificial Sequence
  Description of Artificial Sequence: Synthetic oligonucleotide
guaauaguuucucc

SEQ ID NO: 32717 - RNA, 13 nt, Artificial Sequence
  Description of Artificial Sequence: Synthetic oligonucleotide
aguuucuccaaau

SEQ ID NO: 32718 - RNA, 13 nt, Artificial Sequence
  Description of Artificial Sequence: Synthetic oligonucleotide
uacuuccuagaaa

SEQ ID NO: 32719 - RNA, 13 nt, Artificial Sequence
  Description of Artificial Sequence: Synthetic oligonucleotide
uacaccauauaug

SEQ ID NO: 32720 - RNA, 14 nt, Artificial Sequence
  Description of Artificial Sequence: Synthetic oligonucleotide
auauaugaauggag

SEQ ID NO: 32721 - RNA, 13 nt, Artificial Sequence
  Description of Artificial Sequence: Synthetic oligonucleotide
acgagaagaagau

SEQ ID NO: 32722 - RNA, 13 nt, Artificial Sequence
  Description of Artificial Sequence: Synthetic oligonucleotide
ucauuuacaggga

SEQ ID NO: 32723 - RNA, 13 nt, Artificial Sequence
  Description of Artificial Sequence: Synthetic oligonucleotide
cauuuacagggac

SEQ ID NO: 32724 - RNA, 10 nt, Artificial Sequence
  Description of Artificial Sequence: Synthetic oligonucleotide
agggaccuga

SEQ ID NO: 32725 - RNA, 14 nt, Artificial Sequence
  Description of Artificial Sequence: Synthetic oligonucleotide
uguuugacugcauc

SEQ ID NO: 32726 - RNA, 13 nt, Artificial Sequence
  Description of Artificial Sequence: Synthetic oligonucleotide
uuugacugcaucg

SEQ ID NO: 32727 - RNA, 12 nt, Artificial Sequence
  Description of Artificial Sequence: Synthetic oligonucleotide
gaguucacaggg

SEQ ID NO: 32728 - RNA, 13 nt, Artificial Sequence
  Description of Artificial Sequence: Synthetic oligonucleotide
ggcaccucugucc

SEQ ID NO: 32729 - RNA, 15 nt, Artificial Sequence
  Description of Artificial Sequence: Synthetic oligonucleotide
gguuugucuuuuuaa

SEQ ID NO: 32730 - RNA, 14 nt, Artificial Sequence
  Description of Artificial Sequence: Synthetic oligonucleotide
uuugucuuuuuaag

SEQ ID NO: 32731 - RNA, 13 nt, Artificial Sequence
  Description of Artificial Sequence: Synthetic oligonucleotide
ccuaaagguuguc

SEQ ID NO: 32732 - RNA, 12 nt, Artificial Sequence
  Description of Artificial Sequence: Synthetic oligonucleotide
aagguugucgac

SEQ ID NO: 32733 - RNA, 13 nt, Artificial Sequence
  Description of Artificial Sequence: Synthetic oligonucleotide
accuggcaauugu

SEQ ID NO: 32734 - RNA, 12 nt, Artificial Sequence
  Description of Artificial Sequence: Synthetic oligonucleotide
aguggugcgagg

SEQ ID NO: 32735 - RNA, 13 nt, Artificial Sequence
  Description of Artificial Sequence: Synthetic oligonucleotide
agagacaugaaau

SEQ ID NO: 32736 - RNA, 13 nt, Artificial Sequence
  Description of Artificial Sequence: Synthetic oligonucleotide
auauauuucucca

SEQ ID NO: 32737 - RNA, 10 nt, Artificial Sequence
  Description of Artificial Sequence: Synthetic oligonucleotide
caugaaggcu

SEQ ID NO: 32738 - RNA, 11 nt, Artificial Sequence
  Description of Artificial Sequence: Synthetic oligonucleotide
gcuggaguggu

SEQ ID NO: 32739 - RNA, 11 nt, Artificial Sequence
  Description of Artificial Sequence: Synthetic oligonucleotide
aggaagagagg

SEQ ID NO: 32740 - RNA, 12 nt, Artificial Sequence
  Description of Artificial Sequence: Synthetic oligonucleotide
cuugcaucgggc

SEQ ID NO: 32741 - RNA, 13 nt, Artificial Sequence
  Description of Artificial Sequence: Synthetic oligonucleotide
auauccuacugug

SEQ ID NO: 32742 - RNA, 13 nt, Artificial Sequence
  Description of Artificial Sequence: Synthetic oligonucleotide
uccuacuguguaa

SEQ ID NO: 32743 - RNA, 12 nt, Artificial Sequence
  Description of Artificial Sequence: Synthetic oligonucleotide
ccuuguagugua

SEQ ID NO: 32744 - RNA, 13 nt, Artificial Sequence
  Description of Artificial Sequence: Synthetic oligonucleotide
ucuuuguugauug

SEQ ID NO: 32745 - RNA, 14 nt, Artificial Sequence
  Description of Artificial Sequence: Synthetic oligonucleotide
uuuguugauugaaa

SEQ ID NO: 32746 - RNA, 15 nt, Artificial Sequence
  Description of Artificial Sequence: Synthetic oligonucleotide
uucuuuuucuuccau

SEQ ID NO: 32747 - RNA, 13 nt, Artificial Sequence
  Description of Artificial Sequence: Synthetic oligonucleotide
aaucuuccuucua

SEQ ID NO: 32748 - RNA, 13 nt, Artificial Sequence
  Description of Artificial Sequence: Synthetic oligonucleotide
uugaaugcuucau

SEQ ID NO: 32749 - RNA, 13 nt, Artificial Sequence
  Description of Artificial Sequence: Synthetic oligonucleotide
ugaaugcuucaug

SEQ ID NO: 32750 - RNA, 13 nt, Artificial Sequence
  Description of Artificial Sequence: Synthetic oligonucleotide
aauucuacuuuga

SEQ ID NO: 32751 - RNA, 13 nt, Artificial Sequence
  Description of Artificial Sequence: Synthetic oligonucleotide
agcaacuacagac

SEQ ID NO: 32752 - RNA, 13 nt, Artificial Sequence
  Description of Artificial Sequence: Synthetic oligonucleotide
gaccaaggucaac

SEQ ID NO: 32753 - RNA, 13 nt, Artificial Sequence
  Description of Artificial Sequence: Synthetic oligonucleotide
cgacuaucucgac

SEQ ID NO: 32754 - RNA, 13 nt, Artificial Sequence
  Description of Artificial Sequence: Synthetic oligonucleotide
aaccuucccaaac

SEQ ID NO: 32755 - RNA, 14 nt, Artificial Sequence
  Description of Artificial Sequence: Synthetic oligonucleotide
ccaagcuuagaacu

SEQ ID NO: 32756 - RNA, 15 nt, Artificial Sequence
  Description of Artificial Sequence: Synthetic oligonucleotide
agcuuagaacuuuaa

SEQ ID NO: 32757 - RNA, 11 nt, Artificial Sequence
  Description of Artificial Sequence: Synthetic oligonucleotide
aagaccaccac

SEQ ID NO: 32758 - RNA, 14 nt, Artificial Sequence
  Description of Artificial Sequence: Synthetic oligonucleotide
gcgagaaauaaagu

SEQ ID NO: 32759 - RNA, 14 nt, Artificial Sequence
  Description of Artificial Sequence: Synthetic oligonucleotide
cgagaaauaaaguu

SEQ ID NO: 32760 - RNA, 12 nt, Artificial Sequence
  Description of Artificial Sequence: Synthetic oligonucleotide
aggaaaugaucc

SEQ ID NO: 32761 - RNA, 13 nt, Artificial Sequence
  Description of Artificial Sequence: Synthetic oligonucleotide
gaagaaaugaaac

SEQ ID NO: 32762 - RNA, 13 nt, Artificial Sequence
  Description of Artificial Sequence: Synthetic oligonucleotide
guuuccauccucc

SEQ ID NO: 32763 - RNA, 15 nt, Artificial Sequence
  Description of Artificial Sequence: Synthetic oligonucleotide
acugaaaaucuuuga

SEQ ID NO: 32764 - RNA, 11 nt, Artificial Sequence
  Description of Artificial Sequence: Synthetic oligonucleotide
ugccguucagg

SEQ ID NO: 32765 - RNA, 13 nt, Artificial Sequence
  Description of Artificial Sequence: Synthetic oligonucleotide
caggguccagaag

SEQ ID NO: 32766 - RNA, 13 nt, Artificial Sequence
  Description of Artificial Sequence: Synthetic oligonucleotide
ucaagacugcuug

SEQ ID NO: 32767 - RNA, 13 nt, Artificial Sequence
  Description of Artificial Sequence: Synthetic oligonucleotide
uccaugucuuugg

SEQ ID NO: 32768 - RNA, 11 nt, Artificial Sequence
  Description of Artificial Sequence: Synthetic oligonucleotide
gccugaaacac

SEQ ID NO: 32769 - RNA, 12 nt, Artificial Sequence
  Description of Artificial Sequence: Synthetic oligonucleotide
ucucuguaccuc

SEQ ID NO: 32770 - RNA, 12 nt, Artificial Sequence
  Description of Artificial Sequence: Synthetic oligonucleotide
agcaagacaaga

SEQ ID NO: 32771 - RNA, 13 nt, Artificial Sequence
  Description of Artificial Sequence: Synthetic oligonucleotide
gcaagacaagaaa

SEQ ID NO: 32772 - RNA, 12 nt, Artificial Sequence
  Description of Artificial Sequence: Synthetic oligonucleotide
uguacaagaucc

SEQ ID NO: 32773 - RNA, 12 nt, Artificial Sequence
  Description of Artificial Sequence: Synthetic oligonucleotide
cguacuugcaga

SEQ ID NO: 32774 - RNA, 13 nt, Artificial Sequence
  Description of Artificial Sequence: Synthetic oligonucleotide
cgaucgauacaga

SEQ ID NO: 32775 - RNA, 13 nt, Artificial Sequence
  Description of Artificial Sequence: Synthetic oligonucleotide
uauaaaaauaaau

SEQ ID NO: 32776 - RNA, 13 nt, Artificial Sequence
  Description of Artificial Sequence: Synthetic oligonucleotide
uaaaaauaaauau

SEQ ID NO: 32777 - RNA, 13 nt, Artificial Sequence
  Description of Artificial Sequence: Synthetic oligonucleotide
uuugacugcugug

SEQ ID NO: 32778 - RNA, 13 nt, Artificial Sequence
  Description of Artificial Sequence: Synthetic oligonucleotide
ggagaugagagac

SEQ ID NO: 32779 - RNA, 10 nt, Artificial Sequence
  Description of Artificial Sequence: Synthetic oligonucleotide
ucccacuugg

SEQ ID NO: 32780 - RNA, 10 nt, Artificial Sequence
  Description of Artificial Sequence: Synthetic oligonucleotide
guucacggcc

SEQ ID NO: 32781 - RNA, 12 nt, Artificial Sequence
  Description of Artificial Sequence: Synthetic oligonucleotide
accaucacacca

SEQ ID NO: 32782 - RNA, 10 nt, Artificial Sequence
  Description of Artificial Sequence: Synthetic oligonucleotide
cugcggguuu

SEQ ID NO: 32783 - RNA, 9 nt, Artificial Sequence
  Description of Artificial Sequence: Synthetic oligonucleotide
uccaguuug

SEQ ID NO: 32784 - RNA, 12 nt, Artificial Sequence
  Description of Artificial Sequence: Synthetic oligonucleotide
uuaaggacuucu

SEQ ID NO: 32785 - RNA, 12 nt, Artificial Sequence
  Description of Artificial Sequence: Synthetic oligonucleotide
agugggacagag

SEQ ID NO: 32786 - RNA, 13 nt, Artificial Sequence
  Description of Artificial Sequence: Synthetic oligonucleotide
auuuguuauugug

SEQ ID NO: 32787 - RNA, 12 nt, Artificial Sequence
  Description of Artificial Sequence: Synthetic oligonucleotide
ucaaaugcauuu

SEQ ID NO: 32788 - RNA, 9 nt, Artificial Sequence
  Description of Artificial Sequence: Synthetic oligonucleotide
aggaaagcc

SEQ ID NO: 32789 - RNA, 10 nt, Artificial Sequence
  Description of Artificial Sequence: Synthetic oligonucleotide
ggaaagcccu

SEQ ID NO: 32790 - RNA, 11 nt, Artificial Sequence
  Description of Artificial Sequence: Synthetic oligonucleotide
ccagcauggcc

SEQ ID NO: 32791 - RNA, 10 nt, Artificial Sequence
  Description of Artificial Sequence: Synthetic oligonucleotide
uucucccuga

SEQ ID NO: 32792 - RNA, 11 nt, Artificial Sequence
  Description of Artificial Sequence: Synthetic oligonucleotide
aagaagcccuu

SEQ ID NO: 32793 - RNA, 11 nt, Artificial Sequence
  Description of Artificial Sequence: Synthetic oligonucleotide
gaagcccuuca

SEQ ID NO: 32794 - RNA, 10 nt, Artificial Sequence
  Description of Artificial Sequence: Synthetic oligonucleotide
cccuucagcg

SEQ ID NO: 32795 - RNA, 10 nt, Artificial Sequence
  Description of Artificial Sequence: Synthetic oligonucleotide
cuucagcggc

SEQ ID NO: 32796 - RNA, 11 nt, Artificial Sequence
  Description of Artificial Sequence: Synthetic oligonucleotide
cagcggccagu

SEQ ID NO: 32797 - RNA, 11 nt, Artificial Sequence
  Description of Artificial Sequence: Synthetic oligonucleotide
gaaaagcuccg

SEQ ID NO: 32798 - RNA, 10 nt, Artificial Sequence
  Description of Artificial Sequence: Synthetic oligonucleotide
aaagcuccgg

SEQ ID NO: 32799 - RNA, 12 nt, Artificial Sequence
  Description of Artificial Sequence: Synthetic oligonucleotide
gucaacagucug

SEQ ID NO: 32800 - RNA, 12 nt, Artificial Sequence
  Description of Artificial Sequence: Synthetic oligonucleotide
agaguucaaaag

SEQ ID NO: 32801 - RNA, 12 nt, Artificial Sequence
  Description of Artificial Sequence: Synthetic oligonucleotide
gaguucaaaagc

SEQ ID NO: 32802 - RNA, 11 nt, Artificial Sequence
  Description of Artificial Sequence: Synthetic oligonucleotide
ucaaaagcccu

SEQ ID NO: 32803 - RNA, 11 nt, Artificial Sequence
  Description of Artificial Sequence: Synthetic oligonucleotide
caaaagcccuu

SEQ ID NO: 32804 - RNA, 11 nt, Artificial Sequence
  Description of Artificial Sequence: Synthetic oligonucleotide
aaagcccuuca

SEQ ID NO: 32805 - RNA, 11 nt, Artificial Sequence
  Description of Artificial Sequence: Synthetic oligonucleotide
aagcccuucag

SEQ ID NO: 32806 - RNA, 12 nt, Artificial Sequence
  Description of Artificial Sequence: Synthetic oligonucleotide
ugaagccgcucg

SEQ ID NO: 32807 - RNA, 11 nt, Artificial Sequence
  Description of Artificial Sequence: Synthetic oligonucleotide
acgccagucaa

SEQ ID NO: 32808 - RNA, 12 nt, Artificial Sequence
  Description of Artificial Sequence: Synthetic oligonucleotide
ucuuggugcgug

SEQ ID NO: 32809 - RNA, 13 nt, Artificial Sequence
  Description of Artificial Sequence: Synthetic oligonucleotide
uuggauucaucag

SEQ ID NO: 32810 - RNA, 12 nt, Artificial Sequence
  Description of Artificial Sequence: Synthetic oligonucleotide
ggaauaccuaag

SEQ ID NO: 32811 - RNA, 11 nt, Artificial Sequence
  Description of Artificial Sequence: Synthetic oligonucleotide
uuugaggcuca

SEQ ID NO: 32812 - RNA, 10 nt, Artificial Sequence
  Description of Artificial Sequence: Synthetic oligonucleotide
cuacaauugg

SEQ ID NO: 32813 - RNA, 11 nt, Artificial Sequence
  Description of Artificial Sequence: Synthetic oligonucleotide
aguuaggagcc

SEQ ID NO: 32814 - RNA, 12 nt, Artificial Sequence
  Description of Artificial Sequence: Synthetic oligonucleotide
gucaauauccac

SEQ ID NO: 32815 - RNA, 12 nt, Artificial Sequence
  Description of Artificial Sequence: Synthetic oligonucleotide
uguucagucaca

SEQ ID NO: 32816 - RNA, 11 nt, Artificial Sequence
  Description of Artificial Sequence: Synthetic oligonucleotide
cacacacauac

SEQ ID NO: 32817 - RNA, 11 nt, Artificial Sequence
  Description of Artificial Sequence: Synthetic oligonucleotide
uccuuuugcuu

SEQ ID NO: 32818 - RNA, 15 nt, Artificial Sequence
  Description of Artificial Sequence: Synthetic oligonucleotide
uuuaaaguaauuuuu

SEQ ID NO: 32819 - RNA, 12 nt, Artificial Sequence
  Description of Artificial Sequence: Synthetic oligonucleotide
aacagucaaugg

SEQ ID NO: 32820 - RNA, 12 nt, Artificial Sequence
  Description of Artificial Sequence: Synthetic oligonucleotide
cgacaaaccaau

SEQ ID NO: 32821 - RNA, 11 nt, Artificial Sequence
  Description of Artificial Sequence: Synthetic oligonucleotide
cugcuaccacu

SEQ ID NO: 32822 - RNA, 12 nt, Artificial Sequence
  Description of Artificial Sequence: Synthetic oligonucleotide
caagcggucuua

SEQ ID NO: 32823 - RNA, 12 nt, Artificial Sequence
  Description of Artificial Sequence: Synthetic oligonucleotide
gucuuaccggcu

SEQ ID NO: 32824 - RNA, 10 nt, Artificial Sequence
  Description of Artificial Sequence: Synthetic oligonucleotide
auggguuacc

SEQ ID NO: 32825 - RNA, 10 nt, Artificial Sequence
  Description of Artificial Sequence: Synthetic oligonucleotide
uuaccugcga

SEQ ID NO: 32826 - RNA, 11 nt, Artificial Sequence
  Description of Artificial Sequence: Synthetic oligonucleotide
aucuugcugag

SEQ ID NO: 32827 - RNA, 12 nt, Artificial Sequence
  Description of Artificial Sequence: Synthetic oligonucleotide
gcauaaaacagu

SEQ ID NO: 32828 - RNA, 11 nt, Artificial Sequence
  Description of Artificial Sequence: Synthetic oligonucleotide
uccuuuauccu

SEQ ID NO: 32829 - RNA, 11 nt, Artificial Sequence
  Description of Artificial Sequence: Synthetic oligonucleotide
aacgcaaguug

SEQ ID NO: 32830 - RNA, 12 nt, Artificial Sequence
  Description of Artificial Sequence: Synthetic oligonucleotide
aacugaaaccau

SEQ ID NO: 32831 - RNA, 13 nt, Artificial Sequence
  Description of Artificial Sequence: Synthetic oligonucleotide
cuuuguuaaauau

SEQ ID NO: 32832 - RNA, 13 nt, Artificial Sequence
  Description of Artificial Sequence: Synthetic oligonucleotide
uauauuaaaaguu

SEQ ID NO: 32833 - RNA, 12 nt, Artificial Sequence
  Description of Artificial Sequence: Synthetic oligonucleotide
uuuugacuuaac

SEQ ID NO: 32834 - RNA, 12 nt, Artificial Sequence
  Description of Artificial Sequence: Synthetic oligonucleotide
caaacucagcac

SEQ ID NO: 32835 - RNA, 10 nt, Artificial Sequence
  Description of Artificial Sequence: Synthetic oligonucleotide
gcugaccuca

SEQ ID NO: 32836 - RNA, 13 nt, Artificial Sequence
  Description of Artificial Sequence: Synthetic oligonucleotide
uuauucagaucgc

SEQ ID NO: 32837 - RNA, 12 nt, Artificial Sequence
  Description of Artificial Sequence: Synthetic oligonucleotide
ggguucugggau

SEQ ID NO: 32838 - RNA, 14 nt, Artificial Sequence
  Description of Artificial Sequence: Synthetic oligonucleotide
uauuggaaauuaug

SEQ ID NO: 32839 - RNA, 12 nt, Artificial Sequence
  Description of Artificial Sequence: Synthetic oligonucleotide
uggaagcacuag

SEQ ID NO: 32840 - RNA, 12 nt, Artificial Sequence
  Description of Artificial Sequence: Synthetic oligonucleotide
uuuuuaugugga

SEQ ID NO: 32841 - RNA, 11 nt, Artificial Sequence
  Description of Artificial Sequence: Synthetic oligonucleotide
gaauugguaga

SEQ ID NO: 32842 - RNA, 12 nt, Artificial Sequence
  Description of Artificial Sequence: Synthetic oligonucleotide
uagacuuggaga

SEQ ID NO: 32843 - RNA, 12 nt, Artificial Sequence
  Description of Artificial Sequence: Synthetic oligonucleotide
uacaguauucca

SEQ ID NO: 32844 - RNA, 14 nt, Artificial Sequence
  Description of Artificial Sequence: Synthetic oligonucleotide
cacugaugaauuaa

SEQ ID NO: 32845 - RNA, 11 nt, Artificial Sequence
  Description of Artificial Sequence: Synthetic oligonucleotide
cacaucaucac

SEQ ID NO: 32846 - RNA, 12 nt, Artificial Sequence
  Description of Artificial Sequence: Synthetic oligonucleotide
ucaccaaacaga

SEQ ID NO: 32847 - RNA, 11 nt, Artificial Sequence
  Description of Artificial Sequence: Synthetic oligonucleotide
gaacaugaugg

SEQ ID NO: 32848 - RNA, 11 nt, Artificial Sequence
  Description of Artificial Sequence: Synthetic oligonucleotide
auguagacugc

SEQ ID NO: 32849 - RNA, 12 nt, Artificial Sequence
  Description of Artificial Sequence: Synthetic oligonucleotide
gaucuauuuaug

SEQ ID NO: 32850 - RNA, 11 nt, Artificial Sequence
  Description of Artificial Sequence: Synthetic oligonucleotide
cacuauuauca

SEQ ID NO: 32851 - RNA, 10 nt, Artificial Sequence
  Description of Artificial Sequence: Synthetic oligonucleotide
ucaguucugc

SEQ ID NO: 32852 - RNA, 12 nt, Artificial Sequence
  Description of Artificial Sequence: Synthetic oligonucleotide
gauuaaaccuac

SEQ ID NO: 32853 - RNA, 12 nt, Artificial Sequence
  Description of Artificial Sequence: Synthetic oligonucleotide
uaaaauccuucu

SEQ ID NO: 32854 - RNA, 11 nt, Artificial Sequence
  Description of Artificial Sequence: Synthetic oligonucleotide
augcuguagac

SEQ ID NO: 32855 - RNA, 12 nt, Artificial Sequence
  Description of Artificial Sequence: Synthetic oligonucleotide
ugauaggaauag

SEQ ID NO: 32856 - RNA, 10 nt, Artificial Sequence
  Description of Artificial Sequence: Synthetic oligonucleotide
auggcccuga

SEQ ID NO: 32857 - RNA, 10 nt, Artificial Sequence
  Description of Artificial Sequence: Synthetic oligonucleotide
uccucaagca

SEQ ID NO: 32858 - RNA, 9 nt, Artificial Sequence
  Description of Artificial Sequence: Synthetic oligonucleotide
uucagccca

SEQ ID NO: 32859 - RNA, 10 nt, Artificial Sequence
  Description of Artificial Sequence: Synthetic oligonucleotide
cugcugaacc

SEQ ID NO: 32860 - RNA, 11 nt, Artificial Sequence
  Description of Artificial Sequence: Synthetic oligonucleotide
aguucucuuca

SEQ ID NO: 32861 - RNA, 10 nt, Artificial Sequence
  Description of Artificial Sequence: Synthetic oligonucleotide
cagccuagag

SEQ ID NO: 32862 - RNA, 12 nt, Artificial Sequence
  Description of Artificial Sequence: Synthetic oligonucleotide
ucugugaagugu

SEQ ID NO: 32863 - RNA, 13 nt, Artificial Sequence
  Description of Artificial Sequence: Synthetic oligonucleotide
gagaaaauuucaa

SEQ ID NO: 32864 - RNA, 10 nt, Artificial Sequence
  Description of Artificial Sequence: Synthetic oligonucleotide
auccuccuga

SEQ ID NO: 32865 - RNA, 11 nt, Artificial Sequence
  Description of Artificial Sequence: Synthetic oligonucleotide
ugacaucauau

SEQ ID NO: 32866 - RNA, 12 nt, Artificial Sequence
  Description of Artificial Sequence: Synthetic oligonucleotide
aucuucaucaua

SEQ ID NO: 32867 - RNA, 12 nt, Artificial Sequence
  Description of Artificial Sequence: Synthetic oligonucleotide
acuagcuauuaa

SEQ ID NO: 32868 - RNA, 13 nt, Artificial Sequence
  Description of Artificial Sequence: Synthetic oligonucleotide
cucuacuaaaaau

SEQ ID NO: 32869 - RNA, 11 nt, Artificial Sequence
  Description of Artificial Sequence: Synthetic oligonucleotide
cuaucucgccu

SEQ ID NO: 32870 - RNA, 12 nt, Artificial Sequence
  Description of Artificial Sequence: Synthetic oligonucleotide
uucgguccaguu

SEQ ID NO: 32871 - RNA, 10 nt, Artificial Sequence
  Description of Artificial Sequence: Synthetic oligonucleotide
auguagccgc

SEQ ID NO: 32872 - RNA, 11 nt, Artificial Sequence
  Description of Artificial Sequence: Synthetic oligonucleotide
gaggagacuug

SEQ ID NO: 32873 - RNA, 11 nt, Artificial Sequence
  Description of Artificial Sequence: Synthetic oligonucleotide
aguagugagga

SEQ ID NO: 32874 - RNA, 13 nt, Artificial Sequence
  Description of Artificial Sequence: Synthetic oligonucleotide
agaugaguacaaa

SEQ ID NO: 32875 - RNA, 12 nt, Artificial Sequence
  Description of Artificial Sequence: Synthetic oligonucleotide
uuguuaaugggc

SEQ ID NO: 32876 - RNA, 12 nt, Artificial Sequence
  Description of Artificial Sequence: Synthetic oligonucleotide
uuuuaauuuauu

SEQ ID NO: 32877 - RNA, 11 nt, Artificial Sequence
  Description of Artificial Sequence: Synthetic oligonucleotide
auuuaaauaug

SEQ ID NO: 32878 - RNA, 12 nt, Artificial Sequence
  Description of Artificial Sequence: Synthetic oligonucleotide
auccuuuguuuc

SEQ ID NO: 32879 - RNA, 13 nt, Artificial Sequence
  Description of Artificial Sequence: Synthetic oligonucleotide
gucuaaguguuug

SEQ ID NO: 32880 - RNA, 11 nt, Artificial Sequence
  Description of Artificial Sequence: Synthetic oligonucleotide
ccugugacaaa

SEQ ID NO: 32881 - RNA, 12 nt, Artificial Sequence
  Description of Artificial Sequence: Synthetic oligonucleotide
caggcugaauua

SEQ ID NO: 32882 - RNA, 13 nt, Artificial Sequence
  Description of Artificial Sequence: Synthetic oligonucleotide
ucauucuuacaau

SEQ ID NO: 32883 - RNA, 14 nt, Artificial Sequence
  Description of Artificial Sequence: Synthetic oligonucleotide
cauucuuacaauug

SEQ ID NO: 32884 - RNA, 11 nt, Artificial Sequence
  Description of Artificial Sequence: Synthetic oligonucleotide
agagaguguac

SEQ ID NO: 32885 - RNA, 11 nt, Artificial Sequence
  Description of Artificial Sequence: Synthetic oligonucleotide
gaacucagcag

SEQ ID NO: 32886 - RNA, 12 nt, Artificial Sequence
  Description of Artificial Sequence: Synthetic oligonucleotide
uuauuuucagua

SEQ ID NO: 32887 - RNA, 11 nt, Artificial Sequence
  Description of Artificial Sequence: Synthetic oligonucleotide
cuuaaauggaa

SEQ ID NO: 32888 - RNA, 12 nt, Artificial Sequence
  Description of Artificial Sequence: Synthetic oligonucleotide
gccuaaaauugu

SEQ ID NO: 32889 - RNA, 12 nt, Artificial Sequence
  Description of Artificial Sequence: Synthetic oligonucleotide
acuaacaucugg

SEQ ID NO: 32890 - RNA, 11 nt, Artificial Sequence
  Description of Artificial Sequence: Synthetic oligonucleotide
gacugugagcu

SEQ ID NO: 32891 - RNA, 13 nt, Artificial Sequence
  Description of Artificial Sequence: Synthetic oligonucleotide
gcuuuuuauuaau

SEQ ID NO: 32892 - RNA, 12 nt, Artificial Sequence
  Description of Artificial Sequence: Synthetic oligonucleotide
ucuucuuacauu

SEQ ID NO: 32893 - RNA, 14 nt, Artificial Sequence
  Description of Artificial Sequence: Synthetic oligonucleotide
auuuguaaaaaugu

SEQ ID NO: 32894 - RNA, 14 nt, Artificial Sequence
  Description of Artificial Sequence: Synthetic oligonucleotide
ucuuaauucauauu

SEQ ID NO: 32895 - RNA, 12 nt, Artificial Sequence
  Description of Artificial Sequence: Synthetic oligonucleotide
aacuaaucauga

SEQ ID NO: 32896 - RNA, 11 nt, Artificial Sequence
  Description of Artificial Sequence: Synthetic oligonucleotide
cugcucuuggg

SEQ ID NO: 32897 - RNA, 12 nt, Artificial Sequence
  Description of Artificial Sequence: Synthetic oligonucleotide
aguagcuuugag

SEQ ID NO: 32898 - RNA, 13 nt, Artificial Sequence
  Description of Artificial Sequence: Synthetic oligonucleotide
acguaauauuuca

SEQ ID NO: 32899 - RNA, 12 nt, Artificial Sequence
  Description of Artificial Sequence: Synthetic oligonucleotide
auucucuucacu

SEQ ID NO: 32900 - RNA, 13 nt, Artificial Sequence
  Description of Artificial Sequence: Synthetic oligonucleotide
uaaugcuaagaaa

SEQ ID NO: 32901 - RNA, 11 nt, Artificial Sequence
  Description of Artificial Sequence: Synthetic oligonucleotide
cugaaaaucaa

SEQ ID NO: 32902 - RNA, 13 nt, Artificial Sequence
  Description of Artificial Sequence: Synthetic oligonucleotide
auaugauuacuuu

SEQ ID NO: 32903 - RNA, 13 nt, Artificial Sequence
  Description of Artificial Sequence: Synthetic oligonucleotide
auuuuguucuaca

SEQ ID NO: 32904 - RNA, 11 nt, Artificial Sequence
  Description of Artificial Sequence: Synthetic oligonucleotide
ccgggacucuc

SEQ ID NO: 32905 - RNA, 13 nt, Artificial Sequence
  Description of Artificial Sequence: Synthetic oligonucleotide
cuuuaaaguaaag

SEQ ID NO: 32906 - RNA, 12 nt, Artificial Sequence
  Description of Artificial Sequence: Synthetic oligonucleotide
cuggaagccugg

SEQ ID NO: 32907 - RNA, 13 nt, Artificial Sequence
  Description of Artificial Sequence: Synthetic oligonucleotide
aaacaaaagagag

SEQ ID NO: 32908 - RNA, 12 nt, Artificial Sequence
  Description of Artificial Sequence: Synthetic oligonucleotide
ucaguuaugccg

SEQ ID NO: 32909 - RNA, 12 nt, Artificial Sequence
  Description of Artificial Sequence: Synthetic oligonucleotide
aaaagaagucca

SEQ ID NO: 32910 - RNA, 10 nt, Artificial Sequence
  Description of Artificial Sequence: Synthetic oligonucleotide
ggugagguua

SEQ ID NO: 32911 - RNA, 10 nt, Artificial Sequence
  Description of Artificial Sequence: Synthetic oligonucleotide
ggaagaggac

SEQ ID NO: 32912 - RNA, 12 nt, Artificial Sequence
  Description of Artificial Sequence: Synthetic oligonucleotide
agcaaguauugu

SEQ ID NO: 32913 - RNA, 11 nt, Artificial Sequence
  Description of Artificial Sequence: Synthetic oligonucleotide
uuguagcacuc

SEQ ID NO: 32914 - RNA, 13 nt, Artificial Sequence
  Description of Artificial Sequence: Synthetic oligonucleotide
caaaaccacaaau

SEQ ID NO: 32915 - RNA, 11 nt, Artificial Sequence
  Description of Artificial Sequence: Synthetic oligonucleotide
aagcccauaca

SEQ ID NO: 32916 - RNA, 10 nt, Artificial Sequence
  Description of Artificial Sequence: Synthetic oligonucleotide
gcccauacag

SEQ ID NO: 32917 - RNA, 11 nt, Artificial Sequence
  Description of Artificial Sequence: Synthetic oligonucleotide
agaaaccuucc

SEQ ID NO: 32918 - RNA, 9 nt, Artificial Sequence
  Description of Artificial Sequence: Synthetic oligonucleotide
uauaccuac

SEQ ID NO: 32919 - RNA, 12 nt, Artificial Sequence
  Description of Artificial Sequence: Synthetic oligonucleotide
ccaguuuucgga

SEQ ID NO: 32920 - RNA, 8 nt, Artificial Sequence
  Description of Artificial Sequence: Synthetic oligonucleotide
gaacaggg

SEQ ID NO: 32921 - RNA, 12 nt, Artificial Sequence
  Description of Artificial Sequence: Synthetic oligonucleotide
uaacuuuccagu

SEQ ID NO: 32922 - RNA, 13 nt, Artificial Sequence
  Description of Artificial Sequence: Synthetic oligonucleotide
aaguuugguuuug

SEQ ID NO: 32923 - RNA, 11 nt, Artificial Sequence
  Description of Artificial Sequence: Synthetic oligonucleotide
uucccacugua

SEQ ID NO: 32924 - RNA, 12 nt, Artificial Sequence
  Description of Artificial Sequence: Synthetic oligonucleotide
gauaccauauga

SEQ ID NO: 32925 - RNA, 10 nt, Artificial Sequence
  Description of Artificial Sequence: Synthetic oligonucleotide
acaugggcug

SEQ ID NO: 32926 - RNA, 12 nt, Artificial Sequence
  Description of Artificial Sequence: Synthetic oligonucleotide
aacuuuuucaua

SEQ ID NO: 32927 - RNA, 11 nt, Artificial Sequence
  Description of Artificial Sequence: Synthetic oligonucleotide
augaggccgga

SEQ ID NO: 32928 - RNA, 10 nt, Artificial Sequence
  Description of Artificial Sequence: Synthetic oligonucleotide
cugcauuugu

SEQ ID NO: 32929 - RNA, 12 nt, Artificial Sequence
  Description of Artificial Sequence: Synthetic oligonucleotide
auguuuacuacc

SEQ ID NO: 32930 - RNA, 14 nt, Artificial Sequence
  Description of Artificial Sequence: Synthetic oligonucleotide
auuuuuugaugaaa

SEQ ID NO: 32931 - RNA, 13 nt, Artificial Sequence
  Description of Artificial Sequence: Synthetic oligonucleotide
agugugugaauuu

SEQ ID NO: 32932 - RNA, 12 nt, Artificial Sequence
  Description of Artificial Sequence: Synthetic oligonucleotide
agcaauguaugu

SEQ ID NO: 32933 - RNA, 13 nt, Artificial Sequence
  Description of Artificial Sequence: Synthetic oligonucleotide
aagcacauauaua

SEQ ID NO: 32934 - RNA, 13 nt, Artificial Sequence
  Description of Artificial Sequence: Synthetic oligonucleotide
uaauaguuucucc

SEQ ID NO: 32935 - RNA, 12 nt, Artificial Sequence
  Description of Artificial Sequence: Synthetic oligonucleotide
guuucuccaaau

SEQ ID NO: 32936 - RNA, 12 nt, Artificial Sequence
  Description of Artificial Sequence: Synthetic oligonucleotide
acuuccuagaaa

SEQ ID NO: 32937 - RNA, 12 nt, Artificial Sequence
  Description of Artificial Sequence: Synthetic oligonucleotide
acaccauauaug

SEQ ID NO: 32938 - RNA, 13 nt, Artificial Sequence
  Description of Artificial Sequence: Synthetic oligonucleotide
uauaugaauggag

SEQ ID NO: 32939 - RNA, 12 nt, Artificial Sequence
  Description of Artificial Sequence: Synthetic oligonucleotide
cauuuacaggga

SEQ ID NO: 32940 - RNA, 12 nt, Artificial Sequence
  Description of Artificial Sequence: Synthetic oligonucleotide
auuuacagggac

SEQ ID NO: 32941 - RNA, 9 nt, Artificial Sequence
  Description of Artificial Sequence: Synthetic oligonucleotide
gggaccuga

SEQ ID NO: 32942 - RNA, 13 nt, Artificial Sequence
  Description of Artificial Sequence: Synthetic oligonucleotide
guuugacugcauc

SEQ ID NO: 32943 - RNA, 12 nt, Artificial Sequence
  Description of Artificial Sequence: Synthetic oligonucleotide
uugacugcaucg

SEQ ID NO: 32944 - RNA, 11 nt, Artificial Sequence
  Description of Artificial Sequence: Synthetic oligonucleotide
aguucacaggg

SEQ ID NO: 32945 - RNA, 12 nt, Artificial Sequence
  Description of Artificial Sequence: Synthetic oligonucleotide
gcaccucugucc

SEQ ID NO: 32946 - RNA, 14 nt, Artificial Sequence
  Description of Artificial Sequence: Synthetic oligonucleotide
guuugucuuuuuaa

SEQ ID NO: 32947 - RNA, 13 nt, Artificial Sequence
  Description of Artificial Sequence: Synthetic oligonucleotide
uugucuuuuuaag

SEQ ID NO: 32948 - RNA, 12 nt, Artificial Sequence
  Description of Artificial Sequence: Synthetic oligonucleotide
cuaaagguuguc

SEQ ID NO: 32949 - RNA, 11 nt, Artificial Sequence
  Description of Artificial Sequence: Synthetic oligonucleotide
agguugucgac

SEQ ID NO: 32950 - RNA, 12 nt, Artificial Sequence
  Description of Artificial Sequence: Synthetic oligonucleotide
ccuggcaauugu

SEQ ID NO: 32951 - RNA, 11 nt, Artificial Sequence
  Description of Artificial Sequence: Synthetic oligonucleotide
guggugcgagg

SEQ ID NO: 32952 - RNA, 12 nt, Artificial Sequence
  Description of Artificial Sequence: Synthetic oligonucleotide
gagacaugaaau

SEQ ID NO: 32953 - RNA, 12 nt, Artificial Sequence
  Description of Artificial Sequence: Synthetic oligonucleotide
uauauuucucca

SEQ ID NO: 32954 - RNA, 9 nt, Artificial Sequence
  Description of Artificial Sequence: Synthetic oligonucleotide
augaaggcu

SEQ ID NO: 32955 - RNA, 10 nt, Artificial Sequence
  Description of Artificial Sequence: Synthetic oligonucleotide
cuggaguggu

SEQ ID NO: 32956 - RNA, 10 nt, Artificial Sequence
  Description of Artificial Sequence: Synthetic oligonucleotide
ggaagagagg

SEQ ID NO: 32957 - RNA, 11 nt, Artificial Sequence
  Description of Artificial Sequence: Synthetic oligonucleotide
uugcaucgggc

SEQ ID NO: 32958 - RNA, 12 nt, Artificial Sequence
  Description of Artificial Sequence: Synthetic oligonucleotide
uauccuacugug

SEQ ID NO: 32959 - RNA, 12 nt, Artificial Sequence
  Description of Artificial Sequence: Synthetic oligonucleotide
ccuacuguguaa

SEQ ID NO: 32960 - RNA, 11 nt, Artificial Sequence
  Description of Artificial Sequence: Synthetic oligonucleotide
cuuguagugua

SEQ ID NO: 32961 - RNA, 12 nt, Artificial Sequence
  Description of Artificial Sequence: Synthetic oligonucleotide
cuuuguugauug

SEQ ID NO: 32962 - RNA, 13 nt, Artificial Sequence
  Description of Artificial Sequence: Synthetic oligonucleotide
uuguugauugaaa

SEQ ID NO: 32963 - RNA, 14 nt, Artificial Sequence
  Description of Artificial Sequence: Synthetic oligonucleotide
ucuuuuucuuccau

SEQ ID NO: 32964 - RNA, 12 nt, Artificial Sequence
  Description of Artificial Sequence: Synthetic oligonucleotide
aucuuccuucua

SEQ ID NO: 32965 - RNA, 12 nt, Artificial Sequence
  Description of Artificial Sequence: Synthetic oligonucleotide
ugaaugcuucau

SEQ ID NO: 32966 - RNA, 12 nt, Artificial Sequence
  Description of Artificial Sequence: Synthetic oligonucleotide
gaaugcuucaug

SEQ ID NO: 32967 - RNA, 12 nt, Artificial Sequence
  Description of Artificial Sequence: Synthetic oligonucleotide
auucuacuuuga

SEQ ID NO: 32968 - RNA, 12 nt, Artificial Sequence
  Description of Artificial Sequence: Synthetic oligonucleotide
gcaacuacagac

SEQ ID NO: 32969 - RNA, 12 nt, Artificial Sequence
  Description of Artificial Sequence: Synthetic oligonucleotide
accaaggucaac

SEQ ID NO: 32970 - RNA, 12 nt, Artificial Sequence
  Description of Artificial Sequence: Synthetic oligonucleotide
gacuaucucgac

SEQ ID NO: 32971 - RNA, 12 nt, Artificial Sequence
  Description of Artificial Sequence: Synthetic oligonucleotide
accuucccaaac

SEQ ID NO: 32972 - RNA, 13 nt, Artificial Sequence
  Description of Artificial Sequence: Synthetic oligonucleotide
caagcuuagaacu

SEQ ID NO: 32973 - RNA, 14 nt, Artificial Sequence
  Description of Artificial Sequence: Synthetic oligonucleotide
gcuuagaacuuuaa

SEQ ID NO: 32974 - RNA, 13 nt, Artificial Sequence
  Description of Artificial Sequence: Synthetic oligonucleotide
aacuuuaagcaac

SEQ ID NO: 32975 - RNA, 10 nt, Artificial Sequence
  Description of Artificial Sequence: Synthetic oligonucleotide
agaccaccac

SEQ ID NO: 32976 - RNA, 13 nt, Artificial Sequence
  Description of Artificial Sequence: Synthetic oligonucleotide
cgagaaauaaagu

SEQ ID NO: 32977 - RNA, 13 nt, Artificial Sequence
  Description of Artificial Sequence: Synthetic oligonucleotide
gagaaauaaaguu

SEQ ID NO: 32978 - RNA, 11 nt, Artificial Sequence
  Description of Artificial Sequence: Synthetic oligonucleotide
ggaaaugaucc

SEQ ID NO: 32979 - RNA, 12 nt, Artificial Sequence
  Description of Artificial Sequence: Synthetic oligonucleotide
aagaaaugaaac

SEQ ID NO: 32980 - RNA, 12 nt, Artificial Sequence
  Description of Artificial Sequence: Synthetic oligonucleotide
uuuccauccucc

SEQ ID NO: 32981 - RNA, 14 nt, Artificial Sequence
  Description of Artificial Sequence: Synthetic oligonucleotide
cugaaaaucuuuga

SEQ ID NO: 32982 - RNA, 10 nt, Artificial Sequence
  Description of Artificial Sequence: Synthetic oligonucleotide
gccguucagg

SEQ ID NO: 32983 - RNA, 12 nt, Artificial Sequence
  Description of Artificial Sequence: Synthetic oligonucleotide
aggguccagaag

SEQ ID NO: 32984 - RNA, 12 nt, Artificial Sequence
  Description of Artificial Sequence: Synthetic oligonucleotide
caagacugcuug

SEQ ID NO: 32985 - RNA, 12 nt, Artificial Sequence
  Description of Artificial Sequence: Synthetic oligonucleotide
ccaugucuuugg

SEQ ID NO: 32986 - RNA, 10 nt, Artificial Sequence
  Description of Artificial Sequence: Synthetic oligonucleotide
ccugaaacac

SEQ ID NO: 32987 - RNA, 11 nt, Artificial Sequence
  Description of Artificial Sequence: Synthetic oligonucleotide
cucuguaccuc

SEQ ID NO: 32988 - RNA, 11 nt, Artificial Sequence
  Description of Artificial Sequence: Synthetic oligonucleotide
gcaagacaaga

SEQ ID NO: 32989 - RNA, 12 nt, Artificial Sequence
  Description of Artificial Sequence: Synthetic oligonucleotide
caagacaagaaa

SEQ ID NO: 32990 - RNA, 11 nt, Artificial Sequence
  Description of Artificial Sequence: Synthetic oligonucleotide
guacaagaucc

SEQ ID NO: 32991 - RNA, 11 nt, Artificial Sequence
  Description of Artificial Sequence: Synthetic oligonucleotide
guacuugcaga

SEQ ID NO: 32992 - RNA, 12 nt, Artificial Sequence
  Description of Artificial Sequence: Synthetic oligonucleotide
gaucgauacaga

SEQ ID NO: 32993 - RNA, 12 nt, Artificial Sequence
  Description of Artificial Sequence: Synthetic oligonucleotide
auaaaaauaaau

SEQ ID NO: 32994 - RNA, 12 nt, Artificial Sequence
  Description of Artificial Sequence: Synthetic oligonucleotide
aaaaauaaauau

SEQ ID NO: 32995 - RNA, 12 nt, Artificial Sequence
  Description of Artificial Sequence: Synthetic oligonucleotide
uugacugcugug

SEQ ID NO: 32996 - RNA, 12 nt, Artificial Sequence
  Description of Artificial Sequence: Synthetic oligonucleotide
gagaugagagac

SEQ ID NO: 32997 - RNA, 9 nt, Artificial Sequence
  Description of Artificial Sequence: Synthetic oligonucleotide
cccacuugg

SEQ ID NO: 32998 - RNA, 3724 nt, Homo sapiens
ucucccucggcgccgccgccgccgcccgcggggcugggacccgaugcgguuagagccgcggagccuggaagagccccgagcguuucugcuuugggacaaccauacaucuaauuccuuaaaguaguuuuauauguaaaacuugcaaagaaucagaacaaugccuccacgaccaucaucaggugaacuguggggcauccacuugaugcccccaagaauccuaguagaauguuuacuaccaaauggaaugauagugacuuuagaaugccuccgugaggcuacauuaauaaccauaaagcaugaacuauuuaaagaagcaagaaaauacccccuccaucaacuucuucaagaugaaucuucuuacauuuucguaaguguuacucaagaagcagaaagggaagaauuuuuugaugaaacaagacgacuuugugaccuucggcuuuuucaacccuuuuuaaaaguaauugaaccaguaggcaaccgugaagaaaagauccucaaucgagaaauugguuuugcuaucggcaugccagugugugaauuugauaugguuaaagauccagaaguacaggacuuccgaagaaauauucugaacguuuguaaagaagcuguggaucuuagggaccucaauucaccucauaguagagcaauguaugucuauccuccaaauguagaaucuucaccagaauugccaaagcacauauauaauaaauuagauaaagggcaaauaauaguggugaucuggguaauaguuucuccaaauaaugacaagcagaaguauacucugaaaaucaaccaugacuguguaccagaacaaguaauugcugaagcaaucaggaaaaaaacucgaaguauguugcuauccucugaacaacuaaaacucuguguuuuagaauaucagggcaaguauauuuuaaaaguguguggaugugaugaauacuuccuagaaaaauauccucugagucaguauaaguauauaagaagcuguauaaugcuugggaggaugcccaauuugauguugauggcuaaagaaagccuuuauucucaacugccaauggacuguuuuacaaugccaucuuauuccagacgcauuuccacagcuacaccauauaugaauggagaaacaucuacaaaaucccuuuggguuauaaauagugcacucagaauaaaaauucuuugugcaaccuacgugaauguaaauauucgagacauugauaagaucuauguucgaacagguaucuaccauggaggagaacccuuaugugacaaugugaacacucaaagaguaccuuguuccaaucccagguggaaugaauggcugaauuaugauauauacauuccugaucuuccucgugcugcucgacuuugccuuuccauuugcucuguuaaaggccgaaagggugcuaaagaggaacacuguccauuggcauggggaaauauaaacuuguuugauuacacagacacucuaguaucuggaaaaauggcuuugaaucuuuggccaguaccucauggauuagaagauuugcugaacccuauugguguuacuggaucaaauccaaauaaagaaacuccaugcuuagaguuggaguuugacugguucagcagugugguaaaguucccagauaugucagugauugaagagcaugccaauuggucuguaucccgagaagcaggauuuagcuauucccacgcaggacugaguaacagacuagcuagagacaaugaauuaagggaaaaugacaaagaacagcucaaagcaauuucuacacgagauccucucucugaaaucacugagcaggagaaagauuuucuauggagucacagacacuauuguguaacuauccccgaaauucuacccaaauugcuucugucuguuaaauggaauucuagagaugaaguagcccagauguauugcuugguaaaagauuggccuccaaucaaaccugaacaggcuauggaacuucuggacuguaauuacccagauccuaugguucgagguuuugcuguucggugcuuggaaaaauauuuaacagaugacaaacuuucucaguauuuaauucagcuaguacagguccuaaaauaugaacaauauuuggauaacuugcuugugagauuuuuacugaagaaagcauugacuaaucaaaggauugggcacuuuuucuuuuggcauuuaaaaucugagaugcacaauaaaacaguuagccagagguuuggccugcuuuuggaguccuauugucgugcaugugggauguauuugaagcaccugaauaggcaagucgaggcaauggaaaagcucauuaacuuaacugacauucucaaacaggagaagaaggaugaaacacaaaagguacagaugaaguuuuuaguugagcaaaugaggcgaccagauuucauggaugcucuacagggcuuucugucuccucuaaacccugcucaucaacuaggaaaccucaggcuugaagagugucgaauuauguccucugcaaaaaggccacugugguugaauugggagaacccagacaucaugucagaguuacuguuucagaacaaugagaucaucuuuaaaaauggggaugauuuacggcaagauaugcuaacacuucaaauuauucguauuauggaaaauaucuggcaaaaucaaggucuugaucuucgaauguuaccuuaugguugucugucaaucggugacugugugggacuuauugagguggugcgaaauucucacacuauuaugcaaauucagugcaaaggcggcuugaaaggugcacugcaguucaacagccacacacuacaucaguggcucaaagacaagaacaaaggagaaauauaugaugcagccauugaccuguuuacacguucaugugcuggauacuguguagcuaccuucauuuugggaauuggagaucgucacaauaguaacaucauggugaaagacgauggacaacuguuucauauagauuuuggacacuuuuuggaucacaagaagaaaaaauuugguuauaaacgagaacgugugccauuuguuuugacacaggauuucuuaauagugauuaguaaaggagcccaagaaugcacaaagacaagagaauuugagagguuucaggagauguguuacaaggcuuaucuagcuauucgacagcaugccaaucucuucauaaaucuuuucucaaugaugcuuggcucuggaaugccagaacuacaaucuuuugaugacauugcauacauucgaaagacccuagccuuagauaaaacugagcaagaggcuuuggaguauuucaugaaacaaaugaaugaugcacaucaugguggcuggacaacaaaaauggauuggaucuuccacacaauuaaacagcaugcauugaacugaaaagauaacugagaaaaugaaagcucacucuggauuccacacugcacuguuaauaacucucagcaggcaaagaccgauugcauaggaauugcacaauccaugaacagcauuagaauuuacagcaagaacagaaauaaaauacuauauaauuuaaauaauguaaacgcaaacaggguuugauagcacuuaaacuaguucauuucaaaauuaagcuuuagaauaaugcgcaauuucauguuaugccuuaaguccaaaaagguaaacuuugaagauuguuuguaucuuuuuuuaaaaaacaaaacaaaacaaaaauccccaaaauauauagaaaugauggagaaggaaaaaaaaaaaaaaaaa

SEQ ID NO: 32999 - RNA, 19 nt, Artificial Sequence
  Description of Artificial Sequence: Synthetic oligonucleotide
ucucccucggcgccgccgc

SEQ ID NO: 33000 - RNA, 19 nt, Artificial Sequence
  Description of Artificial Sequence: Synthetic oligonucleotide
ccgccgcccgcggggcugg

SEQ ID NO: 33001 - RNA, 19 nt, Artificial Sequence
  Description of Artificial Sequence: Synthetic oligonucleotide
ggacccgaugcgguuagag

SEQ ID NO: 33002 - RNA, 19 nt, Artificial Sequence
  Description of Artificial Sequence: Synthetic oligonucleotide
gccgcggagccuggaagag

SEQ ID NO: 33003 - RNA, 19 nt, Artificial Sequence
  Description of Artificial Sequence: Synthetic oligonucleotide
gccccgagcguuucugcuu

SEQ ID NO: 33004 - RNA, 19 nt, Artificial Sequence
  Description of Artificial Sequence: Synthetic oligonucleotide
uugggacaaccauacaucu

SEQ ID NO: 33005 - RNA, 19 nt, Artificial Sequence
  Description of Artificial Sequence: Synthetic oligonucleotide
uaauuccuuaaaguaguuu

SEQ ID NO: 33006 - RNA, 19 nt, Artificial Sequence
  Description of Artificial Sequence: Synthetic oligonucleotide
uuauauguaaaacuugcaa

SEQ ID NO: 33007 - RNA, 19 nt, Artificial Sequence
  Description of Artificial Sequence: Synthetic oligonucleotide
aagaaucagaacaaugccu

SEQ ID NO: 33008 - RNA, 19 nt, Artificial Sequence
  Description of Artificial Sequence: Synthetic oligonucleotide
uccacgaccaucaucaggu

SEQ ID NO: 33009 - RNA, 19 nt, Artificial Sequence
  Description of Artificial Sequence: Synthetic oligonucleotide
ugaacuguggggcauccac

SEQ ID NO: 33010 - RNA, 19 nt, Artificial Sequence
  Description of Artificial Sequence: Synthetic oligonucleotide
cuugaugcccccaagaauc

SEQ ID NO: 33011 - RNA, 19 nt, Artificial Sequence
  Description of Artificial Sequence: Synthetic oligonucleotide
ccuaguagaauguuuacua

SEQ ID NO: 33012 - RNA, 19 nt, Artificial Sequence
  Description of Artificial Sequence: Synthetic oligonucleotide
accaaauggaaugauagug

SEQ ID NO: 33013 - RNA, 19 nt, Artificial Sequence
  Description of Artificial Sequence: Synthetic oligonucleotide
gacuuuagaaugccuccgu

SEQ ID NO: 33014 - RNA, 19 nt, Artificial Sequence
  Description of Artificial Sequence: Synthetic oligonucleotide
ugaggcuacauuaauaacc

SEQ ID NO: 33015 - RNA, 19 nt, Artificial Sequence
  Description of Artificial Sequence: Synthetic oligonucleotide
cauaaagcaugaacuauuu

SEQ ID NO: 33016 - RNA, 19 nt, Artificial Sequence
  Description of Artificial Sequence: Synthetic oligonucleotide
uaaagaagcaagaaaauac

SEQ ID NO: 33017 - RNA, 19 nt, Artificial Sequence
  Description of Artificial Sequence: Synthetic oligonucleotide
cccccuccaucaacuucuu

SEQ ID NO: 33018 - RNA, 19 nt, Artificial Sequence
  Description of Artificial Sequence: Synthetic oligonucleotide
ucaagaugaaucuucuuac

SEQ ID NO: 33019 - RNA, 19 nt, Artificial Sequence
  Description of Artificial Sequence: Synthetic oligonucleotide
cauuuucguaaguguuacu

SEQ ID NO: 33020 - RNA, 19 nt, Artificial Sequence
  Description of Artificial Sequence: Synthetic oligonucleotide
ucaagaagcagaaagggaa

SEQ ID NO: 33021 - RNA, 19 nt, Artificial Sequence
  Description of Artificial Sequence: Synthetic oligonucleotide
agaauuuuuugaugaaaca

SEQ ID NO: 33022 - RNA, 19 nt, Artificial Sequence
  Description of Artificial Sequence: Synthetic oligonucleotide
aagacgacuuugugaccuu

SEQ ID NO: 33023 - RNA, 19 nt, Artificial Sequence
  Description of Artificial Sequence: Synthetic oligonucleotide
ucggcuuuuucaacccuuu

SEQ ID NO: 33024 - RNA, 19 nt, Artificial Sequence
  Description of Artificial Sequence: Synthetic oligonucleotide
uuuaaaaguaauugaacca

SEQ ID NO: 33025 - RNA, 19 nt, Artificial Sequence
  Description of Artificial Sequence: Synthetic oligonucleotide
aguaggcaaccgugaagaa

SEQ ID NO: 33026 - RNA, 19 nt, Artificial Sequence
  Description of Artificial Sequence: Synthetic oligonucleotide
aaagauccucaaucgagaa

SEQ ID NO: 33027 - RNA, 19 nt, Artificial Sequence
  Description of Artificial Sequence: Synthetic oligonucleotide
aauugguuuugcuaucggc

SEQ ID NO: 33028 - RNA, 19 nt, Artificial Sequence
  Description of Artificial Sequence: Synthetic oligonucleotide
caugccagugugugaauuu

SEQ ID NO: 33029 - RNA, 19 nt, Artificial Sequence
  Description of Artificial Sequence: Synthetic oligonucleotide
ugauaugguuaaagaucca

SEQ ID NO: 33030 - RNA, 19 nt, Artificial Sequence
  Description of Artificial Sequence: Synthetic oligonucleotide
agaaguacaggacuuccga

SEQ ID NO: 33031 - RNA, 19 nt, Artificial Sequence
  Description of Artificial Sequence: Synthetic oligonucleotide
aagaaauauucugaacguu

SEQ ID NO: 33032 - RNA, 19 nt, Artificial Sequence
  Description of Artificial Sequence: Synthetic oligonucleotide
uuguaaagaagcuguggau

SEQ ID NO: 33033 - RNA, 19 nt, Artificial Sequence
  Description of Artificial Sequence: Synthetic oligonucleotide
ucuuagggaccucaauuca

SEQ ID NO: 33034 - RNA, 19 nt, Artificial Sequence
  Description of Artificial Sequence: Synthetic oligonucleotide
accucauaguagagcaaug

SEQ ID NO: 33035 - RNA, 19 nt, Artificial Sequence
  Description of Artificial Sequence: Synthetic oligonucleotide
guaugucuauccuccaaau

SEQ ID NO: 33036 - RNA, 19 nt, Artificial Sequence
  Description of Artificial Sequence: Synthetic oligonucleotide
uguagaaucuucaccagaa

SEQ ID NO: 33037 - RNA, 19 nt, Artificial Sequence
  Description of Artificial Sequence: Synthetic oligonucleotide
auugccaaagcacauauau

SEQ ID NO: 33038 - RNA, 19 nt, Artificial Sequence
  Description of Artificial Sequence: Synthetic oligonucleotide
uaauaaauuagauaaaggg

SEQ ID NO: 33039 - RNA, 19 nt, Artificial Sequence
  Description of Artificial Sequence: Synthetic oligonucleotide
gcaaauaauaguggugauc

SEQ ID NO: 33040 - RNA, 19 nt, Artificial Sequence
  Description of Artificial Sequence: Synthetic oligonucleotide
cuggguaauaguuucucca

SEQ ID NO: 33041 - RNA, 19 nt, Artificial Sequence
  Description of Artificial Sequence: Synthetic oligonucleotide
aaauaaugacaagcagaag

SEQ ID NO: 33042 - RNA, 19 nt, Artificial Sequence
  Description of Artificial Sequence: Synthetic oligonucleotide
guauacucugaaaaucaac

SEQ ID NO: 33043 - RNA, 19 nt, Artificial Sequence
  Description of Artificial Sequence: Synthetic oligonucleotide
ccaugacuguguaccagaa

SEQ ID NO: 33044 - RNA, 19 nt, Artificial Sequence
  Description of Artificial Sequence: Synthetic oligonucleotide
acaaguaauugcugaagca

SEQ ID NO: 33045 - RNA, 19 nt, Artificial Sequence
  Description of Artificial Sequence: Synthetic oligonucleotide
aaucaggaaaaaaacucga

SEQ ID NO: 33046 - RNA, 19 nt, Artificial Sequence
  Description of Artificial Sequence: Synthetic oligonucleotide
aaguauguugcuauccucu

SEQ ID NO: 33047 - RNA, 19 nt, Artificial Sequence
  Description of Artificial Sequence: Synthetic oligonucleotide
ugaacaacuaaaacucugu

SEQ ID NO: 33048 - RNA, 19 nt, Artificial Sequence
  Description of Artificial Sequence: Synthetic oligonucleotide
uguuuuagaauaucagggc

SEQ ID NO: 33049 - RNA, 19 nt, Artificial Sequence
  Description of Artificial Sequence: Synthetic oligonucleotide
caaguauauuuuaaaagug

SEQ ID NO: 33050 - RNA, 19 nt, Artificial Sequence
  Description of Artificial Sequence: Synthetic oligonucleotide
guguggaugugaugaauac

SEQ ID NO: 33051 - RNA, 19 nt, Artificial Sequence
  Description of Artificial Sequence: Synthetic oligonucleotide
cuuccuagaaaaauauccu

SEQ ID NO: 33052 - RNA, 19 nt, Artificial Sequence
  Description of Artificial Sequence: Synthetic oligonucleotide
ucugagucaguauaaguau

SEQ ID NO: 33053 - RNA, 19 nt, Artificial Sequence
  Description of Artificial Sequence: Synthetic oligonucleotide
uauaagaagcuguauaaug

SEQ ID NO: 33054 - RNA, 19 nt, Artificial Sequence
  Description of Artificial Sequence: Synthetic oligonucleotide
gcuugggaggaugcccaau

SEQ ID NO: 33055 - RNA, 19 nt, Artificial Sequence
  Description of Artificial Sequence: Synthetic oligonucleotide
uuugauguugauggcuaaa

SEQ ID NO: 33056 - RNA, 19 nt, Artificial Sequence
  Description of Artificial Sequence: Synthetic oligonucleotide
agaaagccuuuauucucaa

SEQ ID NO: 33057 - RNA, 19 nt, Artificial Sequence
  Description of Artificial Sequence: Synthetic oligonucleotide
acugccaauggacuguuuu

SEQ ID NO: 33058 - RNA, 19 nt, Artificial Sequence
  Description of Artificial Sequence: Synthetic oligonucleotide
uacaaugccaucuuauucc

SEQ ID NO: 33059 - RNA, 19 nt, Artificial Sequence
  Description of Artificial Sequence: Synthetic oligonucleotide
cagacgcauuuccacagcu

SEQ ID NO: 33060 - RNA, 19 nt, Artificial Sequence
  Description of Artificial Sequence: Synthetic oligonucleotide
uacaccauauaugaaugga

SEQ ID NO: 33061 - RNA, 19 nt, Artificial Sequence
  Description of Artificial Sequence: Synthetic oligonucleotide
agaaacaucuacaaaaucc

SEQ ID NO: 33062 - RNA, 19 nt, Artificial Sequence
  Description of Artificial Sequence: Synthetic oligonucleotide
ccuuuggguuauaaauagu

SEQ ID NO: 33063 - RNA, 19 nt, Artificial Sequence
  Description of Artificial Sequence: Synthetic oligonucleotide
ugcacucagaauaaaaauu

SEQ ID NO: 33064 - RNA, 19 nt, Artificial Sequence
  Description of Artificial Sequence: Synthetic oligonucleotide
ucuuugugcaaccuacgug

SEQ ID NO: 33065 - RNA, 19 nt, Artificial Sequence
  Description of Artificial Sequence: Synthetic oligonucleotide
gaauguaaauauucgagac

SEQ ID NO: 33066 - RNA, 19 nt, Artificial Sequence
  Description of Artificial Sequence: Synthetic oligonucleotide
cauugauaagaucuauguu

SEQ ID NO: 33067 - RNA, 19 nt, Artificial Sequence
  Description of Artificial Sequence: Synthetic oligonucleotide
ucgaacagguaucuaccau

SEQ ID NO: 33068 - RNA, 19 nt, Artificial Sequence
  Description of Artificial Sequence: Synthetic oligonucleotide
uggaggagaacccuuaugu

SEQ ID NO: 33069 - RNA, 19 nt, Artificial Sequence
  Description of Artificial Sequence: Synthetic oligonucleotide
ugacaaugugaacacucaa

SEQ ID NO: 33070 - RNA, 19 nt, Artificial Sequence
  Description of Artificial Sequence: Synthetic oligonucleotide
aagaguaccuuguuccaau

SEQ ID NO: 33071 - RNA, 19 nt, Artificial Sequence
  Description of Artificial Sequence: Synthetic oligonucleotide
ucccagguggaaugaaugg

SEQ ID NO: 33072 - RNA, 19 nt, Artificial Sequence
  Description of Artificial Sequence: Synthetic oligonucleotide
gcugaauuaugauauauac

SEQ ID NO: 33073 - RNA, 19 nt, Artificial Sequence
  Description of Artificial Sequence: Synthetic oligonucleotide
cauuccugaucuuccucgu

SEQ ID NO: 33074 - RNA, 19 nt, Artificial Sequence
  Description of Artificial Sequence: Synthetic oligonucleotide
ugcugcucgacuuugccuu

SEQ ID NO: 33075 - RNA, 19 nt, Artificial Sequence
  Description of Artificial Sequence: Synthetic oligonucleotide
uuccauuugcucuguuaaa

SEQ ID NO: 33076 - RNA, 19 nt, Artificial Sequence
  Description of Artificial Sequence: Synthetic oligonucleotide
aggccgaaagggugcuaaa

SEQ ID NO: 33077 - RNA, 19 nt, Artificial Sequence
  Description of Artificial Sequence: Synthetic oligonucleotide
agaggaacacuguccauug

SEQ ID NO: 33078 - RNA, 19 nt, Artificial Sequence
  Description of Artificial Sequence: Synthetic oligonucleotide
ggcauggggaaauauaaac

SEQ ID NO: 33079 - RNA, 19 nt, Artificial Sequence
  Description of Artificial Sequence: Synthetic oligonucleotide
cuuguuugauuacacagac

SEQ ID NO: 33080 - RNA, 19 nt, Artificial Sequence
  Description of Artificial Sequence: Synthetic oligonucleotide
cacucuaguaucuggaaaa

SEQ ID NO: 33081 - RNA, 19 nt, Artificial Sequence
  Description of Artificial Sequence: Synthetic oligonucleotide
aauggcuuugaaucuuugg

SEQ ID NO: 33082 - RNA, 19 nt, Artificial Sequence
  Description of Artificial Sequence: Synthetic oligonucleotide
gccaguaccucauggauua

SEQ ID NO: 33083 - RNA, 19 nt, Artificial Sequence
  Description of Artificial Sequence: Synthetic oligonucleotide
agaagauuugcugaacccu

SEQ ID NO: 33084 - RNA, 19 nt, Artificial Sequence
  Description of Artificial Sequence: Synthetic oligonucleotide
uauugguguuacuggauca

SEQ ID NO: 33085 - RNA, 19 nt, Artificial Sequence
  Description of Artificial Sequence: Synthetic oligonucleotide
aaauccaaauaaagaaacu

SEQ ID NO: 33086 - RNA, 19 nt, Artificial Sequence
  Description of Artificial Sequence: Synthetic oligonucleotide
uccaugcuuagaguuggag

SEQ ID NO: 33087 - RNA, 19 nt, Artificial Sequence
  Description of Artificial Sequence: Synthetic oligonucleotide
guuugacugguucagcagu

SEQ ID NO: 33088 - RNA, 19 nt, Artificial Sequence
  Description of Artificial Sequence: Synthetic oligonucleotide
ugugguaaaguucccagau

SEQ ID NO: 33089 - RNA, 19 nt, Artificial Sequence
  Description of Artificial Sequence: Synthetic oligonucleotide
uaugucagugauugaagag

SEQ ID NO: 33090 - RNA, 19 nt, Artificial Sequence
  Description of Artificial Sequence: Synthetic oligonucleotide
gcaugccaauuggucugua

SEQ ID NO: 33091 - RNA, 19 nt, Artificial Sequence
  Description of Artificial Sequence: Synthetic oligonucleotide
aucccgagaagcaggauuu

SEQ ID NO: 33092 - RNA, 19 nt, Artificial Sequence
  Description of Artificial Sequence: Synthetic oligonucleotide
uagcuauucccacgcagga

SEQ ID NO: 33093 - RNA, 19 nt, Artificial Sequence
  Description of Artificial Sequence: Synthetic oligonucleotide
acugaguaacagacuagcu

SEQ ID NO: 33094 - RNA, 19 nt, Artificial Sequence
  Description of Artificial Sequence: Synthetic oligonucleotide
uagagacaaugaauuaagg

SEQ ID NO: 33095 - RNA, 19 nt, Artificial Sequence
  Description of Artificial Sequence: Synthetic oligonucleotide
ggaaaaugacaaagaacag

SEQ ID NO: 33096 - RNA, 19 nt, Artificial Sequence
  Description of Artificial Sequence: Synthetic oligonucleotide
gcucaaagcaauuucuaca

SEQ ID NO: 33097 - RNA, 19 nt, Artificial Sequence
  Description of Artificial Sequence: Synthetic oligonucleotide
acgagauccucucucugaa

SEQ ID NO: 33098 - RNA, 19 nt, Artificial Sequence
  Description of Artificial Sequence: Synthetic oligonucleotide
aaucacugagcaggagaaa

SEQ ID NO: 33099 - RNA, 19 nt, Artificial Sequence
  Description of Artificial Sequence: Synthetic oligonucleotide
agauuuucuauggagucac

SEQ ID NO: 33100 - RNA, 19 nt, Artificial Sequence
  Description of Artificial Sequence: Synthetic oligonucleotide
cagacacuauuguguaacu

SEQ ID NO: 33101 - RNA, 19 nt, Artificial Sequence
  Description of Artificial Sequence: Synthetic oligonucleotide
uauccccgaaauucuaccc

SEQ ID NO: 33102 - RNA, 19 nt, Artificial Sequence
  Description of Artificial Sequence: Synthetic oligonucleotide
caaauugcuucugucuguu

SEQ ID NO: 33103 - RNA, 19 nt, Artificial Sequence
  Description of Artificial Sequence: Synthetic oligonucleotide
uaaauggaauucuagagau

SEQ ID NO: 33104 - RNA, 19 nt, Artificial Sequence
  Description of Artificial Sequence: Synthetic oligonucleotide
ugaaguagcccagauguau

SEQ ID NO: 33105 - RNA, 19 nt, Artificial Sequence
  Description of Artificial Sequence: Synthetic oligonucleotide
uugcuugguaaaagauugg

SEQ ID NO: 33106 - RNA, 19 nt, Artificial Sequence
  Description of Artificial Sequence: Synthetic oligonucleotide
gccuccaaucaaaccugaa

SEQ ID NO: 33107 - RNA, 19 nt, Artificial Sequence
  Description of Artificial Sequence: Synthetic oligonucleotide
acaggcuauggaacuucug

SEQ ID NO: 33108 - RNA, 19 nt, Artificial Sequence
  Description of Artificial Sequence: Synthetic oligonucleotide
ggacuguaauuacccagau

SEQ ID NO: 33109 - RNA, 19 nt, Artificial Sequence
  Description of Artificial Sequence: Synthetic oligonucleotide
uccuaugguucgagguuuu

SEQ ID NO: 33110 - RNA, 19 nt, Artificial Sequence
  Description of Artificial Sequence: Synthetic oligonucleotide
ugcuguucggugcuuggaa

SEQ ID NO: 33111 - RNA, 19 nt, Artificial Sequence
  Description of Artificial Sequence: Synthetic oligonucleotide
aaaauauuuaacagaugac

SEQ ID NO: 33112 - RNA, 19 nt, Artificial Sequence
  Description of Artificial Sequence: Synthetic oligonucleotide
caaacuuucucaguauuua

SEQ ID NO: 33113 - RNA, 19 nt, Artificial Sequence
  Description of Artificial Sequence: Synthetic oligonucleotide
aauucagcuaguacagguc

SEQ ID NO: 33114 - RNA, 19 nt, Artificial Sequence
  Description of Artificial Sequence: Synthetic oligonucleotide
ccuaaaauaugaacaauau

SEQ ID NO: 33115 - RNA, 19 nt, Artificial Sequence
  Description of Artificial Sequence: Synthetic oligonucleotide
uuuggauaacuugcuugug

SEQ ID NO: 33116 - RNA, 19 nt, Artificial Sequence
  Description of Artificial Sequence: Synthetic oligonucleotide
gagauuuuuacugaagaaa

SEQ ID NO: 33117 - RNA, 19 nt, Artificial Sequence
  Description of Artificial Sequence: Synthetic oligonucleotide
agcauugacuaaucaaagg

SEQ ID NO: 33118 - RNA, 19 nt, Artificial Sequence
  Description of Artificial Sequence: Synthetic oligonucleotide
gauugggcacuuuuucuuu

SEQ ID NO: 33119 - RNA, 19 nt, Artificial Sequence
  Description of Artificial Sequence: Synthetic oligonucleotide
uuggcauuuaaaaucugag

SEQ ID NO: 33120 - RNA, 19 nt, Artificial Sequence
  Description of Artificial Sequence: Synthetic oligonucleotide
gaugcacaauaaaacaguu

SEQ ID NO: 33121 - RNA, 19 nt, Artificial Sequence
  Description of Artificial Sequence: Synthetic oligonucleotide
uagccagagguuuggccug

SEQ ID NO: 33122 - RNA, 19 nt, Artificial Sequence
  Description of Artificial Sequence: Synthetic oligonucleotide
gcuuuuggaguccuauugu

SEQ ID NO: 33123 - RNA, 19 nt, Artificial Sequence
  Description of Artificial Sequence: Synthetic oligonucleotide
ucgugcaugugggauguau

SEQ ID NO: 33124 - RNA, 19 nt, Artificial Sequence
  Description of Artificial Sequence: Synthetic oligonucleotide
uuugaagcaccugaauagg

SEQ ID NO: 33125 - RNA, 19 nt, Artificial Sequence
  Description of Artificial Sequence: Synthetic oligonucleotide
gcaagucgaggcaauggaa

SEQ ID NO: 33126 - RNA, 19 nt, Artificial Sequence
  Description of Artificial Sequence: Synthetic oligonucleotide
aaagcucauuaacuuaacu

SEQ ID NO: 33127 - RNA, 19 nt, Artificial Sequence
  Description of Artificial Sequence: Synthetic oligonucleotide
ugacauucucaaacaggag

SEQ ID NO: 33128 - RNA, 19 nt, Artificial Sequence
  Description of Artificial Sequence: Synthetic oligonucleotide
gaagaaggaugaaacacaa

SEQ ID NO: 33129 - RNA, 19 nt, Artificial Sequence
  Description of Artificial Sequence: Synthetic oligonucleotide
aaagguacagaugaaguuu

SEQ ID NO: 33130 - RNA, 19 nt, Artificial Sequence
  Description of Artificial Sequence: Synthetic oligonucleotide
uuuaguugagcaaaugagg

SEQ ID NO: 33131 - RNA, 19 nt, Artificial Sequence
  Description of Artificial Sequence: Synthetic oligonucleotide
gcgaccagauuucauggau

SEQ ID NO: 33132 - RNA, 19 nt, Artificial Sequence
  Description of Artificial Sequence: Synthetic oligonucleotide
ugcucuacagggcuuucug

SEQ ID NO: 33133 - RNA, 19 nt, Artificial Sequence
  Description of Artificial Sequence: Synthetic oligonucleotide
gucuccucuaaacccugcu

SEQ ID NO: 33134 - RNA, 19 nt, Artificial Sequence
  Description of Artificial Sequence: Synthetic oligonucleotide
ucaucaacuaggaaaccuc

SEQ ID NO: 33135 - RNA, 19 nt, Artificial Sequence
  Description of Artificial Sequence: Synthetic oligonucleotide
caggcuugaagagugucga

SEQ ID NO: 33136 - RNA, 19 nt, Artificial Sequence
  Description of Artificial Sequence: Synthetic oligonucleotide
aauuauguccucugcaaaa

SEQ ID NO: 33137 - RNA, 19 nt, Artificial Sequence
  Description of Artificial Sequence: Synthetic oligonucleotide
aaggccacugugguugaau

SEQ ID NO: 33138 - RNA, 19 nt, Artificial Sequence
  Description of Artificial Sequence: Synthetic oligonucleotide
uugggagaacccagacauc

SEQ ID NO: 33139 - RNA, 19 nt, Artificial Sequence
  Description of Artificial Sequence: Synthetic oligonucleotide
caugucagaguuacuguuu

SEQ ID NO: 33140 - RNA, 19 nt, Artificial Sequence
  Description of Artificial Sequence: Synthetic oligonucleotide
ucagaacaaugagaucauc

SEQ ID NO: 33141 - RNA, 19 nt, Artificial Sequence
  Description of Artificial Sequence: Synthetic oligonucleotide
cuuuaaaaauggggaugau

SEQ ID NO: 33142 - RNA, 19 nt, Artificial Sequence
  Description of Artificial Sequence: Synthetic oligonucleotide
uuuacggcaagauaugcua

SEQ ID NO: 33143 - RNA, 19 nt, Artificial Sequence
  Description of Artificial Sequence: Synthetic oligonucleotide
aacacuucaaauuauucgu

SEQ ID NO: 33144 - RNA, 19 nt, Artificial Sequence
  Description of Artificial Sequence: Synthetic oligonucleotide
uauuauggaaaauaucugg

SEQ ID NO: 33145 - RNA, 19 nt, Artificial Sequence
  Description of Artificial Sequence: Synthetic oligonucleotide
gcaaaaucaaggucuugau

SEQ ID NO: 33146 - RNA, 19 nt, Artificial Sequence
  Description of Artificial Sequence: Synthetic oligonucleotide
ucuucgaauguuaccuuau

SEQ ID NO: 33147 - RNA, 19 nt, Artificial Sequence
  Description of Artificial Sequence: Synthetic oligonucleotide
ugguugucugucaaucggu

SEQ ID NO: 33148 - RNA, 19 nt, Artificial Sequence
  Description of Artificial Sequence: Synthetic oligonucleotide
ugacugugugggacuuauu

SEQ ID NO: 33149 - RNA, 19 nt, Artificial Sequence
  Description of Artificial Sequence: Synthetic oligonucleotide
ugagguggugcgaaauucu

SEQ ID NO: 33150 - RNA, 19 nt, Artificial Sequence
  Description of Artificial Sequence: Synthetic oligonucleotide
ucacacuauuaugcaaauu

SEQ ID NO: 33151 - RNA, 19 nt, Artificial Sequence
  Description of Artificial Sequence: Synthetic oligonucleotide
ucagugcaaaggcggcuug

SEQ ID NO: 33152 - RNA, 19 nt, Artificial Sequence
  Description of Artificial Sequence: Synthetic oligonucleotide
gaaaggugcacugcaguuc

SEQ ID NO: 33153 - RNA, 19 nt, Artificial Sequence
  Description of Artificial Sequence: Synthetic oligonucleotide
caacagccacacacuacau

SEQ ID NO: 33154 - RNA, 19 nt, Artificial Sequence
  Description of Artificial Sequence: Synthetic oligonucleotide
ucaguggcucaaagacaag

SEQ ID NO: 33155 - RNA, 19 nt, Artificial Sequence
  Description of Artificial Sequence: Synthetic oligonucleotide
gaacaaaggagaaauauau

SEQ ID NO: 33156 - RNA, 19 nt, Artificial Sequence
  Description of Artificial Sequence: Synthetic oligonucleotide
ugaugcagccauugaccug

SEQ ID NO: 33157 - RNA, 19 nt, Artificial Sequence
  Description of Artificial Sequence: Synthetic oligonucleotide
guuuacacguucaugugcu

SEQ ID NO: 33158 - RNA, 19 nt, Artificial Sequence
  Description of Artificial Sequence: Synthetic oligonucleotide
uggauacuguguagcuacc

SEQ ID NO: 33159 - RNA, 19 nt, Artificial Sequence
  Description of Artificial Sequence: Synthetic oligonucleotide
cuucauuuugggaauugga

SEQ ID NO: 33160 - RNA, 19 nt, Artificial Sequence
  Description of Artificial Sequence: Synthetic oligonucleotide
agaucgucacaauaguaac

SEQ ID NO: 33161 - RNA, 19 nt, Artificial Sequence
  Description of Artificial Sequence: Synthetic oligonucleotide
caucauggugaaagacgau

SEQ ID NO: 33162 - RNA, 19 nt, Artificial Sequence
  Description of Artificial Sequence: Synthetic oligonucleotide
uggacaacuguuucauaua

SEQ ID NO: 33163 - RNA, 19 nt, Artificial Sequence
  Description of Artificial Sequence: Synthetic oligonucleotide
agauuuuggacacuuuuug

SEQ ID NO: 33164 - RNA, 19 nt, Artificial Sequence
  Description of Artificial Sequence: Synthetic oligonucleotide
ggaucacaagaagaaaaaa

SEQ ID NO: 33165 - RNA, 19 nt, Artificial Sequence
  Description of Artificial Sequence: Synthetic oligonucleotide
auuugguuauaaacgagaa

SEQ ID NO: 33166 - RNA, 19 nt, Artificial Sequence
  Description of Artificial Sequence: Synthetic oligonucleotide
acgugugccauuuguuuug

SEQ ID NO: 33167 - RNA, 19 nt, Artificial Sequence
  Description of Artificial Sequence: Synthetic oligonucleotide
gacacaggauuucuuaaua

SEQ ID NO: 33168 - RNA, 19 nt, Artificial Sequence
  Description of Artificial Sequence: Synthetic oligonucleotide
agugauuaguaaaggagcc

SEQ ID NO: 33169 - RNA, 19 nt, Artificial Sequence
  Description of Artificial Sequence: Synthetic oligonucleotide
ccaagaaugcacaaagaca

SEQ ID NO: 33170 - RNA, 19 nt, Artificial Sequence
  Description of Artificial Sequence: Synthetic oligonucleotide
aagagaauuugagagguuu

SEQ ID NO: 33171 - RNA, 19 nt, Artificial Sequence
  Description of Artificial Sequence: Synthetic oligonucleotide
ucaggagauguguuacaag

SEQ ID NO: 33172 - RNA, 19 nt, Artificial Sequence
  Description of Artificial Sequence: Synthetic oligonucleotide
ggcuuaucuagcuauucga

SEQ ID NO: 33173 - RNA, 19 nt, Artificial Sequence
  Description of Artificial Sequence: Synthetic oligonucleotide
acagcaugccaaucucuuc

SEQ ID NO: 33174 - RNA, 19 nt, Artificial Sequence
  Description of Artificial Sequence: Synthetic oligonucleotide
cauaaaucuuuucucaaug

SEQ ID NO: 33175 - RNA, 19 nt, Artificial Sequence
  Description of Artificial Sequence: Synthetic oligonucleotide
gaugcuuggcucuggaaug

SEQ ID NO: 33176 - RNA, 19 nt, Artificial Sequence
  Description of Artificial Sequence: Synthetic oligonucleotide
gccagaacuacaaucuuuu

SEQ ID NO: 33177 - RNA, 19 nt, Artificial Sequence
  Description of Artificial Sequence: Synthetic oligonucleotide
ugaugacauugcauacauu

SEQ ID NO: 33178 - RNA, 19 nt, Artificial Sequence
  Description of Artificial Sequence: Synthetic oligonucleotide
ucgaaagacccuagccuua

SEQ ID NO: 33179 - RNA, 19 nt, Artificial Sequence
  Description of Artificial Sequence: Synthetic oligonucleotide
agauaaaacugagcaagag

SEQ ID NO: 33180 - RNA, 19 nt, Artificial Sequence
  Description of Artificial Sequence: Synthetic oligonucleotide
ggcuuuggaguauuucaug

SEQ ID NO: 33181 - RNA, 19 nt, Artificial Sequence
  Description of Artificial Sequence: Synthetic oligonucleotide
gaaacaaaugaaugaugca

SEQ ID NO: 33182 - RNA, 19 nt, Artificial Sequence
  Description of Artificial Sequence: Synthetic oligonucleotide
acaucaugguggcuggaca

SEQ ID NO: 33183 - RNA, 19 nt, Artificial Sequence
  Description of Artificial Sequence: Synthetic oligonucleotide
aacaaaaauggauuggauc

SEQ ID NO: 33184 - RNA, 19 nt, Artificial Sequence
  Description of Artificial Sequence: Synthetic oligonucleotide
cuuccacacaauuaaacag

SEQ ID NO: 33185 - RNA, 19 nt, Artificial Sequence
  Description of Artificial Sequence: Synthetic oligonucleotide
gcaugcauugaacugaaaa

SEQ ID NO: 33186 - RNA, 19 nt, Artificial Sequence
  Description of Artificial Sequence: Synthetic oligonucleotide
agauaacugagaaaaugaa

SEQ ID NO: 33187 - RNA, 19 nt, Artificial Sequence
  Description of Artificial Sequence: Synthetic oligonucleotide
aagcucacucuggauucca

SEQ ID NO: 33188 - RNA, 19 nt, Artificial Sequence
  Description of Artificial Sequence: Synthetic oligonucleotide
acacugcacuguuaauaac

SEQ ID NO: 33189 - RNA, 19 nt, Artificial Sequence
  Description of Artificial Sequence: Synthetic oligonucleotide
cucucagcaggcaaagacc

SEQ ID NO: 33190 - RNA, 19 nt, Artificial Sequence
  Description of Artificial Sequence: Synthetic oligonucleotide
cgauugcauaggaauugca

SEQ ID NO: 33191 - RNA, 19 nt, Artificial Sequence
  Description of Artificial Sequence: Synthetic oligonucleotide
acaauccaugaacagcauu

SEQ ID NO: 33192 - RNA, 19 nt, Artificial Sequence
  Description of Artificial Sequence: Synthetic oligonucleotide
uagaauuuacagcaagaac

SEQ ID NO: 33193 - RNA, 19 nt, Artificial Sequence
  Description of Artificial Sequence: Synthetic oligonucleotide
cagaaauaaaauacuauau

SEQ ID NO: 33194 - RNA, 19 nt, Artificial Sequence
  Description of Artificial Sequence: Synthetic oligonucleotide
uaauuuaaauaauguaaac

SEQ ID NO: 33195 - RNA, 19 nt, Artificial Sequence
  Description of Artificial Sequence: Synthetic oligonucleotide
cgcaaacaggguuugauag

SEQ ID NO: 33196 - RNA, 19 nt, Artificial Sequence
  Description of Artificial Sequence: Synthetic oligonucleotide
gcacuuaaacuaguucauu

SEQ ID NO: 33197 - RNA, 19 nt, Artificial Sequence
  Description of Artificial Sequence: Synthetic oligonucleotide
uucaaaauuaagcuuuaga

SEQ ID NO: 33198 - RNA, 19 nt, Artificial Sequence
  Description of Artificial Sequence: Synthetic oligonucleotide
aauaaugcgcaauuucaug

SEQ ID NO: 33199 - RNA, 19 nt, Artificial Sequence
  Description of Artificial Sequence: Synthetic oligonucleotide
guuaugccuuaaguccaaa

SEQ ID NO: 33200 - RNA, 19 nt, Artificial Sequence
  Description of Artificial Sequence: Synthetic oligonucleotide
aaagguaaacuuugaagau

SEQ ID NO: 33201 - RNA, 19 nt, Artificial Sequence
  Description of Artificial Sequence: Synthetic oligonucleotide
uuguuuguaucuuuuuuua

SEQ ID NO: 33202 - RNA, 19 nt, Artificial Sequence
  Description of Artificial Sequence: Synthetic oligonucleotide
aaaaaacaaaacaaaacaa

SEQ ID NO: 33203 - RNA, 19 nt, Artificial Sequence
  Description of Artificial Sequence: Synthetic oligonucleotide
aaaauccccaaaauauaua

SEQ ID NO: 33204 - RNA, 19 nt, Artificial Sequence
  Description of Artificial Sequence: Synthetic oligonucleotide
agaaaugauggagaaggaa

SEQ ID NO: 33205 - RNA, 25 nt, Artificial Sequence
  Description of Artificial Sequence: Synthetic oligonucleotide
ucucccucggcgccgccgccgccgc

SEQ ID NO: 33206 - RNA, 25 nt, Artificial Sequence
  Description of Artificial Sequence: Synthetic oligonucleotide
cccgcggggcugggacccgaugcgg

SEQ ID NO: 33207 - RNA, 25 nt, Artificial Sequence
  Description of Artificial Sequence: Synthetic oligonucleotide
guuagagccgcggagccuggaagag

SEQ ID NO: 33208 - RNA, 25 nt, Artificial Sequence
  Description of Artificial Sequence: Synthetic oligonucleotide
gccccgagcguuucugcuuugggac

SEQ ID NO: 33209 - RNA, 25 nt, Artificial Sequence
  Description of Artificial Sequence: Synthetic oligonucleotide
caaccauacaucuaauuccuuaaag

SEQ ID NO: 33210 - RNA, 25 nt, Artificial Sequence
  Description of Artificial Sequence: Synthetic oligonucleotide
guaguuuuauauguaaaacuugcaa

SEQ ID NO: 33211 - RNA, 25 nt, Artificial Sequence
  Description of Artificial Sequence: Synthetic oligonucleotide
aagaaucagaacaaugccuccacga

SEQ ID NO: 33212 - RNA, 25 nt, Artificial Sequence
  Description of Artificial Sequence: Synthetic oligonucleotide
accaucaucaggugaacuguggggc

SEQ ID NO: 33213 - RNA, 25 nt, Artificial Sequence
  Description of Artificial Sequence: Synthetic oligonucleotide
cauccacuugaugcccccaagaauc

SEQ ID NO: 33214 - RNA, 25 nt, Artificial Sequence
  Description of Artificial Sequence: Synthetic oligonucleotide
ccuaguagaauguuuacuaccaaau

SEQ ID NO: 33215 - RNA, 25 nt, Artificial Sequence
  Description of Artificial Sequence: Synthetic oligonucleotide
uggaaugauagugacuuuagaaugc

SEQ ID NO: 33216 - RNA, 25 nt, Artificial Sequence
  Description of Artificial Sequence: Synthetic oligonucleotide
ccuccgugaggcuacauuaauaacc

SEQ ID NO: 33217 - RNA, 25 nt, Artificial Sequence
  Description of Artificial Sequence: Synthetic oligonucleotide
cauaaagcaugaacuauuuaaagaa

SEQ ID NO: 33218 - RNA, 25 nt, Artificial Sequence
  Description of Artificial Sequence: Synthetic oligonucleotide
agcaagaaaauacccccuccaucaa

SEQ ID NO: 33219 - RNA, 25 nt, Artificial Sequence
  Description of Artificial Sequence: Synthetic oligonucleotide
acuucuucaagaugaaucuucuuac

SEQ ID NO: 33220 - RNA, 25 nt, Artificial Sequence
  Description of Artificial Sequence: Synthetic oligonucleotide
cauuuucguaaguguuacucaagaa

SEQ ID NO: 33221 - RNA, 25 nt, Artificial Sequence
  Description of Artificial Sequence: Synthetic oligonucleotide
agcagaaagggaagaauuuuuugau

SEQ ID NO: 33222 - RNA, 25 nt, Artificial Sequence
  Description of Artificial Sequence: Synthetic oligonucleotide
ugaaacaagacgacuuugugaccuu

SEQ ID NO: 33223 - RNA, 25 nt, Artificial Sequence
  Description of Artificial Sequence: Synthetic oligonucleotide
ucggcuuuuucaacccuuuuuaaaa

SEQ ID NO: 33224 - RNA, 25 nt, Artificial Sequence
  Description of Artificial Sequence: Synthetic oligonucleotide
aguaauugaaccaguaggcaaccgu

SEQ ID NO: 33225 - RNA, 25 nt, Artificial Sequence
  Description of Artificial Sequence: Synthetic oligonucleotide
ugaagaaaagauccucaaucgagaa

SEQ ID NO: 33226 - RNA, 25 nt, Artificial Sequence
  Description of Artificial Sequence: Synthetic oligonucleotide
aauugguuuugcuaucggcaugcca

SEQ ID NO: 33227 - RNA, 25 nt, Artificial Sequence
  Description of Artificial Sequence: Synthetic oligonucleotide
agugugugaauuugauaugguuaaa

SEQ ID NO: 33228 - RNA, 25 nt, Artificial Sequence
  Description of Artificial Sequence: Synthetic oligonucleotide
agauccagaaguacaggacuuccga

SEQ ID NO: 33229 - RNA, 25 nt, Artificial Sequence
  Description of Artificial Sequence: Synthetic oligonucleotide
aagaaauauucugaacguuuguaaa

SEQ ID NO: 33230 - RNA, 25 nt, Artificial Sequence
  Description of Artificial Sequence: Synthetic oligonucleotide
agaagcuguggaucuuagggaccuc

SEQ ID NO: 33231 - RNA, 25 nt, Artificial Sequence
  Description of Artificial Sequence: Synthetic oligonucleotide
caauucaccucauaguagagcaaug

SEQ ID NO: 33232 - RNA, 25 nt, Artificial Sequence
  Description of Artificial Sequence: Synthetic oligonucleotide
guaugucuauccuccaaauguagaa

SEQ ID NO: 33233 - RNA, 25 nt, Artificial Sequence
  Description of Artificial Sequence: Synthetic oligonucleotide
aucuucaccagaauugccaaagcac

SEQ ID NO: 33234 - RNA, 25 nt, Artificial Sequence
  Description of Artificial Sequence: Synthetic oligonucleotide
cauauauaauaaauuagauaaaggg

SEQ ID NO: 33235 - RNA, 25 nt, Artificial Sequence
  Description of Artificial Sequence: Synthetic oligonucleotide
gcaaauaauaguggugaucugggua

SEQ ID NO: 33236 - RNA, 25 nt, Artificial Sequence
  Description of Artificial Sequence: Synthetic oligonucleotide
aauaguuucuccaaauaaugacaag

SEQ ID NO: 33237 - RNA, 25 nt, Artificial Sequence
  Description of Artificial Sequence: Synthetic oligonucleotide
gcagaaguauacucugaaaaucaac

SEQ ID NO: 33238 - RNA, 25 nt, Artificial Sequence
  Description of Artificial Sequence: Synthetic oligonucleotide
ccaugacuguguaccagaacaagua

SEQ ID NO: 33239 - RNA, 25 nt, Artificial Sequence
  Description of Artificial Sequence: Synthetic oligonucleotide
aauugcugaagcaaucaggaaaaaa

SEQ ID NO: 33240 - RNA, 25 nt, Artificial Sequence
  Description of Artificial Sequence: Synthetic oligonucleotide
aacucgaaguauguugcuauccucu

SEQ ID NO: 33241 - RNA, 25 nt, Artificial Sequence
  Description of Artificial Sequence: Synthetic oligonucleotide
ugaacaacuaaaacucuguguuuua

SEQ ID NO: 33242 - RNA, 25 nt, Artificial Sequence
  Description of Artificial Sequence: Synthetic oligonucleotide
agaauaucagggcaaguauauuuua

SEQ ID NO: 33243 - RNA, 25 nt, Artificial Sequence
  Description of Artificial Sequence: Synthetic oligonucleotide
aaaaguguguggaugugaugaauac

SEQ ID NO: 33244 - RNA, 25 nt, Artificial Sequence
  Description of Artificial Sequence: Synthetic oligonucleotide
cuuccuagaaaaauauccucugagu

SEQ ID NO: 33245 - RNA, 25 nt, Artificial Sequence
  Description of Artificial Sequence: Synthetic oligonucleotide
ucaguauaaguauauaagaagcugu

SEQ ID NO: 33246 - RNA, 25 nt, Artificial Sequence
  Description of Artificial Sequence: Synthetic oligonucleotide
uauaaugcuugggaggaugcccaau

SEQ ID NO: 33247 - RNA, 25 nt, Artificial Sequence
  Description of Artificial Sequence: Synthetic oligonucleotide
uuugauguugauggcuaaagaaagc

SEQ ID NO: 33248 - RNA, 25 nt, Artificial Sequence
  Description of Artificial Sequence: Synthetic oligonucleotide
ccuuuauucucaacugccaauggac

SEQ ID NO: 33249 - RNA, 25 nt, Artificial Sequence
  Description of Artificial Sequence: Synthetic oligonucleotide
cuguuuuacaaugccaucuuauucc

SEQ ID NO: 33250 - RNA, 25 nt, Artificial Sequence
  Description of Artificial Sequence: Synthetic oligonucleotide
cagacgcauuuccacagcuacacca

SEQ ID NO: 33251 - RNA, 25 nt, Artificial Sequence
  Description of Artificial Sequence: Synthetic oligonucleotide
auauaugaauggagaaacaucuaca

SEQ ID NO: 33252 - RNA, 25 nt, Artificial Sequence
  Description of Artificial Sequence: Synthetic oligonucleotide
aaaaucccuuuggguuauaaauagu

SEQ ID NO: 33253 - RNA, 25 nt, Artificial Sequence
  Description of Artificial Sequence: Synthetic oligonucleotide
ugcacucagaauaaaaauucuuugu

SEQ ID NO: 33254 - RNA, 25 nt, Artificial Sequence
  Description of Artificial Sequence: Synthetic oligonucleotide
ugcaaccuacgugaauguaaauauu

SEQ ID NO: 33255 - RNA, 25 nt, Artificial Sequence
  Description of Artificial Sequence: Synthetic oligonucleotide
ucgagacauugauaagaucuauguu

SEQ ID NO: 33256 - RNA, 25 nt, Artificial Sequence
  Description of Artificial Sequence: Synthetic oligonucleotide
ucgaacagguaucuaccauggagga

SEQ ID NO: 33257 - RNA, 25 nt, Artificial Sequence
  Description of Artificial Sequence: Synthetic oligonucleotide
agaacccuuaugugacaaugugaac

SEQ ID NO: 33258 - RNA, 25 nt, Artificial Sequence
  Description of Artificial Sequence: Synthetic oligonucleotide
cacucaaagaguaccuuguuccaau

SEQ ID NO: 33259 - RNA, 25 nt, Artificial Sequence
  Description of Artificial Sequence: Synthetic oligonucleotide
ucccagguggaaugaauggcugaau

SEQ ID NO: 33260 - RNA, 25 nt, Artificial Sequence
  Description of Artificial Sequence: Synthetic oligonucleotide
uuaugauauauacauuccugaucuu

SEQ ID NO: 33261 - RNA, 25 nt, Artificial Sequence
  Description of Artificial Sequence: Synthetic oligonucleotide
uccucgugcugcucgacuuugccuu

SEQ ID NO: 33262 - RNA, 25 nt, Artificial Sequence
  Description of Artificial Sequence: Synthetic oligonucleotide
uuccauuugcucuguuaaaggccga

SEQ ID NO: 33263 - RNA, 25 nt, Artificial Sequence
  Description of Artificial Sequence: Synthetic oligonucleotide
aaagggugcuaaagaggaacacugu

SEQ ID NO: 33264 - RNA, 25 nt, Artificial Sequence
  Description of Artificial Sequence: Synthetic oligonucleotide
uccauuggcauggggaaauauaaac

SEQ ID NO: 33265 - RNA, 25 nt, Artificial Sequence
  Description of Artificial Sequence: Synthetic oligonucleotide
cuuguuugauuacacagacacucua

SEQ ID NO: 33266 - RNA, 25 nt, Artificial Sequence
  Description of Artificial Sequence: Synthetic oligonucleotide
aguaucuggaaaaauggcuuugaau

SEQ ID NO: 33267 - RNA, 25 nt, Artificial Sequence
  Description of Artificial Sequence: Synthetic oligonucleotide
ucuuuggccaguaccucauggauua

SEQ ID NO: 33268 - RNA, 25 nt, Artificial Sequence
  Description of Artificial Sequence: Synthetic oligonucleotide
agaagauuugcugaacccuauuggu

SEQ ID NO: 33269 - RNA, 25 nt, Artificial Sequence
  Description of Artificial Sequence: Synthetic oligonucleotide
uguuacuggaucaaauccaaauaaa

SEQ ID NO: 33270 - RNA, 25 nt, Artificial Sequence
  Description of Artificial Sequence: Synthetic oligonucleotide
agaaacuccaugcuuagaguuggag

SEQ ID NO: 33271 - RNA, 25 nt, Artificial Sequence
  Description of Artificial Sequence: Synthetic oligonucleotide
guuugacugguucagcaguguggua

SEQ ID NO: 33272 - RNA, 25 nt, Artificial Sequence
  Description of Artificial Sequence: Synthetic oligonucleotide
aaaguucccagauaugucagugauu

SEQ ID NO: 33273 - RNA, 25 nt, Artificial Sequence
  Description of Artificial Sequence: Synthetic oligonucleotide
ugaagagcaugccaauuggucugua

SEQ ID NO: 33274 - RNA, 25 nt, Artificial Sequence
  Description of Artificial Sequence: Synthetic oligonucleotide
aucccgagaagcaggauuuagcuau

SEQ ID NO: 33275 - RNA, 25 nt, Artificial Sequence
  Description of Artificial Sequence: Synthetic oligonucleotide
uucccacgcaggacugaguaacaga

SEQ ID NO: 33276 - RNA, 25 nt, Artificial Sequence
  Description of Artificial Sequence: Synthetic oligonucleotide
acuagcuagagacaaugaauuaagg

SEQ ID NO: 33277 - RNA, 25 nt, Artificial Sequence
  Description of Artificial Sequence: Synthetic oligonucleotide
ggaaaaugacaaagaacagcucaaa

SEQ ID NO: 33278 - RNA, 25 nt, Artificial Sequence
  Description of Artificial Sequence: Synthetic oligonucleotide
agcaauuucuacacgagauccucuc

SEQ ID NO: 33279 - RNA, 25 nt, Artificial Sequence
  Description of Artificial Sequence: Synthetic oligonucleotide
cucugaaaucacugagcaggagaaa

SEQ ID NO: 33280 - RNA, 25 nt, Artificial Sequence
  Description of Artificial Sequence: Synthetic oligonucleotide
agauuuucuauggagucacagacac

SEQ ID NO: 33281 - RNA, 25 nt, Artificial Sequence
  Description of Artificial Sequence: Synthetic oligonucleotide
cuauuguguaacuauccccgaaauu

SEQ ID NO: 33282 - RNA, 25 nt, Artificial Sequence
  Description of Artificial Sequence: Synthetic oligonucleotide
ucuacccaaauugcuucugucuguu

SEQ ID NO: 33283 - RNA, 25 nt, Artificial Sequence
  Description of Artificial Sequence: Synthetic oligonucleotide
uaaauggaauucuagagaugaagua

SEQ ID NO: 33284 - RNA, 25 nt, Artificial Sequence
  Description of Artificial Sequence: Synthetic oligonucleotide
agcccagauguauugcuugguaaaa

SEQ ID NO: 33285 - RNA, 25 nt, Artificial Sequence
  Description of Artificial Sequence: Synthetic oligonucleotide
agauuggccuccaaucaaaccugaa

SEQ ID NO: 33286 - RNA, 25 nt, Artificial Sequence
  Description of Artificial Sequence: Synthetic oligonucleotide
acaggcuauggaacuucuggacugu

SEQ ID NO: 33287 - RNA, 25 nt, Artificial Sequence
  Description of Artificial Sequence: Synthetic oligonucleotide
uaauuacccagauccuaugguucga

SEQ ID NO: 33288 - RNA, 25 nt, Artificial Sequence
  Description of Artificial Sequence: Synthetic oligonucleotide
agguuuugcuguucggugcuuggaa

SEQ ID NO: 33289 - RNA, 25 nt, Artificial Sequence
  Description of Artificial Sequence: Synthetic oligonucleotide
aaaauauuuaacagaugacaaacuu

SEQ ID NO: 33290 - RNA, 25 nt, Artificial Sequence
  Description of Artificial Sequence: Synthetic oligonucleotide
uucucaguauuuaauucagcuagua

SEQ ID NO: 33291 - RNA, 25 nt, Artificial Sequence
  Description of Artificial Sequence: Synthetic oligonucleotide
acagguccuaaaauaugaacaauau

SEQ ID NO: 33292 - RNA, 25 nt, Artificial Sequence
  Description of Artificial Sequence: Synthetic oligonucleotide
uuuggauaacuugcuugugagauuu

SEQ ID NO: 33293 - RNA, 25 nt, Artificial Sequence
  Description of Artificial Sequence: Synthetic oligonucleotide
uuuacugaagaaagcauugacuaau

SEQ ID NO: 33294 - RNA, 25 nt, Artificial Sequence
  Description of Artificial Sequence: Synthetic oligonucleotide
ucaaaggauugggcacuuuuucuuu

SEQ ID NO: 33295 - RNA, 25 nt, Artificial Sequence
  Description of Artificial Sequence: Synthetic oligonucleotide
uuggcauuuaaaaucugagaugcac

SEQ ID NO: 33296 - RNA, 25 nt, Artificial Sequence
  Description of Artificial Sequence: Synthetic oligonucleotide
caauaaaacaguuagccagagguuu

SEQ ID NO: 33297 - RNA, 25 nt, Artificial Sequence
  Description of Artificial Sequence: Synthetic oligonucleotide
uggccugcuuuuggaguccuauugu

SEQ ID NO: 33298 - RNA, 25 nt, Artificial Sequence
  Description of Artificial Sequence: Synthetic oligonucleotide
ucgugcaugugggauguauuugaag

SEQ ID NO: 33299 - RNA, 25 nt, Artificial Sequence
  Description of Artificial Sequence: Synthetic oligonucleotide
gcaccugaauaggcaagucgaggca

SEQ ID NO: 33300 - RNA, 25 nt, Artificial Sequence
  Description of Artificial Sequence: Synthetic oligonucleotide
aauggaaaagcucauuaacuuaacu

SEQ ID NO: 33301 - RNA, 25 nt, Artificial Sequence
  Description of Artificial Sequence: Synthetic oligonucleotide
ugacauucucaaacaggagaagaag

SEQ ID NO: 33302 - RNA, 25 nt, Artificial Sequence
  Description of Artificial Sequence: Synthetic oligonucleotide
ggaugaaacacaaaagguacagaug

SEQ ID NO: 33303 - RNA, 25 nt, Artificial Sequence
  Description of Artificial Sequence: Synthetic oligonucleotide
gaaguuuuuaguugagcaaaugagg

SEQ ID NO: 33304 - RNA, 25 nt, Artificial Sequence
  Description of Artificial Sequence: Synthetic oligonucleotide
gcgaccagauuucauggaugcucua

SEQ ID NO: 33305 - RNA, 25 nt, Artificial Sequence
  Description of Artificial Sequence: Synthetic oligonucleotide
acagggcuuucugucuccucuaaac

SEQ ID NO: 33306 - RNA, 25 nt, Artificial Sequence
  Description of Artificial Sequence: Synthetic oligonucleotide
cccugcucaucaacuaggaaaccuc

SEQ ID NO: 33307 - RNA, 25 nt, Artificial Sequence
  Description of Artificial Sequence: Synthetic oligonucleotide
caggcuugaagagugucgaauuaug

SEQ ID NO: 33308 - RNA, 25 nt, Artificial Sequence
  Description of Artificial Sequence: Synthetic oligonucleotide
guccucugcaaaaaggccacugugg

SEQ ID NO: 33309 - RNA, 25 nt, Artificial Sequence
  Description of Artificial Sequence: Synthetic oligonucleotide
guugaauugggagaacccagacauc

SEQ ID NO: 33310 - RNA, 25 nt, Artificial Sequence
  Description of Artificial Sequence: Synthetic oligonucleotide
caugucagaguuacuguuucagaac

SEQ ID NO: 33311 - RNA, 25 nt, Artificial Sequence
  Description of Artificial Sequence: Synthetic oligonucleotide
caaugagaucaucuuuaaaaauggg

SEQ ID NO: 33312 - RNA, 25 nt, Artificial Sequence
  Description of Artificial Sequence: Synthetic oligonucleotide
ggaugauuuacggcaagauaugcua

SEQ ID NO: 33313 - RNA, 25 nt, Artificial Sequence
  Description of Artificial Sequence: Synthetic oligonucleotide
aacacuucaaauuauucguauuaug

SEQ ID NO: 33314 - RNA, 25 nt, Artificial Sequence
  Description of Artificial Sequence: Synthetic oligonucleotide
ggaaaauaucuggcaaaaucaaggu

SEQ ID NO: 33315 - RNA, 25 nt, Artificial Sequence
  Description of Artificial Sequence: Synthetic oligonucleotide
ucuugaucuucgaauguuaccuuau

SEQ ID NO: 33316 - RNA, 25 nt, Artificial Sequence
  Description of Artificial Sequence: Synthetic oligonucleotide
ugguugucugucaaucggugacugu

SEQ ID NO: 33317 - RNA, 25 nt, Artificial Sequence
  Description of Artificial Sequence: Synthetic oligonucleotide
ugugggacuuauugagguggugcga

SEQ ID NO: 33318 - RNA, 25 nt, Artificial Sequence
  Description of Artificial Sequence: Synthetic oligonucleotide
aaauucucacacuauuaugcaaauu

SEQ ID NO: 33319 - RNA, 25 nt, Artificial Sequence
  Description of Artificial Sequence: Synthetic oligonucleotide
ucagugcaaaggcggcuugaaaggu

SEQ ID NO: 33320 - RNA, 25 nt, Artificial Sequence
  Description of Artificial Sequence: Synthetic oligonucleotide
ugcacugcaguucaacagccacaca

SEQ ID NO: 33321 - RNA, 25 nt, Artificial Sequence
  Description of Artificial Sequence: Synthetic oligonucleotide
acuacaucaguggcucaaagacaag

SEQ ID NO: 33322 - RNA, 25 nt, Artificial Sequence
  Description of Artificial Sequence: Synthetic oligonucleotide
gaacaaaggagaaauauaugaugca

SEQ ID NO: 33323 - RNA, 25 nt, Artificial Sequence
  Description of Artificial Sequence: Synthetic oligonucleotide
agccauugaccuguuuacacguuca

SEQ ID NO: 33324 - RNA, 25 nt, Artificial Sequence
  Description of Artificial Sequence: Synthetic oligonucleotide
augugcuggauacuguguagcuacc

SEQ ID NO: 33325 - RNA, 25 nt, Artificial Sequence
  Description of Artificial Sequence: Synthetic oligonucleotide
cuucauuuugggaauuggagaucgu

SEQ ID NO: 33326 - RNA, 25 nt, Artificial Sequence
  Description of Artificial Sequence: Synthetic oligonucleotide
ucacaauaguaacaucauggugaaa

SEQ ID NO: 33327 - RNA, 25 nt, Artificial Sequence
  Description of Artificial Sequence: Synthetic oligonucleotide
agacgauggacaacuguuucauaua

SEQ ID NO: 33328 - RNA, 25 nt, Artificial Sequence
  Description of Artificial Sequence: Synthetic oligonucleotide
agauuuuggacacuuuuuggaucac

SEQ ID NO: 33329 - RNA, 25 nt, Artificial Sequence
  Description of Artificial Sequence: Synthetic oligonucleotide
caagaagaaaaaauuugguuauaaa

SEQ ID NO: 33330 - RNA, 25 nt, Artificial Sequence
  Description of Artificial Sequence: Synthetic oligonucleotide
acgagaacgugugccauuuguuuug

SEQ ID NO: 33331 - RNA, 25 nt, Artificial Sequence
  Description of Artificial Sequence: Synthetic oligonucleotide
gacacaggauuucuuaauagugauu

SEQ ID NO: 33332 - RNA, 25 nt, Artificial Sequence
  Description of Artificial Sequence: Synthetic oligonucleotide
uaguaaaggagcccaagaaugcaca

SEQ ID NO: 33333 - RNA, 25 nt, Artificial Sequence
  Description of Artificial Sequence: Synthetic oligonucleotide
aaagacaagagaauuugagagguuu

SEQ ID NO: 33334 - RNA, 25 nt, Artificial Sequence
  Description of Artificial Sequence: Synthetic oligonucleotide
ucaggagauguguuacaaggcuuau

SEQ ID NO: 33335 - RNA, 25 nt, Artificial Sequence
  Description of Artificial Sequence: Synthetic oligonucleotide
ucuagcuauucgacagcaugccaau

SEQ ID NO: 33336 - RNA, 25 nt, Artificial Sequence
  Description of Artificial Sequence: Synthetic oligonucleotide
ucucuucauaaaucuuuucucaaug

SEQ ID NO: 33337 - RNA, 25 nt, Artificial Sequence
  Description of Artificial Sequence: Synthetic oligonucleotide
gaugcuuggcucuggaaugccagaa

SEQ ID NO: 33338 - RNA, 25 nt, Artificial Sequence
  Description of Artificial Sequence: Synthetic oligonucleotide
acuacaaucuuuugaugacauugca

SEQ ID NO: 33339 - RNA, 25 nt, Artificial Sequence
  Description of Artificial Sequence: Synthetic oligonucleotide
auacauucgaaagacccuagccuua

SEQ ID NO: 33340 - RNA, 25 nt, Artificial Sequence
  Description of Artificial Sequence: Synthetic oligonucleotide
agauaaaacugagcaagaggcuuug

SEQ ID NO: 33341 - RNA, 25 nt, Artificial Sequence
  Description of Artificial Sequence: Synthetic oligonucleotide
ggaguauuucaugaaacaaaugaau

SEQ ID NO: 33342 - RNA, 25 nt, Artificial Sequence
  Description of Artificial Sequence: Synthetic oligonucleotide
ugaugcacaucaugguggcuggaca

SEQ ID NO: 33343 - RNA, 25 nt, Artificial Sequence
  Description of Artificial Sequence: Synthetic oligonucleotide
aacaaaaauggauuggaucuuccac

SEQ ID NO: 33344 - RNA, 25 nt, Artificial Sequence
  Description of Artificial Sequence: Synthetic oligonucleotide
cacaauuaaacagcaugcauugaac

SEQ ID NO: 33345 - RNA, 25 nt, Artificial Sequence
  Description of Artificial Sequence: Synthetic oligonucleotide
cugaaaagauaacugagaaaaugaa

SEQ ID NO: 33346 - RNA, 25 nt, Artificial Sequence
  Description of Artificial Sequence: Synthetic oligonucleotide
aagcucacucuggauuccacacugc

SEQ ID NO: 33347 - RNA, 25 nt, Artificial Sequence
  Description of Artificial Sequence: Synthetic oligonucleotide
cacuguuaauaacucucagcaggca

SEQ ID NO: 33348 - RNA, 25 nt, Artificial Sequence
  Description of Artificial Sequence: Synthetic oligonucleotide
aaagaccgauugcauaggaauugca

SEQ ID NO: 33349 - RNA, 25 nt, Artificial Sequence
  Description of Artificial Sequence: Synthetic oligonucleotide
acaauccaugaacagcauuagaauu

SEQ ID NO: 33350 - RNA, 25 nt, Artificial Sequence
  Description of Artificial Sequence: Synthetic oligonucleotide
uuacagcaagaacagaaauaaaaua

SEQ ID NO: 33351 - RNA, 25 nt, Artificial Sequence
  Description of Artificial Sequence: Synthetic oligonucleotide
acuauauaauuuaaauaauguaaac

SEQ ID NO: 33352 - RNA, 25 nt, Artificial Sequence
  Description of Artificial Sequence: Synthetic oligonucleotide
cgcaaacaggguuugauagcacuua

SEQ ID NO: 33353 - RNA, 25 nt, Artificial Sequence
  Description of Artificial Sequence: Synthetic oligonucleotide
aaacuaguucauuucaaaauuaagc

SEQ ID NO: 33354 - RNA, 25 nt, Artificial Sequence
  Description of Artificial Sequence: Synthetic oligonucleotide
cuuuagaauaaugcgcaauuucaug

SEQ ID NO: 33355 - RNA, 25 nt, Artificial Sequence
  Description of Artificial Sequence: Synthetic oligonucleotide
guuaugccuuaaguccaaaaaggua

SEQ ID NO: 33356 - RNA, 25 nt, Artificial Sequence
  Description of Artificial Sequence: Synthetic oligonucleotide
aaacuuugaagauuguuuguaucuu

SEQ ID NO: 33357 - RNA, 25 nt, Artificial Sequence
  Description of Artificial Sequence: Synthetic oligonucleotide
uuuuuuaaaaaacaaaacaaaacaa

SEQ ID NO: 33358 - RNA, 25 nt, Artificial Sequence
  Description of Artificial Sequence: Synthetic oligonucleotide
aaaauccccaaaauauauagaaaug

SEQ ID NO: 33359 - RNA, 3213 nt, Homo sapiens
augugcuucaguuucauaaugccuccugcuauggcagacauccuugacaucugggcgguggauucacagauagcaucugauggcuccauaccuguggauuuccuuuugcccacugggauuuauauccaguuggagguaccucgggaagcuaccauuucuuauauuaagcagauguuauggaagcaaguucacaauuacccaauguucaaccuccuuauggauauugacuccuauauguuugcaugugugaaucagacugcuguauaugaggagcuugaagaugaaacacgaagacucugugaugucagaccuuuucuuccaguucucaaauuagugacaagaaguugugacccaggggaaaaauuagacucaaaaauuggaguccuuauaggaaaaggucugcaugaauuugauuccuugaaggauccugaaguaaaugaauuucgaagaaaaaugcgcaaauucagcgaggaaaaaauccugucacuugugggauugucuuggauggacuggcuaaaacaaacauauccaccagagcaugaaccauccaucccugaaaacuuagaagauaaacuuuaugggggaaagcucaucguagcuguucauuuugaaaacugccaggacguguuuagcuuucaagugucuccuaauaugaauccuaucaaaguaaaugaauuggcaauccaaaaacguuugacuauucaugggaaggaagaugaaguuagccccuaugauuauguguugcaagucagcgggagaguagaauauguuuuuggugaucauccacuaauucaguuccaguauauccggaacugugugaugaacagagcccugccccauuuuauacuuguggaaugcugcaagaucaagaaaauguaugaacaagaaaugauugccauagaggcugccauaaaucgaaauucaucuaaucuuccucuuccauuaccaccaaagaaaacacgaauuauuucucauguuugggaaaauaacaacccuuuccaaauugucuugguuaagggaaauaaacuuaacacagaggaaacuguaaaaguucaugucagggcuggucuuuuucaugguacugagcuccuguguaaaaccaucguaagcucagagguaucagggaaaaaugaucauauuuggaaugaaccacuggaauuugauauuaauauuugugacuuaccaagaauggcucgauuauguuuugcuguuuaugcaguuuuggauaaaguaaaaacgaagaaaucaacgaaaacuauuaaucccucuaaauaucagaccaucaggaaagcuggaaaagugcauuauccuguagcguggguaaauacgaugguuuuugacuuuaaaggacaauugagaacuggagacauaauauuacacagcuggucuucauuuccugaugaacucgaagaaauguugaauccaaugggaacuguucaaacaaauccauauacugaaaaugcaacagcuuugcauguuaaauuuccagagaauaaaaaacaaccuuauuauuacccucccuucgauaagauuauugaaaaggcagcugagauugcaagcagugauagugcuaaugugucaagucgagguggaaaaaaguuucuuccuguauugaaagaaaucuuggacagggaucccuugucucaacugugugaaaaugaaauggaucuuauuuggacuuugcgacaagacugccgagagauuuucccacaaucacugccaaaauuacugcugucaaucaaguggaauaaacuugaggauguugcucagcuucaggcgcugcuucagauuuggccuaaacugcccccccgggaggcccuagagcuucuggauuucaacuauccagaccaguacguucgagaauaugcuguaggcugccugcgacagaugagugaugaagaacuuucucaauaucuuuuacaacuggugcaaguguuaaaauaugagccuuuucuugauugugcccucucuagauuccuauuagaaagagcacuugguaaucggaggauagggcaguuucuauuuuggcaucuuaggucagaagugcacauuccugcugucucaguacaauuuggugucauccuugaagcauacugccggggaaguguggggcacaugaaagugcuuucuaagcagguugaagcacucaauaaguuaaaaacuuuaaauaguuuaaucaaacugaaugccgugaaguuaaacagagccaaagggaaggaggccaugcauaccuguuuaaaacagagugcuuaccgggaagcccucucugaccugcagucaccccugaacccauguguuauccucucagaacucuauguugaaaagugcaaauacauggauuccaaaaugaagccuuuguggcugguauacaauaacaagguauuuggugaggauucaguuggagugauuuuuaaaaauggugaugauuuacgacaggauauguugacacuccaaauguugcgcuugauggauuuacucuggaaagaagcugguuuggaucuucggauguugccuuauggcuguuuagcaacaggagaucgcucuggccucauugaaguugugagcaccucugaaacaauugcugacauucagcugaacaguagcaauguggcugcugcagcagccuucaacaaagaugcccuucugaacuggcuuaaagaauacaacucuggggaugaccuggaccgagccauugaggaauuuacacuguccugugcuggcuacuguguagcuucuuauguccuugggauuggugacagacauagugacaacaucauggucaaaaaaacuggccagcucuuccacauugacuuuggacauauucuuggaaauuucaaaucuaaguuuggcauuaaaagggagcgagugccuuuuauucuuaccuaugauuucauccaugucauucaacaaggaaaaacaggaaauacagaaaaguuuggccgguuccgccaguguugugaggaugcauaucugauuuuacgacggcaugggaaucucuucaucacucucuuugcgcugauguugacugcagggcuuccugaacucacaucagucaaagauauacaguaucuuaaggacucucuugcauuagggaagagugaagaagaagcacucaaacaguuuaagcaaaaauuugaugaggcgcucagggaaagcuggacuacuaaagugaacuggauggcccacacaguucggaaagacuacagaucuuaa

SEQ ID NO: 33360 - RNA, 19 nt, Artificial Sequence
  Description of Artificial Sequence: Synthetic oligonucleotide
augugcuucaguuucauaa

SEQ ID NO: 33361 - RNA, 19 nt, Artificial Sequence
  Description of Artificial Sequence: Synthetic oligonucleotide
augccuccugcuauggcag

SEQ ID NO: 33362 - RNA, 19 nt, Artificial Sequence
  Description of Artificial Sequence: Synthetic oligonucleotide
gacauccuugacaucuggg

SEQ ID NO: 33363 - RNA, 19 nt, Artificial Sequence
  Description of Artificial Sequence: Synthetic oligonucleotide
gcgguggauucacagauag

SEQ ID NO: 33364 - RNA, 19 nt, Artificial Sequence
  Description of Artificial Sequence: Synthetic oligonucleotide
gcaucugauggcuccauac

SEQ ID NO: 33365 - RNA, 19 nt, Artificial Sequence
  Description of Artificial Sequence: Synthetic oligonucleotide
ccuguggauuuccuuuugc

SEQ ID NO: 33366 - RNA, 19 nt, Artificial Sequence
  Description of Artificial Sequence: Synthetic oligonucleotide
cccacugggauuuauaucc

SEQ ID NO: 33367 - RNA, 19 nt, Artificial Sequence
  Description of Artificial Sequence: Synthetic oligonucleotide
caguuggagguaccucggg

SEQ ID NO: 33368 - RNA, 19 nt, Artificial Sequence
  Description of Artificial Sequence: Synthetic oligonucleotide
gaagcuaccauuucuuaua

SEQ ID NO: 33369 - RNA, 19 nt, Artificial Sequence
  Description of Artificial Sequence: Synthetic oligonucleotide
auuaagcagauguuaugga

SEQ ID NO: 33370 - RNA, 19 nt, Artificial Sequence
  Description of Artificial Sequence: Synthetic oligonucleotide
aagcaaguucacaauuacc

SEQ ID NO: 33371 - RNA, 19 nt, Artificial Sequence
  Description of Artificial Sequence: Synthetic oligonucleotide
ccaauguucaaccuccuua

SEQ ID NO: 33372 - RNA, 19 nt, Artificial Sequence
  Description of Artificial Sequence: Synthetic oligonucleotide
auggauauugacuccuaua

SEQ ID NO: 33373 - RNA, 19 nt, Artificial Sequence
  Description of Artificial Sequence: Synthetic oligonucleotide
auguuugcaugugugaauc

SEQ ID NO: 33374 - RNA, 19 nt, Artificial Sequence
  Description of Artificial Sequence: Synthetic oligonucleotide
cagacugcuguauaugagg

SEQ ID NO: 33375 - RNA, 19 nt, Artificial Sequence
  Description of Artificial Sequence: Synthetic oligonucleotide
gagcuugaagaugaaacac

SEQ ID NO: 33376 - RNA, 19 nt, Artificial Sequence
  Description of Artificial Sequence: Synthetic oligonucleotide
cgaagacucugugauguca

SEQ ID NO: 33377 - RNA, 19 nt, Artificial Sequence
  Description of Artificial Sequence: Synthetic oligonucleotide
agaccuuuucuuccaguuc

SEQ ID NO: 33378 - RNA, 19 nt, Artificial Sequence
  Description of Artificial Sequence: Synthetic oligonucleotide
cucaaauuagugacaagaa

SEQ ID NO: 33379 - RNA, 19 nt, Artificial Sequence
  Description of Artificial Sequence: Synthetic oligonucleotide
aguugugacccaggggaaa

SEQ ID NO: 33380 - RNA, 19 nt, Artificial Sequence
  Description of Artificial Sequence: Synthetic oligonucleotide
aaauuagacucaaaaauug

SEQ ID NO: 33381 - RNA, 19 nt, Artificial Sequence
  Description of Artificial Sequence: Synthetic oligonucleotide
ggaguccuuauaggaaaag

SEQ ID NO: 33382 - RNA, 19 nt, Artificial Sequence
  Description of Artificial Sequence: Synthetic oligonucleotide
ggucugcaugaauuugauu

SEQ ID NO: 33383 - RNA, 19 nt, Artificial Sequence
  Description of Artificial Sequence: Synthetic oligonucleotide
uccuugaaggauccugaag

SEQ ID NO: 33384 - RNA, 19 nt, Artificial Sequence
  Description of Artificial Sequence: Synthetic oligonucleotide
guaaaugaauuucgaagaa

SEQ ID NO: 33385 - RNA, 19 nt, Artificial Sequence
  Description of Artificial Sequence: Synthetic oligonucleotide
aaaaugcgcaaauucagcg

SEQ ID NO: 33386 - RNA, 19 nt, Artificial Sequence
  Description of Artificial Sequence: Synthetic oligonucleotide
gaggaaaaaauccugucac

SEQ ID NO: 33387 - RNA, 19 nt, Artificial Sequence
  Description of Artificial Sequence: Synthetic oligonucleotide
cuugugggauugucuugga

SEQ ID NO: 33388 - RNA, 19 nt, Artificial Sequence
  Description of Artificial Sequence: Synthetic oligonucleotide
auggacuggcuaaaacaaa

SEQ ID NO: 33389 - RNA, 19 nt, Artificial Sequence
  Description of Artificial Sequence: Synthetic oligonucleotide
acauauccaccagagcaug

SEQ ID NO: 33390 - RNA, 19 nt, Artificial Sequence
  Description of Artificial Sequence: Synthetic oligonucleotide
gaaccauccaucccugaaa

SEQ ID NO: 33391 - RNA, 19 nt, Artificial Sequence
  Description of Artificial Sequence: Synthetic oligonucleotide
aacuuagaagauaaacuuu

SEQ ID NO: 33392 - RNA, 19 nt, Artificial Sequence
  Description of Artificial Sequence: Synthetic oligonucleotide
uaugggggaaagcucaucg

SEQ ID NO: 33393 - RNA, 19 nt, Artificial Sequence
  Description of Artificial Sequence: Synthetic oligonucleotide
guagcuguucauuuugaaa

SEQ ID NO: 33394 - RNA, 19 nt, Artificial Sequence
  Description of Artificial Sequence: Synthetic oligonucleotide
aacugccaggacguguuua

SEQ ID NO: 33395 - RNA, 19 nt, Artificial Sequence
  Description of Artificial Sequence: Synthetic oligonucleotide
agcuuucaagugucuccua

SEQ ID NO: 33396 - RNA, 19 nt, Artificial Sequence
  Description of Artificial Sequence: Synthetic oligonucleotide
aauaugaauccuaucaaag

SEQ ID NO: 33397 - RNA, 19 nt, Artificial Sequence
  Description of Artificial Sequence: Synthetic oligonucleotide
guaaaugaauuggcaaucc

SEQ ID NO: 33398 - RNA, 19 nt, Artificial Sequence
  Description of Artificial Sequence: Synthetic oligonucleotide
caaaaacguuugacuauuc

SEQ ID NO: 33399 - RNA, 19 nt, Artificial Sequence
  Description of Artificial Sequence: Synthetic oligonucleotide
caugggaaggaagaugaag

SEQ ID NO: 33400 - RNA, 19 nt, Artificial Sequence
  Description of Artificial Sequence: Synthetic oligonucleotide
guuagccccuaugauuaug

SEQ ID NO: 33401 - RNA, 19 nt, Artificial Sequence
  Description of Artificial Sequence: Synthetic oligonucleotide
guguugcaagucagcggga

SEQ ID NO: 33402 - RNA, 19 nt, Artificial Sequence
  Description of Artificial Sequence: Synthetic oligonucleotide
agaguagaauauguuuuug

SEQ ID NO: 33403 - RNA, 19 nt, Artificial Sequence
  Description of Artificial Sequence: Synthetic oligonucleotide
ggugaucauccacuaauuc

SEQ ID NO: 33404 - RNA, 19 nt, Artificial Sequence
  Description of Artificial Sequence: Synthetic oligonucleotide
caguuccaguauauccgga

SEQ ID NO: 33405 - RNA, 19 nt, Artificial Sequence
  Description of Artificial Sequence: Synthetic oligonucleotide
aacugugugaugaacagag

SEQ ID NO: 33406 - RNA, 19 nt, Artificial Sequence
  Description of Artificial Sequence: Synthetic oligonucleotide
gcccugccccauuuuauac

SEQ ID NO: 33407 - RNA, 19 nt, Artificial Sequence
  Description of Artificial Sequence: Synthetic oligonucleotide
cuuguggaaugcugcaaga

SEQ ID NO: 33408 - RNA, 19 nt, Artificial Sequence
  Description of Artificial Sequence: Synthetic oligonucleotide
aucaagaaaauguaugaac

SEQ ID NO: 33409 - RNA, 19 nt, Artificial Sequence
  Description of Artificial Sequence: Synthetic oligonucleotide
caagaaaugauugccauag

SEQ ID NO: 33410 - RNA, 19 nt, Artificial Sequence
  Description of Artificial Sequence: Synthetic oligonucleotide
gaggcugccauaaaucgaa

SEQ ID NO: 33411 - RNA, 19 nt, Artificial Sequence
  Description of Artificial Sequence: Synthetic oligonucleotide
aauucaucuaaucuuccuc

SEQ ID NO: 33412 - RNA, 19 nt, Artificial Sequence
  Description of Artificial Sequence: Synthetic oligonucleotide
cuuccauuaccaccaaaga

SEQ ID NO: 33413 - RNA, 19 nt, Artificial Sequence
  Description of Artificial Sequence: Synthetic oligonucleotide
aaaacacgaauuauuucuc

SEQ ID NO: 33414 - RNA, 19 nt, Artificial Sequence
  Description of Artificial Sequence: Synthetic oligonucleotide
cauguuugggaaaauaaca

SEQ ID NO: 33415 - RNA, 19 nt, Artificial Sequence
  Description of Artificial Sequence: Synthetic oligonucleotide
aacccuuuccaaauugucu

SEQ ID NO: 33416 - RNA, 19 nt, Artificial Sequence
  Description of Artificial Sequence: Synthetic oligonucleotide
uugguuaagggaaauaaac

SEQ ID NO: 33417 - RNA, 19 nt, Artificial Sequence
  Description of Artificial Sequence: Synthetic oligonucleotide
cuuaacacagaggaaacug

SEQ ID NO: 33418 - RNA, 19 nt, Artificial Sequence
  Description of Artificial Sequence: Synthetic oligonucleotide
guaaaaguucaugucaggg

SEQ ID NO: 33419 - RNA, 19 nt, Artificial Sequence
  Description of Artificial Sequence: Synthetic oligonucleotide
gcuggucuuuuucauggua

SEQ ID NO: 33420 - RNA, 19 nt, Artificial Sequence
  Description of Artificial Sequence: Synthetic oligonucleotide
acugagcuccuguguaaaa

SEQ ID NO: 33421 - RNA, 19 nt, Artificial Sequence
  Description of Artificial Sequence: Synthetic oligonucleotide
accaucguaagcucagagg

SEQ ID NO: 33422 - RNA, 19 nt, Artificial Sequence
  Description of Artificial Sequence: Synthetic oligonucleotide
guaucagggaaaaaugauc

SEQ ID NO: 33423 - RNA, 19 nt, Artificial Sequence
  Description of Artificial Sequence: Synthetic oligonucleotide
cauauuuggaaugaaccac

SEQ ID NO: 33424 - RNA, 19 nt, Artificial Sequence
  Description of Artificial Sequence: Synthetic oligonucleotide
cuggaauuugauauuaaua

SEQ ID NO: 33425 - RNA, 19 nt, Artificial Sequence
  Description of Artificial Sequence: Synthetic oligonucleotide
auuugugacuuaccaagaa

SEQ ID NO: 33426 - RNA, 19 nt, Artificial Sequence
  Description of Artificial Sequence: Synthetic oligonucleotide
auggcucgauuauguuuug

SEQ ID NO: 33427 - RNA, 19 nt, Artificial Sequence
  Description of Artificial Sequence: Synthetic oligonucleotide
gcuguuuaugcaguuuugg

SEQ ID NO: 33428 - RNA, 19 nt, Artificial Sequence
  Description of Artificial Sequence: Synthetic oligonucleotide
gauaaaguaaaaacgaaga

SEQ ID NO: 33429 - RNA, 19 nt, Artificial Sequence
  Description of Artificial Sequence: Synthetic oligonucleotide
aaaucaacgaaaacuauua

SEQ ID NO: 33430 - RNA, 19 nt, Artificial Sequence
  Description of Artificial Sequence: Synthetic oligonucleotide
aaucccucuaaauaucaga

SEQ ID NO: 33431 - RNA, 19 nt, Artificial Sequence
  Description of Artificial Sequence: Synthetic oligonucleotide
accaucaggaaagcuggaa

SEQ ID NO: 33432 - RNA, 19 nt, Artificial Sequence
  Description of Artificial Sequence: Synthetic oligonucleotide
aaagugcauuauccuguag

SEQ ID NO: 33433 - RNA, 19 nt, Artificial Sequence
  Description of Artificial Sequence: Synthetic oligonucleotide
gcguggguaaauacgaugg

SEQ ID NO: 33434 - RNA, 19 nt, Artificial Sequence
  Description of Artificial Sequence: Synthetic oligonucleotide
guuuuugacuuuaaaggac

SEQ ID NO: 33435 - RNA, 19 nt, Artificial Sequence
  Description of Artificial Sequence: Synthetic oligonucleotide
caauugagaacuggagaca

SEQ ID NO: 33436 - RNA, 19 nt, Artificial Sequence
  Description of Artificial Sequence: Synthetic oligonucleotide
auaauauuacacagcuggu

SEQ ID NO: 33437 - RNA, 19 nt, Artificial Sequence
  Description of Artificial Sequence: Synthetic oligonucleotide
ucuucauuuccugaugaac

SEQ ID NO: 33438 - RNA, 19 nt, Artificial Sequence
  Description of Artificial Sequence: Synthetic oligonucleotide
cucgaagaaauguugaauc

SEQ ID NO: 33439 - RNA, 19 nt, Artificial Sequence
  Description of Artificial Sequence: Synthetic oligonucleotide
ccaaugggaacuguucaaa

SEQ ID NO: 33440 - RNA, 19 nt, Artificial Sequence
  Description of Artificial Sequence: Synthetic oligonucleotide
acaaauccauauacugaaa

SEQ ID NO: 33441 - RNA, 19 nt, Artificial Sequence
  Description of Artificial Sequence: Synthetic oligonucleotide
aaugcaacagcuuugcaug

SEQ ID NO: 33442 - RNA, 19 nt, Artificial Sequence
  Description of Artificial Sequence: Synthetic oligonucleotide
guuaaauuuccagagaaua

SEQ ID NO: 33443 - RNA, 19 nt, Artificial Sequence
  Description of Artificial Sequence: Synthetic oligonucleotide
aaaaaacaaccuuauuauu

SEQ ID NO: 33444 - RNA, 19 nt, Artificial Sequence
  Description of Artificial Sequence: Synthetic oligonucleotide
uacccucccuucgauaaga

SEQ ID NO: 33445 - RNA, 19 nt, Artificial Sequence
  Description of Artificial Sequence: Synthetic oligonucleotide
auuauugaaaaggcagcug

SEQ ID NO: 33446 - RNA, 19 nt, Artificial Sequence
  Description of Artificial Sequence: Synthetic oligonucleotide
gagauugcaagcagugaua

SEQ ID NO: 33447 - RNA, 19 nt, Artificial Sequence
  Description of Artificial Sequence: Synthetic oligonucleotide
agugcuaaugugucaaguc

SEQ ID NO: 33448 - RNA, 19 nt, Artificial Sequence
  Description of Artificial Sequence: Synthetic oligonucleotide
cgagguggaaaaaaguuuc

SEQ ID NO: 33449 - RNA, 19 nt, Artificial Sequence
  Description of Artificial Sequence: Synthetic oligonucleotide
cuuccuguauugaaagaaa

SEQ ID NO: 33450 - RNA, 19 nt, Artificial Sequence
  Description of Artificial Sequence: Synthetic oligonucleotide
aucuuggacagggaucccu

SEQ ID NO: 33451 - RNA, 19 nt, Artificial Sequence
  Description of Artificial Sequence: Synthetic oligonucleotide
uugucucaacugugugaaa

SEQ ID NO: 33452 - RNA, 19 nt, Artificial Sequence
  Description of Artificial Sequence: Synthetic oligonucleotide
aaugaaauggaucuuauuu

SEQ ID NO: 33453 - RNA, 19 nt, Artificial Sequence
  Description of Artificial Sequence: Synthetic oligonucleotide
uggacuuugcgacaagacu

SEQ ID NO: 33454 - RNA, 19 nt, Artificial Sequence
  Description of Artificial Sequence: Synthetic oligonucleotide
ugccgagagauuuucccac

SEQ ID NO: 33455 - RNA, 19 nt, Artificial Sequence
  Description of Artificial Sequence: Synthetic oligonucleotide
caaucacugccaaaauuac

SEQ ID NO: 33456 - RNA, 19 nt, Artificial Sequence
  Description of Artificial Sequence: Synthetic oligonucleotide
cugcugucaaucaagugga

SEQ ID NO: 33457 - RNA, 19 nt, Artificial Sequence
  Description of Artificial Sequence: Synthetic oligonucleotide
aauaaacuugaggauguug

SEQ ID NO: 33458 - RNA, 19 nt, Artificial Sequence
  Description of Artificial Sequence: Synthetic oligonucleotide
gcucagcuucaggcgcugc

SEQ ID NO: 33459 - RNA, 19 nt, Artificial Sequence
  Description of Artificial Sequence: Synthetic oligonucleotide
cuucagauuuggccuaaac

SEQ ID NO: 33460 - RNA, 19 nt, Artificial Sequence
  Description of Artificial Sequence: Synthetic oligonucleotide
cugcccccccgggaggccc

SEQ ID NO: 33461 - RNA, 19 nt, Artificial Sequence
  Description of Artificial Sequence: Synthetic oligonucleotide
cuagagcuucuggauuuca

SEQ ID NO: 33462 - RNA, 19 nt, Artificial Sequence
  Description of Artificial Sequence: Synthetic oligonucleotide
aacuauccagaccaguacg

SEQ ID NO: 33463 - RNA, 19 nt, Artificial Sequence
  Description of Artificial Sequence: Synthetic oligonucleotide
guucgagaauaugcuguag

SEQ ID NO: 33464 - RNA, 19 nt, Artificial Sequence
  Description of Artificial Sequence: Synthetic oligonucleotide
ggcugccugcgacagauga

SEQ ID NO: 33465 - RNA, 19 nt, Artificial Sequence
  Description of Artificial Sequence: Synthetic oligonucleotide
agugaugaagaacuuucuc

SEQ ID NO: 33466 - RNA, 19 nt, Artificial Sequence
  Description of Artificial Sequence: Synthetic oligonucleotide
caauaucuuuuacaacugg

SEQ ID NO: 33467 - RNA, 19 nt, Artificial Sequence
  Description of Artificial Sequence: Synthetic oligonucleotide
gugcaaguguuaaaauaug

SEQ ID NO: 33468 - RNA, 19 nt, Artificial Sequence
  Description of Artificial Sequence: Synthetic oligonucleotide
gagccuuuucuugauugug

SEQ ID NO: 33469 - RNA, 19 nt, Artificial Sequence
  Description of Artificial Sequence: Synthetic oligonucleotide
gcccucucuagauuccuau

SEQ ID NO: 33470 - RNA, 19 nt, Artificial Sequence
  Description of Artificial Sequence: Synthetic oligonucleotide
uuagaaagagcacuuggua

SEQ ID NO: 33471 - RNA, 19 nt, Artificial Sequence
  Description of Artificial Sequence: Synthetic oligonucleotide
aaucggaggauagggcagu

SEQ ID NO: 33472 - RNA, 19 nt, Artificial Sequence
  Description of Artificial Sequence: Synthetic oligonucleotide
uuucuauuuuggcaucuua

SEQ ID NO: 33473 - RNA, 19 nt, Artificial Sequence
  Description of Artificial Sequence: Synthetic oligonucleotide
aggucagaagugcacauuc

SEQ ID NO: 33474 - RNA, 19 nt, Artificial Sequence
  Description of Artificial Sequence: Synthetic oligonucleotide
ccugcugucucaguacaau

SEQ ID NO: 33475 - RNA, 19 nt, Artificial Sequence
  Description of Artificial Sequence: Synthetic oligonucleotide
uuuggugucauccuugaag

SEQ ID NO: 33476 - RNA, 19 nt, Artificial Sequence
  Description of Artificial Sequence: Synthetic oligonucleotide
gcauacugccggggaagug

SEQ ID NO: 33477 - RNA, 19 nt, Artificial Sequence
  Description of Artificial Sequence: Synthetic oligonucleotide
guggggcacaugaaagugc

SEQ ID NO: 33478 - RNA, 19 nt, Artificial Sequence
  Description of Artificial Sequence: Synthetic oligonucleotide
cuuucuaagcagguugaag

SEQ ID NO: 33479 - RNA, 19 nt, Artificial Sequence
  Description of Artificial Sequence: Synthetic oligonucleotide
gcacucaauaaguuaaaaa

SEQ ID NO: 33480 - RNA, 19 nt, Artificial Sequence
  Description of Artificial Sequence: Synthetic oligonucleotide
acuuuaaauaguuuaauca

SEQ ID NO: 33481 - RNA, 19 nt, Artificial Sequence
  Description of Artificial Sequence: Synthetic oligonucleotide
aaacugaaugccgugaagu

SEQ ID NO: 33482 - RNA, 19 nt, Artificial Sequence
  Description of Artificial Sequence: Synthetic oligonucleotide
uuaaacagagccaaaggga

SEQ ID NO: 33483 - RNA, 19 nt, Artificial Sequence
  Description of Artificial Sequence: Synthetic oligonucleotide
aaggaggccaugcauaccu

SEQ ID NO: 33484 - RNA, 19 nt, Artificial Sequence
  Description of Artificial Sequence: Synthetic oligonucleotide
uguuuaaaacagagugcuu

SEQ ID NO: 33485 - RNA, 19 nt, Artificial Sequence
  Description of Artificial Sequence: Synthetic oligonucleotide
uaccgggaagcccucucug

SEQ ID NO: 33486 - RNA, 19 nt, Artificial Sequence
  Description of Artificial Sequence: Synthetic oligonucleotide
gaccugcagucaccccuga

SEQ ID NO: 33487 - RNA, 19 nt, Artificial Sequence
  Description of Artificial Sequence: Synthetic oligonucleotide
aacccauguguuauccucu

SEQ ID NO: 33488 - RNA, 19 nt, Artificial Sequence
  Description of Artificial Sequence: Synthetic oligonucleotide
ucagaacucuauguugaaa

SEQ ID NO: 33489 - RNA, 19 nt, Artificial Sequence
  Description of Artificial Sequence: Synthetic oligonucleotide
aagugcaaauacauggauu

SEQ ID NO: 33490 - RNA, 19 nt, Artificial Sequence
  Description of Artificial Sequence: Synthetic oligonucleotide
uccaaaaugaagccuuugu

SEQ ID NO: 33491 - RNA, 19 nt, Artificial Sequence
  Description of Artificial Sequence: Synthetic oligonucleotide
uggcugguauacaauaaca

SEQ ID NO: 33492 - RNA, 19 nt, Artificial Sequence
  Description of Artificial Sequence: Synthetic oligonucleotide
aagguauuuggugaggauu

SEQ ID NO: 33493 - RNA, 19 nt, Artificial Sequence
  Description of Artificial Sequence: Synthetic oligonucleotide
ucaguuggagugauuuuua

SEQ ID NO: 33494 - RNA, 19 nt, Artificial Sequence
  Description of Artificial Sequence: Synthetic oligonucleotide
aaaaauggugaugauuuac

SEQ ID NO: 33495 - RNA, 19 nt, Artificial Sequence
  Description of Artificial Sequence: Synthetic oligonucleotide
cgacaggauauguugacac

SEQ ID NO: 33496 - RNA, 19 nt, Artificial Sequence
  Description of Artificial Sequence: Synthetic oligonucleotide
cuccaaauguugcgcuuga

SEQ ID NO: 33497 - RNA, 19 nt, Artificial Sequence
  Description of Artificial Sequence: Synthetic oligonucleotide
auggauuuacucuggaaag

SEQ ID NO: 33498 - RNA, 19 nt, Artificial Sequence
  Description of Artificial Sequence: Synthetic oligonucleotide
gaagcugguuuggaucuuc

SEQ ID NO: 33499 - RNA, 19 nt, Artificial Sequence
  Description of Artificial Sequence: Synthetic oligonucleotide
cggauguugccuuauggcu

SEQ ID NO: 33500 - RNA, 19 nt, Artificial Sequence
  Description of Artificial Sequence: Synthetic oligonucleotide
uguuuagcaacaggagauc

SEQ ID NO: 33501 - RNA, 19 nt, Artificial Sequence
  Description of Artificial Sequence: Synthetic oligonucleotide
cgcucuggccucauugaag

SEQ ID NO: 33502 - RNA, 19 nt, Artificial Sequence
  Description of Artificial Sequence: Synthetic oligonucleotide
guugugagcaccucugaaa

SEQ ID NO: 33503 - RNA, 19 nt, Artificial Sequence
  Description of Artificial Sequence: Synthetic oligonucleotide
acaauugcugacauucagc

SEQ ID NO: 33504 - RNA, 19 nt, Artificial Sequence
  Description of Artificial Sequence: Synthetic oligonucleotide
cugaacaguagcaaugugg

SEQ ID NO: 33505 - RNA, 19 nt, Artificial Sequence
  Description of Artificial Sequence: Synthetic oligonucleotide
gcugcugcagcagccuuca

SEQ ID NO: 33506 - RNA, 19 nt, Artificial Sequence
  Description of Artificial Sequence: Synthetic oligonucleotide
aacaaagaugcccuucuga

SEQ ID NO: 33507 - RNA, 19 nt, Artificial Sequence
  Description of Artificial Sequence: Synthetic oligonucleotide
aacuggcuuaaagaauaca

SEQ ID NO: 33508 - RNA, 19 nt, Artificial Sequence
  Description of Artificial Sequence: Synthetic oligonucleotide
aacucuggggaugaccugg

SEQ ID NO: 33509 - RNA, 19 nt, Artificial Sequence
  Description of Artificial Sequence: Synthetic oligonucleotide
gaccgagccauugaggaau

SEQ ID NO: 33510 - RNA, 19 nt, Artificial Sequence
  Description of Artificial Sequence: Synthetic oligonucleotide
uuuacacuguccugugcug

SEQ ID NO: 33511 - RNA, 19 nt, Artificial Sequence
  Description of Artificial Sequence: Synthetic oligonucleotide
ggcuacuguguagcuucuu

SEQ ID NO: 33512 - RNA, 19 nt, Artificial Sequence
  Description of Artificial Sequence: Synthetic oligonucleotide
uauguccuugggauuggug

SEQ ID NO: 33513 - RNA, 19 nt, Artificial Sequence
  Description of Artificial Sequence: Synthetic oligonucleotide
gacagacauagugacaaca

SEQ ID NO: 33514 - RNA, 19 nt, Artificial Sequence
  Description of Artificial Sequence: Synthetic oligonucleotide
aucauggucaaaaaaacug

SEQ ID NO: 33515 - RNA, 19 nt, Artificial Sequence
  Description of Artificial Sequence: Synthetic oligonucleotide
ggccagcucuuccacauug

SEQ ID NO: 33516 - RNA, 19 nt, Artificial Sequence
  Description of Artificial Sequence: Synthetic oligonucleotide
gacuuuggacauauucuug

SEQ ID NO: 33517 - RNA, 19 nt, Artificial Sequence
  Description of Artificial Sequence: Synthetic oligonucleotide
ggaaauuucaaaucuaagu

SEQ ID NO: 33518 - RNA, 19 nt, Artificial Sequence
  Description of Artificial Sequence: Synthetic oligonucleotide
uuuggcauuaaaagggagc

SEQ ID NO: 33519 - RNA, 19 nt, Artificial Sequence
  Description of Artificial Sequence: Synthetic oligonucleotide
cgagugccuuuuauucuua

SEQ ID NO: 33520 - RNA, 19 nt, Artificial Sequence
  Description of Artificial Sequence: Synthetic oligonucleotide
accuaugauuucauccaug

SEQ ID NO: 33521 - RNA, 19 nt, Artificial Sequence
  Description of Artificial Sequence: Synthetic oligonucleotide
gucauucaacaaggaaaaa

SEQ ID NO: 33522 - RNA, 19 nt, Artificial Sequence
  Description of Artificial Sequence: Synthetic oligonucleotide
acaggaaauacagaaaagu

SEQ ID NO: 33523 - RNA, 19 nt, Artificial Sequence
  Description of Artificial Sequence: Synthetic oligonucleotide
uuuggccgguuccgccagu

SEQ ID NO: 33524 - RNA, 19 nt, Artificial Sequence
  Description of Artificial Sequence: Synthetic oligonucleotide
uguugugaggaugcauauc

SEQ ID NO: 33525 - RNA, 19 nt, Artificial Sequence
  Description of Artificial Sequence: Synthetic oligonucleotide
cugauuuuacgacggcaug

SEQ ID NO: 33526 - RNA, 19 nt, Artificial Sequence
  Description of Artificial Sequence: Synthetic oligonucleotide
gggaaucucuucaucacuc

SEQ ID NO: 33527 - RNA, 19 nt, Artificial Sequence
  Description of Artificial Sequence: Synthetic oligonucleotide
cucuuugcgcugauguuga

SEQ ID NO: 33528 - RNA, 19 nt, Artificial Sequence
  Description of Artificial Sequence: Synthetic oligonucleotide
acugcagggcuuccugaac

SEQ ID NO: 33529 - RNA, 19 nt, Artificial Sequence
  Description of Artificial Sequence: Synthetic oligonucleotide
cucacaucagucaaagaua

SEQ ID NO: 33530 - RNA, 19 nt, Artificial Sequence
  Description of Artificial Sequence: Synthetic oligonucleotide
auacaguaucuuaaggacu

SEQ ID NO: 33531 - RNA, 19 nt, Artificial Sequence
  Description of Artificial Sequence: Synthetic oligonucleotide
ucucuugcauuagggaaga

SEQ ID NO: 33532 - RNA, 19 nt, Artificial Sequence
  Description of Artificial Sequence: Synthetic oligonucleotide
agugaagaagaagcacuca

SEQ ID NO: 33533 - RNA, 19 nt, Artificial Sequence
  Description of Artificial Sequence: Synthetic oligonucleotide
aaacaguuuaagcaaaaau

SEQ ID NO: 33534 - RNA, 19 nt, Artificial Sequence
  Description of Artificial Sequence: Synthetic oligonucleotide
uuugaugaggcgcucaggg

SEQ ID NO: 33535 - RNA, 19 nt, Artificial Sequence
  Description of Artificial Sequence: Synthetic oligonucleotide
gaaagcuggacuacuaaag

SEQ ID NO: 33536 - RNA, 19 nt, Artificial Sequence
  Description of Artificial Sequence: Synthetic oligonucleotide
gugaacuggauggcccaca

SEQ ID NO: 33537 - RNA, 19 nt, Artificial Sequence
  Description of Artificial Sequence: Synthetic oligonucleotide
acaguucggaaagacuaca

SEQ ID NO: 33538 - RNA, 19 nt, Artificial Sequence
  Description of Artificial Sequence: Synthetic oligonucleotide
gaaagacuacagaucuuaa

SEQ ID NO: 33539 - RNA, 25 nt, Artificial Sequence
  Description of Artificial Sequence: Synthetic oligonucleotide
augugcuucaguuucauaaugccuc

SEQ ID NO: 33540 - RNA, 25 nt, Artificial Sequence
  Description of Artificial Sequence: Synthetic oligonucleotide
ccugcuauggcagacauccuugaca

SEQ ID NO: 33541 - RNA, 25 nt, Artificial Sequence
  Description of Artificial Sequence: Synthetic oligonucleotide
aucugggcgguggauucacagauag

SEQ ID NO: 33542 - RNA, 25 nt, Artificial Sequence
  Description of Artificial Sequence: Synthetic oligonucleotide
gcaucugauggcuccauaccugugg

SEQ ID NO: 33543 - RNA, 25 nt, Artificial Sequence
  Description of Artificial Sequence: Synthetic oligonucleotide
gauuuccuuuugcccacugggauuu

SEQ ID NO: 33544 - RNA, 25 nt, Artificial Sequence
  Description of Artificial Sequence: Synthetic oligonucleotide
uauauccaguuggagguaccucggg

SEQ ID NO: 33545 - RNA, 25 nt, Artificial Sequence
  Description of Artificial Sequence: Synthetic oligonucleotide
gaagcuaccauuucuuauauuaagc

SEQ ID NO: 33546 - RNA, 25 nt, Artificial Sequence
  Description of Artificial Sequence: Synthetic oligonucleotide
cagauguuauggaagcaaguucaca

SEQ ID NO: 33547 - RNA, 25 nt, Artificial Sequence
  Description of Artificial Sequence: Synthetic oligonucleotide
aauuacccaauguucaaccuccuua

SEQ ID NO: 33548 - RNA, 25 nt, Artificial Sequence
  Description of Artificial Sequence: Synthetic oligonucleotide
auggauauugacuccuauauguuug

SEQ ID NO: 33549 - RNA, 25 nt, Artificial Sequence
  Description of Artificial Sequence: Synthetic oligonucleotide
gcaugugugaaucagacugcuguau

SEQ ID NO: 33550 - RNA, 25 nt, Artificial Sequence
  Description of Artificial Sequence: Synthetic oligonucleotide
uaugaggagcuugaagaugaaacac

SEQ ID NO: 33551 - RNA, 25 nt, Artificial Sequence
  Description of Artificial Sequence: Synthetic oligonucleotide
cgaagacucugugaugucagaccuu

SEQ ID NO: 33552 - RNA, 25 nt, Artificial Sequence
  Description of Artificial Sequence: Synthetic oligonucleotide
uuucuuccaguucucaaauuaguga

SEQ ID NO: 33553 - RNA, 25 nt, Artificial Sequence
  Description of Artificial Sequence: Synthetic oligonucleotide
acaagaaguugugacccaggggaaa

SEQ ID NO: 33554 - RNA, 25 nt, Artificial Sequence
  Description of Artificial Sequence: Synthetic oligonucleotide
aaauuagacucaaaaauuggagucc

SEQ ID NO: 33555 - RNA, 25 nt, Artificial Sequence
  Description of Artificial Sequence: Synthetic oligonucleotide
cuuauaggaaaaggucugcaugaau

SEQ ID NO: 33556 - RNA, 25 nt, Artificial Sequence
  Description of Artificial Sequence: Synthetic oligonucleotide
uuugauuccuugaaggauccugaag

SEQ ID NO: 33557 - RNA, 25 nt, Artificial Sequence
  Description of Artificial Sequence: Synthetic oligonucleotide
guaaaugaauuucgaagaaaaaugc

SEQ ID NO: 33558 - RNA, 25 nt, Artificial Sequence
  Description of Artificial Sequence: Synthetic oligonucleotide
cgcaaauucagcgaggaaaaaaucc

SEQ ID NO: 33559 - RNA, 25 nt, Artificial Sequence
  Description of Artificial Sequence: Synthetic oligonucleotide
cugucacuugugggauugucuugga

SEQ ID NO: 33560 - RNA, 25 nt, Artificial Sequence
  Description of Artificial Sequence: Synthetic oligonucleotide
auggacuggcuaaaacaaacauauc

SEQ ID NO: 33561 - RNA, 25 nt, Artificial Sequence
  Description of Artificial Sequence: Synthetic oligonucleotide
ccaccagagcaugaaccauccaucc

SEQ ID NO: 33562 - RNA, 25 nt, Artificial Sequence
  Description of Artificial Sequence: Synthetic oligonucleotide
ccugaaaacuuagaagauaaacuuu

SEQ ID NO: 33563 - RNA, 25 nt, Artificial Sequence
  Description of Artificial Sequence: Synthetic oligonucleotide
uaugggggaaagcucaucguagcug

SEQ ID NO: 33564 - RNA, 25 nt, Artificial Sequence
  Description of Artificial Sequence: Synthetic oligonucleotide
guucauuuugaaaacugccaggacg

SEQ ID NO: 33565 - RNA, 25 nt, Artificial Sequence
  Description of Artificial Sequence: Synthetic oligonucleotide
guguuuagcuuucaagugucuccua

SEQ ID NO: 33566 - RNA, 25 nt, Artificial Sequence
  Description of Artificial Sequence: Synthetic oligonucleotide
aauaugaauccuaucaaaguaaaug

SEQ ID NO: 33567 - RNA, 25 nt, Artificial Sequence
  Description of Artificial Sequence: Synthetic oligonucleotide
gaauuggcaauccaaaaacguuuga

SEQ ID NO: 33568 - RNA, 25 nt, Artificial Sequence
  Description of Artificial Sequence: Synthetic oligonucleotide
acuauucaugggaaggaagaugaag

SEQ ID NO: 33569 - RNA, 25 nt, Artificial Sequence
  Description of Artificial Sequence: Synthetic oligonucleotide
guuagccccuaugauuauguguugc

SEQ ID NO: 33570 - RNA, 25 nt, Artificial Sequence
  Description of Artificial Sequence: Synthetic oligonucleotide
caagucagcgggagaguagaauaug

SEQ ID NO: 33571 - RNA, 25 nt, Artificial Sequence
  Description of Artificial Sequence: Synthetic oligonucleotide
guuuuuggugaucauccacuaauuc

SEQ ID NO: 33572 - RNA, 25 nt, Artificial Sequence
  Description of Artificial Sequence: Synthetic oligonucleotide
caguuccaguauauccggaacugug

SEQ ID NO: 33573 - RNA, 25 nt, Artificial Sequence
  Description of Artificial Sequence: Synthetic oligonucleotide
gugaugaacagagcccugccccauu

SEQ ID NO: 33574 - RNA, 25 nt, Artificial Sequence
  Description of Artificial Sequence: Synthetic oligonucleotide
uuuauacuuguggaaugcugcaaga

SEQ ID NO: 33575 - RNA, 25 nt, Artificial Sequence
  Description of Artificial Sequence: Synthetic oligonucleotide
aucaagaaaauguaugaacaagaaa

SEQ ID NO: 33576 - RNA, 25 nt, Artificial Sequence
  Description of Artificial Sequence: Synthetic oligonucleotide
augauugccauagaggcugccauaa

SEQ ID NO: 33577 - RNA, 25 nt, Artificial Sequence
  Description of Artificial Sequence: Synthetic oligonucleotide
aaucgaaauucaucuaaucuuccuc

SEQ ID NO: 33578 - RNA, 25 nt, Artificial Sequence
  Description of Artificial Sequence: Synthetic oligonucleotide
cuuccauuaccaccaaagaaaacac

SEQ ID NO: 33579 - RNA, 25 nt, Artificial Sequence
  Description of Artificial Sequence: Synthetic oligonucleotide
cgaauuauuucucauguuugggaaa

SEQ ID NO: 33580 - RNA, 25 nt, Artificial Sequence
  Description of Artificial Sequence: Synthetic oligonucleotide
aauaacaacccuuuccaaauugucu

SEQ ID NO: 33581 - RNA, 25 nt, Artificial Sequence
  Description of Artificial Sequence: Synthetic oligonucleotide
uugguuaagggaaauaaacuuaaca

SEQ ID NO: 33582 - RNA, 25 nt, Artificial Sequence
  Description of Artificial Sequence: Synthetic oligonucleotide
acagaggaaacuguaaaaguucaug

SEQ ID NO: 33583 - RNA, 25 nt, Artificial Sequence
  Description of Artificial Sequence: Synthetic oligonucleotide
gucagggcuggucuuuuucauggua

SEQ ID NO: 33584 - RNA, 25 nt, Artificial Sequence
  Description of Artificial Sequence: Synthetic oligonucleotide
acugagcuccuguguaaaaccaucg

SEQ ID NO: 33585 - RNA, 25 nt, Artificial Sequence
  Description of Artificial Sequence: Synthetic oligonucleotide
guaagcucagagguaucagggaaaa

SEQ ID NO: 33586 - RNA, 25 nt, Artificial Sequence
  Description of Artificial Sequence: Synthetic oligonucleotide
aaugaucauauuuggaaugaaccac

SEQ ID NO: 33587 - RNA, 25 nt, Artificial Sequence
  Description of Artificial Sequence: Synthetic oligonucleotide
cuggaauuugauauuaauauuugug

SEQ ID NO: 33588 - RNA, 25 nt, Artificial Sequence
  Description of Artificial Sequence: Synthetic oligonucleotide
gacuuaccaagaauggcucgauuau

SEQ ID NO: 33589 - RNA, 25 nt, Artificial Sequence
  Description of Artificial Sequence: Synthetic oligonucleotide
uguuuugcuguuuaugcaguuuugg

SEQ ID NO: 33590 - RNA, 25 nt, Artificial Sequence
  Description of Artificial Sequence: Synthetic oligonucleotide
gauaaaguaaaaacgaagaaaucaa

SEQ ID NO: 33591 - RNA, 25 nt, Artificial Sequence
  Description of Artificial Sequence: Synthetic oligonucleotide
acgaaaacuauuaaucccucuaaau

SEQ ID NO: 33592 - RNA, 25 nt, Artificial Sequence
  Description of Artificial Sequence: Synthetic oligonucleotide
uaucagaccaucaggaaagcuggaa

SEQ ID NO: 33593 - RNA, 25 nt, Artificial Sequence
  Description of Artificial Sequence: Synthetic oligonucleotide
aaagugcauuauccuguagcguggg

SEQ ID NO: 33594 - RNA, 25 nt, Artificial Sequence
  Description of Artificial Sequence: Synthetic oligonucleotide
guaaauacgaugguuuuugacuuua

SEQ ID NO: 33595 - RNA, 25 nt, Artificial Sequence
  Description of Artificial Sequence: Synthetic oligonucleotide
aaaggacaauugagaacuggagaca

SEQ ID NO: 33596 - RNA, 25 nt, Artificial Sequence
  Description of Artificial Sequence: Synthetic oligonucleotide
auaauauuacacagcuggucuucau

SEQ ID NO: 33597 - RNA, 25 nt, Artificial Sequence
  Description of Artificial Sequence: Synthetic oligonucleotide
uuuccugaugaacucgaagaaaugu

SEQ ID NO: 33598 - RNA, 25 nt, Artificial Sequence
  Description of Artificial Sequence: Synthetic oligonucleotide
uugaauccaaugggaacuguucaaa

SEQ ID NO: 33599 - RNA, 25 nt, Artificial Sequence
  Description of Artificial Sequence: Synthetic oligonucleotide
acaaauccauauacugaaaaugcaa

SEQ ID NO: 33600 - RNA, 25 nt, Artificial Sequence
  Description of Artificial Sequence: Synthetic oligonucleotide
acagcuuugcauguuaaauuuccag

SEQ ID NO: 33601 - RNA, 25 nt, Artificial Sequence
  Description of Artificial Sequence: Synthetic oligonucleotide
gagaauaaaaaacaaccuuauuauu

SEQ ID NO: 33602 - RNA, 25 nt, Artificial Sequence
  Description of Artificial Sequence: Synthetic oligonucleotide
uacccucccuucgauaagauuauug

SEQ ID NO: 33603 - RNA, 25 nt, Artificial Sequence
  Description of Artificial Sequence: Synthetic oligonucleotide
gaaaaggcagcugagauugcaagca

SEQ ID NO: 33604 - RNA, 25 nt, Artificial Sequence
  Description of Artificial Sequence: Synthetic oligonucleotide
agugauagugcuaaugugucaaguc

SEQ ID NO: 33605 - RNA, 25 nt, Artificial Sequence
  Description of Artificial Sequence: Synthetic oligonucleotide
cgagguggaaaaaaguuucuuccug

SEQ ID NO: 33606 - RNA, 25 nt, Artificial Sequence
  Description of Artificial Sequence: Synthetic oligonucleotide
guauugaaagaaaucuuggacaggg

SEQ ID NO: 33607 - RNA, 25 nt, Artificial Sequence
  Description of Artificial Sequence: Synthetic oligonucleotide
gaucccuugucucaacugugugaaa

SEQ ID NO: 33608 - RNA, 25 nt, Artificial Sequence
  Description of Artificial Sequence: Synthetic oligonucleotide
aaugaaauggaucuuauuuggacuu

SEQ ID NO: 33609 - RNA, 25 nt, Artificial Sequence
  Description of Artificial Sequence: Synthetic oligonucleotide
uugcgacaagacugccgagagauuu

SEQ ID NO: 33610 - RNA, 25 nt, Artificial Sequence
  Description of Artificial Sequence: Synthetic oligonucleotide
uucccacaaucacugccaaaauuac

SEQ ID NO: 33611 - RNA, 25 nt, Artificial Sequence
  Description of Artificial Sequence: Synthetic oligonucleotide
cugcugucaaucaaguggaauaaac

SEQ ID NO: 33612 - RNA, 25 nt, Artificial Sequence
  Description of Artificial Sequence: Synthetic oligonucleotide
cuugaggauguugcucagcuucagg

SEQ ID NO: 33613 - RNA, 25 nt, Artificial Sequence
  Description of Artificial Sequence: Synthetic oligonucleotide
gcgcugcuucagauuuggccuaaac

SEQ ID NO: 33614 - RNA, 25 nt, Artificial Sequence
  Description of Artificial Sequence: Synthetic oligonucleotide
cugcccccccgggaggcccuagagc

SEQ ID NO: 33615 - RNA, 25 nt, Artificial Sequence
  Description of Artificial Sequence: Synthetic oligonucleotide
cuucuggauuucaacuauccagacc

SEQ ID NO: 33616 - RNA, 25 nt, Artificial Sequence
  Description of Artificial Sequence: Synthetic oligonucleotide
caguacguucgagaauaugcuguag

SEQ ID NO: 33617 - RNA, 25 nt, Artificial Sequence
  Description of Artificial Sequence: Synthetic oligonucleotide
ggcugccugcgacagaugagugaug

SEQ ID NO: 33618 - RNA, 25 nt, Artificial Sequence
  Description of Artificial Sequence: Synthetic oligonucleotide
gaagaacuuucucaauaucuuuuac

SEQ ID NO: 33619 - RNA, 25 nt, Artificial Sequence
  Description of Artificial Sequence: Synthetic oligonucleotide
caacuggugcaaguguuaaaauaug

SEQ ID NO: 33620 - RNA, 25 nt, Artificial Sequence
  Description of Artificial Sequence: Synthetic oligonucleotide
gagccuuuucuugauugugcccucu

SEQ ID NO: 33621 - RNA, 25 nt, Artificial Sequence
  Description of Artificial Sequence: Synthetic oligonucleotide
ucuagauuccuauuagaaagagcac

SEQ ID NO: 33622 - RNA, 25 nt, Artificial Sequence
  Description of Artificial Sequence: Synthetic oligonucleotide
cuugguaaucggaggauagggcagu

SEQ ID NO: 33623 - RNA, 25 nt, Artificial Sequence
  Description of Artificial Sequence: Synthetic oligonucleotide
uuucuauuuuggcaucuuaggucag

SEQ ID NO: 33624 - RNA, 25 nt, Artificial Sequence
  Description of Artificial Sequence: Synthetic oligonucleotide
gaagugcacauuccugcugucucag

SEQ ID NO: 33625 - RNA, 25 nt, Artificial Sequence
  Description of Artificial Sequence: Synthetic oligonucleotide
guacaauuuggugucauccuugaag

SEQ ID NO: 33626 - RNA, 25 nt, Artificial Sequence
  Description of Artificial Sequence: Synthetic oligonucleotide
gcauacugccggggaaguguggggc

SEQ ID NO: 33627 - RNA, 25 nt, Artificial Sequence
  Description of Artificial Sequence: Synthetic oligonucleotide
cacaugaaagugcuuucuaagcagg

SEQ ID NO: 33628 - RNA, 25 nt, Artificial Sequence
  Description of Artificial Sequence: Synthetic oligonucleotide
guugaagcacucaauaaguuaaaaa

SEQ ID NO: 33629 - RNA, 25 nt, Artificial Sequence
  Description of Artificial Sequence: Synthetic oligonucleotide
acuuuaaauaguuuaaucaaacuga

SEQ ID NO: 33630 - RNA, 25 nt, Artificial Sequence
  Description of Artificial Sequence: Synthetic oligonucleotide
aaugccgugaaguuaaacagagcca

SEQ ID NO: 33631 - RNA, 25 nt, Artificial Sequence
  Description of Artificial Sequence: Synthetic oligonucleotide
aaagggaaggaggccaugcauaccu

SEQ ID NO: 33632 - RNA, 25 nt, Artificial Sequence
  Description of Artificial Sequence: Synthetic oligonucleotide
uguuuaaaacagagugcuuaccggg

SEQ ID NO: 33633 - RNA, 25 nt, Artificial Sequence
  Description of Artificial Sequence: Synthetic oligonucleotide
gaagcccucucugaccugcagucac

SEQ ID NO: 33634 - RNA, 25 nt, Artificial Sequence
  Description of Artificial Sequence: Synthetic oligonucleotide
ccccugaacccauguguuauccucu

SEQ ID NO: 33635 - RNA, 25 nt, Artificial Sequence
  Description of Artificial Sequence: Synthetic oligonucleotide
ucagaacucuauguugaaaagugca

SEQ ID NO: 33636 - RNA, 25 nt, Artificial Sequence
  Description of Artificial Sequence: Synthetic oligonucleotide
aaauacauggauuccaaaaugaagc

SEQ ID NO: 33637 - RNA, 25 nt, Artificial Sequence
  Description of Artificial Sequence: Synthetic oligonucleotide
ccuuuguggcugguauacaauaaca

SEQ ID NO: 33638 - RNA, 25 nt, Artificial Sequence
  Description of Artificial Sequence: Synthetic oligonucleotide
aagguauuuggugaggauucaguug

SEQ ID NO: 33639 - RNA, 25 nt, Artificial Sequence
  Description of Artificial Sequence: Synthetic oligonucleotide
ggagugauuuuuaaaaauggugaug

SEQ ID NO: 33640 - RNA, 25 nt, Artificial Sequence
  Description of Artificial Sequence: Synthetic oligonucleotide
gauuuacgacaggauauguugacac

SEQ ID NO: 33641 - RNA, 25 nt, Artificial Sequence
  Description of Artificial Sequence: Synthetic oligonucleotide
cuccaaauguugcgcuugauggauu

SEQ ID NO: 33642 - RNA, 25 nt, Artificial Sequence
  Description of Artificial Sequence: Synthetic oligonucleotide
uuacucuggaaagaagcugguuugg

SEQ ID NO: 33643 - RNA, 25 nt, Artificial Sequence
  Description of Artificial Sequence: Synthetic oligonucleotide
gaucuucggauguugccuuauggcu

SEQ ID NO: 33644 - RNA, 25 nt, Artificial Sequence
  Description of Artificial Sequence: Synthetic oligonucleotide
uguuuagcaacaggagaucgcucug

SEQ ID NO: 33645 - RNA, 25 nt, Artificial Sequence
  Description of Artificial Sequence: Synthetic oligonucleotide
ggccucauugaaguugugagcaccu

SEQ ID NO: 33646 - RNA, 25 nt, Artificial Sequence
  Description of Artificial Sequence: Synthetic oligonucleotide
ucugaaacaauugcugacauucagc

SEQ ID NO: 33647 - RNA, 25 nt, Artificial Sequence
  Description of Artificial Sequence: Synthetic oligonucleotide
cugaacaguagcaauguggcugcug

SEQ ID NO: 33648 - RNA, 25 nt, Artificial Sequence
  Description of Artificial Sequence: Synthetic oligonucleotide
gcagcagccuucaacaaagaugccc

SEQ ID NO: 33649 - RNA, 25 nt, Artificial Sequence
  Description of Artificial Sequence: Synthetic oligonucleotide
cuucugaacuggcuuaaagaauaca

SEQ ID NO: 33650 - RNA, 25 nt, Artificial Sequence
  Description of Artificial Sequence: Synthetic oligonucleotide
aacucuggggaugaccuggaccgag

SEQ ID NO: 33651 - RNA, 25 nt, Artificial Sequence
  Description of Artificial Sequence: Synthetic oligonucleotide
gccauugaggaauuuacacuguccu

SEQ ID NO: 33652 - RNA, 25 nt, Artificial Sequence
  Description of Artificial Sequence: Synthetic oligonucleotide
ugugcuggcuacuguguagcuucuu

SEQ ID NO: 33653 - RNA, 25 nt, Artificial Sequence
  Description of Artificial Sequence: Synthetic oligonucleotide
uauguccuugggauuggugacagac

SEQ ID NO: 33654 - RNA, 25 nt, Artificial Sequence
  Description of Artificial Sequence: Synthetic oligonucleotide
cauagugacaacaucauggucaaaa

SEQ ID NO: 33655 - RNA, 25 nt, Artificial Sequence
  Description of Artificial Sequence: Synthetic oligonucleotide
aaaacuggccagcucuuccacauug

SEQ ID NO: 33656 - RNA, 25 nt, Artificial Sequence
  Description of Artificial Sequence: Synthetic oligonucleotide
gacuuuggacauauucuuggaaauu

SEQ ID NO: 33657 - RNA, 25 nt, Artificial Sequence
  Description of Artificial Sequence: Synthetic oligonucleotide
uucaaaucuaaguuuggcauuaaaa

SEQ ID NO: 33658 - RNA, 25 nt, Artificial Sequence
  Description of Artificial Sequence: Synthetic oligonucleotide
agggagcgagugccuuuuauucuua

SEQ ID NO: 33659 - RNA, 25 nt, Artificial Sequence
  Description of Artificial Sequence: Synthetic oligonucleotide
accuaugauuucauccaugucauuc

SEQ ID NO: 33660 - RNA, 25 nt, Artificial Sequence
  Description of Artificial Sequence: Synthetic oligonucleotide
caacaaggaaaaacaggaaauacag

SEQ ID NO: 33661 - RNA, 25 nt, Artificial Sequence
  Description of Artificial Sequence: Synthetic oligonucleotide
gaaaaguuuggccgguuccgccagu

SEQ ID NO: 33662 - RNA, 25 nt, Artificial Sequence
  Description of Artificial Sequence: Synthetic oligonucleotide
uguugugaggaugcauaucugauuu

SEQ ID NO: 33663 - RNA, 25 nt, Artificial Sequence
  Description of Artificial Sequence: Synthetic oligonucleotide
uuacgacggcaugggaaucucuuca

SEQ ID NO: 33664 - RNA, 25 nt, Artificial Sequence
  Description of Artificial Sequence: Synthetic oligonucleotide
aucacucucuuugcgcugauguuga

SEQ ID NO: 33665 - RNA, 25 nt, Artificial Sequence
  Description of Artificial Sequence: Synthetic oligonucleotide
acugcagggcuuccugaacucacau

SEQ ID NO: 33666 - RNA, 25 nt, Artificial Sequence
  Description of Artificial Sequence: Synthetic oligonucleotide
ucagucaaagauauacaguaucuua

SEQ ID NO: 33667 - RNA, 25 nt, Artificial Sequence
  Description of Artificial Sequence: Synthetic oligonucleotide
aaggacucucuugcauuagggaaga

SEQ ID NO: 33668 - RNA, 25 nt, Artificial Sequence
  Description of Artificial Sequence: Synthetic oligonucleotide
agugaagaagaagcacucaaacagu

SEQ ID NO: 33669 - RNA, 25 nt, Artificial Sequence
  Description of Artificial Sequence: Synthetic oligonucleotide
uuuaagcaaaaauuugaugaggcgc

SEQ ID NO: 33670 - RNA, 25 nt, Artificial Sequence
  Description of Artificial Sequence: Synthetic oligonucleotide
cucagggaaagcuggacuacuaaag

SEQ ID NO: 33671 - RNA, 25 nt, Artificial Sequence
  Description of Artificial Sequence: Synthetic oligonucleotide
gugaacuggauggcccacacaguuc

SEQ ID NO: 33672 - RNA, 25 nt, Artificial Sequence
  Description of Artificial Sequence: Synthetic oligonucleotide
aguucggaaagacuacagaucuuaa

SEQ ID NO: 33673 - RNA, 5220 nt, Homo sapiens
cagucgcuccgagcggccgcgagcagagccgcccagcccugucagcugcgccgggacgauaaggagucaggccagggcgggaugacacucauugauucuaaagcaucuuuaaucugccaggcggagggggcuuugcuggucuuucuuggacuauuccagagaggacaacugucaucugggaaguaacaacgcaggaugcccccugggguggacugccccauggaauucuggaccaaggaggagaaucagagcguugugguugacuuccugcugcccacaggggucuaccugaacuucccugugucccgcaaugccaaccucagcaccaucaagcagcugcuguggcaccgcgcccaguaugagccgcucuuccacaugcucaguggccccgaggccuauguguucaccugcaucaaccagacagcggagcagcaagagcuggaggacgagcaacggcgucugugugacgugcagcccuuccugcccguccugcgccugguggcccgugagggcgaccgcgugaagaagcucaucaacucacagaucagccuccucaucggcaaaggccuccacgaguuugacuccuugugcgacccagaagugaacgacuuucgcgccaagaugugccaauucugcgaggaggcggccgcccgccggcagcagcugggcugggaggccuggcugcaguacaguuucccccugcagcuggagcccucggcucaaaccugggggccugguacccugcggcucccgaaccgggcccuucuggucaacguuaaguuugagggcagcgaggagagcuucaccuuccagguguccaccaaggacgugccgcuggcgcugauggccugugcccugcggaagaaggccacaguguuccggcagccgcugguggagcagccggaagacuacacgcugcaggugaacggcaggcaugaguaccuguauggcaacuacccgcucugccaguuccaguacaucugcagcugccugcacaguggguugaccccucaccugaccaugguccauuccuccuccauccucgccaugcgggaugagcagagcaacccugccccccagguccagaaaccgcgugccaaaccaccucccauuccugcgaagaagccuuccucugugucccuguggucccuggagcagccguuccgcaucgagcucauccagggcagcaaagugaacgccgacgagcggaugaagcugguggugcaggccgggcuuuuccacggcaacgagaugcugugcaagacgguguccagcucggaggugagcgugugcucggagcccguguggaagcagcggcuggaguucgacaucaacaucugcgaccugccccgcauggcccgucucugcuuugcgcuguacgccgugaucgagaaagccaagaaggcucgcuccaccaagaagaaguccaagaaggcggacugccccauugccugggccaaccucaugcuguuugacuacaaggaccagcuuaagaccggggaacgcugccucuacauguggcccuccgucccagaugagaagggcgagcugcugaaccccacgggcacugugcgcaguaaccccaacacggauagcgccgcugcccugcucaucugccugcccgagguggccccgcaccccguguacuaccccgcccuggagaagaucuuggagcuggggcgacacagcgagugugugcaugucaccgaggaggagcagcugcagcugcgggaaauccuggagcggcgggggucuggggagcuguaugagcacgagaaggaccugguguggaagcugcggcaugaaguccaggagcacuucccggaggcgcuagcccggcugcugcuggucaccaaguggaacaagcaugaggauguggcccagaugcucuaccugcugugcuccuggccggagcugcccguccugagcgcccuggagcugcuagacuucagcuuccccgauugccacguaggcuccuucgccaucaagucgcugcggaaacugacggacgaugagcuguuccaguaccugcugcagcuggugcaggugcucaaguacgaguccuaccuggacugcgagcugaccaaauuccugcuggaccgggcccuggccaaccgcaagaucggccacuuccuuuucuggcaccuccgcuccgagaugcacgugccgucgguggcccugcgcuucggccucauccuggaggccuacugcaggggcagcacccaccacaugaaggugcugaugaagcagggggaagcacugagcaaacugaaggcccugaaugacuucgucaagcugagcucucagaagacccccaagccccagaccaaggagcugaugcacuugugcaugcggcaggaggccuaccuagaggcccucucccaccugcaguccccacucgaccccagcacccugcuggcugaagucugcguggagcagugcaccuucauggacuccaagaugaagccccuguggaucauguacagcaacgaggaggcaggcagcggcggcagcgugggcaucaucuuuaagaacggggaugaccuccggcaggacaugcugacccugcagaugauccagcucauggacguccuguggaagcaggaggggcuggaccugaggaugacccccuauggcugccuccccaccggggaccgcacaggccucauugaggugguacuccguucagacaccaucgccaacauccaacucaacaagagcaacauggcagccacagccgccuucaacaaggaugcccugcucaacuggcugaaguccaagaacccgggggaggcccuggaucgagccauugaggaguucacccucuccugugcuggcuauuguguggccacauaugugcugggcauuggcgaucggcacagcgacaacaucaugauccgagagagugggcagcuguuccacauugauuuuggccacuuucuggggaauuucaagaccaaguuuggaaucaaccgcgagcgugucccauucauccucaccuaugacuuuguccaugugauucagcaggggaagacuaauaauagugagaaauuugaacgguuccggggcuacugugaaagggccuacaccauccugcggcgccacgggcuucucuuccuccaccucuuugcccugaugcgggcggcaggccugccugagcucagcugcuccaaagacauccaguaucucaaggacucccuggcacuggggaaaacagaggaggaggcacugaagcacuuccgagugaaguuuaacgaagcccuccgugagagcuggaaaaccaaagugaacuggcuggcccacaacguguccaaagacaacaggcaguaguggcuccucccagcccugggcccaagaggaggcggcugcgggucguggggaccaagcacauugguccuaaaggggcugaagagccugaacugcaccuaacgggaaagaaccgacauggcugccuuuuguuuacacugguuauuuauuuaugacuugaaauaguuuaaggagcuaaacagccauaaacggaaacgccuccuucauucagcggcggugcugggccccccgaggcugcaccuggcucucggcugaggauugucaccccaagucuuccagcugguggaucugggcccagcaaagacuguucuccucccgagggaaccuucuucccaggccucccgccagacugccuggguccuggcgccuggcggucaccuggugccuacuguccgacaggaugccucgauccucgugcgacccacccuguguauccucccuagacugaguucuggcagcuccccgaggcagccgggguacccucuagauucagggaugcuugcucuccacuuuucaagugggucuuggguacgagaauucccucaucuuucucuacuguaaagugauuuuguuugcagguaagaaaauaauagaugacucaccacaccucuacggcuggggagaucaggcccagccccauaaaggagaaucuacgcugguccucaggacguguuaaagagaucugggccucauguagcucaccccggucacgcaugaaggcaaaagcaggucagaagcgaauacucugccauuaucucaaaaaucuuuuuuuuuuuuuuuuugagauggggucuuccucuguugcccaggcuggagugcaguggugcaaucuuggcucacuguaaccuccgccucccagguucaagugauucuucuugccucagccuccugaguagcugggauuacaggugugcaccacccguacccagcuaauuuuuguauuuuaguagagacggggguuucaccauguuggcugggcuggucucgaacuccugaccucaggugauccacccgccugagccucccaaagugcugggauuacaggcaugagccaccacgcccggcccacucugccauugucuaagccaccucugaaagcagguuuuaacaaaaggaugaggccagaacucuuccagaaccaucaccuuugggaaccugcugugagagugcugagguaccagaagugugagaacgagggggcgugcugggaucuuucucucugacuauacuuaguuugaaauggugcaggcuuagucuuaagccuccaaaggccuggauuugagcagcuuuagaaaugcagguucuagggcuucucccagccuucagaagccaacuaacucugcagauggggcuaggacugugggcuuuuagcagcccacaggugauccuaacauaucaggccauggacucaggaccugcccggugaugcuguugauuucucaaaggucuuccaaaacucaacagagccagaaguagccgcccgcucagcggcucaggugccagcucuguucugauucaccagggguccgucaguagucauugccacccgcggggcaccucccuggccacacgccuguucccagcaagugcugaaacucacuagaccgucugccuguuucgaaauggggaaagccgugcgugcgcguuauuuauuuaagugcgccugugugcgcgggugugggagcacacuuugcaaagccacagcguuucugguuuuggguguacagucuugugugccuggcgagaagaauauuuucuauuuuuuuaagucauuucauguuucugucuggggaaggcaaguuaguuaaguaucacugauguggguugagaccagcacucugugaaaccuugaaaugagaaguaaaggcagaugaaaagaaaaaaaaaaaaaaa

SEQ ID NO: 33674 - RNA, 5411 nt, Homo sapiens
cucgcgcccagcgcagucgcuccgagcggccgcgagcagagccgcccagcccugccagcugcgccgggacgauaaggagucaggccagggcgggaugacacucauugauucuaaagcaucuuuaaucugccaggcggagggggcuuugcuggucuuucuuggacuauuccagagaggacaacugucaucugggaaguaacaacgcaggaugcccccugggguggacugccccauggaauucuggaccaaggaggagaaucagagcguugugguugacuuccugcugcccacaggggucuaccugaacuucccugugucccgcaaugccaaccucagcaccaucaagcagcugcuguggcaccgcgcccaguaugagccgcucuuccacaugcucaguggccccgaggccuauguguucaccugcaucaaccagacagcggagcagcaagagcuggaggacgagcaacggcgucugugugacgugcagcccuuccugcccguccugcgccugguggcccgugagggcgaccgcgugaagaagcucaucaacucacagaucagccuccucaucggcaaaggccuccacgaguuugacuccuugugcgacccagaagugaacgacuuucgcgccaagaugugccaauucugcgaggaggcggccgcccgccggcagcagcugggcugggaggccuggcugcaguacaguuucccccugcagcuggagcccucggcucaaaccugggggccugguacccugcggcucccgaaccgggcccuucuggucaacguuaaguuugagggcagcgaggagagcuucaccuuccagguguccaccaaggacgugccgcuggcgcugauggccugugcccugcggaagaaggccacaguguuccggcagccgcugguggagcagccggaagacuacacgcugcaggugaacggcaggcaugaguaccuguauggcagcuacccgcucugccaguuccaguacaucugcagcugccugcacaguggguugaccccucaccugaccaugguccauuccuccuccauccucgccaugcgggaugagcagagcaacccugccccccagguccagaaaccgcgugccaaaccaccucccauuccugcgaagaagccuuccucugugucccuguggucccuggagcagccguuccgcaucgagcucauccagggcagcaaagugaacgccgacgagcggaugaagcugguggugcaggccgggcuuuuccacggcaacgagaugcugugcaagacgguguccagcucggaggugagcgugugcucggagcccguguggaagcagcggcuggaguucgacaucaacaucugcgaccugccccgcauggcccgucucugcuuugcgcuguacgccgugaucgagaaagccaagaaggcucgcuccaccaagaagaaguccaagaaggcggacugccccauugccugggccaaccucaugcuguuugacuacaaggaccagcuuaagaccggggaacgcugccucuacauguggcccuccgucccagaugagaagggcgagcugcugaaccccacgggcacugugcgcaguaaccccaacacggauagcgccgcugcccugcucaucugccugcccgagguggccccgcaccccguguacuaccccgcccuggagaagaucuuggagcuggggcgacacagcgagugugugcaugucaccgaggaggagcagcugcagcugcgggaaauccuggagcggcgggggucuggggagcuguaugagcacgagaaggaccugguguggaagcugcggcaugaaguccaggagcacuucccggaggcgcuagcccggcugcugcuggucaccaaguggaacaagcaugaggauguggcccagaugcucuaccugcugugcuccuggccggagcugcccguccugagcgcccuggagcugcuagacuucagcuuccccgauugccacguaggcuccuucgccaucaagucgcugcggaaacugacggacgaugagcuguuccaguaccugcugcagcuggugcaggugcucaaguacgaguccuaccuggacugcgagcugaccaaauuccugcuggaccgggcccuggccaaccgcaagaucggccacuuccuuuucuggcaccuccgcuccgagaugcacgugccgucgguggcccugcgcuucggccucauccuggaggccuacugcaggggcagcacccaccacaugaaggugcugaugaagcagggggaagcacugagcaaacugaaggcccugaaugacuucgucaagcugagcucucagaagacccccaagccccagaccaaggagcugaugcacuugugcaugcggcaggaggccuaccuagaggcccucucccaccugcaguccccacucgaccccagcacccugcuggcugaagucugcguggagcagugcaccuucauggacuccaagaugaagccccuguggaucauguacagcaacgaggaggcaggcagcggcggcagcgugggcaucaucuuuaagaacggggaugaccuccggcaggacaugcugacccugcagaugauccagcucauggacguccuguggaagcaggaggggcuggaccugaggaugacccccuauggcugccuccccaccggggaccgcacaggccucauugaggugguacuccguucagacaccaucgccaacauccaacucaacaagagcaacauggcagccacagccgccuucaacaaggaugcccugcucaacuggcugaaguccaagaacccgggggaggcccuggaucgagccauugaggaguucacccucuccugugcuggcuauuguguggccacauaugugcugggcauuggcgaucggcacagcgacaacaucaugauccgagagagugggcagcuguuccacauugauuuuggccacuuucuggggaauuucaagaccaaguuuggaaucaaccgcgagcgugucccauucauccucaccuacgacuuuguccaugugauucagcaggggaagacuaauaauagugagaaauuugaacgguuccggggcuacugugaaagggccuacaccauccugcggcgccacgggcuucucuuccuccaccucuuugcccugaugcgggcggcaggccugccugagcucagcugcuccaaagacauccaguaucucaaggacucccuggcacuggggaaaacagaggaggaggcacugaagcacuuccgagugaaguuuaacgaagcccuccgugagagcuggaaaaccaaagugaacuggcuggcccacaacguguccaaagacaacaggcaguaguggcuccucccagcccugggcccaagaggaggcggcugcgggucguggggaccaagcacauugguccuaaaggggcugaagagccugaacugcaccuaacgggaaagaaccgacauggcugccuuuuguuuacacugguuauuuauuuaugacuugaaauaguuuaaggagcuaaacagccauaaacggaaacgccuccuucaugcagcggcggugcugggccccccgaggcugcaccuggcucucggcugaggauugucaccccaagucuuccagcugguggaucugggcccagcaaagacuguucuccucccgagggaaccuucuucccaggccucccgccagacugccuggguccuggcgccuggcggucaccuggugccuacuguccgacaggaugccuugauccucgugcgacccacccuguguauccucccuagacugaguucuggcagcuccccgaggcagccgggguacccucuagauucagggaugcuugcucuccacuuuucaagugggucuuggguacgagaauucccucaucuuucucuacuguaaagugauuuuguuugcagguaagaaaauaauagaugacucaccacaccucuacggcuggggagaucaggcccagccccauaaaggagaaucuacgcugguccucaggacguguuaaagagaucugggccucauguagcucaccccggucacgcaugaaggcaaaagcaggucagaagcgaauacucugccauuaucucaaaaaucuuuuuuuuuuuuuugagauggggucuuccucuguugcccaggcuggagugcaguggugcaaucuuggcucacuguaaccuccgccucccagguucaagugauucuucugccucagccuccugaguagcugggauuacaggugugcaccaccguacccagcuaauuuuuguauuuuaguagagacggggguuucaccauguuggcugggcuggucucgaacuccugaccucaggugauccacccgccugagccucccaaagugcugggauuacaggcaugagccaccgcgcccggcccacucugccauugucuaagccaccucugaaagcagguuuuaacaaaaggaugaggccagaacucuuccagaaccaucaccuuugggaaccugcugugagagugcugagguaccagaagugugagaacgagggggcgugcugggaucuuucucucugacuauacuuaguuugaaauggugcaggcuuagucuuaagccuccaaaggccuggauuugagcagcuuuagaaaugcagguucuagggcuucucccagccuucagaagccaacuaacucugcagauggggcuaggacugugggcuuuuagcagcccacaggugauccuaacauaucaggccauggacucaggaccugcccggugaugcuguugauuucucaaaggucuuccaaaacucaacagagccagaaguagccgcccgcucagcggcucaggugccagcucuguucugauucaccagggguccgucaguagucauugccacccgcggggcaccucccuggccacacgccuguucccagcaagugcugaaacucacuagaccgucugccuguuucgaaauggggaaagccgugcgugcgcguuauuuauuuaagugcgccugugugcgcgggugugggagcacacuuugcaaagccacagcguuucugguuuuggguguacagucuugugugccuggcgagaagaauauuuucuauuuuuuuaagucauuucauguuucugucuggggaaggcaaguuaguuaaguaucacugauguggguugagaccagcacucugugaaaccuugaaaugagaaguaaaggcagaugaaaagaaagaaaaagccuuuuuauguucuuuuauguucucggcucaaaaagaaacaagggaguguagguuuaaaaccaaaacaggagagaagacaaaccccgcuccggcuggaguuaguuagaaccagaacuuuauuguagcggauacacuuucugaccuaucaugaguauacacaucugcgaagggaaaccgcgcggcgaca

SEQ ID NO: 33675 - RNA, 19 nt, Artificial Sequence
  Description of Artificial Sequence: Synthetic oligonucleotide
cagucgcuccgagcggccg

SEQ ID NO: 33676 - RNA, 19 nt, Artificial Sequence
  Description of Artificial Sequence: Synthetic oligonucleotide
gcgagcagagccgcccagc

SEQ ID NO: 33677 - RNA, 19 nt, Artificial Sequence
  Description of Artificial Sequence: Synthetic oligonucleotide
cccugucagcugcgccggg

SEQ ID NO: 33678 - RNA, 19 nt, Artificial Sequence
  Description of Artificial Sequence: Synthetic oligonucleotide
gacgauaaggagucaggcc

SEQ ID NO: 33679 - RNA, 19 nt, Artificial Sequence
  Description of Artificial Sequence: Synthetic oligonucleotide
cagggcgggaugacacuca

SEQ ID NO: 33680 - RNA, 19 nt, Artificial Sequence
  Description of Artificial Sequence: Synthetic oligonucleotide
auugauucuaaagcaucuu

SEQ ID NO: 33681 - RNA, 19 nt, Artificial Sequence
  Description of Artificial Sequence: Synthetic oligonucleotide
uuaaucugccaggcggagg

SEQ ID NO: 33682 - RNA, 19 nt, Artificial Sequence
  Description of Artificial Sequence: Synthetic oligonucleotide
ggggcuuugcuggucuuuc

SEQ ID NO: 33683 - RNA, 19 nt, Artificial Sequence
  Description of Artificial Sequence: Synthetic oligonucleotide
cuuggacuauuccagagag

SEQ ID NO: 33684 - RNA, 19 nt, Artificial Sequence
  Description of Artificial Sequence: Synthetic oligonucleotide
ggacaacugucaucuggga

SEQ ID NO: 33685 - RNA, 19 nt, Artificial Sequence
  Description of Artificial Sequence: Synthetic oligonucleotide
aaguaacaacgcaggaugc

SEQ ID NO: 33686 - RNA, 19 nt, Artificial Sequence
  Description of Artificial Sequence: Synthetic oligonucleotide
cccccugggguggacugcc

SEQ ID NO: 33687 - RNA, 19 nt, Artificial Sequence
  Description of Artificial Sequence: Synthetic oligonucleotide
cccauggaauucuggacca

SEQ ID NO: 33688 - RNA, 19 nt, Artificial Sequence
  Description of Artificial Sequence: Synthetic oligonucleotide
aaggaggagaaucagagcg

SEQ ID NO: 33689 - RNA, 19 nt, Artificial Sequence
  Description of Artificial Sequence: Synthetic oligonucleotide
guugugguugacuuccugc

SEQ ID NO: 33690 - RNA, 19 nt, Artificial Sequence
  Description of Artificial Sequence: Synthetic oligonucleotide
cugcccacaggggucuacc

SEQ ID NO: 33691 - RNA, 19 nt, Artificial Sequence
  Description of Artificial Sequence: Synthetic oligonucleotide
cugaacuucccuguguccc

SEQ ID NO: 33692 - RNA, 19 nt, Artificial Sequence
  Description of Artificial Sequence: Synthetic oligonucleotide
cgcaaugccaaccucagca

SEQ ID NO: 33693 - RNA, 19 nt, Artificial Sequence
  Description of Artificial Sequence: Synthetic oligonucleotide
accaucaagcagcugcugu

SEQ ID NO: 33694 - RNA, 19 nt, Artificial Sequence
  Description of Artificial Sequence: Synthetic oligonucleotide
uggcaccgcgcccaguaug

SEQ ID NO: 33695 - RNA, 19 nt, Artificial Sequence
  Description of Artificial Sequence: Synthetic oligonucleotide
gagccgcucuuccacaugc

SEQ ID NO: 33696 - RNA, 19 nt, Artificial Sequence
  Description of Artificial Sequence: Synthetic oligonucleotide
cucaguggccccgaggccu

SEQ ID NO: 33697 - RNA, 19 nt, Artificial Sequence
  Description of Artificial Sequence: Synthetic oligonucleotide
uauguguucaccugcauca

SEQ ID NO: 33698 - RNA, 19 nt, Artificial Sequence
  Description of Artificial Sequence: Synthetic oligonucleotide
aaccagacagcggagcagc

SEQ ID NO: 33699 - RNA, 19 nt, Artificial Sequence
  Description of Artificial Sequence: Synthetic oligonucleotide
caagagcuggaggacgagc

SEQ ID NO: 33700 - RNA, 19 nt, Artificial Sequence
  Description of Artificial Sequence: Synthetic oligonucleotide
caacggcgucugugugacg

SEQ ID NO: 33701 - RNA, 19 nt, Artificial Sequence
  Description of Artificial Sequence: Synthetic oligonucleotide
gugcagcccuuccugcccg

SEQ ID NO: 33702 - RNA, 19 nt, Artificial Sequence
  Description of Artificial Sequence: Synthetic oligonucleotide
guccugcgccugguggccc

SEQ ID NO: 33703 - RNA, 19 nt, Artificial Sequence
  Description of Artificial Sequence: Synthetic oligonucleotide
cgugagggcgaccgcguga

SEQ ID NO: 33704 - RNA, 19 nt, Artificial Sequence
  Description of Artificial Sequence: Synthetic oligonucleotide
aagaagcucaucaacucac

SEQ ID NO: 33705 - RNA, 19 nt, Artificial Sequence
  Description of Artificial Sequence: Synthetic oligonucleotide
cagaucagccuccucaucg

SEQ ID NO: 33706 - RNA, 19 nt, Artificial Sequence
  Description of Artificial Sequence: Synthetic oligonucleotide
ggcaaaggccuccacgagu

SEQ ID NO: 33707 - RNA, 19 nt, Artificial Sequence
  Description of Artificial Sequence: Synthetic oligonucleotide
uuugacuccuugugcgacc

SEQ ID NO: 33708 - RNA, 19 nt, Artificial Sequence
  Description of Artificial Sequence: Synthetic oligonucleotide
ccagaagugaacgacuuuc

SEQ ID NO: 33709 - RNA, 19 nt, Artificial Sequence
  Description of Artificial Sequence: Synthetic oligonucleotide
cgcgccaagaugugccaau

SEQ ID NO: 33710 - RNA, 19 nt, Artificial Sequence
  Description of Artificial Sequence: Synthetic oligonucleotide
uucugcgaggaggcggccg

SEQ ID NO: 33711 - RNA, 19 nt, Artificial Sequence
  Description of Artificial Sequence: Synthetic oligonucleotide
gcccgccggcagcagcugg

SEQ ID NO: 33712 - RNA, 19 nt, Artificial Sequence
  Description of Artificial Sequence: Synthetic oligonucleotide
ggcugggaggccuggcugc

SEQ ID NO: 33713 - RNA, 19 nt, Artificial Sequence
  Description of Artificial Sequence: Synthetic oligonucleotide
caguacaguuucccccugc

SEQ ID NO: 33714 - RNA, 19 nt, Artificial Sequence
  Description of Artificial Sequence: Synthetic oligonucleotide
cagcuggagcccucggcuc

SEQ ID NO: 33715 - RNA, 19 nt, Artificial Sequence
  Description of Artificial Sequence: Synthetic oligonucleotide
caaaccugggggccuggua

SEQ ID NO: 33716 - RNA, 19 nt, Artificial Sequence
  Description of Artificial Sequence: Synthetic oligonucleotide
acccugcggcucccgaacc

SEQ ID NO: 33717 - RNA, 19 nt, Artificial Sequence
  Description of Artificial Sequence: Synthetic oligonucleotide
cgggcccuucuggucaacg

SEQ ID NO: 33718 - RNA, 19 nt, Artificial Sequence
  Description of Artificial Sequence: Synthetic oligonucleotide
guuaaguuugagggcagcg

SEQ ID NO: 33719 - RNA, 19 nt, Artificial Sequence
  Description of Artificial Sequence: Synthetic oligonucleotide
gaggagagcuucaccuucc

SEQ ID NO: 33720 - RNA, 19 nt, Artificial Sequence
  Description of Artificial Sequence: Synthetic oligonucleotide
cagguguccaccaaggacg

SEQ ID NO: 33721 - RNA, 19 nt, Artificial Sequence
  Description of Artificial Sequence: Synthetic oligonucleotide
gugccgcuggcgcugaugg

SEQ ID NO: 33722 - RNA, 19 nt, Artificial Sequence
  Description of Artificial Sequence: Synthetic oligonucleotide
gccugugcccugcggaaga

SEQ ID NO: 33723 - RNA, 19 nt, Artificial Sequence
  Description of Artificial Sequence: Synthetic oligonucleotide
aaggccacaguguuccggc

SEQ ID NO: 33724 - RNA, 19 nt, Artificial Sequence
  Description of Artificial Sequence: Synthetic oligonucleotide
cagccgcugguggagcagc

SEQ ID NO: 33725 - RNA, 19 nt, Artificial Sequence
  Description of Artificial Sequence: Synthetic oligonucleotide
ccggaagacuacacgcugc

SEQ ID NO: 33726 - RNA, 19 nt, Artificial Sequence
  Description of Artificial Sequence: Synthetic oligonucleotide
caggugaacggcaggcaug

SEQ ID NO: 33727 - RNA, 19 nt, Artificial Sequence
  Description of Artificial Sequence: Synthetic oligonucleotide
gaguaccuguauggcaacu

SEQ ID NO: 33728 - RNA, 19 nt, Artificial Sequence
  Description of Artificial Sequence: Synthetic oligonucleotide
uacccgcucugccaguucc

SEQ ID NO: 33729 - RNA, 19 nt, Artificial Sequence
  Description of Artificial Sequence: Synthetic oligonucleotide
caguacaucugcagcugcc

SEQ ID NO: 33730 - RNA, 19 nt, Artificial Sequence
  Description of Artificial Sequence: Synthetic oligonucleotide
cugcacaguggguugaccc

SEQ ID NO: 33731 - RNA, 19 nt, Artificial Sequence
  Description of Artificial Sequence: Synthetic oligonucleotide
ccucaccugaccauggucc

SEQ ID NO: 33732 - RNA, 19 nt, Artificial Sequence
  Description of Artificial Sequence: Synthetic oligonucleotide
cauuccuccuccauccucg

SEQ ID NO: 33733 - RNA, 19 nt, Artificial Sequence
  Description of Artificial Sequence: Synthetic oligonucleotide
gccaugcgggaugagcaga

SEQ ID NO: 33734 - RNA, 19 nt, Artificial Sequence
  Description of Artificial Sequence: Synthetic oligonucleotide
agcaacccugccccccagg

SEQ ID NO: 33735 - RNA, 19 nt, Artificial Sequence
  Description of Artificial Sequence: Synthetic oligonucleotide
guccagaaaccgcgugcca

SEQ ID NO: 33736 - RNA, 19 nt, Artificial Sequence
  Description of Artificial Sequence: Synthetic oligonucleotide
aaaccaccucccauuccug

SEQ ID NO: 33737 - RNA, 19 nt, Artificial Sequence
  Description of Artificial Sequence: Synthetic oligonucleotide
gcgaagaagccuuccucug

SEQ ID NO: 33738 - RNA, 19 nt, Artificial Sequence
  Description of Artificial Sequence: Synthetic oligonucleotide
gugucccuguggucccugg

SEQ ID NO: 33739 - RNA, 19 nt, Artificial Sequence
  Description of Artificial Sequence: Synthetic oligonucleotide
gagcagccguuccgcaucg

SEQ ID NO: 33740 - RNA, 19 nt, Artificial Sequence
  Description of Artificial Sequence: Synthetic oligonucleotide
gagcucauccagggcagca

SEQ ID NO: 33741 - RNA, 19 nt, Artificial Sequence
  Description of Artificial Sequence: Synthetic oligonucleotide
aaagugaacgccgacgagc

SEQ ID NO: 33742 - RNA, 19 nt, Artificial Sequence
  Description of Artificial Sequence: Synthetic oligonucleotide
cggaugaagcugguggugc

SEQ ID NO: 33743 - RNA, 19 nt, Artificial Sequence
  Description of Artificial Sequence: Synthetic oligonucleotide
caggccgggcuuuuccacg

SEQ ID NO: 33744 - RNA, 19 nt, Artificial Sequence
  Description of Artificial Sequence: Synthetic oligonucleotide
ggcaacgagaugcugugca

SEQ ID NO: 33745 - RNA, 19 nt, Artificial Sequence
  Description of Artificial Sequence: Synthetic oligonucleotide
aagacgguguccagcucgg

SEQ ID NO: 33746 - RNA, 19 nt, Artificial Sequence
  Description of Artificial Sequence: Synthetic oligonucleotide
gaggugagcgugugcucgg

SEQ ID NO: 33747 - RNA, 19 nt, Artificial Sequence
  Description of Artificial Sequence: Synthetic oligonucleotide
gagcccguguggaagcagc

SEQ ID NO: 33748 - RNA, 19 nt, Artificial Sequence
  Description of Artificial Sequence: Synthetic oligonucleotide
cggcuggaguucgacauca

SEQ ID NO: 33749 - RNA, 19 nt, Artificial Sequence
  Description of Artificial Sequence: Synthetic oligonucleotide
aacaucugcgaccugcccc

SEQ ID NO: 33750 - RNA, 19 nt, Artificial Sequence
  Description of Artificial Sequence: Synthetic oligonucleotide
cgcauggcccgucucugcu

SEQ ID NO: 33751 - RNA, 19 nt, Artificial Sequence
  Description of Artificial Sequence: Synthetic oligonucleotide
uuugcgcuguacgccguga

SEQ ID NO: 33752 - RNA, 19 nt, Artificial Sequence
  Description of Artificial Sequence: Synthetic oligonucleotide
aucgagaaagccaagaagg

SEQ ID NO: 33753 - RNA, 19 nt, Artificial Sequence
  Description of Artificial Sequence: Synthetic oligonucleotide
gcucgcuccaccaagaaga

SEQ ID NO: 33754 - RNA, 19 nt, Artificial Sequence
  Description of Artificial Sequence: Synthetic oligonucleotide
aaguccaagaaggcggacu

SEQ ID NO: 33755 - RNA, 19 nt, Artificial Sequence
  Description of Artificial Sequence: Synthetic oligonucleotide
ugccccauugccugggcca

SEQ ID NO: 33756 - RNA, 19 nt, Artificial Sequence
  Description of Artificial Sequence: Synthetic oligonucleotide
aaccucaugcuguuugacu

SEQ ID NO: 33757 - RNA, 19 nt, Artificial Sequence
  Description of Artificial Sequence: Synthetic oligonucleotide
uacaaggaccagcuuaaga

SEQ ID NO: 33758 - RNA, 19 nt, Artificial Sequence
  Description of Artificial Sequence: Synthetic oligonucleotide
accggggaacgcugccucu

SEQ ID NO: 33759 - RNA, 19 nt, Artificial Sequence
  Description of Artificial Sequence: Synthetic oligonucleotide
uacauguggcccuccgucc

SEQ ID NO: 33760 - RNA, 19 nt, Artificial Sequence
  Description of Artificial Sequence: Synthetic oligonucleotide
ccagaugagaagggcgagc

SEQ ID NO: 33761 - RNA, 19 nt, Artificial Sequence
  Description of Artificial Sequence: Synthetic oligonucleotide
cugcugaaccccacgggca

SEQ ID NO: 33762 - RNA, 19 nt, Artificial Sequence
  Description of Artificial Sequence: Synthetic oligonucleotide
acugugcgcaguaacccca

SEQ ID NO: 33763 - RNA, 19 nt, Artificial Sequence
  Description of Artificial Sequence: Synthetic oligonucleotide
aacacggauagcgccgcug

SEQ ID NO: 33764 - RNA, 19 nt, Artificial Sequence
  Description of Artificial Sequence: Synthetic oligonucleotide
gcccugcucaucugccugc

SEQ ID NO: 33765 - RNA, 19 nt, Artificial Sequence
  Description of Artificial Sequence: Synthetic oligonucleotide
cccgagguggccccgcacc

SEQ ID NO: 33766 - RNA, 19 nt, Artificial Sequence
  Description of Artificial Sequence: Synthetic oligonucleotide
cccguguacuaccccgccc

SEQ ID NO: 33767 - RNA, 19 nt, Artificial Sequence
  Description of Artificial Sequence: Synthetic oligonucleotide
cuggagaagaucuuggagc

SEQ ID NO: 33768 - RNA, 19 nt, Artificial Sequence
  Description of Artificial Sequence: Synthetic oligonucleotide
cuggggcgacacagcgagu

SEQ ID NO: 33769 - RNA, 19 nt, Artificial Sequence
  Description of Artificial Sequence: Synthetic oligonucleotide
ugugugcaugucaccgagg

SEQ ID NO: 33770 - RNA, 19 nt, Artificial Sequence
  Description of Artificial Sequence: Synthetic oligonucleotide
gaggagcagcugcagcugc

SEQ ID NO: 33771 - RNA, 19 nt, Artificial Sequence
  Description of Artificial Sequence: Synthetic oligonucleotide
cgggaaauccuggagcggc

SEQ ID NO: 33772 - RNA, 19 nt, Artificial Sequence
  Description of Artificial Sequence: Synthetic oligonucleotide
cgggggucuggggagcugu

SEQ ID NO: 33773 - RNA, 19 nt, Artificial Sequence
  Description of Artificial Sequence: Synthetic oligonucleotide
uaugagcacgagaaggacc

SEQ ID NO: 33774 - RNA, 19 nt, Artificial Sequence
  Description of Artificial Sequence: Synthetic oligonucleotide
cugguguggaagcugcggc

SEQ ID NO: 33775 - RNA, 19 nt, Artificial Sequence
  Description of Artificial Sequence: Synthetic oligonucleotide
caugaaguccaggagcacu

SEQ ID NO: 33776 - RNA, 19 nt, Artificial Sequence
  Description of Artificial Sequence: Synthetic oligonucleotide
uucccggaggcgcuagccc

SEQ ID NO: 33777 - RNA, 19 nt, Artificial Sequence
  Description of Artificial Sequence: Synthetic oligonucleotide
cggcugcugcuggucacca

SEQ ID NO: 33778 - RNA, 19 nt, Artificial Sequence
  Description of Artificial Sequence: Synthetic oligonucleotide
aaguggaacaagcaugagg

SEQ ID NO: 33779 - RNA, 19 nt, Artificial Sequence
  Description of Artificial Sequence: Synthetic oligonucleotide
gauguggcccagaugcucu

SEQ ID NO: 33780 - RNA, 19 nt, Artificial Sequence
  Description of Artificial Sequence: Synthetic oligonucleotide
uaccugcugugcuccuggc

SEQ ID NO: 33781 - RNA, 19 nt, Artificial Sequence
  Description of Artificial Sequence: Synthetic oligonucleotide
ccggagcugcccguccuga

SEQ ID NO: 33782 - RNA, 19 nt, Artificial Sequence
  Description of Artificial Sequence: Synthetic oligonucleotide
agcgcccuggagcugcuag

SEQ ID NO: 33783 - RNA, 19 nt, Artificial Sequence
  Description of Artificial Sequence: Synthetic oligonucleotide
gacuucagcuuccccgauu

SEQ ID NO: 33784 - RNA, 19 nt, Artificial Sequence
  Description of Artificial Sequence: Synthetic oligonucleotide
ugccacguaggcuccuucg

SEQ ID NO: 33785 - RNA, 19 nt, Artificial Sequence
  Description of Artificial Sequence: Synthetic oligonucleotide
gccaucaagucgcugcgga

SEQ ID NO: 33786 - RNA, 19 nt, Artificial Sequence
  Description of Artificial Sequence: Synthetic oligonucleotide
aaacugacggacgaugagc

SEQ ID NO: 33787 - RNA, 19 nt, Artificial Sequence
  Description of Artificial Sequence: Synthetic oligonucleotide
cuguuccaguaccugcugc

SEQ ID NO: 33788 - RNA, 19 nt, Artificial Sequence
  Description of Artificial Sequence: Synthetic oligonucleotide
cagcuggugcaggugcuca

SEQ ID NO: 33789 - RNA, 19 nt, Artificial Sequence
  Description of Artificial Sequence: Synthetic oligonucleotide
aaguacgaguccuaccugg

SEQ ID NO: 33790 - RNA, 19 nt, Artificial Sequence
  Description of Artificial Sequence: Synthetic oligonucleotide
gacugcgagcugaccaaau

SEQ ID NO: 33791 - RNA, 19 nt, Artificial Sequence
  Description of Artificial Sequence: Synthetic oligonucleotide
uuccugcuggaccgggccc

SEQ ID NO: 33792 - RNA, 19 nt, Artificial Sequence
  Description of Artificial Sequence: Synthetic oligonucleotide
cuggccaaccgcaagaucg

SEQ ID NO: 33793 - RNA, 19 nt, Artificial Sequence
  Description of Artificial Sequence: Synthetic oligonucleotide
ggccacuuccuuuucuggc

SEQ ID NO: 33794 - RNA, 19 nt, Artificial Sequence
  Description of Artificial Sequence: Synthetic oligonucleotide
caccuccgcuccgagaugc

SEQ ID NO: 33795 - RNA, 19 nt, Artificial Sequence
  Description of Artificial Sequence: Synthetic oligonucleotide
cacgugccgucgguggccc

SEQ ID NO: 33796 - RNA, 19 nt, Artificial Sequence
  Description of Artificial Sequence: Synthetic oligonucleotide
cugcgcuucggccucaucc

SEQ ID NO: 33797 - RNA, 19 nt, Artificial Sequence
  Description of Artificial Sequence: Synthetic oligonucleotide
cuggaggccuacugcaggg

SEQ ID NO: 33798 - RNA, 19 nt, Artificial Sequence
  Description of Artificial Sequence: Synthetic oligonucleotide
ggcagcacccaccacauga

SEQ ID NO: 33799 - RNA, 19 nt, Artificial Sequence
  Description of Artificial Sequence: Synthetic oligonucleotide
aaggugcugaugaagcagg

SEQ ID NO: 33800 - RNA, 19 nt, Artificial Sequence
  Description of Artificial Sequence: Synthetic oligonucleotide
ggggaagcacugagcaaac

SEQ ID NO: 33801 - RNA, 19 nt, Artificial Sequence
  Description of Artificial Sequence: Synthetic oligonucleotide
cugaaggcccugaaugacu

SEQ ID NO: 33802 - RNA, 19 nt, Artificial Sequence
  Description of Artificial Sequence: Synthetic oligonucleotide
uucgucaagcugagcucuc

SEQ ID NO: 33803 - RNA, 19 nt, Artificial Sequence
  Description of Artificial Sequence: Synthetic oligonucleotide
cagaagacccccaagcccc

SEQ ID NO: 33804 - RNA, 19 nt, Artificial Sequence
  Description of Artificial Sequence: Synthetic oligonucleotide
cagaccaaggagcugaugc

SEQ ID NO: 33805 - RNA, 19 nt, Artificial Sequence
  Description of Artificial Sequence: Synthetic oligonucleotide
cacuugugcaugcggcagg

SEQ ID NO: 33806 - RNA, 19 nt, Artificial Sequence
  Description of Artificial Sequence: Synthetic oligonucleotide
gaggccuaccuagaggccc

SEQ ID NO: 33807 - RNA, 19 nt, Artificial Sequence
  Description of Artificial Sequence: Synthetic oligonucleotide
cucucccaccugcaguccc

SEQ ID NO: 33808 - RNA, 19 nt, Artificial Sequence
  Description of Artificial Sequence: Synthetic oligonucleotide
ccacucgaccccagcaccc

SEQ ID NO: 33809 - RNA, 19 nt, Artificial Sequence
  Description of Artificial Sequence: Synthetic oligonucleotide
cugcuggcugaagucugcg

SEQ ID NO: 33810 - RNA, 19 nt, Artificial Sequence
  Description of Artificial Sequence: Synthetic oligonucleotide
guggagcagugcaccuuca

SEQ ID NO: 33811 - RNA, 19 nt, Artificial Sequence
  Description of Artificial Sequence: Synthetic oligonucleotide
auggacuccaagaugaagc

SEQ ID NO: 33812 - RNA, 19 nt, Artificial Sequence
  Description of Artificial Sequence: Synthetic oligonucleotide
ccccuguggaucauguaca

SEQ ID NO: 33813 - RNA, 19 nt, Artificial Sequence
  Description of Artificial Sequence: Synthetic oligonucleotide
agcaacgaggaggcaggca

SEQ ID NO: 33814 - RNA, 19 nt, Artificial Sequence
  Description of Artificial Sequence: Synthetic oligonucleotide
agcggcggcagcgugggca

SEQ ID NO: 33815 - RNA, 19 nt, Artificial Sequence
  Description of Artificial Sequence: Synthetic oligonucleotide
aucaucuuuaagaacgggg

SEQ ID NO: 33816 - RNA, 19 nt, Artificial Sequence
  Description of Artificial Sequence: Synthetic oligonucleotide
gaugaccuccggcaggaca

SEQ ID NO: 33817 - RNA, 19 nt, Artificial Sequence
  Description of Artificial Sequence: Synthetic oligonucleotide
augcugacccugcagauga

SEQ ID NO: 33818 - RNA, 19 nt, Artificial Sequence
  Description of Artificial Sequence: Synthetic oligonucleotide
auccagcucauggacgucc

SEQ ID NO: 33819 - RNA, 19 nt, Artificial Sequence
  Description of Artificial Sequence: Synthetic oligonucleotide
cuguggaagcaggaggggc

SEQ ID NO: 33820 - RNA, 19 nt, Artificial Sequence
  Description of Artificial Sequence: Synthetic oligonucleotide
cuggaccugaggaugaccc

SEQ ID NO: 33821 - RNA, 19 nt, Artificial Sequence
  Description of Artificial Sequence: Synthetic oligonucleotide
cccuauggcugccucccca

SEQ ID NO: 33822 - RNA, 19 nt, Artificial Sequence
  Description of Artificial Sequence: Synthetic oligonucleotide
accggggaccgcacaggcc

SEQ ID NO: 33823 - RNA, 19 nt, Artificial Sequence
  Description of Artificial Sequence: Synthetic oligonucleotide
cucauugaggugguacucc

SEQ ID NO: 33824 - RNA, 19 nt, Artificial Sequence
  Description of Artificial Sequence: Synthetic oligonucleotide
cguucagacaccaucgcca

SEQ ID NO: 33825 - RNA, 19 nt, Artificial Sequence
  Description of Artificial Sequence: Synthetic oligonucleotide
aacauccaacucaacaaga

SEQ ID NO: 33826 - RNA, 19 nt, Artificial Sequence
  Description of Artificial Sequence: Synthetic oligonucleotide
agcaacauggcagccacag

SEQ ID NO: 33827 - RNA, 19 nt, Artificial Sequence
  Description of Artificial Sequence: Synthetic oligonucleotide
gccgccuucaacaaggaug

SEQ ID NO: 33828 - RNA, 19 nt, Artificial Sequence
  Description of Artificial Sequence: Synthetic oligonucleotide
gcccugcucaacuggcuga

SEQ ID NO: 33829 - RNA, 19 nt, Artificial Sequence
  Description of Artificial Sequence: Synthetic oligonucleotide
aaguccaagaacccggggg

SEQ ID NO: 33830 - RNA, 19 nt, Artificial Sequence
  Description of Artificial Sequence: Synthetic oligonucleotide
gaggcccuggaucgagcca

SEQ ID NO: 33831 - RNA, 19 nt, Artificial Sequence
  Description of Artificial Sequence: Synthetic oligonucleotide
auugaggaguucacccucu

SEQ ID NO: 33832 - RNA, 19 nt, Artificial Sequence
  Description of Artificial Sequence: Synthetic oligonucleotide
uccugugcuggcuauugug

SEQ ID NO: 33833 - RNA, 19 nt, Artificial Sequence
  Description of Artificial Sequence: Synthetic oligonucleotide
guggccacauaugugcugg

SEQ ID NO: 33834 - RNA, 19 nt, Artificial Sequence
  Description of Artificial Sequence: Synthetic oligonucleotide
ggcauuggcgaucggcaca

SEQ ID NO: 33835 - RNA, 19 nt, Artificial Sequence
  Description of Artificial Sequence: Synthetic oligonucleotide
agcgacaacaucaugaucc

SEQ ID NO: 33836 - RNA, 19 nt, Artificial Sequence
  Description of Artificial Sequence: Synthetic oligonucleotide
cgagagagugggcagcugu

SEQ ID NO: 33837 - RNA, 19 nt, Artificial Sequence
  Description of Artificial Sequence: Synthetic oligonucleotide
uuccacauugauuuuggcc

SEQ ID NO: 33838 - RNA, 19 nt, Artificial Sequence
  Description of Artificial Sequence: Synthetic oligonucleotide
cacuuucuggggaauuuca

SEQ ID NO: 33839 - RNA, 19 nt, Artificial Sequence
  Description of Artificial Sequence: Synthetic oligonucleotide
aagaccaaguuuggaauca

SEQ ID NO: 33840 - RNA, 19 nt, Artificial Sequence
  Description of Artificial Sequence: Synthetic oligonucleotide
aaccgcgagcgugucccau

SEQ ID NO: 33841 - RNA, 19 nt, Artificial Sequence
  Description of Artificial Sequence: Synthetic oligonucleotide
uucauccucaccuaugacu

SEQ ID NO: 33842 - RNA, 19 nt, Artificial Sequence
  Description of Artificial Sequence: Synthetic oligonucleotide
uuuguccaugugauucagc

SEQ ID NO: 33843 - RNA, 19 nt, Artificial Sequence
  Description of Artificial Sequence: Synthetic oligonucleotide
caggggaagacuaauaaua

SEQ ID NO: 33844 - RNA, 19 nt, Artificial Sequence
  Description of Artificial Sequence: Synthetic oligonucleotide
agugagaaauuugaacggu

SEQ ID NO: 33845 - RNA, 19 nt, Artificial Sequence
  Description of Artificial Sequence: Synthetic oligonucleotide
uuccggggcuacugugaaa

SEQ ID NO: 33846 - RNA, 19 nt, Artificial Sequence
  Description of Artificial Sequence: Synthetic oligonucleotide
agggccuacaccauccugc

SEQ ID NO: 33847 - RNA, 19 nt, Artificial Sequence
  Description of Artificial Sequence: Synthetic oligonucleotide
cggcgccacgggcuucucu

SEQ ID NO: 33848 - RNA, 19 nt, Artificial Sequence
  Description of Artificial Sequence: Synthetic oligonucleotide
uuccuccaccucuuugccc

SEQ ID NO: 33849 - RNA, 19 nt, Artificial Sequence
  Description of Artificial Sequence: Synthetic oligonucleotide
cugaugcgggcggcaggcc

SEQ ID NO: 33850 - RNA, 19 nt, Artificial Sequence
  Description of Artificial Sequence: Synthetic oligonucleotide
cugccugagcucagcugcu

SEQ ID NO: 33851 - RNA, 19 nt, Artificial Sequence
  Description of Artificial Sequence: Synthetic oligonucleotide
uccaaagacauccaguauc

SEQ ID NO: 33852 - RNA, 19 nt, Artificial Sequence
  Description of Artificial Sequence: Synthetic oligonucleotide
cucaaggacucccuggcac

SEQ ID NO: 33853 - RNA, 19 nt, Artificial Sequence
  Description of Artificial Sequence: Synthetic oligonucleotide
cuggggaaaacagaggagg

SEQ ID NO: 33854 - RNA, 19 nt, Artificial Sequence
  Description of Artificial Sequence: Synthetic oligonucleotide
gaggcacugaagcacuucc

SEQ ID NO: 33855 - RNA, 19 nt, Artificial Sequence
  Description of Artificial Sequence: Synthetic oligonucleotide
cgagugaaguuuaacgaag

SEQ ID NO: 33856 - RNA, 19 nt, Artificial Sequence
  Description of Artificial Sequence: Synthetic oligonucleotide
gcccuccgugagagcugga

SEQ ID NO: 33857 - RNA, 19 nt, Artificial Sequence
  Description of Artificial Sequence: Synthetic oligonucleotide
aaaaccaaagugaacuggc

SEQ ID NO: 33858 - RNA, 19 nt, Artificial Sequence
  Description of Artificial Sequence: Synthetic oligonucleotide
cuggcccacaacgugucca

SEQ ID NO: 33859 - RNA, 19 nt, Artificial Sequence
  Description of Artificial Sequence: Synthetic oligonucleotide
aaagacaacaggcaguagu

SEQ ID NO: 33860 - RNA, 19 nt, Artificial Sequence
  Description of Artificial Sequence: Synthetic oligonucleotide
uggcuccucccagcccugg

SEQ ID NO: 33861 - RNA, 19 nt, Artificial Sequence
  Description of Artificial Sequence: Synthetic oligonucleotide
ggcccaagaggaggcggcu

SEQ ID NO: 33862 - RNA, 19 nt, Artificial Sequence
  Description of Artificial Sequence: Synthetic oligonucleotide
ugcgggucguggggaccaa

SEQ ID NO: 33863 - RNA, 19 nt, Artificial Sequence
  Description of Artificial Sequence: Synthetic oligonucleotide
agcacauugguccuaaagg

SEQ ID NO: 33864 - RNA, 19 nt, Artificial Sequence
  Description of Artificial Sequence: Synthetic oligonucleotide
gggcugaagagccugaacu

SEQ ID NO: 33865 - RNA, 19 nt, Artificial Sequence
  Description of Artificial Sequence: Synthetic oligonucleotide
ugcaccuaacgggaaagaa

SEQ ID NO: 33866 - RNA, 19 nt, Artificial Sequence
  Description of Artificial Sequence: Synthetic oligonucleotide
accgacauggcugccuuuu

SEQ ID NO: 33867 - RNA, 19 nt, Artificial Sequence
  Description of Artificial Sequence: Synthetic oligonucleotide
uguuuacacugguuauuua

SEQ ID NO: 33868 - RNA, 19 nt, Artificial Sequence
  Description of Artificial Sequence: Synthetic oligonucleotide
auuuaugacuugaaauagu

SEQ ID NO: 33869 - RNA, 19 nt, Artificial Sequence
  Description of Artificial Sequence: Synthetic oligonucleotide
uuuaaggagcuaaacagcc

SEQ ID NO: 33870 - RNA, 19 nt, Artificial Sequence
  Description of Artificial Sequence: Synthetic oligonucleotide
cauaaacggaaacgccucc

SEQ ID NO: 33871 - RNA, 19 nt, Artificial Sequence
  Description of Artificial Sequence: Synthetic oligonucleotide
cuucauucagcggcggugc

SEQ ID NO: 33872 - RNA, 19 nt, Artificial Sequence
  Description of Artificial Sequence: Synthetic oligonucleotide
cugggccccccgaggcugc

SEQ ID NO: 33873 - RNA, 19 nt, Artificial Sequence
  Description of Artificial Sequence: Synthetic oligonucleotide
caccuggcucucggcugag

SEQ ID NO: 33874 - RNA, 19 nt, Artificial Sequence
  Description of Artificial Sequence: Synthetic oligonucleotide
ggauugucaccccaagucu

SEQ ID NO: 33875 - RNA, 19 nt, Artificial Sequence
  Description of Artificial Sequence: Synthetic oligonucleotide
uuccagcugguggaucugg

SEQ ID NO: 33876 - RNA, 19 nt, Artificial Sequence
  Description of Artificial Sequence: Synthetic oligonucleotide
ggcccagcaaagacuguuc

SEQ ID NO: 33877 - RNA, 19 nt, Artificial Sequence
  Description of Artificial Sequence: Synthetic oligonucleotide
cuccucccgagggaaccuu

SEQ ID NO: 33878 - RNA, 19 nt, Artificial Sequence
  Description of Artificial Sequence: Synthetic oligonucleotide
ucuucccaggccucccgcc

SEQ ID NO: 33879 - RNA, 19 nt, Artificial Sequence
  Description of Artificial Sequence: Synthetic oligonucleotide
cagacugccuggguccugg

SEQ ID NO: 33880 - RNA, 19 nt, Artificial Sequence
  Description of Artificial Sequence: Synthetic oligonucleotide
gcgccuggcggucaccugg

SEQ ID NO: 33881 - RNA, 19 nt, Artificial Sequence
  Description of Artificial Sequence: Synthetic oligonucleotide
gugccuacuguccgacagg

SEQ ID NO: 33882 - RNA, 19 nt, Artificial Sequence
  Description of Artificial Sequence: Synthetic oligonucleotide
gaugccucgauccucgugc

SEQ ID NO: 33883 - RNA, 19 nt, Artificial Sequence
  Description of Artificial Sequence: Synthetic oligonucleotide
cgacccacccuguguaucc

SEQ ID NO: 33884 - RNA, 19 nt, Artificial Sequence
  Description of Artificial Sequence: Synthetic oligonucleotide
cucccuagacugaguucug

SEQ ID NO: 33885 - RNA, 19 nt, Artificial Sequence
  Description of Artificial Sequence: Synthetic oligonucleotide
ggcagcuccccgaggcagc

SEQ ID NO: 33886 - RNA, 19 nt, Artificial Sequence
  Description of Artificial Sequence: Synthetic oligonucleotide
ccgggguacccucuagauu

SEQ ID NO: 33887 - RNA, 19 nt, Artificial Sequence
  Description of Artificial Sequence: Synthetic oligonucleotide
ucagggaugcuugcucucc

SEQ ID NO: 33888 - RNA, 19 nt, Artificial Sequence
  Description of Artificial Sequence: Synthetic oligonucleotide
cacuuuucaagugggucuu

SEQ ID NO: 33889 - RNA, 19 nt, Artificial Sequence
  Description of Artificial Sequence: Synthetic oligonucleotide
uggguacgagaauucccuc

SEQ ID NO: 33890 - RNA, 19 nt, Artificial Sequence
  Description of Artificial Sequence: Synthetic oligonucleotide
caucuuucucuacuguaaa

SEQ ID NO: 33891 - RNA, 19 nt, Artificial Sequence
  Description of Artificial Sequence: Synthetic oligonucleotide
agugauuuuguuugcaggu

SEQ ID NO: 33892 - RNA, 19 nt, Artificial Sequence
  Description of Artificial Sequence: Synthetic oligonucleotide
uaagaaaauaauagaugac

SEQ ID NO: 33893 - RNA, 19 nt, Artificial Sequence
  Description of Artificial Sequence: Synthetic oligonucleotide
cucaccacaccucuacggc

SEQ ID NO: 33894 - RNA, 19 nt, Artificial Sequence
  Description of Artificial Sequence: Synthetic oligonucleotide
cuggggagaucaggcccag

SEQ ID NO: 33895 - RNA, 19 nt, Artificial Sequence
  Description of Artificial Sequence: Synthetic oligonucleotide
gccccauaaaggagaaucu

SEQ ID NO: 33896 - RNA, 19 nt, Artificial Sequence
  Description of Artificial Sequence: Synthetic oligonucleotide
uacgcugguccucaggacg

SEQ ID NO: 33897 - RNA, 19 nt, Artificial Sequence
  Description of Artificial Sequence: Synthetic oligonucleotide
guguuaaagagaucugggc

SEQ ID NO: 33898 - RNA, 19 nt, Artificial Sequence
  Description of Artificial Sequence: Synthetic oligonucleotide
ccucauguagcucaccccg

SEQ ID NO: 33899 - RNA, 19 nt, Artificial Sequence
  Description of Artificial Sequence: Synthetic oligonucleotide
ggucacgcaugaaggcaaa

SEQ ID NO: 33900 - RNA, 19 nt, Artificial Sequence
  Description of Artificial Sequence: Synthetic oligonucleotide
aagcaggucagaagcgaau

SEQ ID NO: 33901 - RNA, 19 nt, Artificial Sequence
  Description of Artificial Sequence: Synthetic oligonucleotide
uacucugccauuaucucaa

SEQ ID NO: 33902 - RNA, 19 nt, Artificial Sequence
  Description of Artificial Sequence: Synthetic oligonucleotide
uuuuugagauggggucuuc

SEQ ID NO: 33903 - RNA, 19 nt, Artificial Sequence
  Description of Artificial Sequence: Synthetic oligonucleotide
ccucuguugcccaggcugg

SEQ ID NO: 33904 - RNA, 19 nt, Artificial Sequence
  Description of Artificial Sequence: Synthetic oligonucleotide
gagugcaguggugcaaucu

SEQ ID NO: 33905 - RNA, 19 nt, Artificial Sequence
  Description of Artificial Sequence: Synthetic oligonucleotide
uuggcucacuguaaccucc

SEQ ID NO: 33906 - RNA, 19 nt, Artificial Sequence
  Description of Artificial Sequence: Synthetic oligonucleotide
cgccucccagguucaagug

SEQ ID NO: 33907 - RNA, 19 nt, Artificial Sequence
  Description of Artificial Sequence: Synthetic oligonucleotide
gauucuucuugccucagcc

SEQ ID NO: 33908 - RNA, 19 nt, Artificial Sequence
  Description of Artificial Sequence: Synthetic oligonucleotide
cuccugaguagcugggauu

SEQ ID NO: 33909 - RNA, 19 nt, Artificial Sequence
  Description of Artificial Sequence: Synthetic oligonucleotide
uacaggugugcaccacccg

SEQ ID NO: 33910 - RNA, 19 nt, Artificial Sequence
  Description of Artificial Sequence: Synthetic oligonucleotide
guacccagcuaauuuuugu

SEQ ID NO: 33911 - RNA, 19 nt, Artificial Sequence
  Description of Artificial Sequence: Synthetic oligonucleotide
uauuuuaguagagacgggg

SEQ ID NO: 33912 - RNA, 19 nt, Artificial Sequence
  Description of Artificial Sequence: Synthetic oligonucleotide
gguuucaccauguuggcug

SEQ ID NO: 33913 - RNA, 19 nt, Artificial Sequence
  Description of Artificial Sequence: Synthetic oligonucleotide
gggcuggucucgaacuccu

SEQ ID NO: 33914 - RNA, 19 nt, Artificial Sequence
  Description of Artificial Sequence: Synthetic oligonucleotide
ugaccucaggugauccacc

SEQ ID NO: 33915 - RNA, 19 nt, Artificial Sequence
  Description of Artificial Sequence: Synthetic oligonucleotide
ccgccugagccucccaaag

SEQ ID NO: 33916 - RNA, 19 nt, Artificial Sequence
  Description of Artificial Sequence: Synthetic oligonucleotide
gugcugggauuacaggcau

SEQ ID NO: 33917 - RNA, 19 nt, Artificial Sequence
  Description of Artificial Sequence: Synthetic oligonucleotide
ugagccaccacgcccggcc

SEQ ID NO: 33918 - RNA, 19 nt, Artificial Sequence
  Description of Artificial Sequence: Synthetic oligonucleotide
ccacucugccauugucuaa

SEQ ID NO: 33919 - RNA, 19 nt, Artificial Sequence
  Description of Artificial Sequence: Synthetic oligonucleotide
agccaccucugaaagcagg

SEQ ID NO: 33920 - RNA, 19 nt, Artificial Sequence
  Description of Artificial Sequence: Synthetic oligonucleotide
guuuuaacaaaaggaugag

SEQ ID NO: 33921 - RNA, 19 nt, Artificial Sequence
  Description of Artificial Sequence: Synthetic oligonucleotide
ggccagaacucuuccagaa

SEQ ID NO: 33922 - RNA, 19 nt, Artificial Sequence
  Description of Artificial Sequence: Synthetic oligonucleotide
accaucaccuuugggaacc

SEQ ID NO: 33923 - RNA, 19 nt, Artificial Sequence
  Description of Artificial Sequence: Synthetic oligonucleotide
cugcugugagagugcugag

SEQ ID NO: 33924 - RNA, 19 nt, Artificial Sequence
  Description of Artificial Sequence: Synthetic oligonucleotide
gguaccagaagugugagaa

SEQ ID NO: 33925 - RNA, 19 nt, Artificial Sequence
  Description of Artificial Sequence: Synthetic oligonucleotide
acgagggggcgugcuggga

SEQ ID NO: 33926 - RNA, 19 nt, Artificial Sequence
  Description of Artificial Sequence: Synthetic oligonucleotide
aucuuucucucugacuaua

SEQ ID NO: 33927 - RNA, 19 nt, Artificial Sequence
  Description of Artificial Sequence: Synthetic oligonucleotide
acuuaguuugaaauggugc

SEQ ID NO: 33928 - RNA, 19 nt, Artificial Sequence
  Description of Artificial Sequence: Synthetic oligonucleotide
caggcuuagucuuaagccu

SEQ ID NO: 33929 - RNA, 19 nt, Artificial Sequence
  Description of Artificial Sequence: Synthetic oligonucleotide
uccaaaggccuggauuuga

SEQ ID NO: 33930 - RNA, 19 nt, Artificial Sequence
  Description of Artificial Sequence: Synthetic oligonucleotide
agcagcuuuagaaaugcag

SEQ ID NO: 33931 - RNA, 19 nt, Artificial Sequence
  Description of Artificial Sequence: Synthetic oligonucleotide
gguucuagggcuucuccca

SEQ ID NO: 33932 - RNA, 19 nt, Artificial Sequence
  Description of Artificial Sequence: Synthetic oligonucleotide
agccuucagaagccaacua

SEQ ID NO: 33933 - RNA, 19 nt, Artificial Sequence
  Description of Artificial Sequence: Synthetic oligonucleotide
aacucugcagauggggcua

SEQ ID NO: 33934 - RNA, 19 nt, Artificial Sequence
  Description of Artificial Sequence: Synthetic oligonucleotide
aggacugugggcuuuuagc

SEQ ID NO: 33935 - RNA, 19 nt, Artificial Sequence
  Description of Artificial Sequence: Synthetic oligonucleotide
cagcccacaggugauccua

SEQ ID NO: 33936 - RNA, 19 nt, Artificial Sequence
  Description of Artificial Sequence: Synthetic oligonucleotide
aacauaucaggccauggac

SEQ ID NO: 33937 - RNA, 19 nt, Artificial Sequence
  Description of Artificial Sequence: Synthetic oligonucleotide
cucaggaccugcccgguga

SEQ ID NO: 33938 - RNA, 19 nt, Artificial Sequence
  Description of Artificial Sequence: Synthetic oligonucleotide
augcuguugauuucucaaa

SEQ ID NO: 33939 - RNA, 19 nt, Artificial Sequence
  Description of Artificial Sequence: Synthetic oligonucleotide
aggucuuccaaaacucaac

SEQ ID NO: 33940 - RNA, 19 nt, Artificial Sequence
  Description of Artificial Sequence: Synthetic oligonucleotide
cagagccagaaguagccgc

SEQ ID NO: 33941 - RNA, 19 nt, Artificial Sequence
  Description of Artificial Sequence: Synthetic oligonucleotide
cccgcucagcggcucaggu

SEQ ID NO: 33942 - RNA, 19 nt, Artificial Sequence
  Description of Artificial Sequence: Synthetic oligonucleotide
ugccagcucuguucugauu

SEQ ID NO: 33943 - RNA, 19 nt, Artificial Sequence
  Description of Artificial Sequence: Synthetic oligonucleotide
ucaccagggguccgucagu

SEQ ID NO: 33944 - RNA, 19 nt, Artificial Sequence
  Description of Artificial Sequence: Synthetic oligonucleotide
uagucauugccacccgcgg

SEQ ID NO: 33945 - RNA, 19 nt, Artificial Sequence
  Description of Artificial Sequence: Synthetic oligonucleotide
gggcaccucccuggccaca

SEQ ID NO: 33946 - RNA, 19 nt, Artificial Sequence
  Description of Artificial Sequence: Synthetic oligonucleotide
acgccuguucccagcaagu

SEQ ID NO: 33947 - RNA, 19 nt, Artificial Sequence
  Description of Artificial Sequence: Synthetic oligonucleotide
ugcugaaacucacuagacc

SEQ ID NO: 33948 - RNA, 19 nt, Artificial Sequence
  Description of Artificial Sequence: Synthetic oligonucleotide
cgucugccuguuucgaaau

SEQ ID NO: 33949 - RNA, 19 nt, Artificial Sequence
  Description of Artificial Sequence: Synthetic oligonucleotide
uggggaaagccgugcgugc

SEQ ID NO: 33950 - RNA, 19 nt, Artificial Sequence
  Description of Artificial Sequence: Synthetic oligonucleotide
cgcguuauuuauuuaagug

SEQ ID NO: 33951 - RNA, 19 nt, Artificial Sequence
  Description of Artificial Sequence: Synthetic oligonucleotide
gcgccugugugcgcgggug

SEQ ID NO: 33952 - RNA, 19 nt, Artificial Sequence
  Description of Artificial Sequence: Synthetic oligonucleotide
gugggagcacacuuugcaa

SEQ ID NO: 33953 - RNA, 19 nt, Artificial Sequence
  Description of Artificial Sequence: Synthetic oligonucleotide
aagccacagcguuucuggu

SEQ ID NO: 33954 - RNA, 19 nt, Artificial Sequence
  Description of Artificial Sequence: Synthetic oligonucleotide
uuuuggguguacagucuug

SEQ ID NO: 33955 - RNA, 19 nt, Artificial Sequence
  Description of Artificial Sequence: Synthetic oligonucleotide
gugugccuggcgagaagaa

SEQ ID NO: 33956 - RNA, 19 nt, Artificial Sequence
  Description of Artificial Sequence: Synthetic oligonucleotide
auauuuucuauuuuuuuaa

SEQ ID NO: 33957 - RNA, 19 nt, Artificial Sequence
  Description of Artificial Sequence: Synthetic oligonucleotide
agucauuucauguuucugu

SEQ ID NO: 33958 - RNA, 19 nt, Artificial Sequence
  Description of Artificial Sequence: Synthetic oligonucleotide
ucuggggaaggcaaguuag

SEQ ID NO: 33959 - RNA, 19 nt, Artificial Sequence
  Description of Artificial Sequence: Synthetic oligonucleotide
guuaaguaucacugaugug

SEQ ID NO: 33960 - RNA, 19 nt, Artificial Sequence
  Description of Artificial Sequence: Synthetic oligonucleotide
ggguugagaccagcacucu

SEQ ID NO: 33961 - RNA, 19 nt, Artificial Sequence
  Description of Artificial Sequence: Synthetic oligonucleotide
ugugaaaccuugaaaugag

SEQ ID NO: 33962 - RNA, 19 nt, Artificial Sequence
  Description of Artificial Sequence: Synthetic oligonucleotide
gaaguaaaggcagaugaaa

SEQ ID NO: 33963 - RNA, 19 nt, Artificial Sequence
  Description of Artificial Sequence: Synthetic oligonucleotide
cucgcgcccagcgcagucg

SEQ ID NO: 33964 - RNA, 19 nt, Artificial Sequence
  Description of Artificial Sequence: Synthetic oligonucleotide
gcuccgagcggccgcgagc

SEQ ID NO: 33965 - RNA, 19 nt, Artificial Sequence
  Description of Artificial Sequence: Synthetic oligonucleotide
cagagccgcccagcccugc

SEQ ID NO: 33966 - RNA, 19 nt, Artificial Sequence
  Description of Artificial Sequence: Synthetic oligonucleotide
cccugccagcugcgccggg

SEQ ID NO: 33967 - RNA, 19 nt, Artificial Sequence
  Description of Artificial Sequence: Synthetic oligonucleotide
ccagcugcgccgggacgau

SEQ ID NO: 33968 - RNA, 19 nt, Artificial Sequence
  Description of Artificial Sequence: Synthetic oligonucleotide
uaaggagucaggccagggc

SEQ ID NO: 33969 - RNA, 19 nt, Artificial Sequence
  Description of Artificial Sequence: Synthetic oligonucleotide
cgggaugacacucauugau

SEQ ID NO: 33970 - RNA, 19 nt, Artificial Sequence
  Description of Artificial Sequence: Synthetic oligonucleotide
uucuaaagcaucuuuaauc

SEQ ID NO: 33971 - RNA, 19 nt, Artificial Sequence
  Description of Artificial Sequence: Synthetic oligonucleotide
cugccaggcggagggggcu

SEQ ID NO: 33972 - RNA, 19 nt, Artificial Sequence
  Description of Artificial Sequence: Synthetic oligonucleotide
uuugcuggucuuucuugga

SEQ ID NO: 33973 - RNA, 19 nt, Artificial Sequence
  Description of Artificial Sequence: Synthetic oligonucleotide
acuauuccagagaggacaa

SEQ ID NO: 33974 - RNA, 19 nt, Artificial Sequence
  Description of Artificial Sequence: Synthetic oligonucleotide
acugucaucugggaaguaa

SEQ ID NO: 33975 - RNA, 19 nt, Artificial Sequence
  Description of Artificial Sequence: Synthetic oligonucleotide
acaacgcaggaugcccccu

SEQ ID NO: 33976 - RNA, 19 nt, Artificial Sequence
  Description of Artificial Sequence: Synthetic oligonucleotide
ugggguggacugccccaug

SEQ ID NO: 33977 - RNA, 19 nt, Artificial Sequence
  Description of Artificial Sequence: Synthetic oligonucleotide
ggaauucuggaccaaggag

SEQ ID NO: 33978 - RNA, 19 nt, Artificial Sequence
  Description of Artificial Sequence: Synthetic oligonucleotide
ggagaaucagagcguugug

SEQ ID NO: 33979 - RNA, 19 nt, Artificial Sequence
  Description of Artificial Sequence: Synthetic oligonucleotide
gguugacuuccugcugccc

SEQ ID NO: 33980 - RNA, 19 nt, Artificial Sequence
  Description of Artificial Sequence: Synthetic oligonucleotide
cacaggggucuaccugaac

SEQ ID NO: 33981 - RNA, 19 nt, Artificial Sequence
  Description of Artificial Sequence: Synthetic oligonucleotide
cuucccugugucccgcaau

SEQ ID NO: 33982 - RNA, 19 nt, Artificial Sequence
  Description of Artificial Sequence: Synthetic oligonucleotide
ugccaaccucagcaccauc

SEQ ID NO: 33983 - RNA, 19 nt, Artificial Sequence
  Description of Artificial Sequence: Synthetic oligonucleotide
caagcagcugcuguggcac

SEQ ID NO: 33984 - RNA, 19 nt, Artificial Sequence
  Description of Artificial Sequence: Synthetic oligonucleotide
ccgcgcccaguaugagccg

SEQ ID NO: 33985 - RNA, 19 nt, Artificial Sequence
  Description of Artificial Sequence: Synthetic oligonucleotide
gcucuuccacaugcucagu

SEQ ID NO: 33986 - RNA, 19 nt, Artificial Sequence
  Description of Artificial Sequence: Synthetic oligonucleotide
uggccccgaggccuaugug

SEQ ID NO: 33987 - RNA, 19 nt, Artificial Sequence
  Description of Artificial Sequence: Synthetic oligonucleotide
guucaccugcaucaaccag

SEQ ID NO: 33988 - RNA, 19 nt, Artificial Sequence
  Description of Artificial Sequence: Synthetic oligonucleotide
gacagcggagcagcaagag

SEQ ID NO: 33989 - RNA, 19 nt, Artificial Sequence
  Description of Artificial Sequence: Synthetic oligonucleotide
gcuggaggacgagcaacgg

SEQ ID NO: 33990 - RNA, 19 nt, Artificial Sequence
  Description of Artificial Sequence: Synthetic oligonucleotide
gcgucugugugacgugcag

SEQ ID NO: 33991 - RNA, 19 nt, Artificial Sequence
  Description of Artificial Sequence: Synthetic oligonucleotide
gcccuuccugcccguccug

SEQ ID NO: 33992 - RNA, 19 nt, Artificial Sequence
  Description of Artificial Sequence: Synthetic oligonucleotide
gcgccugguggcccgugag

SEQ ID NO: 33993 - RNA, 19 nt, Artificial Sequence
  Description of Artificial Sequence: Synthetic oligonucleotide
gggcgaccgcgugaagaag

SEQ ID NO: 33994 - RNA, 19 nt, Artificial Sequence
  Description of Artificial Sequence: Synthetic oligonucleotide
gcucaucaacucacagauc

SEQ ID NO: 33995 - RNA, 19 nt, Artificial Sequence
  Description of Artificial Sequence: Synthetic oligonucleotide
cagccuccucaucggcaaa

SEQ ID NO: 33996 - RNA, 19 nt, Artificial Sequence
  Description of Artificial Sequence: Synthetic oligonucleotide
aggccuccacgaguuugac

SEQ ID NO: 33997 - RNA, 19 nt, Artificial Sequence
  Description of Artificial Sequence: Synthetic oligonucleotide
cuccuugugcgacccagaa

SEQ ID NO: 33998 - RNA, 19 nt, Artificial Sequence
  Description of Artificial Sequence: Synthetic oligonucleotide
agugaacgacuuucgcgcc

SEQ ID NO: 33999 - RNA, 19 nt, Artificial Sequence
  Description of Artificial Sequence: Synthetic oligonucleotide
caagaugugccaauucugc

SEQ ID NO: 34000 - RNA, 19 nt, Artificial Sequence
  Description of Artificial Sequence: Synthetic oligonucleotide
cgaggaggcggccgcccgc

SEQ ID NO: 34001 - RNA, 19 nt, Artificial Sequence
  Description of Artificial Sequence: Synthetic oligonucleotide
ccggcagcagcugggcugg

SEQ ID NO: 34002 - RNA, 19 nt, Artificial Sequence
  Description of Artificial Sequence: Synthetic oligonucleotide
ggaggccuggcugcaguac

SEQ ID NO: 34003 - RNA, 19 nt, Artificial Sequence
  Description of Artificial Sequence: Synthetic oligonucleotide
caguuucccccugcagcug

SEQ ID NO: 34004 - RNA, 19 nt, Artificial Sequence
  Description of Artificial Sequence: Synthetic oligonucleotide
ggagcccucggcucaaacc

SEQ ID NO: 34005 - RNA, 19 nt, Artificial Sequence
  Description of Artificial Sequence: Synthetic oligonucleotide
cugggggccugguacccug

SEQ ID NO: 34006 - RNA, 19 nt, Artificial Sequence
  Description of Artificial Sequence: Synthetic oligonucleotide
gcggcucccgaaccgggcc

SEQ ID NO: 34007 - RNA, 19 nt, Artificial Sequence
  Description of Artificial Sequence: Synthetic oligonucleotide
ccuucuggucaacguuaag

SEQ ID NO: 34008 - RNA, 19 nt, Artificial Sequence
  Description of Artificial Sequence: Synthetic oligonucleotide
guuugagggcagcgaggag

SEQ ID NO: 34009 - RNA, 19 nt, Artificial Sequence
  Description of Artificial Sequence: Synthetic oligonucleotide
gagcuucaccuuccaggug

SEQ ID NO: 34010 - RNA, 19 nt, Artificial Sequence
  Description of Artificial Sequence: Synthetic oligonucleotide
guccaccaaggacgugccg

SEQ ID NO: 34011 - RNA, 19 nt, Artificial Sequence
  Description of Artificial Sequence: Synthetic oligonucleotide
gcuggcgcugauggccugu

SEQ ID NO: 34012 - RNA, 19 nt, Artificial Sequence
  Description of Artificial Sequence: Synthetic oligonucleotide
ugcccugcggaagaaggcc

SEQ ID NO: 34013 - RNA, 19 nt, Artificial Sequence
  Description of Artificial Sequence: Synthetic oligonucleotide
cacaguguuccggcagccg

SEQ ID NO: 34014 - RNA, 19 nt, Artificial Sequence
  Description of Artificial Sequence: Synthetic oligonucleotide
gcugguggagcagccggaa

SEQ ID NO: 34015 - RNA, 19 nt, Artificial Sequence
  Description of Artificial Sequence: Synthetic oligonucleotide
agacuacacgcugcaggug

SEQ ID NO: 34016 - RNA, 19 nt, Artificial Sequence
  Description of Artificial Sequence: Synthetic oligonucleotide
gaacggcaggcaugaguac

SEQ ID NO: 34017 - RNA, 19 nt, Artificial Sequence
  Description of Artificial Sequence: Synthetic oligonucleotide
gaguaccuguauggcagcu

SEQ ID NO: 34018 - RNA, 19 nt, Artificial Sequence
  Description of Artificial Sequence: Synthetic oligonucleotide
ccuguauggcagcuacccg

SEQ ID NO: 34019 - RNA, 19 nt, Artificial Sequence
  Description of Artificial Sequence: Synthetic oligonucleotide
gcucugccaguuccaguac

SEQ ID NO: 34020 - RNA, 19 nt, Artificial Sequence
  Description of Artificial Sequence: Synthetic oligonucleotide
caucugcagcugccugcac

SEQ ID NO: 34021 - RNA, 19 nt, Artificial Sequence
  Description of Artificial Sequence: Synthetic oligonucleotide
caguggguugaccccucac

SEQ ID NO: 34022 - RNA, 19 nt, Artificial Sequence
  Description of Artificial Sequence: Synthetic oligonucleotide
ccugaccaugguccauucc

SEQ ID NO: 34023 - RNA, 19 nt, Artificial Sequence
  Description of Artificial Sequence: Synthetic oligonucleotide
cuccuccauccucgccaug

SEQ ID NO: 34024 - RNA, 19 nt, Artificial Sequence
  Description of Artificial Sequence: Synthetic oligonucleotide
gcgggaugagcagagcaac

SEQ ID NO: 34025 - RNA, 19 nt, Artificial Sequence
  Description of Artificial Sequence: Synthetic oligonucleotide
cccugccccccagguccag

SEQ ID NO: 34026 - RNA, 19 nt, Artificial Sequence
  Description of Artificial Sequence: Synthetic oligonucleotide
gaaaccgcgugccaaacca

SEQ ID NO: 34027 - RNA, 19 nt, Artificial Sequence
  Description of Artificial Sequence: Synthetic oligonucleotide
accucccauuccugcgaag

SEQ ID NO: 34028 - RNA, 19 nt, Artificial Sequence
  Description of Artificial Sequence: Synthetic oligonucleotide
gaagccuuccucugugucc

SEQ ID NO: 34029 - RNA, 19 nt, Artificial Sequence
  Description of Artificial Sequence: Synthetic oligonucleotide
ccuguggucccuggagcag

SEQ ID NO: 34030 - RNA, 19 nt, Artificial Sequence
  Description of Artificial Sequence: Synthetic oligonucleotide
gccguuccgcaucgagcuc

SEQ ID NO: 34031 - RNA, 19 nt, Artificial Sequence
  Description of Artificial Sequence: Synthetic oligonucleotide
cauccagggcagcaaagug

SEQ ID NO: 34032 - RNA, 19 nt, Artificial Sequence
  Description of Artificial Sequence: Synthetic oligonucleotide
gaacgccgacgagcggaug

SEQ ID NO: 34033 - RNA, 19 nt, Artificial Sequence
  Description of Artificial Sequence: Synthetic oligonucleotide
gaagcugguggugcaggcc

SEQ ID NO: 34034 - RNA, 19 nt, Artificial Sequence
  Description of Artificial Sequence: Synthetic oligonucleotide
cgggcuuuuccacggcaac

SEQ ID NO: 34035 - RNA, 19 nt, Artificial Sequence
  Description of Artificial Sequence: Synthetic oligonucleotide
cgagaugcugugcaagacg

SEQ ID NO: 34036 - RNA, 19 nt, Artificial Sequence
  Description of Artificial Sequence: Synthetic oligonucleotide
gguguccagcucggaggug

SEQ ID NO: 34037 - RNA, 19 nt, Artificial Sequence
  Description of Artificial Sequence: Synthetic oligonucleotide
gagcgugugcucggagccc

SEQ ID NO: 34038 - RNA, 19 nt, Artificial Sequence
  Description of Artificial Sequence: Synthetic oligonucleotide
cguguggaagcagcggcug

SEQ ID NO: 34039 - RNA, 19 nt, Artificial Sequence
  Description of Artificial Sequence: Synthetic oligonucleotide
ggaguucgacaucaacauc

SEQ ID NO: 34040 - RNA, 19 nt, Artificial Sequence
  Description of Artificial Sequence: Synthetic oligonucleotide
cugcgaccugccccgcaug

SEQ ID NO: 34041 - RNA, 19 nt, Artificial Sequence
  Description of Artificial Sequence: Synthetic oligonucleotide
ggcccgucucugcuuugcg

SEQ ID NO: 34042 - RNA, 19 nt, Artificial Sequence
  Description of Artificial Sequence: Synthetic oligonucleotide
gcuguacgccgugaucgag

SEQ ID NO: 34043 - RNA, 19 nt, Artificial Sequence
  Description of Artificial Sequence: Synthetic oligonucleotide
gaaagccaagaaggcucgc

SEQ ID NO: 34044 - RNA, 19 nt, Artificial Sequence
  Description of Artificial Sequence: Synthetic oligonucleotide
cuccaccaagaagaagucc

SEQ ID NO: 34045 - RNA, 19 nt, Artificial Sequence
  Description of Artificial Sequence: Synthetic oligonucleotide
caagaaggcggacugcccc

SEQ ID NO: 34046 - RNA, 19 nt, Artificial Sequence
  Description of Artificial Sequence: Synthetic oligonucleotide
cauugccugggccaaccuc

SEQ ID NO: 34047 - RNA, 19 nt, Artificial Sequence
  Description of Artificial Sequence: Synthetic oligonucleotide
caugcuguuugacuacaag

SEQ ID NO: 34048 - RNA, 19 nt, Artificial Sequence
  Description of Artificial Sequence: Synthetic oligonucleotide
ggaccagcuuaagaccggg

SEQ ID NO: 34049 - RNA, 19 nt, Artificial Sequence
  Description of Artificial Sequence: Synthetic oligonucleotide
ggaacgcugccucuacaug

SEQ ID NO: 34050 - RNA, 19 nt, Artificial Sequence
  Description of Artificial Sequence: Synthetic oligonucleotide
guggcccuccgucccagau

SEQ ID NO: 34051 - RNA, 19 nt, Artificial Sequence
  Description of Artificial Sequence: Synthetic oligonucleotide
ugagaagggcgagcugcug

SEQ ID NO: 34052 - RNA, 19 nt, Artificial Sequence
  Description of Artificial Sequence: Synthetic oligonucleotide
gaaccccacgggcacugug

SEQ ID NO: 34053 - RNA, 19 nt, Artificial Sequence
  Description of Artificial Sequence: Synthetic oligonucleotide
gcgcaguaaccccaacacg

SEQ ID NO: 34054 - RNA, 19 nt, Artificial Sequence
  Description of Artificial Sequence: Synthetic oligonucleotide
ggauagcgccgcugcccug

SEQ ID NO: 34055 - RNA, 19 nt, Artificial Sequence
  Description of Artificial Sequence: Synthetic oligonucleotide
gcucaucugccugcccgag

SEQ ID NO: 34056 - RNA, 19 nt, Artificial Sequence
  Description of Artificial Sequence: Synthetic oligonucleotide
gguggccccgcaccccgug

SEQ ID NO: 34057 - RNA, 19 nt, Artificial Sequence
  Description of Artificial Sequence: Synthetic oligonucleotide
guacuaccccgcccuggag

SEQ ID NO: 34058 - RNA, 19 nt, Artificial Sequence
  Description of Artificial Sequence: Synthetic oligonucleotide
gaagaucuuggagcugggg

SEQ ID NO: 34059 - RNA, 19 nt, Artificial Sequence
  Description of Artificial Sequence: Synthetic oligonucleotide
gcgacacagcgagugugug

SEQ ID NO: 34060 - RNA, 19 nt, Artificial Sequence
  Description of Artificial Sequence: Synthetic oligonucleotide
gcaugucaccgaggaggag

SEQ ID NO: 34061 - RNA, 19 nt, Artificial Sequence
  Description of Artificial Sequence: Synthetic oligonucleotide
gcagcugcagcugcgggaa

SEQ ID NO: 34062 - RNA, 19 nt, Artificial Sequence
  Description of Artificial Sequence: Synthetic oligonucleotide
aauccuggagcggcggggg

SEQ ID NO: 34063 - RNA, 19 nt, Artificial Sequence
  Description of Artificial Sequence: Synthetic oligonucleotide
gucuggggagcuguaugag

SEQ ID NO: 34064 - RNA, 19 nt, Artificial Sequence
  Description of Artificial Sequence: Synthetic oligonucleotide
gcacgagaaggaccuggug

SEQ ID NO: 34065 - RNA, 19 nt, Artificial Sequence
  Description of Artificial Sequence: Synthetic oligonucleotide
guggaagcugcggcaugaa

SEQ ID NO: 34066 - RNA, 19 nt, Artificial Sequence
  Description of Artificial Sequence: Synthetic oligonucleotide
aguccaggagcacuucccg

SEQ ID NO: 34067 - RNA, 19 nt, Artificial Sequence
  Description of Artificial Sequence: Synthetic oligonucleotide
ggaggcgcuagcccggcug

SEQ ID NO: 34068 - RNA, 19 nt, Artificial Sequence
  Description of Artificial Sequence: Synthetic oligonucleotide
gcugcuggucaccaagugg

SEQ ID NO: 34069 - RNA, 19 nt, Artificial Sequence
  Description of Artificial Sequence: Synthetic oligonucleotide
gaacaagcaugaggaugug

SEQ ID NO: 34070 - RNA, 19 nt, Artificial Sequence
  Description of Artificial Sequence: Synthetic oligonucleotide
ggcccagaugcucuaccug

SEQ ID NO: 34071 - RNA, 19 nt, Artificial Sequence
  Description of Artificial Sequence: Synthetic oligonucleotide
gcugugcuccuggccggag

SEQ ID NO: 34072 - RNA, 19 nt, Artificial Sequence
  Description of Artificial Sequence: Synthetic oligonucleotide
gcugcccguccugagcgcc

SEQ ID NO: 34073 - RNA, 19 nt, Artificial Sequence
  Description of Artificial Sequence: Synthetic oligonucleotide
ccuggagcugcuagacuuc

SEQ ID NO: 34074 - RNA, 19 nt, Artificial Sequence
  Description of Artificial Sequence: Synthetic oligonucleotide
cagcuuccccgauugccac

SEQ ID NO: 34075 - RNA, 19 nt, Artificial Sequence
  Description of Artificial Sequence: Synthetic oligonucleotide
cguaggcuccuucgccauc

SEQ ID NO: 34076 - RNA, 19 nt, Artificial Sequence
  Description of Artificial Sequence: Synthetic oligonucleotide
caagucgcugcggaaacug

SEQ ID NO: 34077 - RNA, 19 nt, Artificial Sequence
  Description of Artificial Sequence: Synthetic oligonucleotide
gacggacgaugagcuguuc

SEQ ID NO: 34078 - RNA, 19 nt, Artificial Sequence
  Description of Artificial Sequence: Synthetic oligonucleotide
ccaguaccugcugcagcug

SEQ ID NO: 34079 - RNA, 19 nt, Artificial Sequence
  Description of Artificial Sequence: Synthetic oligonucleotide
ggugcaggugcucaaguac

SEQ ID NO: 34080 - RNA, 19 nt, Artificial Sequence
  Description of Artificial Sequence: Synthetic oligonucleotide
cgaguccuaccuggacugc

SEQ ID NO: 34081 - RNA, 19 nt, Artificial Sequence
  Description of Artificial Sequence: Synthetic oligonucleotide
cgagcugaccaaauuccug

SEQ ID NO: 34082 - RNA, 19 nt, Artificial Sequence
  Description of Artificial Sequence: Synthetic oligonucleotide
gcuggaccgggcccuggcc

SEQ ID NO: 34083 - RNA, 19 nt, Artificial Sequence
  Description of Artificial Sequence: Synthetic oligonucleotide
caaccgcaagaucggccac

SEQ ID NO: 34084 - RNA, 19 nt, Artificial Sequence
  Description of Artificial Sequence: Synthetic oligonucleotide
cuuccuuuucuggcaccuc

SEQ ID NO: 34085 - RNA, 19 nt, Artificial Sequence
  Description of Artificial Sequence: Synthetic oligonucleotide
ccgcuccgagaugcacgug

SEQ ID NO: 34086 - RNA, 19 nt, Artificial Sequence
  Description of Artificial Sequence: Synthetic oligonucleotide
gccgucgguggcccugcgc

SEQ ID NO: 34087 - RNA, 19 nt, Artificial Sequence
  Description of Artificial Sequence: Synthetic oligonucleotide
cuucggccucauccuggag

SEQ ID NO: 34088 - RNA, 19 nt, Artificial Sequence
  Description of Artificial Sequence: Synthetic oligonucleotide
ggccuacugcaggggcagc

SEQ ID NO: 34089 - RNA, 19 nt, Artificial Sequence
  Description of Artificial Sequence: Synthetic oligonucleotide
cacccaccacaugaaggug

SEQ ID NO: 34090 - RNA, 19 nt, Artificial Sequence
  Description of Artificial Sequence: Synthetic oligonucleotide
gcugaugaagcagggggaa

SEQ ID NO: 34091 - RNA, 19 nt, Artificial Sequence
  Description of Artificial Sequence: Synthetic oligonucleotide
agcacugagcaaacugaag

SEQ ID NO: 34092 - RNA, 19 nt, Artificial Sequence
  Description of Artificial Sequence: Synthetic oligonucleotide
ggcccugaaugacuucguc

SEQ ID NO: 34093 - RNA, 19 nt, Artificial Sequence
  Description of Artificial Sequence: Synthetic oligonucleotide
caagcugagcucucagaag

SEQ ID NO: 34094 - RNA, 19 nt, Artificial Sequence
  Description of Artificial Sequence: Synthetic oligonucleotide
gacccccaagccccagacc

SEQ ID NO: 34095 - RNA, 19 nt, Artificial Sequence
  Description of Artificial Sequence: Synthetic oligonucleotide
caaggagcugaugcacuug

SEQ ID NO: 34096 - RNA, 19 nt, Artificial Sequence
  Description of Artificial Sequence: Synthetic oligonucleotide
gugcaugcggcaggaggcc

SEQ ID NO: 34097 - RNA, 19 nt, Artificial Sequence
  Description of Artificial Sequence: Synthetic oligonucleotide
cuaccuagaggcccucucc

SEQ ID NO: 34098 - RNA, 19 nt, Artificial Sequence
  Description of Artificial Sequence: Synthetic oligonucleotide
ccaccugcaguccccacuc

SEQ ID NO: 34099 - RNA, 19 nt, Artificial Sequence
  Description of Artificial Sequence: Synthetic oligonucleotide
cgaccccagcacccugcug

SEQ ID NO: 34100 - RNA, 19 nt, Artificial Sequence
  Description of Artificial Sequence: Synthetic oligonucleotide
ggcugaagucugcguggag

SEQ ID NO: 34101 - RNA, 19 nt, Artificial Sequence
  Description of Artificial Sequence: Synthetic oligonucleotide
gcagugcaccuucauggac

SEQ ID NO: 34102 - RNA, 19 nt, Artificial Sequence
  Description of Artificial Sequence: Synthetic oligonucleotide
cuccaagaugaagccccug

SEQ ID NO: 34103 - RNA, 19 nt, Artificial Sequence
  Description of Artificial Sequence: Synthetic oligonucleotide
guggaucauguacagcaac

SEQ ID NO: 34104 - RNA, 19 nt, Artificial Sequence
  Description of Artificial Sequence: Synthetic oligonucleotide
cgaggaggcaggcagcggc

SEQ ID NO: 34105 - RNA, 19 nt, Artificial Sequence
  Description of Artificial Sequence: Synthetic oligonucleotide
cggcagcgugggcaucauc

SEQ ID NO: 34106 - RNA, 19 nt, Artificial Sequence
  Description of Artificial Sequence: Synthetic oligonucleotide
cuuuaagaacggggaugac

SEQ ID NO: 34107 - RNA, 19 nt, Artificial Sequence
  Description of Artificial Sequence: Synthetic oligonucleotide
ccuccggcaggacaugcug

SEQ ID NO: 34108 - RNA, 19 nt, Artificial Sequence
  Description of Artificial Sequence: Synthetic oligonucleotide
gacccugcagaugauccag

SEQ ID NO: 34109 - RNA, 19 nt, Artificial Sequence
  Description of Artificial Sequence: Synthetic oligonucleotide
gcucauggacguccugugg

SEQ ID NO: 34110 - RNA, 19 nt, Artificial Sequence
  Description of Artificial Sequence: Synthetic oligonucleotide
gaagcaggaggggcuggac

SEQ ID NO: 34111 - RNA, 19 nt, Artificial Sequence
  Description of Artificial Sequence: Synthetic oligonucleotide
ccugaggaugacccccuau

SEQ ID NO: 34112 - RNA, 19 nt, Artificial Sequence
  Description of Artificial Sequence: Synthetic oligonucleotide
uggcugccuccccaccggg

SEQ ID NO: 34113 - RNA, 19 nt, Artificial Sequence
  Description of Artificial Sequence: Synthetic oligonucleotide
ggaccgcacaggccucauu

SEQ ID NO: 34114 - RNA, 19 nt, Artificial Sequence
  Description of Artificial Sequence: Synthetic oligonucleotide
ugaggugguacuccguuca

SEQ ID NO: 34115 - RNA, 19 nt, Artificial Sequence
  Description of Artificial Sequence: Synthetic oligonucleotide
agacaccaucgccaacauc

SEQ ID NO: 34116 - RNA, 19 nt, Artificial Sequence
  Description of Artificial Sequence: Synthetic oligonucleotide
ccaacucaacaagagcaac

SEQ ID NO: 34117 - RNA, 19 nt, Artificial Sequence
  Description of Artificial Sequence: Synthetic oligonucleotide
cauggcagccacagccgcc

SEQ ID NO: 34118 - RNA, 19 nt, Artificial Sequence
  Description of Artificial Sequence: Synthetic oligonucleotide
cuucaacaaggaugcccug

SEQ ID NO: 34119 - RNA, 19 nt, Artificial Sequence
  Description of Artificial Sequence: Synthetic oligonucleotide
gcucaacuggcugaagucc

SEQ ID NO: 34120 - RNA, 19 nt, Artificial Sequence
  Description of Artificial Sequence: Synthetic oligonucleotide
caagaacccgggggaggcc

SEQ ID NO: 34121 - RNA, 19 nt, Artificial Sequence
  Description of Artificial Sequence: Synthetic oligonucleotide
ccuggaucgagccauugag

SEQ ID NO: 34122 - RNA, 19 nt, Artificial Sequence
  Description of Artificial Sequence: Synthetic oligonucleotide
ggaguucacccucuccugu

SEQ ID NO: 34123 - RNA, 19 nt, Artificial Sequence
  Description of Artificial Sequence: Synthetic oligonucleotide
ugcuggcuauuguguggcc

SEQ ID NO: 34124 - RNA, 19 nt, Artificial Sequence
  Description of Artificial Sequence: Synthetic oligonucleotide
cacauaugugcugggcauu

SEQ ID NO: 34125 - RNA, 19 nt, Artificial Sequence
  Description of Artificial Sequence: Synthetic oligonucleotide
uggcgaucggcacagcgac

SEQ ID NO: 34126 - RNA, 19 nt, Artificial Sequence
  Description of Artificial Sequence: Synthetic oligonucleotide
caacaucaugauccgagag

SEQ ID NO: 34127 - RNA, 19 nt, Artificial Sequence
  Description of Artificial Sequence: Synthetic oligonucleotide
gagugggcagcuguuccac

SEQ ID NO: 34128 - RNA, 19 nt, Artificial Sequence
  Description of Artificial Sequence: Synthetic oligonucleotide
cauugauuuuggccacuuu

SEQ ID NO: 34129 - RNA, 19 nt, Artificial Sequence
  Description of Artificial Sequence: Synthetic oligonucleotide
ucuggggaauuucaagacc

SEQ ID NO: 34130 - RNA, 19 nt, Artificial Sequence
  Description of Artificial Sequence: Synthetic oligonucleotide
caaguuuggaaucaaccgc

SEQ ID NO: 34131 - RNA, 19 nt, Artificial Sequence
  Description of Artificial Sequence: Synthetic oligonucleotide
cgagcgugucccauucauc

SEQ ID NO: 34132 - RNA, 19 nt, Artificial Sequence
  Description of Artificial Sequence: Synthetic oligonucleotide
uucauccucaccuacgacu

SEQ ID NO: 34133 - RNA, 19 nt, Artificial Sequence
  Description of Artificial Sequence: Synthetic oligonucleotide
ccucaccuacgacuuuguc

SEQ ID NO: 34134 - RNA, 19 nt, Artificial Sequence
  Description of Artificial Sequence: Synthetic oligonucleotide
ccaugugauucagcagggg

SEQ ID NO: 34135 - RNA, 19 nt, Artificial Sequence
  Description of Artificial Sequence: Synthetic oligonucleotide
gaagacuaauaauagugag

SEQ ID NO: 34136 - RNA, 19 nt, Artificial Sequence
  Description of Artificial Sequence: Synthetic oligonucleotide
gaaauuugaacgguuccgg

SEQ ID NO: 34137 - RNA, 19 nt, Artificial Sequence
  Description of Artificial Sequence: Synthetic oligonucleotide
gggcuacugugaaagggcc

SEQ ID NO: 34138 - RNA, 19 nt, Artificial Sequence
  Description of Artificial Sequence: Synthetic oligonucleotide
cuacaccauccugcggcgc

SEQ ID NO: 34139 - RNA, 19 nt, Artificial Sequence
  Description of Artificial Sequence: Synthetic oligonucleotide
ccacgggcuucucuuccuc

SEQ ID NO: 34140 - RNA, 19 nt, Artificial Sequence
  Description of Artificial Sequence: Synthetic oligonucleotide
ccaccucuuugcccugaug

SEQ ID NO: 34141 - RNA, 19 nt, Artificial Sequence
  Description of Artificial Sequence: Synthetic oligonucleotide
gcgggcggcaggccugccu

SEQ ID NO: 34142 - RNA, 19 nt, Artificial Sequence
  Description of Artificial Sequence: Synthetic oligonucleotide
ugagcucagcugcuccaaa

SEQ ID NO: 34143 - RNA, 19 nt, Artificial Sequence
  Description of Artificial Sequence: Synthetic oligonucleotide
agacauccaguaucucaag

SEQ ID NO: 34144 - RNA, 19 nt, Artificial Sequence
  Description of Artificial Sequence: Synthetic oligonucleotide
ggacucccuggcacugggg

SEQ ID NO: 34145 - RNA, 19 nt, Artificial Sequence
  Description of Artificial Sequence: Synthetic oligonucleotide
gaaaacagaggaggaggca

SEQ ID NO: 34146 - RNA, 19 nt, Artificial Sequence
  Description of Artificial Sequence: Synthetic oligonucleotide
acugaagcacuuccgagug

SEQ ID NO: 34147 - RNA, 19 nt, Artificial Sequence
  Description of Artificial Sequence: Synthetic oligonucleotide
gaaguuuaacgaagcccuc

SEQ ID NO: 34148 - RNA, 19 nt, Artificial Sequence
  Description of Artificial Sequence: Synthetic oligonucleotide
ccgugagagcuggaaaacc

SEQ ID NO: 34149 - RNA, 19 nt, Artificial Sequence
  Description of Artificial Sequence: Synthetic oligonucleotide
caaagugaacuggcuggcc

SEQ ID NO: 34150 - RNA, 19 nt, Artificial Sequence
  Description of Artificial Sequence: Synthetic oligonucleotide
ccacaacguguccaaagac

SEQ ID NO: 34151 - RNA, 19 nt, Artificial Sequence
  Description of Artificial Sequence: Synthetic oligonucleotide
caacaggcaguaguggcuc

SEQ ID NO: 34152 - RNA, 19 nt, Artificial Sequence
  Description of Artificial Sequence: Synthetic oligonucleotide
ccucccagcccugggccca

SEQ ID NO: 34153 - RNA, 19 nt, Artificial Sequence
  Description of Artificial Sequence: Synthetic oligonucleotide
aagaggaggcggcugcggg

SEQ ID NO: 34154 - RNA, 19 nt, Artificial Sequence
  Description of Artificial Sequence: Synthetic oligonucleotide
gucguggggaccaagcaca

SEQ ID NO: 34155 - RNA, 19 nt, Artificial Sequence
  Description of Artificial Sequence: Synthetic oligonucleotide
auugguccuaaaggggcug

SEQ ID NO: 34156 - RNA, 19 nt, Artificial Sequence
  Description of Artificial Sequence: Synthetic oligonucleotide
gaagagccugaacugcacc

SEQ ID NO: 34157 - RNA, 19 nt, Artificial Sequence
  Description of Artificial Sequence: Synthetic oligonucleotide
cuaacgggaaagaaccgac

SEQ ID NO: 34158 - RNA, 19 nt, Artificial Sequence
  Description of Artificial Sequence: Synthetic oligonucleotide
cauggcugccuuuuguuua

SEQ ID NO: 34159 - RNA, 19 nt, Artificial Sequence
  Description of Artificial Sequence: Synthetic oligonucleotide
acacugguuauuuauuuau

SEQ ID NO: 34160 - RNA, 19 nt, Artificial Sequence
  Description of Artificial Sequence: Synthetic oligonucleotide
ugacuugaaauaguuuaag

SEQ ID NO: 34161 - RNA, 19 nt, Artificial Sequence
  Description of Artificial Sequence: Synthetic oligonucleotide
ggagcuaaacagccauaaa

SEQ ID NO: 34162 - RNA, 19 nt, Artificial Sequence
  Description of Artificial Sequence: Synthetic oligonucleotide
acggaaacgccuccuucau

SEQ ID NO: 34163 - RNA, 19 nt, Artificial Sequence
  Description of Artificial Sequence: Synthetic oligonucleotide
cuucaugcagcggcggugc

SEQ ID NO: 34164 - RNA, 19 nt, Artificial Sequence
  Description of Artificial Sequence: Synthetic oligonucleotide
ugcagcggcggugcugggc

SEQ ID NO: 34165 - RNA, 19 nt, Artificial Sequence
  Description of Artificial Sequence: Synthetic oligonucleotide
ccccccgaggcugcaccug

SEQ ID NO: 34166 - RNA, 19 nt, Artificial Sequence
  Description of Artificial Sequence: Synthetic oligonucleotide
ggcucucggcugaggauug

SEQ ID NO: 34167 - RNA, 19 nt, Artificial Sequence
  Description of Artificial Sequence: Synthetic oligonucleotide
gucaccccaagucuuccag

SEQ ID NO: 34168 - RNA, 19 nt, Artificial Sequence
  Description of Artificial Sequence: Synthetic oligonucleotide
gcugguggaucugggccca

SEQ ID NO: 34169 - RNA, 19 nt, Artificial Sequence
  Description of Artificial Sequence: Synthetic oligonucleotide
agcaaagacuguucuccuc

SEQ ID NO: 34170 - RNA, 19 nt, Artificial Sequence
  Description of Artificial Sequence: Synthetic oligonucleotide
cccgagggaaccuucuucc

SEQ ID NO: 34171 - RNA, 19 nt, Artificial Sequence
  Description of Artificial Sequence: Synthetic oligonucleotide
ccaggccucccgccagacu

SEQ ID NO: 34172 - RNA, 19 nt, Artificial Sequence
  Description of Artificial Sequence: Synthetic oligonucleotide
ugccuggguccuggcgccu

SEQ ID NO: 34173 - RNA, 19 nt, Artificial Sequence
  Description of Artificial Sequence: Synthetic oligonucleotide
uggcggucaccuggugccu

SEQ ID NO: 34174 - RNA, 19 nt, Artificial Sequence
  Description of Artificial Sequence: Synthetic oligonucleotide
uacuguccgacaggaugcc

SEQ ID NO: 34175 - RNA, 19 nt, Artificial Sequence
  Description of Artificial Sequence: Synthetic oligonucleotide
gaugccuugauccucgugc

SEQ ID NO: 34176 - RNA, 19 nt, Artificial Sequence
  Description of Artificial Sequence: Synthetic oligonucleotide
cuugauccucgugcgaccc

SEQ ID NO: 34177 - RNA, 19 nt, Artificial Sequence
  Description of Artificial Sequence: Synthetic oligonucleotide
cacccuguguauccucccu

SEQ ID NO: 34178 - RNA, 19 nt, Artificial Sequence
  Description of Artificial Sequence: Synthetic oligonucleotide
uagacugaguucuggcagc

SEQ ID NO: 34179 - RNA, 19 nt, Artificial Sequence
  Description of Artificial Sequence: Synthetic oligonucleotide
cuccccgaggcagccgggg

SEQ ID NO: 34180 - RNA, 19 nt, Artificial Sequence
  Description of Artificial Sequence: Synthetic oligonucleotide
guacccucuagauucaggg

SEQ ID NO: 34181 - RNA, 19 nt, Artificial Sequence
  Description of Artificial Sequence: Synthetic oligonucleotide
gaugcuugcucuccacuuu

SEQ ID NO: 34182 - RNA, 19 nt, Artificial Sequence
  Description of Artificial Sequence: Synthetic oligonucleotide
uucaagugggucuugggua

SEQ ID NO: 34183 - RNA, 19 nt, Artificial Sequence
  Description of Artificial Sequence: Synthetic oligonucleotide
acgagaauucccucaucuu

SEQ ID NO: 34184 - RNA, 19 nt, Artificial Sequence
  Description of Artificial Sequence: Synthetic oligonucleotide
uucucuacuguaaagugau

SEQ ID NO: 34185 - RNA, 19 nt, Artificial Sequence
  Description of Artificial Sequence: Synthetic oligonucleotide
uuuuguuugcagguaagaa

SEQ ID NO: 34186 - RNA, 19 nt, Artificial Sequence
  Description of Artificial Sequence: Synthetic oligonucleotide
aaauaauagaugacucacc

SEQ ID NO: 34187 - RNA, 19 nt, Artificial Sequence
  Description of Artificial Sequence: Synthetic oligonucleotide
cacaccucuacggcugggg

SEQ ID NO: 34188 - RNA, 19 nt, Artificial Sequence
  Description of Artificial Sequence: Synthetic oligonucleotide
gagaucaggcccagcccca

SEQ ID NO: 34189 - RNA, 19 nt, Artificial Sequence
  Description of Artificial Sequence: Synthetic oligonucleotide
auaaaggagaaucuacgcu

SEQ ID NO: 34190 - RNA, 19 nt, Artificial Sequence
  Description of Artificial Sequence: Synthetic oligonucleotide
ugguccucaggacguguua

SEQ ID NO: 34191 - RNA, 19 nt, Artificial Sequence
  Description of Artificial Sequence: Synthetic oligonucleotide
aaagagaucugggccucau

SEQ ID NO: 34192 - RNA, 19 nt, Artificial Sequence
  Description of Artificial Sequence: Synthetic oligonucleotide
uguagcucaccccggucac

SEQ ID NO: 34193 - RNA, 19 nt, Artificial Sequence
  Description of Artificial Sequence: Synthetic oligonucleotide
cgcaugaaggcaaaagcag

SEQ ID NO: 34194 - RNA, 19 nt, Artificial Sequence
  Description of Artificial Sequence: Synthetic oligonucleotide
ggucagaagcgaauacucu

SEQ ID NO: 34195 - RNA, 19 nt, Artificial Sequence
  Description of Artificial Sequence: Synthetic oligonucleotide
ugccauuaucucaaaaauc

SEQ ID NO: 34196 - RNA, 19 nt, Artificial Sequence
  Description of Artificial Sequence: Synthetic oligonucleotide
aaaaucuuuuuuuuuuuuu

SEQ ID NO: 34197 - RNA, 19 nt, Artificial Sequence
  Description of Artificial Sequence: Synthetic oligonucleotide
cuuuuuuuuuuuuuugaga

SEQ ID NO: 34198 - RNA, 19 nt, Artificial Sequence
  Description of Artificial Sequence: Synthetic oligonucleotide
uugagauggggucuuccuc

SEQ ID NO: 34199 - RNA, 19 nt, Artificial Sequence
  Description of Artificial Sequence: Synthetic oligonucleotide
auggggucuuccucuguug

SEQ ID NO: 34200 - RNA, 19 nt, Artificial Sequence
  Description of Artificial Sequence: Synthetic oligonucleotide
cuguugcccaggcuggagu

SEQ ID NO: 34201 - RNA, 19 nt, Artificial Sequence
  Description of Artificial Sequence: Synthetic oligonucleotide
gcccaggcuggagugcagu

SEQ ID NO: 34202 - RNA, 19 nt, Artificial Sequence
  Description of Artificial Sequence: Synthetic oligonucleotide
ugcaguggugcaaucuugg

SEQ ID NO: 34203 - RNA, 19 nt, Artificial Sequence
  Description of Artificial Sequence: Synthetic oligonucleotide
uggugcaaucuuggcucac

SEQ ID NO: 34204 - RNA, 19 nt, Artificial Sequence
  Description of Artificial Sequence: Synthetic oligonucleotide
gcucacuguaaccuccgcc

SEQ ID NO: 34205 - RNA, 19 nt, Artificial Sequence
  Description of Artificial Sequence: Synthetic oligonucleotide
cuguaaccuccgccuccca

SEQ ID NO: 34206 - RNA, 19 nt, Artificial Sequence
  Description of Artificial Sequence: Synthetic oligonucleotide
cucccagguucaagugauu

SEQ ID NO: 34207 - RNA, 19 nt, Artificial Sequence
  Description of Artificial Sequence: Synthetic oligonucleotide
agguucaagugauucuucu

SEQ ID NO: 34208 - RNA, 19 nt, Artificial Sequence
  Description of Artificial Sequence: Synthetic oligonucleotide
ucuucugccucagccuccu

SEQ ID NO: 34209 - RNA, 19 nt, Artificial Sequence
  Description of Artificial Sequence: Synthetic oligonucleotide
ugccucagccuccugagua

SEQ ID NO: 34210 - RNA, 19 nt, Artificial Sequence
  Description of Artificial Sequence: Synthetic oligonucleotide
ugaguagcugggauuacag

SEQ ID NO: 34211 - RNA, 19 nt, Artificial Sequence
  Description of Artificial Sequence: Synthetic oligonucleotide
agcugggauuacaggugug

SEQ ID NO: 34212 - RNA, 19 nt, Artificial Sequence
  Description of Artificial Sequence: Synthetic oligonucleotide
ggugugcaccaccguaccc

SEQ ID NO: 34213 - RNA, 19 nt, Artificial Sequence
  Description of Artificial Sequence: Synthetic oligonucleotide
gcaccaccguacccagcua

SEQ ID NO: 34214 - RNA, 19 nt, Artificial Sequence
  Description of Artificial Sequence: Synthetic oligonucleotide
cagcuaauuuuuguauuuu

SEQ ID NO: 34215 - RNA, 19 nt, Artificial Sequence
  Description of Artificial Sequence: Synthetic oligonucleotide
aauuuuuguauuuuaguag

SEQ ID NO: 34216 - RNA, 19 nt, Artificial Sequence
  Description of Artificial Sequence: Synthetic oligonucleotide
uaguagagacggggguuuc

SEQ ID NO: 34217 - RNA, 19 nt, Artificial Sequence
  Description of Artificial Sequence: Synthetic oligonucleotide
gagacggggguuucaccau

SEQ ID NO: 34218 - RNA, 19 nt, Artificial Sequence
  Description of Artificial Sequence: Synthetic oligonucleotide
caccauguuggcugggcug

SEQ ID NO: 34219 - RNA, 19 nt, Artificial Sequence
  Description of Artificial Sequence: Synthetic oligonucleotide
uguuggcugggcuggucuc

SEQ ID NO: 34220 - RNA, 19 nt, Artificial Sequence
  Description of Artificial Sequence: Synthetic oligonucleotide
ggucucgaacuccugaccu

SEQ ID NO: 34221 - RNA, 19 nt, Artificial Sequence
  Description of Artificial Sequence: Synthetic oligonucleotide
cgaacuccugaccucaggu

SEQ ID NO: 34222 - RNA, 19 nt, Artificial Sequence
  Description of Artificial Sequence: Synthetic oligonucleotide
ucaggugauccacccgccu

SEQ ID NO: 34223 - RNA, 19 nt, Artificial Sequence
  Description of Artificial Sequence: Synthetic oligonucleotide
ugauccacccgccugagcc

SEQ ID NO: 34224 - RNA, 19 nt, Artificial Sequence
  Description of Artificial Sequence: Synthetic oligonucleotide
ugagccucccaaagugcug

SEQ ID NO: 34225 - RNA, 19 nt, Artificial Sequence
  Description of Artificial Sequence: Synthetic oligonucleotide
cucccaaagugcugggauu

SEQ ID NO: 34226 - RNA, 19 nt, Artificial Sequence
  Description of Artificial Sequence: Synthetic oligonucleotide
gggauuacaggcaugagcc

SEQ ID NO: 34227 - RNA, 19 nt, Artificial Sequence
  Description of Artificial Sequence: Synthetic oligonucleotide
uacaggcaugagccaccgc

SEQ ID NO: 34228 - RNA, 19 nt, Artificial Sequence
  Description of Artificial Sequence: Synthetic oligonucleotide
caccgcgcccggcccacuc

SEQ ID NO: 34229 - RNA, 19 nt, Artificial Sequence
  Description of Artificial Sequence: Synthetic oligonucleotide
cgcccggcccacucugcca

SEQ ID NO: 34230 - RNA, 19 nt, Artificial Sequence
  Description of Artificial Sequence: Synthetic oligonucleotide
cugccauugucuaagccac

SEQ ID NO: 34231 - RNA, 19 nt, Artificial Sequence
  Description of Artificial Sequence: Synthetic oligonucleotide
auugucuaagccaccucug

SEQ ID NO: 34232 - RNA, 19 nt, Artificial Sequence
  Description of Artificial Sequence: Synthetic oligonucleotide
ccucugaaagcagguuuua

SEQ ID NO: 34233 - RNA, 19 nt, Artificial Sequence
  Description of Artificial Sequence: Synthetic oligonucleotide
gaaagcagguuuuaacaaa

SEQ ID NO: 34234 - RNA, 19 nt, Artificial Sequence
  Description of Artificial Sequence: Synthetic oligonucleotide
aacaaaaggaugaggccag

SEQ ID NO: 34235 - RNA, 19 nt, Artificial Sequence
  Description of Artificial Sequence: Synthetic oligonucleotide
aaggaugaggccagaacuc

SEQ ID NO: 34236 - RNA, 19 nt, Artificial Sequence
  Description of Artificial Sequence: Synthetic oligonucleotide
gaacucuuccagaaccauc

SEQ ID NO: 34237 - RNA, 19 nt, Artificial Sequence
  Description of Artificial Sequence: Synthetic oligonucleotide
cuuccagaaccaucaccuu

SEQ ID NO: 34238 - RNA, 19 nt, Artificial Sequence
  Description of Artificial Sequence: Synthetic oligonucleotide
caccuuugggaaccugcug

SEQ ID NO: 34239 - RNA, 19 nt, Artificial Sequence
  Description of Artificial Sequence: Synthetic oligonucleotide
uugggaaccugcugugaga

SEQ ID NO: 34240 - RNA, 19 nt, Artificial Sequence
  Description of Artificial Sequence: Synthetic oligonucleotide
gugagagugcugagguacc

SEQ ID NO: 34241 - RNA, 19 nt, Artificial Sequence
  Description of Artificial Sequence: Synthetic oligonucleotide
agugcugagguaccagaag

SEQ ID NO: 34242 - RNA, 19 nt, Artificial Sequence
  Description of Artificial Sequence: Synthetic oligonucleotide
cagaagugugagaacgagg

SEQ ID NO: 34243 - RNA, 19 nt, Artificial Sequence
  Description of Artificial Sequence: Synthetic oligonucleotide
gugugagaacgagggggcg

SEQ ID NO: 34244 - RNA, 19 nt, Artificial Sequence
  Description of Artificial Sequence: Synthetic oligonucleotide
ggggcgugcugggaucuuu

SEQ ID NO: 34245 - RNA, 19 nt, Artificial Sequence
  Description of Artificial Sequence: Synthetic oligonucleotide
gugcugggaucuuucucuc

SEQ ID NO: 34246 - RNA, 19 nt, Artificial Sequence
  Description of Artificial Sequence: Synthetic oligonucleotide
ucucucugacuauacuuag

SEQ ID NO: 34247 - RNA, 19 nt, Artificial Sequence
  Description of Artificial Sequence: Synthetic oligonucleotide
cugacuauacuuaguuuga

SEQ ID NO: 34248 - RNA, 19 nt, Artificial Sequence
  Description of Artificial Sequence: Synthetic oligonucleotide
guuugaaauggugcaggcu

SEQ ID NO: 34249 - RNA, 19 nt, Artificial Sequence
  Description of Artificial Sequence: Synthetic oligonucleotide
aaauggugcaggcuuaguc

SEQ ID NO: 34250 - RNA, 19 nt, Artificial Sequence
  Description of Artificial Sequence: Synthetic oligonucleotide
uuagucuuaagccuccaaa

SEQ ID NO: 34251 - RNA, 19 nt, Artificial Sequence
  Description of Artificial Sequence: Synthetic oligonucleotide
cuuaagccuccaaaggccu

SEQ ID NO: 34252 - RNA, 19 nt, Artificial Sequence
  Description of Artificial Sequence: Synthetic oligonucleotide
aggccuggauuugagcagc

SEQ ID NO: 34253 - RNA, 19 nt, Artificial Sequence
  Description of Artificial Sequence: Synthetic oligonucleotide
uggauuugagcagcuuuag

SEQ ID NO: 34254 - RNA, 19 nt, Artificial Sequence
  Description of Artificial Sequence: Synthetic oligonucleotide
cuuuagaaaugcagguucu

SEQ ID NO: 34255 - RNA, 19 nt, Artificial Sequence
  Description of Artificial Sequence: Synthetic oligonucleotide
gaaaugcagguucuagggc

SEQ ID NO: 34256 - RNA, 19 nt, Artificial Sequence
  Description of Artificial Sequence: Synthetic oligonucleotide
uagggcuucucccagccuu

SEQ ID NO: 34257 - RNA, 19 nt, Artificial Sequence
  Description of Artificial Sequence: Synthetic oligonucleotide
cuucucccagccuucagaa

SEQ ID NO: 34258 - RNA, 19 nt, Artificial Sequence
  Description of Artificial Sequence: Synthetic oligonucleotide
ucagaagccaacuaacucu

SEQ ID NO: 34259 - RNA, 19 nt, Artificial Sequence
  Description of Artificial Sequence: Synthetic oligonucleotide
agccaacuaacucugcaga

SEQ ID NO: 34260 - RNA, 19 nt, Artificial Sequence
  Description of Artificial Sequence: Synthetic oligonucleotide
ugcagauggggcuaggacu

SEQ ID NO: 34261 - RNA, 19 nt, Artificial Sequence
  Description of Artificial Sequence: Synthetic oligonucleotide
auggggcuaggacuguggg

SEQ ID NO: 34262 - RNA, 19 nt, Artificial Sequence
  Description of Artificial Sequence: Synthetic oligonucleotide
ugugggcuuuuagcagccc

SEQ ID NO: 34263 - RNA, 19 nt, Artificial Sequence
  Description of Artificial Sequence: Synthetic oligonucleotide
gcuuuuagcagcccacagg

SEQ ID NO: 34264 - RNA, 19 nt, Artificial Sequence
  Description of Artificial Sequence: Synthetic oligonucleotide
cacaggugauccuaacaua

SEQ ID NO: 34265 - RNA, 19 nt, Artificial Sequence
  Description of Artificial Sequence: Synthetic oligonucleotide
gugauccuaacauaucagg

SEQ ID NO: 34266 - RNA, 19 nt, Artificial Sequence
  Description of Artificial Sequence: Synthetic oligonucleotide
aucaggccauggacucagg

SEQ ID NO: 34267 - RNA, 19 nt, Artificial Sequence
  Description of Artificial Sequence: Synthetic oligonucleotide
gccauggacucaggaccug

SEQ ID NO: 34268 - RNA, 19 nt, Artificial Sequence
  Description of Artificial Sequence: Synthetic oligonucleotide
gaccugcccggugaugcug

SEQ ID NO: 34269 - RNA, 19 nt, Artificial Sequence
  Description of Artificial Sequence: Synthetic oligonucleotide
gcccggugaugcuguugau

SEQ ID NO: 34270 - RNA, 19 nt, Artificial Sequence
  Description of Artificial Sequence: Synthetic oligonucleotide
guugauuucucaaaggucu

SEQ ID NO: 34271 - RNA, 19 nt, Artificial Sequence
  Description of Artificial Sequence: Synthetic oligonucleotide
uuucucaaaggucuuccaa

SEQ ID NO: 34272 - RNA, 19 nt, Artificial Sequence
  Description of Artificial Sequence: Synthetic oligonucleotide
uuccaaaacucaacagagc

SEQ ID NO: 34273 - RNA, 19 nt, Artificial Sequence
  Description of Artificial Sequence: Synthetic oligonucleotide
aaacucaacagagccagaa

SEQ ID NO: 34274 - RNA, 19 nt, Artificial Sequence
  Description of Artificial Sequence: Synthetic oligonucleotide
ccagaaguagccgcccgcu

SEQ ID NO: 34275 - RNA, 19 nt, Artificial Sequence
  Description of Artificial Sequence: Synthetic oligonucleotide
aguagccgcccgcucagcg

SEQ ID NO: 34276 - RNA, 19 nt, Artificial Sequence
  Description of Artificial Sequence: Synthetic oligonucleotide
ucagcggcucaggugccag

SEQ ID NO: 34277 - RNA, 19 nt, Artificial Sequence
  Description of Artificial Sequence: Synthetic oligonucleotide
ggcucaggugccagcucug

SEQ ID NO: 34278 - RNA, 19 nt, Artificial Sequence
  Description of Artificial Sequence: Synthetic oligonucleotide
gcucuguucugauucacca

SEQ ID NO: 34279 - RNA, 19 nt, Artificial Sequence
  Description of Artificial Sequence: Synthetic oligonucleotide
guucugauucaccaggggu

SEQ ID NO: 34280 - RNA, 19 nt, Artificial Sequence
  Description of Artificial Sequence: Synthetic oligonucleotide
agggguccgucaguaguca

SEQ ID NO: 34281 - RNA, 19 nt, Artificial Sequence
  Description of Artificial Sequence: Synthetic oligonucleotide
uccgucaguagucauugcc

SEQ ID NO: 34282 - RNA, 19 nt, Artificial Sequence
  Description of Artificial Sequence: Synthetic oligonucleotide
auugccacccgcggggcac

SEQ ID NO: 34283 - RNA, 19 nt, Artificial Sequence
  Description of Artificial Sequence: Synthetic oligonucleotide
cacccgcggggcaccuccc

SEQ ID NO: 34284 - RNA, 19 nt, Artificial Sequence
  Description of Artificial Sequence: Synthetic oligonucleotide
ccucccuggccacacgccu

SEQ ID NO: 34285 - RNA, 19 nt, Artificial Sequence
  Description of Artificial Sequence: Synthetic oligonucleotide
cuggccacacgccuguucc

SEQ ID NO: 34286 - RNA, 19 nt, Artificial Sequence
  Description of Artificial Sequence: Synthetic oligonucleotide
uguucccagcaagugcuga

SEQ ID NO: 34287 - RNA, 19 nt, Artificial Sequence
  Description of Artificial Sequence: Synthetic oligonucleotide
ccagcaagugcugaaacuc

SEQ ID NO: 34288 - RNA, 19 nt, Artificial Sequence
  Description of Artificial Sequence: Synthetic oligonucleotide
aaacucacuagaccgucug

SEQ ID NO: 34289 - RNA, 19 nt, Artificial Sequence
  Description of Artificial Sequence: Synthetic oligonucleotide
cacuagaccgucugccugu

SEQ ID NO: 34290 - RNA, 19 nt, Artificial Sequence
  Description of Artificial Sequence: Synthetic oligonucleotide
gccuguuucgaaaugggga

SEQ ID NO: 34291 - RNA, 19 nt, Artificial Sequence
  Description of Artificial Sequence: Synthetic oligonucleotide
uuucgaaauggggaaagcc

SEQ ID NO: 34292 - RNA, 19 nt, Artificial Sequence
  Description of Artificial Sequence: Synthetic oligonucleotide
aaagccgugcgugcgcguu

SEQ ID NO: 34293 - RNA, 19 nt, Artificial Sequence
  Description of Artificial Sequence: Synthetic oligonucleotide
cgugcgugcgcguuauuua

SEQ ID NO: 34294 - RNA, 19 nt, Artificial Sequence
  Description of Artificial Sequence: Synthetic oligonucleotide
uauuuauuuaagugcgccu

SEQ ID NO: 34295 - RNA, 19 nt, Artificial Sequence
  Description of Artificial Sequence: Synthetic oligonucleotide
auuuaagugcgccugugug

SEQ ID NO: 34296 - RNA, 19 nt, Artificial Sequence
  Description of Artificial Sequence: Synthetic oligonucleotide
ugugugcgcggguguggga

SEQ ID NO: 34297 - RNA, 19 nt, Artificial Sequence
  Description of Artificial Sequence: Synthetic oligonucleotide
gcgcgggugugggagcaca

SEQ ID NO: 34298 - RNA, 19 nt, Artificial Sequence
  Description of Artificial Sequence: Synthetic oligonucleotide
agcacacuuugcaaagcca

SEQ ID NO: 34299 - RNA, 19 nt, Artificial Sequence
  Description of Artificial Sequence: Synthetic oligonucleotide
acuuugcaaagccacagcg

SEQ ID NO: 34300 - RNA, 19 nt, Artificial Sequence
  Description of Artificial Sequence: Synthetic oligonucleotide
acagcguuucugguuuugg

SEQ ID NO: 34301 - RNA, 19 nt, Artificial Sequence
  Description of Artificial Sequence: Synthetic oligonucleotide
guuucugguuuugggugua

SEQ ID NO: 34302 - RNA, 19 nt, Artificial Sequence
  Description of Artificial Sequence: Synthetic oligonucleotide
gguguacagucuugugugc

SEQ ID NO: 34303 - RNA, 19 nt, Artificial Sequence
  Description of Artificial Sequence: Synthetic oligonucleotide
acagucuugugugccuggc

SEQ ID NO: 34304 - RNA, 19 nt, Artificial Sequence
  Description of Artificial Sequence: Synthetic oligonucleotide
ccuggcgagaagaauauuu

SEQ ID NO: 34305 - RNA, 19 nt, Artificial Sequence
  Description of Artificial Sequence: Synthetic oligonucleotide
cgagaagaauauuuucuau

SEQ ID NO: 34306 - RNA, 19 nt, Artificial Sequence
  Description of Artificial Sequence: Synthetic oligonucleotide
uucuauuuuuuuaagucau

SEQ ID NO: 34307 - RNA, 19 nt, Artificial Sequence
  Description of Artificial Sequence: Synthetic oligonucleotide
uuuuuuuaagucauuucau

SEQ ID NO: 34308 - RNA, 19 nt, Artificial Sequence
  Description of Artificial Sequence: Synthetic oligonucleotide
uuucauguuucugucuggg

SEQ ID NO: 34309 - RNA, 19 nt, Artificial Sequence
  Description of Artificial Sequence: Synthetic oligonucleotide
uguuucugucuggggaagg

SEQ ID NO: 34310 - RNA, 19 nt, Artificial Sequence
  Description of Artificial Sequence: Synthetic oligonucleotide
ggaaggcaaguuaguuaag

SEQ ID NO: 34311 - RNA, 19 nt, Artificial Sequence
  Description of Artificial Sequence: Synthetic oligonucleotide
gcaaguuaguuaaguauca

SEQ ID NO: 34312 - RNA, 19 nt, Artificial Sequence
  Description of Artificial Sequence: Synthetic oligonucleotide
guaucacugauguggguug

SEQ ID NO: 34313 - RNA, 19 nt, Artificial Sequence
  Description of Artificial Sequence: Synthetic oligonucleotide
acugauguggguugagacc

SEQ ID NO: 34314 - RNA, 19 nt, Artificial Sequence
  Description of Artificial Sequence: Synthetic oligonucleotide
gagaccagcacucugugaa

SEQ ID NO: 34315 - RNA, 19 nt, Artificial Sequence
  Description of Artificial Sequence: Synthetic oligonucleotide
cagcacucugugaaaccuu

SEQ ID NO: 34316 - RNA, 19 nt, Artificial Sequence
  Description of Artificial Sequence: Synthetic oligonucleotide
aaccuugaaaugagaagua

SEQ ID NO: 34317 - RNA, 19 nt, Artificial Sequence
  Description of Artificial Sequence: Synthetic oligonucleotide
ugaaaugagaaguaaaggc

SEQ ID NO: 34318 - RNA, 19 nt, Artificial Sequence
  Description of Artificial Sequence: Synthetic oligonucleotide
aaaggcagaugaaaagaaa

SEQ ID NO: 34319 - RNA, 19 nt, Artificial Sequence
  Description of Artificial Sequence: Synthetic oligonucleotide
cagaugaaaagaaagaaaa

SEQ ID NO: 34320 - RNA, 19 nt, Artificial Sequence
  Description of Artificial Sequence: Synthetic oligonucleotide
agaaaaagccuuuuuaugu

SEQ ID NO: 34321 - RNA, 19 nt, Artificial Sequence
  Description of Artificial Sequence: Synthetic oligonucleotide
aagccuuuuuauguucuuu

SEQ ID NO: 34322 - RNA, 19 nt, Artificial Sequence
  Description of Artificial Sequence: Synthetic oligonucleotide
uucuuuuauguucucggcu

SEQ ID NO: 34323 - RNA, 19 nt, Artificial Sequence
  Description of Artificial Sequence: Synthetic oligonucleotide
uuauguucucggcucaaaa

SEQ ID NO: 34324 - RNA, 19 nt, Artificial Sequence
  Description of Artificial Sequence: Synthetic oligonucleotide
ucaaaaagaaacaagggag

SEQ ID NO: 34325 - RNA, 19 nt, Artificial Sequence
  Description of Artificial Sequence: Synthetic oligonucleotide
aagaaacaagggaguguag

SEQ ID NO: 34326 - RNA, 19 nt, Artificial Sequence
  Description of Artificial Sequence: Synthetic oligonucleotide
guguagguuuaaaaccaaa

SEQ ID NO: 34327 - RNA, 19 nt, Artificial Sequence
  Description of Artificial Sequence: Synthetic oligonucleotide
gguuuaaaaccaaaacagg

SEQ ID NO: 34328 - RNA, 19 nt, Artificial Sequence
  Description of Artificial Sequence: Synthetic oligonucleotide
aacaggagagaagacaaac

SEQ ID NO: 34329 - RNA, 19 nt, Artificial Sequence
  Description of Artificial Sequence: Synthetic oligonucleotide
gagagaagacaaaccccgc

SEQ ID NO: 34330 - RNA, 19 nt, Artificial Sequence
  Description of Artificial Sequence: Synthetic oligonucleotide
ccccgcuccggcuggaguu

SEQ ID NO: 34331 - RNA, 19 nt, Artificial Sequence
  Description of Artificial Sequence: Synthetic oligonucleotide
cuccggcuggaguuaguua

SEQ ID NO: 34332 - RNA, 19 nt, Artificial Sequence
  Description of Artificial Sequence: Synthetic oligonucleotide
uaguuagaaccagaacuuu

SEQ ID NO: 34333 - RNA, 19 nt, Artificial Sequence
  Description of Artificial Sequence: Synthetic oligonucleotide
agaaccagaacuuuauugu

SEQ ID NO: 34334 - RNA, 19 nt, Artificial Sequence
  Description of Artificial Sequence: Synthetic oligonucleotide
uauuguagcggauacacuu

SEQ ID NO: 34335 - RNA, 19 nt, Artificial Sequence
  Description of Artificial Sequence: Synthetic oligonucleotide
uagcggauacacuuucuga

SEQ ID NO: 34336 - RNA, 19 nt, Artificial Sequence
  Description of Artificial Sequence: Synthetic oligonucleotide
uucugaccuaucaugagua

SEQ ID NO: 34337 - RNA, 19 nt, Artificial Sequence
  Description of Artificial Sequence: Synthetic oligonucleotide
accuaucaugaguauacac

SEQ ID NO: 34338 - RNA, 19 nt, Artificial Sequence
  Description of Artificial Sequence: Synthetic oligonucleotide
auacacaucugcgaaggga

SEQ ID NO: 34339 - RNA, 19 nt, Artificial Sequence
  Description of Artificial Sequence: Synthetic oligonucleotide
caucugcgaagggaaaccg

SEQ ID NO: 34340 - RNA, 19 nt, Artificial Sequence
  Description of Artificial Sequence: Synthetic oligonucleotide
gggaaaccgcgcggcgaca

SEQ ID NO: 34341 - RNA, 25 nt, Artificial Sequence
  Description of Artificial Sequence: Synthetic oligonucleotide
cagucgcuccgagcggccgcgagca

SEQ ID NO: 34342 - RNA, 25 nt, Artificial Sequence
  Description of Artificial Sequence: Synthetic oligonucleotide
agagccgcccagcccugucagcugc

SEQ ID NO: 34343 - RNA, 25 nt, Artificial Sequence
  Description of Artificial Sequence: Synthetic oligonucleotide
cgccgggacgauaaggagucaggcc

SEQ ID NO: 34344 - RNA, 25 nt, Artificial Sequence
  Description of Artificial Sequence: Synthetic oligonucleotide
cagggcgggaugacacucauugauu

SEQ ID NO: 34345 - RNA, 25 nt, Artificial Sequence
  Description of Artificial Sequence: Synthetic oligonucleotide
ucuaaagcaucuuuaaucugccagg

SEQ ID NO: 34346 - RNA, 25 nt, Artificial Sequence
  Description of Artificial Sequence: Synthetic oligonucleotide
gcggagggggcuuugcuggucuuuc

SEQ ID NO: 34347 - RNA, 25 nt, Artificial Sequence
  Description of Artificial Sequence: Synthetic oligonucleotide
cuuggacuauuccagagaggacaac

SEQ ID NO: 34348 - RNA, 25 nt, Artificial Sequence
  Description of Artificial Sequence: Synthetic oligonucleotide
cugucaucugggaaguaacaacgca

SEQ ID NO: 34349 - RNA, 25 nt, Artificial Sequence
  Description of Artificial Sequence: Synthetic oligonucleotide
aggaugcccccugggguggacugcc

SEQ ID NO: 34350 - RNA, 25 nt, Artificial Sequence
  Description of Artificial Sequence: Synthetic oligonucleotide
cccauggaauucuggaccaaggagg

SEQ ID NO: 34351 - RNA, 25 nt, Artificial Sequence
  Description of Artificial Sequence: Synthetic oligonucleotide
gagaaucagagcguugugguugacu

SEQ ID NO: 34352 - RNA, 25 nt, Artificial Sequence
  Description of Artificial Sequence: Synthetic oligonucleotide
uuccugcugcccacaggggucuacc

SEQ ID NO: 34353 - RNA, 25 nt, Artificial Sequence
  Description of Artificial Sequence: Synthetic oligonucleotide
cugaacuucccugugucccgcaaug

SEQ ID NO: 34354 - RNA, 25 nt, Artificial Sequence
  Description of Artificial Sequence: Synthetic oligonucleotide
gccaaccucagcaccaucaagcagc

SEQ ID NO: 34355 - RNA, 25 nt, Artificial Sequence
  Description of Artificial Sequence: Synthetic oligonucleotide
cugcuguggcaccgcgcccaguaug

SEQ ID NO: 34356 - RNA, 25 nt, Artificial Sequence
  Description of Artificial Sequence: Synthetic oligonucleotide
gagccgcucuuccacaugcucagug

SEQ ID NO: 34357 - RNA, 25 nt, Artificial Sequence
  Description of Artificial Sequence: Synthetic oligonucleotide
ggccccgaggccuauguguucaccu

SEQ ID NO: 34358 - RNA, 25 nt, Artificial Sequence
  Description of Artificial Sequence: Synthetic oligonucleotide
ugcaucaaccagacagcggagcagc

SEQ ID NO: 34359 - RNA, 25 nt, Artificial Sequence
  Description of Artificial Sequence: Synthetic oligonucleotide
caagagcuggaggacgagcaacggc

SEQ ID NO: 34360 - RNA, 25 nt, Artificial Sequence
  Description of Artificial Sequence: Synthetic oligonucleotide
cgucugugugacgugcagcccuucc

SEQ ID NO: 34361 - RNA, 25 nt, Artificial Sequence
  Description of Artificial Sequence: Synthetic oligonucleotide
cugcccguccugcgccugguggccc

SEQ ID NO: 34362 - RNA, 25 nt, Artificial Sequence
  Description of Artificial Sequence: Synthetic oligonucleotide
cgugagggcgaccgcgugaagaagc

SEQ ID NO: 34363 - RNA, 25 nt, Artificial Sequence
  Description of Artificial Sequence: Synthetic oligonucleotide
cucaucaacucacagaucagccucc

SEQ ID NO: 34364 - RNA, 25 nt, Artificial Sequence
  Description of Artificial Sequence: Synthetic oligonucleotide
cucaucggcaaaggccuccacgagu

SEQ ID NO: 34365 - RNA, 25 nt, Artificial Sequence
  Description of Artificial Sequence: Synthetic oligonucleotide
uuugacuccuugugcgacccagaag

SEQ ID NO: 34366 - RNA, 25 nt, Artificial Sequence
  Description of Artificial Sequence: Synthetic oligonucleotide
gugaacgacuuucgcgccaagaugu

SEQ ID NO: 34367 - RNA, 25 nt, Artificial Sequence
  Description of Artificial Sequence: Synthetic oligonucleotide
ugccaauucugcgaggaggcggccg

SEQ ID NO: 34368 - RNA, 25 nt, Artificial Sequence
  Description of Artificial Sequence: Synthetic oligonucleotide
gcccgccggcagcagcugggcuggg

SEQ ID NO: 34369 - RNA, 25 nt, Artificial Sequence
  Description of Artificial Sequence: Synthetic oligonucleotide
gaggccuggcugcaguacaguuucc

SEQ ID NO: 34370 - RNA, 25 nt, Artificial Sequence
  Description of Artificial Sequence: Synthetic oligonucleotide
ccccugcagcuggagcccucggcuc

SEQ ID NO: 34371 - RNA, 25 nt, Artificial Sequence
  Description of Artificial Sequence: Synthetic oligonucleotide
caaaccugggggccugguacccugc

SEQ ID NO: 34372 - RNA, 25 nt, Artificial Sequence
  Description of Artificial Sequence: Synthetic oligonucleotide
cggcucccgaaccgggcccuucugg

SEQ ID NO: 34373 - RNA, 25 nt, Artificial Sequence
  Description of Artificial Sequence: Synthetic oligonucleotide
gucaacguuaaguuugagggcagcg

SEQ ID NO: 34374 - RNA, 25 nt, Artificial Sequence
  Description of Artificial Sequence: Synthetic oligonucleotide
gaggagagcuucaccuuccaggugu

SEQ ID NO: 34375 - RNA, 25 nt, Artificial Sequence
  Description of Artificial Sequence: Synthetic oligonucleotide
uccaccaaggacgugccgcuggcgc

SEQ ID NO: 34376 - RNA, 25 nt, Artificial Sequence
  Description of Artificial Sequence: Synthetic oligonucleotide
cugauggccugugcccugcggaaga

SEQ ID NO: 34377 - RNA, 25 nt, Artificial Sequence
  Description of Artificial Sequence: Synthetic oligonucleotide
aaggccacaguguuccggcagccgc

SEQ ID NO: 34378 - RNA, 25 nt, Artificial Sequence
  Description of Artificial Sequence: Synthetic oligonucleotide
cugguggagcagccggaagacuaca

SEQ ID NO: 34379 - RNA, 25 nt, Artificial Sequence
  Description of Artificial Sequence: Synthetic oligonucleotide
acgcugcaggugaacggcaggcaug

SEQ ID NO: 34380 - RNA, 25 nt, Artificial Sequence
  Description of Artificial Sequence: Synthetic oligonucleotide
gaguaccuguauggcaacuacccgc

SEQ ID NO: 34381 - RNA, 25 nt, Artificial Sequence
  Description of Artificial Sequence: Synthetic oligonucleotide
cucugccaguuccaguacaucugca

SEQ ID NO: 34382 - RNA, 25 nt, Artificial Sequence
  Description of Artificial Sequence: Synthetic oligonucleotide
agcugccugcacaguggguugaccc

SEQ ID NO: 34383 - RNA, 25 nt, Artificial Sequence
  Description of Artificial Sequence: Synthetic oligonucleotide
ccucaccugaccaugguccauuccu

SEQ ID NO: 34384 - RNA, 25 nt, Artificial Sequence
  Description of Artificial Sequence: Synthetic oligonucleotide
uccuccauccucgccaugcgggaug

SEQ ID NO: 34385 - RNA, 25 nt, Artificial Sequence
  Description of Artificial Sequence: Synthetic oligonucleotide
gagcagagcaacccugccccccagg

SEQ ID NO: 34386 - RNA, 25 nt, Artificial Sequence
  Description of Artificial Sequence: Synthetic oligonucleotide
guccagaaaccgcgugccaaaccac

SEQ ID NO: 34387 - RNA, 25 nt, Artificial Sequence
  Description of Artificial Sequence: Synthetic oligonucleotide
ccucccauuccugcgaagaagccuu

SEQ ID NO: 34388 - RNA, 25 nt, Artificial Sequence
  Description of Artificial Sequence: Synthetic oligonucleotide
uccucugugucccuguggucccugg

SEQ ID NO: 34389 - RNA, 25 nt, Artificial Sequence
  Description of Artificial Sequence: Synthetic oligonucleotide
gagcagccguuccgcaucgagcuca

SEQ ID NO: 34390 - RNA, 25 nt, Artificial Sequence
  Description of Artificial Sequence: Synthetic oligonucleotide
auccagggcagcaaagugaacgccg

SEQ ID NO: 34391 - RNA, 25 nt, Artificial Sequence
  Description of Artificial Sequence: Synthetic oligonucleotide
gacgagcggaugaagcugguggugc

SEQ ID NO: 34392 - RNA, 25 nt, Artificial Sequence
  Description of Artificial Sequence: Synthetic oligonucleotide
caggccgggcuuuuccacggcaacg

SEQ ID NO: 34393 - RNA, 25 nt, Artificial Sequence
  Description of Artificial Sequence: Synthetic oligonucleotide
gagaugcugugcaagacggugucca

SEQ ID NO: 34394 - RNA, 25 nt, Artificial Sequence
  Description of Artificial Sequence: Synthetic oligonucleotide
agcucggaggugagcgugugcucgg

SEQ ID NO: 34395 - RNA, 25 nt, Artificial Sequence
  Description of Artificial Sequence: Synthetic oligonucleotide
gagcccguguggaagcagcggcugg

SEQ ID NO: 34396 - RNA, 25 nt, Artificial Sequence
  Description of Artificial Sequence: Synthetic oligonucleotide
gaguucgacaucaacaucugcgacc

SEQ ID NO: 34397 - RNA, 25 nt, Artificial Sequence
  Description of Artificial Sequence: Synthetic oligonucleotide
cugccccgcauggcccgucucugcu

SEQ ID NO: 34398 - RNA, 25 nt, Artificial Sequence
  Description of Artificial Sequence: Synthetic oligonucleotide
uuugcgcuguacgccgugaucgaga

SEQ ID NO: 34399 - RNA, 25 nt, Artificial Sequence
  Description of Artificial Sequence: Synthetic oligonucleotide
aaagccaagaaggcucgcuccacca

SEQ ID NO: 34400 - RNA, 25 nt, Artificial Sequence
  Description of Artificial Sequence: Synthetic oligonucleotide
aagaagaaguccaagaaggcggacu

SEQ ID NO: 34401 - RNA, 25 nt, Artificial Sequence
  Description of Artificial Sequence: Synthetic oligonucleotide
ugccccauugccugggccaaccuca

SEQ ID NO: 34402 - RNA, 25 nt, Artificial Sequence
  Description of Artificial Sequence: Synthetic oligonucleotide
augcuguuugacuacaaggaccagc

SEQ ID NO: 34403 - RNA, 25 nt, Artificial Sequence
  Description of Artificial Sequence: Synthetic oligonucleotide
cuuaagaccggggaacgcugccucu

SEQ ID NO: 34404 - RNA, 25 nt, Artificial Sequence
  Description of Artificial Sequence: Synthetic oligonucleotide
uacauguggcccuccgucccagaug

SEQ ID NO: 34405 - RNA, 25 nt, Artificial Sequence
  Description of Artificial Sequence: Synthetic oligonucleotide
gagaagggcgagcugcugaacccca

SEQ ID NO: 34406 - RNA, 25 nt, Artificial Sequence
  Description of Artificial Sequence: Synthetic oligonucleotide
acgggcacugugcgcaguaacccca

SEQ ID NO: 34407 - RNA, 25 nt, Artificial Sequence
  Description of Artificial Sequence: Synthetic oligonucleotide
aacacggauagcgccgcugcccugc

SEQ ID NO: 34408 - RNA, 25 nt, Artificial Sequence
  Description of Artificial Sequence: Synthetic oligonucleotide
cucaucugccugcccgagguggccc

SEQ ID NO: 34409 - RNA, 25 nt, Artificial Sequence
  Description of Artificial Sequence: Synthetic oligonucleotide
ccgcaccccguguacuaccccgccc

SEQ ID NO: 34410 - RNA, 25 nt, Artificial Sequence
  Description of Artificial Sequence: Synthetic oligonucleotide
cuggagaagaucuuggagcuggggc

SEQ ID NO: 34411 - RNA, 25 nt, Artificial Sequence
  Description of Artificial Sequence: Synthetic oligonucleotide
cgacacagcgagugugugcauguca

SEQ ID NO: 34412 - RNA, 25 nt, Artificial Sequence
  Description of Artificial Sequence: Synthetic oligonucleotide
accgaggaggagcagcugcagcugc

SEQ ID NO: 34413 - RNA, 25 nt, Artificial Sequence
  Description of Artificial Sequence: Synthetic oligonucleotide
cgggaaauccuggagcggcgggggu

SEQ ID NO: 34414 - RNA, 25 nt, Artificial Sequence
  Description of Artificial Sequence: Synthetic oligonucleotide
ucuggggagcuguaugagcacgaga

SEQ ID NO: 34415 - RNA, 25 nt, Artificial Sequence
  Description of Artificial Sequence: Synthetic oligonucleotide
aaggaccugguguggaagcugcggc

SEQ ID NO: 34416 - RNA, 25 nt, Artificial Sequence
  Description of Artificial Sequence: Synthetic oligonucleotide
caugaaguccaggagcacuucccgg

SEQ ID NO: 34417 - RNA, 25 nt, Artificial Sequence
  Description of Artificial Sequence: Synthetic oligonucleotide
gaggcgcuagcccggcugcugcugg

SEQ ID NO: 34418 - RNA, 25 nt, Artificial Sequence
  Description of Artificial Sequence: Synthetic oligonucleotide
gucaccaaguggaacaagcaugagg

SEQ ID NO: 34419 - RNA, 25 nt, Artificial Sequence
  Description of Artificial Sequence: Synthetic oligonucleotide
gauguggcccagaugcucuaccugc

SEQ ID NO: 34420 - RNA, 25 nt, Artificial Sequence
  Description of Artificial Sequence: Synthetic oligonucleotide
cugugcuccuggccggagcugcccg

SEQ ID NO: 34421 - RNA, 25 nt, Artificial Sequence
  Description of Artificial Sequence: Synthetic oligonucleotide
guccugagcgcccuggagcugcuag

SEQ ID NO: 34422 - RNA, 25 nt, Artificial Sequence
  Description of Artificial Sequence: Synthetic oligonucleotide
gacuucagcuuccccgauugccacg

SEQ ID NO: 34423 - RNA, 25 nt, Artificial Sequence
  Description of Artificial Sequence: Synthetic oligonucleotide
guaggcuccuucgccaucaagucgc

SEQ ID NO: 34424 - RNA, 25 nt, Artificial Sequence
  Description of Artificial Sequence: Synthetic oligonucleotide
cugcggaaacugacggacgaugagc

SEQ ID NO: 34425 - RNA, 25 nt, Artificial Sequence
  Description of Artificial Sequence: Synthetic oligonucleotide
cuguuccaguaccugcugcagcugg

SEQ ID NO: 34426 - RNA, 25 nt, Artificial Sequence
  Description of Artificial Sequence: Synthetic oligonucleotide
gugcaggugcucaaguacgaguccu

SEQ ID NO: 34427 - RNA, 25 nt, Artificial Sequence
  Description of Artificial Sequence: Synthetic oligonucleotide
uaccuggacugcgagcugaccaaau

SEQ ID NO: 34428 - RNA, 25 nt, Artificial Sequence
  Description of Artificial Sequence: Synthetic oligonucleotide
uuccugcuggaccgggcccuggcca

SEQ ID NO: 34429 - RNA, 25 nt, Artificial Sequence
  Description of Artificial Sequence: Synthetic oligonucleotide
aaccgcaagaucggccacuuccuuu

SEQ ID NO: 34430 - RNA, 25 nt, Artificial Sequence
  Description of Artificial Sequence: Synthetic oligonucleotide
uucuggcaccuccgcuccgagaugc

SEQ ID NO: 34431 - RNA, 25 nt, Artificial Sequence
  Description of Artificial Sequence: Synthetic oligonucleotide
cacgugccgucgguggcccugcgcu

SEQ ID NO: 34432 - RNA, 25 nt, Artificial Sequence
  Description of Artificial Sequence: Synthetic oligonucleotide
uucggccucauccuggaggccuacu

SEQ ID NO: 34433 - RNA, 25 nt, Artificial Sequence
  Description of Artificial Sequence: Synthetic oligonucleotide
ugcaggggcagcacccaccacauga

SEQ ID NO: 34434 - RNA, 25 nt, Artificial Sequence
  Description of Artificial Sequence: Synthetic oligonucleotide
aaggugcugaugaagcagggggaag

SEQ ID NO: 34435 - RNA, 25 nt, Artificial Sequence
  Description of Artificial Sequence: Synthetic oligonucleotide
gcacugagcaaacugaaggcccuga

SEQ ID NO: 34436 - RNA, 25 nt, Artificial Sequence
  Description of Artificial Sequence: Synthetic oligonucleotide
aaugacuucgucaagcugagcucuc

SEQ ID NO: 34437 - RNA, 25 nt, Artificial Sequence
  Description of Artificial Sequence: Synthetic oligonucleotide
cagaagacccccaagccccagacca

SEQ ID NO: 34438 - RNA, 25 nt, Artificial Sequence
  Description of Artificial Sequence: Synthetic oligonucleotide
aaggagcugaugcacuugugcaugc

SEQ ID NO: 34439 - RNA, 25 nt, Artificial Sequence
  Description of Artificial Sequence: Synthetic oligonucleotide
cggcaggaggccuaccuagaggccc

SEQ ID NO: 34440 - RNA, 25 nt, Artificial Sequence
  Description of Artificial Sequence: Synthetic oligonucleotide
cucucccaccugcaguccccacucg

SEQ ID NO: 34441 - RNA, 25 nt, Artificial Sequence
  Description of Artificial Sequence: Synthetic oligonucleotide
gaccccagcacccugcuggcugaag

SEQ ID NO: 34442 - RNA, 25 nt, Artificial Sequence
  Description of Artificial Sequence: Synthetic oligonucleotide
gucugcguggagcagugcaccuuca

SEQ ID NO: 34443 - RNA, 25 nt, Artificial Sequence
  Description of Artificial Sequence: Synthetic oligonucleotide
auggacuccaagaugaagccccugu

SEQ ID NO: 34444 - RNA, 25 nt, Artificial Sequence
  Description of Artificial Sequence: Synthetic oligonucleotide
uggaucauguacagcaacgaggagg

SEQ ID NO: 34445 - RNA, 25 nt, Artificial Sequence
  Description of Artificial Sequence: Synthetic oligonucleotide
gcaggcagcggcggcagcgugggca

SEQ ID NO: 34446 - RNA, 25 nt, Artificial Sequence
  Description of Artificial Sequence: Synthetic oligonucleotide
aucaucuuuaagaacggggaugacc

SEQ ID NO: 34447 - RNA, 25 nt, Artificial Sequence
  Description of Artificial Sequence: Synthetic oligonucleotide
cuccggcaggacaugcugacccugc

SEQ ID NO: 34448 - RNA, 25 nt, Artificial Sequence
  Description of Artificial Sequence: Synthetic oligonucleotide
cagaugauccagcucauggacgucc

SEQ ID NO: 34449 - RNA, 25 nt, Artificial Sequence
  Description of Artificial Sequence: Synthetic oligonucleotide
cuguggaagcaggaggggcuggacc

SEQ ID NO: 34450 - RNA, 25 nt, Artificial Sequence
  Description of Artificial Sequence: Synthetic oligonucleotide
cugaggaugacccccuauggcugcc

SEQ ID NO: 34451 - RNA, 25 nt, Artificial Sequence
  Description of Artificial Sequence: Synthetic oligonucleotide
cuccccaccggggaccgcacaggcc

SEQ ID NO: 34452 - RNA, 25 nt, Artificial Sequence
  Description of Artificial Sequence: Synthetic oligonucleotide
cucauugaggugguacuccguucag

SEQ ID NO: 34453 - RNA, 25 nt, Artificial Sequence
  Description of Artificial Sequence: Synthetic oligonucleotide
gacaccaucgccaacauccaacuca

SEQ ID NO: 34454 - RNA, 25 nt, Artificial Sequence
  Description of Artificial Sequence: Synthetic oligonucleotide
aacaagagcaacauggcagccacag

SEQ ID NO: 34455 - RNA, 25 nt, Artificial Sequence
  Description of Artificial Sequence: Synthetic oligonucleotide
gccgccuucaacaaggaugcccugc

SEQ ID NO: 34456 - RNA, 25 nt, Artificial Sequence
  Description of Artificial Sequence: Synthetic oligonucleotide
cucaacuggcugaaguccaagaacc

SEQ ID NO: 34457 - RNA, 25 nt, Artificial Sequence
  Description of Artificial Sequence: Synthetic oligonucleotide
ccgggggaggcccuggaucgagcca

SEQ ID NO: 34458 - RNA, 25 nt, Artificial Sequence
  Description of Artificial Sequence: Synthetic oligonucleotide
auugaggaguucacccucuccugug

SEQ ID NO: 34459 - RNA, 25 nt, Artificial Sequence
  Description of Artificial Sequence: Synthetic oligonucleotide
gcuggcuauuguguggccacauaug

SEQ ID NO: 34460 - RNA, 25 nt, Artificial Sequence
  Description of Artificial Sequence: Synthetic oligonucleotide
gugcugggcauuggcgaucggcaca

SEQ ID NO: 34461 - RNA, 25 nt, Artificial Sequence
  Description of Artificial Sequence: Synthetic oligonucleotide
agcgacaacaucaugauccgagaga

SEQ ID NO: 34462 - RNA, 25 nt, Artificial Sequence
  Description of Artificial Sequence: Synthetic oligonucleotide
agugggcagcuguuccacauugauu

SEQ ID NO: 34463 - RNA, 25 nt, Artificial Sequence
  Description of Artificial Sequence: Synthetic oligonucleotide
uuuggccacuuucuggggaauuuca

SEQ ID NO: 34464 - RNA, 25 nt, Artificial Sequence
  Description of Artificial Sequence: Synthetic oligonucleotide
aagaccaaguuuggaaucaaccgcg

SEQ ID NO: 34465 - RNA, 25 nt, Artificial Sequence
  Description of Artificial Sequence: Synthetic oligonucleotide
gagcgugucccauucauccucaccu

SEQ ID NO: 34466 - RNA, 25 nt, Artificial Sequence
  Description of Artificial Sequence: Synthetic oligonucleotide
uaugacuuuguccaugugauucagc

SEQ ID NO: 34467 - RNA, 25 nt, Artificial Sequence
  Description of Artificial Sequence: Synthetic oligonucleotide
caggggaagacuaauaauagugaga

SEQ ID NO: 34468 - RNA, 25 nt, Artificial Sequence
  Description of Artificial Sequence: Synthetic oligonucleotide
aaauuugaacgguuccggggcuacu

SEQ ID NO: 34469 - RNA, 25 nt, Artificial Sequence
  Description of Artificial Sequence: Synthetic oligonucleotide
ugugaaagggccuacaccauccugc

SEQ ID NO: 34470 - RNA, 25 nt, Artificial Sequence
  Description of Artificial Sequence: Synthetic oligonucleotide
cggcgccacgggcuucucuuccucc

SEQ ID NO: 34471 - RNA, 25 nt, Artificial Sequence
  Description of Artificial Sequence: Synthetic oligonucleotide
caccucuuugcccugaugcgggcgg

SEQ ID NO: 34472 - RNA, 25 nt, Artificial Sequence
  Description of Artificial Sequence: Synthetic oligonucleotide
gcaggccugccugagcucagcugcu

SEQ ID NO: 34473 - RNA, 25 nt, Artificial Sequence
  Description of Artificial Sequence: Synthetic oligonucleotide
uccaaagacauccaguaucucaagg

SEQ ID NO: 34474 - RNA, 25 nt, Artificial Sequence
  Description of Artificial Sequence: Synthetic oligonucleotide
gacucccuggcacuggggaaaacag

SEQ ID NO: 34475 - RNA, 25 nt, Artificial Sequence
  Description of Artificial Sequence: Synthetic oligonucleotide
gaggaggaggcacugaagcacuucc

SEQ ID NO: 34476 - RNA, 25 nt, Artificial Sequence
  Description of Artificial Sequence: Synthetic oligonucleotide
cgagugaaguuuaacgaagcccucc

SEQ ID NO: 34477 - RNA, 25 nt, Artificial Sequence
  Description of Artificial Sequence: Synthetic oligonucleotide
cgugagagcuggaaaaccaaaguga

SEQ ID NO: 34478 - RNA, 25 nt, Artificial Sequence
  Description of Artificial Sequence: Synthetic oligonucleotide
aacuggcuggcccacaacgugucca

SEQ ID NO: 34479 - RNA, 25 nt, Artificial Sequence
  Description of Artificial Sequence: Synthetic oligonucleotide
aaagacaacaggcaguaguggcucc

SEQ ID NO: 34480 - RNA, 25 nt, Artificial Sequence
  Description of Artificial Sequence: Synthetic oligonucleotide
cucccagcccugggcccaagaggag

SEQ ID NO: 34481 - RNA, 25 nt, Artificial Sequence
  Description of Artificial Sequence: Synthetic oligonucleotide
ggcggcugcgggucguggggaccaa

SEQ ID NO: 34482 - RNA, 25 nt, Artificial Sequence
  Description of Artificial Sequence: Synthetic oligonucleotide
agcacauugguccuaaaggggcuga

SEQ ID NO: 34483 - RNA, 25 nt, Artificial Sequence
  Description of Artificial Sequence: Synthetic oligonucleotide
aagagccugaacugcaccuaacggg

SEQ ID NO: 34484 - RNA, 25 nt, Artificial Sequence
  Description of Artificial Sequence: Synthetic oligonucleotide
gaaagaaccgacauggcugccuuuu

SEQ ID NO: 34485 - RNA, 25 nt, Artificial Sequence
  Description of Artificial Sequence: Synthetic oligonucleotide
uguuuacacugguuauuuauuuaug

SEQ ID NO: 34486 - RNA, 25 nt, Artificial Sequence
  Description of Artificial Sequence: Synthetic oligonucleotide
gacuugaaauaguuuaaggagcuaa

SEQ ID NO: 34487 - RNA, 25 nt, Artificial Sequence
  Description of Artificial Sequence: Synthetic oligonucleotide
aacagccauaaacggaaacgccucc

SEQ ID NO: 34488 - RNA, 25 nt, Artificial Sequence
  Description of Artificial Sequence: Synthetic oligonucleotide
cuucauucagcggcggugcugggcc

SEQ ID NO: 34489 - RNA, 25 nt, Artificial Sequence
  Description of Artificial Sequence: Synthetic oligonucleotide
cccccgaggcugcaccuggcucucg

SEQ ID NO: 34490 - RNA, 25 nt, Artificial Sequence
  Description of Artificial Sequence: Synthetic oligonucleotide
ggcugaggauugucaccccaagucu

SEQ ID NO: 34491 - RNA, 25 nt, Artificial Sequence
  Description of Artificial Sequence: Synthetic oligonucleotide
uuccagcugguggaucugggcccag

SEQ ID NO: 34492 - RNA, 25 nt, Artificial Sequence
  Description of Artificial Sequence: Synthetic oligonucleotide
gcaaagacuguucuccucccgaggg

SEQ ID NO: 34493 - RNA, 25 nt, Artificial Sequence
  Description of Artificial Sequence: Synthetic oligonucleotide
gaaccuucuucccaggccucccgcc

SEQ ID NO: 34494 - RNA, 25 nt, Artificial Sequence
  Description of Artificial Sequence: Synthetic oligonucleotide
cagacugccuggguccuggcgccug

SEQ ID NO: 34495 - RNA, 25 nt, Artificial Sequence
  Description of Artificial Sequence: Synthetic oligonucleotide
ggcggucaccuggugccuacugucc

SEQ ID NO: 34496 - RNA, 25 nt, Artificial Sequence
  Description of Artificial Sequence: Synthetic oligonucleotide
cgacaggaugccucgauccucgugc

SEQ ID NO: 34497 - RNA, 25 nt, Artificial Sequence
  Description of Artificial Sequence: Synthetic oligonucleotide
cgacccacccuguguauccucccua

SEQ ID NO: 34498 - RNA, 25 nt, Artificial Sequence
  Description of Artificial Sequence: Synthetic oligonucleotide
agacugaguucuggcagcuccccga

SEQ ID NO: 34499 - RNA, 25 nt, Artificial Sequence
  Description of Artificial Sequence: Synthetic oligonucleotide
aggcagccgggguacccucuagauu

SEQ ID NO: 34500 - RNA, 25 nt, Artificial Sequence
  Description of Artificial Sequence: Synthetic oligonucleotide
ucagggaugcuugcucuccacuuuu

SEQ ID NO: 34501 - RNA, 25 nt, Artificial Sequence
  Description of Artificial Sequence: Synthetic oligonucleotide
ucaagugggucuuggguacgagaau

SEQ ID NO: 34502 - RNA, 25 nt, Artificial Sequence
  Description of Artificial Sequence: Synthetic oligonucleotide
uucccucaucuuucucuacuguaaa

SEQ ID NO: 34503 - RNA, 25 nt, Artificial Sequence
  Description of Artificial Sequence: Synthetic oligonucleotide
agugauuuuguuugcagguaagaaa

SEQ ID NO: 34504 - RNA, 25 nt, Artificial Sequence
  Description of Artificial Sequence: Synthetic oligonucleotide
aauaauagaugacucaccacaccuc

SEQ ID NO: 34505 - RNA, 25 nt, Artificial Sequence
  Description of Artificial Sequence: Synthetic oligonucleotide
cuacggcuggggagaucaggcccag

SEQ ID NO: 34506 - RNA, 25 nt, Artificial Sequence
  Description of Artificial Sequence: Synthetic oligonucleotide
gccccauaaaggagaaucuacgcug

SEQ ID NO: 34507 - RNA, 25 nt, Artificial Sequence
  Description of Artificial Sequence: Synthetic oligonucleotide
gguccucaggacguguuaaagagau

SEQ ID NO: 34508 - RNA, 25 nt, Artificial Sequence
  Description of Artificial Sequence: Synthetic oligonucleotide
ucugggccucauguagcucaccccg

SEQ ID NO: 34509 - RNA, 25 nt, Artificial Sequence
  Description of Artificial Sequence: Synthetic oligonucleotide
ggucacgcaugaaggcaaaagcagg

SEQ ID NO: 34510 - RNA, 25 nt, Artificial Sequence
  Description of Artificial Sequence: Synthetic oligonucleotide
gucagaagcgaauacucugccauua

SEQ ID NO: 34511 - RNA, 25 nt, Artificial Sequence
  Description of Artificial Sequence: Synthetic oligonucleotide
uuuuugagauggggucuuccucugu

SEQ ID NO: 34512 - RNA, 25 nt, Artificial Sequence
  Description of Artificial Sequence: Synthetic oligonucleotide
uugcccaggcuggagugcaguggug

SEQ ID NO: 34513 - RNA, 25 nt, Artificial Sequence
  Description of Artificial Sequence: Synthetic oligonucleotide
gcaaucuuggcucacuguaaccucc

SEQ ID NO: 34514 - RNA, 25 nt, Artificial Sequence
  Description of Artificial Sequence: Synthetic oligonucleotide
cgccucccagguucaagugauucuu

SEQ ID NO: 34515 - RNA, 25 nt, Artificial Sequence
  Description of Artificial Sequence: Synthetic oligonucleotide
ucuugccucagccuccugaguagcu

SEQ ID NO: 34516 - RNA, 25 nt, Artificial Sequence
  Description of Artificial Sequence: Synthetic oligonucleotide
ugggauuacaggugugcaccacccg

SEQ ID NO: 34517 - RNA, 25 nt, Artificial Sequence
  Description of Artificial Sequence: Synthetic oligonucleotide
guacccagcuaauuuuuguauuuua

SEQ ID NO: 34518 - RNA, 25 nt, Artificial Sequence
  Description of Artificial Sequence: Synthetic oligonucleotide
aguagagacggggguuucaccaugu

SEQ ID NO: 34519 - RNA, 25 nt, Artificial Sequence
  Description of Artificial Sequence: Synthetic oligonucleotide
uuggcugggcuggucucgaacuccu

SEQ ID NO: 34520 - RNA, 25 nt, Artificial Sequence
  Description of Artificial Sequence: Synthetic oligonucleotide
ugaccucaggugauccacccgccug

SEQ ID NO: 34521 - RNA, 25 nt, Artificial Sequence
  Description of Artificial Sequence: Synthetic oligonucleotide
gagccucccaaagugcugggauuac

SEQ ID NO: 34522 - RNA, 25 nt, Artificial Sequence
  Description of Artificial Sequence: Synthetic oligonucleotide
caggcaugagccaccacgcccggcc

SEQ ID NO: 34523 - RNA, 25 nt, Artificial Sequence
  Description of Artificial Sequence: Synthetic oligonucleotide
ccacucugccauugucuaagccacc

SEQ ID NO: 34524 - RNA, 25 nt, Artificial Sequence
  Description of Artificial Sequence: Synthetic oligonucleotide
cucugaaagcagguuuuaacaaaag

SEQ ID NO: 34525 - RNA, 25 nt, Artificial Sequence
  Description of Artificial Sequence: Synthetic oligonucleotide
ggaugaggccagaacucuuccagaa

SEQ ID NO: 34526 - RNA, 25 nt, Artificial Sequence
  Description of Artificial Sequence: Synthetic oligonucleotide
accaucaccuuugggaaccugcugu

SEQ ID NO: 34527 - RNA, 25 nt, Artificial Sequence
  Description of Artificial Sequence: Synthetic oligonucleotide
ugagagugcugagguaccagaagug

SEQ ID NO: 34528 - RNA, 25 nt, Artificial Sequence
  Description of Artificial Sequence: Synthetic oligonucleotide
gugagaacgagggggcgugcuggga

SEQ ID NO: 34529 - RNA, 25 nt, Artificial Sequence
  Description of Artificial Sequence: Synthetic oligonucleotide
aucuuucucucugacuauacuuagu

SEQ ID NO: 34530 - RNA, 25 nt, Artificial Sequence
  Description of Artificial Sequence: Synthetic oligonucleotide
uuugaaauggugcaggcuuagucuu

SEQ ID NO: 34531 - RNA, 25 nt, Artificial Sequence
  Description of Artificial Sequence: Synthetic oligonucleotide
uaagccuccaaaggccuggauuuga

SEQ ID NO: 34532 - RNA, 25 nt, Artificial Sequence
  Description of Artificial Sequence: Synthetic oligonucleotide
agcagcuuuagaaaugcagguucua

SEQ ID NO: 34533 - RNA, 25 nt, Artificial Sequence
  Description of Artificial Sequence: Synthetic oligonucleotide
agggcuucucccagccuucagaagc

SEQ ID NO: 34534 - RNA, 25 nt, Artificial Sequence
  Description of Artificial Sequence: Synthetic oligonucleotide
ccaacuaacucugcagauggggcua

SEQ ID NO: 34535 - RNA, 25 nt, Artificial Sequence
  Description of Artificial Sequence: Synthetic oligonucleotide
aggacugugggcuuuuagcagccca

SEQ ID NO: 34536 - RNA, 25 nt, Artificial Sequence
  Description of Artificial Sequence: Synthetic oligonucleotide
acaggugauccuaacauaucaggcc

SEQ ID NO: 34537 - RNA, 25 nt, Artificial Sequence
  Description of Artificial Sequence: Synthetic oligonucleotide
cauggacucaggaccugcccgguga

SEQ ID NO: 34538 - RNA, 25 nt, Artificial Sequence
  Description of Artificial Sequence: Synthetic oligonucleotide
augcuguugauuucucaaaggucuu

SEQ ID NO: 34539 - RNA, 25 nt, Artificial Sequence
  Description of Artificial Sequence: Synthetic oligonucleotide
uccaaaacucaacagagccagaagu

SEQ ID NO: 34540 - RNA, 25 nt, Artificial Sequence
  Description of Artificial Sequence: Synthetic oligonucleotide
uagccgcccgcucagcggcucaggu

SEQ ID NO: 34541 - RNA, 25 nt, Artificial Sequence
  Description of Artificial Sequence: Synthetic oligonucleotide
ugccagcucuguucugauucaccag

SEQ ID NO: 34542 - RNA, 25 nt, Artificial Sequence
  Description of Artificial Sequence: Synthetic oligonucleotide
gggguccgucaguagucauugccac

SEQ ID NO: 34543 - RNA, 25 nt, Artificial Sequence
  Description of Artificial Sequence: Synthetic oligonucleotide
cccgcggggcaccucccuggccaca

SEQ ID NO: 34544 - RNA, 25 nt, Artificial Sequence
  Description of Artificial Sequence: Synthetic oligonucleotide
acgccuguucccagcaagugcugaa

SEQ ID NO: 34545 - RNA, 25 nt, Artificial Sequence
  Description of Artificial Sequence: Synthetic oligonucleotide
aacucacuagaccgucugccuguuu

SEQ ID NO: 34546 - RNA, 25 nt, Artificial Sequence
  Description of Artificial Sequence: Synthetic oligonucleotide
ucgaaauggggaaagccgugcgugc

SEQ ID NO: 34547 - RNA, 25 nt, Artificial Sequence
  Description of Artificial Sequence: Synthetic oligonucleotide
cgcguuauuuauuuaagugcgccug

SEQ ID NO: 34548 - RNA, 25 nt, Artificial Sequence
  Description of Artificial Sequence: Synthetic oligonucleotide
gugugcgcgggugugggagcacacu

SEQ ID NO: 34549 - RNA, 25 nt, Artificial Sequence
  Description of Artificial Sequence: Synthetic oligonucleotide
uuugcaaagccacagcguuucuggu

SEQ ID NO: 34550 - RNA, 25 nt, Artificial Sequence
  Description of Artificial Sequence: Synthetic oligonucleotide
uuuuggguguacagucuugugugcc

SEQ ID NO: 34551 - RNA, 25 nt, Artificial Sequence
  Description of Artificial Sequence: Synthetic oligonucleotide
cuggcgagaagaauauuuucuauuu

SEQ ID NO: 34552 - RNA, 25 nt, Artificial Sequence
  Description of Artificial Sequence: Synthetic oligonucleotide
uuuuuaagucauuucauguuucugu

SEQ ID NO: 34553 - RNA, 25 nt, Artificial Sequence
  Description of Artificial Sequence: Synthetic oligonucleotide
ucuggggaaggcaaguuaguuaagu

SEQ ID NO: 34554 - RNA, 25 nt, Artificial Sequence
  Description of Artificial Sequence: Synthetic oligonucleotide
uaucacugauguggguugagaccag

SEQ ID NO: 34555 - RNA, 25 nt, Artificial Sequence
  Description of Artificial Sequence: Synthetic oligonucleotide
gcacucugugaaaccuugaaaugag

SEQ ID NO: 34556 - RNA, 25 nt, Artificial Sequence
  Description of Artificial Sequence: Synthetic oligonucleotide
gaaguaaaggcagaugaaaagaaaa

SEQ ID NO: 34557 - RNA, 25 nt, Artificial Sequence
  Description of Artificial Sequence: Synthetic oligonucleotide
cucgcgcccagcgcagucgcuccga

SEQ ID NO: 34558 - RNA, 25 nt, Artificial Sequence
  Description of Artificial Sequence: Synthetic oligonucleotide
agcggccgcgagcagagccgcccag

SEQ ID NO: 34559 - RNA, 25 nt, Artificial Sequence
  Description of Artificial Sequence: Synthetic oligonucleotide
agagccgcccagcccugccagcugc

SEQ ID NO: 34560 - RNA, 25 nt, Artificial Sequence
  Description of Artificial Sequence: Synthetic oligonucleotide
gcccugccagcugcgccgggacgau

SEQ ID NO: 34561 - RNA, 25 nt, Artificial Sequence
  Description of Artificial Sequence: Synthetic oligonucleotide
uaaggagucaggccagggcgggaug

SEQ ID NO: 34562 - RNA, 25 nt, Artificial Sequence
  Description of Artificial Sequence: Synthetic oligonucleotide
gacacucauugauucuaaagcaucu

SEQ ID NO: 34563 - RNA, 25 nt, Artificial Sequence
  Description of Artificial Sequence: Synthetic oligonucleotide
uuuaaucugccaggcggagggggcu

SEQ ID NO: 34564 - RNA, 25 nt, Artificial Sequence
  Description of Artificial Sequence: Synthetic oligonucleotide
uuugcuggucuuucuuggacuauuc

SEQ ID NO: 34565 - RNA, 25 nt, Artificial Sequence
  Description of Artificial Sequence: Synthetic oligonucleotide
ccagagaggacaacugucaucuggg

SEQ ID NO: 34566 - RNA, 25 nt, Artificial Sequence
  Description of Artificial Sequence: Synthetic oligonucleotide
gaaguaacaacgcaggaugcccccu

SEQ ID NO: 34567 - RNA, 25 nt, Artificial Sequence
  Description of Artificial Sequence: Synthetic oligonucleotide
ugggguggacugccccauggaauuc

SEQ ID NO: 34568 - RNA, 25 nt, Artificial Sequence
  Description of Artificial Sequence: Synthetic oligonucleotide
cuggaccaaggaggagaaucagagc

SEQ ID NO: 34569 - RNA, 25 nt, Artificial Sequence
  Description of Artificial Sequence: Synthetic oligonucleotide
cguugugguugacuuccugcugccc

SEQ ID NO: 34570 - RNA, 25 nt, Artificial Sequence
  Description of Artificial Sequence: Synthetic oligonucleotide
cacaggggucuaccugaacuucccu

SEQ ID NO: 34571 - RNA, 25 nt, Artificial Sequence
  Description of Artificial Sequence: Synthetic oligonucleotide
ugugucccgcaaugccaaccucagc

SEQ ID NO: 34572 - RNA, 25 nt, Artificial Sequence
  Description of Artificial Sequence: Synthetic oligonucleotide
caccaucaagcagcugcuguggcac

SEQ ID NO: 34573 - RNA, 25 nt, Artificial Sequence
  Description of Artificial Sequence: Synthetic oligonucleotide
ccgcgcccaguaugagccgcucuuc

SEQ ID NO: 34574 - RNA, 25 nt, Artificial Sequence
  Description of Artificial Sequence: Synthetic oligonucleotide
ccacaugcucaguggccccgaggcc

SEQ ID NO: 34575 - RNA, 25 nt, Artificial Sequence
  Description of Artificial Sequence: Synthetic oligonucleotide
cuauguguucaccugcaucaaccag

SEQ ID NO: 34576 - RNA, 25 nt, Artificial Sequence
  Description of Artificial Sequence: Synthetic oligonucleotide
gacagcggagcagcaagagcuggag

SEQ ID NO: 34577 - RNA, 25 nt, Artificial Sequence
  Description of Artificial Sequence: Synthetic oligonucleotide
ggacgagcaacggcgucugugugac

SEQ ID NO: 34578 - RNA, 25 nt, Artificial Sequence
  Description of Artificial Sequence: Synthetic oligonucleotide
cgugcagcccuuccugcccguccug

SEQ ID NO: 34579 - RNA, 25 nt, Artificial Sequence
  Description of Artificial Sequence: Synthetic oligonucleotide
gcgccugguggcccgugagggcgac

SEQ ID NO: 34580 - RNA, 25 nt, Artificial Sequence
  Description of Artificial Sequence: Synthetic oligonucleotide
ccgcgugaagaagcucaucaacuca

SEQ ID NO: 34581 - RNA, 25 nt, Artificial Sequence
  Description of Artificial Sequence: Synthetic oligonucleotide
acagaucagccuccucaucggcaaa

SEQ ID NO: 34582 - RNA, 25 nt, Artificial Sequence
  Description of Artificial Sequence: Synthetic oligonucleotide
aggccuccacgaguuugacuccuug

SEQ ID NO: 34583 - RNA, 25 nt, Artificial Sequence
  Description of Artificial Sequence: Synthetic oligonucleotide
gugcgacccagaagugaacgacuuu

SEQ ID NO: 34584 - RNA, 25 nt, Artificial Sequence
  Description of Artificial Sequence: Synthetic oligonucleotide
ucgcgccaagaugugccaauucugc

SEQ ID NO: 34585 - RNA, 25 nt, Artificial Sequence
  Description of Artificial Sequence: Synthetic oligonucleotide
cgaggaggcggccgcccgccggcag

SEQ ID NO: 34586 - RNA, 25 nt, Artificial Sequence
  Description of Artificial Sequence: Synthetic oligonucleotide
gcagcugggcugggaggccuggcug

SEQ ID NO: 34587 - RNA, 25 nt, Artificial Sequence
  Description of Artificial Sequence: Synthetic oligonucleotide
gcaguacaguuucccccugcagcug

SEQ ID NO: 34588 - RNA, 25 nt, Artificial Sequence
  Description of Artificial Sequence: Synthetic oligonucleotide
ggagcccucggcucaaaccuggggg

SEQ ID NO: 34589 - RNA, 25 nt, Artificial Sequence
  Description of Artificial Sequence: Synthetic oligonucleotide
gccugguacccugcggcucccgaac

SEQ ID NO: 34590 - RNA, 25 nt, Artificial Sequence
  Description of Artificial Sequence: Synthetic oligonucleotide
ccgggcccuucuggucaacguuaag

SEQ ID NO: 34591 - RNA, 25 nt, Artificial Sequence
  Description of Artificial Sequence: Synthetic oligonucleotide
guuugagggcagcgaggagagcuuc

SEQ ID NO: 34592 - RNA, 25 nt, Artificial Sequence
  Description of Artificial Sequence: Synthetic oligonucleotide
caccuuccagguguccaccaaggac

SEQ ID NO: 34593 - RNA, 25 nt, Artificial Sequence
  Description of Artificial Sequence: Synthetic oligonucleotide
cgugccgcuggcgcugauggccugu

SEQ ID NO: 34594 - RNA, 25 nt, Artificial Sequence
  Description of Artificial Sequence: Synthetic oligonucleotide
ugcccugcggaagaaggccacagug

SEQ ID NO: 34595 - RNA, 25 nt, Artificial Sequence
  Description of Artificial Sequence: Synthetic oligonucleotide
guuccggcagccgcugguggagcag

SEQ ID NO: 34596 - RNA, 25 nt, Artificial Sequence
  Description of Artificial Sequence: Synthetic oligonucleotide
gccggaagacuacacgcugcaggug

SEQ ID NO: 34597 - RNA, 25 nt, Artificial Sequence
  Description of Artificial Sequence: Synthetic oligonucleotide
gaacggcaggcaugaguaccuguau

SEQ ID NO: 34598 - RNA, 25 nt, Artificial Sequence
  Description of Artificial Sequence: Synthetic oligonucleotide
gaguaccuguauggcagcuacccgc

SEQ ID NO: 34599 - RNA, 25 nt, Artificial Sequence
  Description of Artificial Sequence: Synthetic oligonucleotide
uggcagcuacccgcucugccaguuc

SEQ ID NO: 34600 - RNA, 25 nt, Artificial Sequence
  Description of Artificial Sequence: Synthetic oligonucleotide
ccaguacaucugcagcugccugcac

SEQ ID NO: 34601 - RNA, 25 nt, Artificial Sequence
  Description of Artificial Sequence: Synthetic oligonucleotide
caguggguugaccccucaccugacc

SEQ ID NO: 34602 - RNA, 25 nt, Artificial Sequence
  Description of Artificial Sequence: Synthetic oligonucleotide
caugguccauuccuccuccauccuc

SEQ ID NO: 34603 - RNA, 25 nt, Artificial Sequence
  Description of Artificial Sequence: Synthetic oligonucleotide
cgccaugcgggaugagcagagcaac

SEQ ID NO: 34604 - RNA, 25 nt, Artificial Sequence
  Description of Artificial Sequence: Synthetic oligonucleotide
cccugccccccagguccagaaaccg

SEQ ID NO: 34605 - RNA, 25 nt, Artificial Sequence
  Description of Artificial Sequence: Synthetic oligonucleotide
gcgugccaaaccaccucccauuccu

SEQ ID NO: 34606 - RNA, 25 nt, Artificial Sequence
  Description of Artificial Sequence: Synthetic oligonucleotide
ugcgaagaagccuuccucugugucc

SEQ ID NO: 34607 - RNA, 25 nt, Artificial Sequence
  Description of Artificial Sequence: Synthetic oligonucleotide
ccuguggucccuggagcagccguuc

SEQ ID NO: 34608 - RNA, 25 nt, Artificial Sequence
  Description of Artificial Sequence: Synthetic oligonucleotide
ccgcaucgagcucauccagggcagc

SEQ ID NO: 34609 - RNA, 25 nt, Artificial Sequence
  Description of Artificial Sequence: Synthetic oligonucleotide
caaagugaacgccgacgagcggaug

SEQ ID NO: 34610 - RNA, 25 nt, Artificial Sequence
  Description of Artificial Sequence: Synthetic oligonucleotide
gaagcugguggugcaggccgggcuu

SEQ ID NO: 34611 - RNA, 25 nt, Artificial Sequence
  Description of Artificial Sequence: Synthetic oligonucleotide
uuuccacggcaacgagaugcugugc

SEQ ID NO: 34612 - RNA, 25 nt, Artificial Sequence
  Description of Artificial Sequence: Synthetic oligonucleotide
caagacgguguccagcucggaggug

SEQ ID NO: 34613 - RNA, 25 nt, Artificial Sequence
  Description of Artificial Sequence: Synthetic oligonucleotide
gagcgugugcucggagcccgugugg

SEQ ID NO: 34614 - RNA, 25 nt, Artificial Sequence
  Description of Artificial Sequence: Synthetic oligonucleotide
gaagcagcggcuggaguucgacauc

SEQ ID NO: 34615 - RNA, 25 nt, Artificial Sequence
  Description of Artificial Sequence: Synthetic oligonucleotide
caacaucugcgaccugccccgcaug

SEQ ID NO: 34616 - RNA, 25 nt, Artificial Sequence
  Description of Artificial Sequence: Synthetic oligonucleotide
ggcccgucucugcuuugcgcuguac

SEQ ID NO: 34617 - RNA, 25 nt, Artificial Sequence
  Description of Artificial Sequence: Synthetic oligonucleotide
cgccgugaucgagaaagccaagaag

SEQ ID NO: 34618 - RNA, 25 nt, Artificial Sequence
  Description of Artificial Sequence: Synthetic oligonucleotide
ggcucgcuccaccaagaagaagucc

SEQ ID NO: 34619 - RNA, 25 nt, Artificial Sequence
  Description of Artificial Sequence: Synthetic oligonucleotide
caagaaggcggacugccccauugcc

SEQ ID NO: 34620 - RNA, 25 nt, Artificial Sequence
  Description of Artificial Sequence: Synthetic oligonucleotide
cugggccaaccucaugcuguuugac

SEQ ID NO: 34621 - RNA, 25 nt, Artificial Sequence
  Description of Artificial Sequence: Synthetic oligonucleotide
cuacaaggaccagcuuaagaccggg

SEQ ID NO: 34622 - RNA, 25 nt, Artificial Sequence
  Description of Artificial Sequence: Synthetic oligonucleotide
ggaacgcugccucuacauguggccc

SEQ ID NO: 34623 - RNA, 25 nt, Artificial Sequence
  Description of Artificial Sequence: Synthetic oligonucleotide
cuccgucccagaugagaagggcgag

SEQ ID NO: 34624 - RNA, 25 nt, Artificial Sequence
  Description of Artificial Sequence: Synthetic oligonucleotide
gcugcugaaccccacgggcacugug

SEQ ID NO: 34625 - RNA, 25 nt, Artificial Sequence
  Description of Artificial Sequence: Synthetic oligonucleotide
gcgcaguaaccccaacacggauagc

SEQ ID NO: 34626 - RNA, 25 nt, Artificial Sequence
  Description of Artificial Sequence: Synthetic oligonucleotide
cgccgcugcccugcucaucugccug

SEQ ID NO: 34627 - RNA, 25 nt, Artificial Sequence
  Description of Artificial Sequence: Synthetic oligonucleotide
gcccgagguggccccgcaccccgug

SEQ ID NO: 34628 - RNA, 25 nt, Artificial Sequence
  Description of Artificial Sequence: Synthetic oligonucleotide
guacuaccccgcccuggagaagauc

SEQ ID NO: 34629 - RNA, 25 nt, Artificial Sequence
  Description of Artificial Sequence: Synthetic oligonucleotide
cuuggagcuggggcgacacagcgag

SEQ ID NO: 34630 - RNA, 25 nt, Artificial Sequence
  Description of Artificial Sequence: Synthetic oligonucleotide
gugugugcaugucaccgaggaggag

SEQ ID NO: 34631 - RNA, 25 nt, Artificial Sequence
  Description of Artificial Sequence: Synthetic oligonucleotide
gcagcugcagcugcgggaaauccug

SEQ ID NO: 34632 - RNA, 25 nt, Artificial Sequence
  Description of Artificial Sequence: Synthetic oligonucleotide
ggagcggcgggggucuggggagcug

SEQ ID NO: 34633 - RNA, 25 nt, Artificial Sequence
  Description of Artificial Sequence: Synthetic oligonucleotide
guaugagcacgagaaggaccuggug

SEQ ID NO: 34634 - RNA, 25 nt, Artificial Sequence
  Description of Artificial Sequence: Synthetic oligonucleotide
guggaagcugcggcaugaaguccag

SEQ ID NO: 34635 - RNA, 25 nt, Artificial Sequence
  Description of Artificial Sequence: Synthetic oligonucleotide
ggagcacuucccggaggcgcuagcc

SEQ ID NO: 34636 - RNA, 25 nt, Artificial Sequence
  Description of Artificial Sequence: Synthetic oligonucleotide
ccggcugcugcuggucaccaagugg

SEQ ID NO: 34637 - RNA, 25 nt, Artificial Sequence
  Description of Artificial Sequence: Synthetic oligonucleotide
gaacaagcaugaggauguggcccag

SEQ ID NO: 34638 - RNA, 25 nt, Artificial Sequence
  Description of Artificial Sequence: Synthetic oligonucleotide
gaugcucuaccugcugugcuccugg

SEQ ID NO: 34639 - RNA, 25 nt, Artificial Sequence
  Description of Artificial Sequence: Synthetic oligonucleotide
gccggagcugcccguccugagcgcc

SEQ ID NO: 34640 - RNA, 25 nt, Artificial Sequence
  Description of Artificial Sequence: Synthetic oligonucleotide
ccuggagcugcuagacuucagcuuc

SEQ ID NO: 34641 - RNA, 25 nt, Artificial Sequence
  Description of Artificial Sequence: Synthetic oligonucleotide
ccccgauugccacguaggcuccuuc

SEQ ID NO: 34642 - RNA, 25 nt, Artificial Sequence
  Description of Artificial Sequence: Synthetic oligonucleotide
cgccaucaagucgcugcggaaacug

SEQ ID NO: 34643 - RNA, 25 nt, Artificial Sequence
  Description of Artificial Sequence: Synthetic oligonucleotide
gacggacgaugagcuguuccaguac

SEQ ID NO: 34644 - RNA, 25 nt, Artificial Sequence
  Description of Artificial Sequence: Synthetic oligonucleotide
ccugcugcagcuggugcaggugcuc

SEQ ID NO: 34645 - RNA, 25 nt, Artificial Sequence
  Description of Artificial Sequence: Synthetic oligonucleotide
caaguacgaguccuaccuggacugc

SEQ ID NO: 34646 - RNA, 25 nt, Artificial Sequence
  Description of Artificial Sequence: Synthetic oligonucleotide
cgagcugaccaaauuccugcuggac

SEQ ID NO: 34647 - RNA, 25 nt, Artificial Sequence
  Description of Artificial Sequence: Synthetic oligonucleotide
ccgggcccuggccaaccgcaagauc

SEQ ID NO: 34648 - RNA, 25 nt, Artificial Sequence
  Description of Artificial Sequence: Synthetic oligonucleotide
cggccacuuccuuuucuggcaccuc

SEQ ID NO: 34649 - RNA, 25 nt, Artificial Sequence
  Description of Artificial Sequence: Synthetic oligonucleotide
ccgcuccgagaugcacgugccgucg

SEQ ID NO: 34650 - RNA, 25 nt, Artificial Sequence
  Description of Artificial Sequence: Synthetic oligonucleotide
gguggcccugcgcuucggccucauc

SEQ ID NO: 34651 - RNA, 25 nt, Artificial Sequence
  Description of Artificial Sequence: Synthetic oligonucleotide
ccuggaggccuacugcaggggcagc

SEQ ID NO: 34652 - RNA, 25 nt, Artificial Sequence
  Description of Artificial Sequence: Synthetic oligonucleotide
cacccaccacaugaaggugcugaug

SEQ ID NO: 34653 - RNA, 25 nt, Artificial Sequence
  Description of Artificial Sequence: Synthetic oligonucleotide
gaagcagggggaagcacugagcaaa

SEQ ID NO: 34654 - RNA, 25 nt, Artificial Sequence
  Description of Artificial Sequence: Synthetic oligonucleotide
acugaaggcccugaaugacuucguc

SEQ ID NO: 34655 - RNA, 25 nt, Artificial Sequence
  Description of Artificial Sequence: Synthetic oligonucleotide
caagcugagcucucagaagaccccc

SEQ ID NO: 34656 - RNA, 25 nt, Artificial Sequence
  Description of Artificial Sequence: Synthetic oligonucleotide
caagccccagaccaaggagcugaug

SEQ ID NO: 34657 - RNA, 25 nt, Artificial Sequence
  Description of Artificial Sequence: Synthetic oligonucleotide
gcacuugugcaugcggcaggaggcc

SEQ ID NO: 34658 - RNA, 25 nt, Artificial Sequence
  Description of Artificial Sequence: Synthetic oligonucleotide
cuaccuagaggcccucucccaccug

SEQ ID NO: 34659 - RNA, 25 nt, Artificial Sequence
  Description of Artificial Sequence: Synthetic oligonucleotide
gcaguccccacucgaccccagcacc

SEQ ID NO: 34660 - RNA, 25 nt, Artificial Sequence
  Description of Artificial Sequence: Synthetic oligonucleotide
ccugcuggcugaagucugcguggag

SEQ ID NO: 34661 - RNA, 25 nt, Artificial Sequence
  Description of Artificial Sequence: Synthetic oligonucleotide
gcagugcaccuucauggacuccaag

SEQ ID NO: 34662 - RNA, 25 nt, Artificial Sequence
  Description of Artificial Sequence: Synthetic oligonucleotide
gaugaagccccuguggaucauguac

SEQ ID NO: 34663 - RNA, 25 nt, Artificial Sequence
  Description of Artificial Sequence: Synthetic oligonucleotide
cagcaacgaggaggcaggcagcggc

SEQ ID NO: 34664 - RNA, 25 nt, Artificial Sequence
  Description of Artificial Sequence: Synthetic oligonucleotide
cggcagcgugggcaucaucuuuaag

SEQ ID NO: 34665 - RNA, 25 nt, Artificial Sequence
  Description of Artificial Sequence: Synthetic oligonucleotide
gaacggggaugaccuccggcaggac

SEQ ID NO: 34666 - RNA, 25 nt, Artificial Sequence
  Description of Artificial Sequence: Synthetic oligonucleotide
caugcugacccugcagaugauccag

SEQ ID NO: 34667 - RNA, 25 nt, Artificial Sequence
  Description of Artificial Sequence: Synthetic oligonucleotide
gcucauggacguccuguggaagcag

SEQ ID NO: 34668 - RNA, 25 nt, Artificial Sequence
  Description of Artificial Sequence: Synthetic oligonucleotide
ggaggggcuggaccugaggaugacc

SEQ ID NO: 34669 - RNA, 25 nt, Artificial Sequence
  Description of Artificial Sequence: Synthetic oligonucleotide
ccccuauggcugccuccccaccggg

SEQ ID NO: 34670 - RNA, 25 nt, Artificial Sequence
  Description of Artificial Sequence: Synthetic oligonucleotide
ggaccgcacaggccucauugaggug

SEQ ID NO: 34671 - RNA, 25 nt, Artificial Sequence
  Description of Artificial Sequence: Synthetic oligonucleotide
gguacuccguucagacaccaucgcc

SEQ ID NO: 34672 - RNA, 25 nt, Artificial Sequence
  Description of Artificial Sequence: Synthetic oligonucleotide
caacauccaacucaacaagagcaac

SEQ ID NO: 34673 - RNA, 25 nt, Artificial Sequence
  Description of Artificial Sequence: Synthetic oligonucleotide
cauggcagccacagccgccuucaac

SEQ ID NO: 34674 - RNA, 25 nt, Artificial Sequence
  Description of Artificial Sequence: Synthetic oligonucleotide
caaggaugcccugcucaacuggcug

SEQ ID NO: 34675 - RNA, 25 nt, Artificial Sequence
  Description of Artificial Sequence: Synthetic oligonucleotide
gaaguccaagaacccgggggaggcc

SEQ ID NO: 34676 - RNA, 25 nt, Artificial Sequence
  Description of Artificial Sequence: Synthetic oligonucleotide
ccuggaucgagccauugaggaguuc

SEQ ID NO: 34677 - RNA, 25 nt, Artificial Sequence
  Description of Artificial Sequence: Synthetic oligonucleotide
cacccucuccugugcuggcuauugu

SEQ ID NO: 34678 - RNA, 25 nt, Artificial Sequence
  Description of Artificial Sequence: Synthetic oligonucleotide
uguggccacauaugugcugggcauu

SEQ ID NO: 34679 - RNA, 25 nt, Artificial Sequence
  Description of Artificial Sequence: Synthetic oligonucleotide
uggcgaucggcacagcgacaacauc

SEQ ID NO: 34680 - RNA, 25 nt, Artificial Sequence
  Description of Artificial Sequence: Synthetic oligonucleotide
caugauccgagagagugggcagcug

SEQ ID NO: 34681 - RNA, 25 nt, Artificial Sequence
  Description of Artificial Sequence: Synthetic oligonucleotide
guuccacauugauuuuggccacuuu

SEQ ID NO: 34682 - RNA, 25 nt, Artificial Sequence
  Description of Artificial Sequence: Synthetic oligonucleotide
ucuggggaauuucaagaccaaguuu

SEQ ID NO: 34683 - RNA, 25 nt, Artificial Sequence
  Description of Artificial Sequence: Synthetic oligonucleotide
uggaaucaaccgcgagcguguccca

SEQ ID NO: 34684 - RNA, 25 nt, Artificial Sequence
  Description of Artificial Sequence: Synthetic oligonucleotide
auucauccucaccuacgacuuuguc

SEQ ID NO: 34685 - RNA, 25 nt, Artificial Sequence
  Description of Artificial Sequence: Synthetic oligonucleotide
uacgacuuuguccaugugauucagc

SEQ ID NO: 34686 - RNA, 25 nt, Artificial Sequence
  Description of Artificial Sequence: Synthetic oligonucleotide
ccaugugauucagcaggggaagacu

SEQ ID NO: 34687 - RNA, 25 nt, Artificial Sequence
  Description of Artificial Sequence: Synthetic oligonucleotide
uaauaauagugagaaauuugaacgg

SEQ ID NO: 34688 - RNA, 25 nt, Artificial Sequence
  Description of Artificial Sequence: Synthetic oligonucleotide
guuccggggcuacugugaaagggcc

SEQ ID NO: 34689 - RNA, 25 nt, Artificial Sequence
  Description of Artificial Sequence: Synthetic oligonucleotide
cuacaccauccugcggcgccacggg

SEQ ID NO: 34690 - RNA, 25 nt, Artificial Sequence
  Description of Artificial Sequence: Synthetic oligonucleotide
gcuucucuuccuccaccucuuugcc

SEQ ID NO: 34691 - RNA, 25 nt, Artificial Sequence
  Description of Artificial Sequence: Synthetic oligonucleotide
ccugaugcgggcggcaggccugccu

SEQ ID NO: 34692 - RNA, 25 nt, Artificial Sequence
  Description of Artificial Sequence: Synthetic oligonucleotide
ugagcucagcugcuccaaagacauc

SEQ ID NO: 34693 - RNA, 25 nt, Artificial Sequence
  Description of Artificial Sequence: Synthetic oligonucleotide
ccaguaucucaaggacucccuggca

SEQ ID NO: 34694 - RNA, 25 nt, Artificial Sequence
  Description of Artificial Sequence: Synthetic oligonucleotide
acuggggaaaacagaggaggaggca

SEQ ID NO: 34695 - RNA, 25 nt, Artificial Sequence
  Description of Artificial Sequence: Synthetic oligonucleotide
acugaagcacuuccgagugaaguuu

SEQ ID NO: 34696 - RNA, 25 nt, Artificial Sequence
  Description of Artificial Sequence: Synthetic oligonucleotide
uaacgaagcccuccgugagagcugg

SEQ ID NO: 34697 - RNA, 25 nt, Artificial Sequence
  Description of Artificial Sequence: Synthetic oligonucleotide
gaaaaccaaagugaacuggcuggcc

SEQ ID NO: 34698 - RNA, 25 nt, Artificial Sequence
  Description of Artificial Sequence: Synthetic oligonucleotide
ccacaacguguccaaagacaacagg

SEQ ID NO: 34699 - RNA, 25 nt, Artificial Sequence
  Description of Artificial Sequence: Synthetic oligonucleotide
gcaguaguggcuccucccagcccug

SEQ ID NO: 34700 - RNA, 25 nt, Artificial Sequence
  Description of Artificial Sequence: Synthetic oligonucleotide
gggcccaagaggaggcggcugcggg

SEQ ID NO: 34701 - RNA, 25 nt, Artificial Sequence
  Description of Artificial Sequence: Synthetic oligonucleotide
gucguggggaccaagcacauugguc

SEQ ID NO: 34702 - RNA, 25 nt, Artificial Sequence
  Description of Artificial Sequence: Synthetic oligonucleotide
ccuaaaggggcugaagagccugaac

SEQ ID NO: 34703 - RNA, 25 nt, Artificial Sequence
  Description of Artificial Sequence: Synthetic oligonucleotide
cugcaccuaacgggaaagaaccgac

SEQ ID NO: 34704 - RNA, 25 nt, Artificial Sequence
  Description of Artificial Sequence: Synthetic oligonucleotide
cauggcugccuuuuguuuacacugg

SEQ ID NO: 34705 - RNA, 25 nt, Artificial Sequence
  Description of Artificial Sequence: Synthetic oligonucleotide
guuauuuauuuaugacuugaaauag

SEQ ID NO: 34706 - RNA, 25 nt, Artificial Sequence
  Description of Artificial Sequence: Synthetic oligonucleotide
guuuaaggagcuaaacagccauaaa

SEQ ID NO: 34707 - RNA, 25 nt, Artificial Sequence
  Description of Artificial Sequence: Synthetic oligonucleotide
acggaaacgccuccuucaugcagcg

SEQ ID NO: 34708 - RNA, 25 nt, Artificial Sequence
  Description of Artificial Sequence: Synthetic oligonucleotide
cuucaugcagcggcggugcugggcc

SEQ ID NO: 34709 - RNA, 25 nt, Artificial Sequence
  Description of Artificial Sequence: Synthetic oligonucleotide
ggcggugcugggccccccgaggcug

SEQ ID NO: 34710 - RNA, 25 nt, Artificial Sequence
  Description of Artificial Sequence: Synthetic oligonucleotide
gcaccuggcucucggcugaggauug

SEQ ID NO: 34711 - RNA, 25 nt, Artificial Sequence
  Description of Artificial Sequence: Synthetic oligonucleotide
gucaccccaagucuuccagcuggug

SEQ ID NO: 34712 - RNA, 25 nt, Artificial Sequence
  Description of Artificial Sequence: Synthetic oligonucleotide
ggaucugggcccagcaaagacuguu

SEQ ID NO: 34713 - RNA, 25 nt, Artificial Sequence
  Description of Artificial Sequence: Synthetic oligonucleotide
ucuccucccgagggaaccuucuucc

SEQ ID NO: 34714 - RNA, 25 nt, Artificial Sequence
  Description of Artificial Sequence: Synthetic oligonucleotide
ccaggccucccgccagacugccugg

SEQ ID NO: 34715 - RNA, 25 nt, Artificial Sequence
  Description of Artificial Sequence: Synthetic oligonucleotide
gguccuggcgccuggcggucaccug

SEQ ID NO: 34716 - RNA, 25 nt, Artificial Sequence
  Description of Artificial Sequence: Synthetic oligonucleotide
ggugccuacuguccgacaggaugcc

SEQ ID NO: 34717 - RNA, 25 nt, Artificial Sequence
  Description of Artificial Sequence: Synthetic oligonucleotide
cgacaggaugccuugauccucgugc

SEQ ID NO: 34718 - RNA, 25 nt, Artificial Sequence
  Description of Artificial Sequence: Synthetic oligonucleotide
cuugauccucgugcgacccacccug

SEQ ID NO: 34719 - RNA, 25 nt, Artificial Sequence
  Description of Artificial Sequence: Synthetic oligonucleotide
guguauccucccuagacugaguucu

SEQ ID NO: 34720 - RNA, 25 nt, Artificial Sequence
  Description of Artificial Sequence: Synthetic oligonucleotide
uggcagcuccccgaggcagccgggg

SEQ ID NO: 34721 - RNA, 25 nt, Artificial Sequence
  Description of Artificial Sequence: Synthetic oligonucleotide
guacccucuagauucagggaugcuu

SEQ ID NO: 34722 - RNA, 25 nt, Artificial Sequence
  Description of Artificial Sequence: Synthetic oligonucleotide
ugcucuccacuuuucaagugggucu

SEQ ID NO: 34723 - RNA, 25 nt, Artificial Sequence
  Description of Artificial Sequence: Synthetic oligonucleotide
uuggguacgagaauucccucaucuu

SEQ ID NO: 34724 - RNA, 25 nt, Artificial Sequence
  Description of Artificial Sequence: Synthetic oligonucleotide
uucucuacuguaaagugauuuuguu

SEQ ID NO: 34725 - RNA, 25 nt, Artificial Sequence
  Description of Artificial Sequence: Synthetic oligonucleotide
uugcagguaagaaaauaauagauga

SEQ ID NO: 34726 - RNA, 25 nt, Artificial Sequence
  Description of Artificial Sequence: Synthetic oligonucleotide
acucaccacaccucuacggcugggg

SEQ ID NO: 34727 - RNA, 25 nt, Artificial Sequence
  Description of Artificial Sequence: Synthetic oligonucleotide
gagaucaggcccagccccauaaagg

SEQ ID NO: 34728 - RNA, 25 nt, Artificial Sequence
  Description of Artificial Sequence: Synthetic oligonucleotide
gagaaucuacgcugguccucaggac

SEQ ID NO: 34729 - RNA, 25 nt, Artificial Sequence
  Description of Artificial Sequence: Synthetic oligonucleotide
cguguuaaagagaucugggccucau

SEQ ID NO: 34730 - RNA, 25 nt, Artificial Sequence
  Description of Artificial Sequence: Synthetic oligonucleotide
uguagcucaccccggucacgcauga

SEQ ID NO: 34731 - RNA, 25 nt, Artificial Sequence
  Description of Artificial Sequence: Synthetic oligonucleotide
aaggcaaaagcaggucagaagcgaa

SEQ ID NO: 34732 - RNA, 25 nt, Artificial Sequence
  Description of Artificial Sequence: Synthetic oligonucleotide
auacucugccauuaucucaaaaauc

SEQ ID NO: 34733 - RNA, 25 nt, Artificial Sequence
  Description of Artificial Sequence: Synthetic oligonucleotide
aucucaaaaaucuuuuuuuuuuuuu

SEQ ID NO: 34734 - RNA, 25 nt, Artificial Sequence
  Description of Artificial Sequence: Synthetic oligonucleotide
cuuuuuuuuuuuuuugagauggggu

SEQ ID NO: 34735 - RNA, 25 nt, Artificial Sequence
  Description of Artificial Sequence: Synthetic oligonucleotide
uugagauggggucuuccucuguugc

SEQ ID NO: 34736 - RNA, 25 nt, Artificial Sequence
  Description of Artificial Sequence: Synthetic oligonucleotide
ucuuccucuguugcccaggcuggag

SEQ ID NO: 34737 - RNA, 25 nt, Artificial Sequence
  Description of Artificial Sequence: Synthetic oligonucleotide
cccaggcuggagugcaguggugcaa

SEQ ID NO: 34738 - RNA, 25 nt, Artificial Sequence
  Description of Artificial Sequence: Synthetic oligonucleotide
gugcaguggugcaaucuuggcucac

SEQ ID NO: 34739 - RNA, 25 nt, Artificial Sequence
  Description of Artificial Sequence: Synthetic oligonucleotide
aucuuggcucacuguaaccuccgcc

SEQ ID NO: 34740 - RNA, 25 nt, Artificial Sequence
  Description of Artificial Sequence: Synthetic oligonucleotide
cuguaaccuccgccucccagguuca

SEQ ID NO: 34741 - RNA, 25 nt, Artificial Sequence
  Description of Artificial Sequence: Synthetic oligonucleotide
cucccagguucaagugauucuucug

SEQ ID NO: 34742 - RNA, 25 nt, Artificial Sequence
  Description of Artificial Sequence: Synthetic oligonucleotide
aagugauucuucugccucagccucc

SEQ ID NO: 34743 - RNA, 25 nt, Artificial Sequence
  Description of Artificial Sequence: Synthetic oligonucleotide
gccucagccuccugaguagcuggga

SEQ ID NO: 34744 - RNA, 25 nt, Artificial Sequence
  Description of Artificial Sequence: Synthetic oligonucleotide
cugaguagcugggauuacaggugug

SEQ ID NO: 34745 - RNA, 25 nt, Artificial Sequence
  Description of Artificial Sequence: Synthetic oligonucleotide
auuacaggugugcaccaccguaccc

SEQ ID NO: 34746 - RNA, 25 nt, Artificial Sequence
  Description of Artificial Sequence: Synthetic oligonucleotide
gcaccaccguacccagcuaauuuuu

SEQ ID NO: 34747 - RNA, 25 nt, Artificial Sequence
  Description of Artificial Sequence: Synthetic oligonucleotide
cagcuaauuuuuguauuuuaguaga

SEQ ID NO: 34748 - RNA, 25 nt, Artificial Sequence
  Description of Artificial Sequence: Synthetic oligonucleotide
uguauuuuaguagagacggggguuu

SEQ ID NO: 34749 - RNA, 25 nt, Artificial Sequence
  Description of Artificial Sequence: Synthetic oligonucleotide
agacggggguuucaccauguuggcu

SEQ ID NO: 34750 - RNA, 25 nt, Artificial Sequence
  Description of Artificial Sequence: Synthetic oligonucleotide
ucaccauguuggcugggcuggucuc

SEQ ID NO: 34751 - RNA, 25 nt, Artificial Sequence
  Description of Artificial Sequence: Synthetic oligonucleotide
ugggcuggucucgaacuccugaccu

SEQ ID NO: 34752 - RNA, 25 nt, Artificial Sequence
  Description of Artificial Sequence: Synthetic oligonucleotide
cgaacuccugaccucaggugaucca

SEQ ID NO: 34753 - RNA, 25 nt, Artificial Sequence
  Description of Artificial Sequence: Synthetic oligonucleotide
ucaggugauccacccgccugagccu

SEQ ID NO: 34754 - RNA, 25 nt, Artificial Sequence
  Description of Artificial Sequence: Synthetic oligonucleotide
acccgccugagccucccaaagugcu

SEQ ID NO: 34755 - RNA, 25 nt, Artificial Sequence
  Description of Artificial Sequence: Synthetic oligonucleotide
ucccaaagugcugggauuacaggca

SEQ ID NO: 34756 - RNA, 25 nt, Artificial Sequence
  Description of Artificial Sequence: Synthetic oligonucleotide
ugggauuacaggcaugagccaccgc

SEQ ID NO: 34757 - RNA, 25 nt, Artificial Sequence
  Description of Artificial Sequence: Synthetic oligonucleotide
augagccaccgcgcccggcccacuc

SEQ ID NO: 34758 - RNA, 25 nt, Artificial Sequence
  Description of Artificial Sequence: Synthetic oligonucleotide
cgcccggcccacucugccauugucu

SEQ ID NO: 34759 - RNA, 25 nt, Artificial Sequence
  Description of Artificial Sequence: Synthetic oligonucleotide
cugccauugucuaagccaccucuga

SEQ ID NO: 34760 - RNA, 25 nt, Artificial Sequence
  Description of Artificial Sequence: Synthetic oligonucleotide
uaagccaccucugaaagcagguuuu

SEQ ID NO: 34761 - RNA, 25 nt, Artificial Sequence
  Description of Artificial Sequence: Synthetic oligonucleotide
aaagcagguuuuaacaaaaggauga

SEQ ID NO: 34762 - RNA, 25 nt, Artificial Sequence
  Description of Artificial Sequence: Synthetic oligonucleotide
uaacaaaaggaugaggccagaacuc

SEQ ID NO: 34763 - RNA, 25 nt, Artificial Sequence
  Description of Artificial Sequence: Synthetic oligonucleotide
aggccagaacucuuccagaaccauc

SEQ ID NO: 34764 - RNA, 25 nt, Artificial Sequence
  Description of Artificial Sequence: Synthetic oligonucleotide
cuuccagaaccaucaccuuugggaa

SEQ ID NO: 34765 - RNA, 25 nt, Artificial Sequence
  Description of Artificial Sequence: Synthetic oligonucleotide
caccuuugggaaccugcugugagag

SEQ ID NO: 34766 - RNA, 25 nt, Artificial Sequence
  Description of Artificial Sequence: Synthetic oligonucleotide
accugcugugagagugcugagguac

SEQ ID NO: 34767 - RNA, 25 nt, Artificial Sequence
  Description of Artificial Sequence: Synthetic oligonucleotide
gugcugagguaccagaagugugaga

SEQ ID NO: 34768 - RNA, 25 nt, Artificial Sequence
  Description of Artificial Sequence: Synthetic oligonucleotide
ccagaagugugagaacgagggggcg

SEQ ID NO: 34769 - RNA, 25 nt, Artificial Sequence
  Description of Artificial Sequence: Synthetic oligonucleotide
aacgagggggcgugcugggaucuuu

SEQ ID NO: 34770 - RNA, 25 nt, Artificial Sequence
  Description of Artificial Sequence: Synthetic oligonucleotide
gugcugggaucuuucucucugacua

SEQ ID NO: 34771 - RNA, 25 nt, Artificial Sequence
  Description of Artificial Sequence: Synthetic oligonucleotide
ucucucugacuauacuuaguuugaa

SEQ ID NO: 34772 - RNA, 25 nt, Artificial Sequence
  Description of Artificial Sequence: Synthetic oligonucleotide
auacuuaguuugaaauggugcaggc

SEQ ID NO: 34773 - RNA, 25 nt, Artificial Sequence
  Description of Artificial Sequence: Synthetic oligonucleotide
aauggugcaggcuuagucuuaagcc

SEQ ID NO: 34774 - RNA, 25 nt, Artificial Sequence
  Description of Artificial Sequence: Synthetic oligonucleotide
cuuagucuuaagccuccaaaggccu

SEQ ID NO: 34775 - RNA, 25 nt, Artificial Sequence
  Description of Artificial Sequence: Synthetic oligonucleotide
cuccaaaggccuggauuugagcagc

SEQ ID NO: 34776 - RNA, 25 nt, Artificial Sequence
  Description of Artificial Sequence: Synthetic oligonucleotide
uggauuugagcagcuuuagaaaugc

SEQ ID NO: 34777 - RNA, 25 nt, Artificial Sequence
  Description of Artificial Sequence: Synthetic oligonucleotide
cuuuagaaaugcagguucuagggcu

SEQ ID NO: 34778 - RNA, 25 nt, Artificial Sequence
  Description of Artificial Sequence: Synthetic oligonucleotide
cagguucuagggcuucucccagccu

SEQ ID NO: 34779 - RNA, 25 nt, Artificial Sequence
  Description of Artificial Sequence: Synthetic oligonucleotide
uucucccagccuucagaagccaacu

SEQ ID NO: 34780 - RNA, 25 nt, Artificial Sequence
  Description of Artificial Sequence: Synthetic oligonucleotide
uucagaagccaacuaacucugcaga

SEQ ID NO: 34781 - RNA, 25 nt, Artificial Sequence
  Description of Artificial Sequence: Synthetic oligonucleotide
uaacucugcagauggggcuaggacu

SEQ ID NO: 34782 - RNA, 25 nt, Artificial Sequence
  Description of Artificial Sequence: Synthetic oligonucleotide
auggggcuaggacugugggcuuuua

SEQ ID NO: 34783 - RNA, 25 nt, Artificial Sequence
  Description of Artificial Sequence: Synthetic oligonucleotide
ugugggcuuuuagcagcccacaggu

SEQ ID NO: 34784 - RNA, 25 nt, Artificial Sequence
  Description of Artificial Sequence: Synthetic oligonucleotide
agcagcccacaggugauccuaacau

SEQ ID NO: 34785 - RNA, 25 nt, Artificial Sequence
  Description of Artificial Sequence: Synthetic oligonucleotide
ugauccuaacauaucaggccaugga

SEQ ID NO: 34786 - RNA, 25 nt, Artificial Sequence
  Description of Artificial Sequence: Synthetic oligonucleotide
uaucaggccauggacucaggaccug

SEQ ID NO: 34787 - RNA, 25 nt, Artificial Sequence
  Description of Artificial Sequence: Synthetic oligonucleotide
acucaggaccugcccggugaugcug

SEQ ID NO: 34788 - RNA, 25 nt, Artificial Sequence
  Description of Artificial Sequence: Synthetic oligonucleotide
gcccggugaugcuguugauuucuca

SEQ ID NO: 34789 - RNA, 25 nt, Artificial Sequence
  Description of Artificial Sequence: Synthetic oligonucleotide
guugauuucucaaaggucuuccaaa

SEQ ID NO: 34790 - RNA, 25 nt, Artificial Sequence
  Description of Artificial Sequence: Synthetic oligonucleotide
aaaggucuuccaaaacucaacagag

SEQ ID NO: 34791 - RNA, 25 nt, Artificial Sequence
  Description of Artificial Sequence: Synthetic oligonucleotide
aacucaacagagccagaaguagccg

SEQ ID NO: 34792 - RNA, 25 nt, Artificial Sequence
  Description of Artificial Sequence: Synthetic oligonucleotide
gccagaaguagccgcccgcucagcg

SEQ ID NO: 34793 - RNA, 25 nt, Artificial Sequence
  Description of Artificial Sequence: Synthetic oligonucleotide
gcccgcucagcggcucaggugccag

SEQ ID NO: 34794 - RNA, 25 nt, Artificial Sequence
  Description of Artificial Sequence: Synthetic oligonucleotide
ggcucaggugccagcucuguucuga

SEQ ID NO: 34795 - RNA, 25 nt, Artificial Sequence
  Description of Artificial Sequence: Synthetic oligonucleotide
gcucuguucugauucaccagggguc

SEQ ID NO: 34796 - RNA, 25 nt, Artificial Sequence
  Description of Artificial Sequence: Synthetic oligonucleotide
auucaccagggguccgucaguaguc

SEQ ID NO: 34797 - RNA, 25 nt, Artificial Sequence
  Description of Artificial Sequence: Synthetic oligonucleotide
ccgucaguagucauugccacccgcg

SEQ ID NO: 34798 - RNA, 25 nt, Artificial Sequence
  Description of Artificial Sequence: Synthetic oligonucleotide
cauugccacccgcggggcaccuccc

SEQ ID NO: 34799 - RNA, 25 nt, Artificial Sequence
  Description of Artificial Sequence: Synthetic oligonucleotide
ggggcaccucccuggccacacgccu

SEQ ID NO: 34800 - RNA, 25 nt, Artificial Sequence
  Description of Artificial Sequence: Synthetic oligonucleotide
cuggccacacgccuguucccagcaa

SEQ ID NO: 34801 - RNA, 25 nt, Artificial Sequence
  Description of Artificial Sequence: Synthetic oligonucleotide
uguucccagcaagugcugaaacuca

SEQ ID NO: 34802 - RNA, 25 nt, Artificial Sequence
  Description of Artificial Sequence: Synthetic oligonucleotide
agugcugaaacucacuagaccgucu

SEQ ID NO: 34803 - RNA, 25 nt, Artificial Sequence
  Description of Artificial Sequence: Synthetic oligonucleotide
acuagaccgucugccuguuucgaaa

SEQ ID NO: 34804 - RNA, 25 nt, Artificial Sequence
  Description of Artificial Sequence: Synthetic oligonucleotide
ugccuguuucgaaauggggaaagcc

SEQ ID NO: 34805 - RNA, 25 nt, Artificial Sequence
  Description of Artificial Sequence: Synthetic oligonucleotide
auggggaaagccgugcgugcgcguu

SEQ ID NO: 34806 - RNA, 25 nt, Artificial Sequence
  Description of Artificial Sequence: Synthetic oligonucleotide
cgugcgugcgcguuauuuauuuaag

SEQ ID NO: 34807 - RNA, 25 nt, Artificial Sequence
  Description of Artificial Sequence: Synthetic oligonucleotide
uauuuauuuaagugcgccugugugc

SEQ ID NO: 34808 - RNA, 25 nt, Artificial Sequence
  Description of Artificial Sequence: Synthetic oligonucleotide
gugcgccugugugcgcggguguggg

SEQ ID NO: 34809 - RNA, 25 nt, Artificial Sequence
  Description of Artificial Sequence: Synthetic oligonucleotide
cgcgggugugggagcacacuuugca

SEQ ID NO: 34810 - RNA, 25 nt, Artificial Sequence
  Description of Artificial Sequence: Synthetic oligonucleotide
gagcacacuuugcaaagccacagcg

SEQ ID NO: 34811 - RNA, 25 nt, Artificial Sequence
  Description of Artificial Sequence: Synthetic oligonucleotide
aaagccacagcguuucugguuuugg

SEQ ID NO: 34812 - RNA, 25 nt, Artificial Sequence
  Description of Artificial Sequence: Synthetic oligonucleotide
guuucugguuuuggguguacagucu

SEQ ID NO: 34813 - RNA, 25 nt, Artificial Sequence
  Description of Artificial Sequence: Synthetic oligonucleotide
gguguacagucuugugugccuggcg

SEQ ID NO: 34814 - RNA, 25 nt, Artificial Sequence
  Description of Artificial Sequence: Synthetic oligonucleotide
uugugugccuggcgagaagaauauu

SEQ ID NO: 34815 - RNA, 25 nt, Artificial Sequence
  Description of Artificial Sequence: Synthetic oligonucleotide
gagaagaauauuuucuauuuuuuua

SEQ ID NO: 34816 - RNA, 25 nt, Artificial Sequence
  Description of Artificial Sequence: Synthetic oligonucleotide
uuucuauuuuuuuaagucauuucau

SEQ ID NO: 34817 - RNA, 25 nt, Artificial Sequence
  Description of Artificial Sequence: Synthetic oligonucleotide
aagucauuucauguuucugucuggg

SEQ ID NO: 34818 - RNA, 25 nt, Artificial Sequence
  Description of Artificial Sequence: Synthetic oligonucleotide
uguuucugucuggggaaggcaaguu

SEQ ID NO: 34819 - RNA, 25 nt, Artificial Sequence
  Description of Artificial Sequence: Synthetic oligonucleotide
ggaaggcaaguuaguuaaguaucac

SEQ ID NO: 34820 - RNA, 25 nt, Artificial Sequence
  Description of Artificial Sequence: Synthetic oligonucleotide
uaguuaaguaucacugauguggguu

SEQ ID NO: 34821 - RNA, 25 nt, Artificial Sequence
  Description of Artificial Sequence: Synthetic oligonucleotide
cugauguggguugagaccagcacuc

SEQ ID NO: 34822 - RNA, 25 nt, Artificial Sequence
  Description of Artificial Sequence: Synthetic oligonucleotide
ugagaccagcacucugugaaaccuu

SEQ ID NO: 34823 - RNA, 25 nt, Artificial Sequence
  Description of Artificial Sequence: Synthetic oligonucleotide
cugugaaaccuugaaaugagaagua

SEQ ID NO: 34824 - RNA, 25 nt, Artificial Sequence
  Description of Artificial Sequence: Synthetic oligonucleotide
ugaaaugagaaguaaaggcagauga

SEQ ID NO: 34825 - RNA, 25 nt, Artificial Sequence
  Description of Artificial Sequence: Synthetic oligonucleotide
aaaggcagaugaaaagaaagaaaaa

SEQ ID NO: 34826 - RNA, 25 nt, Artificial Sequence
  Description of Artificial Sequence: Synthetic oligonucleotide
aaaagaaagaaaaagccuuuuuaug

SEQ ID NO: 34827 - RNA, 25 nt, Artificial Sequence
  Description of Artificial Sequence: Synthetic oligonucleotide
agccuuuuuauguucuuuuauguuc

SEQ ID NO: 34828 - RNA, 25 nt, Artificial Sequence
  Description of Artificial Sequence: Synthetic oligonucleotide
guucuuuuauguucucggcucaaaa

SEQ ID NO: 34829 - RNA, 25 nt, Artificial Sequence
  Description of Artificial Sequence: Synthetic oligonucleotide
cucggcucaaaaagaaacaagggag

SEQ ID NO: 34830 - RNA, 25 nt, Artificial Sequence
  Description of Artificial Sequence: Synthetic oligonucleotide
aagaaacaagggaguguagguuuaa

SEQ ID NO: 34831 - RNA, 25 nt, Artificial Sequence
  Description of Artificial Sequence: Synthetic oligonucleotide
guguagguuuaaaaccaaaacagga

SEQ ID NO: 34832 - RNA, 25 nt, Artificial Sequence
  Description of Artificial Sequence: Synthetic oligonucleotide
aaaccaaaacaggagagaagacaaa

SEQ ID NO: 34833 - RNA, 25 nt, Artificial Sequence
  Description of Artificial Sequence: Synthetic oligonucleotide
agagaagacaaaccccgcuccggcu

SEQ ID NO: 34834 - RNA, 25 nt, Artificial Sequence
  Description of Artificial Sequence: Synthetic oligonucleotide
accccgcuccggcuggaguuaguua

SEQ ID NO: 34835 - RNA, 25 nt, Artificial Sequence
  Description of Artificial Sequence: Synthetic oligonucleotide
uggaguuaguuagaaccagaacuuu

SEQ ID NO: 34836 - RNA, 25 nt, Artificial Sequence
  Description of Artificial Sequence: Synthetic oligonucleotide
agaaccagaacuuuauuguagcgga

SEQ ID NO: 34837 - RNA, 25 nt, Artificial Sequence
  Description of Artificial Sequence: Synthetic oligonucleotide
uauuguagcggauacacuuucugac

SEQ ID NO: 34838 - RNA, 25 nt, Artificial Sequence
  Description of Artificial Sequence: Synthetic oligonucleotide
auacacuuucugaccuaucaugagu

SEQ ID NO: 34839 - RNA, 25 nt, Artificial Sequence
  Description of Artificial Sequence: Synthetic oligonucleotide
ccuaucaugaguauacacaucugcg

SEQ ID NO: 34840 - RNA, 25 nt, Artificial Sequence
  Description of Artificial Sequence: Synthetic oligonucleotide
uauacacaucugcgaagggaaaccg

SEQ ID NO: 34841 - RNA, 25 nt, Artificial Sequence
  Description of Artificial Sequence: Synthetic oligonucleotide
ugcgaagggaaaccgcgcggcgaca

SEQ ID NO: 34842 - RNA, 5379 nt, Homo sapiens
gcacuuccuucucggcuagauuaucugaaacuguugucgguucuugagaugauacuaccaccgaaugucuguguuucauugucuaguccaaccuguauuguggauaucuacaacguuccggcaauaguuuugcaggugcaucacauuuuuguuuuuguuuugggaggaaaagggagggcacggcagccaggcuucauauuccuacaagugcaugcuucaagauuacuguacuuacaguguuuccaacaucuucucauaaaaggggaaagcuucauagccucaaccaugaaggaaaccagucgcauagggcauggagcuggagaacuauaaacagcccguggugcugagagaggacaacugccgaaggcgccggaggaugaagccgcgcagugcugcggccagccuguccuccauggagcucauccccaucgaguucgugcugcccaccagccagcgcaaaugcaagagccccgaaacggcgcugcugcacguggccggccacggcaacguggagcagaugaaggcccagguguggcugcgagcgcuggagaccagcguggcggcggacuucuaccaccggcugggaccgcaucacuuccuccugcucuaucagaagaaggggcagugguacgagaucuacgacaaguaccagguggugcagacucuggacugccugcgcuacuggaaggccacgcaccggagcccgggccagauccaccuggugcagcggcacccgcccuccgaggagucccaagccuuccagcggcagcucacggcgcugauuggcuaugacgucacugacgucagcaacgugcacgacgaugagcuggaguucacgcgccguggcuuggugaccccgcgcauggcggagguggccagccgcgaccccaagcucuacgccaugcacccgugggugacguccaagccccucccggaguaccuguggaagaagauugccaacaacugcaucuucaucgucauucaccgcagcaccaccagccagaccauuaaggucucacccgacgacacccccggcgccauccugcagagcuucuucaccaagauggccaagaagaaaucucugauggauauucccgaaagccaaagcgaacaggauuuugugcugcgcgucuguggccgggaugaguaccuggugggcgaaacgcccaucaaaaacuuccagugggugaggcacugccucaagaacggagaagagauucacgugguacuggacacgccuccagacccggcccuagacgaggugaggaaggaagaguggccgcugguggaugacugcacgggagucaccggcuaccaugagcagcuuaccauccacggcaaggaccacgagaguguguucaccgugucccugugggacugcgaccgcaaguucagggucaagaucagaggcauugauauccccguccugccucggaacaccgaccucacaguuuuuguagaggcaaacauccagcaugggcaacaaguccuuugccaaaggagaaccagccccaaacccuucacagaggaggugcuguggaauguguggcuugaguucaguaucaaaaucaaagacuugcccaaaggggcucuacugaaccuccagaucuacugcgguaaagcuccagcacuguccagcaaggccucugcagagucccccaguucugaguccaagggcaaaguucagcuucucuauuaugugaaccugcugcugauagaccaccguuuccuccugcgccguggagaauacguccuccacauguggcagauaucugggaagggagaagaccaaggaagcuucaaugcugacaaacucacgucugcaacuaacccagacaaggagaacucaauguccaucuccauucuucuggacaauuacugccacccgauagcccugccuaagcaucagcccaccccugacccggaaggggaccggguucgagcagaaaugcccaaccagcuucgcaagcaauuggaggcgaucauagccacugauccacuuaacccucucacagcagaggacaaagaauugcucuggcauuuuagauacgaaagccuuaagcacccaaaagcauauccuaagcuauuuaguucagugaaauggggacagcaagaaauuguggccaaaacauaccaauuguuggccagaagggaagucugggaucaaagugcuuuggauguuggguuaacaaugcagcuccuggacugcaacuucucagaugaaaauguaagagccauugcaguucagaaacuggagagcuuggaggacgaugauguucugcauuaccuucuacaauugguccaggcugugaaauuugaaccauaccaugauagcgcccuugccagauuucugcugaagcgugguuuaagaaacaaaagaauuggucacuuuuuguuuugguucuugagaagugagauagcccaguccagacacuaucagcagagguucgcugugauucuggaagccuaucugaggggcuguggcacagccaugcugcacgacuuuacccaacaaguccaaguaaucgagauguuacaaaaagucacccuugauauuaaaucgcucucugcugaaaaguaugacgucaguucccaaguuauuucacaacuuaaacaaaagcuugaaaaccugcagaauucucaacuccccgaaagcuuuagaguuccauaugauccuggacugaaagcaggagcgcuggcaauugaaaaauguaaaguaauggccuccaagaaaaaaccacuauggcuugaguuuaaaugugccgauccuacagcccuaucaaaugaaacaauuggaauuaucuuuaaacauggugaugaucugcgccaagacaugcuuauuuuacagauucuacgaaucauggagucuauuugggagacugaaucuuuggaucuaugccuccugccauaugguugcauuucaacuggugacaaaauaggaaugaucgagauugugaaagacgccacgacaauugccaaaauucagcaaagcacagugggcaacacgggagcauuuaaagaugaaguccugaaucacuggcucaaagaaaaauccccuacugaagaaaaguuucaggcagcaguggagagauuuguuuauuccugugcaggcuacuguguggcaaccuuuguucuuggaauaggcgacagacacaaugacaauauuaugaucaccgagacaggaaaccuauuucauauugacuucgggcacauucuugggaauuacaaaaguuuccugggcauuaauaaagagagagugccauuugugcuaaccccugacuuccucuuugugaugggaacuucuggaaagaagacaagcccacacuuccagaaauuucaggacaucuguguuaaggcuuaucuagcccuucgucaucacacaaaccuacugaucauccuguucuccaugaugcugaugacaggaaugccccaguuaacaagcaaagaagacauugaauauauccgggaugcccucacaguggggaaaaaugaggaggaugcuaaaaaguauuuucuugaucagaucgaaguuugcagagacaaaggauggacugugcaguuuaauugguuucuacaucuuguucuuggcaucaaacaaggagagaaacauucagccuaauacuuuaggcuagaaucaaaaacaaguuaguguucuaugguuuaaauuagcauagcaaucaucgaacuuggauuucaaaugcaauagacauugugaaagcuggcauuucagaaguauagcucuuuuccuaccugaacucuucccuggagaaaagauguuggcauugcugauuguuugguuaagcaauguccagugcuaggauuauuugcagguuugguuuuuucucauuugucuguggcauuggagaauauucucgguuuaaacagacuaaugacuuccuuauugucccugauauuuugacuaucuuacuauugagugcuucuggaaauucuuuggaauaauugaugacaucuauuuucaucuggguuuagucucaauuuugguuaucuuuguguuccucaagcucuuuaaagaaaaagauguaaucguuguaaccuuugucucauuccuuaaaugaugcuuccaaacaucuccuuagugucugcagguguuaguggugugcuaaaagcaaggaaagcgaguuagucuuuucagugucuuuugcaauucaauucuuuugucauguauaacugagacacacaaacacagcaggagaaaucuaaaccguugugccuugaccuuccucugcuggucuuguuccaggguuaugaauaugaaaaaauagagaugagacuuuuugugucaacucuguccacaagagugaguuaucuaguaugauuaguauagcuuucuccagcauggcagcaggaaguaacuacagggccucuuuuaugccugacauuucuucccuuccuuuuucccugccucccuuuuucaucaauugcaaugcucccacaacucuuuacagacuugugaaaucuucaagaacaccuuuacucuauaacucaaaaauuaguugaaaaauaauuacuucucaaggauuauuagaaucuuagguacuuauuuguaaagauguuuagugacuuuuuuuucaaguaucuuauuaaaggaggcauucuagaaaauaugaauuaguuuccaaaugccuuaauuuuaaacuuuggccugaacaguuuuuucuuuuucuuaauggaagaagauauuuaauaucuuaaaaauauuccaaguuaggaagaacacuacuugccuuauccauuucccauuuaaaggacuuuuaaacuuugacacauccuucagauuuccugaaaauaauugaaauaucuuacuuuaaaaauauuuucaucucugaaauaucucguuauuuauuggagguauuguuuaaccuuagagagaccauuaaauuauuuauaaaauauuuuguaauuaccuguagcuaauacauuacauagaaaaaaacuauguuaacagugucucuguuuaaguauaaucagauauaaauauauacuuaauuuuuuaauuuuaaaaauagauaccuguuugacuuugagguaguccagaccuuuucuuuuuuuuuuuuuuuuuaaugugugcaaaagcccaaagguuccuaagccuggcugcaaagaagaaucaacagggacacuuuuuaaaaacacucuuaucagccugggcaacacagugagacuccaucucuuaaaaaaaaaauuagcuggguauagugguaugugccuguagucccagguacucaggaggcugaggcaggaggauugccugagcccaggagguggaaacugcagagagucaugaucauguccuuacacuccagccuggauaacagagcgagacccugucucaaaaaaauaaaauaaaaaauaaaaaca

SEQ ID NO: 34843 - RNA, 19 nt, Artificial Sequence
  Description of Artificial Sequence: Synthetic oligonucleotide
gcacuuccuucucggcuag

SEQ ID NO: 34844 - RNA, 19 nt, Artificial Sequence
  Description of Artificial Sequence: Synthetic oligonucleotide
gauuaucugaaacuguugu

SEQ ID NO: 34845 - RNA, 19 nt, Artificial Sequence
  Description of Artificial Sequence: Synthetic oligonucleotide
ucgguucuugagaugauac

SEQ ID NO: 34846 - RNA, 19 nt, Artificial Sequence
  Description of Artificial Sequence: Synthetic oligonucleotide
cuaccaccgaaugucugug

SEQ ID NO: 34847 - RNA, 19 nt, Artificial Sequence
  Description of Artificial Sequence: Synthetic oligonucleotide
guuucauugucuaguccaa

SEQ ID NO: 34848 - RNA, 19 nt, Artificial Sequence
  Description of Artificial Sequence: Synthetic oligonucleotide
accuguauuguggauaucu

SEQ ID NO: 34849 - RNA, 19 nt, Artificial Sequence
  Description of Artificial Sequence: Synthetic oligonucleotide
uacaacguuccggcaauag

SEQ ID NO: 34850 - RNA, 19 nt, Artificial Sequence
  Description of Artificial Sequence: Synthetic oligonucleotide
guuuugcaggugcaucaca

SEQ ID NO: 34851 - RNA, 19 nt, Artificial Sequence
  Description of Artificial Sequence: Synthetic oligonucleotide
auuuuuguuuuuguuuugg

SEQ ID NO: 34852 - RNA, 19 nt, Artificial Sequence
  Description of Artificial Sequence: Synthetic oligonucleotide
ggaggaaaagggagggcac

SEQ ID NO: 34853 - RNA, 19 nt, Artificial Sequence
  Description of Artificial Sequence: Synthetic oligonucleotide
cggcagccaggcuucauau

SEQ ID NO: 34854 - RNA, 19 nt, Artificial Sequence
  Description of Artificial Sequence: Synthetic oligonucleotide
uuccuacaagugcaugcuu

SEQ ID NO: 34855 - RNA, 19 nt, Artificial Sequence
  Description of Artificial Sequence: Synthetic oligonucleotide
ucaagauuacuguacuuac

SEQ ID NO: 34856 - RNA, 19 nt, Artificial Sequence
  Description of Artificial Sequence: Synthetic oligonucleotide
caguguuuccaacaucuuc

SEQ ID NO: 34857 - RNA, 19 nt, Artificial Sequence
  Description of Artificial Sequence: Synthetic oligonucleotide
cucauaaaaggggaaagcu

SEQ ID NO: 34858 - RNA, 19 nt, Artificial Sequence
  Description of Artificial Sequence: Synthetic oligonucleotide
uucauagccucaaccauga

SEQ ID NO: 34859 - RNA, 19 nt, Artificial Sequence
  Description of Artificial Sequence: Synthetic oligonucleotide
aaggaaaccagucgcauag

SEQ ID NO: 34860 - RNA, 19 nt, Artificial Sequence
  Description of Artificial Sequence: Synthetic oligonucleotide
gggcauggagcuggagaac

SEQ ID NO: 34861 - RNA, 19 nt, Artificial Sequence
  Description of Artificial Sequence: Synthetic oligonucleotide
cuauaaacagcccguggug

SEQ ID NO: 34862 - RNA, 19 nt, Artificial Sequence
  Description of Artificial Sequence: Synthetic oligonucleotide
gcugagagaggacaacugc

SEQ ID NO: 34863 - RNA, 19 nt, Artificial Sequence
  Description of Artificial Sequence: Synthetic oligonucleotide
ccgaaggcgccggaggaug

SEQ ID NO: 34864 - RNA, 19 nt, Artificial Sequence
  Description of Artificial Sequence: Synthetic oligonucleotide
gaagccgcgcagugcugcg

SEQ ID NO: 34865 - RNA, 19 nt, Artificial Sequence
  Description of Artificial Sequence: Synthetic oligonucleotide
ggccagccuguccuccaug

SEQ ID NO: 34866 - RNA, 19 nt, Artificial Sequence
  Description of Artificial Sequence: Synthetic oligonucleotide
ggagcucauccccaucgag

SEQ ID NO: 34867 - RNA, 19 nt, Artificial Sequence
  Description of Artificial Sequence: Synthetic oligonucleotide
guucgugcugcccaccagc

SEQ ID NO: 34868 - RNA, 19 nt, Artificial Sequence
  Description of Artificial Sequence: Synthetic oligonucleotide
ccagcgcaaaugcaagagc

SEQ ID NO: 34869 - RNA, 19 nt, Artificial Sequence
  Description of Artificial Sequence: Synthetic oligonucleotide
ccccgaaacggcgcugcug

SEQ ID NO: 34870 - RNA, 19 nt, Artificial Sequence
  Description of Artificial Sequence: Synthetic oligonucleotide
gcacguggccggccacggc

SEQ ID NO: 34871 - RNA, 19 nt, Artificial Sequence
  Description of Artificial Sequence: Synthetic oligonucleotide
caacguggagcagaugaag

SEQ ID NO: 34872 - RNA, 19 nt, Artificial Sequence
  Description of Artificial Sequence: Synthetic oligonucleotide
ggcccagguguggcugcga

SEQ ID NO: 34873 - RNA, 19 nt, Artificial Sequence
  Description of Artificial Sequence: Synthetic oligonucleotide
agcgcuggagaccagcgug

SEQ ID NO: 34874 - RNA, 19 nt, Artificial Sequence
  Description of Artificial Sequence: Synthetic oligonucleotide
ggcggcggacuucuaccac

SEQ ID NO: 34875 - RNA, 19 nt, Artificial Sequence
  Description of Artificial Sequence: Synthetic oligonucleotide
ccggcugggaccgcaucac

SEQ ID NO: 34876 - RNA, 19 nt, Artificial Sequence
  Description of Artificial Sequence: Synthetic oligonucleotide
cuuccuccugcucuaucag

SEQ ID NO: 34877 - RNA, 19 nt, Artificial Sequence
  Description of Artificial Sequence: Synthetic oligonucleotide
gaagaaggggcagugguac

SEQ ID NO: 34878 - RNA, 19 nt, Artificial Sequence
  Description of Artificial Sequence: Synthetic oligonucleotide
cgagaucuacgacaaguac

SEQ ID NO: 34879 - RNA, 19 nt, Artificial Sequence
  Description of Artificial Sequence: Synthetic oligonucleotide
ccagguggugcagacucug

SEQ ID NO: 34880 - RNA, 19 nt, Artificial Sequence
  Description of Artificial Sequence: Synthetic oligonucleotide
ggacugccugcgcuacugg

SEQ ID NO: 34881 - RNA, 19 nt, Artificial Sequence
  Description of Artificial Sequence: Synthetic oligonucleotide
gaaggccacgcaccggagc

SEQ ID NO: 34882 - RNA, 19 nt, Artificial Sequence
  Description of Artificial Sequence: Synthetic oligonucleotide
cccgggccagauccaccug

SEQ ID NO: 34883 - RNA, 19 nt, Artificial Sequence
  Description of Artificial Sequence: Synthetic oligonucleotide
ggugcagcggcacccgccc

SEQ ID NO: 34884 - RNA, 19 nt, Artificial Sequence
  Description of Artificial Sequence: Synthetic oligonucleotide
cuccgaggagucccaagcc

SEQ ID NO: 34885 - RNA, 19 nt, Artificial Sequence
  Description of Artificial Sequence: Synthetic oligonucleotide
cuuccagcggcagcucacg

SEQ ID NO: 34886 - RNA, 19 nt, Artificial Sequence
  Description of Artificial Sequence: Synthetic oligonucleotide
ggcgcugauuggcuaugac

SEQ ID NO: 34887 - RNA, 19 nt, Artificial Sequence
  Description of Artificial Sequence: Synthetic oligonucleotide
cgucacugacgucagcaac

SEQ ID NO: 34888 - RNA, 19 nt, Artificial Sequence
  Description of Artificial Sequence: Synthetic oligonucleotide
cgugcacgacgaugagcug

SEQ ID NO: 34889 - RNA, 19 nt, Artificial Sequence
  Description of Artificial Sequence: Synthetic oligonucleotide
ggaguucacgcgccguggc

SEQ ID NO: 34890 - RNA, 19 nt, Artificial Sequence
  Description of Artificial Sequence: Synthetic oligonucleotide
cuuggugaccccgcgcaug

SEQ ID NO: 34891 - RNA, 19 nt, Artificial Sequence
  Description of Artificial Sequence: Synthetic oligonucleotide
ggcggagguggccagccgc

SEQ ID NO: 34892 - RNA, 19 nt, Artificial Sequence
  Description of Artificial Sequence: Synthetic oligonucleotide
cgaccccaagcucuacgcc

SEQ ID NO: 34893 - RNA, 19 nt, Artificial Sequence
  Description of Artificial Sequence: Synthetic oligonucleotide
caugcacccgugggugacg

SEQ ID NO: 34894 - RNA, 19 nt, Artificial Sequence
  Description of Artificial Sequence: Synthetic oligonucleotide
guccaagccccucccggag

SEQ ID NO: 34895 - RNA, 19 nt, Artificial Sequence
  Description of Artificial Sequence: Synthetic oligonucleotide
guaccuguggaagaagauu

SEQ ID NO: 34896 - RNA, 19 nt, Artificial Sequence
  Description of Artificial Sequence: Synthetic oligonucleotide
ugccaacaacugcaucuuc

SEQ ID NO: 34897 - RNA, 19 nt, Artificial Sequence
  Description of Artificial Sequence: Synthetic oligonucleotide
caucgucauucaccgcagc

SEQ ID NO: 34898 - RNA, 19 nt, Artificial Sequence
  Description of Artificial Sequence: Synthetic oligonucleotide
caccaccagccagaccauu

SEQ ID NO: 34899 - RNA, 19 nt, Artificial Sequence
  Description of Artificial Sequence: Synthetic oligonucleotide
uaaggucucacccgacgac

SEQ ID NO: 34900 - RNA, 19 nt, Artificial Sequence
  Description of Artificial Sequence: Synthetic oligonucleotide
cacccccggcgccauccug

SEQ ID NO: 34901 - RNA, 19 nt, Artificial Sequence
  Description of Artificial Sequence: Synthetic oligonucleotide
gcagagcuucuucaccaag

SEQ ID NO: 34902 - RNA, 19 nt, Artificial Sequence
  Description of Artificial Sequence: Synthetic oligonucleotide
gauggccaagaagaaaucu

SEQ ID NO: 34903 - RNA, 19 nt, Artificial Sequence
  Description of Artificial Sequence: Synthetic oligonucleotide
ucugauggauauucccgaa

SEQ ID NO: 34904 - RNA, 19 nt, Artificial Sequence
  Description of Artificial Sequence: Synthetic oligonucleotide
aagccaaagcgaacaggau

SEQ ID NO: 34905 - RNA, 19 nt, Artificial Sequence
  Description of Artificial Sequence: Synthetic oligonucleotide
uuuugugcugcgcgucugu

SEQ ID NO: 34906 - RNA, 19 nt, Artificial Sequence
  Description of Artificial Sequence: Synthetic oligonucleotide
uggccgggaugaguaccug

SEQ ID NO: 34907 - RNA, 19 nt, Artificial Sequence
  Description of Artificial Sequence: Synthetic oligonucleotide
ggugggcgaaacgcccauc

SEQ ID NO: 34908 - RNA, 19 nt, Artificial Sequence
  Description of Artificial Sequence: Synthetic oligonucleotide
caaaaacuuccagugggug

SEQ ID NO: 34909 - RNA, 19 nt, Artificial Sequence
  Description of Artificial Sequence: Synthetic oligonucleotide
gaggcacugccucaagaac

SEQ ID NO: 34910 - RNA, 19 nt, Artificial Sequence
  Description of Artificial Sequence: Synthetic oligonucleotide
cggagaagagauucacgug

SEQ ID NO: 34911 - RNA, 19 nt, Artificial Sequence
  Description of Artificial Sequence: Synthetic oligonucleotide
gguacuggacacgccucca

SEQ ID NO: 34912 - RNA, 19 nt, Artificial Sequence
  Description of Artificial Sequence: Synthetic oligonucleotide
agacccggcccuagacgag

SEQ ID NO: 34913 - RNA, 19 nt, Artificial Sequence
  Description of Artificial Sequence: Synthetic oligonucleotide
ggugaggaaggaagagugg

SEQ ID NO: 34914 - RNA, 19 nt, Artificial Sequence
  Description of Artificial Sequence: Synthetic oligonucleotide
gccgcugguggaugacugc

SEQ ID NO: 34915 - RNA, 19 nt, Artificial Sequence
  Description of Artificial Sequence: Synthetic oligonucleotide
cacgggagucaccggcuac

SEQ ID NO: 34916 - RNA, 19 nt, Artificial Sequence
  Description of Artificial Sequence: Synthetic oligonucleotide
ccaugagcagcuuaccauc

SEQ ID NO: 34917 - RNA, 19 nt, Artificial Sequence
  Description of Artificial Sequence: Synthetic oligonucleotide
ccacggcaaggaccacgag

SEQ ID NO: 34918 - RNA, 19 nt, Artificial Sequence
  Description of Artificial Sequence: Synthetic oligonucleotide
gaguguguucaccgugucc

SEQ ID NO: 34919 - RNA, 19 nt, Artificial Sequence
  Description of Artificial Sequence: Synthetic oligonucleotide
ccugugggacugcgaccgc

SEQ ID NO: 34920 - RNA, 19 nt, Artificial Sequence
  Description of Artificial Sequence: Synthetic oligonucleotide
caaguucagggucaagauc

SEQ ID NO: 34921 - RNA, 19 nt, Artificial Sequence
  Description of Artificial Sequence: Synthetic oligonucleotide
cagaggcauugauaucccc

SEQ ID NO: 34922 - RNA, 19 nt, Artificial Sequence
  Description of Artificial Sequence: Synthetic oligonucleotide
cguccugccucggaacacc

SEQ ID NO: 34923 - RNA, 19 nt, Artificial Sequence
  Description of Artificial Sequence: Synthetic oligonucleotide
cgaccucacaguuuuugua

SEQ ID NO: 34924 - RNA, 19 nt, Artificial Sequence
  Description of Artificial Sequence: Synthetic oligonucleotide
agaggcaaacauccagcau

SEQ ID NO: 34925 - RNA, 19 nt, Artificial Sequence
  Description of Artificial Sequence: Synthetic oligonucleotide
ugggcaacaaguccuuugc

SEQ ID NO: 34926 - RNA, 19 nt, Artificial Sequence
  Description of Artificial Sequence: Synthetic oligonucleotide
ccaaaggagaaccagcccc

SEQ ID NO: 34927 - RNA, 19 nt, Artificial Sequence
  Description of Artificial Sequence: Synthetic oligonucleotide
caaacccuucacagaggag

SEQ ID NO: 34928 - RNA, 19 nt, Artificial Sequence
  Description of Artificial Sequence: Synthetic oligonucleotide
ggugcuguggaaugugugg

SEQ ID NO: 34929 - RNA, 19 nt, Artificial Sequence
  Description of Artificial Sequence: Synthetic oligonucleotide
gcuugaguucaguaucaaa

SEQ ID NO: 34930 - RNA, 19 nt, Artificial Sequence
  Description of Artificial Sequence: Synthetic oligonucleotide
aaucaaagacuugcccaaa

SEQ ID NO: 34931 - RNA, 19 nt, Artificial Sequence
  Description of Artificial Sequence: Synthetic oligonucleotide
aggggcucuacugaaccuc

SEQ ID NO: 34932 - RNA, 19 nt, Artificial Sequence
  Description of Artificial Sequence: Synthetic oligonucleotide
ccagaucuacugcgguaaa

SEQ ID NO: 34933 - RNA, 19 nt, Artificial Sequence
  Description of Artificial Sequence: Synthetic oligonucleotide
agcuccagcacuguccagc

SEQ ID NO: 34934 - RNA, 19 nt, Artificial Sequence
  Description of Artificial Sequence: Synthetic oligonucleotide
caaggccucugcagagucc

SEQ ID NO: 34935 - RNA, 19 nt, Artificial Sequence
  Description of Artificial Sequence: Synthetic oligonucleotide
ccccaguucugaguccaag

SEQ ID NO: 34936 - RNA, 19 nt, Artificial Sequence
  Description of Artificial Sequence: Synthetic oligonucleotide
gggcaaaguucagcuucuc

SEQ ID NO: 34937 - RNA, 19 nt, Artificial Sequence
  Description of Artificial Sequence: Synthetic oligonucleotide
cuauuaugugaaccugcug

SEQ ID NO: 34938 - RNA, 19 nt, Artificial Sequence
  Description of Artificial Sequence: Synthetic oligonucleotide
gcugauagaccaccguuuc

SEQ ID NO: 34939 - RNA, 19 nt, Artificial Sequence
  Description of Artificial Sequence: Synthetic oligonucleotide
ccuccugcgccguggagaa

SEQ ID NO: 34940 - RNA, 19 nt, Artificial Sequence
  Description of Artificial Sequence: Synthetic oligonucleotide
auacguccuccacaugugg

SEQ ID NO: 34941 - RNA, 19 nt, Artificial Sequence
  Description of Artificial Sequence: Synthetic oligonucleotide
gcagauaucugggaaggga

SEQ ID NO: 34942 - RNA, 19 nt, Artificial Sequence
  Description of Artificial Sequence: Synthetic oligonucleotide
agaagaccaaggaagcuuc

SEQ ID NO: 34943 - RNA, 19 nt, Artificial Sequence
  Description of Artificial Sequence: Synthetic oligonucleotide
caaugcugacaaacucacg

SEQ ID NO: 34944 - RNA, 19 nt, Artificial Sequence
  Description of Artificial Sequence: Synthetic oligonucleotide
gucugcaacuaacccagac

SEQ ID NO: 34945 - RNA, 19 nt, Artificial Sequence
  Description of Artificial Sequence: Synthetic oligonucleotide
caaggagaacucaaugucc

SEQ ID NO: 34946 - RNA, 19 nt, Artificial Sequence
  Description of Artificial Sequence: Synthetic oligonucleotide
caucuccauucuucuggac

SEQ ID NO: 34947 - RNA, 19 nt, Artificial Sequence
  Description of Artificial Sequence: Synthetic oligonucleotide
caauuacugccacccgaua

SEQ ID NO: 34948 - RNA, 19 nt, Artificial Sequence
  Description of Artificial Sequence: Synthetic oligonucleotide
agcccugccuaagcaucag

SEQ ID NO: 34949 - RNA, 19 nt, Artificial Sequence
  Description of Artificial Sequence: Synthetic oligonucleotide
gcccaccccugacccggaa

SEQ ID NO: 34950 - RNA, 19 nt, Artificial Sequence
  Description of Artificial Sequence: Synthetic oligonucleotide
aggggaccggguucgagca

SEQ ID NO: 34951 - RNA, 19 nt, Artificial Sequence
  Description of Artificial Sequence: Synthetic oligonucleotide
agaaaugcccaaccagcuu

SEQ ID NO: 34952 - RNA, 19 nt, Artificial Sequence
  Description of Artificial Sequence: Synthetic oligonucleotide
ucgcaagcaauuggaggcg

SEQ ID NO: 34953 - RNA, 19 nt, Artificial Sequence
  Description of Artificial Sequence: Synthetic oligonucleotide
gaucauagccacugaucca

SEQ ID NO: 34954 - RNA, 19 nt, Artificial Sequence
  Description of Artificial Sequence: Synthetic oligonucleotide
acuuaacccucucacagca

SEQ ID NO: 34955 - RNA, 19 nt, Artificial Sequence
  Description of Artificial Sequence: Synthetic oligonucleotide
agaggacaaagaauugcuc

SEQ ID NO: 34956 - RNA, 19 nt, Artificial Sequence
  Description of Artificial Sequence: Synthetic oligonucleotide
cuggcauuuuagauacgaa

SEQ ID NO: 34957 - RNA, 19 nt, Artificial Sequence
  Description of Artificial Sequence: Synthetic oligonucleotide
aagccuuaagcacccaaaa

SEQ ID NO: 34958 - RNA, 19 nt, Artificial Sequence
  Description of Artificial Sequence: Synthetic oligonucleotide
agcauauccuaagcuauuu

SEQ ID NO: 34959 - RNA, 19 nt, Artificial Sequence
  Description of Artificial Sequence: Synthetic oligonucleotide
uaguucagugaaaugggga

SEQ ID NO: 34960 - RNA, 19 nt, Artificial Sequence
  Description of Artificial Sequence: Synthetic oligonucleotide
acagcaagaaauuguggcc

SEQ ID NO: 34961 - RNA, 19 nt, Artificial Sequence
  Description of Artificial Sequence: Synthetic oligonucleotide
caaaacauaccaauuguug

SEQ ID NO: 34962 - RNA, 19 nt, Artificial Sequence
  Description of Artificial Sequence: Synthetic oligonucleotide
ggccagaagggaagucugg

SEQ ID NO: 34963 - RNA, 19 nt, Artificial Sequence
  Description of Artificial Sequence: Synthetic oligonucleotide
ggaucaaagugcuuuggau

SEQ ID NO: 34964 - RNA, 19 nt, Artificial Sequence
  Description of Artificial Sequence: Synthetic oligonucleotide
uguuggguuaacaaugcag

SEQ ID NO: 34965 - RNA, 19 nt, Artificial Sequence
  Description of Artificial Sequence: Synthetic oligonucleotide
gcuccuggacugcaacuuc

SEQ ID NO: 34966 - RNA, 19 nt, Artificial Sequence
  Description of Artificial Sequence: Synthetic oligonucleotide
cucagaugaaaauguaaga

SEQ ID NO: 34967 - RNA, 19 nt, Artificial Sequence
  Description of Artificial Sequence: Synthetic oligonucleotide
agccauugcaguucagaaa

SEQ ID NO: 34968 - RNA, 19 nt, Artificial Sequence
  Description of Artificial Sequence: Synthetic oligonucleotide
acuggagagcuuggaggac

SEQ ID NO: 34969 - RNA, 19 nt, Artificial Sequence
  Description of Artificial Sequence: Synthetic oligonucleotide
cgaugauguucugcauuac

SEQ ID NO: 34970 - RNA, 19 nt, Artificial Sequence
  Description of Artificial Sequence: Synthetic oligonucleotide
ccuucuacaauugguccag

SEQ ID NO: 34971 - RNA, 19 nt, Artificial Sequence
  Description of Artificial Sequence: Synthetic oligonucleotide
ggcugugaaauuugaacca

SEQ ID NO: 34972 - RNA, 19 nt, Artificial Sequence
  Description of Artificial Sequence: Synthetic oligonucleotide
auaccaugauagcgcccuu

SEQ ID NO: 34973 - RNA, 19 nt, Artificial Sequence
  Description of Artificial Sequence: Synthetic oligonucleotide
ugccagauuucugcugaag

SEQ ID NO: 34974 - RNA, 19 nt, Artificial Sequence
  Description of Artificial Sequence: Synthetic oligonucleotide
gcgugguuuaagaaacaaa

SEQ ID NO: 34975 - RNA, 19 nt, Artificial Sequence
  Description of Artificial Sequence: Synthetic oligonucleotide
aagaauuggucacuuuuug

SEQ ID NO: 34976 - RNA, 19 nt, Artificial Sequence
  Description of Artificial Sequence: Synthetic oligonucleotide
guuuugguucuugagaagu

SEQ ID NO: 34977 - RNA, 19 nt, Artificial Sequence
  Description of Artificial Sequence: Synthetic oligonucleotide
ugagauagcccaguccaga

SEQ ID NO: 34978 - RNA, 19 nt, Artificial Sequence
  Description of Artificial Sequence: Synthetic oligonucleotide
acacuaucagcagagguuc

SEQ ID NO: 34979 - RNA, 19 nt, Artificial Sequence
  Description of Artificial Sequence: Synthetic oligonucleotide
cgcugugauucuggaagcc

SEQ ID NO: 34980 - RNA, 19 nt, Artificial Sequence
  Description of Artificial Sequence: Synthetic oligonucleotide
cuaucugaggggcuguggc

SEQ ID NO: 34981 - RNA, 19 nt, Artificial Sequence
  Description of Artificial Sequence: Synthetic oligonucleotide
cacagccaugcugcacgac

SEQ ID NO: 34982 - RNA, 19 nt, Artificial Sequence
  Description of Artificial Sequence: Synthetic oligonucleotide
cuuuacccaacaaguccaa

SEQ ID NO: 34983 - RNA, 19 nt, Artificial Sequence
  Description of Artificial Sequence: Synthetic oligonucleotide
aguaaucgagauguuacaa

SEQ ID NO: 34984 - RNA, 19 nt, Artificial Sequence
  Description of Artificial Sequence: Synthetic oligonucleotide
aaaagucacccuugauauu

SEQ ID NO: 34985 - RNA, 19 nt, Artificial Sequence
  Description of Artificial Sequence: Synthetic oligonucleotide
uaaaucgcucucugcugaa

SEQ ID NO: 34986 - RNA, 19 nt, Artificial Sequence
  Description of Artificial Sequence: Synthetic oligonucleotide
aaaguaugacgucaguucc

SEQ ID NO: 34987 - RNA, 19 nt, Artificial Sequence
  Description of Artificial Sequence: Synthetic oligonucleotide
ccaaguuauuucacaacuu

SEQ ID NO: 34988 - RNA, 19 nt, Artificial Sequence
  Description of Artificial Sequence: Synthetic oligonucleotide
uaaacaaaagcuugaaaac

SEQ ID NO: 34989 - RNA, 19 nt, Artificial Sequence
  Description of Artificial Sequence: Synthetic oligonucleotide
ccugcagaauucucaacuc

SEQ ID NO: 34990 - RNA, 19 nt, Artificial Sequence
  Description of Artificial Sequence: Synthetic oligonucleotide
ccccgaaagcuuuagaguu

SEQ ID NO: 34991 - RNA, 19 nt, Artificial Sequence
  Description of Artificial Sequence: Synthetic oligonucleotide
uccauaugauccuggacug

SEQ ID NO: 34992 - RNA, 19 nt, Artificial Sequence
  Description of Artificial Sequence: Synthetic oligonucleotide
gaaagcaggagcgcuggca

SEQ ID NO: 34993 - RNA, 19 nt, Artificial Sequence
  Description of Artificial Sequence: Synthetic oligonucleotide
aauugaaaaauguaaagua

SEQ ID NO: 34994 - RNA, 19 nt, Artificial Sequence
  Description of Artificial Sequence: Synthetic oligonucleotide
aauggccuccaagaaaaaa

SEQ ID NO: 34995 - RNA, 19 nt, Artificial Sequence
  Description of Artificial Sequence: Synthetic oligonucleotide
accacuauggcuugaguuu

SEQ ID NO: 34996 - RNA, 19 nt, Artificial Sequence
  Description of Artificial Sequence: Synthetic oligonucleotide
uaaaugugccgauccuaca

SEQ ID NO: 34997 - RNA, 19 nt, Artificial Sequence
  Description of Artificial Sequence: Synthetic oligonucleotide
agcccuaucaaaugaaaca

SEQ ID NO: 34998 - RNA, 19 nt, Artificial Sequence
  Description of Artificial Sequence: Synthetic oligonucleotide
aauuggaauuaucuuuaaa

SEQ ID NO: 34999 - RNA, 19 nt, Artificial Sequence
  Description of Artificial Sequence: Synthetic oligonucleotide
acauggugaugaucugcgc

SEQ ID NO: 35000 - RNA, 19 nt, Artificial Sequence
  Description of Artificial Sequence: Synthetic oligonucleotide
ccaagacaugcuuauuuua

SEQ ID NO: 35001 - RNA, 19 nt, Artificial Sequence
  Description of Artificial Sequence: Synthetic oligonucleotide
acagauucuacgaaucaug

SEQ ID NO: 35002 - RNA, 19 nt, Artificial Sequence
  Description of Artificial Sequence: Synthetic oligonucleotide
ggagucuauuugggagacu

SEQ ID NO: 35003 - RNA, 19 nt, Artificial Sequence
  Description of Artificial Sequence: Synthetic oligonucleotide
ugaaucuuuggaucuaugc

SEQ ID NO: 35004 - RNA, 19 nt, Artificial Sequence
  Description of Artificial Sequence: Synthetic oligonucleotide
ccuccugccauaugguugc

SEQ ID NO: 35005 - RNA, 19 nt, Artificial Sequence
  Description of Artificial Sequence: Synthetic oligonucleotide
cauuucaacuggugacaaa

SEQ ID NO: 35006 - RNA, 19 nt, Artificial Sequence
  Description of Artificial Sequence: Synthetic oligonucleotide
aauaggaaugaucgagauu

SEQ ID NO: 35007 - RNA, 19 nt, Artificial Sequence
  Description of Artificial Sequence: Synthetic oligonucleotide
ugugaaagacgccacgaca

SEQ ID NO: 35008 - RNA, 19 nt, Artificial Sequence
  Description of Artificial Sequence: Synthetic oligonucleotide
aauugccaaaauucagcaa

SEQ ID NO: 35009 - RNA, 19 nt, Artificial Sequence
  Description of Artificial Sequence: Synthetic oligonucleotide
aagcacagugggcaacacg

SEQ ID NO: 35010 - RNA, 19 nt, Artificial Sequence
  Description of Artificial Sequence: Synthetic oligonucleotide
gggagcauuuaaagaugaa

SEQ ID NO: 35011 - RNA, 19 nt, Artificial Sequence
  Description of Artificial Sequence: Synthetic oligonucleotide
aguccugaaucacuggcuc

SEQ ID NO: 35012 - RNA, 19 nt, Artificial Sequence
  Description of Artificial Sequence: Synthetic oligonucleotide
caaagaaaaauccccuacu

SEQ ID NO: 35013 - RNA, 19 nt, Artificial Sequence
  Description of Artificial Sequence: Synthetic oligonucleotide
ugaagaaaaguuucaggca

SEQ ID NO: 35014 - RNA, 19 nt, Artificial Sequence
  Description of Artificial Sequence: Synthetic oligonucleotide
agcaguggagagauuuguu

SEQ ID NO: 35015 - RNA, 19 nt, Artificial Sequence
  Description of Artificial Sequence: Synthetic oligonucleotide
uuauuccugugcaggcuac

SEQ ID NO: 35016 - RNA, 19 nt, Artificial Sequence
  Description of Artificial Sequence: Synthetic oligonucleotide
cuguguggcaaccuuuguu

SEQ ID NO: 35017 - RNA, 19 nt, Artificial Sequence
  Description of Artificial Sequence: Synthetic oligonucleotide
ucuuggaauaggcgacaga

SEQ ID NO: 35018 - RNA, 19 nt, Artificial Sequence
  Description of Artificial Sequence: Synthetic oligonucleotide
acacaaugacaauauuaug

SEQ ID NO: 35019 - RNA, 19 nt, Artificial Sequence
  Description of Artificial Sequence: Synthetic oligonucleotide
gaucaccgagacaggaaac

SEQ ID NO: 35020 - RNA, 19 nt, Artificial Sequence
  Description of Artificial Sequence: Synthetic oligonucleotide
ccuauuucauauugacuuc

SEQ ID NO: 35021 - RNA, 19 nt, Artificial Sequence
  Description of Artificial Sequence: Synthetic oligonucleotide
cgggcacauucuugggaau

SEQ ID NO: 35022 - RNA, 19 nt, Artificial Sequence
  Description of Artificial Sequence: Synthetic oligonucleotide
uuacaaaaguuuccugggc

SEQ ID NO: 35023 - RNA, 19 nt, Artificial Sequence
  Description of Artificial Sequence: Synthetic oligonucleotide
cauuaauaaagagagagug

SEQ ID NO: 35024 - RNA, 19 nt, Artificial Sequence
  Description of Artificial Sequence: Synthetic oligonucleotide
gccauuugugcuaaccccu

SEQ ID NO: 35025 - RNA, 19 nt, Artificial Sequence
  Description of Artificial Sequence: Synthetic oligonucleotide
ugacuuccucuuugugaug

SEQ ID NO: 35026 - RNA, 19 nt, Artificial Sequence
  Description of Artificial Sequence: Synthetic oligonucleotide
gggaacuucuggaaagaag

SEQ ID NO: 35027 - RNA, 19 nt, Artificial Sequence
  Description of Artificial Sequence: Synthetic oligonucleotide
gacaagcccacacuuccag

SEQ ID NO: 35028 - RNA, 19 nt, Artificial Sequence
  Description of Artificial Sequence: Synthetic oligonucleotide
gaaauuucaggacaucugu

SEQ ID NO: 35029 - RNA, 19 nt, Artificial Sequence
  Description of Artificial Sequence: Synthetic oligonucleotide
uguuaaggcuuaucuagcc

SEQ ID NO: 35030 - RNA, 19 nt, Artificial Sequence
  Description of Artificial Sequence: Synthetic oligonucleotide
ccuucgucaucacacaaac

SEQ ID NO: 35031 - RNA, 19 nt, Artificial Sequence
  Description of Artificial Sequence: Synthetic oligonucleotide
ccuacugaucauccuguuc

SEQ ID NO: 35032 - RNA, 19 nt, Artificial Sequence
  Description of Artificial Sequence: Synthetic oligonucleotide
cuccaugaugcugaugaca

SEQ ID NO: 35033 - RNA, 19 nt, Artificial Sequence
  Description of Artificial Sequence: Synthetic oligonucleotide
aggaaugccccaguuaaca

SEQ ID NO: 35034 - RNA, 19 nt, Artificial Sequence
  Description of Artificial Sequence: Synthetic oligonucleotide
aagcaaagaagacauugaa

SEQ ID NO: 35035 - RNA, 19 nt, Artificial Sequence
  Description of Artificial Sequence: Synthetic oligonucleotide
auauauccgggaugcccuc

SEQ ID NO: 35036 - RNA, 19 nt, Artificial Sequence
  Description of Artificial Sequence: Synthetic oligonucleotide
cacaguggggaaaaaugag

SEQ ID NO: 35037 - RNA, 19 nt, Artificial Sequence
  Description of Artificial Sequence: Synthetic oligonucleotide
ggaggaugcuaaaaaguau

SEQ ID NO: 35038 - RNA, 19 nt, Artificial Sequence
  Description of Artificial Sequence: Synthetic oligonucleotide
uuuucuugaucagaucgaa

SEQ ID NO: 35039 - RNA, 19 nt, Artificial Sequence
  Description of Artificial Sequence: Synthetic oligonucleotide
aguuugcagagacaaagga

SEQ ID NO: 35040 - RNA, 19 nt, Artificial Sequence
  Description of Artificial Sequence: Synthetic oligonucleotide
auggacugugcaguuuaau

SEQ ID NO: 35041 - RNA, 19 nt, Artificial Sequence
  Description of Artificial Sequence: Synthetic oligonucleotide
uugguuucuacaucuuguu

SEQ ID NO: 35042 - RNA, 19 nt, Artificial Sequence
  Description of Artificial Sequence: Synthetic oligonucleotide
ucuuggcaucaaacaagga

SEQ ID NO: 35043 - RNA, 19 nt, Artificial Sequence
  Description of Artificial Sequence: Synthetic oligonucleotide
agagaaacauucagccuaa

SEQ ID NO: 35044 - RNA, 19 nt, Artificial Sequence
  Description of Artificial Sequence: Synthetic oligonucleotide
auacuuuaggcuagaauca

SEQ ID NO: 35045 - RNA, 19 nt, Artificial Sequence
  Description of Artificial Sequence: Synthetic oligonucleotide
aaaaacaaguuaguguucu

SEQ ID NO: 35046 - RNA, 19 nt, Artificial Sequence
  Description of Artificial Sequence: Synthetic oligonucleotide
uaugguuuaaauuagcaua

SEQ ID NO: 35047 - RNA, 19 nt, Artificial Sequence
  Description of Artificial Sequence: Synthetic oligonucleotide
agcaaucaucgaacuugga

SEQ ID NO: 35048 - RNA, 19 nt, Artificial Sequence
  Description of Artificial Sequence: Synthetic oligonucleotide
auuucaaaugcaauagaca

SEQ ID NO: 35049 - RNA, 19 nt, Artificial Sequence
  Description of Artificial Sequence: Synthetic oligonucleotide
auugugaaagcuggcauuu

SEQ ID NO: 35050 - RNA, 19 nt, Artificial Sequence
  Description of Artificial Sequence: Synthetic oligonucleotide
ucagaaguauagcucuuuu

SEQ ID NO: 35051 - RNA, 19 nt, Artificial Sequence
  Description of Artificial Sequence: Synthetic oligonucleotide
uccuaccugaacucuuccc

SEQ ID NO: 35052 - RNA, 19 nt, Artificial Sequence
  Description of Artificial Sequence: Synthetic oligonucleotide
cuggagaaaagauguuggc

SEQ ID NO: 35053 - RNA, 19 nt, Artificial Sequence
  Description of Artificial Sequence: Synthetic oligonucleotide
cauugcugauuguuugguu

SEQ ID NO: 35054 - RNA, 19 nt, Artificial Sequence
  Description of Artificial Sequence: Synthetic oligonucleotide
uaagcaauguccagugcua

SEQ ID NO: 35055 - RNA, 19 nt, Artificial Sequence
  Description of Artificial Sequence: Synthetic oligonucleotide
aggauuauuugcagguuug

SEQ ID NO: 35056 - RNA, 19 nt, Artificial Sequence
  Description of Artificial Sequence: Synthetic oligonucleotide
gguuuuuucucauuugucu

SEQ ID NO: 35057 - RNA, 19 nt, Artificial Sequence
  Description of Artificial Sequence: Synthetic oligonucleotide
uguggcauuggagaauauu

SEQ ID NO: 35058 - RNA, 19 nt, Artificial Sequence
  Description of Artificial Sequence: Synthetic oligonucleotide
ucucgguuuaaacagacua

SEQ ID NO: 35059 - RNA, 19 nt, Artificial Sequence
  Description of Artificial Sequence: Synthetic oligonucleotide
aaugacuuccuuauugucc

SEQ ID NO: 35060 - RNA, 19 nt, Artificial Sequence
  Description of Artificial Sequence: Synthetic oligonucleotide
ccugauauuuugacuaucu

SEQ ID NO: 35061 - RNA, 19 nt, Artificial Sequence
  Description of Artificial Sequence: Synthetic oligonucleotide
uuacuauugagugcuucug

SEQ ID NO: 35062 - RNA, 19 nt, Artificial Sequence
  Description of Artificial Sequence: Synthetic oligonucleotide
ggaaauucuuuggaauaau

SEQ ID NO: 35063 - RNA, 19 nt, Artificial Sequence
  Description of Artificial Sequence: Synthetic oligonucleotide
uugaugacaucuauuuuca

SEQ ID NO: 35064 - RNA, 19 nt, Artificial Sequence
  Description of Artificial Sequence: Synthetic oligonucleotide
aucuggguuuagucucaau

SEQ ID NO: 35065 - RNA, 19 nt, Artificial Sequence
  Description of Artificial Sequence: Synthetic oligonucleotide
uuuugguuaucuuuguguu

SEQ ID NO: 35066 - RNA, 19 nt, Artificial Sequence
  Description of Artificial Sequence: Synthetic oligonucleotide
uccucaagcucuuuaaaga

SEQ ID NO: 35067 - RNA, 19 nt, Artificial Sequence
  Description of Artificial Sequence: Synthetic oligonucleotide
aaaaagauguaaucguugu

SEQ ID NO: 35068 - RNA, 19 nt, Artificial Sequence
  Description of Artificial Sequence: Synthetic oligonucleotide
uaaccuuugucucauuccu

SEQ ID NO: 35069 - RNA, 19 nt, Artificial Sequence
  Description of Artificial Sequence: Synthetic oligonucleotide
uuaaaugaugcuuccaaac

SEQ ID NO: 35070 - RNA, 19 nt, Artificial Sequence
  Description of Artificial Sequence: Synthetic oligonucleotide
caucuccuuagugucugca

SEQ ID NO: 35071 - RNA, 19 nt, Artificial Sequence
  Description of Artificial Sequence: Synthetic oligonucleotide
agguguuaguggugugcua

SEQ ID NO: 35072 - RNA, 19 nt, Artificial Sequence
  Description of Artificial Sequence: Synthetic oligonucleotide
aaaagcaaggaaagcgagu

SEQ ID NO: 35073 - RNA, 19 nt, Artificial Sequence
  Description of Artificial Sequence: Synthetic oligonucleotide
uuagucuuuucagugucuu

SEQ ID NO: 35074 - RNA, 19 nt, Artificial Sequence
  Description of Artificial Sequence: Synthetic oligonucleotide
uuugcaauucaauucuuuu

SEQ ID NO: 35075 - RNA, 19 nt, Artificial Sequence
  Description of Artificial Sequence: Synthetic oligonucleotide
ugucauguauaacugagac

SEQ ID NO: 35076 - RNA, 19 nt, Artificial Sequence
  Description of Artificial Sequence: Synthetic oligonucleotide
cacacaaacacagcaggag

SEQ ID NO: 35077 - RNA, 19 nt, Artificial Sequence
  Description of Artificial Sequence: Synthetic oligonucleotide
gaaaucuaaaccguugugc

SEQ ID NO: 35078 - RNA, 19 nt, Artificial Sequence
  Description of Artificial Sequence: Synthetic oligonucleotide
ccuugaccuuccucugcug

SEQ ID NO: 35079 - RNA, 19 nt, Artificial Sequence
  Description of Artificial Sequence: Synthetic oligonucleotide
ggucuuguuccaggguuau

SEQ ID NO: 35080 - RNA, 19 nt, Artificial Sequence
  Description of Artificial Sequence: Synthetic oligonucleotide
ugaauaugaaaaaauagag

SEQ ID NO: 35081 - RNA, 19 nt, Artificial Sequence
  Description of Artificial Sequence: Synthetic oligonucleotide
gaugagacuuuuuguguca

SEQ ID NO: 35082 - RNA, 19 nt, Artificial Sequence
  Description of Artificial Sequence: Synthetic oligonucleotide
aacucuguccacaagagug

SEQ ID NO: 35083 - RNA, 19 nt, Artificial Sequence
  Description of Artificial Sequence: Synthetic oligonucleotide
gaguuaucuaguaugauua

SEQ ID NO: 35084 - RNA, 19 nt, Artificial Sequence
  Description of Artificial Sequence: Synthetic oligonucleotide
aguauagcuuucuccagca

SEQ ID NO: 35085 - RNA, 19 nt, Artificial Sequence
  Description of Artificial Sequence: Synthetic oligonucleotide
auggcagcaggaaguaacu

SEQ ID NO: 35086 - RNA, 19 nt, Artificial Sequence
  Description of Artificial Sequence: Synthetic oligonucleotide
uacagggccucuuuuaugc

SEQ ID NO: 35087 - RNA, 19 nt, Artificial Sequence
  Description of Artificial Sequence: Synthetic oligonucleotide
ccugacauuucuucccuuc

SEQ ID NO: 35088 - RNA, 19 nt, Artificial Sequence
  Description of Artificial Sequence: Synthetic oligonucleotide
ccuuuuucccugccucccu

SEQ ID NO: 35089 - RNA, 19 nt, Artificial Sequence
  Description of Artificial Sequence: Synthetic oligonucleotide
uuuuucaucaauugcaaug

SEQ ID NO: 35090 - RNA, 19 nt, Artificial Sequence
  Description of Artificial Sequence: Synthetic oligonucleotide
gcucccacaacucuuuaca

SEQ ID NO: 35091 - RNA, 19 nt, Artificial Sequence
  Description of Artificial Sequence: Synthetic oligonucleotide
agacuugugaaaucuucaa

SEQ ID NO: 35092 - RNA, 19 nt, Artificial Sequence
  Description of Artificial Sequence: Synthetic oligonucleotide
agaacaccuuuacucuaua

SEQ ID NO: 35093 - RNA, 19 nt, Artificial Sequence
  Description of Artificial Sequence: Synthetic oligonucleotide
aacucaaaaauuaguugaa

SEQ ID NO: 35094 - RNA, 19 nt, Artificial Sequence
  Description of Artificial Sequence: Synthetic oligonucleotide
aaaauaauuacuucucaag

SEQ ID NO: 35095 - RNA, 19 nt, Artificial Sequence
  Description of Artificial Sequence: Synthetic oligonucleotide
ggauuauuagaaucuuagg

SEQ ID NO: 35096 - RNA, 19 nt, Artificial Sequence
  Description of Artificial Sequence: Synthetic oligonucleotide
guacuuauuuguaaagaug

SEQ ID NO: 35097 - RNA, 19 nt, Artificial Sequence
  Description of Artificial Sequence: Synthetic oligonucleotide
guuuagugacuuuuuuuuc

SEQ ID NO: 35098 - RNA, 19 nt, Artificial Sequence
  Description of Artificial Sequence: Synthetic oligonucleotide
caaguaucuuauuaaagga

SEQ ID NO: 35099 - RNA, 19 nt, Artificial Sequence
  Description of Artificial Sequence: Synthetic oligonucleotide
aggcauucuagaaaauaug

SEQ ID NO: 35100 - RNA, 19 nt, Artificial Sequence
  Description of Artificial Sequence: Synthetic oligonucleotide
gaauuaguuuccaaaugcc

SEQ ID NO: 35101 - RNA, 19 nt, Artificial Sequence
  Description of Artificial Sequence: Synthetic oligonucleotide
cuuaauuuuaaacuuuggc

SEQ ID NO: 35102 - RNA, 19 nt, Artificial Sequence
  Description of Artificial Sequence: Synthetic oligonucleotide
ccugaacaguuuuuucuuu

SEQ ID NO: 35103 - RNA, 19 nt, Artificial Sequence
  Description of Artificial Sequence: Synthetic oligonucleotide
uuucuuaauggaagaagau

SEQ ID NO: 35104 - RNA, 19 nt, Artificial Sequence
  Description of Artificial Sequence: Synthetic oligonucleotide
uauuuaauaucuuaaaaau

SEQ ID NO: 35105 - RNA, 19 nt, Artificial Sequence
  Description of Artificial Sequence: Synthetic oligonucleotide
uauuccaaguuaggaagaa

SEQ ID NO: 35106 - RNA, 19 nt, Artificial Sequence
  Description of Artificial Sequence: Synthetic oligonucleotide
acacuacuugccuuaucca

SEQ ID NO: 35107 - RNA, 19 nt, Artificial Sequence
  Description of Artificial Sequence: Synthetic oligonucleotide
auuucccauuuaaaggacu

SEQ ID NO: 35108 - RNA, 19 nt, Artificial Sequence
  Description of Artificial Sequence: Synthetic oligonucleotide
uuuuaaacuuugacacauc

SEQ ID NO: 35109 - RNA, 19 nt, Artificial Sequence
  Description of Artificial Sequence: Synthetic oligonucleotide
ccuucagauuuccugaaaa

SEQ ID NO: 35110 - RNA, 19 nt, Artificial Sequence
  Description of Artificial Sequence: Synthetic oligonucleotide
auaauugaaauaucuuacu

SEQ ID NO: 35111 - RNA, 19 nt, Artificial Sequence
  Description of Artificial Sequence: Synthetic oligonucleotide
uuuaaaaauauuuucaucu

SEQ ID NO: 35112 - RNA, 19 nt, Artificial Sequence
  Description of Artificial Sequence: Synthetic oligonucleotide
ucugaaauaucucguuauu

SEQ ID NO: 35113 - RNA, 19 nt, Artificial Sequence
  Description of Artificial Sequence: Synthetic oligonucleotide
uuauuggagguauuguuua

SEQ ID NO: 35114 - RNA, 19 nt, Artificial Sequence
  Description of Artificial Sequence: Synthetic oligonucleotide
aaccuuagagagaccauua

SEQ ID NO: 35115 - RNA, 19 nt, Artificial Sequence
  Description of Artificial Sequence: Synthetic oligonucleotide
aaauuauuuauaaaauauu

SEQ ID NO: 35116 - RNA, 19 nt, Artificial Sequence
  Description of Artificial Sequence: Synthetic oligonucleotide
uuuguaauuaccuguagcu

SEQ ID NO: 35117 - RNA, 19 nt, Artificial Sequence
  Description of Artificial Sequence: Synthetic oligonucleotide
uaauacauuacauagaaaa

SEQ ID NO: 35118 - RNA, 19 nt, Artificial Sequence
  Description of Artificial Sequence: Synthetic oligonucleotide
aaaacuauguuaacagugu

SEQ ID NO: 35119 - RNA, 19 nt, Artificial Sequence
  Description of Artificial Sequence: Synthetic oligonucleotide
ucucuguuuaaguauaauc

SEQ ID NO: 35120 - RNA, 19 nt, Artificial Sequence
  Description of Artificial Sequence: Synthetic oligonucleotide
cagauauaaauauauacuu

SEQ ID NO: 35121 - RNA, 19 nt, Artificial Sequence
  Description of Artificial Sequence: Synthetic oligonucleotide
uaauuuuuuaauuuuaaaa

SEQ ID NO: 35122 - RNA, 19 nt, Artificial Sequence
  Description of Artificial Sequence: Synthetic oligonucleotide
aauagauaccuguuugacu

SEQ ID NO: 35123 - RNA, 19 nt, Artificial Sequence
  Description of Artificial Sequence: Synthetic oligonucleotide
uuugagguaguccagaccu

SEQ ID NO: 35124 - RNA, 19 nt, Artificial Sequence
  Description of Artificial Sequence: Synthetic oligonucleotide
uuuuaaugugugcaaaagc

SEQ ID NO: 35125 - RNA, 19 nt, Artificial Sequence
  Description of Artificial Sequence: Synthetic oligonucleotide
cccaaagguuccuaagccu

SEQ ID NO: 35126 - RNA, 19 nt, Artificial Sequence
  Description of Artificial Sequence: Synthetic oligonucleotide
uggcugcaaagaagaauca

SEQ ID NO: 35127 - RNA, 19 nt, Artificial Sequence
  Description of Artificial Sequence: Synthetic oligonucleotide
aacagggacacuuuuuaaa

SEQ ID NO: 35128 - RNA, 19 nt, Artificial Sequence
  Description of Artificial Sequence: Synthetic oligonucleotide
aaacacucuuaucagccug

SEQ ID NO: 35129 - RNA, 19 nt, Artificial Sequence
  Description of Artificial Sequence: Synthetic oligonucleotide
gggcaacacagugagacuc

SEQ ID NO: 35130 - RNA, 19 nt, Artificial Sequence
  Description of Artificial Sequence: Synthetic oligonucleotide
auuagcuggguauaguggu

SEQ ID NO: 35131 - RNA, 19 nt, Artificial Sequence
  Description of Artificial Sequence: Synthetic oligonucleotide
uaugugccuguagucccag

SEQ ID NO: 35132 - RNA, 19 nt, Artificial Sequence
  Description of Artificial Sequence: Synthetic oligonucleotide
gguacucaggaggcugagg

SEQ ID NO: 35133 - RNA, 19 nt, Artificial Sequence
  Description of Artificial Sequence: Synthetic oligonucleotide
gcaggaggauugccugagc

SEQ ID NO: 35134 - RNA, 19 nt, Artificial Sequence
  Description of Artificial Sequence: Synthetic oligonucleotide
cccaggagguggaaacugc

SEQ ID NO: 35135 - RNA, 19 nt, Artificial Sequence
  Description of Artificial Sequence: Synthetic oligonucleotide
cagagagucaugaucaugu

SEQ ID NO: 35136 - RNA, 19 nt, Artificial Sequence
  Description of Artificial Sequence: Synthetic oligonucleotide
uccuuacacuccagccugg

SEQ ID NO: 35137 - RNA, 19 nt, Artificial Sequence
  Description of Artificial Sequence: Synthetic oligonucleotide
gauaacagagcgagacccu

SEQ ID NO: 35138 - RNA, 19 nt, Artificial Sequence
  Description of Artificial Sequence: Synthetic oligonucleotide
ugucucaaaaaaauaaaau

SEQ ID NO: 35139 - RNA, 19 nt, Artificial Sequence
  Description of Artificial Sequence: Synthetic oligonucleotide
aaaauaaaaaauaaaaaca

SEQ ID NO: 35140 - RNA, 25 nt, Artificial Sequence
  Description of Artificial Sequence: Synthetic oligonucleotide
gcacuuccuucucggcuagauuauc

SEQ ID NO: 35141 - RNA, 25 nt, Artificial Sequence
  Description of Artificial Sequence: Synthetic oligonucleotide
cugaaacuguugucgguucuugaga

SEQ ID NO: 35142 - RNA, 25 nt, Artificial Sequence
  Description of Artificial Sequence: Synthetic oligonucleotide
augauacuaccaccgaaugucugug

SEQ ID NO: 35143 - RNA, 25 nt, Artificial Sequence
  Description of Artificial Sequence: Synthetic oligonucleotide
guuucauugucuaguccaaccugua

SEQ ID NO: 35144 - RNA, 25 nt, Artificial Sequence
  Description of Artificial Sequence: Synthetic oligonucleotide
auuguggauaucuacaacguuccgg

SEQ ID NO: 35145 - RNA, 25 nt, Artificial Sequence
  Description of Artificial Sequence: Synthetic oligonucleotide
gcaauaguuuugcaggugcaucaca

SEQ ID NO: 35146 - RNA, 25 nt, Artificial Sequence
  Description of Artificial Sequence: Synthetic oligonucleotide
auuuuuguuuuuguuuugggaggaa

SEQ ID NO: 35147 - RNA, 25 nt, Artificial Sequence
  Description of Artificial Sequence: Synthetic oligonucleotide
aaagggagggcacggcagccaggcu

SEQ ID NO: 35148 - RNA, 25 nt, Artificial Sequence
  Description of Artificial Sequence: Synthetic oligonucleotide
uucauauuccuacaagugcaugcuu

SEQ ID NO: 35149 - RNA, 25 nt, Artificial Sequence
  Description of Artificial Sequence: Synthetic oligonucleotide
ucaagauuacuguacuuacaguguu

SEQ ID NO: 35150 - RNA, 25 nt, Artificial Sequence
  Description of Artificial Sequence: Synthetic oligonucleotide
uuccaacaucuucucauaaaagggg

SEQ ID NO: 35151 - RNA, 25 nt, Artificial Sequence
  Description of Artificial Sequence: Synthetic oligonucleotide
gaaagcuucauagccucaaccauga

SEQ ID NO: 35152 - RNA, 25 nt, Artificial Sequence
  Description of Artificial Sequence: Synthetic oligonucleotide
aaggaaaccagucgcauagggcaug

SEQ ID NO: 35153 - RNA, 25 nt, Artificial Sequence
  Description of Artificial Sequence: Synthetic oligonucleotide
ggagcuggagaacuauaaacagccc

SEQ ID NO: 35154 - RNA, 25 nt, Artificial Sequence
  Description of Artificial Sequence: Synthetic oligonucleotide
cguggugcugagagaggacaacugc

SEQ ID NO: 35155 - RNA, 25 nt, Artificial Sequence
  Description of Artificial Sequence: Synthetic oligonucleotide
ccgaaggcgccggaggaugaagccg

SEQ ID NO: 35156 - RNA, 25 nt, Artificial Sequence
  Description of Artificial Sequence: Synthetic oligonucleotide
gcgcagugcugcggccagccugucc

SEQ ID NO: 35157 - RNA, 25 nt, Artificial Sequence
  Description of Artificial Sequence: Synthetic oligonucleotide
cuccauggagcucauccccaucgag

SEQ ID NO: 35158 - RNA, 25 nt, Artificial Sequence
  Description of Artificial Sequence: Synthetic oligonucleotide
guucgugcugcccaccagccagcgc

SEQ ID NO: 35159 - RNA, 25 nt, Artificial Sequence
  Description of Artificial Sequence: Synthetic oligonucleotide
caaaugcaagagccccgaaacggcg

SEQ ID NO: 35160 - RNA, 25 nt, Artificial Sequence
  Description of Artificial Sequence: Synthetic oligonucleotide
gcugcugcacguggccggccacggc

SEQ ID NO: 35161 - RNA, 25 nt, Artificial Sequence
  Description of Artificial Sequence: Synthetic oligonucleotide
caacguggagcagaugaaggcccag

SEQ ID NO: 35162 - RNA, 25 nt, Artificial Sequence
  Description of Artificial Sequence: Synthetic oligonucleotide
gguguggcugcgagcgcuggagacc

SEQ ID NO: 35163 - RNA, 25 nt, Artificial Sequence
  Description of Artificial Sequence: Synthetic oligonucleotide
cagcguggcggcggacuucuaccac

SEQ ID NO: 35164 - RNA, 25 nt, Artificial Sequence
  Description of Artificial Sequence: Synthetic oligonucleotide
ccggcugggaccgcaucacuuccuc

SEQ ID NO: 35165 - RNA, 25 nt, Artificial Sequence
  Description of Artificial Sequence: Synthetic oligonucleotide
ccugcucuaucagaagaaggggcag

SEQ ID NO: 35166 - RNA, 25 nt, Artificial Sequence
  Description of Artificial Sequence: Synthetic oligonucleotide
gugguacgagaucuacgacaaguac

SEQ ID NO: 35167 - RNA, 25 nt, Artificial Sequence
  Description of Artificial Sequence: Synthetic oligonucleotide
ccagguggugcagacucuggacugc

SEQ ID NO: 35168 - RNA, 25 nt, Artificial Sequence
  Description of Artificial Sequence: Synthetic oligonucleotide
ccugcgcuacuggaaggccacgcac

SEQ ID NO: 35169 - RNA, 25 nt, Artificial Sequence
  Description of Artificial Sequence: Synthetic oligonucleotide
ccggagcccgggccagauccaccug

SEQ ID NO: 35170 - RNA, 25 nt, Artificial Sequence
  Description of Artificial Sequence: Synthetic oligonucleotide
ggugcagcggcacccgcccuccgag

SEQ ID NO: 35171 - RNA, 25 nt, Artificial Sequence
  Description of Artificial Sequence: Synthetic oligonucleotide
ggagucccaagccuuccagcggcag

SEQ ID NO: 35172 - RNA, 25 nt, Artificial Sequence
  Description of Artificial Sequence: Synthetic oligonucleotide
gcucacggcgcugauuggcuaugac

SEQ ID NO: 35173 - RNA, 25 nt, Artificial Sequence
  Description of Artificial Sequence: Synthetic oligonucleotide
cgucacugacgucagcaacgugcac

SEQ ID NO: 35174 - RNA, 25 nt, Artificial Sequence
  Description of Artificial Sequence: Synthetic oligonucleotide
cgacgaugagcuggaguucacgcgc

SEQ ID NO: 35175 - RNA, 25 nt, Artificial Sequence
  Description of Artificial Sequence: Synthetic oligonucleotide
ccguggcuuggugaccccgcgcaug

SEQ ID NO: 35176 - RNA, 25 nt, Artificial Sequence
  Description of Artificial Sequence: Synthetic oligonucleotide
ggcggagguggccagccgcgacccc

SEQ ID NO: 35177 - RNA, 25 nt, Artificial Sequence
  Description of Artificial Sequence: Synthetic oligonucleotide
caagcucuacgccaugcacccgugg

SEQ ID NO: 35178 - RNA, 25 nt, Artificial Sequence
  Description of Artificial Sequence: Synthetic oligonucleotide
ggugacguccaagccccucccggag

SEQ ID NO: 35179 - RNA, 25 nt, Artificial Sequence
  Description of Artificial Sequence: Synthetic oligonucleotide
guaccuguggaagaagauugccaac

SEQ ID NO: 35180 - RNA, 25 nt, Artificial Sequence
  Description of Artificial Sequence: Synthetic oligonucleotide
caacugcaucuucaucgucauucac

SEQ ID NO: 35181 - RNA, 25 nt, Artificial Sequence
  Description of Artificial Sequence: Synthetic oligonucleotide
ccgcagcaccaccagccagaccauu

SEQ ID NO: 35182 - RNA, 25 nt, Artificial Sequence
  Description of Artificial Sequence: Synthetic oligonucleotide
uaaggucucacccgacgacaccccc

SEQ ID NO: 35183 - RNA, 25 nt, Artificial Sequence
  Description of Artificial Sequence: Synthetic oligonucleotide
cggcgccauccugcagagcuucuuc

SEQ ID NO: 35184 - RNA, 25 nt, Artificial Sequence
  Description of Artificial Sequence: Synthetic oligonucleotide
caccaagauggccaagaagaaaucu

SEQ ID NO: 35185 - RNA, 25 nt, Artificial Sequence
  Description of Artificial Sequence: Synthetic oligonucleotide
ucugauggauauucccgaaagccaa

SEQ ID NO: 35186 - RNA, 25 nt, Artificial Sequence
  Description of Artificial Sequence: Synthetic oligonucleotide
aagcgaacaggauuuugugcugcgc

SEQ ID NO: 35187 - RNA, 25 nt, Artificial Sequence
  Description of Artificial Sequence: Synthetic oligonucleotide
cgucuguggccgggaugaguaccug

SEQ ID NO: 35188 - RNA, 25 nt, Artificial Sequence
  Description of Artificial Sequence: Synthetic oligonucleotide
ggugggcgaaacgcccaucaaaaac

SEQ ID NO: 35189 - RNA, 25 nt, Artificial Sequence
  Description of Artificial Sequence: Synthetic oligonucleotide
cuuccagugggugaggcacugccuc

SEQ ID NO: 35190 - RNA, 25 nt, Artificial Sequence
  Description of Artificial Sequence: Synthetic oligonucleotide
caagaacggagaagagauucacgug

SEQ ID NO: 35191 - RNA, 25 nt, Artificial Sequence
  Description of Artificial Sequence: Synthetic oligonucleotide
gguacuggacacgccuccagacccg

SEQ ID NO: 35192 - RNA, 25 nt, Artificial Sequence
  Description of Artificial Sequence: Synthetic oligonucleotide
ggcccuagacgaggugaggaaggaa

SEQ ID NO: 35193 - RNA, 25 nt, Artificial Sequence
  Description of Artificial Sequence: Synthetic oligonucleotide
agaguggccgcugguggaugacugc

SEQ ID NO: 35194 - RNA, 25 nt, Artificial Sequence
  Description of Artificial Sequence: Synthetic oligonucleotide
cacgggagucaccggcuaccaugag

SEQ ID NO: 35195 - RNA, 25 nt, Artificial Sequence
  Description of Artificial Sequence: Synthetic oligonucleotide
gcagcuuaccauccacggcaaggac

SEQ ID NO: 35196 - RNA, 25 nt, Artificial Sequence
  Description of Artificial Sequence: Synthetic oligonucleotide
ccacgagaguguguucaccgugucc

SEQ ID NO: 35197 - RNA, 25 nt, Artificial Sequence
  Description of Artificial Sequence: Synthetic oligonucleotide
ccugugggacugcgaccgcaaguuc

SEQ ID NO: 35198 - RNA, 25 nt, Artificial Sequence
  Description of Artificial Sequence: Synthetic oligonucleotide
cagggucaagaucagaggcauugau

SEQ ID NO: 35199 - RNA, 25 nt, Artificial Sequence
  Description of Artificial Sequence: Synthetic oligonucleotide
uauccccguccugccucggaacacc

SEQ ID NO: 35200 - RNA, 25 nt, Artificial Sequence
  Description of Artificial Sequence: Synthetic oligonucleotide
cgaccucacaguuuuuguagaggca

SEQ ID NO: 35201 - RNA, 25 nt, Artificial Sequence
  Description of Artificial Sequence: Synthetic oligonucleotide
aaacauccagcaugggcaacaaguc

SEQ ID NO: 35202 - RNA, 25 nt, Artificial Sequence
  Description of Artificial Sequence: Synthetic oligonucleotide
ccuuugccaaaggagaaccagcccc

SEQ ID NO: 35203 - RNA, 25 nt, Artificial Sequence
  Description of Artificial Sequence: Synthetic oligonucleotide
caaacccuucacagaggaggugcug

SEQ ID NO: 35204 - RNA, 25 nt, Artificial Sequence
  Description of Artificial Sequence: Synthetic oligonucleotide
guggaauguguggcuugaguucagu

SEQ ID NO: 35205 - RNA, 25 nt, Artificial Sequence
  Description of Artificial Sequence: Synthetic oligonucleotide
uaucaaaaucaaagacuugcccaaa

SEQ ID NO: 35206 - RNA, 25 nt, Artificial Sequence
  Description of Artificial Sequence: Synthetic oligonucleotide
aggggcucuacugaaccuccagauc

SEQ ID NO: 35207 - RNA, 25 nt, Artificial Sequence
  Description of Artificial Sequence: Synthetic oligonucleotide
cuacugcgguaaagcuccagcacug

SEQ ID NO: 35208 - RNA, 25 nt, Artificial Sequence
  Description of Artificial Sequence: Synthetic oligonucleotide
guccagcaaggccucugcagagucc

SEQ ID NO: 35209 - RNA, 25 nt, Artificial Sequence
  Description of Artificial Sequence: Synthetic oligonucleotide
ccccaguucugaguccaagggcaaa

SEQ ID NO: 35210 - RNA, 25 nt, Artificial Sequence
  Description of Artificial Sequence: Synthetic oligonucleotide
aguucagcuucucuauuaugugaac

SEQ ID NO: 35211 - RNA, 25 nt, Artificial Sequence
  Description of Artificial Sequence: Synthetic oligonucleotide
ccugcugcugauagaccaccguuuc

SEQ ID NO: 35212 - RNA, 25 nt, Artificial Sequence
  Description of Artificial Sequence: Synthetic oligonucleotide
ccuccugcgccguggagaauacguc

SEQ ID NO: 35213 - RNA, 25 nt, Artificial Sequence
  Description of Artificial Sequence: Synthetic oligonucleotide
ccuccacauguggcagauaucuggg

SEQ ID NO: 35214 - RNA, 25 nt, Artificial Sequence
  Description of Artificial Sequence: Synthetic oligonucleotide
gaagggagaagaccaaggaagcuuc

SEQ ID NO: 35215 - RNA, 25 nt, Artificial Sequence
  Description of Artificial Sequence: Synthetic oligonucleotide
caaugcugacaaacucacgucugca

SEQ ID NO: 35216 - RNA, 25 nt, Artificial Sequence
  Description of Artificial Sequence: Synthetic oligonucleotide
aacuaacccagacaaggagaacuca

SEQ ID NO: 35217 - RNA, 25 nt, Artificial Sequence
  Description of Artificial Sequence: Synthetic oligonucleotide
aauguccaucuccauucuucuggac

SEQ ID NO: 35218 - RNA, 25 nt, Artificial Sequence
  Description of Artificial Sequence: Synthetic oligonucleotide
caauuacugccacccgauagcccug

SEQ ID NO: 35219 - RNA, 25 nt, Artificial Sequence
  Description of Artificial Sequence: Synthetic oligonucleotide
gccuaagcaucagcccaccccugac

SEQ ID NO: 35220 - RNA, 25 nt, Artificial Sequence
  Description of Artificial Sequence: Synthetic oligonucleotide
cccggaaggggaccggguucgagca

SEQ ID NO: 35221 - RNA, 25 nt, Artificial Sequence
  Description of Artificial Sequence: Synthetic oligonucleotide
agaaaugcccaaccagcuucgcaag

SEQ ID NO: 35222 - RNA, 25 nt, Artificial Sequence
  Description of Artificial Sequence: Synthetic oligonucleotide
gcaauuggaggcgaucauagccacu

SEQ ID NO: 35223 - RNA, 25 nt, Artificial Sequence
  Description of Artificial Sequence: Synthetic oligonucleotide
ugauccacuuaacccucucacagca

SEQ ID NO: 35224 - RNA, 25 nt, Artificial Sequence
  Description of Artificial Sequence: Synthetic oligonucleotide
agaggacaaagaauugcucuggcau

SEQ ID NO: 35225 - RNA, 25 nt, Artificial Sequence
  Description of Artificial Sequence: Synthetic oligonucleotide
uuuuagauacgaaagccuuaagcac

SEQ ID NO: 35226 - RNA, 25 nt, Artificial Sequence
  Description of Artificial Sequence: Synthetic oligonucleotide
cccaaaagcauauccuaagcuauuu

SEQ ID NO: 35227 - RNA, 25 nt, Artificial Sequence
  Description of Artificial Sequence: Synthetic oligonucleotide
uaguucagugaaauggggacagcaa

SEQ ID NO: 35228 - RNA, 25 nt, Artificial Sequence
  Description of Artificial Sequence: Synthetic oligonucleotide
agaaauuguggccaaaacauaccaa

SEQ ID NO: 35229 - RNA, 25 nt, Artificial Sequence
  Description of Artificial Sequence: Synthetic oligonucleotide
auuguuggccagaagggaagucugg

SEQ ID NO: 35230 - RNA, 25 nt, Artificial Sequence
  Description of Artificial Sequence: Synthetic oligonucleotide
ggaucaaagugcuuuggauguuggg

SEQ ID NO: 35231 - RNA, 25 nt, Artificial Sequence
  Description of Artificial Sequence: Synthetic oligonucleotide
guuaacaaugcagcuccuggacugc

SEQ ID NO: 35232 - RNA, 25 nt, Artificial Sequence
  Description of Artificial Sequence: Synthetic oligonucleotide
caacuucucagaugaaaauguaaga

SEQ ID NO: 35233 - RNA, 25 nt, Artificial Sequence
  Description of Artificial Sequence: Synthetic oligonucleotide
agccauugcaguucagaaacuggag

SEQ ID NO: 35234 - RNA, 25 nt, Artificial Sequence
  Description of Artificial Sequence: Synthetic oligonucleotide
gagcuuggaggacgaugauguucug

SEQ ID NO: 35235 - RNA, 25 nt, Artificial Sequence
  Description of Artificial Sequence: Synthetic oligonucleotide
gcauuaccuucuacaauugguccag

SEQ ID NO: 35236 - RNA, 25 nt, Artificial Sequence
  Description of Artificial Sequence: Synthetic oligonucleotide
ggcugugaaauuugaaccauaccau

SEQ ID NO: 35237 - RNA, 25 nt, Artificial Sequence
  Description of Artificial Sequence: Synthetic oligonucleotide
ugauagcgcccuugccagauuucug

SEQ ID NO: 35238 - RNA, 25 nt, Artificial Sequence
  Description of Artificial Sequence: Synthetic oligonucleotide
gcugaagcgugguuuaagaaacaaa

SEQ ID NO: 35239 - RNA, 25 nt, Artificial Sequence
  Description of Artificial Sequence: Synthetic oligonucleotide
aagaauuggucacuuuuuguuuugg

SEQ ID NO: 35240 - RNA, 25 nt, Artificial Sequence
  Description of Artificial Sequence: Synthetic oligonucleotide
guucuugagaagugagauagcccag

SEQ ID NO: 35241 - RNA, 25 nt, Artificial Sequence
  Description of Artificial Sequence: Synthetic oligonucleotide
guccagacacuaucagcagagguuc

SEQ ID NO: 35242 - RNA, 25 nt, Artificial Sequence
  Description of Artificial Sequence: Synthetic oligonucleotide
cgcugugauucuggaagccuaucug

SEQ ID NO: 35243 - RNA, 25 nt, Artificial Sequence
  Description of Artificial Sequence: Synthetic oligonucleotide
gaggggcuguggcacagccaugcug

SEQ ID NO: 35244 - RNA, 25 nt, Artificial Sequence
  Description of Artificial Sequence: Synthetic oligonucleotide
gcacgacuuuacccaacaaguccaa

SEQ ID NO: 35245 - RNA, 25 nt, Artificial Sequence
  Description of Artificial Sequence: Synthetic oligonucleotide
aguaaucgagauguuacaaaaaguc

SEQ ID NO: 35246 - RNA, 25 nt, Artificial Sequence
  Description of Artificial Sequence: Synthetic oligonucleotide
cacccuugauauuaaaucgcucucu

SEQ ID NO: 35247 - RNA, 25 nt, Artificial Sequence
  Description of Artificial Sequence: Synthetic oligonucleotide
ugcugaaaaguaugacgucaguucc

SEQ ID NO: 35248 - RNA, 25 nt, Artificial Sequence
  Description of Artificial Sequence: Synthetic oligonucleotide
ccaaguuauuucacaacuuaaacaa

SEQ ID NO: 35249 - RNA, 25 nt, Artificial Sequence
  Description of Artificial Sequence: Synthetic oligonucleotide
aaagcuugaaaaccugcagaauucu

SEQ ID NO: 35250 - RNA, 25 nt, Artificial Sequence
  Description of Artificial Sequence: Synthetic oligonucleotide
ucaacuccccgaaagcuuuagaguu

SEQ ID NO: 35251 - RNA, 25 nt, Artificial Sequence
  Description of Artificial Sequence: Synthetic oligonucleotide
uccauaugauccuggacugaaagca

SEQ ID NO: 35252 - RNA, 25 nt, Artificial Sequence
  Description of Artificial Sequence: Synthetic oligonucleotide
aggagcgcuggcaauugaaaaaugu

SEQ ID NO: 35253 - RNA, 25 nt, Artificial Sequence
  Description of Artificial Sequence: Synthetic oligonucleotide
uaaaguaauggccuccaagaaaaaa

SEQ ID NO: 35254 - RNA, 25 nt, Artificial Sequence
  Description of Artificial Sequence: Synthetic oligonucleotide
accacuauggcuugaguuuaaaugu

SEQ ID NO: 35255 - RNA, 25 nt, Artificial Sequence
  Description of Artificial Sequence: Synthetic oligonucleotide
ugccgauccuacagcccuaucaaau

SEQ ID NO: 35256 - RNA, 25 nt, Artificial Sequence
  Description of Artificial Sequence: Synthetic oligonucleotide
ugaaacaauuggaauuaucuuuaaa

SEQ ID NO: 35257 - RNA, 25 nt, Artificial Sequence
  Description of Artificial Sequence: Synthetic oligonucleotide
acauggugaugaucugcgccaagac

SEQ ID NO: 35258 - RNA, 25 nt, Artificial Sequence
  Description of Artificial Sequence: Synthetic oligonucleotide
caugcuuauuuuacagauucuacga

SEQ ID NO: 35259 - RNA, 25 nt, Artificial Sequence
  Description of Artificial Sequence: Synthetic oligonucleotide
aaucauggagucuauuugggagacu

SEQ ID NO: 35260 - RNA, 25 nt, Artificial Sequence
  Description of Artificial Sequence: Synthetic oligonucleotide
ugaaucuuuggaucuaugccuccug

SEQ ID NO: 35261 - RNA, 25 nt, Artificial Sequence
  Description of Artificial Sequence: Synthetic oligonucleotide
gccauaugguugcauuucaacuggu

SEQ ID NO: 35262 - RNA, 25 nt, Artificial Sequence
  Description of Artificial Sequence: Synthetic oligonucleotide
ugacaaaauaggaaugaucgagauu

SEQ ID NO: 35263 - RNA, 25 nt, Artificial Sequence
  Description of Artificial Sequence: Synthetic oligonucleotide
ugugaaagacgccacgacaauugcc

SEQ ID NO: 35264 - RNA, 25 nt, Artificial Sequence
  Description of Artificial Sequence: Synthetic oligonucleotide
caaaauucagcaaagcacagugggc

SEQ ID NO: 35265 - RNA, 25 nt, Artificial Sequence
  Description of Artificial Sequence: Synthetic oligonucleotide
caacacgggagcauuuaaagaugaa

SEQ ID NO: 35266 - RNA, 25 nt, Artificial Sequence
  Description of Artificial Sequence: Synthetic oligonucleotide
aguccugaaucacuggcucaaagaa

SEQ ID NO: 35267 - RNA, 25 nt, Artificial Sequence
  Description of Artificial Sequence: Synthetic oligonucleotide
aaaauccccuacugaagaaaaguuu

SEQ ID NO: 35268 - RNA, 25 nt, Artificial Sequence
  Description of Artificial Sequence: Synthetic oligonucleotide
ucaggcagcaguggagagauuuguu

SEQ ID NO: 35269 - RNA, 25 nt, Artificial Sequence
  Description of Artificial Sequence: Synthetic oligonucleotide
uuauuccugugcaggcuacugugug

SEQ ID NO: 35270 - RNA, 25 nt, Artificial Sequence
  Description of Artificial Sequence: Synthetic oligonucleotide
ggcaaccuuuguucuuggaauaggc

SEQ ID NO: 35271 - RNA, 25 nt, Artificial Sequence
  Description of Artificial Sequence: Synthetic oligonucleotide
cgacagacacaaugacaauauuaug

SEQ ID NO: 35272 - RNA, 25 nt, Artificial Sequence
  Description of Artificial Sequence: Synthetic oligonucleotide
gaucaccgagacaggaaaccuauuu

SEQ ID NO: 35273 - RNA, 25 nt, Artificial Sequence
  Description of Artificial Sequence: Synthetic oligonucleotide
ucauauugacuucgggcacauucuu

SEQ ID NO: 35274 - RNA, 25 nt, Artificial Sequence
  Description of Artificial Sequence: Synthetic oligonucleotide
ugggaauuacaaaaguuuccugggc

SEQ ID NO: 35275 - RNA, 25 nt, Artificial Sequence
  Description of Artificial Sequence: Synthetic oligonucleotide
cauuaauaaagagagagugccauuu

SEQ ID NO: 35276 - RNA, 25 nt, Artificial Sequence
  Description of Artificial Sequence: Synthetic oligonucleotide
ugugcuaaccccugacuuccucuuu

SEQ ID NO: 35277 - RNA, 25 nt, Artificial Sequence
  Description of Artificial Sequence: Synthetic oligonucleotide
ugugaugggaacuucuggaaagaag

SEQ ID NO: 35278 - RNA, 25 nt, Artificial Sequence
  Description of Artificial Sequence: Synthetic oligonucleotide
gacaagcccacacuuccagaaauuu

SEQ ID NO: 35279 - RNA, 25 nt, Artificial Sequence
  Description of Artificial Sequence: Synthetic oligonucleotide
ucaggacaucuguguuaaggcuuau

SEQ ID NO: 35280 - RNA, 25 nt, Artificial Sequence
  Description of Artificial Sequence: Synthetic oligonucleotide
ucuagcccuucgucaucacacaaac

SEQ ID NO: 35281 - RNA, 25 nt, Artificial Sequence
  Description of Artificial Sequence: Synthetic oligonucleotide
ccuacugaucauccuguucuccaug

SEQ ID NO: 35282 - RNA, 25 nt, Artificial Sequence
  Description of Artificial Sequence: Synthetic oligonucleotide
gaugcugaugacaggaaugccccag

SEQ ID NO: 35283 - RNA, 25 nt, Artificial Sequence
  Description of Artificial Sequence: Synthetic oligonucleotide
guuaacaagcaaagaagacauugaa

SEQ ID NO: 35284 - RNA, 25 nt, Artificial Sequence
  Description of Artificial Sequence: Synthetic oligonucleotide
auauauccgggaugcccucacagug

SEQ ID NO: 35285 - RNA, 25 nt, Artificial Sequence
  Description of Artificial Sequence: Synthetic oligonucleotide
ggggaaaaaugaggaggaugcuaaa

SEQ ID NO: 35286 - RNA, 25 nt, Artificial Sequence
  Description of Artificial Sequence: Synthetic oligonucleotide
aaaguauuuucuugaucagaucgaa

SEQ ID NO: 35287 - RNA, 25 nt, Artificial Sequence
  Description of Artificial Sequence: Synthetic oligonucleotide
aguuugcagagacaaaggauggacu

SEQ ID NO: 35288 - RNA, 25 nt, Artificial Sequence
  Description of Artificial Sequence: Synthetic oligonucleotide
ugugcaguuuaauugguuucuacau

SEQ ID NO: 35289 - RNA, 25 nt, Artificial Sequence
  Description of Artificial Sequence: Synthetic oligonucleotide
ucuuguucuuggcaucaaacaagga

SEQ ID NO: 35290 - RNA, 25 nt, Artificial Sequence
  Description of Artificial Sequence: Synthetic oligonucleotide
agagaaacauucagccuaauacuuu

SEQ ID NO: 35291 - RNA, 25 nt, Artificial Sequence
  Description of Artificial Sequence: Synthetic oligonucleotide
uaggcuagaaucaaaaacaaguuag

SEQ ID NO: 35292 - RNA, 25 nt, Artificial Sequence
  Description of Artificial Sequence: Synthetic oligonucleotide
guguucuaugguuuaaauuagcaua

SEQ ID NO: 35293 - RNA, 25 nt, Artificial Sequence
  Description of Artificial Sequence: Synthetic oligonucleotide
agcaaucaucgaacuuggauuucaa

SEQ ID NO: 35294 - RNA, 25 nt, Artificial Sequence
  Description of Artificial Sequence: Synthetic oligonucleotide
aaugcaauagacauugugaaagcug

SEQ ID NO: 35295 - RNA, 25 nt, Artificial Sequence
  Description of Artificial Sequence: Synthetic oligonucleotide
ggcauuucagaaguauagcucuuuu

SEQ ID NO: 35296 - RNA, 25 nt, Artificial Sequence
  Description of Artificial Sequence: Synthetic oligonucleotide
uccuaccugaacucuucccuggaga

SEQ ID NO: 35297 - RNA, 25 nt, Artificial Sequence
  Description of Artificial Sequence: Synthetic oligonucleotide
aaaagauguuggcauugcugauugu

SEQ ID NO: 35298 - RNA, 25 nt, Artificial Sequence
  Description of Artificial Sequence: Synthetic oligonucleotide
uuugguuaagcaauguccagugcua

SEQ ID NO: 35299 - RNA, 25 nt, Artificial Sequence
  Description of Artificial Sequence: Synthetic oligonucleotide
aggauuauuugcagguuugguuuuu

SEQ ID NO: 35300 - RNA, 25 nt, Artificial Sequence
  Description of Artificial Sequence: Synthetic oligonucleotide
uucucauuugucuguggcauuggag

SEQ ID NO: 35301 - RNA, 25 nt, Artificial Sequence
  Description of Artificial Sequence: Synthetic oligonucleotide
gaauauucucgguuuaaacagacua

SEQ ID NO: 35302 - RNA, 25 nt, Artificial Sequence
  Description of Artificial Sequence: Synthetic oligonucleotide
aaugacuuccuuauugucccugaua

SEQ ID NO: 35303 - RNA, 25 nt, Artificial Sequence
  Description of Artificial Sequence: Synthetic oligonucleotide
auuuugacuaucuuacuauugagug

SEQ ID NO: 35304 - RNA, 25 nt, Artificial Sequence
  Description of Artificial Sequence: Synthetic oligonucleotide
gcuucuggaaauucuuuggaauaau

SEQ ID NO: 35305 - RNA, 25 nt, Artificial Sequence
  Description of Artificial Sequence: Synthetic oligonucleotide
uugaugacaucuauuuucaucuggg

SEQ ID NO: 35306 - RNA, 25 nt, Artificial Sequence
  Description of Artificial Sequence: Synthetic oligonucleotide
guuuagucucaauuuugguuaucuu

SEQ ID NO: 35307 - RNA, 25 nt, Artificial Sequence
  Description of Artificial Sequence: Synthetic oligonucleotide
uuguguuccucaagcucuuuaaaga

SEQ ID NO: 35308 - RNA, 25 nt, Artificial Sequence
  Description of Artificial Sequence: Synthetic oligonucleotide
aaaaagauguaaucguuguaaccuu

SEQ ID NO: 35309 - RNA, 25 nt, Artificial Sequence
  Description of Artificial Sequence: Synthetic oligonucleotide
uugucucauuccuuaaaugaugcuu

SEQ ID NO: 35310 - RNA, 25 nt, Artificial Sequence
  Description of Artificial Sequence: Synthetic oligonucleotide
uccaaacaucuccuuagugucugca

SEQ ID NO: 35311 - RNA, 25 nt, Artificial Sequence
  Description of Artificial Sequence: Synthetic oligonucleotide
agguguuaguggugugcuaaaagca

SEQ ID NO: 35312 - RNA, 25 nt, Artificial Sequence
  Description of Artificial Sequence: Synthetic oligonucleotide
aaggaaagcgaguuagucuuuucag

SEQ ID NO: 35313 - RNA, 25 nt, Artificial Sequence
  Description of Artificial Sequence: Synthetic oligonucleotide
gugucuuuugcaauucaauucuuuu

SEQ ID NO: 35314 - RNA, 25 nt, Artificial Sequence
  Description of Artificial Sequence: Synthetic oligonucleotide
ugucauguauaacugagacacacaa

SEQ ID NO: 35315 - RNA, 25 nt, Artificial Sequence
  Description of Artificial Sequence: Synthetic oligonucleotide
aacacagcaggagaaaucuaaaccg

SEQ ID NO: 35316 - RNA, 25 nt, Artificial Sequence
  Description of Artificial Sequence: Synthetic oligonucleotide
guugugccuugaccuuccucugcug

SEQ ID NO: 35317 - RNA, 25 nt, Artificial Sequence
  Description of Artificial Sequence: Synthetic oligonucleotide
ggucuuguuccaggguuaugaauau

SEQ ID NO: 35318 - RNA, 25 nt, Artificial Sequence
  Description of Artificial Sequence: Synthetic oligonucleotide
ugaaaaaauagagaugagacuuuuu

SEQ ID NO: 35319 - RNA, 25 nt, Artificial Sequence
  Description of Artificial Sequence: Synthetic oligonucleotide
ugugucaacucuguccacaagagug

SEQ ID NO: 35320 - RNA, 25 nt, Artificial Sequence
  Description of Artificial Sequence: Synthetic oligonucleotide
gaguuaucuaguaugauuaguauag

SEQ ID NO: 35321 - RNA, 25 nt, Artificial Sequence
  Description of Artificial Sequence: Synthetic oligonucleotide
gcuuucuccagcauggcagcaggaa

SEQ ID NO: 35322 - RNA, 25 nt, Artificial Sequence
  Description of Artificial Sequence: Synthetic oligonucleotide
aguaacuacagggccucuuuuaugc

SEQ ID NO: 35323 - RNA, 25 nt, Artificial Sequence
  Description of Artificial Sequence: Synthetic oligonucleotide
ccugacauuucuucccuuccuuuuu

SEQ ID NO: 35324 - RNA, 25 nt, Artificial Sequence
  Description of Artificial Sequence: Synthetic oligonucleotide
ucccugccucccuuuuucaucaauu

SEQ ID NO: 35325 - RNA, 25 nt, Artificial Sequence
  Description of Artificial Sequence: Synthetic oligonucleotide
ugcaaugcucccacaacucuuuaca

SEQ ID NO: 35326 - RNA, 25 nt, Artificial Sequence
  Description of Artificial Sequence: Synthetic oligonucleotide
agacuugugaaaucuucaagaacac

SEQ ID NO: 35327 - RNA, 25 nt, Artificial Sequence
  Description of Artificial Sequence: Synthetic oligonucleotide
ccuuuacucuauaacucaaaaauua

SEQ ID NO: 35328 - RNA, 25 nt, Artificial Sequence
  Description of Artificial Sequence: Synthetic oligonucleotide
aguugaaaaauaauuacuucucaag

SEQ ID NO: 35329 - RNA, 25 nt, Artificial Sequence
  Description of Artificial Sequence: Synthetic oligonucleotide
ggauuauuagaaucuuagguacuua

SEQ ID NO: 35330 - RNA, 25 nt, Artificial Sequence
  Description of Artificial Sequence: Synthetic oligonucleotide
auuuguaaagauguuuagugacuuu

SEQ ID NO: 35331 - RNA, 25 nt, Artificial Sequence
  Description of Artificial Sequence: Synthetic oligonucleotide
uuuuuucaaguaucuuauuaaagga

SEQ ID NO: 35332 - RNA, 25 nt, Artificial Sequence
  Description of Artificial Sequence: Synthetic oligonucleotide
aggcauucuagaaaauaugaauuag

SEQ ID NO: 35333 - RNA, 25 nt, Artificial Sequence
  Description of Artificial Sequence: Synthetic oligonucleotide
guuuccaaaugccuuaauuuuaaac

SEQ ID NO: 35334 - RNA, 25 nt, Artificial Sequence
  Description of Artificial Sequence: Synthetic oligonucleotide
cuuuggccugaacaguuuuuucuuu

SEQ ID NO: 35335 - RNA, 25 nt, Artificial Sequence
  Description of Artificial Sequence: Synthetic oligonucleotide
uuucuuaauggaagaagauauuuaa

SEQ ID NO: 35336 - RNA, 25 nt, Artificial Sequence
  Description of Artificial Sequence: Synthetic oligonucleotide
auaucuuaaaaauauuccaaguuag

SEQ ID NO: 35337 - RNA, 25 nt, Artificial Sequence
  Description of Artificial Sequence: Synthetic oligonucleotide
ggaagaacacuacuugccuuaucca

SEQ ID NO: 35338 - RNA, 25 nt, Artificial Sequence
  Description of Artificial Sequence: Synthetic oligonucleotide
auuucccauuuaaaggacuuuuaaa

SEQ ID NO: 35339 - RNA, 25 nt, Artificial Sequence
  Description of Artificial Sequence: Synthetic oligonucleotide
acuuugacacauccuucagauuucc

SEQ ID NO: 35340 - RNA, 25 nt, Artificial Sequence
  Description of Artificial Sequence: Synthetic oligonucleotide
cugaaaauaauugaaauaucuuacu

SEQ ID NO: 35341 - RNA, 25 nt, Artificial Sequence
  Description of Artificial Sequence: Synthetic oligonucleotide
uuuaaaaauauuuucaucucugaaa

SEQ ID NO: 35342 - RNA, 25 nt, Artificial Sequence
  Description of Artificial Sequence: Synthetic oligonucleotide
auaucucguuauuuauuggagguau

SEQ ID NO: 35343 - RNA, 25 nt, Artificial Sequence
  Description of Artificial Sequence: Synthetic oligonucleotide
uuguuuaaccuuagagagaccauua

SEQ ID NO: 35344 - RNA, 25 nt, Artificial Sequence
  Description of Artificial Sequence: Synthetic oligonucleotide
aaauuauuuauaaaauauuuuguaa

SEQ ID NO: 35345 - RNA, 25 nt, Artificial Sequence
  Description of Artificial Sequence: Synthetic oligonucleotide
auuaccuguagcuaauacauuacau

SEQ ID NO: 35346 - RNA, 25 nt, Artificial Sequence
  Description of Artificial Sequence: Synthetic oligonucleotide
uagaaaaaaacuauguuaacagugu

SEQ ID NO: 35347 - RNA, 25 nt, Artificial Sequence
  Description of Artificial Sequence: Synthetic oligonucleotide
ucucuguuuaaguauaaucagauau

SEQ ID NO: 35348 - RNA, 25 nt, Artificial Sequence
  Description of Artificial Sequence: Synthetic oligonucleotide
uaaauauauacuuaauuuuuuaauu

SEQ ID NO: 35349 - RNA, 25 nt, Artificial Sequence
  Description of Artificial Sequence: Synthetic oligonucleotide
uuuaaaaauagauaccuguuugacu

SEQ ID NO: 35350 - RNA, 25 nt, Artificial Sequence
  Description of Artificial Sequence: Synthetic oligonucleotide
uuugagguaguccagaccuuuucuu

SEQ ID NO: 35351 - RNA, 25 nt, Artificial Sequence
  Description of Artificial Sequence: Synthetic oligonucleotide
caaaagcccaaagguuccuaagccu

SEQ ID NO: 35352 - RNA, 25 nt, Artificial Sequence
  Description of Artificial Sequence: Synthetic oligonucleotide
uggcugcaaagaagaaucaacaggg

SEQ ID NO: 35353 - RNA, 25 nt, Artificial Sequence
  Description of Artificial Sequence: Synthetic oligonucleotide
gacacuuuuuaaaaacacucuuauc

SEQ ID NO: 35354 - RNA, 25 nt, Artificial Sequence
  Description of Artificial Sequence: Synthetic oligonucleotide
cagccugggcaacacagugagacuc

SEQ ID NO: 35355 - RNA, 25 nt, Artificial Sequence
  Description of Artificial Sequence: Synthetic oligonucleotide
uggguauagugguaugugccuguag

SEQ ID NO: 35356 - RNA, 25 nt, Artificial Sequence
  Description of Artificial Sequence: Synthetic oligonucleotide
gucccagguacucaggaggcugagg

SEQ ID NO: 35357 - RNA, 25 nt, Artificial Sequence
  Description of Artificial Sequence: Synthetic oligonucleotide
gcaggaggauugccugagcccagga

SEQ ID NO: 35358 - RNA, 25 nt, Artificial Sequence
  Description of Artificial Sequence: Synthetic oligonucleotide
agguggaaacugcagagagucauga

SEQ ID NO: 35359 - RNA, 25 nt, Artificial Sequence
  Description of Artificial Sequence: Synthetic oligonucleotide
aucauguccuuacacuccagccugg

SEQ ID NO: 35360 - RNA, 25 nt, Artificial Sequence
  Description of Artificial Sequence: Synthetic oligonucleotide
gauaacagagcgagacccugucuca

SEQ ID NO: 35361 - RNA, 25 nt, Artificial Sequence
  Description of Artificial Sequence: Synthetic oligonucleotide
aaaaaaauaaaauaaaaaauaaaaa

SEQ ID NO: 35362 - RNA, 25 nt, Artificial Sequence
  Description of Artificial Sequence: Synthetic oligonucleotide
aaaaauaaaauaaaaaauaaaaaca

SEQ ID NO: 35363 - DNA, 21 bp, Artificial Sequence
  Description of Artificial Sequence: Synthetic oligonucleotide
  Description of Combined DNA/RNA Molecule: Synthetic oligonucleotide
cuacacaaaucagcgauuutt

SEQ ID NO: 35364 - DNA, 21 bp, Artificial Sequence
  Description of Artificial Sequence: Synthetic oligonucleotide
  Description of Combined DNA/RNA Molecule: Synthetic oligonucleotide
aaaucgcugauuuguguagtt

SEQ ID NO: 35365 - DNA, 25 bp, Artificial Sequence
  Description of Artificial Sequence: Synthetic oligonucleotide
  Description of Combined DNA/RNA Molecule: Synthetic oligonucleotide
cuacacaaaucagcgauuuccaugt

SEQ ID NO: 35366 - RNA, 27 nt, Artificial Sequence
  Description of Artificial Sequence: Synthetic oligonucleotide
acauggaaaucgcugauuuguguaguc

SEQ ID NO: 35367 - RNA, 13 nt, Artificial Sequence
  Description of Artificial Sequence: Synthetic oligonucleotide
cuacacaaaucag

SEQ ID NO: 35368 - DNA, 11 bp, Artificial Sequence
  Description of Artificial Sequence: Synthetic oligonucleotide
  Description of Combined DNA/RNA Molecule: Synthetic oligonucleotide
gauuuccaugt

SEQ ID NO: 35369 - DNA, 21 bp, Artificial Sequence
  Description of Artificial Sequence: Synthetic oligonucleotide
  Description of Combined DNA/RNA Molecule: Synthetic oligonucleotide
ggaucuuauuucuucggagtt

SEQ ID NO: 35370 - DNA, 21 bp, Artificial Sequence
  Description of Artificial Sequence: Synthetic oligonucleotide
  Description of Combined DNA/RNA Molecule: Synthetic oligonucleotide
cuccgaagaaauaagaucctt

SEQ ID NO: 35371 - RNA, 11 nt, Artificial Sequence
  Description of Artificial Sequence: Synthetic oligonucleotide
ggaucuuauuu

SEQ ID NO: 35372 - DNA, 10 bp, Artificial Sequence
  Description of Artificial Sequence: Synthetic oligonucleotide
  Description of Combined DNA/RNA Molecule: Synthetic oligonucleotide
cuucggagtt

SEQ ID NO: 35373 - RNA, 27 nt, Artificial Sequence
  Description of Artificial Sequence: Synthetic oligonucleotide
cauugucuccgaagaaauaagauccuu

SEQ ID NO: 35374 - RNA, 8 nt, Artificial Sequence
  Description of Artificial Sequence: Synthetic oligonucleotide
  modified_base (2): LNA-G
ggaucuua

SEQ ID NO: 35375 - DNA, 17 bp, Artificial Sequence
  Description of Artificial Sequence: Synthetic oligonucleotide
  Description of Combined DNA/RNA Molecule: Synthetic oligonucleotide
uuucuucggagacaatg

SEQ ID NO: 35376 - DNA, 16 bp, Artificial Sequence
  Description of Artificial Sequence: Synthetic oligonucleotide
  Description of Combined DNA/RNA Molecule: Synthetic oligonucleotide
uucuucggagacaatg

SEQ ID NO: 35377 - DNA, 15 bp, Artificial Sequence
  Description of Artificial Sequence: Synthetic oligonucleotide
  Description of Combined DNA/RNA Molecule: Synthetic oligonucleotide
ucuucggagacaatg

SEQ ID NO: 35378 - DNA, 14 bp, Artificial Sequence
  Description of Artificial Sequence: Synthetic oligonucleotide
  Description of Combined DNA/RNA Molecule: Synthetic oligonucleotide
cuucggagacaatg

SEQ ID NO: 35379 - DNA, 13 bp, Artificial Sequence
  Description of Artificial Sequence: Synthetic oligonucleotide
  Description of Combined DNA/RNA Molecule: Synthetic oligonucleotide
uucggagacaatg

SEQ ID NO: 35380 - DNA, 12 bp, Artificial Sequence
  Description of Artificial Sequence: Synthetic oligonucleotide
  Description of Combined DNA/RNA Molecule: Synthetic oligonucleotide
ucggagacaatg

SEQ ID NO: 35381 - DNA, 11 bp, Artificial Sequence
  Description of Artificial Sequence: Synthetic oligonucleotide
  Description of Combined DNA/RNA Molecule: Synthetic oligonucleotide
cggagacaatg

SEQ ID NO: 35382 - RNA, 9 nt, Artificial Sequence
  Description of Artificial Sequence: Synthetic oligonucleotide
  modified_base (2): LNA-G
ggaucuuau

SEQ ID NO: 35383 - RNA, 10 nt, Artificial Sequence
  Description of Artificial Sequence: Synthetic oligonucleotide
  modified_base (2): LNA-G
ggaucuuauu

SEQ ID NO: 35384 - RNA, 11 nt, Artificial Sequence
  Description of Artificial Sequence: Synthetic oligonucleotide
  modified_base (2): LNA-G
ggaucuuauuu

SEQ ID NO: 35385 - RNA, 12 nt, Artificial Sequence
  Description of Artificial Sequence: Synthetic oligonucleotide
  modified_base (2): LNA-G
ggaucuuauuuc

SEQ ID NO: 35386 - RNA, 8 nt, Artificial Sequence
  Description of Artificial Sequence: Synthetic oligonucleotide
  modified_base (3): LNA-A
cuacacaa

SEQ ID NO: 35387 - DNA, 13 bp, Artificial Sequence
  Description of Artificial Sequence: Synthetic oligonucleotide
  Description of Combined DNA/RNA Molecule: Synthetic oligonucleotide
  modified_base (8): LNA-A
aucagcgauuutt

SEQ ID NO: 35388 - DNA, 12 bp, Artificial Sequence
  Description of Artificial Sequence: Synthetic oligonucleotide
  Description of Combined DNA/RNA Molecule: Synthetic oligonucleotide
  modified_base (7): LNA-A
ucagcgauuutt

SEQ ID NO: 35389 - DNA, 11 bp, Artificial Sequence
  Description of Artificial Sequence: Synthetic oligonucleotide
  Description of Combined DNA/RNA Molecule: Synthetic oligonucleotide
  modified_base (6): LNA-A
cagcgauuutt

SEQ ID NO: 35390 - DNA, 10 bp, Artificial Sequence
  Description of Artificial Sequence: Synthetic oligonucleotide
  Description of Combined DNA/RNA Molecule: Synthetic oligonucleotide
  modified_base (5): LNA-A
agcgauuutt

SEQ ID NO: 35391 - DNA, 9 bp, Artificial Sequence
  Description of Artificial Sequence: Synthetic oligonucleotide
  Description of Combined DNA/RNA Molecule: Synthetic oligonucleotide
  modified_base (4): LNA-A
gcgauuutt

SEQ ID NO: 35392 - DNA, 8 bp, Artificial Sequence
  Description of Artificial Sequence: Synthetic oligonucleotide
  Description of Combined DNA/RNA Molecule: Synthetic oligonucleotide
  modified_base (3): LNA-A
cgauuutt

SEQ ID NO: 35393 - DNA, 7 bp, Artificial Sequence
  Description of Artificial Sequence: Synthetic oligonucleotide
  Description of Combined DNA/RNA Molecule: Synthetic oligonucleotide
  modified_base (2): LNA-A
gauuutt

SEQ ID NO: 35394 - RNA, 9 nt, Artificial Sequence
  Description of Artificial Sequence: Synthetic oligonucleotide
  modified_base (3): LNA-A
cuacacaaa

SEQ ID NO: 35395 - RNA, 10 nt, Artificial Sequence
  Description of Artificial Sequence: Synthetic oligonucleotide
  modified_base (3): LNA-A
cuacacaaau

SEQ ID NO: 35396 - RNA, 11 nt, Artificial Sequence
  Description of Artificial Sequence: Synthetic oligonucleotide
  modified_base (3): LNA-A
cuacacaaauc

SEQ ID NO: 35397 - RNA, 12 nt, Artificial Sequence
  Description of Artificial Sequence: Synthetic oligonucleotide
  modified_base (3): LNA-A
cuacacaaauca

SEQ ID NO: 35398 - RNA, 13 nt, Artificial Sequence
  Description of Artificial Sequence: Synthetic oligonucleotide
  modified_base (3): LNA-A
cuacacaaaucag

SEQ ID NO: 35399 - RNA, 14 nt, Artificial Sequence
  Description of Artificial Sequence: Synthetic oligonucleotide
  modified_base (3): LNA-A
cuacacaaaucagc

SEQ ID NO: 35400 - RNA, 13 nt, Artificial Sequence
  Description of Artificial Sequence: Synthetic oligonucleotide
  modified_base (2): LNA-G
ggaucuuauuucu

SEQ ID NO: 35401 - RNA, 14 nt, Artificial Sequence
  Description of Artificial Sequence: Synthetic oligonucleotide
  modified_base (2): LNA-G
ggaucuuauuucuu

SEQ ID NO: 35402 - RNA, 8 nt, Artificial Sequence
  Description of Artificial Sequence: Synthetic oligonucleotide
  modified_base (2): LNA-G
  modified_base (8): LNA-A
ggaucuua

SEQ ID NO: 35403 - RNA, 9 nt, Artificial Sequence
  Description of Artificial Sequence: Synthetic oligonucleotide
  modified_base (2): LNA-G
  modified_base (9): LNA-U
ggaucuuau

SEQ ID NO: 35404 - RNA, 10 nt, Artificial Sequence
  Description of Artificial Sequence: Synthetic oligonucleotide
  modified_base (2): LNA-G
  modified_base (10): LNA-U
ggaucuuauu

SEQ ID NO: 35405 - RNA, 11 nt, Artificial Sequence
  Description of Artificial Sequence: Synthetic oligonucleotide
  modified_base (2): LNA-G
  modified_base (11): LNA-U
ggaucuuauuu

SEQ ID NO: 35406 - RNA, 12 nt, Artificial Sequence
  Description of Artificial Sequence: Synthetic oligonucleotide
  modified_base (2): LNA-G
  modified_base (12): LNA-C
ggaucuuauuuc

SEQ ID NO: 35407 - RNA, 13 nt, Artificial Sequence
  Description of Artificial Sequence: Synthetic oligonucleotide
  modified_base (2): LNA-G
  modified_base (13): LNA-U
ggaucuuauuucu

SEQ ID NO: 35408 - RNA, 14 nt, Artificial Sequence
  Description of Artificial Sequence: Synthetic oligonucleotide
  modified_base (2): LNA-G
  modified_base (14): LNA-U
ggaucuuauuucuu

SEQ ID NO: 35409 - DNA, 13 bp, Artificial Sequence
  Description of Artificial Sequence: Synthetic oligonucleotide
  Description of Combined DNA/RNA Molecule: Synthetic oligonucleotide
  modified_base (8): LNA-G
uuucuucggagtt

SEQ ID NO: 35410 - DNA, 12 bp, Artificial Sequence
  Description of Artificial Sequence: Synthetic oligonucleotide
  Description of Combined DNA/RNA Molecule: Synthetic oligonucleotide
  modified_base (7): LNA-G
uucuucggagtt

SEQ ID NO: 35411 - DNA, 11 bp, Artificial Sequence
  Description of Artificial Sequence: Synthetic oligonucleotide
  Description of Combined DNA/RNA Molecule: Synthetic oligonucleotide
  modified_base (6): LNA-G
ucuucggagtt

SEQ ID NO: 35412 - DNA, 10 bp, Artificial Sequence
  Description of Artificial Sequence: Synthetic oligonucleotide
  Description of Combined DNA/RNA Molecule: Synthetic oligonucleotide
  modified_base (5): LNA-G
cuucggagtt

SEQ ID NO: 35413 - DNA, 9 bp, Artificial Sequence
  Description of Artificial Sequence: Synthetic oligonucleotide
  Description of Combined DNA/RNA Molecule: Synthetic oligonucleotide
  modified_base (4): LNA-G
uucggagtt

SEQ ID NO: 35414 - DNA, 8 bp, Artificial Sequence
  Description of Artificial Sequence: Synthetic oligonucleotide
  Description of Combined DNA/RNA Molecule: Synthetic oligonucleotide
  modified_base (3): LNA-G
ucggagtt

SEQ ID NO: 35415 - DNA, 7 bp, Artificial Sequence
  Description of Artificial Sequence: Synthetic oligonucleotide
  Description of Combined DNA/RNA Molecule: Synthetic oligonucleotide
  modified_base (2): LNA-G
cggagtt

SEQ ID NO: 35416 - DNA, 13 bp, Artificial Sequence
  Description of Artificial Sequence: Synthetic oligonucleotide
  Description of Combined DNA/RNA Molecule: Synthetic oligonucleotide
  modified_base (1): LNA-U
  modified_base (8): LNA-G
uuucuucggagtt

SEQ ID NO: 35417 - DNA, 12 bp, Artificial Sequence
  Description of Artificial Sequence: Synthetic oligonucleotide
  Description of Combined DNA/RNA Molecule: Synthetic oligonucleotide
  modified_base (1): LNA-U
  modified_base (7): LNA-G
uucuucggagtt

SEQ ID NO: 35418 - DNA, 11 bp, Artificial Sequence
  Description of Artificial Sequence: Synthetic oligonucleotide
  Description of Combined DNA/RNA Molecule: Synthetic oligonucleotide
  modified_base (1): LNA-U
  modified_base (6): LNA-G
ucuucggagtt

SEQ ID NO: 35419 - DNA, 10 bp, Artificial Sequence
  Description of Artificial Sequence: Synthetic oligonucleotide
  Description of Combined DNA/RNA Molecule: Synthetic oligonucleotide
  modified_base (1): LNA-C
  modified_base (5): LNA-G
cuucggagtt

SEQ ID NO: 35420 - DNA, 9 bp, Artificial Sequence
  Description of Artificial Sequence: Synthetic oligonucleotide
  Description of Combined DNA/RNA Molecule: Synthetic oligonucleotide
  modified_base (1): LNA-U
  modified_base (4): LNA-G
uucggagtt

SEQ ID NO: 35421 - DNA, 8 bp, Artificial Sequence
  Description of Artificial Sequence: Synthetic oligonucleotide
  Description of Combined DNA/RNA Molecule: Synthetic oligonucleotide
  modified_base (1): LNA-U
  modified_base (3): LNA-G
ucggagtt

SEQ ID NO: 35422 - DNA, 7 bp, Artificial Sequence
  Description of Artificial Sequence: Synthetic oligonucleotide
  Description of Combined DNA/RNA Molecule: Synthetic oligonucleotide
  modified_base (1): LNA-C
  modified_base (2): LNA-G
cggagtt

SEQ ID NO: 35423 - DNA, 21 bp, Artificial Sequence
  Description of Artificial Sequence: Synthetic oligonucleotide
  Description of Combined DNA/RNA Molecule: Synthetic oligonucleotide
  modified_base (2): LNA-G
  modified_base (16): LNA-G
ggaucuuauuucuucggagtt

SEQ ID NO: 35424 - DNA, 25 bp, Artificial Sequence
  Description of Artificial Sequence: Synthetic oligonucleotide
  Description of Combined DNA/RNA Molecule: Synthetic oligonucleotide
ggaucuuauuucuucggagacaatg

SEQ ID NO: 35425 - RNA, 25 nt, Artificial Sequence
  Description of Artificial Sequence: Synthetic oligonucleotide
uuaagcagaguucaaaagcccuuca

SEQ ID NO: 35426 - RNA, 25 nt, Artificial Sequence
  Description of Artificial Sequence: Synthetic oligonucleotide
uaagcagaguucaaaagcccuucag

SEQ ID NO: 35427 - RNA, 25 nt, Artificial Sequence
  Description of Artificial Sequence: Synthetic oligonucleotide
agcagaguucaaaagcccuucagcg

SEQ ID NO: 35428 - RNA, 25 nt, Artificial Sequence
  Description of Artificial Sequence: Synthetic oligonucleotide
cucagggucugagugaagccgcucg

SEQ ID NO: 35429 - RNA, 25 nt, Artificial Sequence
  Description of Artificial Sequence: Synthetic oligonucleotide
caagcaacuacaucacgccagucaa

SEQ ID NO: 35430 - RNA, 25 nt, Artificial Sequence
  Description of Artificial Sequence: Synthetic oligonucleotide
aucaauggcagcuucuuggugcgug

SEQ ID NO: 35431 - RNA, 25 nt, Artificial Sequence
  Description of Artificial Sequence: Synthetic oligonucleotide
uuccagcccacauuggauucaucag

SEQ ID NO: 35432 - RNA, 25 nt, Artificial Sequence
  Description of Artificial Sequence: Synthetic oligonucleotide
cagcugagaauguggaauaccuaag

SEQ ID NO: 35433 - RNA, 25 nt, Artificial Sequence
  Description of Artificial Sequence: Synthetic oligonucleotide
aacguaucuccuaauuugaggcuca

SEQ ID NO: 35434 - RNA, 25 nt, Artificial Sequence
  Description of Artificial Sequence: Synthetic oligonucleotide
ccuaaaauaauuucucuacaauugg

SEQ ID NO: 35435 - RNA, 25 nt, Artificial Sequence
  Description of Artificial Sequence: Synthetic oligonucleotide
uggaagauucagcuaguuaggagcc

SEQ ID NO: 35436 - RNA, 25 nt, Artificial Sequence
  Description of Artificial Sequence: Synthetic oligonucleotide
uuaaacucuccuagucaauauccac

SEQ ID NO: 35437 - RNA, 25 nt, Artificial Sequence
  Description of Artificial Sequence: Synthetic oligonucleotide
cagccuacaguuauguucagucaca

SEQ ID NO: 35438 - RNA, 25 nt, Artificial Sequence
  Description of Artificial Sequence: Synthetic oligonucleotide
guuauguucagucacacacacauac

SEQ ID NO: 35439 - RNA, 25 nt, Artificial Sequence
  Description of Artificial Sequence: Synthetic oligonucleotide
cacauacaaaauguuccuuuugcuu

SEQ ID NO: 35440 - RNA, 25 nt, Artificial Sequence
  Description of Artificial Sequence: Synthetic oligonucleotide
uccuuuugcuuuuaaaguaauuuuu

SEQ ID NO: 35441 - RNA, 25 nt, Artificial Sequence
  Description of Artificial Sequence: Synthetic oligonucleotide
ugaccugugaagcaacagucaaugg

SEQ ID NO: 35442 - RNA, 25 nt, Artificial Sequence
  Description of Artificial Sequence: Synthetic oligonucleotide
cuaucucacacaucgacaaaccaau

SEQ ID NO: 35443 - RNA, 25 nt, Artificial Sequence
  Description of Artificial Sequence: Synthetic oligonucleotide
uguccucaauuguacugcuaccacu

SEQ ID NO: 35444 - RNA, 25 nt, Artificial Sequence
  Description of Artificial Sequence: Synthetic oligonucleotide
aaaccguagcuggcaagcggucuua

SEQ ID NO: 35445 - RNA, 25 nt, Artificial Sequence
  Description of Artificial Sequence: Synthetic oligonucleotide
uagcuggcaagcggucuuaccggcu

SEQ ID NO: 35446 - RNA, 25 nt, Artificial Sequence
  Description of Artificial Sequence: Synthetic oligonucleotide
uuguaugguuaaaagauggguuacc

SEQ ID NO: 35447 - RNA, 25 nt, Artificial Sequence
  Description of Artificial Sequence: Synthetic oligonucleotide
ugguuaaaagauggguuaccugcga

SEQ ID NO: 35448 - RNA, 25 nt, Artificial Sequence
  Description of Artificial Sequence: Synthetic oligonucleotide
cagggaauuauacaaucuugcugag

SEQ ID NO: 35449 - RNA, 25 nt, Artificial Sequence
  Description of Artificial Sequence: Synthetic oligonucleotide
acaaucuugcugagcauaaaacagu

SEQ ID NO: 35450 - RNA, 25 nt, Artificial Sequence
  Description of Artificial Sequence: Synthetic oligonucleotide
ccaauaaugaagaguccuuuauccu

SEQ ID NO: 35451 - RNA, 25 nt, Artificial Sequence
  Description of Artificial Sequence: Synthetic oligonucleotide
acuuuggauguuccaacgcaaguug

SEQ ID NO: 35452 - RNA, 25 nt, Artificial Sequence
  Description of Artificial Sequence: Synthetic oligonucleotide
aaugcuuccacuaaacugaaaccau

SEQ ID NO: 35453 - RNA, 25 nt, Artificial Sequence
  Description of Artificial Sequence: Synthetic oligonucleotide
gagaaaguuugacuuuguuaaauau

SEQ ID NO: 35454 - RNA, 25 nt, Artificial Sequence
  Description of Artificial Sequence: Synthetic oligonucleotide
aaagaacuacuguauauuaaaaguu

SEQ ID NO: 35455 - RNA, 25 nt, Artificial Sequence
  Description of Artificial Sequence: Synthetic oligonucleotide
uuagaaauacggguuuugacuuaac

SEQ ID NO: 35456 - RNA, 25 nt, Artificial Sequence
  Description of Artificial Sequence: Synthetic oligonucleotide
aacauggguacagcaaacucagcac

SEQ ID NO: 35457 - RNA, 25 nt, Artificial Sequence
  Description of Artificial Sequence: Synthetic oligonucleotide
aaagacacagaagaugcugaccuca

SEQ ID NO: 35458 - RNA, 25 nt, Artificial Sequence
  Description of Artificial Sequence: Synthetic oligonucleotide
uaguagggagguuuauucagaucgc

SEQ ID NO: 35459 - RNA, 25 nt, Artificial Sequence
  Description of Artificial Sequence: Synthetic oligonucleotide
gccuucugcagcaggguucugggau

SEQ ID NO: 35460 - RNA, 25 nt, Artificial Sequence
  Description of Artificial Sequence: Synthetic oligonucleotide
ggucugguacauauuggaaauuaug

SEQ ID NO: 35461 - RNA, 25 nt, Artificial Sequence
  Description of Artificial Sequence: Synthetic oligonucleotide
cuaguccuuccgauggaagcacuag

SEQ ID NO: 35462 - RNA, 25 nt, Artificial Sequence
  Description of Artificial Sequence: Synthetic oligonucleotide
ccagugaauauuguuuuuaugugga

SEQ ID NO: 35463 - RNA, 25 nt, Artificial Sequence
  Description of Artificial Sequence: Synthetic oligonucleotide
augaauucaaguuggaauugguaga

SEQ ID NO: 35464 - RNA, 25 nt, Artificial Sequence
  Description of Artificial Sequence: Synthetic oligonucleotide
caggacacagauuuagacuuggaga

SEQ ID NO: 35465 - RNA, 25 nt, Artificial Sequence
  Description of Artificial Sequence: Synthetic oligonucleotide
cucaaagcacaguuacaguauucca

SEQ ID NO: 35466 - RNA, 25 nt, Artificial Sequence
  Description of Artificial Sequence: Synthetic oligonucleotide
accacugccaccacugaugaauuaa

SEQ ID NO: 35467 - RNA, 25 nt, Artificial Sequence
  Description of Artificial Sequence: Synthetic oligonucleotide
gaaacuacuagugccacaucaucac

SEQ ID NO: 35468 - RNA, 25 nt, Artificial Sequence
  Description of Artificial Sequence: Synthetic oligonucleotide
aagucggacagccucaccaaacaga

SEQ ID NO: 35469 - RNA, 25 nt, Artificial Sequence
  Description of Artificial Sequence: Synthetic oligonucleotide
gaaagcgaaaaauggaacaugaugg

SEQ ID NO: 35470 - RNA, 25 nt, Artificial Sequence
  Description of Artificial Sequence: Synthetic oligonucleotide
cccucugauuuagcauguagacugc

SEQ ID NO: 35471 - RNA, 25 nt, Artificial Sequence
  Description of Artificial Sequence: Synthetic oligonucleotide
ugagcuauuuaaggaucuauuuaug

SEQ ID NO: 35472 - RNA, 25 nt, Artificial Sequence
  Description of Artificial Sequence: Synthetic oligonucleotide
aaaaggugaaaaagcacuauuauca

SEQ ID NO: 35473 - RNA, 25 nt, Artificial Sequence
  Description of Artificial Sequence: Synthetic oligonucleotide
gaaaaagcacuauuaucaguucugc

SEQ ID NO: 35474 - RNA, 25 nt, Artificial Sequence
  Description of Artificial Sequence: Synthetic oligonucleotide
ggcugaaaagaaagauuaaaccuac

SEQ ID NO: 35475 - RNA, 25 nt, Artificial Sequence
  Description of Artificial Sequence: Synthetic oligonucleotide
uaaacccuuauaauaaaauccuucu

SEQ ID NO: 35476 - RNA, 25 nt, Artificial Sequence
  Description of Artificial Sequence: Synthetic oligonucleotide
cauacuauuagccaaugcuguagac

SEQ ID NO: 35477 - RNA, 25 nt, Artificial Sequence
  Description of Artificial Sequence: Synthetic oligonucleotide
gacagaagcauuuugauaggaauag

SEQ ID NO: 35478 - RNA, 25 nt, Artificial Sequence
  Description of Artificial Sequence: Synthetic oligonucleotide
agagcaaauaagauaauggcccuga

SEQ ID NO: 35479 - RNA, 25 nt, Artificial Sequence
  Description of Artificial Sequence: Synthetic oligonucleotide
ccaacauuuuucucuuccucaagca

SEQ ID NO: 35480 - RNA, 25 nt, Artificial Sequence
  Description of Artificial Sequence: Synthetic oligonucleotide
uuaaguaugagaaaaguucagccca

SEQ ID NO: 35481 - RNA, 25 nt, Artificial Sequence
  Description of Artificial Sequence: Synthetic oligonucleotide
caggaauaaagauggcugcugaacc

SEQ ID NO: 35482 - RNA, 25 nt, Artificial Sequence
  Description of Artificial Sequence: Synthetic oligonucleotide
aauuugaaugaccaaguucucuuca

SEQ ID NO: 35483 - RNA, 25 nt, Artificial Sequence
  Description of Artificial Sequence: Synthetic oligonucleotide
auguauaaagauagccagccuagag

SEQ ID NO: 35484 - RNA, 25 nt, Artificial Sequence
  Description of Artificial Sequence: Synthetic oligonucleotide
ggcuguaacuaucucugugaagugu

SEQ ID NO: 35485 - RNA, 25 nt, Artificial Sequence
  Description of Artificial Sequence: Synthetic oligonucleotide
ucugugaagugugagaaaauuucaa

SEQ ID NO: 35486 - RNA, 25 nt, Artificial Sequence
  Description of Artificial Sequence: Synthetic oligonucleotide
ccuuuaaggaaaugaauccuccuga

SEQ ID NO: 35487 - RNA, 25 nt, Artificial Sequence
  Description of Artificial Sequence: Synthetic oligonucleotide
aaggauacaaaaagugacaucauau

SEQ ID NO: 35488 - RNA, 25 nt, Artificial Sequence
  Description of Artificial Sequence: Synthetic oligonucleotide
agaugcaauuugaaucuucaucaua

SEQ ID NO: 35489 - RNA, 25 nt, Artificial Sequence
  Description of Artificial Sequence: Synthetic oligonucleotide
guucaaaacgaagacuagcuauuaa

SEQ ID NO: 35490 - RNA, 25 nt, Artificial Sequence
  Description of Artificial Sequence: Synthetic oligonucleotide
gugaaaccucaucucuacuaaaaau

SEQ ID NO: 35491 - RNA, 25 nt, Artificial Sequence
  Description of Artificial Sequence: Synthetic oligonucleotide
acgaaagagaagcucuaucucgccu

SEQ ID NO: 35492 - RNA, 25 nt, Artificial Sequence
  Description of Artificial Sequence: Synthetic oligonucleotide
cuccacaagcgccuucgguccaguu

SEQ ID NO: 35493 - RNA, 25 nt, Artificial Sequence
  Description of Artificial Sequence: Synthetic oligonucleotide
gagaagauuccaaagauguagccgc

SEQ ID NO: 35494 - RNA, 25 nt, Artificial Sequence
  Description of Artificial Sequence: Synthetic oligonucleotide
aaucuggauucaaugaggagacuug

SEQ ID NO: 35495 - RNA, 25 nt, Artificial Sequence
  Description of Artificial Sequence: Synthetic oligonucleotide
agaacagauuugagaguagugagga

SEQ ID NO: 35496 - RNA, 25 nt, Artificial Sequence
  Description of Artificial Sequence: Synthetic oligonucleotide
ccagagcugugcagaugaguacaaa

SEQ ID NO: 35497 - RNA, 25 nt, Artificial Sequence
  Description of Artificial Sequence: Synthetic oligonucleotide
ccucagauuguuguuguuaaugggc

SEQ ID NO: 35498 - RNA, 25 nt, Artificial Sequence
  Description of Artificial Sequence: Synthetic oligonucleotide
cuauuuuaauuauuuuuaauuuauu

SEQ ID NO: 35499 - RNA, 25 nt, Artificial Sequence
  Description of Artificial Sequence: Synthetic oligonucleotide
uuuaauuuauuaauauuuaaauaug

SEQ ID NO: 35500 - RNA, 25 nt, Artificial Sequence
  Description of Artificial Sequence: Synthetic oligonucleotide
augcaguuugaauauccuuuguuuc

SEQ ID NO: 35501 - RNA, 25 nt, Artificial Sequence
  Description of Artificial Sequence: Synthetic oligonucleotide
caugcugcuggcgucuaaguguuug

SEQ ID NO: 35502 - RNA, 25 nt, Artificial Sequence
  Description of Artificial Sequence: Synthetic oligonucleotide
agaugugcauuucaccugugacaaa

SEQ ID NO: 35503 - RNA, 25 nt, Artificial Sequence
  Description of Artificial Sequence: Synthetic oligonucleotide
ucaaaaccugugccaggcugaauua

SEQ ID NO: 35504 - RNA, 25 nt, Artificial Sequence
  Description of Artificial Sequence: Synthetic oligonucleotide
gaauguggguagucauucuuacaau

SEQ ID NO: 35505 - RNA, 25 nt, Artificial Sequence
  Description of Artificial Sequence: Synthetic oligonucleotide
auguggguagucauucuuacaauug

SEQ ID NO: 35506 - RNA, 25 nt, Artificial Sequence
  Description of Artificial Sequence: Synthetic oligonucleotide
ugaaaaugagcaucagagaguguac

SEQ ID NO: 35507 - RNA, 25 nt, Artificial Sequence
  Description of Artificial Sequence: Synthetic oligonucleotide
uugcuuuucauguagaacucagcag

SEQ ID NO: 35508 - RNA, 25 nt, Artificial Sequence
  Description of Artificial Sequence: Synthetic oligonucleotide
uguauuucuauauuuauuuucagua

SEQ ID NO: 35509 - RNA, 25 nt, Artificial Sequence
  Description of Artificial Sequence: Synthetic oligonucleotide
uuugauuaauguuucuuaaauggaa

SEQ ID NO: 35510 - RNA, 25 nt, Artificial Sequence
  Description of Artificial Sequence: Synthetic oligonucleotide
caacguguauagugccuaaaauugu

SEQ ID NO: 35511 - RNA, 25 nt, Artificial Sequence
  Description of Artificial Sequence: Synthetic oligonucleotide
cauauccuuggcuacuaacaucugg

SEQ ID NO: 35512 - RNA, 25 nt, Artificial Sequence
  Description of Artificial Sequence: Synthetic oligonucleotide
uacuaacaucuggagacugugagcu

SEQ ID NO: 35513 - RNA, 25 nt, Artificial Sequence
  Description of Artificial Sequence: Synthetic oligonucleotide
cauaaguugugugcuuuuuauuaau

SEQ ID NO: 35514 - RNA, 25 nt, Artificial Sequence
  Description of Artificial Sequence: Synthetic oligonucleotide
gcaucauuuuggcucuucuuacauu

SEQ ID NO: 35515 - RNA, 25 nt, Artificial Sequence
  Description of Artificial Sequence: Synthetic oligonucleotide
gcucuucuuacauuuguaaaaaugu

SEQ ID NO: 35516 - RNA, 25 nt, Artificial Sequence
  Description of Artificial Sequence: Synthetic oligonucleotide
agauuaggucaucuuaauucauauu

SEQ ID NO: 35517 - RNA, 25 nt, Artificial Sequence
  Description of Artificial Sequence: Synthetic oligonucleotide
auggaauugaaagaacuaaucauga

SEQ ID NO: 35518 - RNA, 25 nt, Artificial Sequence
  Description of Artificial Sequence: Synthetic oligonucleotide
cacacucauuccuucugcucuuggg

SEQ ID NO: 35519 - RNA, 25 nt, Artificial Sequence
  Description of Artificial Sequence: Synthetic oligonucleotide
uguagagguaaccaguagcuuugag

SEQ ID NO: 35520 - RNA, 25 nt, Artificial Sequence
  Description of Artificial Sequence: Synthetic oligonucleotide
caaccacaugccacguaauauuuca

SEQ ID NO: 35521 - RNA, 25 nt, Artificial Sequence
  Description of Artificial Sequence: Synthetic oligonucleotide
ucggaaacaaguuauucucuucacu

SEQ ID NO: 35522 - RNA, 25 nt, Artificial Sequence
  Description of Artificial Sequence: Synthetic oligonucleotide
acucccaauaacuaaugcuaagaaa

SEQ ID NO: 35523 - RNA, 25 nt, Artificial Sequence
  Description of Artificial Sequence: Synthetic oligonucleotide
aaugcuaagaaaugcugaaaaucaa

SEQ ID NO: 35524 - RNA, 25 nt, Artificial Sequence
  Description of Artificial Sequence: Synthetic oligonucleotide
gucuuucucuaaauaugauuacuuu

SEQ ID NO: 35525 - RNA, 25 nt, Artificial Sequence
  Description of Artificial Sequence: Synthetic oligonucleotide
ugaauuucaggcauuuuguucuaca

SEQ ID NO: 35526 - RNA, 25 nt, Artificial Sequence
  Description of Artificial Sequence: Synthetic oligonucleotide
cgauucccucucacccgggacucuc

SEQ ID NO: 35527 - RNA, 25 nt, Artificial Sequence
  Description of Artificial Sequence: Synthetic oligonucleotide
aggaaagugaaccuuuaaaguaaag

SEQ ID NO: 35528 - RNA, 25 nt, Artificial Sequence
  Description of Artificial Sequence: Synthetic oligonucleotide
gaggcugcaugcucuggaagccugg

SEQ ID NO: 35529 - RNA, 25 nt, Artificial Sequence
  Description of Artificial Sequence: Synthetic oligonucleotide
ucucugaacagaaaacaaaagagag

SEQ ID NO: 35530 - RNA, 25 nt, Artificial Sequence
  Description of Artificial Sequence: Synthetic oligonucleotide
aacuuggcuguaaucaguuaugccg

SEQ ID NO: 35531 - RNA, 25 nt, Artificial Sequence
  Description of Artificial Sequence: Synthetic oligonucleotide
agaagccaaaauuaaaagaagucca

SEQ ID NO: 35532 - RNA, 25 nt, Artificial Sequence
  Description of Artificial Sequence: Synthetic oligonucleotide
auuaaaagaaguccaggugagguua

SEQ ID NO: 35533 - RNA, 25 nt, Artificial Sequence
  Description of Artificial Sequence: Synthetic oligonucleotide
gaauccggauuaucgggaagaggac

SEQ ID NO: 35534 - RNA, 25 nt, Artificial Sequence
  Description of Artificial Sequence: Synthetic oligonucleotide
aaugugacaucaaagcaaguauugu

SEQ ID NO: 35535 - RNA, 25 nt, Artificial Sequence
  Description of Artificial Sequence: Synthetic oligonucleotide
caucaaagcaaguauuguagcacuc

SEQ ID NO: 35536 - RNA, 25 nt, Artificial Sequence
  Description of Artificial Sequence: Synthetic oligonucleotide
agagagagaaaacaaaaccacaaau

SEQ ID NO: 35537 - RNA, 25 nt, Artificial Sequence
  Description of Artificial Sequence: Synthetic oligonucleotide
ucgcuguaguauuuaagcccauaca

SEQ ID NO: 35538 - RNA, 25 nt, Artificial Sequence
  Description of Artificial Sequence: Synthetic oligonucleotide
cgcuguaguauuuaagcccauacag

SEQ ID NO: 35539 - RNA, 25 nt, Artificial Sequence
  Description of Artificial Sequence: Synthetic oligonucleotide
auuuaagcccauacagaaaccuucc

SEQ ID NO: 35540 - RNA, 25 nt, Artificial Sequence
  Description of Artificial Sequence: Synthetic oligonucleotide
auuaaaauaaacaugguauaccuac

SEQ ID NO: 35541 - RNA, 25 nt, Artificial Sequence
  Description of Artificial Sequence: Synthetic oligonucleotide
cuguucugaucggccaguuuucgga

SEQ ID NO: 35542 - RNA, 25 nt, Artificial Sequence
  Description of Artificial Sequence: Synthetic oligonucleotide
aaauaauuugaacuuuggaacaggg

SEQ ID NO: 35543 - RNA, 25 nt, Artificial Sequence
  Description of Artificial Sequence: Synthetic oligonucleotide
ugcgaccuuaauuuaacuuuccagu

SEQ ID NO: 35544 - RNA, 25 nt, Artificial Sequence
  Description of Artificial Sequence: Synthetic oligonucleotide
cugagaaagcuaaaguuugguuuug

SEQ ID NO: 35545 - RNA, 25 nt, Artificial Sequence
  Description of Artificial Sequence: Synthetic oligonucleotide
aguaaagaugcuacuucccacugua

SEQ ID NO: 35546 - RNA, 25 nt, Artificial Sequence
  Description of Artificial Sequence: Synthetic oligonucleotide
cugcuuaauugcugauaccauauga

SEQ ID NO: 35547 - RNA, 25 nt, Artificial Sequence
  Description of Artificial Sequence: Synthetic oligonucleotide
uaccauaugaaugaaacaugggcug

SEQ ID NO: 35548 - RNA, 25 nt, Artificial Sequence
  Description of Artificial Sequence: Synthetic oligonucleotide
aacuuucuuauccaacuuuuucaua

SEQ ID NO: 35549 - RNA, 25 nt, Artificial Sequence
  Description of Artificial Sequence: Synthetic oligonucleotide
ccuugcaugacaucaugaggccgga

SEQ ID NO: 35550 - RNA, 25 nt, Artificial Sequence
  Description of Artificial Sequence: Synthetic oligonucleotide
ugaauuuguauaugacugcauuugu

SEQ ID NO: 35551 - RNA, 25 nt, Artificial Sequence
  Description of Artificial Sequence: Synthetic oligonucleotide
gaauccuaguagaauguuuacuacc

SEQ ID NO: 35552 - RNA, 25 nt, Artificial Sequence
  Description of Artificial Sequence: Synthetic oligonucleotide
gaaagggaagaauuuuuugaugaaa

SEQ ID NO: 35553 - RNA, 25 nt, Artificial Sequence
  Description of Artificial Sequence: Synthetic oligonucleotide
uaucggcaugccagugugugaauuu

SEQ ID NO: 35554 - RNA, 25 nt, Artificial Sequence
  Description of Artificial Sequence: Synthetic oligonucleotide
caccucauaguagagcaauguaugu

SEQ ID NO: 35555 - RNA, 25 nt, Artificial Sequence
  Description of Artificial Sequence: Synthetic oligonucleotide
ccagaauugccaaagcacauauaua

SEQ ID NO: 35556 - RNA, 25 nt, Artificial Sequence
  Description of Artificial Sequence: Synthetic oligonucleotide
uggugaucuggguaauaguuucucc

SEQ ID NO: 35557 - RNA, 25 nt, Artificial Sequence
  Description of Artificial Sequence: Synthetic oligonucleotide
gaucuggguaauaguuucuccaaau

SEQ ID NO: 35558 - RNA, 25 nt, Artificial Sequence
  Description of Artificial Sequence: Synthetic oligonucleotide
ggaugugaugaauacuuccuagaaa

SEQ ID NO: 35559 - RNA, 25 nt, Artificial Sequence
  Description of Artificial Sequence: Synthetic oligonucleotide
cauuuccacagcuacaccauauaug

SEQ ID NO: 35560 - RNA, 25 nt, Artificial Sequence
  Description of Artificial Sequence: Synthetic oligonucleotide
acagcuacaccauauaugaauggag

SEQ ID NO: 35561 - RNA, 25 nt, Artificial Sequence
  Description of Artificial Sequence: Synthetic oligonucleotide
ugcaguucuuacacgagaagaagau

SEQ ID NO: 35562 - RNA, 25 nt, Artificial Sequence
  Description of Artificial Sequence: Synthetic oligonucleotide
acgagaagaagaucauuuacaggga

SEQ ID NO: 35563 - RNA, 25 nt, Artificial Sequence
  Description of Artificial Sequence: Synthetic oligonucleotide
cgagaagaagaucauuuacagggac

SEQ ID NO: 35564 - RNA, 25 nt, Artificial Sequence
  Description of Artificial Sequence: Synthetic oligonucleotide
aagaagaucauuuacagggaccuga

SEQ ID NO: 35565 - RNA, 25 nt, Artificial Sequence
  Description of Artificial Sequence: Synthetic oligonucleotide
agaggaagagguguuugacugcauc

SEQ ID NO: 35566 - RNA, 25 nt, Artificial Sequence
  Description of Artificial Sequence: Synthetic oligonucleotide
gaggaagagguguuugacugcaucg

SEQ ID NO: 35567 - RNA, 25 nt, Artificial Sequence
  Description of Artificial Sequence: Synthetic oligonucleotide
cuacuuugagggcgaguucacaggg

SEQ ID NO: 35568 - RNA, 25 nt, Artificial Sequence
  Description of Artificial Sequence: Synthetic oligonucleotide
agggcaucuccuggcaccucugucc

SEQ ID NO: 35569 - RNA, 25 nt, Artificial Sequence
  Description of Artificial Sequence: Synthetic oligonucleotide
ggagugauaugguuugucuuuuuaa

SEQ ID NO: 35570 - RNA, 25 nt, Artificial Sequence
  Description of Artificial Sequence: Synthetic oligonucleotide
gagugauaugguuugucuuuuuaag

SEQ ID NO: 35571 - RNA, 25 nt, Artificial Sequence
  Description of Artificial Sequence: Synthetic oligonucleotide
ugcaguaaagauccuaaagguuguc

SEQ ID NO: 35572 - RNA, 25 nt, Artificial Sequence
  Description of Artificial Sequence: Synthetic oligonucleotide
aguaaagauccuaaagguugucgac

SEQ ID NO: 35573 - RNA, 25 nt, Artificial Sequence
  Description of Artificial Sequence: Synthetic oligonucleotide
ugacaaaggacaaccuggcaauugu

SEQ ID NO: 35574 - RNA, 25 nt, Artificial Sequence
  Description of Artificial Sequence: Synthetic oligonucleotide
gcaauugugacccaguggugcgagg

SEQ ID NO: 35575 - RNA, 25 nt, Artificial Sequence
  Description of Artificial Sequence: Synthetic oligonucleotide
aacaucauccauagagacaugaaau

SEQ ID NO: 35576 - RNA, 25 nt, Artificial Sequence
  Description of Artificial Sequence: Synthetic oligonucleotide
ugaaauccaacaauauauuucucca

SEQ ID NO: 35577 - RNA, 25 nt, Artificial Sequence
  Description of Artificial Sequence: Synthetic oligonucleotide
aacaauauauuucuccaugaaggcu

SEQ ID NO: 35578 - RNA, 25 nt, Artificial Sequence
  Description of Artificial Sequence: Synthetic oligonucleotide
aacaguaaagucacgcuggaguggu

SEQ ID NO: 35579 - RNA, 25 nt, Artificial Sequence
  Description of Artificial Sequence: Synthetic oligonucleotide
ugugaagaaaguaaaggaagagagg

SEQ ID NO: 35580 - RNA, 25 nt, Artificial Sequence
  Description of Artificial Sequence: Synthetic oligonucleotide
cuuccgagccauccuugcaucgggc

SEQ ID NO: 35581 - RNA, 25 nt, Artificial Sequence
  Description of Artificial Sequence: Synthetic oligonucleotide
aauggagguugaauauccuacugug

SEQ ID NO: 35582 - RNA, 25 nt, Artificial Sequence
  Description of Artificial Sequence: Synthetic oligonucleotide
ggagguugaauauccuacuguguaa

SEQ ID NO: 35583 - RNA, 25 nt, Artificial Sequence
  Description of Artificial Sequence: Synthetic oligonucleotide
auuuugaguuuucccuuguagugua

SEQ ID NO: 35584 - RNA, 25 nt, Artificial Sequence
  Description of Artificial Sequence: Synthetic oligonucleotide
uauccuguuuguucuuuguugauug

SEQ ID NO: 35585 - RNA, 25 nt, Artificial Sequence
  Description of Artificial Sequence: Synthetic oligonucleotide
ccuguuuguucuuuguugauugaaa

SEQ ID NO: 35586 - RNA, 25 nt, Artificial Sequence
  Description of Artificial Sequence: Synthetic oligonucleotide
cucuacagccuucuuuuucuuccau

SEQ ID NO: 35587 - RNA, 25 nt, Artificial Sequence
  Description of Artificial Sequence: Synthetic oligonucleotide
ucuuccauagcuaaucuuccuucua

SEQ ID NO: 35588 - RNA, 25 nt, Artificial Sequence
  Description of Artificial Sequence: Synthetic oligonucleotide
auaaucuuccuguugaaugcuucau

SEQ ID NO: 35589 - RNA, 25 nt, Artificial Sequence
  Description of Artificial Sequence: Synthetic oligonucleotide
uaaucuuccuguugaaugcuucaug

SEQ ID NO: 35590 - RNA, 25 nt, Artificial Sequence
  Description of Artificial Sequence: Synthetic oligonucleotide
cuucaugacuugaauucuacuuuga

SEQ ID NO: 35591 - RNA, 25 nt, Artificial Sequence
  Description of Artificial Sequence: Synthetic oligonucleotide
aagagggagagaagcaacuacagac

SEQ ID NO: 35592 - RNA, 25 nt, Artificial Sequence
  Description of Artificial Sequence: Synthetic oligonucleotide
cgucuccuaccagaccaaggucaac

SEQ ID NO: 35593 - RNA, 25 nt, Artificial Sequence
  Description of Artificial Sequence: Synthetic oligonucleotide
gaucaaucggcccgacuaucucgac

SEQ ID NO: 35594 - RNA, 25 nt, Artificial Sequence
  Description of Artificial Sequence: Synthetic oligonucleotide
ggacgaacauccaaccuucccaaac

SEQ ID NO: 35595 - RNA, 25 nt, Artificial Sequence
  Description of Artificial Sequence: Synthetic oligonucleotide
agggucggaacccaagcuuagaacu

SEQ ID NO: 35596 - RNA, 25 nt, Artificial Sequence
  Description of Artificial Sequence: Synthetic oligonucleotide
ucggaacccaagcuuagaacuuuaa

SEQ ID NO: 35597 - RNA, 25 nt, Artificial Sequence
  Description of Artificial Sequence: Synthetic oligonucleotide
acccaagcuuagaacuuuaagcaac

SEQ ID NO: 35598 - RNA, 25 nt, Artificial Sequence
  Description of Artificial Sequence: Synthetic oligonucleotide
gaacuuuaagcaacaagaccaccac

SEQ ID NO: 35599 - RNA, 25 nt, Artificial Sequence
  Description of Artificial Sequence: Synthetic oligonucleotide
acuauucaguggcgagaaauaaagu

SEQ ID NO: 35600 - RNA, 25 nt, Artificial Sequence
  Description of Artificial Sequence: Synthetic oligonucleotide
cuauucaguggcgagaaauaaaguu

SEQ ID NO: 35601 - RNA, 25 nt, Artificial Sequence
  Description of Artificial Sequence: Synthetic oligonucleotide
aaacacagauaacaggaaaugaucc

SEQ ID NO: 35602 - RNA, 25 nt, Artificial Sequence
  Description of Artificial Sequence: Synthetic oligonucleotide
cuuaagaaaagagaagaaaugaaac

SEQ ID NO: 35603 - RNA, 25 nt, Artificial Sequence
  Description of Artificial Sequence: Synthetic oligonucleotide
cugaaggaguguguuuccauccucc

SEQ ID NO: 35604 - RNA, 25 nt, Artificial Sequence
  Description of Artificial Sequence: Synthetic oligonucleotide
ucaccgcgggacugaaaaucuuuga

SEQ ID NO: 35605 - RNA, 25 nt, Artificial Sequence
  Description of Artificial Sequence: Synthetic oligonucleotide
agcagaaauaagcgugccguucagg

SEQ ID NO: 35606 - RNA, 25 nt, Artificial Sequence
  Description of Artificial Sequence: Synthetic oligonucleotide
aagcgugccguucaggguccagaag

SEQ ID NO: 35607 - RNA, 25 nt, Artificial Sequence
  Description of Artificial Sequence: Synthetic oligonucleotide
agaaacagucacucaagacugcuug

SEQ ID NO: 35608 - RNA, 25 nt, Artificial Sequence
  Description of Artificial Sequence: Synthetic oligonucleotide
agaggaagaagguccaugucuuugg

SEQ ID NO: 35609 - RNA, 25 nt, Artificial Sequence
  Description of Artificial Sequence: Synthetic oligonucleotide
uguauucaaaauaugccugaaacac

SEQ ID NO: 35610 - RNA, 25 nt, Artificial Sequence
  Description of Artificial Sequence: Synthetic oligonucleotide
auuuuccucccuuucucuguaccuc

SEQ ID NO: 35611 - RNA, 25 nt, Artificial Sequence
  Description of Artificial Sequence: Synthetic oligonucleotide
caaagaaagauagagcaagacaaga

SEQ ID NO: 35612 - RNA, 25 nt, Artificial Sequence
  Description of Artificial Sequence: Synthetic oligonucleotide
aagaaagauagagcaagacaagaaa

SEQ ID NO: 35613 - RNA, 25 nt, Artificial Sequence
  Description of Artificial Sequence: Synthetic oligonucleotide
gaaagcauuuguuuguacaagaucc

SEQ ID NO: 35614 - RNA, 25 nt, Artificial Sequence
  Description of Artificial Sequence: Synthetic oligonucleotide
ugaguuaaacgaacguacuugcaga

SEQ ID NO: 35615 - RNA, 25 nt, Artificial Sequence
  Description of Artificial Sequence: Synthetic oligonucleotide
acugauacagaacgaucgauacaga

SEQ ID NO: 35616 - RNA, 25 nt, Artificial Sequence
  Description of Artificial Sequence: Synthetic oligonucleotide
auauuauauauauauaaaaauaaau

SEQ ID NO: 35617 - RNA, 25 nt, Artificial Sequence
  Description of Artificial Sequence: Synthetic oligonucleotide
auuauauauauauaaaaauaaauau

SEQ ID NO: 35618 - RNA, 25 nt, Artificial Sequence
  Description of Artificial Sequence: Synthetic oligonucleotide
ucacuggauguauuugacugcugug

SEQ ID NO: 35619 - RNA, 25 nt, Artificial Sequence
  Description of Artificial Sequence: Synthetic oligonucleotide
cagggaagaggaggagaugagagac

SEQ ID NO: 35620 - RNA, 25 nt, Artificial Sequence
  Description of Artificial Sequence: Synthetic oligonucleotide
augaucuuuuuuuugucccacuugg

SEQ ID NO: 35621 - RNA, 27 nt, Artificial Sequence
  Description of Artificial Sequence: Synthetic oligonucleotide
ggccgugaacuccucaucaaaauaccu

SEQ ID NO: 35622 - RNA, 27 nt, Artificial Sequence
  Description of Artificial Sequence: Synthetic oligonucleotide
uggugugauggugaucaucugggccgu

SEQ ID NO: 35623 - RNA, 27 nt, Artificial Sequence
  Description of Artificial Sequence: Synthetic oligonucleotide
aaacccgcaggauaguuuucuucccua

SEQ ID NO: 35624 - RNA, 27 nt, Artificial Sequence
  Description of Artificial Sequence: Synthetic oligonucleotide
caaacuggaugaaauaaauuaaaaccc

SEQ ID NO: 35625 - RNA, 27 nt, Artificial Sequence
  Description of Artificial Sequence: Synthetic oligonucleotide
agaaguccuuaacauuucccuacguga

SEQ ID NO: 35626 - RNA, 27 nt, Artificial Sequence
  Description of Artificial Sequence: Synthetic oligonucleotide
cucugucccacuggguaaacccuggcc

SEQ ID NO: 35627 - RNA, 27 nt, Artificial Sequence
  Description of Artificial Sequence: Synthetic oligonucleotide
cacaauaacaaauuuaaaccuugcucc

SEQ ID NO: 35628 - RNA, 27 nt, Artificial Sequence
  Description of Artificial Sequence: Synthetic oligonucleotide
aaaugcauuugaacaacauaauacaca

SEQ ID NO: 35629 - RNA, 27 nt, Artificial Sequence
  Description of Artificial Sequence: Synthetic oligonucleotide
ggcuuuccugucacaaagauuaaaaac

SEQ ID NO: 35630 - RNA, 27 nt, Artificial Sequence
  Description of Artificial Sequence: Synthetic oligonucleotide
agggcuuuccugucacaaagauuaaaa

SEQ ID NO: 35631 - RNA, 27 nt, Artificial Sequence
  Description of Artificial Sequence: Synthetic oligonucleotide
ggccaugcugggagacauaagcagcag

SEQ ID NO: 35632 - RNA, 27 nt, Artificial Sequence
  Description of Artificial Sequence: Synthetic oligonucleotide
ucagggagaagcuucugaaacacuucu

SEQ ID NO: 35633 - RNA, 27 nt, Artificial Sequence
  Description of Artificial Sequence: Synthetic oligonucleotide
aagggcuucuuccuuauugauggucag

SEQ ID NO: 35634 - RNA, 27 nt, Artificial Sequence
  Description of Artificial Sequence: Synthetic oligonucleotide
ugaagggcuucuuccuuauugaugguc

SEQ ID NO: 35635 - RNA, 27 nt, Artificial Sequence
  Description of Artificial Sequence: Synthetic oligonucleotide
cgcugaagggcuucuuccuuauugaug

SEQ ID NO: 35636 - RNA, 27 nt, Artificial Sequence
  Description of Artificial Sequence: Synthetic oligonucleotide
gccgcugaagggcuucuuccuuauuga

SEQ ID NO: 35637 - RNA, 27 nt, Artificial Sequence
  Description of Artificial Sequence: Synthetic oligonucleotide
acuggccgcugaagggcuucuuccuua

SEQ ID NO: 35638 - RNA, 27 nt, Artificial Sequence
  Description of Artificial Sequence: Synthetic oligonucleotide
cggagcuuuucaccuuuaguuaugcuu

SEQ ID NO: 35639 - RNA, 27 nt, Artificial Sequence
  Description of Artificial Sequence: Synthetic oligonucleotide
ccggagcuuuucaccuuuaguuaugcu

SEQ ID NO: 35640 - RNA, 27 nt, Artificial Sequence
  Description of Artificial Sequence: Synthetic oligonucleotide
cagacuguugacuggcgugauguaguu

SEQ ID NO: 35641 - RNA, 27 nt, Artificial Sequence
  Description of Artificial Sequence: Synthetic oligonucleotide
cuuuugaacucugcuuaaauccagugg

SEQ ID NO: 35642 - RNA, 27 nt, Artificial Sequence
  Description of Artificial Sequence: Synthetic oligonucleotide
gcuuuugaacucugcuuaaauccagug

SEQ ID NO: 35643 - RNA, 27 nt, Artificial Sequence
  Description of Artificial Sequence: Synthetic oligonucleotide
agggcuuuugaacucugcuuaaaucca

SEQ ID NO: 35644 - RNA, 27 nt, Artificial Sequence
  Description of Artificial Sequence: Synthetic oligonucleotide
aagggcuuuugaacucugcuuaaaucc

SEQ ID NO: 35645 - RNA, 27 nt, Artificial Sequence
  Description of Artificial Sequence: Synthetic oligonucleotide
ugaagggcuuuugaacucugcuuaaau

SEQ ID NO: 35646 - RNA, 27 nt, Artificial Sequence
  Description of Artificial Sequence: Synthetic oligonucleotide
cugaagggcuuuugaacucugcuuaaa

SEQ ID NO: 35647 - RNA, 27 nt, Artificial Sequence
  Description of Artificial Sequence: Synthetic oligonucleotide
cgcugaagggcuuuugaacucugcuua

SEQ ID NO: 35648 - RNA, 27 nt, Artificial Sequence
  Description of Artificial Sequence: Synthetic oligonucleotide
cgagcggcuucacucagacccugaggc

SEQ ID NO: 35649 - RNA, 27 nt, Artificial Sequence
  Description of Artificial Sequence: Synthetic oligonucleotide
uugacuggcgugauguaguugcuuggg

SEQ ID NO: 35650 - RNA, 27 nt, Artificial Sequence
  Description of Artificial Sequence: Synthetic oligonucleotide
cacgcaccaagaagcugccauugaucc

SEQ ID NO: 35651 - RNA, 27 nt, Artificial Sequence
  Description of Artificial Sequence: Synthetic oligonucleotide
cugaugaauccaaugugggcuggaauc

SEQ ID NO: 35652 - RNA, 27 nt, Artificial Sequence
  Description of Artificial Sequence: Synthetic oligonucleotide
cuuagguauuccacauucucagcugug

SEQ ID NO: 35653 - RNA, 27 nt, Artificial Sequence
  Description of Artificial Sequence: Synthetic oligonucleotide
ugagccucaaauuaggagauacguuuu

SEQ ID NO: 35654 - RNA, 27 nt, Artificial Sequence
  Description of Artificial Sequence: Synthetic oligonucleotide
ccaauuguagagaaauuauuuuaggaa

SEQ ID NO: 35655 - RNA, 27 nt, Artificial Sequence
  Description of Artificial Sequence: Synthetic oligonucleotide
ggcuccuaacuagcugaaucuuccaau

SEQ ID NO: 35656 - RNA, 27 nt, Artificial Sequence
  Description of Artificial Sequence: Synthetic oligonucleotide
guggauauugacuaggagaguuuaaaa

SEQ ID NO: 35657 - RNA, 27 nt, Artificial Sequence
  Description of Artificial Sequence: Synthetic oligonucleotide
ugugacugaacauaacuguaggcugaa

SEQ ID NO: 35658 - RNA, 27 nt, Artificial Sequence
  Description of Artificial Sequence: Synthetic oligonucleotide
guaugugugugugacugaacauaacug

SEQ ID NO: 35659 - RNA, 27 nt, Artificial Sequence
  Description of Artificial Sequence: Synthetic oligonucleotide
aagcaaaaggaacauuuuguaugugug

SEQ ID NO: 35660 - RNA, 27 nt, Artificial Sequence
  Description of Artificial Sequence: Synthetic oligonucleotide
aaaaauuacuuuaaaagcaaaaggaac

SEQ ID NO: 35661 - RNA, 27 nt, Artificial Sequence
  Description of Artificial Sequence: Synthetic oligonucleotide
ccauugacuguugcuucacaggucaga

SEQ ID NO: 35662 - RNA, 27 nt, Artificial Sequence
  Description of Artificial Sequence: Synthetic oligonucleotide
auugguuugucgaugugugagauaguu

SEQ ID NO: 35663 - RNA, 27 nt, Artificial Sequence
  Description of Artificial Sequence: Synthetic oligonucleotide
agugguagcaguacaauugaggacaag

SEQ ID NO: 35664 - RNA, 27 nt, Artificial Sequence
  Description of Artificial Sequence: Synthetic oligonucleotide
uaagaccgcuugccagcuacgguuuca

SEQ ID NO: 35665 - RNA, 27 nt, Artificial Sequence
  Description of Artificial Sequence: Synthetic oligonucleotide
agccgguaagaccgcuugccagcuacg

SEQ ID NO: 35666 - RNA, 27 nt, Artificial Sequence
  Description of Artificial Sequence: Synthetic oligonucleotide
gguaacccaucuuuuaaccauacaacu

SEQ ID NO: 35667 - RNA, 27 nt, Artificial Sequence
  Description of Artificial Sequence: Synthetic oligonucleotide
ucgcagguaacccaucuuuuaaccaua

SEQ ID NO: 35668 - RNA, 27 nt, Artificial Sequence
  Description of Artificial Sequence: Synthetic oligonucleotide
cucagcaagauuguauaauucccugca

SEQ ID NO: 35669 - RNA, 27 nt, Artificial Sequence
  Description of Artificial Sequence: Synthetic oligonucleotide
acuguuuuaugcucagcaagauuguau

SEQ ID NO: 35670 - RNA, 27 nt, Artificial Sequence
  Description of Artificial Sequence: Synthetic oligonucleotide
aggauaaaggacucuucauuauuggaa

SEQ ID NO: 35671 - RNA, 27 nt, Artificial Sequence
  Description of Artificial Sequence: Synthetic oligonucleotide
caacuugcguuggaacauccaaagugu

SEQ ID NO: 35672 - RNA, 27 nt, Artificial Sequence
  Description of Artificial Sequence: Synthetic oligonucleotide
augguuucaguuuaguggaagcauuua

SEQ ID NO: 35673 - RNA, 27 nt, Artificial Sequence
  Description of Artificial Sequence: Synthetic oligonucleotide
auauuuaacaaagucaaacuuucucac

SEQ ID NO: 35674 - RNA, 27 nt, Artificial Sequence
  Description of Artificial Sequence: Synthetic oligonucleotide
aacuuuuaauauacaguaguucuuuuc

SEQ ID NO: 35675 - RNA, 27 nt, Artificial Sequence
  Description of Artificial Sequence: Synthetic oligonucleotide
guuaagucaaaacccguauuucuaaag

SEQ ID NO: 35676 - RNA, 27 nt, Artificial Sequence
  Description of Artificial Sequence: Synthetic oligonucleotide
gugcugaguuugcuguacccauguuga

SEQ ID NO: 35677 - RNA, 27 nt, Artificial Sequence
  Description of Artificial Sequence: Synthetic oligonucleotide
ugaggucagcaucuucugugucuuuac

SEQ ID NO: 35678 - RNA, 27 nt, Artificial Sequence
  Description of Artificial Sequence: Synthetic oligonucleotide
gcgaucugaauaaaccucccuacuagc

SEQ ID NO: 35679 - RNA, 27 nt, Artificial Sequence
  Description of Artificial Sequence: Synthetic oligonucleotide
aucccagaacccugcugcagaaggcca

SEQ ID NO: 35680 - RNA, 27 nt, Artificial Sequence
  Description of Artificial Sequence: Synthetic oligonucleotide
cauaauuuccaauauguaccagaccuu

SEQ ID NO: 35681 - RNA, 27 nt, Artificial Sequence
  Description of Artificial Sequence: Synthetic oligonucleotide
cuagugcuuccaucggaaggacuaggu

SEQ ID NO: 35682 - RNA, 27 nt, Artificial Sequence
  Description of Artificial Sequence: Synthetic oligonucleotide
uccacauaaaaacaauauucacuggga

SEQ ID NO: 35683 - RNA, 27 nt, Artificial Sequence
  Description of Artificial Sequence: Synthetic oligonucleotide
ucuaccaauuccaacuugaauucauug

SEQ ID NO: 35684 - RNA, 27 nt, Artificial Sequence
  Description of Artificial Sequence: Synthetic oligonucleotide
ucuccaagucuaaaucuguguccugag

SEQ ID NO: 35685 - RNA, 27 nt, Artificial Sequence
  Description of Artificial Sequence: Synthetic oligonucleotide
uggaauacuguaacugugcuuugagga

SEQ ID NO: 35686 - RNA, 27 nt, Artificial Sequence
  Description of Artificial Sequence: Synthetic oligonucleotide
uuaauucaucagugguggcagugguag

SEQ ID NO: 35687 - RNA, 27 nt, Artificial Sequence
  Description of Artificial Sequence: Synthetic oligonucleotide
gugaugauguggcacuaguaguuucuu

SEQ ID NO: 35688 - RNA, 27 nt, Artificial Sequence
  Description of Artificial Sequence: Synthetic oligonucleotide
ucuguuuggugaggcuguccgacuuug

SEQ ID NO: 35689 - RNA, 27 nt, Artificial Sequence
  Description of Artificial Sequence: Synthetic oligonucleotide
ccaucauguuccauuuuucgcuuucuc

SEQ ID NO: 35690 - RNA, 27 nt, Artificial Sequence
  Description of Artificial Sequence: Synthetic oligonucleotide
gcagucuacaugcuaaaucagagggua

SEQ ID NO: 35691 - RNA, 27 nt, Artificial Sequence
  Description of Artificial Sequence: Synthetic oligonucleotide
cauaaauagauccuuaaauagcucaaa

SEQ ID NO: 35692 - RNA, 27 nt, Artificial Sequence
  Description of Artificial Sequence: Synthetic oligonucleotide
ugauaauagugcuuuuucaccuuuuuc

SEQ ID NO: 35693 - RNA, 27 nt, Artificial Sequence
  Description of Artificial Sequence: Synthetic oligonucleotide
gcagaacugauaauagugcuuuuucac

SEQ ID NO: 35694 - RNA, 27 nt, Artificial Sequence
  Description of Artificial Sequence: Synthetic oligonucleotide
guagguuuaaucuuucuuuucagccau

SEQ ID NO: 35695 - RNA, 27 nt, Artificial Sequence
  Description of Artificial Sequence: Synthetic oligonucleotide
agaaggauuuuauuauaaggguuuaau

SEQ ID NO: 35696 - RNA, 27 nt, Artificial Sequence
  Description of Artificial Sequence: Synthetic oligonucleotide
gucuacagcauuggcuaauaguaugaa

SEQ ID NO: 35697 - RNA, 27 nt, Artificial Sequence
  Description of Artificial Sequence: Synthetic oligonucleotide
cuauuccuaucaaaaugcuucugucua

SEQ ID NO: 35698 - RNA, 27 nt, Artificial Sequence
  Description of Artificial Sequence: Synthetic oligonucleotide
ucagggccauuaucuuauuugcucuau

SEQ ID NO: 35699 - RNA, 27 nt, Artificial Sequence
  Description of Artificial Sequence: Synthetic oligonucleotide
ugcuugaggaagagaaaaauguugguc

SEQ ID NO: 35700 - RNA, 27 nt, Artificial Sequence
  Description of Artificial Sequence: Synthetic oligonucleotide
ugggcugaacuuuucucauacuuaaag

SEQ ID NO: 35701 - RNA, 27 nt, Artificial Sequence
  Description of Artificial Sequence: Synthetic oligonucleotide
gguucagcagccaucuuuauuccugcg

SEQ ID NO: 35702 - RNA, 27 nt, Artificial Sequence
  Description of Artificial Sequence: Synthetic oligonucleotide
ugaagagaacuuggucauucaaauuuc

SEQ ID NO: 35703 - RNA, 27 nt, Artificial Sequence
  Description of Artificial Sequence: Synthetic oligonucleotide
cucuaggcuggcuaucuuuauacauac

SEQ ID NO: 35704 - RNA, 27 nt, Artificial Sequence
  Description of Artificial Sequence: Synthetic oligonucleotide
acacuucacagagauaguuacagccau

SEQ ID NO: 35705 - RNA, 27 nt, Artificial Sequence
  Description of Artificial Sequence: Synthetic oligonucleotide
uugaaauuuucucacacuucacagaga

SEQ ID NO: 35706 - RNA, 27 nt, Artificial Sequence
  Description of Artificial Sequence: Synthetic oligonucleotide
ucaggaggauucauuuccuuaaaggaa

SEQ ID NO: 35707 - RNA, 27 nt, Artificial Sequence
  Description of Artificial Sequence: Synthetic oligonucleotide
auaugaugucacuuuuuguauccuuga

SEQ ID NO: 35708 - RNA, 27 nt, Artificial Sequence
  Description of Artificial Sequence: Synthetic oligonucleotide
uaugaugaagauucaaauugcaucuua

SEQ ID NO: 35709 - RNA, 27 nt, Artificial Sequence
  Description of Artificial Sequence: Synthetic oligonucleotide
uuaauagcuagucuucguuuugaacag

SEQ ID NO: 35710 - RNA, 27 nt, Artificial Sequence
  Description of Artificial Sequence: Synthetic oligonucleotide
auuuuuaguagagaugagguuucacca

SEQ ID NO: 35711 - RNA, 27 nt, Artificial Sequence
  Description of Artificial Sequence: Synthetic oligonucleotide
aggcgagauagagcuucucuuucguuc

SEQ ID NO: 35712 - RNA, 27 nt, Artificial Sequence
  Description of Artificial Sequence: Synthetic oligonucleotide
aacuggaccgaaggcgcuuguggagaa

SEQ ID NO: 35713 - RNA, 27 nt, Artificial Sequence
  Description of Artificial Sequence: Synthetic oligonucleotide
gcggcuacaucuuuggaaucuucuccu

SEQ ID NO: 35714 - RNA, 27 nt, Artificial Sequence
  Description of Artificial Sequence: Synthetic oligonucleotide
caagucuccucauugaauccagauugg

SEQ ID NO: 35715 - RNA, 27 nt, Artificial Sequence
  Description of Artificial Sequence: Synthetic oligonucleotide
uccucacuacucucaaaucuguucugg

SEQ ID NO: 35716 - RNA, 27 nt, Artificial Sequence
  Description of Artificial Sequence: Synthetic oligonucleotide
uuuguacucaucugcacagcucuggcu

SEQ ID NO: 35717 - RNA, 27 nt, Artificial Sequence
  Description of Artificial Sequence: Synthetic oligonucleotide
gcccauuaacaacaacaaucugaggug

SEQ ID NO: 35718 - RNA, 27 nt, Artificial Sequence
  Description of Artificial Sequence: Synthetic oligonucleotide
aauaaauuaaaaauaauuaaaauagug

SEQ ID NO: 35719 - RNA, 27 nt, Artificial Sequence
  Description of Artificial Sequence: Synthetic oligonucleotide
cauauuuaaauauuaauaaauuaaaaa

SEQ ID NO: 35720 - RNA, 27 nt, Artificial Sequence
  Description of Artificial Sequence: Synthetic oligonucleotide
gaaacaaaggauauucaaacugcauag

SEQ ID NO: 35721 - RNA, 27 nt, Artificial Sequence
  Description of Artificial Sequence: Synthetic oligonucleotide
caaacacuuagacgccagcagcauggg

SEQ ID NO: 35722 - RNA, 27 nt, Artificial Sequence
  Description of Artificial Sequence: Synthetic oligonucleotide
uuugucacaggugaaaugcacaucuga

SEQ ID NO: 35723 - RNA, 27 nt, Artificial Sequence
  Description of Artificial Sequence: Synthetic oligonucleotide
uaauucagccuggcacagguuuugauc

SEQ ID NO: 35724 - RNA, 27 nt, Artificial Sequence
  Description of Artificial Sequence: Synthetic oligonucleotide
auuguaagaaugacuacccacauucac

SEQ ID NO: 35725 - RNA, 27 nt, Artificial Sequence
  Description of Artificial Sequence: Synthetic oligonucleotide
caauuguaagaaugacuacccacauuc

SEQ ID NO: 35726 - RNA, 27 nt, Artificial Sequence
  Description of Artificial Sequence: Synthetic oligonucleotide
guacacucucugaugcucauuuucaua

SEQ ID NO: 35727 - RNA, 27 nt, Artificial Sequence
  Description of Artificial Sequence: Synthetic oligonucleotide
cugcugaguucuacaugaaaagcaaau

SEQ ID NO: 35728 - RNA, 27 nt, Artificial Sequence
  Description of Artificial Sequence: Synthetic oligonucleotide
uacugaaaauaaauauagaaauacaac

SEQ ID NO: 35729 - RNA, 27 nt, Artificial Sequence
  Description of Artificial Sequence: Synthetic oligonucleotide
uuccauuuaagaaacauuaaucaaaac

SEQ ID NO: 35730 - RNA, 27 nt, Artificial Sequence
  Description of Artificial Sequence: Synthetic oligonucleotide
acaauuuuaggcacuauacacguuguu

SEQ ID NO: 35731 - RNA, 27 nt, Artificial Sequence
  Description of Artificial Sequence: Synthetic oligonucleotide
ccagauguuaguagccaaggauauggu

SEQ ID NO: 35732 - RNA, 27 nt, Artificial Sequence
  Description of Artificial Sequence: Synthetic oligonucleotide
agcucacagucuccagauguuaguagc

SEQ ID NO: 35733 - RNA, 27 nt, Artificial Sequence
  Description of Artificial Sequence: Synthetic oligonucleotide
auuaauaaaaagcacacaacuuauggc

SEQ ID NO: 35734 - RNA, 27 nt, Artificial Sequence
  Description of Artificial Sequence: Synthetic oligonucleotide
aauguaagaagagccaaaaugaugcau

SEQ ID NO: 35735 - RNA, 27 nt, Artificial Sequence
  Description of Artificial Sequence: Synthetic oligonucleotide
acauuuuuacaaauguaagaagagcca

SEQ ID NO: 35736 - RNA, 27 nt, Artificial Sequence
  Description of Artificial Sequence: Synthetic oligonucleotide
aauaugaauuaagaugaccuaaucugu

SEQ ID NO: 35737 - RNA, 27 nt, Artificial Sequence
  Description of Artificial Sequence: Synthetic oligonucleotide
ucaugauuaguucuuucaauuccaucc

SEQ ID NO: 35738 - RNA, 27 nt, Artificial Sequence
  Description of Artificial Sequence: Synthetic oligonucleotide
cccaagagcagaaggaaugagugugca

SEQ ID NO: 35739 - RNA, 27 nt, Artificial Sequence
  Description of Artificial Sequence: Synthetic oligonucleotide
cucaaagcuacugguuaccucuacacc

SEQ ID NO: 35740 - RNA, 27 nt, Artificial Sequence
  Description of Artificial Sequence: Synthetic oligonucleotide
ugaaauauuacguggcaugugguuggg

SEQ ID NO: 35741 - RNA, 27 nt, Artificial Sequence
  Description of Artificial Sequence: Synthetic oligonucleotide
agugaagagaauaacuuguuuccgaag

SEQ ID NO: 35742 - RNA, 27 nt, Artificial Sequence
  Description of Artificial Sequence: Synthetic oligonucleotide
uuucuuagcauuaguuauugggaguga

SEQ ID NO: 35743 - RNA, 27 nt, Artificial Sequence
  Description of Artificial Sequence: Synthetic oligonucleotide
uugauuuucagcauuucuuagcauuag

SEQ ID NO: 35744 - RNA, 27 nt, Artificial Sequence
  Description of Artificial Sequence: Synthetic oligonucleotide
aaaguaaucauauuuagagaaagacag

SEQ ID NO: 35745 - RNA, 27 nt, Artificial Sequence
  Description of Artificial Sequence: Synthetic oligonucleotide
uguagaacaaaaugccugaaauucagc

SEQ ID NO: 35746 - RNA, 27 nt, Artificial Sequence
  Description of Artificial Sequence: Synthetic oligonucleotide
gagagucccgggugagagggaaucgcc

SEQ ID NO: 35747 - RNA, 27 nt, Artificial Sequence
  Description of Artificial Sequence: Synthetic oligonucleotide
cuuuacuuuaaagguucacuuuccuug

SEQ ID NO: 35748 - RNA, 27 nt, Artificial Sequence
  Description of Artificial Sequence: Synthetic oligonucleotide
ccaggcuuccagagcaugcagccuccu

SEQ ID NO: 35749 - RNA, 27 nt, Artificial Sequence
  Description of Artificial Sequence: Synthetic oligonucleotide
cucucuuuuguuuucuguucagagaaa

SEQ ID NO: 35750 - RNA, 27 nt, Artificial Sequence
  Description of Artificial Sequence: Synthetic oligonucleotide
cggcauaacugauuacagccaaguuca

SEQ ID NO: 35751 - RNA, 27 nt, Artificial Sequence
  Description of Artificial Sequence: Synthetic oligonucleotide
uggacuucuuuuaauuuuggcuucuuc

SEQ ID NO: 35752 - RNA, 27 nt, Artificial Sequence
  Description of Artificial Sequence: Synthetic oligonucleotide
uaaccucaccuggacuucuuuuaauuu

SEQ ID NO: 35753 - RNA, 27 nt, Artificial Sequence
  Description of Artificial Sequence: Synthetic oligonucleotide
guccucuucccgauaauccggauucag

SEQ ID NO: 35754 - RNA, 27 nt, Artificial Sequence
  Description of Artificial Sequence: Synthetic oligonucleotide
acaauacuugcuuugaugucacauuaa

SEQ ID NO: 35755 - RNA, 27 nt, Artificial Sequence
  Description of Artificial Sequence: Synthetic oligonucleotide
gagugcuacaauacuugcuuugauguc

SEQ ID NO: 35756 - RNA, 27 nt, Artificial Sequence
  Description of Artificial Sequence: Synthetic oligonucleotide
auuugugguuuuguuuucucucucucu

SEQ ID NO: 35757 - RNA, 27 nt, Artificial Sequence
  Description of Artificial Sequence: Synthetic oligonucleotide
uguaugggcuuaaauacuacagcgagg

SEQ ID NO: 35758 - RNA, 27 nt, Artificial Sequence
  Description of Artificial Sequence: Synthetic oligonucleotide
cuguaugggcuuaaauacuacagcgag

SEQ ID NO: 35759 - RNA, 27 nt, Artificial Sequence
  Description of Artificial Sequence: Synthetic oligonucleotide
ggaagguuucuguaugggcuuaaauac

SEQ ID NO: 35760 - RNA, 27 nt, Artificial Sequence
  Description of Artificial Sequence: Synthetic oligonucleotide
guagguauaccauguuuauuuuaauac

SEQ ID NO: 35761 - RNA, 27 nt, Artificial Sequence
  Description of Artificial Sequence: Synthetic oligonucleotide
uccgaaaacuggccgaucagaacagcc

SEQ ID NO: 35762 - RNA, 27 nt, Artificial Sequence
  Description of Artificial Sequence: Synthetic oligonucleotide
cccuguuccaaaguucaaauuauuugu

SEQ ID NO: 35763 - RNA, 27 nt, Artificial Sequence
  Description of Artificial Sequence: Synthetic oligonucleotide
acuggaaaguuaaauuaaggucgcaau

SEQ ID NO: 35764 - RNA, 27 nt, Artificial Sequence
  Description of Artificial Sequence: Synthetic oligonucleotide
caaaaccaaacuuuagcuuucucagcc

SEQ ID NO: 35765 - RNA, 27 nt, Artificial Sequence
  Description of Artificial Sequence: Synthetic oligonucleotide
uacagugggaaguagcaucuuuacuuu

SEQ ID NO: 35766 - RNA, 27 nt, Artificial Sequence
  Description of Artificial Sequence: Synthetic oligonucleotide
ucauaugguaucagcaauuaagcagua

SEQ ID NO: 35767 - RNA, 27 nt, Artificial Sequence
  Description of Artificial Sequence: Synthetic oligonucleotide
cagcccauguuucauucauaugguauc

SEQ ID NO: 35768 - RNA, 27 nt, Artificial Sequence
  Description of Artificial Sequence: Synthetic oligonucleotide
uaugaaaaaguuggauaagaaaguugg

SEQ ID NO: 35769 - RNA, 27 nt, Artificial Sequence
  Description of Artificial Sequence: Synthetic oligonucleotide
uccggccucaugaugucaugcaaggcu

SEQ ID NO: 35770 - RNA, 27 nt, Artificial Sequence
  Description of Artificial Sequence: Synthetic oligonucleotide
acaaaugcagucauauacaaauucagg

SEQ ID NO: 35771 - RNA, 27 nt, Artificial Sequence
  Description of Artificial Sequence: Synthetic oligonucleotide
gguaguaaacauucuacuaggauucuu

SEQ ID NO: 35772 - RNA, 27 nt, Artificial Sequence
  Description of Artificial Sequence: Synthetic oligonucleotide
uuucaucaaaaaauucuucccuuucug

SEQ ID NO: 35773 - RNA, 27 nt, Artificial Sequence
  Description of Artificial Sequence: Synthetic oligonucleotide
aaauucacacacuggcaugccgauagc

SEQ ID NO: 35774 - RNA, 27 nt, Artificial Sequence
  Description of Artificial Sequence: Synthetic oligonucleotide
acauacauugcucuacuaugaggugaa

SEQ ID NO: 35775 - RNA, 27 nt, Artificial Sequence
  Description of Artificial Sequence: Synthetic oligonucleotide
uauauaugugcuuuggcaauucuggug

SEQ ID NO: 35776 - RNA, 27 nt, Artificial Sequence
  Description of Artificial Sequence: Synthetic oligonucleotide
ggagaaacuauuacccagaucaccacu

SEQ ID NO: 35777 - RNA, 27 nt, Artificial Sequence
  Description of Artificial Sequence: Synthetic oligonucleotide
auuuggagaaacuauuacccagaucac

SEQ ID NO: 35778 - RNA, 27 nt, Artificial Sequence
  Description of Artificial Sequence: Synthetic oligonucleotide
uuucuaggaaguauucaucacauccac

SEQ ID NO: 35779 - RNA, 27 nt, Artificial Sequence
  Description of Artificial Sequence: Synthetic oligonucleotide
cauauaugguguagcuguggaaaugcg

SEQ ID NO: 35780 - RNA, 27 nt, Artificial Sequence
  Description of Artificial Sequence: Synthetic oligonucleotide
cuccauucauauaugguguagcugugg

SEQ ID NO: 35781 - RNA, 27 nt, Artificial Sequence
  Description of Artificial Sequence: Synthetic oligonucleotide
aucuucuucucguguaagaacugcagc

SEQ ID NO: 35782 - RNA, 27 nt, Artificial Sequence
  Description of Artificial Sequence: Synthetic oligonucleotide
ucccuguaaaugaucuucuucucgugu

SEQ ID NO: 35783 - RNA, 27 nt, Artificial Sequence
  Description of Artificial Sequence: Synthetic oligonucleotide
gucccuguaaaugaucuucuucucgug

SEQ ID NO: 35784 - RNA, 27 nt, Artificial Sequence
  Description of Artificial Sequence: Synthetic oligonucleotide
ucaggucccuguaaaugaucuucuucu

SEQ ID NO: 35785 - RNA, 27 nt, Artificial Sequence
  Description of Artificial Sequence: Synthetic oligonucleotide
gaugcagucaaacaccucuuccucugu

SEQ ID NO: 35786 - RNA, 27 nt, Artificial Sequence
  Description of Artificial Sequence: Synthetic oligonucleotide
cgaugcagucaaacaccucuuccucug

SEQ ID NO: 35787 - RNA, 27 nt, Artificial Sequence
  Description of Artificial Sequence: Synthetic oligonucleotide
cccugugaacucgcccucaaaguagcg

SEQ ID NO: 35788 - RNA, 27 nt, Artificial Sequence
  Description of Artificial Sequence: Synthetic oligonucleotide
ggacagaggugccaggagaugcccuca

SEQ ID NO: 35789 - RNA, 27 nt, Artificial Sequence
  Description of Artificial Sequence: Synthetic oligonucleotide
uuaaaaagacaaaccauaucacuccuu

SEQ ID NO: 35790 - RNA, 27 nt, Artificial Sequence
  Description of Artificial Sequence: Synthetic oligonucleotide
cuuaaaaagacaaaccauaucacuccu

SEQ ID NO: 35791 - RNA, 27 nt, Artificial Sequence
  Description of Artificial Sequence: Synthetic oligonucleotide
gacaaccuuuaggaucuuuacugcaac

SEQ ID NO: 35792 - RNA, 27 nt, Artificial Sequence
  Description of Artificial Sequence: Synthetic oligonucleotide
gucgacaaccuuuaggaucuuuacugc

SEQ ID NO: 35793 - RNA, 27 nt, Artificial Sequence
  Description of Artificial Sequence: Synthetic oligonucleotide
acaauugccagguuguccuuugucaug

SEQ ID NO: 35794 - RNA, 27 nt, Artificial Sequence
  Description of Artificial Sequence: Synthetic oligonucleotide
ccucgcaccacugggucacaauugcca

SEQ ID NO: 35795 - RNA, 27 nt, Artificial Sequence
  Description of Artificial Sequence: Synthetic oligonucleotide
auuucaugucucuauggaugauguucu

SEQ ID NO: 35796 - RNA, 27 nt, Artificial Sequence
  Description of Artificial Sequence: Synthetic oligonucleotide
uggagaaauauauuguuggauuucaug

SEQ ID NO: 35797 - RNA, 27 nt, Artificial Sequence
  Description of Artificial Sequence: Synthetic oligonucleotide
agccuucauggagaaauauauuguugg

SEQ ID NO: 35798 - RNA, 27 nt, Artificial Sequence
  Description of Artificial Sequence: Synthetic oligonucleotide
accacuccagcgugacuuuacuguugc

SEQ ID NO: 35799 - RNA, 27 nt, Artificial Sequence
  Description of Artificial Sequence: Synthetic oligonucleotide
ccucucuuccuuuacuuucuucacaca

SEQ ID NO: 35800 - RNA, 27 nt, Artificial Sequence
  Description of Artificial Sequence: Synthetic oligonucleotide
gcccgaugcaaggauggcucggaagcg

SEQ ID NO: 35801 - RNA, 27 nt, Artificial Sequence
  Description of Artificial Sequence: Synthetic oligonucleotide
cacaguaggauauucaaccuccauuuc

SEQ ID NO: 35802 - RNA, 27 nt, Artificial Sequence
  Description of Artificial Sequence: Synthetic oligonucleotide
uuacacaguaggauauucaaccuccau

SEQ ID NO: 35803 - RNA, 27 nt, Artificial Sequence
  Description of Artificial Sequence: Synthetic oligonucleotide
uacacuacaagggaaaacucaaaaucu

SEQ ID NO: 35804 - RNA, 27 nt, Artificial Sequence
  Description of Artificial Sequence: Synthetic oligonucleotide
caaucaacaaagaacaaacaggauaaa

SEQ ID NO: 35805 - RNA, 27 nt, Artificial Sequence
  Description of Artificial Sequence: Synthetic oligonucleotide
uuucaaucaacaaagaacaaacaggau

SEQ ID NO: 35806 - RNA, 27 nt, Artificial Sequence
  Description of Artificial Sequence: Synthetic oligonucleotide
auggaagaaaaagaaggcuguagagaa

SEQ ID NO: 35807 - RNA, 27 nt, Artificial Sequence
  Description of Artificial Sequence: Synthetic oligonucleotide
uagaaggaagauuagcuauggaagaaa

SEQ ID NO: 35808 - RNA, 27 nt, Artificial Sequence
  Description of Artificial Sequence: Synthetic oligonucleotide
augaagcauucaacaggaagauuauuu

SEQ ID NO: 35809 - RNA, 27 nt, Artificial Sequence
  Description of Artificial Sequence: Synthetic oligonucleotide
caugaagcauucaacaggaagauuauu

SEQ ID NO: 35810 - RNA, 27 nt, Artificial Sequence
  Description of Artificial Sequence: Synthetic oligonucleotide
ucaaaguagaauucaagucaugaagca

SEQ ID NO: 35811 - RNA, 27 nt, Artificial Sequence
  Description of Artificial Sequence: Synthetic oligonucleotide
gucuguaguugcuucucucccucuuag

SEQ ID NO: 35812 - RNA, 27 nt, Artificial Sequence
  Description of Artificial Sequence: Synthetic oligonucleotide
guugaccuuggucugguaggagacggc

SEQ ID NO: 35813 - RNA, 27 nt, Artificial Sequence
  Description of Artificial Sequence: Synthetic oligonucleotide
gucgagauagucgggccgauugaucuc

SEQ ID NO: 35814 - RNA, 27 nt, Artificial Sequence
  Description of Artificial Sequence: Synthetic oligonucleotide
guuugggaagguuggauguucguccuc

SEQ ID NO: 35815 - RNA, 27 nt, Artificial Sequence
  Description of Artificial Sequence: Synthetic oligonucleotide
aguucuaagcuuggguuccgacccuaa

SEQ ID NO: 35816 - RNA, 27 nt, Artificial Sequence
  Description of Artificial Sequence: Synthetic oligonucleotide
uuaaaguucuaagcuuggguuccgacc

SEQ ID NO: 35817 - RNA, 27 nt, Artificial Sequence
  Description of Artificial Sequence: Synthetic oligonucleotide
guugcuuaaaguucuaagcuuggguuc

SEQ ID NO: 35818 - RNA, 27 nt, Artificial Sequence
  Description of Artificial Sequence: Synthetic oligonucleotide
gugguggucuuguugcuuaaaguucua

SEQ ID NO: 35819 - RNA, 27 nt, Artificial Sequence
  Description of Artificial Sequence: Synthetic oligonucleotide
acuuuauuucucgccacugaauaguag

SEQ ID NO: 35820 - RNA, 27 nt, Artificial Sequence
  Description of Artificial Sequence: Synthetic oligonucleotide
aacuuuauuucucgccacugaauagua

SEQ ID NO: 35821 - RNA, 27 nt, Artificial Sequence
  Description of Artificial Sequence: Synthetic oligonucleotide
ggaucauuuccuguuaucuguguuugu

SEQ ID NO: 35822 - RNA, 27 nt, Artificial Sequence
  Description of Artificial Sequence: Synthetic oligonucleotide
guuucauuucuucucuuuucuuaaggc

SEQ ID NO: 35823 - RNA, 27 nt, Artificial Sequence
  Description of Artificial Sequence: Synthetic oligonucleotide
ggaggauggaaacacacuccuucaguu

SEQ ID NO: 35824 - RNA, 27 nt, Artificial Sequence
  Description of Artificial Sequence: Synthetic oligonucleotide
ucaaagauuuucagucccgcggugaca

SEQ ID NO: 35825 - RNA, 27 nt, Artificial Sequence
  Description of Artificial Sequence: Synthetic oligonucleotide
ccugaacggcacgcuuauuucugcugu

SEQ ID NO: 35826 - RNA, 27 nt, Artificial Sequence
  Description of Artificial Sequence: Synthetic oligonucleotide
cuucuggacccugaacggcacgcuuau

SEQ ID NO: 35827 - RNA, 27 nt, Artificial Sequence
  Description of Artificial Sequence: Synthetic oligonucleotide
caagcagucuugagugacuguuucuuc

SEQ ID NO: 35828 - RNA, 27 nt, Artificial Sequence
  Description of Artificial Sequence: Synthetic oligonucleotide
ccaaagacauggaccuucuuccucuga

SEQ ID NO: 35829 - RNA, 27 nt, Artificial Sequence
  Description of Artificial Sequence: Synthetic oligonucleotide
guguuucaggcauauuuugaauacauc

SEQ ID NO: 35830 - RNA, 27 nt, Artificial Sequence
  Description of Artificial Sequence: Synthetic oligonucleotide
gagguacagagaaagggaggaaaauag

SEQ ID NO: 35831 - RNA, 27 nt, Artificial Sequence
  Description of Artificial Sequence: Synthetic oligonucleotide
ucuugucuugcucuaucuuucuuuggu

SEQ ID NO: 35832 - RNA, 27 nt, Artificial Sequence
  Description of Artificial Sequence: Synthetic oligonucleotide
uuucuugucuugcucuaucuuucuuug

SEQ ID NO: 35833 - RNA, 27 nt, Artificial Sequence
  Description of Artificial Sequence: Synthetic oligonucleotide
ggaucuuguacaaacaaaugcuuucuc

SEQ ID NO: 35834 - RNA, 27 nt, Artificial Sequence
  Description of Artificial Sequence: Synthetic oligonucleotide
ucugcaaguacguucguuuaacucaag

SEQ ID NO: 35835 - RNA, 27 nt, Artificial Sequence
  Description of Artificial Sequence: Synthetic oligonucleotide
ucuguaucgaucguucuguaucagucu

SEQ ID NO: 35836 - RNA, 27 nt, Artificial Sequence
  Description of Artificial Sequence: Synthetic oligonucleotide
auuuauuuuuauauauauauaauauau

SEQ ID NO: 35837 - RNA, 27 nt, Artificial Sequence
  Description of Artificial Sequence: Synthetic oligonucleotide
auauuuauuuuuauauauauauaauau

SEQ ID NO: 35838 - RNA, 27 nt, Artificial Sequence
  Description of Artificial Sequence: Synthetic oligonucleotide
cacagcagucaaauacauccagugaag

SEQ ID NO: 35839 - RNA, 27 nt, Artificial Sequence
  Description of Artificial Sequence: Synthetic oligonucleotide
gucucucaucuccuccucuucccuguc

SEQ ID NO: 35840 - RNA, 27 nt, Artificial Sequence
  Description of Artificial Sequence: Synthetic oligonucleotide
ccaagugggacaaaaaaaagaucaugc

SEQ ID NO: 35841 - RNA, 14 nt, Artificial Sequence
  Description of Artificial Sequence: Synthetic oligonucleotide
guauuuugaugagg

SEQ ID NO: 35842 - RNA, 12 nt, Artificial Sequence
  Description of Artificial Sequence: Synthetic oligonucleotide
ggcccagaugau

SEQ ID NO: 35843 - RNA, 14 nt, Artificial Sequence
  Description of Artificial Sequence: Synthetic oligonucleotide
gggaagaaaacuau

SEQ ID NO: 35844 - RNA, 15 nt, Artificial Sequence
  Description of Artificial Sequence: Synthetic oligonucleotide
guuuuaauuuauuuc

SEQ ID NO: 35845 - RNA, 12 nt, Artificial Sequence
  Description of Artificial Sequence: Synthetic oligonucleotide
acguagggaaau

SEQ ID NO: 35846 - RNA, 12 nt, Artificial Sequence
  Description of Artificial Sequence: Synthetic oligonucleotide
ccaggguuuacc

SEQ ID NO: 35847 - RNA, 11 nt, Artificial Sequence
  Description of Artificial Sequence: Synthetic oligonucleotide
agcaagguuua

SEQ ID NO: 35848 - RNA, 12 nt, Artificial Sequence
  Description of Artificial Sequence: Synthetic oligonucleotide
uguauuauguug

SEQ ID NO: 35849 - RNA, 15 nt, Artificial Sequence
  Description of Artificial Sequence: Synthetic oligonucleotide
uuuuaaucuuuguga

SEQ ID NO: 35850 - RNA, 14 nt, Artificial Sequence
  Description of Artificial Sequence: Synthetic oligonucleotide
uuaaucuuugugac

SEQ ID NO: 35851 - RNA, 13 nt, Artificial Sequence
  Description of Artificial Sequence: Synthetic oligonucleotide
gcugcuuaugucu

SEQ ID NO: 35852 - RNA, 14 nt, Artificial Sequence
  Description of Artificial Sequence: Synthetic oligonucleotide
aaguguuucagaag

SEQ ID NO: 35853 - RNA, 13 nt, Artificial Sequence
  Description of Artificial Sequence: Synthetic oligonucleotide
gaccaucaauaag

SEQ ID NO: 35854 - RNA, 13 nt, Artificial Sequence
  Description of Artificial Sequence: Synthetic oligonucleotide
ccaucaauaagga

SEQ ID NO: 35855 - RNA, 14 nt, Artificial Sequence
  Description of Artificial Sequence: Synthetic oligonucleotide
ucaauaaggaagaa

SEQ ID NO: 35856 - RNA, 14 nt, Artificial Sequence
  Description of Artificial Sequence: Synthetic oligonucleotide
aauaaggaagaagc

SEQ ID NO: 35857 - RNA, 13 nt, Artificial Sequence
  Description of Artificial Sequence: Synthetic oligonucleotide
aggaagaagcccu

SEQ ID NO: 35858 - RNA, 13 nt, Artificial Sequence
  Description of Artificial Sequence: Synthetic oligonucleotide
gcauaacuaaagg

SEQ ID NO: 35859 - RNA, 14 nt, Artificial Sequence
  Description of Artificial Sequence: Synthetic oligonucleotide
cauaacuaaaggug

SEQ ID NO: 35860 - RNA, 12 nt, Artificial Sequence
  Description of Artificial Sequence: Synthetic oligonucleotide
cuacaucacgcc

SEQ ID NO: 35861 - RNA, 12 nt, Artificial Sequence
  Description of Artificial Sequence: Synthetic oligonucleotide
acuggauuuaag

SEQ ID NO: 35862 - RNA, 12 nt, Artificial Sequence
  Description of Artificial Sequence: Synthetic oligonucleotide
cuggauuuaagc

SEQ ID NO: 35863 - RNA, 13 nt, Artificial Sequence
  Description of Artificial Sequence: Synthetic oligonucleotide
gauuuaagcagag

SEQ ID NO: 35864 - RNA, 13 nt, Artificial Sequence
  Description of Artificial Sequence: Synthetic oligonucleotide
auuuaagcagagu

SEQ ID NO: 35865 - RNA, 13 nt, Artificial Sequence
  Description of Artificial Sequence: Synthetic oligonucleotide
uuaagcagaguuc

SEQ ID NO: 35866 - RNA, 13 nt, Artificial Sequence
  Description of Artificial Sequence: Synthetic oligonucleotide
uaagcagaguuca

SEQ ID NO: 35867 - RNA, 14 nt, Artificial Sequence
  Description of Artificial Sequence: Synthetic oligonucleotide
agcagaguucaaaa

SEQ ID NO: 35868 - RNA, 12 nt, Artificial Sequence
  Description of Artificial Sequence: Synthetic oligonucleotide
cucagggucuga

SEQ ID NO: 35869 - RNA, 13 nt, Artificial Sequence
  Description of Artificial Sequence: Synthetic oligonucleotide
caagcaacuacau

SEQ ID NO: 35870 - RNA, 12 nt, Artificial Sequence
  Description of Artificial Sequence: Synthetic oligonucleotide
aucaauggcagc

SEQ ID NO: 35871 - RNA, 11 nt, Artificial Sequence
  Description of Artificial Sequence: Synthetic oligonucleotide
uuccagcccac

SEQ ID NO: 35872 - RNA, 12 nt, Artificial Sequence
  Description of Artificial Sequence: Synthetic oligonucleotide
cagcugagaaug

SEQ ID NO: 35873 - RNA, 13 nt, Artificial Sequence
  Description of Artificial Sequence: Synthetic oligonucleotide
aacguaucuccua

SEQ ID NO: 35874 - RNA, 14 nt, Artificial Sequence
  Description of Artificial Sequence: Synthetic oligonucleotide
ccuaaaauaauuuc

SEQ ID NO: 35875 - RNA, 13 nt, Artificial Sequence
  Description of Artificial Sequence: Synthetic oligonucleotide
uggaagauucagc

SEQ ID NO: 35876 - RNA, 12 nt, Artificial Sequence
  Description of Artificial Sequence: Synthetic oligonucleotide
uuaaacucuccu

SEQ ID NO: 35877 - RNA, 12 nt, Artificial Sequence
  Description of Artificial Sequence: Synthetic oligonucleotide
cagccuacaguu

SEQ ID NO: 35878 - RNA, 13 nt, Artificial Sequence
  Description of Artificial Sequence: Synthetic oligonucleotide
guuauguucaguc

SEQ ID NO: 35879 - RNA, 13 nt, Artificial Sequence
  Description of Artificial Sequence: Synthetic oligonucleotide
cacauacaaaaug

SEQ ID NO: 35880 - RNA, 9 nt, Artificial Sequence
  Description of Artificial Sequence: Synthetic oligonucleotide
uccuuuugc

SEQ ID NO: 35881 - RNA, 12 nt, Artificial Sequence
  Description of Artificial Sequence: Synthetic oligonucleotide
ugaccugugaag

SEQ ID NO: 35882 - RNA, 12 nt, Artificial Sequence
  Description of Artificial Sequence: Synthetic oligonucleotide
cuaucucacaca

SEQ ID NO: 35883 - RNA, 13 nt, Artificial Sequence
  Description of Artificial Sequence: Synthetic oligonucleotide
uguccucaauugu

SEQ ID NO: 35884 - RNA, 12 nt, Artificial Sequence
  Description of Artificial Sequence: Synthetic oligonucleotide
aaaccguagcug

SEQ ID NO: 35885 - RNA, 12 nt, Artificial Sequence
  Description of Artificial Sequence: Synthetic oligonucleotide
uagcuggcaagc

SEQ ID NO: 35886 - RNA, 14 nt, Artificial Sequence
  Description of Artificial Sequence: Synthetic oligonucleotide
uuguaugguuaaaa

SEQ ID NO: 35887 - RNA, 14 nt, Artificial Sequence
  Description of Artificial Sequence: Synthetic oligonucleotide
ugguuaaaagaugg

SEQ ID NO: 35888 - RNA, 13 nt, Artificial Sequence
  Description of Artificial Sequence: Synthetic oligonucleotide
cagggaauuauac

SEQ ID NO: 35889 - RNA, 12 nt, Artificial Sequence
  Description of Artificial Sequence: Synthetic oligonucleotide
acaaucuugcug

SEQ ID NO: 35890 - RNA, 13 nt, Artificial Sequence
  Description of Artificial Sequence: Synthetic oligonucleotide
ccaauaaugaaga

SEQ ID NO: 35891 - RNA, 13 nt, Artificial Sequence
  Description of Artificial Sequence: Synthetic oligonucleotide
acuuuggauguuc

SEQ ID NO: 35892 - RNA, 12 nt, Artificial Sequence
  Description of Artificial Sequence: Synthetic oligonucleotide
aaugcuuccacu

SEQ ID NO: 35893 - RNA, 11 nt, Artificial Sequence
  Description of Artificial Sequence: Synthetic oligonucleotide
gagaaaguuug

SEQ ID NO: 35894 - RNA, 11 nt, Artificial Sequence
  Description of Artificial Sequence: Synthetic oligonucleotide
aaagaacuacu

SEQ ID NO: 35895 - RNA, 12 nt, Artificial Sequence
  Description of Artificial Sequence: Synthetic oligonucleotide
uuagaaauacgg

SEQ ID NO: 35896 - RNA, 12 nt, Artificial Sequence
  Description of Artificial Sequence: Synthetic oligonucleotide
aacauggguaca

SEQ ID NO: 35897 - RNA, 14 nt, Artificial Sequence
  Description of Artificial Sequence: Synthetic oligonucleotide
aaagacacagaaga

SEQ ID NO: 35898 - RNA, 11 nt, Artificial Sequence
  Description of Artificial Sequence: Synthetic oligonucleotide
uaguagggagg

SEQ ID NO: 35899 - RNA, 12 nt, Artificial Sequence
  Description of Artificial Sequence: Synthetic oligonucleotide
gccuucugcagc

SEQ ID NO: 35900 - RNA, 10 nt, Artificial Sequence
  Description of Artificial Sequence: Synthetic oligonucleotide
ggucugguac

SEQ ID NO: 35901 - RNA, 12 nt, Artificial Sequence
  Description of Artificial Sequence: Synthetic oligonucleotide
cuaguccuuccg

SEQ ID NO: 35902 - RNA, 12 nt, Artificial Sequence
  Description of Artificial Sequence: Synthetic oligonucleotide
ccagugaauauu

SEQ ID NO: 35903 - RNA, 13 nt, Artificial Sequence
  Description of Artificial Sequence: Synthetic oligonucleotide
augaauucaaguu

SEQ ID NO: 35904 - RNA, 12 nt, Artificial Sequence
  Description of Artificial Sequence: Synthetic oligonucleotide
caggacacagau

SEQ ID NO: 35905 - RNA, 12 nt, Artificial Sequence
  Description of Artificial Sequence: Synthetic oligonucleotide
cucaaagcacag

SEQ ID NO: 35906 - RNA, 10 nt, Artificial Sequence
  Description of Artificial Sequence: Synthetic oligonucleotide
accacugcca

SEQ ID NO: 35907 - RNA, 13 nt, Artificial Sequence
  Description of Artificial Sequence: Synthetic oligonucleotide
gaaacuacuagug

SEQ ID NO: 35908 - RNA, 12 nt, Artificial Sequence
  Description of Artificial Sequence: Synthetic oligonucleotide
aagucggacagc

SEQ ID NO: 35909 - RNA, 13 nt, Artificial Sequence
  Description of Artificial Sequence: Synthetic oligonucleotide
gaaagcgaaaaau

SEQ ID NO: 35910 - RNA, 13 nt, Artificial Sequence
  Description of Artificial Sequence: Synthetic oligonucleotide
cccucugauuuag

SEQ ID NO: 35911 - RNA, 12 nt, Artificial Sequence
  Description of Artificial Sequence: Synthetic oligonucleotide
ugagcuauuuaa

SEQ ID NO: 35912 - RNA, 13 nt, Artificial Sequence
  Description of Artificial Sequence: Synthetic oligonucleotide
aaaaggugaaaaa

SEQ ID NO: 35913 - RNA, 14 nt, Artificial Sequence
  Description of Artificial Sequence: Synthetic oligonucleotide
gaaaaagcacuauu

SEQ ID NO: 35914 - RNA, 12 nt, Artificial Sequence
  Description of Artificial Sequence: Synthetic oligonucleotide
ggcugaaaagaa

SEQ ID NO: 35915 - RNA, 12 nt, Artificial Sequence
  Description of Artificial Sequence: Synthetic oligonucleotide
uaaacccuuaua

SEQ ID NO: 35916 - RNA, 13 nt, Artificial Sequence
  Description of Artificial Sequence: Synthetic oligonucleotide
cauacuauuagcc

SEQ ID NO: 35917 - RNA, 12 nt, Artificial Sequence
  Description of Artificial Sequence: Synthetic oligonucleotide
gacagaagcauu

SEQ ID NO: 35918 - RNA, 14 nt, Artificial Sequence
  Description of Artificial Sequence: Synthetic oligonucleotide
agagcaaauaagau

SEQ ID NO: 35919 - RNA, 14 nt, Artificial Sequence
  Description of Artificial Sequence: Synthetic oligonucleotide
ccaacauuuuucuc

SEQ ID NO: 35920 - RNA, 15 nt, Artificial Sequence
  Description of Artificial Sequence: Synthetic oligonucleotide
uuaaguaugagaaaa

SEQ ID NO: 35921 - RNA, 14 nt, Artificial Sequence
  Description of Artificial Sequence: Synthetic oligonucleotide
caggaauaaagaug

SEQ ID NO: 35922 - RNA, 13 nt, Artificial Sequence
  Description of Artificial Sequence: Synthetic oligonucleotide
aauuugaaugacc

SEQ ID NO: 35923 - RNA, 14 nt, Artificial Sequence
  Description of Artificial Sequence: Synthetic oligonucleotide
auguauaaagauag

SEQ ID NO: 35924 - RNA, 12 nt, Artificial Sequence
  Description of Artificial Sequence: Synthetic oligonucleotide
ggcuguaacuau

SEQ ID NO: 35925 - RNA, 11 nt, Artificial Sequence
  Description of Artificial Sequence: Synthetic oligonucleotide
ucugugaagug

SEQ ID NO: 35926 - RNA, 14 nt, Artificial Sequence
  Description of Artificial Sequence: Synthetic oligonucleotide
ccuuuaaggaaaug

SEQ ID NO: 35927 - RNA, 13 nt, Artificial Sequence
  Description of Artificial Sequence: Synthetic oligonucleotide
aaggauacaaaaa

SEQ ID NO: 35928 - RNA, 12 nt, Artificial Sequence
  Description of Artificial Sequence: Synthetic oligonucleotide
agaugcaauuug

SEQ ID NO: 35929 - RNA, 12 nt, Artificial Sequence
  Description of Artificial Sequence: Synthetic oligonucleotide
guucaaaacgaa

SEQ ID NO: 35930 - RNA, 11 nt, Artificial Sequence
  Description of Artificial Sequence: Synthetic oligonucleotide
gugaaaccuca

SEQ ID NO: 35931 - RNA, 13 nt, Artificial Sequence
  Description of Artificial Sequence: Synthetic oligonucleotide
acgaaagagaagc

SEQ ID NO: 35932 - RNA, 12 nt, Artificial Sequence
  Description of Artificial Sequence: Synthetic oligonucleotide
cuccacaagcgc

SEQ ID NO: 35933 - RNA, 14 nt, Artificial Sequence
  Description of Artificial Sequence: Synthetic oligonucleotide
gagaagauuccaaa

SEQ ID NO: 35934 - RNA, 13 nt, Artificial Sequence
  Description of Artificial Sequence: Synthetic oligonucleotide
aaucuggauucaa

SEQ ID NO: 35935 - RNA, 13 nt, Artificial Sequence
  Description of Artificial Sequence: Synthetic oligonucleotide
agaacagauuuga

SEQ ID NO: 35936 - RNA, 11 nt, Artificial Sequence
  Description of Artificial Sequence: Synthetic oligonucleotide
ccagagcugug

SEQ ID NO: 35937 - RNA, 12 nt, Artificial Sequence
  Description of Artificial Sequence: Synthetic oligonucleotide
ccucagauuguu

SEQ ID NO: 35938 - RNA, 12 nt, Artificial Sequence
  Description of Artificial Sequence: Synthetic oligonucleotide
cuauuuuaauua

SEQ ID NO: 35939 - RNA, 13 nt, Artificial Sequence
  Description of Artificial Sequence: Synthetic oligonucleotide
uuuaauuuauuaa

SEQ ID NO: 35940 - RNA, 12 nt, Artificial Sequence
  Description of Artificial Sequence: Synthetic oligonucleotide
augcaguuugaa

SEQ ID NO: 35941 - RNA, 11 nt, Artificial Sequence
  Description of Artificial Sequence: Synthetic oligonucleotide
caugcugcugg

SEQ ID NO: 35942 - RNA, 13 nt, Artificial Sequence
  Description of Artificial Sequence: Synthetic oligonucleotide
agaugugcauuuc

SEQ ID NO: 35943 - RNA, 12 nt, Artificial Sequence
  Description of Artificial Sequence: Synthetic oligonucleotide
ucaaaaccugug

SEQ ID NO: 35944 - RNA, 11 nt, Artificial Sequence
  Description of Artificial Sequence: Synthetic oligonucleotide
gaaugugggua

SEQ ID NO: 35945 - RNA, 10 nt, Artificial Sequence
  Description of Artificial Sequence: Synthetic oligonucleotide
auguggguag

SEQ ID NO: 35946 - RNA, 13 nt, Artificial Sequence
  Description of Artificial Sequence: Synthetic oligonucleotide
ugaaaaugagcau

SEQ ID NO: 35947 - RNA, 13 nt, Artificial Sequence
  Description of Artificial Sequence: Synthetic oligonucleotide
uugcuuuucaugu

SEQ ID NO: 35948 - RNA, 12 nt, Artificial Sequence
  Description of Artificial Sequence: Synthetic oligonucleotide
uguauuucuaua

SEQ ID NO: 35949 - RNA, 13 nt, Artificial Sequence
  Description of Artificial Sequence: Synthetic oligonucleotide
uuugauuaauguu

SEQ ID NO: 35950 - RNA, 12 nt, Artificial Sequence
  Description of Artificial Sequence: Synthetic oligonucleotide
caacguguauag

SEQ ID NO: 35951 - RNA, 12 nt, Artificial Sequence
  Description of Artificial Sequence: Synthetic oligonucleotide
cauauccuuggc

SEQ ID NO: 35952 - RNA, 13 nt, Artificial Sequence
  Description of Artificial Sequence: Synthetic oligonucleotide
uacuaacaucugg

SEQ ID NO: 35953 - RNA, 11 nt, Artificial Sequence
  Description of Artificial Sequence: Synthetic oligonucleotide
cauaaguugug

SEQ ID NO: 35954 - RNA, 12 nt, Artificial Sequence
  Description of Artificial Sequence: Synthetic oligonucleotide
gcaucauuuugg

SEQ ID NO: 35955 - RNA, 10 nt, Artificial Sequence
  Description of Artificial Sequence: Synthetic oligonucleotide
gcucuucuua

SEQ ID NO: 35956 - RNA, 10 nt, Artificial Sequence
  Description of Artificial Sequence: Synthetic oligonucleotide
agauuagguc

SEQ ID NO: 35957 - RNA, 12 nt, Artificial Sequence
  Description of Artificial Sequence: Synthetic oligonucleotide
auggaauugaaa

SEQ ID NO: 35958 - RNA, 13 nt, Artificial Sequence
  Description of Artificial Sequence: Synthetic oligonucleotide
cacacucauuccu

SEQ ID NO: 35959 - RNA, 12 nt, Artificial Sequence
  Description of Artificial Sequence: Synthetic oligonucleotide
uguagagguaac

SEQ ID NO: 35960 - RNA, 11 nt, Artificial Sequence
  Description of Artificial Sequence: Synthetic oligonucleotide
caaccacaugc

SEQ ID NO: 35961 - RNA, 12 nt, Artificial Sequence
  Description of Artificial Sequence: Synthetic oligonucleotide
ucggaaacaagu

SEQ ID NO: 35962 - RNA, 11 nt, Artificial Sequence
  Description of Artificial Sequence: Synthetic oligonucleotide
acucccaauaa

SEQ ID NO: 35963 - RNA, 13 nt, Artificial Sequence
  Description of Artificial Sequence: Synthetic oligonucleotide
aaugcuaagaaau

SEQ ID NO: 35964 - RNA, 11 nt, Artificial Sequence
  Description of Artificial Sequence: Synthetic oligonucleotide
gucuuucucua

SEQ ID NO: 35965 - RNA, 11 nt, Artificial Sequence
  Description of Artificial Sequence: Synthetic oligonucleotide
ugaauuucagg

SEQ ID NO: 35966 - RNA, 13 nt, Artificial Sequence
  Description of Artificial Sequence: Synthetic oligonucleotide
cgauucccucuca

SEQ ID NO: 35967 - RNA, 11 nt, Artificial Sequence
  Description of Artificial Sequence: Synthetic oligonucleotide
aggaaagugaa

SEQ ID NO: 35968 - RNA, 12 nt, Artificial Sequence
  Description of Artificial Sequence: Synthetic oligonucleotide
gaggcugcaugc

SEQ ID NO: 35969 - RNA, 11 nt, Artificial Sequence
  Description of Artificial Sequence: Synthetic oligonucleotide
ucucugaacag

SEQ ID NO: 35970 - RNA, 12 nt, Artificial Sequence
  Description of Artificial Sequence: Synthetic oligonucleotide
aacuuggcugua

SEQ ID NO: 35971 - RNA, 12 nt, Artificial Sequence
  Description of Artificial Sequence: Synthetic oligonucleotide
agaagccaaaau

SEQ ID NO: 35972 - RNA, 14 nt, Artificial Sequence
  Description of Artificial Sequence: Synthetic oligonucleotide
auuaaaagaagucc

SEQ ID NO: 35973 - RNA, 14 nt, Artificial Sequence
  Description of Artificial Sequence: Synthetic oligonucleotide
gaauccggauuauc

SEQ ID NO: 35974 - RNA, 12 nt, Artificial Sequence
  Description of Artificial Sequence: Synthetic oligonucleotide
aaugugacauca

SEQ ID NO: 35975 - RNA, 13 nt, Artificial Sequence
  Description of Artificial Sequence: Synthetic oligonucleotide
caucaaagcaagu

SEQ ID NO: 35976 - RNA, 11 nt, Artificial Sequence
  Description of Artificial Sequence: Synthetic oligonucleotide
agagagagaaa

SEQ ID NO: 35977 - RNA, 13 nt, Artificial Sequence
  Description of Artificial Sequence: Synthetic oligonucleotide
ucgcuguaguauu

SEQ ID NO: 35978 - RNA, 14 nt, Artificial Sequence
  Description of Artificial Sequence: Synthetic oligonucleotide
cgcuguaguauuua

SEQ ID NO: 35979 - RNA, 13 nt, Artificial Sequence
  Description of Artificial Sequence: Synthetic oligonucleotide
auuuaagcccaua

SEQ ID NO: 35980 - RNA, 15 nt, Artificial Sequence
  Description of Artificial Sequence: Synthetic oligonucleotide
auuaaaauaaacaug

SEQ ID NO: 35981 - RNA, 12 nt, Artificial Sequence
  Description of Artificial Sequence: Synthetic oligonucleotide
cuguucugaucg

SEQ ID NO: 35982 - RNA, 16 nt, Artificial Sequence
  Description of Artificial Sequence: Synthetic oligonucleotide
aaauaauuugaacuuu

SEQ ID NO: 35983 - RNA, 12 nt, Artificial Sequence
  Description of Artificial Sequence: Synthetic oligonucleotide
ugcgaccuuaau

SEQ ID NO: 35984 - RNA, 11 nt, Artificial Sequence
  Description of Artificial Sequence: Synthetic oligonucleotide
cugagaaagcu

SEQ ID NO: 35985 - RNA, 13 nt, Artificial Sequence
  Description of Artificial Sequence: Synthetic oligonucleotide
aguaaagaugcua

SEQ ID NO: 35986 - RNA, 12 nt, Artificial Sequence
  Description of Artificial Sequence: Synthetic oligonucleotide
cugcuuaauugc

SEQ ID NO: 35987 - RNA, 14 nt, Artificial Sequence
  Description of Artificial Sequence: Synthetic oligonucleotide
uaccauaugaauga

SEQ ID NO: 35988 - RNA, 12 nt, Artificial Sequence
  Description of Artificial Sequence: Synthetic oligonucleotide
aacuuucuuauc

SEQ ID NO: 35989 - RNA, 13 nt, Artificial Sequence
  Description of Artificial Sequence: Synthetic oligonucleotide
ccuugcaugacau

SEQ ID NO: 35990 - RNA, 14 nt, Artificial Sequence
  Description of Artificial Sequence: Synthetic oligonucleotide
ugaauuuguauaug

SEQ ID NO: 35991 - RNA, 12 nt, Artificial Sequence
  Description of Artificial Sequence: Synthetic oligonucleotide
gaauccuaguag

SEQ ID NO: 35992 - RNA, 10 nt, Artificial Sequence
  Description of Artificial Sequence: Synthetic oligonucleotide
gaaagggaag

SEQ ID NO: 35993 - RNA, 11 nt, Artificial Sequence
  Description of Artificial Sequence: Synthetic oligonucleotide
uaucggcaugc

SEQ ID NO: 35994 - RNA, 12 nt, Artificial Sequence
  Description of Artificial Sequence: Synthetic oligonucleotide
caccucauagua

SEQ ID NO: 35995 - RNA, 11 nt, Artificial Sequence
  Description of Artificial Sequence: Synthetic oligonucleotide
ccagaauugcc

SEQ ID NO: 35996 - RNA, 11 nt, Artificial Sequence
  Description of Artificial Sequence: Synthetic oligonucleotide
uggugaucugg

SEQ ID NO: 35997 - RNA, 12 nt, Artificial Sequence
  Description of Artificial Sequence: Synthetic oligonucleotide
gaucuggguaau

SEQ ID NO: 35998 - RNA, 12 nt, Artificial Sequence
  Description of Artificial Sequence: Synthetic oligonucleotide
ggaugugaugaa

SEQ ID NO: 35999 - RNA, 12 nt, Artificial Sequence
  Description of Artificial Sequence: Synthetic oligonucleotide
cauuuccacagc

SEQ ID NO: 36000 - RNA, 11 nt, Artificial Sequence
  Description of Artificial Sequence: Synthetic oligonucleotide
acagcuacacc

SEQ ID NO: 36001 - RNA, 12 nt, Artificial Sequence
  Description of Artificial Sequence: Synthetic oligonucleotide
ugcaguucuuac

SEQ ID NO: 36002 - RNA, 12 nt, Artificial Sequence
  Description of Artificial Sequence: Synthetic oligonucleotide
acgagaagaaga

SEQ ID NO: 36003 - RNA, 12 nt, Artificial Sequence
  Description of Artificial Sequence: Synthetic oligonucleotide
cgagaagaagau

SEQ ID NO: 36004 - RNA, 15 nt, Artificial Sequence
  Description of Artificial Sequence: Synthetic oligonucleotide
aagaagaucauuuac

SEQ ID NO: 36005 - RNA, 11 nt, Artificial Sequence
  Description of Artificial Sequence: Synthetic oligonucleotide
agaggaagagg

SEQ ID NO: 36006 - RNA, 12 nt, Artificial Sequence
  Description of Artificial Sequence: Synthetic oligonucleotide
gaggaagaggug

SEQ ID NO: 36007 - RNA, 13 nt, Artificial Sequence
  Description of Artificial Sequence: Synthetic oligonucleotide
cuacuuugagggc

SEQ ID NO: 36008 - RNA, 12 nt, Artificial Sequence
  Description of Artificial Sequence: Synthetic oligonucleotide
agggcaucuccu

SEQ ID NO: 36009 - RNA, 10 nt, Artificial Sequence
  Description of Artificial Sequence: Synthetic oligonucleotide
ggagugauau

SEQ ID NO: 36010 - RNA, 11 nt, Artificial Sequence
  Description of Artificial Sequence: Synthetic oligonucleotide
gagugauaugg

SEQ ID NO: 36011 - RNA, 12 nt, Artificial Sequence
  Description of Artificial Sequence: Synthetic oligonucleotide
ugcaguaaagau

SEQ ID NO: 36012 - RNA, 13 nt, Artificial Sequence
  Description of Artificial Sequence: Synthetic oligonucleotide
aguaaagauccua

SEQ ID NO: 36013 - RNA, 12 nt, Artificial Sequence
  Description of Artificial Sequence: Synthetic oligonucleotide
ugacaaaggaca

SEQ ID NO: 36014 - RNA, 13 nt, Artificial Sequence
  Description of Artificial Sequence: Synthetic oligonucleotide
gcaauugugaccc

SEQ ID NO: 36015 - RNA, 12 nt, Artificial Sequence
  Description of Artificial Sequence: Synthetic oligonucleotide
aacaucauccau

SEQ ID NO: 36016 - RNA, 12 nt, Artificial Sequence
  Description of Artificial Sequence: Synthetic oligonucleotide
ugaaauccaaca

SEQ ID NO: 36017 - RNA, 15 nt, Artificial Sequence
  Description of Artificial Sequence: Synthetic oligonucleotide
aacaauauauuucuc

SEQ ID NO: 36018 - RNA, 14 nt, Artificial Sequence
  Description of Artificial Sequence: Synthetic oligonucleotide
aacaguaaagucac

SEQ ID NO: 36019 - RNA, 14 nt, Artificial Sequence
  Description of Artificial Sequence: Synthetic oligonucleotide
ugugaagaaaguaa

SEQ ID NO: 36020 - RNA, 13 nt, Artificial Sequence
  Description of Artificial Sequence: Synthetic oligonucleotide
cuuccgagccauc

SEQ ID NO: 36021 - RNA, 12 nt, Artificial Sequence
  Description of Artificial Sequence: Synthetic oligonucleotide
aauggagguuga

SEQ ID NO: 36022 - RNA, 12 nt, Artificial Sequence
  Description of Artificial Sequence: Synthetic oligonucleotide
ggagguugaaua

SEQ ID NO: 36023 - RNA, 13 nt, Artificial Sequence
  Description of Artificial Sequence: Synthetic oligonucleotide
auuuugaguuuuc

SEQ ID NO: 36024 - RNA, 12 nt, Artificial Sequence
  Description of Artificial Sequence: Synthetic oligonucleotide
uauccuguuugu

SEQ ID NO: 36025 - RNA, 11 nt, Artificial Sequence
  Description of Artificial Sequence: Synthetic oligonucleotide
ccuguuuguuc

SEQ ID NO: 36026 - RNA, 10 nt, Artificial Sequence
  Description of Artificial Sequence: Synthetic oligonucleotide
cucuacagcc

SEQ ID NO: 36027 - RNA, 12 nt, Artificial Sequence
  Description of Artificial Sequence: Synthetic oligonucleotide
ucuuccauagcu

SEQ ID NO: 36028 - RNA, 12 nt, Artificial Sequence
  Description of Artificial Sequence: Synthetic oligonucleotide
auaaucuuccug

SEQ ID NO: 36029 - RNA, 12 nt, Artificial Sequence
  Description of Artificial Sequence: Synthetic oligonucleotide
uaaucuuccugu

SEQ ID NO: 36030 - RNA, 12 nt, Artificial Sequence
  Description of Artificial Sequence: Synthetic oligonucleotide
cuucaugacuug

SEQ ID NO: 36031 - RNA, 12 nt, Artificial Sequence
  Description of Artificial Sequence: Synthetic oligonucleotide
aagagggagaga

SEQ ID NO: 36032 - RNA, 12 nt, Artificial Sequence
  Description of Artificial Sequence: Synthetic oligonucleotide
cgucuccuacca

SEQ ID NO: 36033 - RNA, 12 nt, Artificial Sequence
  Description of Artificial Sequence: Synthetic oligonucleotide
gaucaaucggcc

SEQ ID NO: 36034 - RNA, 12 nt, Artificial Sequence
  Description of Artificial Sequence: Synthetic oligonucleotide
ggacgaacaucc

SEQ ID NO: 36035 - RNA, 11 nt, Artificial Sequence
  Description of Artificial Sequence: Synthetic oligonucleotide
agggucggaac

SEQ ID NO: 36036 - RNA, 10 nt, Artificial Sequence
  Description of Artificial Sequence: Synthetic oligonucleotide
ucggaaccca

SEQ ID NO: 36037 - RNA, 11 nt, Artificial Sequence
  Description of Artificial Sequence: Synthetic oligonucleotide
acccaagcuua

SEQ ID NO: 36038 - RNA, 14 nt, Artificial Sequence
  Description of Artificial Sequence: Synthetic oligonucleotide
gaacuuuaagcaac

SEQ ID NO: 36039 - RNA, 11 nt, Artificial Sequence
  Description of Artificial Sequence: Synthetic oligonucleotide
acuauucagug

SEQ ID NO: 36040 - RNA, 11 nt, Artificial Sequence
  Description of Artificial Sequence: Synthetic oligonucleotide
cuauucagugg

SEQ ID NO: 36041 - RNA, 13 nt, Artificial Sequence
  Description of Artificial Sequence: Synthetic oligonucleotide
aaacacagauaac

SEQ ID NO: 36042 - RNA, 12 nt, Artificial Sequence
  Description of Artificial Sequence: Synthetic oligonucleotide
cuuaagaaaaga

SEQ ID NO: 36043 - RNA, 12 nt, Artificial Sequence
  Description of Artificial Sequence: Synthetic oligonucleotide
cugaaggagugu

SEQ ID NO: 36044 - RNA, 10 nt, Artificial Sequence
  Description of Artificial Sequence: Synthetic oligonucleotide
ucaccgcggg

SEQ ID NO: 36045 - RNA, 14 nt, Artificial Sequence
  Description of Artificial Sequence: Synthetic oligonucleotide
agcagaaauaagcg

SEQ ID NO: 36046 - RNA, 12 nt, Artificial Sequence
  Description of Artificial Sequence: Synthetic oligonucleotide
aagcgugccguu

SEQ ID NO: 36047 - RNA, 12 nt, Artificial Sequence
  Description of Artificial Sequence: Synthetic oligonucleotide
agaaacagucac

SEQ ID NO: 36048 - RNA, 12 nt, Artificial Sequence
  Description of Artificial Sequence: Synthetic oligonucleotide
agaggaagaagg

SEQ ID NO: 36049 - RNA, 14 nt, Artificial Sequence
  Description of Artificial Sequence: Synthetic oligonucleotide
uguauucaaaauau

SEQ ID NO: 36050 - RNA, 13 nt, Artificial Sequence
  Description of Artificial Sequence: Synthetic oligonucleotide
auuuuccucccuu

SEQ ID NO: 36051 - RNA, 13 nt, Artificial Sequence
  Description of Artificial Sequence: Synthetic oligonucleotide
caaagaaagauag

SEQ ID NO: 36052 - RNA, 12 nt, Artificial Sequence
  Description of Artificial Sequence: Synthetic oligonucleotide
aagaaagauaga

SEQ ID NO: 36053 - RNA, 13 nt, Artificial Sequence
  Description of Artificial Sequence: Synthetic oligonucleotide
gaaagcauuuguu

SEQ ID NO: 36054 - RNA, 13 nt, Artificial Sequence
  Description of Artificial Sequence: Synthetic oligonucleotide
ugaguuaaacgaa

SEQ ID NO: 36055 - RNA, 12 nt, Artificial Sequence
  Description of Artificial Sequence: Synthetic oligonucleotide
acugauacagaa

SEQ ID NO: 36056 - RNA, 12 nt, Artificial Sequence
  Description of Artificial Sequence: Synthetic oligonucleotide
auauuauauaua

SEQ ID NO: 36057 - RNA, 12 nt, Artificial Sequence
  Description of Artificial Sequence: Synthetic oligonucleotide
auuauauauaua

SEQ ID NO: 36058 - RNA, 12 nt, Artificial Sequence
  Description of Artificial Sequence: Synthetic oligonucleotide
ucacuggaugua

SEQ ID NO: 36059 - RNA, 12 nt, Artificial Sequence
  Description of Artificial Sequence: Synthetic oligonucleotide
cagggaagagga

SEQ ID NO: 36060 - RNA, 15 nt, Artificial Sequence
  Description of Artificial Sequence: Synthetic oligonucleotide
augaucuuuuuuuug

SEQ ID NO: 36061 - RNA, 11 nt, Artificial Sequence
  Description of Artificial Sequence: Synthetic oligonucleotide
aguucacggcc

SEQ ID NO: 36062 - RNA, 13 nt, Artificial Sequence
  Description of Artificial Sequence: Synthetic oligonucleotide
caccaucacacca

SEQ ID NO: 36063 - RNA, 11 nt, Artificial Sequence
  Description of Artificial Sequence: Synthetic oligonucleotide
ccugcggguuu

SEQ ID NO: 36064 - RNA, 10 nt, Artificial Sequence
  Description of Artificial Sequence: Synthetic oligonucleotide
auccaguuug

SEQ ID NO: 36065 - RNA, 13 nt, Artificial Sequence
  Description of Artificial Sequence: Synthetic oligonucleotide
guuaaggacuucu

SEQ ID NO: 36066 - RNA, 13 nt, Artificial Sequence
  Description of Artificial Sequence: Synthetic oligonucleotide
cagugggacagag

SEQ ID NO: 36067 - RNA, 14 nt, Artificial Sequence
  Description of Artificial Sequence: Synthetic oligonucleotide
aauuuguuauugug

SEQ ID NO: 36068 - RNA, 13 nt, Artificial Sequence
  Description of Artificial Sequence: Synthetic oligonucleotide
uucaaaugcauuu

SEQ ID NO: 36069 - RNA, 10 nt, Artificial Sequence
  Description of Artificial Sequence: Synthetic oligonucleotide
caggaaagcc

SEQ ID NO: 36070 - RNA, 11 nt, Artificial Sequence
  Description of Artificial Sequence: Synthetic oligonucleotide
aggaaagcccu

SEQ ID NO: 36071 - RNA, 12 nt, Artificial Sequence
  Description of Artificial Sequence: Synthetic oligonucleotide
cccagcauggcc

SEQ ID NO: 36072 - RNA, 11 nt, Artificial Sequence
  Description of Artificial Sequence: Synthetic oligonucleotide
cuucucccuga

SEQ ID NO: 36073 - RNA, 12 nt, Artificial Sequence
  Description of Artificial Sequence: Synthetic oligonucleotide
gaagaagcccuu

SEQ ID NO: 36074 - RNA, 12 nt, Artificial Sequence
  Description of Artificial Sequence: Synthetic oligonucleotide
agaagcccuuca

SEQ ID NO: 36075 - RNA, 11 nt, Artificial Sequence
  Description of Artificial Sequence: Synthetic oligonucleotide
gcccuucagcg

SEQ ID NO: 36076 - RNA, 11 nt, Artificial Sequence
  Description of Artificial Sequence: Synthetic oligonucleotide
ccuucagcggc

SEQ ID NO: 36077 - RNA, 12 nt, Artificial Sequence
  Description of Artificial Sequence: Synthetic oligonucleotide
ucagcggccagu

SEQ ID NO: 36078 - RNA, 12 nt, Artificial Sequence
  Description of Artificial Sequence: Synthetic oligonucleotide
ugaaaagcuccg

SEQ ID NO: 36079 - RNA, 11 nt, Artificial Sequence
  Description of Artificial Sequence: Synthetic oligonucleotide
aaaagcuccgg

SEQ ID NO: 36080 - RNA, 13 nt, Artificial Sequence
  Description of Artificial Sequence: Synthetic oligonucleotide
agucaacagucug

SEQ ID NO: 36081 - RNA, 13 nt, Artificial Sequence
  Description of Artificial Sequence: Synthetic oligonucleotide
cagaguucaaaag

SEQ ID NO: 36082 - RNA, 13 nt, Artificial Sequence
  Description of Artificial Sequence: Synthetic oligonucleotide
agaguucaaaagc

SEQ ID NO: 36083 - RNA, 12 nt, Artificial Sequence
  Description of Artificial Sequence: Synthetic oligonucleotide
uucaaaagcccu

SEQ ID NO: 36084 - RNA, 12 nt, Artificial Sequence
  Description of Artificial Sequence: Synthetic oligonucleotide
ucaaaagcccuu

SEQ ID NO: 36085 - RNA, 12 nt, Artificial Sequence
  Description of Artificial Sequence: Synthetic oligonucleotide
aaaagcccuuca

SEQ ID NO: 36086 - RNA, 12 nt, Artificial Sequence
  Description of Artificial Sequence: Synthetic oligonucleotide
aaagcccuucag

SEQ ID NO: 36087 - RNA, 13 nt, Artificial Sequence
  Description of Artificial Sequence: Synthetic oligonucleotide
gugaagccgcucg

SEQ ID NO: 36088 - RNA, 12 nt, Artificial Sequence
  Description of Artificial Sequence: Synthetic oligonucleotide
cacgccagucaa

SEQ ID NO: 36089 - RNA, 13 nt, Artificial Sequence
  Description of Artificial Sequence: Synthetic oligonucleotide
uucuuggugcgug

SEQ ID NO: 36090 - RNA, 14 nt, Artificial Sequence
  Description of Artificial Sequence: Synthetic oligonucleotide
auuggauucaucag

SEQ ID NO: 36091 - RNA, 13 nt, Artificial Sequence
  Description of Artificial Sequence: Synthetic oligonucleotide
uggaauaccuaag

SEQ ID NO: 36092 - RNA, 12 nt, Artificial Sequence
  Description of Artificial Sequence: Synthetic oligonucleotide
auuugaggcuca

SEQ ID NO: 36093 - RNA, 11 nt, Artificial Sequence
  Description of Artificial Sequence: Synthetic oligonucleotide
ucuacaauugg

SEQ ID NO: 36094 - RNA, 12 nt, Artificial Sequence
  Description of Artificial Sequence: Synthetic oligonucleotide
uaguuaggagcc

SEQ ID NO: 36095 - RNA, 13 nt, Artificial Sequence
  Description of Artificial Sequence: Synthetic oligonucleotide
agucaauauccac

SEQ ID NO: 36096 - RNA, 13 nt, Artificial Sequence
  Description of Artificial Sequence: Synthetic oligonucleotide
auguucagucaca

SEQ ID NO: 36097 - RNA, 12 nt, Artificial Sequence
  Description of Artificial Sequence: Synthetic oligonucleotide
acacacacauac

SEQ ID NO: 36098 - RNA, 12 nt, Artificial Sequence
  Description of Artificial Sequence: Synthetic oligonucleotide
uuccuuuugcuu

SEQ ID NO: 36099 - RNA, 16 nt, Artificial Sequence
  Description of Artificial Sequence: Synthetic oligonucleotide
uuuuaaaguaauuuuu

SEQ ID NO: 36100 - RNA, 13 nt, Artificial Sequence
  Description of Artificial Sequence: Synthetic oligonucleotide
caacagucaaugg

SEQ ID NO: 36101 - RNA, 13 nt, Artificial Sequence
  Description of Artificial Sequence: Synthetic oligonucleotide
ucgacaaaccaau

SEQ ID NO: 36102 - RNA, 12 nt, Artificial Sequence
  Description of Artificial Sequence: Synthetic oligonucleotide
acugcuaccacu

SEQ ID NO: 36103 - RNA, 13 nt, Artificial Sequence
  Description of Artificial Sequence: Synthetic oligonucleotide
gcaagcggucuua

SEQ ID NO: 36104 - RNA, 13 nt, Artificial Sequence
  Description of Artificial Sequence: Synthetic oligonucleotide
ggucuuaccggcu

SEQ ID NO: 36105 - RNA, 11 nt, Artificial Sequence
  Description of Artificial Sequence: Synthetic oligonucleotide
gauggguuacc

SEQ ID NO: 36106 - RNA, 11 nt, Artificial Sequence
  Description of Artificial Sequence: Synthetic oligonucleotide
guuaccugcga

SEQ ID NO: 36107 - RNA, 12 nt, Artificial Sequence
  Description of Artificial Sequence: Synthetic oligonucleotide
aaucuugcugag

SEQ ID NO: 36108 - RNA, 13 nt, Artificial Sequence
  Description of Artificial Sequence: Synthetic oligonucleotide
agcauaaaacagu

SEQ ID NO: 36109 - RNA, 12 nt, Artificial Sequence
  Description of Artificial Sequence: Synthetic oligonucleotide
guccuuuauccu

SEQ ID NO: 36110 - RNA, 12 nt, Artificial Sequence
  Description of Artificial Sequence: Synthetic oligonucleotide
caacgcaaguug

SEQ ID NO: 36111 - RNA, 13 nt, Artificial Sequence
  Description of Artificial Sequence: Synthetic oligonucleotide
aaacugaaaccau

SEQ ID NO: 36112 - RNA, 14 nt, Artificial Sequence
  Description of Artificial Sequence: Synthetic oligonucleotide
acuuuguuaaauau

SEQ ID NO: 36113 - RNA, 14 nt, Artificial Sequence
  Description of Artificial Sequence: Synthetic oligonucleotide
guauauuaaaaguu

SEQ ID NO: 36114 - RNA, 13 nt, Artificial Sequence
  Description of Artificial Sequence: Synthetic oligonucleotide
guuuugacuuaac

SEQ ID NO: 36115 - RNA, 13 nt, Artificial Sequence
  Description of Artificial Sequence: Synthetic oligonucleotide
gcaaacucagcac

SEQ ID NO: 36116 - RNA, 11 nt, Artificial Sequence
  Description of Artificial Sequence: Synthetic oligonucleotide
ugcugaccuca

SEQ ID NO: 36117 - RNA, 14 nt, Artificial Sequence
  Description of Artificial Sequence: Synthetic oligonucleotide
uuuauucagaucgc

SEQ ID NO: 36118 - RNA, 13 nt, Artificial Sequence
  Description of Artificial Sequence: Synthetic oligonucleotide
aggguucugggau

SEQ ID NO: 36119 - RNA, 15 nt, Artificial Sequence
  Description of Artificial Sequence: Synthetic oligonucleotide
auauuggaaauuaug

SEQ ID NO: 36120 - RNA, 13 nt, Artificial Sequence
  Description of Artificial Sequence: Synthetic oligonucleotide
auggaagcacuag

SEQ ID NO: 36121 - RNA, 13 nt, Artificial Sequence
  Description of Artificial Sequence: Synthetic oligonucleotide
guuuuuaugugga

SEQ ID NO: 36122 - RNA, 12 nt, Artificial Sequence
  Description of Artificial Sequence: Synthetic oligonucleotide
ggaauugguaga

SEQ ID NO: 36123 - RNA, 13 nt, Artificial Sequence
  Description of Artificial Sequence: Synthetic oligonucleotide
uuagacuuggaga

SEQ ID NO: 36124 - RNA, 13 nt, Artificial Sequence
  Description of Artificial Sequence: Synthetic oligonucleotide
uuacaguauucca

SEQ ID NO: 36125 - RNA, 15 nt, Artificial Sequence
  Description of Artificial Sequence: Synthetic oligonucleotide
ccacugaugaauuaa

SEQ ID NO: 36126 - RNA, 12 nt, Artificial Sequence
  Description of Artificial Sequence: Synthetic oligonucleotide
ccacaucaucac

SEQ ID NO: 36127 - RNA, 13 nt, Artificial Sequence
  Description of Artificial Sequence: Synthetic oligonucleotide
cucaccaaacaga

SEQ ID NO: 36128 - RNA, 12 nt, Artificial Sequence
  Description of Artificial Sequence: Synthetic oligonucleotide
ggaacaugaugg

SEQ ID NO: 36129 - RNA, 12 nt, Artificial Sequence
  Description of Artificial Sequence: Synthetic oligonucleotide
cauguagacugc

SEQ ID NO: 36130 - RNA, 13 nt, Artificial Sequence
  Description of Artificial Sequence: Synthetic oligonucleotide
ggaucuauuuaug

SEQ ID NO: 36131 - RNA, 12 nt, Artificial Sequence
  Description of Artificial Sequence: Synthetic oligonucleotide
gcacuauuauca

SEQ ID NO: 36132 - RNA, 11 nt, Artificial Sequence
  Description of Artificial Sequence: Synthetic oligonucleotide
aucaguucugc

SEQ ID NO: 36133 - RNA, 13 nt, Artificial Sequence
  Description of Artificial Sequence: Synthetic oligonucleotide
agauuaaaccuac

SEQ ID NO: 36134 - RNA, 13 nt, Artificial Sequence
  Description of Artificial Sequence: Synthetic oligonucleotide
auaaaauccuucu

SEQ ID NO: 36135 - RNA, 12 nt, Artificial Sequence
  Description of Artificial Sequence: Synthetic oligonucleotide
aaugcuguagac

SEQ ID NO: 36136 - RNA, 13 nt, Artificial Sequence
  Description of Artificial Sequence: Synthetic oligonucleotide
uugauaggaauag

SEQ ID NO: 36137 - RNA, 11 nt, Artificial Sequence
  Description of Artificial Sequence: Synthetic oligonucleotide
aauggcccuga

SEQ ID NO: 36138 - RNA, 11 nt, Artificial Sequence
  Description of Artificial Sequence: Synthetic oligonucleotide
uuccucaagca

SEQ ID NO: 36139 - RNA, 10 nt, Artificial Sequence
  Description of Artificial Sequence: Synthetic oligonucleotide
guucagccca

SEQ ID NO: 36140 - RNA, 11 nt, Artificial Sequence
  Description of Artificial Sequence: Synthetic oligonucleotide
gcugcugaacc

SEQ ID NO: 36141 - RNA, 12 nt, Artificial Sequence
  Description of Artificial Sequence: Synthetic oligonucleotide
aaguucucuuca

SEQ ID NO: 36142 - RNA, 11 nt, Artificial Sequence
  Description of Artificial Sequence: Synthetic oligonucleotide
ccagccuagag

SEQ ID NO: 36143 - RNA, 13 nt, Artificial Sequence
  Description of Artificial Sequence: Synthetic oligonucleotide
cucugugaagugu

SEQ ID NO: 36144 - RNA, 14 nt, Artificial Sequence
  Description of Artificial Sequence: Synthetic oligonucleotide
ugagaaaauuucaa

SEQ ID NO: 36145 - RNA, 11 nt, Artificial Sequence
  Description of Artificial Sequence: Synthetic oligonucleotide
aauccuccuga

SEQ ID NO: 36146 - RNA, 12 nt, Artificial Sequence
  Description of Artificial Sequence: Synthetic oligonucleotide
gugacaucauau

SEQ ID NO: 36147 - RNA, 13 nt, Artificial Sequence
  Description of Artificial Sequence: Synthetic oligonucleotide
aaucuucaucaua

SEQ ID NO: 36148 - RNA, 13 nt, Artificial Sequence
  Description of Artificial Sequence: Synthetic oligonucleotide
gacuagcuauuaa

SEQ ID NO: 36149 - RNA, 14 nt, Artificial Sequence
  Description of Artificial Sequence: Synthetic oligonucleotide
ucucuacuaaaaau

SEQ ID NO: 36150 - RNA, 12 nt, Artificial Sequence
  Description of Artificial Sequence: Synthetic oligonucleotide
ucuaucucgccu

SEQ ID NO: 36151 - RNA, 13 nt, Artificial Sequence
  Description of Artificial Sequence: Synthetic oligonucleotide
cuucgguccaguu

SEQ ID NO: 36152 - RNA, 11 nt, Artificial Sequence
  Description of Artificial Sequence: Synthetic oligonucleotide
gauguagccgc

SEQ ID NO: 36153 - RNA, 12 nt, Artificial Sequence
  Description of Artificial Sequence: Synthetic oligonucleotide
ugaggagacuug

SEQ ID NO: 36154 - RNA, 12 nt, Artificial Sequence
  Description of Artificial Sequence: Synthetic oligonucleotide
gaguagugagga

SEQ ID NO: 36155 - RNA, 14 nt, Artificial Sequence
  Description of Artificial Sequence: Synthetic oligonucleotide
cagaugaguacaaa

SEQ ID NO: 36156 - RNA, 13 nt, Artificial Sequence
  Description of Artificial Sequence: Synthetic oligonucleotide
guuguuaaugggc

SEQ ID NO: 36157 - RNA, 13 nt, Artificial Sequence
  Description of Artificial Sequence: Synthetic oligonucleotide
uuuuuaauuuauu

SEQ ID NO: 36158 - RNA, 12 nt, Artificial Sequence
  Description of Artificial Sequence: Synthetic oligonucleotide
uauuuaaauaug

SEQ ID NO: 36159 - RNA, 13 nt, Artificial Sequence
  Description of Artificial Sequence: Synthetic oligonucleotide
uauccuuuguuuc

SEQ ID NO: 36160 - RNA, 14 nt, Artificial Sequence
  Description of Artificial Sequence: Synthetic oligonucleotide
cgucuaaguguuug

SEQ ID NO: 36161 - RNA, 12 nt, Artificial Sequence
  Description of Artificial Sequence: Synthetic oligonucleotide
accugugacaaa

SEQ ID NO: 36162 - RNA, 13 nt, Artificial Sequence
  Description of Artificial Sequence: Synthetic oligonucleotide
ccaggcugaauua

SEQ ID NO: 36163 - RNA, 14 nt, Artificial Sequence
  Description of Artificial Sequence: Synthetic oligonucleotide
gucauucuuacaau

SEQ ID NO: 36164 - RNA, 15 nt, Artificial Sequence
  Description of Artificial Sequence: Synthetic oligonucleotide
ucauucuuacaauug

SEQ ID NO: 36165 - RNA, 12 nt, Artificial Sequence
  Description of Artificial Sequence: Synthetic oligonucleotide
cagagaguguac

SEQ ID NO: 36166 - RNA, 12 nt, Artificial Sequence
  Description of Artificial Sequence: Synthetic oligonucleotide
agaacucagcag

SEQ ID NO: 36167 - RNA, 13 nt, Artificial Sequence
  Description of Artificial Sequence: Synthetic oligonucleotide
uuuauuuucagua

SEQ ID NO: 36168 - RNA, 12 nt, Artificial Sequence
  Description of Artificial Sequence: Synthetic oligonucleotide
ucuuaaauggaa

SEQ ID NO: 36169 - RNA, 13 nt, Artificial Sequence
  Description of Artificial Sequence: Synthetic oligonucleotide
ugccuaaaauugu

SEQ ID NO: 36170 - RNA, 12 nt, Artificial Sequence
  Description of Artificial Sequence: Synthetic oligonucleotide
agacugugagcu

SEQ ID NO: 36171 - RNA, 14 nt, Artificial Sequence
  Description of Artificial Sequence: Synthetic oligonucleotide
ugcuuuuuauuaau

SEQ ID NO: 36172 - RNA, 13 nt, Artificial Sequence
  Description of Artificial Sequence: Synthetic oligonucleotide
cucuucuuacauu

SEQ ID NO: 36173 - RNA, 15 nt, Artificial Sequence
  Description of Artificial Sequence: Synthetic oligonucleotide
cauuuguaaaaaugu

SEQ ID NO: 36174 - RNA, 15 nt, Artificial Sequence
  Description of Artificial Sequence: Synthetic oligonucleotide
aucuuaauucauauu

SEQ ID NO: 36175 - RNA, 13 nt, Artificial Sequence
  Description of Artificial Sequence: Synthetic oligonucleotide
gaacuaaucauga

SEQ ID NO: 36176 - RNA, 12 nt, Artificial Sequence
  Description of Artificial Sequence: Synthetic oligonucleotide
ucugcucuuggg

SEQ ID NO: 36177 - RNA, 13 nt, Artificial Sequence
  Description of Artificial Sequence: Synthetic oligonucleotide
caguagcuuugag

SEQ ID NO: 36178 - RNA, 14 nt, Artificial Sequence
  Description of Artificial Sequence: Synthetic oligonucleotide
cacguaauauuuca

SEQ ID NO: 36179 - RNA, 13 nt, Artificial Sequence
  Description of Artificial Sequence: Synthetic oligonucleotide
uauucucuucacu

SEQ ID NO: 36180 - RNA, 14 nt, Artificial Sequence
  Description of Artificial Sequence: Synthetic oligonucleotide
cuaaugcuaagaaa

SEQ ID NO: 36181 - RNA, 12 nt, Artificial Sequence
  Description of Artificial Sequence: Synthetic oligonucleotide
gcugaaaaucaa

SEQ ID NO: 36182 - RNA, 14 nt, Artificial Sequence
  Description of Artificial Sequence: Synthetic oligonucleotide
aauaugauuacuuu

SEQ ID NO: 36183 - RNA, 14 nt, Artificial Sequence
  Description of Artificial Sequence: Synthetic oligonucleotide
cauuuuguucuaca

SEQ ID NO: 36184 - RNA, 12 nt, Artificial Sequence
  Description of Artificial Sequence: Synthetic oligonucleotide
cccgggacucuc

SEQ ID NO: 36185 - RNA, 14 nt, Artificial Sequence
  Description of Artificial Sequence: Synthetic oligonucleotide
ccuuuaaaguaaag

SEQ ID NO: 36186 - RNA, 13 nt, Artificial Sequence
  Description of Artificial Sequence: Synthetic oligonucleotide
ucuggaagccugg

SEQ ID NO: 36187 - RNA, 14 nt, Artificial Sequence
  Description of Artificial Sequence: Synthetic oligonucleotide
aaaacaaaagagag

SEQ ID NO: 36188 - RNA, 13 nt, Artificial Sequence
  Description of Artificial Sequence: Synthetic oligonucleotide
aucaguuaugccg

SEQ ID NO: 36189 - RNA, 13 nt, Artificial Sequence
  Description of Artificial Sequence: Synthetic oligonucleotide
uaaaagaagucca

SEQ ID NO: 36190 - RNA, 11 nt, Artificial Sequence
  Description of Artificial Sequence: Synthetic oligonucleotide
aggugagguua

SEQ ID NO: 36191 - RNA, 11 nt, Artificial Sequence
  Description of Artificial Sequence: Synthetic oligonucleotide
gggaagaggac

SEQ ID NO: 36192 - RNA, 13 nt, Artificial Sequence
  Description of Artificial Sequence: Synthetic oligonucleotide
aagcaaguauugu

SEQ ID NO: 36193 - RNA, 12 nt, Artificial Sequence
  Description of Artificial Sequence: Synthetic oligonucleotide
auuguagcacuc

SEQ ID NO: 36194 - RNA, 14 nt, Artificial Sequence
  Description of Artificial Sequence: Synthetic oligonucleotide
acaaaaccacaaau

SEQ ID NO: 36195 - RNA, 12 nt, Artificial Sequence
  Description of Artificial Sequence: Synthetic oligonucleotide
uaagcccauaca

SEQ ID NO: 36196 - RNA, 11 nt, Artificial Sequence
  Description of Artificial Sequence: Synthetic oligonucleotide
agcccauacag

SEQ ID NO: 36197 - RNA, 12 nt, Artificial Sequence
  Description of Artificial Sequence: Synthetic oligonucleotide
cagaaaccuucc

SEQ ID NO: 36198 - RNA, 10 nt, Artificial Sequence
  Description of Artificial Sequence: Synthetic oligonucleotide
guauaccuac

SEQ ID NO: 36199 - RNA, 13 nt, Artificial Sequence
  Description of Artificial Sequence: Synthetic oligonucleotide
gccaguuuucgga

SEQ ID NO: 36200 - RNA, 9 nt, Artificial Sequence
  Description of Artificial Sequence: Synthetic oligonucleotide
ggaacaggg

SEQ ID NO: 36201 - RNA, 13 nt, Artificial Sequence
  Description of Artificial Sequence: Synthetic oligonucleotide
uuaacuuuccagu

SEQ ID NO: 36202 - RNA, 14 nt, Artificial Sequence
  Description of Artificial Sequence: Synthetic oligonucleotide
aaaguuugguuuug

SEQ ID NO: 36203 - RNA, 12 nt, Artificial Sequence
  Description of Artificial Sequence: Synthetic oligonucleotide
cuucccacugua

SEQ ID NO: 36204 - RNA, 13 nt, Artificial Sequence
  Description of Artificial Sequence: Synthetic oligonucleotide
ugauaccauauga

SEQ ID NO: 36205 - RNA, 11 nt, Artificial Sequence
  Description of Artificial Sequence: Synthetic oligonucleotide
aacaugggcug

SEQ ID NO: 36206 - RNA, 13 nt, Artificial Sequence
  Description of Artificial Sequence: Synthetic oligonucleotide
caacuuuuucaua

SEQ ID NO: 36207 - RNA, 12 nt, Artificial Sequence
  Description of Artificial Sequence: Synthetic oligonucleotide
caugaggccgga

SEQ ID NO: 36208 - RNA, 11 nt, Artificial Sequence
  Description of Artificial Sequence: Synthetic oligonucleotide
acugcauuugu

SEQ ID NO: 36209 - RNA, 13 nt, Artificial Sequence
  Description of Artificial Sequence: Synthetic oligonucleotide
aauguuuacuacc

SEQ ID NO: 36210 - RNA, 15 nt, Artificial Sequence
  Description of Artificial Sequence: Synthetic oligonucleotide
aauuuuuugaugaaa

SEQ ID NO: 36211 - RNA, 14 nt, Artificial Sequence
  Description of Artificial Sequence: Synthetic oligonucleotide
cagugugugaauuu

SEQ ID NO: 36212 - RNA, 13 nt, Artificial Sequence
  Description of Artificial Sequence: Synthetic oligonucleotide
gagcaauguaugu

SEQ ID NO: 36213 - RNA, 14 nt, Artificial Sequence
  Description of Artificial Sequence: Synthetic oligonucleotide
aaagcacauauaua

SEQ ID NO: 36214 - RNA, 14 nt, Artificial Sequence
  Description of Artificial Sequence: Synthetic oligonucleotide
guaauaguuucucc

SEQ ID NO: 36215 - RNA, 13 nt, Artificial Sequence
  Description of Artificial Sequence: Synthetic oligonucleotide
aguuucuccaaau

SEQ ID NO: 36216 - RNA, 13 nt, Artificial Sequence
  Description of Artificial Sequence: Synthetic oligonucleotide
uacuuccuagaaa

SEQ ID NO: 36217 - RNA, 13 nt, Artificial Sequence
  Description of Artificial Sequence: Synthetic oligonucleotide
uacaccauauaug

SEQ ID NO: 36218 - RNA, 14 nt, Artificial Sequence
  Description of Artificial Sequence: Synthetic oligonucleotide
auauaugaauggag

SEQ ID NO: 36219 - RNA, 13 nt, Artificial Sequence
  Description of Artificial Sequence: Synthetic oligonucleotide
acgagaagaagau

SEQ ID NO: 36220 - RNA, 13 nt, Artificial Sequence
  Description of Artificial Sequence: Synthetic oligonucleotide
ucauuuacaggga

SEQ ID NO: 36221 - RNA, 13 nt, Artificial Sequence
  Description of Artificial Sequence: Synthetic oligonucleotide
cauuuacagggac

SEQ ID NO: 36222 - RNA, 10 nt, Artificial Sequence
  Description of Artificial Sequence: Synthetic oligonucleotide
agggaccuga

SEQ ID NO: 36223 - RNA, 14 nt, Artificial Sequence
  Description of Artificial Sequence: Synthetic oligonucleotide
uguuugacugcauc

SEQ ID NO: 36224 - RNA, 13 nt, Artificial Sequence
  Description of Artificial Sequence: Synthetic oligonucleotide
uuugacugcaucg

SEQ ID NO: 36225 - RNA, 12 nt, Artificial Sequence
  Description of Artificial Sequence: Synthetic oligonucleotide
gaguucacaggg

SEQ ID NO: 36226 - RNA, 13 nt, Artificial Sequence
  Description of Artificial Sequence: Synthetic oligonucleotide
ggcaccucugucc

SEQ ID NO: 36227 - RNA, 15 nt, Artificial Sequence
  Description of Artificial Sequence: Synthetic oligonucleotide
gguuugucuuuuuaa

SEQ ID NO: 36228 - RNA, 14 nt, Artificial Sequence
  Description of Artificial Sequence: Synthetic oligonucleotide
uuugucuuuuuaag

SEQ ID NO: 36229 - RNA, 13 nt, Artificial Sequence
  Description of Artificial Sequence: Synthetic oligonucleotide
ccuaaagguuguc

SEQ ID NO: 36230 - RNA, 12 nt, Artificial Sequence
  Description of Artificial Sequence: Synthetic oligonucleotide
aagguugucgac

SEQ ID NO: 36231 - RNA, 13 nt, Artificial Sequence
  Description of Artificial Sequence: Synthetic oligonucleotide
accuggcaauugu

SEQ ID NO: 36232 - RNA, 12 nt, Artificial Sequence
  Description of Artificial Sequence: Synthetic oligonucleotide
aguggugcgagg

SEQ ID NO: 36233 - RNA, 13 nt, Artificial Sequence
  Description of Artificial Sequence: Synthetic oligonucleotide
agagacaugaaau

SEQ ID NO: 36234 - RNA, 13 nt, Artificial Sequence
  Description of Artificial Sequence: Synthetic oligonucleotide
auauauuucucca

SEQ ID NO: 36235 - RNA, 10 nt, Artificial Sequence
  Description of Artificial Sequence: Synthetic oligonucleotide
caugaaggcu

SEQ ID NO: 36236 - RNA, 11 nt, Artificial Sequence
  Description of Artificial Sequence: Synthetic oligonucleotide
gcuggaguggu

SEQ ID NO: 36237 - RNA, 11 nt, Artificial Sequence
  Description of Artificial Sequence: Synthetic oligonucleotide
aggaagagagg

SEQ ID NO: 36238 - RNA, 12 nt, Artificial Sequence
  Description of Artificial Sequence: Synthetic oligonucleotide
cuugcaucgggc

SEQ ID NO: 36239 - RNA, 13 nt, Artificial Sequence
  Description of Artificial Sequence: Synthetic oligonucleotide
auauccuacugug

SEQ ID NO: 36240 - RNA, 13 nt, Artificial Sequence
  Description of Artificial Sequence: Synthetic oligonucleotide
uccuacuguguaa

SEQ ID NO: 36241 - RNA, 12 nt, Artificial Sequence
  Description of Artificial Sequence: Synthetic oligonucleotide
ccuuguagugua

SEQ ID NO: 36242 - RNA, 13 nt, Artificial Sequence
  Description of Artificial Sequence: Synthetic oligonucleotide
ucuuuguugauug

SEQ ID NO: 36243 - RNA, 14 nt, Artificial Sequence
  Description of Artificial Sequence: Synthetic oligonucleotide
uuuguugauugaaa

SEQ ID NO: 36244 - RNA, 15 nt, Artificial Sequence
  Description of Artificial Sequence: Synthetic oligonucleotide
uucuuuuucuuccau

SEQ ID NO: 36245 - RNA, 13 nt, Artificial Sequence
  Description of Artificial Sequence: Synthetic oligonucleotide
aaucuuccuucua

SEQ ID NO: 36246 - RNA, 13 nt, Artificial Sequence
  Description of Artificial Sequence: Synthetic oligonucleotide
uugaaugcuucau

SEQ ID NO: 36247 - RNA, 13 nt, Artificial Sequence
  Description of Artificial Sequence: Synthetic oligonucleotide
ugaaugcuucaug

SEQ ID NO: 36248 - RNA, 13 nt, Artificial Sequence
  Description of Artificial Sequence: Synthetic oligonucleotide
aauucuacuuuga

SEQ ID NO: 36249 - RNA, 13 nt, Artificial Sequence
  Description of Artificial Sequence: Synthetic oligonucleotide
agcaacuacagac

SEQ ID NO: 36250 - RNA, 13 nt, Artificial Sequence
  Description of Artificial Sequence: Synthetic oligonucleotide
gaccaaggucaac

SEQ ID NO: 36251 - RNA, 13 nt, Artificial Sequence
  Description of Artificial Sequence: Synthetic oligonucleotide
cgacuaucucgac

SEQ ID NO: 36252 - RNA, 13 nt, Artificial Sequence
  Description of Artificial Sequence: Synthetic oligonucleotide
aaccuucccaaac

SEQ ID NO: 36253 - RNA, 14 nt, Artificial Sequence
  Description of Artificial Sequence: Synthetic oligonucleotide
ccaagcuuagaacu

SEQ ID NO: 36254 - RNA, 15 nt, Artificial Sequence
  Description of Artificial Sequence: Synthetic oligonucleotide
agcuuagaacuuuaa

SEQ ID NO: 36255 - RNA, 11 nt, Artificial Sequence
  Description of Artificial Sequence: Synthetic oligonucleotide
aagaccaccac

SEQ ID NO: 36256 - RNA, 14 nt, Artificial Sequence
  Description of Artificial Sequence: Synthetic oligonucleotide
gcgagaaauaaagu

SEQ ID NO: 36257 - RNA, 14 nt, Artificial Sequence
  Description of Artificial Sequence: Synthetic oligonucleotide
cgagaaauaaaguu

SEQ ID NO: 36258 - RNA, 12 nt, Artificial Sequence
  Description of Artificial Sequence: Synthetic oligonucleotide
aggaaaugaucc

SEQ ID NO: 36259 - RNA, 13 nt, Artificial Sequence
  Description of Artificial Sequence: Synthetic oligonucleotide
gaagaaaugaaac

SEQ ID NO: 36260 - RNA, 13 nt, Artificial Sequence
  Description of Artificial Sequence: Synthetic oligonucleotide
guuuccauccucc

SEQ ID NO: 36261 - RNA, 15 nt, Artificial Sequence
  Description of Artificial Sequence: Synthetic oligonucleotide
acugaaaaucuuuga

SEQ ID NO: 36262 - RNA, 11 nt, Artificial Sequence
  Description of Artificial Sequence: Synthetic oligonucleotide
ugccguucagg

SEQ ID NO: 36263 - RNA, 13 nt, Artificial Sequence
  Description of Artificial Sequence: Synthetic oligonucleotide
caggguccagaag

SEQ ID NO: 36264 - RNA, 13 nt, Artificial Sequence
  Description of Artificial Sequence: Synthetic oligonucleotide
ucaagacugcuug

SEQ ID NO: 36265 - RNA, 13 nt, Artificial Sequence
  Description of Artificial Sequence: Synthetic oligonucleotide
uccaugucuuugg

SEQ ID NO: 36266 - RNA, 11 nt, Artificial Sequence
  Description of Artificial Sequence: Synthetic oligonucleotide
gccugaaacac

SEQ ID NO: 36267 - RNA, 12 nt, Artificial Sequence
  Description of Artificial Sequence: Synthetic oligonucleotide
ucucuguaccuc

SEQ ID NO: 36268 - RNA, 12 nt, Artificial Sequence
  Description of Artificial Sequence: Synthetic oligonucleotide
agcaagacaaga

SEQ ID NO: 36269 - RNA, 13 nt, Artificial Sequence
  Description of Artificial Sequence: Synthetic oligonucleotide
gcaagacaagaaa

SEQ ID NO: 36270 - RNA, 12 nt, Artificial Sequence
  Description of Artificial Sequence: Synthetic oligonucleotide
uguacaagaucc

SEQ ID NO: 36271 - RNA, 12 nt, Artificial Sequence
  Description of Artificial Sequence: Synthetic oligonucleotide
cguacuugcaga

SEQ ID NO: 36272 - RNA, 13 nt, Artificial Sequence
  Description of Artificial Sequence: Synthetic oligonucleotide
cgaucgauacaga

SEQ ID NO: 36273 - RNA, 13 nt, Artificial Sequence
  Description of Artificial Sequence: Synthetic oligonucleotide
uauaaaaauaaau

SEQ ID NO: 36274 - RNA, 13 nt, Artificial Sequence
  Description of Artificial Sequence: Synthetic oligonucleotide
uaaaaauaaauau

SEQ ID NO: 36275 - RNA, 13 nt, Artificial Sequence
  Description of Artificial Sequence: Synthetic oligonucleotide
uuugacugcugug

SEQ ID NO: 36276 - RNA, 13 nt, Artificial Sequence
  Description of Artificial Sequence: Synthetic oligonucleotide
ggagaugagagac

SEQ ID NO: 36277 - RNA, 10 nt, Artificial Sequence
  Description of Artificial Sequence: Synthetic oligonucleotide
ucccacuugg

SEQ ID NO: 36278 - RNA, 10 nt, Artificial Sequence
  Description of Artificial Sequence: Synthetic oligonucleotide
guucacggcc

SEQ ID NO: 36279 - RNA, 12 nt, Artificial Sequence
  Description of Artificial Sequence: Synthetic oligonucleotide
accaucacacca

SEQ ID NO: 36280 - RNA, 10 nt, Artificial Sequence
  Description of Artificial Sequence: Synthetic oligonucleotide
cugcggguuu

SEQ ID NO: 36281 - RNA, 9 nt, Artificial Sequence
  Description of Artificial Sequence: Synthetic oligonucleotide
uccaguuug

SEQ ID NO: 36282 - RNA, 12 nt, Artificial Sequence
  Description of Artificial Sequence: Synthetic oligonucleotide
uuaaggacuucu

SEQ ID NO: 36283 - RNA, 12 nt, Artificial Sequence
  Description of Artificial Sequence: Synthetic oligonucleotide
agugggacagag

SEQ ID NO: 36284 - RNA, 13 nt, Artificial Sequence
  Description of Artificial Sequence: Synthetic oligonucleotide
auuuguuauugug

SEQ ID NO: 36285 - RNA, 12 nt, Artificial Sequence
  Description of Artificial Sequence: Synthetic oligonucleotide
ucaaaugcauuu

SEQ ID NO: 36286 - RNA, 9 nt, Artificial Sequence
  Description of Artificial Sequence: Synthetic oligonucleotide
aggaaagcc

SEQ ID NO: 36287 - RNA, 10 nt, Artificial Sequence
  Description of Artificial Sequence: Synthetic oligonucleotide
ggaaagcccu

SEQ ID NO: 36288 - RNA, 11 nt, Artificial Sequence
  Description of Artificial Sequence: Synthetic oligonucleotide
ccagcauggcc

SEQ ID NO: 36289 - RNA, 10 nt, Artificial Sequence
  Description of Artificial Sequence: Synthetic oligonucleotide
uucucccuga

SEQ ID NO: 36290 - RNA, 11 nt, Artificial Sequence
  Description of Artificial Sequence: Synthetic oligonucleotide
aagaagcccuu

SEQ ID NO: 36291 - RNA, 11 nt, Artificial Sequence
  Description of Artificial Sequence: Synthetic oligonucleotide
gaagcccuuca

SEQ ID NO: 36292 - RNA, 10 nt, Artificial Sequence
  Description of Artificial Sequence: Synthetic oligonucleotide
cccuucagcg

SEQ ID NO: 36293 - RNA, 10 nt, Artificial Sequence
  Description of Artificial Sequence: Synthetic oligonucleotide
cuucagcggc

SEQ ID NO: 36294 - RNA, 11 nt, Artificial Sequence
  Description of Artificial Sequence: Synthetic oligonucleotide
cagcggccagu

SEQ ID NO: 36295 - RNA, 11 nt, Artificial Sequence
  Description of Artificial Sequence: Synthetic oligonucleotide
gaaaagcuccg

SEQ ID NO: 36296 - RNA, 10 nt, Artificial Sequence
  Description of Artificial Sequence: Synthetic oligonucleotide
aaagcuccgg

SEQ ID NO: 36297 - RNA, 12 nt, Artificial Sequence
  Description of Artificial Sequence: Synthetic oligonucleotide
gucaacagucug

SEQ ID NO: 36298 - RNA, 12 nt, Artificial Sequence
  Description of Artificial Sequence: Synthetic oligonucleotide
agaguucaaaag

SEQ ID NO: 36299 - RNA, 12 nt, Artificial Sequence
  Description of Artificial Sequence: Synthetic oligonucleotide
gaguucaaaagc

SEQ ID NO: 36300 - RNA, 11 nt, Artificial Sequence
  Description of Artificial Sequence: Synthetic oligonucleotide
ucaaaagcccu

SEQ ID NO: 36301 - RNA, 11 nt, Artificial Sequence
  Description of Artificial Sequence: Synthetic oligonucleotide
caaaagcccuu

SEQ ID NO: 36302 - RNA, 11 nt, Artificial Sequence
  Description of Artificial Sequence: Synthetic oligonucleotide
aaagcccuuca

SEQ ID NO: 36303 - RNA, 11 nt, Artificial Sequence
  Description of Artificial Sequence: Synthetic oligonucleotide
aagcccuucag

SEQ ID NO: 36304 - RNA, 12 nt, Artificial Sequence
  Description of Artificial Sequence: Synthetic oligonucleotide
ugaagccgcucg

SEQ ID NO: 36305 - RNA, 11 nt, Artificial Sequence
  Description of Artificial Sequence: Synthetic oligonucleotide
acgccagucaa

SEQ ID NO: 36306 - RNA, 12 nt, Artificial Sequence
  Description of Artificial Sequence: Synthetic oligonucleotide
ucuuggugcgug

SEQ ID NO: 36307 - RNA, 13 nt, Artificial Sequence
  Description of Artificial Sequence: Synthetic oligonucleotide
uuggauucaucag

SEQ ID NO: 36308 - RNA, 12 nt, Artificial Sequence
  Description of Artificial Sequence: Synthetic oligonucleotide
ggaauaccuaag

SEQ ID NO: 36309 - RNA, 11 nt, Artificial Sequence
  Description of Artificial Sequence: Synthetic oligonucleotide
uuugaggcuca

SEQ ID NO: 36310 - RNA, 10 nt, Artificial Sequence
  Description of Artificial Sequence: Synthetic oligonucleotide
cuacaauugg

SEQ ID NO: 36311 - RNA, 11 nt, Artificial Sequence
  Description of Artificial Sequence: Synthetic oligonucleotide
aguuaggagcc

SEQ ID NO: 36312 - RNA, 12 nt, Artificial Sequence
  Description of Artificial Sequence: Synthetic oligonucleotide
gucaauauccac

SEQ ID NO: 36313 - RNA, 12 nt, Artificial Sequence
  Description of Artificial Sequence: Synthetic oligonucleotide
uguucagucaca

SEQ ID NO: 36314 - RNA, 11 nt, Artificial Sequence
  Description of Artificial Sequence: Synthetic oligonucleotide
cacacacauac

SEQ ID NO: 36315 - RNA, 11 nt, Artificial Sequence
  Description of Artificial Sequence: Synthetic oligonucleotide
uccuuuugcuu

SEQ ID NO: 36316 - RNA, 15 nt, Artificial Sequence
  Description of Artificial Sequence: Synthetic oligonucleotide
uuuaaaguaauuuuu

SEQ ID NO: 36317 - RNA, 12 nt, Artificial Sequence
  Description of Artificial Sequence: Synthetic oligonucleotide
aacagucaaugg

SEQ ID NO: 36318 - RNA, 12 nt, Artificial Sequence
  Description of Artificial Sequence: Synthetic oligonucleotide
cgacaaaccaau

SEQ ID NO: 36319 - RNA, 11 nt, Artificial Sequence
  Description of Artificial Sequence: Synthetic oligonucleotide
cugcuaccacu

SEQ ID NO: 36320 - RNA, 12 nt, Artificial Sequence
  Description of Artificial Sequence: Synthetic oligonucleotide
caagcggucuua

SEQ ID NO: 36321 - RNA, 12 nt, Artificial Sequence
  Description of Artificial Sequence: Synthetic oligonucleotide
gucuuaccggcu

SEQ ID NO: 36322 - RNA, 10 nt, Artificial Sequence
  Description of Artificial Sequence: Synthetic oligonucleotide
auggguuacc

SEQ ID NO: 36323 - RNA, 10 nt, Artificial Sequence
  Description of Artificial Sequence: Synthetic oligonucleotide
uuaccugcga

SEQ ID NO: 36324 - RNA, 11 nt, Artificial Sequence
  Description of Artificial Sequence: Synthetic oligonucleotide
aucuugcugag

SEQ ID NO: 36325 - RNA, 12 nt, Artificial Sequence
  Description of Artificial Sequence: Synthetic oligonucleotide
gcauaaaacagu

SEQ ID NO: 36326 - RNA, 11 nt, Artificial Sequence
  Description of Artificial Sequence: Synthetic oligonucleotide
uccuuuauccu

SEQ ID NO: 36327 - RNA, 11 nt, Artificial Sequence
  Description of Artificial Sequence: Synthetic oligonucleotide
aacgcaaguug

SEQ ID NO: 36328 - RNA, 12 nt, Artificial Sequence
  Description of Artificial Sequence: Synthetic oligonucleotide
aacugaaaccau

SEQ ID NO: 36329 - RNA, 13 nt, Artificial Sequence
  Description of Artificial Sequence: Synthetic oligonucleotide
cuuuguuaaauau

SEQ ID NO: 36330 - RNA, 13 nt, Artificial Sequence
  Description of Artificial Sequence: Synthetic oligonucleotide
uauauuaaaaguu

SEQ ID NO: 36331 - RNA, 12 nt, Artificial Sequence
  Description of Artificial Sequence: Synthetic oligonucleotide
uuuugacuuaac

SEQ ID NO: 36332 - RNA, 12 nt, Artificial Sequence
  Description of Artificial Sequence: Synthetic oligonucleotide
caaacucagcac

SEQ ID NO: 36333 - RNA, 10 nt, Artificial Sequence
  Description of Artificial Sequence: Synthetic oligonucleotide
gcugaccuca

SEQ ID NO: 36334 - RNA, 13 nt, Artificial Sequence
  Description of Artificial Sequence: Synthetic oligonucleotide
uuauucagaucgc

SEQ ID NO: 36335 - RNA, 12 nt, Artificial Sequence
  Description of Artificial Sequence: Synthetic oligonucleotide
ggguucugggau

SEQ ID NO: 36336 - RNA, 14 nt, Artificial Sequence
  Description of Artificial Sequence: Synthetic oligonucleotide
uauuggaaauuaug

SEQ ID NO: 36337 - RNA, 12 nt, Artificial Sequence
  Description of Artificial Sequence: Synthetic oligonucleotide
uggaagcacuag

SEQ ID NO: 36338 - RNA, 12 nt, Artificial Sequence
  Description of Artificial Sequence: Synthetic oligonucleotide
uuuuuaugugga

SEQ ID NO: 36339 - RNA, 11 nt, Artificial Sequence
  Description of Artificial Sequence: Synthetic oligonucleotide
gaauugguaga

SEQ ID NO: 36340 - RNA, 12 nt, Artificial Sequence
  Description of Artificial Sequence: Synthetic oligonucleotide
uagacuuggaga

SEQ ID NO: 36341 - RNA, 12 nt, Artificial Sequence
  Description of Artificial Sequence: Synthetic oligonucleotide
uacaguauucca

SEQ ID NO: 36342 - RNA, 14 nt, Artificial Sequence
  Description of Artificial Sequence: Synthetic oligonucleotide
cacugaugaauuaa

SEQ ID NO: 36343 - RNA, 11 nt, Artificial Sequence
  Description of Artificial Sequence: Synthetic oligonucleotide
cacaucaucac

SEQ ID NO: 36344 - RNA, 12 nt, Artificial Sequence
  Description of Artificial Sequence: Synthetic oligonucleotide
ucaccaaacaga

SEQ ID NO: 36345 - RNA, 11 nt, Artificial Sequence
  Description of Artificial Sequence: Synthetic oligonucleotide
gaacaugaugg

SEQ ID NO: 36346 - RNA, 11 nt, Artificial Sequence
  Description of Artificial Sequence: Synthetic oligonucleotide
auguagacugc

SEQ ID NO: 36347 - RNA, 12 nt, Artificial Sequence
  Description of Artificial Sequence: Synthetic oligonucleotide
gaucuauuuaug

SEQ ID NO: 36348 - RNA, 11 nt, Artificial Sequence
  Description of Artificial Sequence: Synthetic oligonucleotide
cacuauuauca

SEQ ID NO: 36349 - RNA, 10 nt, Artificial Sequence
  Description of Artificial Sequence: Synthetic oligonucleotide
ucaguucugc

SEQ ID NO: 36350 - RNA, 12 nt, Artificial Sequence
  Description of Artificial Sequence: Synthetic oligonucleotide
gauuaaaccuac

SEQ ID NO: 36351 - RNA, 12 nt, Artificial Sequence
  Description of Artificial Sequence: Synthetic oligonucleotide
uaaaauccuucu

SEQ ID NO: 36352 - RNA, 11 nt, Artificial Sequence
  Description of Artificial Sequence: Synthetic oligonucleotide
augcuguagac

SEQ ID NO: 36353 - RNA, 12 nt, Artificial Sequence
  Description of Artificial Sequence: Synthetic oligonucleotide
ugauaggaauag

SEQ ID NO: 36354 - RNA, 10 nt, Artificial Sequence
  Description of Artificial Sequence: Synthetic oligonucleotide
auggcccuga

SEQ ID NO: 36355 - RNA, 10 nt, Artificial Sequence
  Description of Artificial Sequence: Synthetic oligonucleotide
uccucaagca

SEQ ID NO: 36356 - RNA, 9 nt, Artificial Sequence
  Description of Artificial Sequence: Synthetic oligonucleotide
uucagccca

SEQ ID NO: 36357 - RNA, 10 nt, Artificial Sequence
  Description of Artificial Sequence: Synthetic oligonucleotide
cugcugaacc

SEQ ID NO: 36358 - RNA, 11 nt, Artificial Sequence
  Description of Artificial Sequence: Synthetic oligonucleotide
aguucucuuca

SEQ ID NO: 36359 - RNA, 10 nt, Artificial Sequence
  Description of Artificial Sequence: Synthetic oligonucleotide
cagccuagag

SEQ ID NO: 36360 - RNA, 12 nt, Artificial Sequence
  Description of Artificial Sequence: Synthetic oligonucleotide
ucugugaagugu

SEQ ID NO: 36361 - RNA, 13 nt, Artificial Sequence
  Description of Artificial Sequence: Synthetic oligonucleotide
gagaaaauuucaa

SEQ ID NO: 36362 - RNA, 10 nt, Artificial Sequence
  Description of Artificial Sequence: Synthetic oligonucleotide
auccuccuga

SEQ ID NO: 36363 - RNA, 11 nt, Artificial Sequence
  Description of Artificial Sequence: Synthetic oligonucleotide
ugacaucauau

SEQ ID NO: 36364 - RNA, 12 nt, Artificial Sequence
  Description of Artificial Sequence: Synthetic oligonucleotide
aucuucaucaua

SEQ ID NO: 36365 - RNA, 12 nt, Artificial Sequence
  Description of Artificial Sequence: Synthetic oligonucleotide
acuagcuauuaa

SEQ ID NO: 36366 - RNA, 13 nt, Artificial Sequence
  Description of Artificial Sequence: Synthetic oligonucleotide
cucuacuaaaaau

SEQ ID NO: 36367 - RNA, 11 nt, Artificial Sequence
  Description of Artificial Sequence: Synthetic oligonucleotide
cuaucucgccu

SEQ ID NO: 36368 - RNA, 12 nt, Artificial Sequence
  Description of Artificial Sequence: Synthetic oligonucleotide
uucgguccaguu

SEQ ID NO: 36369 - RNA, 10 nt, Artificial Sequence
  Description of Artificial Sequence: Synthetic oligonucleotide
auguagccgc

SEQ ID NO: 36370 - RNA, 11 nt, Artificial Sequence
  Description of Artificial Sequence: Synthetic oligonucleotide
gaggagacuug

SEQ ID NO: 36371 - RNA, 11 nt, Artificial Sequence
  Description of Artificial Sequence: Synthetic oligonucleotide
aguagugagga

SEQ ID NO: 36372 - RNA, 13 nt, Artificial Sequence
  Description of Artificial Sequence: Synthetic oligonucleotide
agaugaguacaaa

SEQ ID NO: 36373 - RNA, 12 nt, Artificial Sequence
  Description of Artificial Sequence: Synthetic oligonucleotide
uuguuaaugggc

SEQ ID NO: 36374 - RNA, 12 nt, Artificial Sequence
  Description of Artificial Sequence: Synthetic oligonucleotide
uuuuaauuuauu

SEQ ID NO: 36375 - RNA, 11 nt, Artificial Sequence
  Description of Artificial Sequence: Synthetic oligonucleotide
auuuaaauaug

SEQ ID NO: 36376 - RNA, 12 nt, Artificial Sequence
  Description of Artificial Sequence: Synthetic oligonucleotide
auccuuuguuuc

SEQ ID NO: 36377 - RNA, 13 nt, Artificial Sequence
  Description of Artificial Sequence: Synthetic oligonucleotide
gucuaaguguuug

SEQ ID NO: 36378 - RNA, 11 nt, Artificial Sequence
  Description of Artificial Sequence: Synthetic oligonucleotide
ccugugacaaa

SEQ ID NO: 36379 - RNA, 12 nt, Artificial Sequence
  Description of Artificial Sequence: Synthetic oligonucleotide
caggcugaauua

SEQ ID NO: 36380 - RNA, 13 nt, Artificial Sequence
  Description of Artificial Sequence: Synthetic oligonucleotide
ucauucuuacaau

SEQ ID NO: 36381 - RNA, 14 nt, Artificial Sequence
  Description of Artificial Sequence: Synthetic oligonucleotide
cauucuuacaauug

SEQ ID NO: 36382 - RNA, 11 nt, Artificial Sequence
  Description of Artificial Sequence: Synthetic oligonucleotide
agagaguguac

SEQ ID NO: 36383 - RNA, 11 nt, Artificial Sequence
  Description of Artificial Sequence: Synthetic oligonucleotide
gaacucagcag

SEQ ID NO: 36384 - RNA, 12 nt, Artificial Sequence
  Description of Artificial Sequence: Synthetic oligonucleotide
uuauuuucagua

SEQ ID NO: 36385 - RNA, 11 nt, Artificial Sequence
  Description of Artificial Sequence: Synthetic oligonucleotide
cuuaaauggaa

SEQ ID NO: 36386 - RNA, 12 nt, Artificial Sequence
  Description of Artificial Sequence: Synthetic oligonucleotide
gccuaaaauugu

SEQ ID NO: 36387 - RNA, 12 nt, Artificial Sequence
  Description of Artificial Sequence: Synthetic oligonucleotide
acuaacaucugg

SEQ ID NO: 36388 - RNA, 11 nt, Artificial Sequence
  Description of Artificial Sequence: Synthetic oligonucleotide
gacugugagcu

SEQ ID NO: 36389 - RNA, 13 nt, Artificial Sequence
  Description of Artificial Sequence: Synthetic oligonucleotide
gcuuuuuauuaau

SEQ ID NO: 36390 - RNA, 12 nt, Artificial Sequence
  Description of Artificial Sequence: Synthetic oligonucleotide
ucuucuuacauu

SEQ ID NO: 36391 - RNA, 14 nt, Artificial Sequence
  Description of Artificial Sequence: Synthetic oligonucleotide
auuuguaaaaaugu

SEQ ID NO: 36392 - RNA, 14 nt, Artificial Sequence
  Description of Artificial Sequence: Synthetic oligonucleotide
ucuuaauucauauu

SEQ ID NO: 36393 - RNA, 12 nt, Artificial Sequence
  Description of Artificial Sequence: Synthetic oligonucleotide
aacuaaucauga

SEQ ID NO: 36394 - RNA, 11 nt, Artificial Sequence
  Description of Artificial Sequence: Synthetic oligonucleotide
cugcucuuggg

SEQ ID NO: 36395 - RNA, 12 nt, Artificial Sequence
  Description of Artificial Sequence: Synthetic oligonucleotide
aguagcuuugag

SEQ ID NO: 36396 - RNA, 13 nt, Artificial Sequence
  Description of Artificial Sequence: Synthetic oligonucleotide
acguaauauuuca

SEQ ID NO: 36397 - RNA, 12 nt, Artificial Sequence
  Description of Artificial Sequence: Synthetic oligonucleotide
auucucuucacu

SEQ ID NO: 36398 - RNA, 13 nt, Artificial Sequence
  Description of Artificial Sequence: Synthetic oligonucleotide
uaaugcuaagaaa

SEQ ID NO: 36399 - RNA, 11 nt, Artificial Sequence
  Description of Artificial Sequence: Synthetic oligonucleotide
cugaaaaucaa

SEQ ID NO: 36400 - RNA, 13 nt, Artificial Sequence
  Description of Artificial Sequence: Synthetic oligonucleotide
auaugauuacuuu

SEQ ID NO: 36401 - RNA, 13 nt, Artificial Sequence
  Description of Artificial Sequence: Synthetic oligonucleotide
auuuuguucuaca

SEQ ID NO: 36402 - RNA, 11 nt, Artificial Sequence
  Description of Artificial Sequence: Synthetic oligonucleotide
ccgggacucuc

SEQ ID NO: 36403 - RNA, 13 nt, Artificial Sequence
  Description of Artificial Sequence: Synthetic oligonucleotide
cuuuaaaguaaag

SEQ ID NO: 36404 - RNA, 12 nt, Artificial Sequence
  Description of Artificial Sequence: Synthetic oligonucleotide
cuggaagccugg

SEQ ID NO: 36405 - RNA, 13 nt, Artificial Sequence
  Description of Artificial Sequence: Synthetic oligonucleotide
aaacaaaagagag

SEQ ID NO: 36406 - RNA, 12 nt, Artificial Sequence
  Description of Artificial Sequence: Synthetic oligonucleotide
ucaguuaugccg

SEQ ID NO: 36407 - RNA, 12 nt, Artificial Sequence
  Description of Artificial Sequence: Synthetic oligonucleotide
aaaagaagucca

SEQ ID NO: 36408 - RNA, 10 nt, Artificial Sequence
  Description of Artificial Sequence: Synthetic oligonucleotide
ggugagguua

SEQ ID NO: 36409 - RNA, 10 nt, Artificial Sequence
  Description of Artificial Sequence: Synthetic oligonucleotide
ggaagaggac

SEQ ID NO: 36410 - RNA, 12 nt, Artificial Sequence
  Description of Artificial Sequence: Synthetic oligonucleotide
agcaaguauugu

SEQ ID NO: 36411 - RNA, 11 nt, Artificial Sequence
  Description of Artificial Sequence: Synthetic oligonucleotide
uuguagcacuc

SEQ ID NO: 36412 - RNA, 13 nt, Artificial Sequence
  Description of Artificial Sequence: Synthetic oligonucleotide
caaaaccacaaau

SEQ ID NO: 36413 - RNA, 11 nt, Artificial Sequence
  Description of Artificial Sequence: Synthetic oligonucleotide
aagcccauaca

SEQ ID NO: 36414 - RNA, 10 nt, Artificial Sequence
  Description of Artificial Sequence: Synthetic oligonucleotide
gcccauacag

SEQ ID NO: 36415 - RNA, 11 nt, Artificial Sequence
  Description of Artificial Sequence: Synthetic oligonucleotide
agaaaccuucc

SEQ ID NO: 36416 - RNA, 9 nt, Artificial Sequence
  Description of Artificial Sequence: Synthetic oligonucleotide
uauaccuac

SEQ ID NO: 36417 - RNA, 12 nt, Artificial Sequence
  Description of Artificial Sequence: Synthetic oligonucleotide
ccaguuuucgga

SEQ ID NO: 36418 - RNA, 8 nt, Artificial Sequence
  Description of Artificial Sequence: Synthetic oligonucleotide
gaacaggg

SEQ ID NO: 36419 - RNA, 12 nt, Artificial Sequence
  Description of Artificial Sequence: Synthetic oligonucleotide
uaacuuuccagu

SEQ ID NO: 36420 - RNA, 13 nt, Artificial Sequence
  Description of Artificial Sequence: Synthetic oligonucleotide
aaguuugguuuug

SEQ ID NO: 36421 - RNA, 11 nt, Artificial Sequence
  Description of Artificial Sequence: Synthetic oligonucleotide
uucccacugua

SEQ ID NO: 36422 - RNA, 12 nt, Artificial Sequence
  Description of Artificial Sequence: Synthetic oligonucleotide
gauaccauauga

SEQ ID NO: 36423 - RNA, 10 nt, Artificial Sequence
  Description of Artificial Sequence: Synthetic oligonucleotide
acaugggcug

SEQ ID NO: 36424 - RNA, 12 nt, Artificial Sequence
  Description of Artificial Sequence: Synthetic oligonucleotide
aacuuuuucaua

SEQ ID NO: 36425 - RNA, 11 nt, Artificial Sequence
  Description of Artificial Sequence: Synthetic oligonucleotide
augaggccgga

SEQ ID NO: 36426 - RNA, 10 nt, Artificial Sequence
  Description of Artificial Sequence: Synthetic oligonucleotide
cugcauuugu

SEQ ID NO: 36427 - RNA, 12 nt, Artificial Sequence
  Description of Artificial Sequence: Synthetic oligonucleotide
auguuuacuacc

SEQ ID NO: 36428 - RNA, 14 nt, Artificial Sequence
  Description of Artificial Sequence: Synthetic oligonucleotide
auuuuuugaugaaa

SEQ ID NO: 36429 - RNA, 13 nt, Artificial Sequence
  Description of Artificial Sequence: Synthetic oligonucleotide
agugugugaauuu

SEQ ID NO: 36430 - RNA, 12 nt, Artificial Sequence
  Description of Artificial Sequence: Synthetic oligonucleotide
agcaauguaugu

SEQ ID NO: 36431 - RNA, 13 nt, Artificial Sequence
  Description of Artificial Sequence: Synthetic oligonucleotide
aagcacauauaua

SEQ ID NO: 36432 - RNA, 13 nt, Artificial Sequence
  Description of Artificial Sequence: Synthetic oligonucleotide
uaauaguuucucc

SEQ ID NO: 36433 - RNA, 12 nt, Artificial Sequence
  Description of Artificial Sequence: Synthetic oligonucleotide
guuucuccaaau

SEQ ID NO: 36434 - RNA, 12 nt, Artificial Sequence
  Description of Artificial Sequence: Synthetic oligonucleotide
acuuccuagaaa

SEQ ID NO: 36435 - RNA, 12 nt, Artificial Sequence
  Description of Artificial Sequence: Synthetic oligonucleotide
acaccauauaug

SEQ ID NO: 36436 - RNA, 13 nt, Artificial Sequence
  Description of Artificial Sequence: Synthetic oligonucleotide
uauaugaauggag

SEQ ID NO: 36437 - RNA, 12 nt, Artificial Sequence
  Description of Artificial Sequence: Synthetic oligonucleotide
cauuuacaggga

SEQ ID NO: 36438 - RNA, 12 nt, Artificial Sequence
  Description of Artificial Sequence: Synthetic oligonucleotide
auuuacagggac

SEQ ID NO: 36439 - RNA, 9 nt, Artificial Sequence
  Description of Artificial Sequence: Synthetic oligonucleotide
gggaccuga

SEQ ID NO: 36440 - RNA, 13 nt, Artificial Sequence
  Description of Artificial Sequence: Synthetic oligonucleotide
guuugacugcauc

SEQ ID NO: 36441 - RNA, 12 nt, Artificial Sequence
  Description of Artificial Sequence: Synthetic oligonucleotide
uugacugcaucg

SEQ ID NO: 36442 - RNA, 11 nt, Artificial Sequence
  Description of Artificial Sequence: Synthetic oligonucleotide
aguucacaggg

SEQ ID NO: 36443 - RNA, 12 nt, Artificial Sequence
  Description of Artificial Sequence: Synthetic oligonucleotide
gcaccucugucc

SEQ ID NO: 36444 - RNA, 14 nt, Artificial Sequence
  Description of Artificial Sequence: Synthetic oligonucleotide
guuugucuuuuuaa

SEQ ID NO: 36445 - RNA, 13 nt, Artificial Sequence
  Description of Artificial Sequence: Synthetic oligonucleotide
uugucuuuuuaag

SEQ ID NO: 36446 - RNA, 12 nt, Artificial Sequence
  Description of Artificial Sequence: Synthetic oligonucleotide
cuaaagguuguc

SEQ ID NO: 36447 - RNA, 11 nt, Artificial Sequence
  Description of Artificial Sequence: Synthetic oligonucleotide
agguugucgac

SEQ ID NO: 36448 - RNA, 12 nt, Artificial Sequence
  Description of Artificial Sequence: Synthetic oligonucleotide
ccuggcaauugu

SEQ ID NO: 36449 - RNA, 11 nt, Artificial Sequence
  Description of Artificial Sequence: Synthetic oligonucleotide
guggugcgagg

SEQ ID NO: 36450 - RNA, 12 nt, Artificial Sequence
  Description of Artificial Sequence: Synthetic oligonucleotide
gagacaugaaau

SEQ ID NO: 36451 - RNA, 12 nt, Artificial Sequence
  Description of Artificial Sequence: Synthetic oligonucleotide
uauauuucucca

SEQ ID NO: 36452 - RNA, 9 nt, Artificial Sequence
  Description of Artificial Sequence: Synthetic oligonucleotide
augaaggcu

SEQ ID NO: 36453 - RNA, 10 nt, Artificial Sequence
  Description of Artificial Sequence: Synthetic oligonucleotide
cuggaguggu

SEQ ID NO: 36454 - RNA, 10 nt, Artificial Sequence
  Description of Artificial Sequence: Synthetic oligonucleotide
ggaagagagg

SEQ ID NO: 36455 - RNA, 11 nt, Artificial Sequence
  Description of Artificial Sequence: Synthetic oligonucleotide
uugcaucgggc

SEQ ID NO: 36456 - RNA, 12 nt, Artificial Sequence
  Description of Artificial Sequence: Synthetic oligonucleotide
uauccuacugug

SEQ ID NO: 36457 - RNA, 12 nt, Artificial Sequence
  Description of Artificial Sequence: Synthetic oligonucleotide
ccuacuguguaa

SEQ ID NO: 36458 - RNA, 11 nt, Artificial Sequence
  Description of Artificial Sequence: Synthetic oligonucleotide
cuuguagugua

SEQ ID NO: 36459 - RNA, 12 nt, Artificial Sequence
  Description of Artificial Sequence: Synthetic oligonucleotide
cuuuguugauug

SEQ ID NO: 36460 - RNA, 13 nt, Artificial Sequence
  Description of Artificial Sequence: Synthetic oligonucleotide
uuguugauugaaa

SEQ ID NO: 36461 - RNA, 14 nt, Artificial Sequence
  Description of Artificial Sequence: Synthetic oligonucleotide
ucuuuuucuuccau

SEQ ID NO: 36462 - RNA, 12 nt, Artificial Sequence
  Description of Artificial Sequence: Synthetic oligonucleotide
aucuuccuucua

SEQ ID NO: 36463 - RNA, 12 nt, Artificial Sequence
  Description of Artificial Sequence: Synthetic oligonucleotide
ugaaugcuucau

SEQ ID NO: 36464 - RNA, 12 nt, Artificial Sequence
  Description of Artificial Sequence: Synthetic oligonucleotide
gaaugcuucaug

SEQ ID NO: 36465 - RNA, 12 nt, Artificial Sequence
  Description of Artificial Sequence: Synthetic oligonucleotide
auucuacuuuga

SEQ ID NO: 36466 - RNA, 12 nt, Artificial Sequence
  Description of Artificial Sequence: Synthetic oligonucleotide
gcaacuacagac

SEQ ID NO: 36467 - RNA, 12 nt, Artificial Sequence
  Description of Artificial Sequence: Synthetic oligonucleotide
accaaggucaac

SEQ ID NO: 36468 - RNA, 12 nt, Artificial Sequence
  Description of Artificial Sequence: Synthetic oligonucleotide
gacuaucucgac

SEQ ID NO: 36469 - RNA, 12 nt, Artificial Sequence
  Description of Artificial Sequence: Synthetic oligonucleotide
accuucccaaac

SEQ ID NO: 36470 - RNA, 13 nt, Artificial Sequence
  Description of Artificial Sequence: Synthetic oligonucleotide
caagcuuagaacu

SEQ ID NO: 36471 - RNA, 14 nt, Artificial Sequence
  Description of Artificial Sequence: Synthetic oligonucleotide
gcuuagaacuuuaa

SEQ ID NO: 36472 - RNA, 13 nt, Artificial Sequence
  Description of Artificial Sequence: Synthetic oligonucleotide
aacuuuaagcaac

SEQ ID NO: 36473 - RNA, 10 nt, Artificial Sequence
  Description of Artificial Sequence: Synthetic oligonucleotide
agaccaccac

SEQ ID NO: 36474 - RNA, 13 nt, Artificial Sequence
  Description of Artificial Sequence: Synthetic oligonucleotide
cgagaaauaaagu

SEQ ID NO: 36475 - RNA, 13 nt, Artificial Sequence
  Description of Artificial Sequence: Synthetic oligonucleotide
gagaaauaaaguu

SEQ ID NO: 36476 - RNA, 11 nt, Artificial Sequence
  Description of Artificial Sequence: Synthetic oligonucleotide
ggaaaugaucc

SEQ ID NO: 36477 - RNA, 12 nt, Artificial Sequence
  Description of Artificial Sequence: Synthetic oligonucleotide
aagaaaugaaac

SEQ ID NO: 36478 - RNA, 12 nt, Artificial Sequence
  Description of Artificial Sequence: Synthetic oligonucleotide
uuuccauccucc

SEQ ID NO: 36479 - RNA, 14 nt, Artificial Sequence
  Description of Artificial Sequence: Synthetic oligonucleotide
cugaaaaucuuuga

SEQ ID NO: 36480 - RNA, 10 nt, Artificial Sequence
  Description of Artificial Sequence: Synthetic oligonucleotide
gccguucagg

SEQ ID NO: 36481 - RNA, 12 nt, Artificial Sequence
  Description of Artificial Sequence: Synthetic oligonucleotide
aggguccagaag

SEQ ID NO: 36482 - RNA, 12 nt, Artificial Sequence
  Description of Artificial Sequence: Synthetic oligonucleotide
caagacugcuug

SEQ ID NO: 36483 - RNA, 12 nt, Artificial Sequence
  Description of Artificial Sequence: Synthetic oligonucleotide
ccaugucuuugg

SEQ ID NO: 36484 - RNA, 10 nt, Artificial Sequence
  Description of Artificial Sequence: Synthetic oligonucleotide
ccugaaacac

SEQ ID NO: 36485 - RNA, 11 nt, Artificial Sequence
  Description of Artificial Sequence: Synthetic oligonucleotide
cucuguaccuc

SEQ ID NO: 36486 - RNA, 11 nt, Artificial Sequence
  Description of Artificial Sequence: Synthetic oligonucleotide
gcaagacaaga

SEQ ID NO: 36487 - RNA, 12 nt, Artificial Sequence
  Description of Artificial Sequence: Synthetic oligonucleotide
caagacaagaaa

SEQ ID NO: 36488 - RNA, 11 nt, Artificial Sequence
  Description of Artificial Sequence: Synthetic oligonucleotide
guacaagaucc

SEQ ID NO: 36489 - RNA, 11 nt, Artificial Sequence
  Description of Artificial Sequence: Synthetic oligonucleotide
guacuugcaga

SEQ ID NO: 36490 - RNA, 12 nt, Artificial Sequence
  Description of Artificial Sequence: Synthetic oligonucleotide
gaucgauacaga

SEQ ID NO: 36491 - RNA, 12 nt, Artificial Sequence
  Description of Artificial Sequence: Synthetic oligonucleotide
auaaaaauaaau

SEQ ID NO: 36492 - RNA, 12 nt, Artificial Sequence
  Description of Artificial Sequence: Synthetic oligonucleotide
aaaaauaaauau

SEQ ID NO: 36493 - RNA, 12 nt, Artificial Sequence
  Description of Artificial Sequence: Synthetic oligonucleotide
uugacugcugug

SEQ ID NO: 36494 - RNA, 12 nt, Artificial Sequence
  Description of Artificial Sequence: Synthetic oligonucleotide
gagaugagagac

SEQ ID NO: 36495 - RNA, 9 nt, Artificial Sequence
  Description of Artificial Sequence: Synthetic oligonucleotide
cccacuugg

SEQ ID NO: 36496 - RNA, 2420 nt, Homo sapiens
ucgggcgcgggcgcggggcgcggggcugggcccgggcggagcggcggcugcuccggacaugucgggcccucgcgccggcuucuaccggcaggagcugaacaagaccgugugggaggugccgcagcggcugcaggggcugcgcccggugggcuccggcgccuacggcuccgucuguucggccuacgacgcccggcugcgccagaagguggcggugaagaagcugucgcgccccuuccagucgcugauccacgcgcgcagaacguaccgggagcugcggcugcucaagcaccugaagcacgagaacgucaucgggcuucuggacgucuucacgccggccacguccaucgaggacuucagcgaaguguacuuggugaccacccugaugggcgccgaccugaacaacaucgucaagugccaggcgcugagcgacgagcacguucaauuccugguuuaccagcugcugcgcgggcugaaguacauccacucggccgggaucauccaccgggaccugaagcccagcaacguggcugugaacgaggacugugagcucaggauccuggauuucgggcuggcgcgccaggcggacgaggagaugaccggcuauguggccacgcgcugguaccgggcaccugagaucaugcucaacuggaugcauuacaaccaaacaguggauaucugguccgugggcugcaucauggcugagcugcuccagggcaaggcccucuucccgggaagcgacuacauugaccagcugaagcgcaucauggaaguggugggcacacccagcccugagguucuggcaaaaaucuccucagaacacgcccggacauauauccagucccugccccccaugccccagaaggaccugagcagcaucuuccguggagccaacccccuggccauagaccuccuuggaaggaugcuggugcuggacagugaccagagggucagugcagcugaggcacuggcccacgccuacuucagccaguaccacgaccccgaggaugagccagaggccgagccauaugaugagagcguugaggccaaggagcgcacgcuggaggaguggaaggagcucacuuaccaggaaguccucagcuucaagcccccagagccaccgaagccaccuggcagccuggagauugagcagugaggugcugcccagcagccccugagagccuguggaggggcuugggccugcacccuuccacagcuggccugguuuccucgagaggcaccucccacacuccuauggucacagacuucuggccuaggaccccucgccuucaggagaaucuacacgcauguaugcaugcacaaacauguguguacaugugcuugccauguguaggagucugggcacaagugucccugggccuaccuugguccuccuguccucuucuggcuacugcacucuccacugggaccugacugugggguccuagaugccaaagggguuccccugcggaguuccccugucugucccaggccgacccaagggagugucagccuugggcucucuucugucccagggcuuucuggaggacgcgcuggggccgggaccccgggagacucaaagggagaggucucagugguuagagcugcucagccuggagguagggggcugucuuggucacugcugagacccacaggucuaagaggagaggcagagccagugugccaccaggcugggcagggacaaccaccaggugucaaaugagaaaagcugccuggagucuuguguucacccgugggugugugugggcacguguggaugagcgugcacuccccguguucauaugucagggcacaugugauguggugcgugugaaucugugggcgcccaaggccagcagccauaucuggcaagaagcuggagccggggugggugugcuguugccuucccucuccucgguuccugaugccuugagggguguuucagacuggcggcuccagugggccaaagggcaaccacaugagcaugggcaggggcuuucuccuuggaugugggacccacagcagcuuccugaggcugggggugggugggugggugguuuggccuugaggacgcuagggcaggcagcacaccuggauguggacuuggacucggacacuucugcccugcacccuggcccgcucucuaccucugcccaccguuguggcccugcagccggagaucugaggugcucuggucugugggucaguccucuuuccuugucccaggauggagcugauccaguaaccucggagacgggacccugcccagagcugaguuggggguguggcucugcccuggaaagggggugaccucuugccucgaggggcccagggaagccugggugucaagugccugcaccaggggugcacaauaaaggggguucucucucaaaaaaaaaaaaaaaaaaaaaaaaaaaaaaaaa

SEQ ID NO: 36497 - RNA, 19 nt, Artificial Sequence
  Description of Artificial Sequence: Synthetic oligonucleotide
ucgggcgcgggcgcggggc

SEQ ID NO: 36498 - RNA, 19 nt, Artificial Sequence
  Description of Artificial Sequence: Synthetic oligonucleotide
cgcggggcugggcccgggc

SEQ ID NO: 36499 - RNA, 19 nt, Artificial Sequence
  Description of Artificial Sequence: Synthetic oligonucleotide
cggagcggcggcugcuccg

SEQ ID NO: 36500 - RNA, 19 nt, Artificial Sequence
  Description of Artificial Sequence: Synthetic oligonucleotide
ggacaugucgggcccucgc

SEQ ID NO: 36501 - RNA, 19 nt, Artificial Sequence
  Description of Artificial Sequence: Synthetic oligonucleotide
cgccggcuucuaccggcag

SEQ ID NO: 36502 - RNA, 19 nt, Artificial Sequence
  Description of Artificial Sequence: Synthetic oligonucleotide
ggagcugaacaagaccgug

SEQ ID NO: 36503 - RNA, 19 nt, Artificial Sequence
  Description of Artificial Sequence: Synthetic oligonucleotide
gugggaggugccgcagcgg

SEQ ID NO: 36504 - RNA, 19 nt, Artificial Sequence
  Description of Artificial Sequence: Synthetic oligonucleotide
gcugcaggggcugcgcccg

SEQ ID NO: 36505 - RNA, 19 nt, Artificial Sequence
  Description of Artificial Sequence: Synthetic oligonucleotide
ggugggcuccggcgccuac

SEQ ID NO: 36506 - RNA, 19 nt, Artificial Sequence
  Description of Artificial Sequence: Synthetic oligonucleotide
cggcuccgucuguucggcc

SEQ ID NO: 36507 - RNA, 19 nt, Artificial Sequence
  Description of Artificial Sequence: Synthetic oligonucleotide
cuacgacgcccggcugcgc

SEQ ID NO: 36508 - RNA, 19 nt, Artificial Sequence
  Description of Artificial Sequence: Synthetic oligonucleotide
ccagaagguggcggugaag

SEQ ID NO: 36509 - RNA, 19 nt, Artificial Sequence
  Description of Artificial Sequence: Synthetic oligonucleotide
gaagcugucgcgccccuuc

SEQ ID NO: 36510 - RNA, 19 nt, Artificial Sequence
  Description of Artificial Sequence: Synthetic oligonucleotide
ccagucgcugauccacgcg

SEQ ID NO: 36511 - RNA, 19 nt, Artificial Sequence
  Description of Artificial Sequence: Synthetic oligonucleotide
gcgcagaacguaccgggag

SEQ ID NO: 36512 - RNA, 19 nt, Artificial Sequence
  Description of Artificial Sequence: Synthetic oligonucleotide
gcugcggcugcucaagcac

SEQ ID NO: 36513 - RNA, 19 nt, Artificial Sequence
  Description of Artificial Sequence: Synthetic oligonucleotide
ccugaagcacgagaacguc

SEQ ID NO: 36514 - RNA, 19 nt, Artificial Sequence
  Description of Artificial Sequence: Synthetic oligonucleotide
caucgggcuucuggacguc

SEQ ID NO: 36515 - RNA, 19 nt, Artificial Sequence
  Description of Artificial Sequence: Synthetic oligonucleotide
cuucacgccggccacgucc

SEQ ID NO: 36516 - RNA, 19 nt, Artificial Sequence
  Description of Artificial Sequence: Synthetic oligonucleotide
caucgaggacuucagcgaa

SEQ ID NO: 36517 - RNA, 19 nt, Artificial Sequence
  Description of Artificial Sequence: Synthetic oligonucleotide
aguguacuuggugaccacc

SEQ ID NO: 36518 - RNA, 19 nt, Artificial Sequence
  Description of Artificial Sequence: Synthetic oligonucleotide
ccugaugggcgccgaccug

SEQ ID NO: 36519 - RNA, 19 nt, Artificial Sequence
  Description of Artificial Sequence: Synthetic oligonucleotide
gaacaacaucgucaagugc

SEQ ID NO: 36520 - RNA, 19 nt, Artificial Sequence
  Description of Artificial Sequence: Synthetic oligonucleotide
ccaggcgcugagcgacgag

SEQ ID NO: 36521 - RNA, 19 nt, Artificial Sequence
  Description of Artificial Sequence: Synthetic oligonucleotide
gcacguucaauuccugguu

SEQ ID NO: 36522 - RNA, 19 nt, Artificial Sequence
  Description of Artificial Sequence: Synthetic oligonucleotide
uuaccagcugcugcgcggg

SEQ ID NO: 36523 - RNA, 19 nt, Artificial Sequence
  Description of Artificial Sequence: Synthetic oligonucleotide
gcugaaguacauccacucg

SEQ ID NO: 36524 - RNA, 19 nt, Artificial Sequence
  Description of Artificial Sequence: Synthetic oligonucleotide
ggccgggaucauccaccgg

SEQ ID NO: 36525 - RNA, 19 nt, Artificial Sequence
  Description of Artificial Sequence: Synthetic oligonucleotide
ggaccugaagcccagcaac

SEQ ID NO: 36526 - RNA, 19 nt, Artificial Sequence
  Description of Artificial Sequence: Synthetic oligonucleotide
cguggcugugaacgaggac

SEQ ID NO: 36527 - RNA, 19 nt, Artificial Sequence
  Description of Artificial Sequence: Synthetic oligonucleotide
cugugagcucaggauccug

SEQ ID NO: 36528 - RNA, 19 nt, Artificial Sequence
  Description of Artificial Sequence: Synthetic oligonucleotide
ggauuucgggcuggcgcgc

SEQ ID NO: 36529 - RNA, 19 nt, Artificial Sequence
  Description of Artificial Sequence: Synthetic oligonucleotide
ccaggcggacgaggagaug

SEQ ID NO: 36530 - RNA, 19 nt, Artificial Sequence
  Description of Artificial Sequence: Synthetic oligonucleotide
gaccggcuauguggccacg

SEQ ID NO: 36531 - RNA, 19 nt, Artificial Sequence
  Description of Artificial Sequence: Synthetic oligonucleotide
gcgcugguaccgggcaccu

SEQ ID NO: 36532 - RNA, 19 nt, Artificial Sequence
  Description of Artificial Sequence: Synthetic oligonucleotide
ugagaucaugcucaacugg

SEQ ID NO: 36533 - RNA, 19 nt, Artificial Sequence
  Description of Artificial Sequence: Synthetic oligonucleotide
gaugcauuacaaccaaaca

SEQ ID NO: 36534 - RNA, 19 nt, Artificial Sequence
  Description of Artificial Sequence: Synthetic oligonucleotide
aguggauaucugguccgug

SEQ ID NO: 36535 - RNA, 19 nt, Artificial Sequence
  Description of Artificial Sequence: Synthetic oligonucleotide
gggcugcaucauggcugag

SEQ ID NO: 36536 - RNA, 19 nt, Artificial Sequence
  Description of Artificial Sequence: Synthetic oligonucleotide
gcugcuccagggcaaggcc

SEQ ID NO: 36537 - RNA, 19 nt, Artificial Sequence
  Description of Artificial Sequence: Synthetic oligonucleotide
ccucuucccgggaagcgac

SEQ ID NO: 36538 - RNA, 19 nt, Artificial Sequence
  Description of Artificial Sequence: Synthetic oligonucleotide
cuacauugaccagcugaag

SEQ ID NO: 36539 - RNA, 19 nt, Artificial Sequence
  Description of Artificial Sequence: Synthetic oligonucleotide
gcgcaucauggaaguggug

SEQ ID NO: 36540 - RNA, 19 nt, Artificial Sequence
  Description of Artificial Sequence: Synthetic oligonucleotide
gggcacacccagcccugag

SEQ ID NO: 36541 - RNA, 19 nt, Artificial Sequence
  Description of Artificial Sequence: Synthetic oligonucleotide
gguucuggcaaaaaucucc

SEQ ID NO: 36542 - RNA, 19 nt, Artificial Sequence
  Description of Artificial Sequence: Synthetic oligonucleotide
cucagaacacgcccggaca

SEQ ID NO: 36543 - RNA, 19 nt, Artificial Sequence
  Description of Artificial Sequence: Synthetic oligonucleotide
auauauccagucccugccc

SEQ ID NO: 36544 - RNA, 19 nt, Artificial Sequence
  Description of Artificial Sequence: Synthetic oligonucleotide
ccccaugccccagaaggac

SEQ ID NO: 36545 - RNA, 19 nt, Artificial Sequence
  Description of Artificial Sequence: Synthetic oligonucleotide
ccugagcagcaucuuccgu

SEQ ID NO: 36546 - RNA, 19 nt, Artificial Sequence
  Description of Artificial Sequence: Synthetic oligonucleotide
uggagccaacccccuggcc

SEQ ID NO: 36547 - RNA, 19 nt, Artificial Sequence
  Description of Artificial Sequence: Synthetic oligonucleotide
cauagaccuccuuggaagg

SEQ ID NO: 36548 - RNA, 19 nt, Artificial Sequence
  Description of Artificial Sequence: Synthetic oligonucleotide
gaugcuggugcuggacagu

SEQ ID NO: 36549 - RNA, 19 nt, Artificial Sequence
  Description of Artificial Sequence: Synthetic oligonucleotide
ugaccagagggucagugca

SEQ ID NO: 36550 - RNA, 19 nt, Artificial Sequence
  Description of Artificial Sequence: Synthetic oligonucleotide
agcugaggcacuggcccac

SEQ ID NO: 36551 - RNA, 19 nt, Artificial Sequence
  Description of Artificial Sequence: Synthetic oligonucleotide
cgccuacuucagccaguac

SEQ ID NO: 36552 - RNA, 19 nt, Artificial Sequence
  Description of Artificial Sequence: Synthetic oligonucleotide
ccacgaccccgaggaugag

SEQ ID NO: 36553 - RNA, 19 nt, Artificial Sequence
  Description of Artificial Sequence: Synthetic oligonucleotide
gccagaggccgagccauau

SEQ ID NO: 36554 - RNA, 19 nt, Artificial Sequence
  Description of Artificial Sequence: Synthetic oligonucleotide
ugaugagagcguugaggcc

SEQ ID NO: 36555 - RNA, 19 nt, Artificial Sequence
  Description of Artificial Sequence: Synthetic oligonucleotide
caaggagcgcacgcuggag

SEQ ID NO: 36556 - RNA, 19 nt, Artificial Sequence
  Description of Artificial Sequence: Synthetic oligonucleotide
ggaguggaaggagcucacu

SEQ ID NO: 36557 - RNA, 19 nt, Artificial Sequence
  Description of Artificial Sequence: Synthetic oligonucleotide
uuaccaggaaguccucagc

SEQ ID NO: 36558 - RNA, 19 nt, Artificial Sequence
  Description of Artificial Sequence: Synthetic oligonucleotide
cuucaagcccccagagcca

SEQ ID NO: 36559 - RNA, 19 nt, Artificial Sequence
  Description of Artificial Sequence: Synthetic oligonucleotide
accgaagccaccuggcagc

SEQ ID NO: 36560 - RNA, 19 nt, Artificial Sequence
  Description of Artificial Sequence: Synthetic oligonucleotide
ccuggagauugagcaguga

SEQ ID NO: 36561 - RNA, 19 nt, Artificial Sequence
  Description of Artificial Sequence: Synthetic oligonucleotide
aggugcugcccagcagccc

SEQ ID NO: 36562 - RNA, 19 nt, Artificial Sequence
  Description of Artificial Sequence: Synthetic oligonucleotide
ccugagagccuguggaggg

SEQ ID NO: 36563 - RNA, 19 nt, Artificial Sequence
  Description of Artificial Sequence: Synthetic oligonucleotide
ggcuugggccugcacccuu

SEQ ID NO: 36564 - RNA, 19 nt, Artificial Sequence
  Description of Artificial Sequence: Synthetic oligonucleotide
uccacagcuggccugguuu

SEQ ID NO: 36565 - RNA, 19 nt, Artificial Sequence
  Description of Artificial Sequence: Synthetic oligonucleotide
uccucgagaggcaccuccc

SEQ ID NO: 36566 - RNA, 19 nt, Artificial Sequence
  Description of Artificial Sequence: Synthetic oligonucleotide
cacacuccuauggucacag

SEQ ID NO: 36567 - RNA, 19 nt, Artificial Sequence
  Description of Artificial Sequence: Synthetic oligonucleotide
gacuucuggccuaggaccc

SEQ ID NO: 36568 - RNA, 19 nt, Artificial Sequence
  Description of Artificial Sequence: Synthetic oligonucleotide
ccucgccuucaggagaauc

SEQ ID NO: 36569 - RNA, 19 nt, Artificial Sequence
  Description of Artificial Sequence: Synthetic oligonucleotide
cuacacgcauguaugcaug

SEQ ID NO: 36570 - RNA, 19 nt, Artificial Sequence
  Description of Artificial Sequence: Synthetic oligonucleotide
gcacaaacauguguguaca

SEQ ID NO: 36571 - RNA, 19 nt, Artificial Sequence
  Description of Artificial Sequence: Synthetic oligonucleotide
augugcuugccauguguag

SEQ ID NO: 36572 - RNA, 19 nt, Artificial Sequence
  Description of Artificial Sequence: Synthetic oligonucleotide
ggagucugggcacaagugu

SEQ ID NO: 36573 - RNA, 19 nt, Artificial Sequence
  Description of Artificial Sequence: Synthetic oligonucleotide
ucccugggccuaccuuggu

SEQ ID NO: 36574 - RNA, 19 nt, Artificial Sequence
  Description of Artificial Sequence: Synthetic oligonucleotide
uccuccuguccucuucugg

SEQ ID NO: 36575 - RNA, 19 nt, Artificial Sequence
  Description of Artificial Sequence: Synthetic oligonucleotide
gcuacugcacucuccacug

SEQ ID NO: 36576 - RNA, 19 nt, Artificial Sequence
  Description of Artificial Sequence: Synthetic oligonucleotide
gggaccugacugugggguc

SEQ ID NO: 36577 - RNA, 19 nt, Artificial Sequence
  Description of Artificial Sequence: Synthetic oligonucleotide
ccuagaugccaaagggguu

SEQ ID NO: 36578 - RNA, 19 nt, Artificial Sequence
  Description of Artificial Sequence: Synthetic oligonucleotide
uccccugcggaguuccccu

SEQ ID NO: 36579 - RNA, 19 nt, Artificial Sequence
  Description of Artificial Sequence: Synthetic oligonucleotide
ugucugucccaggccgacc

SEQ ID NO: 36580 - RNA, 19 nt, Artificial Sequence
  Description of Artificial Sequence: Synthetic oligonucleotide
ccaagggagugucagccuu

SEQ ID NO: 36581 - RNA, 19 nt, Artificial Sequence
  Description of Artificial Sequence: Synthetic oligonucleotide
ugggcucucuucuguccca

SEQ ID NO: 36582 - RNA, 19 nt, Artificial Sequence
  Description of Artificial Sequence: Synthetic oligonucleotide
agggcuuucuggaggacgc

SEQ ID NO: 36583 - RNA, 19 nt, Artificial Sequence
  Description of Artificial Sequence: Synthetic oligonucleotide
cgcuggggccgggaccccg

SEQ ID NO: 36584 - RNA, 19 nt, Artificial Sequence
  Description of Artificial Sequence: Synthetic oligonucleotide
gggagacucaaagggagag

SEQ ID NO: 36585 - RNA, 19 nt, Artificial Sequence
  Description of Artificial Sequence: Synthetic oligonucleotide
ggucucagugguuagagcu

SEQ ID NO: 36586 - RNA, 19 nt, Artificial Sequence
  Description of Artificial Sequence: Synthetic oligonucleotide
ugcucagccuggagguagg

SEQ ID NO: 36587 - RNA, 19 nt, Artificial Sequence
  Description of Artificial Sequence: Synthetic oligonucleotide
ggggcugucuuggucacug

SEQ ID NO: 36588 - RNA, 19 nt, Artificial Sequence
  Description of Artificial Sequence: Synthetic oligonucleotide
gcugagacccacaggucua

SEQ ID NO: 36589 - RNA, 19 nt, Artificial Sequence
  Description of Artificial Sequence: Synthetic oligonucleotide
aagaggagaggcagagcca

SEQ ID NO: 36590 - RNA, 19 nt, Artificial Sequence
  Description of Artificial Sequence: Synthetic oligonucleotide
agugugccaccaggcuggg

SEQ ID NO: 36591 - RNA, 19 nt, Artificial Sequence
  Description of Artificial Sequence: Synthetic oligonucleotide
gcagggacaaccaccaggu

SEQ ID NO: 36592 - RNA, 19 nt, Artificial Sequence
  Description of Artificial Sequence: Synthetic oligonucleotide
ugucaaaugagaaaagcug

SEQ ID NO: 36593 - RNA, 19 nt, Artificial Sequence
  Description of Artificial Sequence: Synthetic oligonucleotide
gccuggagucuuguguuca

SEQ ID NO: 36594 - RNA, 19 nt, Artificial Sequence
  Description of Artificial Sequence: Synthetic oligonucleotide
acccguggguguguguggg

SEQ ID NO: 36595 - RNA, 19 nt, Artificial Sequence
  Description of Artificial Sequence: Synthetic oligonucleotide
gcacguguggaugagcgug

SEQ ID NO: 36596 - RNA, 19 nt, Artificial Sequence
  Description of Artificial Sequence: Synthetic oligonucleotide
gcacuccccguguucauau

SEQ ID NO: 36597 - RNA, 19 nt, Artificial Sequence
  Description of Artificial Sequence: Synthetic oligonucleotide
ugucagggcacaugugaug

SEQ ID NO: 36598 - RNA, 19 nt, Artificial Sequence
  Description of Artificial Sequence: Synthetic oligonucleotide
guggugcgugugaaucugu

SEQ ID NO: 36599 - RNA, 19 nt, Artificial Sequence
  Description of Artificial Sequence: Synthetic oligonucleotide
ugggcgcccaaggccagca

SEQ ID NO: 36600 - RNA, 19 nt, Artificial Sequence
  Description of Artificial Sequence: Synthetic oligonucleotide
agccauaucuggcaagaag

SEQ ID NO: 36601 - RNA, 19 nt, Artificial Sequence
  Description of Artificial Sequence: Synthetic oligonucleotide
gcuggagccggggugggug

SEQ ID NO: 36602 - RNA, 19 nt, Artificial Sequence
  Description of Artificial Sequence: Synthetic oligonucleotide
gugcuguugccuucccucu

SEQ ID NO: 36603 - RNA, 19 nt, Artificial Sequence
  Description of Artificial Sequence: Synthetic oligonucleotide
uccucgguuccugaugccu

SEQ ID NO: 36604 - RNA, 19 nt, Artificial Sequence
  Description of Artificial Sequence: Synthetic oligonucleotide
uugagggguguuucagacu

SEQ ID NO: 36605 - RNA, 19 nt, Artificial Sequence
  Description of Artificial Sequence: Synthetic oligonucleotide
uggcggcuccagugggcca

SEQ ID NO: 36606 - RNA, 19 nt, Artificial Sequence
  Description of Artificial Sequence: Synthetic oligonucleotide
aaagggcaaccacaugagc

SEQ ID NO: 36607 - RNA, 19 nt, Artificial Sequence
  Description of Artificial Sequence: Synthetic oligonucleotide
caugggcaggggcuuucuc

SEQ ID NO: 36608 - RNA, 19 nt, Artificial Sequence
  Description of Artificial Sequence: Synthetic oligonucleotide
ccuuggaugugggacccac

SEQ ID NO: 36609 - RNA, 19 nt, Artificial Sequence
  Description of Artificial Sequence: Synthetic oligonucleotide
cagcagcuuccugaggcug

SEQ ID NO: 36610 - RNA, 19 nt, Artificial Sequence
  Description of Artificial Sequence: Synthetic oligonucleotide
gggggugggugggugggug

SEQ ID NO: 36611 - RNA, 19 nt, Artificial Sequence
  Description of Artificial Sequence: Synthetic oligonucleotide
gguuuggccuugaggacgc

SEQ ID NO: 36612 - RNA, 19 nt, Artificial Sequence
  Description of Artificial Sequence: Synthetic oligonucleotide
cuagggcaggcagcacacc

SEQ ID NO: 36613 - RNA, 19 nt, Artificial Sequence
  Description of Artificial Sequence: Synthetic oligonucleotide
cuggauguggacuuggacu

SEQ ID NO: 36614 - RNA, 19 nt, Artificial Sequence
  Description of Artificial Sequence: Synthetic oligonucleotide
ucggacacuucugcccugc

SEQ ID NO: 36615 - RNA, 19 nt, Artificial Sequence
  Description of Artificial Sequence: Synthetic oligonucleotide
cacccuggcccgcucucua

SEQ ID NO: 36616 - RNA, 19 nt, Artificial Sequence
  Description of Artificial Sequence: Synthetic oligonucleotide
accucugcccaccguugug

SEQ ID NO: 36617 - RNA, 19 nt, Artificial Sequence
  Description of Artificial Sequence: Synthetic oligonucleotide
ggcccugcagccggagauc

SEQ ID NO: 36618 - RNA, 19 nt, Artificial Sequence
  Description of Artificial Sequence: Synthetic oligonucleotide
cugaggugcucuggucugu

SEQ ID NO: 36619 - RNA, 19 nt, Artificial Sequence
  Description of Artificial Sequence: Synthetic oligonucleotide
ugggucaguccucuuuccu

SEQ ID NO: 36620 - RNA, 19 nt, Artificial Sequence
  Description of Artificial Sequence: Synthetic oligonucleotide
uugucccaggauggagcug

SEQ ID NO: 36621 - RNA, 19 nt, Artificial Sequence
  Description of Artificial Sequence: Synthetic oligonucleotide
gauccaguaaccucggaga

SEQ ID NO: 36622 - RNA, 19 nt, Artificial Sequence
  Description of Artificial Sequence: Synthetic oligonucleotide
acgggacccugcccagagc

SEQ ID NO: 36623 - RNA, 19 nt, Artificial Sequence
  Description of Artificial Sequence: Synthetic oligonucleotide
cugaguuggggguguggcu

SEQ ID NO: 36624 - RNA, 19 nt, Artificial Sequence
  Description of Artificial Sequence: Synthetic oligonucleotide
ucugcccuggaaagggggu

SEQ ID NO: 36625 - RNA, 19 nt, Artificial Sequence
  Description of Artificial Sequence: Synthetic oligonucleotide
ugaccucuugccucgaggg

SEQ ID NO: 36626 - RNA, 19 nt, Artificial Sequence
  Description of Artificial Sequence: Synthetic oligonucleotide
ggcccagggaagccugggu

SEQ ID NO: 36627 - RNA, 19 nt, Artificial Sequence
  Description of Artificial Sequence: Synthetic oligonucleotide
ugucaagugccugcaccag

SEQ ID NO: 36628 - RNA, 19 nt, Artificial Sequence
  Description of Artificial Sequence: Synthetic oligonucleotide
ggggugcacaauaaagggg

SEQ ID NO: 36629 - RNA, 19 nt, Artificial Sequence
  Description of Artificial Sequence: Synthetic oligonucleotide
gguucucucucaaaaaaaa

SEQ ID NO: 36630 - RNA, 25 nt, Artificial Sequence
  Description of Artificial Sequence: Synthetic oligonucleotide
ucgggcgcgggcgcggggcgcgggg

SEQ ID NO: 36631 - RNA, 25 nt, Artificial Sequence
  Description of Artificial Sequence: Synthetic oligonucleotide
gcugggcccgggcggagcggcggcu

SEQ ID NO: 36632 - RNA, 25 nt, Artificial Sequence
  Description of Artificial Sequence: Synthetic oligonucleotide
ugcuccggacaugucgggcccucgc

SEQ ID NO: 36633 - RNA, 25 nt, Artificial Sequence
  Description of Artificial Sequence: Synthetic oligonucleotide
cgccggcuucuaccggcaggagcug

SEQ ID NO: 36634 - RNA, 25 nt, Artificial Sequence
  Description of Artificial Sequence: Synthetic oligonucleotide
gaacaagaccgugugggaggugccg

SEQ ID NO: 36635 - RNA, 25 nt, Artificial Sequence
  Description of Artificial Sequence: Synthetic oligonucleotide
gcagcggcugcaggggcugcgcccg

SEQ ID NO: 36636 - RNA, 25 nt, Artificial Sequence
  Description of Artificial Sequence: Synthetic oligonucleotide
ggugggcuccggcgccuacggcucc

SEQ ID NO: 36637 - RNA, 25 nt, Artificial Sequence
  Description of Artificial Sequence: Synthetic oligonucleotide
cgucuguucggccuacgacgcccgg

SEQ ID NO: 36638 - RNA, 25 nt, Artificial Sequence
  Description of Artificial Sequence: Synthetic oligonucleotide
gcugcgccagaagguggcggugaag

SEQ ID NO: 36639 - RNA, 25 nt, Artificial Sequence
  Description of Artificial Sequence: Synthetic oligonucleotide
gaagcugucgcgccccuuccagucg

SEQ ID NO: 36640 - RNA, 25 nt, Artificial Sequence
  Description of Artificial Sequence: Synthetic oligonucleotide
gcugauccacgcgcgcagaacguac

SEQ ID NO: 36641 - RNA, 25 nt, Artificial Sequence
  Description of Artificial Sequence: Synthetic oligonucleotide
ccgggagcugcggcugcucaagcac

SEQ ID NO: 36642 - RNA, 25 nt, Artificial Sequence
  Description of Artificial Sequence: Synthetic oligonucleotide
ccugaagcacgagaacgucaucggg

SEQ ID NO: 36643 - RNA, 25 nt, Artificial Sequence
  Description of Artificial Sequence: Synthetic oligonucleotide
gcuucuggacgucuucacgccggcc

SEQ ID NO: 36644 - RNA, 25 nt, Artificial Sequence
  Description of Artificial Sequence: Synthetic oligonucleotide
cacguccaucgaggacuucagcgaa

SEQ ID NO: 36645 - RNA, 25 nt, Artificial Sequence
  Description of Artificial Sequence: Synthetic oligonucleotide
aguguacuuggugaccacccugaug

SEQ ID NO: 36646 - RNA, 25 nt, Artificial Sequence
  Description of Artificial Sequence: Synthetic oligonucleotide
gggcgccgaccugaacaacaucguc

SEQ ID NO: 36647 - RNA, 25 nt, Artificial Sequence
  Description of Artificial Sequence: Synthetic oligonucleotide
caagugccaggcgcugagcgacgag

SEQ ID NO: 36648 - RNA, 25 nt, Artificial Sequence
  Description of Artificial Sequence: Synthetic oligonucleotide
gcacguucaauuccugguuuaccag

SEQ ID NO: 36649 - RNA, 25 nt, Artificial Sequence
  Description of Artificial Sequence: Synthetic oligonucleotide
gcugcugcgcgggcugaaguacauc

SEQ ID NO: 36650 - RNA, 25 nt, Artificial Sequence
  Description of Artificial Sequence: Synthetic oligonucleotide
ccacucggccgggaucauccaccgg

SEQ ID NO: 36651 - RNA, 25 nt, Artificial Sequence
  Description of Artificial Sequence: Synthetic oligonucleotide
ggaccugaagcccagcaacguggcu

SEQ ID NO: 36652 - RNA, 25 nt, Artificial Sequence
  Description of Artificial Sequence: Synthetic oligonucleotide
ugugaacgaggacugugagcucagg

SEQ ID NO: 36653 - RNA, 25 nt, Artificial Sequence
  Description of Artificial Sequence: Synthetic oligonucleotide
gauccuggauuucgggcuggcgcgc

SEQ ID NO: 36654 - RNA, 25 nt, Artificial Sequence
  Description of Artificial Sequence: Synthetic oligonucleotide
ccaggcggacgaggagaugaccggc

SEQ ID NO: 36655 - RNA, 25 nt, Artificial Sequence
  Description of Artificial Sequence: Synthetic oligonucleotide
cuauguggccacgcgcugguaccgg

SEQ ID NO: 36656 - RNA, 25 nt, Artificial Sequence
  Description of Artificial Sequence: Synthetic oligonucleotide
ggcaccugagaucaugcucaacugg

SEQ ID NO: 36657 - RNA, 25 nt, Artificial Sequence
  Description of Artificial Sequence: Synthetic oligonucleotide
gaugcauuacaaccaaacaguggau

SEQ ID NO: 36658 - RNA, 25 nt, Artificial Sequence
  Description of Artificial Sequence: Synthetic oligonucleotide
uaucugguccgugggcugcaucaug

SEQ ID NO: 36659 - RNA, 25 nt, Artificial Sequence
  Description of Artificial Sequence: Synthetic oligonucleotide
ggcugagcugcuccagggcaaggcc

SEQ ID NO: 36660 - RNA, 25 nt, Artificial Sequence
  Description of Artificial Sequence: Synthetic oligonucleotide
ccucuucccgggaagcgacuacauu

SEQ ID NO: 36661 - RNA, 25 nt, Artificial Sequence
  Description of Artificial Sequence: Synthetic oligonucleotide
ugaccagcugaagcgcaucauggaa

SEQ ID NO: 36662 - RNA, 25 nt, Artificial Sequence
  Description of Artificial Sequence: Synthetic oligonucleotide
aguggugggcacacccagcccugag

SEQ ID NO: 36663 - RNA, 25 nt, Artificial Sequence
  Description of Artificial Sequence: Synthetic oligonucleotide
gguucuggcaaaaaucuccucagaa

SEQ ID NO: 36664 - RNA, 25 nt, Artificial Sequence
  Description of Artificial Sequence: Synthetic oligonucleotide
acacgcccggacauauauccagucc

SEQ ID NO: 36665 - RNA, 25 nt, Artificial Sequence
  Description of Artificial Sequence: Synthetic oligonucleotide
ccugccccccaugccccagaaggac

SEQ ID NO: 36666 - RNA, 25 nt, Artificial Sequence
  Description of Artificial Sequence: Synthetic oligonucleotide
ccugagcagcaucuuccguggagcc

SEQ ID NO: 36667 - RNA, 25 nt, Artificial Sequence
  Description of Artificial Sequence: Synthetic oligonucleotide
caacccccuggccauagaccuccuu

SEQ ID NO: 36668 - RNA, 25 nt, Artificial Sequence
  Description of Artificial Sequence: Synthetic oligonucleotide
uggaaggaugcuggugcuggacagu

SEQ ID NO: 36669 - RNA, 25 nt, Artificial Sequence
  Description of Artificial Sequence: Synthetic oligonucleotide
ugaccagagggucagugcagcugag

SEQ ID NO: 36670 - RNA, 25 nt, Artificial Sequence
  Description of Artificial Sequence: Synthetic oligonucleotide
ggcacuggcccacgccuacuucagc

SEQ ID NO: 36671 - RNA, 25 nt, Artificial Sequence
  Description of Artificial Sequence: Synthetic oligonucleotide
ccaguaccacgaccccgaggaugag

SEQ ID NO: 36672 - RNA, 25 nt, Artificial Sequence
  Description of Artificial Sequence: Synthetic oligonucleotide
gccagaggccgagccauaugaugag

SEQ ID NO: 36673 - RNA, 25 nt, Artificial Sequence
  Description of Artificial Sequence: Synthetic oligonucleotide
gagcguugaggccaaggagcgcacg

SEQ ID NO: 36674 - RNA, 25 nt, Artificial Sequence
  Description of Artificial Sequence: Synthetic oligonucleotide
gcuggaggaguggaaggagcucacu

SEQ ID NO: 36675 - RNA, 25 nt, Artificial Sequence
  Description of Artificial Sequence: Synthetic oligonucleotide
uuaccaggaaguccucagcuucaag

SEQ ID NO: 36676 - RNA, 25 nt, Artificial Sequence
  Description of Artificial Sequence: Synthetic oligonucleotide
gcccccagagccaccgaagccaccu

SEQ ID NO: 36677 - RNA, 25 nt, Artificial Sequence
  Description of Artificial Sequence: Synthetic oligonucleotide
uggcagccuggagauugagcaguga

SEQ ID NO: 36678 - RNA, 25 nt, Artificial Sequence
  Description of Artificial Sequence: Synthetic oligonucleotide
aggugcugcccagcagccccugaga

SEQ ID NO: 36679 - RNA, 25 nt, Artificial Sequence
  Description of Artificial Sequence: Synthetic oligonucleotide
agccuguggaggggcuugggccugc

SEQ ID NO: 36680 - RNA, 25 nt, Artificial Sequence
  Description of Artificial Sequence: Synthetic oligonucleotide
cacccuuccacagcuggccugguuu

SEQ ID NO: 36681 - RNA, 25 nt, Artificial Sequence
  Description of Artificial Sequence: Synthetic oligonucleotide
uccucgagaggcaccucccacacuc

SEQ ID NO: 36682 - RNA, 25 nt, Artificial Sequence
  Description of Artificial Sequence: Synthetic oligonucleotide
ccuauggucacagacuucuggccua

SEQ ID NO: 36683 - RNA, 25 nt, Artificial Sequence
  Description of Artificial Sequence: Synthetic oligonucleotide
aggaccccucgccuucaggagaauc

SEQ ID NO: 36684 - RNA, 25 nt, Artificial Sequence
  Description of Artificial Sequence: Synthetic oligonucleotide
cuacacgcauguaugcaugcacaaa

SEQ ID NO: 36685 - RNA, 25 nt, Artificial Sequence
  Description of Artificial Sequence: Synthetic oligonucleotide
acauguguguacaugugcuugccau

SEQ ID NO: 36686 - RNA, 25 nt, Artificial Sequence
  Description of Artificial Sequence: Synthetic oligonucleotide
uguguaggagucugggcacaagugu

SEQ ID NO: 36687 - RNA, 25 nt, Artificial Sequence
  Description of Artificial Sequence: Synthetic oligonucleotide
ucccugggccuaccuugguccuccu

SEQ ID NO: 36688 - RNA, 25 nt, Artificial Sequence
  Description of Artificial Sequence: Synthetic oligonucleotide
uguccucuucuggcuacugcacucu

SEQ ID NO: 36689 - RNA, 25 nt, Artificial Sequence
  Description of Artificial Sequence: Synthetic oligonucleotide
uccacugggaccugacugugggguc

SEQ ID NO: 36690 - RNA, 25 nt, Artificial Sequence
  Description of Artificial Sequence: Synthetic oligonucleotide
ccuagaugccaaagggguuccccug

SEQ ID NO: 36691 - RNA, 25 nt, Artificial Sequence
  Description of Artificial Sequence: Synthetic oligonucleotide
gcggaguuccccugucugucccagg

SEQ ID NO: 36692 - RNA, 25 nt, Artificial Sequence
  Description of Artificial Sequence: Synthetic oligonucleotide
gccgacccaagggagugucagccuu

SEQ ID NO: 36693 - RNA, 25 nt, Artificial Sequence
  Description of Artificial Sequence: Synthetic oligonucleotide
ugggcucucuucugucccagggcuu

SEQ ID NO: 36694 - RNA, 25 nt, Artificial Sequence
  Description of Artificial Sequence: Synthetic oligonucleotide
uucuggaggacgcgcuggggccggg

SEQ ID NO: 36695 - RNA, 25 nt, Artificial Sequence
  Description of Artificial Sequence: Synthetic oligonucleotide
gaccccgggagacucaaagggagag

SEQ ID NO: 36696 - RNA, 25 nt, Artificial Sequence
  Description of Artificial Sequence: Synthetic oligonucleotide
ggucucagugguuagagcugcucag

SEQ ID NO: 36697 - RNA, 25 nt, Artificial Sequence
  Description of Artificial Sequence: Synthetic oligonucleotide
gccuggagguagggggcugucuugg

SEQ ID NO: 36698 - RNA, 25 nt, Artificial Sequence
  Description of Artificial Sequence: Synthetic oligonucleotide
gucacugcugagacccacaggucua

SEQ ID NO: 36699 - RNA, 25 nt, Artificial Sequence
  Description of Artificial Sequence: Synthetic oligonucleotide
aagaggagaggcagagccagugugc

SEQ ID NO: 36700 - RNA, 25 nt, Artificial Sequence
  Description of Artificial Sequence: Synthetic oligonucleotide
ccaccaggcugggcagggacaacca

SEQ ID NO: 36701 - RNA, 25 nt, Artificial Sequence
  Description of Artificial Sequence: Synthetic oligonucleotide
accaggugucaaaugagaaaagcug

SEQ ID NO: 36702 - RNA, 25 nt, Artificial Sequence
  Description of Artificial Sequence: Synthetic oligonucleotide
gccuggagucuuguguucacccgug

SEQ ID NO: 36703 - RNA, 25 nt, Artificial Sequence
  Description of Artificial Sequence: Synthetic oligonucleotide
gggugugugugggcacguguggaug

SEQ ID NO: 36704 - RNA, 25 nt, Artificial Sequence
  Description of Artificial Sequence: Synthetic oligonucleotide
gagcgugcacuccccguguucauau

SEQ ID NO: 36705 - RNA, 25 nt, Artificial Sequence
  Description of Artificial Sequence: Synthetic oligonucleotide
ugucagggcacaugugauguggugc

SEQ ID NO: 36706 - RNA, 25 nt, Artificial Sequence
  Description of Artificial Sequence: Synthetic oligonucleotide
cgugugaaucugugggcgcccaagg

SEQ ID NO: 36707 - RNA, 25 nt, Artificial Sequence
  Description of Artificial Sequence: Synthetic oligonucleotide
gccagcagccauaucuggcaagaag

SEQ ID NO: 36708 - RNA, 25 nt, Artificial Sequence
  Description of Artificial Sequence: Synthetic oligonucleotide
gcuggagccggggugggugugcugu

SEQ ID NO: 36709 - RNA, 25 nt, Artificial Sequence
  Description of Artificial Sequence: Synthetic oligonucleotide
uugccuucccucuccucgguuccug

SEQ ID NO: 36710 - RNA, 25 nt, Artificial Sequence
  Description of Artificial Sequence: Synthetic oligonucleotide
gaugccuugagggguguuucagacu

SEQ ID NO: 36711 - RNA, 25 nt, Artificial Sequence
  Description of Artificial Sequence: Synthetic oligonucleotide
uggcggcuccagugggccaaagggc

SEQ ID NO: 36712 - RNA, 25 nt, Artificial Sequence
  Description of Artificial Sequence: Synthetic oligonucleotide
caaccacaugagcaugggcaggggc

SEQ ID NO: 36713 - RNA, 25 nt, Artificial Sequence
  Description of Artificial Sequence: Synthetic oligonucleotide
cuuucuccuuggaugugggacccac

SEQ ID NO: 36714 - RNA, 25 nt, Artificial Sequence
  Description of Artificial Sequence: Synthetic oligonucleotide
cagcagcuuccugaggcugggggug

SEQ ID NO: 36715 - RNA, 25 nt, Artificial Sequence
  Description of Artificial Sequence: Synthetic oligonucleotide
gggugggugggugguuuggccuuga

SEQ ID NO: 36716 - RNA, 25 nt, Artificial Sequence
  Description of Artificial Sequence: Synthetic oligonucleotide
aggacgcuagggcaggcagcacacc

SEQ ID NO: 36717 - RNA, 25 nt, Artificial Sequence
  Description of Artificial Sequence: Synthetic oligonucleotide
cuggauguggacuuggacucggaca

SEQ ID NO: 36718 - RNA, 25 nt, Artificial Sequence
  Description of Artificial Sequence: Synthetic oligonucleotide
acuucugcccugcacccuggcccgc

SEQ ID NO: 36719 - RNA, 25 nt, Artificial Sequence
  Description of Artificial Sequence: Synthetic oligonucleotide
cucucuaccucugcccaccguugug

SEQ ID NO: 36720 - RNA, 25 nt, Artificial Sequence
  Description of Artificial Sequence: Synthetic oligonucleotide
ggcccugcagccggagaucugaggu

SEQ ID NO: 36721 - RNA, 25 nt, Artificial Sequence
  Description of Artificial Sequence: Synthetic oligonucleotide
ugcucuggucugugggucaguccuc

SEQ ID NO: 36722 - RNA, 25 nt, Artificial Sequence
  Description of Artificial Sequence: Synthetic oligonucleotide
cuuuccuugucccaggauggagcug

SEQ ID NO: 36723 - RNA, 25 nt, Artificial Sequence
  Description of Artificial Sequence: Synthetic oligonucleotide
gauccaguaaccucggagacgggac

SEQ ID NO: 36724 - RNA, 25 nt, Artificial Sequence
  Description of Artificial Sequence: Synthetic oligonucleotide
cccugcccagagcugaguugggggu

SEQ ID NO: 36725 - RNA, 25 nt, Artificial Sequence
  Description of Artificial Sequence: Synthetic oligonucleotide
uguggcucugcccuggaaagggggu

SEQ ID NO: 36726 - RNA, 25 nt, Artificial Sequence
  Description of Artificial Sequence: Synthetic oligonucleotide
ugaccucuugccucgaggggcccag

SEQ ID NO: 36727 - RNA, 25 nt, Artificial Sequence
  Description of Artificial Sequence: Synthetic oligonucleotide
gggaagccugggugucaagugccug

SEQ ID NO: 36728 - RNA, 25 nt, Artificial Sequence
  Description of Artificial Sequence: Synthetic oligonucleotide
gcaccaggggugcacaauaaagggg

SEQ ID NO: 36729 - RNA, 1778 nt, Homo sapiens
gggagcgggagcgccccagcggccggcgggcgggcgggcgagcggacgagcggcgcggagccggcccgaggcgcgcgccgagggagccccguccccggucgugggggcaccgcccgcaggcucugcggggugggcagcucccgggccugccaugagcucuccgccgcccgcccgcaguggcuuuuaccgccaggaggugaccaagacggccugggaggugcgcgccguguaccgggaccugcagcccgugggcucgggcgccuacggcgcggugugcucggccguggacggccgcaccggcgcuaagguggccaucaagaagcuguaucggcccuuccaguccgagcuguucgccaagcgcgccuaccgcgagcugcgccugcucaagcacaugcgccacgagaacgugaucgggcugcuggacguauucacuccugaugagacccuggaugacuucacggacuuuuaccuggugaugccguucaugggcaccgaccugggcaagcucaugaaacaugagaagcuaggcgaggaccggauccaguuccucguguaccagaugcugaaggggcugagguauauccacgcugccggcaucauccacagagaccugaagcccggcaaccuggcugugaacgaagacugugagcugaagauccuggacuucggccuggccaggcaggcagacagugagaugacuggguacguggugacccggugguaccgggcucccgaggucaucuugaauuggaugcgcuacacgcagacgguggacaucuggucugugggcugcaucauggcggagaugaucacaggcaagacgcuguucaagggcagcgaccaccuggaccagcugaaggagaucaugaaggugacggggacgccuccggcugaguuugugcagcggcugcagagcgaugaggccaagaacuacaugaagggccuccccgaauuggagaagaaggauuuugccucuauccugaccaaugcaagcccucuggcugugaaccuccuggagaagaugcuggugcuggacgcggagcagcgggugacggcaggcgaggcgcuggcccaucccuacuucgagucccugcacgacacggaagaugagccccagguccagaaguaugaugacuccuuugacgacguugaccgcacacuggaugaauggaagcguguuacuuacaaagaggugcucagcuucaagccuccccggcagcugggggccagggucuccaaggagacgccucugugaagaucucugggcuccgggguggcagugaggaccaccuucaccuuccaccugagaggggacucucguugccaccuugaccuuggcuggggcuugcaucccaaggcauccaucagagcagacgcccggguuccauggacccuccuccccacggccaugccucugcucuugggcgcccaucauggaggagcaccugaacuuucuggacaagaccucuggccgaccuggggauggccucugaucccuggagcaguggcccacuugcccggugcucucagaaaccucagagcugguggggcuccagaucaggccuuggccucugagcccugccugcucugggccaugcagaggaaggacagagggugggcgcagggcaccaacucagggacauccccucuccugggcgacgucaguggaccuuccugcacccccagccuggaauguaaaucagcuguguggugcccgcguggcuggaaggaaauagacccuuuuguagcucccuaaaaaaaaaaaaaaaaaaaaaaaa

SEQ ID NO: 36730 - RNA, 19 nt, Artificial Sequence
  Description of Artificial Sequence: Synthetic oligonucleotide
gggagcgggagcgccccag

SEQ ID NO: 36731 - RNA, 19 nt, Artificial Sequence
  Description of Artificial Sequence: Synthetic oligonucleotide
gcggccggcgggcgggcgg

SEQ ID NO: 36732 - RNA, 19 nt, Artificial Sequence
  Description of Artificial Sequence: Synthetic oligonucleotide
ggcgagcggacgagcggcg

SEQ ID NO: 36733 - RNA, 19 nt, Artificial Sequence
  Description of Artificial Sequence: Synthetic oligonucleotide
gcggagccggcccgaggcg

SEQ ID NO: 36734 - RNA, 19 nt, Artificial Sequence
  Description of Artificial Sequence: Synthetic oligonucleotide
gcgcgccgagggagccccg

SEQ ID NO: 36735 - RNA, 19 nt, Artificial Sequence
  Description of Artificial Sequence: Synthetic oligonucleotide
guccccggucgugggggca

SEQ ID NO: 36736 - RNA, 19 nt, Artificial Sequence
  Description of Artificial Sequence: Synthetic oligonucleotide
accgcccgcaggcucugcg

SEQ ID NO: 36737 - RNA, 19 nt, Artificial Sequence
  Description of Artificial Sequence: Synthetic oligonucleotide
ggggugggcagcucccggg

SEQ ID NO: 36738 - RNA, 19 nt, Artificial Sequence
  Description of Artificial Sequence: Synthetic oligonucleotide
gccugccaugagcucuccg

SEQ ID NO: 36739 - RNA, 19 nt, Artificial Sequence
  Description of Artificial Sequence: Synthetic oligonucleotide
gccgcccgcccgcaguggc

SEQ ID NO: 36740 - RNA, 19 nt, Artificial Sequence
  Description of Artificial Sequence: Synthetic oligonucleotide
cuuuuaccgccaggaggug

SEQ ID NO: 36741 - RNA, 19 nt, Artificial Sequence
  Description of Artificial Sequence: Synthetic oligonucleotide
gaccaagacggccugggag

SEQ ID NO: 36742 - RNA, 19 nt, Artificial Sequence
  Description of Artificial Sequence: Synthetic oligonucleotide
ggugcgcgccguguaccgg

SEQ ID NO: 36743 - RNA, 19 nt, Artificial Sequence
  Description of Artificial Sequence: Synthetic oligonucleotide
ggaccugcagcccgugggc

SEQ ID NO: 36744 - RNA, 19 nt, Artificial Sequence
  Description of Artificial Sequence: Synthetic oligonucleotide
cucgggcgccuacggcgcg

SEQ ID NO: 36745 - RNA, 19 nt, Artificial Sequence
  Description of Artificial Sequence: Synthetic oligonucleotide
ggugugcucggccguggac

SEQ ID NO: 36746 - RNA, 19 nt, Artificial Sequence
  Description of Artificial Sequence: Synthetic oligonucleotide
cggccgcaccggcgcuaag

SEQ ID NO: 36747 - RNA, 19 nt, Artificial Sequence
  Description of Artificial Sequence: Synthetic oligonucleotide
gguggccaucaagaagcug

SEQ ID NO: 36748 - RNA, 19 nt, Artificial Sequence
  Description of Artificial Sequence: Synthetic oligonucleotide
guaucggcccuuccagucc

SEQ ID NO: 36749 - RNA, 19 nt, Artificial Sequence
  Description of Artificial Sequence: Synthetic oligonucleotide
cgagcuguucgccaagcgc

SEQ ID NO: 36750 - RNA, 19 nt, Artificial Sequence
  Description of Artificial Sequence: Synthetic oligonucleotide
cgccuaccgcgagcugcgc

SEQ ID NO: 36751 - RNA, 19 nt, Artificial Sequence
  Description of Artificial Sequence: Synthetic oligonucleotide
ccugcucaagcacaugcgc

SEQ ID NO: 36752 - RNA, 19 nt, Artificial Sequence
  Description of Artificial Sequence: Synthetic oligonucleotide
ccacgagaacgugaucggg

SEQ ID NO: 36753 - RNA, 19 nt, Artificial Sequence
  Description of Artificial Sequence: Synthetic oligonucleotide
gcugcuggacguauucacu

SEQ ID NO: 36754 - RNA, 19 nt, Artificial Sequence
  Description of Artificial Sequence: Synthetic oligonucleotide
uccugaugagacccuggau

SEQ ID NO: 36755 - RNA, 19 nt, Artificial Sequence
  Description of Artificial Sequence: Synthetic oligonucleotide
ugacuucacggacuuuuac

SEQ ID NO: 36756 - RNA, 19 nt, Artificial Sequence
  Description of Artificial Sequence: Synthetic oligonucleotide
ccuggugaugccguucaug

SEQ ID NO: 36757 - RNA, 19 nt, Artificial Sequence
  Description of Artificial Sequence: Synthetic oligonucleotide
gggcaccgaccugggcaag

SEQ ID NO: 36758 - RNA, 19 nt, Artificial Sequence
  Description of Artificial Sequence: Synthetic oligonucleotide
gcucaugaaacaugagaag

SEQ ID NO: 36759 - RNA, 19 nt, Artificial Sequence
  Description of Artificial Sequence: Synthetic oligonucleotide
gcuaggcgaggaccggauc

SEQ ID NO: 36760 - RNA, 19 nt, Artificial Sequence
  Description of Artificial Sequence: Synthetic oligonucleotide
ccaguuccucguguaccag

SEQ ID NO: 36761 - RNA, 19 nt, Artificial Sequence
  Description of Artificial Sequence: Synthetic oligonucleotide
gaugcugaaggggcugagg

SEQ ID NO: 36762 - RNA, 19 nt, Artificial Sequence
  Description of Artificial Sequence: Synthetic oligonucleotide
guauauccacgcugccggc

SEQ ID NO: 36763 - RNA, 19 nt, Artificial Sequence
  Description of Artificial Sequence: Synthetic oligonucleotide
caucauccacagagaccug

SEQ ID NO: 36764 - RNA, 19 nt, Artificial Sequence
  Description of Artificial Sequence: Synthetic oligonucleotide
gaagcccggcaaccuggcu

SEQ ID NO: 36765 - RNA, 19 nt, Artificial Sequence
  Description of Artificial Sequence: Synthetic oligonucleotide
ugugaacgaagacugugag

SEQ ID NO: 36766 - RNA, 19 nt, Artificial Sequence
  Description of Artificial Sequence: Synthetic oligonucleotide
gcugaagauccuggacuuc

SEQ ID NO: 36767 - RNA, 19 nt, Artificial Sequence
  Description of Artificial Sequence: Synthetic oligonucleotide
cggccuggccaggcaggca

SEQ ID NO: 36768 - RNA, 19 nt, Artificial Sequence
  Description of Artificial Sequence: Synthetic oligonucleotide
agacagugagaugacuggg

SEQ ID NO: 36769 - RNA, 19 nt, Artificial Sequence
  Description of Artificial Sequence: Synthetic oligonucleotide
guacguggugacccggugg

SEQ ID NO: 36770 - RNA, 19 nt, Artificial Sequence
  Description of Artificial Sequence: Synthetic oligonucleotide
guaccgggcucccgagguc

SEQ ID NO: 36771 - RNA, 19 nt, Artificial Sequence
  Description of Artificial Sequence: Synthetic oligonucleotide
caucuugaauuggaugcgc

SEQ ID NO: 36772 - RNA, 19 nt, Artificial Sequence
  Description of Artificial Sequence: Synthetic oligonucleotide
cuacacgcagacgguggac

SEQ ID NO: 36773 - RNA, 19 nt, Artificial Sequence
  Description of Artificial Sequence: Synthetic oligonucleotide
caucuggucugugggcugc

SEQ ID NO: 36774 - RNA, 19 nt, Artificial Sequence
  Description of Artificial Sequence: Synthetic oligonucleotide
caucauggcggagaugauc

SEQ ID NO: 36775 - RNA, 19 nt, Artificial Sequence
  Description of Artificial Sequence: Synthetic oligonucleotide
cacaggcaagacgcuguuc

SEQ ID NO: 36776 - RNA, 19 nt, Artificial Sequence
  Description of Artificial Sequence: Synthetic oligonucleotide
caagggcagcgaccaccug

SEQ ID NO: 36777 - RNA, 19 nt, Artificial Sequence
  Description of Artificial Sequence: Synthetic oligonucleotide
ggaccagcugaaggagauc

SEQ ID NO: 36778 - RNA, 19 nt, Artificial Sequence
  Description of Artificial Sequence: Synthetic oligonucleotide
caugaaggugacggggacg

SEQ ID NO: 36779 - RNA, 19 nt, Artificial Sequence
  Description of Artificial Sequence: Synthetic oligonucleotide
gccuccggcugaguuugug

SEQ ID NO: 36780 - RNA, 19 nt, Artificial Sequence
  Description of Artificial Sequence: Synthetic oligonucleotide
gcagcggcugcagagcgau

SEQ ID NO: 36781 - RNA, 19 nt, Artificial Sequence
  Description of Artificial Sequence: Synthetic oligonucleotide
ugaggccaagaacuacaug

SEQ ID NO: 36782 - RNA, 19 nt, Artificial Sequence
  Description of Artificial Sequence: Synthetic oligonucleotide
gaagggccuccccgaauug

SEQ ID NO: 36783 - RNA, 19 nt, Artificial Sequence
  Description of Artificial Sequence: Synthetic oligonucleotide
ggagaagaaggauuuugcc

SEQ ID NO: 36784 - RNA, 19 nt, Artificial Sequence
  Description of Artificial Sequence: Synthetic oligonucleotide
cucuauccugaccaaugca

SEQ ID NO: 36785 - RNA, 19 nt, Artificial Sequence
  Description of Artificial Sequence: Synthetic oligonucleotide
aagcccucuggcugugaac

SEQ ID NO: 36786 - RNA, 19 nt, Artificial Sequence
  Description of Artificial Sequence: Synthetic oligonucleotide
ccuccuggagaagaugcug

SEQ ID NO: 36787 - RNA, 19 nt, Artificial Sequence
  Description of Artificial Sequence: Synthetic oligonucleotide
ggugcuggacgcggagcag

SEQ ID NO: 36788 - RNA, 19 nt, Artificial Sequence
  Description of Artificial Sequence: Synthetic oligonucleotide
gcgggugacggcaggcgag

SEQ ID NO: 36789 - RNA, 19 nt, Artificial Sequence
  Description of Artificial Sequence: Synthetic oligonucleotide
ggcgcuggcccaucccuac

SEQ ID NO: 36790 - RNA, 19 nt, Artificial Sequence
  Description of Artificial Sequence: Synthetic oligonucleotide
cuucgagucccugcacgac

SEQ ID NO: 36791 - RNA, 19 nt, Artificial Sequence
  Description of Artificial Sequence: Synthetic oligonucleotide
cacggaagaugagccccag

SEQ ID NO: 36792 - RNA, 19 nt, Artificial Sequence
  Description of Artificial Sequence: Synthetic oligonucleotide
gguccagaaguaugaugac

SEQ ID NO: 36793 - RNA, 19 nt, Artificial Sequence
  Description of Artificial Sequence: Synthetic oligonucleotide
cuccuuugacgacguugac

SEQ ID NO: 36794 - RNA, 19 nt, Artificial Sequence
  Description of Artificial Sequence: Synthetic oligonucleotide
ccgcacacuggaugaaugg

SEQ ID NO: 36795 - RNA, 19 nt, Artificial Sequence
  Description of Artificial Sequence: Synthetic oligonucleotide
gaagcguguuacuuacaaa

SEQ ID NO: 36796 - RNA, 19 nt, Artificial Sequence
  Description of Artificial Sequence: Synthetic oligonucleotide
agaggugcucagcuucaag

SEQ ID NO: 36797 - RNA, 19 nt, Artificial Sequence
  Description of Artificial Sequence: Synthetic oligonucleotide
gccuccccggcagcugggg

SEQ ID NO: 36798 - RNA, 19 nt, Artificial Sequence
  Description of Artificial Sequence: Synthetic oligonucleotide
ggccagggucuccaaggag

SEQ ID NO: 36799 - RNA, 19 nt, Artificial Sequence
  Description of Artificial Sequence: Synthetic oligonucleotide
gacgccucugugaagaucu

SEQ ID NO: 36800 - RNA, 19 nt, Artificial Sequence
  Description of Artificial Sequence: Synthetic oligonucleotide
ucugggcuccgggguggca

SEQ ID NO: 36801 - RNA, 19 nt, Artificial Sequence
  Description of Artificial Sequence: Synthetic oligonucleotide
agugaggaccaccuucacc

SEQ ID NO: 36802 - RNA, 19 nt, Artificial Sequence
  Description of Artificial Sequence: Synthetic oligonucleotide
cuuccaccugagaggggac

SEQ ID NO: 36803 - RNA, 19 nt, Artificial Sequence
  Description of Artificial Sequence: Synthetic oligonucleotide
cucucguugccaccuugac

SEQ ID NO: 36804 - RNA, 19 nt, Artificial Sequence
  Description of Artificial Sequence: Synthetic oligonucleotide
ccuuggcuggggcuugcau

SEQ ID NO: 36805 - RNA, 19 nt, Artificial Sequence
  Description of Artificial Sequence: Synthetic oligonucleotide
ucccaaggcauccaucaga

SEQ ID NO: 36806 - RNA, 19 nt, Artificial Sequence
  Description of Artificial Sequence: Synthetic oligonucleotide
agcagacgcccggguucca

SEQ ID NO: 36807 - RNA, 19 nt, Artificial Sequence
  Description of Artificial Sequence: Synthetic oligonucleotide
auggacccuccuccccacg

SEQ ID NO: 36808 - RNA, 19 nt, Artificial Sequence
  Description of Artificial Sequence: Synthetic oligonucleotide
ggccaugccucugcucuug

SEQ ID NO: 36809 - RNA, 19 nt, Artificial Sequence
  Description of Artificial Sequence: Synthetic oligonucleotide
gggcgcccaucauggagga

SEQ ID NO: 36810 - RNA, 19 nt, Artificial Sequence
  Description of Artificial Sequence: Synthetic oligonucleotide
agcaccugaacuuucugga

SEQ ID NO: 36811 - RNA, 19 nt, Artificial Sequence
  Description of Artificial Sequence: Synthetic oligonucleotide
acaagaccucuggccgacc

SEQ ID NO: 36812 - RNA, 19 nt, Artificial Sequence
  Description of Artificial Sequence: Synthetic oligonucleotide
cuggggauggccucugauc

SEQ ID NO: 36813 - RNA, 19 nt, Artificial Sequence
  Description of Artificial Sequence: Synthetic oligonucleotide
cccuggagcaguggcccac

SEQ ID NO: 36814 - RNA, 19 nt, Artificial Sequence
  Description of Artificial Sequence: Synthetic oligonucleotide
cuugcccggugcucucaga

SEQ ID NO: 36815 - RNA, 19 nt, Artificial Sequence
  Description of Artificial Sequence: Synthetic oligonucleotide
aaaccucagagcugguggg

SEQ ID NO: 36816 - RNA, 19 nt, Artificial Sequence
  Description of Artificial Sequence: Synthetic oligonucleotide
ggcuccagaucaggccuug

SEQ ID NO: 36817 - RNA, 19 nt, Artificial Sequence
  Description of Artificial Sequence: Synthetic oligonucleotide
ggccucugagcccugccug

SEQ ID NO: 36818 - RNA, 19 nt, Artificial Sequence
  Description of Artificial Sequence: Synthetic oligonucleotide
gcucugggccaugcagagg

SEQ ID NO: 36819 - RNA, 19 nt, Artificial Sequence
  Description of Artificial Sequence: Synthetic oligonucleotide
gaaggacagagggugggcg

SEQ ID NO: 36820 - RNA, 19 nt, Artificial Sequence
  Description of Artificial Sequence: Synthetic oligonucleotide
gcagggcaccaacucaggg

SEQ ID NO: 36821 - RNA, 19 nt, Artificial Sequence
  Description of Artificial Sequence: Synthetic oligonucleotide
gacauccccucuccugggc

SEQ ID NO: 36822 - RNA, 19 nt, Artificial Sequence
  Description of Artificial Sequence: Synthetic oligonucleotide
cgacgucaguggaccuucc

SEQ ID NO: 36823 - RNA, 19 nt, Artificial Sequence
  Description of Artificial Sequence: Synthetic oligonucleotide
cugcacccccagccuggaa

SEQ ID NO: 36824 - RNA, 19 nt, Artificial Sequence
  Description of Artificial Sequence: Synthetic oligonucleotide
auguaaaucagcugugugg

SEQ ID NO: 36825 - RNA, 19 nt, Artificial Sequence
  Description of Artificial Sequence: Synthetic oligonucleotide
gugcccgcguggcuggaag

SEQ ID NO: 36826 - RNA, 19 nt, Artificial Sequence
  Description of Artificial Sequence: Synthetic oligonucleotide
ggaaauagacccuuuugua

SEQ ID NO: 36827 - RNA, 25 nt, Artificial Sequence
  Description of Artificial Sequence: Synthetic oligonucleotide
gggagcgggagcgccccagcggccg

SEQ ID NO: 36828 - RNA, 25 nt, Artificial Sequence
  Description of Artificial Sequence: Synthetic oligonucleotide
ggcgggcgggcgggcgagcggacga

SEQ ID NO: 36829 - RNA, 25 nt, Artificial Sequence
  Description of Artificial Sequence: Synthetic oligonucleotide
agcggcgcggagccggcccgaggcg

SEQ ID NO: 36830 - RNA, 25 nt, Artificial Sequence
  Description of Artificial Sequence: Synthetic oligonucleotide
gcgcgccgagggagccccguccccg

SEQ ID NO: 36831 - RNA, 25 nt, Artificial Sequence
  Description of Artificial Sequence: Synthetic oligonucleotide
ggucgugggggcaccgcccgcaggc

SEQ ID NO: 36832 - RNA, 25 nt, Artificial Sequence
  Description of Artificial Sequence: Synthetic oligonucleotide
cucugcggggugggcagcucccggg

SEQ ID NO: 36833 - RNA, 25 nt, Artificial Sequence
  Description of Artificial Sequence: Synthetic oligonucleotide
gccugccaugagcucuccgccgccc

SEQ ID NO: 36834 - RNA, 25 nt, Artificial Sequence
  Description of Artificial Sequence: Synthetic oligonucleotide
cgcccgcaguggcuuuuaccgccag

SEQ ID NO: 36835 - RNA, 25 nt, Artificial Sequence
  Description of Artificial Sequence: Synthetic oligonucleotide
ggaggugaccaagacggccugggag

SEQ ID NO: 36836 - RNA, 25 nt, Artificial Sequence
  Description of Artificial Sequence: Synthetic oligonucleotide
ggugcgcgccguguaccgggaccug

SEQ ID NO: 36837 - RNA, 25 nt, Artificial Sequence
  Description of Artificial Sequence: Synthetic oligonucleotide
gcagcccgugggcucgggcgccuac

SEQ ID NO: 36838 - RNA, 25 nt, Artificial Sequence
  Description of Artificial Sequence: Synthetic oligonucleotide
cggcgcggugugcucggccguggac

SEQ ID NO: 36839 - RNA, 25 nt, Artificial Sequence
  Description of Artificial Sequence: Synthetic oligonucleotide
cggccgcaccggcgcuaagguggcc

SEQ ID NO: 36840 - RNA, 25 nt, Artificial Sequence
  Description of Artificial Sequence: Synthetic oligonucleotide
caucaagaagcuguaucggcccuuc

SEQ ID NO: 36841 - RNA, 25 nt, Artificial Sequence
  Description of Artificial Sequence: Synthetic oligonucleotide
ccaguccgagcuguucgccaagcgc

SEQ ID NO: 36842 - RNA, 25 nt, Artificial Sequence
  Description of Artificial Sequence: Synthetic oligonucleotide
cgccuaccgcgagcugcgccugcuc

SEQ ID NO: 36843 - RNA, 25 nt, Artificial Sequence
  Description of Artificial Sequence: Synthetic oligonucleotide
caagcacaugcgccacgagaacgug

SEQ ID NO: 36844 - RNA, 25 nt, Artificial Sequence
  Description of Artificial Sequence: Synthetic oligonucleotide
gaucgggcugcuggacguauucacu

SEQ ID NO: 36845 - RNA, 25 nt, Artificial Sequence
  Description of Artificial Sequence: Synthetic oligonucleotide
uccugaugagacccuggaugacuuc

SEQ ID NO: 36846 - RNA, 25 nt, Artificial Sequence
  Description of Artificial Sequence: Synthetic oligonucleotide
cacggacuuuuaccuggugaugccg

SEQ ID NO: 36847 - RNA, 25 nt, Artificial Sequence
  Description of Artificial Sequence: Synthetic oligonucleotide
guucaugggcaccgaccugggcaag

SEQ ID NO: 36848 - RNA, 25 nt, Artificial Sequence
  Description of Artificial Sequence: Synthetic oligonucleotide
gcucaugaaacaugagaagcuaggc

SEQ ID NO: 36849 - RNA, 25 nt, Artificial Sequence
  Description of Artificial Sequence: Synthetic oligonucleotide
cgaggaccggauccaguuccucgug

SEQ ID NO: 36850 - RNA, 25 nt, Artificial Sequence
  Description of Artificial Sequence: Synthetic oligonucleotide
guaccagaugcugaaggggcugagg

SEQ ID NO: 36851 - RNA, 25 nt, Artificial Sequence
  Description of Artificial Sequence: Synthetic oligonucleotide
guauauccacgcugccggcaucauc

SEQ ID NO: 36852 - RNA, 25 nt, Artificial Sequence
  Description of Artificial Sequence: Synthetic oligonucleotide
ccacagagaccugaagcccggcaac

SEQ ID NO: 36853 - RNA, 25 nt, Artificial Sequence
  Description of Artificial Sequence: Synthetic oligonucleotide
ccuggcugugaacgaagacugugag

SEQ ID NO: 36854 - RNA, 25 nt, Artificial Sequence
  Description of Artificial Sequence: Synthetic oligonucleotide
gcugaagauccuggacuucggccug

SEQ ID NO: 36855 - RNA, 25 nt, Artificial Sequence
  Description of Artificial Sequence: Synthetic oligonucleotide
ggccaggcaggcagacagugagaug

SEQ ID NO: 36856 - RNA, 25 nt, Artificial Sequence
  Description of Artificial Sequence: Synthetic oligonucleotide
gacuggguacguggugacccggugg

SEQ ID NO: 36857 - RNA, 25 nt, Artificial Sequence
  Description of Artificial Sequence: Synthetic oligonucleotide
guaccgggcucccgaggucaucuug

SEQ ID NO: 36858 - RNA, 25 nt, Artificial Sequence
  Description of Artificial Sequence: Synthetic oligonucleotide
gaauuggaugcgcuacacgcagacg

SEQ ID NO: 36859 - RNA, 25 nt, Artificial Sequence
  Description of Artificial Sequence: Synthetic oligonucleotide
gguggacaucuggucugugggcugc

SEQ ID NO: 36860 - RNA, 25 nt, Artificial Sequence
  Description of Artificial Sequence: Synthetic oligonucleotide
caucauggcggagaugaucacaggc

SEQ ID NO: 36861 - RNA, 25 nt, Artificial Sequence
  Description of Artificial Sequence: Synthetic oligonucleotide
caagacgcuguucaagggcagcgac

SEQ ID NO: 36862 - RNA, 25 nt, Artificial Sequence
  Description of Artificial Sequence: Synthetic oligonucleotide
ccaccuggaccagcugaaggagauc

SEQ ID NO: 36863 - RNA, 25 nt, Artificial Sequence
  Description of Artificial Sequence: Synthetic oligonucleotide
caugaaggugacggggacgccuccg

SEQ ID NO: 36864 - RNA, 25 nt, Artificial Sequence
  Description of Artificial Sequence: Synthetic oligonucleotide
ggcugaguuugugcagcggcugcag

SEQ ID NO: 36865 - RNA, 25 nt, Artificial Sequence
  Description of Artificial Sequence: Synthetic oligonucleotide
gagcgaugaggccaagaacuacaug

SEQ ID NO: 36866 - RNA, 25 nt, Artificial Sequence
  Description of Artificial Sequence: Synthetic oligonucleotide
gaagggccuccccgaauuggagaag

SEQ ID NO: 36867 - RNA, 25 nt, Artificial Sequence
  Description of Artificial Sequence: Synthetic oligonucleotide
gaaggauuuugccucuauccugacc

SEQ ID NO: 36868 - RNA, 25 nt, Artificial Sequence
  Description of Artificial Sequence: Synthetic oligonucleotide
caaugcaagcccucuggcugugaac

SEQ ID NO: 36869 - RNA, 25 nt, Artificial Sequence
  Description of Artificial Sequence: Synthetic oligonucleotide
ccuccuggagaagaugcuggugcug

SEQ ID NO: 36870 - RNA, 25 nt, Artificial Sequence
  Description of Artificial Sequence: Synthetic oligonucleotide
ggacgcggagcagcgggugacggca

SEQ ID NO: 36871 - RNA, 25 nt, Artificial Sequence
  Description of Artificial Sequence: Synthetic oligonucleotide
aggcgaggcgcuggcccaucccuac

SEQ ID NO: 36872 - RNA, 25 nt, Artificial Sequence
  Description of Artificial Sequence: Synthetic oligonucleotide
cuucgagucccugcacgacacggaa

SEQ ID NO: 36873 - RNA, 25 nt, Artificial Sequence
  Description of Artificial Sequence: Synthetic oligonucleotide
agaugagccccagguccagaaguau

SEQ ID NO: 36874 - RNA, 25 nt, Artificial Sequence
  Description of Artificial Sequence: Synthetic oligonucleotide
ugaugacuccuuugacgacguugac

SEQ ID NO: 36875 - RNA, 25 nt, Artificial Sequence
  Description of Artificial Sequence: Synthetic oligonucleotide
ccgcacacuggaugaauggaagcgu

SEQ ID NO: 36876 - RNA, 25 nt, Artificial Sequence
  Description of Artificial Sequence: Synthetic oligonucleotide
uguuacuuacaaagaggugcucagc

SEQ ID NO: 36877 - RNA, 25 nt, Artificial Sequence
  Description of Artificial Sequence: Synthetic oligonucleotide
cuucaagccuccccggcagcugggg

SEQ ID NO: 36878 - RNA, 25 nt, Artificial Sequence
  Description of Artificial Sequence: Synthetic oligonucleotide
ggccagggucuccaaggagacgccu

SEQ ID NO: 36879 - RNA, 25 nt, Artificial Sequence
  Description of Artificial Sequence: Synthetic oligonucleotide
ucugugaagaucucugggcuccggg

SEQ ID NO: 36880 - RNA, 25 nt, Artificial Sequence
  Description of Artificial Sequence: Synthetic oligonucleotide
gguggcagugaggaccaccuucacc

SEQ ID NO: 36881 - RNA, 25 nt, Artificial Sequence
  Description of Artificial Sequence: Synthetic oligonucleotide
cuuccaccugagaggggacucucgu

SEQ ID NO: 36882 - RNA, 25 nt, Artificial Sequence
  Description of Artificial Sequence: Synthetic oligonucleotide
uugccaccuugaccuuggcuggggc

SEQ ID NO: 36883 - RNA, 25 nt, Artificial Sequence
  Description of Artificial Sequence: Synthetic oligonucleotide
cuugcaucccaaggcauccaucaga

SEQ ID NO: 36884 - RNA, 25 nt, Artificial Sequence
  Description of Artificial Sequence: Synthetic oligonucleotide
agcagacgcccggguuccauggacc

SEQ ID NO: 36885 - RNA, 25 nt, Artificial Sequence
  Description of Artificial Sequence: Synthetic oligonucleotide
ccuccuccccacggccaugccucug

SEQ ID NO: 36886 - RNA, 25 nt, Artificial Sequence
  Description of Artificial Sequence: Synthetic oligonucleotide
gcucuugggcgcccaucauggagga

SEQ ID NO: 36887 - RNA, 25 nt, Artificial Sequence
  Description of Artificial Sequence: Synthetic oligonucleotide
agcaccugaacuuucuggacaagac

SEQ ID NO: 36888 - RNA, 25 nt, Artificial Sequence
  Description of Artificial Sequence: Synthetic oligonucleotide
ccucuggccgaccuggggauggccu

SEQ ID NO: 36889 - RNA, 25 nt, Artificial Sequence
  Description of Artificial Sequence: Synthetic oligonucleotide
ucugaucccuggagcaguggcccac

SEQ ID NO: 36890 - RNA, 25 nt, Artificial Sequence
  Description of Artificial Sequence: Synthetic oligonucleotide
cuugcccggugcucucagaaaccuc

SEQ ID NO: 36891 - RNA, 25 nt, Artificial Sequence
  Description of Artificial Sequence: Synthetic oligonucleotide
cagagcugguggggcuccagaucag

SEQ ID NO: 36892 - RNA, 25 nt, Artificial Sequence
  Description of Artificial Sequence: Synthetic oligonucleotide
ggccuuggccucugagcccugccug

SEQ ID NO: 36893 - RNA, 25 nt, Artificial Sequence
  Description of Artificial Sequence: Synthetic oligonucleotide
gcucugggccaugcagaggaaggac

SEQ ID NO: 36894 - RNA, 25 nt, Artificial Sequence
  Description of Artificial Sequence: Synthetic oligonucleotide
cagagggugggcgcagggcaccaac

SEQ ID NO: 36895 - RNA, 25 nt, Artificial Sequence
  Description of Artificial Sequence: Synthetic oligonucleotide
cucagggacauccccucuccugggc

SEQ ID NO: 36896 - RNA, 25 nt, Artificial Sequence
  Description of Artificial Sequence: Synthetic oligonucleotide
cgacgucaguggaccuuccugcacc

SEQ ID NO: 36897 - RNA, 25 nt, Artificial Sequence
  Description of Artificial Sequence: Synthetic oligonucleotide
ccccagccuggaauguaaaucagcu

SEQ ID NO: 36898 - RNA, 25 nt, Artificial Sequence
  Description of Artificial Sequence: Synthetic oligonucleotide
uguguggugcccgcguggcuggaag

SEQ ID NO: 36899 - RNA, 25 nt, Artificial Sequence
  Description of Artificial Sequence: Synthetic oligonucleotide
ggaaauagacccuuuuguagcuccc

SEQ ID NO: 36900 - RNA, 1888 nt, Homo sapiens
gcggcgcggggcgggcgcagcgggggucggggcgcugggagcccguugggccgcgaacgcagccgccacgccggggccgccgagaucgggugcccgggaugagccucauccggaaaaagggcuucuacaagcaggacgucaacaagaccgccugggagcugcccaagaccuacguguccccgacgcacgucggcagcggggccuauggcuccgugugcucggccaucgacaagcggucaggggagaagguggccaucaagaagcugagccgacccuuucaguccgagaucuucgccaagcgcgccuaccgggagcugcugcugcugaagcacaugcagcaugagaacgucauugggcuccuggaugucuucaccccagccuccucccugcgcaacuucuaugacuucuaccuggugaugcccuucaugcagacggaucugcagaagaucauggggauggaguucagugaggagaagauccaguaccugguguaucagaugcucaaaggccuuaaguacauccacucugcuggggucgugcacagggaccugaagccaggcaaccuggcugugaaugaggacugugaacugaagauucuggauuuugggcuggcgcgacaugcagacgccgagaugacuggcuacguggugacccgcugguaccgagcccccgaggugauccucagcuggaugcacuacaaccagacaguggacaucuggucugugggcuguaucauggcagagaugcugacagggaaaacucuguucaaggggaaagauuaccuggaccagcugacccagauccugaaagugaccggggugccuggcacggaguuugugcagaagcugaacgacaaagcggccaaauccuacauccagucccugccacagacccccaggaaggauuucacucagcuguucccacgggccagcccccaggcugcggaccugcuggagaagaugcuggagcuagacguggacaagcgccugacggccgcgcaggcccucacccaucccuucuuugaacccuuccgggacccugaggaagagacggaggcccagcagccguuugaugauuccuuagaacacgagaaacucacaguggaugaauggaagcagcacaucuacaaggagauugugaacuucagccccauugcccggaaggacucacggcgccggaguggcaugaagcuguagggacucaucuugcauggcaccaccggccagacacugcccaaggaccaguauuugucacuaccaaacucagcccuucuuggaauacagccuuucaagcagaggacagaaggguccuucuccuuaugugggaaaugggccuaguagaugcagaauucaaagaugucgguugggagaaacuagcucugauccuaacaggccacguuaaacugcccaucuggagaaucgccugcagguggggcccuuuccuucccgccagaguggggcugagugggcgcugagccaggccgggggccuauggcagugaugcuguguugguuuccuagggaugcucuaacgaauuaccacaaaccugguggauugaaacagcagaacuugauucccuuacaguucuggaggcuggaaaucugggauggagguguuggcagggcuguggucccuuugaaggcucuggggaagaauccuuccuuggcucuuuuuagcuuguggcggcagugggcaguccguggcauuccccagcuuauugcugcaucacuccagucucugucucuucuguucucuccucuuuuaacaacagucauuggauuuagggcccacccuaauccugugugaucuuaucuugauccuuauuaauuaaaccugcaaauacucuaguuccaaauaaagucacauucucagguuccagguggacauga

SEQ ID NO: 36901 - RNA, 19 nt, Artificial Sequence
  Description of Artificial Sequence: Synthetic oligonucleotide
gcggcgcggggcgggcgca

SEQ ID NO: 36902 - RNA, 19 nt, Artificial Sequence
  Description of Artificial Sequence: Synthetic oligonucleotide
agcgggggucggggcgcug

SEQ ID NO: 36903 - RNA, 19 nt, Artificial Sequence
  Description of Artificial Sequence: Synthetic oligonucleotide
gggagcccguugggccgcg

SEQ ID NO: 36904 - RNA, 19 nt, Artificial Sequence
  Description of Artificial Sequence: Synthetic oligonucleotide
gaacgcagccgccacgccg

SEQ ID NO: 36905 - RNA, 19 nt, Artificial Sequence
  Description of Artificial Sequence: Synthetic oligonucleotide
ggggccgccgagaucgggu

SEQ ID NO: 36906 - RNA, 19 nt, Artificial Sequence
  Description of Artificial Sequence: Synthetic oligonucleotide
ugcccgggaugagccucau

SEQ ID NO: 36907 - RNA, 19 nt, Artificial Sequence
  Description of Artificial Sequence: Synthetic oligonucleotide
uccggaaaaagggcuucua

SEQ ID NO: 36908 - RNA, 19 nt, Artificial Sequence
  Description of Artificial Sequence: Synthetic oligonucleotide
acaagcaggacgucaacaa

SEQ ID NO: 36909 - RNA, 19 nt, Artificial Sequence
  Description of Artificial Sequence: Synthetic oligonucleotide
agaccgccugggagcugcc

SEQ ID NO: 36910 - RNA, 19 nt, Artificial Sequence
  Description of Artificial Sequence: Synthetic oligonucleotide
ccaagaccuacgugucccc

SEQ ID NO: 36911 - RNA, 19 nt, Artificial Sequence
  Description of Artificial Sequence: Synthetic oligonucleotide
cgacgcacgucggcagcgg

SEQ ID NO: 36912 - RNA, 19 nt, Artificial Sequence
  Description of Artificial Sequence: Synthetic oligonucleotide
gggccuauggcuccgugug

SEQ ID NO: 36913 - RNA, 19 nt, Artificial Sequence
  Description of Artificial Sequence: Synthetic oligonucleotide
gcucggccaucgacaagcg

SEQ ID NO: 36914 - RNA, 19 nt, Artificial Sequence
  Description of Artificial Sequence: Synthetic oligonucleotide
ggucaggggagaagguggc

SEQ ID NO: 36915 - RNA, 19 nt, Artificial Sequence
  Description of Artificial Sequence: Synthetic oligonucleotide
ccaucaagaagcugagccg

SEQ ID NO: 36916 - RNA, 19 nt, Artificial Sequence
  Description of Artificial Sequence: Synthetic oligonucleotide
gacccuuucaguccgagau

SEQ ID NO: 36917 - RNA, 19 nt, Artificial Sequence
  Description of Artificial Sequence: Synthetic oligonucleotide
ucuucgccaagcgcgccua

SEQ ID NO: 36918 - RNA, 19 nt, Artificial Sequence
  Description of Artificial Sequence: Synthetic oligonucleotide
accgggagcugcugcugcu

SEQ ID NO: 36919 - RNA, 19 nt, Artificial Sequence
  Description of Artificial Sequence: Synthetic oligonucleotide
ugaagcacaugcagcauga

SEQ ID NO: 36920 - RNA, 19 nt, Artificial Sequence
  Description of Artificial Sequence: Synthetic oligonucleotide
agaacgucauugggcuccu

SEQ ID NO: 36921 - RNA, 19 nt, Artificial Sequence
  Description of Artificial Sequence: Synthetic oligonucleotide
uggaugucuucaccccagc

SEQ ID NO: 36922 - RNA, 19 nt, Artificial Sequence
  Description of Artificial Sequence: Synthetic oligonucleotide
ccuccucccugcgcaacuu

SEQ ID NO: 36923 - RNA, 19 nt, Artificial Sequence
  Description of Artificial Sequence: Synthetic oligonucleotide
ucuaugacuucuaccuggu

SEQ ID NO: 36924 - RNA, 19 nt, Artificial Sequence
  Description of Artificial Sequence: Synthetic oligonucleotide
ugaugcccuucaugcagac

SEQ ID NO: 36925 - RNA, 19 nt, Artificial Sequence
  Description of Artificial Sequence: Synthetic oligonucleotide
cggaucugcagaagaucau

SEQ ID NO: 36926 - RNA, 19 nt, Artificial Sequence
  Description of Artificial Sequence: Synthetic oligonucleotide
uggggauggaguucaguga

SEQ ID NO: 36927 - RNA, 19 nt, Artificial Sequence
  Description of Artificial Sequence: Synthetic oligonucleotide
aggagaagauccaguaccu

SEQ ID NO: 36928 - RNA, 19 nt, Artificial Sequence
  Description of Artificial Sequence: Synthetic oligonucleotide
ugguguaucagaugcucaa

SEQ ID NO: 36929 - RNA, 19 nt, Artificial Sequence
  Description of Artificial Sequence: Synthetic oligonucleotide
aaggccuuaaguacaucca

SEQ ID NO: 36930 - RNA, 19 nt, Artificial Sequence
  Description of Artificial Sequence: Synthetic oligonucleotide
acucugcuggggucgugca

SEQ ID NO: 36931 - RNA, 19 nt, Artificial Sequence
  Description of Artificial Sequence: Synthetic oligonucleotide
acagggaccugaagccagg

SEQ ID NO: 36932 - RNA, 19 nt, Artificial Sequence
  Description of Artificial Sequence: Synthetic oligonucleotide
gcaaccuggcugugaauga

SEQ ID NO: 36933 - RNA, 19 nt, Artificial Sequence
  Description of Artificial Sequence: Synthetic oligonucleotide
aggacugugaacugaagau

SEQ ID NO: 36934 - RNA, 19 nt, Artificial Sequence
  Description of Artificial Sequence: Synthetic oligonucleotide
uucuggauuuugggcuggc

SEQ ID NO: 36935 - RNA, 19 nt, Artificial Sequence
  Description of Artificial Sequence: Synthetic oligonucleotide
cgcgacaugcagacgccga

SEQ ID NO: 36936 - RNA, 19 nt, Artificial Sequence
  Description of Artificial Sequence: Synthetic oligonucleotide
agaugacuggcuacguggu

SEQ ID NO: 36937 - RNA, 19 nt, Artificial Sequence
  Description of Artificial Sequence: Synthetic oligonucleotide
ugacccgcugguaccgagc

SEQ ID NO: 36938 - RNA, 19 nt, Artificial Sequence
  Description of Artificial Sequence: Synthetic oligonucleotide
cccccgaggugauccucag

SEQ ID NO: 36939 - RNA, 19 nt, Artificial Sequence
  Description of Artificial Sequence: Synthetic oligonucleotide
gcuggaugcacuacaacca

SEQ ID NO: 36940 - RNA, 19 nt, Artificial Sequence
  Description of Artificial Sequence: Synthetic oligonucleotide
agacaguggacaucugguc

SEQ ID NO: 36941 - RNA, 19 nt, Artificial Sequence
  Description of Artificial Sequence: Synthetic oligonucleotide
cugugggcuguaucauggc

SEQ ID NO: 36942 - RNA, 19 nt, Artificial Sequence
  Description of Artificial Sequence: Synthetic oligonucleotide
cagagaugcugacagggaa

SEQ ID NO: 36943 - RNA, 19 nt, Artificial Sequence
  Description of Artificial Sequence: Synthetic oligonucleotide
aaacucuguucaaggggaa

SEQ ID NO: 36944 - RNA, 19 nt, Artificial Sequence
  Description of Artificial Sequence: Synthetic oligonucleotide
aagauuaccuggaccagcu

SEQ ID NO: 36945 - RNA, 19 nt, Artificial Sequence
  Description of Artificial Sequence: Synthetic oligonucleotide
ugacccagauccugaaagu

SEQ ID NO: 36946 - RNA, 19 nt, Artificial Sequence
  Description of Artificial Sequence: Synthetic oligonucleotide
ugaccggggugccuggcac

SEQ ID NO: 36947 - RNA, 19 nt, Artificial Sequence
  Description of Artificial Sequence: Synthetic oligonucleotide
cggaguuugugcagaagcu

SEQ ID NO: 36948 - RNA, 19 nt, Artificial Sequence
  Description of Artificial Sequence: Synthetic oligonucleotide
ugaacgacaaagcggccaa

SEQ ID NO: 36949 - RNA, 19 nt, Artificial Sequence
  Description of Artificial Sequence: Synthetic oligonucleotide
aauccuacauccagucccu

SEQ ID NO: 36950 - RNA, 19 nt, Artificial Sequence
  Description of Artificial Sequence: Synthetic oligonucleotide
ugccacagacccccaggaa

SEQ ID NO: 36951 - RNA, 19 nt, Artificial Sequence
  Description of Artificial Sequence: Synthetic oligonucleotide
aggauuucacucagcuguu

SEQ ID NO: 36952 - RNA, 19 nt, Artificial Sequence
  Description of Artificial Sequence: Synthetic oligonucleotide
ucccacgggccagccccca

SEQ ID NO: 36953 - RNA, 19 nt, Artificial Sequence
  Description of Artificial Sequence: Synthetic oligonucleotide
aggcugcggaccugcugga

SEQ ID NO: 36954 - RNA, 19 nt, Artificial Sequence
  Description of Artificial Sequence: Synthetic oligonucleotide
agaagaugcuggagcuaga

SEQ ID NO: 36955 - RNA, 19 nt, Artificial Sequence
  Description of Artificial Sequence: Synthetic oligonucleotide
acguggacaagcgccugac

SEQ ID NO: 36956 - RNA, 19 nt, Artificial Sequence
  Description of Artificial Sequence: Synthetic oligonucleotide
cggccgcgcaggcccucac

SEQ ID NO: 36957 - RNA, 19 nt, Artificial Sequence
  Description of Artificial Sequence: Synthetic oligonucleotide
cccaucccuucuuugaacc

SEQ ID NO: 36958 - RNA, 19 nt, Artificial Sequence
  Description of Artificial Sequence: Synthetic oligonucleotide
ccuuccgggacccugagga

SEQ ID NO: 36959 - RNA, 19 nt, Artificial Sequence
  Description of Artificial Sequence: Synthetic oligonucleotide
aagagacggaggcccagca

SEQ ID NO: 36960 - RNA, 19 nt, Artificial Sequence
  Description of Artificial Sequence: Synthetic oligonucleotide
agccguuugaugauuccuu

SEQ ID NO: 36961 - RNA, 19 nt, Artificial Sequence
  Description of Artificial Sequence: Synthetic oligonucleotide
uagaacacgagaaacucac

SEQ ID NO: 36962 - RNA, 19 nt, Artificial Sequence
  Description of Artificial Sequence: Synthetic oligonucleotide
caguggaugaauggaagca

SEQ ID NO: 36963 - RNA, 19 nt, Artificial Sequence
  Description of Artificial Sequence: Synthetic oligonucleotide
agcacaucuacaaggagau

SEQ ID NO: 36964 - RNA, 19 nt, Artificial Sequence
  Description of Artificial Sequence: Synthetic oligonucleotide
uugugaacuucagccccau

SEQ ID NO: 36965 - RNA, 19 nt, Artificial Sequence
  Description of Artificial Sequence: Synthetic oligonucleotide
uugcccggaaggacucacg

SEQ ID NO: 36966 - RNA, 19 nt, Artificial Sequence
  Description of Artificial Sequence: Synthetic oligonucleotide
ggcgccggaguggcaugaa

SEQ ID NO: 36967 - RNA, 19 nt, Artificial Sequence
  Description of Artificial Sequence: Synthetic oligonucleotide
agcuguagggacucaucuu

SEQ ID NO: 36968 - RNA, 19 nt, Artificial Sequence
  Description of Artificial Sequence: Synthetic oligonucleotide
ugcauggcaccaccggcca

SEQ ID NO: 36969 - RNA, 19 nt, Artificial Sequence
  Description of Artificial Sequence: Synthetic oligonucleotide
agacacugcccaaggacca

SEQ ID NO: 36970 - RNA, 19 nt, Artificial Sequence
  Description of Artificial Sequence: Synthetic oligonucleotide
aguauuugucacuaccaaa

SEQ ID NO: 36971 - RNA, 19 nt, Artificial Sequence
  Description of Artificial Sequence: Synthetic oligonucleotide
acucagcccuucuuggaau

SEQ ID NO: 36972 - RNA, 19 nt, Artificial Sequence
  Description of Artificial Sequence: Synthetic oligonucleotide
uacagccuuucaagcagag

SEQ ID NO: 36973 - RNA, 19 nt, Artificial Sequence
  Description of Artificial Sequence: Synthetic oligonucleotide
ggacagaaggguccuucuc

SEQ ID NO: 36974 - RNA, 19 nt, Artificial Sequence
  Description of Artificial Sequence: Synthetic oligonucleotide
ccuuaugugggaaaugggc

SEQ ID NO: 36975 - RNA, 19 nt, Artificial Sequence
  Description of Artificial Sequence: Synthetic oligonucleotide
ccuaguagaugcagaauuc

SEQ ID NO: 36976 - RNA, 19 nt, Artificial Sequence
  Description of Artificial Sequence: Synthetic oligonucleotide
caaagaugucgguugggag

SEQ ID NO: 36977 - RNA, 19 nt, Artificial Sequence
  Description of Artificial Sequence: Synthetic oligonucleotide
gaaacuagcucugauccua

SEQ ID NO: 36978 - RNA, 19 nt, Artificial Sequence
  Description of Artificial Sequence: Synthetic oligonucleotide
aacaggccacguuaaacug

SEQ ID NO: 36979 - RNA, 19 nt, Artificial Sequence
  Description of Artificial Sequence: Synthetic oligonucleotide
gcccaucuggagaaucgcc

SEQ ID NO: 36980 - RNA, 19 nt, Artificial Sequence
  Description of Artificial Sequence: Synthetic oligonucleotide
cugcagguggggcccuuuc

SEQ ID NO: 36981 - RNA, 19 nt, Artificial Sequence
  Description of Artificial Sequence: Synthetic oligonucleotide
ccuucccgccagagugggg

SEQ ID NO: 36982 - RNA, 19 nt, Artificial Sequence
  Description of Artificial Sequence: Synthetic oligonucleotide
gcugagugggcgcugagcc

SEQ ID NO: 36983 - RNA, 19 nt, Artificial Sequence
  Description of Artificial Sequence: Synthetic oligonucleotide
caggccgggggccuauggc

SEQ ID NO: 36984 - RNA, 19 nt, Artificial Sequence
  Description of Artificial Sequence: Synthetic oligonucleotide
cagugaugcuguguugguu

SEQ ID NO: 36985 - RNA, 19 nt, Artificial Sequence
  Description of Artificial Sequence: Synthetic oligonucleotide
uuccuagggaugcucuaac

SEQ ID NO: 36986 - RNA, 19 nt, Artificial Sequence
  Description of Artificial Sequence: Synthetic oligonucleotide
cgaauuaccacaaaccugg

SEQ ID NO: 36987 - RNA, 19 nt, Artificial Sequence
  Description of Artificial Sequence: Synthetic oligonucleotide
guggauugaaacagcagaa

SEQ ID NO: 36988 - RNA, 19 nt, Artificial Sequence
  Description of Artificial Sequence: Synthetic oligonucleotide
acuugauucccuuacaguu

SEQ ID NO: 36989 - RNA, 19 nt, Artificial Sequence
  Description of Artificial Sequence: Synthetic oligonucleotide
ucuggaggcuggaaaucug

SEQ ID NO: 36990 - RNA, 19 nt, Artificial Sequence
  Description of Artificial Sequence: Synthetic oligonucleotide
gggauggagguguuggcag

SEQ ID NO: 36991 - RNA, 19 nt, Artificial Sequence
  Description of Artificial Sequence: Synthetic oligonucleotide
gggcuguggucccuuugaa

SEQ ID NO: 36992 - RNA, 19 nt, Artificial Sequence
  Description of Artificial Sequence: Synthetic oligonucleotide
aggcucuggggaagaaucc

SEQ ID NO: 36993 - RNA, 19 nt, Artificial Sequence
  Description of Artificial Sequence: Synthetic oligonucleotide
cuuccuuggcucuuuuuag

SEQ ID NO: 36994 - RNA, 19 nt, Artificial Sequence
  Description of Artificial Sequence: Synthetic oligonucleotide
gcuuguggcggcagugggc

SEQ ID NO: 36995 - RNA, 19 nt, Artificial Sequence
  Description of Artificial Sequence: Synthetic oligonucleotide
caguccguggcauucccca

SEQ ID NO: 36996 - RNA, 19 nt, Artificial Sequence
  Description of Artificial Sequence: Synthetic oligonucleotide
agcuuauugcugcaucacu

SEQ ID NO: 36997 - RNA, 19 nt, Artificial Sequence
  Description of Artificial Sequence: Synthetic oligonucleotide
uccagucucugucucuucu

SEQ ID NO: 36998 - RNA, 19 nt, Artificial Sequence
  Description of Artificial Sequence: Synthetic oligonucleotide
uguucucuccucuuuuaac

SEQ ID NO: 36999 - RNA, 19 nt, Artificial Sequence
  Description of Artificial Sequence: Synthetic oligonucleotide
caacagucauuggauuuag

SEQ ID NO: 37000 - RNA, 19 nt, Artificial Sequence
  Description of Artificial Sequence: Synthetic oligonucleotide
gggcccacccuaauccugu

SEQ ID NO: 37001 - RNA, 19 nt, Artificial Sequence
  Description of Artificial Sequence: Synthetic oligonucleotide
ugugaucuuaucuugaucc

SEQ ID NO: 37002 - RNA, 19 nt, Artificial Sequence
  Description of Artificial Sequence: Synthetic oligonucleotide
cuuauuaauuaaaccugca

SEQ ID NO: 37003 - RNA, 19 nt, Artificial Sequence
  Description of Artificial Sequence: Synthetic oligonucleotide
aaauacucuaguuccaaau

SEQ ID NO: 37004 - RNA, 19 nt, Artificial Sequence
  Description of Artificial Sequence: Synthetic oligonucleotide
uaaagucacauucucaggu

SEQ ID NO: 37005 - RNA, 19 nt, Artificial Sequence
  Description of Artificial Sequence: Synthetic oligonucleotide
agguuccagguggacauga

SEQ ID NO: 37006 - RNA, 25 nt, Artificial Sequence
  Description of Artificial Sequence: Synthetic oligonucleotide
gcggcgcggggcgggcgcagcgggg

SEQ ID NO: 37007 - RNA, 25 nt, Artificial Sequence
  Description of Artificial Sequence: Synthetic oligonucleotide
ggucggggcgcugggagcccguugg

SEQ ID NO: 37008 - RNA, 25 nt, Artificial Sequence
  Description of Artificial Sequence: Synthetic oligonucleotide
ggccgcgaacgcagccgccacgccg

SEQ ID NO: 37009 - RNA, 25 nt, Artificial Sequence
  Description of Artificial Sequence: Synthetic oligonucleotide
ggggccgccgagaucgggugcccgg

SEQ ID NO: 37010 - RNA, 25 nt, Artificial Sequence
  Description of Artificial Sequence: Synthetic oligonucleotide
ggaugagccucauccggaaaaaggg

SEQ ID NO: 37011 - RNA, 25 nt, Artificial Sequence
  Description of Artificial Sequence: Synthetic oligonucleotide
gcuucuacaagcaggacgucaacaa

SEQ ID NO: 37012 - RNA, 25 nt, Artificial Sequence
  Description of Artificial Sequence: Synthetic oligonucleotide
agaccgccugggagcugcccaagac

SEQ ID NO: 37013 - RNA, 25 nt, Artificial Sequence
  Description of Artificial Sequence: Synthetic oligonucleotide
ccuacguguccccgacgcacgucgg

SEQ ID NO: 37014 - RNA, 25 nt, Artificial Sequence
  Description of Artificial Sequence: Synthetic oligonucleotide
gcagcggggccuauggcuccgugug

SEQ ID NO: 37015 - RNA, 25 nt, Artificial Sequence
  Description of Artificial Sequence: Synthetic oligonucleotide
gcucggccaucgacaagcggucagg

SEQ ID NO: 37016 - RNA, 25 nt, Artificial Sequence
  Description of Artificial Sequence: Synthetic oligonucleotide
gggagaagguggccaucaagaagcu

SEQ ID NO: 37017 - RNA, 25 nt, Artificial Sequence
  Description of Artificial Sequence: Synthetic oligonucleotide
ugagccgacccuuucaguccgagau

SEQ ID NO: 37018 - RNA, 25 nt, Artificial Sequence
  Description of Artificial Sequence: Synthetic oligonucleotide
ucuucgccaagcgcgccuaccggga

SEQ ID NO: 37019 - RNA, 25 nt, Artificial Sequence
  Description of Artificial Sequence: Synthetic oligonucleotide
agcugcugcugcugaagcacaugca

SEQ ID NO: 37020 - RNA, 25 nt, Artificial Sequence
  Description of Artificial Sequence: Synthetic oligonucleotide
agcaugagaacgucauugggcuccu

SEQ ID NO: 37021 - RNA, 25 nt, Artificial Sequence
  Description of Artificial Sequence: Synthetic oligonucleotide
uggaugucuucaccccagccuccuc

SEQ ID NO: 37022 - RNA, 25 nt, Artificial Sequence
  Description of Artificial Sequence: Synthetic oligonucleotide
cccugcgcaacuucuaugacuucua

SEQ ID NO: 37023 - RNA, 25 nt, Artificial Sequence
  Description of Artificial Sequence: Synthetic oligonucleotide
accuggugaugcccuucaugcagac

SEQ ID NO: 37024 - RNA, 25 nt, Artificial Sequence
  Description of Artificial Sequence: Synthetic oligonucleotide
cggaucugcagaagaucauggggau

SEQ ID NO: 37025 - RNA, 25 nt, Artificial Sequence
  Description of Artificial Sequence: Synthetic oligonucleotide
uggaguucagugaggagaagaucca

SEQ ID NO: 37026 - RNA, 25 nt, Artificial Sequence
  Description of Artificial Sequence: Synthetic oligonucleotide
aguaccugguguaucagaugcucaa

SEQ ID NO: 37027 - RNA, 25 nt, Artificial Sequence
  Description of Artificial Sequence: Synthetic oligonucleotide
aaggccuuaaguacauccacucugc

SEQ ID NO: 37028 - RNA, 25 nt, Artificial Sequence
  Description of Artificial Sequence: Synthetic oligonucleotide
cuggggucgugcacagggaccugaa

SEQ ID NO: 37029 - RNA, 25 nt, Artificial Sequence
  Description of Artificial Sequence: Synthetic oligonucleotide
agccaggcaaccuggcugugaauga

SEQ ID NO: 37030 - RNA, 25 nt, Artificial Sequence
  Description of Artificial Sequence: Synthetic oligonucleotide
aggacugugaacugaagauucugga

SEQ ID NO: 37031 - RNA, 25 nt, Artificial Sequence
  Description of Artificial Sequence: Synthetic oligonucleotide
auuuugggcuggcgcgacaugcaga

SEQ ID NO: 37032 - RNA, 25 nt, Artificial Sequence
  Description of Artificial Sequence: Synthetic oligonucleotide
acgccgagaugacuggcuacguggu

SEQ ID NO: 37033 - RNA, 25 nt, Artificial Sequence
  Description of Artificial Sequence: Synthetic oligonucleotide
ugacccgcugguaccgagcccccga

SEQ ID NO: 37034 - RNA, 25 nt, Artificial Sequence
  Description of Artificial Sequence: Synthetic oligonucleotide
aggugauccucagcuggaugcacua

SEQ ID NO: 37035 - RNA, 25 nt, Artificial Sequence
  Description of Artificial Sequence: Synthetic oligonucleotide
acaaccagacaguggacaucugguc

SEQ ID NO: 37036 - RNA, 25 nt, Artificial Sequence
  Description of Artificial Sequence: Synthetic oligonucleotide
cugugggcuguaucauggcagagau

SEQ ID NO: 37037 - RNA, 25 nt, Artificial Sequence
  Description of Artificial Sequence: Synthetic oligonucleotide
ugcugacagggaaaacucuguucaa

SEQ ID NO: 37038 - RNA, 25 nt, Artificial Sequence
  Description of Artificial Sequence: Synthetic oligonucleotide
aggggaaagauuaccuggaccagcu

SEQ ID NO: 37039 - RNA, 25 nt, Artificial Sequence
  Description of Artificial Sequence: Synthetic oligonucleotide
ugacccagauccugaaagugaccgg

SEQ ID NO: 37040 - RNA, 25 nt, Artificial Sequence
  Description of Artificial Sequence: Synthetic oligonucleotide
gggugccuggcacggaguuugugca

SEQ ID NO: 37041 - RNA, 25 nt, Artificial Sequence
  Description of Artificial Sequence: Synthetic oligonucleotide
agaagcugaacgacaaagcggccaa

SEQ ID NO: 37042 - RNA, 25 nt, Artificial Sequence
  Description of Artificial Sequence: Synthetic oligonucleotide
aauccuacauccagucccugccaca

SEQ ID NO: 37043 - RNA, 25 nt, Artificial Sequence
  Description of Artificial Sequence: Synthetic oligonucleotide
agacccccaggaaggauuucacuca

SEQ ID NO: 37044 - RNA, 25 nt, Artificial Sequence
  Description of Artificial Sequence: Synthetic oligonucleotide
agcuguucccacgggccagccccca

SEQ ID NO: 37045 - RNA, 25 nt, Artificial Sequence
  Description of Artificial Sequence: Synthetic oligonucleotide
aggcugcggaccugcuggagaagau

SEQ ID NO: 37046 - RNA, 25 nt, Artificial Sequence
  Description of Artificial Sequence: Synthetic oligonucleotide
ugcuggagcuagacguggacaagcg

SEQ ID NO: 37047 - RNA, 25 nt, Artificial Sequence
  Description of Artificial Sequence: Synthetic oligonucleotide
gccugacggccgcgcaggcccucac

SEQ ID NO: 37048 - RNA, 25 nt, Artificial Sequence
  Description of Artificial Sequence: Synthetic oligonucleotide
cccaucccuucuuugaacccuuccg

SEQ ID NO: 37049 - RNA, 25 nt, Artificial Sequence
  Description of Artificial Sequence: Synthetic oligonucleotide
gggacccugaggaagagacggaggc

SEQ ID NO: 37050 - RNA, 25 nt, Artificial Sequence
  Description of Artificial Sequence: Synthetic oligonucleotide
cccagcagccguuugaugauuccuu

SEQ ID NO: 37051 - RNA, 25 nt, Artificial Sequence
  Description of Artificial Sequence: Synthetic oligonucleotide
uagaacacgagaaacucacagugga

SEQ ID NO: 37052 - RNA, 25 nt, Artificial Sequence
  Description of Artificial Sequence: Synthetic oligonucleotide
augaauggaagcagcacaucuacaa

SEQ ID NO: 37053 - RNA, 25 nt, Artificial Sequence
  Description of Artificial Sequence: Synthetic oligonucleotide
aggagauugugaacuucagccccau

SEQ ID NO: 37054 - RNA, 25 nt, Artificial Sequence
  Description of Artificial Sequence: Synthetic oligonucleotide
uugcccggaaggacucacggcgccg

SEQ ID NO: 37055 - RNA, 25 nt, Artificial Sequence
  Description of Artificial Sequence: Synthetic oligonucleotide
ggaguggcaugaagcuguagggacu

SEQ ID NO: 37056 - RNA, 25 nt, Artificial Sequence
  Description of Artificial Sequence: Synthetic oligonucleotide
ucaucuugcauggcaccaccggcca

SEQ ID NO: 37057 - RNA, 25 nt, Artificial Sequence
  Description of Artificial Sequence: Synthetic oligonucleotide
agacacugcccaaggaccaguauuu

SEQ ID NO: 37058 - RNA, 25 nt, Artificial Sequence
  Description of Artificial Sequence: Synthetic oligonucleotide
ugucacuaccaaacucagcccuucu

SEQ ID NO: 37059 - RNA, 25 nt, Artificial Sequence
  Description of Artificial Sequence: Synthetic oligonucleotide
uuggaauacagccuuucaagcagag

SEQ ID NO: 37060 - RNA, 25 nt, Artificial Sequence
  Description of Artificial Sequence: Synthetic oligonucleotide
ggacagaaggguccuucuccuuaug

SEQ ID NO: 37061 - RNA, 25 nt, Artificial Sequence
  Description of Artificial Sequence: Synthetic oligonucleotide
gugggaaaugggccuaguagaugca

SEQ ID NO: 37062 - RNA, 25 nt, Artificial Sequence
  Description of Artificial Sequence: Synthetic oligonucleotide
agaauucaaagaugucgguugggag

SEQ ID NO: 37063 - RNA, 25 nt, Artificial Sequence
  Description of Artificial Sequence: Synthetic oligonucleotide
gaaacuagcucugauccuaacaggc

SEQ ID NO: 37064 - RNA, 25 nt, Artificial Sequence
  Description of Artificial Sequence: Synthetic oligonucleotide
ccacguuaaacugcccaucuggaga

SEQ ID NO: 37065 - RNA, 25 nt, Artificial Sequence
  Description of Artificial Sequence: Synthetic oligonucleotide
aaucgccugcagguggggcccuuuc

SEQ ID NO: 37066 - RNA, 25 nt, Artificial Sequence
  Description of Artificial Sequence: Synthetic oligonucleotide
ccuucccgccagaguggggcugagu

SEQ ID NO: 37067 - RNA, 25 nt, Artificial Sequence
  Description of Artificial Sequence: Synthetic oligonucleotide
ugggcgcugagccaggccgggggcc

SEQ ID NO: 37068 - RNA, 25 nt, Artificial Sequence
  Description of Artificial Sequence: Synthetic oligonucleotide
cuauggcagugaugcuguguugguu

SEQ ID NO: 37069 - RNA, 25 nt, Artificial Sequence
  Description of Artificial Sequence: Synthetic oligonucleotide
uuccuagggaugcucuaacgaauua

SEQ ID NO: 37070 - RNA, 25 nt, Artificial Sequence
  Description of Artificial Sequence: Synthetic oligonucleotide
accacaaaccugguggauugaaaca

SEQ ID NO: 37071 - RNA, 25 nt, Artificial Sequence
  Description of Artificial Sequence: Synthetic oligonucleotide
agcagaacuugauucccuuacaguu

SEQ ID NO: 37072 - RNA, 25 nt, Artificial Sequence
  Description of Artificial Sequence: Synthetic oligonucleotide
ucuggaggcuggaaaucugggaugg

SEQ ID NO: 37073 - RNA, 25 nt, Artificial Sequence
  Description of Artificial Sequence: Synthetic oligonucleotide
gagguguuggcagggcugugguccc

SEQ ID NO: 37074 - RNA, 25 nt, Artificial Sequence
  Description of Artificial Sequence: Synthetic oligonucleotide
cuuugaaggcucuggggaagaaucc

SEQ ID NO: 37075 - RNA, 25 nt, Artificial Sequence
  Description of Artificial Sequence: Synthetic oligonucleotide
cuuccuuggcucuuuuuagcuugug

SEQ ID NO: 37076 - RNA, 25 nt, Artificial Sequence
  Description of Artificial Sequence: Synthetic oligonucleotide
ggcggcagugggcaguccguggcau

SEQ ID NO: 37077 - RNA, 25 nt, Artificial Sequence
  Description of Artificial Sequence: Synthetic oligonucleotide
uuccccagcuuauugcugcaucacu

SEQ ID NO: 37078 - RNA, 25 nt, Artificial Sequence
  Description of Artificial Sequence: Synthetic oligonucleotide
uccagucucugucucuucuguucuc

SEQ ID NO: 37079 - RNA, 25 nt, Artificial Sequence
  Description of Artificial Sequence: Synthetic oligonucleotide
cuccucuuuuaacaacagucauugg

SEQ ID NO: 37080 - RNA, 25 nt, Artificial Sequence
  Description of Artificial Sequence: Synthetic oligonucleotide
gauuuagggcccacccuaauccugu

SEQ ID NO: 37081 - RNA, 25 nt, Artificial Sequence
  Description of Artificial Sequence: Synthetic oligonucleotide
ugugaucuuaucuugauccuuauua

SEQ ID NO: 37082 - RNA, 25 nt, Artificial Sequence
  Description of Artificial Sequence: Synthetic oligonucleotide
aauuaaaccugcaaauacucuaguu

SEQ ID NO: 37083 - RNA, 25 nt, Artificial Sequence
  Description of Artificial Sequence: Synthetic oligonucleotide
uccaaauaaagucacauucucaggu

SEQ ID NO: 37084 - RNA, 25 nt, Artificial Sequence
  Description of Artificial Sequence: Synthetic oligonucleotide
auucucagguuccagguggacauga

SEQ ID NO: 37085 - RNA, 3757 nt, Homo sapiens
ggaaccgcgaccacuggagccuuagcgggcgcagcagcuggaacgggaguacugcgacgcagcccggagucggccuuguaggggcgaaggugcagggagaucgcggcgggcgcagucuugagcgccggagcgcgucccugcccuuagcggggcuugccccagucgcaggggcacauccagccgcugcggcugacagcagccgcgcgcgcgggagucugcggggucgcggcagccgcaccugcgcgggcgaccagcgcaagguccccgcccggcugggcgggcagcaagggccggggagagggugcgggugcaggcgggggccccacagggccaccuucuugcccggcggcugccgcuggaaaaugucucaggagaggcccacguucuaccggcaggagcugaacaagacaaucugggaggugcccgagcguuaccagaaccugucuccagugggcucuggcgccuauggcucugugugugcugcuuuugacacaaaaacgggguuacguguggcagugaagaagcucuccagaccauuucaguccaucauucaugcgaaaagaaccuacagagaacugcgguuacuuaaacauaugaaacaugaaaaugugauuggucuguuggacguuuuuacaccugcaaggucucuggaggaauucaaugauguguaucuggugacccaucucaugggggcagaucugaacaacauugugaaaugucagaagcuuacagaugaccauguucaguuccuuaucuaccaaauucuccgaggucuaaaguauauacauucagcugacauaauucacagggaccuaaaaccuaguaaucuagcugugaaugaagacugugagcugaagauucuggauuuuggacuggcucggcacacagaugaugaaaugacaggcuacguggccacuaggugguacagggcuccugagaucaugcugaacuggaugcauuacaaccagacaguugauauuuggucagugggaugcauaauggccgagcuguugacuggaagaacauuguuuccugguacagaccauauuaaccagcuucagcagauuaugcgucugacaggaacaccccccgcuuaucucauuaacaggaugccaagccaugaggcaagaaacuauauucagucuuugacucagaugccgaagaugaacuuugcgaauguauuuauuggugccaauccccuggcugucgacuugcuggagaagaugcuuguauuggacucagauaagagaauuacagcggcccaagcccuugcacaugccuacuuugcucaguaccacgauccugaugaugaaccaguggccgauccuuaugaucaguccuuugaaagcagggaccuccuuauagaugaguggaaaagccugaccuaugaugaagucaucagcuuugugccaccaccccuugaccaagaagagauggaguccugagcaccugguuucuguucuguugaucccacuucacugugaggggaaggccuuuucacgggaacucuccaaauauuauucaagugccucuuguugcagagauuuccuccaugguggaagggggugugcgugcgugugcgugcguguuagugugugugcaugugugugucugucuuugugggaggguaagacaauaugaacaaacuaugaucacagugacuuuacaggagguuguggaugcuccagggcagccuccaccuugcucuucuuucugagaguuggcucaggcagacaagagcugcuguccuuuuaggaauauguucaaugcaaaguaaaaaaauaugaauuguccccaaucccggucaugcuuuugccacuuuggcuucuccugugaccccaccuugacgguggggcguagacuugacaacaucccacaguggcacggagagaaggcccauaccuucugguugcuucagaccugacaccgucccucagugauacguacagccaaaaaggaccaacuggcuucugugcacuagccugugauuaacuugcuuaguaugguucucagaucuugacaguauauuugaaacuguaaauauguuugugccuuaaaaggagagaagaaaguguagauaguuaaaagacugcagcugcugaaguucugagccgggcaagucgagagggcuguuggacagcugcuugugggcccggaguaaucaggcagccuucauaggcggucaugugugcaugugagcacaugcguauaugugcgucucucuuucucccucacccccagguguugccauuucucugcuuacccuucaccuuuggugcagagguuucuugaauaucugccccaguagucagaagcagguucuugaugucauguacuuccuguguacucuuuauuucuagcagagugaggauguguuuugcacgucuugcuauuugagcaugcacagcugcuuguccugcucucuucaggaggcccuggugucaggcagguuugccagugaagacuucuuggguaguuuagaucccaugucaccucagcugauauuauggcaagugauaucaccucucuucagccccuagugcuauucuguguugaacacaauugauacuucaggugcuuuugaugugaaaaucaugaaaagaggaacagguggauguauagcauuuuuauucaugccaucuguuuucaaccaacuauuuuugaggaauuaucaugggaaaagaccagggcuuuucccaggaauaucccaaacuucggaaacaaguuauucucuucacucccaauaacuaaugcuaagaaaugcugaaaaucaaaguaaaaaauuaaagcccauaaggccagaaacuccuuuugcugucuuucucuaaauaugauuacuuuaaaauaaaaaaguaacaaggugucuuuuccacuccuauggaaaagggucuucuuggcagcuuaacauugacuucuugguuuggggagaaauaaauuuuguuucagaauuuuguauauuguaggaaucccuuugagaaugugauuccuuuugauggggagaaagggcaaauuauuuuaauauuuuguauuuucaacuuuauaaagauaaaauauccucagggguggagaagugucguuuucauaacuugcugaauuucaggcauuuuguucuacaugaggacucauauauuuaagccuuuuguguaauaagaaaguauaaagucacuuccaguguuggcugugugacagaaucuuguauuugggccaagguguuuccauuucucaaucagugcagugauacauguacuccagagggacaggguggacccccugagucaacuggagcaagaaggaaggaggcagacugauggcgauucccucucacccgggacucucccccuuucaaggaaagugaaccuuuaaaguaaaggccucaucuccuuuauugcaguucaaauccucaccauccacagcaagaugaauuuuaucagccauguuugguuguaaaugcucgugugauuuccuacagaaauacugcucugaauauuuuguaauaaaggucuuugcacaugugaccacauacguguuaggaggcugcaugcucuggaagccuggacucuaagcuggagcucuuggaagagcucuucgguuucugagcauaaugcucccaucuccugauuucucugaacagaaaacaaaagagagaaugagggaaauugcuauuuuauuuguauucaugaacuuggcuguaaucaguuaugccguauaggaugucagacaauaccacugguuaaaauaaagccuauuuuucaaauuu

SEQ ID NO: 37086 - RNA, 3757 nt, Homo sapiens
ggaaccgcgaccacuggagccuuagcgggcgcagcagcuggaacgggaguacugcgacgcagcccggagucggccuuguaggggcgaaggugcagggagaucgcggcgggcgcagucuugagcgccggagcgcgucccugcccuuagcggggcuugccccagucgcaggggcacauccagccgcugcggcugacagcagccgcgcgcgcgggagucugcggggucgcggcagccgcaccugcgcgggcgaccagcgcaagguccccgcccggcugggcgggcagcaagggccggggagagggugcgggugcaggcgggggccccacagggccaccuucuugcccggcggcugccgcuggaaaaugucucaggagaggcccacguucuaccggcaggagcugaacaagacaaucugggaggugcccgagcguuaccagaaccugucuccagugggcucuggcgccuauggcucugugugugcugcuuuugacacaaaaacgggguuacguguggcagugaagaagcucuccagaccauuucaguccaucauucaugcgaaaagaaccuacagagaacugcgguuacuuaaacauaugaaacaugaaaaugugauuggucuguuggacguuuuuacaccugcaaggucucuggaggaauucaaugauguguaucuggugacccaucucaugggggcagaucugaacaacauugugaaaugucagaagcuuacagaugaccauguucaguuccuuaucuaccaaauucuccgaggucuaaaguauauacauucagcugacauaauucacagggaccuaaaaccuaguaaucuagcugugaaugaagacugugagcugaagauucuggauuuuggacuggcucggcacacagaugaugaaaugacaggcuacguggccacuaggugguacagggcuccugagaucaugcugaacuggaugcauuacaaccagacaguugauauuuggucagugggaugcauaauggccgagcuguugacuggaagaacauuguuuccugguacagaccauauugaucaguugaagcucauuuuaagacucguuggaaccccaggggcugagcuuuugaagaaaaucuccucagagucugcaagaaacuauauucagucuuugacucagaugccgaagaugaacuuugcgaauguauuuauuggugccaauccccuggcugucgacuugcuggagaagaugcuuguauuggacucagauaagagaauuacagcggcccaagcccuugcacaugccuacuuugcucaguaccacgauccugaugaugaaccaguggccgauccuuaugaucaguccuuugaaagcagggaccuccuuauagaugaguggaaaagccugaccuaugaugaagucaucagcuuugugccaccaccccuugaccaagaagagauggaguccugagcaccugguuucuguucuguugaucccacuucacugugaggggaaggccuuuucacgggaacucuccaaauauuauucaagugccucuuguugcagagauuuccuccaugguggaagggggugugcgugcgugugcgugcguguuagugugugugcaugugugugucugucuuugugggaggguaagacaauaugaacaaacuaugaucacagugacuuuacaggagguuguggaugcuccagggcagccuccaccuugcucuucuuucugagaguuggcucaggcagacaagagcugcuguccuuuuaggaauauguucaaugcaaaguaaaaaaauaugaauuguccccaaucccggucaugcuuuugccacuuuggcuucuccugugaccccaccuugacgguggggcguagacuugacaacaucccacaguggcacggagagaaggcccauaccuucugguugcuucagaccugacaccgucccucagugauacguacagccaaaaaggaccaacuggcuucugugcacuagccugugauuaacuugcuuaguaugguucucagaucuugacaguauauuugaaacuguaaauauguuugugccuuaaaaggagagaagaaaguguagauaguuaaaagacugcagcugcugaaguucugagccgggcaagucgagagggcuguuggacagcugcuugugggcccggaguaaucaggcagccuucauaggcggucaugugugcaugugagcacaugcguauaugugcgucucucuuucucccucacccccagguguugccauuucucugcuuacccuucaccuuuggugcagagguuucuugaauaucugccccaguagucagaagcagguucuugaugucauguacuuccuguguacucuuuauuucuagcagagugaggauguguuuugcacgucuugcuauuugagcaugcacagcugcuuguccugcucucuucaggaggcccuggugucaggcagguuugccagugaagacuucuuggguaguuuagaucccaugucaccucagcugauauuauggcaagugauaucaccucucuucagccccuagugcuauucuguguugaacacaauugauacuucaggugcuuuugaugugaaaaucaugaaaagaggaacagguggauguauagcauuuuuauucaugccaucuguuuucaaccaacuauuuuugaggaauuaucaugggaaaagaccagggcuuuucccaggaauaucccaaacuucggaaacaaguuauucucuucacucccaauaacuaaugcuaagaaaugcugaaaaucaaaguaaaaaauuaaagcccauaaggccagaaacuccuuuugcugucuuucucuaaauaugauuacuuuaaaauaaaaaaguaacaaggugucuuuuccacuccuauggaaaagggucuucuuggcagcuuaacauugacuucuugguuuggggagaaauaaauuuuguuucagaauuuuguauauuguaggaaucccuuugagaaugugauuccuuuugauggggagaaagggcaaauuauuuuaauauuuuguauuuucaacuuuauaaagauaaaauauccucagggguggagaagugucguuuucauaacuugcugaauuucaggcauuuuguucuacaugaggacucauauauuuaagccuuuuguguaauaagaaaguauaaagucacuuccaguguuggcugugugacagaaucuuguauuugggccaagguguuuccauuucucaaucagugcagugauacauguacuccagagggacaggguggacccccugagucaacuggagcaagaaggaaggaggcagacugauggcgauucccucucacccgggacucucccccuuucaaggaaagugaaccuuuaaaguaaaggccucaucuccuuuauugcaguucaaauccucaccauccacagcaagaugaauuuuaucagccauguuugguuguaaaugcucgugugauuuccuacagaaauacugcucugaauauuuuguaauaaaggucuuugcacaugugaccacauacguguuaggaggcugcaugcucuggaagccuggacucuaagcuggagcucuuggaagagcucuucgguuucugagcauaaugcucccaucuccugauuucucugaacagaaaacaaaagagagaaugagggaaauugcuauuuuauuuguauucaugaacuuggcuguaaucaguuaugccguauaggaugucagacaauaccacugguuaaaauaaagccuauuuuucaaauuu

SEQ ID NO: 37087 - RNA, 1312 nt, Homo sapiens
ggaaccgcgaccacuggagccuuagcgggcgcagcagcuggaacgggaguacugcgacgcagcccggagucggccuuguaggggcgaaggugcagggagaucgcggcgggcgcagucuugagcgccggagcgcgucccugcccuuagcggggcuugccccagucgcaggggcacauccagccgcugcggcugacagcagccgcgcgcgcgggagucugcggggucgcggcagccgcaccugcgcgggcgaccagcgcaagguccccgcccggcugggcgggcagcaagggccggggagagggugcgggugcaggcgggggccccacagggccaccuucuugcccggcggcugccgcuggaaaaugucucaggagaggcccacguucuaccggcaggagcugaacaagacaaucugggaggugcccgagcguuaccagaaccugucuccagugggcucuggcgccuauggcucugugugugcugcuuuugacacaaaaacgggguuacguguggcagugaagaagcucuccagaccauuucaguccaucauucaugcgaaaagaaccuacagagaacugcgguuacuuaaacauaugaaacaugaaaaugugauuggucuguuggacguuuuuacaccugcaaggucucuggaggaauucaaugauguguaucuggugacccaucucaugggggcagaucugaacaacauugugaaaugucagaagcuuacagaugaccauguucaguuccuuaucuaccaaauucuccgaggucuaaaguauauacauucagcugacauaauucacagggaccuaaaaccuaguaaucuagcugugaaugaagacugugagcugaagauucuggauuuuggacuggcucggcacacagaugaugaaaugacaggcuacguggccacuaggugguacagggcuccugagaucaugcugaacuggaugcauuacaaccagacaguugauauuuggucagugggaugcauaauggccgagcuguugacuggaagaacauuguuuccugguacagaccauauugaucaguugaagcucauuuuaagacucguuggaaccccaggggcugagcuuuugaagaaaaucuccucagagucugcaagaaacuauauucagucuuugacucagaugccgaagaugaacuuugcgaauguauuuauuggugccaauccccuggguaaguugaccauauauccucaccucauggauauugaauugguuaugauauaaauuggggauuugaagaagaguuucuccuuuugaccaaauaaaguaccauuaguuga

SEQ ID NO: 37088 - RNA, 3679 nt, Homo sapiens
ggaaccgcgaccacuggagccuuagcgggcgcagcagcuggaacgggaguacugcgacgcagcccggagucggccuuguaggggcgaaggugcagggagaucgcggcgggcgcagucuugagcgccggagcgcgucccugcccuuagcggggcuugccccagucgcaggggcacauccagccgcugcggcugacagcagccgcgcgcgcgggagucugcggggucgcggcagccgcaccugcgcgggcgaccagcgcaagguccccgcccggcugggcgggcagcaagggccggggagagggugcgggugcaggcgggggccccacagggccaccuucuugcccggcggcugccgcuggaaaaugucucaggagaggcccacguucuaccggcaggagcugaacaagacaaucugggaggugcccgagcguuaccagaaccugucuccagugggcucuggcgccuauggcucugugugugcugcuuuugacacaaaaacgggguuacguguggcagugaagaagcucuccagaccauuucaguccaucauucaugcgaaaagaaccuacagagaacugcgguuacuuaaacauaugaaacaugaaaaugugauuggucuguuggacguuuuuacaccugcaaggucucuggaggaauucaaugauguguaucuggugacccaucucaugggggcagaucugaacaacauugugaaaugucagaagcuuacagaugaccauguucaguuccuuaucuaccaaauucuccgaggucuaaaguauauacauucagcugacauaauucacagggaccuaaaaccuaguaaucuagcugugaaugaagacugugagcugaagauucuggauuuuggacuggcucggcacacagaugaugaaaugacaggcuacguggccacuaggugguacagggcuccugagaucaugcugaacuggaugcauuacaaccagacaguugauauuuggucagugggaugcauaauggccgagcuguugacuggaagaacauuguuuccugguacagaccauauugaucaguugaagcucauuuuaagacucguuggaaccccaggggcugagcuuuugaagaaaaucuccucagagucucugucgacuugcuggagaagaugcuuguauuggacucagauaagagaauuacagcggcccaagcccuugcacaugccuacuuugcucaguaccacgauccugaugaugaaccaguggccgauccuuaugaucaguccuuugaaagcagggaccuccuuauagaugaguggaaaagccugaccuaugaugaagucaucagcuuugugccaccaccccuugaccaagaagagauggaguccugagcaccugguuucuguucuguugaucccacuucacugugaggggaaggccuuuucacgggaaccucuccaaauauuauucaagugccucuuguugcagagauuuccuccaugguggaagggggugugcgugcgugugcgugcguguuagugugugugcaugugugugucugucuuugugggaggguaagacaauaugaacaaacuaugaucacagugacuuuacaggagguuguggaugcuccagggcagccuccaccuugcucuucuuucugagaguuggcucaggcagacaagagcugcuguccuuuuaggaauauguucaaugcaaaguaaaaaaauaugaauuguccccaaucccggucaugcuuuugccacuuuggcuucuccugugaccccaccuugacgguggggcguagacuugacaacaucccacaguggcacggagagaaggcccauaccuucugguugcuucagaccugacaccgucccucagugauacguacagccaaaaaggaccaacuggcuucugugcacuagccugugauuaacuugcuuaguaugguucucagaucuugacaguauauuugaaacuguaaauauguuugugccuuaaaaggagagaagaaaguguagauaguuaaaagacugcagcugcugaaguucugagccgggcaagucgagagggcuguuggacagcugcuugugggcccggaguaaucaggcagccuucauaggcggucaugugugcaugugagcacaugcguauaugugcgucucucuuucucccucacccccagguguugccauuucucugcuuacccuucaccuuuggugcagagguuucuugaauaucugccccaguagucagaagcagguucuugaugucauguacuuccuguguacucuuuauuucuagcagagugaggauguguuuugcacgucuugcuauuugagcaugcacagcugcuuguccugcucucuucaggaggcccuggugucaggcagguuugccagugaagacuucuuggguaguuuagaucccaugucaccucagcugauauuauggcaagugauaucaccucucuucagccccuagugcuauucuguguugaacacaauugauacuucaggugcuuuugaugugaaaaucaugaaaagaggaacagguggauguauagcauuuuuauucaugccaucuguuuucaaccaacuauuuuugaggaauuaucaugggaaaagaccagggcuuuucccaggaauaucccaaacuucggaaacaaguuauucucuucacucccaauaacuaaugcuaagaaaugcugaaaaucaaaguaaaaaauuaaagcccauaaggccagaaacuccuuuugcugucuuucucuaaauaugauuacuuuaaaauaaaaaaguaacaaggugucuuuuccacuccuauggaaaagggucuucuuggcagcuuaacauugacuucuugguuuggggagaaauaaauuuuguuucagaauuuuguauauuguaggaaucccuuugagaaugugauuccuuuugauggggagaaagggcaaauuauuuuaauauuuuguauuuucaacuuuauaaagauaaaauauccucagggguggagaagugucguuuucauaacuugcugaauuucaggcauuuuguucuacaugaggacucauauauuuaagccuuuuguguaauaagaaaguauaaagucacuuccaguguuggcugugugacagaaucuuguauuugggccaagguguuuccauuucucaaucagugcagugauacauguacuccagagggacaggguggacccccugagucaacuggagcaagaaggaaggaggcagacugauggcgauucccucucacccgggacucucccccuuucaaggaaagugaaccuuuaaaguaaaggccucaucuccuuuauugcaguucaaauccucaccauccacagcaagaugaauuuuaucagccauguuugguuguaaaugcucgugugauuuccuacagaaauacugcucugaauauuuuguaauaaaggucuuugcacaugugaccacauacguguuaggaggcugcaugcucuggaagccuggacucuaagcuggagcucuuggaagagcucuucgguuucugagcauaaugcucccaucuccugauuucucugaacagaaaacaaaagagagaaugagggaaauugcuauuuuauuuguauucaugaacuuggcuguaaucaguuaugccguauaggaugucagacaauaccacugguuaaaauaaagccuauuuuucaaauuu

SEQ ID NO: 37089 - RNA, 19 nt, Artificial Sequence
  Description of Artificial Sequence: Synthetic oligonucleotide
ggaaccgcgaccacuggag

SEQ ID NO: 37090 - RNA, 19 nt, Artificial Sequence
  Description of Artificial Sequence: Synthetic oligonucleotide
gccuuagcgggcgcagcag

SEQ ID NO: 37091 - RNA, 19 nt, Artificial Sequence
  Description of Artificial Sequence: Synthetic oligonucleotide
gcuggaacgggaguacugc

SEQ ID NO: 37092 - RNA, 19 nt, Artificial Sequence
  Description of Artificial Sequence: Synthetic oligonucleotide
cgacgcagcccggagucgg

SEQ ID NO: 37093 - RNA, 19 nt, Artificial Sequence
  Description of Artificial Sequence: Synthetic oligonucleotide
gccuuguaggggcgaaggu

SEQ ID NO: 37094 - RNA, 19 nt, Artificial Sequence
  Description of Artificial Sequence: Synthetic oligonucleotide
ugcagggagaucgcggcgg

SEQ ID NO: 37095 - RNA, 19 nt, Artificial Sequence
  Description of Artificial Sequence: Synthetic oligonucleotide
ggcgcagucuugagcgccg

SEQ ID NO: 37096 - RNA, 19 nt, Artificial Sequence
  Description of Artificial Sequence: Synthetic oligonucleotide
ggagcgcgucccugcccuu

SEQ ID NO: 37097 - RNA, 19 nt, Artificial Sequence
  Description of Artificial Sequence: Synthetic oligonucleotide
uagcggggcuugccccagu

SEQ ID NO: 37098 - RNA, 19 nt, Artificial Sequence
  Description of Artificial Sequence: Synthetic oligonucleotide
ucgcaggggcacauccagc

SEQ ID NO: 37099 - RNA, 19 nt, Artificial Sequence
  Description of Artificial Sequence: Synthetic oligonucleotide
ccgcugcggcugacagcag

SEQ ID NO: 37100 - RNA, 19 nt, Artificial Sequence
  Description of Artificial Sequence: Synthetic oligonucleotide
gccgcgcgcgcgggagucu

SEQ ID NO: 37101 - RNA, 19 nt, Artificial Sequence
  Description of Artificial Sequence: Synthetic oligonucleotide
ugcggggucgcggcagccg

SEQ ID NO: 37102 - RNA, 19 nt, Artificial Sequence
  Description of Artificial Sequence: Synthetic oligonucleotide
gcaccugcgcgggcgacca

SEQ ID NO: 37103 - RNA, 19 nt, Artificial Sequence
  Description of Artificial Sequence: Synthetic oligonucleotide
agcgcaagguccccgcccg

SEQ ID NO: 37104 - RNA, 19 nt, Artificial Sequence
  Description of Artificial Sequence: Synthetic oligonucleotide
ggcugggcgggcagcaagg

SEQ ID NO: 37105 - RNA, 19 nt, Artificial Sequence
  Description of Artificial Sequence: Synthetic oligonucleotide
ggccggggagagggugcgg

SEQ ID NO: 37106 - RNA, 19 nt, Artificial Sequence
  Description of Artificial Sequence: Synthetic oligonucleotide
ggugcaggcgggggcccca

SEQ ID NO: 37107 - RNA, 19 nt, Artificial Sequence
  Description of Artificial Sequence: Synthetic oligonucleotide
acagggccaccuucuugcc

SEQ ID NO: 37108 - RNA, 19 nt, Artificial Sequence
  Description of Artificial Sequence: Synthetic oligonucleotide
ccggcggcugccgcuggaa

SEQ ID NO: 37109 - RNA, 19 nt, Artificial Sequence
  Description of Artificial Sequence: Synthetic oligonucleotide
aaaugucucaggagaggcc

SEQ ID NO: 37110 - RNA, 19 nt, Artificial Sequence
  Description of Artificial Sequence: Synthetic oligonucleotide
ccacguucuaccggcagga

SEQ ID NO: 37111 - RNA, 19 nt, Artificial Sequence
  Description of Artificial Sequence: Synthetic oligonucleotide
agcugaacaagacaaucug

SEQ ID NO: 37112 - RNA, 19 nt, Artificial Sequence
  Description of Artificial Sequence: Synthetic oligonucleotide
gggaggugcccgagcguua

SEQ ID NO: 37113 - RNA, 19 nt, Artificial Sequence
  Description of Artificial Sequence: Synthetic oligonucleotide
accagaaccugucuccagu

SEQ ID NO: 37114 - RNA, 19 nt, Artificial Sequence
  Description of Artificial Sequence: Synthetic oligonucleotide
ugggcucuggcgccuaugg

SEQ ID NO: 37115 - RNA, 19 nt, Artificial Sequence
  Description of Artificial Sequence: Synthetic oligonucleotide
gcucugugugugcugcuuu

SEQ ID NO: 37116 - RNA, 19 nt, Artificial Sequence
  Description of Artificial Sequence: Synthetic oligonucleotide
uugacacaaaaacgggguu

SEQ ID NO: 37117 - RNA, 19 nt, Artificial Sequence
  Description of Artificial Sequence: Synthetic oligonucleotide
uacguguggcagugaagaa

SEQ ID NO: 37118 - RNA, 19 nt, Artificial Sequence
  Description of Artificial Sequence: Synthetic oligonucleotide
agcucuccagaccauuuca

SEQ ID NO: 37119 - RNA, 19 nt, Artificial Sequence
  Description of Artificial Sequence: Synthetic oligonucleotide
aguccaucauucaugcgaa

SEQ ID NO: 37120 - RNA, 19 nt, Artificial Sequence
  Description of Artificial Sequence: Synthetic oligonucleotide
aaagaaccuacagagaacu

SEQ ID NO: 37121 - RNA, 19 nt, Artificial Sequence
  Description of Artificial Sequence: Synthetic oligonucleotide
ugcgguuacuuaaacauau

SEQ ID NO: 37122 - RNA, 19 nt, Artificial Sequence
  Description of Artificial Sequence: Synthetic oligonucleotide
ugaaacaugaaaaugugau

SEQ ID NO: 37123 - RNA, 19 nt, Artificial Sequence
  Description of Artificial Sequence: Synthetic oligonucleotide
uuggucuguuggacguuuu

SEQ ID NO: 37124 - RNA, 19 nt, Artificial Sequence
  Description of Artificial Sequence: Synthetic oligonucleotide
uuacaccugcaaggucucu

SEQ ID NO: 37125 - RNA, 19 nt, Artificial Sequence
  Description of Artificial Sequence: Synthetic oligonucleotide
uggaggaauucaaugaugu

SEQ ID NO: 37126 - RNA, 19 nt, Artificial Sequence
  Description of Artificial Sequence: Synthetic oligonucleotide
uguaucuggugacccaucu

SEQ ID NO: 37127 - RNA, 19 nt, Artificial Sequence
  Description of Artificial Sequence: Synthetic oligonucleotide
ucaugggggcagaucugaa

SEQ ID NO: 37128 - RNA, 19 nt, Artificial Sequence
  Description of Artificial Sequence: Synthetic oligonucleotide
acaacauugugaaauguca

SEQ ID NO: 37129 - RNA, 19 nt, Artificial Sequence
  Description of Artificial Sequence: Synthetic oligonucleotide
agaagcuuacagaugacca

SEQ ID NO: 37130 - RNA, 19 nt, Artificial Sequence
  Description of Artificial Sequence: Synthetic oligonucleotide
auguucaguuccuuaucua

SEQ ID NO: 37131 - RNA, 19 nt, Artificial Sequence
  Description of Artificial Sequence: Synthetic oligonucleotide
accaaauucuccgaggucu

SEQ ID NO: 37132 - RNA, 19 nt, Artificial Sequence
  Description of Artificial Sequence: Synthetic oligonucleotide
uaaaguauauacauucagc

SEQ ID NO: 37133 - RNA, 19 nt, Artificial Sequence
  Description of Artificial Sequence: Synthetic oligonucleotide
cugacauaauucacaggga

SEQ ID NO: 37134 - RNA, 19 nt, Artificial Sequence
  Description of Artificial Sequence: Synthetic oligonucleotide
accuaaaaccuaguaaucu

SEQ ID NO: 37135 - RNA, 19 nt, Artificial Sequence
  Description of Artificial Sequence: Synthetic oligonucleotide
uagcugugaaugaagacug

SEQ ID NO: 37136 - RNA, 19 nt, Artificial Sequence
  Description of Artificial Sequence: Synthetic oligonucleotide
gugagcugaagauucugga

SEQ ID NO: 37137 - RNA, 19 nt, Artificial Sequence
  Description of Artificial Sequence: Synthetic oligonucleotide
auuuuggacuggcucggca

SEQ ID NO: 37138 - RNA, 19 nt, Artificial Sequence
  Description of Artificial Sequence: Synthetic oligonucleotide
acacagaugaugaaaugac

SEQ ID NO: 37139 - RNA, 19 nt, Artificial Sequence
  Description of Artificial Sequence: Synthetic oligonucleotide
caggcuacguggccacuag

SEQ ID NO: 37140 - RNA, 19 nt, Artificial Sequence
  Description of Artificial Sequence: Synthetic oligonucleotide
ggugguacagggcuccuga

SEQ ID NO: 37141 - RNA, 19 nt, Artificial Sequence
  Description of Artificial Sequence: Synthetic oligonucleotide
agaucaugcugaacuggau

SEQ ID NO: 37142 - RNA, 19 nt, Artificial Sequence
  Description of Artificial Sequence: Synthetic oligonucleotide
ugcauuacaaccagacagu

SEQ ID NO: 37143 - RNA, 19 nt, Artificial Sequence
  Description of Artificial Sequence: Synthetic oligonucleotide
uugauauuuggucaguggg

SEQ ID NO: 37144 - RNA, 19 nt, Artificial Sequence
  Description of Artificial Sequence: Synthetic oligonucleotide
gaugcauaauggccgagcu

SEQ ID NO: 37145 - RNA, 19 nt, Artificial Sequence
  Description of Artificial Sequence: Synthetic oligonucleotide
uguugacuggaagaacauu

SEQ ID NO: 37146 - RNA, 19 nt, Artificial Sequence
  Description of Artificial Sequence: Synthetic oligonucleotide
uguuuccugguacagacca

SEQ ID NO: 37147 - RNA, 19 nt, Artificial Sequence
  Description of Artificial Sequence: Synthetic oligonucleotide
auauugaucaguugaagcu

SEQ ID NO: 37148 - RNA, 19 nt, Artificial Sequence
  Description of Artificial Sequence: Synthetic oligonucleotide
ucauuuuaagacucguugg

SEQ ID NO: 37149 - RNA, 19 nt, Artificial Sequence
  Description of Artificial Sequence: Synthetic oligonucleotide
gaaccccaggggcugagcu

SEQ ID NO: 37150 - RNA, 19 nt, Artificial Sequence
  Description of Artificial Sequence: Synthetic oligonucleotide
uuuugaagaaaaucuccuc

SEQ ID NO: 37151 - RNA, 19 nt, Artificial Sequence
  Description of Artificial Sequence: Synthetic oligonucleotide
cagagucugcaagaaacua

SEQ ID NO: 37152 - RNA, 19 nt, Artificial Sequence
  Description of Artificial Sequence: Synthetic oligonucleotide
auauucagucuuugacuca

SEQ ID NO: 37153 - RNA, 19 nt, Artificial Sequence
  Description of Artificial Sequence: Synthetic oligonucleotide
agaugccgaagaugaacuu

SEQ ID NO: 37154 - RNA, 19 nt, Artificial Sequence
  Description of Artificial Sequence: Synthetic oligonucleotide
uugcgaauguauuuauugg

SEQ ID NO: 37155 - RNA, 19 nt, Artificial Sequence
  Description of Artificial Sequence: Synthetic oligonucleotide
gugccaauccccuggcugu

SEQ ID NO: 37156 - RNA, 19 nt, Artificial Sequence
  Description of Artificial Sequence: Synthetic oligonucleotide
ucgacuugcuggagaagau

SEQ ID NO: 37157 - RNA, 19 nt, Artificial Sequence
  Description of Artificial Sequence: Synthetic oligonucleotide
ugcuuguauuggacucaga

SEQ ID NO: 37158 - RNA, 19 nt, Artificial Sequence
  Description of Artificial Sequence: Synthetic oligonucleotide
auaagagaauuacagcggc

SEQ ID NO: 37159 - RNA, 19 nt, Artificial Sequence
  Description of Artificial Sequence: Synthetic oligonucleotide
cccaagcccuugcacaugc

SEQ ID NO: 37160 - RNA, 19 nt, Artificial Sequence
  Description of Artificial Sequence: Synthetic oligonucleotide
ccuacuuugcucaguacca

SEQ ID NO: 37161 - RNA, 19 nt, Artificial Sequence
  Description of Artificial Sequence: Synthetic oligonucleotide
acgauccugaugaugaacc

SEQ ID NO: 37162 - RNA, 19 nt, Artificial Sequence
  Description of Artificial Sequence: Synthetic oligonucleotide
caguggccgauccuuauga

SEQ ID NO: 37163 - RNA, 19 nt, Artificial Sequence
  Description of Artificial Sequence: Synthetic oligonucleotide
aucaguccuuugaaagcag

SEQ ID NO: 37164 - RNA, 19 nt, Artificial Sequence
  Description of Artificial Sequence: Synthetic oligonucleotide
gggaccuccuuauagauga

SEQ ID NO: 37165 - RNA, 19 nt, Artificial Sequence
  Description of Artificial Sequence: Synthetic oligonucleotide
aguggaaaagccugaccua

SEQ ID NO: 37166 - RNA, 19 nt, Artificial Sequence
  Description of Artificial Sequence: Synthetic oligonucleotide
augaugaagucaucagcuu

SEQ ID NO: 37167 - RNA, 19 nt, Artificial Sequence
  Description of Artificial Sequence: Synthetic oligonucleotide
uugugccaccaccccuuga

SEQ ID NO: 37168 - RNA, 19 nt, Artificial Sequence
  Description of Artificial Sequence: Synthetic oligonucleotide
accaagaagagauggaguc

SEQ ID NO: 37169 - RNA, 19 nt, Artificial Sequence
  Description of Artificial Sequence: Synthetic oligonucleotide
ccugagcaccugguuucug

SEQ ID NO: 37170 - RNA, 19 nt, Artificial Sequence
  Description of Artificial Sequence: Synthetic oligonucleotide
guucuguugaucccacuuc

SEQ ID NO: 37171 - RNA, 19 nt, Artificial Sequence
  Description of Artificial Sequence: Synthetic oligonucleotide
cacugugaggggaaggccu

SEQ ID NO: 37172 - RNA, 19 nt, Artificial Sequence
  Description of Artificial Sequence: Synthetic oligonucleotide
uuuucacgggaacucucca

SEQ ID NO: 37173 - RNA, 19 nt, Artificial Sequence
  Description of Artificial Sequence: Synthetic oligonucleotide
aaauauuauucaagugccu

SEQ ID NO: 37174 - RNA, 19 nt, Artificial Sequence
  Description of Artificial Sequence: Synthetic oligonucleotide
ucuuguugcagagauuucc

SEQ ID NO: 37175 - RNA, 19 nt, Artificial Sequence
  Description of Artificial Sequence: Synthetic oligonucleotide
cuccaugguggaagggggu

SEQ ID NO: 37176 - RNA, 19 nt, Artificial Sequence
  Description of Artificial Sequence: Synthetic oligonucleotide
ugugcgugcgugugcgugc

SEQ ID NO: 37177 - RNA, 19 nt, Artificial Sequence
  Description of Artificial Sequence: Synthetic oligonucleotide
cguguuagugugugugcau

SEQ ID NO: 37178 - RNA, 19 nt, Artificial Sequence
  Description of Artificial Sequence: Synthetic oligonucleotide
ugugugugucugucuuugu

SEQ ID NO: 37179 - RNA, 19 nt, Artificial Sequence
  Description of Artificial Sequence: Synthetic oligonucleotide
ugggaggguaagacaauau

SEQ ID NO: 37180 - RNA, 19 nt, Artificial Sequence
  Description of Artificial Sequence: Synthetic oligonucleotide
ugaacaaacuaugaucaca

SEQ ID NO: 37181 - RNA, 19 nt, Artificial Sequence
  Description of Artificial Sequence: Synthetic oligonucleotide
agugacuuuacaggagguu

SEQ ID NO: 37182 - RNA, 19 nt, Artificial Sequence
  Description of Artificial Sequence: Synthetic oligonucleotide
uguggaugcuccagggcag

SEQ ID NO: 37183 - RNA, 19 nt, Artificial Sequence
  Description of Artificial Sequence: Synthetic oligonucleotide
gccuccaccuugcucuucu

SEQ ID NO: 37184 - RNA, 19 nt, Artificial Sequence
  Description of Artificial Sequence: Synthetic oligonucleotide
uuucugagaguuggcucag

SEQ ID NO: 37185 - RNA, 19 nt, Artificial Sequence
  Description of Artificial Sequence: Synthetic oligonucleotide
ggcagacaagagcugcugu

SEQ ID NO: 37186 - RNA, 19 nt, Artificial Sequence
  Description of Artificial Sequence: Synthetic oligonucleotide
uccuuuuaggaauauguuc

SEQ ID NO: 37187 - RNA, 19 nt, Artificial Sequence
  Description of Artificial Sequence: Synthetic oligonucleotide
caaugcaaaguaaaaaaau

SEQ ID NO: 37188 - RNA, 19 nt, Artificial Sequence
  Description of Artificial Sequence: Synthetic oligonucleotide
uaugaauuguccccaaucc

SEQ ID NO: 37189 - RNA, 19 nt, Artificial Sequence
  Description of Artificial Sequence: Synthetic oligonucleotide
ccggucaugcuuuugccac

SEQ ID NO: 37190 - RNA, 19 nt, Artificial Sequence
  Description of Artificial Sequence: Synthetic oligonucleotide
cuuuggcuucuccugugac

SEQ ID NO: 37191 - RNA, 19 nt, Artificial Sequence
  Description of Artificial Sequence: Synthetic oligonucleotide
ccccaccuugacggugggg

SEQ ID NO: 37192 - RNA, 19 nt, Artificial Sequence
  Description of Artificial Sequence: Synthetic oligonucleotide
gcguagacuugacaacauc

SEQ ID NO: 37193 - RNA, 19 nt, Artificial Sequence
  Description of Artificial Sequence: Synthetic oligonucleotide
cccacaguggcacggagag

SEQ ID NO: 37194 - RNA, 19 nt, Artificial Sequence
  Description of Artificial Sequence: Synthetic oligonucleotide
gaaggcccauaccuucugg

SEQ ID NO: 37195 - RNA, 19 nt, Artificial Sequence
  Description of Artificial Sequence: Synthetic oligonucleotide
guugcuucagaccugacac

SEQ ID NO: 37196 - RNA, 19 nt, Artificial Sequence
  Description of Artificial Sequence: Synthetic oligonucleotide
ccgucccucagugauacgu

SEQ ID NO: 37197 - RNA, 19 nt, Artificial Sequence
  Description of Artificial Sequence: Synthetic oligonucleotide
uacagccaaaaaggaccaa

SEQ ID NO: 37198 - RNA, 19 nt, Artificial Sequence
  Description of Artificial Sequence: Synthetic oligonucleotide
acuggcuucugugcacuag

SEQ ID NO: 37199 - RNA, 19 nt, Artificial Sequence
  Description of Artificial Sequence: Synthetic oligonucleotide
gccugugauuaacuugcuu

SEQ ID NO: 37200 - RNA, 19 nt, Artificial Sequence
  Description of Artificial Sequence: Synthetic oligonucleotide
uaguaugguucucagaucu

SEQ ID NO: 37201 - RNA, 19 nt, Artificial Sequence
  Description of Artificial Sequence: Synthetic oligonucleotide
uugacaguauauuugaaac

SEQ ID NO: 37202 - RNA, 19 nt, Artificial Sequence
  Description of Artificial Sequence: Synthetic oligonucleotide
cuguaaauauguuugugcc

SEQ ID NO: 37203 - RNA, 19 nt, Artificial Sequence
  Description of Artificial Sequence: Synthetic oligonucleotide
cuuaaaaggagagaagaaa

SEQ ID NO: 37204 - RNA, 19 nt, Artificial Sequence
  Description of Artificial Sequence: Synthetic oligonucleotide
aguguagauaguuaaaaga

SEQ ID NO: 37205 - RNA, 19 nt, Artificial Sequence
  Description of Artificial Sequence: Synthetic oligonucleotide
acugcagcugcugaaguuc

SEQ ID NO: 37206 - RNA, 19 nt, Artificial Sequence
  Description of Artificial Sequence: Synthetic oligonucleotide
cugagccgggcaagucgag

SEQ ID NO: 37207 - RNA, 19 nt, Artificial Sequence
  Description of Artificial Sequence: Synthetic oligonucleotide
gagggcuguuggacagcug

SEQ ID NO: 37208 - RNA, 19 nt, Artificial Sequence
  Description of Artificial Sequence: Synthetic oligonucleotide
gcuugugggcccggaguaa

SEQ ID NO: 37209 - RNA, 19 nt, Artificial Sequence
  Description of Artificial Sequence: Synthetic oligonucleotide
aucaggcagccuucauagg

SEQ ID NO: 37210 - RNA, 19 nt, Artificial Sequence
  Description of Artificial Sequence: Synthetic oligonucleotide
gcggucaugugugcaugug

SEQ ID NO: 37211 - RNA, 19 nt, Artificial Sequence
  Description of Artificial Sequence: Synthetic oligonucleotide
gagcacaugcguauaugug

SEQ ID NO: 37212 - RNA, 19 nt, Artificial Sequence
  Description of Artificial Sequence: Synthetic oligonucleotide
gcgucucucuuucucccuc

SEQ ID NO: 37213 - RNA, 19 nt, Artificial Sequence
  Description of Artificial Sequence: Synthetic oligonucleotide
cacccccagguguugccau

SEQ ID NO: 37214 - RNA, 19 nt, Artificial Sequence
  Description of Artificial Sequence: Synthetic oligonucleotide
uuucucugcuuacccuuca

SEQ ID NO: 37215 - RNA, 19 nt, Artificial Sequence
  Description of Artificial Sequence: Synthetic oligonucleotide
accuuuggugcagagguuu

SEQ ID NO: 37216 - RNA, 19 nt, Artificial Sequence
  Description of Artificial Sequence: Synthetic oligonucleotide
ucuugaauaucugccccag

SEQ ID NO: 37217 - RNA, 19 nt, Artificial Sequence
  Description of Artificial Sequence: Synthetic oligonucleotide
guagucagaagcagguucu

SEQ ID NO: 37218 - RNA, 19 nt, Artificial Sequence
  Description of Artificial Sequence: Synthetic oligonucleotide
uugaugucauguacuuccu

SEQ ID NO: 37219 - RNA, 19 nt, Artificial Sequence
  Description of Artificial Sequence: Synthetic oligonucleotide
uguguacucuuuauuucua

SEQ ID NO: 37220 - RNA, 19 nt, Artificial Sequence
  Description of Artificial Sequence: Synthetic oligonucleotide
agcagagugaggauguguu

SEQ ID NO: 37221 - RNA, 19 nt, Artificial Sequence
  Description of Artificial Sequence: Synthetic oligonucleotide
uuugcacgucuugcuauuu

SEQ ID NO: 37222 - RNA, 19 nt, Artificial Sequence
  Description of Artificial Sequence: Synthetic oligonucleotide
ugagcaugcacagcugcuu

SEQ ID NO: 37223 - RNA, 19 nt, Artificial Sequence
  Description of Artificial Sequence: Synthetic oligonucleotide
uguccugcucucuucagga

SEQ ID NO: 37224 - RNA, 19 nt, Artificial Sequence
  Description of Artificial Sequence: Synthetic oligonucleotide
aggcccuggugucaggcag

SEQ ID NO: 37225 - RNA, 19 nt, Artificial Sequence
  Description of Artificial Sequence: Synthetic oligonucleotide
gguuugccagugaagacuu

SEQ ID NO: 37226 - RNA, 19 nt, Artificial Sequence
  Description of Artificial Sequence: Synthetic oligonucleotide
ucuuggguaguuuagaucc

SEQ ID NO: 37227 - RNA, 19 nt, Artificial Sequence
  Description of Artificial Sequence: Synthetic oligonucleotide
ccaugucaccucagcugau

SEQ ID NO: 37228 - RNA, 19 nt, Artificial Sequence
  Description of Artificial Sequence: Synthetic oligonucleotide
uauuauggcaagugauauc

SEQ ID NO: 37229 - RNA, 19 nt, Artificial Sequence
  Description of Artificial Sequence: Synthetic oligonucleotide
caccucucuucagccccua

SEQ ID NO: 37230 - RNA, 19 nt, Artificial Sequence
  Description of Artificial Sequence: Synthetic oligonucleotide
agugcuauucuguguugaa

SEQ ID NO: 37231 - RNA, 19 nt, Artificial Sequence
  Description of Artificial Sequence: Synthetic oligonucleotide
acacaauugauacuucagg

SEQ ID NO: 37232 - RNA, 19 nt, Artificial Sequence
  Description of Artificial Sequence: Synthetic oligonucleotide
gugcuuuugaugugaaaau

SEQ ID NO: 37233 - RNA, 19 nt, Artificial Sequence
  Description of Artificial Sequence: Synthetic oligonucleotide
ucaugaaaagaggaacagg

SEQ ID NO: 37234 - RNA, 19 nt, Artificial Sequence
  Description of Artificial Sequence: Synthetic oligonucleotide
guggauguauagcauuuuu

SEQ ID NO: 37235 - RNA, 19 nt, Artificial Sequence
  Description of Artificial Sequence: Synthetic oligonucleotide
uauucaugccaucuguuuu

SEQ ID NO: 37236 - RNA, 19 nt, Artificial Sequence
  Description of Artificial Sequence: Synthetic oligonucleotide
ucaaccaacuauuuuugag

SEQ ID NO: 37237 - RNA, 19 nt, Artificial Sequence
  Description of Artificial Sequence: Synthetic oligonucleotide
ggaauuaucaugggaaaag

SEQ ID NO: 37238 - RNA, 19 nt, Artificial Sequence
  Description of Artificial Sequence: Synthetic oligonucleotide
gaccagggcuuuucccagg

SEQ ID NO: 37239 - RNA, 19 nt, Artificial Sequence
  Description of Artificial Sequence: Synthetic oligonucleotide
gaauaucccaaacuucgga

SEQ ID NO: 37240 - RNA, 19 nt, Artificial Sequence
  Description of Artificial Sequence: Synthetic oligonucleotide
aaacaaguuauucucuuca

SEQ ID NO: 37241 - RNA, 19 nt, Artificial Sequence
  Description of Artificial Sequence: Synthetic oligonucleotide
acucccaauaacuaaugcu

SEQ ID NO: 37242 - RNA, 19 nt, Artificial Sequence
  Description of Artificial Sequence: Synthetic oligonucleotide
uaagaaaugcugaaaauca

SEQ ID NO: 37243 - RNA, 19 nt, Artificial Sequence
  Description of Artificial Sequence: Synthetic oligonucleotide
aaaguaaaaaauuaaagcc

SEQ ID NO: 37244 - RNA, 19 nt, Artificial Sequence
  Description of Artificial Sequence: Synthetic oligonucleotide
ccauaaggccagaaacucc

SEQ ID NO: 37245 - RNA, 19 nt, Artificial Sequence
  Description of Artificial Sequence: Synthetic oligonucleotide
cuuuugcugucuuucucua

SEQ ID NO: 37246 - RNA, 19 nt, Artificial Sequence
  Description of Artificial Sequence: Synthetic oligonucleotide
aaauaugauuacuuuaaaa

SEQ ID NO: 37247 - RNA, 19 nt, Artificial Sequence
  Description of Artificial Sequence: Synthetic oligonucleotide
auaaaaaaguaacaaggug

SEQ ID NO: 37248 - RNA, 19 nt, Artificial Sequence
  Description of Artificial Sequence: Synthetic oligonucleotide
gucuuuuccacuccuaugg

SEQ ID NO: 37249 - RNA, 19 nt, Artificial Sequence
  Description of Artificial Sequence: Synthetic oligonucleotide
gaaaagggucuucuuggca

SEQ ID NO: 37250 - RNA, 19 nt, Artificial Sequence
  Description of Artificial Sequence: Synthetic oligonucleotide
agcuuaacauugacuucuu

SEQ ID NO: 37251 - RNA, 19 nt, Artificial Sequence
  Description of Artificial Sequence: Synthetic oligonucleotide
ugguuuggggagaaauaaa

SEQ ID NO: 37252 - RNA, 19 nt, Artificial Sequence
  Description of Artificial Sequence: Synthetic oligonucleotide
auuuuguuucagaauuuug

SEQ ID NO: 37253 - RNA, 19 nt, Artificial Sequence
  Description of Artificial Sequence: Synthetic oligonucleotide
guauauuguaggaaucccu

SEQ ID NO: 37254 - RNA, 19 nt, Artificial Sequence
  Description of Artificial Sequence: Synthetic oligonucleotide
uuugagaaugugauuccuu

SEQ ID NO: 37255 - RNA, 19 nt, Artificial Sequence
  Description of Artificial Sequence: Synthetic oligonucleotide
uuugauggggagaaagggc

SEQ ID NO: 37256 - RNA, 19 nt, Artificial Sequence
  Description of Artificial Sequence: Synthetic oligonucleotide
caaauuauuuuaauauuuu

SEQ ID NO: 37257 - RNA, 19 nt, Artificial Sequence
  Description of Artificial Sequence: Synthetic oligonucleotide
uguauuuucaacuuuauaa

SEQ ID NO: 37258 - RNA, 19 nt, Artificial Sequence
  Description of Artificial Sequence: Synthetic oligonucleotide
aagauaaaauauccucagg

SEQ ID NO: 37259 - RNA, 19 nt, Artificial Sequence
  Description of Artificial Sequence: Synthetic oligonucleotide
ggguggagaagugucguuu

SEQ ID NO: 37260 - RNA, 19 nt, Artificial Sequence
  Description of Artificial Sequence: Synthetic oligonucleotide
uucauaacuugcugaauuu

SEQ ID NO: 37261 - RNA, 19 nt, Artificial Sequence
  Description of Artificial Sequence: Synthetic oligonucleotide
ucaggcauuuuguucuaca

SEQ ID NO: 37262 - RNA, 19 nt, Artificial Sequence
  Description of Artificial Sequence: Synthetic oligonucleotide
augaggacucauauauuua

SEQ ID NO: 37263 - RNA, 19 nt, Artificial Sequence
  Description of Artificial Sequence: Synthetic oligonucleotide
aagccuuuuguguaauaag

SEQ ID NO: 37264 - RNA, 19 nt, Artificial Sequence
  Description of Artificial Sequence: Synthetic oligonucleotide
gaaaguauaaagucacuuc

SEQ ID NO: 37265 - RNA, 19 nt, Artificial Sequence
  Description of Artificial Sequence: Synthetic oligonucleotide
ccaguguuggcugugugac

SEQ ID NO: 37266 - RNA, 19 nt, Artificial Sequence
  Description of Artificial Sequence: Synthetic oligonucleotide
cagaaucuuguauuugggc

SEQ ID NO: 37267 - RNA, 19 nt, Artificial Sequence
  Description of Artificial Sequence: Synthetic oligonucleotide
ccaagguguuuccauuucu

SEQ ID NO: 37268 - RNA, 19 nt, Artificial Sequence
  Description of Artificial Sequence: Synthetic oligonucleotide
ucaaucagugcagugauac

SEQ ID NO: 37269 - RNA, 19 nt, Artificial Sequence
  Description of Artificial Sequence: Synthetic oligonucleotide
cauguacuccagagggaca

SEQ ID NO: 37270 - RNA, 19 nt, Artificial Sequence
  Description of Artificial Sequence: Synthetic oligonucleotide
aggguggacccccugaguc

SEQ ID NO: 37271 - RNA, 19 nt, Artificial Sequence
  Description of Artificial Sequence: Synthetic oligonucleotide
caacuggagcaagaaggaa

SEQ ID NO: 37272 - RNA, 19 nt, Artificial Sequence
  Description of Artificial Sequence: Synthetic oligonucleotide
aggaggcagacugauggcg

SEQ ID NO: 37273 - RNA, 19 nt, Artificial Sequence
  Description of Artificial Sequence: Synthetic oligonucleotide
gauucccucucacccggga

SEQ ID NO: 37274 - RNA, 19 nt, Artificial Sequence
  Description of Artificial Sequence: Synthetic oligonucleotide
acucucccccuuucaagga

SEQ ID NO: 37275 - RNA, 19 nt, Artificial Sequence
  Description of Artificial Sequence: Synthetic oligonucleotide
aaagugaaccuuuaaagua

SEQ ID NO: 37276 - RNA, 19 nt, Artificial Sequence
  Description of Artificial Sequence: Synthetic oligonucleotide
aaaggccucaucuccuuua

SEQ ID NO: 37277 - RNA, 19 nt, Artificial Sequence
  Description of Artificial Sequence: Synthetic oligonucleotide
auugcaguucaaauccuca

SEQ ID NO: 37278 - RNA, 19 nt, Artificial Sequence
  Description of Artificial Sequence: Synthetic oligonucleotide
accauccacagcaagauga

SEQ ID NO: 37279 - RNA, 19 nt, Artificial Sequence
  Description of Artificial Sequence: Synthetic oligonucleotide
aauuuuaucagccauguuu

SEQ ID NO: 37280 - RNA, 19 nt, Artificial Sequence
  Description of Artificial Sequence: Synthetic oligonucleotide
ugguuguaaaugcucgugu

SEQ ID NO: 37281 - RNA, 19 nt, Artificial Sequence
  Description of Artificial Sequence: Synthetic oligonucleotide
ugauuuccuacagaaauac

SEQ ID NO: 37282 - RNA, 19 nt, Artificial Sequence
  Description of Artificial Sequence: Synthetic oligonucleotide
cugcucugaauauuuugua

SEQ ID NO: 37283 - RNA, 19 nt, Artificial Sequence
  Description of Artificial Sequence: Synthetic oligonucleotide
aauaaaggucuuugcacau

SEQ ID NO: 37284 - RNA, 19 nt, Artificial Sequence
  Description of Artificial Sequence: Synthetic oligonucleotide
ugugaccacauacguguua

SEQ ID NO: 37285 - RNA, 19 nt, Artificial Sequence
  Description of Artificial Sequence: Synthetic oligonucleotide
aggaggcugcaugcucugg

SEQ ID NO: 37286 - RNA, 19 nt, Artificial Sequence
  Description of Artificial Sequence: Synthetic oligonucleotide
gaagccuggacucuaagcu

SEQ ID NO: 37287 - RNA, 19 nt, Artificial Sequence
  Description of Artificial Sequence: Synthetic oligonucleotide
uggagcucuuggaagagcu

SEQ ID NO: 37288 - RNA, 19 nt, Artificial Sequence
  Description of Artificial Sequence: Synthetic oligonucleotide
ucuucgguuucugagcaua

SEQ ID NO: 37289 - RNA, 19 nt, Artificial Sequence
  Description of Artificial Sequence: Synthetic oligonucleotide
aaugcucccaucuccugau

SEQ ID NO: 37290 - RNA, 19 nt, Artificial Sequence
  Description of Artificial Sequence: Synthetic oligonucleotide
uuucucugaacagaaaaca

SEQ ID NO: 37291 - RNA, 19 nt, Artificial Sequence
  Description of Artificial Sequence: Synthetic oligonucleotide
aaaagagagaaugagggaa

SEQ ID NO: 37292 - RNA, 19 nt, Artificial Sequence
  Description of Artificial Sequence: Synthetic oligonucleotide
aauugcuauuuuauuugua

SEQ ID NO: 37293 - RNA, 19 nt, Artificial Sequence
  Description of Artificial Sequence: Synthetic oligonucleotide
auucaugaacuuggcugua

SEQ ID NO: 37294 - RNA, 19 nt, Artificial Sequence
  Description of Artificial Sequence: Synthetic oligonucleotide
aaucaguuaugccguauag

SEQ ID NO: 37295 - RNA, 19 nt, Artificial Sequence
  Description of Artificial Sequence: Synthetic oligonucleotide
ggaugucagacaauaccac

SEQ ID NO: 37296 - RNA, 19 nt, Artificial Sequence
  Description of Artificial Sequence: Synthetic oligonucleotide
cugguuaaaauaaagccua

SEQ ID NO: 37297 - RNA, 19 nt, Artificial Sequence
  Description of Artificial Sequence: Synthetic oligonucleotide
aagccuauuuuucaaauuu

SEQ ID NO: 37298 - RNA, 19 nt, Artificial Sequence
  Description of Artificial Sequence: Synthetic oligonucleotide
auauuaaccagcuucagca

SEQ ID NO: 37299 - RNA, 19 nt, Artificial Sequence
  Description of Artificial Sequence: Synthetic oligonucleotide
agauuaugcgucugacagg

SEQ ID NO: 37300 - RNA, 19 nt, Artificial Sequence
  Description of Artificial Sequence: Synthetic oligonucleotide
gaacaccccccgcuuaucu

SEQ ID NO: 37301 - RNA, 19 nt, Artificial Sequence
  Description of Artificial Sequence: Synthetic oligonucleotide
ucauuaacaggaugccaag

SEQ ID NO: 37302 - RNA, 19 nt, Artificial Sequence
  Description of Artificial Sequence: Synthetic oligonucleotide
gccaugaggcaagaaacua

SEQ ID NO: 37303 - RNA, 19 nt, Artificial Sequence
  Description of Artificial Sequence: Synthetic oligonucleotide
gugccaauccccuggguaa

SEQ ID NO: 37304 - RNA, 19 nt, Artificial Sequence
  Description of Artificial Sequence: Synthetic oligonucleotide
aguugaccauauauccuca

SEQ ID NO: 37305 - RNA, 19 nt, Artificial Sequence
  Description of Artificial Sequence: Synthetic oligonucleotide
accucauggauauugaauu

SEQ ID NO: 37306 - RNA, 19 nt, Artificial Sequence
  Description of Artificial Sequence: Synthetic oligonucleotide
ugguuaugauauaaauugg

SEQ ID NO: 37307 - RNA, 19 nt, Artificial Sequence
  Description of Artificial Sequence: Synthetic oligonucleotide
gggauuugaagaagaguuu

SEQ ID NO: 37308 - RNA, 19 nt, Artificial Sequence
  Description of Artificial Sequence: Synthetic oligonucleotide
ucuccuuuugaccaaauaa

SEQ ID NO: 37309 - RNA, 19 nt, Artificial Sequence
  Description of Artificial Sequence: Synthetic oligonucleotide
auaaaguaccauuaguuga

SEQ ID NO: 37310 - RNA, 19 nt, Artificial Sequence
  Description of Artificial Sequence: Synthetic oligonucleotide
cagagucucugucgacuug

SEQ ID NO: 37311 - RNA, 19 nt, Artificial Sequence
  Description of Artificial Sequence: Synthetic oligonucleotide
gcuggagaagaugcuugua

SEQ ID NO: 37312 - RNA, 19 nt, Artificial Sequence
  Description of Artificial Sequence: Synthetic oligonucleotide
auuggacucagauaagaga

SEQ ID NO: 37313 - RNA, 19 nt, Artificial Sequence
  Description of Artificial Sequence: Synthetic oligonucleotide
aauuacagcggcccaagcc

SEQ ID NO: 37314 - RNA, 19 nt, Artificial Sequence
  Description of Artificial Sequence: Synthetic oligonucleotide
ccuugcacaugccuacuuu

SEQ ID NO: 37315 - RNA, 19 nt, Artificial Sequence
  Description of Artificial Sequence: Synthetic oligonucleotide
ugcucaguaccacgauccu

SEQ ID NO: 37316 - RNA, 19 nt, Artificial Sequence
  Description of Artificial Sequence: Synthetic oligonucleotide
ugaugaugaaccaguggcc

SEQ ID NO: 37317 - RNA, 19 nt, Artificial Sequence
  Description of Artificial Sequence: Synthetic oligonucleotide
cgauccuuaugaucagucc

SEQ ID NO: 37318 - RNA, 19 nt, Artificial Sequence
  Description of Artificial Sequence: Synthetic oligonucleotide
cuuugaaagcagggaccuc

SEQ ID NO: 37319 - RNA, 19 nt, Artificial Sequence
  Description of Artificial Sequence: Synthetic oligonucleotide
ccuuauagaugaguggaaa

SEQ ID NO: 37320 - RNA, 19 nt, Artificial Sequence
  Description of Artificial Sequence: Synthetic oligonucleotide
aagccugaccuaugaugaa

SEQ ID NO: 37321 - RNA, 19 nt, Artificial Sequence
  Description of Artificial Sequence: Synthetic oligonucleotide
agucaucagcuuugugcca

SEQ ID NO: 37322 - RNA, 19 nt, Artificial Sequence
  Description of Artificial Sequence: Synthetic oligonucleotide
accaccccuugaccaagaa

SEQ ID NO: 37323 - RNA, 19 nt, Artificial Sequence
  Description of Artificial Sequence: Synthetic oligonucleotide
agagauggaguccugagca

SEQ ID NO: 37324 - RNA, 19 nt, Artificial Sequence
  Description of Artificial Sequence: Synthetic oligonucleotide
accugguuucuguucuguu

SEQ ID NO: 37325 - RNA, 19 nt, Artificial Sequence
  Description of Artificial Sequence: Synthetic oligonucleotide
ugaucccacuucacuguga

SEQ ID NO: 37326 - RNA, 19 nt, Artificial Sequence
  Description of Artificial Sequence: Synthetic oligonucleotide
aggggaaggccuuuucacg

SEQ ID NO: 37327 - RNA, 19 nt, Artificial Sequence
  Description of Artificial Sequence: Synthetic oligonucleotide
gggaaccucuccaaauauu

SEQ ID NO: 37328 - RNA, 19 nt, Artificial Sequence
  Description of Artificial Sequence: Synthetic oligonucleotide
uauucaagugccucuuguu

SEQ ID NO: 37329 - RNA, 19 nt, Artificial Sequence
  Description of Artificial Sequence: Synthetic oligonucleotide
ugcagagauuuccuccaug

SEQ ID NO: 37330 - RNA, 19 nt, Artificial Sequence
  Description of Artificial Sequence: Synthetic oligonucleotide
gguggaagggggugugcgu

SEQ ID NO: 37331 - RNA, 19 nt, Artificial Sequence
  Description of Artificial Sequence: Synthetic oligonucleotide
ugcgugugcgugcguguua

SEQ ID NO: 37332 - RNA, 19 nt, Artificial Sequence
  Description of Artificial Sequence: Synthetic oligonucleotide
agugugugugcaugugugu

SEQ ID NO: 37333 - RNA, 19 nt, Artificial Sequence
  Description of Artificial Sequence: Synthetic oligonucleotide
ugucugucuuugugggagg

SEQ ID NO: 37334 - RNA, 19 nt, Artificial Sequence
  Description of Artificial Sequence: Synthetic oligonucleotide
gguaagacaauaugaacaa

SEQ ID NO: 37335 - RNA, 19 nt, Artificial Sequence
  Description of Artificial Sequence: Synthetic oligonucleotide
aacuaugaucacagugacu

SEQ ID NO: 37336 - RNA, 19 nt, Artificial Sequence
  Description of Artificial Sequence: Synthetic oligonucleotide
uuuacaggagguuguggau

SEQ ID NO: 37337 - RNA, 19 nt, Artificial Sequence
  Description of Artificial Sequence: Synthetic oligonucleotide
ugcuccagggcagccucca

SEQ ID NO: 37338 - RNA, 19 nt, Artificial Sequence
  Description of Artificial Sequence: Synthetic oligonucleotide
accuugcucuucuuucuga

SEQ ID NO: 37339 - RNA, 19 nt, Artificial Sequence
  Description of Artificial Sequence: Synthetic oligonucleotide
agaguuggcucaggcagac

SEQ ID NO: 37340 - RNA, 19 nt, Artificial Sequence
  Description of Artificial Sequence: Synthetic oligonucleotide
caagagcugcuguccuuuu

SEQ ID NO: 37341 - RNA, 19 nt, Artificial Sequence
  Description of Artificial Sequence: Synthetic oligonucleotide
uaggaauauguucaaugca

SEQ ID NO: 37342 - RNA, 19 nt, Artificial Sequence
  Description of Artificial Sequence: Synthetic oligonucleotide
aaaguaaaaaaauaugaau

SEQ ID NO: 37343 - RNA, 19 nt, Artificial Sequence
  Description of Artificial Sequence: Synthetic oligonucleotide
uuguccccaaucccgguca

SEQ ID NO: 37344 - RNA, 19 nt, Artificial Sequence
  Description of Artificial Sequence: Synthetic oligonucleotide
augcuuuugccacuuuggc

SEQ ID NO: 37345 - RNA, 19 nt, Artificial Sequence
  Description of Artificial Sequence: Synthetic oligonucleotide
cuucuccugugaccccacc

SEQ ID NO: 37346 - RNA, 19 nt, Artificial Sequence
  Description of Artificial Sequence: Synthetic oligonucleotide
cuugacgguggggcguaga

SEQ ID NO: 37347 - RNA, 19 nt, Artificial Sequence
  Description of Artificial Sequence: Synthetic oligonucleotide
acuugacaacaucccacag

SEQ ID NO: 37348 - RNA, 19 nt, Artificial Sequence
  Description of Artificial Sequence: Synthetic oligonucleotide
guggcacggagagaaggcc

SEQ ID NO: 37349 - RNA, 19 nt, Artificial Sequence
  Description of Artificial Sequence: Synthetic oligonucleotide
ccauaccuucugguugcuu

SEQ ID NO: 37350 - RNA, 19 nt, Artificial Sequence
  Description of Artificial Sequence: Synthetic oligonucleotide
ucagaccugacaccguccc

SEQ ID NO: 37351 - RNA, 19 nt, Artificial Sequence
  Description of Artificial Sequence: Synthetic oligonucleotide
cucagugauacguacagcc

SEQ ID NO: 37352 - RNA, 19 nt, Artificial Sequence
  Description of Artificial Sequence: Synthetic oligonucleotide
caaaaaggaccaacuggcu

SEQ ID NO: 37353 - RNA, 19 nt, Artificial Sequence
  Description of Artificial Sequence: Synthetic oligonucleotide
uucugugcacuagccugug

SEQ ID NO: 37354 - RNA, 19 nt, Artificial Sequence
  Description of Artificial Sequence: Synthetic oligonucleotide
gauuaacuugcuuaguaug

SEQ ID NO: 37355 - RNA, 19 nt, Artificial Sequence
  Description of Artificial Sequence: Synthetic oligonucleotide
gguucucagaucuugacag

SEQ ID NO: 37356 - RNA, 19 nt, Artificial Sequence
  Description of Artificial Sequence: Synthetic oligonucleotide
guauauuugaaacuguaaa

SEQ ID NO: 37357 - RNA, 19 nt, Artificial Sequence
  Description of Artificial Sequence: Synthetic oligonucleotide
auauguuugugccuuaaaa

SEQ ID NO: 37358 - RNA, 19 nt, Artificial Sequence
  Description of Artificial Sequence: Synthetic oligonucleotide
aggagagaagaaaguguag

SEQ ID NO: 37359 - RNA, 19 nt, Artificial Sequence
  Description of Artificial Sequence: Synthetic oligonucleotide
gauaguuaaaagacugcag

SEQ ID NO: 37360 - RNA, 19 nt, Artificial Sequence
  Description of Artificial Sequence: Synthetic oligonucleotide
gcugcugaaguucugagcc

SEQ ID NO: 37361 - RNA, 19 nt, Artificial Sequence
  Description of Artificial Sequence: Synthetic oligonucleotide
cgggcaagucgagagggcu

SEQ ID NO: 37362 - RNA, 19 nt, Artificial Sequence
  Description of Artificial Sequence: Synthetic oligonucleotide
uguuggacagcugcuugug

SEQ ID NO: 37363 - RNA, 19 nt, Artificial Sequence
  Description of Artificial Sequence: Synthetic oligonucleotide
gggcccggaguaaucaggc

SEQ ID NO: 37364 - RNA, 19 nt, Artificial Sequence
  Description of Artificial Sequence: Synthetic oligonucleotide
cagccuucauaggcgguca

SEQ ID NO: 37365 - RNA, 19 nt, Artificial Sequence
  Description of Artificial Sequence: Synthetic oligonucleotide
augugugcaugugagcaca

SEQ ID NO: 37366 - RNA, 19 nt, Artificial Sequence
  Description of Artificial Sequence: Synthetic oligonucleotide
augcguauaugugcgucuc

SEQ ID NO: 37367 - RNA, 19 nt, Artificial Sequence
  Description of Artificial Sequence: Synthetic oligonucleotide
cucuuucucccucaccccc

SEQ ID NO: 37368 - RNA, 19 nt, Artificial Sequence
  Description of Artificial Sequence: Synthetic oligonucleotide
cagguguugccauuucucu

SEQ ID NO: 37369 - RNA, 19 nt, Artificial Sequence
  Description of Artificial Sequence: Synthetic oligonucleotide
ugcuuacccuucaccuuug

SEQ ID NO: 37370 - RNA, 19 nt, Artificial Sequence
  Description of Artificial Sequence: Synthetic oligonucleotide
ggugcagagguuucuugaa

SEQ ID NO: 37371 - RNA, 19 nt, Artificial Sequence
  Description of Artificial Sequence: Synthetic oligonucleotide
auaucugccccaguaguca

SEQ ID NO: 37372 - RNA, 19 nt, Artificial Sequence
  Description of Artificial Sequence: Synthetic oligonucleotide
agaagcagguucuugaugu

SEQ ID NO: 37373 - RNA, 19 nt, Artificial Sequence
  Description of Artificial Sequence: Synthetic oligonucleotide
ucauguacuuccuguguac

SEQ ID NO: 37374 - RNA, 19 nt, Artificial Sequence
  Description of Artificial Sequence: Synthetic oligonucleotide
cucuuuauuucuagcagag

SEQ ID NO: 37375 - RNA, 19 nt, Artificial Sequence
  Description of Artificial Sequence: Synthetic oligonucleotide
gugaggauguguuuugcac

SEQ ID NO: 37376 - RNA, 19 nt, Artificial Sequence
  Description of Artificial Sequence: Synthetic oligonucleotide
cgucuugcuauuugagcau

SEQ ID NO: 37377 - RNA, 19 nt, Artificial Sequence
  Description of Artificial Sequence: Synthetic oligonucleotide
ugcacagcugcuuguccug

SEQ ID NO: 37378 - RNA, 19 nt, Artificial Sequence
  Description of Artificial Sequence: Synthetic oligonucleotide
gcucucuucaggaggcccu

SEQ ID NO: 37379 - RNA, 19 nt, Artificial Sequence
  Description of Artificial Sequence: Synthetic oligonucleotide
uggugucaggcagguuugc

SEQ ID NO: 37380 - RNA, 19 nt, Artificial Sequence
  Description of Artificial Sequence: Synthetic oligonucleotide
ccagugaagacuucuuggg

SEQ ID NO: 37381 - RNA, 19 nt, Artificial Sequence
  Description of Artificial Sequence: Synthetic oligonucleotide
guaguuuagaucccauguc

SEQ ID NO: 37382 - RNA, 19 nt, Artificial Sequence
  Description of Artificial Sequence: Synthetic oligonucleotide
caccucagcugauauuaug

SEQ ID NO: 37383 - RNA, 19 nt, Artificial Sequence
  Description of Artificial Sequence: Synthetic oligonucleotide
ggcaagugauaucaccucu

SEQ ID NO: 37384 - RNA, 19 nt, Artificial Sequence
  Description of Artificial Sequence: Synthetic oligonucleotide
ucuucagccccuagugcua

SEQ ID NO: 37385 - RNA, 19 nt, Artificial Sequence
  Description of Artificial Sequence: Synthetic oligonucleotide
auucuguguugaacacaau

SEQ ID NO: 37386 - RNA, 19 nt, Artificial Sequence
  Description of Artificial Sequence: Synthetic oligonucleotide
uugauacuucaggugcuuu

SEQ ID NO: 37387 - RNA, 19 nt, Artificial Sequence
  Description of Artificial Sequence: Synthetic oligonucleotide
uugaugugaaaaucaugaa

SEQ ID NO: 37388 - RNA, 19 nt, Artificial Sequence
  Description of Artificial Sequence: Synthetic oligonucleotide
aaagaggaacagguggaug

SEQ ID NO: 37389 - RNA, 19 nt, Artificial Sequence
  Description of Artificial Sequence: Synthetic oligonucleotide
guauagcauuuuuauucau

SEQ ID NO: 37390 - RNA, 19 nt, Artificial Sequence
  Description of Artificial Sequence: Synthetic oligonucleotide
ugccaucuguuuucaacca

SEQ ID NO: 37391 - RNA, 19 nt, Artificial Sequence
  Description of Artificial Sequence: Synthetic oligonucleotide
aacuauuuuugaggaauua

SEQ ID NO: 37392 - RNA, 19 nt, Artificial Sequence
  Description of Artificial Sequence: Synthetic oligonucleotide
aucaugggaaaagaccagg

SEQ ID NO: 37393 - RNA, 19 nt, Artificial Sequence
  Description of Artificial Sequence: Synthetic oligonucleotide
ggcuuuucccaggaauauc

SEQ ID NO: 37394 - RNA, 19 nt, Artificial Sequence
  Description of Artificial Sequence: Synthetic oligonucleotide
cccaaacuucggaaacaag

SEQ ID NO: 37395 - RNA, 19 nt, Artificial Sequence
  Description of Artificial Sequence: Synthetic oligonucleotide
guuauucucuucacuccca

SEQ ID NO: 37396 - RNA, 19 nt, Artificial Sequence
  Description of Artificial Sequence: Synthetic oligonucleotide
aauaacuaaugcuaagaaa

SEQ ID NO: 37397 - RNA, 19 nt, Artificial Sequence
  Description of Artificial Sequence: Synthetic oligonucleotide
augcugaaaaucaaaguaa

SEQ ID NO: 37398 - RNA, 19 nt, Artificial Sequence
  Description of Artificial Sequence: Synthetic oligonucleotide
aaaaauuaaagcccauaag

SEQ ID NO: 37399 - RNA, 19 nt, Artificial Sequence
  Description of Artificial Sequence: Synthetic oligonucleotide
ggccagaaacuccuuuugc

SEQ ID NO: 37400 - RNA, 19 nt, Artificial Sequence
  Description of Artificial Sequence: Synthetic oligonucleotide
cugucuuucucuaaauaug

SEQ ID NO: 37401 - RNA, 19 nt, Artificial Sequence
  Description of Artificial Sequence: Synthetic oligonucleotide
gauuacuuuaaaauaaaaa

SEQ ID NO: 37402 - RNA, 19 nt, Artificial Sequence
  Description of Artificial Sequence: Synthetic oligonucleotide
aaguaacaaggugucuuuu

SEQ ID NO: 37403 - RNA, 19 nt, Artificial Sequence
  Description of Artificial Sequence: Synthetic oligonucleotide
uccacuccuauggaaaagg

SEQ ID NO: 37404 - RNA, 19 nt, Artificial Sequence
  Description of Artificial Sequence: Synthetic oligonucleotide
ggucuucuuggcagcuuaa

SEQ ID NO: 37405 - RNA, 19 nt, Artificial Sequence
  Description of Artificial Sequence: Synthetic oligonucleotide
acauugacuucuugguuug

SEQ ID NO: 37406 - RNA, 19 nt, Artificial Sequence
  Description of Artificial Sequence: Synthetic oligonucleotide
ggggagaaauaaauuuugu

SEQ ID NO: 37407 - RNA, 19 nt, Artificial Sequence
  Description of Artificial Sequence: Synthetic oligonucleotide
uuucagaauuuuguauauu

SEQ ID NO: 37408 - RNA, 19 nt, Artificial Sequence
  Description of Artificial Sequence: Synthetic oligonucleotide
uguaggaaucccuuugaga

SEQ ID NO: 37409 - RNA, 19 nt, Artificial Sequence
  Description of Artificial Sequence: Synthetic oligonucleotide
aaugugauuccuuuugaug

SEQ ID NO: 37410 - RNA, 19 nt, Artificial Sequence
  Description of Artificial Sequence: Synthetic oligonucleotide
ggggagaaagggcaaauua

SEQ ID NO: 37411 - RNA, 19 nt, Artificial Sequence
  Description of Artificial Sequence: Synthetic oligonucleotide
auuuuaauauuuuguauuu

SEQ ID NO: 37412 - RNA, 19 nt, Artificial Sequence
  Description of Artificial Sequence: Synthetic oligonucleotide
uucaacuuuauaaagauaa

SEQ ID NO: 37413 - RNA, 19 nt, Artificial Sequence
  Description of Artificial Sequence: Synthetic oligonucleotide
aaauauccucaggggugga

SEQ ID NO: 37414 - RNA, 19 nt, Artificial Sequence
  Description of Artificial Sequence: Synthetic oligonucleotide
agaagugucguuuucauaa

SEQ ID NO: 37415 - RNA, 19 nt, Artificial Sequence
  Description of Artificial Sequence: Synthetic oligonucleotide
acuugcugaauuucaggca

SEQ ID NO: 37416 - RNA, 19 nt, Artificial Sequence
  Description of Artificial Sequence: Synthetic oligonucleotide
auuuuguucuacaugagga

SEQ ID NO: 37417 - RNA, 19 nt, Artificial Sequence
  Description of Artificial Sequence: Synthetic oligonucleotide
acucauauauuuaagccuu

SEQ ID NO: 37418 - RNA, 19 nt, Artificial Sequence
  Description of Artificial Sequence: Synthetic oligonucleotide
uuuguguaauaagaaagua

SEQ ID NO: 37419 - RNA, 19 nt, Artificial Sequence
  Description of Artificial Sequence: Synthetic oligonucleotide
auaaagucacuuccagugu

SEQ ID NO: 37420 - RNA, 19 nt, Artificial Sequence
  Description of Artificial Sequence: Synthetic oligonucleotide
uuggcugugugacagaauc

SEQ ID NO: 37421 - RNA, 19 nt, Artificial Sequence
  Description of Artificial Sequence: Synthetic oligonucleotide
cuuguauuugggccaaggu

SEQ ID NO: 37422 - RNA, 19 nt, Artificial Sequence
  Description of Artificial Sequence: Synthetic oligonucleotide
uguuuccauuucucaauca

SEQ ID NO: 37423 - RNA, 19 nt, Artificial Sequence
  Description of Artificial Sequence: Synthetic oligonucleotide
agugcagugauacauguac

SEQ ID NO: 37424 - RNA, 19 nt, Artificial Sequence
  Description of Artificial Sequence: Synthetic oligonucleotide
cuccagagggacagggugg

SEQ ID NO: 37425 - RNA, 19 nt, Artificial Sequence
  Description of Artificial Sequence: Synthetic oligonucleotide
gacccccugagucaacugg

SEQ ID NO: 37426 - RNA, 19 nt, Artificial Sequence
  Description of Artificial Sequence: Synthetic oligonucleotide
gagcaagaaggaaggaggc

SEQ ID NO: 37427 - RNA, 19 nt, Artificial Sequence
  Description of Artificial Sequence: Synthetic oligonucleotide
cagacugauggcgauuccc

SEQ ID NO: 37428 - RNA, 19 nt, Artificial Sequence
  Description of Artificial Sequence: Synthetic oligonucleotide
cucucacccgggacucucc

SEQ ID NO: 37429 - RNA, 19 nt, Artificial Sequence
  Description of Artificial Sequence: Synthetic oligonucleotide
ccccuuucaaggaaaguga

SEQ ID NO: 37430 - RNA, 19 nt, Artificial Sequence
  Description of Artificial Sequence: Synthetic oligonucleotide
aaccuuuaaaguaaaggcc

SEQ ID NO: 37431 - RNA, 19 nt, Artificial Sequence
  Description of Artificial Sequence: Synthetic oligonucleotide
cucaucuccuuuauugcag

SEQ ID NO: 37432 - RNA, 19 nt, Artificial Sequence
  Description of Artificial Sequence: Synthetic oligonucleotide
guucaaauccucaccaucc

SEQ ID NO: 37433 - RNA, 19 nt, Artificial Sequence
  Description of Artificial Sequence: Synthetic oligonucleotide
cacagcaagaugaauuuua

SEQ ID NO: 37434 - RNA, 19 nt, Artificial Sequence
  Description of Artificial Sequence: Synthetic oligonucleotide
aucagccauguuugguugu

SEQ ID NO: 37435 - RNA, 19 nt, Artificial Sequence
  Description of Artificial Sequence: Synthetic oligonucleotide
uaaaugcucgugugauuuc

SEQ ID NO: 37436 - RNA, 19 nt, Artificial Sequence
  Description of Artificial Sequence: Synthetic oligonucleotide
ccuacagaaauacugcucu

SEQ ID NO: 37437 - RNA, 19 nt, Artificial Sequence
  Description of Artificial Sequence: Synthetic oligonucleotide
ugaauauuuuguaauaaag

SEQ ID NO: 37438 - RNA, 19 nt, Artificial Sequence
  Description of Artificial Sequence: Synthetic oligonucleotide
ggucuuugcacaugugacc

SEQ ID NO: 37439 - RNA, 19 nt, Artificial Sequence
  Description of Artificial Sequence: Synthetic oligonucleotide
cacauacguguuaggaggc

SEQ ID NO: 37440 - RNA, 19 nt, Artificial Sequence
  Description of Artificial Sequence: Synthetic oligonucleotide
cugcaugcucuggaagccu

SEQ ID NO: 37441 - RNA, 19 nt, Artificial Sequence
  Description of Artificial Sequence: Synthetic oligonucleotide
uggacucuaagcuggagcu

SEQ ID NO: 37442 - RNA, 19 nt, Artificial Sequence
  Description of Artificial Sequence: Synthetic oligonucleotide
ucuuggaagagcucuucgg

SEQ ID NO: 37443 - RNA, 19 nt, Artificial Sequence
  Description of Artificial Sequence: Synthetic oligonucleotide
guuucugagcauaaugcuc

SEQ ID NO: 37444 - RNA, 19 nt, Artificial Sequence
  Description of Artificial Sequence: Synthetic oligonucleotide
cccaucuccugauuucucu

SEQ ID NO: 37445 - RNA, 19 nt, Artificial Sequence
  Description of Artificial Sequence: Synthetic oligonucleotide
ugaacagaaaacaaaagag

SEQ ID NO: 37446 - RNA, 19 nt, Artificial Sequence
  Description of Artificial Sequence: Synthetic oligonucleotide
gagaaugagggaaauugcu

SEQ ID NO: 37447 - RNA, 19 nt, Artificial Sequence
  Description of Artificial Sequence: Synthetic oligonucleotide
uauuuuauuuguauucaug

SEQ ID NO: 37448 - RNA, 19 nt, Artificial Sequence
  Description of Artificial Sequence: Synthetic oligonucleotide
gaacuuggcuguaaucagu

SEQ ID NO: 37449 - RNA, 19 nt, Artificial Sequence
  Description of Artificial Sequence: Synthetic oligonucleotide
uuaugccguauaggauguc

SEQ ID NO: 37450 - RNA, 19 nt, Artificial Sequence
  Description of Artificial Sequence: Synthetic oligonucleotide
cagacaauaccacugguua

SEQ ID NO: 37451 - RNA, 19 nt, Artificial Sequence
  Description of Artificial Sequence: Synthetic oligonucleotide
aaaauaaagccuauuuuuc

SEQ ID NO: 37452 - RNA, 25 nt, Artificial Sequence
  Description of Artificial Sequence: Synthetic oligonucleotide
ggaaccgcgaccacuggagccuuag

SEQ ID NO: 37453 - RNA, 25 nt, Artificial Sequence
  Description of Artificial Sequence: Synthetic oligonucleotide
gcgggcgcagcagcuggaacgggag

SEQ ID NO: 37454 - RNA, 25 nt, Artificial Sequence
  Description of Artificial Sequence: Synthetic oligonucleotide
guacugcgacgcagcccggagucgg

SEQ ID NO: 37455 - RNA, 25 nt, Artificial Sequence
  Description of Artificial Sequence: Synthetic oligonucleotide
gccuuguaggggcgaaggugcaggg

SEQ ID NO: 37456 - RNA, 25 nt, Artificial Sequence
  Description of Artificial Sequence: Synthetic oligonucleotide
gagaucgcggcgggcgcagucuuga

SEQ ID NO: 37457 - RNA, 25 nt, Artificial Sequence
  Description of Artificial Sequence: Synthetic oligonucleotide
agcgccggagcgcgucccugcccuu

SEQ ID NO: 37458 - RNA, 25 nt, Artificial Sequence
  Description of Artificial Sequence: Synthetic oligonucleotide
uagcggggcuugccccagucgcagg

SEQ ID NO: 37459 - RNA, 25 nt, Artificial Sequence
  Description of Artificial Sequence: Synthetic oligonucleotide
gggcacauccagccgcugcggcuga

SEQ ID NO: 37460 - RNA, 25 nt, Artificial Sequence
  Description of Artificial Sequence: Synthetic oligonucleotide
acagcagccgcgcgcgcgggagucu

SEQ ID NO: 37461 - RNA, 25 nt, Artificial Sequence
  Description of Artificial Sequence: Synthetic oligonucleotide
ugcggggucgcggcagccgcaccug

SEQ ID NO: 37462 - RNA, 25 nt, Artificial Sequence
  Description of Artificial Sequence: Synthetic oligonucleotide
gcgcgggcgaccagcgcaagguccc

SEQ ID NO: 37463 - RNA, 25 nt, Artificial Sequence
  Description of Artificial Sequence: Synthetic oligonucleotide
ccgcccggcugggcgggcagcaagg

SEQ ID NO: 37464 - RNA, 25 nt, Artificial Sequence
  Description of Artificial Sequence: Synthetic oligonucleotide
ggccggggagagggugcgggugcag

SEQ ID NO: 37465 - RNA, 25 nt, Artificial Sequence
  Description of Artificial Sequence: Synthetic oligonucleotide
ggcgggggccccacagggccaccuu

SEQ ID NO: 37466 - RNA, 25 nt, Artificial Sequence
  Description of Artificial Sequence: Synthetic oligonucleotide
ucuugcccggcggcugccgcuggaa

SEQ ID NO: 37467 - RNA, 25 nt, Artificial Sequence
  Description of Artificial Sequence: Synthetic oligonucleotide
aaaugucucaggagaggcccacguu

SEQ ID NO: 37468 - RNA, 25 nt, Artificial Sequence
  Description of Artificial Sequence: Synthetic oligonucleotide
ucuaccggcaggagcugaacaagac

SEQ ID NO: 37469 - RNA, 25 nt, Artificial Sequence
  Description of Artificial Sequence: Synthetic oligonucleotide
caaucugggaggugcccgagcguua

SEQ ID NO: 37470 - RNA, 25 nt, Artificial Sequence
  Description of Artificial Sequence: Synthetic oligonucleotide
accagaaccugucuccagugggcuc

SEQ ID NO: 37471 - RNA, 25 nt, Artificial Sequence
  Description of Artificial Sequence: Synthetic oligonucleotide
cuggcgccuauggcucugugugugc

SEQ ID NO: 37472 - RNA, 25 nt, Artificial Sequence
  Description of Artificial Sequence: Synthetic oligonucleotide
cugcuuuugacacaaaaacgggguu

SEQ ID NO: 37473 - RNA, 25 nt, Artificial Sequence
  Description of Artificial Sequence: Synthetic oligonucleotide
uacguguggcagugaagaagcucuc

SEQ ID NO: 37474 - RNA, 25 nt, Artificial Sequence
  Description of Artificial Sequence: Synthetic oligonucleotide
ccagaccauuucaguccaucauuca

SEQ ID NO: 37475 - RNA, 25 nt, Artificial Sequence
  Description of Artificial Sequence: Synthetic oligonucleotide
augcgaaaagaaccuacagagaacu

SEQ ID NO: 37476 - RNA, 25 nt, Artificial Sequence
  Description of Artificial Sequence: Synthetic oligonucleotide
ugcgguuacuuaaacauaugaaaca

SEQ ID NO: 37477 - RNA, 25 nt, Artificial Sequence
  Description of Artificial Sequence: Synthetic oligonucleotide
augaaaaugugauuggucuguugga

SEQ ID NO: 37478 - RNA, 25 nt, Artificial Sequence
  Description of Artificial Sequence: Synthetic oligonucleotide
acguuuuuacaccugcaaggucucu

SEQ ID NO: 37479 - RNA, 25 nt, Artificial Sequence
  Description of Artificial Sequence: Synthetic oligonucleotide
uggaggaauucaaugauguguaucu

SEQ ID NO: 37480 - RNA, 25 nt, Artificial Sequence
  Description of Artificial Sequence: Synthetic oligonucleotide
uggugacccaucucaugggggcaga

SEQ ID NO: 37481 - RNA, 25 nt, Artificial Sequence
  Description of Artificial Sequence: Synthetic oligonucleotide
aucugaacaacauugugaaauguca

SEQ ID NO: 37482 - RNA, 25 nt, Artificial Sequence
  Description of Artificial Sequence: Synthetic oligonucleotide
agaagcuuacagaugaccauguuca

SEQ ID NO: 37483 - RNA, 25 nt, Artificial Sequence
  Description of Artificial Sequence: Synthetic oligonucleotide
aguuccuuaucuaccaaauucuccg

SEQ ID NO: 37484 - RNA, 25 nt, Artificial Sequence
  Description of Artificial Sequence: Synthetic oligonucleotide
gaggucuaaaguauauacauucagc

SEQ ID NO: 37485 - RNA, 25 nt, Artificial Sequence
  Description of Artificial Sequence: Synthetic oligonucleotide
cugacauaauucacagggaccuaaa

SEQ ID NO: 37486 - RNA, 25 nt, Artificial Sequence
  Description of Artificial Sequence: Synthetic oligonucleotide
aaccuaguaaucuagcugugaauga

SEQ ID NO: 37487 - RNA, 25 nt, Artificial Sequence
  Description of Artificial Sequence: Synthetic oligonucleotide
aagacugugagcugaagauucugga

SEQ ID NO: 37488 - RNA, 25 nt, Artificial Sequence
  Description of Artificial Sequence: Synthetic oligonucleotide
auuuuggacuggcucggcacacaga

SEQ ID NO: 37489 - RNA, 25 nt, Artificial Sequence
  Description of Artificial Sequence: Synthetic oligonucleotide
augaugaaaugacaggcuacguggc

SEQ ID NO: 37490 - RNA, 25 nt, Artificial Sequence
  Description of Artificial Sequence: Synthetic oligonucleotide
ccacuaggugguacagggcuccuga

SEQ ID NO: 37491 - RNA, 25 nt, Artificial Sequence
  Description of Artificial Sequence: Synthetic oligonucleotide
agaucaugcugaacuggaugcauua

SEQ ID NO: 37492 - RNA, 25 nt, Artificial Sequence
  Description of Artificial Sequence: Synthetic oligonucleotide
acaaccagacaguugauauuugguc

SEQ ID NO: 37493 - RNA, 25 nt, Artificial Sequence
  Description of Artificial Sequence: Synthetic oligonucleotide
cagugggaugcauaauggccgagcu

SEQ ID NO: 37494 - RNA, 25 nt, Artificial Sequence
  Description of Artificial Sequence: Synthetic oligonucleotide
uguugacuggaagaacauuguuucc

SEQ ID NO: 37495 - RNA, 25 nt, Artificial Sequence
  Description of Artificial Sequence: Synthetic oligonucleotide
cugguacagaccauauugaucaguu

SEQ ID NO: 37496 - RNA, 25 nt, Artificial Sequence
  Description of Artificial Sequence: Synthetic oligonucleotide
ugaagcucauuuuaagacucguugg

SEQ ID NO: 37497 - RNA, 25 nt, Artificial Sequence
  Description of Artificial Sequence: Synthetic oligonucleotide
gaaccccaggggcugagcuuuugaa

SEQ ID NO: 37498 - RNA, 25 nt, Artificial Sequence
  Description of Artificial Sequence: Synthetic oligonucleotide
agaaaaucuccucagagucugcaag

SEQ ID NO: 37499 - RNA, 25 nt, Artificial Sequence
  Description of Artificial Sequence: Synthetic oligonucleotide
gaaacuauauucagucuuugacuca

SEQ ID NO: 37500 - RNA, 25 nt, Artificial Sequence
  Description of Artificial Sequence: Synthetic oligonucleotide
agaugccgaagaugaacuuugcgaa

SEQ ID NO: 37501 - RNA, 25 nt, Artificial Sequence
  Description of Artificial Sequence: Synthetic oligonucleotide
auguauuuauuggugccaauccccu

SEQ ID NO: 37502 - RNA, 25 nt, Artificial Sequence
  Description of Artificial Sequence: Synthetic oligonucleotide
uggcugucgacuugcuggagaagau

SEQ ID NO: 37503 - RNA, 25 nt, Artificial Sequence
  Description of Artificial Sequence: Synthetic oligonucleotide
ugcuuguauuggacucagauaagag

SEQ ID NO: 37504 - RNA, 25 nt, Artificial Sequence
  Description of Artificial Sequence: Synthetic oligonucleotide
gaauuacagcggcccaagcccuugc

SEQ ID NO: 37505 - RNA, 25 nt, Artificial Sequence
  Description of Artificial Sequence: Synthetic oligonucleotide
cacaugccuacuuugcucaguacca

SEQ ID NO: 37506 - RNA, 25 nt, Artificial Sequence
  Description of Artificial Sequence: Synthetic oligonucleotide
acgauccugaugaugaaccaguggc

SEQ ID NO: 37507 - RNA, 25 nt, Artificial Sequence
  Description of Artificial Sequence: Synthetic oligonucleotide
ccgauccuuaugaucaguccuuuga

SEQ ID NO: 37508 - RNA, 25 nt, Artificial Sequence
  Description of Artificial Sequence: Synthetic oligonucleotide
aaagcagggaccuccuuauagauga

SEQ ID NO: 37509 - RNA, 25 nt, Artificial Sequence
  Description of Artificial Sequence: Synthetic oligonucleotide
aguggaaaagccugaccuaugauga

SEQ ID NO: 37510 - RNA, 25 nt, Artificial Sequence
  Description of Artificial Sequence: Synthetic oligonucleotide
aagucaucagcuuugugccaccacc

SEQ ID NO: 37511 - RNA, 25 nt, Artificial Sequence
  Description of Artificial Sequence: Synthetic oligonucleotide
cccuugaccaagaagagauggaguc

SEQ ID NO: 37512 - RNA, 25 nt, Artificial Sequence
  Description of Artificial Sequence: Synthetic oligonucleotide
ccugagcaccugguuucuguucugu

SEQ ID NO: 37513 - RNA, 25 nt, Artificial Sequence
  Description of Artificial Sequence: Synthetic oligonucleotide
uugaucccacuucacugugagggga

SEQ ID NO: 37514 - RNA, 25 nt, Artificial Sequence
  Description of Artificial Sequence: Synthetic oligonucleotide
aaggccuuuucacgggaacucucca

SEQ ID NO: 37515 - RNA, 25 nt, Artificial Sequence
  Description of Artificial Sequence: Synthetic oligonucleotide
aaauauuauucaagugccucuuguu

SEQ ID NO: 37516 - RNA, 25 nt, Artificial Sequence
  Description of Artificial Sequence: Synthetic oligonucleotide
ugcagagauuuccuccaugguggaa

SEQ ID NO: 37517 - RNA, 25 nt, Artificial Sequence
  Description of Artificial Sequence: Synthetic oligonucleotide
agggggugugcgugcgugugcgugc

SEQ ID NO: 37518 - RNA, 25 nt, Artificial Sequence
  Description of Artificial Sequence: Synthetic oligonucleotide
cguguuagugugugugcaugugugu

SEQ ID NO: 37519 - RNA, 25 nt, Artificial Sequence
  Description of Artificial Sequence: Synthetic oligonucleotide
ugucugucuuugugggaggguaaga

SEQ ID NO: 37520 - RNA, 25 nt, Artificial Sequence
  Description of Artificial Sequence: Synthetic oligonucleotide
acaauaugaacaaacuaugaucaca

SEQ ID NO: 37521 - RNA, 25 nt, Artificial Sequence
  Description of Artificial Sequence: Synthetic oligonucleotide
agugacuuuacaggagguuguggau

SEQ ID NO: 37522 - RNA, 25 nt, Artificial Sequence
  Description of Artificial Sequence: Synthetic oligonucleotide
ugcuccagggcagccuccaccuugc

SEQ ID NO: 37523 - RNA, 25 nt, Artificial Sequence
  Description of Artificial Sequence: Synthetic oligonucleotide
cucuucuuucugagaguuggcucag

SEQ ID NO: 37524 - RNA, 25 nt, Artificial Sequence
  Description of Artificial Sequence: Synthetic oligonucleotide
ggcagacaagagcugcuguccuuuu

SEQ ID NO: 37525 - RNA, 25 nt, Artificial Sequence
  Description of Artificial Sequence: Synthetic oligonucleotide
uaggaauauguucaaugcaaaguaa

SEQ ID NO: 37526 - RNA, 25 nt, Artificial Sequence
  Description of Artificial Sequence: Synthetic oligonucleotide
aaaaaauaugaauuguccccaaucc

SEQ ID NO: 37527 - RNA, 25 nt, Artificial Sequence
  Description of Artificial Sequence: Synthetic oligonucleotide
ccggucaugcuuuugccacuuuggc

SEQ ID NO: 37528 - RNA, 25 nt, Artificial Sequence
  Description of Artificial Sequence: Synthetic oligonucleotide
cuucuccugugaccccaccuugacg

SEQ ID NO: 37529 - RNA, 25 nt, Artificial Sequence
  Description of Artificial Sequence: Synthetic oligonucleotide
gguggggcguagacuugacaacauc

SEQ ID NO: 37530 - RNA, 25 nt, Artificial Sequence
  Description of Artificial Sequence: Synthetic oligonucleotide
cccacaguggcacggagagaaggcc

SEQ ID NO: 37531 - RNA, 25 nt, Artificial Sequence
  Description of Artificial Sequence: Synthetic oligonucleotide
ccauaccuucugguugcuucagacc

SEQ ID NO: 37532 - RNA, 25 nt, Artificial Sequence
  Description of Artificial Sequence: Synthetic oligonucleotide
cugacaccgucccucagugauacgu

SEQ ID NO: 37533 - RNA, 25 nt, Artificial Sequence
  Description of Artificial Sequence: Synthetic oligonucleotide
uacagccaaaaaggaccaacuggcu

SEQ ID NO: 37534 - RNA, 25 nt, Artificial Sequence
  Description of Artificial Sequence: Synthetic oligonucleotide
uucugugcacuagccugugauuaac

SEQ ID NO: 37535 - RNA, 25 nt, Artificial Sequence
  Description of Artificial Sequence: Synthetic oligonucleotide
cuugcuuaguaugguucucagaucu

SEQ ID NO: 37536 - RNA, 25 nt, Artificial Sequence
  Description of Artificial Sequence: Synthetic oligonucleotide
uugacaguauauuugaaacuguaaa

SEQ ID NO: 37537 - RNA, 25 nt, Artificial Sequence
  Description of Artificial Sequence: Synthetic oligonucleotide
auauguuugugccuuaaaaggagag

SEQ ID NO: 37538 - RNA, 25 nt, Artificial Sequence
  Description of Artificial Sequence: Synthetic oligonucleotide
gaagaaaguguagauaguuaaaaga

SEQ ID NO: 37539 - RNA, 25 nt, Artificial Sequence
  Description of Artificial Sequence: Synthetic oligonucleotide
acugcagcugcugaaguucugagcc

SEQ ID NO: 37540 - RNA, 25 nt, Artificial Sequence
  Description of Artificial Sequence: Synthetic oligonucleotide
cgggcaagucgagagggcuguugga

SEQ ID NO: 37541 - RNA, 25 nt, Artificial Sequence
  Description of Artificial Sequence: Synthetic oligonucleotide
acagcugcuugugggcccggaguaa

SEQ ID NO: 37542 - RNA, 25 nt, Artificial Sequence
  Description of Artificial Sequence: Synthetic oligonucleotide
aucaggcagccuucauaggcgguca

SEQ ID NO: 37543 - RNA, 25 nt, Artificial Sequence
  Description of Artificial Sequence: Synthetic oligonucleotide
augugugcaugugagcacaugcgua

SEQ ID NO: 37544 - RNA, 25 nt, Artificial Sequence
  Description of Artificial Sequence: Synthetic oligonucleotide
auaugugcgucucucuuucucccuc

SEQ ID NO: 37545 - RNA, 25 nt, Artificial Sequence
  Description of Artificial Sequence: Synthetic oligonucleotide
cacccccagguguugccauuucucu

SEQ ID NO: 37546 - RNA, 25 nt, Artificial Sequence
  Description of Artificial Sequence: Synthetic oligonucleotide
ugcuuacccuucaccuuuggugcag

SEQ ID NO: 37547 - RNA, 25 nt, Artificial Sequence
  Description of Artificial Sequence: Synthetic oligonucleotide
gagguuucuugaauaucugccccag

SEQ ID NO: 37548 - RNA, 25 nt, Artificial Sequence
  Description of Artificial Sequence: Synthetic oligonucleotide
guagucagaagcagguucuugaugu

SEQ ID NO: 37549 - RNA, 25 nt, Artificial Sequence
  Description of Artificial Sequence: Synthetic oligonucleotide
ucauguacuuccuguguacucuuua

SEQ ID NO: 37550 - RNA, 25 nt, Artificial Sequence
  Description of Artificial Sequence: Synthetic oligonucleotide
auuucuagcagagugaggauguguu

SEQ ID NO: 37551 - RNA, 25 nt, Artificial Sequence
  Description of Artificial Sequence: Synthetic oligonucleotide
uuugcacgucuugcuauuugagcau

SEQ ID NO: 37552 - RNA, 25 nt, Artificial Sequence
  Description of Artificial Sequence: Synthetic oligonucleotide
ugcacagcugcuuguccugcucucu

SEQ ID NO: 37553 - RNA, 25 nt, Artificial Sequence
  Description of Artificial Sequence: Synthetic oligonucleotide
uucaggaggcccuggugucaggcag

SEQ ID NO: 37554 - RNA, 25 nt, Artificial Sequence
  Description of Artificial Sequence: Synthetic oligonucleotide
gguuugccagugaagacuucuuggg

SEQ ID NO: 37555 - RNA, 25 nt, Artificial Sequence
  Description of Artificial Sequence: Synthetic oligonucleotide
guaguuuagaucccaugucaccuca

SEQ ID NO: 37556 - RNA, 25 nt, Artificial Sequence
  Description of Artificial Sequence: Synthetic oligonucleotide
agcugauauuauggcaagugauauc

SEQ ID NO: 37557 - RNA, 25 nt, Artificial Sequence
  Description of Artificial Sequence: Synthetic oligonucleotide
caccucucuucagccccuagugcua

SEQ ID NO: 37558 - RNA, 25 nt, Artificial Sequence
  Description of Artificial Sequence: Synthetic oligonucleotide
auucuguguugaacacaauugauac

SEQ ID NO: 37559 - RNA, 25 nt, Artificial Sequence
  Description of Artificial Sequence: Synthetic oligonucleotide
cuucaggugcuuuugaugugaaaau

SEQ ID NO: 37560 - RNA, 25 nt, Artificial Sequence
  Description of Artificial Sequence: Synthetic oligonucleotide
ucaugaaaagaggaacagguggaug

SEQ ID NO: 37561 - RNA, 25 nt, Artificial Sequence
  Description of Artificial Sequence: Synthetic oligonucleotide
guauagcauuuuuauucaugccauc

SEQ ID NO: 37562 - RNA, 25 nt, Artificial Sequence
  Description of Artificial Sequence: Synthetic oligonucleotide
cuguuuucaaccaacuauuuuugag

SEQ ID NO: 37563 - RNA, 25 nt, Artificial Sequence
  Description of Artificial Sequence: Synthetic oligonucleotide
ggaauuaucaugggaaaagaccagg

SEQ ID NO: 37564 - RNA, 25 nt, Artificial Sequence
  Description of Artificial Sequence: Synthetic oligonucleotide
ggcuuuucccaggaauaucccaaac

SEQ ID NO: 37565 - RNA, 25 nt, Artificial Sequence
  Description of Artificial Sequence: Synthetic oligonucleotide
cuucggaaacaaguuauucucuuca

SEQ ID NO: 37566 - RNA, 25 nt, Artificial Sequence
  Description of Artificial Sequence: Synthetic oligonucleotide
augcugaaaaucaaaguaaaaaauu

SEQ ID NO: 37567 - RNA, 25 nt, Artificial Sequence
  Description of Artificial Sequence: Synthetic oligonucleotide
uaaagcccauaaggccagaaacucc

SEQ ID NO: 37568 - RNA, 25 nt, Artificial Sequence
  Description of Artificial Sequence: Synthetic oligonucleotide
cuuuugcugucuuucucuaaauaug

SEQ ID NO: 37569 - RNA, 25 nt, Artificial Sequence
  Description of Artificial Sequence: Synthetic oligonucleotide
gauuacuuuaaaauaaaaaaguaac

SEQ ID NO: 37570 - RNA, 25 nt, Artificial Sequence
  Description of Artificial Sequence: Synthetic oligonucleotide
caaggugucuuuuccacuccuaugg

SEQ ID NO: 37571 - RNA, 25 nt, Artificial Sequence
  Description of Artificial Sequence: Synthetic oligonucleotide
gaaaagggucuucuuggcagcuuaa

SEQ ID NO: 37572 - RNA, 25 nt, Artificial Sequence
  Description of Artificial Sequence: Synthetic oligonucleotide
acauugacuucuugguuuggggaga

SEQ ID NO: 37573 - RNA, 25 nt, Artificial Sequence
  Description of Artificial Sequence: Synthetic oligonucleotide
aaauaaauuuuguuucagaauuuug

SEQ ID NO: 37574 - RNA, 25 nt, Artificial Sequence
  Description of Artificial Sequence: Synthetic oligonucleotide
guauauuguaggaaucccuuugaga

SEQ ID NO: 37575 - RNA, 25 nt, Artificial Sequence
  Description of Artificial Sequence: Synthetic oligonucleotide
aaugugauuccuuuugauggggaga

SEQ ID NO: 37576 - RNA, 25 nt, Artificial Sequence
  Description of Artificial Sequence: Synthetic oligonucleotide
aaagggcaaauuauuuuaauauuuu

SEQ ID NO: 37577 - RNA, 25 nt, Artificial Sequence
  Description of Artificial Sequence: Synthetic oligonucleotide
uguauuuucaacuuuauaaagauaa

SEQ ID NO: 37578 - RNA, 25 nt, Artificial Sequence
  Description of Artificial Sequence: Synthetic oligonucleotide
aaauauccucagggguggagaagug

SEQ ID NO: 37579 - RNA, 25 nt, Artificial Sequence
  Description of Artificial Sequence: Synthetic oligonucleotide
gucguuuucauaacuugcugaauuu

SEQ ID NO: 37580 - RNA, 25 nt, Artificial Sequence
  Description of Artificial Sequence: Synthetic oligonucleotide
ucaggcauuuuguucuacaugagga

SEQ ID NO: 37581 - RNA, 25 nt, Artificial Sequence
  Description of Artificial Sequence: Synthetic oligonucleotide
acucauauauuuaagccuuuugugu

SEQ ID NO: 37582 - RNA, 25 nt, Artificial Sequence
  Description of Artificial Sequence: Synthetic oligonucleotide
uaauaagaaaguauaaagucacuuc

SEQ ID NO: 37583 - RNA, 25 nt, Artificial Sequence
  Description of Artificial Sequence: Synthetic oligonucleotide
ccaguguuggcugugugacagaauc

SEQ ID NO: 37584 - RNA, 25 nt, Artificial Sequence
  Description of Artificial Sequence: Synthetic oligonucleotide
cuuguauuugggccaagguguuucc

SEQ ID NO: 37585 - RNA, 25 nt, Artificial Sequence
  Description of Artificial Sequence: Synthetic oligonucleotide
cauuucucaaucagugcagugauac

SEQ ID NO: 37586 - RNA, 25 nt, Artificial Sequence
  Description of Artificial Sequence: Synthetic oligonucleotide
cauguacuccagagggacagggugg

SEQ ID NO: 37587 - RNA, 25 nt, Artificial Sequence
  Description of Artificial Sequence: Synthetic oligonucleotide
gacccccugagucaacuggagcaag

SEQ ID NO: 37588 - RNA, 25 nt, Artificial Sequence
  Description of Artificial Sequence: Synthetic oligonucleotide
gaaggaaggaggcagacugauggcg

SEQ ID NO: 37589 - RNA, 25 nt, Artificial Sequence
  Description of Artificial Sequence: Synthetic oligonucleotide
gauucccucucacccgggacucucc

SEQ ID NO: 37590 - RNA, 25 nt, Artificial Sequence
  Description of Artificial Sequence: Synthetic oligonucleotide
ccccuuucaaggaaagugaaccuuu

SEQ ID NO: 37591 - RNA, 25 nt, Artificial Sequence
  Description of Artificial Sequence: Synthetic oligonucleotide
uaaaguaaaggccucaucuccuuua

SEQ ID NO: 37592 - RNA, 25 nt, Artificial Sequence
  Description of Artificial Sequence: Synthetic oligonucleotide
auugcaguucaaauccucaccaucc

SEQ ID NO: 37593 - RNA, 25 nt, Artificial Sequence
  Description of Artificial Sequence: Synthetic oligonucleotide
cacagcaagaugaauuuuaucagcc

SEQ ID NO: 37594 - RNA, 25 nt, Artificial Sequence
  Description of Artificial Sequence: Synthetic oligonucleotide
cauguuugguuguaaaugcucgugu

SEQ ID NO: 37595 - RNA, 25 nt, Artificial Sequence
  Description of Artificial Sequence: Synthetic oligonucleotide
ugauuuccuacagaaauacugcucu

SEQ ID NO: 37596 - RNA, 25 nt, Artificial Sequence
  Description of Artificial Sequence: Synthetic oligonucleotide
ugaauauuuuguaauaaaggucuuu

SEQ ID NO: 37597 - RNA, 25 nt, Artificial Sequence
  Description of Artificial Sequence: Synthetic oligonucleotide
ugcacaugugaccacauacguguua

SEQ ID NO: 37598 - RNA, 25 nt, Artificial Sequence
  Description of Artificial Sequence: Synthetic oligonucleotide
aggaggcugcaugcucuggaagccu

SEQ ID NO: 37599 - RNA, 25 nt, Artificial Sequence
  Description of Artificial Sequence: Synthetic oligonucleotide
uggacucuaagcuggagcucuugga

SEQ ID NO: 37600 - RNA, 25 nt, Artificial Sequence
  Description of Artificial Sequence: Synthetic oligonucleotide
aagagcucuucgguuucugagcaua

SEQ ID NO: 37601 - RNA, 25 nt, Artificial Sequence
  Description of Artificial Sequence: Synthetic oligonucleotide
aaugcucccaucuccugauuucucu

SEQ ID NO: 37602 - RNA, 25 nt, Artificial Sequence
  Description of Artificial Sequence: Synthetic oligonucleotide
ugaacagaaaacaaaagagagaaug

SEQ ID NO: 37603 - RNA, 25 nt, Artificial Sequence
  Description of Artificial Sequence: Synthetic oligonucleotide
gagggaaauugcuauuuuauuugua

SEQ ID NO: 37604 - RNA, 25 nt, Artificial Sequence
  Description of Artificial Sequence: Synthetic oligonucleotide
auucaugaacuuggcuguaaucagu

SEQ ID NO: 37605 - RNA, 25 nt, Artificial Sequence
  Description of Artificial Sequence: Synthetic oligonucleotide
uuaugccguauaggaugucagacaa

SEQ ID NO: 37606 - RNA, 25 nt, Artificial Sequence
  Description of Artificial Sequence: Synthetic oligonucleotide
auaccacugguuaaaauaaagccua

SEQ ID NO: 37607 - RNA, 25 nt, Artificial Sequence
  Description of Artificial Sequence: Synthetic oligonucleotide
aaaauaaagccuauuuuucaaauuu

SEQ ID NO: 37608 - RNA, 25 nt, Artificial Sequence
  Description of Artificial Sequence: Synthetic oligonucleotide
cugguacagaccauauuaaccagcu

SEQ ID NO: 37609 - RNA, 25 nt, Artificial Sequence
  Description of Artificial Sequence: Synthetic oligonucleotide
uucagcagauuaugcgucugacagg

SEQ ID NO: 37610 - RNA, 25 nt, Artificial Sequence
  Description of Artificial Sequence: Synthetic oligonucleotide
gaacaccccccgcuuaucucauuaa

SEQ ID NO: 37611 - RNA, 25 nt, Artificial Sequence
  Description of Artificial Sequence: Synthetic oligonucleotide
acaggaugccaagccaugaggcaag

SEQ ID NO: 37612 - RNA, 25 nt, Artificial Sequence
  Description of Artificial Sequence: Synthetic oligonucleotide
uggguaaguugaccauauauccuca

SEQ ID NO: 37613 - RNA, 25 nt, Artificial Sequence
  Description of Artificial Sequence: Synthetic oligonucleotide
accucauggauauugaauugguuau

SEQ ID NO: 37614 - RNA, 25 nt, Artificial Sequence
  Description of Artificial Sequence: Synthetic oligonucleotide
ugauauaaauuggggauuugaagaa

SEQ ID NO: 37615 - RNA, 25 nt, Artificial Sequence
  Description of Artificial Sequence: Synthetic oligonucleotide
agaguuucuccuuuugaccaaauaa

SEQ ID NO: 37616 - RNA, 25 nt, Artificial Sequence
  Description of Artificial Sequence: Synthetic oligonucleotide
gaccaaauaaaguaccauuaguuga

SEQ ID NO: 37617 - RNA, 25 nt, Artificial Sequence
  Description of Artificial Sequence: Synthetic oligonucleotide
agaaaaucuccucagagucucuguc

SEQ ID NO: 37618 - RNA, 25 nt, Artificial Sequence
  Description of Artificial Sequence: Synthetic oligonucleotide
cgacuugcuggagaagaugcuugua

SEQ ID NO: 37619 - RNA, 25 nt, Artificial Sequence
  Description of Artificial Sequence: Synthetic oligonucleotide
auuggacucagauaagagaauuaca

SEQ ID NO: 37620 - RNA, 25 nt, Artificial Sequence
  Description of Artificial Sequence: Synthetic oligonucleotide
agcggcccaagcccuugcacaugcc

SEQ ID NO: 37621 - RNA, 25 nt, Artificial Sequence
  Description of Artificial Sequence: Synthetic oligonucleotide
cuacuuugcucaguaccacgauccu

SEQ ID NO: 37622 - RNA, 25 nt, Artificial Sequence
  Description of Artificial Sequence: Synthetic oligonucleotide
ugaugaugaaccaguggccgauccu

SEQ ID NO: 37623 - RNA, 25 nt, Artificial Sequence
  Description of Artificial Sequence: Synthetic oligonucleotide
uuaugaucaguccuuugaaagcagg

SEQ ID NO: 37624 - RNA, 25 nt, Artificial Sequence
  Description of Artificial Sequence: Synthetic oligonucleotide
ggaccuccuuauagaugaguggaaa

SEQ ID NO: 37625 - RNA, 25 nt, Artificial Sequence
  Description of Artificial Sequence: Synthetic oligonucleotide
aagccugaccuaugaugaagucauc

SEQ ID NO: 37626 - RNA, 25 nt, Artificial Sequence
  Description of Artificial Sequence: Synthetic oligonucleotide
cagcuuugugccaccaccccuugac

SEQ ID NO: 37627 - RNA, 25 nt, Artificial Sequence
  Description of Artificial Sequence: Synthetic oligonucleotide
ccaagaagagauggaguccugagca

SEQ ID NO: 37628 - RNA, 25 nt, Artificial Sequence
  Description of Artificial Sequence: Synthetic oligonucleotide
accugguuucuguucuguugauccc

SEQ ID NO: 37629 - RNA, 25 nt, Artificial Sequence
  Description of Artificial Sequence: Synthetic oligonucleotide
cacuucacugugaggggaaggccuu

SEQ ID NO: 37630 - RNA, 25 nt, Artificial Sequence
  Description of Artificial Sequence: Synthetic oligonucleotide
uuucacgggaaccucuccaaauauu

SEQ ID NO: 37631 - RNA, 25 nt, Artificial Sequence
  Description of Artificial Sequence: Synthetic oligonucleotide
uauucaagugccucuuguugcagag

SEQ ID NO: 37632 - RNA, 25 nt, Artificial Sequence
  Description of Artificial Sequence: Synthetic oligonucleotide
gauuuccuccaugguggaagggggu

SEQ ID NO: 37633 - RNA, 25 nt, Artificial Sequence
  Description of Artificial Sequence: Synthetic oligonucleotide
ugugcgugcgugugcgugcguguua

SEQ ID NO: 37634 - RNA, 25 nt, Artificial Sequence
  Description of Artificial Sequence: Synthetic oligonucleotide
agugugugugcaugugugugucugu

SEQ ID NO: 37635 - RNA, 25 nt, Artificial Sequence
  Description of Artificial Sequence: Synthetic oligonucleotide
ucuuugugggaggguaagacaauau

SEQ ID NO: 37636 - RNA, 25 nt, Artificial Sequence
  Description of Artificial Sequence: Synthetic oligonucleotide
ugaacaaacuaugaucacagugacu

SEQ ID NO: 37637 - RNA, 25 nt, Artificial Sequence
  Description of Artificial Sequence: Synthetic oligonucleotide
uuuacaggagguuguggaugcucca

SEQ ID NO: 37638 - RNA, 25 nt, Artificial Sequence
  Description of Artificial Sequence: Synthetic oligonucleotide
agggcagccuccaccuugcucuucu

SEQ ID NO: 37639 - RNA, 25 nt, Artificial Sequence
  Description of Artificial Sequence: Synthetic oligonucleotide
uuucugagaguuggcucaggcagac

SEQ ID NO: 37640 - RNA, 25 nt, Artificial Sequence
  Description of Artificial Sequence: Synthetic oligonucleotide
caagagcugcuguccuuuuaggaau

SEQ ID NO: 37641 - RNA, 25 nt, Artificial Sequence
  Description of Artificial Sequence: Synthetic oligonucleotide
uauguucaaugcaaaguaaaaaaau

SEQ ID NO: 37642 - RNA, 25 nt, Artificial Sequence
  Description of Artificial Sequence: Synthetic oligonucleotide
uaugaauuguccccaaucccgguca

SEQ ID NO: 37643 - RNA, 25 nt, Artificial Sequence
  Description of Artificial Sequence: Synthetic oligonucleotide
augcuuuugccacuuuggcuucucc

SEQ ID NO: 37644 - RNA, 25 nt, Artificial Sequence
  Description of Artificial Sequence: Synthetic oligonucleotide
cugugaccccaccuugacggugggg

SEQ ID NO: 37645 - RNA, 25 nt, Artificial Sequence
  Description of Artificial Sequence: Synthetic oligonucleotide
gcguagacuugacaacaucccacag

SEQ ID NO: 37646 - RNA, 25 nt, Artificial Sequence
  Description of Artificial Sequence: Synthetic oligonucleotide
guggcacggagagaaggcccauacc

SEQ ID NO: 37647 - RNA, 25 nt, Artificial Sequence
  Description of Artificial Sequence: Synthetic oligonucleotide
cuucugguugcuucagaccugacac

SEQ ID NO: 37648 - RNA, 25 nt, Artificial Sequence
  Description of Artificial Sequence: Synthetic oligonucleotide
ccgucccucagugauacguacagcc

SEQ ID NO: 37649 - RNA, 25 nt, Artificial Sequence
  Description of Artificial Sequence: Synthetic oligonucleotide
caaaaaggaccaacuggcuucugug

SEQ ID NO: 37650 - RNA, 25 nt, Artificial Sequence
  Description of Artificial Sequence: Synthetic oligonucleotide
gcacuagccugugauuaacuugcuu

SEQ ID NO: 37651 - RNA, 25 nt, Artificial Sequence
  Description of Artificial Sequence: Synthetic oligonucleotide
uaguaugguucucagaucuugacag

SEQ ID NO: 37652 - RNA, 25 nt, Artificial Sequence
  Description of Artificial Sequence: Synthetic oligonucleotide
guauauuugaaacuguaaauauguu

SEQ ID NO: 37653 - RNA, 25 nt, Artificial Sequence
  Description of Artificial Sequence: Synthetic oligonucleotide
uugugccuuaaaaggagagaagaaa

SEQ ID NO: 37654 - RNA, 25 nt, Artificial Sequence
  Description of Artificial Sequence: Synthetic oligonucleotide
aguguagauaguuaaaagacugcag

SEQ ID NO: 37655 - RNA, 25 nt, Artificial Sequence
  Description of Artificial Sequence: Synthetic oligonucleotide
gcugcugaaguucugagccgggcaa

SEQ ID NO: 37656 - RNA, 25 nt, Artificial Sequence
  Description of Artificial Sequence: Synthetic oligonucleotide
agucgagagggcuguuggacagcug

SEQ ID NO: 37657 - RNA, 25 nt, Artificial Sequence
  Description of Artificial Sequence: Synthetic oligonucleotide
gcuugugggcccggaguaaucaggc

SEQ ID NO: 37658 - RNA, 25 nt, Artificial Sequence
  Description of Artificial Sequence: Synthetic oligonucleotide
cagccuucauaggcggucaugugug

SEQ ID NO: 37659 - RNA, 25 nt, Artificial Sequence
  Description of Artificial Sequence: Synthetic oligonucleotide
gcaugugagcacaugcguauaugug

SEQ ID NO: 37660 - RNA, 25 nt, Artificial Sequence
  Description of Artificial Sequence: Synthetic oligonucleotide
gcgucucucuuucucccucaccccc

SEQ ID NO: 37661 - RNA, 25 nt, Artificial Sequence
  Description of Artificial Sequence: Synthetic oligonucleotide
cagguguugccauuucucugcuuac

SEQ ID NO: 37662 - RNA, 25 nt, Artificial Sequence
  Description of Artificial Sequence: Synthetic oligonucleotide
cccuucaccuuuggugcagagguuu

SEQ ID NO: 37663 - RNA, 25 nt, Artificial Sequence
  Description of Artificial Sequence: Synthetic oligonucleotide
ucuugaauaucugccccaguaguca

SEQ ID NO: 37664 - RNA, 25 nt, Artificial Sequence
  Description of Artificial Sequence: Synthetic oligonucleotide
agaagcagguucuugaugucaugua

SEQ ID NO: 37665 - RNA, 25 nt, Artificial Sequence
  Description of Artificial Sequence: Synthetic oligonucleotide
acuuccuguguacucuuuauuucua

SEQ ID NO: 37666 - RNA, 25 nt, Artificial Sequence
  Description of Artificial Sequence: Synthetic oligonucleotide
agcagagugaggauguguuuugcac

SEQ ID NO: 37667 - RNA, 25 nt, Artificial Sequence
  Description of Artificial Sequence: Synthetic oligonucleotide
cgucuugcuauuugagcaugcacag

SEQ ID NO: 37668 - RNA, 25 nt, Artificial Sequence
  Description of Artificial Sequence: Synthetic oligonucleotide
gcugcuuguccugcucucuucagga

SEQ ID NO: 37669 - RNA, 25 nt, Artificial Sequence
  Description of Artificial Sequence: Synthetic oligonucleotide
aggcccuggugucaggcagguuugc

SEQ ID NO: 37670 - RNA, 25 nt, Artificial Sequence
  Description of Artificial Sequence: Synthetic oligonucleotide
ccagugaagacuucuuggguaguuu

SEQ ID NO: 37671 - RNA, 25 nt, Artificial Sequence
  Description of Artificial Sequence: Synthetic oligonucleotide
uagaucccaugucaccucagcugau

SEQ ID NO: 37672 - RNA, 25 nt, Artificial Sequence
  Description of Artificial Sequence: Synthetic oligonucleotide
uauuauggcaagugauaucaccucu

SEQ ID NO: 37673 - RNA, 25 nt, Artificial Sequence
  Description of Artificial Sequence: Synthetic oligonucleotide
ucuucagccccuagugcuauucugu

SEQ ID NO: 37674 - RNA, 25 nt, Artificial Sequence
  Description of Artificial Sequence: Synthetic oligonucleotide
uguugaacacaauugauacuucagg

SEQ ID NO: 37675 - RNA, 25 nt, Artificial Sequence
  Description of Artificial Sequence: Synthetic oligonucleotide
gugcuuuugaugugaaaaucaugaa

SEQ ID NO: 37676 - RNA, 25 nt, Artificial Sequence
  Description of Artificial Sequence: Synthetic oligonucleotide
aaagaggaacagguggauguauagc

SEQ ID NO: 37677 - RNA, 25 nt, Artificial Sequence
  Description of Artificial Sequence: Synthetic oligonucleotide
cauuuuuauucaugccaucuguuuu

SEQ ID NO: 37678 - RNA, 25 nt, Artificial Sequence
  Description of Artificial Sequence: Synthetic oligonucleotide
ucaaccaacuauuuuugaggaauua

SEQ ID NO: 37679 - RNA, 25 nt, Artificial Sequence
  Description of Artificial Sequence: Synthetic oligonucleotide
aucaugggaaaagaccagggcuuuu

SEQ ID NO: 37680 - RNA, 25 nt, Artificial Sequence
  Description of Artificial Sequence: Synthetic oligonucleotide
ucccaggaauaucccaaacuucgga

SEQ ID NO: 37681 - RNA, 25 nt, Artificial Sequence
  Description of Artificial Sequence: Synthetic oligonucleotide
aaacaaguuauucucuucacuccca

SEQ ID NO: 37682 - RNA, 25 nt, Artificial Sequence
  Description of Artificial Sequence: Synthetic oligonucleotide
aauaacuaaugcuaagaaaugcuga

SEQ ID NO: 37683 - RNA, 25 nt, Artificial Sequence
  Description of Artificial Sequence: Synthetic oligonucleotide
aaaaucaaaguaaaaaauuaaagcc

SEQ ID NO: 37684 - RNA, 25 nt, Artificial Sequence
  Description of Artificial Sequence: Synthetic oligonucleotide
ccauaaggccagaaacuccuuuugc

SEQ ID NO: 37685 - RNA, 25 nt, Artificial Sequence
  Description of Artificial Sequence: Synthetic oligonucleotide
cugucuuucucuaaauaugauuacu

SEQ ID NO: 37686 - RNA, 25 nt, Artificial Sequence
  Description of Artificial Sequence: Synthetic oligonucleotide
uuuaaaauaaaaaaguaacaaggug

SEQ ID NO: 37687 - RNA, 25 nt, Artificial Sequence
  Description of Artificial Sequence: Synthetic oligonucleotide
gucuuuuccacuccuauggaaaagg

SEQ ID NO: 37688 - RNA, 25 nt, Artificial Sequence
  Description of Artificial Sequence: Synthetic oligonucleotide
ggucuucuuggcagcuuaacauuga

SEQ ID NO: 37689 - RNA, 25 nt, Artificial Sequence
  Description of Artificial Sequence: Synthetic oligonucleotide
acuucuugguuuggggagaaauaaa

SEQ ID NO: 37690 - RNA, 25 nt, Artificial Sequence
  Description of Artificial Sequence: Synthetic oligonucleotide
auuuuguuucagaauuuuguauauu

SEQ ID NO: 37691 - RNA, 25 nt, Artificial Sequence
  Description of Artificial Sequence: Synthetic oligonucleotide
uguaggaaucccuuugagaauguga

SEQ ID NO: 37692 - RNA, 25 nt, Artificial Sequence
  Description of Artificial Sequence: Synthetic oligonucleotide
auuccuuuugauggggagaaagggc

SEQ ID NO: 37693 - RNA, 25 nt, Artificial Sequence
  Description of Artificial Sequence: Synthetic oligonucleotide
caaauuauuuuaauauuuuguauuu

SEQ ID NO: 37694 - RNA, 25 nt, Artificial Sequence
  Description of Artificial Sequence: Synthetic oligonucleotide
uucaacuuuauaaagauaaaauauc

SEQ ID NO: 37695 - RNA, 25 nt, Artificial Sequence
  Description of Artificial Sequence: Synthetic oligonucleotide
ccucagggguggagaagugucguuu

SEQ ID NO: 37696 - RNA, 25 nt, Artificial Sequence
  Description of Artificial Sequence: Synthetic oligonucleotide
uucauaacuugcugaauuucaggca

SEQ ID NO: 37697 - RNA, 25 nt, Artificial Sequence
  Description of Artificial Sequence: Synthetic oligonucleotide
auuuuguucuacaugaggacucaua

SEQ ID NO: 37698 - RNA, 25 nt, Artificial Sequence
  Description of Artificial Sequence: Synthetic oligonucleotide
auauuuaagccuuuuguguaauaag

SEQ ID NO: 37699 - RNA, 25 nt, Artificial Sequence
  Description of Artificial Sequence: Synthetic oligonucleotide
gaaaguauaaagucacuuccagugu

SEQ ID NO: 37700 - RNA, 25 nt, Artificial Sequence
  Description of Artificial Sequence: Synthetic oligonucleotide
uuggcugugugacagaaucuuguau

SEQ ID NO: 37701 - RNA, 25 nt, Artificial Sequence
  Description of Artificial Sequence: Synthetic oligonucleotide
uuugggccaagguguuuccauuucu

SEQ ID NO: 37702 - RNA, 25 nt, Artificial Sequence
  Description of Artificial Sequence: Synthetic oligonucleotide
ucaaucagugcagugauacauguac

SEQ ID NO: 37703 - RNA, 25 nt, Artificial Sequence
  Description of Artificial Sequence: Synthetic oligonucleotide
cuccagagggacaggguggaccccc

SEQ ID NO: 37704 - RNA, 25 nt, Artificial Sequence
  Description of Artificial Sequence: Synthetic oligonucleotide
cugagucaacuggagcaagaaggaa

SEQ ID NO: 37705 - RNA, 25 nt, Artificial Sequence
  Description of Artificial Sequence: Synthetic oligonucleotide
aggaggcagacugauggcgauuccc

SEQ ID NO: 37706 - RNA, 25 nt, Artificial Sequence
  Description of Artificial Sequence: Synthetic oligonucleotide
cucucacccgggacucucccccuuu

SEQ ID NO: 37707 - RNA, 25 nt, Artificial Sequence
  Description of Artificial Sequence: Synthetic oligonucleotide
ucaaggaaagugaaccuuuaaagua

SEQ ID NO: 37708 - RNA, 25 nt, Artificial Sequence
  Description of Artificial Sequence: Synthetic oligonucleotide
aaaggccucaucuccuuuauugcag

SEQ ID NO: 37709 - RNA, 25 nt, Artificial Sequence
  Description of Artificial Sequence: Synthetic oligonucleotide
guucaaauccucaccauccacagca

SEQ ID NO: 37710 - RNA, 25 nt, Artificial Sequence
  Description of Artificial Sequence: Synthetic oligonucleotide
aagaugaauuuuaucagccauguuu

SEQ ID NO: 37711 - RNA, 25 nt, Artificial Sequence
  Description of Artificial Sequence: Synthetic oligonucleotide
ugguuguaaaugcucgugugauuuc

SEQ ID NO: 37712 - RNA, 25 nt, Artificial Sequence
  Description of Artificial Sequence: Synthetic oligonucleotide
ccuacagaaauacugcucugaauau

SEQ ID NO: 37713 - RNA, 25 nt, Artificial Sequence
  Description of Artificial Sequence: Synthetic oligonucleotide
uuuuguaauaaaggucuuugcacau

SEQ ID NO: 37714 - RNA, 25 nt, Artificial Sequence
  Description of Artificial Sequence: Synthetic oligonucleotide
ugugaccacauacguguuaggaggc

SEQ ID NO: 37715 - RNA, 25 nt, Artificial Sequence
  Description of Artificial Sequence: Synthetic oligonucleotide
cugcaugcucuggaagccuggacuc

SEQ ID NO: 37716 - RNA, 25 nt, Artificial Sequence
  Description of Artificial Sequence: Synthetic oligonucleotide
cuaagcuggagcucuuggaagagcu

SEQ ID NO: 37717 - RNA, 25 nt, Artificial Sequence
  Description of Artificial Sequence: Synthetic oligonucleotide
ucuucgguuucugagcauaaugcuc

SEQ ID NO: 37718 - RNA, 25 nt, Artificial Sequence
  Description of Artificial Sequence: Synthetic oligonucleotide
cccaucuccugauuucucugaacag

SEQ ID NO: 37719 - RNA, 25 nt, Artificial Sequence
  Description of Artificial Sequence: Synthetic oligonucleotide
gaaaacaaaagagagaaugagggaa

SEQ ID NO: 37720 - RNA, 25 nt, Artificial Sequence
  Description of Artificial Sequence: Synthetic oligonucleotide
aauugcuauuuuauuuguauucaug

SEQ ID NO: 37721 - RNA, 25 nt, Artificial Sequence
  Description of Artificial Sequence: Synthetic oligonucleotide
gaacuuggcuguaaucaguuaugcc

SEQ ID NO: 37722 - RNA, 25 nt, Artificial Sequence
  Description of Artificial Sequence: Synthetic oligonucleotide
cguauaggaugucagacaauaccac

SEQ ID NO: 37723 - RNA, 25 nt, Artificial Sequence
  Description of Artificial Sequence: Synthetic oligonucleotide
cugguuaaaauaaagccuauuuuuc

SEQ ID NO: 37724 - DNA, 21 bp, Artificial Sequence
  Description of Artificial Sequence: Synthetic oligonucleotide
  Description of Combined DNA/RNA Molecule: Synthetic oligonucleotide
cuacacaaaucagcgauuutt

SEQ ID NO: 37725 - DNA, 21 bp, Artificial Sequence
  Description of Artificial Sequence: Synthetic oligonucleotide
  Description of Combined DNA/RNA Molecule: Synthetic oligonucleotide
aaaucgcugauuuguguagtt

SEQ ID NO: 37726 - DNA, 25 bp, Artificial Sequence
  Description of Artificial Sequence: Synthetic oligonucleotide
  Description of Combined DNA/RNA Molecule: Synthetic oligonucleotide
cuacacaaaucagcgauuuccaugt

SEQ ID NO: 37727 - RNA, 27 nt, Artificial Sequence
  Description of Artificial Sequence: Synthetic oligonucleotide
acauggaaaucgcugauuuguguaguc

SEQ ID NO: 37728 - RNA, 13 nt, Artificial Sequence
  Description of Artificial Sequence: Synthetic oligonucleotide
cuacacaaaucag

SEQ ID NO: 37729 - DNA, 11 bp, Artificial Sequence
  Description of Artificial Sequence: Synthetic oligonucleotide
  Description of Combined DNA/RNA Molecule: Synthetic oligonucleotide
gauuuccaugt

SEQ ID NO: 37730 - DNA, 21 bp, Artificial Sequence
  Description of Artificial Sequence: Synthetic oligonucleotide
  Description of Combined DNA/RNA Molecule: Synthetic oligonucleotide
ggaucuuauuucuucggagtt

SEQ ID NO: 37731 - DNA, 21 bp, Artificial Sequence
  Description of Artificial Sequence: Synthetic oligonucleotide
  Description of Combined DNA/RNA Molecule: Synthetic oligonucleotide
cuccgaagaaauaagaucctt

SEQ ID NO: 37732 - RNA, 11 nt, Artificial Sequence
  Description of Artificial Sequence: Synthetic oligonucleotide
ggaucuuauuu

SEQ ID NO: 37733 - DNA, 10 bp, Artificial Sequence
  Description of Artificial Sequence: Synthetic oligonucleotide
  Description of Combined DNA/RNA Molecule: Synthetic oligonucleotide
cuucggagtt

SEQ ID NO: 37734 - RNA, 27 nt, Artificial Sequence
  Description of Artificial Sequence: Synthetic oligonucleotide
cauugucuccgaagaaauaagauccuu

SEQ ID NO: 37735 - RNA, 8 nt, Artificial Sequence
  Description of Artificial Sequence: Synthetic oligonucleotide
  modified_base (2): LNA-G
ggaucuua

SEQ ID NO: 37736 - DNA, 17 bp, Artificial Sequence
  Description of Artificial Sequence: Synthetic oligonucleotide
  Description of Combined DNA/RNA Molecule: Synthetic oligonucleotide
uuucuucggagacaatg

SEQ ID NO: 37737 - DNA, 16 bp, Artificial Sequence
  Description of Artificial Sequence: Synthetic oligonucleotide
  Description of Combined DNA/RNA Molecule: Synthetic oligonucleotide
uucuucggagacaatg

SEQ ID NO: 37738 - DNA, 15 bp, Artificial Sequence
  Description of Artificial Sequence: Synthetic oligonucleotide
  Description of Combined DNA/RNA Molecule: Synthetic oligonucleotide
ucuucggagacaatg

SEQ ID NO: 37739 - DNA, 14 bp, Artificial Sequence
  Description of Artificial Sequence: Synthetic oligonucleotide
  Description of Combined DNA/RNA Molecule: Synthetic oligonucleotide
cuucggagacaatg

SEQ ID NO: 37740 - DNA, 13 bp, Artificial Sequence
  Description of Artificial Sequence: Synthetic oligonucleotide
  Description of Combined DNA/RNA Molecule: Synthetic oligonucleotide
uucggagacaatg

SEQ ID NO: 37741 - DNA, 12 bp, Artificial Sequence
  Description of Artificial Sequence: Synthetic oligonucleotide
  Description of Combined DNA/RNA Molecule: Synthetic oligonucleotide
ucggagacaatg

SEQ ID NO: 37742 - DNA, 11 bp, Artificial Sequence
  Description of Artificial Sequence: Synthetic oligonucleotide
  Description of Combined DNA/RNA Molecule: Synthetic oligonucleotide
cggagacaatg

SEQ ID NO: 37743 - RNA, 9 nt, Artificial Sequence
  Description of Artificial Sequence: Synthetic oligonucleotide
  modified_base (2): LNA-G
ggaucuuau

SEQ ID NO: 37744 - RNA, 10 nt, Artificial Sequence
  Description of Artificial Sequence: Synthetic oligonucleotide
  modified_base (2): LNA-G
ggaucuuauu

SEQ ID NO: 37745 - RNA, 11 nt, Artificial Sequence
  Description of Artificial Sequence: Synthetic oligonucleotide
  modified_base (2): LNA-G
ggaucuuauuu

SEQ ID NO: 37746 - RNA, 12 nt, Artificial Sequence
  Description of Artificial Sequence: Synthetic oligonucleotide
  modified_base (2): LNA-G
ggaucuuauuuc

SEQ ID NO: 37747 - RNA, 8 nt, Artificial Sequence
  Description of Artificial Sequence: Synthetic oligonucleotide
  modified_base (3): LNA-A
cuacacaa

SEQ ID NO: 37748 - DNA, 13 bp, Artificial Sequence
  Description of Artificial Sequence: Synthetic oligonucleotide
  Description of Combined DNA/RNA Molecule: Synthetic oligonucleotide
  modified_base (8): LNA-A
aucagcgauuutt

SEQ ID NO: 37749 - DNA, 12 bp, Artificial Sequence
  Description of Artificial Sequence: Synthetic oligonucleotide
  Description of Combined DNA/RNA Molecule: Synthetic oligonucleotide
  modified_base (7): LNA-A
ucagcgauuutt

SEQ ID NO: 37750 - DNA, 11 bp, Artificial Sequence
  Description of Artificial Sequence: Synthetic oligonucleotide
  Description of Combined DNA/RNA Molecule: Synthetic oligonucleotide
  modified_base (6): LNA-A
cagcgauuutt

SEQ ID NO: 37751 - DNA, 10 bp, Artificial Sequence
  Description of Artificial Sequence: Synthetic oligonucleotide
  Description of Combined DNA/RNA Molecule: Synthetic oligonucleotide
  modified_base (5): LNA-A
agcgauuutt

SEQ ID NO: 37752 - DNA, 9 bp, Artificial Sequence
  Description of Artificial Sequence: Synthetic oligonucleotide
  Description of Combined DNA/RNA Molecule: Synthetic oligonucleotide
  modified_base (4): LNA-A
gcgauuutt

SEQ ID NO: 37753 - DNA, 8 bp, Artificial Sequence
  Description of Artificial Sequence: Synthetic oligonucleotide
  Description of Combined DNA/RNA Molecule: Synthetic oligonucleotide
  modified_base (3): LNA-A
cgauuutt

SEQ ID NO: 37754 - DNA, 7 bp, Artificial Sequence
  Description of Artificial Sequence: Synthetic oligonucleotide
  Description of Combined DNA/RNA Molecule: Synthetic oligonucleotide
  modified_base (2): LNA-A
gauuutt

SEQ ID NO: 37755 - RNA, 9 nt, Artificial Sequence
  Description of Artificial Sequence: Synthetic oligonucleotide
  modified_base (3): LNA-A
cuacacaaa

SEQ ID NO: 37756 - RNA, 10 nt, Artificial Sequence
  Description of Artificial Sequence: Synthetic oligonucleotide
  modified_base (3): LNA-A
cuacacaaau

SEQ ID NO: 37757 - RNA, 11 nt, Artificial Sequence
  Description of Artificial Sequence: Synthetic oligonucleotide
  modified_base (3): LNA-A
cuacacaaauc

SEQ ID NO: 37758 - RNA, 12 nt, Artificial Sequence
  Description of Artificial Sequence: Synthetic oligonucleotide
  modified_base (3): LNA-A
cuacacaaauca

SEQ ID NO: 37759 - RNA, 13 nt, Artificial Sequence
  Description of Artificial Sequence: Synthetic oligonucleotide
  modified_base (3): LNA-A
cuacacaaaucag

SEQ ID NO: 37760 - RNA, 14 nt, Artificial Sequence
  Description of Artificial Sequence: Synthetic oligonucleotide
  modified_base (3): LNA-A
cuacacaaaucagc

SEQ ID NO: 37761 - RNA, 13 nt, Artificial Sequence
  Description of Artificial Sequence: Synthetic oligonucleotide
  modified_base (2): LNA-G
ggaucuuauuucu

SEQ ID NO: 37762 - RNA, 14 nt, Artificial Sequence
  Description of Artificial Sequence: Synthetic oligonucleotide
  modified_base (2): LNA-G
ggaucuuauuucuu

SEQ ID NO: 37763 - RNA, 8 nt, Artificial Sequence
  Description of Artificial Sequence: Synthetic oligonucleotide
  modified_base (2): LNA-G
  modified_base (8): LNA-A
ggaucuua

SEQ ID NO: 37764 - RNA, 9 nt, Artificial Sequence
  Description of Artificial Sequence: Synthetic oligonucleotide
  modified_base (2): LNA-G
  modified_base (9): LNA-U
ggaucuuau

SEQ ID NO: 37765 - RNA, 10 nt, Artificial Sequence
  Description of Artificial Sequence: Synthetic oligonucleotide
  modified_base (2): LNA-G
  modified_base (10): LNA-U
ggaucuuauu

SEQ ID NO: 37766 - RNA, 11 nt, Artificial Sequence
  Description of Artificial Sequence: Synthetic oligonucleotide
  modified_base (2): LNA-G
  modified_base (11): LNA-U
ggaucuuauuu

SEQ ID NO: 37767 - RNA, 12 nt, Artificial Sequence
  Description of Artificial Sequence: Synthetic oligonucleotide
  modified_base (2): LNA-G
  modified_base (12): LNA-C
ggaucuuauuuc

SEQ ID NO: 37768 - RNA, 13 nt, Artificial Sequence
  Description of Artificial Sequence: Synthetic oligonucleotide
  modified_base (2): LNA-G
  modified_base (13): LNA-U
ggaucuuauuucu

SEQ ID NO: 37769 - RNA, 14 nt, Artificial Sequence
  Description of Artificial Sequence: Synthetic oligonucleotide
  modified_base (2): LNA-G
  modified_base (14): LNA-U
ggaucuuauuucuu

SEQ ID NO: 37770 - DNA, 13 bp, Artificial Sequence
  Description of Artificial Sequence: Synthetic oligonucleotide
  Description of Combined DNA/RNA Molecule: Synthetic oligonucleotide
  modified_base (8): LNA-G
uuucuucggagtt

SEQ ID NO: 37771 - DNA, 12 bp, Artificial Sequence
  Description of Artificial Sequence: Synthetic oligonucleotide
  Description of Combined DNA/RNA Molecule: Synthetic oligonucleotide
  modified_base (7): LNA-G
uucuucggagtt

SEQ ID NO: 37772 - DNA, 11 bp, Artificial Sequence
  Description of Artificial Sequence: Synthetic oligonucleotide
  Description of Combined DNA/RNA Molecule: Synthetic oligonucleotide
  modified_base (6): LNA-G
ucuucggagtt

SEQ ID NO: 37773 - DNA, 10 bp, Artificial Sequence
  Description of Artificial Sequence: Synthetic oligonucleotide
  Description of Combined DNA/RNA Molecule: Synthetic oligonucleotide
  modified_base (5): LNA-G
cuucggagtt

SEQ ID NO: 37774 - DNA, 9 bp, Artificial Sequence
  Description of Artificial Sequence: Synthetic oligonucleotide
  Description of Combined DNA/RNA Molecule: Synthetic oligonucleotide
  modified_base (4): LNA-G
uucggagtt

SEQ ID NO: 37775 - DNA, 8 bp, Artificial Sequence
  Description of Artificial Sequence: Synthetic oligonucleotide
  Description of Combined DNA/RNA Molecule: Synthetic oligonucleotide
  modified_base (3): LNA-G
ucggagtt

SEQ ID NO: 37776 - DNA, 7 bp, Artificial Sequence
  Description of Artificial Sequence: Synthetic oligonucleotide
  Description of Combined DNA/RNA Molecule: Synthetic oligonucleotide
  modified_base (2): LNA-G
cggagtt

SEQ ID NO: 37777 - DNA, 13 bp, Artificial Sequence
  Description of Artificial Sequence: Synthetic oligonucleotide
  Description of Combined DNA/RNA Molecule: Synthetic oligonucleotide
  modified_base (1): LNA-U
  modified_base (8): LNA-G
uuucuucggagtt

SEQ ID NO: 37778 - DNA, 12 bp, Artificial Sequence
  Description of Artificial Sequence: Synthetic oligonucleotide
  Description of Combined DNA/RNA Molecule: Synthetic oligonucleotide
  modified_base (1): LNA-U
  modified_base (7): LNA-G
uucuucggagtt

SEQ ID NO: 37779 - DNA, 11 bp, Artificial Sequence
  Description of Artificial Sequence: Synthetic oligonucleotide
  Description of Combined DNA/RNA Molecule: Synthetic oligonucleotide
  modified_base (1): LNA-U
  modified_base (6): LNA-G
ucuucggagtt

SEQ ID NO: 37780 - DNA, 10 bp, Artificial Sequence
  Description of Artificial Sequence: Synthetic oligonucleotide
  Description of Combined DNA/RNA Molecule: Synthetic oligonucleotide
  modified_base (1): LNA-C
  modified_base (5): LNA-G
cuucggagtt

SEQ ID NO: 37781 - DNA, 9 bp, Artificial Sequence
  Description of Artificial Sequence: Synthetic oligonucleotide
  Description of Combined DNA/RNA Molecule: Synthetic oligonucleotide
  modified_base (1): LNA-U
  modified_base (4): LNA-G
uucggagtt

SEQ ID NO: 37782 - DNA, 8 bp, Artificial Sequence
  Description of Artificial Sequence: Synthetic oligonucleotide
  Description of Combined DNA/RNA Molecule: Synthetic oligonucleotide
  modified_base (1): LNA-U
  modified_base (3): LNA-G
ucggagtt

SEQ ID NO: 37783 - DNA, 7 bp, Artificial Sequence
  Description of Artificial Sequence: Synthetic oligonucleotide
  Description of Combined DNA/RNA Molecule: Synthetic oligonucleotide
  modified_base (1): LNA-C
  modified_base (2): LNA-G
cggagtt

SEQ ID NO: 37784 - DNA, 21 bp, Artificial Sequence
  Description of Artificial Sequence: Synthetic oligonucleotide
  Description of Combined DNA/RNA Molecule: Synthetic oligonucleotide
  modified_base (2): LNA-G
  modified_base (16): LNA-G
ggaucuuauuucuucggagtt

SEQ ID NO: 37785 - DNA, 25 bp, Artificial Sequence
  Description of Artificial Sequence: Synthetic oligonucleotide
  Description of Combined DNA/RNA Molecule: Synthetic oligonucleotide
ggaucuuauuucuucggagacaatg

SEQ ID NO: 37786 - RNA, 25 nt, Artificial Sequence
  Description of Artificial Sequence: Synthetic oligonucleotide
guauuuugaugaggaguucacggcc

SEQ ID NO: 37787 - RNA, 25 nt, Artificial Sequence
  Description of Artificial Sequence: Synthetic oligonucleotide
ggcccagaugaucaccaucacacca

SEQ ID NO: 37788 - RNA, 25 nt, Artificial Sequence
  Description of Artificial Sequence: Synthetic oligonucleotide
gggaagaaaacuauccugcggguuu

SEQ ID NO: 37789 - RNA, 25 nt, Artificial Sequence
  Description of Artificial Sequence: Synthetic oligonucleotide
guuuuaauuuauuucauccaguuug

SEQ ID NO: 37790 - RNA, 25 nt, Artificial Sequence
  Description of Artificial Sequence: Synthetic oligonucleotide
acguagggaaauguuaaggacuucu

SEQ ID NO: 37791 - RNA, 25 nt, Artificial Sequence
  Description of Artificial Sequence: Synthetic oligonucleotide
ccaggguuuacccagugggacagag

SEQ ID NO: 37792 - RNA, 25 nt, Artificial Sequence
  Description of Artificial Sequence: Synthetic oligonucleotide
agcaagguuuaaauuuguuauugug

SEQ ID NO: 37793 - RNA, 25 nt, Artificial Sequence
  Description of Artificial Sequence: Synthetic oligonucleotide
uguauuauguuguucaaaugcauuu

SEQ ID NO: 37794 - RNA, 25 nt, Artificial Sequence
  Description of Artificial Sequence: Synthetic oligonucleotide
uuuuaaucuuugugacaggaaagcc

SEQ ID NO: 37795 - RNA, 25 nt, Artificial Sequence
  Description of Artificial Sequence: Synthetic oligonucleotide
uuaaucuuugugacaggaaagcccu

SEQ ID NO: 37796 - RNA, 25 nt, Artificial Sequence
  Description of Artificial Sequence: Synthetic oligonucleotide
gcugcuuaugucucccagcauggcc

SEQ ID NO: 37797 - RNA, 25 nt, Artificial Sequence
  Description of Artificial Sequence: Synthetic oligonucleotide
aaguguuucagaagcuucucccuga

SEQ ID NO: 37798 - RNA, 25 nt, Artificial Sequence
  Description of Artificial Sequence: Synthetic oligonucleotide
gaccaucaauaaggaagaagcccuu

SEQ ID NO: 37799 - RNA, 25 nt, Artificial Sequence
  Description of Artificial Sequence: Synthetic oligonucleotide
ccaucaauaaggaagaagcccuuca

SEQ ID NO: 37800 - RNA, 25 nt, Artificial Sequence
  Description of Artificial Sequence: Synthetic oligonucleotide
ucaauaaggaagaagcccuucagcg

SEQ ID NO: 37801 - RNA, 25 nt, Artificial Sequence
  Description of Artificial Sequence: Synthetic oligonucleotide
aauaaggaagaagcccuucagcggc

SEQ ID NO: 37802 - RNA, 25 nt, Artificial Sequence
  Description of Artificial Sequence: Synthetic oligonucleotide
aggaagaagcccuucagcggccagu

SEQ ID NO: 37803 - RNA, 25 nt, Artificial Sequence
  Description of Artificial Sequence: Synthetic oligonucleotide
gcauaacuaaaggugaaaagcuccg

SEQ ID NO: 37804 - RNA, 25 nt, Artificial Sequence
  Description of Artificial Sequence: Synthetic oligonucleotide
cauaacuaaaggugaaaagcuccgg

SEQ ID NO: 37805 - RNA, 25 nt, Artificial Sequence
  Description of Artificial Sequence: Synthetic oligonucleotide
cuacaucacgccagucaacagucug

SEQ ID NO: 37806 - RNA, 25 nt, Artificial Sequence
  Description of Artificial Sequence: Synthetic oligonucleotide
acuggauuuaagcagaguucaaaag

SEQ ID NO: 37807 - RNA, 25 nt, Artificial Sequence
  Description of Artificial Sequence: Synthetic oligonucleotide
cuggauuuaagcagaguucaaaagc

SEQ ID NO: 37808 - RNA, 25 nt, Artificial Sequence
  Description of Artificial Sequence: Synthetic oligonucleotide
gauuuaagcagaguucaaaagcccu

SEQ ID NO: 37809 - RNA, 25 nt, Artificial Sequence
  Description of Artificial Sequence: Synthetic oligonucleotide
auuuaagcagaguucaaaagcccuu

SEQ ID NO: 37810 - RNA, 25 nt, Artificial Sequence
  Description of Artificial Sequence: Synthetic oligonucleotide
uuaagcagaguucaaaagcccuuca

SEQ ID NO: 37811 - RNA, 25 nt, Artificial Sequence
  Description of Artificial Sequence: Synthetic oligonucleotide
uaagcagaguucaaaagcccuucag

SEQ ID NO: 37812 - RNA, 25 nt, Artificial Sequence
  Description of Artificial Sequence: Synthetic oligonucleotide
agcagaguucaaaagcccuucagcg

SEQ ID NO: 37813 - RNA, 25 nt, Artificial Sequence
  Description of Artificial Sequence: Synthetic oligonucleotide
cucagggucugagugaagccgcucg

SEQ ID NO: 37814 - RNA, 25 nt, Artificial Sequence
  Description of Artificial Sequence: Synthetic oligonucleotide
caagcaacuacaucacgccagucaa

SEQ ID NO: 37815 - RNA, 25 nt, Artificial Sequence
  Description of Artificial Sequence: Synthetic oligonucleotide
aucaauggcagcuucuuggugcgug

SEQ ID NO: 37816 - RNA, 25 nt, Artificial Sequence
  Description of Artificial Sequence: Synthetic oligonucleotide
uuccagcccacauuggauucaucag

SEQ ID NO: 37817 - RNA, 25 nt, Artificial Sequence
  Description of Artificial Sequence: Synthetic oligonucleotide
cagcugagaauguggaauaccuaag

SEQ ID NO: 37818 - RNA, 25 nt, Artificial Sequence
  Description of Artificial Sequence: Synthetic oligonucleotide
aacguaucuccuaauuugaggcuca

SEQ ID NO: 37819 - RNA, 25 nt, Artificial Sequence
  Description of Artificial Sequence: Synthetic oligonucleotide
ccuaaaauaauuucucuacaauugg

SEQ ID NO: 37820 - RNA, 25 nt, Artificial Sequence
  Description of Artificial Sequence: Synthetic oligonucleotide
uggaagauucagcuaguuaggagcc

SEQ ID NO: 37821 - RNA, 25 nt, Artificial Sequence
  Description of Artificial Sequence: Synthetic oligonucleotide
uuaaacucuccuagucaauauccac

SEQ ID NO: 37822 - RNA, 25 nt, Artificial Sequence
  Description of Artificial Sequence: Synthetic oligonucleotide
cagccuacaguuauguucagucaca

SEQ ID NO: 37823 - RNA, 25 nt, Artificial Sequence
  Description of Artificial Sequence: Synthetic oligonucleotide
guuauguucagucacacacacauac

SEQ ID NO: 37824 - RNA, 25 nt, Artificial Sequence
  Description of Artificial Sequence: Synthetic oligonucleotide
cacauacaaaauguuccuuuugcuu

SEQ ID NO: 37825 - RNA, 25 nt, Artificial Sequence
  Description of Artificial Sequence: Synthetic oligonucleotide
uccuuuugcuuuuaaaguaauuuuu

SEQ ID NO: 37826 - RNA, 25 nt, Artificial Sequence
  Description of Artificial Sequence: Synthetic oligonucleotide
ugaccugugaagcaacagucaaugg

SEQ ID NO: 37827 - RNA, 25 nt, Artificial Sequence
  Description of Artificial Sequence: Synthetic oligonucleotide
cuaucucacacaucgacaaaccaau

SEQ ID NO: 37828 - RNA, 25 nt, Artificial Sequence
  Description of Artificial Sequence: Synthetic oligonucleotide
uguccucaauuguacugcuaccacu

SEQ ID NO: 37829 - RNA, 25 nt, Artificial Sequence
  Description of Artificial Sequence: Synthetic oligonucleotide
aaaccguagcuggcaagcggucuua

SEQ ID NO: 37830 - RNA, 25 nt, Artificial Sequence
  Description of Artificial Sequence: Synthetic oligonucleotide
uagcuggcaagcggucuuaccggcu

SEQ ID NO: 37831 - RNA, 25 nt, Artificial Sequence
  Description of Artificial Sequence: Synthetic oligonucleotide
uuguaugguuaaaagauggguuacc

SEQ ID NO: 37832 - RNA, 25 nt, Artificial Sequence
  Description of Artificial Sequence: Synthetic oligonucleotide
ugguuaaaagauggguuaccugcga

SEQ ID NO: 37833 - RNA, 25 nt, Artificial Sequence
  Description of Artificial Sequence: Synthetic oligonucleotide
cagggaauuauacaaucuugcugag

SEQ ID NO: 37834 - RNA, 25 nt, Artificial Sequence
  Description of Artificial Sequence: Synthetic oligonucleotide
acaaucuugcugagcauaaaacagu

SEQ ID NO: 37835 - RNA, 25 nt, Artificial Sequence
  Description of Artificial Sequence: Synthetic oligonucleotide
ccaauaaugaagaguccuuuauccu

SEQ ID NO: 37836 - RNA, 25 nt, Artificial Sequence
  Description of Artificial Sequence: Synthetic oligonucleotide
acuuuggauguuccaacgcaaguug

SEQ ID NO: 37837 - RNA, 25 nt, Artificial Sequence
  Description of Artificial Sequence: Synthetic oligonucleotide
aaugcuuccacuaaacugaaaccau

SEQ ID NO: 37838 - RNA, 25 nt, Artificial Sequence
  Description of Artificial Sequence: Synthetic oligonucleotide
gagaaaguuugacuuuguuaaauau

SEQ ID NO: 37839 - RNA, 25 nt, Artificial Sequence
  Description of Artificial Sequence: Synthetic oligonucleotide
aaagaacuacuguauauuaaaaguu

SEQ ID NO: 37840 - RNA, 25 nt, Artificial Sequence
  Description of Artificial Sequence: Synthetic oligonucleotide
uuagaaauacggguuuugacuuaac

SEQ ID NO: 37841 - RNA, 25 nt, Artificial Sequence
  Description of Artificial Sequence: Synthetic oligonucleotide
aacauggguacagcaaacucagcac

SEQ ID NO: 37842 - RNA, 25 nt, Artificial Sequence
  Description of Artificial Sequence: Synthetic oligonucleotide
aaagacacagaagaugcugaccuca

SEQ ID NO: 37843 - RNA, 25 nt, Artificial Sequence
  Description of Artificial Sequence: Synthetic oligonucleotide
uaguagggagguuuauucagaucgc

SEQ ID NO: 37844 - RNA, 25 nt, Artificial Sequence
  Description of Artificial Sequence: Synthetic oligonucleotide
gccuucugcagcaggguucugggau

SEQ ID NO: 37845 - RNA, 25 nt, Artificial Sequence
  Description of Artificial Sequence: Synthetic oligonucleotide
ggucugguacauauuggaaauuaug

SEQ ID NO: 37846 - RNA, 25 nt, Artificial Sequence
  Description of Artificial Sequence: Synthetic oligonucleotide
cuaguccuuccgauggaagcacuag

SEQ ID NO: 37847 - RNA, 25 nt, Artificial Sequence
  Description of Artificial Sequence: Synthetic oligonucleotide
ccagugaauauuguuuuuaugugga

SEQ ID NO: 37848 - RNA, 25 nt, Artificial Sequence
  Description of Artificial Sequence: Synthetic oligonucleotide
augaauucaaguuggaauugguaga

SEQ ID NO: 37849 - RNA, 25 nt, Artificial Sequence
  Description of Artificial Sequence: Synthetic oligonucleotide
caggacacagauuuagacuuggaga

SEQ ID NO: 37850 - RNA, 25 nt, Artificial Sequence
  Description of Artificial Sequence: Synthetic oligonucleotide
cucaaagcacaguuacaguauucca

SEQ ID NO: 37851 - RNA, 25 nt, Artificial Sequence
  Description of Artificial Sequence: Synthetic oligonucleotide
accacugccaccacugaugaauuaa

SEQ ID NO: 37852 - RNA, 25 nt, Artificial Sequence
  Description of Artificial Sequence: Synthetic oligonucleotide
gaaacuacuagugccacaucaucac

SEQ ID NO: 37853 - RNA, 25 nt, Artificial Sequence
  Description of Artificial Sequence: Synthetic oligonucleotide
aagucggacagccucaccaaacaga

SEQ ID NO: 37854 - RNA, 25 nt, Artificial Sequence
  Description of Artificial Sequence: Synthetic oligonucleotide
gaaagcgaaaaauggaacaugaugg

SEQ ID NO: 37855 - RNA, 25 nt, Artificial Sequence
  Description of Artificial Sequence: Synthetic oligonucleotide
cccucugauuuagcauguagacugc

SEQ ID NO: 37856 - RNA, 25 nt, Artificial Sequence
  Description of Artificial Sequence: Synthetic oligonucleotide
ugagcuauuuaaggaucuauuuaug

SEQ ID NO: 37857 - RNA, 25 nt, Artificial Sequence
  Description of Artificial Sequence: Synthetic oligonucleotide
aaaaggugaaaaagcacuauuauca

SEQ ID NO: 37858 - RNA, 25 nt, Artificial Sequence
  Description of Artificial Sequence: Synthetic oligonucleotide
gaaaaagcacuauuaucaguucugc

SEQ ID NO: 37859 - RNA, 25 nt, Artificial Sequence
  Description of Artificial Sequence: Synthetic oligonucleotide
ggcugaaaagaaagauuaaaccuac

SEQ ID NO: 37860 - RNA, 25 nt, Artificial Sequence
  Description of Artificial Sequence: Synthetic oligonucleotide
uaaacccuuauaauaaaauccuucu

SEQ ID NO: 37861 - RNA, 25 nt, Artificial Sequence
  Description of Artificial Sequence: Synthetic oligonucleotide
cauacuauuagccaaugcuguagac

SEQ ID NO: 37862 - RNA, 25 nt, Artificial Sequence
  Description of Artificial Sequence: Synthetic oligonucleotide
gacagaagcauuuugauaggaauag

SEQ ID NO: 37863 - RNA, 25 nt, Artificial Sequence
  Description of Artificial Sequence: Synthetic oligonucleotide
agagcaaauaagauaauggcccuga

SEQ ID NO: 37864 - RNA, 25 nt, Artificial Sequence
  Description of Artificial Sequence: Synthetic oligonucleotide
ccaacauuuuucucuuccucaagca

SEQ ID NO: 37865 - RNA, 25 nt, Artificial Sequence
  Description of Artificial Sequence: Synthetic oligonucleotide
uuaaguaugagaaaaguucagccca

SEQ ID NO: 37866 - RNA, 25 nt, Artificial Sequence
  Description of Artificial Sequence: Synthetic oligonucleotide
caggaauaaagauggcugcugaacc

SEQ ID NO: 37867 - RNA, 25 nt, Artificial Sequence
  Description of Artificial Sequence: Synthetic oligonucleotide
aauuugaaugaccaaguucucuuca

SEQ ID NO: 37868 - RNA, 25 nt, Artificial Sequence
  Description of Artificial Sequence: Synthetic oligonucleotide
auguauaaagauagccagccuagag

SEQ ID NO: 37869 - RNA, 25 nt, Artificial Sequence
  Description of Artificial Sequence: Synthetic oligonucleotide
ggcuguaacuaucucugugaagugu

SEQ ID NO: 37870 - RNA, 25 nt, Artificial Sequence
  Description of Artificial Sequence: Synthetic oligonucleotide
ucugugaagugugagaaaauuucaa

SEQ ID NO: 37871 - RNA, 25 nt, Artificial Sequence
  Description of Artificial Sequence: Synthetic oligonucleotide
ccuuuaaggaaaugaauccuccuga

SEQ ID NO: 37872 - RNA, 25 nt, Artificial Sequence
  Description of Artificial Sequence: Synthetic oligonucleotide
aaggauacaaaaagugacaucauau

SEQ ID NO: 37873 - RNA, 25 nt, Artificial Sequence
  Description of Artificial Sequence: Synthetic oligonucleotide
agaugcaauuugaaucuucaucaua

SEQ ID NO: 37874 - RNA, 25 nt, Artificial Sequence
  Description of Artificial Sequence: Synthetic oligonucleotide
guucaaaacgaagacuagcuauuaa

SEQ ID NO: 37875 - RNA, 25 nt, Artificial Sequence
  Description of Artificial Sequence: Synthetic oligonucleotide
gugaaaccucaucucuacuaaaaau

SEQ ID NO: 37876 - RNA, 25 nt, Artificial Sequence
  Description of Artificial Sequence: Synthetic oligonucleotide
acgaaagagaagcucuaucucgccu

SEQ ID NO: 37877 - RNA, 25 nt, Artificial Sequence
  Description of Artificial Sequence: Synthetic oligonucleotide
cuccacaagcgccuucgguccaguu

SEQ ID NO: 37878 - RNA, 25 nt, Artificial Sequence
  Description of Artificial Sequence: Synthetic oligonucleotide
gagaagauuccaaagauguagccgc

SEQ ID NO: 37879 - RNA, 25 nt, Artificial Sequence
  Description of Artificial Sequence: Synthetic oligonucleotide
aaucuggauucaaugaggagacuug

SEQ ID NO: 37880 - RNA, 25 nt, Artificial Sequence
  Description of Artificial Sequence: Synthetic oligonucleotide
agaacagauuugagaguagugagga

SEQ ID NO: 37881 - RNA, 25 nt, Artificial Sequence
  Description of Artificial Sequence: Synthetic oligonucleotide
ccagagcugugcagaugaguacaaa

SEQ ID NO: 37882 - RNA, 25 nt, Artificial Sequence
  Description of Artificial Sequence: Synthetic oligonucleotide
ccucagauuguuguuguuaaugggc

SEQ ID NO: 37883 - RNA, 25 nt, Artificial Sequence
  Description of Artificial Sequence: Synthetic oligonucleotide
cuauuuuaauuauuuuuaauuuauu

SEQ ID NO: 37884 - RNA, 25 nt, Artificial Sequence
  Description of Artificial Sequence: Synthetic oligonucleotide
uuuaauuuauuaauauuuaaauaug

SEQ ID NO: 37885 - RNA, 25 nt, Artificial Sequence
  Description of Artificial Sequence: Synthetic oligonucleotide
augcaguuugaauauccuuuguuuc

SEQ ID NO: 37886 - RNA, 25 nt, Artificial Sequence
  Description of Artificial Sequence: Synthetic oligonucleotide
caugcugcuggcgucuaaguguuug

SEQ ID NO: 37887 - RNA, 25 nt, Artificial Sequence
  Description of Artificial Sequence: Synthetic oligonucleotide
agaugugcauuucaccugugacaaa

SEQ ID NO: 37888 - RNA, 25 nt, Artificial Sequence
  Description of Artificial Sequence: Synthetic oligonucleotide
ucaaaaccugugccaggcugaauua

SEQ ID NO: 37889 - RNA, 25 nt, Artificial Sequence
  Description of Artificial Sequence: Synthetic oligonucleotide
gaauguggguagucauucuuacaau

SEQ ID NO: 37890 - RNA, 25 nt, Artificial Sequence
  Description of Artificial Sequence: Synthetic oligonucleotide
auguggguagucauucuuacaauug

SEQ ID NO: 37891 - RNA, 25 nt, Artificial Sequence
  Description of Artificial Sequence: Synthetic oligonucleotide
ugaaaaugagcaucagagaguguac

SEQ ID NO: 37892 - RNA, 25 nt, Artificial Sequence
  Description of Artificial Sequence: Synthetic oligonucleotide
uugcuuuucauguagaacucagcag

SEQ ID NO: 37893 - RNA, 25 nt, Artificial Sequence
  Description of Artificial Sequence: Synthetic oligonucleotide
uguauuucuauauuuauuuucagua

SEQ ID NO: 37894 - RNA, 25 nt, Artificial Sequence
  Description of Artificial Sequence: Synthetic oligonucleotide
uuugauuaauguuucuuaaauggaa

SEQ ID NO: 37895 - RNA, 25 nt, Artificial Sequence
  Description of Artificial Sequence: Synthetic oligonucleotide
caacguguauagugccuaaaauugu

SEQ ID NO: 37896 - RNA, 25 nt, Artificial Sequence
  Description of Artificial Sequence: Synthetic oligonucleotide
cauauccuuggcuacuaacaucugg

SEQ ID NO: 37897 - RNA, 25 nt, Artificial Sequence
  Description of Artificial Sequence: Synthetic oligonucleotide
uacuaacaucuggagacugugagcu

SEQ ID NO: 37898 - RNA, 25 nt, Artificial Sequence
  Description of Artificial Sequence: Synthetic oligonucleotide
cauaaguugugugcuuuuuauuaau

SEQ ID NO: 37899 - RNA, 25 nt, Artificial Sequence
  Description of Artificial Sequence: Synthetic oligonucleotide
gcaucauuuuggcucuucuuacauu

SEQ ID NO: 37900 - RNA, 25 nt, Artificial Sequence
  Description of Artificial Sequence: Synthetic oligonucleotide
gcucuucuuacauuuguaaaaaugu

SEQ ID NO: 37901 - RNA, 25 nt, Artificial Sequence
  Description of Artificial Sequence: Synthetic oligonucleotide
agauuaggucaucuuaauucauauu

SEQ ID NO: 37902 - RNA, 25 nt, Artificial Sequence
  Description of Artificial Sequence: Synthetic oligonucleotide
auggaauugaaagaacuaaucauga

SEQ ID NO: 37903 - RNA, 25 nt, Artificial Sequence
  Description of Artificial Sequence: Synthetic oligonucleotide
cacacucauuccuucugcucuuggg

SEQ ID NO: 37904 - RNA, 25 nt, Artificial Sequence
  Description of Artificial Sequence: Synthetic oligonucleotide
uguagagguaaccaguagcuuugag

SEQ ID NO: 37905 - RNA, 25 nt, Artificial Sequence
  Description of Artificial Sequence: Synthetic oligonucleotide
caaccacaugccacguaauauuuca

SEQ ID NO: 37906 - RNA, 25 nt, Artificial Sequence
  Description of Artificial Sequence: Synthetic oligonucleotide
ucggaaacaaguuauucucuucacu

SEQ ID NO: 37907 - RNA, 25 nt, Artificial Sequence
  Description of Artificial Sequence: Synthetic oligonucleotide
acucccaauaacuaaugcuaagaaa

SEQ ID NO: 37908 - RNA, 25 nt, Artificial Sequence
  Description of Artificial Sequence: Synthetic oligonucleotide
aaugcuaagaaaugcugaaaaucaa

SEQ ID NO: 37909 - RNA, 25 nt, Artificial Sequence
  Description of Artificial Sequence: Synthetic oligonucleotide
gucuuucucuaaauaugauuacuuu

SEQ ID NO: 37910 - RNA, 25 nt, Artificial Sequence
  Description of Artificial Sequence: Synthetic oligonucleotide
ugaauuucaggcauuuuguucuaca

SEQ ID NO: 37911 - RNA, 25 nt, Artificial Sequence
  Description of Artificial Sequence: Synthetic oligonucleotide
cgauucccucucacccgggacucuc

SEQ ID NO: 37912 - RNA, 25 nt, Artificial Sequence
  Description of Artificial Sequence: Synthetic oligonucleotide
aggaaagugaaccuuuaaaguaaag

SEQ ID NO: 37913 - RNA, 25 nt, Artificial Sequence
  Description of Artificial Sequence: Synthetic oligonucleotide
gaggcugcaugcucuggaagccugg

SEQ ID NO: 37914 - RNA, 25 nt, Artificial Sequence
  Description of Artificial Sequence: Synthetic oligonucleotide
ucucugaacagaaaacaaaagagag

SEQ ID NO: 37915 - RNA, 25 nt, Artificial Sequence
  Description of Artificial Sequence: Synthetic oligonucleotide
aacuuggcuguaaucaguuaugccg

SEQ ID NO: 37916 - RNA, 25 nt, Artificial Sequence
  Description of Artificial Sequence: Synthetic oligonucleotide
agaagccaaaauuaaaagaagucca

SEQ ID NO: 37917 - RNA, 25 nt, Artificial Sequence
  Description of Artificial Sequence: Synthetic oligonucleotide
auuaaaagaaguccaggugagguua

SEQ ID NO: 37918 - RNA, 25 nt, Artificial Sequence
  Description of Artificial Sequence: Synthetic oligonucleotide
gaauccggauuaucgggaagaggac

SEQ ID NO: 37919 - RNA, 25 nt, Artificial Sequence
  Description of Artificial Sequence: Synthetic oligonucleotide
aaugugacaucaaagcaaguauugu

SEQ ID NO: 37920 - RNA, 25 nt, Artificial Sequence
  Description of Artificial Sequence: Synthetic oligonucleotide
caucaaagcaaguauuguagcacuc

SEQ ID NO: 37921 - RNA, 25 nt, Artificial Sequence
  Description of Artificial Sequence: Synthetic oligonucleotide
agagagagaaaacaaaaccacaaau

SEQ ID NO: 37922 - RNA, 25 nt, Artificial Sequence
  Description of Artificial Sequence: Synthetic oligonucleotide
ucgcuguaguauuuaagcccauaca

SEQ ID NO: 37923 - RNA, 25 nt, Artificial Sequence
  Description of Artificial Sequence: Synthetic oligonucleotide
cgcuguaguauuuaagcccauacag

SEQ ID NO: 37924 - RNA, 25 nt, Artificial Sequence
  Description of Artificial Sequence: Synthetic oligonucleotide
auuuaagcccauacagaaaccuucc

SEQ ID NO: 37925 - RNA, 25 nt, Artificial Sequence
  Description of Artificial Sequence: Synthetic oligonucleotide
auuaaaauaaacaugguauaccuac

SEQ ID NO: 37926 - RNA, 25 nt, Artificial Sequence
  Description of Artificial Sequence: Synthetic oligonucleotide
cuguucugaucggccaguuuucgga

SEQ ID NO: 37927 - RNA, 25 nt, Artificial Sequence
  Description of Artificial Sequence: Synthetic oligonucleotide
aaauaauuugaacuuuggaacaggg

SEQ ID NO: 37928 - RNA, 25 nt, Artificial Sequence
  Description of Artificial Sequence: Synthetic oligonucleotide
ugcgaccuuaauuuaacuuuccagu

SEQ ID NO: 37929 - RNA, 25 nt, Artificial Sequence
  Description of Artificial Sequence: Synthetic oligonucleotide
cugagaaagcuaaaguuugguuuug

SEQ ID NO: 37930 - RNA, 25 nt, Artificial Sequence
  Description of Artificial Sequence: Synthetic oligonucleotide
aguaaagaugcuacuucccacugua

SEQ ID NO: 37931 - RNA, 25 nt, Artificial Sequence
  Description of Artificial Sequence: Synthetic oligonucleotide
cugcuuaauugcugauaccauauga

SEQ ID NO: 37932 - RNA, 25 nt, Artificial Sequence
  Description of Artificial Sequence: Synthetic oligonucleotide
uaccauaugaaugaaacaugggcug

SEQ ID NO: 37933 - RNA, 25 nt, Artificial Sequence
  Description of Artificial Sequence: Synthetic oligonucleotide
aacuuucuuauccaacuuuuucaua

SEQ ID NO: 37934 - RNA, 25 nt, Artificial Sequence
  Description of Artificial Sequence: Synthetic oligonucleotide
ccuugcaugacaucaugaggccgga

SEQ ID NO: 37935 - RNA, 25 nt, Artificial Sequence
  Description of Artificial Sequence: Synthetic oligonucleotide
ugaauuuguauaugacugcauuugu

SEQ ID NO: 37936 - RNA, 25 nt, Artificial Sequence
  Description of Artificial Sequence: Synthetic oligonucleotide
gaauccuaguagaauguuuacuacc

SEQ ID NO: 37937 - RNA, 25 nt, Artificial Sequence
  Description of Artificial Sequence: Synthetic oligonucleotide
gaaagggaagaauuuuuugaugaaa

SEQ ID NO: 37938 - RNA, 25 nt, Artificial Sequence
  Description of Artificial Sequence: Synthetic oligonucleotide
uaucggcaugccagugugugaauuu

SEQ ID NO: 37939 - RNA, 25 nt, Artificial Sequence
  Description of Artificial Sequence: Synthetic oligonucleotide
caccucauaguagagcaauguaugu

SEQ ID NO: 37940 - RNA, 25 nt, Artificial Sequence
  Description of Artificial Sequence: Synthetic oligonucleotide
ccagaauugccaaagcacauauaua

SEQ ID NO: 37941 - RNA, 25 nt, Artificial Sequence
  Description of Artificial Sequence: Synthetic oligonucleotide
uggugaucuggguaauaguuucucc

SEQ ID NO: 37942 - RNA, 25 nt, Artificial Sequence
  Description of Artificial Sequence: Synthetic oligonucleotide
gaucuggguaauaguuucuccaaau

SEQ ID NO: 37943 - RNA, 25 nt, Artificial Sequence
  Description of Artificial Sequence: Synthetic oligonucleotide
ggaugugaugaauacuuccuagaaa

SEQ ID NO: 37944 - RNA, 25 nt, Artificial Sequence
  Description of Artificial Sequence: Synthetic oligonucleotide
cauuuccacagcuacaccauauaug

SEQ ID NO: 37945 - RNA, 25 nt, Artificial Sequence
  Description of Artificial Sequence: Synthetic oligonucleotide
acagcuacaccauauaugaauggag

SEQ ID NO: 37946 - RNA, 25 nt, Artificial Sequence
  Description of Artificial Sequence: Synthetic oligonucleotide
ugcaguucuuacacgagaagaagau

SEQ ID NO: 37947 - RNA, 25 nt, Artificial Sequence
  Description of Artificial Sequence: Synthetic oligonucleotide
acgagaagaagaucauuuacaggga

SEQ ID NO: 37948 - RNA, 25 nt, Artificial Sequence
  Description of Artificial Sequence: Synthetic oligonucleotide
cgagaagaagaucauuuacagggac

SEQ ID NO: 37949 - RNA, 25 nt, Artificial Sequence
  Description of Artificial Sequence: Synthetic oligonucleotide
aagaagaucauuuacagggaccuga

SEQ ID NO: 37950 - RNA, 25 nt, Artificial Sequence
  Description of Artificial Sequence: Synthetic oligonucleotide
agaggaagagguguuugacugcauc

SEQ ID NO: 37951 - RNA, 25 nt, Artificial Sequence
  Description of Artificial Sequence: Synthetic oligonucleotide
gaggaagagguguuugacugcaucg

SEQ ID NO: 37952 - RNA, 25 nt, Artificial Sequence
  Description of Artificial Sequence: Synthetic oligonucleotide
cuacuuugagggcgaguucacaggg

SEQ ID NO: 37953 - RNA, 25 nt, Artificial Sequence
  Description of Artificial Sequence: Synthetic oligonucleotide
agggcaucuccuggcaccucugucc

SEQ ID NO: 37954 - RNA, 25 nt, Artificial Sequence
  Description of Artificial Sequence: Synthetic oligonucleotide
ggagugauaugguuugucuuuuuaa

SEQ ID NO: 37955 - RNA, 25 nt, Artificial Sequence
  Description of Artificial Sequence: Synthetic oligonucleotide
gagugauaugguuugucuuuuuaag

SEQ ID NO: 37956 - RNA, 25 nt, Artificial Sequence
  Description of Artificial Sequence: Synthetic oligonucleotide
ugcaguaaagauccuaaagguuguc

SEQ ID NO: 37957 - RNA, 25 nt, Artificial Sequence
  Description of Artificial Sequence: Synthetic oligonucleotide
aguaaagauccuaaagguugucgac

SEQ ID NO: 37958 - RNA, 25 nt, Artificial Sequence
  Description of Artificial Sequence: Synthetic oligonucleotide
ugacaaaggacaaccuggcaauugu

SEQ ID NO: 37959 - RNA, 25 nt, Artificial Sequence
  Description of Artificial Sequence: Synthetic oligonucleotide
gcaauugugacccaguggugcgagg

SEQ ID NO: 37960 - RNA, 25 nt, Artificial Sequence
  Description of Artificial Sequence: Synthetic oligonucleotide
aacaucauccauagagacaugaaau

SEQ ID NO: 37961 - RNA, 25 nt, Artificial Sequence
  Description of Artificial Sequence: Synthetic oligonucleotide
ugaaauccaacaauauauuucucca

SEQ ID NO: 37962 - RNA, 25 nt, Artificial Sequence
  Description of Artificial Sequence: Synthetic oligonucleotide
aacaauauauuucuccaugaaggcu

SEQ ID NO: 37963 - RNA, 25 nt, Artificial Sequence
  Description of Artificial Sequence: Synthetic oligonucleotide
aacaguaaagucacgcuggaguggu

SEQ ID NO: 37964 - RNA, 25 nt, Artificial Sequence
  Description of Artificial Sequence: Synthetic oligonucleotide
ugugaagaaaguaaaggaagagagg

SEQ ID NO: 37965 - RNA, 25 nt, Artificial Sequence
  Description of Artificial Sequence: Synthetic oligonucleotide
cuuccgagccauccuugcaucgggc

SEQ ID NO: 37966 - RNA, 25 nt, Artificial Sequence
  Description of Artificial Sequence: Synthetic oligonucleotide
aauggagguugaauauccuacugug

SEQ ID NO: 37967 - RNA, 25 nt, Artificial Sequence
  Description of Artificial Sequence: Synthetic oligonucleotide
ggagguugaauauccuacuguguaa

SEQ ID NO: 37968 - RNA, 25 nt, Artificial Sequence
  Description of Artificial Sequence: Synthetic oligonucleotide
auuuugaguuuucccuuguagugua

SEQ ID NO: 37969 - RNA, 25 nt, Artificial Sequence
  Description of Artificial Sequence: Synthetic oligonucleotide
uauccuguuuguucuuuguugauug

SEQ ID NO: 37970 - RNA, 25 nt, Artificial Sequence
  Description of Artificial Sequence: Synthetic oligonucleotide
ccuguuuguucuuuguugauugaaa

SEQ ID NO: 37971 - RNA, 25 nt, Artificial Sequence
  Description of Artificial Sequence: Synthetic oligonucleotide
cucuacagccuucuuuuucuuccau

SEQ ID NO: 37972 - RNA, 25 nt, Artificial Sequence
  Description of Artificial Sequence: Synthetic oligonucleotide
ucuuccauagcuaaucuuccuucua

SEQ ID NO: 37973 - RNA, 25 nt, Artificial Sequence
  Description of Artificial Sequence: Synthetic oligonucleotide
auaaucuuccuguugaaugcuucau

SEQ ID NO: 37974 - RNA, 25 nt, Artificial Sequence
  Description of Artificial Sequence: Synthetic oligonucleotide
uaaucuuccuguugaaugcuucaug

SEQ ID NO: 37975 - RNA, 25 nt, Artificial Sequence
  Description of Artificial Sequence: Synthetic oligonucleotide
cuucaugacuugaauucuacuuuga

SEQ ID NO: 37976 - RNA, 25 nt, Artificial Sequence
  Description of Artificial Sequence: Synthetic oligonucleotide
aagagggagagaagcaacuacagac

SEQ ID NO: 37977 - RNA, 25 nt, Artificial Sequence
  Description of Artificial Sequence: Synthetic oligonucleotide
cgucuccuaccagaccaaggucaac

SEQ ID NO: 37978 - RNA, 25 nt, Artificial Sequence
  Description of Artificial Sequence: Synthetic oligonucleotide
gaucaaucggcccgacuaucucgac

SEQ ID NO: 37979 - RNA, 25 nt, Artificial Sequence
  Description of Artificial Sequence: Synthetic oligonucleotide
ggacgaacauccaaccuucccaaac

SEQ ID NO: 37980 - RNA, 25 nt, Artificial Sequence
  Description of Artificial Sequence: Synthetic oligonucleotide
agggucggaacccaagcuuagaacu

SEQ ID NO: 37981 - RNA, 25 nt, Artificial Sequence
  Description of Artificial Sequence: Synthetic oligonucleotide
ucggaacccaagcuuagaacuuuaa

SEQ ID NO: 37982 - RNA, 25 nt, Artificial Sequence
  Description of Artificial Sequence: Synthetic oligonucleotide
acccaagcuuagaacuuuaagcaac

SEQ ID NO: 37983 - RNA, 25 nt, Artificial Sequence
  Description of Artificial Sequence: Synthetic oligonucleotide
gaacuuuaagcaacaagaccaccac

SEQ ID NO: 37984 - RNA, 25 nt, Artificial Sequence
  Description of Artificial Sequence: Synthetic oligonucleotide
acuauucaguggcgagaaauaaagu

SEQ ID NO: 37985 - RNA, 25 nt, Artificial Sequence
  Description of Artificial Sequence: Synthetic oligonucleotide
cuauucaguggcgagaaauaaaguu

SEQ ID NO: 37986 - RNA, 25 nt, Artificial Sequence
  Description of Artificial Sequence: Synthetic oligonucleotide
aaacacagauaacaggaaaugaucc

SEQ ID NO: 37987 - RNA, 25 nt, Artificial Sequence
  Description of Artificial Sequence: Synthetic oligonucleotide
cuuaagaaaagagaagaaaugaaac

SEQ ID NO: 37988 - RNA, 25 nt, Artificial Sequence
  Description of Artificial Sequence: Synthetic oligonucleotide
cugaaggaguguguuuccauccucc

SEQ ID NO: 37989 - RNA, 25 nt, Artificial Sequence
  Description of Artificial Sequence: Synthetic oligonucleotide
ucaccgcgggacugaaaaucuuuga

SEQ ID NO: 37990 - RNA, 25 nt, Artificial Sequence
  Description of Artificial Sequence: Synthetic oligonucleotide
agcagaaauaagcgugccguucagg

SEQ ID NO: 37991 - RNA, 25 nt, Artificial Sequence
  Description of Artificial Sequence: Synthetic oligonucleotide
aagcgugccguucaggguccagaag

SEQ ID NO: 37992 - RNA, 25 nt, Artificial Sequence
  Description of Artificial Sequence: Synthetic oligonucleotide
agaaacagucacucaagacugcuug

SEQ ID NO: 37993 - RNA, 25 nt, Artificial Sequence
  Description of Artificial Sequence: Synthetic oligonucleotide
agaggaagaagguccaugucuuugg

SEQ ID NO: 37994 - RNA, 25 nt, Artificial Sequence
  Description of Artificial Sequence: Synthetic oligonucleotide
uguauucaaaauaugccugaaacac

SEQ ID NO: 37995 - RNA, 25 nt, Artificial Sequence
  Description of Artificial Sequence: Synthetic oligonucleotide
auuuuccucccuuucucuguaccuc

SEQ ID NO: 37996 - RNA, 25 nt, Artificial Sequence
  Description of Artificial Sequence: Synthetic oligonucleotide
caaagaaagauagagcaagacaaga

SEQ ID NO: 37997 - RNA, 25 nt, Artificial Sequence
  Description of Artificial Sequence: Synthetic oligonucleotide
aagaaagauagagcaagacaagaaa

SEQ ID NO: 37998 - RNA, 25 nt, Artificial Sequence
  Description of Artificial Sequence: Synthetic oligonucleotide
gaaagcauuuguuuguacaagaucc

SEQ ID NO: 37999 - RNA, 25 nt, Artificial Sequence
  Description of Artificial Sequence: Synthetic oligonucleotide
ugaguuaaacgaacguacuugcaga

SEQ ID NO: 38000 - RNA, 25 nt, Artificial Sequence
  Description of Artificial Sequence: Synthetic oligonucleotide
acugauacagaacgaucgauacaga

SEQ ID NO: 38001 - RNA, 25 nt, Artificial Sequence
  Description of Artificial Sequence: Synthetic oligonucleotide
auauuauauauauauaaaaauaaau

SEQ ID NO: 38002 - RNA, 25 nt, Artificial Sequence
  Description of Artificial Sequence: Synthetic oligonucleotide
auuauauauauauaaaaauaaauau

SEQ ID NO: 38003 - RNA, 25 nt, Artificial Sequence
  Description of Artificial Sequence: Synthetic oligonucleotide
ucacuggauguauuugacugcugug

SEQ ID NO: 38004 - RNA, 25 nt, Artificial Sequence
  Description of Artificial Sequence: Synthetic oligonucleotide
cagggaagaggaggagaugagagac

SEQ ID NO: 38005 - RNA, 25 nt, Artificial Sequence
  Description of Artificial Sequence: Synthetic oligonucleotide
augaucuuuuuuuugucccacuugg

SEQ ID NO: 38006 - RNA, 27 nt, Artificial Sequence
  Description of Artificial Sequence: Synthetic oligonucleotide
ggccgugaacuccucaucaaaauaccu

SEQ ID NO: 38007 - RNA, 27 nt, Artificial Sequence
  Description of Artificial Sequence: Synthetic oligonucleotide
uggugugauggugaucaucugggccgu

SEQ ID NO: 38008 - RNA, 27 nt, Artificial Sequence
  Description of Artificial Sequence: Synthetic oligonucleotide
aaacccgcaggauaguuuucuucccua

SEQ ID NO: 38009 - RNA, 27 nt, Artificial Sequence
  Description of Artificial Sequence: Synthetic oligonucleotide
caaacuggaugaaauaaauuaaaaccc

SEQ ID NO: 38010 - RNA, 27 nt, Artificial Sequence
  Description of Artificial Sequence: Synthetic oligonucleotide
agaaguccuuaacauuucccuacguga

SEQ ID NO: 38011 - RNA, 27 nt, Artificial Sequence
  Description of Artificial Sequence: Synthetic oligonucleotide
cucugucccacuggguaaacccuggcc

SEQ ID NO: 38012 - RNA, 27 nt, Artificial Sequence
  Description of Artificial Sequence: Synthetic oligonucleotide
cacaauaacaaauuuaaaccuugcucc

SEQ ID NO: 38013 - RNA, 27 nt, Artificial Sequence
  Description of Artificial Sequence: Synthetic oligonucleotide
aaaugcauuugaacaacauaauacaca

SEQ ID NO: 38014 - RNA, 27 nt, Artificial Sequence
  Description of Artificial Sequence: Synthetic oligonucleotide
ggcuuuccugucacaaagauuaaaaac

SEQ ID NO: 38015 - RNA, 27 nt, Artificial Sequence
  Description of Artificial Sequence: Synthetic oligonucleotide
agggcuuuccugucacaaagauuaaaa

SEQ ID NO: 38016 - RNA, 27 nt, Artificial Sequence
  Description of Artificial Sequence: Synthetic oligonucleotide
ggccaugcugggagacauaagcagcag

SEQ ID NO: 38017 - RNA, 27 nt, Artificial Sequence
  Description of Artificial Sequence: Synthetic oligonucleotide
ucagggagaagcuucugaaacacuucu

SEQ ID NO: 38018 - RNA, 27 nt, Artificial Sequence
  Description of Artificial Sequence: Synthetic oligonucleotide
aagggcuucuuccuuauugauggucag

SEQ ID NO: 38019 - RNA, 27 nt, Artificial Sequence
  Description of Artificial Sequence: Synthetic oligonucleotide
ugaagggcuucuuccuuauugaugguc

SEQ ID NO: 38020 - RNA, 27 nt, Artificial Sequence
  Description of Artificial Sequence: Synthetic oligonucleotide
cgcugaagggcuucuuccuuauugaug

SEQ ID NO: 38021 - RNA, 27 nt, Artificial Sequence
  Description of Artificial Sequence: Synthetic oligonucleotide
gccgcugaagggcuucuuccuuauuga

SEQ ID NO: 38022 - RNA, 27 nt, Artificial Sequence
  Description of Artificial Sequence: Synthetic oligonucleotide
acuggccgcugaagggcuucuuccuua

SEQ ID NO: 38023 - RNA, 27 nt, Artificial Sequence
  Description of Artificial Sequence: Synthetic oligonucleotide
cggagcuuuucaccuuuaguuaugcuu

SEQ ID NO: 38024 - RNA, 27 nt, Artificial Sequence
  Description of Artificial Sequence: Synthetic oligonucleotide
ccggagcuuuucaccuuuaguuaugcu

SEQ ID NO: 38025 - RNA, 27 nt, Artificial Sequence
  Description of Artificial Sequence: Synthetic oligonucleotide
cagacuguugacuggcgugauguaguu

SEQ ID NO: 38026 - RNA, 27 nt, Artificial Sequence
  Description of Artificial Sequence: Synthetic oligonucleotide
cuuuugaacucugcuuaaauccagugg

SEQ ID NO: 38027 - RNA, 27 nt, Artificial Sequence
  Description of Artificial Sequence: Synthetic oligonucleotide
gcuuuugaacucugcuuaaauccagug

SEQ ID NO: 38028 - RNA, 27 nt, Artificial Sequence
  Description of Artificial Sequence: Synthetic oligonucleotide
agggcuuuugaacucugcuuaaaucca

SEQ ID NO: 38029 - RNA, 27 nt, Artificial Sequence
  Description of Artificial Sequence: Synthetic oligonucleotide
aagggcuuuugaacucugcuuaaaucc

SEQ ID NO: 38030 - RNA, 27 nt, Artificial Sequence
  Description of Artificial Sequence: Synthetic oligonucleotide
ugaagggcuuuugaacucugcuuaaau

SEQ ID NO: 38031 - RNA, 27 nt, Artificial Sequence
  Description of Artificial Sequence: Synthetic oligonucleotide
cugaagggcuuuugaacucugcuuaaa

SEQ ID NO: 38032 - RNA, 27 nt, Artificial Sequence
  Description of Artificial Sequence: Synthetic oligonucleotide
cgcugaagggcuuuugaacucugcuua

SEQ ID NO: 38033 - RNA, 27 nt, Artificial Sequence
  Description of Artificial Sequence: Synthetic oligonucleotide
cgagcggcuucacucagacccugaggc

SEQ ID NO: 38034 - RNA, 27 nt, Artificial Sequence
  Description of Artificial Sequence: Synthetic oligonucleotide
uugacuggcgugauguaguugcuuggg

SEQ ID NO: 38035 - RNA, 27 nt, Artificial Sequence
  Description of Artificial Sequence: Synthetic oligonucleotide
cacgcaccaagaagcugccauugaucc

SEQ ID NO: 38036 - RNA, 27 nt, Artificial Sequence
  Description of Artificial Sequence: Synthetic oligonucleotide
cugaugaauccaaugugggcuggaauc

SEQ ID NO: 38037 - RNA, 27 nt, Artificial Sequence
  Description of Artificial Sequence: Synthetic oligonucleotide
cuuagguauuccacauucucagcugug

SEQ ID NO: 38038 - RNA, 27 nt, Artificial Sequence
  Description of Artificial Sequence: Synthetic oligonucleotide
ugagccucaaauuaggagauacguuuu

SEQ ID NO: 38039 - RNA, 27 nt, Artificial Sequence
  Description of Artificial Sequence: Synthetic oligonucleotide
ccaauuguagagaaauuauuuuaggaa

SEQ ID NO: 38040 - RNA, 27 nt, Artificial Sequence
  Description of Artificial Sequence: Synthetic oligonucleotide
ggcuccuaacuagcugaaucuuccaau

SEQ ID NO: 38041 - RNA, 27 nt, Artificial Sequence
  Description of Artificial Sequence: Synthetic oligonucleotide
guggauauugacuaggagaguuuaaaa

SEQ ID NO: 38042 - RNA, 27 nt, Artificial Sequence
  Description of Artificial Sequence: Synthetic oligonucleotide
ugugacugaacauaacuguaggcugaa

SEQ ID NO: 38043 - RNA, 27 nt, Artificial Sequence
  Description of Artificial Sequence: Synthetic oligonucleotide
guaugugugugugacugaacauaacug

SEQ ID NO: 38044 - RNA, 27 nt, Artificial Sequence
  Description of Artificial Sequence: Synthetic oligonucleotide
aagcaaaaggaacauuuuguaugugug

SEQ ID NO: 38045 - RNA, 27 nt, Artificial Sequence
  Description of Artificial Sequence: Synthetic oligonucleotide
aaaaauuacuuuaaaagcaaaaggaac

SEQ ID NO: 38046 - RNA, 27 nt, Artificial Sequence
  Description of Artificial Sequence: Synthetic oligonucleotide
ccauugacuguugcuucacaggucaga

SEQ ID NO: 38047 - RNA, 27 nt, Artificial Sequence
  Description of Artificial Sequence: Synthetic oligonucleotide
auugguuugucgaugugugagauaguu

SEQ ID NO: 38048 - RNA, 27 nt, Artificial Sequence
  Description of Artificial Sequence: Synthetic oligonucleotide
agugguagcaguacaauugaggacaag

SEQ ID NO: 38049 - RNA, 27 nt, Artificial Sequence
  Description of Artificial Sequence: Synthetic oligonucleotide
uaagaccgcuugccagcuacgguuuca

SEQ ID NO: 38050 - RNA, 27 nt, Artificial Sequence
  Description of Artificial Sequence: Synthetic oligonucleotide
agccgguaagaccgcuugccagcuacg

SEQ ID NO: 38051 - RNA, 27 nt, Artificial Sequence
  Description of Artificial Sequence: Synthetic oligonucleotide
gguaacccaucuuuuaaccauacaacu

SEQ ID NO: 38052 - RNA, 27 nt, Artificial Sequence
  Description of Artificial Sequence: Synthetic oligonucleotide
ucgcagguaacccaucuuuuaaccaua

SEQ ID NO: 38053 - RNA, 27 nt, Artificial Sequence
  Description of Artificial Sequence: Synthetic oligonucleotide
cucagcaagauuguauaauucccugca

SEQ ID NO: 38054 - RNA, 27 nt, Artificial Sequence
  Description of Artificial Sequence: Synthetic oligonucleotide
acuguuuuaugcucagcaagauuguau

SEQ ID NO: 38055 - RNA, 27 nt, Artificial Sequence
  Description of Artificial Sequence: Synthetic oligonucleotide
aggauaaaggacucuucauuauuggaa

SEQ ID NO: 38056 - RNA, 27 nt, Artificial Sequence
  Description of Artificial Sequence: Synthetic oligonucleotide
caacuugcguuggaacauccaaagugu

SEQ ID NO: 38057 - RNA, 27 nt, Artificial Sequence
  Description of Artificial Sequence: Synthetic oligonucleotide
augguuucaguuuaguggaagcauuua

SEQ ID NO: 38058 - RNA, 27 nt, Artificial Sequence
  Description of Artificial Sequence: Synthetic oligonucleotide
auauuuaacaaagucaaacuuucucac

SEQ ID NO: 38059 - RNA, 27 nt, Artificial Sequence
  Description of Artificial Sequence: Synthetic oligonucleotide
aacuuuuaauauacaguaguucuuuuc

SEQ ID NO: 38060 - RNA, 27 nt, Artificial Sequence
  Description of Artificial Sequence: Synthetic oligonucleotide
guuaagucaaaacccguauuucuaaag

SEQ ID NO: 38061 - RNA, 27 nt, Artificial Sequence
  Description of Artificial Sequence: Synthetic oligonucleotide
gugcugaguuugcuguacccauguuga

SEQ ID NO: 38062 - RNA, 27 nt, Artificial Sequence
  Description of Artificial Sequence: Synthetic oligonucleotide
ugaggucagcaucuucugugucuuuac

SEQ ID NO: 38063 - RNA, 27 nt, Artificial Sequence
  Description of Artificial Sequence: Synthetic oligonucleotide
gcgaucugaauaaaccucccuacuagc

SEQ ID NO: 38064 - RNA, 27 nt, Artificial Sequence
  Description of Artificial Sequence: Synthetic oligonucleotide
aucccagaacccugcugcagaaggcca

SEQ ID NO: 38065 - RNA, 27 nt, Artificial Sequence
  Description of Artificial Sequence: Synthetic oligonucleotide
cauaauuuccaauauguaccagaccuu

SEQ ID NO: 38066 - RNA, 27 nt, Artificial Sequence
  Description of Artificial Sequence: Synthetic oligonucleotide
cuagugcuuccaucggaaggacuaggu

SEQ ID NO: 38067 - RNA, 27 nt, Artificial Sequence
  Description of Artificial Sequence: Synthetic oligonucleotide
uccacauaaaaacaauauucacuggga

SEQ ID NO: 38068 - RNA, 27 nt, Artificial Sequence
  Description of Artificial Sequence: Synthetic oligonucleotide
ucuaccaauuccaacuugaauucauug

SEQ ID NO: 38069 - RNA, 27 nt, Artificial Sequence
  Description of Artificial Sequence: Synthetic oligonucleotide
ucuccaagucuaaaucuguguccugag

SEQ ID NO: 38070 - RNA, 27 nt, Artificial Sequence
  Description of Artificial Sequence: Synthetic oligonucleotide
uggaauacuguaacugugcuuugagga

SEQ ID NO: 38071 - RNA, 27 nt, Artificial Sequence
  Description of Artificial Sequence: Synthetic oligonucleotide
uuaauucaucagugguggcagugguag

SEQ ID NO: 38072 - RNA, 27 nt, Artificial Sequence
  Description of Artificial Sequence: Synthetic oligonucleotide
gugaugauguggcacuaguaguuucuu

SEQ ID NO: 38073 - RNA, 27 nt, Artificial Sequence
  Description of Artificial Sequence: Synthetic oligonucleotide
ucuguuuggugaggcuguccgacuuug

SEQ ID NO: 38074 - RNA, 27 nt, Artificial Sequence
  Description of Artificial Sequence: Synthetic oligonucleotide
ccaucauguuccauuuuucgcuuucuc

SEQ ID NO: 38075 - RNA, 27 nt, Artificial Sequence
  Description of Artificial Sequence: Synthetic oligonucleotide
gcagucuacaugcuaaaucagagggua

SEQ ID NO: 38076 - RNA, 27 nt, Artificial Sequence
  Description of Artificial Sequence: Synthetic oligonucleotide
cauaaauagauccuuaaauagcucaaa

SEQ ID NO: 38077 - RNA, 27 nt, Artificial Sequence
  Description of Artificial Sequence: Synthetic oligonucleotide
ugauaauagugcuuuuucaccuuuuuc

SEQ ID NO: 38078 - RNA, 27 nt, Artificial Sequence
  Description of Artificial Sequence: Synthetic oligonucleotide
gcagaacugauaauagugcuuuuucac

SEQ ID NO: 38079 - RNA, 27 nt, Artificial Sequence
  Description of Artificial Sequence: Synthetic oligonucleotide
guagguuuaaucuuucuuuucagccau

SEQ ID NO: 38080 - RNA, 27 nt, Artificial Sequence
  Description of Artificial Sequence: Synthetic oligonucleotide
agaaggauuuuauuauaaggguuuaau

SEQ ID NO: 38081 - RNA, 27 nt, Artificial Sequence
  Description of Artificial Sequence: Synthetic oligonucleotide
gucuacagcauuggcuaauaguaugaa

SEQ ID NO: 38082 - RNA, 27 nt, Artificial Sequence
  Description of Artificial Sequence: Synthetic oligonucleotide
cuauuccuaucaaaaugcuucugucua

SEQ ID NO: 38083 - RNA, 27 nt, Artificial Sequence
  Description of Artificial Sequence: Synthetic oligonucleotide
ucagggccauuaucuuauuugcucuau

SEQ ID NO: 38084 - RNA, 27 nt, Artificial Sequence
  Description of Artificial Sequence: Synthetic oligonucleotide
ugcuugaggaagagaaaaauguugguc

SEQ ID NO: 38085 - RNA, 27 nt, Artificial Sequence
  Description of Artificial Sequence: Synthetic oligonucleotide
ugggcugaacuuuucucauacuuaaag

SEQ ID NO: 38086 - RNA, 27 nt, Artificial Sequence
  Description of Artificial Sequence: Synthetic oligonucleotide
gguucagcagccaucuuuauuccugcg

SEQ ID NO: 38087 - RNA, 27 nt, Artificial Sequence
  Description of Artificial Sequence: Synthetic oligonucleotide
ugaagagaacuuggucauucaaauuuc

SEQ ID NO: 38088 - RNA, 27 nt, Artificial Sequence
  Description of Artificial Sequence: Synthetic oligonucleotide
cucuaggcuggcuaucuuuauacauac

SEQ ID NO: 38089 - RNA, 27 nt, Artificial Sequence
  Description of Artificial Sequence: Synthetic oligonucleotide
acacuucacagagauaguuacagccau

SEQ ID NO: 38090 - RNA, 27 nt, Artificial Sequence
  Description of Artificial Sequence: Synthetic oligonucleotide
uugaaauuuucucacacuucacagaga

SEQ ID NO: 38091 - RNA, 27 nt, Artificial Sequence
  Description of Artificial Sequence: Synthetic oligonucleotide
ucaggaggauucauuuccuuaaaggaa

SEQ ID NO: 38092 - RNA, 27 nt, Artificial Sequence
  Description of Artificial Sequence: Synthetic oligonucleotide
auaugaugucacuuuuuguauccuuga

SEQ ID NO: 38093 - RNA, 27 nt, Artificial Sequence
  Description of Artificial Sequence: Synthetic oligonucleotide
uaugaugaagauucaaauugcaucuua

SEQ ID NO: 38094 - RNA, 27 nt, Artificial Sequence
  Description of Artificial Sequence: Synthetic oligonucleotide
uuaauagcuagucuucguuuugaacag

SEQ ID NO: 38095 - RNA, 27 nt, Artificial Sequence
  Description of Artificial Sequence: Synthetic oligonucleotide
auuuuuaguagagaugagguuucacca

SEQ ID NO: 38096 - RNA, 27 nt, Artificial Sequence
  Description of Artificial Sequence: Synthetic oligonucleotide
aggcgagauagagcuucucuuucguuc

SEQ ID NO: 38097 - RNA, 27 nt, Artificial Sequence
  Description of Artificial Sequence: Synthetic oligonucleotide
aacuggaccgaaggcgcuuguggagaa

SEQ ID NO: 38098 - RNA, 27 nt, Artificial Sequence
  Description of Artificial Sequence: Synthetic oligonucleotide
gcggcuacaucuuuggaaucuucuccu

SEQ ID NO: 38099 - RNA, 27 nt, Artificial Sequence
  Description of Artificial Sequence: Synthetic oligonucleotide
caagucuccucauugaauccagauugg

SEQ ID NO: 38100 - RNA, 27 nt, Artificial Sequence
  Description of Artificial Sequence: Synthetic oligonucleotide
uccucacuacucucaaaucuguucugg

SEQ ID NO: 38101 - RNA, 27 nt, Artificial Sequence
  Description of Artificial Sequence: Synthetic oligonucleotide
uuuguacucaucugcacagcucuggcu

SEQ ID NO: 38102 - RNA, 27 nt, Artificial Sequence
  Description of Artificial Sequence: Synthetic oligonucleotide
gcccauuaacaacaacaaucugaggug

SEQ ID NO: 38103 - RNA, 27 nt, Artificial Sequence
  Description of Artificial Sequence: Synthetic oligonucleotide
aauaaauuaaaaauaauuaaaauagug

SEQ ID NO: 38104 - RNA, 27 nt, Artificial Sequence
  Description of Artificial Sequence: Synthetic oligonucleotide
cauauuuaaauauuaauaaauuaaaaa

SEQ ID NO: 38105 - RNA, 27 nt, Artificial Sequence
  Description of Artificial Sequence: Synthetic oligonucleotide
gaaacaaaggauauucaaacugcauag

SEQ ID NO: 38106 - RNA, 27 nt, Artificial Sequence
  Description of Artificial Sequence: Synthetic oligonucleotide
caaacacuuagacgccagcagcauggg

SEQ ID NO: 38107 - RNA, 27 nt, Artificial Sequence
  Description of Artificial Sequence: Synthetic oligonucleotide
uuugucacaggugaaaugcacaucuga

SEQ ID NO: 38108 - RNA, 27 nt, Artificial Sequence
  Description of Artificial Sequence: Synthetic oligonucleotide
uaauucagccuggcacagguuuugauc

SEQ ID NO: 38109 - RNA, 27 nt, Artificial Sequence
  Description of Artificial Sequence: Synthetic oligonucleotide
auuguaagaaugacuacccacauucac

SEQ ID NO: 38110 - RNA, 27 nt, Artificial Sequence
  Description of Artificial Sequence: Synthetic oligonucleotide
caauuguaagaaugacuacccacauuc

SEQ ID NO: 38111 - RNA, 27 nt, Artificial Sequence
  Description of Artificial Sequence: Synthetic oligonucleotide
guacacucucugaugcucauuuucaua

SEQ ID NO: 38112 - RNA, 27 nt, Artificial Sequence
  Description of Artificial Sequence: Synthetic oligonucleotide
cugcugaguucuacaugaaaagcaaau

SEQ ID NO: 38113 - RNA, 27 nt, Artificial Sequence
  Description of Artificial Sequence: Synthetic oligonucleotide
uacugaaaauaaauauagaaauacaac

SEQ ID NO: 38114 - RNA, 27 nt, Artificial Sequence
  Description of Artificial Sequence: Synthetic oligonucleotide
uuccauuuaagaaacauuaaucaaaac

SEQ ID NO: 38115 - RNA, 27 nt, Artificial Sequence
  Description of Artificial Sequence: Synthetic oligonucleotide
acaauuuuaggcacuauacacguuguu

SEQ ID NO: 38116 - RNA, 27 nt, Artificial Sequence
  Description of Artificial Sequence: Synthetic oligonucleotide
ccagauguuaguagccaaggauauggu

SEQ ID NO: 38117 - RNA, 27 nt, Artificial Sequence
  Description of Artificial Sequence: Synthetic oligonucleotide
agcucacagucuccagauguuaguagc

SEQ ID NO: 38118 - RNA, 27 nt, Artificial Sequence
  Description of Artificial Sequence: Synthetic oligonucleotide
auuaauaaaaagcacacaacuuauggc

SEQ ID NO: 38119 - RNA, 27 nt, Artificial Sequence
  Description of Artificial Sequence: Synthetic oligonucleotide
aauguaagaagagccaaaaugaugcau

SEQ ID NO: 38120 - RNA, 27 nt, Artificial Sequence
  Description of Artificial Sequence: Synthetic oligonucleotide
acauuuuuacaaauguaagaagagcca

SEQ ID NO: 38121 - RNA, 27 nt, Artificial Sequence
  Description of Artificial Sequence: Synthetic oligonucleotide
aauaugaauuaagaugaccuaaucugu

SEQ ID NO: 38122 - RNA, 27 nt, Artificial Sequence
  Description of Artificial Sequence: Synthetic oligonucleotide
ucaugauuaguucuuucaauuccaucc

SEQ ID NO: 38123 - RNA, 27 nt, Artificial Sequence
  Description of Artificial Sequence: Synthetic oligonucleotide
cccaagagcagaaggaaugagugugca

SEQ ID NO: 38124 - RNA, 27 nt, Artificial Sequence
  Description of Artificial Sequence: Synthetic oligonucleotide
cucaaagcuacugguuaccucuacacc

SEQ ID NO: 38125 - RNA, 27 nt, Artificial Sequence
  Description of Artificial Sequence: Synthetic oligonucleotide
ugaaauauuacguggcaugugguuggg

SEQ ID NO: 38126 - RNA, 27 nt, Artificial Sequence
  Description of Artificial Sequence: Synthetic oligonucleotide
agugaagagaauaacuuguuuccgaag

SEQ ID NO: 38127 - RNA, 27 nt, Artificial Sequence
  Description of Artificial Sequence: Synthetic oligonucleotide
uuucuuagcauuaguuauugggaguga

SEQ ID NO: 38128 - RNA, 27 nt, Artificial Sequence
  Description of Artificial Sequence: Synthetic oligonucleotide
uugauuuucagcauuucuuagcauuag

SEQ ID NO: 38129 - RNA, 27 nt, Artificial Sequence
  Description of Artificial Sequence: Synthetic oligonucleotide
aaaguaaucauauuuagagaaagacag

SEQ ID NO: 38130 - RNA, 27 nt, Artificial Sequence
  Description of Artificial Sequence: Synthetic oligonucleotide
uguagaacaaaaugccugaaauucagc

SEQ ID NO: 38131 - RNA, 27 nt, Artificial Sequence
  Description of Artificial Sequence: Synthetic oligonucleotide
gagagucccgggugagagggaaucgcc

SEQ ID NO: 38132 - RNA, 27 nt, Artificial Sequence
  Description of Artificial Sequence: Synthetic oligonucleotide
cuuuacuuuaaagguucacuuuccuug

SEQ ID NO: 38133 - RNA, 27 nt, Artificial Sequence
  Description of Artificial Sequence: Synthetic oligonucleotide
ccaggcuuccagagcaugcagccuccu

SEQ ID NO: 38134 - RNA, 27 nt, Artificial Sequence
  Description of Artificial Sequence: Synthetic oligonucleotide
cucucuuuuguuuucuguucagagaaa

SEQ ID NO: 38135 - RNA, 27 nt, Artificial Sequence
  Description of Artificial Sequence: Synthetic oligonucleotide
cggcauaacugauuacagccaaguuca

SEQ ID NO: 38136 - RNA, 27 nt, Artificial Sequence
  Description of Artificial Sequence: Synthetic oligonucleotide
uggacuucuuuuaauuuuggcuucuuc

SEQ ID NO: 38137 - RNA, 27 nt, Artificial Sequence
  Description of Artificial Sequence: Synthetic oligonucleotide
uaaccucaccuggacuucuuuuaauuu

SEQ ID NO: 38138 - RNA, 27 nt, Artificial Sequence
  Description of Artificial Sequence: Synthetic oligonucleotide
guccucuucccgauaauccggauucag

SEQ ID NO: 38139 - RNA, 27 nt, Artificial Sequence
  Description of Artificial Sequence: Synthetic oligonucleotide
acaauacuugcuuugaugucacauuaa

SEQ ID NO: 38140 - RNA, 27 nt, Artificial Sequence
  Description of Artificial Sequence: Synthetic oligonucleotide
gagugcuacaauacuugcuuugauguc

SEQ ID NO: 38141 - RNA, 27 nt, Artificial Sequence
  Description of Artificial Sequence: Synthetic oligonucleotide
auuugugguuuuguuuucucucucucu

SEQ ID NO: 38142 - RNA, 27 nt, Artificial Sequence
  Description of Artificial Sequence: Synthetic oligonucleotide
uguaugggcuuaaauacuacagcgagg

SEQ ID NO: 38143 - RNA, 27 nt, Artificial Sequence
  Description of Artificial Sequence: Synthetic oligonucleotide
cuguaugggcuuaaauacuacagcgag

SEQ ID NO: 38144 - RNA, 27 nt, Artificial Sequence
  Description of Artificial Sequence: Synthetic oligonucleotide
ggaagguuucuguaugggcuuaaauac

SEQ ID NO: 38145 - RNA, 27 nt, Artificial Sequence
  Description of Artificial Sequence: Synthetic oligonucleotide
guagguauaccauguuuauuuuaauac

SEQ ID NO: 38146 - RNA, 27 nt, Artificial Sequence
  Description of Artificial Sequence: Synthetic oligonucleotide
uccgaaaacuggccgaucagaacagcc

SEQ ID NO: 38147 - RNA, 27 nt, Artificial Sequence
  Description of Artificial Sequence: Synthetic oligonucleotide
cccuguuccaaaguucaaauuauuugu

SEQ ID NO: 38148 - RNA, 27 nt, Artificial Sequence
  Description of Artificial Sequence: Synthetic oligonucleotide
acuggaaaguuaaauuaaggucgcaau

SEQ ID NO: 38149 - RNA, 27 nt, Artificial Sequence
  Description of Artificial Sequence: Synthetic oligonucleotide
caaaaccaaacuuuagcuuucucagcc

SEQ ID NO: 38150 - RNA, 27 nt, Artificial Sequence
  Description of Artificial Sequence: Synthetic oligonucleotide
uacagugggaaguagcaucuuuacuuu

SEQ ID NO: 38151 - RNA, 27 nt, Artificial Sequence
  Description of Artificial Sequence: Synthetic oligonucleotide
ucauaugguaucagcaauuaagcagua

SEQ ID NO: 38152 - RNA, 27 nt, Artificial Sequence
  Description of Artificial Sequence: Synthetic oligonucleotide
cagcccauguuucauucauaugguauc

SEQ ID NO: 38153 - RNA, 27 nt, Artificial Sequence
  Description of Artificial Sequence: Synthetic oligonucleotide
uaugaaaaaguuggauaagaaaguugg

SEQ ID NO: 38154 - RNA, 27 nt, Artificial Sequence
  Description of Artificial Sequence: Synthetic oligonucleotide
uccggccucaugaugucaugcaaggcu

SEQ ID NO: 38155 - RNA, 27 nt, Artificial Sequence
  Description of Artificial Sequence: Synthetic oligonucleotide
acaaaugcagucauauacaaauucagg

SEQ ID NO: 38156 - RNA, 27 nt, Artificial Sequence
  Description of Artificial Sequence: Synthetic oligonucleotide
gguaguaaacauucuacuaggauucuu

SEQ ID NO: 38157 - RNA, 27 nt, Artificial Sequence
  Description of Artificial Sequence: Synthetic oligonucleotide
uuucaucaaaaaauucuucccuuucug

SEQ ID NO: 38158 - RNA, 27 nt, Artificial Sequence
  Description of Artificial Sequence: Synthetic oligonucleotide
aaauucacacacuggcaugccgauagc

SEQ ID NO: 38159 - RNA, 27 nt, Artificial Sequence
  Description of Artificial Sequence: Synthetic oligonucleotide
acauacauugcucuacuaugaggugaa

SEQ ID NO: 38160 - RNA, 27 nt, Artificial Sequence
  Description of Artificial Sequence: Synthetic oligonucleotide
uauauaugugcuuuggcaauucuggug

SEQ ID NO: 38161 - RNA, 27 nt, Artificial Sequence
  Description of Artificial Sequence: Synthetic oligonucleotide
ggagaaacuauuacccagaucaccacu

SEQ ID NO: 38162 - RNA, 27 nt, Artificial Sequence
  Description of Artificial Sequence: Synthetic oligonucleotide
auuuggagaaacuauuacccagaucac

SEQ ID NO: 38163 - RNA, 27 nt, Artificial Sequence
  Description of Artificial Sequence: Synthetic oligonucleotide
uuucuaggaaguauucaucacauccac

SEQ ID NO: 38164 - RNA, 27 nt, Artificial Sequence
  Description of Artificial Sequence: Synthetic oligonucleotide
cauauaugguguagcuguggaaaugcg

SEQ ID NO: 38165 - RNA, 27 nt, Artificial Sequence
  Description of Artificial Sequence: Synthetic oligonucleotide
cuccauucauauaugguguagcugugg

SEQ ID NO: 38166 - RNA, 27 nt, Artificial Sequence
  Description of Artificial Sequence: Synthetic oligonucleotide
aucuucuucucguguaagaacugcagc

SEQ ID NO: 38167 - RNA, 27 nt, Artificial Sequence
  Description of Artificial Sequence: Synthetic oligonucleotide
ucccuguaaaugaucuucuucucgugu

SEQ ID NO: 38168 - RNA, 27 nt, Artificial Sequence
  Description of Artificial Sequence: Synthetic oligonucleotide
gucccuguaaaugaucuucuucucgug

SEQ ID NO: 38169 - RNA, 27 nt, Artificial Sequence
  Description of Artificial Sequence: Synthetic oligonucleotide
ucaggucccuguaaaugaucuucuucu

SEQ ID NO: 38170 - RNA, 27 nt, Artificial Sequence
  Description of Artificial Sequence: Synthetic oligonucleotide
gaugcagucaaacaccucuuccucugu

SEQ ID NO: 38171 - RNA, 27 nt, Artificial Sequence
  Description of Artificial Sequence: Synthetic oligonucleotide
cgaugcagucaaacaccucuuccucug

SEQ ID NO: 38172 - RNA, 27 nt, Artificial Sequence
  Description of Artificial Sequence: Synthetic oligonucleotide
cccugugaacucgcccucaaaguagcg

SEQ ID NO: 38173 - RNA, 27 nt, Artificial Sequence
  Description of Artificial Sequence: Synthetic oligonucleotide
ggacagaggugccaggagaugcccuca

SEQ ID NO: 38174 - RNA, 27 nt, Artificial Sequence
  Description of Artificial Sequence: Synthetic oligonucleotide
uuaaaaagacaaaccauaucacuccuu

SEQ ID NO: 38175 - RNA, 27 nt, Artificial Sequence
  Description of Artificial Sequence: Synthetic oligonucleotide
cuuaaaaagacaaaccauaucacuccu

SEQ ID NO: 38176 - RNA, 27 nt, Artificial Sequence
  Description of Artificial Sequence: Synthetic oligonucleotide
gacaaccuuuaggaucuuuacugcaac

SEQ ID NO: 38177 - RNA, 27 nt, Artificial Sequence
  Description of Artificial Sequence: Synthetic oligonucleotide
gucgacaaccuuuaggaucuuuacugc

SEQ ID NO: 38178 - RNA, 27 nt, Artificial Sequence
  Description of Artificial Sequence: Synthetic oligonucleotide
acaauugccagguuguccuuugucaug

SEQ ID NO: 38179 - RNA, 27 nt, Artificial Sequence
  Description of Artificial Sequence: Synthetic oligonucleotide
ccucgcaccacugggucacaauugcca

SEQ ID NO: 38180 - RNA, 27 nt, Artificial Sequence
  Description of Artificial Sequence: Synthetic oligonucleotide
auuucaugucucuauggaugauguucu

SEQ ID NO: 38181 - RNA, 27 nt, Artificial Sequence
  Description of Artificial Sequence: Synthetic oligonucleotide
uggagaaauauauuguuggauuucaug

SEQ ID NO: 38182 - RNA, 27 nt, Artificial Sequence
  Description of Artificial Sequence: Synthetic oligonucleotide
agccuucauggagaaauauauuguugg

SEQ ID NO: 38183 - RNA, 27 nt, Artificial Sequence
  Description of Artificial Sequence: Synthetic oligonucleotide
accacuccagcgugacuuuacuguugc

SEQ ID NO: 38184 - RNA, 27 nt, Artificial Sequence
  Description of Artificial Sequence: Synthetic oligonucleotide
ccucucuuccuuuacuuucuucacaca

SEQ ID NO: 38185 - RNA, 27 nt, Artificial Sequence
  Description of Artificial Sequence: Synthetic oligonucleotide
gcccgaugcaaggauggcucggaagcg

SEQ ID NO: 38186 - RNA, 27 nt, Artificial Sequence
  Description of Artificial Sequence: Synthetic oligonucleotide
cacaguaggauauucaaccuccauuuc

SEQ ID NO: 38187 - RNA, 27 nt, Artificial Sequence
  Description of Artificial Sequence: Synthetic oligonucleotide
uuacacaguaggauauucaaccuccau

SEQ ID NO: 38188 - RNA, 27 nt, Artificial Sequence
  Description of Artificial Sequence: Synthetic oligonucleotide
uacacuacaagggaaaacucaaaaucu

SEQ ID NO: 38189 - RNA, 27 nt, Artificial Sequence
  Description of Artificial Sequence: Synthetic oligonucleotide
caaucaacaaagaacaaacaggauaaa

SEQ ID NO: 38190 - RNA, 27 nt, Artificial Sequence
  Description of Artificial Sequence: Synthetic oligonucleotide
uuucaaucaacaaagaacaaacaggau

SEQ ID NO: 38191 - RNA, 27 nt, Artificial Sequence
  Description of Artificial Sequence: Synthetic oligonucleotide
auggaagaaaaagaaggcuguagagaa

SEQ ID NO: 38192 - RNA, 27 nt, Artificial Sequence
  Description of Artificial Sequence: Synthetic oligonucleotide
uagaaggaagauuagcuauggaagaaa

SEQ ID NO: 38193 - RNA, 27 nt, Artificial Sequence
  Description of Artificial Sequence: Synthetic oligonucleotide
augaagcauucaacaggaagauuauuu

SEQ ID NO: 38194 - RNA, 27 nt, Artificial Sequence
  Description of Artificial Sequence: Synthetic oligonucleotide
caugaagcauucaacaggaagauuauu

SEQ ID NO: 38195 - RNA, 27 nt, Artificial Sequence
  Description of Artificial Sequence: Synthetic oligonucleotide
ucaaaguagaauucaagucaugaagca

SEQ ID NO: 38196 - RNA, 27 nt, Artificial Sequence
  Description of Artificial Sequence: Synthetic oligonucleotide
gucuguaguugcuucucucccucuuag

SEQ ID NO: 38197 - RNA, 27 nt, Artificial Sequence
  Description of Artificial Sequence: Synthetic oligonucleotide
guugaccuuggucugguaggagacggc

SEQ ID NO: 38198 - RNA, 27 nt, Artificial Sequence
  Description of Artificial Sequence: Synthetic oligonucleotide
gucgagauagucgggccgauugaucuc

SEQ ID NO: 38199 - RNA, 27 nt, Artificial Sequence
  Description of Artificial Sequence: Synthetic oligonucleotide
guuugggaagguuggauguucguccuc

SEQ ID NO: 38200 - RNA, 27 nt, Artificial Sequence
  Description of Artificial Sequence: Synthetic oligonucleotide
aguucuaagcuuggguuccgacccuaa

SEQ ID NO: 38201 - RNA, 27 nt, Artificial Sequence
  Description of Artificial Sequence: Synthetic oligonucleotide
uuaaaguucuaagcuuggguuccgacc

SEQ ID NO: 38202 - RNA, 27 nt, Artificial Sequence
  Description of Artificial Sequence: Synthetic oligonucleotide
guugcuuaaaguucuaagcuuggguuc

SEQ ID NO: 38203 - RNA, 27 nt, Artificial Sequence
  Description of Artificial Sequence: Synthetic oligonucleotide
gugguggucuuguugcuuaaaguucua

SEQ ID NO: 38204 - RNA, 27 nt, Artificial Sequence
  Description of Artificial Sequence: Synthetic oligonucleotide
acuuuauuucucgccacugaauaguag

SEQ ID NO: 38205 - RNA, 27 nt, Artificial Sequence
  Description of Artificial Sequence: Synthetic oligonucleotide
aacuuuauuucucgccacugaauagua

SEQ ID NO: 38206 - RNA, 27 nt, Artificial Sequence
  Description of Artificial Sequence: Synthetic oligonucleotide
ggaucauuuccuguuaucuguguuugu

SEQ ID NO: 38207 - RNA, 27 nt, Artificial Sequence
  Description of Artificial Sequence: Synthetic oligonucleotide
guuucauuucuucucuuuucuuaaggc

SEQ ID NO: 38208 - RNA, 27 nt, Artificial Sequence
  Description of Artificial Sequence: Synthetic oligonucleotide
ggaggauggaaacacacuccuucaguu

SEQ ID NO: 38209 - RNA, 27 nt, Artificial Sequence
  Description of Artificial Sequence: Synthetic oligonucleotide
ucaaagauuuucagucccgcggugaca

SEQ ID NO: 38210 - RNA, 27 nt, Artificial Sequence
  Description of Artificial Sequence: Synthetic oligonucleotide
ccugaacggcacgcuuauuucugcugu

SEQ ID NO: 38211 - RNA, 27 nt, Artificial Sequence
  Description of Artificial Sequence: Synthetic oligonucleotide
cuucuggacccugaacggcacgcuuau

SEQ ID NO: 38212 - RNA, 27 nt, Artificial Sequence
  Description of Artificial Sequence: Synthetic oligonucleotide
caagcagucuugagugacuguuucuuc

SEQ ID NO: 38213 - RNA, 27 nt, Artificial Sequence
  Description of Artificial Sequence: Synthetic oligonucleotide
ccaaagacauggaccuucuuccucuga

SEQ ID NO: 38214 - RNA, 27 nt, Artificial Sequence
  Description of Artificial Sequence: Synthetic oligonucleotide
guguuucaggcauauuuugaauacauc

SEQ ID NO: 38215 - RNA, 27 nt, Artificial Sequence
  Description of Artificial Sequence: Synthetic oligonucleotide
gagguacagagaaagggaggaaaauag

SEQ ID NO: 38216 - RNA, 27 nt, Artificial Sequence
  Description of Artificial Sequence: Synthetic oligonucleotide
ucuugucuugcucuaucuuucuuuggu

SEQ ID NO: 38217 - RNA, 27 nt, Artificial Sequence
  Description of Artificial Sequence: Synthetic oligonucleotide
uuucuugucuugcucuaucuuucuuug

SEQ ID NO: 38218 - RNA, 27 nt, Artificial Sequence
  Description of Artificial Sequence: Synthetic oligonucleotide
ggaucuuguacaaacaaaugcuuucuc

SEQ ID NO: 38219 - RNA, 27 nt, Artificial Sequence
  Description of Artificial Sequence: Synthetic oligonucleotide
ucugcaaguacguucguuuaacucaag

SEQ ID NO: 38220 - RNA, 27 nt, Artificial Sequence
  Description of Artificial Sequence: Synthetic oligonucleotide
ucuguaucgaucguucuguaucagucu

SEQ ID NO: 38221 - RNA, 27 nt, Artificial Sequence
  Description of Artificial Sequence: Synthetic oligonucleotide
auuuauuuuuauauauauauaauauau

SEQ ID NO: 38222 - RNA, 27 nt, Artificial Sequence
  Description of Artificial Sequence: Synthetic oligonucleotide
auauuuauuuuuauauauauauaauau

SEQ ID NO: 38223 - RNA, 27 nt, Artificial Sequence
  Description of Artificial Sequence: Synthetic oligonucleotide
cacagcagucaaauacauccagugaag

SEQ ID NO: 38224 - RNA, 27 nt, Artificial Sequence
  Description of Artificial Sequence: Synthetic oligonucleotide
gucucucaucuccuccucuucccuguc

SEQ ID NO: 38225 - RNA, 27 nt, Artificial Sequence
  Description of Artificial Sequence: Synthetic oligonucleotide
ccaagugggacaaaaaaaagaucaugc

SEQ ID NO: 38226 - RNA, 14 nt, Artificial Sequence
  Description of Artificial Sequence: Synthetic oligonucleotide
guauuuugaugagg

SEQ ID NO: 38227 - RNA, 12 nt, Artificial Sequence
  Description of Artificial Sequence: Synthetic oligonucleotide
ggcccagaugau

SEQ ID NO: 38228 - RNA, 14 nt, Artificial Sequence
  Description of Artificial Sequence: Synthetic oligonucleotide
gggaagaaaacuau

SEQ ID NO: 38229 - RNA, 15 nt, Artificial Sequence
  Description of Artificial Sequence: Synthetic oligonucleotide
guuuuaauuuauuuc

SEQ ID NO: 38230 - RNA, 12 nt, Artificial Sequence
  Description of Artificial Sequence: Synthetic oligonucleotide
acguagggaaau

SEQ ID NO: 38231 - RNA, 12 nt, Artificial Sequence
  Description of Artificial Sequence: Synthetic oligonucleotide
ccaggguuuacc

SEQ ID NO: 38232 - RNA, 11 nt, Artificial Sequence
  Description of Artificial Sequence: Synthetic oligonucleotide
agcaagguuua

SEQ ID NO: 38233 - RNA, 12 nt, Artificial Sequence
  Description of Artificial Sequence: Synthetic oligonucleotide
uguauuauguug

SEQ ID NO: 38234 - RNA, 15 nt, Artificial Sequence
  Description of Artificial Sequence: Synthetic oligonucleotide
uuuuaaucuuuguga

SEQ ID NO: 38235 - RNA, 14 nt, Artificial Sequence
  Description of Artificial Sequence: Synthetic oligonucleotide
uuaaucuuugugac

SEQ ID NO: 38236 - RNA, 13 nt, Artificial Sequence
  Description of Artificial Sequence: Synthetic oligonucleotide
gcugcuuaugucu

SEQ ID NO: 38237 - RNA, 14 nt, Artificial Sequence
  Description of Artificial Sequence: Synthetic oligonucleotide
aaguguuucagaag

SEQ ID NO: 38238 - RNA, 13 nt, Artificial Sequence
  Description of Artificial Sequence: Synthetic oligonucleotide
gaccaucaauaag

SEQ ID NO: 38239 - RNA, 13 nt, Artificial Sequence
  Description of Artificial Sequence: Synthetic oligonucleotide
ccaucaauaagga

SEQ ID NO: 38240 - RNA, 14 nt, Artificial Sequence
  Description of Artificial Sequence: Synthetic oligonucleotide
ucaauaaggaagaa

SEQ ID NO: 38241 - RNA, 14 nt, Artificial Sequence
  Description of Artificial Sequence: Synthetic oligonucleotide
aauaaggaagaagc

SEQ ID NO: 38242 - RNA, 13 nt, Artificial Sequence
  Description of Artificial Sequence: Synthetic oligonucleotide
aggaagaagcccu

SEQ ID NO: 38243 - RNA, 13 nt, Artificial Sequence
  Description of Artificial Sequence: Synthetic oligonucleotide
gcauaacuaaagg

SEQ ID NO: 38244 - RNA, 14 nt, Artificial Sequence
  Description of Artificial Sequence: Synthetic oligonucleotide
cauaacuaaaggug

SEQ ID NO: 38245 - RNA, 12 nt, Artificial Sequence
  Description of Artificial Sequence: Synthetic oligonucleotide
cuacaucacgcc

SEQ ID NO: 38246 - RNA, 12 nt, Artificial Sequence
  Description of Artificial Sequence: Synthetic oligonucleotide
acuggauuuaag

SEQ ID NO: 38247 - RNA, 12 nt, Artificial Sequence
  Description of Artificial Sequence: Synthetic oligonucleotide
cuggauuuaagc

SEQ ID NO: 38248 - RNA, 13 nt, Artificial Sequence
  Description of Artificial Sequence: Synthetic oligonucleotide
gauuuaagcagag

SEQ ID NO: 38249 - RNA, 13 nt, Artificial Sequence
  Description of Artificial Sequence: Synthetic oligonucleotide
auuuaagcagagu

SEQ ID NO: 38250 - RNA, 13 nt, Artificial Sequence
  Description of Artificial Sequence: Synthetic oligonucleotide
uuaagcagaguuc

SEQ ID NO: 38251 - RNA, 13 nt, Artificial Sequence
  Description of Artificial Sequence: Synthetic oligonucleotide
uaagcagaguuca

SEQ ID NO: 38252 - RNA, 14 nt, Artificial Sequence
  Description of Artificial Sequence: Synthetic oligonucleotide
agcagaguucaaaa

SEQ ID NO: 38253 - RNA, 12 nt, Artificial Sequence
  Description of Artificial Sequence: Synthetic oligonucleotide
cucagggucuga

SEQ ID NO: 38254 - RNA, 13 nt, Artificial Sequence
  Description of Artificial Sequence: Synthetic oligonucleotide
caagcaacuacau

SEQ ID NO: 38255 - RNA, 12 nt, Artificial Sequence
  Description of Artificial Sequence: Synthetic oligonucleotide
aucaauggcagc

SEQ ID NO: 38256 - RNA, 11 nt, Artificial Sequence
  Description of Artificial Sequence: Synthetic oligonucleotide
uuccagcccac

SEQ ID NO: 38257 - RNA, 12 nt, Artificial Sequence
  Description of Artificial Sequence: Synthetic oligonucleotide
cagcugagaaug

SEQ ID NO: 38258 - RNA, 13 nt, Artificial Sequence
  Description of Artificial Sequence: Synthetic oligonucleotide
aacguaucuccua

SEQ ID NO: 38259 - RNA, 14 nt, Artificial Sequence
  Description of Artificial Sequence: Synthetic oligonucleotide
ccuaaaauaauuuc

SEQ ID NO: 38260 - RNA, 13 nt, Artificial Sequence
  Description of Artificial Sequence: Synthetic oligonucleotide
uggaagauucagc

SEQ ID NO: 38261 - RNA, 12 nt, Artificial Sequence
  Description of Artificial Sequence: Synthetic oligonucleotide
uuaaacucuccu

SEQ ID NO: 38262 - RNA, 12 nt, Artificial Sequence
  Description of Artificial Sequence: Synthetic oligonucleotide
cagccuacaguu

SEQ ID NO: 38263 - RNA, 13 nt, Artificial Sequence
  Description of Artificial Sequence: Synthetic oligonucleotide
guuauguucaguc

SEQ ID NO: 38264 - RNA, 13 nt, Artificial Sequence
  Description of Artificial Sequence: Synthetic oligonucleotide
cacauacaaaaug

SEQ ID NO: 38265 - RNA, 9 nt, Artificial Sequence
  Description of Artificial Sequence: Synthetic oligonucleotide
uccuuuugc

SEQ ID NO: 38266 - RNA, 12 nt, Artificial Sequence
  Description of Artificial Sequence: Synthetic oligonucleotide
ugaccugugaag

SEQ ID NO: 38267 - RNA, 12 nt, Artificial Sequence
  Description of Artificial Sequence: Synthetic oligonucleotide
cuaucucacaca

SEQ ID NO: 38268 - RNA, 13 nt, Artificial Sequence
  Description of Artificial Sequence: Synthetic oligonucleotide
uguccucaauugu

SEQ ID NO: 38269 - RNA, 12 nt, Artificial Sequence
  Description of Artificial Sequence: Synthetic oligonucleotide
aaaccguagcug

SEQ ID NO: 38270 - RNA, 12 nt, Artificial Sequence
  Description of Artificial Sequence: Synthetic oligonucleotide
uagcuggcaagc

SEQ ID NO: 38271 - RNA, 14 nt, Artificial Sequence
  Description of Artificial Sequence: Synthetic oligonucleotide
uuguaugguuaaaa

SEQ ID NO: 38272 - RNA, 14 nt, Artificial Sequence
  Description of Artificial Sequence: Synthetic oligonucleotide
ugguuaaaagaugg

SEQ ID NO: 38273 - RNA, 13 nt, Artificial Sequence
  Description of Artificial Sequence: Synthetic oligonucleotide
cagggaauuauac

SEQ ID NO: 38274 - RNA, 12 nt, Artificial Sequence
  Description of Artificial Sequence: Synthetic oligonucleotide
acaaucuugcug

SEQ ID NO: 38275 - RNA, 13 nt, Artificial Sequence
  Description of Artificial Sequence: Synthetic oligonucleotide
ccaauaaugaaga

SEQ ID NO: 38276 - RNA, 13 nt, Artificial Sequence
  Description of Artificial Sequence: Synthetic oligonucleotide
acuuuggauguuc

SEQ ID NO: 38277 - RNA, 12 nt, Artificial Sequence
  Description of Artificial Sequence: Synthetic oligonucleotide
aaugcuuccacu

SEQ ID NO: 38278 - RNA, 11 nt, Artificial Sequence
  Description of Artificial Sequence: Synthetic oligonucleotide
gagaaaguuug

SEQ ID NO: 38279 - RNA, 11 nt, Artificial Sequence
  Description of Artificial Sequence: Synthetic oligonucleotide
aaagaacuacu

SEQ ID NO: 38280 - RNA, 12 nt, Artificial Sequence
  Description of Artificial Sequence: Synthetic oligonucleotide
uuagaaauacgg

SEQ ID NO: 38281 - RNA, 12 nt, Artificial Sequence
  Description of Artificial Sequence: Synthetic oligonucleotide
aacauggguaca

SEQ ID NO: 38282 - RNA, 14 nt, Artificial Sequence
  Description of Artificial Sequence: Synthetic oligonucleotide
aaagacacagaaga

SEQ ID NO: 38283 - RNA, 11 nt, Artificial Sequence
  Description of Artificial Sequence: Synthetic oligonucleotide
uaguagggagg

SEQ ID NO: 38284 - RNA, 12 nt, Artificial Sequence
  Description of Artificial Sequence: Synthetic oligonucleotide
gccuucugcagc

SEQ ID NO: 38285 - RNA, 10 nt, Artificial Sequence
  Description of Artificial Sequence: Synthetic oligonucleotide
ggucugguac

SEQ ID NO: 38286 - RNA, 12 nt, Artificial Sequence
  Description of Artificial Sequence: Synthetic oligonucleotide
cuaguccuuccg

SEQ ID NO: 38287 - RNA, 12 nt, Artificial Sequence
  Description of Artificial Sequence: Synthetic oligonucleotide
ccagugaauauu

SEQ ID NO: 38288 - RNA, 13 nt, Artificial Sequence
  Description of Artificial Sequence: Synthetic oligonucleotide
augaauucaaguu

SEQ ID NO: 38289 - RNA, 12 nt, Artificial Sequence
  Description of Artificial Sequence: Synthetic oligonucleotide
caggacacagau

SEQ ID NO: 38290 - RNA, 12 nt, Artificial Sequence
  Description of Artificial Sequence: Synthetic oligonucleotide
cucaaagcacag

SEQ ID NO: 38291 - RNA, 10 nt, Artificial Sequence
  Description of Artificial Sequence: Synthetic oligonucleotide
accacugcca

SEQ ID NO: 38292 - RNA, 13 nt, Artificial Sequence
  Description of Artificial Sequence: Synthetic oligonucleotide
gaaacuacuagug

SEQ ID NO: 38293 - RNA, 12 nt, Artificial Sequence
  Description of Artificial Sequence: Synthetic oligonucleotide
aagucggacagc

SEQ ID NO: 38294 - RNA, 13 nt, Artificial Sequence
  Description of Artificial Sequence: Synthetic oligonucleotide
gaaagcgaaaaau

SEQ ID NO: 38295 - RNA, 13 nt, Artificial Sequence
  Description of Artificial Sequence: Synthetic oligonucleotide
cccucugauuuag

SEQ ID NO: 38296 - RNA, 12 nt, Artificial Sequence
  Description of Artificial Sequence: Synthetic oligonucleotide
ugagcuauuuaa

SEQ ID NO: 38297 - RNA, 13 nt, Artificial Sequence
  Description of Artificial Sequence: Synthetic oligonucleotide
aaaaggugaaaaa

SEQ ID NO: 38298 - RNA, 14 nt, Artificial Sequence
  Description of Artificial Sequence: Synthetic oligonucleotide
gaaaaagcacuauu

SEQ ID NO: 38299 - RNA, 12 nt, Artificial Sequence
  Description of Artificial Sequence: Synthetic oligonucleotide
ggcugaaaagaa

SEQ ID NO: 38300 - RNA, 12 nt, Artificial Sequence
  Description of Artificial Sequence: Synthetic oligonucleotide
uaaacccuuaua

SEQ ID NO: 38301 - RNA, 13 nt, Artificial Sequence
  Description of Artificial Sequence: Synthetic oligonucleotide
cauacuauuagcc

SEQ ID NO: 38302 - RNA, 12 nt, Artificial Sequence
  Description of Artificial Sequence: Synthetic oligonucleotide
gacagaagcauu

SEQ ID NO: 38303 - RNA, 14 nt, Artificial Sequence
  Description of Artificial Sequence: Synthetic oligonucleotide
agagcaaauaagau

SEQ ID NO: 38304 - RNA, 14 nt, Artificial Sequence
  Description of Artificial Sequence: Synthetic oligonucleotide
ccaacauuuuucuc

SEQ ID NO: 38305 - RNA, 15 nt, Artificial Sequence
  Description of Artificial Sequence: Synthetic oligonucleotide
uuaaguaugagaaaa

SEQ ID NO: 38306 - RNA, 14 nt, Artificial Sequence
  Description of Artificial Sequence: Synthetic oligonucleotide
caggaauaaagaug

SEQ ID NO: 38307 - RNA, 13 nt, Artificial Sequence
  Description of Artificial Sequence: Synthetic oligonucleotide
aauuugaaugacc

SEQ ID NO: 38308 - RNA, 14 nt, Artificial Sequence
  Description of Artificial Sequence: Synthetic oligonucleotide
auguauaaagauag

SEQ ID NO: 38309 - RNA, 12 nt, Artificial Sequence
  Description of Artificial Sequence: Synthetic oligonucleotide
ggcuguaacuau

SEQ ID NO: 38310 - RNA, 11 nt, Artificial Sequence
  Description of Artificial Sequence: Synthetic oligonucleotide
ucugugaagug

SEQ ID NO: 38311 - RNA, 14 nt, Artificial Sequence
  Description of Artificial Sequence: Synthetic oligonucleotide
ccuuuaaggaaaug

SEQ ID NO: 38312 - RNA, 13 nt, Artificial Sequence
  Description of Artificial Sequence: Synthetic oligonucleotide
aaggauacaaaaa

SEQ ID NO: 38313 - RNA, 12 nt, Artificial Sequence
  Description of Artificial Sequence: Synthetic oligonucleotide
agaugcaauuug

SEQ ID NO: 38314 - RNA, 12 nt, Artificial Sequence
  Description of Artificial Sequence: Synthetic oligonucleotide
guucaaaacgaa

SEQ ID NO: 38315 - RNA, 11 nt, Artificial Sequence
  Description of Artificial Sequence: Synthetic oligonucleotide
gugaaaccuca

SEQ ID NO: 38316 - RNA, 13 nt, Artificial Sequence
  Description of Artificial Sequence: Synthetic oligonucleotide
acgaaagagaagc

SEQ ID NO: 38317 - RNA, 12 nt, Artificial Sequence
  Description of Artificial Sequence: Synthetic oligonucleotide
cuccacaagcgc

SEQ ID NO: 38318 - RNA, 14 nt, Artificial Sequence
  Description of Artificial Sequence: Synthetic oligonucleotide
gagaagauuccaaa

SEQ ID NO: 38319 - RNA, 13 nt, Artificial Sequence
  Description of Artificial Sequence: Synthetic oligonucleotide
aaucuggauucaa

SEQ ID NO: 38320 - RNA, 13 nt, Artificial Sequence
  Description of Artificial Sequence: Synthetic oligonucleotide
agaacagauuuga

SEQ ID NO: 38321 - RNA, 11 nt, Artificial Sequence
  Description of Artificial Sequence: Synthetic oligonucleotide
ccagagcugug

SEQ ID NO: 38322 - RNA, 12 nt, Artificial Sequence
  Description of Artificial Sequence: Synthetic oligonucleotide
ccucagauuguu

SEQ ID NO: 38323 - RNA, 12 nt, Artificial Sequence
  Description of Artificial Sequence: Synthetic oligonucleotide
cuauuuuaauua

SEQ ID NO: 38324 - RNA, 13 nt, Artificial Sequence
  Description of Artificial Sequence: Synthetic oligonucleotide
uuuaauuuauuaa

SEQ ID NO: 38325 - RNA, 12 nt, Artificial Sequence
  Description of Artificial Sequence: Synthetic oligonucleotide
augcaguuugaa

SEQ ID NO: 38326 - RNA, 11 nt, Artificial Sequence
  Description of Artificial Sequence: Synthetic oligonucleotide
caugcugcugg

SEQ ID NO: 38327 - RNA, 13 nt, Artificial Sequence
  Description of Artificial Sequence: Synthetic oligonucleotide
agaugugcauuuc

SEQ ID NO: 38328 - RNA, 12 nt, Artificial Sequence
  Description of Artificial Sequence: Synthetic oligonucleotide
ucaaaaccugug

SEQ ID NO: 38329 - RNA, 11 nt, Artificial Sequence
  Description of Artificial Sequence: Synthetic oligonucleotide
gaaugugggua

SEQ ID NO: 38330 - RNA, 10 nt, Artificial Sequence
  Description of Artificial Sequence: Synthetic oligonucleotide
auguggguag

SEQ ID NO: 38331 - RNA, 13 nt, Artificial Sequence
  Description of Artificial Sequence: Synthetic oligonucleotide
ugaaaaugagcau

SEQ ID NO: 38332 - RNA, 13 nt, Artificial Sequence
  Description of Artificial Sequence: Synthetic oligonucleotide
uugcuuuucaugu

SEQ ID NO: 38333 - RNA, 12 nt, Artificial Sequence
  Description of Artificial Sequence: Synthetic oligonucleotide
uguauuucuaua

SEQ ID NO: 38334 - RNA, 13 nt, Artificial Sequence
  Description of Artificial Sequence: Synthetic oligonucleotide
uuugauuaauguu

SEQ ID NO: 38335 - RNA, 12 nt, Artificial Sequence
  Description of Artificial Sequence: Synthetic oligonucleotide
caacguguauag

SEQ ID NO: 38336 - RNA, 12 nt, Artificial Sequence
  Description of Artificial Sequence: Synthetic oligonucleotide
cauauccuuggc

SEQ ID NO: 38337 - RNA, 13 nt, Artificial Sequence
  Description of Artificial Sequence: Synthetic oligonucleotide
uacuaacaucugg

SEQ ID NO: 38338 - RNA, 11 nt, Artificial Sequence
  Description of Artificial Sequence: Synthetic oligonucleotide
cauaaguugug

SEQ ID NO: 38339 - RNA, 12 nt, Artificial Sequence
  Description of Artificial Sequence: Synthetic oligonucleotide
gcaucauuuugg

SEQ ID NO: 38340 - RNA, 10 nt, Artificial Sequence
  Description of Artificial Sequence: Synthetic oligonucleotide
gcucuucuua

SEQ ID NO: 38341 - RNA, 10 nt, Artificial Sequence
  Description of Artificial Sequence: Synthetic oligonucleotide
agauuagguc

SEQ ID NO: 38342 - RNA, 12 nt, Artificial Sequence
  Description of Artificial Sequence: Synthetic oligonucleotide
auggaauugaaa

SEQ ID NO: 38343 - RNA, 13 nt, Artificial Sequence
  Description of Artificial Sequence: Synthetic oligonucleotide
cacacucauuccu

SEQ ID NO: 38344 - RNA, 12 nt, Artificial Sequence
  Description of Artificial Sequence: Synthetic oligonucleotide
uguagagguaac

SEQ ID NO: 38345 - RNA, 11 nt, Artificial Sequence
  Description of Artificial Sequence: Synthetic oligonucleotide
caaccacaugc

SEQ ID NO: 38346 - RNA, 12 nt, Artificial Sequence
  Description of Artificial Sequence: Synthetic oligonucleotide
ucggaaacaagu

SEQ ID NO: 38347 - RNA, 11 nt, Artificial Sequence
  Description of Artificial Sequence: Synthetic oligonucleotide
acucccaauaa

SEQ ID NO: 38348 - RNA, 13 nt, Artificial Sequence
  Description of Artificial Sequence: Synthetic oligonucleotide
aaugcuaagaaau

SEQ ID NO: 38349 - RNA, 11 nt, Artificial Sequence
  Description of Artificial Sequence: Synthetic oligonucleotide
gucuuucucua

SEQ ID NO: 38350 - RNA, 11 nt, Artificial Sequence
  Description of Artificial Sequence: Synthetic oligonucleotide
ugaauuucagg

SEQ ID NO: 38351 - RNA, 13 nt, Artificial Sequence
  Description of Artificial Sequence: Synthetic oligonucleotide
cgauucccucuca

SEQ ID NO: 38352 - RNA, 11 nt, Artificial Sequence
  Description of Artificial Sequence: Synthetic oligonucleotide
aggaaagugaa

SEQ ID NO: 38353 - RNA, 12 nt, Artificial Sequence
  Description of Artificial Sequence: Synthetic oligonucleotide
gaggcugcaugc

SEQ ID NO: 38354 - RNA, 11 nt, Artificial Sequence
  Description of Artificial Sequence: Synthetic oligonucleotide
ucucugaacag

SEQ ID NO: 38355 - RNA, 12 nt, Artificial Sequence
  Description of Artificial Sequence: Synthetic oligonucleotide
aacuuggcugua

SEQ ID NO: 38356 - RNA, 12 nt, Artificial Sequence
  Description of Artificial Sequence: Synthetic oligonucleotide
agaagccaaaau

SEQ ID NO: 38357 - RNA, 14 nt, Artificial Sequence
  Description of Artificial Sequence: Synthetic oligonucleotide
auuaaaagaagucc

SEQ ID NO: 38358 - RNA, 14 nt, Artificial Sequence
  Description of Artificial Sequence: Synthetic oligonucleotide
gaauccggauuauc

SEQ ID NO: 38359 - RNA, 12 nt, Artificial Sequence
  Description of Artificial Sequence: Synthetic oligonucleotide
aaugugacauca

SEQ ID NO: 38360 - RNA, 13 nt, Artificial Sequence
  Description of Artificial Sequence: Synthetic oligonucleotide
caucaaagcaagu

SEQ ID NO: 38361 - RNA, 11 nt, Artificial Sequence
  Description of Artificial Sequence: Synthetic oligonucleotide
agagagagaaa

SEQ ID NO: 38362 - RNA, 13 nt, Artificial Sequence
  Description of Artificial Sequence: Synthetic oligonucleotide
ucgcuguaguauu

SEQ ID NO: 38363 - RNA, 14 nt, Artificial Sequence
  Description of Artificial Sequence: Synthetic oligonucleotide
cgcuguaguauuua

SEQ ID NO: 38364 - RNA, 13 nt, Artificial Sequence
  Description of Artificial Sequence: Synthetic oligonucleotide
auuuaagcccaua

SEQ ID NO: 38365 - RNA, 15 nt, Artificial Sequence
  Description of Artificial Sequence: Synthetic oligonucleotide
auuaaaauaaacaug

SEQ ID NO: 38366 - RNA, 12 nt, Artificial Sequence
  Description of Artificial Sequence: Synthetic oligonucleotide
cuguucugaucg

SEQ ID NO: 38367 - RNA, 16 nt, Artificial Sequence
  Description of Artificial Sequence: Synthetic oligonucleotide
aaauaauuugaacuuu

SEQ ID NO: 38368 - RNA, 12 nt, Artificial Sequence
  Description of Artificial Sequence: Synthetic oligonucleotide
ugcgaccuuaau

SEQ ID NO: 38369 - RNA, 11 nt, Artificial Sequence
  Description of Artificial Sequence: Synthetic oligonucleotide
cugagaaagcu

SEQ ID NO: 38370 - RNA, 13 nt, Artificial Sequence
  Description of Artificial Sequence: Synthetic oligonucleotide
aguaaagaugcua

SEQ ID NO: 38371 - RNA, 12 nt, Artificial Sequence
  Description of Artificial Sequence: Synthetic oligonucleotide
cugcuuaauugc

SEQ ID NO: 38372 - RNA, 14 nt, Artificial Sequence
  Description of Artificial Sequence: Synthetic oligonucleotide
uaccauaugaauga

SEQ ID NO: 38373 - RNA, 12 nt, Artificial Sequence
  Description of Artificial Sequence: Synthetic oligonucleotide
aacuuucuuauc

SEQ ID NO: 38374 - RNA, 13 nt, Artificial Sequence
  Description of Artificial Sequence: Synthetic oligonucleotide
ccuugcaugacau

SEQ ID NO: 38375 - RNA, 14 nt, Artificial Sequence
  Description of Artificial Sequence: Synthetic oligonucleotide
ugaauuuguauaug

SEQ ID NO: 38376 - RNA, 12 nt, Artificial Sequence
  Description of Artificial Sequence: Synthetic oligonucleotide
gaauccuaguag

SEQ ID NO: 38377 - RNA, 10 nt, Artificial Sequence
  Description of Artificial Sequence: Synthetic oligonucleotide
gaaagggaag

SEQ ID NO: 38378 - RNA, 11 nt, Artificial Sequence
  Description of Artificial Sequence: Synthetic oligonucleotide
uaucggcaugc

SEQ ID NO: 38379 - RNA, 12 nt, Artificial Sequence
  Description of Artificial Sequence: Synthetic oligonucleotide
caccucauagua

SEQ ID NO: 38380 - RNA, 11 nt, Artificial Sequence
  Description of Artificial Sequence: Synthetic oligonucleotide
ccagaauugcc

SEQ ID NO: 38381 - RNA, 11 nt, Artificial Sequence
  Description of Artificial Sequence: Synthetic oligonucleotide
uggugaucugg

SEQ ID NO: 38382 - RNA, 12 nt, Artificial Sequence
  Description of Artificial Sequence: Synthetic oligonucleotide
gaucuggguaau

SEQ ID NO: 38383 - RNA, 12 nt, Artificial Sequence
  Description of Artificial Sequence: Synthetic oligonucleotide
ggaugugaugaa

SEQ ID NO: 38384 - RNA, 12 nt, Artificial Sequence
  Description of Artificial Sequence: Synthetic oligonucleotide
cauuuccacagc

SEQ ID NO: 38385 - RNA, 11 nt, Artificial Sequence
  Description of Artificial Sequence: Synthetic oligonucleotide
acagcuacacc

SEQ ID NO: 38386 - RNA, 12 nt, Artificial Sequence
  Description of Artificial Sequence: Synthetic oligonucleotide
ugcaguucuuac

SEQ ID NO: 38387 - RNA, 12 nt, Artificial Sequence
  Description of Artificial Sequence: Synthetic oligonucleotide
acgagaagaaga

SEQ ID NO: 38388 - RNA, 12 nt, Artificial Sequence
  Description of Artificial Sequence: Synthetic oligonucleotide
cgagaagaagau

SEQ ID NO: 38389 - RNA, 15 nt, Artificial Sequence
  Description of Artificial Sequence: Synthetic oligonucleotide
aagaagaucauuuac

SEQ ID NO: 38390 - RNA, 11 nt, Artificial Sequence
  Description of Artificial Sequence: Synthetic oligonucleotide
agaggaagagg

SEQ ID NO: 38391 - RNA, 12 nt, Artificial Sequence
  Description of Artificial Sequence: Synthetic oligonucleotide
gaggaagaggug

SEQ ID NO: 38392 - RNA, 13 nt, Artificial Sequence
  Description of Artificial Sequence: Synthetic oligonucleotide
cuacuuugagggc

SEQ ID NO: 38393 - RNA, 12 nt, Artificial Sequence
  Description of Artificial Sequence: Synthetic oligonucleotide
agggcaucuccu

SEQ ID NO: 38394 - RNA, 10 nt, Artificial Sequence
  Description of Artificial Sequence: Synthetic oligonucleotide
ggagugauau

SEQ ID NO: 38395 - RNA, 11 nt, Artificial Sequence
  Description of Artificial Sequence: Synthetic oligonucleotide
gagugauaugg

SEQ ID NO: 38396 - RNA, 12 nt, Artificial Sequence
  Description of Artificial Sequence: Synthetic oligonucleotide
ugcaguaaagau

SEQ ID NO: 38397 - RNA, 13 nt, Artificial Sequence
  Description of Artificial Sequence: Synthetic oligonucleotide
aguaaagauccua

SEQ ID NO: 38398 - RNA, 12 nt, Artificial Sequence
  Description of Artificial Sequence: Synthetic oligonucleotide
ugacaaaggaca

SEQ ID NO: 38399 - RNA, 13 nt, Artificial Sequence
  Description of Artificial Sequence: Synthetic oligonucleotide
gcaauugugaccc

SEQ ID NO: 38400 - RNA, 12 nt, Artificial Sequence
  Description of Artificial Sequence: Synthetic oligonucleotide
aacaucauccau

SEQ ID NO: 38401 - RNA, 12 nt, Artificial Sequence
  Description of Artificial Sequence: Synthetic oligonucleotide
ugaaauccaaca

SEQ ID NO: 38402 - RNA, 15 nt, Artificial Sequence
  Description of Artificial Sequence: Synthetic oligonucleotide
aacaauauauuucuc

SEQ ID NO: 38403 - RNA, 14 nt, Artificial Sequence
  Description of Artificial Sequence: Synthetic oligonucleotide
aacaguaaagucac

SEQ ID NO: 38404 - RNA, 14 nt, Artificial Sequence
  Description of Artificial Sequence: Synthetic oligonucleotide
ugugaagaaaguaa

SEQ ID NO: 38405 - RNA, 13 nt, Artificial Sequence
  Description of Artificial Sequence: Synthetic oligonucleotide
cuuccgagccauc

SEQ ID NO: 38406 - RNA, 12 nt, Artificial Sequence
  Description of Artificial Sequence: Synthetic oligonucleotide
aauggagguuga

SEQ ID NO: 38407 - RNA, 12 nt, Artificial Sequence
  Description of Artificial Sequence: Synthetic oligonucleotide
ggagguugaaua

SEQ ID NO: 38408 - RNA, 13 nt, Artificial Sequence
  Description of Artificial Sequence: Synthetic oligonucleotide
auuuugaguuuuc

SEQ ID NO: 38409 - RNA, 12 nt, Artificial Sequence
  Description of Artificial Sequence: Synthetic oligonucleotide
uauccuguuugu

SEQ ID NO: 38410 - RNA, 11 nt, Artificial Sequence
  Description of Artificial Sequence: Synthetic oligonucleotide
ccuguuuguuc

SEQ ID NO: 38411 - RNA, 10 nt, Artificial Sequence
  Description of Artificial Sequence: Synthetic oligonucleotide
cucuacagcc

SEQ ID NO: 38412 - RNA, 12 nt, Artificial Sequence
  Description of Artificial Sequence: Synthetic oligonucleotide
ucuuccauagcu

SEQ ID NO: 38413 - RNA, 12 nt, Artificial Sequence
  Description of Artificial Sequence: Synthetic oligonucleotide
auaaucuuccug

SEQ ID NO: 38414 - RNA, 12 nt, Artificial Sequence
  Description of Artificial Sequence: Synthetic oligonucleotide
uaaucuuccugu

SEQ ID NO: 38415 - RNA, 12 nt, Artificial Sequence
  Description of Artificial Sequence: Synthetic oligonucleotide
cuucaugacuug

SEQ ID NO: 38416 - RNA, 12 nt, Artificial Sequence
  Description of Artificial Sequence: Synthetic oligonucleotide
aagagggagaga

SEQ ID NO: 38417 - RNA, 12 nt, Artificial Sequence
  Description of Artificial Sequence: Synthetic oligonucleotide
cgucuccuacca

SEQ ID NO: 38418 - RNA, 12 nt, Artificial Sequence
  Description of Artificial Sequence: Synthetic oligonucleotide
gaucaaucggcc

SEQ ID NO: 38419 - RNA, 12 nt, Artificial Sequence
  Description of Artificial Sequence: Synthetic oligonucleotide
ggacgaacaucc

SEQ ID NO: 38420 - RNA, 11 nt, Artificial Sequence
  Description of Artificial Sequence: Synthetic oligonucleotide
agggucggaac

SEQ ID NO: 38421 - RNA, 10 nt, Artificial Sequence
  Description of Artificial Sequence: Synthetic oligonucleotide
ucggaaccca

SEQ ID NO: 38422 - RNA, 11 nt, Artificial Sequence
  Description of Artificial Sequence: Synthetic oligonucleotide
acccaagcuua

SEQ ID NO: 38423 - RNA, 14 nt, Artificial Sequence
  Description of Artificial Sequence: Synthetic oligonucleotide
gaacuuuaagcaac

SEQ ID NO: 38424 - RNA, 11 nt, Artificial Sequence
  Description of Artificial Sequence: Synthetic oligonucleotide
acuauucagug

SEQ ID NO: 38425 - RNA, 11 nt, Artificial Sequence
  Description of Artificial Sequence: Synthetic oligonucleotide
cuauucagugg

SEQ ID NO: 38426 - RNA, 13 nt, Artificial Sequence
  Description of Artificial Sequence: Synthetic oligonucleotide
aaacacagauaac

SEQ ID NO: 38427 - RNA, 12 nt, Artificial Sequence
  Description of Artificial Sequence: Synthetic oligonucleotide
cuuaagaaaaga

SEQ ID NO: 38428 - RNA, 12 nt, Artificial Sequence
  Description of Artificial Sequence: Synthetic oligonucleotide
cugaaggagugu

SEQ ID NO: 38429 - RNA, 10 nt, Artificial Sequence
  Description of Artificial Sequence: Synthetic oligonucleotide
ucaccgcggg

SEQ ID NO: 38430 - RNA, 14 nt, Artificial Sequence
  Description of Artificial Sequence: Synthetic oligonucleotide
agcagaaauaagcg

SEQ ID NO: 38431 - RNA, 12 nt, Artificial Sequence
  Description of Artificial Sequence: Synthetic oligonucleotide
aagcgugccguu

SEQ ID NO: 38432 - RNA, 12 nt, Artificial Sequence
  Description of Artificial Sequence: Synthetic oligonucleotide
agaaacagucac

SEQ ID NO: 38433 - RNA, 12 nt, Artificial Sequence
  Description of Artificial Sequence: Synthetic oligonucleotide
agaggaagaagg

SEQ ID NO: 38434 - RNA, 14 nt, Artificial Sequence
  Description of Artificial Sequence: Synthetic oligonucleotide
uguauucaaaauau

SEQ ID NO: 38435 - RNA, 13 nt, Artificial Sequence
  Description of Artificial Sequence: Synthetic oligonucleotide
auuuuccucccuu

SEQ ID NO: 38436 - RNA, 13 nt, Artificial Sequence
  Description of Artificial Sequence: Synthetic oligonucleotide
caaagaaagauag

SEQ ID NO: 38437 - RNA, 12 nt, Artificial Sequence
  Description of Artificial Sequence: Synthetic oligonucleotide
aagaaagauaga

SEQ ID NO: 38438 - RNA, 13 nt, Artificial Sequence
  Description of Artificial Sequence: Synthetic oligonucleotide
gaaagcauuuguu

SEQ ID NO: 38439 - RNA, 13 nt, Artificial Sequence
  Description of Artificial Sequence: Synthetic oligonucleotide
ugaguuaaacgaa

SEQ ID NO: 38440 - RNA, 12 nt, Artificial Sequence
  Description of Artificial Sequence: Synthetic oligonucleotide
acugauacagaa

SEQ ID NO: 38441 - RNA, 12 nt, Artificial Sequence
  Description of Artificial Sequence: Synthetic oligonucleotide
auauuauauaua

SEQ ID NO: 38442 - RNA, 12 nt, Artificial Sequence
  Description of Artificial Sequence: Synthetic oligonucleotide
auuauauauaua

SEQ ID NO: 38443 - RNA, 12 nt, Artificial Sequence
  Description of Artificial Sequence: Synthetic oligonucleotide
ucacuggaugua

SEQ ID NO: 38444 - RNA, 12 nt, Artificial Sequence
  Description of Artificial Sequence: Synthetic oligonucleotide
cagggaagagga

SEQ ID NO: 38445 - RNA, 15 nt, Artificial Sequence
  Description of Artificial Sequence: Synthetic oligonucleotide
augaucuuuuuuuug

SEQ ID NO: 38446 - RNA, 11 nt, Artificial Sequence
  Description of Artificial Sequence: Synthetic oligonucleotide
aguucacggcc

SEQ ID NO: 38447 - RNA, 13 nt, Artificial Sequence
  Description of Artificial Sequence: Synthetic oligonucleotide
caccaucacacca

SEQ ID NO: 38448 - RNA, 11 nt, Artificial Sequence
  Description of Artificial Sequence: Synthetic oligonucleotide
ccugcggguuu

SEQ ID NO: 38449 - RNA, 10 nt, Artificial Sequence
  Description of Artificial Sequence: Synthetic oligonucleotide
auccaguuug

SEQ ID NO: 38450 - RNA, 13 nt, Artificial Sequence
  Description of Artificial Sequence: Synthetic oligonucleotide
guuaaggacuucu

SEQ ID NO: 38451 - RNA, 13 nt, Artificial Sequence
  Description of Artificial Sequence: Synthetic oligonucleotide
cagugggacagag

SEQ ID NO: 38452 - RNA, 14 nt, Artificial Sequence
  Description of Artificial Sequence: Synthetic oligonucleotide
aauuuguuauugug

SEQ ID NO: 38453 - RNA, 13 nt, Artificial Sequence
  Description of Artificial Sequence: Synthetic oligonucleotide
uucaaaugcauuu

SEQ ID NO: 38454 - RNA, 10 nt, Artificial Sequence
  Description of Artificial Sequence: Synthetic oligonucleotide
caggaaagcc

SEQ ID NO: 38455 - RNA, 11 nt, Artificial Sequence
  Description of Artificial Sequence: Synthetic oligonucleotide
aggaaagcccu

SEQ ID NO: 38456 - RNA, 12 nt, Artificial Sequence
  Description of Artificial Sequence: Synthetic oligonucleotide
cccagcauggcc

SEQ ID NO: 38457 - RNA, 11 nt, Artificial Sequence
  Description of Artificial Sequence: Synthetic oligonucleotide
cuucucccuga

SEQ ID NO: 38458 - RNA, 12 nt, Artificial Sequence
  Description of Artificial Sequence: Synthetic oligonucleotide
gaagaagcccuu

SEQ ID NO: 38459 - RNA, 12 nt, Artificial Sequence
  Description of Artificial Sequence: Synthetic oligonucleotide
agaagcccuuca

SEQ ID NO: 38460 - RNA, 11 nt, Artificial Sequence
  Description of Artificial Sequence: Synthetic oligonucleotide
gcccuucagcg

SEQ ID NO: 38461 - RNA, 11 nt, Artificial Sequence
  Description of Artificial Sequence: Synthetic oligonucleotide
ccuucagcggc

SEQ ID NO: 38462 - RNA, 12 nt, Artificial Sequence
  Description of Artificial Sequence: Synthetic oligonucleotide
ucagcggccagu

SEQ ID NO: 38463 - RNA, 12 nt, Artificial Sequence
  Description of Artificial Sequence: Synthetic oligonucleotide
ugaaaagcuccg

SEQ ID NO: 38464 - RNA, 11 nt, Artificial Sequence
  Description of Artificial Sequence: Synthetic oligonucleotide
aaaagcuccgg

SEQ ID NO: 38465 - RNA, 13 nt, Artificial Sequence
  Description of Artificial Sequence: Synthetic oligonucleotide
agucaacagucug

SEQ ID NO: 38466 - RNA, 13 nt, Artificial Sequence
  Description of Artificial Sequence: Synthetic oligonucleotide
cagaguucaaaag

SEQ ID NO: 38467 - RNA, 13 nt, Artificial Sequence
  Description of Artificial Sequence: Synthetic oligonucleotide
agaguucaaaagc

SEQ ID NO: 38468 - RNA, 12 nt, Artificial Sequence
  Description of Artificial Sequence: Synthetic oligonucleotide
uucaaaagcccu

SEQ ID NO: 38469 - RNA, 12 nt, Artificial Sequence
  Description of Artificial Sequence: Synthetic oligonucleotide
ucaaaagcccuu

SEQ ID NO: 38470 - RNA, 12 nt, Artificial Sequence
  Description of Artificial Sequence: Synthetic oligonucleotide
aaaagcccuuca

SEQ ID NO: 38471 - RNA, 12 nt, Artificial Sequence
  Description of Artificial Sequence: Synthetic oligonucleotide
aaagcccuucag

SEQ ID NO: 38472 - RNA, 13 nt, Artificial Sequence
  Description of Artificial Sequence: Synthetic oligonucleotide
gugaagccgcucg

SEQ ID NO: 38473 - RNA, 12 nt, Artificial Sequence
  Description of Artificial Sequence: Synthetic oligonucleotide
cacgccagucaa

SEQ ID NO: 38474 - RNA, 13 nt, Artificial Sequence
  Description of Artificial Sequence: Synthetic oligonucleotide
uucuuggugcgug

SEQ ID NO: 38475 - RNA, 14 nt, Artificial Sequence
  Description of Artificial Sequence: Synthetic oligonucleotide
auuggauucaucag

SEQ ID NO: 38476 - RNA, 13 nt, Artificial Sequence
  Description of Artificial Sequence: Synthetic oligonucleotide
uggaauaccuaag

SEQ ID NO: 38477 - RNA, 12 nt, Artificial Sequence
  Description of Artificial Sequence: Synthetic oligonucleotide
auuugaggcuca

SEQ ID NO: 38478 - RNA, 11 nt, Artificial Sequence
  Description of Artificial Sequence: Synthetic oligonucleotide
ucuacaauugg

SEQ ID NO: 38479 - RNA, 12 nt, Artificial Sequence
  Description of Artificial Sequence: Synthetic oligonucleotide
uaguuaggagcc

SEQ ID NO: 38480 - RNA, 13 nt, Artificial Sequence
  Description of Artificial Sequence: Synthetic oligonucleotide
agucaauauccac

SEQ ID NO: 38481 - RNA, 13 nt, Artificial Sequence
  Description of Artificial Sequence: Synthetic oligonucleotide
auguucagucaca

SEQ ID NO: 38482 - RNA, 12 nt, Artificial Sequence
  Description of Artificial Sequence: Synthetic oligonucleotide
acacacacauac

SEQ ID NO: 38483 - RNA, 12 nt, Artificial Sequence
  Description of Artificial Sequence: Synthetic oligonucleotide
uuccuuuugcuu

SEQ ID NO: 38484 - RNA, 16 nt, Artificial Sequence
  Description of Artificial Sequence: Synthetic oligonucleotide
uuuuaaaguaauuuuu

SEQ ID NO: 38485 - RNA, 13 nt, Artificial Sequence
  Description of Artificial Sequence: Synthetic oligonucleotide
caacagucaaugg

SEQ ID NO: 38486 - RNA, 13 nt, Artificial Sequence
  Description of Artificial Sequence: Synthetic oligonucleotide
ucgacaaaccaau

SEQ ID NO: 38487 - RNA, 12 nt, Artificial Sequence
  Description of Artificial Sequence: Synthetic oligonucleotide
acugcuaccacu

SEQ ID NO: 38488 - RNA, 13 nt, Artificial Sequence
  Description of Artificial Sequence: Synthetic oligonucleotide
gcaagcggucuua

SEQ ID NO: 38489 - RNA, 13 nt, Artificial Sequence
  Description of Artificial Sequence: Synthetic oligonucleotide
ggucuuaccggcu

SEQ ID NO: 38490 - RNA, 11 nt, Artificial Sequence
  Description of Artificial Sequence: Synthetic oligonucleotide
gauggguuacc

SEQ ID NO: 38491 - RNA, 11 nt, Artificial Sequence
  Description of Artificial Sequence: Synthetic oligonucleotide
guuaccugcga

SEQ ID NO: 38492 - RNA, 12 nt, Artificial Sequence
  Description of Artificial Sequence: Synthetic oligonucleotide
aaucuugcugag

SEQ ID NO: 38493 - RNA, 13 nt, Artificial Sequence
  Description of Artificial Sequence: Synthetic oligonucleotide
agcauaaaacagu

SEQ ID NO: 38494 - RNA, 12 nt, Artificial Sequence
  Description of Artificial Sequence: Synthetic oligonucleotide
guccuuuauccu

SEQ ID NO: 38495 - RNA, 12 nt, Artificial Sequence
  Description of Artificial Sequence: Synthetic oligonucleotide
caacgcaaguug

SEQ ID NO: 38496 - RNA, 13 nt, Artificial Sequence
  Description of Artificial Sequence: Synthetic oligonucleotide
aaacugaaaccau

SEQ ID NO: 38497 - RNA, 14 nt, Artificial Sequence
  Description of Artificial Sequence: Synthetic oligonucleotide
acuuuguuaaauau

SEQ ID NO: 38498 - RNA, 14 nt, Artificial Sequence
  Description of Artificial Sequence: Synthetic oligonucleotide
guauauuaaaaguu

SEQ ID NO: 38499 - RNA, 13 nt, Artificial Sequence
  Description of Artificial Sequence: Synthetic oligonucleotide
guuuugacuuaac

SEQ ID NO: 38500 - RNA, 13 nt, Artificial Sequence
  Description of Artificial Sequence: Synthetic oligonucleotide
gcaaacucagcac

SEQ ID NO: 38501 - RNA, 11 nt, Artificial Sequence
  Description of Artificial Sequence: Synthetic oligonucleotide
ugcugaccuca

SEQ ID NO: 38502 - RNA, 14 nt, Artificial Sequence
  Description of Artificial Sequence: Synthetic oligonucleotide
uuuauucagaucgc

SEQ ID NO: 38503 - RNA, 13 nt, Artificial Sequence
  Description of Artificial Sequence: Synthetic oligonucleotide
aggguucugggau

SEQ ID NO: 38504 - RNA, 15 nt, Artificial Sequence
  Description of Artificial Sequence: Synthetic oligonucleotide
auauuggaaauuaug

SEQ ID NO: 38505 - RNA, 13 nt, Artificial Sequence
  Description of Artificial Sequence: Synthetic oligonucleotide
auggaagcacuag

SEQ ID NO: 38506 - RNA, 13 nt, Artificial Sequence
  Description of Artificial Sequence: Synthetic oligonucleotide
guuuuuaugugga

SEQ ID NO: 38507 - RNA, 12 nt, Artificial Sequence
  Description of Artificial Sequence: Synthetic oligonucleotide
ggaauugguaga

SEQ ID NO: 38508 - RNA, 13 nt, Artificial Sequence
  Description of Artificial Sequence: Synthetic oligonucleotide
uuagacuuggaga

SEQ ID NO: 38509 - RNA, 13 nt, Artificial Sequence
  Description of Artificial Sequence: Synthetic oligonucleotide
uuacaguauucca

SEQ ID NO: 38510 - RNA, 15 nt, Artificial Sequence
  Description of Artificial Sequence: Synthetic oligonucleotide
ccacugaugaauuaa

SEQ ID NO: 38511 - RNA, 12 nt, Artificial Sequence
  Description of Artificial Sequence: Synthetic oligonucleotide
ccacaucaucac

SEQ ID NO: 38512 - RNA, 13 nt, Artificial Sequence
  Description of Artificial Sequence: Synthetic oligonucleotide
cucaccaaacaga

SEQ ID NO: 38513 - RNA, 12 nt, Artificial Sequence
  Description of Artificial Sequence: Synthetic oligonucleotide
ggaacaugaugg

SEQ ID NO: 38514 - RNA, 12 nt, Artificial Sequence
  Description of Artificial Sequence: Synthetic oligonucleotide
cauguagacugc

SEQ ID NO: 38515 - RNA, 13 nt, Artificial Sequence
  Description of Artificial Sequence: Synthetic oligonucleotide
ggaucuauuuaug

SEQ ID NO: 38516 - RNA, 12 nt, Artificial Sequence
  Description of Artificial Sequence: Synthetic oligonucleotide
gcacuauuauca

SEQ ID NO: 38517 - RNA, 11 nt, Artificial Sequence
  Description of Artificial Sequence: Synthetic oligonucleotide
aucaguucugc

SEQ ID NO: 38518 - RNA, 13 nt, Artificial Sequence
  Description of Artificial Sequence: Synthetic oligonucleotide
agauuaaaccuac

SEQ ID NO: 38519 - RNA, 13 nt, Artificial Sequence
  Description of Artificial Sequence: Synthetic oligonucleotide
auaaaauccuucu

SEQ ID NO: 38520 - RNA, 12 nt, Artificial Sequence
  Description of Artificial Sequence: Synthetic oligonucleotide
aaugcuguagac

SEQ ID NO: 38521 - RNA, 13 nt, Artificial Sequence
  Description of Artificial Sequence: Synthetic oligonucleotide
uugauaggaauag

SEQ ID NO: 38522 - RNA, 11 nt, Artificial Sequence
  Description of Artificial Sequence: Synthetic oligonucleotide
aauggcccuga

SEQ ID NO: 38523 - RNA, 11 nt, Artificial Sequence
  Description of Artificial Sequence: Synthetic oligonucleotide
uuccucaagca

SEQ ID NO: 38524 - RNA, 10 nt, Artificial Sequence
  Description of Artificial Sequence: Synthetic oligonucleotide
guucagccca

SEQ ID NO: 38525 - RNA, 11 nt, Artificial Sequence
  Description of Artificial Sequence: Synthetic oligonucleotide
gcugcugaacc

SEQ ID NO: 38526 - RNA, 12 nt, Artificial Sequence
  Description of Artificial Sequence: Synthetic oligonucleotide
aaguucucuuca

SEQ ID NO: 38527 - RNA, 11 nt, Artificial Sequence
  Description of Artificial Sequence: Synthetic oligonucleotide
ccagccuagag

SEQ ID NO: 38528 - RNA, 13 nt, Artificial Sequence
  Description of Artificial Sequence: Synthetic oligonucleotide
cucugugaagugu

SEQ ID NO: 38529 - RNA, 14 nt, Artificial Sequence
  Description of Artificial Sequence: Synthetic oligonucleotide
ugagaaaauuucaa

SEQ ID NO: 38530 - RNA, 11 nt, Artificial Sequence
  Description of Artificial Sequence: Synthetic oligonucleotide
aauccuccuga

SEQ ID NO: 38531 - RNA, 12 nt, Artificial Sequence
  Description of Artificial Sequence: Synthetic oligonucleotide
gugacaucauau

SEQ ID NO: 38532 - RNA, 13 nt, Artificial Sequence
  Description of Artificial Sequence: Synthetic oligonucleotide
aaucuucaucaua

SEQ ID NO: 38533 - RNA, 13 nt, Artificial Sequence
  Description of Artificial Sequence: Synthetic oligonucleotide
gacuagcuauuaa

SEQ ID NO: 38534 - RNA, 14 nt, Artificial Sequence
  Description of Artificial Sequence: Synthetic oligonucleotide
ucucuacuaaaaau

SEQ ID NO: 38535 - RNA, 12 nt, Artificial Sequence
  Description of Artificial Sequence: Synthetic oligonucleotide
ucuaucucgccu

SEQ ID NO: 38536 - RNA, 13 nt, Artificial Sequence
  Description of Artificial Sequence: Synthetic oligonucleotide
cuucgguccaguu

SEQ ID NO: 38537 - RNA, 11 nt, Artificial Sequence
  Description of Artificial Sequence: Synthetic oligonucleotide
gauguagccgc

SEQ ID NO: 38538 - RNA, 12 nt, Artificial Sequence
  Description of Artificial Sequence: Synthetic oligonucleotide
ugaggagacuug

SEQ ID NO: 38539 - RNA, 12 nt, Artificial Sequence
  Description of Artificial Sequence: Synthetic oligonucleotide
gaguagugagga

SEQ ID NO: 38540 - RNA, 14 nt, Artificial Sequence
  Description of Artificial Sequence: Synthetic oligonucleotide
cagaugaguacaaa

SEQ ID NO: 38541 - RNA, 13 nt, Artificial Sequence
  Description of Artificial Sequence: Synthetic oligonucleotide
guuguuaaugggc

SEQ ID NO: 38542 - RNA, 13 nt, Artificial Sequence
  Description of Artificial Sequence: Synthetic oligonucleotide
uuuuuaauuuauu

SEQ ID NO: 38543 - RNA, 12 nt, Artificial Sequence
  Description of Artificial Sequence: Synthetic oligonucleotide
uauuuaaauaug

SEQ ID NO: 38544 - RNA, 13 nt, Artificial Sequence
  Description of Artificial Sequence: Synthetic oligonucleotide
uauccuuuguuuc

SEQ ID NO: 38545 - RNA, 14 nt, Artificial Sequence
  Description of Artificial Sequence: Synthetic oligonucleotide
cgucuaaguguuug

SEQ ID NO: 38546 - RNA, 12 nt, Artificial Sequence
  Description of Artificial Sequence: Synthetic oligonucleotide
accugugacaaa

SEQ ID NO: 38547 - RNA, 13 nt, Artificial Sequence
  Description of Artificial Sequence: Synthetic oligonucleotide
ccaggcugaauua

SEQ ID NO: 38548 - RNA, 14 nt, Artificial Sequence
  Description of Artificial Sequence: Synthetic oligonucleotide
gucauucuuacaau

SEQ ID NO: 38549 - RNA, 15 nt, Artificial Sequence
  Description of Artificial Sequence: Synthetic oligonucleotide
ucauucuuacaauug

SEQ ID NO: 38550 - RNA, 12 nt, Artificial Sequence
  Description of Artificial Sequence: Synthetic oligonucleotide
cagagaguguac

SEQ ID NO: 38551 - RNA, 12 nt, Artificial Sequence
  Description of Artificial Sequence: Synthetic oligonucleotide
agaacucagcag

SEQ ID NO: 38552 - RNA, 13 nt, Artificial Sequence
  Description of Artificial Sequence: Synthetic oligonucleotide
uuuauuuucagua

SEQ ID NO: 38553 - RNA, 12 nt, Artificial Sequence
  Description of Artificial Sequence: Synthetic oligonucleotide
ucuuaaauggaa

SEQ ID NO: 38554 - RNA, 13 nt, Artificial Sequence
  Description of Artificial Sequence: Synthetic oligonucleotide
ugccuaaaauugu

SEQ ID NO: 38555 - RNA, 12 nt, Artificial Sequence
  Description of Artificial Sequence: Synthetic oligonucleotide
agacugugagcu

SEQ ID NO: 38556 - RNA, 14 nt, Artificial Sequence
  Description of Artificial Sequence: Synthetic oligonucleotide
ugcuuuuuauuaau

SEQ ID NO: 38557 - RNA, 13 nt, Artificial Sequence
  Description of Artificial Sequence: Synthetic oligonucleotide
cucuucuuacauu

SEQ ID NO: 38558 - RNA, 15 nt, Artificial Sequence
  Description of Artificial Sequence: Synthetic oligonucleotide
cauuuguaaaaaugu

SEQ ID NO: 38559 - RNA, 15 nt, Artificial Sequence
  Description of Artificial Sequence: Synthetic oligonucleotide
aucuuaauucauauu

SEQ ID NO: 38560 - RNA, 13 nt, Artificial Sequence
  Description of Artificial Sequence: Synthetic oligonucleotide
gaacuaaucauga

SEQ ID NO: 38561 - RNA, 12 nt, Artificial Sequence
  Description of Artificial Sequence: Synthetic oligonucleotide
ucugcucuuggg

SEQ ID NO: 38562 - RNA, 13 nt, Artificial Sequence
  Description of Artificial Sequence: Synthetic oligonucleotide
caguagcuuugag

SEQ ID NO: 38563 - RNA, 14 nt, Artificial Sequence
  Description of Artificial Sequence: Synthetic oligonucleotide
cacguaauauuuca

SEQ ID NO: 38564 - RNA, 13 nt, Artificial Sequence
  Description of Artificial Sequence: Synthetic oligonucleotide
uauucucuucacu

SEQ ID NO: 38565 - RNA, 14 nt, Artificial Sequence
  Description of Artificial Sequence: Synthetic oligonucleotide
cuaaugcuaagaaa

SEQ ID NO: 38566 - RNA, 12 nt, Artificial Sequence
  Description of Artificial Sequence: Synthetic oligonucleotide
gcugaaaaucaa

SEQ ID NO: 38567 - RNA, 14 nt, Artificial Sequence
  Description of Artificial Sequence: Synthetic oligonucleotide
aauaugauuacuuu

SEQ ID NO: 38568 - RNA, 14 nt, Artificial Sequence
  Description of Artificial Sequence: Synthetic oligonucleotide
cauuuuguucuaca

SEQ ID NO: 38569 - RNA, 12 nt, Artificial Sequence
  Description of Artificial Sequence: Synthetic oligonucleotide
cccgggacucuc

SEQ ID NO: 38570 - RNA, 14 nt, Artificial Sequence
  Description of Artificial Sequence: Synthetic oligonucleotide
ccuuuaaaguaaag

SEQ ID NO: 38571 - RNA, 13 nt, Artificial Sequence
  Description of Artificial Sequence: Synthetic oligonucleotide
ucuggaagccugg

SEQ ID NO: 38572 - RNA, 14 nt, Artificial Sequence
  Description of Artificial Sequence: Synthetic oligonucleotide
aaaacaaaagagag

SEQ ID NO: 38573 - RNA, 13 nt, Artificial Sequence
  Description of Artificial Sequence: Synthetic oligonucleotide
aucaguuaugccg

SEQ ID NO: 38574 - RNA, 13 nt, Artificial Sequence
  Description of Artificial Sequence: Synthetic oligonucleotide
uaaaagaagucca

SEQ ID NO: 38575 - RNA, 11 nt, Artificial Sequence
  Description of Artificial Sequence: Synthetic oligonucleotide
aggugagguua

SEQ ID NO: 38576 - RNA, 11 nt, Artificial Sequence
  Description of Artificial Sequence: Synthetic oligonucleotide
gggaagaggac

SEQ ID NO: 38577 - RNA, 13 nt, Artificial Sequence
  Description of Artificial Sequence: Synthetic oligonucleotide
aagcaaguauugu

SEQ ID NO: 38578 - RNA, 12 nt, Artificial Sequence
  Description of Artificial Sequence: Synthetic oligonucleotide
auuguagcacuc

SEQ ID NO: 38579 - RNA, 14 nt, Artificial Sequence
  Description of Artificial Sequence: Synthetic oligonucleotide
acaaaaccacaaau

SEQ ID NO: 38580 - RNA, 12 nt, Artificial Sequence
  Description of Artificial Sequence: Synthetic oligonucleotide
uaagcccauaca

SEQ ID NO: 38581 - RNA, 11 nt, Artificial Sequence
  Description of Artificial Sequence: Synthetic oligonucleotide
agcccauacag

SEQ ID NO: 38582 - RNA, 12 nt, Artificial Sequence
  Description of Artificial Sequence: Synthetic oligonucleotide
cagaaaccuucc

SEQ ID NO: 38583 - RNA, 10 nt, Artificial Sequence
  Description of Artificial Sequence: Synthetic oligonucleotide
guauaccuac

SEQ ID NO: 38584 - RNA, 13 nt, Artificial Sequence
  Description of Artificial Sequence: Synthetic oligonucleotide
gccaguuuucgga

SEQ ID NO: 38585 - RNA, 9 nt, Artificial Sequence
  Description of Artificial Sequence: Synthetic oligonucleotide
ggaacaggg

SEQ ID NO: 38586 - RNA, 13 nt, Artificial Sequence
  Description of Artificial Sequence: Synthetic oligonucleotide
uuaacuuuccagu

SEQ ID NO: 38587 - RNA, 14 nt, Artificial Sequence
  Description of Artificial Sequence: Synthetic oligonucleotide
aaaguuugguuuug

SEQ ID NO: 38588 - RNA, 12 nt, Artificial Sequence
  Description of Artificial Sequence: Synthetic oligonucleotide
cuucccacugua

SEQ ID NO: 38589 - RNA, 13 nt, Artificial Sequence
  Description of Artificial Sequence: Synthetic oligonucleotide
ugauaccauauga

SEQ ID NO: 38590 - RNA, 11 nt, Artificial Sequence
  Description of Artificial Sequence: Synthetic oligonucleotide
aacaugggcug

SEQ ID NO: 38591 - RNA, 13 nt, Artificial Sequence
  Description of Artificial Sequence: Synthetic oligonucleotide
caacuuuuucaua

SEQ ID NO: 38592 - RNA, 12 nt, Artificial Sequence
  Description of Artificial Sequence: Synthetic oligonucleotide
caugaggccgga

SEQ ID NO: 38593 - RNA, 11 nt, Artificial Sequence
  Description of Artificial Sequence: Synthetic oligonucleotide
acugcauuugu

SEQ ID NO: 38594 - RNA, 13 nt, Artificial Sequence
  Description of Artificial Sequence: Synthetic oligonucleotide
aauguuuacuacc

SEQ ID NO: 38595 - RNA, 15 nt, Artificial Sequence
  Description of Artificial Sequence: Synthetic oligonucleotide
aauuuuuugaugaaa

SEQ ID NO: 38596 - RNA, 14 nt, Artificial Sequence
  Description of Artificial Sequence: Synthetic oligonucleotide
cagugugugaauuu

SEQ ID NO: 38597 - RNA, 13 nt, Artificial Sequence
  Description of Artificial Sequence: Synthetic oligonucleotide
gagcaauguaugu

SEQ ID NO: 38598 - RNA, 14 nt, Artificial Sequence
  Description of Artificial Sequence: Synthetic oligonucleotide
aaagcacauauaua

SEQ ID NO: 38599 - RNA, 14 nt, Artificial Sequence
  Description of Artificial Sequence: Synthetic oligonucleotide
guaauaguuucucc

SEQ ID NO: 38600 - RNA, 13 nt, Artificial Sequence
  Description of Artificial Sequence: Synthetic oligonucleotide
aguuucuccaaau

SEQ ID NO: 38601 - RNA, 13 nt, Artificial Sequence
  Description of Artificial Sequence: Synthetic oligonucleotide
uacuuccuagaaa

SEQ ID NO: 38602 - RNA, 13 nt, Artificial Sequence
  Description of Artificial Sequence: Synthetic oligonucleotide
uacaccauauaug

SEQ ID NO: 38603 - RNA, 14 nt, Artificial Sequence
  Description of Artificial Sequence: Synthetic oligonucleotide
auauaugaauggag

SEQ ID NO: 38604 - RNA, 13 nt, Artificial Sequence
  Description of Artificial Sequence: Synthetic oligonucleotide
acgagaagaagau

SEQ ID NO: 38605 - RNA, 13 nt, Artificial Sequence
  Description of Artificial Sequence: Synthetic oligonucleotide
ucauuuacaggga

SEQ ID NO: 38606 - RNA, 13 nt, Artificial Sequence
  Description of Artificial Sequence: Synthetic oligonucleotide
cauuuacagggac

SEQ ID NO: 38607 - RNA, 10 nt, Artificial Sequence
  Description of Artificial Sequence: Synthetic oligonucleotide
agggaccuga

SEQ ID NO: 38608 - RNA, 14 nt, Artificial Sequence
  Description of Artificial Sequence: Synthetic oligonucleotide
uguuugacugcauc

SEQ ID NO: 38609 - RNA, 13 nt, Artificial Sequence
  Description of Artificial Sequence: Synthetic oligonucleotide
uuugacugcaucg

SEQ ID NO: 38610 - RNA, 12 nt, Artificial Sequence
  Description of Artificial Sequence: Synthetic oligonucleotide
gaguucacaggg

SEQ ID NO: 38611 - RNA, 13 nt, Artificial Sequence
  Description of Artificial Sequence: Synthetic oligonucleotide
ggcaccucugucc

SEQ ID NO: 38612 - RNA, 15 nt, Artificial Sequence
  Description of Artificial Sequence: Synthetic oligonucleotide
gguuugucuuuuuaa

SEQ ID NO: 38613 - RNA, 14 nt, Artificial Sequence
  Description of Artificial Sequence: Synthetic oligonucleotide
uuugucuuuuuaag

SEQ ID NO: 38614 - RNA, 13 nt, Artificial Sequence
  Description of Artificial Sequence: Synthetic oligonucleotide
ccuaaagguuguc

SEQ ID NO: 38615 - RNA, 12 nt, Artificial Sequence
  Description of Artificial Sequence: Synthetic oligonucleotide
aagguugucgac

SEQ ID NO: 38616 - RNA, 13 nt, Artificial Sequence
  Description of Artificial Sequence: Synthetic oligonucleotide
accuggcaauugu

SEQ ID NO: 38617 - RNA, 12 nt, Artificial Sequence
  Description of Artificial Sequence: Synthetic oligonucleotide
aguggugcgagg

SEQ ID NO: 38618 - RNA, 13 nt, Artificial Sequence
  Description of Artificial Sequence: Synthetic oligonucleotide
agagacaugaaau

SEQ ID NO: 38619 - RNA, 13 nt, Artificial Sequence
  Description of Artificial Sequence: Synthetic oligonucleotide
auauauuucucca

SEQ ID NO: 38620 - RNA, 10 nt, Artificial Sequence
  Description of Artificial Sequence: Synthetic oligonucleotide
caugaaggcu

SEQ ID NO: 38621 - RNA, 11 nt, Artificial Sequence
  Description of Artificial Sequence: Synthetic oligonucleotide
gcuggaguggu

SEQ ID NO: 38622 - RNA, 11 nt, Artificial Sequence
  Description of Artificial Sequence: Synthetic oligonucleotide
aggaagagagg

SEQ ID NO: 38623 - RNA, 12 nt, Artificial Sequence
  Description of Artificial Sequence: Synthetic oligonucleotide
cuugcaucgggc

SEQ ID NO: 38624 - RNA, 13 nt, Artificial Sequence
  Description of Artificial Sequence: Synthetic oligonucleotide
auauccuacugug

SEQ ID NO: 38625 - RNA, 13 nt, Artificial Sequence
  Description of Artificial Sequence: Synthetic oligonucleotide
uccuacuguguaa

SEQ ID NO: 38626 - RNA, 12 nt, Artificial Sequence
  Description of Artificial Sequence: Synthetic oligonucleotide
ccuuguagugua

SEQ ID NO: 38627 - RNA, 13 nt, Artificial Sequence
  Description of Artificial Sequence: Synthetic oligonucleotide
ucuuuguugauug

SEQ ID NO: 38628 - RNA, 14 nt, Artificial Sequence
  Description of Artificial Sequence: Synthetic oligonucleotide
uuuguugauugaaa

SEQ ID NO: 38629 - RNA, 15 nt, Artificial Sequence
  Description of Artificial Sequence: Synthetic oligonucleotide
uucuuuuucuuccau

SEQ ID NO: 38630 - RNA, 13 nt, Artificial Sequence
  Description of Artificial Sequence: Synthetic oligonucleotide
aaucuuccuucua

SEQ ID NO: 38631 - RNA, 13 nt, Artificial Sequence
  Description of Artificial Sequence: Synthetic oligonucleotide
uugaaugcuucau

SEQ ID NO: 38632 - RNA, 13 nt, Artificial Sequence
  Description of Artificial Sequence: Synthetic oligonucleotide
ugaaugcuucaug

SEQ ID NO: 38633 - RNA, 13 nt, Artificial Sequence
  Description of Artificial Sequence: Synthetic oligonucleotide
aauucuacuuuga

SEQ ID NO: 38634 - RNA, 13 nt, Artificial Sequence
  Description of Artificial Sequence: Synthetic oligonucleotide
agcaacuacagac

SEQ ID NO: 38635 - RNA, 13 nt, Artificial Sequence
  Description of Artificial Sequence: Synthetic oligonucleotide
gaccaaggucaac

SEQ ID NO: 38636 - RNA, 13 nt, Artificial Sequence
  Description of Artificial Sequence: Synthetic oligonucleotide
cgacuaucucgac

SEQ ID NO: 38637 - RNA, 13 nt, Artificial Sequence
  Description of Artificial Sequence: Synthetic oligonucleotide
aaccuucccaaac

SEQ ID NO: 38638 - RNA, 14 nt, Artificial Sequence
  Description of Artificial Sequence: Synthetic oligonucleotide
ccaagcuuagaacu

SEQ ID NO: 38639 - RNA, 15 nt, Artificial Sequence
  Description of Artificial Sequence: Synthetic oligonucleotide
agcuuagaacuuuaa

SEQ ID NO: 38640 - RNA, 11 nt, Artificial Sequence
  Description of Artificial Sequence: Synthetic oligonucleotide
aagaccaccac

SEQ ID NO: 38641 - RNA, 14 nt, Artificial Sequence
  Description of Artificial Sequence: Synthetic oligonucleotide
gcgagaaauaaagu

SEQ ID NO: 38642 - RNA, 14 nt, Artificial Sequence
  Description of Artificial Sequence: Synthetic oligonucleotide
cgagaaauaaaguu

SEQ ID NO: 38643 - RNA, 12 nt, Artificial Sequence
  Description of Artificial Sequence: Synthetic oligonucleotide
aggaaaugaucc

SEQ ID NO: 38644 - RNA, 13 nt, Artificial Sequence
  Description of Artificial Sequence: Synthetic oligonucleotide
gaagaaaugaaac

SEQ ID NO: 38645 - RNA, 13 nt, Artificial Sequence
  Description of Artificial Sequence: Synthetic oligonucleotide
guuuccauccucc

SEQ ID NO: 38646 - RNA, 15 nt, Artificial Sequence
  Description of Artificial Sequence: Synthetic oligonucleotide
acugaaaaucuuuga

SEQ ID NO: 38647 - RNA, 11 nt, Artificial Sequence
  Description of Artificial Sequence: Synthetic oligonucleotide
ugccguucagg

SEQ ID NO: 38648 - RNA, 13 nt, Artificial Sequence
  Description of Artificial Sequence: Synthetic oligonucleotide
caggguccagaag

SEQ ID NO: 38649 - RNA, 13 nt, Artificial Sequence
  Description of Artificial Sequence: Synthetic oligonucleotide
ucaagacugcuug

SEQ ID NO: 38650 - RNA, 13 nt, Artificial Sequence
  Description of Artificial Sequence: Synthetic oligonucleotide
uccaugucuuugg

SEQ ID NO: 38651 - RNA, 11 nt, Artificial Sequence
  Description of Artificial Sequence: Synthetic oligonucleotide
gccugaaacac

SEQ ID NO: 38652 - RNA, 12 nt, Artificial Sequence
  Description of Artificial Sequence: Synthetic oligonucleotide
ucucuguaccuc

SEQ ID NO: 38653 - RNA, 12 nt, Artificial Sequence
  Description of Artificial Sequence: Synthetic oligonucleotide
agcaagacaaga

SEQ ID NO: 38654 - RNA, 13 nt, Artificial Sequence
  Description of Artificial Sequence: Synthetic oligonucleotide
gcaagacaagaaa

SEQ ID NO: 38655 - RNA, 12 nt, Artificial Sequence
  Description of Artificial Sequence: Synthetic oligonucleotide
uguacaagaucc

SEQ ID NO: 38656 - RNA, 12 nt, Artificial Sequence
  Description of Artificial Sequence: Synthetic oligonucleotide
cguacuugcaga

SEQ ID NO: 38657 - RNA, 13 nt, Artificial Sequence
  Description of Artificial Sequence: Synthetic oligonucleotide
cgaucgauacaga

SEQ ID NO: 38658 - RNA, 13 nt, Artificial Sequence
  Description of Artificial Sequence: Synthetic oligonucleotide
uauaaaaauaaau

SEQ ID NO: 38659 - RNA, 13 nt, Artificial Sequence
  Description of Artificial Sequence: Synthetic oligonucleotide
uaaaaauaaauau

SEQ ID NO: 38660 - RNA, 13 nt, Artificial Sequence
  Description of Artificial Sequence: Synthetic oligonucleotide
uuugacugcugug

SEQ ID NO: 38661 - RNA, 13 nt, Artificial Sequence
  Description of Artificial Sequence: Synthetic oligonucleotide
ggagaugagagac

SEQ ID NO: 38662 - RNA, 10 nt, Artificial Sequence
  Description of Artificial Sequence: Synthetic oligonucleotide
ucccacuugg

SEQ ID NO: 38663 - RNA, 10 nt, Artificial Sequence
  Description of Artificial Sequence: Synthetic oligonucleotide
guucacggcc

SEQ ID NO: 38664 - RNA, 12 nt, Artificial Sequence
  Description of Artificial Sequence: Synthetic oligonucleotide
accaucacacca

SEQ ID NO: 38665 - RNA, 10 nt, Artificial Sequence
  Description of Artificial Sequence: Synthetic oligonucleotide
cugcggguuu

SEQ ID NO: 38666 - RNA, 9 nt, Artificial Sequence
  Description of Artificial Sequence: Synthetic oligonucleotide
uccaguuug

SEQ ID NO: 38667 - RNA, 12 nt, Artificial Sequence
  Description of Artificial Sequence: Synthetic oligonucleotide
uuaaggacuucu

SEQ ID NO: 38668 - RNA, 12 nt, Artificial Sequence
  Description of Artificial Sequence: Synthetic oligonucleotide
agugggacagag

SEQ ID NO: 38669 - RNA, 13 nt, Artificial Sequence
  Description of Artificial Sequence: Synthetic oligonucleotide
auuuguuauugug

SEQ ID NO: 38670 - RNA, 12 nt, Artificial Sequence
  Description of Artificial Sequence: Synthetic oligonucleotide
ucaaaugcauuu

SEQ ID NO: 38671 - RNA, 9 nt, Artificial Sequence
  Description of Artificial Sequence: Synthetic oligonucleotide
aggaaagcc

SEQ ID NO: 38672 - RNA, 10 nt, Artificial Sequence
  Description of Artificial Sequence: Synthetic oligonucleotide
ggaaagcccu

SEQ ID NO: 38673 - RNA, 11 nt, Artificial Sequence
  Description of Artificial Sequence: Synthetic oligonucleotide
ccagcauggcc

SEQ ID NO: 38674 - RNA, 10 nt, Artificial Sequence
  Description of Artificial Sequence: Synthetic oligonucleotide
uucucccuga

SEQ ID NO: 38675 - RNA, 11 nt, Artificial Sequence
  Description of Artificial Sequence: Synthetic oligonucleotide
aagaagcccuu

SEQ ID NO: 38676 - RNA, 11 nt, Artificial Sequence
  Description of Artificial Sequence: Synthetic oligonucleotide
gaagcccuuca

SEQ ID NO: 38677 - RNA, 10 nt, Artificial Sequence
  Description of Artificial Sequence: Synthetic oligonucleotide
cccuucagcg

SEQ ID NO: 38678 - RNA, 10 nt, Artificial Sequence
  Description of Artificial Sequence: Synthetic oligonucleotide
cuucagcggc

SEQ ID NO: 38679 - RNA, 11 nt, Artificial Sequence
  Description of Artificial Sequence: Synthetic oligonucleotide
cagcggccagu

SEQ ID NO: 38680 - RNA, 11 nt, Artificial Sequence
  Description of Artificial Sequence: Synthetic oligonucleotide
gaaaagcuccg

SEQ ID NO: 38681 - RNA, 10 nt, Artificial Sequence
  Description of Artificial Sequence: Synthetic oligonucleotide
aaagcuccgg

SEQ ID NO: 38682 - RNA, 12 nt, Artificial Sequence
  Description of Artificial Sequence: Synthetic oligonucleotide
gucaacagucug

SEQ ID NO: 38683 - RNA, 12 nt, Artificial Sequence
  Description of Artificial Sequence: Synthetic oligonucleotide
agaguucaaaag

SEQ ID NO: 38684 - RNA, 12 nt, Artificial Sequence
  Description of Artificial Sequence: Synthetic oligonucleotide
gaguucaaaagc

SEQ ID NO: 38685 - RNA, 11 nt, Artificial Sequence
  Description of Artificial Sequence: Synthetic oligonucleotide
ucaaaagcccu

SEQ ID NO: 38686 - RNA, 11 nt, Artificial Sequence
  Description of Artificial Sequence: Synthetic oligonucleotide
caaaagcccuu

SEQ ID NO: 38687 - RNA, 11 nt, Artificial Sequence
  Description of Artificial Sequence: Synthetic oligonucleotide
aaagcccuuca

SEQ ID NO: 38688 - RNA, 11 nt, Artificial Sequence
  Description of Artificial Sequence: Synthetic oligonucleotide
aagcccuucag

SEQ ID NO: 38689 - RNA, 12 nt, Artificial Sequence
  Description of Artificial Sequence: Synthetic oligonucleotide
ugaagccgcucg

SEQ ID NO: 38690 - RNA, 11 nt, Artificial Sequence
  Description of Artificial Sequence: Synthetic oligonucleotide
acgccagucaa

SEQ ID NO: 38691 - RNA, 12 nt, Artificial Sequence
  Description of Artificial Sequence: Synthetic oligonucleotide
ucuuggugcgug

SEQ ID NO: 38692 - RNA, 13 nt, Artificial Sequence
  Description of Artificial Sequence: Synthetic oligonucleotide
uuggauucaucag

SEQ ID NO: 38693 - RNA, 12 nt, Artificial Sequence
  Description of Artificial Sequence: Synthetic oligonucleotide
ggaauaccuaag

SEQ ID NO: 38694 - RNA, 11 nt, Artificial Sequence
  Description of Artificial Sequence: Synthetic oligonucleotide
uuugaggcuca

SEQ ID NO: 38695 - RNA, 10 nt, Artificial Sequence
  Description of Artificial Sequence: Synthetic oligonucleotide
cuacaauugg

SEQ ID NO: 38696 - RNA, 11 nt, Artificial Sequence
  Description of Artificial Sequence: Synthetic oligonucleotide
aguuaggagcc

SEQ ID NO: 38697 - RNA, 12 nt, Artificial Sequence
  Description of Artificial Sequence: Synthetic oligonucleotide
gucaauauccac

SEQ ID NO: 38698 - RNA, 12 nt, Artificial Sequence
  Description of Artificial Sequence: Synthetic oligonucleotide
uguucagucaca

SEQ ID NO: 38699 - RNA, 11 nt, Artificial Sequence
  Description of Artificial Sequence: Synthetic oligonucleotide
cacacacauac

SEQ ID NO: 38700 - RNA, 11 nt, Artificial Sequence
  Description of Artificial Sequence: Synthetic oligonucleotide
uccuuuugcuu

SEQ ID NO: 38701 - RNA, 15 nt, Artificial Sequence
  Description of Artificial Sequence: Synthetic oligonucleotide
uuuaaaguaauuuuu

SEQ ID NO: 38702 - RNA, 12 nt, Artificial Sequence
  Description of Artificial Sequence: Synthetic oligonucleotide
aacagucaaugg

SEQ ID NO: 38703 - RNA, 12 nt, Artificial Sequence
  Description of Artificial Sequence: Synthetic oligonucleotide
cgacaaaccaau

SEQ ID NO: 38704 - RNA, 11 nt, Artificial Sequence
  Description of Artificial Sequence: Synthetic oligonucleotide
cugcuaccacu

SEQ ID NO: 38705 - RNA, 12 nt, Artificial Sequence
  Description of Artificial Sequence: Synthetic oligonucleotide
caagcggucuua

SEQ ID NO: 38706 - RNA, 12 nt, Artificial Sequence
  Description of Artificial Sequence: Synthetic oligonucleotide
gucuuaccggcu

SEQ ID NO: 38707 - RNA, 10 nt, Artificial Sequence
  Description of Artificial Sequence: Synthetic oligonucleotide
auggguuacc

SEQ ID NO: 38708 - RNA, 10 nt, Artificial Sequence
  Description of Artificial Sequence: Synthetic oligonucleotide
uuaccugcga

SEQ ID NO: 38709 - RNA, 11 nt, Artificial Sequence
  Description of Artificial Sequence: Synthetic oligonucleotide
aucuugcugag

SEQ ID NO: 38710 - RNA, 12 nt, Artificial Sequence
  Description of Artificial Sequence: Synthetic oligonucleotide
gcauaaaacagu

SEQ ID NO: 38711 - RNA, 11 nt, Artificial Sequence
  Description of Artificial Sequence: Synthetic oligonucleotide
uccuuuauccu

SEQ ID NO: 38712 - RNA, 11 nt, Artificial Sequence
  Description of Artificial Sequence: Synthetic oligonucleotide
aacgcaaguug

SEQ ID NO: 38713 - RNA, 12 nt, Artificial Sequence
  Description of Artificial Sequence: Synthetic oligonucleotide
aacugaaaccau

SEQ ID NO: 38714 - RNA, 13 nt, Artificial Sequence
  Description of Artificial Sequence: Synthetic oligonucleotide
cuuuguuaaauau

SEQ ID NO: 38715 - RNA, 13 nt, Artificial Sequence
  Description of Artificial Sequence: Synthetic oligonucleotide
uauauuaaaaguu

SEQ ID NO: 38716 - RNA, 12 nt, Artificial Sequence
  Description of Artificial Sequence: Synthetic oligonucleotide
uuuugacuuaac

SEQ ID NO: 38717 - RNA, 12 nt, Artificial Sequence
  Description of Artificial Sequence: Synthetic oligonucleotide
caaacucagcac

SEQ ID NO: 38718 - RNA, 10 nt, Artificial Sequence
  Description of Artificial Sequence: Synthetic oligonucleotide
gcugaccuca

SEQ ID NO: 38719 - RNA, 13 nt, Artificial Sequence
  Description of Artificial Sequence: Synthetic oligonucleotide
uuauucagaucgc

SEQ ID NO: 38720 - RNA, 12 nt, Artificial Sequence
  Description of Artificial Sequence: Synthetic oligonucleotide
ggguucugggau

SEQ ID NO: 38721 - RNA, 14 nt, Artificial Sequence
  Description of Artificial Sequence: Synthetic oligonucleotide
uauuggaaauuaug

SEQ ID NO: 38722 - RNA, 12 nt, Artificial Sequence
  Description of Artificial Sequence: Synthetic oligonucleotide
uggaagcacuag

SEQ ID NO: 38723 - RNA, 12 nt, Artificial Sequence
  Description of Artificial Sequence: Synthetic oligonucleotide
uuuuuaugugga

SEQ ID NO: 38724 - RNA, 11 nt, Artificial Sequence
  Description of Artificial Sequence: Synthetic oligonucleotide
gaauugguaga

SEQ ID NO: 38725 - RNA, 12 nt, Artificial Sequence
  Description of Artificial Sequence: Synthetic oligonucleotide
uagacuuggaga

SEQ ID NO: 38726 - RNA, 12 nt, Artificial Sequence
  Description of Artificial Sequence: Synthetic oligonucleotide
uacaguauucca

SEQ ID NO: 38727 - RNA, 14 nt, Artificial Sequence
  Description of Artificial Sequence: Synthetic oligonucleotide
cacugaugaauuaa

SEQ ID NO: 38728 - RNA, 11 nt, Artificial Sequence
  Description of Artificial Sequence: Synthetic oligonucleotide
cacaucaucac

SEQ ID NO: 38729 - RNA, 12 nt, Artificial Sequence
  Description of Artificial Sequence: Synthetic oligonucleotide
ucaccaaacaga

SEQ ID NO: 38730 - RNA, 11 nt, Artificial Sequence
  Description of Artificial Sequence: Synthetic oligonucleotide
gaacaugaugg

SEQ ID NO: 38731 - RNA, 11 nt, Artificial Sequence
  Description of Artificial Sequence: Synthetic oligonucleotide
auguagacugc

SEQ ID NO: 38732 - RNA, 12 nt, Artificial Sequence
  Description of Artificial Sequence: Synthetic oligonucleotide
gaucuauuuaug

SEQ ID NO: 38733 - RNA, 11 nt, Artificial Sequence
  Description of Artificial Sequence: Synthetic oligonucleotide
cacuauuauca

SEQ ID NO: 38734 - RNA, 10 nt, Artificial Sequence
  Description of Artificial Sequence: Synthetic oligonucleotide
ucaguucugc

SEQ ID NO: 38735 - RNA, 12 nt, Artificial Sequence
  Description of Artificial Sequence: Synthetic oligonucleotide
gauuaaaccuac

SEQ ID NO: 38736 - RNA, 12 nt, Artificial Sequence
  Description of Artificial Sequence: Synthetic oligonucleotide
uaaaauccuucu

SEQ ID NO: 38737 - RNA, 11 nt, Artificial Sequence
  Description of Artificial Sequence: Synthetic oligonucleotide
augcuguagac

SEQ ID NO: 38738 - RNA, 12 nt, Artificial Sequence
  Description of Artificial Sequence: Synthetic oligonucleotide
ugauaggaauag

SEQ ID NO: 38739 - RNA, 10 nt, Artificial Sequence
  Description of Artificial Sequence: Synthetic oligonucleotide
auggcccuga

SEQ ID NO: 38740 - RNA, 10 nt, Artificial Sequence
  Description of Artificial Sequence: Synthetic oligonucleotide
uccucaagca

SEQ ID NO: 38741 - RNA, 9 nt, Artificial Sequence
  Description of Artificial Sequence: Synthetic oligonucleotide
uucagccca

SEQ ID NO: 38742 - RNA, 10 nt, Artificial Sequence
  Description of Artificial Sequence: Synthetic oligonucleotide
cugcugaacc

SEQ ID NO: 38743 - RNA, 11 nt, Artificial Sequence
  Description of Artificial Sequence: Synthetic oligonucleotide
aguucucuuca

SEQ ID NO: 38744 - RNA, 10 nt, Artificial Sequence
  Description of Artificial Sequence: Synthetic oligonucleotide
cagccuagag

SEQ ID NO: 38745 - RNA, 12 nt, Artificial Sequence
  Description of Artificial Sequence: Synthetic oligonucleotide
ucugugaagugu

SEQ ID NO: 38746 - RNA, 13 nt, Artificial Sequence
  Description of Artificial Sequence: Synthetic oligonucleotide
gagaaaauuucaa

SEQ ID NO: 38747 - RNA, 10 nt, Artificial Sequence
  Description of Artificial Sequence: Synthetic oligonucleotide
auccuccuga

SEQ ID NO: 38748 - RNA, 11 nt, Artificial Sequence
  Description of Artificial Sequence: Synthetic oligonucleotide
ugacaucauau

SEQ ID NO: 38749 - RNA, 12 nt, Artificial Sequence
  Description of Artificial Sequence: Synthetic oligonucleotide
aucuucaucaua

SEQ ID NO: 38750 - RNA, 12 nt, Artificial Sequence
  Description of Artificial Sequence: Synthetic oligonucleotide
acuagcuauuaa

SEQ ID NO: 38751 - RNA, 13 nt, Artificial Sequence
  Description of Artificial Sequence: Synthetic oligonucleotide
cucuacuaaaaau

SEQ ID NO: 38752 - RNA, 11 nt, Artificial Sequence
  Description of Artificial Sequence: Synthetic oligonucleotide
cuaucucgccu

SEQ ID NO: 38753 - RNA, 12 nt, Artificial Sequence
  Description of Artificial Sequence: Synthetic oligonucleotide
uucgguccaguu

SEQ ID NO: 38754 - RNA, 10 nt, Artificial Sequence
  Description of Artificial Sequence: Synthetic oligonucleotide
auguagccgc

SEQ ID NO: 38755 - RNA, 11 nt, Artificial Sequence
  Description of Artificial Sequence: Synthetic oligonucleotide
gaggagacuug

SEQ ID NO: 38756 - RNA, 11 nt, Artificial Sequence
  Description of Artificial Sequence: Synthetic oligonucleotide
aguagugagga

SEQ ID NO: 38757 - RNA, 13 nt, Artificial Sequence
  Description of Artificial Sequence: Synthetic oligonucleotide
agaugaguacaaa

SEQ ID NO: 38758 - RNA, 12 nt, Artificial Sequence
  Description of Artificial Sequence: Synthetic oligonucleotide
uuguuaaugggc

SEQ ID NO: 38759 - RNA, 12 nt, Artificial Sequence
  Description of Artificial Sequence: Synthetic oligonucleotide
uuuuaauuuauu

SEQ ID NO: 38760 - RNA, 11 nt, Artificial Sequence
  Description of Artificial Sequence: Synthetic oligonucleotide
auuuaaauaug

SEQ ID NO: 38761 - RNA, 12 nt, Artificial Sequence
  Description of Artificial Sequence: Synthetic oligonucleotide
auccuuuguuuc

SEQ ID NO: 38762 - RNA, 13 nt, Artificial Sequence
  Description of Artificial Sequence: Synthetic oligonucleotide
gucuaaguguuug

SEQ ID NO: 38763 - RNA, 11 nt, Artificial Sequence
  Description of Artificial Sequence: Synthetic oligonucleotide
ccugugacaaa

SEQ ID NO: 38764 - RNA, 12 nt, Artificial Sequence
  Description of Artificial Sequence: Synthetic oligonucleotide
caggcugaauua

SEQ ID NO: 38765 - RNA, 13 nt, Artificial Sequence
  Description of Artificial Sequence: Synthetic oligonucleotide
ucauucuuacaau

SEQ ID NO: 38766 - RNA, 14 nt, Artificial Sequence
  Description of Artificial Sequence: Synthetic oligonucleotide
cauucuuacaauug

SEQ ID NO: 38767 - RNA, 11 nt, Artificial Sequence
  Description of Artificial Sequence: Synthetic oligonucleotide
agagaguguac

SEQ ID NO: 38768 - RNA, 11 nt, Artificial Sequence
  Description of Artificial Sequence: Synthetic oligonucleotide
gaacucagcag

SEQ ID NO: 38769 - RNA, 12 nt, Artificial Sequence
  Description of Artificial Sequence: Synthetic oligonucleotide
uuauuuucagua

SEQ ID NO: 38770 - RNA, 11 nt, Artificial Sequence
  Description of Artificial Sequence: Synthetic oligonucleotide
cuuaaauggaa

SEQ ID NO: 38771 - RNA, 12 nt, Artificial Sequence
  Description of Artificial Sequence: Synthetic oligonucleotide
gccuaaaauugu

SEQ ID NO: 38772 - RNA, 12 nt, Artificial Sequence
  Description of Artificial Sequence: Synthetic oligonucleotide
acuaacaucugg

SEQ ID NO: 38773 - RNA, 11 nt, Artificial Sequence
  Description of Artificial Sequence: Synthetic oligonucleotide
gacugugagcu

SEQ ID NO: 38774 - RNA, 13 nt, Artificial Sequence
  Description of Artificial Sequence: Synthetic oligonucleotide
gcuuuuuauuaau

SEQ ID NO: 38775 - RNA, 12 nt, Artificial Sequence
  Description of Artificial Sequence: Synthetic oligonucleotide
ucuucuuacauu

SEQ ID NO: 38776 - RNA, 14 nt, Artificial Sequence
  Description of Artificial Sequence: Synthetic oligonucleotide
auuuguaaaaaugu

SEQ ID NO: 38777 - RNA, 14 nt, Artificial Sequence
  Description of Artificial Sequence: Synthetic oligonucleotide
ucuuaauucauauu

SEQ ID NO: 38778 - RNA, 12 nt, Artificial Sequence
  Description of Artificial Sequence: Synthetic oligonucleotide
aacuaaucauga

SEQ ID NO: 38779 - RNA, 11 nt, Artificial Sequence
  Description of Artificial Sequence: Synthetic oligonucleotide
cugcucuuggg

SEQ ID NO: 38780 - RNA, 12 nt, Artificial Sequence
  Description of Artificial Sequence: Synthetic oligonucleotide
aguagcuuugag

SEQ ID NO: 38781 - RNA, 13 nt, Artificial Sequence
  Description of Artificial Sequence: Synthetic oligonucleotide
acguaauauuuca

SEQ ID NO: 38782 - RNA, 12 nt, Artificial Sequence
  Description of Artificial Sequence: Synthetic oligonucleotide
auucucuucacu

SEQ ID NO: 38783 - RNA, 13 nt, Artificial Sequence
  Description of Artificial Sequence: Synthetic oligonucleotide
uaaugcuaagaaa

SEQ ID NO: 38784 - RNA, 11 nt, Artificial Sequence
  Description of Artificial Sequence: Synthetic oligonucleotide
cugaaaaucaa

SEQ ID NO: 38785 - RNA, 13 nt, Artificial Sequence
  Description of Artificial Sequence: Synthetic oligonucleotide
auaugauuacuuu

SEQ ID NO: 38786 - RNA, 13 nt, Artificial Sequence
  Description of Artificial Sequence: Synthetic oligonucleotide
auuuuguucuaca

SEQ ID NO: 38787 - RNA, 11 nt, Artificial Sequence
  Description of Artificial Sequence: Synthetic oligonucleotide
ccgggacucuc

SEQ ID NO: 38788 - RNA, 13 nt, Artificial Sequence
  Description of Artificial Sequence: Synthetic oligonucleotide
cuuuaaaguaaag

SEQ ID NO: 38789 - RNA, 12 nt, Artificial Sequence
  Description of Artificial Sequence: Synthetic oligonucleotide
cuggaagccugg

SEQ ID NO: 38790 - RNA, 13 nt, Artificial Sequence
  Description of Artificial Sequence: Synthetic oligonucleotide
aaacaaaagagag

SEQ ID NO: 38791 - RNA, 12 nt, Artificial Sequence
  Description of Artificial Sequence: Synthetic oligonucleotide
ucaguuaugccg

SEQ ID NO: 38792 - RNA, 12 nt, Artificial Sequence
  Description of Artificial Sequence: Synthetic oligonucleotide
aaaagaagucca

SEQ ID NO: 38793 - RNA, 10 nt, Artificial Sequence
  Description of Artificial Sequence: Synthetic oligonucleotide
ggugagguua

SEQ ID NO: 38794 - RNA, 10 nt, Artificial Sequence
  Description of Artificial Sequence: Synthetic oligonucleotide
ggaagaggac

SEQ ID NO: 38795 - RNA, 12 nt, Artificial Sequence
  Description of Artificial Sequence: Synthetic oligonucleotide
agcaaguauugu

SEQ ID NO: 38796 - RNA, 11 nt, Artificial Sequence
  Description of Artificial Sequence: Synthetic oligonucleotide
uuguagcacuc

SEQ ID NO: 38797 - RNA, 13 nt, Artificial Sequence
  Description of Artificial Sequence: Synthetic oligonucleotide
caaaaccacaaau

SEQ ID NO: 38798 - RNA, 11 nt, Artificial Sequence
  Description of Artificial Sequence: Synthetic oligonucleotide
aagcccauaca

SEQ ID NO: 38799 - RNA, 10 nt, Artificial Sequence
  Description of Artificial Sequence: Synthetic oligonucleotide
gcccauacag

SEQ ID NO: 38800 - RNA, 11 nt, Artificial Sequence
  Description of Artificial Sequence: Synthetic oligonucleotide
agaaaccuucc

SEQ ID NO: 38801 - RNA, 9 nt, Artificial Sequence
  Description of Artificial Sequence: Synthetic oligonucleotide
uauaccuac

SEQ ID NO: 38802 - RNA, 12 nt, Artificial Sequence
  Description of Artificial Sequence: Synthetic oligonucleotide
ccaguuuucgga

SEQ ID NO: 38803 - RNA, 8 nt, Artificial Sequence
  Description of Artificial Sequence: Synthetic oligonucleotide
gaacaggg

SEQ ID NO: 38804 - RNA, 12 nt, Artificial Sequence
  Description of Artificial Sequence: Synthetic oligonucleotide
uaacuuuccagu

SEQ ID NO: 38805 - RNA, 13 nt, Artificial Sequence
  Description of Artificial Sequence: Synthetic oligonucleotide
aaguuugguuuug

SEQ ID NO: 38806 - RNA, 11 nt, Artificial Sequence
  Description of Artificial Sequence: Synthetic oligonucleotide
uucccacugua

SEQ ID NO: 38807 - RNA, 12 nt, Artificial Sequence
  Description of Artificial Sequence: Synthetic oligonucleotide
gauaccauauga

SEQ ID NO: 38808 - RNA, 10 nt, Artificial Sequence
  Description of Artificial Sequence: Synthetic oligonucleotide
acaugggcug

SEQ ID NO: 38809 - RNA, 12 nt, Artificial Sequence
  Description of Artificial Sequence: Synthetic oligonucleotide
aacuuuuucaua

SEQ ID NO: 38810 - RNA, 11 nt, Artificial Sequence
  Description of Artificial Sequence: Synthetic oligonucleotide
augaggccgga

SEQ ID NO: 38811 - RNA, 10 nt, Artificial Sequence
  Description of Artificial Sequence: Synthetic oligonucleotide
cugcauuugu

SEQ ID NO: 38812 - RNA, 12 nt, Artificial Sequence
  Description of Artificial Sequence: Synthetic oligonucleotide
auguuuacuacc

SEQ ID NO: 38813 - RNA, 14 nt, Artificial Sequence
  Description of Artificial Sequence: Synthetic oligonucleotide
auuuuuugaugaaa

SEQ ID NO: 38814 - RNA, 13 nt, Artificial Sequence
  Description of Artificial Sequence: Synthetic oligonucleotide
agugugugaauuu

SEQ ID NO: 38815 - RNA, 12 nt, Artificial Sequence
  Description of Artificial Sequence: Synthetic oligonucleotide
agcaauguaugu

SEQ ID NO: 38816 - RNA, 13 nt, Artificial Sequence
  Description of Artificial Sequence: Synthetic oligonucleotide
aagcacauauaua

SEQ ID NO: 38817 - RNA, 13 nt, Artificial Sequence
  Description of Artificial Sequence: Synthetic oligonucleotide
uaauaguuucucc

SEQ ID NO: 38818 - RNA, 12 nt, Artificial Sequence
  Description of Artificial Sequence: Synthetic oligonucleotide
guuucuccaaau

SEQ ID NO: 38819 - RNA, 12 nt, Artificial Sequence
  Description of Artificial Sequence: Synthetic oligonucleotide
acuuccuagaaa

SEQ ID NO: 38820 - RNA, 12 nt, Artificial Sequence
  Description of Artificial Sequence: Synthetic oligonucleotide
acaccauauaug

SEQ ID NO: 38821 - RNA, 13 nt, Artificial Sequence
  Description of Artificial Sequence: Synthetic oligonucleotide
uauaugaauggag

SEQ ID NO: 38822 - RNA, 12 nt, Artificial Sequence
  Description of Artificial Sequence: Synthetic oligonucleotide
cauuuacaggga

SEQ ID NO: 38823 - RNA, 12 nt, Artificial Sequence
  Description of Artificial Sequence: Synthetic oligonucleotide
auuuacagggac

SEQ ID NO: 38824 - RNA, 9 nt, Artificial Sequence
  Description of Artificial Sequence: Synthetic oligonucleotide
gggaccuga

SEQ ID NO: 38825 - RNA, 13 nt, Artificial Sequence
  Description of Artificial Sequence: Synthetic oligonucleotide
guuugacugcauc

SEQ ID NO: 38826 - RNA, 12 nt, Artificial Sequence
  Description of Artificial Sequence: Synthetic oligonucleotide
uugacugcaucg

SEQ ID NO: 38827 - RNA, 11 nt, Artificial Sequence
  Description of Artificial Sequence: Synthetic oligonucleotide
aguucacaggg

SEQ ID NO: 38828 - RNA, 12 nt, Artificial Sequence
  Description of Artificial Sequence: Synthetic oligonucleotide
gcaccucugucc

SEQ ID NO: 38829 - RNA, 14 nt, Artificial Sequence
  Description of Artificial Sequence: Synthetic oligonucleotide
guuugucuuuuuaa

SEQ ID NO: 38830 - RNA, 13 nt, Artificial Sequence
  Description of Artificial Sequence: Synthetic oligonucleotide
uugucuuuuuaag

SEQ ID NO: 38831 - RNA, 12 nt, Artificial Sequence
  Description of Artificial Sequence: Synthetic oligonucleotide
cuaaagguuguc

SEQ ID NO: 38832 - RNA, 11 nt, Artificial Sequence
  Description of Artificial Sequence: Synthetic oligonucleotide
agguugucgac

SEQ ID NO: 38833 - RNA, 12 nt, Artificial Sequence
  Description of Artificial Sequence: Synthetic oligonucleotide
ccuggcaauugu

SEQ ID NO: 38834 - RNA, 11 nt, Artificial Sequence
  Description of Artificial Sequence: Synthetic oligonucleotide
guggugcgagg

SEQ ID NO: 38835 - RNA, 12 nt, Artificial Sequence
  Description of Artificial Sequence: Synthetic oligonucleotide
gagacaugaaau

SEQ ID NO: 38836 - RNA, 12 nt, Artificial Sequence
  Description of Artificial Sequence: Synthetic oligonucleotide
uauauuucucca

SEQ ID NO: 38837 - RNA, 9 nt, Artificial Sequence
  Description of Artificial Sequence: Synthetic oligonucleotide
augaaggcu

SEQ ID NO: 38838 - RNA, 10 nt, Artificial Sequence
  Description of Artificial Sequence: Synthetic oligonucleotide
cuggaguggu

SEQ ID NO: 38839 - RNA, 10 nt, Artificial Sequence
  Description of Artificial Sequence: Synthetic oligonucleotide
ggaagagagg

SEQ ID NO: 38840 - RNA, 11 nt, Artificial Sequence
  Description of Artificial Sequence: Synthetic oligonucleotide
uugcaucgggc

SEQ ID NO: 38841 - RNA, 12 nt, Artificial Sequence
  Description of Artificial Sequence: Synthetic oligonucleotide
uauccuacugug

SEQ ID NO: 38842 - RNA, 12 nt, Artificial Sequence
  Description of Artificial Sequence: Synthetic oligonucleotide
ccuacuguguaa

SEQ ID NO: 38843 - RNA, 11 nt, Artificial Sequence
  Description of Artificial Sequence: Synthetic oligonucleotide
cuuguagugua

SEQ ID NO: 38844 - RNA, 12 nt, Artificial Sequence
  Description of Artificial Sequence: Synthetic oligonucleotide
cuuuguugauug

SEQ ID NO: 38845 - RNA, 13 nt, Artificial Sequence
  Description of Artificial Sequence: Synthetic oligonucleotide
uuguugauugaaa

SEQ ID NO: 38846 - RNA, 14 nt, Artificial Sequence
  Description of Artificial Sequence: Synthetic oligonucleotide
ucuuuuucuuccau

SEQ ID NO: 38847 - RNA, 12 nt, Artificial Sequence
  Description of Artificial Sequence: Synthetic oligonucleotide
aucuuccuucua

SEQ ID NO: 38848 - RNA, 12 nt, Artificial Sequence
  Description of Artificial Sequence: Synthetic oligonucleotide
ugaaugcuucau

SEQ ID NO: 38849 - RNA, 12 nt, Artificial Sequence
  Description of Artificial Sequence: Synthetic oligonucleotide
gaaugcuucaug

SEQ ID NO: 38850 - RNA, 12 nt, Artificial Sequence
  Description of Artificial Sequence: Synthetic oligonucleotide
auucuacuuuga

SEQ ID NO: 38851 - RNA, 12 nt, Artificial Sequence
  Description of Artificial Sequence: Synthetic oligonucleotide
gcaacuacagac

SEQ ID NO: 38852 - RNA, 12 nt, Artificial Sequence
  Description of Artificial Sequence: Synthetic oligonucleotide
accaaggucaac

SEQ ID NO: 38853 - RNA, 12 nt, Artificial Sequence
  Description of Artificial Sequence: Synthetic oligonucleotide
gacuaucucgac

SEQ ID NO: 38854 - RNA, 12 nt, Artificial Sequence
  Description of Artificial Sequence: Synthetic oligonucleotide
accuucccaaac

SEQ ID NO: 38855 - RNA, 13 nt, Artificial Sequence
  Description of Artificial Sequence: Synthetic oligonucleotide
caagcuuagaacu

SEQ ID NO: 38856 - RNA, 14 nt, Artificial Sequence
  Description of Artificial Sequence: Synthetic oligonucleotide
gcuuagaacuuuaa

SEQ ID NO: 38857 - RNA, 13 nt, Artificial Sequence
  Description of Artificial Sequence: Synthetic oligonucleotide
aacuuuaagcaac

SEQ ID NO: 38858 - RNA, 10 nt, Artificial Sequence
  Description of Artificial Sequence: Synthetic oligonucleotide
agaccaccac

SEQ ID NO: 38859 - RNA, 13 nt, Artificial Sequence
  Description of Artificial Sequence: Synthetic oligonucleotide
cgagaaauaaagu

SEQ ID NO: 38860 - RNA, 13 nt, Artificial Sequence
  Description of Artificial Sequence: Synthetic oligonucleotide
gagaaauaaaguu

SEQ ID NO: 38861 - RNA, 11 nt, Artificial Sequence
  Description of Artificial Sequence: Synthetic oligonucleotide
ggaaaugaucc

SEQ ID NO: 38862 - RNA, 12 nt, Artificial Sequence
  Description of Artificial Sequence: Synthetic oligonucleotide
aagaaaugaaac

SEQ ID NO: 38863 - RNA, 12 nt, Artificial Sequence
  Description of Artificial Sequence: Synthetic oligonucleotide
uuuccauccucc

SEQ ID NO: 38864 - RNA, 14 nt, Artificial Sequence
  Description of Artificial Sequence: Synthetic oligonucleotide
cugaaaaucuuuga

SEQ ID NO: 38865 - RNA, 10 nt, Artificial Sequence
  Description of Artificial Sequence: Synthetic oligonucleotide
gccguucagg

SEQ ID NO: 38866 - RNA, 12 nt, Artificial Sequence
  Description of Artificial Sequence: Synthetic oligonucleotide
aggguccagaag

SEQ ID NO: 38867 - RNA, 12 nt, Artificial Sequence
  Description of Artificial Sequence: Synthetic oligonucleotide
caagacugcuug

SEQ ID NO: 38868 - RNA, 12 nt, Artificial Sequence
  Description of Artificial Sequence: Synthetic oligonucleotide
ccaugucuuugg

SEQ ID NO: 38869 - RNA, 10 nt, Artificial Sequence
  Description of Artificial Sequence: Synthetic oligonucleotide
ccugaaacac

SEQ ID NO: 38870 - RNA, 11 nt, Artificial Sequence
  Description of Artificial Sequence: Synthetic oligonucleotide
cucuguaccuc

SEQ ID NO: 38871 - RNA, 11 nt, Artificial Sequence
  Description of Artificial Sequence: Synthetic oligonucleotide
gcaagacaaga

SEQ ID NO: 38872 - RNA, 12 nt, Artificial Sequence
  Description of Artificial Sequence: Synthetic oligonucleotide
caagacaagaaa

SEQ ID NO: 38873 - RNA, 11 nt, Artificial Sequence
  Description of Artificial Sequence: Synthetic oligonucleotide
guacaagaucc

SEQ ID NO: 38874 - RNA, 11 nt, Artificial Sequence
  Description of Artificial Sequence: Synthetic oligonucleotide
guacuugcaga

SEQ ID NO: 38875 - RNA, 12 nt, Artificial Sequence
  Description of Artificial Sequence: Synthetic oligonucleotide
gaucgauacaga

SEQ ID NO: 38876 - RNA, 12 nt, Artificial Sequence
  Description of Artificial Sequence: Synthetic oligonucleotide
auaaaaauaaau

SEQ ID NO: 38877 - RNA, 12 nt, Artificial Sequence
  Description of Artificial Sequence: Synthetic oligonucleotide
aaaaauaaauau

SEQ ID NO: 38878 - RNA, 12 nt, Artificial Sequence
  Description of Artificial Sequence: Synthetic oligonucleotide
uugacugcugug

SEQ ID NO: 38879 - RNA, 12 nt, Artificial Sequence
  Description of Artificial Sequence: Synthetic oligonucleotide
gagaugagagac

SEQ ID NO: 38880 - RNA, 9 nt, Artificial Sequence
  Description of Artificial Sequence: Synthetic oligonucleotide
cccacuugg

SEQ ID NO: 38881 - RNA, 2420 nt, Homo sapiens; identical to SEQ ID NO: 36496

SEQ ID NO: 38882 - RNA, 1778 nt, Homo sapiens; identical to SEQ ID NO: 36729

SEQ ID NO: 38883 - RNA, 1888 nt, Homo sapiens; identical to SEQ ID NO: 36900

SEQ ID NO: 38884 - RNA, 3757 nt, Homo sapiens; identical to SEQ ID NO: 37085

SEQ ID NO: 38885 - RNA, 3757 nt, Homo sapiens; identical to SEQ ID NO: 37086

SEQ ID NO: 38886 - RNA, 1312 nt, Homo sapiens; identical to SEQ ID NO: 37087

SEQ ID NO: 38887 - RNA, 3679 nt, Homo sapiens; identical to SEQ ID NO: 37088

SEQ ID NO: 38888 - RNA, 19 nt, Artificial Sequence
  Description of Artificial Sequence: Synthetic oligonucleotide
aacuggaugcauuacaacc

SEQ ID NO: 38889 - RNA, 19 nt, Artificial Sequence
  Description of Artificial Sequence: Synthetic oligonucleotide
accggcaggagcugaacaa

SEQ ID NO: 38890 - RNA, 19 nt, Artificial Sequence
  Description of Artificial Sequence: Synthetic oligonucleotide
acuggaugcauuacaacca

SEQ ID NO: 38891 - RNA, 19 nt, Artificial Sequence
  Description of Artificial Sequence: Synthetic oligonucleotide
ccggcaggagcugaacaag

SEQ ID NO: 38892 - RNA, 19 nt, Artificial Sequence
  Description of Artificial Sequence: Synthetic oligonucleotide
cggcaggagcugaacaaga

SEQ ID NO: 38893 - RNA, 19 nt, Artificial Sequence
  Description of Artificial Sequence: Synthetic oligonucleotide
cuaccggcaggagcugaac

SEQ ID NO: 38894 - RNA, 19 nt, Artificial Sequence
  Description of Artificial Sequence: Synthetic oligonucleotide
ggcaggagcugaacaagac

SEQ ID NO: 38895 - RNA, 19 nt, Artificial Sequence
  Description of Artificial Sequence: Synthetic oligonucleotide
uaccggcaggagcugaaca

SEQ ID NO: 38896 - RNA, 19 nt, Artificial Sequence
  Description of Artificial Sequence: Synthetic oligonucleotide
ucuaccggcaggagcugaa

SEQ ID NO: 38897 - RNA, 19 nt, Artificial Sequence
  Description of Artificial Sequence: Synthetic oligonucleotide
uucuaccggcaggagcuga

SEQ ID NO: 38898 - RNA, 19 nt, Artificial Sequence
  Description of Artificial Sequence: Synthetic oligonucleotide
aagguggccaucaagaagc

SEQ ID NO: 38899 - RNA, 19 nt, Artificial Sequence
  Description of Artificial Sequence: Synthetic oligonucleotide
acaucuggucugugggcug

SEQ ID NO: 38900 - RNA, 19 nt, Artificial Sequence
  Description of Artificial Sequence: Synthetic oligonucleotide
agguggccaucaagaagcu

SEQ ID NO: 38901 - RNA, 19 nt, Artificial Sequence
  Description of Artificial Sequence: Synthetic oligonucleotide
gacaucuggucugugggcu

SEQ ID NO: 38902 - RNA, 19 nt, Artificial Sequence
  Description of Artificial Sequence: Synthetic oligonucleotide
ggacaucuggucugugggc

SEQ ID NO: 38903 - RNA, 19 nt, Artificial Sequence
  Description of Artificial Sequence: Synthetic oligonucleotide
gguggccaucaagaagcug

SEQ ID NO: 38904 - RNA, 19 nt, Artificial Sequence
  Description of Artificial Sequence: Synthetic oligonucleotide
guggacaucuggucugugg

SEQ ID NO: 38905 - RNA, 19 nt, Artificial Sequence
  Description of Artificial Sequence: Synthetic oligonucleotide
ucgccaagcgcgccuaccg

SEQ ID NO: 38906 - RNA, 19 nt, Artificial Sequence
  Description of Artificial Sequence: Synthetic oligonucleotide
uggacaucuggucuguggg

SEQ ID NO: 38907 - RNA, 19 nt, Artificial Sequence
  Description of Artificial Sequence: Synthetic oligonucleotide
uucgccaagcgcgccuacc

SEQ ID NO: 38908 - RNA, 19 nt, Artificial Sequence
  Description of Artificial Sequence: Synthetic oligonucleotide
aagacugugagcugaagau

SEQ ID NO: 38909 - RNA, 19 nt, Artificial Sequence
  Description of Artificial Sequence: Synthetic oligonucleotide
gaagacugugagcugaaga

SEQ ID NO: 38910 - RNA, 19 nt, Artificial Sequence
  Description of Artificial Sequence: Synthetic oligonucleotide
cugaagauucuggauuuug

SEQ ID NO: 38911 - RNA, 19 nt, Artificial Sequence
  Description of Artificial Sequence: Synthetic oligonucleotide
ugaagauucuggauuuugg

SEQ ID NO: 38912 - RNA, 19 nt, Artificial Sequence
  Description of Artificial Sequence: Synthetic oligonucleotide
aucugguccgugggcugca

SEQ ID NO: 38913 - RNA, 19 nt, Artificial Sequence
  Description of Artificial Sequence: Synthetic oligonucleotide
ucugguccgugggcugcau

SEQ ID NO: 38914 - RNA, 19 nt, Artificial Sequence
  Description of Artificial Sequence: Synthetic oligonucleotide
cugguccgugggcugcauc

SEQ ID NO: 38915 - RNA, 19 nt, Artificial Sequence
  Description of Artificial Sequence: Synthetic oligonucleotide
ugguccgugggcugcauca

SEQ ID NO: 38916 - RNA, 19 nt, Artificial Sequence
  Description of Artificial Sequence: Synthetic oligonucleotide
gguccgugggcugcaucau

SEQ ID NO: 38917 - RNA, 19 nt, Artificial Sequence
  Description of Artificial Sequence: Synthetic oligonucleotide
guccgugggcugcaucaug

SEQ ID NO: 38918 - RNA, 19 nt, Artificial Sequence
  Description of Artificial Sequence: Synthetic oligonucleotide
uccgugggcugcaucaugg

SEQ ID NO: 38919 - RNA, 19 nt, Artificial Sequence
  Description of Artificial Sequence: Synthetic oligonucleotide
ccgugggcugcaucauggc

SEQ ID NO: 38920 - RNA, 19 nt, Artificial Sequence
  Description of Artificial Sequence: Synthetic oligonucleotide
caaaaaaaaaaaaaaaaaa

SEQ ID NO: 38921 - RNA, 19 nt, Artificial Sequence
  Description of Artificial Sequence: Synthetic oligonucleotide
cuggauuucgggcuggcgc

SEQ ID NO: 38922 - RNA, 19 nt, Artificial Sequence
  Description of Artificial Sequence: Synthetic oligonucleotide
cugugaacgaggacuguga

SEQ ID NO: 38923 - RNA, 19 nt, Artificial Sequence
  Description of Artificial Sequence: Synthetic oligonucleotide
gcugugaacgaggacugug

SEQ ID NO: 38924 - RNA, 19 nt, Artificial Sequence
  Description of Artificial Sequence: Synthetic oligonucleotide
ggcugugaacgaggacugu

SEQ ID NO: 38925 - RNA, 19 nt, Artificial Sequence
  Description of Artificial Sequence: Synthetic oligonucleotide
uggauuucgggcuggcgcg

SEQ ID NO: 38926 - RNA, 19 nt, Artificial Sequence
  Description of Artificial Sequence: Synthetic oligonucleotide
uggcugugaacgaggacug

SEQ ID NO: 38927 - RNA, 19 nt, Artificial Sequence
  Description of Artificial Sequence: Synthetic oligonucleotide
augcauuacaaccaaacag

SEQ ID NO: 38928 - RNA, 19 nt, Artificial Sequence
  Description of Artificial Sequence: Synthetic oligonucleotide
cuggaugcauuacaaccaa

SEQ ID NO: 38929 - RNA, 19 nt, Artificial Sequence
  Description of Artificial Sequence: Synthetic oligonucleotide
gaugcauuacaaccaaaca

SEQ ID NO: 38930 - RNA, 19 nt, Artificial Sequence
  Description of Artificial Sequence: Synthetic oligonucleotide
ggaugcauuacaaccaaac

SEQ ID NO: 38931 - RNA, 19 nt, Artificial Sequence
  Description of Artificial Sequence: Synthetic oligonucleotide
ugcauuacaaccaaacagu

SEQ ID NO: 38932 - RNA, 19 nt, Artificial Sequence
  Description of Artificial Sequence: Synthetic oligonucleotide
uggaugcauuacaaccaaa

SEQ ID NO: 38933 - RNA, 19 nt, Artificial Sequence
  Description of Artificial Sequence: Synthetic oligonucleotide
cugugaacgaagacuguga

SEQ ID NO: 38934 - RNA, 19 nt, Artificial Sequence
  Description of Artificial Sequence: Synthetic oligonucleotide
gcugugaacgaagacugug

SEQ ID NO: 38935 - RNA, 19 nt, Artificial Sequence
  Description of Artificial Sequence: Synthetic oligonucleotide
ggcugugaacgaagacugu

SEQ ID NO: 38936 - RNA, 19 nt, Artificial Sequence
  Description of Artificial Sequence: Synthetic oligonucleotide
gugaacgaagacugugagc

SEQ ID NO: 38937 - RNA, 19 nt, Artificial Sequence
  Description of Artificial Sequence: Synthetic oligonucleotide
ugaacgaagacugugagcu

SEQ ID NO: 38938 - RNA, 19 nt, Artificial Sequence
  Description of Artificial Sequence: Synthetic oligonucleotide
uggcugugaacgaagacug

SEQ ID NO: 38939 - RNA, 19 nt, Artificial Sequence
  Description of Artificial Sequence: Synthetic oligonucleotide
ugugaacgaagacugugag

SEQ ID NO: 38940 - RNA, 19 nt, Artificial Sequence
  Description of Artificial Sequence: Synthetic oligonucleotide
aucuggucugugggcugca

SEQ ID NO: 38941 - RNA, 19 nt, Artificial Sequence
  Description of Artificial Sequence: Synthetic oligonucleotide
caucuggucugugggcugc

SEQ ID NO: 38942 - RNA, 19 nt, Artificial Sequence
  Description of Artificial Sequence: Synthetic oligonucleotide
cuggucugugggcugcauc

SEQ ID NO: 38943 - RNA, 19 nt, Artificial Sequence
  Description of Artificial Sequence: Synthetic oligonucleotide
cugugggcugcaucauggc

SEQ ID NO: 38944 - RNA, 19 nt, Artificial Sequence
  Description of Artificial Sequence: Synthetic oligonucleotide
gcaaccuggcugugaacga

SEQ ID NO: 38945 - RNA, 19 nt, Artificial Sequence
  Description of Artificial Sequence: Synthetic oligonucleotide
ggcaaccuggcugugaacg

SEQ ID NO: 38946 - RNA, 19 nt, Artificial Sequence
  Description of Artificial Sequence: Synthetic oligonucleotide
ggucugugggcugcaucau

SEQ ID NO: 38947 - RNA, 19 nt, Artificial Sequence
  Description of Artificial Sequence: Synthetic oligonucleotide
gucugugggcugcaucaug

SEQ ID NO: 38948 - RNA, 19 nt, Artificial Sequence
  Description of Artificial Sequence: Synthetic oligonucleotide
ucuggucugugggcugcau

SEQ ID NO: 38949 - RNA, 19 nt, Artificial Sequence
  Description of Artificial Sequence: Synthetic oligonucleotide
ucugugggcugcaucaugg

SEQ ID NO: 38950 - RNA, 19 nt, Artificial Sequence
  Description of Artificial Sequence: Synthetic oligonucleotide
uggucugugggcugcauca

SEQ ID NO: 38951 - RNA, 19 nt, Artificial Sequence
  Description of Artificial Sequence: Synthetic oligonucleotide
aacgaagacugugagcuga

SEQ ID NO: 38952 - RNA, 19 nt, Artificial Sequence
  Description of Artificial Sequence: Synthetic oligonucleotide
acgaagacugugagcugaa

SEQ ID NO: 38953 - RNA, 19 nt, Artificial Sequence
  Description of Artificial Sequence: Synthetic oligonucleotide
acugugagcugaagauccu

SEQ ID NO: 38954 - RNA, 19 nt, Artificial Sequence
  Description of Artificial Sequence: Synthetic oligonucleotide
agacugugagcugaagauc

SEQ ID NO: 38955 - RNA, 19 nt, Artificial Sequence
  Description of Artificial Sequence: Synthetic oligonucleotide
cgaagacugugagcugaag

SEQ ID NO: 38956 - RNA, 19 nt, Artificial Sequence
  Description of Artificial Sequence: Synthetic oligonucleotide
cugugagcugaagauccug

SEQ ID NO: 38957 - RNA, 19 nt, Artificial Sequence
  Description of Artificial Sequence: Synthetic oligonucleotide
gaacgaagacugugagcug

SEQ ID NO: 38958 - RNA, 19 nt, Artificial Sequence
  Description of Artificial Sequence: Synthetic oligonucleotide
gacugugagcugaagaucc

SEQ ID NO: 38959 - RNA, 19 nt, Artificial Sequence
  Description of Artificial Sequence: Synthetic oligonucleotide
gugagcugaagauccugga

SEQ ID NO: 38960 - RNA, 19 nt, Artificial Sequence
  Description of Artificial Sequence: Synthetic oligonucleotide
ugugagcugaagauccugg

SEQ ID NO: 38961 - RNA, 19 nt, Artificial Sequence
  Description of Artificial Sequence: Synthetic oligonucleotide
gacuucuaccuggugaugc

SEQ ID NO: 38962 - RNA, 19 nt, Artificial Sequence
  Description of Artificial Sequence: Synthetic oligonucleotide
acuucuaccuggugaugcc

SEQ ID NO: 38963 - RNA, 19 nt, Artificial Sequence
  Description of Artificial Sequence: Synthetic oligonucleotide
cagacaguggacaucuggu

SEQ ID NO: 38964 - RNA, 19 nt, Artificial Sequence
  Description of Artificial Sequence: Synthetic oligonucleotide
agacaguggacaucugguc

SEQ ID NO: 38965 - RNA, 19 nt, Artificial Sequence
  Description of Artificial Sequence: Synthetic oligonucleotide
gacaguggacaucuggucu

SEQ ID NO: 38966 - RNA, 19 nt, Artificial Sequence
  Description of Artificial Sequence: Synthetic oligonucleotide
acaguggacaucuggucug

SEQ ID NO: 38967 - RNA, 19 nt, Artificial Sequence
  Description of Artificial Sequence: Synthetic oligonucleotide
caguggacaucuggucugu

SEQ ID NO: 38968 - RNA, 19 nt, Artificial Sequence
  Description of Artificial Sequence: Synthetic oligonucleotide
aguggacaucuggucugug

SEQ ID NO: 38969 - RNA, 19 nt, Artificial Sequence
  Description of Artificial Sequence: Synthetic oligonucleotide
gacugugaacugaagauuc

SEQ ID NO: 38970 - RNA, 19 nt, Artificial Sequence
  Description of Artificial Sequence: Synthetic oligonucleotide
acugugaacugaagauucu

SEQ ID NO: 38971 - RNA, 19 nt, Artificial Sequence
  Description of Artificial Sequence: Synthetic oligonucleotide
cugugaacugaagauucug

SEQ ID NO: 38972 - RNA, 19 nt, Artificial Sequence
  Description of Artificial Sequence: Synthetic oligonucleotide
ugugaacugaagauucugg

SEQ ID NO: 38973 - RNA, 19 nt, Artificial Sequence
  Description of Artificial Sequence: Synthetic oligonucleotide
gugaacugaagauucugga

SEQ ID NO: 38974 - RNA, 19 nt, Artificial Sequence
  Description of Artificial Sequence: Synthetic oligonucleotide
ugaacugaagauucuggau

SEQ ID NO: 38975 - RNA, 19 nt, Artificial Sequence
  Description of Artificial Sequence: Synthetic oligonucleotide
gaacugaagauucuggauu

SEQ ID NO: 38976 - RNA, 19 nt, Artificial Sequence
  Description of Artificial Sequence: Synthetic oligonucleotide
aacugaagauucuggauuu

SEQ ID NO: 38977 - RNA, 19 nt, Artificial Sequence
  Description of Artificial Sequence: Synthetic oligonucleotide
acugaagauucuggauuuu

SEQ ID NO: 38978 - RNA, 19 nt, Artificial Sequence
  Description of Artificial Sequence: Synthetic oligonucleotide
cuggaugcacuacaaccag

SEQ ID NO: 38979 - RNA, 19 nt, Artificial Sequence
  Description of Artificial Sequence: Synthetic oligonucleotide
uggaugcacuacaaccaga

SEQ ID NO: 38980 - RNA, 19 nt, Artificial Sequence
  Description of Artificial Sequence: Synthetic oligonucleotide
ggaugcacuacaaccagac

SEQ ID NO: 38981 - RNA, 19 nt, Artificial Sequence
  Description of Artificial Sequence: Synthetic oligonucleotide
gaugcacuacaaccagaca

SEQ ID NO: 38982 - RNA, 19 nt, Artificial Sequence
  Description of Artificial Sequence: Synthetic oligonucleotide
augcacuacaaccagacag

SEQ ID NO: 38983 - RNA, 19 nt, Artificial Sequence
  Description of Artificial Sequence: Synthetic oligonucleotide
ugcacuacaaccagacagu

SEQ ID NO: 38984 - RNA, 19 nt, Artificial Sequence
  Description of Artificial Sequence: Synthetic oligonucleotide
gaccugcuggagaagaugc

SEQ ID NO: 38985 - RNA, 19 nt, Artificial Sequence
  Description of Artificial Sequence: Synthetic oligonucleotide
accugcuggagaagaugcu

SEQ ID NO: 38986 - RNA, 19 nt, Artificial Sequence
  Description of Artificial Sequence: Synthetic oligonucleotide
gcugugaaugaagacugug

SEQ ID NO: 38987 - RNA, 19 nt, Artificial Sequence
  Description of Artificial Sequence: Synthetic oligonucleotide
cugugaaugaagacuguga

SEQ ID NO: 38988 - RNA, 19 nt, Artificial Sequence
  Description of Artificial Sequence: Synthetic oligonucleotide
gaagauucuggauuuugga

SEQ ID NO: 38989 - RNA, 19 nt, Artificial Sequence
  Description of Artificial Sequence: Synthetic oligonucleotide
aagauucuggauuuuggac

SEQ ID NO: 38990 - RNA, 19 nt, Artificial Sequence
  Description of Artificial Sequence: Synthetic oligonucleotide
agauucuggauuuuggacu

SEQ ID NO: 38991 - RNA, 19 nt, Artificial Sequence
  Description of Artificial Sequence: Synthetic oligonucleotide
gauucuggauuuuggacug

SEQ ID NO: 38992 - RNA, 19 nt, Artificial Sequence
  Description of Artificial Sequence: Synthetic oligonucleotide
auucuggauuuuggacugg

SEQ ID NO: 38993 - RNA, 19 nt, Artificial Sequence
  Description of Artificial Sequence: Synthetic oligonucleotide
uucuggauuuuggacuggc

SEQ ID NO: 38994 - RNA, 19 nt, Artificial Sequence
  Description of Artificial Sequence: Synthetic oligonucleotide
gugggcuccggcgccuacg

SEQ ID NO: 38995 - RNA, 19 nt, Artificial Sequence
  Description of Artificial Sequence: Synthetic oligonucleotide
ugggcuccggcgccuacgg

SEQ ID NO: 38996 - RNA, 19 nt, Artificial Sequence
  Description of Artificial Sequence: Synthetic oligonucleotide
gggcuccggcgccuacggc

SEQ ID NO: 38997 - RNA, 19 nt, Artificial Sequence
  Description of Artificial Sequence: Synthetic oligonucleotide
gagcugcggcugcucaagc

SEQ ID NO: 38998 - RNA, 19 nt, Artificial Sequence
  Description of Artificial Sequence: Synthetic oligonucleotide
agcugcggcugcucaagca

SEQ ID NO: 38999 - RNA, 19 nt, Artificial Sequence
  Description of Artificial Sequence: Synthetic oligonucleotide
gcugcggcugcucaagcac

SEQ ID NO: 39000 - RNA, 19 nt, Artificial Sequence
  Description of Artificial Sequence: Synthetic oligonucleotide
cacgagaacgucaucgggc

SEQ ID NO: 39001 - RNA, 19 nt, Artificial Sequence
  Description of Artificial Sequence: Synthetic oligonucleotide
acgagaacgucaucgggcu

SEQ ID NO: 39002 - RNA, 19 nt, Artificial Sequence
  Description of Artificial Sequence: Synthetic oligonucleotide
gcaacguggcugugaacga

SEQ ID NO: 39003 - RNA, 19 nt, Artificial Sequence
  Description of Artificial Sequence: Synthetic oligonucleotide
ugugaacgaggacugugag

SEQ ID NO: 39004 - RNA, 19 nt, Artificial Sequence
  Description of Artificial Sequence: Synthetic oligonucleotide
gugaacgaggacugugagc

SEQ ID NO: 39005 - RNA, 19 nt, Artificial Sequence
  Description of Artificial Sequence: Synthetic oligonucleotide
ugaacgaggacugugagcu

SEQ ID NO: 39006 - RNA, 19 nt, Artificial Sequence
  Description of Artificial Sequence: Synthetic oligonucleotide
gugggcugcaucauggcug

SEQ ID NO: 39007 - RNA, 19 nt, Artificial Sequence
  Description of Artificial Sequence: Synthetic oligonucleotide
ugggcugcaucauggcuga

SEQ ID NO: 39008 - RNA, 19 nt, Artificial Sequence
  Description of Artificial Sequence: Synthetic oligonucleotide
gggcugcaucauggcugag

SEQ ID NO: 39009 - RNA, 19 nt, Artificial Sequence
  Description of Artificial Sequence: Synthetic oligonucleotide
cucaaaaaaaaaaaaaaaa

SEQ ID NO: 39010 - RNA, 19 nt, Artificial Sequence
  Description of Artificial Sequence: Synthetic oligonucleotide
ucaaaaaaaaaaaaaaaaa

SEQ ID NO: 39011 - RNA, 19 nt, Artificial Sequence
  Description of Artificial Sequence: Synthetic oligonucleotide
accgggagcugcggcugcu

SEQ ID NO: 39012 - RNA, 19 nt, Artificial Sequence
  Description of Artificial Sequence: Synthetic oligonucleotide
uaccgggagcugcggcugc

SEQ ID NO: 39013 - RNA, 19 nt, Artificial Sequence
  Description of Artificial Sequence: Synthetic oligonucleotide
agaucaugcucaacuggau

SEQ ID NO: 39014 - RNA, 19 nt, Artificial Sequence
  Description of Artificial Sequence: Synthetic oligonucleotide
aucaugcucaacuggaugc

SEQ ID NO: 39015 - RNA, 19 nt, Artificial Sequence
  Description of Artificial Sequence: Synthetic oligonucleotide
augcucaacuggaugcauu

SEQ ID NO: 39016 - RNA, 19 nt, Artificial Sequence
  Description of Artificial Sequence: Synthetic oligonucleotide
caacuggaugcauuacaac

SEQ ID NO: 39017 - RNA, 19 nt, Artificial Sequence
  Description of Artificial Sequence: Synthetic oligonucleotide
caugcucaacuggaugcau

SEQ ID NO: 39018 - RNA, 19 nt, Artificial Sequence
  Description of Artificial Sequence: Synthetic oligonucleotide
ccugagaucaugcucaacu

SEQ ID NO: 39019 - RNA, 19 nt, Artificial Sequence
  Description of Artificial Sequence: Synthetic oligonucleotide
cucaacuggaugcauuaca

SEQ ID NO: 39020 - RNA, 19 nt, Artificial Sequence
  Description of Artificial Sequence: Synthetic oligonucleotide
cugagaucaugcucaacug

SEQ ID NO: 39021 - RNA, 19 nt, Artificial Sequence
  Description of Artificial Sequence: Synthetic oligonucleotide
cuucuaccggcaggagcug

SEQ ID NO: 39022 - RNA, 19 nt, Artificial Sequence
  Description of Artificial Sequence: Synthetic oligonucleotide
gagaucaugcucaacugga

SEQ ID NO: 39023 - RNA, 19 nt, Artificial Sequence
  Description of Artificial Sequence: Synthetic oligonucleotide
gaucaugcucaacuggaug

SEQ ID NO: 39024 - RNA, 19 nt, Artificial Sequence
  Description of Artificial Sequence: Synthetic oligonucleotide
gcaggagcugaacaagacc

SEQ ID NO: 39025 - RNA, 19 nt, Artificial Sequence
  Description of Artificial Sequence: Synthetic oligonucleotide
gcucaacuggaugcauuac

SEQ ID NO: 39026 - RNA, 19 nt, Artificial Sequence
  Description of Artificial Sequence: Synthetic oligonucleotide
gggcaccugagaucaugcu

SEQ ID NO: 39027 - RNA, 19 nt, Artificial Sequence
  Description of Artificial Sequence: Synthetic oligonucleotide
ucaacuggaugcauuacaa

SEQ ID NO: 39028 - RNA, 19 nt, Artificial Sequence
  Description of Artificial Sequence: Synthetic oligonucleotide
ucaugcucaacuggaugca

SEQ ID NO: 39029 - RNA, 19 nt, Artificial Sequence
  Description of Artificial Sequence: Synthetic oligonucleotide
ugagaucaugcucaacugg

SEQ ID NO: 39030 - RNA, 19 nt, Artificial Sequence
  Description of Artificial Sequence: Synthetic oligonucleotide
ugcucaacuggaugcauua

SEQ ID NO: 39031 - RNA, 19 nt, Artificial Sequence
  Description of Artificial Sequence: Synthetic oligonucleotide
acgagaacgugaucgggcu

SEQ ID NO: 39032 - RNA, 19 nt, Artificial Sequence
  Description of Artificial Sequence: Synthetic oligonucleotide
agcugcgccugcucaagca

SEQ ID NO: 39033 - RNA, 19 nt, Artificial Sequence
  Description of Artificial Sequence: Synthetic oligonucleotide
cacgagaacgugaucgggc

SEQ ID NO: 39034 - RNA, 19 nt, Artificial Sequence
  Description of Artificial Sequence: Synthetic oligonucleotide
cuaaaaaaaaaaaaaaaaa

SEQ ID NO: 39035 - RNA, 19 nt, Artificial Sequence
  Description of Artificial Sequence: Synthetic oligonucleotide
gagcugcgccugcucaagc

SEQ ID NO: 39036 - RNA, 19 nt, Artificial Sequence
  Description of Artificial Sequence: Synthetic oligonucleotide
gcugcgccugcucaagcac

SEQ ID NO: 39037 - RNA, 19 nt, Artificial Sequence
  Description of Artificial Sequence: Synthetic oligonucleotide
gggcucgggcgccuacggc

SEQ ID NO: 39038 - RNA, 19 nt, Artificial Sequence
  Description of Artificial Sequence: Synthetic oligonucleotide
gggcugcaucauggcggag

SEQ ID NO: 39039 - RNA, 19 nt, Artificial Sequence
  Description of Artificial Sequence: Synthetic oligonucleotide
gugggcucgggcgccuacg

SEQ ID NO: 39040 - RNA, 19 nt, Artificial Sequence
  Description of Artificial Sequence: Synthetic oligonucleotide
gugggcugcaucauggcgg

SEQ ID NO: 39041 - RNA, 19 nt, Artificial Sequence
  Description of Artificial Sequence: Synthetic oligonucleotide
uaaaaaaaaaaaaaaaaaa

SEQ ID NO: 39042 - RNA, 19 nt, Artificial Sequence
  Description of Artificial Sequence: Synthetic oligonucleotide
ugggcucgggcgccuacgg

SEQ ID NO: 39043 - RNA, 19 nt, Artificial Sequence
  Description of Artificial Sequence: Synthetic oligonucleotide
ugggcugcaucauggcgga

SEQ ID NO: 39044 - RNA, 19 nt, Artificial Sequence
  Description of Artificial Sequence: Synthetic oligonucleotide
aagcccggcaaccuggcug

SEQ ID NO: 39045 - RNA, 19 nt, Artificial Sequence
  Description of Artificial Sequence: Synthetic oligonucleotide
aagcgcgccuaccgcgagc

SEQ ID NO: 39046 - RNA, 19 nt, Artificial Sequence
  Description of Artificial Sequence: Synthetic oligonucleotide
acacuggaugaauggaagc

SEQ ID NO: 39047 - RNA, 19 nt, Artificial Sequence
  Description of Artificial Sequence: Synthetic oligonucleotide
accuccuggagaagaugcu

SEQ ID NO: 39048 - RNA, 19 nt, Artificial Sequence
  Description of Artificial Sequence: Synthetic oligonucleotide
accugaagcccggcaaccu

SEQ ID NO: 39049 - RNA, 19 nt, Artificial Sequence
  Description of Artificial Sequence: Synthetic oligonucleotide
accuggugaugccguucau

SEQ ID NO: 39050 - RNA, 19 nt, Artificial Sequence
  Description of Artificial Sequence: Synthetic oligonucleotide
acgguggacaucuggucug

SEQ ID NO: 39051 - RNA, 19 nt, Artificial Sequence
  Description of Artificial Sequence: Synthetic oligonucleotide
acguggugacccgguggua

SEQ ID NO: 39052 - RNA, 19 nt, Artificial Sequence
  Description of Artificial Sequence: Synthetic oligonucleotide
acuggguacguggugaccc

SEQ ID NO: 39053 - RNA, 19 nt, Artificial Sequence
  Description of Artificial Sequence: Synthetic oligonucleotide
acuuuuaccuggugaugcc

SEQ ID NO: 39054 - RNA, 19 nt, Artificial Sequence
  Description of Artificial Sequence: Synthetic oligonucleotide
agacgguggacaucugguc

SEQ ID NO: 39055 - RNA, 19 nt, Artificial Sequence
  Description of Artificial Sequence: Synthetic oligonucleotide
agaugacuggguacguggu

SEQ ID NO: 39056 - RNA, 19 nt, Artificial Sequence
  Description of Artificial Sequence: Synthetic oligonucleotide
agcccggcaaccuggcugu

SEQ ID NO: 39057 - RNA, 19 nt, Artificial Sequence
  Description of Artificial Sequence: Synthetic oligonucleotide
agcgcgccuaccgcgagcu

SEQ ID NO: 39058 - RNA, 19 nt, Artificial Sequence
  Description of Artificial Sequence: Synthetic oligonucleotide
augacuggguacgugguga

SEQ ID NO: 39059 - RNA, 19 nt, Artificial Sequence
  Description of Artificial Sequence: Synthetic oligonucleotide
caagcgcgccuaccgcgag

SEQ ID NO: 39060 - RNA, 19 nt, Artificial Sequence
  Description of Artificial Sequence: Synthetic oligonucleotide
cacacuggaugaauggaag

SEQ ID NO: 39061 - RNA, 19 nt, Artificial Sequence
  Description of Artificial Sequence: Synthetic oligonucleotide
cagacgguggacaucuggu

SEQ ID NO: 39062 - RNA, 19 nt, Artificial Sequence
  Description of Artificial Sequence: Synthetic oligonucleotide
ccaagcgcgccuaccgcga

SEQ ID NO: 39063 - RNA, 19 nt, Artificial Sequence
  Description of Artificial Sequence: Synthetic oligonucleotide
cccggcaaccuggcuguga

SEQ ID NO: 39064 - RNA, 19 nt, Artificial Sequence
  Description of Artificial Sequence: Synthetic oligonucleotide
ccggcaaccuggcugugaa

SEQ ID NO: 39065 - RNA, 19 nt, Artificial Sequence
  Description of Artificial Sequence: Synthetic oligonucleotide
ccuccuggagaagaugcug

SEQ ID NO: 39066 - RNA, 19 nt, Artificial Sequence
  Description of Artificial Sequence: Synthetic oligonucleotide
ccugaagcccggcaaccug

SEQ ID NO: 39067 - RNA, 19 nt, Artificial Sequence
  Description of Artificial Sequence: Synthetic oligonucleotide
ccuggugaugccguucaug

SEQ ID NO: 39068 - RNA, 19 nt, Artificial Sequence
  Description of Artificial Sequence: Synthetic oligonucleotide
cgccaagcgcgccuaccgc

SEQ ID NO: 39069 - RNA, 19 nt, Artificial Sequence
  Description of Artificial Sequence: Synthetic oligonucleotide
cgcgccuaccgcgagcugc

SEQ ID NO: 39070 - RNA, 19 nt, Artificial Sequence
  Description of Artificial Sequence: Synthetic oligonucleotide
cgguggacaucuggucugu

SEQ ID NO: 39071 - RNA, 19 nt, Artificial Sequence
  Description of Artificial Sequence: Synthetic oligonucleotide
cguggugacccggugguac

SEQ ID NO: 39072 - RNA, 19 nt, Artificial Sequence
  Description of Artificial Sequence: Synthetic oligonucleotide
cuccuggagaagaugcugg

SEQ ID NO: 39073 - RNA, 19 nt, Artificial Sequence
  Description of Artificial Sequence: Synthetic oligonucleotide
cugaagcccggcaaccugg

SEQ ID NO: 39074 - RNA, 19 nt, Artificial Sequence
  Description of Artificial Sequence: Synthetic oligonucleotide
cuggagaagaugcuggugc

SEQ ID NO: 39075 - RNA, 19 nt, Artificial Sequence
  Description of Artificial Sequence: Synthetic oligonucleotide
cuggguacguggugacccg

SEQ ID NO: 39076 - RNA, 19 nt, Artificial Sequence
  Description of Artificial Sequence: Synthetic oligonucleotide
gaagcccggcaaccuggcu

SEQ ID NO: 39077 - RNA, 19 nt, Artificial Sequence
  Description of Artificial Sequence: Synthetic oligonucleotide
gaccugaagcccggcaacc

SEQ ID NO: 39078 - RNA, 19 nt, Artificial Sequence
  Description of Artificial Sequence: Synthetic oligonucleotide
gacgguggacaucuggucu

SEQ ID NO: 39079 - RNA, 19 nt, Artificial Sequence
  Description of Artificial Sequence: Synthetic oligonucleotide
gacuggguacguggugacc

SEQ ID NO: 39080 - RNA, 19 nt, Artificial Sequence
  Description of Artificial Sequence: Synthetic oligonucleotide
gacuuuuaccuggugaugc

SEQ ID NO: 39081 - RNA, 19 nt, Artificial Sequence
  Description of Artificial Sequence: Synthetic oligonucleotide
gagaugacuggguacgugg

SEQ ID NO: 39082 - RNA, 19 nt, Artificial Sequence
  Description of Artificial Sequence: Synthetic oligonucleotide
gaugacuggguacguggug

SEQ ID NO: 39083 - RNA, 19 nt, Artificial Sequence
  Description of Artificial Sequence: Synthetic oligonucleotide
gccaagcgcgccuaccgcg

SEQ ID NO: 39084 - RNA, 19 nt, Artificial Sequence
  Description of Artificial Sequence: Synthetic oligonucleotide
gcccggcaaccuggcugug

SEQ ID NO: 39085 - RNA, 19 nt, Artificial Sequence
  Description of Artificial Sequence: Synthetic oligonucleotide
gcgcgccuaccgcgagcug

SEQ ID NO: 39086 - RNA, 19 nt, Artificial Sequence
  Description of Artificial Sequence: Synthetic oligonucleotide
gguggacaucuggucugug

SEQ ID NO: 39087 - RNA, 19 nt, Artificial Sequence
  Description of Artificial Sequence: Synthetic oligonucleotide
guggccaucaagaagcugu

SEQ ID NO: 39088 - RNA, 19 nt, Artificial Sequence
  Description of Artificial Sequence: Synthetic oligonucleotide
guggugacccggugguacc

SEQ ID NO: 39089 - RNA, 19 nt, Artificial Sequence
  Description of Artificial Sequence: Synthetic oligonucleotide
guucgccaagcgcgccuac

SEQ ID NO: 39090 - RNA, 19 nt, Artificial Sequence
  Description of Artificial Sequence: Synthetic oligonucleotide
uaagguggccaucaagaag

SEQ ID NO: 39091 - RNA, 19 nt, Artificial Sequence
  Description of Artificial Sequence: Synthetic oligonucleotide
uaccuggugaugccguuca

SEQ ID NO: 39092 - RNA, 19 nt, Artificial Sequence
  Description of Artificial Sequence: Synthetic oligonucleotide
uacguggugacccgguggu

SEQ ID NO: 39093 - RNA, 19 nt, Artificial Sequence
  Description of Artificial Sequence: Synthetic oligonucleotide
ugaagcccggcaaccuggc

SEQ ID NO: 39094 - RNA, 19 nt, Artificial Sequence
  Description of Artificial Sequence: Synthetic oligonucleotide
ugacuggguacguggugac

SEQ ID NO: 39095 - RNA, 19 nt, Artificial Sequence
  Description of Artificial Sequence: Synthetic oligonucleotide
uggagaagaugcuggugcu

SEQ ID NO: 39096 - RNA, 19 nt, Artificial Sequence
  Description of Artificial Sequence: Synthetic oligonucleotide
uggugacccggugguaccg

SEQ ID NO: 39097 - RNA, 19 nt, Artificial Sequence
  Description of Artificial Sequence: Synthetic oligonucleotide
uguucgccaagcgcgccua

SEQ ID NO: 39098 - RNA, 19 nt, Artificial Sequence
  Description of Artificial Sequence: Synthetic oligonucleotide
uaccgggagcugcugcugc

SEQ ID NO: 39099 - RNA, 19 nt, Artificial Sequence
  Description of Artificial Sequence: Synthetic oligonucleotide
accgggagcugcugcugcu

SEQ ID NO: 39100 - RNA, 19 nt, Artificial Sequence
  Description of Artificial Sequence: Synthetic oligonucleotide
uggcugugaaugaggacug

SEQ ID NO: 39101 - RNA, 19 nt, Artificial Sequence
  Description of Artificial Sequence: Synthetic oligonucleotide
ggcugugaaugaggacugu

SEQ ID NO: 39102 - RNA, 19 nt, Artificial Sequence
  Description of Artificial Sequence: Synthetic oligonucleotide
gcugugaaugaggacugug

SEQ ID NO: 39103 - RNA, 19 nt, Artificial Sequence
  Description of Artificial Sequence: Synthetic oligonucleotide
cugugaaugaggacuguga

SEQ ID NO: 39104 - RNA, 19 nt, Artificial Sequence
  Description of Artificial Sequence: Synthetic oligonucleotide
cuggauuuugggcuggcgc

SEQ ID NO: 39105 - RNA, 19 nt, Artificial Sequence
  Description of Artificial Sequence: Synthetic oligonucleotide
uggauuuugggcuggcgcg

SEQ ID NO: 39106 - RNA, 19 nt, Artificial Sequence
  Description of Artificial Sequence: Synthetic oligonucleotide
gaagguggccaucaagaag

SEQ ID NO: 39107 - RNA, 19 nt, Artificial Sequence
  Description of Artificial Sequence: Synthetic oligonucleotide
guggccaucaagaagcuga

SEQ ID NO: 39108 - RNA, 19 nt, Artificial Sequence
  Description of Artificial Sequence: Synthetic oligonucleotide
ucuucgccaagcgcgccua

SEQ ID NO: 39109 - RNA, 19 nt, Artificial Sequence
  Description of Artificial Sequence: Synthetic oligonucleotide
cuucgccaagcgcgccuac

SEQ ID NO: 39110 - RNA, 19 nt, Artificial Sequence
  Description of Artificial Sequence: Synthetic oligonucleotide
cgccaagcgcgccuaccgg

SEQ ID NO: 39111 - RNA, 19 nt, Artificial Sequence
  Description of Artificial Sequence: Synthetic oligonucleotide
gccaagcgcgccuaccggg

SEQ ID NO: 39112 - RNA, 19 nt, Artificial Sequence
  Description of Artificial Sequence: Synthetic oligonucleotide
ccaagcgcgccuaccggga

SEQ ID NO: 39113 - RNA, 19 nt, Artificial Sequence
  Description of Artificial Sequence: Synthetic oligonucleotide
caagcgcgccuaccgggag

SEQ ID NO: 39114 - RNA, 19 nt, Artificial Sequence
  Description of Artificial Sequence: Synthetic oligonucleotide
aagcgcgccuaccgggagc

SEQ ID NO: 39115 - RNA, 19 nt, Artificial Sequence
  Description of Artificial Sequence: Synthetic oligonucleotide
agcgcgccuaccgggagcu

SEQ ID NO: 39116 - RNA, 19 nt, Artificial Sequence
  Description of Artificial Sequence: Synthetic oligonucleotide
gcgcgccuaccgggagcug

SEQ ID NO: 39117 - RNA, 19 nt, Artificial Sequence
  Description of Artificial Sequence: Synthetic oligonucleotide
cgcgccuaccgggagcugc

SEQ ID NO: 39118 - RNA, 19 nt, Artificial Sequence
  Description of Artificial Sequence: Synthetic oligonucleotide
uaccuggugaugcccuuca

SEQ ID NO: 39119 - RNA, 19 nt, Artificial Sequence
  Description of Artificial Sequence: Synthetic oligonucleotide
accuggugaugcccuucau

SEQ ID NO: 39120 - RNA, 19 nt, Artificial Sequence
  Description of Artificial Sequence: Synthetic oligonucleotide
ccuggugaugcccuucaug

SEQ ID NO: 39121 - RNA, 19 nt, Artificial Sequence
  Description of Artificial Sequence: Synthetic oligonucleotide
gaccugaagccaggcaacc

SEQ ID NO: 39122 - RNA, 19 nt, Artificial Sequence
  Description of Artificial Sequence: Synthetic oligonucleotide
accugaagccaggcaaccu

SEQ ID NO: 39123 - RNA, 19 nt, Artificial Sequence
  Description of Artificial Sequence: Synthetic oligonucleotide
ccugaagccaggcaaccug

SEQ ID NO: 39124 - RNA, 19 nt, Artificial Sequence
  Description of Artificial Sequence: Synthetic oligonucleotide
cugaagccaggcaaccugg

SEQ ID NO: 39125 - RNA, 19 nt, Artificial Sequence
  Description of Artificial Sequence: Synthetic oligonucleotide
ugaagccaggcaaccuggc

SEQ ID NO: 39126 - RNA, 19 nt, Artificial Sequence
  Description of Artificial Sequence: Synthetic oligonucleotide
gaagccaggcaaccuggcu

SEQ ID NO: 39127 - RNA, 19 nt, Artificial Sequence
  Description of Artificial Sequence: Synthetic oligonucleotide
aagccaggcaaccuggcug

SEQ ID NO: 39128 - RNA, 19 nt, Artificial Sequence
  Description of Artificial Sequence: Synthetic oligonucleotide
agccaggcaaccuggcugu

SEQ ID NO: 39129 - RNA, 19 nt, Artificial Sequence
  Description of Artificial Sequence: Synthetic oligonucleotide
gccaggcaaccuggcugug

SEQ ID NO: 39130 - RNA, 19 nt, Artificial Sequence
  Description of Artificial Sequence: Synthetic oligonucleotide
ccaggcaaccuggcuguga

SEQ ID NO: 39131 - RNA, 19 nt, Artificial Sequence
  Description of Artificial Sequence: Synthetic oligonucleotide
caggcaaccuggcugugaa

SEQ ID NO: 39132 - RNA, 19 nt, Artificial Sequence
  Description of Artificial Sequence: Synthetic oligonucleotide
ggcaaccuggcugugaaug

SEQ ID NO: 39133 - RNA, 19 nt, Artificial Sequence
  Description of Artificial Sequence: Synthetic oligonucleotide
gcaaccuggcugugaauga

SEQ ID NO: 39134 - RNA, 19 nt, Artificial Sequence
  Description of Artificial Sequence: Synthetic oligonucleotide
gagaugacuggcuacgugg

SEQ ID NO: 39135 - RNA, 19 nt, Artificial Sequence
  Description of Artificial Sequence: Synthetic oligonucleotide
agaugacuggcuacguggu

SEQ ID NO: 39136 - RNA, 19 nt, Artificial Sequence
  Description of Artificial Sequence: Synthetic oligonucleotide
gaugacuggcuacguggug

SEQ ID NO: 39137 - RNA, 19 nt, Artificial Sequence
  Description of Artificial Sequence: Synthetic oligonucleotide
augacuggcuacgugguga

SEQ ID NO: 39138 - RNA, 19 nt, Artificial Sequence
  Description of Artificial Sequence: Synthetic oligonucleotide
ugacuggcuacguggugac

SEQ ID NO: 39139 - RNA, 19 nt, Artificial Sequence
  Description of Artificial Sequence: Synthetic oligonucleotide
gacuggcuacguggugacc

SEQ ID NO: 39140 - RNA, 19 nt, Artificial Sequence
  Description of Artificial Sequence: Synthetic oligonucleotide
acuggcuacguggugaccc

SEQ ID NO: 39141 - RNA, 19 nt, Artificial Sequence
  Description of Artificial Sequence: Synthetic oligonucleotide
cuggcuacguggugacccg

SEQ ID NO: 39142 - RNA, 19 nt, Artificial Sequence
  Description of Artificial Sequence: Synthetic oligonucleotide
uacguggugacccgcuggu

SEQ ID NO: 39143 - RNA, 19 nt, Artificial Sequence
  Description of Artificial Sequence: Synthetic oligonucleotide
acguggugacccgcuggua

SEQ ID NO: 39144 - RNA, 19 nt, Artificial Sequence
  Description of Artificial Sequence: Synthetic oligonucleotide
cguggugacccgcugguac

SEQ ID NO: 39145 - RNA, 19 nt, Artificial Sequence
  Description of Artificial Sequence: Synthetic oligonucleotide
guggugacccgcugguacc

SEQ ID NO: 39146 - RNA, 19 nt, Artificial Sequence
  Description of Artificial Sequence: Synthetic oligonucleotide
uggugacccgcugguaccg

SEQ ID NO: 39147 - RNA, 19 nt, Artificial Sequence
  Description of Artificial Sequence: Synthetic oligonucleotide
caucuggucugugggcugu

SEQ ID NO: 39148 - RNA, 19 nt, Artificial Sequence
  Description of Artificial Sequence: Synthetic oligonucleotide
aucuggucugugggcugua

SEQ ID NO: 39149 - RNA, 19 nt, Artificial Sequence
  Description of Artificial Sequence: Synthetic oligonucleotide
ucuggucugugggcuguau

SEQ ID NO: 39150 - RNA, 19 nt, Artificial Sequence
  Description of Artificial Sequence: Synthetic oligonucleotide
cuggucugugggcuguauc

SEQ ID NO: 39151 - RNA, 19 nt, Artificial Sequence
  Description of Artificial Sequence: Synthetic oligonucleotide
uggucugugggcuguauca

SEQ ID NO: 39152 - RNA, 19 nt, Artificial Sequence
  Description of Artificial Sequence: Synthetic oligonucleotide
ggucugugggcuguaucau

SEQ ID NO: 39153 - RNA, 19 nt, Artificial Sequence
  Description of Artificial Sequence: Synthetic oligonucleotide
gucugugggcuguaucaug

SEQ ID NO: 39154 - RNA, 19 nt, Artificial Sequence
  Description of Artificial Sequence: Synthetic oligonucleotide
ucugugggcuguaucaugg

SEQ ID NO: 39155 - RNA, 19 nt, Artificial Sequence
  Description of Artificial Sequence: Synthetic oligonucleotide
cugugggcuguaucauggc

SEQ ID NO: 39156 - RNA, 19 nt, Artificial Sequence
  Description of Artificial Sequence: Synthetic oligonucleotide
ccugcuggagaagaugcug

SEQ ID NO: 39157 - RNA, 19 nt, Artificial Sequence
  Description of Artificial Sequence: Synthetic oligonucleotide
cugcuggagaagaugcugg

SEQ ID NO: 39158 - RNA, 19 nt, Artificial Sequence
  Description of Artificial Sequence: Synthetic oligonucleotide
cuggagaagaugcuggagc

SEQ ID NO: 39159 - RNA, 19 nt, Artificial Sequence
  Description of Artificial Sequence: Synthetic oligonucleotide
uggagaagaugcuggagcu

SEQ ID NO: 39160 - RNA, 19 nt, Artificial Sequence
  Description of Artificial Sequence: Synthetic oligonucleotide
cacaguggaugaauggaag

SEQ ID NO: 39161 - RNA, 19 nt, Artificial Sequence
  Description of Artificial Sequence: Synthetic oligonucleotide
acaguggaugaauggaagc

SEQ ID NO: 39162 - RNA, 19 nt, Artificial Sequence
  Description of Artificial Sequence: Synthetic oligonucleotide
gaagauucuggauuuuggg

SEQ ID NO: 39163 - RNA, 19 nt, Artificial Sequence
  Description of Artificial Sequence: Synthetic oligonucleotide
aagauucuggauuuugggc

SEQ ID NO: 39164 - RNA, 19 nt, Artificial Sequence
  Description of Artificial Sequence: Synthetic oligonucleotide
agauucuggauuuugggcu

SEQ ID NO: 39165 - RNA, 19 nt, Artificial Sequence
  Description of Artificial Sequence: Synthetic oligonucleotide
gauucuggauuuugggcug

SEQ ID NO: 39166 - RNA, 19 nt, Artificial Sequence
  Description of Artificial Sequence: Synthetic oligonucleotide
auucuggauuuugggcugg

SEQ ID NO: 39167 - RNA, 19 nt, Artificial Sequence
  Description of Artificial Sequence: Synthetic oligonucleotide
uucuggauuuugggcuggc

SEQ ID NO: 39168 - RNA, 19 nt, Artificial Sequence
  Description of Artificial Sequence: Synthetic oligonucleotide
guucuaccggcaggagcug

SEQ ID NO: 39169 - RNA, 19 nt, Artificial Sequence
  Description of Artificial Sequence: Synthetic oligonucleotide
gcaggagcugaacaagaca

SEQ ID NO: 39170 - RNA, 19 nt, Artificial Sequence
  Description of Artificial Sequence: Synthetic oligonucleotide
gggcuccugagaucaugcu

SEQ ID NO: 39171 - RNA, 19 nt, Artificial Sequence
  Description of Artificial Sequence: Synthetic oligonucleotide
ccugagaucaugcugaacu

SEQ ID NO: 39172 - RNA, 19 nt, Artificial Sequence
  Description of Artificial Sequence: Synthetic oligonucleotide
cugagaucaugcugaacug

SEQ ID NO: 39173 - RNA, 19 nt, Artificial Sequence
  Description of Artificial Sequence: Synthetic oligonucleotide
ugagaucaugcugaacugg

SEQ ID NO: 39174 - RNA, 19 nt, Artificial Sequence
  Description of Artificial Sequence: Synthetic oligonucleotide
gagaucaugcugaacugga

SEQ ID NO: 39175 - RNA, 19 nt, Artificial Sequence
  Description of Artificial Sequence: Synthetic oligonucleotide
agaucaugcugaacuggau

SEQ ID NO: 39176 - RNA, 19 nt, Artificial Sequence
  Description of Artificial Sequence: Synthetic oligonucleotide
gaucaugcugaacuggaug

SEQ ID NO: 39177 - RNA, 19 nt, Artificial Sequence
  Description of Artificial Sequence: Synthetic oligonucleotide
aucaugcugaacuggaugc

SEQ ID NO: 39178 - RNA, 19 nt, Artificial Sequence
  Description of Artificial Sequence: Synthetic oligonucleotide
ucaugcugaacuggaugca

SEQ ID NO: 39179 - RNA, 19 nt, Artificial Sequence
  Description of Artificial Sequence: Synthetic oligonucleotide
caugcugaacuggaugcau

SEQ ID NO: 39180 - RNA, 19 nt, Artificial Sequence
  Description of Artificial Sequence: Synthetic oligonucleotide
augcugaacuggaugcauu

SEQ ID NO: 39181 - RNA, 19 nt, Artificial Sequence
  Description of Artificial Sequence: Synthetic oligonucleotide
ugcugaacuggaugcauua

SEQ ID NO: 39182 - RNA, 19 nt, Artificial Sequence
  Description of Artificial Sequence: Synthetic oligonucleotide
gcugaacuggaugcauuac

SEQ ID NO: 39183 - RNA, 19 nt, Artificial Sequence
  Description of Artificial Sequence: Synthetic oligonucleotide
cugaacuggaugcauuaca

SEQ ID NO: 39184 - RNA, 19 nt, Artificial Sequence
  Description of Artificial Sequence: Synthetic oligonucleotide
ugaacuggaugcauuacaa

SEQ ID NO: 39185 - RNA, 19 nt, Artificial Sequence
  Description of Artificial Sequence: Synthetic oligonucleotide
gaacuggaugcauuacaac

SEQ ID NO: 39186 - RNA, 19 nt, Artificial Sequence
  Description of Artificial Sequence: Synthetic oligonucleotide
cuggaugcauuacaaccag

SEQ ID NO: 39187 - RNA, 19 nt, Artificial Sequence
  Description of Artificial Sequence: Synthetic oligonucleotide
uggaugcauuacaaccaga

SEQ ID NO: 39188 - RNA, 19 nt, Artificial Sequence
  Description of Artificial Sequence: Synthetic oligonucleotide
ggaugcauuacaaccagac

SEQ ID NO: 39189 - RNA, 19 nt, Artificial Sequence
  Description of Artificial Sequence: Synthetic oligonucleotide
gaugcauuacaaccagaca

SEQ ID NO: 39190 - RNA, 19 nt, Artificial Sequence
  Description of Artificial Sequence: Synthetic oligonucleotide
augcauuacaaccagacag

SEQ ID NO: 39191 - RNA, 19 nt, Artificial Sequence
  Description of Artificial Sequence: Synthetic oligonucleotide
ugcauuacaaccagacagu

SEQ ID NO: 39192 - RNA, 19 nt, Artificial Sequence
  Description of Artificial Sequence: Synthetic oligonucleotide
ugugaaugaagacugugag

SEQ ID NO: 39193 - RNA, 19 nt, Artificial Sequence
  Description of Artificial Sequence: Synthetic oligonucleotide
gugaaugaagacugugagc

SEQ ID NO: 39194 - RNA, 19 nt, Artificial Sequence
  Description of Artificial Sequence: Synthetic oligonucleotide
ugaaugaagacugugagcu

SEQ ID NO: 39195 - RNA, 19 nt, Artificial Sequence
  Description of Artificial Sequence: Synthetic oligonucleotide
gaaugaagacugugagcug

SEQ ID NO: 39196 - RNA, 19 nt, Artificial Sequence
  Description of Artificial Sequence: Synthetic oligonucleotide
aaugaagacugugagcuga

SEQ ID NO: 39197 - RNA, 19 nt, Artificial Sequence
  Description of Artificial Sequence: Synthetic oligonucleotide
augaagacugugagcugaa

SEQ ID NO: 39198 - RNA, 19 nt, Artificial Sequence
  Description of Artificial Sequence: Synthetic oligonucleotide
ugaagacugugagcugaag

SEQ ID NO: 39199 - RNA, 19 nt, Artificial Sequence
  Description of Artificial Sequence: Synthetic oligonucleotide
agacugugagcugaagauu

SEQ ID NO: 39200 - RNA, 19 nt, Artificial Sequence
  Description of Artificial Sequence: Synthetic oligonucleotide
gacugugagcugaagauuc

SEQ ID NO: 39201 - RNA, 19 nt, Artificial Sequence
  Description of Artificial Sequence: Synthetic oligonucleotide
acugugagcugaagauucu

SEQ ID NO: 39202 - RNA, 19 nt, Artificial Sequence
  Description of Artificial Sequence: Synthetic oligonucleotide
cugugagcugaagauucug

SEQ ID NO: 39203 - RNA, 19 nt, Artificial Sequence
  Description of Artificial Sequence: Synthetic oligonucleotide
ugugagcugaagauucugg

SEQ ID NO: 39204 - RNA, 19 nt, Artificial Sequence
  Description of Artificial Sequence: Synthetic oligonucleotide
gugagcugaagauucugga

SEQ ID NO: 39205 - RNA, 19 nt, Artificial Sequence
  Description of Artificial Sequence: Synthetic oligonucleotide
ugagcugaagauucuggau

SEQ ID NO: 39206 - RNA, 19 nt, Artificial Sequence
  Description of Artificial Sequence: Synthetic oligonucleotide
gagcugaagauucuggauu

SEQ ID NO: 39207 - RNA, 19 nt, Artificial Sequence
  Description of Artificial Sequence: Synthetic oligonucleotide
agcugaagauucuggauuu

SEQ ID NO: 39208 - RNA, 19 nt, Artificial Sequence
  Description of Artificial Sequence: Synthetic oligonucleotide
gcugaagauucuggauuuu

SEQ ID NO: 39209 - RNA, 19 nt, Artificial Sequence
  Description of Artificial Sequence: Synthetic oligonucleotide
gacuugcuggagaagaugc

SEQ ID NO: 39210 - RNA, 19 nt, Artificial Sequence
  Description of Artificial Sequence: Synthetic oligonucleotide
acuugcuggagaagaugcu

SEQ ID NO: 39211 - RNA, 19 nt, Artificial Sequence
  Description of Artificial Sequence: Synthetic oligonucleotide
agcacgagaacgucaucgg

SEQ ID NO: 39212 - RNA, 19 nt, Artificial Sequence
  Description of Artificial Sequence: Synthetic oligonucleotide
auccuggauuucgggcugg

SEQ ID NO: 39213 - RNA, 19 nt, Artificial Sequence
  Description of Artificial Sequence: Synthetic oligonucleotide
ccuggauuucgggcuggcg

SEQ ID NO: 39214 - RNA, 19 nt, Artificial Sequence
  Description of Artificial Sequence: Synthetic oligonucleotide
gauccuggauuucgggcug

SEQ ID NO: 39215 - RNA, 19 nt, Artificial Sequence
  Description of Artificial Sequence: Synthetic oligonucleotide
gcacgagaacgucaucggg

SEQ ID NO: 39216 - RNA, 19 nt, Artificial Sequence
  Description of Artificial Sequence: Synthetic oligonucleotide
uccuggauuucgggcuggc

SEQ ID NO: 39217 - RNA, 19 nt, Artificial Sequence
  Description of Artificial Sequence: Synthetic oligonucleotide
gcuccggcgccuacggcuc

SEQ ID NO: 39218 - RNA, 19 nt, Artificial Sequence
  Description of Artificial Sequence: Synthetic oligonucleotide
ggcuccggcgccuacggcu

SEQ ID NO: 39219 - RNA, 19 nt, Artificial Sequence
  Description of Artificial Sequence: Synthetic oligonucleotide
aaccuggcugugaacgaag

SEQ ID NO: 39220 - RNA, 19 nt, Artificial Sequence
  Description of Artificial Sequence: Synthetic oligonucleotide
accuggcugugaacgaaga

SEQ ID NO: 39221 - RNA, 19 nt, Artificial Sequence
  Description of Artificial Sequence: Synthetic oligonucleotide
caaccuggcugugaacgaa

SEQ ID NO: 39222 - RNA, 19 nt, Artificial Sequence
  Description of Artificial Sequence: Synthetic oligonucleotide
ccuggcugugaacgaagac

SEQ ID NO: 39223 - RNA, 19 nt, Artificial Sequence
  Description of Artificial Sequence: Synthetic oligonucleotide
cuggcugugaacgaagacu

SEQ ID NO: 39224 - RNA, 19 nt, Artificial Sequence
  Description of Artificial Sequence: Synthetic oligonucleotide
gaccaccuggaccagcuga

SEQ ID NO: 39225 - RNA, 19 nt, Artificial Sequence
  Description of Artificial Sequence: Synthetic oligonucleotide
agcugaagauccuggacuu

SEQ ID NO: 39226 - RNA, 19 nt, Artificial Sequence
  Description of Artificial Sequence: Synthetic oligonucleotide
gagcugaagauccuggacu

SEQ ID NO: 39227 - RNA, 19 nt, Artificial Sequence
  Description of Artificial Sequence: Synthetic oligonucleotide
ugagcugaagauccuggac

SEQ ID NO: 39228 - RNA, 19 nt, Artificial Sequence
  Description of Artificial Sequence: Synthetic oligonucleotide
ugguaccgagcccccgagg

SEQ ID NO: 39229 - RNA, 19 nt, Artificial Sequence
  Description of Artificial Sequence: Synthetic oligonucleotide
gguaccgagcccccgaggu

SEQ ID NO: 39230 - RNA, 19 nt, Artificial Sequence
  Description of Artificial Sequence: Synthetic oligonucleotide
cuagcugugaaugaagacu

SEQ ID NO: 39231 - RNA, 19 nt, Artificial Sequence
  Description of Artificial Sequence: Synthetic oligonucleotide
uagcugugaaugaagacug

SEQ ID NO: 39232 - RNA, 19 nt, Artificial Sequence
  Description of Artificial Sequence: Synthetic oligonucleotide
agcugugaaugaagacugu

SEQ ID NO: 39233 - RNA, 19 nt, Artificial Sequence
  Description of Artificial Sequence: Synthetic oligonucleotide
gggaccugaagcccagcaa

SEQ ID NO: 39234 - RNA, 19 nt, Artificial Sequence
  Description of Artificial Sequence: Synthetic oligonucleotide
ggaccugaagcccagcaac

SEQ ID NO: 39235 - RNA, 19 nt, Artificial Sequence
  Description of Artificial Sequence: Synthetic oligonucleotide
gaccugaagcccagcaacg

SEQ ID NO: 39236 - RNA, 19 nt, Artificial Sequence
  Description of Artificial Sequence: Synthetic oligonucleotide
accugaagcccagcaacgu

SEQ ID NO: 39237 - RNA, 19 nt, Artificial Sequence
  Description of Artificial Sequence: Synthetic oligonucleotide
ccugaagcccagcaacgug

SEQ ID NO: 39238 - RNA, 19 nt, Artificial Sequence
  Description of Artificial Sequence: Synthetic oligonucleotide
cugaagcccagcaacgugg

SEQ ID NO: 39239 - RNA, 19 nt, Artificial Sequence
  Description of Artificial Sequence: Synthetic oligonucleotide
ugaagcccagcaacguggc

SEQ ID NO: 39240 - RNA, 19 nt, Artificial Sequence
  Description of Artificial Sequence: Synthetic oligonucleotide
gaagcccagcaacguggcu

SEQ ID NO: 39241 - RNA, 19 nt, Artificial Sequence
  Description of Artificial Sequence: Synthetic oligonucleotide
aagcccagcaacguggcug

SEQ ID NO: 39242 - RNA, 19 nt, Artificial Sequence
  Description of Artificial Sequence: Synthetic oligonucleotide
agcccagcaacguggcugu

SEQ ID NO: 39243 - RNA, 19 nt, Artificial Sequence
  Description of Artificial Sequence: Synthetic oligonucleotide
gcccagcaacguggcugug

SEQ ID NO: 39244 - RNA, 19 nt, Artificial Sequence
  Description of Artificial Sequence: Synthetic oligonucleotide
cccagcaacguggcuguga

SEQ ID NO: 39245 - RNA, 19 nt, Artificial Sequence
  Description of Artificial Sequence: Synthetic oligonucleotide
ccagcaacguggcugugaa

SEQ ID NO: 39246 - RNA, 19 nt, Artificial Sequence
  Description of Artificial Sequence: Synthetic oligonucleotide
cagcaacguggcugugaac

SEQ ID NO: 39247 - RNA, 19 nt, Artificial Sequence
  Description of Artificial Sequence: Synthetic oligonucleotide
agcaacguggcugugaacg

SEQ ID NO: 39248 - RNA, 19 nt, Artificial Sequence
  Description of Artificial Sequence: Synthetic oligonucleotide
guggauaucugguccgugg

SEQ ID NO: 39249 - RNA, 19 nt, Artificial Sequence
  Description of Artificial Sequence: Synthetic oligonucleotide
uggauaucugguccguggg

SEQ ID NO: 39250 - RNA, 19 nt, Artificial Sequence
  Description of Artificial Sequence: Synthetic oligonucleotide
ggauaucugguccgugggc

SEQ ID NO: 39251 - RNA, 19 nt, Artificial Sequence
  Description of Artificial Sequence: Synthetic oligonucleotide
gauaucugguccgugggcu

SEQ ID NO: 39252 - RNA, 19 nt, Artificial Sequence
  Description of Artificial Sequence: Synthetic oligonucleotide
auaucugguccgugggcug

SEQ ID NO: 39253 - RNA, 19 nt, Artificial Sequence
  Description of Artificial Sequence: Synthetic oligonucleotide
uaucugguccgugggcugc

SEQ ID NO: 39254 - RNA, 19 nt, Artificial Sequence
  Description of Artificial Sequence: Synthetic oligonucleotide
cgugggcugcaucauggcu

SEQ ID NO: 39255 - RNA, 19 nt, Artificial Sequence
  Description of Artificial Sequence: Synthetic oligonucleotide
aaggaugcuggugcuggac

SEQ ID NO: 39256 - RNA, 19 nt, Artificial Sequence
  Description of Artificial Sequence: Synthetic oligonucleotide
aggaugcuggugcuggaca

SEQ ID NO: 39257 - RNA, 19 nt, Artificial Sequence
  Description of Artificial Sequence: Synthetic oligonucleotide
gaaguccucagcuucaagc

SEQ ID NO: 39258 - RNA, 19 nt, Artificial Sequence
  Description of Artificial Sequence: Synthetic oligonucleotide
aaguccucagcuucaagcc

SEQ ID NO: 39259 - RNA, 19 nt, Artificial Sequence
  Description of Artificial Sequence: Synthetic oligonucleotide
guccucagcuucaagcccc

SEQ ID NO: 39260 - RNA, 19 nt, Artificial Sequence
  Description of Artificial Sequence: Synthetic oligonucleotide
uccucagcuucaagccccc

SEQ ID NO: 39261 - RNA, 19 nt, Artificial Sequence
  Description of Artificial Sequence: Synthetic oligonucleotide
aaacaguggauaucugguc

SEQ ID NO: 39262 - RNA, 19 nt, Artificial Sequence
  Description of Artificial Sequence: Synthetic oligonucleotide
aaccaaacaguggauaucu

SEQ ID NO: 39263 - RNA, 19 nt, Artificial Sequence
  Description of Artificial Sequence: Synthetic oligonucleotide
aacgucaucgggcuucugg

SEQ ID NO: 39264 - RNA, 19 nt, Artificial Sequence
  Description of Artificial Sequence: Synthetic oligonucleotide
aacguggcugugaacgagg

SEQ ID NO: 39265 - RNA, 19 nt, Artificial Sequence
  Description of Artificial Sequence: Synthetic oligonucleotide
aaguacauccacucggccg

SEQ ID NO: 39266 - RNA, 19 nt, Artificial Sequence
  Description of Artificial Sequence: Synthetic oligonucleotide
acaaccaaacaguggauau

SEQ ID NO: 39267 - RNA, 19 nt, Artificial Sequence
  Description of Artificial Sequence: Synthetic oligonucleotide
acaguggauaucugguccg

SEQ ID NO: 39268 - RNA, 19 nt, Artificial Sequence
  Description of Artificial Sequence: Synthetic oligonucleotide
accaaacaguggauaucug

SEQ ID NO: 39269 - RNA, 19 nt, Artificial Sequence
  Description of Artificial Sequence: Synthetic oligonucleotide
acgucaucgggcuucugga

SEQ ID NO: 39270 - RNA, 19 nt, Artificial Sequence
  Description of Artificial Sequence: Synthetic oligonucleotide
acguggcugugaacgagga

SEQ ID NO: 39271 - RNA, 19 nt, Artificial Sequence
  Description of Artificial Sequence: Synthetic oligonucleotide
agaacgucaucgggcuucu

SEQ ID NO: 39272 - RNA, 19 nt, Artificial Sequence
  Description of Artificial Sequence: Synthetic oligonucleotide
aguacauccacucggccgg

SEQ ID NO: 39273 - RNA, 19 nt, Artificial Sequence
  Description of Artificial Sequence: Synthetic oligonucleotide
aguggauaucugguccgug

SEQ ID NO: 39274 - RNA, 19 nt, Artificial Sequence
  Description of Artificial Sequence: Synthetic oligonucleotide
auuacaaccaaacagugga

SEQ ID NO: 39275 - RNA, 19 nt, Artificial Sequence
  Description of Artificial Sequence: Synthetic oligonucleotide
auuucgggcuggcgcgcca

SEQ ID NO: 39276 - RNA, 19 nt, Artificial Sequence
  Description of Artificial Sequence: Synthetic oligonucleotide
caaacaguggauaucuggu

SEQ ID NO: 39277 - RNA, 19 nt, Artificial Sequence
  Description of Artificial Sequence: Synthetic oligonucleotide
caaccaaacaguggauauc

SEQ ID NO: 39278 - RNA, 19 nt, Artificial Sequence
  Description of Artificial Sequence: Synthetic oligonucleotide
caacguggcugugaacgag

SEQ ID NO: 39279 - RNA, 19 nt, Artificial Sequence
  Description of Artificial Sequence: Synthetic oligonucleotide
caguggauaucugguccgu

SEQ ID NO: 39280 - RNA, 19 nt, Artificial Sequence
  Description of Artificial Sequence: Synthetic oligonucleotide
cauuacaaccaaacagugg

SEQ ID NO: 39281 - RNA, 19 nt, Artificial Sequence
  Description of Artificial Sequence: Synthetic oligonucleotide
ccaaacaguggauaucugg

SEQ ID NO: 39282 - RNA, 19 nt, Artificial Sequence
  Description of Artificial Sequence: Synthetic oligonucleotide
cguggcugugaacgaggac

SEQ ID NO: 39283 - RNA, 19 nt, Artificial Sequence
  Description of Artificial Sequence: Synthetic oligonucleotide
gaacgucaucgggcuucug

SEQ ID NO: 39284 - RNA, 19 nt, Artificial Sequence
  Description of Artificial Sequence: Synthetic oligonucleotide
gagaacgucaucgggcuuc

SEQ ID NO: 39285 - RNA, 19 nt, Artificial Sequence
  Description of Artificial Sequence: Synthetic oligonucleotide
gagaugaccggcuaugugg

SEQ ID NO: 39286 - RNA, 19 nt, Artificial Sequence
  Description of Artificial Sequence: Synthetic oligonucleotide
gauuucgggcuggcgcgcc

SEQ ID NO: 39287 - RNA, 19 nt, Artificial Sequence
  Description of Artificial Sequence: Synthetic oligonucleotide
gcauuacaaccaaacagug

SEQ ID NO: 39288 - RNA, 19 nt, Artificial Sequence
  Description of Artificial Sequence: Synthetic oligonucleotide
ggauuucgggcuggcgcgc

SEQ ID NO: 39289 - RNA, 19 nt, Artificial Sequence
  Description of Artificial Sequence: Synthetic oligonucleotide
ggcuucuggacgucuucac

SEQ ID NO: 39290 - RNA, 19 nt, Artificial Sequence
  Description of Artificial Sequence: Synthetic oligonucleotide
gggcuucuggacgucuuca

SEQ ID NO: 39291 - RNA, 19 nt, Artificial Sequence
  Description of Artificial Sequence: Synthetic oligonucleotide
guacauccacucggccggg

SEQ ID NO: 39292 - RNA, 19 nt, Artificial Sequence
  Description of Artificial Sequence: Synthetic oligonucleotide
guggcugugaacgaggacu

SEQ ID NO: 39293 - RNA, 19 nt, Artificial Sequence
  Description of Artificial Sequence: Synthetic oligonucleotide
uacaaccaaacaguggaua

SEQ ID NO: 39294 - RNA, 19 nt, Artificial Sequence
  Description of Artificial Sequence: Synthetic oligonucleotide
ugaagcacgagaacgucau

SEQ ID NO: 39295 - RNA, 19 nt, Artificial Sequence
  Description of Artificial Sequence: Synthetic oligonucleotide
ccggugggcuccggcgccu

SEQ ID NO: 39296 - RNA, 19 nt, Artificial Sequence
  Description of Artificial Sequence: Synthetic oligonucleotide
cggugggcuccggcgccua

SEQ ID NO: 39297 - RNA, 19 nt, Artificial Sequence
  Description of Artificial Sequence: Synthetic oligonucleotide
uuacaaccaaacaguggau

SEQ ID NO: 39298 - RNA, 19 nt, Artificial Sequence
  Description of Artificial Sequence: Synthetic oligonucleotide
aagaugcuggugcuggacg

SEQ ID NO: 39299 - RNA, 19 nt, Artificial Sequence
  Description of Artificial Sequence: Synthetic oligonucleotide
agaccugaagcccggcaac

SEQ ID NO: 39300 - RNA, 19 nt, Artificial Sequence
  Description of Artificial Sequence: Synthetic oligonucleotide
agagcgaugaggccaagaa

SEQ ID NO: 39301 - RNA, 19 nt, Artificial Sequence
  Description of Artificial Sequence: Synthetic oligonucleotide
aucauccacagagaccuga

SEQ ID NO: 39302 - RNA, 19 nt, Artificial Sequence
  Description of Artificial Sequence: Synthetic oligonucleotide
auccacagagaccugaagc

SEQ ID NO: 39303 - RNA, 19 nt, Artificial Sequence
  Description of Artificial Sequence: Synthetic oligonucleotide
auccuggacuucggccugg

SEQ ID NO: 39304 - RNA, 19 nt, Artificial Sequence
  Description of Artificial Sequence: Synthetic oligonucleotide
cauccacagagaccugaag

SEQ ID NO: 39305 - RNA, 19 nt, Artificial Sequence
  Description of Artificial Sequence: Synthetic oligonucleotide
ccacagagaccugaagccc

SEQ ID NO: 39306 - RNA, 19 nt, Artificial Sequence
  Description of Artificial Sequence: Synthetic oligonucleotide
cccuaaaaaaaaaaaaaaa

SEQ ID NO: 39307 - RNA, 19 nt, Artificial Sequence
  Description of Artificial Sequence: Synthetic oligonucleotide
ccuaaaaaaaaaaaaaaaa

SEQ ID NO: 39308 - RNA, 19 nt, Artificial Sequence
  Description of Artificial Sequence: Synthetic oligonucleotide
cucccuaaaaaaaaaaaaa

SEQ ID NO: 39309 - RNA, 19 nt, Artificial Sequence
  Description of Artificial Sequence: Synthetic oligonucleotide
gaagaugcuggugcuggac

SEQ ID NO: 39310 - RNA, 19 nt, Artificial Sequence
  Description of Artificial Sequence: Synthetic oligonucleotide
gagaccugaagcccggcaa

SEQ ID NO: 39311 - RNA, 19 nt, Artificial Sequence
  Description of Artificial Sequence: Synthetic oligonucleotide
gauccuggacuucggccug

SEQ ID NO: 39312 - RNA, 19 nt, Artificial Sequence
  Description of Artificial Sequence: Synthetic oligonucleotide
ucauccacagagaccugaa

SEQ ID NO: 39313 - RNA, 19 nt, Artificial Sequence
  Description of Artificial Sequence: Synthetic oligonucleotide
uccacagagaccugaagcc

SEQ ID NO: 39314 - RNA, 19 nt, Artificial Sequence
  Description of Artificial Sequence: Synthetic oligonucleotide
ucccuaaaaaaaaaaaaaa

SEQ ID NO: 39315 - RNA, 19 nt, Artificial Sequence
  Description of Artificial Sequence: Synthetic oligonucleotide
uccuggacuucggccuggc

SEQ ID NO: 39316 - RNA, 19 nt, Artificial Sequence
  Description of Artificial Sequence: Synthetic oligonucleotide
aaccuccuggagaagaugc

SEQ ID NO: 39317 - RNA, 19 nt, Artificial Sequence
  Description of Artificial Sequence: Synthetic oligonucleotide
acagagaccugaagcccgg

SEQ ID NO: 39318 - RNA, 19 nt, Artificial Sequence
  Description of Artificial Sequence: Synthetic oligonucleotide
agagaccugaagcccggca

SEQ ID NO: 39319 - RNA, 19 nt, Artificial Sequence
  Description of Artificial Sequence: Synthetic oligonucleotide
cacagagaccugaagcccg

SEQ ID NO: 39320 - RNA, 19 nt, Artificial Sequence
  Description of Artificial Sequence: Synthetic oligonucleotide
cagagaccugaagcccggc

SEQ ID NO: 39321 - RNA, 19 nt, Artificial Sequence
  Description of Artificial Sequence: Synthetic oligonucleotide
cggcaaccuggcugugaac

SEQ ID NO: 39322 - RNA, 19 nt, Artificial Sequence
  Description of Artificial Sequence: Synthetic oligonucleotide
cugcaucauggcggagaug

SEQ ID NO: 39323 - RNA, 19 nt, Artificial Sequence
  Description of Artificial Sequence: Synthetic oligonucleotide
gaaccuccuggagaagaug

SEQ ID NO: 39324 - RNA, 19 nt, Artificial Sequence
  Description of Artificial Sequence: Synthetic oligonucleotide
gcugcaucauggcggagau

SEQ ID NO: 39325 - RNA, 19 nt, Artificial Sequence
  Description of Artificial Sequence: Synthetic oligonucleotide
ggcugcaucauggcggaga

SEQ ID NO: 39326 - RNA, 19 nt, Artificial Sequence
  Description of Artificial Sequence: Synthetic oligonucleotide
uggccaucaagaagcugua

SEQ ID NO: 39327 - RNA, 19 nt, Artificial Sequence
  Description of Artificial Sequence: Synthetic oligonucleotide
ugugggcugcaucauggcg

SEQ ID NO: 39328 - RNA, 19 nt, Artificial Sequence
  Description of Artificial Sequence: Synthetic oligonucleotide
ggugguaccgggcucccga

SEQ ID NO: 39329 - RNA, 19 nt, Artificial Sequence
  Description of Artificial Sequence: Synthetic oligonucleotide
gugguaccgggcucccgag

SEQ ID NO: 39330 - RNA, 19 nt, Artificial Sequence
  Description of Artificial Sequence: Synthetic oligonucleotide
gagaacgucauugggcucc

SEQ ID NO: 39331 - RNA, 19 nt, Artificial Sequence
  Description of Artificial Sequence: Synthetic oligonucleotide
agaacgucauugggcuccu

SEQ ID NO: 39332 - RNA, 19 nt, Artificial Sequence
  Description of Artificial Sequence: Synthetic oligonucleotide
gaacgucauugggcuccug

SEQ ID NO: 39333 - RNA, 19 nt, Artificial Sequence
  Description of Artificial Sequence: Synthetic oligonucleotide
aacgucauugggcuccugg

SEQ ID NO: 39334 - RNA, 19 nt, Artificial Sequence
  Description of Artificial Sequence: Synthetic oligonucleotide
acgucauugggcuccugga

SEQ ID NO: 39335 - RNA, 19 nt, Artificial Sequence
  Description of Artificial Sequence: Synthetic oligonucleotide
gggcuccuggaugucuuca

SEQ ID NO: 39336 - RNA, 19 nt, Artificial Sequence
  Description of Artificial Sequence: Synthetic oligonucleotide
ggcuccuggaugucuucac

SEQ ID NO: 39337 - RNA, 19 nt, Artificial Sequence
  Description of Artificial Sequence: Synthetic oligonucleotide
ugugaaugaggacugugaa

SEQ ID NO: 39338 - RNA, 19 nt, Artificial Sequence
  Description of Artificial Sequence: Synthetic oligonucleotide
gugaaugaggacugugaac

SEQ ID NO: 39339 - RNA, 19 nt, Artificial Sequence
  Description of Artificial Sequence: Synthetic oligonucleotide
ugaaugaggacugugaacu

SEQ ID NO: 39340 - RNA, 19 nt, Artificial Sequence
  Description of Artificial Sequence: Synthetic oligonucleotide
cucagcuggaugcacuaca

SEQ ID NO: 39341 - RNA, 19 nt, Artificial Sequence
  Description of Artificial Sequence: Synthetic oligonucleotide
ucagcuggaugcacuacaa

SEQ ID NO: 39342 - RNA, 19 nt, Artificial Sequence
  Description of Artificial Sequence: Synthetic oligonucleotide
cagcuggaugcacuacaac

SEQ ID NO: 39343 - RNA, 19 nt, Artificial Sequence
  Description of Artificial Sequence: Synthetic oligonucleotide
agcuggaugcacuacaacc

SEQ ID NO: 39344 - RNA, 19 nt, Artificial Sequence
  Description of Artificial Sequence: Synthetic oligonucleotide
gcuggaugcacuacaacca

SEQ ID NO: 39345 - RNA, 19 nt, Artificial Sequence
  Description of Artificial Sequence: Synthetic oligonucleotide
gcacuacaaccagacagug

SEQ ID NO: 39346 - RNA, 19 nt, Artificial Sequence
  Description of Artificial Sequence: Synthetic oligonucleotide
cacuacaaccagacagugg

SEQ ID NO: 39347 - RNA, 19 nt, Artificial Sequence
  Description of Artificial Sequence: Synthetic oligonucleotide
acuacaaccagacagugga

SEQ ID NO: 39348 - RNA, 19 nt, Artificial Sequence
  Description of Artificial Sequence: Synthetic oligonucleotide
uacaaccagacaguggaca

SEQ ID NO: 39349 - RNA, 19 nt, Artificial Sequence
  Description of Artificial Sequence: Synthetic oligonucleotide
acaaccagacaguggacau

SEQ ID NO: 39350 - RNA, 19 nt, Artificial Sequence
  Description of Artificial Sequence: Synthetic oligonucleotide
caaccagacaguggacauc

SEQ ID NO: 39351 - RNA, 19 nt, Artificial Sequence
  Description of Artificial Sequence: Synthetic oligonucleotide
aaccagacaguggacaucu

SEQ ID NO: 39352 - RNA, 19 nt, Artificial Sequence
  Description of Artificial Sequence: Synthetic oligonucleotide
accagacaguggacaucug

SEQ ID NO: 39353 - RNA, 19 nt, Artificial Sequence
  Description of Artificial Sequence: Synthetic oligonucleotide
ccagacaguggacaucugg

SEQ ID NO: 39354 - RNA, 19 nt, Artificial Sequence
  Description of Artificial Sequence: Synthetic oligonucleotide
ccuacauccagucccugcc

SEQ ID NO: 39355 - RNA, 19 nt, Artificial Sequence
  Description of Artificial Sequence: Synthetic oligonucleotide
uacauccagucccugccac

SEQ ID NO: 39356 - RNA, 19 nt, Artificial Sequence
  Description of Artificial Sequence: Synthetic oligonucleotide
ugacuucuaccuggugaug

SEQ ID NO: 39357 - RNA, 19 nt, Artificial Sequence
  Description of Artificial Sequence: Synthetic oligonucleotide
cuucuaccuggugaugccc

SEQ ID NO: 39358 - RNA, 19 nt, Artificial Sequence
  Description of Artificial Sequence: Synthetic oligonucleotide
uucuaccuggugaugcccu

SEQ ID NO: 39359 - RNA, 19 nt, Artificial Sequence
  Description of Artificial Sequence: Synthetic oligonucleotide
ucuaccuggugaugcccuu

SEQ ID NO: 39360 - RNA, 19 nt, Artificial Sequence
  Description of Artificial Sequence: Synthetic oligonucleotide
cuaccuggugaugcccuuc

SEQ ID NO: 39361 - RNA, 19 nt, Artificial Sequence
  Description of Artificial Sequence: Synthetic oligonucleotide
gaggacugugaacugaaga

SEQ ID NO: 39362 - RNA, 19 nt, Artificial Sequence
  Description of Artificial Sequence: Synthetic oligonucleotide
aggacugugaacugaagau

SEQ ID NO: 39363 - RNA, 19 nt, Artificial Sequence
  Description of Artificial Sequence: Synthetic oligonucleotide
cgagaugacuggcuacgug

SEQ ID NO: 39364 - RNA, 19 nt, Artificial Sequence
  Description of Artificial Sequence: Synthetic oligonucleotide
ggugacccgcugguaccga

SEQ ID NO: 39365 - RNA, 19 nt, Artificial Sequence
  Description of Artificial Sequence: Synthetic oligonucleotide
gugacccgcugguaccgag

SEQ ID NO: 39366 - RNA, 19 nt, Artificial Sequence
  Description of Artificial Sequence: Synthetic oligonucleotide
ugacccgcugguaccgagc

SEQ ID NO: 39367 - RNA, 19 nt, Artificial Sequence
  Description of Artificial Sequence: Synthetic oligonucleotide
ugugggcuguaucauggca

SEQ ID NO: 39368 - RNA, 19 nt, Artificial Sequence
  Description of Artificial Sequence: Synthetic oligonucleotide
gugggcuguaucauggcag

SEQ ID NO: 39369 - RNA, 19 nt, Artificial Sequence
  Description of Artificial Sequence: Synthetic oligonucleotide
ugggcuguaucauggcaga

SEQ ID NO: 39370 - RNA, 19 nt, Artificial Sequence
  Description of Artificial Sequence: Synthetic oligonucleotide
gggcuguaucauggcagag

SEQ ID NO: 39371 - RNA, 19 nt, Artificial Sequence
  Description of Artificial Sequence: Synthetic oligonucleotide
ggcuguaucauggcagaga

SEQ ID NO: 39372 - RNA, 19 nt, Artificial Sequence
  Description of Artificial Sequence: Synthetic oligonucleotide
gcuguaucauggcagagau

SEQ ID NO: 39373 - RNA, 19 nt, Artificial Sequence
  Description of Artificial Sequence: Synthetic oligonucleotide
cuguaucauggcagagaug

SEQ ID NO: 39374 - RNA, 19 nt, Artificial Sequence
  Description of Artificial Sequence: Synthetic oligonucleotide
ggagaagaugcuggagcua

SEQ ID NO: 39375 - RNA, 19 nt, Artificial Sequence
  Description of Artificial Sequence: Synthetic oligonucleotide
gagaagaugcuggagcuag

SEQ ID NO: 39376 - RNA, 19 nt, Artificial Sequence
  Description of Artificial Sequence: Synthetic oligonucleotide
agaagaugcuggagcuaga

SEQ ID NO: 39377 - RNA, 19 nt, Artificial Sequence
  Description of Artificial Sequence: Synthetic oligonucleotide
gaagaugcuggagcuagac

SEQ ID NO: 39378 - RNA, 19 nt, Artificial Sequence
  Description of Artificial Sequence: Synthetic oligonucleotide
aagaugcuggagcuagacg

SEQ ID NO: 39379 - RNA, 19 nt, Artificial Sequence
  Description of Artificial Sequence: Synthetic oligonucleotide
caguggaugaauggaagca

SEQ ID NO: 39380 - RNA, 19 nt, Artificial Sequence
  Description of Artificial Sequence: Synthetic oligonucleotide
ggggccuauggcuccgugu

SEQ ID NO: 39381 - RNA, 19 nt, Artificial Sequence
  Description of Artificial Sequence: Synthetic oligonucleotide
gggccuauggcuccgugug

SEQ ID NO: 39382 - RNA, 19 nt, Artificial Sequence
  Description of Artificial Sequence: Synthetic oligonucleotide
gaaugaggacugugaacug

SEQ ID NO: 39383 - RNA, 19 nt, Artificial Sequence
  Description of Artificial Sequence: Synthetic oligonucleotide
aaugaggacugugaacuga

SEQ ID NO: 39384 - RNA, 19 nt, Artificial Sequence
  Description of Artificial Sequence: Synthetic oligonucleotide
augaggacugugaacugaa

SEQ ID NO: 39385 - RNA, 19 nt, Artificial Sequence
  Description of Artificial Sequence: Synthetic oligonucleotide
ugaggacugugaacugaag

SEQ ID NO: 39386 - RNA, 19 nt, Artificial Sequence
  Description of Artificial Sequence: Synthetic oligonucleotide
ggacugugaacugaagauu

SEQ ID NO: 39387 - RNA, 19 nt, Artificial Sequence
  Description of Artificial Sequence: Synthetic oligonucleotide
ggaccugcuggagaagaug

SEQ ID NO: 39388 - RNA, 19 nt, Artificial Sequence
  Description of Artificial Sequence: Synthetic oligonucleotide
caggagcugaacaagacaa

SEQ ID NO: 39389 - RNA, 19 nt, Artificial Sequence
  Description of Artificial Sequence: Synthetic oligonucleotide
aggagcugaacaagacaau

SEQ ID NO: 39390 - RNA, 19 nt, Artificial Sequence
  Description of Artificial Sequence: Synthetic oligonucleotide
ccagugggcucuggcgccu

SEQ ID NO: 39391 - RNA, 19 nt, Artificial Sequence
  Description of Artificial Sequence: Synthetic oligonucleotide
cagugggcucuggcgccua

SEQ ID NO: 39392 - RNA, 19 nt, Artificial Sequence
  Description of Artificial Sequence: Synthetic oligonucleotide
guggcagugaagaagcucu

SEQ ID NO: 39393 - RNA, 19 nt, Artificial Sequence
  Description of Artificial Sequence: Synthetic oligonucleotide
uggcagugaagaagcucuc

SEQ ID NO: 39394 - RNA, 19 nt, Artificial Sequence
  Description of Artificial Sequence: Synthetic oligonucleotide
augacaggcuacguggcca

SEQ ID NO: 39395 - RNA, 19 nt, Artificial Sequence
  Description of Artificial Sequence: Synthetic oligonucleotide
ugacaggcuacguggccac

SEQ ID NO: 39396 - RNA, 19 nt, Artificial Sequence
  Description of Artificial Sequence: Synthetic oligonucleotide
ucuggauuuuggacuggcu

SEQ ID NO: 39397 - RNA, 19 nt, Artificial Sequence
  Description of Artificial Sequence: Synthetic oligonucleotide
cuggauuuuggacuggcuc

SEQ ID NO: 39398 - RNA, 19 nt, Artificial Sequence
  Description of Artificial Sequence: Synthetic oligonucleotide
uggauuuuggacuggcucg

SEQ ID NO: 39399 - RNA, 19 nt, Artificial Sequence
  Description of Artificial Sequence: Synthetic oligonucleotide
gaaaugacaggcuacgugg

SEQ ID NO: 39400 - RNA, 19 nt, Artificial Sequence
  Description of Artificial Sequence: Synthetic oligonucleotide
ggugggcuccggcgccuac

SEQ ID NO: 39401 - RNA, 19 nt, Artificial Sequence
  Description of Artificial Sequence: Synthetic oligonucleotide
ccgggagcugcggcugcuc

SEQ ID NO: 39402 - RNA, 19 nt, Artificial Sequence
  Description of Artificial Sequence: Synthetic oligonucleotide
cgggagcugcggcugcuca

SEQ ID NO: 39403 - RNA, 19 nt, Artificial Sequence
  Description of Artificial Sequence: Synthetic oligonucleotide
gggagcugcggcugcucaa

SEQ ID NO: 39404 - RNA, 19 nt, Artificial Sequence
  Description of Artificial Sequence: Synthetic oligonucleotide
ggagcugcggcugcucaag

SEQ ID NO: 39405 - RNA, 19 nt, Artificial Sequence
  Description of Artificial Sequence: Synthetic oligonucleotide
cugcggcugcucaagcacc

SEQ ID NO: 39406 - RNA, 19 nt, Artificial Sequence
  Description of Artificial Sequence: Synthetic oligonucleotide
ugcggcugcucaagcaccu

SEQ ID NO: 39407 - RNA, 19 nt, Artificial Sequence
  Description of Artificial Sequence: Synthetic oligonucleotide
gcggcugcucaagcaccug

SEQ ID NO: 39408 - RNA, 19 nt, Artificial Sequence
  Description of Artificial Sequence: Synthetic oligonucleotide
cgagaacgucaucgggcuu

SEQ ID NO: 39409 - RNA, 19 nt, Artificial Sequence
  Description of Artificial Sequence: Synthetic oligonucleotide
cgucaucgggcuucuggac

SEQ ID NO: 39410 - RNA, 19 nt, Artificial Sequence
  Description of Artificial Sequence: Synthetic oligonucleotide
gucaucgggcuucuggacg

SEQ ID NO: 39411 - RNA, 19 nt, Artificial Sequence
  Description of Artificial Sequence: Synthetic oligonucleotide
ucaucgggcuucuggacgu

SEQ ID NO: 39412 - RNA, 19 nt, Artificial Sequence
  Description of Artificial Sequence: Synthetic oligonucleotide
aucgggcuucuggacgucu

SEQ ID NO: 39413 - RNA, 19 nt, Artificial Sequence
  Description of Artificial Sequence: Synthetic oligonucleotide
ucgggcuucuggacgucuu

SEQ ID NO: 39414 - RNA, 19 nt, Artificial Sequence
  Description of Artificial Sequence: Synthetic oligonucleotide
cgggcuucuggacgucuuc

SEQ ID NO: 39415 - RNA, 19 nt, Artificial Sequence
  Description of Artificial Sequence: Synthetic oligonucleotide
aucauccaccgggaccuga

SEQ ID NO: 39416 - RNA, 19 nt, Artificial Sequence
  Description of Artificial Sequence: Synthetic oligonucleotide
ucauccaccgggaccugaa

SEQ ID NO: 39417 - RNA, 19 nt, Artificial Sequence
  Description of Artificial Sequence: Synthetic oligonucleotide
cauccaccgggaccugaag

SEQ ID NO: 39418 - RNA, 19 nt, Artificial Sequence
  Description of Artificial Sequence: Synthetic oligonucleotide
auccaccgggaccugaagc

SEQ ID NO: 39419 - RNA, 19 nt, Artificial Sequence
  Description of Artificial Sequence: Synthetic oligonucleotide
uccaccgggaccugaagcc

SEQ ID NO: 39420 - RNA, 19 nt, Artificial Sequence
  Description of Artificial Sequence: Synthetic oligonucleotide
ccaccgggaccugaagccc

SEQ ID NO: 39421 - RNA, 19 nt, Artificial Sequence
  Description of Artificial Sequence: Synthetic oligonucleotide
gaacgaggacugugagcuc

SEQ ID NO: 39422 - RNA, 19 nt, Artificial Sequence
  Description of Artificial Sequence: Synthetic oligonucleotide
aacgaggacugugagcuca

SEQ ID NO: 39423 - RNA, 19 nt, Artificial Sequence
  Description of Artificial Sequence: Synthetic oligonucleotide
gacugugagcucaggaucc

SEQ ID NO: 39424 - RNA, 19 nt, Artificial Sequence
  Description of Artificial Sequence: Synthetic oligonucleotide
acugugagcucaggauccu

SEQ ID NO: 39425 - RNA, 19 nt, Artificial Sequence
  Description of Artificial Sequence: Synthetic oligonucleotide
cugugagcucaggauccug

SEQ ID NO: 39426 - RNA, 19 nt, Artificial Sequence
  Description of Artificial Sequence: Synthetic oligonucleotide
ugugagcucaggauccugg

SEQ ID NO: 39427 - RNA, 19 nt, Artificial Sequence
  Description of Artificial Sequence: Synthetic oligonucleotide
gugagcucaggauccugga

SEQ ID NO: 39428 - RNA, 19 nt, Artificial Sequence
  Description of Artificial Sequence: Synthetic oligonucleotide
ggcugcaucauggcugagc

SEQ ID NO: 39429 - RNA, 19 nt, Artificial Sequence
  Description of Artificial Sequence: Synthetic oligonucleotide
gcugcaucauggcugagcu

SEQ ID NO: 39430 - RNA, 19 nt, Artificial Sequence
  Description of Artificial Sequence: Synthetic oligonucleotide
cugcaucauggcugagcug

SEQ ID NO: 39431 - RNA, 19 nt, Artificial Sequence
  Description of Artificial Sequence: Synthetic oligonucleotide
agagcguugaggccaagga

SEQ ID NO: 39432 - RNA, 19 nt, Artificial Sequence
  Description of Artificial Sequence: Synthetic oligonucleotide
cucucucaaaaaaaaaaaa

SEQ ID NO: 39433 - RNA, 19 nt, Artificial Sequence
  Description of Artificial Sequence: Synthetic oligonucleotide
ucucucaaaaaaaaaaaaa

SEQ ID NO: 39434 - RNA, 19 nt, Artificial Sequence
  Description of Artificial Sequence: Synthetic oligonucleotide
cucucaaaaaaaaaaaaaa

SEQ ID NO: 39435 - RNA, 19 nt, Artificial Sequence
  Description of Artificial Sequence: Synthetic oligonucleotide
ucucaaaaaaaaaaaaaaa

SEQ ID NO: 39436 - RNA, 19 nt, Artificial Sequence
  Description of Artificial Sequence: Synthetic oligonucleotide
cauauauccagucccugcc

SEQ ID NO: 39437 - RNA, 19 nt, Artificial Sequence
  Description of Artificial Sequence: Synthetic oligonucleotide
cguaccgggagcugcggcu

SEQ ID NO: 39438 - RNA, 19 nt, Artificial Sequence
  Description of Artificial Sequence: Synthetic oligonucleotide
cugaaguacauccacucgg

SEQ ID NO: 39439 - RNA, 19 nt, Artificial Sequence
  Description of Artificial Sequence: Synthetic oligonucleotide
ggcugaaguacauccacuc

SEQ ID NO: 39440 - RNA, 19 nt, Artificial Sequence
  Description of Artificial Sequence: Synthetic oligonucleotide
gggcugaaguacauccacu

SEQ ID NO: 39441 - RNA, 19 nt, Artificial Sequence
  Description of Artificial Sequence: Synthetic oligonucleotide
guaccgggagcugcggcug

SEQ ID NO: 39442 - RNA, 19 nt, Artificial Sequence
  Description of Artificial Sequence: Synthetic oligonucleotide
uauauccagucccugcccc

SEQ ID NO: 39443 - RNA, 19 nt, Artificial Sequence
  Description of Artificial Sequence: Synthetic oligonucleotide
ugaaguacauccacucggc

SEQ ID NO: 39444 - RNA, 19 nt, Artificial Sequence
  Description of Artificial Sequence: Synthetic oligonucleotide
accgggcaccugagaucau

SEQ ID NO: 39445 - RNA, 19 nt, Artificial Sequence
  Description of Artificial Sequence: Synthetic oligonucleotide
accugagaucaugcucaac

SEQ ID NO: 39446 - RNA, 19 nt, Artificial Sequence
  Description of Artificial Sequence: Synthetic oligonucleotide
aggagcugaacaagaccgu

SEQ ID NO: 39447 - RNA, 19 nt, Artificial Sequence
  Description of Artificial Sequence: Synthetic oligonucleotide
augaccggcuauguggcca

SEQ ID NO: 39448 - RNA, 19 nt, Artificial Sequence
  Description of Artificial Sequence: Synthetic oligonucleotide
caccugagaucaugcucaa

SEQ ID NO: 39449 - RNA, 19 nt, Artificial Sequence
  Description of Artificial Sequence: Synthetic oligonucleotide
caggagcugaacaagaccg

SEQ ID NO: 39450 - RNA, 19 nt, Artificial Sequence
  Description of Artificial Sequence: Synthetic oligonucleotide
ccgggcaccugagaucaug

SEQ ID NO: 39451 - RNA, 19 nt, Artificial Sequence
  Description of Artificial Sequence: Synthetic oligonucleotide
cgggcaccugagaucaugc

SEQ ID NO: 39452 - RNA, 19 nt, Artificial Sequence
  Description of Artificial Sequence: Synthetic oligonucleotide
gcaccugagaucaugcuca

SEQ ID NO: 39453 - RNA, 19 nt, Artificial Sequence
  Description of Artificial Sequence: Synthetic oligonucleotide
gcuucuaccggcaggagcu

SEQ ID NO: 39454 - RNA, 19 nt, Artificial Sequence
  Description of Artificial Sequence: Synthetic oligonucleotide
ggcaccugagaucaugcuc

SEQ ID NO: 39455 - RNA, 19 nt, Artificial Sequence
  Description of Artificial Sequence: Synthetic oligonucleotide
gguaccgggcaccugagau

SEQ ID NO: 39456 - RNA, 19 nt, Artificial Sequence
  Description of Artificial Sequence: Synthetic oligonucleotide
guaccgggcaccugagauc

SEQ ID NO: 39457 - RNA, 19 nt, Artificial Sequence
  Description of Artificial Sequence: Synthetic oligonucleotide
guggcggugaagaagcugu

SEQ ID NO: 39458 - RNA, 19 nt, Artificial Sequence
  Description of Artificial Sequence: Synthetic oligonucleotide
uaccgggcaccugagauca

SEQ ID NO: 39459 - RNA, 19 nt, Artificial Sequence
  Description of Artificial Sequence: Synthetic oligonucleotide
ugaccggcuauguggccac

SEQ ID NO: 39460 - RNA, 19 nt, Artificial Sequence
  Description of Artificial Sequence: Synthetic oligonucleotide
uggcggugaagaagcuguc

SEQ ID NO: 39461 - RNA, 19 nt, Artificial Sequence
  Description of Artificial Sequence: Synthetic oligonucleotide
ugguaccgggcaccugaga

SEQ ID NO: 39462 - RNA, 19 nt, Artificial Sequence
  Description of Artificial Sequence: Synthetic oligonucleotide
aacgugaucgggcugcugg

SEQ ID NO: 39463 - RNA, 19 nt, Artificial Sequence
  Description of Artificial Sequence: Synthetic oligonucleotide
accgcgagcugcgccugcu

SEQ ID NO: 39464 - RNA, 19 nt, Artificial Sequence
  Description of Artificial Sequence: Synthetic oligonucleotide
acgugaucgggcugcugga

SEQ ID NO: 39465 - RNA, 19 nt, Artificial Sequence
  Description of Artificial Sequence: Synthetic oligonucleotide
agaacgugaucgggcugcu

SEQ ID NO: 39466 - RNA, 19 nt, Artificial Sequence
  Description of Artificial Sequence: Synthetic oligonucleotide
aggugcucagcuucaagcc

SEQ ID NO: 39467 - RNA, 19 nt, Artificial Sequence
  Description of Artificial Sequence: Synthetic oligonucleotide
aucgggcugcuggacguau

SEQ ID NO: 39468 - RNA, 19 nt, Artificial Sequence
  Description of Artificial Sequence: Synthetic oligonucleotide
ccacgagaacgugaucggg

SEQ ID NO: 39469 - RNA, 19 nt, Artificial Sequence
  Description of Artificial Sequence: Synthetic oligonucleotide
cccgugggcucgggcgccu

SEQ ID NO: 39470 - RNA, 19 nt, Artificial Sequence
  Description of Artificial Sequence: Synthetic oligonucleotide
ccgcgagcugcgccugcuc

SEQ ID NO: 39471 - RNA, 19 nt, Artificial Sequence
  Description of Artificial Sequence: Synthetic oligonucleotide
ccgugggcucgggcgccua

SEQ ID NO: 39472 - RNA, 19 nt, Artificial Sequence
  Description of Artificial Sequence: Synthetic oligonucleotide
cgagaacgugaucgggcug

SEQ ID NO: 39473 - RNA, 19 nt, Artificial Sequence
  Description of Artificial Sequence: Synthetic oligonucleotide
cgagcugcgccugcucaag

SEQ ID NO: 39474 - RNA, 19 nt, Artificial Sequence
  Description of Artificial Sequence: Synthetic oligonucleotide
cgcgagcugcgccugcuca

SEQ ID NO: 39475 - RNA, 19 nt, Artificial Sequence
  Description of Artificial Sequence: Synthetic oligonucleotide
cgggcugcuggacguauuc

SEQ ID NO: 39476 - RNA, 19 nt, Artificial Sequence
  Description of Artificial Sequence: Synthetic oligonucleotide
cgugaucgggcugcuggac

SEQ ID NO: 39477 - RNA, 19 nt, Artificial Sequence
  Description of Artificial Sequence: Synthetic oligonucleotide
cgugggcucgggcgccuac

SEQ ID NO: 39478 - RNA, 19 nt, Artificial Sequence
  Description of Artificial Sequence: Synthetic oligonucleotide
cugcgccugcucaagcaca

SEQ ID NO: 39479 - RNA, 19 nt, Artificial Sequence
  Description of Artificial Sequence: Synthetic oligonucleotide
gaacgugaucgggcugcug

SEQ ID NO: 39480 - RNA, 19 nt, Artificial Sequence
  Description of Artificial Sequence: Synthetic oligonucleotide
gagaacgugaucgggcugc

SEQ ID NO: 39481 - RNA, 19 nt, Artificial Sequence
  Description of Artificial Sequence: Synthetic oligonucleotide
gaggugcucagcuucaagc

SEQ ID NO: 39482 - RNA, 19 nt, Artificial Sequence
  Description of Artificial Sequence: Synthetic oligonucleotide
gcgagcugcgccugcucaa

SEQ ID NO: 39483 - RNA, 19 nt, Artificial Sequence
  Description of Artificial Sequence: Synthetic oligonucleotide
gcgccugcucaagcacaug

SEQ ID NO: 39484 - RNA, 19 nt, Artificial Sequence
  Description of Artificial Sequence: Synthetic oligonucleotide
gcucgggcgccuacggcgc

SEQ ID NO: 39485 - RNA, 19 nt, Artificial Sequence
  Description of Artificial Sequence: Synthetic oligonucleotide
ggcucgggcgccuacggcg

SEQ ID NO: 39486 - RNA, 19 nt, Artificial Sequence
  Description of Artificial Sequence: Synthetic oligonucleotide
ggcugcuggacguauucac

SEQ ID NO: 39487 - RNA, 19 nt, Artificial Sequence
  Description of Artificial Sequence: Synthetic oligonucleotide
gggcugcuggacguauuca

SEQ ID NO: 39488 - RNA, 19 nt, Artificial Sequence
  Description of Artificial Sequence: Synthetic oligonucleotide
gugaucgggcugcuggacg

SEQ ID NO: 39489 - RNA, 19 nt, Artificial Sequence
  Description of Artificial Sequence: Synthetic oligonucleotide
gugcucagcuucaagccuc

SEQ ID NO: 39490 - RNA, 19 nt, Artificial Sequence
  Description of Artificial Sequence: Synthetic oligonucleotide
uaccgcgagcugcgccugc

SEQ ID NO: 39491 - RNA, 19 nt, Artificial Sequence
  Description of Artificial Sequence: Synthetic oligonucleotide
ucgggcugcuggacguauu

SEQ ID NO: 39492 - RNA, 19 nt, Artificial Sequence
  Description of Artificial Sequence: Synthetic oligonucleotide
ugaucgggcugcuggacgu

SEQ ID NO: 39493 - RNA, 19 nt, Artificial Sequence
  Description of Artificial Sequence: Synthetic oligonucleotide
ugcgccugcucaagcacau

SEQ ID NO: 39494 - RNA, 19 nt, Artificial Sequence
  Description of Artificial Sequence: Synthetic oligonucleotide
ugcucagcuucaagccucc

SEQ ID NO: 39495 - RNA, 19 nt, Artificial Sequence
  Description of Artificial Sequence: Synthetic oligonucleotide
aagacggccugggaggugc

SEQ ID NO: 39496 - RNA, 19 nt, Artificial Sequence
  Description of Artificial Sequence: Synthetic oligonucleotide
agaagaugcuggugcugga

SEQ ID NO: 39497 - RNA, 19 nt, Artificial Sequence
  Description of Artificial Sequence: Synthetic oligonucleotide
agcuguucgccaagcgcgc

SEQ ID NO: 39498 - RNA, 19 nt, Artificial Sequence
  Description of Artificial Sequence: Synthetic oligonucleotide
aguccgagcuguucgccaa

SEQ ID NO: 39499 - RNA, 19 nt, Artificial Sequence
  Description of Artificial Sequence: Synthetic oligonucleotide
caagacggccugggaggug

SEQ ID NO: 39500 - RNA, 19 nt, Artificial Sequence
  Description of Artificial Sequence: Synthetic oligonucleotide
cacuggaugaauggaagcg

SEQ ID NO: 39501 - RNA, 19 nt, Artificial Sequence
  Description of Artificial Sequence: Synthetic oligonucleotide
caguccgagcuguucgcca

SEQ ID NO: 39502 - RNA, 19 nt, Artificial Sequence
  Description of Artificial Sequence: Synthetic oligonucleotide
ccgagcuguucgccaagcg

SEQ ID NO: 39503 - RNA, 19 nt, Artificial Sequence
  Description of Artificial Sequence: Synthetic oligonucleotide
ccuggagaagaugcuggug

SEQ ID NO: 39504 - RNA, 19 nt, Artificial Sequence
  Description of Artificial Sequence: Synthetic oligonucleotide
cgagcuguucgccaagcgc

SEQ ID NO: 39505 - RNA, 19 nt, Artificial Sequence
  Description of Artificial Sequence: Synthetic oligonucleotide
cgcacacuggaugaaugga

SEQ ID NO: 39506 - RNA, 19 nt, Artificial Sequence
  Description of Artificial Sequence: Synthetic oligonucleotide
cuaagguggccaucaagaa

SEQ ID NO: 39507 - RNA, 19 nt, Artificial Sequence
  Description of Artificial Sequence: Synthetic oligonucleotide
cuggugaugccguucaugg

SEQ ID NO: 39508 - RNA, 19 nt, Artificial Sequence
  Description of Artificial Sequence: Synthetic oligonucleotide
cuguucgccaagcgcgccu

SEQ ID NO: 39509 - RNA, 19 nt, Artificial Sequence
  Description of Artificial Sequence: Synthetic oligonucleotide
cuuuuaccuggugaugccg

SEQ ID NO: 39510 - RNA, 19 nt, Artificial Sequence
  Description of Artificial Sequence: Synthetic oligonucleotide
gagaagaugcuggugcugg

SEQ ID NO: 39511 - RNA, 19 nt, Artificial Sequence
  Description of Artificial Sequence: Synthetic oligonucleotide
gagcuguucgccaagcgcg

SEQ ID NO: 39512 - RNA, 19 nt, Artificial Sequence
  Description of Artificial Sequence: Synthetic oligonucleotide
gcacacuggaugaauggaa

SEQ ID NO: 39513 - RNA, 19 nt, Artificial Sequence
  Description of Artificial Sequence: Synthetic oligonucleotide
gcagacgguggacaucugg

SEQ ID NO: 39514 - RNA, 19 nt, Artificial Sequence
  Description of Artificial Sequence: Synthetic oligonucleotide
gcgccuaccgcgagcugcg

SEQ ID NO: 39515 - RNA, 19 nt, Artificial Sequence
  Description of Artificial Sequence: Synthetic oligonucleotide
gcuaagguggccaucaaga

SEQ ID NO: 39516 - RNA, 19 nt, Artificial Sequence
  Description of Artificial Sequence: Synthetic oligonucleotide
gcuguucgccaagcgcgcc

SEQ ID NO: 39517 - RNA, 19 nt, Artificial Sequence
  Description of Artificial Sequence: Synthetic oligonucleotide
ggacuuuuaccuggugaug

SEQ ID NO: 39518 - RNA, 19 nt, Artificial Sequence
  Description of Artificial Sequence: Synthetic oligonucleotide
ggagaagaugcuggugcug

SEQ ID NO: 39519 - RNA, 19 nt, Artificial Sequence
  Description of Artificial Sequence: Synthetic oligonucleotide
ggguacguggugacccggu

SEQ ID NO: 39520 - RNA, 19 nt, Artificial Sequence
  Description of Artificial Sequence: Synthetic oligonucleotide
gguaccgggcucccgaggu

SEQ ID NO: 39521 - RNA, 19 nt, Artificial Sequence
  Description of Artificial Sequence: Synthetic oligonucleotide
gguacguggugacccggug

SEQ ID NO: 39522 - RNA, 19 nt, Artificial Sequence
  Description of Artificial Sequence: Synthetic oligonucleotide
ggugacccggugguaccgg

SEQ ID NO: 39523 - RNA, 19 nt, Artificial Sequence
  Description of Artificial Sequence: Synthetic oligonucleotide
guacguggugacccggugg

SEQ ID NO: 39524 - RNA, 19 nt, Artificial Sequence
  Description of Artificial Sequence: Synthetic oligonucleotide
guccgagcuguucgccaag

SEQ ID NO: 39525 - RNA, 19 nt, Artificial Sequence
  Description of Artificial Sequence: Synthetic oligonucleotide
gugacccggugguaccggg

SEQ ID NO: 39526 - RNA, 19 nt, Artificial Sequence
  Description of Artificial Sequence: Synthetic oligonucleotide
uccgagcuguucgccaagc

SEQ ID NO: 39527 - RNA, 19 nt, Artificial Sequence
  Description of Artificial Sequence: Synthetic oligonucleotide
uccuggagaagaugcuggu

SEQ ID NO: 39528 - RNA, 19 nt, Artificial Sequence
  Description of Artificial Sequence: Synthetic oligonucleotide
ugacccggugguaccgggc

SEQ ID NO: 39529 - RNA, 19 nt, Artificial Sequence
  Description of Artificial Sequence: Synthetic oligonucleotide
ugagaugacuggguacgug

SEQ ID NO: 39530 - RNA, 19 nt, Artificial Sequence
  Description of Artificial Sequence: Synthetic oligonucleotide
uggguacguggugacccgg

SEQ ID NO: 39531 - RNA, 19 nt, Artificial Sequence
  Description of Artificial Sequence: Synthetic oligonucleotide
ugguaccgggcucccgagg

SEQ ID NO: 39532 - RNA, 19 nt, Artificial Sequence
  Description of Artificial Sequence: Synthetic oligonucleotide
uuaccuggugaugccguuc

SEQ ID NO: 39533 - RNA, 19 nt, Artificial Sequence
  Description of Artificial Sequence: Synthetic oligonucleotide
uuuaccuggugaugccguu

SEQ ID NO: 39534 - RNA, 19 nt, Artificial Sequence
  Description of Artificial Sequence: Synthetic oligonucleotide
uuuuaccuggugaugccgu

SEQ ID NO: 39535 - RNA, 19 nt, Artificial Sequence
  Description of Artificial Sequence: Synthetic oligonucleotide
ccuaccgggagcugcugcu

SEQ ID NO: 39536 - RNA, 19 nt, Artificial Sequence
  Description of Artificial Sequence: Synthetic oligonucleotide
cuaccgggagcugcugcug

SEQ ID NO: 39537 - RNA, 19 nt, Artificial Sequence
  Description of Artificial Sequence: Synthetic oligonucleotide
ccgggagcugcugcugcug

SEQ ID NO: 39538 - RNA, 19 nt, Artificial Sequence
  Description of Artificial Sequence: Synthetic oligonucleotide
cgggagcugcugcugcuga

SEQ ID NO: 39539 - RNA, 19 nt, Artificial Sequence
  Description of Artificial Sequence: Synthetic oligonucleotide
gggagcugcugcugcugaa

SEQ ID NO: 39540 - RNA, 19 nt, Artificial Sequence
  Description of Artificial Sequence: Synthetic oligonucleotide
ggagcugcugcugcugaag

SEQ ID NO: 39541 - RNA, 19 nt, Artificial Sequence
  Description of Artificial Sequence: Synthetic oligonucleotide
gagcugcugcugcugaagc

SEQ ID NO: 39542 - RNA, 19 nt, Artificial Sequence
  Description of Artificial Sequence: Synthetic oligonucleotide
agcugcugcugcugaagca

SEQ ID NO: 39543 - RNA, 19 nt, Artificial Sequence
  Description of Artificial Sequence: Synthetic oligonucleotide
gcugcugcugcugaagcac

SEQ ID NO: 39544 - RNA, 19 nt, Artificial Sequence
  Description of Artificial Sequence: Synthetic oligonucleotide
ugcagcaugagaacgucau

SEQ ID NO: 39545 - RNA, 19 nt, Artificial Sequence
  Description of Artificial Sequence: Synthetic oligonucleotide
agcaugagaacgucauugg

SEQ ID NO: 39546 - RNA, 19 nt, Artificial Sequence
  Description of Artificial Sequence: Synthetic oligonucleotide
gcaugagaacgucauuggg

SEQ ID NO: 39547 - RNA, 19 nt, Artificial Sequence
  Description of Artificial Sequence: Synthetic oligonucleotide
caugagaacgucauugggc

SEQ ID NO: 39548 - RNA, 19 nt, Artificial Sequence
  Description of Artificial Sequence: Synthetic oligonucleotide
augagaacgucauugggcu

SEQ ID NO: 39549 - RNA, 19 nt, Artificial Sequence
  Description of Artificial Sequence: Synthetic oligonucleotide
ggccuuaaguacauccacu

SEQ ID NO: 39550 - RNA, 19 nt, Artificial Sequence
  Description of Artificial Sequence: Synthetic oligonucleotide
gccuuaaguacauccacuc

SEQ ID NO: 39551 - RNA, 19 nt, Artificial Sequence
  Description of Artificial Sequence: Synthetic oligonucleotide
cuuaaguacauccacucug

SEQ ID NO: 39552 - RNA, 19 nt, Artificial Sequence
  Description of Artificial Sequence: Synthetic oligonucleotide
uuaaguacauccacucugc

SEQ ID NO: 39553 - RNA, 19 nt, Artificial Sequence
  Description of Artificial Sequence: Synthetic oligonucleotide
aaguacauccacucugcug

SEQ ID NO: 39554 - RNA, 19 nt, Artificial Sequence
  Description of Artificial Sequence: Synthetic oligonucleotide
aguacauccacucugcugg

SEQ ID NO: 39555 - RNA, 19 nt, Artificial Sequence
  Description of Artificial Sequence: Synthetic oligonucleotide
guacauccacucugcuggg

SEQ ID NO: 39556 - RNA, 19 nt, Artificial Sequence
  Description of Artificial Sequence: Synthetic oligonucleotide
ugcacagggaccugaagcc

SEQ ID NO: 39557 - RNA, 19 nt, Artificial Sequence
  Description of Artificial Sequence: Synthetic oligonucleotide
gggaccugaagccaggcaa

SEQ ID NO: 39558 - RNA, 19 nt, Artificial Sequence
  Description of Artificial Sequence: Synthetic oligonucleotide
ggaccugaagccaggcaac

SEQ ID NO: 39559 - RNA, 19 nt, Artificial Sequence
  Description of Artificial Sequence: Synthetic oligonucleotide
caaccuggcugugaaugag

SEQ ID NO: 39560 - RNA, 19 nt, Artificial Sequence
  Description of Artificial Sequence: Synthetic oligonucleotide
aaccuggcugugaaugagg

SEQ ID NO: 39561 - RNA, 19 nt, Artificial Sequence
  Description of Artificial Sequence: Synthetic oligonucleotide
accuggcugugaaugagga

SEQ ID NO: 39562 - RNA, 19 nt, Artificial Sequence
  Description of Artificial Sequence: Synthetic oligonucleotide
ccuggcugugaaugaggac

SEQ ID NO: 39563 - RNA, 19 nt, Artificial Sequence
  Description of Artificial Sequence: Synthetic oligonucleotide
cuggcugugaaugaggacu

SEQ ID NO: 39564 - RNA, 19 nt, Artificial Sequence
  Description of Artificial Sequence: Synthetic oligonucleotide
ucuggauuuugggcuggcg

SEQ ID NO: 39565 - RNA, 19 nt, Artificial Sequence
  Description of Artificial Sequence: Synthetic oligonucleotide
ggauuuugggcuggcgcga

SEQ ID NO: 39566 - RNA, 19 nt, Artificial Sequence
  Description of Artificial Sequence: Synthetic oligonucleotide
gauuuugggcuggcgcgac

SEQ ID NO: 39567 - RNA, 19 nt, Artificial Sequence
  Description of Artificial Sequence: Synthetic oligonucleotide
auuuugggcuggcgcgaca

SEQ ID NO: 39568 - RNA, 19 nt, Artificial Sequence
  Description of Artificial Sequence: Synthetic oligonucleotide
caagaccgccugggagcug

SEQ ID NO: 39569 - RNA, 19 nt, Artificial Sequence
  Description of Artificial Sequence: Synthetic oligonucleotide
aagaccgccugggagcugc

SEQ ID NO: 39570 - RNA, 19 nt, Artificial Sequence
  Description of Artificial Sequence: Synthetic oligonucleotide
gagaagguggccaucaaga

SEQ ID NO: 39571 - RNA, 19 nt, Artificial Sequence
  Description of Artificial Sequence: Synthetic oligonucleotide
agaagguggccaucaagaa

SEQ ID NO: 39572 - RNA, 19 nt, Artificial Sequence
  Description of Artificial Sequence: Synthetic oligonucleotide
uggccaucaagaagcugag

SEQ ID NO: 39573 - RNA, 19 nt, Artificial Sequence
  Description of Artificial Sequence: Synthetic oligonucleotide
caguccgagaucuucgcca

SEQ ID NO: 39574 - RNA, 19 nt, Artificial Sequence
  Description of Artificial Sequence: Synthetic oligonucleotide
aguccgagaucuucgccaa

SEQ ID NO: 39575 - RNA, 19 nt, Artificial Sequence
  Description of Artificial Sequence: Synthetic oligonucleotide
guccgagaucuucgccaag

SEQ ID NO: 39576 - RNA, 19 nt, Artificial Sequence
  Description of Artificial Sequence: Synthetic oligonucleotide
uccgagaucuucgccaagc

SEQ ID NO: 39577 - RNA, 19 nt, Artificial Sequence
  Description of Artificial Sequence: Synthetic oligonucleotide
ccgagaucuucgccaagcg

SEQ ID NO: 39578 - RNA, 19 nt, Artificial Sequence
  Description of Artificial Sequence: Synthetic oligonucleotide
cgagaucuucgccaagcgc

SEQ ID NO: 39579 - RNA, 19 nt, Artificial Sequence
  Description of Artificial Sequence: Synthetic oligonucleotide
gagaucuucgccaagcgcg

SEQ ID NO: 39580 - RNA, 19 nt, Artificial Sequence
  Description of Artificial Sequence: Synthetic oligonucleotide
agaucuucgccaagcgcgc

SEQ ID NO: 39581 - RNA, 19 nt, Artificial Sequence
  Description of Artificial Sequence: Synthetic oligonucleotide
gaucuucgccaagcgcgcc

SEQ ID NO: 39582 - RNA, 19 nt, Artificial Sequence
  Description of Artificial Sequence: Synthetic oligonucleotide
aucuucgccaagcgcgccu

SEQ ID NO: 39583 - RNA, 19 nt, Artificial Sequence
  Description of Artificial Sequence: Synthetic oligonucleotide
gcgccuaccgggagcugcu

SEQ ID NO: 39584 - RNA, 19 nt, Artificial Sequence
  Description of Artificial Sequence: Synthetic oligonucleotide
cuggugaugcccuucaugc

SEQ ID NO: 39585 - RNA, 19 nt, Artificial Sequence
  Description of Artificial Sequence: Synthetic oligonucleotide
cacagggaccugaagccag

SEQ ID NO: 39586 - RNA, 19 nt, Artificial Sequence
  Description of Artificial Sequence: Synthetic oligonucleotide
acagggaccugaagccagg

SEQ ID NO: 39587 - RNA, 19 nt, Artificial Sequence
  Description of Artificial Sequence: Synthetic oligonucleotide
cagggaccugaagccaggc

SEQ ID NO: 39588 - RNA, 19 nt, Artificial Sequence
  Description of Artificial Sequence: Synthetic oligonucleotide
agggaccugaagccaggca

SEQ ID NO: 39589 - RNA, 19 nt, Artificial Sequence
  Description of Artificial Sequence: Synthetic oligonucleotide
aggcaaccuggcugugaau

SEQ ID NO: 39590 - RNA, 19 nt, Artificial Sequence
  Description of Artificial Sequence: Synthetic oligonucleotide
uggcuacguggugacccgc

SEQ ID NO: 39591 - RNA, 19 nt, Artificial Sequence
  Description of Artificial Sequence: Synthetic oligonucleotide
ggcuacguggugacccgcu

SEQ ID NO: 39592 - RNA, 19 nt, Artificial Sequence
  Description of Artificial Sequence: Synthetic oligonucleotide
gcuacguggugacccgcug

SEQ ID NO: 39593 - RNA, 19 nt, Artificial Sequence
  Description of Artificial Sequence: Synthetic oligonucleotide
cuacguggugacccgcugg

SEQ ID NO: 39594 - RNA, 19 nt, Artificial Sequence
  Description of Artificial Sequence: Synthetic oligonucleotide
gauuaccuggaccagcuga

SEQ ID NO: 39595 - RNA, 19 nt, Artificial Sequence
  Description of Artificial Sequence: Synthetic oligonucleotide
ugcuggagaagaugcugga

SEQ ID NO: 39596 - RNA, 19 nt, Artificial Sequence
  Description of Artificial Sequence: Synthetic oligonucleotide
gcuggagaagaugcuggag

SEQ ID NO: 39597 - RNA, 19 nt, Artificial Sequence
  Description of Artificial Sequence: Synthetic oligonucleotide
cucacaguggaugaaugga

SEQ ID NO: 39598 - RNA, 19 nt, Artificial Sequence
  Description of Artificial Sequence: Synthetic oligonucleotide
ucacaguggaugaauggaa

SEQ ID NO: 39599 - RNA, 19 nt, Artificial Sequence
  Description of Artificial Sequence: Synthetic oligonucleotide
cguucuaccggcaggagcu

SEQ ID NO: 39600 - RNA, 19 nt, Artificial Sequence
  Description of Artificial Sequence: Synthetic oligonucleotide
gugggcucuggcgccuaug

SEQ ID NO: 39601 - RNA, 19 nt, Artificial Sequence
  Description of Artificial Sequence: Synthetic oligonucleotide
ugggcucuggcgccuaugg

SEQ ID NO: 39602 - RNA, 19 nt, Artificial Sequence
  Description of Artificial Sequence: Synthetic oligonucleotide
gggcucuggcgccuauggc

SEQ ID NO: 39603 - RNA, 19 nt, Artificial Sequence
  Description of Artificial Sequence: Synthetic oligonucleotide
ggcucuggcgccuauggcu

SEQ ID NO: 39604 - RNA, 19 nt, Artificial Sequence
  Description of Artificial Sequence: Synthetic oligonucleotide
gcucuggcgccuauggcuc

SEQ ID NO: 39605 - RNA, 19 nt, Artificial Sequence
  Description of Artificial Sequence: Synthetic oligonucleotide
ugguacagggcuccugaga

SEQ ID NO: 39606 - RNA, 19 nt, Artificial Sequence
  Description of Artificial Sequence: Synthetic oligonucleotide
gguacagggcuccugagau

SEQ ID NO: 39607 - RNA, 19 nt, Artificial Sequence
  Description of Artificial Sequence: Synthetic oligonucleotide
guacagggcuccugagauc

SEQ ID NO: 39608 - RNA, 19 nt, Artificial Sequence
  Description of Artificial Sequence: Synthetic oligonucleotide
uacagggcuccugagauca

SEQ ID NO: 39609 - RNA, 19 nt, Artificial Sequence
  Description of Artificial Sequence: Synthetic oligonucleotide
acagggcuccugagaucau

SEQ ID NO: 39610 - RNA, 19 nt, Artificial Sequence
  Description of Artificial Sequence: Synthetic oligonucleotide
cagggcuccugagaucaug

SEQ ID NO: 39611 - RNA, 19 nt, Artificial Sequence
  Description of Artificial Sequence: Synthetic oligonucleotide
agggcuccugagaucaugc

SEQ ID NO: 39612 - RNA, 19 nt, Artificial Sequence
  Description of Artificial Sequence: Synthetic oligonucleotide
ggcuccugagaucaugcug

SEQ ID NO: 39613 - RNA, 19 nt, Artificial Sequence
  Description of Artificial Sequence: Synthetic oligonucleotide
gcuccugagaucaugcuga

SEQ ID NO: 39614 - RNA, 19 nt, Artificial Sequence
  Description of Artificial Sequence: Synthetic oligonucleotide
cuccugagaucaugcugaa

SEQ ID NO: 39615 - RNA, 19 nt, Artificial Sequence
  Description of Artificial Sequence: Synthetic oligonucleotide
uccugagaucaugcugaac

SEQ ID NO: 39616 - RNA, 19 nt, Artificial Sequence
  Description of Artificial Sequence: Synthetic oligonucleotide
gcauuacaaccagacaguu

SEQ ID NO: 39617 - RNA, 19 nt, Artificial Sequence
  Description of Artificial Sequence: Synthetic oligonucleotide
cauuacaaccagacaguug

SEQ ID NO: 39618 - RNA, 19 nt, Artificial Sequence
  Description of Artificial Sequence: Synthetic oligonucleotide
auuacaaccagacaguuga

SEQ ID NO: 39619 - RNA, 19 nt, Artificial Sequence
  Description of Artificial Sequence: Synthetic oligonucleotide
uuacaaccagacaguugau

SEQ ID NO: 39620 - RNA, 19 nt, Artificial Sequence
  Description of Artificial Sequence: Synthetic oligonucleotide
uacaaccagacaguugaua

SEQ ID NO: 39621 - RNA, 19 nt, Artificial Sequence
  Description of Artificial Sequence: Synthetic oligonucleotide
acaaccagacaguugauau

SEQ ID NO: 39622 - RNA, 19 nt, Artificial Sequence
  Description of Artificial Sequence: Synthetic oligonucleotide
ggugguacagggcuccuga

SEQ ID NO: 39623 - RNA, 19 nt, Artificial Sequence
  Description of Artificial Sequence: Synthetic oligonucleotide
gugguacagggcuccugag

SEQ ID NO: 39624 - RNA, 19 nt, Artificial Sequence
  Description of Artificial Sequence: Synthetic oligonucleotide
ugcuggagaagaugcuugu

SEQ ID NO: 39625 - RNA, 19 nt, Artificial Sequence
  Description of Artificial Sequence: Synthetic oligonucleotide
ggcgccuauggcucugugu

SEQ ID NO: 39626 - RNA, 19 nt, Artificial Sequence
  Description of Artificial Sequence: Synthetic oligonucleotide
gcgccuauggcucugugug

SEQ ID NO: 39627 - RNA, 19 nt, Artificial Sequence
  Description of Artificial Sequence: Synthetic oligonucleotide
cgacuugcuggagaagaug

SEQ ID NO: 39628 - RNA, 19 nt, Artificial Sequence
  Description of Artificial Sequence: Synthetic oligonucleotide
cuugcuggagaagaugcuu

SEQ ID NO: 39629 - RNA, 19 nt, Artificial Sequence
  Description of Artificial Sequence: Synthetic oligonucleotide
uugcuggagaagaugcuug

SEQ ID NO: 39630 - RNA, 19 nt, Artificial Sequence
  Description of Artificial Sequence: Synthetic oligonucleotide
ccggcgccuacggcuccgu

SEQ ID NO: 39631 - RNA, 19 nt, Artificial Sequence
  Description of Artificial Sequence: Synthetic oligonucleotide
cuccggcgccuacggcucc

SEQ ID NO: 39632 - RNA, 19 nt, Artificial Sequence
  Description of Artificial Sequence: Synthetic oligonucleotide
uccggcgccuacggcuccg

SEQ ID NO: 39633 - RNA, 19 nt, Artificial Sequence
  Description of Artificial Sequence: Synthetic oligonucleotide
cugaagauccuggacuucg

SEQ ID NO: 39634 - RNA, 19 nt, Artificial Sequence
  Description of Artificial Sequence: Synthetic oligonucleotide
ugaagauccuggacuucgg

SEQ ID NO: 39635 - RNA, 19 nt, Artificial Sequence
  Description of Artificial Sequence: Synthetic oligonucleotide
gcugaagauccuggacuuc

SEQ ID NO: 39636 - RNA, 19 nt, Artificial Sequence
  Description of Artificial Sequence: Synthetic oligonucleotide
cggcuucuaccggcaggag

SEQ ID NO: 39637 - RNA, 19 nt, Artificial Sequence
  Description of Artificial Sequence: Synthetic oligonucleotide
augggcgccgaccugaaca

SEQ ID NO: 39638 - RNA, 19 nt, Artificial Sequence
  Description of Artificial Sequence: Synthetic oligonucleotide
ugggcgccgaccugaacaa

SEQ ID NO: 39639 - RNA, 19 nt, Artificial Sequence
  Description of Artificial Sequence: Synthetic oligonucleotide
cgggcugaaguacauccac

SEQ ID NO: 39640 - RNA, 19 nt, Artificial Sequence
  Description of Artificial Sequence: Synthetic oligonucleotide
caccgggaccugaagccca

SEQ ID NO: 39641 - RNA, 19 nt, Artificial Sequence
  Description of Artificial Sequence: Synthetic oligonucleotide
gaggcacuggcccacgccu

SEQ ID NO: 39642 - RNA, 19 nt, Artificial Sequence
  Description of Artificial Sequence: Synthetic oligonucleotide
aggcacuggcccacgccua

SEQ ID NO: 39643 - RNA, 19 nt, Artificial Sequence
  Description of Artificial Sequence: Synthetic oligonucleotide
ggcacuggcccacgccuac

SEQ ID NO: 39644 - RNA, 19 nt, Artificial Sequence
  Description of Artificial Sequence: Synthetic oligonucleotide
gcacuggcccacgccuacu

SEQ ID NO: 39645 - RNA, 19 nt, Artificial Sequence
  Description of Artificial Sequence: Synthetic oligonucleotide
cacuggcccacgccuacuu

SEQ ID NO: 39646 - RNA, 19 nt, Artificial Sequence
  Description of Artificial Sequence: Synthetic oligonucleotide
acuggcccacgccuacuuc

SEQ ID NO: 39647 - RNA, 19 nt, Artificial Sequence
  Description of Artificial Sequence: Synthetic oligonucleotide
cuggcccacgccuacuuca

SEQ ID NO: 39648 - RNA, 19 nt, Artificial Sequence
  Description of Artificial Sequence: Synthetic oligonucleotide
aguccucagcuucaagccc

SEQ ID NO: 39649 - RNA, 19 nt, Artificial Sequence
  Description of Artificial Sequence: Synthetic oligonucleotide
aacaguggauaucuggucc

SEQ ID NO: 39650 - RNA, 19 nt, Artificial Sequence
  Description of Artificial Sequence: Synthetic oligonucleotide
aagcacgagaacgucaucg

SEQ ID NO: 39651 - RNA, 19 nt, Artificial Sequence
  Description of Artificial Sequence: Synthetic oligonucleotide
acauccacucggccgggau

SEQ ID NO: 39652 - RNA, 19 nt, Artificial Sequence
  Description of Artificial Sequence: Synthetic oligonucleotide
agaugaccggcuauguggc

SEQ ID NO: 39653 - RNA, 19 nt, Artificial Sequence
  Description of Artificial Sequence: Synthetic oligonucleotide
aggauccuggauuucgggc

SEQ ID NO: 39654 - RNA, 19 nt, Artificial Sequence
  Description of Artificial Sequence: Synthetic oligonucleotide
cauccacucggccgggauc

SEQ ID NO: 39655 - RNA, 19 nt, Artificial Sequence
  Description of Artificial Sequence: Synthetic oligonucleotide
caucgggcuucuggacguc

SEQ ID NO: 39656 - RNA, 19 nt, Artificial Sequence
  Description of Artificial Sequence: Synthetic oligonucleotide
gaagcacgagaacgucauc

SEQ ID NO: 39657 - RNA, 19 nt, Artificial Sequence
  Description of Artificial Sequence: Synthetic oligonucleotide
ggauccuggauuucgggcu

SEQ ID NO: 39658 - RNA, 19 nt, Artificial Sequence
  Description of Artificial Sequence: Synthetic oligonucleotide
uacauccacucggccggga

SEQ ID NO: 39659 - RNA, 19 nt, Artificial Sequence
  Description of Artificial Sequence: Synthetic oligonucleotide
accacgaccccgaggauga

SEQ ID NO: 39660 - RNA, 19 nt, Artificial Sequence
  Description of Artificial Sequence: Synthetic oligonucleotide
accugaacaacaucgucaa

SEQ ID NO: 39661 - RNA, 19 nt, Artificial Sequence
  Description of Artificial Sequence: Synthetic oligonucleotide
aguaccacgaccccgagga

SEQ ID NO: 39662 - RNA, 19 nt, Artificial Sequence
  Description of Artificial Sequence: Synthetic oligonucleotide
auugaccagcugaagcgca

SEQ ID NO: 39663 - RNA, 19 nt, Artificial Sequence
  Description of Artificial Sequence: Synthetic oligonucleotide
caguaccacgaccccgagg

SEQ ID NO: 39664 - RNA, 19 nt, Artificial Sequence
  Description of Artificial Sequence: Synthetic oligonucleotide
cccggugggcuccggcgcc

SEQ ID NO: 39665 - RNA, 19 nt, Artificial Sequence
  Description of Artificial Sequence: Synthetic oligonucleotide
ccgaccugaacaacaucgu

SEQ ID NO: 39666 - RNA, 19 nt, Artificial Sequence
  Description of Artificial Sequence: Synthetic oligonucleotide
cgccuacggcuccgucugu

SEQ ID NO: 39667 - RNA, 19 nt, Artificial Sequence
  Description of Artificial Sequence: Synthetic oligonucleotide
gaccugaacaacaucguca

SEQ ID NO: 39668 - RNA, 19 nt, Artificial Sequence
  Description of Artificial Sequence: Synthetic oligonucleotide
gccgaccugaacaacaucg

SEQ ID NO: 39669 - RNA, 19 nt, Artificial Sequence
  Description of Artificial Sequence: Synthetic oligonucleotide
gcgccuacggcuccgucug

SEQ ID NO: 39670 - RNA, 19 nt, Artificial Sequence
  Description of Artificial Sequence: Synthetic oligonucleotide
ggcgccuacggcuccgucu

SEQ ID NO: 39671 - RNA, 19 nt, Artificial Sequence
  Description of Artificial Sequence: Synthetic oligonucleotide
guaccacgaccccgaggau

SEQ ID NO: 39672 - RNA, 19 nt, Artificial Sequence
  Description of Artificial Sequence: Synthetic oligonucleotide
uaccacgaccccgaggaug

SEQ ID NO: 39673 - RNA, 19 nt, Artificial Sequence
  Description of Artificial Sequence: Synthetic oligonucleotide
uggagccaacccccuggcc

SEQ ID NO: 39674 - RNA, 19 nt, Artificial Sequence
  Description of Artificial Sequence: Synthetic oligonucleotide
uugaccagcugaagcgcau

SEQ ID NO: 39675 - RNA, 19 nt, Artificial Sequence
  Description of Artificial Sequence: Synthetic oligonucleotide
aagauccuggacuucggcc

SEQ ID NO: 39676 - RNA, 19 nt, Artificial Sequence
  Description of Artificial Sequence: Synthetic oligonucleotide
agauccuggacuucggccu

SEQ ID NO: 39677 - RNA, 19 nt, Artificial Sequence
  Description of Artificial Sequence: Synthetic oligonucleotide
accaccuggaccagcugaa

SEQ ID NO: 39678 - RNA, 19 nt, Artificial Sequence
  Description of Artificial Sequence: Synthetic oligonucleotide
cgaccaccuggaccagcug

SEQ ID NO: 39679 - RNA, 19 nt, Artificial Sequence
  Description of Artificial Sequence: Synthetic oligonucleotide
cgcugguaccgagcccccg

SEQ ID NO: 39680 - RNA, 19 nt, Artificial Sequence
  Description of Artificial Sequence: Synthetic oligonucleotide
gcugguaccgagcccccga

SEQ ID NO: 39681 - RNA, 19 nt, Artificial Sequence
  Description of Artificial Sequence: Synthetic oligonucleotide
cugguaccgagcccccgag

SEQ ID NO: 39682 - RNA, 19 nt, Artificial Sequence
  Description of Artificial Sequence: Synthetic oligonucleotide
cuacaaccagacaguggac

SEQ ID NO: 39683 - RNA, 19 nt, Artificial Sequence
  Description of Artificial Sequence: Synthetic oligonucleotide
gugugcucggccaucgaca

SEQ ID NO: 39684 - RNA, 19 nt, Artificial Sequence
  Description of Artificial Sequence: Synthetic oligonucleotide
ccgacccuuucaguccgag

SEQ ID NO: 39685 - RNA, 19 nt, Artificial Sequence
  Description of Artificial Sequence: Synthetic oligonucleotide
gacccgcugguaccgagcc

SEQ ID NO: 39686 - RNA, 19 nt, Artificial Sequence
  Description of Artificial Sequence: Synthetic oligonucleotide
acccgcugguaccgagccc

SEQ ID NO: 39687 - RNA, 19 nt, Artificial Sequence
  Description of Artificial Sequence: Synthetic oligonucleotide
cccgcugguaccgagcccc

SEQ ID NO: 39688 - RNA, 19 nt, Artificial Sequence
  Description of Artificial Sequence: Synthetic oligonucleotide
ccgcugguaccgagccccc

SEQ ID NO: 39689 - RNA, 19 nt, Artificial Sequence
  Description of Artificial Sequence: Synthetic oligonucleotide
guaccgagcccccgaggug

SEQ ID NO: 39690 - RNA, 19 nt, Artificial Sequence
  Description of Artificial Sequence: Synthetic oligonucleotide
uaccgagcccccgagguga

SEQ ID NO: 39691 - RNA, 19 nt, Artificial Sequence
  Description of Artificial Sequence: Synthetic oligonucleotide
accgagcccccgaggugau

SEQ ID NO: 39692 - RNA, 19 nt, Artificial Sequence
  Description of Artificial Sequence: Synthetic oligonucleotide
ccgagcccccgaggugauc

SEQ ID NO: 39693 - RNA, 19 nt, Artificial Sequence
  Description of Artificial Sequence: Synthetic oligonucleotide
cggggccuauggcuccgug

SEQ ID NO: 39694 - RNA, 19 nt, Artificial Sequence
  Description of Artificial Sequence: Synthetic oligonucleotide
ggccuauggcuccgugugc

SEQ ID NO: 39695 - RNA, 19 nt, Artificial Sequence
  Description of Artificial Sequence: Synthetic oligonucleotide
gccuauggcuccgugugcu

SEQ ID NO: 39696 - RNA, 19 nt, Artificial Sequence
  Description of Artificial Sequence: Synthetic oligonucleotide
ccuauggcuccgugugcuc

SEQ ID NO: 39697 - RNA, 19 nt, Artificial Sequence
  Description of Artificial Sequence: Synthetic oligonucleotide
ggcugcggaccugcuggag

SEQ ID NO: 39698 - RNA, 19 nt, Artificial Sequence
  Description of Artificial Sequence: Synthetic oligonucleotide
gcugcggaccugcuggaga

SEQ ID NO: 39699 - RNA, 19 nt, Artificial Sequence
  Description of Artificial Sequence: Synthetic oligonucleotide
cugcggaccugcuggagaa

SEQ ID NO: 39700 - RNA, 19 nt, Artificial Sequence
  Description of Artificial Sequence: Synthetic oligonucleotide
ugcggaccugcuggagaag

SEQ ID NO: 39701 - RNA, 19 nt, Artificial Sequence
  Description of Artificial Sequence: Synthetic oligonucleotide
gcggaccugcuggagaaga

SEQ ID NO: 39702 - RNA, 19 nt, Artificial Sequence
  Description of Artificial Sequence: Synthetic oligonucleotide
cggaccugcuggagaagau

SEQ ID NO: 39703 - RNA, 19 nt, Artificial Sequence
  Description of Artificial Sequence: Synthetic oligonucleotide
aaaugacaggcuacguggc

SEQ ID NO: 39704 - RNA, 19 nt, Artificial Sequence
  Description of Artificial Sequence: Synthetic oligonucleotide
aaugacaggcuacguggcc

SEQ ID NO: 39705 - RNA, 19 nt, Artificial Sequence
  Description of Artificial Sequence: Synthetic oligonucleotide
caagacaaucugggaggug

SEQ ID NO: 39706 - RNA, 19 nt, Artificial Sequence
  Description of Artificial Sequence: Synthetic oligonucleotide
aagacaaucugggaggugc

SEQ ID NO: 39707 - RNA, 19 nt, Artificial Sequence
  Description of Artificial Sequence: Synthetic oligonucleotide
uucacagggaccuaaaacc

SEQ ID NO: 39708 - RNA, 19 nt, Artificial Sequence
  Description of Artificial Sequence: Synthetic oligonucleotide
aaucuagcugugaaugaag

SEQ ID NO: 39709 - RNA, 19 nt, Artificial Sequence
  Description of Artificial Sequence: Synthetic oligonucleotide
aucuagcugugaaugaaga

SEQ ID NO: 39710 - RNA, 19 nt, Artificial Sequence
  Description of Artificial Sequence: Synthetic oligonucleotide
ucuagcugugaaugaagac

SEQ ID NO: 39711 - RNA, 19 nt, Artificial Sequence
  Description of Artificial Sequence: Synthetic oligonucleotide
ggcuucuaccggcaggagc

SEQ ID NO: 39712 - RNA, 19 nt, Artificial Sequence
  Description of Artificial Sequence: Synthetic oligonucleotide
accgggaccugaagcccag

SEQ ID NO: 39713 - RNA, 19 nt, Artificial Sequence
  Description of Artificial Sequence: Synthetic oligonucleotide
ccgggaccugaagcccagc

SEQ ID NO: 39714 - RNA, 19 nt, Artificial Sequence
  Description of Artificial Sequence: Synthetic oligonucleotide
cgggaccugaagcccagca

SEQ ID NO: 39715 - RNA, 19 nt, Artificial Sequence
  Description of Artificial Sequence: Synthetic oligonucleotide
ggaaggaugcuggugcugg

SEQ ID NO: 39716 - RNA, 19 nt, Artificial Sequence
  Description of Artificial Sequence: Synthetic oligonucleotide
gaaggaugcuggugcugga

SEQ ID NO: 39717 - RNA, 19 nt, Artificial Sequence
  Description of Artificial Sequence: Synthetic oligonucleotide
ggaugcuggugcuggacag

SEQ ID NO: 39718 - RNA, 19 nt, Artificial Sequence
  Description of Artificial Sequence: Synthetic oligonucleotide
gaugcuggugcuggacagu

SEQ ID NO: 39719 - RNA, 19 nt, Artificial Sequence
  Description of Artificial Sequence: Synthetic oligonucleotide
augcuggugcuggacagug

SEQ ID NO: 39720 - RNA, 19 nt, Artificial Sequence
  Description of Artificial Sequence: Synthetic oligonucleotide
ugcuggugcuggacaguga

SEQ ID NO: 39721 - RNA, 19 nt, Artificial Sequence
  Description of Artificial Sequence: Synthetic oligonucleotide
gcagcugaggcacuggccc

SEQ ID NO: 39722 - RNA, 19 nt, Artificial Sequence
  Description of Artificial Sequence: Synthetic oligonucleotide
cagcugaggcacuggccca

SEQ ID NO: 39723 - RNA, 19 nt, Artificial Sequence
  Description of Artificial Sequence: Synthetic oligonucleotide
aggaaguccucagcuucaa

SEQ ID NO: 39724 - RNA, 19 nt, Artificial Sequence
  Description of Artificial Sequence: Synthetic oligonucleotide
ggaaguccucagcuucaag

SEQ ID NO: 39725 - RNA, 19 nt, Artificial Sequence
  Description of Artificial Sequence: Synthetic oligonucleotide
ccucagcuucaagccccca

SEQ ID NO: 39726 - RNA, 19 nt, Artificial Sequence
  Description of Artificial Sequence: Synthetic oligonucleotide
cucagcuucaagcccccag

SEQ ID NO: 39727 - RNA, 19 nt, Artificial Sequence
  Description of Artificial Sequence: Synthetic oligonucleotide
aagcaccugaagcacgaga

SEQ ID NO: 39728 - RNA, 19 nt, Artificial Sequence
  Description of Artificial Sequence: Synthetic oligonucleotide
accugaagcacgagaacgu

SEQ ID NO: 39729 - RNA, 19 nt, Artificial Sequence
  Description of Artificial Sequence: Synthetic oligonucleotide
acgaggagaugaccggcua

SEQ ID NO: 39730 - RNA, 19 nt, Artificial Sequence
  Description of Artificial Sequence: Synthetic oligonucleotide
acggcuccgucuguucggc

SEQ ID NO: 39731 - RNA, 19 nt, Artificial Sequence
  Description of Artificial Sequence: Synthetic oligonucleotide
acguaccgggagcugcggc

SEQ ID NO: 39732 - RNA, 19 nt, Artificial Sequence
  Description of Artificial Sequence: Synthetic oligonucleotide
agcaccugaagcacgagaa

SEQ ID NO: 39733 - RNA, 19 nt, Artificial Sequence
  Description of Artificial Sequence: Synthetic oligonucleotide
caccugaagcacgagaacg

SEQ ID NO: 39734 - RNA, 19 nt, Artificial Sequence
  Description of Artificial Sequence: Synthetic oligonucleotide
ccccaugccccagaaggac

SEQ ID NO: 39735 - RNA, 19 nt, Artificial Sequence
  Description of Artificial Sequence: Synthetic oligonucleotide
ccuacggcuccgucuguuc

SEQ ID NO: 39736 - RNA, 19 nt, Artificial Sequence
  Description of Artificial Sequence: Synthetic oligonucleotide
ccugaagcacgagaacguc

SEQ ID NO: 39737 - RNA, 19 nt, Artificial Sequence
  Description of Artificial Sequence: Synthetic oligonucleotide
cggcgccuacggcuccguc

SEQ ID NO: 39738 - RNA, 19 nt, Artificial Sequence
  Description of Artificial Sequence: Synthetic oligonucleotide
cggcuccgucuguucggcc

SEQ ID NO: 39739 - RNA, 19 nt, Artificial Sequence
  Description of Artificial Sequence: Synthetic oligonucleotide
cuacggcuccgucuguucg

SEQ ID NO: 39740 - RNA, 19 nt, Artificial Sequence
  Description of Artificial Sequence: Synthetic oligonucleotide
cugaagcacgagaacguca

SEQ ID NO: 39741 - RNA, 19 nt, Artificial Sequence
  Description of Artificial Sequence: Synthetic oligonucleotide
cuggacgucuucacgccgg

SEQ ID NO: 39742 - RNA, 19 nt, Artificial Sequence
  Description of Artificial Sequence: Synthetic oligonucleotide
cuucuggacgucuucacgc

SEQ ID NO: 39743 - RNA, 19 nt, Artificial Sequence
  Description of Artificial Sequence: Synthetic oligonucleotide
gaaguacauccacucggcc

SEQ ID NO: 39744 - RNA, 19 nt, Artificial Sequence
  Description of Artificial Sequence: Synthetic oligonucleotide
gacgaggagaugaccggcu

SEQ ID NO: 39745 - RNA, 19 nt, Artificial Sequence
  Description of Artificial Sequence: Synthetic oligonucleotide
gacuacauugaccagcuga

SEQ ID NO: 39746 - RNA, 19 nt, Artificial Sequence
  Description of Artificial Sequence: Synthetic oligonucleotide
gcaccugaagcacgagaac

SEQ ID NO: 39747 - RNA, 19 nt, Artificial Sequence
  Description of Artificial Sequence: Synthetic oligonucleotide
gcaucauggcugagcugcu

SEQ ID NO: 39748 - RNA, 19 nt, Artificial Sequence
  Description of Artificial Sequence: Synthetic oligonucleotide
gccuacggcuccgucuguu

SEQ ID NO: 39749 - RNA, 19 nt, Artificial Sequence
  Description of Artificial Sequence: Synthetic oligonucleotide
gcuucuggacgucuucacg

SEQ ID NO: 39750 - RNA, 19 nt, Artificial Sequence
  Description of Artificial Sequence: Synthetic oligonucleotide
ggacgucuucacgccggcc

SEQ ID NO: 39751 - RNA, 19 nt, Artificial Sequence
  Description of Artificial Sequence: Synthetic oligonucleotide
ggagaugaccggcuaugug

SEQ ID NO: 39752 - RNA, 19 nt, Artificial Sequence
  Description of Artificial Sequence: Synthetic oligonucleotide
guggccacgcgcugguacc

SEQ ID NO: 39753 - RNA, 19 nt, Artificial Sequence
  Description of Artificial Sequence: Synthetic oligonucleotide
uacggcuccgucuguucgg

SEQ ID NO: 39754 - RNA, 19 nt, Artificial Sequence
  Description of Artificial Sequence: Synthetic oligonucleotide
ucgggcuggcgcgccaggc

SEQ ID NO: 39755 - RNA, 19 nt, Artificial Sequence
  Description of Artificial Sequence: Synthetic oligonucleotide
ugcaucauggcugagcugc

SEQ ID NO: 39756 - RNA, 19 nt, Artificial Sequence
  Description of Artificial Sequence: Synthetic oligonucleotide
uggacgucuucacgccggc

SEQ ID NO: 39757 - RNA, 19 nt, Artificial Sequence
  Description of Artificial Sequence: Synthetic oligonucleotide
uggccacgcgcugguaccg

SEQ ID NO: 39758 - RNA, 19 nt, Artificial Sequence
  Description of Artificial Sequence: Synthetic oligonucleotide
uucgggcuggcgcgccagg

SEQ ID NO: 39759 - RNA, 19 nt, Artificial Sequence
  Description of Artificial Sequence: Synthetic oligonucleotide
uucuggacgucuucacgcc

SEQ ID NO: 39760 - RNA, 19 nt, Artificial Sequence
  Description of Artificial Sequence: Synthetic oligonucleotide
uuucgggcuggcgcgccag

SEQ ID NO: 39761 - RNA, 19 nt, Artificial Sequence
  Description of Artificial Sequence: Synthetic oligonucleotide
agcucaggauccuggauuu

SEQ ID NO: 39762 - RNA, 19 nt, Artificial Sequence
  Description of Artificial Sequence: Synthetic oligonucleotide
agguggcggugaagaagcu

SEQ ID NO: 39763 - RNA, 19 nt, Artificial Sequence
  Description of Artificial Sequence: Synthetic oligonucleotide
cugaacaacaucgucaagu

SEQ ID NO: 39764 - RNA, 19 nt, Artificial Sequence
  Description of Artificial Sequence: Synthetic oligonucleotide
gagcucaggauccuggauu

SEQ ID NO: 39765 - RNA, 19 nt, Artificial Sequence
  Description of Artificial Sequence: Synthetic oligonucleotide
gcgccgaccugaacaacau

SEQ ID NO: 39766 - RNA, 19 nt, Artificial Sequence
  Description of Artificial Sequence: Synthetic oligonucleotide
ggcgccgaccugaacaaca

SEQ ID NO: 39767 - RNA, 19 nt, Artificial Sequence
  Description of Artificial Sequence: Synthetic oligonucleotide
gggcgccgaccugaacaac

SEQ ID NO: 39768 - RNA, 19 nt, Artificial Sequence
  Description of Artificial Sequence: Synthetic oligonucleotide
guggagccaacccccuggc

SEQ ID NO: 39769 - RNA, 19 nt, Artificial Sequence
  Description of Artificial Sequence: Synthetic oligonucleotide
ugaacaacaucgucaagug

SEQ ID NO: 39770 - RNA, 19 nt, Artificial Sequence
  Description of Artificial Sequence: Synthetic oligonucleotide
ugagcucaggauccuggau

SEQ ID NO: 39771 - RNA, 19 nt, Artificial Sequence
  Description of Artificial Sequence: Synthetic oligonucleotide
uggcaaaaaucuccucaga

SEQ ID NO: 39772 - RNA, 19 nt, Artificial Sequence
  Description of Artificial Sequence: Synthetic oligonucleotide
aagaggugcucagcuucaa

SEQ ID NO: 39773 - RNA, 19 nt, Artificial Sequence
  Description of Artificial Sequence: Synthetic oligonucleotide
accagcugaaggagaucau

SEQ ID NO: 39774 - RNA, 19 nt, Artificial Sequence
  Description of Artificial Sequence: Synthetic oligonucleotide
accgggcucccgaggucau

SEQ ID NO: 39775 - RNA, 19 nt, Artificial Sequence
  Description of Artificial Sequence: Synthetic oligonucleotide
acgacacggaagaugagcc

SEQ ID NO: 39776 - RNA, 19 nt, Artificial Sequence
  Description of Artificial Sequence: Synthetic oligonucleotide
agaggugcucagcuucaag

SEQ ID NO: 39777 - RNA, 19 nt, Artificial Sequence
  Description of Artificial Sequence: Synthetic oligonucleotide
agaugcuggugcuggacgc

SEQ ID NO: 39778 - RNA, 19 nt, Artificial Sequence
  Description of Artificial Sequence: Synthetic oligonucleotide
agcgaccaccuggaccagc

SEQ ID NO: 39779 - RNA, 19 nt, Artificial Sequence
  Description of Artificial Sequence: Synthetic oligonucleotide
augggcaccgaccugggca

SEQ ID NO: 39780 - RNA, 19 nt, Artificial Sequence
  Description of Artificial Sequence: Synthetic oligonucleotide
cacgacacggaagaugagc

SEQ ID NO: 39781 - RNA, 19 nt, Artificial Sequence
  Description of Artificial Sequence: Synthetic oligonucleotide
cagagcgaugaggccaaga

SEQ ID NO: 39782 - RNA, 19 nt, Artificial Sequence
  Description of Artificial Sequence: Synthetic oligonucleotide
caggcgaggcgcuggccca

SEQ ID NO: 39783 - RNA, 19 nt, Artificial Sequence
  Description of Artificial Sequence: Synthetic oligonucleotide
caucauccacagagaccug

SEQ ID NO: 39784 - RNA, 19 nt, Artificial Sequence
  Description of Artificial Sequence: Synthetic oligonucleotide
ccaccuggaccagcugaag

SEQ ID NO: 39785 - RNA, 19 nt, Artificial Sequence
  Description of Artificial Sequence: Synthetic oligonucleotide
ccagcugaaggagaucaug

SEQ ID NO: 39786 - RNA, 19 nt, Artificial Sequence
  Description of Artificial Sequence: Synthetic oligonucleotide
ccggcaucauccacagaga

SEQ ID NO: 39787 - RNA, 19 nt, Artificial Sequence
  Description of Artificial Sequence: Synthetic oligonucleotide
ccuggacuucggccuggcc

SEQ ID NO: 39788 - RNA, 19 nt, Artificial Sequence
  Description of Artificial Sequence: Synthetic oligonucleotide
cggcaucauccacagagac

SEQ ID NO: 39789 - RNA, 19 nt, Artificial Sequence
  Description of Artificial Sequence: Synthetic oligonucleotide
cggugguaccgggcucccg

SEQ ID NO: 39790 - RNA, 19 nt, Artificial Sequence
  Description of Artificial Sequence: Synthetic oligonucleotide
gaccagcugaaggagauca

SEQ ID NO: 39791 - RNA, 19 nt, Artificial Sequence
  Description of Artificial Sequence: Synthetic oligonucleotide
gagcgaugaggccaagaac

SEQ ID NO: 39792 - RNA, 19 nt, Artificial Sequence
  Description of Artificial Sequence: Synthetic oligonucleotide
gcaggcgaggcgcuggccc

SEQ ID NO: 39793 - RNA, 19 nt, Artificial Sequence
  Description of Artificial Sequence: Synthetic oligonucleotide
gcaucauccacagagaccu

SEQ ID NO: 39794 - RNA, 19 nt, Artificial Sequence
  Description of Artificial Sequence: Synthetic oligonucleotide
gccggcaucauccacagag

SEQ ID NO: 39795 - RNA, 19 nt, Artificial Sequence
  Description of Artificial Sequence: Synthetic oligonucleotide
gcgaccaccuggaccagcu

SEQ ID NO: 39796 - RNA, 19 nt, Artificial Sequence
  Description of Artificial Sequence: Synthetic oligonucleotide
gcucccuaaaaaaaaaaaa

SEQ ID NO: 39797 - RNA, 19 nt, Artificial Sequence
  Description of Artificial Sequence: Synthetic oligonucleotide
ggcaucauccacagagacc

SEQ ID NO: 39798 - RNA, 19 nt, Artificial Sequence
  Description of Artificial Sequence: Synthetic oligonucleotide
guaccgggcucccgagguc

SEQ ID NO: 39799 - RNA, 19 nt, Artificial Sequence
  Description of Artificial Sequence: Synthetic oligonucleotide
uaccgggcucccgagguca

SEQ ID NO: 39800 - RNA, 19 nt, Artificial Sequence
  Description of Artificial Sequence: Synthetic oligonucleotide
ugggcaccgaccugggcaa

SEQ ID NO: 39801 - RNA, 19 nt, Artificial Sequence
  Description of Artificial Sequence: Synthetic oligonucleotide
aagcacaugcgccacgaga

SEQ ID NO: 39802 - RNA, 19 nt, Artificial Sequence
  Description of Artificial Sequence: Synthetic oligonucleotide
aagcucaugaaacaugaga

SEQ ID NO: 39803 - RNA, 19 nt, Artificial Sequence
  Description of Artificial Sequence: Synthetic oligonucleotide
acaugcgccacgagaacgu

SEQ ID NO: 39804 - RNA, 19 nt, Artificial Sequence
  Description of Artificial Sequence: Synthetic oligonucleotide
acggcgcggugugcucggc

SEQ ID NO: 39805 - RNA, 19 nt, Artificial Sequence
  Description of Artificial Sequence: Synthetic oligonucleotide
agcacaugcgccacgagaa

SEQ ID NO: 39806 - RNA, 19 nt, Artificial Sequence
  Description of Artificial Sequence: Synthetic oligonucleotide
agcucaugaaacaugagaa

SEQ ID NO: 39807 - RNA, 19 nt, Artificial Sequence
  Description of Artificial Sequence: Synthetic oligonucleotide
aguuccucguguaccagau

SEQ ID NO: 39808 - RNA, 19 nt, Artificial Sequence
  Description of Artificial Sequence: Synthetic oligonucleotide
auccaguuccucguguacc

SEQ ID NO: 39809 - RNA, 19 nt, Artificial Sequence
  Description of Artificial Sequence: Synthetic oligonucleotide
augcgcuacacgcagacgg

SEQ ID NO: 39810 - RNA, 19 nt, Artificial Sequence
  Description of Artificial Sequence: Synthetic oligonucleotide
augcuggugcuggacgcgg

SEQ ID NO: 39811 - RNA, 19 nt, Artificial Sequence
  Description of Artificial Sequence: Synthetic oligonucleotide
cacaugcgccacgagaacg

SEQ ID NO: 39812 - RNA, 19 nt, Artificial Sequence
  Description of Artificial Sequence: Synthetic oligonucleotide
cagacagugagaugacugg

SEQ ID NO: 39813 - RNA, 19 nt, Artificial Sequence
  Description of Artificial Sequence: Synthetic oligonucleotide
caguuccucguguaccaga

SEQ ID NO: 39814 - RNA, 19 nt, Artificial Sequence
  Description of Artificial Sequence: Synthetic oligonucleotide
ccaguccgagcuguucgcc

SEQ ID NO: 39815 - RNA, 19 nt, Artificial Sequence
  Description of Artificial Sequence: Synthetic oligonucleotide
ccaguuccucguguaccag

SEQ ID NO: 39816 - RNA, 19 nt, Artificial Sequence
  Description of Artificial Sequence: Synthetic oligonucleotide
ccaucaagaagcuguaucg

SEQ ID NO: 39817 - RNA, 19 nt, Artificial Sequence
  Description of Artificial Sequence: Synthetic oligonucleotide
cccuacuucgagucccugc

SEQ ID NO: 39818 - RNA, 19 nt, Artificial Sequence
  Description of Artificial Sequence: Synthetic oligonucleotide
cccuuccaguccgagcugu

SEQ ID NO: 39819 - RNA, 19 nt, Artificial Sequence
  Description of Artificial Sequence: Synthetic oligonucleotide
ccuacggcgcggugugcuc

SEQ ID NO: 39820 - RNA, 19 nt, Artificial Sequence
  Description of Artificial Sequence: Synthetic oligonucleotide
ccucguguaccagaugcug

SEQ ID NO: 39821 - RNA, 19 nt, Artificial Sequence
  Description of Artificial Sequence: Synthetic oligonucleotide
ccuuccaguccgagcuguu

SEQ ID NO: 39822 - RNA, 19 nt, Artificial Sequence
  Description of Artificial Sequence: Synthetic oligonucleotide
cggcccuuccaguccgagc

SEQ ID NO: 39823 - RNA, 19 nt, Artificial Sequence
  Description of Artificial Sequence: Synthetic oligonucleotide
cggcgcggugugcucggcc

SEQ ID NO: 39824 - RNA, 19 nt, Artificial Sequence
  Description of Artificial Sequence: Synthetic oligonucleotide
cuacggcgcggugugcucg

SEQ ID NO: 39825 - RNA, 19 nt, Artificial Sequence
  Description of Artificial Sequence: Synthetic oligonucleotide
cucguguaccagaugcuga

SEQ ID NO: 39826 - RNA, 19 nt, Artificial Sequence
  Description of Artificial Sequence: Synthetic oligonucleotide
cugugaaccuccuggagaa

SEQ ID NO: 39827 - RNA, 19 nt, Artificial Sequence
  Description of Artificial Sequence: Synthetic oligonucleotide
cuuccaguccgagcuguuc

SEQ ID NO: 39828 - RNA, 19 nt, Artificial Sequence
  Description of Artificial Sequence: Synthetic oligonucleotide
gauccaguuccucguguac

SEQ ID NO: 39829 - RNA, 19 nt, Artificial Sequence
  Description of Artificial Sequence: Synthetic oligonucleotide
gaugcgcuacacgcagacg

SEQ ID NO: 39830 - RNA, 19 nt, Artificial Sequence
  Description of Artificial Sequence: Synthetic oligonucleotide
gaugcuggugcuggacgcg

SEQ ID NO: 39831 - RNA, 19 nt, Artificial Sequence
  Description of Artificial Sequence: Synthetic oligonucleotide
gcacaugcgccacgagaac

SEQ ID NO: 39832 - RNA, 19 nt, Artificial Sequence
  Description of Artificial Sequence: Synthetic oligonucleotide
gcagacagugagaugacug

SEQ ID NO: 39833 - RNA, 19 nt, Artificial Sequence
  Description of Artificial Sequence: Synthetic oligonucleotide
gcaucauggcggagaugau

SEQ ID NO: 39834 - RNA, 19 nt, Artificial Sequence
  Description of Artificial Sequence: Synthetic oligonucleotide
gccaucaagaagcuguauc

SEQ ID NO: 39835 - RNA, 19 nt, Artificial Sequence
  Description of Artificial Sequence: Synthetic oligonucleotide
gccuacggcgcggugugcu

SEQ ID NO: 39836 - RNA, 19 nt, Artificial Sequence
  Description of Artificial Sequence: Synthetic oligonucleotide
gcugugaaccuccuggaga

SEQ ID NO: 39837 - RNA, 19 nt, Artificial Sequence
  Description of Artificial Sequence: Synthetic oligonucleotide
ggccaucaagaagcuguau

SEQ ID NO: 39838 - RNA, 19 nt, Artificial Sequence
  Description of Artificial Sequence: Synthetic oligonucleotide
ggcccuuccaguccgagcu

SEQ ID NO: 39839 - RNA, 19 nt, Artificial Sequence
  Description of Artificial Sequence: Synthetic oligonucleotide
ggcugugaaccuccuggag

SEQ ID NO: 39840 - RNA, 19 nt, Artificial Sequence
  Description of Artificial Sequence: Synthetic oligonucleotide
gugaaccuccuggagaaga

SEQ ID NO: 39841 - RNA, 19 nt, Artificial Sequence
  Description of Artificial Sequence: Synthetic oligonucleotide
guguaccagaugcugaagg

SEQ ID NO: 39842 - RNA, 19 nt, Artificial Sequence
  Description of Artificial Sequence: Synthetic oligonucleotide
guuccucguguaccagaug

SEQ ID NO: 39843 - RNA, 19 nt, Artificial Sequence
  Description of Artificial Sequence: Synthetic oligonucleotide
uacggcgcggugugcucgg

SEQ ID NO: 39844 - RNA, 19 nt, Artificial Sequence
  Description of Artificial Sequence: Synthetic oligonucleotide
uccaguccgagcuguucgc

SEQ ID NO: 39845 - RNA, 19 nt, Artificial Sequence
  Description of Artificial Sequence: Synthetic oligonucleotide
uccaguuccucguguacca

SEQ ID NO: 39846 - RNA, 19 nt, Artificial Sequence
  Description of Artificial Sequence: Synthetic oligonucleotide
uccucguguaccagaugcu

SEQ ID NO: 39847 - RNA, 19 nt, Artificial Sequence
  Description of Artificial Sequence: Synthetic oligonucleotide
ucggcccuuccaguccgag

SEQ ID NO: 39848 - RNA, 19 nt, Artificial Sequence
  Description of Artificial Sequence: Synthetic oligonucleotide
ucguguaccagaugcugaa

SEQ ID NO: 39849 - RNA, 19 nt, Artificial Sequence
  Description of Artificial Sequence: Synthetic oligonucleotide
ugaaccuccuggagaagau

SEQ ID NO: 39850 - RNA, 19 nt, Artificial Sequence
  Description of Artificial Sequence: Synthetic oligonucleotide
ugcaucauggcggagauga

SEQ ID NO: 39851 - RNA, 19 nt, Artificial Sequence
  Description of Artificial Sequence: Synthetic oligonucleotide
ugcuggugcuggacgcgga

SEQ ID NO: 39852 - RNA, 19 nt, Artificial Sequence
  Description of Artificial Sequence: Synthetic oligonucleotide
uguaccagaugcugaaggg

SEQ ID NO: 39853 - RNA, 19 nt, Artificial Sequence
  Description of Artificial Sequence: Synthetic oligonucleotide
ugugaaccuccuggagaag

SEQ ID NO: 39854 - RNA, 19 nt, Artificial Sequence
  Description of Artificial Sequence: Synthetic oligonucleotide
uuccaguccgagcuguucg

SEQ ID NO: 39855 - RNA, 19 nt, Artificial Sequence
  Description of Artificial Sequence: Synthetic oligonucleotide
uuccucguguaccagaugc

SEQ ID NO: 39856 - RNA, 19 nt, Artificial Sequence
  Description of Artificial Sequence: Synthetic oligonucleotide
acccggugguaccgggcuc

SEQ ID NO: 39857 - RNA, 19 nt, Artificial Sequence
  Description of Artificial Sequence: Synthetic oligonucleotide
cccggugguaccgggcucc

SEQ ID NO: 39858 - RNA, 19 nt, Artificial Sequence
  Description of Artificial Sequence: Synthetic oligonucleotide
gcgccuacggcgcggugug

SEQ ID NO: 39859 - RNA, 19 nt, Artificial Sequence
  Description of Artificial Sequence: Synthetic oligonucleotide
ggcgccuacggcgcggugu

SEQ ID NO: 39860 - RNA, 19 nt, Artificial Sequence
  Description of Artificial Sequence: Synthetic oligonucleotide
ucaacaagaccgccuggga

SEQ ID NO: 39861 - RNA, 19 nt, Artificial Sequence
  Description of Artificial Sequence: Synthetic oligonucleotide
caacaagaccgccugggag

SEQ ID NO: 39862 - RNA, 19 nt, Artificial Sequence
  Description of Artificial Sequence: Synthetic oligonucleotide
aacaagaccgccugggagc

SEQ ID NO: 39863 - RNA, 19 nt, Artificial Sequence
  Description of Artificial Sequence: Synthetic oligonucleotide
acaagaccgccugggagcu

SEQ ID NO: 39864 - RNA, 19 nt, Artificial Sequence
  Description of Artificial Sequence: Synthetic oligonucleotide
agaccgccugggagcugcc

SEQ ID NO: 39865 - RNA, 19 nt, Artificial Sequence
  Description of Artificial Sequence: Synthetic oligonucleotide
cuauggcuccgugugcucg

SEQ ID NO: 39866 - RNA, 19 nt, Artificial Sequence
  Description of Artificial Sequence: Synthetic oligonucleotide
uauggcuccgugugcucgg

SEQ ID NO: 39867 - RNA, 19 nt, Artificial Sequence
  Description of Artificial Sequence: Synthetic oligonucleotide
auggcuccgugugcucggc

SEQ ID NO: 39868 - RNA, 19 nt, Artificial Sequence
  Description of Artificial Sequence: Synthetic oligonucleotide
uggcuccgugugcucggcc

SEQ ID NO: 39869 - RNA, 19 nt, Artificial Sequence
  Description of Artificial Sequence: Synthetic oligonucleotide
ggcuccgugugcucggcca

SEQ ID NO: 39870 - RNA, 19 nt, Artificial Sequence
  Description of Artificial Sequence: Synthetic oligonucleotide
ugagaacgucauugggcuc

SEQ ID NO: 39871 - RNA, 19 nt, Artificial Sequence
  Description of Artificial Sequence: Synthetic oligonucleotide
cgucauugggcuccuggau

SEQ ID NO: 39872 - RNA, 19 nt, Artificial Sequence
  Description of Artificial Sequence: Synthetic oligonucleotide
gucauugggcuccuggaug

SEQ ID NO: 39873 - RNA, 19 nt, Artificial Sequence
  Description of Artificial Sequence: Synthetic oligonucleotide
ucauugggcuccuggaugu

SEQ ID NO: 39874 - RNA, 19 nt, Artificial Sequence
  Description of Artificial Sequence: Synthetic oligonucleotide
cauugggcuccuggauguc

SEQ ID NO: 39875 - RNA, 19 nt, Artificial Sequence
  Description of Artificial Sequence: Synthetic oligonucleotide
auugggcuccuggaugucu

SEQ ID NO: 39876 - RNA, 19 nt, Artificial Sequence
  Description of Artificial Sequence: Synthetic oligonucleotide
uugggcuccuggaugucuu

SEQ ID NO: 39877 - RNA, 19 nt, Artificial Sequence
  Description of Artificial Sequence: Synthetic oligonucleotide
ugggcuccuggaugucuuc

SEQ ID NO: 39878 - RNA, 19 nt, Artificial Sequence
  Description of Artificial Sequence: Synthetic oligonucleotide
gcuccuggaugucuucacc

SEQ ID NO: 39879 - RNA, 19 nt, Artificial Sequence
  Description of Artificial Sequence: Synthetic oligonucleotide
cuccuggaugucuucaccc

SEQ ID NO: 39880 - RNA, 19 nt, Artificial Sequence
  Description of Artificial Sequence: Synthetic oligonucleotide
uccuggaugucuucacccc

SEQ ID NO: 39881 - RNA, 19 nt, Artificial Sequence
  Description of Artificial Sequence: Synthetic oligonucleotide
cuggaugucuucaccccag

SEQ ID NO: 39882 - RNA, 19 nt, Artificial Sequence
  Description of Artificial Sequence: Synthetic oligonucleotide
uggaugucuucaccccagc

SEQ ID NO: 39883 - RNA, 19 nt, Artificial Sequence
  Description of Artificial Sequence: Synthetic oligonucleotide
ggaugucuucaccccagcc

SEQ ID NO: 39884 - RNA, 19 nt, Artificial Sequence
  Description of Artificial Sequence: Synthetic oligonucleotide
gggcuggcgcgacaugcag

SEQ ID NO: 39885 - RNA, 19 nt, Artificial Sequence
  Description of Artificial Sequence: Synthetic oligonucleotide
ggcuggcgcgacaugcaga

SEQ ID NO: 39886 - RNA, 19 nt, Artificial Sequence
  Description of Artificial Sequence: Synthetic oligonucleotide
gcuggcgcgacaugcagac

SEQ ID NO: 39887 - RNA, 19 nt, Artificial Sequence
  Description of Artificial Sequence: Synthetic oligonucleotide
cuggcgcgacaugcagacg

SEQ ID NO: 39888 - RNA, 19 nt, Artificial Sequence
  Description of Artificial Sequence: Synthetic oligonucleotide
auccucagcuggaugcacu

SEQ ID NO: 39889 - RNA, 19 nt, Artificial Sequence
  Description of Artificial Sequence: Synthetic oligonucleotide
uccucagcuggaugcacua

SEQ ID NO: 39890 - RNA, 19 nt, Artificial Sequence
  Description of Artificial Sequence: Synthetic oligonucleotide
ccucagcuggaugcacuac

SEQ ID NO: 39891 - RNA, 19 nt, Artificial Sequence
  Description of Artificial Sequence: Synthetic oligonucleotide
uccuacauccagucccugc

SEQ ID NO: 39892 - RNA, 19 nt, Artificial Sequence
  Description of Artificial Sequence: Synthetic oligonucleotide
cuacauccagucccugcca

SEQ ID NO: 39893 - RNA, 19 nt, Artificial Sequence
  Description of Artificial Sequence: Synthetic oligonucleotide
acauccagucccugccaca

SEQ ID NO: 39894 - RNA, 19 nt, Artificial Sequence
  Description of Artificial Sequence: Synthetic oligonucleotide
gcuccgugugcucggccau

SEQ ID NO: 39895 - RNA, 19 nt, Artificial Sequence
  Description of Artificial Sequence: Synthetic oligonucleotide
ccgugugcucggccaucga

SEQ ID NO: 39896 - RNA, 19 nt, Artificial Sequence
  Description of Artificial Sequence: Synthetic oligonucleotide
cgugugcucggccaucgac

SEQ ID NO: 39897 - RNA, 19 nt, Artificial Sequence
  Description of Artificial Sequence: Synthetic oligonucleotide
ggccaucaagaagcugagc

SEQ ID NO: 39898 - RNA, 19 nt, Artificial Sequence
  Description of Artificial Sequence: Synthetic oligonucleotide
gccaucaagaagcugagcc

SEQ ID NO: 39899 - RNA, 19 nt, Artificial Sequence
  Description of Artificial Sequence: Synthetic oligonucleotide
ccaucaagaagcugagccg

SEQ ID NO: 39900 - RNA, 19 nt, Artificial Sequence
  Description of Artificial Sequence: Synthetic oligonucleotide
cgacccuuucaguccgaga

SEQ ID NO: 39901 - RNA, 19 nt, Artificial Sequence
  Description of Artificial Sequence: Synthetic oligonucleotide
gacccuuucaguccgagau

SEQ ID NO: 39902 - RNA, 19 nt, Artificial Sequence
  Description of Artificial Sequence: Synthetic oligonucleotide
cugcugaagcacaugcagc

SEQ ID NO: 39903 - RNA, 19 nt, Artificial Sequence
  Description of Artificial Sequence: Synthetic oligonucleotide
ugcugaagcacaugcagca

SEQ ID NO: 39904 - RNA, 19 nt, Artificial Sequence
  Description of Artificial Sequence: Synthetic oligonucleotide
aagcacaugcagcaugaga

SEQ ID NO: 39905 - RNA, 19 nt, Artificial Sequence
  Description of Artificial Sequence: Synthetic oligonucleotide
agcacaugcagcaugagaa

SEQ ID NO: 39906 - RNA, 19 nt, Artificial Sequence
  Description of Artificial Sequence: Synthetic oligonucleotide
gcacaugcagcaugagaac

SEQ ID NO: 39907 - RNA, 19 nt, Artificial Sequence
  Description of Artificial Sequence: Synthetic oligonucleotide
cacaugcagcaugagaacg

SEQ ID NO: 39908 - RNA, 19 nt, Artificial Sequence
  Description of Artificial Sequence: Synthetic oligonucleotide
acaugcagcaugagaacgu

SEQ ID NO: 39909 - RNA, 19 nt, Artificial Sequence
  Description of Artificial Sequence: Synthetic oligonucleotide
augacuucuaccuggugau

SEQ ID NO: 39910 - RNA, 19 nt, Artificial Sequence
  Description of Artificial Sequence: Synthetic oligonucleotide
uggugaugcccuucaugca

SEQ ID NO: 39911 - RNA, 19 nt, Artificial Sequence
  Description of Artificial Sequence: Synthetic oligonucleotide
agauccaguaccuggugua

SEQ ID NO: 39912 - RNA, 19 nt, Artificial Sequence
  Description of Artificial Sequence: Synthetic oligonucleotide
guguaucagaugcucaaag

SEQ ID NO: 39913 - RNA, 19 nt, Artificial Sequence
  Description of Artificial Sequence: Synthetic oligonucleotide
uguaucagaugcucaaagg

SEQ ID NO: 39914 - RNA, 19 nt, Artificial Sequence
  Description of Artificial Sequence: Synthetic oligonucleotide
cgugcacagggaccugaag

SEQ ID NO: 39915 - RNA, 19 nt, Artificial Sequence
  Description of Artificial Sequence: Synthetic oligonucleotide
gugcacagggaccugaagc

SEQ ID NO: 39916 - RNA, 19 nt, Artificial Sequence
  Description of Artificial Sequence: Synthetic oligonucleotide
gcagacgccgagaugacug

SEQ ID NO: 39917 - RNA, 19 nt, Artificial Sequence
  Description of Artificial Sequence: Synthetic oligonucleotide
cagacgccgagaugacugg

SEQ ID NO: 39918 - RNA, 19 nt, Artificial Sequence
  Description of Artificial Sequence: Synthetic oligonucleotide
ccgagaugacuggcuacgu

SEQ ID NO: 39919 - RNA, 19 nt, Artificial Sequence
  Description of Artificial Sequence: Synthetic oligonucleotide
uguaucauggcagagaugc

SEQ ID NO: 39920 - RNA, 19 nt, Artificial Sequence
  Description of Artificial Sequence: Synthetic oligonucleotide
guaucauggcagagaugcu

SEQ ID NO: 39921 - RNA, 19 nt, Artificial Sequence
  Description of Artificial Sequence: Synthetic oligonucleotide
aucauggcagagaugcuga

SEQ ID NO: 39922 - RNA, 19 nt, Artificial Sequence
  Description of Artificial Sequence: Synthetic oligonucleotide
ucauggcagagaugcugac

SEQ ID NO: 39923 - RNA, 19 nt, Artificial Sequence
  Description of Artificial Sequence: Synthetic oligonucleotide
cauggcagagaugcugaca

SEQ ID NO: 39924 - RNA, 19 nt, Artificial Sequence
  Description of Artificial Sequence: Synthetic oligonucleotide
auggcagagaugcugacag

SEQ ID NO: 39925 - RNA, 19 nt, Artificial Sequence
  Description of Artificial Sequence: Synthetic oligonucleotide
uggcagagaugcugacagg

SEQ ID NO: 39926 - RNA, 19 nt, Artificial Sequence
  Description of Artificial Sequence: Synthetic oligonucleotide
acagggaaaacucuguuca

SEQ ID NO: 39927 - RNA, 19 nt, Artificial Sequence
  Description of Artificial Sequence: Synthetic oligonucleotide
cagggaaaacucuguucaa

SEQ ID NO: 39928 - RNA, 19 nt, Artificial Sequence
  Description of Artificial Sequence: Synthetic oligonucleotide
agggaaaacucuguucaag

SEQ ID NO: 39929 - RNA, 19 nt, Artificial Sequence
  Description of Artificial Sequence: Synthetic oligonucleotide
gggaaaacucuguucaagg

SEQ ID NO: 39930 - RNA, 19 nt, Artificial Sequence
  Description of Artificial Sequence: Synthetic oligonucleotide
ggaaaacucuguucaaggg

SEQ ID NO: 39931 - RNA, 19 nt, Artificial Sequence
  Description of Artificial Sequence: Synthetic oligonucleotide
aaaacucuguucaagggga

SEQ ID NO: 39932 - RNA, 19 nt, Artificial Sequence
  Description of Artificial Sequence: Synthetic oligonucleotide
agauccugaaagugaccgg

SEQ ID NO: 39933 - RNA, 19 nt, Artificial Sequence
  Description of Artificial Sequence: Synthetic oligonucleotide
gauccugaaagugaccggg

SEQ ID NO: 39934 - RNA, 19 nt, Artificial Sequence
  Description of Artificial Sequence: Synthetic oligonucleotide
cggaguuugugcagaagcu

SEQ ID NO: 39935 - RNA, 19 nt, Artificial Sequence
  Description of Artificial Sequence: Synthetic oligonucleotide
ggaguuugugcagaagcug

SEQ ID NO: 39936 - RNA, 19 nt, Artificial Sequence
  Description of Artificial Sequence: Synthetic oligonucleotide
gaguuugugcagaagcuga

SEQ ID NO: 39937 - RNA, 19 nt, Artificial Sequence
  Description of Artificial Sequence: Synthetic oligonucleotide
aguuugugcagaagcugaa

SEQ ID NO: 39938 - RNA, 19 nt, Artificial Sequence
  Description of Artificial Sequence: Synthetic oligonucleotide
agaugcuggagcuagacgu

SEQ ID NO: 39939 - RNA, 19 nt, Artificial Sequence
  Description of Artificial Sequence: Synthetic oligonucleotide
gaugcuggagcuagacgug

SEQ ID NO: 39940 - RNA, 19 nt, Artificial Sequence
  Description of Artificial Sequence: Synthetic oligonucleotide
augcuggagcuagacgugg

SEQ ID NO: 39941 - RNA, 19 nt, Artificial Sequence
  Description of Artificial Sequence: Synthetic oligonucleotide
ugcuggagcuagacgugga

SEQ ID NO: 39942 - RNA, 19 nt, Artificial Sequence
  Description of Artificial Sequence: Synthetic oligonucleotide
aguggaugaauggaagcag

SEQ ID NO: 39943 - RNA, 19 nt, Artificial Sequence
  Description of Artificial Sequence: Synthetic oligonucleotide
ccacguucuaccggcagga

SEQ ID NO: 39944 - RNA, 19 nt, Artificial Sequence
  Description of Artificial Sequence: Synthetic oligonucleotide
cacguucuaccggcaggag

SEQ ID NO: 39945 - RNA, 19 nt, Artificial Sequence
  Description of Artificial Sequence: Synthetic oligonucleotide
acguucuaccggcaggagc

SEQ ID NO: 39946 - RNA, 19 nt, Artificial Sequence
  Description of Artificial Sequence: Synthetic oligonucleotide
ggagcugaacaagacaauc

SEQ ID NO: 39947 - RNA, 19 nt, Artificial Sequence
  Description of Artificial Sequence: Synthetic oligonucleotide
gagcugaacaagacaaucu

SEQ ID NO: 39948 - RNA, 19 nt, Artificial Sequence
  Description of Artificial Sequence: Synthetic oligonucleotide
agcugaacaagacaaucug

SEQ ID NO: 39949 - RNA, 19 nt, Artificial Sequence
  Description of Artificial Sequence: Synthetic oligonucleotide
gcugaacaagacaaucugg

SEQ ID NO: 39950 - RNA, 19 nt, Artificial Sequence
  Description of Artificial Sequence: Synthetic oligonucleotide
cugaacaagacaaucuggg

SEQ ID NO: 39951 - RNA, 19 nt, Artificial Sequence
  Description of Artificial Sequence: Synthetic oligonucleotide
ugaacaagacaaucuggga

SEQ ID NO: 39952 - RNA, 19 nt, Artificial Sequence
  Description of Artificial Sequence: Synthetic oligonucleotide
gaacaagacaaucugggag

SEQ ID NO: 39953 - RNA, 19 nt, Artificial Sequence
  Description of Artificial Sequence: Synthetic oligonucleotide
aacaagacaaucugggagg

SEQ ID NO: 39954 - RNA, 19 nt, Artificial Sequence
  Description of Artificial Sequence: Synthetic oligonucleotide
acaagacaaucugggaggu

SEQ ID NO: 39955 - RNA, 19 nt, Artificial Sequence
  Description of Artificial Sequence: Synthetic oligonucleotide
agacaaucugggaggugcc

SEQ ID NO: 39956 - RNA, 19 nt, Artificial Sequence
  Description of Artificial Sequence: Synthetic oligonucleotide
uccagugggcucuggcgcc

SEQ ID NO: 39957 - RNA, 19 nt, Artificial Sequence
  Description of Artificial Sequence: Synthetic oligonucleotide
agugggcucuggcgccuau

SEQ ID NO: 39958 - RNA, 19 nt, Artificial Sequence
  Description of Artificial Sequence: Synthetic oligonucleotide
guguggcagugaagaagcu

SEQ ID NO: 39959 - RNA, 19 nt, Artificial Sequence
  Description of Artificial Sequence: Synthetic oligonucleotide
uguggcagugaagaagcuc

SEQ ID NO: 39960 - RNA, 19 nt, Artificial Sequence
  Description of Artificial Sequence: Synthetic oligonucleotide
ggcagugaagaagcucucc

SEQ ID NO: 39961 - RNA, 19 nt, Artificial Sequence
  Description of Artificial Sequence: Synthetic oligonucleotide
cugaacaacauugugaaau

SEQ ID NO: 39962 - RNA, 19 nt, Artificial Sequence
  Description of Artificial Sequence: Synthetic oligonucleotide
ugaacaacauugugaaaug

SEQ ID NO: 39963 - RNA, 19 nt, Artificial Sequence
  Description of Artificial Sequence: Synthetic oligonucleotide
gacaggcuacguggccacu

SEQ ID NO: 39964 - RNA, 19 nt, Artificial Sequence
  Description of Artificial Sequence: Synthetic oligonucleotide
gugggaugcauaauggccg

SEQ ID NO: 39965 - RNA, 19 nt, Artificial Sequence
  Description of Artificial Sequence: Synthetic oligonucleotide
ugggaugcauaauggccga

SEQ ID NO: 39966 - RNA, 19 nt, Artificial Sequence
  Description of Artificial Sequence: Synthetic oligonucleotide
gggaugcauaauggccgag

SEQ ID NO: 39967 - RNA, 19 nt, Artificial Sequence
  Description of Artificial Sequence: Synthetic oligonucleotide
ggaugcauaauggccgagc

SEQ ID NO: 39968 - RNA, 19 nt, Artificial Sequence
  Description of Artificial Sequence: Synthetic oligonucleotide
gaugcauaauggccgagcu

SEQ ID NO: 39969 - RNA, 19 nt, Artificial Sequence
  Description of Artificial Sequence: Synthetic oligonucleotide
augcauaauggccgagcug

SEQ ID NO: 39970 - RNA, 19 nt, Artificial Sequence
  Description of Artificial Sequence: Synthetic oligonucleotide
ugcauaauggccgagcugu

SEQ ID NO: 39971 - RNA, 19 nt, Artificial Sequence
  Description of Artificial Sequence: Synthetic oligonucleotide
gcauaauggccgagcuguu

SEQ ID NO: 39972 - RNA, 19 nt, Artificial Sequence
  Description of Artificial Sequence: Synthetic oligonucleotide
ugaagaaaaucuccucaga

SEQ ID NO: 39973 - RNA, 19 nt, Artificial Sequence
  Description of Artificial Sequence: Synthetic oligonucleotide
gaugaugaaccaguggccg

SEQ ID NO: 39974 - RNA, 19 nt, Artificial Sequence
  Description of Artificial Sequence: Synthetic oligonucleotide
augaugaaccaguggccga

SEQ ID NO: 39975 - RNA, 19 nt, Artificial Sequence
  Description of Artificial Sequence: Synthetic oligonucleotide
gaugaaccaguggccgauc

SEQ ID NO: 39976 - RNA, 19 nt, Artificial Sequence
  Description of Artificial Sequence: Synthetic oligonucleotide
augaaccaguggccgaucc

SEQ ID NO: 39977 - RNA, 19 nt, Artificial Sequence
  Description of Artificial Sequence: Synthetic oligonucleotide
ugaaaugacaggcuacgug

SEQ ID NO: 39978 - RNA, 19 nt, Artificial Sequence
  Description of Artificial Sequence: Synthetic oligonucleotide
gcuggagaagaugcuugua

SEQ ID NO: 39979 - RNA, 19 nt, Artificial Sequence
  Description of Artificial Sequence: Synthetic oligonucleotide
cuggagaagaugcuuguau

SEQ ID NO: 39980 - RNA, 19 nt, Artificial Sequence
  Description of Artificial Sequence: Synthetic oligonucleotide
uggagaagaugcuuguauu

SEQ ID NO: 39981 - RNA, 19 nt, Artificial Sequence
  Description of Artificial Sequence: Synthetic oligonucleotide
ggagaagaugcuuguauug

SEQ ID NO: 39982 - RNA, 19 nt, Artificial Sequence
  Description of Artificial Sequence: Synthetic oligonucleotide
gagaagaugcuuguauugg

SEQ ID NO: 39983 - RNA, 19 nt, Artificial Sequence
  Description of Artificial Sequence: Synthetic oligonucleotide
agaagaugcuuguauugga

SEQ ID NO: 39984 - RNA, 19 nt, Artificial Sequence
  Description of Artificial Sequence: Synthetic oligonucleotide
gaagaugcuuguauuggac

SEQ ID NO: 39985 - RNA, 19 nt, Artificial Sequence
  Description of Artificial Sequence: Synthetic oligonucleotide
guaaucuagcugugaauga

SEQ ID NO: 39986 - RNA, 19 nt, Artificial Sequence
  Description of Artificial Sequence: Synthetic oligonucleotide
ggauuuuggacuggcucgg

SEQ ID NO: 39987 - RNA, 19 nt, Artificial Sequence
  Description of Artificial Sequence: Synthetic oligonucleotide
gauuuuggacuggcucggc

SEQ ID NO: 39988 - RNA, 19 nt, Artificial Sequence
  Description of Artificial Sequence: Synthetic oligonucleotide
auuuuggacuggcucggca

SEQ ID NO: 39989 - RNA, 19 nt, Artificial Sequence
  Description of Artificial Sequence: Synthetic oligonucleotide
caagaccgugugggaggug

SEQ ID NO: 39990 - RNA, 19 nt, Artificial Sequence
  Description of Artificial Sequence: Synthetic oligonucleotide
aagaccgugugggaggugc

SEQ ID NO: 39991 - RNA, 19 nt, Artificial Sequence
  Description of Artificial Sequence: Synthetic oligonucleotide
aagguggcggugaagaagc

SEQ ID NO: 39992 - RNA, 19 nt, Artificial Sequence
  Description of Artificial Sequence: Synthetic oligonucleotide
gguggcggugaagaagcug

SEQ ID NO: 39993 - RNA, 19 nt, Artificial Sequence
  Description of Artificial Sequence: Synthetic oligonucleotide
aagaagcugucgcgccccu

SEQ ID NO: 39994 - RNA, 19 nt, Artificial Sequence
  Description of Artificial Sequence: Synthetic oligonucleotide
agaagcugucgcgccccuu

SEQ ID NO: 39995 - RNA, 19 nt, Artificial Sequence
  Description of Artificial Sequence: Synthetic oligonucleotide
gaagcugucgcgccccuuc

SEQ ID NO: 39996 - RNA, 19 nt, Artificial Sequence
  Description of Artificial Sequence: Synthetic oligonucleotide
aagcugucgcgccccuucc

SEQ ID NO: 39997 - RNA, 19 nt, Artificial Sequence
  Description of Artificial Sequence: Synthetic oligonucleotide
agcugucgcgccccuucca

SEQ ID NO: 39998 - RNA, 19 nt, Artificial Sequence
  Description of Artificial Sequence: Synthetic oligonucleotide
gcugucgcgccccuuccag

SEQ ID NO: 39999 - RNA, 19 nt, Artificial Sequence
  Description of Artificial Sequence: Synthetic oligonucleotide
cugucgcgccccuuccagu

SEQ ID NO: 40000 - RNA, 19 nt, Artificial Sequence
  Description of Artificial Sequence: Synthetic oligonucleotide
ugucgcgccccuuccaguc

SEQ ID NO: 40001 - RNA, 19 nt, Artificial Sequence
  Description of Artificial Sequence: Synthetic oligonucleotide
cggcugcucaagcaccuga

SEQ ID NO: 40002 - RNA, 19 nt, Artificial Sequence
  Description of Artificial Sequence: Synthetic oligonucleotide
uuccugguuuaccagcugc

SEQ ID NO: 40003 - RNA, 19 nt, Artificial Sequence
  Description of Artificial Sequence: Synthetic oligonucleotide
uccugguuuaccagcugcu

SEQ ID NO: 40004 - RNA, 19 nt, Artificial Sequence
  Description of Artificial Sequence: Synthetic oligonucleotide
ccugguuuaccagcugcug

SEQ ID NO: 40005 - RNA, 19 nt, Artificial Sequence
  Description of Artificial Sequence: Synthetic oligonucleotide
auccacucggccgggauca

SEQ ID NO: 40006 - RNA, 19 nt, Artificial Sequence
  Description of Artificial Sequence: Synthetic oligonucleotide
uccacucggccgggaucau

SEQ ID NO: 40007 - RNA, 19 nt, Artificial Sequence
  Description of Artificial Sequence: Synthetic oligonucleotide
ccacucggccgggaucauc

SEQ ID NO: 40008 - RNA, 19 nt, Artificial Sequence
  Description of Artificial Sequence: Synthetic oligonucleotide
cacucggccgggaucaucc

SEQ ID NO: 40009 - RNA, 19 nt, Artificial Sequence
  Description of Artificial Sequence: Synthetic oligonucleotide
acucggccgggaucaucca

SEQ ID NO: 40010 - RNA, 19 nt, Artificial Sequence
  Description of Artificial Sequence: Synthetic oligonucleotide
cucggccgggaucauccac

SEQ ID NO: 40011 - RNA, 19 nt, Artificial Sequence
  Description of Artificial Sequence: Synthetic oligonucleotide
cggccgggaucauccaccg

SEQ ID NO: 40012 - RNA, 19 nt, Artificial Sequence
  Description of Artificial Sequence: Synthetic oligonucleotide
gccgggaucauccaccggg

SEQ ID NO: 40013 - RNA, 19 nt, Artificial Sequence
  Description of Artificial Sequence: Synthetic oligonucleotide
ccgggaucauccaccggga

SEQ ID NO: 40014 - RNA, 19 nt, Artificial Sequence
  Description of Artificial Sequence: Synthetic oligonucleotide
cgggaucauccaccgggac

SEQ ID NO: 40015 - RNA, 19 nt, Artificial Sequence
  Description of Artificial Sequence: Synthetic oligonucleotide
gggaucauccaccgggacc

SEQ ID NO: 40016 - RNA, 19 nt, Artificial Sequence
  Description of Artificial Sequence: Synthetic oligonucleotide
ggaucauccaccgggaccu

SEQ ID NO: 40017 - RNA, 19 nt, Artificial Sequence
  Description of Artificial Sequence: Synthetic oligonucleotide
gaucauccaccgggaccug

SEQ ID NO: 40018 - RNA, 19 nt, Artificial Sequence
  Description of Artificial Sequence: Synthetic oligonucleotide
acgaggacugugagcucag

SEQ ID NO: 40019 - RNA, 19 nt, Artificial Sequence
  Description of Artificial Sequence: Synthetic oligonucleotide
cgaggacugugagcucagg

SEQ ID NO: 40020 - RNA, 19 nt, Artificial Sequence
  Description of Artificial Sequence: Synthetic oligonucleotide
gaggacugugagcucagga

SEQ ID NO: 40021 - RNA, 19 nt, Artificial Sequence
  Description of Artificial Sequence: Synthetic oligonucleotide
aggacugugagcucaggau

SEQ ID NO: 40022 - RNA, 19 nt, Artificial Sequence
  Description of Artificial Sequence: Synthetic oligonucleotide
ggacugugagcucaggauc

SEQ ID NO: 40023 - RNA, 19 nt, Artificial Sequence
  Description of Artificial Sequence: Synthetic oligonucleotide
gcucaggauccuggauuuc

SEQ ID NO: 40024 - RNA, 19 nt, Artificial Sequence
  Description of Artificial Sequence: Synthetic oligonucleotide
cucaggauccuggauuucg

SEQ ID NO: 40025 - RNA, 19 nt, Artificial Sequence
  Description of Artificial Sequence: Synthetic oligonucleotide
ucaggauccuggauuucgg

SEQ ID NO: 40026 - RNA, 19 nt, Artificial Sequence
  Description of Artificial Sequence: Synthetic oligonucleotide
acgcgcugguaccgggcac

SEQ ID NO: 40027 - RNA, 19 nt, Artificial Sequence
  Description of Artificial Sequence: Synthetic oligonucleotide
cgcgcugguaccgggcacc

SEQ ID NO: 40028 - RNA, 19 nt, Artificial Sequence
  Description of Artificial Sequence: Synthetic oligonucleotide
cgcugguaccgggcaccug

SEQ ID NO: 40029 - RNA, 19 nt, Artificial Sequence
  Description of Artificial Sequence: Synthetic oligonucleotide
gcugguaccgggcaccuga

SEQ ID NO: 40030 - RNA, 19 nt, Artificial Sequence
  Description of Artificial Sequence: Synthetic oligonucleotide
cugguaccgggcaccugag

SEQ ID NO: 40031 - RNA, 19 nt, Artificial Sequence
  Description of Artificial Sequence: Synthetic oligonucleotide
caucauggcugagcugcuc

SEQ ID NO: 40032 - RNA, 19 nt, Artificial Sequence
  Description of Artificial Sequence: Synthetic oligonucleotide
agcgacuacauugaccagc

SEQ ID NO: 40033 - RNA, 19 nt, Artificial Sequence
  Description of Artificial Sequence: Synthetic oligonucleotide
gcgacuacauugaccagcu

SEQ ID NO: 40034 - RNA, 19 nt, Artificial Sequence
  Description of Artificial Sequence: Synthetic oligonucleotide
cgacuacauugaccagcug

SEQ ID NO: 40035 - RNA, 19 nt, Artificial Sequence
  Description of Artificial Sequence: Synthetic oligonucleotide
acuacauugaccagcugaa

SEQ ID NO: 40036 - RNA, 19 nt, Artificial Sequence
  Description of Artificial Sequence: Synthetic oligonucleotide
cuacauugaccagcugaag

SEQ ID NO: 40037 - RNA, 19 nt, Artificial Sequence
  Description of Artificial Sequence: Synthetic oligonucleotide
gaccagcugaagcgcauca

SEQ ID NO: 40038 - RNA, 19 nt, Artificial Sequence
  Description of Artificial Sequence: Synthetic oligonucleotide
accagcugaagcgcaucau

SEQ ID NO: 40039 - RNA, 19 nt, Artificial Sequence
  Description of Artificial Sequence: Synthetic oligonucleotide
ccagcugaagcgcaucaug

SEQ ID NO: 40040 - RNA, 19 nt, Artificial Sequence
  Description of Artificial Sequence: Synthetic oligonucleotide
cacgaccccgaggaugagc

SEQ ID NO: 40041 - RNA, 19 nt, Artificial Sequence
  Description of Artificial Sequence: Synthetic oligonucleotide
acgaccccgaggaugagcc

SEQ ID NO: 40042 - RNA, 19 nt, Artificial Sequence
  Description of Artificial Sequence: Synthetic oligonucleotide
ugagagcguugaggccaag

SEQ ID NO: 40043 - RNA, 19 nt, Artificial Sequence
  Description of Artificial Sequence: Synthetic oligonucleotide
gagagcguugaggccaagg

SEQ ID NO: 40044 - RNA, 19 nt, Artificial Sequence
  Description of Artificial Sequence: Synthetic oligonucleotide
gagcguugaggccaaggag

SEQ ID NO: 40045 - RNA, 19 nt, Artificial Sequence
  Description of Artificial Sequence: Synthetic oligonucleotide
cgcacgcuggaggagugga

SEQ ID NO: 40046 - RNA, 19 nt, Artificial Sequence
  Description of Artificial Sequence: Synthetic oligonucleotide
gcacgcuggaggaguggaa

SEQ ID NO: 40047 - RNA, 19 nt, Artificial Sequence
  Description of Artificial Sequence: Synthetic oligonucleotide
cacgcuggaggaguggaag

SEQ ID NO: 40048 - RNA, 19 nt, Artificial Sequence
  Description of Artificial Sequence: Synthetic oligonucleotide
ucucucucaaaaaaaaaaa

SEQ ID NO: 40049 - RNA, 19 nt, Artificial Sequence
  Description of Artificial Sequence: Synthetic oligonucleotide
aacaagaccgugugggagg

SEQ ID NO: 40050 - RNA, 19 nt, Artificial Sequence
  Description of Artificial Sequence: Synthetic oligonucleotide
acaagaccgugugggaggu

SEQ ID NO: 40051 - RNA, 19 nt, Artificial Sequence
  Description of Artificial Sequence: Synthetic oligonucleotide
acauauauccagucccugc

SEQ ID NO: 40052 - RNA, 19 nt, Artificial Sequence
  Description of Artificial Sequence: Synthetic oligonucleotide
agaagguggcggugaagaa

SEQ ID NO: 40053 - RNA, 19 nt, Artificial Sequence
  Description of Artificial Sequence: Synthetic oligonucleotide
agaccgugugggaggugcc

SEQ ID NO: 40054 - RNA, 19 nt, Artificial Sequence
  Description of Artificial Sequence: Synthetic oligonucleotide
auauauccagucccugccc

SEQ ID NO: 40055 - RNA, 19 nt, Artificial Sequence
  Description of Artificial Sequence: Synthetic oligonucleotide
auauccagucccugccccc

SEQ ID NO: 40056 - RNA, 19 nt, Artificial Sequence
  Description of Artificial Sequence: Synthetic oligonucleotide
cugcucaagcaccugaagc

SEQ ID NO: 40057 - RNA, 19 nt, Artificial Sequence
  Description of Artificial Sequence: Synthetic oligonucleotide
cuggcgcgccaggcggacg

SEQ ID NO: 40058 - RNA, 19 nt, Artificial Sequence
  Description of Artificial Sequence: Synthetic oligonucleotide
gaagguggcggugaagaag

SEQ ID NO: 40059 - RNA, 19 nt, Artificial Sequence
  Description of Artificial Sequence: Synthetic oligonucleotide
gcugaaguacauccacucg

SEQ ID NO: 40060 - RNA, 19 nt, Artificial Sequence
  Description of Artificial Sequence: Synthetic oligonucleotide
gcugcucaagcaccugaag

SEQ ID NO: 40061 - RNA, 19 nt, Artificial Sequence
  Description of Artificial Sequence: Synthetic oligonucleotide
gcuggcgcgccaggcggac

SEQ ID NO: 40062 - RNA, 19 nt, Artificial Sequence
  Description of Artificial Sequence: Synthetic oligonucleotide
ggcuccgucuguucggccu

SEQ ID NO: 40063 - RNA, 19 nt, Artificial Sequence
  Description of Artificial Sequence: Synthetic oligonucleotide
ggcuggcgcgccaggcgga

SEQ ID NO: 40064 - RNA, 19 nt, Artificial Sequence
  Description of Artificial Sequence: Synthetic oligonucleotide
gggcuggcgcgccaggcgg

SEQ ID NO: 40065 - RNA, 19 nt, Artificial Sequence
  Description of Artificial Sequence: Synthetic oligonucleotide
ugaacaagaccguguggga

SEQ ID NO: 40066 - RNA, 19 nt, Artificial Sequence
  Description of Artificial Sequence: Synthetic oligonucleotide
ugcucaagcaccugaagca

SEQ ID NO: 40067 - RNA, 19 nt, Artificial Sequence
  Description of Artificial Sequence: Synthetic oligonucleotide
agaggccgagccauaugau

SEQ ID NO: 40068 - RNA, 19 nt, Artificial Sequence
  Description of Artificial Sequence: Synthetic oligonucleotide
agcugaacaagaccgugug

SEQ ID NO: 40069 - RNA, 19 nt, Artificial Sequence
  Description of Artificial Sequence: Synthetic oligonucleotide
aggaugagccagaggccga

SEQ ID NO: 40070 - RNA, 19 nt, Artificial Sequence
  Description of Artificial Sequence: Synthetic oligonucleotide
augagccagaggccgagcc

SEQ ID NO: 40071 - RNA, 19 nt, Artificial Sequence
  Description of Artificial Sequence: Synthetic oligonucleotide
cagaggccgagccauauga

SEQ ID NO: 40072 - RNA, 19 nt, Artificial Sequence
  Description of Artificial Sequence: Synthetic oligonucleotide
ccagaggccgagccauaug

SEQ ID NO: 40073 - RNA, 19 nt, Artificial Sequence
  Description of Artificial Sequence: Synthetic oligonucleotide
ccggcuucuaccggcagga

SEQ ID NO: 40074 - RNA, 19 nt, Artificial Sequence
  Description of Artificial Sequence: Synthetic oligonucleotide
cugaacaagaccguguggg

SEQ ID NO: 40075 - RNA, 19 nt, Artificial Sequence
  Description of Artificial Sequence: Synthetic oligonucleotide
gaacaagaccgugugggag

SEQ ID NO: 40076 - RNA, 19 nt, Artificial Sequence
  Description of Artificial Sequence: Synthetic oligonucleotide
gaccggcuauguggccacg

SEQ ID NO: 40077 - RNA, 19 nt, Artificial Sequence
  Description of Artificial Sequence: Synthetic oligonucleotide
gagcugaacaagaccgugu

SEQ ID NO: 40078 - RNA, 19 nt, Artificial Sequence
  Description of Artificial Sequence: Synthetic oligonucleotide
gaggaugagccagaggccg

SEQ ID NO: 40079 - RNA, 19 nt, Artificial Sequence
  Description of Artificial Sequence: Synthetic oligonucleotide
gaugaccggcuauguggcc

SEQ ID NO: 40080 - RNA, 19 nt, Artificial Sequence
  Description of Artificial Sequence: Synthetic oligonucleotide
gaugagccagaggccgagc

SEQ ID NO: 40081 - RNA, 19 nt, Artificial Sequence
  Description of Artificial Sequence: Synthetic oligonucleotide
gcugaacaagaccgugugg

SEQ ID NO: 40082 - RNA, 19 nt, Artificial Sequence
  Description of Artificial Sequence: Synthetic oligonucleotide
ggagcugaacaagaccgug

SEQ ID NO: 40083 - RNA, 19 nt, Artificial Sequence
  Description of Artificial Sequence: Synthetic oligonucleotide
ggccgagccauaugaugag

SEQ ID NO: 40084 - RNA, 19 nt, Artificial Sequence
  Description of Artificial Sequence: Synthetic oligonucleotide
ggcggugaagaagcugucg

SEQ ID NO: 40085 - RNA, 19 nt, Artificial Sequence
  Description of Artificial Sequence: Synthetic oligonucleotide
ugugggaggugccgcagcg

SEQ ID NO: 40086 - RNA, 19 nt, Artificial Sequence
  Description of Artificial Sequence: Synthetic oligonucleotide
aagaagcuguaucggcccu

SEQ ID NO: 40087 - RNA, 19 nt, Artificial Sequence
  Description of Artificial Sequence: Synthetic oligonucleotide
aagcuguaucggcccuucc

SEQ ID NO: 40088 - RNA, 19 nt, Artificial Sequence
  Description of Artificial Sequence: Synthetic oligonucleotide
accgccaggaggugaccaa

SEQ ID NO: 40089 - RNA, 19 nt, Artificial Sequence
  Description of Artificial Sequence: Synthetic oligonucleotide
accgggaccugcagcccgu

SEQ ID NO: 40090 - RNA, 19 nt, Artificial Sequence
  Description of Artificial Sequence: Synthetic oligonucleotide
acgcugccggcaucaucca

SEQ ID NO: 40091 - RNA, 19 nt, Artificial Sequence
  Description of Artificial Sequence: Synthetic oligonucleotide
agaagcuguaucggcccuu

SEQ ID NO: 40092 - RNA, 19 nt, Artificial Sequence
  Description of Artificial Sequence: Synthetic oligonucleotide
agcuguaucggcccuucca

SEQ ID NO: 40093 - RNA, 19 nt, Artificial Sequence
  Description of Artificial Sequence: Synthetic oligonucleotide
aggcgcuggcccaucccua

SEQ ID NO: 40094 - RNA, 19 nt, Artificial Sequence
  Description of Artificial Sequence: Synthetic oligonucleotide
auccacgcugccggcauca

SEQ ID NO: 40095 - RNA, 19 nt, Artificial Sequence
  Description of Artificial Sequence: Synthetic oligonucleotide
cacgcugccggcaucaucc

SEQ ID NO: 40096 - RNA, 19 nt, Artificial Sequence
  Description of Artificial Sequence: Synthetic oligonucleotide
caggaggugaccaagacgg

SEQ ID NO: 40097 - RNA, 19 nt, Artificial Sequence
  Description of Artificial Sequence: Synthetic oligonucleotide
caucauggcggagaugauc

SEQ ID NO: 40098 - RNA, 19 nt, Artificial Sequence
  Description of Artificial Sequence: Synthetic oligonucleotide
ccacgcugccggcaucauc

SEQ ID NO: 40099 - RNA, 19 nt, Artificial Sequence
  Description of Artificial Sequence: Synthetic oligonucleotide
ccgccaggaggugaccaag

SEQ ID NO: 40100 - RNA, 19 nt, Artificial Sequence
  Description of Artificial Sequence: Synthetic oligonucleotide
ccuaccgcgagcugcgccu

SEQ ID NO: 40101 - RNA, 19 nt, Artificial Sequence
  Description of Artificial Sequence: Synthetic oligonucleotide
cgccaggaggugaccaaga

SEQ ID NO: 40102 - RNA, 19 nt, Artificial Sequence
  Description of Artificial Sequence: Synthetic oligonucleotide
cgccugcucaagcacaugc

SEQ ID NO: 40103 - RNA, 19 nt, Artificial Sequence
  Description of Artificial Sequence: Synthetic oligonucleotide
cgcugccggcaucauccac

SEQ ID NO: 40104 - RNA, 19 nt, Artificial Sequence
  Description of Artificial Sequence: Synthetic oligonucleotide
cgcuggcccaucccuacuu

SEQ ID NO: 40105 - RNA, 19 nt, Artificial Sequence
  Description of Artificial Sequence: Synthetic oligonucleotide
cgggcgccuacggcgcggu

SEQ ID NO: 40106 - RNA, 19 nt, Artificial Sequence
  Description of Artificial Sequence: Synthetic oligonucleotide
cuaccgcgagcugcgccug

SEQ ID NO: 40107 - RNA, 19 nt, Artificial Sequence
  Description of Artificial Sequence: Synthetic oligonucleotide
cucagcuucaagccucccc

SEQ ID NO: 40108 - RNA, 19 nt, Artificial Sequence
  Description of Artificial Sequence: Synthetic oligonucleotide
cucgggcgccuacggcgcg

SEQ ID NO: 40109 - RNA, 19 nt, Artificial Sequence
  Description of Artificial Sequence: Synthetic oligonucleotide
cugccggcaucauccacag

SEQ ID NO: 40110 - RNA, 19 nt, Artificial Sequence
  Description of Artificial Sequence: Synthetic oligonucleotide
cugcuggacguauucacuc

SEQ ID NO: 40111 - RNA, 19 nt, Artificial Sequence
  Description of Artificial Sequence: Synthetic oligonucleotide
cuggacguauucacuccug

SEQ ID NO: 40112 - RNA, 19 nt, Artificial Sequence
  Description of Artificial Sequence: Synthetic oligonucleotide
cuggcccaucccuacuucg

SEQ ID NO: 40113 - RNA, 19 nt, Artificial Sequence
  Description of Artificial Sequence: Synthetic oligonucleotide
cuguaucggcccuuccagu

SEQ ID NO: 40114 - RNA, 19 nt, Artificial Sequence
  Description of Artificial Sequence: Synthetic oligonucleotide
cuuuuaccgccaggaggug

SEQ ID NO: 40115 - RNA, 19 nt, Artificial Sequence
  Description of Artificial Sequence: Synthetic oligonucleotide
gaagcuguaucggcccuuc

SEQ ID NO: 40116 - RNA, 19 nt, Artificial Sequence
  Description of Artificial Sequence: Synthetic oligonucleotide
gaggcgcuggcccaucccu

SEQ ID NO: 40117 - RNA, 19 nt, Artificial Sequence
  Description of Artificial Sequence: Synthetic oligonucleotide
gaucgggcugcuggacgua

SEQ ID NO: 40118 - RNA, 19 nt, Artificial Sequence
  Description of Artificial Sequence: Synthetic oligonucleotide
gcagagcgaugaggccaag

SEQ ID NO: 40119 - RNA, 19 nt, Artificial Sequence
  Description of Artificial Sequence: Synthetic oligonucleotide
gccacgagaacgugaucgg

SEQ ID NO: 40120 - RNA, 19 nt, Artificial Sequence
  Description of Artificial Sequence: Synthetic oligonucleotide
gccaggaggugaccaagac

SEQ ID NO: 40121 - RNA, 19 nt, Artificial Sequence
  Description of Artificial Sequence: Synthetic oligonucleotide
gcccgugggcucgggcgcc

SEQ ID NO: 40122 - RNA, 19 nt, Artificial Sequence
  Description of Artificial Sequence: Synthetic oligonucleotide
gcgcuggcccaucccuacu

SEQ ID NO: 40123 - RNA, 19 nt, Artificial Sequence
  Description of Artificial Sequence: Synthetic oligonucleotide
gcucagcuucaagccuccc

SEQ ID NO: 40124 - RNA, 19 nt, Artificial Sequence
  Description of Artificial Sequence: Synthetic oligonucleotide
gcugcuggacguauucacu

SEQ ID NO: 40125 - RNA, 19 nt, Artificial Sequence
  Description of Artificial Sequence: Synthetic oligonucleotide
gcuggcccaucccuacuuc

SEQ ID NO: 40126 - RNA, 19 nt, Artificial Sequence
  Description of Artificial Sequence: Synthetic oligonucleotide
gcuguaucggcccuuccag

SEQ ID NO: 40127 - RNA, 19 nt, Artificial Sequence
  Description of Artificial Sequence: Synthetic oligonucleotide
gcuuuuaccgccaggaggu

SEQ ID NO: 40128 - RNA, 19 nt, Artificial Sequence
  Description of Artificial Sequence: Synthetic oligonucleotide
ggcgcuggcccaucccuac

SEQ ID NO: 40129 - RNA, 19 nt, Artificial Sequence
  Description of Artificial Sequence: Synthetic oligonucleotide
ggcugagguauauccacgc

SEQ ID NO: 40130 - RNA, 19 nt, Artificial Sequence
  Description of Artificial Sequence: Synthetic oligonucleotide
ggcuuuuaccgccaggagg

SEQ ID NO: 40131 - RNA, 19 nt, Artificial Sequence
  Description of Artificial Sequence: Synthetic oligonucleotide
gggcugagguauauccacg

SEQ ID NO: 40132 - RNA, 19 nt, Artificial Sequence
  Description of Artificial Sequence: Synthetic oligonucleotide
ggggcugagguauauccac

SEQ ID NO: 40133 - RNA, 19 nt, Artificial Sequence
  Description of Artificial Sequence: Synthetic oligonucleotide
ggugcucagcuucaagccu

SEQ ID NO: 40134 - RNA, 19 nt, Artificial Sequence
  Description of Artificial Sequence: Synthetic oligonucleotide
uaccgccaggaggugacca

SEQ ID NO: 40135 - RNA, 19 nt, Artificial Sequence
  Description of Artificial Sequence: Synthetic oligonucleotide
uaccgggaccugcagcccg

SEQ ID NO: 40136 - RNA, 19 nt, Artificial Sequence
  Description of Artificial Sequence: Synthetic oligonucleotide
uccacgcugccggcaucau

SEQ ID NO: 40137 - RNA, 19 nt, Artificial Sequence
  Description of Artificial Sequence: Synthetic oligonucleotide
ucgggcgccuacggcgcgg

SEQ ID NO: 40138 - RNA, 19 nt, Artificial Sequence
  Description of Artificial Sequence: Synthetic oligonucleotide
ugcuggacguauucacucc

SEQ ID NO: 40139 - RNA, 19 nt, Artificial Sequence
  Description of Artificial Sequence: Synthetic oligonucleotide
uggcuuuuaccgccaggag

SEQ ID NO: 40140 - RNA, 19 nt, Artificial Sequence
  Description of Artificial Sequence: Synthetic oligonucleotide
uguaucggcccuuccaguc

SEQ ID NO: 40141 - RNA, 19 nt, Artificial Sequence
  Description of Artificial Sequence: Synthetic oligonucleotide
uuuuaccgccaggagguga

SEQ ID NO: 40142 - RNA, 19 nt, Artificial Sequence
  Description of Artificial Sequence: Synthetic oligonucleotide
aagacgcuguucaagggca

SEQ ID NO: 40143 - RNA, 19 nt, Artificial Sequence
  Description of Artificial Sequence: Synthetic oligonucleotide
acacgcagacgguggacau

SEQ ID NO: 40144 - RNA, 19 nt, Artificial Sequence
  Description of Artificial Sequence: Synthetic oligonucleotide
acaggcaagacgcuguuca

SEQ ID NO: 40145 - RNA, 19 nt, Artificial Sequence
  Description of Artificial Sequence: Synthetic oligonucleotide
accaagacggccugggagg

SEQ ID NO: 40146 - RNA, 19 nt, Artificial Sequence
  Description of Artificial Sequence: Synthetic oligonucleotide
accgcacacuggaugaaug

SEQ ID NO: 40147 - RNA, 19 nt, Artificial Sequence
  Description of Artificial Sequence: Synthetic oligonucleotide
accuggaccagcugaagga

SEQ ID NO: 40148 - RNA, 19 nt, Artificial Sequence
  Description of Artificial Sequence: Synthetic oligonucleotide
acgcagacgguggacaucu

SEQ ID NO: 40149 - RNA, 19 nt, Artificial Sequence
  Description of Artificial Sequence: Synthetic oligonucleotide
acuggaugaauggaagcgu

SEQ ID NO: 40150 - RNA, 19 nt, Artificial Sequence
  Description of Artificial Sequence: Synthetic oligonucleotide
agacggccugggaggugcg

SEQ ID NO: 40151 - RNA, 19 nt, Artificial Sequence
  Description of Artificial Sequence: Synthetic oligonucleotide
agaucaugaaggugacggg

SEQ ID NO: 40152 - RNA, 19 nt, Artificial Sequence
  Description of Artificial Sequence: Synthetic oligonucleotide
aggcaagacgcuguucaag

SEQ ID NO: 40153 - RNA, 19 nt, Artificial Sequence
  Description of Artificial Sequence: Synthetic oligonucleotide
aguuugugcagcggcugca

SEQ ID NO: 40154 - RNA, 19 nt, Artificial Sequence
  Description of Artificial Sequence: Synthetic oligonucleotide
aucauggcggagaugauca

SEQ ID NO: 40155 - RNA, 19 nt, Artificial Sequence
  Description of Artificial Sequence: Synthetic oligonucleotide
auggcggagaugaucacag

SEQ ID NO: 40156 - RNA, 19 nt, Artificial Sequence
  Description of Artificial Sequence: Synthetic oligonucleotide
cacgcagacgguggacauc

SEQ ID NO: 40157 - RNA, 19 nt, Artificial Sequence
  Description of Artificial Sequence: Synthetic oligonucleotide
caggcaagacgcuguucaa

SEQ ID NO: 40158 - RNA, 19 nt, Artificial Sequence
  Description of Artificial Sequence: Synthetic oligonucleotide
cauggcggagaugaucaca

SEQ ID NO: 40159 - RNA, 19 nt, Artificial Sequence
  Description of Artificial Sequence: Synthetic oligonucleotide
ccaagacggccugggaggu

SEQ ID NO: 40160 - RNA, 19 nt, Artificial Sequence
  Description of Artificial Sequence: Synthetic oligonucleotide
ccgcacacuggaugaaugg

SEQ ID NO: 40161 - RNA, 19 nt, Artificial Sequence
  Description of Artificial Sequence: Synthetic oligonucleotide
ccgggcucccgaggucauc

SEQ ID NO: 40162 - RNA, 19 nt, Artificial Sequence
  Description of Artificial Sequence: Synthetic oligonucleotide
ccggugguaccgggcuccc

SEQ ID NO: 40163 - RNA, 19 nt, Artificial Sequence
  Description of Artificial Sequence: Synthetic oligonucleotide
ccuacuucgagucccugca

SEQ ID NO: 40164 - RNA, 19 nt, Artificial Sequence
  Description of Artificial Sequence: Synthetic oligonucleotide
ccuggaccagcugaaggag

SEQ ID NO: 40165 - RNA, 19 nt, Artificial Sequence
  Description of Artificial Sequence: Synthetic oligonucleotide
cgcagacgguggacaucug

SEQ ID NO: 40166 - RNA, 19 nt, Artificial Sequence
  Description of Artificial Sequence: Synthetic oligonucleotide
cgccuaccgcgagcugcgc

SEQ ID NO: 40167 - RNA, 19 nt, Artificial Sequence
  Description of Artificial Sequence: Synthetic oligonucleotide
cgcuaagguggccaucaag

SEQ ID NO: 40168 - RNA, 19 nt, Artificial Sequence
  Description of Artificial Sequence: Synthetic oligonucleotide
cggacuuuuaccuggugau

SEQ ID NO: 40169 - RNA, 19 nt, Artificial Sequence
  Description of Artificial Sequence: Synthetic oligonucleotide
cggugugcucggccgugga

SEQ ID NO: 40170 - RNA, 19 nt, Artificial Sequence
  Description of Artificial Sequence: Synthetic oligonucleotide
cguguaccgggaccugcag

SEQ ID NO: 40171 - RNA, 19 nt, Artificial Sequence
  Description of Artificial Sequence: Synthetic oligonucleotide
cuacacgcagacgguggac

SEQ ID NO: 40172 - RNA, 19 nt, Artificial Sequence
  Description of Artificial Sequence: Synthetic oligonucleotide
cugaguuugugcagcggcu

SEQ ID NO: 40173 - RNA, 19 nt, Artificial Sequence
  Description of Artificial Sequence: Synthetic oligonucleotide
cugcucaagcacaugcgcc

SEQ ID NO: 40174 - RNA, 19 nt, Artificial Sequence
  Description of Artificial Sequence: Synthetic oligonucleotide
cuggaccagcugaaggaga

SEQ ID NO: 40175 - RNA, 19 nt, Artificial Sequence
  Description of Artificial Sequence: Synthetic oligonucleotide
gaccaagacggccugggag

SEQ ID NO: 40176 - RNA, 19 nt, Artificial Sequence
  Description of Artificial Sequence: Synthetic oligonucleotide
gacccggugguaccgggcu

SEQ ID NO: 40177 - RNA, 19 nt, Artificial Sequence
  Description of Artificial Sequence: Synthetic oligonucleotide
gacggccugggaggugcgc

SEQ ID NO: 40178 - RNA, 19 nt, Artificial Sequence
  Description of Artificial Sequence: Synthetic oligonucleotide
gaguuugugcagcggcugc

SEQ ID NO: 40179 - RNA, 19 nt, Artificial Sequence
  Description of Artificial Sequence: Synthetic oligonucleotide
gaucaugaaggugacgggg

SEQ ID NO: 40180 - RNA, 19 nt, Artificial Sequence
  Description of Artificial Sequence: Synthetic oligonucleotide
gcaagacgcuguucaaggg

SEQ ID NO: 40181 - RNA, 19 nt, Artificial Sequence
  Description of Artificial Sequence: Synthetic oligonucleotide
gccuaccgcgagcugcgcc

SEQ ID NO: 40182 - RNA, 19 nt, Artificial Sequence
  Description of Artificial Sequence: Synthetic oligonucleotide
gcgcggugugcucggccgu

SEQ ID NO: 40183 - RNA, 19 nt, Artificial Sequence
  Description of Artificial Sequence: Synthetic oligonucleotide
gcgcuaagguggccaucaa

SEQ ID NO: 40184 - RNA, 19 nt, Artificial Sequence
  Description of Artificial Sequence: Synthetic oligonucleotide
ggacauccccucuccuggg

SEQ ID NO: 40185 - RNA, 19 nt, Artificial Sequence
  Description of Artificial Sequence: Synthetic oligonucleotide
ggaccagcugaaggagauc

SEQ ID NO: 40186 - RNA, 19 nt, Artificial Sequence
  Description of Artificial Sequence: Synthetic oligonucleotide
ggauccaguuccucgugua

SEQ ID NO: 40187 - RNA, 19 nt, Artificial Sequence
  Description of Artificial Sequence: Synthetic oligonucleotide
ggaugcgcuacacgcagac

SEQ ID NO: 40188 - RNA, 19 nt, Artificial Sequence
  Description of Artificial Sequence: Synthetic oligonucleotide
ggcaagacgcuguucaagg

SEQ ID NO: 40189 - RNA, 19 nt, Artificial Sequence
  Description of Artificial Sequence: Synthetic oligonucleotide
ggcgcggugugcucggccg

SEQ ID NO: 40190 - RNA, 19 nt, Artificial Sequence
  Description of Artificial Sequence: Synthetic oligonucleotide
ggcgcuaagguggccauca

SEQ ID NO: 40191 - RNA, 19 nt, Artificial Sequence
  Description of Artificial Sequence: Synthetic oligonucleotide
ggugugcucggccguggac

SEQ ID NO: 40192 - RNA, 19 nt, Artificial Sequence
  Description of Artificial Sequence: Synthetic oligonucleotide
gugaccaagacggccuggg

SEQ ID NO: 40193 - RNA, 19 nt, Artificial Sequence
  Description of Artificial Sequence: Synthetic oligonucleotide
gugagaugacuggguacgu

SEQ ID NO: 40194 - RNA, 19 nt, Artificial Sequence
  Description of Artificial Sequence: Synthetic oligonucleotide
guguaccgggaccugcagc

SEQ ID NO: 40195 - RNA, 19 nt, Artificial Sequence
  Description of Artificial Sequence: Synthetic oligonucleotide
gugugcucggccguggacg

SEQ ID NO: 40196 - RNA, 19 nt, Artificial Sequence
  Description of Artificial Sequence: Synthetic oligonucleotide
uacacgcagacgguggaca

SEQ ID NO: 40197 - RNA, 19 nt, Artificial Sequence
  Description of Artificial Sequence: Synthetic oligonucleotide
ucauggcggagaugaucac

SEQ ID NO: 40198 - RNA, 19 nt, Artificial Sequence
  Description of Artificial Sequence: Synthetic oligonucleotide
ugaccaagacggccuggga

SEQ ID NO: 40199 - RNA, 19 nt, Artificial Sequence
  Description of Artificial Sequence: Synthetic oligonucleotide
ugaguuugugcagcggcug

SEQ ID NO: 40200 - RNA, 19 nt, Artificial Sequence
  Description of Artificial Sequence: Synthetic oligonucleotide
ugcucaagcacaugcgcca

SEQ ID NO: 40201 - RNA, 19 nt, Artificial Sequence
  Description of Artificial Sequence: Synthetic oligonucleotide
uggaccagcugaaggagau

SEQ ID NO: 40202 - RNA, 19 nt, Artificial Sequence
  Description of Artificial Sequence: Synthetic oligonucleotide
uggaugcgcuacacgcaga

SEQ ID NO: 40203 - RNA, 19 nt, Artificial Sequence
  Description of Artificial Sequence: Synthetic oligonucleotide
uggcggagaugaucacagg

SEQ ID NO: 40204 - RNA, 19 nt, Artificial Sequence
  Description of Artificial Sequence: Synthetic oligonucleotide
uggugaugccguucauggg

SEQ ID NO: 40205 - RNA, 19 nt, Artificial Sequence
  Description of Artificial Sequence: Synthetic oligonucleotide
uguaccgggaccugcagcc

SEQ ID NO: 40206 - RNA, 19 nt, Artificial Sequence
  Description of Artificial Sequence: Synthetic oligonucleotide
ucaagggcagcgaccaccu

SEQ ID NO: 40207 - RNA, 19 nt, Artificial Sequence
  Description of Artificial Sequence: Synthetic oligonucleotide
gcaggacgucaacaagacc

SEQ ID NO: 40208 - RNA, 19 nt, Artificial Sequence
  Description of Artificial Sequence: Synthetic oligonucleotide
caggacgucaacaagaccg

SEQ ID NO: 40209 - RNA, 19 nt, Artificial Sequence
  Description of Artificial Sequence: Synthetic oligonucleotide
gcggggccuauggcuccgu

SEQ ID NO: 40210 - RNA, 19 nt, Artificial Sequence
  Description of Artificial Sequence: Synthetic oligonucleotide
gccuaccgggagcugcugc

SEQ ID NO: 40211 - RNA, 19 nt, Artificial Sequence
  Description of Artificial Sequence: Synthetic oligonucleotide
cugcugcugcugaagcaca

SEQ ID NO: 40212 - RNA, 19 nt, Artificial Sequence
  Description of Artificial Sequence: Synthetic oligonucleotide
ugcugcugcugaagcacau

SEQ ID NO: 40213 - RNA, 19 nt, Artificial Sequence
  Description of Artificial Sequence: Synthetic oligonucleotide
gcugcugcugaagcacaug

SEQ ID NO: 40214 - RNA, 19 nt, Artificial Sequence
  Description of Artificial Sequence: Synthetic oligonucleotide
gcugcugaagcacaugcag

SEQ ID NO: 40215 - RNA, 19 nt, Artificial Sequence
  Description of Artificial Sequence: Synthetic oligonucleotide
caugcagcaugagaacguc

SEQ ID NO: 40216 - RNA, 19 nt, Artificial Sequence
  Description of Artificial Sequence: Synthetic oligonucleotide
augcagcaugagaacguca

SEQ ID NO: 40217 - RNA, 19 nt, Artificial Sequence
  Description of Artificial Sequence: Synthetic oligonucleotide
gcagcaugagaacgucauu

SEQ ID NO: 40218 - RNA, 19 nt, Artificial Sequence
  Description of Artificial Sequence: Synthetic oligonucleotide
cagcaugagaacgucauug

SEQ ID NO: 40219 - RNA, 19 nt, Artificial Sequence
  Description of Artificial Sequence: Synthetic oligonucleotide
aggccuuaaguacauccac

SEQ ID NO: 40220 - RNA, 19 nt, Artificial Sequence
  Description of Artificial Sequence: Synthetic oligonucleotide
ccuuaaguacauccacucu

SEQ ID NO: 40221 - RNA, 19 nt, Artificial Sequence
  Description of Artificial Sequence: Synthetic oligonucleotide
uaaguacauccacucugcu

SEQ ID NO: 40222 - RNA, 19 nt, Artificial Sequence
  Description of Artificial Sequence: Synthetic oligonucleotide
uacauccacucugcugggg

SEQ ID NO: 40223 - RNA, 19 nt, Artificial Sequence
  Description of Artificial Sequence: Synthetic oligonucleotide
acauccacucugcuggggu

SEQ ID NO: 40224 - RNA, 19 nt, Artificial Sequence
  Description of Artificial Sequence: Synthetic oligonucleotide
cauccacucugcugggguc

SEQ ID NO: 40225 - RNA, 19 nt, Artificial Sequence
  Description of Artificial Sequence: Synthetic oligonucleotide
ucgugcacagggaccugaa

SEQ ID NO: 40226 - RNA, 19 nt, Artificial Sequence
  Description of Artificial Sequence: Synthetic oligonucleotide
uuuugggcuggcgcgacau

SEQ ID NO: 40227 - RNA, 19 nt, Artificial Sequence
  Description of Artificial Sequence: Synthetic oligonucleotide
uuugggcuggcgcgacaug

SEQ ID NO: 40228 - RNA, 19 nt, Artificial Sequence
  Description of Artificial Sequence: Synthetic oligonucleotide
uugggcuggcgcgacaugc

SEQ ID NO: 40229 - RNA, 19 nt, Artificial Sequence
  Description of Artificial Sequence: Synthetic oligonucleotide
gacgccgagaugacuggcu

SEQ ID NO: 40230 - RNA, 19 nt, Artificial Sequence
  Description of Artificial Sequence: Synthetic oligonucleotide
acgccgagaugacuggcua

SEQ ID NO: 40231 - RNA, 19 nt, Artificial Sequence
  Description of Artificial Sequence: Synthetic oligonucleotide
ugauccucagcuggaugca

SEQ ID NO: 40232 - RNA, 19 nt, Artificial Sequence
  Description of Artificial Sequence: Synthetic oligonucleotide
auccagucccugccacaga

SEQ ID NO: 40233 - RNA, 19 nt, Artificial Sequence
  Description of Artificial Sequence: Synthetic oligonucleotide
gucaacaagaccgccuggg

SEQ ID NO: 40234 - RNA, 19 nt, Artificial Sequence
  Description of Artificial Sequence: Synthetic oligonucleotide
gaccgccugggagcugccc

SEQ ID NO: 40235 - RNA, 19 nt, Artificial Sequence
  Description of Artificial Sequence: Synthetic oligonucleotide
ggggagaagguggccauca

SEQ ID NO: 40236 - RNA, 19 nt, Artificial Sequence
  Description of Artificial Sequence: Synthetic oligonucleotide
gggagaagguggccaucaa

SEQ ID NO: 40237 - RNA, 19 nt, Artificial Sequence
  Description of Artificial Sequence: Synthetic oligonucleotide
ggagaagguggccaucaag

SEQ ID NO: 40238 - RNA, 19 nt, Artificial Sequence
  Description of Artificial Sequence: Synthetic oligonucleotide
cccuuucaguccgagaucu

SEQ ID NO: 40239 - RNA, 19 nt, Artificial Sequence
  Description of Artificial Sequence: Synthetic oligonucleotide
ccuuucaguccgagaucuu

SEQ ID NO: 40240 - RNA, 19 nt, Artificial Sequence
  Description of Artificial Sequence: Synthetic oligonucleotide
cuuucaguccgagaucuuc

SEQ ID NO: 40241 - RNA, 19 nt, Artificial Sequence
  Description of Artificial Sequence: Synthetic oligonucleotide
uuucaguccgagaucuucg

SEQ ID NO: 40242 - RNA, 19 nt, Artificial Sequence
  Description of Artificial Sequence: Synthetic oligonucleotide
uucaguccgagaucuucgc

SEQ ID NO: 40243 - RNA, 19 nt, Artificial Sequence
  Description of Artificial Sequence: Synthetic oligonucleotide
ucaguccgagaucuucgcc

SEQ ID NO: 40244 - RNA, 19 nt, Artificial Sequence
  Description of Artificial Sequence: Synthetic oligonucleotide
cgccuaccgggagcugcug

SEQ ID NO: 40245 - RNA, 19 nt, Artificial Sequence
  Description of Artificial Sequence: Synthetic oligonucleotide
cugcugcugaagcacaugc

SEQ ID NO: 40246 - RNA, 19 nt, Artificial Sequence
  Description of Artificial Sequence: Synthetic oligonucleotide
gaugcccuucaugcagacg

SEQ ID NO: 40247 - RNA, 19 nt, Artificial Sequence
  Description of Artificial Sequence: Synthetic oligonucleotide
augcccuucaugcagacgg

SEQ ID NO: 40248 - RNA, 19 nt, Artificial Sequence
  Description of Artificial Sequence: Synthetic oligonucleotide
gauccaguaccugguguau

SEQ ID NO: 40249 - RNA, 19 nt, Artificial Sequence
  Description of Artificial Sequence: Synthetic oligonucleotide
auccaguaccugguguauc

SEQ ID NO: 40250 - RNA, 19 nt, Artificial Sequence
  Description of Artificial Sequence: Synthetic oligonucleotide
uccaguaccugguguauca

SEQ ID NO: 40251 - RNA, 19 nt, Artificial Sequence
  Description of Artificial Sequence: Synthetic oligonucleotide
ccaguaccugguguaucag

SEQ ID NO: 40252 - RNA, 19 nt, Artificial Sequence
  Description of Artificial Sequence: Synthetic oligonucleotide
caguaccugguguaucaga

SEQ ID NO: 40253 - RNA, 19 nt, Artificial Sequence
  Description of Artificial Sequence: Synthetic oligonucleotide
aguaccugguguaucagau

SEQ ID NO: 40254 - RNA, 19 nt, Artificial Sequence
  Description of Artificial Sequence: Synthetic oligonucleotide
guaccugguguaucagaug

SEQ ID NO: 40255 - RNA, 19 nt, Artificial Sequence
  Description of Artificial Sequence: Synthetic oligonucleotide
uaccugguguaucagaugc

SEQ ID NO: 40256 - RNA, 19 nt, Artificial Sequence
  Description of Artificial Sequence: Synthetic oligonucleotide
accugguguaucagaugcu

SEQ ID NO: 40257 - RNA, 19 nt, Artificial Sequence
  Description of Artificial Sequence: Synthetic oligonucleotide
ccugguguaucagaugcuc

SEQ ID NO: 40258 - RNA, 19 nt, Artificial Sequence
  Description of Artificial Sequence: Synthetic oligonucleotide
cugguguaucagaugcuca

SEQ ID NO: 40259 - RNA, 19 nt, Artificial Sequence
  Description of Artificial Sequence: Synthetic oligonucleotide
ugguguaucagaugcucaa

SEQ ID NO: 40260 - RNA, 19 nt, Artificial Sequence
  Description of Artificial Sequence: Synthetic oligonucleotide
gcacagggaccugaagcca

SEQ ID NO: 40261 - RNA, 19 nt, Artificial Sequence
  Description of Artificial Sequence: Synthetic oligonucleotide
agauuaccuggaccagcug

SEQ ID NO: 40262 - RNA, 19 nt, Artificial Sequence
  Description of Artificial Sequence: Synthetic oligonucleotide
auuaccuggaccagcugac

SEQ ID NO: 40263 - RNA, 19 nt, Artificial Sequence
  Description of Artificial Sequence: Synthetic oligonucleotide
accuggaccagcugaccca

SEQ ID NO: 40264 - RNA, 19 nt, Artificial Sequence
  Description of Artificial Sequence: Synthetic oligonucleotide
ccuggaccagcugacccag

SEQ ID NO: 40265 - RNA, 19 nt, Artificial Sequence
  Description of Artificial Sequence: Synthetic oligonucleotide
cuggaccagcugacccaga

SEQ ID NO: 40266 - RNA, 19 nt, Artificial Sequence
  Description of Artificial Sequence: Synthetic oligonucleotide
uggaccagcugacccagau

SEQ ID NO: 40267 - RNA, 19 nt, Artificial Sequence
  Description of Artificial Sequence: Synthetic oligonucleotide
ggaccagcugacccagauc

SEQ ID NO: 40268 - RNA, 19 nt, Artificial Sequence
  Description of Artificial Sequence: Synthetic oligonucleotide
aacucacaguggaugaaug

SEQ ID NO: 40269 - RNA, 19 nt, Artificial Sequence
  Description of Artificial Sequence: Synthetic oligonucleotide
acucacaguggaugaaugg

SEQ ID NO: 40270 - RNA, 19 nt, Artificial Sequence
  Description of Artificial Sequence: Synthetic oligonucleotide
ucugggaggugcccgagcg

SEQ ID NO: 40271 - RNA, 19 nt, Artificial Sequence
  Description of Artificial Sequence: Synthetic oligonucleotide
cucuggcgccuauggcucu

SEQ ID NO: 40272 - RNA, 19 nt, Artificial Sequence
  Description of Artificial Sequence: Synthetic oligonucleotide
ucuggcgccuauggcucug

SEQ ID NO: 40273 - RNA, 19 nt, Artificial Sequence
  Description of Artificial Sequence: Synthetic oligonucleotide
cuggcgccuauggcucugu

SEQ ID NO: 40274 - RNA, 19 nt, Artificial Sequence
  Description of Artificial Sequence: Synthetic oligonucleotide
cgccuauggcucugugugu

SEQ ID NO: 40275 - RNA, 19 nt, Artificial Sequence
  Description of Artificial Sequence: Synthetic oligonucleotide
augggggcagaucugaaca

SEQ ID NO: 40276 - RNA, 19 nt, Artificial Sequence
  Description of Artificial Sequence: Synthetic oligonucleotide
ugggggcagaucugaacaa

SEQ ID NO: 40277 - RNA, 19 nt, Artificial Sequence
  Description of Artificial Sequence: Synthetic oligonucleotide
gggggcagaucugaacaac

SEQ ID NO: 40278 - RNA, 19 nt, Artificial Sequence
  Description of Artificial Sequence: Synthetic oligonucleotide
ggggcagaucugaacaaca

SEQ ID NO: 40279 - RNA, 19 nt, Artificial Sequence
  Description of Artificial Sequence: Synthetic oligonucleotide
gggcagaucugaacaacau

SEQ ID NO: 40280 - RNA, 19 nt, Artificial Sequence
  Description of Artificial Sequence: Synthetic oligonucleotide
gcagaucugaacaacauug

SEQ ID NO: 40281 - RNA, 19 nt, Artificial Sequence
  Description of Artificial Sequence: Synthetic oligonucleotide
cagaucugaacaacauugu

SEQ ID NO: 40282 - RNA, 19 nt, Artificial Sequence
  Description of Artificial Sequence: Synthetic oligonucleotide
gaucugaacaacauuguga

SEQ ID NO: 40283 - RNA, 19 nt, Artificial Sequence
  Description of Artificial Sequence: Synthetic oligonucleotide
aucugaacaacauugugaa

SEQ ID NO: 40284 - RNA, 19 nt, Artificial Sequence
  Description of Artificial Sequence: Synthetic oligonucleotide
caaccagacaguugauauu

SEQ ID NO: 40285 - RNA, 19 nt, Artificial Sequence
  Description of Artificial Sequence: Synthetic oligonucleotide
aaccagacaguugauauuu

SEQ ID NO: 40286 - RNA, 19 nt, Artificial Sequence
  Description of Artificial Sequence: Synthetic oligonucleotide
accagacaguugauauuug

SEQ ID NO: 40287 - RNA, 19 nt, Artificial Sequence
  Description of Artificial Sequence: Synthetic oligonucleotide
ccagacaguugauauuugg

SEQ ID NO: 40288 - RNA, 19 nt, Artificial Sequence
  Description of Artificial Sequence: Synthetic oligonucleotide
cagacaguugauauuuggu

SEQ ID NO: 40289 - RNA, 19 nt, Artificial Sequence
  Description of Artificial Sequence: Synthetic oligonucleotide
agacaguugauauuugguc

SEQ ID NO: 40290 - RNA, 19 nt, Artificial Sequence
  Description of Artificial Sequence: Synthetic oligonucleotide
acaguugauauuuggucag

SEQ ID NO: 40291 - RNA, 19 nt, Artificial Sequence
  Description of Artificial Sequence: Synthetic oligonucleotide
caguugauauuuggucagu

SEQ ID NO: 40292 - RNA, 19 nt, Artificial Sequence
  Description of Artificial Sequence: Synthetic oligonucleotide
aguugauauuuggucagug

SEQ ID NO: 40293 - RNA, 19 nt, Artificial Sequence
  Description of Artificial Sequence: Synthetic oligonucleotide
guugauauuuggucagugg

SEQ ID NO: 40294 - RNA, 19 nt, Artificial Sequence
  Description of Artificial Sequence: Synthetic oligonucleotide
uugauauuuggucaguggg

SEQ ID NO: 40295 - RNA, 19 nt, Artificial Sequence
  Description of Artificial Sequence: Synthetic oligonucleotide
gauauuuggucagugggau

SEQ ID NO: 40296 - RNA, 19 nt, Artificial Sequence
  Description of Artificial Sequence: Synthetic oligonucleotide
auauuuggucagugggaug

SEQ ID NO: 40297 - RNA, 19 nt, Artificial Sequence
  Description of Artificial Sequence: Synthetic oligonucleotide
uauuuggucagugggaugc

SEQ ID NO: 40298 - RNA, 19 nt, Artificial Sequence
  Description of Artificial Sequence: Synthetic oligonucleotide
auuuggucagugggaugca

SEQ ID NO: 40299 - RNA, 19 nt, Artificial Sequence
  Description of Artificial Sequence: Synthetic oligonucleotide
uuuggucagugggaugcau

SEQ ID NO: 40300 - RNA, 19 nt, Artificial Sequence
  Description of Artificial Sequence: Synthetic oligonucleotide
uggucagugggaugcauaa

SEQ ID NO: 40301 - RNA, 19 nt, Artificial Sequence
  Description of Artificial Sequence: Synthetic oligonucleotide
ggucagugggaugcauaau

SEQ ID NO: 40302 - RNA, 19 nt, Artificial Sequence
  Description of Artificial Sequence: Synthetic oligonucleotide
gucagugggaugcauaaug

SEQ ID NO: 40303 - RNA, 19 nt, Artificial Sequence
  Description of Artificial Sequence: Synthetic oligonucleotide
ucagugggaugcauaaugg

SEQ ID NO: 40304 - RNA, 19 nt, Artificial Sequence
  Description of Artificial Sequence: Synthetic oligonucleotide
cagugggaugcauaauggc

SEQ ID NO: 40305 - RNA, 19 nt, Artificial Sequence
  Description of Artificial Sequence: Synthetic oligonucleotide
auugaucaguugaagcuca

SEQ ID NO: 40306 - RNA, 19 nt, Artificial Sequence
  Description of Artificial Sequence: Synthetic oligonucleotide
uugaucaguugaagcucau

SEQ ID NO: 40307 - RNA, 19 nt, Artificial Sequence
  Description of Artificial Sequence: Synthetic oligonucleotide
uuggugccaauccccuggc

SEQ ID NO: 40308 - RNA, 19 nt, Artificial Sequence
  Description of Artificial Sequence: Synthetic oligonucleotide
uggugccaauccccuggcu

SEQ ID NO: 40309 - RNA, 19 nt, Artificial Sequence
  Description of Artificial Sequence: Synthetic oligonucleotide
caguaccacgauccugaug

SEQ ID NO: 40310 - RNA, 19 nt, Artificial Sequence
  Description of Artificial Sequence: Synthetic oligonucleotide
aguaccacgauccugauga

SEQ ID NO: 40311 - RNA, 19 nt, Artificial Sequence
  Description of Artificial Sequence: Synthetic oligonucleotide
guaccacgauccugaugau

SEQ ID NO: 40312 - RNA, 19 nt, Artificial Sequence
  Description of Artificial Sequence: Synthetic oligonucleotide
uaccacgauccugaugaug

SEQ ID NO: 40313 - RNA, 19 nt, Artificial Sequence
  Description of Artificial Sequence: Synthetic oligonucleotide
accacgauccugaugauga

SEQ ID NO: 40314 - RNA, 19 nt, Artificial Sequence
  Description of Artificial Sequence: Synthetic oligonucleotide
ccaguggccgauccuuaug

SEQ ID NO: 40315 - RNA, 19 nt, Artificial Sequence
  Description of Artificial Sequence: Synthetic oligonucleotide
caguggccgauccuuauga

SEQ ID NO: 40316 - RNA, 19 nt, Artificial Sequence
  Description of Artificial Sequence: Synthetic oligonucleotide
aguggccgauccuuaugau

SEQ ID NO: 40317 - RNA, 19 nt, Artificial Sequence
  Description of Artificial Sequence: Synthetic oligonucleotide
ggccgauccuuaugaucag

SEQ ID NO: 40318 - RNA, 19 nt, Artificial Sequence
  Description of Artificial Sequence: Synthetic oligonucleotide
gugauuggucuguuggacg

SEQ ID NO: 40319 - RNA, 19 nt, Artificial Sequence
  Description of Artificial Sequence: Synthetic oligonucleotide
ugauuggucuguuggacgu

SEQ ID NO: 40320 - RNA, 19 nt, Artificial Sequence
  Description of Artificial Sequence: Synthetic oligonucleotide
acuaggugguacagggcuc

SEQ ID NO: 40321 - RNA, 19 nt, Artificial Sequence
  Description of Artificial Sequence: Synthetic oligonucleotide
cuaggugguacagggcucc

SEQ ID NO: 40322 - RNA, 19 nt, Artificial Sequence
  Description of Artificial Sequence: Synthetic oligonucleotide
aggugguacagggcuccug

SEQ ID NO: 40323 - RNA, 19 nt, Artificial Sequence
  Description of Artificial Sequence: Synthetic oligonucleotide
uccagggcagccuccaccu

SEQ ID NO: 40324 - RNA, 19 nt, Artificial Sequence
  Description of Artificial Sequence: Synthetic oligonucleotide
uggcgccuauggcucugug

SEQ ID NO: 40325 - RNA, 19 nt, Artificial Sequence
  Description of Artificial Sequence: Synthetic oligonucleotide
gccuauggcucugugugug

SEQ ID NO: 40326 - RNA, 19 nt, Artificial Sequence
  Description of Artificial Sequence: Synthetic oligonucleotide
ccuauggcucugugugugc

SEQ ID NO: 40327 - RNA, 19 nt, Artificial Sequence
  Description of Artificial Sequence: Synthetic oligonucleotide
ggcugucgacuugcuggag

SEQ ID NO: 40328 - RNA, 19 nt, Artificial Sequence
  Description of Artificial Sequence: Synthetic oligonucleotide
gcugucgacuugcuggaga

SEQ ID NO: 40329 - RNA, 19 nt, Artificial Sequence
  Description of Artificial Sequence: Synthetic oligonucleotide
cugucgacuugcuggagaa

SEQ ID NO: 40330 - RNA, 19 nt, Artificial Sequence
  Description of Artificial Sequence: Synthetic oligonucleotide
ugucgacuugcuggagaag

SEQ ID NO: 40331 - RNA, 19 nt, Artificial Sequence
  Description of Artificial Sequence: Synthetic oligonucleotide
gucgacuugcuggagaaga

SEQ ID NO: 40332 - RNA, 19 nt, Artificial Sequence
  Description of Artificial Sequence: Synthetic oligonucleotide
ucgacuugcuggagaagau

SEQ ID NO: 40333 - RNA, 19 nt, Artificial Sequence
  Description of Artificial Sequence: Synthetic oligonucleotide
ccccauugcccggaaggac

SEQ ID NO: 40334 - RNA, 19 nt, Artificial Sequence
  Description of Artificial Sequence: Synthetic oligonucleotide
auccagucccugcccccca

SEQ ID NO: 40335 - DNA, 21 bp, Artificial Sequence
  Description of Artificial Sequence: Synthetic oligonucleotide
  Description of Combined DNA/RNA Molecule: Synthetic oligonucleotide
cuacacaaaucagcgauuutt

SEQ ID NO: 40336 - DNA, 21 bp, Artificial Sequence
  Description of Artificial Sequence: Synthetic oligonucleotide
  Description of Combined DNA/RNA Molecule: Synthetic oligonucleotide
aaaucgcugauuuguguagtt

SEQ ID NO: 40337 - DNA, 25 bp, Artificial Sequence
  Description of Artificial Sequence: Synthetic oligonucleotide
  Description of Combined DNA/RNA Molecule: Synthetic oligonucleotide
cuacacaaaucagcgauuuccaugt

SEQ ID NO: 40338 - RNA, 27 nt, Artificial Sequence
  Description of Artificial Sequence: Synthetic oligonucleotide
acauggaaaucgcugauuuguguaguc

SEQ ID NO: 40339 - RNA, 13 nt, Artificial Sequence
  Description of Artificial Sequence: Synthetic oligonucleotide
cuacacaaaucag

SEQ ID NO: 40340 - DNA, 11 bp, Artificial Sequence
  Description of Artificial Sequence: Synthetic oligonucleotide
  Description of Combined DNA/RNA Molecule: Synthetic oligonucleotide
gauuuccaugt

SEQ ID NO: 40341 - DNA, 21 bp, Artificial Sequence
  Description of Artificial Sequence: Synthetic oligonucleotide
  Description of Combined DNA/RNA Molecule: Synthetic oligonucleotide
ggaucuuauuucuucggagtt

SEQ ID NO: 40342 - DNA, 21 bp, Artificial Sequence
  Description of Artificial Sequence: Synthetic oligonucleotide
  Description of Combined DNA/RNA Molecule: Synthetic oligonucleotide
cuccgaagaaauaagaucctt

SEQ ID NO: 40343 - RNA, 11 nt, Artificial Sequence
  Description of Artificial Sequence: Synthetic oligonucleotide
ggaucuuauuu

SEQ ID NO: 40344 - DNA, 10 bp, Artificial Sequence
  Description of Artificial Sequence: Synthetic oligonucleotide
  Description of Combined DNA/RNA Molecule: Synthetic oligonucleotide
cuucggagtt

SEQ ID NO: 40345 - RNA, 27 nt, Artificial Sequence
  Description of Artificial Sequence: Synthetic oligonucleotide
cauugucuccgaagaaauaagauccuu

SEQ ID NO: 40346 - RNA, 8 nt, Artificial Sequence
  Description of Artificial Sequence: Synthetic oligonucleotide
  modified_base (2): LNA-G
ggaucuua

SEQ ID NO: 40347 - DNA, 17 bp, Artificial Sequence
  Description of Artificial Sequence: Synthetic oligonucleotide
  Description of Combined DNA/RNA Molecule: Synthetic oligonucleotide
uuucuucggagacaatg

SEQ ID NO: 40348 - DNA, 16 bp, Artificial Sequence
  Description of Artificial Sequence: Synthetic oligonucleotide
  Description of Combined DNA/RNA Molecule: Synthetic oligonucleotide
uucuucggagacaatg

SEQ ID NO: 40349 - DNA, 15 bp, Artificial Sequence
  Description of Artificial Sequence: Synthetic oligonucleotide
  Description of Combined DNA/RNA Molecule: Synthetic oligonucleotide
ucuucggagacaatg

SEQ ID NO: 40350 - DNA, 14 bp, Artificial Sequence
  Description of Artificial Sequence: Synthetic oligonucleotide
  Description of Combined DNA/RNA Molecule: Synthetic oligonucleotide
cuucggagacaatg

SEQ ID NO: 40351 - DNA, 13 bp, Artificial Sequence
  Description of Artificial Sequence: Synthetic oligonucleotide
  Description of Combined DNA/RNA Molecule: Synthetic oligonucleotide
uucggagacaatg

SEQ ID NO: 40352 - DNA, 12 bp, Artificial Sequence
  Description of Artificial Sequence: Synthetic oligonucleotide
  Description of Combined DNA/RNA Molecule: Synthetic oligonucleotide
ucggagacaatg

SEQ ID NO: 40353 - DNA, 11 bp, Artificial Sequence
  Description of Artificial Sequence: Synthetic oligonucleotide
  Description of Combined DNA/RNA Molecule: Synthetic oligonucleotide
cggagacaatg

SEQ ID NO: 40354 - RNA, 9 nt, Artificial Sequence
  Description of Artificial Sequence: Synthetic oligonucleotide
  modified_base (2): LNA-G
ggaucuuau

SEQ ID NO: 40355 - RNA, 10 nt, Artificial Sequence
  Description of Artificial Sequence: Synthetic oligonucleotide
  modified_base (2): LNA-G
ggaucuuauu

SEQ ID NO: 40356 - RNA, 11 nt, Artificial Sequence
  Description of Artificial Sequence: Synthetic oligonucleotide
  modified_base (2): LNA-G
ggaucuuauuu

SEQ ID NO: 40357 - RNA, 12 nt, Artificial Sequence
  Description of Artificial Sequence: Synthetic oligonucleotide
  modified_base (2): LNA-G
ggaucuuauuuc

SEQ ID NO: 40358 - RNA, 8 nt, Artificial Sequence
  Description of Artificial Sequence: Synthetic oligonucleotide
  modified_base (3): LNA-A
cuacacaa

SEQ ID NO: 40359 - DNA, 13 bp, Artificial Sequence
  Description of Artificial Sequence: Synthetic oligonucleotide
  Description of Combined DNA/RNA Molecule: Synthetic oligonucleotide
  modified_base (8): LNA-A
aucagcgauuutt

SEQ ID NO: 40360 - DNA, 12 bp, Artificial Sequence
  Description of Artificial Sequence: Synthetic oligonucleotide
  Description of Combined DNA/RNA Molecule: Synthetic oligonucleotide
  modified_base (7): LNA-A
ucagcgauuutt

SEQ ID NO: 40361 - DNA, 11 bp, Artificial Sequence
  Description of Artificial Sequence: Synthetic oligonucleotide
  Description of Combined DNA/RNA Molecule: Synthetic oligonucleotide
  modified_base (6): LNA-A
cagcgauuutt

SEQ ID NO: 40362 - DNA, 10 bp, Artificial Sequence
  Description of Artificial Sequence: Synthetic oligonucleotide
  Description of Combined DNA/RNA Molecule: Synthetic oligonucleotide
  modified_base (5): LNA-A
agcgauuutt

SEQ ID NO: 40363 - DNA, 9 bp, Artificial Sequence
  Description of Artificial Sequence: Synthetic oligonucleotide
  Description of Combined DNA/RNA Molecule: Synthetic oligonucleotide
  modified_base (4): LNA-A
gcgauuutt

SEQ ID NO: 40364 - DNA, 8 bp, Artificial Sequence
  Description of Artificial Sequence: Synthetic oligonucleotide
  Description of Combined DNA/RNA Molecule: Synthetic oligonucleotide
  modified_base (3): LNA-A
cgauuutt

SEQ ID NO: 40365 - DNA, 7 bp, Artificial Sequence
  Description of Artificial Sequence: Synthetic oligonucleotide
  Description of Combined DNA/RNA Molecule: Synthetic oligonucleotide
  modified_base (2): LNA-A
gauuutt

SEQ ID NO: 40366 - RNA, 9 nt, Artificial Sequence
  Description of Artificial Sequence: Synthetic oligonucleotide
  modified_base (3): LNA-A
cuacacaaa

SEQ ID NO: 40367 - RNA, 10 nt, Artificial Sequence
  Description of Artificial Sequence: Synthetic oligonucleotide
  modified_base (3): LNA-A
cuacacaaau

SEQ ID NO: 40368 - RNA, 11 nt, Artificial Sequence
  Description of Artificial Sequence: Synthetic oligonucleotide
  modified_base (3): LNA-A
cuacacaaauc

SEQ ID NO: 40369 - RNA, 12 nt, Artificial Sequence
  Description of Artificial Sequence: Synthetic oligonucleotide
  modified_base (3): LNA-A
cuacacaaauca

SEQ ID NO: 40370 - RNA, 13 nt, Artificial Sequence
  Description of Artificial Sequence: Synthetic oligonucleotide
  modified_base (3): LNA-A
cuacacaaaucag

SEQ ID NO: 40371 - RNA, 14 nt, Artificial Sequence
  Description of Artificial Sequence: Synthetic oligonucleotide
  modified_base (3): LNA-A
cuacacaaaucagc

SEQ ID NO: 40372 - RNA, 13 nt, Artificial Sequence
  Description of Artificial Sequence: Synthetic oligonucleotide
  modified_base (2): LNA-G
ggaucuuauuucu

SEQ ID NO: 40373 - RNA, 14 nt, Artificial Sequence
  Description of Artificial Sequence: Synthetic oligonucleotide
  modified_base (2): LNA-G
ggaucuuauuucuu

SEQ ID NO: 40374 - RNA, 8 nt, Artificial Sequence
  Description of Artificial Sequence: Synthetic oligonucleotide
  modified_base (2): LNA-G
  modified_base (8): LNA-A
ggaucuua

SEQ ID NO: 40375 - RNA, 9 nt, Artificial Sequence
  Description of Artificial Sequence: Synthetic oligonucleotide
  modified_base (2): LNA-G
  modified_base (9): LNA-U
ggaucuuau

SEQ ID NO: 40376 - RNA, 10 nt, Artificial Sequence
  Description of Artificial Sequence: Synthetic oligonucleotide
  modified_base (2): LNA-G
  modified_base (10): LNA-U
ggaucuuauu

SEQ ID NO: 40377 - RNA, 11 nt, Artificial Sequence
  Description of Artificial Sequence: Synthetic oligonucleotide
  modified_base (2): LNA-G
  modified_base (11): LNA-U
ggaucuuauuu

SEQ ID NO: 40378 - RNA, 12 nt, Artificial Sequence
  Description of Artificial Sequence: Synthetic oligonucleotide
  modified_base (2): LNA-G
  modified_base (12): LNA-C
ggaucuuauuuc

SEQ ID NO: 40379 - RNA, 13 nt, Artificial Sequence
  Description of Artificial Sequence: Synthetic oligonucleotide
  modified_base (2): LNA-G
  modified_base (13): LNA-U
ggaucuuauuucu

SEQ ID NO: 40380 - RNA, 14 nt, Artificial Sequence
  Description of Artificial Sequence: Synthetic oligonucleotide
  modified_base (2): LNA-G
  modified_base (14): LNA-U
ggaucuuauuucuu

SEQ ID NO: 40381 - DNA, 13 bp, Artificial Sequence
  Description of Artificial Sequence: Synthetic oligonucleotide
  Description of Combined DNA/RNA Molecule: Synthetic oligonucleotide
  modified_base (8): LNA-G
uuucuucggagtt

SEQ ID NO: 40382 - DNA, 12 bp, Artificial Sequence
  Description of Artificial Sequence: Synthetic oligonucleotide
  Description of Combined DNA/RNA Molecule: Synthetic oligonucleotide
  modified_base (7): LNA-G
uucuucggagtt

SEQ ID NO: 40383 - DNA, 11 bp, Artificial Sequence
  Description of Artificial Sequence: Synthetic oligonucleotide
  Description of Combined DNA/RNA Molecule: Synthetic oligonucleotide
  modified_base (6): LNA-G
ucuucggagtt

SEQ ID NO: 40384 - DNA, 10 bp, Artificial Sequence
  Description of Artificial Sequence: Synthetic oligonucleotide
  Description of Combined DNA/RNA Molecule: Synthetic oligonucleotide
  modified_base (5): LNA-G
cuucggagtt

SEQ ID NO: 40385 - DNA, 9 bp, Artificial Sequence
  Description of Artificial Sequence: Synthetic oligonucleotide
  Description of Combined DNA/RNA Molecule: Synthetic oligonucleotide
  modified_base (4): LNA-G
uucggagtt

SEQ ID NO: 40386 - DNA, 8 bp, Artificial Sequence
  Description of Artificial Sequence: Synthetic oligonucleotide
  Description of Combined DNA/RNA Molecule: Synthetic oligonucleotide
  modified_base (3): LNA-G
ucggagtt

SEQ ID NO: 40387 - DNA, 7 bp, Artificial Sequence
  Description of Artificial Sequence: Synthetic oligonucleotide
  Description of Combined DNA/RNA Molecule: Synthetic oligonucleotide
  modified_base (2): LNA-G
cggagtt

SEQ ID NO: 40388 - DNA, 13 bp, Artificial Sequence
  Description of Artificial Sequence: Synthetic oligonucleotide
  Description of Combined DNA/RNA Molecule: Synthetic oligonucleotide
  modified_base (1): LNA-U
  modified_base (8): LNA-G
uuucuucggagtt

SEQ ID NO: 40389 - DNA, 12 bp, Artificial Sequence
  Description of Artificial Sequence: Synthetic oligonucleotide
  Description of Combined DNA/RNA Molecule: Synthetic oligonucleotide
  modified_base (1): LNA-U
  modified_base (7): LNA-G
uucuucggagtt

SEQ ID NO: 40390 - DNA, 11 bp, Artificial Sequence
  Description of Artificial Sequence: Synthetic oligonucleotide
  Description of Combined DNA/RNA Molecule: Synthetic oligonucleotide
  modified_base (1): LNA-U
  modified_base (6): LNA-G
ucuucggagtt

SEQ ID NO: 40391 - DNA, 10 bp, Artificial Sequence
  Description of Artificial Sequence: Synthetic oligonucleotide
  Description of Combined DNA/RNA Molecule: Synthetic oligonucleotide
  modified_base (1): LNA-C
  modified_base (5): LNA-G
cuucggagtt

SEQ ID NO: 40392 - DNA, 9 bp, Artificial Sequence
  Description of Artificial Sequence: Synthetic oligonucleotide
  Description of Combined DNA/RNA Molecule: Synthetic oligonucleotide
  modified_base (1): LNA-U
  modified_base (4): LNA-G
uucggagtt

SEQ ID NO: 40393 - DNA, 8 bp, Artificial Sequence
  Description of Artificial Sequence: Synthetic oligonucleotide
  Description of Combined DNA/RNA Molecule: Synthetic oligonucleotide
  modified_base (1): LNA-U
  modified_base (3): LNA-G
ucggagtt

SEQ ID NO: 40394 - DNA, 7 bp, Artificial Sequence
  Description of Artificial Sequence: Synthetic oligonucleotide
  Description of Combined DNA/RNA Molecule: Synthetic oligonucleotide
  modified_base (1): LNA-C
  modified_base (2): LNA-G
cggagtt

SEQ ID NO: 40395 - DNA, 21 bp, Artificial Sequence
  Description of Artificial Sequence: Synthetic oligonucleotide
  Description of Combined DNA/RNA Molecule: Synthetic oligonucleotide
  modified_base (2): LNA-G
  modified_base (16): LNA-G
ggaucuuauuucuucggagtt

SEQ ID NO: 40396 - DNA, 25 bp, Artificial Sequence
  Description of Artificial Sequence: Synthetic oligonucleotide
  Description of Combined DNA/RNA Molecule: Synthetic oligonucleotide
ggaucuuauuucuucggagacaatg

SEQ ID NO: 40397 - RNA, 25 nt, Artificial Sequence
  Description of Artificial Sequence: Synthetic oligonucleotide
uuaagcagaguucaaaagcccuuca

SEQ ID NO: 40398 - RNA, 25 nt, Artificial Sequence
  Description of Artificial Sequence: Synthetic oligonucleotide
uaagcagaguucaaaagcccuucag

SEQ ID NO: 40399 - RNA, 25 nt, Artificial Sequence
  Description of Artificial Sequence: Synthetic oligonucleotide
agcagaguucaaaagcccuucagcg

SEQ ID NO: 40400 - RNA, 25 nt, Artificial Sequence
  Description of Artificial Sequence: Synthetic oligonucleotide
cucagggucugagugaagccgcucg

SEQ ID NO: 40401 - RNA, 25 nt, Artificial Sequence
  Description of Artificial Sequence: Synthetic oligonucleotide
caagcaacuacaucacgccagucaa

SEQ ID NO: 40402 - RNA, 25 nt, Artificial Sequence
  Description of Artificial Sequence: Synthetic oligonucleotide
aucaauggcagcuucuuggugcgug

SEQ ID NO: 40403 - RNA, 25 nt, Artificial Sequence
  Description of Artificial Sequence: Synthetic oligonucleotide
uuccagcccacauuggauucaucag

SEQ ID NO: 40404 - RNA, 25 nt, Artificial Sequence
  Description of Artificial Sequence: Synthetic oligonucleotide
cagcugagaauguggaauaccuaag

SEQ ID NO: 40405 - RNA, 25 nt, Artificial Sequence
  Description of Artificial Sequence: Synthetic oligonucleotide
aacguaucuccuaauuugaggcuca

SEQ ID NO: 40406 - RNA, 25 nt, Artificial Sequence
  Description of Artificial Sequence: Synthetic oligonucleotide
ccuaaaauaauuucucuacaauugg

SEQ ID NO: 40407 - RNA, 25 nt, Artificial Sequence
  Description of Artificial Sequence: Synthetic oligonucleotide
uggaagauucagcuaguuaggagcc

SEQ ID NO: 40408 - RNA, 25 nt, Artificial Sequence
  Description of Artificial Sequence: Synthetic oligonucleotide
uuaaacucuccuagucaauauccac

SEQ ID NO: 40409 - RNA, 25 nt, Artificial Sequence
  Description of Artificial Sequence: Synthetic oligonucleotide
cagccuacaguuauguucagucaca

SEQ ID NO: 40410 - RNA, 25 nt, Artificial Sequence
  Description of Artificial Sequence: Synthetic oligonucleotide
guuauguucagucacacacacauac

SEQ ID NO: 40411 - RNA, 25 nt, Artificial Sequence
  Description of Artificial Sequence: Synthetic oligonucleotide
cacauacaaaauguuccuuuugcuu

SEQ ID NO: 40412 - RNA, 25 nt, Artificial Sequence
  Description of Artificial Sequence: Synthetic oligonucleotide
uccuuuugcuuuuaaaguaauuuuu

SEQ ID NO: 40413 - RNA, 25 nt, Artificial Sequence
  Description of Artificial Sequence: Synthetic oligonucleotide
ugaccugugaagcaacagucaaugg

SEQ ID NO: 40414 - RNA, 25 nt, Artificial Sequence
  Description of Artificial Sequence: Synthetic oligonucleotide
cuaucucacacaucgacaaaccaau

SEQ ID NO: 40415 - RNA, 25 nt, Artificial Sequence
  Description of Artificial Sequence: Synthetic oligonucleotide
uguccucaauuguacugcuaccacu

SEQ ID NO: 40416 - RNA, 25 nt, Artificial Sequence
  Description of Artificial Sequence: Synthetic oligonucleotide
aaaccguagcuggcaagcggucuua

SEQ ID NO: 40417 - RNA, 25 nt, Artificial Sequence
  Description of Artificial Sequence: Synthetic oligonucleotide
uagcuggcaagcggucuuaccggcu

SEQ ID NO: 40418 - RNA, 25 nt, Artificial Sequence
  Description of Artificial Sequence: Synthetic oligonucleotide
uuguaugguuaaaagauggguuacc

SEQ ID NO: 40419 - RNA, 25 nt, Artificial Sequence
  Description of Artificial Sequence: Synthetic oligonucleotide
ugguuaaaagauggguuaccugcga

SEQ ID NO: 40420 - RNA, 25 nt, Artificial Sequence
  Description of Artificial Sequence: Synthetic oligonucleotide
cagggaauuauacaaucuugcugag

SEQ ID NO: 40421 - RNA, 25 nt, Artificial Sequence
  Description of Artificial Sequence: Synthetic oligonucleotide
acaaucuugcugagcauaaaacagu

SEQ ID NO: 40422 - RNA, 25 nt, Artificial Sequence
  Description of Artificial Sequence: Synthetic oligonucleotide
ccaauaaugaagaguccuuuauccu

SEQ ID NO: 40423 - RNA, 25 nt, Artificial Sequence
  Description of Artificial Sequence: Synthetic oligonucleotide
acuuuggauguuccaacgcaaguug

SEQ ID NO: 40424 - RNA, 25 nt, Artificial Sequence
  Description of Artificial Sequence: Synthetic oligonucleotide
aaugcuuccacuaaacugaaaccau

SEQ ID NO: 40425 - RNA, 25 nt, Artificial Sequence
  Description of Artificial Sequence: Synthetic oligonucleotide
gagaaaguuugacuuuguuaaauau

SEQ ID NO: 40426 - RNA, 25 nt, Artificial Sequence
  Description of Artificial Sequence: Synthetic oligonucleotide
aaagaacuacuguauauuaaaaguu

SEQ ID NO: 40427 - RNA, 25 nt, Artificial Sequence
  Description of Artificial Sequence: Synthetic oligonucleotide
uuagaaauacggguuuugacuuaac

SEQ ID NO: 40428 - RNA, 25 nt, Artificial Sequence
  Description of Artificial Sequence: Synthetic oligonucleotide
aacauggguacagcaaacucagcac

SEQ ID NO: 40429 - RNA, 25 nt, Artificial Sequence
  Description of Artificial Sequence: Synthetic oligonucleotide
aaagacacagaagaugcugaccuca

SEQ ID NO: 40430 - RNA, 25 nt, Artificial Sequence
  Description of Artificial Sequence: Synthetic oligonucleotide
uaguagggagguuuauucagaucgc

SEQ ID NO: 40431 - RNA, 25 nt, Artificial Sequence
  Description of Artificial Sequence: Synthetic oligonucleotide
gccuucugcagcaggguucugggau

SEQ ID NO: 40432 - RNA, 25 nt, Artificial Sequence
  Description of Artificial Sequence: Synthetic oligonucleotide
ggucugguacauauuggaaauuaug

SEQ ID NO: 40433 - RNA, 25 nt, Artificial Sequence
  Description of Artificial Sequence: Synthetic oligonucleotide
cuaguccuuccgauggaagcacuag

SEQ ID NO: 40434 - RNA, 25 nt, Artificial Sequence
  Description of Artificial Sequence: Synthetic oligonucleotide
ccagugaauauuguuuuuaugugga

SEQ ID NO: 40435 - RNA, 25 nt, Artificial Sequence
  Description of Artificial Sequence: Synthetic oligonucleotide
augaauucaaguuggaauugguaga

SEQ ID NO: 40436 - RNA, 25 nt, Artificial Sequence
  Description of Artificial Sequence: Synthetic oligonucleotide
caggacacagauuuagacuuggaga

SEQ ID NO: 40437 - RNA, 25 nt, Artificial Sequence
  Description of Artificial Sequence: Synthetic oligonucleotide
cucaaagcacaguuacaguauucca

SEQ ID NO: 40438 - RNA, 25 nt, Artificial Sequence
  Description of Artificial Sequence: Synthetic oligonucleotide
accacugccaccacugaugaauuaa

SEQ ID NO: 40439 - RNA, 25 nt, Artificial Sequence
  Description of Artificial Sequence: Synthetic oligonucleotide
gaaacuacuagugccacaucaucac

SEQ ID NO: 40440 - RNA, 25 nt, Artificial Sequence
  Description of Artificial Sequence: Synthetic oligonucleotide
aagucggacagccucaccaaacaga

SEQ ID NO: 40441 - RNA, 25 nt, Artificial Sequence
  Description of Artificial Sequence: Synthetic oligonucleotide
gaaagcgaaaaauggaacaugaugg

SEQ ID NO: 40442 - RNA, 25 nt, Artificial Sequence
  Description of Artificial Sequence: Synthetic oligonucleotide
cccucugauuuagcauguagacugc

SEQ ID NO: 40443 - RNA, 25 nt, Artificial Sequence
  Description of Artificial Sequence: Synthetic oligonucleotide
ugagcuauuuaaggaucuauuuaug

SEQ ID NO: 40444 - RNA, 25 nt, Artificial Sequence
  Description of Artificial Sequence: Synthetic oligonucleotide
aaaaggugaaaaagcacuauuauca

SEQ ID NO: 40445 - RNA, 25 nt, Artificial Sequence
  Description of Artificial Sequence: Synthetic oligonucleotide
gaaaaagcacuauuaucaguucugc

SEQ ID NO: 40446 - RNA, 25 nt, Artificial Sequence
  Description of Artificial Sequence: Synthetic oligonucleotide
ggcugaaaagaaagauuaaaccuac

SEQ ID NO: 40447 - RNA, 25 nt, Artificial Sequence
  Description of Artificial Sequence: Synthetic oligonucleotide
uaaacccuuauaauaaaauccuucu

SEQ ID NO: 40448 - RNA, 25 nt, Artificial Sequence
  Description of Artificial Sequence: Synthetic oligonucleotide
cauacuauuagccaaugcuguagac

SEQ ID NO: 40449 - RNA, 25 nt, Artificial Sequence
  Description of Artificial Sequence: Synthetic oligonucleotide
gacagaagcauuuugauaggaauag

SEQ ID NO: 40450 - RNA, 25 nt, Artificial Sequence
  Description of Artificial Sequence: Synthetic oligonucleotide
agagcaaauaagauaauggcccuga

SEQ ID NO: 40451 - RNA, 25 nt, Artificial Sequence
  Description of Artificial Sequence: Synthetic oligonucleotide
ccaacauuuuucucuuccucaagca

SEQ ID NO: 40452 - RNA, 25 nt, Artificial Sequence
  Description of Artificial Sequence: Synthetic oligonucleotide
uuaaguaugagaaaaguucagccca

SEQ ID NO: 40453 - RNA, 25 nt, Artificial Sequence
  Description of Artificial Sequence: Synthetic oligonucleotide
caggaauaaagauggcugcugaacc

SEQ ID NO: 40454 - RNA, 25 nt, Artificial Sequence
  Description of Artificial Sequence: Synthetic oligonucleotide
aauuugaaugaccaaguucucuuca

SEQ ID NO: 40455 - RNA, 25 nt, Artificial Sequence
  Description of Artificial Sequence: Synthetic oligonucleotide
auguauaaagauagccagccuagag

SEQ ID NO: 40456 - RNA, 25 nt, Artificial Sequence
  Description of Artificial Sequence: Synthetic oligonucleotide
ggcuguaacuaucucugugaagugu

SEQ ID NO: 40457 - RNA, 25 nt, Artificial Sequence
  Description of Artificial Sequence: Synthetic oligonucleotide
ucugugaagugugagaaaauuucaa

SEQ ID NO: 40458 - RNA, 25 nt, Artificial Sequence
  Description of Artificial Sequence: Synthetic oligonucleotide
ccuuuaaggaaaugaauccuccuga

SEQ ID NO: 40459 - RNA, 25 nt, Artificial Sequence
  Description of Artificial Sequence: Synthetic oligonucleotide
aaggauacaaaaagugacaucauau

SEQ ID NO: 40460 - RNA, 25 nt, Artificial Sequence
  Description of Artificial Sequence: Synthetic oligonucleotide
agaugcaauuugaaucuucaucaua

SEQ ID NO: 40461 - RNA, 25 nt, Artificial Sequence
  Description of Artificial Sequence: Synthetic oligonucleotide
guucaaaacgaagacuagcuauuaa

SEQ ID NO: 40462 - RNA, 25 nt, Artificial Sequence
  Description of Artificial Sequence: Synthetic oligonucleotide
gugaaaccucaucucuacuaaaaau

SEQ ID NO: 40463 - RNA, 25 nt, Artificial Sequence
  Description of Artificial Sequence: Synthetic oligonucleotide
acgaaagagaagcucuaucucgccu

SEQ ID NO: 40464 - RNA, 25 nt, Artificial Sequence
  Description of Artificial Sequence: Synthetic oligonucleotide
cuccacaagcgccuucgguccaguu

SEQ ID NO: 40465 - RNA, 25 nt, Artificial Sequence
  Description of Artificial Sequence: Synthetic oligonucleotide
gagaagauuccaaagauguagccgc

SEQ ID NO: 40466 - RNA, 25 nt, Artificial Sequence
  Description of Artificial Sequence: Synthetic oligonucleotide
aaucuggauucaaugaggagacuug

SEQ ID NO: 40467 - RNA, 25 nt, Artificial Sequence
  Description of Artificial Sequence: Synthetic oligonucleotide
agaacagauuugagaguagugagga

SEQ ID NO: 40468 - RNA, 25 nt, Artificial Sequence
  Description of Artificial Sequence: Synthetic oligonucleotide
ccagagcugugcagaugaguacaaa

SEQ ID NO: 40469 - RNA, 25 nt, Artificial Sequence
  Description of Artificial Sequence: Synthetic oligonucleotide
ccucagauuguuguuguuaaugggc

SEQ ID NO: 40470 - RNA, 25 nt, Artificial Sequence
  Description of Artificial Sequence: Synthetic oligonucleotide
cuauuuuaauuauuuuuaauuuauu

SEQ ID NO: 40471 - RNA, 25 nt, Artificial Sequence
  Description of Artificial Sequence: Synthetic oligonucleotide
uuuaauuuauuaauauuuaaauaug

SEQ ID NO: 40472 - RNA, 25 nt, Artificial Sequence
  Description of Artificial Sequence: Synthetic oligonucleotide
augcaguuugaauauccuuuguuuc

SEQ ID NO: 40473 - RNA, 25 nt, Artificial Sequence
  Description of Artificial Sequence: Synthetic oligonucleotide
caugcugcuggcgucuaaguguuug

SEQ ID NO: 40474 - RNA, 25 nt, Artificial Sequence
  Description of Artificial Sequence: Synthetic oligonucleotide
agaugugcauuucaccugugacaaa

SEQ ID NO: 40475 - RNA, 25 nt, Artificial Sequence
  Description of Artificial Sequence: Synthetic oligonucleotide
ucaaaaccugugccaggcugaauua

SEQ ID NO: 40476 - RNA, 25 nt, Artificial Sequence
  Description of Artificial Sequence: Synthetic oligonucleotide
gaauguggguagucauucuuacaau

SEQ ID NO: 40477 - RNA, 25 nt, Artificial Sequence
  Description of Artificial Sequence: Synthetic oligonucleotide
auguggguagucauucuuacaauug

SEQ ID NO: 40478 - RNA, 25 nt, Artificial Sequence
  Description of Artificial Sequence: Synthetic oligonucleotide
ugaaaaugagcaucagagaguguac

SEQ ID NO: 40479 - RNA, 25 nt, Artificial Sequence
  Description of Artificial Sequence: Synthetic oligonucleotide
uugcuuuucauguagaacucagcag

SEQ ID NO: 40480 - RNA, 25 nt, Artificial Sequence
  Description of Artificial Sequence: Synthetic oligonucleotide
uguauuucuauauuuauuuucagua

SEQ ID NO: 40481 - RNA, 25 nt, Artificial Sequence
  Description of Artificial Sequence: Synthetic oligonucleotide
uuugauuaauguuucuuaaauggaa

SEQ ID NO: 40482 - RNA, 25 nt, Artificial Sequence
  Description of Artificial Sequence: Synthetic oligonucleotide
caacguguauagugccuaaaauugu

SEQ ID NO: 40483 - RNA, 25 nt, Artificial Sequence
  Description of Artificial Sequence: Synthetic oligonucleotide
cauauccuuggcuacuaacaucugg

SEQ ID NO: 40484 - RNA, 25 nt, Artificial Sequence
  Description of Artificial Sequence: Synthetic oligonucleotide
uacuaacaucuggagacugugagcu

SEQ ID NO: 40485 - RNA, 25 nt, Artificial Sequence
  Description of Artificial Sequence: Synthetic oligonucleotide
cauaaguugugugcuuuuuauuaau

SEQ ID NO: 40486 - RNA, 25 nt, Artificial Sequence
  Description of Artificial Sequence: Synthetic oligonucleotide
gcaucauuuuggcucuucuuacauu

SEQ ID NO: 40487 - RNA, 25 nt, Artificial Sequence
  Description of Artificial Sequence: Synthetic oligonucleotide
gcucuucuuacauuuguaaaaaugu

SEQ ID NO: 40488 - RNA, 25 nt, Artificial Sequence
  Description of Artificial Sequence: Synthetic oligonucleotide
agauuaggucaucuuaauucauauu

SEQ ID NO: 40489 - RNA, 25 nt, Artificial Sequence
  Description of Artificial Sequence: Synthetic oligonucleotide
auggaauugaaagaacuaaucauga

SEQ ID NO: 40490 - RNA, 25 nt, Artificial Sequence
  Description of Artificial Sequence: Synthetic oligonucleotide
cacacucauuccuucugcucuuggg

SEQ ID NO: 40491 - RNA, 25 nt, Artificial Sequence
  Description of Artificial Sequence: Synthetic oligonucleotide
uguagagguaaccaguagcuuugag

SEQ ID NO: 40492 - RNA, 25 nt, Artificial Sequence
  Description of Artificial Sequence: Synthetic oligonucleotide
caaccacaugccacguaauauuuca

SEQ ID NO: 40493 - RNA, 25 nt, Artificial Sequence
  Description of Artificial Sequence: Synthetic oligonucleotide
ucggaaacaaguuauucucuucacu

SEQ ID NO: 40494 - RNA, 25 nt, Artificial Sequence
  Description of Artificial Sequence: Synthetic oligonucleotide
acucccaauaacuaaugcuaagaaa

SEQ ID NO: 40495 - RNA, 25 nt, Artificial Sequence
  Description of Artificial Sequence: Synthetic oligonucleotide
aaugcuaagaaaugcugaaaaucaa

SEQ ID NO: 40496 - RNA, 25 nt, Artificial Sequence
  Description of Artificial Sequence: Synthetic oligonucleotide
gucuuucucuaaauaugauuacuuu

SEQ ID NO: 40497 - RNA, 25 nt, Artificial Sequence
  Description of Artificial Sequence: Synthetic oligonucleotide
ugaauuucaggcauuuuguucuaca

SEQ ID NO: 40498 - RNA, 25 nt, Artificial Sequence
  Description of Artificial Sequence: Synthetic oligonucleotide
cgauucccucucacccgggacucuc

SEQ ID NO: 40499 - RNA, 25 nt, Artificial Sequence
  Description of Artificial Sequence: Synthetic oligonucleotide
aggaaagugaaccuuuaaaguaaag

SEQ ID NO: 40500 - RNA, 25 nt, Artificial Sequence
  Description of Artificial Sequence: Synthetic oligonucleotide
gaggcugcaugcucuggaagccugg

SEQ ID NO: 40501 - RNA, 25 nt, Artificial Sequence
  Description of Artificial Sequence: Synthetic oligonucleotide
ucucugaacagaaaacaaaagagag

SEQ ID NO: 40502 - RNA, 25 nt, Artificial Sequence
  Description of Artificial Sequence: Synthetic oligonucleotide
aacuuggcuguaaucaguuaugccg

SEQ ID NO: 40503 - RNA, 25 nt, Artificial Sequence
  Description of Artificial Sequence: Synthetic oligonucleotide
agaagccaaaauuaaaagaagucca

SEQ ID NO: 40504 - RNA, 25 nt, Artificial Sequence
  Description of Artificial Sequence: Synthetic oligonucleotide
auuaaaagaaguccaggugagguua

SEQ ID NO: 40505 - RNA, 25 nt, Artificial Sequence
  Description of Artificial Sequence: Synthetic oligonucleotide
gaauccggauuaucgggaagaggac

SEQ ID NO: 40506 - RNA, 25 nt, Artificial Sequence
  Description of Artificial Sequence: Synthetic oligonucleotide
aaugugacaucaaagcaaguauugu

SEQ ID NO: 40507 - RNA, 25 nt, Artificial Sequence
  Description of Artificial Sequence: Synthetic oligonucleotide
caucaaagcaaguauuguagcacuc

SEQ ID NO: 40508 - RNA, 25 nt, Artificial Sequence
  Description of Artificial Sequence: Synthetic oligonucleotide
agagagagaaaacaaaaccacaaau

SEQ ID NO: 40509 - RNA, 25 nt, Artificial Sequence
  Description of Artificial Sequence: Synthetic oligonucleotide
ucgcuguaguauuuaagcccauaca

SEQ ID NO: 40510 - RNA, 25 nt, Artificial Sequence
  Description of Artificial Sequence: Synthetic oligonucleotide
cgcuguaguauuuaagcccauacag

SEQ ID NO: 40511 - RNA, 25 nt, Artificial Sequence
  Description of Artificial Sequence: Synthetic oligonucleotide
auuuaagcccauacagaaaccuucc

SEQ ID NO: 40512 - RNA, 25 nt, Artificial Sequence
  Description of Artificial Sequence: Synthetic oligonucleotide
auuaaaauaaacaugguauaccuac

SEQ ID NO: 40513 - RNA, 25 nt, Artificial Sequence
  Description of Artificial Sequence: Synthetic oligonucleotide
cuguucugaucggccaguuuucgga

SEQ ID NO: 40514 - RNA, 25 nt, Artificial Sequence
  Description of Artificial Sequence: Synthetic oligonucleotide
aaauaauuugaacuuuggaacaggg

SEQ ID NO: 40515 - RNA, 25 nt, Artificial Sequence
  Description of Artificial Sequence: Synthetic oligonucleotide
ugcgaccuuaauuuaacuuuccagu

SEQ ID NO: 40516 - RNA, 25 nt, Artificial Sequence
  Description of Artificial Sequence: Synthetic oligonucleotide
cugagaaagcuaaaguuugguuuug

SEQ ID NO: 40517 - RNA, 25 nt, Artificial Sequence
  Description of Artificial Sequence: Synthetic oligonucleotide
aguaaagaugcuacuucccacugua

SEQ ID NO: 40518 - RNA, 25 nt, Artificial Sequence
  Description of Artificial Sequence: Synthetic oligonucleotide
cugcuuaauugcugauaccauauga

SEQ ID NO: 40519 - RNA, 25 nt, Artificial Sequence
  Description of Artificial Sequence: Synthetic oligonucleotide
uaccauaugaaugaaacaugggcug

SEQ ID NO: 40520 - RNA, 25 nt, Artificial Sequence
  Description of Artificial Sequence: Synthetic oligonucleotide
aacuuucuuauccaacuuuuucaua

SEQ ID NO: 40521 - RNA, 25 nt, Artificial Sequence
  Description of Artificial Sequence: Synthetic oligonucleotide
ccuugcaugacaucaugaggccgga

SEQ ID NO: 40522 - RNA, 25 nt, Artificial Sequence
  Description of Artificial Sequence: Synthetic oligonucleotide
ugaauuuguauaugacugcauuugu

SEQ ID NO: 40523 - RNA, 25 nt, Artificial Sequence
  Description of Artificial Sequence: Synthetic oligonucleotide
gaauccuaguagaauguuuacuacc

SEQ ID NO: 40524 - RNA, 25 nt, Artificial Sequence
  Description of Artificial Sequence: Synthetic oligonucleotide
gaaagggaagaauuuuuugaugaaa

SEQ ID NO: 40525 - RNA, 25 nt, Artificial Sequence
  Description of Artificial Sequence: Synthetic oligonucleotide
uaucggcaugccagugugugaauuu

SEQ ID NO: 40526 - RNA, 25 nt, Artificial Sequence
  Description of Artificial Sequence: Synthetic oligonucleotide
caccucauaguagagcaauguaugu

SEQ ID NO: 40527 - RNA, 25 nt, Artificial Sequence
  Description of Artificial Sequence: Synthetic oligonucleotide
ccagaauugccaaagcacauauaua

SEQ ID NO: 40528 - RNA, 25 nt, Artificial Sequence
  Description of Artificial Sequence: Synthetic oligonucleotide
uggugaucuggguaauaguuucucc

SEQ ID NO: 40529 - RNA, 25 nt, Artificial Sequence
  Description of Artificial Sequence: Synthetic oligonucleotide
gaucuggguaauaguuucuccaaau

SEQ ID NO: 40530 - RNA, 25 nt, Artificial Sequence
  Description of Artificial Sequence: Synthetic oligonucleotide
ggaugugaugaauacuuccuagaaa

SEQ ID NO: 40531 - RNA, 25 nt, Artificial Sequence
  Description of Artificial Sequence: Synthetic oligonucleotide
cauuuccacagcuacaccauauaug

SEQ ID NO: 40532 - RNA, 25 nt, Artificial Sequence
  Description of Artificial Sequence: Synthetic oligonucleotide
acagcuacaccauauaugaauggag

SEQ ID NO: 40533 - RNA, 25 nt, Artificial Sequence
  Description of Artificial Sequence: Synthetic oligonucleotide
ugcaguucuuacacgagaagaagau

SEQ ID NO: 40534 - RNA, 25 nt, Artificial Sequence
  Description of Artificial Sequence: Synthetic oligonucleotide
acgagaagaagaucauuuacaggga

SEQ ID NO: 40535 - RNA, 25 nt, Artificial Sequence
  Description of Artificial Sequence: Synthetic oligonucleotide
cgagaagaagaucauuuacagggac

SEQ ID NO: 40536 - RNA, 25 nt, Artificial Sequence
  Description of Artificial Sequence: Synthetic oligonucleotide
aagaagaucauuuacagggaccuga

SEQ ID NO: 40537 - RNA, 25 nt, Artificial Sequence
  Description of Artificial Sequence: Synthetic oligonucleotide
agaggaagagguguuugacugcauc

SEQ ID NO: 40538 - RNA, 25 nt, Artificial Sequence
  Description of Artificial Sequence: Synthetic oligonucleotide
gaggaagagguguuugacugcaucg

SEQ ID NO: 40539 - RNA, 25 nt, Artificial Sequence
  Description of Artificial Sequence: Synthetic oligonucleotide
cuacuuugagggcgaguucacaggg

SEQ ID NO: 40540 - RNA, 25 nt, Artificial Sequence
  Description of Artificial Sequence: Synthetic oligonucleotide
agggcaucuccuggcaccucugucc

SEQ ID NO: 40541 - RNA, 25 nt, Artificial Sequence
  Description of Artificial Sequence: Synthetic oligonucleotide
ggagugauaugguuugucuuuuuaa

SEQ ID NO: 40542 - RNA, 25 nt, Artificial Sequence
  Description of Artificial Sequence: Synthetic oligonucleotide
gagugauaugguuugucuuuuuaag

SEQ ID NO: 40543 - RNA, 25 nt, Artificial Sequence
  Description of Artificial Sequence: Synthetic oligonucleotide
ugcaguaaagauccuaaagguuguc

SEQ ID NO: 40544 - RNA, 25 nt, Artificial Sequence
  Description of Artificial Sequence: Synthetic oligonucleotide
aguaaagauccuaaagguugucgac

SEQ ID NO: 40545 - RNA, 25 nt, Artificial Sequence
  Description of Artificial Sequence: Synthetic oligonucleotide
ugacaaaggacaaccuggcaauugu

SEQ ID NO: 40546 - RNA, 25 nt, Artificial Sequence
  Description of Artificial Sequence: Synthetic oligonucleotide
gcaauugugacccaguggugcgagg

SEQ ID NO: 40547 - RNA, 25 nt, Artificial Sequence
  Description of Artificial Sequence: Synthetic oligonucleotide
aacaucauccauagagacaugaaau

SEQ ID NO: 40548 - RNA, 25 nt, Artificial Sequence
  Description of Artificial Sequence: Synthetic oligonucleotide
ugaaauccaacaauauauuucucca

SEQ ID NO: 40549 - RNA, 25 nt, Artificial Sequence
  Description of Artificial Sequence: Synthetic oligonucleotide
aacaauauauuucuccaugaaggcu

SEQ ID NO: 40550 - RNA, 25 nt, Artificial Sequence
  Description of Artificial Sequence: Synthetic oligonucleotide
aacaguaaagucacgcuggaguggu

SEQ ID NO: 40551 - RNA, 25 nt, Artificial Sequence
  Description of Artificial Sequence: Synthetic oligonucleotide
ugugaagaaaguaaaggaagagagg

SEQ ID NO: 40552 - RNA, 25 nt, Artificial Sequence
  Description of Artificial Sequence: Synthetic oligonucleotide
cuuccgagccauccuugcaucgggc

SEQ ID NO: 40553 - RNA, 25 nt, Artificial Sequence
  Description of Artificial Sequence: Synthetic oligonucleotide
aauggagguugaauauccuacugug

SEQ ID NO: 40554 - RNA, 25 nt, Artificial Sequence
  Description of Artificial Sequence: Synthetic oligonucleotide
ggagguugaauauccuacuguguaa

SEQ ID NO: 40555 - RNA, 25 nt, Artificial Sequence
  Description of Artificial Sequence: Synthetic oligonucleotide
auuuugaguuuucccuuguagugua

SEQ ID NO: 40556 - RNA, 25 nt, Artificial Sequence
  Description of Artificial Sequence: Synthetic oligonucleotide
uauccuguuuguucuuuguugauug

SEQ ID NO: 40557 - RNA, 25 nt, Artificial Sequence
  Description of Artificial Sequence: Synthetic oligonucleotide
ccuguuuguucuuuguugauugaaa

SEQ ID NO: 40558 - RNA, 25 nt, Artificial Sequence
  Description of Artificial Sequence: Synthetic oligonucleotide
cucuacagccuucuuuuucuuccau

SEQ ID NO: 40559 - RNA, 25 nt, Artificial Sequence
  Description of Artificial Sequence: Synthetic oligonucleotide
ucuuccauagcuaaucuuccuucua

SEQ ID NO: 40560 - RNA, 25 nt, Artificial Sequence
  Description of Artificial Sequence: Synthetic oligonucleotide
auaaucuuccuguugaaugcuucau

SEQ ID NO: 40561 - RNA, 25 nt, Artificial Sequence
  Description of Artificial Sequence: Synthetic oligonucleotide
uaaucuuccuguugaaugcuucaug

SEQ ID NO: 40562 - RNA, 25 nt, Artificial Sequence
  Description of Artificial Sequence: Synthetic oligonucleotide
cuucaugacuugaauucuacuuuga

SEQ ID NO: 40563 - RNA, 25 nt, Artificial Sequence
  Description of Artificial Sequence: Synthetic oligonucleotide
aagagggagagaagcaacuacagac

SEQ ID NO: 40564 - RNA, 25 nt, Artificial Sequence
  Description of Artificial Sequence: Synthetic oligonucleotide
cgucuccuaccagaccaaggucaac

SEQ ID NO: 40565 - RNA, 25 nt, Artificial Sequence
  Description of Artificial Sequence: Synthetic oligonucleotide
gaucaaucggcccgacuaucucgac

SEQ ID NO: 40566 - RNA, 25 nt, Artificial Sequence
  Description of Artificial Sequence: Synthetic oligonucleotide
ggacgaacauccaaccuucccaaac

SEQ ID NO: 40567 - RNA, 25 nt, Artificial Sequence
  Description of Artificial Sequence: Synthetic oligonucleotide
agggucggaacccaagcuuagaacu

SEQ ID NO: 40568 - RNA, 25 nt, Artificial Sequence
  Description of Artificial Sequence: Synthetic oligonucleotide
ucggaacccaagcuuagaacuuuaa

SEQ ID NO: 40569 - RNA, 25 nt, Artificial Sequence
  Description of Artificial Sequence: Synthetic oligonucleotide
acccaagcuuagaacuuuaagcaac

SEQ ID NO: 40570 - RNA, 25 nt, Artificial Sequence
  Description of Artificial Sequence: Synthetic oligonucleotide
gaacuuuaagcaacaagaccaccac

SEQ ID NO: 40571 - RNA, 25 nt, Artificial Sequence
  Description of Artificial Sequence: Synthetic oligonucleotide
acuauucaguggcgagaaauaaagu

SEQ ID NO: 40572 - RNA, 25 nt, Artificial Sequence
  Description of Artificial Sequence: Synthetic oligonucleotide
cuauucaguggcgagaaauaaaguu

SEQ ID NO: 40573 - RNA, 25 nt, Artificial Sequence
  Description of Artificial Sequence: Synthetic oligonucleotide
aaacacagauaacaggaaaugaucc

SEQ ID NO: 40574 - RNA, 25 nt, Artificial Sequence
  Description of Artificial Sequence: Synthetic oligonucleotide
cuuaagaaaagagaagaaaugaaac

SEQ ID NO: 40575 - RNA, 25 nt, Artificial Sequence
  Description of Artificial Sequence: Synthetic oligonucleotide
cugaaggaguguguuuccauccucc

SEQ ID NO: 40576 - RNA, 25 nt, Artificial Sequence
  Description of Artificial Sequence: Synthetic oligonucleotide
ucaccgcgggacugaaaaucuuuga

SEQ ID NO: 40577 - RNA, 25 nt, Artificial Sequence
  Description of Artificial Sequence: Synthetic oligonucleotide
agcagaaauaagcgugccguucagg

SEQ ID NO: 40578 - RNA, 25 nt, Artificial Sequence
  Description of Artificial Sequence: Synthetic oligonucleotide
aagcgugccguucaggguccagaag

SEQ ID NO: 40579 - RNA, 25 nt, Artificial Sequence
  Description of Artificial Sequence: Synthetic oligonucleotide
agaaacagucacucaagacugcuug

SEQ ID NO: 40580 - RNA, 25 nt, Artificial Sequence
  Description of Artificial Sequence: Synthetic oligonucleotide
agaggaagaagguccaugucuuugg

SEQ ID NO: 40581 - RNA, 25 nt, Artificial Sequence
  Description of Artificial Sequence: Synthetic oligonucleotide
uguauucaaaauaugccugaaacac

SEQ ID NO: 40582 - RNA, 25 nt, Artificial Sequence
  Description of Artificial Sequence: Synthetic oligonucleotide
auuuuccucccuuucucuguaccuc

SEQ ID NO: 40583 - RNA, 25 nt, Artificial Sequence
  Description of Artificial Sequence: Synthetic oligonucleotide
caaagaaagauagagcaagacaaga

SEQ ID NO: 40584 - RNA, 25 nt, Artificial Sequence
  Description of Artificial Sequence: Synthetic oligonucleotide
aagaaagauagagcaagacaagaaa

SEQ ID NO: 40585 - RNA, 25 nt, Artificial Sequence
  Description of Artificial Sequence: Synthetic oligonucleotide
gaaagcauuuguuuguacaagaucc

SEQ ID NO: 40586 - RNA, 25 nt, Artificial Sequence
  Description of Artificial Sequence: Synthetic oligonucleotide
ugaguuaaacgaacguacuugcaga

SEQ ID NO: 40587 - RNA, 25 nt, Artificial Sequence
  Description of Artificial Sequence: Synthetic oligonucleotide
acugauacagaacgaucgauacaga

SEQ ID NO: 40588 - RNA, 25 nt, Artificial Sequence
  Description of Artificial Sequence: Synthetic oligonucleotide
auauuauauauauauaaaaauaaau

SEQ ID NO: 40589 - RNA, 25 nt, Artificial Sequence
  Description of Artificial Sequence: Synthetic oligonucleotide
auuauauauauauaaaaauaaauau

SEQ ID NO: 40590 - RNA, 25 nt, Artificial Sequence
  Description of Artificial Sequence: Synthetic oligonucleotide
ucacuggauguauuugacugcugug

SEQ ID NO: 40591 - RNA, 25 nt, Artificial Sequence
  Description of Artificial Sequence: Synthetic oligonucleotide
cagggaagaggaggagaugagagac

SEQ ID NO: 40592 - RNA, 25 nt, Artificial Sequence
  Description of Artificial Sequence: Synthetic oligonucleotide
augaucuuuuuuuugucccacuugg

SEQ ID NO: 40593 - RNA, 27 nt, Artificial Sequence
  Description of Artificial Sequence: Synthetic oligonucleotide
ggccgugaacuccucaucaaaauaccu

SEQ ID NO: 40594 - RNA, 27 nt, Artificial Sequence
  Description of Artificial Sequence: Synthetic oligonucleotide
uggugugauggugaucaucugggccgu

SEQ ID NO: 40595 - RNA, 27 nt, Artificial Sequence
  Description of Artificial Sequence: Synthetic oligonucleotide
aaacccgcaggauaguuuucuucccua

SEQ ID NO: 40596 - RNA, 27 nt, Artificial Sequence
  Description of Artificial Sequence: Synthetic oligonucleotide
caaacuggaugaaauaaauuaaaaccc

SEQ ID NO: 40597 - RNA, 27 nt, Artificial Sequence
  Description of Artificial Sequence: Synthetic oligonucleotide
agaaguccuuaacauuucccuacguga

SEQ ID NO: 40598 - RNA, 27 nt, Artificial Sequence
  Description of Artificial Sequence: Synthetic oligonucleotide
cucugucccacuggguaaacccuggcc

SEQ ID NO: 40599 - RNA, 27 nt, Artificial Sequence
  Description of Artificial Sequence: Synthetic oligonucleotide
cacaauaacaaauuuaaaccuugcucc

SEQ ID NO: 40600 - RNA, 27 nt, Artificial Sequence
  Description of Artificial Sequence: Synthetic oligonucleotide
aaaugcauuugaacaacauaauacaca

SEQ ID NO: 40601 - RNA, 27 nt, Artificial Sequence
  Description of Artificial Sequence: Synthetic oligonucleotide
ggcuuuccugucacaaagauuaaaaac

SEQ ID NO: 40602 - RNA, 27 nt, Artificial Sequence
  Description of Artificial Sequence: Synthetic oligonucleotide
agggcuuuccugucacaaagauuaaaa

SEQ ID NO: 40603 - RNA, 27 nt, Artificial Sequence
  Description of Artificial Sequence: Synthetic oligonucleotide
ggccaugcugggagacauaagcagcag

SEQ ID NO: 40604 - RNA, 27 nt, Artificial Sequence
  Description of Artificial Sequence: Synthetic oligonucleotide
ucagggagaagcuucugaaacacuucu

SEQ ID NO: 40605 - RNA, 27 nt, Artificial Sequence
  Description of Artificial Sequence: Synthetic oligonucleotide
aagggcuucuuccuuauugauggucag

SEQ ID NO: 40606 - RNA, 27 nt, Artificial Sequence
  Description of Artificial Sequence: Synthetic oligonucleotide
ugaagggcuucuuccuuauugaugguc

SEQ ID NO: 40607 - RNA, 27 nt, Artificial Sequence
  Description of Artificial Sequence: Synthetic oligonucleotide
cgcugaagggcuucuuccuuauugaug

SEQ ID NO: 40608 - RNA, 27 nt, Artificial Sequence
  Description of Artificial Sequence: Synthetic oligonucleotide
gccgcugaagggcuucuuccuuauuga

SEQ ID NO: 40609 - RNA, 27 nt, Artificial Sequence
  Description of Artificial Sequence: Synthetic oligonucleotide
acuggccgcugaagggcuucuuccuua

SEQ ID NO: 40610 - RNA, 27 nt, Artificial Sequence
  Description of Artificial Sequence: Synthetic oligonucleotide
cggagcuuuucaccuuuaguuaugcuu

SEQ ID NO: 40611 - RNA, 27 nt, Artificial Sequence
  Description of Artificial Sequence: Synthetic oligonucleotide
ccggagcuuuucaccuuuaguuaugcu

SEQ ID NO: 40612 - RNA, 27 nt, Artificial Sequence
  Description of Artificial Sequence: Synthetic oligonucleotide
cagacuguugacuggcgugauguaguu

SEQ ID NO: 40613 - RNA, 27 nt, Artificial Sequence
  Description of Artificial Sequence: Synthetic oligonucleotide
cuuuugaacucugcuuaaauccagugg

SEQ ID NO: 40614 - RNA, 27 nt, Artificial Sequence
  Description of Artificial Sequence: Synthetic oligonucleotide
gcuuuugaacucugcuuaaauccagug

SEQ ID NO: 40615 - RNA, 27 nt, Artificial Sequence
  Description of Artificial Sequence: Synthetic oligonucleotide
agggcuuuugaacucugcuuaaaucca

SEQ ID NO: 40616 - RNA, 27 nt, Artificial Sequence
  Description of Artificial Sequence: Synthetic oligonucleotide
aagggcuuuugaacucugcuuaaaucc

SEQ ID NO: 40617 - RNA, 27 nt, Artificial Sequence
  Description of Artificial Sequence: Synthetic oligonucleotide
ugaagggcuuuugaacucugcuuaaau

SEQ ID NO: 40618 - RNA, 27 nt, Artificial Sequence
  Description of Artificial Sequence: Synthetic oligonucleotide
cugaagggcuuuugaacucugcuuaaa

SEQ ID NO: 40619 - RNA, 27 nt, Artificial Sequence
  Description of Artificial Sequence: Synthetic oligonucleotide
cgcugaagggcuuuugaacucugcuua

SEQ ID NO: 40620 - RNA, 27 nt, Artificial Sequence
  Description of Artificial Sequence: Synthetic oligonucleotide
cgagcggcuucacucagacccugaggc

SEQ ID NO: 40621 - RNA, 27 nt, Artificial Sequence
  Description of Artificial Sequence: Synthetic oligonucleotide
uugacuggcgugauguaguugcuuggg

SEQ ID NO: 40622 - RNA, 27 nt, Artificial Sequence
  Description of Artificial Sequence: Synthetic oligonucleotide
cacgcaccaagaagcugccauugaucc

SEQ ID NO: 40623 - RNA, 27 nt, Artificial Sequence
  Description of Artificial Sequence: Synthetic oligonucleotide
cugaugaauccaaugugggcuggaauc

SEQ ID NO: 40624 - RNA, 27 nt, Artificial Sequence
  Description of Artificial Sequence: Synthetic oligonucleotide
cuuagguauuccacauucucagcugug

SEQ ID NO: 40625 - RNA, 27 nt, Artificial Sequence
  Description of Artificial Sequence: Synthetic oligonucleotide
ugagccucaaauuaggagauacguuuu

SEQ ID NO: 40626 - RNA, 27 nt, Artificial Sequence
  Description of Artificial Sequence: Synthetic oligonucleotide
ccaauuguagagaaauuauuuuaggaa

SEQ ID NO: 40627 - RNA, 27 nt, Artificial Sequence
  Description of Artificial Sequence: Synthetic oligonucleotide
ggcuccuaacuagcugaaucuuccaau

SEQ ID NO: 40628 - RNA, 27 nt, Artificial Sequence
  Description of Artificial Sequence: Synthetic oligonucleotide
guggauauugacuaggagaguuuaaaa

SEQ ID NO: 40629 - RNA, 27 nt, Artificial Sequence
  Description of Artificial Sequence: Synthetic oligonucleotide
ugugacugaacauaacuguaggcugaa

SEQ ID NO: 40630 - RNA, 27 nt, Artificial Sequence
  Description of Artificial Sequence: Synthetic oligonucleotide
guaugugugugugacugaacauaacug

SEQ ID NO: 40631 - RNA, 27 nt, Artificial Sequence
  Description of Artificial Sequence: Synthetic oligonucleotide
aagcaaaaggaacauuuuguaugugug

SEQ ID NO: 40632 - RNA, 27 nt, Artificial Sequence
  Description of Artificial Sequence: Synthetic oligonucleotide
aaaaauuacuuuaaaagcaaaaggaac

SEQ ID NO: 40633 - RNA, 27 nt, Artificial Sequence
  Description of Artificial Sequence: Synthetic oligonucleotide
ccauugacuguugcuucacaggucaga

SEQ ID NO: 40634 - RNA, 27 nt, Artificial Sequence
  Description of Artificial Sequence: Synthetic oligonucleotide
auugguuugucgaugugugagauaguu

SEQ ID NO: 40635 - RNA, 27 nt, Artificial Sequence
  Description of Artificial Sequence: Synthetic oligonucleotide
agugguagcaguacaauugaggacaag

SEQ ID NO: 40636 - RNA, 27 nt, Artificial Sequence
  Description of Artificial Sequence: Synthetic oligonucleotide
uaagaccgcuugccagcuacgguuuca

SEQ ID NO: 40637 - RNA, 27 nt, Artificial Sequence
  Description of Artificial Sequence: Synthetic oligonucleotide
agccgguaagaccgcuugccagcuacg

SEQ ID NO: 40638 - RNA, 27 nt, Artificial Sequence
  Description of Artificial Sequence: Synthetic oligonucleotide
gguaacccaucuuuuaaccauacaacu

SEQ ID NO: 40639 - RNA, 27 nt, Artificial Sequence
  Description of Artificial Sequence: Synthetic oligonucleotide
ucgcagguaacccaucuuuuaaccaua

SEQ ID NO: 40640 - RNA, 27 nt, Artificial Sequence
  Description of Artificial Sequence: Synthetic oligonucleotide
cucagcaagauuguauaauucccugca

SEQ ID NO: 40641 - RNA, 27 nt, Artificial Sequence
  Description of Artificial Sequence: Synthetic oligonucleotide
acuguuuuaugcucagcaagauuguau

SEQ ID NO: 40642 - RNA, 27 nt, Artificial Sequence
  Description of Artificial Sequence: Synthetic oligonucleotide
aggauaaaggacucuucauuauuggaa

SEQ ID NO: 40643 - RNA, 27 nt, Artificial Sequence
  Description of Artificial Sequence: Synthetic oligonucleotide
caacuugcguuggaacauccaaagugu

SEQ ID NO: 40644 - RNA, 27 nt, Artificial Sequence
  Description of Artificial Sequence: Synthetic oligonucleotide
augguuucaguuuaguggaagcauuua

SEQ ID NO: 40645 - RNA, 27 nt, Artificial Sequence
  Description of Artificial Sequence: Synthetic oligonucleotide
auauuuaacaaagucaaacuuucucac

SEQ ID NO: 40646 - RNA, 27 nt, Artificial Sequence
  Description of Artificial Sequence: Synthetic oligonucleotide
aacuuuuaauauacaguaguucuuuuc

SEQ ID NO: 40647 - RNA, 27 nt, Artificial Sequence
  Description of Artificial Sequence: Synthetic oligonucleotide
guuaagucaaaacccguauuucuaaag

SEQ ID NO: 40648 - RNA, 27 nt, Artificial Sequence
  Description of Artificial Sequence: Synthetic oligonucleotide
gugcugaguuugcuguacccauguuga

SEQ ID NO: 40649 - RNA, 27 nt, Artificial Sequence
  Description of Artificial Sequence: Synthetic oligonucleotide
ugaggucagcaucuucugugucuuuac

SEQ ID NO: 40650 - RNA, 27 nt, Artificial Sequence
  Description of Artificial Sequence: Synthetic oligonucleotide
gcgaucugaauaaaccucccuacuagc

SEQ ID NO: 40651 - RNA, 27 nt, Artificial Sequence
  Description of Artificial Sequence: Synthetic oligonucleotide
aucccagaacccugcugcagaaggcca

SEQ ID NO: 40652 - RNA, 27 nt, Artificial Sequence
  Description of Artificial Sequence: Synthetic oligonucleotide
cauaauuuccaauauguaccagaccuu

SEQ ID NO: 40653 - RNA, 27 nt, Artificial Sequence
  Description of Artificial Sequence: Synthetic oligonucleotide
cuagugcuuccaucggaaggacuaggu

SEQ ID NO: 40654 - RNA, 27 nt, Artificial Sequence
  Description of Artificial Sequence: Synthetic oligonucleotide
uccacauaaaaacaauauucacuggga

SEQ ID NO: 40655 - RNA, 27 nt, Artificial Sequence
  Description of Artificial Sequence: Synthetic oligonucleotide
ucuaccaauuccaacuugaauucauug

SEQ ID NO: 40656 - RNA, 27 nt, Artificial Sequence
  Description of Artificial Sequence: Synthetic oligonucleotide
ucuccaagucuaaaucuguguccugag

SEQ ID NO: 40657 - RNA, 27 nt, Artificial Sequence
  Description of Artificial Sequence: Synthetic oligonucleotide
uggaauacuguaacugugcuuugagga

SEQ ID NO: 40658 - RNA, 27 nt, Artificial Sequence
  Description of Artificial Sequence: Synthetic oligonucleotide
uuaauucaucagugguggcagugguag

SEQ ID NO: 40659 - RNA, 27 nt, Artificial Sequence
  Description of Artificial Sequence: Synthetic oligonucleotide
gugaugauguggcacuaguaguuucuu

SEQ ID NO: 40660 - RNA, 27 nt, Artificial Sequence
  Description of Artificial Sequence: Synthetic oligonucleotide
ucuguuuggugaggcuguccgacuuug

SEQ ID NO: 40661 - RNA, 27 nt, Artificial Sequence
  Description of Artificial Sequence: Synthetic oligonucleotide
ccaucauguuccauuuuucgcuuucuc

SEQ ID NO: 40662 - RNA, 27 nt, Artificial Sequence
  Description of Artificial Sequence: Synthetic oligonucleotide
gcagucuacaugcuaaaucagagggua

SEQ ID NO: 40663 - RNA, 27 nt, Artificial Sequence
  Description of Artificial Sequence: Synthetic oligonucleotide
cauaaauagauccuuaaauagcucaaa

SEQ ID NO: 40664 - RNA, 27 nt, Artificial Sequence
  Description of Artificial Sequence: Synthetic oligonucleotide
ugauaauagugcuuuuucaccuuuuuc

SEQ ID NO: 40665 - RNA, 27 nt, Artificial Sequence
  Description of Artificial Sequence: Synthetic oligonucleotide
gcagaacugauaauagugcuuuuucac

SEQ ID NO: 40666 - RNA, 27 nt, Artificial Sequence
  Description of Artificial Sequence: Synthetic oligonucleotide
guagguuuaaucuuucuuuucagccau

SEQ ID NO: 40667 - RNA, 27 nt, Artificial Sequence
  Description of Artificial Sequence: Synthetic oligonucleotide
agaaggauuuuauuauaaggguuuaau

SEQ ID NO: 40668 - RNA, 27 nt, Artificial Sequence
  Description of Artificial Sequence: Synthetic oligonucleotide
gucuacagcauuggcuaauaguaugaa

SEQ ID NO: 40669 - RNA, 27 nt, Artificial Sequence
  Description of Artificial Sequence: Synthetic oligonucleotide
cuauuccuaucaaaaugcuucugucua

SEQ ID NO: 40670 - RNA, 27 nt, Artificial Sequence
  Description of Artificial Sequence: Synthetic oligonucleotide
ucagggccauuaucuuauuugcucuau

SEQ ID NO: 40671 - RNA, 27 nt, Artificial Sequence
  Description of Artificial Sequence: Synthetic oligonucleotide
ugcuugaggaagagaaaaauguugguc

SEQ ID NO: 40672 - RNA, 27 nt, Artificial Sequence
  Description of Artificial Sequence: Synthetic oligonucleotide
ugggcugaacuuuucucauacuuaaag

SEQ ID NO: 40673 - RNA, 27 nt, Artificial Sequence
  Description of Artificial Sequence: Synthetic oligonucleotide
gguucagcagccaucuuuauuccugcg

SEQ ID NO: 40674 - RNA, 27 nt, Artificial Sequence
  Description of Artificial Sequence: Synthetic oligonucleotide
ugaagagaacuuggucauucaaauuuc

SEQ ID NO: 40675 - RNA, 27 nt, Artificial Sequence
  Description of Artificial Sequence: Synthetic oligonucleotide
cucuaggcuggcuaucuuuauacauac

SEQ ID NO: 40676 - RNA, 27 nt, Artificial Sequence
  Description of Artificial Sequence: Synthetic oligonucleotide
acacuucacagagauaguuacagccau

SEQ ID NO: 40677 - RNA, 27 nt, Artificial Sequence
  Description of Artificial Sequence: Synthetic oligonucleotide
uugaaauuuucucacacuucacagaga

SEQ ID NO: 40678 - RNA, 27 nt, Artificial Sequence
  Description of Artificial Sequence: Synthetic oligonucleotide
ucaggaggauucauuuccuuaaaggaa

SEQ ID NO: 40679 - RNA, 27 nt, Artificial Sequence
  Description of Artificial Sequence: Synthetic oligonucleotide
auaugaugucacuuuuuguauccuuga

SEQ ID NO: 40680 - RNA, 27 nt, Artificial Sequence
  Description of Artificial Sequence: Synthetic oligonucleotide
uaugaugaagauucaaauugcaucuua

SEQ ID NO: 40681 - RNA, 27 nt, Artificial Sequence
  Description of Artificial Sequence: Synthetic oligonucleotide
uuaauagcuagucuucguuuugaacag

SEQ ID NO: 40682 - RNA, 27 nt, Artificial Sequence
  Description of Artificial Sequence: Synthetic oligonucleotide
auuuuuaguagagaugagguuucacca

SEQ ID NO: 40683 - RNA, 27 nt, Artificial Sequence
  Description of Artificial Sequence: Synthetic oligonucleotide
aggcgagauagagcuucucuuucguuc

SEQ ID NO: 40684 - RNA, 27 nt, Artificial Sequence
  Description of Artificial Sequence: Synthetic oligonucleotide
aacuggaccgaaggcgcuuguggagaa

SEQ ID NO: 40685 - RNA, 27 nt, Artificial Sequence
  Description of Artificial Sequence: Synthetic oligonucleotide
gcggcuacaucuuuggaaucuucuccu

SEQ ID NO: 40686 - RNA, 27 nt, Artificial Sequence
  Description of Artificial Sequence: Synthetic oligonucleotide
caagucuccucauugaauccagauugg

SEQ ID NO: 40687 - RNA, 27 nt, Artificial Sequence
  Description of Artificial Sequence: Synthetic oligonucleotide
uccucacuacucucaaaucuguucugg

SEQ ID NO: 40688 - RNA, 27 nt, Artificial Sequence
  Description of Artificial Sequence: Synthetic oligonucleotide
uuuguacucaucugcacagcucuggcu

SEQ ID NO: 40689 - RNA, 27 nt, Artificial Sequence
  Description of Artificial Sequence: Synthetic oligonucleotide
gcccauuaacaacaacaaucugaggug

SEQ ID NO: 40690 - RNA, 27 nt, Artificial Sequence
  Description of Artificial Sequence: Synthetic oligonucleotide
aauaaauuaaaaauaauuaaaauagug

SEQ ID NO: 40691 - RNA, 27 nt, Artificial Sequence
  Description of Artificial Sequence: Synthetic oligonucleotide
cauauuuaaauauuaauaaauuaaaaa

SEQ ID NO: 40692 - RNA, 27 nt, Artificial Sequence
  Description of Artificial Sequence: Synthetic oligonucleotide
gaaacaaaggauauucaaacugcauag

SEQ ID NO: 40693 - RNA, 27 nt, Artificial Sequence
  Description of Artificial Sequence: Synthetic oligonucleotide
caaacacuuagacgccagcagcauggg

SEQ ID NO: 40694 - RNA, 27 nt, Artificial Sequence
  Description of Artificial Sequence: Synthetic oligonucleotide
uuugucacaggugaaaugcacaucuga

SEQ ID NO: 40695 - RNA, 27 nt, Artificial Sequence
  Description of Artificial Sequence: Synthetic oligonucleotide
uaauucagccuggcacagguuuugauc

SEQ ID NO: 40696 - RNA, 27 nt, Artificial Sequence
  Description of Artificial Sequence: Synthetic oligonucleotide
auuguaagaaugacuacccacauucac

SEQ ID NO: 40697 - RNA, 27 nt, Artificial Sequence
  Description of Artificial Sequence: Synthetic oligonucleotide
caauuguaagaaugacuacccacauuc

SEQ ID NO: 40698 - RNA, 27 nt, Artificial Sequence
  Description of Artificial Sequence: Synthetic oligonucleotide
guacacucucugaugcucauuuucaua

SEQ ID NO: 40699 - RNA, 27 nt, Artificial Sequence
  Description of Artificial Sequence: Synthetic oligonucleotide
cugcugaguucuacaugaaaagcaaau

SEQ ID NO: 40700 - RNA, 27 nt, Artificial Sequence
  Description of Artificial Sequence: Synthetic oligonucleotide
uacugaaaauaaauauagaaauacaac

SEQ ID NO: 40701 - RNA, 27 nt, Artificial Sequence
  Description of Artificial Sequence: Synthetic oligonucleotide
uuccauuuaagaaacauuaaucaaaac

SEQ ID NO: 40702 - RNA, 27 nt, Artificial Sequence
  Description of Artificial Sequence: Synthetic oligonucleotide
acaauuuuaggcacuauacacguuguu

SEQ ID NO: 40703 - RNA, 27 nt, Artificial Sequence
  Description of Artificial Sequence: Synthetic oligonucleotide
ccagauguuaguagccaaggauauggu

SEQ ID NO: 40704 - RNA, 27 nt, Artificial Sequence
  Description of Artificial Sequence: Synthetic oligonucleotide
agcucacagucuccagauguuaguagc

SEQ ID NO: 40705 - RNA, 27 nt, Artificial Sequence
  Description of Artificial Sequence: Synthetic oligonucleotide
auuaauaaaaagcacacaacuuauggc

SEQ ID NO: 40706 - RNA, 27 nt, Artificial Sequence
  Description of Artificial Sequence: Synthetic oligonucleotide
aauguaagaagagccaaaaugaugcau

SEQ ID NO: 40707 - RNA, 27 nt, Artificial Sequence
  Description of Artificial Sequence: Synthetic oligonucleotide
acauuuuuacaaauguaagaagagcca

SEQ ID NO: 40708 - RNA, 27 nt, Artificial Sequence
  Description of Artificial Sequence: Synthetic oligonucleotide
aauaugaauuaagaugaccuaaucugu

SEQ ID NO: 40709 - RNA, 27 nt, Artificial Sequence
  Description of Artificial Sequence: Synthetic oligonucleotide
ucaugauuaguucuuucaauuccaucc

SEQ ID NO: 40710 - RNA, 27 nt, Artificial Sequence
  Description of Artificial Sequence: Synthetic oligonucleotide
cccaagagcagaaggaaugagugugca

SEQ ID NO: 40711 - RNA, 27 nt, Artificial Sequence
  Description of Artificial Sequence: Synthetic oligonucleotide
cucaaagcuacugguuaccucuacacc

SEQ ID NO: 40712 - RNA, 27 nt, Artificial Sequence
  Description of Artificial Sequence: Synthetic oligonucleotide
ugaaauauuacguggcaugugguuggg

SEQ ID NO: 40713 - RNA, 27 nt, Artificial Sequence
  Description of Artificial Sequence: Synthetic oligonucleotide
agugaagagaauaacuuguuuccgaag

SEQ ID NO: 40714 - RNA, 27 nt, Artificial Sequence
  Description of Artificial Sequence: Synthetic oligonucleotide
uuucuuagcauuaguuauugggaguga

SEQ ID NO: 40715 - RNA, 27 nt, Artificial Sequence
  Description of Artificial Sequence: Synthetic oligonucleotide
uugauuuucagcauuucuuagcauuag

SEQ ID NO: 40716 - RNA, 27 nt, Artificial Sequence
  Description of Artificial Sequence: Synthetic oligonucleotide
aaaguaaucauauuuagagaaagacag

SEQ ID NO: 40717 - RNA, 27 nt, Artificial Sequence
  Description of Artificial Sequence: Synthetic oligonucleotide
uguagaacaaaaugccugaaauucagc

SEQ ID NO: 40718 - RNA, 27 nt, Artificial Sequence
  Description of Artificial Sequence: Synthetic oligonucleotide
gagagucccgggugagagggaaucgcc

SEQ ID NO: 40719 - RNA, 27 nt, Artificial Sequence
  Description of Artificial Sequence: Synthetic oligonucleotide
cuuuacuuuaaagguucacuuuccuug

SEQ ID NO: 40720 - RNA, 27 nt, Artificial Sequence
  Description of Artificial Sequence: Synthetic oligonucleotide
ccaggcuuccagagcaugcagccuccu

SEQ ID NO: 40721 - RNA, 27 nt, Artificial Sequence
  Description of Artificial Sequence: Synthetic oligonucleotide
cucucuuuuguuuucuguucagagaaa

SEQ ID NO: 40722 - RNA, 27 nt, Artificial Sequence
  Description of Artificial Sequence: Synthetic oligonucleotide
cggcauaacugauuacagccaaguuca

SEQ ID NO: 40723 - RNA, 27 nt, Artificial Sequence
  Description of Artificial Sequence: Synthetic oligonucleotide
uggacuucuuuuaauuuuggcuucuuc

SEQ ID NO: 40724 - RNA, 27 nt, Artificial Sequence
  Description of Artificial Sequence: Synthetic oligonucleotide
uaaccucaccuggacuucuuuuaauuu

SEQ ID NO: 40725 - RNA, 27 nt, Artificial Sequence
  Description of Artificial Sequence: Synthetic oligonucleotide
guccucuucccgauaauccggauucag

SEQ ID NO: 40726 - RNA, 27 nt, Artificial Sequence
  Description of Artificial Sequence: Synthetic oligonucleotide
acaauacuugcuuugaugucacauuaa

SEQ ID NO: 40727 - RNA, 27 nt, Artificial Sequence
  Description of Artificial Sequence: Synthetic oligonucleotide
gagugcuacaauacuugcuuugauguc

SEQ ID NO: 40728 - RNA, 27 nt, Artificial Sequence
  Description of Artificial Sequence: Synthetic oligonucleotide
auuugugguuuuguuuucucucucucu

SEQ ID NO: 40729 - RNA, 27 nt, Artificial Sequence
  Description of Artificial Sequence: Synthetic oligonucleotide
uguaugggcuuaaauacuacagcgagg

SEQ ID NO: 40730 - RNA, 27 nt, Artificial Sequence
  Description of Artificial Sequence: Synthetic oligonucleotide
cuguaugggcuuaaauacuacagcgag

SEQ ID NO: 40731 - RNA, 27 nt, Artificial Sequence
  Description of Artificial Sequence: Synthetic oligonucleotide
ggaagguuucuguaugggcuuaaauac

SEQ ID NO: 40732 - RNA, 27 nt, Artificial Sequence
  Description of Artificial Sequence: Synthetic oligonucleotide
guagguauaccauguuuauuuuaauac

SEQ ID NO: 40733 - RNA, 27 nt, Artificial Sequence
  Description of Artificial Sequence: Synthetic oligonucleotide
uccgaaaacuggccgaucagaacagcc

SEQ ID NO: 40734 - RNA, 27 nt, Artificial Sequence
  Description of Artificial Sequence: Synthetic oligonucleotide
cccuguuccaaaguucaaauuauuugu

SEQ ID NO: 40735 - RNA, 27 nt, Artificial Sequence
  Description of Artificial Sequence: Synthetic oligonucleotide
acuggaaaguuaaauuaaggucgcaau

SEQ ID NO: 40736 - RNA, 27 nt, Artificial Sequence
  Description of Artificial Sequence: Synthetic oligonucleotide
caaaaccaaacuuuagcuuucucagcc

SEQ ID NO: 40737 - RNA, 27 nt, Artificial Sequence
  Description of Artificial Sequence: Synthetic oligonucleotide
uacagugggaaguagcaucuuuacuuu

SEQ ID NO: 40738 - RNA, 27 nt, Artificial Sequence
  Description of Artificial Sequence: Synthetic oligonucleotide
ucauaugguaucagcaauuaagcagua

SEQ ID NO: 40739 - RNA, 27 nt, Artificial Sequence
  Description of Artificial Sequence: Synthetic oligonucleotide
cagcccauguuucauucauaugguauc

SEQ ID NO: 40740 - RNA, 27 nt, Artificial Sequence
  Description of Artificial Sequence: Synthetic oligonucleotide
uaugaaaaaguuggauaagaaaguugg

SEQ ID NO: 40741 - RNA, 27 nt, Artificial Sequence
  Description of Artificial Sequence: Synthetic oligonucleotide
uccggccucaugaugucaugcaaggcu

SEQ ID NO: 40742 - RNA, 27 nt, Artificial Sequence
  Description of Artificial Sequence: Synthetic oligonucleotide
acaaaugcagucauauacaaauucagg

SEQ ID NO: 40743 - RNA, 27 nt, Artificial Sequence
  Description of Artificial Sequence: Synthetic oligonucleotide
gguaguaaacauucuacuaggauucuu

SEQ ID NO: 40744 - RNA, 27 nt, Artificial Sequence
  Description of Artificial Sequence: Synthetic oligonucleotide
uuucaucaaaaaauucuucccuuucug

SEQ ID NO: 40745 - RNA, 27 nt, Artificial Sequence
  Description of Artificial Sequence: Synthetic oligonucleotide
aaauucacacacuggcaugccgauagc

SEQ ID NO: 40746 - RNA, 27 nt, Artificial Sequence
  Description of Artificial Sequence: Synthetic oligonucleotide
acauacauugcucuacuaugaggugaa

SEQ ID NO: 40747 - RNA, 27 nt, Artificial Sequence
  Description of Artificial Sequence: Synthetic oligonucleotide
uauauaugugcuuuggcaauucuggug

SEQ ID NO: 40748 - RNA, 27 nt, Artificial Sequence
  Description of Artificial Sequence: Synthetic oligonucleotide
ggagaaacuauuacccagaucaccacu

SEQ ID NO: 40749 - RNA, 27 nt, Artificial Sequence
  Description of Artificial Sequence: Synthetic oligonucleotide
auuuggagaaacuauuacccagaucac

SEQ ID NO: 40750 - RNA, 27 nt, Artificial Sequence
  Description of Artificial Sequence: Synthetic oligonucleotide
uuucuaggaaguauucaucacauccac

SEQ ID NO: 40751 - RNA, 27 nt, Artificial Sequence
  Description of Artificial Sequence: Synthetic oligonucleotide
cauauaugguguagcuguggaaaugcg

SEQ ID NO: 40752 - RNA, 27 nt, Artificial Sequence
  Description of Artificial Sequence: Synthetic oligonucleotide
cuccauucauauaugguguagcugugg

SEQ ID NO: 40753 - RNA, 27 nt, Artificial Sequence
  Description of Artificial Sequence: Synthetic oligonucleotide
aucuucuucucguguaagaacugcagc

SEQ ID NO: 40754 - RNA, 27 nt, Artificial Sequence
  Description of Artificial Sequence: Synthetic oligonucleotide
ucccuguaaaugaucuucuucucgugu

SEQ ID NO: 40755 - RNA, 27 nt, Artificial Sequence
  Description of Artificial Sequence: Synthetic oligonucleotide
gucccuguaaaugaucuucuucucgug

SEQ ID NO: 40756 - RNA, 27 nt, Artificial Sequence
  Description of Artificial Sequence: Synthetic oligonucleotide
ucaggucccuguaaaugaucuucuucu

SEQ ID NO: 40757 - RNA, 27 nt, Artificial Sequence
  Description of Artificial Sequence: Synthetic oligonucleotide
gaugcagucaaacaccucuuccucugu

SEQ ID NO: 40758 - RNA, 27 nt, Artificial Sequence
  Description of Artificial Sequence: Synthetic oligonucleotide
cgaugcagucaaacaccucuuccucug

SEQ ID NO: 40759 - RNA, 27 nt, Artificial Sequence
  Description of Artificial Sequence: Synthetic oligonucleotide
cccugugaacucgcccucaaaguagcg

SEQ ID NO: 40760 - RNA, 27 nt, Artificial Sequence
  Description of Artificial Sequence: Synthetic oligonucleotide
ggacagaggugccaggagaugcccuca

SEQ ID NO: 40761 - RNA, 27 nt, Artificial Sequence
  Description of Artificial Sequence: Synthetic oligonucleotide
uuaaaaagacaaaccauaucacuccuu

SEQ ID NO: 40762 - RNA, 27 nt, Artificial Sequence
  Description of Artificial Sequence: Synthetic oligonucleotide
cuuaaaaagacaaaccauaucacuccu

SEQ ID NO: 40763 - RNA, 27 nt, Artificial Sequence
  Description of Artificial Sequence: Synthetic oligonucleotide
gacaaccuuuaggaucuuuacugcaac

SEQ ID NO: 40764 - RNA, 27 nt, Artificial Sequence
  Description of Artificial Sequence: Synthetic oligonucleotide
gucgacaaccuuuaggaucuuuacugc

SEQ ID NO: 40765 - RNA, 27 nt, Artificial Sequence
  Description of Artificial Sequence: Synthetic oligonucleotide
acaauugccagguuguccuuugucaug

SEQ ID NO: 40766 - RNA, 27 nt, Artificial Sequence
  Description of Artificial Sequence: Synthetic oligonucleotide
ccucgcaccacugggucacaauugcca

SEQ ID NO: 40767 - RNA, 27 nt, Artificial Sequence
  Description of Artificial Sequence: Synthetic oligonucleotide
auuucaugucucuauggaugauguucu

SEQ ID NO: 40768 - RNA, 27 nt, Artificial Sequence
  Description of Artificial Sequence: Synthetic oligonucleotide
uggagaaauauauuguuggauuucaug

SEQ ID NO: 40769 - RNA, 27 nt, Artificial Sequence
  Description of Artificial Sequence: Synthetic oligonucleotide
agccuucauggagaaauauauuguugg

SEQ ID NO: 40770 - RNA, 27 nt, Artificial Sequence
  Description of Artificial Sequence: Synthetic oligonucleotide
accacuccagcgugacuuuacuguugc

SEQ ID NO: 40771 - RNA, 27 nt, Artificial Sequence
  Description of Artificial Sequence: Synthetic oligonucleotide
ccucucuuccuuuacuuucuucacaca

SEQ ID NO: 40772 - RNA, 27 nt, Artificial Sequence
  Description of Artificial Sequence: Synthetic oligonucleotide
gcccgaugcaaggauggcucggaagcg

SEQ ID NO: 40773 - RNA, 27 nt, Artificial Sequence
  Description of Artificial Sequence: Synthetic oligonucleotide
cacaguaggauauucaaccuccauuuc

SEQ ID NO: 40774 - RNA, 27 nt, Artificial Sequence
  Description of Artificial Sequence: Synthetic oligonucleotide
uuacacaguaggauauucaaccuccau

SEQ ID NO: 40775 - RNA, 27 nt, Artificial Sequence
  Description of Artificial Sequence: Synthetic oligonucleotide
uacacuacaagggaaaacucaaaaucu

SEQ ID NO: 40776 - RNA, 27 nt, Artificial Sequence
  Description of Artificial Sequence: Synthetic oligonucleotide
caaucaacaaagaacaaacaggauaaa

SEQ ID NO: 40777 - RNA, 27 nt, Artificial Sequence
  Description of Artificial Sequence: Synthetic oligonucleotide
uuucaaucaacaaagaacaaacaggau

SEQ ID NO: 40778 - RNA, 27 nt, Artificial Sequence
  Description of Artificial Sequence: Synthetic oligonucleotide
auggaagaaaaagaaggcuguagagaa

SEQ ID NO: 40779 - RNA, 27 nt, Artificial Sequence
  Description of Artificial Sequence: Synthetic oligonucleotide
uagaaggaagauuagcuauggaagaaa

SEQ ID NO: 40780 - RNA, 27 nt, Artificial Sequence
  Description of Artificial Sequence: Synthetic oligonucleotide
augaagcauucaacaggaagauuauuu

SEQ ID NO: 40781 - RNA, 27 nt, Artificial Sequence
  Description of Artificial Sequence: Synthetic oligonucleotide
caugaagcauucaacaggaagauuauu

SEQ ID NO: 40782 - RNA, 27 nt, Artificial Sequence
  Description of Artificial Sequence: Synthetic oligonucleotide
ucaaaguagaauucaagucaugaagca

SEQ ID NO: 40783 - RNA, 27 nt, Artificial Sequence
  Description of Artificial Sequence: Synthetic oligonucleotide
gucuguaguugcuucucucccucuuag

SEQ ID NO: 40784 - RNA, 27 nt, Artificial Sequence
  Description of Artificial Sequence: Synthetic oligonucleotide
guugaccuuggucugguaggagacggc

SEQ ID NO: 40785 - RNA, 27 nt, Artificial Sequence
  Description of Artificial Sequence: Synthetic oligonucleotide
gucgagauagucgggccgauugaucuc

SEQ ID NO: 40786 - RNA, 27 nt, Artificial Sequence
  Description of Artificial Sequence: Synthetic oligonucleotide
guuugggaagguuggauguucguccuc

SEQ ID NO: 40787 - RNA, 27 nt, Artificial Sequence
  Description of Artificial Sequence: Synthetic oligonucleotide
aguucuaagcuuggguuccgacccuaa

SEQ ID NO: 40788 - RNA, 27 nt, Artificial Sequence
  Description of Artificial Sequence: Synthetic oligonucleotide
uuaaaguucuaagcuuggguuccgacc

SEQ ID NO: 40789 - RNA, 27 nt, Artificial Sequence
  Description of Artificial Sequence: Synthetic oligonucleotide
guugcuuaaaguucuaagcuuggguuc

SEQ ID NO: 40790 - RNA, 27 nt, Artificial Sequence
  Description of Artificial Sequence: Synthetic oligonucleotide
gugguggucuuguugcuuaaaguucua

SEQ ID NO: 40791 - RNA, 27 nt, Artificial Sequence
  Description of Artificial Sequence: Synthetic oligonucleotide
acuuuauuucucgccacugaauaguag

SEQ ID NO: 40792 - RNA, 27 nt, Artificial Sequence
  Description of Artificial Sequence: Synthetic oligonucleotide
aacuuuauuucucgccacugaauagua

SEQ ID NO: 40793 - RNA, 27 nt, Artificial Sequence
  Description of Artificial Sequence: Synthetic oligonucleotide
ggaucauuuccuguuaucuguguuugu

SEQ ID NO: 40794 - RNA, 27 nt, Artificial Sequence
  Description of Artificial Sequence: Synthetic oligonucleotide
guuucauuucuucucuuuucuuaaggc

SEQ ID NO: 40795 - RNA, 27 nt, Artificial Sequence
  Description of Artificial Sequence: Synthetic oligonucleotide
ggaggauggaaacacacuccuucaguu

SEQ ID NO: 40796 - RNA, 27 nt, Artificial Sequence
  Description of Artificial Sequence: Synthetic oligonucleotide
ucaaagauuuucagucccgcggugaca

SEQ ID NO: 40797 - RNA, 27 nt, Artificial Sequence
  Description of Artificial Sequence: Synthetic oligonucleotide
ccugaacggcacgcuuauuucugcugu

SEQ ID NO: 40798 - RNA, 27 nt, Artificial Sequence
  Description of Artificial Sequence: Synthetic oligonucleotide
cuucuggacccugaacggcacgcuuau

SEQ ID NO: 40799 - RNA, 27 nt, Artificial Sequence
  Description of Artificial Sequence: Synthetic oligonucleotide
caagcagucuugagugacuguuucuuc

SEQ ID NO: 40800 - RNA, 27 nt, Artificial Sequence
  Description of Artificial Sequence: Synthetic oligonucleotide
ccaaagacauggaccuucuuccucuga

SEQ ID NO: 40801 - RNA, 27 nt, Artificial Sequence
  Description of Artificial Sequence: Synthetic oligonucleotide
guguuucaggcauauuuugaauacauc

SEQ ID NO: 40802 - RNA, 27 nt, Artificial Sequence
  Description of Artificial Sequence: Synthetic oligonucleotide
gagguacagagaaagggaggaaaauag

SEQ ID NO: 40803 - RNA, 27 nt, Artificial Sequence
  Description of Artificial Sequence: Synthetic oligonucleotide
ucuugucuugcucuaucuuucuuuggu

SEQ ID NO: 40804 - RNA, 27 nt, Artificial Sequence
  Description of Artificial Sequence: Synthetic oligonucleotide
uuucuugucuugcucuaucuuucuuug

SEQ ID NO: 40805 - RNA, 27 nt, Artificial Sequence
  Description of Artificial Sequence: Synthetic oligonucleotide
ggaucuuguacaaacaaaugcuuucuc

SEQ ID NO: 40806 - RNA, 27 nt, Artificial Sequence
  Description of Artificial Sequence: Synthetic oligonucleotide
ucugcaaguacguucguuuaacucaag

SEQ ID NO: 40807 - RNA, 27 nt, Artificial Sequence
  Description of Artificial Sequence: Synthetic oligonucleotide
ucuguaucgaucguucuguaucagucu

SEQ ID NO: 40808 - RNA, 27 nt, Artificial Sequence
  Description of Artificial Sequence: Synthetic oligonucleotide
auuuauuuuuauauauauauaauauau

SEQ ID NO: 40809 - RNA, 27 nt, Artificial Sequence
  Description of Artificial Sequence: Synthetic oligonucleotide
auauuuauuuuuauauauauauaauau

SEQ ID NO: 40810 - RNA, 27 nt, Artificial Sequence
  Description of Artificial Sequence: Synthetic oligonucleotide
cacagcagucaaauacauccagugaag

SEQ ID NO: 40811 - RNA, 27 nt, Artificial Sequence
  Description of Artificial Sequence: Synthetic oligonucleotide
gucucucaucuccuccucuucccuguc

SEQ ID NO: 40812 - RNA, 27 nt, Artificial Sequence
  Description of Artificial Sequence: Synthetic oligonucleotide
ccaagugggacaaaaaaaagaucaugc

SEQ ID NO: 40813 - RNA, 14 nt, Artificial Sequence
  Description of Artificial Sequence: Synthetic oligonucleotide
guauuuugaugagg

SEQ ID NO: 40814 - RNA, 12 nt, Artificial Sequence
  Description of Artificial Sequence: Synthetic oligonucleotide
ggcccagaugau

SEQ ID NO: 40815 - RNA, 14 nt, Artificial Sequence
  Description of Artificial Sequence: Synthetic oligonucleotide
gggaagaaaacuau

SEQ ID NO: 40816 - RNA, 15 nt, Artificial Sequence
  Description of Artificial Sequence: Synthetic oligonucleotide
guuuuaauuuauuuc

SEQ ID NO: 40817 - RNA, 12 nt, Artificial Sequence
  Description of Artificial Sequence: Synthetic oligonucleotide
acguagggaaau

SEQ ID NO: 40818 - RNA, 12 nt, Artificial Sequence
  Description of Artificial Sequence: Synthetic oligonucleotide
ccaggguuuacc

SEQ ID NO: 40819 - RNA, 11 nt, Artificial Sequence
  Description of Artificial Sequence: Synthetic oligonucleotide
agcaagguuua

SEQ ID NO: 40820 - RNA, 12 nt, Artificial Sequence
  Description of Artificial Sequence: Synthetic oligonucleotide
uguauuauguug

SEQ ID NO: 40821 - RNA, 15 nt, Artificial Sequence
  Description of Artificial Sequence: Synthetic oligonucleotide
uuuuaaucuuuguga

SEQ ID NO: 40822 - RNA, 14 nt, Artificial Sequence
  Description of Artificial Sequence: Synthetic oligonucleotide
uuaaucuuugugac

SEQ ID NO: 40823 - RNA, 13 nt, Artificial Sequence
  Description of Artificial Sequence: Synthetic oligonucleotide
gcugcuuaugucu

SEQ ID NO: 40824 - RNA, 14 nt, Artificial Sequence
  Description of Artificial Sequence: Synthetic oligonucleotide
aaguguuucagaag

SEQ ID NO: 40825 - RNA, 13 nt, Artificial Sequence
  Description of Artificial Sequence: Synthetic oligonucleotide
gaccaucaauaag

SEQ ID NO: 40826 - RNA, 13 nt, Artificial Sequence
  Description of Artificial Sequence: Synthetic oligonucleotide
ccaucaauaagga

SEQ ID NO: 40827 - RNA, 14 nt, Artificial Sequence
  Description of Artificial Sequence: Synthetic oligonucleotide
ucaauaaggaagaa

SEQ ID NO: 40828 - RNA, 14 nt, Artificial Sequence
  Description of Artificial Sequence: Synthetic oligonucleotide
aauaaggaagaagc

SEQ ID NO: 40829 - RNA, 13 nt, Artificial Sequence
  Description of Artificial Sequence: Synthetic oligonucleotide
aggaagaagcccu

SEQ ID NO: 40830 - RNA, 13 nt, Artificial Sequence
  Description of Artificial Sequence: Synthetic oligonucleotide
gcauaacuaaagg

SEQ ID NO: 40831 - RNA, 14 nt, Artificial Sequence
  Description of Artificial Sequence: Synthetic oligonucleotide
cauaacuaaaggug

SEQ ID NO: 40832 - RNA, 12 nt, Artificial Sequence
  Description of Artificial Sequence: Synthetic oligonucleotide
cuacaucacgcc

SEQ ID NO: 40833 - RNA, 12 nt, Artificial Sequence
  Description of Artificial Sequence: Synthetic oligonucleotide
acuggauuuaag

SEQ ID NO: 40834 - RNA, 12 nt, Artificial Sequence
  Description of Artificial Sequence: Synthetic oligonucleotide
cuggauuuaagc

SEQ ID NO: 40835 - RNA, 13 nt, Artificial Sequence
  Description of Artificial Sequence: Synthetic oligonucleotide
gauuuaagcagag

SEQ ID NO: 40836 - RNA, 13 nt, Artificial Sequence
  Description of Artificial Sequence: Synthetic oligonucleotide
auuuaagcagagu

SEQ ID NO: 40837 - RNA, 13 nt, Artificial Sequence
  Description of Artificial Sequence: Synthetic oligonucleotide
uuaagcagaguuc

SEQ ID NO: 40838 - RNA, 13 nt, Artificial Sequence
  Description of Artificial Sequence: Synthetic oligonucleotide
uaagcagaguuca

SEQ ID NO: 40839 - RNA, 14 nt, Artificial Sequence
  Description of Artificial Sequence: Synthetic oligonucleotide
agcagaguucaaaa

SEQ ID NO: 40840 - RNA, 12 nt, Artificial Sequence
  Description of Artificial Sequence: Synthetic oligonucleotide
cucagggucuga

SEQ ID NO: 40841 - RNA, 13 nt, Artificial Sequence
  Description of Artificial Sequence: Synthetic oligonucleotide
caagcaacuacau

SEQ ID NO: 40842 - RNA, 12 nt, Artificial Sequence
  Description of Artificial Sequence: Synthetic oligonucleotide
aucaauggcagc

SEQ ID NO: 40843 - RNA, 11 nt, Artificial Sequence
  Description of Artificial Sequence: Synthetic oligonucleotide
uuccagcccac

SEQ ID NO: 40844 - RNA, 12 nt, Artificial Sequence
  Description of Artificial Sequence: Synthetic oligonucleotide
cagcugagaaug

SEQ ID NO: 40845 - RNA, 13 nt, Artificial Sequence
  Description of Artificial Sequence: Synthetic oligonucleotide
aacguaucuccua

SEQ ID NO: 40846 - RNA, 14 nt, Artificial Sequence
  Description of Artificial Sequence: Synthetic oligonucleotide
ccuaaaauaauuuc

SEQ ID NO: 40847 - RNA, 13 nt, Artificial Sequence
  Description of Artificial Sequence: Synthetic oligonucleotide
uggaagauucagc

SEQ ID NO: 40848 - RNA, 12 nt, Artificial Sequence
  Description of Artificial Sequence: Synthetic oligonucleotide
uuaaacucuccu

SEQ ID NO: 40849 - RNA, 12 nt, Artificial Sequence
  Description of Artificial Sequence: Synthetic oligonucleotide
cagccuacaguu

SEQ ID NO: 40850 - RNA, 13 nt, Artificial Sequence
  Description of Artificial Sequence: Synthetic oligonucleotide
guuauguucaguc

SEQ ID NO: 40851 - RNA, 13 nt, Artificial Sequence
  Description of Artificial Sequence: Synthetic oligonucleotide
cacauacaaaaug

SEQ ID NO: 40852 - RNA, 9 nt, Artificial Sequence
  Description of Artificial Sequence: Synthetic oligonucleotide
uccuuuugc

SEQ ID NO: 40853 - RNA, 12 nt, Artificial Sequence
  Description of Artificial Sequence: Synthetic oligonucleotide
ugaccugugaag

SEQ ID NO: 40854 - RNA, 12 nt, Artificial Sequence
  Description of Artificial Sequence: Synthetic oligonucleotide
cuaucucacaca

SEQ ID NO: 40855 - RNA, 13 nt, Artificial Sequence
  Description of Artificial Sequence: Synthetic oligonucleotide
uguccucaauugu

SEQ ID NO: 40856 - RNA, 12 nt, Artificial Sequence
  Description of Artificial Sequence: Synthetic oligonucleotide
aaaccguagcug

SEQ ID NO: 40857 - RNA, 12 nt, Artificial Sequence
  Description of Artificial Sequence: Synthetic oligonucleotide
uagcuggcaagc

SEQ ID NO: 40858 - RNA, 14 nt, Artificial Sequence
  Description of Artificial Sequence: Synthetic oligonucleotide
uuguaugguuaaaa

SEQ ID NO: 40859 - RNA, 14 nt, Artificial Sequence
  Description of Artificial Sequence: Synthetic oligonucleotide
ugguuaaaagaugg

SEQ ID NO: 40860 - RNA, 13 nt, Artificial Sequence
  Description of Artificial Sequence: Synthetic oligonucleotide
cagggaauuauac

SEQ ID NO: 40861 - RNA, 12 nt, Artificial Sequence
  Description of Artificial Sequence: Synthetic oligonucleotide
acaaucuugcug

SEQ ID NO: 40862 - RNA, 13 nt, Artificial Sequence
  Description of Artificial Sequence: Synthetic oligonucleotide
ccaauaaugaaga

SEQ ID NO: 40863 - RNA, 13 nt, Artificial Sequence
  Description of Artificial Sequence: Synthetic oligonucleotide
acuuuggauguuc

SEQ ID NO: 40864 - RNA, 12 nt, Artificial Sequence
  Description of Artificial Sequence: Synthetic oligonucleotide
aaugcuuccacu

SEQ ID NO: 40865 - RNA, 11 nt, Artificial Sequence
  Description of Artificial Sequence: Synthetic oligonucleotide
gagaaaguuug

SEQ ID NO: 40866 - RNA, 11 nt, Artificial Sequence
  Description of Artificial Sequence: Synthetic oligonucleotide
aaagaacuacu

SEQ ID NO: 40867 - RNA, 12 nt, Artificial Sequence
  Description of Artificial Sequence: Synthetic oligonucleotide
uuagaaauacgg

SEQ ID NO: 40868 - RNA, 12 nt, Artificial Sequence
  Description of Artificial Sequence: Synthetic oligonucleotide
aacauggguaca

SEQ ID NO: 40869 - RNA, 14 nt, Artificial Sequence
  Description of Artificial Sequence: Synthetic oligonucleotide
aaagacacagaaga

SEQ ID NO: 40870 - RNA, 11 nt, Artificial Sequence
  Description of Artificial Sequence: Synthetic oligonucleotide
uaguagggagg

SEQ ID NO: 40871 - RNA, 12 nt, Artificial Sequence
  Description of Artificial Sequence: Synthetic oligonucleotide
gccuucugcagc

SEQ ID NO: 40872 - RNA, 10 nt, Artificial Sequence
  Description of Artificial Sequence: Synthetic oligonucleotide
ggucugguac

SEQ ID NO: 40873 - RNA, 12 nt, Artificial Sequence
  Description of Artificial Sequence: Synthetic oligonucleotide
cuaguccuuccg

SEQ ID NO: 40874 - RNA, 12 nt, Artificial Sequence
  Description of Artificial Sequence: Synthetic oligonucleotide
ccagugaauauu

SEQ ID NO: 40875 - RNA, 13 nt, Artificial Sequence
  Description of Artificial Sequence: Synthetic oligonucleotide
augaauucaaguu

SEQ ID NO: 40876 - RNA, 12 nt, Artificial Sequence
  Description of Artificial Sequence: Synthetic oligonucleotide
caggacacagau

SEQ ID NO: 40877 - RNA, 12 nt, Artificial Sequence
  Description of Artificial Sequence: Synthetic oligonucleotide
cucaaagcacag

SEQ ID NO: 40878 - RNA, 10 nt, Artificial Sequence
  Description of Artificial Sequence: Synthetic oligonucleotide
accacugcca

SEQ ID NO: 40879 - RNA, 13 nt, Artificial Sequence
  Description of Artificial Sequence: Synthetic oligonucleotide
gaaacuacuagug

SEQ ID NO: 40880 - RNA, 12 nt, Artificial Sequence
  Description of Artificial Sequence: Synthetic oligonucleotide
aagucggacagc

SEQ ID NO: 40881 - RNA, 13 nt, Artificial Sequence
  Description of Artificial Sequence: Synthetic oligonucleotide
gaaagcgaaaaau

SEQ ID NO: 40882 - RNA, 13 nt, Artificial Sequence
  Description of Artificial Sequence: Synthetic oligonucleotide
cccucugauuuag

SEQ ID NO: 40883 - RNA, 12 nt, Artificial Sequence
  Description of Artificial Sequence: Synthetic oligonucleotide
ugagcuauuuaa

SEQ ID NO: 40884 - RNA, 13 nt, Artificial Sequence
  Description of Artificial Sequence: Synthetic oligonucleotide
aaaaggugaaaaa

SEQ ID NO: 40885 - RNA, 14 nt, Artificial Sequence
  Description of Artificial Sequence: Synthetic oligonucleotide
gaaaaagcacuauu

SEQ ID NO: 40886 - RNA, 12 nt, Artificial Sequence
  Description of Artificial Sequence: Synthetic oligonucleotide
ggcugaaaagaa

SEQ ID NO: 40887 - RNA, 12 nt, Artificial Sequence
  Description of Artificial Sequence: Synthetic oligonucleotide
uaaacccuuaua

SEQ ID NO: 40888 - RNA, 13 nt, Artificial Sequence
  Description of Artificial Sequence: Synthetic oligonucleotide
cauacuauuagcc

SEQ ID NO: 40889 - RNA, 12 nt, Artificial Sequence
  Description of Artificial Sequence: Synthetic oligonucleotide
gacagaagcauu

SEQ ID NO: 40890 - RNA, 14 nt, Artificial Sequence
  Description of Artificial Sequence: Synthetic oligonucleotide
agagcaaauaagau

SEQ ID NO: 40891 - RNA, 14 nt, Artificial Sequence
  Description of Artificial Sequence: Synthetic oligonucleotide
ccaacauuuuucuc

SEQ ID NO: 40892 - RNA, 15 nt, Artificial Sequence
  Description of Artificial Sequence: Synthetic oligonucleotide
uuaaguaugagaaaa

SEQ ID NO: 40893 - RNA, 14 nt, Artificial Sequence
  Description of Artificial Sequence: Synthetic oligonucleotide
caggaauaaagaug

SEQ ID NO: 40894 - RNA, 13 nt, Artificial Sequence
  Description of Artificial Sequence: Synthetic oligonucleotide
aauuugaaugacc

SEQ ID NO: 40895 - RNA, 14 nt, Artificial Sequence
  Description of Artificial Sequence: Synthetic oligonucleotide
auguauaaagauag

SEQ ID NO: 40896 - RNA, 12 nt, Artificial Sequence
  Description of Artificial Sequence: Synthetic oligonucleotide
ggcuguaacuau

SEQ ID NO: 40897 - RNA, 11 nt, Artificial Sequence
  Description of Artificial Sequence: Synthetic oligonucleotide
ucugugaagug

SEQ ID NO: 40898 - RNA, 14 nt, Artificial Sequence
  Description of Artificial Sequence: Synthetic oligonucleotide
ccuuuaaggaaaug

SEQ ID NO: 40899 - RNA, 13 nt, Artificial Sequence
  Description of Artificial Sequence: Synthetic oligonucleotide
aaggauacaaaaa

SEQ ID NO: 40900 - RNA, 12 nt, Artificial Sequence
  Description of Artificial Sequence: Synthetic oligonucleotide
agaugcaauuug

SEQ ID NO: 40901 - RNA, 12 nt, Artificial Sequence
  Description of Artificial Sequence: Synthetic oligonucleotide
guucaaaacgaa

SEQ ID NO: 40902 - RNA, 11 nt, Artificial Sequence
  Description of Artificial Sequence: Synthetic oligonucleotide
gugaaaccuca

SEQ ID NO: 40903 - RNA, 13 nt, Artificial Sequence
  Description of Artificial Sequence: Synthetic oligonucleotide
acgaaagagaagc

SEQ ID NO: 40904 - RNA, 12 nt, Artificial Sequence
  Description of Artificial Sequence: Synthetic oligonucleotide
cuccacaagcgc

SEQ ID NO: 40905 - RNA, 14 nt, Artificial Sequence
  Description of Artificial Sequence: Synthetic oligonucleotide
gagaagauuccaaa

SEQ ID NO: 40906 - RNA, 13 nt, Artificial Sequence
  Description of Artificial Sequence: Synthetic oligonucleotide
aaucuggauucaa

SEQ ID NO: 40907 - RNA, 13 nt, Artificial Sequence
  Description of Artificial Sequence: Synthetic oligonucleotide
agaacagauuuga

SEQ ID NO: 40908 - RNA, 11 nt, Artificial Sequence
  Description of Artificial Sequence: Synthetic oligonucleotide
ccagagcugug

SEQ ID NO: 40909 - RNA, 12 nt, Artificial Sequence
  Description of Artificial Sequence: Synthetic oligonucleotide
ccucagauuguu

SEQ ID NO: 40910 - RNA, 12 nt, Artificial Sequence
  Description of Artificial Sequence: Synthetic oligonucleotide
cuauuuuaauua

SEQ ID NO: 40911 - RNA, 13 nt, Artificial Sequence
  Description of Artificial Sequence: Synthetic oligonucleotide
uuuaauuuauuaa

SEQ ID NO: 40912 - RNA, 12 nt, Artificial Sequence
  Description of Artificial Sequence: Synthetic oligonucleotide
augcaguuugaa

SEQ ID NO: 40913 - RNA, 11 nt, Artificial Sequence
  Description of Artificial Sequence: Synthetic oligonucleotide
caugcugcugg

SEQ ID NO: 40914 - RNA, 13 nt, Artificial Sequence
  Description of Artificial Sequence: Synthetic oligonucleotide
agaugugcauuuc

SEQ ID NO: 40915 - RNA, 12 nt, Artificial Sequence
  Description of Artificial Sequence: Synthetic oligonucleotide
ucaaaaccugug

SEQ ID NO: 40916 - RNA, 11 nt, Artificial Sequence
  Description of Artificial Sequence: Synthetic oligonucleotide
gaaugugggua

SEQ ID NO: 40917 - RNA, 10 nt, Artificial Sequence
  Description of Artificial Sequence: Synthetic oligonucleotide
auguggguag

SEQ ID NO: 40918 - RNA, 13 nt, Artificial Sequence
  Description of Artificial Sequence: Synthetic oligonucleotide
ugaaaaugagcau

SEQ ID NO: 40919 - RNA, 13 nt, Artificial Sequence
  Description of Artificial Sequence: Synthetic oligonucleotide
uugcuuuucaugu

SEQ ID NO: 40920 - RNA, 12 nt, Artificial Sequence
  Description of Artificial Sequence: Synthetic oligonucleotide
uguauuucuaua

SEQ ID NO: 40921 - RNA, 13 nt, Artificial Sequence
  Description of Artificial Sequence: Synthetic oligonucleotide
uuugauuaauguu

SEQ ID NO: 40922 - RNA, 12 nt, Artificial Sequence
  Description of Artificial Sequence: Synthetic oligonucleotide
caacguguauag

SEQ ID NO: 40923 - RNA, 12 nt, Artificial Sequence
  Description of Artificial Sequence: Synthetic oligonucleotide
cauauccuuggc

SEQ ID NO: 40924 - RNA, 13 nt, Artificial Sequence
  Description of Artificial Sequence: Synthetic oligonucleotide
uacuaacaucugg

SEQ ID NO: 40925 - RNA, 11 nt, Artificial Sequence
  Description of Artificial Sequence: Synthetic oligonucleotide
cauaaguugug

SEQ ID NO: 40926 - RNA, 12 nt, Artificial Sequence
  Description of Artificial Sequence: Synthetic oligonucleotide
gcaucauuuugg

SEQ ID NO: 40927 - RNA, 10 nt, Artificial Sequence
  Description of Artificial Sequence: Synthetic oligonucleotide
gcucuucuua

SEQ ID NO: 40928 - RNA, 10 nt, Artificial Sequence
  Description of Artificial Sequence: Synthetic oligonucleotide
agauuagguc

SEQ ID NO: 40929 - RNA, 12 nt, Artificial Sequence
  Description of Artificial Sequence: Synthetic oligonucleotide
auggaauugaaa

SEQ ID NO: 40930 - RNA, 13 nt, Artificial Sequence
  Description of Artificial Sequence: Synthetic oligonucleotide
cacacucauuccu

SEQ ID NO: 40931 - RNA, 12 nt, Artificial Sequence
  Description of Artificial Sequence: Synthetic oligonucleotide
uguagagguaac

SEQ ID NO: 40932 - RNA, 11 nt, Artificial Sequence
  Description of Artificial Sequence: Synthetic oligonucleotide
caaccacaugc

SEQ ID NO: 40933 - RNA, 12 nt, Artificial Sequence
  Description of Artificial Sequence: Synthetic oligonucleotide
ucggaaacaagu

SEQ ID NO: 40934 - RNA, 11 nt, Artificial Sequence
  Description of Artificial Sequence: Synthetic oligonucleotide
acucccaauaa

SEQ ID NO: 40935 - RNA, 13 nt, Artificial Sequence
  Description of Artificial Sequence: Synthetic oligonucleotide
aaugcuaagaaau

SEQ ID NO: 40936 - RNA, 11 nt, Artificial Sequence
  Description of Artificial Sequence: Synthetic oligonucleotide
gucuuucucua

SEQ ID NO: 40937 - RNA, 11 nt, Artificial Sequence
  Description of Artificial Sequence: Synthetic oligonucleotide
ugaauuucagg

SEQ ID NO: 40938 - RNA, 13 nt, Artificial Sequence
  Description of Artificial Sequence: Synthetic oligonucleotide
cgauucccucuca

SEQ ID NO: 40939 - RNA, 11 nt, Artificial Sequence
  Description of Artificial Sequence: Synthetic oligonucleotide
aggaaagugaa

SEQ ID NO: 40940 - RNA, 12 nt, Artificial Sequence
  Description of Artificial Sequence: Synthetic oligonucleotide
gaggcugcaugc

SEQ ID NO: 40941 - RNA, 11 nt, Artificial Sequence
  Description of Artificial Sequence: Synthetic oligonucleotide
ucucugaacag

SEQ ID NO: 40942 - RNA, 12 nt, Artificial Sequence
  Description of Artificial Sequence: Synthetic oligonucleotide
aacuuggcugua

SEQ ID NO: 40943 - RNA, 12 nt, Artificial Sequence
  Description of Artificial Sequence: Synthetic oligonucleotide
agaagccaaaau

SEQ ID NO: 40944 - RNA, 14 nt, Artificial Sequence
  Description of Artificial Sequence: Synthetic oligonucleotide
auuaaaagaagucc

SEQ ID NO: 40945 - RNA, 14 nt, Artificial Sequence
  Description of Artificial Sequence: Synthetic oligonucleotide
gaauccggauuauc

SEQ ID NO: 40946 - RNA, 12 nt, Artificial Sequence
  Description of Artificial Sequence: Synthetic oligonucleotide
aaugugacauca

SEQ ID NO: 40947 - RNA, 13 nt, Artificial Sequence
  Description of Artificial Sequence: Synthetic oligonucleotide
caucaaagcaagu

SEQ ID NO: 40948 - RNA, 11 nt, Artificial Sequence
  Description of Artificial Sequence: Synthetic oligonucleotide
agagagagaaa

SEQ ID NO: 40949 - RNA, 13 nt, Artificial Sequence
  Description of Artificial Sequence: Synthetic oligonucleotide
ucgcuguaguauu

SEQ ID NO: 40950 - RNA, 14 nt, Artificial Sequence
  Description of Artificial Sequence: Synthetic oligonucleotide
cgcuguaguauuua

SEQ ID NO: 40951 - RNA, 13 nt, Artificial Sequence
  Description of Artificial Sequence: Synthetic oligonucleotide
auuuaagcccaua

SEQ ID NO: 40952 - RNA, 15 nt, Artificial Sequence
  Description of Artificial Sequence: Synthetic oligonucleotide
auuaaaauaaacaug

SEQ ID NO: 40953 - RNA, 12 nt, Artificial Sequence
  Description of Artificial Sequence: Synthetic oligonucleotide
cuguucugaucg

SEQ ID NO: 40954 - RNA, 16 nt, Artificial Sequence
  Description of Artificial Sequence: Synthetic oligonucleotide
aaauaauuugaacuuu

SEQ ID NO: 40955 - RNA, 12 nt, Artificial Sequence
  Description of Artificial Sequence: Synthetic oligonucleotide
ugcgaccuuaau

SEQ ID NO: 40956 - RNA, 11 nt, Artificial Sequence
  Description of Artificial Sequence: Synthetic oligonucleotide
cugagaaagcu

SEQ ID NO: 40957 - RNA, 13 nt, Artificial Sequence
  Description of Artificial Sequence: Synthetic oligonucleotide
aguaaagaugcua

SEQ ID NO: 40958 - RNA, 12 nt, Artificial Sequence
  Description of Artificial Sequence: Synthetic oligonucleotide
cugcuuaauugc

SEQ ID NO: 40959 - RNA, 14 nt, Artificial Sequence
  Description of Artificial Sequence: Synthetic oligonucleotide
uaccauaugaauga

SEQ ID NO: 40960 - RNA, 12 nt, Artificial Sequence
  Description of Artificial Sequence: Synthetic oligonucleotide
aacuuucuuauc

SEQ ID NO: 40961 - RNA, 13 nt, Artificial Sequence
  Description of Artificial Sequence: Synthetic oligonucleotide
ccuugcaugacau

SEQ ID NO: 40962 - RNA, 14 nt, Artificial Sequence
  Description of Artificial Sequence: Synthetic oligonucleotide
ugaauuuguauaug

SEQ ID NO: 40963 - RNA, 12 nt, Artificial Sequence
  Description of Artificial Sequence: Synthetic oligonucleotide
gaauccuaguag

SEQ ID NO: 40964 - RNA, 10 nt, Artificial Sequence
  Description of Artificial Sequence: Synthetic oligonucleotide
gaaagggaag

SEQ ID NO: 40965 - RNA, 11 nt, Artificial Sequence
  Description of Artificial Sequence: Synthetic oligonucleotide
uaucggcaugc

SEQ ID NO: 40966 - RNA, 12 nt, Artificial Sequence
  Description of Artificial Sequence: Synthetic oligonucleotide
caccucauagua

SEQ ID NO: 40967 - RNA, 11 nt, Artificial Sequence
  Description of Artificial Sequence: Synthetic oligonucleotide
ccagaauugcc

SEQ ID NO: 40968 - RNA, 11 nt, Artificial Sequence
  Description of Artificial Sequence: Synthetic oligonucleotide
uggugaucugg

SEQ ID NO: 40969 - RNA, 12 nt, Artificial Sequence
  Description of Artificial Sequence: Synthetic oligonucleotide
gaucuggguaau

SEQ ID NO: 40970 - RNA, 12 nt, Artificial Sequence
  Description of Artificial Sequence: Synthetic oligonucleotide
ggaugugaugaa

SEQ ID NO: 40971 - RNA, 12 nt, Artificial Sequence
  Description of Artificial Sequence: Synthetic oligonucleotide
cauuuccacagc

SEQ ID NO: 40972 - RNA, 11 nt, Artificial Sequence
  Description of Artificial Sequence: Synthetic oligonucleotide
acagcuacacc

SEQ ID NO: 40973 - RNA, 12 nt, Artificial Sequence
  Description of Artificial Sequence: Synthetic oligonucleotide
ugcaguucuuac

SEQ ID NO: 40974 - RNA, 12 nt, Artificial Sequence
  Description of Artificial Sequence: Synthetic oligonucleotide
acgagaagaaga

SEQ ID NO: 40975 - RNA, 12 nt, Artificial Sequence
  Description of Artificial Sequence: Synthetic oligonucleotide
cgagaagaagau

SEQ ID NO: 40976 - RNA, 15 nt, Artificial Sequence
  Description of Artificial Sequence: Synthetic oligonucleotide
aagaagaucauuuac

SEQ ID NO: 40977 - RNA, 11 nt, Artificial Sequence
  Description of Artificial Sequence: Synthetic oligonucleotide
agaggaagagg

SEQ ID NO: 40978 - RNA, 12 nt, Artificial Sequence
  Description of Artificial Sequence: Synthetic oligonucleotide
gaggaagaggug

SEQ ID NO: 40979 - RNA, 13 nt, Artificial Sequence
  Description of Artificial Sequence: Synthetic oligonucleotide
cuacuuugagggc

SEQ ID NO: 40980 - RNA, 12 nt, Artificial Sequence
  Description of Artificial Sequence: Synthetic oligonucleotide
agggcaucuccu

SEQ ID NO: 40981 - RNA, 10 nt, Artificial Sequence
  Description of Artificial Sequence: Synthetic oligonucleotide
ggagugauau

SEQ ID NO: 40982 - RNA, 11 nt, Artificial Sequence
  Description of Artificial Sequence: Synthetic oligonucleotide
gagugauaugg

SEQ ID NO: 40983 - RNA, 12 nt, Artificial Sequence
  Description of Artificial Sequence: Synthetic oligonucleotide
ugcaguaaagau

SEQ ID NO: 40984 - RNA, 13 nt, Artificial Sequence
  Description of Artificial Sequence: Synthetic oligonucleotide
aguaaagauccua

SEQ ID NO: 40985 - RNA, 12 nt, Artificial Sequence
  Description of Artificial Sequence: Synthetic oligonucleotide
ugacaaaggaca

SEQ ID NO: 40986 - RNA, 13 nt, Artificial Sequence
  Description of Artificial Sequence: Synthetic oligonucleotide
gcaauugugaccc

SEQ ID NO: 40987 - RNA, 12 nt, Artificial Sequence
  Description of Artificial Sequence: Synthetic oligonucleotide
aacaucauccau

SEQ ID NO: 40988 - RNA, 12 nt, Artificial Sequence
  Description of Artificial Sequence: Synthetic oligonucleotide
ugaaauccaaca

SEQ ID NO: 40989 - RNA, 15 nt, Artificial Sequence
  Description of Artificial Sequence: Synthetic oligonucleotide
aacaauauauuucuc

SEQ ID NO: 40990 - RNA, 14 nt, Artificial Sequence
  Description of Artificial Sequence: Synthetic oligonucleotide
aacaguaaagucac

SEQ ID NO: 40991 - RNA, 14 nt, Artificial Sequence
  Description of Artificial Sequence: Synthetic oligonucleotide
ugugaagaaaguaa

SEQ ID NO: 40992 - RNA, 13 nt, Artificial Sequence
  Description of Artificial Sequence: Synthetic oligonucleotide
cuuccgagccauc

SEQ ID NO: 40993 - RNA, 12 nt, Artificial Sequence
  Description of Artificial Sequence: Synthetic oligonucleotide
aauggagguuga

SEQ ID NO: 40994 - RNA, 12 nt, Artificial Sequence
  Description of Artificial Sequence: Synthetic oligonucleotide
ggagguugaaua

SEQ ID NO: 40995 - RNA, 13 nt, Artificial Sequence
  Description of Artificial Sequence: Synthetic oligonucleotide
auuuugaguuuuc

SEQ ID NO: 40996 - RNA, 12 nt, Artificial Sequence
  Description of Artificial Sequence: Synthetic oligonucleotide
uauccuguuugu

SEQ ID NO: 40997 - RNA, 11 nt, Artificial Sequence
  Description of Artificial Sequence: Synthetic oligonucleotide
ccuguuuguuc

SEQ ID NO: 40998 - RNA, 10 nt, Artificial Sequence
  Description of Artificial Sequence: Synthetic oligonucleotide
cucuacagcc

SEQ ID NO: 40999 - RNA, 12 nt, Artificial Sequence
  Description of Artificial Sequence: Synthetic oligonucleotide
ucuuccauagcu

SEQ ID NO: 41000 - RNA, 12 nt, Artificial Sequence
  Description of Artificial Sequence: Synthetic oligonucleotide
auaaucuuccug

SEQ ID NO: 41001 - RNA, 12 nt, Artificial Sequence
  Description of Artificial Sequence: Synthetic oligonucleotide
uaaucuuccugu

SEQ ID NO: 41002 - RNA, 12 nt, Artificial Sequence
  Description of Artificial Sequence: Synthetic oligonucleotide
cuucaugacuug

SEQ ID NO: 41003 - RNA, 12 nt, Artificial Sequence
  Description of Artificial Sequence: Synthetic oligonucleotide
aagagggagaga

SEQ ID NO: 41004 - RNA, 12 nt, Artificial Sequence
  Description of Artificial Sequence: Synthetic oligonucleotide
cgucuccuacca

SEQ ID NO: 41005 - RNA, 12 nt, Artificial Sequence
  Description of Artificial Sequence: Synthetic oligonucleotide
gaucaaucggcc

SEQ ID NO: 41006 - RNA, 12 nt, Artificial Sequence
  Description of Artificial Sequence: Synthetic oligonucleotide
ggacgaacaucc

SEQ ID NO: 41007 - RNA, 11 nt, Artificial Sequence
  Description of Artificial Sequence: Synthetic oligonucleotide
agggucggaac

SEQ ID NO: 41008 - RNA, 10 nt, Artificial Sequence
  Description of Artificial Sequence: Synthetic oligonucleotide
ucggaaccca

SEQ ID NO: 41009 - RNA, 11 nt, Artificial Sequence
  Description of Artificial Sequence: Synthetic oligonucleotide
acccaagcuua

SEQ ID NO: 41010 - RNA, 14 nt, Artificial Sequence
  Description of Artificial Sequence: Synthetic oligonucleotide
gaacuuuaagcaac

SEQ ID NO: 41011 - RNA, 11 nt, Artificial Sequence
  Description of Artificial Sequence: Synthetic oligonucleotide
acuauucagug

SEQ ID NO: 41012 - RNA, 11 nt, Artificial Sequence
  Description of Artificial Sequence: Synthetic oligonucleotide
cuauucagugg

SEQ ID NO: 41013 - RNA, 13 nt, Artificial Sequence
  Description of Artificial Sequence: Synthetic oligonucleotide
aaacacagauaac

SEQ ID NO: 41014 - RNA, 12 nt, Artificial Sequence
  Description of Artificial Sequence: Synthetic oligonucleotide
cuuaagaaaaga

SEQ ID NO: 41015 - RNA, 12 nt, Artificial Sequence
  Description of Artificial Sequence: Synthetic oligonucleotide
cugaaggagugu

SEQ ID NO: 41016 - RNA, 10 nt, Artificial Sequence
  Description of Artificial Sequence: Synthetic oligonucleotide
ucaccgcggg

SEQ ID NO: 41017 - RNA, 14 nt, Artificial Sequence
  Description of Artificial Sequence: Synthetic oligonucleotide
agcagaaauaagcg

SEQ ID NO: 41018 - RNA, 12 nt, Artificial Sequence
  Description of Artificial Sequence: Synthetic oligonucleotide
aagcgugccguu

SEQ ID NO: 41019 - RNA, 12 nt, Artificial Sequence
  Description of Artificial Sequence: Synthetic oligonucleotide
agaaacagucac

SEQ ID NO: 41020 - RNA, 12 nt, Artificial Sequence
  Description of Artificial Sequence: Synthetic oligonucleotide
agaggaagaagg

SEQ ID NO: 41021 - RNA, 14 nt, Artificial Sequence
  Description of Artificial Sequence: Synthetic oligonucleotide
uguauucaaaauau

SEQ ID NO: 41022 - RNA, 13 nt, Artificial Sequence
  Description of Artificial Sequence: Synthetic oligonucleotide
auuuuccucccuu

SEQ ID NO: 41023 - RNA, 13 nt, Artificial Sequence
  Description of Artificial Sequence: Synthetic oligonucleotide
caaagaaagauag

SEQ ID NO: 41024 - RNA, 12 nt, Artificial Sequence
  Description of Artificial Sequence: Synthetic oligonucleotide
aagaaagauaga

SEQ ID NO: 41025 - RNA, 13 nt, Artificial Sequence
  Description of Artificial Sequence: Synthetic oligonucleotide
gaaagcauuuguu

SEQ ID NO: 41026 - RNA, 13 nt, Artificial Sequence
  Description of Artificial Sequence: Synthetic oligonucleotide
ugaguuaaacgaa

SEQ ID NO: 41027 - RNA, 12 nt, Artificial Sequence
  Description of Artificial Sequence: Synthetic oligonucleotide
acugauacagaa

SEQ ID NO: 41028 - RNA, 12 nt, Artificial Sequence
  Description of Artificial Sequence: Synthetic oligonucleotide
auauuauauaua

SEQ ID NO: 41029 - RNA, 12 nt, Artificial Sequence
  Description of Artificial Sequence: Synthetic oligonucleotide
auuauauauaua

SEQ ID NO: 41030 - RNA, 12 nt, Artificial Sequence
  Description of Artificial Sequence: Synthetic oligonucleotide
ucacuggaugua

SEQ ID NO: 41031 - RNA, 12 nt, Artificial Sequence
  Description of Artificial Sequence: Synthetic oligonucleotide
cagggaagagga

SEQ ID NO: 41032 - RNA, 15 nt, Artificial Sequence
  Description of Artificial Sequence: Synthetic oligonucleotide
augaucuuuuuuuug

SEQ ID NO: 41033 - RNA, 11 nt, Artificial Sequence
  Description of Artificial Sequence: Synthetic oligonucleotide
aguucacggcc

SEQ ID NO: 41034 - RNA, 13 nt, Artificial Sequence
  Description of Artificial Sequence: Synthetic oligonucleotide
caccaucacacca

SEQ ID NO: 41035 - RNA, 11 nt, Artificial Sequence
  Description of Artificial Sequence: Synthetic oligonucleotide
ccugcggguuu

SEQ ID NO: 41036 - RNA, 10 nt, Artificial Sequence
  Description of Artificial Sequence: Synthetic oligonucleotide
auccaguuug

SEQ ID NO: 41037 - RNA, 13 nt, Artificial Sequence
  Description of Artificial Sequence: Synthetic oligonucleotide
guuaaggacuucu

SEQ ID NO: 41038 - RNA, 13 nt, Artificial Sequence
  Description of Artificial Sequence: Synthetic oligonucleotide
cagugggacagag

SEQ ID NO: 41039 - RNA, 14 nt, Artificial Sequence
  Description of Artificial Sequence: Synthetic oligonucleotide
aauuuguuauugug

SEQ ID NO: 41040 - RNA, 13 nt, Artificial Sequence
  Description of Artificial Sequence: Synthetic oligonucleotide
uucaaaugcauuu

SEQ ID NO: 41041 - RNA, 10 nt, Artificial Sequence
  Description of Artificial Sequence: Synthetic oligonucleotide
caggaaagcc

SEQ ID NO: 41042 - RNA, 11 nt, Artificial Sequence
  Description of Artificial Sequence: Synthetic oligonucleotide
aggaaagcccu

SEQ ID NO: 41043 - RNA, 12 nt, Artificial Sequence
  Description of Artificial Sequence: Synthetic oligonucleotide
cccagcauggcc

SEQ ID NO: 41044 - RNA, 11 nt, Artificial Sequence
  Description of Artificial Sequence: Synthetic oligonucleotide
cuucucccuga

SEQ ID NO: 41045 - RNA, 12 nt, Artificial Sequence
  Description of Artificial Sequence: Synthetic oligonucleotide
gaagaagcccuu

SEQ ID NO: 41046 - RNA, 12 nt, Artificial Sequence
  Description of Artificial Sequence: Synthetic oligonucleotide
agaagcccuuca

SEQ ID NO: 41047 - RNA, 11 nt, Artificial Sequence
  Description of Artificial Sequence: Synthetic oligonucleotide
gcccuucagcg

SEQ ID NO: 41048 - RNA, 11 nt, Artificial Sequence
  Description of Artificial Sequence: Synthetic oligonucleotide
ccuucagcggc

SEQ ID NO: 41049 - RNA, 12 nt, Artificial Sequence
  Description of Artificial Sequence: Synthetic oligonucleotide
ucagcggccagu

SEQ ID NO: 41050 - RNA, 12 nt, Artificial Sequence
  Description of Artificial Sequence: Synthetic oligonucleotide
ugaaaagcuccg

SEQ ID NO: 41051 - RNA, 11 nt, Artificial Sequence
  Description of Artificial Sequence: Synthetic oligonucleotide
aaaagcuccgg

SEQ ID NO: 41052 - RNA, 13 nt, Artificial Sequence
  Description of Artificial Sequence: Synthetic oligonucleotide
agucaacagucug

SEQ ID NO: 41053 - RNA, 13 nt, Artificial Sequence
  Description of Artificial Sequence: Synthetic oligonucleotide
cagaguucaaaag

SEQ ID NO: 41054 - RNA, 13 nt, Artificial Sequence
  Description of Artificial Sequence: Synthetic oligonucleotide
agaguucaaaagc

SEQ ID NO: 41055 - RNA, 12 nt, Artificial Sequence
  Description of Artificial Sequence: Synthetic oligonucleotide
uucaaaagcccu

SEQ ID NO: 41056 - RNA, 12 nt, Artificial Sequence
  Description of Artificial Sequence: Synthetic oligonucleotide
ucaaaagcccuu

SEQ ID NO: 41057 - RNA, 12 nt, Artificial Sequence
  Description of Artificial Sequence: Synthetic oligonucleotide
aaaagcccuuca

SEQ ID NO: 41058 - RNA, 12 nt, Artificial Sequence
  Description of Artificial Sequence: Synthetic oligonucleotide
aaagcccuucag

SEQ ID NO: 41059 - RNA, 13 nt, Artificial Sequence
  Description of Artificial Sequence: Synthetic oligonucleotide
gugaagccgcucg

SEQ ID NO: 41060 - RNA, 12 nt, Artificial Sequence
  Description of Artificial Sequence: Synthetic oligonucleotide
cacgccagucaa

SEQ ID NO: 41061 - RNA, 13 nt, Artificial Sequence
  Description of Artificial Sequence: Synthetic oligonucleotide
uucuuggugcgug

SEQ ID NO: 41062 - RNA, 14 nt, Artificial Sequence
  Description of Artificial Sequence: Synthetic oligonucleotide
auuggauucaucag

SEQ ID NO: 41063 - RNA, 13 nt, Artificial Sequence
  Description of Artificial Sequence: Synthetic oligonucleotide
uggaauaccuaag

SEQ ID NO: 41064 - RNA, 12 nt, Artificial Sequence
  Description of Artificial Sequence: Synthetic oligonucleotide
auuugaggcuca

SEQ ID NO: 41065 - RNA, 11 nt, Artificial Sequence
  Description of Artificial Sequence: Synthetic oligonucleotide
ucuacaauugg

SEQ ID NO: 41066 - RNA, 12 nt, Artificial Sequence
  Description of Artificial Sequence: Synthetic oligonucleotide
uaguuaggagcc

SEQ ID NO: 41067 - RNA, 13 nt, Artificial Sequence
  Description of Artificial Sequence: Synthetic oligonucleotide
agucaauauccac

SEQ ID NO: 41068 - RNA, 13 nt, Artificial Sequence
  Description of Artificial Sequence: Synthetic oligonucleotide
auguucagucaca

SEQ ID NO: 41069 - RNA, 12 nt, Artificial Sequence
  Description of Artificial Sequence: Synthetic oligonucleotide
acacacacauac

SEQ ID NO: 41070 - RNA, 12 nt, Artificial Sequence
  Description of Artificial Sequence: Synthetic oligonucleotide
uuccuuuugcuu

SEQ ID NO: 41071 - RNA, 16 nt, Artificial Sequence
  Description of Artificial Sequence: Synthetic oligonucleotide
uuuuaaaguaauuuuu

SEQ ID NO: 41072 - RNA, 13 nt, Artificial Sequence
  Description of Artificial Sequence: Synthetic oligonucleotide
caacagucaaugg

SEQ ID NO: 41073 - RNA, 13 nt, Artificial Sequence
  Description of Artificial Sequence: Synthetic oligonucleotide
ucgacaaaccaau

SEQ ID NO: 41074 - RNA, 12 nt, Artificial Sequence
  Description of Artificial Sequence: Synthetic oligonucleotide
acugcuaccacu

SEQ ID NO: 41075 - RNA, 13 nt, Artificial Sequence
  Description of Artificial Sequence: Synthetic oligonucleotide
gcaagcggucuua

SEQ ID NO: 41076 - RNA, 13 nt, Artificial Sequence
  Description of Artificial Sequence: Synthetic oligonucleotide
ggucuuaccggcu

SEQ ID NO: 41077 - RNA, 11 nt, Artificial Sequence
  Description of Artificial Sequence: Synthetic oligonucleotide
gauggguuacc

SEQ ID NO: 41078 - RNA, 11 nt, Artificial Sequence
  Description of Artificial Sequence: Synthetic oligonucleotide
guuaccugcga

SEQ ID NO: 41079 - RNA, 12 nt, Artificial Sequence
  Description of Artificial Sequence: Synthetic oligonucleotide
aaucuugcugag

SEQ ID NO: 41080 - RNA, 13 nt, Artificial Sequence
  Description of Artificial Sequence: Synthetic oligonucleotide
agcauaaaacagu

SEQ ID NO: 41081 - RNA, 12 nt, Artificial Sequence
  Description of Artificial Sequence: Synthetic oligonucleotide
guccuuuauccu

SEQ ID NO: 41082 - RNA, 12 nt, Artificial Sequence
  Description of Artificial Sequence: Synthetic oligonucleotide
caacgcaaguug

SEQ ID NO: 41083 - RNA, 13 nt, Artificial Sequence
  Description of Artificial Sequence: Synthetic oligonucleotide
aaacugaaaccau

SEQ ID NO: 41084 - RNA, 14 nt, Artificial Sequence
  Description of Artificial Sequence: Synthetic oligonucleotide
acuuuguuaaauau

SEQ ID NO: 41085 - RNA, 14 nt, Artificial Sequence
  Description of Artificial Sequence: Synthetic oligonucleotide
guauauuaaaaguu

SEQ ID NO: 41086 - RNA, 13 nt, Artificial Sequence
  Description of Artificial Sequence: Synthetic oligonucleotide
guuuugacuuaac

SEQ ID NO: 41087 - RNA, 13 nt, Artificial Sequence
  Description of Artificial Sequence: Synthetic oligonucleotide
gcaaacucagcac

SEQ ID NO: 41088 - RNA, 11 nt, Artificial Sequence
  Description of Artificial Sequence: Synthetic oligonucleotide
ugcugaccuca

SEQ ID NO: 41089 - RNA, 14 nt, Artificial Sequence
  Description of Artificial Sequence: Synthetic oligonucleotide
uuuauucagaucgc

SEQ ID NO: 41090 - RNA, 13 nt, Artificial Sequence
  Description of Artificial Sequence: Synthetic oligonucleotide
aggguucugggau

SEQ ID NO: 41091 - RNA, 15 nt, Artificial Sequence
  Description of Artificial Sequence: Synthetic oligonucleotide
auauuggaaauuaug

SEQ ID NO: 41092 - RNA, 13 nt, Artificial Sequence
  Description of Artificial Sequence: Synthetic oligonucleotide
auggaagcacuag

SEQ ID NO: 41093 - RNA, 13 nt, Artificial Sequence
  Description of Artificial Sequence: Synthetic oligonucleotide
guuuuuaugugga

SEQ ID NO: 41094 - RNA, 12 nt, Artificial Sequence
  Description of Artificial Sequence: Synthetic oligonucleotide
ggaauugguaga

SEQ ID NO: 41095 - RNA, 13 nt, Artificial Sequence
  Description of Artificial Sequence: Synthetic oligonucleotide
uuagacuuggaga

SEQ ID NO: 41096 - RNA, 13 nt, Artificial Sequence
  Description of Artificial Sequence: Synthetic oligonucleotide
uuacaguauucca

SEQ ID NO: 41097 - RNA, 15 nt, Artificial Sequence
  Description of Artificial Sequence: Synthetic oligonucleotide
ccacugaugaauuaa

SEQ ID NO: 41098 - RNA, 12 nt, Artificial Sequence
  Description of Artificial Sequence: Synthetic oligonucleotide
ccacaucaucac

SEQ ID NO: 41099 - RNA, 13 nt, Artificial Sequence
  Description of Artificial Sequence: Synthetic oligonucleotide
cucaccaaacaga

SEQ ID NO: 41100 - RNA, 12 nt, Artificial Sequence
  Description of Artificial Sequence: Synthetic oligonucleotide
ggaacaugaugg

SEQ ID NO: 41101 - RNA, 12 nt, Artificial Sequence
  Description of Artificial Sequence: Synthetic oligonucleotide
cauguagacugc

SEQ ID NO: 41102 - RNA, 13 nt, Artificial Sequence
  Description of Artificial Sequence: Synthetic oligonucleotide
ggaucuauuuaug

SEQ ID NO: 41103 - RNA, 12 nt, Artificial Sequence
  Description of Artificial Sequence: Synthetic oligonucleotide
gcacuauuauca

SEQ ID NO: 41104 - RNA, 11 nt, Artificial Sequence
  Description of Artificial Sequence: Synthetic oligonucleotide
aucaguucugc

SEQ ID NO: 41105 - RNA, 13 nt, Artificial Sequence
  Description of Artificial Sequence: Synthetic oligonucleotide
agauuaaaccuac

SEQ ID NO: 41106 - RNA, 13 nt, Artificial Sequence
  Description of Artificial Sequence: Synthetic oligonucleotide
auaaaauccuucu

SEQ ID NO: 41107 - RNA, 12 nt, Artificial Sequence
  Description of Artificial Sequence: Synthetic oligonucleotide
aaugcuguagac

SEQ ID NO: 41108 - RNA, 13 nt, Artificial Sequence
  Description of Artificial Sequence: Synthetic oligonucleotide
uugauaggaauag

SEQ ID NO: 41109 - RNA, 11 nt, Artificial Sequence
  Description of Artificial Sequence: Synthetic oligonucleotide
aauggcccuga

SEQ ID NO: 41110 - RNA, 11 nt, Artificial Sequence
  Description of Artificial Sequence: Synthetic oligonucleotide
uuccucaagca

SEQ ID NO: 41111 - RNA, 10 nt, Artificial Sequence
  Description of Artificial Sequence: Synthetic oligonucleotide
guucagccca

SEQ ID NO: 41112 - RNA, 11 nt, Artificial Sequence
  Description of Artificial Sequence: Synthetic oligonucleotide
gcugcugaacc

SEQ ID NO: 41113 - RNA, 12 nt, Artificial Sequence
  Description of Artificial Sequence: Synthetic oligonucleotide
aaguucucuuca

SEQ ID NO: 41114 - RNA, 11 nt, Artificial Sequence
  Description of Artificial Sequence: Synthetic oligonucleotide
ccagccuagag

SEQ ID NO: 41115 - RNA, 13 nt, Artificial Sequence
  Description of Artificial Sequence: Synthetic oligonucleotide
cucugugaagugu

SEQ ID NO: 41116 - RNA, 14 nt, Artificial Sequence
  Description of Artificial Sequence: Synthetic oligonucleotide
ugagaaaauuucaa

SEQ ID NO: 41117 - RNA, 11 nt, Artificial Sequence
  Description of Artificial Sequence: Synthetic oligonucleotide
aauccuccuga

SEQ ID NO: 41118 - RNA, 12 nt, Artificial Sequence
  Description of Artificial Sequence: Synthetic oligonucleotide
gugacaucauau

SEQ ID NO: 41119 - RNA, 13 nt, Artificial Sequence
  Description of Artificial Sequence: Synthetic oligonucleotide
aaucuucaucaua

SEQ ID NO: 41120 - RNA, 13 nt, Artificial Sequence
  Description of Artificial Sequence: Synthetic oligonucleotide
gacuagcuauuaa

SEQ ID NO: 41121 - RNA, 14 nt, Artificial Sequence
  Description of Artificial Sequence: Synthetic oligonucleotide
ucucuacuaaaaau

SEQ ID NO: 41122 - RNA, 12 nt, Artificial Sequence
  Description of Artificial Sequence: Synthetic oligonucleotide
ucuaucucgccu

SEQ ID NO: 41123 - RNA, 13 nt, Artificial Sequence
  Description of Artificial Sequence: Synthetic oligonucleotide
cuucgguccaguu

SEQ ID NO: 41124 - RNA, 11 nt, Artificial Sequence
  Description of Artificial Sequence: Synthetic oligonucleotide
gauguagccgc

SEQ ID NO: 41125 - RNA, 12 nt, Artificial Sequence
  Description of Artificial Sequence: Synthetic oligonucleotide
ugaggagacuug

SEQ ID NO: 41126 - RNA, 12 nt, Artificial Sequence
  Description of Artificial Sequence: Synthetic oligonucleotide
gaguagugagga

SEQ ID NO: 41127 - RNA, 14 nt, Artificial Sequence
  Description of Artificial Sequence: Synthetic oligonucleotide
cagaugaguacaaa

SEQ ID NO: 41128 - RNA, 13 nt, Artificial Sequence
  Description of Artificial Sequence: Synthetic oligonucleotide
guuguuaaugggc

SEQ ID NO: 41129 - RNA, 13 nt, Artificial Sequence
  Description of Artificial Sequence: Synthetic oligonucleotide
uuuuuaauuuauu

SEQ ID NO: 41130 - RNA, 12 nt, Artificial Sequence
  Description of Artificial Sequence: Synthetic oligonucleotide
uauuuaaauaug

SEQ ID NO: 41131 - RNA, 13 nt, Artificial Sequence
  Description of Artificial Sequence: Synthetic oligonucleotide
uauccuuuguuuc

SEQ ID NO: 41132 - RNA, 14 nt, Artificial Sequence
  Description of Artificial Sequence: Synthetic oligonucleotide
cgucuaaguguuug

SEQ ID NO: 41133 - RNA, 12 nt, Artificial Sequence
  Description of Artificial Sequence: Synthetic oligonucleotide
accugugacaaa

SEQ ID NO: 41134 - RNA, 13 nt, Artificial Sequence
  Description of Artificial Sequence: Synthetic oligonucleotide
ccaggcugaauua

SEQ ID NO: 41135 - RNA, 14 nt, Artificial Sequence
  Description of Artificial Sequence: Synthetic oligonucleotide
gucauucuuacaau

SEQ ID NO: 41136 - RNA, 15 nt, Artificial Sequence
  Description of Artificial Sequence: Synthetic oligonucleotide
ucauucuuacaauug

SEQ ID NO: 41137 - RNA, 12 nt, Artificial Sequence
  Description of Artificial Sequence: Synthetic oligonucleotide
cagagaguguac

SEQ ID NO: 41138 - RNA, 12 nt, Artificial Sequence
  Description of Artificial Sequence: Synthetic oligonucleotide
agaacucagcag

SEQ ID NO: 41139 - RNA, 13 nt, Artificial Sequence
  Description of Artificial Sequence: Synthetic oligonucleotide
uuuauuuucagua

SEQ ID NO: 41140 - RNA, 12 nt, Artificial Sequence
  Description of Artificial Sequence: Synthetic oligonucleotide
ucuuaaauggaa

SEQ ID NO: 41141 - RNA, 13 nt, Artificial Sequence
  Description of Artificial Sequence: Synthetic oligonucleotide
ugccuaaaauugu

SEQ ID NO: 41142 - RNA, 12 nt, Artificial Sequence
  Description of Artificial Sequence: Synthetic oligonucleotide
agacugugagcu

SEQ ID NO: 41143 - RNA, 14 nt, Artificial Sequence
  Description of Artificial Sequence: Synthetic oligonucleotide
ugcuuuuuauuaau

SEQ ID NO: 41144 - RNA, 13 nt, Artificial Sequence
  Description of Artificial Sequence: Synthetic oligonucleotide
cucuucuuacauu

SEQ ID NO: 41145 - RNA, 15 nt, Artificial Sequence
  Description of Artificial Sequence: Synthetic oligonucleotide
cauuuguaaaaaugu

SEQ ID NO: 41146 - RNA, 15 nt, Artificial Sequence
  Description of Artificial Sequence: Synthetic oligonucleotide
aucuuaauucauauu

SEQ ID NO: 41147 - RNA, 13 nt, Artificial Sequence
  Description of Artificial Sequence: Synthetic oligonucleotide
gaacuaaucauga

SEQ ID NO: 41148 - RNA, 12 nt, Artificial Sequence
  Description of Artificial Sequence: Synthetic oligonucleotide
ucugcucuuggg

SEQ ID NO: 41149 - RNA, 13 nt, Artificial Sequence
  Description of Artificial Sequence: Synthetic oligonucleotide
caguagcuuugag

SEQ ID NO: 41150 - RNA, 14 nt, Artificial Sequence
  Description of Artificial Sequence: Synthetic oligonucleotide
cacguaauauuuca

SEQ ID NO: 41151 - RNA, 13 nt, Artificial Sequence
  Description of Artificial Sequence: Synthetic oligonucleotide
uauucucuucacu

SEQ ID NO: 41152 - RNA, 14 nt, Artificial Sequence
  Description of Artificial Sequence: Synthetic oligonucleotide
cuaaugcuaagaaa

SEQ ID NO: 41153 - RNA, 12 nt, Artificial Sequence
  Description of Artificial Sequence: Synthetic oligonucleotide
gcugaaaaucaa

SEQ ID NO: 41154 - RNA, 14 nt, Artificial Sequence
  Description of Artificial Sequence: Synthetic oligonucleotide
aauaugauuacuuu

SEQ ID NO: 41155 - RNA, 14 nt, Artificial Sequence
  Description of Artificial Sequence: Synthetic oligonucleotide
cauuuuguucuaca

SEQ ID NO: 41156 - RNA, 12 nt, Artificial Sequence
  Description of Artificial Sequence: Synthetic oligonucleotide
cccgggacucuc

SEQ ID NO: 41157 - RNA, 14 nt, Artificial Sequence
  Description of Artificial Sequence: Synthetic oligonucleotide
ccuuuaaaguaaag

SEQ ID NO: 41158 - RNA, 13 nt, Artificial Sequence
  Description of Artificial Sequence: Synthetic oligonucleotide
ucuggaagccugg

SEQ ID NO: 41159 - RNA, 14 nt, Artificial Sequence
  Description of Artificial Sequence: Synthetic oligonucleotide
aaaacaaaagagag

SEQ ID NO: 41160 - RNA, 13 nt, Artificial Sequence
  Description of Artificial Sequence: Synthetic oligonucleotide
aucaguuaugccg

SEQ ID NO: 41161 - RNA, 13 nt, Artificial Sequence
  Description of Artificial Sequence: Synthetic oligonucleotide
uaaaagaagucca

SEQ ID NO: 41162 - RNA, 11 nt, Artificial Sequence
  Description of Artificial Sequence: Synthetic oligonucleotide
aggugagguua

SEQ ID NO: 41163 - RNA, 11 nt, Artificial Sequence
  Description of Artificial Sequence: Synthetic oligonucleotide
gggaagaggac

SEQ ID NO: 41164 - RNA, 13 nt, Artificial Sequence
  Description of Artificial Sequence: Synthetic oligonucleotide
aagcaaguauugu

SEQ ID NO: 41165 - RNA, 12 nt, Artificial Sequence
  Description of Artificial Sequence: Synthetic oligonucleotide
auuguagcacuc

SEQ ID NO: 41166 - RNA, 14 nt, Artificial Sequence
  Description of Artificial Sequence: Synthetic oligonucleotide
acaaaaccacaaau

SEQ ID NO: 41167 - RNA, 12 nt, Artificial Sequence
  Description of Artificial Sequence: Synthetic oligonucleotide
uaagcccauaca

SEQ ID NO: 41168 - RNA, 11 nt, Artificial Sequence
  Description of Artificial Sequence: Synthetic oligonucleotide
agcccauacag

SEQ ID NO: 41169 - RNA, 12 nt, Artificial Sequence
  Description of Artificial Sequence: Synthetic oligonucleotide
cagaaaccuucc

SEQ ID NO: 41170 - RNA, 10 nt, Artificial Sequence
  Description of Artificial Sequence: Synthetic oligonucleotide
guauaccuac

SEQ ID NO: 41171 - RNA, 13 nt, Artificial Sequence
  Description of Artificial Sequence: Synthetic oligonucleotide
gccaguuuucgga

SEQ ID NO: 41172 - RNA, 9 nt, Artificial Sequence
  Description of Artificial Sequence: Synthetic oligonucleotide
ggaacaggg

SEQ ID NO: 41173 - RNA, 13 nt, Artificial Sequence
  Description of Artificial Sequence: Synthetic oligonucleotide
uuaacuuuccagu

SEQ ID NO: 41174 - RNA, 14 nt, Artificial Sequence
  Description of Artificial Sequence: Synthetic oligonucleotide
aaaguuugguuuug

SEQ ID NO: 41175 - RNA, 12 nt, Artificial Sequence
  Description of Artificial Sequence: Synthetic oligonucleotide
cuucccacugua

SEQ ID NO: 41176 - RNA, 13 nt, Artificial Sequence
  Description of Artificial Sequence: Synthetic oligonucleotide
ugauaccauauga

SEQ ID NO: 41177 - RNA, 11 nt, Artificial Sequence
  Description of Artificial Sequence: Synthetic oligonucleotide
aacaugggcug

SEQ ID NO: 41178 - RNA, 13 nt, Artificial Sequence
  Description of Artificial Sequence: Synthetic oligonucleotide
caacuuuuucaua

SEQ ID NO: 41179 - RNA, 12 nt, Artificial Sequence
  Description of Artificial Sequence: Synthetic oligonucleotide
caugaggccgga

SEQ ID NO: 41180 - RNA, 11 nt, Artificial Sequence
  Description of Artificial Sequence: Synthetic oligonucleotide
acugcauuugu

SEQ ID NO: 41181 - RNA, 13 nt, Artificial Sequence
  Description of Artificial Sequence: Synthetic oligonucleotide
aauguuuacuacc

SEQ ID NO: 41182 - RNA, 15 nt, Artificial Sequence
  Description of Artificial Sequence: Synthetic oligonucleotide
aauuuuuugaugaaa

SEQ ID NO: 41183 - RNA, 14 nt, Artificial Sequence
  Description of Artificial Sequence: Synthetic oligonucleotide
cagugugugaauuu

SEQ ID NO: 41184 - RNA, 13 nt, Artificial Sequence
  Description of Artificial Sequence: Synthetic oligonucleotide
gagcaauguaugu

SEQ ID NO: 41185 - RNA, 14 nt, Artificial Sequence
  Description of Artificial Sequence: Synthetic oligonucleotide
aaagcacauauaua

SEQ ID NO: 41186 - RNA, 14 nt, Artificial Sequence
  Description of Artificial Sequence: Synthetic oligonucleotide
guaauaguuucucc

SEQ ID NO: 41187 - RNA, 13 nt, Artificial Sequence
  Description of Artificial Sequence: Synthetic oligonucleotide
aguuucuccaaau

SEQ ID NO: 41188 - RNA, 13 nt, Artificial Sequence
  Description of Artificial Sequence: Synthetic oligonucleotide
uacuuccuagaaa

SEQ ID NO: 41189 - RNA, 13 nt, Artificial Sequence
  Description of Artificial Sequence: Synthetic oligonucleotide
uacaccauauaug

SEQ ID NO: 41190 - RNA, 14 nt, Artificial Sequence
  Description of Artificial Sequence: Synthetic oligonucleotide
auauaugaauggag

SEQ ID NO: 41191 - RNA, 13 nt, Artificial Sequence
  Description of Artificial Sequence: Synthetic oligonucleotide
acgagaagaagau

SEQ ID NO: 41192 - RNA, 13 nt, Artificial Sequence
  Description of Artificial Sequence: Synthetic oligonucleotide
ucauuuacaggga

SEQ ID NO: 41193 - RNA, 13 nt, Artificial Sequence
  Description of Artificial Sequence: Synthetic oligonucleotide
cauuuacagggac

SEQ ID NO: 41194 - RNA, 10 nt, Artificial Sequence
  Description of Artificial Sequence: Synthetic oligonucleotide
agggaccuga

SEQ ID NO: 41195 - RNA, 14 nt, Artificial Sequence
  Description of Artificial Sequence: Synthetic oligonucleotide
uguuugacugcauc

SEQ ID NO: 41196 - RNA, 13 nt, Artificial Sequence
  Description of Artificial Sequence: Synthetic oligonucleotide
uuugacugcaucg

SEQ ID NO: 41197 - RNA, 12 nt, Artificial Sequence
  Description of Artificial Sequence: Synthetic oligonucleotide
gaguucacaggg

SEQ ID NO: 41198 - RNA, 13 nt, Artificial Sequence
  Description of Artificial Sequence: Synthetic oligonucleotide
ggcaccucugucc

SEQ ID NO: 41199 - RNA, 15 nt, Artificial Sequence
  Description of Artificial Sequence: Synthetic oligonucleotide
gguuugucuuuuuaa

SEQ ID NO: 41200 - RNA, 14 nt, Artificial Sequence
  Description of Artificial Sequence: Synthetic oligonucleotide
uuugucuuuuuaag

SEQ ID NO: 41201 - RNA, 13 nt, Artificial Sequence
  Description of Artificial Sequence: Synthetic oligonucleotide
ccuaaagguuguc

SEQ ID NO: 41202 - RNA, 12 nt, Artificial Sequence
  Description of Artificial Sequence: Synthetic oligonucleotide
aagguugucgac

SEQ ID NO: 41203 - RNA, 13 nt, Artificial Sequence
  Description of Artificial Sequence: Synthetic oligonucleotide
accuggcaauugu

SEQ ID NO: 41204 - RNA, 12 nt, Artificial Sequence
  Description of Artificial Sequence: Synthetic oligonucleotide
aguggugcgagg

SEQ ID NO: 41205 - RNA, 13 nt, Artificial Sequence
  Description of Artificial Sequence: Synthetic oligonucleotide
agagacaugaaau

SEQ ID NO: 41206 - RNA, 13 nt, Artificial Sequence
  Description of Artificial Sequence: Synthetic oligonucleotide
auauauuucucca

SEQ ID NO: 41207 - RNA, 10 nt, Artificial Sequence
  Description of Artificial Sequence: Synthetic oligonucleotide
caugaaggcu

SEQ ID NO: 41208 - RNA, 11 nt, Artificial Sequence
  Description of Artificial Sequence: Synthetic oligonucleotide
gcuggaguggu

SEQ ID NO: 41209 - RNA, 11 nt, Artificial Sequence
  Description of Artificial Sequence: Synthetic oligonucleotide
aggaagagagg

SEQ ID NO: 41210 - RNA, 12 nt, Artificial Sequence
  Description of Artificial Sequence: Synthetic oligonucleotide
cuugcaucgggc

SEQ ID NO: 41211 - RNA, 13 nt, Artificial Sequence
  Description of Artificial Sequence: Synthetic oligonucleotide
auauccuacugug

SEQ ID NO: 41212 - RNA, 13 nt, Artificial Sequence
  Description of Artificial Sequence: Synthetic oligonucleotide
uccuacuguguaa

SEQ ID NO: 41213 - RNA, 12 nt, Artificial Sequence
  Description of Artificial Sequence: Synthetic oligonucleotide
ccuuguagugua

SEQ ID NO: 41214 - RNA, 13 nt, Artificial Sequence
  Description of Artificial Sequence: Synthetic oligonucleotide
ucuuuguugauug

SEQ ID NO: 41215 - RNA, 14 nt, Artificial Sequence
  Description of Artificial Sequence: Synthetic oligonucleotide
uuuguugauugaaa

SEQ ID NO: 41216 - RNA, 15 nt, Artificial Sequence
  Description of Artificial Sequence: Synthetic oligonucleotide
uucuuuuucuuccau

SEQ ID NO: 41217 - RNA, 13 nt, Artificial Sequence
  Description of Artificial Sequence: Synthetic oligonucleotide
aaucuuccuucua

SEQ ID NO: 41218 - RNA, 13 nt, Artificial Sequence
  Description of Artificial Sequence: Synthetic oligonucleotide
uugaaugcuucau

SEQ ID NO: 41219 - RNA, 13 nt, Artificial Sequence
  Description of Artificial Sequence: Synthetic oligonucleotide
ugaaugcuucaug

SEQ ID NO: 41220 - RNA, 13 nt, Artificial Sequence
  Description of Artificial Sequence: Synthetic oligonucleotide
aauucuacuuuga

SEQ ID NO: 41221 - RNA, 13 nt, Artificial Sequence
  Description of Artificial Sequence: Synthetic oligonucleotide
agcaacuacagac

SEQ ID NO: 41222 - RNA, 13 nt, Artificial Sequence
  Description of Artificial Sequence: Synthetic oligonucleotide
gaccaaggucaac

SEQ ID NO: 41223 - RNA, 13 nt, Artificial Sequence
  Description of Artificial Sequence: Synthetic oligonucleotide
cgacuaucucgac

SEQ ID NO: 41224 - RNA, 13 nt, Artificial Sequence
  Description of Artificial Sequence: Synthetic oligonucleotide
aaccuucccaaac

SEQ ID NO: 41225 - RNA, 14 nt, Artificial Sequence
  Description of Artificial Sequence: Synthetic oligonucleotide
ccaagcuuagaacu

SEQ ID NO: 41226 - RNA, 15 nt, Artificial Sequence
  Description of Artificial Sequence: Synthetic oligonucleotide
agcuuagaacuuuaa

SEQ ID NO: 41227 - RNA, 11 nt, Artificial Sequence
  Description of Artificial Sequence: Synthetic oligonucleotide
aagaccaccac

SEQ ID NO: 41228 - RNA, 14 nt, Artificial Sequence
  Description of Artificial Sequence: Synthetic oligonucleotide
gcgagaaauaaagu

SEQ ID NO: 41229 - RNA, 14 nt, Artificial Sequence
  Description of Artificial Sequence: Synthetic oligonucleotide
cgagaaauaaaguu

SEQ ID NO: 41230 - RNA, 12 nt, Artificial Sequence
  Description of Artificial Sequence: Synthetic oligonucleotide
aggaaaugaucc

SEQ ID NO: 41231 - RNA, 13 nt, Artificial Sequence
  Description of Artificial Sequence: Synthetic oligonucleotide
gaagaaaugaaac

SEQ ID NO: 41232 - RNA, 13 nt, Artificial Sequence
  Description of Artificial Sequence: Synthetic oligonucleotide
guuuccauccucc

SEQ ID NO: 41233 - RNA, 15 nt, Artificial Sequence
  Description of Artificial Sequence: Synthetic oligonucleotide
acugaaaaucuuuga

SEQ ID NO: 41234 - RNA, 11 nt, Artificial Sequence
  Description of Artificial Sequence: Synthetic oligonucleotide
ugccguucagg

SEQ ID NO: 41235 - RNA, 13 nt, Artificial Sequence
  Description of Artificial Sequence: Synthetic oligonucleotide
caggguccagaag

SEQ ID NO: 41236 - RNA, 13 nt, Artificial Sequence
  Description of Artificial Sequence: Synthetic oligonucleotide
ucaagacugcuug

SEQ ID NO: 41237 - RNA, 13 nt, Artificial Sequence
  Description of Artificial Sequence: Synthetic oligonucleotide
uccaugucuuugg

SEQ ID NO: 41238 - RNA, 11 nt, Artificial Sequence
  Description of Artificial Sequence: Synthetic oligonucleotide
gccugaaacac

SEQ ID NO: 41239 - RNA, 12 nt, Artificial Sequence
  Description of Artificial Sequence: Synthetic oligonucleotide
ucucuguaccuc

SEQ ID NO: 41240 - RNA, 12 nt, Artificial Sequence
  Description of Artificial Sequence: Synthetic oligonucleotide
agcaagacaaga

SEQ ID NO: 41241 - RNA, 13 nt, Artificial Sequence
  Description of Artificial Sequence: Synthetic oligonucleotide
gcaagacaagaaa

SEQ ID NO: 41242 - RNA, 12 nt, Artificial Sequence
  Description of Artificial Sequence: Synthetic oligonucleotide
uguacaagaucc

SEQ ID NO: 41243 - RNA, 12 nt, Artificial Sequence
  Description of Artificial Sequence: Synthetic oligonucleotide
cguacuugcaga

SEQ ID NO: 41244 - RNA, 13 nt, Artificial Sequence
  Description of Artificial Sequence: Synthetic oligonucleotide
cgaucgauacaga

SEQ ID NO: 41245 - RNA, 13 nt, Artificial Sequence
  Description of Artificial Sequence: Synthetic oligonucleotide
uauaaaaauaaau

SEQ ID NO: 41246 - RNA, 13 nt, Artificial Sequence
  Description of Artificial Sequence: Synthetic oligonucleotide
uaaaaauaaauau

SEQ ID NO: 41247 - RNA, 13 nt, Artificial Sequence
  Description of Artificial Sequence: Synthetic oligonucleotide
uuugacugcugug

SEQ ID NO: 41248 - RNA, 13 nt, Artificial Sequence
  Description of Artificial Sequence: Synthetic oligonucleotide
ggagaugagagac

SEQ ID NO: 41249 - RNA, 10 nt, Artificial Sequence
  Description of Artificial Sequence: Synthetic oligonucleotide
ucccacuugg

SEQ ID NO: 41250 - RNA, 10 nt, Artificial Sequence
  Description of Artificial Sequence: Synthetic oligonucleotide
guucacggcc

SEQ ID NO: 41251 - RNA, 12 nt, Artificial Sequence
  Description of Artificial Sequence: Synthetic oligonucleotide
accaucacacca

SEQ ID NO: 41252 - RNA, 10 nt, Artificial Sequence
  Description of Artificial Sequence: Synthetic oligonucleotide
cugcggguuu

SEQ ID NO: 41253 - RNA, 9 nt, Artificial Sequence
  Description of Artificial Sequence: Synthetic oligonucleotide
uccaguuug

SEQ ID NO: 41254 - RNA, 12 nt, Artificial Sequence
  Description of Artificial Sequence: Synthetic oligonucleotide
uuaaggacuucu

SEQ ID NO: 41255 - RNA, 12 nt, Artificial Sequence
  Description of Artificial Sequence: Synthetic oligonucleotide
agugggacagag

SEQ ID NO: 41256 - RNA, 13 nt, Artificial Sequence
  Description of Artificial Sequence: Synthetic oligonucleotide
auuuguuauugug

SEQ ID NO: 41257 - RNA, 12 nt, Artificial Sequence
  Description of Artificial Sequence: Synthetic oligonucleotide
ucaaaugcauuu

SEQ ID NO: 41258 - RNA, 9 nt, Artificial Sequence
  Description of Artificial Sequence: Synthetic oligonucleotide
aggaaagcc

SEQ ID NO: 41259 - RNA, 10 nt, Artificial Sequence
  Description of Artificial Sequence: Synthetic oligonucleotide
ggaaagcccu

SEQ ID NO: 41260 - RNA, 11 nt, Artificial Sequence
  Description of Artificial Sequence: Synthetic oligonucleotide
ccagcauggcc

SEQ ID NO: 41261 - RNA, 10 nt, Artificial Sequence
  Description of Artificial Sequence: Synthetic oligonucleotide
uucucccuga

SEQ ID NO: 41262 - RNA, 11 nt, Artificial Sequence
  Description of Artificial Sequence: Synthetic oligonucleotide
aagaagcccuu

SEQ ID NO: 41263 - RNA, 11 nt, Artificial Sequence
  Description of Artificial Sequence: Synthetic oligonucleotide
gaagcccuuca

SEQ ID NO: 41264 - RNA, 10 nt, Artificial Sequence
  Description of Artificial Sequence: Synthetic oligonucleotide
cccuucagcg

SEQ ID NO: 41265 - RNA, 10 nt, Artificial Sequence
  Description of Artificial Sequence: Synthetic oligonucleotide
cuucagcggc

SEQ ID NO: 41266 - RNA, 11 nt, Artificial Sequence
  Description of Artificial Sequence: Synthetic oligonucleotide
cagcggccagu

SEQ ID NO: 41267 - RNA, 11 nt, Artificial Sequence
  Description of Artificial Sequence: Synthetic oligonucleotide
gaaaagcuccg

SEQ ID NO: 41268 - RNA, 10 nt, Artificial Sequence
  Description of Artificial Sequence: Synthetic oligonucleotide
aaagcuccgg

SEQ ID NO: 41269 - RNA, 12 nt, Artificial Sequence
  Description of Artificial Sequence: Synthetic oligonucleotide
gucaacagucug

SEQ ID NO: 41270 - RNA, 12 nt, Artificial Sequence
  Description of Artificial Sequence: Synthetic oligonucleotide
agaguucaaaag

SEQ ID NO: 41271 - RNA, 12 nt, Artificial Sequence
  Description of Artificial Sequence: Synthetic oligonucleotide
gaguucaaaagc

SEQ ID NO: 41272 - RNA, 11 nt, Artificial Sequence
  Description of Artificial Sequence: Synthetic oligonucleotide
ucaaaagcccu

SEQ ID NO: 41273 - RNA, 11 nt, Artificial Sequence
  Description of Artificial Sequence: Synthetic oligonucleotide
caaaagcccuu

SEQ ID NO: 41274 - RNA, 11 nt, Artificial Sequence
  Description of Artificial Sequence: Synthetic oligonucleotide
aaagcccuuca

SEQ ID NO: 41275 - RNA, 11 nt, Artificial Sequence
  Description of Artificial Sequence: Synthetic oligonucleotide
aagcccuucag

SEQ ID NO: 41276 - RNA, 12 nt, Artificial Sequence
  Description of Artificial Sequence: Synthetic oligonucleotide
ugaagccgcucg

SEQ ID NO: 41277 - RNA, 11 nt, Artificial Sequence
  Description of Artificial Sequence: Synthetic oligonucleotide
acgccagucaa

SEQ ID NO: 41278 - RNA, 12 nt, Artificial Sequence
  Description of Artificial Sequence: Synthetic oligonucleotide
ucuuggugcgug

SEQ ID NO: 41279 - RNA, 13 nt, Artificial Sequence
  Description of Artificial Sequence: Synthetic oligonucleotide
uuggauucaucag

SEQ ID NO: 41280 - RNA, 12 nt, Artificial Sequence
  Description of Artificial Sequence: Synthetic oligonucleotide
ggaauaccuaag

SEQ ID NO: 41281 - RNA, 11 nt, Artificial Sequence
  Description of Artificial Sequence: Synthetic oligonucleotide
uuugaggcuca

SEQ ID NO: 41282 - RNA, 10 nt, Artificial Sequence
  Description of Artificial Sequence: Synthetic oligonucleotide
cuacaauugg

SEQ ID NO: 41283 - RNA, 11 nt, Artificial Sequence
  Description of Artificial Sequence: Synthetic oligonucleotide
aguuaggagcc

SEQ ID NO: 41284 - RNA, 12 nt, Artificial Sequence
  Description of Artificial Sequence: Synthetic oligonucleotide
gucaauauccac

SEQ ID NO: 41285 - RNA, 12 nt, Artificial Sequence
  Description of Artificial Sequence: Synthetic oligonucleotide
uguucagucaca

SEQ ID NO: 41286 - RNA, 11 nt, Artificial Sequence
  Description of Artificial Sequence: Synthetic oligonucleotide
cacacacauac

SEQ ID NO: 41287 - RNA, 11 nt, Artificial Sequence
  Description of Artificial Sequence: Synthetic oligonucleotide
uccuuuugcuu

SEQ ID NO: 41288 - RNA, 15 nt, Artificial Sequence
  Description of Artificial Sequence: Synthetic oligonucleotide
uuuaaaguaauuuuu

SEQ ID NO: 41289 - RNA, 12 nt, Artificial Sequence
  Description of Artificial Sequence: Synthetic oligonucleotide
aacagucaaugg

SEQ ID NO: 41290 - RNA, 12 nt, Artificial Sequence
  Description of Artificial Sequence: Synthetic oligonucleotide
cgacaaaccaau

SEQ ID NO: 41291 - RNA, 11 nt, Artificial Sequence
  Description of Artificial Sequence: Synthetic oligonucleotide
cugcuaccacu

SEQ ID NO: 41292 - RNA, 12 nt, Artificial Sequence
  Description of Artificial Sequence: Synthetic oligonucleotide
caagcggucuua

SEQ ID NO: 41293 - RNA, 12 nt, Artificial Sequence
  Description of Artificial Sequence: Synthetic oligonucleotide
gucuuaccggcu

SEQ ID NO: 41294 - RNA, 10 nt, Artificial Sequence
  Description of Artificial Sequence: Synthetic oligonucleotide
auggguuacc

SEQ ID NO: 41295 - RNA, 10 nt, Artificial Sequence
  Description of Artificial Sequence: Synthetic oligonucleotide
uuaccugcga

SEQ ID NO: 41296 - RNA, 11 nt, Artificial Sequence
  Description of Artificial Sequence: Synthetic oligonucleotide
aucuugcugag

SEQ ID NO: 41297 - RNA, 12 nt, Artificial Sequence
  Description of Artificial Sequence: Synthetic oligonucleotide
gcauaaaacagu

SEQ ID NO: 41298 - RNA, 11 nt, Artificial Sequence
  Description of Artificial Sequence: Synthetic oligonucleotide
uccuuuauccu

SEQ ID NO: 41299 - RNA, 11 nt, Artificial Sequence
  Description of Artificial Sequence: Synthetic oligonucleotide
aacgcaaguug

SEQ ID NO: 41300 - RNA, 12 nt, Artificial Sequence
  Description of Artificial Sequence: Synthetic oligonucleotide
aacugaaaccau

SEQ ID NO: 41301 - RNA, 13 nt, Artificial Sequence
  Description of Artificial Sequence: Synthetic oligonucleotide
cuuuguuaaauau

SEQ ID NO: 41302 - RNA, 13 nt, Artificial Sequence
  Description of Artificial Sequence: Synthetic oligonucleotide
uauauuaaaaguu

SEQ ID NO: 41303 - RNA, 12 nt, Artificial Sequence
  Description of Artificial Sequence: Synthetic oligonucleotide
uuuugacuuaac

SEQ ID NO: 41304 - RNA, 12 nt, Artificial Sequence
  Description of Artificial Sequence: Synthetic oligonucleotide
caaacucagcac

SEQ ID NO: 41305 - RNA, 10 nt, Artificial Sequence
  Description of Artificial Sequence: Synthetic oligonucleotide
gcugaccuca

SEQ ID NO: 41306 - RNA, 13 nt, Artificial Sequence
  Description of Artificial Sequence: Synthetic oligonucleotide
uuauucagaucgc

SEQ ID NO: 41307 - RNA, 12 nt, Artificial Sequence
  Description of Artificial Sequence: Synthetic oligonucleotide
ggguucugggau

SEQ ID NO: 41308 - RNA, 14 nt, Artificial Sequence
  Description of Artificial Sequence: Synthetic oligonucleotide
uauuggaaauuaug

SEQ ID NO: 41309 - RNA, 12 nt, Artificial Sequence
  Description of Artificial Sequence: Synthetic oligonucleotide
uggaagcacuag

SEQ ID NO: 41310 - RNA, 12 nt, Artificial Sequence
  Description of Artificial Sequence: Synthetic oligonucleotide
uuuuuaugugga

SEQ ID NO: 41311 - RNA, 11 nt, Artificial Sequence
  Description of Artificial Sequence: Synthetic oligonucleotide
gaauugguaga

SEQ ID NO: 41312 - RNA, 12 nt, Artificial Sequence
  Description of Artificial Sequence: Synthetic oligonucleotide
uagacuuggaga

SEQ ID NO: 41313 - RNA, 12 nt, Artificial Sequence
  Description of Artificial Sequence: Synthetic oligonucleotide
uacaguauucca

SEQ ID NO: 41314 - RNA, 14 nt, Artificial Sequence
  Description of Artificial Sequence: Synthetic oligonucleotide
cacugaugaauuaa

SEQ ID NO: 41315 - RNA, 11 nt, Artificial Sequence
  Description of Artificial Sequence: Synthetic oligonucleotide
cacaucaucac

SEQ ID NO: 41316 - RNA, 12 nt, Artificial Sequence
  Description of Artificial Sequence: Synthetic oligonucleotide
ucaccaaacaga

SEQ ID NO: 41317 - RNA, 11 nt, Artificial Sequence
  Description of Artificial Sequence: Synthetic oligonucleotide
gaacaugaugg

SEQ ID NO: 41318 - RNA, 11 nt, Artificial Sequence
  Description of Artificial Sequence: Synthetic oligonucleotide
auguagacugc

SEQ ID NO: 41319 - RNA, 12 nt, Artificial Sequence
  Description of Artificial Sequence: Synthetic oligonucleotide
gaucuauuuaug

SEQ ID NO: 41320 - RNA, 11 nt, Artificial Sequence
  Description of Artificial Sequence: Synthetic oligonucleotide
cacuauuauca

SEQ ID NO: 41321 - RNA, 10 nt, Artificial Sequence
  Description of Artificial Sequence: Synthetic oligonucleotide
ucaguucugc

SEQ ID NO: 41322 - RNA, 12 nt, Artificial Sequence
  Description of Artificial Sequence: Synthetic oligonucleotide
gauuaaaccuac

SEQ ID NO: 41323 - RNA, 12 nt, Artificial Sequence
  Description of Artificial Sequence: Synthetic oligonucleotide
uaaaauccuucu

SEQ ID NO: 41324 - RNA, 11 nt, Artificial Sequence
  Description of Artificial Sequence: Synthetic oligonucleotide
augcuguagac

SEQ ID NO: 41325 - RNA, 12 nt, Artificial Sequence
  Description of Artificial Sequence: Synthetic oligonucleotide
ugauaggaauag

SEQ ID NO: 41326 - RNA, 10 nt, Artificial Sequence
  Description of Artificial Sequence: Synthetic oligonucleotide
auggcccuga

SEQ ID NO: 41327 - RNA, 10 nt, Artificial Sequence
  Description of Artificial Sequence: Synthetic oligonucleotide
uccucaagca

SEQ ID NO: 41328 - RNA, 9 nt, Artificial Sequence
  Description of Artificial Sequence: Synthetic oligonucleotide
uucagccca

SEQ ID NO: 41329 - RNA, 10 nt, Artificial Sequence
  Description of Artificial Sequence: Synthetic oligonucleotide
cugcugaacc

SEQ ID NO: 41330 - RNA, 11 nt, Artificial Sequence
  Description of Artificial Sequence: Synthetic oligonucleotide
aguucucuuca

SEQ ID NO: 41331 - RNA, 10 nt, Artificial Sequence
  Description of Artificial Sequence: Synthetic oligonucleotide
cagccuagag

SEQ ID NO: 41332 - RNA, 12 nt, Artificial Sequence
  Description of Artificial Sequence: Synthetic oligonucleotide
ucugugaagugu

SEQ ID NO: 41333 - RNA, 13 nt, Artificial Sequence
  Description of Artificial Sequence: Synthetic oligonucleotide
gagaaaauuucaa

SEQ ID NO: 41334 - RNA, 10 nt, Artificial Sequence
  Description of Artificial Sequence: Synthetic oligonucleotide
auccuccuga

SEQ ID NO: 41335 - RNA, 11 nt, Artificial Sequence
  Description of Artificial Sequence: Synthetic oligonucleotide
ugacaucauau

SEQ ID NO: 41336 - RNA, 12 nt, Artificial Sequence
  Description of Artificial Sequence: Synthetic oligonucleotide
aucuucaucaua

SEQ ID NO: 41337 - RNA, 12 nt, Artificial Sequence
  Description of Artificial Sequence: Synthetic oligonucleotide
acuagcuauuaa

SEQ ID NO: 41338 - RNA, 13 nt, Artificial Sequence
  Description of Artificial Sequence: Synthetic oligonucleotide
cucuacuaaaaau

SEQ ID NO: 41339 - RNA, 11 nt, Artificial Sequence
  Description of Artificial Sequence: Synthetic oligonucleotide
cuaucucgccu

SEQ ID NO: 41340 - RNA, 12 nt, Artificial Sequence
  Description of Artificial Sequence: Synthetic oligonucleotide
uucgguccaguu

SEQ ID NO: 41341 - RNA, 10 nt, Artificial Sequence
  Description of Artificial Sequence: Synthetic oligonucleotide
auguagccgc

SEQ ID NO: 41342 - RNA, 11 nt, Artificial Sequence
  Description of Artificial Sequence: Synthetic oligonucleotide
gaggagacuug

SEQ ID NO: 41343 - RNA, 11 nt, Artificial Sequence
  Description of Artificial Sequence: Synthetic oligonucleotide
aguagugagga

SEQ ID NO: 41344 - RNA, 13 nt, Artificial Sequence
  Description of Artificial Sequence: Synthetic oligonucleotide
agaugaguacaaa

SEQ ID NO: 41345 - RNA, 12 nt, Artificial Sequence
  Description of Artificial Sequence: Synthetic oligonucleotide
uuguuaaugggc

SEQ ID NO: 41346 - RNA, 12 nt, Artificial Sequence
  Description of Artificial Sequence: Synthetic oligonucleotide
uuuuaauuuauu

SEQ ID NO: 41347 - RNA, 11 nt, Artificial Sequence
  Description of Artificial Sequence: Synthetic oligonucleotide
auuuaaauaug

SEQ ID NO: 41348 - RNA, 12 nt, Artificial Sequence
  Description of Artificial Sequence: Synthetic oligonucleotide
auccuuuguuuc

SEQ ID NO: 41349 - RNA, 13 nt, Artificial Sequence
  Description of Artificial Sequence: Synthetic oligonucleotide
gucuaaguguuug

SEQ ID NO: 41350 - RNA, 11 nt, Artificial Sequence
  Description of Artificial Sequence: Synthetic oligonucleotide
ccugugacaaa

SEQ ID NO: 41351 - RNA, 12 nt, Artificial Sequence
  Description of Artificial Sequence: Synthetic oligonucleotide
caggcugaauua

SEQ ID NO: 41352 - RNA, 13 nt, Artificial Sequence
  Description of Artificial Sequence: Synthetic oligonucleotide
ucauucuuacaau

SEQ ID NO: 41353 - RNA, 14 nt, Artificial Sequence
  Description of Artificial Sequence: Synthetic oligonucleotide
cauucuuacaauug

SEQ ID NO: 41354 - RNA, 11 nt, Artificial Sequence
  Description of Artificial Sequence: Synthetic oligonucleotide
agagaguguac

SEQ ID NO: 41355 - RNA, 11 nt, Artificial Sequence
  Description of Artificial Sequence: Synthetic oligonucleotide
gaacucagcag

SEQ ID NO: 41356 - RNA, 12 nt, Artificial Sequence
  Description of Artificial Sequence: Synthetic oligonucleotide
uuauuuucagua

SEQ ID NO: 41357 - RNA, 11 nt, Artificial Sequence
  Description of Artificial Sequence: Synthetic oligonucleotide
cuuaaauggaa

SEQ ID NO: 41358 - RNA, 12 nt, Artificial Sequence
  Description of Artificial Sequence: Synthetic oligonucleotide
gccuaaaauugu

SEQ ID NO: 41359 - RNA, 12 nt, Artificial Sequence
  Description of Artificial Sequence: Synthetic oligonucleotide
acuaacaucugg

SEQ ID NO: 41360 - RNA, 11 nt, Artificial Sequence
  Description of Artificial Sequence: Synthetic oligonucleotide
gacugugagcu

SEQ ID NO: 41361 - RNA, 13 nt, Artificial Sequence
  Description of Artificial Sequence: Synthetic oligonucleotide
gcuuuuuauuaau

SEQ ID NO: 41362 - RNA, 12 nt, Artificial Sequence
  Description of Artificial Sequence: Synthetic oligonucleotide
ucuucuuacauu

SEQ ID NO: 41363 - RNA, 14 nt, Artificial Sequence
  Description of Artificial Sequence: Synthetic oligonucleotide
auuuguaaaaaugu

SEQ ID NO: 41364 - RNA, 14 nt, Artificial Sequence
  Description of Artificial Sequence: Synthetic oligonucleotide
ucuuaauucauauu

SEQ ID NO: 41365 - RNA, 12 nt, Artificial Sequence
  Description of Artificial Sequence: Synthetic oligonucleotide
aacuaaucauga

SEQ ID NO: 41366 - RNA, 11 nt, Artificial Sequence
  Description of Artificial Sequence: Synthetic oligonucleotide
cugcucuuggg

SEQ ID NO: 41367 - RNA, 12 nt, Artificial Sequence
  Description of Artificial Sequence: Synthetic oligonucleotide
aguagcuuugag

SEQ ID NO: 41368 - RNA, 13 nt, Artificial Sequence
  Description of Artificial Sequence: Synthetic oligonucleotide
acguaauauuuca

SEQ ID NO: 41369 - RNA, 12 nt, Artificial Sequence
  Description of Artificial Sequence: Synthetic oligonucleotide
auucucuucacu

SEQ ID NO: 41370 - RNA, 13 nt, Artificial Sequence
  Description of Artificial Sequence: Synthetic oligonucleotide
uaaugcuaagaaa

SEQ ID NO: 41371 - RNA, 11 nt, Artificial Sequence
  Description of Artificial Sequence: Synthetic oligonucleotide
cugaaaaucaa

SEQ ID NO: 41372 - RNA, 13 nt, Artificial Sequence
  Description of Artificial Sequence: Synthetic oligonucleotide
auaugauuacuuu

SEQ ID NO: 41373 - RNA, 13 nt, Artificial Sequence
  Description of Artificial Sequence: Synthetic oligonucleotide
auuuuguucuaca

SEQ ID NO: 41374 - RNA, 11 nt, Artificial Sequence
  Description of Artificial Sequence: Synthetic oligonucleotide
ccgggacucuc

SEQ ID NO: 41375 - RNA, 13 nt, Artificial Sequence
  Description of Artificial Sequence: Synthetic oligonucleotide
cuuuaaaguaaag

SEQ ID NO: 41376 - RNA, 12 nt, Artificial Sequence
  Description of Artificial Sequence: Synthetic oligonucleotide
cuggaagccugg

SEQ ID NO: 41377 - RNA, 13 nt, Artificial Sequence
  Description of Artificial Sequence: Synthetic oligonucleotide
aaacaaaagagag

SEQ ID NO: 41378 - RNA, 12 nt, Artificial Sequence
  Description of Artificial Sequence: Synthetic oligonucleotide
ucaguuaugccg

SEQ ID NO: 41379 - RNA, 12 nt, Artificial Sequence
  Description of Artificial Sequence: Synthetic oligonucleotide
aaaagaagucca

SEQ ID NO: 41380 - RNA, 10 nt, Artificial Sequence
  Description of Artificial Sequence: Synthetic oligonucleotide
ggugagguua

SEQ ID NO: 41381 - RNA, 10 nt, Artificial Sequence
  Description of Artificial Sequence: Synthetic oligonucleotide
ggaagaggac

SEQ ID NO: 41382 - RNA, 12 nt, Artificial Sequence
  Description of Artificial Sequence: Synthetic oligonucleotide
agcaaguauugu

SEQ ID NO: 41383 - RNA, 11 nt, Artificial Sequence
  Description of Artificial Sequence: Synthetic oligonucleotide
uuguagcacuc

SEQ ID NO: 41384 - RNA, 13 nt, Artificial Sequence
  Description of Artificial Sequence: Synthetic oligonucleotide
caaaaccacaaau

SEQ ID NO: 41385 - RNA, 11 nt, Artificial Sequence
  Description of Artificial Sequence: Synthetic oligonucleotide
aagcccauaca

SEQ ID NO: 41386 - RNA, 10 nt, Artificial Sequence
  Description of Artificial Sequence: Synthetic oligonucleotide
gcccauacag

SEQ ID NO: 41387 - RNA, 11 nt, Artificial Sequence
  Description of Artificial Sequence: Synthetic oligonucleotide
agaaaccuucc

SEQ ID NO: 41388 - RNA, 9 nt, Artificial Sequence
  Description of Artificial Sequence: Synthetic oligonucleotide
uauaccuac

SEQ ID NO: 41389 - RNA, 12 nt, Artificial Sequence
  Description of Artificial Sequence: Synthetic oligonucleotide
ccaguuuucgga

SEQ ID NO: 41390 - RNA, 8 nt, Artificial Sequence
  Description of Artificial Sequence: Synthetic oligonucleotide
gaacaggg

SEQ ID NO: 41391 - RNA, 12 nt, Artificial Sequence
  Description of Artificial Sequence: Synthetic oligonucleotide
uaacuuuccagu

SEQ ID NO: 41392 - RNA, 13 nt, Artificial Sequence
  Description of Artificial Sequence: Synthetic oligonucleotide
aaguuugguuuug

SEQ ID NO: 41393 - RNA, 11 nt, Artificial Sequence
  Description of Artificial Sequence: Synthetic oligonucleotide
uucccacugua

SEQ ID NO: 41394 - RNA, 12 nt, Artificial Sequence
  Description of Artificial Sequence: Synthetic oligonucleotide
gauaccauauga

SEQ ID NO: 41395 - RNA, 10 nt, Artificial Sequence
  Description of Artificial Sequence: Synthetic oligonucleotide
acaugggcug

SEQ ID NO: 41396 - RNA, 12 nt, Artificial Sequence
  Description of Artificial Sequence: Synthetic oligonucleotide
aacuuuuucaua

SEQ ID NO: 41397 - RNA, 11 nt, Artificial Sequence
  Description of Artificial Sequence: Synthetic oligonucleotide
augaggccgga

SEQ ID NO: 41398 - RNA, 10 nt, Artificial Sequence
  Description of Artificial Sequence: Synthetic oligonucleotide
cugcauuugu

SEQ ID NO: 41399 - RNA, 12 nt, Artificial Sequence
  Description of Artificial Sequence: Synthetic oligonucleotide
auguuuacuacc

SEQ ID NO: 41400 - RNA, 14 nt, Artificial Sequence
  Description of Artificial Sequence: Synthetic oligonucleotide
auuuuuugaugaaa

SEQ ID NO: 41401 - RNA, 13 nt, Artificial Sequence
  Description of Artificial Sequence: Synthetic oligonucleotide
agugugugaauuu

SEQ ID NO: 41402 - RNA, 12 nt, Artificial Sequence
  Description of Artificial Sequence: Synthetic oligonucleotide
agcaauguaugu

SEQ ID NO: 41403 - RNA, 13 nt, Artificial Sequence
  Description of Artificial Sequence: Synthetic oligonucleotide
aagcacauauaua

SEQ ID NO: 41404 - RNA, 13 nt, Artificial Sequence
  Description of Artificial Sequence: Synthetic oligonucleotide
uaauaguuucucc

SEQ ID NO: 41405 - RNA, 12 nt, Artificial Sequence
  Description of Artificial Sequence: Synthetic oligonucleotide
guuucuccaaau

SEQ ID NO: 41406 - RNA, 12 nt, Artificial Sequence
  Description of Artificial Sequence: Synthetic oligonucleotide
acuuccuagaaa

SEQ ID NO: 41407 - RNA, 12 nt, Artificial Sequence
  Description of Artificial Sequence: Synthetic oligonucleotide
acaccauauaug

SEQ ID NO: 41408 - RNA, 13 nt, Artificial Sequence
  Description of Artificial Sequence: Synthetic oligonucleotide
uauaugaauggag

SEQ ID NO: 41409 - RNA, 12 nt, Artificial Sequence
  Description of Artificial Sequence: Synthetic oligonucleotide
cauuuacaggga

SEQ ID NO: 41410 - RNA, 12 nt, Artificial Sequence
  Description of Artificial Sequence: Synthetic oligonucleotide
auuuacagggac

SEQ ID NO: 41411 - RNA, 9 nt, Artificial Sequence
  Description of Artificial Sequence: Synthetic oligonucleotide
gggaccuga

SEQ ID NO: 41412 - RNA, 13 nt, Artificial Sequence
  Description of Artificial Sequence: Synthetic oligonucleotide
guuugacugcauc

SEQ ID NO: 41413 - RNA, 12 nt, Artificial Sequence
  Description of Artificial Sequence: Synthetic oligonucleotide
uugacugcaucg

SEQ ID NO: 41414 - RNA, 11 nt, Artificial Sequence
  Description of Artificial Sequence: Synthetic oligonucleotide
aguucacaggg

SEQ ID NO: 41415 - RNA, 12 nt, Artificial Sequence
  Description of Artificial Sequence: Synthetic oligonucleotide
gcaccucugucc

SEQ ID NO: 41416 - RNA, 14 nt, Artificial Sequence
  Description of Artificial Sequence: Synthetic oligonucleotide
guuugucuuuuuaa

SEQ ID NO: 41417 - RNA, 13 nt, Artificial Sequence
  Description of Artificial Sequence: Synthetic oligonucleotide
uugucuuuuuaag

SEQ ID NO: 41418 - RNA, 12 nt, Artificial Sequence
  Description of Artificial Sequence: Synthetic oligonucleotide
cuaaagguuguc

SEQ ID NO: 41419 - RNA, 11 nt, Artificial Sequence
  Description of Artificial Sequence: Synthetic oligonucleotide
agguugucgac

SEQ ID NO: 41420 - RNA, 12 nt, Artificial Sequence
  Description of Artificial Sequence: Synthetic oligonucleotide
ccuggcaauugu

SEQ ID NO: 41421 - RNA, 11 nt, Artificial Sequence
  Description of Artificial Sequence: Synthetic oligonucleotide
guggugcgagg

SEQ ID NO: 41422 - RNA, 12 nt, Artificial Sequence
  Description of Artificial Sequence: Synthetic oligonucleotide
gagacaugaaau

SEQ ID NO: 41423 - RNA, 12 nt, Artificial Sequence
  Description of Artificial Sequence: Synthetic oligonucleotide
uauauuucucca

SEQ ID NO: 41424 - RNA, 9 nt, Artificial Sequence
  Description of Artificial Sequence: Synthetic oligonucleotide
augaaggcu

SEQ ID NO: 41425 - RNA, 10 nt, Artificial Sequence
  Description of Artificial Sequence: Synthetic oligonucleotide
cuggaguggu

SEQ ID NO: 41426 - RNA, 10 nt, Artificial Sequence
  Description of Artificial Sequence: Synthetic oligonucleotide
ggaagagagg

SEQ ID NO: 41427 - RNA, 11 nt, Artificial Sequence
  Description of Artificial Sequence: Synthetic oligonucleotide
uugcaucgggc

SEQ ID NO: 41428 - RNA, 12 nt, Artificial Sequence
  Description of Artificial Sequence: Synthetic oligonucleotide
uauccuacugug

SEQ ID NO: 41429 - RNA, 12 nt, Artificial Sequence
  Description of Artificial Sequence: Synthetic oligonucleotide
ccuacuguguaa

SEQ ID NO: 41430 - RNA, 11 nt, Artificial Sequence
  Description of Artificial Sequence: Synthetic oligonucleotide
cuuguagugua

SEQ ID NO: 41431 - RNA, 12 nt, Artificial Sequence
  Description of Artificial Sequence: Synthetic oligonucleotide
cuuuguugauug

SEQ ID NO: 41432 - RNA, 13 nt, Artificial Sequence
  Description of Artificial Sequence: Synthetic oligonucleotide
uuguugauugaaa

SEQ ID NO: 41433 - RNA, 14 nt, Artificial Sequence
  Description of Artificial Sequence: Synthetic oligonucleotide
ucuuuuucuuccau

SEQ ID NO: 41434 - RNA, 12 nt, Artificial Sequence
  Description of Artificial Sequence: Synthetic oligonucleotide
aucuuccuucua

SEQ ID NO: 41435 - RNA, 12 nt, Artificial Sequence
  Description of Artificial Sequence: Synthetic oligonucleotide
ugaaugcuucau

SEQ ID NO: 41436 - RNA, 12 nt, Artificial Sequence
  Description of Artificial Sequence: Synthetic oligonucleotide
gaaugcuucaug

SEQ ID NO: 41437 - RNA, 12 nt, Artificial Sequence
  Description of Artificial Sequence: Synthetic oligonucleotide
auucuacuuuga

SEQ ID NO: 41438 - RNA, 12 nt, Artificial Sequence
  Description of Artificial Sequence: Synthetic oligonucleotide
gcaacuacagac

SEQ ID NO: 41439 - RNA, 12 nt, Artificial Sequence
  Description of Artificial Sequence: Synthetic oligonucleotide
accaaggucaac

SEQ ID NO: 41440 - RNA, 12 nt, Artificial Sequence
  Description of Artificial Sequence: Synthetic oligonucleotide
gacuaucucgac

SEQ ID NO: 41441 - RNA, 12 nt, Artificial Sequence
  Description of Artificial Sequence: Synthetic oligonucleotide
accuucccaaac

SEQ ID NO: 41442 - RNA, 13 nt, Artificial Sequence
  Description of Artificial Sequence: Synthetic oligonucleotide
caagcuuagaacu

SEQ ID NO: 41443 - RNA, 14 nt, Artificial Sequence
  Description of Artificial Sequence: Synthetic oligonucleotide
gcuuagaacuuuaa

SEQ ID NO: 41444 - RNA, 13 nt, Artificial Sequence
  Description of Artificial Sequence: Synthetic oligonucleotide
aacuuuaagcaac

SEQ ID NO: 41445 - RNA, 10 nt, Artificial Sequence
  Description of Artificial Sequence: Synthetic oligonucleotide
agaccaccac

SEQ ID NO: 41446 - RNA, 13 nt, Artificial Sequence
  Description of Artificial Sequence: Synthetic oligonucleotide
cgagaaauaaagu

SEQ ID NO: 41447 - RNA, 13 nt, Artificial Sequence
  Description of Artificial Sequence: Synthetic oligonucleotide
gagaaauaaaguu

SEQ ID NO: 41448 - RNA, 11 nt, Artificial Sequence
  Description of Artificial Sequence: Synthetic oligonucleotide
ggaaaugaucc

SEQ ID NO: 41449 - RNA, 12 nt, Artificial Sequence
  Description of Artificial Sequence: Synthetic oligonucleotide
aagaaaugaaac

SEQ ID NO: 41450 - RNA, 12 nt, Artificial Sequence
  Description of Artificial Sequence: Synthetic oligonucleotide
uuuccauccucc

SEQ ID NO: 41451 - RNA, 14 nt, Artificial Sequence
  Description of Artificial Sequence: Synthetic oligonucleotide
cugaaaaucuuuga

SEQ ID NO: 41452 - RNA, 10 nt, Artificial Sequence
  Description of Artificial Sequence: Synthetic oligonucleotide
gccguucagg

SEQ ID NO: 41453 - RNA, 12 nt, Artificial Sequence
  Description of Artificial Sequence: Synthetic oligonucleotide
aggguccagaag

SEQ ID NO: 41454 - RNA, 12 nt, Artificial Sequence
  Description of Artificial Sequence: Synthetic oligonucleotide
caagacugcuug

SEQ ID NO: 41455 - RNA, 12 nt, Artificial Sequence
  Description of Artificial Sequence: Synthetic oligonucleotide
ccaugucuuugg

SEQ ID NO: 41456 - RNA, 10 nt, Artificial Sequence
  Description of Artificial Sequence: Synthetic oligonucleotide
ccugaaacac

SEQ ID NO: 41457 - RNA, 11 nt, Artificial Sequence
  Description of Artificial Sequence: Synthetic oligonucleotide
cucuguaccuc

SEQ ID NO: 41458 - RNA, 11 nt, Artificial Sequence
  Description of Artificial Sequence: Synthetic oligonucleotide
gcaagacaaga

SEQ ID NO: 41459 - RNA, 12 nt, Artificial Sequence
  Description of Artificial Sequence: Synthetic oligonucleotide
caagacaagaaa

SEQ ID NO: 41460 - RNA, 11 nt, Artificial Sequence
  Description of Artificial Sequence: Synthetic oligonucleotide
guacaagaucc

SEQ ID NO: 41461 - RNA, 11 nt, Artificial Sequence
  Description of Artificial Sequence: Synthetic oligonucleotide
guacuugcaga

SEQ ID NO: 41462 - RNA, 12 nt, Artificial Sequence
  Description of Artificial Sequence: Synthetic oligonucleotide
gaucgauacaga

SEQ ID NO: 41463 - RNA, 12 nt, Artificial Sequence
  Description of Artificial Sequence: Synthetic oligonucleotide
auaaaaauaaau

SEQ ID NO: 41464 - RNA, 12 nt, Artificial Sequence
  Description of Artificial Sequence: Synthetic oligonucleotide
aaaaauaaauau

SEQ ID NO: 41465 - RNA, 12 nt, Artificial Sequence
  Description of Artificial Sequence: Synthetic oligonucleotide
uugacugcugug

SEQ ID NO: 41466 - RNA, 12 nt, Artificial Sequence
  Description of Artificial Sequence: Synthetic oligonucleotide
gagaugagagac

SEQ ID NO: 41467 - RNA, 9 nt, Artificial Sequence
  Description of Artificial Sequence: Synthetic oligonucleotide
cccacuugg

SEQ ID NO: 41468 - RNA, 3958 nt, Homo sapiens
gugcugccucgucugaggggacaggaggaucacccucuucgucgcuucggccagugugucgggcugggcccugacaagccaccugaggagaggcucggagccgggcccggaccccggcgauugccgcccgcuucucucuagucucacgagggguuucccgccucgcacccccaccucuggacuugccuuuccuucucuucuccgcguguggagggagccagcgcuuaggccggagcgagccugggggccgcccgccgugaagacaucgcggggaccgauucaccauggagggcgccggcggcgcgaacgacaagaaaaagauaaguucugaacgucgaaaagaaaagucucgagaugcagccagaucucggcgaaguaaagaaucugaaguuuuuuaugagcuugcucaucaguugccacuuccacauaaugugaguucgcaucuugauaaggccucugugaugaggcuuaccaucagcuauuugcgugugaggaaacuucuggaugcuggugauuuggauauugaagaugacaugaaagcacagaugaauugcuuuuauuugaaagccuuggaugguuuuguuaugguucucacagaugauggugacaugauuuacauuucugauaaugugaacaaauacaugggauuaacucaguuugaacuaacuggacacaguguguuugauuuuacucauccaugugaccaugaggaaaugagagaaaugcuuacacacagaaauggccuugugaaaaaggguaaagaacaaaacacacagcgaagcuuuuuucucagaaugaaguguacccuaacuagccgaggaagaacuaugaacauaaagucugcaacauggaagguauugcacugcacaggccacauucacguauaugauaccaacaguaaccaaccucaguguggguauaagaaaccaccuaugaccugcuuggugcugauuugugaacccauuccucacccaucaaauauugaaauuccuuuagauagcaagacuuuccucagucgacacagccuggauaugaaauuuucuuauugugaugaaagaauuaccgaauugaugggauaugagccagaagaacuuuuaggccgcucaauuuaugaauauuaucaugcuuuggacucugaucaucugaccaaaacucaucaugauauguuuacuaaaggacaagucaccacaggacaguacaggaugcuugccaaaagagguggauaugucuggguugaaacucaagcaacugucauauauaacaccaagaauucucaaccacagugcauuguaugugugaauuacguugugagugguauuauucagcacgacuugauuuucucccuucaacaaacagaauguguccuuaaaccgguugaaucuucagauaugaaaaugacucagcuauucaccaaaguugaaucagaagauacaaguagccucuuugacaaacuuaagaaggaaccugaugcuuuaacuuugcuggccccagccgcuggagacacaaucauaucuuuagauuuuggcagcaacgacacagaaacugaugaccagcaacuugaggaaguaccauuauauaaugauguaaugcuccccucacccaacgaaaaauuacagaauauaaauuuggcaaugucuccauuacccaccgcugaaacgccaaagccacuucgaaguagugcugacccugcacucaaucaagaaguugcauuaaaauuagaaccaaauccagagucacuggaacuuucuuuuaccaugccccagauucaggaucagacaccuaguccuuccgauggaagcacuagacaaaguucaccugagccuaauagucccagugaauauuguuuuuauguggauagugauauggucaaugaauucaaguuggaauugguagaaaaacuuuuugcugaagacacagaagcaaagaacccauuuucuacucaggacacagauuuagacuuggagauguuagcucccuauaucccaauggaugaugacuuccaguuacguuccuucgaucaguugucaccauuagaaagcaguuccgcaagcccugaaagcgcaaguccucaaagcacaguuacaguauuccagcagacucaaauacaagaaccuacugcuaaugccaccacuaccacugccaccacugaugaauuaaaaacagugacaaaagaccguauggaagacauuaaaauauugauugcaucuccaucuccuacccacauacauaaagaaacuacuagugccacaucaucaccauauagagauacucaaagucggacagccucaccaaacagagcaggaaaaggagucauagaacagacagaaaaaucucauccaagaagcccuaacguguuaucugucgcuuugagucaaagaacuacaguuccugaggaagaacuaaauccaaagauacuagcuuugcagaaugcucagagaaagcgaaaaauggaacaugaugguucacuuuuucaagcaguaggaauuggaacauuauuacagcagccagacgaucaugcagcuacuacaucacuuucuuggaaacguguaaaaggaugcaaaucuagugaacagaauggaauggagcaaaagacaauuauuuuaauacccucugauuuagcauguagacugcuggggcaaucaauggaugaaaguggauuaccacagcugaccaguuaugauugugaaguuaaugcuccuauacaaggcagcagaaaccuacugcagggugaagaauuacucagagcuuuggaucaaguuaacugagcuuuuucuuaauuucauuccuuuuuuuggacacugguggcucacuaccuaaagcagucuauuuauauuuucuacaucuaauuuuagaagccuggcuacaauacugcacaaacuugguuaguucaauuuuugauccccuuucuacuuaauuuacauuaaugcucuuuuuuaguauguucuuuaaugcuggaucacagacagcucauuuucucaguuuuuugguauuuaaaccauugcauugcaguagcaucauuuuaaaaaaugcaccuuuuuauuuauuuauuuuuggcuagggaguuuaucccuuuuucgaauuauuuuuaagaagaugccaauauaauuuuuguaagaaggcaguaaccuuucaucaugaucauaggcaguugaaaaauuuuuacaccuuuuuuuucacauuuuacauaaauaauaaugcuuugccagcaguacgugguagccacaauugcacaauauauuuucuuaaaaaauaccagcaguuacucauggaauauauucugcguuuauaaaacuaguuuuuaagaagaaauuuuuuuuggccuaugaaauuguuaaaccuggaacaugacauuguuaaucauauaauaaugauucuuaaaugcuguaugguuuauuauuuaaauggguaaagccauuuacauaauauagaaagauaugcauauaucuagaagguauguggcauuuauuuggauaaaauucucaauucagagaaaucaucugauguuucuauagucacuuugccagcucaaaagaaaacaauacccuauguaguuguggaaguuuaugcuaauauuguguaacugauauuaaaccuaaauguucugccuacccuguugguauaaagauauuuugagcagacuguaaacaagaaaaaaaaaaucaugcauucuuagcaaaauugccuaguauguuaauuugcucaaaauacaauguuugauuuuaugcacuuugucgcuauuaacauccuuuuuuucauguagauuucaauaauugaguaauuuuagaagcauuauuuuaggaauauauaguugucacaguaaauaucuuguuuuuucuauguacauuguacaaauuuuucauuccuuuugcucuuugugguuggaucuaacacuaacuguauuguuuuguuacaucaaauaaacaucuucuguggaccaggaaaaaaaaaaaaaaaaaaa

SEQ ID NO: 41469 - RNA, 3812 nt, Homo sapiens
gugcugccucgucugaggggacaggaggaucacccucuucgucgcuucggccagugugucgggcugggcccugacaagccaccugaggagaggcucggagccgggcccggaccccggcgauugccgcccgcuucucucuagucucacgagggguuucccgccucgcacccccaccucuggacuugccuuuccuucucuucuccgcguguggagggagccagcgcuuaggccggagcgagccugggggccgcccgccgugaagacaucgcggggaccgauucaccauggagggcgccggcggcgcgaacgacaagaaaaagauaaguucugaacgucgaaaagaaaagucucgagaugcagccagaucucggcgaaguaaagaaucugaaguuuuuuaugagcuugcucaucaguugccacuuccacauaaugugaguucgcaucuugauaaggccucugugaugaggcuuaccaucagcuauuugcgugugaggaaacuucuggaugcuggugauuuggauauugaagaugacaugaaagcacagaugaauugcuuuuauuugaaagccuuggaugguuuuguuaugguucucacagaugauggugacaugauuuacauuucugauaaugugaacaaauacaugggauuaacucaguuugaacuaacuggacacaguguguuugauuuuacucauccaugugaccaugaggaaaugagagaaaugcuuacacacagaaauggccuugugaaaaaggguaaagaacaaaacacacagcgaagcuuuuuucucagaaugaaguguacccuaacuagccgaggaagaacuaugaacauaaagucugcaacauggaagguauugcacugcacaggccacauucacguauaugauaccaacaguaaccaaccucaguguggguauaagaaaccaccuaugaccugcuuggugcugauuugugaacccauuccucacccaucaaauauugaaauuccuuuagauagcaagacuuuccucagucgacacagccuggauaugaaauuuucuuauugugaugaaagaauuaccgaauugaugggauaugagccagaagaacuuuuaggccgcucaauuuaugaauauuaucaugcuuuggacucugaucaucugaccaaaacucaucaugauauguuuacuaaaggacaagucaccacaggacaguacaggaugcuugccaaaagagguggauaugucuggguugaaacucaagcaacugucauauauaacaccaagaauucucaaccacagugcauuguaugugugaauuacguugugagugguauuauucagcacgacuugauuuucucccuucaacaaacagaauguguccuuaaaccgguugaaucuucagauaugaaaaugacucagcuauucaccaaaguugaaucagaagauacaaguagccucuuugacaaacuuaagaaggaaccugaugcuuuaacuuugcuggccccagccgcuggagacacaaucauaucuuuagauuuuggcagcaacgacacagaaacugaugaccagcaacuugaggaaguaccauuauauaaugauguaaugcuccccucacccaacgaaaaauuacagaauauaaauuuggcaaugucuccauuacccaccgcugaaacgccaaagccacuucgaaguagugcugacccugcacucaaucaagaaguugcauuaaaauuagaaccaaauccagagucacuggaacuuucuuuuaccaugccccagauucaggaucagacaccuaguccuuccgauggaagcacuagacaaaguucaccugagccuaauagucccagugaauauuguuuuuauguggauagugauauggucaaugaauucaaguuggaauugguagaaaaacuuuuugcugaagacacagaagcaaagaacccauuuucuacucaggacacagauuuagacuuggagauguuagcucccuauaucccaauggaugaugacuuccaguuacguuccuucgaucaguugucaccauuagaaagcaguuccgcaagcccugaaagcgcaaguccucaaagcacaguuacaguauuccagcagacucaaauacaagaaccuacugcuaaugccaccacuaccacugccaccacugaugaauuaaaaacagugacaaaagaccguauggaagacauuaaaauauugauugcaucuccaucuccuacccacauacauaaagaaacuacuagugccacaucaucaccauauagagauacucaaagucggacagccucaccaaacagagcaggaaaaggagucauagaacagacagaaaaaucucauccaagaagcccuaacguguuaucugucgcuuugagucaaagaacuacaguuccugaggaagaacuaaauccaaagauacuagcuuugcagaaugcucagagaaagcgaaaaauggaacaugaugguucacuuuuucaagcaguaggaauuauuuagcauguagacugcuggggcaaucaauggaugaaaguggauuaccacagcugaccaguuaugauugugaaguuaaugcuccuauacaaggcagcagaaaccuacugcagggugaagaauuacucagagcuuuggaucaaguuaacugagcuuuuucuuaauuucauuccuuuuuuuggacacugguggcucacuaccuaaagcagucuauuuauauuuucuacaucuaauuuuagaagccuggcuacaauacugcacaaacuugguuaguucaauuuuugauccccuuucuacuuaauuuacauuaaugcucuuuuuuaguauguucuuuaaugcuggaucacagacagcucauuuucucaguuuuuugguauuuaaaccauugcauugcaguagcaucauuuuaaaaaaugcaccuuuuuauuuauuuauuuuuggcuagggaguuuaucccuuuuucgaauuauuuuuaagaagaugccaauauaauuuuuguaagaaggcaguaaccuuucaucaugaucauaggcaguugaaaaauuuuuacaccuuuuuuuucacauuuuacauaaauaauaaugcuuugccagcaguacgugguagccacaauugcacaauauauuuucuuaaaaaauaccagcaguuacucauggaauauauucugcguuuauaaaacuaguuuuuaagaagaaauuuuuuuuggccuaugaaauuguuaaaccuggaacaugacauuguuaaucauauaauaaugauucuuaaaugcuguaugguuuauuauuuaaauggguaaagccauuuacauaauauagaaagauaugcauauaucuagaagguauguggcauuuauuuggauaaaauucucaauucagagaaaucaucugauguuucuauagucacuuugccagcucaaaagaaaacaauacccuauguaguuguggaaguuuaugcuaauauuguguaacugauauuaaaccuaaauguucugccuacccuguugguauaaagauauuuugagcagacuguaaacaagaaaaaaaaaaucaugcauucuuagcaaaauugccuaguauguuaauuugcucaaaauacaauguuugauuuuaugcacuuugucgcuauuaacauccuuuuuuucauguagauuucaauaauugaguaauuuuagaagcauuauuuuaggaauauauaguugucacaguaaauaucuuguuuuuucuauguacauuguacaaauuuuucauuccuuuugcucuuugugguuggaucuaacacuaacuguauuguuuuguuacaucaaauaaacaucuucuguggaccagg

SEQ ID NO: 41470 - RNA, 19 nt, Artificial Sequence
  Description of Artificial Sequence: Synthetic oligonucleotide
gugcugccucgucugaggg

SEQ ID NO: 41471 - RNA, 19 nt, Artificial Sequence
  Description of Artificial Sequence: Synthetic oligonucleotide
ggacaggaggaucacccuc

SEQ ID NO: 41472 - RNA, 19 nt, Artificial Sequence
  Description of Artificial Sequence: Synthetic oligonucleotide
cuucgucgcuucggccagu

SEQ ID NO: 41473 - RNA, 19 nt, Artificial Sequence
  Description of Artificial Sequence: Synthetic oligonucleotide
ugugucgggcugggcccug

SEQ ID NO: 41474 - RNA, 19 nt, Artificial Sequence
  Description of Artificial Sequence: Synthetic oligonucleotide
gacaagccaccugaggaga

SEQ ID NO: 41475 - RNA, 19 nt, Artificial Sequence
  Description of Artificial Sequence: Synthetic oligonucleotide
aggcucggagccgggcccg

SEQ ID NO: 41476 - RNA, 19 nt, Artificial Sequence
  Description of Artificial Sequence: Synthetic oligonucleotide
ggaccccggcgauugccgc

SEQ ID NO: 41477 - RNA, 19 nt, Artificial Sequence
  Description of Artificial Sequence: Synthetic oligonucleotide
cccgcuucucucuagucuc

SEQ ID NO: 41478 - RNA, 19 nt, Artificial Sequence
  Description of Artificial Sequence: Synthetic oligonucleotide
cacgagggguuucccgccu

SEQ ID NO: 41479 - RNA, 19 nt, Artificial Sequence
  Description of Artificial Sequence: Synthetic oligonucleotide
ucgcacccccaccucugga

SEQ ID NO: 41480 - RNA, 19 nt, Artificial Sequence
  Description of Artificial Sequence: Synthetic oligonucleotide
acuugccuuuccuucucuu

SEQ ID NO: 41481 - RNA, 19 nt, Artificial Sequence
  Description of Artificial Sequence: Synthetic oligonucleotide
ucuccgcguguggagggag

SEQ ID NO: 41482 - RNA, 19 nt, Artificial Sequence
  Description of Artificial Sequence: Synthetic oligonucleotide
gccagcgcuuaggccggag

SEQ ID NO: 41483 - RNA, 19 nt, Artificial Sequence
  Description of Artificial Sequence: Synthetic oligonucleotide
gcgagccugggggccgccc

SEQ ID NO: 41484 - RNA, 19 nt, Artificial Sequence
  Description of Artificial Sequence: Synthetic oligonucleotide
cgccgugaagacaucgcgg

SEQ ID NO: 41485 - RNA, 19 nt, Artificial Sequence
  Description of Artificial Sequence: Synthetic oligonucleotide
gggaccgauucaccaugga

SEQ ID NO: 41486 - RNA, 19 nt, Artificial Sequence
  Description of Artificial Sequence: Synthetic oligonucleotide
agggcgccggcggcgcgaa

SEQ ID NO: 41487 - RNA, 19 nt, Artificial Sequence
  Description of Artificial Sequence: Synthetic oligonucleotide
acgacaagaaaaagauaag

SEQ ID NO: 41488 - RNA, 19 nt, Artificial Sequence
  Description of Artificial Sequence: Synthetic oligonucleotide
guucugaacgucgaaaaga

SEQ ID NO: 41489 - RNA, 19 nt, Artificial Sequence
  Description of Artificial Sequence: Synthetic oligonucleotide
aaaagucucgagaugcagc

SEQ ID NO: 41490 - RNA, 19 nt, Artificial Sequence
  Description of Artificial Sequence: Synthetic oligonucleotide
ccagaucucggcgaaguaa

SEQ ID NO: 41491 - RNA, 19 nt, Artificial Sequence
  Description of Artificial Sequence: Synthetic oligonucleotide
aagaaucugaaguuuuuua

SEQ ID NO: 41492 - RNA, 19 nt, Artificial Sequence
  Description of Artificial Sequence: Synthetic oligonucleotide
augagcuugcucaucaguu

SEQ ID NO: 41493 - RNA, 19 nt, Artificial Sequence
  Description of Artificial Sequence: Synthetic oligonucleotide
ugccacuuccacauaaugu

SEQ ID NO: 41494 - RNA, 19 nt, Artificial Sequence
  Description of Artificial Sequence: Synthetic oligonucleotide
ugaguucgcaucuugauaa

SEQ ID NO: 41495 - RNA, 19 nt, Artificial Sequence
  Description of Artificial Sequence: Synthetic oligonucleotide
aggccucugugaugaggcu

SEQ ID NO: 41496 - RNA, 19 nt, Artificial Sequence
  Description of Artificial Sequence: Synthetic oligonucleotide
uuaccaucagcuauuugcg

SEQ ID NO: 41497 - RNA, 19 nt, Artificial Sequence
  Description of Artificial Sequence: Synthetic oligonucleotide
gugugaggaaacuucugga

SEQ ID NO: 41498 - RNA, 19 nt, Artificial Sequence
  Description of Artificial Sequence: Synthetic oligonucleotide
augcuggugauuuggauau

SEQ ID NO: 41499 - RNA, 19 nt, Artificial Sequence
  Description of Artificial Sequence: Synthetic oligonucleotide
uugaagaugacaugaaagc

SEQ ID NO: 41500 - RNA, 19 nt, Artificial Sequence
  Description of Artificial Sequence: Synthetic oligonucleotide
cacagaugaauugcuuuua

SEQ ID NO: 41501 - RNA, 19 nt, Artificial Sequence
  Description of Artificial Sequence: Synthetic oligonucleotide
auuugaaagccuuggaugg

SEQ ID NO: 41502 - RNA, 19 nt, Artificial Sequence
  Description of Artificial Sequence: Synthetic oligonucleotide
guuuuguuaugguucucac

SEQ ID NO: 41503 - RNA, 19 nt, Artificial Sequence
  Description of Artificial Sequence: Synthetic oligonucleotide
cagaugauggugacaugau

SEQ ID NO: 41504 - RNA, 19 nt, Artificial Sequence
  Description of Artificial Sequence: Synthetic oligonucleotide
uuuacauuucugauaaugu

SEQ ID NO: 41505 - RNA, 19 nt, Artificial Sequence
  Description of Artificial Sequence: Synthetic oligonucleotide
ugaacaaauacaugggauu

SEQ ID NO: 41506 - RNA, 19 nt, Artificial Sequence
  Description of Artificial Sequence: Synthetic oligonucleotide
uaacucaguuugaacuaac

SEQ ID NO: 41507 - RNA, 19 nt, Artificial Sequence
  Description of Artificial Sequence: Synthetic oligonucleotide
cuggacacaguguguuuga

SEQ ID NO: 41508 - RNA, 19 nt, Artificial Sequence
  Description of Artificial Sequence: Synthetic oligonucleotide
auuuuacucauccauguga

SEQ ID NO: 41509 - RNA, 19 nt, Artificial Sequence
  Description of Artificial Sequence: Synthetic oligonucleotide
accaugaggaaaugagaga

SEQ ID NO: 41510 - RNA, 19 nt, Artificial Sequence
  Description of Artificial Sequence: Synthetic oligonucleotide
aaaugcuuacacacagaaa

SEQ ID NO: 41511 - RNA, 19 nt, Artificial Sequence
  Description of Artificial Sequence: Synthetic oligonucleotide
auggccuugugaaaaaggg

SEQ ID NO: 41512 - RNA, 19 nt, Artificial Sequence
  Description of Artificial Sequence: Synthetic oligonucleotide
guaaagaacaaaacacaca

SEQ ID NO: 41513 - RNA, 19 nt, Artificial Sequence
  Description of Artificial Sequence: Synthetic oligonucleotide
agcgaagcuuuuuucucag

SEQ ID NO: 41514 - RNA, 19 nt, Artificial Sequence
  Description of Artificial Sequence: Synthetic oligonucleotide
gaaugaaguguacccuaac

SEQ ID NO: 41515 - RNA, 19 nt, Artificial Sequence
  Description of Artificial Sequence: Synthetic oligonucleotide
cuagccgaggaagaacuau

SEQ ID NO: 41516 - RNA, 19 nt, Artificial Sequence
  Description of Artificial Sequence: Synthetic oligonucleotide
ugaacauaaagucugcaac

SEQ ID NO: 41517 - RNA, 19 nt, Artificial Sequence
  Description of Artificial Sequence: Synthetic oligonucleotide
cauggaagguauugcacug

SEQ ID NO: 41518 - RNA, 19 nt, Artificial Sequence
  Description of Artificial Sequence: Synthetic oligonucleotide
gcacaggccacauucacgu

SEQ ID NO: 41519 - RNA, 19 nt, Artificial Sequence
  Description of Artificial Sequence: Synthetic oligonucleotide
uauaugauaccaacaguaa

SEQ ID NO: 41520 - RNA, 19 nt, Artificial Sequence
  Description of Artificial Sequence: Synthetic oligonucleotide
accaaccucagugugggua

SEQ ID NO: 41521 - RNA, 19 nt, Artificial Sequence
  Description of Artificial Sequence: Synthetic oligonucleotide
auaagaaaccaccuaugac

SEQ ID NO: 41522 - RNA, 19 nt, Artificial Sequence
  Description of Artificial Sequence: Synthetic oligonucleotide
ccugcuuggugcugauuug

SEQ ID NO: 41523 - RNA, 19 nt, Artificial Sequence
  Description of Artificial Sequence: Synthetic oligonucleotide
gugaacccauuccucaccc

SEQ ID NO: 41524 - RNA, 19 nt, Artificial Sequence
  Description of Artificial Sequence: Synthetic oligonucleotide
caucaaauauugaaauucc

SEQ ID NO: 41525 - RNA, 19 nt, Artificial Sequence
  Description of Artificial Sequence: Synthetic oligonucleotide
cuuuagauagcaagacuuu

SEQ ID NO: 41526 - RNA, 19 nt, Artificial Sequence
  Description of Artificial Sequence: Synthetic oligonucleotide
uccucagucgacacagccu

SEQ ID NO: 41527 - RNA, 19 nt, Artificial Sequence
  Description of Artificial Sequence: Synthetic oligonucleotide
uggauaugaaauuuucuua

SEQ ID NO: 41528 - RNA, 19 nt, Artificial Sequence
  Description of Artificial Sequence: Synthetic oligonucleotide
auugugaugaaagaauuac

SEQ ID NO: 41529 - RNA, 19 nt, Artificial Sequence
  Description of Artificial Sequence: Synthetic oligonucleotide
ccgaauugaugggauauga

SEQ ID NO: 41530 - RNA, 19 nt, Artificial Sequence
  Description of Artificial Sequence: Synthetic oligonucleotide
agccagaagaacuuuuagg

SEQ ID NO: 41531 - RNA, 19 nt, Artificial Sequence
  Description of Artificial Sequence: Synthetic oligonucleotide
gccgcucaauuuaugaaua

SEQ ID NO: 41532 - RNA, 19 nt, Artificial Sequence
  Description of Artificial Sequence: Synthetic oligonucleotide
auuaucaugcuuuggacuc

SEQ ID NO: 41533 - RNA, 19 nt, Artificial Sequence
  Description of Artificial Sequence: Synthetic oligonucleotide
cugaucaucugaccaaaac

SEQ ID NO: 41534 - RNA, 19 nt, Artificial Sequence
  Description of Artificial Sequence: Synthetic oligonucleotide
cucaucaugauauguuuac

SEQ ID NO: 41535 - RNA, 19 nt, Artificial Sequence
  Description of Artificial Sequence: Synthetic oligonucleotide
cuaaaggacaagucaccac

SEQ ID NO: 41536 - RNA, 19 nt, Artificial Sequence
  Description of Artificial Sequence: Synthetic oligonucleotide
caggacaguacaggaugcu

SEQ ID NO: 41537 - RNA, 19 nt, Artificial Sequence
  Description of Artificial Sequence: Synthetic oligonucleotide
uugccaaaagagguggaua

SEQ ID NO: 41538 - RNA, 19 nt, Artificial Sequence
  Description of Artificial Sequence: Synthetic oligonucleotide
augucuggguugaaacuca

SEQ ID NO: 41539 - RNA, 19 nt, Artificial Sequence
  Description of Artificial Sequence: Synthetic oligonucleotide
aagcaacugucauauauaa

SEQ ID NO: 41540 - RNA, 19 nt, Artificial Sequence
  Description of Artificial Sequence: Synthetic oligonucleotide
acaccaagaauucucaacc

SEQ ID NO: 41541 - RNA, 19 nt, Artificial Sequence
  Description of Artificial Sequence: Synthetic oligonucleotide
cacagugcauuguaugugu

SEQ ID NO: 41542 - RNA, 19 nt, Artificial Sequence
  Description of Artificial Sequence: Synthetic oligonucleotide
ugaauuacguugugagugg

SEQ ID NO: 41543 - RNA, 19 nt, Artificial Sequence
  Description of Artificial Sequence: Synthetic oligonucleotide
guauuauucagcacgacuu

SEQ ID NO: 41544 - RNA, 19 nt, Artificial Sequence
  Description of Artificial Sequence: Synthetic oligonucleotide
ugauuuucucccuucaaca

SEQ ID NO: 41545 - RNA, 19 nt, Artificial Sequence
  Description of Artificial Sequence: Synthetic oligonucleotide
aaacagaauguguccuuaa

SEQ ID NO: 41546 - RNA, 19 nt, Artificial Sequence
  Description of Artificial Sequence: Synthetic oligonucleotide
aaccgguugaaucuucaga

SEQ ID NO: 41547 - RNA, 19 nt, Artificial Sequence
  Description of Artificial Sequence: Synthetic oligonucleotide
auaugaaaaugacucagcu

SEQ ID NO: 41548 - RNA, 19 nt, Artificial Sequence
  Description of Artificial Sequence: Synthetic oligonucleotide
uauucaccaaaguugaauc

SEQ ID NO: 41549 - RNA, 19 nt, Artificial Sequence
  Description of Artificial Sequence: Synthetic oligonucleotide
cagaagauacaaguagccu

SEQ ID NO: 41550 - RNA, 19 nt, Artificial Sequence
  Description of Artificial Sequence: Synthetic oligonucleotide
ucuuugacaaacuuaagaa

SEQ ID NO: 41551 - RNA, 19 nt, Artificial Sequence
  Description of Artificial Sequence: Synthetic oligonucleotide
aggaaccugaugcuuuaac

SEQ ID NO: 41552 - RNA, 19 nt, Artificial Sequence
  Description of Artificial Sequence: Synthetic oligonucleotide
cuuugcuggccccagccgc

SEQ ID NO: 41553 - RNA, 19 nt, Artificial Sequence
  Description of Artificial Sequence: Synthetic oligonucleotide
cuggagacacaaucauauc

SEQ ID NO: 41554 - RNA, 19 nt, Artificial Sequence
  Description of Artificial Sequence: Synthetic oligonucleotide
cuuuagauuuuggcagcaa

SEQ ID NO: 41555 - RNA, 19 nt, Artificial Sequence
  Description of Artificial Sequence: Synthetic oligonucleotide
acgacacagaaacugauga

SEQ ID NO: 41556 - RNA, 19 nt, Artificial Sequence
  Description of Artificial Sequence: Synthetic oligonucleotide
accagcaacuugaggaagu

SEQ ID NO: 41557 - RNA, 19 nt, Artificial Sequence
  Description of Artificial Sequence: Synthetic oligonucleotide
uaccauuauauaaugaugu

SEQ ID NO: 41558 - RNA, 19 nt, Artificial Sequence
  Description of Artificial Sequence: Synthetic oligonucleotide
uaaugcuccccucacccaa

SEQ ID NO: 41559 - RNA, 19 nt, Artificial Sequence
  Description of Artificial Sequence: Synthetic oligonucleotide
acgaaaaauuacagaauau

SEQ ID NO: 41560 - RNA, 19 nt, Artificial Sequence
  Description of Artificial Sequence: Synthetic oligonucleotide
uaaauuuggcaaugucucc

SEQ ID NO: 41561 - RNA, 19 nt, Artificial Sequence
  Description of Artificial Sequence: Synthetic oligonucleotide
cauuacccaccgcugaaac

SEQ ID NO: 41562 - RNA, 19 nt, Artificial Sequence
  Description of Artificial Sequence: Synthetic oligonucleotide
cgccaaagccacuucgaag

SEQ ID NO: 41563 - RNA, 19 nt, Artificial Sequence
  Description of Artificial Sequence: Synthetic oligonucleotide
guagugcugacccugcacu

SEQ ID NO: 41564 - RNA, 19 nt, Artificial Sequence
  Description of Artificial Sequence: Synthetic oligonucleotide
ucaaucaagaaguugcauu

SEQ ID NO: 41565 - RNA, 19 nt, Artificial Sequence
  Description of Artificial Sequence: Synthetic oligonucleotide
uaaaauuagaaccaaaucc

SEQ ID NO: 41566 - RNA, 19 nt, Artificial Sequence
  Description of Artificial Sequence: Synthetic oligonucleotide
cagagucacuggaacuuuc

SEQ ID NO: 41567 - RNA, 19 nt, Artificial Sequence
  Description of Artificial Sequence: Synthetic oligonucleotide
cuuuuaccaugccccagau

SEQ ID NO: 41568 - RNA, 19 nt, Artificial Sequence
  Description of Artificial Sequence: Synthetic oligonucleotide
uucaggaucagacaccuag

SEQ ID NO: 41569 - RNA, 19 nt, Artificial Sequence
  Description of Artificial Sequence: Synthetic oligonucleotide
guccuuccgauggaagcac

SEQ ID NO: 41570 - RNA, 19 nt, Artificial Sequence
  Description of Artificial Sequence: Synthetic oligonucleotide
cuagacaaaguucaccuga

SEQ ID NO: 41571 - RNA, 19 nt, Artificial Sequence
  Description of Artificial Sequence: Synthetic oligonucleotide
agccuaauagucccaguga

SEQ ID NO: 41572 - RNA, 19 nt, Artificial Sequence
  Description of Artificial Sequence: Synthetic oligonucleotide
aauauuguuuuuaugugga

SEQ ID NO: 41573 - RNA, 19 nt, Artificial Sequence
  Description of Artificial Sequence: Synthetic oligonucleotide
auagugauauggucaauga

SEQ ID NO: 41574 - RNA, 19 nt, Artificial Sequence
  Description of Artificial Sequence: Synthetic oligonucleotide
aauucaaguuggaauuggu

SEQ ID NO: 41575 - RNA, 19 nt, Artificial Sequence
  Description of Artificial Sequence: Synthetic oligonucleotide
uagaaaaacuuuuugcuga

SEQ ID NO: 41576 - RNA, 19 nt, Artificial Sequence
  Description of Artificial Sequence: Synthetic oligonucleotide
aagacacagaagcaaagaa

SEQ ID NO: 41577 - RNA, 19 nt, Artificial Sequence
  Description of Artificial Sequence: Synthetic oligonucleotide
acccauuuucuacucagga

SEQ ID NO: 41578 - RNA, 19 nt, Artificial Sequence
  Description of Artificial Sequence: Synthetic oligonucleotide
acacagauuuagacuugga

SEQ ID NO: 41579 - RNA, 19 nt, Artificial Sequence
  Description of Artificial Sequence: Synthetic oligonucleotide
agauguuagcucccuauau

SEQ ID NO: 41580 - RNA, 19 nt, Artificial Sequence
  Description of Artificial Sequence: Synthetic oligonucleotide
ucccaauggaugaugacuu

SEQ ID NO: 41581 - RNA, 19 nt, Artificial Sequence
  Description of Artificial Sequence: Synthetic oligonucleotide
uccaguuacguuccuucga

SEQ ID NO: 41582 - RNA, 19 nt, Artificial Sequence
  Description of Artificial Sequence: Synthetic oligonucleotide
aucaguugucaccauuaga

SEQ ID NO: 41583 - RNA, 19 nt, Artificial Sequence
  Description of Artificial Sequence: Synthetic oligonucleotide
aaagcaguuccgcaagccc

SEQ ID NO: 41584 - RNA, 19 nt, Artificial Sequence
  Description of Artificial Sequence: Synthetic oligonucleotide
cugaaagcgcaaguccuca

SEQ ID NO: 41585 - RNA, 19 nt, Artificial Sequence
  Description of Artificial Sequence: Synthetic oligonucleotide
aaagcacaguuacaguauu

SEQ ID NO: 41586 - RNA, 19 nt, Artificial Sequence
  Description of Artificial Sequence: Synthetic oligonucleotide
uccagcagacucaaauaca

SEQ ID NO: 41587 - RNA, 19 nt, Artificial Sequence
  Description of Artificial Sequence: Synthetic oligonucleotide
aagaaccuacugcuaaugc

SEQ ID NO: 41588 - RNA, 19 nt, Artificial Sequence
  Description of Artificial Sequence: Synthetic oligonucleotide
ccaccacuaccacugccac

SEQ ID NO: 41589 - RNA, 19 nt, Artificial Sequence
  Description of Artificial Sequence: Synthetic oligonucleotide
ccacugaugaauuaaaaac

SEQ ID NO: 41590 - RNA, 19 nt, Artificial Sequence
  Description of Artificial Sequence: Synthetic oligonucleotide
cagugacaaaagaccguau

SEQ ID NO: 41591 - RNA, 19 nt, Artificial Sequence
  Description of Artificial Sequence: Synthetic oligonucleotide
uggaagacauuaaaauauu

SEQ ID NO: 41592 - RNA, 19 nt, Artificial Sequence
  Description of Artificial Sequence: Synthetic oligonucleotide
ugauugcaucuccaucucc

SEQ ID NO: 41593 - RNA, 19 nt, Artificial Sequence
  Description of Artificial Sequence: Synthetic oligonucleotide
cuacccacauacauaaaga

SEQ ID NO: 41594 - RNA, 19 nt, Artificial Sequence
  Description of Artificial Sequence: Synthetic oligonucleotide
aaacuacuagugccacauc

SEQ ID NO: 41595 - RNA, 19 nt, Artificial Sequence
  Description of Artificial Sequence: Synthetic oligonucleotide
caucaccauauagagauac

SEQ ID NO: 41596 - RNA, 19 nt, Artificial Sequence
  Description of Artificial Sequence: Synthetic oligonucleotide
cucaaagucggacagccuc

SEQ ID NO: 41597 - RNA, 19 nt, Artificial Sequence
  Description of Artificial Sequence: Synthetic oligonucleotide
caccaaacagagcaggaaa

SEQ ID NO: 41598 - RNA, 19 nt, Artificial Sequence
  Description of Artificial Sequence: Synthetic oligonucleotide
aaggagucauagaacagac

SEQ ID NO: 41599 - RNA, 19 nt, Artificial Sequence
  Description of Artificial Sequence: Synthetic oligonucleotide
cagaaaaaucucauccaag

SEQ ID NO: 41600 - RNA, 19 nt, Artificial Sequence
  Description of Artificial Sequence: Synthetic oligonucleotide
gaagcccuaacguguuauc

SEQ ID NO: 41601 - RNA, 19 nt, Artificial Sequence
  Description of Artificial Sequence: Synthetic oligonucleotide
cugucgcuuugagucaaag

SEQ ID NO: 41602 - RNA, 19 nt, Artificial Sequence
  Description of Artificial Sequence: Synthetic oligonucleotide
gaacuacaguuccugagga

SEQ ID NO: 41603 - RNA, 19 nt, Artificial Sequence
  Description of Artificial Sequence: Synthetic oligonucleotide
aagaacuaaauccaaagau

SEQ ID NO: 41604 - RNA, 19 nt, Artificial Sequence
  Description of Artificial Sequence: Synthetic oligonucleotide
uacuagcuuugcagaaugc

SEQ ID NO: 41605 - RNA, 19 nt, Artificial Sequence
  Description of Artificial Sequence: Synthetic oligonucleotide
cucagagaaagcgaaaaau

SEQ ID NO: 41606 - RNA, 19 nt, Artificial Sequence
  Description of Artificial Sequence: Synthetic oligonucleotide
uggaacaugaugguucacu

SEQ ID NO: 41607 - RNA, 19 nt, Artificial Sequence
  Description of Artificial Sequence: Synthetic oligonucleotide
uuuuucaagcaguaggaau

SEQ ID NO: 41608 - RNA, 19 nt, Artificial Sequence
  Description of Artificial Sequence: Synthetic oligonucleotide
uuggaacauuauuacagca

SEQ ID NO: 41609 - RNA, 19 nt, Artificial Sequence
  Description of Artificial Sequence: Synthetic oligonucleotide
agccagacgaucaugcagc

SEQ ID NO: 41610 - RNA, 19 nt, Artificial Sequence
  Description of Artificial Sequence: Synthetic oligonucleotide
cuacuacaucacuuucuug

SEQ ID NO: 41611 - RNA, 19 nt, Artificial Sequence
  Description of Artificial Sequence: Synthetic oligonucleotide
ggaaacguguaaaaggaug

SEQ ID NO: 41612 - RNA, 19 nt, Artificial Sequence
  Description of Artificial Sequence: Synthetic oligonucleotide
gcaaaucuagugaacagaa

SEQ ID NO: 41613 - RNA, 19 nt, Artificial Sequence
  Description of Artificial Sequence: Synthetic oligonucleotide
auggaauggagcaaaagac

SEQ ID NO: 41614 - RNA, 19 nt, Artificial Sequence
  Description of Artificial Sequence: Synthetic oligonucleotide
caauuauuuuaauacccuc

SEQ ID NO: 41615 - RNA, 19 nt, Artificial Sequence
  Description of Artificial Sequence: Synthetic oligonucleotide
cugauuuagcauguagacu

SEQ ID NO: 41616 - RNA, 19 nt, Artificial Sequence
  Description of Artificial Sequence: Synthetic oligonucleotide
ugcuggggcaaucaaugga

SEQ ID NO: 41617 - RNA, 19 nt, Artificial Sequence
  Description of Artificial Sequence: Synthetic oligonucleotide
augaaaguggauuaccaca

SEQ ID NO: 41618 - RNA, 19 nt, Artificial Sequence
  Description of Artificial Sequence: Synthetic oligonucleotide
agcugaccaguuaugauug

SEQ ID NO: 41619 - RNA, 19 nt, Artificial Sequence
  Description of Artificial Sequence: Synthetic oligonucleotide
gugaaguuaaugcuccuau

SEQ ID NO: 41620 - RNA, 19 nt, Artificial Sequence
  Description of Artificial Sequence: Synthetic oligonucleotide
uacaaggcagcagaaaccu

SEQ ID NO: 41621 - RNA, 19 nt, Artificial Sequence
  Description of Artificial Sequence: Synthetic oligonucleotide
uacugcagggugaagaauu

SEQ ID NO: 41622 - RNA, 19 nt, Artificial Sequence
  Description of Artificial Sequence: Synthetic oligonucleotide
uacucagagcuuuggauca

SEQ ID NO: 41623 - RNA, 19 nt, Artificial Sequence
  Description of Artificial Sequence: Synthetic oligonucleotide
aaguuaacugagcuuuuuc

SEQ ID NO: 41624 - RNA, 19 nt, Artificial Sequence
  Description of Artificial Sequence: Synthetic oligonucleotide
cuuaauuucauuccuuuuu

SEQ ID NO: 41625 - RNA, 19 nt, Artificial Sequence
  Description of Artificial Sequence: Synthetic oligonucleotide
uuuggacacugguggcuca

SEQ ID NO: 41626 - RNA, 19 nt, Artificial Sequence
  Description of Artificial Sequence: Synthetic oligonucleotide
acuaccuaaagcagucuau

SEQ ID NO: 41627 - RNA, 19 nt, Artificial Sequence
  Description of Artificial Sequence: Synthetic oligonucleotide
uuuauauuuucuacaucua

SEQ ID NO: 41628 - RNA, 19 nt, Artificial Sequence
  Description of Artificial Sequence: Synthetic oligonucleotide
aauuuuagaagccuggcua

SEQ ID NO: 41629 - RNA, 19 nt, Artificial Sequence
  Description of Artificial Sequence: Synthetic oligonucleotide
acaauacugcacaaacuug

SEQ ID NO: 41630 - RNA, 19 nt, Artificial Sequence
  Description of Artificial Sequence: Synthetic oligonucleotide
gguuaguucaauuuuugau

SEQ ID NO: 41631 - RNA, 19 nt, Artificial Sequence
  Description of Artificial Sequence: Synthetic oligonucleotide
uccccuuucuacuuaauuu

SEQ ID NO: 41632 - RNA, 19 nt, Artificial Sequence
  Description of Artificial Sequence: Synthetic oligonucleotide
uacauuaaugcucuuuuuu

SEQ ID NO: 41633 - RNA, 19 nt, Artificial Sequence
  Description of Artificial Sequence: Synthetic oligonucleotide
uaguauguucuuuaaugcu

SEQ ID NO: 41634 - RNA, 19 nt, Artificial Sequence
  Description of Artificial Sequence: Synthetic oligonucleotide
uggaucacagacagcucau

SEQ ID NO: 41635 - RNA, 19 nt, Artificial Sequence
  Description of Artificial Sequence: Synthetic oligonucleotide
uuuucucaguuuuuuggua

SEQ ID NO: 41636 - RNA, 19 nt, Artificial Sequence
  Description of Artificial Sequence: Synthetic oligonucleotide
auuuaaaccauugcauugc

SEQ ID NO: 41637 - RNA, 19 nt, Artificial Sequence
  Description of Artificial Sequence: Synthetic oligonucleotide
caguagcaucauuuuaaaa

SEQ ID NO: 41638 - RNA, 19 nt, Artificial Sequence
  Description of Artificial Sequence: Synthetic oligonucleotide
aaaugcaccuuuuuauuua

SEQ ID NO: 41639 - RNA, 19 nt, Artificial Sequence
  Description of Artificial Sequence: Synthetic oligonucleotide
auuuauuuuuggcuaggga

SEQ ID NO: 41640 - RNA, 19 nt, Artificial Sequence
  Description of Artificial Sequence: Synthetic oligonucleotide
aguuuaucccuuuuucgaa

SEQ ID NO: 41641 - RNA, 19 nt, Artificial Sequence
  Description of Artificial Sequence: Synthetic oligonucleotide
auuauuuuuaagaagaugc

SEQ ID NO: 41642 - RNA, 19 nt, Artificial Sequence
  Description of Artificial Sequence: Synthetic oligonucleotide
ccaauauaauuuuuguaag

SEQ ID NO: 41643 - RNA, 19 nt, Artificial Sequence
  Description of Artificial Sequence: Synthetic oligonucleotide
gaaggcaguaaccuuucau

SEQ ID NO: 41644 - RNA, 19 nt, Artificial Sequence
  Description of Artificial Sequence: Synthetic oligonucleotide
ucaugaucauaggcaguug

SEQ ID NO: 41645 - RNA, 19 nt, Artificial Sequence
  Description of Artificial Sequence: Synthetic oligonucleotide
gaaaaauuuuuacaccuuu

SEQ ID NO: 41646 - RNA, 19 nt, Artificial Sequence
  Description of Artificial Sequence: Synthetic oligonucleotide
uuuuuucacauuuuacaua

SEQ ID NO: 41647 - RNA, 19 nt, Artificial Sequence
  Description of Artificial Sequence: Synthetic oligonucleotide
aaauaauaaugcuuugcca

SEQ ID NO: 41648 - RNA, 19 nt, Artificial Sequence
  Description of Artificial Sequence: Synthetic oligonucleotide
agcaguacgugguagccac

SEQ ID NO: 41649 - RNA, 19 nt, Artificial Sequence
  Description of Artificial Sequence: Synthetic oligonucleotide
caauugcacaauauauuuu

SEQ ID NO: 41650 - RNA, 19 nt, Artificial Sequence
  Description of Artificial Sequence: Synthetic oligonucleotide
ucuuaaaaaauaccagcag

SEQ ID NO: 41651 - RNA, 19 nt, Artificial Sequence
  Description of Artificial Sequence: Synthetic oligonucleotide
guuacucauggaauauauu

SEQ ID NO: 41652 - RNA, 19 nt, Artificial Sequence
  Description of Artificial Sequence: Synthetic oligonucleotide
ucugcguuuauaaaacuag

SEQ ID NO: 41653 - RNA, 19 nt, Artificial Sequence
  Description of Artificial Sequence: Synthetic oligonucleotide
guuuuuaagaagaaauuuu

SEQ ID NO: 41654 - RNA, 19 nt, Artificial Sequence
  Description of Artificial Sequence: Synthetic oligonucleotide
uuuuuggccuaugaaauug

SEQ ID NO: 41655 - RNA, 19 nt, Artificial Sequence
  Description of Artificial Sequence: Synthetic oligonucleotide
guuaaaccuggaacaugac

SEQ ID NO: 41656 - RNA, 19 nt, Artificial Sequence
  Description of Artificial Sequence: Synthetic oligonucleotide
cauuguuaaucauauaaua

SEQ ID NO: 41657 - RNA, 19 nt, Artificial Sequence
  Description of Artificial Sequence: Synthetic oligonucleotide
aaugauucuuaaaugcugu

SEQ ID NO: 41658 - RNA, 19 nt, Artificial Sequence
  Description of Artificial Sequence: Synthetic oligonucleotide
uaugguuuauuauuuaaau

SEQ ID NO: 41659 - RNA, 19 nt, Artificial Sequence
  Description of Artificial Sequence: Synthetic oligonucleotide
uggguaaagccauuuacau

SEQ ID NO: 41660 - RNA, 19 nt, Artificial Sequence
  Description of Artificial Sequence: Synthetic oligonucleotide
uaauauagaaagauaugca

SEQ ID NO: 41661 - RNA, 19 nt, Artificial Sequence
  Description of Artificial Sequence: Synthetic oligonucleotide
auauaucuagaagguaugu

SEQ ID NO: 41662 - RNA, 19 nt, Artificial Sequence
  Description of Artificial Sequence: Synthetic oligonucleotide
uggcauuuauuuggauaaa

SEQ ID NO: 41663 - RNA, 19 nt, Artificial Sequence
  Description of Artificial Sequence: Synthetic oligonucleotide
aauucucaauucagagaaa

SEQ ID NO: 41664 - RNA, 19 nt, Artificial Sequence
  Description of Artificial Sequence: Synthetic oligonucleotide
aucaucugauguuucuaua

SEQ ID NO: 41665 - RNA, 19 nt, Artificial Sequence
  Description of Artificial Sequence: Synthetic oligonucleotide
agucacuuugccagcucaa

SEQ ID NO: 41666 - RNA, 19 nt, Artificial Sequence
  Description of Artificial Sequence: Synthetic oligonucleotide
aaagaaaacaauacccuau

SEQ ID NO: 41667 - RNA, 19 nt, Artificial Sequence
  Description of Artificial Sequence: Synthetic oligonucleotide
uguaguuguggaaguuuau

SEQ ID NO: 41668 - RNA, 19 nt, Artificial Sequence
  Description of Artificial Sequence: Synthetic oligonucleotide
ugcuaauauuguguaacug

SEQ ID NO: 41669 - RNA, 19 nt, Artificial Sequence
  Description of Artificial Sequence: Synthetic oligonucleotide
gauauuaaaccuaaauguu

SEQ ID NO: 41670 - RNA, 19 nt, Artificial Sequence
  Description of Artificial Sequence: Synthetic oligonucleotide
ucugccuacccuguuggua

SEQ ID NO: 41671 - RNA, 19 nt, Artificial Sequence
  Description of Artificial Sequence: Synthetic oligonucleotide
auaaagauauuuugagcag

SEQ ID NO: 41672 - RNA, 19 nt, Artificial Sequence
  Description of Artificial Sequence: Synthetic oligonucleotide
gacuguaaacaagaaaaaa

SEQ ID NO: 41673 - RNA, 19 nt, Artificial Sequence
  Description of Artificial Sequence: Synthetic oligonucleotide
aaaaaucaugcauucuuag

SEQ ID NO: 41674 - RNA, 19 nt, Artificial Sequence
  Description of Artificial Sequence: Synthetic oligonucleotide
gcaaaauugccuaguaugu

SEQ ID NO: 41675 - RNA, 19 nt, Artificial Sequence
  Description of Artificial Sequence: Synthetic oligonucleotide
uuaauuugcucaaaauaca

SEQ ID NO: 41676 - RNA, 19 nt, Artificial Sequence
  Description of Artificial Sequence: Synthetic oligonucleotide
aauguuugauuuuaugcac

SEQ ID NO: 41677 - RNA, 19 nt, Artificial Sequence
  Description of Artificial Sequence: Synthetic oligonucleotide
cuuugucgcuauuaacauc

SEQ ID NO: 41678 - RNA, 19 nt, Artificial Sequence
  Description of Artificial Sequence: Synthetic oligonucleotide
ccuuuuuuucauguagauu

SEQ ID NO: 41679 - RNA, 19 nt, Artificial Sequence
  Description of Artificial Sequence: Synthetic oligonucleotide
uucaauaauugaguaauuu

SEQ ID NO: 41680 - RNA, 19 nt, Artificial Sequence
  Description of Artificial Sequence: Synthetic oligonucleotide
uuagaagcauuauuuuagg

SEQ ID NO: 41681 - RNA, 19 nt, Artificial Sequence
  Description of Artificial Sequence: Synthetic oligonucleotide
gaauauauaguugucacag

SEQ ID NO: 41682 - RNA, 19 nt, Artificial Sequence
  Description of Artificial Sequence: Synthetic oligonucleotide
guaaauaucuuguuuuuuc

SEQ ID NO: 41683 - RNA, 19 nt, Artificial Sequence
  Description of Artificial Sequence: Synthetic oligonucleotide
cuauguacauuguacaaau

SEQ ID NO: 41684 - RNA, 19 nt, Artificial Sequence
  Description of Artificial Sequence: Synthetic oligonucleotide
uuuuucauuccuuuugcuc

SEQ ID NO: 41685 - RNA, 19 nt, Artificial Sequence
  Description of Artificial Sequence: Synthetic oligonucleotide
cuuugugguuggaucuaac

SEQ ID NO: 41686 - RNA, 19 nt, Artificial Sequence
  Description of Artificial Sequence: Synthetic oligonucleotide
cacuaacuguauuguuuug

SEQ ID NO: 41687 - RNA, 19 nt, Artificial Sequence
  Description of Artificial Sequence: Synthetic oligonucleotide
guuacaucaaauaaacauc

SEQ ID NO: 41688 - RNA, 19 nt, Artificial Sequence
  Description of Artificial Sequence: Synthetic oligonucleotide
cuucuguggaccaggaaaa

SEQ ID NO: 41689 - RNA, 19 nt, Artificial Sequence
  Description of Artificial Sequence: Synthetic oligonucleotide
uuauuuagcauguagacug

SEQ ID NO: 41690 - RNA, 19 nt, Artificial Sequence
  Description of Artificial Sequence: Synthetic oligonucleotide
gcuggggcaaucaauggau

SEQ ID NO: 41691 - RNA, 19 nt, Artificial Sequence
  Description of Artificial Sequence: Synthetic oligonucleotide
ugaaaguggauuaccacag

SEQ ID NO: 41692 - RNA, 19 nt, Artificial Sequence
  Description of Artificial Sequence: Synthetic oligonucleotide
gcugaccaguuaugauugu

SEQ ID NO: 41693 - RNA, 19 nt, Artificial Sequence
  Description of Artificial Sequence: Synthetic oligonucleotide
ugaaguuaaugcuccuaua

SEQ ID NO: 41694 - RNA, 19 nt, Artificial Sequence
  Description of Artificial Sequence: Synthetic oligonucleotide
acaaggcagcagaaaccua

SEQ ID NO: 41695 - RNA, 19 nt, Artificial Sequence
  Description of Artificial Sequence: Synthetic oligonucleotide
acugcagggugaagaauua

SEQ ID NO: 41696 - RNA, 19 nt, Artificial Sequence
  Description of Artificial Sequence: Synthetic oligonucleotide
acucagagcuuuggaucaa

SEQ ID NO: 41697 - RNA, 19 nt, Artificial Sequence
  Description of Artificial Sequence: Synthetic oligonucleotide
aguuaacugagcuuuuucu

SEQ ID NO: 41698 - RNA, 19 nt, Artificial Sequence
  Description of Artificial Sequence: Synthetic oligonucleotide
uuaauuucauuccuuuuuu

SEQ ID NO: 41699 - RNA, 19 nt, Artificial Sequence
  Description of Artificial Sequence: Synthetic oligonucleotide
uuggacacugguggcucac

SEQ ID NO: 41700 - RNA, 19 nt, Artificial Sequence
  Description of Artificial Sequence: Synthetic oligonucleotide
cuaccuaaagcagucuauu

SEQ ID NO: 41701 - RNA, 19 nt, Artificial Sequence
  Description of Artificial Sequence: Synthetic oligonucleotide
uuauauuuucuacaucuaa

SEQ ID NO: 41702 - RNA, 19 nt, Artificial Sequence
  Description of Artificial Sequence: Synthetic oligonucleotide
auuuuagaagccuggcuac

SEQ ID NO: 41703 - RNA, 19 nt, Artificial Sequence
  Description of Artificial Sequence: Synthetic oligonucleotide
caauacugcacaaacuugg

SEQ ID NO: 41704 - RNA, 19 nt, Artificial Sequence
  Description of Artificial Sequence: Synthetic oligonucleotide
guuaguucaauuuuugauc

SEQ ID NO: 41705 - RNA, 19 nt, Artificial Sequence
  Description of Artificial Sequence: Synthetic oligonucleotide
ccccuuucuacuuaauuua

SEQ ID NO: 41706 - RNA, 19 nt, Artificial Sequence
  Description of Artificial Sequence: Synthetic oligonucleotide
acauuaaugcucuuuuuua

SEQ ID NO: 41707 - RNA, 19 nt, Artificial Sequence
  Description of Artificial Sequence: Synthetic oligonucleotide
aguauguucuuuaaugcug

SEQ ID NO: 41708 - RNA, 19 nt, Artificial Sequence
  Description of Artificial Sequence: Synthetic oligonucleotide
ggaucacagacagcucauu

SEQ ID NO: 41709 - RNA, 19 nt, Artificial Sequence
  Description of Artificial Sequence: Synthetic oligonucleotide
uuucucaguuuuuugguau

SEQ ID NO: 41710 - RNA, 19 nt, Artificial Sequence
  Description of Artificial Sequence: Synthetic oligonucleotide
uuuaaaccauugcauugca

SEQ ID NO: 41711 - RNA, 19 nt, Artificial Sequence
  Description of Artificial Sequence: Synthetic oligonucleotide
aguagcaucauuuuaaaaa

SEQ ID NO: 41712 - RNA, 19 nt, Artificial Sequence
  Description of Artificial Sequence: Synthetic oligonucleotide
aaugcaccuuuuuauuuau

SEQ ID NO: 41713 - RNA, 19 nt, Artificial Sequence
  Description of Artificial Sequence: Synthetic oligonucleotide
uuuauuuuuggcuagggag

SEQ ID NO: 41714 - RNA, 19 nt, Artificial Sequence
  Description of Artificial Sequence: Synthetic oligonucleotide
guuuaucccuuuuucgaau

SEQ ID NO: 41715 - RNA, 19 nt, Artificial Sequence
  Description of Artificial Sequence: Synthetic oligonucleotide
uuauuuuuaagaagaugcc

SEQ ID NO: 41716 - RNA, 19 nt, Artificial Sequence
  Description of Artificial Sequence: Synthetic oligonucleotide
caauauaauuuuuguaaga

SEQ ID NO: 41717 - RNA, 19 nt, Artificial Sequence
  Description of Artificial Sequence: Synthetic oligonucleotide
aaggcaguaaccuuucauc

SEQ ID NO: 41718 - RNA, 19 nt, Artificial Sequence
  Description of Artificial Sequence: Synthetic oligonucleotide
caugaucauaggcaguuga

SEQ ID NO: 41719 - RNA, 19 nt, Artificial Sequence
  Description of Artificial Sequence: Synthetic oligonucleotide
aaaaauuuuuacaccuuuu

SEQ ID NO: 41720 - RNA, 19 nt, Artificial Sequence
  Description of Artificial Sequence: Synthetic oligonucleotide
uuuuucacauuuuacauaa

SEQ ID NO: 41721 - RNA, 19 nt, Artificial Sequence
  Description of Artificial Sequence: Synthetic oligonucleotide
aauaauaaugcuuugccag

SEQ ID NO: 41722 - RNA, 19 nt, Artificial Sequence
  Description of Artificial Sequence: Synthetic oligonucleotide
gcaguacgugguagccaca

SEQ ID NO: 41723 - RNA, 19 nt, Artificial Sequence
  Description of Artificial Sequence: Synthetic oligonucleotide
aauugcacaauauauuuuc

SEQ ID NO: 41724 - RNA, 19 nt, Artificial Sequence
  Description of Artificial Sequence: Synthetic oligonucleotide
cuuaaaaaauaccagcagu

SEQ ID NO: 41725 - RNA, 19 nt, Artificial Sequence
  Description of Artificial Sequence: Synthetic oligonucleotide
uuacucauggaauauauuc

SEQ ID NO: 41726 - RNA, 19 nt, Artificial Sequence
  Description of Artificial Sequence: Synthetic oligonucleotide
cugcguuuauaaaacuagu

SEQ ID NO: 41727 - RNA, 19 nt, Artificial Sequence
  Description of Artificial Sequence: Synthetic oligonucleotide
uuuuuaagaagaaauuuuu

SEQ ID NO: 41728 - RNA, 19 nt, Artificial Sequence
  Description of Artificial Sequence: Synthetic oligonucleotide
uuuuggccuaugaaauugu

SEQ ID NO: 41729 - RNA, 19 nt, Artificial Sequence
  Description of Artificial Sequence: Synthetic oligonucleotide
uuaaaccuggaacaugaca

SEQ ID NO: 41730 - RNA, 19 nt, Artificial Sequence
  Description of Artificial Sequence: Synthetic oligonucleotide
auuguuaaucauauaauaa

SEQ ID NO: 41731 - RNA, 19 nt, Artificial Sequence
  Description of Artificial Sequence: Synthetic oligonucleotide
augauucuuaaaugcugua

SEQ ID NO: 41732 - RNA, 19 nt, Artificial Sequence
  Description of Artificial Sequence: Synthetic oligonucleotide
augguuuauuauuuaaaug

SEQ ID NO: 41733 - RNA, 19 nt, Artificial Sequence
  Description of Artificial Sequence: Synthetic oligonucleotide
ggguaaagccauuuacaua

SEQ ID NO: 41734 - RNA, 19 nt, Artificial Sequence
  Description of Artificial Sequence: Synthetic oligonucleotide
aauauagaaagauaugcau

SEQ ID NO: 41735 - RNA, 19 nt, Artificial Sequence
  Description of Artificial Sequence: Synthetic oligonucleotide
uauaucuagaagguaugug

SEQ ID NO: 41736 - RNA, 19 nt, Artificial Sequence
  Description of Artificial Sequence: Synthetic oligonucleotide
ggcauuuauuuggauaaaa

SEQ ID NO: 41737 - RNA, 19 nt, Artificial Sequence
  Description of Artificial Sequence: Synthetic oligonucleotide
auucucaauucagagaaau

SEQ ID NO: 41738 - RNA, 19 nt, Artificial Sequence
  Description of Artificial Sequence: Synthetic oligonucleotide
ucaucugauguuucuauag

SEQ ID NO: 41739 - RNA, 19 nt, Artificial Sequence
  Description of Artificial Sequence: Synthetic oligonucleotide
gucacuuugccagcucaaa

SEQ ID NO: 41740 - RNA, 19 nt, Artificial Sequence
  Description of Artificial Sequence: Synthetic oligonucleotide
aagaaaacaauacccuaug

SEQ ID NO: 41741 - RNA, 19 nt, Artificial Sequence
  Description of Artificial Sequence: Synthetic oligonucleotide
guaguuguggaaguuuaug

SEQ ID NO: 41742 - RNA, 19 nt, Artificial Sequence
  Description of Artificial Sequence: Synthetic oligonucleotide
gcuaauauuguguaacuga

SEQ ID NO: 41743 - RNA, 19 nt, Artificial Sequence
  Description of Artificial Sequence: Synthetic oligonucleotide
auauuaaaccuaaauguuc

SEQ ID NO: 41744 - RNA, 19 nt, Artificial Sequence
  Description of Artificial Sequence: Synthetic oligonucleotide
cugccuacccuguugguau

SEQ ID NO: 41745 - RNA, 19 nt, Artificial Sequence
  Description of Artificial Sequence: Synthetic oligonucleotide
uaaagauauuuugagcaga

SEQ ID NO: 41746 - RNA, 19 nt, Artificial Sequence
  Description of Artificial Sequence: Synthetic oligonucleotide
acuguaaacaagaaaaaaa

SEQ ID NO: 41747 - RNA, 19 nt, Artificial Sequence
  Description of Artificial Sequence: Synthetic oligonucleotide
aaaaucaugcauucuuagc

SEQ ID NO: 41748 - RNA, 19 nt, Artificial Sequence
  Description of Artificial Sequence: Synthetic oligonucleotide
caaaauugccuaguauguu

SEQ ID NO: 41749 - RNA, 19 nt, Artificial Sequence
  Description of Artificial Sequence: Synthetic oligonucleotide
uaauuugcucaaaauacaa

SEQ ID NO: 41750 - RNA, 19 nt, Artificial Sequence
  Description of Artificial Sequence: Synthetic oligonucleotide
auguuugauuuuaugcacu

SEQ ID NO: 41751 - RNA, 19 nt, Artificial Sequence
  Description of Artificial Sequence: Synthetic oligonucleotide
uuugucgcuauuaacaucc

SEQ ID NO: 41752 - RNA, 19 nt, Artificial Sequence
  Description of Artificial Sequence: Synthetic oligonucleotide
cuuuuuuucauguagauuu

SEQ ID NO: 41753 - RNA, 19 nt, Artificial Sequence
  Description of Artificial Sequence: Synthetic oligonucleotide
ucaauaauugaguaauuuu

SEQ ID NO: 41754 - RNA, 19 nt, Artificial Sequence
  Description of Artificial Sequence: Synthetic oligonucleotide
uagaagcauuauuuuagga

SEQ ID NO: 41755 - RNA, 19 nt, Artificial Sequence
  Description of Artificial Sequence: Synthetic oligonucleotide
aauauauaguugucacagu

SEQ ID NO: 41756 - RNA, 19 nt, Artificial Sequence
  Description of Artificial Sequence: Synthetic oligonucleotide
uaaauaucuuguuuuuucu

SEQ ID NO: 41757 - RNA, 19 nt, Artificial Sequence
  Description of Artificial Sequence: Synthetic oligonucleotide
uauguacauuguacaaauu

SEQ ID NO: 41758 - RNA, 19 nt, Artificial Sequence
  Description of Artificial Sequence: Synthetic oligonucleotide
uuuucauuccuuuugcucu

SEQ ID NO: 41759 - RNA, 19 nt, Artificial Sequence
  Description of Artificial Sequence: Synthetic oligonucleotide
uuugugguuggaucuaaca

SEQ ID NO: 41760 - RNA, 19 nt, Artificial Sequence
  Description of Artificial Sequence: Synthetic oligonucleotide
acuaacuguauuguuuugu

SEQ ID NO: 41761 - RNA, 19 nt, Artificial Sequence
  Description of Artificial Sequence: Synthetic oligonucleotide
uuacaucaaauaaacaucu

SEQ ID NO: 41762 - RNA, 19 nt, Artificial Sequence
  Description of Artificial Sequence: Synthetic oligonucleotide
acaucuucuguggaccagg

SEQ ID NO: 41763 - RNA, 25 nt, Artificial Sequence
  Description of Artificial Sequence: Synthetic oligonucleotide
gugcugccucgucugaggggacagg

SEQ ID NO: 41764 - RNA, 25 nt, Artificial Sequence
  Description of Artificial Sequence: Synthetic oligonucleotide
gaggaucacccucuucgucgcuucg

SEQ ID NO: 41765 - RNA, 25 nt, Artificial Sequence
  Description of Artificial Sequence: Synthetic oligonucleotide
ggccagugugucgggcugggcccug

SEQ ID NO: 41766 - RNA, 25 nt, Artificial Sequence
  Description of Artificial Sequence: Synthetic oligonucleotide
gacaagccaccugaggagaggcucg

SEQ ID NO: 41767 - RNA, 25 nt, Artificial Sequence
  Description of Artificial Sequence: Synthetic oligonucleotide
ggagccgggcccggaccccggcgau

SEQ ID NO: 41768 - RNA, 25 nt, Artificial Sequence
  Description of Artificial Sequence: Synthetic oligonucleotide
uugccgcccgcuucucucuagucuc

SEQ ID NO: 41769 - RNA, 25 nt, Artificial Sequence
  Description of Artificial Sequence: Synthetic oligonucleotide
cacgagggguuucccgccucgcacc

SEQ ID NO: 41770 - RNA, 25 nt, Artificial Sequence
  Description of Artificial Sequence: Synthetic oligonucleotide
ccccaccucuggacuugccuuuccu

SEQ ID NO: 41771 - RNA, 25 nt, Artificial Sequence
  Description of Artificial Sequence: Synthetic oligonucleotide
uucucuucuccgcguguggagggag

SEQ ID NO: 41772 - RNA, 25 nt, Artificial Sequence
  Description of Artificial Sequence: Synthetic oligonucleotide
gccagcgcuuaggccggagcgagcc

SEQ ID NO: 41773 - RNA, 25 nt, Artificial Sequence
  Description of Artificial Sequence: Synthetic oligonucleotide
cugggggccgcccgccgugaagaca

SEQ ID NO: 41774 - RNA, 25 nt, Artificial Sequence
  Description of Artificial Sequence: Synthetic oligonucleotide
aucgcggggaccgauucaccaugga

SEQ ID NO: 41775 - RNA, 25 nt, Artificial Sequence
  Description of Artificial Sequence: Synthetic oligonucleotide
agggcgccggcggcgcgaacgacaa

SEQ ID NO: 41776 - RNA, 25 nt, Artificial Sequence
  Description of Artificial Sequence: Synthetic oligonucleotide
agaaaaagauaaguucugaacgucg

SEQ ID NO: 41777 - RNA, 25 nt, Artificial Sequence
  Description of Artificial Sequence: Synthetic oligonucleotide
gaaaagaaaagucucgagaugcagc

SEQ ID NO: 41778 - RNA, 25 nt, Artificial Sequence
  Description of Artificial Sequence: Synthetic oligonucleotide
ccagaucucggcgaaguaaagaauc

SEQ ID NO: 41779 - RNA, 25 nt, Artificial Sequence
  Description of Artificial Sequence: Synthetic oligonucleotide
cugaaguuuuuuaugagcuugcuca

SEQ ID NO: 41780 - RNA, 25 nt, Artificial Sequence
  Description of Artificial Sequence: Synthetic oligonucleotide
aucaguugccacuuccacauaaugu

SEQ ID NO: 41781 - RNA, 25 nt, Artificial Sequence
  Description of Artificial Sequence: Synthetic oligonucleotide
ugaguucgcaucuugauaaggccuc

SEQ ID NO: 41782 - RNA, 25 nt, Artificial Sequence
  Description of Artificial Sequence: Synthetic oligonucleotide
cugugaugaggcuuaccaucagcua

SEQ ID NO: 41783 - RNA, 25 nt, Artificial Sequence
  Description of Artificial Sequence: Synthetic oligonucleotide
auuugcgugugaggaaacuucugga

SEQ ID NO: 41784 - RNA, 25 nt, Artificial Sequence
  Description of Artificial Sequence: Synthetic oligonucleotide
augcuggugauuuggauauugaaga

SEQ ID NO: 41785 - RNA, 25 nt, Artificial Sequence
  Description of Artificial Sequence: Synthetic oligonucleotide
augacaugaaagcacagaugaauug

SEQ ID NO: 41786 - RNA, 25 nt, Artificial Sequence
  Description of Artificial Sequence: Synthetic oligonucleotide
gcuuuuauuugaaagccuuggaugg

SEQ ID NO: 41787 - RNA, 25 nt, Artificial Sequence
  Description of Artificial Sequence: Synthetic oligonucleotide
guuuuguuaugguucucacagauga

SEQ ID NO: 41788 - RNA, 25 nt, Artificial Sequence
  Description of Artificial Sequence: Synthetic oligonucleotide
auggugacaugauuuacauuucuga

SEQ ID NO: 41789 - RNA, 25 nt, Artificial Sequence
  Description of Artificial Sequence: Synthetic oligonucleotide
auaaugugaacaaauacaugggauu

SEQ ID NO: 41790 - RNA, 25 nt, Artificial Sequence
  Description of Artificial Sequence: Synthetic oligonucleotide
uaacucaguuugaacuaacuggaca

SEQ ID NO: 41791 - RNA, 25 nt, Artificial Sequence
  Description of Artificial Sequence: Synthetic oligonucleotide
acaguguguuugauuuuacucaucc

SEQ ID NO: 41792 - RNA, 25 nt, Artificial Sequence
  Description of Artificial Sequence: Synthetic oligonucleotide
caugugaccaugaggaaaugagaga

SEQ ID NO: 41793 - RNA, 25 nt, Artificial Sequence
  Description of Artificial Sequence: Synthetic oligonucleotide
aaaugcuuacacacagaaauggccu

SEQ ID NO: 41794 - RNA, 25 nt, Artificial Sequence
  Description of Artificial Sequence: Synthetic oligonucleotide
uugugaaaaaggguaaagaacaaaa

SEQ ID NO: 41795 - RNA, 25 nt, Artificial Sequence
  Description of Artificial Sequence: Synthetic oligonucleotide
acacacagcgaagcuuuuuucucag

SEQ ID NO: 41796 - RNA, 25 nt, Artificial Sequence
  Description of Artificial Sequence: Synthetic oligonucleotide
gaaugaaguguacccuaacuagccg

SEQ ID NO: 41797 - RNA, 25 nt, Artificial Sequence
  Description of Artificial Sequence: Synthetic oligonucleotide
gaggaagaacuaugaacauaaaguc

SEQ ID NO: 41798 - RNA, 25 nt, Artificial Sequence
  Description of Artificial Sequence: Synthetic oligonucleotide
cugcaacauggaagguauugcacug

SEQ ID NO: 41799 - RNA, 25 nt, Artificial Sequence
  Description of Artificial Sequence: Synthetic oligonucleotide
gcacaggccacauucacguauauga

SEQ ID NO: 41800 - RNA, 25 nt, Artificial Sequence
  Description of Artificial Sequence: Synthetic oligonucleotide
auaccaacaguaaccaaccucagug

SEQ ID NO: 41801 - RNA, 25 nt, Artificial Sequence
  Description of Artificial Sequence: Synthetic oligonucleotide
guggguauaagaaaccaccuaugac

SEQ ID NO: 41802 - RNA, 25 nt, Artificial Sequence
  Description of Artificial Sequence: Synthetic oligonucleotide
ccugcuuggugcugauuugugaacc

SEQ ID NO: 41803 - RNA, 25 nt, Artificial Sequence
  Description of Artificial Sequence: Synthetic oligonucleotide
ccauuccucacccaucaaauauuga

SEQ ID NO: 41804 - RNA, 25 nt, Artificial Sequence
  Description of Artificial Sequence: Synthetic oligonucleotide
aaauuccuuuagauagcaagacuuu

SEQ ID NO: 41805 - RNA, 25 nt, Artificial Sequence
  Description of Artificial Sequence: Synthetic oligonucleotide
uccucagucgacacagccuggauau

SEQ ID NO: 41806 - RNA, 25 nt, Artificial Sequence
  Description of Artificial Sequence: Synthetic oligonucleotide
ugaaauuuucuuauugugaugaaag

SEQ ID NO: 41807 - RNA, 25 nt, Artificial Sequence
  Description of Artificial Sequence: Synthetic oligonucleotide
gaauuaccgaauugaugggauauga

SEQ ID NO: 41808 - RNA, 25 nt, Artificial Sequence
  Description of Artificial Sequence: Synthetic oligonucleotide
agccagaagaacuuuuaggccgcuc

SEQ ID NO: 41809 - RNA, 25 nt, Artificial Sequence
  Description of Artificial Sequence: Synthetic oligonucleotide
caauuuaugaauauuaucaugcuuu

SEQ ID NO: 41810 - RNA, 25 nt, Artificial Sequence
  Description of Artificial Sequence: Synthetic oligonucleotide
uggacucugaucaucugaccaaaac

SEQ ID NO: 41811 - RNA, 25 nt, Artificial Sequence
  Description of Artificial Sequence: Synthetic oligonucleotide
cucaucaugauauguuuacuaaagg

SEQ ID NO: 41812 - RNA, 25 nt, Artificial Sequence
  Description of Artificial Sequence: Synthetic oligonucleotide
gacaagucaccacaggacaguacag

SEQ ID NO: 41813 - RNA, 25 nt, Artificial Sequence
  Description of Artificial Sequence: Synthetic oligonucleotide
ggaugcuugccaaaagagguggaua

SEQ ID NO: 41814 - RNA, 25 nt, Artificial Sequence
  Description of Artificial Sequence: Synthetic oligonucleotide
augucuggguugaaacucaagcaac

SEQ ID NO: 41815 - RNA, 25 nt, Artificial Sequence
  Description of Artificial Sequence: Synthetic oligonucleotide
cugucauauauaacaccaagaauuc

SEQ ID NO: 41816 - RNA, 25 nt, Artificial Sequence
  Description of Artificial Sequence: Synthetic oligonucleotide
cucaaccacagugcauuguaugugu

SEQ ID NO: 41817 - RNA, 25 nt, Artificial Sequence
  Description of Artificial Sequence: Synthetic oligonucleotide
ugaauuacguugugagugguauuau

SEQ ID NO: 41818 - RNA, 25 nt, Artificial Sequence
  Description of Artificial Sequence: Synthetic oligonucleotide
uucagcacgacuugauuuucucccu

SEQ ID NO: 41819 - RNA, 25 nt, Artificial Sequence
  Description of Artificial Sequence: Synthetic oligonucleotide
uucaacaaacagaauguguccuuaa

SEQ ID NO: 41820 - RNA, 25 nt, Artificial Sequence
  Description of Artificial Sequence: Synthetic oligonucleotide
aaccgguugaaucuucagauaugaa

SEQ ID NO: 41821 - RNA, 25 nt, Artificial Sequence
  Description of Artificial Sequence: Synthetic oligonucleotide
aaaugacucagcuauucaccaaagu

SEQ ID NO: 41822 - RNA, 25 nt, Artificial Sequence
  Description of Artificial Sequence: Synthetic oligonucleotide
uugaaucagaagauacaaguagccu

SEQ ID NO: 41823 - RNA, 25 nt, Artificial Sequence
  Description of Artificial Sequence: Synthetic oligonucleotide
ucuuugacaaacuuaagaaggaacc

SEQ ID NO: 41824 - RNA, 25 nt, Artificial Sequence
  Description of Artificial Sequence: Synthetic oligonucleotide
cugaugcuuuaacuuugcuggcccc

SEQ ID NO: 41825 - RNA, 25 nt, Artificial Sequence
  Description of Artificial Sequence: Synthetic oligonucleotide
cagccgcuggagacacaaucauauc

SEQ ID NO: 41826 - RNA, 25 nt, Artificial Sequence
  Description of Artificial Sequence: Synthetic oligonucleotide
cuuuagauuuuggcagcaacgacac

SEQ ID NO: 41827 - RNA, 25 nt, Artificial Sequence
  Description of Artificial Sequence: Synthetic oligonucleotide
cagaaacugaugaccagcaacuuga

SEQ ID NO: 41828 - RNA, 25 nt, Artificial Sequence
  Description of Artificial Sequence: Synthetic oligonucleotide
aggaaguaccauuauauaaugaugu

SEQ ID NO: 41829 - RNA, 25 nt, Artificial Sequence
  Description of Artificial Sequence: Synthetic oligonucleotide
uaaugcuccccucacccaacgaaaa

SEQ ID NO: 41830 - RNA, 25 nt, Artificial Sequence
  Description of Artificial Sequence: Synthetic oligonucleotide
aauuacagaauauaaauuuggcaau

SEQ ID NO: 41831 - RNA, 25 nt, Artificial Sequence
  Description of Artificial Sequence: Synthetic oligonucleotide
ugucuccauuacccaccgcugaaac

SEQ ID NO: 41832 - RNA, 25 nt, Artificial Sequence
  Description of Artificial Sequence: Synthetic oligonucleotide
cgccaaagccacuucgaaguagugc

SEQ ID NO: 41833 - RNA, 25 nt, Artificial Sequence
  Description of Artificial Sequence: Synthetic oligonucleotide
cugacccugcacucaaucaagaagu

SEQ ID NO: 41834 - RNA, 25 nt, Artificial Sequence
  Description of Artificial Sequence: Synthetic oligonucleotide
uugcauuaaaauuagaaccaaaucc

SEQ ID NO: 41835 - RNA, 25 nt, Artificial Sequence
  Description of Artificial Sequence: Synthetic oligonucleotide
cagagucacuggaacuuucuuuuac

SEQ ID NO: 41836 - RNA, 25 nt, Artificial Sequence
  Description of Artificial Sequence: Synthetic oligonucleotide
ccaugccccagauucaggaucagac

SEQ ID NO: 41837 - RNA, 25 nt, Artificial Sequence
  Description of Artificial Sequence: Synthetic oligonucleotide
caccuaguccuuccgauggaagcac

SEQ ID NO: 41838 - RNA, 25 nt, Artificial Sequence
  Description of Artificial Sequence: Synthetic oligonucleotide
cuagacaaaguucaccugagccuaa

SEQ ID NO: 41839 - RNA, 25 nt, Artificial Sequence
  Description of Artificial Sequence: Synthetic oligonucleotide
auagucccagugaauauuguuuuua

SEQ ID NO: 41840 - RNA, 25 nt, Artificial Sequence
  Description of Artificial Sequence: Synthetic oligonucleotide
auguggauagugauauggucaauga

SEQ ID NO: 41841 - RNA, 25 nt, Artificial Sequence
  Description of Artificial Sequence: Synthetic oligonucleotide
aauucaaguuggaauugguagaaaa

SEQ ID NO: 41842 - RNA, 25 nt, Artificial Sequence
  Description of Artificial Sequence: Synthetic oligonucleotide
aacuuuuugcugaagacacagaagc

SEQ ID NO: 41843 - RNA, 25 nt, Artificial Sequence
  Description of Artificial Sequence: Synthetic oligonucleotide
caaagaacccauuuucuacucagga

SEQ ID NO: 41844 - RNA, 25 nt, Artificial Sequence
  Description of Artificial Sequence: Synthetic oligonucleotide
acacagauuuagacuuggagauguu

SEQ ID NO: 41845 - RNA, 25 nt, Artificial Sequence
  Description of Artificial Sequence: Synthetic oligonucleotide
uagcucccuauaucccaauggauga

SEQ ID NO: 41846 - RNA, 25 nt, Artificial Sequence
  Description of Artificial Sequence: Synthetic oligonucleotide
augacuuccaguuacguuccuucga

SEQ ID NO: 41847 - RNA, 25 nt, Artificial Sequence
  Description of Artificial Sequence: Synthetic oligonucleotide
aucaguugucaccauuagaaagcag

SEQ ID NO: 41848 - RNA, 25 nt, Artificial Sequence
  Description of Artificial Sequence: Synthetic oligonucleotide
guuccgcaagcccugaaagcgcaag

SEQ ID NO: 41849 - RNA, 25 nt, Artificial Sequence
  Description of Artificial Sequence: Synthetic oligonucleotide
guccucaaagcacaguuacaguauu

SEQ ID NO: 41850 - RNA, 25 nt, Artificial Sequence
  Description of Artificial Sequence: Synthetic oligonucleotide
uccagcagacucaaauacaagaacc

SEQ ID NO: 41851 - RNA, 25 nt, Artificial Sequence
  Description of Artificial Sequence: Synthetic oligonucleotide
cuacugcuaaugccaccacuaccac

SEQ ID NO: 41852 - RNA, 25 nt, Artificial Sequence
  Description of Artificial Sequence: Synthetic oligonucleotide
cugccaccacugaugaauuaaaaac

SEQ ID NO: 41853 - RNA, 25 nt, Artificial Sequence
  Description of Artificial Sequence: Synthetic oligonucleotide
cagugacaaaagaccguauggaaga

SEQ ID NO: 41854 - RNA, 25 nt, Artificial Sequence
  Description of Artificial Sequence: Synthetic oligonucleotide
acauuaaaauauugauugcaucucc

SEQ ID NO: 41855 - RNA, 25 nt, Artificial Sequence
  Description of Artificial Sequence: Synthetic oligonucleotide
caucuccuacccacauacauaaaga

SEQ ID NO: 41856 - RNA, 25 nt, Artificial Sequence
  Description of Artificial Sequence: Synthetic oligonucleotide
aaacuacuagugccacaucaucacc

SEQ ID NO: 41857 - RNA, 25 nt, Artificial Sequence
  Description of Artificial Sequence: Synthetic oligonucleotide
cauauagagauacucaaagucggac

SEQ ID NO: 41858 - RNA, 25 nt, Artificial Sequence
  Description of Artificial Sequence: Synthetic oligonucleotide
cagccucaccaaacagagcaggaaa

SEQ ID NO: 41859 - RNA, 25 nt, Artificial Sequence
  Description of Artificial Sequence: Synthetic oligonucleotide
aaggagucauagaacagacagaaaa

SEQ ID NO: 41860 - RNA, 25 nt, Artificial Sequence
  Description of Artificial Sequence: Synthetic oligonucleotide
aaucucauccaagaagcccuaacgu

SEQ ID NO: 41861 - RNA, 25 nt, Artificial Sequence
  Description of Artificial Sequence: Synthetic oligonucleotide
uguuaucugucgcuuugagucaaag

SEQ ID NO: 41862 - RNA, 25 nt, Artificial Sequence
  Description of Artificial Sequence: Synthetic oligonucleotide
gaacuacaguuccugaggaagaacu

SEQ ID NO: 41863 - RNA, 25 nt, Artificial Sequence
  Description of Artificial Sequence: Synthetic oligonucleotide
uaaauccaaagauacuagcuuugca

SEQ ID NO: 41864 - RNA, 25 nt, Artificial Sequence
  Description of Artificial Sequence: Synthetic oligonucleotide
agaaugcucagagaaagcgaaaaau

SEQ ID NO: 41865 - RNA, 25 nt, Artificial Sequence
  Description of Artificial Sequence: Synthetic oligonucleotide
uggaacaugaugguucacuuuuuca

SEQ ID NO: 41866 - RNA, 25 nt, Artificial Sequence
  Description of Artificial Sequence: Synthetic oligonucleotide
aagcaguaggaauuggaacauuauu

SEQ ID NO: 41867 - RNA, 25 nt, Artificial Sequence
  Description of Artificial Sequence: Synthetic oligonucleotide
uacagcagccagacgaucaugcagc

SEQ ID NO: 41868 - RNA, 25 nt, Artificial Sequence
  Description of Artificial Sequence: Synthetic oligonucleotide
cuacuacaucacuuucuuggaaacg

SEQ ID NO: 41869 - RNA, 25 nt, Artificial Sequence
  Description of Artificial Sequence: Synthetic oligonucleotide
guguaaaaggaugcaaaucuaguga

SEQ ID NO: 41870 - RNA, 25 nt, Artificial Sequence
  Description of Artificial Sequence: Synthetic oligonucleotide
aacagaauggaauggagcaaaagac

SEQ ID NO: 41871 - RNA, 25 nt, Artificial Sequence
  Description of Artificial Sequence: Synthetic oligonucleotide
caauuauuuuaauacccucugauuu

SEQ ID NO: 41872 - RNA, 25 nt, Artificial Sequence
  Description of Artificial Sequence: Synthetic oligonucleotide
uagcauguagacugcuggggcaauc

SEQ ID NO: 41873 - RNA, 25 nt, Artificial Sequence
  Description of Artificial Sequence: Synthetic oligonucleotide
caauggaugaaaguggauuaccaca

SEQ ID NO: 41874 - RNA, 25 nt, Artificial Sequence
  Description of Artificial Sequence: Synthetic oligonucleotide
agcugaccaguuaugauugugaagu

SEQ ID NO: 41875 - RNA, 25 nt, Artificial Sequence
  Description of Artificial Sequence: Synthetic oligonucleotide
uuaaugcuccuauacaaggcagcag

SEQ ID NO: 41876 - RNA, 25 nt, Artificial Sequence
  Description of Artificial Sequence: Synthetic oligonucleotide
gaaaccuacugcagggugaagaauu

SEQ ID NO: 41877 - RNA, 25 nt, Artificial Sequence
  Description of Artificial Sequence: Synthetic oligonucleotide
uacucagagcuuuggaucaaguuaa

SEQ ID NO: 41878 - RNA, 25 nt, Artificial Sequence
  Description of Artificial Sequence: Synthetic oligonucleotide
acugagcuuuuucuuaauuucauuc

SEQ ID NO: 41879 - RNA, 25 nt, Artificial Sequence
  Description of Artificial Sequence: Synthetic oligonucleotide
ccuuuuuuuggacacugguggcuca

SEQ ID NO: 41880 - RNA, 25 nt, Artificial Sequence
  Description of Artificial Sequence: Synthetic oligonucleotide
acuaccuaaagcagucuauuuauau

SEQ ID NO: 41881 - RNA, 25 nt, Artificial Sequence
  Description of Artificial Sequence: Synthetic oligonucleotide
uuuucuacaucuaauuuuagaagcc

SEQ ID NO: 41882 - RNA, 25 nt, Artificial Sequence
  Description of Artificial Sequence: Synthetic oligonucleotide
cuggcuacaauacugcacaaacuug

SEQ ID NO: 41883 - RNA, 25 nt, Artificial Sequence
  Description of Artificial Sequence: Synthetic oligonucleotide
gguuaguucaauuuuugauccccuu

SEQ ID NO: 41884 - RNA, 25 nt, Artificial Sequence
  Description of Artificial Sequence: Synthetic oligonucleotide
uucuacuuaauuuacauuaaugcuc

SEQ ID NO: 41885 - RNA, 25 nt, Artificial Sequence
  Description of Artificial Sequence: Synthetic oligonucleotide
cuuuuuuaguauguucuuuaaugcu

SEQ ID NO: 41886 - RNA, 25 nt, Artificial Sequence
  Description of Artificial Sequence: Synthetic oligonucleotide
uggaucacagacagcucauuuucuc

SEQ ID NO: 41887 - RNA, 25 nt, Artificial Sequence
  Description of Artificial Sequence: Synthetic oligonucleotide
caguuuuuugguauuuaaaccauug

SEQ ID NO: 41888 - RNA, 25 nt, Artificial Sequence
  Description of Artificial Sequence: Synthetic oligonucleotide
gcauugcaguagcaucauuuuaaaa

SEQ ID NO: 41889 - RNA, 25 nt, Artificial Sequence
  Description of Artificial Sequence: Synthetic oligonucleotide
aaaugcaccuuuuuauuuauuuauu

SEQ ID NO: 41890 - RNA, 25 nt, Artificial Sequence
  Description of Artificial Sequence: Synthetic oligonucleotide
uuuuggcuagggaguuuaucccuuu

SEQ ID NO: 41891 - RNA, 25 nt, Artificial Sequence
  Description of Artificial Sequence: Synthetic oligonucleotide
uuucgaauuauuuuuaagaagaugc

SEQ ID NO: 41892 - RNA, 25 nt, Artificial Sequence
  Description of Artificial Sequence: Synthetic oligonucleotide
ccaauauaauuuuuguaagaaggca

SEQ ID NO: 41893 - RNA, 25 nt, Artificial Sequence
  Description of Artificial Sequence: Synthetic oligonucleotide
aguaaccuuucaucaugaucauagg

SEQ ID NO: 41894 - RNA, 25 nt, Artificial Sequence
  Description of Artificial Sequence: Synthetic oligonucleotide
gcaguugaaaaauuuuuacaccuuu

SEQ ID NO: 41895 - RNA, 25 nt, Artificial Sequence
  Description of Artificial Sequence: Synthetic oligonucleotide
uuuuuucacauuuuacauaaauaau

SEQ ID NO: 41896 - RNA, 25 nt, Artificial Sequence
  Description of Artificial Sequence: Synthetic oligonucleotide
uaaugcuuugccagcaguacguggu

SEQ ID NO: 41897 - RNA, 25 nt, Artificial Sequence
  Description of Artificial Sequence: Synthetic oligonucleotide
uagccacaauugcacaauauauuuu

SEQ ID NO: 41898 - RNA, 25 nt, Artificial Sequence
  Description of Artificial Sequence: Synthetic oligonucleotide
ucuuaaaaaauaccagcaguuacuc

SEQ ID NO: 41899 - RNA, 25 nt, Artificial Sequence
  Description of Artificial Sequence: Synthetic oligonucleotide
cauggaauauauucugcguuuauaa

SEQ ID NO: 41900 - RNA, 25 nt, Artificial Sequence
  Description of Artificial Sequence: Synthetic oligonucleotide
aaacuaguuuuuaagaagaaauuuu

SEQ ID NO: 41901 - RNA, 25 nt, Artificial Sequence
  Description of Artificial Sequence: Synthetic oligonucleotide
uuuuuggccuaugaaauuguuaaac

SEQ ID NO: 41902 - RNA, 25 nt, Artificial Sequence
  Description of Artificial Sequence: Synthetic oligonucleotide
ccuggaacaugacauuguuaaucau

SEQ ID NO: 41903 - RNA, 25 nt, Artificial Sequence
  Description of Artificial Sequence: Synthetic oligonucleotide
uauaauaaugauucuuaaaugcugu

SEQ ID NO: 41904 - RNA, 25 nt, Artificial Sequence
  Description of Artificial Sequence: Synthetic oligonucleotide
uaugguuuauuauuuaaauggguaa

SEQ ID NO: 41905 - RNA, 25 nt, Artificial Sequence
  Description of Artificial Sequence: Synthetic oligonucleotide
aagccauuuacauaauauagaaaga

SEQ ID NO: 41906 - RNA, 25 nt, Artificial Sequence
  Description of Artificial Sequence: Synthetic oligonucleotide
auaugcauauaucuagaagguaugu

SEQ ID NO: 41907 - RNA, 25 nt, Artificial Sequence
  Description of Artificial Sequence: Synthetic oligonucleotide
uggcauuuauuuggauaaaauucuc

SEQ ID NO: 41908 - RNA, 25 nt, Artificial Sequence
  Description of Artificial Sequence: Synthetic oligonucleotide
caauucagagaaaucaucugauguu

SEQ ID NO: 41909 - RNA, 25 nt, Artificial Sequence
  Description of Artificial Sequence: Synthetic oligonucleotide
uucuauagucacuuugccagcucaa

SEQ ID NO: 41910 - RNA, 25 nt, Artificial Sequence
  Description of Artificial Sequence: Synthetic oligonucleotide
aaagaaaacaauacccuauguaguu

SEQ ID NO: 41911 - RNA, 25 nt, Artificial Sequence
  Description of Artificial Sequence: Synthetic oligonucleotide
uguggaaguuuaugcuaauauugug

SEQ ID NO: 41912 - RNA, 25 nt, Artificial Sequence
  Description of Artificial Sequence: Synthetic oligonucleotide
guaacugauauuaaaccuaaauguu

SEQ ID NO: 41913 - RNA, 25 nt, Artificial Sequence
  Description of Artificial Sequence: Synthetic oligonucleotide
ucugccuacccuguugguauaaaga

SEQ ID NO: 41914 - RNA, 25 nt, Artificial Sequence
  Description of Artificial Sequence: Synthetic oligonucleotide
auauuuugagcagacuguaaacaag

SEQ ID NO: 41915 - RNA, 25 nt, Artificial Sequence
  Description of Artificial Sequence: Synthetic oligonucleotide
gcaaaauugccuaguauguuaauuu

SEQ ID NO: 41916 - RNA, 25 nt, Artificial Sequence
  Description of Artificial Sequence: Synthetic oligonucleotide
ugcucaaaauacaauguuugauuuu

SEQ ID NO: 41917 - RNA, 25 nt, Artificial Sequence
  Description of Artificial Sequence: Synthetic oligonucleotide
uaugcacuuugucgcuauuaacauc

SEQ ID NO: 41918 - RNA, 25 nt, Artificial Sequence
  Description of Artificial Sequence: Synthetic oligonucleotide
ccuuuuuuucauguagauuucaaua

SEQ ID NO: 41919 - RNA, 25 nt, Artificial Sequence
  Description of Artificial Sequence: Synthetic oligonucleotide
aauugaguaauuuuagaagcauuau

SEQ ID NO: 41920 - RNA, 25 nt, Artificial Sequence
  Description of Artificial Sequence: Synthetic oligonucleotide
uuuuaggaauauauaguugucacag

SEQ ID NO: 41921 - RNA, 25 nt, Artificial Sequence
  Description of Artificial Sequence: Synthetic oligonucleotide
guaaauaucuuguuuuuucuaugua

SEQ ID NO: 41922 - RNA, 25 nt, Artificial Sequence
  Description of Artificial Sequence: Synthetic oligonucleotide
acauuguacaaauuuuucauuccuu

SEQ ID NO: 41923 - RNA, 25 nt, Artificial Sequence
  Description of Artificial Sequence: Synthetic oligonucleotide
uuugcucuuugugguuggaucuaac

SEQ ID NO: 41924 - RNA, 25 nt, Artificial Sequence
  Description of Artificial Sequence: Synthetic oligonucleotide
cacuaacuguauuguuuuguuacau

SEQ ID NO: 41925 - RNA, 25 nt, Artificial Sequence
  Description of Artificial Sequence: Synthetic oligonucleotide
ucaaauaaacaucuucuguggacca

SEQ ID NO: 41926 - RNA, 25 nt, Artificial Sequence
  Description of Artificial Sequence: Synthetic oligonucleotide
aagcaguaggaauuauuuagcaugu

SEQ ID NO: 41927 - RNA, 25 nt, Artificial Sequence
  Description of Artificial Sequence: Synthetic oligonucleotide
uagacugcuggggcaaucaauggau

SEQ ID NO: 41928 - RNA, 25 nt, Artificial Sequence
  Description of Artificial Sequence: Synthetic oligonucleotide
ugaaaguggauuaccacagcugacc

SEQ ID NO: 41929 - RNA, 25 nt, Artificial Sequence
  Description of Artificial Sequence: Synthetic oligonucleotide
caguuaugauugugaaguuaaugcu

SEQ ID NO: 41930 - RNA, 25 nt, Artificial Sequence
  Description of Artificial Sequence: Synthetic oligonucleotide
uccuauacaaggcagcagaaaccua

SEQ ID NO: 41931 - RNA, 25 nt, Artificial Sequence
  Description of Artificial Sequence: Synthetic oligonucleotide
acugcagggugaagaauuacucaga

SEQ ID NO: 41932 - RNA, 25 nt, Artificial Sequence
  Description of Artificial Sequence: Synthetic oligonucleotide
agcuuuggaucaaguuaacugagcu

SEQ ID NO: 41933 - RNA, 25 nt, Artificial Sequence
  Description of Artificial Sequence: Synthetic oligonucleotide
uuuuucuuaauuucauuccuuuuuu

SEQ ID NO: 41934 - RNA, 25 nt, Artificial Sequence
  Description of Artificial Sequence: Synthetic oligonucleotide
uuggacacugguggcucacuaccua

SEQ ID NO: 41935 - RNA, 25 nt, Artificial Sequence
  Description of Artificial Sequence: Synthetic oligonucleotide
aaagcagucuauuuauauuuucuac

SEQ ID NO: 41936 - RNA, 25 nt, Artificial Sequence
  Description of Artificial Sequence: Synthetic oligonucleotide
caucuaauuuuagaagccuggcuac

SEQ ID NO: 41937 - RNA, 25 nt, Artificial Sequence
  Description of Artificial Sequence: Synthetic oligonucleotide
caauacugcacaaacuugguuaguu

SEQ ID NO: 41938 - RNA, 25 nt, Artificial Sequence
  Description of Artificial Sequence: Synthetic oligonucleotide
ucaauuuuugauccccuuucuacuu

SEQ ID NO: 41939 - RNA, 25 nt, Artificial Sequence
  Description of Artificial Sequence: Synthetic oligonucleotide
uaauuuacauuaaugcucuuuuuua

SEQ ID NO: 41940 - RNA, 25 nt, Artificial Sequence
  Description of Artificial Sequence: Synthetic oligonucleotide
aguauguucuuuaaugcuggaucac

SEQ ID NO: 41941 - RNA, 25 nt, Artificial Sequence
  Description of Artificial Sequence: Synthetic oligonucleotide
cagacagcucauuuucucaguuuuu

SEQ ID NO: 41942 - RNA, 25 nt, Artificial Sequence
  Description of Artificial Sequence: Synthetic oligonucleotide
uugguauuuaaaccauugcauugca

SEQ ID NO: 41943 - RNA, 25 nt, Artificial Sequence
  Description of Artificial Sequence: Synthetic oligonucleotide
aguagcaucauuuuaaaaaaugcac

SEQ ID NO: 41944 - RNA, 25 nt, Artificial Sequence
  Description of Artificial Sequence: Synthetic oligonucleotide
ccuuuuuauuuauuuauuuuuggcu

SEQ ID NO: 41945 - RNA, 25 nt, Artificial Sequence
  Description of Artificial Sequence: Synthetic oligonucleotide
uagggaguuuaucccuuuuucgaau

SEQ ID NO: 41946 - RNA, 25 nt, Artificial Sequence
  Description of Artificial Sequence: Synthetic oligonucleotide
uuauuuuuaagaagaugccaauaua

SEQ ID NO: 41947 - RNA, 25 nt, Artificial Sequence
  Description of Artificial Sequence: Synthetic oligonucleotide
aauuuuuguaagaaggcaguaaccu

SEQ ID NO: 41948 - RNA, 25 nt, Artificial Sequence
  Description of Artificial Sequence: Synthetic oligonucleotide
uuucaucaugaucauaggcaguuga

SEQ ID NO: 41949 - RNA, 25 nt, Artificial Sequence
  Description of Artificial Sequence: Synthetic oligonucleotide
aaaaauuuuuacaccuuuuuuuuca

SEQ ID NO: 41950 - RNA, 25 nt, Artificial Sequence
  Description of Artificial Sequence: Synthetic oligonucleotide
acauuuuacauaaauaauaaugcuu

SEQ ID NO: 41951 - RNA, 25 nt, Artificial Sequence
  Description of Artificial Sequence: Synthetic oligonucleotide
uugccagcaguacgugguagccaca

SEQ ID NO: 41952 - RNA, 25 nt, Artificial Sequence
  Description of Artificial Sequence: Synthetic oligonucleotide
aauugcacaauauauuuucuuaaaa

SEQ ID NO: 41953 - RNA, 25 nt, Artificial Sequence
  Description of Artificial Sequence: Synthetic oligonucleotide
aaauaccagcaguuacucauggaau

SEQ ID NO: 41954 - RNA, 25 nt, Artificial Sequence
  Description of Artificial Sequence: Synthetic oligonucleotide
uauauucugcguuuauaaaacuagu

SEQ ID NO: 41955 - RNA, 25 nt, Artificial Sequence
  Description of Artificial Sequence: Synthetic oligonucleotide
uuuuuaagaagaaauuuuuuuuggc

SEQ ID NO: 41956 - RNA, 25 nt, Artificial Sequence
  Description of Artificial Sequence: Synthetic oligonucleotide
ccuaugaaauuguuaaaccuggaac

SEQ ID NO: 41957 - RNA, 25 nt, Artificial Sequence
  Description of Artificial Sequence: Synthetic oligonucleotide
caugacauuguuaaucauauaauaa

SEQ ID NO: 41958 - RNA, 25 nt, Artificial Sequence
  Description of Artificial Sequence: Synthetic oligonucleotide
augauucuuaaaugcuguaugguuu

SEQ ID NO: 41959 - RNA, 25 nt, Artificial Sequence
  Description of Artificial Sequence: Synthetic oligonucleotide
uauuauuuaaauggguaaagccauu

SEQ ID NO: 41960 - RNA, 25 nt, Artificial Sequence
  Description of Artificial Sequence: Synthetic oligonucleotide
uuacauaauauagaaagauaugcau

SEQ ID NO: 41961 - RNA, 25 nt, Artificial Sequence
  Description of Artificial Sequence: Synthetic oligonucleotide
uauaucuagaagguauguggcauuu

SEQ ID NO: 41962 - RNA, 25 nt, Artificial Sequence
  Description of Artificial Sequence: Synthetic oligonucleotide
uauuuggauaaaauucucaauucag

SEQ ID NO: 41963 - RNA, 25 nt, Artificial Sequence
  Description of Artificial Sequence: Synthetic oligonucleotide
gagaaaucaucugauguuucuauag

SEQ ID NO: 41964 - RNA, 25 nt, Artificial Sequence
  Description of Artificial Sequence: Synthetic oligonucleotide
gucacuuugccagcucaaaagaaaa

SEQ ID NO: 41965 - RNA, 25 nt, Artificial Sequence
  Description of Artificial Sequence: Synthetic oligonucleotide
acaauacccuauguaguuguggaag

SEQ ID NO: 41966 - RNA, 25 nt, Artificial Sequence
  Description of Artificial Sequence: Synthetic oligonucleotide
guuuaugcuaauauuguguaacuga

SEQ ID NO: 41967 - RNA, 25 nt, Artificial Sequence
  Description of Artificial Sequence: Synthetic oligonucleotide
auauuaaaccuaaauguucugccua

SEQ ID NO: 41968 - RNA, 25 nt, Artificial Sequence
  Description of Artificial Sequence: Synthetic oligonucleotide
acccuguugguauaaagauauuuug

SEQ ID NO: 41969 - RNA, 25 nt, Artificial Sequence
  Description of Artificial Sequence: Synthetic oligonucleotide
gagcagacuguaaacaagaaaaaaa

SEQ ID NO: 41970 - RNA, 25 nt, Artificial Sequence
  Description of Artificial Sequence: Synthetic oligonucleotide
aaaaucaugcauucuuagcaaaauu

SEQ ID NO: 41971 - RNA, 25 nt, Artificial Sequence
  Description of Artificial Sequence: Synthetic oligonucleotide
ugccuaguauguuaauuugcucaaa

SEQ ID NO: 41972 - RNA, 25 nt, Artificial Sequence
  Description of Artificial Sequence: Synthetic oligonucleotide
aauacaauguuugauuuuaugcacu

SEQ ID NO: 41973 - RNA, 25 nt, Artificial Sequence
  Description of Artificial Sequence: Synthetic oligonucleotide
uuugucgcuauuaacauccuuuuuu

SEQ ID NO: 41974 - RNA, 25 nt, Artificial Sequence
  Description of Artificial Sequence: Synthetic oligonucleotide
uucauguagauuucaauaauugagu

SEQ ID NO: 41975 - RNA, 25 nt, Artificial Sequence
  Description of Artificial Sequence: Synthetic oligonucleotide
uaauuuuagaagcauuauuuuagga

SEQ ID NO: 41976 - RNA, 25 nt, Artificial Sequence
  Description of Artificial Sequence: Synthetic oligonucleotide
aauauauaguugucacaguaaauau

SEQ ID NO: 41977 - RNA, 25 nt, Artificial Sequence
  Description of Artificial Sequence: Synthetic oligonucleotide
ucuuguuuuuucuauguacauugua

SEQ ID NO: 41978 - RNA, 25 nt, Artificial Sequence
  Description of Artificial Sequence: Synthetic oligonucleotide
acaaauuuuucauuccuuuugcucu

SEQ ID NO: 41979 - RNA, 25 nt, Artificial Sequence
  Description of Artificial Sequence: Synthetic oligonucleotide
uuugugguuggaucuaacacuaacu

SEQ ID NO: 41980 - RNA, 25 nt, Artificial Sequence
  Description of Artificial Sequence: Synthetic oligonucleotide
uguauuguuuuguuacaucaaauaa

SEQ ID NO: 41981 - RNA, 25 nt, Artificial Sequence
  Description of Artificial Sequence: Synthetic oligonucleotide
aaauaaacaucuucuguggaccagg

SEQ ID NO: 41982 - DNA, 21 bp, Artificial Sequence
  Description of Artificial Sequence: Synthetic oligonucleotide
  Description of Combined DNA/RNA Molecule: Synthetic oligonucleotide
cuacacaaaucagcgauuutt

SEQ ID NO: 41983 - DNA, 21 bp, Artificial Sequence
  Description of Artificial Sequence: Synthetic oligonucleotide
  Description of Combined DNA/RNA Molecule: Synthetic oligonucleotide
aaaucgcugauuuguguagtt

SEQ ID NO: 41984 - DNA, 25 bp, Artificial Sequence
  Description of Artificial Sequence: Synthetic oligonucleotide
  Description of Combined DNA/RNA Molecule: Synthetic oligonucleotide
cuacacaaaucagcgauuuccaugt

SEQ ID NO: 41985 - RNA, 27 nt, Artificial Sequence
  Description of Artificial Sequence: Synthetic oligonucleotide
acauggaaaucgcugauuuguguaguc

SEQ ID NO: 41986 - RNA, 13 nt, Artificial Sequence
  Description of Artificial Sequence: Synthetic oligonucleotide
cuacacaaaucag

SEQ ID NO: 41987 - DNA, 11 bp, Artificial Sequence
  Description of Artificial Sequence: Synthetic oligonucleotide
  Description of Combined DNA/RNA Molecule: Synthetic oligonucleotide
gauuuccaugt

SEQ ID NO: 41988 - DNA, 21 bp, Artificial Sequence
  Description of Artificial Sequence: Synthetic oligonucleotide
  Description of Combined DNA/RNA Molecule: Synthetic oligonucleotide
ggaucuuauuucuucggagtt

SEQ ID NO: 41989 - DNA, 21 bp, Artificial Sequence
  Description of Artificial Sequence: Synthetic oligonucleotide
  Description of Combined DNA/RNA Molecule: Synthetic oligonucleotide
cuccgaagaaauaagaucctt

SEQ ID NO: 41990 - RNA, 11 nt, Artificial Sequence
  Description of Artificial Sequence: Synthetic oligonucleotide
ggaucuuauuu

SEQ ID NO: 41991 - DNA, 10 bp, Artificial Sequence
  Description of Artificial Sequence: Synthetic oligonucleotide
  Description of Combined DNA/RNA Molecule: Synthetic oligonucleotide
cuucggagtt

SEQ ID NO: 41992 - RNA, 27 nt, Artificial Sequence
  Description of Artificial Sequence: Synthetic oligonucleotide
cauugucuccgaagaaauaagauccuu

SEQ ID NO: 41993 - RNA, 8 nt, Artificial Sequence
  Description of Artificial Sequence: Synthetic oligonucleotide
  modified_base (2): LNA-G
ggaucuua

SEQ ID NO: 41994 - DNA, 17 bp, Artificial Sequence
  Description of Artificial Sequence: Synthetic oligonucleotide
  Description of Combined DNA/RNA Molecule: Synthetic oligonucleotide
uuucuucggagacaatg

SEQ ID NO: 41995 - DNA, 16 bp, Artificial Sequence
  Description of Artificial Sequence: Synthetic oligonucleotide
  Description of Combined DNA/RNA Molecule: Synthetic oligonucleotide
uucuucggagacaatg

SEQ ID NO: 41996 - DNA, 15 bp, Artificial Sequence
  Description of Artificial Sequence: Synthetic oligonucleotide
  Description of Combined DNA/RNA Molecule: Synthetic oligonucleotide
ucuucggagacaatg

SEQ ID NO: 41997 - DNA, 14 bp, Artificial Sequence
  Description of Artificial Sequence: Synthetic oligonucleotide
  Description of Combined DNA/RNA Molecule: Synthetic oligonucleotide
cuucggagacaatg

SEQ ID NO: 41998 - DNA, 13 bp, Artificial Sequence
  Description of Artificial Sequence: Synthetic oligonucleotide
  Description of Combined DNA/RNA Molecule: Synthetic oligonucleotide
uucggagacaatg

SEQ ID NO: 41999 - DNA, 12 bp, Artificial Sequence
  Description of Artificial Sequence: Synthetic oligonucleotide
  Description of Combined DNA/RNA Molecule: Synthetic oligonucleotide
ucggagacaatg

SEQ ID NO: 42000 - DNA, 11 bp, Artificial Sequence
  Description of Artificial Sequence: Synthetic oligonucleotide
  Description of Combined DNA/RNA Molecule: Synthetic oligonucleotide
cggagacaatg

SEQ ID NO: 42001 - RNA, 9 nt, Artificial Sequence
  Description of Artificial Sequence: Synthetic oligonucleotide
  modified_base (2): LNA-G
ggaucuuau

SEQ ID NO: 42002 - RNA, 10 nt, Artificial Sequence
  Description of Artificial Sequence: Synthetic oligonucleotide
  modified_base (2): LNA-G
ggaucuuauu

SEQ ID NO: 42003 - RNA, 11 nt, Artificial Sequence
  Description of Artificial Sequence: Synthetic oligonucleotide
  modified_base (2): LNA-G
ggaucuuauuu

SEQ ID NO: 42004 - RNA, 12 nt, Artificial Sequence
  Description of Artificial Sequence: Synthetic oligonucleotide
  modified_base (2): LNA-G
ggaucuuauuuc

SEQ ID NO: 42005 - RNA, 8 nt, Artificial Sequence
  Description of Artificial Sequence: Synthetic oligonucleotide
  modified_base (3): LNA-A
cuacacaa

SEQ ID NO: 42006 - DNA, 13 bp, Artificial Sequence
  Description of Artificial Sequence: Synthetic oligonucleotide
  Description of Combined DNA/RNA Molecule: Synthetic oligonucleotide
  modified_base (8): LNA-A
aucagcgauuutt

SEQ ID NO: 42007 - DNA, 12 bp, Artificial Sequence
  Description of Artificial Sequence: Synthetic oligonucleotide
  Description of Combined DNA/RNA Molecule: Synthetic oligonucleotide
  modified_base (7): LNA-A
ucagcgauuutt

SEQ ID NO: 42008 - DNA, 11 bp, Artificial Sequence
  Description of Artificial Sequence: Synthetic oligonucleotide
  Description of Combined DNA/RNA Molecule: Synthetic oligonucleotide
  modified_base (6): LNA-A
cagcgauuutt

SEQ ID NO: 42009 - DNA, 10 bp, Artificial Sequence
  Description of Artificial Sequence: Synthetic oligonucleotide
  Description of Combined DNA/RNA Molecule: Synthetic oligonucleotide
  modified_base (5): LNA-A
agcgauuutt

SEQ ID NO: 42010 - DNA, 9 bp, Artificial Sequence
  Description of Artificial Sequence: Synthetic oligonucleotide
  Description of Combined DNA/RNA Molecule: Synthetic oligonucleotide
  modified_base (4): LNA-A
gcgauuutt

SEQ ID NO: 42011 - DNA, 8 bp, Artificial Sequence
  Description of Artificial Sequence: Synthetic oligonucleotide
  Description of Combined DNA/RNA Molecule: Synthetic oligonucleotide
  modified_base (3): LNA-A
cgauuutt

SEQ ID NO: 42012 - DNA, 7 bp, Artificial Sequence
  Description of Artificial Sequence: Synthetic oligonucleotide
  Description of Combined DNA/RNA Molecule: Synthetic oligonucleotide
  modified_base (2): LNA-A
gauuutt

SEQ ID NO: 42013 - RNA, 9 nt, Artificial Sequence
  Description of Artificial Sequence: Synthetic oligonucleotide
  modified_base (3): LNA-A
cuacacaaa

SEQ ID NO: 42014 - RNA, 10 nt, Artificial Sequence
  Description of Artificial Sequence: Synthetic oligonucleotide
  modified_base (3): LNA-A
cuacacaaau

SEQ ID NO: 42015 - RNA, 11 nt, Artificial Sequence
  Description of Artificial Sequence: Synthetic oligonucleotide
  modified_base (3): LNA-A
cuacacaaauc

SEQ ID NO: 42016 - RNA, 12 nt, Artificial Sequence
  Description of Artificial Sequence: Synthetic oligonucleotide
  modified_base (3): LNA-A
cuacacaaauca

SEQ ID NO: 42017 - RNA, 13 nt, Artificial Sequence
  Description of Artificial Sequence: Synthetic oligonucleotide
  modified_base (3): LNA-A
cuacacaaaucag

SEQ ID NO: 42018 - RNA, 14 nt, Artificial Sequence
  Description of Artificial Sequence: Synthetic oligonucleotide
  modified_base (3): LNA-A
cuacacaaaucagc

SEQ ID NO: 42019 - RNA, 13 nt, Artificial Sequence
  Description of Artificial Sequence: Synthetic oligonucleotide
  modified_base (2): LNA-G
ggaucuuauuucu

SEQ ID NO: 42020 - RNA, 14 nt, Artificial Sequence
  Description of Artificial Sequence: Synthetic oligonucleotide
  modified_base (2): LNA-G
ggaucuuauuucuu

SEQ ID NO: 42021 - RNA, 8 nt, Artificial Sequence
  Description of Artificial Sequence: Synthetic oligonucleotide
  modified_base (2): LNA-G
  modified_base (8): LNA-A
ggaucuua

SEQ ID NO: 42022 - RNA, 9 nt, Artificial Sequence
  Description of Artificial Sequence: Synthetic oligonucleotide
  modified_base (2): LNA-G
  modified_base (9): LNA-U
ggaucuuau

SEQ ID NO: 42023 - RNA, 10 nt, Artificial Sequence
  Description of Artificial Sequence: Synthetic oligonucleotide
  modified_base (2): LNA-G
  modified_base (10): LNA-U
ggaucuuauu

SEQ ID NO: 42024 - RNA, 11 nt, Artificial Sequence
  Description of Artificial Sequence: Synthetic oligonucleotide
  modified_base (2): LNA-G
  modified_base (11): LNA-U
ggaucuuauuu

SEQ ID NO: 42025 - RNA, 12 nt, Artificial Sequence
  Description of Artificial Sequence: Synthetic oligonucleotide
  modified_base (2): LNA-G
  modified_base (12): LNA-C
ggaucuuauuuc

SEQ ID NO: 42026 - RNA, 13 nt, Artificial Sequence
  Description of Artificial Sequence: Synthetic oligonucleotide
  modified_base (2): LNA-G
  modified_base (13): LNA-U
ggaucuuauuucu

SEQ ID NO: 42027 - RNA, 14 nt, Artificial Sequence
  Description of Artificial Sequence: Synthetic oligonucleotide
  modified_base (2): LNA-G
  modified_base (14): LNA-U
ggaucuuauuucuu

SEQ ID NO: 42028 - DNA, 13 bp, Artificial Sequence
  Description of Artificial Sequence: Synthetic oligonucleotide
  Description of Combined DNA/RNA Molecule: Synthetic oligonucleotide
  modified_base (8): LNA-G
uuucuucggagtt

SEQ ID NO: 42029 - DNA, 12 bp, Artificial Sequence
  Description of Artificial Sequence: Synthetic oligonucleotide
  Description of Combined DNA/RNA Molecule: Synthetic oligonucleotide
  modified_base (7): LNA-G
uucuucggagtt

SEQ ID NO: 42030 - DNA, 11 bp, Artificial Sequence
  Description of Artificial Sequence: Synthetic oligonucleotide
  Description of Combined DNA/RNA Molecule: Synthetic oligonucleotide
  modified_base (6): LNA-G
ucuucggagtt

SEQ ID NO: 42031 - DNA, 10 bp, Artificial Sequence
  Description of Artificial Sequence: Synthetic oligonucleotide
  Description of Combined DNA/RNA Molecule: Synthetic oligonucleotide
  modified_base (5): LNA-G
cuucggagtt

SEQ ID NO: 42032 - DNA, 9 bp, Artificial Sequence
  Description of Artificial Sequence: Synthetic oligonucleotide
  Description of Combined DNA/RNA Molecule: Synthetic oligonucleotide
  modified_base (4): LNA-G
uucggagtt

SEQ ID NO: 42033 - DNA, 8 bp, Artificial Sequence
  Description of Artificial Sequence: Synthetic oligonucleotide
  Description of Combined DNA/RNA Molecule: Synthetic oligonucleotide
  modified_base (3): LNA-G
ucggagtt

SEQ ID NO: 42034 - DNA, 7 bp, Artificial Sequence
  Description of Artificial Sequence: Synthetic oligonucleotide
  Description of Combined DNA/RNA Molecule: Synthetic oligonucleotide
  modified_base (2): LNA-G
cggagtt

SEQ ID NO: 42035 - DNA, 13 bp, Artificial Sequence
  Description of Artificial Sequence: Synthetic oligonucleotide
  Description of Combined DNA/RNA Molecule: Synthetic oligonucleotide
  modified_base (1): LNA-U
  modified_base (8): LNA-G
uuucuucggagtt

SEQ ID NO: 42036 - DNA, 12 bp, Artificial Sequence
  Description of Artificial Sequence: Synthetic oligonucleotide
  Description of Combined DNA/RNA Molecule: Synthetic oligonucleotide
  modified_base (1): LNA-U
  modified_base (7): LNA-G
uucuucggagtt

SEQ ID NO: 42037 - DNA, 11 bp, Artificial Sequence
  Description of Artificial Sequence: Synthetic oligonucleotide
  Description of Combined DNA/RNA Molecule: Synthetic oligonucleotide
  modified_base (1): LNA-U
  modified_base (6): LNA-G
ucuucggagtt

SEQ ID NO: 42038 - DNA, 10 bp, Artificial Sequence
  Description of Artificial Sequence: Synthetic oligonucleotide
  Description of Combined DNA/RNA Molecule: Synthetic oligonucleotide
  modified_base (1): LNA-C
  modified_base (5): LNA-G
cuucggagtt

SEQ ID NO: 42039 - DNA, 9 bp, Artificial Sequence
  Description of Artificial Sequence: Synthetic oligonucleotide
  Description of Combined DNA/RNA Molecule: Synthetic oligonucleotide
  modified_base (1): LNA-U
  modified_base (4): LNA-G
uucggagtt

SEQ ID NO: 42040 - DNA, 8 bp, Artificial Sequence
  Description of Artificial Sequence: Synthetic oligonucleotide
  Description of Combined DNA/RNA Molecule: Synthetic oligonucleotide
  modified_base (1): LNA-U
  modified_base (3): LNA-G
ucggagtt

SEQ ID NO: 42041 - DNA, 7 bp, Artificial Sequence
  Description of Artificial Sequence: Synthetic oligonucleotide
  Description of Combined DNA/RNA Molecule: Synthetic oligonucleotide
  modified_base (1): LNA-C
  modified_base (2): LNA-G
cggagtt

SEQ ID NO: 42042 - DNA, 21 bp, Artificial Sequence
  Description of Artificial Sequence: Synthetic oligonucleotide
  Description of Combined DNA/RNA Molecule: Synthetic oligonucleotide
  modified_base (2): LNA-G
  modified_base (16): LNA-G
ggaucuuauuucuucggagtt

SEQ ID NO: 42043 - DNA, 25 bp, Artificial Sequence
  Description of Artificial Sequence: Synthetic oligonucleotide
  Description of Combined DNA/RNA Molecule: Synthetic oligonucleotide
ggaucuuauuucuucggagacaatg

SEQ ID NO: 42044 - RNA, 25 nt, Artificial Sequence
  Description of Artificial Sequence: Synthetic oligonucleotide
uuaagcagaguucaaaagcccuuca

SEQ ID NO: 42045 - RNA, 25 nt, Artificial Sequence
  Description of Artificial Sequence: Synthetic oligonucleotide
uaagcagaguucaaaagcccuucag

SEQ ID NO: 42046 - RNA, 25 nt, Artificial Sequence
  Description of Artificial Sequence: Synthetic oligonucleotide
agcagaguucaaaagcccuucagcg

SEQ ID NO: 42047 - RNA, 25 nt, Artificial Sequence
  Description of Artificial Sequence: Synthetic oligonucleotide
cucagggucugagugaagccgcucg

SEQ ID NO: 42048 - RNA, 25 nt, Artificial Sequence
  Description of Artificial Sequence: Synthetic oligonucleotide
caagcaacuacaucacgccagucaa

SEQ ID NO: 42049 - RNA, 25 nt, Artificial Sequence
  Description of Artificial Sequence: Synthetic oligonucleotide
aucaauggcagcuucuuggugcgug

SEQ ID NO: 42050 - RNA, 25 nt, Artificial Sequence
  Description of Artificial Sequence: Synthetic oligonucleotide
uuccagcccacauuggauucaucag

SEQ ID NO: 42051 - RNA, 25 nt, Artificial Sequence
  Description of Artificial Sequence: Synthetic oligonucleotide
cagcugagaauguggaauaccuaag

SEQ ID NO: 42052 - RNA, 25 nt, Artificial Sequence
  Description of Artificial Sequence: Synthetic oligonucleotide
aacguaucuccuaauuugaggcuca

SEQ ID NO: 42053 - RNA, 25 nt, Artificial Sequence
  Description of Artificial Sequence: Synthetic oligonucleotide
ccuaaaauaauuucucuacaauugg

SEQ ID NO: 42054 - RNA, 25 nt, Artificial Sequence
  Description of Artificial Sequence: Synthetic oligonucleotide
uggaagauucagcuaguuaggagcc

SEQ ID NO: 42055 - RNA, 25 nt, Artificial Sequence
  Description of Artificial Sequence: Synthetic oligonucleotide
uuaaacucuccuagucaauauccac

SEQ ID NO: 42056 - RNA, 25 nt, Artificial Sequence
  Description of Artificial Sequence: Synthetic oligonucleotide
cagccuacaguuauguucagucaca

SEQ ID NO: 42057 - RNA, 25 nt, Artificial Sequence
  Description of Artificial Sequence: Synthetic oligonucleotide
guuauguucagucacacacacauac

SEQ ID NO: 42058 - RNA, 25 nt, Artificial Sequence
  Description of Artificial Sequence: Synthetic oligonucleotide
cacauacaaaauguuccuuuugcuu

SEQ ID NO: 42059 - RNA, 25 nt, Artificial Sequence
  Description of Artificial Sequence: Synthetic oligonucleotide
uccuuuugcuuuuaaaguaauuuuu

SEQ ID NO: 42060 - RNA, 25 nt, Artificial Sequence
  Description of Artificial Sequence: Synthetic oligonucleotide
ugaccugugaagcaacagucaaugg

SEQ ID NO: 42061 - RNA, 25 nt, Artificial Sequence
  Description of Artificial Sequence: Synthetic oligonucleotide
cuaucucacacaucgacaaaccaau

SEQ ID NO: 42062 - RNA, 25 nt, Artificial Sequence
  Description of Artificial Sequence: Synthetic oligonucleotide
uguccucaauuguacugcuaccacu

SEQ ID NO: 42063 - RNA, 25 nt, Artificial Sequence
  Description of Artificial Sequence: Synthetic oligonucleotide
aaaccguagcuggcaagcggucuua

SEQ ID NO: 42064 - RNA, 25 nt, Artificial Sequence
  Description of Artificial Sequence: Synthetic oligonucleotide
uagcuggcaagcggucuuaccggcu

SEQ ID NO: 42065 - RNA, 25 nt, Artificial Sequence
  Description of Artificial Sequence: Synthetic oligonucleotide
uuguaugguuaaaagauggguuacc

SEQ ID NO: 42066 - RNA, 25 nt, Artificial Sequence
  Description of Artificial Sequence: Synthetic oligonucleotide
ugguuaaaagauggguuaccugcga

SEQ ID NO: 42067 - RNA, 25 nt, Artificial Sequence
  Description of Artificial Sequence: Synthetic oligonucleotide
cagggaauuauacaaucuugcugag

SEQ ID NO: 42068 - RNA, 25 nt, Artificial Sequence
  Description of Artificial Sequence: Synthetic oligonucleotide
acaaucuugcugagcauaaaacagu

SEQ ID NO: 42069 - RNA, 25 nt, Artificial Sequence
  Description of Artificial Sequence: Synthetic oligonucleotide
ccaauaaugaagaguccuuuauccu

SEQ ID NO: 42070 - RNA, 25 nt, Artificial Sequence
  Description of Artificial Sequence: Synthetic oligonucleotide
acuuuggauguuccaacgcaaguug

SEQ ID NO: 42071 - RNA, 25 nt, Artificial Sequence
  Description of Artificial Sequence: Synthetic oligonucleotide
aaugcuuccacuaaacugaaaccau

SEQ ID NO: 42072 - RNA, 25 nt, Artificial Sequence
  Description of Artificial Sequence: Synthetic oligonucleotide
gagaaaguuugacuuuguuaaauau

SEQ ID NO: 42073 - RNA, 25 nt, Artificial Sequence
  Description of Artificial Sequence: Synthetic oligonucleotide
aaagaacuacuguauauuaaaaguu

SEQ ID NO: 42074 - RNA, 25 nt, Artificial Sequence
  Description of Artificial Sequence: Synthetic oligonucleotide
uuagaaauacggguuuugacuuaac

SEQ ID NO: 42075 - RNA, 25 nt, Artificial Sequence
  Description of Artificial Sequence: Synthetic oligonucleotide
aacauggguacagcaaacucagcac

SEQ ID NO: 42076 - RNA, 25 nt, Artificial Sequence
  Description of Artificial Sequence: Synthetic oligonucleotide
aaagacacagaagaugcugaccuca

SEQ ID NO: 42077 - RNA, 25 nt, Artificial Sequence
  Description of Artificial Sequence: Synthetic oligonucleotide
uaguagggagguuuauucagaucgc

SEQ ID NO: 42078 - RNA, 25 nt, Artificial Sequence
  Description of Artificial Sequence: Synthetic oligonucleotide
gccuucugcagcaggguucugggau

SEQ ID NO: 42079 - RNA, 25 nt, Artificial Sequence
  Description of Artificial Sequence: Synthetic oligonucleotide
ggucugguacauauuggaaauuaug

SEQ ID NO: 42080 - RNA, 25 nt, Artificial Sequence
  Description of Artificial Sequence: Synthetic oligonucleotide
cuaguccuuccgauggaagcacuag

SEQ ID NO: 42081 - RNA, 25 nt, Artificial Sequence
  Description of Artificial Sequence: Synthetic oligonucleotide
ccagugaauauuguuuuuaugugga

SEQ ID NO: 42082 - RNA, 25 nt, Artificial Sequence
  Description of Artificial Sequence: Synthetic oligonucleotide
augaauucaaguuggaauugguaga

SEQ ID NO: 42083 - RNA, 25 nt, Artificial Sequence
  Description of Artificial Sequence: Synthetic oligonucleotide
caggacacagauuuagacuuggaga

SEQ ID NO: 42084 - RNA, 25 nt, Artificial Sequence
  Description of Artificial Sequence: Synthetic oligonucleotide
cucaaagcacaguuacaguauucca

SEQ ID NO: 42085 - RNA, 25 nt, Artificial Sequence
  Description of Artificial Sequence: Synthetic oligonucleotide
accacugccaccacugaugaauuaa

SEQ ID NO: 42086 - RNA, 25 nt, Artificial Sequence
  Description of Artificial Sequence: Synthetic oligonucleotide
gaaacuacuagugccacaucaucac

SEQ ID NO: 42087 - RNA, 25 nt, Artificial Sequence
  Description of Artificial Sequence: Synthetic oligonucleotide
aagucggacagccucaccaaacaga

SEQ ID NO: 42088 - RNA, 25 nt, Artificial Sequence
  Description of Artificial Sequence: Synthetic oligonucleotide
gaaagcgaaaaauggaacaugaugg

SEQ ID NO: 42089 - RNA, 25 nt, Artificial Sequence
  Description of Artificial Sequence: Synthetic oligonucleotide
cccucugauuuagcauguagacugc

SEQ ID NO: 42090 - RNA, 25 nt, Artificial Sequence
  Description of Artificial Sequence: Synthetic oligonucleotide
ugagcuauuuaaggaucuauuuaug

SEQ ID NO: 42091 - RNA, 25 nt, Artificial Sequence
  Description of Artificial Sequence: Synthetic oligonucleotide
aaaaggugaaaaagcacuauuauca

SEQ ID NO: 42092 - RNA, 25 nt, Artificial Sequence
  Description of Artificial Sequence: Synthetic oligonucleotide
gaaaaagcacuauuaucaguucugc

SEQ ID NO: 42093 - RNA, 25 nt, Artificial Sequence
  Description of Artificial Sequence: Synthetic oligonucleotide
ggcugaaaagaaagauuaaaccuac

SEQ ID NO: 42094 - RNA, 25 nt, Artificial Sequence
  Description of Artificial Sequence: Synthetic oligonucleotide
uaaacccuuauaauaaaauccuucu

SEQ ID NO: 42095 - RNA, 25 nt, Artificial Sequence
  Description of Artificial Sequence: Synthetic oligonucleotide
cauacuauuagccaaugcuguagac

SEQ ID NO: 42096 - RNA, 25 nt, Artificial Sequence
  Description of Artificial Sequence: Synthetic oligonucleotide
gacagaagcauuuugauaggaauag

SEQ ID NO: 42097 - RNA, 25 nt, Artificial Sequence
  Description of Artificial Sequence: Synthetic oligonucleotide
agagcaaauaagauaauggcccuga

SEQ ID NO: 42098 - RNA, 25 nt, Artificial Sequence
  Description of Artificial Sequence: Synthetic oligonucleotide
ccaacauuuuucucuuccucaagca

SEQ ID NO: 42099 - RNA, 25 nt, Artificial Sequence
  Description of Artificial Sequence: Synthetic oligonucleotide
uuaaguaugagaaaaguucagccca

SEQ ID NO: 42100 - RNA, 25 nt, Artificial Sequence
  Description of Artificial Sequence: Synthetic oligonucleotide
caggaauaaagauggcugcugaacc

SEQ ID NO: 42101 - RNA, 25 nt, Artificial Sequence
  Description of Artificial Sequence: Synthetic oligonucleotide
aauuugaaugaccaaguucucuuca

SEQ ID NO: 42102 - RNA, 25 nt, Artificial Sequence
  Description of Artificial Sequence: Synthetic oligonucleotide
auguauaaagauagccagccuagag

SEQ ID NO: 42103 - RNA, 25 nt, Artificial Sequence
  Description of Artificial Sequence: Synthetic oligonucleotide
ggcuguaacuaucucugugaagugu

SEQ ID NO: 42104 - RNA, 25 nt, Artificial Sequence
  Description of Artificial Sequence: Synthetic oligonucleotide
ucugugaagugugagaaaauuucaa

SEQ ID NO: 42105 - RNA, 25 nt, Artificial Sequence
  Description of Artificial Sequence: Synthetic oligonucleotide
ccuuuaaggaaaugaauccuccuga

SEQ ID NO: 42106 - RNA, 25 nt, Artificial Sequence
  Description of Artificial Sequence: Synthetic oligonucleotide
aaggauacaaaaagugacaucauau

SEQ ID NO: 42107 - RNA, 25 nt, Artificial Sequence
  Description of Artificial Sequence: Synthetic oligonucleotide
agaugcaauuugaaucuucaucaua

SEQ ID NO: 42108 - RNA, 25 nt, Artificial Sequence
  Description of Artificial Sequence: Synthetic oligonucleotide
guucaaaacgaagacuagcuauuaa

SEQ ID NO: 42109 - RNA, 25 nt, Artificial Sequence
  Description of Artificial Sequence: Synthetic oligonucleotide
gugaaaccucaucucuacuaaaaau

SEQ ID NO: 42110 - RNA, 25 nt, Artificial Sequence
  Description of Artificial Sequence: Synthetic oligonucleotide
acgaaagagaagcucuaucucgccu

SEQ ID NO: 42111 - RNA, 25 nt, Artificial Sequence
  Description of Artificial Sequence: Synthetic oligonucleotide
cuccacaagcgccuucgguccaguu

SEQ ID NO: 42112 - RNA, 25 nt, Artificial Sequence
  Description of Artificial Sequence: Synthetic oligonucleotide
gagaagauuccaaagauguagccgc

SEQ ID NO: 42113 - RNA, 25 nt, Artificial Sequence
  Description of Artificial Sequence: Synthetic oligonucleotide
aaucuggauucaaugaggagacuug

SEQ ID NO: 42114 - RNA, 25 nt, Artificial Sequence
  Description of Artificial Sequence: Synthetic oligonucleotide
agaacagauuugagaguagugagga

SEQ ID NO: 42115 - RNA, 25 nt, Artificial Sequence
  Description of Artificial Sequence: Synthetic oligonucleotide
ccagagcugugcagaugaguacaaa

SEQ ID NO: 42116 - RNA, 25 nt, Artificial Sequence
  Description of Artificial Sequence: Synthetic oligonucleotide
ccucagauuguuguuguuaaugggc

SEQ ID NO: 42117 - RNA, 25 nt, Artificial Sequence
  Description of Artificial Sequence: Synthetic oligonucleotide
cuauuuuaauuauuuuuaauuuauu

SEQ ID NO: 42118 - RNA, 25 nt, Artificial Sequence
  Description of Artificial Sequence: Synthetic oligonucleotide
uuuaauuuauuaauauuuaaauaug

SEQ ID NO: 42119 - RNA, 25 nt, Artificial Sequence
  Description of Artificial Sequence: Synthetic oligonucleotide
augcaguuugaauauccuuuguuuc

SEQ ID NO: 42120 - RNA, 25 nt, Artificial Sequence
  Description of Artificial Sequence: Synthetic oligonucleotide
caugcugcuggcgucuaaguguuug

SEQ ID NO: 42121 - RNA, 25 nt, Artificial Sequence
  Description of Artificial Sequence: Synthetic oligonucleotide
agaugugcauuucaccugugacaaa

SEQ ID NO: 42122 - RNA, 25 nt, Artificial Sequence
  Description of Artificial Sequence: Synthetic oligonucleotide
ucaaaaccugugccaggcugaauua

SEQ ID NO: 42123 - RNA, 25 nt, Artificial Sequence
  Description of Artificial Sequence: Synthetic oligonucleotide
gaauguggguagucauucuuacaau

SEQ ID NO: 42124 - RNA, 25 nt, Artificial Sequence
  Description of Artificial Sequence: Synthetic oligonucleotide
auguggguagucauucuuacaauug

SEQ ID NO: 42125 - RNA, 25 nt, Artificial Sequence
  Description of Artificial Sequence: Synthetic oligonucleotide
ugaaaaugagcaucagagaguguac

SEQ ID NO: 42126 - RNA, 25 nt, Artificial Sequence
  Description of Artificial Sequence: Synthetic oligonucleotide
uugcuuuucauguagaacucagcag

SEQ ID NO: 42127 - RNA, 25 nt, Artificial Sequence
  Description of Artificial Sequence: Synthetic oligonucleotide
uguauuucuauauuuauuuucagua

SEQ ID NO: 42128 - RNA, 25 nt, Artificial Sequence
  Description of Artificial Sequence: Synthetic oligonucleotide
uuugauuaauguuucuuaaauggaa

SEQ ID NO: 42129 - RNA, 25 nt, Artificial Sequence
  Description of Artificial Sequence: Synthetic oligonucleotide
caacguguauagugccuaaaauugu

SEQ ID NO: 42130 - RNA, 25 nt, Artificial Sequence
  Description of Artificial Sequence: Synthetic oligonucleotide
cauauccuuggcuacuaacaucugg

SEQ ID NO: 42131 - RNA, 25 nt, Artificial Sequence
  Description of Artificial Sequence: Synthetic oligonucleotide
uacuaacaucuggagacugugagcu

SEQ ID NO: 42132 - RNA, 25 nt, Artificial Sequence
  Description of Artificial Sequence: Synthetic oligonucleotide
cauaaguugugugcuuuuuauuaau

SEQ ID NO: 42133 - RNA, 25 nt, Artificial Sequence
  Description of Artificial Sequence: Synthetic oligonucleotide
gcaucauuuuggcucuucuuacauu

SEQ ID NO: 42134 - RNA, 25 nt, Artificial Sequence
  Description of Artificial Sequence: Synthetic oligonucleotide
gcucuucuuacauuuguaaaaaugu

SEQ ID NO: 42135 - RNA, 25 nt, Artificial Sequence
  Description of Artificial Sequence: Synthetic oligonucleotide
agauuaggucaucuuaauucauauu

SEQ ID NO: 42136 - RNA, 25 nt, Artificial Sequence
  Description of Artificial Sequence: Synthetic oligonucleotide
auggaauugaaagaacuaaucauga

SEQ ID NO: 42137 - RNA, 25 nt, Artificial Sequence
  Description of Artificial Sequence: Synthetic oligonucleotide
cacacucauuccuucugcucuuggg

SEQ ID NO: 42138 - RNA, 25 nt, Artificial Sequence
  Description of Artificial Sequence: Synthetic oligonucleotide
uguagagguaaccaguagcuuugag

SEQ ID NO: 42139 - RNA, 25 nt, Artificial Sequence
  Description of Artificial Sequence: Synthetic oligonucleotide
caaccacaugccacguaauauuuca

SEQ ID NO: 42140 - RNA, 25 nt, Artificial Sequence
  Description of Artificial Sequence: Synthetic oligonucleotide
ucggaaacaaguuauucucuucacu

SEQ ID NO: 42141 - RNA, 25 nt, Artificial Sequence
  Description of Artificial Sequence: Synthetic oligonucleotide
acucccaauaacuaaugcuaagaaa

SEQ ID NO: 42142 - RNA, 25 nt, Artificial Sequence
  Description of Artificial Sequence: Synthetic oligonucleotide
aaugcuaagaaaugcugaaaaucaa

SEQ ID NO: 42143 - RNA, 25 nt, Artificial Sequence
  Description of Artificial Sequence: Synthetic oligonucleotide
gucuuucucuaaauaugauuacuuu

SEQ ID NO: 42144 - RNA, 25 nt, Artificial Sequence
  Description of Artificial Sequence: Synthetic oligonucleotide
ugaauuucaggcauuuuguucuaca

SEQ ID NO: 42145 - RNA, 25 nt, Artificial Sequence
  Description of Artificial Sequence: Synthetic oligonucleotide
cgauucccucucacccgggacucuc

SEQ ID NO: 42146 - RNA, 25 nt, Artificial Sequence
  Description of Artificial Sequence: Synthetic oligonucleotide
aggaaagugaaccuuuaaaguaaag

SEQ ID NO: 42147 - RNA, 25 nt, Artificial Sequence
  Description of Artificial Sequence: Synthetic oligonucleotide
gaggcugcaugcucuggaagccugg

SEQ ID NO: 42148 - RNA, 25 nt, Artificial Sequence
  Description of Artificial Sequence: Synthetic oligonucleotide
ucucugaacagaaaacaaaagagag

SEQ ID NO: 42149 - RNA, 25 nt, Artificial Sequence
  Description of Artificial Sequence: Synthetic oligonucleotide
aacuuggcuguaaucaguuaugccg

SEQ ID NO: 42150 - RNA, 25 nt, Artificial Sequence
  Description of Artificial Sequence: Synthetic oligonucleotide
agaagccaaaauuaaaagaagucca

SEQ ID NO: 42151 - RNA, 25 nt, Artificial Sequence
  Description of Artificial Sequence: Synthetic oligonucleotide
auuaaaagaaguccaggugagguua

SEQ ID NO: 42152 - RNA, 25 nt, Artificial Sequence
  Description of Artificial Sequence: Synthetic oligonucleotide
gaauccggauuaucgggaagaggac

SEQ ID NO: 42153 - RNA, 25 nt, Artificial Sequence
  Description of Artificial Sequence: Synthetic oligonucleotide
aaugugacaucaaagcaaguauugu

SEQ ID NO: 42154 - RNA, 25 nt, Artificial Sequence
  Description of Artificial Sequence: Synthetic oligonucleotide
caucaaagcaaguauuguagcacuc

SEQ ID NO: 42155 - RNA, 25 nt, Artificial Sequence
  Description of Artificial Sequence: Synthetic oligonucleotide
agagagagaaaacaaaaccacaaau

SEQ ID NO: 42156 - RNA, 25 nt, Artificial Sequence
  Description of Artificial Sequence: Synthetic oligonucleotide
ucgcuguaguauuuaagcccauaca

SEQ ID NO: 42157 - RNA, 25 nt, Artificial Sequence
  Description of Artificial Sequence: Synthetic oligonucleotide
cgcuguaguauuuaagcccauacag

SEQ ID NO: 42158 - RNA, 25 nt, Artificial Sequence
  Description of Artificial Sequence: Synthetic oligonucleotide
auuuaagcccauacagaaaccuucc

SEQ ID NO: 42159 - RNA, 25 nt, Artificial Sequence
  Description of Artificial Sequence: Synthetic oligonucleotide
auuaaaauaaacaugguauaccuac

SEQ ID NO: 42160 - RNA, 25 nt, Artificial Sequence
  Description of Artificial Sequence: Synthetic oligonucleotide
cuguucugaucggccaguuuucgga

SEQ ID NO: 42161 - RNA, 25 nt, Artificial Sequence
  Description of Artificial Sequence: Synthetic oligonucleotide
aaauaauuugaacuuuggaacaggg

SEQ ID NO: 42162 - RNA, 25 nt, Artificial Sequence
  Description of Artificial Sequence: Synthetic oligonucleotide
ugcgaccuuaauuuaacuuuccagu

SEQ ID NO: 42163 - RNA, 25 nt, Artificial Sequence
  Description of Artificial Sequence: Synthetic oligonucleotide
cugagaaagcuaaaguuugguuuug

SEQ ID NO: 42164 - RNA, 25 nt, Artificial Sequence
  Description of Artificial Sequence: Synthetic oligonucleotide
aguaaagaugcuacuucccacugua

SEQ ID NO: 42165 - RNA, 25 nt, Artificial Sequence
  Description of Artificial Sequence: Synthetic oligonucleotide
cugcuuaauugcugauaccauauga

SEQ ID NO: 42166 - RNA, 25 nt, Artificial Sequence
  Description of Artificial Sequence: Synthetic oligonucleotide
uaccauaugaaugaaacaugggcug

SEQ ID NO: 42167 - RNA, 25 nt, Artificial Sequence
  Description of Artificial Sequence: Synthetic oligonucleotide
aacuuucuuauccaacuuuuucaua

SEQ ID NO: 42168 - RNA, 25 nt, Artificial Sequence
  Description of Artificial Sequence: Synthetic oligonucleotide
ccuugcaugacaucaugaggccgga

SEQ ID NO: 42169 - RNA, 25 nt, Artificial Sequence
  Description of Artificial Sequence: Synthetic oligonucleotide
ugaauuuguauaugacugcauuugu

SEQ ID NO: 42170 - RNA, 25 nt, Artificial Sequence
  Description of Artificial Sequence: Synthetic oligonucleotide
gaauccuaguagaauguuuacuacc

SEQ ID NO: 42171 - RNA, 25 nt, Artificial Sequence
  Description of Artificial Sequence: Synthetic oligonucleotide
gaaagggaagaauuuuuugaugaaa

SEQ ID NO: 42172 - RNA, 25 nt, Artificial Sequence
  Description of Artificial Sequence: Synthetic oligonucleotide
uaucggcaugccagugugugaauuu

SEQ ID NO: 42173 - RNA, 25 nt, Artificial Sequence
  Description of Artificial Sequence: Synthetic oligonucleotide
caccucauaguagagcaauguaugu

SEQ ID NO: 42174 - RNA, 25 nt, Artificial Sequence
  Description of Artificial Sequence: Synthetic oligonucleotide
ccagaauugccaaagcacauauaua

SEQ ID NO: 42175 - RNA, 25 nt, Artificial Sequence
  Description of Artificial Sequence: Synthetic oligonucleotide
uggugaucuggguaauaguuucucc

SEQ ID NO: 42176 - RNA, 25 nt, Artificial Sequence
  Description of Artificial Sequence: Synthetic oligonucleotide
gaucuggguaauaguuucuccaaau

SEQ ID NO: 42177 - RNA, 25 nt, Artificial Sequence
  Description of Artificial Sequence: Synthetic oligonucleotide
ggaugugaugaauacuuccuagaaa

SEQ ID NO: 42178 - RNA, 25 nt, Artificial Sequence
  Description of Artificial Sequence: Synthetic oligonucleotide
cauuuccacagcuacaccauauaug

SEQ ID NO: 42179 - RNA, 25 nt, Artificial Sequence
  Description of Artificial Sequence: Synthetic oligonucleotide
acagcuacaccauauaugaauggag

SEQ ID NO: 42180 - RNA, 25 nt, Artificial Sequence
  Description of Artificial Sequence: Synthetic oligonucleotide
ugcaguucuuacacgagaagaagau

SEQ ID NO: 42181 - RNA, 25 nt, Artificial Sequence
  Description of Artificial Sequence: Synthetic oligonucleotide
acgagaagaagaucauuuacaggga

SEQ ID NO: 42182 - RNA, 25 nt, Artificial Sequence
  Description of Artificial Sequence: Synthetic oligonucleotide
cgagaagaagaucauuuacagggac

SEQ ID NO: 42183 - RNA, 25 nt, Artificial Sequence
  Description of Artificial Sequence: Synthetic oligonucleotide
aagaagaucauuuacagggaccuga

SEQ ID NO: 42184 - RNA, 25 nt, Artificial Sequence
  Description of Artificial Sequence: Synthetic oligonucleotide
agaggaagagguguuugacugcauc

SEQ ID NO: 42185 - RNA, 25 nt, Artificial Sequence
  Description of Artificial Sequence: Synthetic oligonucleotide
gaggaagagguguuugacugcaucg

SEQ ID NO: 42186 - RNA, 25 nt, Artificial Sequence
  Description of Artificial Sequence: Synthetic oligonucleotide
cuacuuugagggcgaguucacaggg

SEQ ID NO: 42187 - RNA, 25 nt, Artificial Sequence
  Description of Artificial Sequence: Synthetic oligonucleotide
agggcaucuccuggcaccucugucc

SEQ ID NO: 42188 - RNA, 25 nt, Artificial Sequence
  Description of Artificial Sequence: Synthetic oligonucleotide
ggagugauaugguuugucuuuuuaa

SEQ ID NO: 42189 - RNA, 25 nt, Artificial Sequence
  Description of Artificial Sequence: Synthetic oligonucleotide
gagugauaugguuugucuuuuuaag

SEQ ID NO: 42190 - RNA, 25 nt, Artificial Sequence
  Description of Artificial Sequence: Synthetic oligonucleotide
ugcaguaaagauccuaaagguuguc

SEQ ID NO: 42191 - RNA, 25 nt, Artificial Sequence
  Description of Artificial Sequence: Synthetic oligonucleotide
aguaaagauccuaaagguugucgac

SEQ ID NO: 42192 - RNA, 25 nt, Artificial Sequence
  Description of Artificial Sequence: Synthetic oligonucleotide
ugacaaaggacaaccuggcaauugu

SEQ ID NO: 42193 - RNA, 25 nt, Artificial Sequence
  Description of Artificial Sequence: Synthetic oligonucleotide
gcaauugugacccaguggugcgagg

SEQ ID NO: 42194 - RNA, 25 nt, Artificial Sequence
  Description of Artificial Sequence: Synthetic oligonucleotide
aacaucauccauagagacaugaaau

SEQ ID NO: 42195 - RNA, 25 nt, Artificial Sequence
  Description of Artificial Sequence: Synthetic oligonucleotide
ugaaauccaacaauauauuucucca

SEQ ID NO: 42196 - RNA, 25 nt, Artificial Sequence
  Description of Artificial Sequence: Synthetic oligonucleotide
aacaauauauuucuccaugaaggcu

SEQ ID NO: 42197 - RNA, 25 nt, Artificial Sequence
  Description of Artificial Sequence: Synthetic oligonucleotide
aacaguaaagucacgcuggaguggu

SEQ ID NO: 42198 - RNA, 25 nt, Artificial Sequence
  Description of Artificial Sequence: Synthetic oligonucleotide
ugugaagaaaguaaaggaagagagg

SEQ ID NO: 42199 - RNA, 25 nt, Artificial Sequence
  Description of Artificial Sequence: Synthetic oligonucleotide
cuuccgagccauccuugcaucgggc

SEQ ID NO: 42200 - RNA, 25 nt, Artificial Sequence
  Description of Artificial Sequence: Synthetic oligonucleotide
aauggagguugaauauccuacugug

SEQ ID NO: 42201 - RNA, 25 nt, Artificial Sequence
  Description of Artificial Sequence: Synthetic oligonucleotide
ggagguugaauauccuacuguguaa

SEQ ID NO: 42202 - RNA, 25 nt, Artificial Sequence
  Description of Artificial Sequence: Synthetic oligonucleotide
auuuugaguuuucccuuguagugua

SEQ ID NO: 42203 - RNA, 25 nt, Artificial Sequence
  Description of Artificial Sequence: Synthetic oligonucleotide
uauccuguuuguucuuuguugauug

SEQ ID NO: 42204 - RNA, 25 nt, Artificial Sequence
  Description of Artificial Sequence: Synthetic oligonucleotide
ccuguuuguucuuuguugauugaaa

SEQ ID NO: 42205 - RNA, 25 nt, Artificial Sequence
  Description of Artificial Sequence: Synthetic oligonucleotide
cucuacagccuucuuuuucuuccau

SEQ ID NO: 42206 - RNA, 25 nt, Artificial Sequence
  Description of Artificial Sequence: Synthetic oligonucleotide
ucuuccauagcuaaucuuccuucua

SEQ ID NO: 42207 - RNA, 25 nt, Artificial Sequence
  Description of Artificial Sequence: Synthetic oligonucleotide
auaaucuuccuguugaaugcuucau

SEQ ID NO: 42208 - RNA, 25 nt, Artificial Sequence
  Description of Artificial Sequence: Synthetic oligonucleotide
uaaucuuccuguugaaugcuucaug

SEQ ID NO: 42209 - RNA, 25 nt, Artificial Sequence
  Description of Artificial Sequence: Synthetic oligonucleotide
cuucaugacuugaauucuacuuuga

SEQ ID NO: 42210 - RNA, 25 nt, Artificial Sequence
  Description of Artificial Sequence: Synthetic oligonucleotide
aagagggagagaagcaacuacagac

SEQ ID NO: 42211 - RNA, 25 nt, Artificial Sequence
  Description of Artificial Sequence: Synthetic oligonucleotide
cgucuccuaccagaccaaggucaac

SEQ ID NO: 42212 - RNA, 25 nt, Artificial Sequence
  Description of Artificial Sequence: Synthetic oligonucleotide
gaucaaucggcccgacuaucucgac

SEQ ID NO: 42213 - RNA, 25 nt, Artificial Sequence
  Description of Artificial Sequence: Synthetic oligonucleotide
ggacgaacauccaaccuucccaaac

SEQ ID NO: 42214 - RNA, 25 nt, Artificial Sequence
  Description of Artificial Sequence: Synthetic oligonucleotide
agggucggaacccaagcuuagaacu

SEQ ID NO: 42215 - RNA, 25 nt, Artificial Sequence
  Description of Artificial Sequence: Synthetic oligonucleotide
ucggaacccaagcuuagaacuuuaa

SEQ ID NO: 42216 - RNA, 25 nt, Artificial Sequence
  Description of Artificial Sequence: Synthetic oligonucleotide
acccaagcuuagaacuuuaagcaac

SEQ ID NO: 42217 - RNA, 25 nt, Artificial Sequence
  Description of Artificial Sequence: Synthetic oligonucleotide
gaacuuuaagcaacaagaccaccac

SEQ ID NO: 42218 - RNA, 25 nt, Artificial Sequence
  Description of Artificial Sequence: Synthetic oligonucleotide
acuauucaguggcgagaaauaaagu

SEQ ID NO: 42219 - RNA, 25 nt, Artificial Sequence
  Description of Artificial Sequence: Synthetic oligonucleotide
cuauucaguggcgagaaauaaaguu

SEQ ID NO: 42220 - RNA, 25 nt, Artificial Sequence
  Description of Artificial Sequence: Synthetic oligonucleotide
aaacacagauaacaggaaaugaucc

SEQ ID NO: 42221 - RNA, 25 nt, Artificial Sequence
  Description of Artificial Sequence: Synthetic oligonucleotide
cuuaagaaaagagaagaaaugaaac

SEQ ID NO: 42222 - RNA, 25 nt, Artificial Sequence
  Description of Artificial Sequence: Synthetic oligonucleotide
cugaaggaguguguuuccauccucc

SEQ ID NO: 42223 - RNA, 25 nt, Artificial Sequence
  Description of Artificial Sequence: Synthetic oligonucleotide
ucaccgcgggacugaaaaucuuuga

SEQ ID NO: 42224 - RNA, 25 nt, Artificial Sequence
  Description of Artificial Sequence: Synthetic oligonucleotide
agcagaaauaagcgugccguucagg

SEQ ID NO: 42225 - RNA, 25 nt, Artificial Sequence
  Description of Artificial Sequence: Synthetic oligonucleotide
aagcgugccguucaggguccagaag

SEQ ID NO: 42226 - RNA, 25 nt, Artificial Sequence
  Description of Artificial Sequence: Synthetic oligonucleotide
agaaacagucacucaagacugcuug

SEQ ID NO: 42227 - RNA, 25 nt, Artificial Sequence
  Description of Artificial Sequence: Synthetic oligonucleotide
agaggaagaagguccaugucuuugg

SEQ ID NO: 42228 - RNA, 25 nt, Artificial Sequence
  Description of Artificial Sequence: Synthetic oligonucleotide
uguauucaaaauaugccugaaacac

SEQ ID NO: 42229 - RNA, 25 nt, Artificial Sequence
  Description of Artificial Sequence: Synthetic oligonucleotide
auuuuccucccuuucucuguaccuc

SEQ ID NO: 42230 - RNA, 25 nt, Artificial Sequence
  Description of Artificial Sequence: Synthetic oligonucleotide
caaagaaagauagagcaagacaaga

SEQ ID NO: 42231 - RNA, 25 nt, Artificial Sequence
  Description of Artificial Sequence: Synthetic oligonucleotide
aagaaagauagagcaagacaagaaa

SEQ ID NO: 42232 - RNA, 25 nt, Artificial Sequence
  Description of Artificial Sequence: Synthetic oligonucleotide
gaaagcauuuguuuguacaagaucc

SEQ ID NO: 42233 - RNA, 25 nt, Artificial Sequence
  Description of Artificial Sequence: Synthetic oligonucleotide
ugaguuaaacgaacguacuugcaga

SEQ ID NO: 42234 - RNA, 25 nt, Artificial Sequence
  Description of Artificial Sequence: Synthetic oligonucleotide
acugauacagaacgaucgauacaga

SEQ ID NO: 42235 - RNA, 25 nt, Artificial Sequence
  Description of Artificial Sequence: Synthetic oligonucleotide
auauuauauauauauaaaaauaaau

SEQ ID NO: 42236 - RNA, 25 nt, Artificial Sequence
  Description of Artificial Sequence: Synthetic oligonucleotide
auuauauauauauaaaaauaaauau

SEQ ID NO: 42237 - RNA, 25 nt, Artificial Sequence
  Description of Artificial Sequence: Synthetic oligonucleotide
ucacuggauguauuugacugcugug

SEQ ID NO: 42238 - RNA, 25 nt, Artificial Sequence
  Description of Artificial Sequence: Synthetic oligonucleotide
cagggaagaggaggagaugagagac

SEQ ID NO: 42239 - RNA, 25 nt, Artificial Sequence
  Description of Artificial Sequence: Synthetic oligonucleotide
augaucuuuuuuuugucccacuugg

SEQ ID NO: 42240 - RNA, 27 nt, Artificial Sequence
  Description of Artificial Sequence: Synthetic oligonucleotide
ggccgugaacuccucaucaaaauaccu

SEQ ID NO: 42241 - RNA, 27 nt, Artificial Sequence
  Description of Artificial Sequence: Synthetic oligonucleotide
uggugugauggugaucaucugggccgu

SEQ ID NO: 42242 - RNA, 27 nt, Artificial Sequence
  Description of Artificial Sequence: Synthetic oligonucleotide
aaacccgcaggauaguuuucuucccua

SEQ ID NO: 42243 - RNA, 27 nt, Artificial Sequence
  Description of Artificial Sequence: Synthetic oligonucleotide
caaacuggaugaaauaaauuaaaaccc

SEQ ID NO: 42244 - RNA, 27 nt, Artificial Sequence
  Description of Artificial Sequence: Synthetic oligonucleotide
agaaguccuuaacauuucccuacguga

SEQ ID NO: 42245 - RNA, 27 nt, Artificial Sequence
  Description of Artificial Sequence: Synthetic oligonucleotide
cucugucccacuggguaaacccuggcc

SEQ ID NO: 42246 - RNA, 27 nt, Artificial Sequence
  Description of Artificial Sequence: Synthetic oligonucleotide
cacaauaacaaauuuaaaccuugcucc

SEQ ID NO: 42247 - RNA, 27 nt, Artificial Sequence
  Description of Artificial Sequence: Synthetic oligonucleotide
aaaugcauuugaacaacauaauacaca

SEQ ID NO: 42248 - RNA, 27 nt, Artificial Sequence
  Description of Artificial Sequence: Synthetic oligonucleotide
ggcuuuccugucacaaagauuaaaaac

SEQ ID NO: 42249 - RNA, 27 nt, Artificial Sequence
  Description of Artificial Sequence: Synthetic oligonucleotide
agggcuuuccugucacaaagauuaaaa

SEQ ID NO: 42250 - RNA, 27 nt, Artificial Sequence
  Description of Artificial Sequence: Synthetic oligonucleotide
ggccaugcugggagacauaagcagcag

SEQ ID NO: 42251 - RNA, 27 nt, Artificial Sequence
  Description of Artificial Sequence: Synthetic oligonucleotide
ucagggagaagcuucugaaacacuucu

SEQ ID NO: 42252 - RNA, 27 nt, Artificial Sequence
  Description of Artificial Sequence: Synthetic oligonucleotide
aagggcuucuuccuuauugauggucag

SEQ ID NO: 42253 - RNA, 27 nt, Artificial Sequence
  Description of Artificial Sequence: Synthetic oligonucleotide
ugaagggcuucuuccuuauugaugguc

SEQ ID NO: 42254 - RNA, 27 nt, Artificial Sequence
  Description of Artificial Sequence: Synthetic oligonucleotide
cgcugaagggcuucuuccuuauugaug

SEQ ID NO: 42255 - RNA, 27 nt, Artificial Sequence
  Description of Artificial Sequence: Synthetic oligonucleotide
gccgcugaagggcuucuuccuuauuga

SEQ ID NO: 42256 - RNA, 27 nt, Artificial Sequence
  Description of Artificial Sequence: Synthetic oligonucleotide
acuggccgcugaagggcuucuuccuua

SEQ ID NO: 42257 - RNA, 27 nt, Artificial Sequence
  Description of Artificial Sequence: Synthetic oligonucleotide
cggagcuuuucaccuuuaguuaugcuu

SEQ ID NO: 42258 - RNA, 27 nt, Artificial Sequence
  Description of Artificial Sequence: Synthetic oligonucleotide
ccggagcuuuucaccuuuaguuaugcu

SEQ ID NO: 42259 - RNA, 27 nt, Artificial Sequence
  Description of Artificial Sequence: Synthetic oligonucleotide
cagacuguugacuggcgugauguaguu

SEQ ID NO: 42260 - RNA, 27 nt, Artificial Sequence
  Description of Artificial Sequence: Synthetic oligonucleotide
cuuuugaacucugcuuaaauccagugg

SEQ ID NO: 42261 - RNA, 27 nt, Artificial Sequence
  Description of Artificial Sequence: Synthetic oligonucleotide
gcuuuugaacucugcuuaaauccagug

SEQ ID NO: 42262 - RNA, 27 nt, Artificial Sequence
  Description of Artificial Sequence: Synthetic oligonucleotide
agggcuuuugaacucugcuuaaaucca

SEQ ID NO: 42263 - RNA, 27 nt, Artificial Sequence
  Description of Artificial Sequence: Synthetic oligonucleotide
aagggcuuuugaacucugcuuaaaucc

SEQ ID NO: 42264 - RNA, 27 nt, Artificial Sequence
  Description of Artificial Sequence: Synthetic oligonucleotide
ugaagggcuuuugaacucugcuuaaau

SEQ ID NO: 42265 - RNA, 27 nt, Artificial Sequence
  Description of Artificial Sequence: Synthetic oligonucleotide
cugaagggcuuuugaacucugcuuaaa

SEQ ID NO: 42266 - RNA, 27 nt, Artificial Sequence
  Description of Artificial Sequence: Synthetic oligonucleotide
cgcugaagggcuuuugaacucugcuua

SEQ ID NO: 42267 - RNA, 27 nt, Artificial Sequence
  Description of Artificial Sequence: Synthetic oligonucleotide
cgagcggcuucacucagacccugaggc

SEQ ID NO: 42268 - RNA, 27 nt, Artificial Sequence
  Description of Artificial Sequence: Synthetic oligonucleotide
uugacuggcgugauguaguugcuuggg

SEQ ID NO: 42269 - RNA, 27 nt, Artificial Sequence
  Description of Artificial Sequence: Synthetic oligonucleotide
cacgcaccaagaagcugccauugaucc

SEQ ID NO: 42270 - RNA, 27 nt, Artificial Sequence
  Description of Artificial Sequence: Synthetic oligonucleotide
cugaugaauccaaugugggcuggaauc

SEQ ID NO: 42271 - RNA, 27 nt, Artificial Sequence
  Description of Artificial Sequence: Synthetic oligonucleotide
cuuagguauuccacauucucagcugug

SEQ ID NO: 42272 - RNA, 27 nt, Artificial Sequence
  Description of Artificial Sequence: Synthetic oligonucleotide
ugagccucaaauuaggagauacguuuu

SEQ ID NO: 42273 - RNA, 27 nt, Artificial Sequence
  Description of Artificial Sequence: Synthetic oligonucleotide
ccaauuguagagaaauuauuuuaggaa

SEQ ID NO: 42274 - RNA, 27 nt, Artificial Sequence
  Description of Artificial Sequence: Synthetic oligonucleotide
ggcuccuaacuagcugaaucuuccaau

SEQ ID NO: 42275 - RNA, 27 nt, Artificial Sequence
  Description of Artificial Sequence: Synthetic oligonucleotide
guggauauugacuaggagaguuuaaaa

SEQ ID NO: 42276 - RNA, 27 nt, Artificial Sequence
  Description of Artificial Sequence: Synthetic oligonucleotide
ugugacugaacauaacuguaggcugaa

SEQ ID NO: 42277 - RNA, 27 nt, Artificial Sequence
  Description of Artificial Sequence: Synthetic oligonucleotide
guaugugugugugacugaacauaacug

SEQ ID NO: 42278 - RNA, 27 nt, Artificial Sequence
  Description of Artificial Sequence: Synthetic oligonucleotide
aagcaaaaggaacauuuuguaugugug

SEQ ID NO: 42279 - RNA, 27 nt, Artificial Sequence
  Description of Artificial Sequence: Synthetic oligonucleotide
aaaaauuacuuuaaaagcaaaaggaac

SEQ ID NO: 42280 - RNA, 27 nt, Artificial Sequence
  Description of Artificial Sequence: Synthetic oligonucleotide
ccauugacuguugcuucacaggucaga

SEQ ID NO: 42281 - RNA, 27 nt, Artificial Sequence
  Description of Artificial Sequence: Synthetic oligonucleotide
auugguuugucgaugugugagauaguu

SEQ ID NO: 42282 - RNA, 27 nt, Artificial Sequence
  Description of Artificial Sequence: Synthetic oligonucleotide
agugguagcaguacaauugaggacaag

SEQ ID NO: 42283 - RNA, 27 nt, Artificial Sequence
  Description of Artificial Sequence: Synthetic oligonucleotide
uaagaccgcuugccagcuacgguuuca

SEQ ID NO: 42284 - RNA, 27 nt, Artificial Sequence
  Description of Artificial Sequence: Synthetic oligonucleotide
agccgguaagaccgcuugccagcuacg

SEQ ID NO: 42285 - RNA, 27 nt, Artificial Sequence
  Description of Artificial Sequence: Synthetic oligonucleotide
gguaacccaucuuuuaaccauacaacu

SEQ ID NO: 42286 - RNA, 27 nt, Artificial Sequence
  Description of Artificial Sequence: Synthetic oligonucleotide
ucgcagguaacccaucuuuuaaccaua

SEQ ID NO: 42287 - RNA, 27 nt, Artificial Sequence
  Description of Artificial Sequence: Synthetic oligonucleotide
cucagcaagauuguauaauucccugca

SEQ ID NO: 42288 - RNA, 27 nt, Artificial Sequence
  Description of Artificial Sequence: Synthetic oligonucleotide
acuguuuuaugcucagcaagauuguau

SEQ ID NO: 42289 - RNA, 27 nt, Artificial Sequence
  Description of Artificial Sequence: Synthetic oligonucleotide
aggauaaaggacucuucauuauuggaa

SEQ ID NO: 42290 - RNA, 27 nt, Artificial Sequence
  Description of Artificial Sequence: Synthetic oligonucleotide
caacuugcguuggaacauccaaagugu

SEQ ID NO: 42291 - RNA, 27 nt, Artificial Sequence
  Description of Artificial Sequence: Synthetic oligonucleotide
augguuucaguuuaguggaagcauuua

SEQ ID NO: 42292 - RNA, 27 nt, Artificial Sequence
  Description of Artificial Sequence: Synthetic oligonucleotide
auauuuaacaaagucaaacuuucucac

SEQ ID NO: 42293 - RNA, 27 nt, Artificial Sequence
  Description of Artificial Sequence: Synthetic oligonucleotide
aacuuuuaauauacaguaguucuuuuc

SEQ ID NO: 42294 - RNA, 27 nt, Artificial Sequence
  Description of Artificial Sequence: Synthetic oligonucleotide
guuaagucaaaacccguauuucuaaag

SEQ ID NO: 42295 - RNA, 27 nt, Artificial Sequence
  Description of Artificial Sequence: Synthetic oligonucleotide
gugcugaguuugcuguacccauguuga

SEQ ID NO: 42296 - RNA, 27 nt, Artificial Sequence
  Description of Artificial Sequence: Synthetic oligonucleotide
ugaggucagcaucuucugugucuuuac

SEQ ID NO: 42297 - RNA, 27 nt, Artificial Sequence
  Description of Artificial Sequence: Synthetic oligonucleotide
gcgaucugaauaaaccucccuacuagc

SEQ ID NO: 42298 - RNA, 27 nt, Artificial Sequence
  Description of Artificial Sequence: Synthetic oligonucleotide
aucccagaacccugcugcagaaggcca

SEQ ID NO: 42299 - RNA, 27 nt, Artificial Sequence
  Description of Artificial Sequence: Synthetic oligonucleotide
cauaauuuccaauauguaccagaccuu

SEQ ID NO: 42300 - RNA, 27 nt, Artificial Sequence
  Description of Artificial Sequence: Synthetic oligonucleotide
cuagugcuuccaucggaaggacuaggu

SEQ ID NO: 42301 - RNA, 27 nt, Artificial Sequence
  Description of Artificial Sequence: Synthetic oligonucleotide
uccacauaaaaacaauauucacuggga

SEQ ID NO: 42302 - RNA, 27 nt, Artificial Sequence
  Description of Artificial Sequence: Synthetic oligonucleotide
ucuaccaauuccaacuugaauucauug

SEQ ID NO: 42303 - RNA, 27 nt, Artificial Sequence
  Description of Artificial Sequence: Synthetic oligonucleotide
ucuccaagucuaaaucuguguccugag

SEQ ID NO: 42304 - RNA, 27 nt, Artificial Sequence
  Description of Artificial Sequence: Synthetic oligonucleotide
uggaauacuguaacugugcuuugagga

SEQ ID NO: 42305 - RNA, 27 nt, Artificial Sequence
  Description of Artificial Sequence: Synthetic oligonucleotide
uuaauucaucagugguggcagugguag

SEQ ID NO: 42306 - RNA, 27 nt, Artificial Sequence
  Description of Artificial Sequence: Synthetic oligonucleotide
gugaugauguggcacuaguaguuucuu

SEQ ID NO: 42307 - RNA, 27 nt, Artificial Sequence
  Description of Artificial Sequence: Synthetic oligonucleotide
ucuguuuggugaggcuguccgacuuug

SEQ ID NO: 42308 - RNA, 27 nt, Artificial Sequence
  Description of Artificial Sequence: Synthetic oligonucleotide
ccaucauguuccauuuuucgcuuucuc

SEQ ID NO: 42309 - RNA, 27 nt, Artificial Sequence
  Description of Artificial Sequence: Synthetic oligonucleotide
gcagucuacaugcuaaaucagagggua

SEQ ID NO: 42310 - RNA, 27 nt, Artificial Sequence
  Description of Artificial Sequence: Synthetic oligonucleotide
cauaaauagauccuuaaauagcucaaa

SEQ ID NO: 42311 - RNA, 27 nt, Artificial Sequence
  Description of Artificial Sequence: Synthetic oligonucleotide
ugauaauagugcuuuuucaccuuuuuc

SEQ ID NO: 42312 - RNA, 27 nt, Artificial Sequence
  Description of Artificial Sequence: Synthetic oligonucleotide
gcagaacugauaauagugcuuuuucac

SEQ ID NO: 42313 - RNA, 27 nt, Artificial Sequence
  Description of Artificial Sequence: Synthetic oligonucleotide
guagguuuaaucuuucuuuucagccau

SEQ ID NO: 42314 - RNA, 27 nt, Artificial Sequence
  Description of Artificial Sequence: Synthetic oligonucleotide
agaaggauuuuauuauaaggguuuaau

SEQ ID NO: 42315 - RNA, 27 nt, Artificial Sequence
  Description of Artificial Sequence: Synthetic oligonucleotide
gucuacagcauuggcuaauaguaugaa

SEQ ID NO: 42316 - RNA, 27 nt, Artificial Sequence
  Description of Artificial Sequence: Synthetic oligonucleotide
cuauuccuaucaaaaugcuucugucua

SEQ ID NO: 42317 - RNA, 27 nt, Artificial Sequence
  Description of Artificial Sequence: Synthetic oligonucleotide
ucagggccauuaucuuauuugcucuau

SEQ ID NO: 42318 - RNA, 27 nt, Artificial Sequence
  Description of Artificial Sequence: Synthetic oligonucleotide
ugcuugaggaagagaaaaauguugguc

SEQ ID NO: 42319 - RNA, 27 nt, Artificial Sequence
  Description of Artificial Sequence: Synthetic oligonucleotide
ugggcugaacuuuucucauacuuaaag

SEQ ID NO: 42320 - RNA, 27 nt, Artificial Sequence
  Description of Artificial Sequence: Synthetic oligonucleotide
gguucagcagccaucuuuauuccugcg

SEQ ID NO: 42321 - RNA, 27 nt, Artificial Sequence
  Description of Artificial Sequence: Synthetic oligonucleotide
ugaagagaacuuggucauucaaauuuc

SEQ ID NO: 42322 - RNA, 27 nt, Artificial Sequence
  Description of Artificial Sequence: Synthetic oligonucleotide
cucuaggcuggcuaucuuuauacauac

SEQ ID NO: 42323 - RNA, 27 nt, Artificial Sequence
  Description of Artificial Sequence: Synthetic oligonucleotide
acacuucacagagauaguuacagccau

SEQ ID NO: 42324 - RNA, 27 nt, Artificial Sequence
  Description of Artificial Sequence: Synthetic oligonucleotide
uugaaauuuucucacacuucacagaga

SEQ ID NO: 42325 - RNA, 27 nt, Artificial Sequence
  Description of Artificial Sequence: Synthetic oligonucleotide
ucaggaggauucauuuccuuaaaggaa

SEQ ID NO: 42326 - RNA, 27 nt, Artificial Sequence
  Description of Artificial Sequence: Synthetic oligonucleotide
auaugaugucacuuuuuguauccuuga

SEQ ID NO: 42327 - RNA, 27 nt, Artificial Sequence
  Description of Artificial Sequence: Synthetic oligonucleotide
uaugaugaagauucaaauugcaucuua

SEQ ID NO: 42328 - RNA, 27 nt, Artificial Sequence
  Description of Artificial Sequence: Synthetic oligonucleotide
uuaauagcuagucuucguuuugaacag

SEQ ID NO: 42329 - RNA, 27 nt, Artificial Sequence
  Description of Artificial Sequence: Synthetic oligonucleotide
auuuuuaguagagaugagguuucacca

SEQ ID NO: 42330 - RNA, 27 nt, Artificial Sequence
  Description of Artificial Sequence: Synthetic oligonucleotide
aggcgagauagagcuucucuuucguuc

SEQ ID NO: 42331 - RNA, 27 nt, Artificial Sequence
  Description of Artificial Sequence: Synthetic oligonucleotide
aacuggaccgaaggcgcuuguggagaa

SEQ ID NO: 42332 - RNA, 27 nt, Artificial Sequence
  Description of Artificial Sequence: Synthetic oligonucleotide
gcggcuacaucuuuggaaucuucuccu

SEQ ID NO: 42333 - RNA, 27 nt, Artificial Sequence
  Description of Artificial Sequence: Synthetic oligonucleotide
caagucuccucauugaauccagauugg

SEQ ID NO: 42334 - RNA, 27 nt, Artificial Sequence
  Description of Artificial Sequence: Synthetic oligonucleotide
uccucacuacucucaaaucuguucugg

SEQ ID NO: 42335 - RNA, 27 nt, Artificial Sequence
  Description of Artificial Sequence: Synthetic oligonucleotide
uuuguacucaucugcacagcucuggcu

SEQ ID NO: 42336 - RNA, 27 nt, Artificial Sequence
  Description of Artificial Sequence: Synthetic oligonucleotide
gcccauuaacaacaacaaucugaggug

SEQ ID NO: 42337 - RNA, 27 nt, Artificial Sequence
  Description of Artificial Sequence: Synthetic oligonucleotide
aauaaauuaaaaauaauuaaaauagug

SEQ ID NO: 42338 - RNA, 27 nt, Artificial Sequence
  Description of Artificial Sequence: Synthetic oligonucleotide
cauauuuaaauauuaauaaauuaaaaa

SEQ ID NO: 42339 - RNA, 27 nt, Artificial Sequence
  Description of Artificial Sequence: Synthetic oligonucleotide
gaaacaaaggauauucaaacugcauag

SEQ ID NO: 42340 - RNA, 27 nt, Artificial Sequence
  Description of Artificial Sequence: Synthetic oligonucleotide
caaacacuuagacgccagcagcauggg

SEQ ID NO: 42341 - RNA, 27 nt, Artificial Sequence
  Description of Artificial Sequence: Synthetic oligonucleotide
uuugucacaggugaaaugcacaucuga

SEQ ID NO: 42342 - RNA, 27 nt, Artificial Sequence
  Description of Artificial Sequence: Synthetic oligonucleotide
uaauucagccuggcacagguuuugauc

SEQ ID NO: 42343 - RNA, 27 nt, Artificial Sequence
  Description of Artificial Sequence: Synthetic oligonucleotide
auuguaagaaugacuacccacauucac

SEQ ID NO: 42344 - RNA, 27 nt, Artificial Sequence
  Description of Artificial Sequence: Synthetic oligonucleotide
caauuguaagaaugacuacccacauuc

SEQ ID NO: 42345 - RNA, 27 nt, Artificial Sequence
  Description of Artificial Sequence: Synthetic oligonucleotide
guacacucucugaugcucauuuucaua

SEQ ID NO: 42346 - RNA, 27 nt, Artificial Sequence
  Description of Artificial Sequence: Synthetic oligonucleotide
cugcugaguucuacaugaaaagcaaau

SEQ ID NO: 42347 - RNA, 27 nt, Artificial Sequence
  Description of Artificial Sequence: Synthetic oligonucleotide
uacugaaaauaaauauagaaauacaac

SEQ ID NO: 42348 - RNA, 27 nt, Artificial Sequence
  Description of Artificial Sequence: Synthetic oligonucleotide
uuccauuuaagaaacauuaaucaaaac

SEQ ID NO: 42349 - RNA, 27 nt, Artificial Sequence
  Description of Artificial Sequence: Synthetic oligonucleotide
acaauuuuaggcacuauacacguuguu

SEQ ID NO: 42350 - RNA, 27 nt, Artificial Sequence
  Description of Artificial Sequence: Synthetic oligonucleotide
ccagauguuaguagccaaggauauggu

SEQ ID NO: 42351 - RNA, 27 nt, Artificial Sequence
  Description of Artificial Sequence: Synthetic oligonucleotide
agcucacagucuccagauguuaguagc

SEQ ID NO: 42352 - RNA, 27 nt, Artificial Sequence
  Description of Artificial Sequence: Synthetic oligonucleotide
auuaauaaaaagcacacaacuuauggc

SEQ ID NO: 42353 - RNA, 27 nt, Artificial Sequence
  Description of Artificial Sequence: Synthetic oligonucleotide
aauguaagaagagccaaaaugaugcau

SEQ ID NO: 42354 - RNA, 27 nt, Artificial Sequence
  Description of Artificial Sequence: Synthetic oligonucleotide
acauuuuuacaaauguaagaagagcca

SEQ ID NO: 42355 - RNA, 27 nt, Artificial Sequence
  Description of Artificial Sequence: Synthetic oligonucleotide
aauaugaauuaagaugaccuaaucugu

SEQ ID NO: 42356 - RNA, 27 nt, Artificial Sequence
  Description of Artificial Sequence: Synthetic oligonucleotide
ucaugauuaguucuuucaauuccaucc

SEQ ID NO: 42357 - RNA, 27 nt, Artificial Sequence
  Description of Artificial Sequence: Synthetic oligonucleotide
cccaagagcagaaggaaugagugugca

SEQ ID NO: 42358 - RNA, 27 nt, Artificial Sequence
  Description of Artificial Sequence: Synthetic oligonucleotide
cucaaagcuacugguuaccucuacacc

SEQ ID NO: 42359 - RNA, 27 nt, Artificial Sequence
  Description of Artificial Sequence: Synthetic oligonucleotide
ugaaauauuacguggcaugugguuggg

SEQ ID NO: 42360 - RNA, 27 nt, Artificial Sequence
  Description of Artificial Sequence: Synthetic oligonucleotide
agugaagagaauaacuuguuuccgaag

SEQ ID NO: 42361 - RNA, 27 nt, Artificial Sequence
  Description of Artificial Sequence: Synthetic oligonucleotide
uuucuuagcauuaguuauugggaguga

SEQ ID NO: 42362 - RNA, 27 nt, Artificial Sequence
  Description of Artificial Sequence: Synthetic oligonucleotide
uugauuuucagcauuucuuagcauuag

SEQ ID NO: 42363 - RNA, 27 nt, Artificial Sequence
  Description of Artificial Sequence: Synthetic oligonucleotide
aaaguaaucauauuuagagaaagacag

SEQ ID NO: 42364 - RNA, 27 nt, Artificial Sequence
  Description of Artificial Sequence: Synthetic oligonucleotide
uguagaacaaaaugccugaaauucagc

SEQ ID NO: 42365 - RNA, 27 nt, Artificial Sequence
  Description of Artificial Sequence: Synthetic oligonucleotide
gagagucccgggugagagggaaucgcc

SEQ ID NO: 42366 - RNA, 27 nt, Artificial Sequence
  Description of Artificial Sequence: Synthetic oligonucleotide
cuuuacuuuaaagguucacuuuccuug

SEQ ID NO: 42367 - RNA, 27 nt, Artificial Sequence
  Description of Artificial Sequence: Synthetic oligonucleotide
ccaggcuuccagagcaugcagccuccu

SEQ ID NO: 42368 - RNA, 27 nt, Artificial Sequence
  Description of Artificial Sequence: Synthetic oligonucleotide
cucucuuuuguuuucuguucagagaaa

SEQ ID NO: 42369 - RNA, 27 nt, Artificial Sequence
  Description of Artificial Sequence: Synthetic oligonucleotide
cggcauaacugauuacagccaaguuca

SEQ ID NO: 42370 - RNA, 27 nt, Artificial Sequence
  Description of Artificial Sequence: Synthetic oligonucleotide
uggacuucuuuuaauuuuggcuucuuc

SEQ ID NO: 42371 - RNA, 27 nt, Artificial Sequence
  Description of Artificial Sequence: Synthetic oligonucleotide
uaaccucaccuggacuucuuuuaauuu

SEQ ID NO: 42372 - RNA, 27 nt, Artificial Sequence
  Description of Artificial Sequence: Synthetic oligonucleotide
guccucuucccgauaauccggauucag

SEQ ID NO: 42373 - RNA, 27 nt, Artificial Sequence
  Description of Artificial Sequence: Synthetic oligonucleotide
acaauacuugcuuugaugucacauuaa

SEQ ID NO: 42374 - RNA, 27 nt, Artificial Sequence
  Description of Artificial Sequence: Synthetic oligonucleotide
gagugcuacaauacuugcuuugauguc

SEQ ID NO: 42375 - RNA, 27 nt, Artificial Sequence
  Description of Artificial Sequence: Synthetic oligonucleotide
auuugugguuuuguuuucucucucucu

SEQ ID NO: 42376 - RNA, 27 nt, Artificial Sequence
  Description of Artificial Sequence: Synthetic oligonucleotide
uguaugggcuuaaauacuacagcgagg

SEQ ID NO: 42377 - RNA, 27 nt, Artificial Sequence
  Description of Artificial Sequence: Synthetic oligonucleotide
cuguaugggcuuaaauacuacagcgag

SEQ ID NO: 42378 - RNA, 27 nt, Artificial Sequence
  Description of Artificial Sequence: Synthetic oligonucleotide
ggaagguuucuguaugggcuuaaauac

SEQ ID NO: 42379 - RNA, 27 nt, Artificial Sequence
  Description of Artificial Sequence: Synthetic oligonucleotide
guagguauaccauguuuauuuuaauac

SEQ ID NO: 42380 - RNA, 27 nt, Artificial Sequence
  Description of Artificial Sequence: Synthetic oligonucleotide
uccgaaaacuggccgaucagaacagcc

SEQ ID NO: 42381 - RNA, 27 nt, Artificial Sequence
  Description of Artificial Sequence: Synthetic oligonucleotide
cccuguuccaaaguucaaauuauuugu

SEQ ID NO: 42382 - RNA, 27 nt, Artificial Sequence
  Description of Artificial Sequence: Synthetic oligonucleotide
acuggaaaguuaaauuaaggucgcaau

SEQ ID NO: 42383 - RNA, 27 nt, Artificial Sequence
  Description of Artificial Sequence: Synthetic oligonucleotide
caaaaccaaacuuuagcuuucucagcc

SEQ ID NO: 42384 - RNA, 27 nt, Artificial Sequence
  Description of Artificial Sequence: Synthetic oligonucleotide
uacagugggaaguagcaucuuuacuuu

SEQ ID NO: 42385 - RNA, 27 nt, Artificial Sequence
  Description of Artificial Sequence: Synthetic oligonucleotide
ucauaugguaucagcaauuaagcagua

SEQ ID NO: 42386 - RNA, 27 nt, Artificial Sequence
  Description of Artificial Sequence: Synthetic oligonucleotide
cagcccauguuucauucauaugguauc

SEQ ID NO: 42387 - RNA, 27 nt, Artificial Sequence
  Description of Artificial Sequence: Synthetic oligonucleotide
uaugaaaaaguuggauaagaaaguugg

SEQ ID NO: 42388 - RNA, 27 nt, Artificial Sequence
  Description of Artificial Sequence: Synthetic oligonucleotide
uccggccucaugaugucaugcaaggcu

SEQ ID NO: 42389 - RNA, 27 nt, Artificial Sequence
  Description of Artificial Sequence: Synthetic oligonucleotide
acaaaugcagucauauacaaauucagg

SEQ ID NO: 42390 - RNA, 27 nt, Artificial Sequence
  Description of Artificial Sequence: Synthetic oligonucleotide
gguaguaaacauucuacuaggauucuu

SEQ ID NO: 42391 - RNA, 27 nt, Artificial Sequence
  Description of Artificial Sequence: Synthetic oligonucleotide
uuucaucaaaaaauucuucccuuucug

SEQ ID NO: 42392 - RNA, 27 nt, Artificial Sequence
  Description of Artificial Sequence: Synthetic oligonucleotide
aaauucacacacuggcaugccgauagc

SEQ ID NO: 42393 - RNA, 27 nt, Artificial Sequence
  Description of Artificial Sequence: Synthetic oligonucleotide
acauacauugcucuacuaugaggugaa

SEQ ID NO: 42394 - RNA, 27 nt, Artificial Sequence
  Description of Artificial Sequence: Synthetic oligonucleotide
uauauaugugcuuuggcaauucuggug

SEQ ID NO: 42395 - RNA, 27 nt, Artificial Sequence
  Description of Artificial Sequence: Synthetic oligonucleotide
ggagaaacuauuacccagaucaccacu

SEQ ID NO: 42396 - RNA, 27 nt, Artificial Sequence
  Description of Artificial Sequence: Synthetic oligonucleotide
auuuggagaaacuauuacccagaucac

SEQ ID NO: 42397 - RNA, 27 nt, Artificial Sequence
  Description of Artificial Sequence: Synthetic oligonucleotide
uuucuaggaaguauucaucacauccac

SEQ ID NO: 42398 - RNA, 27 nt, Artificial Sequence
  Description of Artificial Sequence: Synthetic oligonucleotide
cauauaugguguagcuguggaaaugcg

SEQ ID NO: 42399 - RNA, 27 nt, Artificial Sequence
  Description of Artificial Sequence: Synthetic oligonucleotide
cuccauucauauaugguguagcugugg

SEQ ID NO: 42400 - RNA, 27 nt, Artificial Sequence
  Description of Artificial Sequence: Synthetic oligonucleotide
aucuucuucucguguaagaacugcagc

SEQ ID NO: 42401 - RNA, 27 nt, Artificial Sequence
  Description of Artificial Sequence: Synthetic oligonucleotide
ucccuguaaaugaucuucuucucgugu

SEQ ID NO: 42402 - RNA, 27 nt, Artificial Sequence
  Description of Artificial Sequence: Synthetic oligonucleotide
gucccuguaaaugaucuucuucucgug

SEQ ID NO: 42403 - RNA, 27 nt, Artificial Sequence
  Description of Artificial Sequence: Synthetic oligonucleotide
ucaggucccuguaaaugaucuucuucu

SEQ ID NO: 42404 - RNA, 27 nt, Artificial Sequence
  Description of Artificial Sequence: Synthetic oligonucleotide
gaugcagucaaacaccucuuccucugu

SEQ ID NO: 42405 - RNA, 27 nt, Artificial Sequence
  Description of Artificial Sequence: Synthetic oligonucleotide
cgaugcagucaaacaccucuuccucug

SEQ ID NO: 42406 - RNA, 27 nt, Artificial Sequence
  Description of Artificial Sequence: Synthetic oligonucleotide
cccugugaacucgcccucaaaguagcg

SEQ ID NO: 42407 - RNA, 27 nt, Artificial Sequence
  Description of Artificial Sequence: Synthetic oligonucleotide
ggacagaggugccaggagaugcccuca

SEQ ID NO: 42408 - RNA, 27 nt, Artificial Sequence
  Description of Artificial Sequence: Synthetic oligonucleotide
uuaaaaagacaaaccauaucacuccuu

SEQ ID NO: 42409 - RNA, 27 nt, Artificial Sequence
  Description of Artificial Sequence: Synthetic oligonucleotide
cuuaaaaagacaaaccauaucacuccu

SEQ ID NO: 42410 - RNA, 27 nt, Artificial Sequence
  Description of Artificial Sequence: Synthetic oligonucleotide
gacaaccuuuaggaucuuuacugcaac

SEQ ID NO: 42411 - RNA, 27 nt, Artificial Sequence
  Description of Artificial Sequence: Synthetic oligonucleotide
gucgacaaccuuuaggaucuuuacugc

SEQ ID NO: 42412 - RNA, 27 nt, Artificial Sequence
  Description of Artificial Sequence: Synthetic oligonucleotide
acaauugccagguuguccuuugucaug

SEQ ID NO: 42413 - RNA, 27 nt, Artificial Sequence
  Description of Artificial Sequence: Synthetic oligonucleotide
ccucgcaccacugggucacaauugcca

SEQ ID NO: 42414 - RNA, 27 nt, Artificial Sequence
  Description of Artificial Sequence: Synthetic oligonucleotide
auuucaugucucuauggaugauguucu

SEQ ID NO: 42415 - RNA, 27 nt, Artificial Sequence
  Description of Artificial Sequence: Synthetic oligonucleotide
uggagaaauauauuguuggauuucaug

SEQ ID NO: 42416 - RNA, 27 nt, Artificial Sequence
  Description of Artificial Sequence: Synthetic oligonucleotide
agccuucauggagaaauauauuguugg

SEQ ID NO: 42417 - RNA, 27 nt, Artificial Sequence
  Description of Artificial Sequence: Synthetic oligonucleotide
accacuccagcgugacuuuacuguugc

SEQ ID NO: 42418 - RNA, 27 nt, Artificial Sequence
  Description of Artificial Sequence: Synthetic oligonucleotide
ccucucuuccuuuacuuucuucacaca

SEQ ID NO: 42419 - RNA, 27 nt, Artificial Sequence
  Description of Artificial Sequence: Synthetic oligonucleotide
gcccgaugcaaggauggcucggaagcg

SEQ ID NO: 42420 - RNA, 27 nt, Artificial Sequence
  Description of Artificial Sequence: Synthetic oligonucleotide
cacaguaggauauucaaccuccauuuc

SEQ ID NO: 42421 - RNA, 27 nt, Artificial Sequence
  Description of Artificial Sequence: Synthetic oligonucleotide
uuacacaguaggauauucaaccuccau

SEQ ID NO: 42422 - RNA, 27 nt, Artificial Sequence
  Description of Artificial Sequence: Synthetic oligonucleotide
uacacuacaagggaaaacucaaaaucu

SEQ ID NO: 42423 - RNA, 27 nt, Artificial Sequence
  Description of Artificial Sequence: Synthetic oligonucleotide
caaucaacaaagaacaaacaggauaaa

SEQ ID NO: 42424 - RNA, 27 nt, Artificial Sequence
  Description of Artificial Sequence: Synthetic oligonucleotide
uuucaaucaacaaagaacaaacaggau

SEQ ID NO: 42425 - RNA, 27 nt, Artificial Sequence
  Description of Artificial Sequence: Synthetic oligonucleotide
auggaagaaaaagaaggcuguagagaa

SEQ ID NO: 42426 - RNA, 27 nt, Artificial Sequence
  Description of Artificial Sequence: Synthetic oligonucleotide
uagaaggaagauuagcuauggaagaaa

SEQ ID NO: 42427 - RNA, 27 nt, Artificial Sequence
  Description of Artificial Sequence: Synthetic oligonucleotide
augaagcauucaacaggaagauuauuu

SEQ ID NO: 42428 - RNA, 27 nt, Artificial Sequence
  Description of Artificial Sequence: Synthetic oligonucleotide
caugaagcauucaacaggaagauuauu

SEQ ID NO: 42429 - RNA, 27 nt, Artificial Sequence
  Description of Artificial Sequence: Synthetic oligonucleotide
ucaaaguagaauucaagucaugaagca

SEQ ID NO: 42430 - RNA, 27 nt, Artificial Sequence
  Description of Artificial Sequence: Synthetic oligonucleotide
gucuguaguugcuucucucccucuuag

SEQ ID NO: 42431 - RNA, 27 nt, Artificial Sequence
  Description of Artificial Sequence: Synthetic oligonucleotide
guugaccuuggucugguaggagacggc

SEQ ID NO: 42432 - RNA, 27 nt, Artificial Sequence
  Description of Artificial Sequence: Synthetic oligonucleotide
gucgagauagucgggccgauugaucuc

SEQ ID NO: 42433 - RNA, 27 nt, Artificial Sequence
  Description of Artificial Sequence: Synthetic oligonucleotide
guuugggaagguuggauguucguccuc

SEQ ID NO: 42434 - RNA, 27 nt, Artificial Sequence
  Description of Artificial Sequence: Synthetic oligonucleotide
aguucuaagcuuggguuccgacccuaa

SEQ ID NO: 42435 - RNA, 27 nt, Artificial Sequence
  Description of Artificial Sequence: Synthetic oligonucleotide
uuaaaguucuaagcuuggguuccgacc

SEQ ID NO: 42436 - RNA, 27 nt, Artificial Sequence
  Description of Artificial Sequence: Synthetic oligonucleotide
guugcuuaaaguucuaagcuuggguuc

SEQ ID NO: 42437 - RNA, 27 nt, Artificial Sequence
  Description of Artificial Sequence: Synthetic oligonucleotide
gugguggucuuguugcuuaaaguucua

SEQ ID NO: 42438 - RNA, 27 nt, Artificial Sequence
  Description of Artificial Sequence: Synthetic oligonucleotide
acuuuauuucucgccacugaauaguag

SEQ ID NO: 42439 - RNA, 27 nt, Artificial Sequence
  Description of Artificial Sequence: Synthetic oligonucleotide
aacuuuauuucucgccacugaauagua

SEQ ID NO: 42440 - RNA, 27 nt, Artificial Sequence
  Description of Artificial Sequence: Synthetic oligonucleotide
ggaucauuuccuguuaucuguguuugu

SEQ ID NO: 42441 - RNA, 27 nt, Artificial Sequence
  Description of Artificial Sequence: Synthetic oligonucleotide
guuucauuucuucucuuuucuuaaggc

SEQ ID NO: 42442 - RNA, 27 nt, Artificial Sequence
  Description of Artificial Sequence: Synthetic oligonucleotide
ggaggauggaaacacacuccuucaguu

SEQ ID NO: 42443 - RNA, 27 nt, Artificial Sequence
  Description of Artificial Sequence: Synthetic oligonucleotide
ucaaagauuuucagucccgcggugaca

SEQ ID NO: 42444 - RNA, 27 nt, Artificial Sequence
  Description of Artificial Sequence: Synthetic oligonucleotide
ccugaacggcacgcuuauuucugcugu

SEQ ID NO: 42445 - RNA, 27 nt, Artificial Sequence
  Description of Artificial Sequence: Synthetic oligonucleotide
cuucuggacccugaacggcacgcuuau

SEQ ID NO: 42446 - RNA, 27 nt, Artificial Sequence
  Description of Artificial Sequence: Synthetic oligonucleotide
caagcagucuugagugacuguuucuuc

SEQ ID NO: 42447 - RNA, 27 nt, Artificial Sequence
  Description of Artificial Sequence: Synthetic oligonucleotide
ccaaagacauggaccuucuuccucuga

SEQ ID NO: 42448 - RNA, 27 nt, Artificial Sequence
  Description of Artificial Sequence: Synthetic oligonucleotide
guguuucaggcauauuuugaauacauc

SEQ ID NO: 42449 - RNA, 27 nt, Artificial Sequence
  Description of Artificial Sequence: Synthetic oligonucleotide
gagguacagagaaagggaggaaaauag

SEQ ID NO: 42450 - RNA, 27 nt, Artificial Sequence
  Description of Artificial Sequence: Synthetic oligonucleotide
ucuugucuugcucuaucuuucuuuggu

SEQ ID NO: 42451 - RNA, 27 nt, Artificial Sequence
  Description of Artificial Sequence: Synthetic oligonucleotide
uuucuugucuugcucuaucuuucuuug

SEQ ID NO: 42452 - RNA, 27 nt, Artificial Sequence
  Description of Artificial Sequence: Synthetic oligonucleotide
ggaucuuguacaaacaaaugcuuucuc

SEQ ID NO: 42453 - RNA, 27 nt, Artificial Sequence
  Description of Artificial Sequence: Synthetic oligonucleotide
ucugcaaguacguucguuuaacucaag

SEQ ID NO: 42454 - RNA, 27 nt, Artificial Sequence
  Description of Artificial Sequence: Synthetic oligonucleotide
ucuguaucgaucguucuguaucagucu

SEQ ID NO: 42455 - RNA, 27 nt, Artificial Sequence
  Description of Artificial Sequence: Synthetic oligonucleotide
auuuauuuuuauauauauauaauauau

SEQ ID NO: 42456 - RNA, 27 nt, Artificial Sequence
  Description of Artificial Sequence: Synthetic oligonucleotide
auauuuauuuuuauauauauauaauau

SEQ ID NO: 42457 - RNA, 27 nt, Artificial Sequence
  Description of Artificial Sequence: Synthetic oligonucleotide
cacagcagucaaauacauccagugaag

SEQ ID NO: 42458 - RNA, 27 nt, Artificial Sequence
  Description of Artificial Sequence: Synthetic oligonucleotide
gucucucaucuccuccucuucccuguc

SEQ ID NO: 42459 - RNA, 27 nt, Artificial Sequence
  Description of Artificial Sequence: Synthetic oligonucleotide
ccaagugggacaaaaaaaagaucaugc

SEQ ID NO: 42460 - RNA, 14 nt, Artificial Sequence
  Description of Artificial Sequence: Synthetic oligonucleotide
guauuuugaugagg

SEQ ID NO: 42461 - RNA, 12 nt, Artificial Sequence
  Description of Artificial Sequence: Synthetic oligonucleotide
ggcccagaugau

SEQ ID NO: 42462 - RNA, 14 nt, Artificial Sequence
  Description of Artificial Sequence: Synthetic oligonucleotide
gggaagaaaacuau

SEQ ID NO: 42463 - RNA, 15 nt, Artificial Sequence
  Description of Artificial Sequence: Synthetic oligonucleotide
guuuuaauuuauuuc

SEQ ID NO: 42464 - RNA, 12 nt, Artificial Sequence
  Description of Artificial Sequence: Synthetic oligonucleotide
acguagggaaau

SEQ ID NO: 42465 - RNA, 12 nt, Artificial Sequence
  Description of Artificial Sequence: Synthetic oligonucleotide
ccaggguuuacc

SEQ ID NO: 42466 - RNA, 11 nt, Artificial Sequence
  Description of Artificial Sequence: Synthetic oligonucleotide
agcaagguuua

SEQ ID NO: 42467 - RNA, 12 nt, Artificial Sequence
  Description of Artificial Sequence: Synthetic oligonucleotide
uguauuauguug

SEQ ID NO: 42468 - RNA, 15 nt, Artificial Sequence
  Description of Artificial Sequence: Synthetic oligonucleotide
uuuuaaucuuuguga

SEQ ID NO: 42469 - RNA, 14 nt, Artificial Sequence
  Description of Artificial Sequence: Synthetic oligonucleotide
uuaaucuuugugac

SEQ ID NO: 42470 - RNA, 13 nt, Artificial Sequence
  Description of Artificial Sequence: Synthetic oligonucleotide
gcugcuuaugucu

SEQ ID NO: 42471 - RNA, 14 nt, Artificial Sequence
  Description of Artificial Sequence: Synthetic oligonucleotide
aaguguuucagaag

SEQ ID NO: 42472 - RNA, 13 nt, Artificial Sequence
  Description of Artificial Sequence: Synthetic oligonucleotide
gaccaucaauaag

SEQ ID NO: 42473 - RNA, 13 nt, Artificial Sequence
  Description of Artificial Sequence: Synthetic oligonucleotide
ccaucaauaagga

SEQ ID NO: 42474 - RNA, 14 nt, Artificial Sequence
  Description of Artificial Sequence: Synthetic oligonucleotide
ucaauaaggaagaa

SEQ ID NO: 42475 - RNA, 14 nt, Artificial Sequence
  Description of Artificial Sequence: Synthetic oligonucleotide
aauaaggaagaagc

SEQ ID NO: 42476 - RNA, 13 nt, Artificial Sequence
  Description of Artificial Sequence: Synthetic oligonucleotide
aggaagaagcccu

SEQ ID NO: 42477 - RNA, 13 nt, Artificial Sequence
  Description of Artificial Sequence: Synthetic oligonucleotide
gcauaacuaaagg

SEQ ID NO: 42478 - RNA, 14 nt, Artificial Sequence
  Description of Artificial Sequence: Synthetic oligonucleotide
cauaacuaaaggug

SEQ ID NO: 42479 - RNA, 12 nt, Artificial Sequence
  Description of Artificial Sequence: Synthetic oligonucleotide
cuacaucacgcc

SEQ ID NO: 42480 - RNA, 12 nt, Artificial Sequence
  Description of Artificial Sequence: Synthetic oligonucleotide
acuggauuuaag

SEQ ID NO: 42481 - RNA, 12 nt, Artificial Sequence
  Description of Artificial Sequence: Synthetic oligonucleotide
cuggauuuaagc

SEQ ID NO: 42482 - RNA, 13 nt, Artificial Sequence
  Description of Artificial Sequence: Synthetic oligonucleotide
gauuuaagcagag

SEQ ID NO: 42483 - RNA, 13 nt, Artificial Sequence
  Description of Artificial Sequence: Synthetic oligonucleotide
auuuaagcagagu

SEQ ID NO: 42484 - RNA, 13 nt, Artificial Sequence
  Description of Artificial Sequence: Synthetic oligonucleotide
uuaagcagaguuc

SEQ ID NO: 42485 - RNA, 13 nt, Artificial Sequence
  Description of Artificial Sequence: Synthetic oligonucleotide
uaagcagaguuca

SEQ ID NO: 42486 - RNA, 14 nt, Artificial Sequence
  Description of Artificial Sequence: Synthetic oligonucleotide
agcagaguucaaaa

SEQ ID NO: 42487 - RNA, 12 nt, Artificial Sequence
  Description of Artificial Sequence: Synthetic oligonucleotide
cucagggucuga

SEQ ID NO: 42488 - RNA, 13 nt, Artificial Sequence
  Description of Artificial Sequence: Synthetic oligonucleotide
caagcaacuacau

SEQ ID NO: 42489 - RNA, 12 nt, Artificial Sequence
  Description of Artificial Sequence: Synthetic oligonucleotide
aucaauggcagc

SEQ ID NO: 42490 - RNA, 11 nt, Artificial Sequence
  Description of Artificial Sequence: Synthetic oligonucleotide
uuccagcccac

SEQ ID NO: 42491 - RNA, 12 nt, Artificial Sequence
  Description of Artificial Sequence: Synthetic oligonucleotide
cagcugagaaug

SEQ ID NO: 42492 - RNA, 13 nt, Artificial Sequence
  Description of Artificial Sequence: Synthetic oligonucleotide
aacguaucuccua

SEQ ID NO: 42493 - RNA, 14 nt, Artificial Sequence
  Description of Artificial Sequence: Synthetic oligonucleotide
ccuaaaauaauuuc

SEQ ID NO: 42494 - RNA, 13 nt, Artificial Sequence
  Description of Artificial Sequence: Synthetic oligonucleotide
uggaagauucagc

SEQ ID NO: 42495 - RNA, 12 nt, Artificial Sequence
  Description of Artificial Sequence: Synthetic oligonucleotide
uuaaacucuccu

SEQ ID NO: 42496 - RNA, 12 nt, Artificial Sequence
  Description of Artificial Sequence: Synthetic oligonucleotide
cagccuacaguu

SEQ ID NO: 42497 - RNA, 13 nt, Artificial Sequence
  Description of Artificial Sequence: Synthetic oligonucleotide
guuauguucaguc

SEQ ID NO: 42498 - RNA, 13 nt, Artificial Sequence
  Description of Artificial Sequence: Synthetic oligonucleotide
cacauacaaaaug

SEQ ID NO: 42499 - RNA, 9 nt, Artificial Sequence
  Description of Artificial Sequence: Synthetic oligonucleotide
uccuuuugc

SEQ ID NO: 42500 - RNA, 12 nt, Artificial Sequence
  Description of Artificial Sequence: Synthetic oligonucleotide
ugaccugugaag

SEQ ID NO: 42501 - RNA, 12 nt, Artificial Sequence
  Description of Artificial Sequence: Synthetic oligonucleotide
cuaucucacaca

SEQ ID NO: 42502 - RNA, 13 nt, Artificial Sequence
  Description of Artificial Sequence: Synthetic oligonucleotide
uguccucaauugu

SEQ ID NO: 42503 - RNA, 12 nt, Artificial Sequence
  Description of Artificial Sequence: Synthetic oligonucleotide
aaaccguagcug

SEQ ID NO: 42504 - RNA, 12 nt, Artificial Sequence
  Description of Artificial Sequence: Synthetic oligonucleotide
uagcuggcaagc

SEQ ID NO: 42505 - RNA, 14 nt, Artificial Sequence
  Description of Artificial Sequence: Synthetic oligonucleotide
uuguaugguuaaaa

SEQ ID NO: 42506 - RNA, 14 nt, Artificial Sequence
  Description of Artificial Sequence: Synthetic oligonucleotide
ugguuaaaagaugg

SEQ ID NO: 42507 - RNA, 13 nt, Artificial Sequence
  Description of Artificial Sequence: Synthetic oligonucleotide
cagggaauuauac

SEQ ID NO: 42508 - RNA, 12 nt, Artificial Sequence
  Description of Artificial Sequence: Synthetic oligonucleotide
acaaucuugcug

SEQ ID NO: 42509 - RNA, 13 nt, Artificial Sequence
  Description of Artificial Sequence: Synthetic oligonucleotide
ccaauaaugaaga

SEQ ID NO: 42510 - RNA, 13 nt, Artificial Sequence
  Description of Artificial Sequence: Synthetic oligonucleotide
acuuuggauguuc

SEQ ID NO: 42511 - RNA, 12 nt, Artificial Sequence
  Description of Artificial Sequence: Synthetic oligonucleotide
aaugcuuccacu

SEQ ID NO: 42512 - RNA, 11 nt, Artificial Sequence
  Description of Artificial Sequence: Synthetic oligonucleotide
gagaaaguuug

SEQ ID NO: 42513 - RNA, 11 nt, Artificial Sequence
  Description of Artificial Sequence: Synthetic oligonucleotide
aaagaacuacu

SEQ ID NO: 42514 - RNA, 12 nt, Artificial Sequence
  Description of Artificial Sequence: Synthetic oligonucleotide
uuagaaauacgg

SEQ ID NO: 42515 - RNA, 12 nt, Artificial Sequence
  Description of Artificial Sequence: Synthetic oligonucleotide
aacauggguaca

SEQ ID NO: 42516 - RNA, 14 nt, Artificial Sequence
  Description of Artificial Sequence: Synthetic oligonucleotide
aaagacacagaaga

SEQ ID NO: 42517 - RNA, 11 nt, Artificial Sequence
  Description of Artificial Sequence: Synthetic oligonucleotide
uaguagggagg

SEQ ID NO: 42518 - RNA, 12 nt, Artificial Sequence
  Description of Artificial Sequence: Synthetic oligonucleotide
gccuucugcagc

SEQ ID NO: 42519 - RNA, 10 nt, Artificial Sequence
  Description of Artificial Sequence: Synthetic oligonucleotide
ggucugguac

SEQ ID NO: 42520 - RNA, 12 nt, Artificial Sequence
  Description of Artificial Sequence: Synthetic oligonucleotide
cuaguccuuccg

SEQ ID NO: 42521 - RNA, 12 nt, Artificial Sequence
  Description of Artificial Sequence: Synthetic oligonucleotide
ccagugaauauu

SEQ ID NO: 42522 - RNA, 13 nt, Artificial Sequence
  Description of Artificial Sequence: Synthetic oligonucleotide
augaauucaaguu

SEQ ID NO: 42523 - RNA, 12 nt, Artificial Sequence
  Description of Artificial Sequence: Synthetic oligonucleotide
caggacacagau

SEQ ID NO: 42524 - RNA, 12 nt, Artificial Sequence
  Description of Artificial Sequence: Synthetic oligonucleotide
cucaaagcacag

SEQ ID NO: 42525 - RNA, 10 nt, Artificial Sequence
  Description of Artificial Sequence: Synthetic oligonucleotide
accacugcca

SEQ ID NO: 42526 - RNA, 13 nt, Artificial Sequence
  Description of Artificial Sequence: Synthetic oligonucleotide
gaaacuacuagug

SEQ ID NO: 42527 - RNA, 12 nt, Artificial Sequence
  Description of Artificial Sequence: Synthetic oligonucleotide
aagucggacagc

SEQ ID NO: 42528 - RNA, 13 nt, Artificial Sequence
  Description of Artificial Sequence: Synthetic oligonucleotide
gaaagcgaaaaau

SEQ ID NO: 42529 - RNA, 13 nt, Artificial Sequence
  Description of Artificial Sequence: Synthetic oligonucleotide
cccucugauuuag

SEQ ID NO: 42530 - RNA, 12 nt, Artificial Sequence
  Description of Artificial Sequence: Synthetic oligonucleotide
ugagcuauuuaa

SEQ ID NO: 42531 - RNA, 13 nt, Artificial Sequence
  Description of Artificial Sequence: Synthetic oligonucleotide
aaaaggugaaaaa

SEQ ID NO: 42532 - RNA, 14 nt, Artificial Sequence
  Description of Artificial Sequence: Synthetic oligonucleotide
gaaaaagcacuauu

SEQ ID NO: 42533 - RNA, 12 nt, Artificial Sequence
  Description of Artificial Sequence: Synthetic oligonucleotide
ggcugaaaagaa

SEQ ID NO: 42534 - RNA, 12 nt, Artificial Sequence
  Description of Artificial Sequence: Synthetic oligonucleotide
uaaacccuuaua

SEQ ID NO: 42535 - RNA, 13 nt, Artificial Sequence
  Description of Artificial Sequence: Synthetic oligonucleotide
cauacuauuagcc

SEQ ID NO: 42536 - RNA, 12 nt, Artificial Sequence
  Description of Artificial Sequence: Synthetic oligonucleotide
gacagaagcauu

SEQ ID NO: 42537 - RNA, 14 nt, Artificial Sequence
  Description of Artificial Sequence: Synthetic oligonucleotide
agagcaaauaagau

SEQ ID NO: 42538 - RNA, 14 nt, Artificial Sequence
  Description of Artificial Sequence: Synthetic oligonucleotide
ccaacauuuuucuc

SEQ ID NO: 42539 - RNA, 15 nt, Artificial Sequence
  Description of Artificial Sequence: Synthetic oligonucleotide
uuaaguaugagaaaa

SEQ ID NO: 42540 - RNA, 14 nt, Artificial Sequence
  Description of Artificial Sequence: Synthetic oligonucleotide
caggaauaaagaug

SEQ ID NO: 42541 - RNA, 13 nt, Artificial Sequence
  Description of Artificial Sequence: Synthetic oligonucleotide
aauuugaaugacc

SEQ ID NO: 42542 - RNA, 14 nt, Artificial Sequence
  Description of Artificial Sequence: Synthetic oligonucleotide
auguauaaagauag

SEQ ID NO: 42543 - RNA, 12 nt, Artificial Sequence
  Description of Artificial Sequence: Synthetic oligonucleotide
ggcuguaacuau

SEQ ID NO: 42544 - RNA, 11 nt, Artificial Sequence
  Description of Artificial Sequence: Synthetic oligonucleotide
ucugugaagug

SEQ ID NO: 42545 - RNA, 14 nt, Artificial Sequence
  Description of Artificial Sequence: Synthetic oligonucleotide
ccuuuaaggaaaug

SEQ ID NO: 42546 - RNA, 13 nt, Artificial Sequence
  Description of Artificial Sequence: Synthetic oligonucleotide
aaggauacaaaaa

SEQ ID NO: 42547 - RNA, 12 nt, Artificial Sequence
  Description of Artificial Sequence: Synthetic oligonucleotide
agaugcaauuug

SEQ ID NO: 42548 - RNA, 12 nt, Artificial Sequence
  Description of Artificial Sequence: Synthetic oligonucleotide
guucaaaacgaa

SEQ ID NO: 42549 - RNA, 11 nt, Artificial Sequence
  Description of Artificial Sequence: Synthetic oligonucleotide
gugaaaccuca

SEQ ID NO: 42550 - RNA, 13 nt, Artificial Sequence
  Description of Artificial Sequence: Synthetic oligonucleotide
acgaaagagaagc

SEQ ID NO: 42551 - RNA, 12 nt, Artificial Sequence
  Description of Artificial Sequence: Synthetic oligonucleotide
cuccacaagcgc

SEQ ID NO: 42552 - RNA, 14 nt, Artificial Sequence
  Description of Artificial Sequence: Synthetic oligonucleotide
gagaagauuccaaa

SEQ ID NO: 42553 - RNA, 13 nt, Artificial Sequence
  Description of Artificial Sequence: Synthetic oligonucleotide
aaucuggauucaa

SEQ ID NO: 42554 - RNA, 13 nt, Artificial Sequence
  Description of Artificial Sequence: Synthetic oligonucleotide
agaacagauuuga

SEQ ID NO: 42555 - RNA, 11 nt, Artificial Sequence
  Description of Artificial Sequence: Synthetic oligonucleotide
ccagagcugug

SEQ ID NO: 42556 - RNA, 12 nt, Artificial Sequence
  Description of Artificial Sequence: Synthetic oligonucleotide
ccucagauuguu

SEQ ID NO: 42557 - RNA, 12 nt, Artificial Sequence
  Description of Artificial Sequence: Synthetic oligonucleotide
cuauuuuaauua

SEQ ID NO: 42558 - RNA, 13 nt, Artificial Sequence
  Description of Artificial Sequence: Synthetic oligonucleotide
uuuaauuuauuaa

SEQ ID NO: 42559 - RNA, 12 nt, Artificial Sequence
  Description of Artificial Sequence: Synthetic oligonucleotide
augcaguuugaa

SEQ ID NO: 42560 - RNA, 11 nt, Artificial Sequence
  Description of Artificial Sequence: Synthetic oligonucleotide
caugcugcugg

SEQ ID NO: 42561 - RNA, 13 nt, Artificial Sequence
  Description of Artificial Sequence: Synthetic oligonucleotide
agaugugcauuuc

SEQ ID NO: 42562 - RNA, 12 nt, Artificial Sequence
  Description of Artificial Sequence: Synthetic oligonucleotide
ucaaaaccugug

SEQ ID NO: 42563 - RNA, 11 nt, Artificial Sequence
  Description of Artificial Sequence: Synthetic oligonucleotide
gaaugugggua

SEQ ID NO: 42564 - RNA, 10 nt, Artificial Sequence
  Description of Artificial Sequence: Synthetic oligonucleotide
auguggguag

SEQ ID NO: 42565 - RNA, 13 nt, Artificial Sequence
  Description of Artificial Sequence: Synthetic oligonucleotide
ugaaaaugagcau

SEQ ID NO: 42566 - RNA, 13 nt, Artificial Sequence
  Description of Artificial Sequence: Synthetic oligonucleotide
uugcuuuucaugu

SEQ ID NO: 42567 - RNA, 12 nt, Artificial Sequence
  Description of Artificial Sequence: Synthetic oligonucleotide
uguauuucuaua

SEQ ID NO: 42568 - RNA, 13 nt, Artificial Sequence
  Description of Artificial Sequence: Synthetic oligonucleotide
uuugauuaauguu

SEQ ID NO: 42569 - RNA, 12 nt, Artificial Sequence
  Description of Artificial Sequence: Synthetic oligonucleotide
caacguguauag

SEQ ID NO: 42570 - RNA, 12 nt, Artificial Sequence
  Description of Artificial Sequence: Synthetic oligonucleotide
cauauccuuggc

SEQ ID NO: 42571 - RNA, 13 nt, Artificial Sequence
  Description of Artificial Sequence: Synthetic oligonucleotide
uacuaacaucugg

SEQ ID NO: 42572 - RNA, 11 nt, Artificial Sequence
  Description of Artificial Sequence: Synthetic oligonucleotide
cauaaguugug

SEQ ID NO: 42573 - RNA, 12 nt, Artificial Sequence
  Description of Artificial Sequence: Synthetic oligonucleotide
gcaucauuuugg

SEQ ID NO: 42574 - RNA, 10 nt, Artificial Sequence
  Description of Artificial Sequence: Synthetic oligonucleotide
gcucuucuua

SEQ ID NO: 42575 - RNA, 10 nt, Artificial Sequence
  Description of Artificial Sequence: Synthetic oligonucleotide
agauuagguc

SEQ ID NO: 42576 - RNA, 12 nt, Artificial Sequence
  Description of Artificial Sequence: Synthetic oligonucleotide
auggaauugaaa

SEQ ID NO: 42577 - RNA, 13 nt, Artificial Sequence
  Description of Artificial Sequence: Synthetic oligonucleotide
cacacucauuccu

SEQ ID NO: 42578 - RNA, 12 nt, Artificial Sequence
  Description of Artificial Sequence: Synthetic oligonucleotide
uguagagguaac

SEQ ID NO: 42579 - RNA, 11 nt, Artificial Sequence
  Description of Artificial Sequence: Synthetic oligonucleotide
caaccacaugc

SEQ ID NO: 42580 - RNA, 12 nt, Artificial Sequence
  Description of Artificial Sequence: Synthetic oligonucleotide
ucggaaacaagu

SEQ ID NO: 42581 - RNA, 11 nt, Artificial Sequence
  Description of Artificial Sequence: Synthetic oligonucleotide
acucccaauaa

SEQ ID NO: 42582 - RNA, 13 nt, Artificial Sequence
  Description of Artificial Sequence: Synthetic oligonucleotide
aaugcuaagaaau

SEQ ID NO: 42583 - RNA, 11 nt, Artificial Sequence
  Description of Artificial Sequence: Synthetic oligonucleotide
gucuuucucua

SEQ ID NO: 42584 - RNA, 11 nt, Artificial Sequence
  Description of Artificial Sequence: Synthetic oligonucleotide
ugaauuucagg

SEQ ID NO: 42585 - RNA, 13 nt, Artificial Sequence
  Description of Artificial Sequence: Synthetic oligonucleotide
cgauucccucuca

SEQ ID NO: 42586 - RNA, 11 nt, Artificial Sequence
  Description of Artificial Sequence: Synthetic oligonucleotide
aggaaagugaa

SEQ ID NO: 42587 - RNA, 12 nt, Artificial Sequence
  Description of Artificial Sequence: Synthetic oligonucleotide
gaggcugcaugc

SEQ ID NO: 42588 - RNA, 11 nt, Artificial Sequence
  Description of Artificial Sequence: Synthetic oligonucleotide
ucucugaacag

SEQ ID NO: 42589 - RNA, 12 nt, Artificial Sequence
  Description of Artificial Sequence: Synthetic oligonucleotide
aacuuggcugua

SEQ ID NO: 42590 - RNA, 12 nt, Artificial Sequence
  Description of Artificial Sequence: Synthetic oligonucleotide
agaagccaaaau

SEQ ID NO: 42591 - RNA, 14 nt, Artificial Sequence
  Description of Artificial Sequence: Synthetic oligonucleotide
auuaaaagaagucc

SEQ ID NO: 42592 - RNA, 14 nt, Artificial Sequence
  Description of Artificial Sequence: Synthetic oligonucleotide
gaauccggauuauc

SEQ ID NO: 42593 - RNA, 12 nt, Artificial Sequence
  Description of Artificial Sequence: Synthetic oligonucleotide
aaugugacauca

SEQ ID NO: 42594 - RNA, 13 nt, Artificial Sequence
  Description of Artificial Sequence: Synthetic oligonucleotide
caucaaagcaagu

SEQ ID NO: 42595 - RNA, 11 nt, Artificial Sequence
  Description of Artificial Sequence: Synthetic oligonucleotide
agagagagaaa

SEQ ID NO: 42596 - RNA, 13 nt, Artificial Sequence
  Description of Artificial Sequence: Synthetic oligonucleotide
ucgcuguaguauu

SEQ ID NO: 42597 - RNA, 14 nt, Artificial Sequence
  Description of Artificial Sequence: Synthetic oligonucleotide
cgcuguaguauuua

SEQ ID NO: 42598 - RNA, 13 nt, Artificial Sequence
  Description of Artificial Sequence: Synthetic oligonucleotide
auuuaagcccaua

SEQ ID NO: 42599 - RNA, 15 nt, Artificial Sequence
  Description of Artificial Sequence: Synthetic oligonucleotide
auuaaaauaaacaug

SEQ ID NO: 42600 - RNA, 12 nt, Artificial Sequence
  Description of Artificial Sequence: Synthetic oligonucleotide
cuguucugaucg

SEQ ID NO: 42601 - RNA, 16 nt, Artificial Sequence
  Description of Artificial Sequence: Synthetic oligonucleotide
aaauaauuugaacuuu

SEQ ID NO: 42602 - RNA, 12 nt, Artificial Sequence
  Description of Artificial Sequence: Synthetic oligonucleotide
ugcgaccuuaau

SEQ ID NO: 42603 - RNA, 11 nt, Artificial Sequence
  Description of Artificial Sequence: Synthetic oligonucleotide
cugagaaagcu

SEQ ID NO: 42604 - RNA, 13 nt, Artificial Sequence
  Description of Artificial Sequence: Synthetic oligonucleotide
aguaaagaugcua

SEQ ID NO: 42605 - RNA, 12 nt, Artificial Sequence
  Description of Artificial Sequence: Synthetic oligonucleotide
cugcuuaauugc

SEQ ID NO: 42606 - RNA, 14 nt, Artificial Sequence
  Description of Artificial Sequence: Synthetic oligonucleotide
uaccauaugaauga

SEQ ID NO: 42607 - RNA, 12 nt, Artificial Sequence
  Description of Artificial Sequence: Synthetic oligonucleotide
aacuuucuuauc

SEQ ID NO: 42608 - RNA, 13 nt, Artificial Sequence
  Description of Artificial Sequence: Synthetic oligonucleotide
ccuugcaugacau

SEQ ID NO: 42609 - RNA, 14 nt, Artificial Sequence
  Description of Artificial Sequence: Synthetic oligonucleotide
ugaauuuguauaug

SEQ ID NO: 42610 - RNA, 12 nt, Artificial Sequence
  Description of Artificial Sequence: Synthetic oligonucleotide
gaauccuaguag

SEQ ID NO: 42611 - RNA, 10 nt, Artificial Sequence
  Description of Artificial Sequence: Synthetic oligonucleotide
gaaagggaag

SEQ ID NO: 42612 - RNA, 11 nt, Artificial Sequence
  Description of Artificial Sequence: Synthetic oligonucleotide
uaucggcaugc

SEQ ID NO: 42613 - RNA, 12 nt, Artificial Sequence
  Description of Artificial Sequence: Synthetic oligonucleotide
caccucauagua

SEQ ID NO: 42614 - RNA, 11 nt, Artificial Sequence
  Description of Artificial Sequence: Synthetic oligonucleotide
ccagaauugcc

SEQ ID NO: 42615 - RNA, 11 nt, Artificial Sequence
  Description of Artificial Sequence: Synthetic oligonucleotide
uggugaucugg

SEQ ID NO: 42616 - RNA, 12 nt, Artificial Sequence
  Description of Artificial Sequence: Synthetic oligonucleotide
gaucuggguaau

SEQ ID NO: 42617 - RNA, 12 nt, Artificial Sequence
  Description of Artificial Sequence: Synthetic oligonucleotide
ggaugugaugaa

SEQ ID NO: 42618 - RNA, 12 nt, Artificial Sequence
  Description of Artificial Sequence: Synthetic oligonucleotide
cauuuccacagc

SEQ ID NO: 42619 - RNA, 11 nt, Artificial Sequence
  Description of Artificial Sequence: Synthetic oligonucleotide
acagcuacacc

SEQ ID NO: 42620 - RNA, 12 nt, Artificial Sequence
  Description of Artificial Sequence: Synthetic oligonucleotide
ugcaguucuuac

SEQ ID NO: 42621 - RNA, 12 nt, Artificial Sequence
  Description of Artificial Sequence: Synthetic oligonucleotide
acgagaagaaga

SEQ ID NO: 42622 - RNA, 12 nt, Artificial Sequence
  Description of Artificial Sequence: Synthetic oligonucleotide
cgagaagaagau

SEQ ID NO: 42623 - RNA, 15 nt, Artificial Sequence
  Description of Artificial Sequence: Synthetic oligonucleotide
aagaagaucauuuac

SEQ ID NO: 42624 - RNA, 11 nt, Artificial Sequence
  Description of Artificial Sequence: Synthetic oligonucleotide
agaggaagagg

SEQ ID NO: 42625 - RNA, 12 nt, Artificial Sequence
  Description of Artificial Sequence: Synthetic oligonucleotide
gaggaagaggug

SEQ ID NO: 42626 - RNA, 13 nt, Artificial Sequence
  Description of Artificial Sequence: Synthetic oligonucleotide
cuacuuugagggc

SEQ ID NO: 42627 - RNA, 12 nt, Artificial Sequence
  Description of Artificial Sequence: Synthetic oligonucleotide
agggcaucuccu

SEQ ID NO: 42628 - RNA, 10 nt, Artificial Sequence
  Description of Artificial Sequence: Synthetic oligonucleotide
ggagugauau

SEQ ID NO: 42629 - RNA, 11 nt, Artificial Sequence
  Description of Artificial Sequence: Synthetic oligonucleotide
gagugauaugg

SEQ ID NO: 42630 - RNA, 12 nt, Artificial Sequence
  Description of Artificial Sequence: Synthetic oligonucleotide
ugcaguaaagau

SEQ ID NO: 42631 - RNA, 13 nt, Artificial Sequence
  Description of Artificial Sequence: Synthetic oligonucleotide
aguaaagauccua

SEQ ID NO: 42632 - RNA, 12 nt, Artificial Sequence
  Description of Artificial Sequence: Synthetic oligonucleotide
ugacaaaggaca

SEQ ID NO: 42633 - RNA, 13 nt, Artificial Sequence
  Description of Artificial Sequence: Synthetic oligonucleotide
gcaauugugaccc

SEQ ID NO: 42634 - RNA, 12 nt, Artificial Sequence
  Description of Artificial Sequence: Synthetic oligonucleotide
aacaucauccau

SEQ ID NO: 42635 - RNA, 12 nt, Artificial Sequence
  Description of Artificial Sequence: Synthetic oligonucleotide
ugaaauccaaca

SEQ ID NO: 42636 - RNA, 15 nt, Artificial Sequence
  Description of Artificial Sequence: Synthetic oligonucleotide
aacaauauauuucuc

SEQ ID NO: 42637 - RNA, 14 nt, Artificial Sequence
  Description of Artificial Sequence: Synthetic oligonucleotide
aacaguaaagucac

SEQ ID NO: 42638 - RNA, 14 nt, Artificial Sequence
  Description of Artificial Sequence: Synthetic oligonucleotide
ugugaagaaaguaa

SEQ ID NO: 42639 - RNA, 13 nt, Artificial Sequence
  Description of Artificial Sequence: Synthetic oligonucleotide
cuuccgagccauc

SEQ ID NO: 42640 - RNA, 12 nt, Artificial Sequence
  Description of Artificial Sequence: Synthetic oligonucleotide
aauggagguuga

SEQ ID NO: 42641 - RNA, 12 nt, Artificial Sequence
  Description of Artificial Sequence: Synthetic oligonucleotide
ggagguugaaua

SEQ ID NO: 42642 - RNA, 13 nt, Artificial Sequence
  Description of Artificial Sequence: Synthetic oligonucleotide
auuuugaguuuuc

SEQ ID NO: 42643 - RNA, 12 nt, Artificial Sequence
  Description of Artificial Sequence: Synthetic oligonucleotide
uauccuguuugu

SEQ ID NO: 42644 - RNA, 11 nt, Artificial Sequence
  Description of Artificial Sequence: Synthetic oligonucleotide
ccuguuuguuc

SEQ ID NO: 42645 - RNA, 10 nt, Artificial Sequence
  Description of Artificial Sequence: Synthetic oligonucleotide
cucuacagcc

SEQ ID NO: 42646 - RNA, 12 nt, Artificial Sequence
  Description of Artificial Sequence: Synthetic oligonucleotide
ucuuccauagcu

SEQ ID NO: 42647 - RNA, 12 nt, Artificial Sequence
  Description of Artificial Sequence: Synthetic oligonucleotide
auaaucuuccug

SEQ ID NO: 42648 - RNA, 12 nt, Artificial Sequence
  Description of Artificial Sequence: Synthetic oligonucleotide
uaaucuuccugu

SEQ ID NO: 42649 - RNA, 12 nt, Artificial Sequence
  Description of Artificial Sequence: Synthetic oligonucleotide
cuucaugacuug

SEQ ID NO: 42650 - RNA, 12 nt, Artificial Sequence
  Description of Artificial Sequence: Synthetic oligonucleotide
aagagggagaga

SEQ ID NO: 42651 - RNA, 12 nt, Artificial Sequence
  Description of Artificial Sequence: Synthetic oligonucleotide
cgucuccuacca

SEQ ID NO: 42652 - RNA, 12 nt, Artificial Sequence
  Description of Artificial Sequence: Synthetic oligonucleotide
gaucaaucggcc

SEQ ID NO: 42653 - RNA, 12 nt, Artificial Sequence
  Description of Artificial Sequence: Synthetic oligonucleotide
ggacgaacaucc

SEQ ID NO: 42654 - RNA, 11 nt, Artificial Sequence
  Description of Artificial Sequence: Synthetic oligonucleotide
agggucggaac

SEQ ID NO: 42655 - RNA, 10 nt, Artificial Sequence
  Description of Artificial Sequence: Synthetic oligonucleotide
ucggaaccca

SEQ ID NO: 42656 - RNA, 11 nt, Artificial Sequence
  Description of Artificial Sequence: Synthetic oligonucleotide
acccaagcuua

SEQ ID NO: 42657 - RNA, 14 nt, Artificial Sequence
  Description of Artificial Sequence: Synthetic oligonucleotide
gaacuuuaagcaac

SEQ ID NO: 42658 - RNA, 11 nt, Artificial Sequence
  Description of Artificial Sequence: Synthetic oligonucleotide
acuauucagug

SEQ ID NO: 42659 - RNA, 11 nt, Artificial Sequence
  Description of Artificial Sequence: Synthetic oligonucleotide
cuauucagugg

SEQ ID NO: 42660 - RNA, 13 nt, Artificial Sequence
  Description of Artificial Sequence: Synthetic oligonucleotide
aaacacagauaac

SEQ ID NO: 42661 - RNA, 12 nt, Artificial Sequence
  Description of Artificial Sequence: Synthetic oligonucleotide
cuuaagaaaaga

SEQ ID NO: 42662 - RNA, 12 nt, Artificial Sequence
  Description of Artificial Sequence: Synthetic oligonucleotide
cugaaggagugu

SEQ ID NO: 42663 - RNA, 10 nt, Artificial Sequence
  Description of Artificial Sequence: Synthetic oligonucleotide
ucaccgcggg

SEQ ID NO: 42664 - RNA, 14 nt, Artificial Sequence
  Description of Artificial Sequence: Synthetic oligonucleotide
agcagaaauaagcg

SEQ ID NO: 42665 - RNA, 12 nt, Artificial Sequence
  Description of Artificial Sequence: Synthetic oligonucleotide
aagcgugccguu

SEQ ID NO: 42666 - RNA, 12 nt, Artificial Sequence
  Description of Artificial Sequence: Synthetic oligonucleotide
agaaacagucac

SEQ ID NO: 42667 - RNA, 12 nt, Artificial Sequence
  Description of Artificial Sequence: Synthetic oligonucleotide
agaggaagaagg

SEQ ID NO: 42668 - RNA, 14 nt, Artificial Sequence
  Description of Artificial Sequence: Synthetic oligonucleotide
uguauucaaaauau

SEQ ID NO: 42669 - RNA, 13 nt, Artificial Sequence
  Description of Artificial Sequence: Synthetic oligonucleotide
auuuuccucccuu

SEQ ID NO: 42670 - RNA, 13 nt, Artificial Sequence
  Description of Artificial Sequence: Synthetic oligonucleotide
caaagaaagauag

SEQ ID NO: 42671 - RNA, 12 nt, Artificial Sequence
  Description of Artificial Sequence: Synthetic oligonucleotide
aagaaagauaga

SEQ ID NO: 42672 - RNA, 13 nt, Artificial Sequence
  Description of Artificial Sequence: Synthetic oligonucleotide
gaaagcauuuguu

SEQ ID NO: 42673 - RNA, 13 nt, Artificial Sequence
  Description of Artificial Sequence: Synthetic oligonucleotide
ugaguuaaacgaa

SEQ ID NO: 42674 - RNA, 12 nt, Artificial Sequence
  Description of Artificial Sequence: Synthetic oligonucleotide
acugauacagaa

SEQ ID NO: 42675 - RNA, 12 nt, Artificial Sequence
  Description of Artificial Sequence: Synthetic oligonucleotide
auauuauauaua

SEQ ID NO: 42676 - RNA, 12 nt, Artificial Sequence
  Description of Artificial Sequence: Synthetic oligonucleotide
auuauauauaua

SEQ ID NO: 42677 - RNA, 12 nt, Artificial Sequence
  Description of Artificial Sequence: Synthetic oligonucleotide
ucacuggaugua

SEQ ID NO: 42678 - RNA, 12 nt, Artificial Sequence
  Description of Artificial Sequence: Synthetic oligonucleotide
cagggaagagga

SEQ ID NO: 42679 - RNA, 15 nt, Artificial Sequence
  Description of Artificial Sequence: Synthetic oligonucleotide
augaucuuuuuuuug

SEQ ID NO: 42680 - RNA, 11 nt, Artificial Sequence
  Description of Artificial Sequence: Synthetic oligonucleotide
aguucacggcc

SEQ ID NO: 42681 - RNA, 13 nt, Artificial Sequence
  Description of Artificial Sequence: Synthetic oligonucleotide
caccaucacacca

SEQ ID NO: 42682 - RNA, 11 nt, Artificial Sequence
  Description of Artificial Sequence: Synthetic oligonucleotide
ccugcggguuu

SEQ ID NO: 42683 - RNA, 10 nt, Artificial Sequence
  Description of Artificial Sequence: Synthetic oligonucleotide
auccaguuug

SEQ ID NO: 42684 - RNA, 13 nt, Artificial Sequence
  Description of Artificial Sequence: Synthetic oligonucleotide
guuaaggacuucu

SEQ ID NO: 42685 - RNA, 13 nt, Artificial Sequence
  Description of Artificial Sequence: Synthetic oligonucleotide
cagugggacagag

SEQ ID NO: 42686 - RNA, 14 nt, Artificial Sequence
  Description of Artificial Sequence: Synthetic oligonucleotide
aauuuguuauugug

SEQ ID NO: 42687 - RNA, 13 nt, Artificial Sequence
  Description of Artificial Sequence: Synthetic oligonucleotide
uucaaaugcauuu

SEQ ID NO: 42688 - RNA, 10 nt, Artificial Sequence
  Description of Artificial Sequence: Synthetic oligonucleotide
caggaaagcc

SEQ ID NO: 42689 - RNA, 11 nt, Artificial Sequence
  Description of Artificial Sequence: Synthetic oligonucleotide
aggaaagcccu

SEQ ID NO: 42690 - RNA, 12 nt, Artificial Sequence
  Description of Artificial Sequence: Synthetic oligonucleotide
cccagcauggcc

SEQ ID NO: 42691 - RNA, 11 nt, Artificial Sequence
  Description of Artificial Sequence: Synthetic oligonucleotide
cuucucccuga

SEQ ID NO: 42692 - RNA, 12 nt, Artificial Sequence
  Description of Artificial Sequence: Synthetic oligonucleotide
gaagaagcccuu

SEQ ID NO: 42693 - RNA, 12 nt, Artificial Sequence
  Description of Artificial Sequence: Synthetic oligonucleotide
agaagcccuuca

SEQ ID NO: 42694 - RNA, 11 nt, Artificial Sequence
  Description of Artificial Sequence: Synthetic oligonucleotide
gcccuucagcg

SEQ ID NO: 42695 - RNA, 11 nt, Artificial Sequence
  Description of Artificial Sequence: Synthetic oligonucleotide
ccuucagcggc

SEQ ID NO: 42696 - RNA, 12 nt, Artificial Sequence
  Description of Artificial Sequence: Synthetic oligonucleotide
ucagcggccagu

SEQ ID NO: 42697 - RNA, 12 nt, Artificial Sequence
  Description of Artificial Sequence: Synthetic oligonucleotide
ugaaaagcuccg

SEQ ID NO: 42698 - RNA, 11 nt, Artificial Sequence
  Description of Artificial Sequence: Synthetic oligonucleotide
aaaagcuccgg

SEQ ID NO: 42699 - RNA, 13 nt, Artificial Sequence
  Description of Artificial Sequence: Synthetic oligonucleotide
agucaacagucug

SEQ ID NO: 42700 - RNA, 13 nt, Artificial Sequence
  Description of Artificial Sequence: Synthetic oligonucleotide
cagaguucaaaag

SEQ ID NO: 42701 - RNA, 13 nt, Artificial Sequence
  Description of Artificial Sequence: Synthetic oligonucleotide
agaguucaaaagc

SEQ ID NO: 42702 - RNA, 12 nt, Artificial Sequence
  Description of Artificial Sequence: Synthetic oligonucleotide
uucaaaagcccu

SEQ ID NO: 42703 - RNA, 12 nt, Artificial Sequence
  Description of Artificial Sequence: Synthetic oligonucleotide
ucaaaagcccuu

SEQ ID NO: 42704 - RNA, 12 nt, Artificial Sequence
  Description of Artificial Sequence: Synthetic oligonucleotide
aaaagcccuuca

SEQ ID NO: 42705 - RNA, 12 nt, Artificial Sequence
  Description of Artificial Sequence: Synthetic oligonucleotide
aaagcccuucag

SEQ ID NO: 42706 - RNA, 13 nt, Artificial Sequence
  Description of Artificial Sequence: Synthetic oligonucleotide
gugaagccgcucg

SEQ ID NO: 42707 - RNA, 12 nt, Artificial Sequence
  Description of Artificial Sequence: Synthetic oligonucleotide
cacgccagucaa

SEQ ID NO: 42708 - RNA, 13 nt, Artificial Sequence
  Description of Artificial Sequence: Synthetic oligonucleotide
uucuuggugcgug

SEQ ID NO: 42709 - RNA, 14 nt, Artificial Sequence
  Description of Artificial Sequence: Synthetic oligonucleotide
auuggauucaucag

SEQ ID NO: 42710 - RNA, 13 nt, Artificial Sequence
  Description of Artificial Sequence: Synthetic oligonucleotide
uggaauaccuaag

SEQ ID NO: 42711 - RNA, 12 nt, Artificial Sequence
  Description of Artificial Sequence: Synthetic oligonucleotide
auuugaggcuca

SEQ ID NO: 42712 - RNA, 11 nt, Artificial Sequence
  Description of Artificial Sequence: Synthetic oligonucleotide
ucuacaauugg

SEQ ID NO: 42713 - RNA, 12 nt, Artificial Sequence
  Description of Artificial Sequence: Synthetic oligonucleotide
uaguuaggagcc

SEQ ID NO: 42714 - RNA, 13 nt, Artificial Sequence
  Description of Artificial Sequence: Synthetic oligonucleotide
agucaauauccac

SEQ ID NO: 42715 - RNA, 13 nt, Artificial Sequence
  Description of Artificial Sequence: Synthetic oligonucleotide
auguucagucaca

SEQ ID NO: 42716 - RNA, 12 nt, Artificial Sequence
  Description of Artificial Sequence: Synthetic oligonucleotide
acacacacauac

SEQ ID NO: 42717 - RNA, 12 nt, Artificial Sequence
  Description of Artificial Sequence: Synthetic oligonucleotide
uuccuuuugcuu

SEQ ID NO: 42718 - RNA, 16 nt, Artificial Sequence
  Description of Artificial Sequence: Synthetic oligonucleotide
uuuuaaaguaauuuuu

SEQ ID NO: 42719 - RNA, 13 nt, Artificial Sequence
  Description of Artificial Sequence: Synthetic oligonucleotide
caacagucaaugg

SEQ ID NO: 42720 - RNA, 13 nt, Artificial Sequence
  Description of Artificial Sequence: Synthetic oligonucleotide
ucgacaaaccaau

SEQ ID NO: 42721 - RNA, 12 nt, Artificial Sequence
  Description of Artificial Sequence: Synthetic oligonucleotide
acugcuaccacu

SEQ ID NO: 42722 - RNA, 13 nt, Artificial Sequence
  Description of Artificial Sequence: Synthetic oligonucleotide
gcaagcggucuua

SEQ ID NO: 42723 - RNA, 13 nt, Artificial Sequence
  Description of Artificial Sequence: Synthetic oligonucleotide
ggucuuaccggcu

SEQ ID NO: 42724 - RNA, 11 nt, Artificial Sequence
  Description of Artificial Sequence: Synthetic oligonucleotide
gauggguuacc

SEQ ID NO: 42725 - RNA, 11 nt, Artificial Sequence
  Description of Artificial Sequence: Synthetic oligonucleotide
guuaccugcga

SEQ ID NO: 42726 - RNA, 12 nt, Artificial Sequence
  Description of Artificial Sequence: Synthetic oligonucleotide
aaucuugcugag

SEQ ID NO: 42727 - RNA, 13 nt, Artificial Sequence
  Description of Artificial Sequence: Synthetic oligonucleotide
agcauaaaacagu

SEQ ID NO: 42728 - RNA, 12 nt, Artificial Sequence
  Description of Artificial Sequence: Synthetic oligonucleotide
guccuuuauccu

SEQ ID NO: 42729 - RNA, 12 nt, Artificial Sequence
  Description of Artificial Sequence: Synthetic oligonucleotide
caacgcaaguug

SEQ ID NO: 42730 - RNA, 13 nt, Artificial Sequence
  Description of Artificial Sequence: Synthetic oligonucleotide
aaacugaaaccau

SEQ ID NO: 42731 - RNA, 14 nt, Artificial Sequence
  Description of Artificial Sequence: Synthetic oligonucleotide
acuuuguuaaauau

SEQ ID NO: 42732 - RNA, 14 nt, Artificial Sequence
  Description of Artificial Sequence: Synthetic oligonucleotide
guauauuaaaaguu

SEQ ID NO: 42733 - RNA, 13 nt, Artificial Sequence
  Description of Artificial Sequence: Synthetic oligonucleotide
guuuugacuuaac

SEQ ID NO: 42734 - RNA, 13 nt, Artificial Sequence
  Description of Artificial Sequence: Synthetic oligonucleotide
gcaaacucagcac

SEQ ID NO: 42735 - RNA, 11 nt, Artificial Sequence
  Description of Artificial Sequence: Synthetic oligonucleotide
ugcugaccuca

SEQ ID NO: 42736 - RNA, 14 nt, Artificial Sequence
  Description of Artificial Sequence: Synthetic oligonucleotide
uuuauucagaucgc

SEQ ID NO: 42737 - RNA, 13 nt, Artificial Sequence
  Description of Artificial Sequence: Synthetic oligonucleotide
aggguucugggau

SEQ ID NO: 42738 - RNA, 15 nt, Artificial Sequence
  Description of Artificial Sequence: Synthetic oligonucleotide
auauuggaaauuaug

SEQ ID NO: 42739 - RNA, 13 nt, Artificial Sequence
  Description of Artificial Sequence: Synthetic oligonucleotide
auggaagcacuag

SEQ ID NO: 42740 - RNA, 13 nt, Artificial Sequence
  Description of Artificial Sequence: Synthetic oligonucleotide
guuuuuaugugga

SEQ ID NO: 42741 - RNA, 12 nt, Artificial Sequence
  Description of Artificial Sequence: Synthetic oligonucleotide
ggaauugguaga

SEQ ID NO: 42742 - RNA, 13 nt, Artificial Sequence
  Description of Artificial Sequence: Synthetic oligonucleotide
uuagacuuggaga

SEQ ID NO: 42743 - RNA, 13 nt, Artificial Sequence
  Description of Artificial Sequence: Synthetic oligonucleotide
uuacaguauucca

SEQ ID NO: 42744 - RNA, 15 nt, Artificial Sequence
  Description of Artificial Sequence: Synthetic oligonucleotide
ccacugaugaauuaa

SEQ ID NO: 42745 - RNA, 12 nt, Artificial Sequence
  Description of Artificial Sequence: Synthetic oligonucleotide
ccacaucaucac

SEQ ID NO: 42746 - RNA, 13 nt, Artificial Sequence
  Description of Artificial Sequence: Synthetic oligonucleotide
cucaccaaacaga

SEQ ID NO: 42747 - RNA, 12 nt, Artificial Sequence
  Description of Artificial Sequence: Synthetic oligonucleotide
ggaacaugaugg

SEQ ID NO: 42748 - RNA, 12 nt, Artificial Sequence
  Description of Artificial Sequence: Synthetic oligonucleotide
cauguagacugc

SEQ ID NO: 42749 - RNA, 13 nt, Artificial Sequence
  Description of Artificial Sequence: Synthetic oligonucleotide
ggaucuauuuaug

SEQ ID NO: 42750 - RNA, 12 nt, Artificial Sequence
  Description of Artificial Sequence: Synthetic oligonucleotide
gcacuauuauca

SEQ ID NO: 42751 - RNA, 11 nt, Artificial Sequence
  Description of Artificial Sequence: Synthetic oligonucleotide
aucaguucugc

SEQ ID NO: 42752 - RNA, 13 nt, Artificial Sequence
  Description of Artificial Sequence: Synthetic oligonucleotide
agauuaaaccuac

SEQ ID NO: 42753 - RNA, 13 nt, Artificial Sequence
  Description of Artificial Sequence: Synthetic oligonucleotide
auaaaauccuucu

SEQ ID NO: 42754 - RNA, 12 nt, Artificial Sequence
  Description of Artificial Sequence: Synthetic oligonucleotide
aaugcuguagac

SEQ ID NO: 42755 - RNA, 13 nt, Artificial Sequence
  Description of Artificial Sequence: Synthetic oligonucleotide
uugauaggaauag

SEQ ID NO: 42756 - RNA, 11 nt, Artificial Sequence
  Description of Artificial Sequence: Synthetic oligonucleotide
aauggcccuga

SEQ ID NO: 42757 - RNA, 11 nt, Artificial Sequence
  Description of Artificial Sequence: Synthetic oligonucleotide
uuccucaagca

SEQ ID NO: 42758 - RNA, 10 nt, Artificial Sequence
  Description of Artificial Sequence: Synthetic oligonucleotide
guucagccca

SEQ ID NO: 42759 - RNA, 11 nt, Artificial Sequence
  Description of Artificial Sequence: Synthetic oligonucleotide
gcugcugaacc

SEQ ID NO: 42760 - RNA, 12 nt, Artificial Sequence
  Description of Artificial Sequence: Synthetic oligonucleotide
aaguucucuuca

SEQ ID NO: 42761 - RNA, 11 nt, Artificial Sequence
  Description of Artificial Sequence: Synthetic oligonucleotide
ccagccuagag

SEQ ID NO: 42762 - RNA, 13 nt, Artificial Sequence
  Description of Artificial Sequence: Synthetic oligonucleotide
cucugugaagugu

SEQ ID NO: 42763 - RNA, 14 nt, Artificial Sequence
  Description of Artificial Sequence: Synthetic oligonucleotide
ugagaaaauuucaa

SEQ ID NO: 42764 - RNA, 11 nt, Artificial Sequence
  Description of Artificial Sequence: Synthetic oligonucleotide
aauccuccuga

SEQ ID NO: 42765 - RNA, 12 nt, Artificial Sequence
  Description of Artificial Sequence: Synthetic oligonucleotide
gugacaucauau

SEQ ID NO: 42766 - RNA, 13 nt, Artificial Sequence
  Description of Artificial Sequence: Synthetic oligonucleotide
aaucuucaucaua

SEQ ID NO: 42767 - RNA, 13 nt, Artificial Sequence
  Description of Artificial Sequence: Synthetic oligonucleotide
gacuagcuauuaa

SEQ ID NO: 42768 - RNA, 14 nt, Artificial Sequence
  Description of Artificial Sequence: Synthetic oligonucleotide
ucucuacuaaaaau

SEQ ID NO: 42769 - RNA, 12 nt, Artificial Sequence
  Description of Artificial Sequence: Synthetic oligonucleotide
ucuaucucgccu

SEQ ID NO: 42770 - RNA, 13 nt, Artificial Sequence
  Description of Artificial Sequence: Synthetic oligonucleotide
cuucgguccaguu

SEQ ID NO: 42771 - RNA, 11 nt, Artificial Sequence
  Description of Artificial Sequence: Synthetic oligonucleotide
gauguagccgc

SEQ ID NO: 42772 - RNA, 12 nt, Artificial Sequence
  Description of Artificial Sequence: Synthetic oligonucleotide
ugaggagacuug

SEQ ID NO: 42773 - RNA, 12 nt, Artificial Sequence
  Description of Artificial Sequence: Synthetic oligonucleotide
gaguagugagga

SEQ ID NO: 42774 - RNA, 14 nt, Artificial Sequence
  Description of Artificial Sequence: Synthetic oligonucleotide
cagaugaguacaaa

SEQ ID NO: 42775 - RNA, 13 nt, Artificial Sequence
  Description of Artificial Sequence: Synthetic oligonucleotide
guuguuaaugggc

SEQ ID NO: 42776 - RNA, 13 nt, Artificial Sequence
  Description of Artificial Sequence: Synthetic oligonucleotide
uuuuuaauuuauu

SEQ ID NO: 42777 - RNA, 12 nt, Artificial Sequence
  Description of Artificial Sequence: Synthetic oligonucleotide
uauuuaaauaug

SEQ ID NO: 42778 - RNA, 13 nt, Artificial Sequence
  Description of Artificial Sequence: Synthetic oligonucleotide
uauccuuuguuuc

SEQ ID NO: 42779 - RNA, 14 nt, Artificial Sequence
  Description of Artificial Sequence: Synthetic oligonucleotide
cgucuaaguguuug

SEQ ID NO: 42780 - RNA, 12 nt, Artificial Sequence
  Description of Artificial Sequence: Synthetic oligonucleotide
accugugacaaa

SEQ ID NO: 42781 - RNA, 13 nt, Artificial Sequence
  Description of Artificial Sequence: Synthetic oligonucleotide
ccaggcugaauua

SEQ ID NO: 42782 - RNA, 14 nt, Artificial Sequence
  Description of Artificial Sequence: Synthetic oligonucleotide
gucauucuuacaau

SEQ ID NO: 42783 - RNA, 15 nt, Artificial Sequence
  Description of Artificial Sequence: Synthetic oligonucleotide
ucauucuuacaauug

SEQ ID NO: 42784 - RNA, 12 nt, Artificial Sequence
  Description of Artificial Sequence: Synthetic oligonucleotide
cagagaguguac

SEQ ID NO: 42785 - RNA, 12 nt, Artificial Sequence
  Description of Artificial Sequence: Synthetic oligonucleotide
agaacucagcag

SEQ ID NO: 42786 - RNA, 13 nt, Artificial Sequence
  Description of Artificial Sequence: Synthetic oligonucleotide
uuuauuuucagua

SEQ ID NO: 42787 - RNA, 12 nt, Artificial Sequence
  Description of Artificial Sequence: Synthetic oligonucleotide
ucuuaaauggaa

SEQ ID NO: 42788 - RNA, 13 nt, Artificial Sequence
  Description of Artificial Sequence: Synthetic oligonucleotide
ugccuaaaauugu

SEQ ID NO: 42789 - RNA, 12 nt, Artificial Sequence
  Description of Artificial Sequence: Synthetic oligonucleotide
agacugugagcu

SEQ ID NO: 42790 - RNA, 14 nt, Artificial Sequence
  Description of Artificial Sequence: Synthetic oligonucleotide
ugcuuuuuauuaau

SEQ ID NO: 42791 - RNA, 13 nt, Artificial Sequence
  Description of Artificial Sequence: Synthetic oligonucleotide
cucuucuuacauu

SEQ ID NO: 42792 - RNA, 15 nt, Artificial Sequence
  Description of Artificial Sequence: Synthetic oligonucleotide
cauuuguaaaaaugu

SEQ ID NO: 42793 - RNA, 15 nt, Artificial Sequence
  Description of Artificial Sequence: Synthetic oligonucleotide
aucuuaauucauauu

SEQ ID NO: 42794 - RNA, 13 nt, Artificial Sequence
  Description of Artificial Sequence: Synthetic oligonucleotide
gaacuaaucauga

SEQ ID NO: 42795 - RNA, 12 nt, Artificial Sequence
  Description of Artificial Sequence: Synthetic oligonucleotide
ucugcucuuggg

SEQ ID NO: 42796 - RNA, 13 nt, Artificial Sequence
  Description of Artificial Sequence: Synthetic oligonucleotide
caguagcuuugag

SEQ ID NO: 42797 - RNA, 14 nt, Artificial Sequence
  Description of Artificial Sequence: Synthetic oligonucleotide
cacguaauauuuca

SEQ ID NO: 42798 - RNA, 13 nt, Artificial Sequence
  Description of Artificial Sequence: Synthetic oligonucleotide
uauucucuucacu

SEQ ID NO: 42799 - RNA, 14 nt, Artificial Sequence
  Description of Artificial Sequence: Synthetic oligonucleotide
cuaaugcuaagaaa

SEQ ID NO: 42800 - RNA, 12 nt, Artificial Sequence
  Description of Artificial Sequence: Synthetic oligonucleotide
gcugaaaaucaa

SEQ ID NO: 42801 - RNA, 14 nt, Artificial Sequence
  Description of Artificial Sequence: Synthetic oligonucleotide
aauaugauuacuuu

SEQ ID NO: 42802 - RNA, 14 nt, Artificial Sequence
  Description of Artificial Sequence: Synthetic oligonucleotide
cauuuuguucuaca

SEQ ID NO: 42803 - RNA, 12 nt, Artificial Sequence
  Description of Artificial Sequence: Synthetic oligonucleotide
cccgggacucuc

SEQ ID NO: 42804 - RNA, 14 nt, Artificial Sequence
  Description of Artificial Sequence: Synthetic oligonucleotide
ccuuuaaaguaaag

SEQ ID NO: 42805 - RNA, 13 nt, Artificial Sequence
  Description of Artificial Sequence: Synthetic oligonucleotide
ucuggaagccugg

SEQ ID NO: 42806 - RNA, 14 nt, Artificial Sequence
  Description of Artificial Sequence: Synthetic oligonucleotide
aaaacaaaagagag

SEQ ID NO: 42807 - RNA, 13 nt, Artificial Sequence
  Description of Artificial Sequence: Synthetic oligonucleotide
aucaguuaugccg

SEQ ID NO: 42808 - RNA, 13 nt, Artificial Sequence
  Description of Artificial Sequence: Synthetic oligonucleotide
uaaaagaagucca

SEQ ID NO: 42809 - RNA, 11 nt, Artificial Sequence
  Description of Artificial Sequence: Synthetic oligonucleotide
aggugagguua

SEQ ID NO: 42810 - RNA, 11 nt, Artificial Sequence
  Description of Artificial Sequence: Synthetic oligonucleotide
gggaagaggac

SEQ ID NO: 42811 - RNA, 13 nt, Artificial Sequence
  Description of Artificial Sequence: Synthetic oligonucleotide
aagcaaguauugu

SEQ ID NO: 42812 - RNA, 12 nt, Artificial Sequence
  Description of Artificial Sequence: Synthetic oligonucleotide
auuguagcacuc

SEQ ID NO: 42813 - RNA, 14 nt, Artificial Sequence
  Description of Artificial Sequence: Synthetic oligonucleotide
acaaaaccacaaau

SEQ ID NO: 42814 - RNA, 12 nt, Artificial Sequence
  Description of Artificial Sequence: Synthetic oligonucleotide
uaagcccauaca

SEQ ID NO: 42815 - RNA, 11 nt, Artificial Sequence
  Description of Artificial Sequence: Synthetic oligonucleotide
agcccauacag

SEQ ID NO: 42816 - RNA, 12 nt, Artificial Sequence
  Description of Artificial Sequence: Synthetic oligonucleotide
cagaaaccuucc

SEQ ID NO: 42817 - RNA, 10 nt, Artificial Sequence
  Description of Artificial Sequence: Synthetic oligonucleotide
guauaccuac

SEQ ID NO: 42818 - RNA, 13 nt, Artificial Sequence
  Description of Artificial Sequence: Synthetic oligonucleotide
gccaguuuucgga

SEQ ID NO: 42819 - RNA, 9 nt, Artificial Sequence
  Description of Artificial Sequence: Synthetic oligonucleotide
ggaacaggg

SEQ ID NO: 42820 - RNA, 13 nt, Artificial Sequence
  Description of Artificial Sequence: Synthetic oligonucleotide
uuaacuuuccagu

SEQ ID NO: 42821 - RNA, 14 nt, Artificial Sequence
  Description of Artificial Sequence: Synthetic oligonucleotide
aaaguuugguuuug

SEQ ID NO: 42822 - RNA, 12 nt, Artificial Sequence
  Description of Artificial Sequence: Synthetic oligonucleotide
cuucccacugua

SEQ ID NO: 42823 - RNA, 13 nt, Artificial Sequence
  Description of Artificial Sequence: Synthetic oligonucleotide
ugauaccauauga

SEQ ID NO: 42824 - RNA, 11 nt, Artificial Sequence
  Description of Artificial Sequence: Synthetic oligonucleotide
aacaugggcug

SEQ ID NO: 42825 - RNA, 13 nt, Artificial Sequence
  Description of Artificial Sequence: Synthetic oligonucleotide
caacuuuuucaua

SEQ ID NO: 42826 - RNA, 12 nt, Artificial Sequence
  Description of Artificial Sequence: Synthetic oligonucleotide
caugaggccgga

SEQ ID NO: 42827 - RNA, 11 nt, Artificial Sequence
  Description of Artificial Sequence: Synthetic oligonucleotide
acugcauuugu

SEQ ID NO: 42828 - RNA, 13 nt, Artificial Sequence
  Description of Artificial Sequence: Synthetic oligonucleotide
aauguuuacuacc

SEQ ID NO: 42829 - RNA, 15 nt, Artificial Sequence
  Description of Artificial Sequence: Synthetic oligonucleotide
aauuuuuugaugaaa

SEQ ID NO: 42830 - RNA, 14 nt, Artificial Sequence
  Description of Artificial Sequence: Synthetic oligonucleotide
cagugugugaauuu

SEQ ID NO: 42831 - RNA, 13 nt, Artificial Sequence
  Description of Artificial Sequence: Synthetic oligonucleotide
gagcaauguaugu

SEQ ID NO: 42832 - RNA, 14 nt, Artificial Sequence
  Description of Artificial Sequence: Synthetic oligonucleotide
aaagcacauauaua

SEQ ID NO: 42833 - RNA, 14 nt, Artificial Sequence
  Description of Artificial Sequence: Synthetic oligonucleotide
guaauaguuucucc

SEQ ID NO: 42834 - RNA, 13 nt, Artificial Sequence
  Description of Artificial Sequence: Synthetic oligonucleotide
aguuucuccaaau

SEQ ID NO: 42835 - RNA, 13 nt, Artificial Sequence
  Description of Artificial Sequence: Synthetic oligonucleotide
uacuuccuagaaa

SEQ ID NO: 42836 - RNA, 13 nt, Artificial Sequence
  Description of Artificial Sequence: Synthetic oligonucleotide
uacaccauauaug

SEQ ID NO: 42837 - RNA, 14 nt, Artificial Sequence
  Description of Artificial Sequence: Synthetic oligonucleotide
auauaugaauggag

SEQ ID NO: 42838 - RNA, 13 nt, Artificial Sequence
  Description of Artificial Sequence: Synthetic oligonucleotide
acgagaagaagau

SEQ ID NO: 42839 - RNA, 13 nt, Artificial Sequence
  Description of Artificial Sequence: Synthetic oligonucleotide
ucauuuacaggga

SEQ ID NO: 42840 - RNA, 13 nt, Artificial Sequence
  Description of Artificial Sequence: Synthetic oligonucleotide
cauuuacagggac

SEQ ID NO: 42841 - RNA, 10 nt, Artificial Sequence
  Description of Artificial Sequence: Synthetic oligonucleotide
agggaccuga

SEQ ID NO: 42842 - RNA, 14 nt, Artificial Sequence
  Description of Artificial Sequence: Synthetic oligonucleotide
uguuugacugcauc

SEQ ID NO: 42843 - RNA, 13 nt, Artificial Sequence
  Description of Artificial Sequence: Synthetic oligonucleotide
uuugacugcaucg

SEQ ID NO: 42844 - RNA, 12 nt, Artificial Sequence
  Description of Artificial Sequence: Synthetic oligonucleotide
gaguucacaggg

SEQ ID NO: 42845 - RNA, 13 nt, Artificial Sequence
  Description of Artificial Sequence: Synthetic oligonucleotide
ggcaccucugucc

SEQ ID NO: 42846 - RNA, 15 nt, Artificial Sequence
  Description of Artificial Sequence: Synthetic oligonucleotide
gguuugucuuuuuaa

SEQ ID NO: 42847 - RNA, 14 nt, Artificial Sequence
  Description of Artificial Sequence: Synthetic oligonucleotide
uuugucuuuuuaag

SEQ ID NO: 42848 - RNA, 13 nt, Artificial Sequence
  Description of Artificial Sequence: Synthetic oligonucleotide
ccuaaagguuguc

SEQ ID NO: 42849 - RNA, 12 nt, Artificial Sequence
  Description of Artificial Sequence: Synthetic oligonucleotide
aagguugucgac

SEQ ID NO: 42850 - RNA, 13 nt, Artificial Sequence
  Description of Artificial Sequence: Synthetic oligonucleotide
accuggcaauugu

SEQ ID NO: 42851 - RNA, 12 nt, Artificial Sequence
  Description of Artificial Sequence: Synthetic oligonucleotide
aguggugcgagg

SEQ ID NO: 42852 - RNA, 13 nt, Artificial Sequence
  Description of Artificial Sequence: Synthetic oligonucleotide
agagacaugaaau

SEQ ID NO: 42853 - RNA, 13 nt, Artificial Sequence
  Description of Artificial Sequence: Synthetic oligonucleotide
auauauuucucca

SEQ ID NO: 42854 - RNA, 10 nt, Artificial Sequence
  Description of Artificial Sequence: Synthetic oligonucleotide
caugaaggcu

SEQ ID NO: 42855 - RNA, 11 nt, Artificial Sequence
  Description of Artificial Sequence: Synthetic oligonucleotide
gcuggaguggu

SEQ ID NO: 42856 - RNA, 11 nt, Artificial Sequence
  Description of Artificial Sequence: Synthetic oligonucleotide
aggaagagagg

SEQ ID NO: 42857 - RNA, 12 nt, Artificial Sequence
  Description of Artificial Sequence: Synthetic oligonucleotide
cuugcaucgggc

SEQ ID NO: 42858 - RNA, 13 nt, Artificial Sequence
  Description of Artificial Sequence: Synthetic oligonucleotide
auauccuacugug

SEQ ID NO: 42859 - RNA, 13 nt, Artificial Sequence
  Description of Artificial Sequence: Synthetic oligonucleotide
uccuacuguguaa

SEQ ID NO: 42860 - RNA, 12 nt, Artificial Sequence
  Description of Artificial Sequence: Synthetic oligonucleotide
ccuuguagugua

SEQ ID NO: 42861 - RNA, 13 nt, Artificial Sequence
  Description of Artificial Sequence: Synthetic oligonucleotide
ucuuuguugauug

SEQ ID NO: 42862 - RNA, 14 nt, Artificial Sequence
  Description of Artificial Sequence: Synthetic oligonucleotide
uuuguugauugaaa

SEQ ID NO: 42863 - RNA, 15 nt, Artificial Sequence
  Description of Artificial Sequence: Synthetic oligonucleotide
uucuuuuucuuccau

SEQ ID NO: 42864 - RNA, 13 nt, Artificial Sequence
  Description of Artificial Sequence: Synthetic oligonucleotide
aaucuuccuucua

SEQ ID NO: 42865 - RNA, 13 nt, Artificial Sequence
  Description of Artificial Sequence: Synthetic oligonucleotide
uugaaugcuucau

SEQ ID NO: 42866 - RNA, 13 nt, Artificial Sequence
  Description of Artificial Sequence: Synthetic oligonucleotide
ugaaugcuucaug

SEQ ID NO: 42867 - RNA, 13 nt, Artificial Sequence
  Description of Artificial Sequence: Synthetic oligonucleotide
aauucuacuuuga

SEQ ID NO: 42868 - RNA, 13 nt, Artificial Sequence
  Description of Artificial Sequence: Synthetic oligonucleotide
agcaacuacagac

SEQ ID NO: 42869 - RNA, 13 nt, Artificial Sequence
  Description of Artificial Sequence: Synthetic oligonucleotide
gaccaaggucaac

SEQ ID NO: 42870 - RNA, 13 nt, Artificial Sequence
  Description of Artificial Sequence: Synthetic oligonucleotide
cgacuaucucgac

SEQ ID NO: 42871 - RNA, 13 nt, Artificial Sequence
  Description of Artificial Sequence: Synthetic oligonucleotide
aaccuucccaaac

SEQ ID NO: 42872 - RNA, 14 nt, Artificial Sequence
  Description of Artificial Sequence: Synthetic oligonucleotide
ccaagcuuagaacu

SEQ ID NO: 42873 - RNA, 15 nt, Artificial Sequence
  Description of Artificial Sequence: Synthetic oligonucleotide
agcuuagaacuuuaa

SEQ ID NO: 42874 - RNA, 11 nt, Artificial Sequence
  Description of Artificial Sequence: Synthetic oligonucleotide
aagaccaccac

SEQ ID NO: 42875 - RNA, 14 nt, Artificial Sequence
  Description of Artificial Sequence: Synthetic oligonucleotide
gcgagaaauaaagu

SEQ ID NO: 42876 - RNA, 14 nt, Artificial Sequence
  Description of Artificial Sequence: Synthetic oligonucleotide
cgagaaauaaaguu

SEQ ID NO: 42877 - RNA, 12 nt, Artificial Sequence
  Description of Artificial Sequence: Synthetic oligonucleotide
aggaaaugaucc

SEQ ID NO: 42878 - RNA, 13 nt, Artificial Sequence
  Description of Artificial Sequence: Synthetic oligonucleotide
gaagaaaugaaac

SEQ ID NO: 42879 - RNA, 13 nt, Artificial Sequence
  Description of Artificial Sequence: Synthetic oligonucleotide
guuuccauccucc

SEQ ID NO: 42880 - RNA, 15 nt, Artificial Sequence
  Description of Artificial Sequence: Synthetic oligonucleotide
acugaaaaucuuuga

SEQ ID NO: 42881 - RNA, 11 nt, Artificial Sequence
  Description of Artificial Sequence: Synthetic oligonucleotide
ugccguucagg

SEQ ID NO: 42882 - RNA, 13 nt, Artificial Sequence
  Description of Artificial Sequence: Synthetic oligonucleotide
caggguccagaag

SEQ ID NO: 42883 - RNA, 13 nt, Artificial Sequence
  Description of Artificial Sequence: Synthetic oligonucleotide
ucaagacugcuug

SEQ ID NO: 42884 - RNA, 13 nt, Artificial Sequence
  Description of Artificial Sequence: Synthetic oligonucleotide
uccaugucuuugg

SEQ ID NO: 42885 - RNA, 11 nt, Artificial Sequence
  Description of Artificial Sequence: Synthetic oligonucleotide
gccugaaacac

SEQ ID NO: 42886 - RNA, 12 nt, Artificial Sequence
  Description of Artificial Sequence: Synthetic oligonucleotide
ucucuguaccuc

SEQ ID NO: 42887 - RNA, 12 nt, Artificial Sequence
  Description of Artificial Sequence: Synthetic oligonucleotide
agcaagacaaga

SEQ ID NO: 42888 - RNA, 13 nt, Artificial Sequence
  Description of Artificial Sequence: Synthetic oligonucleotide
gcaagacaagaaa

SEQ ID NO: 42889 - RNA, 12 nt, Artificial Sequence
  Description of Artificial Sequence: Synthetic oligonucleotide
uguacaagaucc

SEQ ID NO: 42890 - RNA, 12 nt, Artificial Sequence
  Description of Artificial Sequence: Synthetic oligonucleotide
cguacuugcaga

SEQ ID NO: 42891 - RNA, 13 nt, Artificial Sequence
  Description of Artificial Sequence: Synthetic oligonucleotide
cgaucgauacaga

SEQ ID NO: 42892 - RNA, 13 nt, Artificial Sequence
  Description of Artificial Sequence: Synthetic oligonucleotide
uauaaaaauaaau

SEQ ID NO: 42893 - RNA, 13 nt, Artificial Sequence
  Description of Artificial Sequence: Synthetic oligonucleotide
uaaaaauaaauau

SEQ ID NO: 42894 - RNA, 13 nt, Artificial Sequence
  Description of Artificial Sequence: Synthetic oligonucleotide
uuugacugcugug

SEQ ID NO: 42895 - RNA, 13 nt, Artificial Sequence
  Description of Artificial Sequence: Synthetic oligonucleotide
ggagaugagagac

SEQ ID NO: 42896 - RNA, 10 nt, Artificial Sequence
  Description of Artificial Sequence: Synthetic oligonucleotide
ucccacuugg

SEQ ID NO: 42897 - RNA, 10 nt, Artificial Sequence
  Description of Artificial Sequence: Synthetic oligonucleotide
guucacggcc

SEQ ID NO: 42898 - RNA, 12 nt, Artificial Sequence
  Description of Artificial Sequence: Synthetic oligonucleotide
accaucacacca

SEQ ID NO: 42899 - RNA, 10 nt, Artificial Sequence
  Description of Artificial Sequence: Synthetic oligonucleotide
cugcggguuu

SEQ ID NO: 42900 - RNA, 9 nt, Artificial Sequence
  Description of Artificial Sequence: Synthetic oligonucleotide
uccaguuug

SEQ ID NO: 42901 - RNA, 12 nt, Artificial Sequence
  Description of Artificial Sequence: Synthetic oligonucleotide
uuaaggacuucu

SEQ ID NO: 42902 - RNA, 12 nt, Artificial Sequence
  Description of Artificial Sequence: Synthetic oligonucleotide
agugggacagag

SEQ ID NO: 42903 - RNA, 13 nt, Artificial Sequence
  Description of Artificial Sequence: Synthetic oligonucleotide
auuuguuauugug

SEQ ID NO: 42904 - RNA, 12 nt, Artificial Sequence
  Description of Artificial Sequence: Synthetic oligonucleotide
ucaaaugcauuu

SEQ ID NO: 42905 - RNA, 9 nt, Artificial Sequence
  Description of Artificial Sequence: Synthetic oligonucleotide
aggaaagcc

SEQ ID NO: 42906 - RNA, 10 nt, Artificial Sequence
  Description of Artificial Sequence: Synthetic oligonucleotide
ggaaagcccu

SEQ ID NO: 42907 - RNA, 11 nt, Artificial Sequence
  Description of Artificial Sequence: Synthetic oligonucleotide
ccagcauggcc

SEQ ID NO: 42908 - RNA, 10 nt, Artificial Sequence
  Description of Artificial Sequence: Synthetic oligonucleotide
uucucccuga

SEQ ID NO: 42909 - RNA, 11 nt, Artificial Sequence
  Description of Artificial Sequence: Synthetic oligonucleotide
aagaagcccuu

SEQ ID NO: 42910 - RNA, 11 nt, Artificial Sequence
  Description of Artificial Sequence: Synthetic oligonucleotide
gaagcccuuca

SEQ ID NO: 42911 - RNA, 10 nt, Artificial Sequence
  Description of Artificial Sequence: Synthetic oligonucleotide
cccuucagcg

SEQ ID NO: 42912 - RNA, 10 nt, Artificial Sequence
  Description of Artificial Sequence: Synthetic oligonucleotide
cuucagcggc

SEQ ID NO: 42913 - RNA, 11 nt, Artificial Sequence
  Description of Artificial Sequence: Synthetic oligonucleotide
cagcggccagu

SEQ ID NO: 42914 - RNA, 11 nt, Artificial Sequence
  Description of Artificial Sequence: Synthetic oligonucleotide
gaaaagcuccg

SEQ ID NO: 42915 - RNA, 10 nt, Artificial Sequence
  Description of Artificial Sequence: Synthetic oligonucleotide
aaagcuccgg

SEQ ID NO: 42916 - RNA, 12 nt, Artificial Sequence
  Description of Artificial Sequence: Synthetic oligonucleotide
gucaacagucug

SEQ ID NO: 42917 - RNA, 12 nt, Artificial Sequence
  Description of Artificial Sequence: Synthetic oligonucleotide
agaguucaaaag

SEQ ID NO: 42918 - RNA, 12 nt, Artificial Sequence
  Description of Artificial Sequence: Synthetic oligonucleotide
gaguucaaaagc

SEQ ID NO: 42919 - RNA, 11 nt, Artificial Sequence
  Description of Artificial Sequence: Synthetic oligonucleotide
ucaaaagcccu

SEQ ID NO: 42920 - RNA, 11 nt, Artificial Sequence
  Description of Artificial Sequence: Synthetic oligonucleotide
caaaagcccuu

SEQ ID NO: 42921 - RNA, 11 nt, Artificial Sequence
  Description of Artificial Sequence: Synthetic oligonucleotide
aaagcccuuca

SEQ ID NO: 42922 - RNA, 11 nt, Artificial Sequence
  Description of Artificial Sequence: Synthetic oligonucleotide
aagcccuucag

SEQ ID NO: 42923 - RNA, 12 nt, Artificial Sequence
  Description of Artificial Sequence: Synthetic oligonucleotide
ugaagccgcucg

SEQ ID NO: 42924 - RNA, 11 nt, Artificial Sequence
  Description of Artificial Sequence: Synthetic oligonucleotide
acgccagucaa

SEQ ID NO: 42925 - RNA, 12 nt, Artificial Sequence
  Description of Artificial Sequence: Synthetic oligonucleotide
ucuuggugcgug

SEQ ID NO: 42926 - RNA, 13 nt, Artificial Sequence
  Description of Artificial Sequence: Synthetic oligonucleotide
uuggauucaucag

SEQ ID NO: 42927 - RNA, 12 nt, Artificial Sequence
  Description of Artificial Sequence: Synthetic oligonucleotide
ggaauaccuaag

SEQ ID NO: 42928 - RNA, 11 nt, Artificial Sequence
  Description of Artificial Sequence: Synthetic oligonucleotide
uuugaggcuca

SEQ ID NO: 42929 - RNA, 10 nt, Artificial Sequence
  Description of Artificial Sequence: Synthetic oligonucleotide
cuacaauugg

SEQ ID NO: 42930 - RNA, 11 nt, Artificial Sequence
  Description of Artificial Sequence: Synthetic oligonucleotide
aguuaggagcc

SEQ ID NO: 42931 - RNA, 12 nt, Artificial Sequence
  Description of Artificial Sequence: Synthetic oligonucleotide
gucaauauccac

SEQ ID NO: 42932 - RNA, 12 nt, Artificial Sequence
  Description of Artificial Sequence: Synthetic oligonucleotide
uguucagucaca

SEQ ID NO: 42933 - RNA, 11 nt, Artificial Sequence
  Description of Artificial Sequence: Synthetic oligonucleotide
cacacacauac

SEQ ID NO: 42934 - RNA, 11 nt, Artificial Sequence
  Description of Artificial Sequence: Synthetic oligonucleotide
uccuuuugcuu

SEQ ID NO: 42935 - RNA, 15 nt, Artificial Sequence
  Description of Artificial Sequence: Synthetic oligonucleotide
uuuaaaguaauuuuu

SEQ ID NO: 42936 - RNA, 12 nt, Artificial Sequence
  Description of Artificial Sequence: Synthetic oligonucleotide
aacagucaaugg

SEQ ID NO: 42937 - RNA, 12 nt, Artificial Sequence
  Description of Artificial Sequence: Synthetic oligonucleotide
cgacaaaccaau

SEQ ID NO: 42938 - RNA, 11 nt, Artificial Sequence
  Description of Artificial Sequence: Synthetic oligonucleotide
cugcuaccacu

SEQ ID NO: 42939 - RNA, 12 nt, Artificial Sequence
  Description of Artificial Sequence: Synthetic oligonucleotide
caagcggucuua

SEQ ID NO: 42940 - RNA, 12 nt, Artificial Sequence
  Description of Artificial Sequence: Synthetic oligonucleotide
gucuuaccggcu

SEQ ID NO: 42941 - RNA, 10 nt, Artificial Sequence
  Description of Artificial Sequence: Synthetic oligonucleotide
auggguuacc

SEQ ID NO: 42942 - RNA, 10 nt, Artificial Sequence
  Description of Artificial Sequence: Synthetic oligonucleotide
uuaccugcga

SEQ ID NO: 42943 - RNA, 11 nt, Artificial Sequence
  Description of Artificial Sequence: Synthetic oligonucleotide
aucuugcugag

SEQ ID NO: 42944 - RNA, 12 nt, Artificial Sequence
  Description of Artificial Sequence: Synthetic oligonucleotide
gcauaaaacagu

SEQ ID NO: 42945 - RNA, 11 nt, Artificial Sequence
  Description of Artificial Sequence: Synthetic oligonucleotide
uccuuuauccu

SEQ ID NO: 42946 - RNA, 11 nt, Artificial Sequence
  Description of Artificial Sequence: Synthetic oligonucleotide
aacgcaaguug

SEQ ID NO: 42947 - RNA, 12 nt, Artificial Sequence
  Description of Artificial Sequence: Synthetic oligonucleotide
aacugaaaccau

SEQ ID NO: 42948 - RNA, 13 nt, Artificial Sequence
  Description of Artificial Sequence: Synthetic oligonucleotide
cuuuguuaaauau

SEQ ID NO: 42949 - RNA, 13 nt, Artificial Sequence
  Description of Artificial Sequence: Synthetic oligonucleotide
uauauuaaaaguu

SEQ ID NO: 42950 - RNA, 12 nt, Artificial Sequence
  Description of Artificial Sequence: Synthetic oligonucleotide
uuuugacuuaac

SEQ ID NO: 42951 - RNA, 12 nt, Artificial Sequence
  Description of Artificial Sequence: Synthetic oligonucleotide
caaacucagcac

SEQ ID NO: 42952 - RNA, 10 nt, Artificial Sequence
  Description of Artificial Sequence: Synthetic oligonucleotide
gcugaccuca

SEQ ID NO: 42953 - RNA, 13 nt, Artificial Sequence
  Description of Artificial Sequence: Synthetic oligonucleotide
uuauucagaucgc

SEQ ID NO: 42954 - RNA, 12 nt, Artificial Sequence
  Description of Artificial Sequence: Synthetic oligonucleotide
ggguucugggau

SEQ ID NO: 42955 - RNA, 14 nt, Artificial Sequence
  Description of Artificial Sequence: Synthetic oligonucleotide
uauuggaaauuaug

SEQ ID NO: 42956 - RNA, 12 nt, Artificial Sequence
  Description of Artificial Sequence: Synthetic oligonucleotide
uggaagcacuag

SEQ ID NO: 42957 - RNA, 12 nt, Artificial Sequence
  Description of Artificial Sequence: Synthetic oligonucleotide
uuuuuaugugga

SEQ ID NO: 42958 - RNA, 11 nt, Artificial Sequence
  Description of Artificial Sequence: Synthetic oligonucleotide
gaauugguaga

SEQ ID NO: 42959 - RNA, 12 nt, Artificial Sequence
  Description of Artificial Sequence: Synthetic oligonucleotide
uagacuuggaga

SEQ ID NO: 42960 - RNA, 12 nt, Artificial Sequence
  Description of Artificial Sequence: Synthetic oligonucleotide
uacaguauucca

SEQ ID NO: 42961 - RNA, 14 nt, Artificial Sequence
  Description of Artificial Sequence: Synthetic oligonucleotide
cacugaugaauuaa

SEQ ID NO: 42962 - RNA, 11 nt, Artificial Sequence
  Description of Artificial Sequence: Synthetic oligonucleotide
cacaucaucac

SEQ ID NO: 42963 - RNA, 12 nt, Artificial Sequence
  Description of Artificial Sequence: Synthetic oligonucleotide
ucaccaaacaga

SEQ ID NO: 42964 - RNA, 11 nt, Artificial Sequence
  Description of Artificial Sequence: Synthetic oligonucleotide
gaacaugaugg

SEQ ID NO: 42965 - RNA, 11 nt, Artificial Sequence
  Description of Artificial Sequence: Synthetic oligonucleotide
auguagacugc

SEQ ID NO: 42966 - RNA, 12 nt, Artificial Sequence
  Description of Artificial Sequence: Synthetic oligonucleotide
gaucuauuuaug

SEQ ID NO: 42967 - RNA, 11 nt, Artificial Sequence
  Description of Artificial Sequence: Synthetic oligonucleotide
cacuauuauca

SEQ ID NO: 42968 - RNA, 10 nt, Artificial Sequence
  Description of Artificial Sequence: Synthetic oligonucleotide
ucaguucugc

SEQ ID NO: 42969 - RNA, 12 nt, Artificial Sequence
  Description of Artificial Sequence: Synthetic oligonucleotide
gauuaaaccuac

SEQ ID NO: 42970 - RNA, 12 nt, Artificial Sequence
  Description of Artificial Sequence: Synthetic oligonucleotide
uaaaauccuucu

SEQ ID NO: 42971 - RNA, 11 nt, Artificial Sequence
  Description of Artificial Sequence: Synthetic oligonucleotide
augcuguagac

SEQ ID NO: 42972 - RNA, 12 nt, Artificial Sequence
  Description of Artificial Sequence: Synthetic oligonucleotide
ugauaggaauag

SEQ ID NO: 42973 - RNA, 10 nt, Artificial Sequence
  Description of Artificial Sequence: Synthetic oligonucleotide
auggcccuga

SEQ ID NO: 42974 - RNA, 10 nt, Artificial Sequence
  Description of Artificial Sequence: Synthetic oligonucleotide
uccucaagca

SEQ ID NO: 42975 - RNA, 9 nt, Artificial Sequence
  Description of Artificial Sequence: Synthetic oligonucleotide
uucagccca

SEQ ID NO: 42976 - RNA, 10 nt, Artificial Sequence
  Description of Artificial Sequence: Synthetic oligonucleotide
cugcugaacc

SEQ ID NO: 42977 - RNA, 11 nt, Artificial Sequence
  Description of Artificial Sequence: Synthetic oligonucleotide
aguucucuuca

SEQ ID NO: 42978 - RNA, 10 nt, Artificial Sequence
  Description of Artificial Sequence: Synthetic oligonucleotide
cagccuagag

SEQ ID NO: 42979 - RNA, 12 nt, Artificial Sequence
  Description of Artificial Sequence: Synthetic oligonucleotide
ucugugaagugu

SEQ ID NO: 42980 - RNA, 13 nt, Artificial Sequence
  Description of Artificial Sequence: Synthetic oligonucleotide
gagaaaauuucaa

SEQ ID NO: 42981 - RNA, 10 nt, Artificial Sequence
  Description of Artificial Sequence: Synthetic oligonucleotide
auccuccuga

SEQ ID NO: 42982 - RNA, 11 nt, Artificial Sequence
  Description of Artificial Sequence: Synthetic oligonucleotide
ugacaucauau

SEQ ID NO: 42983 - RNA, 12 nt, Artificial Sequence
  Description of Artificial Sequence: Synthetic oligonucleotide
aucuucaucaua

SEQ ID NO: 42984 - RNA, 12 nt, Artificial Sequence
  Description of Artificial Sequence: Synthetic oligonucleotide
acuagcuauuaa

SEQ ID NO: 42985 - RNA, 13 nt, Artificial Sequence
  Description of Artificial Sequence: Synthetic oligonucleotide
cucuacuaaaaau

SEQ ID NO: 42986 - RNA, 11 nt, Artificial Sequence
  Description of Artificial Sequence: Synthetic oligonucleotide
cuaucucgccu

SEQ ID NO: 42987 - RNA, 12 nt, Artificial Sequence
  Description of Artificial Sequence: Synthetic oligonucleotide
uucgguccaguu

SEQ ID NO: 42988 - RNA, 10 nt, Artificial Sequence
  Description of Artificial Sequence: Synthetic oligonucleotide
auguagccgc

SEQ ID NO: 42989 - RNA, 11 nt, Artificial Sequence
  Description of Artificial Sequence: Synthetic oligonucleotide
gaggagacuug

SEQ ID NO: 42990 - RNA, 11 nt, Artificial Sequence
  Description of Artificial Sequence: Synthetic oligonucleotide
aguagugagga

SEQ ID NO: 42991 - RNA, 13 nt, Artificial Sequence
  Description of Artificial Sequence: Synthetic oligonucleotide
agaugaguacaaa

SEQ ID NO: 42992 - RNA, 12 nt, Artificial Sequence
  Description of Artificial Sequence: Synthetic oligonucleotide
uuguuaaugggc

SEQ ID NO: 42993 - RNA, 12 nt, Artificial Sequence
  Description of Artificial Sequence: Synthetic oligonucleotide
uuuuaauuuauu

SEQ ID NO: 42994 - RNA, 11 nt, Artificial Sequence
  Description of Artificial Sequence: Synthetic oligonucleotide
auuuaaauaug

SEQ ID NO: 42995 - RNA, 12 nt, Artificial Sequence
  Description of Artificial Sequence: Synthetic oligonucleotide
auccuuuguuuc

SEQ ID NO: 42996 - RNA, 13 nt, Artificial Sequence
  Description of Artificial Sequence: Synthetic oligonucleotide
gucuaaguguuug

SEQ ID NO: 42997 - RNA, 11 nt, Artificial Sequence
  Description of Artificial Sequence: Synthetic oligonucleotide
ccugugacaaa

SEQ ID NO: 42998 - RNA, 12 nt, Artificial Sequence
  Description of Artificial Sequence: Synthetic oligonucleotide
caggcugaauua

SEQ ID NO: 42999 - RNA, 13 nt, Artificial Sequence
  Description of Artificial Sequence: Synthetic oligonucleotide
ucauucuuacaau

SEQ ID NO: 43000 - RNA, 14 nt, Artificial Sequence
  Description of Artificial Sequence: Synthetic oligonucleotide
cauucuuacaauug

SEQ ID NO: 43001 - RNA, 11 nt, Artificial Sequence
  Description of Artificial Sequence: Synthetic oligonucleotide
agagaguguac

SEQ ID NO: 43002 - RNA, 11 nt, Artificial Sequence
  Description of Artificial Sequence: Synthetic oligonucleotide
gaacucagcag

SEQ ID NO: 43003 - RNA, 12 nt, Artificial Sequence
  Description of Artificial Sequence: Synthetic oligonucleotide
uuauuuucagua

SEQ ID NO: 43004 - RNA, 11 nt, Artificial Sequence
  Description of Artificial Sequence: Synthetic oligonucleotide
cuuaaauggaa

SEQ ID NO: 43005 - RNA, 12 nt, Artificial Sequence
  Description of Artificial Sequence: Synthetic oligonucleotide
gccuaaaauugu

SEQ ID NO: 43006 - RNA, 12 nt, Artificial Sequence
  Description of Artificial Sequence: Synthetic oligonucleotide
acuaacaucugg

SEQ ID NO: 43007 - RNA, 11 nt, Artificial Sequence
  Description of Artificial Sequence: Synthetic oligonucleotide
gacugugagcu

SEQ ID NO: 43008 - RNA, 13 nt, Artificial Sequence
  Description of Artificial Sequence: Synthetic oligonucleotide
gcuuuuuauuaau

SEQ ID NO: 43009 - RNA, 12 nt, Artificial Sequence
  Description of Artificial Sequence: Synthetic oligonucleotide
ucuucuuacauu

SEQ ID NO: 43010 - RNA, 14 nt, Artificial Sequence
  Description of Artificial Sequence: Synthetic oligonucleotide
auuuguaaaaaugu

SEQ ID NO: 43011 - RNA, 14 nt, Artificial Sequence
  Description of Artificial Sequence: Synthetic oligonucleotide
ucuuaauucauauu

SEQ ID NO: 43012 - RNA, 12 nt, Artificial Sequence
  Description of Artificial Sequence: Synthetic oligonucleotide
aacuaaucauga

SEQ ID NO: 43013 - RNA, 11 nt, Artificial Sequence
  Description of Artificial Sequence: Synthetic oligonucleotide
cugcucuuggg

SEQ ID NO: 43014 - RNA, 12 nt, Artificial Sequence
  Description of Artificial Sequence: Synthetic oligonucleotide
aguagcuuugag

SEQ ID NO: 43015 - RNA, 13 nt, Artificial Sequence
  Description of Artificial Sequence: Synthetic oligonucleotide
acguaauauuuca

SEQ ID NO: 43016 - RNA, 12 nt, Artificial Sequence
  Description of Artificial Sequence: Synthetic oligonucleotide
auucucuucacu

SEQ ID NO: 43017 - RNA, 13 nt, Artificial Sequence
  Description of Artificial Sequence: Synthetic oligonucleotide
uaaugcuaagaaa

SEQ ID NO: 43018 - RNA, 11 nt, Artificial Sequence
  Description of Artificial Sequence: Synthetic oligonucleotide
cugaaaaucaa

SEQ ID NO: 43019 - RNA, 13 nt, Artificial Sequence
  Description of Artificial Sequence: Synthetic oligonucleotide
auaugauuacuuu

SEQ ID NO: 43020 - RNA, 13 nt, Artificial Sequence
  Description of Artificial Sequence: Synthetic oligonucleotide
auuuuguucuaca

SEQ ID NO: 43021 - RNA, 11 nt, Artificial Sequence
  Description of Artificial Sequence: Synthetic oligonucleotide
ccgggacucuc

SEQ ID NO: 43022 - RNA, 13 nt, Artificial Sequence
  Description of Artificial Sequence: Synthetic oligonucleotide
cuuuaaaguaaag

SEQ ID NO: 43023 - RNA, 12 nt, Artificial Sequence
  Description of Artificial Sequence: Synthetic oligonucleotide
cuggaagccugg

SEQ ID NO: 43024 - RNA, 13 nt, Artificial Sequence
  Description of Artificial Sequence: Synthetic oligonucleotide
aaacaaaagagag

SEQ ID NO: 43025 - RNA, 12 nt, Artificial Sequence
  Description of Artificial Sequence: Synthetic oligonucleotide
ucaguuaugccg

SEQ ID NO: 43026 - RNA, 12 nt, Artificial Sequence
  Description of Artificial Sequence: Synthetic oligonucleotide
aaaagaagucca

SEQ ID NO: 43027 - RNA, 10 nt, Artificial Sequence
  Description of Artificial Sequence: Synthetic oligonucleotide
ggugagguua

SEQ ID NO: 43028 - RNA, 10 nt, Artificial Sequence
  Description of Artificial Sequence: Synthetic oligonucleotide
ggaagaggac

SEQ ID NO: 43029 - RNA, 12 nt, Artificial Sequence
  Description of Artificial Sequence: Synthetic oligonucleotide
agcaaguauugu

SEQ ID NO: 43030 - RNA, 11 nt, Artificial Sequence
  Description of Artificial Sequence: Synthetic oligonucleotide
uuguagcacuc

SEQ ID NO: 43031 - RNA, 13 nt, Artificial Sequence
  Description of Artificial Sequence: Synthetic oligonucleotide
caaaaccacaaau

SEQ ID NO: 43032 - RNA, 11 nt, Artificial Sequence
  Description of Artificial Sequence: Synthetic oligonucleotide
aagcccauaca

SEQ ID NO: 43033 - RNA, 10 nt, Artificial Sequence
  Description of Artificial Sequence: Synthetic oligonucleotide
gcccauacag

SEQ ID NO: 43034 - RNA, 11 nt, Artificial Sequence
  Description of Artificial Sequence: Synthetic oligonucleotide
agaaaccuucc

SEQ ID NO: 43035 - RNA, 9 nt, Artificial Sequence
  Description of Artificial Sequence: Synthetic oligonucleotide
uauaccuac

SEQ ID NO: 43036 - RNA, 12 nt, Artificial Sequence
  Description of Artificial Sequence: Synthetic oligonucleotide
ccaguuuucgga

SEQ ID NO: 43037 - RNA, 8 nt, Artificial Sequence
  Description of Artificial Sequence: Synthetic oligonucleotide
gaacaggg

SEQ ID NO: 43038 - RNA, 12 nt, Artificial Sequence
  Description of Artificial Sequence: Synthetic oligonucleotide
uaacuuuccagu

SEQ ID NO: 43039 - RNA, 13 nt, Artificial Sequence
  Description of Artificial Sequence: Synthetic oligonucleotide
aaguuugguuuug

SEQ ID NO: 43040 - RNA, 11 nt, Artificial Sequence
  Description of Artificial Sequence: Synthetic oligonucleotide
uucccacugua

SEQ ID NO: 43041 - RNA, 12 nt, Artificial Sequence
  Description of Artificial Sequence: Synthetic oligonucleotide
gauaccauauga

SEQ ID NO: 43042 - RNA, 10 nt, Artificial Sequence
  Description of Artificial Sequence: Synthetic oligonucleotide
acaugggcug

SEQ ID NO: 43043 - RNA, 12 nt, Artificial Sequence
  Description of Artificial Sequence: Synthetic oligonucleotide
aacuuuuucaua

SEQ ID NO: 43044 - RNA, 11 nt, Artificial Sequence
  Description of Artificial Sequence: Synthetic oligonucleotide
augaggccgga

SEQ ID NO: 43045 - RNA, 10 nt, Artificial Sequence
  Description of Artificial Sequence: Synthetic oligonucleotide
cugcauuugu

SEQ ID NO: 43046 - RNA, 12 nt, Artificial Sequence
  Description of Artificial Sequence: Synthetic oligonucleotide
auguuuacuacc

SEQ ID NO: 43047 - RNA, 14 nt, Artificial Sequence
  Description of Artificial Sequence: Synthetic oligonucleotide
auuuuuugaugaaa

SEQ ID NO: 43048 - RNA, 13 nt, Artificial Sequence
  Description of Artificial Sequence: Synthetic oligonucleotide
agugugugaauuu

SEQ ID NO: 43049 - RNA, 12 nt, Artificial Sequence
  Description of Artificial Sequence: Synthetic oligonucleotide
agcaauguaugu

SEQ ID NO: 43050 - RNA, 13 nt, Artificial Sequence
  Description of Artificial Sequence: Synthetic oligonucleotide
aagcacauauaua

SEQ ID NO: 43051 - RNA, 13 nt, Artificial Sequence
  Description of Artificial Sequence: Synthetic oligonucleotide
uaauaguuucucc

SEQ ID NO: 43052 - RNA, 12 nt, Artificial Sequence
  Description of Artificial Sequence: Synthetic oligonucleotide
guuucuccaaau

SEQ ID NO: 43053 - RNA, 12 nt, Artificial Sequence
  Description of Artificial Sequence: Synthetic oligonucleotide
acuuccuagaaa

SEQ ID NO: 43054 - RNA, 12 nt, Artificial Sequence
  Description of Artificial Sequence: Synthetic oligonucleotide
acaccauauaug

SEQ ID NO: 43055 - RNA, 13 nt, Artificial Sequence
  Description of Artificial Sequence: Synthetic oligonucleotide
uauaugaauggag

SEQ ID NO: 43056 - RNA, 12 nt, Artificial Sequence
  Description of Artificial Sequence: Synthetic oligonucleotide
cauuuacaggga

SEQ ID NO: 43057 - RNA, 12 nt, Artificial Sequence
  Description of Artificial Sequence: Synthetic oligonucleotide
auuuacagggac

SEQ ID NO: 43058 - RNA, 9 nt, Artificial Sequence
  Description of Artificial Sequence: Synthetic oligonucleotide
gggaccuga

SEQ ID NO: 43059 - RNA, 13 nt, Artificial Sequence
  Description of Artificial Sequence: Synthetic oligonucleotide
guuugacugcauc

SEQ ID NO: 43060 - RNA, 12 nt, Artificial Sequence
  Description of Artificial Sequence: Synthetic oligonucleotide
uugacugcaucg

SEQ ID NO: 43061 - RNA, 11 nt, Artificial Sequence
  Description of Artificial Sequence: Synthetic oligonucleotide
aguucacaggg

SEQ ID NO: 43062 - RNA, 12 nt, Artificial Sequence
  Description of Artificial Sequence: Synthetic oligonucleotide
gcaccucugucc

SEQ ID NO: 43063 - RNA, 14 nt, Artificial Sequence
  Description of Artificial Sequence: Synthetic oligonucleotide
guuugucuuuuuaa

SEQ ID NO: 43064 - RNA, 13 nt, Artificial Sequence
  Description of Artificial Sequence: Synthetic oligonucleotide
uugucuuuuuaag

SEQ ID NO: 43065 - RNA, 12 nt, Artificial Sequence
  Description of Artificial Sequence: Synthetic oligonucleotide
cuaaagguuguc

SEQ ID NO: 43066 - RNA, 11 nt, Artificial Sequence
  Description of Artificial Sequence: Synthetic oligonucleotide
agguugucgac

SEQ ID NO: 43067 - RNA, 12 nt, Artificial Sequence
  Description of Artificial Sequence: Synthetic oligonucleotide
ccuggcaauugu

SEQ ID NO: 43068 - RNA, 11 nt, Artificial Sequence
  Description of Artificial Sequence: Synthetic oligonucleotide
guggugcgagg

SEQ ID NO: 43069 - RNA, 12 nt, Artificial Sequence
  Description of Artificial Sequence: Synthetic oligonucleotide
gagacaugaaau

SEQ ID NO: 43070 - RNA, 12 nt, Artificial Sequence
  Description of Artificial Sequence: Synthetic oligonucleotide
uauauuucucca

SEQ ID NO: 43071 - RNA, 9 nt, Artificial Sequence
  Description of Artificial Sequence: Synthetic oligonucleotide
augaaggcu

SEQ ID NO: 43072 - RNA, 10 nt, Artificial Sequence
  Description of Artificial Sequence: Synthetic oligonucleotide
cuggaguggu

SEQ ID NO: 43073 - RNA, 10 nt, Artificial Sequence
  Description of Artificial Sequence: Synthetic oligonucleotide
ggaagagagg

SEQ ID NO: 43074 - RNA, 11 nt, Artificial Sequence
  Description of Artificial Sequence: Synthetic oligonucleotide
uugcaucgggc

SEQ ID NO: 43075 - RNA, 12 nt, Artificial Sequence
  Description of Artificial Sequence: Synthetic oligonucleotide
uauccuacugug

SEQ ID NO: 43076 - RNA, 12 nt, Artificial Sequence
  Description of Artificial Sequence: Synthetic oligonucleotide
ccuacuguguaa

SEQ ID NO: 43077 - RNA, 11 nt, Artificial Sequence
  Description of Artificial Sequence: Synthetic oligonucleotide
cuuguagugua

SEQ ID NO: 43078 - RNA, 12 nt, Artificial Sequence
  Description of Artificial Sequence: Synthetic oligonucleotide
cuuuguugauug

SEQ ID NO: 43079 - RNA, 13 nt, Artificial Sequence
  Description of Artificial Sequence: Synthetic oligonucleotide
uuguugauugaaa

SEQ ID NO: 43080 - RNA, 14 nt, Artificial Sequence
  Description of Artificial Sequence: Synthetic oligonucleotide
ucuuuuucuuccau

SEQ ID NO: 43081 - RNA, 12 nt, Artificial Sequence
  Description of Artificial Sequence: Synthetic oligonucleotide
aucuuccuucua

SEQ ID NO: 43082 - RNA, 12 nt, Artificial Sequence
  Description of Artificial Sequence: Synthetic oligonucleotide
ugaaugcuucau

SEQ ID NO: 43083 - RNA, 12 nt, Artificial Sequence
  Description of Artificial Sequence: Synthetic oligonucleotide
gaaugcuucaug

SEQ ID NO: 43084 - RNA, 12 nt, Artificial Sequence
  Description of Artificial Sequence: Synthetic oligonucleotide
auucuacuuuga

SEQ ID NO: 43085 - RNA, 12 nt, Artificial Sequence
  Description of Artificial Sequence: Synthetic oligonucleotide
gcaacuacagac

SEQ ID NO: 43086 - RNA, 12 nt, Artificial Sequence
  Description of Artificial Sequence: Synthetic oligonucleotide
accaaggucaac

SEQ ID NO: 43087 - RNA, 12 nt, Artificial Sequence
  Description of Artificial Sequence: Synthetic oligonucleotide
gacuaucucgac

SEQ ID NO: 43088 - RNA, 12 nt, Artificial Sequence
  Description of Artificial Sequence: Synthetic oligonucleotide
accuucccaaac

SEQ ID NO: 43089 - RNA, 13 nt, Artificial Sequence
  Description of Artificial Sequence: Synthetic oligonucleotide
caagcuuagaacu

SEQ ID NO: 43090 - RNA, 14 nt, Artificial Sequence
  Description of Artificial Sequence: Synthetic oligonucleotide
gcuuagaacuuuaa

SEQ ID NO: 43091 - RNA, 13 nt, Artificial Sequence
  Description of Artificial Sequence: Synthetic oligonucleotide
aacuuuaagcaac

SEQ ID NO: 43092 - RNA, 10 nt, Artificial Sequence
  Description of Artificial Sequence: Synthetic oligonucleotide
agaccaccac

SEQ ID NO: 43093 - RNA, 13 nt, Artificial Sequence
  Description of Artificial Sequence: Synthetic oligonucleotide
cgagaaauaaagu

SEQ ID NO: 43094 - RNA, 13 nt, Artificial Sequence
  Description of Artificial Sequence: Synthetic oligonucleotide
gagaaauaaaguu

SEQ ID NO: 43095 - RNA, 11 nt, Artificial Sequence
  Description of Artificial Sequence: Synthetic oligonucleotide
ggaaaugaucc

SEQ ID NO: 43096 - RNA, 12 nt, Artificial Sequence
  Description of Artificial Sequence: Synthetic oligonucleotide
aagaaaugaaac

SEQ ID NO: 43097 - RNA, 12 nt, Artificial Sequence
  Description of Artificial Sequence: Synthetic oligonucleotide
uuuccauccucc

SEQ ID NO: 43098 - RNA, 14 nt, Artificial Sequence
  Description of Artificial Sequence: Synthetic oligonucleotide
cugaaaaucuuuga

SEQ ID NO: 43099 - RNA, 10 nt, Artificial Sequence
  Description of Artificial Sequence: Synthetic oligonucleotide
gccguucagg

SEQ ID NO: 43100 - RNA, 12 nt, Artificial Sequence
  Description of Artificial Sequence: Synthetic oligonucleotide
aggguccagaag

SEQ ID NO: 43101 - RNA, 12 nt, Artificial Sequence
  Description of Artificial Sequence: Synthetic oligonucleotide
caagacugcuug

SEQ ID NO: 43102 - RNA, 12 nt, Artificial Sequence
  Description of Artificial Sequence: Synthetic oligonucleotide
ccaugucuuugg

SEQ ID NO: 43103 - RNA, 10 nt, Artificial Sequence
  Description of Artificial Sequence: Synthetic oligonucleotide
ccugaaacac

SEQ ID NO: 43104 - RNA, 11 nt, Artificial Sequence
  Description of Artificial Sequence: Synthetic oligonucleotide
cucuguaccuc

SEQ ID NO: 43105 - RNA, 11 nt, Artificial Sequence
  Description of Artificial Sequence: Synthetic oligonucleotide
gcaagacaaga

SEQ ID NO: 43106 - RNA, 12 nt, Artificial Sequence
  Description of Artificial Sequence: Synthetic oligonucleotide
caagacaagaaa

SEQ ID NO: 43107 - RNA, 11 nt, Artificial Sequence
  Description of Artificial Sequence: Synthetic oligonucleotide
guacaagaucc

SEQ ID NO: 43108 - RNA, 11 nt, Artificial Sequence
  Description of Artificial Sequence: Synthetic oligonucleotide
guacuugcaga

SEQ ID NO: 43109 - RNA, 12 nt, Artificial Sequence
  Description of Artificial Sequence: Synthetic oligonucleotide
gaucgauacaga

SEQ ID NO: 43110 - RNA, 12 nt, Artificial Sequence
  Description of Artificial Sequence: Synthetic oligonucleotide
auaaaaauaaau

SEQ ID NO: 43111 - RNA, 12 nt, Artificial Sequence
  Description of Artificial Sequence: Synthetic oligonucleotide
aaaaauaaauau

SEQ ID NO: 43112 - RNA, 12 nt, Artificial Sequence
  Description of Artificial Sequence: Synthetic oligonucleotide
uugacugcugug

SEQ ID NO: 43113 - RNA, 12 nt, Artificial Sequence
  Description of Artificial Sequence: Synthetic oligonucleotide
gagaugagagac

SEQ ID NO: 43114 - RNA, 9 nt, Artificial Sequence
  Description of Artificial Sequence: Synthetic oligonucleotide
cccacuugg

SEQ ID NO: 43115 - RNA, 3385 nt, Homo sapiens
ggcucccgcgggcgcgcggcggggaaggccagaggaccugggcgcgggcgaugugccuccugagcguccaaaccgggggugaggcgcggucacgcccagcgggaaccgcaggcgccgaagcccggguacugggcccagaaucccgcggaauuuuggauccgagggaggcgcuggggcgcgggaccucgggcguggggucccgggcgcuggaucggcgcggacgggaggcggcgcuggucccgcgggccagcgggucucgggagggggcgcccgaucccgcgucuccggcgccgcuucccgggaaguuucaaguuugaaaguccuggcggagggucugcggcuuccgggaccggaguggcugagaggagggccccaagcggccggagcggcgccauggaggagggggcgccgcggcagccugggccgagccaguggcccccagaggaugagaaggaggugauccgccgggccauccagaaagagcugaagaucaaggaggggguggagaaccugcggcgcguggccacagaccgccgccacuugggccaugugcagcagcugcugcgguccuccaaccgccgccuggagcagcugcauggcgagcugcgggagcugcacgcccgaauccugcugcccggcccugggccuggcccagcugagccuguggccucaggaccccggccgugggcagagcagcucagggcucggcaccuagaggcucuccggaggcagcugcauguggagcugaaggugaagcagggggcugagaacaugacccacacgugcgccaguggcacccccaaggagaggaagcuccuggcagcugcccagcagaugcugcgggacagccagcugaagguggcccugcugcggaugaagaucagcagccuggaggccaguggguccccggagccagggccugagcugcuggcggaggagcuacagcaucgacugcacguugaggcagcuguggcugagggcgccaagaacguggugaaacugcuuaguagccggagaacacaggaccgcaaggcacuggcugaggcccaggcccagcuacaggaguccucucagaaacuggaccuccugcgccuggccuuggagcagcugcuggagcaacugccuccugcccacccuuugcgcagcagagugacccgagaguugcgggcugcggugccuggauacccccagccuucagggacaccugugaagcccaccgcccuaacagggacacugcagguccgccuccugggcugugaacaguugcugacagccgugccugggcgcuccccagcggccgcacuggccagcagccccuccgagggcuggcuucggaccaaggccaagcaccagcguggccgaggcgagcuugccagcgaggugcuggcugugcuaaagguggacaaccguguuguggggcagacgggcugggggcagguggccgaacaguccugggaccagaccuuugucaucccacuggagcgagcccgugagcuggagauugggguacacuggcgggacuggcggcagcuauguggcguggccuuccugagacuugaggacuuccuggacaaugccugucaccaacugucccucagccugguaccgcagggacugcuuuuugcccaggugaccuucugcgauccugucauugagaggcggccccggcugcagaggcaggaacgcaucuucucuaaacgcagaggccaggacuuccugagggcuucgcagaugaaccucggcauggcggccugggggcgccucgucaugaaccugcugccccccugcagcuccccgagcacaaucagccccccuaaaggaugcccucggaccccaacaacacugcgagaggccucugacccugccacucccaguaauuuccugcccaagaagacccccuugggugaagagaugacacccccacccaagcccccacgccucuaccucccccaggagccaacauccgaggagacuccgcgcaccaaacguccccauauggagccuaggacucgacgugggccaucuccaccagccucccccaccaggaaacccccucggcuucaggacuuccgcugcuuagcugugcugggccggggacacuuugggaagguccuccugguccaguucaaggggacagggaaauacuacgccaucaaagcacugaagaagcaggaggugcucagccgggacgagauagagagccuguacugcgagaagcggauccuggaggcugugggcugcacagggcacccuuuccugcucucccuccuugccugcuuccagaccuccagccaugccugcuuugugacugaguuugugccugguggugaccucaugaugcagauccacgaggaugucuuccccgagccccaggcccgcuucuacguggcuuguguuguccuggggcugcaguucuuacacgagaagaagaucauuuacagggaccugaaguuggauaaccuucugcuggaugcccagggauuccugaagaucgcagacuuuggacucugcaaggaagggaucggcuucggggaccggacuagcaccuucuguggcaccccggaguuccuggcucccgaggugcugacccaggaggcauacacacgggcuguggacuggugggggcugggugugcugcucuacgagaugcuggugggugagugcccguucccaggggacacagaggaagagguguuugacugcaucgucaacauggacgcccccuaccccggcuuucugucggugcaagggcuugaguucauucagaagcuccuccagaagugcccggagaagcgccucggggcaggugagcaggaugccgaggagaucaagguccagccauucuucaggaccaccaacuggcaagcccugcucgcccgcaccauccagccccccuucgugccuacccuguguggcccugcggaccugcgcuacuuugagggcgaguucacagggcugccgccugcccugaccccaccugcaccccacagccuccucacugcccgccaacaggccgccuuccgggacuucgacuuugugucagagcgauuccuggaacccugagggcaucuccuggcaccucuguccccuucccccacagacuguuagagccucugcucguucacccgugcgcccugccuggagguccaggccuugcuggguacuucugagcccuugggauucaaaguggcagccauggggccacuguugugggcuuugcucagugucacugggcaaagugugucccuucccccuccagcucgcccucuucuaccucccagcgagaccuggcccagaaagggugccgcagcaaggagugauaugguuugucuuuuuaagacuggacuugcuuuauauuaaauuuguaaaagugugcaaaaaaaaa

SEQ ID NO: 43116 - RNA, 19 nt, Artificial Sequence
  Description of Artificial Sequence: Synthetic oligonucleotide
ggcucccgcgggcgcgcgg

SEQ ID NO: 43117 - RNA, 19 nt, Artificial Sequence
  Description of Artificial Sequence: Synthetic oligonucleotide
gcggggaaggccagaggac

SEQ ID NO: 43118 - RNA, 19 nt, Artificial Sequence
  Description of Artificial Sequence: Synthetic oligonucleotide
ccugggcgcgggcgaugug

SEQ ID NO: 43119 - RNA, 19 nt, Artificial Sequence
  Description of Artificial Sequence: Synthetic oligonucleotide
gccuccugagcguccaaac

SEQ ID NO: 43120 - RNA, 19 nt, Artificial Sequence
  Description of Artificial Sequence: Synthetic oligonucleotide
ccgggggugaggcgcgguc

SEQ ID NO: 43121 - RNA, 19 nt, Artificial Sequence
  Description of Artificial Sequence: Synthetic oligonucleotide
cacgcccagcgggaaccgc

SEQ ID NO: 43122 - RNA, 19 nt, Artificial Sequence
  Description of Artificial Sequence: Synthetic oligonucleotide
caggcgccgaagcccgggu

SEQ ID NO: 43123 - RNA, 19 nt, Artificial Sequence
  Description of Artificial Sequence: Synthetic oligonucleotide
uacugggcccagaaucccg

SEQ ID NO: 43124 - RNA, 19 nt, Artificial Sequence
  Description of Artificial Sequence: Synthetic oligonucleotide
gcggaauuuuggauccgag

SEQ ID NO: 43125 - RNA, 19 nt, Artificial Sequence
  Description of Artificial Sequence: Synthetic oligonucleotide
gggaggcgcuggggcgcgg

SEQ ID NO: 43126 - RNA, 19 nt, Artificial Sequence
  Description of Artificial Sequence: Synthetic oligonucleotide
ggaccucgggcgugggguc

SEQ ID NO: 43127 - RNA, 19 nt, Artificial Sequence
  Description of Artificial Sequence: Synthetic oligonucleotide
cccgggcgcuggaucggcg

SEQ ID NO: 43128 - RNA, 19 nt, Artificial Sequence
  Description of Artificial Sequence: Synthetic oligonucleotide
gcggacgggaggcggcgcu

SEQ ID NO: 43129 - RNA, 19 nt, Artificial Sequence
  Description of Artificial Sequence: Synthetic oligonucleotide
uggucccgcgggccagcgg

SEQ ID NO: 43130 - RNA, 19 nt, Artificial Sequence
  Description of Artificial Sequence: Synthetic oligonucleotide
ggucucgggagggggcgcc

SEQ ID NO: 43131 - RNA, 19 nt, Artificial Sequence
  Description of Artificial Sequence: Synthetic oligonucleotide
ccgaucccgcgucuccggc

SEQ ID NO: 43132 - RNA, 19 nt, Artificial Sequence
  Description of Artificial Sequence: Synthetic oligonucleotide
cgccgcuucccgggaaguu

SEQ ID NO: 43133 - RNA, 19 nt, Artificial Sequence
  Description of Artificial Sequence: Synthetic oligonucleotide
uucaaguuugaaaguccug

SEQ ID NO: 43134 - RNA, 19 nt, Artificial Sequence
  Description of Artificial Sequence: Synthetic oligonucleotide
ggcggagggucugcggcuu

SEQ ID NO: 43135 - RNA, 19 nt, Artificial Sequence
  Description of Artificial Sequence: Synthetic oligonucleotide
uccgggaccggaguggcug

SEQ ID NO: 43136 - RNA, 19 nt, Artificial Sequence
  Description of Artificial Sequence: Synthetic oligonucleotide
gagaggagggccccaagcg

SEQ ID NO: 43137 - RNA, 19 nt, Artificial Sequence
  Description of Artificial Sequence: Synthetic oligonucleotide
ggccggagcggcgccaugg

SEQ ID NO: 43138 - RNA, 19 nt, Artificial Sequence
  Description of Artificial Sequence: Synthetic oligonucleotide
gaggagggggcgccgcggc

SEQ ID NO: 43139 - RNA, 19 nt, Artificial Sequence
  Description of Artificial Sequence: Synthetic oligonucleotide
cagccugggccgagccagu

SEQ ID NO: 43140 - RNA, 19 nt, Artificial Sequence
  Description of Artificial Sequence: Synthetic oligonucleotide
uggcccccagaggaugaga

SEQ ID NO: 43141 - RNA, 19 nt, Artificial Sequence
  Description of Artificial Sequence: Synthetic oligonucleotide
aaggaggugauccgccggg

SEQ ID NO: 43142 - RNA, 19 nt, Artificial Sequence
  Description of Artificial Sequence: Synthetic oligonucleotide
gccauccagaaagagcuga

SEQ ID NO: 43143 - RNA, 19 nt, Artificial Sequence
  Description of Artificial Sequence: Synthetic oligonucleotide
aagaucaaggagggggugg

SEQ ID NO: 43144 - RNA, 19 nt, Artificial Sequence
  Description of Artificial Sequence: Synthetic oligonucleotide
gagaaccugcggcgcgugg

SEQ ID NO: 43145 - RNA, 19 nt, Artificial Sequence
  Description of Artificial Sequence: Synthetic oligonucleotide
gccacagaccgccgccacu

SEQ ID NO: 43146 - RNA, 19 nt, Artificial Sequence
  Description of Artificial Sequence: Synthetic oligonucleotide
uugggccaugugcagcagc

SEQ ID NO: 43147 - RNA, 19 nt, Artificial Sequence
  Description of Artificial Sequence: Synthetic oligonucleotide
cugcugcgguccuccaacc

SEQ ID NO: 43148 - RNA, 19 nt, Artificial Sequence
  Description of Artificial Sequence: Synthetic oligonucleotide
cgccgccuggagcagcugc

SEQ ID NO: 43149 - RNA, 19 nt, Artificial Sequence
  Description of Artificial Sequence: Synthetic oligonucleotide
cauggcgagcugcgggagc

SEQ ID NO: 43150 - RNA, 19 nt, Artificial Sequence
  Description of Artificial Sequence: Synthetic oligonucleotide
cugcacgcccgaauccugc

SEQ ID NO: 43151 - RNA, 19 nt, Artificial Sequence
  Description of Artificial Sequence: Synthetic oligonucleotide
cugcccggcccugggccug

SEQ ID NO: 43152 - RNA, 19 nt, Artificial Sequence
  Description of Artificial Sequence: Synthetic oligonucleotide
ggcccagcugagccugugg

SEQ ID NO: 43153 - RNA, 19 nt, Artificial Sequence
  Description of Artificial Sequence: Synthetic oligonucleotide
gccucaggaccccggccgu

SEQ ID NO: 43154 - RNA, 19 nt, Artificial Sequence
  Description of Artificial Sequence: Synthetic oligonucleotide
ugggcagagcagcucaggg

SEQ ID NO: 43155 - RNA, 19 nt, Artificial Sequence
  Description of Artificial Sequence: Synthetic oligonucleotide
gcucggcaccuagaggcuc

SEQ ID NO: 43156 - RNA, 19 nt, Artificial Sequence
  Description of Artificial Sequence: Synthetic oligonucleotide
cuccggaggcagcugcaug

SEQ ID NO: 43157 - RNA, 19 nt, Artificial Sequence
  Description of Artificial Sequence: Synthetic oligonucleotide
guggagcugaaggugaagc

SEQ ID NO: 43158 - RNA, 19 nt, Artificial Sequence
  Description of Artificial Sequence: Synthetic oligonucleotide
cagggggcugagaacauga

SEQ ID NO: 43159 - RNA, 19 nt, Artificial Sequence
  Description of Artificial Sequence: Synthetic oligonucleotide
acccacacgugcgccagug

SEQ ID NO: 43160 - RNA, 19 nt, Artificial Sequence
  Description of Artificial Sequence: Synthetic oligonucleotide
ggcacccccaaggagagga

SEQ ID NO: 43161 - RNA, 19 nt, Artificial Sequence
  Description of Artificial Sequence: Synthetic oligonucleotide
aagcuccuggcagcugccc

SEQ ID NO: 43162 - RNA, 19 nt, Artificial Sequence
  Description of Artificial Sequence: Synthetic oligonucleotide
cagcagaugcugcgggaca

SEQ ID NO: 43163 - RNA, 19 nt, Artificial Sequence
  Description of Artificial Sequence: Synthetic oligonucleotide
agccagcugaagguggccc

SEQ ID NO: 43164 - RNA, 19 nt, Artificial Sequence
  Description of Artificial Sequence: Synthetic oligonucleotide
cugcugcggaugaagauca

SEQ ID NO: 43165 - RNA, 19 nt, Artificial Sequence
  Description of Artificial Sequence: Synthetic oligonucleotide
agcagccuggaggccagug

SEQ ID NO: 43166 - RNA, 19 nt, Artificial Sequence
  Description of Artificial Sequence: Synthetic oligonucleotide
ggguccccggagccagggc

SEQ ID NO: 43167 - RNA, 19 nt, Artificial Sequence
  Description of Artificial Sequence: Synthetic oligonucleotide
ccugagcugcuggcggagg

SEQ ID NO: 43168 - RNA, 19 nt, Artificial Sequence
  Description of Artificial Sequence: Synthetic oligonucleotide
gagcuacagcaucgacugc

SEQ ID NO: 43169 - RNA, 19 nt, Artificial Sequence
  Description of Artificial Sequence: Synthetic oligonucleotide
cacguugaggcagcugugg

SEQ ID NO: 43170 - RNA, 19 nt, Artificial Sequence
  Description of Artificial Sequence: Synthetic oligonucleotide
gcugagggcgccaagaacg

SEQ ID NO: 43171 - RNA, 19 nt, Artificial Sequence
  Description of Artificial Sequence: Synthetic oligonucleotide
guggugaaacugcuuagua

SEQ ID NO: 43172 - RNA, 19 nt, Artificial Sequence
  Description of Artificial Sequence: Synthetic oligonucleotide
agccggagaacacaggacc

SEQ ID NO: 43173 - RNA, 19 nt, Artificial Sequence
  Description of Artificial Sequence: Synthetic oligonucleotide
cgcaaggcacuggcugagg

SEQ ID NO: 43174 - RNA, 19 nt, Artificial Sequence
  Description of Artificial Sequence: Synthetic oligonucleotide
gcccaggcccagcuacagg

SEQ ID NO: 43175 - RNA, 19 nt, Artificial Sequence
  Description of Artificial Sequence: Synthetic oligonucleotide
gaguccucucagaaacugg

SEQ ID NO: 43176 - RNA, 19 nt, Artificial Sequence
  Description of Artificial Sequence: Synthetic oligonucleotide
gaccuccugcgccuggccu

SEQ ID NO: 43177 - RNA, 19 nt, Artificial Sequence
  Description of Artificial Sequence: Synthetic oligonucleotide
uuggagcagcugcuggagc

SEQ ID NO: 43178 - RNA, 19 nt, Artificial Sequence
  Description of Artificial Sequence: Synthetic oligonucleotide
caacugccuccugcccacc

SEQ ID NO: 43179 - RNA, 19 nt, Artificial Sequence
  Description of Artificial Sequence: Synthetic oligonucleotide
ccuuugcgcagcagaguga

SEQ ID NO: 43180 - RNA, 19 nt, Artificial Sequence
  Description of Artificial Sequence: Synthetic oligonucleotide
acccgagaguugcgggcug

SEQ ID NO: 43181 - RNA, 19 nt, Artificial Sequence
  Description of Artificial Sequence: Synthetic oligonucleotide
gcggugccuggauaccccc

SEQ ID NO: 43182 - RNA, 19 nt, Artificial Sequence
  Description of Artificial Sequence: Synthetic oligonucleotide
cagccuucagggacaccug

SEQ ID NO: 43183 - RNA, 19 nt, Artificial Sequence
  Description of Artificial Sequence: Synthetic oligonucleotide
gugaagcccaccgcccuaa

SEQ ID NO: 43184 - RNA, 19 nt, Artificial Sequence
  Description of Artificial Sequence: Synthetic oligonucleotide
acagggacacugcaggucc

SEQ ID NO: 43185 - RNA, 19 nt, Artificial Sequence
  Description of Artificial Sequence: Synthetic oligonucleotide
cgccuccugggcugugaac

SEQ ID NO: 43186 - RNA, 19 nt, Artificial Sequence
  Description of Artificial Sequence: Synthetic oligonucleotide
caguugcugacagccgugc

SEQ ID NO: 43187 - RNA, 19 nt, Artificial Sequence
  Description of Artificial Sequence: Synthetic oligonucleotide
ccugggcgcuccccagcgg

SEQ ID NO: 43188 - RNA, 19 nt, Artificial Sequence
  Description of Artificial Sequence: Synthetic oligonucleotide
gccgcacuggccagcagcc

SEQ ID NO: 43189 - RNA, 19 nt, Artificial Sequence
  Description of Artificial Sequence: Synthetic oligonucleotide
cccuccgagggcuggcuuc

SEQ ID NO: 43190 - RNA, 19 nt, Artificial Sequence
  Description of Artificial Sequence: Synthetic oligonucleotide
cggaccaaggccaagcacc

SEQ ID NO: 43191 - RNA, 19 nt, Artificial Sequence
  Description of Artificial Sequence: Synthetic oligonucleotide
cagcguggccgaggcgagc

SEQ ID NO: 43192 - RNA, 19 nt, Artificial Sequence
  Description of Artificial Sequence: Synthetic oligonucleotide
cuugccagcgaggugcugg

SEQ ID NO: 43193 - RNA, 19 nt, Artificial Sequence
  Description of Artificial Sequence: Synthetic oligonucleotide
gcugugcuaaagguggaca

SEQ ID NO: 43194 - RNA, 19 nt, Artificial Sequence
  Description of Artificial Sequence: Synthetic oligonucleotide
aaccguguuguggggcaga

SEQ ID NO: 43195 - RNA, 19 nt, Artificial Sequence
  Description of Artificial Sequence: Synthetic oligonucleotide
acgggcugggggcaggugg

SEQ ID NO: 43196 - RNA, 19 nt, Artificial Sequence
  Description of Artificial Sequence: Synthetic oligonucleotide
gccgaacaguccugggacc

SEQ ID NO: 43197 - RNA, 19 nt, Artificial Sequence
  Description of Artificial Sequence: Synthetic oligonucleotide
cagaccuuugucaucccac

SEQ ID NO: 43198 - RNA, 19 nt, Artificial Sequence
  Description of Artificial Sequence: Synthetic oligonucleotide
cuggagcgagcccgugagc

SEQ ID NO: 43199 - RNA, 19 nt, Artificial Sequence
  Description of Artificial Sequence: Synthetic oligonucleotide
cuggagauugggguacacu

SEQ ID NO: 43200 - RNA, 19 nt, Artificial Sequence
  Description of Artificial Sequence: Synthetic oligonucleotide
uggcgggacuggcggcagc

SEQ ID NO: 43201 - RNA, 19 nt, Artificial Sequence
  Description of Artificial Sequence: Synthetic oligonucleotide
cuauguggcguggccuucc

SEQ ID NO: 43202 - RNA, 19 nt, Artificial Sequence
  Description of Artificial Sequence: Synthetic oligonucleotide
cugagacuugaggacuucc

SEQ ID NO: 43203 - RNA, 19 nt, Artificial Sequence
  Description of Artificial Sequence: Synthetic oligonucleotide
cuggacaaugccugucacc

SEQ ID NO: 43204 - RNA, 19 nt, Artificial Sequence
  Description of Artificial Sequence: Synthetic oligonucleotide
caacugucccucagccugg

SEQ ID NO: 43205 - RNA, 19 nt, Artificial Sequence
  Description of Artificial Sequence: Synthetic oligonucleotide
guaccgcagggacugcuuu

SEQ ID NO: 43206 - RNA, 19 nt, Artificial Sequence
  Description of Artificial Sequence: Synthetic oligonucleotide
uuugcccaggugaccuucu

SEQ ID NO: 43207 - RNA, 19 nt, Artificial Sequence
  Description of Artificial Sequence: Synthetic oligonucleotide
ugcgauccugucauugaga

SEQ ID NO: 43208 - RNA, 19 nt, Artificial Sequence
  Description of Artificial Sequence: Synthetic oligonucleotide
aggcggccccggcugcaga

SEQ ID NO: 43209 - RNA, 19 nt, Artificial Sequence
  Description of Artificial Sequence: Synthetic oligonucleotide
aggcaggaacgcaucuucu

SEQ ID NO: 43210 - RNA, 19 nt, Artificial Sequence
  Description of Artificial Sequence: Synthetic oligonucleotide
ucuaaacgcagaggccagg

SEQ ID NO: 43211 - RNA, 19 nt, Artificial Sequence
  Description of Artificial Sequence: Synthetic oligonucleotide
gacuuccugagggcuucgc

SEQ ID NO: 43212 - RNA, 19 nt, Artificial Sequence
  Description of Artificial Sequence: Synthetic oligonucleotide
cagaugaaccucggcaugg

SEQ ID NO: 43213 - RNA, 19 nt, Artificial Sequence
  Description of Artificial Sequence: Synthetic oligonucleotide
gcggccugggggcgccucg

SEQ ID NO: 43214 - RNA, 19 nt, Artificial Sequence
  Description of Artificial Sequence: Synthetic oligonucleotide
gucaugaaccugcugcccc

SEQ ID NO: 43215 - RNA, 19 nt, Artificial Sequence
  Description of Artificial Sequence: Synthetic oligonucleotide
cccugcagcuccccgagca

SEQ ID NO: 43216 - RNA, 19 nt, Artificial Sequence
  Description of Artificial Sequence: Synthetic oligonucleotide
acaaucagccccccuaaag

SEQ ID NO: 43217 - RNA, 19 nt, Artificial Sequence
  Description of Artificial Sequence: Synthetic oligonucleotide
ggaugcccucggaccccaa

SEQ ID NO: 43218 - RNA, 19 nt, Artificial Sequence
  Description of Artificial Sequence: Synthetic oligonucleotide
acaacacugcgagaggccu

SEQ ID NO: 43219 - RNA, 19 nt, Artificial Sequence
  Description of Artificial Sequence: Synthetic oligonucleotide
ucugacccugccacuccca

SEQ ID NO: 43220 - RNA, 19 nt, Artificial Sequence
  Description of Artificial Sequence: Synthetic oligonucleotide
aguaauuuccugcccaaga

SEQ ID NO: 43221 - RNA, 19 nt, Artificial Sequence
  Description of Artificial Sequence: Synthetic oligonucleotide
aagacccccuugggugaag

SEQ ID NO: 43222 - RNA, 19 nt, Artificial Sequence
  Description of Artificial Sequence: Synthetic oligonucleotide
gagaugacacccccaccca

SEQ ID NO: 43223 - RNA, 19 nt, Artificial Sequence
  Description of Artificial Sequence: Synthetic oligonucleotide
aagcccccacgccucuacc

SEQ ID NO: 43224 - RNA, 19 nt, Artificial Sequence
  Description of Artificial Sequence: Synthetic oligonucleotide
cucccccaggagccaacau

SEQ ID NO: 43225 - RNA, 19 nt, Artificial Sequence
  Description of Artificial Sequence: Synthetic oligonucleotide
uccgaggagacuccgcgca

SEQ ID NO: 43226 - RNA, 19 nt, Artificial Sequence
  Description of Artificial Sequence: Synthetic oligonucleotide
accaaacguccccauaugg

SEQ ID NO: 43227 - RNA, 19 nt, Artificial Sequence
  Description of Artificial Sequence: Synthetic oligonucleotide
gagccuaggacucgacgug

SEQ ID NO: 43228 - RNA, 19 nt, Artificial Sequence
  Description of Artificial Sequence: Synthetic oligonucleotide
gggccaucuccaccagccu

SEQ ID NO: 43229 - RNA, 19 nt, Artificial Sequence
  Description of Artificial Sequence: Synthetic oligonucleotide
ucccccaccaggaaacccc

SEQ ID NO: 43230 - RNA, 19 nt, Artificial Sequence
  Description of Artificial Sequence: Synthetic oligonucleotide
ccucggcuucaggacuucc

SEQ ID NO: 43231 - RNA, 19 nt, Artificial Sequence
  Description of Artificial Sequence: Synthetic oligonucleotide
cgcugcuuagcugugcugg

SEQ ID NO: 43232 - RNA, 19 nt, Artificial Sequence
  Description of Artificial Sequence: Synthetic oligonucleotide
ggccggggacacuuuggga

SEQ ID NO: 43233 - RNA, 19 nt, Artificial Sequence
  Description of Artificial Sequence: Synthetic oligonucleotide
aagguccuccugguccagu

SEQ ID NO: 43234 - RNA, 19 nt, Artificial Sequence
  Description of Artificial Sequence: Synthetic oligonucleotide
uucaaggggacagggaaau

SEQ ID NO: 43235 - RNA, 19 nt, Artificial Sequence
  Description of Artificial Sequence: Synthetic oligonucleotide
uacuacgccaucaaagcac

SEQ ID NO: 43236 - RNA, 19 nt, Artificial Sequence
  Description of Artificial Sequence: Synthetic oligonucleotide
cugaagaagcaggaggugc

SEQ ID NO: 43237 - RNA, 19 nt, Artificial Sequence
  Description of Artificial Sequence: Synthetic oligonucleotide
cucagccgggacgagauag

SEQ ID NO: 43238 - RNA, 19 nt, Artificial Sequence
  Description of Artificial Sequence: Synthetic oligonucleotide
gagagccuguacugcgaga

SEQ ID NO: 43239 - RNA, 19 nt, Artificial Sequence
  Description of Artificial Sequence: Synthetic oligonucleotide
aagcggauccuggaggcug

SEQ ID NO: 43240 - RNA, 19 nt, Artificial Sequence
  Description of Artificial Sequence: Synthetic oligonucleotide
gugggcugcacagggcacc

SEQ ID NO: 43241 - RNA, 19 nt, Artificial Sequence
  Description of Artificial Sequence: Synthetic oligonucleotide
ccuuuccugcucucccucc

SEQ ID NO: 43242 - RNA, 19 nt, Artificial Sequence
  Description of Artificial Sequence: Synthetic oligonucleotide
cuugccugcuuccagaccu

SEQ ID NO: 43243 - RNA, 19 nt, Artificial Sequence
  Description of Artificial Sequence: Synthetic oligonucleotide
uccagccaugccugcuuug

SEQ ID NO: 43244 - RNA, 19 nt, Artificial Sequence
  Description of Artificial Sequence: Synthetic oligonucleotide
gugacugaguuugugccug

SEQ ID NO: 43245 - RNA, 19 nt, Artificial Sequence
  Description of Artificial Sequence: Synthetic oligonucleotide
gguggugaccucaugaugc

SEQ ID NO: 43246 - RNA, 19 nt, Artificial Sequence
  Description of Artificial Sequence: Synthetic oligonucleotide
cagauccacgaggaugucu

SEQ ID NO: 43247 - RNA, 19 nt, Artificial Sequence
  Description of Artificial Sequence: Synthetic oligonucleotide
uuccccgagccccaggccc

SEQ ID NO: 43248 - RNA, 19 nt, Artificial Sequence
  Description of Artificial Sequence: Synthetic oligonucleotide
cgcuucuacguggcuugug

SEQ ID NO: 43249 - RNA, 19 nt, Artificial Sequence
  Description of Artificial Sequence: Synthetic oligonucleotide
guuguccuggggcugcagu

SEQ ID NO: 43250 - RNA, 19 nt, Artificial Sequence
  Description of Artificial Sequence: Synthetic oligonucleotide
uucuuacacgagaagaaga

SEQ ID NO: 43251 - RNA, 19 nt, Artificial Sequence
  Description of Artificial Sequence: Synthetic oligonucleotide
aucauuuacagggaccuga

SEQ ID NO: 43252 - RNA, 19 nt, Artificial Sequence
  Description of Artificial Sequence: Synthetic oligonucleotide
aaguuggauaaccuucugc

SEQ ID NO: 43253 - RNA, 19 nt, Artificial Sequence
  Description of Artificial Sequence: Synthetic oligonucleotide
cuggaugcccagggauucc

SEQ ID NO: 43254 - RNA, 19 nt, Artificial Sequence
  Description of Artificial Sequence: Synthetic oligonucleotide
cugaagaucgcagacuuug

SEQ ID NO: 43255 - RNA, 19 nt, Artificial Sequence
  Description of Artificial Sequence: Synthetic oligonucleotide
ggacucugcaaggaaggga

SEQ ID NO: 43256 - RNA, 19 nt, Artificial Sequence
  Description of Artificial Sequence: Synthetic oligonucleotide
aucggcuucggggaccgga

SEQ ID NO: 43257 - RNA, 19 nt, Artificial Sequence
  Description of Artificial Sequence: Synthetic oligonucleotide
acuagcaccuucuguggca

SEQ ID NO: 43258 - RNA, 19 nt, Artificial Sequence
  Description of Artificial Sequence: Synthetic oligonucleotide
accccggaguuccuggcuc

SEQ ID NO: 43259 - RNA, 19 nt, Artificial Sequence
  Description of Artificial Sequence: Synthetic oligonucleotide
cccgaggugcugacccagg

SEQ ID NO: 43260 - RNA, 19 nt, Artificial Sequence
  Description of Artificial Sequence: Synthetic oligonucleotide
gaggcauacacacgggcug

SEQ ID NO: 43261 - RNA, 19 nt, Artificial Sequence
  Description of Artificial Sequence: Synthetic oligonucleotide
guggacuggugggggcugg

SEQ ID NO: 43262 - RNA, 19 nt, Artificial Sequence
  Description of Artificial Sequence: Synthetic oligonucleotide
ggugugcugcucuacgaga

SEQ ID NO: 43263 - RNA, 19 nt, Artificial Sequence
  Description of Artificial Sequence: Synthetic oligonucleotide
augcuggugggugagugcc

SEQ ID NO: 43264 - RNA, 19 nt, Artificial Sequence
  Description of Artificial Sequence: Synthetic oligonucleotide
ccguucccaggggacacag

SEQ ID NO: 43265 - RNA, 19 nt, Artificial Sequence
  Description of Artificial Sequence: Synthetic oligonucleotide
gaggaagagguguuugacu

SEQ ID NO: 43266 - RNA, 19 nt, Artificial Sequence
  Description of Artificial Sequence: Synthetic oligonucleotide
ugcaucgucaacauggacg

SEQ ID NO: 43267 - RNA, 19 nt, Artificial Sequence
  Description of Artificial Sequence: Synthetic oligonucleotide
gcccccuaccccggcuuuc

SEQ ID NO: 43268 - RNA, 19 nt, Artificial Sequence
  Description of Artificial Sequence: Synthetic oligonucleotide
cugucggugcaagggcuug

SEQ ID NO: 43269 - RNA, 19 nt, Artificial Sequence
  Description of Artificial Sequence: Synthetic oligonucleotide
gaguucauucagaagcucc

SEQ ID NO: 43270 - RNA, 19 nt, Artificial Sequence
  Description of Artificial Sequence: Synthetic oligonucleotide
cuccagaagugcccggaga

SEQ ID NO: 43271 - RNA, 19 nt, Artificial Sequence
  Description of Artificial Sequence: Synthetic oligonucleotide
aagcgccucggggcaggug

SEQ ID NO: 43272 - RNA, 19 nt, Artificial Sequence
  Description of Artificial Sequence: Synthetic oligonucleotide
gagcaggaugccgaggaga

SEQ ID NO: 43273 - RNA, 19 nt, Artificial Sequence
  Description of Artificial Sequence: Synthetic oligonucleotide
aucaagguccagccauucu

SEQ ID NO: 43274 - RNA, 19 nt, Artificial Sequence
  Description of Artificial Sequence: Synthetic oligonucleotide
uucaggaccaccaacuggc

SEQ ID NO: 43275 - RNA, 19 nt, Artificial Sequence
  Description of Artificial Sequence: Synthetic oligonucleotide
caagcccugcucgcccgca

SEQ ID NO: 43276 - RNA, 19 nt, Artificial Sequence
  Description of Artificial Sequence: Synthetic oligonucleotide
accauccagccccccuucg

SEQ ID NO: 43277 - RNA, 19 nt, Artificial Sequence
  Description of Artificial Sequence: Synthetic oligonucleotide
gugccuacccuguguggcc

SEQ ID NO: 43278 - RNA, 19 nt, Artificial Sequence
  Description of Artificial Sequence: Synthetic oligonucleotide
ccugcggaccugcgcuacu

SEQ ID NO: 43279 - RNA, 19 nt, Artificial Sequence
  Description of Artificial Sequence: Synthetic oligonucleotide
uuugagggcgaguucacag

SEQ ID NO: 43280 - RNA, 19 nt, Artificial Sequence
  Description of Artificial Sequence: Synthetic oligonucleotide
gggcugccgccugcccuga

SEQ ID NO: 43281 - RNA, 19 nt, Artificial Sequence
  Description of Artificial Sequence: Synthetic oligonucleotide
accccaccugcaccccaca

SEQ ID NO: 43282 - RNA, 19 nt, Artificial Sequence
  Description of Artificial Sequence: Synthetic oligonucleotide
agccuccucacugcccgcc

SEQ ID NO: 43283 - RNA, 19 nt, Artificial Sequence
  Description of Artificial Sequence: Synthetic oligonucleotide
caacaggccgccuuccggg

SEQ ID NO: 43284 - RNA, 19 nt, Artificial Sequence
  Description of Artificial Sequence: Synthetic oligonucleotide
gacuucgacuuugugucag

SEQ ID NO: 43285 - RNA, 19 nt, Artificial Sequence
  Description of Artificial Sequence: Synthetic oligonucleotide
gagcgauuccuggaacccu

SEQ ID NO: 43286 - RNA, 19 nt, Artificial Sequence
  Description of Artificial Sequence: Synthetic oligonucleotide
ugagggcaucuccuggcac

SEQ ID NO: 43287 - RNA, 19 nt, Artificial Sequence
  Description of Artificial Sequence: Synthetic oligonucleotide
ccucuguccccuuccccca

SEQ ID NO: 43288 - RNA, 19 nt, Artificial Sequence
  Description of Artificial Sequence: Synthetic oligonucleotide
acagacuguuagagccucu

SEQ ID NO: 43289 - RNA, 19 nt, Artificial Sequence
  Description of Artificial Sequence: Synthetic oligonucleotide
ugcucguucacccgugcgc

SEQ ID NO: 43290 - RNA, 19 nt, Artificial Sequence
  Description of Artificial Sequence: Synthetic oligonucleotide
cccugccuggagguccagg

SEQ ID NO: 43291 - RNA, 19 nt, Artificial Sequence
  Description of Artificial Sequence: Synthetic oligonucleotide
gccuugcuggguacuucug

SEQ ID NO: 43292 - RNA, 19 nt, Artificial Sequence
  Description of Artificial Sequence: Synthetic oligonucleotide
gagcccuugggauucaaag

SEQ ID NO: 43293 - RNA, 19 nt, Artificial Sequence
  Description of Artificial Sequence: Synthetic oligonucleotide
guggcagccauggggccac

SEQ ID NO: 43294 - RNA, 19 nt, Artificial Sequence
  Description of Artificial Sequence: Synthetic oligonucleotide
cuguugugggcuuugcuca

SEQ ID NO: 43295 - RNA, 19 nt, Artificial Sequence
  Description of Artificial Sequence: Synthetic oligonucleotide
agugucacugggcaaagug

SEQ ID NO: 43296 - RNA, 19 nt, Artificial Sequence
  Description of Artificial Sequence: Synthetic oligonucleotide
gugucccuucccccuccag

SEQ ID NO: 43297 - RNA, 19 nt, Artificial Sequence
  Description of Artificial Sequence: Synthetic oligonucleotide
gcucgcccucuucuaccuc

SEQ ID NO: 43298 - RNA, 19 nt, Artificial Sequence
  Description of Artificial Sequence: Synthetic oligonucleotide
cccagcgagaccuggccca

SEQ ID NO: 43299 - RNA, 19 nt, Artificial Sequence
  Description of Artificial Sequence: Synthetic oligonucleotide
agaaagggugccgcagcaa

SEQ ID NO: 43300 - RNA, 19 nt, Artificial Sequence
  Description of Artificial Sequence: Synthetic oligonucleotide
aggagugauaugguuuguc

SEQ ID NO: 43301 - RNA, 19 nt, Artificial Sequence
  Description of Artificial Sequence: Synthetic oligonucleotide
cuuuuuaagacuggacuug

SEQ ID NO: 43302 - RNA, 19 nt, Artificial Sequence
  Description of Artificial Sequence: Synthetic oligonucleotide
gcuuuauauuaaauuugua

SEQ ID NO: 43303 - RNA, 19 nt, Artificial Sequence
  Description of Artificial Sequence: Synthetic oligonucleotide
aaaagugugcaaaaaaaaa

SEQ ID NO: 43304 - RNA, 25 nt, Artificial Sequence
  Description of Artificial Sequence: Synthetic oligonucleotide
ggcucccgcgggcgcgcggcgggga

SEQ ID NO: 43305 - RNA, 25 nt, Artificial Sequence
  Description of Artificial Sequence: Synthetic oligonucleotide
aaggccagaggaccugggcgcgggc

SEQ ID NO: 43306 - RNA, 25 nt, Artificial Sequence
  Description of Artificial Sequence: Synthetic oligonucleotide
cgaugugccuccugagcguccaaac

SEQ ID NO: 43307 - RNA, 25 nt, Artificial Sequence
  Description of Artificial Sequence: Synthetic oligonucleotide
ccgggggugaggcgcggucacgccc

SEQ ID NO: 43308 - RNA, 25 nt, Artificial Sequence
  Description of Artificial Sequence: Synthetic oligonucleotide
cagcgggaaccgcaggcgccgaagc

SEQ ID NO: 43309 - RNA, 25 nt, Artificial Sequence
  Description of Artificial Sequence: Synthetic oligonucleotide
cccggguacugggcccagaaucccg

SEQ ID NO: 43310 - RNA, 25 nt, Artificial Sequence
  Description of Artificial Sequence: Synthetic oligonucleotide
gcggaauuuuggauccgagggaggc

SEQ ID NO: 43311 - RNA, 25 nt, Artificial Sequence
  Description of Artificial Sequence: Synthetic oligonucleotide
cgcuggggcgcgggaccucgggcgu

SEQ ID NO: 43312 - RNA, 25 nt, Artificial Sequence
  Description of Artificial Sequence: Synthetic oligonucleotide
uggggucccgggcgcuggaucggcg

SEQ ID NO: 43313 - RNA, 25 nt, Artificial Sequence
  Description of Artificial Sequence: Synthetic oligonucleotide
gcggacgggaggcggcgcugguccc

SEQ ID NO: 43314 - RNA, 25 nt, Artificial Sequence
  Description of Artificial Sequence: Synthetic oligonucleotide
cgcgggccagcgggucucgggaggg

SEQ ID NO: 43315 - RNA, 25 nt, Artificial Sequence
  Description of Artificial Sequence: Synthetic oligonucleotide
gggcgcccgaucccgcgucuccggc

SEQ ID NO: 43316 - RNA, 25 nt, Artificial Sequence
  Description of Artificial Sequence: Synthetic oligonucleotide
cgccgcuucccgggaaguuucaagu

SEQ ID NO: 43317 - RNA, 25 nt, Artificial Sequence
  Description of Artificial Sequence: Synthetic oligonucleotide
uuugaaaguccuggcggagggucug

SEQ ID NO: 43318 - RNA, 25 nt, Artificial Sequence
  Description of Artificial Sequence: Synthetic oligonucleotide
gcggcuuccgggaccggaguggcug

SEQ ID NO: 43319 - RNA, 25 nt, Artificial Sequence
  Description of Artificial Sequence: Synthetic oligonucleotide
gagaggagggccccaagcggccgga

SEQ ID NO: 43320 - RNA, 25 nt, Artificial Sequence
  Description of Artificial Sequence: Synthetic oligonucleotide
agcggcgccauggaggagggggcgc

SEQ ID NO: 43321 - RNA, 25 nt, Artificial Sequence
  Description of Artificial Sequence: Synthetic oligonucleotide
ccgcggcagccugggccgagccagu

SEQ ID NO: 43322 - RNA, 25 nt, Artificial Sequence
  Description of Artificial Sequence: Synthetic oligonucleotide
uggcccccagaggaugagaaggagg

SEQ ID NO: 43323 - RNA, 25 nt, Artificial Sequence
  Description of Artificial Sequence: Synthetic oligonucleotide
gugauccgccgggccauccagaaag

SEQ ID NO: 43324 - RNA, 25 nt, Artificial Sequence
  Description of Artificial Sequence: Synthetic oligonucleotide
gagcugaagaucaaggagggggugg

SEQ ID NO: 43325 - RNA, 25 nt, Artificial Sequence
  Description of Artificial Sequence: Synthetic oligonucleotide
gagaaccugcggcgcguggccacag

SEQ ID NO: 43326 - RNA, 25 nt, Artificial Sequence
  Description of Artificial Sequence: Synthetic oligonucleotide
gaccgccgccacuugggccaugugc

SEQ ID NO: 43327 - RNA, 25 nt, Artificial Sequence
  Description of Artificial Sequence: Synthetic oligonucleotide
cagcagcugcugcgguccuccaacc

SEQ ID NO: 43328 - RNA, 25 nt, Artificial Sequence
  Description of Artificial Sequence: Synthetic oligonucleotide
cgccgccuggagcagcugcauggcg

SEQ ID NO: 43329 - RNA, 25 nt, Artificial Sequence
  Description of Artificial Sequence: Synthetic oligonucleotide
gagcugcgggagcugcacgcccgaa

SEQ ID NO: 43330 - RNA, 25 nt, Artificial Sequence
  Description of Artificial Sequence: Synthetic oligonucleotide
auccugcugcccggcccugggccug

SEQ ID NO: 43331 - RNA, 25 nt, Artificial Sequence
  Description of Artificial Sequence: Synthetic oligonucleotide
ggcccagcugagccuguggccucag

SEQ ID NO: 43332 - RNA, 25 nt, Artificial Sequence
  Description of Artificial Sequence: Synthetic oligonucleotide
ggaccccggccgugggcagagcagc

SEQ ID NO: 43333 - RNA, 25 nt, Artificial Sequence
  Description of Artificial Sequence: Synthetic oligonucleotide
cucagggcucggcaccuagaggcuc

SEQ ID NO: 43334 - RNA, 25 nt, Artificial Sequence
  Description of Artificial Sequence: Synthetic oligonucleotide
cuccggaggcagcugcauguggagc

SEQ ID NO: 43335 - RNA, 25 nt, Artificial Sequence
  Description of Artificial Sequence: Synthetic oligonucleotide
cugaaggugaagcagggggcugaga

SEQ ID NO: 43336 - RNA, 25 nt, Artificial Sequence
  Description of Artificial Sequence: Synthetic oligonucleotide
aacaugacccacacgugcgccagug

SEQ ID NO: 43337 - RNA, 25 nt, Artificial Sequence
  Description of Artificial Sequence: Synthetic oligonucleotide
ggcacccccaaggagaggaagcucc

SEQ ID NO: 43338 - RNA, 25 nt, Artificial Sequence
  Description of Artificial Sequence: Synthetic oligonucleotide
cuggcagcugcccagcagaugcugc

SEQ ID NO: 43339 - RNA, 25 nt, Artificial Sequence
  Description of Artificial Sequence: Synthetic oligonucleotide
cgggacagccagcugaagguggccc

SEQ ID NO: 43340 - RNA, 25 nt, Artificial Sequence
  Description of Artificial Sequence: Synthetic oligonucleotide
cugcugcggaugaagaucagcagcc

SEQ ID NO: 43341 - RNA, 25 nt, Artificial Sequence
  Description of Artificial Sequence: Synthetic oligonucleotide
cuggaggccaguggguccccggagc

SEQ ID NO: 43342 - RNA, 25 nt, Artificial Sequence
  Description of Artificial Sequence: Synthetic oligonucleotide
ccagggccugagcugcuggcggagg

SEQ ID NO: 43343 - RNA, 25 nt, Artificial Sequence
  Description of Artificial Sequence: Synthetic oligonucleotide
gagcuacagcaucgacugcacguug

SEQ ID NO: 43344 - RNA, 25 nt, Artificial Sequence
  Description of Artificial Sequence: Synthetic oligonucleotide
gaggcagcuguggcugagggcgcca

SEQ ID NO: 43345 - RNA, 25 nt, Artificial Sequence
  Description of Artificial Sequence: Synthetic oligonucleotide
aagaacguggugaaacugcuuagua

SEQ ID NO: 43346 - RNA, 25 nt, Artificial Sequence
  Description of Artificial Sequence: Synthetic oligonucleotide
agccggagaacacaggaccgcaagg

SEQ ID NO: 43347 - RNA, 25 nt, Artificial Sequence
  Description of Artificial Sequence: Synthetic oligonucleotide
gcacuggcugaggcccaggcccagc

SEQ ID NO: 43348 - RNA, 25 nt, Artificial Sequence
  Description of Artificial Sequence: Synthetic oligonucleotide
cuacaggaguccucucagaaacugg

SEQ ID NO: 43349 - RNA, 25 nt, Artificial Sequence
  Description of Artificial Sequence: Synthetic oligonucleotide
gaccuccugcgccuggccuuggagc

SEQ ID NO: 43350 - RNA, 25 nt, Artificial Sequence
  Description of Artificial Sequence: Synthetic oligonucleotide
cagcugcuggagcaacugccuccug

SEQ ID NO: 43351 - RNA, 25 nt, Artificial Sequence
  Description of Artificial Sequence: Synthetic oligonucleotide
gcccacccuuugcgcagcagaguga

SEQ ID NO: 43352 - RNA, 25 nt, Artificial Sequence
  Description of Artificial Sequence: Synthetic oligonucleotide
acccgagaguugcgggcugcggugc

SEQ ID NO: 43353 - RNA, 25 nt, Artificial Sequence
  Description of Artificial Sequence: Synthetic oligonucleotide
ccuggauacccccagccuucaggga

SEQ ID NO: 43354 - RNA, 25 nt, Artificial Sequence
  Description of Artificial Sequence: Synthetic oligonucleotide
acaccugugaagcccaccgcccuaa

SEQ ID NO: 43355 - RNA, 25 nt, Artificial Sequence
  Description of Artificial Sequence: Synthetic oligonucleotide
acagggacacugcagguccgccucc

SEQ ID NO: 43356 - RNA, 25 nt, Artificial Sequence
  Description of Artificial Sequence: Synthetic oligonucleotide
cugggcugugaacaguugcugacag

SEQ ID NO: 43357 - RNA, 25 nt, Artificial Sequence
  Description of Artificial Sequence: Synthetic oligonucleotide
gccgugccugggcgcuccccagcgg

SEQ ID NO: 43358 - RNA, 25 nt, Artificial Sequence
  Description of Artificial Sequence: Synthetic oligonucleotide
gccgcacuggccagcagccccuccg

SEQ ID NO: 43359 - RNA, 25 nt, Artificial Sequence
  Description of Artificial Sequence: Synthetic oligonucleotide
gagggcuggcuucggaccaaggcca

SEQ ID NO: 43360 - RNA, 25 nt, Artificial Sequence
  Description of Artificial Sequence: Synthetic oligonucleotide
aagcaccagcguggccgaggcgagc

SEQ ID NO: 43361 - RNA, 25 nt, Artificial Sequence
  Description of Artificial Sequence: Synthetic oligonucleotide
cuugccagcgaggugcuggcugugc

SEQ ID NO: 43362 - RNA, 25 nt, Artificial Sequence
  Description of Artificial Sequence: Synthetic oligonucleotide
cuaaagguggacaaccguguugugg

SEQ ID NO: 43363 - RNA, 25 nt, Artificial Sequence
  Description of Artificial Sequence: Synthetic oligonucleotide
gggcagacgggcugggggcaggugg

SEQ ID NO: 43364 - RNA, 25 nt, Artificial Sequence
  Description of Artificial Sequence: Synthetic oligonucleotide
gccgaacaguccugggaccagaccu

SEQ ID NO: 43365 - RNA, 25 nt, Artificial Sequence
  Description of Artificial Sequence: Synthetic oligonucleotide
uuugucaucccacuggagcgagccc

SEQ ID NO: 43366 - RNA, 25 nt, Artificial Sequence
  Description of Artificial Sequence: Synthetic oligonucleotide
cgugagcuggagauugggguacacu

SEQ ID NO: 43367 - RNA, 25 nt, Artificial Sequence
  Description of Artificial Sequence: Synthetic oligonucleotide
uggcgggacuggcggcagcuaugug

SEQ ID NO: 43368 - RNA, 25 nt, Artificial Sequence
  Description of Artificial Sequence: Synthetic oligonucleotide
ggcguggccuuccugagacuugagg

SEQ ID NO: 43369 - RNA, 25 nt, Artificial Sequence
  Description of Artificial Sequence: Synthetic oligonucleotide
gacuuccuggacaaugccugucacc

SEQ ID NO: 43370 - RNA, 25 nt, Artificial Sequence
  Description of Artificial Sequence: Synthetic oligonucleotide
caacugucccucagccugguaccgc

SEQ ID NO: 43371 - RNA, 25 nt, Artificial Sequence
  Description of Artificial Sequence: Synthetic oligonucleotide
cagggacugcuuuuugcccagguga

SEQ ID NO: 43372 - RNA, 25 nt, Artificial Sequence
  Description of Artificial Sequence: Synthetic oligonucleotide
accuucugcgauccugucauugaga

SEQ ID NO: 43373 - RNA, 25 nt, Artificial Sequence
  Description of Artificial Sequence: Synthetic oligonucleotide
aggcggccccggcugcagaggcagg

SEQ ID NO: 43374 - RNA, 25 nt, Artificial Sequence
  Description of Artificial Sequence: Synthetic oligonucleotide
gaacgcaucuucucuaaacgcagag

SEQ ID NO: 43375 - RNA, 25 nt, Artificial Sequence
  Description of Artificial Sequence: Synthetic oligonucleotide
ggccaggacuuccugagggcuucgc

SEQ ID NO: 43376 - RNA, 25 nt, Artificial Sequence
  Description of Artificial Sequence: Synthetic oligonucleotide
cagaugaaccucggcauggcggccu

SEQ ID NO: 43377 - RNA, 25 nt, Artificial Sequence
  Description of Artificial Sequence: Synthetic oligonucleotide
ugggggcgccucgucaugaaccugc

SEQ ID NO: 43378 - RNA, 25 nt, Artificial Sequence
  Description of Artificial Sequence: Synthetic oligonucleotide
cugccccccugcagcuccccgagca

SEQ ID NO: 43379 - RNA, 25 nt, Artificial Sequence
  Description of Artificial Sequence: Synthetic oligonucleotide
acaaucagccccccuaaaggaugcc

SEQ ID NO: 43380 - RNA, 25 nt, Artificial Sequence
  Description of Artificial Sequence: Synthetic oligonucleotide
ccucggaccccaacaacacugcgag

SEQ ID NO: 43381 - RNA, 25 nt, Artificial Sequence
  Description of Artificial Sequence: Synthetic oligonucleotide
gaggccucugacccugccacuccca

SEQ ID NO: 43382 - RNA, 25 nt, Artificial Sequence
  Description of Artificial Sequence: Synthetic oligonucleotide
aguaauuuccugcccaagaagaccc

SEQ ID NO: 43383 - RNA, 25 nt, Artificial Sequence
  Description of Artificial Sequence: Synthetic oligonucleotide
cccuugggugaagagaugacacccc

SEQ ID NO: 43384 - RNA, 25 nt, Artificial Sequence
  Description of Artificial Sequence: Synthetic oligonucleotide
ccacccaagcccccacgccucuacc

SEQ ID NO: 43385 - RNA, 25 nt, Artificial Sequence
  Description of Artificial Sequence: Synthetic oligonucleotide
cucccccaggagccaacauccgagg

SEQ ID NO: 43386 - RNA, 25 nt, Artificial Sequence
  Description of Artificial Sequence: Synthetic oligonucleotide
gagacuccgcgcaccaaacgucccc

SEQ ID NO: 43387 - RNA, 25 nt, Artificial Sequence
  Description of Artificial Sequence: Synthetic oligonucleotide
cauauggagccuaggacucgacgug

SEQ ID NO: 43388 - RNA, 25 nt, Artificial Sequence
  Description of Artificial Sequence: Synthetic oligonucleotide
gggccaucuccaccagccuccccca

SEQ ID NO: 43389 - RNA, 25 nt, Artificial Sequence
  Description of Artificial Sequence: Synthetic oligonucleotide
accaggaaacccccucggcuucagg

SEQ ID NO: 43390 - RNA, 25 nt, Artificial Sequence
  Description of Artificial Sequence: Synthetic oligonucleotide
gacuuccgcugcuuagcugugcugg

SEQ ID NO: 43391 - RNA, 25 nt, Artificial Sequence
  Description of Artificial Sequence: Synthetic oligonucleotide
ggccggggacacuuugggaaggucc

SEQ ID NO: 43392 - RNA, 25 nt, Artificial Sequence
  Description of Artificial Sequence: Synthetic oligonucleotide
cuccugguccaguucaaggggacag

SEQ ID NO: 43393 - RNA, 25 nt, Artificial Sequence
  Description of Artificial Sequence: Synthetic oligonucleotide
gggaaauacuacgccaucaaagcac

SEQ ID NO: 43394 - RNA, 25 nt, Artificial Sequence
  Description of Artificial Sequence: Synthetic oligonucleotide
cugaagaagcaggaggugcucagcc

SEQ ID NO: 43395 - RNA, 25 nt, Artificial Sequence
  Description of Artificial Sequence: Synthetic oligonucleotide
cgggacgagauagagagccuguacu

SEQ ID NO: 43396 - RNA, 25 nt, Artificial Sequence
  Description of Artificial Sequence: Synthetic oligonucleotide
ugcgagaagcggauccuggaggcug

SEQ ID NO: 43397 - RNA, 25 nt, Artificial Sequence
  Description of Artificial Sequence: Synthetic oligonucleotide
gugggcugcacagggcacccuuucc

SEQ ID NO: 43398 - RNA, 25 nt, Artificial Sequence
  Description of Artificial Sequence: Synthetic oligonucleotide
cugcucucccuccuugccugcuucc

SEQ ID NO: 43399 - RNA, 25 nt, Artificial Sequence
  Description of Artificial Sequence: Synthetic oligonucleotide
cagaccuccagccaugccugcuuug

SEQ ID NO: 43400 - RNA, 25 nt, Artificial Sequence
  Description of Artificial Sequence: Synthetic oligonucleotide
gugacugaguuugugccugguggug

SEQ ID NO: 43401 - RNA, 25 nt, Artificial Sequence
  Description of Artificial Sequence: Synthetic oligonucleotide
gaccucaugaugcagauccacgagg

SEQ ID NO: 43402 - RNA, 25 nt, Artificial Sequence
  Description of Artificial Sequence: Synthetic oligonucleotide
gaugucuuccccgagccccaggccc

SEQ ID NO: 43403 - RNA, 25 nt, Artificial Sequence
  Description of Artificial Sequence: Synthetic oligonucleotide
cgcuucuacguggcuuguguugucc

SEQ ID NO: 43404 - RNA, 25 nt, Artificial Sequence
  Description of Artificial Sequence: Synthetic oligonucleotide
cuggggcugcaguucuuacacgaga

SEQ ID NO: 43405 - RNA, 25 nt, Artificial Sequence
  Description of Artificial Sequence: Synthetic oligonucleotide
aaguuggauaaccuucugcuggaug

SEQ ID NO: 43406 - RNA, 25 nt, Artificial Sequence
  Description of Artificial Sequence: Synthetic oligonucleotide
gcccagggauuccugaagaucgcag

SEQ ID NO: 43407 - RNA, 25 nt, Artificial Sequence
  Description of Artificial Sequence: Synthetic oligonucleotide
gacuuuggacucugcaaggaaggga

SEQ ID NO: 43408 - RNA, 25 nt, Artificial Sequence
  Description of Artificial Sequence: Synthetic oligonucleotide
aucggcuucggggaccggacuagca

SEQ ID NO: 43409 - RNA, 25 nt, Artificial Sequence
  Description of Artificial Sequence: Synthetic oligonucleotide
accuucuguggcaccccggaguucc

SEQ ID NO: 43410 - RNA, 25 nt, Artificial Sequence
  Description of Artificial Sequence: Synthetic oligonucleotide
cuggcucccgaggugcugacccagg

SEQ ID NO: 43411 - RNA, 25 nt, Artificial Sequence
  Description of Artificial Sequence: Synthetic oligonucleotide
gaggcauacacacgggcuguggacu

SEQ ID NO: 43412 - RNA, 25 nt, Artificial Sequence
  Description of Artificial Sequence: Synthetic oligonucleotide
uggugggggcugggugugcugcucu

SEQ ID NO: 43413 - RNA, 25 nt, Artificial Sequence
  Description of Artificial Sequence: Synthetic oligonucleotide
uacgagaugcuggugggugagugcc

SEQ ID NO: 43414 - RNA, 25 nt, Artificial Sequence
  Description of Artificial Sequence: Synthetic oligonucleotide
ccguucccaggggacacagaggaag

SEQ ID NO: 43415 - RNA, 25 nt, Artificial Sequence
  Description of Artificial Sequence: Synthetic oligonucleotide
gagguguuugacugcaucgucaaca

SEQ ID NO: 43416 - RNA, 25 nt, Artificial Sequence
  Description of Artificial Sequence: Synthetic oligonucleotide
auggacgcccccuaccccggcuuuc

SEQ ID NO: 43417 - RNA, 25 nt, Artificial Sequence
  Description of Artificial Sequence: Synthetic oligonucleotide
cugucggugcaagggcuugaguuca

SEQ ID NO: 43418 - RNA, 25 nt, Artificial Sequence
  Description of Artificial Sequence: Synthetic oligonucleotide
auucagaagcuccuccagaagugcc

SEQ ID NO: 43419 - RNA, 25 nt, Artificial Sequence
  Description of Artificial Sequence: Synthetic oligonucleotide
ccggagaagcgccucggggcaggug

SEQ ID NO: 43420 - RNA, 25 nt, Artificial Sequence
  Description of Artificial Sequence: Synthetic oligonucleotide
gagcaggaugccgaggagaucaagg

SEQ ID NO: 43421 - RNA, 25 nt, Artificial Sequence
  Description of Artificial Sequence: Synthetic oligonucleotide
guccagccauucuucaggaccacca

SEQ ID NO: 43422 - RNA, 25 nt, Artificial Sequence
  Description of Artificial Sequence: Synthetic oligonucleotide
aacuggcaagcccugcucgcccgca

SEQ ID NO: 43423 - RNA, 25 nt, Artificial Sequence
  Description of Artificial Sequence: Synthetic oligonucleotide
accauccagccccccuucgugccua

SEQ ID NO: 43424 - RNA, 25 nt, Artificial Sequence
  Description of Artificial Sequence: Synthetic oligonucleotide
acccuguguggcccugcggaccugc

SEQ ID NO: 43425 - RNA, 25 nt, Artificial Sequence
  Description of Artificial Sequence: Synthetic oligonucleotide
cgcuacuuugagggcgaguucacag

SEQ ID NO: 43426 - RNA, 25 nt, Artificial Sequence
  Description of Artificial Sequence: Synthetic oligonucleotide
gggcugccgccugcccugaccccac

SEQ ID NO: 43427 - RNA, 25 nt, Artificial Sequence
  Description of Artificial Sequence: Synthetic oligonucleotide
ccugcaccccacagccuccucacug

SEQ ID NO: 43428 - RNA, 25 nt, Artificial Sequence
  Description of Artificial Sequence: Synthetic oligonucleotide
gcccgccaacaggccgccuuccggg

SEQ ID NO: 43429 - RNA, 25 nt, Artificial Sequence
  Description of Artificial Sequence: Synthetic oligonucleotide
gacuucgacuuugugucagagcgau

SEQ ID NO: 43430 - RNA, 25 nt, Artificial Sequence
  Description of Artificial Sequence: Synthetic oligonucleotide
uuccuggaacccugagggcaucucc

SEQ ID NO: 43431 - RNA, 25 nt, Artificial Sequence
  Description of Artificial Sequence: Synthetic oligonucleotide
cuggcaccucuguccccuuccccca

SEQ ID NO: 43432 - RNA, 25 nt, Artificial Sequence
  Description of Artificial Sequence: Synthetic oligonucleotide
acagacuguuagagccucugcucgu

SEQ ID NO: 43433 - RNA, 25 nt, Artificial Sequence
  Description of Artificial Sequence: Synthetic oligonucleotide
uucacccgugcgcccugccuggagg

SEQ ID NO: 43434 - RNA, 25 nt, Artificial Sequence
  Description of Artificial Sequence: Synthetic oligonucleotide
guccaggccuugcuggguacuucug

SEQ ID NO: 43435 - RNA, 25 nt, Artificial Sequence
  Description of Artificial Sequence: Synthetic oligonucleotide
gagcccuugggauucaaaguggcag

SEQ ID NO: 43436 - RNA, 25 nt, Artificial Sequence
  Description of Artificial Sequence: Synthetic oligonucleotide
gccauggggccacuguugugggcuu

SEQ ID NO: 43437 - RNA, 25 nt, Artificial Sequence
  Description of Artificial Sequence: Synthetic oligonucleotide
uugcucagugucacugggcaaagug

SEQ ID NO: 43438 - RNA, 25 nt, Artificial Sequence
  Description of Artificial Sequence: Synthetic oligonucleotide
gugucccuucccccuccagcucgcc

SEQ ID NO: 43439 - RNA, 25 nt, Artificial Sequence
  Description of Artificial Sequence: Synthetic oligonucleotide
ccucuucuaccucccagcgagaccu

SEQ ID NO: 43440 - RNA, 25 nt, Artificial Sequence
  Description of Artificial Sequence: Synthetic oligonucleotide
uggcccagaaagggugccgcagcaa

SEQ ID NO: 43441 - RNA, 25 nt, Artificial Sequence
  Description of Artificial Sequence: Synthetic oligonucleotide
aggagugauaugguuugucuuuuua

SEQ ID NO: 43442 - RNA, 25 nt, Artificial Sequence
  Description of Artificial Sequence: Synthetic oligonucleotide
aagacuggacuugcuuuauauuaaa

SEQ ID NO: 43443 - RNA, 25 nt, Artificial Sequence
  Description of Artificial Sequence: Synthetic oligonucleotide
auuuguaaaagugugcaaaaaaaaa

SEQ ID NO: 43444 - DNA, 21 bp, Artificial Sequence
  Description of Artificial Sequence: Synthetic oligonucleotide
  Description of Combined DNA/RNA Molecule: Synthetic oligonucleotide
cuacacaaaucagcgauuutt

SEQ ID NO: 43445 - DNA, 21 bp, Artificial Sequence
  Description of Artificial Sequence: Synthetic oligonucleotide
  Description of Combined DNA/RNA Molecule: Synthetic oligonucleotide
aaaucgcugauuuguguagtt

SEQ ID NO: 43446 - DNA, 25 bp, Artificial Sequence
  Description of Artificial Sequence: Synthetic oligonucleotide
  Description of Combined DNA/RNA Molecule: Synthetic oligonucleotide
cuacacaaaucagcgauuuccaugt

SEQ ID NO: 43447 - RNA, 27 nt, Artificial Sequence
  Description of Artificial Sequence: Synthetic oligonucleotide
acauggaaaucgcugauuuguguaguc

SEQ ID NO: 43448 - RNA, 13 nt, Artificial Sequence
  Description of Artificial Sequence: Synthetic oligonucleotide
cuacacaaaucag

SEQ ID NO: 43449 - DNA, 11 bp, Artificial Sequence
  Description of Artificial Sequence: Synthetic oligonucleotide
  Description of Combined DNA/RNA Molecule: Synthetic oligonucleotide
gauuuccaugt

SEQ ID NO: 43450 - DNA, 21 bp, Artificial Sequence
  Description of Artificial Sequence: Synthetic oligonucleotide
  Description of Combined DNA/RNA Molecule: Synthetic oligonucleotide
ggaucuuauuucuucggagtt

SEQ ID NO: 43451 - DNA, 21 bp, Artificial Sequence
  Description of Artificial Sequence: Synthetic oligonucleotide
  Description of Combined DNA/RNA Molecule: Synthetic oligonucleotide
cuccgaagaaauaagaucctt

SEQ ID NO: 43452 - RNA, 11 nt, Artificial Sequence
  Description of Artificial Sequence: Synthetic oligonucleotide
ggaucuuauuu

SEQ ID NO: 43453 - DNA, 10 bp, Artificial Sequence
  Description of Artificial Sequence: Synthetic oligonucleotide
  Description of Combined DNA/RNA Molecule: Synthetic oligonucleotide
cuucggagtt

SEQ ID NO: 43454 - RNA, 27 nt, Artificial Sequence
  Description of Artificial Sequence: Synthetic oligonucleotide
cauugucuccgaagaaauaagauccuu

SEQ ID NO: 43455 - RNA, 8 nt, Artificial Sequence
  Description of Artificial Sequence: Synthetic oligonucleotide
  modified_base (2): LNA-G
ggaucuua

SEQ ID NO: 43456 - DNA, 17 bp, Artificial Sequence
  Description of Artificial Sequence: Synthetic oligonucleotide
  Description of Combined DNA/RNA Molecule: Synthetic oligonucleotide
uuucuucggagacaatg

SEQ ID NO: 43457 - DNA, 16 bp, Artificial Sequence
  Description of Artificial Sequence: Synthetic oligonucleotide
  Description of Combined DNA/RNA Molecule: Synthetic oligonucleotide
uucuucggagacaatg

SEQ ID NO: 43458 - DNA, 15 bp, Artificial Sequence
  Description of Artificial Sequence: Synthetic oligonucleotide
  Description of Combined DNA/RNA Molecule: Synthetic oligonucleotide
ucuucggagacaatg

SEQ ID NO: 43459 - DNA, 14 bp, Artificial Sequence
  Description of Artificial Sequence: Synthetic oligonucleotide
  Description of Combined DNA/RNA Molecule: Synthetic oligonucleotide
cuucggagacaatg

SEQ ID NO: 43460 - DNA, 13 bp, Artificial Sequence
  Description of Artificial Sequence: Synthetic oligonucleotide
  Description of Combined DNA/RNA Molecule: Synthetic oligonucleotide
uucggagacaatg

SEQ ID NO: 43461 - DNA, 12 bp, Artificial Sequence
  Description of Artificial Sequence: Synthetic oligonucleotide
  Description of Combined DNA/RNA Molecule: Synthetic oligonucleotide
ucggagacaatg

SEQ ID NO: 43462 - DNA, 11 bp, Artificial Sequence
  Description of Artificial Sequence: Synthetic oligonucleotide
  Description of Combined DNA/RNA Molecule: Synthetic oligonucleotide
cggagacaatg

SEQ ID NO: 43463 - RNA, 9 nt, Artificial Sequence
  Description of Artificial Sequence: Synthetic oligonucleotide
  modified_base (2): LNA-G
ggaucuuau

SEQ ID NO: 43464 - RNA, 10 nt, Artificial Sequence
  Description of Artificial Sequence: Synthetic oligonucleotide
  modified_base (2): LNA-G
ggaucuuauu

SEQ ID NO: 43465 - RNA, 11 nt, Artificial Sequence
  Description of Artificial Sequence: Synthetic oligonucleotide
  modified_base (2): LNA-G
ggaucuuauuu

SEQ ID NO: 43466 - RNA, 12 nt, Artificial Sequence
  Description of Artificial Sequence: Synthetic oligonucleotide
  modified_base (2): LNA-G
ggaucuuauuuc

SEQ ID NO: 43467 - RNA, 8 nt, Artificial Sequence
  Description of Artificial Sequence: Synthetic oligonucleotide
  modified_base (3): LNA-A
cuacacaa

SEQ ID NO: 43468 - DNA, 13 bp, Artificial Sequence
  Description of Artificial Sequence: Synthetic oligonucleotide
  Description of Combined DNA/RNA Molecule: Synthetic oligonucleotide
  modified_base (8): LNA-A
aucagcgauuutt

SEQ ID NO: 43469 - DNA, 12 bp, Artificial Sequence
  Description of Artificial Sequence: Synthetic oligonucleotide
  Description of Combined DNA/RNA Molecule: Synthetic oligonucleotide
  modified_base (7): LNA-A
ucagcgauuutt

SEQ ID NO: 43470 - DNA, 11 bp, Artificial Sequence
  Description of Artificial Sequence: Synthetic oligonucleotide
  Description of Combined DNA/RNA Molecule: Synthetic oligonucleotide
  modified_base (6): LNA-A
cagcgauuutt

SEQ ID NO: 43471 - DNA, 10 bp, Artificial Sequence
  Description of Artificial Sequence: Synthetic oligonucleotide
  Description of Combined DNA/RNA Molecule: Synthetic oligonucleotide
  modified_base (5): LNA-A
agcgauuutt

SEQ ID NO: 43472 - DNA, 9 bp, Artificial Sequence
  Description of Artificial Sequence: Synthetic oligonucleotide
  Description of Combined DNA/RNA Molecule: Synthetic oligonucleotide
  modified_base (4): LNA-A
gcgauuutt

SEQ ID NO: 43473 - DNA, 8 bp, Artificial Sequence
  Description of Artificial Sequence: Synthetic oligonucleotide
  Description of Combined DNA/RNA Molecule: Synthetic oligonucleotide
  modified_base (3): LNA-A
cgauuutt

SEQ ID NO: 43474 - DNA, 7 bp, Artificial Sequence
  Description of Artificial Sequence: Synthetic oligonucleotide
  Description of Combined DNA/RNA Molecule: Synthetic oligonucleotide
  modified_base (2): LNA-A
gauuutt

SEQ ID NO: 43475 - RNA, 9 nt, Artificial Sequence
  Description of Artificial Sequence: Synthetic oligonucleotide
  modified_base (3): LNA-A
cuacacaaa

SEQ ID NO: 43476 - RNA, 10 nt, Artificial Sequence
  Description of Artificial Sequence: Synthetic oligonucleotide
  modified_base (3): LNA-A
cuacacaaau

SEQ ID NO: 43477 - RNA, 11 nt, Artificial Sequence
  Description of Artificial Sequence: Synthetic oligonucleotide
  modified_base (3): LNA-A
cuacacaaauc

SEQ ID NO: 43478 - RNA, 12 nt, Artificial Sequence
  Description of Artificial Sequence: Synthetic oligonucleotide
  modified_base (3): LNA-A
cuacacaaauca

SEQ ID NO: 43479 - RNA, 13 nt, Artificial Sequence
  Description of Artificial Sequence: Synthetic oligonucleotide
  modified_base (3): LNA-A
cuacacaaaucag

SEQ ID NO: 43480 - RNA, 14 nt, Artificial Sequence
  Description of Artificial Sequence: Synthetic oligonucleotide
  modified_base (3): LNA-A
cuacacaaaucagc

SEQ ID NO: 43481 - RNA, 13 nt, Artificial Sequence
  Description of Artificial Sequence: Synthetic oligonucleotide
  modified_base (2): LNA-G
ggaucuuauuucu

SEQ ID NO: 43482 - RNA, 14 nt, Artificial Sequence
  Description of Artificial Sequence: Synthetic oligonucleotide
  modified_base (2): LNA-G
ggaucuuauuucuu

SEQ ID NO: 43483 - RNA, 8 nt, Artificial Sequence
  Description of Artificial Sequence: Synthetic oligonucleotide
  modified_base (2): LNA-G
  modified_base (8): LNA-A
ggaucuua

SEQ ID NO: 43484 - RNA, 9 nt, Artificial Sequence
  Description of Artificial Sequence: Synthetic oligonucleotide
  modified_base (2): LNA-G
  modified_base (9): LNA-U
ggaucuuau

SEQ ID NO: 43485 - RNA, 10 nt, Artificial Sequence
  Description of Artificial Sequence: Synthetic oligonucleotide
  modified_base (2): LNA-G
  modified_base (10): LNA-U
ggaucuuauu

SEQ ID NO: 43486 - RNA, 11 nt, Artificial Sequence
  Description of Artificial Sequence: Synthetic oligonucleotide
  modified_base (2): LNA-G
  modified_base (11): LNA-U
ggaucuuauuu

SEQ ID NO: 43487 - RNA, 12 nt, Artificial Sequence
  Description of Artificial Sequence: Synthetic oligonucleotide
  modified_base (2): LNA-G
  modified_base (12): LNA-C
ggaucuuauuuc

SEQ ID NO: 43488 - RNA, 13 nt, Artificial Sequence
  Description of Artificial Sequence: Synthetic oligonucleotide
  modified_base (2): LNA-G
  modified_base (13): LNA-U
ggaucuuauuucu

SEQ ID NO: 43489 - RNA, 14 nt, Artificial Sequence
  Description of Artificial Sequence: Synthetic oligonucleotide
  modified_base (2): LNA-G
  modified_base (14): LNA-U
ggaucuuauuucuu

SEQ ID NO: 43490 - DNA, 13 bp, Artificial Sequence
  Description of Artificial Sequence: Synthetic oligonucleotide
  Description of Combined DNA/RNA Molecule: Synthetic oligonucleotide
  modified_base (8): LNA-G
uuucuucggagtt

SEQ ID NO: 43491 - DNA, 12 bp, Artificial Sequence
  Description of Artificial Sequence: Synthetic oligonucleotide
  Description of Combined DNA/RNA Molecule: Synthetic oligonucleotide
  modified_base (7): LNA-G
uucuucggagtt

SEQ ID NO: 43492 - DNA, 11 bp, Artificial Sequence
  Description of Artificial Sequence: Synthetic oligonucleotide
  Description of Combined DNA/RNA Molecule: Synthetic oligonucleotide
  modified_base (6): LNA-G
ucuucggagtt

SEQ ID NO: 43493 - DNA, 10 bp, Artificial Sequence
  Description of Artificial Sequence: Synthetic oligonucleotide
  Description of Combined DNA/RNA Molecule: Synthetic oligonucleotide
  modified_base (5): LNA-G
cuucggagtt

SEQ ID NO: 43494 - DNA, 9 bp, Artificial Sequence
  Description of Artificial Sequence: Synthetic oligonucleotide
  Description of Combined DNA/RNA Molecule: Synthetic oligonucleotide
  modified_base (4): LNA-G
uucggagtt

SEQ ID NO: 43495 - DNA, 8 bp, Artificial Sequence
  Description of Artificial Sequence: Synthetic oligonucleotide
  Description of Combined DNA/RNA Molecule: Synthetic oligonucleotide
  modified_base (3): LNA-G
ucggagtt

SEQ ID NO: 43496 - DNA, 7 bp, Artificial Sequence
  Description of Artificial Sequence: Synthetic oligonucleotide
  Description of Combined DNA/RNA Molecule: Synthetic oligonucleotide
  modified_base (2): LNA-G
cggagtt

SEQ ID NO: 43497 - DNA, 13 bp, Artificial Sequence
  Description of Artificial Sequence: Synthetic oligonucleotide
  Description of Combined DNA/RNA Molecule: Synthetic oligonucleotide
  modified_base (1): LNA-U
  modified_base (8): LNA-G
uuucuucggagtt

SEQ ID NO: 43498 - DNA, 12 bp, Artificial Sequence
  Description of Artificial Sequence: Synthetic oligonucleotide
  Description of Combined DNA/RNA Molecule: Synthetic oligonucleotide
  modified_base (1): LNA-U
  modified_base (7): LNA-G
uucuucggagtt

SEQ ID NO: 43499 - DNA, 11 bp, Artificial Sequence
  Description of Artificial Sequence: Synthetic oligonucleotide
  Description of Combined DNA/RNA Molecule: Synthetic oligonucleotide
  modified_base (1): LNA-U
  modified_base (6): LNA-G
ucuucggagtt

SEQ ID NO: 43500 - DNA, 10 bp, Artificial Sequence
  Description of Artificial Sequence: Synthetic oligonucleotide
  Description of Combined DNA/RNA Molecule: Synthetic oligonucleotide
  modified_base (1): LNA-C
  modified_base (5): LNA-G
cuucggagtt

SEQ ID NO: 43501 - DNA, 9 bp, Artificial Sequence
  Description of Artificial Sequence: Synthetic oligonucleotide
  Description of Combined DNA/RNA Molecule: Synthetic oligonucleotide
  modified_base (1): LNA-U
  modified_base (4): LNA-G
uucggagtt

SEQ ID NO: 43502 - DNA, 8 bp, Artificial Sequence
  Description of Artificial Sequence: Synthetic oligonucleotide
  Description of Combined DNA/RNA Molecule: Synthetic oligonucleotide
  modified_base (1): LNA-U
  modified_base (3): LNA-G
ucggagtt

SEQ ID NO: 43503 - DNA, 7 bp, Artificial Sequence
  Description of Artificial Sequence: Synthetic oligonucleotide
  Description of Combined DNA/RNA Molecule: Synthetic oligonucleotide
  modified_base (1): LNA-C
  modified_base (2): LNA-G
cggagtt

SEQ ID NO: 43504 - DNA, 21 bp, Artificial Sequence
  Description of Artificial Sequence: Synthetic oligonucleotide
  Description of Combined DNA/RNA Molecule: Synthetic oligonucleotide
  modified_base (2): LNA-G
  modified_base (16): LNA-G
ggaucuuauuucuucggagtt

SEQ ID NO: 43505 - DNA, 25 bp, Artificial Sequence
  Description of Artificial Sequence: Synthetic oligonucleotide
  Description of Combined DNA/RNA Molecule: Synthetic oligonucleotide
ggaucuuauuucuucggagacaatg

SEQ ID NO: 43506 - RNA, 25 nt, Artificial Sequence
  Description of Artificial Sequence: Synthetic oligonucleotide
uuaagcagaguucaaaagcccuuca

SEQ ID NO: 43507 - RNA, 25 nt, Artificial Sequence
  Description of Artificial Sequence: Synthetic oligonucleotide
uaagcagaguucaaaagcccuucag

SEQ ID NO: 43508 - RNA, 25 nt, Artificial Sequence
  Description of Artificial Sequence: Synthetic oligonucleotide
agcagaguucaaaagcccuucagcg

SEQ ID NO: 43509 - RNA, 25 nt, Artificial Sequence
  Description of Artificial Sequence: Synthetic oligonucleotide
cucagggucugagugaagccgcucg

SEQ ID NO: 43510 - RNA, 25 nt, Artificial Sequence
  Description of Artificial Sequence: Synthetic oligonucleotide
caagcaacuacaucacgccagucaa

SEQ ID NO: 43511 - RNA, 25 nt, Artificial Sequence
  Description of Artificial Sequence: Synthetic oligonucleotide
aucaauggcagcuucuuggugcgug

SEQ ID NO: 43512 - RNA, 25 nt, Artificial Sequence
  Description of Artificial Sequence: Synthetic oligonucleotide
uuccagcccacauuggauucaucag

SEQ ID NO: 43513 - RNA, 25 nt, Artificial Sequence
  Description of Artificial Sequence: Synthetic oligonucleotide
cagcugagaauguggaauaccuaag

SEQ ID NO: 43514 - RNA, 25 nt, Artificial Sequence
  Description of Artificial Sequence: Synthetic oligonucleotide
aacguaucuccuaauuugaggcuca

SEQ ID NO: 43515 - RNA, 25 nt, Artificial Sequence
  Description of Artificial Sequence: Synthetic oligonucleotide
ccuaaaauaauuucucuacaauugg

SEQ ID NO: 43516 - RNA, 25 nt, Artificial Sequence
  Description of Artificial Sequence: Synthetic oligonucleotide
uggaagauucagcuaguuaggagcc

SEQ ID NO: 43517 - RNA, 25 nt, Artificial Sequence
  Description of Artificial Sequence: Synthetic oligonucleotide
uuaaacucuccuagucaauauccac

SEQ ID NO: 43518 - RNA, 25 nt, Artificial Sequence
  Description of Artificial Sequence: Synthetic oligonucleotide
cagccuacaguuauguucagucaca

SEQ ID NO: 43519 - RNA, 25 nt, Artificial Sequence
  Description of Artificial Sequence: Synthetic oligonucleotide
guuauguucagucacacacacauac

SEQ ID NO: 43520 - RNA, 25 nt, Artificial Sequence
  Description of Artificial Sequence: Synthetic oligonucleotide
cacauacaaaauguuccuuuugcuu

SEQ ID NO: 43521 - RNA, 25 nt, Artificial Sequence
  Description of Artificial Sequence: Synthetic oligonucleotide
uccuuuugcuuuuaaaguaauuuuu

SEQ ID NO: 43522 - RNA, 25 nt, Artificial Sequence
  Description of Artificial Sequence: Synthetic oligonucleotide
ugaccugugaagcaacagucaaugg

SEQ ID NO: 43523 - RNA, 25 nt, Artificial Sequence
  Description of Artificial Sequence: Synthetic oligonucleotide
cuaucucacacaucgacaaaccaau

SEQ ID NO: 43524 - RNA, 25 nt, Artificial Sequence
  Description of Artificial Sequence: Synthetic oligonucleotide
uguccucaauuguacugcuaccacu

SEQ ID NO: 43525 - RNA, 25 nt, Artificial Sequence
  Description of Artificial Sequence: Synthetic oligonucleotide
aaaccguagcuggcaagcggucuua

SEQ ID NO: 43526 - RNA, 25 nt, Artificial Sequence
  Description of Artificial Sequence: Synthetic oligonucleotide
uagcuggcaagcggucuuaccggcu

SEQ ID NO: 43527 - RNA, 25 nt, Artificial Sequence
  Description of Artificial Sequence: Synthetic oligonucleotide
uuguaugguuaaaagauggguuacc

SEQ ID NO: 43528 - RNA, 25 nt, Artificial Sequence
  Description of Artificial Sequence: Synthetic oligonucleotide
ugguuaaaagauggguuaccugcga

SEQ ID NO: 43529 - RNA, 25 nt, Artificial Sequence
  Description of Artificial Sequence: Synthetic oligonucleotide
cagggaauuauacaaucuugcugag

SEQ ID NO: 43530 - RNA, 25 nt, Artificial Sequence
  Description of Artificial Sequence: Synthetic oligonucleotide
acaaucuugcugagcauaaaacagu

SEQ ID NO: 43531 - RNA, 25 nt, Artificial Sequence
  Description of Artificial Sequence: Synthetic oligonucleotide
ccaauaaugaagaguccuuuauccu

SEQ ID NO: 43532 - RNA, 25 nt, Artificial Sequence
  Description of Artificial Sequence: Synthetic oligonucleotide
acuuuggauguuccaacgcaaguug

SEQ ID NO: 43533 - RNA, 25 nt, Artificial Sequence
  Description of Artificial Sequence: Synthetic oligonucleotide
aaugcuuccacuaaacugaaaccau

SEQ ID NO: 43534 - RNA, 25 nt, Artificial Sequence
  Description of Artificial Sequence: Synthetic oligonucleotide
gagaaaguuugacuuuguuaaauau

SEQ ID NO: 43535 - RNA, 25 nt, Artificial Sequence
  Description of Artificial Sequence: Synthetic oligonucleotide
aaagaacuacuguauauuaaaaguu

SEQ ID NO: 43536 - RNA, 25 nt, Artificial Sequence
  Description of Artificial Sequence: Synthetic oligonucleotide
uuagaaauacggguuuugacuuaac

SEQ ID NO: 43537 - RNA, 25 nt, Artificial Sequence
  Description of Artificial Sequence: Synthetic oligonucleotide
aacauggguacagcaaacucagcac

SEQ ID NO: 43538 - RNA, 25 nt, Artificial Sequence
  Description of Artificial Sequence: Synthetic oligonucleotide
aaagacacagaagaugcugaccuca

SEQ ID NO: 43539 - RNA, 25 nt, Artificial Sequence
  Description of Artificial Sequence: Synthetic oligonucleotide
uaguagggagguuuauucagaucgc

SEQ ID NO: 43540 - RNA, 25 nt, Artificial Sequence
  Description of Artificial Sequence: Synthetic oligonucleotide
gccuucugcagcaggguucugggau

SEQ ID NO: 43541 - RNA, 25 nt, Artificial Sequence
  Description of Artificial Sequence: Synthetic oligonucleotide
ggucugguacauauuggaaauuaug

SEQ ID NO: 43542 - RNA, 25 nt, Artificial Sequence
  Description of Artificial Sequence: Synthetic oligonucleotide
cuaguccuuccgauggaagcacuag

SEQ ID NO: 43543 - RNA, 25 nt, Artificial Sequence
  Description of Artificial Sequence: Synthetic oligonucleotide
ccagugaauauuguuuuuaugugga

SEQ ID NO: 43544 - RNA, 25 nt, Artificial Sequence
  Description of Artificial Sequence: Synthetic oligonucleotide
augaauucaaguuggaauugguaga

SEQ ID NO: 43545 - RNA, 25 nt, Artificial Sequence
  Description of Artificial Sequence: Synthetic oligonucleotide
caggacacagauuuagacuuggaga

SEQ ID NO: 43546 - RNA, 25 nt, Artificial Sequence
  Description of Artificial Sequence: Synthetic oligonucleotide
cucaaagcacaguuacaguauucca

SEQ ID NO: 43547 - RNA, 25 nt, Artificial Sequence
  Description of Artificial Sequence: Synthetic oligonucleotide
accacugccaccacugaugaauuaa

SEQ ID NO: 43548 - RNA, 25 nt, Artificial Sequence
  Description of Artificial Sequence: Synthetic oligonucleotide
gaaacuacuagugccacaucaucac

SEQ ID NO: 43549 - RNA, 25 nt, Artificial Sequence
  Description of Artificial Sequence: Synthetic oligonucleotide
aagucggacagccucaccaaacaga

SEQ ID NO: 43550 - RNA, 25 nt, Artificial Sequence
  Description of Artificial Sequence: Synthetic oligonucleotide
gaaagcgaaaaauggaacaugaugg

SEQ ID NO: 43551 - RNA, 25 nt, Artificial Sequence
  Description of Artificial Sequence: Synthetic oligonucleotide
cccucugauuuagcauguagacugc

SEQ ID NO: 43552 - RNA, 25 nt, Artificial Sequence
  Description of Artificial Sequence: Synthetic oligonucleotide
ugagcuauuuaaggaucuauuuaug

SEQ ID NO: 43553 - RNA, 25 nt, Artificial Sequence
  Description of Artificial Sequence: Synthetic oligonucleotide
aaaaggugaaaaagcacuauuauca

SEQ ID NO: 43554 - RNA, 25 nt, Artificial Sequence
  Description of Artificial Sequence: Synthetic oligonucleotide
gaaaaagcacuauuaucaguucugc

SEQ ID NO: 43555 - RNA, 25 nt, Artificial Sequence
  Description of Artificial Sequence: Synthetic oligonucleotide
ggcugaaaagaaagauuaaaccuac

SEQ ID NO: 43556 - RNA, 25 nt, Artificial Sequence
  Description of Artificial Sequence: Synthetic oligonucleotide
uaaacccuuauaauaaaauccuucu

SEQ ID NO: 43557 - RNA, 25 nt, Artificial Sequence
  Description of Artificial Sequence: Synthetic oligonucleotide
cauacuauuagccaaugcuguagac

SEQ ID NO: 43558 - RNA, 25 nt, Artificial Sequence
  Description of Artificial Sequence: Synthetic oligonucleotide
gacagaagcauuuugauaggaauag

SEQ ID NO: 43559 - RNA, 25 nt, Artificial Sequence
  Description of Artificial Sequence: Synthetic oligonucleotide
agagcaaauaagauaauggcccuga

SEQ ID NO: 43560 - RNA, 25 nt, Artificial Sequence
  Description of Artificial Sequence: Synthetic oligonucleotide
ccaacauuuuucucuuccucaagca

SEQ ID NO: 43561 - RNA, 25 nt, Artificial Sequence
  Description of Artificial Sequence: Synthetic oligonucleotide
uuaaguaugagaaaaguucagccca

SEQ ID NO: 43562 - RNA, 25 nt, Artificial Sequence
  Description of Artificial Sequence: Synthetic oligonucleotide
caggaauaaagauggcugcugaacc

SEQ ID NO: 43563 - RNA, 25 nt, Artificial Sequence
  Description of Artificial Sequence: Synthetic oligonucleotide
aauuugaaugaccaaguucucuuca

SEQ ID NO: 43564 - RNA, 25 nt, Artificial Sequence
  Description of Artificial Sequence: Synthetic oligonucleotide
auguauaaagauagccagccuagag

SEQ ID NO: 43565 - RNA, 25 nt, Artificial Sequence
  Description of Artificial Sequence: Synthetic oligonucleotide
ggcuguaacuaucucugugaagugu

SEQ ID NO: 43566 - RNA, 25 nt, Artificial Sequence
  Description of Artificial Sequence: Synthetic oligonucleotide
ucugugaagugugagaaaauuucaa

SEQ ID NO: 43567 - RNA, 25 nt, Artificial Sequence
  Description of Artificial Sequence: Synthetic oligonucleotide
ccuuuaaggaaaugaauccuccuga

SEQ ID NO: 43568 - RNA, 25 nt, Artificial Sequence
  Description of Artificial Sequence: Synthetic oligonucleotide
aaggauacaaaaagugacaucauau

SEQ ID NO: 43569 - RNA, 25 nt, Artificial Sequence
  Description of Artificial Sequence: Synthetic oligonucleotide
agaugcaauuugaaucuucaucaua

SEQ ID NO: 43570 - RNA, 25 nt, Artificial Sequence
  Description of Artificial Sequence: Synthetic oligonucleotide
guucaaaacgaagacuagcuauuaa

SEQ ID NO: 43571 - RNA, 25 nt, Artificial Sequence
  Description of Artificial Sequence: Synthetic oligonucleotide
gugaaaccucaucucuacuaaaaau

SEQ ID NO: 43572 - RNA, 25 nt, Artificial Sequence
  Description of Artificial Sequence: Synthetic oligonucleotide
acgaaagagaagcucuaucucgccu

SEQ ID NO: 43573 - RNA, 25 nt, Artificial Sequence
  Description of Artificial Sequence: Synthetic oligonucleotide
cuccacaagcgccuucgguccaguu

SEQ ID NO: 43574 - RNA, 25 nt, Artificial Sequence
  Description of Artificial Sequence: Synthetic oligonucleotide
gagaagauuccaaagauguagccgc

SEQ ID NO: 43575 - RNA, 25 nt, Artificial Sequence
  Description of Artificial Sequence: Synthetic oligonucleotide
aaucuggauucaaugaggagacuug

SEQ ID NO: 43576 - RNA, 25 nt, Artificial Sequence
  Description of Artificial Sequence: Synthetic oligonucleotide
agaacagauuugagaguagugagga

SEQ ID NO: 43577 - RNA, 25 nt, Artificial Sequence
  Description of Artificial Sequence: Synthetic oligonucleotide
ccagagcugugcagaugaguacaaa

SEQ ID NO: 43578 - RNA, 25 nt, Artificial Sequence
  Description of Artificial Sequence: Synthetic oligonucleotide
ccucagauuguuguuguuaaugggc

SEQ ID NO: 43579 - RNA, 25 nt, Artificial Sequence
  Description of Artificial Sequence: Synthetic oligonucleotide
cuauuuuaauuauuuuuaauuuauu

SEQ ID NO: 43580 - RNA, 25 nt, Artificial Sequence
  Description of Artificial Sequence: Synthetic oligonucleotide
uuuaauuuauuaauauuuaaauaug

SEQ ID NO: 43581 - RNA, 25 nt, Artificial Sequence
  Description of Artificial Sequence: Synthetic oligonucleotide
augcaguuugaauauccuuuguuuc

SEQ ID NO: 43582 - RNA, 25 nt, Artificial Sequence
  Description of Artificial Sequence: Synthetic oligonucleotide
caugcugcuggcgucuaaguguuug

SEQ ID NO: 43583 - RNA, 25 nt, Artificial Sequence
  Description of Artificial Sequence: Synthetic oligonucleotide
agaugugcauuucaccugugacaaa

SEQ ID NO: 43584 - RNA, 25 nt, Artificial Sequence
  Description of Artificial Sequence: Synthetic oligonucleotide
ucaaaaccugugccaggcugaauua

SEQ ID NO: 43585 - RNA, 25 nt, Artificial Sequence
  Description of Artificial Sequence: Synthetic oligonucleotide
gaauguggguagucauucuuacaau

SEQ ID NO: 43586 - RNA, 25 nt, Artificial Sequence
  Description of Artificial Sequence: Synthetic oligonucleotide
auguggguagucauucuuacaauug

SEQ ID NO: 43587 - RNA, 25 nt, Artificial Sequence
  Description of Artificial Sequence: Synthetic oligonucleotide
ugaaaaugagcaucagagaguguac

SEQ ID NO: 43588 - RNA, 25 nt, Artificial Sequence
  Description of Artificial Sequence: Synthetic oligonucleotide
uugcuuuucauguagaacucagcag

SEQ ID NO: 43589 - RNA, 25 nt, Artificial Sequence
  Description of Artificial Sequence: Synthetic oligonucleotide
uguauuucuauauuuauuuucagua

SEQ ID NO: 43590 - RNA, 25 nt, Artificial Sequence
  Description of Artificial Sequence: Synthetic oligonucleotide
uuugauuaauguuucuuaaauggaa

SEQ ID NO: 43591 - RNA, 25 nt, Artificial Sequence
  Description of Artificial Sequence: Synthetic oligonucleotide
caacguguauagugccuaaaauugu

SEQ ID NO: 43592 - RNA, 25 nt, Artificial Sequence
  Description of Artificial Sequence: Synthetic oligonucleotide
cauauccuuggcuacuaacaucugg

SEQ ID NO: 43593 - RNA, 25 nt, Artificial Sequence
  Description of Artificial Sequence: Synthetic oligonucleotide
uacuaacaucuggagacugugagcu

SEQ ID NO: 43594 - RNA, 25 nt, Artificial Sequence
  Description of Artificial Sequence: Synthetic oligonucleotide
cauaaguugugugcuuuuuauuaau

SEQ ID NO: 43595 - RNA, 25 nt, Artificial Sequence
  Description of Artificial Sequence: Synthetic oligonucleotide
gcaucauuuuggcucuucuuacauu

SEQ ID NO: 43596 - RNA, 25 nt, Artificial Sequence
  Description of Artificial Sequence: Synthetic oligonucleotide
gcucuucuuacauuuguaaaaaugu

SEQ ID NO: 43597 - RNA, 25 nt, Artificial Sequence
  Description of Artificial Sequence: Synthetic oligonucleotide
agauuaggucaucuuaauucauauu

SEQ ID NO: 43598 - RNA, 25 nt, Artificial Sequence
  Description of Artificial Sequence: Synthetic oligonucleotide
auggaauugaaagaacuaaucauga

SEQ ID NO: 43599 - RNA, 25 nt, Artificial Sequence
  Description of Artificial Sequence: Synthetic oligonucleotide
cacacucauuccuucugcucuuggg

SEQ ID NO: 43600 - RNA, 25 nt, Artificial Sequence
  Description of Artificial Sequence: Synthetic oligonucleotide
uguagagguaaccaguagcuuugag

SEQ ID NO: 43601 - RNA, 25 nt, Artificial Sequence
  Description of Artificial Sequence: Synthetic oligonucleotide
caaccacaugccacguaauauuuca

SEQ ID NO: 43602 - RNA, 25 nt, Artificial Sequence
  Description of Artificial Sequence: Synthetic oligonucleotide
ucggaaacaaguuauucucuucacu

SEQ ID NO: 43603 - RNA, 25 nt, Artificial Sequence
  Description of Artificial Sequence: Synthetic oligonucleotide
acucccaauaacuaaugcuaagaaa

SEQ ID NO: 43604 - RNA, 25 nt, Artificial Sequence
  Description of Artificial Sequence: Synthetic oligonucleotide
aaugcuaagaaaugcugaaaaucaa

SEQ ID NO: 43605 - RNA, 25 nt, Artificial Sequence
  Description of Artificial Sequence: Synthetic oligonucleotide
gucuuucucuaaauaugauuacuuu

SEQ ID NO: 43606 - RNA, 25 nt, Artificial Sequence
  Description of Artificial Sequence: Synthetic oligonucleotide
ugaauuucaggcauuuuguucuaca

SEQ ID NO: 43607 - RNA, 25 nt, Artificial Sequence
  Description of Artificial Sequence: Synthetic oligonucleotide
cgauucccucucacccgggacucuc

SEQ ID NO: 43608 - RNA, 25 nt, Artificial Sequence
  Description of Artificial Sequence: Synthetic oligonucleotide
aggaaagugaaccuuuaaaguaaag

SEQ ID NO: 43609 - RNA, 25 nt, Artificial Sequence
  Description of Artificial Sequence: Synthetic oligonucleotide
gaggcugcaugcucuggaagccugg

SEQ ID NO: 43610 - RNA, 25 nt, Artificial Sequence
  Description of Artificial Sequence: Synthetic oligonucleotide
ucucugaacagaaaacaaaagagag

SEQ ID NO: 43611 - RNA, 25 nt, Artificial Sequence
  Description of Artificial Sequence: Synthetic oligonucleotide
aacuuggcuguaaucaguuaugccg

SEQ ID NO: 43612 - RNA, 25 nt, Artificial Sequence
  Description of Artificial Sequence: Synthetic oligonucleotide
agaagccaaaauuaaaagaagucca

SEQ ID NO: 43613 - RNA, 25 nt, Artificial Sequence
  Description of Artificial Sequence: Synthetic oligonucleotide
auuaaaagaaguccaggugagguua

SEQ ID NO: 43614 - RNA, 25 nt, Artificial Sequence
  Description of Artificial Sequence: Synthetic oligonucleotide
gaauccggauuaucgggaagaggac

SEQ ID NO: 43615 - RNA, 25 nt, Artificial Sequence
  Description of Artificial Sequence: Synthetic oligonucleotide
aaugugacaucaaagcaaguauugu

SEQ ID NO: 43616 - RNA, 25 nt, Artificial Sequence
  Description of Artificial Sequence: Synthetic oligonucleotide
caucaaagcaaguauuguagcacuc

SEQ ID NO: 43617 - RNA, 25 nt, Artificial Sequence
  Description of Artificial Sequence: Synthetic oligonucleotide
agagagagaaaacaaaaccacaaau

SEQ ID NO: 43618 - RNA, 25 nt, Artificial Sequence
  Description of Artificial Sequence: Synthetic oligonucleotide
ucgcuguaguauuuaagcccauaca

SEQ ID NO: 43619 - RNA, 25 nt, Artificial Sequence
  Description of Artificial Sequence: Synthetic oligonucleotide
cgcuguaguauuuaagcccauacag

SEQ ID NO: 43620 - RNA, 25 nt, Artificial Sequence
  Description of Artificial Sequence: Synthetic oligonucleotide
auuuaagcccauacagaaaccuucc

SEQ ID NO: 43621 - RNA, 25 nt, Artificial Sequence
  Description of Artificial Sequence: Synthetic oligonucleotide
auuaaaauaaacaugguauaccuac

SEQ ID NO: 43622 - RNA, 25 nt, Artificial Sequence
  Description of Artificial Sequence: Synthetic oligonucleotide
cuguucugaucggccaguuuucgga

SEQ ID NO: 43623 - RNA, 25 nt, Artificial Sequence
  Description of Artificial Sequence: Synthetic oligonucleotide
aaauaauuugaacuuuggaacaggg

SEQ ID NO: 43624 - RNA, 25 nt, Artificial Sequence
  Description of Artificial Sequence: Synthetic oligonucleotide
ugcgaccuuaauuuaacuuuccagu

SEQ ID NO: 43625 - RNA, 25 nt, Artificial Sequence
  Description of Artificial Sequence: Synthetic oligonucleotide
cugagaaagcuaaaguuugguuuug

SEQ ID NO: 43626 - RNA, 25 nt, Artificial Sequence
  Description of Artificial Sequence: Synthetic oligonucleotide
aguaaagaugcuacuucccacugua

SEQ ID NO: 43627 - RNA, 25 nt, Artificial Sequence
  Description of Artificial Sequence: Synthetic oligonucleotide
cugcuuaauugcugauaccauauga

SEQ ID NO: 43628 - RNA, 25 nt, Artificial Sequence
  Description of Artificial Sequence: Synthetic oligonucleotide
uaccauaugaaugaaacaugggcug

SEQ ID NO: 43629 - RNA, 25 nt, Artificial Sequence
  Description of Artificial Sequence: Synthetic oligonucleotide
aacuuucuuauccaacuuuuucaua

SEQ ID NO: 43630 - RNA, 25 nt, Artificial Sequence
  Description of Artificial Sequence: Synthetic oligonucleotide
ccuugcaugacaucaugaggccgga

SEQ ID NO: 43631 - RNA, 25 nt, Artificial Sequence
  Description of Artificial Sequence: Synthetic oligonucleotide
ugaauuuguauaugacugcauuugu

SEQ ID NO: 43632 - RNA, 25 nt, Artificial Sequence
  Description of Artificial Sequence: Synthetic oligonucleotide
gaauccuaguagaauguuuacuacc

SEQ ID NO: 43633 - RNA, 25 nt, Artificial Sequence
  Description of Artificial Sequence: Synthetic oligonucleotide
gaaagggaagaauuuuuugaugaaa

SEQ ID NO: 43634 - RNA, 25 nt, Artificial Sequence
  Description of Artificial Sequence: Synthetic oligonucleotide
uaucggcaugccagugugugaauuu

SEQ ID NO: 43635 - RNA, 25 nt, Artificial Sequence
  Description of Artificial Sequence: Synthetic oligonucleotide
caccucauaguagagcaauguaugu

SEQ ID NO: 43636 - RNA, 25 nt, Artificial Sequence
  Description of Artificial Sequence: Synthetic oligonucleotide
ccagaauugccaaagcacauauaua

SEQ ID NO: 43637 - RNA, 25 nt, Artificial Sequence
  Description of Artificial Sequence: Synthetic oligonucleotide
uggugaucuggguaauaguuucucc

SEQ ID NO: 43638 - RNA, 25 nt, Artificial Sequence
  Description of Artificial Sequence: Synthetic oligonucleotide
gaucuggguaauaguuucuccaaau

SEQ ID NO: 43639 - RNA, 25 nt, Artificial Sequence
  Description of Artificial Sequence: Synthetic oligonucleotide
ggaugugaugaauacuuccuagaaa

SEQ ID NO: 43640 - RNA, 25 nt, Artificial Sequence
  Description of Artificial Sequence: Synthetic oligonucleotide
cauuuccacagcuacaccauauaug

SEQ ID NO: 43641 - RNA, 25 nt, Artificial Sequence
  Description of Artificial Sequence: Synthetic oligonucleotide
acagcuacaccauauaugaauggag

SEQ ID NO: 43642 - RNA, 25 nt, Artificial Sequence
  Description of Artificial Sequence: Synthetic oligonucleotide
ugcaguucuuacacgagaagaagau

SEQ ID NO: 43643 - RNA, 25 nt, Artificial Sequence
  Description of Artificial Sequence: Synthetic oligonucleotide
acgagaagaagaucauuuacaggga

SEQ ID NO: 43644 - RNA, 25 nt, Artificial Sequence
  Description of Artificial Sequence: Synthetic oligonucleotide
cgagaagaagaucauuuacagggac

SEQ ID NO: 43645 - RNA, 25 nt, Artificial Sequence
  Description of Artificial Sequence: Synthetic oligonucleotide
aagaagaucauuuacagggaccuga

SEQ ID NO: 43646 - RNA, 25 nt, Artificial Sequence
  Description of Artificial Sequence: Synthetic oligonucleotide
agaggaagagguguuugacugcauc

SEQ ID NO: 43647 - RNA, 25 nt, Artificial Sequence
  Description of Artificial Sequence: Synthetic oligonucleotide
gaggaagagguguuugacugcaucg

SEQ ID NO: 43648 - RNA, 25 nt, Artificial Sequence
  Description of Artificial Sequence: Synthetic oligonucleotide
cuacuuugagggcgaguucacaggg

SEQ ID NO: 43649 - RNA, 25 nt, Artificial Sequence
  Description of Artificial Sequence: Synthetic oligonucleotide
agggcaucuccuggcaccucugucc

SEQ ID NO: 43650 - RNA, 25 nt, Artificial Sequence
  Description of Artificial Sequence: Synthetic oligonucleotide
ggagugauaugguuugucuuuuuaa

SEQ ID NO: 43651 - RNA, 25 nt, Artificial Sequence
  Description of Artificial Sequence: Synthetic oligonucleotide
gagugauaugguuugucuuuuuaag

SEQ ID NO: 43652 - RNA, 25 nt, Artificial Sequence
  Description of Artificial Sequence: Synthetic oligonucleotide
ugcaguaaagauccuaaagguuguc

SEQ ID NO: 43653 - RNA, 25 nt, Artificial Sequence
  Description of Artificial Sequence: Synthetic oligonucleotide
aguaaagauccuaaagguugucgac

SEQ ID NO: 43654 - RNA, 25 nt, Artificial Sequence
  Description of Artificial Sequence: Synthetic oligonucleotide
ugacaaaggacaaccuggcaauugu

SEQ ID NO: 43655 - RNA, 25 nt, Artificial Sequence
  Description of Artificial Sequence: Synthetic oligonucleotide
gcaauugugacccaguggugcgagg

SEQ ID NO: 43656 - RNA, 25 nt, Artificial Sequence
  Description of Artificial Sequence: Synthetic oligonucleotide
aacaucauccauagagacaugaaau

SEQ ID NO: 43657 - RNA, 25 nt, Artificial Sequence
  Description of Artificial Sequence: Synthetic oligonucleotide
ugaaauccaacaauauauuucucca

SEQ ID NO: 43658 - RNA, 25 nt, Artificial Sequence
  Description of Artificial Sequence: Synthetic oligonucleotide
aacaauauauuucuccaugaaggcu

SEQ ID NO: 43659 - RNA, 25 nt, Artificial Sequence
  Description of Artificial Sequence: Synthetic oligonucleotide
aacaguaaagucacgcuggaguggu

SEQ ID NO: 43660 - RNA, 25 nt, Artificial Sequence
  Description of Artificial Sequence: Synthetic oligonucleotide
ugugaagaaaguaaaggaagagagg

SEQ ID NO: 43661 - RNA, 25 nt, Artificial Sequence
  Description of Artificial Sequence: Synthetic oligonucleotide
cuuccgagccauccuugcaucgggc

SEQ ID NO: 43662 - RNA, 25 nt, Artificial Sequence
  Description of Artificial Sequence: Synthetic oligonucleotide
aauggagguugaauauccuacugug

SEQ ID NO: 43663 - RNA, 25 nt, Artificial Sequence
  Description of Artificial Sequence: Synthetic oligonucleotide
ggagguugaauauccuacuguguaa

SEQ ID NO: 43664 - RNA, 25 nt, Artificial Sequence
  Description of Artificial Sequence: Synthetic oligonucleotide
auuuugaguuuucccuuguagugua

SEQ ID NO: 43665 - RNA, 25 nt, Artificial Sequence
  Description of Artificial Sequence: Synthetic oligonucleotide
uauccuguuuguucuuuguugauug

SEQ ID NO: 43666 - RNA, 25 nt, Artificial Sequence
  Description of Artificial Sequence: Synthetic oligonucleotide
ccuguuuguucuuuguugauugaaa

SEQ ID NO: 43667 - RNA, 25 nt, Artificial Sequence
  Description of Artificial Sequence: Synthetic oligonucleotide
cucuacagccuucuuuuucuuccau

SEQ ID NO: 43668 - RNA, 25 nt, Artificial Sequence
  Description of Artificial Sequence: Synthetic oligonucleotide
ucuuccauagcuaaucuuccuucua

SEQ ID NO: 43669 - RNA, 25 nt, Artificial Sequence
  Description of Artificial Sequence: Synthetic oligonucleotide
auaaucuuccuguugaaugcuucau

SEQ ID NO: 43670 - RNA, 25 nt, Artificial Sequence
  Description of Artificial Sequence: Synthetic oligonucleotide
uaaucuuccuguugaaugcuucaug

SEQ ID NO: 43671 - RNA, 25 nt, Artificial Sequence
  Description of Artificial Sequence: Synthetic oligonucleotide
cuucaugacuugaauucuacuuuga

SEQ ID NO: 43672 - RNA, 25 nt, Artificial Sequence
  Description of Artificial Sequence: Synthetic oligonucleotide
aagagggagagaagcaacuacagac

SEQ ID NO: 43673 - RNA, 25 nt, Artificial Sequence
  Description of Artificial Sequence: Synthetic oligonucleotide
cgucuccuaccagaccaaggucaac

SEQ ID NO: 43674 - RNA, 25 nt, Artificial Sequence
  Description of Artificial Sequence: Synthetic oligonucleotide
gaucaaucggcccgacuaucucgac

SEQ ID NO: 43675 - RNA, 25 nt, Artificial Sequence
  Description of Artificial Sequence: Synthetic oligonucleotide
ggacgaacauccaaccuucccaaac

SEQ ID NO: 43676 - RNA, 25 nt, Artificial Sequence
  Description of Artificial Sequence: Synthetic oligonucleotide
agggucggaacccaagcuuagaacu

SEQ ID NO: 43677 - RNA, 25 nt, Artificial Sequence
  Description of Artificial Sequence: Synthetic oligonucleotide
ucggaacccaagcuuagaacuuuaa

SEQ ID NO: 43678 - RNA, 25 nt, Artificial Sequence
  Description of Artificial Sequence: Synthetic oligonucleotide
acccaagcuuagaacuuuaagcaac

SEQ ID NO: 43679 - RNA, 25 nt, Artificial Sequence
  Description of Artificial Sequence: Synthetic oligonucleotide
gaacuuuaagcaacaagaccaccac

SEQ ID NO: 43680 - RNA, 25 nt, Artificial Sequence
  Description of Artificial Sequence: Synthetic oligonucleotide
acuauucaguggcgagaaauaaagu

SEQ ID NO: 43681 - RNA, 25 nt, Artificial Sequence
  Description of Artificial Sequence: Synthetic oligonucleotide
cuauucaguggcgagaaauaaaguu

SEQ ID NO: 43682 - RNA, 25 nt, Artificial Sequence
  Description of Artificial Sequence: Synthetic oligonucleotide
aaacacagauaacaggaaaugaucc

SEQ ID NO: 43683 - RNA, 25 nt, Artificial Sequence
  Description of Artificial Sequence: Synthetic oligonucleotide
cuuaagaaaagagaagaaaugaaac

SEQ ID NO: 43684 - RNA, 25 nt, Artificial Sequence
  Description of Artificial Sequence: Synthetic oligonucleotide
cugaaggaguguguuuccauccucc

SEQ ID NO: 43685 - RNA, 25 nt, Artificial Sequence
  Description of Artificial Sequence: Synthetic oligonucleotide
ucaccgcgggacugaaaaucuuuga

SEQ ID NO: 43686 - RNA, 25 nt, Artificial Sequence
  Description of Artificial Sequence: Synthetic oligonucleotide
agcagaaauaagcgugccguucagg

SEQ ID NO: 43687 - RNA, 25 nt, Artificial Sequence
  Description of Artificial Sequence: Synthetic oligonucleotide
aagcgugccguucaggguccagaag

SEQ ID NO: 43688 - RNA, 25 nt, Artificial Sequence
  Description of Artificial Sequence: Synthetic oligonucleotide
agaaacagucacucaagacugcuug

SEQ ID NO: 43689 - RNA, 25 nt, Artificial Sequence
  Description of Artificial Sequence: Synthetic oligonucleotide
agaggaagaagguccaugucuuugg

SEQ ID NO: 43690 - RNA, 25 nt, Artificial Sequence
  Description of Artificial Sequence: Synthetic oligonucleotide
uguauucaaaauaugccugaaacac

SEQ ID NO: 43691 - RNA, 25 nt, Artificial Sequence
  Description of Artificial Sequence: Synthetic oligonucleotide
auuuuccucccuuucucuguaccuc

SEQ ID NO: 43692 - RNA, 25 nt, Artificial Sequence
  Description of Artificial Sequence: Synthetic oligonucleotide
caaagaaagauagagcaagacaaga

SEQ ID NO: 43693 - RNA, 25 nt, Artificial Sequence
  Description of Artificial Sequence: Synthetic oligonucleotide
aagaaagauagagcaagacaagaaa

SEQ ID NO: 43694 - RNA, 25 nt, Artificial Sequence
  Description of Artificial Sequence: Synthetic oligonucleotide
gaaagcauuuguuuguacaagaucc

SEQ ID NO: 43695 - RNA, 25 nt, Artificial Sequence
  Description of Artificial Sequence: Synthetic oligonucleotide
ugaguuaaacgaacguacuugcaga

SEQ ID NO: 43696 - RNA, 25 nt, Artificial Sequence
  Description of Artificial Sequence: Synthetic oligonucleotide
acugauacagaacgaucgauacaga

SEQ ID NO: 43697 - RNA, 25 nt, Artificial Sequence
  Description of Artificial Sequence: Synthetic oligonucleotide
auauuauauauauauaaaaauaaau

SEQ ID NO: 43698 - RNA, 25 nt, Artificial Sequence
  Description of Artificial Sequence: Synthetic oligonucleotide
auuauauauauauaaaaauaaauau

SEQ ID NO: 43699 - RNA, 25 nt, Artificial Sequence
  Description of Artificial Sequence: Synthetic oligonucleotide
ucacuggauguauuugacugcugug

SEQ ID NO: 43700 - RNA, 25 nt, Artificial Sequence
  Description of Artificial Sequence: Synthetic oligonucleotide
cagggaagaggaggagaugagagac

SEQ ID NO: 43701 - RNA, 25 nt, Artificial Sequence
  Description of Artificial Sequence: Synthetic oligonucleotide
augaucuuuuuuuugucccacuugg

SEQ ID NO: 43702 - RNA, 27 nt, Artificial Sequence
  Description of Artificial Sequence: Synthetic oligonucleotide
ggccgugaacuccucaucaaaauaccu

SEQ ID NO: 43703 - RNA, 27 nt, Artificial Sequence
  Description of Artificial Sequence: Synthetic oligonucleotide
uggugugauggugaucaucugggccgu

SEQ ID NO: 43704 - RNA, 27 nt, Artificial Sequence
  Description of Artificial Sequence: Synthetic oligonucleotide
aaacccgcaggauaguuuucuucccua

SEQ ID NO: 43705 - RNA, 27 nt, Artificial Sequence
  Description of Artificial Sequence: Synthetic oligonucleotide
caaacuggaugaaauaaauuaaaaccc

SEQ ID NO: 43706 - RNA, 27 nt, Artificial Sequence
  Description of Artificial Sequence: Synthetic oligonucleotide
agaaguccuuaacauuucccuacguga

SEQ ID NO: 43707 - RNA, 27 nt, Artificial Sequence
  Description of Artificial Sequence: Synthetic oligonucleotide
cucugucccacuggguaaacccuggcc

SEQ ID NO: 43708 - RNA, 27 nt, Artificial Sequence
  Description of Artificial Sequence: Synthetic oligonucleotide
cacaauaacaaauuuaaaccuugcucc

SEQ ID NO: 43709 - RNA, 27 nt, Artificial Sequence
  Description of Artificial Sequence: Synthetic oligonucleotide
aaaugcauuugaacaacauaauacaca

SEQ ID NO: 43710 - RNA, 27 nt, Artificial Sequence
  Description of Artificial Sequence: Synthetic oligonucleotide
ggcuuuccugucacaaagauuaaaaac

SEQ ID NO: 43711 - RNA, 27 nt, Artificial Sequence
  Description of Artificial Sequence: Synthetic oligonucleotide
agggcuuuccugucacaaagauuaaaa

SEQ ID NO: 43712 - RNA, 27 nt, Artificial Sequence
  Description of Artificial Sequence: Synthetic oligonucleotide
ggccaugcugggagacauaagcagcag

SEQ ID NO: 43713 - RNA, 27 nt, Artificial Sequence
  Description of Artificial Sequence: Synthetic oligonucleotide
ucagggagaagcuucugaaacacuucu

SEQ ID NO: 43714 - RNA, 27 nt, Artificial Sequence
  Description of Artificial Sequence: Synthetic oligonucleotide
aagggcuucuuccuuauugauggucag

SEQ ID NO: 43715 - RNA, 27 nt, Artificial Sequence
  Description of Artificial Sequence: Synthetic oligonucleotide
ugaagggcuucuuccuuauugaugguc

SEQ ID NO: 43716 - RNA, 27 nt, Artificial Sequence
  Description of Artificial Sequence: Synthetic oligonucleotide
cgcugaagggcuucuuccuuauugaug

SEQ ID NO: 43717 - RNA, 27 nt, Artificial Sequence
  Description of Artificial Sequence: Synthetic oligonucleotide
gccgcugaagggcuucuuccuuauuga

SEQ ID NO: 43718 - RNA, 27 nt, Artificial Sequence
  Description of Artificial Sequence: Synthetic oligonucleotide
acuggccgcugaagggcuucuuccuua

SEQ ID NO: 43719 - RNA, 27 nt, Artificial Sequence
  Description of Artificial Sequence: Synthetic oligonucleotide
cggagcuuuucaccuuuaguuaugcuu

SEQ ID NO: 43720 - RNA, 27 nt, Artificial Sequence
  Description of Artificial Sequence: Synthetic oligonucleotide
ccggagcuuuucaccuuuaguuaugcu

SEQ ID NO: 43721 - RNA, 27 nt, Artificial Sequence
  Description of Artificial Sequence: Synthetic oligonucleotide
cagacuguugacuggcgugauguaguu

SEQ ID NO: 43722 - RNA, 27 nt, Artificial Sequence
  Description of Artificial Sequence: Synthetic oligonucleotide
cuuuugaacucugcuuaaauccagugg

SEQ ID NO: 43723 - RNA, 27 nt, Artificial Sequence
  Description of Artificial Sequence: Synthetic oligonucleotide
gcuuuugaacucugcuuaaauccagug

SEQ ID NO: 43724 - RNA, 27 nt, Artificial Sequence
  Description of Artificial Sequence: Synthetic oligonucleotide
agggcuuuugaacucugcuuaaaucca

SEQ ID NO: 43725 - RNA, 27 nt, Artificial Sequence
  Description of Artificial Sequence: Synthetic oligonucleotide
aagggcuuuugaacucugcuuaaaucc

SEQ ID NO: 43726 - RNA, 27 nt, Artificial Sequence
  Description of Artificial Sequence: Synthetic oligonucleotide
ugaagggcuuuugaacucugcuuaaau

SEQ ID NO: 43727 - RNA, 27 nt, Artificial Sequence
  Description of Artificial Sequence: Synthetic oligonucleotide
cugaagggcuuuugaacucugcuuaaa

SEQ ID NO: 43728 - RNA, 27 nt, Artificial Sequence
  Description of Artificial Sequence: Synthetic oligonucleotide
cgcugaagggcuuuugaacucugcuua

SEQ ID NO: 43729 - RNA, 27 nt, Artificial Sequence
  Description of Artificial Sequence: Synthetic oligonucleotide
cgagcggcuucacucagacccugaggc

SEQ ID NO: 43730 - RNA, 27 nt, Artificial Sequence
  Description of Artificial Sequence: Synthetic oligonucleotide
uugacuggcgugauguaguugcuuggg

SEQ ID NO: 43731 - RNA, 27 nt, Artificial Sequence
  Description of Artificial Sequence: Synthetic oligonucleotide
cacgcaccaagaagcugccauugaucc

SEQ ID NO: 43732 - RNA, 27 nt, Artificial Sequence
  Description of Artificial Sequence: Synthetic oligonucleotide
cugaugaauccaaugugggcuggaauc

SEQ ID NO: 43733 - RNA, 27 nt, Artificial Sequence
  Description of Artificial Sequence: Synthetic oligonucleotide
cuuagguauuccacauucucagcugug

SEQ ID NO: 43734 - RNA, 27 nt, Artificial Sequence
  Description of Artificial Sequence: Synthetic oligonucleotide
ugagccucaaauuaggagauacguuuu

SEQ ID NO: 43735 - RNA, 27 nt, Artificial Sequence
  Description of Artificial Sequence: Synthetic oligonucleotide
ccaauuguagagaaauuauuuuaggaa

SEQ ID NO: 43736 - RNA, 27 nt, Artificial Sequence
  Description of Artificial Sequence: Synthetic oligonucleotide
ggcuccuaacuagcugaaucuuccaau

SEQ ID NO: 43737 - RNA, 27 nt, Artificial Sequence
  Description of Artificial Sequence: Synthetic oligonucleotide
guggauauugacuaggagaguuuaaaa

SEQ ID NO: 43738 - RNA, 27 nt, Artificial Sequence
  Description of Artificial Sequence: Synthetic oligonucleotide
ugugacugaacauaacuguaggcugaa

SEQ ID NO: 43739 - RNA, 27 nt, Artificial Sequence
  Description of Artificial Sequence: Synthetic oligonucleotide
guaugugugugugacugaacauaacug

SEQ ID NO: 43740 - RNA, 27 nt, Artificial Sequence
  Description of Artificial Sequence: Synthetic oligonucleotide
aagcaaaaggaacauuuuguaugugug

SEQ ID NO: 43741 - RNA, 27 nt, Artificial Sequence
  Description of Artificial Sequence: Synthetic oligonucleotide
aaaaauuacuuuaaaagcaaaaggaac

SEQ ID NO: 43742 - RNA, 27 nt, Artificial Sequence
  Description of Artificial Sequence: Synthetic oligonucleotide
ccauugacuguugcuucacaggucaga

SEQ ID NO: 43743 - RNA, 27 nt, Artificial Sequence
  Description of Artificial Sequence: Synthetic oligonucleotide
auugguuugucgaugugugagauaguu

SEQ ID NO: 43744 - RNA, 27 nt, Artificial Sequence
  Description of Artificial Sequence: Synthetic oligonucleotide
agugguagcaguacaauugaggacaag

SEQ ID NO: 43745 - RNA, 27 nt, Artificial Sequence
  Description of Artificial Sequence: Synthetic oligonucleotide
uaagaccgcuugccagcuacgguuuca

SEQ ID NO: 43746 - RNA, 27 nt, Artificial Sequence
  Description of Artificial Sequence: Synthetic oligonucleotide
agccgguaagaccgcuugccagcuacg

SEQ ID NO: 43747 - RNA, 27 nt, Artificial Sequence
  Description of Artificial Sequence: Synthetic oligonucleotide
gguaacccaucuuuuaaccauacaacu

SEQ ID NO: 43748 - RNA, 27 nt, Artificial Sequence
  Description of Artificial Sequence: Synthetic oligonucleotide
ucgcagguaacccaucuuuuaaccaua

SEQ ID NO: 43749 - RNA, 27 nt, Artificial Sequence
  Description of Artificial Sequence: Synthetic oligonucleotide
cucagcaagauuguauaauucccugca

SEQ ID NO: 43750 - RNA, 27 nt, Artificial Sequence
  Description of Artificial Sequence: Synthetic oligonucleotide
acuguuuuaugcucagcaagauuguau

SEQ ID NO: 43751 - RNA, 27 nt, Artificial Sequence
  Description of Artificial Sequence: Synthetic oligonucleotide
aggauaaaggacucuucauuauuggaa

SEQ ID NO: 43752 - RNA, 27 nt, Artificial Sequence
  Description of Artificial Sequence: Synthetic oligonucleotide
caacuugcguuggaacauccaaagugu

SEQ ID NO: 43753 - RNA, 27 nt, Artificial Sequence
  Description of Artificial Sequence: Synthetic oligonucleotide
augguuucaguuuaguggaagcauuua

SEQ ID NO: 43754 - RNA, 27 nt, Artificial Sequence
  Description of Artificial Sequence: Synthetic oligonucleotide
auauuuaacaaagucaaacuuucucac

SEQ ID NO: 43755 - RNA, 27 nt, Artificial Sequence
  Description of Artificial Sequence: Synthetic oligonucleotide
aacuuuuaauauacaguaguucuuuuc

SEQ ID NO: 43756 - RNA, 27 nt, Artificial Sequence
  Description of Artificial Sequence: Synthetic oligonucleotide
guuaagucaaaacccguauuucuaaag

SEQ ID NO: 43757 - RNA, 27 nt, Artificial Sequence
  Description of Artificial Sequence: Synthetic oligonucleotide
gugcugaguuugcuguacccauguuga

SEQ ID NO: 43758 - RNA, 27 nt, Artificial Sequence
  Description of Artificial Sequence: Synthetic oligonucleotide
ugaggucagcaucuucugugucuuuac

SEQ ID NO: 43759 - RNA, 27 nt, Artificial Sequence
  Description of Artificial Sequence: Synthetic oligonucleotide
gcgaucugaauaaaccucccuacuagc

SEQ ID NO: 43760 - RNA, 27 nt, Artificial Sequence
  Description of Artificial Sequence: Synthetic oligonucleotide
aucccagaacccugcugcagaaggcca

SEQ ID NO: 43761 - RNA, 27 nt, Artificial Sequence
  Description of Artificial Sequence: Synthetic oligonucleotide
cauaauuuccaauauguaccagaccuu

SEQ ID NO: 43762 - RNA, 27 nt, Artificial Sequence
  Description of Artificial Sequence: Synthetic oligonucleotide
cuagugcuuccaucggaaggacuaggu

SEQ ID NO: 43763 - RNA, 27 nt, Artificial Sequence
  Description of Artificial Sequence: Synthetic oligonucleotide
uccacauaaaaacaauauucacuggga

SEQ ID NO: 43764 - RNA, 27 nt, Artificial Sequence
  Description of Artificial Sequence: Synthetic oligonucleotide
ucuaccaauuccaacuugaauucauug

SEQ ID NO: 43765 - RNA, 27 nt, Artificial Sequence
  Description of Artificial Sequence: Synthetic oligonucleotide
ucuccaagucuaaaucuguguccugag

SEQ ID NO: 43766 - RNA, 27 nt, Artificial Sequence
  Description of Artificial Sequence: Synthetic oligonucleotide
uggaauacuguaacugugcuuugagga

SEQ ID NO: 43767 - RNA, 27 nt, Artificial Sequence
  Description of Artificial Sequence: Synthetic oligonucleotide
uuaauucaucagugguggcagugguag

SEQ ID NO: 43768 - RNA, 27 nt, Artificial Sequence
  Description of Artificial Sequence: Synthetic oligonucleotide
gugaugauguggcacuaguaguuucuu

SEQ ID NO: 43769 - RNA, 27 nt, Artificial Sequence
  Description of Artificial Sequence: Synthetic oligonucleotide
ucuguuuggugaggcuguccgacuuug

SEQ ID NO: 43770 - RNA, 27 nt, Artificial Sequence
  Description of Artificial Sequence: Synthetic oligonucleotide
ccaucauguuccauuuuucgcuuucuc

SEQ ID NO: 43771 - RNA, 27 nt, Artificial Sequence
  Description of Artificial Sequence: Synthetic oligonucleotide
gcagucuacaugcuaaaucagagggua

SEQ ID NO: 43772 - RNA, 27 nt, Artificial Sequence
  Description of Artificial Sequence: Synthetic oligonucleotide
cauaaauagauccuuaaauagcucaaa

SEQ ID NO: 43773 - RNA, 27 nt, Artificial Sequence
  Description of Artificial Sequence: Synthetic oligonucleotide
ugauaauagugcuuuuucaccuuuuuc

SEQ ID NO: 43774 - RNA, 27 nt, Artificial Sequence
  Description of Artificial Sequence: Synthetic oligonucleotide
gcagaacugauaauagugcuuuuucac

SEQ ID NO: 43775 - RNA, 27 nt, Artificial Sequence
  Description of Artificial Sequence: Synthetic oligonucleotide
guagguuuaaucuuucuuuucagccau

SEQ ID NO: 43776 - RNA, 27 nt, Artificial Sequence
  Description of Artificial Sequence: Synthetic oligonucleotide
agaaggauuuuauuauaaggguuuaau

SEQ ID NO: 43777 - RNA, 27 nt, Artificial Sequence
  Description of Artificial Sequence: Synthetic oligonucleotide
gucuacagcauuggcuaauaguaugaa

SEQ ID NO: 43778 - RNA, 27 nt, Artificial Sequence
  Description of Artificial Sequence: Synthetic oligonucleotide
cuauuccuaucaaaaugcuucugucua

SEQ ID NO: 43779 - RNA, 27 nt, Artificial Sequence
  Description of Artificial Sequence: Synthetic oligonucleotide
ucagggccauuaucuuauuugcucuau

SEQ ID NO: 43780 - RNA, 27 nt, Artificial Sequence
  Description of Artificial Sequence: Synthetic oligonucleotide
ugcuugaggaagagaaaaauguugguc

SEQ ID NO: 43781 - RNA, 27 nt, Artificial Sequence
  Description of Artificial Sequence: Synthetic oligonucleotide
ugggcugaacuuuucucauacuuaaag

SEQ ID NO: 43782 - RNA, 27 nt, Artificial Sequence
  Description of Artificial Sequence: Synthetic oligonucleotide
gguucagcagccaucuuuauuccugcg

SEQ ID NO: 43783 - RNA, 27 nt, Artificial Sequence
  Description of Artificial Sequence: Synthetic oligonucleotide
ugaagagaacuuggucauucaaauuuc

SEQ ID NO: 43784 - RNA, 27 nt, Artificial Sequence
  Description of Artificial Sequence: Synthetic oligonucleotide
cucuaggcuggcuaucuuuauacauac

SEQ ID NO: 43785 - RNA, 27 nt, Artificial Sequence
  Description of Artificial Sequence: Synthetic oligonucleotide
acacuucacagagauaguuacagccau

SEQ ID NO: 43786 - RNA, 27 nt, Artificial Sequence
  Description of Artificial Sequence: Synthetic oligonucleotide
uugaaauuuucucacacuucacagaga

SEQ ID NO: 43787 - RNA, 27 nt, Artificial Sequence
  Description of Artificial Sequence: Synthetic oligonucleotide
ucaggaggauucauuuccuuaaaggaa

SEQ ID NO: 43788 - RNA, 27 nt, Artificial Sequence
  Description of Artificial Sequence: Synthetic oligonucleotide
auaugaugucacuuuuuguauccuuga

SEQ ID NO: 43789 - RNA, 27 nt, Artificial Sequence
  Description of Artificial Sequence: Synthetic oligonucleotide
uaugaugaagauucaaauugcaucuua

SEQ ID NO: 43790 - RNA, 27 nt, Artificial Sequence
  Description of Artificial Sequence: Synthetic oligonucleotide
uuaauagcuagucuucguuuugaacag

SEQ ID NO: 43791 - RNA, 27 nt, Artificial Sequence
  Description of Artificial Sequence: Synthetic oligonucleotide
auuuuuaguagagaugagguuucacca

SEQ ID NO: 43792 - RNA, 27 nt, Artificial Sequence
  Description of Artificial Sequence: Synthetic oligonucleotide
aggcgagauagagcuucucuuucguuc

SEQ ID NO: 43793 - RNA, 27 nt, Artificial Sequence
  Description of Artificial Sequence: Synthetic oligonucleotide
aacuggaccgaaggcgcuuguggagaa

SEQ ID NO: 43794 - RNA, 27 nt, Artificial Sequence
  Description of Artificial Sequence: Synthetic oligonucleotide
gcggcuacaucuuuggaaucuucuccu

SEQ ID NO: 43795 - RNA, 27 nt, Artificial Sequence
  Description of Artificial Sequence: Synthetic oligonucleotide
caagucuccucauugaauccagauugg

SEQ ID NO: 43796 - RNA, 27 nt, Artificial Sequence
  Description of Artificial Sequence: Synthetic oligonucleotide
uccucacuacucucaaaucuguucugg

SEQ ID NO: 43797 - RNA, 27 nt, Artificial Sequence
  Description of Artificial Sequence: Synthetic oligonucleotide
uuuguacucaucugcacagcucuggcu

SEQ ID NO: 43798 - RNA, 27 nt, Artificial Sequence
  Description of Artificial Sequence: Synthetic oligonucleotide
gcccauuaacaacaacaaucugaggug

SEQ ID NO: 43799 - RNA, 27 nt, Artificial Sequence
  Description of Artificial Sequence: Synthetic oligonucleotide
aauaaauuaaaaauaauuaaaauagug

SEQ ID NO: 43800 - RNA, 27 nt, Artificial Sequence
  Description of Artificial Sequence: Synthetic oligonucleotide
cauauuuaaauauuaauaaauuaaaaa

SEQ ID NO: 43801 - RNA, 27 nt, Artificial Sequence
  Description of Artificial Sequence: Synthetic oligonucleotide
gaaacaaaggauauucaaacugcauag

SEQ ID NO: 43802 - RNA, 27 nt, Artificial Sequence
  Description of Artificial Sequence: Synthetic oligonucleotide
caaacacuuagacgccagcagcauggg

SEQ ID NO: 43803 - RNA, 27 nt, Artificial Sequence
  Description of Artificial Sequence: Synthetic oligonucleotide
uuugucacaggugaaaugcacaucuga

SEQ ID NO: 43804 - RNA, 27 nt, Artificial Sequence
  Description of Artificial Sequence: Synthetic oligonucleotide
uaauucagccuggcacagguuuugauc

SEQ ID NO: 43805 - RNA, 27 nt, Artificial Sequence
  Description of Artificial Sequence: Synthetic oligonucleotide
auuguaagaaugacuacccacauucac

SEQ ID NO: 43806 - RNA, 27 nt, Artificial Sequence
  Description of Artificial Sequence: Synthetic oligonucleotide
caauuguaagaaugacuacccacauuc

SEQ ID NO: 43807 - RNA, 27 nt, Artificial Sequence
  Description of Artificial Sequence: Synthetic oligonucleotide
guacacucucugaugcucauuuucaua

SEQ ID NO: 43808 - RNA, 27 nt, Artificial Sequence
  Description of Artificial Sequence: Synthetic oligonucleotide
cugcugaguucuacaugaaaagcaaau

SEQ ID NO: 43809 - RNA, 27 nt, Artificial Sequence
  Description of Artificial Sequence: Synthetic oligonucleotide
uacugaaaauaaauauagaaauacaac

SEQ ID NO: 43810 - RNA, 27 nt, Artificial Sequence
  Description of Artificial Sequence: Synthetic oligonucleotide
uuccauuuaagaaacauuaaucaaaac

SEQ ID NO: 43811 - RNA, 27 nt, Artificial Sequence
  Description of Artificial Sequence: Synthetic oligonucleotide
acaauuuuaggcacuauacacguuguu

SEQ ID NO: 43812 - RNA, 27 nt, Artificial Sequence
  Description of Artificial Sequence: Synthetic oligonucleotide
ccagauguuaguagccaaggauauggu

SEQ ID NO: 43813 - RNA, 27 nt, Artificial Sequence
  Description of Artificial Sequence: Synthetic oligonucleotide
agcucacagucuccagauguuaguagc

SEQ ID NO: 43814 - RNA, 27 nt, Artificial Sequence
  Description of Artificial Sequence: Synthetic oligonucleotide
auuaauaaaaagcacacaacuuauggc

SEQ ID NO: 43815 - RNA, 27 nt, Artificial Sequence
  Description of Artificial Sequence: Synthetic oligonucleotide
aauguaagaagagccaaaaugaugcau

SEQ ID NO: 43816 - RNA, 27 nt, Artificial Sequence
  Description of Artificial Sequence: Synthetic oligonucleotide
acauuuuuacaaauguaagaagagcca

SEQ ID NO: 43817 - RNA, 27 nt, Artificial Sequence
  Description of Artificial Sequence: Synthetic oligonucleotide
aauaugaauuaagaugaccuaaucugu

SEQ ID NO: 43818 - RNA, 27 nt, Artificial Sequence
  Description of Artificial Sequence: Synthetic oligonucleotide
ucaugauuaguucuuucaauuccaucc

SEQ ID NO: 43819 - RNA, 27 nt, Artificial Sequence
  Description of Artificial Sequence: Synthetic oligonucleotide
cccaagagcagaaggaaugagugugca

SEQ ID NO: 43820 - RNA, 27 nt, Artificial Sequence
  Description of Artificial Sequence: Synthetic oligonucleotide
cucaaagcuacugguuaccucuacacc

SEQ ID NO: 43821 - RNA, 27 nt, Artificial Sequence
  Description of Artificial Sequence: Synthetic oligonucleotide
ugaaauauuacguggcaugugguuggg

SEQ ID NO: 43822 - RNA, 27 nt, Artificial Sequence
  Description of Artificial Sequence: Synthetic oligonucleotide
agugaagagaauaacuuguuuccgaag

SEQ ID NO: 43823 - RNA, 27 nt, Artificial Sequence
  Description of Artificial Sequence: Synthetic oligonucleotide
uuucuuagcauuaguuauugggaguga

SEQ ID NO: 43824 - RNA, 27 nt, Artificial Sequence
  Description of Artificial Sequence: Synthetic oligonucleotide
uugauuuucagcauuucuuagcauuag

SEQ ID NO: 43825 - RNA, 27 nt, Artificial Sequence
  Description of Artificial Sequence: Synthetic oligonucleotide
aaaguaaucauauuuagagaaagacag

SEQ ID NO: 43826 - RNA, 27 nt, Artificial Sequence
  Description of Artificial Sequence: Synthetic oligonucleotide
uguagaacaaaaugccugaaauucagc

SEQ ID NO: 43827 - RNA, 27 nt, Artificial Sequence
  Description of Artificial Sequence: Synthetic oligonucleotide
gagagucccgggugagagggaaucgcc

SEQ ID NO: 43828 - RNA, 27 nt, Artificial Sequence
  Description of Artificial Sequence: Synthetic oligonucleotide
cuuuacuuuaaagguucacuuuccuug

SEQ ID NO: 43829 - RNA, 27 nt, Artificial Sequence
  Description of Artificial Sequence: Synthetic oligonucleotide
ccaggcuuccagagcaugcagccuccu

SEQ ID NO: 43830 - RNA, 27 nt, Artificial Sequence
  Description of Artificial Sequence: Synthetic oligonucleotide
cucucuuuuguuuucuguucagagaaa

SEQ ID NO: 43831 - RNA, 27 nt, Artificial Sequence
  Description of Artificial Sequence: Synthetic oligonucleotide
cggcauaacugauuacagccaaguuca

SEQ ID NO: 43832 - RNA, 27 nt, Artificial Sequence
  Description of Artificial Sequence: Synthetic oligonucleotide
uggacuucuuuuaauuuuggcuucuuc

SEQ ID NO: 43833 - RNA, 27 nt, Artificial Sequence
  Description of Artificial Sequence: Synthetic oligonucleotide
uaaccucaccuggacuucuuuuaauuu

SEQ ID NO: 43834 - RNA, 27 nt, Artificial Sequence
  Description of Artificial Sequence: Synthetic oligonucleotide
guccucuucccgauaauccggauucag

SEQ ID NO: 43835 - RNA, 27 nt, Artificial Sequence
  Description of Artificial Sequence: Synthetic oligonucleotide
acaauacuugcuuugaugucacauuaa

SEQ ID NO: 43836 - RNA, 27 nt, Artificial Sequence
  Description of Artificial Sequence: Synthetic oligonucleotide
gagugcuacaauacuugcuuugauguc

SEQ ID NO: 43837 - RNA, 27 nt, Artificial Sequence
  Description of Artificial Sequence: Synthetic oligonucleotide
auuugugguuuuguuuucucucucucu

SEQ ID NO: 43838 - RNA, 27 nt, Artificial Sequence
  Description of Artificial Sequence: Synthetic oligonucleotide
uguaugggcuuaaauacuacagcgagg

SEQ ID NO: 43839 - RNA, 27 nt, Artificial Sequence
  Description of Artificial Sequence: Synthetic oligonucleotide
cuguaugggcuuaaauacuacagcgag

SEQ ID NO: 43840 - RNA, 27 nt, Artificial Sequence
  Description of Artificial Sequence: Synthetic oligonucleotide
ggaagguuucuguaugggcuuaaauac

SEQ ID NO: 43841 - RNA, 27 nt, Artificial Sequence
  Description of Artificial Sequence: Synthetic oligonucleotide
guagguauaccauguuuauuuuaauac

SEQ ID NO: 43842 - RNA, 27 nt, Artificial Sequence
  Description of Artificial Sequence: Synthetic oligonucleotide
uccgaaaacuggccgaucagaacagcc

SEQ ID NO: 43843 - RNA, 27 nt, Artificial Sequence
  Description of Artificial Sequence: Synthetic oligonucleotide
cccuguuccaaaguucaaauuauuugu

SEQ ID NO: 43844 - RNA, 27 nt, Artificial Sequence
  Description of Artificial Sequence: Synthetic oligonucleotide
acuggaaaguuaaauuaaggucgcaau

SEQ ID NO: 43845 - RNA, 27 nt, Artificial Sequence
  Description of Artificial Sequence: Synthetic oligonucleotide
caaaaccaaacuuuagcuuucucagcc

SEQ ID NO: 43846 - RNA, 27 nt, Artificial Sequence
  Description of Artificial Sequence: Synthetic oligonucleotide
uacagugggaaguagcaucuuuacuuu

SEQ ID NO: 43847 - RNA, 27 nt, Artificial Sequence
  Description of Artificial Sequence: Synthetic oligonucleotide
ucauaugguaucagcaauuaagcagua

SEQ ID NO: 43848 - RNA, 27 nt, Artificial Sequence
  Description of Artificial Sequence: Synthetic oligonucleotide
cagcccauguuucauucauaugguauc

SEQ ID NO: 43849 - RNA, 27 nt, Artificial Sequence
  Description of Artificial Sequence: Synthetic oligonucleotide
uaugaaaaaguuggauaagaaaguugg

SEQ ID NO: 43850 - RNA, 27 nt, Artificial Sequence
  Description of Artificial Sequence: Synthetic oligonucleotide
uccggccucaugaugucaugcaaggcu

SEQ ID NO: 43851 - RNA, 27 nt, Artificial Sequence
  Description of Artificial Sequence: Synthetic oligonucleotide
acaaaugcagucauauacaaauucagg

SEQ ID NO: 43852 - RNA, 27 nt, Artificial Sequence
  Description of Artificial Sequence: Synthetic oligonucleotide
gguaguaaacauucuacuaggauucuu

SEQ ID NO: 43853 - RNA, 27 nt, Artificial Sequence
  Description of Artificial Sequence: Synthetic oligonucleotide
uuucaucaaaaaauucuucccuuucug

SEQ ID NO: 43854 - RNA, 27 nt, Artificial Sequence
  Description of Artificial Sequence: Synthetic oligonucleotide
aaauucacacacuggcaugccgauagc

SEQ ID NO: 43855 - RNA, 27 nt, Artificial Sequence
  Description of Artificial Sequence: Synthetic oligonucleotide
acauacauugcucuacuaugaggugaa

SEQ ID NO: 43856 - RNA, 27 nt, Artificial Sequence
  Description of Artificial Sequence: Synthetic oligonucleotide
uauauaugugcuuuggcaauucuggug

SEQ ID NO: 43857 - RNA, 27 nt, Artificial Sequence
  Description of Artificial Sequence: Synthetic oligonucleotide
ggagaaacuauuacccagaucaccacu

SEQ ID NO: 43858 - RNA, 27 nt, Artificial Sequence
  Description of Artificial Sequence: Synthetic oligonucleotide
auuuggagaaacuauuacccagaucac

SEQ ID NO: 43859 - RNA, 27 nt, Artificial Sequence
  Description of Artificial Sequence: Synthetic oligonucleotide
uuucuaggaaguauucaucacauccac

SEQ ID NO: 43860 - RNA, 27 nt, Artificial Sequence
  Description of Artificial Sequence: Synthetic oligonucleotide
cauauaugguguagcuguggaaaugcg

SEQ ID NO: 43861 - RNA, 27 nt, Artificial Sequence
  Description of Artificial Sequence: Synthetic oligonucleotide
cuccauucauauaugguguagcugugg

SEQ ID NO: 43862 - RNA, 27 nt, Artificial Sequence
  Description of Artificial Sequence: Synthetic oligonucleotide
aucuucuucucguguaagaacugcagc

SEQ ID NO: 43863 - RNA, 27 nt, Artificial Sequence
  Description of Artificial Sequence: Synthetic oligonucleotide
ucccuguaaaugaucuucuucucgugu

SEQ ID NO: 43864 - RNA, 27 nt, Artificial Sequence
  Description of Artificial Sequence: Synthetic oligonucleotide
gucccuguaaaugaucuucuucucgug

SEQ ID NO: 43865 - RNA, 27 nt, Artificial Sequence
  Description of Artificial Sequence: Synthetic oligonucleotide
ucaggucccuguaaaugaucuucuucu

SEQ ID NO: 43866 - RNA, 27 nt, Artificial Sequence
  Description of Artificial Sequence: Synthetic oligonucleotide
gaugcagucaaacaccucuuccucugu

SEQ ID NO: 43867 - RNA, 27 nt, Artificial Sequence
  Description of Artificial Sequence: Synthetic oligonucleotide
cgaugcagucaaacaccucuuccucug

SEQ ID NO: 43868 - RNA, 27 nt, Artificial Sequence
  Description of Artificial Sequence: Synthetic oligonucleotide
cccugugaacucgcccucaaaguagcg

SEQ ID NO: 43869 - RNA, 27 nt, Artificial Sequence
  Description of Artificial Sequence: Synthetic oligonucleotide
ggacagaggugccaggagaugcccuca

SEQ ID NO: 43870 - RNA, 27 nt, Artificial Sequence
  Description of Artificial Sequence: Synthetic oligonucleotide
uuaaaaagacaaaccauaucacuccuu

SEQ ID NO: 43871 - RNA, 27 nt, Artificial Sequence
  Description of Artificial Sequence: Synthetic oligonucleotide
cuuaaaaagacaaaccauaucacuccu

SEQ ID NO: 43872 - RNA, 27 nt, Artificial Sequence
  Description of Artificial Sequence: Synthetic oligonucleotide
gacaaccuuuaggaucuuuacugcaac

SEQ ID NO: 43873 - RNA, 27 nt, Artificial Sequence
  Description of Artificial Sequence: Synthetic oligonucleotide
gucgacaaccuuuaggaucuuuacugc

SEQ ID NO: 43874 - RNA, 27 nt, Artificial Sequence
  Description of Artificial Sequence: Synthetic oligonucleotide
acaauugccagguuguccuuugucaug

SEQ ID NO: 43875 - RNA, 27 nt, Artificial Sequence
  Description of Artificial Sequence: Synthetic oligonucleotide
ccucgcaccacugggucacaauugcca

SEQ ID NO: 43876 - RNA, 27 nt, Artificial Sequence
  Description of Artificial Sequence: Synthetic oligonucleotide
auuucaugucucuauggaugauguucu

SEQ ID NO: 43877 - RNA, 27 nt, Artificial Sequence
  Description of Artificial Sequence: Synthetic oligonucleotide
uggagaaauauauuguuggauuucaug

SEQ ID NO: 43878 - RNA, 27 nt, Artificial Sequence
  Description of Artificial Sequence: Synthetic oligonucleotide
agccuucauggagaaauauauuguugg

SEQ ID NO: 43879 - RNA, 27 nt, Artificial Sequence
  Description of Artificial Sequence: Synthetic oligonucleotide
accacuccagcgugacuuuacuguugc

SEQ ID NO: 43880 - RNA, 27 nt, Artificial Sequence
  Description of Artificial Sequence: Synthetic oligonucleotide
ccucucuuccuuuacuuucuucacaca

SEQ ID NO: 43881 - RNA, 27 nt, Artificial Sequence
  Description of Artificial Sequence: Synthetic oligonucleotide
gcccgaugcaaggauggcucggaagcg

SEQ ID NO: 43882 - RNA, 27 nt, Artificial Sequence
  Description of Artificial Sequence: Synthetic oligonucleotide
cacaguaggauauucaaccuccauuuc

SEQ ID NO: 43883 - RNA, 27 nt, Artificial Sequence
  Description of Artificial Sequence: Synthetic oligonucleotide
uuacacaguaggauauucaaccuccau

SEQ ID NO: 43884 - RNA, 27 nt, Artificial Sequence
  Description of Artificial Sequence: Synthetic oligonucleotide
uacacuacaagggaaaacucaaaaucu

SEQ ID NO: 43885 - RNA, 27 nt, Artificial Sequence
  Description of Artificial Sequence: Synthetic oligonucleotide
caaucaacaaagaacaaacaggauaaa

SEQ ID NO: 43886 - RNA, 27 nt, Artificial Sequence
  Description of Artificial Sequence: Synthetic oligonucleotide
uuucaaucaacaaagaacaaacaggau

SEQ ID NO: 43887 - RNA, 27 nt, Artificial Sequence
  Description of Artificial Sequence: Synthetic oligonucleotide
auggaagaaaaagaaggcuguagagaa

SEQ ID NO: 43888 - RNA, 27 nt, Artificial Sequence
  Description of Artificial Sequence: Synthetic oligonucleotide
uagaaggaagauuagcuauggaagaaa

SEQ ID NO: 43889 - RNA, 27 nt, Artificial Sequence
  Description of Artificial Sequence: Synthetic oligonucleotide
augaagcauucaacaggaagauuauuu

SEQ ID NO: 43890 - RNA, 27 nt, Artificial Sequence
  Description of Artificial Sequence: Synthetic oligonucleotide
caugaagcauucaacaggaagauuauu

SEQ ID NO: 43891 - RNA, 27 nt, Artificial Sequence
  Description of Artificial Sequence: Synthetic oligonucleotide
ucaaaguagaauucaagucaugaagca

SEQ ID NO: 43892 - RNA, 27 nt, Artificial Sequence
  Description of Artificial Sequence: Synthetic oligonucleotide
gucuguaguugcuucucucccucuuag

SEQ ID NO: 43893 - RNA, 27 nt, Artificial Sequence
  Description of Artificial Sequence: Synthetic oligonucleotide
guugaccuuggucugguaggagacggc

SEQ ID NO: 43894 - RNA, 27 nt, Artificial Sequence
  Description of Artificial Sequence: Synthetic oligonucleotide
gucgagauagucgggccgauugaucuc

SEQ ID NO: 43895 - RNA, 27 nt, Artificial Sequence
  Description of Artificial Sequence: Synthetic oligonucleotide
guuugggaagguuggauguucguccuc

SEQ ID NO: 43896 - RNA, 27 nt, Artificial Sequence
  Description of Artificial Sequence: Synthetic oligonucleotide
aguucuaagcuuggguuccgacccuaa

SEQ ID NO: 43897 - RNA, 27 nt, Artificial Sequence
  Description of Artificial Sequence: Synthetic oligonucleotide
uuaaaguucuaagcuuggguuccgacc

SEQ ID NO: 43898 - RNA, 27 nt, Artificial Sequence
  Description of Artificial Sequence: Synthetic oligonucleotide
guugcuuaaaguucuaagcuuggguuc

SEQ ID NO: 43899 - RNA, 27 nt, Artificial Sequence
  Description of Artificial Sequence: Synthetic oligonucleotide
gugguggucuuguugcuuaaaguucua

SEQ ID NO: 43900 - RNA, 27 nt, Artificial Sequence
  Description of Artificial Sequence: Synthetic oligonucleotide
acuuuauuucucgccacugaauaguag

SEQ ID NO: 43901 - RNA, 27 nt, Artificial Sequence
  Description of Artificial Sequence: Synthetic oligonucleotide
aacuuuauuucucgccacugaauagua

SEQ ID NO: 43902 - RNA, 27 nt, Artificial Sequence
  Description of Artificial Sequence: Synthetic oligonucleotide
ggaucauuuccuguuaucuguguuugu

SEQ ID NO: 43903 - RNA, 27 nt, Artificial Sequence
  Description of Artificial Sequence: Synthetic oligonucleotide
guuucauuucuucucuuuucuuaaggc

SEQ ID NO: 43904 - RNA, 27 nt, Artificial Sequence
  Description of Artificial Sequence: Synthetic oligonucleotide
ggaggauggaaacacacuccuucaguu

SEQ ID NO: 43905 - RNA, 27 nt, Artificial Sequence
  Description of Artificial Sequence: Synthetic oligonucleotide
ucaaagauuuucagucccgcggugaca

SEQ ID NO: 43906 - RNA, 27 nt, Artificial Sequence
  Description of Artificial Sequence: Synthetic oligonucleotide
ccugaacggcacgcuuauuucugcugu

SEQ ID NO: 43907 - RNA, 27 nt, Artificial Sequence
  Description of Artificial Sequence: Synthetic oligonucleotide
cuucuggacccugaacggcacgcuuau

SEQ ID NO: 43908 - RNA, 27 nt, Artificial Sequence
  Description of Artificial Sequence: Synthetic oligonucleotide
caagcagucuugagugacuguuucuuc

SEQ ID NO: 43909 - RNA, 27 nt, Artificial Sequence
  Description of Artificial Sequence: Synthetic oligonucleotide
ccaaagacauggaccuucuuccucuga

SEQ ID NO: 43910 - RNA, 27 nt, Artificial Sequence
  Description of Artificial Sequence: Synthetic oligonucleotide
guguuucaggcauauuuugaauacauc

SEQ ID NO: 43911 - RNA, 27 nt, Artificial Sequence
  Description of Artificial Sequence: Synthetic oligonucleotide
gagguacagagaaagggaggaaaauag

SEQ ID NO: 43912 - RNA, 27 nt, Artificial Sequence
  Description of Artificial Sequence: Synthetic oligonucleotide
ucuugucuugcucuaucuuucuuuggu

SEQ ID NO: 43913 - RNA, 27 nt, Artificial Sequence
  Description of Artificial Sequence: Synthetic oligonucleotide
uuucuugucuugcucuaucuuucuuug

SEQ ID NO: 43914 - RNA, 27 nt, Artificial Sequence
  Description of Artificial Sequence: Synthetic oligonucleotide
ggaucuuguacaaacaaaugcuuucuc

SEQ ID NO: 43915 - RNA, 27 nt, Artificial Sequence
  Description of Artificial Sequence: Synthetic oligonucleotide
ucugcaaguacguucguuuaacucaag

SEQ ID NO: 43916 - RNA, 27 nt, Artificial Sequence
  Description of Artificial Sequence: Synthetic oligonucleotide
ucuguaucgaucguucuguaucagucu

SEQ ID NO: 43917 - RNA, 27 nt, Artificial Sequence
  Description of Artificial Sequence: Synthetic oligonucleotide
auuuauuuuuauauauauauaauauau

SEQ ID NO: 43918 - RNA, 27 nt, Artificial Sequence
  Description of Artificial Sequence: Synthetic oligonucleotide
auauuuauuuuuauauauauauaauau

SEQ ID NO: 43919 - RNA, 27 nt, Artificial Sequence
  Description of Artificial Sequence: Synthetic oligonucleotide
cacagcagucaaauacauccagugaag

SEQ ID NO: 43920 - RNA, 27 nt, Artificial Sequence
  Description of Artificial Sequence: Synthetic oligonucleotide
gucucucaucuccuccucuucccuguc

SEQ ID NO: 43921 - RNA, 27 nt, Artificial Sequence
  Description of Artificial Sequence: Synthetic oligonucleotide
ccaagugggacaaaaaaaagaucaugc

SEQ ID NO: 43922 - RNA, 14 nt, Artificial Sequence
  Description of Artificial Sequence: Synthetic oligonucleotide
guauuuugaugagg

SEQ ID NO: 43923 - RNA, 12 nt, Artificial Sequence
  Description of Artificial Sequence: Synthetic oligonucleotide
ggcccagaugau

SEQ ID NO: 43924 - RNA, 14 nt, Artificial Sequence
  Description of Artificial Sequence: Synthetic oligonucleotide
gggaagaaaacuau

SEQ ID NO: 43925 - RNA, 15 nt, Artificial Sequence
  Description of Artificial Sequence: Synthetic oligonucleotide
guuuuaauuuauuuc

SEQ ID NO: 43926 - RNA, 12 nt, Artificial Sequence
  Description of Artificial Sequence: Synthetic oligonucleotide
acguagggaaau

SEQ ID NO: 43927 - RNA, 12 nt, Artificial Sequence
  Description of Artificial Sequence: Synthetic oligonucleotide
ccaggguuuacc

SEQ ID NO: 43928 - RNA, 11 nt, Artificial Sequence
  Description of Artificial Sequence: Synthetic oligonucleotide
agcaagguuua

SEQ ID NO: 43929 - RNA, 12 nt, Artificial Sequence
  Description of Artificial Sequence: Synthetic oligonucleotide
uguauuauguug

SEQ ID NO: 43930 - RNA, 15 nt, Artificial Sequence
  Description of Artificial Sequence: Synthetic oligonucleotide
uuuuaaucuuuguga

SEQ ID NO: 43931 - RNA, 14 nt, Artificial Sequence
  Description of Artificial Sequence: Synthetic oligonucleotide
uuaaucuuugugac

SEQ ID NO: 43932 - RNA, 13 nt, Artificial Sequence
  Description of Artificial Sequence: Synthetic oligonucleotide
gcugcuuaugucu

SEQ ID NO: 43933 - RNA, 14 nt, Artificial Sequence
  Description of Artificial Sequence: Synthetic oligonucleotide
aaguguuucagaag

SEQ ID NO: 43934 - RNA, 13 nt, Artificial Sequence
  Description of Artificial Sequence: Synthetic oligonucleotide
gaccaucaauaag

SEQ ID NO: 43935 - RNA, 13 nt, Artificial Sequence
  Description of Artificial Sequence: Synthetic oligonucleotide
ccaucaauaagga

SEQ ID NO: 43936 - RNA, 14 nt, Artificial Sequence
  Description of Artificial Sequence: Synthetic oligonucleotide
ucaauaaggaagaa

SEQ ID NO: 43937 - RNA, 14 nt, Artificial Sequence
  Description of Artificial Sequence: Synthetic oligonucleotide
aauaaggaagaagc

SEQ ID NO: 43938 - RNA, 13 nt, Artificial Sequence
  Description of Artificial Sequence: Synthetic oligonucleotide
aggaagaagcccu

SEQ ID NO: 43939 - RNA, 13 nt, Artificial Sequence
  Description of Artificial Sequence: Synthetic oligonucleotide
gcauaacuaaagg

SEQ ID NO: 43940 - RNA, 14 nt, Artificial Sequence
  Description of Artificial Sequence: Synthetic oligonucleotide
cauaacuaaaggug

SEQ ID NO: 43941 - RNA, 12 nt, Artificial Sequence
  Description of Artificial Sequence: Synthetic oligonucleotide
cuacaucacgcc

SEQ ID NO: 43942 - RNA, 12 nt, Artificial Sequence
  Description of Artificial Sequence: Synthetic oligonucleotide
acuggauuuaag

SEQ ID NO: 43943 - RNA, 12 nt, Artificial Sequence
  Description of Artificial Sequence: Synthetic oligonucleotide
cuggauuuaagc

SEQ ID NO: 43944 - RNA, 13 nt, Artificial Sequence
  Description of Artificial Sequence: Synthetic oligonucleotide
gauuuaagcagag

SEQ ID NO: 43945 - RNA, 13 nt, Artificial Sequence
  Description of Artificial Sequence: Synthetic oligonucleotide
auuuaagcagagu

SEQ ID NO: 43946 - RNA, 13 nt, Artificial Sequence
  Description of Artificial Sequence: Synthetic oligonucleotide
uuaagcagaguuc

SEQ ID NO: 43947 - RNA, 13 nt, Artificial Sequence
  Description of Artificial Sequence: Synthetic oligonucleotide
uaagcagaguuca

SEQ ID NO: 43948 - RNA, 14 nt, Artificial Sequence
  Description of Artificial Sequence: Synthetic oligonucleotide
agcagaguucaaaa

SEQ ID NO: 43949 - RNA, 12 nt, Artificial Sequence
  Description of Artificial Sequence: Synthetic oligonucleotide
cucagggucuga

SEQ ID NO: 43950 - RNA, 13 nt, Artificial Sequence
  Description of Artificial Sequence: Synthetic oligonucleotide
caagcaacuacau

SEQ ID NO: 43951 - RNA, 12 nt, Artificial Sequence
  Description of Artificial Sequence: Synthetic oligonucleotide
aucaauggcagc

SEQ ID NO: 43952 - RNA, 11 nt, Artificial Sequence
  Description of Artificial Sequence: Synthetic oligonucleotide
uuccagcccac

SEQ ID NO: 43953 - RNA, 12 nt, Artificial Sequence
  Description of Artificial Sequence: Synthetic oligonucleotide
cagcugagaaug

SEQ ID NO: 43954 - RNA, 13 nt, Artificial Sequence
  Description of Artificial Sequence: Synthetic oligonucleotide
aacguaucuccua

SEQ ID NO: 43955 - RNA, 14 nt, Artificial Sequence
  Description of Artificial Sequence: Synthetic oligonucleotide
ccuaaaauaauuuc

SEQ ID NO: 43956 - RNA, 13 nt, Artificial Sequence
  Description of Artificial Sequence: Synthetic oligonucleotide
uggaagauucagc

SEQ ID NO: 43957 - RNA, 12 nt, Artificial Sequence
  Description of Artificial Sequence: Synthetic oligonucleotide
uuaaacucuccu

SEQ ID NO: 43958 - RNA, 12 nt, Artificial Sequence
  Description of Artificial Sequence: Synthetic oligonucleotide
cagccuacaguu

SEQ ID NO: 43959 - RNA, 13 nt, Artificial Sequence
  Description of Artificial Sequence: Synthetic oligonucleotide
guuauguucaguc

SEQ ID NO: 43960 - RNA, 13 nt, Artificial Sequence
  Description of Artificial Sequence: Synthetic oligonucleotide
cacauacaaaaug

SEQ ID NO: 43961 - RNA, 9 nt, Artificial Sequence
  Description of Artificial Sequence: Synthetic oligonucleotide
uccuuuugc

SEQ ID NO: 43962 - RNA, 12 nt, Artificial Sequence
  Description of Artificial Sequence: Synthetic oligonucleotide
ugaccugugaag

SEQ ID NO: 43963 - RNA, 12 nt, Artificial Sequence
  Description of Artificial Sequence: Synthetic oligonucleotide
cuaucucacaca

SEQ ID NO: 43964 - RNA, 13 nt, Artificial Sequence
  Description of Artificial Sequence: Synthetic oligonucleotide
uguccucaauugu

SEQ ID NO: 43965 - RNA, 12 nt, Artificial Sequence
  Description of Artificial Sequence: Synthetic oligonucleotide
aaaccguagcug

SEQ ID NO: 43966 - RNA, 12 nt, Artificial Sequence
  Description of Artificial Sequence: Synthetic oligonucleotide
uagcuggcaagc

SEQ ID NO: 43967 - RNA, 14 nt, Artificial Sequence
  Description of Artificial Sequence: Synthetic oligonucleotide
uuguaugguuaaaa

SEQ ID NO: 43968 - RNA, 14 nt, Artificial Sequence
  Description of Artificial Sequence: Synthetic oligonucleotide
ugguuaaaagaugg

SEQ ID NO: 43969 - RNA, 13 nt, Artificial Sequence
  Description of Artificial Sequence: Synthetic oligonucleotide
cagggaauuauac

SEQ ID NO: 43970 - RNA, 12 nt, Artificial Sequence
  Description of Artificial Sequence: Synthetic oligonucleotide
acaaucuugcug

SEQ ID NO: 43971 - RNA, 13 nt, Artificial Sequence
  Description of Artificial Sequence: Synthetic oligonucleotide
ccaauaaugaaga

SEQ ID NO: 43972 - RNA, 13 nt, Artificial Sequence
  Description of Artificial Sequence: Synthetic oligonucleotide
acuuuggauguuc

SEQ ID NO: 43973 - RNA, 12 nt, Artificial Sequence
  Description of Artificial Sequence: Synthetic oligonucleotide
aaugcuuccacu

SEQ ID NO: 43974 - RNA, 11 nt, Artificial Sequence
  Description of Artificial Sequence: Synthetic oligonucleotide
gagaaaguuug

SEQ ID NO: 43975 - RNA, 11 nt, Artificial Sequence
  Description of Artificial Sequence: Synthetic oligonucleotide
aaagaacuacu

SEQ ID NO: 43976 - RNA, 12 nt, Artificial Sequence
  Description of Artificial Sequence: Synthetic oligonucleotide
uuagaaauacgg

SEQ ID NO: 43977 - RNA, 12 nt, Artificial Sequence
  Description of Artificial Sequence: Synthetic oligonucleotide
aacauggguaca

SEQ ID NO: 43978 - RNA, 14 nt, Artificial Sequence
  Description of Artificial Sequence: Synthetic oligonucleotide
aaagacacagaaga

SEQ ID NO: 43979 - RNA, 11 nt, Artificial Sequence
  Description of Artificial Sequence: Synthetic oligonucleotide
uaguagggagg

SEQ ID NO: 43980 - RNA, 12 nt, Artificial Sequence
  Description of Artificial Sequence: Synthetic oligonucleotide
gccuucugcagc

SEQ ID NO: 43981 - RNA, 10 nt, Artificial Sequence
  Description of Artificial Sequence: Synthetic oligonucleotide
ggucugguac

SEQ ID NO: 43982 - RNA, 12 nt, Artificial Sequence
  Description of Artificial Sequence: Synthetic oligonucleotide
cuaguccuuccg

SEQ ID NO: 43983 - RNA, 12 nt, Artificial Sequence
  Description of Artificial Sequence: Synthetic oligonucleotide
ccagugaauauu

SEQ ID NO: 43984 - RNA, 13 nt, Artificial Sequence
  Description of Artificial Sequence: Synthetic oligonucleotide
augaauucaaguu

SEQ ID NO: 43985 - RNA, 12 nt, Artificial Sequence
  Description of Artificial Sequence: Synthetic oligonucleotide
caggacacagau

SEQ ID NO: 43986 - RNA, 12 nt, Artificial Sequence
  Description of Artificial Sequence: Synthetic oligonucleotide
cucaaagcacag

SEQ ID NO: 43987 - RNA, 10 nt, Artificial Sequence
  Description of Artificial Sequence: Synthetic oligonucleotide
accacugcca

SEQ ID NO: 43988 - RNA, 13 nt, Artificial Sequence
  Description of Artificial Sequence: Synthetic oligonucleotide
gaaacuacuagug

SEQ ID NO: 43989 - RNA, 12 nt, Artificial Sequence
  Description of Artificial Sequence: Synthetic oligonucleotide
aagucggacagc

SEQ ID NO: 43990 - RNA, 13 nt, Artificial Sequence
  Description of Artificial Sequence: Synthetic oligonucleotide
gaaagcgaaaaau

SEQ ID NO: 43991 - RNA, 13 nt, Artificial Sequence
  Description of Artificial Sequence: Synthetic oligonucleotide
cccucugauuuag

SEQ ID NO: 43992 - RNA, 12 nt, Artificial Sequence
  Description of Artificial Sequence: Synthetic oligonucleotide
ugagcuauuuaa

SEQ ID NO: 43993 - RNA, 13 nt, Artificial Sequence
  Description of Artificial Sequence: Synthetic oligonucleotide
aaaaggugaaaaa

SEQ ID NO: 43994 - RNA, 14 nt, Artificial Sequence
  Description of Artificial Sequence: Synthetic oligonucleotide
gaaaaagcacuauu

SEQ ID NO: 43995 - RNA, 12 nt, Artificial Sequence
  Description of Artificial Sequence: Synthetic oligonucleotide
ggcugaaaagaa

SEQ ID NO: 43996 - RNA, 12 nt, Artificial Sequence
  Description of Artificial Sequence: Synthetic oligonucleotide
uaaacccuuaua

SEQ ID NO: 43997 - RNA, 13 nt, Artificial Sequence
  Description of Artificial Sequence: Synthetic oligonucleotide
cauacuauuagcc

SEQ ID NO: 43998 - RNA, 12 nt, Artificial Sequence
  Description of Artificial Sequence: Synthetic oligonucleotide
gacagaagcauu

SEQ ID NO: 43999 - RNA, 14 nt, Artificial Sequence
  Description of Artificial Sequence: Synthetic oligonucleotide
agagcaaauaagau

SEQ ID NO: 44000 - RNA, 14 nt, Artificial Sequence
  Description of Artificial Sequence: Synthetic oligonucleotide
ccaacauuuuucuc

SEQ ID NO: 44001 - RNA, 15 nt, Artificial Sequence
  Description of Artificial Sequence: Synthetic oligonucleotide
uuaaguaugagaaaa

SEQ ID NO: 44002 - RNA, 14 nt, Artificial Sequence
  Description of Artificial Sequence: Synthetic oligonucleotide
caggaauaaagaug

SEQ ID NO: 44003 - RNA, 13 nt, Artificial Sequence
  Description of Artificial Sequence: Synthetic oligonucleotide
aauuugaaugacc

SEQ ID NO: 44004 - RNA, 14 nt, Artificial Sequence
  Description of Artificial Sequence: Synthetic oligonucleotide
auguauaaagauag

SEQ ID NO: 44005 - RNA, 12 nt, Artificial Sequence
  Description of Artificial Sequence: Synthetic oligonucleotide
ggcuguaacuau

SEQ ID NO: 44006 - RNA, 11 nt, Artificial Sequence
  Description of Artificial Sequence: Synthetic oligonucleotide
ucugugaagug

SEQ ID NO: 44007 - RNA, 14 nt, Artificial Sequence
  Description of Artificial Sequence: Synthetic oligonucleotide
ccuuuaaggaaaug

SEQ ID NO: 44008 - RNA, 13 nt, Artificial Sequence
  Description of Artificial Sequence: Synthetic oligonucleotide
aaggauacaaaaa

SEQ ID NO: 44009 - RNA, 12 nt, Artificial Sequence
  Description of Artificial Sequence: Synthetic oligonucleotide
agaugcaauuug

SEQ ID NO: 44010 - RNA, 12 nt, Artificial Sequence
  Description of Artificial Sequence: Synthetic oligonucleotide
guucaaaacgaa

SEQ ID NO: 44011 - RNA, 11 nt, Artificial Sequence
  Description of Artificial Sequence: Synthetic oligonucleotide
gugaaaccuca

SEQ ID NO: 44012 - RNA, 13 nt, Artificial Sequence
  Description of Artificial Sequence: Synthetic oligonucleotide
acgaaagagaagc

SEQ ID NO: 44013 - RNA, 12 nt, Artificial Sequence
  Description of Artificial Sequence: Synthetic oligonucleotide
cuccacaagcgc

SEQ ID NO: 44014 - RNA, 14 nt, Artificial Sequence
  Description of Artificial Sequence: Synthetic oligonucleotide
gagaagauuccaaa

SEQ ID NO: 44015 - RNA, 13 nt, Artificial Sequence
  Description of Artificial Sequence: Synthetic oligonucleotide
aaucuggauucaa

SEQ ID NO: 44016 - RNA, 13 nt, Artificial Sequence
  Description of Artificial Sequence: Synthetic oligonucleotide
agaacagauuuga

SEQ ID NO: 44017 - RNA, 11 nt, Artificial Sequence
  Description of Artificial Sequence: Synthetic oligonucleotide
ccagagcugug

SEQ ID NO: 44018 - RNA, 12 nt, Artificial Sequence
  Description of Artificial Sequence: Synthetic oligonucleotide
ccucagauuguu

SEQ ID NO: 44019 - RNA, 12 nt, Artificial Sequence
  Description of Artificial Sequence: Synthetic oligonucleotide
cuauuuuaauua

SEQ ID NO: 44020 - RNA, 13 nt, Artificial Sequence
  Description of Artificial Sequence: Synthetic oligonucleotide
uuuaauuuauuaa

SEQ ID NO: 44021 - RNA, 12 nt, Artificial Sequence
  Description of Artificial Sequence: Synthetic oligonucleotide
augcaguuugaa

SEQ ID NO: 44022 - RNA, 11 nt, Artificial Sequence
  Description of Artificial Sequence: Synthetic oligonucleotide
caugcugcugg

SEQ ID NO: 44023 - RNA, 13 nt, Artificial Sequence
  Description of Artificial Sequence: Synthetic oligonucleotide
agaugugcauuuc

SEQ ID NO: 44024 - RNA, 12 nt, Artificial Sequence
  Description of Artificial Sequence: Synthetic oligonucleotide
ucaaaaccugug

SEQ ID NO: 44025 - RNA, 11 nt, Artificial Sequence
  Description of Artificial Sequence: Synthetic oligonucleotide
gaaugugggua

SEQ ID NO: 44026 - RNA, 10 nt, Artificial Sequence
  Description of Artificial Sequence: Synthetic oligonucleotide
auguggguag

SEQ ID NO: 44027 - RNA, 13 nt, Artificial Sequence
  Description of Artificial Sequence: Synthetic oligonucleotide
ugaaaaugagcau

SEQ ID NO: 44028 - RNA, 13 nt, Artificial Sequence
  Description of Artificial Sequence: Synthetic oligonucleotide
uugcuuuucaugu

SEQ ID NO: 44029 - RNA, 12 nt, Artificial Sequence
  Description of Artificial Sequence: Synthetic oligonucleotide
uguauuucuaua

SEQ ID NO: 44030 - RNA, 13 nt, Artificial Sequence
  Description of Artificial Sequence: Synthetic oligonucleotide
uuugauuaauguu

SEQ ID NO: 44031 - RNA, 12 nt, Artificial Sequence
  Description of Artificial Sequence: Synthetic oligonucleotide
caacguguauag

SEQ ID NO: 44032 - RNA, 12 nt, Artificial Sequence
  Description of Artificial Sequence: Synthetic oligonucleotide
cauauccuuggc

SEQ ID NO: 44033 - RNA, 13 nt, Artificial Sequence
  Description of Artificial Sequence: Synthetic oligonucleotide
uacuaacaucugg

SEQ ID NO: 44034 - RNA, 11 nt, Artificial Sequence
  Description of Artificial Sequence: Synthetic oligonucleotide
cauaaguugug

SEQ ID NO: 44035 - RNA, 12 nt, Artificial Sequence
  Description of Artificial Sequence: Synthetic oligonucleotide
gcaucauuuugg

SEQ ID NO: 44036 - RNA, 10 nt, Artificial Sequence
  Description of Artificial Sequence: Synthetic oligonucleotide
gcucuucuua

SEQ ID NO: 44037 - RNA, 10 nt, Artificial Sequence
  Description of Artificial Sequence: Synthetic oligonucleotide
agauuagguc

SEQ ID NO: 44038 - RNA, 12 nt, Artificial Sequence
  Description of Artificial Sequence: Synthetic oligonucleotide
auggaauugaaa

SEQ ID NO: 44039 - RNA, 13 nt, Artificial Sequence
  Description of Artificial Sequence: Synthetic oligonucleotide
cacacucauuccu

SEQ ID NO: 44040 - RNA, 12 nt, Artificial Sequence
  Description of Artificial Sequence: Synthetic oligonucleotide
uguagagguaac

SEQ ID NO: 44041 - RNA, 11 nt, Artificial Sequence
  Description of Artificial Sequence: Synthetic oligonucleotide
caaccacaugc

SEQ ID NO: 44042 - RNA, 12 nt, Artificial Sequence
  Description of Artificial Sequence: Synthetic oligonucleotide
ucggaaacaagu

SEQ ID NO: 44043 - RNA, 11 nt, Artificial Sequence
  Description of Artificial Sequence: Synthetic oligonucleotide
acucccaauaa

SEQ ID NO: 44044 - RNA, 13 nt, Artificial Sequence
  Description of Artificial Sequence: Synthetic oligonucleotide
aaugcuaagaaau

SEQ ID NO: 44045 - RNA, 11 nt, Artificial Sequence
  Description of Artificial Sequence: Synthetic oligonucleotide
gucuuucucua

SEQ ID NO: 44046 - RNA, 11 nt, Artificial Sequence
  Description of Artificial Sequence: Synthetic oligonucleotide
ugaauuucagg

SEQ ID NO: 44047 - RNA, 13 nt, Artificial Sequence
  Description of Artificial Sequence: Synthetic oligonucleotide
cgauucccucuca

SEQ ID NO: 44048 - RNA, 11 nt, Artificial Sequence
  Description of Artificial Sequence: Synthetic oligonucleotide
aggaaagugaa

SEQ ID NO: 44049 - RNA, 12 nt, Artificial Sequence
  Description of Artificial Sequence: Synthetic oligonucleotide
gaggcugcaugc

SEQ ID NO: 44050 - RNA, 11 nt, Artificial Sequence
  Description of Artificial Sequence: Synthetic oligonucleotide
ucucugaacag

SEQ ID NO: 44051 - RNA, 12 nt, Artificial Sequence
  Description of Artificial Sequence: Synthetic oligonucleotide
aacuuggcugua

SEQ ID NO: 44052 - RNA, 12 nt, Artificial Sequence
  Description of Artificial Sequence: Synthetic oligonucleotide
agaagccaaaau

SEQ ID NO: 44053 - RNA, 14 nt, Artificial Sequence
  Description of Artificial Sequence: Synthetic oligonucleotide
auuaaaagaagucc

SEQ ID NO: 44054 - RNA, 14 nt, Artificial Sequence
  Description of Artificial Sequence: Synthetic oligonucleotide
gaauccggauuauc

SEQ ID NO: 44055 - RNA, 12 nt, Artificial Sequence
  Description of Artificial Sequence: Synthetic oligonucleotide
aaugugacauca

SEQ ID NO: 44056 - RNA, 13 nt, Artificial Sequence
  Description of Artificial Sequence: Synthetic oligonucleotide
caucaaagcaagu

SEQ ID NO: 44057 - RNA, 11 nt, Artificial Sequence
  Description of Artificial Sequence: Synthetic oligonucleotide
agagagagaaa

SEQ ID NO: 44058 - RNA, 13 nt, Artificial Sequence
  Description of Artificial Sequence: Synthetic oligonucleotide
ucgcuguaguauu

SEQ ID NO: 44059 - RNA, 14 nt, Artificial Sequence
  Description of Artificial Sequence: Synthetic oligonucleotide
cgcuguaguauuua

SEQ ID NO: 44060 - RNA, 13 nt, Artificial Sequence
  Description of Artificial Sequence: Synthetic oligonucleotide
auuuaagcccaua

SEQ ID NO: 44061 - RNA, 15 nt, Artificial Sequence
  Description of Artificial Sequence: Synthetic oligonucleotide
auuaaaauaaacaug

SEQ ID NO: 44062 - RNA, 12 nt, Artificial Sequence
  Description of Artificial Sequence: Synthetic oligonucleotide
cuguucugaucg

SEQ ID NO: 44063 - RNA, 16 nt, Artificial Sequence
  Description of Artificial Sequence: Synthetic oligonucleotide
aaauaauuugaacuuu

SEQ ID NO: 44064 - RNA, 12 nt, Artificial Sequence
  Description of Artificial Sequence: Synthetic oligonucleotide
ugcgaccuuaau

SEQ ID NO: 44065 - RNA, 11 nt, Artificial Sequence
  Description of Artificial Sequence: Synthetic oligonucleotide
cugagaaagcu

SEQ ID NO: 44066 - RNA, 13 nt, Artificial Sequence
  Description of Artificial Sequence: Synthetic oligonucleotide
aguaaagaugcua

SEQ ID NO: 44067 - RNA, 12 nt, Artificial Sequence
  Description of Artificial Sequence: Synthetic oligonucleotide
cugcuuaauugc

SEQ ID NO: 44068 - RNA, 14 nt, Artificial Sequence
  Description of Artificial Sequence: Synthetic oligonucleotide
uaccauaugaauga

SEQ ID NO: 44069 - RNA, 12 nt, Artificial Sequence
  Description of Artificial Sequence: Synthetic oligonucleotide
aacuuucuuauc

SEQ ID NO: 44070 - RNA, 13 nt, Artificial Sequence
  Description of Artificial Sequence: Synthetic oligonucleotide
ccuugcaugacau

SEQ ID NO: 44071 - RNA, 14 nt, Artificial Sequence
  Description of Artificial Sequence: Synthetic oligonucleotide
ugaauuuguauaug

SEQ ID NO: 44072 - RNA, 12 nt, Artificial Sequence
  Description of Artificial Sequence: Synthetic oligonucleotide
gaauccuaguag

SEQ ID NO: 44073 - RNA, 10 nt, Artificial Sequence
  Description of Artificial Sequence: Synthetic oligonucleotide
gaaagggaag

SEQ ID NO: 44074 - RNA, 11 nt, Artificial Sequence
  Description of Artificial Sequence: Synthetic oligonucleotide
uaucggcaugc

SEQ ID NO: 44075 - RNA, 12 nt, Artificial Sequence
  Description of Artificial Sequence: Synthetic oligonucleotide
caccucauagua

SEQ ID NO: 44076 - RNA, 11 nt, Artificial Sequence
  Description of Artificial Sequence: Synthetic oligonucleotide
ccagaauugcc

SEQ ID NO: 44077 - RNA, 11 nt, Artificial Sequence
  Description of Artificial Sequence: Synthetic oligonucleotide
uggugaucugg

SEQ ID NO: 44078 - RNA, 12 nt, Artificial Sequence
  Description of Artificial Sequence: Synthetic oligonucleotide
gaucuggguaau

SEQ ID NO: 44079 - RNA, 12 nt, Artificial Sequence
  Description of Artificial Sequence: Synthetic oligonucleotide
ggaugugaugaa

SEQ ID NO: 44080 - RNA, 12 nt, Artificial Sequence
  Description of Artificial Sequence: Synthetic oligonucleotide
cauuuccacagc

SEQ ID NO: 44081 - RNA, 11 nt, Artificial Sequence
  Description of Artificial Sequence: Synthetic oligonucleotide
acagcuacacc

SEQ ID NO: 44082 - RNA, 12 nt, Artificial Sequence
  Description of Artificial Sequence: Synthetic oligonucleotide
ugcaguucuuac

SEQ ID NO: 44083 - RNA, 12 nt, Artificial Sequence
  Description of Artificial Sequence: Synthetic oligonucleotide
acgagaagaaga

SEQ ID NO: 44084 - RNA, 12 nt, Artificial Sequence
  Description of Artificial Sequence: Synthetic oligonucleotide
cgagaagaagau

SEQ ID NO: 44085 - RNA, 15 nt, Artificial Sequence
  Description of Artificial Sequence: Synthetic oligonucleotide
aagaagaucauuuac

SEQ ID NO: 44086 - RNA, 11 nt, Artificial Sequence
  Description of Artificial Sequence: Synthetic oligonucleotide
agaggaagagg

SEQ ID NO: 44087 - RNA, 12 nt, Artificial Sequence
  Description of Artificial Sequence: Synthetic oligonucleotide
gaggaagaggug

SEQ ID NO: 44088 - RNA, 13 nt, Artificial Sequence
  Description of Artificial Sequence: Synthetic oligonucleotide
cuacuuugagggc

SEQ ID NO: 44089 - RNA, 12 nt, Artificial Sequence
  Description of Artificial Sequence: Synthetic oligonucleotide
agggcaucuccu

SEQ ID NO: 44090 - RNA, 10 nt, Artificial Sequence
  Description of Artificial Sequence: Synthetic oligonucleotide
ggagugauau

SEQ ID NO: 44091 - RNA, 11 nt, Artificial Sequence
  Description of Artificial Sequence: Synthetic oligonucleotide
gagugauaugg

SEQ ID NO: 44092 - RNA, 12 nt, Artificial Sequence
  Description of Artificial Sequence: Synthetic oligonucleotide
ugcaguaaagau

SEQ ID NO: 44093 - RNA, 13 nt, Artificial Sequence
  Description of Artificial Sequence: Synthetic oligonucleotide
aguaaagauccua

SEQ ID NO: 44094 - RNA, 12 nt, Artificial Sequence
  Description of Artificial Sequence: Synthetic oligonucleotide
ugacaaaggaca

SEQ ID NO: 44095 - RNA, 13 nt, Artificial Sequence
  Description of Artificial Sequence: Synthetic oligonucleotide
gcaauugugaccc

SEQ ID NO: 44096 - RNA, 12 nt, Artificial Sequence
  Description of Artificial Sequence: Synthetic oligonucleotide
aacaucauccau

SEQ ID NO: 44097 - RNA, 12 nt, Artificial Sequence
  Description of Artificial Sequence: Synthetic oligonucleotide
ugaaauccaaca

SEQ ID NO: 44098 - RNA, 15 nt, Artificial Sequence
  Description of Artificial Sequence: Synthetic oligonucleotide
aacaauauauuucuc

SEQ ID NO: 44099 - RNA, 14 nt, Artificial Sequence
  Description of Artificial Sequence: Synthetic oligonucleotide
aacaguaaagucac

SEQ ID NO: 44100 - RNA, 14 nt, Artificial Sequence
  Description of Artificial Sequence: Synthetic oligonucleotide
ugugaagaaaguaa

SEQ ID NO: 44101 - RNA, 13 nt, Artificial Sequence
  Description of Artificial Sequence: Synthetic oligonucleotide
cuuccgagccauc

SEQ ID NO: 44102 - RNA, 12 nt, Artificial Sequence
  Description of Artificial Sequence: Synthetic oligonucleotide
aauggagguuga

SEQ ID NO: 44103 - RNA, 12 nt, Artificial Sequence
  Description of Artificial Sequence: Synthetic oligonucleotide
ggagguugaaua

SEQ ID NO: 44104 - RNA, 13 nt, Artificial Sequence
  Description of Artificial Sequence: Synthetic oligonucleotide
auuuugaguuuuc

SEQ ID NO: 44105 - RNA, 12 nt, Artificial Sequence
  Description of Artificial Sequence: Synthetic oligonucleotide
uauccuguuugu

SEQ ID NO: 44106 - RNA, 11 nt, Artificial Sequence
  Description of Artificial Sequence: Synthetic oligonucleotide
ccuguuuguuc

SEQ ID NO: 44107 - RNA, 10 nt, Artificial Sequence
  Description of Artificial Sequence: Synthetic oligonucleotide
cucuacagcc

SEQ ID NO: 44108 - RNA, 12 nt, Artificial Sequence
  Description of Artificial Sequence: Synthetic oligonucleotide
ucuuccauagcu

SEQ ID NO: 44109 - RNA, 12 nt, Artificial Sequence
  Description of Artificial Sequence: Synthetic oligonucleotide
auaaucuuccug

SEQ ID NO: 44110 - RNA, 12 nt, Artificial Sequence
  Description of Artificial Sequence: Synthetic oligonucleotide
uaaucuuccugu

SEQ ID NO: 44111 - RNA, 12 nt, Artificial Sequence
  Description of Artificial Sequence: Synthetic oligonucleotide
cuucaugacuug

SEQ ID NO: 44112 - RNA, 12 nt, Artificial Sequence
  Description of Artificial Sequence: Synthetic oligonucleotide
aagagggagaga

SEQ ID NO: 44113 - RNA, 12 nt, Artificial Sequence
  Description of Artificial Sequence: Synthetic oligonucleotide
cgucuccuacca

SEQ ID NO: 44114 - RNA, 12 nt, Artificial Sequence
  Description of Artificial Sequence: Synthetic oligonucleotide
gaucaaucggcc

SEQ ID NO: 44115 - RNA, 12 nt, Artificial Sequence
  Description of Artificial Sequence: Synthetic oligonucleotide
ggacgaacaucc

SEQ ID NO: 44116 - RNA, 11 nt, Artificial Sequence
  Description of Artificial Sequence: Synthetic oligonucleotide
agggucggaac

SEQ ID NO: 44117 - RNA, 10 nt, Artificial Sequence
  Description of Artificial Sequence: Synthetic oligonucleotide
ucggaaccca

SEQ ID NO: 44118 - RNA, 11 nt, Artificial Sequence
  Description of Artificial Sequence: Synthetic oligonucleotide
acccaagcuua

SEQ ID NO: 44119 - RNA, 14 nt, Artificial Sequence
  Description of Artificial Sequence: Synthetic oligonucleotide
gaacuuuaagcaac

SEQ ID NO: 44120 - RNA, 11 nt, Artificial Sequence
  Description of Artificial Sequence: Synthetic oligonucleotide
acuauucagug

SEQ ID NO: 44121 - RNA, 11 nt, Artificial Sequence
  Description of Artificial Sequence: Synthetic oligonucleotide
cuauucagugg

SEQ ID NO: 44122 - RNA, 13 nt, Artificial Sequence
  Description of Artificial Sequence: Synthetic oligonucleotide
aaacacagauaac

SEQ ID NO: 44123 - RNA, 12 nt, Artificial Sequence
  Description of Artificial Sequence: Synthetic oligonucleotide
cuuaagaaaaga

SEQ ID NO: 44124 - RNA, 12 nt, Artificial Sequence
  Description of Artificial Sequence: Synthetic oligonucleotide
cugaaggagugu

SEQ ID NO: 44125 - RNA, 10 nt, Artificial Sequence
  Description of Artificial Sequence: Synthetic oligonucleotide
ucaccgcggg

SEQ ID NO: 44126 - RNA, 14 nt, Artificial Sequence
  Description of Artificial Sequence: Synthetic oligonucleotide
agcagaaauaagcg

SEQ ID NO: 44127 - RNA, 12 nt, Artificial Sequence
  Description of Artificial Sequence: Synthetic oligonucleotide
aagcgugccguu

SEQ ID NO: 44128 - RNA, 12 nt, Artificial Sequence
  Description of Artificial Sequence: Synthetic oligonucleotide
agaaacagucac

SEQ ID NO: 44129 - RNA, 12 nt, Artificial Sequence
  Description of Artificial Sequence: Synthetic oligonucleotide
agaggaagaagg

SEQ ID NO: 44130 - RNA, 14 nt, Artificial Sequence
  Description of Artificial Sequence: Synthetic oligonucleotide
uguauucaaaauau

SEQ ID NO: 44131 - RNA, 13 nt, Artificial Sequence
  Description of Artificial Sequence: Synthetic oligonucleotide
auuuuccucccuu

SEQ ID NO: 44132 - RNA, 13 nt, Artificial Sequence
  Description of Artificial Sequence: Synthetic oligonucleotide
caaagaaagauag

SEQ ID NO: 44133 - RNA, 12 nt, Artificial Sequence
  Description of Artificial Sequence: Synthetic oligonucleotide
aagaaagauaga

SEQ ID NO: 44134 - RNA, 13 nt, Artificial Sequence
  Description of Artificial Sequence: Synthetic oligonucleotide
gaaagcauuuguu

SEQ ID NO: 44135 - RNA, 13 nt, Artificial Sequence
  Description of Artificial Sequence: Synthetic oligonucleotide
ugaguuaaacgaa

SEQ ID NO: 44136 - RNA, 12 nt, Artificial Sequence
  Description of Artificial Sequence: Synthetic oligonucleotide
acugauacagaa

SEQ ID NO: 44137 - RNA, 12 nt, Artificial Sequence
  Description of Artificial Sequence: Synthetic oligonucleotide
auauuauauaua

SEQ ID NO: 44138 - RNA, 12 nt, Artificial Sequence
  Description of Artificial Sequence: Synthetic oligonucleotide
auuauauauaua

SEQ ID NO: 44139 - RNA, 12 nt, Artificial Sequence
  Description of Artificial Sequence: Synthetic oligonucleotide
ucacuggaugua

SEQ ID NO: 44140 - RNA, 12 nt, Artificial Sequence
  Description of Artificial Sequence: Synthetic oligonucleotide
cagggaagagga

SEQ ID NO: 44141 - RNA, 15 nt, Artificial Sequence
  Description of Artificial Sequence: Synthetic oligonucleotide
augaucuuuuuuuug

SEQ ID NO: 44142 - RNA, 11 nt, Artificial Sequence
  Description of Artificial Sequence: Synthetic oligonucleotide
aguucacggcc

SEQ ID NO: 44143 - RNA, 13 nt, Artificial Sequence
  Description of Artificial Sequence: Synthetic oligonucleotide
caccaucacacca

SEQ ID NO: 44144 - RNA, 11 nt, Artificial Sequence
  Description of Artificial Sequence: Synthetic oligonucleotide
ccugcggguuu

SEQ ID NO: 44145 - RNA, 10 nt, Artificial Sequence
  Description of Artificial Sequence: Synthetic oligonucleotide
auccaguuug

SEQ ID NO: 44146 - RNA, 13 nt, Artificial Sequence
  Description of Artificial Sequence: Synthetic oligonucleotide
guuaaggacuucu

SEQ ID NO: 44147 - RNA, 13 nt, Artificial Sequence
  Description of Artificial Sequence: Synthetic oligonucleotide
cagugggacagag

SEQ ID NO: 44148 - RNA, 14 nt, Artificial Sequence
  Description of Artificial Sequence: Synthetic oligonucleotide
aauuuguuauugug

SEQ ID NO: 44149 - RNA, 13 nt, Artificial Sequence
  Description of Artificial Sequence: Synthetic oligonucleotide
uucaaaugcauuu

SEQ ID NO: 44150 - RNA, 10 nt, Artificial Sequence
  Description of Artificial Sequence: Synthetic oligonucleotide
caggaaagcc

SEQ ID NO: 44151 - RNA, 11 nt, Artificial Sequence
  Description of Artificial Sequence: Synthetic oligonucleotide
aggaaagcccu

SEQ ID NO: 44152 - RNA, 12 nt, Artificial Sequence
  Description of Artificial Sequence: Synthetic oligonucleotide
cccagcauggcc

SEQ ID NO: 44153 - RNA, 11 nt, Artificial Sequence
  Description of Artificial Sequence: Synthetic oligonucleotide
cuucucccuga

SEQ ID NO: 44154 - RNA, 12 nt, Artificial Sequence
  Description of Artificial Sequence: Synthetic oligonucleotide
gaagaagcccuu

SEQ ID NO: 44155 - RNA, 12 nt, Artificial Sequence
  Description of Artificial Sequence: Synthetic oligonucleotide
agaagcccuuca

SEQ ID NO: 44156 - RNA, 11 nt, Artificial Sequence
  Description of Artificial Sequence: Synthetic oligonucleotide
gcccuucagcg

SEQ ID NO: 44157 - RNA, 11 nt, Artificial Sequence
  Description of Artificial Sequence: Synthetic oligonucleotide
ccuucagcggc

SEQ ID NO: 44158 - RNA, 12 nt, Artificial Sequence
  Description of Artificial Sequence: Synthetic oligonucleotide
ucagcggccagu

SEQ ID NO: 44159 - RNA, 12 nt, Artificial Sequence
  Description of Artificial Sequence: Synthetic oligonucleotide
ugaaaagcuccg

SEQ ID NO: 44160 - RNA, 11 nt, Artificial Sequence
  Description of Artificial Sequence: Synthetic oligonucleotide
aaaagcuccgg

SEQ ID NO: 44161 - RNA, 13 nt, Artificial Sequence
  Description of Artificial Sequence: Synthetic oligonucleotide
agucaacagucug

SEQ ID NO: 44162 - RNA, 13 nt, Artificial Sequence
  Description of Artificial Sequence: Synthetic oligonucleotide
cagaguucaaaag

SEQ ID NO: 44163 - RNA, 13 nt, Artificial Sequence
  Description of Artificial Sequence: Synthetic oligonucleotide
agaguucaaaagc

SEQ ID NO: 44164 - RNA, 12 nt, Artificial Sequence
  Description of Artificial Sequence: Synthetic oligonucleotide
uucaaaagcccu

SEQ ID NO: 44165 - RNA, 12 nt, Artificial Sequence
  Description of Artificial Sequence: Synthetic oligonucleotide
ucaaaagcccuu

SEQ ID NO: 44166 - RNA, 12 nt, Artificial Sequence
  Description of Artificial Sequence: Synthetic oligonucleotide
aaaagcccuuca

SEQ ID NO: 44167 - RNA, 12 nt, Artificial Sequence
  Description of Artificial Sequence: Synthetic oligonucleotide
aaagcccuucag

SEQ ID NO: 44168 - RNA, 13 nt, Artificial Sequence
  Description of Artificial Sequence: Synthetic oligonucleotide
gugaagccgcucg

SEQ ID NO: 44169 - RNA, 12 nt, Artificial Sequence
  Description of Artificial Sequence: Synthetic oligonucleotide
cacgccagucaa

SEQ ID NO: 44170 - RNA, 13 nt, Artificial Sequence
  Description of Artificial Sequence: Synthetic oligonucleotide
uucuuggugcgug

SEQ ID NO: 44171 - RNA, 14 nt, Artificial Sequence
  Description of Artificial Sequence: Synthetic oligonucleotide
auuggauucaucag

SEQ ID NO: 44172 - RNA, 13 nt, Artificial Sequence
  Description of Artificial Sequence: Synthetic oligonucleotide
uggaauaccuaag

SEQ ID NO: 44173 - RNA, 12 nt, Artificial Sequence
  Description of Artificial Sequence: Synthetic oligonucleotide
auuugaggcuca

SEQ ID NO: 44174 - RNA, 11 nt, Artificial Sequence
  Description of Artificial Sequence: Synthetic oligonucleotide
ucuacaauugg

SEQ ID NO: 44175 - RNA, 12 nt, Artificial Sequence
  Description of Artificial Sequence: Synthetic oligonucleotide
uaguuaggagcc

SEQ ID NO: 44176 - RNA, 13 nt, Artificial Sequence
  Description of Artificial Sequence: Synthetic oligonucleotide
agucaauauccac

SEQ ID NO: 44177 - RNA, 13 nt, Artificial Sequence
  Description of Artificial Sequence: Synthetic oligonucleotide
auguucagucaca

SEQ ID NO: 44178 - RNA, 12 nt, Artificial Sequence
  Description of Artificial Sequence: Synthetic oligonucleotide
acacacacauac

SEQ ID NO: 44179 - RNA, 12 nt, Artificial Sequence
  Description of Artificial Sequence: Synthetic oligonucleotide
uuccuuuugcuu

SEQ ID NO: 44180 - RNA, 16 nt, Artificial Sequence
  Description of Artificial Sequence: Synthetic oligonucleotide
uuuuaaaguaauuuuu

SEQ ID NO: 44181 - RNA, 13 nt, Artificial Sequence
  Description of Artificial Sequence: Synthetic oligonucleotide
caacagucaaugg

SEQ ID NO: 44182 - RNA, 13 nt, Artificial Sequence
  Description of Artificial Sequence: Synthetic oligonucleotide
ucgacaaaccaau

SEQ ID NO: 44183 - RNA, 12 nt, Artificial Sequence
  Description of Artificial Sequence: Synthetic oligonucleotide
acugcuaccacu

SEQ ID NO: 44184 - RNA, 13 nt, Artificial Sequence
  Description of Artificial Sequence: Synthetic oligonucleotide
gcaagcggucuua

SEQ ID NO: 44185 - RNA, 13 nt, Artificial Sequence
  Description of Artificial Sequence: Synthetic oligonucleotide
ggucuuaccggcu

SEQ ID NO: 44186 - RNA, 11 nt, Artificial Sequence
  Description of Artificial Sequence: Synthetic oligonucleotide
gauggguuacc

SEQ ID NO: 44187 - RNA, 11 nt, Artificial Sequence
  Description of Artificial Sequence: Synthetic oligonucleotide
guuaccugcga

SEQ ID NO: 44188 - RNA, 12 nt, Artificial Sequence
  Description of Artificial Sequence: Synthetic oligonucleotide
aaucuugcugag

SEQ ID NO: 44189 - RNA, 13 nt, Artificial Sequence
  Description of Artificial Sequence: Synthetic oligonucleotide
agcauaaaacagu

SEQ ID NO: 44190 - RNA, 12 nt, Artificial Sequence
  Description of Artificial Sequence: Synthetic oligonucleotide
guccuuuauccu

SEQ ID NO: 44191 - RNA, 12 nt, Artificial Sequence
  Description of Artificial Sequence: Synthetic oligonucleotide
caacgcaaguug

SEQ ID NO: 44192 - RNA, 13 nt, Artificial Sequence
  Description of Artificial Sequence: Synthetic oligonucleotide
aaacugaaaccau

SEQ ID NO: 44193 - RNA, 14 nt, Artificial Sequence
  Description of Artificial Sequence: Synthetic oligonucleotide
acuuuguuaaauau

SEQ ID NO: 44194 - RNA, 14 nt, Artificial Sequence
  Description of Artificial Sequence: Synthetic oligonucleotide
guauauuaaaaguu

SEQ ID NO: 44195 - RNA, 13 nt, Artificial Sequence
  Description of Artificial Sequence: Synthetic oligonucleotide
guuuugacuuaac

SEQ ID NO: 44196 - RNA, 13 nt, Artificial Sequence
  Description of Artificial Sequence: Synthetic oligonucleotide
gcaaacucagcac

SEQ ID NO: 44197 - RNA, 11 nt, Artificial Sequence
  Description of Artificial Sequence: Synthetic oligonucleotide
ugcugaccuca

SEQ ID NO: 44198 - RNA, 14 nt, Artificial Sequence
  Description of Artificial Sequence: Synthetic oligonucleotide
uuuauucagaucgc

SEQ ID NO: 44199 - RNA, 13 nt, Artificial Sequence
  Description of Artificial Sequence: Synthetic oligonucleotide
aggguucugggau

SEQ ID NO: 44200 - RNA, 15 nt, Artificial Sequence
  Description of Artificial Sequence: Synthetic oligonucleotide
auauuggaaauuaug

SEQ ID NO: 44201 - RNA, 13 nt, Artificial Sequence
  Description of Artificial Sequence: Synthetic oligonucleotide
auggaagcacuag

SEQ ID NO: 44202 - RNA, 13 nt, Artificial Sequence
  Description of Artificial Sequence: Synthetic oligonucleotide
guuuuuaugugga

SEQ ID NO: 44203 - RNA, 12 nt, Artificial Sequence
  Description of Artificial Sequence: Synthetic oligonucleotide
ggaauugguaga

SEQ ID NO: 44204 - RNA, 13 nt, Artificial Sequence
  Description of Artificial Sequence: Synthetic oligonucleotide
uuagacuuggaga

SEQ ID NO: 44205 - RNA, 13 nt, Artificial Sequence
  Description of Artificial Sequence: Synthetic oligonucleotide
uuacaguauucca

SEQ ID NO: 44206 - RNA, 15 nt, Artificial Sequence
  Description of Artificial Sequence: Synthetic oligonucleotide
ccacugaugaauuaa

SEQ ID NO: 44207 - RNA, 12 nt, Artificial Sequence
  Description of Artificial Sequence: Synthetic oligonucleotide
ccacaucaucac

SEQ ID NO: 44208 - RNA, 13 nt, Artificial Sequence
  Description of Artificial Sequence: Synthetic oligonucleotide
cucaccaaacaga

SEQ ID NO: 44209 - RNA, 12 nt, Artificial Sequence
  Description of Artificial Sequence: Synthetic oligonucleotide
ggaacaugaugg

SEQ ID NO: 44210 - RNA, 12 nt, Artificial Sequence
  Description of Artificial Sequence: Synthetic oligonucleotide
cauguagacugc

SEQ ID NO: 44211 - RNA, 13 nt, Artificial Sequence
  Description of Artificial Sequence: Synthetic oligonucleotide
ggaucuauuuaug

SEQ ID NO: 44212 - RNA, 12 nt, Artificial Sequence
  Description of Artificial Sequence: Synthetic oligonucleotide
gcacuauuauca

SEQ ID NO: 44213 - RNA, 11 nt, Artificial Sequence
  Description of Artificial Sequence: Synthetic oligonucleotide
aucaguucugc

SEQ ID NO: 44214 - RNA, 13 nt, Artificial Sequence
  Description of Artificial Sequence: Synthetic oligonucleotide
agauuaaaccuac

SEQ ID NO: 44215 - RNA, 13 nt, Artificial Sequence
  Description of Artificial Sequence: Synthetic oligonucleotide
auaaaauccuucu

SEQ ID NO: 44216 - RNA, 12 nt, Artificial Sequence
  Description of Artificial Sequence: Synthetic oligonucleotide
aaugcuguagac

SEQ ID NO: 44217 - RNA, 13 nt, Artificial Sequence
  Description of Artificial Sequence: Synthetic oligonucleotide
uugauaggaauag

SEQ ID NO: 44218 - RNA, 11 nt, Artificial Sequence
  Description of Artificial Sequence: Synthetic oligonucleotide
aauggcccuga

SEQ ID NO: 44219 - RNA, 11 nt, Artificial Sequence
  Description of Artificial Sequence: Synthetic oligonucleotide
uuccucaagca

SEQ ID NO: 44220 - RNA, 10 nt, Artificial Sequence
  Description of Artificial Sequence: Synthetic oligonucleotide
guucagccca

SEQ ID NO: 44221 - RNA, 11 nt, Artificial Sequence
  Description of Artificial Sequence: Synthetic oligonucleotide
gcugcugaacc

SEQ ID NO: 44222 - RNA, 12 nt, Artificial Sequence
  Description of Artificial Sequence: Synthetic oligonucleotide
aaguucucuuca

SEQ ID NO: 44223 - RNA, 11 nt, Artificial Sequence
  Description of Artificial Sequence: Synthetic oligonucleotide
ccagccuagag

SEQ ID NO: 44224 - RNA, 13 nt, Artificial Sequence
  Description of Artificial Sequence: Synthetic oligonucleotide
cucugugaagugu

SEQ ID NO: 44225 - RNA, 14 nt, Artificial Sequence
  Description of Artificial Sequence: Synthetic oligonucleotide
ugagaaaauuucaa

SEQ ID NO: 44226 - RNA, 11 nt, Artificial Sequence
  Description of Artificial Sequence: Synthetic oligonucleotide
aauccuccuga

SEQ ID NO: 44227 - RNA, 12 nt, Artificial Sequence
  Description of Artificial Sequence: Synthetic oligonucleotide
gugacaucauau

SEQ ID NO: 44228 - RNA, 13 nt, Artificial Sequence
  Description of Artificial Sequence: Synthetic oligonucleotide
aaucuucaucaua

SEQ ID NO: 44229 - RNA, 13 nt, Artificial Sequence
  Description of Artificial Sequence: Synthetic oligonucleotide
gacuagcuauuaa

SEQ ID NO: 44230 - RNA, 14 nt, Artificial Sequence
  Description of Artificial Sequence: Synthetic oligonucleotide
ucucuacuaaaaau

SEQ ID NO: 44231 - RNA, 12 nt, Artificial Sequence
  Description of Artificial Sequence: Synthetic oligonucleotide
ucuaucucgccu

SEQ ID NO: 44232 - RNA, 13 nt, Artificial Sequence
  Description of Artificial Sequence: Synthetic oligonucleotide
cuucgguccaguu

SEQ ID NO: 44233 - RNA, 11 nt, Artificial Sequence
  Description of Artificial Sequence: Synthetic oligonucleotide
gauguagccgc

SEQ ID NO: 44234 - RNA, 12 nt, Artificial Sequence
  Description of Artificial Sequence: Synthetic oligonucleotide
ugaggagacuug

SEQ ID NO: 44235 - RNA, 12 nt, Artificial Sequence
  Description of Artificial Sequence: Synthetic oligonucleotide
gaguagugagga

SEQ ID NO: 44236 - RNA, 14 nt, Artificial Sequence
  Description of Artificial Sequence: Synthetic oligonucleotide
cagaugaguacaaa

SEQ ID NO: 44237 - RNA, 13 nt, Artificial Sequence
  Description of Artificial Sequence: Synthetic oligonucleotide
guuguuaaugggc

SEQ ID NO: 44238 - RNA, 13 nt, Artificial Sequence
  Description of Artificial Sequence: Synthetic oligonucleotide
uuuuuaauuuauu

SEQ ID NO: 44239 - RNA, 12 nt, Artificial Sequence
  Description of Artificial Sequence: Synthetic oligonucleotide
uauuuaaauaug

SEQ ID NO: 44240 - RNA, 13 nt, Artificial Sequence
  Description of Artificial Sequence: Synthetic oligonucleotide
uauccuuuguuuc

SEQ ID NO: 44241 - RNA, 14 nt, Artificial Sequence
  Description of Artificial Sequence: Synthetic oligonucleotide
cgucuaaguguuug

SEQ ID NO: 44242 - RNA, 12 nt, Artificial Sequence
  Description of Artificial Sequence: Synthetic oligonucleotide
accugugacaaa

SEQ ID NO: 44243 - RNA, 13 nt, Artificial Sequence
  Description of Artificial Sequence: Synthetic oligonucleotide
ccaggcugaauua

SEQ ID NO: 44244 - RNA, 14 nt, Artificial Sequence
  Description of Artificial Sequence: Synthetic oligonucleotide
gucauucuuacaau

SEQ ID NO: 44245 - RNA, 15 nt, Artificial Sequence
  Description of Artificial Sequence: Synthetic oligonucleotide
ucauucuuacaauug

SEQ ID NO: 44246 - RNA, 12 nt, Artificial Sequence
  Description of Artificial Sequence: Synthetic oligonucleotide
cagagaguguac

SEQ ID NO: 44247 - RNA, 12 nt, Artificial Sequence
  Description of Artificial Sequence: Synthetic oligonucleotide
agaacucagcag

SEQ ID NO: 44248 - RNA, 13 nt, Artificial Sequence
  Description of Artificial Sequence: Synthetic oligonucleotide
uuuauuuucagua

SEQ ID NO: 44249 - RNA, 12 nt, Artificial Sequence
  Description of Artificial Sequence: Synthetic oligonucleotide
ucuuaaauggaa

SEQ ID NO: 44250 - RNA, 13 nt, Artificial Sequence
  Description of Artificial Sequence: Synthetic oligonucleotide
ugccuaaaauugu

SEQ ID NO: 44251 - RNA, 12 nt, Artificial Sequence
  Description of Artificial Sequence: Synthetic oligonucleotide
agacugugagcu

SEQ ID NO: 44252 - RNA, 14 nt, Artificial Sequence
  Description of Artificial Sequence: Synthetic oligonucleotide
ugcuuuuuauuaau

SEQ ID NO: 44253 - RNA, 13 nt, Artificial Sequence
  Description of Artificial Sequence: Synthetic oligonucleotide
cucuucuuacauu

SEQ ID NO: 44254 - RNA, 15 nt, Artificial Sequence
  Description of Artificial Sequence: Synthetic oligonucleotide
cauuuguaaaaaugu

SEQ ID NO: 44255 - RNA, 15 nt, Artificial Sequence
  Description of Artificial Sequence: Synthetic oligonucleotide
aucuuaauucauauu

SEQ ID NO: 44256 - RNA, 13 nt, Artificial Sequence
  Description of Artificial Sequence: Synthetic oligonucleotide
gaacuaaucauga

SEQ ID NO: 44257 - RNA, 12 nt, Artificial Sequence
  Description of Artificial Sequence: Synthetic oligonucleotide
ucugcucuuggg

SEQ ID NO: 44258 - RNA, 13 nt, Artificial Sequence
  Description of Artificial Sequence: Synthetic oligonucleotide
caguagcuuugag

SEQ ID NO: 44259 - RNA, 14 nt, Artificial Sequence
  Description of Artificial Sequence: Synthetic oligonucleotide
cacguaauauuuca

SEQ ID NO: 44260 - RNA, 13 nt, Artificial Sequence
  Description of Artificial Sequence: Synthetic oligonucleotide
uauucucuucacu

SEQ ID NO: 44261 - RNA, 14 nt, Artificial Sequence
  Description of Artificial Sequence: Synthetic oligonucleotide
cuaaugcuaagaaa

SEQ ID NO: 44262 - RNA, 12 nt, Artificial Sequence
  Description of Artificial Sequence: Synthetic oligonucleotide
gcugaaaaucaa

SEQ ID NO: 44263 - RNA, 14 nt, Artificial Sequence
  Description of Artificial Sequence: Synthetic oligonucleotide
aauaugauuacuuu

SEQ ID NO: 44264 - RNA, 14 nt, Artificial Sequence
  Description of Artificial Sequence: Synthetic oligonucleotide
cauuuuguucuaca

SEQ ID NO: 44265 - RNA, 12 nt, Artificial Sequence
  Description of Artificial Sequence: Synthetic oligonucleotide
cccgggacucuc

SEQ ID NO: 44266 - RNA, 14 nt, Artificial Sequence
  Description of Artificial Sequence: Synthetic oligonucleotide
ccuuuaaaguaaag

SEQ ID NO: 44267 - RNA, 13 nt, Artificial Sequence
  Description of Artificial Sequence: Synthetic oligonucleotide
ucuggaagccugg

SEQ ID NO: 44268 - RNA, 14 nt, Artificial Sequence
  Description of Artificial Sequence: Synthetic oligonucleotide
aaaacaaaagagag

SEQ ID NO: 44269 - RNA, 13 nt, Artificial Sequence
  Description of Artificial Sequence: Synthetic oligonucleotide
aucaguuaugccg

SEQ ID NO: 44270 - RNA, 13 nt, Artificial Sequence
  Description of Artificial Sequence: Synthetic oligonucleotide
uaaaagaagucca

SEQ ID NO: 44271 - RNA, 11 nt, Artificial Sequence
  Description of Artificial Sequence: Synthetic oligonucleotide
aggugagguua

SEQ ID NO: 44272 - RNA, 11 nt, Artificial Sequence
  Description of Artificial Sequence: Synthetic oligonucleotide
gggaagaggac

SEQ ID NO: 44273 - RNA, 13 nt, Artificial Sequence
  Description of Artificial Sequence: Synthetic oligonucleotide
aagcaaguauugu

SEQ ID NO: 44274 - RNA, 12 nt, Artificial Sequence
  Description of Artificial Sequence: Synthetic oligonucleotide
auuguagcacuc

SEQ ID NO: 44275 - RNA, 14 nt, Artificial Sequence
  Description of Artificial Sequence: Synthetic oligonucleotide
acaaaaccacaaau

SEQ ID NO: 44276 - RNA, 12 nt, Artificial Sequence
  Description of Artificial Sequence: Synthetic oligonucleotide
uaagcccauaca

SEQ ID NO: 44277 - RNA, 11 nt, Artificial Sequence
  Description of Artificial Sequence: Synthetic oligonucleotide
agcccauacag

SEQ ID NO: 44278 - RNA, 12 nt, Artificial Sequence
  Description of Artificial Sequence: Synthetic oligonucleotide
cagaaaccuucc

SEQ ID NO: 44279 - RNA, 10 nt, Artificial Sequence
  Description of Artificial Sequence: Synthetic oligonucleotide
guauaccuac

SEQ ID NO: 44280 - RNA, 13 nt, Artificial Sequence
  Description of Artificial Sequence: Synthetic oligonucleotide
gccaguuuucgga

SEQ ID NO: 44281 - RNA, 9 nt, Artificial Sequence
  Description of Artificial Sequence: Synthetic oligonucleotide
ggaacaggg

SEQ ID NO: 44282 - RNA, 13 nt, Artificial Sequence
  Description of Artificial Sequence: Synthetic oligonucleotide
uuaacuuuccagu

SEQ ID NO: 44283 - RNA, 14 nt, Artificial Sequence
  Description of Artificial Sequence: Synthetic oligonucleotide
aaaguuugguuuug

SEQ ID NO: 44284 - RNA, 12 nt, Artificial Sequence
  Description of Artificial Sequence: Synthetic oligonucleotide
cuucccacugua

SEQ ID NO: 44285 - RNA, 13 nt, Artificial Sequence
  Description of Artificial Sequence: Synthetic oligonucleotide
ugauaccauauga

SEQ ID NO: 44286 - RNA, 11 nt, Artificial Sequence
  Description of Artificial Sequence: Synthetic oligonucleotide
aacaugggcug

SEQ ID NO: 44287 - RNA, 13 nt, Artificial Sequence
  Description of Artificial Sequence: Synthetic oligonucleotide
caacuuuuucaua

SEQ ID NO: 44288 - RNA, 12 nt, Artificial Sequence
  Description of Artificial Sequence: Synthetic oligonucleotide
caugaggccgga

SEQ ID NO: 44289 - RNA, 11 nt, Artificial Sequence
  Description of Artificial Sequence: Synthetic oligonucleotide
acugcauuugu

SEQ ID NO: 44290 - RNA, 13 nt, Artificial Sequence
  Description of Artificial Sequence: Synthetic oligonucleotide
aauguuuacuacc

SEQ ID NO: 44291 - RNA, 15 nt, Artificial Sequence
  Description of Artificial Sequence: Synthetic oligonucleotide
aauuuuuugaugaaa

SEQ ID NO: 44292 - RNA, 14 nt, Artificial Sequence
  Description of Artificial Sequence: Synthetic oligonucleotide
cagugugugaauuu

SEQ ID NO: 44293 - RNA, 13 nt, Artificial Sequence
  Description of Artificial Sequence: Synthetic oligonucleotide
gagcaauguaugu

SEQ ID NO: 44294 - RNA, 14 nt, Artificial Sequence
  Description of Artificial Sequence: Synthetic oligonucleotide
aaagcacauauaua

SEQ ID NO: 44295 - RNA, 14 nt, Artificial Sequence
  Description of Artificial Sequence: Synthetic oligonucleotide
guaauaguuucucc

SEQ ID NO: 44296 - RNA, 13 nt, Artificial Sequence
  Description of Artificial Sequence: Synthetic oligonucleotide
aguuucuccaaau

SEQ ID NO: 44297 - RNA, 13 nt, Artificial Sequence
  Description of Artificial Sequence: Synthetic oligonucleotide
uacuuccuagaaa

SEQ ID NO: 44298 - RNA, 13 nt, Artificial Sequence
  Description of Artificial Sequence: Synthetic oligonucleotide
uacaccauauaug

SEQ ID NO: 44299 - RNA, 14 nt, Artificial Sequence
  Description of Artificial Sequence: Synthetic oligonucleotide
auauaugaauggag

SEQ ID NO: 44300 - RNA, 13 nt, Artificial Sequence
  Description of Artificial Sequence: Synthetic oligonucleotide
acgagaagaagau

SEQ ID NO: 44301 - RNA, 13 nt, Artificial Sequence
  Description of Artificial Sequence: Synthetic oligonucleotide
ucauuuacaggga

SEQ ID NO: 44302 - RNA, 13 nt, Artificial Sequence
  Description of Artificial Sequence: Synthetic oligonucleotide
cauuuacagggac

SEQ ID NO: 44303 - RNA, 10 nt, Artificial Sequence
  Description of Artificial Sequence: Synthetic oligonucleotide
agggaccuga

SEQ ID NO: 44304 - RNA, 14 nt, Artificial Sequence
  Description of Artificial Sequence: Synthetic oligonucleotide
uguuugacugcauc

SEQ ID NO: 44305 - RNA, 13 nt, Artificial Sequence
  Description of Artificial Sequence: Synthetic oligonucleotide
uuugacugcaucg

SEQ ID NO: 44306 - RNA, 12 nt, Artificial Sequence
  Description of Artificial Sequence: Synthetic oligonucleotide
gaguucacaggg

SEQ ID NO: 44307 - RNA, 13 nt, Artificial Sequence
  Description of Artificial Sequence: Synthetic oligonucleotide
ggcaccucugucc

SEQ ID NO: 44308 - RNA, 15 nt, Artificial Sequence
  Description of Artificial Sequence: Synthetic oligonucleotide
gguuugucuuuuuaa

SEQ ID NO: 44309 - RNA, 14 nt, Artificial Sequence
  Description of Artificial Sequence: Synthetic oligonucleotide
uuugucuuuuuaag

SEQ ID NO: 44310 - RNA, 13 nt, Artificial Sequence
  Description of Artificial Sequence: Synthetic oligonucleotide
ccuaaagguuguc

SEQ ID NO: 44311 - RNA, 12 nt, Artificial Sequence
  Description of Artificial Sequence: Synthetic oligonucleotide
aagguugucgac

SEQ ID NO: 44312 - RNA, 13 nt, Artificial Sequence
  Description of Artificial Sequence: Synthetic oligonucleotide
accuggcaauugu

SEQ ID NO: 44313 - RNA, 12 nt, Artificial Sequence
  Description of Artificial Sequence: Synthetic oligonucleotide
aguggugcgagg

SEQ ID NO: 44314 - RNA, 13 nt, Artificial Sequence
  Description of Artificial Sequence: Synthetic oligonucleotide
agagacaugaaau

SEQ ID NO: 44315 - RNA, 13 nt, Artificial Sequence
  Description of Artificial Sequence: Synthetic oligonucleotide
auauauuucucca

SEQ ID NO: 44316 - RNA, 10 nt, Artificial Sequence
  Description of Artificial Sequence: Synthetic oligonucleotide
caugaaggcu

SEQ ID NO: 44317 - RNA, 11 nt, Artificial Sequence
  Description of Artificial Sequence: Synthetic oligonucleotide
gcuggaguggu

SEQ ID NO: 44318 - RNA, 11 nt, Artificial Sequence
  Description of Artificial Sequence: Synthetic oligonucleotide
aggaagagagg

SEQ ID NO: 44319 - RNA, 12 nt, Artificial Sequence
  Description of Artificial Sequence: Synthetic oligonucleotide
cuugcaucgggc

SEQ ID NO: 44320 - RNA, 13 nt, Artificial Sequence
  Description of Artificial Sequence: Synthetic oligonucleotide
auauccuacugug

SEQ ID NO: 44321 - RNA, 13 nt, Artificial Sequence
  Description of Artificial Sequence: Synthetic oligonucleotide
uccuacuguguaa

SEQ ID NO: 44322 - RNA, 12 nt, Artificial Sequence
  Description of Artificial Sequence: Synthetic oligonucleotide
ccuuguagugua

SEQ ID NO: 44323 - RNA, 13 nt, Artificial Sequence
  Description of Artificial Sequence: Synthetic oligonucleotide
ucuuuguugauug

SEQ ID NO: 44324 - RNA, 14 nt, Artificial Sequence
  Description of Artificial Sequence: Synthetic oligonucleotide
uuuguugauugaaa

SEQ ID NO: 44325 - RNA, 15 nt, Artificial Sequence
  Description of Artificial Sequence: Synthetic oligonucleotide
uucuuuuucuuccau

SEQ ID NO: 44326 - RNA, 13 nt, Artificial Sequence
  Description of Artificial Sequence: Synthetic oligonucleotide
aaucuuccuucua

SEQ ID NO: 44327 - RNA, 13 nt, Artificial Sequence
  Description of Artificial Sequence: Synthetic oligonucleotide
uugaaugcuucau

SEQ ID NO: 44328 - RNA, 13 nt, Artificial Sequence
  Description of Artificial Sequence: Synthetic oligonucleotide
ugaaugcuucaug

SEQ ID NO: 44329 - RNA, 13 nt, Artificial Sequence
  Description of Artificial Sequence: Synthetic oligonucleotide
aauucuacuuuga

SEQ ID NO: 44330 - RNA, 13 nt, Artificial Sequence
  Description of Artificial Sequence: Synthetic oligonucleotide
agcaacuacagac

SEQ ID NO: 44331 - RNA, 13 nt, Artificial Sequence
  Description of Artificial Sequence: Synthetic oligonucleotide
gaccaaggucaac

SEQ ID NO: 44332 - RNA, 13 nt, Artificial Sequence
  Description of Artificial Sequence: Synthetic oligonucleotide
cgacuaucucgac

SEQ ID NO: 44333 - RNA, 13 nt, Artificial Sequence
  Description of Artificial Sequence: Synthetic oligonucleotide
aaccuucccaaac

SEQ ID NO: 44334 - RNA, 14 nt, Artificial Sequence
  Description of Artificial Sequence: Synthetic oligonucleotide
ccaagcuuagaacu

SEQ ID NO: 44335 - RNA, 15 nt, Artificial Sequence
  Description of Artificial Sequence: Synthetic oligonucleotide
agcuuagaacuuuaa

SEQ ID NO: 44336 - RNA, 11 nt, Artificial Sequence
  Description of Artificial Sequence: Synthetic oligonucleotide
aagaccaccac

SEQ ID NO: 44337 - RNA, 14 nt, Artificial Sequence
  Description of Artificial Sequence: Synthetic oligonucleotide
gcgagaaauaaagu

SEQ ID NO: 44338 - RNA, 14 nt, Artificial Sequence
  Description of Artificial Sequence: Synthetic oligonucleotide
cgagaaauaaaguu

SEQ ID NO: 44339 - RNA, 12 nt, Artificial Sequence
  Description of Artificial Sequence: Synthetic oligonucleotide
aggaaaugaucc

SEQ ID NO: 44340 - RNA, 13 nt, Artificial Sequence
  Description of Artificial Sequence: Synthetic oligonucleotide
gaagaaaugaaac

SEQ ID NO: 44341 - RNA, 13 nt, Artificial Sequence
  Description of Artificial Sequence: Synthetic oligonucleotide
guuuccauccucc

SEQ ID NO: 44342 - RNA, 15 nt, Artificial Sequence
  Description of Artificial Sequence: Synthetic oligonucleotide
acugaaaaucuuuga

SEQ ID NO: 44343 - RNA, 11 nt, Artificial Sequence
  Description of Artificial Sequence: Synthetic oligonucleotide
ugccguucagg

SEQ ID NO: 44344 - RNA, 13 nt, Artificial Sequence
  Description of Artificial Sequence: Synthetic oligonucleotide
caggguccagaag

SEQ ID NO: 44345 - RNA, 13 nt, Artificial Sequence
  Description of Artificial Sequence: Synthetic oligonucleotide
ucaagacugcuug

SEQ ID NO: 44346 - RNA, 13 nt, Artificial Sequence
  Description of Artificial Sequence: Synthetic oligonucleotide
uccaugucuuugg

SEQ ID NO: 44347 - RNA, 11 nt, Artificial Sequence
  Description of Artificial Sequence: Synthetic oligonucleotide
gccugaaacac

SEQ ID NO: 44348 - RNA, 12 nt, Artificial Sequence
  Description of Artificial Sequence: Synthetic oligonucleotide
ucucuguaccuc

SEQ ID NO: 44349 - RNA, 12 nt, Artificial Sequence
  Description of Artificial Sequence: Synthetic oligonucleotide
agcaagacaaga

SEQ ID NO: 44350 - RNA, 13 nt, Artificial Sequence
  Description of Artificial Sequence: Synthetic oligonucleotide
gcaagacaagaaa

SEQ ID NO: 44351 - RNA, 12 nt, Artificial Sequence
  Description of Artificial Sequence: Synthetic oligonucleotide
uguacaagaucc

SEQ ID NO: 44352 - RNA, 12 nt, Artificial Sequence
  Description of Artificial Sequence: Synthetic oligonucleotide
cguacuugcaga

SEQ ID NO: 44353 - RNA, 13 nt, Artificial Sequence
  Description of Artificial Sequence: Synthetic oligonucleotide
cgaucgauacaga

SEQ ID NO: 44354 - RNA, 13 nt, Artificial Sequence
  Description of Artificial Sequence: Synthetic oligonucleotide
uauaaaaauaaau

SEQ ID NO: 44355 - RNA, 13 nt, Artificial Sequence
  Description of Artificial Sequence: Synthetic oligonucleotide
uaaaaauaaauau

SEQ ID NO: 44356 - RNA, 13 nt, Artificial Sequence
  Description of Artificial Sequence: Synthetic oligonucleotide
uuugacugcugug

SEQ ID NO: 44357 - RNA, 13 nt, Artificial Sequence
  Description of Artificial Sequence: Synthetic oligonucleotide
ggagaugagagac

SEQ ID NO: 44358 - RNA, 10 nt, Artificial Sequence
  Description of Artificial Sequence: Synthetic oligonucleotide
ucccacuugg

SEQ ID NO: 44359 - RNA, 10 nt, Artificial Sequence
  Description of Artificial Sequence: Synthetic oligonucleotide
guucacggcc

SEQ ID NO: 44360 - RNA, 12 nt, Artificial Sequence
  Description of Artificial Sequence: Synthetic oligonucleotide
accaucacacca

SEQ ID NO: 44361 - RNA, 10 nt, Artificial Sequence
  Description of Artificial Sequence: Synthetic oligonucleotide
cugcggguuu

SEQ ID NO: 44362 - RNA, 9 nt, Artificial Sequence
  Description of Artificial Sequence: Synthetic oligonucleotide
uccaguuug

SEQ ID NO: 44363 - RNA, 12 nt, Artificial Sequence
  Description of Artificial Sequence: Synthetic oligonucleotide
uuaaggacuucu

SEQ ID NO: 44364 - RNA, 12 nt, Artificial Sequence
  Description of Artificial Sequence: Synthetic oligonucleotide
agugggacagag

SEQ ID NO: 44365 - RNA, 13 nt, Artificial Sequence
  Description of Artificial Sequence: Synthetic oligonucleotide
auuuguuauugug

SEQ ID NO: 44366 - RNA, 12 nt, Artificial Sequence
  Description of Artificial Sequence: Synthetic oligonucleotide
ucaaaugcauuu

SEQ ID NO: 44367 - RNA, 9 nt, Artificial Sequence
  Description of Artificial Sequence: Synthetic oligonucleotide
aggaaagcc

SEQ ID NO: 44368 - RNA, 10 nt, Artificial Sequence
  Description of Artificial Sequence: Synthetic oligonucleotide
ggaaagcccu

SEQ ID NO: 44369 - RNA, 11 nt, Artificial Sequence
  Description of Artificial Sequence: Synthetic oligonucleotide
ccagcauggcc

SEQ ID NO: 44370 - RNA, 10 nt, Artificial Sequence
  Description of Artificial Sequence: Synthetic oligonucleotide
uucucccuga

SEQ ID NO: 44371 - RNA, 11 nt, Artificial Sequence
  Description of Artificial Sequence: Synthetic oligonucleotide
aagaagcccuu

SEQ ID NO: 44372 - RNA, 11 nt, Artificial Sequence
  Description of Artificial Sequence: Synthetic oligonucleotide
gaagcccuuca

SEQ ID NO: 44373 - RNA, 10 nt, Artificial Sequence
  Description of Artificial Sequence: Synthetic oligonucleotide
cccuucagcg

SEQ ID NO: 44374 - RNA, 10 nt, Artificial Sequence
  Description of Artificial Sequence: Synthetic oligonucleotide
cuucagcggc

SEQ ID NO: 44375 - RNA, 11 nt, Artificial Sequence
  Description of Artificial Sequence: Synthetic oligonucleotide
cagcggccagu

SEQ ID NO: 44376 - RNA, 11 nt, Artificial Sequence
  Description of Artificial Sequence: Synthetic oligonucleotide
gaaaagcuccg

SEQ ID NO: 44377 - RNA, 10 nt, Artificial Sequence
  Description of Artificial Sequence: Synthetic oligonucleotide
aaagcuccgg

SEQ ID NO: 44378 - RNA, 12 nt, Artificial Sequence
  Description of Artificial Sequence: Synthetic oligonucleotide
gucaacagucug

SEQ ID NO: 44379 - RNA, 12 nt, Artificial Sequence
  Description of Artificial Sequence: Synthetic oligonucleotide
agaguucaaaag

SEQ ID NO: 44380 - RNA, 12 nt, Artificial Sequence
  Description of Artificial Sequence: Synthetic oligonucleotide
gaguucaaaagc

SEQ ID NO: 44381 - RNA, 11 nt, Artificial Sequence
  Description of Artificial Sequence: Synthetic oligonucleotide
ucaaaagcccu

SEQ ID NO: 44382 - RNA, 11 nt, Artificial Sequence
  Description of Artificial Sequence: Synthetic oligonucleotide
caaaagcccuu

SEQ ID NO: 44383 - RNA, 11 nt, Artificial Sequence
  Description of Artificial Sequence: Synthetic oligonucleotide
aaagcccuuca

SEQ ID NO: 44384 - RNA, 11 nt, Artificial Sequence
  Description of Artificial Sequence: Synthetic oligonucleotide
aagcccuucag

SEQ ID NO: 44385 - RNA, 12 nt, Artificial Sequence
  Description of Artificial Sequence: Synthetic oligonucleotide
ugaagccgcucg

SEQ ID NO: 44386 - RNA, 11 nt, Artificial Sequence
  Description of Artificial Sequence: Synthetic oligonucleotide
acgccagucaa

SEQ ID NO: 44387 - RNA, 12 nt, Artificial Sequence
  Description of Artificial Sequence: Synthetic oligonucleotide
ucuuggugcgug

SEQ ID NO: 44388 - RNA, 13 nt, Artificial Sequence
  Description of Artificial Sequence: Synthetic oligonucleotide
uuggauucaucag

SEQ ID NO: 44389 - RNA, 12 nt, Artificial Sequence
  Description of Artificial Sequence: Synthetic oligonucleotide
ggaauaccuaag

SEQ ID NO: 44390 - RNA, 11 nt, Artificial Sequence
  Description of Artificial Sequence: Synthetic oligonucleotide
uuugaggcuca

SEQ ID NO: 44391 - RNA, 10 nt, Artificial Sequence
  Description of Artificial Sequence: Synthetic oligonucleotide
cuacaauugg

SEQ ID NO: 44392 - RNA, 11 nt, Artificial Sequence
  Description of Artificial Sequence: Synthetic oligonucleotide
aguuaggagcc

SEQ ID NO: 44393 - RNA, 12 nt, Artificial Sequence
  Description of Artificial Sequence: Synthetic oligonucleotide
gucaauauccac

SEQ ID NO: 44394 - RNA, 12 nt, Artificial Sequence
  Description of Artificial Sequence: Synthetic oligonucleotide
uguucagucaca

SEQ ID NO: 44395 - RNA, 11 nt, Artificial Sequence
  Description of Artificial Sequence: Synthetic oligonucleotide
cacacacauac

SEQ ID NO: 44396 - RNA, 11 nt, Artificial Sequence
  Description of Artificial Sequence: Synthetic oligonucleotide
uccuuuugcuu

SEQ ID NO: 44397 - RNA, 15 nt, Artificial Sequence
  Description of Artificial Sequence: Synthetic oligonucleotide
uuuaaaguaauuuuu

SEQ ID NO: 44398 - RNA, 12 nt, Artificial Sequence
  Description of Artificial Sequence: Synthetic oligonucleotide
aacagucaaugg

SEQ ID NO: 44399 - RNA, 12 nt, Artificial Sequence
  Description of Artificial Sequence: Synthetic oligonucleotide
cgacaaaccaau

SEQ ID NO: 44400 - RNA, 11 nt, Artificial Sequence
  Description of Artificial Sequence: Synthetic oligonucleotide
cugcuaccacu

SEQ ID NO: 44401 - RNA, 12 nt, Artificial Sequence
  Description of Artificial Sequence: Synthetic oligonucleotide
caagcggucuua

SEQ ID NO: 44402 - RNA, 12 nt, Artificial Sequence
  Description of Artificial Sequence: Synthetic oligonucleotide
gucuuaccggcu

SEQ ID NO: 44403 - RNA, 10 nt, Artificial Sequence
  Description of Artificial Sequence: Synthetic oligonucleotide
auggguuacc

SEQ ID NO: 44404 - RNA, 10 nt, Artificial Sequence
  Description of Artificial Sequence: Synthetic oligonucleotide
uuaccugcga

SEQ ID NO: 44405 - RNA, 11 nt, Artificial Sequence
  Description of Artificial Sequence: Synthetic oligonucleotide
aucuugcugag

SEQ ID NO: 44406 - RNA, 12 nt, Artificial Sequence
  Description of Artificial Sequence: Synthetic oligonucleotide
gcauaaaacagu

SEQ ID NO: 44407 - RNA, 11 nt, Artificial Sequence
  Description of Artificial Sequence: Synthetic oligonucleotide
uccuuuauccu

SEQ ID NO: 44408 - RNA, 11 nt, Artificial Sequence
  Description of Artificial Sequence: Synthetic oligonucleotide
aacgcaaguug

SEQ ID NO: 44409 - RNA, 12 nt, Artificial Sequence
  Description of Artificial Sequence: Synthetic oligonucleotide
aacugaaaccau

SEQ ID NO: 44410 - RNA, 13 nt, Artificial Sequence
  Description of Artificial Sequence: Synthetic oligonucleotide
cuuuguuaaauau

SEQ ID NO: 44411 - RNA, 13 nt, Artificial Sequence
  Description of Artificial Sequence: Synthetic oligonucleotide
uauauuaaaaguu

SEQ ID NO: 44412 - RNA, 12 nt, Artificial Sequence
  Description of Artificial Sequence: Synthetic oligonucleotide
uuuugacuuaac

SEQ ID NO: 44413 - RNA, 12 nt, Artificial Sequence
  Description of Artificial Sequence: Synthetic oligonucleotide
caaacucagcac

SEQ ID NO: 44414 - RNA, 10 nt, Artificial Sequence
  Description of Artificial Sequence: Synthetic oligonucleotide
gcugaccuca

SEQ ID NO: 44415 - RNA, 13 nt, Artificial Sequence
  Description of Artificial Sequence: Synthetic oligonucleotide
uuauucagaucgc

SEQ ID NO: 44416 - RNA, 12 nt, Artificial Sequence
  Description of Artificial Sequence: Synthetic oligonucleotide
ggguucugggau

SEQ ID NO: 44417 - RNA, 14 nt, Artificial Sequence
  Description of Artificial Sequence: Synthetic oligonucleotide
uauuggaaauuaug

SEQ ID NO: 44418 - RNA, 12 nt, Artificial Sequence
  Description of Artificial Sequence: Synthetic oligonucleotide
uggaagcacuag

SEQ ID NO: 44419 - RNA, 12 nt, Artificial Sequence
  Description of Artificial Sequence: Synthetic oligonucleotide
uuuuuaugugga

SEQ ID NO: 44420 - RNA, 11 nt, Artificial Sequence
  Description of Artificial Sequence: Synthetic oligonucleotide
gaauugguaga

SEQ ID NO: 44421 - RNA, 12 nt, Artificial Sequence
  Description of Artificial Sequence: Synthetic oligonucleotide
uagacuuggaga

SEQ ID NO: 44422 - RNA, 12 nt, Artificial Sequence
  Description of Artificial Sequence: Synthetic oligonucleotide
uacaguauucca

SEQ ID NO: 44423 - RNA, 14 nt, Artificial Sequence
  Description of Artificial Sequence: Synthetic oligonucleotide
cacugaugaauuaa

SEQ ID NO: 44424 - RNA, 11 nt, Artificial Sequence
  Description of Artificial Sequence: Synthetic oligonucleotide
cacaucaucac

SEQ ID NO: 44425 - RNA, 12 nt, Artificial Sequence
  Description of Artificial Sequence: Synthetic oligonucleotide
ucaccaaacaga

SEQ ID NO: 44426 - RNA, 11 nt, Artificial Sequence
  Description of Artificial Sequence: Synthetic oligonucleotide
gaacaugaugg

SEQ ID NO: 44427 - RNA, 11 nt, Artificial Sequence
  Description of Artificial Sequence: Synthetic oligonucleotide
auguagacugc

SEQ ID NO: 44428 - RNA, 12 nt, Artificial Sequence
  Description of Artificial Sequence: Synthetic oligonucleotide
gaucuauuuaug

SEQ ID NO: 44429 - RNA, 11 nt, Artificial Sequence
  Description of Artificial Sequence: Synthetic oligonucleotide
cacuauuauca

SEQ ID NO: 44430 - RNA, 10 nt, Artificial Sequence
  Description of Artificial Sequence: Synthetic oligonucleotide
ucaguucugc

SEQ ID NO: 44431 - RNA, 12 nt, Artificial Sequence
  Description of Artificial Sequence: Synthetic oligonucleotide
gauuaaaccuac

SEQ ID NO: 44432 - RNA, 12 nt, Artificial Sequence
  Description of Artificial Sequence: Synthetic oligonucleotide
uaaaauccuucu

SEQ ID NO: 44433 - RNA, 11 nt, Artificial Sequence
  Description of Artificial Sequence: Synthetic oligonucleotide
augcuguagac

SEQ ID NO: 44434 - RNA, 12 nt, Artificial Sequence
  Description of Artificial Sequence: Synthetic oligonucleotide
ugauaggaauag

SEQ ID NO: 44435 - RNA, 10 nt, Artificial Sequence
  Description of Artificial Sequence: Synthetic oligonucleotide
auggcccuga

SEQ ID NO: 44436 - RNA, 10 nt, Artificial Sequence
  Description of Artificial Sequence: Synthetic oligonucleotide
uccucaagca

SEQ ID NO: 44437 - RNA, 9 nt, Artificial Sequence
  Description of Artificial Sequence: Synthetic oligonucleotide
uucagccca

SEQ ID NO: 44438 - RNA, 10 nt, Artificial Sequence
  Description of Artificial Sequence: Synthetic oligonucleotide
cugcugaacc

SEQ ID NO: 44439 - RNA, 11 nt, Artificial Sequence
  Description of Artificial Sequence: Synthetic oligonucleotide
aguucucuuca

SEQ ID NO: 44440 - RNA, 10 nt, Artificial Sequence
  Description of Artificial Sequence: Synthetic oligonucleotide
cagccuagag

SEQ ID NO: 44441 - RNA, 12 nt, Artificial Sequence
  Description of Artificial Sequence: Synthetic oligonucleotide
ucugugaagugu

SEQ ID NO: 44442 - RNA, 13 nt, Artificial Sequence
  Description of Artificial Sequence: Synthetic oligonucleotide
gagaaaauuucaa

SEQ ID NO: 44443 - RNA, 10 nt, Artificial Sequence
  Description of Artificial Sequence: Synthetic oligonucleotide
auccuccuga

SEQ ID NO: 44444 - RNA, 11 nt, Artificial Sequence
  Description of Artificial Sequence: Synthetic oligonucleotide
ugacaucauau

SEQ ID NO: 44445 - RNA, 12 nt, Artificial Sequence
  Description of Artificial Sequence: Synthetic oligonucleotide
aucuucaucaua

SEQ ID NO: 44446 - RNA, 12 nt, Artificial Sequence
  Description of Artificial Sequence: Synthetic oligonucleotide
acuagcuauuaa

SEQ ID NO: 44447 - RNA, 13 nt, Artificial Sequence
  Description of Artificial Sequence: Synthetic oligonucleotide
cucuacuaaaaau

SEQ ID NO: 44448 - RNA, 11 nt, Artificial Sequence
  Description of Artificial Sequence: Synthetic oligonucleotide
cuaucucgccu

SEQ ID NO: 44449 - RNA, 12 nt, Artificial Sequence
  Description of Artificial Sequence: Synthetic oligonucleotide
uucgguccaguu

SEQ ID NO: 44450 - RNA, 10 nt, Artificial Sequence
  Description of Artificial Sequence: Synthetic oligonucleotide
auguagccgc

SEQ ID NO: 44451 - RNA, 11 nt, Artificial Sequence
  Description of Artificial Sequence: Synthetic oligonucleotide
gaggagacuug

SEQ ID NO: 44452 - RNA, 11 nt, Artificial Sequence
  Description of Artificial Sequence: Synthetic oligonucleotide
aguagugagga

SEQ ID NO: 44453 - RNA, 13 nt, Artificial Sequence
  Description of Artificial Sequence: Synthetic oligonucleotide
agaugaguacaaa

SEQ ID NO: 44454 - RNA, 12 nt, Artificial Sequence
  Description of Artificial Sequence: Synthetic oligonucleotide
uuguuaaugggc

SEQ ID NO: 44455 - RNA, 12 nt, Artificial Sequence
  Description of Artificial Sequence: Synthetic oligonucleotide
uuuuaauuuauu

SEQ ID NO: 44456 - RNA, 11 nt, Artificial Sequence
  Description of Artificial Sequence: Synthetic oligonucleotide
auuuaaauaug

SEQ ID NO: 44457 - RNA, 12 nt, Artificial Sequence
  Description of Artificial Sequence: Synthetic oligonucleotide
auccuuuguuuc

SEQ ID NO: 44458 - RNA, 13 nt, Artificial Sequence
  Description of Artificial Sequence: Synthetic oligonucleotide
gucuaaguguuug

SEQ ID NO: 44459 - RNA, 11 nt, Artificial Sequence
  Description of Artificial Sequence: Synthetic oligonucleotide
ccugugacaaa

SEQ ID NO: 44460 - RNA, 12 nt, Artificial Sequence
  Description of Artificial Sequence: Synthetic oligonucleotide
caggcugaauua

SEQ ID NO: 44461 - RNA, 13 nt, Artificial Sequence
  Description of Artificial Sequence: Synthetic oligonucleotide
ucauucuuacaau

SEQ ID NO: 44462 - RNA, 14 nt, Artificial Sequence
  Description of Artificial Sequence: Synthetic oligonucleotide
cauucuuacaauug

SEQ ID NO: 44463 - RNA, 11 nt, Artificial Sequence
  Description of Artificial Sequence: Synthetic oligonucleotide
agagaguguac

SEQ ID NO: 44464 - RNA, 11 nt, Artificial Sequence
  Description of Artificial Sequence: Synthetic oligonucleotide
gaacucagcag

SEQ ID NO: 44465 - RNA, 12 nt, Artificial Sequence
  Description of Artificial Sequence: Synthetic oligonucleotide
uuauuuucagua

SEQ ID NO: 44466 - RNA, 11 nt, Artificial Sequence
  Description of Artificial Sequence: Synthetic oligonucleotide
cuuaaauggaa

SEQ ID NO: 44467 - RNA, 12 nt, Artificial Sequence
  Description of Artificial Sequence: Synthetic oligonucleotide
gccuaaaauugu

SEQ ID NO: 44468 - RNA, 12 nt, Artificial Sequence
  Description of Artificial Sequence: Synthetic oligonucleotide
acuaacaucugg

SEQ ID NO: 44469 - RNA, 11 nt, Artificial Sequence
  Description of Artificial Sequence: Synthetic oligonucleotide
gacugugagcu

SEQ ID NO: 44470 - RNA, 13 nt, Artificial Sequence
  Description of Artificial Sequence: Synthetic oligonucleotide
gcuuuuuauuaau

SEQ ID NO: 44471 - RNA, 12 nt, Artificial Sequence
  Description of Artificial Sequence: Synthetic oligonucleotide
ucuucuuacauu

SEQ ID NO: 44472 - RNA, 14 nt, Artificial Sequence
  Description of Artificial Sequence: Synthetic oligonucleotide
auuuguaaaaaugu

SEQ ID NO: 44473 - RNA, 14 nt, Artificial Sequence
  Description of Artificial Sequence: Synthetic oligonucleotide
ucuuaauucauauu

SEQ ID NO: 44474 - RNA, 12 nt, Artificial Sequence
  Description of Artificial Sequence: Synthetic oligonucleotide
aacuaaucauga

SEQ ID NO: 44475 - RNA, 11 nt, Artificial Sequence
  Description of Artificial Sequence: Synthetic oligonucleotide
cugcucuuggg

SEQ ID NO: 44476 - RNA, 12 nt, Artificial Sequence
  Description of Artificial Sequence: Synthetic oligonucleotide
aguagcuuugag

SEQ ID NO: 44477 - RNA, 13 nt, Artificial Sequence
  Description of Artificial Sequence: Synthetic oligonucleotide
acguaauauuuca

SEQ ID NO: 44478 - RNA, 12 nt, Artificial Sequence
  Description of Artificial Sequence: Synthetic oligonucleotide
auucucuucacu

SEQ ID NO: 44479 - RNA, 13 nt, Artificial Sequence
  Description of Artificial Sequence: Synthetic oligonucleotide
uaaugcuaagaaa

SEQ ID NO: 44480 - RNA, 11 nt, Artificial Sequence
  Description of Artificial Sequence: Synthetic oligonucleotide
cugaaaaucaa

SEQ ID NO: 44481 - RNA, 13 nt, Artificial Sequence
  Description of Artificial Sequence: Synthetic oligonucleotide
auaugauuacuuu

SEQ ID NO: 44482 - RNA, 13 nt, Artificial Sequence
  Description of Artificial Sequence: Synthetic oligonucleotide
auuuuguucuaca

SEQ ID NO: 44483 - RNA, 11 nt, Artificial Sequence
  Description of Artificial Sequence: Synthetic oligonucleotide
ccgggacucuc

SEQ ID NO: 44484 - RNA, 13 nt, Artificial Sequence
  Description of Artificial Sequence: Synthetic oligonucleotide
cuuuaaaguaaag

SEQ ID NO: 44485 - RNA, 12 nt, Artificial Sequence
  Description of Artificial Sequence: Synthetic oligonucleotide
cuggaagccugg

SEQ ID NO: 44486 - RNA, 13 nt, Artificial Sequence
  Description of Artificial Sequence: Synthetic oligonucleotide
aaacaaaagagag

SEQ ID NO: 44487 - RNA, 12 nt, Artificial Sequence
  Description of Artificial Sequence: Synthetic oligonucleotide
ucaguuaugccg

SEQ ID NO: 44488 - RNA, 12 nt, Artificial Sequence
  Description of Artificial Sequence: Synthetic oligonucleotide
aaaagaagucca

SEQ ID NO: 44489 - RNA, 10 nt, Artificial Sequence
  Description of Artificial Sequence: Synthetic oligonucleotide
ggugagguua

SEQ ID NO: 44490 - RNA, 10 nt, Artificial Sequence
  Description of Artificial Sequence: Synthetic oligonucleotide
ggaagaggac

SEQ ID NO: 44491 - RNA, 12 nt, Artificial Sequence
  Description of Artificial Sequence: Synthetic oligonucleotide
agcaaguauugu

SEQ ID NO: 44492 - RNA, 11 nt, Artificial Sequence
  Description of Artificial Sequence: Synthetic oligonucleotide
uuguagcacuc

SEQ ID NO: 44493 - RNA, 13 nt, Artificial Sequence
  Description of Artificial Sequence: Synthetic oligonucleotide
caaaaccacaaau

SEQ ID NO: 44494 - RNA, 11 nt, Artificial Sequence
  Description of Artificial Sequence: Synthetic oligonucleotide
aagcccauaca

SEQ ID NO: 44495 - RNA, 10 nt, Artificial Sequence
  Description of Artificial Sequence: Synthetic oligonucleotide
gcccauacag

SEQ ID NO: 44496 - RNA, 11 nt, Artificial Sequence
  Description of Artificial Sequence: Synthetic oligonucleotide
agaaaccuucc

SEQ ID NO: 44497 - RNA, 9 nt, Artificial Sequence
  Description of Artificial Sequence: Synthetic oligonucleotide
uauaccuac

SEQ ID NO: 44498 - RNA, 12 nt, Artificial Sequence
  Description of Artificial Sequence: Synthetic oligonucleotide
ccaguuuucgga

SEQ ID NO: 44499 - RNA, 8 nt, Artificial Sequence
  Description of Artificial Sequence: Synthetic oligonucleotide
gaacaggg

SEQ ID NO: 44500 - RNA, 12 nt, Artificial Sequence
  Description of Artificial Sequence: Synthetic oligonucleotide
uaacuuuccagu

SEQ ID NO: 44501 - RNA, 13 nt, Artificial Sequence
  Description of Artificial Sequence: Synthetic oligonucleotide
aaguuugguuuug

SEQ ID NO: 44502 - RNA, 11 nt, Artificial Sequence
  Description of Artificial Sequence: Synthetic oligonucleotide
uucccacugua

SEQ ID NO: 44503 - RNA, 12 nt, Artificial Sequence
  Description of Artificial Sequence: Synthetic oligonucleotide
gauaccauauga

SEQ ID NO: 44504 - RNA, 10 nt, Artificial Sequence
  Description of Artificial Sequence: Synthetic oligonucleotide
acaugggcug

SEQ ID NO: 44505 - RNA, 12 nt, Artificial Sequence
  Description of Artificial Sequence: Synthetic oligonucleotide
aacuuuuucaua

SEQ ID NO: 44506 - RNA, 11 nt, Artificial Sequence
  Description of Artificial Sequence: Synthetic oligonucleotide
augaggccgga

SEQ ID NO: 44507 - RNA, 10 nt, Artificial Sequence
  Description of Artificial Sequence: Synthetic oligonucleotide
cugcauuugu

SEQ ID NO: 44508 - RNA, 12 nt, Artificial Sequence
  Description of Artificial Sequence: Synthetic oligonucleotide
auguuuacuacc

SEQ ID NO: 44509 - RNA, 14 nt, Artificial Sequence
  Description of Artificial Sequence: Synthetic oligonucleotide
auuuuuugaugaaa

SEQ ID NO: 44510 - RNA, 13 nt, Artificial Sequence
  Description of Artificial Sequence: Synthetic oligonucleotide
agugugugaauuu

SEQ ID NO: 44511 - RNA, 12 nt, Artificial Sequence
  Description of Artificial Sequence: Synthetic oligonucleotide
agcaauguaugu

SEQ ID NO: 44512 - RNA, 13 nt, Artificial Sequence
  Description of Artificial Sequence: Synthetic oligonucleotide
aagcacauauaua

SEQ ID NO: 44513 - RNA, 13 nt, Artificial Sequence
  Description of Artificial Sequence: Synthetic oligonucleotide
uaauaguuucucc

SEQ ID NO: 44514 - RNA, 12 nt, Artificial Sequence
  Description of Artificial Sequence: Synthetic oligonucleotide
guuucuccaaau

SEQ ID NO: 44515 - RNA, 12 nt, Artificial Sequence
  Description of Artificial Sequence: Synthetic oligonucleotide
acuuccuagaaa

SEQ ID NO: 44516 - RNA, 12 nt, Artificial Sequence
  Description of Artificial Sequence: Synthetic oligonucleotide
acaccauauaug

SEQ ID NO: 44517 - RNA, 13 nt, Artificial Sequence
  Description of Artificial Sequence: Synthetic oligonucleotide
uauaugaauggag

SEQ ID NO: 44518 - RNA, 12 nt, Artificial Sequence
  Description of Artificial Sequence: Synthetic oligonucleotide
cauuuacaggga

SEQ ID NO: 44519 - RNA, 12 nt, Artificial Sequence
  Description of Artificial Sequence: Synthetic oligonucleotide
auuuacagggac

SEQ ID NO: 44520 - RNA, 9 nt, Artificial Sequence
  Description of Artificial Sequence: Synthetic oligonucleotide
gggaccuga

SEQ ID NO: 44521 - RNA, 13 nt, Artificial Sequence
  Description of Artificial Sequence: Synthetic oligonucleotide
guuugacugcauc

SEQ ID NO: 44522 - RNA, 12 nt, Artificial Sequence
  Description of Artificial Sequence: Synthetic oligonucleotide
uugacugcaucg

SEQ ID NO: 44523 - RNA, 11 nt, Artificial Sequence
  Description of Artificial Sequence: Synthetic oligonucleotide
aguucacaggg

SEQ ID NO: 44524 - RNA, 12 nt, Artificial Sequence
  Description of Artificial Sequence: Synthetic oligonucleotide
gcaccucugucc

SEQ ID NO: 44525 - RNA, 14 nt, Artificial Sequence
  Description of Artificial Sequence: Synthetic oligonucleotide
guuugucuuuuuaa

SEQ ID NO: 44526 - RNA, 13 nt, Artificial Sequence
  Description of Artificial Sequence: Synthetic oligonucleotide
uugucuuuuuaag

SEQ ID NO: 44527 - RNA, 12 nt, Artificial Sequence
  Description of Artificial Sequence: Synthetic oligonucleotide
cuaaagguuguc

SEQ ID NO: 44528 - RNA, 11 nt, Artificial Sequence
  Description of Artificial Sequence: Synthetic oligonucleotide
agguugucgac

SEQ ID NO: 44529 - RNA, 12 nt, Artificial Sequence
  Description of Artificial Sequence: Synthetic oligonucleotide
ccuggcaauugu

SEQ ID NO: 44530 - RNA, 11 nt, Artificial Sequence
  Description of Artificial Sequence: Synthetic oligonucleotide
guggugcgagg

SEQ ID NO: 44531 - RNA, 12 nt, Artificial Sequence
  Description of Artificial Sequence: Synthetic oligonucleotide
gagacaugaaau

SEQ ID NO: 44532 - RNA, 12 nt, Artificial Sequence
  Description of Artificial Sequence: Synthetic oligonucleotide
uauauuucucca

SEQ ID NO: 44533 - RNA, 9 nt, Artificial Sequence
  Description of Artificial Sequence: Synthetic oligonucleotide
augaaggcu

SEQ ID NO: 44534 - RNA, 10 nt, Artificial Sequence
  Description of Artificial Sequence: Synthetic oligonucleotide
cuggaguggu

SEQ ID NO: 44535 - RNA, 10 nt, Artificial Sequence
  Description of Artificial Sequence: Synthetic oligonucleotide
ggaagagagg

SEQ ID NO: 44536 - RNA, 11 nt, Artificial Sequence
  Description of Artificial Sequence: Synthetic oligonucleotide
uugcaucgggc

SEQ ID NO: 44537 - RNA, 12 nt, Artificial Sequence
  Description of Artificial Sequence: Synthetic oligonucleotide
uauccuacugug

SEQ ID NO: 44538 - RNA, 12 nt, Artificial Sequence
  Description of Artificial Sequence: Synthetic oligonucleotide
ccuacuguguaa

SEQ ID NO: 44539 - RNA, 11 nt, Artificial Sequence
  Description of Artificial Sequence: Synthetic oligonucleotide
cuuguagugua

SEQ ID NO: 44540 - RNA, 12 nt, Artificial Sequence
  Description of Artificial Sequence: Synthetic oligonucleotide
cuuuguugauug

SEQ ID NO: 44541 - RNA, 13 nt, Artificial Sequence
  Description of Artificial Sequence: Synthetic oligonucleotide
uuguugauugaaa

SEQ ID NO: 44542 - RNA, 14 nt, Artificial Sequence
  Description of Artificial Sequence: Synthetic oligonucleotide
ucuuuuucuuccau

SEQ ID NO: 44543 - RNA, 12 nt, Artificial Sequence
  Description of Artificial Sequence: Synthetic oligonucleotide
aucuuccuucua

SEQ ID NO: 44544 - RNA, 12 nt, Artificial Sequence
  Description of Artificial Sequence: Synthetic oligonucleotide
ugaaugcuucau

SEQ ID NO: 44545 - RNA, 12 nt, Artificial Sequence
  Description of Artificial Sequence: Synthetic oligonucleotide
gaaugcuucaug

SEQ ID NO: 44546 - RNA, 12 nt, Artificial Sequence
  Description of Artificial Sequence: Synthetic oligonucleotide
auucuacuuuga

SEQ ID NO: 44547 - RNA, 12 nt, Artificial Sequence
  Description of Artificial Sequence: Synthetic oligonucleotide
gcaacuacagac

SEQ ID NO: 44548 - RNA, 12 nt, Artificial Sequence
  Description of Artificial Sequence: Synthetic oligonucleotide
accaaggucaac

SEQ ID NO: 44549 - RNA, 12 nt, Artificial Sequence
  Description of Artificial Sequence: Synthetic oligonucleotide
gacuaucucgac

SEQ ID NO: 44550 - RNA, 12 nt, Artificial Sequence
  Description of Artificial Sequence: Synthetic oligonucleotide
accuucccaaac

SEQ ID NO: 44551 - RNA, 13 nt, Artificial Sequence
  Description of Artificial Sequence: Synthetic oligonucleotide
caagcuuagaacu

SEQ ID NO: 44552 - RNA, 14 nt, Artificial Sequence
  Description of Artificial Sequence: Synthetic oligonucleotide
gcuuagaacuuuaa

SEQ ID NO: 44553 - RNA, 13 nt, Artificial Sequence
  Description of Artificial Sequence: Synthetic oligonucleotide
aacuuuaagcaac

SEQ ID NO: 44554 - RNA, 10 nt, Artificial Sequence
  Description of Artificial Sequence: Synthetic oligonucleotide
agaccaccac

SEQ ID NO: 44555 - RNA, 13 nt, Artificial Sequence
  Description of Artificial Sequence: Synthetic oligonucleotide
cgagaaauaaagu

SEQ ID NO: 44556 - RNA, 13 nt, Artificial Sequence
  Description of Artificial Sequence: Synthetic oligonucleotide
gagaaauaaaguu

SEQ ID NO: 44557 - RNA, 11 nt, Artificial Sequence
  Description of Artificial Sequence: Synthetic oligonucleotide
ggaaaugaucc

SEQ ID NO: 44558 - RNA, 12 nt, Artificial Sequence
  Description of Artificial Sequence: Synthetic oligonucleotide
aagaaaugaaac

SEQ ID NO: 44559 - RNA, 12 nt, Artificial Sequence
  Description of Artificial Sequence: Synthetic oligonucleotide
uuuccauccucc

SEQ ID NO: 44560 - RNA, 14 nt, Artificial Sequence
  Description of Artificial Sequence: Synthetic oligonucleotide
cugaaaaucuuuga

SEQ ID NO: 44561 - RNA, 10 nt, Artificial Sequence
  Description of Artificial Sequence: Synthetic oligonucleotide
gccguucagg

SEQ ID NO: 44562 - RNA, 12 nt, Artificial Sequence
  Description of Artificial Sequence: Synthetic oligonucleotide
aggguccagaag

SEQ ID NO: 44563 - RNA, 12 nt, Artificial Sequence
  Description of Artificial Sequence: Synthetic oligonucleotide
caagacugcuug

SEQ ID NO: 44564 - RNA, 12 nt, Artificial Sequence
  Description of Artificial Sequence: Synthetic oligonucleotide
ccaugucuuugg

SEQ ID NO: 44565 - RNA, 10 nt, Artificial Sequence
  Description of Artificial Sequence: Synthetic oligonucleotide
ccugaaacac

SEQ ID NO: 44566 - RNA, 11 nt, Artificial Sequence
  Description of Artificial Sequence: Synthetic oligonucleotide
cucuguaccuc

SEQ ID NO: 44567 - RNA, 11 nt, Artificial Sequence
  Description of Artificial Sequence: Synthetic oligonucleotide
gcaagacaaga

SEQ ID NO: 44568 - RNA, 12 nt, Artificial Sequence
  Description of Artificial Sequence: Synthetic oligonucleotide
caagacaagaaa

SEQ ID NO: 44569 - RNA, 11 nt, Artificial Sequence
  Description of Artificial Sequence: Synthetic oligonucleotide
guacaagaucc

SEQ ID NO: 44570 - RNA, 11 nt, Artificial Sequence
  Description of Artificial Sequence: Synthetic oligonucleotide
guacuugcaga

SEQ ID NO: 44571 - RNA, 12 nt, Artificial Sequence
  Description of Artificial Sequence: Synthetic oligonucleotide
gaucgauacaga

SEQ ID NO: 44572 - RNA, 12 nt, Artificial Sequence
  Description of Artificial Sequence: Synthetic oligonucleotide
auaaaaauaaau

SEQ ID NO: 44573 - RNA, 12 nt, Artificial Sequence
  Description of Artificial Sequence: Synthetic oligonucleotide
aaaaauaaauau

SEQ ID NO: 44574 - RNA, 12 nt, Artificial Sequence
  Description of Artificial Sequence: Synthetic oligonucleotide
uugacugcugug

SEQ ID NO: 44575 - RNA, 12 nt, Artificial Sequence
  Description of Artificial Sequence: Synthetic oligonucleotide
gagaugagagac

SEQ ID NO: 44576 - RNA, 9 nt, Artificial Sequence
  Description of Artificial Sequence: Synthetic oligonucleotide
cccacuugg

SEQ ID NO: 44577 - RNA, 1859 nt, Homo sapiens
gcaggcacaaacucauccauccccaguugauuggaagaaacaacgaugacuccugggaagaccucauuggugucacugcuacugcugcugagccuggaggccauagugaaggcaggaaucacaaucccacgaaauccaggaugcccaaauucugaggacaagaacuucccccggacugugauggucaaccugaacauccauaaccggaauaccaauaccaaucccaaaagguccucagauuacuacaaccgauccaccucaccuuggaaucuccaccgcaaugaggacccugagagauaucccucugugaucugggaggcaaagugccgccacuugggcugcaucaacgcugaugggaacguggacuaccacaugaacucuguccccauccagcaagagauccugguccugcgcagggagccuccacacugccccaacuccuuccggcuggagaagauacugguguccgugggcugcaccugugucaccccgauuguccaccauguggccuaagagcucuggggagcccacacuccccaaagcaguuagacuauggagagccgacccagccccucaggaacccucauccuucaaagacagccucauuucggacuaaacucauuagaguucuuaaggcaguuuguccaauuaaagcuucagagguaacacuuggccaagauaugagaucugaauuaccuuucccucuuuccaagaaggaagguuugacugaguaccaauuugcuucuuguuuacuuuuuuaagggcuuuaaguuauuuauguauuuaauaugcccugagauaacuuugggguauaagauuccauuuuaaugaauuaccuacuuuauuuuguuugucuuuuuaaagaagauaagauucugggcuugggaauuuuauuauuuaaaagguaaaaccuguauuuauuugagcuauuuaaggaucuauuuauguuuaaguauuuagaaaaaggugaaaaagcacuauuaucaguucugccuagguaaauguaagauagaauuaaauggcagugcaaaauuucugagucuuuacaacauacggauauaguauuuccuccucuuuguuuuuaaaaguuauaacauggcugaaaagaaagauuaaaccuacuuucauauguauuaauuuaaauuuugcaauuuguugagguuuuacaagagauacagcaagucuaacucucuguuccauuaaacccuuauaauaaaauccuucuguaauaauaaaguuucaaaagaaaauguuuauuuguucucauuaaauguauuuuagcaaacucagcucuucccuauugggaagaguuaugcaaauucuccuauaagcaaaacaaagcaugucuuugaguaacaaugaccuggaaauacccaaaauuccaaguucucgauuucacaugccuucaagacugaacaccgacuaagguuuucauacuauuagccaaugcuguagacagaagcauuuugauaggaauagagcaaauaagauaauggcccugaggaauggcaugucauuauuaaagaucauauggggaaaaugaaacccuccccaaaauacaagaaguucugggaggagacauugucuucagacuacaauguccaguuucuccccuagacucaggcuuccuuuggagauuaaggccccucagagaucaacagaccaacauuuuucucuuccucaagcaacacuccuagggccuggcuucugucugaucaaggcaccacacaacccagaaaggagcugauggggcagaacgaacuuuaaguaugagaaaaguucagcccaaguaaaauaaaaacucaaucacauucaauuccagaguaguuucaaguuucacaucguaaccauuuucgccc

SEQ ID NO: 44578 - RNA, 19 nt, Artificial Sequence
  Description of Artificial Sequence: Synthetic oligonucleotide
gcaggcacaaacucaucca

SEQ ID NO: 44579 - RNA, 19 nt, Artificial Sequence
  Description of Artificial Sequence: Synthetic oligonucleotide
auccccaguugauuggaag

SEQ ID NO: 44580 - RNA, 19 nt, Artificial Sequence
  Description of Artificial Sequence: Synthetic oligonucleotide
gaaacaacgaugacuccug

SEQ ID NO: 44581 - RNA, 19 nt, Artificial Sequence
  Description of Artificial Sequence: Synthetic oligonucleotide
gggaagaccucauuggugu

SEQ ID NO: 44582 - RNA, 19 nt, Artificial Sequence
  Description of Artificial Sequence: Synthetic oligonucleotide
ucacugcuacugcugcuga

SEQ ID NO: 44583 - RNA, 19 nt, Artificial Sequence
  Description of Artificial Sequence: Synthetic oligonucleotide
agccuggaggccauaguga

SEQ ID NO: 44584 - RNA, 19 nt, Artificial Sequence
  Description of Artificial Sequence: Synthetic oligonucleotide
aaggcaggaaucacaaucc

SEQ ID NO: 44585 - RNA, 19 nt, Artificial Sequence
  Description of Artificial Sequence: Synthetic oligonucleotide
ccacgaaauccaggaugcc

SEQ ID NO: 44586 - RNA, 19 nt, Artificial Sequence
  Description of Artificial Sequence: Synthetic oligonucleotide
ccaaauucugaggacaaga

SEQ ID NO: 44587 - RNA, 19 nt, Artificial Sequence
  Description of Artificial Sequence: Synthetic oligonucleotide
aacuucccccggacuguga

SEQ ID NO: 44588 - RNA, 19 nt, Artificial Sequence
  Description of Artificial Sequence: Synthetic oligonucleotide
auggucaaccugaacaucc

SEQ ID NO: 44589 - RNA, 19 nt, Artificial Sequence
  Description of Artificial Sequence: Synthetic oligonucleotide
cauaaccggaauaccaaua

SEQ ID NO: 44590 - RNA, 19 nt, Artificial Sequence
  Description of Artificial Sequence: Synthetic oligonucleotide
accaaucccaaaagguccu

SEQ ID NO: 44591 - RNA, 19 nt, Artificial Sequence
  Description of Artificial Sequence: Synthetic oligonucleotide
ucagauuacuacaaccgau

SEQ ID NO: 44592 - RNA, 19 nt, Artificial Sequence
  Description of Artificial Sequence: Synthetic oligonucleotide
uccaccucaccuuggaauc

SEQ ID NO: 44593 - RNA, 19 nt, Artificial Sequence
  Description of Artificial Sequence: Synthetic oligonucleotide
cuccaccgcaaugaggacc

SEQ ID NO: 44594 - RNA, 19 nt, Artificial Sequence
  Description of Artificial Sequence: Synthetic oligonucleotide
ccugagagauaucccucug

SEQ ID NO: 44595 - RNA, 19 nt, Artificial Sequence
  Description of Artificial Sequence: Synthetic oligonucleotide
gugaucugggaggcaaagu

SEQ ID NO: 44596 - RNA, 19 nt, Artificial Sequence
  Description of Artificial Sequence: Synthetic oligonucleotide
ugccgccacuugggcugca

SEQ ID NO: 44597 - RNA, 19 nt, Artificial Sequence
  Description of Artificial Sequence: Synthetic oligonucleotide
aucaacgcugaugggaacg

SEQ ID NO: 44598 - RNA, 19 nt, Artificial Sequence
  Description of Artificial Sequence: Synthetic oligonucleotide
guggacuaccacaugaacu

SEQ ID NO: 44599 - RNA, 19 nt, Artificial Sequence
  Description of Artificial Sequence: Synthetic oligonucleotide
ucuguccccauccagcaag

SEQ ID NO: 44600 - RNA, 19 nt, Artificial Sequence
  Description of Artificial Sequence: Synthetic oligonucleotide
gagauccugguccugcgca

SEQ ID NO: 44601 - RNA, 19 nt, Artificial Sequence
  Description of Artificial Sequence: Synthetic oligonucleotide
agggagccuccacacugcc

SEQ ID NO: 44602 - RNA, 19 nt, Artificial Sequence
  Description of Artificial Sequence: Synthetic oligonucleotide
cccaacuccuuccggcugg

SEQ ID NO: 44603 - RNA, 19 nt, Artificial Sequence
  Description of Artificial Sequence: Synthetic oligonucleotide
gagaagauacugguguccg

SEQ ID NO: 44604 - RNA, 19 nt, Artificial Sequence
  Description of Artificial Sequence: Synthetic oligonucleotide
gugggcugcaccuguguca

SEQ ID NO: 44605 - RNA, 19 nt, Artificial Sequence
  Description of Artificial Sequence: Synthetic oligonucleotide
accccgauuguccaccaug

SEQ ID NO: 44606 - RNA, 19 nt, Artificial Sequence
  Description of Artificial Sequence: Synthetic oligonucleotide
guggccuaagagcucuggg

SEQ ID NO: 44607 - RNA, 19 nt, Artificial Sequence
  Description of Artificial Sequence: Synthetic oligonucleotide
ggagcccacacuccccaaa

SEQ ID NO: 44608 - RNA, 19 nt, Artificial Sequence
  Description of Artificial Sequence: Synthetic oligonucleotide
agcaguuagacuauggaga

SEQ ID NO: 44609 - RNA, 19 nt, Artificial Sequence
  Description of Artificial Sequence: Synthetic oligonucleotide
agccgacccagccccucag

SEQ ID NO: 44610 - RNA, 19 nt, Artificial Sequence
  Description of Artificial Sequence: Synthetic oligonucleotide
ggaacccucauccuucaaa

SEQ ID NO: 44611 - RNA, 19 nt, Artificial Sequence
  Description of Artificial Sequence: Synthetic oligonucleotide
agacagccucauuucggac

SEQ ID NO: 44612 - RNA, 19 nt, Artificial Sequence
  Description of Artificial Sequence: Synthetic oligonucleotide
cuaaacucauuagaguucu

SEQ ID NO: 44613 - RNA, 19 nt, Artificial Sequence
  Description of Artificial Sequence: Synthetic oligonucleotide
uuaaggcaguuuguccaau

SEQ ID NO: 44614 - RNA, 19 nt, Artificial Sequence
  Description of Artificial Sequence: Synthetic oligonucleotide
uuaaagcuucagagguaac

SEQ ID NO: 44615 - RNA, 19 nt, Artificial Sequence
  Description of Artificial Sequence: Synthetic oligonucleotide
cacuuggccaagauaugag

SEQ ID NO: 44616 - RNA, 19 nt, Artificial Sequence
  Description of Artificial Sequence: Synthetic oligonucleotide
gaucugaauuaccuuuccc

SEQ ID NO: 44617 - RNA, 19 nt, Artificial Sequence
  Description of Artificial Sequence: Synthetic oligonucleotide
cucuuuccaagaaggaagg

SEQ ID NO: 44618 - RNA, 19 nt, Artificial Sequence
  Description of Artificial Sequence: Synthetic oligonucleotide
guuugacugaguaccaauu

SEQ ID NO: 44619 - RNA, 19 nt, Artificial Sequence
  Description of Artificial Sequence: Synthetic oligonucleotide
uugcuucuuguuuacuuuu

SEQ ID NO: 44620 - RNA, 19 nt, Artificial Sequence
  Description of Artificial Sequence: Synthetic oligonucleotide
uuuaagggcuuuaaguuau

SEQ ID NO: 44621 - RNA, 19 nt, Artificial Sequence
  Description of Artificial Sequence: Synthetic oligonucleotide
uuuauguauuuaauaugcc

SEQ ID NO: 44622 - RNA, 19 nt, Artificial Sequence
  Description of Artificial Sequence: Synthetic oligonucleotide
ccugagauaacuuuggggu

SEQ ID NO: 44623 - RNA, 19 nt, Artificial Sequence
  Description of Artificial Sequence: Synthetic oligonucleotide
uauaagauuccauuuuaau

SEQ ID NO: 44624 - RNA, 19 nt, Artificial Sequence
  Description of Artificial Sequence: Synthetic oligonucleotide
ugaauuaccuacuuuauuu

SEQ ID NO: 44625 - RNA, 19 nt, Artificial Sequence
  Description of Artificial Sequence: Synthetic oligonucleotide
uuguuugucuuuuuaaaga

SEQ ID NO: 44626 - RNA, 19 nt, Artificial Sequence
  Description of Artificial Sequence: Synthetic oligonucleotide
aagauaagauucugggcuu

SEQ ID NO: 44627 - RNA, 19 nt, Artificial Sequence
  Description of Artificial Sequence: Synthetic oligonucleotide
ugggaauuuuauuauuuaa

SEQ ID NO: 44628 - RNA, 19 nt, Artificial Sequence
  Description of Artificial Sequence: Synthetic oligonucleotide
aaagguaaaaccuguauuu

SEQ ID NO: 44629 - RNA, 19 nt, Artificial Sequence
  Description of Artificial Sequence: Synthetic oligonucleotide
uauuugagcuauuuaagga

SEQ ID NO: 44630 - RNA, 19 nt, Artificial Sequence
  Description of Artificial Sequence: Synthetic oligonucleotide
aucuauuuauguuuaagua

SEQ ID NO: 44631 - RNA, 19 nt, Artificial Sequence
  Description of Artificial Sequence: Synthetic oligonucleotide
auuuagaaaaaggugaaaa

SEQ ID NO: 44632 - RNA, 19 nt, Artificial Sequence
  Description of Artificial Sequence: Synthetic oligonucleotide
aagcacuauuaucaguucu

SEQ ID NO: 44633 - RNA, 19 nt, Artificial Sequence
  Description of Artificial Sequence: Synthetic oligonucleotide
ugccuagguaaauguaaga

SEQ ID NO: 44634 - RNA, 19 nt, Artificial Sequence
  Description of Artificial Sequence: Synthetic oligonucleotide
auagaauuaaauggcagug

SEQ ID NO: 44635 - RNA, 19 nt, Artificial Sequence
  Description of Artificial Sequence: Synthetic oligonucleotide
gcaaaauuucugagucuuu

SEQ ID NO: 44636 - RNA, 19 nt, Artificial Sequence
  Description of Artificial Sequence: Synthetic oligonucleotide
uacaacauacggauauagu

SEQ ID NO: 44637 - RNA, 19 nt, Artificial Sequence
  Description of Artificial Sequence: Synthetic oligonucleotide
uauuuccuccucuuuguuu

SEQ ID NO: 44638 - RNA, 19 nt, Artificial Sequence
  Description of Artificial Sequence: Synthetic oligonucleotide
uuuaaaaguuauaacaugg

SEQ ID NO: 44639 - RNA, 19 nt, Artificial Sequence
  Description of Artificial Sequence: Synthetic oligonucleotide
gcugaaaagaaagauuaaa

SEQ ID NO: 44640 - RNA, 19 nt, Artificial Sequence
  Description of Artificial Sequence: Synthetic oligonucleotide
accuacuuucauauguauu

SEQ ID NO: 44641 - RNA, 19 nt, Artificial Sequence
  Description of Artificial Sequence: Synthetic oligonucleotide
uaauuuaaauuuugcaauu

SEQ ID NO: 44642 - RNA, 19 nt, Artificial Sequence
  Description of Artificial Sequence: Synthetic oligonucleotide
uuguugagguuuuacaaga

SEQ ID NO: 44643 - RNA, 19 nt, Artificial Sequence
  Description of Artificial Sequence: Synthetic oligonucleotide
agauacagcaagucuaacu

SEQ ID NO: 44644 - RNA, 19 nt, Artificial Sequence
  Description of Artificial Sequence: Synthetic oligonucleotide
ucucuguuccauuaaaccc

SEQ ID NO: 44645 - RNA, 19 nt, Artificial Sequence
  Description of Artificial Sequence: Synthetic oligonucleotide
cuuauaauaaaauccuucu

SEQ ID NO: 44646 - RNA, 19 nt, Artificial Sequence
  Description of Artificial Sequence: Synthetic oligonucleotide
uguaauaauaaaguuucaa

SEQ ID NO: 44647 - RNA, 19 nt, Artificial Sequence
  Description of Artificial Sequence: Synthetic oligonucleotide
aaagaaaauguuuauuugu

SEQ ID NO: 44648 - RNA, 19 nt, Artificial Sequence
  Description of Artificial Sequence: Synthetic oligonucleotide
uucucauuaaauguauuuu

SEQ ID NO: 44649 - RNA, 19 nt, Artificial Sequence
  Description of Artificial Sequence: Synthetic oligonucleotide
uagcaaacucagcucuucc

SEQ ID NO: 44650 - RNA, 19 nt, Artificial Sequence
  Description of Artificial Sequence: Synthetic oligonucleotide
ccuauugggaagaguuaug

SEQ ID NO: 44651 - RNA, 19 nt, Artificial Sequence
  Description of Artificial Sequence: Synthetic oligonucleotide
gcaaauucuccuauaagca

SEQ ID NO: 44652 - RNA, 19 nt, Artificial Sequence
  Description of Artificial Sequence: Synthetic oligonucleotide
aaaacaaagcaugucuuug

SEQ ID NO: 44653 - RNA, 19 nt, Artificial Sequence
  Description of Artificial Sequence: Synthetic oligonucleotide
gaguaacaaugaccuggaa

SEQ ID NO: 44654 - RNA, 19 nt, Artificial Sequence
  Description of Artificial Sequence: Synthetic oligonucleotide
aauacccaaaauuccaagu

SEQ ID NO: 44655 - RNA, 19 nt, Artificial Sequence
  Description of Artificial Sequence: Synthetic oligonucleotide
uucucgauuucacaugccu

SEQ ID NO: 44656 - RNA, 19 nt, Artificial Sequence
  Description of Artificial Sequence: Synthetic oligonucleotide
uucaagacugaacaccgac

SEQ ID NO: 44657 - RNA, 19 nt, Artificial Sequence
  Description of Artificial Sequence: Synthetic oligonucleotide
cuaagguuuucauacuauu

SEQ ID NO: 44658 - RNA, 19 nt, Artificial Sequence
  Description of Artificial Sequence: Synthetic oligonucleotide
uagccaaugcuguagacag

SEQ ID NO: 44659 - RNA, 19 nt, Artificial Sequence
  Description of Artificial Sequence: Synthetic oligonucleotide
gaagcauuuugauaggaau

SEQ ID NO: 44660 - RNA, 19 nt, Artificial Sequence
  Description of Artificial Sequence: Synthetic oligonucleotide
uagagcaaauaagauaaug

SEQ ID NO: 44661 - RNA, 19 nt, Artificial Sequence
  Description of Artificial Sequence: Synthetic oligonucleotide
ggcccugaggaauggcaug

SEQ ID NO: 44662 - RNA, 19 nt, Artificial Sequence
  Description of Artificial Sequence: Synthetic oligonucleotide
gucauuauuaaagaucaua

SEQ ID NO: 44663 - RNA, 19 nt, Artificial Sequence
  Description of Artificial Sequence: Synthetic oligonucleotide
auggggaaaaugaaacccu

SEQ ID NO: 44664 - RNA, 19 nt, Artificial Sequence
  Description of Artificial Sequence: Synthetic oligonucleotide
uccccaaaauacaagaagu

SEQ ID NO: 44665 - RNA, 19 nt, Artificial Sequence
  Description of Artificial Sequence: Synthetic oligonucleotide
uucugggaggagacauugu

SEQ ID NO: 44666 - RNA, 19 nt, Artificial Sequence
  Description of Artificial Sequence: Synthetic oligonucleotide
ucuucagacuacaaugucc

SEQ ID NO: 44667 - RNA, 19 nt, Artificial Sequence
  Description of Artificial Sequence: Synthetic oligonucleotide
caguuucuccccuagacuc

SEQ ID NO: 44668 - RNA, 19 nt, Artificial Sequence
  Description of Artificial Sequence: Synthetic oligonucleotide
caggcuuccuuuggagauu

SEQ ID NO: 44669 - RNA, 19 nt, Artificial Sequence
  Description of Artificial Sequence: Synthetic oligonucleotide
uaaggccccucagagauca

SEQ ID NO: 44670 - RNA, 19 nt, Artificial Sequence
  Description of Artificial Sequence: Synthetic oligonucleotide
aacagaccaacauuuuucu

SEQ ID NO: 44671 - RNA, 19 nt, Artificial Sequence
  Description of Artificial Sequence: Synthetic oligonucleotide
ucuuccucaagcaacacuc

SEQ ID NO: 44672 - RNA, 19 nt, Artificial Sequence
  Description of Artificial Sequence: Synthetic oligonucleotide
ccuagggccuggcuucugu

SEQ ID NO: 44673 - RNA, 19 nt, Artificial Sequence
  Description of Artificial Sequence: Synthetic oligonucleotide
ucugaucaaggcaccacac

SEQ ID NO: 44674 - RNA, 19 nt, Artificial Sequence
  Description of Artificial Sequence: Synthetic oligonucleotide
caacccagaaaggagcuga

SEQ ID NO: 44675 - RNA, 19 nt, Artificial Sequence
  Description of Artificial Sequence: Synthetic oligonucleotide
auggggcagaacgaacuuu

SEQ ID NO: 44676 - RNA, 19 nt, Artificial Sequence
  Description of Artificial Sequence: Synthetic oligonucleotide
uaaguaugagaaaaguuca

SEQ ID NO: 44677 - RNA, 19 nt, Artificial Sequence
  Description of Artificial Sequence: Synthetic oligonucleotide
agcccaaguaaaauaaaaa

SEQ ID NO: 44678 - RNA, 19 nt, Artificial Sequence
  Description of Artificial Sequence: Synthetic oligonucleotide
acucaaucacauucaauuc

SEQ ID NO: 44679 - RNA, 19 nt, Artificial Sequence
  Description of Artificial Sequence: Synthetic oligonucleotide
ccagaguaguuucaaguuu

SEQ ID NO: 44680 - RNA, 19 nt, Artificial Sequence
  Description of Artificial Sequence: Synthetic oligonucleotide
ucacaucguaaccauuuuc

SEQ ID NO: 44681 - RNA, 19 nt, Artificial Sequence
  Description of Artificial Sequence: Synthetic oligonucleotide
aucguaaccauuuucgccc

SEQ ID NO: 44682 - RNA, 25 nt, Artificial Sequence
  Description of Artificial Sequence: Synthetic oligonucleotide
gcaggcacaaacucauccaucccca

SEQ ID NO: 44683 - RNA, 25 nt, Artificial Sequence
  Description of Artificial Sequence: Synthetic oligonucleotide
aguugauuggaagaaacaacgauga

SEQ ID NO: 44684 - RNA, 25 nt, Artificial Sequence
  Description of Artificial Sequence: Synthetic oligonucleotide
acuccugggaagaccucauuggugu

SEQ ID NO: 44685 - RNA, 25 nt, Artificial Sequence
  Description of Artificial Sequence: Synthetic oligonucleotide
ucacugcuacugcugcugagccugg

SEQ ID NO: 44686 - RNA, 25 nt, Artificial Sequence
  Description of Artificial Sequence: Synthetic oligonucleotide
gaggccauagugaaggcaggaauca

SEQ ID NO: 44687 - RNA, 25 nt, Artificial Sequence
  Description of Artificial Sequence: Synthetic oligonucleotide
acaaucccacgaaauccaggaugcc

SEQ ID NO: 44688 - RNA, 25 nt, Artificial Sequence
  Description of Artificial Sequence: Synthetic oligonucleotide
ccaaauucugaggacaagaacuucc

SEQ ID NO: 44689 - RNA, 25 nt, Artificial Sequence
  Description of Artificial Sequence: Synthetic oligonucleotide
ccccggacugugauggucaaccuga

SEQ ID NO: 44690 - RNA, 25 nt, Artificial Sequence
  Description of Artificial Sequence: Synthetic oligonucleotide
aacauccauaaccggaauaccaaua

SEQ ID NO: 44691 - RNA, 25 nt, Artificial Sequence
  Description of Artificial Sequence: Synthetic oligonucleotide
accaaucccaaaagguccucagauu

SEQ ID NO: 44692 - RNA, 25 nt, Artificial Sequence
  Description of Artificial Sequence: Synthetic oligonucleotide
uacuacaaccgauccaccucaccuu

SEQ ID NO: 44693 - RNA, 25 nt, Artificial Sequence
  Description of Artificial Sequence: Synthetic oligonucleotide
uggaaucuccaccgcaaugaggacc

SEQ ID NO: 44694 - RNA, 25 nt, Artificial Sequence
  Description of Artificial Sequence: Synthetic oligonucleotide
ccugagagauaucccucugugaucu

SEQ ID NO: 44695 - RNA, 25 nt, Artificial Sequence
  Description of Artificial Sequence: Synthetic oligonucleotide
ugggaggcaaagugccgccacuugg

SEQ ID NO: 44696 - RNA, 25 nt, Artificial Sequence
  Description of Artificial Sequence: Synthetic oligonucleotide
ggcugcaucaacgcugaugggaacg

SEQ ID NO: 44697 - RNA, 25 nt, Artificial Sequence
  Description of Artificial Sequence: Synthetic oligonucleotide
guggacuaccacaugaacucugucc

SEQ ID NO: 44698 - RNA, 25 nt, Artificial Sequence
  Description of Artificial Sequence: Synthetic oligonucleotide
cccauccagcaagagauccuggucc

SEQ ID NO: 44699 - RNA, 25 nt, Artificial Sequence
  Description of Artificial Sequence: Synthetic oligonucleotide
cugcgcagggagccuccacacugcc

SEQ ID NO: 44700 - RNA, 25 nt, Artificial Sequence
  Description of Artificial Sequence: Synthetic oligonucleotide
cccaacuccuuccggcuggagaaga

SEQ ID NO: 44701 - RNA, 25 nt, Artificial Sequence
  Description of Artificial Sequence: Synthetic oligonucleotide
auacugguguccgugggcugcaccu

SEQ ID NO: 44702 - RNA, 25 nt, Artificial Sequence
  Description of Artificial Sequence: Synthetic oligonucleotide
ugugucaccccgauuguccaccaug

SEQ ID NO: 44703 - RNA, 25 nt, Artificial Sequence
  Description of Artificial Sequence: Synthetic oligonucleotide
guggccuaagagcucuggggagccc

SEQ ID NO: 44704 - RNA, 25 nt, Artificial Sequence
  Description of Artificial Sequence: Synthetic oligonucleotide
cacacuccccaaagcaguuagacua

SEQ ID NO: 44705 - RNA, 25 nt, Artificial Sequence
  Description of Artificial Sequence: Synthetic oligonucleotide
auggagagccgacccagccccucag

SEQ ID NO: 44706 - RNA, 25 nt, Artificial Sequence
  Description of Artificial Sequence: Synthetic oligonucleotide
ggaacccucauccuucaaagacagc

SEQ ID NO: 44707 - RNA, 25 nt, Artificial Sequence
  Description of Artificial Sequence: Synthetic oligonucleotide
ccucauuucggacuaaacucauuag

SEQ ID NO: 44708 - RNA, 25 nt, Artificial Sequence
  Description of Artificial Sequence: Synthetic oligonucleotide
gaguucuuaaggcaguuuguccaau

SEQ ID NO: 44709 - RNA, 25 nt, Artificial Sequence
  Description of Artificial Sequence: Synthetic oligonucleotide
uuaaagcuucagagguaacacuugg

SEQ ID NO: 44710 - RNA, 25 nt, Artificial Sequence
  Description of Artificial Sequence: Synthetic oligonucleotide
gccaagauaugagaucugaauuacc

SEQ ID NO: 44711 - RNA, 25 nt, Artificial Sequence
  Description of Artificial Sequence: Synthetic oligonucleotide
cuuucccucuuuccaagaaggaagg

SEQ ID NO: 44712 - RNA, 25 nt, Artificial Sequence
  Description of Artificial Sequence: Synthetic oligonucleotide
guuugacugaguaccaauuugcuuc

SEQ ID NO: 44713 - RNA, 25 nt, Artificial Sequence
  Description of Artificial Sequence: Synthetic oligonucleotide
cuuguuuacuuuuuuaagggcuuua

SEQ ID NO: 44714 - RNA, 25 nt, Artificial Sequence
  Description of Artificial Sequence: Synthetic oligonucleotide
aaguuauuuauguauuuaauaugcc

SEQ ID NO: 44715 - RNA, 25 nt, Artificial Sequence
  Description of Artificial Sequence: Synthetic oligonucleotide
ccugagauaacuuugggguauaaga

SEQ ID NO: 44716 - RNA, 25 nt, Artificial Sequence
  Description of Artificial Sequence: Synthetic oligonucleotide
auuccauuuuaaugaauuaccuacu

SEQ ID NO: 44717 - RNA, 25 nt, Artificial Sequence
  Description of Artificial Sequence: Synthetic oligonucleotide
uuuauuuuguuugucuuuuuaaaga

SEQ ID NO: 44718 - RNA, 25 nt, Artificial Sequence
  Description of Artificial Sequence: Synthetic oligonucleotide
aagauaagauucugggcuugggaau

SEQ ID NO: 44719 - RNA, 25 nt, Artificial Sequence
  Description of Artificial Sequence: Synthetic oligonucleotide
uuuuauuauuuaaaagguaaaaccu

SEQ ID NO: 44720 - RNA, 25 nt, Artificial Sequence
  Description of Artificial Sequence: Synthetic oligonucleotide
uguauuuauuugagcuauuuaagga

SEQ ID NO: 44721 - RNA, 25 nt, Artificial Sequence
  Description of Artificial Sequence: Synthetic oligonucleotide
aucuauuuauguuuaaguauuuaga

SEQ ID NO: 44722 - RNA, 25 nt, Artificial Sequence
  Description of Artificial Sequence: Synthetic oligonucleotide
aaaaaggugaaaaagcacuauuauc

SEQ ID NO: 44723 - RNA, 25 nt, Artificial Sequence
  Description of Artificial Sequence: Synthetic oligonucleotide
caguucugccuagguaaauguaaga

SEQ ID NO: 44724 - RNA, 25 nt, Artificial Sequence
  Description of Artificial Sequence: Synthetic oligonucleotide
auagaauuaaauggcagugcaaaau

SEQ ID NO: 44725 - RNA, 25 nt, Artificial Sequence
  Description of Artificial Sequence: Synthetic oligonucleotide
uuucugagucuuuacaacauacgga

SEQ ID NO: 44726 - RNA, 25 nt, Artificial Sequence
  Description of Artificial Sequence: Synthetic oligonucleotide
auauaguauuuccuccucuuuguuu

SEQ ID NO: 44727 - RNA, 25 nt, Artificial Sequence
  Description of Artificial Sequence: Synthetic oligonucleotide
uuuaaaaguuauaacauggcugaaa

SEQ ID NO: 44728 - RNA, 25 nt, Artificial Sequence
  Description of Artificial Sequence: Synthetic oligonucleotide
aagaaagauuaaaccuacuuucaua

SEQ ID NO: 44729 - RNA, 25 nt, Artificial Sequence
  Description of Artificial Sequence: Synthetic oligonucleotide
auguauuaauuuaaauuuugcaauu

SEQ ID NO: 44730 - RNA, 25 nt, Artificial Sequence
  Description of Artificial Sequence: Synthetic oligonucleotide
uuguugagguuuuacaagagauaca

SEQ ID NO: 44731 - RNA, 25 nt, Artificial Sequence
  Description of Artificial Sequence: Synthetic oligonucleotide
agcaagucuaacucucuguuccauu

SEQ ID NO: 44732 - RNA, 25 nt, Artificial Sequence
  Description of Artificial Sequence: Synthetic oligonucleotide
uguaauaauaaaguuucaaaagaaa

SEQ ID NO: 44733 - RNA, 25 nt, Artificial Sequence
  Description of Artificial Sequence: Synthetic oligonucleotide
aauguuuauuuguucucauuaaaug

SEQ ID NO: 44734 - RNA, 25 nt, Artificial Sequence
  Description of Artificial Sequence: Synthetic oligonucleotide
guauuuuagcaaacucagcucuucc

SEQ ID NO: 44735 - RNA, 25 nt, Artificial Sequence
  Description of Artificial Sequence: Synthetic oligonucleotide
ccuauugggaagaguuaugcaaauu

SEQ ID NO: 44736 - RNA, 25 nt, Artificial Sequence
  Description of Artificial Sequence: Synthetic oligonucleotide
ucuccuauaagcaaaacaaagcaug

SEQ ID NO: 44737 - RNA, 25 nt, Artificial Sequence
  Description of Artificial Sequence: Synthetic oligonucleotide
gucuuugaguaacaaugaccuggaa

SEQ ID NO: 44738 - RNA, 25 nt, Artificial Sequence
  Description of Artificial Sequence: Synthetic oligonucleotide
aauacccaaaauuccaaguucucga

SEQ ID NO: 44739 - RNA, 25 nt, Artificial Sequence
  Description of Artificial Sequence: Synthetic oligonucleotide
auuucacaugccuucaagacugaac

SEQ ID NO: 44740 - RNA, 25 nt, Artificial Sequence
  Description of Artificial Sequence: Synthetic oligonucleotide
caccgacuaagguuuucauacuauu

SEQ ID NO: 44741 - RNA, 25 nt, Artificial Sequence
  Description of Artificial Sequence: Synthetic oligonucleotide
uagccaaugcuguagacagaagcau

SEQ ID NO: 44742 - RNA, 25 nt, Artificial Sequence
  Description of Artificial Sequence: Synthetic oligonucleotide
uuuugauaggaauagagcaaauaag

SEQ ID NO: 44743 - RNA, 25 nt, Artificial Sequence
  Description of Artificial Sequence: Synthetic oligonucleotide
gauaauggcccugaggaauggcaug

SEQ ID NO: 44744 - RNA, 25 nt, Artificial Sequence
  Description of Artificial Sequence: Synthetic oligonucleotide
gucauuauuaaagaucauaugggga

SEQ ID NO: 44745 - RNA, 25 nt, Artificial Sequence
  Description of Artificial Sequence: Synthetic oligonucleotide
aaaaugaaacccuccccaaaauaca

SEQ ID NO: 44746 - RNA, 25 nt, Artificial Sequence
  Description of Artificial Sequence: Synthetic oligonucleotide
aagaaguucugggaggagacauugu

SEQ ID NO: 44747 - RNA, 25 nt, Artificial Sequence
  Description of Artificial Sequence: Synthetic oligonucleotide
ucuucagacuacaauguccaguuuc

SEQ ID NO: 44748 - RNA, 25 nt, Artificial Sequence
  Description of Artificial Sequence: Synthetic oligonucleotide
cuccccuagacucaggcuuccuuug

SEQ ID NO: 44749 - RNA, 25 nt, Artificial Sequence
  Description of Artificial Sequence: Synthetic oligonucleotide
ggagauuaaggccccucagagauca

SEQ ID NO: 44750 - RNA, 25 nt, Artificial Sequence
  Description of Artificial Sequence: Synthetic oligonucleotide
aacagaccaacauuuuucucuuccu

SEQ ID NO: 44751 - RNA, 25 nt, Artificial Sequence
  Description of Artificial Sequence: Synthetic oligonucleotide
ucaagcaacacuccuagggccuggc

SEQ ID NO: 44752 - RNA, 25 nt, Artificial Sequence
  Description of Artificial Sequence: Synthetic oligonucleotide
cuucugucugaucaaggcaccacac

SEQ ID NO: 44753 - RNA, 25 nt, Artificial Sequence
  Description of Artificial Sequence: Synthetic oligonucleotide
caacccagaaaggagcugauggggc

SEQ ID NO: 44754 - RNA, 25 nt, Artificial Sequence
  Description of Artificial Sequence: Synthetic oligonucleotide
cagaacgaacuuuaaguaugagaaa

SEQ ID NO: 44755 - RNA, 25 nt, Artificial Sequence
  Description of Artificial Sequence: Synthetic oligonucleotide
aaguucagcccaaguaaaauaaaaa

SEQ ID NO: 44756 - RNA, 25 nt, Artificial Sequence
  Description of Artificial Sequence: Synthetic oligonucleotide
acucaaucacauucaauuccagagu

SEQ ID NO: 44757 - RNA, 25 nt, Artificial Sequence
  Description of Artificial Sequence: Synthetic oligonucleotide
uaguuucaaguuucacaucguaacc

SEQ ID NO: 44758 - RNA, 25 nt, Artificial Sequence
  Description of Artificial Sequence: Synthetic oligonucleotide
uuucacaucguaaccauuuucgccc

SEQ ID NO: 44759 - DNA, 21 bp, Artificial Sequence
  Description of Artificial Sequence: Synthetic oligonucleotide
  Description of Combined DNA/RNA Molecule: Synthetic oligonucleotide
cuacacaaaucagcgauuutt

SEQ ID NO: 44760 - DNA, 21 bp, Artificial Sequence
  Description of Artificial Sequence: Synthetic oligonucleotide
  Description of Combined DNA/RNA Molecule: Synthetic oligonucleotide
aaaucgcugauuuguguagtt

SEQ ID NO: 44761 - DNA, 25 bp, Artificial Sequence
  Description of Artificial Sequence: Synthetic oligonucleotide
  Description of Combined DNA/RNA Molecule: Synthetic oligonucleotide
cuacacaaaucagcgauuuccaugt

SEQ ID NO: 44762 - RNA, 27 nt, Artificial Sequence
  Description of Artificial Sequence: Synthetic oligonucleotide
acauggaaaucgcugauuuguguaguc

SEQ ID NO: 44763 - RNA, 13 nt, Artificial Sequence
  Description of Artificial Sequence: Synthetic oligonucleotide
cuacacaaaucag

SEQ ID NO: 44764 - DNA, 11 bp, Artificial Sequence
  Description of Artificial Sequence: Synthetic oligonucleotide
  Description of Combined DNA/RNA Molecule: Synthetic oligonucleotide
gauuuccaugt

SEQ ID NO: 44765 - DNA, 21 bp, Artificial Sequence
  Description of Artificial Sequence: Synthetic oligonucleotide
  Description of Combined DNA/RNA Molecule: Synthetic oligonucleotide
ggaucuuauuucuucggagtt

SEQ ID NO: 44766 - DNA, 21 bp, Artificial Sequence
  Description of Artificial Sequence: Synthetic oligonucleotide
  Description of Combined DNA/RNA Molecule: Synthetic oligonucleotide
cuccgaagaaauaagaucctt

SEQ ID NO: 44767 - RNA, 11 nt, Artificial Sequence
  Description of Artificial Sequence: Synthetic oligonucleotide
ggaucuuauuu

SEQ ID NO: 44768 - DNA, 10 bp, Artificial Sequence
  Description of Artificial Sequence: Synthetic oligonucleotide
  Description of Combined DNA/RNA Molecule: Synthetic oligonucleotide
cuucggagtt

SEQ ID NO: 44769 - RNA, 27 nt, Artificial Sequence
  Description of Artificial Sequence: Synthetic oligonucleotide
cauugucuccgaagaaauaagauccuu

SEQ ID NO: 44770 - RNA, 8 nt, Artificial Sequence
  Description of Artificial Sequence: Synthetic oligonucleotide
  modified_base (2): LNA-G
ggaucuua

SEQ ID NO: 44771 - DNA, 17 bp, Artificial Sequence
  Description of Artificial Sequence: Synthetic oligonucleotide
  Description of Combined DNA/RNA Molecule: Synthetic oligonucleotide
uuucuucggagacaatg

SEQ ID NO: 44772 - DNA, 16 bp, Artificial Sequence
  Description of Artificial Sequence: Synthetic oligonucleotide
  Description of Combined DNA/RNA Molecule: Synthetic oligonucleotide
uucuucggagacaatg

SEQ ID NO: 44773 - DNA, 15 bp, Artificial Sequence
  Description of Artificial Sequence: Synthetic oligonucleotide
  Description of Combined DNA/RNA Molecule: Synthetic oligonucleotide
ucuucggagacaatg

SEQ ID NO: 44774 - DNA, 14 bp, Artificial Sequence
  Description of Artificial Sequence: Synthetic oligonucleotide
  Description of Combined DNA/RNA Molecule: Synthetic oligonucleotide
cuucggagacaatg

SEQ ID NO: 44775 - DNA, 13 bp, Artificial Sequence
  Description of Artificial Sequence: Synthetic oligonucleotide
  Description of Combined DNA/RNA Molecule: Synthetic oligonucleotide
uucggagacaatg

SEQ ID NO: 44776 - DNA, 12 bp, Artificial Sequence
  Description of Artificial Sequence: Synthetic oligonucleotide
  Description of Combined DNA/RNA Molecule: Synthetic oligonucleotide
ucggagacaatg

SEQ ID NO: 44777 - DNA, 11 bp, Artificial Sequence
  Description of Artificial Sequence: Synthetic oligonucleotide
  Description of Combined DNA/RNA Molecule: Synthetic oligonucleotide
cggagacaatg

SEQ ID NO: 44778 - RNA, 9 nt, Artificial Sequence
  Description of Artificial Sequence: Synthetic oligonucleotide
  modified_base (2): LNA-G
ggaucuuau

SEQ ID NO: 44779 - RNA, 10 nt, Artificial Sequence
  Description of Artificial Sequence: Synthetic oligonucleotide
  modified_base (2): LNA-G
ggaucuuauu

SEQ ID NO: 44780 - RNA, 11 nt, Artificial Sequence
  Description of Artificial Sequence: Synthetic oligonucleotide
  modified_base (2): LNA-G
ggaucuuauuu

SEQ ID NO: 44781 - RNA, 12 nt, Artificial Sequence
  Description of Artificial Sequence: Synthetic oligonucleotide
  modified_base (2): LNA-G
ggaucuuauuuc

SEQ ID NO: 44782 - RNA, 8 nt, Artificial Sequence
  Description of Artificial Sequence: Synthetic oligonucleotide
  modified_base (3): LNA-A
cuacacaa

SEQ ID NO: 44783 - DNA, 13 bp, Artificial Sequence
  Description of Artificial Sequence: Synthetic oligonucleotide
  Description of Combined DNA/RNA Molecule: Synthetic oligonucleotide
  modified_base (8): LNA-A
aucagcgauuutt

SEQ ID NO: 44784 - DNA, 12 bp, Artificial Sequence
  Description of Artificial Sequence: Synthetic oligonucleotide
  Description of Combined DNA/RNA Molecule: Synthetic oligonucleotide
  modified_base (7): LNA-A
ucagcgauuutt

SEQ ID NO: 44785 - DNA, 11 bp, Artificial Sequence
  Description of Artificial Sequence: Synthetic oligonucleotide
  Description of Combined DNA/RNA Molecule: Synthetic oligonucleotide
  modified_base (6): LNA-A
cagcgauuutt

SEQ ID NO: 44786 - DNA, 10 bp, Artificial Sequence
  Description of Artificial Sequence: Synthetic oligonucleotide
  Description of Combined DNA/RNA Molecule: Synthetic oligonucleotide
  modified_base (5): LNA-A
agcgauuutt

SEQ ID NO: 44787 - DNA, 9 bp, Artificial Sequence
  Description of Artificial Sequence: Synthetic oligonucleotide
  Description of Combined DNA/RNA Molecule: Synthetic oligonucleotide
  modified_base (4): LNA-A
gcgauuutt

SEQ ID NO: 44788 - DNA, 8 bp, Artificial Sequence
  Description of Artificial Sequence: Synthetic oligonucleotide
  Description of Combined DNA/RNA Molecule: Synthetic oligonucleotide
  modified_base (3): LNA-A
cgauuutt

SEQ ID NO: 44789 - DNA, 7 bp, Artificial Sequence
  Description of Artificial Sequence: Synthetic oligonucleotide
  Description of Combined DNA/RNA Molecule: Synthetic oligonucleotide
  modified_base (2): LNA-A
gauuutt

SEQ ID NO: 44790 - RNA, 9 nt, Artificial Sequence
  Description of Artificial Sequence: Synthetic oligonucleotide
  modified_base (3): LNA-A
cuacacaaa

SEQ ID NO: 44791 - RNA, 10 nt, Artificial Sequence
  Description of Artificial Sequence: Synthetic oligonucleotide
  modified_base (3): LNA-A
cuacacaaau

SEQ ID NO: 44792 - RNA, 11 nt, Artificial Sequence
  Description of Artificial Sequence: Synthetic oligonucleotide
  modified_base (3): LNA-A
cuacacaaauc

SEQ ID NO: 44793 - RNA, 12 nt, Artificial Sequence
  Description of Artificial Sequence: Synthetic oligonucleotide
  modified_base (3): LNA-A
cuacacaaauca

SEQ ID NO: 44794 - RNA, 13 nt, Artificial Sequence
  Description of Artificial Sequence: Synthetic oligonucleotide
  modified_base (3): LNA-A
cuacacaaaucag

SEQ ID NO: 44795 - RNA, 14 nt, Artificial Sequence
  Description of Artificial Sequence: Synthetic oligonucleotide
  modified_base (3): LNA-A
cuacacaaaucagc

SEQ ID NO: 44796 - RNA, 13 nt, Artificial Sequence
  Description of Artificial Sequence: Synthetic oligonucleotide
  modified_base (2): LNA-G
ggaucuuauuucu

SEQ ID NO: 44797 - RNA, 14 nt, Artificial Sequence
  Description of Artificial Sequence: Synthetic oligonucleotide
  modified_base (2): LNA-G
ggaucuuauuucuu

SEQ ID NO: 44798 - RNA, 8 nt, Artificial Sequence
  Description of Artificial Sequence: Synthetic oligonucleotide
  modified_base (2): LNA-G
  modified_base (8): LNA-A
ggaucuua

SEQ ID NO: 44799 - RNA, 9 nt, Artificial Sequence
  Description of Artificial Sequence: Synthetic oligonucleotide
  modified_base (2): LNA-G
  modified_base (9): LNA-U
ggaucuuau

SEQ ID NO: 44800 - RNA, 10 nt, Artificial Sequence
  Description of Artificial Sequence: Synthetic oligonucleotide
  modified_base (2): LNA-G
  modified_base (10): LNA-U
ggaucuuauu

SEQ ID NO: 44801 - RNA, 11 nt, Artificial Sequence
  Description of Artificial Sequence: Synthetic oligonucleotide
  modified_base (2): LNA-G
  modified_base (11): LNA-U
ggaucuuauuu

SEQ ID NO: 44802 - RNA, 12 nt, Artificial Sequence
  Description of Artificial Sequence: Synthetic oligonucleotide
  modified_base (2): LNA-G
  modified_base (12): LNA-C
ggaucuuauuuc

SEQ ID NO: 44803 - RNA, 13 nt, Artificial Sequence
  Description of Artificial Sequence: Synthetic oligonucleotide
  modified_base (2): LNA-G
  modified_base (13): LNA-U
ggaucuuauuucu

SEQ ID NO: 44804 - RNA, 14 nt, Artificial Sequence
  Description of Artificial Sequence: Synthetic oligonucleotide
  modified_base (2): LNA-G
  modified_base (14): LNA-U
ggaucuuauuucuu

SEQ ID NO: 44805 - DNA, 13 bp, Artificial Sequence
  Description of Artificial Sequence: Synthetic oligonucleotide
  Description of Combined DNA/RNA Molecule: Synthetic oligonucleotide
  modified_base (8): LNA-G
uuucuucggagtt

SEQ ID NO: 44806 - DNA, 12 bp, Artificial Sequence
  Description of Artificial Sequence: Synthetic oligonucleotide
  Description of Combined DNA/RNA Molecule: Synthetic oligonucleotide
  modified_base (7): LNA-G
uucuucggagtt

SEQ ID NO: 44807 - DNA, 11 bp, Artificial Sequence
  Description of Artificial Sequence: Synthetic oligonucleotide
  Description of Combined DNA/RNA Molecule: Synthetic oligonucleotide
  modified_base (6): LNA-G
ucuucggagtt

SEQ ID NO: 44808 - DNA, 10 bp, Artificial Sequence
  Description of Artificial Sequence: Synthetic oligonucleotide
  Description of Combined DNA/RNA Molecule: Synthetic oligonucleotide
  modified_base (5): LNA-G
cuucggagtt

SEQ ID NO: 44809 - DNA, 9 bp, Artificial Sequence
  Description of Artificial Sequence: Synthetic oligonucleotide
  Description of Combined DNA/RNA Molecule: Synthetic oligonucleotide
  modified_base (4): LNA-G
uucggagtt

SEQ ID NO: 44810 - DNA, 8 bp, Artificial Sequence
  Description of Artificial Sequence: Synthetic oligonucleotide
  Description of Combined DNA/RNA Molecule: Synthetic oligonucleotide
  modified_base (3): LNA-G
ucggagtt

SEQ ID NO: 44811 - DNA, 7 bp, Artificial Sequence
  Description of Artificial Sequence: Synthetic oligonucleotide
  Description of Combined DNA/RNA Molecule: Synthetic oligonucleotide
  modified_base (2): LNA-G
cggagtt

SEQ ID NO: 44812 - DNA, 13 bp, Artificial Sequence
  Description of Artificial Sequence: Synthetic oligonucleotide
  Description of Combined DNA/RNA Molecule: Synthetic oligonucleotide
  modified_base (1): LNA-U
  modified_base (8): LNA-G
uuucuucggagtt

SEQ ID NO: 44813 - DNA, 12 bp, Artificial Sequence
  Description of Artificial Sequence: Synthetic oligonucleotide
  Description of Combined DNA/RNA Molecule: Synthetic oligonucleotide
  modified_base (1): LNA-U
  modified_base (7): LNA-G
uucuucggagtt

SEQ ID NO: 44814 - DNA, 11 bp, Artificial Sequence
  Description of Artificial Sequence: Synthetic oligonucleotide
  Description of Combined DNA/RNA Molecule: Synthetic oligonucleotide
  modified_base (1): LNA-U
  modified_base (6): LNA-G
ucuucggagtt

SEQ ID NO: 44815 - DNA, 10 bp, Artificial Sequence
  Description of Artificial Sequence: Synthetic oligonucleotide
  Description of Combined DNA/RNA Molecule: Synthetic oligonucleotide
  modified_base (1): LNA-C
  modified_base (5): LNA-G
cuucggagtt

SEQ ID NO: 44816 - DNA, 9 bp, Artificial Sequence
  Description of Artificial Sequence: Synthetic oligonucleotide
  Description of Combined DNA/RNA Molecule: Synthetic oligonucleotide
  modified_base (1): LNA-U
  modified_base (4): LNA-G
uucggagtt

SEQ ID NO: 44817 - DNA, 8 bp, Artificial Sequence
  Description of Artificial Sequence: Synthetic oligonucleotide
  Description of Combined DNA/RNA Molecule: Synthetic oligonucleotide
  modified_base (1): LNA-U
  modified_base (3): LNA-G
ucggagtt

SEQ ID NO: 44818 - DNA, 7 bp, Artificial Sequence
  Description of Artificial Sequence: Synthetic oligonucleotide
  Description of Combined DNA/RNA Molecule: Synthetic oligonucleotide
  modified_base (1): LNA-C
  modified_base (2): LNA-G
cggagtt

SEQ ID NO: 44819 - DNA, 21 bp, Artificial Sequence
  Description of Artificial Sequence: Synthetic oligonucleotide
  Description of Combined DNA/RNA Molecule: Synthetic oligonucleotide
  modified_base (2): LNA-G
  modified_base (16): LNA-G
ggaucuuauuucuucggagtt

SEQ ID NO: 44820 - DNA, 25 bp, Artificial Sequence
  Description of Artificial Sequence: Synthetic oligonucleotide
  Description of Combined DNA/RNA Molecule: Synthetic oligonucleotide
ggaucuuauuucuucggagacaatg

SEQ ID NO: 44821 - RNA, 25 nt, Artificial Sequence
  Description of Artificial Sequence: Synthetic oligonucleotide
guauuuugaugaggaguucacggcc

SEQ ID NO: 44822 - RNA, 25 nt, Artificial Sequence
  Description of Artificial Sequence: Synthetic oligonucleotide
ggcccagaugaucaccaucacacca

SEQ ID NO: 44823 - RNA, 25 nt, Artificial Sequence
  Description of Artificial Sequence: Synthetic oligonucleotide
gggaagaaaacuauccugcggguuu

SEQ ID NO: 44824 - RNA, 25 nt, Artificial Sequence
  Description of Artificial Sequence: Synthetic oligonucleotide
guuuuaauuuauuucauccaguuug

SEQ ID NO: 44825 - RNA, 25 nt, Artificial Sequence
  Description of Artificial Sequence: Synthetic oligonucleotide
acguagggaaauguuaaggacuucu

SEQ ID NO: 44826 - RNA, 25 nt, Artificial Sequence
  Description of Artificial Sequence: Synthetic oligonucleotide
ccaggguuuacccagugggacagag

SEQ ID NO: 44827 - RNA, 25 nt, Artificial Sequence
  Description of Artificial Sequence: Synthetic oligonucleotide
agcaagguuuaaauuuguuauugug

SEQ ID NO: 44828 - RNA, 25 nt, Artificial Sequence
  Description of Artificial Sequence: Synthetic oligonucleotide
uguauuauguuguucaaaugcauuu

SEQ ID NO: 44829 - RNA, 25 nt, Artificial Sequence
  Description of Artificial Sequence: Synthetic oligonucleotide
uuuuaaucuuugugacaggaaagcc

SEQ ID NO: 44830 - RNA, 25 nt, Artificial Sequence
  Description of Artificial Sequence: Synthetic oligonucleotide
uuaaucuuugugacaggaaagcccu

SEQ ID NO: 44831 - RNA, 25 nt, Artificial Sequence
  Description of Artificial Sequence: Synthetic oligonucleotide
gcugcuuaugucucccagcauggcc

SEQ ID NO: 44832 - RNA, 25 nt, Artificial Sequence
  Description of Artificial Sequence: Synthetic oligonucleotide
aaguguuucagaagcuucucccuga

SEQ ID NO: 44833 - RNA, 25 nt, Artificial Sequence
  Description of Artificial Sequence: Synthetic oligonucleotide
gaccaucaauaaggaagaagcccuu

SEQ ID NO: 44834 - RNA, 25 nt, Artificial Sequence
  Description of Artificial Sequence: Synthetic oligonucleotide
ccaucaauaaggaagaagcccuuca

SEQ ID NO: 44835 - RNA, 25 nt, Artificial Sequence
  Description of Artificial Sequence: Synthetic oligonucleotide
ucaauaaggaagaagcccuucagcg

SEQ ID NO: 44836 - RNA, 25 nt, Artificial Sequence
  Description of Artificial Sequence: Synthetic oligonucleotide
aauaaggaagaagcccuucagcggc

SEQ ID NO: 44837 - RNA, 25 nt, Artificial Sequence
  Description of Artificial Sequence: Synthetic oligonucleotide
aggaagaagcccuucagcggccagu

SEQ ID NO: 44838 - RNA, 25 nt, Artificial Sequence
  Description of Artificial Sequence: Synthetic oligonucleotide
gcauaacuaaaggugaaaagcuccg

SEQ ID NO: 44839 - RNA, 25 nt, Artificial Sequence
  Description of Artificial Sequence: Synthetic oligonucleotide
cauaacuaaaggugaaaagcuccgg

SEQ ID NO: 44840 - RNA, 25 nt, Artificial Sequence
  Description of Artificial Sequence: Synthetic oligonucleotide
cuacaucacgccagucaacagucug

SEQ ID NO: 44841 - RNA, 25 nt, Artificial Sequence
  Description of Artificial Sequence: Synthetic oligonucleotide
acuggauuuaagcagaguucaaaag

SEQ ID NO: 44842 - RNA, 25 nt, Artificial Sequence
  Description of Artificial Sequence: Synthetic oligonucleotide
cuggauuuaagcagaguucaaaagc

SEQ ID NO: 44843 - RNA, 25 nt, Artificial Sequence
  Description of Artificial Sequence: Synthetic oligonucleotide
gauuuaagcagaguucaaaagcccu

SEQ ID NO: 44844 - RNA, 25 nt, Artificial Sequence
  Description of Artificial Sequence: Synthetic oligonucleotide
auuuaagcagaguucaaaagcccuu

SEQ ID NO: 44845 - RNA, 25 nt, Artificial Sequence
  Description of Artificial Sequence: Synthetic oligonucleotide
uuaagcagaguucaaaagcccuuca

SEQ ID NO: 44846 - RNA, 25 nt, Artificial Sequence
  Description of Artificial Sequence: Synthetic oligonucleotide
uaagcagaguucaaaagcccuucag

SEQ ID NO: 44847 - RNA, 25 nt, Artificial Sequence
  Description of Artificial Sequence: Synthetic oligonucleotide
agcagaguucaaaagcccuucagcg

SEQ ID NO: 44848 - RNA, 25 nt, Artificial Sequence
  Description of Artificial Sequence: Synthetic oligonucleotide
cucagggucugagugaagccgcucg

SEQ ID NO: 44849 - RNA, 25 nt, Artificial Sequence
  Description of Artificial Sequence: Synthetic oligonucleotide
caagcaacuacaucacgccagucaa

SEQ ID NO: 44850 - RNA, 25 nt, Artificial Sequence
  Description of Artificial Sequence: Synthetic oligonucleotide
aucaauggcagcuucuuggugcgug

SEQ ID NO: 44851 - RNA, 25 nt, Artificial Sequence
  Description of Artificial Sequence: Synthetic oligonucleotide
uuccagcccacauuggauucaucag

SEQ ID NO: 44852 - RNA, 25 nt, Artificial Sequence
  Description of Artificial Sequence: Synthetic oligonucleotide
cagcugagaauguggaauaccuaag

SEQ ID NO: 44853 - RNA, 25 nt, Artificial Sequence
  Description of Artificial Sequence: Synthetic oligonucleotide
aacguaucuccuaauuugaggcuca

SEQ ID NO: 44854 - RNA, 25 nt, Artificial Sequence
  Description of Artificial Sequence: Synthetic oligonucleotide
ccuaaaauaauuucucuacaauugg

SEQ ID NO: 44855 - RNA, 25 nt, Artificial Sequence
  Description of Artificial Sequence: Synthetic oligonucleotide
uggaagauucagcuaguuaggagcc

SEQ ID NO: 44856 - RNA, 25 nt, Artificial Sequence
  Description of Artificial Sequence: Synthetic oligonucleotide
uuaaacucuccuagucaauauccac

SEQ ID NO: 44857 - RNA, 25 nt, Artificial Sequence
  Description of Artificial Sequence: Synthetic oligonucleotide
cagccuacaguuauguucagucaca

SEQ ID NO: 44858 - RNA, 25 nt, Artificial Sequence
  Description of Artificial Sequence: Synthetic oligonucleotide
guuauguucagucacacacacauac

SEQ ID NO: 44859 - RNA, 25 nt, Artificial Sequence
  Description of Artificial Sequence: Synthetic oligonucleotide
cacauacaaaauguuccuuuugcuu

SEQ ID NO: 44860 - RNA, 25 nt, Artificial Sequence
  Description of Artificial Sequence: Synthetic oligonucleotide
uccuuuugcuuuuaaaguaauuuuu

SEQ ID NO: 44861 - RNA, 25 nt, Artificial Sequence
  Description of Artificial Sequence: Synthetic oligonucleotide
ugaccugugaagcaacagucaaugg

SEQ ID NO: 44862 - RNA, 25 nt, Artificial Sequence
  Description of Artificial Sequence: Synthetic oligonucleotide
cuaucucacacaucgacaaaccaau

SEQ ID NO: 44863 - RNA, 25 nt, Artificial Sequence
  Description of Artificial Sequence: Synthetic oligonucleotide
uguccucaauuguacugcuaccacu

SEQ ID NO: 44864 - RNA, 25 nt, Artificial Sequence
  Description of Artificial Sequence: Synthetic oligonucleotide
aaaccguagcuggcaagcggucuua

SEQ ID NO: 44865 - RNA, 25 nt, Artificial Sequence
  Description of Artificial Sequence: Synthetic oligonucleotide
uagcuggcaagcggucuuaccggcu

SEQ ID NO: 44866 - RNA, 25 nt, Artificial Sequence
  Description of Artificial Sequence: Synthetic oligonucleotide
uuguaugguuaaaagauggguuacc

SEQ ID NO: 44867 - RNA, 25 nt, Artificial Sequence
  Description of Artificial Sequence: Synthetic oligonucleotide
ugguuaaaagauggguuaccugcga

SEQ ID NO: 44868 - RNA, 25 nt, Artificial Sequence
  Description of Artificial Sequence: Synthetic oligonucleotide
cagggaauuauacaaucuugcugag

SEQ ID NO: 44869 - RNA, 25 nt, Artificial Sequence
  Description of Artificial Sequence: Synthetic oligonucleotide
acaaucuugcugagcauaaaacagu

SEQ ID NO: 44870 - RNA, 25 nt, Artificial Sequence
  Description of Artificial Sequence: Synthetic oligonucleotide
ccaauaaugaagaguccuuuauccu

SEQ ID NO: 44871 - RNA, 25 nt, Artificial Sequence
  Description of Artificial Sequence: Synthetic oligonucleotide
acuuuggauguuccaacgcaaguug

SEQ ID NO: 44872 - RNA, 25 nt, Artificial Sequence
  Description of Artificial Sequence: Synthetic oligonucleotide
aaugcuuccacuaaacugaaaccau

SEQ ID NO: 44873 - RNA, 25 nt, Artificial Sequence
  Description of Artificial Sequence: Synthetic oligonucleotide
gagaaaguuugacuuuguuaaauau

SEQ ID NO: 44874 - RNA, 25 nt, Artificial Sequence
  Description of Artificial Sequence: Synthetic oligonucleotide
aaagaacuacuguauauuaaaaguu

SEQ ID NO: 44875 - RNA, 25 nt, Artificial Sequence
  Description of Artificial Sequence: Synthetic oligonucleotide
uuagaaauacggguuuugacuuaac

SEQ ID NO: 44876 - RNA, 25 nt, Artificial Sequence
  Description of Artificial Sequence: Synthetic oligonucleotide
aacauggguacagcaaacucagcac

SEQ ID NO: 44877 - RNA, 25 nt, Artificial Sequence
  Description of Artificial Sequence: Synthetic oligonucleotide
aaagacacagaagaugcugaccuca

SEQ ID NO: 44878 - RNA, 25 nt, Artificial Sequence
  Description of Artificial Sequence: Synthetic oligonucleotide
uaguagggagguuuauucagaucgc

SEQ ID NO: 44879 - RNA, 25 nt, Artificial Sequence
  Description of Artificial Sequence: Synthetic oligonucleotide
gccuucugcagcaggguucugggau

SEQ ID NO: 44880 - RNA, 25 nt, Artificial Sequence
  Description of Artificial Sequence: Synthetic oligonucleotide
ggucugguacauauuggaaauuaug

SEQ ID NO: 44881 - RNA, 25 nt, Artificial Sequence
  Description of Artificial Sequence: Synthetic oligonucleotide
cuaguccuuccgauggaagcacuag

SEQ ID NO: 44882 - RNA, 25 nt, Artificial Sequence
  Description of Artificial Sequence: Synthetic oligonucleotide
ccagugaauauuguuuuuaugugga

SEQ ID NO: 44883 - RNA, 25 nt, Artificial Sequence
  Description of Artificial Sequence: Synthetic oligonucleotide
augaauucaaguuggaauugguaga

SEQ ID NO: 44884 - RNA, 25 nt, Artificial Sequence
  Description of Artificial Sequence: Synthetic oligonucleotide
caggacacagauuuagacuuggaga

SEQ ID NO: 44885 - RNA, 25 nt, Artificial Sequence
  Description of Artificial Sequence: Synthetic oligonucleotide
cucaaagcacaguuacaguauucca

SEQ ID NO: 44886 - RNA, 25 nt, Artificial Sequence
  Description of Artificial Sequence: Synthetic oligonucleotide
accacugccaccacugaugaauuaa

SEQ ID NO: 44887 - RNA, 25 nt, Artificial Sequence
  Description of Artificial Sequence: Synthetic oligonucleotide
gaaacuacuagugccacaucaucac

SEQ ID NO: 44888 - RNA, 25 nt, Artificial Sequence
  Description of Artificial Sequence: Synthetic oligonucleotide
aagucggacagccucaccaaacaga

SEQ ID NO: 44889 - RNA, 25 nt, Artificial Sequence
  Description of Artificial Sequence: Synthetic oligonucleotide
gaaagcgaaaaauggaacaugaugg

SEQ ID NO: 44890 - RNA, 25 nt, Artificial Sequence
  Description of Artificial Sequence: Synthetic oligonucleotide
cccucugauuuagcauguagacugc

SEQ ID NO: 44891 - RNA, 25 nt, Artificial Sequence
  Description of Artificial Sequence: Synthetic oligonucleotide
ugagcuauuuaaggaucuauuuaug

SEQ ID NO: 44892 - RNA, 25 nt, Artificial Sequence
  Description of Artificial Sequence: Synthetic oligonucleotide
aaaaggugaaaaagcacuauuauca

SEQ ID NO: 44893 - RNA, 25 nt, Artificial Sequence
  Description of Artificial Sequence: Synthetic oligonucleotide
gaaaaagcacuauuaucaguucugc

SEQ ID NO: 44894 - RNA, 25 nt, Artificial Sequence
  Description of Artificial Sequence: Synthetic oligonucleotide
ggcugaaaagaaagauuaaaccuac

SEQ ID NO: 44895 - RNA, 25 nt, Artificial Sequence
  Description of Artificial Sequence: Synthetic oligonucleotide
uaaacccuuauaauaaaauccuucu

SEQ ID NO: 44896 - RNA, 25 nt, Artificial Sequence
  Description of Artificial Sequence: Synthetic oligonucleotide
cauacuauuagccaaugcuguagac

SEQ ID NO: 44897 - RNA, 25 nt, Artificial Sequence
  Description of Artificial Sequence: Synthetic oligonucleotide
gacagaagcauuuugauaggaauag

SEQ ID NO: 44898 - RNA, 25 nt, Artificial Sequence
  Description of Artificial Sequence: Synthetic oligonucleotide
agagcaaauaagauaauggcccuga

SEQ ID NO: 44899 - RNA, 25 nt, Artificial Sequence
  Description of Artificial Sequence: Synthetic oligonucleotide
ccaacauuuuucucuuccucaagca

SEQ ID NO: 44900 - RNA, 25 nt, Artificial Sequence
  Description of Artificial Sequence: Synthetic oligonucleotide
uuaaguaugagaaaaguucagccca

SEQ ID NO: 44901 - RNA, 25 nt, Artificial Sequence
  Description of Artificial Sequence: Synthetic oligonucleotide
caggaauaaagauggcugcugaacc

SEQ ID NO: 44902 - RNA, 25 nt, Artificial Sequence
  Description of Artificial Sequence: Synthetic oligonucleotide
aauuugaaugaccaaguucucuuca

SEQ ID NO: 44903 - RNA, 25 nt, Artificial Sequence
  Description of Artificial Sequence: Synthetic oligonucleotide
auguauaaagauagccagccuagag

SEQ ID NO: 44904 - RNA, 25 nt, Artificial Sequence
  Description of Artificial Sequence: Synthetic oligonucleotide
ggcuguaacuaucucugugaagugu

SEQ ID NO: 44905 - RNA, 25 nt, Artificial Sequence
  Description of Artificial Sequence: Synthetic oligonucleotide
ucugugaagugugagaaaauuucaa

SEQ ID NO: 44906 - RNA, 25 nt, Artificial Sequence
  Description of Artificial Sequence: Synthetic oligonucleotide
ccuuuaaggaaaugaauccuccuga

SEQ ID NO: 44907 - RNA, 25 nt, Artificial Sequence
  Description of Artificial Sequence: Synthetic oligonucleotide
aaggauacaaaaagugacaucauau

SEQ ID NO: 44908 - RNA, 25 nt, Artificial Sequence
  Description of Artificial Sequence: Synthetic oligonucleotide
agaugcaauuugaaucuucaucaua

SEQ ID NO: 44909 - RNA, 25 nt, Artificial Sequence
  Description of Artificial Sequence: Synthetic oligonucleotide
guucaaaacgaagacuagcuauuaa

SEQ ID NO: 44910 - RNA, 25 nt, Artificial Sequence
  Description of Artificial Sequence: Synthetic oligonucleotide
gugaaaccucaucucuacuaaaaau

SEQ ID NO: 44911 - RNA, 25 nt, Artificial Sequence
  Description of Artificial Sequence: Synthetic oligonucleotide
acgaaagagaagcucuaucucgccu

SEQ ID NO: 44912 - RNA, 25 nt, Artificial Sequence
  Description of Artificial Sequence: Synthetic oligonucleotide
cuccacaagcgccuucgguccaguu

SEQ ID NO: 44913 - RNA, 25 nt, Artificial Sequence
  Description of Artificial Sequence: Synthetic oligonucleotide
gagaagauuccaaagauguagccgc

SEQ ID NO: 44914 - RNA, 25 nt, Artificial Sequence
  Description of Artificial Sequence: Synthetic oligonucleotide
aaucuggauucaaugaggagacuug

SEQ ID NO: 44915 - RNA, 25 nt, Artificial Sequence
  Description of Artificial Sequence: Synthetic oligonucleotide
agaacagauuugagaguagugagga

SEQ ID NO: 44916 - RNA, 25 nt, Artificial Sequence
  Description of Artificial Sequence: Synthetic oligonucleotide
ccagagcugugcagaugaguacaaa

SEQ ID NO: 44917 - RNA, 25 nt, Artificial Sequence
  Description of Artificial Sequence: Synthetic oligonucleotide
ccucagauuguuguuguuaaugggc

SEQ ID NO: 44918 - RNA, 25 nt, Artificial Sequence
  Description of Artificial Sequence: Synthetic oligonucleotide
cuauuuuaauuauuuuuaauuuauu

SEQ ID NO: 44919 - RNA, 25 nt, Artificial Sequence
  Description of Artificial Sequence: Synthetic oligonucleotide
uuuaauuuauuaauauuuaaauaug

SEQ ID NO: 44920 - RNA, 25 nt, Artificial Sequence
  Description of Artificial Sequence: Synthetic oligonucleotide
augcaguuugaauauccuuuguuuc

SEQ ID NO: 44921 - RNA, 25 nt, Artificial Sequence
  Description of Artificial Sequence: Synthetic oligonucleotide
caugcugcuggcgucuaaguguuug

SEQ ID NO: 44922 - RNA, 25 nt, Artificial Sequence
  Description of Artificial Sequence: Synthetic oligonucleotide
agaugugcauuucaccugugacaaa

SEQ ID NO: 44923 - RNA, 25 nt, Artificial Sequence
  Description of Artificial Sequence: Synthetic oligonucleotide
ucaaaaccugugccaggcugaauua

SEQ ID NO: 44924 - RNA, 25 nt, Artificial Sequence
  Description of Artificial Sequence: Synthetic oligonucleotide
gaauguggguagucauucuuacaau

SEQ ID NO: 44925 - RNA, 25 nt, Artificial Sequence
  Description of Artificial Sequence: Synthetic oligonucleotide
auguggguagucauucuuacaauug

SEQ ID NO: 44926 - RNA, 25 nt, Artificial Sequence
  Description of Artificial Sequence: Synthetic oligonucleotide
ugaaaaugagcaucagagaguguac

SEQ ID NO: 44927 - RNA, 25 nt, Artificial Sequence
  Description of Artificial Sequence: Synthetic oligonucleotide
uugcuuuucauguagaacucagcag

SEQ ID NO: 44928 - RNA, 25 nt, Artificial Sequence
  Description of Artificial Sequence: Synthetic oligonucleotide
uguauuucuauauuuauuuucagua

SEQ ID NO: 44929 - RNA, 25 nt, Artificial Sequence
  Description of Artificial Sequence: Synthetic oligonucleotide
uuugauuaauguuucuuaaauggaa

SEQ ID NO: 44930 - RNA, 25 nt, Artificial Sequence
  Description of Artificial Sequence: Synthetic oligonucleotide
caacguguauagugccuaaaauugu

SEQ ID NO: 44931 - RNA, 25 nt, Artificial Sequence
  Description of Artificial Sequence: Synthetic oligonucleotide
cauauccuuggcuacuaacaucugg

SEQ ID NO: 44932 - RNA, 25 nt, Artificial Sequence
  Description of Artificial Sequence: Synthetic oligonucleotide
uacuaacaucuggagacugugagcu

SEQ ID NO: 44933 - RNA, 25 nt, Artificial Sequence
  Description of Artificial Sequence: Synthetic oligonucleotide
cauaaguugugugcuuuuuauuaau

SEQ ID NO: 44934 - RNA, 25 nt, Artificial Sequence
  Description of Artificial Sequence: Synthetic oligonucleotide
gcaucauuuuggcucuucuuacauu

SEQ ID NO: 44935 - RNA, 25 nt, Artificial Sequence
  Description of Artificial Sequence: Synthetic oligonucleotide
gcucuucuuacauuuguaaaaaugu

SEQ ID NO: 44936 - RNA, 25 nt, Artificial Sequence
  Description of Artificial Sequence: Synthetic oligonucleotide
agauuaggucaucuuaauucauauu

SEQ ID NO: 44937 - RNA, 25 nt, Artificial Sequence
  Description of Artificial Sequence: Synthetic oligonucleotide
auggaauugaaagaacuaaucauga

SEQ ID NO: 44938 - RNA, 25 nt, Artificial Sequence
  Description of Artificial Sequence: Synthetic oligonucleotide
cacacucauuccuucugcucuuggg

SEQ ID NO: 44939 - RNA, 25 nt, Artificial Sequence
  Description of Artificial Sequence: Synthetic oligonucleotide
uguagagguaaccaguagcuuugag

SEQ ID NO: 44940 - RNA, 25 nt, Artificial Sequence
  Description of Artificial Sequence: Synthetic oligonucleotide
caaccacaugccacguaauauuuca

SEQ ID NO: 44941 - RNA, 25 nt, Artificial Sequence
  Description of Artificial Sequence: Synthetic oligonucleotide
ucggaaacaaguuauucucuucacu

SEQ ID NO: 44942 - RNA, 25 nt, Artificial Sequence
  Description of Artificial Sequence: Synthetic oligonucleotide
acucccaauaacuaaugcuaagaaa

SEQ ID NO: 44943 - RNA, 25 nt, Artificial Sequence
  Description of Artificial Sequence: Synthetic oligonucleotide
aaugcuaagaaaugcugaaaaucaa

SEQ ID NO: 44944 - RNA, 25 nt, Artificial Sequence
  Description of Artificial Sequence: Synthetic oligonucleotide
gucuuucucuaaauaugauuacuuu

SEQ ID NO: 44945 - RNA, 25 nt, Artificial Sequence
  Description of Artificial Sequence: Synthetic oligonucleotide
ugaauuucaggcauuuuguucuaca

SEQ ID NO: 44946 - RNA, 25 nt, Artificial Sequence
  Description of Artificial Sequence: Synthetic oligonucleotide
cgauucccucucacccgggacucuc

SEQ ID NO: 44947 - RNA, 25 nt, Artificial Sequence
  Description of Artificial Sequence: Synthetic oligonucleotide
aggaaagugaaccuuuaaaguaaag

SEQ ID NO: 44948 - RNA, 25 nt, Artificial Sequence
  Description of Artificial Sequence: Synthetic oligonucleotide
gaggcugcaugcucuggaagccugg

SEQ ID NO: 44949 - RNA, 25 nt, Artificial Sequence
  Description of Artificial Sequence: Synthetic oligonucleotide
ucucugaacagaaaacaaaagagag

SEQ ID NO: 44950 - RNA, 25 nt, Artificial Sequence
  Description of Artificial Sequence: Synthetic oligonucleotide
aacuuggcuguaaucaguuaugccg

SEQ ID NO: 44951 - RNA, 25 nt, Artificial Sequence
  Description of Artificial Sequence: Synthetic oligonucleotide
agaagccaaaauuaaaagaagucca

SEQ ID NO: 44952 - RNA, 25 nt, Artificial Sequence
  Description of Artificial Sequence: Synthetic oligonucleotide
auuaaaagaaguccaggugagguua

SEQ ID NO: 44953 - RNA, 25 nt, Artificial Sequence
  Description of Artificial Sequence: Synthetic oligonucleotide
gaauccggauuaucgggaagaggac

SEQ ID NO: 44954 - RNA, 25 nt, Artificial Sequence
  Description of Artificial Sequence: Synthetic oligonucleotide
aaugugacaucaaagcaaguauugu

SEQ ID NO: 44955 - RNA, 25 nt, Artificial Sequence
  Description of Artificial Sequence: Synthetic oligonucleotide
caucaaagcaaguauuguagcacuc

SEQ ID NO: 44956 - RNA, 25 nt, Artificial Sequence
  Description of Artificial Sequence: Synthetic oligonucleotide
agagagagaaaacaaaaccacaaau

SEQ ID NO: 44957 - RNA, 25 nt, Artificial Sequence
  Description of Artificial Sequence: Synthetic oligonucleotide
ucgcuguaguauuuaagcccauaca

SEQ ID NO: 44958 - RNA, 25 nt, Artificial Sequence
  Description of Artificial Sequence: Synthetic oligonucleotide
cgcuguaguauuuaagcccauacag

SEQ ID NO: 44959 - RNA, 25 nt, Artificial Sequence
  Description of Artificial Sequence: Synthetic oligonucleotide
auuuaagcccauacagaaaccuucc

SEQ ID NO: 44960 - RNA, 25 nt, Artificial Sequence
  Description of Artificial Sequence: Synthetic oligonucleotide
auuaaaauaaacaugguauaccuac

SEQ ID NO: 44961 - RNA, 25 nt, Artificial Sequence
  Description of Artificial Sequence: Synthetic oligonucleotide
cuguucugaucggccaguuuucgga

SEQ ID NO: 44962 - RNA, 25 nt, Artificial Sequence
  Description of Artificial Sequence: Synthetic oligonucleotide
aaauaauuugaacuuuggaacaggg

SEQ ID NO: 44963 - RNA, 25 nt, Artificial Sequence
  Description of Artificial Sequence: Synthetic oligonucleotide
ugcgaccuuaauuuaacuuuccagu

SEQ ID NO: 44964 - RNA, 25 nt, Artificial Sequence
  Description of Artificial Sequence: Synthetic oligonucleotide
cugagaaagcuaaaguuugguuuug

SEQ ID NO: 44965 - RNA, 25 nt, Artificial Sequence
  Description of Artificial Sequence: Synthetic oligonucleotide
aguaaagaugcuacuucccacugua

SEQ ID NO: 44966 - RNA, 25 nt, Artificial Sequence
  Description of Artificial Sequence: Synthetic oligonucleotide
cugcuuaauugcugauaccauauga

SEQ ID NO: 44967 - RNA, 25 nt, Artificial Sequence
  Description of Artificial Sequence: Synthetic oligonucleotide
uaccauaugaaugaaacaugggcug

SEQ ID NO: 44968 - RNA, 25 nt, Artificial Sequence
  Description of Artificial Sequence: Synthetic oligonucleotide
aacuuucuuauccaacuuuuucaua

SEQ ID NO: 44969 - RNA, 25 nt, Artificial Sequence
  Description of Artificial Sequence: Synthetic oligonucleotide
ccuugcaugacaucaugaggccgga

SEQ ID NO: 44970 - RNA, 25 nt, Artificial Sequence
  Description of Artificial Sequence: Synthetic oligonucleotide
ugaauuuguauaugacugcauuugu

SEQ ID NO: 44971 - RNA, 25 nt, Artificial Sequence
  Description of Artificial Sequence: Synthetic oligonucleotide
gaauccuaguagaauguuuacuacc

SEQ ID NO: 44972 - RNA, 25 nt, Artificial Sequence
  Description of Artificial Sequence: Synthetic oligonucleotide
gaaagggaagaauuuuuugaugaaa

SEQ ID NO: 44973 - RNA, 25 nt, Artificial Sequence
  Description of Artificial Sequence: Synthetic oligonucleotide
uaucggcaugccagugugugaauuu

SEQ ID NO: 44974 - RNA, 25 nt, Artificial Sequence
  Description of Artificial Sequence: Synthetic oligonucleotide
caccucauaguagagcaauguaugu

SEQ ID NO: 44975 - RNA, 25 nt, Artificial Sequence
  Description of Artificial Sequence: Synthetic oligonucleotide
ccagaauugccaaagcacauauaua

SEQ ID NO: 44976 - RNA, 25 nt, Artificial Sequence
  Description of Artificial Sequence: Synthetic oligonucleotide
uggugaucuggguaauaguuucucc

SEQ ID NO: 44977 - RNA, 25 nt, Artificial Sequence
  Description of Artificial Sequence: Synthetic oligonucleotide
gaucuggguaauaguuucuccaaau

SEQ ID NO: 44978 - RNA, 25 nt, Artificial Sequence
  Description of Artificial Sequence: Synthetic oligonucleotide
ggaugugaugaauacuuccuagaaa

SEQ ID NO: 44979 - RNA, 25 nt, Artificial Sequence
  Description of Artificial Sequence: Synthetic oligonucleotide
cauuuccacagcuacaccauauaug

SEQ ID NO: 44980 - RNA, 25 nt, Artificial Sequence
  Description of Artificial Sequence: Synthetic oligonucleotide
acagcuacaccauauaugaauggag

SEQ ID NO: 44981 - RNA, 25 nt, Artificial Sequence
  Description of Artificial Sequence: Synthetic oligonucleotide
ugcaguucuuacacgagaagaagau

SEQ ID NO: 44982 - RNA, 25 nt, Artificial Sequence
  Description of Artificial Sequence: Synthetic oligonucleotide
acgagaagaagaucauuuacaggga

SEQ ID NO: 44983 - RNA, 25 nt, Artificial Sequence
  Description of Artificial Sequence: Synthetic oligonucleotide
cgagaagaagaucauuuacagggac

SEQ ID NO: 44984 - RNA, 25 nt, Artificial Sequence
  Description of Artificial Sequence: Synthetic oligonucleotide
aagaagaucauuuacagggaccuga

SEQ ID NO: 44985 - RNA, 25 nt, Artificial Sequence
  Description of Artificial Sequence: Synthetic oligonucleotide
agaggaagagguguuugacugcauc

SEQ ID NO: 44986 - RNA, 25 nt, Artificial Sequence
  Description of Artificial Sequence: Synthetic oligonucleotide
gaggaagagguguuugacugcaucg

SEQ ID NO: 44987 - RNA, 25 nt, Artificial Sequence
  Description of Artificial Sequence: Synthetic oligonucleotide
cuacuuugagggcgaguucacaggg

SEQ ID NO: 44988 - RNA, 25 nt, Artificial Sequence
  Description of Artificial Sequence: Synthetic oligonucleotide
agggcaucuccuggcaccucugucc

SEQ ID NO: 44989 - RNA, 25 nt, Artificial Sequence
  Description of Artificial Sequence: Synthetic oligonucleotide
ggagugauaugguuugucuuuuuaa

SEQ ID NO: 44990 - RNA, 25 nt, Artificial Sequence
  Description of Artificial Sequence: Synthetic oligonucleotide
gagugauaugguuugucuuuuuaag

SEQ ID NO: 44991 - RNA, 25 nt, Artificial Sequence
  Description of Artificial Sequence: Synthetic oligonucleotide
ugcaguaaagauccuaaagguuguc

SEQ ID NO: 44992 - RNA, 25 nt, Artificial Sequence
  Description of Artificial Sequence: Synthetic oligonucleotide
aguaaagauccuaaagguugucgac

SEQ ID NO: 44993 - RNA, 25 nt, Artificial Sequence
  Description of Artificial Sequence: Synthetic oligonucleotide
ugacaaaggacaaccuggcaauugu

SEQ ID NO: 44994 - RNA, 25 nt, Artificial Sequence
  Description of Artificial Sequence: Synthetic oligonucleotide
gcaauugugacccaguggugcgagg

SEQ ID NO: 44995 - RNA, 25 nt, Artificial Sequence
  Description of Artificial Sequence: Synthetic oligonucleotide
aacaucauccauagagacaugaaau

SEQ ID NO: 44996 - RNA, 25 nt, Artificial Sequence
  Description of Artificial Sequence: Synthetic oligonucleotide
ugaaauccaacaauauauuucucca

SEQ ID NO: 44997 - RNA, 25 nt, Artificial Sequence
  Description of Artificial Sequence: Synthetic oligonucleotide
aacaauauauuucuccaugaaggcu

SEQ ID NO: 44998 - RNA, 25 nt, Artificial Sequence
  Description of Artificial Sequence: Synthetic oligonucleotide
aacaguaaagucacgcuggaguggu

SEQ ID NO: 44999 - RNA, 25 nt, Artificial Sequence
  Description of Artificial Sequence: Synthetic oligonucleotide
ugugaagaaaguaaaggaagagagg

SEQ ID NO: 45000 - RNA, 25 nt, Artificial Sequence
  Description of Artificial Sequence: Synthetic oligonucleotide
cuuccgagccauccuugcaucgggc

SEQ ID NO: 45001 - RNA, 25 nt, Artificial Sequence
  Description of Artificial Sequence: Synthetic oligonucleotide
aauggagguugaauauccuacugug

SEQ ID NO: 45002 - RNA, 25 nt, Artificial Sequence
  Description of Artificial Sequence: Synthetic oligonucleotide
ggagguugaauauccuacuguguaa

SEQ ID NO: 45003 - RNA, 25 nt, Artificial Sequence
  Description of Artificial Sequence: Synthetic oligonucleotide
auuuugaguuuucccuuguagugua

SEQ ID NO: 45004 - RNA, 25 nt, Artificial Sequence
  Description of Artificial Sequence: Synthetic oligonucleotide
uauccuguuuguucuuuguugauug

SEQ ID NO: 45005 - RNA, 25 nt, Artificial Sequence
  Description of Artificial Sequence: Synthetic oligonucleotide
ccuguuuguucuuuguugauugaaa

SEQ ID NO: 45006 - RNA, 25 nt, Artificial Sequence
  Description of Artificial Sequence: Synthetic oligonucleotide
cucuacagccuucuuuuucuuccau

SEQ ID NO: 45007 - RNA, 25 nt, Artificial Sequence
  Description of Artificial Sequence: Synthetic oligonucleotide
ucuuccauagcuaaucuuccuucua

SEQ ID NO: 45008 - RNA, 25 nt, Artificial Sequence
  Description of Artificial Sequence: Synthetic oligonucleotide
auaaucuuccuguugaaugcuucau

SEQ ID NO: 45009 - RNA, 25 nt, Artificial Sequence
  Description of Artificial Sequence: Synthetic oligonucleotide
uaaucuuccuguugaaugcuucaug

SEQ ID NO: 45010 - RNA, 25 nt, Artificial Sequence
  Description of Artificial Sequence: Synthetic oligonucleotide
cuucaugacuugaauucuacuuuga

SEQ ID NO: 45011 - RNA, 25 nt, Artificial Sequence
  Description of Artificial Sequence: Synthetic oligonucleotide
aagagggagagaagcaacuacagac

SEQ ID NO: 45012 - RNA, 25 nt, Artificial Sequence
  Description of Artificial Sequence: Synthetic oligonucleotide
cgucuccuaccagaccaaggucaac

SEQ ID NO: 45013 - RNA, 25 nt, Artificial Sequence
  Description of Artificial Sequence: Synthetic oligonucleotide
gaucaaucggcccgacuaucucgac

SEQ ID NO: 45014 - RNA, 25 nt, Artificial Sequence
  Description of Artificial Sequence: Synthetic oligonucleotide
ggacgaacauccaaccuucccaaac

SEQ ID NO: 45015 - RNA, 25 nt, Artificial Sequence
  Description of Artificial Sequence: Synthetic oligonucleotide
agggucggaacccaagcuuagaacu

SEQ ID NO: 45016 - RNA, 25 nt, Artificial Sequence
  Description of Artificial Sequence: Synthetic oligonucleotide
ucggaacccaagcuuagaacuuuaa

SEQ ID NO: 45017 - RNA, 25 nt, Artificial Sequence
  Description of Artificial Sequence: Synthetic oligonucleotide
acccaagcuuagaacuuuaagcaac

SEQ ID NO: 45018 - RNA, 25 nt, Artificial Sequence
  Description of Artificial Sequence: Synthetic oligonucleotide
gaacuuuaagcaacaagaccaccac

SEQ ID NO: 45019 - RNA, 25 nt, Artificial Sequence
  Description of Artificial Sequence: Synthetic oligonucleotide
acuauucaguggcgagaaauaaagu

SEQ ID NO: 45020 - RNA, 25 nt, Artificial Sequence
  Description of Artificial Sequence: Synthetic oligonucleotide
cuauucaguggcgagaaauaaaguu

SEQ ID NO: 45021 - RNA, 25 nt, Artificial Sequence
  Description of Artificial Sequence: Synthetic oligonucleotide
aaacacagauaacaggaaaugaucc

SEQ ID NO: 45022 - RNA, 25 nt, Artificial Sequence
  Description of Artificial Sequence: Synthetic oligonucleotide
cuuaagaaaagagaagaaaugaaac

SEQ ID NO: 45023 - RNA, 25 nt, Artificial Sequence
  Description of Artificial Sequence: Synthetic oligonucleotide
cugaaggaguguguuuccauccucc

SEQ ID NO: 45024 - RNA, 25 nt, Artificial Sequence
  Description of Artificial Sequence: Synthetic oligonucleotide
ucaccgcgggacugaaaaucuuuga

SEQ ID NO: 45025 - RNA, 25 nt, Artificial Sequence
  Description of Artificial Sequence: Synthetic oligonucleotide
agcagaaauaagcgugccguucagg

SEQ ID NO: 45026 - RNA, 25 nt, Artificial Sequence
  Description of Artificial Sequence: Synthetic oligonucleotide
aagcgugccguucaggguccagaag

SEQ ID NO: 45027 - RNA, 25 nt, Artificial Sequence
  Description of Artificial Sequence: Synthetic oligonucleotide
agaaacagucacucaagacugcuug

SEQ ID NO: 45028 - RNA, 25 nt, Artificial Sequence
  Description of Artificial Sequence: Synthetic oligonucleotide
agaggaagaagguccaugucuuugg

SEQ ID NO: 45029 - RNA, 25 nt, Artificial Sequence
  Description of Artificial Sequence: Synthetic oligonucleotide
uguauucaaaauaugccugaaacac

SEQ ID NO: 45030 - RNA, 25 nt, Artificial Sequence
  Description of Artificial Sequence: Synthetic oligonucleotide
auuuuccucccuuucucuguaccuc

SEQ ID NO: 45031 - RNA, 25 nt, Artificial Sequence
  Description of Artificial Sequence: Synthetic oligonucleotide
caaagaaagauagagcaagacaaga

SEQ ID NO: 45032 - RNA, 25 nt, Artificial Sequence
  Description of Artificial Sequence: Synthetic oligonucleotide
aagaaagauagagcaagacaagaaa

SEQ ID NO: 45033 - RNA, 25 nt, Artificial Sequence
  Description of Artificial Sequence: Synthetic oligonucleotide
gaaagcauuuguuuguacaagaucc

SEQ ID NO: 45034 - RNA, 25 nt, Artificial Sequence
  Description of Artificial Sequence: Synthetic oligonucleotide
ugaguuaaacgaacguacuugcaga

SEQ ID NO: 45035 - RNA, 25 nt, Artificial Sequence
  Description of Artificial Sequence: Synthetic oligonucleotide
acugauacagaacgaucgauacaga

SEQ ID NO: 45036 - RNA, 25 nt, Artificial Sequence
  Description of Artificial Sequence: Synthetic oligonucleotide
auauuauauauauauaaaaauaaau

SEQ ID NO: 45037 - RNA, 25 nt, Artificial Sequence
  Description of Artificial Sequence: Synthetic oligonucleotide
auuauauauauauaaaaauaaauau

SEQ ID NO: 45038 - RNA, 25 nt, Artificial Sequence
  Description of Artificial Sequence: Synthetic oligonucleotide
ucacuggauguauuugacugcugug

SEQ ID NO: 45039 - RNA, 25 nt, Artificial Sequence
  Description of Artificial Sequence: Synthetic oligonucleotide
cagggaagaggaggagaugagagac

SEQ ID NO: 45040 - RNA, 25 nt, Artificial Sequence
  Description of Artificial Sequence: Synthetic oligonucleotide
augaucuuuuuuuugucccacuugg

SEQ ID NO: 45041 - RNA, 27 nt, Artificial Sequence
  Description of Artificial Sequence: Synthetic oligonucleotide
ggccgugaacuccucaucaaaauaccu

SEQ ID NO: 45042 - RNA, 27 nt, Artificial Sequence
  Description of Artificial Sequence: Synthetic oligonucleotide
uggugugauggugaucaucugggccgu

SEQ ID NO: 45043 - RNA, 27 nt, Artificial Sequence
  Description of Artificial Sequence: Synthetic oligonucleotide
aaacccgcaggauaguuuucuucccua

SEQ ID NO: 45044 - RNA, 27 nt, Artificial Sequence
  Description of Artificial Sequence: Synthetic oligonucleotide
caaacuggaugaaauaaauuaaaaccc

SEQ ID NO: 45045 - RNA, 27 nt, Artificial Sequence
  Description of Artificial Sequence: Synthetic oligonucleotide
agaaguccuuaacauuucccuacguga

SEQ ID NO: 45046 - RNA, 27 nt, Artificial Sequence
  Description of Artificial Sequence: Synthetic oligonucleotide
cucugucccacuggguaaacccuggcc

SEQ ID NO: 45047 - RNA, 27 nt, Artificial Sequence
  Description of Artificial Sequence: Synthetic oligonucleotide
cacaauaacaaauuuaaaccuugcucc

SEQ ID NO: 45048 - RNA, 27 nt, Artificial Sequence
  Description of Artificial Sequence: Synthetic oligonucleotide
aaaugcauuugaacaacauaauacaca

SEQ ID NO: 45049 - RNA, 27 nt, Artificial Sequence
  Description of Artificial Sequence: Synthetic oligonucleotide
ggcuuuccugucacaaagauuaaaaac

SEQ ID NO: 45050 - RNA, 27 nt, Artificial Sequence
  Description of Artificial Sequence: Synthetic oligonucleotide
agggcuuuccugucacaaagauuaaaa

SEQ ID NO: 45051 - RNA, 27 nt, Artificial Sequence
  Description of Artificial Sequence: Synthetic oligonucleotide
ggccaugcugggagacauaagcagcag

SEQ ID NO: 45052 - RNA, 27 nt, Artificial Sequence
  Description of Artificial Sequence: Synthetic oligonucleotide
ucagggagaagcuucugaaacacuucu

SEQ ID NO: 45053 - RNA, 27 nt, Artificial Sequence
  Description of Artificial Sequence: Synthetic oligonucleotide
aagggcuucuuccuuauugauggucag

SEQ ID NO: 45054 - RNA, 27 nt, Artificial Sequence
  Description of Artificial Sequence: Synthetic oligonucleotide
ugaagggcuucuuccuuauugaugguc

SEQ ID NO: 45055 - RNA, 27 nt, Artificial Sequence
  Description of Artificial Sequence: Synthetic oligonucleotide
cgcugaagggcuucuuccuuauugaug

SEQ ID NO: 45056 - RNA, 27 nt, Artificial Sequence
  Description of Artificial Sequence: Synthetic oligonucleotide
gccgcugaagggcuucuuccuuauuga

SEQ ID NO: 45057 - RNA, 27 nt, Artificial Sequence
  Description of Artificial Sequence: Synthetic oligonucleotide
acuggccgcugaagggcuucuuccuua

SEQ ID NO: 45058 - RNA, 27 nt, Artificial Sequence
  Description of Artificial Sequence: Synthetic oligonucleotide
cggagcuuuucaccuuuaguuaugcuu

SEQ ID NO: 45059 - RNA, 27 nt, Artificial Sequence
  Description of Artificial Sequence: Synthetic oligonucleotide
ccggagcuuuucaccuuuaguuaugcu

SEQ ID NO: 45060 - RNA, 27 nt, Artificial Sequence
  Description of Artificial Sequence: Synthetic oligonucleotide
cagacuguugacuggcgugauguaguu

SEQ ID NO: 45061 - RNA, 27 nt, Artificial Sequence
  Description of Artificial Sequence: Synthetic oligonucleotide
cuuuugaacucugcuuaaauccagugg

SEQ ID NO: 45062 - RNA, 27 nt, Artificial Sequence
  Description of Artificial Sequence: Synthetic oligonucleotide
gcuuuugaacucugcuuaaauccagug

SEQ ID NO: 45063 - RNA, 27 nt, Artificial Sequence
  Description of Artificial Sequence: Synthetic oligonucleotide
agggcuuuugaacucugcuuaaaucca

SEQ ID NO: 45064 - RNA, 27 nt, Artificial Sequence
  Description of Artificial Sequence: Synthetic oligonucleotide
aagggcuuuugaacucugcuuaaaucc

SEQ ID NO: 45065 - RNA, 27 nt, Artificial Sequence
  Description of Artificial Sequence: Synthetic oligonucleotide
ugaagggcuuuugaacucugcuuaaau

SEQ ID NO: 45066 - RNA, 27 nt, Artificial Sequence
  Description of Artificial Sequence: Synthetic oligonucleotide
cugaagggcuuuugaacucugcuuaaa

SEQ ID NO: 45067 - RNA, 27 nt, Artificial Sequence
  Description of Artificial Sequence: Synthetic oligonucleotide
cgcugaagggcuuuugaacucugcuua

SEQ ID NO: 45068 - RNA, 27 nt, Artificial Sequence
  Description of Artificial Sequence: Synthetic oligonucleotide
cgagcggcuucacucagacccugaggc

SEQ ID NO: 45069 - RNA, 27 nt, Artificial Sequence
  Description of Artificial Sequence: Synthetic oligonucleotide
uugacuggcgugauguaguugcuuggg

SEQ ID NO: 45070 - RNA, 27 nt, Artificial Sequence
  Description of Artificial Sequence: Synthetic oligonucleotide
cacgcaccaagaagcugccauugaucc

SEQ ID NO: 45071 - RNA, 27 nt, Artificial Sequence
  Description of Artificial Sequence: Synthetic oligonucleotide
cugaugaauccaaugugggcuggaauc

SEQ ID NO: 45072 - RNA, 27 nt, Artificial Sequence
  Description of Artificial Sequence: Synthetic oligonucleotide
cuuagguauuccacauucucagcugug

SEQ ID NO: 45073 - RNA, 27 nt, Artificial Sequence
  Description of Artificial Sequence: Synthetic oligonucleotide
ugagccucaaauuaggagauacguuuu

SEQ ID NO: 45074 - RNA, 27 nt, Artificial Sequence
  Description of Artificial Sequence: Synthetic oligonucleotide
ccaauuguagagaaauuauuuuaggaa

SEQ ID NO: 45075 - RNA, 27 nt, Artificial Sequence
  Description of Artificial Sequence: Synthetic oligonucleotide
ggcuccuaacuagcugaaucuuccaau

SEQ ID NO: 45076 - RNA, 27 nt, Artificial Sequence
  Description of Artificial Sequence: Synthetic oligonucleotide
guggauauugacuaggagaguuuaaaa

SEQ ID NO: 45077 - RNA, 27 nt, Artificial Sequence
  Description of Artificial Sequence: Synthetic oligonucleotide
ugugacugaacauaacuguaggcugaa

SEQ ID NO: 45078 - RNA, 27 nt, Artificial Sequence
  Description of Artificial Sequence: Synthetic oligonucleotide
guaugugugugugacugaacauaacug

SEQ ID NO: 45079 - RNA, 27 nt, Artificial Sequence
  Description of Artificial Sequence: Synthetic oligonucleotide
aagcaaaaggaacauuuuguaugugug

SEQ ID NO: 45080 - RNA, 27 nt, Artificial Sequence
  Description of Artificial Sequence: Synthetic oligonucleotide
aaaaauuacuuuaaaagcaaaaggaac

SEQ ID NO: 45081 - RNA, 27 nt, Artificial Sequence
  Description of Artificial Sequence: Synthetic oligonucleotide
ccauugacuguugcuucacaggucaga

SEQ ID NO: 45082 - RNA, 27 nt, Artificial Sequence
  Description of Artificial Sequence: Synthetic oligonucleotide
auugguuugucgaugugugagauaguu

SEQ ID NO: 45083 - RNA, 27 nt, Artificial Sequence
  Description of Artificial Sequence: Synthetic oligonucleotide
agugguagcaguacaauugaggacaag

SEQ ID NO: 45084 - RNA, 27 nt, Artificial Sequence
  Description of Artificial Sequence: Synthetic oligonucleotide
uaagaccgcuugccagcuacgguuuca

SEQ ID NO: 45085 - RNA, 27 nt, Artificial Sequence
  Description of Artificial Sequence: Synthetic oligonucleotide
agccgguaagaccgcuugccagcuacg

SEQ ID NO: 45086 - RNA, 27 nt, Artificial Sequence
  Description of Artificial Sequence: Synthetic oligonucleotide
gguaacccaucuuuuaaccauacaacu

SEQ ID NO: 45087 - RNA, 27 nt, Artificial Sequence
  Description of Artificial Sequence: Synthetic oligonucleotide
ucgcagguaacccaucuuuuaaccaua

SEQ ID NO: 45088 - RNA, 27 nt, Artificial Sequence
  Description of Artificial Sequence: Synthetic oligonucleotide
cucagcaagauuguauaauucccugca

SEQ ID NO: 45089 - RNA, 27 nt, Artificial Sequence
  Description of Artificial Sequence: Synthetic oligonucleotide
acuguuuuaugcucagcaagauuguau

SEQ ID NO: 45090 - RNA, 27 nt, Artificial Sequence
  Description of Artificial Sequence: Synthetic oligonucleotide
aggauaaaggacucuucauuauuggaa

SEQ ID NO: 45091 - RNA, 27 nt, Artificial Sequence
  Description of Artificial Sequence: Synthetic oligonucleotide
caacuugcguuggaacauccaaagugu

SEQ ID NO: 45092 - RNA, 27 nt, Artificial Sequence
  Description of Artificial Sequence: Synthetic oligonucleotide
augguuucaguuuaguggaagcauuua

SEQ ID NO: 45093 - RNA, 27 nt, Artificial Sequence
  Description of Artificial Sequence: Synthetic oligonucleotide
auauuuaacaaagucaaacuuucucac

SEQ ID NO: 45094 - RNA, 27 nt, Artificial Sequence
  Description of Artificial Sequence: Synthetic oligonucleotide
aacuuuuaauauacaguaguucuuuuc

SEQ ID NO: 45095 - RNA, 27 nt, Artificial Sequence
  Description of Artificial Sequence: Synthetic oligonucleotide
guuaagucaaaacccguauuucuaaag

SEQ ID NO: 45096 - RNA, 27 nt, Artificial Sequence
  Description of Artificial Sequence: Synthetic oligonucleotide
gugcugaguuugcuguacccauguuga

SEQ ID NO: 45097 - RNA, 27 nt, Artificial Sequence
  Description of Artificial Sequence: Synthetic oligonucleotide
ugaggucagcaucuucugugucuuuac

SEQ ID NO: 45098 - RNA, 27 nt, Artificial Sequence
  Description of Artificial Sequence: Synthetic oligonucleotide
gcgaucugaauaaaccucccuacuagc

SEQ ID NO: 45099 - RNA, 27 nt, Artificial Sequence
  Description of Artificial Sequence: Synthetic oligonucleotide
aucccagaacccugcugcagaaggcca

SEQ ID NO: 45100 - RNA, 27 nt, Artificial Sequence
  Description of Artificial Sequence: Synthetic oligonucleotide
cauaauuuccaauauguaccagaccuu

SEQ ID NO: 45101 - RNA, 27 nt, Artificial Sequence
  Description of Artificial Sequence: Synthetic oligonucleotide
cuagugcuuccaucggaaggacuaggu

SEQ ID NO: 45102 - RNA, 27 nt, Artificial Sequence
  Description of Artificial Sequence: Synthetic oligonucleotide
uccacauaaaaacaauauucacuggga

SEQ ID NO: 45103 - RNA, 27 nt, Artificial Sequence
  Description of Artificial Sequence: Synthetic oligonucleotide
ucuaccaauuccaacuugaauucauug

SEQ ID NO: 45104 - RNA, 27 nt, Artificial Sequence
  Description of Artificial Sequence: Synthetic oligonucleotide
ucuccaagucuaaaucuguguccugag

SEQ ID NO: 45105 - RNA, 27 nt, Artificial Sequence
  Description of Artificial Sequence: Synthetic oligonucleotide
uggaauacuguaacugugcuuugagga

SEQ ID NO: 45106 - RNA, 27 nt, Artificial Sequence
  Description of Artificial Sequence: Synthetic oligonucleotide
uuaauucaucagugguggcagugguag

SEQ ID NO: 45107 - RNA, 27 nt, Artificial Sequence
  Description of Artificial Sequence: Synthetic oligonucleotide
gugaugauguggcacuaguaguuucuu

SEQ ID NO: 45108 - RNA, 27 nt, Artificial Sequence
  Description of Artificial Sequence: Synthetic oligonucleotide
ucuguuuggugaggcuguccgacuuug

SEQ ID NO: 45109 - RNA, 27 nt, Artificial Sequence
  Description of Artificial Sequence: Synthetic oligonucleotide
ccaucauguuccauuuuucgcuuucuc

SEQ ID NO: 45110 - RNA, 27 nt, Artificial Sequence
  Description of Artificial Sequence: Synthetic oligonucleotide
gcagucuacaugcuaaaucagagggua

SEQ ID NO: 45111 - RNA, 27 nt, Artificial Sequence
  Description of Artificial Sequence: Synthetic oligonucleotide
cauaaauagauccuuaaauagcucaaa

SEQ ID NO: 45112 - RNA, 27 nt, Artificial Sequence
  Description of Artificial Sequence: Synthetic oligonucleotide
ugauaauagugcuuuuucaccuuuuuc

SEQ ID NO: 45113 - RNA, 27 nt, Artificial Sequence
  Description of Artificial Sequence: Synthetic oligonucleotide
gcagaacugauaauagugcuuuuucac

SEQ ID NO: 45114 - RNA, 27 nt, Artificial Sequence
  Description of Artificial Sequence: Synthetic oligonucleotide
guagguuuaaucuuucuuuucagccau

SEQ ID NO: 45115 - RNA, 27 nt, Artificial Sequence
  Description of Artificial Sequence: Synthetic oligonucleotide
agaaggauuuuauuauaaggguuuaau

SEQ ID NO: 45116 - RNA, 27 nt, Artificial Sequence
  Description of Artificial Sequence: Synthetic oligonucleotide
gucuacagcauuggcuaauaguaugaa

SEQ ID NO: 45117 - RNA, 27 nt, Artificial Sequence
  Description of Artificial Sequence: Synthetic oligonucleotide
cuauuccuaucaaaaugcuucugucua

SEQ ID NO: 45118 - RNA, 27 nt, Artificial Sequence
  Description of Artificial Sequence: Synthetic oligonucleotide
ucagggccauuaucuuauuugcucuau

SEQ ID NO: 45119 - RNA, 27 nt, Artificial Sequence
  Description of Artificial Sequence: Synthetic oligonucleotide
ugcuugaggaagagaaaaauguugguc

SEQ ID NO: 45120 - RNA, 27 nt, Artificial Sequence
  Description of Artificial Sequence: Synthetic oligonucleotide
ugggcugaacuuuucucauacuuaaag

SEQ ID NO: 45121 - RNA, 27 nt, Artificial Sequence
  Description of Artificial Sequence: Synthetic oligonucleotide
gguucagcagccaucuuuauuccugcg

SEQ ID NO: 45122 - RNA, 27 nt, Artificial Sequence
  Description of Artificial Sequence: Synthetic oligonucleotide
ugaagagaacuuggucauucaaauuuc

SEQ ID NO: 45123 - RNA, 27 nt, Artificial Sequence
  Description of Artificial Sequence: Synthetic oligonucleotide
cucuaggcuggcuaucuuuauacauac

SEQ ID NO: 45124 - RNA, 27 nt, Artificial Sequence
  Description of Artificial Sequence: Synthetic oligonucleotide
acacuucacagagauaguuacagccau

SEQ ID NO: 45125 - RNA, 27 nt, Artificial Sequence
  Description of Artificial Sequence: Synthetic oligonucleotide
uugaaauuuucucacacuucacagaga

SEQ ID NO: 45126 - RNA, 27 nt, Artificial Sequence
  Description of Artificial Sequence: Synthetic oligonucleotide
ucaggaggauucauuuccuuaaaggaa

SEQ ID NO: 45127 - RNA, 27 nt, Artificial Sequence
  Description of Artificial Sequence: Synthetic oligonucleotide
auaugaugucacuuuuuguauccuuga

SEQ ID NO: 45128 - RNA, 27 nt, Artificial Sequence
  Description of Artificial Sequence: Synthetic oligonucleotide
uaugaugaagauucaaauugcaucuua

SEQ ID NO: 45129 - RNA, 27 nt, Artificial Sequence
  Description of Artificial Sequence: Synthetic oligonucleotide
uuaauagcuagucuucguuuugaacag

SEQ ID NO: 45130 - RNA, 27 nt, Artificial Sequence
  Description of Artificial Sequence: Synthetic oligonucleotide
auuuuuaguagagaugagguuucacca

SEQ ID NO: 45131 - RNA, 27 nt, Artificial Sequence
  Description of Artificial Sequence: Synthetic oligonucleotide
aggcgagauagagcuucucuuucguuc

SEQ ID NO: 45132 - RNA, 27 nt, Artificial Sequence
  Description of Artificial Sequence: Synthetic oligonucleotide
aacuggaccgaaggcgcuuguggagaa

SEQ ID NO: 45133 - RNA, 27 nt, Artificial Sequence
  Description of Artificial Sequence: Synthetic oligonucleotide
gcggcuacaucuuuggaaucuucuccu

SEQ ID NO: 45134 - RNA, 27 nt, Artificial Sequence
  Description of Artificial Sequence: Synthetic oligonucleotide
caagucuccucauugaauccagauugg

SEQ ID NO: 45135 - RNA, 27 nt, Artificial Sequence
  Description of Artificial Sequence: Synthetic oligonucleotide
uccucacuacucucaaaucuguucugg

SEQ ID NO: 45136 - RNA, 27 nt, Artificial Sequence
  Description of Artificial Sequence: Synthetic oligonucleotide
uuuguacucaucugcacagcucuggcu

SEQ ID NO: 45137 - RNA, 27 nt, Artificial Sequence
  Description of Artificial Sequence: Synthetic oligonucleotide
gcccauuaacaacaacaaucugaggug

SEQ ID NO: 45138 - RNA, 27 nt, Artificial Sequence
  Description of Artificial Sequence: Synthetic oligonucleotide
aauaaauuaaaaauaauuaaaauagug

SEQ ID NO: 45139 - RNA, 27 nt, Artificial Sequence
  Description of Artificial Sequence: Synthetic oligonucleotide
cauauuuaaauauuaauaaauuaaaaa

SEQ ID NO: 45140 - RNA, 27 nt, Artificial Sequence
  Description of Artificial Sequence: Synthetic oligonucleotide
gaaacaaaggauauucaaacugcauag

SEQ ID NO: 45141 - RNA, 27 nt, Artificial Sequence
  Description of Artificial Sequence: Synthetic oligonucleotide
caaacacuuagacgccagcagcauggg

SEQ ID NO: 45142 - RNA, 27 nt, Artificial Sequence
  Description of Artificial Sequence: Synthetic oligonucleotide
uuugucacaggugaaaugcacaucuga

SEQ ID NO: 45143 - RNA, 27 nt, Artificial Sequence
  Description of Artificial Sequence: Synthetic oligonucleotide
uaauucagccuggcacagguuuugauc

SEQ ID NO: 45144 - RNA, 27 nt, Artificial Sequence
  Description of Artificial Sequence: Synthetic oligonucleotide
auuguaagaaugacuacccacauucac

SEQ ID NO: 45145 - RNA, 27 nt, Artificial Sequence
  Description of Artificial Sequence: Synthetic oligonucleotide
caauuguaagaaugacuacccacauuc

SEQ ID NO: 45146 - RNA, 27 nt, Artificial Sequence
  Description of Artificial Sequence: Synthetic oligonucleotide
guacacucucugaugcucauuuucaua

SEQ ID NO: 45147 - RNA, 27 nt, Artificial Sequence
  Description of Artificial Sequence: Synthetic oligonucleotide
cugcugaguucuacaugaaaagcaaau

SEQ ID NO: 45148 - RNA, 27 nt, Artificial Sequence
  Description of Artificial Sequence: Synthetic oligonucleotide
uacugaaaauaaauauagaaauacaac

SEQ ID NO: 45149 - RNA, 27 nt, Artificial Sequence
  Description of Artificial Sequence: Synthetic oligonucleotide
uuccauuuaagaaacauuaaucaaaac

SEQ ID NO: 45150 - RNA, 27 nt, Artificial Sequence
  Description of Artificial Sequence: Synthetic oligonucleotide
acaauuuuaggcacuauacacguuguu

SEQ ID NO: 45151 - RNA, 27 nt, Artificial Sequence
  Description of Artificial Sequence: Synthetic oligonucleotide
ccagauguuaguagccaaggauauggu

SEQ ID NO: 45152 - RNA, 27 nt, Artificial Sequence
  Description of Artificial Sequence: Synthetic oligonucleotide
agcucacagucuccagauguuaguagc

SEQ ID NO: 45153 - RNA, 27 nt, Artificial Sequence
  Description of Artificial Sequence: Synthetic oligonucleotide
auuaauaaaaagcacacaacuuauggc

SEQ ID NO: 45154 - RNA, 27 nt, Artificial Sequence
  Description of Artificial Sequence: Synthetic oligonucleotide
aauguaagaagagccaaaaugaugcau

SEQ ID NO: 45155 - RNA, 27 nt, Artificial Sequence
  Description of Artificial Sequence: Synthetic oligonucleotide
acauuuuuacaaauguaagaagagcca

SEQ ID NO: 45156 - RNA, 27 nt, Artificial Sequence
  Description of Artificial Sequence: Synthetic oligonucleotide
aauaugaauuaagaugaccuaaucugu

SEQ ID NO: 45157 - RNA, 27 nt, Artificial Sequence
  Description of Artificial Sequence: Synthetic oligonucleotide
ucaugauuaguucuuucaauuccaucc

SEQ ID NO: 45158 - RNA, 27 nt, Artificial Sequence
  Description of Artificial Sequence: Synthetic oligonucleotide
cccaagagcagaaggaaugagugugca

SEQ ID NO: 45159 - RNA, 27 nt, Artificial Sequence
  Description of Artificial Sequence: Synthetic oligonucleotide
cucaaagcuacugguuaccucuacacc

SEQ ID NO: 45160 - RNA, 27 nt, Artificial Sequence
  Description of Artificial Sequence: Synthetic oligonucleotide
ugaaauauuacguggcaugugguuggg

SEQ ID NO: 45161 - RNA, 27 nt, Artificial Sequence
  Description of Artificial Sequence: Synthetic oligonucleotide
agugaagagaauaacuuguuuccgaag

SEQ ID NO: 45162 - RNA, 27 nt, Artificial Sequence
  Description of Artificial Sequence: Synthetic oligonucleotide
uuucuuagcauuaguuauugggaguga

SEQ ID NO: 45163 - RNA, 27 nt, Artificial Sequence
  Description of Artificial Sequence: Synthetic oligonucleotide
uugauuuucagcauuucuuagcauuag

SEQ ID NO: 45164 - RNA, 27 nt, Artificial Sequence
  Description of Artificial Sequence: Synthetic oligonucleotide
aaaguaaucauauuuagagaaagacag

SEQ ID NO: 45165 - RNA, 27 nt, Artificial Sequence
  Description of Artificial Sequence: Synthetic oligonucleotide
uguagaacaaaaugccugaaauucagc

SEQ ID NO: 45166 - RNA, 27 nt, Artificial Sequence
  Description of Artificial Sequence: Synthetic oligonucleotide
gagagucccgggugagagggaaucgcc

SEQ ID NO: 45167 - RNA, 27 nt, Artificial Sequence
  Description of Artificial Sequence: Synthetic oligonucleotide
cuuuacuuuaaagguucacuuuccuug

SEQ ID NO: 45168 - RNA, 27 nt, Artificial Sequence
  Description of Artificial Sequence: Synthetic oligonucleotide
ccaggcuuccagagcaugcagccuccu

SEQ ID NO: 45169 - RNA, 27 nt, Artificial Sequence
  Description of Artificial Sequence: Synthetic oligonucleotide
cucucuuuuguuuucuguucagagaaa

SEQ ID NO: 45170 - RNA, 27 nt, Artificial Sequence
  Description of Artificial Sequence: Synthetic oligonucleotide
cggcauaacugauuacagccaaguuca

SEQ ID NO: 45171 - RNA, 27 nt, Artificial Sequence
  Description of Artificial Sequence: Synthetic oligonucleotide
uggacuucuuuuaauuuuggcuucuuc

SEQ ID NO: 45172 - RNA, 27 nt, Artificial Sequence
  Description of Artificial Sequence: Synthetic oligonucleotide
uaaccucaccuggacuucuuuuaauuu

SEQ ID NO: 45173 - RNA, 27 nt, Artificial Sequence
  Description of Artificial Sequence: Synthetic oligonucleotide
guccucuucccgauaauccggauucag

SEQ ID NO: 45174 - RNA, 27 nt, Artificial Sequence
  Description of Artificial Sequence: Synthetic oligonucleotide
acaauacuugcuuugaugucacauuaa

SEQ ID NO: 45175 - RNA, 27 nt, Artificial Sequence
  Description of Artificial Sequence: Synthetic oligonucleotide
gagugcuacaauacuugcuuugauguc

SEQ ID NO: 45176 - RNA, 27 nt, Artificial Sequence
  Description of Artificial Sequence: Synthetic oligonucleotide
auuugugguuuuguuuucucucucucu

SEQ ID NO: 45177 - RNA, 27 nt, Artificial Sequence
  Description of Artificial Sequence: Synthetic oligonucleotide
uguaugggcuuaaauacuacagcgagg

SEQ ID NO: 45178 - RNA, 27 nt, Artificial Sequence
  Description of Artificial Sequence: Synthetic oligonucleotide
cuguaugggcuuaaauacuacagcgag

SEQ ID NO: 45179 - RNA, 27 nt, Artificial Sequence
  Description of Artificial Sequence: Synthetic oligonucleotide
ggaagguuucuguaugggcuuaaauac

SEQ ID NO: 45180 - RNA, 27 nt, Artificial Sequence
  Description of Artificial Sequence: Synthetic oligonucleotide
guagguauaccauguuuauuuuaauac

SEQ ID NO: 45181 - RNA, 27 nt, Artificial Sequence
  Description of Artificial Sequence: Synthetic oligonucleotide
uccgaaaacuggccgaucagaacagcc

SEQ ID NO: 45182 - RNA, 27 nt, Artificial Sequence
  Description of Artificial Sequence: Synthetic oligonucleotide
cccuguuccaaaguucaaauuauuugu

SEQ ID NO: 45183 - RNA, 27 nt, Artificial Sequence
  Description of Artificial Sequence: Synthetic oligonucleotide
acuggaaaguuaaauuaaggucgcaau

SEQ ID NO: 45184 - RNA, 27 nt, Artificial Sequence
  Description of Artificial Sequence: Synthetic oligonucleotide
caaaaccaaacuuuagcuuucucagcc

SEQ ID NO: 45185 - RNA, 27 nt, Artificial Sequence
  Description of Artificial Sequence: Synthetic oligonucleotide
uacagugggaaguagcaucuuuacuuu

SEQ ID NO: 45186 - RNA, 27 nt, Artificial Sequence
  Description of Artificial Sequence: Synthetic oligonucleotide
ucauaugguaucagcaauuaagcagua

SEQ ID NO: 45187 - RNA, 27 nt, Artificial Sequence
  Description of Artificial Sequence: Synthetic oligonucleotide
cagcccauguuucauucauaugguauc

SEQ ID NO: 45188 - RNA, 27 nt, Artificial Sequence
  Description of Artificial Sequence: Synthetic oligonucleotide
uaugaaaaaguuggauaagaaaguugg

SEQ ID NO: 45189 - RNA, 27 nt, Artificial Sequence
  Description of Artificial Sequence: Synthetic oligonucleotide
uccggccucaugaugucaugcaaggcu

SEQ ID NO: 45190 - RNA, 27 nt, Artificial Sequence
  Description of Artificial Sequence: Synthetic oligonucleotide
acaaaugcagucauauacaaauucagg

SEQ ID NO: 45191 - RNA, 27 nt, Artificial Sequence
  Description of Artificial Sequence: Synthetic oligonucleotide
gguaguaaacauucuacuaggauucuu

SEQ ID NO: 45192 - RNA, 27 nt, Artificial Sequence
  Description of Artificial Sequence: Synthetic oligonucleotide
uuucaucaaaaaauucuucccuuucug

SEQ ID NO: 45193 - RNA, 27 nt, Artificial Sequence
  Description of Artificial Sequence: Synthetic oligonucleotide
aaauucacacacuggcaugccgauagc

SEQ ID NO: 45194 - RNA, 27 nt, Artificial Sequence
  Description of Artificial Sequence: Synthetic oligonucleotide
acauacauugcucuacuaugaggugaa

SEQ ID NO: 45195 - RNA, 27 nt, Artificial Sequence
  Description of Artificial Sequence: Synthetic oligonucleotide
uauauaugugcuuuggcaauucuggug

SEQ ID NO: 45196 - RNA, 27 nt, Artificial Sequence
  Description of Artificial Sequence: Synthetic oligonucleotide
ggagaaacuauuacccagaucaccacu

SEQ ID NO: 45197 - RNA, 27 nt, Artificial Sequence
  Description of Artificial Sequence: Synthetic oligonucleotide
auuuggagaaacuauuacccagaucac

SEQ ID NO: 45198 - RNA, 27 nt, Artificial Sequence
  Description of Artificial Sequence: Synthetic oligonucleotide
uuucuaggaaguauucaucacauccac

SEQ ID NO: 45199 - RNA, 27 nt, Artificial Sequence
  Description of Artificial Sequence: Synthetic oligonucleotide
cauauaugguguagcuguggaaaugcg

SEQ ID NO: 45200 - RNA, 27 nt, Artificial Sequence
  Description of Artificial Sequence: Synthetic oligonucleotide
cuccauucauauaugguguagcugugg

SEQ ID NO: 45201 - RNA, 27 nt, Artificial Sequence
  Description of Artificial Sequence: Synthetic oligonucleotide
aucuucuucucguguaagaacugcagc

SEQ ID NO: 45202 - RNA, 27 nt, Artificial Sequence
  Description of Artificial Sequence: Synthetic oligonucleotide
ucccuguaaaugaucuucuucucgugu

SEQ ID NO: 45203 - RNA, 27 nt, Artificial Sequence
  Description of Artificial Sequence: Synthetic oligonucleotide
gucccuguaaaugaucuucuucucgug

SEQ ID NO: 45204 - RNA, 27 nt, Artificial Sequence
  Description of Artificial Sequence: Synthetic oligonucleotide
ucaggucccuguaaaugaucuucuucu

SEQ ID NO: 45205 - RNA, 27 nt, Artificial Sequence
  Description of Artificial Sequence: Synthetic oligonucleotide
gaugcagucaaacaccucuuccucugu

SEQ ID NO: 45206 - RNA, 27 nt, Artificial Sequence
  Description of Artificial Sequence: Synthetic oligonucleotide
cgaugcagucaaacaccucuuccucug

SEQ ID NO: 45207 - RNA, 27 nt, Artificial Sequence
  Description of Artificial Sequence: Synthetic oligonucleotide
cccugugaacucgcccucaaaguagcg

SEQ ID NO: 45208 - RNA, 27 nt, Artificial Sequence
  Description of Artificial Sequence: Synthetic oligonucleotide
ggacagaggugccaggagaugcccuca

SEQ ID NO: 45209 - RNA, 27 nt, Artificial Sequence
  Description of Artificial Sequence: Synthetic oligonucleotide
uuaaaaagacaaaccauaucacuccuu

SEQ ID NO: 45210 - RNA, 27 nt, Artificial Sequence
  Description of Artificial Sequence: Synthetic oligonucleotide
cuuaaaaagacaaaccauaucacuccu

SEQ ID NO: 45211 - RNA, 27 nt, Artificial Sequence
  Description of Artificial Sequence: Synthetic oligonucleotide
gacaaccuuuaggaucuuuacugcaac

SEQ ID NO: 45212 - RNA, 27 nt, Artificial Sequence
  Description of Artificial Sequence: Synthetic oligonucleotide
gucgacaaccuuuaggaucuuuacugc

SEQ ID NO: 45213 - RNA, 27 nt, Artificial Sequence
  Description of Artificial Sequence: Synthetic oligonucleotide
acaauugccagguuguccuuugucaug

SEQ ID NO: 45214 - RNA, 27 nt, Artificial Sequence
  Description of Artificial Sequence: Synthetic oligonucleotide
ccucgcaccacugggucacaauugcca

SEQ ID NO: 45215 - RNA, 27 nt, Artificial Sequence
  Description of Artificial Sequence: Synthetic oligonucleotide
auuucaugucucuauggaugauguucu

SEQ ID NO: 45216 - RNA, 27 nt, Artificial Sequence
  Description of Artificial Sequence: Synthetic oligonucleotide
uggagaaauauauuguuggauuucaug

SEQ ID NO: 45217 - RNA, 27 nt, Artificial Sequence
  Description of Artificial Sequence: Synthetic oligonucleotide
agccuucauggagaaauauauuguugg

SEQ ID NO: 45218 - RNA, 27 nt, Artificial Sequence
  Description of Artificial Sequence: Synthetic oligonucleotide
accacuccagcgugacuuuacuguugc

SEQ ID NO: 45219 - RNA, 27 nt, Artificial Sequence
  Description of Artificial Sequence: Synthetic oligonucleotide
ccucucuuccuuuacuuucuucacaca

SEQ ID NO: 45220 - RNA, 27 nt, Artificial Sequence
  Description of Artificial Sequence: Synthetic oligonucleotide
gcccgaugcaaggauggcucggaagcg

SEQ ID NO: 45221 - RNA, 27 nt, Artificial Sequence
  Description of Artificial Sequence: Synthetic oligonucleotide
cacaguaggauauucaaccuccauuuc

SEQ ID NO: 45222 - RNA, 27 nt, Artificial Sequence
  Description of Artificial Sequence: Synthetic oligonucleotide
uuacacaguaggauauucaaccuccau

SEQ ID NO: 45223 - RNA, 27 nt, Artificial Sequence
  Description of Artificial Sequence: Synthetic oligonucleotide
uacacuacaagggaaaacucaaaaucu

SEQ ID NO: 45224 - RNA, 27 nt, Artificial Sequence
  Description of Artificial Sequence: Synthetic oligonucleotide
caaucaacaaagaacaaacaggauaaa

SEQ ID NO: 45225 - RNA, 27 nt, Artificial Sequence
  Description of Artificial Sequence: Synthetic oligonucleotide
uuucaaucaacaaagaacaaacaggau

SEQ ID NO: 45226 - RNA, 27 nt, Artificial Sequence
  Description of Artificial Sequence: Synthetic oligonucleotide
auggaagaaaaagaaggcuguagagaa

SEQ ID NO: 45227 - RNA, 27 nt, Artificial Sequence
  Description of Artificial Sequence: Synthetic oligonucleotide
uagaaggaagauuagcuauggaagaaa

SEQ ID NO: 45228 - RNA, 27 nt, Artificial Sequence
  Description of Artificial Sequence: Synthetic oligonucleotide
augaagcauucaacaggaagauuauuu

SEQ ID NO: 45229 - RNA, 27 nt, Artificial Sequence
  Description of Artificial Sequence: Synthetic oligonucleotide
caugaagcauucaacaggaagauuauu

SEQ ID NO: 45230 - RNA, 27 nt, Artificial Sequence
  Description of Artificial Sequence: Synthetic oligonucleotide
ucaaaguagaauucaagucaugaagca

SEQ ID NO: 45231 - RNA, 27 nt, Artificial Sequence
  Description of Artificial Sequence: Synthetic oligonucleotide
gucuguaguugcuucucucccucuuag

SEQ ID NO: 45232 - RNA, 27 nt, Artificial Sequence
  Description of Artificial Sequence: Synthetic oligonucleotide
guugaccuuggucugguaggagacggc

SEQ ID NO: 45233 - RNA, 27 nt, Artificial Sequence
  Description of Artificial Sequence: Synthetic oligonucleotide
gucgagauagucgggccgauugaucuc

SEQ ID NO: 45234 - RNA, 27 nt, Artificial Sequence
  Description of Artificial Sequence: Synthetic oligonucleotide
guuugggaagguuggauguucguccuc

SEQ ID NO: 45235 - RNA, 27 nt, Artificial Sequence
  Description of Artificial Sequence: Synthetic oligonucleotide
aguucuaagcuuggguuccgacccuaa

SEQ ID NO: 45236 - RNA, 27 nt, Artificial Sequence
  Description of Artificial Sequence: Synthetic oligonucleotide
uuaaaguucuaagcuuggguuccgacc

SEQ ID NO: 45237 - RNA, 27 nt, Artificial Sequence
  Description of Artificial Sequence: Synthetic oligonucleotide
guugcuuaaaguucuaagcuuggguuc

SEQ ID NO: 45238 - RNA, 27 nt, Artificial Sequence
  Description of Artificial Sequence: Synthetic oligonucleotide
gugguggucuuguugcuuaaaguucua

SEQ ID NO: 45239 - RNA, 27 nt, Artificial Sequence
  Description of Artificial Sequence: Synthetic oligonucleotide
acuuuauuucucgccacugaauaguag

SEQ ID NO: 45240 - RNA, 27 nt, Artificial Sequence
  Description of Artificial Sequence: Synthetic oligonucleotide
aacuuuauuucucgccacugaauagua

SEQ ID NO: 45241 - RNA, 27 nt, Artificial Sequence
  Description of Artificial Sequence: Synthetic oligonucleotide
ggaucauuuccuguuaucuguguuugu

SEQ ID NO: 45242 - RNA, 27 nt, Artificial Sequence
  Description of Artificial Sequence: Synthetic oligonucleotide
guuucauuucuucucuuuucuuaaggc

SEQ ID NO: 45243 - RNA, 27 nt, Artificial Sequence
  Description of Artificial Sequence: Synthetic oligonucleotide
ggaggauggaaacacacuccuucaguu

SEQ ID NO: 45244 - RNA, 27 nt, Artificial Sequence
  Description of Artificial Sequence: Synthetic oligonucleotide
ucaaagauuuucagucccgcggugaca

SEQ ID NO: 45245 - RNA, 27 nt, Artificial Sequence
  Description of Artificial Sequence: Synthetic oligonucleotide
ccugaacggcacgcuuauuucugcugu

SEQ ID NO: 45246 - RNA, 27 nt, Artificial Sequence
  Description of Artificial Sequence: Synthetic oligonucleotide
cuucuggacccugaacggcacgcuuau

SEQ ID NO: 45247 - RNA, 27 nt, Artificial Sequence
  Description of Artificial Sequence: Synthetic oligonucleotide
caagcagucuugagugacuguuucuuc

SEQ ID NO: 45248 - RNA, 27 nt, Artificial Sequence
  Description of Artificial Sequence: Synthetic oligonucleotide
ccaaagacauggaccuucuuccucuga

SEQ ID NO: 45249 - RNA, 27 nt, Artificial Sequence
  Description of Artificial Sequence: Synthetic oligonucleotide
guguuucaggcauauuuugaauacauc

SEQ ID NO: 45250 - RNA, 27 nt, Artificial Sequence
  Description of Artificial Sequence: Synthetic oligonucleotide
gagguacagagaaagggaggaaaauag

SEQ ID NO: 45251 - RNA, 27 nt, Artificial Sequence
  Description of Artificial Sequence: Synthetic oligonucleotide
ucuugucuugcucuaucuuucuuuggu

SEQ ID NO: 45252 - RNA, 27 nt, Artificial Sequence
  Description of Artificial Sequence: Synthetic oligonucleotide
uuucuugucuugcucuaucuuucuuug

SEQ ID NO: 45253 - RNA, 27 nt, Artificial Sequence
  Description of Artificial Sequence: Synthetic oligonucleotide
ggaucuuguacaaacaaaugcuuucuc

SEQ ID NO: 45254 - RNA, 27 nt, Artificial Sequence
  Description of Artificial Sequence: Synthetic oligonucleotide
ucugcaaguacguucguuuaacucaag

SEQ ID NO: 45255 - RNA, 27 nt, Artificial Sequence
  Description of Artificial Sequence: Synthetic oligonucleotide
ucuguaucgaucguucuguaucagucu

SEQ ID NO: 45256 - RNA, 27 nt, Artificial Sequence
  Description of Artificial Sequence: Synthetic oligonucleotide
auuuauuuuuauauauauauaauauau

SEQ ID NO: 45257 - RNA, 27 nt, Artificial Sequence
  Description of Artificial Sequence: Synthetic oligonucleotide
auauuuauuuuuauauauauauaauau

SEQ ID NO: 45258 - RNA, 27 nt, Artificial Sequence
  Description of Artificial Sequence: Synthetic oligonucleotide
cacagcagucaaauacauccagugaag

SEQ ID NO: 45259 - RNA, 27 nt, Artificial Sequence
  Description of Artificial Sequence: Synthetic oligonucleotide
gucucucaucuccuccucuucccuguc

SEQ ID NO: 45260 - RNA, 27 nt, Artificial Sequence
  Description of Artificial Sequence: Synthetic oligonucleotide
ccaagugggacaaaaaaaagaucaugc

SEQ ID NO: 45261 - RNA, 14 nt, Artificial Sequence
  Description of Artificial Sequence: Synthetic oligonucleotide
guauuuugaugagg

SEQ ID NO: 45262 - RNA, 12 nt, Artificial Sequence
  Description of Artificial Sequence: Synthetic oligonucleotide
ggcccagaugau

SEQ ID NO: 45263 - RNA, 14 nt, Artificial Sequence
  Description of Artificial Sequence: Synthetic oligonucleotide
gggaagaaaacuau

SEQ ID NO: 45264 - RNA, 15 nt, Artificial Sequence
  Description of Artificial Sequence: Synthetic oligonucleotide
guuuuaauuuauuuc

SEQ ID NO: 45265 - RNA, 12 nt, Artificial Sequence
  Description of Artificial Sequence: Synthetic oligonucleotide
acguagggaaau

SEQ ID NO: 45266 - RNA, 12 nt, Artificial Sequence
  Description of Artificial Sequence: Synthetic oligonucleotide
ccaggguuuacc

SEQ ID NO: 45267 - RNA, 11 nt, Artificial Sequence
  Description of Artificial Sequence: Synthetic oligonucleotide
agcaagguuua

SEQ ID NO: 45268 - RNA, 12 nt, Artificial Sequence
  Description of Artificial Sequence: Synthetic oligonucleotide
uguauuauguug

SEQ ID NO: 45269 - RNA, 15 nt, Artificial Sequence
  Description of Artificial Sequence: Synthetic oligonucleotide
uuuuaaucuuuguga

SEQ ID NO: 45270 - RNA, 14 nt, Artificial Sequence
  Description of Artificial Sequence: Synthetic oligonucleotide
uuaaucuuugugac

SEQ ID NO: 45271 - RNA, 13 nt, Artificial Sequence
  Description of Artificial Sequence: Synthetic oligonucleotide
gcugcuuaugucu

SEQ ID NO: 45272 - RNA, 14 nt, Artificial Sequence
  Description of Artificial Sequence: Synthetic oligonucleotide
aaguguuucagaag

SEQ ID NO: 45273 - RNA, 13 nt, Artificial Sequence
  Description of Artificial Sequence: Synthetic oligonucleotide
gaccaucaauaag

SEQ ID NO: 45274 - RNA, 13 nt, Artificial Sequence
  Description of Artificial Sequence: Synthetic oligonucleotide
ccaucaauaagga

SEQ ID NO: 45275 - RNA, 14 nt, Artificial Sequence
  Description of Artificial Sequence: Synthetic oligonucleotide
ucaauaaggaagaa

SEQ ID NO: 45276 - RNA, 14 nt, Artificial Sequence
  Description of Artificial Sequence: Synthetic oligonucleotide
aauaaggaagaagc

SEQ ID NO: 45277 - RNA, 13 nt, Artificial Sequence
  Description of Artificial Sequence: Synthetic oligonucleotide
aggaagaagcccu

SEQ ID NO: 45278 - RNA, 13 nt, Artificial Sequence
  Description of Artificial Sequence: Synthetic oligonucleotide
gcauaacuaaagg

SEQ ID NO: 45279 - RNA, 14 nt, Artificial Sequence
  Description of Artificial Sequence: Synthetic oligonucleotide
cauaacuaaaggug

SEQ ID NO: 45280 - RNA, 12 nt, Artificial Sequence
  Description of Artificial Sequence: Synthetic oligonucleotide
cuacaucacgcc

SEQ ID NO: 45281 - RNA, 12 nt, Artificial Sequence
  Description of Artificial Sequence: Synthetic oligonucleotide
acuggauuuaag

SEQ ID NO: 45282 - RNA, 12 nt, Artificial Sequence
  Description of Artificial Sequence: Synthetic oligonucleotide
cuggauuuaagc

SEQ ID NO: 45283 - RNA, 13 nt, Artificial Sequence
  Description of Artificial Sequence: Synthetic oligonucleotide
gauuuaagcagag

SEQ ID NO: 45284 - RNA, 13 nt, Artificial Sequence
  Description of Artificial Sequence: Synthetic oligonucleotide
auuuaagcagagu

SEQ ID NO: 45285 - RNA, 13 nt, Artificial Sequence
  Description of Artificial Sequence: Synthetic oligonucleotide
uuaagcagaguuc

SEQ ID NO: 45286 - RNA, 13 nt, Artificial Sequence
  Description of Artificial Sequence: Synthetic oligonucleotide
uaagcagaguuca

SEQ ID NO: 45287 - RNA, 14 nt, Artificial Sequence
  Description of Artificial Sequence: Synthetic oligonucleotide
agcagaguucaaaa

SEQ ID NO: 45288 - RNA, 12 nt, Artificial Sequence
  Description of Artificial Sequence: Synthetic oligonucleotide
cucagggucuga

SEQ ID NO: 45289 - RNA, 13 nt, Artificial Sequence
  Description of Artificial Sequence: Synthetic oligonucleotide
caagcaacuacau

SEQ ID NO: 45290 - RNA, 12 nt, Artificial Sequence
  Description of Artificial Sequence: Synthetic oligonucleotide
aucaauggcagc

SEQ ID NO: 45291 - RNA, 11 nt, Artificial Sequence
  Description of Artificial Sequence: Synthetic oligonucleotide
uuccagcccac

SEQ ID NO: 45292 - RNA, 12 nt, Artificial Sequence
  Description of Artificial Sequence: Synthetic oligonucleotide
cagcugagaaug

SEQ ID NO: 45293 - RNA, 13 nt, Artificial Sequence
  Description of Artificial Sequence: Synthetic oligonucleotide
aacguaucuccua

SEQ ID NO: 45294 - RNA, 14 nt, Artificial Sequence
  Description of Artificial Sequence: Synthetic oligonucleotide
ccuaaaauaauuuc

SEQ ID NO: 45295 - RNA, 13 nt, Artificial Sequence
  Description of Artificial Sequence: Synthetic oligonucleotide
uggaagauucagc

SEQ ID NO: 45296 - RNA, 12 nt, Artificial Sequence
  Description of Artificial Sequence: Synthetic oligonucleotide
uuaaacucuccu

SEQ ID NO: 45297 - RNA, 12 nt, Artificial Sequence
  Description of Artificial Sequence: Synthetic oligonucleotide
cagccuacaguu

SEQ ID NO: 45298 - RNA, 13 nt, Artificial Sequence
  Description of Artificial Sequence: Synthetic oligonucleotide
guuauguucaguc

SEQ ID NO: 45299 - RNA, 13 nt, Artificial Sequence
  Description of Artificial Sequence: Synthetic oligonucleotide
cacauacaaaaug

SEQ ID NO: 45300 - RNA, 9 nt, Artificial Sequence
  Description of Artificial Sequence: Synthetic oligonucleotide
uccuuuugc

SEQ ID NO: 45301 - RNA, 12 nt, Artificial Sequence
  Description of Artificial Sequence: Synthetic oligonucleotide
ugaccugugaag

SEQ ID NO: 45302 - RNA, 12 nt, Artificial Sequence
  Description of Artificial Sequence: Synthetic oligonucleotide
cuaucucacaca

SEQ ID NO: 45303 - RNA, 13 nt, Artificial Sequence
  Description of Artificial Sequence: Synthetic oligonucleotide
uguccucaauugu

SEQ ID NO: 45304 - RNA, 12 nt, Artificial Sequence
  Description of Artificial Sequence: Synthetic oligonucleotide
aaaccguagcug

SEQ ID NO: 45305 - RNA, 12 nt, Artificial Sequence
  Description of Artificial Sequence: Synthetic oligonucleotide
uagcuggcaagc

SEQ ID NO: 45306 - RNA, 14 nt, Artificial Sequence
  Description of Artificial Sequence: Synthetic oligonucleotide
uuguaugguuaaaa

SEQ ID NO: 45307 - RNA, 14 nt, Artificial Sequence
  Description of Artificial Sequence: Synthetic oligonucleotide
ugguuaaaagaugg

SEQ ID NO: 45308 - RNA, 13 nt, Artificial Sequence
  Description of Artificial Sequence: Synthetic oligonucleotide
cagggaauuauac

SEQ ID NO: 45309 - RNA, 12 nt, Artificial Sequence
  Description of Artificial Sequence: Synthetic oligonucleotide
acaaucuugcug

SEQ ID NO: 45310 - RNA, 13 nt, Artificial Sequence
  Description of Artificial Sequence: Synthetic oligonucleotide
ccaauaaugaaga

SEQ ID NO: 45311 - RNA, 13 nt, Artificial Sequence
  Description of Artificial Sequence: Synthetic oligonucleotide
acuuuggauguuc

SEQ ID NO: 45312 - RNA, 12 nt, Artificial Sequence
  Description of Artificial Sequence: Synthetic oligonucleotide
aaugcuuccacu

SEQ ID NO: 45313 - RNA, 11 nt, Artificial Sequence
  Description of Artificial Sequence: Synthetic oligonucleotide
gagaaaguuug

SEQ ID NO: 45314 - RNA, 11 nt, Artificial Sequence
  Description of Artificial Sequence: Synthetic oligonucleotide
aaagaacuacu

SEQ ID NO: 45315 - RNA, 12 nt, Artificial Sequence
  Description of Artificial Sequence: Synthetic oligonucleotide
uuagaaauacgg

SEQ ID NO: 45316 - RNA, 12 nt, Artificial Sequence
  Description of Artificial Sequence: Synthetic oligonucleotide
aacauggguaca

SEQ ID NO: 45317 - RNA, 14 nt, Artificial Sequence
  Description of Artificial Sequence: Synthetic oligonucleotide
aaagacacagaaga

SEQ ID NO: 45318 - RNA, 11 nt, Artificial Sequence
  Description of Artificial Sequence: Synthetic oligonucleotide
uaguagggagg

SEQ ID NO: 45319 - RNA, 12 nt, Artificial Sequence
  Description of Artificial Sequence: Synthetic oligonucleotide
gccuucugcagc

SEQ ID NO: 45320 - RNA, 10 nt, Artificial Sequence
  Description of Artificial Sequence: Synthetic oligonucleotide
ggucugguac

SEQ ID NO: 45321 - RNA, 12 nt, Artificial Sequence
  Description of Artificial Sequence: Synthetic oligonucleotide
cuaguccuuccg

SEQ ID NO: 45322 - RNA, 12 nt, Artificial Sequence
  Description of Artificial Sequence: Synthetic oligonucleotide
ccagugaauauu

SEQ ID NO: 45323 - RNA, 13 nt, Artificial Sequence
  Description of Artificial Sequence: Synthetic oligonucleotide
augaauucaaguu

SEQ ID NO: 45324 - RNA, 12 nt, Artificial Sequence
  Description of Artificial Sequence: Synthetic oligonucleotide
caggacacagau

SEQ ID NO: 45325 - RNA, 12 nt, Artificial Sequence
  Description of Artificial Sequence: Synthetic oligonucleotide
cucaaagcacag

SEQ ID NO: 45326 - RNA, 10 nt, Artificial Sequence
  Description of Artificial Sequence: Synthetic oligonucleotide
accacugcca

SEQ ID NO: 45327 - RNA, 13 nt, Artificial Sequence
  Description of Artificial Sequence: Synthetic oligonucleotide
gaaacuacuagug

SEQ ID NO: 45328 - RNA, 12 nt, Artificial Sequence
  Description of Artificial Sequence: Synthetic oligonucleotide
aagucggacagc

SEQ ID NO: 45329 - RNA, 13 nt, Artificial Sequence
  Description of Artificial Sequence: Synthetic oligonucleotide
gaaagcgaaaaau

SEQ ID NO: 45330 - RNA, 13 nt, Artificial Sequence
  Description of Artificial Sequence: Synthetic oligonucleotide
cccucugauuuag

SEQ ID NO: 45331 - RNA, 12 nt, Artificial Sequence
  Description of Artificial Sequence: Synthetic oligonucleotide
ugagcuauuuaa

SEQ ID NO: 45332 - RNA, 13 nt, Artificial Sequence
  Description of Artificial Sequence: Synthetic oligonucleotide
aaaaggugaaaaa

SEQ ID NO: 45333 - RNA, 14 nt, Artificial Sequence
  Description of Artificial Sequence: Synthetic oligonucleotide
gaaaaagcacuauu

SEQ ID NO: 45334 - RNA, 12 nt, Artificial Sequence
  Description of Artificial Sequence: Synthetic oligonucleotide
ggcugaaaagaa

SEQ ID NO: 45335 - RNA, 12 nt, Artificial Sequence
  Description of Artificial Sequence: Synthetic oligonucleotide
uaaacccuuaua

SEQ ID NO: 45336 - RNA, 13 nt, Artificial Sequence
  Description of Artificial Sequence: Synthetic oligonucleotide
cauacuauuagcc

SEQ ID NO: 45337 - RNA, 12 nt, Artificial Sequence
  Description of Artificial Sequence: Synthetic oligonucleotide
gacagaagcauu

SEQ ID NO: 45338 - RNA, 14 nt, Artificial Sequence
  Description of Artificial Sequence: Synthetic oligonucleotide
agagcaaauaagau

SEQ ID NO: 45339 - RNA, 14 nt, Artificial Sequence
  Description of Artificial Sequence: Synthetic oligonucleotide
ccaacauuuuucuc

SEQ ID NO: 45340 - RNA, 15 nt, Artificial Sequence
  Description of Artificial Sequence: Synthetic oligonucleotide
uuaaguaugagaaaa

SEQ ID NO: 45341 - RNA, 14 nt, Artificial Sequence
  Description of Artificial Sequence: Synthetic oligonucleotide
caggaauaaagaug

SEQ ID NO: 45342 - RNA, 13 nt, Artificial Sequence
  Description of Artificial Sequence: Synthetic oligonucleotide
aauuugaaugacc

SEQ ID NO: 45343 - RNA, 14 nt, Artificial Sequence
  Description of Artificial Sequence: Synthetic oligonucleotide
auguauaaagauag

SEQ ID NO: 45344 - RNA, 12 nt, Artificial Sequence
  Description of Artificial Sequence: Synthetic oligonucleotide
ggcuguaacuau

SEQ ID NO: 45345 - RNA, 11 nt, Artificial Sequence
  Description of Artificial Sequence: Synthetic oligonucleotide
ucugugaagug

SEQ ID NO: 45346 - RNA, 14 nt, Artificial Sequence
  Description of Artificial Sequence: Synthetic oligonucleotide
ccuuuaaggaaaug

SEQ ID NO: 45347 - RNA, 13 nt, Artificial Sequence
  Description of Artificial Sequence: Synthetic oligonucleotide
aaggauacaaaaa

SEQ ID NO: 45348 - RNA, 12 nt, Artificial Sequence
  Description of Artificial Sequence: Synthetic oligonucleotide
agaugcaauuug

SEQ ID NO: 45349 - RNA, 12 nt, Artificial Sequence
  Description of Artificial Sequence: Synthetic oligonucleotide
guucaaaacgaa

SEQ ID NO: 45350 - RNA, 11 nt, Artificial Sequence
  Description of Artificial Sequence: Synthetic oligonucleotide
gugaaaccuca

SEQ ID NO: 45351 - RNA, 13 nt, Artificial Sequence
  Description of Artificial Sequence: Synthetic oligonucleotide
acgaaagagaagc

SEQ ID NO: 45352 - RNA, 12 nt, Artificial Sequence
  Description of Artificial Sequence: Synthetic oligonucleotide
cuccacaagcgc

SEQ ID NO: 45353 - RNA, 14 nt, Artificial Sequence
  Description of Artificial Sequence: Synthetic oligonucleotide
gagaagauuccaaa

SEQ ID NO: 45354 - RNA, 13 nt, Artificial Sequence
  Description of Artificial Sequence: Synthetic oligonucleotide
aaucuggauucaa

SEQ ID NO: 45355 - RNA, 13 nt, Artificial Sequence
  Description of Artificial Sequence: Synthetic oligonucleotide
agaacagauuuga

SEQ ID NO: 45356 - RNA, 11 nt, Artificial Sequence
  Description of Artificial Sequence: Synthetic oligonucleotide
ccagagcugug

SEQ ID NO: 45357 - RNA, 12 nt, Artificial Sequence
  Description of Artificial Sequence: Synthetic oligonucleotide
ccucagauuguu

SEQ ID NO: 45358 - RNA, 12 nt, Artificial Sequence
  Description of Artificial Sequence: Synthetic oligonucleotide
cuauuuuaauua

SEQ ID NO: 45359 - RNA, 13 nt, Artificial Sequence
  Description of Artificial Sequence: Synthetic oligonucleotide
uuuaauuuauuaa

SEQ ID NO: 45360 - RNA, 12 nt, Artificial Sequence
  Description of Artificial Sequence: Synthetic oligonucleotide
augcaguuugaa

SEQ ID NO: 45361 - RNA, 11 nt, Artificial Sequence
  Description of Artificial Sequence: Synthetic oligonucleotide
caugcugcugg

SEQ ID NO: 45362 - RNA, 13 nt, Artificial Sequence
  Description of Artificial Sequence: Synthetic oligonucleotide
agaugugcauuuc

SEQ ID NO: 45363 - RNA, 12 nt, Artificial Sequence
  Description of Artificial Sequence: Synthetic oligonucleotide
ucaaaaccugug

SEQ ID NO: 45364 - RNA, 11 nt, Artificial Sequence
  Description of Artificial Sequence: Synthetic oligonucleotide
gaaugugggua

SEQ ID NO: 45365 - RNA, 10 nt, Artificial Sequence
  Description of Artificial Sequence: Synthetic oligonucleotide
auguggguag

SEQ ID NO: 45366 - RNA, 13 nt, Artificial Sequence
  Description of Artificial Sequence: Synthetic oligonucleotide
ugaaaaugagcau

SEQ ID NO: 45367 - RNA, 13 nt, Artificial Sequence
  Description of Artificial Sequence: Synthetic oligonucleotide
uugcuuuucaugu

SEQ ID NO: 45368 - RNA, 12 nt, Artificial Sequence
  Description of Artificial Sequence: Synthetic oligonucleotide
uguauuucuaua

SEQ ID NO: 45369 - RNA, 13 nt, Artificial Sequence
  Description of Artificial Sequence: Synthetic oligonucleotide
uuugauuaauguu

SEQ ID NO: 45370 - RNA, 12 nt, Artificial Sequence
  Description of Artificial Sequence: Synthetic oligonucleotide
caacguguauag

SEQ ID NO: 45371 - RNA, 12 nt, Artificial Sequence
  Description of Artificial Sequence: Synthetic oligonucleotide
cauauccuuggc

SEQ ID NO: 45372 - RNA, 13 nt, Artificial Sequence
  Description of Artificial Sequence: Synthetic oligonucleotide
uacuaacaucugg

SEQ ID NO: 45373 - RNA, 11 nt, Artificial Sequence
  Description of Artificial Sequence: Synthetic oligonucleotide
cauaaguugug

SEQ ID NO: 45374 - RNA, 12 nt, Artificial Sequence
  Description of Artificial Sequence: Synthetic oligonucleotide
gcaucauuuugg

SEQ ID NO: 45375 - RNA, 10 nt, Artificial Sequence
  Description of Artificial Sequence: Synthetic oligonucleotide
gcucuucuua

SEQ ID NO: 45376 - RNA, 10 nt, Artificial Sequence
  Description of Artificial Sequence: Synthetic oligonucleotide
agauuagguc

SEQ ID NO: 45377 - RNA, 12 nt, Artificial Sequence
  Description of Artificial Sequence: Synthetic oligonucleotide
auggaauugaaa

SEQ ID NO: 45378 - RNA, 13 nt, Artificial Sequence
  Description of Artificial Sequence: Synthetic oligonucleotide
cacacucauuccu

SEQ ID NO: 45379 - RNA, 12 nt, Artificial Sequence
  Description of Artificial Sequence: Synthetic oligonucleotide
uguagagguaac

SEQ ID NO: 45380 - RNA, 11 nt, Artificial Sequence
  Description of Artificial Sequence: Synthetic oligonucleotide
caaccacaugc

SEQ ID NO: 45381 - RNA, 12 nt, Artificial Sequence
  Description of Artificial Sequence: Synthetic oligonucleotide
ucggaaacaagu

SEQ ID NO: 45382 - RNA, 11 nt, Artificial Sequence
  Description of Artificial Sequence: Synthetic oligonucleotide
acucccaauaa

SEQ ID NO: 45383 - RNA, 13 nt, Artificial Sequence
  Description of Artificial Sequence: Synthetic oligonucleotide
aaugcuaagaaau

SEQ ID NO: 45384 - RNA, 11 nt, Artificial Sequence
  Description of Artificial Sequence: Synthetic oligonucleotide
gucuuucucua

SEQ ID NO: 45385 - RNA, 11 nt, Artificial Sequence
  Description of Artificial Sequence: Synthetic oligonucleotide
ugaauuucagg

SEQ ID NO: 45386 - RNA, 13 nt, Artificial Sequence
  Description of Artificial Sequence: Synthetic oligonucleotide
cgauucccucuca

SEQ ID NO: 45387 - RNA, 11 nt, Artificial Sequence
  Description of Artificial Sequence: Synthetic oligonucleotide
aggaaagugaa

SEQ ID NO: 45388 - RNA, 12 nt, Artificial Sequence
  Description of Artificial Sequence: Synthetic oligonucleotide
gaggcugcaugc

SEQ ID NO: 45389 - RNA, 11 nt, Artificial Sequence
  Description of Artificial Sequence: Synthetic oligonucleotide
ucucugaacag

SEQ ID NO: 45390 - RNA, 12 nt, Artificial Sequence
  Description of Artificial Sequence: Synthetic oligonucleotide
aacuuggcugua

SEQ ID NO: 45391 - RNA, 12 nt, Artificial Sequence
  Description of Artificial Sequence: Synthetic oligonucleotide
agaagccaaaau

SEQ ID NO: 45392 - RNA, 14 nt, Artificial Sequence
  Description of Artificial Sequence: Synthetic oligonucleotide
auuaaaagaagucc

SEQ ID NO: 45393 - RNA, 14 nt, Artificial Sequence
  Description of Artificial Sequence: Synthetic oligonucleotide
gaauccggauuauc

SEQ ID NO: 45394 - RNA, 12 nt, Artificial Sequence
  Description of Artificial Sequence: Synthetic oligonucleotide
aaugugacauca

SEQ ID NO: 45395 - RNA, 13 nt, Artificial Sequence
  Description of Artificial Sequence: Synthetic oligonucleotide
caucaaagcaagu

SEQ ID NO: 45396 - RNA, 11 nt, Artificial Sequence
  Description of Artificial Sequence: Synthetic oligonucleotide
agagagagaaa

SEQ ID NO: 45397 - RNA, 13 nt, Artificial Sequence
  Description of Artificial Sequence: Synthetic oligonucleotide
ucgcuguaguauu

SEQ ID NO: 45398 - RNA, 14 nt, Artificial Sequence
  Description of Artificial Sequence: Synthetic oligonucleotide
cgcuguaguauuua

SEQ ID NO: 45399 - RNA, 13 nt, Artificial Sequence
  Description of Artificial Sequence: Synthetic oligonucleotide
auuuaagcccaua

SEQ ID NO: 45400 - RNA, 15 nt, Artificial Sequence
  Description of Artificial Sequence: Synthetic oligonucleotide
auuaaaauaaacaug

SEQ ID NO: 45401 - RNA, 12 nt, Artificial Sequence
  Description of Artificial Sequence: Synthetic oligonucleotide
cuguucugaucg

SEQ ID NO: 45402 - RNA, 16 nt, Artificial Sequence
  Description of Artificial Sequence: Synthetic oligonucleotide
aaauaauuugaacuuu

SEQ ID NO: 45403 - RNA, 12 nt, Artificial Sequence
  Description of Artificial Sequence: Synthetic oligonucleotide
ugcgaccuuaau

SEQ ID NO: 45404 - RNA, 11 nt, Artificial Sequence
  Description of Artificial Sequence: Synthetic oligonucleotide
cugagaaagcu

SEQ ID NO: 45405 - RNA, 13 nt, Artificial Sequence
  Description of Artificial Sequence: Synthetic oligonucleotide
aguaaagaugcua

SEQ ID NO: 45406 - RNA, 12 nt, Artificial Sequence
  Description of Artificial Sequence: Synthetic oligonucleotide
cugcuuaauugc

SEQ ID NO: 45407 - RNA, 14 nt, Artificial Sequence
  Description of Artificial Sequence: Synthetic oligonucleotide
uaccauaugaauga

SEQ ID NO: 45408 - RNA, 12 nt, Artificial Sequence
  Description of Artificial Sequence: Synthetic oligonucleotide
aacuuucuuauc

SEQ ID NO: 45409 - RNA, 13 nt, Artificial Sequence
  Description of Artificial Sequence: Synthetic oligonucleotide
ccuugcaugacau

SEQ ID NO: 45410 - RNA, 14 nt, Artificial Sequence
  Description of Artificial Sequence: Synthetic oligonucleotide
ugaauuuguauaug

SEQ ID NO: 45411 - RNA, 12 nt, Artificial Sequence
  Description of Artificial Sequence: Synthetic oligonucleotide
gaauccuaguag

SEQ ID NO: 45412 - RNA, 10 nt, Artificial Sequence
  Description of Artificial Sequence: Synthetic oligonucleotide
gaaagggaag

SEQ ID NO: 45413 - RNA, 11 nt, Artificial Sequence
  Description of Artificial Sequence: Synthetic oligonucleotide
uaucggcaugc

SEQ ID NO: 45414 - RNA, 12 nt, Artificial Sequence
  Description of Artificial Sequence: Synthetic oligonucleotide
caccucauagua

SEQ ID NO: 45415 - RNA, 11 nt, Artificial Sequence
  Description of Artificial Sequence: Synthetic oligonucleotide
ccagaauugcc

SEQ ID NO: 45416 - RNA, 11 nt, Artificial Sequence
  Description of Artificial Sequence: Synthetic oligonucleotide
uggugaucugg

SEQ ID NO: 45417 - RNA, 12 nt, Artificial Sequence
  Description of Artificial Sequence: Synthetic oligonucleotide
gaucuggguaau

SEQ ID NO: 45418 - RNA, 12 nt, Artificial Sequence
  Description of Artificial Sequence: Synthetic oligonucleotide
ggaugugaugaa

SEQ ID NO: 45419 - RNA, 12 nt, Artificial Sequence
  Description of Artificial Sequence: Synthetic oligonucleotide
cauuuccacagc

SEQ ID NO: 45420 - RNA, 11 nt, Artificial Sequence
  Description of Artificial Sequence: Synthetic oligonucleotide
acagcuacacc

SEQ ID NO: 45421 - RNA, 12 nt, Artificial Sequence
  Description of Artificial Sequence: Synthetic oligonucleotide
ugcaguucuuac

SEQ ID NO: 45422 - RNA, 12 nt, Artificial Sequence
  Description of Artificial Sequence: Synthetic oligonucleotide
acgagaagaaga

SEQ ID NO: 45423 - RNA, 12 nt, Artificial Sequence
  Description of Artificial Sequence: Synthetic oligonucleotide
cgagaagaagau

SEQ ID NO: 45424 - RNA, 15 nt, Artificial Sequence
  Description of Artificial Sequence: Synthetic oligonucleotide
aagaagaucauuuac

SEQ ID NO: 45425 - RNA, 11 nt, Artificial Sequence
  Description of Artificial Sequence: Synthetic oligonucleotide
agaggaagagg

SEQ ID NO: 45426 - RNA, 12 nt, Artificial Sequence
  Description of Artificial Sequence: Synthetic oligonucleotide
gaggaagaggug

SEQ ID NO: 45427 - RNA, 13 nt, Artificial Sequence
  Description of Artificial Sequence: Synthetic oligonucleotide
cuacuuugagggc

SEQ ID NO: 45428 - RNA, 12 nt, Artificial Sequence
  Description of Artificial Sequence: Synthetic oligonucleotide
agggcaucuccu

SEQ ID NO: 45429 - RNA, 10 nt, Artificial Sequence
  Description of Artificial Sequence: Synthetic oligonucleotide
ggagugauau

SEQ ID NO: 45430 - RNA, 11 nt, Artificial Sequence
  Description of Artificial Sequence: Synthetic oligonucleotide
gagugauaugg

SEQ ID NO: 45431 - RNA, 12 nt, Artificial Sequence
  Description of Artificial Sequence: Synthetic oligonucleotide
ugcaguaaagau

SEQ ID NO: 45432 - RNA, 13 nt, Artificial Sequence
  Description of Artificial Sequence: Synthetic oligonucleotide
aguaaagauccua

SEQ ID NO: 45433 - RNA, 12 nt, Artificial Sequence
  Description of Artificial Sequence: Synthetic oligonucleotide
ugacaaaggaca

SEQ ID NO: 45434 - RNA, 13 nt, Artificial Sequence
  Description of Artificial Sequence: Synthetic oligonucleotide
gcaauugugaccc

SEQ ID NO: 45435 - RNA, 12 nt, Artificial Sequence
  Description of Artificial Sequence: Synthetic oligonucleotide
aacaucauccau

SEQ ID NO: 45436 - RNA, 12 nt, Artificial Sequence
  Description of Artificial Sequence: Synthetic oligonucleotide
ugaaauccaaca

SEQ ID NO: 45437 - RNA, 15 nt, Artificial Sequence
  Description of Artificial Sequence: Synthetic oligonucleotide
aacaauauauuucuc

SEQ ID NO: 45438 - RNA, 14 nt, Artificial Sequence
  Description of Artificial Sequence: Synthetic oligonucleotide
aacaguaaagucac

SEQ ID NO: 45439 - RNA, 14 nt, Artificial Sequence
  Description of Artificial Sequence: Synthetic oligonucleotide
ugugaagaaaguaa

SEQ ID NO: 45440 - RNA, 13 nt, Artificial Sequence
  Description of Artificial Sequence: Synthetic oligonucleotide
cuuccgagccauc

SEQ ID NO: 45441 - RNA, 12 nt, Artificial Sequence
  Description of Artificial Sequence: Synthetic oligonucleotide
aauggagguuga

SEQ ID NO: 45442 - RNA, 12 nt, Artificial Sequence
  Description of Artificial Sequence: Synthetic oligonucleotide
ggagguugaaua

SEQ ID NO: 45443 - RNA, 13 nt, Artificial Sequence
  Description of Artificial Sequence: Synthetic oligonucleotide
auuuugaguuuuc

SEQ ID NO: 45444 - RNA, 12 nt, Artificial Sequence
  Description of Artificial Sequence: Synthetic oligonucleotide
uauccuguuugu

SEQ ID NO: 45445 - RNA, 11 nt, Artificial Sequence
  Description of Artificial Sequence: Synthetic oligonucleotide
ccuguuuguuc

SEQ ID NO: 45446 - RNA, 10 nt, Artificial Sequence
  Description of Artificial Sequence: Synthetic oligonucleotide
cucuacagcc

SEQ ID NO: 45447 - RNA, 12 nt, Artificial Sequence
  Description of Artificial Sequence: Synthetic oligonucleotide
ucuuccauagcu

SEQ ID NO: 45448 - RNA, 12 nt, Artificial Sequence
  Description of Artificial Sequence: Synthetic oligonucleotide
auaaucuuccug

SEQ ID NO: 45449 - RNA, 12 nt, Artificial Sequence
  Description of Artificial Sequence: Synthetic oligonucleotide
uaaucuuccugu

SEQ ID NO: 45450 - RNA, 12 nt, Artificial Sequence
  Description of Artificial Sequence: Synthetic oligonucleotide
cuucaugacuug

SEQ ID NO: 45451 - RNA, 12 nt, Artificial Sequence
  Description of Artificial Sequence: Synthetic oligonucleotide
aagagggagaga

SEQ ID NO: 45452 - RNA, 12 nt, Artificial Sequence
  Description of Artificial Sequence: Synthetic oligonucleotide
cgucuccuacca

SEQ ID NO: 45453 - RNA, 12 nt, Artificial Sequence
  Description of Artificial Sequence: Synthetic oligonucleotide
gaucaaucggcc

SEQ ID NO: 45454 - RNA, 12 nt, Artificial Sequence
  Description of Artificial Sequence: Synthetic oligonucleotide
ggacgaacaucc

SEQ ID NO: 45455 - RNA, 11 nt, Artificial Sequence
  Description of Artificial Sequence: Synthetic oligonucleotide
agggucggaac

SEQ ID NO: 45456 - RNA, 10 nt, Artificial Sequence
  Description of Artificial Sequence: Synthetic oligonucleotide
ucggaaccca

SEQ ID NO: 45457 - RNA, 11 nt, Artificial Sequence
  Description of Artificial Sequence: Synthetic oligonucleotide
acccaagcuua

SEQ ID NO: 45458 - RNA, 14 nt, Artificial Sequence
  Description of Artificial Sequence: Synthetic oligonucleotide
gaacuuuaagcaac

SEQ ID NO: 45459 - RNA, 11 nt, Artificial Sequence
  Description of Artificial Sequence: Synthetic oligonucleotide
acuauucagug

SEQ ID NO: 45460 - RNA, 11 nt, Artificial Sequence
  Description of Artificial Sequence: Synthetic oligonucleotide
cuauucagugg

SEQ ID NO: 45461 - RNA, 13 nt, Artificial Sequence
  Description of Artificial Sequence: Synthetic oligonucleotide
aaacacagauaac

SEQ ID NO: 45462 - RNA, 12 nt, Artificial Sequence
  Description of Artificial Sequence: Synthetic oligonucleotide
cuuaagaaaaga

SEQ ID NO: 45463 - RNA, 12 nt, Artificial Sequence
  Description of Artificial Sequence: Synthetic oligonucleotide
cugaaggagugu

SEQ ID NO: 45464 - RNA, 10 nt, Artificial Sequence
  Description of Artificial Sequence: Synthetic oligonucleotide
ucaccgcggg

SEQ ID NO: 45465 - RNA, 14 nt, Artificial Sequence
  Description of Artificial Sequence: Synthetic oligonucleotide
agcagaaauaagcg

SEQ ID NO: 45466 - RNA, 12 nt, Artificial Sequence
  Description of Artificial Sequence: Synthetic oligonucleotide
aagcgugccguu

SEQ ID NO: 45467 - RNA, 12 nt, Artificial Sequence
  Description of Artificial Sequence: Synthetic oligonucleotide
agaaacagucac

SEQ ID NO: 45468 - RNA, 12 nt, Artificial Sequence
  Description of Artificial Sequence: Synthetic oligonucleotide
agaggaagaagg

SEQ ID NO: 45469 - RNA, 14 nt, Artificial Sequence
  Description of Artificial Sequence: Synthetic oligonucleotide
uguauucaaaauau

SEQ ID NO: 45470 - RNA, 13 nt, Artificial Sequence
  Description of Artificial Sequence: Synthetic oligonucleotide
auuuuccucccuu

SEQ ID NO: 45471 - RNA, 13 nt, Artificial Sequence
  Description of Artificial Sequence: Synthetic oligonucleotide
caaagaaagauag

SEQ ID NO: 45472 - RNA, 12 nt, Artificial Sequence
  Description of Artificial Sequence: Synthetic oligonucleotide
aagaaagauaga

SEQ ID NO: 45473 - RNA, 13 nt, Artificial Sequence
  Description of Artificial Sequence: Synthetic oligonucleotide
gaaagcauuuguu

SEQ ID NO: 45474 - RNA, 13 nt, Artificial Sequence
  Description of Artificial Sequence: Synthetic oligonucleotide
ugaguuaaacgaa

SEQ ID NO: 45475 - RNA, 12 nt, Artificial Sequence
  Description of Artificial Sequence: Synthetic oligonucleotide
acugauacagaa

SEQ ID NO: 45476 - RNA, 12 nt, Artificial Sequence
  Description of Artificial Sequence: Synthetic oligonucleotide
auauuauauaua

SEQ ID NO: 45477 - RNA, 12 nt, Artificial Sequence
  Description of Artificial Sequence: Synthetic oligonucleotide
auuauauauaua

SEQ ID NO: 45478 - RNA, 12 nt, Artificial Sequence
  Description of Artificial Sequence: Synthetic oligonucleotide
ucacuggaugua

SEQ ID NO: 45479 - RNA, 12 nt, Artificial Sequence
  Description of Artificial Sequence: Synthetic oligonucleotide
cagggaagagga

SEQ ID NO: 45480 - RNA, 15 nt, Artificial Sequence
  Description of Artificial Sequence: Synthetic oligonucleotide
augaucuuuuuuuug

SEQ ID NO: 45481 - RNA, 11 nt, Artificial Sequence
  Description of Artificial Sequence: Synthetic oligonucleotide
aguucacggcc

SEQ ID NO: 45482 - RNA, 13 nt, Artificial Sequence
  Description of Artificial Sequence: Synthetic oligonucleotide
caccaucacacca

SEQ ID NO: 45483 - RNA, 11 nt, Artificial Sequence
  Description of Artificial Sequence: Synthetic oligonucleotide
ccugcggguuu

SEQ ID NO: 45484 - RNA, 10 nt, Artificial Sequence
  Description of Artificial Sequence: Synthetic oligonucleotide
auccaguuug

SEQ ID NO: 45485 - RNA, 13 nt, Artificial Sequence
  Description of Artificial Sequence: Synthetic oligonucleotide
guuaaggacuucu

SEQ ID NO: 45486 - RNA, 13 nt, Artificial Sequence
  Description of Artificial Sequence: Synthetic oligonucleotide
cagugggacagag

SEQ ID NO: 45487 - RNA, 14 nt, Artificial Sequence
  Description of Artificial Sequence: Synthetic oligonucleotide
aauuuguuauugug

SEQ ID NO: 45488 - RNA, 13 nt, Artificial Sequence
  Description of Artificial Sequence: Synthetic oligonucleotide
uucaaaugcauuu

SEQ ID NO: 45489 - RNA, 10 nt, Artificial Sequence
  Description of Artificial Sequence: Synthetic oligonucleotide
caggaaagcc

SEQ ID NO: 45490 - RNA, 11 nt, Artificial Sequence
  Description of Artificial Sequence: Synthetic oligonucleotide
aggaaagcccu

SEQ ID NO: 45491 - RNA, 12 nt, Artificial Sequence
  Description of Artificial Sequence: Synthetic oligonucleotide
cccagcauggcc

SEQ ID NO: 45492 - RNA, 11 nt, Artificial Sequence
  Description of Artificial Sequence: Synthetic oligonucleotide
cuucucccuga

SEQ ID NO: 45493 - RNA, 12 nt, Artificial Sequence
  Description of Artificial Sequence: Synthetic oligonucleotide
gaagaagcccuu

SEQ ID NO: 45494 - RNA, 12 nt, Artificial Sequence
  Description of Artificial Sequence: Synthetic oligonucleotide
agaagcccuuca

SEQ ID NO: 45495 - RNA, 11 nt, Artificial Sequence
  Description of Artificial Sequence: Synthetic oligonucleotide
gcccuucagcg

SEQ ID NO: 45496 - RNA, 11 nt, Artificial Sequence
  Description of Artificial Sequence: Synthetic oligonucleotide
ccuucagcggc

SEQ ID NO: 45497 - RNA, 12 nt, Artificial Sequence
  Description of Artificial Sequence: Synthetic oligonucleotide
ucagcggccagu

SEQ ID NO: 45498 - RNA, 12 nt, Artificial Sequence
  Description of Artificial Sequence: Synthetic oligonucleotide
ugaaaagcuccg

SEQ ID NO: 45499 - RNA, 11 nt, Artificial Sequence
  Description of Artificial Sequence: Synthetic oligonucleotide
aaaagcuccgg

SEQ ID NO: 45500 - RNA, 13 nt, Artificial Sequence
  Description of Artificial Sequence: Synthetic oligonucleotide
agucaacagucug

SEQ ID NO: 45501 - RNA, 13 nt, Artificial Sequence
  Description of Artificial Sequence: Synthetic oligonucleotide
cagaguucaaaag

SEQ ID NO: 45502 - RNA, 13 nt, Artificial Sequence
  Description of Artificial Sequence: Synthetic oligonucleotide
agaguucaaaagc

SEQ ID NO: 45503 - RNA, 12 nt, Artificial Sequence
  Description of Artificial Sequence: Synthetic oligonucleotide
uucaaaagcccu

SEQ ID NO: 45504 - RNA, 12 nt, Artificial Sequence
  Description of Artificial Sequence: Synthetic oligonucleotide
ucaaaagcccuu

SEQ ID NO: 45505 - RNA, 12 nt, Artificial Sequence
  Description of Artificial Sequence: Synthetic oligonucleotide
aaaagcccuuca

SEQ ID NO: 45506 - RNA, 12 nt, Artificial Sequence
  Description of Artificial Sequence: Synthetic oligonucleotide
aaagcccuucag

SEQ ID NO: 45507 - RNA, 13 nt, Artificial Sequence
  Description of Artificial Sequence: Synthetic oligonucleotide
gugaagccgcucg

SEQ ID NO: 45508 - RNA, 12 nt, Artificial Sequence
  Description of Artificial Sequence: Synthetic oligonucleotide
cacgccagucaa

SEQ ID NO: 45509 - RNA, 13 nt, Artificial Sequence
  Description of Artificial Sequence: Synthetic oligonucleotide
uucuuggugcgug

SEQ ID NO: 45510 - RNA, 14 nt, Artificial Sequence
  Description of Artificial Sequence: Synthetic oligonucleotide
auuggauucaucag

SEQ ID NO: 45511 - RNA, 13 nt, Artificial Sequence
  Description of Artificial Sequence: Synthetic oligonucleotide
uggaauaccuaag

SEQ ID NO: 45512 - RNA, 12 nt, Artificial Sequence
  Description of Artificial Sequence: Synthetic oligonucleotide
auuugaggcuca

SEQ ID NO: 45513 - RNA, 11 nt, Artificial Sequence
  Description of Artificial Sequence: Synthetic oligonucleotide
ucuacaauugg

SEQ ID NO: 45514 - RNA, 12 nt, Artificial Sequence
  Description of Artificial Sequence: Synthetic oligonucleotide
uaguuaggagcc

SEQ ID NO: 45515 - RNA, 13 nt, Artificial Sequence
  Description of Artificial Sequence: Synthetic oligonucleotide
agucaauauccac

SEQ ID NO: 45516 - RNA, 13 nt, Artificial Sequence
  Description of Artificial Sequence: Synthetic oligonucleotide
auguucagucaca

SEQ ID NO: 45517 - RNA, 12 nt, Artificial Sequence
  Description of Artificial Sequence: Synthetic oligonucleotide
acacacacauac

SEQ ID NO: 45518 - RNA, 12 nt, Artificial Sequence
  Description of Artificial Sequence: Synthetic oligonucleotide
uuccuuuugcuu

SEQ ID NO: 45519 - RNA, 16 nt, Artificial Sequence
  Description of Artificial Sequence: Synthetic oligonucleotide
uuuuaaaguaauuuuu

SEQ ID NO: 45520 - RNA, 13 nt, Artificial Sequence
  Description of Artificial Sequence: Synthetic oligonucleotide
caacagucaaugg

SEQ ID NO: 45521 - RNA, 13 nt, Artificial Sequence
  Description of Artificial Sequence: Synthetic oligonucleotide
ucgacaaaccaau

SEQ ID NO: 45522 - RNA, 12 nt, Artificial Sequence
  Description of Artificial Sequence: Synthetic oligonucleotide
acugcuaccacu

SEQ ID NO: 45523 - RNA, 13 nt, Artificial Sequence
  Description of Artificial Sequence: Synthetic oligonucleotide
gcaagcggucuua

SEQ ID NO: 45524 - RNA, 13 nt, Artificial Sequence
  Description of Artificial Sequence: Synthetic oligonucleotide
ggucuuaccggcu

SEQ ID NO: 45525 - RNA, 11 nt, Artificial Sequence
  Description of Artificial Sequence: Synthetic oligonucleotide
gauggguuacc

SEQ ID NO: 45526 - RNA, 11 nt, Artificial Sequence
  Description of Artificial Sequence: Synthetic oligonucleotide
guuaccugcga

SEQ ID NO: 45527 - RNA, 12 nt, Artificial Sequence
  Description of Artificial Sequence: Synthetic oligonucleotide
aaucuugcugag

SEQ ID NO: 45528 - RNA, 13 nt, Artificial Sequence
  Description of Artificial Sequence: Synthetic oligonucleotide
agcauaaaacagu

SEQ ID NO: 45529 - RNA, 12 nt, Artificial Sequence
  Description of Artificial Sequence: Synthetic oligonucleotide
guccuuuauccu

SEQ ID NO: 45530 - RNA, 12 nt, Artificial Sequence
  Description of Artificial Sequence: Synthetic oligonucleotide
caacgcaaguug

SEQ ID NO: 45531 - RNA, 13 nt, Artificial Sequence
  Description of Artificial Sequence: Synthetic oligonucleotide
aaacugaaaccau

SEQ ID NO: 45532 - RNA, 14 nt, Artificial Sequence
  Description of Artificial Sequence: Synthetic oligonucleotide
acuuuguuaaauau

SEQ ID NO: 45533 - RNA, 14 nt, Artificial Sequence
  Description of Artificial Sequence: Synthetic oligonucleotide
guauauuaaaaguu

SEQ ID NO: 45534 - RNA, 13 nt, Artificial Sequence
  Description of Artificial Sequence: Synthetic oligonucleotide
guuuugacuuaac

SEQ ID NO: 45535 - RNA, 13 nt, Artificial Sequence
  Description of Artificial Sequence: Synthetic oligonucleotide
gcaaacucagcac

SEQ ID NO: 45536 - RNA, 11 nt, Artificial Sequence
  Description of Artificial Sequence: Synthetic oligonucleotide
ugcugaccuca

SEQ ID NO: 45537 - RNA, 14 nt, Artificial Sequence
  Description of Artificial Sequence: Synthetic oligonucleotide
uuuauucagaucgc

SEQ ID NO: 45538 - RNA, 13 nt, Artificial Sequence
  Description of Artificial Sequence: Synthetic oligonucleotide
aggguucugggau

SEQ ID NO: 45539 - RNA, 15 nt, Artificial Sequence
  Description of Artificial Sequence: Synthetic oligonucleotide
auauuggaaauuaug

SEQ ID NO: 45540 - RNA, 13 nt, Artificial Sequence
  Description of Artificial Sequence: Synthetic oligonucleotide
auggaagcacuag

SEQ ID NO: 45541 - RNA, 13 nt, Artificial Sequence
  Description of Artificial Sequence: Synthetic oligonucleotide
guuuuuaugugga

SEQ ID NO: 45542 - RNA, 12 nt, Artificial Sequence
  Description of Artificial Sequence: Synthetic oligonucleotide
ggaauugguaga

SEQ ID NO: 45543 - RNA, 13 nt, Artificial Sequence
  Description of Artificial Sequence: Synthetic oligonucleotide
uuagacuuggaga

SEQ ID NO: 45544 - RNA, 13 nt, Artificial Sequence
  Description of Artificial Sequence: Synthetic oligonucleotide
uuacaguauucca

SEQ ID NO: 45545 - RNA, 15 nt, Artificial Sequence
  Description of Artificial Sequence: Synthetic oligonucleotide
ccacugaugaauuaa

SEQ ID NO: 45546 - RNA, 12 nt, Artificial Sequence
  Description of Artificial Sequence: Synthetic oligonucleotide
ccacaucaucac

SEQ ID NO: 45547 - RNA, 13 nt, Artificial Sequence
  Description of Artificial Sequence: Synthetic oligonucleotide
cucaccaaacaga

SEQ ID NO: 45548 - RNA, 12 nt, Artificial Sequence
  Description of Artificial Sequence: Synthetic oligonucleotide
ggaacaugaugg

SEQ ID NO: 45549 - RNA, 12 nt, Artificial Sequence
  Description of Artificial Sequence: Synthetic oligonucleotide
cauguagacugc

SEQ ID NO: 45550 - RNA, 13 nt, Artificial Sequence
  Description of Artificial Sequence: Synthetic oligonucleotide
ggaucuauuuaug

SEQ ID NO: 45551 - RNA, 12 nt, Artificial Sequence
  Description of Artificial Sequence: Synthetic oligonucleotide
gcacuauuauca

SEQ ID NO: 45552 - RNA, 11 nt, Artificial Sequence
  Description of Artificial Sequence: Synthetic oligonucleotide
aucaguucugc

SEQ ID NO: 45553 - RNA, 13 nt, Artificial Sequence
  Description of Artificial Sequence: Synthetic oligonucleotide
agauuaaaccuac

SEQ ID NO: 45554 - RNA, 13 nt, Artificial Sequence
  Description of Artificial Sequence: Synthetic oligonucleotide
auaaaauccuucu

SEQ ID NO: 45555 - RNA, 12 nt, Artificial Sequence
  Description of Artificial Sequence: Synthetic oligonucleotide
aaugcuguagac

SEQ ID NO: 45556 - RNA, 13 nt, Artificial Sequence
  Description of Artificial Sequence: Synthetic oligonucleotide
uugauaggaauag

SEQ ID NO: 45557 - RNA, 11 nt, Artificial Sequence
  Description of Artificial Sequence: Synthetic oligonucleotide
aauggcccuga

SEQ ID NO: 45558 - RNA, 11 nt, Artificial Sequence
  Description of Artificial Sequence: Synthetic oligonucleotide
uuccucaagca

SEQ ID NO: 45559 - RNA, 10 nt, Artificial Sequence
  Description of Artificial Sequence: Synthetic oligonucleotide
guucagccca

SEQ ID NO: 45560 - RNA, 11 nt, Artificial Sequence
  Description of Artificial Sequence: Synthetic oligonucleotide
gcugcugaacc

SEQ ID NO: 45561 - RNA, 12 nt, Artificial Sequence
  Description of Artificial Sequence: Synthetic oligonucleotide
aaguucucuuca

SEQ ID NO: 45562 - RNA, 11 nt, Artificial Sequence
  Description of Artificial Sequence: Synthetic oligonucleotide
ccagccuagag

SEQ ID NO: 45563 - RNA, 13 nt, Artificial Sequence
  Description of Artificial Sequence: Synthetic oligonucleotide
cucugugaagugu

SEQ ID NO: 45564 - RNA, 14 nt, Artificial Sequence
  Description of Artificial Sequence: Synthetic oligonucleotide
ugagaaaauuucaa

SEQ ID NO: 45565 - RNA, 11 nt, Artificial Sequence
  Description of Artificial Sequence: Synthetic oligonucleotide
aauccuccuga

SEQ ID NO: 45566 - RNA, 12 nt, Artificial Sequence
  Description of Artificial Sequence: Synthetic oligonucleotide
gugacaucauau

SEQ ID NO: 45567 - RNA, 13 nt, Artificial Sequence
  Description of Artificial Sequence: Synthetic oligonucleotide
aaucuucaucaua

SEQ ID NO: 45568 - RNA, 13 nt, Artificial Sequence
  Description of Artificial Sequence: Synthetic oligonucleotide
gacuagcuauuaa

SEQ ID NO: 45569 - RNA, 14 nt, Artificial Sequence
  Description of Artificial Sequence: Synthetic oligonucleotide
ucucuacuaaaaau

SEQ ID NO: 45570 - RNA, 12 nt, Artificial Sequence
  Description of Artificial Sequence: Synthetic oligonucleotide
ucuaucucgccu

SEQ ID NO: 45571 - RNA, 13 nt, Artificial Sequence
  Description of Artificial Sequence: Synthetic oligonucleotide
cuucgguccaguu

SEQ ID NO: 45572 - RNA, 11 nt, Artificial Sequence
  Description of Artificial Sequence: Synthetic oligonucleotide
gauguagccgc

SEQ ID NO: 45573 - RNA, 12 nt, Artificial Sequence
  Description of Artificial Sequence: Synthetic oligonucleotide
ugaggagacuug

SEQ ID NO: 45574 - RNA, 12 nt, Artificial Sequence
  Description of Artificial Sequence: Synthetic oligonucleotide
gaguagugagga

SEQ ID NO: 45575 - RNA, 14 nt, Artificial Sequence
  Description of Artificial Sequence: Synthetic oligonucleotide
cagaugaguacaaa

SEQ ID NO: 45576 - RNA, 13 nt, Artificial Sequence
  Description of Artificial Sequence: Synthetic oligonucleotide
guuguuaaugggc

SEQ ID NO: 45577 - RNA, 13 nt, Artificial Sequence
  Description of Artificial Sequence: Synthetic oligonucleotide
uuuuuaauuuauu

SEQ ID NO: 45578 - RNA, 12 nt, Artificial Sequence
  Description of Artificial Sequence: Synthetic oligonucleotide
uauuuaaauaug

SEQ ID NO: 45579 - RNA, 13 nt, Artificial Sequence
  Description of Artificial Sequence: Synthetic oligonucleotide
uauccuuuguuuc

SEQ ID NO: 45580 - RNA, 14 nt, Artificial Sequence
  Description of Artificial Sequence: Synthetic oligonucleotide
cgucuaaguguuug

SEQ ID NO: 45581 - RNA, 12 nt, Artificial Sequence
  Description of Artificial Sequence: Synthetic oligonucleotide
accugugacaaa

SEQ ID NO: 45582 - RNA, 13 nt, Artificial Sequence
  Description of Artificial Sequence: Synthetic oligonucleotide
ccaggcugaauua

SEQ ID NO: 45583 - RNA, 14 nt, Artificial Sequence
  Description of Artificial Sequence: Synthetic oligonucleotide
gucauucuuacaau

SEQ ID NO: 45584 - RNA, 15 nt, Artificial Sequence
  Description of Artificial Sequence: Synthetic oligonucleotide
ucauucuuacaauug

SEQ ID NO: 45585 - RNA, 12 nt, Artificial Sequence
  Description of Artificial Sequence: Synthetic oligonucleotide
cagagaguguac

SEQ ID NO: 45586 - RNA, 12 nt, Artificial Sequence
  Description of Artificial Sequence: Synthetic oligonucleotide
agaacucagcag

SEQ ID NO: 45587 - RNA, 13 nt, Artificial Sequence
  Description of Artificial Sequence: Synthetic oligonucleotide
uuuauuuucagua

SEQ ID NO: 45588 - RNA, 12 nt, Artificial Sequence
  Description of Artificial Sequence: Synthetic oligonucleotide
ucuuaaauggaa

SEQ ID NO: 45589 - RNA, 13 nt, Artificial Sequence
  Description of Artificial Sequence: Synthetic oligonucleotide
ugccuaaaauugu

SEQ ID NO: 45590 - RNA, 12 nt, Artificial Sequence
  Description of Artificial Sequence: Synthetic oligonucleotide
agacugugagcu

SEQ ID NO: 45591 - RNA, 14 nt, Artificial Sequence
  Description of Artificial Sequence: Synthetic oligonucleotide
ugcuuuuuauuaau

SEQ ID NO: 45592 - RNA, 13 nt, Artificial Sequence
  Description of Artificial Sequence: Synthetic oligonucleotide
cucuucuuacauu

SEQ ID NO: 45593 - RNA, 15 nt, Artificial Sequence
  Description of Artificial Sequence: Synthetic oligonucleotide
cauuuguaaaaaugu

SEQ ID NO: 45594 - RNA, 15 nt, Artificial Sequence
  Description of Artificial Sequence: Synthetic oligonucleotide
aucuuaauucauauu

SEQ ID NO: 45595 - RNA, 13 nt, Artificial Sequence
  Description of Artificial Sequence: Synthetic oligonucleotide
gaacuaaucauga

SEQ ID NO: 45596 - RNA, 12 nt, Artificial Sequence
  Description of Artificial Sequence: Synthetic oligonucleotide
ucugcucuuggg

SEQ ID NO: 45597 - RNA, 13 nt, Artificial Sequence
  Description of Artificial Sequence: Synthetic oligonucleotide
caguagcuuugag

SEQ ID NO: 45598 - RNA, 14 nt, Artificial Sequence
  Description of Artificial Sequence: Synthetic oligonucleotide
cacguaauauuuca

SEQ ID NO: 45599 - RNA, 13 nt, Artificial Sequence
  Description of Artificial Sequence: Synthetic oligonucleotide
uauucucuucacu

SEQ ID NO: 45600 - RNA, 14 nt, Artificial Sequence
  Description of Artificial Sequence: Synthetic oligonucleotide
cuaaugcuaagaaa

SEQ ID NO: 45601 - RNA, 12 nt, Artificial Sequence
  Description of Artificial Sequence: Synthetic oligonucleotide
gcugaaaaucaa

SEQ ID NO: 45602 - RNA, 14 nt, Artificial Sequence
  Description of Artificial Sequence: Synthetic oligonucleotide
aauaugauuacuuu

SEQ ID NO: 45603 - RNA, 14 nt, Artificial Sequence
  Description of Artificial Sequence: Synthetic oligonucleotide
cauuuuguucuaca

SEQ ID NO: 45604 - RNA, 12 nt, Artificial Sequence
  Description of Artificial Sequence: Synthetic oligonucleotide
cccgggacucuc

SEQ ID NO: 45605 - RNA, 14 nt, Artificial Sequence
  Description of Artificial Sequence: Synthetic oligonucleotide
ccuuuaaaguaaag

SEQ ID NO: 45606 - RNA, 13 nt, Artificial Sequence
  Description of Artificial Sequence: Synthetic oligonucleotide
ucuggaagccugg

SEQ ID NO: 45607 - RNA, 14 nt, Artificial Sequence
  Description of Artificial Sequence: Synthetic oligonucleotide
aaaacaaaagagag

SEQ ID NO: 45608 - RNA, 13 nt, Artificial Sequence
  Description of Artificial Sequence: Synthetic oligonucleotide
aucaguuaugccg

SEQ ID NO: 45609 - RNA, 13 nt, Artificial Sequence
  Description of Artificial Sequence: Synthetic oligonucleotide
uaaaagaagucca

SEQ ID NO: 45610 - RNA, 11 nt, Artificial Sequence
  Description of Artificial Sequence: Synthetic oligonucleotide
aggugagguua

SEQ ID NO: 45611 - RNA, 11 nt, Artificial Sequence
  Description of Artificial Sequence: Synthetic oligonucleotide
gggaagaggac

SEQ ID NO: 45612 - RNA, 13 nt, Artificial Sequence
  Description of Artificial Sequence: Synthetic oligonucleotide
aagcaaguauugu

SEQ ID NO: 45613 - RNA, 12 nt, Artificial Sequence
  Description of Artificial Sequence: Synthetic oligonucleotide
auuguagcacuc

SEQ ID NO: 45614 - RNA, 14 nt, Artificial Sequence
  Description of Artificial Sequence: Synthetic oligonucleotide
acaaaaccacaaau

SEQ ID NO: 45615 - RNA, 12 nt, Artificial Sequence
  Description of Artificial Sequence: Synthetic oligonucleotide
uaagcccauaca

SEQ ID NO: 45616 - RNA, 11 nt, Artificial Sequence
  Description of Artificial Sequence: Synthetic oligonucleotide
agcccauacag

SEQ ID NO: 45617 - RNA, 12 nt, Artificial Sequence
  Description of Artificial Sequence: Synthetic oligonucleotide
cagaaaccuucc

SEQ ID NO: 45618 - RNA, 10 nt, Artificial Sequence
  Description of Artificial Sequence: Synthetic oligonucleotide
guauaccuac

SEQ ID NO: 45619 - RNA, 13 nt, Artificial Sequence
  Description of Artificial Sequence: Synthetic oligonucleotide
gccaguuuucgga

SEQ ID NO: 45620 - RNA, 9 nt, Artificial Sequence
  Description of Artificial Sequence: Synthetic oligonucleotide
ggaacaggg

SEQ ID NO: 45621 - RNA, 13 nt, Artificial Sequence
  Description of Artificial Sequence: Synthetic oligonucleotide
uuaacuuuccagu

SEQ ID NO: 45622 - RNA, 14 nt, Artificial Sequence
  Description of Artificial Sequence: Synthetic oligonucleotide
aaaguuugguuuug

SEQ ID NO: 45623 - RNA, 12 nt, Artificial Sequence
  Description of Artificial Sequence: Synthetic oligonucleotide
cuucccacugua

SEQ ID NO: 45624 - RNA, 13 nt, Artificial Sequence
  Description of Artificial Sequence: Synthetic oligonucleotide
ugauaccauauga

SEQ ID NO: 45625 - RNA, 11 nt, Artificial Sequence
  Description of Artificial Sequence: Synthetic oligonucleotide
aacaugggcug

SEQ ID NO: 45626 - RNA, 13 nt, Artificial Sequence
  Description of Artificial Sequence: Synthetic oligonucleotide
caacuuuuucaua

SEQ ID NO: 45627 - RNA, 12 nt, Artificial Sequence
  Description of Artificial Sequence: Synthetic oligonucleotide
caugaggccgga

SEQ ID NO: 45628 - RNA, 11 nt, Artificial Sequence
  Description of Artificial Sequence: Synthetic oligonucleotide
acugcauuugu

SEQ ID NO: 45629 - RNA, 13 nt, Artificial Sequence
  Description of Artificial Sequence: Synthetic oligonucleotide
aauguuuacuacc

SEQ ID NO: 45630 - RNA, 15 nt, Artificial Sequence
  Description of Artificial Sequence: Synthetic oligonucleotide
aauuuuuugaugaaa

SEQ ID NO: 45631 - RNA, 14 nt, Artificial Sequence
  Description of Artificial Sequence: Synthetic oligonucleotide
cagugugugaauuu

SEQ ID NO: 45632 - RNA, 13 nt, Artificial Sequence
  Description of Artificial Sequence: Synthetic oligonucleotide
gagcaauguaugu

SEQ ID NO: 45633 - RNA, 14 nt, Artificial Sequence
  Description of Artificial Sequence: Synthetic oligonucleotide
aaagcacauauaua

SEQ ID NO: 45634 - RNA, 14 nt, Artificial Sequence
  Description of Artificial Sequence: Synthetic oligonucleotide
guaauaguuucucc

SEQ ID NO: 45635 - RNA, 13 nt, Artificial Sequence
  Description of Artificial Sequence: Synthetic oligonucleotide
aguuucuccaaau

SEQ ID NO: 45636 - RNA, 13 nt, Artificial Sequence
  Description of Artificial Sequence: Synthetic oligonucleotide
uacuuccuagaaa

SEQ ID NO: 45637 - RNA, 13 nt, Artificial Sequence
  Description of Artificial Sequence: Synthetic oligonucleotide
uacaccauauaug

SEQ ID NO: 45638 - RNA, 14 nt, Artificial Sequence
  Description of Artificial Sequence: Synthetic oligonucleotide
auauaugaauggag

SEQ ID NO: 45639 - RNA, 13 nt, Artificial Sequence
  Description of Artificial Sequence: Synthetic oligonucleotide
acgagaagaagau

SEQ ID NO: 45640 - RNA, 13 nt, Artificial Sequence
  Description of Artificial Sequence: Synthetic oligonucleotide
ucauuuacaggga

SEQ ID NO: 45641 - RNA, 13 nt, Artificial Sequence
  Description of Artificial Sequence: Synthetic oligonucleotide
cauuuacagggac

SEQ ID NO: 45642 - RNA, 10 nt, Artificial Sequence
  Description of Artificial Sequence: Synthetic oligonucleotide
agggaccuga

SEQ ID NO: 45643 - RNA, 14 nt, Artificial Sequence
  Description of Artificial Sequence: Synthetic oligonucleotide
uguuugacugcauc

SEQ ID NO: 45644 - RNA, 13 nt, Artificial Sequence
  Description of Artificial Sequence: Synthetic oligonucleotide
uuugacugcaucg

SEQ ID NO: 45645 - RNA, 12 nt, Artificial Sequence
  Description of Artificial Sequence: Synthetic oligonucleotide
gaguucacaggg

SEQ ID NO: 45646 - RNA, 13 nt, Artificial Sequence
  Description of Artificial Sequence: Synthetic oligonucleotide
ggcaccucugucc

SEQ ID NO: 45647 - RNA, 15 nt, Artificial Sequence
  Description of Artificial Sequence: Synthetic oligonucleotide
gguuugucuuuuuaa

SEQ ID NO: 45648 - RNA, 14 nt, Artificial Sequence
  Description of Artificial Sequence: Synthetic oligonucleotide
uuugucuuuuuaag

SEQ ID NO: 45649 - RNA, 13 nt, Artificial Sequence
  Description of Artificial Sequence: Synthetic oligonucleotide
ccuaaagguuguc

SEQ ID NO: 45650 - RNA, 12 nt, Artificial Sequence
  Description of Artificial Sequence: Synthetic oligonucleotide
aagguugucgac

SEQ ID NO: 45651 - RNA, 13 nt, Artificial Sequence
  Description of Artificial Sequence: Synthetic oligonucleotide
accuggcaauugu

SEQ ID NO: 45652 - RNA, 12 nt, Artificial Sequence
  Description of Artificial Sequence: Synthetic oligonucleotide
aguggugcgagg

SEQ ID NO: 45653 - RNA, 13 nt, Artificial Sequence
  Description of Artificial Sequence: Synthetic oligonucleotide
agagacaugaaau

SEQ ID NO: 45654 - RNA, 13 nt, Artificial Sequence
  Description of Artificial Sequence: Synthetic oligonucleotide
auauauuucucca

SEQ ID NO: 45655 - RNA, 10 nt, Artificial Sequence
  Description of Artificial Sequence: Synthetic oligonucleotide
caugaaggcu

SEQ ID NO: 45656 - RNA, 11 nt, Artificial Sequence
  Description of Artificial Sequence: Synthetic oligonucleotide
gcuggaguggu

SEQ ID NO: 45657 - RNA, 11 nt, Artificial Sequence
  Description of Artificial Sequence: Synthetic oligonucleotide
aggaagagagg

SEQ ID NO: 45658 - RNA, 12 nt, Artificial Sequence
  Description of Artificial Sequence: Synthetic oligonucleotide
cuugcaucgggc

SEQ ID NO: 45659 - RNA, 13 nt, Artificial Sequence
  Description of Artificial Sequence: Synthetic oligonucleotide
auauccuacugug

SEQ ID NO: 45660 - RNA, 13 nt, Artificial Sequence
  Description of Artificial Sequence: Synthetic oligonucleotide
uccuacuguguaa

SEQ ID NO: 45661 - RNA, 12 nt, Artificial Sequence
  Description of Artificial Sequence: Synthetic oligonucleotide
ccuuguagugua

SEQ ID NO: 45662 - RNA, 13 nt, Artificial Sequence
  Description of Artificial Sequence: Synthetic oligonucleotide
ucuuuguugauug

SEQ ID NO: 45663 - RNA, 14 nt, Artificial Sequence
  Description of Artificial Sequence: Synthetic oligonucleotide
uuuguugauugaaa

SEQ ID NO: 45664 - RNA, 15 nt, Artificial Sequence
  Description of Artificial Sequence: Synthetic oligonucleotide
uucuuuuucuuccau

SEQ ID NO: 45665 - RNA, 13 nt, Artificial Sequence
  Description of Artificial Sequence: Synthetic oligonucleotide
aaucuuccuucua

SEQ ID NO: 45666 - RNA, 13 nt, Artificial Sequence
  Description of Artificial Sequence: Synthetic oligonucleotide
uugaaugcuucau

SEQ ID NO: 45667 - RNA, 13 nt, Artificial Sequence
  Description of Artificial Sequence: Synthetic oligonucleotide
ugaaugcuucaug

SEQ ID NO: 45668 - RNA, 13 nt, Artificial Sequence
  Description of Artificial Sequence: Synthetic oligonucleotide
aauucuacuuuga

SEQ ID NO: 45669 - RNA, 13 nt, Artificial Sequence
  Description of Artificial Sequence: Synthetic oligonucleotide
agcaacuacagac

SEQ ID NO: 45670 - RNA, 13 nt, Artificial Sequence
  Description of Artificial Sequence: Synthetic oligonucleotide
gaccaaggucaac

SEQ ID NO: 45671 - RNA, 13 nt, Artificial Sequence
  Description of Artificial Sequence: Synthetic oligonucleotide
cgacuaucucgac

SEQ ID NO: 45672 - RNA, 13 nt, Artificial Sequence
  Description of Artificial Sequence: Synthetic oligonucleotide
aaccuucccaaac

SEQ ID NO: 45673 - RNA, 14 nt, Artificial Sequence
  Description of Artificial Sequence: Synthetic oligonucleotide
ccaagcuuagaacu

SEQ ID NO: 45674 - RNA, 15 nt, Artificial Sequence
  Description of Artificial Sequence: Synthetic oligonucleotide
agcuuagaacuuuaa

SEQ ID NO: 45675 - RNA, 11 nt, Artificial Sequence
  Description of Artificial Sequence: Synthetic oligonucleotide
aagaccaccac

SEQ ID NO: 45676 - RNA, 14 nt, Artificial Sequence
  Description of Artificial Sequence: Synthetic oligonucleotide
gcgagaaauaaagu

SEQ ID NO: 45677 - RNA, 14 nt, Artificial Sequence
  Description of Artificial Sequence: Synthetic oligonucleotide
cgagaaauaaaguu

SEQ ID NO: 45678 - RNA, 12 nt, Artificial Sequence
  Description of Artificial Sequence: Synthetic oligonucleotide
aggaaaugaucc

SEQ ID NO: 45679 - RNA, 13 nt, Artificial Sequence
  Description of Artificial Sequence: Synthetic oligonucleotide
gaagaaaugaaac

SEQ ID NO: 45680 - RNA, 13 nt, Artificial Sequence
  Description of Artificial Sequence: Synthetic oligonucleotide
guuuccauccucc

SEQ ID NO: 45681 - RNA, 15 nt, Artificial Sequence
  Description of Artificial Sequence: Synthetic oligonucleotide
acugaaaaucuuuga

SEQ ID NO: 45682 - RNA, 11 nt, Artificial Sequence
  Description of Artificial Sequence: Synthetic oligonucleotide
ugccguucagg

SEQ ID NO: 45683 - RNA, 13 nt, Artificial Sequence
  Description of Artificial Sequence: Synthetic oligonucleotide
caggguccagaag

SEQ ID NO: 45684 - RNA, 13 nt, Artificial Sequence
  Description of Artificial Sequence: Synthetic oligonucleotide
ucaagacugcuug

SEQ ID NO: 45685 - RNA, 13 nt, Artificial Sequence
  Description of Artificial Sequence: Synthetic oligonucleotide
uccaugucuuugg

SEQ ID NO: 45686 - RNA, 11 nt, Artificial Sequence
  Description of Artificial Sequence: Synthetic oligonucleotide
gccugaaacac

SEQ ID NO: 45687 - RNA, 12 nt, Artificial Sequence
  Description of Artificial Sequence: Synthetic oligonucleotide
ucucuguaccuc

SEQ ID NO: 45688 - RNA, 12 nt, Artificial Sequence
  Description of Artificial Sequence: Synthetic oligonucleotide
agcaagacaaga

SEQ ID NO: 45689 - RNA, 13 nt, Artificial Sequence
  Description of Artificial Sequence: Synthetic oligonucleotide
gcaagacaagaaa

SEQ ID NO: 45690 - RNA, 12 nt, Artificial Sequence
  Description of Artificial Sequence: Synthetic oligonucleotide
uguacaagaucc

SEQ ID NO: 45691 - RNA, 12 nt, Artificial Sequence
  Description of Artificial Sequence: Synthetic oligonucleotide
cguacuugcaga

SEQ ID NO: 45692 - RNA, 13 nt, Artificial Sequence
  Description of Artificial Sequence: Synthetic oligonucleotide
cgaucgauacaga

SEQ ID NO: 45693 - RNA, 13 nt, Artificial Sequence
  Description of Artificial Sequence: Synthetic oligonucleotide
uauaaaaauaaau

SEQ ID NO: 45694 - RNA, 13 nt, Artificial Sequence
  Description of Artificial Sequence: Synthetic oligonucleotide
uaaaaauaaauau

SEQ ID NO: 45695 - RNA, 13 nt, Artificial Sequence
  Description of Artificial Sequence: Synthetic oligonucleotide
uuugacugcugug

SEQ ID NO: 45696 - RNA, 13 nt, Artificial Sequence
  Description of Artificial Sequence: Synthetic oligonucleotide
ggagaugagagac

SEQ ID NO: 45697 - RNA, 10 nt, Artificial Sequence
  Description of Artificial Sequence: Synthetic oligonucleotide
ucccacuugg

SEQ ID NO: 45698 - RNA, 10 nt, Artificial Sequence
  Description of Artificial Sequence: Synthetic oligonucleotide
guucacggcc

SEQ ID NO: 45699 - RNA, 12 nt, Artificial Sequence
  Description of Artificial Sequence: Synthetic oligonucleotide
accaucacacca

SEQ ID NO: 45700 - RNA, 10 nt, Artificial Sequence
  Description of Artificial Sequence: Synthetic oligonucleotide
cugcggguuu

SEQ ID NO: 45701 - RNA, 9 nt, Artificial Sequence
  Description of Artificial Sequence: Synthetic oligonucleotide
uccaguuug

SEQ ID NO: 45702 - RNA, 12 nt, Artificial Sequence
  Description of Artificial Sequence: Synthetic oligonucleotide
uuaaggacuucu

SEQ ID NO: 45703 - RNA, 12 nt, Artificial Sequence
  Description of Artificial Sequence: Synthetic oligonucleotide
agugggacagag

SEQ ID NO: 45704 - RNA, 13 nt, Artificial Sequence
  Description of Artificial Sequence: Synthetic oligonucleotide
auuuguuauugug

SEQ ID NO: 45705 - RNA, 12 nt, Artificial Sequence
  Description of Artificial Sequence: Synthetic oligonucleotide
ucaaaugcauuu

SEQ ID NO: 45706 - RNA, 9 nt, Artificial Sequence
  Description of Artificial Sequence: Synthetic oligonucleotide
aggaaagcc

SEQ ID NO: 45707 - RNA, 10 nt, Artificial Sequence
  Description of Artificial Sequence: Synthetic oligonucleotide
ggaaagcccu

SEQ ID NO: 45708 - RNA, 11 nt, Artificial Sequence
  Description of Artificial Sequence: Synthetic oligonucleotide
ccagcauggcc

SEQ ID NO: 45709 - RNA, 10 nt, Artificial Sequence
  Description of Artificial Sequence: Synthetic oligonucleotide
uucucccuga

SEQ ID NO: 45710 - RNA, 11 nt, Artificial Sequence
  Description of Artificial Sequence: Synthetic oligonucleotide
aagaagcccuu

SEQ ID NO: 45711 - RNA, 11 nt, Artificial Sequence
  Description of Artificial Sequence: Synthetic oligonucleotide
gaagcccuuca

SEQ ID NO: 45712 - RNA, 10 nt, Artificial Sequence
  Description of Artificial Sequence: Synthetic oligonucleotide
cccuucagcg

SEQ ID NO: 45713 - RNA, 10 nt, Artificial Sequence
  Description of Artificial Sequence: Synthetic oligonucleotide
cuucagcggc

SEQ ID NO: 45714 - RNA, 11 nt, Artificial Sequence
  Description of Artificial Sequence: Synthetic oligonucleotide
cagcggccagu

SEQ ID NO: 45715 - RNA, 11 nt, Artificial Sequence
  Description of Artificial Sequence: Synthetic oligonucleotide
gaaaagcuccg

SEQ ID NO: 45716 - RNA, 10 nt, Artificial Sequence
  Description of Artificial Sequence: Synthetic oligonucleotide
aaagcuccgg

SEQ ID NO: 45717 - RNA, 12 nt, Artificial Sequence
  Description of Artificial Sequence: Synthetic oligonucleotide
gucaacagucug

SEQ ID NO: 45718 - RNA, 12 nt, Artificial Sequence
  Description of Artificial Sequence: Synthetic oligonucleotide
agaguucaaaag

SEQ ID NO: 45719 - RNA, 12 nt, Artificial Sequence
  Description of Artificial Sequence: Synthetic oligonucleotide
gaguucaaaagc

SEQ ID NO: 45720 - RNA, 11 nt, Artificial Sequence
  Description of Artificial Sequence: Synthetic oligonucleotide
ucaaaagcccu

SEQ ID NO: 45721 - RNA, 11 nt, Artificial Sequence
  Description of Artificial Sequence: Synthetic oligonucleotide
caaaagcccuu

SEQ ID NO: 45722 - RNA, 11 nt, Artificial Sequence
  Description of Artificial Sequence: Synthetic oligonucleotide
aaagcccuuca

SEQ ID NO: 45723 - RNA, 11 nt, Artificial Sequence
  Description of Artificial Sequence: Synthetic oligonucleotide
aagcccuucag

SEQ ID NO: 45724 - RNA, 12 nt, Artificial Sequence
  Description of Artificial Sequence: Synthetic oligonucleotide
ugaagccgcucg

SEQ ID NO: 45725 - RNA, 11 nt, Artificial Sequence
  Description of Artificial Sequence: Synthetic oligonucleotide
acgccagucaa

SEQ ID NO: 45726 - RNA, 12 nt, Artificial Sequence
  Description of Artificial Sequence: Synthetic oligonucleotide
ucuuggugcgug

SEQ ID NO: 45727 - RNA, 13 nt, Artificial Sequence
  Description of Artificial Sequence: Synthetic oligonucleotide
uuggauucaucag

SEQ ID NO: 45728 - RNA, 12 nt, Artificial Sequence
  Description of Artificial Sequence: Synthetic oligonucleotide
ggaauaccuaag

SEQ ID NO: 45729 - RNA, 11 nt, Artificial Sequence
  Description of Artificial Sequence: Synthetic oligonucleotide
uuugaggcuca

SEQ ID NO: 45730 - RNA, 10 nt, Artificial Sequence
  Description of Artificial Sequence: Synthetic oligonucleotide
cuacaauugg

SEQ ID NO: 45731 - RNA, 11 nt, Artificial Sequence
  Description of Artificial Sequence: Synthetic oligonucleotide
aguuaggagcc

SEQ ID NO: 45732 - RNA, 12 nt, Artificial Sequence
  Description of Artificial Sequence: Synthetic oligonucleotide
gucaauauccac

SEQ ID NO: 45733 - RNA, 12 nt, Artificial Sequence
  Description of Artificial Sequence: Synthetic oligonucleotide
uguucagucaca

SEQ ID NO: 45734 - RNA, 11 nt, Artificial Sequence
  Description of Artificial Sequence: Synthetic oligonucleotide
cacacacauac

SEQ ID NO: 45735 - RNA, 11 nt, Artificial Sequence
  Description of Artificial Sequence: Synthetic oligonucleotide
uccuuuugcuu

SEQ ID NO: 45736 - RNA, 15 nt, Artificial Sequence
  Description of Artificial Sequence: Synthetic oligonucleotide
uuuaaaguaauuuuu

SEQ ID NO: 45737 - RNA, 12 nt, Artificial Sequence
  Description of Artificial Sequence: Synthetic oligonucleotide
aacagucaaugg

SEQ ID NO: 45738 - RNA, 12 nt, Artificial Sequence
  Description of Artificial Sequence: Synthetic oligonucleotide
cgacaaaccaau

SEQ ID NO: 45739 - RNA, 11 nt, Artificial Sequence
  Description of Artificial Sequence: Synthetic oligonucleotide
cugcuaccacu

SEQ ID NO: 45740 - RNA, 12 nt, Artificial Sequence
  Description of Artificial Sequence: Synthetic oligonucleotide
caagcggucuua

SEQ ID NO: 45741 - RNA, 12 nt, Artificial Sequence
  Description of Artificial Sequence: Synthetic oligonucleotide
gucuuaccggcu

SEQ ID NO: 45742 - RNA, 10 nt, Artificial Sequence
  Description of Artificial Sequence: Synthetic oligonucleotide
auggguuacc

SEQ ID NO: 45743 - RNA, 10 nt, Artificial Sequence
  Description of Artificial Sequence: Synthetic oligonucleotide
uuaccugcga

SEQ ID NO: 45744 - RNA, 11 nt, Artificial Sequence
  Description of Artificial Sequence: Synthetic oligonucleotide
aucuugcugag

SEQ ID NO: 45745 - RNA, 12 nt, Artificial Sequence
  Description of Artificial Sequence: Synthetic oligonucleotide
gcauaaaacagu

SEQ ID NO: 45746 - RNA, 11 nt, Artificial Sequence
  Description of Artificial Sequence: Synthetic oligonucleotide
uccuuuauccu

SEQ ID NO: 45747 - RNA, 11 nt, Artificial Sequence
  Description of Artificial Sequence: Synthetic oligonucleotide
aacgcaaguug

SEQ ID NO: 45748 - RNA, 12 nt, Artificial Sequence
  Description of Artificial Sequence: Synthetic oligonucleotide
aacugaaaccau

SEQ ID NO: 45749 - RNA, 13 nt, Artificial Sequence
  Description of Artificial Sequence: Synthetic oligonucleotide
cuuuguuaaauau

SEQ ID NO: 45750 - RNA, 13 nt, Artificial Sequence
  Description of Artificial Sequence: Synthetic oligonucleotide
uauauuaaaaguu

SEQ ID NO: 45751 - RNA, 12 nt, Artificial Sequence
  Description of Artificial Sequence: Synthetic oligonucleotide
uuuugacuuaac

SEQ ID NO: 45752 - RNA, 12 nt, Artificial Sequence
  Description of Artificial Sequence: Synthetic oligonucleotide
caaacucagcac

SEQ ID NO: 45753 - RNA, 10 nt, Artificial Sequence
  Description of Artificial Sequence: Synthetic oligonucleotide
gcugaccuca

SEQ ID NO: 45754 - RNA, 13 nt, Artificial Sequence
  Description of Artificial Sequence: Synthetic oligonucleotide
uuauucagaucgc

SEQ ID NO: 45755 - RNA, 12 nt, Artificial Sequence
  Description of Artificial Sequence: Synthetic oligonucleotide
ggguucugggau

SEQ ID NO: 45756 - RNA, 14 nt, Artificial Sequence
  Description of Artificial Sequence: Synthetic oligonucleotide
uauuggaaauuaug

SEQ ID NO: 45757 - RNA, 12 nt, Artificial Sequence
  Description of Artificial Sequence: Synthetic oligonucleotide
uggaagcacuag

SEQ ID NO: 45758 - RNA, 12 nt, Artificial Sequence
  Description of Artificial Sequence: Synthetic oligonucleotide
uuuuuaugugga

SEQ ID NO: 45759 - RNA, 11 nt, Artificial Sequence
  Description of Artificial Sequence: Synthetic oligonucleotide
gaauugguaga

SEQ ID NO: 45760 - RNA, 12 nt, Artificial Sequence
  Description of Artificial Sequence: Synthetic oligonucleotide
uagacuuggaga

SEQ ID NO: 45761 - RNA, 12 nt, Artificial Sequence
  Description of Artificial Sequence: Synthetic oligonucleotide
uacaguauucca

SEQ ID NO: 45762 - RNA, 14 nt, Artificial Sequence
  Description of Artificial Sequence: Synthetic oligonucleotide
cacugaugaauuaa

SEQ ID NO: 45763 - RNA, 11 nt, Artificial Sequence
  Description of Artificial Sequence: Synthetic oligonucleotide
cacaucaucac

SEQ ID NO: 45764 - RNA, 12 nt, Artificial Sequence
  Description of Artificial Sequence: Synthetic oligonucleotide
ucaccaaacaga

SEQ ID NO: 45765 - RNA, 11 nt, Artificial Sequence
  Description of Artificial Sequence: Synthetic oligonucleotide
gaacaugaugg

SEQ ID NO: 45766 - RNA, 11 nt, Artificial Sequence
  Description of Artificial Sequence: Synthetic oligonucleotide
auguagacugc

SEQ ID NO: 45767 - RNA, 12 nt, Artificial Sequence
  Description of Artificial Sequence: Synthetic oligonucleotide
gaucuauuuaug

SEQ ID NO: 45768 - RNA, 11 nt, Artificial Sequence
  Description of Artificial Sequence: Synthetic oligonucleotide
cacuauuauca

SEQ ID NO: 45769 - RNA, 10 nt, Artificial Sequence
  Description of Artificial Sequence: Synthetic oligonucleotide
ucaguucugc

SEQ ID NO: 45770 - RNA, 12 nt, Artificial Sequence
  Description of Artificial Sequence: Synthetic oligonucleotide
gauuaaaccuac

SEQ ID NO: 45771 - RNA, 12 nt, Artificial Sequence
  Description of Artificial Sequence: Synthetic oligonucleotide
uaaaauccuucu

SEQ ID NO: 45772 - RNA, 11 nt, Artificial Sequence
  Description of Artificial Sequence: Synthetic oligonucleotide
augcuguagac

SEQ ID NO: 45773 - RNA, 12 nt, Artificial Sequence
  Description of Artificial Sequence: Synthetic oligonucleotide
ugauaggaauag

SEQ ID NO: 45774 - RNA, 10 nt, Artificial Sequence
  Description of Artificial Sequence: Synthetic oligonucleotide
auggcccuga

SEQ ID NO: 45775 - RNA, 10 nt, Artificial Sequence
  Description of Artificial Sequence: Synthetic oligonucleotide
uccucaagca

SEQ ID NO: 45776 - RNA, 9 nt, Artificial Sequence
  Description of Artificial Sequence: Synthetic oligonucleotide
uucagccca

SEQ ID NO: 45777 - RNA, 10 nt, Artificial Sequence
  Description of Artificial Sequence: Synthetic oligonucleotide
cugcugaacc

SEQ ID NO: 45778 - RNA, 11 nt, Artificial Sequence
  Description of Artificial Sequence: Synthetic oligonucleotide
aguucucuuca

SEQ ID NO: 45779 - RNA, 10 nt, Artificial Sequence
  Description of Artificial Sequence: Synthetic oligonucleotide
cagccuagag

SEQ ID NO: 45780 - RNA, 12 nt, Artificial Sequence
  Description of Artificial Sequence: Synthetic oligonucleotide
ucugugaagugu

SEQ ID NO: 45781 - RNA, 13 nt, Artificial Sequence
  Description of Artificial Sequence: Synthetic oligonucleotide
gagaaaauuucaa

SEQ ID NO: 45782 - RNA, 10 nt, Artificial Sequence
  Description of Artificial Sequence: Synthetic oligonucleotide
auccuccuga

SEQ ID NO: 45783 - RNA, 11 nt, Artificial Sequence
  Description of Artificial Sequence: Synthetic oligonucleotide
ugacaucauau

SEQ ID NO: 45784 - RNA, 12 nt, Artificial Sequence
  Description of Artificial Sequence: Synthetic oligonucleotide
aucuucaucaua

SEQ ID NO: 45785 - RNA, 12 nt, Artificial Sequence
  Description of Artificial Sequence: Synthetic oligonucleotide
acuagcuauuaa

SEQ ID NO: 45786 - RNA, 13 nt, Artificial Sequence
  Description of Artificial Sequence: Synthetic oligonucleotide
cucuacuaaaaau

SEQ ID NO: 45787 - RNA, 11 nt, Artificial Sequence
  Description of Artificial Sequence: Synthetic oligonucleotide
cuaucucgccu

SEQ ID NO: 45788 - RNA, 12 nt, Artificial Sequence
  Description of Artificial Sequence: Synthetic oligonucleotide
uucgguccaguu

SEQ ID NO: 45789 - RNA, 10 nt, Artificial Sequence
  Description of Artificial Sequence: Synthetic oligonucleotide
auguagccgc

SEQ ID NO: 45790 - RNA, 11 nt, Artificial Sequence
  Description of Artificial Sequence: Synthetic oligonucleotide
gaggagacuug

SEQ ID NO: 45791 - RNA, 11 nt, Artificial Sequence
  Description of Artificial Sequence: Synthetic oligonucleotide
aguagugagga

SEQ ID NO: 45792 - RNA, 13 nt, Artificial Sequence
  Description of Artificial Sequence: Synthetic oligonucleotide
agaugaguacaaa

SEQ ID NO: 45793 - RNA, 12 nt, Artificial Sequence
  Description of Artificial Sequence: Synthetic oligonucleotide
uuguuaaugggc

SEQ ID NO: 45794 - RNA, 12 nt, Artificial Sequence
  Description of Artificial Sequence: Synthetic oligonucleotide
uuuuaauuuauu

SEQ ID NO: 45795 - RNA, 11 nt, Artificial Sequence
  Description of Artificial Sequence: Synthetic oligonucleotide
auuuaaauaug

SEQ ID NO: 45796 - RNA, 12 nt, Artificial Sequence
  Description of Artificial Sequence: Synthetic oligonucleotide
auccuuuguuuc

SEQ ID NO: 45797 - RNA, 13 nt, Artificial Sequence
  Description of Artificial Sequence: Synthetic oligonucleotide
gucuaaguguuug

SEQ ID NO: 45798 - RNA, 11 nt, Artificial Sequence
  Description of Artificial Sequence: Synthetic oligonucleotide
ccugugacaaa

SEQ ID NO: 45799 - RNA, 12 nt, Artificial Sequence
  Description of Artificial Sequence: Synthetic oligonucleotide
caggcugaauua

SEQ ID NO: 45800 - RNA, 13 nt, Artificial Sequence
  Description of Artificial Sequence: Synthetic oligonucleotide
ucauucuuacaau

SEQ ID NO: 45801 - RNA, 14 nt, Artificial Sequence
  Description of Artificial Sequence: Synthetic oligonucleotide
cauucuuacaauug

SEQ ID NO: 45802 - RNA, 11 nt, Artificial Sequence
  Description of Artificial Sequence: Synthetic oligonucleotide
agagaguguac

SEQ ID NO: 45803 - RNA, 11 nt, Artificial Sequence
  Description of Artificial Sequence: Synthetic oligonucleotide
gaacucagcag

SEQ ID NO: 45804 - RNA, 12 nt, Artificial Sequence
  Description of Artificial Sequence: Synthetic oligonucleotide
uuauuuucagua

SEQ ID NO: 45805 - RNA, 11 nt, Artificial Sequence
  Description of Artificial Sequence: Synthetic oligonucleotide
cuuaaauggaa

SEQ ID NO: 45806 - RNA, 12 nt, Artificial Sequence
  Description of Artificial Sequence: Synthetic oligonucleotide
gccuaaaauugu

SEQ ID NO: 45807 - RNA, 12 nt, Artificial Sequence
  Description of Artificial Sequence: Synthetic oligonucleotide
acuaacaucugg

SEQ ID NO: 45808 - RNA, 11 nt, Artificial Sequence
  Description of Artificial Sequence: Synthetic oligonucleotide
gacugugagcu

SEQ ID NO: 45809 - RNA, 13 nt, Artificial Sequence
  Description of Artificial Sequence: Synthetic oligonucleotide
gcuuuuuauuaau

SEQ ID NO: 45810 - RNA, 12 nt, Artificial Sequence
  Description of Artificial Sequence: Synthetic oligonucleotide
ucuucuuacauu

SEQ ID NO: 45811 - RNA, 14 nt, Artificial Sequence
  Description of Artificial Sequence: Synthetic oligonucleotide
auuuguaaaaaugu

SEQ ID NO: 45812 - RNA, 14 nt, Artificial Sequence
  Description of Artificial Sequence: Synthetic oligonucleotide
ucuuaauucauauu

SEQ ID NO: 45813 - RNA, 12 nt, Artificial Sequence
  Description of Artificial Sequence: Synthetic oligonucleotide
aacuaaucauga

SEQ ID NO: 45814 - RNA, 11 nt, Artificial Sequence
  Description of Artificial Sequence: Synthetic oligonucleotide
cugcucuuggg

SEQ ID NO: 45815 - RNA, 12 nt, Artificial Sequence
  Description of Artificial Sequence: Synthetic oligonucleotide
aguagcuuugag

SEQ ID NO: 45816 - RNA, 13 nt, Artificial Sequence
  Description of Artificial Sequence: Synthetic oligonucleotide
acguaauauuuca

SEQ ID NO: 45817 - RNA, 12 nt, Artificial Sequence
  Description of Artificial Sequence: Synthetic oligonucleotide
auucucuucacu

SEQ ID NO: 45818 - RNA, 13 nt, Artificial Sequence
  Description of Artificial Sequence: Synthetic oligonucleotide
uaaugcuaagaaa

SEQ ID NO: 45819 - RNA, 11 nt, Artificial Sequence
  Description of Artificial Sequence: Synthetic oligonucleotide
cugaaaaucaa

SEQ ID NO: 45820 - RNA, 13 nt, Artificial Sequence
  Description of Artificial Sequence: Synthetic oligonucleotide
auaugauuacuuu

SEQ ID NO: 45821 - RNA, 13 nt, Artificial Sequence
  Description of Artificial Sequence: Synthetic oligonucleotide
auuuuguucuaca

SEQ ID NO: 45822 - RNA, 11 nt, Artificial Sequence
  Description of Artificial Sequence: Synthetic oligonucleotide
ccgggacucuc

SEQ ID NO: 45823 - RNA, 13 nt, Artificial Sequence
  Description of Artificial Sequence: Synthetic oligonucleotide
cuuuaaaguaaag

SEQ ID NO: 45824 - RNA, 12 nt, Artificial Sequence
  Description of Artificial Sequence: Synthetic oligonucleotide
cuggaagccugg

SEQ ID NO: 45825 - RNA, 13 nt, Artificial Sequence
  Description of Artificial Sequence: Synthetic oligonucleotide
aaacaaaagagag

SEQ ID NO: 45826 - RNA, 12 nt, Artificial Sequence
  Description of Artificial Sequence: Synthetic oligonucleotide
ucaguuaugccg

SEQ ID NO: 45827 - RNA, 12 nt, Artificial Sequence
  Description of Artificial Sequence: Synthetic oligonucleotide
aaaagaagucca

SEQ ID NO: 45828 - RNA, 10 nt, Artificial Sequence
  Description of Artificial Sequence: Synthetic oligonucleotide
ggugagguua

SEQ ID NO: 45829 - RNA, 10 nt, Artificial Sequence
  Description of Artificial Sequence: Synthetic oligonucleotide
ggaagaggac

SEQ ID NO: 45830 - RNA, 12 nt, Artificial Sequence
  Description of Artificial Sequence: Synthetic oligonucleotide
agcaaguauugu

SEQ ID NO: 45831 - RNA, 11 nt, Artificial Sequence
  Description of Artificial Sequence: Synthetic oligonucleotide
uuguagcacuc

SEQ ID NO: 45832 - RNA, 13 nt, Artificial Sequence
  Description of Artificial Sequence: Synthetic oligonucleotide
caaaaccacaaau

SEQ ID NO: 45833 - RNA, 11 nt, Artificial Sequence
  Description of Artificial Sequence: Synthetic oligonucleotide
aagcccauaca

SEQ ID NO: 45834 - RNA, 10 nt, Artificial Sequence
  Description of Artificial Sequence: Synthetic oligonucleotide
gcccauacag

SEQ ID NO: 45835 - RNA, 11 nt, Artificial Sequence
  Description of Artificial Sequence: Synthetic oligonucleotide
agaaaccuucc

SEQ ID NO: 45836 - RNA, 9 nt, Artificial Sequence
  Description of Artificial Sequence: Synthetic oligonucleotide
uauaccuac

SEQ ID NO: 45837 - RNA, 12 nt, Artificial Sequence
  Description of Artificial Sequence: Synthetic oligonucleotide
ccaguuuucgga

SEQ ID NO: 45838 - RNA, 8 nt, Artificial Sequence
  Description of Artificial Sequence: Synthetic oligonucleotide
gaacaggg

SEQ ID NO: 45839 - RNA, 12 nt, Artificial Sequence
  Description of Artificial Sequence: Synthetic oligonucleotide
uaacuuuccagu

SEQ ID NO: 45840 - RNA, 13 nt, Artificial Sequence
  Description of Artificial Sequence: Synthetic oligonucleotide
aaguuugguuuug

SEQ ID NO: 45841 - RNA, 11 nt, Artificial Sequence
  Description of Artificial Sequence: Synthetic oligonucleotide
uucccacugua

SEQ ID NO: 45842 - RNA, 12 nt, Artificial Sequence
  Description of Artificial Sequence: Synthetic oligonucleotide
gauaccauauga

SEQ ID NO: 45843 - RNA, 10 nt, Artificial Sequence
  Description of Artificial Sequence: Synthetic oligonucleotide
acaugggcug

SEQ ID NO: 45844 - RNA, 12 nt, Artificial Sequence
  Description of Artificial Sequence: Synthetic oligonucleotide
aacuuuuucaua

SEQ ID NO: 45845 - RNA, 11 nt, Artificial Sequence
  Description of Artificial Sequence: Synthetic oligonucleotide
augaggccgga

SEQ ID NO: 45846 - RNA, 10 nt, Artificial Sequence
  Description of Artificial Sequence: Synthetic oligonucleotide
cugcauuugu

SEQ ID NO: 45847 - RNA, 12 nt, Artificial Sequence
  Description of Artificial Sequence: Synthetic oligonucleotide
auguuuacuacc

SEQ ID NO: 45848 - RNA, 14 nt, Artificial Sequence
  Description of Artificial Sequence: Synthetic oligonucleotide
auuuuuugaugaaa

SEQ ID NO: 45849 - RNA, 13 nt, Artificial Sequence
  Description of Artificial Sequence: Synthetic oligonucleotide
agugugugaauuu

SEQ ID NO: 45850 - RNA, 12 nt, Artificial Sequence
  Description of Artificial Sequence: Synthetic oligonucleotide
agcaauguaugu

SEQ ID NO: 45851 - RNA, 13 nt, Artificial Sequence
  Description of Artificial Sequence: Synthetic oligonucleotide
aagcacauauaua

SEQ ID NO: 45852 - RNA, 13 nt, Artificial Sequence
  Description of Artificial Sequence: Synthetic oligonucleotide
uaauaguuucucc

SEQ ID NO: 45853 - RNA, 12 nt, Artificial Sequence
  Description of Artificial Sequence: Synthetic oligonucleotide
guuucuccaaau

SEQ ID NO: 45854 - RNA, 12 nt, Artificial Sequence
  Description of Artificial Sequence: Synthetic oligonucleotide
acuuccuagaaa

SEQ ID NO: 45855 - RNA, 12 nt, Artificial Sequence
  Description of Artificial Sequence: Synthetic oligonucleotide
acaccauauaug

SEQ ID NO: 45856 - RNA, 13 nt, Artificial Sequence
  Description of Artificial Sequence: Synthetic oligonucleotide
uauaugaauggag

SEQ ID NO: 45857 - RNA, 12 nt, Artificial Sequence
  Description of Artificial Sequence: Synthetic oligonucleotide
cauuuacaggga

SEQ ID NO: 45858 - RNA, 12 nt, Artificial Sequence
  Description of Artificial Sequence: Synthetic oligonucleotide
auuuacagggac

SEQ ID NO: 45859 - RNA, 9 nt, Artificial Sequence
  Description of Artificial Sequence: Synthetic oligonucleotide
gggaccuga

SEQ ID NO: 45860 - RNA, 13 nt, Artificial Sequence
  Description of Artificial Sequence: Synthetic oligonucleotide
guuugacugcauc

SEQ ID NO: 45861 - RNA, 12 nt, Artificial Sequence
  Description of Artificial Sequence: Synthetic oligonucleotide
uugacugcaucg

SEQ ID NO: 45862 - RNA, 11 nt, Artificial Sequence
  Description of Artificial Sequence: Synthetic oligonucleotide
aguucacaggg

SEQ ID NO: 45863 - RNA, 12 nt, Artificial Sequence
  Description of Artificial Sequence: Synthetic oligonucleotide
gcaccucugucc

SEQ ID NO: 45864 - RNA, 14 nt, Artificial Sequence
  Description of Artificial Sequence: Synthetic oligonucleotide
guuugucuuuuuaa

SEQ ID NO: 45865 - RNA, 13 nt, Artificial Sequence
  Description of Artificial Sequence: Synthetic oligonucleotide
uugucuuuuuaag

SEQ ID NO: 45866 - RNA, 12 nt, Artificial Sequence
  Description of Artificial Sequence: Synthetic oligonucleotide
cuaaagguuguc

SEQ ID NO: 45867 - RNA, 11 nt, Artificial Sequence
  Description of Artificial Sequence: Synthetic oligonucleotide
agguugucgac

SEQ ID NO: 45868 - RNA, 12 nt, Artificial Sequence
  Description of Artificial Sequence: Synthetic oligonucleotide
ccuggcaauugu

SEQ ID NO: 45869 - RNA, 11 nt, Artificial Sequence
  Description of Artificial Sequence: Synthetic oligonucleotide
guggugcgagg

SEQ ID NO: 45870 - RNA, 12 nt, Artificial Sequence
  Description of Artificial Sequence: Synthetic oligonucleotide
gagacaugaaau

SEQ ID NO: 45871 - RNA, 12 nt, Artificial Sequence
  Description of Artificial Sequence: Synthetic oligonucleotide
uauauuucucca

SEQ ID NO: 45872 - RNA, 9 nt, Artificial Sequence
  Description of Artificial Sequence: Synthetic oligonucleotide
augaaggcu

SEQ ID NO: 45873 - RNA, 10 nt, Artificial Sequence
  Description of Artificial Sequence: Synthetic oligonucleotide
cuggaguggu

SEQ ID NO: 45874 - RNA, 10 nt, Artificial Sequence
  Description of Artificial Sequence: Synthetic oligonucleotide
ggaagagagg

SEQ ID NO: 45875 - RNA, 11 nt, Artificial Sequence
  Description of Artificial Sequence: Synthetic oligonucleotide
uugcaucgggc

SEQ ID NO: 45876 - RNA, 12 nt, Artificial Sequence
  Description of Artificial Sequence: Synthetic oligonucleotide
uauccuacugug

SEQ ID NO: 45877 - RNA, 12 nt, Artificial Sequence
  Description of Artificial Sequence: Synthetic oligonucleotide
ccuacuguguaa

SEQ ID NO: 45878 - RNA, 11 nt, Artificial Sequence
  Description of Artificial Sequence: Synthetic oligonucleotide
cuuguagugua

SEQ ID NO: 45879 - RNA, 12 nt, Artificial Sequence
  Description of Artificial Sequence: Synthetic oligonucleotide
cuuuguugauug

SEQ ID NO: 45880 - RNA, 13 nt, Artificial Sequence
  Description of Artificial Sequence: Synthetic oligonucleotide
uuguugauugaaa

SEQ ID NO: 45881 - RNA, 14 nt, Artificial Sequence
  Description of Artificial Sequence: Synthetic oligonucleotide
ucuuuuucuuccau

SEQ ID NO: 45882 - RNA, 12 nt, Artificial Sequence
  Description of Artificial Sequence: Synthetic oligonucleotide
aucuuccuucua

SEQ ID NO: 45883 - RNA, 12 nt, Artificial Sequence
  Description of Artificial Sequence: Synthetic oligonucleotide
ugaaugcuucau

SEQ ID NO: 45884 - RNA, 12 nt, Artificial Sequence
  Description of Artificial Sequence: Synthetic oligonucleotide
gaaugcuucaug

SEQ ID NO: 45885 - RNA, 12 nt, Artificial Sequence
  Description of Artificial Sequence: Synthetic oligonucleotide
auucuacuuuga

SEQ ID NO: 45886 - RNA, 12 nt, Artificial Sequence
  Description of Artificial Sequence: Synthetic oligonucleotide
gcaacuacagac

SEQ ID NO: 45887 - RNA, 12 nt, Artificial Sequence
  Description of Artificial Sequence: Synthetic oligonucleotide
accaaggucaac

SEQ ID NO: 45888 - RNA, 12 nt, Artificial Sequence
  Description of Artificial Sequence: Synthetic oligonucleotide
gacuaucucgac

SEQ ID NO: 45889 - RNA, 12 nt, Artificial Sequence
  Description of Artificial Sequence: Synthetic oligonucleotide
accuucccaaac

SEQ ID NO: 45890 - RNA, 13 nt, Artificial Sequence
  Description of Artificial Sequence: Synthetic oligonucleotide
caagcuuagaacu

SEQ ID NO: 45891 - RNA, 14 nt, Artificial Sequence
  Description of Artificial Sequence: Synthetic oligonucleotide
gcuuagaacuuuaa

SEQ ID NO: 45892 - RNA, 13 nt, Artificial Sequence
  Description of Artificial Sequence: Synthetic oligonucleotide
aacuuuaagcaac

SEQ ID NO: 45893 - RNA, 10 nt, Artificial Sequence
  Description of Artificial Sequence: Synthetic oligonucleotide
agaccaccac

SEQ ID NO: 45894 - RNA, 13 nt, Artificial Sequence
  Description of Artificial Sequence: Synthetic oligonucleotide
cgagaaauaaagu

SEQ ID NO: 45895 - RNA, 13 nt, Artificial Sequence
  Description of Artificial Sequence: Synthetic oligonucleotide
gagaaauaaaguu

SEQ ID NO: 45896 - RNA, 11 nt, Artificial Sequence
  Description of Artificial Sequence: Synthetic oligonucleotide
ggaaaugaucc

SEQ ID NO: 45897 - RNA, 12 nt, Artificial Sequence
  Description of Artificial Sequence: Synthetic oligonucleotide
aagaaaugaaac

SEQ ID NO: 45898 - RNA, 12 nt, Artificial Sequence
  Description of Artificial Sequence: Synthetic oligonucleotide
uuuccauccucc

SEQ ID NO: 45899 - RNA, 14 nt, Artificial Sequence
  Description of Artificial Sequence: Synthetic oligonucleotide
cugaaaaucuuuga

SEQ ID NO: 45900 - RNA, 10 nt, Artificial Sequence
  Description of Artificial Sequence: Synthetic oligonucleotide
gccguucagg

SEQ ID NO: 45901 - RNA, 12 nt, Artificial Sequence
  Description of Artificial Sequence: Synthetic oligonucleotide
aggguccagaag

SEQ ID NO: 45902 - RNA, 12 nt, Artificial Sequence
  Description of Artificial Sequence: Synthetic oligonucleotide
caagacugcuug

SEQ ID NO: 45903 - RNA, 12 nt, Artificial Sequence
  Description of Artificial Sequence: Synthetic oligonucleotide
ccaugucuuugg

SEQ ID NO: 45904 - RNA, 10 nt, Artificial Sequence
  Description of Artificial Sequence: Synthetic oligonucleotide
ccugaaacac

SEQ ID NO: 45905 - RNA, 11 nt, Artificial Sequence
  Description of Artificial Sequence: Synthetic oligonucleotide
cucuguaccuc

SEQ ID NO: 45906 - RNA, 11 nt, Artificial Sequence
  Description of Artificial Sequence: Synthetic oligonucleotide
gcaagacaaga

SEQ ID NO: 45907 - RNA, 12 nt, Artificial Sequence
  Description of Artificial Sequence: Synthetic oligonucleotide
caagacaagaaa

SEQ ID NO: 45908 - RNA, 11 nt, Artificial Sequence
  Description of Artificial Sequence: Synthetic oligonucleotide
guacaagaucc

SEQ ID NO: 45909 - RNA, 11 nt, Artificial Sequence
  Description of Artificial Sequence: Synthetic oligonucleotide
guacuugcaga

SEQ ID NO: 45910 - RNA, 12 nt, Artificial Sequence
  Description of Artificial Sequence: Synthetic oligonucleotide
gaucgauacaga

SEQ ID NO: 45911 - RNA, 12 nt, Artificial Sequence
  Description of Artificial Sequence: Synthetic oligonucleotide
auaaaaauaaau

SEQ ID NO: 45912 - RNA, 12 nt, Artificial Sequence
  Description of Artificial Sequence: Synthetic oligonucleotide
aaaaauaaauau

SEQ ID NO: 45913 - RNA, 12 nt, Artificial Sequence
  Description of Artificial Sequence: Synthetic oligonucleotide
uugacugcugug

SEQ ID NO: 45914 - RNA, 12 nt, Artificial Sequence
  Description of Artificial Sequence: Synthetic oligonucleotide
gagaugagagac

SEQ ID NO: 45915 - RNA, 9 nt, Artificial Sequence
  Description of Artificial Sequence: Synthetic oligonucleotide
cccacuugg

SEQ ID NO: 45916 - RNA, 1125 nt, Homo sapiens
uucugcccucgagcccaccgggaacgaaagagaagcucuaucucgccuccaggagcccagcuaugaacuccuucuccacaagcgccuucgguccaguugccuucucccuggggcugcuccugguguugccugcugccuucccugccccaguacccccaggagaagauuccaaagauguagccgccccacacagacagccacucaccucuucagaacgaauugacaaacaaauucgguacauccucgacggcaucucagcccugagaaaggagacauguaacaagaguaacaugugugaaagcagcaaagaggcacuggcagaaaacaaccugaaccuuccaaagauggcugaaaaagauggaugcuuccaaucuggauucaaugaggagacuugccuggugaaaaucaucacuggucuuuuggaguuugagguauaccuagaguaccuccagaacagauuugagaguagugaggaacaagccagagcugugcagaugaguacaaaaguccugauccaguuccugcagaaaaaggcaaagaaucuagaugcaauaaccaccccugacccaaccacaaaugccagccugcugacgaagcugcaggcacagaaccaguggcugcaggacaugacaacucaucucauucugcgcagcuuuaaggaguuccugcaguccagccugagggcucuucggcaaauguagcaugggcaccucagauuguuguuguuaaugggcauuccuucuucuggucagaaaccuguccacugggcacagaacuuauguuguucucuauggagaacuaaaaguaugagcguuaggacacuauuuuaauuauuuuuaauuuauuaauauuuaaauaugugaagcugaguuaauuuauguaagucauauuuauauuuuuaagaaguaccacuugaaacauuuuauguauuaguuuugaaauaauaauggaaaguggcuaugcaguuugaauauccuuuguuucagagccagaucauuucuuggaaaguguaggcuuaccucaaauaaauggcuaacuuauacauauuuuuaaagaaauauuuauauuguauuuauauaauguauaaaugguuuuuauaccaauaaauggcauuuuaaaaaauuc

SEQ ID NO: 45917 - RNA, 1131 nt, Homo sapiens
cauucugcccucgagcccaccgggaacgaaagagaagcucuaucuccccuccaggagcccagcuaugaacuccuucuccacaagcgccuucgguccaguugccuucucccuggggcugcuccugguguugccugcugccuucccugccccaguacccccaggagaagauuccaaagauguagccgccccacacagacagccacucaccucuucagaacgaauugacaaacaaauucgguacauccucgacggcaucucagcccugagaaaggagacauguaacaagaguaacaugugugaaagcagcaaagaggcacuggcagaaaacaaccugaaccuuccaaagauggcugaaaaagauggaugcuuccaaucuggauucaaugaggagacuugccuggugaaaaucaucacuggucuuuuggaguuugagguauaccuagaguaccuccagaacagauuugagaguagugaggaacaagccagagcugugcagaugaguacaaaaguccugauccaguuccugcagaaaaaggcaaagaaucuagaugcaauaaccaccccugacccaaccacaaaugccagccugcugacgaagcugcaggcacagaaccaguggcugcaggacaugacaacucaucucauucugcgcagcuuuaaggaguuccugcaguccagccugagggcucuucggcaaauguagcaugggcaccucagauuguuguuguuaaugggcauuccuucuucuggucagaaaccuguccacugggcacagaacuuauguuguucucuauggagaacuaaaaguaugagcguuaggacacuauuuuaauuauuuuuaauuuauuaauauuuaaauaugugaagcugaguuaauuuauguaagucauauuuauauuuuuaagaaguaccacuugaaacauuuuauguauuaguuuugaaauaauaauggaaaguggcuaugcaguuugaauauccuuuguuucagagccagaucauuucuuggaaaguguaggcuuaccucaaauaaauggcuaacuuauacauauuuuuaaagaaauauuuauauuguauuuauauaauguauaaaugguuuuuauaccaauaaauggcauuuuaaaaaauucagca

SEQ ID NO: 45918 - RNA, 19 nt, Artificial Sequence
  Description of Artificial Sequence: Synthetic oligonucleotide
uucugcccucgagcccacc

SEQ ID NO: 45919 - RNA, 19 nt, Artificial Sequence
  Description of Artificial Sequence: Synthetic oligonucleotide
cgggaacgaaagagaagcu

SEQ ID NO: 45920 - RNA, 19 nt, Artificial Sequence
  Description of Artificial Sequence: Synthetic oligonucleotide
ucuaucucgccuccaggag

SEQ ID NO: 45921 - RNA, 19 nt, Artificial Sequence
  Description of Artificial Sequence: Synthetic oligonucleotide
gcccagcuaugaacuccuu

SEQ ID NO: 45922 - RNA, 19 nt, Artificial Sequence
  Description of Artificial Sequence: Synthetic oligonucleotide
ucuccacaagcgccuucgg

SEQ ID NO: 45923 - RNA, 19 nt, Artificial Sequence
  Description of Artificial Sequence: Synthetic oligonucleotide
guccaguugccuucucccu

SEQ ID NO: 45924 - RNA, 19 nt, Artificial Sequence
  Description of Artificial Sequence: Synthetic oligonucleotide
uggggcugcuccugguguu

SEQ ID NO: 45925 - RNA, 19 nt, Artificial Sequence
  Description of Artificial Sequence: Synthetic oligonucleotide
ugccugcugccuucccugc

SEQ ID NO: 45926 - RNA, 19 nt, Artificial Sequence
  Description of Artificial Sequence: Synthetic oligonucleotide
ccccaguacccccaggaga

SEQ ID NO: 45927 - RNA, 19 nt, Artificial Sequence
  Description of Artificial Sequence: Synthetic oligonucleotide
aagauuccaaagauguagc

SEQ ID NO: 45928 - RNA, 19 nt, Artificial Sequence
  Description of Artificial Sequence: Synthetic oligonucleotide
ccgccccacacagacagcc

SEQ ID NO: 45929 - RNA, 19 nt, Artificial Sequence
  Description of Artificial Sequence: Synthetic oligonucleotide
cacucaccucuucagaacg

SEQ ID NO: 45930 - RNA, 19 nt, Artificial Sequence
  Description of Artificial Sequence: Synthetic oligonucleotide
gaauugacaaacaaauucg

SEQ ID NO: 45931 - RNA, 19 nt, Artificial Sequence
  Description of Artificial Sequence: Synthetic oligonucleotide
gguacauccucgacggcau

SEQ ID NO: 45932 - RNA, 19 nt, Artificial Sequence
  Description of Artificial Sequence: Synthetic oligonucleotide
ucucagcccugagaaagga

SEQ ID NO: 45933 - RNA, 19 nt, Artificial Sequence
  Description of Artificial Sequence: Synthetic oligonucleotide
agacauguaacaagaguaa

SEQ ID NO: 45934 - RNA, 19 nt, Artificial Sequence
  Description of Artificial Sequence: Synthetic oligonucleotide
acaugugugaaagcagcaa

SEQ ID NO: 45935 - RNA, 19 nt, Artificial Sequence
  Description of Artificial Sequence: Synthetic oligonucleotide
aagaggcacuggcagaaaa

SEQ ID NO: 45936 - RNA, 19 nt, Artificial Sequence
  Description of Artificial Sequence: Synthetic oligonucleotide
acaaccugaaccuuccaaa

SEQ ID NO: 45937 - RNA, 19 nt, Artificial Sequence
  Description of Artificial Sequence: Synthetic oligonucleotide
agauggcugaaaaagaugg

SEQ ID NO: 45938 - RNA, 19 nt, Artificial Sequence
  Description of Artificial Sequence: Synthetic oligonucleotide
gaugcuuccaaucuggauu

SEQ ID NO: 45939 - RNA, 19 nt, Artificial Sequence
  Description of Artificial Sequence: Synthetic oligonucleotide
ucaaugaggagacuugccu

SEQ ID NO: 45940 - RNA, 19 nt, Artificial Sequence
  Description of Artificial Sequence: Synthetic oligonucleotide
uggugaaaaucaucacugg

SEQ ID NO: 45941 - RNA, 19 nt, Artificial Sequence
  Description of Artificial Sequence: Synthetic oligonucleotide
gucuuuuggaguuugaggu

SEQ ID NO: 45942 - RNA, 19 nt, Artificial Sequence
  Description of Artificial Sequence: Synthetic oligonucleotide
uauaccuagaguaccucca

SEQ ID NO: 45943 - RNA, 19 nt, Artificial Sequence
  Description of Artificial Sequence: Synthetic oligonucleotide
agaacagauuugagaguag

SEQ ID NO: 45944 - RNA, 19 nt, Artificial Sequence
  Description of Artificial Sequence: Synthetic oligonucleotide
gugaggaacaagccagagc

SEQ ID NO: 45945 - RNA, 19 nt, Artificial Sequence
  Description of Artificial Sequence: Synthetic oligonucleotide
cugugcagaugaguacaaa

SEQ ID NO: 45946 - RNA, 19 nt, Artificial Sequence
  Description of Artificial Sequence: Synthetic oligonucleotide
aaguccugauccaguuccu

SEQ ID NO: 45947 - RNA, 19 nt, Artificial Sequence
  Description of Artificial Sequence: Synthetic oligonucleotide
ugcagaaaaaggcaaagaa

SEQ ID NO: 45948 - RNA, 19 nt, Artificial Sequence
  Description of Artificial Sequence: Synthetic oligonucleotide
aucuagaugcaauaaccac

SEQ ID NO: 45949 - RNA, 19 nt, Artificial Sequence
  Description of Artificial Sequence: Synthetic oligonucleotide
ccccugacccaaccacaaa

SEQ ID NO: 45950 - RNA, 19 nt, Artificial Sequence
  Description of Artificial Sequence: Synthetic oligonucleotide
augccagccugcugacgaa

SEQ ID NO: 45951 - RNA, 19 nt, Artificial Sequence
  Description of Artificial Sequence: Synthetic oligonucleotide
agcugcaggcacagaacca

SEQ ID NO: 45952 - RNA, 19 nt, Artificial Sequence
  Description of Artificial Sequence: Synthetic oligonucleotide
aguggcugcaggacaugac

SEQ ID NO: 45953 - RNA, 19 nt, Artificial Sequence
  Description of Artificial Sequence: Synthetic oligonucleotide
caacucaucucauucugcg

SEQ ID NO: 45954 - RNA, 19 nt, Artificial Sequence
  Description of Artificial Sequence: Synthetic oligonucleotide
gcagcuuuaaggaguuccu

SEQ ID NO: 45955 - RNA, 19 nt, Artificial Sequence
  Description of Artificial Sequence: Synthetic oligonucleotide
ugcaguccagccugagggc

SEQ ID NO: 45956 - RNA, 19 nt, Artificial Sequence
  Description of Artificial Sequence: Synthetic oligonucleotide
cucuucggcaaauguagca

SEQ ID NO: 45957 - RNA, 19 nt, Artificial Sequence
  Description of Artificial Sequence: Synthetic oligonucleotide
augggcaccucagauuguu

SEQ ID NO: 45958 - RNA, 19 nt, Artificial Sequence
  Description of Artificial Sequence: Synthetic oligonucleotide
uguuguuaaugggcauucc

SEQ ID NO: 45959 - RNA, 19 nt, Artificial Sequence
  Description of Artificial Sequence: Synthetic oligonucleotide
cuucuucuggucagaaacc

SEQ ID NO: 45960 - RNA, 19 nt, Artificial Sequence
  Description of Artificial Sequence: Synthetic oligonucleotide
cuguccacugggcacagaa

SEQ ID NO: 45961 - RNA, 19 nt, Artificial Sequence
  Description of Artificial Sequence: Synthetic oligonucleotide
acuuauguuguucucuaug

SEQ ID NO: 45962 - RNA, 19 nt, Artificial Sequence
  Description of Artificial Sequence: Synthetic oligonucleotide
ggagaacuaaaaguaugag

SEQ ID NO: 45963 - RNA, 19 nt, Artificial Sequence
  Description of Artificial Sequence: Synthetic oligonucleotide
gcguuaggacacuauuuua

SEQ ID NO: 45964 - RNA, 19 nt, Artificial Sequence
  Description of Artificial Sequence: Synthetic oligonucleotide
aauuauuuuuaauuuauua

SEQ ID NO: 45965 - RNA, 19 nt, Artificial Sequence
  Description of Artificial Sequence: Synthetic oligonucleotide
aauauuuaaauaugugaag

SEQ ID NO: 45966 - RNA, 19 nt, Artificial Sequence
  Description of Artificial Sequence: Synthetic oligonucleotide
gcugaguuaauuuauguaa

SEQ ID NO: 45967 - RNA, 19 nt, Artificial Sequence
  Description of Artificial Sequence: Synthetic oligonucleotide
agucauauuuauauuuuua

SEQ ID NO: 45968 - RNA, 19 nt, Artificial Sequence
  Description of Artificial Sequence: Synthetic oligonucleotide
aagaaguaccacuugaaac

SEQ ID NO: 45969 - RNA, 19 nt, Artificial Sequence
  Description of Artificial Sequence: Synthetic oligonucleotide
cauuuuauguauuaguuuu

SEQ ID NO: 45970 - RNA, 19 nt, Artificial Sequence
  Description of Artificial Sequence: Synthetic oligonucleotide
ugaaauaauaauggaaagu

SEQ ID NO: 45971 - RNA, 19 nt, Artificial Sequence
  Description of Artificial Sequence: Synthetic oligonucleotide
uggcuaugcaguuugaaua

SEQ ID NO: 45972 - RNA, 19 nt, Artificial Sequence
  Description of Artificial Sequence: Synthetic oligonucleotide
auccuuuguuucagagcca

SEQ ID NO: 45973 - RNA, 19 nt, Artificial Sequence
  Description of Artificial Sequence: Synthetic oligonucleotide
agaucauuucuuggaaagu

SEQ ID NO: 45974 - RNA, 19 nt, Artificial Sequence
  Description of Artificial Sequence: Synthetic oligonucleotide
uguaggcuuaccucaaaua

SEQ ID NO: 45975 - RNA, 19 nt, Artificial Sequence
  Description of Artificial Sequence: Synthetic oligonucleotide
aaauggcuaacuuauacau

SEQ ID NO: 45976 - RNA, 19 nt, Artificial Sequence
  Description of Artificial Sequence: Synthetic oligonucleotide
uauuuuuaaagaaauauuu

SEQ ID NO: 45977 - RNA, 19 nt, Artificial Sequence
  Description of Artificial Sequence: Synthetic oligonucleotide
uauauuguauuuauauaau

SEQ ID NO: 45978 - RNA, 19 nt, Artificial Sequence
  Description of Artificial Sequence: Synthetic oligonucleotide
uguauaaaugguuuuuaua

SEQ ID NO: 45979 - RNA, 19 nt, Artificial Sequence
  Description of Artificial Sequence: Synthetic oligonucleotide
accaauaaauggcauuuua

SEQ ID NO: 45980 - RNA, 19 nt, Artificial Sequence
  Description of Artificial Sequence: Synthetic oligonucleotide
auggcauuuuaaaaaauuc

SEQ ID NO: 45981 - RNA, 19 nt, Artificial Sequence
  Description of Artificial Sequence: Synthetic oligonucleotide
cauucugcccucgagccca

SEQ ID NO: 45982 - RNA, 19 nt, Artificial Sequence
  Description of Artificial Sequence: Synthetic oligonucleotide
accgggaacgaaagagaag

SEQ ID NO: 45983 - RNA, 19 nt, Artificial Sequence
  Description of Artificial Sequence: Synthetic oligonucleotide
gcucuaucuccccuccagg

SEQ ID NO: 45984 - RNA, 19 nt, Artificial Sequence
  Description of Artificial Sequence: Synthetic oligonucleotide
ucuaucuccccuccaggag

SEQ ID NO: 45985 - RNA, 19 nt, Artificial Sequence
  Description of Artificial Sequence: Synthetic oligonucleotide
gagcccagcuaugaacucc

SEQ ID NO: 45986 - RNA, 19 nt, Artificial Sequence
  Description of Artificial Sequence: Synthetic oligonucleotide
cuucuccacaagcgccuuc

SEQ ID NO: 45987 - RNA, 19 nt, Artificial Sequence
  Description of Artificial Sequence: Synthetic oligonucleotide
cgguccaguugccuucucc

SEQ ID NO: 45988 - RNA, 19 nt, Artificial Sequence
  Description of Artificial Sequence: Synthetic oligonucleotide
ccuggggcugcuccuggug

SEQ ID NO: 45989 - RNA, 19 nt, Artificial Sequence
  Description of Artificial Sequence: Synthetic oligonucleotide
guugccugcugccuucccu

SEQ ID NO: 45990 - RNA, 19 nt, Artificial Sequence
  Description of Artificial Sequence: Synthetic oligonucleotide
ugccccaguacccccagga

SEQ ID NO: 45991 - RNA, 19 nt, Artificial Sequence
  Description of Artificial Sequence: Synthetic oligonucleotide
agaagauuccaaagaugua

SEQ ID NO: 45992 - RNA, 19 nt, Artificial Sequence
  Description of Artificial Sequence: Synthetic oligonucleotide
agccgccccacacagacag

SEQ ID NO: 45993 - RNA, 19 nt, Artificial Sequence
  Description of Artificial Sequence: Synthetic oligonucleotide
gccacucaccucuucagaa

SEQ ID NO: 45994 - RNA, 19 nt, Artificial Sequence
  Description of Artificial Sequence: Synthetic oligonucleotide
acgaauugacaaacaaauu

SEQ ID NO: 45995 - RNA, 19 nt, Artificial Sequence
  Description of Artificial Sequence: Synthetic oligonucleotide
ucgguacauccucgacggc

SEQ ID NO: 45996 - RNA, 19 nt, Artificial Sequence
  Description of Artificial Sequence: Synthetic oligonucleotide
caucucagcccugagaaag

SEQ ID NO: 45997 - RNA, 19 nt, Artificial Sequence
  Description of Artificial Sequence: Synthetic oligonucleotide
ggagacauguaacaagagu

SEQ ID NO: 45998 - RNA, 19 nt, Artificial Sequence
  Description of Artificial Sequence: Synthetic oligonucleotide
uaacaugugugaaagcagc

SEQ ID NO: 45999 - RNA, 19 nt, Artificial Sequence
  Description of Artificial Sequence: Synthetic oligonucleotide
caaagaggcacuggcagaa

SEQ ID NO: 46000 - RNA, 19 nt, Artificial Sequence
  Description of Artificial Sequence: Synthetic oligonucleotide
aaacaaccugaaccuucca

SEQ ID NO: 46001 - RNA, 19 nt, Artificial Sequence
  Description of Artificial Sequence: Synthetic oligonucleotide
aaagauggcugaaaaagau

SEQ ID NO: 46002 - RNA, 19 nt, Artificial Sequence
  Description of Artificial Sequence: Synthetic oligonucleotide
uggaugcuuccaaucugga

SEQ ID NO: 46003 - RNA, 19 nt, Artificial Sequence
  Description of Artificial Sequence: Synthetic oligonucleotide
auucaaugaggagacuugc

SEQ ID NO: 46004 - RNA, 19 nt, Artificial Sequence
  Description of Artificial Sequence: Synthetic oligonucleotide
ccuggugaaaaucaucacu

SEQ ID NO: 46005 - RNA, 19 nt, Artificial Sequence
  Description of Artificial Sequence: Synthetic oligonucleotide
uggucuuuuggaguuugag

SEQ ID NO: 46006 - RNA, 19 nt, Artificial Sequence
  Description of Artificial Sequence: Synthetic oligonucleotide
gguauaccuagaguaccuc

SEQ ID NO: 46007 - RNA, 19 nt, Artificial Sequence
  Description of Artificial Sequence: Synthetic oligonucleotide
ccagaacagauuugagagu

SEQ ID NO: 46008 - RNA, 19 nt, Artificial Sequence
  Description of Artificial Sequence: Synthetic oligonucleotide
uagugaggaacaagccaga

SEQ ID NO: 46009 - RNA, 19 nt, Artificial Sequence
  Description of Artificial Sequence: Synthetic oligonucleotide
agcugugcagaugaguaca

SEQ ID NO: 46010 - RNA, 19 nt, Artificial Sequence
  Description of Artificial Sequence: Synthetic oligonucleotide
aaaaguccugauccaguuc

SEQ ID NO: 46011 - RNA, 19 nt, Artificial Sequence
  Description of Artificial Sequence: Synthetic oligonucleotide
ccugcagaaaaaggcaaag

SEQ ID NO: 46012 - RNA, 19 nt, Artificial Sequence
  Description of Artificial Sequence: Synthetic oligonucleotide
gaaucuagaugcaauaacc

SEQ ID NO: 46013 - RNA, 19 nt, Artificial Sequence
  Description of Artificial Sequence: Synthetic oligonucleotide
caccccugacccaaccaca

SEQ ID NO: 46014 - RNA, 19 nt, Artificial Sequence
  Description of Artificial Sequence: Synthetic oligonucleotide
aaaugccagccugcugacg

SEQ ID NO: 46015 - RNA, 19 nt, Artificial Sequence
  Description of Artificial Sequence: Synthetic oligonucleotide
gaagcugcaggcacagaac

SEQ ID NO: 46016 - RNA, 19 nt, Artificial Sequence
  Description of Artificial Sequence: Synthetic oligonucleotide
ccaguggcugcaggacaug

SEQ ID NO: 46017 - RNA, 19 nt, Artificial Sequence
  Description of Artificial Sequence: Synthetic oligonucleotide
gacaacucaucucauucug

SEQ ID NO: 46018 - RNA, 19 nt, Artificial Sequence
  Description of Artificial Sequence: Synthetic oligonucleotide
gcgcagcuuuaaggaguuc

SEQ ID NO: 46019 - RNA, 19 nt, Artificial Sequence
  Description of Artificial Sequence: Synthetic oligonucleotide
ccugcaguccagccugagg

SEQ ID NO: 46020 - RNA, 19 nt, Artificial Sequence
  Description of Artificial Sequence: Synthetic oligonucleotide
ggcucuucggcaaauguag

SEQ ID NO: 46021 - RNA, 19 nt, Artificial Sequence
  Description of Artificial Sequence: Synthetic oligonucleotide
gcaugggcaccucagauug

SEQ ID NO: 46022 - RNA, 19 nt, Artificial Sequence
  Description of Artificial Sequence: Synthetic oligonucleotide
guuguuguuaaugggcauu

SEQ ID NO: 46023 - RNA, 19 nt, Artificial Sequence
  Description of Artificial Sequence: Synthetic oligonucleotide
uccuucuucuggucagaaa

SEQ ID NO: 46024 - RNA, 19 nt, Artificial Sequence
  Description of Artificial Sequence: Synthetic oligonucleotide
accuguccacugggcacag

SEQ ID NO: 46025 - RNA, 19 nt, Artificial Sequence
  Description of Artificial Sequence: Synthetic oligonucleotide
gaacuuauguuguucucua

SEQ ID NO: 46026 - RNA, 19 nt, Artificial Sequence
  Description of Artificial Sequence: Synthetic oligonucleotide
auggagaacuaaaaguaug

SEQ ID NO: 46027 - RNA, 19 nt, Artificial Sequence
  Description of Artificial Sequence: Synthetic oligonucleotide
gagcguuaggacacuauuu

SEQ ID NO: 46028 - RNA, 19 nt, Artificial Sequence
  Description of Artificial Sequence: Synthetic oligonucleotide
uuaauuauuuuuaauuuau

SEQ ID NO: 46029 - RNA, 19 nt, Artificial Sequence
  Description of Artificial Sequence: Synthetic oligonucleotide
uuaauauuuaaauauguga

SEQ ID NO: 46030 - RNA, 19 nt, Artificial Sequence
  Description of Artificial Sequence: Synthetic oligonucleotide
aagcugaguuaauuuaugu

SEQ ID NO: 46031 - RNA, 19 nt, Artificial Sequence
  Description of Artificial Sequence: Synthetic oligonucleotide
uaagucauauuuauauuuu

SEQ ID NO: 46032 - RNA, 19 nt, Artificial Sequence
  Description of Artificial Sequence: Synthetic oligonucleotide
uuaagaaguaccacuugaa

SEQ ID NO: 46033 - RNA, 19 nt, Artificial Sequence
  Description of Artificial Sequence: Synthetic oligonucleotide
aacauuuuauguauuaguu

SEQ ID NO: 46034 - RNA, 19 nt, Artificial Sequence
  Description of Artificial Sequence: Synthetic oligonucleotide
uuugaaauaauaauggaaa

SEQ ID NO: 46035 - RNA, 19 nt, Artificial Sequence
  Description of Artificial Sequence: Synthetic oligonucleotide
aguggcuaugcaguuugaa

SEQ ID NO: 46036 - RNA, 19 nt, Artificial Sequence
  Description of Artificial Sequence: Synthetic oligonucleotide
auauccuuuguuucagagc

SEQ ID NO: 46037 - RNA, 19 nt, Artificial Sequence
  Description of Artificial Sequence: Synthetic oligonucleotide
ccagaucauuucuuggaaa

SEQ ID NO: 46038 - RNA, 19 nt, Artificial Sequence
  Description of Artificial Sequence: Synthetic oligonucleotide
aguguaggcuuaccucaaa

SEQ ID NO: 46039 - RNA, 19 nt, Artificial Sequence
  Description of Artificial Sequence: Synthetic oligonucleotide
auaaauggcuaacuuauac

SEQ ID NO: 46040 - RNA, 19 nt, Artificial Sequence
  Description of Artificial Sequence: Synthetic oligonucleotide
cauauuuuuaaagaaauau

SEQ ID NO: 46041 - RNA, 19 nt, Artificial Sequence
  Description of Artificial Sequence: Synthetic oligonucleotide
uuuauauuguauuuauaua

SEQ ID NO: 46042 - RNA, 19 nt, Artificial Sequence
  Description of Artificial Sequence: Synthetic oligonucleotide
aauguauaaaugguuuuua

SEQ ID NO: 46043 - RNA, 19 nt, Artificial Sequence
  Description of Artificial Sequence: Synthetic oligonucleotide
auaccaauaaauggcauuu

SEQ ID NO: 46044 - RNA, 19 nt, Artificial Sequence
  Description of Artificial Sequence: Synthetic oligonucleotide
cauuuuaaaaaauucagca

SEQ ID NO: 46045 - RNA, 25 nt, Artificial Sequence
  Description of Artificial Sequence: Synthetic oligonucleotide
uucugcccucgagcccaccgggaac

SEQ ID NO: 46046 - RNA, 25 nt, Artificial Sequence
  Description of Artificial Sequence: Synthetic oligonucleotide
cgaaagagaagcucuaucucgccuc

SEQ ID NO: 46047 - RNA, 25 nt, Artificial Sequence
  Description of Artificial Sequence: Synthetic oligonucleotide
ccaggagcccagcuaugaacuccuu

SEQ ID NO: 46048 - RNA, 25 nt, Artificial Sequence
  Description of Artificial Sequence: Synthetic oligonucleotide
ucuccacaagcgccuucgguccagu

SEQ ID NO: 46049 - RNA, 25 nt, Artificial Sequence
  Description of Artificial Sequence: Synthetic oligonucleotide
uugccuucucccuggggcugcuccu

SEQ ID NO: 46050 - RNA, 25 nt, Artificial Sequence
  Description of Artificial Sequence: Synthetic oligonucleotide
ugguguugccugcugccuucccugc

SEQ ID NO: 46051 - RNA, 25 nt, Artificial Sequence
  Description of Artificial Sequence: Synthetic oligonucleotide
ccccaguacccccaggagaagauuc

SEQ ID NO: 46052 - RNA, 25 nt, Artificial Sequence
  Description of Artificial Sequence: Synthetic oligonucleotide
ccaaagauguagccgccccacacag

SEQ ID NO: 46053 - RNA, 25 nt, Artificial Sequence
  Description of Artificial Sequence: Synthetic oligonucleotide
gacagccacucaccucuucagaacg

SEQ ID NO: 46054 - RNA, 25 nt, Artificial Sequence
  Description of Artificial Sequence: Synthetic oligonucleotide
gaauugacaaacaaauucgguacau

SEQ ID NO: 46055 - RNA, 25 nt, Artificial Sequence
  Description of Artificial Sequence: Synthetic oligonucleotide
uccucgacggcaucucagcccugag

SEQ ID NO: 46056 - RNA, 25 nt, Artificial Sequence
  Description of Artificial Sequence: Synthetic oligonucleotide
gaaaggagacauguaacaagaguaa

SEQ ID NO: 46057 - RNA, 25 nt, Artificial Sequence
  Description of Artificial Sequence: Synthetic oligonucleotide
acaugugugaaagcagcaaagaggc

SEQ ID NO: 46058 - RNA, 25 nt, Artificial Sequence
  Description of Artificial Sequence: Synthetic oligonucleotide
cacuggcagaaaacaaccugaaccu

SEQ ID NO: 46059 - RNA, 25 nt, Artificial Sequence
  Description of Artificial Sequence: Synthetic oligonucleotide
uuccaaagauggcugaaaaagaugg

SEQ ID NO: 46060 - RNA, 25 nt, Artificial Sequence
  Description of Artificial Sequence: Synthetic oligonucleotide
gaugcuuccaaucuggauucaauga

SEQ ID NO: 46061 - RNA, 25 nt, Artificial Sequence
  Description of Artificial Sequence: Synthetic oligonucleotide
aggagacuugccuggugaaaaucau

SEQ ID NO: 46062 - RNA, 25 nt, Artificial Sequence
  Description of Artificial Sequence: Synthetic oligonucleotide
ucacuggucuuuuggaguuugaggu

SEQ ID NO: 46063 - RNA, 25 nt, Artificial Sequence
  Description of Artificial Sequence: Synthetic oligonucleotide
uauaccuagaguaccuccagaacag

SEQ ID NO: 46064 - RNA, 25 nt, Artificial Sequence
  Description of Artificial Sequence: Synthetic oligonucleotide
gauuugagaguagugaggaacaagc

SEQ ID NO: 46065 - RNA, 25 nt, Artificial Sequence
  Description of Artificial Sequence: Synthetic oligonucleotide
aaguccugauccaguuccugcagaa

SEQ ID NO: 46066 - RNA, 25 nt, Artificial Sequence
  Description of Artificial Sequence: Synthetic oligonucleotide
aaaaggcaaagaaucuagaugcaau

SEQ ID NO: 46067 - RNA, 25 nt, Artificial Sequence
  Description of Artificial Sequence: Synthetic oligonucleotide
uaaccaccccugacccaaccacaaa

SEQ ID NO: 46068 - RNA, 25 nt, Artificial Sequence
  Description of Artificial Sequence: Synthetic oligonucleotide
augccagccugcugacgaagcugca

SEQ ID NO: 46069 - RNA, 25 nt, Artificial Sequence
  Description of Artificial Sequence: Synthetic oligonucleotide
aggcacagaaccaguggcugcagga

SEQ ID NO: 46070 - RNA, 25 nt, Artificial Sequence
  Description of Artificial Sequence: Synthetic oligonucleotide
acaugacaacucaucucauucugcg

SEQ ID NO: 46071 - RNA, 25 nt, Artificial Sequence
  Description of Artificial Sequence: Synthetic oligonucleotide
gcagcuuuaaggaguuccugcaguc

SEQ ID NO: 46072 - RNA, 25 nt, Artificial Sequence
  Description of Artificial Sequence: Synthetic oligonucleotide
ccagccugagggcucuucggcaaau

SEQ ID NO: 46073 - RNA, 25 nt, Artificial Sequence
  Description of Artificial Sequence: Synthetic oligonucleotide
uguagcaugggcaccucagauuguu

SEQ ID NO: 46074 - RNA, 25 nt, Artificial Sequence
  Description of Artificial Sequence: Synthetic oligonucleotide
uguuguuaaugggcauuccuucuuc

SEQ ID NO: 46075 - RNA, 25 nt, Artificial Sequence
  Description of Artificial Sequence: Synthetic oligonucleotide
cuggucagaaaccuguccacugggc

SEQ ID NO: 46076 - RNA, 25 nt, Artificial Sequence
  Description of Artificial Sequence: Synthetic oligonucleotide
cacagaacuuauguuguucucuaug

SEQ ID NO: 46077 - RNA, 25 nt, Artificial Sequence
  Description of Artificial Sequence: Synthetic oligonucleotide
ggagaacuaaaaguaugagcguuag

SEQ ID NO: 46078 - RNA, 25 nt, Artificial Sequence
  Description of Artificial Sequence: Synthetic oligonucleotide
ggacacuauuuuaauuauuuuuaau

SEQ ID NO: 46079 - RNA, 25 nt, Artificial Sequence
  Description of Artificial Sequence: Synthetic oligonucleotide
uuuauuaauauuuaaauaugugaag

SEQ ID NO: 46080 - RNA, 25 nt, Artificial Sequence
  Description of Artificial Sequence: Synthetic oligonucleotide
gcugaguuaauuuauguaagucaua

SEQ ID NO: 46081 - RNA, 25 nt, Artificial Sequence
  Description of Artificial Sequence: Synthetic oligonucleotide
auuuauauuuuuaagaaguaccacu

SEQ ID NO: 46082 - RNA, 25 nt, Artificial Sequence
  Description of Artificial Sequence: Synthetic oligonucleotide
uugaaacauuuuauguauuaguuuu

SEQ ID NO: 46083 - RNA, 25 nt, Artificial Sequence
  Description of Artificial Sequence: Synthetic oligonucleotide
ugaaauaauaauggaaaguggcuau

SEQ ID NO: 46084 - RNA, 25 nt, Artificial Sequence
  Description of Artificial Sequence: Synthetic oligonucleotide
ugcaguuugaauauccuuuguuuca

SEQ ID NO: 46085 - RNA, 25 nt, Artificial Sequence
  Description of Artificial Sequence: Synthetic oligonucleotide
agagccagaucauuucuuggaaagu

SEQ ID NO: 46086 - RNA, 25 nt, Artificial Sequence
  Description of Artificial Sequence: Synthetic oligonucleotide
uguaggcuuaccucaaauaaauggc

SEQ ID NO: 46087 - RNA, 25 nt, Artificial Sequence
  Description of Artificial Sequence: Synthetic oligonucleotide
cuaacuuauacauauuuuuaaagaa

SEQ ID NO: 46088 - RNA, 25 nt, Artificial Sequence
  Description of Artificial Sequence: Synthetic oligonucleotide
aauauuuauauuguauuuauauaau

SEQ ID NO: 46089 - RNA, 25 nt, Artificial Sequence
  Description of Artificial Sequence: Synthetic oligonucleotide
uguauaaaugguuuuuauaccaaua

SEQ ID NO: 46090 - RNA, 25 nt, Artificial Sequence
  Description of Artificial Sequence: Synthetic oligonucleotide
caauaaauggcauuuuaaaaaauuc

SEQ ID NO: 46091 - RNA, 25 nt, Artificial Sequence
  Description of Artificial Sequence: Synthetic oligonucleotide
aaauggcauuuuaaaaaauucagca

SEQ ID NO: 46092 - RNA, 25 nt, Artificial Sequence
  Description of Artificial Sequence: Synthetic oligonucleotide
cauucugcccucgagcccaccggga

SEQ ID NO: 46093 - RNA, 25 nt, Artificial Sequence
  Description of Artificial Sequence: Synthetic oligonucleotide
aacgaaagagaagcucuaucucccc

SEQ ID NO: 46094 - RNA, 25 nt, Artificial Sequence
  Description of Artificial Sequence: Synthetic oligonucleotide
cgaaagagaagcucuaucuccccuc

SEQ ID NO: 46095 - RNA, 25 nt, Artificial Sequence
  Description of Artificial Sequence: Synthetic oligonucleotide
cuccaggagcccagcuaugaacucc

SEQ ID NO: 46096 - RNA, 25 nt, Artificial Sequence
  Description of Artificial Sequence: Synthetic oligonucleotide
cuucuccacaagcgccuucggucca

SEQ ID NO: 46097 - RNA, 25 nt, Artificial Sequence
  Description of Artificial Sequence: Synthetic oligonucleotide
aguugccuucucccuggggcugcuc

SEQ ID NO: 46098 - RNA, 25 nt, Artificial Sequence
  Description of Artificial Sequence: Synthetic oligonucleotide
ccugguguugccugcugccuucccu

SEQ ID NO: 46099 - RNA, 25 nt, Artificial Sequence
  Description of Artificial Sequence: Synthetic oligonucleotide
ugccccaguacccccaggagaagau

SEQ ID NO: 46100 - RNA, 25 nt, Artificial Sequence
  Description of Artificial Sequence: Synthetic oligonucleotide
uuccaaagauguagccgccccacac

SEQ ID NO: 46101 - RNA, 25 nt, Artificial Sequence
  Description of Artificial Sequence: Synthetic oligonucleotide
cagacagccacucaccucuucagaa

SEQ ID NO: 46102 - RNA, 25 nt, Artificial Sequence
  Description of Artificial Sequence: Synthetic oligonucleotide
acgaauugacaaacaaauucgguac

SEQ ID NO: 46103 - RNA, 25 nt, Artificial Sequence
  Description of Artificial Sequence: Synthetic oligonucleotide
cauccucgacggcaucucagcccug

SEQ ID NO: 46104 - RNA, 25 nt, Artificial Sequence
  Description of Artificial Sequence: Synthetic oligonucleotide
gagaaaggagacauguaacaagagu

SEQ ID NO: 46105 - RNA, 25 nt, Artificial Sequence
  Description of Artificial Sequence: Synthetic oligonucleotide
uaacaugugugaaagcagcaaagag

SEQ ID NO: 46106 - RNA, 25 nt, Artificial Sequence
  Description of Artificial Sequence: Synthetic oligonucleotide
ggcacuggcagaaaacaaccugaac

SEQ ID NO: 46107 - RNA, 25 nt, Artificial Sequence
  Description of Artificial Sequence: Synthetic oligonucleotide
ccuuccaaagauggcugaaaaagau

SEQ ID NO: 46108 - RNA, 25 nt, Artificial Sequence
  Description of Artificial Sequence: Synthetic oligonucleotide
uggaugcuuccaaucuggauucaau

SEQ ID NO: 46109 - RNA, 25 nt, Artificial Sequence
  Description of Artificial Sequence: Synthetic oligonucleotide
ugaggagacuugccuggugaaaauc

SEQ ID NO: 46110 - RNA, 25 nt, Artificial Sequence
  Description of Artificial Sequence: Synthetic oligonucleotide
caucacuggucuuuuggaguuugag

SEQ ID NO: 46111 - RNA, 25 nt, Artificial Sequence
  Description of Artificial Sequence: Synthetic oligonucleotide
gguauaccuagaguaccuccagaac

SEQ ID NO: 46112 - RNA, 25 nt, Artificial Sequence
  Description of Artificial Sequence: Synthetic oligonucleotide
cagauuugagaguagugaggaacaa

SEQ ID NO: 46113 - RNA, 25 nt, Artificial Sequence
  Description of Artificial Sequence: Synthetic oligonucleotide
agccagagcugugcagaugaguaca

SEQ ID NO: 46114 - RNA, 25 nt, Artificial Sequence
  Description of Artificial Sequence: Synthetic oligonucleotide
aaaaguccugauccaguuccugcag

SEQ ID NO: 46115 - RNA, 25 nt, Artificial Sequence
  Description of Artificial Sequence: Synthetic oligonucleotide
gaaaaaggcaaagaaucuagaugca

SEQ ID NO: 46116 - RNA, 25 nt, Artificial Sequence
  Description of Artificial Sequence: Synthetic oligonucleotide
aauaaccaccccugacccaaccaca

SEQ ID NO: 46117 - RNA, 25 nt, Artificial Sequence
  Description of Artificial Sequence: Synthetic oligonucleotide
aaaugccagccugcugacgaagcug

SEQ ID NO: 46118 - RNA, 25 nt, Artificial Sequence
  Description of Artificial Sequence: Synthetic oligonucleotide
gcaggcacagaaccaguggcugcag

SEQ ID NO: 46119 - RNA, 25 nt, Artificial Sequence
  Description of Artificial Sequence: Synthetic oligonucleotide
ggacaugacaacucaucucauucug

SEQ ID NO: 46120 - RNA, 25 nt, Artificial Sequence
  Description of Artificial Sequence: Synthetic oligonucleotide
gcgcagcuuuaaggaguuccugcag

SEQ ID NO: 46121 - RNA, 25 nt, Artificial Sequence
  Description of Artificial Sequence: Synthetic oligonucleotide
guccagccugagggcucuucggcaa

SEQ ID NO: 46122 - RNA, 25 nt, Artificial Sequence
  Description of Artificial Sequence: Synthetic oligonucleotide
aauguagcaugggcaccucagauug

SEQ ID NO: 46123 - RNA, 25 nt, Artificial Sequence
  Description of Artificial Sequence: Synthetic oligonucleotide
guuguuguuaaugggcauuccuucu

SEQ ID NO: 46124 - RNA, 25 nt, Artificial Sequence
  Description of Artificial Sequence: Synthetic oligonucleotide
uucuggucagaaaccuguccacugg

SEQ ID NO: 46125 - RNA, 25 nt, Artificial Sequence
  Description of Artificial Sequence: Synthetic oligonucleotide
ggcacagaacuuauguuguucucua

SEQ ID NO: 46126 - RNA, 25 nt, Artificial Sequence
  Description of Artificial Sequence: Synthetic oligonucleotide
auggagaacuaaaaguaugagcguu

SEQ ID NO: 46127 - RNA, 25 nt, Artificial Sequence
  Description of Artificial Sequence: Synthetic oligonucleotide
uaggacacuauuuuaauuauuuuua

SEQ ID NO: 46128 - RNA, 25 nt, Artificial Sequence
  Description of Artificial Sequence: Synthetic oligonucleotide
aauuuauuaauauuuaaauauguga

SEQ ID NO: 46129 - RNA, 25 nt, Artificial Sequence
  Description of Artificial Sequence: Synthetic oligonucleotide
aagcugaguuaauuuauguaaguca

SEQ ID NO: 46130 - RNA, 25 nt, Artificial Sequence
  Description of Artificial Sequence: Synthetic oligonucleotide
auauuuauauuuuuaagaaguacca

SEQ ID NO: 46131 - RNA, 25 nt, Artificial Sequence
  Description of Artificial Sequence: Synthetic oligonucleotide
acuugaaacauuuuauguauuaguu

SEQ ID NO: 46132 - RNA, 25 nt, Artificial Sequence
  Description of Artificial Sequence: Synthetic oligonucleotide
uuugaaauaauaauggaaaguggcu

SEQ ID NO: 46133 - RNA, 25 nt, Artificial Sequence
  Description of Artificial Sequence: Synthetic oligonucleotide
uaugcaguuugaauauccuuuguuu

SEQ ID NO: 46134 - RNA, 25 nt, Artificial Sequence
  Description of Artificial Sequence: Synthetic oligonucleotide
ucagagccagaucauuucuuggaaa

SEQ ID NO: 46135 - RNA, 25 nt, Artificial Sequence
  Description of Artificial Sequence: Synthetic oligonucleotide
aguguaggcuuaccucaaauaaaug

SEQ ID NO: 46136 - RNA, 25 nt, Artificial Sequence
  Description of Artificial Sequence: Synthetic oligonucleotide
ggcuaacuuauacauauuuuuaaag

SEQ ID NO: 46137 - RNA, 25 nt, Artificial Sequence
  Description of Artificial Sequence: Synthetic oligonucleotide
gaaauauuuauauuguauuuauaua

SEQ ID NO: 46138 - RNA, 25 nt, Artificial Sequence
  Description of Artificial Sequence: Synthetic oligonucleotide
aauguauaaaugguuuuuauaccaa

SEQ ID NO: 46139 - RNA, 25 nt, Artificial Sequence
  Description of Artificial Sequence: Synthetic oligonucleotide
auaaauggcauuuuaaaaaauucag

SEQ ID NO: 46140 - DNA, 21 bp, Artificial Sequence
  Description of Artificial Sequence: Synthetic oligonucleotide
  Description of Combined DNA/RNA Molecule: Synthetic oligonucleotide
cuacacaaaucagcgauuutt

SEQ ID NO: 46141 - DNA, 21 bp, Artificial Sequence
  Description of Artificial Sequence: Synthetic oligonucleotide
  Description of Combined DNA/RNA Molecule: Synthetic oligonucleotide
aaaucgcugauuuguguagtt

SEQ ID NO: 46142 - DNA, 25 bp, Artificial Sequence
  Description of Artificial Sequence: Synthetic oligonucleotide
  Description of Combined DNA/RNA Molecule: Synthetic oligonucleotide
cuacacaaaucagcgauuuccaugt

SEQ ID NO: 46143 - RNA, 27 nt, Artificial Sequence
  Description of Artificial Sequence: Synthetic oligonucleotide
acauggaaaucgcugauuuguguaguc

SEQ ID NO: 46144 - RNA, 13 nt, Artificial Sequence
  Description of Artificial Sequence: Synthetic oligonucleotide
cuacacaaaucag

SEQ ID NO: 46145 - DNA, 11 bp, Artificial Sequence
  Description of Artificial Sequence: Synthetic oligonucleotide
  Description of Combined DNA/RNA Molecule: Synthetic oligonucleotide
gauuuccaugt

SEQ ID NO: 46146 - DNA, 21 bp, Artificial Sequence
  Description of Artificial Sequence: Synthetic oligonucleotide
  Description of Combined DNA/RNA Molecule: Synthetic oligonucleotide
ggaucuuauuucuucggagtt

SEQ ID NO: 46147 - DNA, 21 bp, Artificial Sequence
  Description of Artificial Sequence: Synthetic oligonucleotide
  Description of Combined DNA/RNA Molecule: Synthetic oligonucleotide
cuccgaagaaauaagaucctt

SEQ ID NO: 46148 - RNA, 11 nt, Artificial Sequence
  Description of Artificial Sequence: Synthetic oligonucleotide
ggaucuuauuu

SEQ ID NO: 46149 - DNA, 10 bp, Artificial Sequence
  Description of Artificial Sequence: Synthetic oligonucleotide
  Description of Combined DNA/RNA Molecule: Synthetic oligonucleotide
cuucggagtt

SEQ ID NO: 46150 - RNA, 27 nt, Artificial Sequence
  Description of Artificial Sequence: Synthetic oligonucleotide
cauugucuccgaagaaauaagauccuu

SEQ ID NO: 46151 - RNA, 8 nt, Artificial Sequence
  Description of Artificial Sequence: Synthetic oligonucleotide
  modified_base (2): LNA-G
ggaucuua

SEQ ID NO: 46152 - DNA, 17 bp, Artificial Sequence
  Description of Artificial Sequence: Synthetic oligonucleotide
  Description of Combined DNA/RNA Molecule: Synthetic oligonucleotide
uuucuucggagacaatg

SEQ ID NO: 46153 - DNA, 16 bp, Artificial Sequence
  Description of Artificial Sequence: Synthetic oligonucleotide
  Description of Combined DNA/RNA Molecule: Synthetic oligonucleotide
uucuucggagacaatg

SEQ ID NO: 46154 - DNA, 15 bp, Artificial Sequence
  Description of Artificial Sequence: Synthetic oligonucleotide
  Description of Combined DNA/RNA Molecule: Synthetic oligonucleotide
ucuucggagacaatg

SEQ ID NO: 46155 - DNA, 14 bp, Artificial Sequence
  Description of Artificial Sequence: Synthetic oligonucleotide
  Description of Combined DNA/RNA Molecule: Synthetic oligonucleotide
cuucggagacaatg

SEQ ID NO: 46156 - DNA, 13 bp, Artificial Sequence
  Description of Artificial Sequence: Synthetic oligonucleotide
  Description of Combined DNA/RNA Molecule: Synthetic oligonucleotide
uucggagacaatg

SEQ ID NO: 46157 - DNA, 12 bp, Artificial Sequence
  Description of Artificial Sequence: Synthetic oligonucleotide
  Description of Combined DNA/RNA Molecule: Synthetic oligonucleotide
ucggagacaatg

SEQ ID NO: 46158 - DNA, 11 bp, Artificial Sequence
  Description of Artificial Sequence: Synthetic oligonucleotide
  Description of Combined DNA/RNA Molecule: Synthetic oligonucleotide
cggagacaatg

SEQ ID NO: 46159 - RNA, 9 nt, Artificial Sequence
  Description of Artificial Sequence: Synthetic oligonucleotide
  modified_base (2): LNA-G
ggaucuuau

SEQ ID NO: 46160 - RNA, 10 nt, Artificial Sequence
  Description of Artificial Sequence: Synthetic oligonucleotide
  modified_base (2): LNA-G
ggaucuuauu

SEQ ID NO: 46161 - RNA, 11 nt, Artificial Sequence
  Description of Artificial Sequence: Synthetic oligonucleotide
  modified_base (2): LNA-G
ggaucuuauuu

SEQ ID NO: 46162 - RNA, 12 nt, Artificial Sequence
  Description of Artificial Sequence: Synthetic oligonucleotide
  modified_base (2): LNA-G
ggaucuuauuuc

SEQ ID NO: 46163 - RNA, 8 nt, Artificial Sequence
  Description of Artificial Sequence: Synthetic oligonucleotide
  modified_base (3): LNA-A
cuacacaa

SEQ ID NO: 46164 - DNA, 13 bp, Artificial Sequence
  Description of Artificial Sequence: Synthetic oligonucleotide
  Description of Combined DNA/RNA Molecule: Synthetic oligonucleotide
  modified_base (8): LNA-A
aucagcgauuutt

SEQ ID NO: 46165 - DNA, 12 bp, Artificial Sequence
  Description of Artificial Sequence: Synthetic oligonucleotide
  Description of Combined DNA/RNA Molecule: Synthetic oligonucleotide
  modified_base (7): LNA-A
ucagcgauuutt

SEQ ID NO: 46166 - DNA, 11 bp, Artificial Sequence
  Description of Artificial Sequence: Synthetic oligonucleotide
  Description of Combined DNA/RNA Molecule: Synthetic oligonucleotide
  modified_base (6): LNA-A
cagcgauuutt

SEQ ID NO: 46167 - DNA, 10 bp, Artificial Sequence
  Description of Artificial Sequence: Synthetic oligonucleotide
  Description of Combined DNA/RNA Molecule: Synthetic oligonucleotide
  modified_base (5): LNA-A
agcgauuutt

SEQ ID NO: 46168 - DNA, 9 bp, Artificial Sequence
  Description of Artificial Sequence: Synthetic oligonucleotide
  Description of Combined DNA/RNA Molecule: Synthetic oligonucleotide
  modified_base (4): LNA-A
gcgauuutt

SEQ ID NO: 46169 - DNA, 8 bp, Artificial Sequence
  Description of Artificial Sequence: Synthetic oligonucleotide
  Description of Combined DNA/RNA Molecule: Synthetic oligonucleotide
  modified_base (3): LNA-A
cgauuutt

SEQ ID NO: 46170 - DNA, 7 bp, Artificial Sequence
  Description of Artificial Sequence: Synthetic oligonucleotide
  Description of Combined DNA/RNA Molecule: Synthetic oligonucleotide
  modified_base (2): LNA-A
gauuutt

SEQ ID NO: 46171 - RNA, 9 nt, Artificial Sequence
  Description of Artificial Sequence: Synthetic oligonucleotide
  modified_base (3): LNA-A
cuacacaaa

SEQ ID NO: 46172 - RNA, 10 nt, Artificial Sequence
  Description of Artificial Sequence: Synthetic oligonucleotide
  modified_base (3): LNA-A
cuacacaaau

SEQ ID NO: 46173 - RNA, 11 nt, Artificial Sequence
  Description of Artificial Sequence: Synthetic oligonucleotide
  modified_base (3): LNA-A
cuacacaaauc

SEQ ID NO: 46174 - RNA, 12 nt, Artificial Sequence
  Description of Artificial Sequence: Synthetic oligonucleotide
  modified_base (3): LNA-A
cuacacaaauca

SEQ ID NO: 46175 - RNA, 13 nt, Artificial Sequence
  Description of Artificial Sequence: Synthetic oligonucleotide
  modified_base (3): LNA-A
cuacacaaaucag

SEQ ID NO: 46176 - RNA, 14 nt, Artificial Sequence
  Description of Artificial Sequence: Synthetic oligonucleotide
  modified_base (3): LNA-A
cuacacaaaucagc

SEQ ID NO: 46177 - RNA, 13 nt, Artificial Sequence
  Description of Artificial Sequence: Synthetic oligonucleotide
  modified_base (2): LNA-G
ggaucuuauuucu

SEQ ID NO: 46178 - RNA, 14 nt, Artificial Sequence
  Description of Artificial Sequence: Synthetic oligonucleotide
  modified_base (2): LNA-G
ggaucuuauuucuu

SEQ ID NO: 46179 - RNA, 8 nt, Artificial Sequence
  Description of Artificial Sequence: Synthetic oligonucleotide
  modified_base (2): LNA-G
  modified_base (8): LNA-A
ggaucuua

SEQ ID NO: 46180 - RNA, 9 nt, Artificial Sequence
  Description of Artificial Sequence: Synthetic oligonucleotide
  modified_base (2): LNA-G
  modified_base (9): LNA-U
ggaucuuau

SEQ ID NO: 46181 - RNA, 10 nt, Artificial Sequence
  Description of Artificial Sequence: Synthetic oligonucleotide
  modified_base (2): LNA-G
  modified_base (10): LNA-U
ggaucuuauu

SEQ ID NO: 46182 - RNA, 11 nt, Artificial Sequence
  Description of Artificial Sequence: Synthetic oligonucleotide
  modified_base (2): LNA-G
  modified_base (11): LNA-U
ggaucuuauuu

SEQ ID NO: 46183 - RNA, 12 nt, Artificial Sequence
  Description of Artificial Sequence: Synthetic oligonucleotide
  modified_base (2): LNA-G
  modified_base (12): LNA-C
ggaucuuauuuc

SEQ ID NO: 46184 - RNA, 13 nt, Artificial Sequence
  Description of Artificial Sequence: Synthetic oligonucleotide
  modified_base (2): LNA-G
  modified_base (13): LNA-U
ggaucuuauuucu

SEQ ID NO: 46185 - RNA, 14 nt, Artificial Sequence
  Description of Artificial Sequence: Synthetic oligonucleotide
  modified_base (2): LNA-G
  modified_base (14): LNA-U
ggaucuuauuucuu

SEQ ID NO: 46186 - DNA, 13 bp, Artificial Sequence
  Description of Artificial Sequence: Synthetic oligonucleotide
  Description of Combined DNA/RNA Molecule: Synthetic oligonucleotide
  modified_base (8): LNA-G
uuucuucggagtt

SEQ ID NO: 46187 - DNA, 12 bp, Artificial Sequence
  Description of Artificial Sequence: Synthetic oligonucleotide
  Description of Combined DNA/RNA Molecule: Synthetic oligonucleotide
  modified_base (7): LNA-G
uucuucggagtt

SEQ ID NO: 46188 - DNA, 11 bp, Artificial Sequence
  Description of Artificial Sequence: Synthetic oligonucleotide
  Description of Combined DNA/RNA Molecule: Synthetic oligonucleotide
  modified_base (6): LNA-G
ucuucggagtt

SEQ ID NO: 46189 - DNA, 10 bp, Artificial Sequence
  Description of Artificial Sequence: Synthetic oligonucleotide
  Description of Combined DNA/RNA Molecule: Synthetic oligonucleotide
  modified_base (5): LNA-G
cuucggagtt

SEQ ID NO: 46190 - DNA, 9 bp, Artificial Sequence
  Description of Artificial Sequence: Synthetic oligonucleotide
  Description of Combined DNA/RNA Molecule: Synthetic oligonucleotide
  modified_base (4): LNA-G
uucggagtt

SEQ ID NO: 46191 - DNA, 8 bp, Artificial Sequence
  Description of Artificial Sequence: Synthetic oligonucleotide
  Description of Combined DNA/RNA Molecule: Synthetic oligonucleotide
  modified_base (3): LNA-G
ucggagtt

SEQ ID NO: 46192 - DNA, 7 bp, Artificial Sequence
  Description of Artificial Sequence: Synthetic oligonucleotide
  Description of Combined DNA/RNA Molecule: Synthetic oligonucleotide
  modified_base (2): LNA-G
cggagtt

SEQ ID NO: 46193 - DNA, 13 bp, Artificial Sequence
  Description of Artificial Sequence: Synthetic oligonucleotide
  Description of Combined DNA/RNA Molecule: Synthetic oligonucleotide
  modified_base (1): LNA-U
  modified_base (8): LNA-G
uuucuucggagtt

SEQ ID NO: 46194 - DNA, 12 bp, Artificial Sequence
  Description of Artificial Sequence: Synthetic oligonucleotide
  Description of Combined DNA/RNA Molecule: Synthetic oligonucleotide
  modified_base (1): LNA-U
  modified_base (7): LNA-G
uucuucggagtt

SEQ ID NO: 46195 - DNA, 11 bp, Artificial Sequence
  Description of Artificial Sequence: Synthetic oligonucleotide
  Description of Combined DNA/RNA Molecule: Synthetic oligonucleotide
  modified_base (1): LNA-U
  modified_base (6): LNA-G
ucuucggagtt

SEQ ID NO: 46196 - DNA, 10 bp, Artificial Sequence
  Description of Artificial Sequence: Synthetic oligonucleotide
  Description of Combined DNA/RNA Molecule: Synthetic oligonucleotide
  modified_base (1): LNA-C
  modified_base (5): LNA-G
cuucggagtt

SEQ ID NO: 46197 - DNA, 9 bp, Artificial Sequence
  Description of Artificial Sequence: Synthetic oligonucleotide
  Description of Combined DNA/RNA Molecule: Synthetic oligonucleotide
  modified_base (1): LNA-U
  modified_base (4): LNA-G
uucggagtt

SEQ ID NO: 46198 - DNA, 8 bp, Artificial Sequence
  Description of Artificial Sequence: Synthetic oligonucleotide
  Description of Combined DNA/RNA Molecule: Synthetic oligonucleotide
  modified_base (1): LNA-U
  modified_base (3): LNA-G
ucggagtt

SEQ ID NO: 46199 - DNA, 7 bp, Artificial Sequence
  Description of Artificial Sequence: Synthetic oligonucleotide
  Description of Combined DNA/RNA Molecule: Synthetic oligonucleotide
  modified_base (1): LNA-C
  modified_base (2): LNA-G
cggagtt

SEQ ID NO: 46200 - DNA, 21 bp, Artificial Sequence
  Description of Artificial Sequence: Synthetic oligonucleotide
  Description of Combined DNA/RNA Molecule: Synthetic oligonucleotide
  modified_base (2): LNA-G
  modified_base (16): LNA-G
ggaucuuauuucuucggagtt

SEQ ID NO: 46201 - DNA, 25 bp, Artificial Sequence
  Description of Artificial Sequence: Synthetic oligonucleotide
  Description of Combined DNA/RNA Molecule: Synthetic oligonucleotide
ggaucuuauuucuucggagacaatg

SEQ ID NO: 46202 - RNA, 25 nt, Artificial Sequence
  Description of Artificial Sequence: Synthetic oligonucleotide
uuaagcagaguucaaaagcccuuca

SEQ ID NO: 46203 - RNA, 25 nt, Artificial Sequence
  Description of Artificial Sequence: Synthetic oligonucleotide
uaagcagaguucaaaagcccuucag

SEQ ID NO: 46204 - RNA, 25 nt, Artificial Sequence
  Description of Artificial Sequence: Synthetic oligonucleotide
agcagaguucaaaagcccuucagcg

SEQ ID NO: 46205 - RNA, 25 nt, Artificial Sequence
  Description of Artificial Sequence: Synthetic oligonucleotide
cucagggucugagugaagccgcucg

SEQ ID NO: 46206 - RNA, 25 nt, Artificial Sequence
  Description of Artificial Sequence: Synthetic oligonucleotide
caagcaacuacaucacgccagucaa

SEQ ID NO: 46207 - RNA, 25 nt, Artificial Sequence
  Description of Artificial Sequence: Synthetic oligonucleotide
aucaauggcagcuucuuggugcgug

SEQ ID NO: 46208 - RNA, 25 nt, Artificial Sequence
  Description of Artificial Sequence: Synthetic oligonucleotide
uuccagcccacauuggauucaucag

SEQ ID NO: 46209 - RNA, 25 nt, Artificial Sequence
  Description of Artificial Sequence: Synthetic oligonucleotide
cagcugagaauguggaauaccuaag

SEQ ID NO: 46210 - RNA, 25 nt, Artificial Sequence
  Description of Artificial Sequence: Synthetic oligonucleotide
aacguaucuccuaauuugaggcuca

SEQ ID NO: 46211 - RNA, 25 nt, Artificial Sequence
  Description of Artificial Sequence: Synthetic oligonucleotide
ccuaaaauaauuucucuacaauugg

SEQ ID NO: 46212 - RNA, 25 nt, Artificial Sequence
  Description of Artificial Sequence: Synthetic oligonucleotide
uggaagauucagcuaguuaggagcc

SEQ ID NO: 46213 - RNA, 25 nt, Artificial Sequence
  Description of Artificial Sequence: Synthetic oligonucleotide
uuaaacucuccuagucaauauccac

SEQ ID NO: 46214 - RNA, 25 nt, Artificial Sequence
  Description of Artificial Sequence: Synthetic oligonucleotide
cagccuacaguuauguucagucaca

SEQ ID NO: 46215 - RNA, 25 nt, Artificial Sequence
  Description of Artificial Sequence: Synthetic oligonucleotide
guuauguucagucacacacacauac

SEQ ID NO: 46216 - RNA, 25 nt, Artificial Sequence
  Description of Artificial Sequence: Synthetic oligonucleotide
cacauacaaaauguuccuuuugcuu

SEQ ID NO: 46217 - RNA, 25 nt, Artificial Sequence
  Description of Artificial Sequence: Synthetic oligonucleotide
uccuuuugcuuuuaaaguaauuuuu

SEQ ID NO: 46218 - RNA, 25 nt, Artificial Sequence
  Description of Artificial Sequence: Synthetic oligonucleotide
ugaccugugaagcaacagucaaugg

SEQ ID NO: 46219 - RNA, 25 nt, Artificial Sequence
  Description of Artificial Sequence: Synthetic oligonucleotide
cuaucucacacaucgacaaaccaau

SEQ ID NO: 46220 - RNA, 25 nt, Artificial Sequence
  Description of Artificial Sequence: Synthetic oligonucleotide
uguccucaauuguacugcuaccacu

SEQ ID NO: 46221 - RNA, 25 nt, Artificial Sequence
  Description of Artificial Sequence: Synthetic oligonucleotide
aaaccguagcuggcaagcggucuua

SEQ ID NO: 46222 - RNA, 25 nt, Artificial Sequence
  Description of Artificial Sequence: Synthetic oligonucleotide
uagcuggcaagcggucuuaccggcu

SEQ ID NO: 46223 - RNA, 25 nt, Artificial Sequence
  Description of Artificial Sequence: Synthetic oligonucleotide
uuguaugguuaaaagauggguuacc

SEQ ID NO: 46224 - RNA, 25 nt, Artificial Sequence
  Description of Artificial Sequence: Synthetic oligonucleotide
ugguuaaaagauggguuaccugcga

SEQ ID NO: 46225 - RNA, 25 nt, Artificial Sequence
  Description of Artificial Sequence: Synthetic oligonucleotide
cagggaauuauacaaucuugcugag

SEQ ID NO: 46226 - RNA, 25 nt, Artificial Sequence
  Description of Artificial Sequence: Synthetic oligonucleotide
acaaucuugcugagcauaaaacagu

SEQ ID NO: 46227 - RNA, 25 nt, Artificial Sequence
  Description of Artificial Sequence: Synthetic oligonucleotide
ccaauaaugaagaguccuuuauccu

SEQ ID NO: 46228 - RNA, 25 nt, Artificial Sequence
  Description of Artificial Sequence: Synthetic oligonucleotide
acuuuggauguuccaacgcaaguug

SEQ ID NO: 46229 - RNA, 25 nt, Artificial Sequence
  Description of Artificial Sequence: Synthetic oligonucleotide
aaugcuuccacuaaacugaaaccau

SEQ ID NO: 46230 - RNA, 25 nt, Artificial Sequence
  Description of Artificial Sequence: Synthetic oligonucleotide
gagaaaguuugacuuuguuaaauau

SEQ ID NO: 46231 - RNA, 25 nt, Artificial Sequence
  Description of Artificial Sequence: Synthetic oligonucleotide
aaagaacuacuguauauuaaaaguu

SEQ ID NO: 46232 - RNA, 25 nt, Artificial Sequence
  Description of Artificial Sequence: Synthetic oligonucleotide
uuagaaauacggguuuugacuuaac

SEQ ID NO: 46233 - RNA, 25 nt, Artificial Sequence
  Description of Artificial Sequence: Synthetic oligonucleotide
aacauggguacagcaaacucagcac

SEQ ID NO: 46234 - RNA, 25 nt, Artificial Sequence
  Description of Artificial Sequence: Synthetic oligonucleotide
aaagacacagaagaugcugaccuca

SEQ ID NO: 46235 - RNA, 25 nt, Artificial Sequence
  Description of Artificial Sequence: Synthetic oligonucleotide
uaguagggagguuuauucagaucgc

SEQ ID NO: 46236 - RNA, 25 nt, Artificial Sequence
  Description of Artificial Sequence: Synthetic oligonucleotide
gccuucugcagcaggguucugggau

SEQ ID NO: 46237 - RNA, 25 nt, Artificial Sequence
  Description of Artificial Sequence: Synthetic oligonucleotide
ggucugguacauauuggaaauuaug

SEQ ID NO: 46238 - RNA, 25 nt, Artificial Sequence
  Description of Artificial Sequence: Synthetic oligonucleotide
cuaguccuuccgauggaagcacuag

SEQ ID NO: 46239 - RNA, 25 nt, Artificial Sequence
  Description of Artificial Sequence: Synthetic oligonucleotide
ccagugaauauuguuuuuaugugga

SEQ ID NO: 46240 - RNA, 25 nt, Artificial Sequence
  Description of Artificial Sequence: Synthetic oligonucleotide
augaauucaaguuggaauugguaga

SEQ ID NO: 46241 - RNA, 25 nt, Artificial Sequence
  Description of Artificial Sequence: Synthetic oligonucleotide
caggacacagauuuagacuuggaga

SEQ ID NO: 46242 - RNA, 25 nt, Artificial Sequence
  Description of Artificial Sequence: Synthetic oligonucleotide
cucaaagcacaguuacaguauucca

SEQ ID NO: 46243 - RNA, 25 nt, Artificial Sequence
  Description of Artificial Sequence: Synthetic oligonucleotide
accacugccaccacugaugaauuaa

SEQ ID NO: 46244 - RNA, 25 nt, Artificial Sequence
  Description of Artificial Sequence: Synthetic oligonucleotide
gaaacuacuagugccacaucaucac

SEQ ID NO: 46245 - RNA, 25 nt, Artificial Sequence
  Description of Artificial Sequence: Synthetic oligonucleotide
aagucggacagccucaccaaacaga

SEQ ID NO: 46246 - RNA, 25 nt, Artificial Sequence
  Description of Artificial Sequence: Synthetic oligonucleotide
gaaagcgaaaaauggaacaugaugg

SEQ ID NO: 46247 - RNA, 25 nt, Artificial Sequence
  Description of Artificial Sequence: Synthetic oligonucleotide
cccucugauuuagcauguagacugc

SEQ ID NO: 46248 - RNA, 25 nt, Artificial Sequence
  Description of Artificial Sequence: Synthetic oligonucleotide
ugagcuauuuaaggaucuauuuaug

SEQ ID NO: 46249 - RNA, 25 nt, Artificial Sequence
  Description of Artificial Sequence: Synthetic oligonucleotide
aaaaggugaaaaagcacuauuauca

SEQ ID NO: 46250 - RNA, 25 nt, Artificial Sequence
  Description of Artificial Sequence: Synthetic oligonucleotide
gaaaaagcacuauuaucaguucugc

SEQ ID NO: 46251 - RNA, 25 nt, Artificial Sequence
  Description of Artificial Sequence: Synthetic oligonucleotide
ggcugaaaagaaagauuaaaccuac

SEQ ID NO: 46252 - RNA, 25 nt, Artificial Sequence
  Description of Artificial Sequence: Synthetic oligonucleotide
uaaacccuuauaauaaaauccuucu

SEQ ID NO: 46253 - RNA, 25 nt, Artificial Sequence
  Description of Artificial Sequence: Synthetic oligonucleotide
cauacuauuagccaaugcuguagac

SEQ ID NO: 46254 - RNA, 25 nt, Artificial Sequence
  Description of Artificial Sequence: Synthetic oligonucleotide
gacagaagcauuuugauaggaauag

SEQ ID NO: 46255 - RNA, 25 nt, Artificial Sequence
  Description of Artificial Sequence: Synthetic oligonucleotide
agagcaaauaagauaauggcccuga

SEQ ID NO: 46256 - RNA, 25 nt, Artificial Sequence
  Description of Artificial Sequence: Synthetic oligonucleotide
ccaacauuuuucucuuccucaagca

SEQ ID NO: 46257 - RNA, 25 nt, Artificial Sequence
  Description of Artificial Sequence: Synthetic oligonucleotide
uuaaguaugagaaaaguucagccca

SEQ ID NO: 46258 - RNA, 25 nt, Artificial Sequence
  Description of Artificial Sequence: Synthetic oligonucleotide
caggaauaaagauggcugcugaacc

SEQ ID NO: 46259 - RNA, 25 nt, Artificial Sequence
  Description of Artificial Sequence: Synthetic oligonucleotide
aauuugaaugaccaaguucucuuca

SEQ ID NO: 46260 - RNA, 25 nt, Artificial Sequence
  Description of Artificial Sequence: Synthetic oligonucleotide
auguauaaagauagccagccuagag

SEQ ID NO: 46261 - RNA, 25 nt, Artificial Sequence
  Description of Artificial Sequence: Synthetic oligonucleotide
ggcuguaacuaucucugugaagugu

SEQ ID NO: 46262 - RNA, 25 nt, Artificial Sequence
  Description of Artificial Sequence: Synthetic oligonucleotide
ucugugaagugugagaaaauuucaa

SEQ ID NO: 46263 - RNA, 25 nt, Artificial Sequence
  Description of Artificial Sequence: Synthetic oligonucleotide
ccuuuaaggaaaugaauccuccuga

SEQ ID NO: 46264 - RNA, 25 nt, Artificial Sequence
  Description of Artificial Sequence: Synthetic oligonucleotide
aaggauacaaaaagugacaucauau

SEQ ID NO: 46265 - RNA, 25 nt, Artificial Sequence
  Description of Artificial Sequence: Synthetic oligonucleotide
agaugcaauuugaaucuucaucaua

SEQ ID NO: 46266 - RNA, 25 nt, Artificial Sequence
  Description of Artificial Sequence: Synthetic oligonucleotide
guucaaaacgaagacuagcuauuaa

SEQ ID NO: 46267 - RNA, 25 nt, Artificial Sequence
  Description of Artificial Sequence: Synthetic oligonucleotide
gugaaaccucaucucuacuaaaaau

SEQ ID NO: 46268 - RNA, 25 nt, Artificial Sequence
  Description of Artificial Sequence: Synthetic oligonucleotide
acgaaagagaagcucuaucucgccu

SEQ ID NO: 46269 - RNA, 25 nt, Artificial Sequence
  Description of Artificial Sequence: Synthetic oligonucleotide
cuccacaagcgccuucgguccaguu

SEQ ID NO: 46270 - RNA, 25 nt, Artificial Sequence
  Description of Artificial Sequence: Synthetic oligonucleotide
gagaagauuccaaagauguagccgc

SEQ ID NO: 46271 - RNA, 25 nt, Artificial Sequence
  Description of Artificial Sequence: Synthetic oligonucleotide
aaucuggauucaaugaggagacuug

SEQ ID NO: 46272 - RNA, 25 nt, Artificial Sequence
  Description of Artificial Sequence: Synthetic oligonucleotide
agaacagauuugagaguagugagga

SEQ ID NO: 46273 - RNA, 25 nt, Artificial Sequence
  Description of Artificial Sequence: Synthetic oligonucleotide
ccagagcugugcagaugaguacaaa

SEQ ID NO: 46274 - RNA, 25 nt, Artificial Sequence
  Description of Artificial Sequence: Synthetic oligonucleotide
ccucagauuguuguuguuaaugggc

SEQ ID NO: 46275 - RNA, 25 nt, Artificial Sequence
  Description of Artificial Sequence: Synthetic oligonucleotide
cuauuuuaauuauuuuuaauuuauu

SEQ ID NO: 46276 - RNA, 25 nt, Artificial Sequence
  Description of Artificial Sequence: Synthetic oligonucleotide
uuuaauuuauuaauauuuaaauaug

SEQ ID NO: 46277 - RNA, 25 nt, Artificial Sequence
  Description of Artificial Sequence: Synthetic oligonucleotide
augcaguuugaauauccuuuguuuc

SEQ ID NO: 46278 - RNA, 25 nt, Artificial Sequence
  Description of Artificial Sequence: Synthetic oligonucleotide
caugcugcuggcgucuaaguguuug

SEQ ID NO: 46279 - RNA, 25 nt, Artificial Sequence
  Description of Artificial Sequence: Synthetic oligonucleotide
agaugugcauuucaccugugacaaa

SEQ ID NO: 46280 - RNA, 25 nt, Artificial Sequence
  Description of Artificial Sequence: Synthetic oligonucleotide
ucaaaaccugugccaggcugaauua

SEQ ID NO: 46281 - RNA, 25 nt, Artificial Sequence
  Description of Artificial Sequence: Synthetic oligonucleotide
gaauguggguagucauucuuacaau

SEQ ID NO: 46282 - RNA, 25 nt, Artificial Sequence
  Description of Artificial Sequence: Synthetic oligonucleotide
auguggguagucauucuuacaauug

SEQ ID NO: 46283 - RNA, 25 nt, Artificial Sequence
  Description of Artificial Sequence: Synthetic oligonucleotide
ugaaaaugagcaucagagaguguac

SEQ ID NO: 46284 - RNA, 25 nt, Artificial Sequence
  Description of Artificial Sequence: Synthetic oligonucleotide
uugcuuuucauguagaacucagcag

SEQ ID NO: 46285 - RNA, 25 nt, Artificial Sequence
  Description of Artificial Sequence: Synthetic oligonucleotide
uguauuucuauauuuauuuucagua

SEQ ID NO: 46286 - RNA, 25 nt, Artificial Sequence
  Description of Artificial Sequence: Synthetic oligonucleotide
uuugauuaauguuucuuaaauggaa

SEQ ID NO: 46287 - RNA, 25 nt, Artificial Sequence
  Description of Artificial Sequence: Synthetic oligonucleotide
caacguguauagugccuaaaauugu

SEQ ID NO: 46288 - RNA, 25 nt, Artificial Sequence
  Description of Artificial Sequence: Synthetic oligonucleotide
cauauccuuggcuacuaacaucugg

SEQ ID NO: 46289 - RNA, 25 nt, Artificial Sequence
  Description of Artificial Sequence: Synthetic oligonucleotide
uacuaacaucuggagacugugagcu

SEQ ID NO: 46290 - RNA, 25 nt, Artificial Sequence
  Description of Artificial Sequence: Synthetic oligonucleotide
cauaaguugugugcuuuuuauuaau

SEQ ID NO: 46291 - RNA, 25 nt, Artificial Sequence
  Description of Artificial Sequence: Synthetic oligonucleotide
gcaucauuuuggcucuucuuacauu

SEQ ID NO: 46292 - RNA, 25 nt, Artificial Sequence
  Description of Artificial Sequence: Synthetic oligonucleotide
gcucuucuuacauuuguaaaaaugu

SEQ ID NO: 46293 - RNA, 25 nt, Artificial Sequence
  Description of Artificial Sequence: Synthetic oligonucleotide
agauuaggucaucuuaauucauauu

SEQ ID NO: 46294 - RNA, 25 nt, Artificial Sequence
  Description of Artificial Sequence: Synthetic oligonucleotide
auggaauugaaagaacuaaucauga

SEQ ID NO: 46295 - RNA, 25 nt, Artificial Sequence
  Description of Artificial Sequence: Synthetic oligonucleotide
cacacucauuccuucugcucuuggg

SEQ ID NO: 46296 - RNA, 25 nt, Artificial Sequence
  Description of Artificial Sequence: Synthetic oligonucleotide
uguagagguaaccaguagcuuugag

SEQ ID NO: 46297 - RNA, 25 nt, Artificial Sequence
  Description of Artificial Sequence: Synthetic oligonucleotide
caaccacaugccacguaauauuuca

SEQ ID NO: 46298 - RNA, 25 nt, Artificial Sequence
  Description of Artificial Sequence: Synthetic oligonucleotide
ucggaaacaaguuauucucuucacu

SEQ ID NO: 46299 - RNA, 25 nt, Artificial Sequence
  Description of Artificial Sequence: Synthetic oligonucleotide
acucccaauaacuaaugcuaagaaa

SEQ ID NO: 46300 - RNA, 25 nt, Artificial Sequence
  Description of Artificial Sequence: Synthetic oligonucleotide
aaugcuaagaaaugcugaaaaucaa

SEQ ID NO: 46301 - RNA, 25 nt, Artificial Sequence
  Description of Artificial Sequence: Synthetic oligonucleotide
gucuuucucuaaauaugauuacuuu

SEQ ID NO: 46302 - RNA, 25 nt, Artificial Sequence
  Description of Artificial Sequence: Synthetic oligonucleotide
ugaauuucaggcauuuuguucuaca

SEQ ID NO: 46303 - RNA, 25 nt, Artificial Sequence
  Description of Artificial Sequence: Synthetic oligonucleotide
cgauucccucucacccgggacucuc

SEQ ID NO: 46304 - RNA, 25 nt, Artificial Sequence
  Description of Artificial Sequence: Synthetic oligonucleotide
aggaaagugaaccuuuaaaguaaag

SEQ ID NO: 46305 - RNA, 25 nt, Artificial Sequence
  Description of Artificial Sequence: Synthetic oligonucleotide
gaggcugcaugcucuggaagccugg

SEQ ID NO: 46306 - RNA, 25 nt, Artificial Sequence
  Description of Artificial Sequence: Synthetic oligonucleotide
ucucugaacagaaaacaaaagagag

SEQ ID NO: 46307 - RNA, 25 nt, Artificial Sequence
  Description of Artificial Sequence: Synthetic oligonucleotide
aacuuggcuguaaucaguuaugccg

SEQ ID NO: 46308 - RNA, 25 nt, Artificial Sequence
  Description of Artificial Sequence: Synthetic oligonucleotide
agaagccaaaauuaaaagaagucca

SEQ ID NO: 46309 - RNA, 25 nt, Artificial Sequence
  Description of Artificial Sequence: Synthetic oligonucleotide
auuaaaagaaguccaggugagguua

SEQ ID NO: 46310 - RNA, 25 nt, Artificial Sequence
  Description of Artificial Sequence: Synthetic oligonucleotide
gaauccggauuaucgggaagaggac

SEQ ID NO: 46311 - RNA, 25 nt, Artificial Sequence
  Description of Artificial Sequence: Synthetic oligonucleotide
aaugugacaucaaagcaaguauugu

SEQ ID NO: 46312 - RNA, 25 nt, Artificial Sequence
  Description of Artificial Sequence: Synthetic oligonucleotide
caucaaagcaaguauuguagcacuc

SEQ ID NO: 46313 - RNA, 25 nt, Artificial Sequence
  Description of Artificial Sequence: Synthetic oligonucleotide
agagagagaaaacaaaaccacaaau

SEQ ID NO: 46314 - RNA, 25 nt, Artificial Sequence
  Description of Artificial Sequence: Synthetic oligonucleotide
ucgcuguaguauuuaagcccauaca

SEQ ID NO: 46315 - RNA, 25 nt, Artificial Sequence
  Description of Artificial Sequence: Synthetic oligonucleotide
cgcuguaguauuuaagcccauacag

SEQ ID NO: 46316 - RNA, 25 nt, Artificial Sequence
  Description of Artificial Sequence: Synthetic oligonucleotide
auuuaagcccauacagaaaccuucc

SEQ ID NO: 46317 - RNA, 25 nt, Artificial Sequence
  Description of Artificial Sequence: Synthetic oligonucleotide
auuaaaauaaacaugguauaccuac

SEQ ID NO: 46318 - RNA, 25 nt, Artificial Sequence
  Description of Artificial Sequence: Synthetic oligonucleotide
cuguucugaucggccaguuuucgga

SEQ ID NO: 46319 - RNA, 25 nt, Artificial Sequence
  Description of Artificial Sequence: Synthetic oligonucleotide
aaauaauuugaacuuuggaacaggg

SEQ ID NO: 46320 - RNA, 25 nt, Artificial Sequence
  Description of Artificial Sequence: Synthetic oligonucleotide
ugcgaccuuaauuuaacuuuccagu

SEQ ID NO: 46321 - RNA, 25 nt, Artificial Sequence
  Description of Artificial Sequence: Synthetic oligonucleotide
cugagaaagcuaaaguuugguuuug

SEQ ID NO: 46322 - RNA, 25 nt, Artificial Sequence
  Description of Artificial Sequence: Synthetic oligonucleotide
aguaaagaugcuacuucccacugua

SEQ ID NO: 46323 - RNA, 25 nt, Artificial Sequence
  Description of Artificial Sequence: Synthetic oligonucleotide
cugcuuaauugcugauaccauauga

SEQ ID NO: 46324 - RNA, 25 nt, Artificial Sequence
  Description of Artificial Sequence: Synthetic oligonucleotide
uaccauaugaaugaaacaugggcug

SEQ ID NO: 46325 - RNA, 25 nt, Artificial Sequence
  Description of Artificial Sequence: Synthetic oligonucleotide
aacuuucuuauccaacuuuuucaua

SEQ ID NO: 46326 - RNA, 25 nt, Artificial Sequence
  Description of Artificial Sequence: Synthetic oligonucleotide
ccuugcaugacaucaugaggccgga

SEQ ID NO: 46327 - RNA, 25 nt, Artificial Sequence
  Description of Artificial Sequence: Synthetic oligonucleotide
ugaauuuguauaugacugcauuugu

SEQ ID NO: 46328 - RNA, 25 nt, Artificial Sequence
  Description of Artificial Sequence: Synthetic oligonucleotide
gaauccuaguagaauguuuacuacc

SEQ ID NO: 46329 - RNA, 25 nt, Artificial Sequence
  Description of Artificial Sequence: Synthetic oligonucleotide
gaaagggaagaauuuuuugaugaaa

SEQ ID NO: 46330 - RNA, 25 nt, Artificial Sequence
  Description of Artificial Sequence: Synthetic oligonucleotide
uaucggcaugccagugugugaauuu

SEQ ID NO: 46331 - RNA, 25 nt, Artificial Sequence
  Description of Artificial Sequence: Synthetic oligonucleotide
caccucauaguagagcaauguaugu

SEQ ID NO: 46332 - RNA, 25 nt, Artificial Sequence
  Description of Artificial Sequence: Synthetic oligonucleotide
ccagaauugccaaagcacauauaua

SEQ ID NO: 46333 - RNA, 25 nt, Artificial Sequence
  Description of Artificial Sequence: Synthetic oligonucleotide
uggugaucuggguaauaguuucucc

SEQ ID NO: 46334 - RNA, 25 nt, Artificial Sequence
  Description of Artificial Sequence: Synthetic oligonucleotide
gaucuggguaauaguuucuccaaau

SEQ ID NO: 46335 - RNA, 25 nt, Artificial Sequence
  Description of Artificial Sequence: Synthetic oligonucleotide
ggaugugaugaauacuuccuagaaa

SEQ ID NO: 46336 - RNA, 25 nt, Artificial Sequence
  Description of Artificial Sequence: Synthetic oligonucleotide
cauuuccacagcuacaccauauaug

SEQ ID NO: 46337 - RNA, 25 nt, Artificial Sequence
  Description of Artificial Sequence: Synthetic oligonucleotide
acagcuacaccauauaugaauggag

SEQ ID NO: 46338 - RNA, 25 nt, Artificial Sequence
  Description of Artificial Sequence: Synthetic oligonucleotide
ugcaguucuuacacgagaagaagau

SEQ ID NO: 46339 - RNA, 25 nt, Artificial Sequence
  Description of Artificial Sequence: Synthetic oligonucleotide
acgagaagaagaucauuuacaggga

SEQ ID NO: 46340 - RNA, 25 nt, Artificial Sequence
  Description of Artificial Sequence: Synthetic oligonucleotide
cgagaagaagaucauuuacagggac

SEQ ID NO: 46341 - RNA, 25 nt, Artificial Sequence
  Description of Artificial Sequence: Synthetic oligonucleotide
aagaagaucauuuacagggaccuga

SEQ ID NO: 46342 - RNA, 25 nt, Artificial Sequence
  Description of Artificial Sequence: Synthetic oligonucleotide
agaggaagagguguuugacugcauc

SEQ ID NO: 46343 - RNA, 25 nt, Artificial Sequence
  Description of Artificial Sequence: Synthetic oligonucleotide
gaggaagagguguuugacugcaucg

SEQ ID NO: 46344 - RNA, 25 nt, Artificial Sequence
  Description of Artificial Sequence: Synthetic oligonucleotide
cuacuuugagggcgaguucacaggg

SEQ ID NO: 46345 - RNA, 25 nt, Artificial Sequence
  Description of Artificial Sequence: Synthetic oligonucleotide
agggcaucuccuggcaccucugucc

SEQ ID NO: 46346 - RNA, 25 nt, Artificial Sequence
  Description of Artificial Sequence: Synthetic oligonucleotide
ggagugauaugguuugucuuuuuaa

SEQ ID NO: 46347 - RNA, 25 nt, Artificial Sequence
  Description of Artificial Sequence: Synthetic oligonucleotide
gagugauaugguuugucuuuuuaag

SEQ ID NO: 46348 - RNA, 25 nt, Artificial Sequence
  Description of Artificial Sequence: Synthetic oligonucleotide
ugcaguaaagauccuaaagguuguc

SEQ ID NO: 46349 - RNA, 25 nt, Artificial Sequence
  Description of Artificial Sequence: Synthetic oligonucleotide
aguaaagauccuaaagguugucgac

SEQ ID NO: 46350 - RNA, 25 nt, Artificial Sequence
  Description of Artificial Sequence: Synthetic oligonucleotide
ugacaaaggacaaccuggcaauugu

SEQ ID NO: 46351 - RNA, 25 nt, Artificial Sequence
  Description of Artificial Sequence: Synthetic oligonucleotide
gcaauugugacccaguggugcgagg

SEQ ID NO: 46352 - RNA, 25 nt, Artificial Sequence
  Description of Artificial Sequence: Synthetic oligonucleotide
aacaucauccauagagacaugaaau

SEQ ID NO: 46353 - RNA, 25 nt, Artificial Sequence
  Description of Artificial Sequence: Synthetic oligonucleotide
ugaaauccaacaauauauuucucca

SEQ ID NO: 46354 - RNA, 25 nt, Artificial Sequence
  Description of Artificial Sequence: Synthetic oligonucleotide
aacaauauauuucuccaugaaggcu

SEQ ID NO: 46355 - RNA, 25 nt, Artificial Sequence
  Description of Artificial Sequence: Synthetic oligonucleotide
aacaguaaagucacgcuggaguggu

SEQ ID NO: 46356 - RNA, 25 nt, Artificial Sequence
  Description of Artificial Sequence: Synthetic oligonucleotide
ugugaagaaaguaaaggaagagagg

SEQ ID NO: 46357 - RNA, 25 nt, Artificial Sequence
  Description of Artificial Sequence: Synthetic oligonucleotide
cuuccgagccauccuugcaucgggc

SEQ ID NO: 46358 - RNA, 25 nt, Artificial Sequence
  Description of Artificial Sequence: Synthetic oligonucleotide
aauggagguugaauauccuacugug

SEQ ID NO: 46359 - RNA, 25 nt, Artificial Sequence
  Description of Artificial Sequence: Synthetic oligonucleotide
ggagguugaauauccuacuguguaa

SEQ ID NO: 46360 - RNA, 25 nt, Artificial Sequence
  Description of Artificial Sequence: Synthetic oligonucleotide
auuuugaguuuucccuuguagugua

SEQ ID NO: 46361 - RNA, 25 nt, Artificial Sequence
  Description of Artificial Sequence: Synthetic oligonucleotide
uauccuguuuguucuuuguugauug

SEQ ID NO: 46362 - RNA, 25 nt, Artificial Sequence
  Description of Artificial Sequence: Synthetic oligonucleotide
ccuguuuguucuuuguugauugaaa

SEQ ID NO: 46363 - RNA, 25 nt, Artificial Sequence
  Description of Artificial Sequence: Synthetic oligonucleotide
cucuacagccuucuuuuucuuccau

SEQ ID NO: 46364 - RNA, 25 nt, Artificial Sequence
  Description of Artificial Sequence: Synthetic oligonucleotide
ucuuccauagcuaaucuuccuucua

SEQ ID NO: 46365 - RNA, 25 nt, Artificial Sequence
  Description of Artificial Sequence: Synthetic oligonucleotide
auaaucuuccuguugaaugcuucau

SEQ ID NO: 46366 - RNA, 25 nt, Artificial Sequence
  Description of Artificial Sequence: Synthetic oligonucleotide
uaaucuuccuguugaaugcuucaug

SEQ ID NO: 46367 - RNA, 25 nt, Artificial Sequence
  Description of Artificial Sequence: Synthetic oligonucleotide
cuucaugacuugaauucuacuuuga

SEQ ID NO: 46368 - RNA, 25 nt, Artificial Sequence
  Description of Artificial Sequence: Synthetic oligonucleotide
aagagggagagaagcaacuacagac

SEQ ID NO: 46369 - RNA, 25 nt, Artificial Sequence
  Description of Artificial Sequence: Synthetic oligonucleotide
cgucuccuaccagaccaaggucaac

SEQ ID NO: 46370 - RNA, 25 nt, Artificial Sequence
  Description of Artificial Sequence: Synthetic oligonucleotide
gaucaaucggcccgacuaucucgac

SEQ ID NO: 46371 - RNA, 25 nt, Artificial Sequence
  Description of Artificial Sequence: Synthetic oligonucleotide
ggacgaacauccaaccuucccaaac

SEQ ID NO: 46372 - RNA, 25 nt, Artificial Sequence
  Description of Artificial Sequence: Synthetic oligonucleotide
agggucggaacccaagcuuagaacu

SEQ ID NO: 46373 - RNA, 25 nt, Artificial Sequence
  Description of Artificial Sequence: Synthetic oligonucleotide
ucggaacccaagcuuagaacuuuaa

SEQ ID NO: 46374 - RNA, 25 nt, Artificial Sequence
  Description of Artificial Sequence: Synthetic oligonucleotide
acccaagcuuagaacuuuaagcaac

SEQ ID NO: 46375 - RNA, 25 nt, Artificial Sequence
  Description of Artificial Sequence: Synthetic oligonucleotide
gaacuuuaagcaacaagaccaccac

SEQ ID NO: 46376 - RNA, 25 nt, Artificial Sequence
  Description of Artificial Sequence: Synthetic oligonucleotide
acuauucaguggcgagaaauaaagu

SEQ ID NO: 46377 - RNA, 25 nt, Artificial Sequence
  Description of Artificial Sequence: Synthetic oligonucleotide
cuauucaguggcgagaaauaaaguu

SEQ ID NO: 46378 - RNA, 25 nt, Artificial Sequence
  Description of Artificial Sequence: Synthetic oligonucleotide
aaacacagauaacaggaaaugaucc

SEQ ID NO: 46379 - RNA, 25 nt, Artificial Sequence
  Description of Artificial Sequence: Synthetic oligonucleotide
cuuaagaaaagagaagaaaugaaac

SEQ ID NO: 46380 - RNA, 25 nt, Artificial Sequence
  Description of Artificial Sequence: Synthetic oligonucleotide
cugaaggaguguguuuccauccucc

SEQ ID NO: 46381 - RNA, 25 nt, Artificial Sequence
  Description of Artificial Sequence: Synthetic oligonucleotide
ucaccgcgggacugaaaaucuuuga

SEQ ID NO: 46382 - RNA, 25 nt, Artificial Sequence
  Description of Artificial Sequence: Synthetic oligonucleotide
agcagaaauaagcgugccguucagg

SEQ ID NO: 46383 - RNA, 25 nt, Artificial Sequence
  Description of Artificial Sequence: Synthetic oligonucleotide
aagcgugccguucaggguccagaag

SEQ ID NO: 46384 - RNA, 25 nt, Artificial Sequence
  Description of Artificial Sequence: Synthetic oligonucleotide
agaaacagucacucaagacugcuug

SEQ ID NO: 46385 - RNA, 25 nt, Artificial Sequence
  Description of Artificial Sequence: Synthetic oligonucleotide
agaggaagaagguccaugucuuugg

SEQ ID NO: 46386 - RNA, 25 nt, Artificial Sequence
  Description of Artificial Sequence: Synthetic oligonucleotide
uguauucaaaauaugccugaaacac

SEQ ID NO: 46387 - RNA, 25 nt, Artificial Sequence
  Description of Artificial Sequence: Synthetic oligonucleotide
auuuuccucccuuucucuguaccuc

SEQ ID NO: 46388 - RNA, 25 nt, Artificial Sequence
  Description of Artificial Sequence: Synthetic oligonucleotide
caaagaaagauagagcaagacaaga

SEQ ID NO: 46389 - RNA, 25 nt, Artificial Sequence
  Description of Artificial Sequence: Synthetic oligonucleotide
aagaaagauagagcaagacaagaaa

SEQ ID NO: 46390 - RNA, 25 nt, Artificial Sequence
  Description of Artificial Sequence: Synthetic oligonucleotide
gaaagcauuuguuuguacaagaucc

SEQ ID NO: 46391 - RNA, 25 nt, Artificial Sequence
  Description of Artificial Sequence: Synthetic oligonucleotide
ugaguuaaacgaacguacuugcaga

SEQ ID NO: 46392 - RNA, 25 nt, Artificial Sequence
  Description of Artificial Sequence: Synthetic oligonucleotide
acugauacagaacgaucgauacaga

SEQ ID NO: 46393 - RNA, 25 nt, Artificial Sequence
  Description of Artificial Sequence: Synthetic oligonucleotide
auauuauauauauauaaaaauaaau

SEQ ID NO: 46394 - RNA, 25 nt, Artificial Sequence
  Description of Artificial Sequence: Synthetic oligonucleotide
auuauauauauauaaaaauaaauau

SEQ ID NO: 46395 - RNA, 25 nt, Artificial Sequence
  Description of Artificial Sequence: Synthetic oligonucleotide
ucacuggauguauuugacugcugug

SEQ ID NO: 46396 - RNA, 25 nt, Artificial Sequence
  Description of Artificial Sequence: Synthetic oligonucleotide
cagggaagaggaggagaugagagac

SEQ ID NO: 46397 - RNA, 25 nt, Artificial Sequence
  Description of Artificial Sequence: Synthetic oligonucleotide
augaucuuuuuuuugucccacuugg

SEQ ID NO: 46398 - RNA, 27 nt, Artificial Sequence
  Description of Artificial Sequence: Synthetic oligonucleotide
ggccgugaacuccucaucaaaauaccu

SEQ ID NO: 46399 - RNA, 27 nt, Artificial Sequence
  Description of Artificial Sequence: Synthetic oligonucleotide
uggugugauggugaucaucugggccgu

SEQ ID NO: 46400 - RNA, 27 nt, Artificial Sequence
  Description of Artificial Sequence: Synthetic oligonucleotide
aaacccgcaggauaguuuucuucccua

SEQ ID NO: 46401 - RNA, 27 nt, Artificial Sequence
  Description of Artificial Sequence: Synthetic oligonucleotide
caaacuggaugaaauaaauuaaaaccc

SEQ ID NO: 46402 - RNA, 27 nt, Artificial Sequence
  Description of Artificial Sequence: Synthetic oligonucleotide
agaaguccuuaacauuucccuacguga

SEQ ID NO: 46403 - RNA, 27 nt, Artificial Sequence
  Description of Artificial Sequence: Synthetic oligonucleotide
cucugucccacuggguaaacccuggcc

SEQ ID NO: 46404 - RNA, 27 nt, Artificial Sequence
  Description of Artificial Sequence: Synthetic oligonucleotide
cacaauaacaaauuuaaaccuugcucc

SEQ ID NO: 46405 - RNA, 27 nt, Artificial Sequence
  Description of Artificial Sequence: Synthetic oligonucleotide
aaaugcauuugaacaacauaauacaca

SEQ ID NO: 46406 - RNA, 27 nt, Artificial Sequence
  Description of Artificial Sequence: Synthetic oligonucleotide
ggcuuuccugucacaaagauuaaaaac

SEQ ID NO: 46407 - RNA, 27 nt, Artificial Sequence
  Description of Artificial Sequence: Synthetic oligonucleotide
agggcuuuccugucacaaagauuaaaa

SEQ ID NO: 46408 - RNA, 27 nt, Artificial Sequence
  Description of Artificial Sequence: Synthetic oligonucleotide
ggccaugcugggagacauaagcagcag

SEQ ID NO: 46409 - RNA, 27 nt, Artificial Sequence
  Description of Artificial Sequence: Synthetic oligonucleotide
ucagggagaagcuucugaaacacuucu

SEQ ID NO: 46410 - RNA, 27 nt, Artificial Sequence
  Description of Artificial Sequence: Synthetic oligonucleotide
aagggcuucuuccuuauugauggucag

SEQ ID NO: 46411 - RNA, 27 nt, Artificial Sequence
  Description of Artificial Sequence: Synthetic oligonucleotide
ugaagggcuucuuccuuauugaugguc

SEQ ID NO: 46412 - RNA, 27 nt, Artificial Sequence
  Description of Artificial Sequence: Synthetic oligonucleotide
cgcugaagggcuucuuccuuauugaug

SEQ ID NO: 46413 - RNA, 27 nt, Artificial Sequence
  Description of Artificial Sequence: Synthetic oligonucleotide
gccgcugaagggcuucuuccuuauuga

SEQ ID NO: 46414 - RNA, 27 nt, Artificial Sequence
  Description of Artificial Sequence: Synthetic oligonucleotide
acuggccgcugaagggcuucuuccuua

SEQ ID NO: 46415 - RNA, 27 nt, Artificial Sequence
  Description of Artificial Sequence: Synthetic oligonucleotide
cggagcuuuucaccuuuaguuaugcuu

SEQ ID NO: 46416 - RNA, 27 nt, Artificial Sequence
  Description of Artificial Sequence: Synthetic oligonucleotide
ccggagcuuuucaccuuuaguuaugcu

SEQ ID NO: 46417 - RNA, 27 nt, Artificial Sequence
  Description of Artificial Sequence: Synthetic oligonucleotide
cagacuguugacuggcgugauguaguu

SEQ ID NO: 46418 - RNA, 27 nt, Artificial Sequence
  Description of Artificial Sequence: Synthetic oligonucleotide
cuuuugaacucugcuuaaauccagugg

SEQ ID NO: 46419 - RNA, 27 nt, Artificial Sequence
  Description of Artificial Sequence: Synthetic oligonucleotide
gcuuuugaacucugcuuaaauccagug

SEQ ID NO: 46420 - RNA, 27 nt, Artificial Sequence
  Description of Artificial Sequence: Synthetic oligonucleotide
agggcuuuugaacucugcuuaaaucca

SEQ ID NO: 46421 - RNA, 27 nt, Artificial Sequence
  Description of Artificial Sequence: Synthetic oligonucleotide
aagggcuuuugaacucugcuuaaaucc

SEQ ID NO: 46422 - RNA, 27 nt, Artificial Sequence
  Description of Artificial Sequence: Synthetic oligonucleotide
ugaagggcuuuugaacucugcuuaaau

SEQ ID NO: 46423 - RNA, 27 nt, Artificial Sequence
  Description of Artificial Sequence: Synthetic oligonucleotide
cugaagggcuuuugaacucugcuuaaa

SEQ ID NO: 46424 - RNA, 27 nt, Artificial Sequence
  Description of Artificial Sequence: Synthetic oligonucleotide
cgcugaagggcuuuugaacucugcuua

SEQ ID NO: 46425 - RNA, 27 nt, Artificial Sequence
  Description of Artificial Sequence: Synthetic oligonucleotide
cgagcggcuucacucagacccugaggc

SEQ ID NO: 46426 - RNA, 27 nt, Artificial Sequence
  Description of Artificial Sequence: Synthetic oligonucleotide
uugacuggcgugauguaguugcuuggg

SEQ ID NO: 46427 - RNA, 27 nt, Artificial Sequence
  Description of Artificial Sequence: Synthetic oligonucleotide
cacgcaccaagaagcugccauugaucc

SEQ ID NO: 46428 - RNA, 27 nt, Artificial Sequence
  Description of Artificial Sequence: Synthetic oligonucleotide
cugaugaauccaaugugggcuggaauc

SEQ ID NO: 46429 - RNA, 27 nt, Artificial Sequence
  Description of Artificial Sequence: Synthetic oligonucleotide
cuuagguauuccacauucucagcugug

SEQ ID NO: 46430 - RNA, 27 nt, Artificial Sequence
  Description of Artificial Sequence: Synthetic oligonucleotide
ugagccucaaauuaggagauacguuuu

SEQ ID NO: 46431 - RNA, 27 nt, Artificial Sequence
  Description of Artificial Sequence: Synthetic oligonucleotide
ccaauuguagagaaauuauuuuaggaa

SEQ ID NO: 46432 - RNA, 27 nt, Artificial Sequence
  Description of Artificial Sequence: Synthetic oligonucleotide
ggcuccuaacuagcugaaucuuccaau

SEQ ID NO: 46433 - RNA, 27 nt, Artificial Sequence
  Description of Artificial Sequence: Synthetic oligonucleotide
guggauauugacuaggagaguuuaaaa

SEQ ID NO: 46434 - RNA, 27 nt, Artificial Sequence
  Description of Artificial Sequence: Synthetic oligonucleotide
ugugacugaacauaacuguaggcugaa

SEQ ID NO: 46435 - RNA, 27 nt, Artificial Sequence
  Description of Artificial Sequence: Synthetic oligonucleotide
guaugugugugugacugaacauaacug

SEQ ID NO: 46436 - RNA, 27 nt, Artificial Sequence
  Description of Artificial Sequence: Synthetic oligonucleotide
aagcaaaaggaacauuuuguaugugug

SEQ ID NO: 46437 - RNA, 27 nt, Artificial Sequence
  Description of Artificial Sequence: Synthetic oligonucleotide
aaaaauuacuuuaaaagcaaaaggaac

SEQ ID NO: 46438 - RNA, 27 nt, Artificial Sequence
  Description of Artificial Sequence: Synthetic oligonucleotide
ccauugacuguugcuucacaggucaga

SEQ ID NO: 46439 - RNA, 27 nt, Artificial Sequence
  Description of Artificial Sequence: Synthetic oligonucleotide
auugguuugucgaugugugagauaguu

SEQ ID NO: 46440 - RNA, 27 nt, Artificial Sequence
  Description of Artificial Sequence: Synthetic oligonucleotide
agugguagcaguacaauugaggacaag

SEQ ID NO: 46441 - RNA, 27 nt, Artificial Sequence
  Description of Artificial Sequence: Synthetic oligonucleotide
uaagaccgcuugccagcuacgguuuca

SEQ ID NO: 46442 - RNA, 27 nt, Artificial Sequence
  Description of Artificial Sequence: Synthetic oligonucleotide
agccgguaagaccgcuugccagcuacg

SEQ ID NO: 46443 - RNA, 27 nt, Artificial Sequence
  Description of Artificial Sequence: Synthetic oligonucleotide
gguaacccaucuuuuaaccauacaacu

SEQ ID NO: 46444 - RNA, 27 nt, Artificial Sequence
  Description of Artificial Sequence: Synthetic oligonucleotide
ucgcagguaacccaucuuuuaaccaua

SEQ ID NO: 46445 - RNA, 27 nt, Artificial Sequence
  Description of Artificial Sequence: Synthetic oligonucleotide
cucagcaagauuguauaauucccugca

SEQ ID NO: 46446 - RNA, 27 nt, Artificial Sequence
  Description of Artificial Sequence: Synthetic oligonucleotide
acuguuuuaugcucagcaagauuguau

SEQ ID NO: 46447 - RNA, 27 nt, Artificial Sequence
  Description of Artificial Sequence: Synthetic oligonucleotide
aggauaaaggacucuucauuauuggaa

SEQ ID NO: 46448 - RNA, 27 nt, Artificial Sequence
  Description of Artificial Sequence: Synthetic oligonucleotide
caacuugcguuggaacauccaaagugu

SEQ ID NO: 46449 - RNA, 27 nt, Artificial Sequence
  Description of Artificial Sequence: Synthetic oligonucleotide
augguuucaguuuaguggaagcauuua

SEQ ID NO: 46450 - RNA, 27 nt, Artificial Sequence
  Description of Artificial Sequence: Synthetic oligonucleotide
auauuuaacaaagucaaacuuucucac

SEQ ID NO: 46451 - RNA, 27 nt, Artificial Sequence
  Description of Artificial Sequence: Synthetic oligonucleotide
aacuuuuaauauacaguaguucuuuuc

SEQ ID NO: 46452 - RNA, 27 nt, Artificial Sequence
  Description of Artificial Sequence: Synthetic oligonucleotide
guuaagucaaaacccguauuucuaaag

SEQ ID NO: 46453 - RNA, 27 nt, Artificial Sequence
  Description of Artificial Sequence: Synthetic oligonucleotide
gugcugaguuugcuguacccauguuga

SEQ ID NO: 46454 - RNA, 27 nt, Artificial Sequence
  Description of Artificial Sequence: Synthetic oligonucleotide
ugaggucagcaucuucugugucuuuac

SEQ ID NO: 46455 - RNA, 27 nt, Artificial Sequence
  Description of Artificial Sequence: Synthetic oligonucleotide
gcgaucugaauaaaccucccuacuagc

SEQ ID NO: 46456 - RNA, 27 nt, Artificial Sequence
  Description of Artificial Sequence: Synthetic oligonucleotide
aucccagaacccugcugcagaaggcca

SEQ ID NO: 46457 - RNA, 27 nt, Artificial Sequence
  Description of Artificial Sequence: Synthetic oligonucleotide
cauaauuuccaauauguaccagaccuu

SEQ ID NO: 46458 - RNA, 27 nt, Artificial Sequence
  Description of Artificial Sequence: Synthetic oligonucleotide
cuagugcuuccaucggaaggacuaggu

SEQ ID NO: 46459 - RNA, 27 nt, Artificial Sequence
  Description of Artificial Sequence: Synthetic oligonucleotide
uccacauaaaaacaauauucacuggga

SEQ ID NO: 46460 - RNA, 27 nt, Artificial Sequence
  Description of Artificial Sequence: Synthetic oligonucleotide
ucuaccaauuccaacuugaauucauug

SEQ ID NO: 46461 - RNA, 27 nt, Artificial Sequence
  Description of Artificial Sequence: Synthetic oligonucleotide
ucuccaagucuaaaucuguguccugag

SEQ ID NO: 46462 - RNA, 27 nt, Artificial Sequence
  Description of Artificial Sequence: Synthetic oligonucleotide
uggaauacuguaacugugcuuugagga

SEQ ID NO: 46463 - RNA, 27 nt, Artificial Sequence
  Description of Artificial Sequence: Synthetic oligonucleotide
uuaauucaucagugguggcagugguag

SEQ ID NO: 46464 - RNA, 27 nt, Artificial Sequence
  Description of Artificial Sequence: Synthetic oligonucleotide
gugaugauguggcacuaguaguuucuu

SEQ ID NO: 46465 - RNA, 27 nt, Artificial Sequence
  Description of Artificial Sequence: Synthetic oligonucleotide
ucuguuuggugaggcuguccgacuuug

SEQ ID NO: 46466 - RNA, 27 nt, Artificial Sequence
  Description of Artificial Sequence: Synthetic oligonucleotide
ccaucauguuccauuuuucgcuuucuc

SEQ ID NO: 46467 - RNA, 27 nt, Artificial Sequence
  Description of Artificial Sequence: Synthetic oligonucleotide
gcagucuacaugcuaaaucagagggua

SEQ ID NO: 46468 - RNA, 27 nt, Artificial Sequence
  Description of Artificial Sequence: Synthetic oligonucleotide
cauaaauagauccuuaaauagcucaaa

SEQ ID NO: 46469 - RNA, 27 nt, Artificial Sequence
  Description of Artificial Sequence: Synthetic oligonucleotide
ugauaauagugcuuuuucaccuuuuuc

SEQ ID NO: 46470 - RNA, 27 nt, Artificial Sequence
  Description of Artificial Sequence: Synthetic oligonucleotide
gcagaacugauaauagugcuuuuucac

SEQ ID NO: 46471 - RNA, 27 nt, Artificial Sequence
  Description of Artificial Sequence: Synthetic oligonucleotide
guagguuuaaucuuucuuuucagccau

SEQ ID NO: 46472 - RNA, 27 nt, Artificial Sequence
  Description of Artificial Sequence: Synthetic oligonucleotide
agaaggauuuuauuauaaggguuuaau

SEQ ID NO: 46473 - RNA, 27 nt, Artificial Sequence
  Description of Artificial Sequence: Synthetic oligonucleotide
gucuacagcauuggcuaauaguaugaa

SEQ ID NO: 46474 - RNA, 27 nt, Artificial Sequence
  Description of Artificial Sequence: Synthetic oligonucleotide
cuauuccuaucaaaaugcuucugucua

SEQ ID NO: 46475 - RNA, 27 nt, Artificial Sequence
  Description of Artificial Sequence: Synthetic oligonucleotide
ucagggccauuaucuuauuugcucuau

SEQ ID NO: 46476 - RNA, 27 nt, Artificial Sequence
  Description of Artificial Sequence: Synthetic oligonucleotide
ugcuugaggaagagaaaaauguugguc

SEQ ID NO: 46477 - RNA, 27 nt, Artificial Sequence
  Description of Artificial Sequence: Synthetic oligonucleotide
ugggcugaacuuuucucauacuuaaag

SEQ ID NO: 46478 - RNA, 27 nt, Artificial Sequence
  Description of Artificial Sequence: Synthetic oligonucleotide
gguucagcagccaucuuuauuccugcg

SEQ ID NO: 46479 - RNA, 27 nt, Artificial Sequence
  Description of Artificial Sequence: Synthetic oligonucleotide
ugaagagaacuuggucauucaaauuuc

SEQ ID NO: 46480 - RNA, 27 nt, Artificial Sequence
  Description of Artificial Sequence: Synthetic oligonucleotide
cucuaggcuggcuaucuuuauacauac

SEQ ID NO: 46481 - RNA, 27 nt, Artificial Sequence
  Description of Artificial Sequence: Synthetic oligonucleotide
acacuucacagagauaguuacagccau

SEQ ID NO: 46482 - RNA, 27 nt, Artificial Sequence
  Description of Artificial Sequence: Synthetic oligonucleotide
uugaaauuuucucacacuucacagaga

SEQ ID NO: 46483 - RNA, 27 nt, Artificial Sequence
  Description of Artificial Sequence: Synthetic oligonucleotide
ucaggaggauucauuuccuuaaaggaa

SEQ ID NO: 46484 - RNA, 27 nt, Artificial Sequence
  Description of Artificial Sequence: Synthetic oligonucleotide
auaugaugucacuuuuuguauccuuga

SEQ ID NO: 46485 - RNA, 27 nt, Artificial Sequence
  Description of Artificial Sequence: Synthetic oligonucleotide
uaugaugaagauucaaauugcaucuua

SEQ ID NO: 46486 - RNA, 27 nt, Artificial Sequence
  Description of Artificial Sequence: Synthetic oligonucleotide
uuaauagcuagucuucguuuugaacag

SEQ ID NO: 46487 - RNA, 27 nt, Artificial Sequence
  Description of Artificial Sequence: Synthetic oligonucleotide
auuuuuaguagagaugagguuucacca

SEQ ID NO: 46488 - RNA, 27 nt, Artificial Sequence
  Description of Artificial Sequence: Synthetic oligonucleotide
aggcgagauagagcuucucuuucguuc

SEQ ID NO: 46489 - RNA, 27 nt, Artificial Sequence
  Description of Artificial Sequence: Synthetic oligonucleotide
aacuggaccgaaggcgcuuguggagaa

SEQ ID NO: 46490 - RNA, 27 nt, Artificial Sequence
  Description of Artificial Sequence: Synthetic oligonucleotide
gcggcuacaucuuuggaaucuucuccu

SEQ ID NO: 46491 - RNA, 27 nt, Artificial Sequence
  Description of Artificial Sequence: Synthetic oligonucleotide
caagucuccucauugaauccagauugg

SEQ ID NO: 46492 - RNA, 27 nt, Artificial Sequence
  Description of Artificial Sequence: Synthetic oligonucleotide
uccucacuacucucaaaucuguucugg

SEQ ID NO: 46493 - RNA, 27 nt, Artificial Sequence
  Description of Artificial Sequence: Synthetic oligonucleotide
uuuguacucaucugcacagcucuggcu

SEQ ID NO: 46494 - RNA, 27 nt, Artificial Sequence
  Description of Artificial Sequence: Synthetic oligonucleotide
gcccauuaacaacaacaaucugaggug

SEQ ID NO: 46495 - RNA, 27 nt, Artificial Sequence
  Description of Artificial Sequence: Synthetic oligonucleotide
aauaaauuaaaaauaauuaaaauagug

SEQ ID NO: 46496 - RNA, 27 nt, Artificial Sequence
  Description of Artificial Sequence: Synthetic oligonucleotide
cauauuuaaauauuaauaaauuaaaaa

SEQ ID NO: 46497 - RNA, 27 nt, Artificial Sequence
  Description of Artificial Sequence: Synthetic oligonucleotide
gaaacaaaggauauucaaacugcauag

SEQ ID NO: 46498 - RNA, 27 nt, Artificial Sequence
  Description of Artificial Sequence: Synthetic oligonucleotide
caaacacuuagacgccagcagcauggg

SEQ ID NO: 46499 - RNA, 27 nt, Artificial Sequence
  Description of Artificial Sequence: Synthetic oligonucleotide
uuugucacaggugaaaugcacaucuga

SEQ ID NO: 46500 - RNA, 27 nt, Artificial Sequence
  Description of Artificial Sequence: Synthetic oligonucleotide
uaauucagccuggcacagguuuugauc

SEQ ID NO: 46501 - RNA, 27 nt, Artificial Sequence
  Description of Artificial Sequence: Synthetic oligonucleotide
auuguaagaaugacuacccacauucac

SEQ ID NO: 46502 - RNA, 27 nt, Artificial Sequence
  Description of Artificial Sequence: Synthetic oligonucleotide
caauuguaagaaugacuacccacauuc

SEQ ID NO: 46503 - RNA, 27 nt, Artificial Sequence
  Description of Artificial Sequence: Synthetic oligonucleotide
guacacucucugaugcucauuuucaua

SEQ ID NO: 46504 - RNA, 27 nt, Artificial Sequence
  Description of Artificial Sequence: Synthetic oligonucleotide
cugcugaguucuacaugaaaagcaaau

SEQ ID NO: 46505 - RNA, 27 nt, Artificial Sequence
  Description of Artificial Sequence: Synthetic oligonucleotide
uacugaaaauaaauauagaaauacaac

SEQ ID NO: 46506 - RNA, 27 nt, Artificial Sequence
  Description of Artificial Sequence: Synthetic oligonucleotide
uuccauuuaagaaacauuaaucaaaac

SEQ ID NO: 46507 - RNA, 27 nt, Artificial Sequence
  Description of Artificial Sequence: Synthetic oligonucleotide
acaauuuuaggcacuauacacguuguu

SEQ ID NO: 46508 - RNA, 27 nt, Artificial Sequence
  Description of Artificial Sequence: Synthetic oligonucleotide
ccagauguuaguagccaaggauauggu

SEQ ID NO: 46509 - RNA, 27 nt, Artificial Sequence
  Description of Artificial Sequence: Synthetic oligonucleotide
agcucacagucuccagauguuaguagc

SEQ ID NO: 46510 - RNA, 27 nt, Artificial Sequence
  Description of Artificial Sequence: Synthetic oligonucleotide
auuaauaaaaagcacacaacuuauggc

SEQ ID NO: 46511 - RNA, 27 nt, Artificial Sequence
  Description of Artificial Sequence: Synthetic oligonucleotide
aauguaagaagagccaaaaugaugcau

SEQ ID NO: 46512 - RNA, 27 nt, Artificial Sequence
  Description of Artificial Sequence: Synthetic oligonucleotide
acauuuuuacaaauguaagaagagcca

SEQ ID NO: 46513 - RNA, 27 nt, Artificial Sequence
  Description of Artificial Sequence: Synthetic oligonucleotide
aauaugaauuaagaugaccuaaucugu

SEQ ID NO: 46514 - RNA, 27 nt, Artificial Sequence
  Description of Artificial Sequence: Synthetic oligonucleotide
ucaugauuaguucuuucaauuccaucc

SEQ ID NO: 46515 - RNA, 27 nt, Artificial Sequence
  Description of Artificial Sequence: Synthetic oligonucleotide
cccaagagcagaaggaaugagugugca

SEQ ID NO: 46516 - RNA, 27 nt, Artificial Sequence
  Description of Artificial Sequence: Synthetic oligonucleotide
cucaaagcuacugguuaccucuacacc

SEQ ID NO: 46517 - RNA, 27 nt, Artificial Sequence
  Description of Artificial Sequence: Synthetic oligonucleotide
ugaaauauuacguggcaugugguuggg

SEQ ID NO: 46518 - RNA, 27 nt, Artificial Sequence
  Description of Artificial Sequence: Synthetic oligonucleotide
agugaagagaauaacuuguuuccgaag

SEQ ID NO: 46519 - RNA, 27 nt, Artificial Sequence
  Description of Artificial Sequence: Synthetic oligonucleotide
uuucuuagcauuaguuauugggaguga

SEQ ID NO: 46520 - RNA, 27 nt, Artificial Sequence
  Description of Artificial Sequence: Synthetic oligonucleotide
uugauuuucagcauuucuuagcauuag

SEQ ID NO: 46521 - RNA, 27 nt, Artificial Sequence
  Description of Artificial Sequence: Synthetic oligonucleotide
aaaguaaucauauuuagagaaagacag

SEQ ID NO: 46522 - RNA, 27 nt, Artificial Sequence
  Description of Artificial Sequence: Synthetic oligonucleotide
uguagaacaaaaugccugaaauucagc

SEQ ID NO: 46523 - RNA, 27 nt, Artificial Sequence
  Description of Artificial Sequence: Synthetic oligonucleotide
gagagucccgggugagagggaaucgcc

SEQ ID NO: 46524 - RNA, 27 nt, Artificial Sequence
  Description of Artificial Sequence: Synthetic oligonucleotide
cuuuacuuuaaagguucacuuuccuug

SEQ ID NO: 46525 - RNA, 27 nt, Artificial Sequence
  Description of Artificial Sequence: Synthetic oligonucleotide
ccaggcuuccagagcaugcagccuccu

SEQ ID NO: 46526 - RNA, 27 nt, Artificial Sequence
  Description of Artificial Sequence: Synthetic oligonucleotide
cucucuuuuguuuucuguucagagaaa

SEQ ID NO: 46527 - RNA, 27 nt, Artificial Sequence
  Description of Artificial Sequence: Synthetic oligonucleotide
cggcauaacugauuacagccaaguuca

SEQ ID NO: 46528 - RNA, 27 nt, Artificial Sequence
  Description of Artificial Sequence: Synthetic oligonucleotide
uggacuucuuuuaauuuuggcuucuuc

SEQ ID NO: 46529 - RNA, 27 nt, Artificial Sequence
  Description of Artificial Sequence: Synthetic oligonucleotide
uaaccucaccuggacuucuuuuaauuu

SEQ ID NO: 46530 - RNA, 27 nt, Artificial Sequence
  Description of Artificial Sequence: Synthetic oligonucleotide
guccucuucccgauaauccggauucag

SEQ ID NO: 46531 - RNA, 27 nt, Artificial Sequence
  Description of Artificial Sequence: Synthetic oligonucleotide
acaauacuugcuuugaugucacauuaa

SEQ ID NO: 46532 - RNA, 27 nt, Artificial Sequence
  Description of Artificial Sequence: Synthetic oligonucleotide
gagugcuacaauacuugcuuugauguc

SEQ ID NO: 46533 - RNA, 27 nt, Artificial Sequence
  Description of Artificial Sequence: Synthetic oligonucleotide
auuugugguuuuguuuucucucucucu

SEQ ID NO: 46534 - RNA, 27 nt, Artificial Sequence
  Description of Artificial Sequence: Synthetic oligonucleotide
uguaugggcuuaaauacuacagcgagg

SEQ ID NO: 46535 - RNA, 27 nt, Artificial Sequence
  Description of Artificial Sequence: Synthetic oligonucleotide
cuguaugggcuuaaauacuacagcgag

SEQ ID NO: 46536 - RNA, 27 nt, Artificial Sequence
  Description of Artificial Sequence: Synthetic oligonucleotide
ggaagguuucuguaugggcuuaaauac

SEQ ID NO: 46537 - RNA, 27 nt, Artificial Sequence
  Description of Artificial Sequence: Synthetic oligonucleotide
guagguauaccauguuuauuuuaauac

SEQ ID NO: 46538 - RNA, 27 nt, Artificial Sequence
  Description of Artificial Sequence: Synthetic oligonucleotide
uccgaaaacuggccgaucagaacagcc

SEQ ID NO: 46539 - RNA, 27 nt, Artificial Sequence
  Description of Artificial Sequence: Synthetic oligonucleotide
cccuguuccaaaguucaaauuauuugu

SEQ ID NO: 46540 - RNA, 27 nt, Artificial Sequence
  Description of Artificial Sequence: Synthetic oligonucleotide
acuggaaaguuaaauuaaggucgcaau

SEQ ID NO: 46541 - RNA, 27 nt, Artificial Sequence
  Description of Artificial Sequence: Synthetic oligonucleotide
caaaaccaaacuuuagcuuucucagcc

SEQ ID NO: 46542 - RNA, 27 nt, Artificial Sequence
  Description of Artificial Sequence: Synthetic oligonucleotide
uacagugggaaguagcaucuuuacuuu

SEQ ID NO: 46543 - RNA, 27 nt, Artificial Sequence
  Description of Artificial Sequence: Synthetic oligonucleotide
ucauaugguaucagcaauuaagcagua

SEQ ID NO: 46544 - RNA, 27 nt, Artificial Sequence
  Description of Artificial Sequence: Synthetic oligonucleotide
cagcccauguuucauucauaugguauc

SEQ ID NO: 46545 - RNA, 27 nt, Artificial Sequence
  Description of Artificial Sequence: Synthetic oligonucleotide
uaugaaaaaguuggauaagaaaguugg

SEQ ID NO: 46546 - RNA, 27 nt, Artificial Sequence
  Description of Artificial Sequence: Synthetic oligonucleotide
uccggccucaugaugucaugcaaggcu

SEQ ID NO: 46547 - RNA, 27 nt, Artificial Sequence
  Description of Artificial Sequence: Synthetic oligonucleotide
acaaaugcagucauauacaaauucagg

SEQ ID NO: 46548 - RNA, 27 nt, Artificial Sequence
  Description of Artificial Sequence: Synthetic oligonucleotide
gguaguaaacauucuacuaggauucuu

SEQ ID NO: 46549 - RNA, 27 nt, Artificial Sequence
  Description of Artificial Sequence: Synthetic oligonucleotide
uuucaucaaaaaauucuucccuuucug

SEQ ID NO: 46550 - RNA, 27 nt, Artificial Sequence
  Description of Artificial Sequence: Synthetic oligonucleotide
aaauucacacacuggcaugccgauagc

SEQ ID NO: 46551 - RNA, 27 nt, Artificial Sequence
  Description of Artificial Sequence: Synthetic oligonucleotide
acauacauugcucuacuaugaggugaa

SEQ ID NO: 46552 - RNA, 27 nt, Artificial Sequence
  Description of Artificial Sequence: Synthetic oligonucleotide
uauauaugugcuuuggcaauucuggug

SEQ ID NO: 46553 - RNA, 27 nt, Artificial Sequence
  Description of Artificial Sequence: Synthetic oligonucleotide
ggagaaacuauuacccagaucaccacu

SEQ ID NO: 46554 - RNA, 27 nt, Artificial Sequence
  Description of Artificial Sequence: Synthetic oligonucleotide
auuuggagaaacuauuacccagaucac

SEQ ID NO: 46555 - RNA, 27 nt, Artificial Sequence
  Description of Artificial Sequence: Synthetic oligonucleotide
uuucuaggaaguauucaucacauccac

SEQ ID NO: 46556 - RNA, 27 nt, Artificial Sequence
  Description of Artificial Sequence: Synthetic oligonucleotide
cauauaugguguagcuguggaaaugcg

SEQ ID NO: 46557 - RNA, 27 nt, Artificial Sequence
  Description of Artificial Sequence: Synthetic oligonucleotide
cuccauucauauaugguguagcugugg

SEQ ID NO: 46558 - RNA, 27 nt, Artificial Sequence
  Description of Artificial Sequence: Synthetic oligonucleotide
aucuucuucucguguaagaacugcagc

SEQ ID NO: 46559 - RNA, 27 nt, Artificial Sequence
  Description of Artificial Sequence: Synthetic oligonucleotide
ucccuguaaaugaucuucuucucgugu

SEQ ID NO: 46560 - RNA, 27 nt, Artificial Sequence
  Description of Artificial Sequence: Synthetic oligonucleotide
gucccuguaaaugaucuucuucucgug

SEQ ID NO: 46561 - RNA, 27 nt, Artificial Sequence
  Description of Artificial Sequence: Synthetic oligonucleotide
ucaggucccuguaaaugaucuucuucu

SEQ ID NO: 46562 - RNA, 27 nt, Artificial Sequence
  Description of Artificial Sequence: Synthetic oligonucleotide
gaugcagucaaacaccucuuccucugu

SEQ ID NO: 46563 - RNA, 27 nt, Artificial Sequence
  Description of Artificial Sequence: Synthetic oligonucleotide
cgaugcagucaaacaccucuuccucug

SEQ ID NO: 46564 - RNA, 27 nt, Artificial Sequence
  Description of Artificial Sequence: Synthetic oligonucleotide
cccugugaacucgcccucaaaguagcg

SEQ ID NO: 46565 - RNA, 27 nt, Artificial Sequence
  Description of Artificial Sequence: Synthetic oligonucleotide
ggacagaggugccaggagaugcccuca

SEQ ID NO: 46566 - RNA, 27 nt, Artificial Sequence
  Description of Artificial Sequence: Synthetic oligonucleotide
uuaaaaagacaaaccauaucacuccuu

SEQ ID NO: 46567 - RNA, 27 nt, Artificial Sequence
  Description of Artificial Sequence: Synthetic oligonucleotide
cuuaaaaagacaaaccauaucacuccu

SEQ ID NO: 46568 - RNA, 27 nt, Artificial Sequence
  Description of Artificial Sequence: Synthetic oligonucleotide
gacaaccuuuaggaucuuuacugcaac

SEQ ID NO: 46569 - RNA, 27 nt, Artificial Sequence
  Description of Artificial Sequence: Synthetic oligonucleotide
gucgacaaccuuuaggaucuuuacugc

SEQ ID NO: 46570 - RNA, 27 nt, Artificial Sequence
  Description of Artificial Sequence: Synthetic oligonucleotide
acaauugccagguuguccuuugucaug

SEQ ID NO: 46571 - RNA, 27 nt, Artificial Sequence
  Description of Artificial Sequence: Synthetic oligonucleotide
ccucgcaccacugggucacaauugcca

SEQ ID NO: 46572 - RNA, 27 nt, Artificial Sequence
  Description of Artificial Sequence: Synthetic oligonucleotide
auuucaugucucuauggaugauguucu

SEQ ID NO: 46573 - RNA, 27 nt, Artificial Sequence
  Description of Artificial Sequence: Synthetic oligonucleotide
uggagaaauauauuguuggauuucaug

SEQ ID NO: 46574 - RNA, 27 nt, Artificial Sequence
  Description of Artificial Sequence: Synthetic oligonucleotide
agccuucauggagaaauauauuguugg

SEQ ID NO: 46575 - RNA, 27 nt, Artificial Sequence
  Description of Artificial Sequence: Synthetic oligonucleotide
accacuccagcgugacuuuacuguugc

SEQ ID NO: 46576 - RNA, 27 nt, Artificial Sequence
  Description of Artificial Sequence: Synthetic oligonucleotide
ccucucuuccuuuacuuucuucacaca

SEQ ID NO: 46577 - RNA, 27 nt, Artificial Sequence
  Description of Artificial Sequence: Synthetic oligonucleotide
gcccgaugcaaggauggcucggaagcg

SEQ ID NO: 46578 - RNA, 27 nt, Artificial Sequence
  Description of Artificial Sequence: Synthetic oligonucleotide
cacaguaggauauucaaccuccauuuc

SEQ ID NO: 46579 - RNA, 27 nt, Artificial Sequence
  Description of Artificial Sequence: Synthetic oligonucleotide
uuacacaguaggauauucaaccuccau

SEQ ID NO: 46580 - RNA, 27 nt, Artificial Sequence
  Description of Artificial Sequence: Synthetic oligonucleotide
uacacuacaagggaaaacucaaaaucu

SEQ ID NO: 46581 - RNA, 27 nt, Artificial Sequence
  Description of Artificial Sequence: Synthetic oligonucleotide
caaucaacaaagaacaaacaggauaaa

SEQ ID NO: 46582 - RNA, 27 nt, Artificial Sequence
  Description of Artificial Sequence: Synthetic oligonucleotide
uuucaaucaacaaagaacaaacaggau

SEQ ID NO: 46583 - RNA, 27 nt, Artificial Sequence
  Description of Artificial Sequence: Synthetic oligonucleotide
auggaagaaaaagaaggcuguagagaa

SEQ ID NO: 46584 - RNA, 27 nt, Artificial Sequence
  Description of Artificial Sequence: Synthetic oligonucleotide
uagaaggaagauuagcuauggaagaaa

SEQ ID NO: 46585 - RNA, 27 nt, Artificial Sequence
  Description of Artificial Sequence: Synthetic oligonucleotide
augaagcauucaacaggaagauuauuu

SEQ ID NO: 46586 - RNA, 27 nt, Artificial Sequence
  Description of Artificial Sequence: Synthetic oligonucleotide
caugaagcauucaacaggaagauuauu

SEQ ID NO: 46587 - RNA, 27 nt, Artificial Sequence
  Description of Artificial Sequence: Synthetic oligonucleotide
ucaaaguagaauucaagucaugaagca

SEQ ID NO: 46588 - RNA, 27 nt, Artificial Sequence
  Description of Artificial Sequence: Synthetic oligonucleotide
gucuguaguugcuucucucccucuuag

SEQ ID NO: 46589 - RNA, 27 nt, Artificial Sequence
  Description of Artificial Sequence: Synthetic oligonucleotide
guugaccuuggucugguaggagacggc

SEQ ID NO: 46590 - RNA, 27 nt, Artificial Sequence
  Description of Artificial Sequence: Synthetic oligonucleotide
gucgagauagucgggccgauugaucuc

SEQ ID NO: 46591 - RNA, 27 nt, Artificial Sequence
  Description of Artificial Sequence: Synthetic oligonucleotide
guuugggaagguuggauguucguccuc

SEQ ID NO: 46592 - RNA, 27 nt, Artificial Sequence
  Description of Artificial Sequence: Synthetic oligonucleotide
aguucuaagcuuggguuccgacccuaa

SEQ ID NO: 46593 - RNA, 27 nt, Artificial Sequence
  Description of Artificial Sequence: Synthetic oligonucleotide
uuaaaguucuaagcuuggguuccgacc

SEQ ID NO: 46594 - RNA, 27 nt, Artificial Sequence
  Description of Artificial Sequence: Synthetic oligonucleotide
guugcuuaaaguucuaagcuuggguuc

SEQ ID NO: 46595 - RNA, 27 nt, Artificial Sequence
  Description of Artificial Sequence: Synthetic oligonucleotide
gugguggucuuguugcuuaaaguucua

SEQ ID NO: 46596 - RNA, 27 nt, Artificial Sequence
  Description of Artificial Sequence: Synthetic oligonucleotide
acuuuauuucucgccacugaauaguag

SEQ ID NO: 46597 - RNA, 27 nt, Artificial Sequence
  Description of Artificial Sequence: Synthetic oligonucleotide
aacuuuauuucucgccacugaauagua

SEQ ID NO: 46598 - RNA, 27 nt, Artificial Sequence
  Description of Artificial Sequence: Synthetic oligonucleotide
ggaucauuuccuguuaucuguguuugu

SEQ ID NO: 46599 - RNA, 27 nt, Artificial Sequence
  Description of Artificial Sequence: Synthetic oligonucleotide
guuucauuucuucucuuuucuuaaggc

SEQ ID NO: 46600 - RNA, 27 nt, Artificial Sequence
  Description of Artificial Sequence: Synthetic oligonucleotide
ggaggauggaaacacacuccuucaguu

SEQ ID NO: 46601 - RNA, 27 nt, Artificial Sequence
  Description of Artificial Sequence: Synthetic oligonucleotide
ucaaagauuuucagucccgcggugaca

SEQ ID NO: 46602 - RNA, 27 nt, Artificial Sequence
  Description of Artificial Sequence: Synthetic oligonucleotide
ccugaacggcacgcuuauuucugcugu

SEQ ID NO: 46603 - RNA, 27 nt, Artificial Sequence
  Description of Artificial Sequence: Synthetic oligonucleotide
cuucuggacccugaacggcacgcuuau

SEQ ID NO: 46604 - RNA, 27 nt, Artificial Sequence
  Description of Artificial Sequence: Synthetic oligonucleotide
caagcagucuugagugacuguuucuuc

SEQ ID NO: 46605 - RNA, 27 nt, Artificial Sequence
  Description of Artificial Sequence: Synthetic oligonucleotide
ccaaagacauggaccuucuuccucuga

SEQ ID NO: 46606 - RNA, 27 nt, Artificial Sequence
  Description of Artificial Sequence: Synthetic oligonucleotide
guguuucaggcauauuuugaauacauc

SEQ ID NO: 46607 - RNA, 27 nt, Artificial Sequence
  Description of Artificial Sequence: Synthetic oligonucleotide
gagguacagagaaagggaggaaaauag

SEQ ID NO: 46608 - RNA, 27 nt, Artificial Sequence
  Description of Artificial Sequence: Synthetic oligonucleotide
ucuugucuugcucuaucuuucuuuggu

SEQ ID NO: 46609 - RNA, 27 nt, Artificial Sequence
  Description of Artificial Sequence: Synthetic oligonucleotide
uuucuugucuugcucuaucuuucuuug

SEQ ID NO: 46610 - RNA, 27 nt, Artificial Sequence
  Description of Artificial Sequence: Synthetic oligonucleotide
ggaucuuguacaaacaaaugcuuucuc

SEQ ID NO: 46611 - RNA, 27 nt, Artificial Sequence
  Description of Artificial Sequence: Synthetic oligonucleotide
ucugcaaguacguucguuuaacucaag

SEQ ID NO: 46612 - RNA, 27 nt, Artificial Sequence
  Description of Artificial Sequence: Synthetic oligonucleotide
ucuguaucgaucguucuguaucagucu

SEQ ID NO: 46613 - RNA, 27 nt, Artificial Sequence
  Description of Artificial Sequence: Synthetic oligonucleotide
auuuauuuuuauauauauauaauauau

SEQ ID NO: 46614 - RNA, 27 nt, Artificial Sequence
  Description of Artificial Sequence: Synthetic oligonucleotide
auauuuauuuuuauauauauauaauau

SEQ ID NO: 46615 - RNA, 27 nt, Artificial Sequence
  Description of Artificial Sequence: Synthetic oligonucleotide
cacagcagucaaauacauccagugaag

SEQ ID NO: 46616 - RNA, 27 nt, Artificial Sequence
  Description of Artificial Sequence: Synthetic oligonucleotide
gucucucaucuccuccucuucccuguc

SEQ ID NO: 46617 - RNA, 27 nt, Artificial Sequence
  Description of Artificial Sequence: Synthetic oligonucleotide
ccaagugggacaaaaaaaagaucaugc

SEQ ID NO: 46618 - RNA, 14 nt, Artificial Sequence
  Description of Artificial Sequence: Synthetic oligonucleotide
guauuuugaugagg

SEQ ID NO: 46619 - RNA, 12 nt, Artificial Sequence
  Description of Artificial Sequence: Synthetic oligonucleotide
ggcccagaugau

SEQ ID NO: 46620 - RNA, 14 nt, Artificial Sequence
  Description of Artificial Sequence: Synthetic oligonucleotide
gggaagaaaacuau

SEQ ID NO: 46621 - RNA, 15 nt, Artificial Sequence
  Description of Artificial Sequence: Synthetic oligonucleotide
guuuuaauuuauuuc

SEQ ID NO: 46622 - RNA, 12 nt, Artificial Sequence
  Description of Artificial Sequence: Synthetic oligonucleotide
acguagggaaau

SEQ ID NO: 46623 - RNA, 12 nt, Artificial Sequence
  Description of Artificial Sequence: Synthetic oligonucleotide
ccaggguuuacc

SEQ ID NO: 46624 - RNA, 11 nt, Artificial Sequence
  Description of Artificial Sequence: Synthetic oligonucleotide
agcaagguuua

SEQ ID NO: 46625 - RNA, 12 nt, Artificial Sequence
  Description of Artificial Sequence: Synthetic oligonucleotide
uguauuauguug

SEQ ID NO: 46626 - RNA, 15 nt, Artificial Sequence
  Description of Artificial Sequence: Synthetic oligonucleotide
uuuuaaucuuuguga

SEQ ID NO: 46627 - RNA, 14 nt, Artificial Sequence
  Description of Artificial Sequence: Synthetic oligonucleotide
uuaaucuuugugac

SEQ ID NO: 46628 - RNA, 13 nt, Artificial Sequence
  Description of Artificial Sequence: Synthetic oligonucleotide
gcugcuuaugucu

SEQ ID NO: 46629 - RNA, 14 nt, Artificial Sequence
  Description of Artificial Sequence: Synthetic oligonucleotide
aaguguuucagaag

SEQ ID NO: 46630 - RNA, 13 nt, Artificial Sequence
  Description of Artificial Sequence: Synthetic oligonucleotide
gaccaucaauaag

SEQ ID NO: 46631 - RNA, 13 nt, Artificial Sequence
  Description of Artificial Sequence: Synthetic oligonucleotide
ccaucaauaagga

SEQ ID NO: 46632 - RNA, 14 nt, Artificial Sequence
  Description of Artificial Sequence: Synthetic oligonucleotide
ucaauaaggaagaa

SEQ ID NO: 46633 - RNA, 14 nt, Artificial Sequence
  Description of Artificial Sequence: Synthetic oligonucleotide
aauaaggaagaagc

SEQ ID NO: 46634 - RNA, 13 nt, Artificial Sequence
  Description of Artificial Sequence: Synthetic oligonucleotide
aggaagaagcccu

SEQ ID NO: 46635 - RNA, 13 nt, Artificial Sequence
  Description of Artificial Sequence: Synthetic oligonucleotide
gcauaacuaaagg

SEQ ID NO: 46636 - RNA, 14 nt, Artificial Sequence
  Description of Artificial Sequence: Synthetic oligonucleotide
cauaacuaaaggug

SEQ ID NO: 46637 - RNA, 12 nt, Artificial Sequence
  Description of Artificial Sequence: Synthetic oligonucleotide
cuacaucacgcc

SEQ ID NO: 46638 - RNA, 12 nt, Artificial Sequence
  Description of Artificial Sequence: Synthetic oligonucleotide
acuggauuuaag

SEQ ID NO: 46639 - RNA, 12 nt, Artificial Sequence
  Description of Artificial Sequence: Synthetic oligonucleotide
cuggauuuaagc

SEQ ID NO: 46640 - RNA, 13 nt, Artificial Sequence
  Description of Artificial Sequence: Synthetic oligonucleotide
gauuuaagcagag

SEQ ID NO: 46641 - RNA, 13 nt, Artificial Sequence
  Description of Artificial Sequence: Synthetic oligonucleotide
auuuaagcagagu

SEQ ID NO: 46642 - RNA, 13 nt, Artificial Sequence
  Description of Artificial Sequence: Synthetic oligonucleotide
uuaagcagaguuc

SEQ ID NO: 46643 - RNA, 13 nt, Artificial Sequence
  Description of Artificial Sequence: Synthetic oligonucleotide
uaagcagaguuca

SEQ ID NO: 46644 - RNA, 14 nt, Artificial Sequence
  Description of Artificial Sequence: Synthetic oligonucleotide
agcagaguucaaaa

SEQ ID NO: 46645 - RNA, 12 nt, Artificial Sequence
  Description of Artificial Sequence: Synthetic oligonucleotide
cucagggucuga

SEQ ID NO: 46646 - RNA, 13 nt, Artificial Sequence
  Description of Artificial Sequence: Synthetic oligonucleotide
caagcaacuacau

SEQ ID NO: 46647 - RNA, 12 nt, Artificial Sequence
  Description of Artificial Sequence: Synthetic oligonucleotide
aucaauggcagc

SEQ ID NO: 46648 - RNA, 11 nt, Artificial Sequence
  Description of Artificial Sequence: Synthetic oligonucleotide
uuccagcccac

SEQ ID NO: 46649 - RNA, 12 nt, Artificial Sequence
  Description of Artificial Sequence: Synthetic oligonucleotide
cagcugagaaug

SEQ ID NO: 46650 - RNA, 13 nt, Artificial Sequence
  Description of Artificial Sequence: Synthetic oligonucleotide
aacguaucuccua

SEQ ID NO: 46651 - RNA, 14 nt, Artificial Sequence
  Description of Artificial Sequence: Synthetic oligonucleotide
ccuaaaauaauuuc

SEQ ID NO: 46652 - RNA, 13 nt, Artificial Sequence
  Description of Artificial Sequence: Synthetic oligonucleotide
uggaagauucagc

SEQ ID NO: 46653 - RNA, 12 nt, Artificial Sequence
  Description of Artificial Sequence: Synthetic oligonucleotide
uuaaacucuccu

SEQ ID NO: 46654 - RNA, 12 nt, Artificial Sequence
  Description of Artificial Sequence: Synthetic oligonucleotide
cagccuacaguu

SEQ ID NO: 46655 - RNA, 13 nt, Artificial Sequence
  Description of Artificial Sequence: Synthetic oligonucleotide
guuauguucaguc

SEQ ID NO: 46656 - RNA, 13 nt, Artificial Sequence
  Description of Artificial Sequence: Synthetic oligonucleotide
cacauacaaaaug

SEQ ID NO: 46657 - RNA, 9 nt, Artificial Sequence
  Description of Artificial Sequence: Synthetic oligonucleotide
uccuuuugc

SEQ ID NO: 46658 - RNA, 12 nt, Artificial Sequence
  Description of Artificial Sequence: Synthetic oligonucleotide
ugaccugugaag

SEQ ID NO: 46659 - RNA, 12 nt, Artificial Sequence
  Description of Artificial Sequence: Synthetic oligonucleotide
cuaucucacaca

SEQ ID NO: 46660 - RNA, 13 nt, Artificial Sequence
  Description of Artificial Sequence: Synthetic oligonucleotide
uguccucaauugu

SEQ ID NO: 46661 - RNA, 12 nt, Artificial Sequence
  Description of Artificial Sequence: Synthetic oligonucleotide
aaaccguagcug

SEQ ID NO: 46662 - RNA, 12 nt, Artificial Sequence
  Description of Artificial Sequence: Synthetic oligonucleotide
uagcuggcaagc

SEQ ID NO: 46663 - RNA, 14 nt, Artificial Sequence
  Description of Artificial Sequence: Synthetic oligonucleotide
uuguaugguuaaaa

SEQ ID NO: 46664 - RNA, 14 nt, Artificial Sequence
  Description of Artificial Sequence: Synthetic oligonucleotide
ugguuaaaagaugg

SEQ ID NO: 46665 - RNA, 13 nt, Artificial Sequence
  Description of Artificial Sequence: Synthetic oligonucleotide
cagggaauuauac

SEQ ID NO: 46666 - RNA, 12 nt, Artificial Sequence
  Description of Artificial Sequence: Synthetic oligonucleotide
acaaucuugcug

SEQ ID NO: 46667 - RNA, 13 nt, Artificial Sequence
  Description of Artificial Sequence: Synthetic oligonucleotide
ccaauaaugaaga

SEQ ID NO: 46668 - RNA, 13 nt, Artificial Sequence
  Description of Artificial Sequence: Synthetic oligonucleotide
acuuuggauguuc

SEQ ID NO: 46669 - RNA, 12 nt, Artificial Sequence
  Description of Artificial Sequence: Synthetic oligonucleotide
aaugcuuccacu

SEQ ID NO: 46670 - RNA, 11 nt, Artificial Sequence
  Description of Artificial Sequence: Synthetic oligonucleotide
gagaaaguuug

SEQ ID NO: 46671 - RNA, 11 nt, Artificial Sequence
  Description of Artificial Sequence: Synthetic oligonucleotide
aaagaacuacu

SEQ ID NO: 46672 - RNA, 12 nt, Artificial Sequence
  Description of Artificial Sequence: Synthetic oligonucleotide
uuagaaauacgg

SEQ ID NO: 46673 - RNA, 12 nt, Artificial Sequence
  Description of Artificial Sequence: Synthetic oligonucleotide
aacauggguaca

SEQ ID NO: 46674 - RNA, 14 nt, Artificial Sequence
  Description of Artificial Sequence: Synthetic oligonucleotide
aaagacacagaaga

SEQ ID NO: 46675 - RNA, 11 nt, Artificial Sequence
  Description of Artificial Sequence: Synthetic oligonucleotide
uaguagggagg

SEQ ID NO: 46676 - RNA, 12 nt, Artificial Sequence
  Description of Artificial Sequence: Synthetic oligonucleotide
gccuucugcagc

SEQ ID NO: 46677 - RNA, 10 nt, Artificial Sequence
  Description of Artificial Sequence: Synthetic oligonucleotide
ggucugguac

SEQ ID NO: 46678 - RNA, 12 nt, Artificial Sequence
  Description of Artificial Sequence: Synthetic oligonucleotide
cuaguccuuccg

SEQ ID NO: 46679 - RNA, 12 nt, Artificial Sequence
  Description of Artificial Sequence: Synthetic oligonucleotide
ccagugaauauu

SEQ ID NO: 46680 - RNA, 13 nt, Artificial Sequence
  Description of Artificial Sequence: Synthetic oligonucleotide
augaauucaaguu

SEQ ID NO: 46681 - RNA, 12 nt, Artificial Sequence
  Description of Artificial Sequence: Synthetic oligonucleotide
caggacacagau

SEQ ID NO: 46682 - RNA, 12 nt, Artificial Sequence
  Description of Artificial Sequence: Synthetic oligonucleotide
cucaaagcacag

SEQ ID NO: 46683 - RNA, 10 nt, Artificial Sequence
  Description of Artificial Sequence: Synthetic oligonucleotide
accacugcca

SEQ ID NO: 46684 - RNA, 13 nt, Artificial Sequence
  Description of Artificial Sequence: Synthetic oligonucleotide
gaaacuacuagug

SEQ ID NO: 46685 - RNA, 12 nt, Artificial Sequence
  Description of Artificial Sequence: Synthetic oligonucleotide
aagucggacagc

SEQ ID NO: 46686 - RNA, 13 nt, Artificial Sequence
  Description of Artificial Sequence: Synthetic oligonucleotide
gaaagcgaaaaau

SEQ ID NO: 46687 - RNA, 13 nt, Artificial Sequence
  Description of Artificial Sequence: Synthetic oligonucleotide
cccucugauuuag

SEQ ID NO: 46688 - RNA, 12 nt, Artificial Sequence
  Description of Artificial Sequence: Synthetic oligonucleotide
ugagcuauuuaa

SEQ ID NO: 46689 - RNA, 13 nt, Artificial Sequence
  Description of Artificial Sequence: Synthetic oligonucleotide
aaaaggugaaaaa

SEQ ID NO: 46690 - RNA, 14 nt, Artificial Sequence
  Description of Artificial Sequence: Synthetic oligonucleotide
gaaaaagcacuauu

SEQ ID NO: 46691 - RNA, 12 nt, Artificial Sequence
  Description of Artificial Sequence: Synthetic oligonucleotide
ggcugaaaagaa

SEQ ID NO: 46692 - RNA, 12 nt, Artificial Sequence
  Description of Artificial Sequence: Synthetic oligonucleotide
uaaacccuuaua

SEQ ID NO: 46693 - RNA, 13 nt, Artificial Sequence
  Description of Artificial Sequence: Synthetic oligonucleotide
cauacuauuagcc

SEQ ID NO: 46694 - RNA, 12 nt, Artificial Sequence
  Description of Artificial Sequence: Synthetic oligonucleotide
gacagaagcauu

SEQ ID NO: 46695 - RNA, 14 nt, Artificial Sequence
  Description of Artificial Sequence: Synthetic oligonucleotide
agagcaaauaagau

SEQ ID NO: 46696 - RNA, 14 nt, Artificial Sequence
  Description of Artificial Sequence: Synthetic oligonucleotide
ccaacauuuuucuc

SEQ ID NO: 46697 - RNA, 15 nt, Artificial Sequence
  Description of Artificial Sequence: Synthetic oligonucleotide
uuaaguaugagaaaa

SEQ ID NO: 46698 - RNA, 14 nt, Artificial Sequence
  Description of Artificial Sequence: Synthetic oligonucleotide
caggaauaaagaug

SEQ ID NO: 46699 - RNA, 13 nt, Artificial Sequence
  Description of Artificial Sequence: Synthetic oligonucleotide
aauuugaaugacc

SEQ ID NO: 46700 - RNA, 14 nt, Artificial Sequence
  Description of Artificial Sequence: Synthetic oligonucleotide
auguauaaagauag

SEQ ID NO: 46701 - RNA, 12 nt, Artificial Sequence
  Description of Artificial Sequence: Synthetic oligonucleotide
ggcuguaacuau

SEQ ID NO: 46702 - RNA, 11 nt, Artificial Sequence
  Description of Artificial Sequence: Synthetic oligonucleotide
ucugugaagug

SEQ ID NO: 46703 - RNA, 14 nt, Artificial Sequence
  Description of Artificial Sequence: Synthetic oligonucleotide
ccuuuaaggaaaug

SEQ ID NO: 46704 - RNA, 13 nt, Artificial Sequence
  Description of Artificial Sequence: Synthetic oligonucleotide
aaggauacaaaaa

SEQ ID NO: 46705 - RNA, 12 nt, Artificial Sequence
  Description of Artificial Sequence: Synthetic oligonucleotide
agaugcaauuug

SEQ ID NO: 46706 - RNA, 12 nt, Artificial Sequence
  Description of Artificial Sequence: Synthetic oligonucleotide
guucaaaacgaa

SEQ ID NO: 46707 - RNA, 11 nt, Artificial Sequence
  Description of Artificial Sequence: Synthetic oligonucleotide
gugaaaccuca

SEQ ID NO: 46708 - RNA, 13 nt, Artificial Sequence
  Description of Artificial Sequence: Synthetic oligonucleotide
acgaaagagaagc

SEQ ID NO: 46709 - RNA, 12 nt, Artificial Sequence
  Description of Artificial Sequence: Synthetic oligonucleotide
cuccacaagcgc

SEQ ID NO: 46710 - RNA, 14 nt, Artificial Sequence
  Description of Artificial Sequence: Synthetic oligonucleotide
gagaagauuccaaa

SEQ ID NO: 46711 - RNA, 13 nt, Artificial Sequence
  Description of Artificial Sequence: Synthetic oligonucleotide
aaucuggauucaa

SEQ ID NO: 46712 - RNA, 13 nt, Artificial Sequence
  Description of Artificial Sequence: Synthetic oligonucleotide
agaacagauuuga

SEQ ID NO: 46713 - RNA, 11 nt, Artificial Sequence
  Description of Artificial Sequence: Synthetic oligonucleotide
ccagagcugug

SEQ ID NO: 46714 - RNA, 12 nt, Artificial Sequence
  Description of Artificial Sequence: Synthetic oligonucleotide
ccucagauuguu

SEQ ID NO: 46715 - RNA, 12 nt, Artificial Sequence
  Description of Artificial Sequence: Synthetic oligonucleotide
cuauuuuaauua

SEQ ID NO: 46716 - RNA, 13 nt, Artificial Sequence
  Description of Artificial Sequence: Synthetic oligonucleotide
uuuaauuuauuaa

SEQ ID NO: 46717 - RNA, 12 nt, Artificial Sequence
  Description of Artificial Sequence: Synthetic oligonucleotide
augcaguuugaa

SEQ ID NO: 46718 - RNA, 11 nt, Artificial Sequence
  Description of Artificial Sequence: Synthetic oligonucleotide
caugcugcugg

SEQ ID NO: 46719 - RNA, 13 nt, Artificial Sequence
  Description of Artificial Sequence: Synthetic oligonucleotide
agaugugcauuuc

SEQ ID NO: 46720 - RNA, 12 nt, Artificial Sequence
  Description of Artificial Sequence: Synthetic oligonucleotide
ucaaaaccugug

SEQ ID NO: 46721 - RNA, 11 nt, Artificial Sequence
  Description of Artificial Sequence: Synthetic oligonucleotide
gaaugugggua

SEQ ID NO: 46722 - RNA, 10 nt, Artificial Sequence
  Description of Artificial Sequence: Synthetic oligonucleotide
auguggguag

SEQ ID NO: 46723 - RNA, 13 nt, Artificial Sequence
  Description of Artificial Sequence: Synthetic oligonucleotide
ugaaaaugagcau

SEQ ID NO: 46724 - RNA, 13 nt, Artificial Sequence
  Description of Artificial Sequence: Synthetic oligonucleotide
uugcuuuucaugu

SEQ ID NO: 46725 - RNA, 12 nt, Artificial Sequence
  Description of Artificial Sequence: Synthetic oligonucleotide
uguauuucuaua

SEQ ID NO: 46726 - RNA, 13 nt, Artificial Sequence
  Description of Artificial Sequence: Synthetic oligonucleotide
uuugauuaauguu

SEQ ID NO: 46727 - RNA, 12 nt, Artificial Sequence
  Description of Artificial Sequence: Synthetic oligonucleotide
caacguguauag

SEQ ID NO: 46728 - RNA, 12 nt, Artificial Sequence
  Description of Artificial Sequence: Synthetic oligonucleotide
cauauccuuggc

SEQ ID NO: 46729 - RNA, 13 nt, Artificial Sequence
  Description of Artificial Sequence: Synthetic oligonucleotide
uacuaacaucugg

SEQ ID NO: 46730 - RNA, 11 nt, Artificial Sequence
  Description of Artificial Sequence: Synthetic oligonucleotide
cauaaguugug

SEQ ID NO: 46731 - RNA, 12 nt, Artificial Sequence
  Description of Artificial Sequence: Synthetic oligonucleotide
gcaucauuuugg

SEQ ID NO: 46732 - RNA, 10 nt, Artificial Sequence
  Description of Artificial Sequence: Synthetic oligonucleotide
gcucuucuua

SEQ ID NO: 46733 - RNA, 10 nt, Artificial Sequence
  Description of Artificial Sequence: Synthetic oligonucleotide
agauuagguc

SEQ ID NO: 46734 - RNA, 12 nt, Artificial Sequence
  Description of Artificial Sequence: Synthetic oligonucleotide
auggaauugaaa

SEQ ID NO: 46735 - RNA, 13 nt, Artificial Sequence
  Description of Artificial Sequence: Synthetic oligonucleotide
cacacucauuccu

SEQ ID NO: 46736 - RNA, 12 nt, Artificial Sequence
  Description of Artificial Sequence: Synthetic oligonucleotide
uguagagguaac

SEQ ID NO: 46737 - RNA, 11 nt, Artificial Sequence
  Description of Artificial Sequence: Synthetic oligonucleotide
caaccacaugc

SEQ ID NO: 46738 - RNA, 12 nt, Artificial Sequence
  Description of Artificial Sequence: Synthetic oligonucleotide
ucggaaacaagu

SEQ ID NO: 46739 - RNA, 11 nt, Artificial Sequence
  Description of Artificial Sequence: Synthetic oligonucleotide
acucccaauaa

SEQ ID NO: 46740 - RNA, 13 nt, Artificial Sequence
  Description of Artificial Sequence: Synthetic oligonucleotide
aaugcuaagaaau

SEQ ID NO: 46741 - RNA, 11 nt, Artificial Sequence
  Description of Artificial Sequence: Synthetic oligonucleotide
gucuuucucua

SEQ ID NO: 46742 - RNA, 11 nt, Artificial Sequence
  Description of Artificial Sequence: Synthetic oligonucleotide
ugaauuucagg

SEQ ID NO: 46743 - RNA, 13 nt, Artificial Sequence
  Description of Artificial Sequence: Synthetic oligonucleotide
cgauucccucuca

SEQ ID NO: 46744 - RNA, 11 nt, Artificial Sequence
  Description of Artificial Sequence: Synthetic oligonucleotide
aggaaagugaa

SEQ ID NO: 46745 - RNA, 12 nt, Artificial Sequence
  Description of Artificial Sequence: Synthetic oligonucleotide
gaggcugcaugc

SEQ ID NO: 46746 - RNA, 11 nt, Artificial Sequence
  Description of Artificial Sequence: Synthetic oligonucleotide
ucucugaacag

SEQ ID NO: 46747 - RNA, 12 nt, Artificial Sequence
  Description of Artificial Sequence: Synthetic oligonucleotide
aacuuggcugua

SEQ ID NO: 46748 - RNA, 12 nt, Artificial Sequence
  Description of Artificial Sequence: Synthetic oligonucleotide
agaagccaaaau

SEQ ID NO: 46749 - RNA, 14 nt, Artificial Sequence
  Description of Artificial Sequence: Synthetic oligonucleotide
auuaaaagaagucc

SEQ ID NO: 46750 - RNA, 14 nt, Artificial Sequence
  Description of Artificial Sequence: Synthetic oligonucleotide
gaauccggauuauc

SEQ ID NO: 46751 - RNA, 12 nt, Artificial Sequence
  Description of Artificial Sequence: Synthetic oligonucleotide
aaugugacauca

SEQ ID NO: 46752 - RNA, 13 nt, Artificial Sequence
  Description of Artificial Sequence: Synthetic oligonucleotide
caucaaagcaagu

SEQ ID NO: 46753 - RNA, 11 nt, Artificial Sequence
  Description of Artificial Sequence: Synthetic oligonucleotide
agagagagaaa

SEQ ID NO: 46754 - RNA, 13 nt, Artificial Sequence
  Description of Artificial Sequence: Synthetic oligonucleotide
ucgcuguaguauu

SEQ ID NO: 46755 - RNA, 14 nt, Artificial Sequence
  Description of Artificial Sequence: Synthetic oligonucleotide
cgcuguaguauuua

SEQ ID NO: 46756 - RNA, 13 nt, Artificial Sequence
  Description of Artificial Sequence: Synthetic oligonucleotide
auuuaagcccaua

SEQ ID NO: 46757 - RNA, 15 nt, Artificial Sequence
  Description of Artificial Sequence: Synthetic oligonucleotide
auuaaaauaaacaug

SEQ ID NO: 46758 - RNA, 12 nt, Artificial Sequence
  Description of Artificial Sequence: Synthetic oligonucleotide
cuguucugaucg

SEQ ID NO: 46759 - RNA, 16 nt, Artificial Sequence
  Description of Artificial Sequence: Synthetic oligonucleotide
aaauaauuugaacuuu

SEQ ID NO: 46760 - RNA, 12 nt, Artificial Sequence
  Description of Artificial Sequence: Synthetic oligonucleotide
ugcgaccuuaau

SEQ ID NO: 46761 - RNA, 11 nt, Artificial Sequence
  Description of Artificial Sequence: Synthetic oligonucleotide
cugagaaagcu

SEQ ID NO: 46762 - RNA, 13 nt, Artificial Sequence
  Description of Artificial Sequence: Synthetic oligonucleotide
aguaaagaugcua

SEQ ID NO: 46763 - RNA, 12 nt, Artificial Sequence
  Description of Artificial Sequence: Synthetic oligonucleotide
cugcuuaauugc

SEQ ID NO: 46764 - RNA, 14 nt, Artificial Sequence
  Description of Artificial Sequence: Synthetic oligonucleotide
uaccauaugaauga

SEQ ID NO: 46765 - RNA, 12 nt, Artificial Sequence
  Description of Artificial Sequence: Synthetic oligonucleotide
aacuuucuuauc

SEQ ID NO: 46766 - RNA, 13 nt, Artificial Sequence
  Description of Artificial Sequence: Synthetic oligonucleotide
ccuugcaugacau

SEQ ID NO: 46767 - RNA, 14 nt, Artificial Sequence
  Description of Artificial Sequence: Synthetic oligonucleotide
ugaauuuguauaug

SEQ ID NO: 46768 - RNA, 12 nt, Artificial Sequence
  Description of Artificial Sequence: Synthetic oligonucleotide
gaauccuaguag

SEQ ID NO: 46769 - RNA, 10 nt, Artificial Sequence
  Description of Artificial Sequence: Synthetic oligonucleotide
gaaagggaag

SEQ ID NO: 46770 - RNA, 11 nt, Artificial Sequence
  Description of Artificial Sequence: Synthetic oligonucleotide
uaucggcaugc

SEQ ID NO: 46771 - RNA, 12 nt, Artificial Sequence
  Description of Artificial Sequence: Synthetic oligonucleotide
caccucauagua

SEQ ID NO: 46772 - RNA, 11 nt, Artificial Sequence
  Description of Artificial Sequence: Synthetic oligonucleotide
ccagaauugcc

SEQ ID NO: 46773 - RNA, 11 nt, Artificial Sequence
  Description of Artificial Sequence: Synthetic oligonucleotide
uggugaucugg

SEQ ID NO: 46774 - RNA, 12 nt, Artificial Sequence
  Description of Artificial Sequence: Synthetic oligonucleotide
gaucuggguaau

SEQ ID NO: 46775 - RNA, 12 nt, Artificial Sequence
  Description of Artificial Sequence: Synthetic oligonucleotide
ggaugugaugaa

SEQ ID NO: 46776 - RNA, 12 nt, Artificial Sequence
  Description of Artificial Sequence: Synthetic oligonucleotide
cauuuccacagc

SEQ ID NO: 46777 - RNA, 11 nt, Artificial Sequence
  Description of Artificial Sequence: Synthetic oligonucleotide
acagcuacacc

SEQ ID NO: 46778 - RNA, 12 nt, Artificial Sequence
  Description of Artificial Sequence: Synthetic oligonucleotide
ugcaguucuuac

SEQ ID NO: 46779 - RNA, 12 nt, Artificial Sequence
  Description of Artificial Sequence: Synthetic oligonucleotide
acgagaagaaga

SEQ ID NO: 46780 - RNA, 12 nt, Artificial Sequence
  Description of Artificial Sequence: Synthetic oligonucleotide
cgagaagaagau

SEQ ID NO: 46781 - RNA, 15 nt, Artificial Sequence
  Description of Artificial Sequence: Synthetic oligonucleotide
aagaagaucauuuac

SEQ ID NO: 46782 - RNA, 11 nt, Artificial Sequence
  Description of Artificial Sequence: Synthetic oligonucleotide
agaggaagagg

SEQ ID NO: 46783 - RNA, 12 nt, Artificial Sequence
  Description of Artificial Sequence: Synthetic oligonucleotide
gaggaagaggug

SEQ ID NO: 46784 - RNA, 13 nt, Artificial Sequence
  Description of Artificial Sequence: Synthetic oligonucleotide
cuacuuugagggc

SEQ ID NO: 46785 - RNA, 12 nt, Artificial Sequence
  Description of Artificial Sequence: Synthetic oligonucleotide
agggcaucuccu

SEQ ID NO: 46786 - RNA, 10 nt, Artificial Sequence
  Description of Artificial Sequence: Synthetic oligonucleotide
ggagugauau

SEQ ID NO: 46787 - RNA, 11 nt, Artificial Sequence
  Description of Artificial Sequence: Synthetic oligonucleotide
gagugauaugg

SEQ ID NO: 46788 - RNA, 12 nt, Artificial Sequence
  Description of Artificial Sequence: Synthetic oligonucleotide
ugcaguaaagau

SEQ ID NO: 46789 - RNA, 13 nt, Artificial Sequence
  Description of Artificial Sequence: Synthetic oligonucleotide
aguaaagauccua

SEQ ID NO: 46790 - RNA, 12 nt, Artificial Sequence
  Description of Artificial Sequence: Synthetic oligonucleotide
ugacaaaggaca

SEQ ID NO: 46791 - RNA, 13 nt, Artificial Sequence
  Description of Artificial Sequence: Synthetic oligonucleotide
gcaauugugaccc

SEQ ID NO: 46792 - RNA, 12 nt, Artificial Sequence
  Description of Artificial Sequence: Synthetic oligonucleotide
aacaucauccau

SEQ ID NO: 46793 - RNA, 12 nt, Artificial Sequence
  Description of Artificial Sequence: Synthetic oligonucleotide
ugaaauccaaca

SEQ ID NO: 46794 - RNA, 15 nt, Artificial Sequence
  Description of Artificial Sequence: Synthetic oligonucleotide
aacaauauauuucuc

SEQ ID NO: 46795 - RNA, 14 nt, Artificial Sequence
  Description of Artificial Sequence: Synthetic oligonucleotide
aacaguaaagucac

SEQ ID NO: 46796 - RNA, 14 nt, Artificial Sequence
  Description of Artificial Sequence: Synthetic oligonucleotide
ugugaagaaaguaa

SEQ ID NO: 46797 - RNA, 13 nt, Artificial Sequence
  Description of Artificial Sequence: Synthetic oligonucleotide
cuuccgagccauc

SEQ ID NO: 46798 - RNA, 12 nt, Artificial Sequence
  Description of Artificial Sequence: Synthetic oligonucleotide
aauggagguuga

SEQ ID NO: 46799 - RNA, 12 nt, Artificial Sequence
  Description of Artificial Sequence: Synthetic oligonucleotide
ggagguugaaua

SEQ ID NO: 46800 - RNA, 13 nt, Artificial Sequence
  Description of Artificial Sequence: Synthetic oligonucleotide
auuuugaguuuuc

SEQ ID NO: 46801 - RNA, 12 nt, Artificial Sequence
  Description of Artificial Sequence: Synthetic oligonucleotide
uauccuguuugu

SEQ ID NO: 46802 - RNA, 11 nt, Artificial Sequence
  Description of Artificial Sequence: Synthetic oligonucleotide
ccuguuuguuc

SEQ ID NO: 46803 - RNA, 10 nt, Artificial Sequence
  Description of Artificial Sequence: Synthetic oligonucleotide
cucuacagcc

SEQ ID NO: 46804 - RNA, 12 nt, Artificial Sequence
  Description of Artificial Sequence: Synthetic oligonucleotide
ucuuccauagcu

SEQ ID NO: 46805 - RNA, 12 nt, Artificial Sequence
  Description of Artificial Sequence: Synthetic oligonucleotide
auaaucuuccug

SEQ ID NO: 46806 - RNA, 12 nt, Artificial Sequence
  Description of Artificial Sequence: Synthetic oligonucleotide
uaaucuuccugu

SEQ ID NO: 46807 - RNA, 12 nt, Artificial Sequence
  Description of Artificial Sequence: Synthetic oligonucleotide
cuucaugacuug

SEQ ID NO: 46808 - RNA, 12 nt, Artificial Sequence
  Description of Artificial Sequence: Synthetic oligonucleotide
aagagggagaga

SEQ ID NO: 46809 - RNA, 12 nt, Artificial Sequence
  Description of Artificial Sequence: Synthetic oligonucleotide
cgucuccuacca

SEQ ID NO: 46810 - RNA, 12 nt, Artificial Sequence
  Description of Artificial Sequence: Synthetic oligonucleotide
gaucaaucggcc

SEQ ID NO: 46811 - RNA, 12 nt, Artificial Sequence
  Description of Artificial Sequence: Synthetic oligonucleotide
ggacgaacaucc

SEQ ID NO: 46812 - RNA, 11 nt, Artificial Sequence
  Description of Artificial Sequence: Synthetic oligonucleotide
agggucggaac

SEQ ID NO: 46813 - RNA, 10 nt, Artificial Sequence
  Description of Artificial Sequence: Synthetic oligonucleotide
ucggaaccca

SEQ ID NO: 46814 - RNA, 11 nt, Artificial Sequence
  Description of Artificial Sequence: Synthetic oligonucleotide
acccaagcuua

SEQ ID NO: 46815 - RNA, 14 nt, Artificial Sequence
  Description of Artificial Sequence: Synthetic oligonucleotide
gaacuuuaagcaac

SEQ ID NO: 46816 - RNA, 11 nt, Artificial Sequence
  Description of Artificial Sequence: Synthetic oligonucleotide
acuauucagug

SEQ ID NO: 46817 - RNA, 11 nt, Artificial Sequence
  Description of Artificial Sequence: Synthetic oligonucleotide
cuauucagugg

SEQ ID NO: 46818 - RNA, 13 nt, Artificial Sequence
  Description of Artificial Sequence: Synthetic oligonucleotide
aaacacagauaac

SEQ ID NO: 46819 - RNA, 12 nt, Artificial Sequence
  Description of Artificial Sequence: Synthetic oligonucleotide
cuuaagaaaaga

SEQ ID NO: 46820 - RNA, 12 nt, Artificial Sequence
  Description of Artificial Sequence: Synthetic oligonucleotide
cugaaggagugu

SEQ ID NO: 46821 - RNA, 10 nt, Artificial Sequence
  Description of Artificial Sequence: Synthetic oligonucleotide
ucaccgcggg

SEQ ID NO: 46822 - RNA, 14 nt, Artificial Sequence
  Description of Artificial Sequence: Synthetic oligonucleotide
agcagaaauaagcg

SEQ ID NO: 46823 - RNA, 12 nt, Artificial Sequence
  Description of Artificial Sequence: Synthetic oligonucleotide
aagcgugccguu

SEQ ID NO: 46824 - RNA, 12 nt, Artificial Sequence
  Description of Artificial Sequence: Synthetic oligonucleotide
agaaacagucac

SEQ ID NO: 46825 - RNA, 12 nt, Artificial Sequence
  Description of Artificial Sequence: Synthetic oligonucleotide
agaggaagaagg

SEQ ID NO: 46826 - RNA, 14 nt, Artificial Sequence
  Description of Artificial Sequence: Synthetic oligonucleotide
uguauucaaaauau

SEQ ID NO: 46827 - RNA, 13 nt, Artificial Sequence
  Description of Artificial Sequence: Synthetic oligonucleotide
auuuuccucccuu

SEQ ID NO: 46828 - RNA, 13 nt, Artificial Sequence
  Description of Artificial Sequence: Synthetic oligonucleotide
caaagaaagauag

SEQ ID NO: 46829 - RNA, 12 nt, Artificial Sequence
  Description of Artificial Sequence: Synthetic oligonucleotide
aagaaagauaga

SEQ ID NO: 46830 - RNA, 13 nt, Artificial Sequence
  Description of Artificial Sequence: Synthetic oligonucleotide
gaaagcauuuguu

SEQ ID NO: 46831 - RNA, 13 nt, Artificial Sequence
  Description of Artificial Sequence: Synthetic oligonucleotide
ugaguuaaacgaa

SEQ ID NO: 46832 - RNA, 12 nt, Artificial Sequence
  Description of Artificial Sequence: Synthetic oligonucleotide
acugauacagaa

SEQ ID NO: 46833 - RNA, 12 nt, Artificial Sequence
  Description of Artificial Sequence: Synthetic oligonucleotide
auauuauauaua

SEQ ID NO: 46834 - RNA, 12 nt, Artificial Sequence
  Description of Artificial Sequence: Synthetic oligonucleotide
auuauauauaua

SEQ ID NO: 46835 - RNA, 12 nt, Artificial Sequence
  Description of Artificial Sequence: Synthetic oligonucleotide
ucacuggaugua

SEQ ID NO: 46836 - RNA, 12 nt, Artificial Sequence
  Description of Artificial Sequence: Synthetic oligonucleotide
cagggaagagga

SEQ ID NO: 46837 - RNA, 15 nt, Artificial Sequence
  Description of Artificial Sequence: Synthetic oligonucleotide
augaucuuuuuuuug

SEQ ID NO: 46838 - RNA, 11 nt, Artificial Sequence
  Description of Artificial Sequence: Synthetic oligonucleotide
aguucacggcc

SEQ ID NO: 46839 - RNA, 13 nt, Artificial Sequence
  Description of Artificial Sequence: Synthetic oligonucleotide
caccaucacacca

SEQ ID NO: 46840 - RNA, 11 nt, Artificial Sequence
  Description of Artificial Sequence: Synthetic oligonucleotide
ccugcggguuu

SEQ ID NO: 46841 - RNA, 10 nt, Artificial Sequence
  Description of Artificial Sequence: Synthetic oligonucleotide
auccaguuug

SEQ ID NO: 46842 - RNA, 13 nt, Artificial Sequence
  Description of Artificial Sequence: Synthetic oligonucleotide
guuaaggacuucu

SEQ ID NO: 46843 - RNA, 13 nt, Artificial Sequence
  Description of Artificial Sequence: Synthetic oligonucleotide
cagugggacagag

SEQ ID NO: 46844 - RNA, 14 nt, Artificial Sequence
  Description of Artificial Sequence: Synthetic oligonucleotide
aauuuguuauugug

SEQ ID NO: 46845 - RNA, 13 nt, Artificial Sequence
  Description of Artificial Sequence: Synthetic oligonucleotide
uucaaaugcauuu

SEQ ID NO: 46846 - RNA, 10 nt, Artificial Sequence
  Description of Artificial Sequence: Synthetic oligonucleotide
caggaaagcc

SEQ ID NO: 46847 - RNA, 11 nt, Artificial Sequence
  Description of Artificial Sequence: Synthetic oligonucleotide
aggaaagcccu

SEQ ID NO: 46848 - RNA, 12 nt, Artificial Sequence
  Description of Artificial Sequence: Synthetic oligonucleotide
cccagcauggcc

SEQ ID NO: 46849 - RNA, 11 nt, Artificial Sequence
  Description of Artificial Sequence: Synthetic oligonucleotide
cuucucccuga

SEQ ID NO: 46850 - RNA, 12 nt, Artificial Sequence
  Description of Artificial Sequence: Synthetic oligonucleotide
gaagaagcccuu

SEQ ID NO: 46851 - RNA, 12 nt, Artificial Sequence
  Description of Artificial Sequence: Synthetic oligonucleotide
agaagcccuuca

SEQ ID NO: 46852 - RNA, 11 nt, Artificial Sequence
  Description of Artificial Sequence: Synthetic oligonucleotide
gcccuucagcg

SEQ ID NO: 46853 - RNA, 11 nt, Artificial Sequence
  Description of Artificial Sequence: Synthetic oligonucleotide
ccuucagcggc

SEQ ID NO: 46854 - RNA, 12 nt, Artificial Sequence
  Description of Artificial Sequence: Synthetic oligonucleotide
ucagcggccagu

SEQ ID NO: 46855 - RNA, 12 nt, Artificial Sequence
  Description of Artificial Sequence: Synthetic oligonucleotide
ugaaaagcuccg

SEQ ID NO: 46856 - RNA, 11 nt, Artificial Sequence
  Description of Artificial Sequence: Synthetic oligonucleotide
aaaagcuccgg

SEQ ID NO: 46857 - RNA, 13 nt, Artificial Sequence
  Description of Artificial Sequence: Synthetic oligonucleotide
agucaacagucug

SEQ ID NO: 46858 - RNA, 13 nt, Artificial Sequence
  Description of Artificial Sequence: Synthetic oligonucleotide
cagaguucaaaag

SEQ ID NO: 46859 - RNA, 13 nt, Artificial Sequence
  Description of Artificial Sequence: Synthetic oligonucleotide
agaguucaaaagc

SEQ ID NO: 46860 - RNA, 12 nt, Artificial Sequence
  Description of Artificial Sequence: Synthetic oligonucleotide
uucaaaagcccu

SEQ ID NO: 46861 - RNA, 12 nt, Artificial Sequence
  Description of Artificial Sequence: Synthetic oligonucleotide
ucaaaagcccuu

SEQ ID NO: 46862 - RNA, 12 nt, Artificial Sequence
  Description of Artificial Sequence: Synthetic oligonucleotide
aaaagcccuuca

SEQ ID NO: 46863 - RNA, 12 nt, Artificial Sequence
  Description of Artificial Sequence: Synthetic oligonucleotide
aaagcccuucag

SEQ ID NO: 46864 - RNA, 13 nt, Artificial Sequence
  Description of Artificial Sequence: Synthetic oligonucleotide
gugaagccgcucg

SEQ ID NO: 46865 - RNA, 12 nt, Artificial Sequence
  Description of Artificial Sequence: Synthetic oligonucleotide
cacgccagucaa

SEQ ID NO: 46866 - RNA, 13 nt, Artificial Sequence
  Description of Artificial Sequence: Synthetic oligonucleotide
uucuuggugcgug

SEQ ID NO: 46867 - RNA, 14 nt, Artificial Sequence
  Description of Artificial Sequence: Synthetic oligonucleotide
auuggauucaucag

SEQ ID NO: 46868 - RNA, 13 nt, Artificial Sequence
  Description of Artificial Sequence: Synthetic oligonucleotide
uggaauaccuaag

SEQ ID NO: 46869 - RNA, 12 nt, Artificial Sequence
  Description of Artificial Sequence: Synthetic oligonucleotide
auuugaggcuca

SEQ ID NO: 46870 - RNA, 11 nt, Artificial Sequence
  Description of Artificial Sequence: Synthetic oligonucleotide
ucuacaauugg

SEQ ID NO: 46871 - RNA, 12 nt, Artificial Sequence
  Description of Artificial Sequence: Synthetic oligonucleotide
uaguuaggagcc

SEQ ID NO: 46872 - RNA, 13 nt, Artificial Sequence
  Description of Artificial Sequence: Synthetic oligonucleotide
agucaauauccac

SEQ ID NO: 46873 - RNA, 13 nt, Artificial Sequence
  Description of Artificial Sequence: Synthetic oligonucleotide
auguucagucaca

SEQ ID NO: 46874 - RNA, 12 nt, Artificial Sequence
  Description of Artificial Sequence: Synthetic oligonucleotide
acacacacauac

SEQ ID NO: 46875 - RNA, 12 nt, Artificial Sequence
  Description of Artificial Sequence: Synthetic oligonucleotide
uuccuuuugcuu

SEQ ID NO: 46876 - RNA, 16 nt, Artificial Sequence
  Description of Artificial Sequence: Synthetic oligonucleotide
uuuuaaaguaauuuuu

SEQ ID NO: 46877 - RNA, 13 nt, Artificial Sequence
  Description of Artificial Sequence: Synthetic oligonucleotide
caacagucaaugg

SEQ ID NO: 46878 - RNA, 13 nt, Artificial Sequence
  Description of Artificial Sequence: Synthetic oligonucleotide
ucgacaaaccaau

SEQ ID NO: 46879 - RNA, 12 nt, Artificial Sequence
  Description of Artificial Sequence: Synthetic oligonucleotide
acugcuaccacu

SEQ ID NO: 46880 - RNA, 13 nt, Artificial Sequence
  Description of Artificial Sequence: Synthetic oligonucleotide
gcaagcggucuua

SEQ ID NO: 46881 - RNA, 13 nt, Artificial Sequence
  Description of Artificial Sequence: Synthetic oligonucleotide
ggucuuaccggcu

SEQ ID NO: 46882 - RNA, 11 nt, Artificial Sequence
  Description of Artificial Sequence: Synthetic oligonucleotide
gauggguuacc

SEQ ID NO: 46883 - RNA, 11 nt, Artificial Sequence
  Description of Artificial Sequence: Synthetic oligonucleotide
guuaccugcga

SEQ ID NO: 46884 - RNA, 12 nt, Artificial Sequence
  Description of Artificial Sequence: Synthetic oligonucleotide
aaucuugcugag

SEQ ID NO: 46885 - RNA, 13 nt, Artificial Sequence
  Description of Artificial Sequence: Synthetic oligonucleotide
agcauaaaacagu

SEQ ID NO: 46886 - RNA, 12 nt, Artificial Sequence
  Description of Artificial Sequence: Synthetic oligonucleotide
guccuuuauccu

SEQ ID NO: 46887 - RNA, 12 nt, Artificial Sequence
  Description of Artificial Sequence: Synthetic oligonucleotide
caacgcaaguug

SEQ ID NO: 46888 - RNA, 13 nt, Artificial Sequence
  Description of Artificial Sequence: Synthetic oligonucleotide
aaacugaaaccau

SEQ ID NO: 46889 - RNA, 14 nt, Artificial Sequence
  Description of Artificial Sequence: Synthetic oligonucleotide
acuuuguuaaauau

SEQ ID NO: 46890 - RNA, 14 nt, Artificial Sequence
  Description of Artificial Sequence: Synthetic oligonucleotide
guauauuaaaaguu

SEQ ID NO: 46891 - RNA, 13 nt, Artificial Sequence
  Description of Artificial Sequence: Synthetic oligonucleotide
guuuugacuuaac

SEQ ID NO: 46892 - RNA, 13 nt, Artificial Sequence
  Description of Artificial Sequence: Synthetic oligonucleotide
gcaaacucagcac

SEQ ID NO: 46893 - RNA, 11 nt, Artificial Sequence
  Description of Artificial Sequence: Synthetic oligonucleotide
ugcugaccuca

SEQ ID NO: 46894 - RNA, 14 nt, Artificial Sequence
  Description of Artificial Sequence: Synthetic oligonucleotide
uuuauucagaucgc

SEQ ID NO: 46895 - RNA, 13 nt, Artificial Sequence
  Description of Artificial Sequence: Synthetic oligonucleotide
aggguucugggau

SEQ ID NO: 46896 - RNA, 15 nt, Artificial Sequence
  Description of Artificial Sequence: Synthetic oligonucleotide
auauuggaaauuaug

SEQ ID NO: 46897 - RNA, 13 nt, Artificial Sequence
  Description of Artificial Sequence: Synthetic oligonucleotide
auggaagcacuag

SEQ ID NO: 46898 - RNA, 13 nt, Artificial Sequence
  Description of Artificial Sequence: Synthetic oligonucleotide
guuuuuaugugga

SEQ ID NO: 46899 - RNA, 12 nt, Artificial Sequence
  Description of Artificial Sequence: Synthetic oligonucleotide
ggaauugguaga

SEQ ID NO: 46900 - RNA, 13 nt, Artificial Sequence
  Description of Artificial Sequence: Synthetic oligonucleotide
uuagacuuggaga

SEQ ID NO: 46901 - RNA, 13 nt, Artificial Sequence
  Description of Artificial Sequence: Synthetic oligonucleotide
uuacaguauucca

SEQ ID NO: 46902 - RNA, 15 nt, Artificial Sequence
  Description of Artificial Sequence: Synthetic oligonucleotide
ccacugaugaauuaa

SEQ ID NO: 46903 - RNA, 12 nt, Artificial Sequence
  Description of Artificial Sequence: Synthetic oligonucleotide
ccacaucaucac

SEQ ID NO: 46904 - RNA, 13 nt, Artificial Sequence
  Description of Artificial Sequence: Synthetic oligonucleotide
cucaccaaacaga

SEQ ID NO: 46905 - RNA, 12 nt, Artificial Sequence
  Description of Artificial Sequence: Synthetic oligonucleotide
ggaacaugaugg

SEQ ID NO: 46906 - RNA, 12 nt, Artificial Sequence
  Description of Artificial Sequence: Synthetic oligonucleotide
cauguagacugc

SEQ ID NO: 46907 - RNA, 13 nt, Artificial Sequence
  Description of Artificial Sequence: Synthetic oligonucleotide
ggaucuauuuaug

SEQ ID NO: 46908 - RNA, 12 nt, Artificial Sequence
  Description of Artificial Sequence: Synthetic oligonucleotide
gcacuauuauca

SEQ ID NO: 46909 - RNA, 11 nt, Artificial Sequence
  Description of Artificial Sequence: Synthetic oligonucleotide
aucaguucugc

SEQ ID NO: 46910 - RNA, 13 nt, Artificial Sequence
  Description of Artificial Sequence: Synthetic oligonucleotide
agauuaaaccuac

SEQ ID NO: 46911 - RNA, 13 nt, Artificial Sequence
  Description of Artificial Sequence: Synthetic oligonucleotide
auaaaauccuucu

SEQ ID NO: 46912 - RNA, 12 nt, Artificial Sequence
  Description of Artificial Sequence: Synthetic oligonucleotide
aaugcuguagac

SEQ ID NO: 46913 - RNA, 13 nt, Artificial Sequence
  Description of Artificial Sequence: Synthetic oligonucleotide
uugauaggaauag

SEQ ID NO: 46914 - RNA, 11 nt, Artificial Sequence
  Description of Artificial Sequence: Synthetic oligonucleotide
aauggcccuga

SEQ ID NO: 46915 - RNA, 11 nt, Artificial Sequence
  Description of Artificial Sequence: Synthetic oligonucleotide
uuccucaagca

SEQ ID NO: 46916 - RNA, 10 nt, Artificial Sequence
  Description of Artificial Sequence: Synthetic oligonucleotide
guucagccca

SEQ ID NO: 46917 - RNA, 11 nt, Artificial Sequence
  Description of Artificial Sequence: Synthetic oligonucleotide
gcugcugaacc

SEQ ID NO: 46918 - RNA, 12 nt, Artificial Sequence
  Description of Artificial Sequence: Synthetic oligonucleotide
aaguucucuuca

SEQ ID NO: 46919 - RNA, 11 nt, Artificial Sequence
  Description of Artificial Sequence: Synthetic oligonucleotide
ccagccuagag

SEQ ID NO: 46920 - RNA, 13 nt, Artificial Sequence
  Description of Artificial Sequence: Synthetic oligonucleotide
cucugugaagugu

SEQ ID NO: 46921 - RNA, 14 nt, Artificial Sequence
  Description of Artificial Sequence: Synthetic oligonucleotide
ugagaaaauuucaa

SEQ ID NO: 46922 - RNA, 11 nt, Artificial Sequence
  Description of Artificial Sequence: Synthetic oligonucleotide
aauccuccuga

SEQ ID NO: 46923 - RNA, 12 nt, Artificial Sequence
  Description of Artificial Sequence: Synthetic oligonucleotide
gugacaucauau

SEQ ID NO: 46924 - RNA, 13 nt, Artificial Sequence
  Description of Artificial Sequence: Synthetic oligonucleotide
aaucuucaucaua

SEQ ID NO: 46925 - RNA, 13 nt, Artificial Sequence
  Description of Artificial Sequence: Synthetic oligonucleotide
gacuagcuauuaa

SEQ ID NO: 46926 - RNA, 14 nt, Artificial Sequence
  Description of Artificial Sequence: Synthetic oligonucleotide
ucucuacuaaaaau

SEQ ID NO: 46927 - RNA, 12 nt, Artificial Sequence
  Description of Artificial Sequence: Synthetic oligonucleotide
ucuaucucgccu

SEQ ID NO: 46928 - RNA, 13 nt, Artificial Sequence
  Description of Artificial Sequence: Synthetic oligonucleotide
cuucgguccaguu

SEQ ID NO: 46929 - RNA, 11 nt, Artificial Sequence
  Description of Artificial Sequence: Synthetic oligonucleotide
gauguagccgc

SEQ ID NO: 46930 - RNA, 12 nt, Artificial Sequence
  Description of Artificial Sequence: Synthetic oligonucleotide
ugaggagacuug

SEQ ID NO: 46931 - RNA, 12 nt, Artificial Sequence
  Description of Artificial Sequence: Synthetic oligonucleotide
gaguagugagga

SEQ ID NO: 46932 - RNA, 14 nt, Artificial Sequence
  Description of Artificial Sequence: Synthetic oligonucleotide
cagaugaguacaaa

SEQ ID NO: 46933 - RNA, 13 nt, Artificial Sequence
  Description of Artificial Sequence: Synthetic oligonucleotide
guuguuaaugggc

SEQ ID NO: 46934 - RNA, 13 nt, Artificial Sequence
  Description of Artificial Sequence: Synthetic oligonucleotide
uuuuuaauuuauu

SEQ ID NO: 46935 - RNA, 12 nt, Artificial Sequence
  Description of Artificial Sequence: Synthetic oligonucleotide
uauuuaaauaug

SEQ ID NO: 46936 - RNA, 13 nt, Artificial Sequence
  Description of Artificial Sequence: Synthetic oligonucleotide
uauccuuuguuuc

SEQ ID NO: 46937 - RNA, 14 nt, Artificial Sequence
  Description of Artificial Sequence: Synthetic oligonucleotide
cgucuaaguguuug

SEQ ID NO: 46938 - RNA, 12 nt, Artificial Sequence
  Description of Artificial Sequence: Synthetic oligonucleotide
accugugacaaa

SEQ ID NO: 46939 - RNA, 13 nt, Artificial Sequence
  Description of Artificial Sequence: Synthetic oligonucleotide
ccaggcugaauua

SEQ ID NO: 46940 - RNA, 14 nt, Artificial Sequence
  Description of Artificial Sequence: Synthetic oligonucleotide
gucauucuuacaau

SEQ ID NO: 46941 - RNA, 15 nt, Artificial Sequence
  Description of Artificial Sequence: Synthetic oligonucleotide
ucauucuuacaauug

SEQ ID NO: 46942 - RNA, 12 nt, Artificial Sequence
  Description of Artificial Sequence: Synthetic oligonucleotide
cagagaguguac

SEQ ID NO: 46943 - RNA, 12 nt, Artificial Sequence
  Description of Artificial Sequence: Synthetic oligonucleotide
agaacucagcag

SEQ ID NO: 46944 - RNA, 13 nt, Artificial Sequence
  Description of Artificial Sequence: Synthetic oligonucleotide
uuuauuuucagua

SEQ ID NO: 46945 - RNA, 12 nt, Artificial Sequence
  Description of Artificial Sequence: Synthetic oligonucleotide
ucuuaaauggaa

SEQ ID NO: 46946 - RNA, 13 nt, Artificial Sequence
  Description of Artificial Sequence: Synthetic oligonucleotide
ugccuaaaauugu

SEQ ID NO: 46947 - RNA, 12 nt, Artificial Sequence
  Description of Artificial Sequence: Synthetic oligonucleotide
agacugugagcu

SEQ ID NO: 46948 - RNA, 14 nt, Artificial Sequence
  Description of Artificial Sequence: Synthetic oligonucleotide
ugcuuuuuauuaau

SEQ ID NO: 46949 - RNA, 13 nt, Artificial Sequence
  Description of Artificial Sequence: Synthetic oligonucleotide
cucuucuuacauu

SEQ ID NO: 46950 - RNA, 15 nt, Artificial Sequence
  Description of Artificial Sequence: Synthetic oligonucleotide
cauuuguaaaaaugu

SEQ ID NO: 46951 - RNA, 15 nt, Artificial Sequence
  Description of Artificial Sequence: Synthetic oligonucleotide
aucuuaauucauauu

SEQ ID NO: 46952 - RNA, 13 nt, Artificial Sequence
  Description of Artificial Sequence: Synthetic oligonucleotide
gaacuaaucauga

SEQ ID NO: 46953 - RNA, 12 nt, Artificial Sequence
  Description of Artificial Sequence: Synthetic oligonucleotide
ucugcucuuggg

SEQ ID NO: 46954 - RNA, 13 nt, Artificial Sequence
  Description of Artificial Sequence: Synthetic oligonucleotide
caguagcuuugag

SEQ ID NO: 46955 - RNA, 14 nt, Artificial Sequence
  Description of Artificial Sequence: Synthetic oligonucleotide
cacguaauauuuca

SEQ ID NO: 46956 - RNA, 13 nt, Artificial Sequence
  Description of Artificial Sequence: Synthetic oligonucleotide
uauucucuucacu

SEQ ID NO: 46957 - RNA, 14 nt, Artificial Sequence
  Description of Artificial Sequence: Synthetic oligonucleotide
cuaaugcuaagaaa

SEQ ID NO: 46958 - RNA, 12 nt, Artificial Sequence
  Description of Artificial Sequence: Synthetic oligonucleotide
gcugaaaaucaa

SEQ ID NO: 46959 - RNA, 14 nt, Artificial Sequence
  Description of Artificial Sequence: Synthetic oligonucleotide
aauaugauuacuuu

SEQ ID NO: 46960 - RNA, 14 nt, Artificial Sequence
  Description of Artificial Sequence: Synthetic oligonucleotide
cauuuuguucuaca

SEQ ID NO: 46961 - RNA, 12 nt, Artificial Sequence
  Description of Artificial Sequence: Synthetic oligonucleotide
cccgggacucuc

SEQ ID NO: 46962 - RNA, 14 nt, Artificial Sequence
  Description of Artificial Sequence: Synthetic oligonucleotide
ccuuuaaaguaaag

SEQ ID NO: 46963 - RNA, 13 nt, Artificial Sequence
  Description of Artificial Sequence: Synthetic oligonucleotide
ucuggaagccugg

SEQ ID NO: 46964 - RNA, 14 nt, Artificial Sequence
  Description of Artificial Sequence: Synthetic oligonucleotide
aaaacaaaagagag

SEQ ID NO: 46965 - RNA, 13 nt, Artificial Sequence
  Description of Artificial Sequence: Synthetic oligonucleotide
aucaguuaugccg

SEQ ID NO: 46966 - RNA, 13 nt, Artificial Sequence
  Description of Artificial Sequence: Synthetic oligonucleotide
uaaaagaagucca

SEQ ID NO: 46967 - RNA, 11 nt, Artificial Sequence
  Description of Artificial Sequence: Synthetic oligonucleotide
aggugagguua

SEQ ID NO: 46968 - RNA, 11 nt, Artificial Sequence
  Description of Artificial Sequence: Synthetic oligonucleotide
gggaagaggac

SEQ ID NO: 46969 - RNA, 13 nt, Artificial Sequence
  Description of Artificial Sequence: Synthetic oligonucleotide
aagcaaguauugu

SEQ ID NO: 46970 - RNA, 12 nt, Artificial Sequence
  Description of Artificial Sequence: Synthetic oligonucleotide
auuguagcacuc

SEQ ID NO: 46971 - RNA, 14 nt, Artificial Sequence
  Description of Artificial Sequence: Synthetic oligonucleotide
acaaaaccacaaau

SEQ ID NO: 46972 - RNA, 12 nt, Artificial Sequence
  Description of Artificial Sequence: Synthetic oligonucleotide
uaagcccauaca

SEQ ID NO: 46973 - RNA, 11 nt, Artificial Sequence
  Description of Artificial Sequence: Synthetic oligonucleotide
agcccauacag

SEQ ID NO: 46974 - RNA, 12 nt, Artificial Sequence
  Description of Artificial Sequence: Synthetic oligonucleotide
cagaaaccuucc

SEQ ID NO: 46975 - RNA, 10 nt, Artificial Sequence
  Description of Artificial Sequence: Synthetic oligonucleotide
guauaccuac

SEQ ID NO: 46976 - RNA, 13 nt, Artificial Sequence
  Description of Artificial Sequence: Synthetic oligonucleotide
gccaguuuucgga

SEQ ID NO: 46977 - RNA, 9 nt, Artificial Sequence
  Description of Artificial Sequence: Synthetic oligonucleotide
ggaacaggg

SEQ ID NO: 46978 - RNA, 13 nt, Artificial Sequence
  Description of Artificial Sequence: Synthetic oligonucleotide
uuaacuuuccagu

SEQ ID NO: 46979 - RNA, 14 nt, Artificial Sequence
  Description of Artificial Sequence: Synthetic oligonucleotide
aaaguuugguuuug

SEQ ID NO: 46980 - RNA, 12 nt, Artificial Sequence
  Description of Artificial Sequence: Synthetic oligonucleotide
cuucccacugua

SEQ ID NO: 46981 - RNA, 13 nt, Artificial Sequence
  Description of Artificial Sequence: Synthetic oligonucleotide
ugauaccauauga

SEQ ID NO: 46982 - RNA, 11 nt, Artificial Sequence
  Description of Artificial Sequence: Synthetic oligonucleotide
aacaugggcug

SEQ ID NO: 46983 - RNA, 13 nt, Artificial Sequence
  Description of Artificial Sequence: Synthetic oligonucleotide
caacuuuuucaua

SEQ ID NO: 46984 - RNA, 12 nt, Artificial Sequence
  Description of Artificial Sequence: Synthetic oligonucleotide
caugaggccgga

SEQ ID NO: 46985 - RNA, 11 nt, Artificial Sequence
  Description of Artificial Sequence: Synthetic oligonucleotide
acugcauuugu

SEQ ID NO: 46986 - RNA, 13 nt, Artificial Sequence
  Description of Artificial Sequence: Synthetic oligonucleotide
aauguuuacuacc

SEQ ID NO: 46987 - RNA, 15 nt, Artificial Sequence
  Description of Artificial Sequence: Synthetic oligonucleotide
aauuuuuugaugaaa

SEQ ID NO: 46988 - RNA, 14 nt, Artificial Sequence
  Description of Artificial Sequence: Synthetic oligonucleotide
cagugugugaauuu

SEQ ID NO: 46989 - RNA, 13 nt, Artificial Sequence
  Description of Artificial Sequence: Synthetic oligonucleotide
gagcaauguaugu

SEQ ID NO: 46990 - RNA, 14 nt, Artificial Sequence
  Description of Artificial Sequence: Synthetic oligonucleotide
aaagcacauauaua

SEQ ID NO: 46991 - RNA, 14 nt, Artificial Sequence
  Description of Artificial Sequence: Synthetic oligonucleotide
guaauaguuucucc

SEQ ID NO: 46992 - RNA, 13 nt, Artificial Sequence
  Description of Artificial Sequence: Synthetic oligonucleotide
aguuucuccaaau

SEQ ID NO: 46993 - RNA, 13 nt, Artificial Sequence
  Description of Artificial Sequence: Synthetic oligonucleotide
uacuuccuagaaa

SEQ ID NO: 46994 - RNA, 13 nt, Artificial Sequence
  Description of Artificial Sequence: Synthetic oligonucleotide
uacaccauauaug

SEQ ID NO: 46995 - RNA, 14 nt, Artificial Sequence
  Description of Artificial Sequence: Synthetic oligonucleotide
auauaugaauggag

SEQ ID NO: 46996 - RNA, 13 nt, Artificial Sequence
  Description of Artificial Sequence: Synthetic oligonucleotide
acgagaagaagau

SEQ ID NO: 46997 - RNA, 13 nt, Artificial Sequence
  Description of Artificial Sequence: Synthetic oligonucleotide
ucauuuacaggga

SEQ ID NO: 46998 - RNA, 13 nt, Artificial Sequence
  Description of Artificial Sequence: Synthetic oligonucleotide
cauuuacagggac

SEQ ID NO: 46999 - RNA, 10 nt, Artificial Sequence
  Description of Artificial Sequence: Synthetic oligonucleotide
agggaccuga

SEQ ID NO: 47000 - RNA, 14 nt, Artificial Sequence
  Description of Artificial Sequence: Synthetic oligonucleotide
uguuugacugcauc

SEQ ID NO: 47001 - RNA, 13 nt, Artificial Sequence
  Description of Artificial Sequence: Synthetic oligonucleotide
uuugacugcaucg

SEQ ID NO: 47002 - RNA, 12 nt, Artificial Sequence
  Description of Artificial Sequence: Synthetic oligonucleotide
gaguucacaggg

SEQ ID NO: 47003 - RNA, 13 nt, Artificial Sequence
  Description of Artificial Sequence: Synthetic oligonucleotide
ggcaccucugucc

SEQ ID NO: 47004 - RNA, 15 nt, Artificial Sequence
  Description of Artificial Sequence: Synthetic oligonucleotide
gguuugucuuuuuaa

SEQ ID NO: 47005 - RNA, 14 nt, Artificial Sequence
  Description of Artificial Sequence: Synthetic oligonucleotide
uuugucuuuuuaag

SEQ ID NO: 47006 - RNA, 13 nt, Artificial Sequence
  Description of Artificial Sequence: Synthetic oligonucleotide
ccuaaagguuguc

SEQ ID NO: 47007 - RNA, 12 nt, Artificial Sequence
  Description of Artificial Sequence: Synthetic oligonucleotide
aagguugucgac

SEQ ID NO: 47008 - RNA, 13 nt, Artificial Sequence
  Description of Artificial Sequence: Synthetic oligonucleotide
accuggcaauugu

SEQ ID NO: 47009 - RNA, 12 nt, Artificial Sequence
  Description of Artificial Sequence: Synthetic oligonucleotide
aguggugcgagg

SEQ ID NO: 47010 - RNA, 13 nt, Artificial Sequence
  Description of Artificial Sequence: Synthetic oligonucleotide
agagacaugaaau

SEQ ID NO: 47011 - RNA, 13 nt, Artificial Sequence
  Description of Artificial Sequence: Synthetic oligonucleotide
auauauuucucca

SEQ ID NO: 47012 - RNA, 10 nt, Artificial Sequence
  Description of Artificial Sequence: Synthetic oligonucleotide
caugaaggcu

SEQ ID NO: 47013 - RNA, 11 nt, Artificial Sequence
  Description of Artificial Sequence: Synthetic oligonucleotide
gcuggaguggu

SEQ ID NO: 47014 - RNA, 11 nt, Artificial Sequence
  Description of Artificial Sequence: Synthetic oligonucleotide
aggaagagagg

SEQ ID NO: 47015 - RNA, 12 nt, Artificial Sequence
  Description of Artificial Sequence: Synthetic oligonucleotide
cuugcaucgggc

SEQ ID NO: 47016 - RNA, 13 nt, Artificial Sequence
  Description of Artificial Sequence: Synthetic oligonucleotide
auauccuacugug

SEQ ID NO: 47017 - RNA, 13 nt, Artificial Sequence
  Description of Artificial Sequence: Synthetic oligonucleotide
uccuacuguguaa

SEQ ID NO: 47018 - RNA, 12 nt, Artificial Sequence
  Description of Artificial Sequence: Synthetic oligonucleotide
ccuuguagugua

SEQ ID NO: 47019 - RNA, 13 nt, Artificial Sequence
  Description of Artificial Sequence: Synthetic oligonucleotide
ucuuuguugauug

SEQ ID NO: 47020 - RNA, 14 nt, Artificial Sequence
  Description of Artificial Sequence: Synthetic oligonucleotide
uuuguugauugaaa

SEQ ID NO: 47021 - RNA, 15 nt, Artificial Sequence
  Description of Artificial Sequence: Synthetic oligonucleotide
uucuuuuucuuccau

SEQ ID NO: 47022 - RNA, 13 nt, Artificial Sequence
  Description of Artificial Sequence: Synthetic oligonucleotide
aaucuuccuucua

SEQ ID NO: 47023 - RNA, 13 nt, Artificial Sequence
  Description of Artificial Sequence: Synthetic oligonucleotide
uugaaugcuucau

SEQ ID NO: 47024 - RNA, 13 nt, Artificial Sequence
  Description of Artificial Sequence: Synthetic oligonucleotide
ugaaugcuucaug

SEQ ID NO: 47025 - RNA, 13 nt, Artificial Sequence
  Description of Artificial Sequence: Synthetic oligonucleotide
aauucuacuuuga

SEQ ID NO: 47026 - RNA, 13 nt, Artificial Sequence
  Description of Artificial Sequence: Synthetic oligonucleotide
agcaacuacagac

SEQ ID NO: 47027 - RNA, 13 nt, Artificial Sequence
  Description of Artificial Sequence: Synthetic oligonucleotide
gaccaaggucaac

SEQ ID NO: 47028 - RNA, 13 nt, Artificial Sequence
  Description of Artificial Sequence: Synthetic oligonucleotide
cgacuaucucgac

SEQ ID NO: 47029 - RNA, 13 nt, Artificial Sequence
  Description of Artificial Sequence: Synthetic oligonucleotide
aaccuucccaaac

SEQ ID NO: 47030 - RNA, 14 nt, Artificial Sequence
  Description of Artificial Sequence: Synthetic oligonucleotide
ccaagcuuagaacu

SEQ ID NO: 47031 - RNA, 15 nt, Artificial Sequence
  Description of Artificial Sequence: Synthetic oligonucleotide
agcuuagaacuuuaa

SEQ ID NO: 47032 - RNA, 11 nt, Artificial Sequence
  Description of Artificial Sequence: Synthetic oligonucleotide
aagaccaccac

SEQ ID NO: 47033 - RNA, 14 nt, Artificial Sequence
  Description of Artificial Sequence: Synthetic oligonucleotide
gcgagaaauaaagu

SEQ ID NO: 47034 - RNA, 14 nt, Artificial Sequence
  Description of Artificial Sequence: Synthetic oligonucleotide
cgagaaauaaaguu

SEQ ID NO: 47035 - RNA, 12 nt, Artificial Sequence
  Description of Artificial Sequence: Synthetic oligonucleotide
aggaaaugaucc

SEQ ID NO: 47036 - RNA, 13 nt, Artificial Sequence
  Description of Artificial Sequence: Synthetic oligonucleotide
gaagaaaugaaac

SEQ ID NO: 47037 - RNA, 13 nt, Artificial Sequence
  Description of Artificial Sequence: Synthetic oligonucleotide
guuuccauccucc

SEQ ID NO: 47038 - RNA, 15 nt, Artificial Sequence
  Description of Artificial Sequence: Synthetic oligonucleotide
acugaaaaucuuuga

SEQ ID NO: 47039 - RNA, 11 nt, Artificial Sequence
  Description of Artificial Sequence: Synthetic oligonucleotide
ugccguucagg

SEQ ID NO: 47040 - RNA, 13 nt, Artificial Sequence
  Description of Artificial Sequence: Synthetic oligonucleotide
caggguccagaag

SEQ ID NO: 47041 - RNA, 13 nt, Artificial Sequence
  Description of Artificial Sequence: Synthetic oligonucleotide
ucaagacugcuug

SEQ ID NO: 47042 - RNA, 13 nt, Artificial Sequence
  Description of Artificial Sequence: Synthetic oligonucleotide
uccaugucuuugg

SEQ ID NO: 47043 - RNA, 11 nt, Artificial Sequence
  Description of Artificial Sequence: Synthetic oligonucleotide
gccugaaacac

SEQ ID NO: 47044 - RNA, 12 nt, Artificial Sequence
  Description of Artificial Sequence: Synthetic oligonucleotide
ucucuguaccuc

SEQ ID NO: 47045 - RNA, 12 nt, Artificial Sequence
  Description of Artificial Sequence: Synthetic oligonucleotide
agcaagacaaga

SEQ ID NO: 47046 - RNA, 13 nt, Artificial Sequence
  Description of Artificial Sequence: Synthetic oligonucleotide
gcaagacaagaaa

SEQ ID NO: 47047 - RNA, 12 nt, Artificial Sequence
  Description of Artificial Sequence: Synthetic oligonucleotide
uguacaagaucc

SEQ ID NO: 47048 - RNA, 12 nt, Artificial Sequence
  Description of Artificial Sequence: Synthetic oligonucleotide
cguacuugcaga

SEQ ID NO: 47049 - RNA, 13 nt, Artificial Sequence
  Description of Artificial Sequence: Synthetic oligonucleotide
cgaucgauacaga

SEQ ID NO: 47050 - RNA, 13 nt, Artificial Sequence
  Description of Artificial Sequence: Synthetic oligonucleotide
uauaaaaauaaau

SEQ ID NO: 47051 - RNA, 13 nt, Artificial Sequence
  Description of Artificial Sequence: Synthetic oligonucleotide
uaaaaauaaauau

SEQ ID NO: 47052 - RNA, 13 nt, Artificial Sequence
  Description of Artificial Sequence: Synthetic oligonucleotide
uuugacugcugug

SEQ ID NO: 47053 - RNA, 13 nt, Artificial Sequence
  Description of Artificial Sequence: Synthetic oligonucleotide
ggagaugagagac

SEQ ID NO: 47054 - RNA, 10 nt, Artificial Sequence
  Description of Artificial Sequence: Synthetic oligonucleotide
ucccacuugg

SEQ ID NO: 47055 - RNA, 10 nt, Artificial Sequence
  Description of Artificial Sequence: Synthetic oligonucleotide
guucacggcc

SEQ ID NO: 47056 - RNA, 12 nt, Artificial Sequence
  Description of Artificial Sequence: Synthetic oligonucleotide
accaucacacca

SEQ ID NO: 47057 - RNA, 10 nt, Artificial Sequence
  Description of Artificial Sequence: Synthetic oligonucleotide
cugcggguuu

SEQ ID NO: 47058 - RNA, 9 nt, Artificial Sequence
  Description of Artificial Sequence: Synthetic oligonucleotide
uccaguuug

SEQ ID NO: 47059 - RNA, 12 nt, Artificial Sequence
  Description of Artificial Sequence: Synthetic oligonucleotide
uuaaggacuucu

SEQ ID NO: 47060 - RNA, 12 nt, Artificial Sequence
  Description of Artificial Sequence: Synthetic oligonucleotide
agugggacagag

SEQ ID NO: 47061 - RNA, 13 nt, Artificial Sequence
  Description of Artificial Sequence: Synthetic oligonucleotide
auuuguuauugug

SEQ ID NO: 47062 - RNA, 12 nt, Artificial Sequence
  Description of Artificial Sequence: Synthetic oligonucleotide
ucaaaugcauuu

SEQ ID NO: 47063 - RNA, 9 nt, Artificial Sequence
  Description of Artificial Sequence: Synthetic oligonucleotide
aggaaagcc

SEQ ID NO: 47064 - RNA, 10 nt, Artificial Sequence
  Description of Artificial Sequence: Synthetic oligonucleotide
ggaaagcccu

SEQ ID NO: 47065 - RNA, 11 nt, Artificial Sequence
  Description of Artificial Sequence: Synthetic oligonucleotide
ccagcauggcc

SEQ ID NO: 47066 - RNA, 10 nt, Artificial Sequence
  Description of Artificial Sequence: Synthetic oligonucleotide
uucucccuga

SEQ ID NO: 47067 - RNA, 11 nt, Artificial Sequence
  Description of Artificial Sequence: Synthetic oligonucleotide
aagaagcccuu

SEQ ID NO: 47068 - RNA, 11 nt, Artificial Sequence
  Description of Artificial Sequence: Synthetic oligonucleotide
gaagcccuuca

SEQ ID NO: 47069 - RNA, 10 nt, Artificial Sequence
  Description of Artificial Sequence: Synthetic oligonucleotide
cccuucagcg

SEQ ID NO: 47070 - RNA, 10 nt, Artificial Sequence
  Description of Artificial Sequence: Synthetic oligonucleotide
cuucagcggc

SEQ ID NO: 47071 - RNA, 11 nt, Artificial Sequence
  Description of Artificial Sequence: Synthetic oligonucleotide
cagcggccagu

SEQ ID NO: 47072 - RNA, 11 nt, Artificial Sequence
  Description of Artificial Sequence: Synthetic oligonucleotide
gaaaagcuccg

SEQ ID NO: 47073 - RNA, 10 nt, Artificial Sequence
  Description of Artificial Sequence: Synthetic oligonucleotide
aaagcuccgg

SEQ ID NO: 47074 - RNA, 12 nt, Artificial Sequence
  Description of Artificial Sequence: Synthetic oligonucleotide
gucaacagucug

SEQ ID NO: 47075 - RNA, 12 nt, Artificial Sequence
  Description of Artificial Sequence: Synthetic oligonucleotide
agaguucaaaag

SEQ ID NO: 47076 - RNA, 12 nt, Artificial Sequence
  Description of Artificial Sequence: Synthetic oligonucleotide
gaguucaaaagc

SEQ ID NO: 47077 - RNA, 11 nt, Artificial Sequence
  Description of Artificial Sequence: Synthetic oligonucleotide
ucaaaagcccu

SEQ ID NO: 47078 - RNA, 11 nt, Artificial Sequence
  Description of Artificial Sequence: Synthetic oligonucleotide
caaaagcccuu

SEQ ID NO: 47079 - RNA, 11 nt, Artificial Sequence
  Description of Artificial Sequence: Synthetic oligonucleotide
aaagcccuuca

SEQ ID NO: 47080 - RNA, 11 nt, Artificial Sequence
  Description of Artificial Sequence: Synthetic oligonucleotide
aagcccuucag

SEQ ID NO: 47081 - RNA, 12 nt, Artificial Sequence
  Description of Artificial Sequence: Synthetic oligonucleotide
ugaagccgcucg

SEQ ID NO: 47082 - RNA, 11 nt, Artificial Sequence
  Description of Artificial Sequence: Synthetic oligonucleotide
acgccagucaa

SEQ ID NO: 47083 - RNA, 12 nt, Artificial Sequence
  Description of Artificial Sequence: Synthetic oligonucleotide
ucuuggugcgug

SEQ ID NO: 47084 - RNA, 13 nt, Artificial Sequence
  Description of Artificial Sequence: Synthetic oligonucleotide
uuggauucaucag

SEQ ID NO: 47085 - RNA, 12 nt, Artificial Sequence
  Description of Artificial Sequence: Synthetic oligonucleotide
ggaauaccuaag

SEQ ID NO: 47086 - RNA, 11 nt, Artificial Sequence
  Description of Artificial Sequence: Synthetic oligonucleotide
uuugaggcuca

SEQ ID NO: 47087 - RNA, 10 nt, Artificial Sequence
  Description of Artificial Sequence: Synthetic oligonucleotide
cuacaauugg

SEQ ID NO: 47088 - RNA, 11 nt, Artificial Sequence
  Description of Artificial Sequence: Synthetic oligonucleotide
aguuaggagcc

SEQ ID NO: 47089 - RNA, 12 nt, Artificial Sequence
  Description of Artificial Sequence: Synthetic oligonucleotide
gucaauauccac

SEQ ID NO: 47090 - RNA, 12 nt, Artificial Sequence
  Description of Artificial Sequence: Synthetic oligonucleotide
uguucagucaca

SEQ ID NO: 47091 - RNA, 11 nt, Artificial Sequence
  Description of Artificial Sequence: Synthetic oligonucleotide
cacacacauac

SEQ ID NO: 47092 - RNA, 11 nt, Artificial Sequence
  Description of Artificial Sequence: Synthetic oligonucleotide
uccuuuugcuu

SEQ ID NO: 47093 - RNA, 15 nt, Artificial Sequence
  Description of Artificial Sequence: Synthetic oligonucleotide
uuuaaaguaauuuuu

SEQ ID NO: 47094 - RNA, 12 nt, Artificial Sequence
  Description of Artificial Sequence: Synthetic oligonucleotide
aacagucaaugg

SEQ ID NO: 47095 - RNA, 12 nt, Artificial Sequence
  Description of Artificial Sequence: Synthetic oligonucleotide
cgacaaaccaau

SEQ ID NO: 47096 - RNA, 11 nt, Artificial Sequence
  Description of Artificial Sequence: Synthetic oligonucleotide
cugcuaccacu

SEQ ID NO: 47097 - RNA, 12 nt, Artificial Sequence
  Description of Artificial Sequence: Synthetic oligonucleotide
caagcggucuua

SEQ ID NO: 47098 - RNA, 12 nt, Artificial Sequence
  Description of Artificial Sequence: Synthetic oligonucleotide
gucuuaccggcu

SEQ ID NO: 47099 - RNA, 10 nt, Artificial Sequence
  Description of Artificial Sequence: Synthetic oligonucleotide
auggguuacc

SEQ ID NO: 47100 - RNA, 10 nt, Artificial Sequence
  Description of Artificial Sequence: Synthetic oligonucleotide
uuaccugcga

SEQ ID NO: 47101 - RNA, 11 nt, Artificial Sequence
  Description of Artificial Sequence: Synthetic oligonucleotide
aucuugcugag

SEQ ID NO: 47102 - RNA, 12 nt, Artificial Sequence
  Description of Artificial Sequence: Synthetic oligonucleotide
gcauaaaacagu

SEQ ID NO: 47103 - RNA, 11 nt, Artificial Sequence
  Description of Artificial Sequence: Synthetic oligonucleotide
uccuuuauccu

SEQ ID NO: 47104 - RNA, 11 nt, Artificial Sequence
  Description of Artificial Sequence: Synthetic oligonucleotide
aacgcaaguug

SEQ ID NO: 47105 - RNA, 12 nt, Artificial Sequence
  Description of Artificial Sequence: Synthetic oligonucleotide
aacugaaaccau

SEQ ID NO: 47106 - RNA, 13 nt, Artificial Sequence
  Description of Artificial Sequence: Synthetic oligonucleotide
cuuuguuaaauau

SEQ ID NO: 47107 - RNA, 13 nt, Artificial Sequence
  Description of Artificial Sequence: Synthetic oligonucleotide
uauauuaaaaguu

SEQ ID NO: 47108 - RNA, 12 nt, Artificial Sequence
  Description of Artificial Sequence: Synthetic oligonucleotide
uuuugacuuaac

SEQ ID NO: 47109 - RNA, 12 nt, Artificial Sequence
  Description of Artificial Sequence: Synthetic oligonucleotide
caaacucagcac

SEQ ID NO: 47110 - RNA, 10 nt, Artificial Sequence
  Description of Artificial Sequence: Synthetic oligonucleotide
gcugaccuca

SEQ ID NO: 47111 - RNA, 13 nt, Artificial Sequence
  Description of Artificial Sequence: Synthetic oligonucleotide
uuauucagaucgc

SEQ ID NO: 47112 - RNA, 12 nt, Artificial Sequence
  Description of Artificial Sequence: Synthetic oligonucleotide
ggguucugggau

SEQ ID NO: 47113 - RNA, 14 nt, Artificial Sequence
  Description of Artificial Sequence: Synthetic oligonucleotide
uauuggaaauuaug

SEQ ID NO: 47114 - RNA, 12 nt, Artificial Sequence
  Description of Artificial Sequence: Synthetic oligonucleotide
uggaagcacuag

SEQ ID NO: 47115 - RNA, 12 nt, Artificial Sequence
  Description of Artificial Sequence: Synthetic oligonucleotide
uuuuuaugugga

SEQ ID NO: 47116 - RNA, 11 nt, Artificial Sequence
  Description of Artificial Sequence: Synthetic oligonucleotide
gaauugguaga

SEQ ID NO: 47117 - RNA, 12 nt, Artificial Sequence
  Description of Artificial Sequence: Synthetic oligonucleotide
uagacuuggaga

SEQ ID NO: 47118 - RNA, 12 nt, Artificial Sequence
  Description of Artificial Sequence: Synthetic oligonucleotide
uacaguauucca

SEQ ID NO: 47119 - RNA, 14 nt, Artificial Sequence
  Description of Artificial Sequence: Synthetic oligonucleotide
cacugaugaauuaa

SEQ ID NO: 47120 - RNA, 11 nt, Artificial Sequence
  Description of Artificial Sequence: Synthetic oligonucleotide
cacaucaucac

SEQ ID NO: 47121 - RNA, 12 nt, Artificial Sequence
  Description of Artificial Sequence: Synthetic oligonucleotide
ucaccaaacaga

SEQ ID NO: 47122 - RNA, 11 nt, Artificial Sequence
  Description of Artificial Sequence: Synthetic oligonucleotide
gaacaugaugg

SEQ ID NO: 47123 - RNA, 11 nt, Artificial Sequence
  Description of Artificial Sequence: Synthetic oligonucleotide
auguagacugc

SEQ ID NO: 47124 - RNA, 12 nt, Artificial Sequence
  Description of Artificial Sequence: Synthetic oligonucleotide
gaucuauuuaug

SEQ ID NO: 47125 - RNA, 11 nt, Artificial Sequence
  Description of Artificial Sequence: Synthetic oligonucleotide
cacuauuauca

SEQ ID NO: 47126 - RNA, 10 nt, Artificial Sequence
  Description of Artificial Sequence: Synthetic oligonucleotide
ucaguucugc

SEQ ID NO: 47127 - RNA, 12 nt, Artificial Sequence
  Description of Artificial Sequence: Synthetic oligonucleotide
gauuaaaccuac

SEQ ID NO: 47128 - RNA, 12 nt, Artificial Sequence
  Description of Artificial Sequence: Synthetic oligonucleotide
uaaaauccuucu

SEQ ID NO: 47129 - RNA, 11 nt, Artificial Sequence
  Description of Artificial Sequence: Synthetic oligonucleotide
augcuguagac

SEQ ID NO: 47130 - RNA, 12 nt, Artificial Sequence
  Description of Artificial Sequence: Synthetic oligonucleotide
ugauaggaauag

SEQ ID NO: 47131 - RNA, 10 nt, Artificial Sequence
  Description of Artificial Sequence: Synthetic oligonucleotide
auggcccuga

SEQ ID NO: 47132 - RNA, 10 nt, Artificial Sequence
  Description of Artificial Sequence: Synthetic oligonucleotide
uccucaagca

SEQ ID NO: 47133 - RNA, 9 nt, Artificial Sequence
  Description of Artificial Sequence: Synthetic oligonucleotide
uucagccca

SEQ ID NO: 47134 - RNA, 10 nt, Artificial Sequence
  Description of Artificial Sequence: Synthetic oligonucleotide
cugcugaacc

SEQ ID NO: 47135 - RNA, 11 nt, Artificial Sequence
  Description of Artificial Sequence: Synthetic oligonucleotide
aguucucuuca

SEQ ID NO: 47136 - RNA, 10 nt, Artificial Sequence
  Description of Artificial Sequence: Synthetic oligonucleotide
cagccuagag

SEQ ID NO: 47137 - RNA, 12 nt, Artificial Sequence
  Description of Artificial Sequence: Synthetic oligonucleotide
ucugugaagugu

SEQ ID NO: 47138 - RNA, 13 nt, Artificial Sequence
  Description of Artificial Sequence: Synthetic oligonucleotide
gagaaaauuucaa

SEQ ID NO: 47139 - RNA, 10 nt, Artificial Sequence
  Description of Artificial Sequence: Synthetic oligonucleotide
auccuccuga

SEQ ID NO: 47140 - RNA, 11 nt, Artificial Sequence
  Description of Artificial Sequence: Synthetic oligonucleotide
ugacaucauau

SEQ ID NO: 47141 - RNA, 12 nt, Artificial Sequence
  Description of Artificial Sequence: Synthetic oligonucleotide
aucuucaucaua

SEQ ID NO: 47142 - RNA, 12 nt, Artificial Sequence
  Description of Artificial Sequence: Synthetic oligonucleotide
acuagcuauuaa

SEQ ID NO: 47143 - RNA, 13 nt, Artificial Sequence
  Description of Artificial Sequence: Synthetic oligonucleotide
cucuacuaaaaau

SEQ ID NO: 47144 - RNA, 11 nt, Artificial Sequence
  Description of Artificial Sequence: Synthetic oligonucleotide
cuaucucgccu

SEQ ID NO: 47145 - RNA, 12 nt, Artificial Sequence
  Description of Artificial Sequence: Synthetic oligonucleotide
uucgguccaguu

SEQ ID NO: 47146 - RNA, 10 nt, Artificial Sequence
  Description of Artificial Sequence: Synthetic oligonucleotide
auguagccgc

SEQ ID NO: 47147 - RNA, 11 nt, Artificial Sequence
  Description of Artificial Sequence: Synthetic oligonucleotide
gaggagacuug

SEQ ID NO: 47148 - RNA, 11 nt, Artificial Sequence
  Description of Artificial Sequence: Synthetic oligonucleotide
aguagugagga

SEQ ID NO: 47149 - RNA, 13 nt, Artificial Sequence
  Description of Artificial Sequence: Synthetic oligonucleotide
agaugaguacaaa

SEQ ID NO: 47150 - RNA, 12 nt, Artificial Sequence
  Description of Artificial Sequence: Synthetic oligonucleotide
uuguuaaugggc

SEQ ID NO: 47151 - RNA, 12 nt, Artificial Sequence
  Description of Artificial Sequence: Synthetic oligonucleotide
uuuuaauuuauu

SEQ ID NO: 47152 - RNA, 11 nt, Artificial Sequence
  Description of Artificial Sequence: Synthetic oligonucleotide
auuuaaauaug

SEQ ID NO: 47153 - RNA, 12 nt, Artificial Sequence
  Description of Artificial Sequence: Synthetic oligonucleotide
auccuuuguuuc

SEQ ID NO: 47154 - RNA, 13 nt, Artificial Sequence
  Description of Artificial Sequence: Synthetic oligonucleotide
gucuaaguguuug

SEQ ID NO: 47155 - RNA, 11 nt, Artificial Sequence
  Description of Artificial Sequence: Synthetic oligonucleotide
ccugugacaaa

SEQ ID NO: 47156 - RNA, 12 nt, Artificial Sequence
  Description of Artificial Sequence: Synthetic oligonucleotide
caggcugaauua

SEQ ID NO: 47157 - RNA, 13 nt, Artificial Sequence
  Description of Artificial Sequence: Synthetic oligonucleotide
ucauucuuacaau

SEQ ID NO: 47158 - RNA, 14 nt, Artificial Sequence
  Description of Artificial Sequence: Synthetic oligonucleotide
cauucuuacaauug

SEQ ID NO: 47159 - RNA, 11 nt, Artificial Sequence
  Description of Artificial Sequence: Synthetic oligonucleotide
agagaguguac

SEQ ID NO: 47160 - RNA, 11 nt, Artificial Sequence
  Description of Artificial Sequence: Synthetic oligonucleotide
gaacucagcag

SEQ ID NO: 47161 - RNA, 12 nt, Artificial Sequence
  Description of Artificial Sequence: Synthetic oligonucleotide
uuauuuucagua

SEQ ID NO: 47162 - RNA, 11 nt, Artificial Sequence
  Description of Artificial Sequence: Synthetic oligonucleotide
cuuaaauggaa

SEQ ID NO: 47163 - RNA, 12 nt, Artificial Sequence
  Description of Artificial Sequence: Synthetic oligonucleotide
gccuaaaauugu

SEQ ID NO: 47164 - RNA, 12 nt, Artificial Sequence
  Description of Artificial Sequence: Synthetic oligonucleotide
acuaacaucugg

SEQ ID NO: 47165 - RNA, 11 nt, Artificial Sequence
  Description of Artificial Sequence: Synthetic oligonucleotide
gacugugagcu

SEQ ID NO: 47166 - RNA, 13 nt, Artificial Sequence
  Description of Artificial Sequence: Synthetic oligonucleotide
gcuuuuuauuaau

SEQ ID NO: 47167 - RNA, 12 nt, Artificial Sequence
  Description of Artificial Sequence: Synthetic oligonucleotide
ucuucuuacauu

SEQ ID NO: 47168 - RNA, 14 nt, Artificial Sequence
  Description of Artificial Sequence: Synthetic oligonucleotide
auuuguaaaaaugu

SEQ ID NO: 47169 - RNA, 14 nt, Artificial Sequence
  Description of Artificial Sequence: Synthetic oligonucleotide
ucuuaauucauauu

SEQ ID NO: 47170 - RNA, 12 nt, Artificial Sequence
  Description of Artificial Sequence: Synthetic oligonucleotide
aacuaaucauga

SEQ ID NO: 47171 - RNA, 11 nt, Artificial Sequence
  Description of Artificial Sequence: Synthetic oligonucleotide
cugcucuuggg

SEQ ID NO: 47172 - RNA, 12 nt, Artificial Sequence
  Description of Artificial Sequence: Synthetic oligonucleotide
aguagcuuugag

SEQ ID NO: 47173 - RNA, 13 nt, Artificial Sequence
  Description of Artificial Sequence: Synthetic oligonucleotide
acguaauauuuca

SEQ ID NO: 47174 - RNA, 12 nt, Artificial Sequence
  Description of Artificial Sequence: Synthetic oligonucleotide
auucucuucacu

SEQ ID NO: 47175 - RNA, 13 nt, Artificial Sequence
  Description of Artificial Sequence: Synthetic oligonucleotide
uaaugcuaagaaa

SEQ ID NO: 47176 - RNA, 11 nt, Artificial Sequence
  Description of Artificial Sequence: Synthetic oligonucleotide
cugaaaaucaa

SEQ ID NO: 47177 - RNA, 13 nt, Artificial Sequence
  Description of Artificial Sequence: Synthetic oligonucleotide
auaugauuacuuu

SEQ ID NO: 47178 - RNA, 13 nt, Artificial Sequence
  Description of Artificial Sequence: Synthetic oligonucleotide
auuuuguucuaca

SEQ ID NO: 47179 - RNA, 11 nt, Artificial Sequence
  Description of Artificial Sequence: Synthetic oligonucleotide
ccgggacucuc

SEQ ID NO: 47180 - RNA, 13 nt, Artificial Sequence
  Description of Artificial Sequence: Synthetic oligonucleotide
cuuuaaaguaaag

SEQ ID NO: 47181 - RNA, 12 nt, Artificial Sequence
  Description of Artificial Sequence: Synthetic oligonucleotide
cuggaagccugg

SEQ ID NO: 47182 - RNA, 13 nt, Artificial Sequence
  Description of Artificial Sequence: Synthetic oligonucleotide
aaacaaaagagag

SEQ ID NO: 47183 - RNA, 12 nt, Artificial Sequence
  Description of Artificial Sequence: Synthetic oligonucleotide
ucaguuaugccg

SEQ ID NO: 47184 - RNA, 12 nt, Artificial Sequence
  Description of Artificial Sequence: Synthetic oligonucleotide
aaaagaagucca

SEQ ID NO: 47185 - RNA, 10 nt, Artificial Sequence
  Description of Artificial Sequence: Synthetic oligonucleotide
ggugagguua

SEQ ID NO: 47186 - RNA, 10 nt, Artificial Sequence
  Description of Artificial Sequence: Synthetic oligonucleotide
ggaagaggac

SEQ ID NO: 47187 - RNA, 12 nt, Artificial Sequence
  Description of Artificial Sequence: Synthetic oligonucleotide
agcaaguauugu

SEQ ID NO: 47188 - RNA, 11 nt, Artificial Sequence
  Description of Artificial Sequence: Synthetic oligonucleotide
uuguagcacuc

SEQ ID NO: 47189 - RNA, 13 nt, Artificial Sequence
  Description of Artificial Sequence: Synthetic oligonucleotide
caaaaccacaaau

SEQ ID NO: 47190 - RNA, 11 nt, Artificial Sequence
  Description of Artificial Sequence: Synthetic oligonucleotide
aagcccauaca

SEQ ID NO: 47191 - RNA, 10 nt, Artificial Sequence
  Description of Artificial Sequence: Synthetic oligonucleotide
gcccauacag

SEQ ID NO: 47192 - RNA, 11 nt, Artificial Sequence
  Description of Artificial Sequence: Synthetic oligonucleotide
agaaaccuucc

SEQ ID NO: 47193 - RNA, 9 nt, Artificial Sequence
  Description of Artificial Sequence: Synthetic oligonucleotide
uauaccuac

SEQ ID NO: 47194 - RNA, 12 nt, Artificial Sequence
  Description of Artificial Sequence: Synthetic oligonucleotide
ccaguuuucgga

SEQ ID NO: 47195 - RNA, 8 nt, Artificial Sequence
  Description of Artificial Sequence: Synthetic oligonucleotide
gaacaggg

SEQ ID NO: 47196 - RNA, 12 nt, Artificial Sequence
  Description of Artificial Sequence: Synthetic oligonucleotide
uaacuuuccagu

SEQ ID NO: 47197 - RNA, 13 nt, Artificial Sequence
  Description of Artificial Sequence: Synthetic oligonucleotide
aaguuugguuuug

SEQ ID NO: 47198 - RNA, 11 nt, Artificial Sequence
  Description of Artificial Sequence: Synthetic oligonucleotide
uucccacugua

SEQ ID NO: 47199 - RNA, 12 nt, Artificial Sequence
  Description of Artificial Sequence: Synthetic oligonucleotide
gauaccauauga

SEQ ID NO: 47200 - RNA, 10 nt, Artificial Sequence
  Description of Artificial Sequence: Synthetic oligonucleotide
acaugggcug

SEQ ID NO: 47201 - RNA, 12 nt, Artificial Sequence
  Description of Artificial Sequence: Synthetic oligonucleotide
aacuuuuucaua

SEQ ID NO: 47202 - RNA, 11 nt, Artificial Sequence
  Description of Artificial Sequence: Synthetic oligonucleotide
augaggccgga

SEQ ID NO: 47203 - RNA, 10 nt, Artificial Sequence
  Description of Artificial Sequence: Synthetic oligonucleotide
cugcauuugu

SEQ ID NO: 47204 - RNA, 12 nt, Artificial Sequence
  Description of Artificial Sequence: Synthetic oligonucleotide
auguuuacuacc

SEQ ID NO: 47205 - RNA, 14 nt, Artificial Sequence
  Description of Artificial Sequence: Synthetic oligonucleotide
auuuuuugaugaaa

SEQ ID NO: 47206 - RNA, 13 nt, Artificial Sequence
  Description of Artificial Sequence: Synthetic oligonucleotide
agugugugaauuu

SEQ ID NO: 47207 - RNA, 12 nt, Artificial Sequence
  Description of Artificial Sequence: Synthetic oligonucleotide
agcaauguaugu

SEQ ID NO: 47208 - RNA, 13 nt, Artificial Sequence
  Description of Artificial Sequence: Synthetic oligonucleotide
aagcacauauaua

SEQ ID NO: 47209 - RNA, 13 nt, Artificial Sequence
  Description of Artificial Sequence: Synthetic oligonucleotide
uaauaguuucucc

SEQ ID NO: 47210 - RNA, 12 nt, Artificial Sequence
  Description of Artificial Sequence: Synthetic oligonucleotide
guuucuccaaau

SEQ ID NO: 47211 - RNA, 12 nt, Artificial Sequence
  Description of Artificial Sequence: Synthetic oligonucleotide
acuuccuagaaa

SEQ ID NO: 47212 - RNA, 12 nt, Artificial Sequence
  Description of Artificial Sequence: Synthetic oligonucleotide
acaccauauaug

SEQ ID NO: 47213 - RNA, 13 nt, Artificial Sequence
  Description of Artificial Sequence: Synthetic oligonucleotide
uauaugaauggag

SEQ ID NO: 47214 - RNA, 12 nt, Artificial Sequence
  Description of Artificial Sequence: Synthetic oligonucleotide
cauuuacaggga

SEQ ID NO: 47215 - RNA, 12 nt, Artificial Sequence
  Description of Artificial Sequence: Synthetic oligonucleotide
auuuacagggac

SEQ ID NO: 47216 - RNA, 9 nt, Artificial Sequence
  Description of Artificial Sequence: Synthetic oligonucleotide
gggaccuga

SEQ ID NO: 47217 - RNA, 13 nt, Artificial Sequence
  Description of Artificial Sequence: Synthetic oligonucleotide
guuugacugcauc

SEQ ID NO: 47218 - RNA, 12 nt, Artificial Sequence
  Description of Artificial Sequence: Synthetic oligonucleotide
uugacugcaucg

SEQ ID NO: 47219 - RNA, 11 nt, Artificial Sequence
  Description of Artificial Sequence: Synthetic oligonucleotide
aguucacaggg

SEQ ID NO: 47220 - RNA, 12 nt, Artificial Sequence
  Description of Artificial Sequence: Synthetic oligonucleotide
gcaccucugucc

SEQ ID NO: 47221 - RNA, 14 nt, Artificial Sequence
  Description of Artificial Sequence: Synthetic oligonucleotide
guuugucuuuuuaa

SEQ ID NO: 47222 - RNA, 13 nt, Artificial Sequence
  Description of Artificial Sequence: Synthetic oligonucleotide
uugucuuuuuaag

SEQ ID NO: 47223 - RNA, 12 nt, Artificial Sequence
  Description of Artificial Sequence: Synthetic oligonucleotide
cuaaagguuguc

SEQ ID NO: 47224 - RNA, 11 nt, Artificial Sequence
  Description of Artificial Sequence: Synthetic oligonucleotide
agguugucgac

SEQ ID NO: 47225 - RNA, 12 nt, Artificial Sequence
  Description of Artificial Sequence: Synthetic oligonucleotide
ccuggcaauugu

SEQ ID NO: 47226 - RNA, 11 nt, Artificial Sequence
  Description of Artificial Sequence: Synthetic oligonucleotide
guggugcgagg

SEQ ID NO: 47227 - RNA, 12 nt, Artificial Sequence
  Description of Artificial Sequence: Synthetic oligonucleotide
gagacaugaaau

SEQ ID NO: 47228 - RNA, 12 nt, Artificial Sequence
  Description of Artificial Sequence: Synthetic oligonucleotide
uauauuucucca

SEQ ID NO: 47229 - RNA, 9 nt, Artificial Sequence
  Description of Artificial Sequence: Synthetic oligonucleotide
augaaggcu

SEQ ID NO: 47230 - RNA, 10 nt, Artificial Sequence
  Description of Artificial Sequence: Synthetic oligonucleotide
cuggaguggu

SEQ ID NO: 47231 - RNA, 10 nt, Artificial Sequence
  Description of Artificial Sequence: Synthetic oligonucleotide
ggaagagagg

SEQ ID NO: 47232 - RNA, 11 nt, Artificial Sequence
  Description of Artificial Sequence: Synthetic oligonucleotide
uugcaucgggc

SEQ ID NO: 47233 - RNA, 12 nt, Artificial Sequence
  Description of Artificial Sequence: Synthetic oligonucleotide
uauccuacugug

SEQ ID NO: 47234 - RNA, 12 nt, Artificial Sequence
  Description of Artificial Sequence: Synthetic oligonucleotide
ccuacuguguaa

SEQ ID NO: 47235 - RNA, 11 nt, Artificial Sequence
  Description of Artificial Sequence: Synthetic oligonucleotide
cuuguagugua

SEQ ID NO: 47236 - RNA, 12 nt, Artificial Sequence
  Description of Artificial Sequence: Synthetic oligonucleotide
cuuuguugauug

SEQ ID NO: 47237 - RNA, 13 nt, Artificial Sequence
  Description of Artificial Sequence: Synthetic oligonucleotide
uuguugauugaaa

SEQ ID NO: 47238 - RNA, 14 nt, Artificial Sequence
  Description of Artificial Sequence: Synthetic oligonucleotide
ucuuuuucuuccau

SEQ ID NO: 47239 - RNA, 12 nt, Artificial Sequence
  Description of Artificial Sequence: Synthetic oligonucleotide
aucuuccuucua

SEQ ID NO: 47240 - RNA, 12 nt, Artificial Sequence
  Description of Artificial Sequence: Synthetic oligonucleotide
ugaaugcuucau

SEQ ID NO: 47241 - RNA, 12 nt, Artificial Sequence
  Description of Artificial Sequence: Synthetic oligonucleotide
gaaugcuucaug

SEQ ID NO: 47242 - RNA, 12 nt, Artificial Sequence
  Description of Artificial Sequence: Synthetic oligonucleotide
auucuacuuuga

SEQ ID NO: 47243 - RNA, 12 nt, Artificial Sequence
  Description of Artificial Sequence: Synthetic oligonucleotide
gcaacuacagac

SEQ ID NO: 47244 - RNA, 12 nt, Artificial Sequence
  Description of Artificial Sequence: Synthetic oligonucleotide
accaaggucaac

SEQ ID NO: 47245 - RNA, 12 nt, Artificial Sequence
  Description of Artificial Sequence: Synthetic oligonucleotide
gacuaucucgac

SEQ ID NO: 47246 - RNA, 12 nt, Artificial Sequence
  Description of Artificial Sequence: Synthetic oligonucleotide
accuucccaaac

SEQ ID NO: 47247 - RNA, 13 nt, Artificial Sequence
  Description of Artificial Sequence: Synthetic oligonucleotide
caagcuuagaacu

SEQ ID NO: 47248 - RNA, 14 nt, Artificial Sequence
  Description of Artificial Sequence: Synthetic oligonucleotide
gcuuagaacuuuaa

SEQ ID NO: 47249 - RNA, 13 nt, Artificial Sequence
  Description of Artificial Sequence: Synthetic oligonucleotide
aacuuuaagcaac

SEQ ID NO: 47250 - RNA, 10 nt, Artificial Sequence
  Description of Artificial Sequence: Synthetic oligonucleotide
agaccaccac

SEQ ID NO: 47251 - RNA, 13 nt, Artificial Sequence
  Description of Artificial Sequence: Synthetic oligonucleotide
cgagaaauaaagu

SEQ ID NO: 47252 - RNA, 13 nt, Artificial Sequence
  Description of Artificial Sequence: Synthetic oligonucleotide
gagaaauaaaguu

SEQ ID NO: 47253 - RNA, 11 nt, Artificial Sequence
  Description of Artificial Sequence: Synthetic oligonucleotide
ggaaaugaucc

SEQ ID NO: 47254 - RNA, 12 nt, Artificial Sequence
  Description of Artificial Sequence: Synthetic oligonucleotide
aagaaaugaaac

SEQ ID NO: 47255 - RNA, 12 nt, Artificial Sequence
  Description of Artificial Sequence: Synthetic oligonucleotide
uuuccauccucc

SEQ ID NO: 47256 - RNA, 14 nt, Artificial Sequence
  Description of Artificial Sequence: Synthetic oligonucleotide
cugaaaaucuuuga

SEQ ID NO: 47257 - RNA, 10 nt, Artificial Sequence
  Description of Artificial Sequence: Synthetic oligonucleotide
gccguucagg

SEQ ID NO: 47258 - RNA, 12 nt, Artificial Sequence
  Description of Artificial Sequence: Synthetic oligonucleotide
aggguccagaag

SEQ ID NO: 47259 - RNA, 12 nt, Artificial Sequence
  Description of Artificial Sequence: Synthetic oligonucleotide
caagacugcuug

SEQ ID NO: 47260 - RNA, 12 nt, Artificial Sequence
  Description of Artificial Sequence: Synthetic oligonucleotide
ccaugucuuugg

SEQ ID NO: 47261 - RNA, 10 nt, Artificial Sequence
  Description of Artificial Sequence: Synthetic oligonucleotide
ccugaaacac

SEQ ID NO: 47262 - RNA, 11 nt, Artificial Sequence
  Description of Artificial Sequence: Synthetic oligonucleotide
cucuguaccuc

SEQ ID NO: 47263 - RNA, 11 nt, Artificial Sequence
  Description of Artificial Sequence: Synthetic oligonucleotide
gcaagacaaga

SEQ ID NO: 47264 - RNA, 12 nt, Artificial Sequence
  Description of Artificial Sequence: Synthetic oligonucleotide
caagacaagaaa

SEQ ID NO: 47265 - RNA, 11 nt, Artificial Sequence
  Description of Artificial Sequence: Synthetic oligonucleotide
guacaagaucc

SEQ ID NO: 47266 - RNA, 11 nt, Artificial Sequence
  Description of Artificial Sequence: Synthetic oligonucleotide
guacuugcaga

SEQ ID NO: 47267 - RNA, 12 nt, Artificial Sequence
  Description of Artificial Sequence: Synthetic oligonucleotide
gaucgauacaga

SEQ ID NO: 47268 - RNA, 12 nt, Artificial Sequence
  Description of Artificial Sequence: Synthetic oligonucleotide
auaaaaauaaau

SEQ ID NO: 47269 - RNA, 12 nt, Artificial Sequence
  Description of Artificial Sequence: Synthetic oligonucleotide
aaaaauaaauau

SEQ ID NO: 47270 - RNA, 12 nt, Artificial Sequence
  Description of Artificial Sequence: Synthetic oligonucleotide
uugacugcugug

SEQ ID NO: 47271 - RNA, 12 nt, Artificial Sequence
  Description of Artificial Sequence: Synthetic oligonucleotide
gagaugagagac

SEQ ID NO: 47272 - RNA, 9 nt, Artificial Sequence
  Description of Artificial Sequence: Synthetic oligonucleotide
cccacuugg

SEQ ID NO: 47273 - RNA, 1145 nt, Homo sapiens
auucucuccccagcuugcugagcccuuugcuccccuggcgacugccuggacagucagcaaggaauugucucccagugcauuuugcccuccuggcugccaacucuggcugcuaaagcggcugccaccugcugcagucuacacagcuucgggaagaggaaaggaaccucagaccuuccagaucgcuuccucucgcaacaaacuauuugucgcaggaauaaagauggcugcugaaccaguagaagacaauugcaucaacuuuguggcaaugaaauuuauugacaauacgcuuuacuuuauagcugaagaugaugaaaaccuggaaucagauuacuuuggcaagcuugaaucuaaauuaucagucauaagaaauuugaaugaccaaguucucuucauugaccaaggaaaucggccucuauuugaagauaugacugauucugacuguagagauaaugcaccccggaccauauuuauuauaaguauguauaaagauagccagccuagagguauggcuguaacuaucucugugaagugugagaaaauuucaacucucuccugugagaacaaaauuauuuccuuuaaggaaaugaauccuccugauaacaucaaggauacaaaaagugacaucauauucuuucagagaagugucccaggacaugauaauaagaugcaauuugaaucuucaucauacgaaggauacuuucuagcuugugaaaaagagagagaccuuuuuaaacucauuuugaaaaaagaggaugaauugggggauagaucuauaauguucacuguucaaaacgaagacuagcuauuaaaauuucaugccgggcgcaguggcucacgccuguaaucccagcccuuugggaggcugaggcgggcagaucaccagaggucagguguucaagaccagccugaccaacauggugaaaccucaucucuacuaaaaauacaaaaaauuagcugaguguagugacgcaugcccucaaucccagcuacucaagaggcugaggcaggagaaucacuugcacuccggagguagagguuguggugagccgagauugcaccauugcgcucuagccugggcaacaacagcaaaacuccaucucaaaaaauaaaauaaauaaauaaacaaauaaaaaauucauaaugug

SEQ ID NO: 47274 - RNA, 19 nt, Artificial Sequence
  Description of Artificial Sequence: Synthetic oligonucleotide
auucucuccccagcuugcu

SEQ ID NO: 47275 - RNA, 19 nt, Artificial Sequence
  Description of Artificial Sequence: Synthetic oligonucleotide
ugagcccuuugcuccccug

SEQ ID NO: 47276 - RNA, 19 nt, Artificial Sequence
  Description of Artificial Sequence: Synthetic oligonucleotide
ggcgacugccuggacaguc

SEQ ID NO: 47277 - RNA, 19 nt, Artificial Sequence
  Description of Artificial Sequence: Synthetic oligonucleotide
cagcaaggaauugucuccc

SEQ ID NO: 47278 - RNA, 19 nt, Artificial Sequence
  Description of Artificial Sequence: Synthetic oligonucleotide
cagugcauuuugcccuccu

SEQ ID NO: 47279 - RNA, 19 nt, Artificial Sequence
  Description of Artificial Sequence: Synthetic oligonucleotide
uggcugccaacucuggcug

SEQ ID NO: 47280 - RNA, 19 nt, Artificial Sequence
  Description of Artificial Sequence: Synthetic oligonucleotide
gcuaaagcggcugccaccu

SEQ ID NO: 47281 - RNA, 19 nt, Artificial Sequence
  Description of Artificial Sequence: Synthetic oligonucleotide
ugcugcagucuacacagcu

SEQ ID NO: 47282 - RNA, 19 nt, Artificial Sequence
  Description of Artificial Sequence: Synthetic oligonucleotide
uucgggaagaggaaaggaa

SEQ ID NO: 47283 - RNA, 19 nt, Artificial Sequence
  Description of Artificial Sequence: Synthetic oligonucleotide
accucagaccuuccagauc

SEQ ID NO: 47284 - RNA, 19 nt, Artificial Sequence
  Description of Artificial Sequence: Synthetic oligonucleotide
cgcuuccucucgcaacaaa

SEQ ID NO: 47285 - RNA, 19 nt, Artificial Sequence
  Description of Artificial Sequence: Synthetic oligonucleotide
acuauuugucgcaggaaua

SEQ ID NO: 47286 - RNA, 19 nt, Artificial Sequence
  Description of Artificial Sequence: Synthetic oligonucleotide
aaagauggcugcugaacca

SEQ ID NO: 47287 - RNA, 19 nt, Artificial Sequence
  Description of Artificial Sequence: Synthetic oligonucleotide
aguagaagacaauugcauc

SEQ ID NO: 47288 - RNA, 19 nt, Artificial Sequence
  Description of Artificial Sequence: Synthetic oligonucleotide
caacuuuguggcaaugaaa

SEQ ID NO: 47289 - RNA, 19 nt, Artificial Sequence
  Description of Artificial Sequence: Synthetic oligonucleotide
auuuauugacaauacgcuu

SEQ ID NO: 47290 - RNA, 19 nt, Artificial Sequence
  Description of Artificial Sequence: Synthetic oligonucleotide
uuacuuuauagcugaagau

SEQ ID NO: 47291 - RNA, 19 nt, Artificial Sequence
  Description of Artificial Sequence: Synthetic oligonucleotide
ugaugaaaaccuggaauca

SEQ ID NO: 47292 - RNA, 19 nt, Artificial Sequence
  Description of Artificial Sequence: Synthetic oligonucleotide
agauuacuuuggcaagcuu

SEQ ID NO: 47293 - RNA, 19 nt, Artificial Sequence
  Description of Artificial Sequence: Synthetic oligonucleotide
ugaaucuaaauuaucaguc

SEQ ID NO: 47294 - RNA, 19 nt, Artificial Sequence
  Description of Artificial Sequence: Synthetic oligonucleotide
cauaagaaauuugaaugac

SEQ ID NO: 47295 - RNA, 19 nt, Artificial Sequence
  Description of Artificial Sequence: Synthetic oligonucleotide
ccaaguucucuucauugac

SEQ ID NO: 47296 - RNA, 19 nt, Artificial Sequence
  Description of Artificial Sequence: Synthetic oligonucleotide
ccaaggaaaucggccucua

SEQ ID NO: 47297 - RNA, 19 nt, Artificial Sequence
  Description of Artificial Sequence: Synthetic oligonucleotide
auuugaagauaugacugau

SEQ ID NO: 47298 - RNA, 19 nt, Artificial Sequence
  Description of Artificial Sequence: Synthetic oligonucleotide
uucugacuguagagauaau

SEQ ID NO: 47299 - RNA, 19 nt, Artificial Sequence
  Description of Artificial Sequence: Synthetic oligonucleotide
ugcaccccggaccauauuu

SEQ ID NO: 47300 - RNA, 19 nt, Artificial Sequence
  Description of Artificial Sequence: Synthetic oligonucleotide
uauuauaaguauguauaaa

SEQ ID NO: 47301 - RNA, 19 nt, Artificial Sequence
  Description of Artificial Sequence: Synthetic oligonucleotide
agauagccagccuagaggu

SEQ ID NO: 47302 - RNA, 19 nt, Artificial Sequence
  Description of Artificial Sequence: Synthetic oligonucleotide
uauggcuguaacuaucucu

SEQ ID NO: 47303 - RNA, 19 nt, Artificial Sequence
  Description of Artificial Sequence: Synthetic oligonucleotide
ugugaagugugagaaaauu

SEQ ID NO: 47304 - RNA, 19 nt, Artificial Sequence
  Description of Artificial Sequence: Synthetic oligonucleotide
uucaacucucuccugugag

SEQ ID NO: 47305 - RNA, 19 nt, Artificial Sequence
  Description of Artificial Sequence: Synthetic oligonucleotide
gaacaaaauuauuuccuuu

SEQ ID NO: 47306 - RNA, 19 nt, Artificial Sequence
  Description of Artificial Sequence: Synthetic oligonucleotide
uaaggaaaugaauccuccu

SEQ ID NO: 47307 - RNA, 19 nt, Artificial Sequence
  Description of Artificial Sequence: Synthetic oligonucleotide
ugauaacaucaaggauaca

SEQ ID NO: 47308 - RNA, 19 nt, Artificial Sequence
  Description of Artificial Sequence: Synthetic oligonucleotide
aaaaagugacaucauauuc

SEQ ID NO: 47309 - RNA, 19 nt, Artificial Sequence
  Description of Artificial Sequence: Synthetic oligonucleotide
cuuucagagaaguguccca

SEQ ID NO: 47310 - RNA, 19 nt, Artificial Sequence
  Description of Artificial Sequence: Synthetic oligonucleotide
aggacaugauaauaagaug

SEQ ID NO: 47311 - RNA, 19 nt, Artificial Sequence
  Description of Artificial Sequence: Synthetic oligonucleotide
gcaauuugaaucuucauca

SEQ ID NO: 47312 - RNA, 19 nt, Artificial Sequence
  Description of Artificial Sequence: Synthetic oligonucleotide
auacgaaggauacuuucua

SEQ ID NO: 47313 - RNA, 19 nt, Artificial Sequence
  Description of Artificial Sequence: Synthetic oligonucleotide
agcuugugaaaaagagaga

SEQ ID NO: 47314 - RNA, 19 nt, Artificial Sequence
  Description of Artificial Sequence: Synthetic oligonucleotide
agaccuuuuuaaacucauu

SEQ ID NO: 47315 - RNA, 19 nt, Artificial Sequence
  Description of Artificial Sequence: Synthetic oligonucleotide
uuugaaaaaagaggaugaa

SEQ ID NO: 47316 - RNA, 19 nt, Artificial Sequence
  Description of Artificial Sequence: Synthetic oligonucleotide
auugggggauagaucuaua

SEQ ID NO: 47317 - RNA, 19 nt, Artificial Sequence
  Description of Artificial Sequence: Synthetic oligonucleotide
aauguucacuguucaaaac

SEQ ID NO: 47318 - RNA, 19 nt, Artificial Sequence
  Description of Artificial Sequence: Synthetic oligonucleotide
cgaagacuagcuauuaaaa

SEQ ID NO: 47319 - RNA, 19 nt, Artificial Sequence
  Description of Artificial Sequence: Synthetic oligonucleotide
auuucaugccgggcgcagu

SEQ ID NO: 47320 - RNA, 19 nt, Artificial Sequence
  Description of Artificial Sequence: Synthetic oligonucleotide
uggcucacgccuguaaucc

SEQ ID NO: 47321 - RNA, 19 nt, Artificial Sequence
  Description of Artificial Sequence: Synthetic oligonucleotide
ccagcccuuugggaggcug

SEQ ID NO: 47322 - RNA, 19 nt, Artificial Sequence
  Description of Artificial Sequence: Synthetic oligonucleotide
gaggcgggcagaucaccag

SEQ ID NO: 47323 - RNA, 19 nt, Artificial Sequence
  Description of Artificial Sequence: Synthetic oligonucleotide
gaggucagguguucaagac

SEQ ID NO: 47324 - RNA, 19 nt, Artificial Sequence
  Description of Artificial Sequence: Synthetic oligonucleotide
ccagccugaccaacauggu

SEQ ID NO: 47325 - RNA, 19 nt, Artificial Sequence
  Description of Artificial Sequence: Synthetic oligonucleotide
ugaaaccucaucucuacua

SEQ ID NO: 47326 - RNA, 19 nt, Artificial Sequence
  Description of Artificial Sequence: Synthetic oligonucleotide
aaaaauacaaaaaauuagc

SEQ ID NO: 47327 - RNA, 19 nt, Artificial Sequence
  Description of Artificial Sequence: Synthetic oligonucleotide
cugaguguagugacgcaug

SEQ ID NO: 47328 - RNA, 19 nt, Artificial Sequence
  Description of Artificial Sequence: Synthetic oligonucleotide
gcccucaaucccagcuacu

SEQ ID NO: 47329 - RNA, 19 nt, Artificial Sequence
  Description of Artificial Sequence: Synthetic oligonucleotide
ucaagaggcugaggcagga

SEQ ID NO: 47330 - RNA, 19 nt, Artificial Sequence
  Description of Artificial Sequence: Synthetic oligonucleotide
agaaucacuugcacuccgg

SEQ ID NO: 47331 - RNA, 19 nt, Artificial Sequence
  Description of Artificial Sequence: Synthetic oligonucleotide
gagguagagguugugguga

SEQ ID NO: 47332 - RNA, 19 nt, Artificial Sequence
  Description of Artificial Sequence: Synthetic oligonucleotide
agccgagauugcaccauug

SEQ ID NO: 47333 - RNA, 19 nt, Artificial Sequence
  Description of Artificial Sequence: Synthetic oligonucleotide
gcgcucuagccugggcaac

SEQ ID NO: 47334 - RNA, 19 nt, Artificial Sequence
  Description of Artificial Sequence: Synthetic oligonucleotide
caacagcaaaacuccaucu

SEQ ID NO: 47335 - RNA, 19 nt, Artificial Sequence
  Description of Artificial Sequence: Synthetic oligonucleotide
ucaaaaaauaaaauaaaua

SEQ ID NO: 47336 - RNA, 19 nt, Artificial Sequence
  Description of Artificial Sequence: Synthetic oligonucleotide
aaauaaacaaauaaaaaau

SEQ ID NO: 47337 - RNA, 19 nt, Artificial Sequence
  Description of Artificial Sequence: Synthetic oligonucleotide
auaaaaaauucauaaugug

SEQ ID NO: 47338 - RNA, 25 nt, Artificial Sequence
  Description of Artificial Sequence: Synthetic oligonucleotide
auucucuccccagcuugcugagccc

SEQ ID NO: 47339 - RNA, 25 nt, Artificial Sequence
  Description of Artificial Sequence: Synthetic oligonucleotide
cuuugcuccccuggcgacugccugg

SEQ ID NO: 47340 - RNA, 25 nt, Artificial Sequence
  Description of Artificial Sequence: Synthetic oligonucleotide
gacagucagcaaggaauugucuccc

SEQ ID NO: 47341 - RNA, 25 nt, Artificial Sequence
  Description of Artificial Sequence: Synthetic oligonucleotide
cagugcauuuugcccuccuggcugc

SEQ ID NO: 47342 - RNA, 25 nt, Artificial Sequence
  Description of Artificial Sequence: Synthetic oligonucleotide
ccaacucuggcugcuaaagcggcug

SEQ ID NO: 47343 - RNA, 25 nt, Artificial Sequence
  Description of Artificial Sequence: Synthetic oligonucleotide
gccaccugcugcagucuacacagcu

SEQ ID NO: 47344 - RNA, 25 nt, Artificial Sequence
  Description of Artificial Sequence: Synthetic oligonucleotide
uucgggaagaggaaaggaaccucag

SEQ ID NO: 47345 - RNA, 25 nt, Artificial Sequence
  Description of Artificial Sequence: Synthetic oligonucleotide
gaccuuccagaucgcuuccucucgc

SEQ ID NO: 47346 - RNA, 25 nt, Artificial Sequence
  Description of Artificial Sequence: Synthetic oligonucleotide
caacaaacuauuugucgcaggaaua

SEQ ID NO: 47347 - RNA, 25 nt, Artificial Sequence
  Description of Artificial Sequence: Synthetic oligonucleotide
aaagauggcugcugaaccaguagaa

SEQ ID NO: 47348 - RNA, 25 nt, Artificial Sequence
  Description of Artificial Sequence: Synthetic oligonucleotide
agacaauugcaucaacuuuguggca

SEQ ID NO: 47349 - RNA, 25 nt, Artificial Sequence
  Description of Artificial Sequence: Synthetic oligonucleotide
aaugaaauuuauugacaauacgcuu

SEQ ID NO: 47350 - RNA, 25 nt, Artificial Sequence
  Description of Artificial Sequence: Synthetic oligonucleotide
uuacuuuauagcugaagaugaugaa

SEQ ID NO: 47351 - RNA, 25 nt, Artificial Sequence
  Description of Artificial Sequence: Synthetic oligonucleotide
aaaccuggaaucagauuacuuuggc

SEQ ID NO: 47352 - RNA, 25 nt, Artificial Sequence
  Description of Artificial Sequence: Synthetic oligonucleotide
caagcuugaaucuaaauuaucaguc

SEQ ID NO: 47353 - RNA, 25 nt, Artificial Sequence
  Description of Artificial Sequence: Synthetic oligonucleotide
cauaagaaauuugaaugaccaaguu

SEQ ID NO: 47354 - RNA, 25 nt, Artificial Sequence
  Description of Artificial Sequence: Synthetic oligonucleotide
ucucuucauugaccaaggaaaucgg

SEQ ID NO: 47355 - RNA, 25 nt, Artificial Sequence
  Description of Artificial Sequence: Synthetic oligonucleotide
gccucuauuugaagauaugacugau

SEQ ID NO: 47356 - RNA, 25 nt, Artificial Sequence
  Description of Artificial Sequence: Synthetic oligonucleotide
uucugacuguagagauaaugcaccc

SEQ ID NO: 47357 - RNA, 25 nt, Artificial Sequence
  Description of Artificial Sequence: Synthetic oligonucleotide
ccggaccauauuuauuauaaguaug

SEQ ID NO: 47358 - RNA, 25 nt, Artificial Sequence
  Description of Artificial Sequence: Synthetic oligonucleotide
guauaaagauagccagccuagaggu

SEQ ID NO: 47359 - RNA, 25 nt, Artificial Sequence
  Description of Artificial Sequence: Synthetic oligonucleotide
uauggcuguaacuaucucugugaag

SEQ ID NO: 47360 - RNA, 25 nt, Artificial Sequence
  Description of Artificial Sequence: Synthetic oligonucleotide
gugugagaaaauuucaacucucucc

SEQ ID NO: 47361 - RNA, 25 nt, Artificial Sequence
  Description of Artificial Sequence: Synthetic oligonucleotide
cugugagaacaaaauuauuuccuuu

SEQ ID NO: 47362 - RNA, 25 nt, Artificial Sequence
  Description of Artificial Sequence: Synthetic oligonucleotide
uaaggaaaugaauccuccugauaac

SEQ ID NO: 47363 - RNA, 25 nt, Artificial Sequence
  Description of Artificial Sequence: Synthetic oligonucleotide
caucaaggauacaaaaagugacauc

SEQ ID NO: 47364 - RNA, 25 nt, Artificial Sequence
  Description of Artificial Sequence: Synthetic oligonucleotide
cauauucuuucagagaaguguccca

SEQ ID NO: 47365 - RNA, 25 nt, Artificial Sequence
  Description of Artificial Sequence: Synthetic oligonucleotide
aggacaugauaauaagaugcaauuu

SEQ ID NO: 47366 - RNA, 25 nt, Artificial Sequence
  Description of Artificial Sequence: Synthetic oligonucleotide
ugaaucuucaucauacgaaggauac

SEQ ID NO: 47367 - RNA, 25 nt, Artificial Sequence
  Description of Artificial Sequence: Synthetic oligonucleotide
cuuucuagcuugugaaaaagagaga

SEQ ID NO: 47368 - RNA, 25 nt, Artificial Sequence
  Description of Artificial Sequence: Synthetic oligonucleotide
agaccuuuuuaaacucauuuugaaa

SEQ ID NO: 47369 - RNA, 25 nt, Artificial Sequence
  Description of Artificial Sequence: Synthetic oligonucleotide
aaaagaggaugaauugggggauaga

SEQ ID NO: 47370 - RNA, 25 nt, Artificial Sequence
  Description of Artificial Sequence: Synthetic oligonucleotide
aucuauaauguucacuguucaaaac

SEQ ID NO: 47371 - RNA, 25 nt, Artificial Sequence
  Description of Artificial Sequence: Synthetic oligonucleotide
cgaagacuagcuauuaaaauuucau

SEQ ID NO: 47372 - RNA, 25 nt, Artificial Sequence
  Description of Artificial Sequence: Synthetic oligonucleotide
ugccgggcgcaguggcucacgccug

SEQ ID NO: 47373 - RNA, 25 nt, Artificial Sequence
  Description of Artificial Sequence: Synthetic oligonucleotide
guaaucccagcccuuugggaggcug

SEQ ID NO: 47374 - RNA, 25 nt, Artificial Sequence
  Description of Artificial Sequence: Synthetic oligonucleotide
gaggcgggcagaucaccagagguca

SEQ ID NO: 47375 - RNA, 25 nt, Artificial Sequence
  Description of Artificial Sequence: Synthetic oligonucleotide
agguguucaagaccagccugaccaa

SEQ ID NO: 47376 - RNA, 25 nt, Artificial Sequence
  Description of Artificial Sequence: Synthetic oligonucleotide
acauggugaaaccucaucucuacua

SEQ ID NO: 47377 - RNA, 25 nt, Artificial Sequence
  Description of Artificial Sequence: Synthetic oligonucleotide
aaaaauacaaaaaauuagcugagug

SEQ ID NO: 47378 - RNA, 25 nt, Artificial Sequence
  Description of Artificial Sequence: Synthetic oligonucleotide
guagugacgcaugcccucaauccca

SEQ ID NO: 47379 - RNA, 25 nt, Artificial Sequence
  Description of Artificial Sequence: Synthetic oligonucleotide
agcuacucaagaggcugaggcagga

SEQ ID NO: 47380 - RNA, 25 nt, Artificial Sequence
  Description of Artificial Sequence: Synthetic oligonucleotide
agaaucacuugcacuccggagguag

SEQ ID NO: 47381 - RNA, 25 nt, Artificial Sequence
  Description of Artificial Sequence: Synthetic oligonucleotide
gagguuguggugagccgagauugca

SEQ ID NO: 47382 - RNA, 25 nt, Artificial Sequence
  Description of Artificial Sequence: Synthetic oligonucleotide
accauugcgcucuagccugggcaac

SEQ ID NO: 47383 - RNA, 25 nt, Artificial Sequence
  Description of Artificial Sequence: Synthetic oligonucleotide
caacagcaaaacuccaucucaaaaa

SEQ ID NO: 47384 - RNA, 25 nt, Artificial Sequence
  Description of Artificial Sequence: Synthetic oligonucleotide
aauaaaauaaauaaauaaacaaaua

SEQ ID NO: 47385 - RNA, 25 nt, Artificial Sequence
  Description of Artificial Sequence: Synthetic oligonucleotide
aaacaaauaaaaaauucauaaugug

SEQ ID NO: 47386 - DNA, 21 bp, Artificial Sequence
  Description of Artificial Sequence: Synthetic oligonucleotide
  Description of Combined DNA/RNA Molecule: Synthetic oligonucleotide
cuacacaaaucagcgauuutt

SEQ ID NO: 47387 - DNA, 21 bp, Artificial Sequence
  Description of Artificial Sequence: Synthetic oligonucleotide
  Description of Combined DNA/RNA Molecule: Synthetic oligonucleotide
aaaucgcugauuuguguagtt

SEQ ID NO: 47388 - DNA, 25 bp, Artificial Sequence
  Description of Artificial Sequence: Synthetic oligonucleotide
  Description of Combined DNA/RNA Molecule: Synthetic oligonucleotide
cuacacaaaucagcgauuuccaugt

SEQ ID NO: 47389 - RNA, 27 nt, Artificial Sequence
  Description of Artificial Sequence: Synthetic oligonucleotide
acauggaaaucgcugauuuguguaguc

SEQ ID NO: 47390 - RNA, 13 nt, Artificial Sequence
  Description of Artificial Sequence: Synthetic oligonucleotide
cuacacaaaucag

SEQ ID NO: 47391 - DNA, 11 bp, Artificial Sequence
  Description of Artificial Sequence: Synthetic oligonucleotide
  Description of Combined DNA/RNA Molecule: Synthetic oligonucleotide
gauuuccaugt

SEQ ID NO: 47392 - DNA, 21 bp, Artificial Sequence
  Description of Artificial Sequence: Synthetic oligonucleotide
  Description of Combined DNA/RNA Molecule: Synthetic oligonucleotide
ggaucuuauuucuucggagtt

SEQ ID NO: 47393 - DNA, 21 bp, Artificial Sequence
  Description of Artificial Sequence: Synthetic oligonucleotide
  Description of Combined DNA/RNA Molecule: Synthetic oligonucleotide
cuccgaagaaauaagaucctt

SEQ ID NO: 47394 - RNA, 11 nt, Artificial Sequence
  Description of Artificial Sequence: Synthetic oligonucleotide
ggaucuuauuu

SEQ ID NO: 47395 - DNA, 10 bp, Artificial Sequence
  Description of Artificial Sequence: Synthetic oligonucleotide
  Description of Combined DNA/RNA Molecule: Synthetic oligonucleotide
cuucggagtt

SEQ ID NO: 47396 - RNA, 27 nt, Artificial Sequence
  Description of Artificial Sequence: Synthetic oligonucleotide
cauugucuccgaagaaauaagauccuu

SEQ ID NO: 47397 - RNA, 8 nt, Artificial Sequence
  Description of Artificial Sequence: Synthetic oligonucleotide
  modified_base (2): LNA-G
ggaucuua

SEQ ID NO: 47398 - DNA, 17 bp, Artificial Sequence
  Description of Artificial Sequence: Synthetic oligonucleotide
  Description of Combined DNA/RNA Molecule: Synthetic oligonucleotide
uuucuucggagacaatg

SEQ ID NO: 47399 - DNA, 16 bp, Artificial Sequence
  Description of Artificial Sequence: Synthetic oligonucleotide
  Description of Combined DNA/RNA Molecule: Synthetic oligonucleotide
uucuucggagacaatg

SEQ ID NO: 47400 - DNA, 15 bp, Artificial Sequence
  Description of Artificial Sequence: Synthetic oligonucleotide
  Description of Combined DNA/RNA Molecule: Synthetic oligonucleotide
ucuucggagacaatg

SEQ ID NO: 47401 - DNA, 14 bp, Artificial Sequence
  Description of Artificial Sequence: Synthetic oligonucleotide
  Description of Combined DNA/RNA Molecule: Synthetic oligonucleotide
cuucggagacaatg

SEQ ID NO: 47402 - DNA, 13 bp, Artificial Sequence
  Description of Artificial Sequence: Synthetic oligonucleotide
  Description of Combined DNA/RNA Molecule: Synthetic oligonucleotide
uucggagacaatg

SEQ ID NO: 47403 - DNA, 12 bp, Artificial Sequence
  Description of Artificial Sequence: Synthetic oligonucleotide
  Description of Combined DNA/RNA Molecule: Synthetic oligonucleotide
ucggagacaatg

SEQ ID NO: 47404 - DNA, 11 bp, Artificial Sequence
  Description of Artificial Sequence: Synthetic oligonucleotide
  Description of Combined DNA/RNA Molecule: Synthetic oligonucleotide
cggagacaatg

SEQ ID NO: 47405 - RNA, 9 nt, Artificial Sequence
  Description of Artificial Sequence: Synthetic oligonucleotide
  modified_base (2): LNA-G
ggaucuuau

SEQ ID NO: 47406 - RNA, 10 nt, Artificial Sequence
  Description of Artificial Sequence: Synthetic oligonucleotide
  modified_base (2): LNA-G
ggaucuuauu

SEQ ID NO: 47407 - RNA, 11 nt, Artificial Sequence
  Description of Artificial Sequence: Synthetic oligonucleotide
  modified_base (2): LNA-G
ggaucuuauuu

SEQ ID NO: 47408 - RNA, 12 nt, Artificial Sequence
  Description of Artificial Sequence: Synthetic oligonucleotide
  modified_base (2): LNA-G
ggaucuuauuuc

SEQ ID NO: 47409 - RNA, 8 nt, Artificial Sequence
  Description of Artificial Sequence: Synthetic oligonucleotide
  modified_base (3): LNA-A
cuacacaa

SEQ ID NO: 47410 - DNA, 13 bp, Artificial Sequence
  Description of Artificial Sequence: Synthetic oligonucleotide
  Description of Combined DNA/RNA Molecule: Synthetic oligonucleotide
  modified_base (8): LNA-A
aucagcgauuutt

SEQ ID NO: 47411 - DNA, 12 bp, Artificial Sequence
  Description of Artificial Sequence: Synthetic oligonucleotide
  Description of Combined DNA/RNA Molecule: Synthetic oligonucleotide
  modified_base (7): LNA-A
ucagcgauuutt

SEQ ID NO: 47412 - DNA, 11 bp, Artificial Sequence
  Description of Artificial Sequence: Synthetic oligonucleotide
  Description of Combined DNA/RNA Molecule: Synthetic oligonucleotide
  modified_base (6): LNA-A
cagcgauuutt

SEQ ID NO: 47413 - DNA, 10 bp, Artificial Sequence
  Description of Artificial Sequence: Synthetic oligonucleotide
  Description of Combined DNA/RNA Molecule: Synthetic oligonucleotide
  modified_base (5): LNA-A
agcgauuutt

SEQ ID NO: 47414 - DNA, 9 bp, Artificial Sequence
  Description of Artificial Sequence: Synthetic oligonucleotide
  Description of Combined DNA/RNA Molecule: Synthetic oligonucleotide
  modified_base (4): LNA-A
gcgauuutt

SEQ ID NO: 47415 - DNA, 8 bp, Artificial Sequence
  Description of Artificial Sequence: Synthetic oligonucleotide
  Description of Combined DNA/RNA Molecule: Synthetic oligonucleotide
  modified_base (3): LNA-A
cgauuutt

SEQ ID NO: 47416 - DNA, 7 bp, Artificial Sequence
  Description of Artificial Sequence: Synthetic oligonucleotide
  Description of Combined DNA/RNA Molecule: Synthetic oligonucleotide
  modified_base (2): LNA-A
gauuutt

SEQ ID NO: 47417 - RNA, 9 nt, Artificial Sequence
  Description of Artificial Sequence: Synthetic oligonucleotide
  modified_base (3): LNA-A
cuacacaaa

SEQ ID NO: 47418 - RNA, 10 nt, Artificial Sequence
  Description of Artificial Sequence: Synthetic oligonucleotide
  modified_base (3): LNA-A
cuacacaaau

SEQ ID NO: 47419 - RNA, 11 nt, Artificial Sequence
  Description of Artificial Sequence: Synthetic oligonucleotide
  modified_base (3): LNA-A
cuacacaaauc

SEQ ID NO: 47420 - RNA, 12 nt, Artificial Sequence
  Description of Artificial Sequence: Synthetic oligonucleotide
  modified_base (3): LNA-A
cuacacaaauca

SEQ ID NO: 47421 - RNA, 13 nt, Artificial Sequence
  Description of Artificial Sequence: Synthetic oligonucleotide
  modified_base (3): LNA-A
cuacacaaaucag

SEQ ID NO: 47422 - RNA, 14 nt, Artificial Sequence
  Description of Artificial Sequence: Synthetic oligonucleotide
  modified_base (3): LNA-A
cuacacaaaucagc

SEQ ID NO: 47423 - RNA, 13 nt, Artificial Sequence
  Description of Artificial Sequence: Synthetic oligonucleotide
  modified_base (2): LNA-G
ggaucuuauuucu

SEQ ID NO: 47424 - RNA, 14 nt, Artificial Sequence
  Description of Artificial Sequence: Synthetic oligonucleotide
  modified_base (2): LNA-G
ggaucuuauuucuu

SEQ ID NO: 47425 - RNA, 8 nt, Artificial Sequence
  Description of Artificial Sequence: Synthetic oligonucleotide
  modified_base (2): LNA-G
  modified_base (8): LNA-A
ggaucuua

SEQ ID NO: 47426 - RNA, 9 nt, Artificial Sequence
  Description of Artificial Sequence: Synthetic oligonucleotide
  modified_base (2): LNA-G
  modified_base (9): LNA-U
ggaucuuau

SEQ ID NO: 47427 - RNA, 10 nt, Artificial Sequence
  Description of Artificial Sequence: Synthetic oligonucleotide
  modified_base (2): LNA-G
  modified_base (10): LNA-U
ggaucuuauu

SEQ ID NO: 47428 - RNA, 11 nt, Artificial Sequence
  Description of Artificial Sequence: Synthetic oligonucleotide
  modified_base (2): LNA-G
  modified_base (11): LNA-U
ggaucuuauuu

SEQ ID NO: 47429 - RNA, 12 nt, Artificial Sequence
  Description of Artificial Sequence: Synthetic oligonucleotide
  modified_base (2): LNA-G
  modified_base (12): LNA-C
ggaucuuauuuc

SEQ ID NO: 47430 - RNA, 13 nt, Artificial Sequence
  Description of Artificial Sequence: Synthetic oligonucleotide
  modified_base (2): LNA-G
  modified_base (13): LNA-U
ggaucuuauuucu

SEQ ID NO: 47431 - RNA, 14 nt, Artificial Sequence
  Description of Artificial Sequence: Synthetic oligonucleotide
  modified_base (2): LNA-G
  modified_base (14): LNA-U
ggaucuuauuucuu
